United States Patent Application Publication US 2019/0348154 A1 - sequence listing, part 86

SEQ ID NO: 325441 - DNA, 2226 bp, Pseudomonas aeruginosa
atgaagttccagaaacgcagtgcgtgcatgctcggcctgtttctcgtattcgcctgcatggcgggatatgccgttccggcgagggcgacggctggcgaatattcttccctgctccggattcccgctccggattgcccggagggcgccgatgcggtcgtcgaagcgccgctacaccaggctgccgacgggctgcgctcgccgtccccttccagcctggtgctcggcctgctggtggcctgcctggtctgcgtcggatgcctgggctggaatactgtccttcaactcaggctcaggcgctggcaacgtaccgaagccgacctgagcggccgcctggcattgaagcaggcgctggtcgacgggattccctacccggtgagcatccgcacgctcgacggtcgcctgctggcctgcaaccgcaattacctggaaagcctgcggatgacccgtgagcaggcccgcggcaccctgttgaccgattccgactgggtcgagggcagcaaggcacggctcatgcaccagcagtgcctggcggtggctcggggaggaacggcgagcttcaccgacatggcggtgcgcatcggcgggcaattgctggagatccaccattgggtcacgccctacagggatcgccagggccgggtgctcggcctgatgaacggctggatcgacatcaccgaacgggagcgcctggcccgccagttgcgcgaggcgatgcgccaggcgggcgaggcgaatcgggcgaagagcgtcttcctggcgaccatgagccacgagatccgtacgccgatgaatgcggtcatcggcatcctcgaactggtcctgcagcgcctggcgccggagcagcgcgaacgcgcctcgctggaggtcgcctacgaggctgcggggtcgctgcaactgctcatcggcgacatcctcgacgtcgccaagatcgagtccggccacctgaccctcacgcccgagcgggttcgcctgcgccatgtcgtggagtcggtgcgccgcatgttcgaaggcctggcccggcagaaaggcctgaggctcgttgtggagctggacgatgccccgggacgggacgtgctgatcgatcccctgcgcttcaagcaggtgctctccaacctggtgagcaatgcgatcaagttcaccgagcggggacaggtgacgatccgtctccaggaaaggagcctggacgaggggagggcgatcgtccgggtggacgtggaggattccggtatcggtatcgctccggcggaccaggcgcgcctgttccagcctttcatccaggtggccaagggacgcacggtgcagggcgggaccggccttgggctggcgatctgtcggaagttggtggacctcatgggcggcgatgtcgagatgcacagcgagccgggcaaaggcacccgggtgtcgctcgacctgctcttgcgccagtgcgggccgaaaatgcctgaatccagccaggacccgctggcagcatccatggagccgtctcgccgcctgcatatcctcatcgccgacgactatccgcccaaccgggtactgctgcgccagcaactggagtttctcggccaccgggtggcggaagcggaggatggccaggtggcgctggaactctgggccgacgagcgcttcgaggtgctgatcagcgactgcaatatgccgcgcctgaacggctatcagctggcacgcaggatacgcatccaggaacggtgcgagcggcgcgcgccgatcctgatcctcggctataccgccgacgccgagccggacgaggtacagcgctgccgcgacgcgggcatggatgattgcctgttcaagccgctcggcctggagaccctgcgcaactacctcgcgacctctttcggccgcgacgccgcgcagccccgggggctctatgacgcggacgctctcagcagcctcggtggcggccgcccggaacggctgcgcgaactgctggagaccctgctaggcagcaaccgtcaggacctccagcgccttgccatcctcctgcgcgagggcgacaggacccggctcgccgagcatgcccaccgcatcaagggcgccgcgcggatgatcggggcgcgtaccctgctggaggcctgcgaggccctggaggacgcctgccggcgaggtggcgacggggagtgcctgcaggcgtctggcgaaagactccggctggccctggaggcgttgcaggaggaactccaggagcagttggcggccgctgcggtatga

SEQ ID NO: 325442 - DNA, 675 bp, Pseudomonas aeruginosa
atgccgcaactcgacgacgagcgctgggctcgtcatccgctggtctacctgatggaagcggcggacgacatctgctacggcctgatcgacctcgaagacggcctggaaatggagctgctcgaatacagcgaggtcgaggcgctgttgctcggcctggtcggcgacgacctgcccgacacctatcgccaactcggccccagggactcccgccggcgcaagctggcgatcctccgcggcaaggccatcgagcacctgaccaatgccgccgcccgtgccttcgtcgaccagcagcaggccctgctcgccgggcagcttgccggcgacctggtggaacacatgcacggcccggccaagctctgcgtgcaacgggccaaggccatcgcgcgggaaaagatcttccaggacaagcgcaagaccctccacgagatcggcgcctacaccactctggagatcctcctcaacgccttctgtggcgccgcgctggagcaatacggcgggcatacgccgtcgttcaagaaccggcgcatcctcgacctgctcggacgcaacgcgcccgacccgcagtggccgctgtaccgcgcctttctccaggtgatcgatttcatcgccggcatgaccgacagctacgccacggaaatggcccgggaaatgaccggacgctcgagcccctcctga

SEQ ID NO: 325443 - DNA, 669 bp, Pseudomonas aeruginosa
  misc_feature (653)..(662): n is a, c, g, or t
atggactggcagaccctgctcacccgcgaacggctcggaaagccggtacacagcaacgatgaactgggccgcagcgccttccacaaggaccatgaccggatcatcttctccggcgcgtttcgccgcctcggacgcaagacccaggtccatccggtctccagcaacgatcacatccacacccgcctgacccactccctggaagtcgcctgcgtcggccgctcgctgggcatgcgggtcggcgagatcctccgcgaggaactacccgagtggtgcgaccccagcgacctcggggtcatcgtccagtcggcctgcctggcccacgacatcggcaacccaccgttcgggcactccggcgaagacgcgatccgcaactggttccagcaagccgccggacgtggctggctggacgagatgagcgacgccgagcgttccgactttctccacttcgaaggcaacgcccagggcttccgggtcctcacccaactggaataccaccagttcgacggcggcacgcggttgacctacgccaccctgggcacctacctgaagtacccctggacctcgcgccacgccgaagcgctgggctacaagaagcacaagttcggctgctaccagagcgaactgccgctgctcgagcagatcacccataagcnnnnnnnnnncccataa

SEQ ID NO: 325444 - DNA, 426 bp, Pseudomonas aeruginosa
atgccgcaggcaatcccgccccagaccccgcaaagaccgtgcaacggccagacaccgaggacgtcgtcgatcttccagcgcacctgggtcgcggtgaacgcccagacgaacagggcccccgccaccaggccggtagccagcgcgccgatcggatgcatcaggtcggaaccggcgcacaccgccaccaacccggccagcggaccgttgtgcaggaaacccgggtcgttgcggccgatcagcagcgacgccatggtgccgccaaccatcgccagcaaggagttgaccgccaccagcccgctgaccccagcgagggtctgggcgctcatcacgttgaagccgaaccagccgatgatcaggatccacgaccccagtgccaggaacgggatgctcgacggcgccatcgccaccagcttgccgtcgcgatag

SEQ ID NO: 325445 - DNA, 153 bp, Pseudomonas aeruginosa
atggagggcggcattgccttcgccaccccgaacaatgcgcagatgggcgagcccgccaagccggggcagaccttcgccctgttcgattcggccaatgacgaatggttggagtgggcgccgaagattcctctgaaggaaaccgcccgccgctga

SEQ ID NO: 325446 - DNA, 561 bp, Pseudomonas aeruginosa
atggatctttccgatccgtcctggtccggccgtttcggcttcgtgcccaccagtggcgccttcctcgaacaggtcgccgcagtgatcaagctcaagggccaggaggaagccgaggattggctgaccggcctgaaggccttcggctcgatctacaccaacaacgtcaccgccatgaaagccgtggagaacggcgaggtcgacatggcgctgatcaacaactactactggtacaccctgaagaaggaaaagggcgagttgaactcgcgcctgcactacttcggcaaccaggacccgggcgcgctggtcaccgtctccggcgccgcagtgctcaagtccagcaagcaccccagggaagcccagcagttcgtcgccttcatgctcagcgaggaaggccagaaggcgatcctcagccagtccgccgagtacccgatgcgcaaggggatgcaggccgatccggcgctgaagccgttcgccgaactggacccaccgaaactgaccccggccgacctgggtgaggccagcgaggccctcagcctcgaacgcgacgttggcctgaattga

SEQ ID NO: 325447 - DNA, 405 bp, Pseudomonas aeruginosa
atggccaagcagactcatccactggcaggcggcatcggcatcctcgcggcgctggcgctgctgttcagcgcttcggccggggccgagttgcgctcgctgggcgatagcgatctggacgacgtggtcggccaggccgggatcagcatcagcgcctcgctcaatctccaggaaaatccttcgcagacgcgctgcgccggcggctgcggcgcgcgcctggcgatccagccggccggcagcggcatgaaggacaccagcttccaggacctgcgcttcaccatcgctggcgccaacaaggcgcgcggtaccgatcccgggctggtgcagaccaacctggtcagcgcacgcatcgacggcaccctcaagctgcaaggcaacgtcaacatcttcaccgtcgccccgcgttga

SEQ ID NO: 325448 - DNA, 2229 bp, Pseudomonas aeruginosa
atgccccgctccatcccttcgcgcccggctcccctggcgctttccctgtccctcttcgcttcgttttccgctcctgcgctggctgccgatccggtggagcagcagatggtggtgatcggctcgcgcgcgccgaccagcatcagcgagttgcccggcacggtctgggtgatcgagcgcgagcaactggaccagcagacccaggccggcgtgccgctgaaggaggcgttgggacaattgatcccgggcctggatatcggctcccagggtcgtaccaacaacgggcagaacctgcgcggacgcagcgtgctggtgatgatcgacggggtgtcgctgaacagttcgcggggcatcagccggcagttcgactccatcgacccattcaacatcgagcgcatcgaggtgatgtccggcgccagcgcggtgtacggcggcggcgccaccggcgggatcatcaacatcgtgaccaagaagggcgtcggcggcgacactcgcttcaataccgagctgggcgcccgcagcggcttccagagccatgaggaccatgacctgcgcgcggcgcagtcgatcagcggcggcaacgacctgttcaacggccgcctggccatcgcctaccagaagaacggcgcggcctacgacggcaatggcgaccaggtactgacggacatcacccagaccgacctacagtacaacaggtcggtggacctgatgggcagccttggcttcactttcgccaatggccacagcctcgatctcggcctgcagtactacgactccggctacgacggcgaccgcggcctcgatctcgggcgcaacttcgacgccctgcgtggacgggcaccctattcgatcaagggcggcgtcgacctcgaccgcgagccggaaagcaagcgccatcagttcaacgccacctaccatgcgccggaagtgctgggtcacgacctctacctgcaggcctactaccgcaacgagaagatggccttcaaccccttccccaccatccgctacagcaatagtggcgcaatcaactacggcacttcctactactcggcctcgcagcaggacactgactactacgggatgaaactggccctggtgaagacctgggagcgcgccagcctgacctacggggtggacctggaccgggaaaaattcacgtccgaccagatgctcttcaacctgccgctcgccgccgccagcggcgggctggtagccagtgaacaggccaagctgggccgctacccggacatcgataccgacagccgcgccttcttcctccagggcagttggaaggccaccgacgacctgaccctgagcgccggcgtgcggcgccagtcgatgagcaccgacgtcagcgacttcgttgcggcgaaccagcagatcctcatcgccaacggccttggcaagaccgccgacgcggttccgggcgggagcaaggactacgacgtcaacctggtcaacgtcggcgccatctacaagctgaacctgcaacaacaggtctgggccaactacagcgaaggcttcgagctgccggacccggccaagtactacggtttcggacgctacggcgcagccgacggcaatggccactacccgctgctacagggggtcagcgtgaacgactcgccgctggacgggatcaagaccaagcaggtcgagctgggctggcggcacaccgacggtgccctggatacccaggtggcggcgttctattcctggtcggacaagagcatcaagtacgactcgaagaccctggcggtgctgcagcaggacaccaagaagcgcaactacggcctggagggccaggctacctactggctggacgatcactggcagctcggcgtcaacggcctggccatccgctcccaggagaaggtcgacggccgctggctgaagcaggacgtgacctcggccagcccatccaaggccggcgccttcgtcggctggaaggacgaccagcgcagcctgcgcctgcagggcgtgcgcaccttcaacctgaacgacgagccgggcaacaagatcgacggctacgcgctgttcgacctgctcggcacccaggcgctgccggtgggcaccctcaccgcgggcatccagaacctgctggacaaggactacaccacggtctggggacaacgcgcccaggtctactacggcgggctcgcaccagcgggactgttcgactacaagggacgggggcggacctacagcctgacgtatagcgtggagttctga

SEQ ID NO: 325449 - DNA, 522 bp, Pseudomonas aeruginosa
atgaagaaactacttccgctggccgttctggccgcactttcctccgtccacgtggcctccgcccaggcggcggacgtctcggccgccgtcggtgcgaccggccagtcgggcatgacctatcgcctgggcctgagctgggattgggacaagagctggtggcagacctccaccgggcgcctgaccggctactgggatgcgggctacacctattgggaaggtggcgatgaaggcgccggcaagcattcgctgtcgttcgctccggtattcgtctacgagttcgccggcgactcgatcaagccattcatcgaggccggtatcggcgtggcggcgttctccggcacccgtgtcggcgaccagaacctgggttcctccctgaacttcgaagaccgcatcggcgccggcctgaagttcgccaacggccagtcggtcggcgttcgggcgatccactattccaacgccggcctgaaacagccgaacgacggtattgagtcctacagcctgttctacaagatcccgatctag

SEQ ID NO: 325450 - DNA, 732 bp, Pseudomonas aeruginosa
atgtgtataagagacaggtaccagcagggcgcctgccgccatgtcccattcggacaggccgaattcccagaaggcgtcgtagcgtccggcggcgacgtaggccaggtccaggctggcggcgccggcgcggcggatgccggcggtctggccgaccaggctgcggaacatgttcaggtagttgtcgagattgtcgatctggttgtcgcggaacgggaacccggtgccgagcagggcgccttccaggctcttgcggccgctgacgcgcaggcggcgaccgttgagggcggcgccgcggccgcggctggcggtgaattcttcctggcgcaccgggtcgaggaccacggcgtgctccaggcggcccttgtacttgcaggcgatgctcacggcaaagtgcggtacgccatggatgaagttggtggtgccgtccagcggatcgatcacccagaggtaatcggcaccctcgccgctgccttcgatgaagccgccttcctcgcccatgatcgcgtgagtcggataggccttgcgcagcgcggcgacgatggtctgctcggcggcgcgatcgacttcggtcacgtagtccttggcatccttctcgttgaccgagatgacatccaggcgttcgatggagcggaaaatcagttcaccggcgctgcgagcggcgcgcagggcgatattcagcataggctgcatggagaggtcacctgggtcgttaaagaaagccggccattctag

SEQ ID NO: 325451 - DNA, 1416 bp, Pseudomonas aeruginosa
atgcaatcgaacgaaaagaacggccgtgacttctacgcgctggcctggcgctggcatttctacgccggcctgttcgtcgcgcccttcatgatcctgctggcgctgaccggaatcgtctacctgttcaagccgcaactggatgcgctgctctatccgcaactgctgcgggtcgaagccggtgcgcagatgcgcagcgccgaccagttgctcgccggggtgcgccaggcgcacccgcaggccgccgtcagccagtacctgccgccgagcgaggcggggcgcagcgcgcaattcgtgattggcgaagagggcaggcaatggaacctcttcgtcgatccctacagcggacgcgaactcggccgccaggatgcgcaactgaatctccaggcggtggcccgggcactgcatggcgagctgatggtcgggaccgtcggcgaccggctgatcgagctggccgccggctggggcatcgtcctggtggtctccggtctctatctgtggtggccgcgcgggcgggcggcgagcgcgctgttctggccgcgcctgcacctgcgcggacgaccgctgtggcgcgatttacatgtggtcgccgggttctggggcagcctgctgttgctgttcatgctgctcagcgggatgacctggaccggctactggggcaagcagttcgccgatgtctggaaccgcttcccggcggcgatgtggaacgatgtgccgacctccgacatgcaggccggtagcctcaacagcgcgtcgcgccagcaggtgccctggccgctggagaacactccgctgccgcgctcgcagccgccggcggccgacgcccatgccgagcatcgcgggcattccgcccaggccgggcacgcgatgccgatggacatgccgatgccggcgggcatccctctgcaaagggtggtggatatcgcccgcgagcgcggcgtggcggcgggctacgggatcgccctgccgagcgggatggagggggtctacacgatttccgtgttccccgacgatccgcgccacgacgccaccctgcacatcgaccagtacagcggcaaggttctcgccgacgtgcgttggcaggactacaacgcggtggcgaggagcgtgcagatgggcgtcgtgctgcacgaaggcaagctcttcggcctgggcaatcagttgctgatgctcgcggtctgcctggcgatcctgctcagctcggcgagcggcctgtggatctggtggaagcgcaagccggccggacgccttggcgtgccgccgctgcgccacgagctgccgcgctggaagaccggcatcgccatcatgctggcgctgggcgtggccttcccgttggtgggggcctcgctcctgctggtctgggcgctggactggctggtgctgtcgcggctgccggcggttcgccgggtcctggcttga

SEQ ID NO: 325452 - DNA, 396 bp, Pseudomonas aeruginosa; identical to SEQ ID NO: 319655

SEQ ID NO: 325453 - DNA, 1086 bp, Pseudomonas aeruginosa
atggccccggtaaccctggcattggcggacgatgatcgtttcgaggcgagggtatgcgttaccggccagcatcgtgagatgcttgaccaagtcttgaatctcttcaagatcgtccctgacttcgatctcaatatcatgcgttcggggcaggatctgactgatgtaactgttgccattctgcaaggaatgaaagacgttttctctcagttcaagcccgatatcgttcttgtccatggcgatacagccacgacgttggctgctagccttgctgcttattatcatcagatcccggttgcccatgtcgaggcgggattgcggacagggaacatgtattctccgtggcctgaagagggcaatcggaaattaactggtgccttagcctgtcttcactttgctccaacggagacttctagggacaacttgcttagggaagggatatccgccgagcgaattcgtgtgaccggaaatactgttatcgatgccttgttaaatgttgtgcaacgcttggagcaagatatggagcttgccagcgaggcggcggctccgactgagtttcttgactcctcacgcaggttcattcttgtcactggccatcgccgtgaaagctttggcggaggtttcgaacgcatctgtcaagcactgggcgtggttgcaaggaatcacccagagatcgatattgtttatcccgttcatctgaatccgaatgtacgagagccggtcaatcgtctactttcagatgttcagaacattcatcttatagagccgttggactatctccctttcgttcatttgatgagccgtgctcatgttattctcaccgattccggtggtattcaggaggaagcgccttcgttaggtaagcccgttttggtcatgcgggagacgacggagcgcccggaggctgttgccgcaggaaccgtcaagttggtcgggacagaaatcaagaatatagttaatgagcttgagcgtttactggtagatgaatctgcctatcgaaaaatgagttttgcccataacccttacggtgatggaatggcgagtaagcgaatcattgacagcctcttggatgcgaagagaggcgagtaa

SEQ ID NO: 325454 - DNA, 1083 bp, Pseudomonas aeruginosa
gtgactgacggtattgactcgcgacagacgtccaagcgtaacgaaatcgattttatcgagctcattcaagggctctggtcacaaaagtggctcgttttttccctgacttttctaggtgctgttctggcggggagctatgcatttttaagcaagccagtctacgaggctcgggttgctcttctaccgccatcccttagcgatgttgccgggttcaacattgcccgtggccgagacagcggtcttccaccttttactgtgagccaagtttattctgtattcactcggaatctgcagtccgaaggcactcggaggcagttttttcgcgaagtttatttgccctcccttgaggagcgaaagggctcaattgatggcctctatagggcgttttcagatgatgtaagtgttaatcggccgtcgaaggacttgcctgagcggtatactgtcatcctcaaccgacaggatcctgagcaggccgcaaaatgggctaagcaatacgccgatctagctgctctgcgctcgatggatgaaatgcgaggtaatgctcagcgcgaacttgaggtgaagagccgcaatattctgcagcagatcgacaccctgcggcaggtggtcaaagagcgtcgtaatgatcgtatcgtccgtttgaaagaggctctgcaggttgccagagcagtgggggtagaaaaacctccgcttataggggcacagattgatcagcaactgtcggcaatcatggaaggcagtctgatgtatatgagagggacgaaagcgctggaggctgaaatcaaagccttggaaaaacggacgtcggatgatccattcattcccgccttgcgtggtctacaagagcagcttgctctttatgaaagtaaacagttgaattttgatagagttgcggtttttcgccaagatggcggtgtagaaattcctgacgaccctatcaagccaaaaaaggctctcctccttgctcttggtattttagccggtggtgtgtttggcgtattgcttgccttgctccgcctattgttacgtgatgggcgaaacggcatggcggacttaaagcatcctatgaccaaggataaatga

SEQ ID NO: 325455 - DNA, 489 bp, Pseudomonas aeruginosa
atgggtggtgacctgagcctggaaaatcagcgcgaggtcggcggcgagccggtcgccgacatccgcgtgcgctccgcgcggctcaagggcatcgacattcccgaggacctggtgccactggccatcgacgagttcccggtactcttcgtggctgccgcctgcgccgaggggcgcaccgtcctgcgtggcgccgaagagctgcgggtcaaggagtcggaccgtatccaggtcatggccgacggcctgaaggccctgggcgtgaaggccgagccgaccccggatggcatcgtcatcgagggtggtgcgttcggtggcggcgaagtctgggcgcacggcgaccaccgtatcgccatgtccttcagcgtcgcttcgctgcgcgccagcgggccgatccgcatccacgattgcgccaacgtcgccacctccttccccaacttcctcgccctgtgtgcccagaccggtatccgggtcgccgtggagaacaattga

SEQ ID NO: 325456 - DNA, 717 bp, Pseudomonas aeruginosa
atggcgatttctgagttgaagctgccggccggcgtcggcctgcaggtctggggcagcgccgccgagcaggcccgcggcctggccgccgaggtcgccggccggttgcgctcggcgctggccgagcagggccaggcgctgctggtggtgtccggtgggcgcagtccggtggccttcctcgaagccttgagcgaggagccgctggactggtcgcggatcaccctcagcctggccgacgagcgctgggtgccggagtcgcatgccgatagcaacgccggcctggttcgccgccacctgctccgtggcgaggcggcgaaggcgcgcttcatcggcctctaccagccggcggcgagcctggaggaagcggccgagctggccaaccaccacctgcacgagctgccgttgccgatcgacgtgctggtccttggcatgggcgacgacggccataccgcctcgctgttcccgaacagccctggcctggacctggcgatggatccccagggcacgcgccgttgcctgccgatgtgggcgccgagcgtgccgcaccagcgcctgaccctaccgcgcgccgtgctggcggcggcgaaggtgcagctgctggcgatccagggccagtccaagctggccaccctgaacaccgcgctggcggtcgaggacgaacggcggatgccggttcgcgccttcctccgcgcgccgctgacgatccattggtacccctga

SEQ ID NO: 325457 - DNA, 1920 bp, Pseudomonas aeruginosa
atgtttcaactcctttcctggatatccaggaagccgtcccccaccccaacaaccaaagctgccccagggggattcatccttcctctgagcagcatggaactgctcggcacgcctcgccgccggcagctactggagaacatctggcagcgcgcctcgctatccaagcagcaattcgaggagatctaccggcggccactggccaactatgccgagctggtccagcagctccctgcttcggaaaatcatcaccatgcccatccaggcgggatgatcgatcacggcctggagatcgtggcctacgcactcaaggtacggcagacctacctgctcccgatcggcgcagcgccggagtcacagtcagcccaggctgaagcctggtcggccgccgcggcgtatggcgccctggctcatgacataggcaagatcgtcgtcgacctgcaggttgagctacaggacggcagcacctggcacccttggaacggaccgatcaaccagccataccgcttcaagtacgtgaagtcccgcgaataccagctccacggcgctgcctcagcacttctcatccaccaactgctaccgcgcactgcactcgattggctcagtcgctttccagagctgtgggctcaattgatctacctgttcgctgggcagtacgagcacgccgggatcctcggcgagatcatcgtgaaggcagaccaggcctcagttgcacaggagctaggaggcaatccggatcgagctctggctgcaccgaagcagtcgctgcagcggcagttggcagacggccttcgcttcttggtgaaggacaagttcaagttgaatcaacctagcggcccgtctgatggatggctgacccaggacgcactctggctggtgagcaagcctgctgccgatcaactgagagcctacctgctggcccagggtatcgatggggtgccctcctctaacgcgccgttcttcagcatgctccaggaccaagccgtcatccagacaaatgccgaggacaaggccatttggacggccacggtagacaacggtgctggatggagaaacaagttcacgctactcaagattgctccagccttgatctggacagatgctgccgagcgcccctcaccctacagcggatcactggtcgttgaagatggaaccgcctcaacggaaaagccggaaacgacctgtgaaattcccaacgggccggctgaacagcagcaagcaccagaaacgaagatgatgctccatcaacctgcgccgagcgttgcgaaaccggcaaacgagacgcaggcgattgcgaaaccctcaactgatgatcaagaagaaacagacgatttgtatgcacttcttggtaatatcaattcgccactagaagagctagacactagccacgactcgccggctgcctctcctacgaacacacgcggggaggagaacctacagcagccactagggaccaaggagccaacagattgcgctcctgaagcaattgaagatgtatttatgcctagcagaagtactgatctgggacagggattcgttggttggatgaaatctggcatcgcggcccgtcgcctgttcatcaacgacaccaaggctttggtgcataccgtcgacgggaccgccatgctggtcacgccaggaatcttcaagcgttatgtccaggagcatccggaggttgaaaagctggcccaggccaaggagaccgccggctggaagctggtgcagcgcgcgttcgagaaacagggtcttcaccgaaagaccagtaagaacctgaatatctggaccatcaaggtttctggtcctcgcaagacgaaagagctcaaggcctacctgctccaggatcccaaattgctgttccctgagcagcctctggacaacccaagcctcacggtcatcaccgatgccgaaggaggtgtggaatga

SEQ ID NO: 325458 - DNA, 534 bp, Pseudomonas aeruginosa
atgatttactcaccgcactcgctcctgaaactggtccgggatggaaaactaatcaagcaccttgcccaccgtgagttgaccaccccggaaggcgttggatttgacctcagactcgcaggcctctctcgcctgacagtagggggtggaagcttgcgagaatctacgcgacgcacccctgccagcgaggtcgtgctcgcagacccggatgactgcttcgtcatggaaccgggcaagacttatctggcgagcaccatggaagaattcgatctgccggaagatctggcggcgcttttttttccgagaagcacgctgttcagaagcgggataacgttcagttccagtgtgctgcctccaggttatgtagggccgatgacgttcgcgctcaccaacaatcacagcgaggcgtttgaaattcagattggtgcacgctttgcgcacgtcatctttcaggcggtatccggggatatcggccggtataaaggacaatggcagggtggccgcgtctcgcagcccaaggacgaaggacaaatctga

SEQ ID NO: 325459 - DNA, 711 bp, Pseudomonas aeruginosa
atgagtgtgttacagatcaaagggcgtacaacgaaatcccacacggattttgacgcggcatcgtactccagcaacagccttatactcactgatgcaggggacgagagaattgaagagttttccctcgaattgtccgtgggtgaagggtggagtgataactattctggcaacgacaaaaacctgtggcgcattgtcgatggtatgacgatcaggggtcacgattctgttgtggtggaggccgctgaagaaatcaaggtgccgcacaatcggtacggcatagtcctacctacgggaagtctttttctctcacgcggcgtgctggttgcttcggcgaaggtcgaacctgcatttgatggcaagctcaagctcaggatattcaacaccaccaacaaaaatgtctgccttaccaaaggcgagaagcttggctctgtgatttttttctccacagaatcgacgcacacccaaagccccatcaagcgtggcagtgaaatatcgacgcttcccatcacgcggcgcgcgcgattgaagaagtggttttcgctcaatcccaccatatgggtcgggtggacgctgaatttaatcggaagttccctggtgtcttctcttataatgtacgccgtctattacaaggttgtgctggaacaccagtcgcagcctcctcagtcacaacaaaacgctcagccatcgccgaacgaagttaagccaaaatga

SEQ ID NO: 325460 - DNA, 618 bp, Pseudomonas aeruginosa
gtgggaagcctggaaaagtgctgtttcgcctgcaaagaaataattcatgttcatgcgattcgttgtcggcagtgcggcgagtcccaaggctggcgaaggttcatgagctctccaacctcagtagttgcgttggtccttagccttttatcaatcgctgccacaaaacctgtggagcgattgttcgatgcccagcgagcagagctacaaatctccatcacgggtggtgattacaaagctgcccagcttatgttgaccaataacgggtcaaagcctgcaactttagtttccttcgaaatcacatcgaaagccacgaccaatacgaaaacatggtttttggtaagcaatacggatggcgaaattctggagccaggcaaaacttacaaaatcagggcctcaaccgatgagtctatcccaaaaattgtcgaagctgagcgtcggacgattttgaagtctcagtacgcacttgcagataattgcgaattaaccgctaaatacatagaggccacggggcagaaggttgtgcgtgtgcaaccgttcatgtgcgacacacctcctgaaaagggtggcctgccccctggtaaacctggcatacccatttggtaccttggtcaagaatga

SEQ ID NO: 325461 - DNA, 1932 bp, Pseudomonas aeruginosa
atgagcagacgaattgatagcccagataccgacgccgaccgcgagatccacgcatgcattgtagcgacgcctccgcagcccttcgtggttcgtgctggcgcaggttccggcaagaccacctccctcatcaaggcgctggactgggtgatctcggagcacggcgccagcatgcgggcgaggaagcagaaggtcgcgtgcatcacgtataccgaccttgccaccaatgaaatcctggcggacgtcaacgatgacccgctggttcatgtctcgaccatccacagcttttactggtctattgcaaagacgttccaggccgacatcaaggtttggctgcagaacgacatccgcaggcggatctccgaacttgaagaagagttcgagaattacagctcgcgtgtccggcagaccacgcgcgacaggaacaaggccgaccaagagcgatatgtccgaagcctggaggctgtggccggcgtcaggacgttcaactacggcgtgggcagtgactacgccaagggcatacttggccacgaggacatccttcagctcgccgacttcctgctacaaaaccgcccgctgttccgacgggtcgtggcgctgagctacccgttcgtgtttatcgatgagagtcaggacacgttcccgggtgtagtgaagtctttcaaggaagtggaagcccagatgcagggcaagttctgccttggttttttcggcgacccgatgcagtcgatcttcatgagaggcgcaggggacatccagcttgaggatcattggcgggccatcacgaagccggagaactttcgctgcgccaagcagatccttgacgtcgccaatgccgtgcgcgcgcagggcgatggcatggagcaagtccgcgggctgcacgagagggtcgatgggaacctcaagctggtggaggggtcggcccggatgttcgtcttgccgaacacgctgaaccgaaccgaggctttggcaagagtccgagcgtggagctcggcgacgaacaacgacgagggttggacaaccccagacatcgcagtcaagattcttgtcatcgtgcaccgcatggccgcaaaccggcttggcttcggcggcatctactcggcgctgaacgacaagacgtcggatgccatgaagcaagggatgcaggacggcaccggttggcccgttcgacccttcctaagttttgcgctaccgatcgttgcagctgtgaaggccggcaatgagttcgcggcgatgagcctgctccgggaattcagcccgcgcctggcgcctgcggctctgaccggccgacgtgccgcggatgtattgcgagagctgcacgctgctgcgtcgaggcttgtcgccatgctggacgaggcagggaccaccattggtgacatagctctccatctctgtgacacgggtctttttgagttcgacgagcgctatgcgcgtgttcttgggtttgtcagggatattgctgacaccgctcaggagcccgaggctgctgatgcagttccggccgaaggattatccttggacgcgacaatggccaagttcttcaattgctctgcgcaagagctttggccctatgaacgctatgtctcagaaggctccccctatgccacgcagcacggcgtgaagggagcgcagttcgaacgcgtcatggtggtgatggacgaggaagaaagcgactaccgaacgtacaactacgagcgtgtcttcgcgagtgctgaggcccgcgctgcagatcgtgcacgagcactagacggtgatgaaaacacttggagccgaacgctgcgactgctttacgtctgctgcactcgtgcccagcgggggctggtactagcgttctttgtcgccgaccctgcgaccaccctggaaaacgtcgtggcgagcgggatcttgccgcgaagcgcagtctttacgcaggaagtgttagttggatggccatag

SEQ ID NO: 325462 - DNA, 2424 bp, Pseudomonas aeruginosa
atgaagttacaggcatatcggctgcagaactaccgccggctgcgcgatgttgtcatcgagctcgatgacgaaatttctatctttgtcggtgccaacaacagcgggaagacatccgccgtccaaggcctgtactcaatgcttcgcggcgaagtgaagaagttcgagctctttgacttcagtgcggcgctgtgggccgagatcgatgcggtcggcaggacgccccctggcgatgaggatgcgcccaaaaggttaccgtccatactcttggatctctggttccgcgtcggtgaagacgacctcgccactgcgatgtcgctgctgccgagcactgagtgggacggcaagtgcgtcgggatccgggtagcgttcgagcctcgggatgcccacgagctcgtctggaagttccatgaactacatgagaaggccaacaacgcagctgtcgcgcttgcggccaagcgcaaggccgccggggagcaagctgtggaggcgggcgcggaagacgcggctgcggtggtggccgatgccggcgagtacaagccttggccagaaagcctgacgaagtacctcacaaaggaactgagcaaggaatacaccttccgctactacgtgctcgatgagcgggcttttgtcggctatcaggcaagggaggccgactacgagccgctacccctaggcaaggagccgggcggtgcagccattctcaagtcgctggtgagggtcgacttcctgcgcgcgcagcggcacctcgatgacccagatgccggtagctctgatcgcgcagagagcttgtcgcggcgtctgagcaggttctatcaccgcaacctggagaagcgtggcgacgaccatgcggctctcaaggcgctagatacctcggagaaggagctgaacttccacctgaaggaagtcttcaatgacaccctcacgcgcctggccaagctcggctatccgggcgtcaacaatccggagatcgtgattcgggcggccttggatccgaccactgtcttggggcaagacgccaaggttcactacgtgatcccgggcgtagcttccgcccaactgccagacagctacaatggcctggggttcaagaatctggtctacatggtggttgagctgctcgacttgcacgagcagtggaaagccgaggatgacaagcgagctccgcttcatttggtcttcattgaggagcctgaggcgcatctgcacgcgcagatccagcaggtcttcatcaggaacgttttgcgcctccttgaggatgctaacgatcacgcgactttgttccacacgcagctcgtcatcaccacgcactccccgcacatcctctatgaacgcggattctcgcccattcggtacttccgccgcgtcaacgaccagttgggccatcacacggatgtgcgcaatctgtcgctattcaaaacgggcgcgtccgacgctccagcgcgcgaattcctgcagcggtatctgaagctgacgcactgcgatctctttttttccgacgcggtgatattggtggaaggcaacgtcgagcgtctgctcctgcctgcaatgatcgagttggtggccaagcgcctgcgttcttccgccctaaccatccttgaagtcggtggtgcgttcgcgcatcggttccaggagctgatcgccttcgttgggctcacaacactggtcatcacggatctggacagcgtgacggtcaagacggacgccgagaaggccgccgcgcaaggcgcaggcgctgagggcgccgttgacggagatgacgaggacgaggacgacgacctgaagcccttcgagcttgaagacgacgacgaagcagaaccgagtggcaagaagaagtccaagaagcgtggcagcacctgccatgcacacgtggaaggtgccgtcacgtccaaccaaaccctcatcagctggatcccgaagaagcggtcgatggcagagctctgggaagtcacggcggagcaaaagacgctgtcgctggctgaggattccagcgctggggttcgggtagcttaccagaccaaggtttcggtgacggtgggtgcgacgacatcacagctctgcggccgcacacttgaggaggcctttggtcttgagaacgcggactggtgccaggctgaggcaaaccggtcggtcggcctcaagctcaagcgcgcaccgagcagccctgaagagctggctgagaagttacacgatagggtggtcggcaagaacttcgacaagacccgctttgcgctggaggtactcgcaagcgggccgctcaatggctggaaggttcccgcgtacatcgccgagggcttggcctggctcgaagccaaagtggcccacgagcttgaggcggatgctgccatcgccaccgaggtcgcgactattgagccgactacagccgatgttgtcgctatcattgttgacccggggcagacggcatga

SEQ ID NO: 325463 - DNA, 165 bp, Pseudomonas aeruginosa
atggatcgcagtccttggaatcgcttggtcaacggcaaggccgcattgggctgggtaatggagcgccaagcgatgcgtactgaaaaagccagcggaatcgtcaatgacgtcaacgattgggccgtggaaaccatgggcaacccaagtcccctcaggagctgttga

SEQ ID NO: 325464 - DNA, 351 bp, Pseudomonas aeruginosa
atggccaagtaccgcatctctcatgatgcccaagcggacatcgtcgatatcctgcgcttcacccacaaccacttcggcgatgccgcgcgccgacgttaccaggcactcataggggcggcgctggaagcagttgcgacagacccacaacaggtaggcagcatcagccgtgaagaactgggagctggcctgcgcagcatccacctcgtttactgccactcgatgcccaatgtcggtaaggttgttcggcccaggcacttcgtcttctaccgggtggcgacagaccaggtgctagaggtggttcgcgtgcttcacgacgccatggatctggatcaacacctgccccaacgatga

SEQ ID NO: 325465 - DNA, 273 bp, Pseudomonas aeruginosa
atggcaacgcgaaacgtcgtccttcccgatccgctggagcaggatatcaacgagctggtggagaccggccgctatcagaatcgcagcgaagtcatccgggcaggcttgcgcctgctgctgcaacaggaagcccagaatagcgccaagctcgaagccctccgcaacgcaacatccagtgggctgatgcaactggagcgcggcgagtacgacgagatcaccagcgacgacctggcccaatacctcgacgagctcggcaaccaggcgagccactga

SEQ ID NO: 325466 - DNA, 1512 bp, Pseudomonas aeruginosa
atgaccttcatgaccaatgactacctggagtattacctcaccctcctcggctggatcatcaacaacgggatctggaacatgatctcggatactggcctgttcgcggtgccgttcgcggccatcgtgatgcgcgaatggctgaaagttcgtggggaaggcgccgacgagggcaacaagggagtgctgtctctcgcccgcatcgagacgcatatctacgtcggctacatcgtggtcgccctggcggggatcccggtcgtcaacgtgagcttcgacaccatcgagttcgaccagactcgcgcccagcagtgccaatacaatctgccggcaccggcggacaccggctggtcgagctccttcagcagcctggccggcaagagtgcgcagatgccgctctggtgggcgatgatgcacgccctgtccaagggcttcaccagcggcgccatcgcggccattccgtgcggcacggatctgcggcagatgcgaatggaagtggacaacacgcgcgtgaacaatccgctgctggcacaagaaatcgctgatttttccagagactgctacgggccttcccgtgcgcggctgttcatgcggcaacccgacctgggctccgtcgccgaggacaacaaggcgttgcaagacctgaactggatcggctcccgattcttgttgaacaccccggggtactacgacaccgactactcgaagagtccccgtcagtcgtggccctacaacgccacccgcgatgccggcctgcctcaggtgggcggtggtggcggctacccaacctgcaagcagtggtgggctgactcagggatcggcttgcgtgatcggatcaaggaccaggtggatccggacctgatgaccagcttcctcaagtgggcgaaatggttgaaccaggacgaggtgaccgaggctgtcattcgccaggtgatctcaccctccagccaggtcaagggtaacgtctacaccgattacggcgggcaggtgggcggcaccgtctggaacggcatcgcgagaaccgcaggaaccttcggcgttgcgctgggcagcctggcctacttcccggcgatggatatggtccgccaggcactgccgatggtgatgtcgttcctgaagatggcaatggtcatctgcattccgatggtcctggtcatcggcacctatcaactgaaagttgccatgacgatgacggtcgtcttctttgcgatgatgttcgtcgacttctggtttcagttagccagatatatcgacagcacgatacttgatgctttctatggttcgggatcaccacatctttcattcaacccagtcatggggctgaatacggctactcaagatgcgatcttgaacttcgttatgggttctatgttcattgttttaccactactgtggatgacagcgatcggctggtccggaattcaagcagggtctgttctgaacggattgagcagagggactgaaggagttcaagccgccggcaaggaagcaggaaatagagttaaaaacgcagtttga

SEQ ID NO: 325467 - DNA, 342 bp, Pseudomonas aeruginosa
atggcagatacgctcaccacccgaaagcttctcggtcagctactggtcggagtgctgatcgtcatcggactggcagtggtcggtacgctgctcagtctcttcgccctgaaccacttcggtggcatccagggcctggaggcctggcggcaaagcaactactggagcttgttcgcctggcgggcgctgctgtactgcgccctggccatcgcctggttccggcagcgcaaggaactgagcgcgcatgagcggcagcgcattcggcggatcgagatcctggtgctgttgctggtcctgctcatcgaattcagcaaagcctacttccgcacgggaggcgcagcatga

SEQ ID NO: 325468 - DNA, 1383 bp, Pseudomonas aeruginosa
atgcgaatgaacatcacctcggtcgcgctaatgtggctgctcgcagcgcaacttgcccaggccgacgacccgatcaacgtgtccaagaccggcacggtgctcagcgacgaggtcctctacagcattggcggcggcagtgcggtgagcatgggcagcgccggccagatggactcgatcggcgtcggcttcggctggaacaacgacatgatgtgcggaaacatgaacctgagcaccaccctggagaaccagctcaacggtgccacacagggtttccagaacatcatgggctcagtcatccagaacgcgaccggcgcggtcatgtcgctgccggcgttgatcatccagcgcgcgaaccctcagctctacaacctgatcaccaatggcatcctgcaggcgcggatcgactacgaccgctcgaaagggacttgcagagcgatcgccgagaagatggctgacatcgctggcgagcagaccggctgggggaaaatcgccgaaggccaggccctgggcgccacactggcctctgacgggaaagacgccgtatccgccctcgaagcagtggagaagaagggcggcaacgatggcgtaacctgggttggtggagacaaggccggcggctccggccagaagcccattcgcatcgtcaacgacgtgacccgggcgggctacaacctgttgaccagccgctcggtgaatgattcgtcgagcgtgccttccgccacttgcaacaacggcctggtctgcaacacttggtcctccccccaggaggccgccgcattcgccacccgggtactgggggagcaacagcaacagacctgcgaaggctgccagaagacggtgacggctgctggcgtcggcctcaccccgctgatccaggagacctacgacaagaagctccagtcgctgcaggagctgctgtcgaagagcaaaccactgactgcagagaacctggctgcggccggcaccgatgctctgccaattacccgcggcgtcatcgaggcgctgcgcgacgagcgtgaccaggacgtcctggcgcgccgcctggcgtccgatgtctccctgatggacgtgctcagcaaggcactgctactgcagcgcctgatgttcgccggcgccaaggagcccaacgtcgccgccaacggcctggccacccaagccgtcgatcagcagaccagcctcctgcagcaggagatctccaatctcaagaccgaactggaactccgtcgcgagttggccagcaactcccccatgcgggtcatcgagcgcgggcaacaacgcgcctcagggtccagtggcgtgttcgagtcggcgcccgatgccgatcgcctcgatcgcctgcaggccccctctgccgccggcggcaagtcgggagggagaccgtga

SEQ ID NO: 325469 - DNA, 939 bp, Pseudomonas aeruginosa
atgaccagcctcaacctccgccgcctggcagcggcggccgccaccttcagcctctcgttcacggcctcggccgcgatcaacagcgctgccatcgtctcctccaccctttcccctcagtgcctcgaatacaaggtcgtcgggatctgttactggctgctctgcggcccgcatggctgcaaagtgaagacgtcggtcaaggtccgccactacgtgcctgacgcagtcgtctccagctacgcgaataccgggagcaacccctggaccgaggtatcggcgctgggtacaccgaatccactcgcccaggccggcaatgacgcgaccacaaactacaaggccgagaacagcatcggccgcttcaaggaagcggatgtgatcggccatcctggtggcgccacgttcagccggttcgccagcgcctctgggtacgtttgccctggcgccaccgtcccgctggtgccgtactttctcagcacactggacgccattggctggcggcatggaattcccgagcaggtgtaccccgaagcgttggtcccagggctgcgcgaggtgggtggaatcttctccggcgacatgtgggggaacctctatccgcgcagcggcttcctgcaccagaccgacgactacaagacggcagccgtcatcgcccagcgcgccggcgatatcaccacgcgaatcggccagctccacgtctacctccccatgcgcgcagcccccaaggacggctactggccggcgggcgagctgaaagagggcgatgcctcgaccgggaaatggcaggagctgaccccatccctgagcctcaactgcgcggtgtttcccaactctgggccgaagacgcaagccgtcgacggcgattacgcctgggcgctctggcgtccctactcctgctgccagcgcaaggggcagatcttcctcggcagtaccgacttccaataa

SEQ ID NO: 325470 - DNA, 219 bp, Pseudomonas aeruginosa
atggagcgcttgctcgagagcatttacatcaatgctcggccggcaatggagttgaggcttagcctcaccagctccggccacaagagaatggtaaagattgtggatggggaggaggtcgaggttctgccaggtgaagtgcagggcatcctggaggaccaaaagagggatgttggaatcctcgccgatttcttagccaagagtctcttggcgcgacgctag

SEQ ID NO: 325471 - DNA, 660 bp, Pseudomonas aeruginosa
gtgagactcttgaagggcggctgggcagccaaacgatttcaaggtcccgccctgccctgggcggggctgctgctggtcttgctggctgcatccgccgtaggggtagagcttctggtgaagggcctgccagccaaccacagcctctacggcgatgcgaaagcgcgctggacgatcaatgaatacgccgacctggagtgccccttctgcaaggtctacaccccgcggcttaagcgctgggtagacagccatccggacgtgaacctggtttggcgccatcttcccctgcagatgcatggcgaggcggcccgccaccaggctcgcctggtggagtgcgcggggatccaaggcggcgccaaagccttctggagcgctatcgatgcgatcttcgctcagtcggccggcaacgggggcgggctgcctggcggcacattggactttcctgaactggaccaggctcgactggagaaatgtgcgaaagacaacgaacttattgactcagatatcaagttggacatcgacattgcacggtcgaagggcattacagcgaccccgaccctcgtcatccgggacaaccagacgggacgaagcgtgaagcttgaaggcatggccgacgagaccacgttgctgtcggcgatagactggctagccaaggatctctag

SEQ ID NO: 325472 - DNA, 2862 bp, Pseudomonas aeruginosa
atgggcttttttcaaacccttctgcgcggtcgcacacagcctcagtcggtaccggcagacgctcccgaagattcaggagcgctggacgtagcggccgcggaagaagcgactgagcgctatctggcgcgactggccgccatgggtattcctctgcccaacaccgggagcaagaatggcgccacgcaggccgaagcgtcacgcctctacgatcacgacccatcgttcgtagacctgctgccctgggctgagtacctgcccgacgagcaagtgatgctcctggaggatgggcgttcgcgcgccgcattcttcgaactggtgcccttgggcaccgagggccgcgatcccaattggatgcagaacgcccgggacgcattgaaagaagccctgcagaactccttcgacgagcacgaaacctcaccctggattgtccagttctacgcccaggacgagatcagctgggacaatttccaggagcagttgaggcagtacgtccatcctcgagcgcgaggatcggccttcagcgagatgtacctggcgctcatgaagcatcacctggagggcatttcgaagccgggcggactgttcgtcgacaccgccgtcagcaagctgccctggcgaggacaacagcgccgcgtgcggatggtcgtctaccgccggatccgcaaggaggatgcgcagattcgcggacaggacccggcggcgtacctgaaatccatctgcgagcgtatccaaggcggcctggcgaacgccggcatcgtcgcttcgcgcatgggcggacaggagatcaggaactggttgatccgctggttcaacccgcacccggatcacctcggccaggccgaggcggacctacgtcgcttctacgaactggtatgccgtccggacgaaccgatcctgcaggatgaattgccactggccgacggcactgacttctcccagaacctgttctatcggcagcctgtttccgatgccacccagggcgtatggctcttcgatgccatgccgcaccgagtgattgtggtcgaccagttgaacaaagcgccgctgacaggccacttcaccggcgagacgctcaaaggcgatggcctcaacgccctgttcgatcgaatgcccgaggacacgctgctgtgcatcaccatggtcgtgacgccgcaggacatgctggaagggcatctgcagcagctctcgaaaaaggccgttggtgacacccaggcctcgatccacacccgcgaggacgtggccaccgttcgacgcctgatcggccgggagcacaagctctatcgcggagcgatcgctctgttcgtgcgcggccgcgaccatacccagttggaggaacgctgcatcaccctgagcaacgtactgctcggcgccggcctggtgccggtcgaaccgcagaacgaagtcggaccgctgaacagctacctgcgctggctcccctcaaacttcgatccaaacgagaagcgagccctggagtggtacacccagatgatgttcgctcagcacatcgccaacctgtcgcccatctgggggcgcaccaccggtaccggacaccctggcttcacgctgttcaaccgtggcggcgcgccgttgaccttcgacccgttcaacaagctggaccggcagatgaatgcccacggcttcatcttcgggccaactggctccggcaagtcggcgtccctgaccaacctcatctgccagatgctcgccatgtacctgccgcggatgttcgccccgggctccggcggcagcctggcgccgttcgcggacgccatcaagctggtcgagagccccgaccaagtgaaggtgctggacgccgaagacatcgaggcctcggactcggtccagggcagcaaggccgacctcgaggacgaccagcgagacatcctgggcgagatggagatcgtcgcccgcctcatgattaccggtggcgaagagaaggaagatgcgcgcctgacccgtgccgatcgcagcgccgtccgccaggcgatcctggcggcggccaggacctgcgccgccgcgaaccgcacggtactgacccaagacgtgcgcgatgcgctctacgaggcctccaggagcgatagcaccgcgccagaacgccgcgcgcggatcgccgaaatggcggaagccatgcagatgttctgcatgggcgccgacggcgagatgttcaatcgcgaaggcacgccctggcctgaggccgaccttaccgtggtggatttcgcaacgtacgcgcgcgaaggctacgccgcccagctcgggatcgcctacatctcgctgctgaacaccgtgaacaacatcgccgaacgcgaccagttcaagggccggccaatcgtcaagatcaccgatgaggggcacatcatcaccaagcacccgctgctgctgccctacgccatgaagatcaccaagatgtggcggaaactgggcgcctggttctggctcgccacccagaacatcgacgacatcccagcctccggggcgccgatgctgaacatgatcgagtggtggttgtgcctgaacatgccccccgacgaagtagagaagatatccaggttccgcgagctgtcgccggcgcagaagtcgatgatgctctcggcccgcaaggaaagcggcaagttcaccgagggcgtgctcctggccaagggcaaagaatacctcgtccgtgtggttcccccgagtctctacctggccctggccatgaccgaaaacgaagaaaagaaccagcgctacaacatcatgcaagccaccggctgcgacgagctcgaggcggccttgcaggtcgcagcggatctcgacaaggcgcgcggcctgccacccttccccattgttttcccagaccaaccggcagtggagtgccaggacgaatga

SEQ ID NO: 325473 - DNA, 1506 bp, Pseudomonas aeruginosa
gtggcgctgaccggtaatcccctcctgaaattgctggtcgtccccgtcgtgatcggcgccatcctgatcggcgtgagcatgatgggcaagaaagaaagtgcgcagtcacaaggcgccgcaaccccgacggtaacgtcggaagaagcggcaaccctgggcatcgacggcgacacgcccgccgacacactacgcaccatcgtggcggaaagccggcagctcaaggaccagatcagcaaggtgatccaggagaatgactcgctcaaagccgccaatgagaacctgcagggccgcctgcgcaacatcgatcagaacatcgagcagaagctcaacaacaccgcccaggaactgcagcaacagcaggaaaaccgtagccagacgatcctggaccaggtacagaaacggctcgagaacctaacccacattcccgaggccggtgacaccgacctgcccgtaggattcggcgtgcgaccaaaggatggccagcactttcagggagcgggctcgtcttcatcggatatcgtctggatcgagccccaggacgcccgcgcggttgatgccaatggccagccgctggccgccggctccaccacccaaccgagcggattcagcttcccgacctccttcggcaatgcggtcgatcgcggacagaacgcgctggagcggatcgatgacgggctgcaccccgtcggccaacagcgatctgacctggaaaaccgcaagctcgtccgtaagacctacacgctgccgcagaactcgacgctcatgggctcggtggccatgtctgcgctgatcggtcgtgtgccggtcgacgggacggtcaatgatccttacccgttcaaaatcctcatcggcccggacaacctcaccgccaacggcatcgagctgccggacgtcgccggcgcggtagccagcgggaccgcctcgggcgactggacactctcctgcgtgcgtgggcagatccgcagcctcacgttcgtgttcaacgacgggaccgtgcgcaccttcccggcgccggccgaggaggtgaatgacaaccagagcaacaacaaccagaccgccagcgccgaccagaaaaccatccagggcggcctcggctggatcagcgacccctacggcatcccatgcatcgccggtgatcgccgatccaatgccaaggagtacctgggcaatcagagcctactcacggctgccggggccggcattgccaagctcctggacgccgacgagaacaacaccagtaccgtcttcagcggcaacggcaccagcttcgggacgaccggaaccaacagcaactcggccctcaacagcatcctctccggcggcgtcagcgacatccggcagtggatgaacaagttgtacggggaggccttcgccgccgtctacgtgcagccaggtgcgcgggtcgcagtgcatctcgatcagcaactggcgatcgactatgaactcaagggccgcaaggtcgattacagctctggagccgctcatgcaacagcagacttggactaa

SEQ ID NO: 325474 - DNA, 660 bp, Pseudomonas aeruginosa
atgagtttcagaaaacacactgcgcaacagcaggcacacatcaacaccttccggttcatcaccggcttcctgtgcatggtcatcgttgtgctggcctactgcgtctgggaagcccgtaaggacctctggatccacattccgcccgacttgcgctcaggaagcacccggttgtggtgggacattccgccagagagcgtctatgcgttcggcctctacatcttccagcaggtgcagcgttggcccaaggacggcgaggtggactacaagggaaacctgttccgctacgctgcctacctcactccctcctgcaaagtcttcctggagaaagactttgagtttcgtcgtaacgccggcgagctcaggggtcgcgagcgcaccacctcggaaatccccggtcgaggcattggcgagagcaatggccgcgtgatccagcactcgatcaatgactggaccgtcaacttggacatggacagcacggagtattacgccggcgagaagatcaagcgggcgctggcccgctacccgttgcacgttatccgcgccgacgtcgacccggaaaccaatcccttcggcctgcagtgggactgctactccgacacgcctcaacgtatcgagcttgaggagccggccgcccccaccaagcgggagggaggtctatga

SEQ ID NO: 325475 - DNA, 357 bp, Pseudomonas aeruginosa
atgctgaaactcaccctccagaaactgtccgccctctgccagagcctggccgccatcactttggcgctccccggtatcgccttggctgcactccccaaacccgaggcacctagccgtggggagggatcgggcatcatgcaaaccatccagaacttcggctatgacggagcgatgctcctcgcgctgctcatctgcgcggctgtctttctgggggtcgcttggcatacctacggcacctatcacgccatccatgacgggaagaagaagtggtcggatctcggagcgggcgtagccgtaggtgtcggcctgctgatcttgatcatttatctcgtcaccaaagccaccgccatcatgtaa

SEQ ID NO: 325476 - DNA, 240 bp, Pseudomonas aeruginosa
atgagcatgagcggagcccagacatcagcgttccaggccgccgctggctttcccccatcggccggcgagggactgttcattggagcagcgatgaccttccttctgctgtggtccgcctgggcgatgtacagcacctggcgcggctgggccaccaacaacctcgacagcgccaccgctggcgcttccgcgatccggatcttggtcctcctcggcatcacctctttcttcctcctcagctga

SEQ ID NO: 325477 - DNA, 339 bp, Pseudomonas aeruginosa
gtgaacactccacatccatcccttcgccgaagctgcctggccgtcttggcctgcagtgcgctggtcgcacagggagctttcgcagcgagcgcctccgagcaggcgaacctggaggtgatgatccggcagctcaacgccctcgaggacaccgcccgccgcagtgcccagggcgccgatgagcccggacagcgcttctacttcgactacccgcgcctggccgctgacctgcagcgcatccgccaaggcctgcaggactacatgacgcccagccgcgcccaaccgcgtgacccttccgacttatcagggaattacaccctgcgcggagggccgatgccatga

SEQ ID NO: 325478 - DNA, 1110 bp, Pseudomonas aeruginosa
atgaaacttatccttgatttcgacggacgccttctaaatccaagcaacatgctagaggccctatcaaaagcaggaaaaaatacaagcatcagcataagcaacgcgcaagcattaaatatagaaactcttctcaaggcaacaaccactgcagaaaacacaaaaaacctctcaacaactttcaacggcgcagagctgactgctaacaaccttcagcaagtcataaactcagcaggatcactaaccagagtatccacaatagccgcacaagccattaatataaacacacttctttccgcaatatctacagcaggcaactcaaagaattttagcgcagaattcaatggagcccaactcagcagcgacaacctacttagagcagtaaatgcggcaggaacaaacaccagcataagcgtcaataccgcacaagcggcaaatataaccgcccttcttcaaactattcatgcagcaggtgacacaaaaacattcagcgcagagttcaatggcgctcaacttacttcaaacaacattcaacaagctttagacgccgcaggaacccgaacatccattagcgtcaataccgcacaggcggttaatataagcaccctactagccctcatcaactctgccaaagacacgaaaaagtttagcgccgacttcaatggtgcacaactaacagcagacaaccttcagcaagcgatcagcgctgcggcctcgggtaccaatatcagcgtcaacaccgctcaggcggcgaatatatccacccttttacaggccatcaacatcgcgggcaacactaaaaaattcagcgccaactttaatggtgcccaactcacttcaaacaacatccagcaggcgctccgagcgacaggatcaaacacatcaatcagcatgaactccgcacaatccgccaaccaaagcactctacttgaacttctagacatagcaagttccagcaagcaattccaagccaattacaacggtggcatgtctaatccgaacaacctacaacagatagtttcccgtgcaggcgccagtacaaccgtgtttatttccgacgcacaaggcctaccaatcgcaaatatccttacccttatatcatctgccggatga

SEQ ID NO: 325479 - DNA, 1482 bp, Pseudomonas aeruginosa
gtgcagtggactcacgaacagtcaccgatcatccagtcgaaggcaccgaagatcctggtgcgagccttcgcaggcactggcaaaactaccaccctggtgggctttgccaggtcgaaccctaccctgagaatcctctatctctgctacaacagctcggtggagaaagccgcgaagggcaagtttccccgcaacgtagtgtgcaagaccgcccacagtctggctcatgcggtgtacggcattcagtacgcccacaagaagacgaagaacctgcgactgaccgatatcgcccgcggactcgatacccaagactgggagttggtacgtgacgtgctggccacgctgaacaactacatggccagcgccgacgcggaactcggccgaccgcacttcccgcgcttccgcgacaaggcgttcctcaccagtgctcaggaacgcttcctcaagcagggcctggacatggcgcgagtagtctggaggcgcatggtcgatctccaggacaccggcatgctgatgccccttgacggctacctgaagctgtatcaactgagcaagcccgatttgagccagcgcttcgactgcatgctcctggacgaggggcaggacatcaacccagtgatcgcggacattgcccattggcagcgcatcagaatggctatcgtcggcgatccccatcagcagctctaccggttcaggggcgcagaagatgccctgaacagcgactggatggccggcgccgaggagcactacctgacccagagctggcgattcggccccgcgatcgcacacgtggccaacatcatcctctcctacaagggcgaaacacggaaacttcaaggactgggtccgcagacgctggtgaaaaagtccctcccgccggaccttcctcaccgcactttcattcaccgcaccgttatcggcgtcatcgagaatgccctgcagctggtccgcaatcatccggagcccaaattccactgggtaggcggtatcgacagttactcgctgcgcgacctggaggatctgtacgcattcagccgaggcctgcgccaaaacgtccagaacaagaaactgctccgtgactaccgcgactacacccagtacgtggagatcgccgagatcagccaggacggtgagatgcttcgctcgatcaagatcatatcgacctaccctgatctgcctgcgcggatccttgagcttcgctcactgacccttgacgatgagctggacgcaacaatcaccctgaccaccgcacacaaggccaaggggctggaatgggatttcgtttgcctgtacgacgacttcaacgcggacccgctggcccccgacaccgacccaggcaagcgcgacgatgagttgaacctgatctacgtcgcagtgacccgcgcgatgaagatccttgccatcaacagcctggtgctgtcgatcatgcagcggtacgtggacgacagaaaactgaaggagcagatagctagctgtaaaaaatga

SEQ ID NO: 325480 - DNA, 351 bp, Pseudomonas aeruginosa
atggttacgcacttcttgagcgaatccggccaggcagcctgcgggcgcggcgacagcaacgtgaacggctcgagcgatgtcggccaggtcagttgcaagacctgccggcgcaccaacgccttcgcccaggcccaggaaaacgccgctccggccagtgcccctgtcacccccaccgccgctgcgccagtgaccgacaaggccgcgccgcggccgaaagccgaggccaggcccgccgccgcgcagcgccaggaccgcgatgccgcccgcaaggcctggcaggcgcgtctcaacgaattgtccgggaagaaccgcatgccgcgctcgcggcgccgcgcgcaagcctatctctga

SEQ ID NO: 325481 - DNA, 807 bp, Pseudomonas aeruginosa
gtgagccgtgaaccgcagacctacctcgcccaacgcttcgatcccgacgcgctcggccagccggccctggccctgcagctggaggcccggcacaacgacaccgaagtgccggtgcaccggcatcgcaagggccagctggtggtggcctgccgcggcggcatcacctgcacggtgcccgatggcctgtggatggtgccggccgggttcggtgtgtggattcccggcggcatcgcccatagcaaccgggtcaccgccaacggcaaggtctgcttcctcttcgtcgagccgggggcggcacgcctgccgagcgactgctgcaccctggccctgtcgccgctggtcctcgaactgatcctgcacctgagcgcgcaaccgcaggactatccgcacgacggcccgctcgcacgtctcgccggggtgctgctggaactcctggaacaggcgccgaccgaacagctctacctgccgctgccggacaaccgcggcctgcgccgcatcgccgacgaactgacccgcgcccccggcgaccgcgccagcatggccgaatgggccaggcgagtggcgatgagcgagcggtccctggcgcggatggtgcgccgggagaccggcatgaccttcggccagtggcgccagcaattgcagatcatcatcgccctgcagcaactgtccgccggcgtttcggtgcaacgcaccgccgagatcctcggctacgagtcggtcagctcgttcatcggcatgttccgcaaggcgctcggcagccccccggcccgctacgtgcgcgacagcatgcggcggccagccgactga

SEQ ID NO: 325482 - DNA, 189 bp, Pseudomonas aeruginosa; identical to SEQ ID NO: 319999

SEQ ID NO: 325483 - DNA, 909 bp, Pseudomonas aeruginosa
atgtccatcgttcgtctttccaaggtggctgcgaccttcgcctgcggcctgctcgccctgtgcctggcgttgcagttgtggcaagcctacgtgctggcgccctggacccgcgacgggcgggtcagcgcgcaggtgattcgcatcgcgccggaagtttccggcagcgtcgaggcggtgctcgtcgcagataaccagcgggtggcccgcggcgatccgctgtaccgcatcgatccgcgcagctatcgcctggccgtgcgccagcgcgaggcggagctggagcaggcgcgggaaaccctgcgccaacgtgacgagcaatggcgccgacgcatgcagttggccggcgcggtttcgcgcgaggaggtcgccaacgccggtcgcgccctgcgtatcgcccgcgcccgcgccgaggccgctggggcggcgctcgaccaggcgcggctggacctgcggcgcagcgagttgcgctcgccggtggacggctatgtgacgcagttgcgcgtgcagcccggcgattacgcggcggcgggccggaccaacatcttcatcgtcgatcggcgaagcttctgggtcaccggctatttcgaggaaaccaagctgcgcaatgtacaggtcggcgcgccggcgacgatcaagctgatggggttcgatccgctgctcgacggccatgtcgcgagcatcggtcgcggtgtcgccgacctcaacgaaagccgtgccgacagcggcctgccgcaggtcagcccgaacttcagctggatacgcctggcgcagcgcgtgccggtgcgcatcgaactcgaccgggtaccggcgggcgtggtgcttgccgccggcatgaccggcagtgtcgaggtgctgcaggcggggaccgcgcggcactggcggctgacccgctggttgcaggagtacctttga

SEQ ID NO: 325484 - DNA, 504 bp, Pseudomonas aeruginosa
atggcctcttacgcggaactgttcgatatcggagaagacttcgccgccttcgtcggccatggcctggccacggaacagggcgcggtcgcgcggttccggcagaagctggaaagcaacgggctgccgagcgcgctgacggaacgcctgcaacgcatcgaacggcgctatcgcctgctggtcgccggggaaatgtggtgcccggactgccagatcaacctggccgcgctggacttcgcgcagcgcctgcaaccgaacatcgagctggcgatcatttccaagggccgcgccgaggacgacctgcgccagcgcctggcgctggagcgaatcccgattccgctggtactggtgctggacgaggagttcaacctgctcggacgcttcgtcgaacggccgcaggcggtgctcgacggcggtccgcaggcgcttgcggcgtacaaggcgggcgactacctggagcacgccatcggcgacgtcctggcgatcatcgaaggcgcggtgcgctga

SEQ ID NO: 325485 - DNA, 258 bp, Pseudomonas aeruginosa
atgaaaacctcgttcttgctggccttgctgctgtcctgctggtcccaggtccaggcggcggacgacgacgggaaagagttgccgccgatcgagcgctacgactacggcatgccgctggacatcgagcgggtgctttccgtcacgccggtgccggccacctgtggcgtggtgccgctggtgatgctctaccgcgacagcgccggacgcctacatcgcttgcagtaccgaggccttggcgcgggctgttcgcggcactga

SEQ ID NO: 325486 - DNA, 2040 bp, Pseudomonas aeruginosa
atggcggcgtcggcgtccggcgggcgcgattggtacgcggcgttgccgttgccctggcggaccgacagcctgggctacgtgctgcgcagcatcggcgctgccgctctggcgctcggcctggggctctacctgcaactggattcgccgttttccgcggcgtccactgtgctgttgctgatcaatccggtgcagggagcggtggtcggcaagggctggtggcgcgccgtgggtaccctggtcggcacgctcgctgccttcgtcctgaccgcgctgttcgcccagaagatgctgctgttcgtcgtcgccctgggtttctggctgggtctctgcgtcggcgtcatgagcctggtccggcacttctacgccactgccgcggtggtcgccggctacaccgtgtgcctggcgctgggaccggccatggtcgagcccgaggcggccttcgagcacatcgtcacccgcgcctcggcggtaatcgtcggggtctgctgcctgagcttggtgaccgtgctcttcagccgcaggaccgtgtccgggcgggtgcgccagcgtctcgtctcgctctgcgcggcgacgctggcgctggtcgctgcgcggcatgccggtgcggctgacggggaactggagcgccgtcgccggacgctggccggcgaggtctacgcggtagacgacctgctgggcgtcggtcgcgccgagtcgcgggcgctgagcgctgcgctcccggcgatccgcggtggcctggcggcgctgttttccacgctgatggagttccgcttcgccggcgagacgcattgggcccggcgcttggcggagcgtggactggcgctgccgatggccgacgacctgtgcctgctgggcggccaactggagcgcggcgagctcgacttcgccggcgccgcgcgacggctcgcgagcttgcgcggtcgcctggcggcgattcggcgcggacttccgacagaccaagcggatgcctgtcgcgaagggctgttcatggagcgtctcgacgagcaactggatgacctgcaggccgccctgcgggggttcgcccggctcgacggccgggcccgcgccgacgtccgcccagcggccttccatcgacattaccgcgaggccttgcgcaacggcgcgcgagcctggctggcgatgctggtcggcggcgccctgtggttcctcagcgggtgggaccaggggccgaccctgctggcggtgctcggcccctactgcacgctgctggcagcctcgccctttcccgccgagggcacgcgcaatttcattcgcggcacgctctacgcgatacctgccgcattgctctgcaaattccttctgctaccgctgatcaacggttttccattgctgctgctgtgcctcgccttcttctggtcgttcggtatccaggccaccacagtgcccaggcgggcgttgcagggaatcgcctacctgatcgccttcaacaccctggtcgccaccggcaatctcgcccgcttcgatttcggcgacttcgccaaccagtcctgcgcctgggtgctggcgctctgcatcagcctgctggtctaccgcctgctgccgaaggacctggaacggcattcggcgtcgctgctcgaccatctgcgccgcgagaccctagccttgctgcgtcgtcgcgccggtttcgacgcgcatgcctggcaggcccgccagcagcatcgcatcgcccagctgggcgcgttgcatggcatggaacatccgcgcagcgcgctggccctgcgcctgggcttcgtatccctgcaactcggccgcgagtcgcggcgcctgtggcgcgccctggccgggctcgacccggccgccgcggaggcgcggtggatcgagtgcgcactgcgagccatcgccgtccgccatcgcgatccgccgctcgccgcgcggcacgcacgccgtgccggcgctcgcctggcggccgccggcgaatggcgcctggccgcgatcctcaccgacctcgcctggttgctccgggcctattcgcaaagcgtctcgtccgacggggcgcagcatggagaaaagacctcatga

SEQ ID NO: 325487 - DNA, 987 bp, Pseudomonas aeruginosa
atgatgacccgcagacatttcctccagcgactcggcgccagcgccggcctcggtgccgccctcacgctcggcctggagttcggctcgccgcgtggacaggcggcggcagccgatcactggcacatgcccgacgagcacctgccgcaggaacgggtgttccttgcctatgccgcgtccccgtcgatctggaaggacctggccgaggacgtgaaccgcagcgtcgccctgctggccaggaccatcgcccgctaccagccggtcacgctgctctgccggcccacgcaggaggccgcggcgcgccgcgcatgcggcggcgccaacatcgactacctggcgttgccgctggacgatatctgggtccgcgactacggcggctgcttcgtgctgaacggggagggcggcggcatcgaagtggacgggcgtggcacggcgatcctcaccgaaagttgctggctcaacgacaatcgcaaccccggcatggacaagggccaggtcgaggccgaattgaaagccctgctcggcctgcgcaagatcgtctggctgccgggtatccgcggcagggacatcaccgatgcgcatgtcgacttctatgcgcgcttcgtcaggccgggcgtggtcatcgccaatctcgacaacgacccggactcctacgactacgccgtgacccgcgaacacctggagatcctgcgcacagccaccgacgccgacggtcgcgcgctgcaggtgcataccctgtcgccgcccctgaagccgcgccgcgactactcgcgaaacaacccggacttcgccgccggctacatcaactacctgccgatcaacggcgcggtgattgccccgcagttcggcgacgccagcgccgatcgccactgcggggaattgctgggccgcctgtatccggggcgggacatcgtccagctgaacatcgatcccatcgccgccggaggcggcggcatccattgcgtgaccaagcacatgccacgtgcctga

SEQ ID NO: 325488 - DNA, 1449 bp, Pseudomonas aeruginosa
atgagcagcctccccgtacccgtatcgctcgacagcaccctccgccatctcggcagcgccgacccgcggcggccgttcctgatcgacgcccgcgagccggagcgaccgctggaatacacctggggcgacgccgaccgccaggtcgacgccctcgccgagcagatcgccgcgcatgcctgccgcagtgtcggcgtgctgctggacaacagctaccgcaacctctgcctgatctatgcggtcatgcgcgcgggcaagcatctggtgctgatcgatcccgagtggggggaggccgcgaagcaggccatcgtcgacgagatgcgcctggaagcgctggccagcgaacatccgctcgagggcgcgctggccgggctgcgcctggcgctggacttcgagcgcagcgcgacgcgccggctcgaccgcgccgcgcacagccacatgatcctgttcacctcgggcaccaccggccagccgaaaggcatcgaactcagccagcaggccatgctccatgcctaccgcatcggccgcgactgcctgggcatcggcgagcacacgcgctccggttgcttctaccggatcagcggcctgggcatcctcggcatcaatttcctcttcccgctgctgtacggcggcagcgcggtgctcctgccgctgcactgctgggccgacagcgaaggcttctgggaatacgtggaacgcttcggcatcagtttcctctacctggtgccgccggtggtcaaccacatggtcaaggaaggctccccgccgccgcgccgcttgccgttgcagcgcctgctctgcgtcgccggctcggcgcgcctggacgccgacctgcaggcggccttccagcgcgactacgcggcgctggcgaacatctacggcctcagcgagtgcggcttcgccttcctcttcggcaagcgtcgcggcgacgcgttcgacaactcggtgggaccggccgtcggcctggaactcaagctgaccgaccccgacggccgcccgctggagggcagcggcgaacgcgggcgcctgtgggtgcgcacgccgagcctgttctccggctacgtcaaccgccccgacctgaccgcccaggtgctcgaggacggctggctgaacacccaggacctcgcctacttcgacgaggaccgctgcgtgcacgtcctcggccgttgcgacggcaccatcaacaagggcggcaacctgttccacctgaatgaatgcgaacgggcgctcaacggcctggacgaggtgatcgacgtctgctgcctgaaggtcgactgcccgctctatggcgaagactatgtcgccgtgatccacaccgcgccgcaggccctcctgcggcggcagcggtaccgccgcggcgccggacatcggcaggcgggtcataccgatggcgccgttcggcagggccgcgatgccctcgccgaacggaccccgatgggccagcaggcgtag

SEQ ID NO: 325489 - DNA, 1224 bp, Pseudomonas aeruginosa
  misc_feature (1160)..(1169): n is a, c, g, or t
gtgatcctcaccgatggcaatggcaacccgatcggccagacccttgccgacggcagcggcaactggagcttcacgccgggcacgccgctggccaacggcacggtggtcaacgccgtggcccaggacccggccggcaacaccagcggtccggccagcaccacggtggacacggtggctccggccacgccggtgatcaatgccagcaacggcagcgtgatcaccgggaccgccgaggtcggcgccaaggtgatcctcaccgatggcaacggcaacccgatcggcgagaccaccgccgacggcagtggcaactggaccttcacccccggcacgccgctggccaacggtacggtgatcaacgccgtcgccgaggacgccgcgggcaacgccagcggtccggccagcaccacggtggactcggtggcgccgtccgctccgctgctgagcatcagcgccgacggcgcgctgctgaccggcaccgccgagccgaacagccaggtgcgtatcgtggtcaacggcgacaccgccaacccgatcacggtcaccgtcgacggcgccggcaacttcagcctgccgttcgcgccgccgctgatcaccggcgaactgatcgccggggttgccgtggacgccgccggcaacgtcagcgggccggccaccatcaacgccccggacctggcgccgccgaccatcagcgtgccggaagccgccgatacctggatcaatgccgcggagatcggcgacggtatccaggtcgatgtgacggtccgtccgaccatgcaggtcggccaggtggtcacggtcaagttcgccgggcagaacggctacgaggccgaggtcagccataccctcaccgccggcgacatcgccgccggcaacctgaccctgaccctgacgcctcccggcggcatgggcccgttcccggagggcgcctcgaccgtcaccgccgacatcaacggcggcaccgcgtcgaccccggtgccgttcaccatcgacaccattccgccggcgaccccggtgctgtccctggtcggcaacatcctgaccatctcggcggagccgggcaccgagctgacggtcaccgtcgacgtcggcggggtgaccgccaccgccacggtgaccgccgacaacagcgggctggcgtcgctgaacctgctcaccgatcnnnnnnnnnnggtcaccgtggcggtggcggtcaccccgccgacaacagcgggctggcgtcgctga

SEQ ID NO: 325490 - DNA, 816 bp, Pseudomonas aeruginosa
atgacgccgaacccccgccattgggccagcgagctgtggcagcgctcccgcgatcgcggcttgcagacccacatcgatgtgctggtcgacgctaccgggctggacgactatcccttgcttaccgagcatgcgcggcaaagcgatcctccggcgctgttcaaattgctggagcaaaccccggaggccgccctggccgacgagggcccactgctgctgcgcctggaagacggccacgcgggctggctggacgaactgctcgaacgcatcgactgccgccgccacctgatgctcctgttcagcccctggccgttgccgcgcctgggcgagcacctgcgcagctgcacccaggccgagtggaaccagggccgttccagcggcgtgctgcgtttctacgatccgggcctgttcatggccgtcagcgacatgctcgacccccggcagagccgttacctgcatgccccggtttccagctggcactggctggaccgcgacggccggccgagggcgctggccggtcattaccaggcccacgagacgccgccgctgcaagcggccctccgcctggaagcgcatcaagtcgccgccttgcgcgcctggagcgaggccgaagcctaccgccgcgaatacttcgtgctgccccgcgagcatggcctgggcggccaggaaagcctgctccagcatctggtccaggcgcacctggccgccgaccgccagggcttgcaggacttcgaccagcgcgatgccttcgtcgcccagtggctgcgcgaacagacccccggccccggcttttccccggcgggaacgagtcgcgcatga

SEQ ID NO: 325491 - DNA, 462 bp, Pseudomonas aeruginosa
atgaccgatagccctcgcccagaactggatatggaaacccaggagttcgtccaccagctgttcgacctggcccgccagggcaacagccagcgcctcgagcaactgctgcaacagggcctgccgccgaacctgcgcaaccacaagggcgatagcctgctgatgctggccagctaccatggccacgccgacacggtacgcctgctgctggcctacaaggccgacccggacctgcgcaacctggccgggcagacaccgctggccggcgctgcgttcaagggcgacctggcgatggtcgaactgctcctcgccggcggcgccgacgtcgagggcgcctcggccgacggcaagaccgcactgatgatggcggccatgttcaaccaggccgaggtcgccgccagcaggctggcggcgcggatgatgaatgccgaggccacggtcgcgctgctcagccggccccactga

SEQ ID NO: 325492 - DNA, 855 bp, Pseudomonas aeruginosa
atgcaacgggaattcgtcagcggcgccgggctaggcctgcgtcgcgcgctgctggagccgctcggcgccggcgatgaggtccgggtcgacttcctcgaggtcgccccggagaactggatcggcatcggcggccgtctcggccgccagttccgcgagctgaccgagcgcctgccgttcctctgccatggtctgtctctcaacctcggcggctacgctccgctggacatgtcgttgctgcgcgcgatcaagggtttcatcgagcagcatggcatccgtgcctacagcgagcacctgtctgcctgcgccgacgacggccagctctacgacctgatgccgctgccgttcagcgacgagtcggtgcgccgggtcgccgaacgggtccgggtggtacaggacgtcctcgagcggccgttgatcgtcgagaacgtctcggcgtatgcgcgcttgccgggcgagctggaagaggtcgatttcgtccgcgcggtactggaggaagccgattgccaattgctgctggacgtcaacaacgtctacgtcaacgcctgcaacttcggtttcgacgcacacgcctacatcgccgcgatgcccagccggaggatcgcctacctgcacatggccgggcacgacgaacagggcgccagcctgaagattgacacccatggcgcgccggtctgcgatccggtctgggaactgctggcacatgcctatgcctgccatggcgaacgcccgacgctgctggagcgcgatttcaacctcccgccactgagcgagctgtatgccgaaaccgatcgcatccgcgagctgcagcggcgcagcggtgaagcgcaactgcgcagcctggggtacggcacatga

SEQ ID NO: 325493 - DNA, 3480 bp, Pseudomonas aeruginosa
atgtcgctgtccatcgggctgatcgccgtggtcgccctggtctacatggccatcctgttcgccatcgccttctatggcgaccgtcgccgcaccccgctctcaccccgcctgcgcgcctgggtctacagcctctccctggcagtgtactgcaccagctggaccttcttcggcgcggtcggccaggccaccgaccagctctggtcgttcctgccgatctacctcggaccggtgctgctgatgctgttcgcgccctgggtgctgcagaagatgatcatgatcagcaagcaggagaacatcacctccatcgccgacttcatcgccgcccgctacggcaagtcgcaggcgctggcggtggtggtggcgctgatctgcatggtcggcgtgctgccctacatcgccctgcaactgaaaggcatcgtcctcggggtgaacctgctgatcggctccggcgccgactccaccggtacccgcgcccaggacacggcgctgatcgtgtcgctggtgctggcgctgttcaccatcgtcttcggtacccgcagcctggatgtcaccgaacaccaccgcggcatggtcctggccatcgccttcgagtcgctggtcaagctcaccgccttcctcgccgtgggcatcttcgtcaccttcggcctctacgacggcttcgccgatctcttctcccaggcccgcgccgcgccgcagttggccgactactgggaagagaccgtgcactggccggcgatgctgctgcagaccggcgtggcgatgaccgcgatcatgtgcctgccgcggcaattccacgtcaccgtggtggagaacatcgagccgcgcgacctcaacctggcgcgctgggtgttccccatctacctggtgctggccgcgttgttcgtggtgccgatcgccctcgccggccagttgcacctgcccgccggggtaatgccggactccttcgtcatcagcctgccgctggccgaggcacacccggcgctggccctgctggcattcatcggcggcgcctcggccgccaccggaatggtcatcgtcgccagcgtcgcgctgtcgaccatggtctccaacgacatgctcctgccgtggctgctgcgacgccgggaaaaggacaccgaacggcccttcgaggccttccgtcactggctgctgaccgtgcgccgggtgagcatcgcggtgatcctgctgctcgcctacgtggcctaccgcctgctcggctccagcgccagcctggcgaccatcggccagatcgccttcgccgccatcgcccagctcggcccggcgatgatcggcgcgctgtactggaaacaggccaaccgccgcggggtcttcgccggcctcgccgccggctcgctgctgtgggcctatacgctggtcctgccggtggtggccaagggccttggctggccgctggagcgcatccccggcctgacctggctggcaagcaatcccttcggcctgccgatcgagccgctgacccagggcgtgctgatctcgctggtcggcaacttcgccctgttcggcctggtctcggtgctctcgcgcacccgcgtgtccgagcactggcaggccagccgcttcatcggccaggagatctcccagcggcagaactcgcgcttcatgctcgcggtgcaggtggaagacctgctgatgctcgccgcgcgtttcgtcggagaggaacgcgcgcggcaaagcttcatccgcttcgcctaccgccagggcaagggcttcaccccgaaccagaccgccaacaacgagtggatcgcgcacaccgagcgcctgctcgccggggtcctcggcgcgtcctcggcgcgggcggtggtgaaggccgccatcgaagggcgcgagatgcaggtggaggacgtggtgcggatcgccgacgaagcctccgaggtgctgcaattcaaccgcgccctgctgcagggcgcgatcgagaacatcacccagggcatcagcgtggtcgaccagtcgctgcgcctggtggcctggaaccaccgctacctggaactgttcgagtacccggacggactgatctacgtcggccgaccgatcgccgacatcatccgctacaacgccgatcgcggcctgtgcgggcccggcgatccggacatgcacgtggccaagcgcctgtactggatgcgccagggcactccgcacacctccgagcggctgttccccaacggccgggtcatcgagctgatcggcaacccgatgcccggcggcggcttcgtcatgagcttcaccgatatcaccgcctaccgcgaggccgaacagggcctcaagggcgccaacgagtcgctggaacagcgggtccaggagcgtacccaggaactctcgcagttgaaccaggaactcagcgaggcgaagagcaacgccgaggccgccaaccagtcgaagacccgcttcctcgccgccgtcagccacgacctgatgcagccgctgaacgccgcgcggctgttctccgccgccctcgcccaccaggacgcgctgcccggtgaggtccgcgacctggtgcagcacctcgactcgtcgctgcgttccgccgaggacctgatcaccgacctgctggacatctcgcgcctggaaagcggccgggtcagcgccgaacgcaacccgttcccgctgaacaacctctacgatgccctcggcgtcgagttcaaggcgctggcccaggaacagggcctgcatttccgcctgcgcggcagccagctgcgggtggacagcgacatcaagctgctgcggcgcatcctacagaacttcctgaccaacgctttccgctacgccaagggccacgtgctgctcggcgtgcgccgcgaggacggctacctgcgcctggaagtctgggatcaggggccgggcatccccccggacaagcagaaagtcatcttcgaagagttcaagcgcctggacagccaccagacccgcgcggagaaaggcctcggtctcggcctggcgatcgccgaccggctctgcaaggtcctcggccatccgctggaggtacgttcctggccgggcaagggcagcgtcttcagcgtccgcgtaccgctggcgcggcaggcgccgccggccctggccaacggccacaaggccgaaccggcgcaagcgctgaacggcgcccaggtgctctgcgtggacaacgaagacagcatcctcgccggcatgaacagcctgctcagccgctggggctgccaggtctggaccgcgcgcagccgcgaggaatgcgccacgctgctggacagcgagatgcgcccgcaactggcgttgatcgactatcacctggacgacggcgagaccggtacgcaattgatggcctggctgcgcacgcgcctgggcgagccggtgccgggcgtggtgatcagcgccgacgcgcggccggaactggtggcggagatccacgctgccggcctcgactacctgtccaagccggtcaagccggccgcgttgcgggccctgctcagccgccatctgagcctgcgctga

SEQ ID NO: 325494 - DNA, 162 bp, Pseudomonas aeruginosa
atgcgttttcgcttcgtcctggggccggtcgccgcgccttcggcgggagccgtcgaggcgggcgcccggcacggatcgggatcgccgttgcgcgccattctgccgcatggcggccgcgccggtttacaactgggcgaaggtgccttgtcctttcgcgactag

SEQ ID NO: 325495 - DNA, 2199 bp, Pseudomonas aeruginosa
atgagcgaaccgatgtccgaacgcgaacgctggcaactggagctggacaagctgcagcgcggcctgcagggcgatccattcgccttcctcggcccgcagcgcgaccccggcggcgaaggcggcgtgctgcgcgcctacctgcccggcgcgcagcgcgtcgagctgctcgacgaagacggcgcgacgctcgccgaactggagcagagcgaccccggcagcggcttgttccagcgccgcctggagcgcctgccgccgcgctaccgcctgcgcgtgcactggccggacggcgtgcaggaaagcgaagacccctatgccttcgggccgttgctcggcgaactcgacctttacctgttcgccgaaggcaaccaccgccaactggcctcctgcctgggcgcgcaactgacccgtcacgaaggcgtggagggcgtgcgcttcgcggtctgggcgccgaacgccgtgcgcgtctcggtggtcggcgatttcaacggctgggacgggcgccgtcacccgatgcgacgacgctatccctccggcgtctgggaactgttcgtcccgcgcctcggcgagggcgaactgtacaagtacgagttgcagggccacgacggcctcctgccgctgaaggccgaccccctggcgctggcctgcgagacgccgcccggaaccgcttcgaagacctgcgcggcgttgcgccacgagtggcgcgaccaggactggctggcccggcgcgcggagcgccagggctatgcggcaccgctgtcgatctacgaagtccacgccggctcctggcgccaccgcgacggccggccgccgcactggtcggaactggcggaggagctgattccctacgtgcgccagctcggcttcacccatatcgagctgatgccggtgatggaacatcccttcggcggctcctggggctaccagccgctcgggttgttcgcccccaccgcgcgctacggcacgccggaggacttcgccgcgttcgtcgacgcctgccaccaggccggcatcggcgtgatcctcgactgggtgccggcgcattttcccaccgacgcccacggcctgggccgtttcgacggcacggcgctgtacgagtacgaacatcccttcgaaggcttccaccaggactgggatacctacatctacaaccttggccgcagcgaggtgcacggcttcatgctggcctcggcgctgcactggctgcgcacctaccacgtcgacggcctgcgggtggatgcggtggcctcgatgctctaccgcgactattcgcgcaaggaaggcgaatggctgccgaaccgccatggcggccgggagaacctggaggccatcgacttcctccatcacctcaaccaggtggtcgccagcgagacccccggcgcgctggtgatcgccgaggaatccaccgcctggcccggcgtcagccgtccggtggcggagggcggcctgggcttcagccataagtggaacatgggctggatgcacgacagcctggcgtacatcggcgaagacccgctgcaccggcgctatcaccaccaccagttgaccttcggcctgctctacgccttctccgagcatttcatcctgccgatctcccacgacgaggtggtacatggcaagcactcgctactggacaagatgcccggcgaccgctggcagaagttcgccaacctgcgcctgtacctgagcttcatgtggtcgcacccgggcaagaagctgctgttcatgggctgcgagttcggccagtggcgcgagtggaaccacgacggcgaactggactggtacctgctgcgctatccggagcatcagggcgtacaggatctggtggcggccctcaaccggctgtaccgcgatctccccgcactgcatgcgcgcgacggcgaggcgctcggcttcgaatggctgatcggcgacgaccaggcgaacagtgtctacgcctggctgcgccacgcggccggcgagccatcgctgctggcggtacacaatttcaccccggtgccgcgccagggctatcggatcggcgtaccgcaaggcggcgactgggacgtgctgctcaatagcgacgcccaggcgttcgccggttccggctcaggcagccagggccgcgtctccagcgagtcgtgcggcgcccatggccaggcgcagtcgctgctgctcgacctgccgccgctgggcacgctgctgctgcgtccggccggctga

SEQ ID NO: 325496 - DNA, 1206 bp, Pseudomonas aeruginosa
atgaacttcccctggcgcgacggcaaccgcgtagaactgctgatcaacggcgaagagtactttccgcgcctgttccagtgcatcgccgaggcgcgccgggagatcctcctggaaaccttcatcatcttcgaggacgaggtcggccggcagttgcaggaagccctcagcgccgccgccgagcgcggtgtcgaggtacaggtcacggtggacggctacggcaccgcctcgctcagcacggactacctggccaggctcaccgccgccggggttcgcgtgcacctgttcgacccgcgcccgcgcctgctcggcatgcgtaccaacctgtttcgccggttgcaccgcaagctggtggtgatcgatcgccagcaggccttcgtcggcggcatcaactacggcgaggaccacctggtgcgtcgcggcaacatggccaagcaggactacgcggtgcgcgtcgagggcccggtggtgcgcgatatccgccaggcctgcctggcgctgctcgaaccggacgccgactacccgccgttgcggccgtcgggcgccgggcagccggcgcgtgtgcgcctggtgatccgcgacaacgaccagtccagcgacgacatcgagcgcgagtacctgcaagcgatccgccaggcgcggcggcgcctgctgatcgccaacgcctatttcttccccggctaccgcctgcttcgcgagctgcgcgatgcggcgcgccgcggcgtgcgcgtcgacctggtactacagggcatgccggacatgccgctggtgcgcctgtgcagccggctgctctacgactacctgctgcgcgagggcgtgcgtatccacgaatactgccagcgtccgctgcacggcaaggtcgcggtgatcgacgacgactggtcgaccatcggttcgagcaatctcgatcccctcagcctgtcgctgaacctggaggccaacctggtgatccacgacgtcgccttcaacggccagctctaccagcacctgcgcgagctggcgcgccgccactgccggcgcatcagccgccgccacgccaggcgcggctactggtggcgggcgccgctgatcttcctcggcttccacttttcccggcatttcccggccatcgccggttgggtacccgcccatctgccgcgcctgaaatcgctggagccgcgtccgtcgcggcgctggcaggaacgccagggccagcggggcaacccatga

SEQ ID NO: 325497 - DNA, 312 bp, Pseudomonas aeruginosa
atgagcgcagaccctcggcagagactggtggtggcccatagcgtcgatcccgcggccgccgaacatgaagtgcagggcaacctggccctggcgcgctggctggcggaagtccagaagctggagttcggcggccgctacgaacccgaattgcaccagcgaggccccctctacctggtcccgacccgcaccctggtcggcagggagaccgccgtgcgcctgggcgtgaacagtgacgaagatctgctcggcggtttcgtcgagcacgcgttcatcgccggcaaggccatcgtccatccgctgcccttgccgtag

SEQ ID NO: 325498 - DNA, 348 bp, Pseudomonas aeruginosa
atgtccggccccgataccctcagccaggccttcggcaccttgctgctggccctggccttcagcgccttcatcgttttcgttcgcggctaccgcccgggcggggtcagcggcgcctggtacgacctggtgctcgccttcgtcgcggtatggctggcgttctggcccgaagccggcgtactcgcacgctcgccgagcctggccaatgccctggggttggtcttgcaggtcggcgctaccctgctcggctgcctgctcggttacggggtggcaaggggattgcggcgggcgatgcgggaaacccggcaaaaaagatcggcttcttcgccggtgaatcggcgaggttcgtag

SEQ ID NO: 325499 - DNA, 591 bp, Pseudomonas aeruginosa
atgcgcaatctggaaaccgcaaccctgaagctggggatattccatccccacgacagcctgagccaggcgctgatcgccgccgccttgcagcgacagatcgaagtcagcgccttgcaagccgatctcaacagcctgcaggcgcgccccgggctgcgctgcaagccagccagcctggcgtcgtcgatcgaggtcagccaggcggctgccggtctcgacctgctgttcgcgccgttgtccgactacgccgccgaagccttgccgccgatctgcgccgcgctgatcgatggcgccctgcgcgccgaggtaccgcgcctgttcctgcttggccattggcaatggctggtggcgccgcgcgacgccggcgaggagcaactgggtgccgggctcgagcgcagcctcacggtcagcggcctggactggacgctggtggaggtcccgagcctgcccgccggcctgcgcatcgacgatttcagccgcgccggcgacgtcgcggaagtggaggccgccagggtattcgcctgcgccgaagcgctgctcgacgaagtccgtctcggcctgcacaagcgccagtgcctgcgcctggcgccctga

SEQ ID NO: 325500 - DNA, 1653 bp, Pseudomonas aeruginosa
gtgcaggtagggcgggctggcccagataccgttcagtgggcgcgccttgtaggccatcaggtcgctggtcatcgccaggcactgctccaggcgccgggccttgtcgctgtcggccgcgacgttttcggccaggagcagggcgcctggcgcgtccgcggcggtcgcttcgacgctgtcggcgtcggggctgtccggcaccggactgatcagcggcggcaactgcccgtcgaagatgcccagggcggcggtctggaaggcacccagggcgacgctcaggccgcgcgcggccagggcctggaccaccacttcctggagcacgtccaccgcataggcctgcttgccgtagaaaccgcgctggccagtgccgacgaaggacaggtagggcttgccgcgcacgtagccggtcttcagctgggcgatgctgttgcaggcggtccacgggtcggtaccgatcggcgcgacctcgccgcgcgcctgcaggtgggtgagcacggtcttcaccggggtccgcaggtcgttgcggtccagcggcgtgtggcagctggagcaatgttgccggtacagctcgcggccctcggcgaccctggtcggctccggggcgccgaacagctggttcggccaggccggcggcttcagttggccgagctggtcttcgatgcggatcaggttgtcgacgttgatgctcgacgggtagccgatgtgcagcgccgactggatcgggctgagcaccttgacgtcggcgaataccccgaccgcctcgccggcgttgcgcgccagggcgccgacgtcgaacttgcggttgtcgatgtcgaccacgttgatgtggttcgggttgaagccggtccactgcacgcggtccagctgcggtacgttccacaggaacggatagctcacgggggcgtcctcggcgccgtagatctgctcgtcggcgtgcagttcgtagcccaccgagttgaagatcgaaccgatggcgtccaggcggcccgggccgaactcgggatcgtgcggcaggttgaagtgcgagccgtcgcgcaggcgcacgatggtggcgtccagggctgcctgcaggcgtgccttgttggcgtcgttgtagccgctgaccaggccatcggcgccgagcaccttgcgggcgaagcgctcgaacttggcggtgtcggcgcgggtgctctgcagggcgccgaggatctccagctggaagccggcgaggtcgcccatggtctgcccgccgtagacggtcaactgggtgccctggtagctgatgtgcgaggtgtggcacatgctgcaggtcggtccgacccagggttccttggagccctgcagggctttccagcgcagcttggtgaaggtcaggtcgctgtcgtcgctgcggtcgaccgcgtagccctgcaccaccttcacgctggaaccgccgagggtgtgcgggacatagccgtactggcggatcagcgcatcggacatcagcggttcttcgctggcgcgctgctccagcgccaccagccaggccagcggcagcatccgcgagccctggccggcttccagccaggcggtcttctgggtctggttccagccctggtcgaggtcgacgccgctgtcgtcggcgaatgccggggcaccggcgagaacggaaaggatggcaaggctgagtcgcgatag

SEQ ID NO: 325501 - DNA, 981 bp, Pseudomonas aeruginosa
gtggacatccagatcgatcgactggccgcggcgcgctatggcctgagcatcgccgatgtgcaggcggtggtatcgggcgccatcggcggcagcaatattggtgagacggttgaaggactggcccgcttcccgatcaacctgcgctatcccaaggagtggcgagatagtccgcaggcactacggcgtatgccgatcctcacgcaagccggccagcagatcaccttgggcaccgtcgcccaggttagtctgaccgaagggccaccaatgctgcgcagcgagaacgggcgtctgtccggttgggtgtatgtcgatgtacgtgggcgcgacctggcatcgaccgtgcgcgagttgcagcaacgcgtcgccgagcgggtacaactcgacgccggcatgaccgtctcctactccggtcagttcgaattcctcgagcgcgccaatgcgcggctggcctgggtggtgccggcgactctgttgattatcttcgtgctgctctacctgactttcagccgcttcggcgaggccctgctgatcatggccaccctgccctttgccctgtcgggcggcatctggctgctctactggttcggcttcaacctgtcggtggccaccggcgtgggcttcatcgccctggccggcgtctcggccgagttcggggtgatcatgctgctgtacctgaagaacgcctggcatgcgcgtgtggataccgggcgcagcggtgatccggccctactggaggcaattcgtgaaggcgcggtgctgcgtgtgcggcccaaggtgatgacggtggccgtgatcatcgccggcctgttgccaatcctctggggcggaggtgccggatctgaggtgatgaagcgcatcgccgcgcccatggtcggcggcatgattaccgcgccgctgatgtccatgttggttttgccggccgcgtactggctgatgcgaaggcagcgtacacagaaggttcgcgcaccgcaggagctatag

SEQ ID NO: 325502 - DNA, 159 bp, Pseudomonas aeruginosa
atgaaaagcctcaaagttattgcagcccttgccgctatggttgtttcctctgccactctggcagaaggcggcgctgatcgtgtttatggtcggatgattcaggccaatgagcaggccatgcaagagtatgctgccgctatcagcgtggtgcccgcgtaa

SEQ ID NO: 325503 - DNA, 789 bp, Pseudomonas aeruginosa
atgaataacagaaccctgttaggactttctctgctcactctgagcgtcagtaccgggcaagctgcaatggccgccgacgagaaaggcgagggatttatcgaaggcagcagcctgaccatcctcaatcgaaatctctacttcaaccgtgacttccgcaaaggccagtccagcagctcgggtaatggctattcggaagagtgggcgcatggcgtgataggccgattcgagtctggcttcaccgagggcaccataggcttcggtgtcgatgcctttgccatgctaggacttaaacttgacactggcgacggccgttcaggagccggtggctcagtcgatgtgctgccttacaacagcctcgggcaggctgaggataactactccaaactgggtggcgcggtgaaagctcggttcatggataccgagatcaaggcaggcgacgtctttcccgtcagcccggtcgtccaatacggtgatgcacggcttttaccggagagttttcgaggtgtcaccgtggtcaacagcagcgtggaaggactgtcgcttcagggcggtcgcctccactcgatgagccaacccaataccagcagcatgcgcgacggcttcgctaccttctacgcgggcgaagtggactcgccatggatcgcctatttcggtggtgattacacgcttaatgacaacgtcggctttagtctctacaccagccgcctcaaggatgcctggaatcaatattacgcgggcaccacgctgatagcggcagcatactcttgcatggcctgctcattggcctga

SEQ ID NO: 325504 - DNA, 552 bp, Pseudomonas aeruginosa
ttgatcggcgggctgaactactacaaggcggtcgatgaagggaagcagctcctcgggagcttcgataacaacatctggagcggcaaggtcggcatccaattcggcgctcacacagtgctggtgggtctccagcgcaacaatggcgatgatgacttcgactacttgcgccaatcggactccatctacctcgacaactccatccagtacagcgacttcaactcgccgaaggagaagtcatggcaagtgcgctatgacctggatatggagcctttcggtgtgcctgggttgagcttcatgactcgatatgcccaaggctgggatgccgactacagcaacgccaacgaagtctatatgcgccgtgatgacaacggcgatccgttgaccaaccagaagcgctgggagcgggacatcgaggccaagtacgttgtgcagtctgggtcgttgaaggacatgtcctttcgcattcgacaagccacgactcgcgccaccgacttcgagtcggatttggatgagttccgcctgattgtcgagtacccgctggaagttctctaa

SEQ ID NO: 325505 - DNA, 270 bp, Pseudomonas aeruginosa
atgacagcagtgaagcaaagactgggcgtcgcgccacggttagcgtcttgccacaccgcggtgattgacggcaagttcgtcgaaggtcatgtgccggcggctcaggtcatcgaactcaccaagcgcgatgatctgctgggcatcgctgttcccgggatgccggcgggctcccccggcatggaagtcgatggcgtacagcatgcctaccaggtcattggcttgaccaagacgggttctgatcaggtcgttgcagaatatcccgcccagtag

SEQ ID NO: 325506 - DNA, 843 bp, Pseudomonas aeruginosa
atgaaaagaacaattaaaactttggtggcggccggcgtggtcggtagcacagctgtcctggccggcgcctactttggcgtggtcaacgtgggggccgacgatccccattttcctgcagtgcatgcgtttctcacgatggcccgtgaccgctctatcgaagtccgttcgcgggacatcgaggttcccaacctggatgatcaagctcttattcgcgccggtgcgggcaactacaactccatgtgtatcggctgtcatttggcgccaggtgtggcggagaccgagctaagccaatcgctttatcctgcgccccccaacctcgccaagatcggtgtcgatggcaatccgtcagcagcgttctgggtgatcaagcatggcatcaaggcaacgggtatgcctgcgtggggcaagagcatgggagacgagtacatctggggcatggttgccttcctcaaccaactgccgacgatggatgccaagcaataccaaacactcgtcgcatccagtggcggccatcagcacggtggtggggaaacgcagatgcataaccatgaaggacagcacggcgacaacaagcctggccatcatgacaatagtggcggtggcgatgaccatcatggatcaggtgatgctggagagcctggtcatcacgatgccgcggctacggatagcgagggtggctccgcacctaaggcaggtcaccattcggatatgagtggcgatgaccaccatgctggagatgaggcgtcgtccaacggaggtgatcatcacgccgagcaggctccgaacgcctcgcccaagacccacacccacgccgatggcaaagagcacgtacatgaaagctaa

SEQ ID NO: 325507 - DNA, 1092 bp, Pseudomonas aeruginosa
atgaccactaggttttcacgcccgtccctcatagcgctggccgtgtcgctgagtgcactcagcggcggcgttacccaggctgcggaagaaatggatcattcggcaatggggcacggctccatgtcgatggaccacagccagatgggccacggttccgccaaagcgccgatggagggcatggatcacagcaagatggatcatggtgccatgcagagcgaatcgggcagcatggaccatagccagatgggccacagccagagccaagagaaggccccagccatggaccacagcaagatgggacacggcaccatgcagggacagatggagggcatggatcattcgaagatgaaccatggctccgctgaagccccgagaactaccagtcgtacgccgattcccgttctgacggatgctgatcgccaagcggctttcccgccactgcctggccacaaggtgcatgacagcgccatcaacagctttttcctgctcgatcagctcgaataccaagacgcagatgagggcagcaccctggcctgggatgcgtcgggttgggtaggcggtgatatcaaccgggtctggttccgctccgaaggcgagcgtaccaacggcgttaccgaggacgctgaattacagctgctgtacggccgctcgatcggcccttggtgggatgtcgtcgcgggcgttcgccaggactttaaaccggagtcgccgcagacttgggctgccttcggtatccagggcatggcgctttacgcctttgaggccgaagccacggccttcgtcggcgagaatggccaaactgctgcccgactggagggcgagtacgacattctgctgaccaaccagctgattctccagccaactgccgaaatgaacttctacggcaagaacgatcctgagcgaggtgtggggtctgggttggcaaataccgagctcggcttgcgtctgcgttacgagattgtcagacagtttgctccctatgtcggggtttcctggagccgctcctatggcaacacggcagacatggtgcgcgacgagggcggtgatgtagacgaggcgcgttttgtcgccggtatccggatgtggttttga

SEQ ID NO: 325508 - DNA, 312 bp, Pseudomonas aeruginosa
atgagtacttttatgaagcgtaatgccctgtttggcagcgcagcgatgttcagtcttttggctgttctgcacgcgccgacgtcattggcaggtgaggggcacagcgagcacgaacaacatgctgccgagtcggctgcgcccgacgccagtgacaagcctgcagatcaatcgaaaggcaaggccgctggccatcagatggatcatggcgccatggatcatgagggtatgaaccatgacgatatggggcacgagaagatgatggataagcatggcggcaccgaagccgaagcaggttcgaaccatgaccactag

SEQ ID NO: 325509 - DNA, 1833 bp, Pseudomonas aeruginosa
atgcaaagcaaaaccacaaggcgcaccttcgtcaaaggcctggcagccaccggtattatcggcggacttggcctgtggcgcacgccggtctgggcggtgaacagccccggccagcccaacgtactgactggtaacgaattcgacctattcatcggtgaaaccccggtgaacatcaccggcgcagcgcgcacggccatgaccatcaacggctcgctccctgggccgattcttcgttggcgcgaaggcgataccgtcacattgcgcgtgcgcaaccgcctcaaggaggacacctccatccattggcacggcatcatcctgccggcgaacatggatggcgttcctggcctgagcttccatggcatcgcccctgatggcatgtatgagtacaagttcaaggtcaaccagaacggcacctactggtatcacagccattctgggctccaggagcaggtcggcgtatacggtgcgctggtcatcgatgccaaggagcccgagcccttcagttacgaccgtgattacgtcgtgttgctgagcgactggacggatgaaaatccaacgcgggtactggccaagctcaagaaacagtcggactactacaaccagcacaaacgcaccgttggtgacttcatcgatgacgtaagcgagatgggttggtccgccgccgtagccgaccgtaagatgtgggccgaaatgaagatgagcccgactgatctcgccgacgtcagtggctacacctacacctacctgatgaacggccaggcacctgatggcaactggaccggcatattcaaaccgggcgagaagattcgtctgcgtttcatcaatgcctcggccatgacgtacttcgatgtgcgtatccccggcctgaagatgacggtagtcgcggccgatggccagcacgtcaaaccagtcagcgtcgatgagttccgtgtcgccgtagccgagacctacgacgtgatagtcgagcccgatagcgagcaagcctacaccgtctttgctcaatccatggatcgcactggctatgcgcgcggcacccttgcggtacaggaagggttgagtgcaccggtaccaagccctgacccgcgcccactgattgccatgggtgacatgggcatggaccacggcagcatgggcggcatggatcatgggagcatggccgggatggatcagggcaatatggcgggaatggatcatggcagcatgcagggtggcatggctggtatggatcacagccagatggccggaatggatcattcaaacatggctggcatggctggcatggctggcatggctggcatggctggcaacatgcaggcacacccggcctcagagaccaacaatcctttggtcgacatgcagaccatgacgccgacgcacaagctggacgacccaggtatcggcctgcgtgataacggccggcgcgtcctgacttactctgacctgcgcagcaccttccctgatccggatggtcgcgaaccaagtcgcaccatcgagctgcaccttaccgggcacatggagaaattctcctggtccttcgatggcatcaagttctctgacgctgagcctctgcgcctcaagtacggcgagcgtgttcgcatcacgctggtcaacgacaccatgatgactcatccgatccatcttcatggcatgtggagtgatctggaggatgcgaacggcaatttcctggtgcgtaaacacaccatcgacatgccgccaggttccaagcgcagctatcgggtgaccgccgatgcgttggggcgttgggcctaccactgccacctgttgctccacatggaaatgggcatgttccgtgaagtccgtgtggatgagtaa

SEQ ID NO: 325510 - DNA, 261 bp, Pseudomonas aeruginosa
atgtcgaataaatccaacgtcgctaccggtgccgctctggctctcgtggccgccagcctgtttgctaccctgcctgtccaggccgcccaggacaccaaagcagctgaagtgaagtgcttcggcgtcaacggttgcaagggccagaacgactgcatgaccgccaaaaatgcctgcaaaggccagggagaatgtaaaggccagggtttcaagctgatgactcaggccaagtgcgatgaggccggtggcaagaccagcgaataa

SEQ ID NO: 325511 - DNA, 837 bp, Pseudomonas aeruginosa
atgagtaagcgcaaaacactgggtttcggtcttggccttcgcagtgagtattaccagcagattcttgaacagcgacctgcggtcgactggtttgagatcatttccgagaattacctggtgggcggtggcaaggccctctactttctcgatgcgattggcgagcaatacccgttggtgatgcacggagtatcgctgtcgatcggcggttcgcataacctggacatgggctacctacgacagctcaagcaactggcggaccgggtacagccccagtgggtttccgaccacttgtgctggagtcgcggcaacgcccatcaactccacgacctgctgccgctgccgtttacccaagaaagcctgctgcatgtcgccgcgcgggtgcgtctagtgcaggatgttctggaacgtcccattgtgctggagaacgtttcttcttacgtgcagtggaagacgtccagcatgagcgaatcgcagtttctctcggaactgagtttcctgaccggttgcgaattgctccttgacgtgaacaacgtctacgtcagcgcacgaaatcaggatttcgacccatggcagttcatcttggaattgccgcacgagcggattcgtcaaattcacctggccgggcatagcgattacgggcaatacctcatcgacacccacgaccagcccatcgctgacccggtttgggcgctctacagcaagactttgagctacttgggtccaacgtcgacgttgatcgagcgggatgatcattttccaccgttcgaggatctgttatccgagttggagcatgcccgagctatcgccaatggcgtgatatcgagggcaaccctttga

SEQ ID NO: 325512 - DNA, 792 bp, Pseudomonas aeruginosa
ttgagcctaagcgccttacagactgcatttgaaacttacctgacagatggtgccctgccctccaacgagcttttggagcaagtccggggttgcactgcgctgagtgccctcgaaggcctgcggatctaccataacgcctatcgctcgcgcctgctggcggtgctgcgcgaggatttcccggcgctgcagcaatggctgggagaagagtcgttcgagcaactcgcactggcctatatcgccgcctggccaccgcggcatttcagcattcgctggctgggtgaaaagctgcccgagttcattcgcagctacattgcggaacctcaactttcaccgatgcgcgaactcgcggagctggagtgggcttttacactggctttcgatgctcaggatgtcgaagcgctttcactgcaggccatcagtgagttttcggctgaagactgggtttcattcagggtttccctgactccatctgccagatggctgcgattgcagtacaacacgctggcgctgtggaaggctgccaagtctggggatctgcttcccgttgccacccaaccagccgggaatcgagactgtctggtctggcgtcataacctcgtatgccattaccgaagcctggagccagaagaggcgtcagcattgcggtttttcgtcgagggtggatcgttcgccgaactctgcgagtcattgagcgcaacacatggagagcaagcccccctgcaggccgcaacttggttgaaattgtgggtcaacgaaggtttgctaaagctcagggcaactattcacgaatga

SEQ ID NO: 325513 - DNA, 315 bp, Pseudomonas aeruginosa
atgacacaccgcatcattcatttcaaacagcaagccttgctggacccagagacttaccaggcgatgctggccgacggcgtcggtcattgggaggcgcttgtaggaaaagtcgtcggaatagaagacgagaaaagccacgagttcgccgcattgaaaagcctgttcaagcgaaagcgctactcctatgacacgctggaaatgcgcgagccaggcgatcactcaaactggcttcgcggccgagatggggatgaaggtattactaacgaggtcaccagtattcacgggctgaaagagctctcagaactggagatttag

SEQ ID NO: 325514 - DNA, 201 bp, Pseudomonas aeruginosa
atgttcagcctgaatgtttcgggtatgggttgtggcagttgtgtcagcaaaatcacgaaggccatccagacgctggatcaggacgcacgcgtagaggtggatcgggcagccggcaaggtcactgtagagagcacagaaagtgccgaatcgatccgcgagctgatccaggagcttggttatgcggcccaggtcagcgcttga

SEQ ID NO: 325515 - DNA, 1200 bp, Pseudomonas aeruginosa
atgcgcctcatcgctaagttcccagcgcgaagcggccataacccacagatcttacagctccaccagcccaacaccgactaccctgcaattcggcacgccgccatgctgttactgcaggcaggccaccttgctcagcctctccgtgccacttacgcgcgcttgcttgtcgacgaataccaggactgcaacgtcgtccagcacgccatcgtgtcaggtttggcccaggtgctaccgacctgcgtgctcggtgacccaatgcaagccatcttcgactttcgtggcaatcgactggtgcattgggcgaatgaggtgcagcccctgttccccgcggcaggagagctgaggataccctggcgctggcggctggccggagctgagaaccttgggcagtggctactcgccatacggcagcaacttcaagttggccagccggtggatctgcgcacggctccggcagaagtgcgctgggtgcagctcaacgccgggaccgaagtccagcagcggctggtggccgctagaaccgagtcacccaacgctcggggcagcgtcctcatcatcggggactccatcaacgtgcaaggtcgccatcagctcacgagccagacacccggcgccatggccgtcgaagccgtcgacctaagggacctcgtcaacttcgccaggaactttaacctgcagggtgccaatgctctggcacaacttgcggaatttgcttcaagcgtgatgacgggggtaggtgcagcaaacctgcgaacgcgtgtggagtctctgcgcacaggacgtgcccgaacgccaccgaccccggccgaggccgaggccgtcgcattcgtcggggagccaacaccgcagcgagcactccttgtgctcaacgccctcgccgaacagccgggggcacgggtgtaccgaccggaagttctgcactgctgccggtccgctatgcaagctgtggcgggaggtacagccgactttctgagtgcagccattcaagcgcgagaacgcaatcgacaccttgcccgctccatcgcaagacgctcggtaggcagcacattacttctcaaggggctcgaggccgatgtctcggttgttctgcatcctgaacttatgaccgctcagaatctgtatgtcgccctgacgaggggcgcaaggcacgtagtggtgtgttcatcgaaccccatcctgatgcctgtgaacaacggctga

SEQ ID NO: 325516 - DNA, 1728 bp, Pseudomonas aeruginosa
gtggcccgcattcgcagactgattatcagcaacttccgatctatccaggcgctcgactgggtgccggccccaggaattaactgcctcataggtcctggcgatagtggaaagtccagcattctagatgcgattgacctttgcgtcggtgcccgccggggcggcacgttcggcgacatggacttcttcgctctgaacgtcgaaacacccatcaccatcagtgtgacgcttggcgatttgccggtatcgctgatggatatcgatgtttacggcgagttcttgcgtggattcaatccaggaacgggagaagtcgaagacgaaccgcgagcggggctggagaccgttatcaccttgcttctgcaagttggtgccgatttggaacctacctggacacttttttctgagcgtgcggagcagcagcaactcgaacgcactcttccctggaaggaacgagcggcactagcacccgcccgtatcggcagctttgcgagttcgaacttgtcgtggagtcgtggctcagtgctcaatcgacttactgacgagcgtgcagagctaggtgccgaacttgcgcgcgccgcgaggcaagcaagagcgaactttggcaatcaagccgtcggacatctaactcagacgcttgaggtggtgcaacgcacggctcagcatcttggggtttcggttggagcgatgccacaagcactccttgacgcacattctgtgtcgattggcgagggtgcgatcgcgctgcacagcgacacaggcattccccttcgctcccttggcacgggctcgtcgcgattgctagtggcagggttgcaaagagctgcagctagcgccgcgccaattgctcttgtcgatgaggtggaatatgggcttgaacctcatcggctcatgcgattcctggactccctgggcgcaaaggacgctgccgctccgctgcaggtcttcatgacgactcactcaccggtcgcgctgcgcgaattgtccggcagccagttattcgttgttcggtctgggcctcaacgccacagcgttatggcggcaggggaggccaacgaagtacaaagtacccttcggaaggacccagaggcattcctcgccaaatccattatcgtttgcgagggtgccagcgaggttggcttcgcgcgtggccttgaccaatggtggggcagccttggcgctacctcattcctggctcatggtggcgcttatgtggacgccggcgggggaagtcccgataacagtcttatccgcggaacggcacttcagaacctaggctatcgcgtgatggtttttgtagacgccgacaaaccttcgaccgcagggctacctgaagcattcttggccgcaggcggacaaattctgacatggcgaccaggtctcactctggaggacgagatcttccgccatctcagtgaccaagcactcgatgcacttctggcgaaagccgaaacaatagtgggtgcagagctgatgaatgcgcatatccagacgaagtcccaaggacgtatgacactacatgacatcaaagctgaaagacttattcagggctacttgcccgcgacgcgagagcttttgggagctgcatctcgtatccgcaacagcgggtggttcaagtcgttgacaacctatcaggaggttgcaagggacatcgtcggcccgtctctacagaacgccgaccagggcttcatggcagtcacgaatcagctctggacgtttacaagtgccccttga

SEQ ID NO: 325517 - DNA, 2361 bp, Pseudomonas aeruginosa
atgcaaaagacctcctgccatcatgaccaggatcattcacataactcgcacgcccactccgagagccagcgcgacccggtgtgtggcatggaggtgaaatctgatagcccataccgcgagagcgttgaagggaagacctatcgcttctgcagtgccaaatgcctgcagaagtttcaaattgatccccactcgtacatgggccactcgtctcatgaagcacatcagcatacgagtcaccctacgatatcggcaccagaaggagccgcatatacctgtccgatgcatccagagattcgccaaccgacccctggcaactgcccgatctgtggcatgacgctggagcctgtcatcccggagctggaagaggaggaaaacccggagctgaaggacttctctcggcgattctggtggaccctaccgctgaccgtcatcgtgaccgtgctggcgatggctggccattccttgcaactgtttcatggcacgacccagaactgggtcgagctggctctggcgacgcccgtgacgctatggggtggctgggtgttcttcgcccgcggcattgactccatccggcaccgcagccccaacatgtggaccctgatcggtttgggaacggccgctgcctacctctacagcgtggccgctaccttggttccgcagtggtttccggcggcttttgcccaggacggacgtatcggcgtctattttgaagcagccgcggtgattatctcactcacgctgttgggccaaatgctcgaactcaaggcccgctcgcagacgtccgcagctatcaaatcgctgctgggactggcaccaaagacagcgcggcgcatcatgcccgatggagtagaagaggacattcctctaacccatgtccatcagggcgatcatctgcgtgtccggccaggcgagaaggttcctgtagatggcactgtgctggagggtgagagcgcagtcgacgaatcgatgcttactggagaaccgttacccgtgaccaaacgggcaggggatgcccttatcggtgccaccctaaacacccacggcagcctagttatggaggcgcagaaagtcggtgccgaaaccatgctgtcgcagatcgtgctgatggtggccaaggcccagcgctctaaggcacccatgcagcgtatggccgatgccgttgcggggtatttcgtggtcggggtgatcctgatcgcgattctgaccttcttcggctgggggctgttcgggccggaatctggctgggtatttggcctgatcaatgcggtggcggtgctgatcattgcgtgtccctgcgccctgggtctggcaaccccgatgtccgtcatggttgcgactggcaaggccgctagcagcggtgtgttgttccgcgatgccagcgccatcgaaaatctatgcaagatcgacacgctcatcgtcgacaagaccggaaccctgactgaggggtgccccgtattccatagtgcggaagggacaggcggttacgactccaatgaagtgctgcgcctggctgccagtctcgaccagggtagtgagcacccgctggctcatgccatcgtcgatcatgcgcggggtcaaggcattgcactggtcaagccggacactttcgagtcgggctcgggtattggcgtgcgcggtcaggtcgatggccatcagctgcagctcggcaacaccgcactgatggacgaggcgggcgtcgatattaccccgctgcgcaatcgcgccgagcaactgcgtctggaaggcatcagcatcatctatttggccgttgatggtcgcctggcgggactcctggccgtttccgatccgatcaagcctacttctcaacaggctgtctccaagcttcaaagcgaagacgtaaaggtcatcatggccactggtgatggcctcaccacagcaagagccgtggcgaagcagctcggaatcgaggaagtgcatggtgaggtcaaaccgcaggataaggagaaactggtcgccgatttgcagggctatggccgtcgtgtcgccatggcgggtgacggcatcaacgatgcgcccgccctggccaggtctgacgtaggtatcgccatgggcaccggtaccgatgtggcgatgaacagcgcccaagtgacgctggtcaagggagatctgatgggcatcctgcgagcgcgcaccctgtcagtggcaaccgtgaaaaacatgaggcagaacctcgcctttgcgttcctctacaacgcgatgggaatcccgctagcagcggggctgctgtacccgctgacggggcatcttctgtcgcccttgattgctgcgctggcgatgagtgtcagctcggcgtcggtggtcttcaatgctctgaggttgaaatcaacggacatcggatag

SEQ ID NO: 325518 - DNA, 249 bp, Pseudomonas aeruginosa
gtggaccatacccatcacaccagtaccactgagccgcctttttggaagagcaagattggcattgcgctgatcatgctggccgtaatcggcatcttctatgtagcgcgtgagcattacggtcatctttcgcaggccctgccgtacctcatcctgctgctatgcccgctgatgcatctgtttggccacaatcacggcgggcactcccactccagcagcaccgctgtttccaaggacgaagaaaggacatag

SEQ ID NO: 325519 - DNA, 534 bp, Pseudomonas aeruginosa
atgaaactcagacccgctttcataatcaccacccttggcttgctgctcagtgctgccaatgcgctggccagcccgggccacaagaaagacagtattgggcaaccgggagacggtcaggcagtagatcgcaccatcgaagtccggatgggggacatcttcttcgaacccaaagcaatggagatcaaagcaggcgagacagttcgcttcgtcctgaaaaatgacggtgcactgctacacgaattcaatcttggcaaagcggcatcccatgccgcgcaccagaaagagatggccgcgatgtttcagaacggcacgctgtcccctacaggtgcacatgacatgagcaatatgggccatgccatgggcggcatgaagatggtcggtatggaacacgatgaccccaacagtgttcttgtcgaacctggagcacgcgaagagttgatctggaccttctccgccgccaccgaactggagttcgcctgcaatattccaggacattatcagtcgggaatggtcggtaaggtgaccgtacgctga

SEQ ID NO: 325520 - DNA, 558 bp, Pseudomonas aeruginosa
atgaaacgcttaccccttaaactgctgatcagcactctgttcatcagcaccacctttccggcatttgccgaggtcggcggcagtagcaatggcattgggcagcaggcccaggcgacgccagcgactcgtaccatcttggtaaagatggacgacatcaactacagccagaaaacgatcgatgtgaagccaggtgaaaccgtgcgcttcgttctgaagaacgagggcgcgttgatgcacgagttcaacatcgggcaggcagcgtcccagctggagcaccagcgcaagatggcgtccttgttcaaggacggcacactgaccccgaccggcatggccgagcgcattgtctggcatgagcgttatggcatgggagactccaaccctccaggctatccggaagtcatcaaagccaagcatgacgacccgaacgcggttctcgtcgagcccggcacaaccaaagagttcgtgtggaccttccctaaggcgggcagtttgagcttcgcctgtacattgcctgggcattaccaggcggggatggtcggtgagtttgctctgcgttag

SEQ ID NO: 325521 - DNA, 360 bp, Pseudomonas aeruginosa
atgaaatcgctgaaacctttgcttctggttggttcgctactgctgtcttccatggcttgggccgaagggggcagcgaccgtgtattcgagcgcatccagcagatgcgcgacaaagcagaagccgtgctgatccaggcggagaaggccccggtcggcgagcggcatgtgcacatgaaggagcatatgaacatgctcgaagacatcatgagccagctgcacaacgaacatcccgcgccaaacatgtctgccgaagagcatctggcctggatggaaaagcatgacaagctggtagacgacgtgctgggtcaaatgattcgagagcacaagctgatgatggccgacaaggaatgccatcagtaa

SEQ ID NO: 325522 - DNA, 678 bp, Pseudomonas aeruginosa
atgaaactactggtagctgaagacgaacccaaaaccggtacgtacctccagcaaggtctcaccgaggctgggttcaatgtcgaccgggttatgaccggtacagatgcccttcagcatgcacttagcgaagcctatgacctgctaattctggatgtaatgatgcctgggctggacggttgggaagtgctgcgcatgttgcgcgcagcaggaaaagacgtccccgtactgttcttgacggcacgcgatggtgtggaggaccgcgttaaagggttggagctaggtgcggacgactacctaatcaagccatttgctttttcagaacttctggccagggtcagaacgctgctgcgtagaggcaatggctcacccacgcaaacaacgatgaaaattgccgatctggaagtcgatctgatgaagcggcgtgcgatccgtggcgggaaaagaattgacctgaccgcgaaggagttttcactgctggaactgctactgcgccggcgcggcgaggtgctcccgaagtcgctgattgcctctcaggtttgggacatgaatttcgacagcgacaccaatgtcattgaggttgcggtacgccggctacgcgcaaaaatcgatgacgatttcgatctcaagctgattcataccgcccgcggcatgggatacatgatggatgcgccggagtga

SEQ ID NO: 325523 - DNA, 1377 bp, Pseudomonas aeruginosa
atgaagcacctttcgctgacagcacgcatgagcctgatgttcatgtccgcggtaattgcagtcctgacggtagcaggactgagtttcaatatgctcagccagcaccacttcaagatgctggatcggcaggccctggtggagaaactcgaatccgccaaacatatcctcaacaatgctcgcggtgaagcgagcctttcggaagaattaccgcagttgcgagccttgctgggagcccatcaggatctggcggccactatcctggccagtgacggttctgtactgttctccgcccccagagcagtcgaagtaccagagcgtttcagacgtgaaaatgagcagagcatgtgggagtggcagaacggccaacacatgtaccgcggcatgacggcgcaaatctcggtagccgatcaggctgagccgctcacagctttgctgattcttgacgtcaccaatcacacacactttttcgacacgctgcaacgatggttctggattggattggtcatcagtgccctgttcagtgccacgctcggctgggtggttgctcgcagcggccttaggcctctgcggcaagtcactcatgtggcctccgggatgtccgctcgctcgttacaggaacgaatccctctcgaaccagtgccgcgggaacttcagcaactggttctatccttcaatgcgatgttggctcggctagaggatgccttcgttaggctctccaatttttcggccgacattgcccacgagctacgcacgcccgttagcaacctgatgacccacaccgaggtcgtgctgagcaagaaacgcgatatcaatgcctatgaagagaatctctactccaacctggaggacttgaagcgcatgtctcggatgattgatgacatgcttttcttggccaaggctgataatggcctaatcatccccgagcaggccaggatcgaactggctgacgtagtcttcaagctgtttgactactaccaccttctggccgaagaacatggcattgaactatcgctcacaggcacaggccaagtgctgggagatcggctgatgcttgatcgtgcactttccaacttgctgtccaatgcactgcgctacacgccggtgggacatacaatttcggttttgatccgcgagacagcggactccacaaccttcagcatcgagaacccaggggacacaattagctcagagcatttagagaagctcttcgaccgcttttaccgggtcgaccccgctcggcgggagggaagcccgagcaacgccgggctcggacttgccatcacccgatccatcattgaggctcacaaaggccgcatctggtgcacctcagccgccggcctcacgggctttcacatcgaattgccccattccagatga

SEQ ID NO: 325524 - DNA, 993 bp, Pseudomonas aeruginosa
atgagccaggagatcgagcggtacctgcaggccggcacccgcgctagcacgcggcgcagctaccaacaggcgctcgagcacttcgaagtgacctggggcggctttctgccggcaaccagcgatgccatcgtgcgctacctggtcgatcacgccgccatgctgtccagtaacactctcaagctgcgcctggcggcactggcgcagtggcacgtcagccaaggcttccccgatccgaccaagaccccactggttcgccagatcctcaagggaatccgtactctgcacccgcgccaggagaagcaggccgagccgttgcaattgcgccaactcgaacagtgcgtgctgtggttggaacaggccgaggggagagcacgagcggaggacgactggccgcggttgctgcgctgttgccgcgaccgtgcgttgatgctgattggcttctggcgggcgttccgcagcgatgagctgtgccgtctgcaggtcgagcacatccaggtaaggccgggggagggcatgcagctgtttctgccctggagcaaaggtgaccgcgacaaccaaggccagaccttcagcgcgccggcgttggccaggttatgtccagtacaagcctacgtcgactggatcagcgtggcgggcatcgcgcgtgggccggtattccgtggaattgatcgctgggggcatttaagtgagcagggtttgcacccaaatagcattgtcccactcatgcgcgccgtactgcaggcggcaggactgccttcggagctgtacagtagccactcgctacgccgcgggtttgccacctgggccacccgcagcggctgggatctcaaagcgctgatgcagtacgtaggttggagcgatggccaatccgcattgcgctatgtggagagcacaggagtgttccctgggcagttgagtgcgctacaacacatctcaaactggcccgaggggactgccataagaccgccttccgcggccccgatctgcacctag

SEQ ID NO: 325525 - DNA, 999 bp, Pseudomonas aeruginosa
atggcccgtggtggaatcaacaaagctgtcgtgcagaaagccaggcatgccctcctcgcccgcggcgcccaccccagtattgatgcggtgcgcatcgagctgggcaacaccggttcaaagaccaccattcaccgctacctgaaagagctcgaagacgccgagcgcggccgggatgcggcttcgatcccgctcagcgaacagctggccaatctggtcagccaactggcagatcagctagaggaggaggcgcaggccgcggtggccctggagcgcgaacaactgacccgcgaacggctcgattaccagcatcggtttcgacaggccgaaagccgcatccaacaactggaaggccagaccgcgctcgacgcggaacggcttcagaccactcatcacgagttgcagcaggcacgcgagcaacggcaacaggccgagatcgagaacgcccgcctacagcaggctaatcgtgacctcgaggagcggcacaaggatcgcgacgcacagatccactcgctggaggaaaaacaccgacatgcgcgcgacaccctggagcactaccgacaggccagcaaggaacagcgtgagcaggaacaacgccgacacgagtcgcaggtacaacaactgcaactagaactgcggcaactgcagcagaccttgataatcaagcaggacgagctgacgcaactgaaccgcgacaatgcacgcttgctcaccgaggcgcggcagttgcaaaaagagcgacatgcacagcaacagctagtggcgcagaaaactcaggccctggaggctctgcagagcacgctggccggctccgaacgcacgaatgaagcccttgatcagcgttgtcgcacattgcaggaggaggtgtcccggctgagcgaagcctccgcgcttcaggcgcagcagacgcagggcctgcagaagcgcttggtcgaagccactacacagctgaagctactcggggcaccgcttgcgaacagcgatggcgcatgtagcacatga

SEQ ID NO: 325526 - DNA, 645 bp, Pseudomonas aeruginosa
atgacactacttgagactaccaatgagggggctgcggaacctgtccgtttgactacgccactgggccaggccattggtaatctgttcgcccgggccttgccgctactggatggcaatccgccaggctcgctcaaagtcttcgtcttcggcggctgcgcggtgcacctgctcacccatgcgcgtggtagtgcggacatcgatgcggagatcgaggcggcccgcgtgctgcgtaaggacgagatcatggccgtctacacaccgccagagggttatgaggacggcgacggccgcgacttgcaggtgtacctggaccagaactacaccaatgccctcgggccactgcacgaggactaccgcgagcgcgccatcccgatggagggtttcgagggtgagcagccgctgcatatcttcgttgccgccggcgtggatctggccatctccaagctcggccgctttacggaaaacgatcaatatgatatcgaacagctcatcgaatgtggccgtgtcgatgtcggccagtttgttacactggcaacagaggcaatcgattatgccgtgggcaaccgaagcgcaatgctaggctgcctgaaactggtcatagcgaagtacctggaggatgggcgagatgccacgtctggatcgtaa

SEQ ID NO: 325527 - DNA, 480 bp, Pseudomonas aeruginosa
atgccacgtctggatcgtaaacaaagctttggcacgctcctggagactgtcacccagcagcgtcttagccaagttgcgtccgatgctcttgtggagcttgccaagcagttgtggtacgaagagcgcgacctcgtgccagtactgcagcgtgaagtggcaagcaagctgcgcgagcctgaacagaagctgcgtgccctctatctcgtcgacctgctgcgtcgctttccctgtgtatcaacggacaaagccgcgcgcctaaaaggctttgtcagcagttggtcgaacctgaaaccagcagaacgctcacctcgtgcgacccagcttgtctctcgctaccaactcgacaagctggcctatgaatgggggcttgaagaggacgtcagcaagcagatgcaggatgtcctggctttccaaacccgccattacgccgccacccagggcgtgaagacgggctattcagagccaacgcccgtaagctag

SEQ ID NO: 325528 - DNA, 960 bp, Pseudomonas aeruginosa
ttgctcggatcggtcgatatcggcgcgccgatcctctaccgccaggtccgcgtcggcagcgtgcagagctaccagctgtcgcgcgaccgccagcgagtggtggtgggtgtgcacatcgagccggagtacgcgcacctggtgaatacctcgacgcgcttctggaactccagcgggatcaccctgaccggcaacctcagcggcgtgcaggtgaagagcgagtcgctacagaccctgatcaccggcgggatttccttcgacaccctcgatccgaaggcgccgaccgtgaccaaggtgcgtcgcttcaccctcttcgacagcgaggaggcggcgatggcccgtggcgtggagatccagctgagcatcgacaatgccgacggcctgcgcgaaggcacgccgatccgcttcaagggcctggacatcggcaagatcgaaagcgtcgagctgaacccggacctctccggggtactgatgaaggcccgcctgacttccgccggcgagcgcgtcgcccgcagcggaacccgcttctgggtggtacgtccggcgctcggcctgctgcgtaccgagaacctcggaaccctggtcagcggcccctacatcgaggcgctgccgtcgagcacgccgggcgagcgccaggcacgcttccagactctcgccgaagcgcccaacctgctgggtcgggaaaacggcctgcggctgaccctcagtgcgccgcgcaagggctcgatcaagccgggcaacctggtgacctaccggcagatcccggtgggcaaggtcgtcgacctggccttgggcgaacaggccgaccgggtgctgatcagcatcctcatcgaaccgcgctacgtaccgctggtgcgtaccggcagccgtttctggaatgccagcggcttcggcgtcgacgccagcctgttcaaggggtcatgccgagataaaggaaaattaggacatacgcgctgcaactga

SEQ ID NO: 325529 - DNA, 1953 bp, Pseudomonas aeruginosa
atgacctcgaaagccgtcgtcttcgcctaccacgacatcggttgcaccggtatcgaagccctgctcaatgccggctacgagatcgccgccgtcttcacccatgccgacgacccacgggaaaacaccttctacgcctcggtcgcacgcctctgtgccgagcgcggcattccgctgcacgcgcccgaggacgtgaaccatccgctgtggctggagcgcatccgccaactgcgcccggacttcctgttctccttctactaccgccgcctgctcggcgccgagctgctcgcctgcgccgcacgcggcgcctacaacctgcacggttcgctgctgccgcgctaccgcggacgcgccccggcgaactgggtgctggtcaacggcgaaacgcagaccggggtgaccctgcatcgcatgatcgagcgcgccgacgccgggccgatcctcgcccagcaggccgtcgccatcgaccccgaggacaccgccctgagcctgcacggcaagctgcgcaaggccgccggcgccctgctgcgcgacagcctgccgctgctcgccctcggcgtgctgccggaagtcgagcaggacgagagccaggccagccacttcggccggcgcaccccggcggacggcctgctcgactggcacaggccggcacggcagttgtacgacctggtgcgcgcggtgacccagccctaccctggcgccttctgccaggtcggcgaacagaagctgatcgtctggagcgccgaggtggtcgccggcaaccacggtcgcgagccgggcagcgtactgtcctgcgacccgctgcggatcgcctgcggcgaggactcgctggtgctgcgcttcggccagcgcggcgagcgcggcctgtacctggccggcacgcaactggccaccgagctgggcctggtcgagggcgcgcgcctgcgtggcgcggcgtccggcccgcagcgccgcacgcgggtgctgatcctcggggtcaacggcttcatcggcaaccacctgtccgaacgcctgctgcgcgacgggcgctacgaggtccacggcatggacatcggctccgacgccatcgaacggctcaaggccgacccgcatttccacttcgtcgaaggcgacatcggcatccattcggagtggctcgaataccatgtgaagaaatgcgacgtggtcctgccgctggtggccatcgccacgcccatcgagtacacgcgcaacccgctgcgggtgttcgaactggacttcgaggaaaacctgcggatcgtccgctactgcgtgaaatacggcaaacgcgtggtgttcccttccacctccgaggtctacggcatgtgccaggacccggacttcgacgaagaccgctcgaatctggtggtcgggccgatcaacaagcagcgctggatctactcggtgtccaagcagttgctcgaccgggtgatctgggcctacggccagcagggcctgcgcttcaccctgttccgtccgttcaactggatgggcccgcgcctggaccgcctggattcggcgcggatcggcagctcgcgggcgatcacccagctcatcctgcacctggtcgaaggcacgccgatccgcctggtcgacggcggcgcgcagaagcgctgcttcaccgacgtcgacgacggcatcgaggccctcgggcagattgtcaacatcggcaacccggacaacgaggcgagcatccgccagctcggcgaggaactgctgcgccagttcgaggcccacccgctgcgcgcgcagttcccgcccttcgccggcttccgcgaggtggagagccgcagcttctacggcgacggctaccaggacgtggcccaccgcaagccgagcatcgacaacgcccggcgcctgctcgactggcagcccaccatcgaactgcgcgagaccatcggcaagaccctcgacttcttcctccacgaagcgctccgcgagcgcgaggcacaggcgtga

SEQ ID NO: 325530 - DNA, 1020 bp, Pseudomonas aeruginosa
atgaagccctatccgatcgacctggtctcggtggtgatcccggtctacaacgaggaagccagcctgcccgaactgctgcgccgcaccgaggccgcctgcctggagctgggccgcgccttcgagatcgtgctggtcgacgacggcagccgcgaccgctccgcggaactcttgcaggccgccgccgaacgcgacggcagcgccgtggtggcggtgatcctcaaccgcaactacggccagcacgcggcgatcctcgccggcttcgaacagtcccgtggagacctggtgatcaccctcgatgccgacctgcagaacccgccggaggaaatcccgcgcctggtggagcgcgccgcgcagggctacgacgtggtcggcagcatccgcgccgagcgccaggactcggcctggcggcgctggccttcgcgcctggtgaacctggcggtgcagcgctccaccggggtcgccatgcacgactacggctgcatgctgcgcgcctaccggcgcagcatcgtcgaagcgatgctggcctgccgcgaacgcagtaccttcatcccgatcctggccaacggcttcgcccggcatacctgcgagatccgcgtcgcccacgccgagcgcgcccacggcgaatcgaaatacagcgcgatgcgcctgctcaacctgatgttcgacctggtcacctgcatgaccaccacgccgctgcgcctgctcagcctggtcggcggcggcatggccctggccggcttcctcttcgccctgttcctcctcgtgctgcgcctggccttcggcgccgcctgggccggcaacggcctgttcgtgctgttcgccgtgctgttcatgttcagcggcgtgcagttgctcggcatgggcctgctcggcgagtacctcgggcgcatgtacagcgacgtgcgcgcgcggccgcgcttcttcatcgagcgcgtggtccgcgccacgccctccgcgcttccctcggccctacagcgggtcggtttcacctcttcatccagcgagccttccacgccatga

SEQ ID NO: 325531 - DNA, 1320 bp, Pseudomonas aeruginosa
atgatcccagtaatcctttccggtggcagcggctcgcgactctggcctctttcccgcaagcagtaccccaagcagttcctcgccctcaccggcgacgacaccctgttccagcagaccatcaagcgcctggccttcgacggcatgcaggcgccgctgctggtgtgcaacaaggagcaccgcttcatcgtccaggaacagctggaggcgcagaacctggcgagccaggcgatcctgctcgaacccttcggccgcaacacggcgccggcggtggccatcgccgcgatgaaactggtcgccgaaggccgcgacgaactgctgctgatccttcccgccgaccacgtgatcgaggaccagcgcgccttccagcaggccctggcgctggccaccaacgccgccgaaaagggcgagatggtgctcttcggcattcccgccagccgccccgagaccggttacggctacatccgcgcgagcgccgatgcgcaactgccggaaggcgtcagccgggtgcagagcttcgtcgagaaacccgacgaagcccgcgcccgcgagttcgtcgccgccggcggctactactggaacagcggcatgttcctgttccgcgccagccgctacctggaagaactgaagaagcacgacgccgacatctacgacacctgcctgctggccctggagcgcagccagcacgacggcgacctggtgaacatcgacgccgccaccttcgaatgctgcccggacgacgtcttccaggcgctcgatgtggtccacgacagccacaactgcctggtgcacggcaacggcaagctggtctcggtgatcggcctggaggacatcgtggtggtggaaaccaaggacgccatgatgatcgcccacaaggaccgggtgcaggacgtcaagcacgtggtcaaggacctcgacgcccagggccgtagcgagacccagaaccactgcgaggtctaccgcccgtggggctcctacgactcggtggacatgggcggccgcttccaggtcaagcacatcaccgtgaagcccggcgcgcgcctctcgctgcagatgcaccaccaccgcgccgagcactggatcgtggtttccgggaccgcccaggtgacctgcgacgacaagaccttcctgctcaccgagaaccagtcgacctacatcccgatcgcctccgtgcaccgcctggccaaccccggcaagatcccgctggagatcatcgaggtgcagtccggcagctacctcggcgaggacgacatcgagcgcctggaagacgtctacgggcgcaccgcagaaccggccctgcaagtggtcgccggcagccgctga

SEQ ID NO: 325532 - DNA, 1665 bp, Pseudomonas aeruginosa
atgaagcaccacctcactccgctggatgccacgcaactcgacagttggcgcgccctggccgcccatcgccaggaactgcaggacttcaggatgcgccaggcgttcatcgacgatccggagcgcttcaagcggttttccttcagcgcctgtgggctgttcctcgacttctcgaagaacctgattcgccaggacaccatcgacctgctggtgaagctggccgaggaggcacggctgagcgacgcgatcagggcgatgttcgacggcgaggcgatcaatgcctccgaacgccggccggtactgcataccgcgctgcgtcgaccgatcggcgacaaggtgctggtcgatggcgtcgacgtgatgccggaagtccaccgcgtcctgcaccagatgaccgagctggtgggctacgtgcacaacggcctgtggcgcggctataccgaaaagccgatcaccgacgtggtgaacatcggcatcggcggctccttcctcggcccgcaactggtatccgaagccttgctgccgttcgcccagaaaggcgtgcgctgccactacctggcgaacatcgacggtagcgagttccatgaactggccagccgcctgaacgccgagaccaccctgttcatcgtttcctccaagtccttcgggaccctggaaaccctgaagaacgcccaggccgcacgcgcctggtacctggcccagggcggcaccgaggaagagctctaccgccatttcatcgccgtctccagcaacaaggaagccgcgatcgccttcggcatccgcgaggaaaacatcttccccatgtgggactgggtcggcggccgctactcgctgtggtcggccatcggcctgccgatcgccatgtccatcggcatctccaacttcaaggaactgctgtccggcgcctacaacatggaccagcatttccagaccgcgccgttcgaacgcaacatcccggtgctgctcggcctgctcggcgtctggtacggcgacttctggggcgcgaacagccacgcgatcctgccctacgactactatctgcggaatatcaccgaccacctgcaacaactggacatggaatccaacggcaagagcgtgcgccaggacggcacgccggtcaccagcggcaccgggccggtgatctggggtggtgtcggctgcaacggccagcacgcctaccatcagttgctgcaccagggcacccagttgatcccggcggacttcatcgtcccggtgagcagctacaacccggtggccgaccatcaccagtggctgtacgccaactgcctgtcgcagagccaggcgctgatgctcggcaagagccgcgaggaggccgaggccgaactgcgcgccaagggcctgccggaagccgaagtgcagcgcctggcgccgcacaaggtgatcccgggcaaccgaccgagcaacaccctggtggtcgagcgcatcagcgcccgccgcctcggcgcgctgatcgccatgtacgagcacaaggtctacgtacagagcatcctctggggcatcaacgccttcgaccaatggggcgtggagcttggcaaggaactcggcaagggtgtctattcgcgcctggtcggcagcgaggaaaccccggccgaggacgcctccacccaaggcctgatcgacttcttccgcggccgccatcgcggctga

SEQ ID NO: 325533 - DNA, 738 bp, Pseudomonas aeruginosa
atgaacaccgtcaagaccgtccgtgaactgcgcgccgcggtggcgcgcgcccgcagcgaaggcaagcgcatcggcttcgtgccgaccatgggcaacctccacgccggccatgccgcgctggtaaagaaagccggcgaacgcgccgacttcgtggtcgtcagcatcttcgtcaacccgctgcaattcggccccagcgaagacctcgacacatacccgcgaaccctcgcagccgaccaggaacgcctgctcgaagccggctgccacctgctgttcaccccgaccgtcgaggaaatgtaccccgacggcatggacgggcagacccgcatccatgttcccggcgtctccgaaggcctttgcggcgccagtcgtcccggccatttcgaaggcgtggcgaccgtggtcagcaagctgctgaacatggtccagccggacctcgcgctgttcggcgaaaaggatttccagcagttggcggtgatccgcaagctggtcccggcgatctaccgcaccctgcggcagctcggcgaacgcatccgcgccggcgccgaggacttcccggcattgctcgccgacgcccgccaggccctggaacaggccgggttgcgccccgactacctggaaatccgcgagccgatcagcctgcgccccggggtacccggcgaccgccaactggtgatcctggccgccgcctacctgggcagtacgcggctgatcgacaacctctcagtccacctcgattga

SEQ ID NO: 325534 - DNA, 495 bp, Pseudomonas aeruginosa
atggacgagttcctcgctgcccggttgcagcaggctggcctggctcgccgcttcatcttgttcctcctctatgtcggcatcctcgtcatcggcttcgtcgctgggcctgatttgcgtctggaaaagcccgaccttcggcgccacgccaccacgataggtgaaatcggcaatgacctccggcctggccgcgatgattccgctgacattcgcgccatggctggcgacctggatttctccgctttgctcatcgcgatcgaagagcggccgggagggatcggcgatcgcttcctcgccgtcgatggccactcggttggccagcggagtgatcgcctggccggcgaacgccggatgctgcggaaggaaaccgccatcgatcaccccgacatccacgcctttgccggtcaggcccaacgcgcgcgcgaccggcacgccgatgaagtcctgctcccagccgctggaccgggcttcggccaacgcacagggcgacagcgatag

SEQ ID NO: 325535 - DNA, 681 bp, Pseudomonas aeruginosa
gtgcgcctgatcgccgccaacctgccggtgcgcgacggcgggcatacccttggcgaactcgacctgctgctgcgggacgacgacggcatccaccacctggaactggcgatcaaactctacctggggccccagtccggccccggcgactggctcgggcccggcggccaggaccgcctgtcacgcaagctggaacacctctgccgacaccagttgccgctggcggcgacccgcgagggtcgccaggtgctggccgcccatggagccgaatcggccgtttccgcattgtggctgagcggctacctgttccatccctggcccgggccgggcagcctgcccgccgacatcgagccacggcatctgcgtggccgctggctccgccagcgcgactggccggcgtacctggccagcctggccggaccgcaggccgggcagcattggctgcatctgtcgcgcgagcactggctggcgccggccatgcggcggcaggacccgctcgacccaccgcgcgacggcgcctgctggaacatcgccttcgccgacgaggcacgtccgcaaatgctggtaagggtggtgccgcgcgacggctactgggtagaggccgagcgcctgttcctggccagcgacgactggcccccggggctcagcctgtggggtagcgcgcgccaggccgcggatgcctga

SEQ ID NO: 325536 - DNA, 2028 bp, Pseudomonas aeruginosa
atgatccagccccggaaggctacctggccggccaccctgctcaagcgcaacggacgtgaagtccccttcgatcccggcaagatcgaacgcgccatcgccgccgccggccaggccaccggcgagttcgacccgcagcaggcgcaggcgctcgccgaacgcgtggtggaacgcctgccggaacgcgcctgcctggatatcgaacgggtccaggacctggtcgaacgggtgctgatggaggccggccactaccccacggcgcgcgcctacgtggtctaccgcgaacgccacggccggctgcgccgcgagcgcaagaccctggtggacgtcgccgcgtcgatgaacgaatacctttcccgcgaggattggcgggtgcgcgccaacgccaaccagggctattccctcggcgggctgatcctcaacgtatccggcaaggtcaccgcgaactactggctggacgaggtctacgatgccgacatcgccgccgcccaccgcgacgccgacctgcatatccacgacctcgacatgctcgccggctattgcgccggctggtcgctgcgcaccttgctgaacgaaggcctgaacggcgtgccggggcgggtcgaggccggtccgccgaagcacctgggcagcgccctggggcagatggtcaacttcctcggcaccctgcagaacgaatgggccggggcccaggccttcagttccttcgatacctacctggcgccctacgtgcgcaaggaccgcctcgactacgccagcgtgcgccaggccctccaggagttcatctacaacctcaacgtgccgtcgcgctggggcacccagacgcccttcaccaacctgaccttcgactgggtctgcccggacgacctgcgcgaccaggtgccgcgcatcggcggcgaggagatgcccttcgcctacggcgagctgcaggccgagatggacctgatcaaccgcgcctacatcgaggtgatgcaggccggcgacgcccatggccgggtgttcaccttcccgatcccgacctacaacatcacccacgacttcccctgggacagcgacaacgccacgcgcctgttcgagatgaccgcgcgctacggcctgccctacttccagaacttcctcaactcggacatgcagcccaaccaggtgcgctcgatgtgctgccgcctgcaactggacgtgcgcgaactgctcaagcgcggcaacggcctgttcggctcggcggagcagaccggctcgctgggcgtggtgacgatcaactgcgcgcgcctgggctatcgccaccgtggcgacgccgccggcctctaccgccagctcgaccacctgctcgaactcgccttcgccagcctggagctgaagcgcaaggtgatccagcagcacatggatgccggcctctatccctacacccgacgctacctgggtaccctgcgcaaccatttctccaccatcggcgtgaacggcctgcacgagatggtgcgcaacttcagcgacgaccgcgagggactgcacagcgaagccgggcgcgagatggccctggccctgctcgatcacgtgcgcgcgcggctggtgggtttccaggagaacagcgggcacctctacaacctggaagccacgcccgccgagggcaccacctatcgcttcgcccgcgaggaccgcaagcgctatccgcgcatcctccaggccggcacgccggaggcgccctactacaccaactcctcgcaactgccggtgggcttcaccgacgacccgttcgaggcgctggagctgcaggacgccctgcaatgcaagtacaccggcggcaccgtgctgcatctctacatggccgagcggatttcctccgccgaagcctgcaagaccctggtgcgcaccgccctcggtcgcttccgcctgccgtacctgaccgtcacccccaccttctcgatctgcccgcggcacggctacctggccggcgagcacgagttctgcccgaagtgcgacgaggagctgctgcaacgctccacgcccaagagctgttgcggcggctgcggcggttga

SEQ ID NO: 325537 - DNA, 2154 bp, Pseudomonas aeruginosa
atgatcgaaaaaattctgcttcgcaacgtctccagctactctccagactcagcggtatccattgccccgcttaagcgcgtgagtttgttctatggccataacgggacgggcaagaccactatcagtaacttccttcaggcccctgatgaggcctgctacagcgtttgcggcgtggagccagtaaaggttggccgggagatcctagtctacaaccatgcattcatggagaaaaatttccatgaagccgcatcccagccaggggtcttcaccctcaatgagggcaacattgaggcggaagctgccctcgcagtggccgagaaagcaatcgctgagctgacgatcgcccatgatactgaaatggagaagggcattaactgcaagaatgctcagcagcaagctcatgaggcgctactggacagtgtatggaagcctaagcgtggcttcgataacaccgctttggcttactgcttcaggtcgctcaacaccaaagagcgtttacttgatgcagtccgaagcgtccagcttgtggcaacctctgacaccgctcaggggctactcagcgaggcggcagaacttaacgaggccagtgataaagagctgcccggaatcgcgccaatcaccttccaggcgggtaagctagaaaccgatccgatcatgcaggaagtcatcactgggtcaggcgattcctacctttctgcgttcattcagcaactgggaaattcggattgggtcaagcaggcactgcgctatgaggtcgaggcaaaagaccagtgcccactatgccagcagtccttgccgcaggatttctatactgaaattcgtaaagtcttcgataaaacctatcagcagcgcattgatttgctgcagcaattcgaaagccaataccgagacgcggtggatcaatttctgcgacggtacgaggctccggaatatcagctgcaagccataaagctccgtgtcaccagacttcacgctgtcttccagaaaaacctgcaatccctcgctacaaagctcgccagtccatcccttatgattacgttggagtccactgcaacattggtcgcagagttgaacagtgagatcgcggctgagcaactgaaaatcgacgctatcaatgcgaggataaaaaacaggaagcagcatgaggaggacatcaagcgacgcttctggagctggtacagagcttcgtgcgacgcggctttcgtggcattcgaaaaggtcgataaggagcaggggcgccaacgccaggccgccaaggatgaggttcagtctctgcgggatcgcattcaggcacaacgcgatatcattgcccaatccagggcggccatcaggaacatcgaccagtcggtcgagagtatcaataattggttgcgggtgttgggtctgaagggcttcgcgctgattaaagaagagggcccggtgccacaatatcgtcttgaacgtcctggccagactgaaggggtgttcagaacgctaagtgagggcgaaaaaacgctgatctcgttcctctacttccttgaggtctgcaatggcgagctggacacagctagtgggacgctcaagcgtgatcgcatcatcgtcatcgatgacccaatatcgagcctctcccataactatgtctacgatattgcgtcgctgatcaggcggcaggtgctcatcccgagagaccggttcaaacaggtgatcattctgacgcacaaccttttcttcttccacgaaatggtcaagctcttgaaggatgacggagaaaaatccttggcaatgttccggatcaccaagtccgaatacagctcggtcgtgaccatggaagagcgcgaaatccagaacgactaccaagccttctggcaaaccatcaaggacgcgttgcaaggccgaacttcccctaacgtgatcccgaacatgatgcgcaatatcttggagtactacttcagcttcgtgcatcagacgcaaagcctgcgccaagcgttgactgatcttagcgaggagaatccagagttcagagcgctttaccgatacatcaaccgtgaatcacatgctgactcggttaacctaactgacttcggcgagatcgatccggagatcttcgtcgcgcggtttaaggatgtgttcatcagaaccaatttcgaatctcacttcgacaagatgatggcatag

SEQ ID NO: 325538 - DNA, 237 bp, Pseudomonas aeruginosa
gtgatccaggagcgctgcaccgtctgccactcggcgaaaccgaccagccagctgttcagcaccgcgccaggcgggatcatgctcgacaccccgcagcagatccagcaactggcaccgaagatccaggcccaggccgtggcctcgcagatcatgccgctgggcaacatcacgcagatgacccaggaagaacgcaacctgatcggcagctggatcgccaagggcgcacagatcaactga

SEQ ID NO: 325539 - DNA, 1350 bp, Pseudomonas aeruginosa
gtggaaagcaccaaacaagaagaacaagggatctacgctgcgacaccgcccgccaccggcctgctcgaacgcctgttcaagctccgccagcatggtacgacggtcaggaccgagctggcggccgggctgaccaccttcatcaccatggcctacatcatcttcgtcaatcccaacatcatggccgacgccggcatcgaccacggcgcggcgttcgtcgccacgtgcctggcggccgccctcggctgcttcctgatgggcttgtacgccaactggccggtgggcctggcgccgggaatggggctgaacgccttcttcacctacaccgtggtcggcaccatgggctacagctggcagatcgccctcggcgcggtgttcatctccggggtgatgttcatgctgctgaccttctcccgggtccgcgaatggctgctcaacagcatcccccgcagcctcaggttcgccatgggcgcgggtgtcggcctgttcctcggcctgatcggcctgaagaccgccggcatcgtagtggccagcccggcgaccctgatcaagctcggccacctcacctcgcccggcccgctgctggcggcactgtgcttcctgatgatcgccgtgctcgagtaccgccgggtgttcggcggcatcctcatcagcatcctcagcgtcaccctggtcggctgggccctcggcctggtgcagtacggcggggtgttctcggcgccgccgagcctggcgccgaccttcctggcgatggacatcgccggcgcgttcaacgtcaccatgatcagcgtgatcctggccttcctcttcgtgcacatgttcgataccgccggcactctcatgggcgtcgcccagcgcgcgcacctggtgaaggaggacggacgtatcgagaacctgtcgaaggcgatgaaggccgacagcgcctccagcgtgttcggcggcatgctcggtgtcccgccggtgaccagttacgtggagagcgccgcgggcgtggccgccggcggacgtaccgggctcaccgcggtggtggtcggcgtgctgttcgtcgccgcgatgttcttcgccccgctggccgggatgatccccgccttcgccaccgccggcgcgctgatctacgtggccatgctgatgatgggcgggatggcgcacatcgactgggacgagcacaccgaaaccatcccggcgatcgtcacggtgatcatgatgccgctgaccttctcggtggccgacggtatcgccctgggcttcatcacctacgtcgcgatgaaggtcctcaccggcaagcaccgcgaagtctcggccagcctctatgccttgttcgtgatcttcgtcgccaagttcatcttcctctga

SEQ ID NO: 325540 - DNA, 1305 bp, Pseudomonas aeruginosa
atgacccgcaacgccaaagcctaccgcgccgccatcctgcacagcatcgccgaccccgcggaggtcggcgtcgaacgctcctacgaatacttcgaggacggcctgttgctggtggaggacggcaaggtcgctcgcctcggtgacgccgaagccctgctcggcgagatcggcgacgtcgaggtcttcgagtaccgcgacgcgctgatcacccccggcttcatcgatacccacatccatttcccgcagaccgggatgatcgcctcctacggcgaacaactgctggactggctgaacacctataccttccccaccgagcgccaattcagtgaccaggcccatgccgaccaggtcgccgagatcttcctgcaggaactgctgcgcaacggcactaccaccgcgctggtcttcggcagcgtgcaccggcagtcggtggaatcgctgttcgaggccgcccggcgcctggacctgcgcctgatcgccggcaaggtgatgatggaccgcaacgcgccagactacctgaccgacaccgccgagagcagctaccgcgacagcaaggcgctgatcgagcgctggcacggccagggccgtctgctctacgcagtgaccccgcgcttcgccccgaccagcaccgcggaacagctggacatggcggcgcggctgctgcgcgagcatcccggcgtatacctgcacacccacctgtcggagaacctcaaggaaatcgagtgggtgaaggagctgttccccgagcgcagcggctacctggacgtctacgaccaccacggcctgcttgggccgcgctcggtgttcgcccatggcgtgcacctgtgcgacggcgaatgccagcgcctggcggagactggctcggcggtggcgttctgcccaacctccaacctgttcctcggcagcggtctgttcgacttgccgaagctggagcgctacaaggtcaaggtcggcctcggcaccgatgtcggcgccggcactagcttctcccagctgcagtccctgaacgaggcgtacaaggtcatgcagttgcagggcgcccgcctcgatccgttcaagtcgctctacctcgccaccctcggcggcgcccgtgcgctggagctggacgaccggatcggcagcttcgccaccggcaacgaggcggacttcgtggtcctcgactaccacgccaccccgctgctctcctaccgcctgagccaggccggcagcctggccgaacggctgttcgcgctgaccatcctcggcgacgaccgcacggtgaaggaaaccttcgccgccggtcgctcggtgcatcgccgcgactga

SEQ ID NO: 325541 - DNA, 2142 bp, Pseudomonas aeruginosa
atgctcagcctcggcaacgctttcgaggagcaggacctgctggacttcgaccgccgcgtacgcgaaggactggccgacctgttgcctggcggcgacctgctcggcggtggcgcggaggtcgagtacagttgcgagccgaagctggacggcctggccgtcagcctgctctacgaacgcggccagttggtgcgcggcgccacccgcggcgatggcagcaccggcgaggacatcaccagcaacgtacgcaccattcgcaacgtaccgctgaagctgcacggcgaaggctggccggagatcctcgaagtgcgcggcgaggtgttcatgtccaaggccggtttcgaggcgctcaacgccaaggccgtggaaaccggcggcaagaccttcgccaacccgcgcaacgcggcggccggcagcctgcgccagctggattcgaagatcaccgccagtcgcccgctggagttctgtgcctacggcttcggccaggtcagcgggacgctgccggacacccaggtgggcatcctcgaggcgttccgcggctggggtatccccatcagtcgcgagctgcgcctggtcaagggcgcccaggcctgccgcgactactacgacgacatcggtcgccgacgcgatgcgctggcctacgagatcgacggcgtggtgttcaaggtcaaccgcatcgccttccagcgcgaactgggcttccgcgcgcgcgagccgcgttgggcgatcgcccacaagttccccgcgcgcgaggagctgaccgagctgctgggtgtcgagttccaggtcggccgcaccggcgccgtgaccccggtggcacgcctcaagccggtgcaggtggccggcgtcacggtgtccaatgcgaccctgcacaacatggatgaagtcgcccgcctgggcctgcgcatcggcgatacggtggtgatccgccgtgctggcgatgtgattccgcaggtcatgcaggtggtgctcgagcgccgcccggcggatgcgcaggctatcgaggtgcccgagcattgcccggtctgcggctcggccgtggagcggacccagttggtcaagcgcagcaagggcaaggagtcgatcagcgagggcgccatctatcgctgcgtcggccgcctctcctgtcaggcgcagttgaagcaggcgatcatccatttcgtatcgcgccgggcaatggacatcgacggtcttggcgacaagatcgtcgagcaactggtggatcgcgggctggtcgcctcgccggcggatctctataccctgacctatgaacaggtgttcgagctggaagggttcgccgagctgtccaccaacaacctgctggcggccatcgccgatagccgcaagccttcgctggcgcgcttcatcttcgccctggggattcccgacgtcggcgaggaaaccgccaagctgctggcgcgttcgctgggttcgctcgagcggatcggcaaggcgctcccggaagtgttgacctacctgccggacgtcggcgccgaggtagcctacgagatccacaacttcttcgccgacgagcacaaccgccaggtgatcgcccagttgcgcgatgccgaacatggcgtgcagttgcaggaagagggcgaggtcgccgcggagttcgccgcttgtgcctcgctggccggtttcatcgacaagctgaacattcccttcatcgccgccaccggcgcggaaaagctggccagccgcttcggttcgctcgacggcatcatccgcgccgactggctcgatctacgccaggtggagcgtctgcccgagcgagcggcgaaaagcctgcgcgatttcttcgacgagccggccaacgtgcagcgtgccctggccatcgaggcgcagttgcgtgagttcggcatgcattggcagagcgagcgcaaggcggtcgaaggcctgcctctggccgggcagacctgggtgctgaccggcaccttggaggcgatgagccgggacgtggccaaggacaagctggaagggctcggcgccaaggtggccggctcggtgtcggccaagacccactgcgtggtcgccgggcccggcgccggctcgaagctggccaaggccaacgagctgggcgtgaaggtgctcgacgaagacggcctgctgaaactgttcgacgagcacggcgtcgcccgctga

SEQ ID NO: 325542 - DNA, 762 bp, Pseudomonas aeruginosa
atgtcgtccaccctgttcatcaccggcgccacctcaggcttcggcgaagcctgcgcccgtcgtttcgccgaggccggctggtcgctggtgctcaccggccgtcgcgaggagcgtctgcaggccctggccggcgagctttcggcgaagacccgggtgctgccgctgaccctggacgtgcgcgaccgcgcggcgatgagcgcggccgtggacaacctgccggaagagttcgccaccctgcgcggcctgatcaacaacgccggcctggcgctgggcaccgacccggcgcagtcctgcgacctggacgactgggacaccatggtcgacaccaacatcaagggcctgctctacagcacgcgcctgctgctgccgcggctgatcgcccacggcgccggggcgagcatcgtcaacctgggttcggtggccggcaagtggccctatccgggtagccatgtctacggcggcaccaaggccttcgtcgagcaattctccctgaacctgcgttgcgacctgcagggcaccggggtgcgcgtgaccaacctcgagccggggctgtgcgagagcgagttctccctggtccgcttcggcggcgaccaggcgcgctacgacaagacctacgccggggcccatccgatccagccggaagacatcgccgagaccatcttctggatcatgaaccagcccgcccacctgaacatcaacagcctcgagatcatgccggtgagccagtcctgggccggcttcgccatccaccgcgaaagctga

SEQ ID NO: 325543 - DNA, 696 bp, Pseudomonas aeruginosa
gtgttcttcagattgctcttgatcgccgtcctgctggcggtatccgcgtgcagctccaaggctcccggcccgggggcgtcggtgccgaaggtcgtgcgcggcgagtatcgcgtcaagcgcggcgacaccctctattcgatcgccacccggcacggctggaactacaaggacctggcgcgcgccaacggcatccgcccgccctacgcggtcaaggtcggccaggtagtgcgcttcgacgggcgcaagtcgacctacgtcgccagcagccgctcctcgtcgagcagccgtgcgcgcaagtcgccgcctccgccgccgtcggtgaccctgcgcggctggcagtggccgatgaaggggccggtgatccgccgcttctccagttccgacaagctcaacaagggcatccgcatcgccggcaccctgggccagccggtacaggcctcgctggccggcaaggtggtgttcgcggtgaacaacatgcgtggctacggcaacctggtgatcatccagcacggtacctcgtacaccagcacctacgcgcacaacagccgcttgctggtgaaggaggggcagatggtcagcaagggccagaagatcgccgaggccggttcctcggatgccgaccgggtgcaactgtacttcgagatccgccagaacggccggccgctcgacccgctgagcctgctgccgccgtcctga

SEQ ID NO: 325544 - DNA, 2433 bp, Pseudomonas aeruginosa
atgcccgagctgcttgcccactatccgttcaccgatacggcctaccatgagctgctcgatcgccagggtggcgtgcgtccccattggcagcggctgttccgccaactggagcgcagcagccctgagcaactgcgccagcgccaggccctggtggaacggcagatccaggagaacggcgtcacctacaacgtctacgccgatcccaagggcaccgaccgcccctgggcgctggaccttctgccgaacctgctgtccgccgccgagtggcagccgattgccgccggcgtggcacagcgtgctcggctgctcaacgcgctgctggccgacctgtacggcgagcagcgtctgctcgccgaagggctgctgcccagcgaactggtcttcggccatccgaacttcctctggccggcgctcggcatccggccgcccggcgggattttcctgcacagctatgccgtcgacctggcgcgcgatgccgacggacgctggcaggtccttgccgaccgcacccaggcgccgtccggcgcgggctatgcgctggagaaccggcagatcgtctcgcgggccttgccggaactctatcgcgacctgcgtgtgcagcatctcgccgggtatttccgcaccctgcaggagaccctcgccagccaggccgccggcgacggcgagacgccgctggtggtgctgctgactcccggacgtttcaacgaaacctacttcgagcatctctacctggcgcgccagctcggtttcccgctggtcgaggggcacgacctgacggtgcgcgacgccaccctctatctcaagaccctcggcggcctgaaacgggtgcatgcggtattgcggcgcctcgatgacgacttctgcgatccgctggaattgcgtaccgactcggcgctgggcattcccggcctgctcgaggcggtacgccaggggcgcgtactggtggccaacgcgttgggcagcggggtgctggaatcgcccggcctgctcggcttactgccgcaggcctgtcgccgcctgcttggcgaggaactggcgctgccctcgctcgacacccgctggtgcggcgagccgcaagccctcgaggcgatactcgcggcactgcccgacctggtgatcaagccggcctttcccggccagcgctgcgaaccgctgttcggccacgccctcgacagtgccggcctggcatccctcggcgagcgcttgcgcgagcgcccgcaggcctacgtggcgcaacgcctggcgcagttgtcccaggcaccggtctggcgcgacggcgaggccggcgtcggcctgcagtcgcgggccatcggcatgcgcgtgttcgccgtcgccgccgccgacggacgctactgggtgatgcccggcggcctgacccgcgtagcggccgagcgagcagtcggcggcgagccgttgcgaccgcgccggctcggcgtgcgcgacctggtccgcgaggatccctacctgccgtcgcgggtggtggagaacctgttctggtacggccgctatgccgagcgttgcgacgaccatgcgcgcctgttgcgggtggtgctgtcgcgctacgtggatgccgatggcgacgaagaggcgttgcgcagcgccctggccctggccggcggcatcggcctgctgcccggggatggcgagccgttggaaaggtgcctgttgcgggcgttgctcgacgagcactggccggcgagcctgtgcgccaacctgcggcgcctgcactgggcggcggcgcaggtgcgcgggcgcttgtccggggagaactggctggccttgctggagctgcaacgcgacatgcaggcgctcgatccggcacgcaccgacctcggcgaagcgctggacttcctcaaccggctagtgatgtccctggcagccttgtccggtttcgccctcgacgacatgacccgcgacgacggctggcgtttcctgatgatcggccggcgcatcgagcgcgtgcgcttcttcgccgagagcatcgccgccttcctcgacggcggtagcgcctgggacgccggcgcgctggaatggctgctggaactgggtaacagcggcatcacctaccgctcgcgctacctggcgtcgccgcaactggtcccggtgctcgacctgctcctgttgcacgagcagaacccgcactcgctgcgcttccagttgcaggccctggagcgttcgctggagcgcctgcacgaggagttcggcgcgccacgcgagcgggaactcaggaccctgggcgaacgcctgcgcagcttcgatctggcggccctggaaagcccgctgttcggcgcggcaggactcgacgaggtgctcgtcgggctggcgcgactgctgcgcgacatcgccgcctgcgccggacaggtctccgatcggctaggcttgcgctatttcgcccatgtcgacgatgtcagccagagaacggtatccacctga

SEQ ID NO: 325545 - DNA, 1287 bp, Pseudomonas aeruginosa
gtgttcggcgaggttcggtacctgcggccagagcggctcgcgaaccgcttcgtggaagcgcccaccctggtagagacgatagacgtggcgtgcgatgcccagcgccgcggtgagaccggtggaacggatgccgccgacactgatccagttgcgtccgtcgacctggcggatgcggtattccttcttttcgctggctggccgcaacccggcgtaggtggcggtgaccggcatgccgcgcaggccggggatccgctcgacggcggcgtcgatcagtcgctgcagggtgtcgctgtcgacccgtgcctgttcgcggtcgtcctgttcctcggcggtggggccggcgagcaggttgccgaagacagtacgggtgaataccacgcctttggtccgctcgttgggtaccggcagcaggatgtgccgcagcagcgccgcggcggccttgtcgaagaccacgaactggcccttgcgcggatggatggcgaagctcgccgcgccgagcaggcgctgttccagttggtcaccgaagagtccggcgcagttgattacctggcgcgcgcgcagatcgccgcggcgggtatgcaacagccattcgccgccgtcgaaggcgccgtccagcacctcgacgtcgaaacaggcctcggcgccatgggcctgcgcctgttgcagataggcgagcggcgcggaccaggggtcgatcagatgctcaccggggacccgcaccgcaccgagcacattgccggccaactgcggctccagcgccaggacctcgtcgcgaccgatctggcggacgtcatcgacaccgttgccgtgggcctgctcgacgatggccggcaggcgcgccagatcctcgtcgctccatgccgccaccagggcgccggtttccagcagcggcaggttgaggcgcgcatggatgtcgcggtattcgcgatagccctcctgcatgcaggccagttcgatgctgccgggcggcgcgtcgaaaccggtatggaggatcgcgctgttgcccttgctggcaccggagaggatgtcggtgcttttttccagcaggaccacccgcgcaccttccagggcgaagcggcgggccatggcgcaacccaccacgccagcgccgatcactgcaacgtcgaagatcgcggtctttgtcgcaagcggctcagtcatcgtttctgcctgtttcttttggtatcagtttgctttttgaccgtaacactgatttttcacacagaattttatgtgaaatctgttgttttaatgtggcaactgaaagagaaacagtcaatcgattaa

SEQ ID NO: 325546 - DNA, 483 bp, Pseudomonas aeruginosa
atggacctggagtccctccgccccggggtccggtgcttccaggccggactggcccaggtagacgtggatggcgtccaccaggttgtccggcgcgcgcgccggagcgagcaggcagtgttcgaggaacgcccgtatcggcgcgccggccgccgcgctgcgcagcagggccgaggccatcgccggcgcaccggccagttgtgcggcgcggcggtcggcggcgaattcgcgcaggcggctccagtggttcacggcgaggccgaaacgttcgaggaagtacccggccaacagtcgcgccggttccagtgccgcacgttcgaagacgttggcttcctgctcctcgatggcggccagttggctcgcggcgccctggtagatcggcaggaagcgcaggctgtaatgggcgtcgcggccggcgaagtgggccagttcgtgagcgatcactgcactcagttcggcgcggtccagcaggcccagcaacggtag

SEQ ID NO: 325547 - DNA, 663 bp, Pseudomonas aeruginosa
atgagcaaccaggaaccccgggacctcgtctccaacctcgccgaaaccctcggtgccgaacacgaagagctgaaccaggcgaagaccgccgaggtcatcgcccacctggagcgggtgattgccaacgtacccccggccaccgagttcaccaatacccgcaagtacgtggtgctgggtccgctgctgagcatcgtgcccttcatcatgaccggcatgtggttctcccagggcaagccgggggtcggcgtcgtcggcttgctgctcggcctgttcgggctgttcctcggctaccagcatcgcaactccggcaagacccccttcatgcgcctgacccgtacccagctctgggccgacagcctgtcggctccggtcgagctggccgacgtcatcgatttcagcgtcaaggccgacatgctgcaaaccacccagaccctccacctgcggcccgaaacgccgctgccgacccatcgcgccgtacgccaggtgttcgcctcccaggccatggctttcaaaggcaaggacccgcgcatcaccatcatgtcggccggcctgcagagcgacggcaagaagctggactgcgacgacatggcggcgatcctcgacgcctacatccaggccgcccacgcccagcgctacctgcaacaactgcgcagccagggctga

SEQ ID NO: 325548 - DNA, 987 bp, Pseudomonas aeruginosa
atgaagaaagtggttctctacaaacgtctctccgcgcccctgatggaacgcctgcgcgaacgggtcgaggtgctcctgatcgaggagcccggccgcgacggcctggcccgcttgcgcgacgccctgcccgaggcccacggcctgctcggcgccagcctgcgcctggaggccggactgctcgacctggcaccgcgactggaagccatcgccagcgtctcggtgggcgtcgacaactatgacatcgactacctcgaccgccgcggcatcctcctcagcaatacccccgacgtgctcaccgagaccaccgccgacaccggcttcgcgctgatcctggcgacagcccggcgggtagtggaactggccggctgggtgcgcgccggggaatggaagaagagcgtcggcgccgcccagttcggtaccgacgtgcatggcaagaccctcggtatcgtcggcatgggccgcatcggcgaggccctggcccggcgcgggcaccacggcttcggcatgcgcgtgctgtaccacagccatagcccgaagccccacgtcgaagaacgctacgcagcgagctaccgctccctcgacgcgctgctcgaggaatccgacttcgtctgcctgaccctgccgctgaccgccgccaccgaaggcctgatcggtgccgcgcagttcgcccggatgcgtccacaggcgatcttcatcaacatctcccgtggccgggtgatcgacgaggcggccctgatcgaggccctggcccagcggcggatccgcgccgccggcctcgacgtgttcgagcgcgagccgctgtctcccgactcgccgctgctgcgcctgccgaacgtggtggccaccccgcacatcggctcggccaccgaggaaacccgcgaagccatggcccgctgcgcggtggacaacctgctggccgccctcgccggcgagcggccgctgaacctggtcaatccttcggcctgggcgcgacggcgaggcgcctga

SEQ ID NO: 325549 - DNA, 768 bp, Pseudomonas aeruginosa
gtgcggggcgtccgcgaagatggacggggccaccctgcggatttggtcatcggtcagcgggtaatcgctgcgcagtgccggggaacgggaagcgaaacgggatgcgagttgcatgatctttctcctgacaaaaagaggtttgctgttcacaccgcacaccggattcctagattcggaagcccagcctttcggctgttcggtgcggtcggcacgaggaacccggttggccctgttgccaccgtctttcctgagttcatcgcccgcgacggtcaggagcgcgcgaacggatgccgtcaaggaggcaagcgcagggttggtgcggcccgcaggcgcagccgaggacacggccctgcgcgccttgacggcacacgggcgcgggctacagtcgcggtgaaggtgatgaagtcaggggagacggctggacaaggcaacggccttcccccttgcgctgaccgcacggcaagcgaagcgcgcaggcccggatctggaagccgggccggaggcgtcagccgagcggagcgagggaacgatggaagcccgaatggggcgagacgccgcaggcggctcgatgcgctacgcgcacgacagcgcgaccggccatctcccaggtggccggggacgcccagccttcaaggttcgatgagcaccagacgcaacacgccccccgcatcggaaagcgggttctgctgtggccgcggatttctggccgagccggcgcagccggttcggcggcttttaggggggccaagcatcgcgcggcggggatag

SEQ ID NO: 325550 - DNA, 279 bp, Pseudomonas aeruginosa
atgagcagccatcacgactacatcatcgaaatcaccgcgcaacacgatgcgctcaagccattcgcgccggagaacggccagccgctgcgcttcaagatcggcgatgcggtgatctacaccaacgaatacggcgtgcagttccgtcgctgcgtcaccgggttctaccggccgagtggcctttgcggtcactacgcgcgtggagcgcgctatctgctgaactcgacttcgccgtgggtgccggttgcggaatccagcctgcgtcctgacgactcggcctga

SEQ ID NO: 325551 - DNA, 351 bp, Pseudomonas aeruginosa
atgaacaacgtactcatcactgccgagcagcgcatcgtgctgctggccaacggccgcgcatcgctggagaacccggacttcgatccggccccggtggtcaagctgttcacgccagacggcggcgcgacctggctgctgaccgagattgatcccgatgaccacgaccacgctttcggtctttgcgacctgggcctgggcgagccggaaatcggctgggtcagcttgaacgagctggcgagcttgcgcggcgggctgggcctgccgatcgagcgcgacctgtctttccgggcagagaaacgtctaagtggctatgcgcgtgatgcgcggctggccgggcgaatcgtcgtctga

SEQ ID NO: 325552 - DNA, 1311 bp, Pseudomonas aeruginosa
atgctcgctgtccttaagaaccgcacctatcgccacctgttcgctgcgcaagtgatcgcgctagtgggcaccggcctgatgactgtggcgctgggcctactcgcctacgaactggcgggcgcggacgccggagcggtgcttggtacggcgctggctatcaagatgcttgcttatgtcggcatcgccccgatcgctcaggcgttcgccgaccgcttgccgcgtaggtcgctgctggtcgcacttgacctgattcgagccgccgtggctctctgcctgcccttcgtcaccgaggtctggcaaatctatctcctgatcttcgtgttgcaggcggcttctgccggattcacgccgacctttcaggcgaccatcccggacatcctgcctgacgaggaggagtacacgaaggcgctgtcgctctcgcggctggcctacgaccttgaaagcctggtttccccgatgctggcggctgcgctgctgaccatcatcagcttccacaacctgtttgccgggacagtgcttggcttccttgtctcggccgcgctggtggtcagcgtggtgttgcccgcctcgacacccggcccacgtcgcggcatctgggagcgcaccacgcggggcgttcgcctctaccttgcaacgccgcggctgcggggacttctggcagttagccttgccgtgtcagcagcaggcgcgatggtgatagtgaatacggtggtcatcgtgaaggcacgcttcggccttggcgaagcagaagtagcttgggctttggcggcgtttgggggcggctcgatgatcgctgcatttgcactgcctgggctgctcaacaaattagcggatcgacctgtcatggtcacgggagcggcggtgctggttatcggtacggccatcggggcgctgattccgtcttatgttctgttgcttccactttggctggtgattggtttcggctacagcgtggcacaaacgccttctggtcggctgctgcgccgttccgcccatgccgaggatcggcctgcgctattcgctgcacagtttgcgctgtcacatgcctgctggctgatctgctacccgctggcgggacgcttcggtgctgcctttggactgcaatcaaccttcatcgttatgtcattgattggccttgccggtgtagtgcttgcgctaatgctttggcctgccggcgatccatcggatatcgcccatgaccacccggatctaccgccggatcatccgcatatgcgcgaacattcaggccagggccgacaccaccaccttctgatcgtggacgacctacatcaaggttggccacgcatgtag

SEQ ID NO: 325553 - DNA, 507 bp, Pseudomonas aeruginosa
atgtcgcaactctccctctctctcgataccccgttgatggtgcgcgatggccgtgggcgctatcggccggcggatgccgaccagattctggaagctgcgcgccaggtcatcgaccagaagatgcagcgcggtgcatcgttcagttcgccagcggcggtcaaggactacctgcgcgccaagctggctggcttcgagcacgaagtctttgccgtcctgtttctcgatacgcgccatcggctgatcgactacgtggagatgtttcacggcacgatcgacgccgccgaggtgcatccgcgcgaggtggtgaagcaggcgctgcggctcaatgcggcggcggtcatcgtttcgcacaaccatccgagtgggaaccccgagccgagcgcggccgacagagcgatgaccgcgcagcttcggcaggcgctggcgctggtggacgttcgcacgctggatcacatcatcgttgcggggactcgcaccacgtcattcgccgagtgcggcctgatttga

SEQ ID NO: 325554 - DNA, 1116 bp, Pseudomonas aeruginosa
atgagcgcccggacgcccaaggccgccaaagacgccgccctgcctgccggctacgccggcatccacggcggcatcgtggaactgctggacgccgcgcgccaggcggcggcgcgcagcgtcaatgcgctgatgacggccagctattgggaaatcggccgccgcatcgtggaggccgagcaacagggcaagcggcgcgcgggctatggcgagcagttgatcgcccggctgtccgccgacctgaccgcgcgcttcgggcgcggtttcagcccggacaatctggagaacatgcggcggttcttcgccgacgagctgcctgccgagatttccgagacagtgtctcggaaattcgccctggccgagctggcgcaggtgttcccgctgccgtggtcggcctacgtgcggctgctggcggtcaaggatgaccacgcccgccggttctacgaggctgaggcgctgcgtggcggctggagcgtgcgccagcttgaccggcagatcggcagccagttctacgagcgcacggccttgtccaaggacaaggcggcgatgctggtcaagggcgcagcgccgaggcccgaggatgccgtcaggcccgacgacgccatcaaagacccctacgtgctggagttcctgaacctcaaagacgagtattccgaatccgatttggaggccgccttgatccagcggctggaggattttctgctggagctgggcgaagggttcaccttcgtcgggcggcagcggcgcttgcgcatcgaccagacttggtatcgggtggatcttctgtttttccaccgacggctgcgctgcctggtcatcatcgacttgaagctgggcagcctgtcccatgccgacgtgggccagatgctcatgtattgcaactacgccaaggagcattgggcctatgccgatgaaaacccgcctgtgggtttgatcctgtgcgccgacaagggccatgcgctggcgcggtatgcgctggaaggcttgccgtcgaaggtgatggcggcgaactaccgtaccgtgctgccggatgccgagctgttgcagaaggaattggagactacgcggcgcttgctggaatcgcgcacgccgaagcagcccaagaaactcccgcagtaa

SEQ ID NO: 325555 - DNA, 1206 bp, Pseudomonas aeruginosa
atggcgaaaatcaaactcaccaagtccgtcgttgacacggcacaggcgcgaacctgcgacgtggaactccgagacacgctcgttccaggcttcttgtgcaaggttacaccaaccgggcgcaaggtattcatgcttcagtaccgcacgaactccggcgtgcggcgcaagccatcgctcggccagttcggcgagctgacggtcgaacaggcccggtcgctggcgcaagactggctggccgaagtccggcgcggcggcgaccccggactggacaaggcggatgcccgcaaggccccaacggtcaaggagctgtgcggtcggttcatggatgaccactccaagccgcacaacaagccgagcacccaggccggctatcagtaccagatcgacaccttcgtcattccggccttcggcaccaagaaggttcacgaagtcacgcgcaacgacattaccgcgctgatgaagcgcatggagaagtcgcccacccaggccaatcgggtgctgtcgctcgtgcgcaagatgttcaatctggccgagctgtggggctaccggccggacggctccaacccgtgccgccatgtgcccaagtacccggagaaaggctcgacccggctcattaccgatgaccagatggtcaagctgttcgcctatctggacaaggccgaggccgagaacttggagcatcccatcctcttgctggccgtccgactgcaattcgagttcgccgcgcgcatgtcggaaatcctgctgttgcagtgggattggctcgacctgcccaatggccgggtggtctggccggacagcaagaccggcgatatgtccaagcccttgagcgaggaagccaagcggcggctgacgagcgccccccgctatggcgattcgccctatgtctgcccggcgatcatcgaccaccgccagcccctcagcccccacacctactatcaggggtggcggcgcatcctcagcaatgccggcgtgccgaaggtcggcacccacggcattcgccatcgctccgcgaccgacattgccaattcaggcgtcccggtcaaggtcggcatggcgctgacagcgcacaagaccgtggcgatgttcatgcgctacgtccacaccgaggacgatccggtgcgccaagccgccgaactggtggcgacccgtcggcagaccatcaccgggaagcggcaaccgcagccgcaggaggccatggcatga

SEQ ID NO: 325556 - DNA, 1707 bp, Pseudomonas aeruginosa
  misc_feature (32)..(41): n is a, c, g, or t
atgaatcagccgagctatacctcgggccgccnnnnnnnnnnccaggatgtcgccttgctggcgaccaccgtcggcgacgccttcgatgccaccgtcgcgcatcatgccgagcgcgaggcgctggtggtgcggcatcaacgcctgcgctacagctggcggcaactggcggagcgggtcgatacctacgcccgcgccttcatcgccctgggcctgcgccccggcgagcgcctggggatctgggcgccgaactgcgccgaatggtgcattacccagttcgccagcgccaaggtcggtgcggtcctggtgaacatcaacccggcataccgcagcagcgagctggaatacgctctcaagcagtccggttgcagctggctgatctgcgccgacgccttcaagaccagcgactaccacgcgatgctcggcgacctgctgccggagctggcgcgggcgcgtccgggcgaactggccagcgagcgcctgccggagctgcgcggcgtgatcagcctggccgagcgggcgccggcgggcttcctgcactggcagggcctgccggggctggccgccgcggtaggcgccgaggaactgcgccagcgccaggcctcgctgcagttcgacgagccgatcaacatccagtacacctccggtaccacgggcttccccaagggcgccaccctcagccactacaacatcctcaacaacggctacatggtcggcgaaagcctcggactcggcgcggaagaccgcctggtgatcccggtgccgctgtatcactgcttcggcatggtgatgggcaacctcggctgcgtcacccacggctcgaccatgatctacccggcgcccagcttcgacgccgaggcgaccctgctggccgtggccgaggagcgcgccaccgcgctgtacggggtaccgaccatgttcatcgccgagctggatcatccgcgccgccgcgaattcgacctttccagcctgcgcaccggaatcatggccggcgccacctgcccgatcgaggtgatgcggcgggtcattggcgacatgcacatggccgaggtgcagatcgcctacggcatgaccgagaccagcccggtgtcgctgcagaccggtccggacgatggcctggagctgcgcgtgaccactgtcggacgcacccagccgaggctggagagcaagatcgtcgaccagacgggcagggtggtgccgcgcggcgagatcggcgagctgtgcacccgcggctacagcgtgatgctcggctactggaacgacccccaggccaccgccgaggccatcgacccggcgcgctggatgcacaccggcgacctggcggtgatggacgacgacggctacgtgcggatcgtcgggcgcagcaaggacatgatcatccgcggcggcgagaacatctatccgcgcgaactggaggagttcttcttcactcacccggcggtggccgacgtgcaggtgatcggcatccccgacgagcgctatggcgaggaaatcgtcgcctggatcaagctgcatccgggccaccacgccgatgacgaacagttgcgggcgttctgcaaggcgcgtatcgctcacttcaagatcccgcgccacttcaggttcgtcgacgagttcccgatgaccgttaccggcaagatccagaagttccgcatgcgcgagatcagcatcgaagagattcgcctactcgcgctgcgccaggggcgcgattga

SEQ ID NO: 325557 - DNA, 1557 bp, Pseudomonas aeruginosa
atgacctattcgagcaagctctcctcgcattatctggaactcgcggaacagccgatttcaaaggatgtctttgcgggtgaggatgtgcgtttttccagcgaatacgaggcgctggaaaatgagctgggcaaggcgctctcgctccatgagaacggccagaccgactggttgaaaatcctggaaaacagcgaagcgctgcttagtgcccaatccaaggacctgcgtgttgcagcctggttgacctgggccctctaccaacgggaatcctttcccggtttgctggccggactgggattgctggaacgtctgtgcagccggcattgggtcgagatccatccgctcaaggcgcgcactcgcgccgcggccattgcctggctggtgccccggctggagcaggcgctgaacgagaacgtaccgatcaaggagcaactccccctgttccggcgtctcgccgagcacctggaaaaactcgataccgcgctgaccgcgcaactgggcgacgacgcgcccttgttgctgccgatcagccgacgcctttcgggcatgctccagcgcgccgccgacaaccagcccgaacctggcgtggtcggcgccgtggtggcccaggtcaagcaggcggccagccagttgctggcgccgggtgcgcccatcgacaacgagcgcgacgcccacaaggccatgcgcgcccagcaggaggccgcacgccccctgtgcgcctggtggctgaagcagaaagccaccgatctgcgcgcgctgcgcctcaaccggacgatgctctggctgcccatcgagtccatgcccgagcgcaatgccgaacaggtcaccgcgctaaggggagtgccggcggacaagctgaaaagctaccaggagcgtttcgcccagggcctgtacgccgatctcctggtggagctggaggcgagcctggcacgggcgccgttctggttcgacggccagcgcctggtctgggagtgcctgcaagggctcaacgccgagcaggcgatgcgggaagtcgaaatgcatttcgccttgctcctgcagcgtctgccggggctggtggagctgcgtttccacgacggcagcgcattcgccgatgcggccacccgtggctggatcagcgtccatgtcatgccccatctccagaacgacagtgcgccgcgcaaggtcgagaccgtggccctgcaggccgaatgggacgtcgccctggacgaggtccagccggtgttgcgcaaggacggcctgaaggcggcggtacaggtgttgaagcagggcatgaagcgcgcccacggcgggcgcgcccggttcttctggcaactgagcctcgcgcgactgtgcttcctggcgaagaagtacgagctggccaagacccagctggagagcctcgaccatcagttgcacgaatcgggattgcacgcctgggagcccgatctggcgctggatgtactgcacctgctgcatagctgctgcgagctgttgccgcagaaccacgccgtgcgagaacgcaaggaagacatttatcgcaggctgtgccacctcgatctcgaggtggtgctcgaatag

SEQ ID NO: 325558 - DNA, 876 bp, Pseudomonas aeruginosa
  misc_feature (22)..(31): n is a, c, g, or t
atgatcaaggaaagggaatacnnnnnnnnnnaggacgagaagaccgtcctcctcgatcaccagggacaggtaccggcccaggggccgctgaccgatttcgccgaaccgccgcgcttcgagcagctcgaggagcggatgatctacgcggcgcgcctgcgtccgggcgaggccttcaacgtcagcctgaacccgctggtggcggcggcttccgaactgctttcggaagtggtccggctcaagcacagcagcgtgctggagaaccttgcggcgctcaaggagcggttgacctccgccatgaagctcttcgaattccgcgccgtgcaggatggcgtggaaaacagccaggtcatggcggcgcgctacgtgctgtgcacggtggtcgacgaggcggtggtgaccaccccgtggggcaacgaaagcgaatggtcgaagatcagcctgctgagcagcttccataacgagaccttcggcggcgagaagttcttccagttgctcgaccggctgtcgaagaacccggtcaagcatctgccgatgctggagctgatgtacctctgcctggccctcggcttcgagggcaagtaccgggtgatggctcgcggcgtgctcgacctggacggtatttccgatgcgctctaccggcagatccgccagttgcgcggcgacgtgccgcgcgaactgtcgccgcactggcaggggctcagcgaccagcgtcgcggcctggtgcggatcgtgccctggtggatggtggcgctgttcaccctggtctgcctggtggtgatgtattcgggattcgcctgggttctcggcgagcaacgcgacacggtgctgcagccttaccagtcgctcgatgcggcggcaggacagcccggttcgtaa

SEQ ID NO: 325559 - DNA, 1092 bp, Pseudomonas aeruginosa
  misc_feature (1017)..(1026): n is a, c, g, or t
atgcccggcgccctttcccatatccgcgtactcgacctgtcccgtgtcctggccggcccttgggccgggcagattctcgccgacctcggcgccgaggtgatcaagatcgagcgccccggcagcggcgacgacacccgcgcctggggcccgccgttcctcaaggatgccgaaggcaacgacaccagcgaggcggcctactacctgtcggccaaccgcaacaagaagtcggtgacggtggacttcacccagccggaaggccagcgcatcgttcgcgaattggcggccaaggccgacatcctgctggagaacttcaaggtcggcgggctcaaggcctatggcctcgactatgaatcgctgaagcaggtcaacccgaagctgatctactgttcgatcaccggcttcggccagtccggcccctatgccaagcgcgccggctatgacttcatgatccagggcctgggcggcctgatgagcctcaccgggcgcgccgacaacgaggaaggcgccggtccggtgaaggtcggcgtggcgctgaccgatatcctcaccgggctgtactcctccaccgcggtgctcgccgccctcgcccaccgcgacgtcagcggcatcggccagcacatcgacatggccctgctcgacgtgcaggtcgcctgcctggccaaccagaccctcaactacctgaccaccggcgtgccgccgcggcgcctgggcaacgcacacccgaacatcgtgccgtaccaggacttccccaccgccgacggcgacatgatcctcacggtcggcaacgacagccagttccgcaagttcgccgagctggcagaccacccggaatgggccgacgacccgcgcttcgccaccaacaaggcgcgggtggccaaccgcgaggtgctgatcccgctgatccgccaggccacggtgctgcacaccaccgccgagtggattctttccctggagcgcgccggcgtgccctgcgggccgatcaacgacctggcgcaagtgttcgccgacccgcaggtnnnnnnnnnnaggtgcaggcccgcggcctgcgcgtggagctaccgcacccgctggccgggacggttccgcaggtag

SEQ ID NO: 325560 - DNA, 1365 bp, Pseudomonas aeruginosa
  misc_feature (332)..(341): n is a, c, g, or t
atgagcactgcccggaacgtcctgcaatccacccagcgacacatcgatggccagcgcctctggcaatcgctgatggatctcgcccgcctcggcgccaccgccaagggtggggtctgccgcctggccctgagcgatctcgaccgccaggcccgcgatctcttcgtgcaatggtgcgaagcggccggctgcacggtcagcgtcgatcgggtcggcaacatcttcgcccgtcgtcccgggcgtaacccggacttgcccccggtgatgaccggtagccacatcgacacccagcccaccggtggcaagttcgacggctgcttcggggtgatggccgnnnnnnnnnngggctgggtgtcgatgtggctaccggtcatcaccgggggcaagttcgacggctgcttcggggtgatggccggcctcgaggtgatccgcaccctcaacgacctcggggtggaaaccgaggcgccgctggaggtggtggtgtggaccaacgaggaaggctcgcgcttcgcgccctgcatgatgggctcgggcgtattcgccgggaagttcaccctggaggagaccctggccaagcgcgatgccgacggtgtcagcgtaggcgaggcgctggacgccatcggctacgcgggagcgcgcgattgtctcggacatccggtgggcgcctatttcgaggcgcacatcgaacaggggccgatcctcgaggacgaggagaagaccatcggcgtggtgctcggcgcgctcgggcagaaatggttcgacctgtccctgcgcggcgtcgaggcacacgccgggccaacgccgatgcacctgcgcaaggacgccctggtcggtgccgcggcggtggtcgaggcggtcaatcgcgcggccctcggccatcagccgcatgcttgcggcacggtcggctgcctgcacgcctatcccggttcgcgcaacgtgatacccggcgaagtgaagatgaccctggacttccgccatctgcaaccggagcgcctggactcgatgatcgccgaagtccgccaggtgatcgccgctacctgcgagaagcatggcttgcaatacgagctggtgccgaccgccgatttcccgccgctgtacttcgaccagggatgcgtcggcgcggtgcgcgaggcggcgcaggcgctgggcatgccgcagatggacatcgtcagcggcgccggccacgacgcgatcttcctcgccgaactcggtccggcggggatgatcttcgtgccctgcgagaacggcatcagccacaacgagatcgagaacgccagccccgacgacctggccgccggctgcgcggtgctgttgcgggccatgctcaaggcctccgaggcgatcgccggcggccgcctggcggcctga

SEQ ID NO: 325561 - DNA, 1368 bp, Pseudomonas aeruginosa
gtgatcgattccctgaaccacctcccccgtccggacgccggcgcggacacgctcgccgagcgcttcgccgacctcgcgccgccgctcaacgcccgccaggccgccctggaaagcgcccgctgcctgtactgctacgacgcgccctgcgtcaacgcctgcccgaccgagatcgacatccccgggttcatccgcagcatcgcccaggagaatgtccagggcgcggcgcagaagatcctctcggcgaacatcctcggcggcagctgcgcccgcgtctgccccacggaaatcctctgccagcgggcctgcgtacgcaacaacgcccaggaatgcgcaccggtgctgatcggccagttgcaacgctacgccctcgaccacgccggcttcggcgaacatccgttcaagcgctcgccggccaccggcaagcgcatcgccgtggtcggcgccgggccggccgggctgtcctgcgcccaccgcctggccatgcacggccacgacgtggtgctcttcgaggcccgcgccaaggtcggcggcctcaacgagtacggcatcgcccgctacaagctggtggacgacttcgcccggcgcgaagtggaattcctcctgcagatcggcggtatcgaactgcgccacggccagcgtctcggcgacaacctggcgctcggcgccctgcacgacgagtacgacgcggtgttcctcggcatcggcctggccgccagcaagcgcctcggcctggaagacgaggacgcccccggcctgctcgccgccaccgactacatccgcgagctgcggcagagcgacgacctgctcgacctgcccgtcgccgaccgttgcatcgtcatcggcgccggcaacaccgccatcgacatggcggtgcagatgagccggctcggcgcccgcgacgtcaacctggtctaccgccgtggcttcgaggaaatgggcgccaccggccacgagcaggagatcgccaaggccagccaggtgcgcctgctgacctgggcccgaccggaacgggtactgcttgacgagcaaggccgggtgcgcggcatgcgcttcgcccgcacgcgcctggagaacggtcgcctgggcgacaccggcgagcacttcgaactggccgccgacgccatcttcaaggccatcggccaggccttcgaaggcgccagcctgggcgatccgctggcagcgcaactgcggcgcgacggcgagcgcatccaggtcgacggacagatgcgcaccagcatccccggcatctacgccggcggcgactgcgtggcgctcggcgaggacctcaccgtgcaggcggtgcagcacggcaaactggcggcggaagcgatccacgcccaactcatgctcaacgtggaggctgcgtga

SEQ ID NO: 325562 - DNA, 648 bp, Pseudomonas aeruginosa
atgtcgaccaccaccctgctgcgccttcccgatctccaggggcagtctttcgacgtctatttccgctatgacgagttcggcgccgacacccattcgccgccgcacacccacgcctggggccagctcaactatgcagcccatggcgtgatgcagctggagatcgacggccagcgcttcctctcgcctccgcaatacgcggtatggataccaccggagcgggtgcacagctgctacaacagccaggccatcgtctaccgctcgctgtacctctccgccgaactgtcacgacgcctgccggcgacaccctgcaccctggcgatcagcgcgatcctcaaggcaatcctctcggacttcgccgagcgcggggtcaagctggcgcaatgggcgcagcaggtgcacagcaccgagcgaaccctggcccgacactgccagcgcgaactgggcatgaccttcggcgaatggcgccaacgcctgcgcttcctcgcggccatcgaggcgctggaagccggcagggggatccagcagatcgccttcgacctcggctacagcagcccctcggcgttcatctcgatgttccgccggctggccggcaccacgccggaacaataccgcctggccagccgcgcccaggacatgccgatgctgtaa

SEQ ID NO: 325563 - DNA, 609 bp, Pseudomonas aeruginosa
atgacgcttgcgcaggtcggcatcgtcggcgaggaaacgttgcagggtgcggaactcgggacgctccagcaatccgggaagcagacgcatcaggcgccaggtcagcggcgccttgtccagttcggaaacctcgggaatgctttcgcggcccagcaccgcgcgataggcctgccagaggaactgcgccggcaactgcacctccagcgccgcggcgatgccgccaccgccgccaccgtcctcgcggggatcttcggccaatgccagcttcaaccattgggcgatgccgttgctgtgcaccaggacccgctcgctttccagcggcgccagcggatagcggcgcatccaggaaacggcgaggtcgcgcaggtcgtccaggcgattgccgtggacgatcatgaatccgggcgtgagggcggtggttcccaagggttctggcatcggtacggctattcctggcgcaaggctctggcgaaagaggtcaggatcgggcggcgacgaagcgtcgttccagttcgaggctgtcggccatgcggaaatcgctccagcgctcgctcaggccgagatggctgtccgcctggcaatccggggcactggcgcaacggcgggtga

SEQ ID NO: 325564 - DNA, 1314 bp, Pseudomonas aeruginosa
atgaacgctttgaaaggccgggacatcctggcgcttggttttatgacctttgccctgttcgtcggggccggcaacatcatcttcccgcccatcgtcggcttgcagtccggcccccatgtgtggctggcggcgctgggcttcctgatcaccgcggtggggctgccggtgatcaccgtgatcgccctggccaaggtcggcggttcggtcgacgccctcagccatccgatcggcaggtatgccggcggcctgctggcggcggtctgctacctggcggtcggcccgctgttcgccattccgcgcaccgccacggtgtccttcgaggtcggcgtggtgccgctgctcggcgagagcggcacggcgctgttcgtctacagcctggcgtacttcctcctcgccctggccatctccctctaccccggtcgcctgctggacaccgtcggacgcttcctcgccccgctgaagatcctcgccctggcgattctcggcgtcgccgccttcctctggcccgccggcccgatcggcacggcccagccggagtacacccaggccgcgttctcccagggtttcgtcaacggctacctgaccatggacaccctcgccgcgctggtcttcggcatcgtcatcgtcaacgccatccgttcccgcggcgtgcagtcgccgcggctgatcacccgctacgccatcgtcgccgggctgatcgccggcgtcggcctggtgctggtctacgtcagcctgttccggctcggcgccggcagccatgccatcgccgccgacgccagcaacggcgcggcggtcctgcatgcctacgtgcaacataccttcggcagcctcggcagctcgttcctggcgggacttatcgcgctggcctgcctggtcaccgcggtcggcctgacctgcgcctgcgccgagtacttctgccagcgcctgccgctgtcctaccgcagcctggtgatcatcctggcagggttctccttcatcgtttccaacctcggcctgaccaagctgatccaggtctcgatcccggtgctcaccgcgatctatccgccctgcatcgtgctggtggcgctgagcttctgcatcggcctctggcattcggcgacgcgcatcctcgccccggtgatgctggtttccctggcgttcggcgtgctcgatgccctgaaggcggcgggcctgggccaggacttcccgcaatggctgctgcacctgccgctggccgaacagggcctggcctggctgatcccctcggtcgccactctcgccgcctgcagcctggtcgaccgcctgctgggcaagcctgcgcaagtcgccgcctga

SEQ ID NO: 325565 - DNA, 240 bp, Pseudomonas aeruginosa
atggccaaggcactcatcagcgtactgttgttctccctcgccctcgccggctgcgccagcgactacaacccctctcgcccgtacagcagcgacgaggtcaggcaactggcgctggaagacctggcccggcgcagcctgtcgttcgaggaataccaggccaagcgtcaggcgattctcgaggaaaaaccgcaaaccgccgtcagccagtccaacgccgccctacgcagtaccgccatctga

SEQ ID NO: 325566 - DNA, 1014 bp, Pseudomonas aeruginosa
atggcgacaatgaaggacgtggcggcgatggcgggggtttccttcaccaccgtatcgcatgtggtgaacaggacgcggccggtcagcgacgcggtgcgcaagaaggtcgaggacgccatcgcgcagctgcactacgtgcccagcgcggtggcgcgctcgctgaaggtgcgcaccacctcgatcatcggcctgctggtgccgaacagcaccaacccgtatttcgccgagctgtcgcggggcatcgaggattgctgcgagcgcaacggctactgcgtgatcctctgcaactccgacgacaacccgcagaagcaggccaactacctgcgcgtgctccaggagaaacgcatcgacggcctggtcctggcgtccgccggcggcgacggcgcgctggccaaggggctggcgaacatgcgcacgccgaccgtgatcgtcgaccgcgaggtggaaggcgtggaagccgaccgggtgcagatcgaccatgagatgggcgcctacctggcgacccgccacctgctcgaactgggccatcgcgacatcgcctgcatcggcgggccgctgtcgaccaaggtctcgacgctgcgggtcgagggctaccggcgggcgatggccaaggccggcctggaggtgcgcccgcagtggctgctggaaagcgagttcagcagccccggcggctaccacgcggcgctcggcctgctgggcggcgagggcgagcgaccgacggcgatcgtcgccggcaacgacatgatcggcatcggcgtgctgcgcgccgcggccgagctgaatatcagggtgccgcacgaactgtcggtgatcggcttcgacgatatcgagctgagccgcttcgtgtttcccgccttgaccaccgtgggccagtcgatccgcctgctcggcgagatcgccgcgcaactgctgctgcaacgcatcgccgagcgcgaggagccgatgcagcggcgggtggtggcgccggcgctgatcctgcgcgaatccaccgcgccgccgctggtgcgggtctga

SEQ ID NO: 325567 - DNA, 837 bp, Pseudomonas aeruginosa
atgcgtgccctgaccgccctgagccgtttcgtcagcgccagcttcccgttctgggtcctgctgttcgccatcctcgccttcttccggccggcctggttcctcccgctcaccgtcgccatcgcgccgctgctcggcctggtgatgttcggcatgggcctgacgctcaagggcgaagacttccgcgaggtcgcccggcaccccatacgggtgctggtcggctgctgccccggcggcaccgcttccaacgtgatgacctggctgtcccgtggcgatgtcgccctgtcggtggcgatcacctcggtgaccaccctgctcgccccgctggtcacgccggcgctggtctggctgctggcctcggcctggctgccggtgtcattcgcggcgatgttcctgtcgatcctccaggtggtgctgatgcccatcgccctcggcctgctggcacagcgcctgctcggcgagcgcacccggcaggtggcggaggtgctgccgctggtctcggtattcagcatcgtggtgatcatcgccgcggtggtggccgccagccaggcgcggatcgccgagtccggcctgctgatcatggccgtggtgatgctgcacaacggcttcggcctgtcgctcggctatctcaccggcaagctgaccggcatgccgctggcacagcgcaaggccctggccatcgaagtcggcatgcagaactcggggctcggcgcggcgctggccaacgcccatttctcgcccctggcagcggtgcccagcgcgctgttcagcgtctggcacaatctctccggttcgctgctggccgccctgttccggcgtatggaagatacgccgcgttga

SEQ ID NO: 325568 - DNA, 1260 bp, Pseudomonas aeruginosa
atgccgcgcacctggccagggtcgagcagaccctcgccggatacccgccgctggtcttcgccggcgcagctcgccgaagtcaccgccggacgcgccttcttgctccagggcggggattgcgcggaaagcttcgccgaattttccgcggcgaagatccgcgataccttcaaggtactgttgcagatggcggtggtaatgaccttcgccgccggctgcccggtagtgaaggtcgggcgcatggccggccagttcgccaagccgcgctcctccggcgacgaaacgcagaacggcgtgaccctgcctgcctatcgcggcgacatagtcaacggcatcggcttcgacgagaagagccgcgtgccggacccggagcgcctgttgcaggcctaccaccagtccaccgccagcctcaacctgttgcgcgccttcgcccagggcggcttcgccgacctgcaccaggtgcaccgctggaacctcgacttcatcgccaactcggcgctggccgagcgctaccagcaactcgccgaccgcatcgacgagaccctcgccttcatgcgcgcctgcggcctggacagcgcgccgcagctccgcgaaaccagcttcttcaccgcccacgaagcgctcctgctgaactacgaggaagccctgacccgccgcgacagcctgaccggcgagtggtacgactgctcggcgcacatgctctggatcggcgaccgcacccgccagctcgacggcgctcatgtcgagatgctgcgcggcgtaggcaatccgatcggggtcaaggtcggaccgagcatggacagcgaggagctgatccgcctgatcgatattctcaacccggacaacgatccgggccgcctcaacctgatcgtgcggatgggtgccgacaaggtcggcgaccacctgccgcgcctgatccaggccatccagcgcgagggccgccaggtgctgtggagttccgacccgatgcacggcaataccatcaaggcctccagcggctacaagacccgcgacttcgcccgcgtgctcgccgaagtccgccagttcttcgaggtgcaccaggccgaaggcagctacgccggcggcatccacatcgagatgaccgggcagaacgtcaccgaatgcatcggcggttcgcgaccgatcaccgaagacggcctcagcgaccgctaccacacccactgcgacccgcggctgaacgccgaccagtcgctggagctggccttcctgatcgccgaaaccctgaagcaggtacgccgctga

SEQ ID NO: 325569 - DNA, 453 bp, Pseudomonas aeruginosa
atgcgcgaagcgttcgtgatcttcctcctggcgctggccggctacatgttctggcgcctgttccggcgcccgccgcagggcggcgcgacgccgcgctacggtttgccctggatgggcgtgctgggccttggcgcaggttcgctcggcgggcttttcggggtgggcggcggggtgctggcgacaccggtgctgacttcggtgttcggcctcgcccaggtcgtcgcacagggcctcgcgctggccctggccgcaccgagcacggcggtggcgctggggacctacgccatgcacggtcatgtcgactggcggatggggatccccctggcgctgggcggcctgctgagcatttcctggggcgtgaggctggcccacgccttgcccgagcgcagcctgcgcatggccttctgtgccttcctcgcgttgtgcgcggtgctcctgctggtgcgcggttga

SEQ ID NO: 325570 - DNA, 1134 bp, Pseudomonas aeruginosa
gtggtcctgctggaagcgcaccggatcggctggggcgccagtgggcgcaatggcggccagttgatccgcggcgtcggccatgacgtcgagcagttcctcccggtgatcggcgccgacggcgtgaaggcactcaagctgatgggcctggaggcggtggagatcgtccgtcgccgggtcgagcaatacgccatcgactgcgatctgcgctggggctactgcgacctggcgaacaagcccggcgactaccagggcttccgcgaggacatggaggaactccaggccctcggctatcgccacgagatgcgcctggtgccggccgcggagatgcgcagcgtggtcggctccgatcgctacgtcggcggcctggtggacatgggctccggccacctgcacccgctcaacctggtcctcggcgaagccgccgctgcccagtcgctgggcgtccgcctgttcgagcgctcgccggtgacgcgcatcgactacggcacggaagtccaggtgcataccgccgccggcaaggtgcgggcgaagaccctggtgctgggctgcaacgcctacatgaacgacctcaacccgctgctcggcggcaaggtactgccggccggcagctacgtgatcgccaccgaaccgctggacgagcaactggcccgccaactgctgccgcagaacatggcagtgtgcgaccagcgcgtggccctcgactactaccggctctccgccgacaaccgcctgctgttcggtggcgcctgccattattccggccgcgaccccagcgacatcgccgcctacatgcggccgaagatgctggaggtattcccgcaactggcgaacgtccgcatcgactaccaatggggcggcatgatcggcatcggtgccaatcgcctgccacagatcggccgcctgccggggcagcccaacgtgtacttcgcccaggcctattccggacacggggtgaacgccacgcacctcgccgggcagttgctcgccgaagccatcggcggccagcagagcgacggcttcgacctgttcgccaaggtgccgcacatcaccttccccggcggcaagctgctgcgctcgccactgctggcgctgggcatggcctggtaccggctgaaggaaaaactcggtagctga

SEQ ID NO: 325571 - DNA, 1719 bp, Pseudomonas aeruginosa
atgtcgagcaagaaagtcgccgagatcgtcgtggaaaccctggaagccgccggcgtccgccattgctatggcatcgtcggcgacaccctcaaccatgtcaccgacgccatccatcgcagccagatccagtgggtccacgtgcgccacgaagaggcggcggccttcgccgcgggcgccgagtcctacatcagcggacgcctgaccgcctgcgccggctcctgcggaccgggcagcctgcacttcatcaacggcgtctacgaggcccagcgcaaccgcgcgccgatggtgctgatcgccagccagatcgtcaccccgcaactgggcatggagtttccccaggaggtcgacttcaaggcggtctacgccagttgctcggtgttctgcgagcaggtgcacagcccggaacaggcgcgccgggtgctggccctggcctgccaggcggcgctcaaccggcgcggcgtggcggtggtgatcctgccggccgacatcagccaggccacggtgaaggacgacctgccgttctcggtgcatttcccgcaaccggtgctgcgccccagcgacgccgaactgcaggatatcgcccgcctgctggcccacggcaagaagatcggcatctacgccggctccggctgccagggcgcccacgacctgctggtggccctcgccgaccgcctcaaggcgcccatcgcgcacacgtcgcgggccaaggacttcgtcgagtacgacaaccccttcaacatgggcatgaccggtatgctcgggatcgagtccggcttccacatgatgaccgagtgcgacaccctcctgctgctcggcgccgacttcgcctgggcgcagttctatccgcagaaggccaccctgatccaggtcgaccgcgacggcagccacctgggtcgccgccaccccgtcgatctcggcgtggtcggcgacgtgatccccaccctcgaggcgctcctgccgctgctcgaagtccgcgaggaacgcagcttcctcgacgaatgcctgaagcaccgcgagcgctcgctgcggacgctggaaaaagaggagcaagccggcaagggcgagctgatccacccccagcacctggtcagcctgctcgaccagcacgccagcgaggacgccctgttcaccgccgacggcggctcggcgatggtctggctgttgcgtcacatccacagcaacggcaagcgccgcaccctcaccagcctggtccacggcaccatggccaacgccatgccccaggcgctgggactgaagaaggcctaccccgagcgccaggtgatctcgatctccggcgacggcggcctggccatgctgctcggcgacctgctgacggccatccaggaaaaactgccgatcaaggtagtggtgctgaacaatgcctcgctgaacttcgtcgagctggaacagaaggtcgagggcctgctggacaactacaccgacctgctcaacccggacttcgcccggctcgccgaggtgatcggcttccacggacgcaaggtgacgcgctccgaggatctcgaggcggcggtgcaggagttcctcgcccagcccggtccggcgctgctggacgtgcataccaaccctgcggagctggtgatgccgccgaagatcgagttcggccaggtcgccgacaccgccctctacgccgccaaggccgtgctcagcgggcgcttcaaggacgtcgagacgctactggtgaacaacctgctgaaatga

SEQ ID NO: 325572 - DNA, 357 bp, Pseudomonas aeruginosa
ttgctcaaggaacagtgggccggcgcggtggacaccgtcggcggcgacatcctcttcaacgtggtcaagtcgttgcagtacggcggcagcgtcgcctgctgcggcctgaccgccggcgccggcttcaaggcctcggtgctgccgttcatcctgcgcggggtcaacctgctcggggtggactcggtggagctgccgctggtggtcaaggcatccatgtgggacaagctgtcgctgcaatggaagctcgacaacctcgaagaggtggcgcgcgagatcgccctcgaagagctgccgggggcgatcaaccagatcctcgccggcaagctggtcggccgggtgctggtcaacctcggctga

SEQ ID NO: 325573 - DNA, 1389 bp, Pseudomonas aeruginosa
atgcataagagaacgtacctgaatgcatgcctggttctcgcgctggctgcgggcgcgagccaggcctcggccgcgcccggtgcgagcgaaatggctggcgacgtcgccgtgctccaggcttctccggcgagcaccggccacgcccgcttcgccaaccccaacgcggcgacctcggcggccggcattcacttcgccgcgccccccgcccgccgcgtggcccgcgccgcgccgctggcgccgaaaccgggtacgccgctgcaagtaggcgtgggcctgaagacggcgactccggaaatcgacctggcaaccctcgaatggatcgacaccccggacgggcgccacaccgcgcgcttcccgatcagcgccgcgggggccgccagcctacgcgccgcgattcgcctggaaacccgcagcggctcgctgcccgacgacgtgctgctgcacttcgccggcgccggcaaggaaatcttcgaggccagcggcaaggacctctcgctcaaccgtccctactggagcccggtcatcgagggcgataccctgaccgtcgaactggtgctgccggccaacctgcaaccgggcgacctgcgcctgtcggtaccccaggtatcgtatttcgccgactccctgtacaaggccggctaccgcgacggcttcggcgccagcggcagctgcgaggtggatgcggtctgcgcgacccagagcggcacgcgggcctacgacaacgccaccgccgcggtggcgaagatggtcttcaccagctcggcggacggcggcagctacatctgcaccggcaccctgctgaacaacggcaactcgcccaagcgccagctgttctggtcggccgcgcactgcatcgaggaccaggccaccgccgcgacgctgcagaccatctggttctacaacaccacccagtgctacggcgacgcctcgaccatcaaccagagcgtcaccgtgctgaccggcggggcgaatatcctgcaccgcgacgcgaagcgcgacaccctgctgctggaactcaagcgtactccgccggccggcgtgttctaccagggctggagcgccacgccgatcgccaacggctcgctcggccatgacatccaccatccgcgcggcgacgccaagaaatactcgcagggcaacgtctcggcagtgggcgtcacctacgacgggcataccgccctgacccgcgtcgactggccgtcggcggtggtcgaaggcggctcgtccggctcgggcctgctgaccgtcgccggcgacggttcctaccagctacgcggtggcctgtacggcggcccctcgtactgcggcgcgcccacctcacagcgcaatgactacttctccgatttcagcggcgtctattcgcagatatcccgctacttcgcgccctga

SEQ ID NO: 325574 - DNA, 498 bp, Pseudomonas aeruginosa
atgctccgtattccccttgcccgactggcgcttccgttcctgttcgccagcctctcgccgttcgcggcgcacaccgccacagcggccccggataccaacgtcgagactgccgtcacccggcagttggaacgctatgaacaggcactgaatgcctccgacgtcgacgcggtgatgaagctctatgcccgcgacccggtgttcatgccgcaacacagcctgcccgcggtaggccgcgaggcggtacgcgcggcctaccggcaggtgttcgcgaagatccgcctggacatcgacttcagcatcgacgagatccgtccgctgggcccggactgggccttcgcccggacccgctccaacggcacggtgaaagtgctcggcgtcgacgctcccgcaggcgccgaggccaaccaggaggtgttcctcctgcaccgcgaaaacgacggccaatggcgcttcgcgcgctacatcttcagcactaccaaccctccccggcagccctga

SEQ ID NO: 325575 - DNA, 987 bp, Pseudomonas aeruginosa
atgaaagcctacgtcatcgaacagcctggcggcccggaagtcctgcgcctgcacgacatcgcctcgcccgaaccgaacgccaacgaagtacggatacgcgtgcgtgccttcggcctgaaccgcgccgaactctaccggcgcgccggcaagatggggccgatcgccgggccggtggtacccggtatcgaagcggtcggcgaagtccttcaggacccggccgggcaattccgggtcggccagcgggtcgccaccgcgatgggcggcatgcagttcagccgcaacggcagctacgcggaagaggtcacggtcctgcgcagcaatgtggtggccttgccggacagcgaactgtcctgggaagagctggcggcgctgccacaggcctacctgaccgtatggggcgccctggatcgcagcctggcgatccagcctgggcagaccctgctggtacgcggcgccacctcttcggtcggcctggccgccctgacctacgccaaggcacgcggcctgcgggtgctagccagtacccgcagcgcggagcacacggcgcgcctgcggcagttgggcgccgaccaggtgttcatcgacgacggcgaactctgcgcgtcgatactcgcggcggcgccggaaggggtggacgccgcgctcgaggtggtcggcgcgccaaccctgcgcgacagcgtccgctgcctgcgcccgttcggctcggtgtgcgtgatcggtctgctcggcggcccgccgttgctcgaacagttccagttgatgcaggacctgcccggcgcgacccgcctgagcttcttccccagcggcctgctcggaggcgcgtacatggacctgggcgagtcgccactgggctgggtggtgcgggaacggaccgccggccgcctgccctctctgctctccgccgccttcgacttcgacgacctgccccgcgcccacagcctcatggaggccaatcgcgcgttcggcaagttcgtcgtccgtgtctag

SEQ ID NO: 325576 - DNA, 378 bp, Pseudomonas aeruginosa
atgaccatccagtccatcctgcaatcctacgagaccgccctcaacgccaacgacatcgacgccatcctcgatctctacggcgaagcgccggtattcatgccgcagcacgccccggccctggtcggccgcgaggcagtccgcgccggctaccagcaagtgttcgccagtatcaagttgcagatccgcttcgacatccacgaggtcgaggtcatcggcgactgggcctgggcccgcaccagttcggccggccgcacccgcctcctggccgaagacgtggaaatcgcggagggcaacaacgagctgttcgtgttccggcgcgaacacggccactggaagatccaccgctatctcttcgccaccaaccaaccgcgcgcctga

SEQ ID NO: 325577 - DNA, 912 bp, Pseudomonas aeruginosa
atggacctcaatgcgctccgtatgttcgtcggcgtcgttcaggcgggcagcctgtcggctgcagccgcacgccttgagataccgctgccgacgctcagccgacgggtccgcgagctggagcaccagctcgccgtgcaactgctcgagcgttcggtccgcggcacgcggctgaccgaggcgggcatgcgtctctacgagaacgccgcgcgcggtgtcgagatactgcacgaggcggagcaggccctggcgtcggaccaggcgcgtctgaagggacgcctgcggttgtcgttgccgcccggcttcgaaccctggtgggagctgctgggggtgttccagcggcgctatccggatatccgcgtgcaggtgttcacctccgagcggcgcatcgatctcgtcgaggatggggtcgacgtggcccttcgggtcggcgcggttgcccatgaggcgatggtggcgcgccgcctcttcgcctatcgccacgttctggtgggtagcccgcgcctgcttgaacgcgagggtggaatggaaacgctggacgacctgcgccgtttcccggtcggcatgtggtacccgggcggcagcggcgagggcgcctggctgctcggtggccaagcggtcaagccgcggatcgtgctggcgaccaatgactacgcgcatctgcgtgcccgcgccctggatgccgaactggtcaccgagctaccaccgttcatggctgccgccgcggtgcgtgcggggcaactgatcgagttgctgcctgagcaccccttgccggagcaggagatccacttgctctatccgtcgcaccggcatccgtcgacgatcgtcaggtgctacctggatttctgccagcagcacctggacctgctgcacgatgcctgtcggctggacggccctgcgcctggcgcggggtag

SEQ ID NO: 325578 - DNA, 1218 bp, Pseudomonas aeruginosa
atggcggccttccattcgaggaatgccgcttccatgaccgtcttcaccagccccgttccggccgccgcccctcgctccacactgagcgtcgcgatcctggccttctccgcgtttctcatcgttaccaccgaatttctcatcgtcggcctgttgccgagcctggcccgcgacctgcagatatccatctccgcggcaggccggctggtgaccctgttcgcctttaccgtgatgctcttcgggccgccgctgaccgccgtgctcgcccacctgccacgcaagccgctgttcgtcgccatcctgctggtgttcgccctgtccaacggcctcgccgcgctctcgaccgacctcaggctgctcgccgtcgcccgcttcgtgccggcgctgatgctgccggtgttctggggcaccgccagcgaaacggcagcgcaactggccggtaccgagcgcgccgggcaggccatcgccagggtctacctgggcatttcctgcgcgctcctgctgggcattccgctcggcaccctggccgccaacggcatcggctggcgcggcgccttctggatactcgccgggctgtcgctgctgatggccgtcgccctcgtcctgttcatgcccgccgtggaccgtggcgaacgtctcgatctgcgccggcaggcgcggatattcggcgaaccgctgttcctcgccaatgtcgcgctgtcggtgctggtgttcagtgccatgttcgtttcatacacctacctggccgatatcctcgaacgtatcgccgggatcactccggcgcggatcggctggtggctgatgggcttcggcgcggtaggcctgttcggcaactggctcggcggcaggctggtcgaccgctcgccgctgcgcgccaccgcactgttcctcgtcctgctcgcgctcggcatggccgccagcgtccccctggccggccagccgctcctgttctgcctcgcactggcgctttggggcgtggccaataccgcgctctatccggtttgccaggtgcgcgtgatgcgctcggtgcagcatgcccaggcgctggccgcgaccagcaacgtcgccgccgccaatgccgggatcggcctcggcgcgctacttggcggagagaccatcgcgactctcggcctggaacgaatcggcttcgtcgcagcggccctcgccgtactcggtctggcgctgctccccgtcgtcgcgcgcctggcgcgacgacgctga

SEQ ID NO: 325579 - DNA, 930 bp, Pseudomonas aeruginosa
gtgttttcctcagaacgtctgaaaggcatagacgtcttcgtctgcgtcgccgaagccggcagcttcagcgcggcggcggagcgactgcacctgaccgcctcggcggtgagcaaggccattgcccggctggaagaccgcctcggcctgcgcctgttcgagaggaccactcgtcgactggcgctgaccgacgccggcacgacgttctaccgcacctgttcgcgagtgctcggcgacctcgaagagtccgagctggcgctgcacgccgagcaccaccagacaggcggacgcatccgtctcgacctgcctgcttcctacgggcgcctgcacgtgctaccggtggtgctcgacttcgccaggcgccacgcgctgctcgtgccacatatctccttcagcgacgacttcatcgaccccgtcagccagggcatcgatatcctggtgcgcataggcggtccggatatctggccggaaaccctcggtcaccgctacctcggcgcacagcgcctggtgttctgtgccgcgccggcctacctcgccgcacacggcgagccccgcgatgtggaagagctggccgctcacgactgcgtgctgtacggccagggcgatggcctgaccaccccctggaacttcccgggacaccagccaggcgagctggaacgacgggtgatgccgacgcggatcgcgataggcgatggcgagggcgtggtgcaggcactgcttgccagccacggcatcggccaattgccgacctggctggtcagccggcatctggagagcgggcgcctgcgcgaggtcctgccacaactggccagcgacggcctgtcgatcaacctggcctggcagaagcgacgtgaaaacctgcccaaggtcggcgccctgctcgacgtgcttggccgcagcctcatcccctccggccacatcttgggcaattaa

SEQ ID NO: 325580 - DNA, 630 bp, Pseudomonas aeruginosa
atgcataccgtcctgatcgtcgacgaccaccccgtcatccgcctcgccgtgcgcgtcctgctggaaaagcatggtttgcaggtggtggccgagacggacaatggcgtggatgccatccagttggtccgggagcacgaaccggacgtggtgattctcgacatcggcattcccaagctcgacggcctgaccgtgatctcgcggatcaagtcgctggaactgcgcacccaggtgctggtactcacttcacaatccgcagaggcgttctgcaagcgctgtatccaggtcggcgcccgtgggttcgtcaacaaggaagaagacctgaacaacctgatcaacgccctgaacgccgtgatcgctggctacacgttctttccttcgctcacgttcgataccctcggcaccccgccggagcgcatttccgaaagcgagcttatcggcctgctctccgaccgcgagatgatcgtcctccagcatctcgccatgggctattcgaacaaggccatcggcgagaagctgttcctcagcaacaagaccgtcagcacctacaagacccgcctgctgcagaagctcggcctgggttcgctggtcgacctcgcagagttcgccaagcgcaattcgctgatccactga

SEQ ID NO: 325581 - DNA, 240 bp, Pseudomonas aeruginosa
gtggccgacctgctcaccggcatgttccgccacagccaaccgcaggaaatcgtcgaggtgatccaggacgtcccggtggataacctcgacgccagtcagtttgccgatcccgagccggcaaccgagcgcttcgccgatagcgactatcccgccgacggcggtttcgccgatggcgatttcagcgatagcgacttcaacgacgactccagcttcctcggcgacgacgatttgttcacctga

SEQ ID NO: 325582 - DNA, 657 bp, Pseudomonas aeruginosa
atgaatcctctgctgccgctgcgtgacgcctggttcttcttcacccgccacctgaccaccctggtgccgctctgcctgccctggatattcctcgaaagcctgctccagcagcagatcgacgaagccgtcggcccccagcagatgggcgcctggagcctggtcgccggactgctcttctacccgctctacaccgcagccctgatcctgttcatggacgcgcgcgggcgcgacgagcggcctcgcgtcggccagctgtggagcgccgcgctgcgcctgtggccagccttcgcgctactcgcggcgctgacttcgctgctgatcgtgctcggcctgtcgctgctgatcctgccgggcatcttcgtcatggtgaagctggccttcgccgaattctgcctggtgctgcgcggccgtagtccgctgcaggcgctgcgggaaagcttcgagttcacccgtgggcgattcttcctgatcctcgcctgttcgctggtgatcctgctgccggtctggagcctggaagcctggctcgccgattcggccggcgacgccgtcgtgctgcgggtcgccctgcatacgctcagcgggttcttccagctgctgttgaccatcgtcgccttccgcatctacagcctcggtccggcgccacgcaacgggatgtga

SEQ ID NO: 325583 - DNA, 834 bp, Pseudomonas aeruginosa
atgggtagcatgcatcccgtacaggtgatcgcagtaactggcggcaagggcggcgtcggcaagaccaatgtgtcggtgaacctggcactggctctggccgatctcggccgtcgcgtcatgctgctggatgccgacctcggcctggccaacgtcgacgtcctgctgggactcacgcccaagcgcaccctggccgacgtgatcgagggacgctgcgaactgcgcgatgtcctcctcctcggtcccggtggcgtgcgcatcgttcccgcggcctccggcacgcagagcatggtgcacctctcgccgatgcagcatgcggggctgatccaggcgttcagcgatatcagcgacaacctcgatgtcctggtcgtcgacactgccgccggaatcggcgattcggtggtcagtttcgtccgcgccgcgcaggaggtgctgctggtcgtctgcgacgagccgacctcgatcaccgatgcctacgccctgatcaagctgctcaaccgcgaccacggcatgacccgcttccgggtcctggccaacatggcccacagcccgcaggaaggacgcaacctgttcgccaaactgaccaaggtcactgaccgtttcctcgacgtcgcactacagtatgtaggtgtcatcccttacgacgagtcggtacgcaaggccgtgcagaaacagcgagccgtatacgaggcattcccccgctcgaaggcgtccctggccttcaaggcggtcgcgcagaaggtcgacagctggccgctgccggccaacccgcgcgggcacctggagttcttcgtcgaacgactggtccaacaccccgcgacaggttcggccgtatga

SEQ ID NO: 325584 - DNA, 360 bp, Pseudomonas aeruginosa
ttgccggcgtcgccgagcctgaacgtgaagaattacctggtgatggccaccaccagccagagccaggtgctcaagtcggcctaccagacctatcggcactgcgggctggcgggttgcatcctgactaagctggacgaggcgggcagcctcggtgaatcgatggcgctggctatcgcccagcgtctcccggtagcctatctggcggatgggccgcggattccggacgacctgcaggtggcgcgcagtcaccaactggtcagccgggcggtgagcctgcaggcaccggaagagcccagcgaggacgccatggccgagatgttcgccgggctctaccagcaaccggcgcggcgtgccggctga

SEQ ID NO: 325585 - DNA, 1323 bp, Pseudomonas aeruginosa
atgtctgcaatcacgcgttatctcgccatgcttcggctgttcggcatgctgctctgcgccgccgcgattccctccgttgccaccgcgacggtgccggtcaccgtcgcggtggcagcgtccgatgtcgaggaggaggccgtggaggcatcggcggtcggcgccgaggccgaggcagcccgcgatgcgggctacgagtccgcggaggttccggcgccggcgcggcgggtgaccgaccttaccgcgaccctcgacgccgccgagcgtgcccgcctggaagcttcgctggccgcgctggaggcccggaagggtgcccaggtagcgatcctgatggtgcccagcacctatccggacagcatcgaggcctatgcgacgcgggtcttcgaggcgtggaagctggggcgcaaggggatcgatgacggcgtcctggtgctggtggcgaaggacgaccggcgcatgcgcatcgaagtcggctatggcctggaaggaacgatcaccgacatcgatgccgggcggatcatccgcgaatacatgacccctgcgttccgtcagcaagactacgccggcggcctggaagcggcggcgcagcgcctggtacgactggtggagcccggcgcggtacggcagaccctggctatcgcattcctgctcggcgctctcggcggggtggcgctgctggtacgcccgcgcgcctggtactggaccctgggtgcggtagtggcgctcgctgcggcgctggcgctggggcgacactggccagcatgggcgatggtggcgctggcggagatggtggcggtcctgggcgtcggcttcggcgcgttgctcaagtattcgcgcggtgcccgctggttcttcgccattcttgtgctctatgcgctggggctgttctgggcctacggccgttatggcctgccggtgctccattacggattggccgtgccgctttcgctggggctgaccctgctgatgctggccggtgcctggcaggggctgcgcagaggacggcgctgggcctacctgccgggcctgctcggcctgctgctgaccctggccctggagtgcctgctgttgctggtggacgacccgctgaacagcatcgaggcgttgatcatcctgcccgccgcttgcctgccgctgctcatcggttgcaatttcagcgccggcggctcggggggagggcgtcggcgcggcggcgattacgctagctcatcgggttcctcgtcgtcgagttcgtccagttcgtccagttcgtccagttcgtcttcggactcgttctccggcggcggaggctcgagtggcggcggtggcgcctccggtagttggtga

SEQ ID NO: 325586 - DNA, 1017 bp, Pseudomonas aeruginosa
ttgccgcgcgccggcctctacgcgctgctcatggggatctgcctgtcgccgtggggacgccagcagatccgcccggtccgcgaactgctcgccaccgtgcgcaggccgctgctggtggcggcgcgcggcaaggaagtgccgctgttcgatttcgtccaccaggcggtctcggtgatggtgctgatcatcctcctcgtcaccgtcaccgccatgtgccgcgcctactactccggtgcctggccgcgcggcacgctgttcctgctgatcgccgcgtcctgcctgtcggcacccgggcgcctgctgatggccccggtgctgacgccgatcaccgagttcgtccagcgttatcgctggcaggccctgctgctgctcggcctgatctccacctatcgcctgtcggacacggtgatgggggtgatggccggggtcttctacatcgacatgggcttctccaaggaagtcatcgccagtgtcagcaaggtcttcggcgtactcatgaccctgatcggcgccgccgccggcggggtgctgatcgcccgcttcagcatcctctccatcctgttcatcggcggtgccgcttcggctgccaccaacctgctgttcgccatgctcgcccagctcggcccgctgcacgccgaggccctgcccagccatgacgtgatcagcctggtgatggcgctcgagccgcacgtgctgatgctggtgatgaccatcaccctcgacaacttcagcggcggcctcgccgcctcggccttcgtcgcctacctgtcgagcctgaccaacctgaagttctccgccacccagtacgccatgctcagctcgaccatgctcctgctgccgcgcttcatcggcggctactccggaaccatggtcgagagcctcggctacgagcacttcttctacgtcaccgcggtgatgggcattcccaccctgctgctgatcggctggttgtggctgcgccgcgcgccgtccagcgagacgccggcgccgggtcaccagaacgccgagcagcactga

SEQ ID NO: 325587 - DNA, 912 bp, Pseudomonas aeruginosa
atgacctggcatatcctcggcgccggtagcctcggcagcctctgggccgcgcgcctcgggcgcgccggcctgcccgtccgcctgatcctgcgcgaccgccagcgcctgcgccgctaccaacaggccggcggactgaacctggtggaagacggccaggccagcctctacccgatcgccgcggaaaccccggacggcgggcaacccatccagcgcctgctgctggcctgcaaggcctacgacgcggaggaagccgcctccagcgtggcccatcgcctggccggcaacgccgaactgctgttgctgcagaacggcctgggcagccagcaggcggtcgccgcccgcctgccgcgcagccgctgcctgttcgcctccagcaccgaaggcgcgttccgcgatggcgatttccgcgtggtcttcgccggccgcgggcacacctggctcggcgatccgcgcgacacaagcgcccccgcctggctggcgcagctgtcccaggccgggatcccgcacagctggagcgacgacatcctcgaacgcctgtggcgcaagctggccctgaactgcgcgatcaacccgctgaccgtcctccacgattgccacaacggcggcctgcggcagcacccggaagagatcgccgcgctttgcgacgaactcggccagttgctccacgccagcggctacgacgccgccgccaggagcctgctggaggatgtccgggcggtgatcgacgccaccgcggccaactattcctcgatgcatcaggacgtcacccgcggccggcgcacggaaatcggctacctgctcggctacgcctgccagcacgggcagcgcctgggactaccgttgccgcgcctaggaaccttgctcgcccgcctccaggcccatctgcgccagcgcggtttgcccgaccgctaa

SEQ ID NO: 325588 - DNA, 960 bp, Pseudomonas aeruginosa
atgaacctttgcctcgatagcctgctgaacggcacccaggatcccaaggcgttcggccgtgtcgccgtgctgttcggtggcaagagcgccgagcgcgaggtgtcgctgaagtccggcgcgatggtcctgcaatccctgctggccgccggggtcgatgccttcggcatcgatgtcggcgaagacctgctgcaacgcctggtcgaggagaagatcgaccgcgccttcatcattctccacggtcgtggcggcgaggatggcagcatgcagggcctgctcgagtgcgcgggcattccctacaccggcagcggcgtgctggcctcggcgctggcgatggacaagctgcggaccaagcgggtctggctcagcctcggcctgccgaccccggactacgcggtgctggccagcgaggatgactgccgcgacgcggcgcagcgactgggtttcccgctgatcgtcaagccggctcacgaaggctcgagcatcggcatggccaaggtcggcgggctcgacgaattgatcgcggcgtggcgcgaagcggcccgctacgactcgcaggtgctggtcgagcagtggatcagcggcccggaattcaccgtggcgaccttgcgcgggcaggtgctgccggcgatccgcctgggcacgccgcacaccttctacgactacgacgccaagtacctggccagcgatacccgctaccaggtgccctgcggtctcgacgaggccaaggaacgcgagctgaaggaactcaccgcgcgcgcctgcgacgccctgggcatccagggctgggggcgggcggacgtgatgcaggacgccgaagggcgtttctggctgcttgaagtcaacaccgcaccaggcatgaccgaccacagcctggtgcctatggccgtgcgggccgccggcctggatttccagcaactggtgctggcgatcctggccgatagccgcgaggcgaggggataa

SEQ ID NO: 325589 - DNA, 1119 bp, Pseudomonas aeruginosa
gtggccgttcagcggcacctgttcctgtgtcagcggcagcgcctcgccgcgagcgacgcggatctgccaggcgaccaggtcgaggccggtgatggcctcggtgaccgggtgttccacctgcaggcgggtgttcatttccatgaagaagaactggccgcgttcgtcgaggaggaattcgacggtaccggcgccaacgtagccgatcgcctgcgccgcgcgtaccgcggcctcgcccatggcccggcgcagttccgcgccgagaccgggggcgggggcttcctcgacgaccttctggtggcggcgctggatcgaacagtcgcgttcgttgaggtacaggcagtggccatggcgatcggcgaatacctggatctccacgtggcgcggcttcagcaggtatttctccaccagcatccgcgcgtcgccgaaggcggccttggcctcgcgctgggcggaggaaagggcctcggccagctcggcttcgtgctccaccaccttcatgcccttgccgccgccgccagcggcggccttgagcagcaccgggtagccgatccttccggcttcccggcggaaggtctcggcgtcctgggcttcgccgtgatagccgggcaccagcggcacgccggcttcttccatcagcgccttggccgccgacttgctgcccatggcgtcgatggccgccgccggcggcccgaggaagagcaggccggcttcctcgcaggcgcgggcgaagtcggcgttctccgagaggaagccgtagccggggtggatcgcctgggcgccgctggcgagggcggcggcgatgatcctgtcgccgcgcaggtagctgtcggcgggcttggcgccgcccaggtcgacggcgatgtcggcttcggcgacgtggcgggcgtggcggtcgatgtcgctgtgcacggcgacgctgccgatgccgagggcgcgcgcgctgcgcatcacccggcaggcgatctcgccgcggttggcgaccaggatgcgctggatgctgcggtagtccgggttcatgcgtcgtttctccaggcgggcgtgcgtttctccaggaaggcgcgcaggccttcctggccttccgggctgatgcggatgcgggcgatggccgcctcggtgtag

SEQ ID NO: 325590 - DNA, 798 bp, Pseudomonas aeruginosa
atgagcgaattccagaccatccagcttgagatcgacccgcgcggcgtagccaccctgtggctggaccgggcggaaaagaacaacgccttcaatgccgtcgtgatcgacgaactgttgcaggccatcgatcgcgtcggcagcgacccgcaggtccgcctgctggtgctgcgcggccgtggccggcacttctgcggcggtgccgacctggcctggatgcagcagtcggtggacctcgactaccagggcaacctggccgacgcccagcgcatcgccgaactcatgacccatctctacaacctgcccaagccgaccctggcggtggtccagggcgcggtgttcggcggcggggtcggcctggtcagttgctgcgatatggccatcggcagcgacgacgcgaccttctgcctgtccgaggtacgcatcggcctgatcccggcgaccatcgccccgttcgtggtcaaggccatcggccagcgcgccgcgcgacgctattcgctgaccgccgagcgcttcgacggacgccgcgccagcgaactgggcctgctcagcgaaagctgtcccgccgccgaactggaaagccaggccgaggcctggatcgccaacctgctgcaaaacagcccgcgcgccctggtcgcctgcaaggcgctctaccatgaggtcgaggccgccgagctgagcccggcgctgcgccgctacaccgaggcggccatcgcccgcatccgcatcagcccggaaggccaggaaggcctgcgcgccttcctggagaaacgcacgcccgcctggagaaacgacgcatga

SEQ ID NO: 325591 - DNA, 423 bp, Pseudomonas aeruginosa
atgtcccccaccctcacccacctggcgctgcacgtccccgacctcgacgcctgcatcgccttctacgaaaccttctgcggcatgcgggtgatccaccggcgccccggcaaaggctcgcagatcgtctggatggccgaacccggccaggaacaacgcttcatcttcgtcatcatgcccggcggccagccgcgcaacctggccagcgacgattacagtcatttcggcttcgccctctccagccgcgccgcggtagacgatctggcgcgccgcgccgaggccgccggctgcctggtctgggcgccgcgcgacgagccctatccggtcggctactactgcggcctgcgcgatcccgcgggcaactatgtggagttcagttacggccagccgctggggccgggttccgaggcactaccgattctctga

SEQ ID NO: 325592 - DNA, 261 bp, Pseudomonas aeruginosa
atgtcaaccctcgccccccttttcctggccaaacaccctgacggcgaagaacgccaggtgatccgcccgaacgtctgggaaacctcctgcgcagataccgagaccctgtcgatcttccatatcgagggcatggccgacccggacctgtcggagaaactgcgctcgctggtcaccgtgctcgccgtccgcctggagttctctccccatgccggcaaggtccgtcccagcgtcagcgagccgctgctggccagcgtcgtctga

SEQ ID NO: 325593 - DNA, 474 bp, Pseudomonas aeruginosa
atgtccattccactggatatgtacgatcagcgtattctcgctttgctgcaggaggaatcctcgctttccaccgccgagatcgccgagcgcatcggactttcccagtcgccctgctggcggcgcatccaacgcctgaaggaggagggggtgatccgcaagcaggtgaccctgctcgaccgcaagaagatcggcctgaatacccaggtattcgcccagatcaagctcaacgcccatgggcgcaagaacctcaccgacttcgccgaggcgatgcaccagtttcccgaggtgctggagtgccacgtactgatgggcgcggtggacttcatgctgcgtatcgtcacccgcgatatcgaatcctacgaacgctttttcttcgagaagctgtcggcggtgccgggcatccaggaagtgaactccatcgtcgccttgtcggaaatcaaatccaccactaccttgcccctgctcgctccctga

SEQ ID NO: 325594 - DNA, 711 bp, Pseudomonas aeruginosa
atggatgccggcctggtggcgcggcagccagtgcaggcgcgcaccgggaatcgccggcaggtcgaggatatcggcttctcccggcacttcgagaaaggcctcgaccaccggcggctcggcttcgccggccagctcctcgagaattcccgccaccgcgggcaaggcggtttcgtcggcgatcagcaggatatggcggacgccagccggcggcttccattcgtagccgccggggtcatcgccgtattgccggttgggcgcggccagttgcaggcggtcgccgatccgcgcgtgggtcgcccaggccgaggccgggccgttctcgccgtggaggacgaactccacgtcgacctcctcctgctcggcgcgcagcgcacggatggtgtaggtacgcatcggcggccggcgagccggctcgacgctgcgataggcctggtaccactcgctgccaccgggcaggctgggcggctggccgctggcatcggggaagaagatcttgatccgctggtcggcggccagggtcttcatctcggcgacctccgggccgccgaagacgaagcgggtcagcgccgggctgagttgctcgcggcgcttgagttcgacattgaacagacgataggcgggttgcgacatgacgatggtctcctggtgaccggcgcccagcggcgccggcggatgcatgcatcaggcaactctagcaaacaatgcgaatga

SEQ ID NO: 325595 - DNA, 1065 bp, Pseudomonas aeruginosa
atgagcagcactcccagcctttcccattcccctgccgagctttaccgcgcctggcaggacctgcgcgccgagcgaccgcagctacgcgcgcgcgacgccgctgcgctgttgcaggtcagcgaaggcgagctggtcgccagccgggtcggcatcgatgccgtgcgcctgcggccggactgggccgccttgctgccggcgctcggcgaactggggccgatcatggcgctgacccgcaacgagcattgcgtccacgaacgcaaggggccgtatcgcgaagtgacggtctctgccaatgggcagatgggcctggtggtctcgccggatatcgacctgcgcctgtttctggggggttggaacgctgtcttcgccattgccgaggagacatcgcggggtacccagcgcagcatccaggtgttcgaccagcagggcgtggcggtgcacaaggtgttccttaccgaggccagcgacgtccgcgcctgggaaccgctggtcgagcgcctgcgggctgccgagcaggatgccgtgctggccctgcgcgaaccccgcgcaccggctgctgcgctcgtcgatgcgcagatcgatgccgtagccttgcgcgaaggctgggccgcgttgaaggacacccatcatttccacgccctgctgaagaagcatggcgcgcagcgcacccaggcgctgcgcctggctggcggcgaatgggccgagcgcctggacaagggcgacctggcgaaactcttcgaagcggcggccgaaagcgggttgccgatcatggtgttcgtcggcaacgcccactgcatccagatccataccgggtctgtgtgcaacctgaagtggctggacgactggttcaacgtgctcgatccggaattcaacctgcacctgaagaccaccggcatcgccgagctttggcgggtgcgcaagccgagcaccgatggcatcgtaaccagttgggaggccttcgacgccgacggcgaactgatcgtgcaactgttcggcgcgcgcaagcccggcgagcccgagcgcgacgactggcgcgaactggccgaatccgtcaaggcgctctga

SEQ ID NO: 325596 - DNA, 408 bp, Pseudomonas aeruginosa
  misc_feature (239)..(248): n is a, c, g, or t
atgccgctctccccgcccttcgccctgcgcccctgcctggccctgctgttgctcagcccttccctggctctggcggggaacgccgtcccgctgaccccgaccaccatcaccgccacccgtaccgagcaggcagtggattcggtgccgagcaccgtcagcgtgcagacccgcgaacaactggaccggcagaacgtcaacaacatcaaggaactggtgcgctacgaaccgggagtctcggnnnnnnnnnnggcggcgccggccagcgtgccgggatcaccggctacaacatccgcggcatcgacgggaaccgcatccttacgcagatcgacggggtcgaactgcccaacgacttcttcagcggcccctacgcgcagacccaccgcaactacgtcgatccggacatcgtaa

SEQ ID NO: 325597 - DNA, 1455 bp, Pseudomonas aeruginosa
atgagcttttccctgctccgcctggtgggattcatcctcgggcttttcctggtcaccctggcggccagcatgctgatcccgatgctgacgctggcgctcttccagcgctacgacgatttcgacgccttcctctggtcgagcctgctcaccgcggctgccggcctcgcgctggtcttgccgggacggccggctcacgtgcattttcgtgcccggcacatgtatttcctgaccaccgccagttgggtggtggtctgcgccttcgccgcgctgccgatggtgatggctcggcacatcagctacaccgatgcgttcttcgagaccatgtcgggcatcaccaccaccggctccaccgtgttcagcgggttggaccagatgtcgccgggcatcctcatctggcgctcgttgttgcactggctcggcggcatcggtttcatcggcatggcggtggcgatcctgccgctgctgcgtgtcggcggcatgcgcctgttccagaccgaatcctccgactggggcgagaaggtgatgccacgctcgcacatggcggccaagtacatcctcggcgtctacgtcgcgcttacgctgctgggcgtgctgtgcttctggtgggcgggcatgacccccttcgaggcgttcaaccattcgatggccgccatctccacgggcggcttctccacctccgacgcttccctcgcgcactggccgcaaccggcggtgcactgggtcgccgtgttgttcatgatcctcggcagcctgccgttcaccctctatgtcgcgaccctgcgcggccatcgcctggccttgctcaaggaccaccaggtgcatggcttcatcggcttcctggcggtgacctggctggttttcgccttctggctctggctgaattccgattacggctggtgggatgcgctgcgcctggtggcggtcaatgtgacgtcggtggtgaccaccaccggtttcgccctgaccgactacaccacctggggaaccttcgcggtcatgctgttcttctacctcaccttcgtcggcggttgctcgggctccaccgccggcgggttgaagatcttccgcttccaggtggccttcgtgttgctcagggccaacctgcagaacctcgtgcatccgcgggcgaccatccggcaaagctacaacggccatccgctggacgaggaaatcgtccgctcgctgatcaccttttccttcttcttcaccatcaccatcggcgtgatcgcactggggttgaccatgctcggcctcgactgggtctccgcgttcaccggtgccgcgaccgccgtgtgcaacgtcgggcccgggctcgggccgattatcggaccggcgggaaacttttccagcctgccggacatggccaagtggctgctgaccctcggcatgctgcttggtcggctagagattctcaccgtactggtgctgtgcacccgcgcgttctggcgcttctga

SEQ ID NO: 325598 - DNA, 828 bp, Pseudomonas aeruginosa
atgcccggccaccgcatcaccctcaccggagaaaagcagacgctcctgatcaccctctacgccaaggcgctggatagccgcctggacgattccatcctccatgaccgtttcgccgaggaggcggtgcggcagatcgacttcgacttctccagggtcgccctcggcaaaggcaacgaacgggccctggccatgcgctcgcattacttcgaccaggcctgccgcgacttcctcggccgccatcccgaggggcaggtgctcaacctcggttgcggcctggacagccgtatctaccgggtcgatccgccggccgagctgccctggttcgaccttgactacccggaggtcatggacctgcgcgagcggctctacccgccgcgcgccggcgcctatcgggcgctgcgccactcggtggacgacgacggctggctgcaaggggtgccgcgcgagcggcccgccctggtcctggccgaggggctgatgccttatctgcgggagtcccaggtgcgacgcctggtggaacgcctggtcgaccacctgggtagcggcgagctgctgttcgacggctacggccgcctcggcatcatgctgctgcgcctgtatccgccgctgcgcgagaccggggcgcaggtgtactggagcatcgacgacccgcgcgaactcgagcggtggcatccggccctgcgcttcatcgaggaggtcaccgactatgacccgcaggacgttgccaagctgccgcagtcgtcgcggctgatgctgccgatctacaacggcttcgccttcctgcggcggatgggccggctgatccgctaccgttggcccagggtctag

SEQ ID NO: 325599 - DNA, 1029 bp, Pseudomonas aeruginosa
  misc_feature (536)..(545): n is a, c, g, or t
gtgacgatcaacggcgagacctggcaggacagccgccgcaacctcttcgtcgcgccccaccgacgtgccctcggctacgtgttccaggatgccaacctgttccgccacctgacggtgcggcgcaacctggccttcggtctcaagcgcatcgccgccgccgagcgccgcgtcgagctggaacaggcctgcgccctgctgggcatcgagcacttgctggaacgcatgccggaacgcctctccggcggcgagcagcaacgcgtcggcatcgcccgggccctcctcaccagcccgcgcctgctgctgatggacgagccgctggcatccctcgacctgaagcgcaagggcgagatcctgccctatctcgaacgcctgcacgaggaactggacatcccggtgctctatgtcagccactcgccggacgaagtggcgcgcctggccgatcacctggtgctgctggagaacggcaaggtccgcgccagcgggccgatcggcatcatgctgctgcgcctgtatccgccgctgcgcgagaccggggnnnnnnnnnngaccgtgccctcgatcaccaccccggcgtcgtcgtccagcgccagcgggccgatcggcgaaaccctggcgcgagtcgacctgccgctggcgctggacgacgacgccggggtggtgatcgagggcacggtcagcgaccacgacccggcctacggcctgctgaccctggtcctgcccggcagcgcgctgcaaatgcgcgtcgcccacgccccgctggcccccggcaagcgcctgcgcttcaaggtacaggcgcgcgacgtcagcctgaacctgcgcgacgacgcccagagcagcatcctcaaccgcctgccggtacgggttctggaattggtcgataccgacaccgcggcccacgtactggtgcgcctggatgccggcggcaatccgctgctggcgcggatcacccgttactcgcgggaccagttgcaactacggcccggccagctgttgtgggcgcagatcaagtcggtggcagtgctcgcctga

SEQ ID NO: 325600 - DNA, 180 bp, Pseudomonas aeruginosa
atgaccgagtcctatgcccttggcggctggcaactggcgcgcctcaccggccaggccgggctggacgcgagcgactaccggcaggcggcggaaaacatcgtccgcctggtctgcgccggctgcctggcactccccggcgaggccgcgccgcgtcggcgtttccgcgcgctggccggctga

SEQ ID NO: 325601 - DNA, 408 bp, Pseudomonas aeruginosa
atggtcggggacgcgaccgccgctggctggcgttcggcaaacttccgtgtctatagcggcgactacaacggcgacggtcagccggacctctacctgaaggcggtcacttcggtggtcgtggtggggggcgaagtggctacgccgattccgctcctgccaccgttgaagaatgtcgtcctgctgcgcaatggtgccagctacagcgccctctacgatccaccggcggcggatctgaacgccgtggcctggacggcggcgccctaccagagcttcatcggcgacctgaatcgcgatggcatcctcgacctggtcctgcagccgaacgattccagcgactcgctgctgatcgtcagcggcaacccttccgcgcacggcgtactgcaggtagccagcggtaccgggcgttga

SEQ ID NO: 325602 - DNA, 378 bp, Pseudomonas aeruginosa
ttgttatggctgctattcacatcaatatcagcccacgccatcgacaagaaagtcaacaacgtcaccatcatgcgtgtgggctttatggtggacgcgaattctccgggtggaggctggggcttcatcgtcagcaagccgggagcggcggattgcggctttggcctgatgcgcctgccgccgatgaataccgatgccggcaaggccatgctgtcgctgatgctgagcggccaggccacacagaacaaactgccggaaatcgcctattcggccagcgccacggtgaacgcggtatgccagatcacttcggcgcagatagacagcggcgcctggggagaaaggtacgaggccgcagccccgtacctaggcgagagtgcttag

SEQ ID NO: 325603 - DNA, 2853 bp, Pseudomonas aeruginosa
atggacaagacttaccagccgcacgccatcgagacttcctggtacgagacctgggagtccaacgactacttcgctccgagcggcgaaggccagccctacaccatcatgatcccgccgccgaacgtgaccggcagcctgcacatgggccatggcttcaacaacgcgataatggacgcgctgatccgctaccgccgcatgcagggccgcaacaccctgtggcagccgggcaccgatcacgccggcatcgccacccagatggtggtggagcgccagctcggcgcccagggcgtgagccgccacgacctcggccgggagaagttcctggagaaggtctgggaatggaaggaacagtccggcggcaacatcacccggcagattcgtcgcctgggctcctcggtggactggtcgcgcgagcgcttcaccatggacgacggcctctccgaagcggtcaaggaagccttcgtgcgcctgcatgaagacggcctgatctaccgcggcaaacgcctggtgaactgggacaccaagctgcacaccgcgatttccgacctggaagtggaaaaccacgacgagaagggccacctctggcacctgcgctacccgctggtgaaaggcgcgaagaccagcgaaggcctggactacctggtggtcgccactacccgtccggaaaccctgctgggcgacgccgcggtcgcggtgcacccggaagacgagcgctacgccaagctgatcggccagttcgccgaactgccgatcgtcggccggcgcatcccgatcgtcgccgacgagtacgtcgaccgcgaattcggcaccggctgcgtgaagatcaccccggcccacgacttcaacgactacgaagtgggcaagcgccacgacctgccgctgatcaacatcttcgacaagaacgccgcggtgctggcccaggcccaggtgttccacctcgacggcagcgtcaacccgaacctcgaccccagcctgccgcagagctacgccggcatggaccgcttcgccgcgcgcaaggccatcgtcgccgagttcgaggccatgggcctgctcgagaaggtcgacgaccacgcactgaaagtaccgaagggcgaccgctccggcaccgtcatcgaaccctggctgaccgaccagtggtacgtcagcaccaagccgctggccgaagacgccatcgccgccgtggaagacggccgtatccagttcgtgcccaagcagtacgagaacatgtacttctcctggatgcgcgacatccaggactggtgcatcagccgccagctctggtggggccaccgcatcccggcctggtacgacgaggccggcaacgtctacgtcggccgcgacgaggtcgaggtgcgcaccaagcacaagctcggcaacgaggtcgagttgcgccaggacgaagacgttctcgacacctggttcagctccggcctgtggaccttctccaccctcggctggccgcagcagaccgagttcctcaagaccttccaccccaccgacgtgctggtcaccggcttcgacatcatcttcttctgggtcgcgcggatgatcatgctcaccatgcacctggtgaagaaccccgacggcaccccgcagatcccgttcaagaccgtctatgtccacggcctggtgcgcgacggccagggccagaagatgtccaagtccaagggcaacgtactcgacccgctggacatcgtcgacggcatcgacctcgataccctgctgcagaaacgcaccagcggcatgatgcagccgaagctggcggagaagatcgccaagcagacccgcgccgaattccccgaaggcatcgccagctacggcaccgacgccctgcgcttcaccttctgctcgctggcctccaccggccgcgacatcaagttcgacatgggccgcgtcgaaggcttccgcaacttctgcaacaagatctggaacgccgccaacttcgtcatcgagaacaccgatggccaggacaccggggtcaacggcgagccggtcgagctgtcctcggtcgaccgctggatcatctcccagttgcagcgcaccgagcaggaagtcacccgccagctcgacgccttccgcttcgacctggccgcccaggccctctatgagttcatctgggacgagtactgcgcctggtacctggagctggtcaagccggtgctgtgggacgagaacgcccccatcgagcgccagcgcggcactcgtcgcaccctgatccgcgtgctggagacggccctgcgcctggcgcacccgttcatgccgttcatcaccgaggaaatctggcagcgcatcaagggccaggccggcaaggaaggtccgaccctgatgctgcaaccctggccggtggccgacgaaggcaggatcgacgccgccgccgaaggcgacatcgaatgggtcaaggcgctgatgctcggcgtacggcagatccgcggcgagatgaacatctccatggccaagcgcatcgacatcatcctcaggaacgcctcgcccagcgaccaccgccgcctggccgacaacgagccgctgctgatgaaactggccaagctggaaagcatccgcgtgctggaagccggcgaggaagcgccgatgtccgccaccgccctggtcggcgacatggaagtattggtgccgatggccggcctgatcgacaagagcgccgaactggggcgcctggacaaggagatccagcgcctggaaggcgaggtcaagcgcgtcggcggcaagctgtccaacgaaggcttcgtcgccaaggccccggccgacgtgatcgagaaggaacgcgccaagctagccgaggccgaacaggccctggccaagctggccgagcaacggcagaagatcgccgcgctctaa

SEQ ID NO: 325604 - DNA, 429 bp, Pseudomonas aeruginosa
gtgacccgggtcgatttctacgtgatccccagcgccgatccgtcggcgcgcctgcaggtcgcctgccgcctggccgagaaggcctggcggcagggcatgcgggtctacctgcattgcgccgacgaggcgcagcgcagcgagttggacggccgcctgtggagcttccgcggcgaggctttcattcctcacagcctggccgaggaagacgccgaggcgcccgtcgccctgggtctgggagagaccccggggaaccatcgcgacctgctgatcaacctgaccctcgaagcccccggcttcgtcgcgaacttttcgcgggtggccgaactggtggtcgaggagccggcgatccgccaggcggcacgggataaattccgcttctaccgggagcagggctatcctctacaggatcatcgcctgccgcgtatctga

SEQ ID NO: 325605 - DNA, 309 bp, Pseudomonas aeruginosa
ttgcagtggcgcctgtcgacaccgctgctggtgttcgtggtgaccctgctggcggtgccgctgtcgcgggtcaacccacggcaggggcgcttcctcaagctgctgccggcgatcctcctttatatgggctacctggccctgctgatcgctgtccgtggccagttggacaaaggcaagatccccatggccatcggcctgtggtgggtccacggactattcctggcgatcggtcttcttctgttctattgggaacccttgcgcctgaagctggcgtcctcccgtgccggtcgcgaggtggcgcatggttaa

SEQ ID NO: 325606 - DNA, 750 bp, Pseudomonas aeruginosa
atgcctgacttccagcaccgcgactgcaccctcgtctacgacgaccatcccggacccgccgagcgcgcgccggtcctgctgttgcacggtctgggttcgagcgcccgcgactgggaataccagttgccggccctgctgggccgctaccgcctgctggtcccggacctgcgtggccacggccgctccggcaagccgcgcggcggctacagcatggccggcttcgccgaggactgcgcggcctgcgaccgccccgacctgctgcgcagcctgaccatcgtcaacagcactccggaagtcatcccgcgcaagccccgcgaacacctggaagtggccaagcgcaggctcctctcgcgcctgctcagcctgcggaccatcggccgcgccctcggccggctgttgtttcccaaggcggaacaggccgggctgcgagaaaagatcgaggcgcgctgggcggagaacgacaagcgcgcctacctggccagcctcgacgcgatcatcggctggggcgtgcaggaacgattggccgagatcgcctgtccgaccctggtgatcagcgcggatcgcgactacacgccggtatcgctgaagcaggcctattgcgagcggatcgccgacgcccgcctggtggtggtggaggactcccgccacgccacgccgatggaccaacccgagattttcaacaccaccctgctcggcttcctcgccgatatcgataaaaccaaggaacaaccatgctcaaacgtctcctga

SEQ ID NO: 325607 - DNA, 264 bp, Pseudomonas aeruginosa
atgacccgctaccgtgatgtcctcgaactgcataccggccaccccgcctccgatggcgccggcgtccgcctgacccgcgtgatcggcggcccgtccccggaacgcttcgatccgttcctgatgctcgaccagttcgatacccagaacccggacgactatgtcgccggcttcccttcgcacccgcaccgcggcttcgagaccgtgacctacatgctcgcaagacaacacgaaatagacacagcctcttccctagctgtacactga

SEQ ID NO: 325608 - DNA, 1578 bp, Pseudomonas aeruginosa
atgccttctgctttctcttatgtgcggttctcctctggcaagcaagccaagggatcgtctgaacaccgacagcgagcaatgctcggccagtggctggagcaacacccttccttcactctctccgatctccgattcgaagacttaggccgttccggcttctctggtgagcatctcgaccacggcctagggcaactccttgccgccatcgatagcggagctatcaagagcggggatgtgattctggttgaggctgtagaccggataggtcgccttgagcctctggaaatgctccccctcttctcccggatcgtgaaggctggagtatctgtaatcaccctcgaagacggccacgtctacgatagaagctctgtcaacgaaacgtctctgttcctgctggtagccaagattcagcaagcccacgaatacagtaaccgcctcagcaggcgcataaacgcctcctatacagcccgcagggagaaagctaaggcagggttagggatcaagcgagaaacgcccgtatggctcactacggacggtcagttagtgcctcacgtcgccccgcacatcgcccaagccttccaagactatgccgatggcctaggagagcgccgcatctgtcgcaagcttcgcgaatctggccttgaggagttcagcaagaccaacgccaccactgtccgccgctggctcaagaacaagactgctattggctactggaacgatattccagatgtttacccgcacgttgtagacccagcccttttctaccgagtgcaacagcgcctagacgctccgaaggtagacagagccaagccttccgcccattacctcacaggcttagtgaagtgtgcggtatgtggtcgtaactacaactacaaacaacgcaagcacacagacccggccatgctctgcacttcccgggctcgcctagctggagaaggctgttccaactccaaaacctaccctgtgattgttctcgatcaggtgcggaagcttacaagcctccctttcctacagcatgcaatggagagcgcaagctctcaggcggacccatcctcacagcgcctagctgtaatcgatggagagattggggagctttcccggaaaatcggcgaagccactaaagcactccttgcgcttggattcacgccggagattcaggaaagcttagagcagcttaaaacagcccgtgaagcattggaagaggaaagggctaccttactactccctcaagctgaaaagctcacagcggctcaattagaggccttctctaacggcctactcgacgatgaaccaatgaagctcaaccacgtcttgcaaactgccggctactccatggttgttcacccggacgggtctattgacgtagatgggaagaggtttgtttacgaaggagccaacaggaagaagaaagtctacaagctccgcctccttggcgaggataggcaatgggaactccccatcctctccccagagcaagcagccagccttgcccgctccgtggacggaggatacctccccccgaattccagcgaggagatagcccgctactatgagaaggtgaaacacctagttcggtaa

SEQ ID NO: 325609 - DNA, 351 bp, Pseudomonas aeruginosa
atgattaaccctatcgcccaaatggaagccttcaaggcagcccaagagaaggcagagattgaagccgctgaagctgaagcccgcaatcttctgattcgccacttagtggatattggcactccctctatgaaagccaagagacgtgctgatatctccctaatgtgggctttccgcaagcacctacgtaagcccctgcgtaatccgaaggctccagtaaaacaagctttcccctccgccaaggaatacgcgaaagctgtcgctatcggtgcaaagaaagcccgagaactatccaaccggatcgaaaacgaactaatcaacaaacctacccagaagccgcgtaacgctgcttaa

SEQ ID NO: 325610 - DNA, 627 bp, Pseudomonas aeruginosa
atggctaaagtacaagtaaccaacgttctggacagcaaaccagcttcccgccgcgcctctttctacaaaggagttgacgttaagcagctagacctatcccaagctaaggctcgaatcaccgacctgaagcatcaagaagctttcgctattgaaatggaagagaccaacctagctcagcgccagctacaagaacgtgcatttatcggctcttacactgaacaggacgaaaatggcttctataacaaccgagatattaccgcttctctccgctccgctgctatccctattagctcttatagcgttgacgctcttgtccctctgatgatggataagatgggcgagggttacgttaaggctggagacgttgtatcccgcacaggccatgccgctgcctacttcgtcaagcctgatagtgcagagtacaaagctgccctcgaagcgaacattgctgaaatcaaacgttgcttcgctctggtagctgagaaagagattcccgctctgatcgatcaagctgtagagcgcttccacgaagaagaggctgttcgcaaagcccgggaagaagaggctcaagctcgcaaggaacaagctgcccttatgagtgcgattaacaaagaactaggcctctaa

SEQ ID NO: 325611 - DNA, 237 bp, Pseudomonas aeruginosa
atgcgggttgtcatggtcctagatttccctttgagtttagatagccagaaggccgagtttgatttgttcaaccattcgcttgccgaggccgggagtggctttgatagtggcaacgtgatcttcgtagaagtgagcgattacgatagcgttaggtgctggaagagggcgggcagccatggcccacattgcatatccgataagcaggacggctccagcggctccaaactgagcctctag

SEQ ID NO: 325612 - DNA, 1974 bp, Pseudomonas aeruginosa
atggagacacccactaccccccggagcaccctgaatcctccggtcttctatacctccgccgccctgatcctggccctggtgctgttcaccgtgctcctccaggaagaagcgcaatcgctgttcaaccacgtccagcaatggatcatcaccaacgccagctggttctacgtactggccgtggcgctgatcctgatcagcgtggtgttcctcgccgtcagccgctacggcgacatcaagctcggccccgaccacagtcgtcccgactaccgcaacaccacctggttcgccatgctgttctccgccggcatgggcatcggtctgatgttcttcggcgttgccgaaccggtgatgcacttcaccaccccaccggtaggcgagccgaacaccgtgcaggcggcgaaggaagcgatgaagctgaccttcttccactggggcctgcatgcctgggcgatctacgccatcgtcgcgctgatcctggccttcttcagctatcgccacggcctgccgctgaccctgcgctcggcgctgtatccgctgatcggcgaacgtatctacggccccatcggccacgcggtggatatcttcgcgatcatcggcaccgtgttcggcgtggcgacttcgctcggctacggcgtgctgcagatcaacagcggcctgcaccacctgttcggctggccggtgaaccagaccgtgcagatcgccctgatcgccgccacctgcggcctcgccacgctctcggtggccagcggactggaccgcggcatccgcatcctgtccgagctgaacctgagcctggcggtgatcctgctgctcttcgtgctggtcctcgggccgaccgtgttcctcctgcaaacctacgtgcagaacaccggggcctacctgtccgacatcgtcaacaagaccttcaacctgtacgcctacgagcccaccgactggatcggcggctggaccctgctgtactggggctggtggcccttcgtcggcctgttcatcgcccgtatctcgcgcggccgcacgatccgcgagttcgtctgcggcgtgctgttcgtcccggccggcttcaccctgctgtggatgacggtgttcggcgataccgccatccacatggtcctgcaggagggcttcacccagttggccgaagtggtcaaccaggacagttcggtggcgctgttcgccttcctcgagcacttcccgctgggcagcgtgatttcgctggtggcggtgctgatggtggtggtgttcttcgtcacctcggccgactccggcgcgctggtggtggacatgctggcctccagcggcaaggaccactcgccgctctggcagcggatattttggtcggtgctgatgggcgtggtggccatcgccctgctcctcgccgatggcctcaaggcgctgcaaaccgcgaccatcgccagcgcgctgccattctccatcgtgctcctggcgtcgatctggggcctgttcaaggcgctgcacctggatgccaccaagcgcggcatccgctaccaggcgctgaccttctcccgccccaccacgcgcagcggcgcaagcgagggcgacggttggcagcgccgcttgcgcaacatcgccatgttcccgaggcgcagccacgtcaaccgcttcatcaccgatgtggcgcgaccggcctgcgaggacgtcgccgccgaactgcgcaagcagggctacgaagtccaggtgcaggacggcgaggacggccgggttcggctggaagtcagccacggcggcgaggtcgatttcatctacgaggtgcgtccgcgcgccttcaccacgccgagcttcgtgatgcgcgacaccgaggacagcagcgagtcgcgcaagtatttccgcgccgaggtccatctccaggaaggcggccaggactacgacatcatgggctggagccgcgacggcgtgatcggcgacatcctcgatcagtacgagcggcacatgcacttcctgcacgtggtgcgctga

SEQ ID NO: 325613 - DNA, 888 bp, Pseudomonas aeruginosa
atggcaaccccaggccggctcgccgctctccctctgagccaacggctgcgccgcacgccgcagcgcttcgaactgttgcaggcgctgctgctgctcgaacgcgagcgtccccaggcgttgccgctgggcaccggcaacgcgccgcgggcggaggccctgcgcctgcgcgggccgctgctgccgctgttcgcctcgagcgaggtggaaagcctgctcgacgacccgcagcaaccggtgctgtccaccccggtgttcggcctcggcggccccgacggcccgttgccctatgcctaccaggaatggctgcaacagcgttcccggcagaaggaccatgcccccgccgagttcctcgacctgttccagcaccgcctgctcagcctgctctaccgggtgctgcgcaagcatcgcgtggcgctcggtttcgcggtgccggcggcgaccccggtgcaggcgcagctacgcgccctcagcggcctgttgccgaaagccctgcaagagcgcctggcgctgccggacagcgcggtactggcccgcagccggctgcaacgcggcggacgcaacctgcgcctgggtcgcgacgccatagccggcacgcgcacctgggacgagcacgccggcatcgccctcagtctcggtccgctggatgcccgcgaagccgcccgcttcttccccgacggcgacgcccatggccagttggccagcctcgccgcgctgtacttcggccccgacctggattgtcgcctgagcctgctggtgagcggcggcgcgccgctgcgcctggagcgcggtgcaccgcccaggctgagctggaacaccggcctgcggcgcgtcgaagacggccagcggcagcgcatcgatctcgacctgcggcagccggaggtagcctga

SEQ ID NO: 325614 - DNA, 1794 bp, Pseudomonas aeruginosa
atgagcgattcgattgatgccgacctgctcgactactaccagcgcgagctgacctggctacggcacgccggcggcgccttcgccgagcgctatccgaaggtcgcccggcgcctgcaactggcccccggcgaatgccccgacccgcacgtcgagcgtctgctggaaggtttctcgctgctcaccgcgcgcctgcaacggcgcctcgacgacgactacgcagagttcagcgacgccctcctcgaacagctctaccccctggcgctgcgcccgctgccgtcctgcgcgatcgtccagttcgaaccggacccgacccagggcaacctcgccgagggctaccggctgccgcgcgacaccgcgctgttcgtcaccacccgtggcggcgacagcgtgcatttccgcagcagcgccgaggcgaccctgtggccgctggcgatcgacgaggcgaccctgctcggcggcgaggaggcacaagccctgaccggagtcggcgccgcccgctcggcgttgcgcctgagcctgcgctgcctgggcgagtaccgctgggacgaactgtcgatcgagcgcctgcgcatccacctggcggcttcgccgatgggctgcgcgatcctctacgacctgctcgccgcgcatgccgtgcaggtcatggcgggggcgcccggcacgccgccggcggcgctccgcggactgccggagatcgtcggcttcgccgccgacgaggcgctgctgccggaggaagacggcggacatccgggcctgcgcctgctcgccgagtacttcgccttccccgacaagttccacttcttcgacctgccgctgtccggcgcgctcgccgacggacagacgctctacctgtacctggtcttcgatcgcgcaccgacggcacgcctgcatttgcaggcggaagacttccagctcggctgcgcgccggcgatcaacctctttccgcggacctcggagccgctgcgcccggacggcacccgcagcgagtaccgcctggtcgccgacagtcaccgcgagaacagcgtggaaatccatagcatccgcgccgtgcgctcggttgccgggagcaccgtgcagccagtcccggcctactatggctgccgccacgacagccacctcggcacgctctactggcacgcccggcgcatcgccgggctgaccccgaaccggctgggcagcgacctgctgctgagcctggtggataccggcttcgacccgttgcgcgaggccccggccttcagcctgaccgccgagctgctatgcaccaatcgctatctggccgagcgcctgggtgccggcaccgcgctgggcttcgaacggcccgggccggtcgccgccgcacgcctgcgcaacgcgcccagcgcgcagagccagccgcgcctggacggccagtcgcgctggagactggtctcgcagctgaccctcaaccacctctcgctggtggaaggtccgcgcgccctcgaagccctgcgggaaatcctcgccctgcacaacctgcgcgacgacgccagcgcccgccggcagatagaagggctgcggcaactcgactgccagcgggtggtggcgcacgtcggcgaggatgcctggcgcggctggcgcaatggcctggaaatccgcctgcgactcgatccgcaacacttcgtcggcgccagcggcgtgctgttctccgccgtgctggcgcagttcttctcgctgtatgccaccgccaaccgcttcgtgcgcacggtcctggtggaagccgacaaggaggtgaagacatggcaaccccaggccggctcgccgctctccctctga

SEQ ID NO: 325615 - DNA, 759 bp, Pseudomonas aeruginosa
  misc_feature (689)..(698): n is a, c, g, or t
atggccaaggcaatcccccagctgatcgacggcgaatggcgcggcagccgttcccgcgaactgatcgaagtcaccgatccggcgacccaggacgtcctcgcgctggcgccgaaggccaccgccgacgagatcgagcaggccatcgccagcgcccagcgcgccttcgagacctggcgcgaagtcccggctcccgagcgagcgcggttgatgctgcgctaccagcacctgctcaaggaacaccacgacgaactcggcgaactgctggcccgggagactggcaagaacctcgccgatgccaagggcgacgtgtggcgcggcatcgaggtggtcgaacacgccgccaacgtggccagcctgatgatgggcgagacggtggaaaacgtcgcccgcgagatcgacaccgccagttggatccagcccctcggcgtgtgcgccgggatcaccccgttcaatttcccggcgatgatcccgctgtggatgttcccgctggccatcgcctgcggcaacaccttcgtcctcaagccctccgaacaggatccgctgacacccaatcgcctcgccgagctgttcctcgaggccggcgcgccgaagggcgtgctgcaggtgatccatggcggccgcgagcaggtcgatgccctcctcacccacccggacatccgggcgatttccttcgtcggctcggtccccgnnnnnnnnnntccttcgtcggctcggtcgccgtcggccagcacgtgtaccgcaccggcaccgcgcacctga

SEQ ID NO: 325616 - DNA, 897 bp, Pseudomonas aeruginosa
atgaaacagatcgccttcatcggcctcggccacatgggcgcgccgatggccaccaacctgctcaaggccggctacctgctgaacgtcttcgacctggtgcagagcgccgtcgacggcctggtcgccgccggcgccggcgccgcccgcagcgcccgcgacgcggtgcagggcgccgacgtggtcatcagcatgctgccggccagccagcacgtcgaaggcctgtacctcgacgacgatggcctgctcgcgcacatcgcccccggcaccctggtgctggaatgctcgaccatcgccccgacctcggcgcgcaaggtccacgccgccgcccgcgagcgcggcctggcgatgctcgacgcgccggtgtccggcggcactgccggcgcggcagccggcaccctgaccttcatggtcggcggcgacgacgaagccctggagaaggcccggccgctgttcgaggccatgggtcgcaacatcttccatgccggccccgacggcgccggccaggtggccaaggtgtgcaacaaccagctcctcgcggtgctgatgatcggtaccgcagaagccatggccctgggcgtggccaacggcctcgacgcgaaggtgctggccgagatcatgcgccgcagctccggtggcaactgggcgctggaagtctacaacccctggccgggggtgatggagaacgctccggcgtcgcgcgactacagcggcggcttcatggcccagttgatggccaaggacctcgggctggcccaggaagccgcccaggccagcgccagcagcacaccgatgggcagcctggcgctgagcctgtaccgtctgctgctgaagcagggctatgcggagcgggacttttccgtggtgcagaaattgttcgatccgacccaaggccaatag

SEQ ID NO: 325617 - DNA, 1977 bp, Pseudomonas aeruginosa
atgagccgtctgctcgcactcctggcgctcgccccgctactcgccggcgccgccgaaccctccgcgtccaagccgcccagcgccttcaccgtcgaggcccagcggcgggtcgaagcggaattgccgttcgccgaccgtgccgacttcgagcgcgccgaacgcggcctgatccggcgcccggagcgggtgctcatccgcaaccccgacggcagcgtcgcctggcagctcggcggctacgacttcctcctcgacggcaagccccgcgacagcatcaatcccagcctgcaacgccaggccctgctcaatctcaagtacggcctgttcgaggttgccgagggtatctaccaggtgcgcggcttcgacctggccaacatcaccttcatccgcggcgacagcggctggatcgtggtcgacaccctgaccaccccggccaccgccagggcggcctacgagctggtcagccgcgagctgggcgagaggccgatccgtacggtgatctacagccacgcccacgccgatcactttggaggcgtgcgcggtctggtcgagccgcagcaggtcgccagcggcgcggtgcagatcatcgctccggccggcttcatggaggcggcgatcaaggagaacgtcctggccggcaacgccatgatgcgccgcgccacctaccagtacggcacgcaactgcccaaggggccgcaggggcaggtcgacatggccatcggcaagggattggcgcgcggaccgctgagcctgctggcgccgacccgcctgatcgaaggcgagggcgaggacctggtgctggacggcgtgccgttcaccttccagaacacgccgggcaccgagtcgccggcggagatgaacatctggctgccgcggcagaaggccctgctgatggccgagaacgtggtcggtaccctgcacaacctgtataccctgcggggcgccgaggtacgtgatgcgctgggctggagcaagtacatcaaccaggcgctgcatcgtttcggcaggcaggccgaggtgatgttcgcagtgcacaactggccgcgctggggcaacgcggagatcgtcgaggtgctggaaaagcagcgtgacctgtacggcttcctgcacgaccagaccctgcacctggccaaccagggcgtgaccatcggccaggtgcacaaccgcctgcgcctgccgcccagcctcgaccaggaatggtacgaccgcggctaccacggctcggtcagccataacgcacgggccgtgctgaaccgctacctgggctactacgacggcaacccggcgagcctcgacccgctcagcccggaggactcggcgggccgctacgtggaatacatgggcggcgccgagcgcctgctggagcaagcgcgggcgtcgtacgccaggggcgagtaccgctgggtggtcgaggtggtcaacaggctggtcttcgccgagccggataaccgggccgcgcgcgagctgcaggccgatgccctggagcagctcggctaccaggcggagaacgccggctggcgcaacagctacctcagcgccgcctacgaactgcgccacggcgtaccgcgcgaccagccgacgatgaaggccggcagcgccgatgccctggcggcgatggacaccggcctgctgttcgactatctcggcgtgcgcctggacgccggcgctgcggaaggcaaggcgctgagcatcaacctgcgcctgccggacatcggcgagaactacctgctggaactgaagaactcgcacctgaacaacctgcgcggcgtgcagagcgaggacgccgggcagaccgtgagcatcgaccgcgccgatctcaaccggctgctgctcaaggaggtatcggcggtacgcctggtcttcgagggcaaactgaagagttccggcaatccgctgttgctggggcaactgttcggcatgctcggcgacttcgacttctggttcgatatcgtcacgccggcggcgaagtccgaaggctga

SEQ ID NO: 325618 - DNA, 168 bp, Pseudomonas aeruginosa
atggtcatgcgattgatcgggctgctgccggcggccttcctggggagcggttgcagcggggggccgggcgcctgcgtcgaactggacttcgaccagggttactacggctaccatcgcggcggcccgccccattgtcctccaggccaggccaagaaaggctggtgctga

SEQ ID NO: 325619 - DNA, 1473 bp, Pseudomonas aeruginosa
atgagtgatcgcggacggaccctgatggtccagggcaccacctcggacgccggcaagagcaccctggtgaccgcgctgtgccgctggctggcccggcgcggcgtcgcggtggtgccgttcaagccgcagaacatggcgctgaacagcgcggtcaccgccgacggcggcgagatcggccgcgcccaggcggtccaggcccaggcctgccggctggcgccgcacaccgacatgaacccggtgctgctcaagccgaacaccgacatcggcgcccaggtgatcatccatggccgcgcggtgaccagcatggacgccgccgcctaccacgactacaagcgcgtggcgatggaagcggtgctggcttcccatgggcggctcgccgccgcctaccgggtggtgatggtggagggcgccggctcgccggcggagatcaacctgcgcgccaacgacatcgccaacatgggcttcgccgaagcggtggattgcccggtgatcctggtcgccgatatcgaccgcggcggggtcttcgcccacctggtcggcaccctggaactgctctccgactcggagcgggagcgggtcaagggcttcgtcatcaatcgcttccgcggcgacatcgccctgctgcaacccggcctcgactggctggaggcgcgcaccggcaagccggtgctcggcgtgctgccctatgtcagcgacctgcacctggaggcggaggacgccatcgacacgcgccaggcggccaaggtcgggccgcgcctgaaggtggtggtgccggtgctgccgaggatcagcaaccacaccgatttcgatccgctgcgcctgcacccccaggtcgagttgagcttcgtcggccccggccaggcgctgccgtcggcggacctgatcgtcctgcccggctcgaagagcgtgcgcgccgacctcgcggcgctgcgcgagcgtggctgggacgaggcgatcctccgtcacctgcgctacggcggtcgcctgctggggatctgcggcggcctgcagatgctcggcgagcgcctgcacgatccgctcggcctggaaggcgcggccggcagcagcgctggcctcggcctgctggcgttggaaacgaccctggaggcggacaagcaattgcgcaacgtacagggccgcctgagcctggaggacgcgccgctgtcgggctacgagatccatgcaggggtcactcgtggcgaggccctggcgcggccggcggtggtgctcgacgatggccgcgcggatggtgcccgcagcgtcgacgggaacgtcatgggcacctacctgcacggcctgttcgaatccaccgcggcctgttcggcgctgctgcgctgggccggcctgcgcgaggtccaggcggtggactaccaggccttgcgcgaacgcgacatcgagcggctcgccgacctggtcgagcgcaacctggataccgggcgattgctcgccctctgcggagaaccccatgcgtga

SEQ ID NO: 325620 - DNA, 726 bp, Pseudomonas aeruginosa
atgccgcaacggctgtgcagcttggcctcggtccagccggcatgcccggccagcgcggccaaggggacgtcttcgcaacggcagaccagggtatccgcctccgccagttcacgcagttcggcacgcagggcgaagtgtcgcgccagggtgtcggcgaagcgcggcgagccgcgtcgcgctcgtcgacggcggcatggccggcgatggcgccttccaccagggccagttcgctgccgccgaagccggtgcattcgccggcggcgtagtggtcgggcaggctgccggcctgccattcgtcgacggcgagcgcctggccgtcgaggcgatagccaagggcctggccgagttgcacgttgggcgccaggccgaagccgcaggccaggcgttcgcaggcgatctcgcggacccgaccgccttcgcgcaggcgcacggcttccaggcgctcctcgccgagggcggcgagcacgtagctgtcggcgcggtagctacgggcgaacaggccggcggcctgccacagcttaccgggccagcgcggcaggcgtacggcgaaggcggccagggttctcgccggcgcctgttcggcgacgcgcagcaggcgcgccccgcactggctggcgctggcggcgctggccagcagcagcgggccggagccagccaccactaggcgctggccggccagtggcaggccgcccttggccaacgcctgcaggccgccggcgccggtga

SEQ ID NO: 325621 - DNA, 1359 bp, Pseudomonas aeruginosa
atggcgctccagcctgtgcgcgaacaccgcgccgagcagcgccgagccgaggccgagggaggcctgctggacggtggcgagcatggcgctgccggcgccggcctgggcggtcggcacctccgagaggccgatgcggaagaagctgctgacgatgaacgcctggccgaagccgatcaccagggtcgccggcgccaggttgaggatgcccggctgcggccagacccgttgcagggtcagcatcaggccgagcaggccgcacatctggatgacgcagccgagcagcagcaggcgtaccgggccgatccgcgccgccacccgggcggtgagcagcgccgagacgaagtaggaggcgccgagggcgatgaaggcattgccggcctgcaccggcgagagaccggcgccggcctgcagggccagggcaagggcgaacatgaagccgctccagcaggcgaagaacaggatcgccagcaacaggccgaagcggatgctcggcaggcgcagcagcgacggcggcagcaacggccaggcctggcggcgttcctggcgcagctcggtgcgccacagccaggccagcagcggcaccgccgccgccagcagcagggcgcagggccaggaccagtgcagcgatgggccgagagccagcggcagcagcaggcagaggatcagcgcggcgagcagcagggtgcccggcgcgtcgacgcgggcggcatgctcggcgcgggtctccggtacccagcggcggctgcaaaggagaatgccgaggcagatcggcaggttgatcaggaacacgctgcgccagccgaggccgccgatgtcggcggagaccaggaagccgccgagcacctggccgacgacgaaggccaggccgccgatggcgccgtaggcggccagcgcgcgggaatgcgcgtggccgctgaggctgacatgcagggtggcgaggatctgcggcacgatcagcgccgcgccgacgccctgcagggcgcgcgccaccagcagcagccagaccgaaccggccagcccgcaaagcaacgaggcgacggcgaacagggcgacgccgagatcgaacaggcggcgacggccgtagttgtcgccaagccggccgcccatcgccaggcacacggcgaaggccacgccgtagacggcgacgatcagttccagttcggtttcgctggcgccgagggaatgggcgagggcgtcgagggcgacgttgacgatggagaaatcgatcatcggcaacagttgccccgccagcaggatgcagagcccggcgaggccgagccgcgacgacgagacggtgctgggcatgggcggagtccttgtgcggaagggagtgggctggcagcatgcgcttctggctaa

SEQ ID NO: 325622 - DNA, 798 bp, Pseudomonas aeruginosa
atggattcctcccctggggcggtgagccccgaactcgtgctgctggaccggccggagcagggcgtggccctgttgcgactgaaccgcccggcagtactcaacgccctgaacatgcgcctgcgcgaggctctggcggagtacgtacggcgcctcgacgagtgcgccgatacccgggtcatcgtcctcaccggaaatggcacggcgttcgccgccggcgccgatctcaacgaactggcggaggcgtccgcgctggagatccagcagcgcggggtggagcgccactggcaggcgctcgccgcctgccgcaagccgctgatcgccgccgtggagggccatgccctgggcggaggctgcgagttggcgatgcactgcgacctgatcgtcgccggtgcctcggcgcgcttcgcccagccggaaatccgtgtcggcgtgatgcccggcgccggcggcacccagcgcctggtgcgagcggtgggcaagttccaggcgctgcgcatgctgtttaccggttgcacggtacgggcgccggaggccctggccatagggttggtcagcgaggtggcggcggatggccaggcattggatcgcgccctcgaactggctcgccagatcgccggcctgccgccgctggcgctggcgcagatcaaggaagtggtcctggccggcgccgacctgccgctggaccaggccctggcgctggagcgcaaggccttccagttgctgttcgacagccacgaccagaaggagggcatgcgtgccttcctggaaaaacgcacagcggagtacctgggaaaatga

SEQ ID NO: 325623 - DNA, 1110 bp, Pseudomonas aeruginosa
gtgggtacgcccggagtcggaactggcgttcaggctctgcgcgcggtccagcaccgagacttccaccggggcgttctcgaacacgaacaggctgtcgaacagcggctggcccttgggcagctcgctgctttcctggatggccaccaggggcaggtgctcgtgctcgcgcaactccaggttgcgctcgaacagccggttcagccattcgcgcaccgtgcagcgctggccggcggccggcatctgcacgcgcaatgggatgctgttgatgaacaggccgacggtgcgctgcatttccggcatgcccaccggacgcccggccacggtgacgccgaacagcacgtcgcgctcgccgctgaagcggcgcagggtcagcgcccaggcggcctgggcgaaggtgttgacggtgagctggtagcgctgcgccagttcgcgcaggcgcgcgccgtcggcggcgtccaggcgcgtgtagcggtcgccgacgatcatcccgccgctctcgccggcgtgctcgcggaggaacggtcggtcgctgggtaccagggtcggccgctcgaagccgcgcaggctctcgctccaccagcggcgcgattgctccaggtcctggcgttgcagccaggcgatgtagtcgcggtagcgcggcggcgtcggcaggttcgccgggcggccttcgccgagggcgccgtagatctcgaagaagtcgttcatcagcaggccacggcaccaggcatcgatgaggatgtggtggttgctcatcatgaaccagtagcgcgcctcacccaggcggatcaggcgcaggtggaacggcggctgttcgagcaggtcgaagccggcctcgcgctcgcgcttgtgcagcgcttgcaggcgctcctcgtggccgtcctccggcagctcgctccagtcgaggaactcgatgcgggtgcgaccaggcttgtggatcacctgcaacatcgtttcgccggcattccagacgaacgacgcgcgcagcgcctcgtggcgggccaccaccgcctgccaggcggcggcgaagcgctcgggatcgagcgggctgtcgatccggtagcggtcctgcatgtagtagatgccggtgcccggttccagcagggtgtgtaa

SEQ ID NO: 325624 - DNA, 8625 bp, Pseudomonas aeruginosa
  misc_feature (3761)..(3770): n is a, c, g, or t
  misc_feature (8145)..(8154): n is a, c, g, or t
atgatggacgccttcgaacttcccaccaccctggtccaggccctgcgtcgccgcgccgtccaggagcccgagcgcctggcgctgcgcttcctcgccgaggacgatggcgaaggcgtggtcctcagctatcgcgatctcgacctgcgcgcgcggagcatcgccgcggccctgcaggcccatgcgcagctgggcgatcgcgcggtgctgctgtttcccagcggccccgactacgtcgcggcgttcttcggttgcctgtatgccggggtcatcgcggtgccggcctatccgccggagtcggcgcgccgccatcaccaggaacgcctgttgtcgatcatcgccgacgccgagccgcgcctggtcctgaccaccgctgacctgcgcgagccattgctgcagatgaacgcgcaactgtccgccgccaacgccccgcaactgctctgcgtcgaccagttggacccggccgttgccgaggcctgggacgagccgcaagtgcgtcccgagcacatcgccttcctccagtacacctccggttcaaccgcactgcccaagggcgtgcaggtcagccatggcaacctggtcgccaacgaggtgttgatccgccgaggcttcggcatcggtgccgacgacgtgatcgtcagctggctgccgctgtaccacgacatgggcctgatcggcggcctgctgcaaccgatcttcagcggcgtaccctgcgtgctgatgtcgccgcgctacttcctcgaacgtccggtgcgctggctggaagccatcagccagtacggcggcaccgtcagcggcggtcccgatttcgcctaccggctgtgcagcgagcgggtcgccgagtcggccctggagcgtctcgacctgagcggctggcgggtagccttctccggttccgagccgatccgccaggacagcctggaacgcttcgccgagaaattcgccgccagccgcttcgaggcgtccagtttcttcgcctgctacggcctcgccgaggcgaccctgttcgtcaccggcggccagcgcggccagggcattcccgccctggcggtggatggcgaggcgctggcgcgcaaccgcatcgccgaaggcgcagcgagcatcgcccacggctactggcgcaacccggaagcctcggcgaagaccttcgtcgagcgtgacgggcgtacctggctgcgcaccggcgacctcggtttcctccgcgacggcgaactgttcgtcaccgggcgcctgaaggacatgctcatcgtccgcggccacaacctctatccgcaggacatcgaacgcaccgtcgagagcgaggtgccgtcggcgcgcaagggcagggtcgcggccttcgcggtcacggtcgatggcgaggaaggcatcggcattgccgccgagatcggacgcggcgtccagaaatcggtgccggcccaggagctgatcgactcgatccgccaggcggtggccgaggcctaccaggaagcgccgaaggtggtggcgctgctcaatcccggcgccttgccgaagacatccagcggcaagctgcaacgttccgcctgccgcctgcgcctggaagacggcagcctggacagctatgcgctgtttcccggcctccaggccgtgcaggaagcgcagccgccggcaggcgacgacgaactgctggcacgcatcggcgagatctggagggcccggctgggcgtggcgcaggtagcgccgcgcgatcacttcttcctgctcggtggcaactccatcggcgccgcccaggtggtcgcccaggtgcgcgaccgcgtcacgttcgtgctcggccagcgcggcgagctggacgaggcggcgctgcgcgccagcttccagcgcctggtcgaacgccacgaagcgctgcgcacgcgtttcctcgagcgcgacggcgcagccttgcagcgtatcgacgagcagggcgagttcgcctggcagttcgtcgacctcgccgcgctggccgagcacgaacgtgacgcggctgccgcgcagcgccgcgaagccgaggcgcagcagccgttcgacctggaaaaggggccgctgctgcgggtcagcctggtgcgcctggacgaacaggagcaccagctctgggtcaccctgcatcacatcgtcgccgatggttggtcgctgaacctgctgctcgacgaattctcgcggctctacgccgaagcctgcggtggccagccggccgacctggcgccgctggaactgcactacgccgaattcgccgcctggcaacggcagtggctggacgcgggcgagggcgcccgccaactggcctactggcgggaacgcctgggcgacgcggcgccggtgctggaactggccaccgaccatccgcgcacggcgcgccaggcgtcgccggccgcgcgctacagcctgcgggtcgacgaagccctggcgcgggccatccgcgaggccgcgctggaccatgaggcgagtgtcttcatgtggctgctggcggcgttccaggcgctgctgcatcgccacagcgggcagggcgagatccgcatcggcgtgcccagcgccaaccgccagcgcctggagacccaggggctggtcggcttcttcatcaacaccctggtcctgcgcggcacgccccgggcgcgccagccgttcgccgcgttgctcggcgaggctcgcgaggcgaccctcggcgcccaggccaaccaggacctgccgttcgaccaggtgctcgcagcctgcggccagggcggccagttgttccaggtgttgttcaaccaccagcagcgcgacctgtcggcgttgcgccggctgcctggcctgctcgccgacgagctgccctggcacagccgcgaagccaagttcgacctgcaactgcagagcgaggaggacgctcgcggtcgcctgaccctgaacttcgactacgccgcggacctcttcgaggaggccagtatccggcgtttcgccgcgcaatacctggagctgctgcgccaggtcgcggaagacccgcagcgctgcctcggcgatatcgccctggtcgacgccgagcaggcggcgcgcctcgccgaatggggcagcgcgccctgcgagccggcgcgcgcctggctgccggagctgctggagcggcaactggcgcagtccgccgaacgcgtcgccctggagtgggacggcggcagcctcggctacgccgaactgcacgcccgggccaaccgcctggcccactacctgcgcgacaagggcgtcggcccggacgtgcgggtagcgatctgcgccgagcgttcgccgcaactgctggtcggtctgctggcgatcgtcaaggcgggcggcgcctacgtgccgctggacccggactaccccagcgaacgcctggcctacatgctcgccgacagcggcgtcgagctgctgctgacccaggcccatctgttcgagcgcctgcctggcgcggagggcgtcacgccgatctgcctggacagcctcaagctcgacaactggccgagccaggcaccgggcctgcacctgcacggcgacaatctcgcctacgtcatctacacctccggttccaccggccagccgaagggcgtgggcaatacccacgcggcgctggccgagcgcctgcaatggatgcaggccacctacgccctcgacggcgacgacgtgctgatgcagaaggcgccggtgagcttcgacgtgtcggtgtgggagtgcttctggccgctggtcactggttgccggctggtcctcgccgcccccggcgagcaccgcgatccggcgcgcctggtggaactggtgcggcagttcggggnnnnnnnnnngttcggggtgaccacgctgcacttcgtgccgccgctgctgcaactgttcatcgacgaacccggcgtcgccgcctgcggcagcctgcgccgcctgttctccggcggcgaggcgcttccggcggagctgcgcaaccgcgtgttgcaacgcctgccggcggtggccctgcataaccgctacgggccgaccgagaccgccatcaacgtcacccactggcaatgccgcgcggaagacggcgagcgttcgccgatcggccggccgctgggcaacgtggtctgccgcgtgctggacgccgagttcaacctgctgccggccggcgtcgccggcgagctgtgcatcggcggcctgggcctggcccgtggctacctggggcgcccggcgctgagcgccgagcgcttcgtcgccgatccgttctcgaccgacggcgagcgcctgtaccgcaccggcgaccgcgcgcgctggaacgccgacggcgtgctggaatacctcggccgcctcgaccagcaggtcaagctgcgtggcttccgcatcgagccggaggagatccaggcacgcctgctggcgcagccgggggtggcccaggcggtggtggtgatccgcgaaggcgtggccggcagccagttggtcggctactacaccggcgctgccggcgccgaggcggaagccgagcagaaccagcgtctgcgcgccgcgctacaggccgaactgccggaatacatggttccggcgcagttgatgcgcctggcgcagatgcccctcggcccgagcggcaagctggatacgcgggcgctgccggagccggtctggcagcagcgcgagcacgtcgagccgcggaccgagctgcaacggcgcatcgccgcgatctggagcgaagtgctcggcctgccgcgggtcggcctgcgcgacgatttcttcgaactcggcgggcattccctgctggccacccgcatcgtctcgcgcacccgccaggcctgcgacgtcgaactgccgttgcgcgcgctgttcgaggccagcgaactggaggccttctgcgaacaggtccgcgcagcccaggccgccgggcgtaccgacagccacggcacgatccgccgcatcgaccgcgagcagccggtgccgctgtcctactcgcagcagcgcatgtggttcctctggcaactggagccggacagcccggcctataacgtcggcggcctggcgcgcctgagcgggccgctggacgtggcgcgcttcgaggccgcgctacaggccctggtgcagcgccacgagaccctgcgcaccacgttccccagcgtcggcggcgtgccggtacagcgcgtacatagcgatggcggcctgcacatggactggcaggacttctccgcgctcgaccgcgacagtcgccagcagcacctgcagaccctcgccgacagcgaggcgcaccgtcccttcgaccttgagagcgggccgttgctgcgggtctgcatggtgaagatggccgagcgcgagcactacctggtggtgaccctgcaccacatcgtcaccgaaggctgggcgatggacatcttcgcccgcgaactgggcgcgctctacgaggccttcctcgacgaccgcgaatcgccgctggagccgttgccggtccagtacctggactacagcgtgtggcagcgcgagtggctggagagcggcgagcgccagcgccagctcgactactggaaggcccagctgggcaacgagcatccgctgctcgaactgccgggcgaccggccacgcccgccggtgcagagccaccagggcgacctctaccgcttcgacctgagccccgagctggccgagcgcgtgcgccgcttcaacgccgcccgcggactgaccatgttcatgaccatgaccgccacccttgcggccttgctctaccgctacagcggccagcaggacctgcgcatcggcgcgccggtggcgaaccgcatccgcccggagagcgaagggctgatcggcgccttcctcaatacccaggtgctgcgctgccggctcgacggacagatgagcgtcggtgagctgctggagcaggtgcggcagaccgtgatcgatggccagtcgcaccaggacctgccgttcgaccacctggtggaagccctgcaaccgccgcgcagcgccgcctacaacccgttgttccaggtgatgtgcaacgtccagcgctgggagttccagcagacccggcaactggccgggatgaccgtcgagtacatcgccaacgatgcgcgagcgaccaagttcgacctcaacctggaggtcaccgacctcgaccagcgcctcggctgctgcctgacctacagccgcgacctgttcgacgaaccgcgcatcgcgcggatggccggacactggcagaacctgctggaggcgctgctgggcgacccgcagcggcgcattgccgaattgccgctgttcgccgccgaggagcggaagcaactgctgctcgccggcacggctggcgaggcagggctccaggacaccctccatggcctgttcgccgcccgtgtggcggccagcccccaggccccggcgctgaccttcgccggacagaccctgagctatgccgaactcgacgcccgctccaaccgcctggcgcgcgtcctgcgcggtcatggcgtcggcccggaagtgcgggtcggcctggccctggagcgttcgctggagatggtcgtcggcctgctggcgatcctcaaggccggcggcgcctacgtgccgctggacccggaatatccgctggagcgcctgcaatacatgatcgaggacagcggcgtacgcctgctgctcagccacgcggcgctgttcgaggccctcggcgagctaccggcgggcgtggcgcgctggtgcctcgaggaggacggcccggcgctggacgccgaggaccccgcgccgctggcagcgctgagcgggccgcagcaccaggcctacctgatctatacctccggctccaccggcaagccgaagggcgtggcggtctcccacggcgagatcgccatgcactgcgccgcggtgatcgagcgcttcggcatgcgcgccgacgattgtgaactgcacttttattcgatcaacttcgacgccgccagcgagcgcctgctggccccgttgctgtgcggcgcccgcgtggtgctgcgggcccagggccagtggggcgcggaggaaatctgcgagctgatccgcgcggagggcgtgagcatcctcggcttcaccccgagctacggcagccagctcgcccagtggctggagagccagggccggcagttgccggtgcgcatgtgcatcaccggcggcgaagcgctgaccggcgagcacctgcaacggattcgccaggccttcgccccggcgtcgttcttcaatgcctacggaccgaccgaaacggtggtcatgccgctggcctgcctggctcccgaacgactggaggagggtgccgccagcgtgccgatcggcagcgtggtcggcgcgcgggtcgcctacatcctggatgccgacctggaccaggtgaagatccgtggcttccgcatcgaactgggcgagatcgaggcgcgcctgctggagcatccgcaggttcgcgaagcgctggtcctggcgctcgacagcccgagcggcaagcagttggccggttatgtcgccagcgcggtggccgagcaggacgaggacgcccaggcggcgctgcgcgaggcgctgaaaacgcacctcaagcagcaattgccggactacatggtgccggcccacctgctgttgctcgccagcctgccgctgaccgccaacggcaagctcgaccgccgcgcgctgccggcgcccgacccggcgctcaaccggcaggcctacgaggccccgcgcagcgtgctggagcagcaactggccggggtctggcgcgaggtgctgaacgtcgagcgggtaggtctcggcgacaacttcttcgaactgggcggcgattcgatcctgtcgatccaggtggtcagccgcgcccgccagctcggcatccacttcagcccccgcgacctgttccagcaccagaccgtgcagagcctcgccgcggtggcccggcacagccaggccagccaggccgagcaggggccggtgcagggcgacagcgcgctgacgccgatccagcactggttcttcgacctgccgctggcgcgccgcgaacactggaaccagtcgctgctgttgcagccgcggcaggccattgacctcggcctgctgcgcaagtccctgcaacgcctggtcgaacagcatgatgccctgcgcctggcgttccgccaggtcgacggcgaatggctggcgcagcatcgtccgctgcgcgaacaggaactgctctggcacgttccggcgcattcgtcgaaggattgcaccggaacgtgccagagcagttcnnnnnnnnnngcgccgagctgttcgccaaggcccagcgcagcctcgacctcgaacaggggccgctgctgcgcgcggtgctggtggacggcccggccggcgagcaacgcctgctgctggcgatccaccacctggtggtggacggggtgtcctggcgggtgctgctggaggacctgcaacaggtctaccgtcagttcgccgagggcgccgaaccggcgctgccggccaagaccagcgccttccgcgactgggccggacgcctgcaggcctacgccggcagcgaatcgctgcgcgaggagctgggctggtggcaagcccggctgggtgggcagccggtcgagtggccgtgcgaccgcccgcagggcgacaaccgcgaggcgctggcggaaagtgtcagcctgcggctcgacccgcaacgtacccggcaattgctgcaacaggcgccggcggcctaccgcacccaggtcaacgatatcgacctga

SEQ ID NO: 325625 - DNA, 270 bp, Pseudomonas aeruginosa
gtgaagtcgcccccggcctcatgcagccagccgagcaactcggcgctgcacctgttcggtggacgcgaggacagcctgcgcagcgccgagttgctcggctggctgcatgaggccgggggcgacttcaccctcgacctgctcgacgggcagcactttttcatccgcgaacagcaggggcagttgctgcgcctgctgcgtcgctacgccggccagcatctgctgcgctggcacaaggacaaggtccggggaagcatgcgcgccgccagttga

SEQ ID NO: 325626 - DNA, 1971 bp, Pseudomonas aeruginosa
atggaagggctgaaactctacgcccgcttgctctggcggcagccgcgggaaaccctgctgttcgccctgcgcaccgtcgccgccgggctgctgaccctctacctggccttcctcttcgacctggagcagccgaagtgggcgctgatgaccgtggtcatcgtcagccagccgctggccgggatggctctcaagcgcagcttcgcccaggtcgtcggtaccttcgccggcgccgtggtggcggtgctgatcatggcgctgttcgcccagcaaccgttgccgttcttcgtcgccctgggactctggctggcgctctgcaccgccggcggcaccttgctgcgctacaccgattcgcacgccttcgtgctcagcggcttcaccgcggtgatcgtcgccgtgctgtcgattcccgatccggaaaacaccttcatgctcgccgtggtgcgggtcaccgagaccctgctgggcgtcgcctgcgtggccctggtcagcctgctcagcgcgcgtccgcaggcggtggcgaagggctacttcgcccaggtcgacggcctgatccgcagtaccgcgcggcacgccgcggcggtgatccgcggcgacgagggcgacgagtcgttcaaccagcggcagatgcaactggtcgccagcatcaccgcgctggacggcctgcgccggcacctctatttcgacgcgccgaacctgcgccgcgccgatggcctggtgcagttgctgggcaacctgctggtgctgatggcctcgcggctgttgctgctgcgccagcatcgcctgctggtgcgggcgcactgggtcgggccgttgccggcggatatccaggcgctcctggatcgtgcgctgcgggtgctggacgcgctggccgagcaggggcgggcggtaccctccgaggtgctggaggagttccaggcggtgcgccaggccttcgatgccgcggcgacgcgcgcggagtcctacgacgaggcgctgagcccggcgctgcgcccgcaggtggcgatcctgcgctgggaatacgcgcggctgttccagcgcctgggcgaagtgctcgaactcaacgatgcgatccagtccggccgccaggccagcagtttctaccgccgtggccaggcgcaggcgctgcacctggactgggcgctggcctcgatgaatgccgtgcgcgctttcgtcgccttgtcctgcgccgcctggctgtggatcaccagcgcctggaacggcgccctcagcagcctgctgctggtcggcgtgatgtgctcgctgatggcgaccttcccgcgtccgctgctggcggcgcagaacttcctgcgcgggctgctgctggcgatcctgatctcggcggcgctgctgttcgtgctgttgccggcatccgccgacttcgagtggctggcgctgtggatggcgttgctgctgtacgtggtcgcggtcggcctgagcagcccgctgagcgccgggatcgccatgggcatcggcctggagaccctgctgatggtggcgccgcagaatatcgcggtctactacagcaacgcttcgcagtggttcgagttcgtcggcggcttcctcgccgcggcggtcctcgccgtgctggtgttcgccctggtctatccgttccgcgccgacccgcgcctgcgccggctgctctacctgtcgcgccaggacgtcgcggaaatgtcgcgctgcgaggccagcgaggcgcagcgcttcgccttcgagacgcggatgatcgatcgcctggcggtgatggtcggccacctcgccctggccgccctgcagcgtttcggccggggcctggaggccttgctggcgcagccgtcgaaggacctcggggcgacgcggcagcgcttcatcatgaatgtcgcggtactgatcctgcagcagtcgctgcaacgctatcggacgttgctggaggaggaccgcggcgcaccggcggtcgtcgaagaaccagaagaggagggcggacatgcccgctga

SEQ ID NO: 325627 - DNA, 810 bp, Pseudomonas aeruginosa
  misc_feature (726)..(735): n is a, c, g, or t
atggccactcatgcacttctactagagagcggaacggttctattctttgacgtagtaaccgattattccgttcagcaacaaacacaaaccactgagcatactcttgaaaccggggctgtcacttctgaccacatcattcagcaagctagacagattcagctaaacgctatcttgtctgacgcggatttcaactatgatcgccctacagatacagccatccgtcaagctagtgcagagaccgggcaagacctctcccgcactcaggttcaagacccgcttaacaggatcaacgccaaagagactcagcctttggtcactgttagtgactccggcctgagcattgtctctggcctattgggtgatgctggcgtcccctctgtgaccgttccagaccaaggcaagacaaccccagcgagggaagtagcagagcgtctatcggagatcgagcgtgcaggacagacagtaaccttgctcactttccgcctagatgaatctggggctgcgctgcctgataagacatacacagatatgcttattactaacctcactttcaatgaggatcaggactccggcgatggtgttttctttagtatgagtttacagcaactccgctacttctcccctagagaaatcaccatccgcacgaacaagggtcgtcaacctgccaagaggacggaacgcccatctatcaagaacgatgctgctaatggccctcaagtccaaacnnnnnnnnnnaactccgcagcttcggacgttctcaagcccaagaagcctgatccgaactccgatgaatattggctagaatcttaa

SEQ ID NO: 325628 - DNA, 669 bp, Pseudomonas aeruginosa
atgcgtaaagacgcagtattcaccattgccggagtcgattaccacactcagcagctaccagcagccgaagccttcgaccttctaagactaggcgattgcctttctacattcgtacaggctgctcagacagactccagcattgttcacctgacagcagccatcgctgaaatgtctgattacgaagagtttcttcgtagggtattccggcatatccgtgtagctggagaagcgaatcccattgatgttgatagttactttggcgggaggtatgagcttatcccggttctactgacccactttatcgaactcaattaccttgagtttatgtccttcctagctagacactctccagttccagcagagccgcctaagcctcagatcgatccgtggacgggtaagccaatggaaacccctcccgcttctaagactcccgttatcgaaaccaaatacgacagagagcgcatgcaagtgcaaaagaagtgctccgtcgatatctacatgtaccagattcttacaagtaagccgtctcaagccgatcttcatcagttgcagacgatttactccctagatgacgcggtaactttcctagaaatcctgaacacctacgcggcattccaagatattgctttccgtgaacaagaagaagctcacgctaaagccaaccaataa

SEQ ID NO: 325629 - DNA, 1680 bp, Pseudomonas aeruginosa
  misc_feature (1552)..(1571): n is a, c, g, or t
atgatccaagaaactattgcccagcttaccgggcatttgaagtttgttgttgactcccgcccactgcgtgaattcgaacgcaatctagccagagtacagaccaagctaagccagtttgccaagactgcaaaccagaagattcaattcaagcccatgctgaatgccaatgtaatggcccaacagaagggtgcatttcagcaactaatgcagcaagccaagcttcagcgcatcactaacgataacgcccatcgtagtgttatggctaacatgaaacagcagcaacaggccgctatgggtaatgccaagcttcagctagctaatgcccgcattcagcagcaagccgctattgctggagcccgcctgacagcagcaacagcagccgctgagcgtagagcccaagctgcccgtctgacaatgaaccaacgtattgccgctgctactacccgtcaacgccgtctagatgaactccacgccatccgcgtacagagggctcaactcggcctacaacgcgctcaggcagcttctagagccggaggcggtgggttcggtggggtcggagtcaatgctggtgctatcgcttccatgatgcccggtggtgggttctcttccctgatctctggtagtggtgctgccgctgctggtctgggagcgctggctggtgctacagcaggcgcaatcatcggcctccgcatgctggctacagaagctcagaaggctggagactggcaggctcacgcatccgcacagatgaaggtgtttgatagtcaagctgtccagcagaacatggaatggctcttcaatatcgccaatgacctaggcgtctccgcccgggacacacagcaaggcgtaatgcgggctcttattggtatgcgtgatggcggcatgagcacaaacgcagccaagcagtctacatacgatgtaatggcctatgcccgggcttccggcctagacacagccactgtagacctcgtattccgtgcgatgggccagatgctgtcgaagggtcaagtttatagtgaagagcttaagtctcagttcgccgaacatatgcccggagctatgaagattgctgctcaagcttgggcagaactaaacaacctcccagccgacgaaggctctatgaaacgcctttccaaggatatggaagatgggaagatcgccggggctatggtggctccattcattgagcgcatgacctcgattatgggtagtcgtgccaacgatggaggccgcctcgatatcatccggcagagcggagacgcagcaatcgcccgccgtgagaacgtaatgcaacagaacctagccggtgcatggaacgccaatggcggggaactgaagaacgctgttcaagagttccaaggtgcggcggttcctcttctccgtgagcttggccctctgctaaaagctctcgctccgtacagtgctgctatcgtcaagagcactacggatatggccgtttctctggctcagttccttccggggattacagccgggatcgaaggattctccgagaacccatacttcccccgtctcggcgccctcgccctggccnnnnnnnnnnnnnnnnnnnnaactggagttcattggcacagtaatcaacgtagctgcccgggcaatcgaatggattgcaaacaagatgggtgcaaacttccgcccagcctctcaacagcgttccgctga

SEQ ID NO: 325630 - DNA, 960 bp, Pseudomonas aeruginosa
atgccgcaacaacaatctattacagacgtaaacaatgcgtctaaccctcgaatctttaaagatcgagtctaccgccttacagtgcagaaatcagccgacaacccttcggttgctcttctgtatgaaggccagttctctgatgacaatgctttgcagcttgttttcaacgtagagaagaacgcagacagcaagcaacgtatctccaatggtgctgtccgtatttataacctgagccacacaagccgggagagtttacaggaaggcatgataattcgcctagaggtgggttatcggtctactggcctagtcgagcttatcaatgctgacctagtgagtgtggagcatgagaaaagtggtcctacatgggtcacaatgcttacagtggccgagggacacaagctgctaacgcaagtgaggctagctgaaactgtctctcctaacgtccctgtagaacagacactagagattatccgggaagcgatgcccgggattgctagaggcacatatgccctcccgcctactcttgcctctggtcggtctggttatgttttgtctggcactccaaggcaatgcctagatcagatttgcgaggctcatgacctccagtggaacatcacccgggacactctgacagttacagaccgggacggcacatatgaggctaacacttctaccgctcctctaatctctccagagactggaatggtgggaagcccccgctctctcacaagaaaccagagagctacagccaaggacaagaaggccaagccggggatcagagttacatccctgattaaccctcaagtgaggccagccgggattatccgtgtggagtctcagatgcatacaggcttctaccgtgttgccaagatcactttcgagggagactggcgggggaatgcttggtatatgcacatcgaagctacagagattgactctgacattactcaaatcaactaa

SEQ ID NO: 325631 - DNA, 726 bp, Pseudomonas aeruginosa
atggtcgggattaactctcaaggtaatgattaccttctagaacaactcaaaacttgcatgccagcccgggtattgagagtagcctcacaagaagagcttagggtagacgtgcaaccagtgattgacattctccgcaaggatggagatagccagccaatcccaacaatcctaaacgtccctgtactgatgctagggggctccaagagtctgattagctacccggtagaggctggggattttgtgatgcttgtcttctctcaattggatatcgatagatttatcgagggcactggcactaatgctcatgagaagaccccatacacagcccgtcgcttccatcttcaagatgctgttgctatcccgggcctattcccattcggggctaaggctaactccccagctactcgcaccaatccacacaacccacaagacctagttgtaactcacaacaaaggaacagggaatgaagttgaggtgcgtctaggcaaggacgggagcctaactctgaagagcccgctcgctgtgaatgttgagtccccttctgtcagtgtgaagactcaaaccctcaaggttgaagccgctaacactacatggacaggcaacatcacacacagcggcaactatgtgcagactggtgaatccacattcaacggaattcagttcagcactcacaaacacggaggggttatgccgggaggcggaacaacgtccgtccctcaaccctaa

SEQ ID NO: 325632 - DNA, 204 bp, Pseudomonas aeruginosa
atgcacaagacctgcacttgccgggcttgcgggaagctcttttcccgtaagaagcccaagccttactgctcgccagcctgccggctgacacacaagcccacacagggcacagaacacagcaccaacacaacccccaccactcaacaatccagcgtcctagagggagctattagccgtgaccgcaacacccaacacaacacgtaa

SEQ ID NO: 325633 - DNA, 1101 bp, Pseudomonas aeruginosa
gtgaccgcaacacccaacacaacacgtaagccatccacacagaaacaacgcacatgcaaggccaaaggctgctctaagcgcttcactgtgaagccttctcacccgggcaagctctactgctccgctacatgcaaagactccataaaggtgcggaaggtatccgccgagcgagccaaggagcgagaacagaagcgtctagacaacgcccacaagagcgccttcttccacttcctcgctgctgaatgcaaacgggccggcactctagaaatcctgcacaaccacgatgttgattccttgatggcccttcactatgtctacagcgaccgcctacgtttcaaccgctttggggctgtccgcaccttcgatctgtgccacatctaccctgtagctggagagcgtctaggcctactccgtgctgacaacctagtgattgctcccgccgccttgaacaaggctcatggcaatcgacatttcgggtctggagtatccattgatagagcctccctcaagaagtctctacgtgtgtccaaggacgcagcctcctccgagatcacagaacgcattgtgaagtatctagggaaggccgtagtagccgagttctccgctctggccaacctgcaacctacccaacgcttcaagaatgtcctgttcctacagcagcattgggaagctcttgtagagatcaagccagagatgaagagccatagcgatctagacaagctctcctctgtcgttatctctggtctggttgcacaagtgaagggtaagcccggcttcaagccttcggctgatgttgtccgcgtgatcgatgttcttcatggagagtgcgaacgcctacaggcctactccccagagctagccgctctaaccaaggctctggctgaagtggctgaagatgacgtgatcgacctaggtagaggcatggtcaccactcaggccaagaatgtccctagctccgctatcaaggccgtctttgacgctctacacggtgcagaagtggcattcgccgttaaggctctgaaggccgtttctagccgcgattatgctcaagcgcataaggatgattgggatttgtgggaagaactagatatggtggcttag

SEQ ID NO: 325634 - DNA, 696 bp, Pseudomonas aeruginosa
atgaaagtagttgcataccagcgagtatccacttccaaacaggaagcctccggcttggggctggaagcccaacgggagtacatcctcgcagccgctaaggctgaaggctgggaagtggtcgaatggtatgtcgaggctatcagtggctccgtggctccggaggagcggcctgtaatgtctcaggctatcgcctctgggctgcctgtcgtggtagcgaagctagaccgtattggccgtgatgttgagcacgtagccgctctgatgaagcaaaccactatcaaagtggccaccatgccgaaagcggatgctttccagctccacctcttcgctgctctcgcagaacaggagcgccagtttattcgtcagcgtaccaaggacgccctgcaagccctcaaggagcgggctgagagtggttgtgaagagagtaaggctaaggtagcccgtagagacgaagcactctccaagggccatacagacgccatcagagccaaaggccgcgaggccttaacacacaaggctgacaccttcgctgagtccgttaggtctgacttcgaatcctgcctgttcaggggctgcaacactctacaatcgatggctgattgcttgaatggtaggaaggtggctacggcccgtggctgtgagtggactccgattgctgtttctcgtctgatgaagcgtttaaatctcgctttctga

SEQ ID NO: 325635 - DNA, 960 bp, Pseudomonas aeruginosa
atgcccgcacatgccttgctcgaaatccggcgggccagcacccaggacattcccctggagcagcggctggcgttctgggaggactacaacgcttccatcctggttggcctgaaatgttcgtcgtattcccaggtcggcttcgccgcgacccaggacaacctctgcctcgaacgcctgcggctggcccgcatcggcggcaacgagcacgtggtggagcgcgaccgctcgatgatccgcgcagtgcccaaggagtcgatcttcgtctccctggtgcagggcagccagtcgttcttctaccaggacaacggctgcaacctcctgcaaccgggcgagctggttatctaccggaccgacaagccctacctgttcggtttttccggaccgatgcggcagttcatcttcgacattccccaggacgatttcgccgagcgctgcctgcgcgacttcaagggaccgctgaagatcggcgcggaaagcccggtgcagcgcctgctggtgcggaccctcggcgagcgtacccgggatttcctcgacagcccccatggcgaggatgccgagcgctaccaggaggaagcctacgacctgctggcgagcatcatcagcgaccatgccggcgagcaccgcgccagcgccctgggcgcgtcctacctgctggcggccaagcagtacatccagcagcacctcgacgaacccgccctgagctgcgagcgggtggccgccgccactggcgtctccagccggcacctggcgcggctgttcgcccaggaaggcagctcgcccgggcgctacctgcaggagcggcgcctggagcgcgcccgccagttgctcgcctcgccccagggccggcgcctggacgtcgccgaggtcgcctatcgccacggtttctccagccaggcgcatttcgcccgggccttcaaggcgcgctacgggatgacgccgagcgaggcgcgtggccgctag

SEQ ID NO: 325636 - DNA, 822 bp, Pseudomonas aeruginosa
gtgccgccgtgccccggacctttcagcgcattggcggacaaggcgcctcccaccatgaccttgccgtccgggccgccatcgagcacgatccgcccgttcttgccgcgcagcgaacgggcctcgatggcaccctgggagttcaccaccgtgttgagcagcgcattggcggtcctggccgccatcaggactcgccccccgtcggccttgagcaggccgccgttgcttgccagcgcattggcgaccccggcgtcgacgcggatgtcgagcagcttgttgccgtcgaaattcagcgtcaggtcgctgcccgcgccgagcccgacaccgcccatctgcgccaggaccgtcccgcggttgtcgacctgcgcgcccagcagggcgatgctgccgccttccgccgcggtgatggcgcccccgtggttgaggacaccgttggtagagggacccgtgaaacggtatctggaggagttgccgttgaactcggcatccgtgatgtccagcgtggaagccaccaggccgccgacattgacctgggcgccgcgaccgaagagcacgccgttggggttgaccaggaagacctggccgttggcatcgatccggccctggatatcgctggccttggtgccgatcacccgattcagggcaatcgagctactgctcggctggttgaagatcacccgctcgccggcggcaacgctgaaggagtcccagttggcgatcagcttgtcgaccttctggttgaccgacaggctgttgccgcccgacaggtgtatctccccgttcgcgctcccgccgaccaccgttcccccgcttggcagcgcatag

SEQ ID NO: 325637 - DNA, 1455 bp, Pseudomonas aeruginosa
atggccttgccgaccctacgcatcctcggtttcatcatcggcatcttcctgatcactctggccgccagcatgctggtcccgatcctgaccatgctcgccttcgaccgtaccgaaggcatccaggcgttcatctggtccagcgtcgccaccttcgtcaccggcctcggcctggtcctgccggggcgtcccgagcatgtccacctgcgcccgcgggacatgtacatgctcaccgtatcgagctgggtgctggtatgcatcttcgccgccctgccgttcgtcctgcagcagcacatcagctacaccgatgccttcttcgaaagcatgtcggggatcaccgccaccggctccaccgtgctcagcgggctggacgacatgtccccgggcatcctcatctggcgctcgctgctgcactggctgggcggcatcggcttcatcgccatggccgtggcgatcctgccgatgctgcggatcggcggcatgcgcctgttccagaccgaatcctcggaccgctcggaaaaggtcctgccacgctcgcacatggtcgccaagtacatcgtcgccacctatgtcggcatcaccctgctcggcagcctggccttctggggcgccggcatgagcccgttcgacgcggtcaaccacgccatgtcggcgatttccaccggcggtttctccacctccgaccaatccctggccaagtggaagcagccggcggtgcactggaccgcggtagtggtgatgatcctcggcagcctgccgttcgcgctctacgtcgccaccctgcgcggacaccgcaaggcgctgatcaaggaccagcaggtccgcggcctgctcggcctgctgctggtgacctggctgctgatgggcacctggtacgcggtaacctccaagctgccctggatggatgccttccgcatcgtcgcggtgaatgtcacctcggtggtcaccaccaccggcttcgccctcggcgactacagcatgtgggggcacttctcgatcatgctgttcttctacctcggcttcatcggcggttgctccggctctaccgccggcggcatcaagatcttccgcttccaggtcgcctacaccctgctcaaggccaacctctaccagttgatccacccgcgcgcggtgctcaagcagaactacaacggccatcggctggacgaggaaatcgtccgctcgatcctgaccttctcgttcttcttcgccatcgtcgtctgcctgctcgccctctgcctgtcgctgatcggcctggactggatgaccgccctcaccggcgccgccagcaccgtggccggcgtaggcccggggatgggccccatcatcggcccctcgggcaacttcgccagcctgccggacgccgccaagtggctgctggccgccggcatgctgctcggccgcctggagatcatcaccgtgctggtcctgctgaccccggcgttctggcgccactga

SEQ ID NO: 325638 - DNA, 765 bp, Pseudomonas aeruginosa
atgggttcgatcctttccctgcgccactacagccacgaccagatcgtccacagccatgaccatgcccaattggtcctgggcctcagcggctgcctcgagttcgaggtcgaggggcgcggcagccgcgtgttgcggcagaccttcgcggtggtgccggcgcaagcccggcatgcctgctcgagtcccgccggcagccgctgcctggtcctcgacctgccctgcgacggcagcctgctgctgggcctgggcgaacacgccgaagccggcaggcggctgttcgagcgaccgcaggcgctgtcgctgacacccgcccagggccaactggtgaactggctggccagcggcccgatcaacgacccggtgatcgcccaccagggcgccggcctgctcctcgccagcctggccagcgagcgccagccgccgcgccagcagccccgcctgccactggccagcctggacgcctacctcgaccgccatgccgcccatccgctacaggtagccgacctggcgcggctggccggtctttcggtggcgcgcttccacagcctgttcctcgccgagaccggacagacgcccatggactacgcgcgcagccgacgcctgcaccaggcccacgaactgttgttggagagcagcctggcggtgggcgagatcgccgcccgggtcggctacgcctcgcagagcgccttcaccgcagcgctggtccgcgagttcggcgtcaccccgcgacaactgcgtcgcgagtcccgcgacaaaaccggctag

SEQ ID NO: 325639 - DNA, 894 bp, Pseudomonas aeruginosa
atgaatcgacgttccgccctcgccgccctgcacggcggcgccctcctcttcggcctgaccggggtgttcggcaagctggccagcgcctcccccggggtgatcgtgttcggtcgcgcgctgttcgcggtgctcgccctcggcctcttcgcccgcctcgcgggccaggcctggcgcgccctgggacccgcgcaatggctgcgcctggcgctctgcggcctgctcctggccgggcactgggtgagtttcttcatcgccgtgaagaccgccggcgtggccatcgccaccctcggcttcgccagcttcccggccttcacggtaatcctcgaagggctgctcttccgcgagcgcattcatctcgcggaaggactgctggtagtcctggtcagccttggcctggtgctggtcacgccgaacttcgacctcgccagcggcgccaccctcggcctgctctgggcgatcctttccggcctgctgttcgccctgctgtcgctggccaaccgcagcaacagcgggcaggtcggcccggtgcaggcggcgctctggcagaacctggtagtcgccctgtgcctgctgccattcgcggtcggcgaactaccggcgctacccgctctcgactggctctggctggccctgctgggcgtcttctgcaccggcctggcgcacagcctgttcgtggccagcctggcggtggtcaaggcccgcaccgcggcactggtattctccctggagccggtctacgggatcgccttcgcctggctgttgttccatgagacgccggggccgcggatgttcctcggcggcgccctgatcgtcctcgccatcgtgctgtcggcgcgactcggcgccaggaaccggccggtcccggacaacggcttgtccgctaaccggggctga

SEQ ID NO: 325640 - DNA, 954 bp, Pseudomonas aeruginosa
atggacaaactcaccgccatggccaccttcgtgaaggtggtggacgccggcagcttcacacgcgcggccgatgccctgggcctgccgaaagctcgcgtttcgcagcgcgtcagcgatcttgaaaagcatctaggcgtgcgcttgctcaatcgtacgacccgtgccctgagccttacgcacgatggcagcgcgtacttcgacaaatgccaggtcctgctgcagcagatagacgaactggaggccacgctcaggggcgggacggcgacgcccatcggccggctcagagtggactccctgatcaccatcgcccgatgggtgatcgctccaaggctgcacgacttccaggcgcgctacccgaggatccagctgcggctgagtagttcggaccggatcagcaatctgctggaggacggcatcgattgcacgatccggggaggtgcgctcaaggactccagcatgatcgccaggcatctttgcgacatccagatgggcttgtatgcctcgcccgagtacctggcctccataggcggtgtagacagtccgaacgatctatcgcagttcaggcggttgagctggttcagcggcagggagcgcaacccgttcatgtgggagctggagtccggcccggagcgtttcgtggtgcagtccggcgatggaatgcagttcgacgaacccgacgtggctatttcggcctgcatggcgggcagcggcatctgccctggcgccccattcgcggtggctggattcgtacgcgcagggaaacttgttccggtactgccgcaatggcacttttctgcggcgccggtgcatgtcatctacccgggctccaggcacctgtcggttcgtgtgcgctgctttgtgaactgggtcatggagctgttcgcggagaaccccgagatacagctcacgcccatcgcgctggcgctcgagtccggcctcgcgcaacgaacctga

SEQ ID NO: 325641 - DNA, 555 bp, Pseudomonas aeruginosa
atgtcaaaagcagtcgttgtttatttctccggatatggccataccaagcgcgtagcacaagcggcggcggaaggcgcacaggcttcgctggtcgagatcgatagcgagggcaacattcccgaggcagcctgggacttgctcgaccaggcgcaatccatcctcttcggcgcgcccacgtacatgggctcggtgccttggcaattcaagaagttcgcggacgccacttccaggaagtggtttgttcggcagtggcaggacaaggtcttcggcggcttcaccaacagcgcaagcctgaacggcgacaagcaggtttccctgatcctcatgcacacgctggcgtcccagcacggcggcatctgggtcagcctgggcctggctcccgccaacacctcggcctcgagccgcgcggatatcaacaacctcggcgcctcggtcggcgcgctggtgcagtcgccgtccgacgcggatgcccaggccattcccagcggcgatctcgagaccgtgaagctctacgccgctcgcgtcgccaggatcggacaacagctgcatgcctga

SEQ ID NO: 325642 - DNA, 618 bp, Pseudomonas aeruginosa
atgaaactgtactactcccccggctcttgctcgctggccatccacatcgtgcttcgcgaggccaacgtgcctcacgaactggccaaggtcgacctgtggcagcacaagaccgcctcgggcggcgattacttccagatcaacccgaagggcacggcgcccgccctcgagttcgaaggcggcttgctgaccgaaggcgccgccatcagccaatacctcgcggatcgctacgccccaacgttggtgccagccaacggaacgctggaacgcagccgtttgcacgagatactgaattacctctcttcggattaccacaagtccttcaccccgctgttctacctgtccccttcggacgaccccacggccgcgcagcgcccagtgatagccaaagtggcctacctgaacaacctcctcgcggacggccgcccatacatcctgggtgacgagttcaccgtcgcggacgcacatctcttcgcccttacgcgctggtgcccccaattcggcatttcgctggccccattcccagcattgatggatttcatggccaggattgcagcccgtccggcagtcagggccgcgctacaggccgaaggactggaggaacaccccgaccagtgctga

SEQ ID NO: 325643 - DNA, 840 bp, Pseudomonas aeruginosa
atgtcgaagaaaattcttgttctaggtgcgacgggaacagtcggcaagccgttagtcgaaggcctgctggccaagggagaggccgtcaaggccgcttcccgcggaaatcggaaaatggatggagtcgagagtacgccgttcgatttcggcaaaccggaaaccatcgccaccgccctggagggtgtggatcgcacttacatgctcctgcccgccggctacctgaacgtacgcgatctgctcctgccgttcgtcgaagccgccgcaagccgcaaggtgaaaatagtcttccagagcgcctttggcgtggatgcgaatggcgccaaccccatgcgccaaatggaaatcctgctggagaaatccggcacaccccatgtgatcttgcggccgaactggttctccgacaatttccatcacttctggaaagccggcctcgaccaggggcagatcgccttgccagccggtgatagcaggaccagtttcatcgatgtgcgcgatattgcggccagcgccatcgccgcgctcacctcaaccgctttcgacggcaaagcattcaacctcaccggtcccgaagcgctcagttatgccgatgccgcggcgatcctgtccgaagtgaccggcaagcccgtgcgatacgccgcgacatcggacaaggcgttcatcgacatgctggagaacaacggtgtgcccgccgccaatgcggcgcacatggcctcgatcttccacccggtgcgccaaggctggatgagcgtagtgaccgacgatgtcatgaagctcaccggcaagagaccgcggacactgcgggaatacgcacaagacaaggtcgccgccctgacggcctag

SEQ ID NO: 325644 - DNA, 387 bp, Pseudomonas aeruginosa
atgcaattttccaaagaccattactgggttcgcctcgccgacaccctcgatggccacgctatcgacagcgttgtcgtcggcgtcaccccacgggcgctggccggcctgggcaacctgatttcggtgatcctgcccaacgtcggcgagacgttggcgcagggagccgccgcggccgagatcgagtcggacaaagcggtgacgaacctgtacacccccgtctccggcgaaatcatcgccgtcaacacggccttgcgcgacaccccgacgcttgccaacaccgacccgttgggcgccggctggttcttcagggtcaaactcagcaacccggggcaactggatgcgctgctcgacgagaaggcttatgccgaactgttctgggccccgtga

SEQ ID NO: 325645 - DNA, 744 bp, Pseudomonas aeruginosa
atgacactcatgaactgcgatccggccaccggcagttgccggattcccgacgctgctcccatcctcccccagggggcgaagcaggcccctggcggcgaagtcacgctcaggtacatcggcgaccccatgtgctcctggtgctggggtatttcctccacgctcgaagaactcgcacggtactgcgaacagaagggtatcggcttcaccctcaccatgggcggcctgcgcgcgggcgggggcgacgcatgggggccggagttccgggagtttctacgccgggaatggacccatatcgccaaggtcaccggtcaaccattcggtttttccctgctgtcggcaaagcatttcgactatgacacggagcctgcctgccgagccgttgtggtcgccgagcaaatgctcgaccagaagcggcctgtcgcctccgcgaccctggcatttttctctgccgtgcagcgcaagttctatgtcgaaggcgaggaccccaagaacgtggacttttatagatccatttgcgaagacgcttcgctatcgttcgaagacttccgcgcgcatttcgccactgccgctgcacggcaagccgtctatcggcaattcgcccagtgcggagagtggggcgtacgcgcattccccacccttctgcttgacctggctggtgatctgaagcaactcagttcaggcgccaccacagcggcaagcgtgatcgaacgtatcgaacatctgctgggcgcacgcaccaactga

SEQ ID NO: 325646 - DNA, 210 bp, Pseudomonas aeruginosa
ttggcgggcactgctctcgataaccaggaaccctatctgcgccaggtgctgggcttcgtcggcatccacgacgtcaccttcatccacgcggagggcatgaacatgggcccggagttccgtgagaaaggcctggcgcgagcccgcgagcggatgctgcaggcgctggaaacgaacacttccctttgcgtccctctgccaacgctccggtga

SEQ ID NO: 325647 - DNA, 846 bp, Pseudomonas aeruginosa
atgaagttcgaaggcacccagtcctacgtcgccaccgacgacctcaagctcgcggtcaacgccgccatcaccctgcagcggccgctgctggtgaagggcgaaccgggcaccggcaagaccatgctcgccgagcagctggccgagtccttcggcgccaagctgatcacctggcacatcaagtccaccaccaaggcccaccagggcctctacgagtacgatgcggtaagccgcctgcgcgattcgcagctgggcgtggacaaggtccacgacgtgcgcaactacatcaagaagggcaagctctgggaggccttcgaggccgaggagcgggtgatcctgctgatcgacgagatcgacaaggccgacatcgagttccccaacgacctgttgcaggaactcgacaagatggagttctacgtctacgagaccaacgaaaccatcaaggcgaagcagcgcccgatcatcatcatcacctcgaacaacgagaaggaactgcccgacgccttcctgcgccgctgtttcttccactacatcgccttccccgaccgcgagacgttgcagaagatcgtcgatgtgcactacccgaacatcaagcagtcgctggtcagcgaggcgctggacatcttcttcgacgtgcgcaaggtgcccggcctgaaaaagaaaccttcgacttccgagttggtcgactggctgaagctgctgatggccgacgagatcggcgaagcggtgctgcgcgaacgcgatccgaccaaggcgatcccgccgctggccggcgccctggtgaagaacgagcaggacgtgcagcttctcgagcgcctggcgttcatgagccgccgcgccagccgctga

SEQ ID NO: 325648 - DNA, 408 bp, Pseudomonas aeruginosa
atgcttaccggtctcaatcacctgaccctggcggtcgccgatctgccggccagcatcgccttctaccgcgatcttctcggctttcgcctggaagcgcgctgggaccagggcgcctatctcgaactgggttcgctgtggctgtgcctgtcccgggagccgcagtacggcgggccggccgcggactacacgcactacgccttcggcatcgccgccgcggacttcgcccgcttcgccgcgcagctgcgcgcgcatggcgtgcgcgaatggaagcagaaccgcagcgagggcgattcgttctacttcctcgacccggacggccatcgcctggaggcccacgtcggcgacctgcgcagccggctcgcggcgtgccggcaagcgccctatgcgggaatgcgtttcgccgactag

SEQ ID NO: 325649 - DNA, 780 bp, Pseudomonas aeruginosa
atgacgcccagaaaaggaaagctacctgccgtgctcgcctgcatggcatcgctggcgggctgcaacatcaacccggcgaaccagggctcggtgtcgtcctggttctccatgcgcgccggcgatccgcccagcttcgtcaccggcgtggtcggcttcgagaacaccggcagcaacgacccgtccacccgcctgaccctgcgtttccgcgatcccgtctccaagacccatgcggcccacgtcaccacctcgtcgtactccgagctgttcagcctcgcactgacgccgcgctactacgagctttacgagttcgaggtgaggtacctgtcctataccgtcacccgcgagaccggtgcgtacgaggagcgctgcgaggccaacggcgaggcgctggagaagacggtccagaaaaggaagcgcagcgtcacccacacggcggtgaacgtggagtccaactgtcgttctacgccgctgaccaagaccgactactactacgagacctatacctccaagccgttctccgcgccgttccgtgccgagagcttcgccaccaactacatcggcgacttccgcgtgcagtgcagctacaaggagaagaagggcaagaccctcgtcgatagctgccgtctcaactacggcgccgtcagccgcgatcgggtggatgcctgggtggcgcagatgaacgaggcagacaaggacaagcgcgagccgctgccgccggtacgccagcaggcggtcgacacgaagaaggccggcaagctcatccattcggtatttcgctga

SEQ ID NO: 325650 - DNA, 201 bp, Pseudomonas aeruginosa
atggtcaagcagctcaagaccgatatgcgccgcaagcaccaactaccaaagaacatcccgccatacatcttgcccctgtcggtgcaagccatcgagatcgttcgatacctgttggaagagttcaagccggcacaacgctatctgctgcacggtgacgtggacatcaagtcccgcatcagtgccccctcaacagtgcgctga

SEQ ID NO: 325651 - DNA, 471 bp, Pseudomonas aeruginosa
atgacggcacccaggatgcgagcctcgaccaaggcagcgactcgccgtgatgaagaccagttggtccagcgtgcaatagccgtgctggagcgccgtatgttccggcgcggccaggaattactgagcccgcgcggcctgcgccaataccttcgactgaggctggtggggaaaagcgaggaggtgtttgccgccgtgtttctcgacgcccaatggcgcgcgctgttccgcggcacagtcaatgcggcgccaatgtatgcgcgcgtggtggtcaagcgcgcgcttcggcacaatgcggtcggcgtcgtcgtcgcgcacaaccatccatcaggcttggccaccccgagccaagccgatattgctgccactcggcagttgaaggcggcattgaaccttgtcgacatcgagctgctggatcatttcgtcatcggacgcggtgagcccttttcctttttcgacgcccagctactgtga

SEQ ID NO: 325652 - DNA, 909 bp, Pseudomonas aeruginosa
atggaaggtgcagcacacgaatcgacagcgtattcctctcccgccgatgccgaccatggcatggtcacactgcagcccggcttgatcgtctgccatacggttgcaaccagccttggcgctgtctccaccaccaagacgttcgacggtgactgcgagttcattcacctcaactgccaactggccggaaagttcaccggacgggtcggcagccatcctttggatttttcccaaggagacgtctcgcttggtttttcggctggcgaacggttccaaatccagcattgcgaccggtttgagaacctgacggtgatggtcacgccagacgtgctatgtgagttggcgggggaagaagtgcgccccatgctcggccccgaaggcaatcctggattcttcgtccggtatgcgggactctgccgaaaatcgattcgttctgccaaaagcgttgccagcctactggccacggctccgtgtcagcgcctcctgcttcacgctgcaaccctcgacttcctgcattggcatctcgccgcgttccgcaactgcgaagactgcaggcgactctccgtgcgcgaatgtcggcagctggaaaacgcccgggcactgctgctgcaggatctcagcacccctccaaccattgccgaactcgcgaaagccgtcggcatgaaccaatgcaagctaaagaagtgcttcaaagaccacttcggcagcaccatctacgccttgtttcaagagcagcggatgagcagcgctcagcagctgctgcagagctacaacgtgaccgagacggcaatgatgcttggctactccaacgtcagccacttcagcgccgccttcgccaagcagtttggtaacttgccgagcaaggcgcgccagagcgtcacagtagctgttcggggctatcatcccgtctaa

SEQ ID NO: 325653 - DNA, 783 bp, Pseudomonas aeruginosa
atgaggaacagtcccgcagaggcgctggccgcggcttgcaccccgacagcgtcagtcaggtgcgtctggcaacagcttcaggcggaggccaggcgcgcgccgcaggaagactctgtattggggccgctcatcgatagatccattctctgccgcagctcattctggcaggcgctgtcctccctgctgagcgctaagctgtccatccaaacggtgtccatggacatatggctggagtgctttgccgatgctcatggaccggaggccgaggaggcggcgaaagacgacttggccgcgaccctccttcgggatccggcagcggagaacctgttggtgccctttctctgctacaagggcttccacgcactgcagtgccaccgggttgcccaccagctatggaacgcccgcagaaggacactcgcgcgtctgttgcagagccgggtttctgaagtcttcggtgtggatatccatcctgccgttccggtggggcggcgcgtcttcatagatcacgcaacaggaatcgtcatcggcgagactgccagcatcggtaacgacgtctcgattctccagaaagttactctgggtggaaccggcaaggagtatggggaccgccatccgaagatacgggaccgagccttcattgcagcaggcgcgacgatactgggcaacattgaaatcggctttgcctccaccgtcggcgctggaagcgtcgtgcttgagccggttccgccttactccacggtcgttggcgtacctgctcgcattctttgcacgaatggactttga

SEQ ID NO: 325654 - DNA, 1905 bp, Pseudomonas aeruginosa
atgaactcggtgaagaaaattattgtgctgggcggccatggcgaaacaggaagacgcatcgtcggcaatctgtcactgcgctatccagacctgcaggtcaccatcggctcgcggcgagcggctcccgcctcggacgggaccacgccgattgtccggatcgataccaatgaccgagtacaagccctggaggtgctgtcgcactacgacctggcaatcatcgccctgggacctatgcatgtgcatggaagtacaccgcatcagctatgcatcgaggcaggggtcgattgcatcgacatcaatgatagcctggttgtcgcagagcaagtcctggctctgcaggctgtcgcggcgcagagcaagcgggcggttttcaccggcatggggtttaccccggggctgtccagcatgttgatcgcagaactggccgaccagcatgcctcccataccgggacctaccggattcgcgcatgcatgggggctgcgtacggtggcggggaaacaagtccctacgccattctctccagtttccgcccgcaaatcgccaccctcgttgccggcgctcatcaaagcgttcccaccccttggagggatggcctcgagcgcttctcattcccggggcagcaagtccccgtcgaaaccattccgttttcgccgctggaggccgtcagcctcgcctcgtcccgcagcgccctagccggcgtcgtatcgaatctggatgcgcgctatcacatccaatatctaaaacaggggttcgcacggatgctggcccgcatccaactgtcgccgcagaccgttgagtggttcgccaggaaattctacaaaagcggccagaagatgaagcgcaagaaggatgcagatcccgataccgtgctgtgggtgtatccggacgacgctccgcagcgcggactgctggtacatggtgtgctgtcgtcctacgacttgaccgccgcgatggcctgcgccgtcgccgatgcctggctggcgggtgatcttgcggcatgccaaggcgtctatgccgtcgaccatctgggtgaagacttgcgagcttgcctgcgccggcatctggcacgccgaggtgtcaccagcaagcctgcggacatccccggcctgaccgagcaggggctggactttggctgggtcgccagcatcagcagcagcgacgtgcgagcgcttcgccacttccgctgcaactggtacacggccagccccaagcaccccaagatggtcccgctgcaaaagcgctttctgctgcaatccaaggtctggaagactttgcggagtagacgaaagggactgtcatttctcggattcgtcctgttcaccatgcgtcggtggcggcagcactttaaggcgttgaagtcgttcaggtcagaagccgtcggcccgtgcgccggatggtggccagatatcacgcgtgacatcagcatgttcacgtccggctactcccgggtgcgagacatgcttggacaaacactggcattgcagctgtacggtcagatgttcctggaaacgggacggatggaaatgcgatggctgtggccggatccgaccatcttcgcggcgctggatcggcccgccgagggtgtgcgtgactactggctggcattcatggagggctgccaggaattgggagtgcttcgctatgagacccagaccgaagggaaccgtctggtttgcgaaatcacccactgcgcatacgccgctatgttcgcccgactcgattgcccggaacttgcggcgcttgtgcggcagatggagcatgaagcactcgcctacatggcgagcaacagcggattggagctggactggcaggcaggaccatcaggaaccgccagaatcatgctgaaaaccccgttatcgtccgaccggcagcctgccgaacagcagcaaagggtatctgtatga

SEQ ID NO: 325655 - DNA, 1155 bp, Pseudomonas aeruginosa
atggatactcagagcagcggagcccggatcttgatcttgggtggctatggacgcgtcgggcaagaagctgcccgctatcttctgaacgcgaccgatgcgaaggttgccctgtcgagtcgaatggcccggccgctgcccgtatgggccgggcccggttcgctggatcgcttaacgaaccaacaacttgatgtgttcgatggcgaagcgttggtcgcggcatgtgcacggtcagacctggtcatctcgtgcgcaggaccgtcgggattgatcggcgaacgcgtggccatggcctgcaagcgggcgggcgttccgctcgtggaggcgggcgggtacgatccgctgttgcacagcttgcaacaggctcaggcctcagcgccgacgtcggttccgcttgtcatcaacgtgggattgcttcctggcttgtccgggctgttcccgaagtggcttctggacacccggcgcgacactcaacttgtcgaggcgctcgacgtctactacgtcgggcgcgacgcatggacctacaactcggcctgggacatcatcaacagcctcggtggctttggccatgaccggggcttctgctatttgaacggacagaatgtcgttcgggttcccatgcgtaaggccgcgcgcaaggtcaacttccccgacccgattggcagcgcctcgaccatgctcatctattcagaagagatcgcccggctggcctgccaatgggaaatagatactgcgcgcgtctacggagccaacattggccctcgcgcgaccctggtgtgcatgctggcgaaggttttgcgcttttatcaaacgccacgggcggtggcgcggggcgctcgctggctggcccgcgcgtctgcccgcgacatgcaaaagcttgagcccgcctacggaatccatgtcgacctgcactaccgcggcgggcgcacggcgagcgccacgttaaccctggacgacacctatcgggcgaccggaacagtgatcggcatcgctgcgcatcaactcctcgatgaagaggggccaggccccggcatattcatgttgcacgaggccgtccaatccgaacgcttcatgcattccctggaggcccagggacttttgcggatttttcacggggcacaggactccggcaacaggctggagggagcgacggtatga

SEQ ID NO: 325656 - DNA, 828 bp, Pseudomonas aeruginosa
atgcacgccccgttgagcgcagaagcccacggcgattttccgacatatcggtcctggttccgaattccggcctccagggctgatccggcctggcgcttaatctgcctgccccacgctggcggatcggccagcttcttctatccctggagtcgagtgctcctgcccgaagtggagttggtggcgatccagtacccagggcgcgaagagcgcataggtgagccctgcatcgatgacatggacaccatggtgagcagtctggcccaggcactcgccgctgttccgcagttgctgcaacggccctatgtactgtttggccacagcatgggagcggcggtcgcctatgagcttgtactggccttgcagcaacggaatgctgcgctgcccaacctgcttgcgctctcggcgagcgaggggcccggagcggtgaagcccagtgcgctgcactgtgccaccgacggtgcattggtggccgaaattgtccgactcaacaatcgattggagcacctgctgcattcaccggaactgacgggcctggtccttccggcgctgcgcagcgactaccggctgatagaaacctacggtggcagaaagccctcgtacagccaggtgcgggtgcccgtggcggcactggtgggacgggaagacagcgagctgagcctggacgacgcgcaagcttggcagcggatcgctagccagggcttcgagctatgcagtttcccgggtgggcacttctacctgagtcagcagtttccggcattgaccgaacagctatgccgacgcctgaccgagcacagcctgggaaagacaccgtggcaagaactgccctga

SEQ ID NO: 325657 - DNA, 4596 bp, Pseudomonas aeruginosa
atgaatgaatacacccaccctgtccctgaactggtcgccaagctgtctgcctccggcattctcctttgggtcgaggacgggcaactgcgcttcaaagcgcccgcaggcgcgctcagcacggagcggcggcaaatgctccaggcgcgaaagggagagattctggcccacctgatcgccacggataccagcatccaagctgaccccgccaatcggtttgagccgtttccactcacggacctgcaactggcgtacatcgtcgggcgccgcgacaactacgagctcggcggcgtgggctgccacaactacctcgaactgcagatgcctgccttggatccgcaacgcctggagcgtgcatggcatgccctgatcatgcggcatgacatgttgcgagcggaaatcggcaccgacggccaacaacgcgtcctcagaagtgtcgtgctgccgccgctgcgctgcgatgatctgcgaggggcaagcgccgaggagtttgagcgtgccacgctcgccagccgagacgagatggcatttcgtcgatacgactccgaacgttggccgctctatgagattcgccttacgctgcacgacgacagttcggttctgcactactcaacggacctgctgatcgccgacttcgccagcatccagttgctgctggctgagttgggtcagctctaccatcgtcccgagactgctccggcaccactaacgctgactttccgcgacgtggtgatgtccgagcgccggcgtcgtcagcacccggataccgaagctcgacagcaaaaggaccgggattactggatggcgcggctgccggacttgcccggggcccccgagctaccactcctgcctcatgctgcacgtcccctccagaacacccctagcttcgagcgtcatggcttcgatcttcccgcgggctcctggcaacggttcagcgagatcgcaacggcccagcaactgacgccgaccgcggccgtgctagccgtctttactgaggtcctccggctctggtctcgccagcccgacttctgcatcaacctgacactgttcaatcgcccgccggtccatgagcagatccagcatatcgtcggcgacttcatcgccgtcaacgtcctcgaggttcgcctcgatggtggcacgaccttcccgcagcgtgcccgggcgttgcaaacgcgcctttggcaggacatggagcattccggcttcacgggcatcgaggtgcttcgacaactgtcgcgtctgcatggcagcaatcagctcatccccgtggtgttcaccagcaccgtgggcatcgccggtcaagcactgccccggaatgacttcatgcacgatgcccaactgctctacggcatcacccagacgccccaggtctggctcgactgccaggtaaccgaacgcaacggtacattgcatgtcgactgggacgtgcgcaacggcatctttcccccgggcctcatcgaacaggctttcgctgccttcacccaggccattacctcgctttctcaaggcccggacgcctggacactcgggcacctggtcacgctacccgaatccacgcgactgcagcgcgaacgcatcaacacagagcgcaatgcccccttgcccttgggctacctgcatggtggcttctgccgccgcgcactggattttcccgagcgccctgctttgctgtgcggcgcaagcgaatggaactacggtcagcttgctgcatgggccgtggccatcgcccgtgacctgcgtgccgccggctgcgggccgggccaacccgtcgccttgtttctcgacaaagggcccgcgcagatcgctgccgtcctgggcgtcctgctggcggagggtgcctacgtccccatagacgtaggccaacccgtcgagcgaagagacaccatgctggcggacgtcggtgcgaaactgctgctgaccgattgcgaacatatcgacgctcagtggcccgacggcatccagccgatgctcgttggcgccatggacgccttgccgcccgaggaactggcctcggccctgcaagaggccatcgccgcggcagcgcaccgagacaccgcaacgcagttggcctatgtgctctatacctcgggcaccacggggcggccgaagggcgtcatgcttactcatcggggtgtcctgaacaccatccaaggtttcaatcgccagttcggtcttgacgagaacgacagattcttcggtctggtgaactacaccttcgacctctcggtgctggacattttctgcgccttcaccaccggagcggcgttggtcctgccgcaggggcagtggcgcaatgaccccgagcaatgggtatcggccatcgagttgcatcgggctacggtctggaactccgtacccgcgcacatgcaaatgctcttaacccacctaccccagggacggatgctctccagcctgcggataggttttctttctggcgactggatcccggtggcactgccggaccaggtacgtcagcgcctgcccggcatggcacccaaaagcctcggtggcccgaccgagatttcggtgacctgcatctatcacgacattggtgatgtgccccaggacgcagtgtcgatcccctacggctcgccattgagcaaccaccggctttatgtcctgaatcaccagcttgagcactgccccaactggaccccgggggaaatgtatgtgggcggccccggggtcgctctcggattcgtcaatgatcccgagcgcacccgcgagcgcttcatcattcacccgcagaccggcgagcgcctgtaccgaaccggcgatgtctgccgcttccgcgacgacggcatcatcgagatcctggggcgcgaagacaatcaggtgaagatccgcggccatcgcatcgaattgggtgatgtggaagcggcctttgcctcactgcccggtgtcggccgcgctgtcgcgctggtacgccgggagccgctggacctggtggccgcagtgcaggtgtgcgaaccctgcgatgatccagccacgctcatcgagcaatggcgtaaggacctggccacgcgtctgcctcgctacatgttgccgtcggccatcgaggtgttgcctcagattcccttgagccgcaacggcaaggtcgaccgcaaggcgctcgccgaacgcttccagggcgcgttggcgggcggccgcgaccggcaaccgctccgagaggacccgctggagcagaagctggccgcgatctggcgcgaactgacgctggcagaagacatcgcgcgcgacgacgacttcttcatgattggcggcaccagcctgacggcggtaggactgctcaatcggctttccagcgaaggactgcgtgtcaatatcgaccttatcttcaaccactccgtgttccatgacatggttgaggcactgaagcgtgccgaagacgaagaggagaatttccgccagggcatcgacctcgaagcgctgctcacccgagcgatgcgtaacctgcacacggccgcgcccgagccggcagcggagcaagtccgcaacatcttcctgaccggcgctactggttacctgggcatctacgtgctacgtgccctcgtgcaatccacaaattgtcggattcactgcctgctgcgatgccgcgacgaagacagcggctaccagcgtcttcgtcagatgagcgaggaaaaggggctgggcttcgatttggaccgtgaccgcgtgcgcatcatccccggcgatctgtctgccgaacgtttcggactggacgaggccgcctatgctgcgctggcacaggacatggacaaggttctgcatatcgctgcgctgatcagcctcatcgcgcccctttccggtctgtacccgatcaacgttcagggctcggccaacgtcatcgaactggcaaccaccggcaagcgaaaacccatccactacatgtccaccatcggtgtccactaccggcttccgtacggtgaggacgagccccctattcccgaggctacagggccggatgccccctggcacaagcccgagctcacctacgaacacaccaagtacatggccgaacagctattccatcgggcgcgggaactgggcgtgaaggtgaacatcttccgctccggggccatcacctgggacagcgaacagccccagccttttatcaacgacgatgccttcgtcaagttcttccggacctgcctgagcgtacagggctatccggactcctcgatcctgataagcatcactccggtcaatgtcgtcgcccggtacatcgggatgatcgctcagcgtgaaatccgcgaccaggggcagaacttccatctggtgtcccagcacagcctccctggcggcaggatctacgcctggttcaacgagctgggctgccgtttttcgcccctggacttcgagacttgggacgagcggctttcggacagtttcgggcgaggcttcatcaaccgctacttcaagcacggcatcggccaaggtggccatcatcagtaccgtatcgacaacctggttgccgtgctggaaaaacacggcatgcagccgaaccaggtcgaccgtgcctacttcaaacctttgctatcgcagcttgcaggcgtgggccaggacgacgaaggagacatgtcatgcacgccccgttga

SEQ ID NO: 325658 - DNA, 3459 bp, Pseudomonas aeruginosa
atgaacacttttcatgcctctgacttcatcgccaagatccaggccctgctgcctgagccattcgccggccgcgaggaggacaacctcatcgagctcggcctggattcgctgcacatcatgcgtctcgtcaacgactggcggcgggagggcattgcgctgacgtttgcccaacttatcgagcggccctatctcaagcattggctccaactgctggagacggtccggcccaatgccccgacagagacggcagcgtggcagcccgatagcctggaggcatcaacgccaatcgacggtgcagaagcctttgggctgactgacgtgcagtatgcgtattgggtgggccgtcaggatggccagcctctcggaggcgtgggatgccatgcttatctggagctcgaaggtcgtggtatcgacccgtccaggctggagggtggatggcagcagcttttccgacagcacgccatgctccgaacccggtttggcacggatggtacgcagtgtgtctgcgaggatctggccgcacctccgttgcgcacgcatgatttcaggcatctcgctgcaaatgaagctgaagccaggttgctggctgttcgggatcgcctctcacatcgtcgcttggatgtggcaatcggagaagttgcgggcctggagctctcactgcttcccggtggcggcacctgcatccacttcgacatcgatttgctcgtggcggatgtccagagcctgcacatactgcttcgcgatctggcagcggcttatcaggggcaagcgcttcgcgctgatcccgactggagattttcccaatatctgaacagcgaggctcggcggggcgccgagcaggtagatattgcgcagaagtactggcaggacagcctggccaaactgcctcctggccctcagttgcccctggtcaagacgccggagaatgttgtacggccacgtttcgtgcgccggcggcatcaactccccagcgagacttggcagaccttgagaagactggcagcgaggaatggcgttacgccagcgatgatgctgctctctgcctatgcggaggtcttgggcaggtggagccaagagcccgagttttcgttgaatcttccgctgttcgaccgcaggactgaccacccaggagtcgagcatgtcgtggctgacttcaccaacctgctgctactgcgctgcgactgccgccatgcagcgtcgttttctgaccgcacgcacgaactccagcggcaatttcaccgtgacgtcgcccactcttcctattcggcagtcaacgtacaacgcgacatggttaagcatggcttcgccgaaggagtcatggctccggtggtgtttgcctgcaatctcgggaccccgttgctgacgccggagtgcaagaccacgcttggccgccttcgctacatggtgtcccagacaccgcaggtctggctggatcaccaggtctatgaggacgaggaggggctcttattggcgtgggacgcagtggaggagctgttccccgaaggggtggtcgacgacatgttctccgcctactgcaacttgttggaatggctggctcaggatgcgactcattggcaacagcttatgccatgggtgcggcgcagccacgagcaggacatccgcacggccgctgtcgtggacaacggcattgtgaccgatgcctcgctgcaccagcgtatgttcaatgtggccgccactatgccggaccgcgttgctgtcgttcttgatggtggcgtcctttcctatggcgagctggcgcggcgcgcactgcaagtggccgcgctcttgcatcggcacggtatcgaacctggtgagccagtcgccatcagcctgccacggggcttggaccaagtgacagcggtattcggtgttctagccgcaggtgcctgctacgtgcccgtgggaatgagccagcctgcggcccggcaggccaggatccatgagacagctggcatccgttgggtcctgacggactccagcggtgtcgtcatggcaactcgtgaaggtaccaccaggctggacgtggccagcgcttggcatatcgatcctccgtcagagtaccagcccgtccgtgcggacagcagcgcctacatcatctttacctccggctcgactggcgagcccaagggcgtggaggtaacccacgcggcagctgccaacaccatcgatgtcctcaacgcccgctatggcgtgggccccgacagccgcgtgctggccgtgtcctcactggatttcgacctgtcggtgtacgacctctttggcgtgctcggcgtcggtggcgcggtggtgctgctcgacgaggaccatcgccgtgacgccgccgcttggctggagctcatccaccagcaccgggtcaccctgtggaactccgtgccggtgctgctggacatgctgctggtgatggccgccgaggaccctcgtccgctgccgttcgagcaggtgttcctgtccggcgactggataggtctggacctgcccgggcggctgttcgccaagacctccggcagcacgaagctggtcgccatgggcggcgccaccgaggcggccatctggtcgaacgccttcgacgtgaccttgccgctgccggcccactggcggtccatcccctacggcagaccactggccaaccaacgctaccgggtggtcgacgcccagggccgggactgtccggactgggtgaccggcgagctgtggatcggcggtgcgggtgtcgcgctcggctaccggggagacccggcgcagaccgccgagcgcttcgtcgactacaacggcgagcgctggtaccgcaccggcgacctggggcgttactggcctgacggcaacctggagttcctcggtcggcgcgaccaccaggtcaaggtgcgaggccaccgcatcgaactgggcgagatcgaggcggcgctgtccgccctgcccggcgtggcccgtgcggtggcggtgaccatcggcaagccggtggctctggccgccgctttcgtgcccaccgaccccacgacacagcctcgtaccgacgagttgctggccgccctgcggcaactgctgcccgactacatggtgccgactcacttgcaggccatcgataccttgcccctgagcggcaatggcaaggtcgatcgacaggccctcgtggcgctgctggctacccaagcctcgacacgagcggcctacgacccgccacaaccaggtctggagtgcgaggtggccgatatctggagggaggtgctgcagtgcacccccctttccagaacggacgacttcttcctgatcggcggcgatagcctgcgagctacgcagatcgtgcagttgctccactcgcggcggatctcaccagcacccgtgccgctgtttgtcctgttttccagccccaccatcgccgcgctcgcccatcacatacgaggacagtggcaggccctgagcatgaccggagccgaagactccattgaggaaggcatcctatga

SEQ ID NO: 325659 - DNA, 1014 bp, Pseudomonas aeruginosa
atggaactgttcgtgcctgccctcgaagtccgcatccgcgatgggaaggcgcgccttcgcgcgatagatcctgccatgttgcccacgctgagagctgtgatcgaacgggtgcaacagcagagcgaaagcactcccattgctccagaagacgacgagacgctgctcgccttgcgtcaacatgaagaagatatctatagagctaacgtccagcaggcggtggacgaaatcaatgcgcgcaagtaccagaaggtgattctgtcacgccgaattcccctcccggccggggtcgacatccttcaaacctaccgcgcaggcagggcgcgcaatactcctgcccggtcattcctggtccaactcggcggatcacgaatggctggcttcagcccggaaacggtagtcgaggtgacctccgatggttgggtcagcacgcagcctctggccggaacccgcgccctgggcgagtcccatgaagaagaggagcggctgcgcatggatctcctcaacgatgccaaggaggtggccgagcacgccgtttcggtcaagctagcccaagacgaagtggcaaaggtatgccgggacgcaagcgtcagcgagttcatgcatgtgctgcggcggggctccgtgcagcatctcgcctctcgcgtgaatggccgcctgcatgaaggccgtaccgcctgggatgccttcgaagcgctgtttcccgcggtcaccgcatccggtatcccgaaacaggctggcatcgaagccatcggccgcttcgagcgcacggccaggggctggtacagcggctgcatgctggtggtggacagtcagggggctttggatgcggcactcgtgctgcgctccatctaccagcgtgaaggcgaaagctggctccaggctggagccggcatcgtcggccaatccagacctgcacgcgaactcgaggagaccaacgagaagctcgcttgcatcctcaagtacgtggtgctcaaaccggccgccatcggcgaaccactggagggtgtccgatga

SEQ ID NO: 325660 - DNA, 1674 bp, Pseudomonas aeruginosa
atggttactaatcgttgtgatattgctgcactggaacagcgctatgagagcctaggctattggaagcgccagacattgcctgaatggctcagaatcgccgccgattcgtatgcacaggcgccggccctgattgatggtgcttcccggctcacctacagcgaacttgatctcaaagtggatcgccttgccgccggatttgaccgcatcggcattgccagaggcgaccgggtgctgatgcagctgcccaacggcgaagcgttcgtggtctgcctattctcactttttcggctcggggcgctccccatcctggccatgccggcccatcgcgagaaggaagtactggagttgtgccgcctggccgagcccagcgcgtacatcattccgaggtctttcctaggattcgattatcttgcgctagccgagcgtgcccgggccagcgtgccttccatcaagaacattctcgtagagggcgatccgggcccctggctgagtctgagccaggtagaagatgctccccgcagcttcgcgcctcctgcgcacacggataccgccctgctgttgctctctgggggtaccaccggtacgccgaaactgattccgcgcaggcacaccgactatctctacaacgccgtcgagtcagcccgcctgtgtggcttttcccgggagtccgtctacctcgccgccttgccagtggcccacaactttccgctggcctgcccaggtcttatcggcacgctcagcgtcggcgggtgcgtggtgatggccaaggcgcccagcgccgatgagaccttcccattgatcgtgaaggaacgagtgacacacacggcgctggttccgccgctagtcaagctctggctggaagcgcgcaaatgggataccagcgacctttcgagtttgaagctccttcaggtgggtggcgcgcggcttgatccggatctcgcccggcaaatcacgcccagcctgggctgccagcttcaacaggtctttggcatggctgagggactgctgtgctacacgcgcctggacgacccattggaggtggcgctgaacacccaagggcggccgctgtgccctgatgacgaactgcggatcgtgggaccggatggccagcctgtatccgcggggcaagtcggcgagcttcaagttcgaggcccgtacaccattagaggctattaccgagtgcccgagcacaacgcccgcagcttcacgactgacggattctaccaatcgggtgatctggtgcagctcactcccgaaggcaatctggtggttcatgggcggatcaaggagcagatcaatcgagccggcgagaagatcgcctctgctgaattggaaggcgccgtcgaactgcatcccgatgtcgagagctgcgccgtagtcgcggtacccgacgaaagactgggcgagaggacatgcgcagtactcctcgccggcgaggggaatccctccctggcagatctccatgtgttcctgcgcactgcgggcctgccacagtacaaactgccggaccaactactcagagttgaccgctggccactgaccaccatcggaaaaatcgacaagcagcggctcatgatgctcgcccgggacgactcgaccatgcccgacatccgtcctgccgcaactccactttcctatgtcggtacggcccgtcaggaagcgatagtcctctga

SEQ ID NO: 325661 - DNA, 660 bp, Pseudomonas aeruginosa
atgagctatgagctcggtatgcgctccaattggctcgacgattcgttggtggtcaatggtgcgttgttcttcaacgatatgagcaaggagcagatgcagagctgggactacgagaacttcaccggaaagaacctgaacctggatgcgcggtcggccggcttcgagttggacgcccgttacctcgcaagccgcaattggtggatggaggtaggcgtggcctatacatacagttcgctgcgccacgtttctgcagaggcggccgcgctccaggacggcttgcgaagtggcaacaggcttccaagcgtaccggaatggacggcaaggaccgcgctgggatatgaggcgctgggtcgtgaacttgggttctccggatggctggcagagcaaagggtgaacgcaatgctcacatacaactttgtcggcagccgtttcaccgatgcttccaacttcggcaggctcgctccggttcacttgatctcggcgcgtctgggtatcgattggggcgacggggagttctacctgttcggggacaacctgctggacaagagatacatgacgatcaaggaccgcttcggcaccgacccccagggccagccggtctacggcgtttcctatgcgcgcggtgcaaccctcggggtggggatggtgctgcgcttctga

SEQ ID NO: 325662 - DNA, 1641 bp, Pseudomonas aeruginosa
gtgccgagcatccgcgacatcgaggaccacgacgcggtcttcgtcctcggcgaggacctgacccagaccgccgcccgcatcgccctggccctgcgccagtcggtgaagggcaaggccgtcgagatggccgccgacatgaaggtccagccgtggctcgacgccgcggtgaagaacatcgcccagcacgcgcagaacccgctgttcatcgccagcgtcagcgcgacccgcctcgacgacgtggccgaggaaaccgtccacgccgcaccggacgacctcgcccgcctcggcttcgccgtggcccacgcgatcgacccgagcgctccagccgtggccgacctcgacccgcaggcccaggccttcgcccagcgcatcgccgatgccctgctggtggccaagcgtccgttggtggtgtccggcaactcgctgggcaacaaggcactgatcgaagccgcggcgaacatcgccaaggccctcaagcagcgcgagaagaacggttccatcagcctggtggtcggcgaagccaacagcctcggcctggcgctcttcggcggcgactccgtggaagccgcgctcgagcgactgacctccggacaggccgacgccgtggtggtgctggagaacgatctctaccgccgcaccgacgccgcccgtgtcgacgcagccctggcggcggccagggtggtgatcgtcgccgatcaccagcagaccgccaccaccgccaaggcgcacctggtgctgccggcggccagcttcgccgaaggcgacggcaccctggtcagccaggaaggccgcgcccagcgcttcttccaggtgttcgacccgacctactacgacgccaagaacatggtccgcgagggctggcgctggctgcatgcgatccacagcaccctgcaaggcaagcgcgtcgactggacccagctggaccacgtcaccgaagccgtggccgaggccaagccgatcctggccggtatccgcgacgccgcaccggccgcctcgttccgcatcaagggcctcaagctggcccgcgaaccgcaccgctacagcgggcgcaccgccatgcgcgccaacatcagcgtgcacgagccgcgcaccccgcaggacatcgactcggcgttcgccttctccatggaaggctactccggcagccaggaagaccgtcagcagatcccgttcgcctggtcgccgggctggaactcgccgcaggcctggaacaagttccaggacgaggtcggcggccacctgcgcgccggcgaccccggcgtgcgcctgatcgaaccgaagggcgaaggcctcgactggttccaggccgtgccggtgccgttcagcgccaaggccgacagctggaaggtagtgcctctgtaccacctgttcggtagcgaggaaaacagctcgcgggccgcgccgatccagcagcgcatcccggagacctacgtcgccctgtccaaggaagacgcggaccgcctcggcgtcaacgacggcgcgaccctcggcttccagctcaagggccaggccctgcgcctgccgctgcgcatcgatgaacaactcggcgccggcctgatcggcctgccggtcggcttcgccggcatcccggcggcgatcgccggctgctccgtggaaggtctgcaggaggctgcacaatga

SEQ ID NO: 325663 - DNA, 1230 bp, Pseudomonas aeruginosa
atggccgctggcgaaggcctcccagaggatctcgtccttggagtagaagcccgcggtgaggaagggcagggcggccagcgccgcaccgccgaccacgaagctggcgtaggccagcggcagcttcttccacaagccgcccatcttgaagatgttctgctcgtggtggcaggcgatgatcaccgcgcccgaggcgaggaacagcagggccttgaagaaggcgtgggtcatcaggtggaagatcgccgcgtcccaggcgccgacgccgagggcgaggaacatgtagccgatctggctcatggtcgagtaggcgaggatgcgcttgatatcggtctgcaccagggcggcgaagccggccaggaccagggtcaccgcgccgacgatgccgaccagttcgaggatgtccggggccagggtgaacaggccgtggcaacgggcgatcaggtagacgccggcggtcaccatggtggcggcgtggatcagcgcggagaccggggtcgggccggccatggcgtcggccagccaggtctgcagcggcagttgggcggacttgccgaccgcgccgccgagcagggccagggtcgccagggtcagccagaggttgccttccgggaacttctgcggcgccagcaccagcagctcctggatgttcagggtgccgaactgctggaacaggatgaacaggccgaaagccatgaacacgtcgccgacgcgggtgacgatgaatgccttgagcgccgcgttaccgttgttgcgattgctgtagtagaagccgatcagcaggtagctgcacaggcccacgccttcccagccgaagtagaggaacagcaggttgtcgcccagcaccaggaacagcatgctggcaatgaacaggttggtgtaggcgaagaagcgcgaatagccggtttcgccacgcatgtaccaggaggcgaacaggtggatcaggaagccgacgccggtaaccacgccgagcatggttaccgagaggccgtccaggtacagggtgaagttgctgctgaagtcgccggccgccatccactgccacagcaccaggctgtaggcgccgccttccggcggactgctgtggaagctgaagatggcccaggccgcgctcagggcggagaggccgaccgagccgacgccgaccagcgccgaaaggttttccgaccacctgccgcgggagaacgacagcagcaggaagccgaccagggggaacaggaaggtaagaggtag

SEQ ID NO: 325664 - DNA, 1902 bp, Pseudomonas aeruginosa
atggaatcccccgacccgccctgcagcgtacctccgtcactgaccgtgaagccccgcctcgtccgccagttgctgctccccattcccctgctcctgctgatgctcggcttcggctacggcggctaccggatcagcgagagcgccggcatccgtgccctcgccgagaatggcgaacgccagctggagctgcatgcgcggacggtcgagagcgagatcagcaagtacacctacctgcccagcctgctggagctggagcgcagcgtcagccacctgctcaccgacccgacgccataccggcgcaaccaggtcaacgcctacctcgaaggcctcaaccgccgcgccggcagccgcgcggtgtacctgctggacaccaacggccgggtcctggccaccagcaactggagcgacccggacagctacctcggcgaggacctgtcgttccgcgcctactggcaggacgcgatgaagggcaagccgggccgcttctacggcatcggcagcacccgcggcgagccgggctactacctggcccacggcctggtccacggcggccggatcatcggcgtggcggtggtcaaggtgaagatggacgccctcgaggagcgctgggagaaggcgcgcctggaagccttcgtcagcgacgagaacggcatcatcatcctctccagcaaccctgccctgcgcctgaaggcggtgcgctccctgagcgccgacgacaaggagcgcctggcgcgcagcatgcagtactactggtgggcgctgaacgagtggcagccgctgctgcgcgagccgctggccgccggagtggagaagctcagtttccccgccgatgagcagcacccgcgcggcgaagcggtcacctacctggcgcagacccgcgcgctgaatgacacgccgtggaacctgaccctgctcagcccgctggaagacctgcgccgcgacgcggtgcgcaatggcatgctggccgccatcggtttcgccctcctggccttcctgctgatcgcctggaacgagcggcgcaaggtactcgccacccgcctcgccgcgcgcgaggcgctgcaacgggccaacggcgagctggaagtgaagatcgccgaacgcaccgccgacctgcaggccagcaacgcacgcctgaccgccgagatccacgagcgccagcaggccgaggacaccctgcgcaaggcccaggacgaactggtccaggccggcaagctggcggtgatcgggcagatgtccaccagcatcgcccacgaactcaaccaaccactggcggcgctgcgtacgctgtccggcaacaccgtgcgcttcctccagcgcggcaaactggagaccgccagcaccaacctcgccaccatcaatgaactggtcgaccgcatgggccgcatcaccgccagcctgcgtgccttcgcccggcgcagcgacgacgccggccaggccagcctggccaaggcggtggacgcggcgctgctgatcctgcacgggcgcctggagcaggacccgccgaccctgcaccggcatttcgacgatgtgcgcctgggcatcgaccagacccgcctggagcagatcctggtcaacctgctggccaacgccctcgacgccatgagcgggcaggccgaccgccagctctggctggaaggccggcgcgaggaggagcgctacgtcctgcgcgtgcgcgacaacggccccggtatcccgccggcggcgcgcgtccacctgttcgaacccttcttcaccaccaagcccggcgaacatggcctgggcctcggcctgaccctctcggccagcctggccaccgccgccggcggcagcctcagcgtgcagcaccccgaaagcggcggaaccgccttcgagctgagcctgtccctggttcccgattccccgactgcgagtcccgcccgatga

SEQ ID NO: 325665 - DNA, 750 bp, Pseudomonas aeruginosa
atgaatccttctttgcaggaccacccggtgagcaaccgggaacaatggctggacgcccgtcgccgtctgctggcgcgggaaaagcaactcacccgcctgcgcgaccaggtcgccgccgaacgacgcgaactgccctgggtcagggtggacaaggactaccgcttccagggcgagcgcggcgagcgttcgctggccgagttgttcggcggcaatagccagctaatcgtctaccacttcatgttcgcgccgggctggagcgaaggctgcgtcggctgttcgttcctcgccgaccacatcgacggcgccaaccggcacctggcgcaccacgacgtcagcctggtggcggtatcgcgcgcgcccctggaggagttccaggcgttccgccggcgcatgggctggcgtttcgactggtactcctcgtacggcagcgatttcaaccgtgacttcggggtgtccttcgacaaggcgcaactggccgccggcagcgtcgactacaactaccagccgacccccgacgccggcgaggaaatgccgggtgccagcgtgttcctgcgcaatccggcgggcgaggtgttccacacctattcggcctatgcgcgcggcctcgacatcctgctcaccacctacaccttcctcgacctgacgcccaaggggcgcaacgaggacgcgatcatggactggctgcgtcaccacgaccgctacgacgaggcgccgaaaagcgcctgctgccacgcgcaggccagccattga

SEQ ID NO: 325666 - DNA, 1245 bp, Pseudomonas aeruginosa
ttgagggagcacggcgagccgttgcgcagccgcatcgaggcgctgtaccgcgaggagtcgcggcgcgtgctggcgaccctgatccgcctgctcggcgatttcgagctggccgaggaagccttgcacgacgccttcatcgccgccgtcgagcagtggccgcgcgacggtatcccgcgtaacccgcgcgcctggctggtttccgccgggcgcttcaaggccatcgacaacctgcgccggcgagcgcgcttcgacgcctcgcagcggctgctcgccgagcaactggaagagcaggccgaggcgccggcggaggagggcgatgcggtggaagacgaccggctacgcctgatcttcacctgctgccacccggcgctgacccccgaggcacaggtggcgctgaccctgcgcgaggtctgcgacctgcgcaccgaggagatcgcccgcgccttcctcgccgcgcccagcgccatcgcccaacgcatcgtgcgggccaagaacaagatccgcgaggcccggattccctaccaggtaccgaccctggaggaactccccgagcggctgggcaacgtcctgcaagtgatctacctggtgttcaacgagggctactcggcctccaccggcaccagcctgacccgcgccgatctcagcggcgaggcgatccgcgtcggccgcctgctggtcgaactgctgcccgaccccgaggccctcggcctgctcgccctgatgttgctgcacgactcgcggcgccaggcgcggacctcggccagcggcgaactggtgcggctcgacgagcaggaccgcgcgctgtgggatcgtggactgatcgtcgaggggctcggcctggtcgagcgggccctggccagccgccgtttcggggcctacaccctgcaggcggccatcgtcgcggtgcacgcccaggcgccgcgcgccgaggacaccgactgggcacggatcgtcgccctctacgacgcgctactgcgcctggcgccatcgccggtgatcgaactcaaccgcgccgtggccttggccatgtgcgatggcgtcgaggtcgggctggccgcggtcgatgcgttgctggcgcggggtgaactggccgattaccacctggtgcactcggcgcgcgccgacttctgccgccgtctcggtcgccgccgcgaggcccgcgaggcctaccgcgcggcgctggccctggcgcgccaggagccggagcggcgcttcatcgagcagcgcctgcgcgaactcgattga

SEQ ID NO: 325667 - DNA, 804 bp, Pseudomonas aeruginosa
atgaggattgaaaagcgtgcgcgttggttcgccctggtgcgccaggtctgcgccgtgttgctggtgttgtgtagctggagtgcctacgcggagccttattactggcaattaaacggcccgactgctcctgaccggtttaccagtcctagtgcggcttgtgaggtcgggctgggaatgtataaggctcaatatcccacggttgaaatggtgatcgattcgcgggagatgaggggctcgaccaactatgtgtgcacggtgtttcgttatttcaacgggaatcgtattgagccgaatttcactatttccgtcatgcgcaagggcaccggttgtgctgagggctccacgtataacgcgcaaacgggagtgtgtgaaacgccgccggaaaacaactgcatcaaagggctgacggatctgttcagttcaccgccctcgaacatcttcgtgtcgggcggcagaaacttcgtgaatagctcgccgcccactgcctgcaagaatggttgccagtacctgccgaccacctcgaagaccaccagttgctatcgctatcccggcagcgacaaccaaggcttctgcaactacgtgttgatgacggacggtagtgcctgcgccgctgactccggcaatcccggcatgaccggtccctcgttgaacgacaccccgccgaccaatcccgacgaaccgccgtccgacccgaatgaccctggctgtcctcccggctatagctggtccgggacgacttgcgtcaagacgcccacggatccgactgagccggggggcgatggcggtgatgggggatggcggtaa

SEQ ID NO: 325668 - DNA, 435 bp, Pseudomonas aeruginosa
atgaacatgtttgcaacccaaggcggcgtcgtcgaactgtgggtcaccaagaccgacacctatacctcgaccaagaccggggaaatctacgcctcggtccagtccatcgccccgatcccggaaggtgcccgtggcaacgccaagggcttcgagatcagcgaatacaacatcgagccgaccctgctggacgccatcgtcttcgaaggccagccggtgctctgcaagttcgccagcgtggtccgcccgacccaagaccgtttcggtcggatcaccaatacgcaagtccttgtggatctgctggccgtgggcggcaagccgatggcgccgaccgcccaagccccggcccgcccgcaagcgcaggcccaagccccgcgcccggcccagcagccgcagggccaggacaaacaagacaagtccccggacgccaaggcgtaa

SEQ ID NO: 325669 - DNA, 291 bp, Pseudomonas aeruginosa
atggccgccagtccctactacctgcaccaaacccacgccccggactgcgcctgctctgtgtgctggtccgcaaggcaggccatcccattgcacagcccgtcgccgtgtccggactgccggccccctgggctgccctatctggaagatggccgctggctctgccgtccccgttccttctgcgcgaaacacgacccgtcccggcgtccgccgaagtactggcacgttgtgtacgacagcgggaaacccacgccctttgtgccagtgcgcgaagcattccaactggagggctga

SEQ ID NO: 325670 - DNA, 213 bp, Pseudomonas aeruginosa
atgcgctacctcgtagagatgtgcaccttccacggcccgacccggcaacgtcgctggcatcgcgtccatcagggcatttcccgcgtggaatgccaacgctgggtcgaagagttggtggctgtcttcccgactgaagaagaagctcgccgctccttcggcctgacccgcgaacgcgctcggcaggtgtaccgcatccgtggggtgagggcatga

SEQ ID NO: 325671 - DNA, 1032 bp, Pseudomonas aeruginosa
atgtctaagagattggtgctatttaaccataaaggtggggtaagcaagacaacaacggtttataatgttggttggatgctggcggaaactcatagggttctattagttgatgctgacccccagtgtaatctgacaagcctcatacttaaagacaatttcgatggctattatcttgaggatcaaaccaaacgccaaaatataaaagatggagtcagtccggcgttcagtggaaagcccatccccattacacctattgcctgtccttctagtgagcggaaccaaaatctatttttaattccagggcatgcaaatctttcagagtatgacgctgcacttacgtttgcacaaaattctcataacgctatagctactttgcaaaatttgcccggagcgtttagtgagctaataaggctaacagaggaggagtataatatcgattatacgataattgatttgaaccctggccttagcgcgataaaccagaaccttttcttaaatagcgatgttttcgcgttgccgactaacccagatccattttcaataatggccttggatactctaacagccgttctacctcgctgggctggctggaaaaaaagcgcaataaacatgttctcagactcggcatatcctttaagggatggcgtgccgaagtttggtggcgccttcatacagcgctttaatataagaaacggcaaggcagctgcaccctatagagagaatatagatgagataaaacaaagactcaccgaagaaatgcttcccatccttcaagaaaatgatttagcttttgatatggatttttatcccgctgaactagtgaggcatggttactgtcttgcagaaattcaagattttggaggactcctccccaaagcatatatggcaggcgttccagtttttgcaattacagatgctgaaattggtgaggttggaaatgtgttgaactctcttacagagaagagagataatctgcgcgctagaattcaaagtgctgcccggctactagagcaaatcttagataatgcatag

SEQ ID NO: 325672 - DNA, 609 bp, Pseudomonas aeruginosa
atgcatagttcattcgctatattccgcatgaacatggggcagacggagtctctgctggttctttatgattatttggcgaatgagttaaaggctccagttagttttgacgatatattgaggtcgaaaattgtttatgcagtgagtgcatttgataaactattgcacgacctaattagggttggaatggttgaggtatttaaagggaatagggtggcaactccgaaatatctttcggaagctatatccatggctactgttcagcaacttgcacctggatccactccgcctccagaaattgcatttgaggaagcagtaagatcaaagcttaaacttctatcatttcaggatcccgataaagtctcagaggggcttagtctcatatgggcggagtcacataagtggcaaaagatatcgaatgctttaggcatgagtaacagtgaattgcggacaaggctaaagcttatcgtctctcggcgaaactcaattgttcatgaggcagatttgaatcctattgatggaaaaaaaatagaaatcactcgatcagaggcgatagatatagtccagcttttgagggctgtaggggaagagatatacaatcaagtcagatag

SEQ ID NO: 325673 - DNA, 144 bp, Pseudomonas aeruginosa
atggctgaagcgctggaacaggacgacgccggtgcgcgcctgcagagccctgagctgctggcttaccgcgccgggagtgacgcccatggccgcggccgcgcgggtgagattgccatggcgggcggtttcgacgaaagcgcgtag

SEQ ID NO: 325674 - DNA, 549 bp, Pseudomonas aeruginosa
atggaagtgatggcggccgagctggagcgccatggcctgctgattccggcttcgctgcgcaggcaggcggtgctccgctggtatcggcaggcagggagcagtccacagatcaaggatttgctggacgcactggacgcctggccggacggtgtccggcgggcgatgacggaaggtcgcctcgacgatctcgaggcggaggcgagcaagcgaatcaggcaccagttgcgcaagctgctggcggcgctcgacgatcccggacacgatcttcacgacatccgcctgttggtaaagcgcgcacgttattcgcaggaggcctacccggacctctgccctctgccgggaaaggtgctcgacacgctgaaaacgctacagaccatgctgggggattggcacgaccaccagcaatggtgcctcagggccgaagagcaggccgacctgcgccccctgagcgcggaatggcgcaggtccgaggccgccgccctggaccgggccgaggaatccgttcggcgccttgccaggttgctggggaaagccatcggccgcacctga

SEQ ID NO: 325675 - DNA, 183 bp, Pseudomonas aeruginosa
atgcaactgcgaatgcacccttcgaccaagggcggatggatcgtccaggtcggcgcctatcgcatccccttccataccgaacgggaaggtcgggaatatctgcgcaaactgcgcgagcggatcgaagccccccacgcgctgcccggttcgcccaagccccggataatccgccaggccaggtag

SEQ ID NO: 325676 - DNA, 429 bp, Pseudomonas aeruginosa
atgacggaccgactgcgcgtactcttcgtctgtatcgccaatgacgcccgctccctgatcgccgaggccatcctgcggcacaccgacggcgaacatttcgccgcgttcagcgccggcgtgcgccccgctggcgtcgacccgcgcaccctgagcgtgctcgaacacgccggcatcccgacccaagggttgagtagcaagccgctggagaccttcgccggggagtccttcgactatctcatcgacctctgcgacaaagacaccgacgaactcgcacagttgccgcactccgcccagaccctcgcctggagctgcagcgacccgaccctccaggaaggcctggaaggattcagccatgtcctgcaggagctgaacgaccgggtacggctgttcctggcagtgaagaaccgcccccatggggaacgctcctga

SEQ ID NO: 325677 - DNA, 1563 bp, Pseudomonas aeruginosa
atgagtgggatggacctcaagcgccgccgcgtcgtgcaaggcctgggcgctggactgctgttgccggcgctgggcgcgccggcggtgatcgcctcgcccagggcgcggccgaagctgaccgatggcgtgcaatccggcgatgtgcagggcgaccgcgcgctggtctggagccgcaccgaccgcccggcgcggatgatcgtcgaatgggacacccgtagcgtcttcagcgagccgcgccggctggtctcgccggtcaccgacgagcgcctcgactacaccgcgcgcatcgacctgcgtggcctgccagccgaccagtcgatcttctaccgggtgcgcttcgaggatgcccgcgacggcagcctgagcaagccctggttcggccacctgcgcagtgcgccgagcgaggcgcgcaatatccgtttcgtctggagcggcgacacctgcgggcaaggtttcgggatcaatccggatatcggcggcatgcgtatctacgaagccatgcgccggcgccagccggatttcttcctgcacagcggcgataccatctatgccgatgggccgatccccgaacgcatcgagaccgagagcgggcgcatctggcgcaaccgggtgaccgaggccaagagcaaggtcgccgagaccctcgacgagttccgcggcaactaccgctacaacctgctcgacgacaacctgcgccgcttcaacgccgaggtgccgcagatctggcaatgggacgaccacgagaccaccaacaactggtcctccagcaagcagctcgacgagcgctaccaggtgaaggacatcgacgtgctggcggcccgcgcgcgccaggcgttcctcgaatacgcgccgctgcgcttccagcgccaggggcgcgacgggcggatctaccgcaaggtcgcctacggccctttgctcgacgtgttcgtcctcgacatgcgcagctaccgcggcggcaacagcgccaacctgcaggcgcggcgcagcgccgccaccgatttcctcggccgtgaacagttgcaatggctcaagcgcgagttgcgcggttcgcgcgcgcagtggaaggtgatcgccgccgacatgccgatcggcctctgcgtgcccgatggcaaggacgcccagggccgcgaccgctgggaggccatcgccaatggcaacgacggtgccgccctcggtcgcgagctggagatcgccgacctgctgcgcttcgtccagcgcgccggggtgcgcaacaccgtctggctgaccgccgacgtgcattactgcgcagcccaccactacagcccggagcgcgccgcgttcaaggacttcgcgccgttctgggagttcgtcgccgggcctctcaatgccggtagtttcggacccaacgcgctggatggcacgttcggcccgcaggtgatgttccagaaggccccgctggtccagaacagctcccccttcgccggctaccagttcttcggcgaggtggagatcgatgcgcaaagccgcgcgctcaccgtcaccctgcgcgacctcgacggcgagccggtgttttcccaggaactgcagcccgacggcgcctga

SEQ ID NO: 325678 - DNA, 1563 bp, Pseudomonas aeruginosa; identical to SEQ ID NO: 325677

SEQ ID NO: 325679 - DNA, 516 bp, Pseudomonas aeruginosa
atgctgaaccgccaacgcctgctcctcggcgtcgccggacgcctgttgccgctggcggcgaaggttccgcgcgggctccagcacctggtcctgcaacgggtcgccaaccggctgttcgcccagccgctggaggagggcgccttcgacctgctggaaggtcgctggctgcgcctggaagtcagggacctcggcgtcggctggtgcgtcacccgggtacccggcggcctgcgcctggtcgaacggccacgggccagcgtgaccatccgcggcgactggcgcgacttcctgctgctggccagccggcatgaggacccggataccctgttcttccgccgccgcctggtgatcgagggcgacaccgagctgggcctggcggtcaagaacctcctcgacagcctcgatccggagcacctgccgccctggttgtggagcgccgtggaacgggccgggcgggccgtgcaggaggagcgcggcgaggcgccccaggggccggtccagggggcgcggggcggctga

SEQ ID NO: 325680 - DNA, 891 bp, Pseudomonas aeruginosa
atgaaactgagcctgggaccgctgctgttctactgggacaagcggcagatattcgatttctacgccgagatggctagccagccgctcgacgtcatctacctcggcgagaccgtctgcgccaagcgccgggcgctgtccctgaacgattggcaggcgctggcccgcgagctggcgcaggcgacccgtgccgagctggtgctctccgggctggcgctgatcgaggccgcttcggagctgtccagcctgcgccggctatgcgagaacggcgaactccgggtcgaggccaacgacatggccgccgtctattacctcagccagcgcggcgtgccctttgtcggcggtccggcgctgaacctctacaacggtcatgccctggccgaactgtattcctggggcatgcgccgctggattccgccggtggaagtctccggcaagctgctgcgcggggtgctcgaccaggctgcgcagctgggcctggagcaattgcagaccgaggtcttcgcctacggtcacctgccgctggcctactcggcgcgctgcttcaccgcgcgggcggagaaccggcccaaggacgactgtcagttctgctgccagcagtatcccgaaggtattccgctgctcagccaggagggcgaggcgctgttcaccctcaacggcatccagaccatgtccggcaaggtcagcaacctgctggccgactaccgctcgctggaacatagcggcgccgacctgctacgcctgagccctcgggcgcagggcatggccgaggtgatcgcggccttcgaccgggtacgccagggtgccgctccgccgctcgccgtggaaggctgcaacggctactggcacggccggccggggatgctgcgggcagaggaggcggggctatgctga

SEQ ID NO: 325681 - DNA, 996 bp, Pseudomonas aeruginosa
atgcaactggtctgtccggcgggcagcctgcccgccttgaagtcggccctgcgacagggcgccgacgccatctacgtcggtttccgcgacgacaccaacgcccgccatttcgccggcctcaaccttgacgaacgccagttgcaggaaggcctgcggcgagtccacgaggccgggcggcagctctacgtagcggtcaacacctattccagcgcgcagggctgggagcgctggcagcgcgcggtggaccaggccgccgacctcggcgtcgatgcgttgatcgccgccgacgtggcggtgctcggctatgccgcgaagcgtcatccgcggctcaacctgcatctgtcggtgcagggctcggcaaccaatgccgcggccctggccctctatcacgaacgctacggcatccgtcgcgcggtcctgccccgcgtgctatcgctggcgcaggtacgccaggtggcggccggcagcccggtgccggtggaagtgttcgccttcggcagcctgtgcatcatggccgagggccgctgccacctgtcctcctacgtcaccggcgagtcgccgaacctctgcggcgtctgttcgccggccagggcggtgcgctggagcgaggaaccggaggggttgacctcgcgcctcaacgaagtgctcatcgaccgctacgccgccggcgaggcggccggctacccgaccctctgcaagggccgtttcctggtcaatggccagcgcttccatgcgctggaggaaccgaccagcctgaacaccctggacctggtcccgcagctggcggaaatcggcgtggcggcggtgaagatcgaaggccgccagcgcagcccggcctacgtcgagcaggtcacccgggtctggcgccaggcgctggacagctacgccagcgcgccgggcgcctatagcgtgcagccgcaatggcagcgcgcgctggccggactttccgaagggcaccagaccaccctgggcgcctatcaccgttcctggcagtga

SEQ ID NO: 325682 - DNA, 1146 bp, Pseudomonas aeruginosa
  misc_feature (966)..(975): n is a, c, g, or t
gtgagcgcttgcgcctgcgatggcggccaactgcgcccgctcgacgaggcgctggccgaactgctggcgcgcgcgccgcgcccgccagcctgcgagagcctggccctggagcgggcgctgggacgagtgctcggcgaggacctgctggcgccgatggacctgccgcattgggacaacagtgcgatggacggctacgccttgtgctccgccgacctgccgcgcagcggcggcagcctgacggtcggcgcgcggatcgccgccggcgacacccgcggcatgagtctgccgctgggccaggcggcgcggatcttcaccggcgcgccgctgccgaccggcgccgactgcgtggtgccgcaggaactctgcgtggtcgacggcgagcgcgtgcagttgccgccggtgagcgccggccagcatgtgcgccggcgcggcgaggagttgcgccgcggcgcgccggtgctgcgtgccggacagcgcttgcgcccgcaggaactcggcctgctggcgagtctcggcgtcgccacggtctcggtgcgtcggcgcttgcgcatcggcctgctgagcagcggcgacgaattgcgcgagcccggccagacactgttggccgggcagatctacaacgccaaccgttactgcatcggcgccttgctgcgcggcctcggcttcgaggtgcacgacgaggaagtgctcgccgacgaactggtggccagccgcgatgcgctcagcctggcggcctccgaatgggacgcgctggtcaccagcggcggggtctcggtaggcgaggaagatcacctcaagcgcgccatcgccgaacttggcgaggtcaacctgtggcgcctggcgatccagccgggcaagccgttcgccttcggctccgtggccggcaagccttggctgggcctgcccggcaaccctgcggcggatctggtagatgtcatcggacttcaggctccgctggtgcaggcnnnnnnnnnngcccggcaaacctgcggcggcgctggtcaccgcattgctggtggcgcgtccgttcctgcttcgccagcagggactgttcgacgtagtgccgcggccgctgccgctgccggcggccttcgactggccgcaaccgcgggcgcgtcgccagtacctgcgggcgcggctcgatga

SEQ ID NO: 325683 - DNA, 558 bp, Pseudomonas aeruginosa
atgagccacctggccacctccaccttccagccgctgaacatcgccatcctcaccgtcagcgacacccgtaccctggaaaccgatacttccggccagaccctcgccgacgcgctgctggccgccggtcatcgcctgcaccagcggagcctgaagtccgatgacatctaccagatccgcgcggtggtctcggcctggatcgccgaccccgaggtacaggtcggcctgatcaccggcggcaccggcttcaccgcgcgggataacaccccgcaggcggtcgggccgctgttcgagcgcgatgtggagggcttcggcgaactgttccgccaggtctcgcagcgcgagatcggcacttccaccatccagtcgcgagcgctggccgggctcagcaacggtaccctggtgtgctgcctgcccggctcgccgggcgcctgtcgcaccgcctggaacgagattctcctggcgcaactggacagccgcacccgcccgtgcaatttcgtcccgcacctgaagaccccgccagccgtggcgccggtggccggctgcgggtgccgctcgtga

SEQ ID NO: 325684 - DNA, 453 bp, Pseudomonas aeruginosa
atggccatccgcgtccagcaggccgctttcgatccggggcaggagcttaacgccctgcatgcgcagaacgtcggcatcggcgcggtggtcggcttcgtcggctacgtgcgcgacttcaacgacggtcgcgaggtcggcgggatgttcctcgaacattatccgggcatgaccgagaaggccctcggcaagatcgccgccgaggccgggcagcgctggccgctgctgcgcctggagattctccaccgcatcggccgcctggagccgggcgagccgatcgtcttcgtcggttgcgccagcgcccaccggcaggcggcgttcgacgcctgcaacttcgtcatggactacctgaagacccgcgcgccgttctggaagaaggaagacaccgccgaaggcccgcgctgggtcgaaggccgctgcagcgaccaggccgccgcgcagcgctgggaggagtga

SEQ ID NO: 325685 - DNA, 252 bp, Pseudomonas aeruginosa
atgatccgcgtgcagtatttcgcccgttaccgagaagccctcggcgtcgacggcgagcagttgaactgggacgccgggctggcgaccctcggcgccttgcgccagctcctggtggagcgcggcggggcctgggagcgtaccctcggcgagcagaacctgatgtgcgcgcgcaatcaggaactgtgcggcctcgacgagccgttgcaggacggcgacgaagtcgccttcttccccaccgtcaccggaggttga

SEQ ID NO: 325686 - DNA, 483 bp, Pseudomonas aeruginosa
gtgctgacccatctcgattcccagggccgcgccaacatggtcgacgtcacggaaaaggccgtgacctcccgtgaagccacggccgaggccgtggtgcgcatgcgcccggaaaccctgcaactgatccaggacggcggccatcccaagggcgacgtcttcgccgtggcgcggatcgccggcatccaggcggccaagcgcacccacgaactgatcccgctgtgccatccgctgctgctcaccagcgtcaagctcgaactgcaggccgaggcgccggacgccgtgcgcatccgcgcgcgttgccggctggccgggcagaccggcgtggagatggaggcgctcaccgccgccagcgtcgcggccctgaccatctacgacatgtgcaaggcggtggaccgcgggatggtcatcgagcaggtccagttgctggagaagctcggcggcaagagcggccactaccgcaaagaggaggaagggcaggcatga

SEQ ID NO: 325687 - DNA, 429 bp, Pseudomonas aeruginosa; identical to SEQ ID NO: 325676

SEQ ID NO: 325688 - DNA, 183 bp, Pseudomonas aeruginosa; identical to SEQ ID NO: 325675

SEQ ID NO: 325689 - DNA, 549 bp, Pseudomonas aeruginosa; identical to SEQ ID NO: 325674

SEQ ID NO: 325690 - DNA, 1392 bp, Pseudomonas aeruginosa
gtgccggcgctgaacgggcgcaagctggacggcgtcagccgccacgattatttcggctggcgcaacctggacgaggagcggatcgacaacgacgtcgccaccctcaagctcgaacacgatttcagcgacgacttccagttgcagaacctcatccgctattcccacctgcatcgggacacggtgatctccgcctcccacgtcaaccagaagggcctgccgccggggcgctacctgccggcgggaccgcaagcctacgggcgcgattcgaagacgcggatgtggatcaaccagaccaacctcaccggccgcttcgacaccttcggcctggcgcatacgctgatcggcggcttcgagctgtcccgcgagacctacgaccgcaccacctactcctacaacctgggcaagttctacccggccaacggcttcgacctgcacaacccgccgggctactggaacggccccaccgacaagcgcgacagcgcgcgcaaccggaccgaactggaggtcaaggcgctgtacgccttcgacaccatcgccctggacgagcgctgggacctcagcctgggcctgcgctacgactggatcgacggcacctcgcggagcacgccctcaggcaagccgacggtgcgcgccgacagttccgacggcaagctgagcacacgggcggggctggtattcaagccgctggagaacgggcgggtgtacgtctcctacggcacctccttcaacccctcggcggaacacctggtcaccaccggctcgggcgtgaccgaggcgaccggaggcctggcgccggagaagaacagcacctacgagctgggcaccaagtgggagttcctcggacggcgcctggagctggacgcggcgctgttccaggtgaagaaggaagacgcccgcgaacgcctggccgacggcagctacgtgcttgccggcgaacagcgcgtgcgtggcctggagctgagcgccagcggcaagctgaacgagcactgggacctcttcgccacctacacctacctcgacagcgaaaccctgaaatccagtaacacgcagcgtgagggacaggccttgggcaataccccgccgcgctcgttgagcctctggagcacctacgaactgcccgagggcgtgaccctgggctatggcgcacgctacgtcagccagcgcaacgtcacctcggtggacaacggcaagctggatgcctactgggtgcacaacatgatgctcggctaccaggcgacgcgcgacctgaaactgcaactcaacctcgacaacctgttcgacaaggcctacgtcgagcgggtgcgccaggtgtacggcaaccagtcgcgctcctcggccatcgagtatggcgacggtcgcacggcgattctttcggcgatctacgcgttctga

SEQ ID NO: 325691 - DNA, 1359 bp, Pseudomonas aeruginosa
atgaatcaaccgtcccgcctggccactttgtacctgctggggttcgccctggacctggtgaacatcttcatcgccagcgtcgcctacccggacatcgggcgttcccttggcgcttcggtggcgaccctggcgtggatcggcaacacctacctgctcggcttgaccctggtgattccgttgagcgtctggctcgcttcgcgcctgggagaacggcgactgatgctgctggcactggccggtttcgccagcgcttcgctgggttgcggcctggctggatcggcggcgacgttgatcgtctggcgcctgtgccaggggttggccggcgggttactgatccccctcggccaggccatggcctatcggaatgtcccgtcgtcggcacgggccggcctgaccgcacgggtgatgctggtggcgctgatcgttcccgccgtggcgcctgccctcggcggctggctggtggacagcctgtcctggcgtgggatcttcttcgccagcgtggcgccggcgctgctggtgctggccctggcgatgcgctggctgcccaggcacaagcatgcggcgcagcgcctggacctgcgcggcctgctgctcggctcggcggcgctggccacgctgctggtggcgctcgcctggctgggatcgcccggcggcggcgggcgtggcctgctcctggcgctgctggcctgcgtgctgggctgctgctactggcgtgacgggcgcgctcgtaccgacgcgctgctcgaccttggcttgctggaggcgccattgctgcgtacggcgatgctggtctatctctgcgtgccgggagccttcatgggcgccaacctggtcgccatgctctatctgcaaggccccctcggcctcagcgcgagccgtgccggtgcgctgatgctgccctgggcgctggcggccggcctggccatcggcctgacccggcgacgcttcaatcgctgggggccgaaatccttgctgctggcgggcatggcgatacaggccggcggcctgctgtggctggctcgaagcggggaggggagcggcttctggcaactggcgggggcctacgcgaccatgggattcggcggcagcctgtgtagcagcgcggcacagggcatggccttgctcgacgtcccggcggcgcgcatgggccatgccagcgccttgtggaacatcaatcggcaactggcgttctgcctgggcatggccgtgctcggtgggttgctcaacctgttgcaggcgcgggccgaccccgcggccttcgtccactgcttcctgttcgccgccgctttcacgctattgcctctgccgtgggtgaggcgtatcgattccgccggggttcgcgccctggtccagacctga

SEQ ID NO: 325692 - DNA, 561 bp, Pseudomonas aeruginosa
atgctggcgaggcagcagggcgcagatgcgcgaattcaccaactcctccaggaacagcccgggacgcgcctcgacctcggtcagcacggcgacgtcgacgtgttcgctgagcagcgccgcgagggtttcctgggcgttgcccaggcgcaggttgacggtgattcccggatagctcgcgcgcagccgggcgagcatcggcatcaccaggtgcgggccgtcggcggcgacctcgaggcggccggagaccaattgtcgattggcgtcgagcagggcctcggcttcttcctccagggcgaacagggtgcgtgtgatcgccaccaggcgcgagccttcctcggtcagttcgatgcgccgggcggtgcgtcggaacagggtgacctggtagtgctcctcgagtgccttgacgtgtccggtcaccgccggctggctgatgcacaggcgctcggcggcgcgggtgaaactgccttcgcgggcgacggcgtcgaaggcgcggagctggaagagattcatggtatcggcctggcttatggctggcatcggaacaaacaatttgaacgatag

SEQ ID NO: 325693 - DNA, 291 bp, Pseudomonas aeruginosa
atgggcgacgccggcggccaggtggccgatcgaggcaagcttctccgtctgcaccagttggctttccagctccttgcgctcgccgatctctttctccagcgcctccttggcctggccgacttcctgggtgatctcctggatggcagcctccatccggctcatctgcaattggaggtgagccgtcacgttccacttggcgctgagattgccggccatctggcggacctcctgtccctgcaaaggcaggccgaggagcagcaggcgctcttccgcggcccacggcgccaatag

SEQ ID NO: 325694 - DNA, 213 bp, Pseudomonas aeruginosa
atgcaccacgacctgcaagcgggagtcgagacgccagaaccgctcgagaacgggaatatccgcgcctaccgacgacatcccgagaaacaccacggcatacggcgcatcggcctggagggccgagcgtatccgccccaaggcctcctcggcgcttcccgccgtatccacctggtagccccgctcaggcgccacgggaggcgattcggcctctag

SEQ ID NO: 325695 - DNA, 1056 bp, Pseudomonas aeruginosa
gtgaaaaagccagctcccgcacacatcaagctactcttctgcattggtatatcgaccgctggatgcctttggtcgctctcctcggtggcctattgcggcaagcctgaactacctaccaagacccccctgccgatacagagcctccaatccgttttcaccttgaagcacgcaccgatcggtaaatcgatgggaacaatgaccgtgcaagtcggctcaggagaaactctaggtggctgggcgtggtgcggaagtgacggaaagcccggacaattcggttttacagctcccaaaactaccctcattccaatagatggaaatggcctctatgagtctggagtgccaggggtcggtatcagaattggacaccgagcacgctataactggaccgaaccgacagcagctcccgccacctaccccacgggcaacatcggcaccatgcgctatatgcccactgttctcgtagttgatttcatccgaaccgcaatgggagtaggaaagggagacatcaccccttttaactactcaaccaattttttcatcgataccaactacacaaatccatccagggctgaattcaccatagagggatataaccttcgcgcaacgcttgaacataacgctttcttcaccacgtgcagcacacaaaagtcgaccattgatgtcaacatggggcgcccaacggcgtatgacatcaaaagaggggctgtgccagatcatggcttttcactggatgttgtgtgcgaaggactcaatccgagtgtcaaacctcctgtgaaggtctactttgaaggaaactcgatccaggatggcctgttgaacctcacaggcagaggagaagccggtgtagcccaaggagtcggcatttcgttgatgtccagtaaaggagcggcattgccattcacccaagccaaggccctgcccctggactggctggccagcggtgctgggacggagatgtaccgctttgtgggatcggctcgctatgtcgccactggcggaaaaatcaccgcgggtaaagctgactccattttgacctacatcctggagtacaactaa

SEQ ID NO: 325696 - DNA, 225 bp, Pseudomonas aeruginosa
atgcgtcgtgtcagcgaattgatcgtatgcgctcggctcttgcgagcaacggacacaggagtgccgggaagcccggtgtgtggaaggggcgccttctcgaagaacatctaccgagtcatcggaatgccctgtcgcatcgacgacccggcattgggtcggttcccgcgatttgacccgttcatgcggtcgatgagttacgcgcagagcgagcccccttatctctag

SEQ ID NO: 325697 - DNA, 2763 bp, Pseudomonas aeruginosa
atgctcgaactcgatacccggcagatccgcatgggccagcgcgccgcggacaaggccgaagccctgcgcctgctcggcgcggcgctggtcgccgacggcctggccgcgcccggctatgccgagggcctgaaggcgcgcgaggcacaaggctccacctacctcggccagggcatcgccataccccatgggaccccggatacccgcgagctggtcttcagcaccggtgtgcgcctgctgcaattccccgagggagtggactggggcgatggccagcaggtctacctggccatcggcatcgcggcgaagtccgacgaacacctgcagctcctgcaattgctcacccgcgccctcggcgaggccgacctgggaccggcgctgagcgcggccgccagcgccgaggaagtcctcggcctgttgcagggcgcgccgcaggaactggcgctggacgcacaactggtcggcctcggccagaacgccgaggacctcgacgaactggcctggctcggcgcgcgcctgttgaagaaggccggctgcgtggagaacggcttcgccgccgtgctccagcagaccgaaccgttgccgctgggcgacgggctgtgctggttgcacagcgaacaattggtgaagcgccccgggctggccttcgttactccggcgcaaccgttgcagcaccaggggcaaccggtcaccgggctgttctgcctggccagcctgggcgaagcgcaccaggcgctgctcgaacgcctgtgcgacctgttgctggaagggcgtggcgccgagctggtgcgcgccaccagcagccgcagcgtactcgcggcgctcggtggcgagctgccgccggactggcccagcgcgcgagcggtcctggccaacccgcatggcctgcatgcccgcccggcccaggcgctggcgcagctggccaagggcttcgccggcgagatccgggtacgcctggccgacagcgaggcggcccccgtctcggcgaagagcctgagcaagctgctcgccctcggcgcgcgacgcggccagacgctggagttcagcgccgagccggcgatcgccgaggacgcgctgccagccttgctggccgcggtgcgcgaggggctcggcgaggaggtcgaagcgctggcggaggaggccttgcccgatgccgtcggcgaggcggaagaggatgcccggccggcgccgctgcgcgccggcgagcgcctgcaggcgatcgccgcgtcgccgggcatcgccagtggtccggcgcatgtccaggtggcgcagcgcttcgagttccagccgcgtggcgagtcgccggcccatgaacgcgagcgcctgctgcgggccaagcgggcggtggacgaggagatcgtcggcctggtcgaacgcagcacggtgaaggcgatccgcgagattttcgtcacccaccgggagatgctcgacgatccggaactggccgagcaggtgcaactgcgcctgaatcgcggcgaaagcgccgaagcggcctggagtcgggtagtggaagacagcgcggcgcagcaggaggcgctgcacgacaccttgctcgccgagcgcgccgccgacctccgcgacctcggccggcgggtgctggccaggctctgcggggtggaggcgccgcgcgagccggagcagccgtacatcctggtgatggacgaggtcggcccctccgatgtcgcccgcctcgacgcccagcgggtcgccggcatcctcacggcgcgcggcggcgccacttcgcacagcgcgatcatcgcccgcgccctcggcattccggcattggtcggcgccggcgcggcggtgctcggcctggagccgggcacggcactgctgctggatggcgaacacggctggctgcaggtggcgccgagcaccgaacagttgcagcaggccgccgccgagcgcgacgcccgccagcagcgccaggcccgcgccgacgcgcagcgtctggagcctgcgcggacccgcgacggccacgcggtggaagtctgcgccaaccttggcgacaccgccggcgccgcgcgcgcggtggagctgggcgccgagggcgttggcctgctgcgcaccgagttcgtcttcatgaacaacgcccgcgcgccggacctggcgacccaggaagcggaataccgtcgggtgctcgacgccctcgacggacgtccgctggtggcgcggaccctggatgtcggcggggacgcgctgttccgcgccgccggggagcgaccgctgcgggtgatgtttccgatggtcggcagcctcgacgaatggcgccaggcgcgtgacctggcgctgcgcctgcgcgaggaaatcccgctggccgacctgcaactggggatcatggttgaggtgccctcggcggcgttgctcgcgccggtgctggcccgcgaggtggatttcttcagcgtcggcaccaacgacctgacccagtacaccctggccatcgatcgcggccacccgagtctttcggcccaggccgacggcctgcatccggcggtgctgcaactgatcgacatgaccgtccgcgccgcccatgccgagggcaagtgggtcggcgtctgcggcgaactggcggccgacccgctggcgttgccgctgctggtcggcctgggagtggacgagctgagcgtctcggcgcgcagcatcgccctggtcaaggccggcgtgcgcgaactgcagctggtcgctgcgcgcggcctggcccgcaaagccctgggcctggcgagcgccgccgaggtccgggccctggtggaagcggaggtgcagtaa

SEQ ID NO: 325698 - DNA, 675 bp, Pseudomonas aeruginosa
atgaaccagaagaaagcggtcatcctgctctccggcggcctcgactccgccaccgttgtcgccatggccaaggccgacggctacgcctgctacaccatgagtttcgactacggccagcgccatcgcgccgagctgcaggccgccgagcgcgtggcccggcagttgggcgtgatcgagcacaaggtgatagggctcgacctcaatggcatgggcggctcggcattgaccgacgagagcatcgcggtgcccgagtcgcctagcgaaggtataccggtgacttacgtgcccgcgcgcaatacggtgtttctctcgctcgccctgggctgggccgaggtcctggatgcccgtgacatcttcatcggtgtgaatgcggtggattactctggttatccggattgtcgccctgagttcgtcgaggctttcgagcgcatggcgaacctggcaaccaaggcgggcgtggaaggcaatggcttccgcatccaggcgccgctgcagtatctgtccaaggcgcagatcatccaggcgggcgtggcgcgtggggtggattacggcctgacggtgtcctgttatcaagccgatgagcaggggcgtgcgtgcggcaaatgcgatagctgccggctgcgtgcggatggcttcgcggcggctggtatttccgacccgacgccatatttctga

SEQ ID NO: 325699 - DNA, 333 bp, Pseudomonas aeruginosa
gtgtcacgggtcgacccgcgcgtaagcaaggttctcgacctcaagacgccgggatctggcgaggtcggacgcaaccgatacgaaaatatcccgttgctgaccgacaacgatcaggtgaagtttgtcgtctgttcgcgagaggactacgactgggcggtatccaagctgatcgagtaccgcctcgaccagcgtgccggtgaagtcctgttctcgccgagccaccatcaggtcagcgcgcgagaactggccgattggatcgtggccgacaacctgccggtccgcctgcaattgcaactgcacaagattctctggaacgacgaaccgggccattga

SEQ ID NO: 325700 - DNA, 339 bp, Pseudomonas aeruginosa
atgcaacagaccctgcgcatcaccgagattttctactcgttgcagggggaaacacgtaccgccggcttgccgacggtcttcgtgcgcctgaccggctgccccctgcgctgtcactattgcgataccgcctatgccttcagcggcggcgacgtcgttagcctggacgctattctcgagcgggttgccacctacaagcctcgctacatctgcgtgaccggcggggagccgctccagcagagaattgcatttctctgctggagcggctttgcgacgccggctacgaggtttccctggaaaccagcggggccctcgatgtgtcacgggtcgacccgcgcgtaa

SEQ ID NO: 325701 - DNA, 825 bp, Pseudomonas aeruginosa
atgcccaagcacctgcgtgtcctgacgttcctcgcgctcagcctgccattcgcggcctgggcggaagttcctgtgtatgacggcgttgccgccaacaatggcggcaacgttcctccttccgggtatggcacggcaggtgccggcggcgcctttgccggaggtggggtgacaacccctacctccgtgcagggcgaactgttcatgcagctccagcagatgcaggacgagttggctcgcctgcgtggcacgctcgaggaacagcagaaccagatccagcagctcaagcaggaaagcctggaacgttaccaggacctcgaccgtcggatttccggtggtggcgctcccgctgcacagaattccgcacccgctggcgccatcaacgccaatggggcgcctgcggctcccgcaggcaacaacgcaccggcgccgagtagcgagccgggcgacccggcgaaggagaagctctactacgacgcggccttcgacctgataaagagcaaggatttcgacaaggcgagccaggcgttcaatgccttcttgcgcaagtacccgaacagccagtactccggcaacgcccagtactggctcggcgaggtgaacctggccaagggcgacctgcaaggtgccggccaggctttcgcgcgggtcagccagagctaccccagcagccagaaggtgcccgactcgctgtacaagctggcggacgtcgagcgtcgcctgggtaacaacgacaaggccaagggcatcctccagcaggtcatttcccagtacccgggcacttcggccgcccaactggcgcagcgcgacctgaagaaccttcgctga

SEQ ID NO: 325702 - DNA, 1044 bp, Pseudomonas aeruginosa
ttgaagcaacagttcgagcgctcgccttccgagagttatttctggcccgtcgtcctggcggtggtcctgcacgttctgatcttcgccatgctgttcgtcagctgggcgtttgctccggagcttcctccctccaagccgatcgtgcaggccacgctctaccagctcaagtcgaagagccaggcgacgacccagaccaaccagaagatcgctggcgaggcgaagaagaccgcctccaagcaatacgaagtcgagcagctcgaacagaagaagctcgagcagcagaaactcgagcaacaaaagctggaacagcagcaggtcgctgctgcgaaagcggcggaacaaaagaaggctgacgaggctcgaaaggccgaggcccagaaagccgccgaggcgaagaaggccgatgaagccaagaaagctgccgaggccaaggccgccgaacagaagaagcaggctgacatagccaagaagcgcgccgaggacgaggccaagaaaaaggccgctgacgacgccaagaaaaaggcagccgaggacgcgaagaagaaagcggccgaggaggccaagaagaaggctgctgcggaagcggcgaagaagaaagccgccgtcgaggccgccaagaaaaaggccgccgccgctgccgcggcagcccgcaaggctgccgaggacaagaaggcgcaggcgttggccgagttgctttcggatacgaccgagcgccagcaggccctggccgacgaggtgggcagcgaggtcaccggcagtctcgacgacctgatcgtcaacctggtgagccagcagtggcggcgtcctccatcggcgcgtaatggaatgagcgtagaagtactaatcgaaatgctgccggacggtaccatcaccaatgccagcgtcagccgttcgagtggcgacaagcctttcgacagttcggcggtggcggcggtgcgcaacgtcggccgtattcccgagatgcagcaattgccgcgggctaccttcgacagcctgtatcgtcagcgccgcatcatctttaaaccggaggatttgagtctgtga

SEQ ID NO: 325703 - DNA, 1323 bp, Pseudomonas aeruginosa
atgaagtggagcgccattgcactggcggtttccgcaggtagcactcagttcgccgtggccgacgcattcgtcagcgatcaagccgaagcgaaggggttcatcgaagacagcagcctcgacctgctgctccgcaactactatttcaaccgtgacggcaagagcggcagcggggaccgcgtcgactggacccaaggcttcctcaccacctatgaatccggcttcacccaaggcaccgtcggcttcggcgtcgatgccttcggctacctcggtctgaagctcgacggcacctccgacaagagcggtaccggcaacctgccagtgatgaacgacggcacgccccgtgacgactacagccgcgccggtggcgccgtgaaggtacgcatctccaagaccatgttgaagtggggcgagatgcagccgaccgctccggtcttcgccgccggcggcagccgcctgttcccgcagaccgcgaccggcttccaactgcagagcagcgaactcgaagggctcgatctcgaagcgggccacttcaccgaaggcaagcagggcaccaccaccaagtcgcgcggcgaactctacgcaacctatgcaggcgagaccgccaagagcgccgatttcattgggggccgctacgcaatcaccgataacctcagcgcctccctgtacggtgctgaactcgaagacatctatcgtcagtattacctgaacagcaactacaccatcccactggcatccgaccaatcgctgggcttcgatttcaacatctaccgcacaaacgatgaaggcaaggccaaggccggcgacatcagcaacaccacttggtccctggcggcagcctacactctggatgcgcacactttcaccttggcctaccagaaggtccatggcgatcagccgtttgattatatcggcttcggcgagaacggttccggcggcggcggtgactcgattttcctcgccaactccgtgcagtactccgacttcaacggccccggcgagaaatcctggcaggcccgctacgacctgaacctcgcctcctatggcgttcccggcctgactttcatggtccgctatatcaatggcaaggacatcgatggcaccaagatgtctgacaacaacgtcggctataagaactacggctacggcgaggacggcaagcaccacgagaccaacctcgaagccaagtacgtggtccagtccggtccggccaaggacctgtcgttccgcatccgccaggcctggcaccgcgccaacgccgaccaggccgaaggcgaccagaacgagttccgcctgatcgtcgactatccgctgtcgatcctgtaa

SEQ ID NO: 325704 - DNA, 246 bp, Pseudomonas aeruginosa
  misc_feature (11)..(20): n is a, c, g, or t
gtgctgatcgnnnnnnnnnngctggaaaccgtcgcgcatgcggtcccagatgtcgttgtaggcggcgttctggccgggctgggtatgcagccaggagggattgaactggacgtcgacggctcgggcgccgggacgtgctgctttggcctgggcctcccccttgatctggccgctgccctggcagccggcgagcgcaccggcgatgagcaggatggacacccggacggcgcgagccagggcgtctag

SEQ ID NO: 325705 - DNA, 1245 bp, Pseudomonas aeruginosa
atgcactacgtggtcgagcgcctggaagaacgcaacatgccgctcgaactggcgctgctgccggtcatcgaaagcgcctacaaccccttcgccctgtcgcgcagcaacgccgccggcctctggcagttcattcccgccaccggccagcatttcaacctgcgccagaccaatttctacgacggtcgccgcgacatcaccgcctcgaccaacgccgccctgacctatctcgagcgcctgcacgacatgttcaacggcgactggatgctcgccctggcggcctacaacgccggcgaaggcactgtcagccgtgccatcgaacgcaacgagaaactgggcctgccgaccgactactggaacctgccgctgccgcaggaaacccaggactacgtacccaagctgctcgccctctcgcagatcgtcatggcgccggattcctacggcatcagcctgaacccgatcaacaacgagccctacttccaggccgtccgggtcaagcgcgggatcgacctgtccagcgtcgccgcgctggcgaacctggacgaggacgagctgtaccagctgaacccggcctacaagcgccgcgtgaccatggacggcccccagcaactgttggtgccgatggagaaagcggcgttcctgaccgcctcgctggacaccctcaagccgaaggaagtcaccgcctggcagcaataccgggtgcgtagcggcgacagcctgcacagcatcgccaaccgctatcggatcaccgtagcggagctcaagagcgccaaccgcctgtccagcaaccacctgcgcaagggccagcaactgagcatccccgggcagatcgccggcggcgccgtcaagccggtctaccagcaactcgcccgacaggcttccaccccggccagaacccgctcctacaaggtcaagaacggcgacagcctgtggcagatcgcccgcaacaacggcgtcgacgtcaacgacctgaagcgctggaacggcctggacaagcacgccctgaaggtcggccagaccctcaagctgcaaggcggcacccaggccctggcggcccgcaagggaaatgccgccggcaagcgcgacagcgccacctactacaaggtcaagcaaggcgactcgatgtacctgatcgccaagcgcttcaatgtcgagatgaagcacctgcagcgctggaacccgcgcagcaagcaggcgctcaagcccggccagaccctgaccctgtacctggacaccgcgagccgctga

SEQ ID NO: 325706 - DNA, 1113 bp, Pseudomonas aeruginosa
gtgttcgaacgcgtgaagggctggtggggcgaaaaactgccggtgaaccgcggcaaatacaatttcgaccgggtcgtggtggacttctaccgggacaacggcgtcgccttcgaagccttcaaggccggcgagttcgacttctacatcgagcaccaggcgaagaactggctgaacaactatcgcttccccgcggttctgcgcggcgatgtgatccgcacggaaatcccgcaccagatccccagccagacccaggcgttgttcatgaacacccgtcgcgccgtgttcaaggagcgcgcgctacgccaggcgctgggcgagatgttcgacttcgaatggaccaatcgcgccctcttcagcaattcctacctgcgctcgcgcagctactacccgaacagcgaattcgccgccagcggcgtcccggagggccaggaatggctgtacctgtcgccgtaccgcaagcaattgccggcgcagttgttcaaacagccattcagcctgccgaccaccgaggggcgcggcattccccgtgaaaccctcaggcatgcactcggtctactggccgatgccggctggaagctgtccggcgaccgactgctgaataaaaagggcgaaccgctgcgcttcgaaatcctgctggtcaatccgagcctggagcgtattctccagccctatcgcgaaaacctcgccagcatcggcatcgacgcgcgcctgcgcaccgtcgaccgcgcccaatacaagcagcgcctggaccagttcgactacgacatgatcctcatgaccctgccgcagaccctcagtcccggcctggaacagtggcagtacttccactccagccaggtgaaggtcaagggcagcaagaattacgcgggaatcgccaacccggtggtcgacgccatgctcaaccgcctgctcggcgcccacagccgcgacgaacaggtcgccgccgcgcgcgccctggaccggaccttgctctggcagtactacagcattcccaactggtacctcaattcgcaccgtctggcgtaccgcaaccgcttcgccttcgtcgccaccccgccctacaccctgggcctgcgcgcgtggtggcagaaaaacctggagacgtcccgatga

SEQ ID NO: 325707 - DNA, 1086 bp, Pseudomonas aeruginosa
  misc_feature (1002)..(1011): n is a, c, g, or t
atgcgcctgtctcccatcaaccagcgccgctgggcccgcttcaagagcaacaagcgtggctggtggtcgctctggctgttcctcatcctgttcgtcggcagcctcggcgccgaactgatcgccaacgacaaaccgctggtcgtgcattacgacggcggctggtatttcccggtcttcaaacgctacccggaaaccaccttcggcggcgaattccccctggaagccaactacaagagcccctacatcagccaactgatcgccgagaaggacggctgggtgctttggccgccgatcccctacagctacgacaccatcaactacgagctgaaggttcccgcccccgccccgccgtcggcggaaaactggctgggcaccgacgaccaggcccgcgacgtgctcgcccgggtgatttacggcttccgcgtgtcgatcctcttcgccctgaccctgaccgtgctcagttctctgatcggcgtcaccgtcggcgccctgcaaggctactacggcggctgggtcgacctgctcggccagcgtttcctggaagtctggtcggggctgccggtgctctacctgctgatcatcctggccagcttcgtccagccgaacttctggtggctgctgggcatcatgctgctgttttcctggatgagcctggtggacgtggtccgcgccgagttcctccgcgggcgtaacctggaatacgtccgcgccgcccgggccctcggcatgcgcaacagcgccatcatgttccgtcacatcctgccgaacgcgatgatctcgaccctgaccttcatgccgttcatcctcaccggcgccatcggcaccctcacctccctggacttcctcggcttcggcctgccgcccggcgcgccgtcgctgggcgagctggtcgcccagggcaagtccaacctccaggcgccctggctgggcatttccgccttcgtggtgctggcggtcatgctgagcctgctggtgttcatcggcgaagcggtgcgcgacgcnnnnnnnnnngtgctggcggtcatgctgagcctgctggtgttcatcggcgaagccgcccgcgacgctttcgacccgaggaaatga

SEQ ID NO: 325708 - DNA, 240 bp, Pseudomonas aeruginosa
gtgcagcgccaggtcgtggaattgctgcggcaactgcagggcaagtacaacctcacctacctgttcatcagccacgacctggcggtggtcaaggcgctcagccaccagttgatggtggttcgacatggcaaggtggtggaacagggcagcgccgaagcggttttcgcctcgccgcaacatccctatacgcagcaattgctggaggccgccttcatggccccggcaagcgcggaaaactga

SEQ ID NO: 325709 - DNA, 999 bp, Pseudomonas aeruginosa
atgtcccttcgtcgtttcgccctggccgcactcgccagcgccctggtctccggcccggttgccgcggccacgcaactgctgaacgtttcctacgacccgacccgcgagctgtaccaggcctacaacgcggccttcatcaagcactggaaggcccagggcggcgaggacctgaccgtccagcagtcccacggaggctccggcaagcaggcccgcgcggtgatcgacgggctcaaggccgacgtggtgaccctggccctggccggcgacatcgacgaactgcacaagctcggcaagctgctgccggccgactggcaggcacgcctgccggacaacagcaccccctacacctcgaccatcgtgttcctggtgcgcaagggcaaccccaagggaatcaaggactggggcgacctgaccaaggaaggcgtggaagtcatcacgccgaacccgaagacctccggcggcgcgcgctggaacttcctcgccgcctgggcctgggcgaagaagcagtacggcagcgacgagaaggccaaggactacgtgcaggcgctgtacaagcacgtaccggtgctcgacaccggcgcccgcggctcgaccatcaccttcgtcaacaaccagatcggcgacgtgctgctggcctgggagaacgaggcgttcctggcgaagaaggaacagggcggggaaaacttcgagatcgtcgtaccctccatctccatcctcgccgaaccaccggtcgcggtggtcgacaaggtggtcgagaagaaaggcacccgcaaggtcgccgaggcctacctgcaatacctgtacagcgaggaaggccagcgcatcgccgcgcagaacttctaccggccgcgcaaccagaaggtcgccgccgagttcgccacgcagttcccgaaactgaacctggtcaccgtcgactccgatttcggcggctggaagacggcccagccgaagttcttcaacgacgggggcatcttcgaccagatctaccaggcgcaatga

SEQ ID NO: 325710 - DNA, 990 bp, Pseudomonas aeruginosa
atgagcatcgaaatccgtaacgtcagcaagaacttcaacgccttcaaggccctggacgacatcaacctcgacatccagagcggcgagctggtggccctgctcggcccctccgggtgcggcaagaccaccctgctgcggatcatcgccgggctggaaaccccggacgccggcaacatcgtgttccatggcgaggacgtctcgcagcacgacgtgcgcgaccgcaacgtcggcttcgtcttccagcactacgcgctgttccgccacatgacggtgttcgacaacgtcgccttcggcctgcgcatgaagcccaagggcgagcggccgggcgagtccgcgatcaaggccaaggtccacgagctgctcaacatggtgcagctcgactggctcgccgaccgctatccagagcaactctccggcggccagcggcagcgtatcgccctggcccgcgcgctggcggtggagccgaagatcctgctcctcgacgaacccttcggcgccctcgacgccaaggtgcgcaaggagctgcgccgctggctggcgcgcctgcacgaggagatcaacctgacctcggtgttcgtcacccacgaccaggaagaggcgatggaagtggccgaccgcatcgtggtgatgaacaaaggcgtgatcgagcagatcggctcgcccggcgaggtctacgagaacccggccagcgatttcgtctaccacttcctcggcgactccaaccgcctgcaactgggcaacgaccagcacctgctgttccgcccccacgaagtgtcgctgtcgcgttccgcggtggccgagcaccgcgccgccgaggtccgcgacatccgtccgctgggggcgatcacccgggtaacgctgaaggtcgacggccaggacgaactgatcgaagccgaagtggtgaaggaccacgacagcctggccggcctggcccgcggcgagaccctctacttcaagccgaaggccttccagccggtggccaatctctga

SEQ ID NO: 325711 - DNA, 2169 bp, Pseudomonas aeruginosa
gtggtgcgggtgatagtcggcaacgaggcgctgttccgccgcgaggtgacggcagaacagttgatcgcctacctcgaccgggtccgcgcggcggtcaaggttccggtgaccaccgccgaacagtggcacgtctaccgcgaacacccggaactggcgcaacacgtcgacctgatcgccgcccacgtcctgccctactgggaggccacgccggtggccgacgcggtggacttcgtgctcgaacgcgcgcgcgaactcaaggccgccttcccgaggaagccgctgctgctcgctgaggtcggctggccgagcaacgggcgcatgcgcggcagcgccgaggcgacacccgcggaccaggccatctacctgcggcgcctgaccaacgcgctcaacggcgaaggctacagctacttcgtcatcgaggccttcgaccagccctggaaggtcagcgccgaaggctcggtgggcgcctactggggcgtctacaacgccgaccgcaaggccaagttcaacttcaccgggccggtggtgccgattcccaagtggcgcgccctggccatcgcctcggcggtactcgcggtactcgccttcaccctgctgctgatcgacagttcctcgctgcgccagcgcgggaggaccttcctcgccgtggtctcgttcgcctgcgcctcggtgctggtgtggatcgcctacgactacagccagcagtacagcacctggttcagcctgaccgtcggcgcgttgctgggcgtcggcgcgctgggggtggtcatcgtgctgttcaccgaggcccacgagctggccgaggcggtctggacgcgcaagcggcgccggccattcctgccgatcaccgccgcgcaggcctatcggcccaaggtgtcgatccacgtgccctgctacaacgagccgccggaactgctgaaacagaccctcgacgccctcgcccgcctcgactacccggactacgaagtcctggtgatcgacaacaacactcgcgacccggccgtctggcagccggtcgaggcgcactgcgcgcgcctgggcgagcgcttccgcttcttccacgtcgccccgctggaaggcttcaaggccggcgcgctgaacttcgccctgggccacgtggcggcggacgtcgaggtggtcgcggtgatcgacgccgactactgcgtcgaccccgactggctcaggcacatggtgccgcacttcggcgacccgcggatcgccgtggtgcagtcgccgcaggactaccgcgaccagcacgagagcgccttcaagcggctctgctacgccgagtacaagggcttcttccacatcggcatggtcacccgcaacgaccgcgacgcgatcatcgagcacggcaccatgaccatgatccggcgcagcgtgctggacgagctgagatggccggaatggtgcatcaccgaagacgccgagctgggcctgcgggtgttcgagaagggcctgtcggccgcctacttcgagcgcagctacggcaagggggtgatgcccgataccttcatcgacttcaagaagcagcgcttccgctgggcctacggcgcgatccagatcatgaagcggcataccgacgccctgctgcgcggccgcggtcccgacggcagccgcctgacccgcggccagcgctaccacttcgtggccggctggctgccgtggatcgccgacggcctgaacatcttcttcaccctcggcgcgctgctctggatcttcgcgatcctgccgctggccctgttcgccttcaaggtcggcaagatcctcttcctctaccggcgcaccgtcggcgtcgacctgcgtgactcgttcttcgccgccctcgccggcctgtcgctctcgcacaccatcgccaaggcggtgctgtacggcttcgtcacccgcggcatcccgttcttccgcacgccgaagatgcgctccagccacggcctgctggtggccctggcggaggcccgcgaggaagtcttcgtgatgctcctgctgtggggcgcggcggccggcatcgtggcggttcagggcgtgccgagccgcgacctgctgatctgggtcgccatgctcctggtgcaatcgctgccctacctggcggcgctggtcatggccctgctctcgtcgctgccgaaaccgcgcgaggaactggccggcggcgccgagcagatcggcggttga

SEQ ID NO: 325712 - DNA, 1788 bp, Pseudomonas aeruginosa
atgcaaataactaaactaaccctccatcgctttaaaaaatacagagataaagaaatatcaataaaacccggactatcactttttgccggacctaataacgcagggaaaaccaccatattacaagctttcgcagtttgggaattctgcaaaactgtacttgagatggagaaaggcagcgctagcattcggcaaggttacgctggtcaaggcctaggaatgggagcagatgatttcctagtcattaacacaccgtctcttaaacacctatggacaaatcttaacactcaaagagacagtgaaaatgatgggtacactctatggataaaagttgactggactgatagggacaacgcaaagcatttaacaataggcctatcactcgcaaatgatagaatatttataaaaacaatatcaagcaacattcaggaagatgaaaaatcaccaaacattgcttatataccaccttttgcaggcataacaacaaaggaacaaaaagcgacacctgcccaacagagaagactgataggacaagggctacccggcgcaaccattagatcaactcttctcaatctatttaataccaaccaagcaaagagagcagcctttaaagacaatcgcggcagaattcctaggcaccaattacgagagattagggattcggacccatgggagatcctctccacaataataaaagaagtattcaaaacagagattacagtaagcccatacaatgaggcataccacacctatataaagctcacaacttacaagggagacttcaatgaacgaggactatttactcgatactcaaattatacccctagagatctaactgcggaaggaagtggctttctacagtggctaagtgtatttgcttttgcgctttccccagaaaccgacttgatacttcttgacgaaccagacgctcacttacactccactcttcagcatgaaataataagacaacttgagaaagtagcagaaaaagcaggaaagcagatatttttctgcactcactctccagagctaataaaggcacaccctgcagaaaaaattctttcaataaacagagactcaatctcatatctatctgacgaccaagggaaaataatatcactatctggcataggcagcgaatactacccattgttagacaacacaaaaaagaccaaaaaaatactatttgtagaaaatctatctgacgcaagaacaatattcaatatcgcaagaaaacttggcttcaacattgaaaacaaaatcgttatatggccttgggcttctaaaggtcatgagcgcaagcatttattcaaccaactcctccttgaaatccctgagttaaaagggataagcctaaacgacagagacaatgaagagataaacactgtaatagccgaaaaccttcgggatactacatatcccacaccaaatgcgcagactagactttacttcaaaaaatggcgaagaagatacattgaaggctacttccttcaccccgacccaatagcaagggcagccaatcgaccagcagacgaagtaataagacacgtattagataactttgcaatcaacattgcgggccggatagtaactcaacaaaacgagcctgcagcgctcctcgactgccgtgcaaaatcaatattatccgaagacacaaatagcatccaaagcgtcttccaagttgacaaatacaaaatagtaaatgaattattaccaaacgaaatacacgaagatttccatatattaattagagaaatcttacagttactacaaattaatgaacaagcttaa

SEQ ID NO: 325713 - DNA, 555 bp, Pseudomonas aeruginosa
atgtctgacgcccccctccactacagccgtttcacccaccaccatcgggtcctgcgcgccgtgctgctggatgaggaaggctggttcgtgctctccgacctggcacggctgctgggccgttacctgggtggtcgggcgccggcggcgttgtgtgacgaggcgccgtggccgctggcgacggcggaacagcgcgagcacttgttcgccctctgtcatgtgctggagcggcatctggacaccgatcagtggcggctcgcctggctccatgacgaacgccacgggccacgccaggactgcctggtcagcgagtccgggctctacgctctgctctggctcgcagtgcctggcgcggcacggggtttgcgccgttgggtcagcggctcggtgctgccacgcctgcgcagccagtctcaccccaaagccacgccccagcgcgccgtgctgcactggaaaaccgccgagatcgacaccctgcactggcaaggcaagacctggatccccctctccgactgcccccaactcctcgaccgcccacgcccgctgatccgggcctga

SEQ ID NO: 325714 - DNA, 1368 bp, Pseudomonas aeruginosa
atgagctcttcccccgcgcccgaaagtgcgctgaaacccaccctgggcgtgttcgacgtggtcgccatcaccgtttccgcggtcactcccgccagttccgtcttcgtcatcgcccctttcgccatccagcaggccggcaccggcgctttctgggccttcgccctggccggggtgctggcgctgatgttcgcctggtgctatgccgagctgggcagggcgcacagcaccgccggcggcgagtatgtctacgccaagcgcgtgttcggcggcttggccggctacgccaccttcctcacggtgctggcgatgctgctgttcatcccgccggtgctcgccaccggcgcggcgacttacctgaacgccgccctcggcacccacttcgatgcgcagaccgtggccctggcgatcgttgccttcagctacctgctgggcatcctcaacatccgcgtcaacgcctgggtcacgggtacctgcctgctgctggaagtggcggcgctgctggtgatcgtcggcctcggtttcggccatgcacagcaaccggcgagcgtcctgctgcagccgcaggtagtcggcgacggcgggctgctggcgatcgcaccctgggcattggtgatcggagcggtcggtaccgcgctgttctcctacaacggtttcggcggcgcggtgctgctcgccgaggacatgaaggacggcggccacagcgtgcatcgcgcggtgctctggtcgctggcgctggtggtgctgatcgagatcgtcccgctcgccgcgctgctgatcggcgcgccgtcgcttccggcgatgctcgccagccccgatccgatcggctacctgttgaacagccatggcaacgagacgctgtcgcgcctggtcagcgcgggaatcttcctctcggtgttcaacgccatcgtcgccatcgtcatccagagcgcccgggtgatcttcagcagcggtcgcgacgcgctctggatgccggcgttgaaccgtgccttcacccgtatccatccgcgctgggaatcgccctggctggccacgctgttcctcgccattccctcggcggcgctgagcttcagctccaacctggccgaactgacctcgttcaccgtgttgctgatcgtcatggtctacctgatcgtcgccctctgcgcgttgttcagccgggtgctgcggcgcgaccgcgagcatccctaccggatgccgctgtggccgctgccggcgctgctggcggtgagcggggcgggatacctgctgctcaacctgttcctggcggcctcggccagggacgtgatgatcattgtcggactgctggcggtgtcggtgattctctactgcacctacggcaagctcagtccggcgttccagaagctttga

SEQ ID NO: 325715 - DNA, 348 bp, Pseudomonas aeruginosa
gtgaaggcgaagtatctgggtctggcgattctcctgggcggtctcggcgggtgcgtggtgcatccgccgcagaccagcgaaccgccggcctcgctgcaaccgcagactccagcgcagcccagccgctcgcgtccgcagttcgccccgccgccaggcggcaagggcgtctgggacggcagcctgggggtctatgtgatccgcggcgagcgcgatctctactaccgccagcgtacctactaccgctgggacggcggctggttctggtccaccagcccgcagggtccctggaccgagaccgacgcccgcggcatcccgcccggtctcagccggcgctacgccaatccatga

SEQ ID NO: 325716 - DNA, 387 bp, Pseudomonas aeruginosa
atgccctcgccaagccccttcctcctcgccgccctgctgcttatcgccagccatgtccaggccgccccggccatcctcggcgacgaggaaaaggatgcaatcatcgatcggcaccggctgactccggagttccgcatcaatcggcaagccaaggtacgccatcacgaaggaaccatcgaccgcgtggtcctgcttcaggatagggaccgcttcacctaccgaagctaccttcgcgacgaccagaaggagcctgccaccttctggatcctggagttcgacgcacgcagcgggaaacggctgagcgaacgccagaccgatgaggacgactattggcgtagacgcgacgccgactcgcaacgggccgacagcggcgaaaggaaccgatag

SEQ ID NO: 325717 - DNA, 408 bp, Pseudomonas aeruginosa
gtggcgcgcttcaatgcgcgcggcgtcgccagcgcggacatccgggtcgccatcggtcccgggatcaaagcctgctgctacgaggtgagtgccgggttcatcgaggcgttgcaggtcggccacggccgcctctgggagggcgcggcgcctccctggagccagcgtcgtccgctccccgagcggccgccccggttcgctccgcccgagcccacgtcgatgcggccgaaggcgcccctggtggccttctgtcgccagttgttccaggccgccggcgtcgggccggcgcagatcgaagccagcgccgtctgcacttactgttccggcgatgcgttcgccagtcatcgccgacgccagcgcctgggcgaggagaagcgccagcagtacgcctggatcgcgcgcaagccgtga

SEQ ID NO: 325718 - DNA, 849 bp, Pseudomonas aeruginosa
atgcgcaaagccctgctgtgctgtgccgccccgctgtgcgcggccgccgccttcggcgccgaaaacaacgacgagaacgccgcccgcgaagggctctggaacaacctgcacgtctaccgcgcgttcaaccagcgcggcggcccctacctgaccgacgacagctacctggaatgggagttcggcggccgcaagggggtgctcgacctgtacggctacatcgactacaagaacctcttcgacgacgccagctcggacgtacccgacggcgagaactggttcgtcgacatcgagccgcgtctctccatcgaccgcctgctcggccgcgacttctccatcggcccgatccgcgaatggttcgtcgccttcgactactactacgccgacgcgcgccagggaccggggctgaacgtgctgtggtcgggcatcggcaccaacaccgagctgccctggctgggtacggtggggctcaatctctacgcgcgctacatcgacaagaactacggcgcgtccaacgagaacgcctgggacggctacgtcgcccacatgaactggttcaagccgctggcgcagttcggcggcaagcgcttcatcgccttccagggcttcttcgactacgagttcggctcgaagctgcccgacaaggacgatgccttcgagcgcgaataccgtaccgataacggcttccaggcctacctcgggctctggtatcacaccgaacactggaagttcggctacggcgccaaggtctaccgcaacatgacccagtggcgcgacggcgagcaactggacggacgccgcaccgactccagcgggatcggccactacttcaacgtcggctacgcgttctga

SEQ ID NO: 325719 - DNA, 222 bp, Pseudomonas aeruginosa
atgattcgagtgatgttcaagcagcagctggacgaaaagtcttacagggataagcggaggatcacgttgcaggaggtgagcgatgcaaccggtatctccagagcgacgctatcgcgtatagcgaacactccgggctacaacacttcgacggatcacatcgatttgctgtgtgactacctggaatgtgagttgagcgatttgctcaagcgagtggcgaattag

SEQ ID NO: 325720 - DNA, 237 bp, Pseudomonas aeruginosa
atgaacgaaatctatctgacgaccgacgagctgtctcagcgcatcaaatacgatgcgcggaccatccgtaattgcctgaaggactctgtgctgctggaaggtatccattacttccgcccctttggcggtcgaaaaatcctgttcatctgggaagctgtagaacgggacatggtcaagttctcgcgtgaaaacggctttggcatcccgatggcgaatggggggatctgccgtgggtaa

SEQ ID NO: 325721 - DNA, 525 bp, Pseudomonas aeruginosa
atggggggatctgccgtgggtaagattgttgcccgtaaagagaccggaaatctgttcttcgatttccgttacctgggcaagcgctgccgtgagcagacggcccttcccgacaccccgaccaaccggaagaaactggagaagatcctcgagcgcatcgaggccgaaatcactctcggcaccttcgattacaacgagtatttcccgcagagcggccgtgccgacgagctaagccggctcaaagctggcatctcgagactgaaggtgccgcaattcaaagacttcgcccaactctggttcgacgaaaaaaagatggaatggcgcgatagccacaccaataccgtacgcctcacgctcgagaaatatctgctgccaacgtttggcaaacaagaggtcagcgccatcaccaaggcagacatcctggctttccgctcggcactcggcaaagttcccgggcagaaaggtcagagtctgacagcgacgcgaatcaaccacatcagattgttgcgctgcagcgtgacgccataa

SEQ ID NO: 325722 - DNA, 1641 bp, Pseudomonas aeruginosa
ttgtcacatgagaagactcgcaagctggtcattgaagggcgtcgccaatggtgtctgcaaaccgccatcaagaatgaaggcaaacgtttcatcggcctggtcgcggtgaatggcggcctgccgatgcgcctggtcgagtcggcgcagggcgggctatccggcctgctgcgcatggtcaccctacaggcggtggactacgacctgcacgatgagcaactgcgtcaggctatcgaagcccaggctgctcttttgcccgcatgctatcagcaagcaccggtctatgagctgctggacaacctgatcaaggcggtcctgcatatccgcaggacctatgctctgaagggtacccaagatccgatcgccaagctgcaggaagaatgccctcagtgggaagagctctttcccatcgcactcgacagtcaggcagcagccagcctcatcaagggcctggtccgggtcacagtcagcatcacgccccagtccaggcgcccccctttccagattcagcgtggcctgcgcttcagctccgacggctccatgcccgtctacgagctgtcctttgccatgcaggcacaagccaagcgagatcaagttgccgagtcactggggttggctgctgatcgactgccgccgcacttccaactgctgctgcgcatcggcgagcgagagcacctggtcggcgaagcattgctcagggatgacgagtatcagcttatcgccagaccgctgccctccattcaaactgtgcacgaagctgcgcagctgatagtcagtcgctggggcgccactttgcacatcgccaacctgcccggcggcgaagcgttaagccacgacgaaccgttgatcttcgaaaatacttatccctttgctcgtctgattgcgcaaggcgatgctctggtgaaggggctgtccgcactggcggtcatgccggcaagaaccatcgtattggctgaggaaggcgagacccgtgaacttcacgactgccttgctgatgggcagatgctgatggagcttccggccggcaaaacgaggctcgcctatcgcggacaagcgttcattgtcaccatcagcgccagtgctacgcaccgcccggaagcctattggcaaggtaatagcctagaggcgctctctgtgccgggcctgctgttccgcggtacgccacaccttcgagtcgatcaggggctggggcattccagttacgcgccgtcccatgaactttttgttcgcagtcattccaaggagctcccactcggtgaggcacaggcaccaggactatgccgactgatctggcgcaaggatggccagcgcctactgagcacccgcgccgtactccttccggagggagcttccattacctatgttccagcggcaagcaccctcgaaggaaccatccggctcgacaactggcccgacgtaccagtccgttgtgagaacgaagagatcgagctggacagccgtcatgatgggacaaacctggtcctcaggctgaaaagcacgagcgctcggcctgcaacttcagttccgctctgcatgcagtggcccgacggcgaacataggctcacgctgcctttccccggttatggcgtcacgctgcagcgcaacaatctgatgtggttgattcgcgtcgctgtcagactctga

SEQ ID NO: 325723 - DNA, 621 bp, Pseudomonas aeruginosa
atggatagaaacctgccagatggtccgcccaaggcgctgggccagtacttcagcgataacctttgcgccgtgctggccgttgccggcaagccgcgcgataacggcactgcagggccaatcacggcaacccgcatacagcgcgaaacaggtgttgcccgcagcaccctccgggcattgaagtcacagcgtggcgaagttgcagctaatccagacctcgacacgcttgatcgaatcgccgatgtccttggtgttcctccggctttcctacttatgcgcccccaggactgggttgccttggccaacgccatgggcagcatcaacgattacctggctgctgctgtgaaactgcataacgacggccagttggacttcggcagcccggtcgaaaaggtgttgcgcgaatgtaaggttcaccccgatgcccgcccgatgggggttggctcctctccagagatcaagcgcgcaaccgcgagggatgaatggcgccgcctcgcctgcctcaagctcaatgccttgatgctccgcccagtccatgccgcccagcctcgcgttgcgctggccgcagtagctggtgcgctagtgagccggggcactccacacgacccgaacatcggcgactag

SEQ ID NO: 325724 - DNA, 828 bp, Pseudomonas aeruginosa
atgtcaatcattcatgacgccgacctggctggcgtgctgatgagcgctagcgctgacgatattaggctgctgatcgacgtcatcaccgacagcggtaaggggcggatctcgttgtcctcagcgatttgccgccaactgaccgcggcgaaggagggtgaagtcggcgactacgagcgcgcattggtcgccgaagagctcacgcggtttggcggcaactcgctgatgaacctgttccggggcggcagcggcgtgtcttatgtagaactgctgagcgatgttgcttctcacgtgggtgtctcgaaggccgggacgggcgattgcgcgcagatggaaatggccatcatcgccaaggtggtcgagcagtcgattggtcgcatgagcgaggaagacaaagaaaccttctttgagtcgatgggggccagctaccggccgggaatgggcgcggctgccctggcagcgctgatcaccagcctgagtgccagctcgactgcctaccggcttgccgcggtagtggccagcgcaacgatgagcagcctggtcggccggggcgtcgcgtttgccgggggcgctgccatgggcaggggattggcggtgctctcagggcccgtcggctgggcaattaccggcatctggacggccttcgagttggccagcccggcctaccgggtgacggtgccatgcgtcatccagattggccacatgcgccagaaaatgctgctcaaggaggggtgccctgaatgccacgcgtcgactcccgctggcagtaagttttgtagcagttgcggcgcacggcttgcgagtcgcttacctcattccattcacgattag

SEQ ID NO: 325725 - DNA, 954 bp, Pseudomonas aeruginosa
atggctgagctaaatgtgatcttcgatgtgccggaggcgattgccgaggggctgaaaaacggtgtttatgaacgtatcggtggcgtcatccgcagggtggctgacaagcagatcgtgatgtggctgcaggaaggtgtgctgctggaacgcgatactgccgaacagttgctcaaacagggggccgagcatgtccagttgctgcgtcagcaggctgagcaactgcaaatgctcggtgtgcaacagcagttgatcatggggctggaggtggccaatctggcggtcagtgtcgcgggctttgcgctaacgctgtacaagctgcagggtatcgagaaccagcttagacacatggatggcaagctcgacgacatccggcagggtgtcgagtggctagatgtcaggcagatgatcagccggctggctcctttacatgcagccctgcagcatgtacgcgaggccgggctgtatcgtaatgccgcgatgatgcagcagcagctcggtattgctaacagccagctcgcagagagccaaagttactttggtgggctattgcagcatgtgagtgagcgttcgtttgagtatctgcagcccggcgagtttgcggccgcttaccggggttgggtgatgtctgcgcaggggcggttgcaggtgctggctcgtttgggggaaatggatctggctgcgcatctcgccaatgagttcaaggaacgtcatgccgggttcggtcagcggctgcagcaaagcctgaaaaatccggcgctgcgcctaatggcgggtcagcaaggcgaaaccaatcatgctcgcttgcttagcattgctgagcaggccgtcggtgcacacgagatcatccgcggtaacgttatgcagctggagttcatgcgcgatgagcaattggatctgccaattctgaatagtccggccgggtatcaaggattggcgttctgccgagtgggctga

SEQ ID NO: 325726 - DNA, 441 bp, Pseudomonas aeruginosa
gtggttctgcagcaggtcgtgcagctcggtgccggagaaggcattgggcaggcgtttctccacgaccttttccccggcttccggttgcagttccgggaggaactggccgcgcggaccctgcggatcgaacaggccaccctggatacccaggtggcgcacatgcacgatgggcgtaccgttggcgcgggccgcctgcaccagcacgccgatttccgcggcggcagcgtccaggcctggcaggctcagggcgccgctgcggtactcttcctgggcatcgatgatcagcaaggtgctctgccgaaggggggctggcgggtagccgcgtccgctgatctgcaaaagggtgagcggatgaggcatgtcactactcctgagaaggcacatgcctttcattctggcccctatcggcgagcctgtgaacctttgccgcatgcgcactaa

SEQ ID NO: 325727 - DNA, 300 bp, Pseudomonas aeruginosa
atggctaaggccgatgatacgtcgaatcccgcaataaccgcacagtccccttccaccttcatccccctgcgacgcacctcgcaatgcaaccagcatcccggctgcgccaccctctacctggactgcagcgcagccagcgaagacctgttcgacaccgcccgccgccctctggagtcggcgatcggaacgctgagcgtcctcgacctgctcgacgaaaccgaagaccggcgaaagcaccgccgcatcaccggctccttgctgtcgctgttcgaggcggaatacgcacgcagacaccgataa

SEQ ID NO: 325728 - DNA, 1089 bp, Pseudomonas aeruginosa
atggaacagccattcgatctggctgcagagttagccaagcaaccccatctactggaaatagccggcaacctgttgatgaagggcggccccgaagactatatcggtgccgtgctttgcctacgcggtactctctacttcaaagaggcccataccccactggtacgtgagtcattatgccaatgcttcgatgagttcaagcgcctagcagagcctcacctcacctggctctggcgtgaagaacctgcacaaggaaagccactgaccgcataccgtgacacccaaccactgcgcgagatgatgggggcaatggatgaagacgatcatctcagcttctgctacaccagcggcaagaaatcccgcgatgcaggcgcctggctgtttgatatttacggcaagcggagctggcaagccaaaatggggcatgatcttagtgttctggagttctccgtacctctgctatatcaagagcggcagccattggatttcctacagctgtttattgacttcgcacggcgactagagccggagcaggggtatgcggggcatgcctacaatctctcgccgaccagttgggacaatgacgagccctccgaagcctttatggcggcgcgtatgccgggtttggatgtagggacggcttgtctgctggccaatactcccgagttcaaacctacaagaatcaaaactgtcagttggctaaccctcctgaacaacgagcgcctggcgctggccggcgggctcgatgccctgcgtgcgcaactgccctccagccactttgccttctaccgctacggcgatggcgtggtaatccaggccggtgcctatccctatatcgcgggtgatgcggaagactccagacccgctccgtatgtgctgctgaaccacgcgctcaaaggcattcgctatgaaaccgtcggctcgctacacggcggctcccacgacggcgaattgcggctggtgggctgggcggccgatcaatggctgaaacggctggatgtggaagacagcgaactcccccgctggcgcgacaaattgctcaacactgagccatgcttggacgcgacgaactcactgccggagcgcccgtag

SEQ ID NO: 325729 - DNA, 702 bp, Pseudomonas aeruginosa
atgagcgaccagcccagcctgtcccggggaggcatgagccccgaaggcaggaccaaccccgtcggcaccctggaatccaggctcgatccgcaggacaagaaggtgctgtgctcggcggtctgccattgcagcagcacgcccaacctcagccaggatggcaaaagcctcaagcaggcgtgcgtggcacagcggctgggagagttggacgaagttctccagggacgcagcccctacaagcccgaggtcagctacgacatgaccaagaacccaccgcagccgattctcgatagccagaccggtaacagtccacatggctggataccgggatggatcagcaagtattgggatgaagatccggagcatccgccgttcaagccagggaaaggaatgattcgcaggcccgacgtgatcatcgttcagaatcccaacaggccgccaacccaggacaatatcaaacaggtggtggagatgaagtttccgcctgacccacataatagggaacaacttgaggattatgcagcgattgccggcaacaagaacaagattgttgaaatgaaaccctccgactgcgactgtggccaggaaaatcaacgatccaaggtgccagtagagcaagcagggtgggccgtcgccatcgcaggtggagtgatgttcgtcttgacccgaggccgttcccctcgcccgatgattcccgcctattga

SEQ ID NO: 325730 - DNA, 519 bp, Pseudomonas aeruginosa
atgagtggaaaacccgccgcccgcgtcaccgatccaacgacctgcccagtgccagggcatggcagcaaccccatcgtccagggctctcccgacgtcgttttcgacggcctgccggcagcacggcaaggcgacacctcagcctgcggaagcccgatgatctcagccgtttcgtcgacggtactcatcaacggcctaccggcggtgacgctgggtagtatcggggcgcacggcaacgtggtgatcggcggctcggggacggtactcatcggcgacgtcttcacgcccgccccgcgcgctcccgcccttccccttaaccgcaacagcgtgccctgttccgggcgcttccagctcatcgaccacgaaacgggcaagcccgtcgccggacgccgggtcagggtctggtcgagtggcggctggaatgcgttcgacaccacggatgccgacggcatgacctcctggatcgagcgccccaccgcggagaccctctacatcgacctggtgcagaggggcgacgcatga

SEQ ID NO: 325731 - DNA, 336 bp, Pseudomonas aeruginosa
atgtcactacagtctgaaatgctcgtggagcagaaagtttccaacgcccagaaatccaccggcaccgcctatcttctgtggttcttcctgggcggtttcggcgcacaccgcttctacctggggaaaaccggcacggcggttacccaactgatcatcacgctgatcggttgtttcaccctgttccccctgatcattaccggcatctggtggatcgtcgatgccttcctgattcccggcatcatccagggccatacggagcagacccgccgcgacgcccggctggaagttgcagcgctgcaggtagccggcgcttccgcgtcgcaccctcaagactga

SEQ ID NO: 325732 - DNA, 639 bp, Pseudomonas aeruginosa
atgaaaaaggaaccgaaaggagcaaaaaacaggatagtcatcgccaaagatgagaagaacgttctgacctgcaccagcgaagggttcgaatatacgccagacatcgtcaagaacgtctacggaaagagcagccgacccgcactggaagactggttcctgacggaacttgatttctttcgcaggtattacccgggatacgagattttcaccctcggctccagttgtgtcttcggcgaaaagttcgtgaactacctgaccatctgcgaattcgacatagacagtacctacgccttcgactgtctcaagaaggccctgagggagtccgaccaggccattaggcggaaactctccgccatgtggaaatgggacatagccgccaggaaggactggaacatcgtcttcatggttgggcacatggacttcgcctacttcctccagcacaggaaggagttccagggggatgcccataagcgcttcatgagtacattcaccacggcggagacgaaaatcacctctcgcgactacaaggtcatgcatgacggcgcgatcctgcccttcgacgaaacggccctgtcgccggaagacaggttcattttcgagaactatcaaaagataaagttcgaaaccacgccactatga

SEQ ID NO: 325733 - DNA, 606 bp, Pseudomonas aeruginosa
atgcccagaccccgtattgacaatgcagcttcactggaaaaatataaagataggctgttaaatggatcttataaaattctctctcttctacttgatctaataatcaaaagcttggcgaagcctcgcactgtatacaaaaagcttgctattggctcgctagcaataagcggaggagcgttctcgacacctttctggcagcaggcattagagcaggcggtttctagcattgaaacaagtatatgcgatactcaaacctcctccctgcttgtagggattttgtttcttcttctaacatttttatttgcaatgctctcccaacgatactcgaaaaaccaaaaagagagcttaatcgatagcaaaaccattagcgcgccggcaatggttgggaattccaaaatatactgctactgcggtagtgtaatggcaatttccggaatagaagtggtcgtaacatccgagaataccaatctccatctgggcagtattagcggaacctctgtatcaggaaggatcagaagattgtccgcatcgttcaatagcgatggcacattgcatatagatcatcttcagaatgcgagagacttggaaatcaaatcagctgcataa

SEQ ID NO: 325734 - DNA, 609 bp, Pseudomonas aeruginosa
atgaaaataattgagcccttgagcagtgctctcctagtaactgggtgtgtttatgcatcggggattgcacagaactccgccttcatgagggtgtttggggtaaacccaatattcagccagccagcgatagataagatattttatgacggaggcataataacatttgaaatattttcaacccatttaatagttgctgccatcggcctaatctcccttctttcttttattatatttatctcggtagcgatttctataaaaaagcatacgaacgtttcctctgagttcttagagattgcagaaaagatagaatgcctcgtggtacctttcggaaagattagcgggctgtgtatcctgacctacctaatagtcctcacacttctctcatacaacaaggcaaaagtagatggcgaagaaatcgcactatcttttgtacatacatgccacaaagtcgtaatagagaaaggcaaagaacgagtggacggctgtgcctttaacaaggacagagactcaatatggtattacacactggatggcggagagccaaaagctaacgccaaaccgctttcggaaattgatcgaattatatacctcgaccctgagactcaatag

SEQ ID NO: 325735 - DNA, 1248 bp, Pseudomonas aeruginosa
atggcagatacaggaattaaagttgcttacctcaacaaagatcaaaagatttggtttatcagagcgagctcaggaatttacgcaagaaacttcaggacgggcggcgtaattgcaattaatcacctagaaaaaatcctaggaaatagattgggaagtgaggtccccagcgaaggaaaattaagatcagtcttgctaaaaaacaaggactactatgattttgtagtagacaacaaaaccgaaagggagacaaaaaggcttaacaggagaggattaaatctgcttgctcaaattaaaaggtttgcgtatgacatacaagctggcgacataattgtaaccaagaatgaaactgacggctacaacattggtgtctgcagtgaaagtgaagcctttgttgatcactcgccgattgaactacctagagcaaatgatgaaatccccaagggaccagtacttcgttacaagttcaggaaaagggtaatttgggggccgatgataaatggcaaaaatcttccgcacaccatacgacgagccacacgtggtcagcagacggtaacaaatcttagcaagcataaggttaaaatatttcatctgatttatccgttctttaccgatggtgatcatctctatttctcgaacaagatactcaaagagggagatattaactctcttgtcgtaggcaagctattcgaaaacatatctttagcagagaaactaattaaagaattggtttcggacggggaaattgactcgagaaaactcttgcttctactgcaaaagcagatgttttcggagacggactttgtttcctgccaagctgaattcatgtcgccaggagacatgtggtgtaaaattccactttcccaagcgtacgacttaattactcaagttggagcgggagttattatatgcctcctgttgacagggcaattatcagcagcggagctgaagacaatttcagatgcaaaaaatgcagcgaccgccgttgtcaaaatcaatgaagacagcccatcgagcagcatgttcaaagataaattccaaccagccaaaccatctacggcactcaaagggattgcgagaaagttaaatgataaaagctcagagcttgagaagctagaaagtgatcgagctactcgagaggtcaagagcaatctccagcttgaaatgacggcgaccaggacagaagcacttgaaaagttcaaatacggaatcaatgtaattgaactgagaggcgtcaatgaaaataattga

SEQ ID NO: 325736 - DNA, 603 bp, Pseudomonas aeruginosa
atggcaaagcgcgagatcaacgagcagctcaatagcctgagcttcgacatggacgaggaaatcgacgatcgcaacgaacgtcgaggccgcaaagccgcgccacctcgtcacgcccacactcccatggaccccagccacgccatcattctggccgccatcatcatcgtcggcggcctgtggggcgggaagcttctctacgactacatccaggaacggcgcatcaaggccgccctcaacgacgcagccgcctatatgcagcagaccatgcagcaagccgagcaaaactccagacgcgcgaaggcagagatgcagcagcgaacagcggctgaggaagaggccagagaacagcggcgcgctgagcaactcgcccaagtgcaggcagagcaagcacgggtggcgcaggaaaaacgcttcaaatcatcccagtgccagttctggtggcagcaacacaatcagaatcctacgccgaaatccgcacagaggaagaccgaatcttgtggagaattactagatcataaatatatttggccgagtataaaaagcacctccttgattagagtcaaaattaataccacagcaactagcagtctttaccttaactag

SEQ ID NO: 325737 - DNA, 777 bp, Pseudomonas aeruginosa
atgctgcaattggctgctcgattgggtgaccccctggcgacggccctggatgcgtcttcgtatgcgagcttgcgtcggaaacggctggaggaggggatatccgggaagactctgaacaacgaactgggctacctccgcgcggtgttcaatgaactgaaggatctgggccagatcgactacggcaacccgctggccggggtgaagctgctcaagctgcaagagcgcgagctgtcatggctgactaccgagcagatcggcgagcttctcgactctatccgcagtcgttgcgacaacccgcataccgaactggtgacgctgctctgcctggctactggtgctcgatggtccgaggctgaaaagcttcccgcacaccgactccagggcaacgtcgtgacctatgccggaaccaagtctgggaaggtaaggcacgtgccgattccaccagagctggctaaccgggcgagtgcacactggcgaatgcatggcccgttcacgtcctgcattacatcctttcgccgcgccctggatcgcaccacgattcaacttccgcaagggcaggctagccatgctctccggcactcctttgccagtcacttcatgatgaatggcggcaatatcctcacgctccagaagatattggggcattcgacgctcacgatgacaatgcgctatgcccatttgtacccagatcacttgcaggacgcgatcaaatttggaccgctgcggtgtctaggcagtcggcaaataaatttgtctgaaggcttgatatcagaatga

SEQ ID NO: 325738 - DNA, 291 bp, Pseudomonas aeruginosa
atggcatatgatttttggattacgggtgtgaacaagggtgataagcacattgactacgtgcgagttcagcgaaaaaaggtaactgccaatctgggccctgcccgcattgtggatcgcgggtttgttgctgatctgattaggggtgggaaagcgacgttttgcacctctgtaaaaaactcagagggaaaatggcaggagggtgcgcgcgtgcatgtgatcgaagaggacttcctcaccaccgatcccaatgacaccaagcgggacaatctcggcaacctccaagagttttga

SEQ ID NO: 325739 - DNA, 1188 bp, Pseudomonas aeruginosa
atgggtagagatgggcggggagtcagggcggtctctgattcgagtatcgaaatcacgttcatgtatcgcggcgtcaggtgccgggagcgcatctcgctcaagcccaccgccactaacctgaagcgagcagagcagcacaaggcggctatcgaacatgcgatcgccgccggtaccttcgactactcggtgacatttcctggatctccgcgcgccgccaagtttgcgcctgaggcgtcacgcgagacggttgcgggattccttggccgatggcttgagtcgaagcgcaagcatgtctccagtagtaccttcgagggctacaggaagattgtagagcttcgtctggtgccggccctagggcccgtcatggtggtcgacctgaagcggaaggccgtcaaggattggctggacaccctgaaggtgagcaacaagacgctcagcaatatccagagctgcctacgctcggccctcagcgatgcgatggaagaggagctgatcgacagcaaccccctcgccggctggacgtacgcaaggaagggagaggtcaaggtcgacgacgtggacccattctcgccggaagagcagcgggcgatcctgagcgccctcgatggtcaagggcggaacctggtgcagttcgcattctggacagggatgcggaccagcgaactcgtcggcctcgagtggggcgatattgactggctccgcggcgaggcgcatgtcactcgcgccatgacccaagcagccaagggaaaagcggaggtgacgaagaccacttccggccggcgcagcatcaagctgctcggccctgcgctggaagccctgaaggcgcagaaggcattcacctacctggccaaccaggaagtctttcagaacccgaggacgggagagcgctgggccggtgacggcccgattcgaaagacgctctggatgtatgcgctgaagaaggctggtgtgcgctaccgccggccgtaccagacgcgccacacctacgcttcgatgatgctgtctgctggtgagcatccgatgtgggtggcgcagcagatggggcacagtgactggaccatgattgcacgcatatacggtcgctggatgccatcagctgactacaacgcgggcgaaaaagcagaagtgatgtggcggcccatcgacatgcaggactttaccgaaactcttacaaagaaaaacccataa

SEQ ID NO: 325740 - DNA, 330 bp, Pseudomonas aeruginosa
atggctagaactctgcttcgcgtgatgaggggagagtttgcgttctacctgaccgaagggtcaaagggcggcaagaaaggaggggcgcgctgggccttataccggaccagtggattcgggaaggtcaaagacggctttgtcttcgtcaacagtggtgaccgcgccagactgctggcaatgacaaacgacggtgagcaaatggatgcctgccaggcactgttcgacagtaagaaacgccgggcctacgttcggcgctgcgagattcgcggcccatccggccgctgggaggggcttgcattcaagcctaggcctcaggaatgcgctacctga

SEQ ID NO: 325741 - DNA, 720 bp, Pseudomonas aeruginosa
atgaagggcgcaacgatgcatcggctgatcgacctcggcgtcgacagcagccgtaacctgcgtgtccgtatagcagccctccggatgttcatccgggcagtgcacgccgatcgcgacgccagcttcgcagagcatcgccagaaatggcgacgacttctcaagggcatgccgttcaccgagcaggcgctggagcgcgagcggatggcatatcgggagcgggccagagttgcggcgcaagccatggaggagtgcggtgcttggcttatcggaaactcagccatgatcgagcaggctctgtcattcgacgacctgtgcgatctcctgggggtgaatcatgcccaccgtgccgaggctgccgaggtctgcgcgggcgacgccggaatcgttggcggcctgctctggattggtggggagttcgaggacagcgcggaccacaagagtggccgttccaaccgagggaacacggggccacttaccgcagcggtccataacctgtttcagaagttcttgcttgaaaacccgtcggccatccctgacccattcgccccggatggccctttctacggcgccccgcggcaggagacggcgtcagatggaacggtgcagattcggcgaccggcactcaccgtccacagccaggacggatcgatccgcacggttgagcgaaagccggaggcgtattcggtagtggcgaaagatggtgggggtcgccatggctag

SEQ ID NO: 325742 - DNA, 192 bp, Pseudomonas aeruginosa
atgagaggctccgacattccaccaccaccagggtatcgccctaccccgctcgccaccctcggccagcagttggtccgcctgggccaggcgatgcagaaccccaacaccaagctcggcgagttgaccgaactggtccaggcctgtggcgtcgacctgcggatctgcgacacgaacaaggagagtcgggcatga

SEQ ID NO: 325743 - DNA, 528 bp, Pseudomonas aeruginosa
atgagcatcaccctcaagggccatgccctcaaccagcgccaactcgacgctatcaccccggtgatgaacgacctgattcagggtcgggttgacctggcaagtttcgatgatgcctgcgtcaaagccctggataacgccggctgcccgctgggctatgacaccagcatgcccggtaccggcagcaccatcgaggagcgggccgccagatggctgagtgacggtcaagtgggagcgtcttcgcgggccatccacgatcacatgctcggtctgcccatggaacgccaccacgcggcctatccccatgacccggacgacctgaatcgctgcctgcttctgctgaacttgatccctgaatgggcgccacgcatccgcgagatggcccagcacagccaggagtgggccgcactggcgagcagttggggaaagctcaccaaccttttcctgcaagaagctgggctggactggcaacgcagcagcggagcccccgaaacctacgcggcgatgcgattcctacttggtgatgcatga

SEQ ID NO: 325744 - DNA, 870 bp, Pseudomonas aeruginosa
  misc_feature (68)..(77): n is a, c, g, or t
atgagccccatcaccatcgttctccgctcaggcatgggcataccattccgcaggtatgggcgtaccgnnnnnnnnnncatcaccatcgttctccgctcaggcatgggcatgcagatcgactcggtacgcccatacctgcggaatggtatgcccatagcaatcgggcgcgcaggcgcggttatctcgcactttgctgacggggacgcacacctggcgctccgcaccatcgccgagttcccctgtcccgagcaggacaacatgccggcggcgaacatgcggcagatcgcgctggcggcgctgagcggggctggggtgagtacggagccgggcaaccctggcggcgaacctgtttccggaccaggtaataccggcgagccccctggccccgcgccgaggccgggtgatgactcccttggcgaaagccttcgaaccctggaacgctggcttgatcgagtggcaatcgaggacggctatgtcagcgtgccggtgatcgaggccgtcgaggtggtggtcaccgagatgaagcgccagcaacaaccagtcgatccggccttctgccgctgcaaccactggttcgccggggacagcgtcgaagcggccttcattcgccagcatggccagtgccaggactgcgtcgagatggaccagatgctggagcgggaagtgcaggccgagaacgccaagcgctacctgtggctgcgcaacacggctctctacgcatcggacctggcccgcgaggtcaaccgcatggacaagagcgtcgtcaacctgttcccgcggggcaaggacggcaacctcctggcagaggctgatctggacgaggccatcgatgctgccatggcgaagccgccggaaggcggtgacgcatga

SEQ ID NO: 325745 - DNA, 231 bp, Pseudomonas aeruginosa
atgaaacgagcaaccgttgtaaccgaactgccggccagcaccagccgggatatggacaagttcgttgtccgactgcccgacggcctgagggccgaggtcgaagccgaggccaagcgagacgagcgcagcatgaacagcgtggtcatcatcgccctgcgcgagtacctgcatggccagcgccgaaagcaagcgctcctcgatgcgctgaccaccgccgccggaggccgctga

SEQ ID NO: 325746 - DNA, 768 bp, Pseudomonas aeruginosa
gtgcgtatcgaaaatcgagtgttcctggtcaccggcggtagctccgggctcggcgccgccaccgcgaagatgctggtggagcagggcggcaaggtggtgctggccgacatcaacgccgaggccggcgcggccaaggccgccgagcttggcgcccaggcgcgcttcgtcagggccgacatcgccagcgaggccgacggccgccaggccgtggccactgcactggaggccttcggcggcctccatggcctggccaattgcgcgggcgtggcgccggccgagaaggtcctcggacgcaatggcatccatgccctggagagtttccgccgggtcatcgacatcaacctggtgggcagcttcaacatgctgcgcctggccgccgaggccatgtcccagggccagccggacgagggcggcgagcgcggggtgatcgtcaataccgcctcggtggcggcgttcgacgggcagatcggccaggccgcctattccgcctcgaagagcggggtggtcggcatgaccctgcccatcgcccgcgagctggcgcgcttcggcatccgagtgatgaccatcgccccgggcatcttcgagacaccgatgatggccggcatgccccaggaggtgcgcgactccctcggcgccagcgtgccgttcccgccgcgcctggggcgtccggacgaatacgccgcgctggtccggcagatcatcgagaacagcatgctcaacggcgaagtgattcgcctcgacggcgccatccgcatggccgcccgctaa

SEQ ID NO: 325747 - DNA, 1191 bp, Pseudomonas aeruginosa
atgacccgcgaagatccgatcgtcatcgtcagcgccgtccgcaccccgatgggcggcttcctcggcgacttcaaggacgtcaacgccgctaccctcggcgccgcggcggtgcgcgccgcggtggagcgggcgcgcctgcaagccgacgaagtggacgaggccgtgctcggctgcgtgctcgccgccggccagggccaggcgccggcgcgccaggcggtgcttggcgccgggctggcgcgcggcacgccgtgctcgacgctgaacaagatgtgtggctcgggcatgaaggcgctgatgctcgcccacgacacgttgctcgccggcagcgccggggtcgcgctggccgggggcatggaaagcatgtccaacgcgccctacctgctggagcgcgcccgtagcggctaccgcatgggccacggcaaggtgctcgaccacatgttcctcgacggcctcgaagacgcctacgacaagggccgcctgatgggcaccttcgccgaggactgcgccgaggcctacggcttcacccgcgaagcacaggacgagttcgccgtggcctcgctgacccgcgcgcagcaagccatgcgcgacgggcgcttccaggccgagatcgtgccgctgacggtcaccgccggcaagaccgagcgcctggtggatagcgacgagcagccgccgaaggcccggctggacaagatcccgaccctgaagccggcgttccgcgaaggcggcacggtaaccgcggccaactccagttcgatttccgacggcgccgccgcgctggtcctgatgcgcctttccgaggccgagcgacgcgggctcgcgccgttggcggcgattcgtgggcatgcttcgttcgccgacgcgccgaacctgttccccaccgcgccggtcggtgcggtgaagcgcctgatgcagcgtaccggctggtcgctgggcgaggtcgacctgttcgaggtcaacgaagccttcgccgtggtcggcatggcggcaatgcgcgacctcgacctgtcccacgagcacctcaacgtccacggcggcgcctgtgcgctgggccatccgatcggcgcgtccggcgcgcggatcgtcgtgaccctgctcaacgccctgcagcagtacgacctggaacgcggcgtggcggcggtctgcatcggcggcggcgaggcgaccgcgatcgccgtcgagcgcttgcgctga

SEQ ID NO: 325748 - DNA, 906 bp, Pseudomonas aeruginosa
gtggatcacctcaccgccctcaaggtcttccgcgccgtggccgcgaatggcggcttcgccgccgcggcccggcagatgaatctctcgccggccgccgtgagcaagaacgtcgccgagctggaagcgcacctcaaggtgcgcctgatcaatcgcaccacccgcagcatgagcctgaccgaggccggcgaagtctaccggcagcgcctggagcgcatcctcgacgacctcgaggccgccgacgccgcgctcacttcgatgcagcagggccccagcggcctgctgcgggtcagcgccccgctgaccctcgccctcacctgcctgaccccggccattccggcttttctccagcgttatccggacctgcgcctggaactgctcctgcaggacggccgccaggacctgatcgccgaaggcatcgacctggccctgcgcggtagcgaccgggttgcggactccggcctggtcgctcgcccgctgctgatcctggagcacgtgctctgcgcggcgccggcctacctcggtcagcatggccagccgctgcggccggaggccctgcgcgaacacgagtgcatccgcttcagcctctctggccatgccgaccgctggaccttccgcaagggccgcgagtgcgtagcggtgcctatcgccgggcgttaccgggtgtcctccagcctggcggtgcgcgatgccctgctcgccggcttcggcttgagtctgatcccacggctgtacgtacaggcggaactggccgaaggccgcctggttgaattgctggccggctggaaggccgacgagacggcgatccacgcggtctatccatcgcgccaactggccggcaagacccgggtgtttctcgacttcctgaccgagacaatggcgcagggccatgattccccaacgctgtaa

SEQ ID NO: 325749 - DNA, 1740 bp, Pseudomonas aeruginosa
atgagactgactcaaggattgttccggttcccgctggccgggctgctgtgcctgagtacggccgccttcgcggagagccagcttagcgtgcgcgtcacccccgccaatgccgccctgaaggccaatatcgaggcctatgtgggtagcctcggcgagcgggacgaagcggcgttgcaacgtttccgccgcaatgccgaagcgcaggcggaaaaggcggcccaggcgctcggctacttccaggcgcagatcgacagcgaggtgaaggacggcaagccgccgaagctcacgctcaaggtagtgcccggcgagcccgtgcgcctgcgccaggtgaatatccaggtgctcggcgaggccgccagcctggagagcttccgcttgccgtcgggcaagcaactgaaaccgggcgcgaagctgaaccagggcgtctacgaggacgccaagcggctgatccagaaccaggcctcgcgctacggcttcttccagggccgcttcagcacccagcgcctgagcatcgatccgcgcgccggcatcgccgacatcgacctggtctacgacagcggccagcgctacaccttcggcaaggtgagcttcgacggcgactcgatcatcgaggaagaactgttgcgccgcatggtgccgttcaaggccggccaaccctatgactccgaactgatcgccgaactcaaccagaacctgcaatccagcggctacttcgagggcgtgcgggtcgacgccgcgccgacccaggcgcaggccgacggcgcgcgccaggcgatcccggtagcggtccggctggaggcgcgcaagccccggaccatgggcgtcggcctcggcttctcgaccgacgtcggggcgcgcgcgaggttcaactggacccgccattgggtgaatgccgaagggcatagcctgggattcgagtcggaaatctccgcaccacggcagaacgtcggcgcctggtacgagattcccctcgatccgccgctcaccgacaagctgcgcttcaccagcggctaccagttcgaagacctggtcgacaccgagagcaagctgctgacccttggcggcgaatggcacagcaagcagcccggtggctggcagcgggtggtttcgctgaactggatgcgcgaggagtacaagctgggcgacgactccgggctgagcagcttcctgatgccggggatcggctactcgctgctggagaccgacaacaaggtcgaccccagccatggctaccgcctgcagttcaacgtcaagggggcgaaggaaggcctgctggccgacgccgacgtcctccatgtcgacgccatggccaagggcctgaccagcttcgccggcggccatcgcctgctcggccgcctgcaggtaggcggaatcgccaccaacgactacaagtcgatcccgccctcgctgcgcttcttcgccggcggcgaccagcgcgtgcgtggctacgactaccggacgctgtcgccggagaattccgatggcgacaagatcggcggccgctacatgatcgccggcagcgtcgagtatcaatatccgctggccgagcgctggcgcctggcgaccttcgtcgaccagggcaacgccttcaactcgctggacttcccgtcgatcaagaccggggtcggcttcggcgtgcgctgggtctcgccggtcggcccgttgcgcctcgacctggcccatgcgctcgacgacgatggcggtttccgcctgcacttctccatggggccagaactgtga

SEQ ID NO: 325750 - DNA, 939 bp, Pseudomonas aeruginosa
atgagcgtttctctcctggtaaaagtcactctggtgggcctgttcgtcgccagcgtcctgttcgtccatttccgtgggcgcgcgcgcttgcccttcctgcgtcaactggtcaaccactccgcctggttcgccccctacaactcgctgatgtacctgttctccagcgtcccctcgaagccctatctggatcgcagccgttttccagagctggacgaactgaagaacaattggcaaaccatccgcgaagaagccctcaacctgttcgacgagggttatatccgggctgccctgaacaacaacgaagccggcttcggctcgttcttcaagaaaggctggaagcgcttctacctgacctggtacgacggcccgctgccctccgcccagcagctctgcccgaagaccgtagagctggtgagccgcatccccaacgtcaagggcgcgatgttcaccctgcttcccggcggcagccacctgaatccgcaccgcgaccccttcggcggctcactgcgctatcacctcggcctgtccacgccgaattcggacaactgccgcatctacgtcgacggccagccctacgcgtggcgtgatggcgaagacgtgatgttcgacgaaaccttcgtccactgggtgaagaacgagaccgagcagacccgggtgattctcttctgcgatatcgagcggccgctccgttcccgcctgctgacccggctcaatcgctggatcagcggcattctcgggcgtgcgaccgcaccgcagaacgtcgaaggcgaacgcgtcggcagcatcaaccaggcctactcggtcgccattcgcggcggcaatgccatcggcgcccaggtgaagcgcttcaaacgcgcctacccgaaggcctaccgagtcctccgcccggtgctggcggtgatcctgctggtcatcctctatcgttggatcttcggctga

SEQ ID NO: 325751 - DNA, 1053 bp, Pseudomonas aeruginosa
atgtaccaggcgtacagcaagatattctcccgcctcggcctggatttccgtcccgtgcaagccgacaacggctccatcggcggcagcggctcccatgagttccacgtgctggccaactccggcgaggacgatatcgtcttcagcgacagctccgactacgccgcgaacatcgagaaggccgaagccgtgccgcgcgagagcgcccgcggcagcgccaccgaggacatgcgcctggtcgaactcaacgaaatcaaggccgccaaccagccgctggtcgccagcccgctggtattcgcgtcggaggccgagatccgtgccgccatcggcgccggccccggctcgctgggcccggtcaacctgccgatcgcctgcatcgtcgaccgctccgtcgccctgatgagcgatttcgccgctggcgccaacatcgaggacaagcactacttcggcgtgaactgggagcgcgacctgccgctgcccgaggtcgccgacctgcgcaatgtcgtcgaaggcgaccccagcccggacggcaagggcaccctggtgatcaagcgcggcatcgaggtcggtcatatcttccagcttggtaccaagtacagcgaagcgatgaagctgaacgtcctgagcgaacagggcaagccggtcaacctgatcatgggctgctacggcatcggcgtatcccgcgtggtcgccgccgccatcgaacagaaccatgacgagcgtggcattctctggccaagcgcactggcgccgttccagatcgccctggtaccgctgaagtacgaaaccgagagcgtcaagcaggcgaccgacaagctctatgccgagctgaccgcagccggtttcgaagtgctgctggacgatcgcgacaagaagaccagccccggggtgaaattcgccgacatggagctgatcggcattccccaccgcatcgtgatcagcgaccgcggcctcaacgaaggcgtcctggaatacaagggccgccgtgacagcgagtcgcagaacctgccgatcggcgaactgatgtcgttcatcaccgaaaaactcagccgctga

SEQ ID NO: 325752 - DNA, 1164 bp, Pseudomonas aeruginosa
atgctgaccaccctggcggtgtccaactaccgcaccctgcgcgacctggtgatgccgctgcggcgcctgaacctgatcaccggcgccaacggcgccggcaagtccaacgtctaccgggccttgcgcctgctggcggacagcgcgcgcggcgaagtgatcccgtcgctggcgcgcgagggcggcctgccatcgaccctgtgggcgggaccggaggacatcagccgggccatgcgcagtggcgcccagccgatcgaaggcagcgtgcgccggcagtcggtgaatctgcgcctgggcttcgccggggaggatttcggttattgcatcgacctcggcctgccggagccaagccagagcaagttcggtctcgacccggtgatcaagcgcgaatgcatctgggccggcccgttcctgcgcccggccaatgtcctggtcgaccgtcgcgggccgttgttgcgcgcacgcggcggcggcggtcgctgggaagtggcggcgcagcacctcgccaccttcgacagcatgctgggcgcggcggtggacccgcgacaggtgccggaactgctcggcctgcgcgagcggatccgctcctggcgcttctacgaccatttccgcagcgacgccgaggcaccggcgcggcgcccgcagatcggcacccatacgccggtgctgggcgccgacggcgccgacctggccgcggccctgcagaccatccgcgagatcggcgatgcggcggcgctggacgaggcggtggacgatgcctttcccggcagccgcctgcacatcgacaacccgggagggcgcttcgaagtgctgatcgagcagcccggcctgctgcggccgctgcgcaccgcggagctgtcggacggcaccctgcgctacctgctgtggatcgccgccctgttgtcgccgcggccgccggcgctgctggtgctcaacgaaccggaaaccagcctgcatcccgacctgctgccggccctcgggcgcctggtcggccaggccgcgcagcactcccaggtgctggtggtgtcgcacgccgcgcggcttgtcgcgacgctcgaagaacacccggaatgccattcgctggggctggagaaggacttcggcgagacccgcatccaggggctgcgcgagctggaccggccggcctggtactggccggtgcgctga

SEQ ID NO: 325753 - DNA, 1119 bp, Pseudomonas aeruginosa
  misc_feature (1004)..(1013): n is a, c, g, or t
atgctgatcggcttcgccttgccgatcctcgccgcggtgggcatcgtggtacttcacgaagcgcacacctcgcggctgcaggcacgcgagctggcacgctacgccgcgaccctggactacgaggtgcgccagggtcccagcgaggccatcctgttcccggcggacggccccttcgaccgccgcctcggctaccagttgctgccttcgttcatgcagcgcctgtacgaccgcgactacgccatcacccgccaggcgcacttctccccggcgctgatgcgctacgccgaacaccggctgttcccgccctacgcggaaaaggcccaggccgggctggacatcgccgattgccgcggcgtgccgatctacgacttccgctatccgcaacggcgctacgcgaacttcgccagcctgccgccgctggcggtgcagagcctgctgttcatcgagaaccgcgacctgctcgatcacgaacgcccctacctcaacccggcggtggactggggtcgcttcacccaggcggcgctgtcgcaggtcggcaagatgctcggcttcagcgcgcactcctccggcggcagcaccctggcgacccagatcgagaaataccgccactctgccgaagggcgcaccggcagcatcggcgacaagctgcggcagatgctctcggccagcgtacgcagctatcgcgaaggcccggccaacttcgccgcgcgccaggacatcgtgctcacctacctcaactcggtgccgctatcggcggcgccgggctacggcgaggtcaccggcctggccgatggcctgtgggtctggtacggcgccgactaccggcaggtcggcgaggccctcgacggcaaggccggactcgccgcccagggcctggccctgcgccaggtgctggcgctgatgatcgcccaccgccggccttccttctatctggcgccgcgcggccgcgacgagctggaccggatgaccgacagccacctgcgggtcctgacccaggccggcgnnnnnnnnnngtcatcgaggcgccgttacgcgatgcggcgctggcgcagaagctggcgttccgcgacccacgcagccagccgacggtgcaaccgctgccgaccaacaagggcgtga

SEQ ID NO: 325754 - DNA, 666 bp, Pseudomonas aeruginosa
atggagcgcagccgacggctcgagcgcagctggcgcggcaatgccgaggcctgggcccgcgccgtgcgcgagggacgcctggaaagccgccgcctggccaccgacgacgcgattctccaggcgctgcgccagcgcgcgccgcggcgcctgctggatatcggctgcggcgagggctggctgtgccgggcgctggccggcgaggtcggcgaatgcgtcggcatcgacgcctcgccggaactgatcgaactcgcccgcgcggcgggcggcggtagcttccggcgcctggcctaccgcgagctggatgcggcctcggggctcggtcgtttcgacgccctggtgtgcaatttctccctgctcgacgaagaccttgccggttgcctggcggcctggccggctctgctggaaagcggcggcgagttgctgatccagaccctgcatccctgggccgccggcgacgaggactaccgcgacggctggcgcgaggagcgcttcgacggtttcggcgaaggcttccgcgacagcatgccctggtatttccgcaccctggagtcctggctggcgctgctcgacggcagcggctggcgcctgcggggcctgagcgaaaccgtccatccccggctcggcaggccgctgtccctgttgctgcgggcgggactcgccgaatga

SEQ ID NO: 325755 - DNA, 234 bp, Pseudomonas aeruginosa
atgcgtagtttccttcgcggcgcccgggaaagcgttcgccggctggtggccttcgctcaagcagaaggctggagcgtcgaccgctccgcaggcggccacttgaagctcagcaagatcggctgcgcctcgatcttcatttcttccacgccaagcgacgcacgcggcgagctcaatgcccgcgccctgctccgtcgagccgacaggcagcgttccctgaaccaggagtctttctga

SEQ ID NO: 325756 - DNA, 174 bp, Pseudomonas aeruginosa
atgctgcgttccgcgcatgacgacctggcctgcagccggcagagcgatcgtcgcagccttcaggcgctggtgaaacgtctcctggatgccgccgccaccgatagccttccccgctcccttgcagagatggagacctggctgcagctcaacagcgaggagaccacgaatgcgtag

SEQ ID NO: 325757 - DNA, 258 bp, Pseudomonas aeruginosa
atgaaggcgtcccagacctatcagtgcatcgtcaagttcgatggcgccggtttctggaccaataccattcagaagcagcgtgcgacctgcacctggagcgacaaggtggcagcctcccgccttgccgaacgactgtttggcgaggacaacgcatacatcacccgtatgccggtacaggcaggcgaccacgaaaagcgcatcgagagccgctgggcgctgtcctgtagaaatcccaaggaggtagcgcgcgatgcctga

SEQ ID NO: 325758 - DNA, 528 bp, Pseudomonas aeruginosa
atgaacactgaagcccgctttccgagtatccacgcctcggccgcgttcaccgactcggcagtggttcatgccaatcacgttggggtcaaccccatcgagctggacgccctcagccaagtgatctcgcgcctttcgcgggacgagagcacggtcgcacccagttcgatggagcgagagcttcgtgagctggaggaactggggtacatcgaaatctcgaccacccaggccgggactctggtggtcactacgcgcgctccggggcaattgctttcggcttacttctggtcggtatggatcccgcgacacctgttcagctgctcgctgaaagtgagcctggtgccgcacctctgctgcggcactcaggactcccagcacctcaccgccgtgttccgcattgcaggcagcaaggacgccgcgcgcgagttcctgcatcagttggccaacaactatcccgggcatgagccggagttgcccgaactggtggccgttcaggtcggtgatgcactcagcaaggaggccgagtcatga

SEQ ID NO: 325759 - DNA, 186 bp, Pseudomonas aeruginosa
atgaacacttcccagcccctggtcacccaccagtgcatgaattgtgaccagcaccacccacaccatttggtgcgccaggttctccccgccgagaacaccccagaaggagaagccgaggtgttggtctgcccctgctgcggaagctacgacgtccatcagttggaggctgtctttgatgaacactga

SEQ ID NO: 325760 - DNA, 702 bp, Pseudomonas aeruginosa
atggacaagcaaaaagtcctcgccaaggtcgagaagctgatggccctggcgaatgccaagggggccacgccgaacgaggcggaaaccgcattgcgccaggccgcgatcctgaagcggcagttcgacctcagcgatgcggagatctcggcccacacggtggaaaccgcgtgcgttcccactcgaaccaggcgctctcctgccccatggctgcatgaactggccgggatctgcgccagttccttcggctgcgactacctggcggcatacgcgatgccagcgggctggacgttcaagttcatgggccgagggatcggccctgagctggccgctcacgcctactctacgctccaccaccaactggtggcagcgcgctcggctcatgtcgcccaacagaagcgctgcaagctgtcgaccaagcgtcgtcgcagcaagctcttcgtcgaaggctggcttctcgcagtgcgttcgctggtacgtgaatttgctggcaggccggacgagtcgactcaagcagccatcaaggcctacctcgaactacaccatccggcgttgaagtacctggagccggcggcgcttacgaaggcccttgcctatgaccaggcctcgctgcaagcaggctgggagcacggcaaaaacactcgcctgcaccgcggtgtcagccggcgagttcagggcgcgctcgagcagggaggttcccaatga

SEQ ID NO: 325761 - DNA, 687 bp, Pseudomonas aeruginosa
atgagtgaccccaagctcaagccctgcccgctctgcggcagcacgaacattcgaatgctggaacccgagctgctcgacaccgatgcctggaactgtgccattgaatgcctggactgccaggttcacatcgggccgtcctactgcgagccagacccggtaacagcgaggtattcagcacagatcgactggaatagacgcccaagcgcaaaaaaccacgcggacgagcgtgagcagttcttgatggccaacctgctcgccgccctggaggtcgcactgggcgacgtagcagccctggctattgtcgatcgggtaagacaggccacagaccgaatttacccaacttcgaacctctcccctgttccgcaggcctggctcgatgtacaggccgagcgccggcgccagatcaccgtcgaaggtttcgataccagcaacgacgacgctagcgctggcctgatcgccctggcggccggctgctacgcgctccatgccggcggcatcggcaccgactggccgggcggcattcggaatggctctgcactgttctggccctgggacgaagagtggtggaagcctaagtcggcgcgcgagaacctggtacgcgccggcgccctagtgctggccgagatcgagcgcctggaccgctccgccaccgagcagggctcaacctgctgcaaggggggcgcgtaa

SEQ ID NO: 325762 - DNA, 333 bp, Pseudomonas aeruginosa
  misc_feature (314)..(323): n is a, c, g, or t
atggcgaagactcctatcacccaagcccgcgacgtcgacgcggaacttgtgctggaactgaacaagttcggcagcgccgccgaccttcggagccagcaggccaaattgaccggcgctacgcgagaaatacgcaagctgactggtggcggtatcgacctgttcgggaagctgggttgctacttgagcttcgaacaaaagcagctcctacaagacgcagcgcgcttgctcgactcggtgaacaagcagatcgagcatgcgaaggaaaagcgtgatcgctacgagaaaaaagccaagaagcggcgcgagctacgtgnnnnnnnnnnagctacgtga

SEQ ID NO: 325763 - DNA, 594 bp, Pseudomonas aeruginosa
atgcaatccctcgtgcccttcctgctgttcgccgtcgtcgcctcgatcacccccggaccgaccaacatcctggtcctgagcaacagccagcgccacggcctggccgccgcctggccgatcgtgctcggcgcctgcgcggcggtggcggcgctgatcctgctgctcgggctcggcctgggcgagctgctgcggcgccacccgttgctccagcaggggctcgcctggcttggcgtcggctggctcagctacctggcctggagcctgttccgcagcgcgggcggcatcgacggcgcggagccgccgcggcgcctcggcgtgctcggcggcgcggcgttgcaactggtcaatcccaaggcctggatgatggccctcgccgcgctggcactgttcgccggggaaggcgccggacaggccgggcggatcggcctgctggcattgctgttcttcctggtttcgctgccgtgcctggccagttgggccttgctcggcgtcggcagcgcgcggctgctgcgctcgccgtcgctgatgaagcgcttcaaccagggcatggcgctgttgctgctggcatcggcctgggccgccctgctgctctga

SEQ ID NO: 325764 - DNA, 837 bp, Pseudomonas aeruginosa
atgggcagccgagactggatcgacctggcccgcgacgccgagaccgggatcgagaccctgcgcgcccatttcgagggccacgcctacgatccgcactggcacgacagctacctgatcggctacaccgagatcggcgtgcagcaattcaactgccgccgacgccgacacgacagcaccgccggccaggtattcctggtcgaaccgggggagatccacgacggtcgcgcgccgatcgccggcggcttcacctactcgatgctgtacctgcagccggactggctgcggcgcgaactgcgggcgaccttcgacgatgcgcccagcgaccgcgaccccggcttccacgccaacctcaccgaagacccgcgcctgaccctggccatcgcccaggccttccgcgtcctgcatggccgcgagctgcgactgctgcggcagaccgccctggagctggtgctggagcggctgcgcgtgcacctcggctggcgcgaggcgaagccattcgatccacgcctgccgctggtggcgcagaaagcccgcgactacctgcatgcgcacttctaccaggacatcggcctggacgagctggccagcgcctgcggcaccgaccgcttccgcctgaaccgtgcattcaaggccgcctacggcttgccaccctacgcctacctggtccagttgcggctggccaaggcgcggcagatgctcgctgtcggcgggcaaccggcggacctcgccagcgccctcggcttcgccgaccagagccatctcggccgctggttccggcgcgcctacgggatgactccggcggcctaccgcaggcagtgcacccagcttccagactga

SEQ ID NO: 325765 - DNA, 1638 bp, Pseudomonas aeruginosa
atgctgcaatggttcgctaacctatcgttccgcaggaaaatcgccctgccgatcctcctgctcgcggtgcttctgctgctggtgggcgcgctcggcgtgcatggcatcgcccagcagaacgaatccaaccagcgcctgggcaagcgttttctccccggcatcgccctgctgctcaacgccgaccgcgatctctaccaggccttcgtcgccgagcgcagcctgctcgatagcctcctgaacgccgagcagatcgccggcctgaggaacgatcacgcggaaaacctgcagcaggccctggatcgggtgcgccagtacgcggcgatgcagccgggcgaggcggaactggccaaggtcgccgagttcgagctgcagagggcacagccgcgatcgcactcggcgcgggtgctgagcctggcggccagcgatccgagcgccgcggcgcagctcagctacggtgacagcgatcgccagttcggggcgatgcgcgaggtgatcaaccagctcgatgagatggaagaggcggccgcggccgccgacggcgaggcgtcctccgcgctgggcgagcgccaccgctggcagcaggtggcgctggtggcgttcggcctgctggtgtgcctgtcgctggtactggtgttccccggcctggtgacccgtccgttgcagcgcctgctgcaacgcctggaagagatcgccaacggcgatggcgacctgcgcgtgcgcctggaggtcacttcgcgcgacgaacccggccgcctcggcagcgccttcaacgccttcctcgacaagttgcagccgctgatccgcgaggtcggccgggtcaccggcgaggtcgccgattccgccggttcgctggccggcatgaccgccgccaacgatcgtctgatcaacagcgagcacgcgtcggtggaccaggtcagcaccgccgcgacgcagatgagcagcgccgtccacgaggtggcgcgcaacgcccagagcgccgcgcaggtggcccatgacgcccgccggcaggcgcgcgagggcgccaacgtggtggaggcgaccatcgaggtgatccgccagttggcgcgagaagtggagagcagttccgagagcatccagcaactggcccaggaaaccgccagcatcgacgcggtgctgacggtgatcaagggcatcgccgaacagaccaacctgctcgccctcaacgccgccatcgaagccgcgcgggccggcgagcagggtcgcggtttcgccgtggtggccgacgaggtgcgggcgctggcggcgcgcacccaggagtcgaccaaggacatccaggcgcgcatcgagcgtctccaggccggggtgcagaacgccgtgcgggccatgcagtcgggcagcctcaaggcgcgcgacagcgtcgagcgcgccgccggggtcgacggcgtgctggccgccaccggcgacgcggtggggcggatcaacgacctcgccgcgcagatcgcctcggcctgcgaggagcagagccgggtgatcgacgaaatcgcccgcaacatcagcgaggtgcgcgagctttccgcccaggcggcggagcattcggagcagggcaccggggccagccgccggctgtccgagctgtcctcggaactggcgcggctggtcgggcgtttccgcgtctga

SEQ ID NO: 325766 - DNA, 492 bp, Pseudomonas aeruginosa
atgagcagtcgccgagagctgttccgccgcctcggcgggcacccgccgacgcggcgcccgccgtggaccgccgccgacttcgccgaaggctgcacaggctgcgccgcctgcgtcgaggcctgcccggaaggcgtgctgaagctcggcgccggtcggctcgtcgaactcgacctctccagcgccggctgcacgctgtgcggggaatgcgccagccgctgcgaggccggcctgttcgatggcgcgcgcccggccttcccctggatcgccacgatcggcgaagcctgcctggccctggccgggatccactgccgcagttgccaggacgcctgcgaacccgccgcgatccgtttccgcccggctcccggcggcgtcgccctggccgagctggacagccagcgctgcaacggctgcggcgcctgcctggcgccctgtccgagccaggccatccaactgcgtgcgctatccaacgaggagtctccacgacatgcctga

SEQ ID NO: 325767 - DNA, 183 bp, Pseudomonas aeruginosa
atgccgaccgactccggtcccttggccttgagcgcggccttgaacttctcggccatgatgtcgaaggcctgttcccaactgatcggctggaactcgccctgcttgtcgaacttgccgtccttcatgcgcagcagcgggcgggtcaggcggtcgctgccgtacatgatcttcgacaggaagtag

SEQ ID NO: 325768 - DNA, 1458 bp, Pseudomonas aeruginosa
gtgcccgccgagcggctgaaggccctcgccgaactctacgccgaccccaagcgcaaggtggtgtcgttctggaccatgggcttcaaccagcacacccgcggggtctgggcgaacaacctgatctacaacatccacctgctcaccgggaagatcagcgaaccgggcaacagccccttctcgctcaccggccagccctcggcctgcggcaccgcgcgcgaggtcggcaccttctcccaccggctccccgccgacctggtggtgaccaacccgaagcaccgggaaaccgcggagaagatctggaaggtgccggccgggaccatccaggagaaggtcggcttccacgccgtgcagcagagccggatgctcaacgacggcgtgctcaacgtctactggacccaggtcagcaacaacatgcaggccggtcccaacgtgatgcaggaagtgctgcccggctggcgcaacccggacaacttcgtgatcgtctccgacgtctaccccaccgtctcggcccaggccgccgacctgatcctgcccagcgccatgtgggtggagaaggaaggcgccttcggcaatgccgagcgccgcacgcagttctggcaccagttggtgaaggcaccgggcgaggcgaagtccgacctctggcaactggtggaattctccaagcgcttcaccaccgacgaggtctggcccgccgaactgctggcgaaggcccccgagctgaagggcaagaccctctacgacgtgctgttccgcaacggccaggtcgaccgcttcccggccagcgacctggccaagggctacgccaacgacgaggtcgacgcattcggcttctatatccagaaggggctgttcgaggaatacgccgccttcggtcgcggccacggccacgacctcgcccccttcgacgcctaccacgaggcgcgcggcctgcgctggccggtggtggacggcaaggagacccgctggcgctaccgcgagggctacgacccctacgtgagcaagggcagcggcgtgcagttctatggctatccggacaagaaggcgatcgtcttcgccctgccctacgagccgccggccgaggcgccggaccaggactacccgttctggctcgccaccggccgggtgctcgaacactggcacaccgggagcatgaccgcgcgggtcccggagctgtacaaggcggtgcccgacgcgctggtctacatgcacccggaggatgcgcgtcagctcaagctgcgccgcggcagcgaagtcaaggtggtgagccggcgcggcgagatccgcgcgcgggtcgagacccgcgggcgcaacaagccgccccaggggctggtgttcgtgccgttcttcgacgccaacaagctgatcaacaaggtcaccctggacgccaccgacccgatttccaagcagaccgactacaagaagtgcgccgttcgcatcgaactgctcaacctggcctga

SEQ ID NO: 325769 - DNA, 1197 bp, Pseudomonas aeruginosa
atgcgcagccttcttctctcctcgctggccctgctacccgccctggccctggcgcaacccgacgcctcgagcttcccttcctgcctcgccggcctgcagaagaaggcccaggcgcagggcatttccgccgacagttatgagcgcttcaccagcggcctgcaggccgacctcagcgtgctcgacctgctcgacgcgcagccggagttcaccaccccgctgtgggactacctggccggcctggtggacgagcagcgggtcagcgatggcaaggcgatgctcgcccagcacgacaagctgctcgaccaggtggccgcgcgctacggcgtggacaagtacacggtggtggcggtgtggggcgtggaaagcgactacgggcggatcttcggcaagcgtccgctgctgacctcgctgtcgaccctgtcctgctacgggcgccgccagtcgttcttccagggcgagttcctcgccaccctgaagctgttgcaggccggcgacatccgcgacgccggcatcaccggctcctgggccggggccttcggccatacccagttcatgccatcgacctacgcgcggatcgccgtggacttcgacggcgacggtcgtcgcgacctggtaggcagcgtgccggatgccctcggttccaccgccaactacctgaagaaggctggctggcgcacgggacagccgtggggctatgaagtgaaggtgccggccgacttccccgccagcctgggcgggcgcggcaagcgccagccgctgtcggcctgggtcgcccgtggggtgaagcgggccgacggccagccgctgccgggcggcgacgagaaggccgcgatcctcctgccgaccggggcccagggcccggccttcctggtctatcgcaactacgatgcgatctattcctacaacgccgcggaaagctacgcgctggccatcgccctgctttccgaccgcctgcgcggcggcagcggcctggtggcgtcctggccgaccgacgacccgggcatcagccggctcgagcgcaagcaattgcagaaggcgttgctggcgcgcggctacgacatcggcgaggccgacgggctgatcggcaccagcacgcgcaaggcgatccaggccgagcagaagcgcctcggcctgaccccggccgacggtcgcgccgggcgcaagatcctcgaggcgctgaagggcgcccagccctga

SEQ ID NO: 325770 - DNA, 2025 bp, Pseudomonas aeruginosa
atgaaacgcaggagtgtgctcttgtcgggtgtcgccctgagtggaaccgcactggccaatgactcgatattcttttcgcccttgaaatacctcggggcggaacaacagcgatctatcgatgcctcgcgaagtttgctggacaacctgattccgccgagtttgccgcaatatgacaacctggccggaaagttggcgcggcgtgcggtattgaccagcaagaaactggtatatgtctggaccgagaacttcgccaatgtcaaaggcgtgccgatggcccgctcggtgccgctgggcgagttgccgaatgtcgactggctgttgaagaccgccggggtgatcgtcgagctgatcgtcaatttcgtcgcctcgttgccggcgtcggccgccgcgcagttcgagcggatcgccgccgggctcagcggcgatctggaagcggcgcgccaggtccacgaggcgttgctggaggaggcgaagaacgatccggccgcggccggcagcctgctgctgcgcttcacggaattgcagacgcgggtcgacgacatcctcaagagcgccagcaacctggttacccagggtggacagggcgacggcctgaatcgcttccgcgcggtgttcggcaccctgcgcctgccggaggtcgccgacagcttccgtgacgacgaagcgttcgcctactggcgggtggccgggcctaatccgctgctgatccgccgcgtcgatgcgctgccggccaactttccgctgggcgaagagcagttccgccgggtgatgggcgccgacgacagcttgctggaggccgccgccagccgccgcctgtacctgctggactacgccgagctgggcaagctggcgccgtcgggagcggtggacaaactgctcaccgggacgggcttcgcctatgcgccgatcgccctgttcgcccttggcaaggatcgggcgaggctgttgccggtggccatccagtgcggccaggaccccgctacccatccgatgttcgtgcgtcccgcggagtcggagagtgatctgtactggggttggcagatggccaagacggtggtccaggtcgccgaggagaactaccacgagatgttcgtccacctggcccagacccacctggtgagcgaggcgttctgcctggccacccagcgcaccctggcgcccagccatccgctgcacgtcctgctcgccccgcacttcgagggcaccctgttcatcaacgagggggcggcgcggatcctgttgcccagcgcgggcttcatcgacgtgatgttcgccgcgccgatccaggacacccaggccaccgccggcggcaaccggctgggtttcgacttctaccgcggcatgttgccggagagcctgaaggcgcggaacgtcgacgacccggccgcgttaccggactacccctaccgcgacgacggcctgctggtgtggaatgcgatccgccagtgggcggccgactacgtggcggtgtactacgccagcgacggcgacgtcaccggtgacgtcgaactggtggcctgggtcggcgaagtgatcggcagcggcaaggtggccgggttccgcccgatcaccggtcgcagccaactggtcgaggtgctgaccatggtgatcttcaccgcctccgcgcagcatgcggcggtcaattttccccagccttcgatgatgacctacgcgccagcgatctgcgccatgagcgcggcgccggctccggactcgccgagcggcaagagcgaggccgattggttgaagatgatgccgccgaccctggtggcgctggagaaggtgaacatctatcacctgctcggttcggtctaccacggtcgcctcggcgactaccggcagaccgggttcccctatgcgccggtgttctcggacaggcgggtgaccgccagcggcggcccgctggagcgcttccaggcacgcctgaaggaggtcgaggcgaccattcgcacgcgcaaccaggcgcgccgcaagccctacgagtacctgttgccgagccggattccggcgagcaccaatatctga

SEQ ID NO: 325771 - DNA, 672 bp, Pseudomonas aeruginosa
atgcctgacctgagtacctggaacctgaccattccccagggccgcccggccatcaccatctccaccagccaattgcagcgcgactaccgcagcgactatttccagcgcaccgccgacggcattcgcttctgggtgccggtcaacggcagccacacgcgcaacagcgagttcccgcgcagcgagttgcgcgagaccctgtccagcggcaggccctacaactggcgttacgccagggccgacaactggctggaggcgaccctgcgcatcgaggcggtgccctcgacccggcgcatgatcatcggccagatccacagcgatggcagcaatagcggccaggccgcgccgctggtgaagctgctctaccagttgcggctcgaccaggggcgggtccaggcgctggtccgcgagcgaccggacgatggcgggaccagggcctacacgctgatggacgggattcctctcggccagtcgttcagctaccgcatcggcgtgtctcgcagcggattgctcagcgtgtcggtgaatggcagcgccctggggcagcaactggacccgcagtgggcctaccagggcctctatttcaaggccggactctatctacaggacaaccgcgggccgtccagcgagggcgggcgggcgacgttcagcgagctgcgcgttagccatcaatga

SEQ ID NO: 325772 - DNA, 726 bp, Pseudomonas aeruginosa
atgaggaatgacggaggctttttgctgtggtgggacggtttgcgtagcgagatgcagccgatccacgacagccagggcgtgttcgccgtcctggaaaaggaagtgcggcgcctgggcttcgattactacgcctatggcgtgcgccacacgattcccttcacccggccgaagaccgaggtccatggcacctatcccaaggcctggctggagcgataccagatgcagaactacggggccgtggatccggcgatcctcaacggcctgcgctcctcggaaatggtggtctggagcgacagcctgttcgaccagagccggatgctctggaacgaggctcgcgattggggcctctgtgtcggcgcgaccctgccgatccgcgcgccgaacaatttgctcagcgtgctttccgtggcgcgcgaccagcagaacatctccagcttcgagcgcgaggaaatccgcctgcggctgcgttgcatgatcgagttgctgacccagaagctgaccgacctggagcatccgatgctgatgtccaacccggtctgcctgagccatcgcgaacgcgagatcctgcaatggaccgccgacggcaagagttccggggaaatcgccatcatcctgagcatctccgagagcacggtgaacttccaccacaagaacatccagaagaagttcgacgcgccgaacaagacgctggctgccgcctacgccgcggcgctgggcctcatctga

SEQ ID NO: 325773 - DNA, 384 bp, Pseudomonas aeruginosa
atgcacgccatcctcatcgccatcggctcggccggcgacgtatttcccttcatcggcctggcccggaccctgaaactgcgcgggcaccgcgtgagcctctgcaccatcccggtgtttcgcgacgcggtggagcagcacggcatcgcgtttgtcccgctgagcgacgaactgacctaccgccggaccatgggcgatccgcgcctgtgggaccccaagacgtccttcggcgtgctctggcaagccatcgccgggatgatcgagccggtctacgagtacgtctcggcgcagcgccatgacgacatcgtggtggtcggctcgctatgggcgctgggcgcacgcatcgctcacgagaagtacgggattccctacctgtccgcgcgttga

SEQ ID NO: 325774 - DNA, 594 bp, Pseudomonas aeruginosa
atgcccaaggtcggtatgcagcccatccgccgctcgcaactgattcacgccaccctggaggcggtcgatcaggtcggcatgggagacgccagcatcgccctgattgcccgcctggcgggtgtttccaacggcatcatcagccactacttccaggacaagaacggcttgctggaagcgaccatgcggcacctgctcagcgccttgagcaaggccgtacgcgaacgccgcgcggcgctctacgacgacagtccgagggcgcacctgcgagcgatcgtcgaaggcaacttcgacgacagccaggtcaatggtccggcgatgaagacctggctggcgttctgggcgaccagcatgcaccagccggcactgcgtcgattgcagcgggtcaacgaccatcgcctgtattcgaacctgtgctaccagttccgccgccagctctcggcggacgacgcccgcgccgcggcacgcggcctggcggccctgatcgacggcctgtggttgcgtggcgcgctgaccggcgacgccttcgataccgacgaggccttgaacatcgcttacgactacctcgaccagcagttggcaaaacagtcggggtag

SEQ ID NO: 325775 - DNA, 885 bp, Pseudomonas aeruginosa
gtgccggacggcgtgttcaacgtgctcaccggcagcggacgcgaagtcggccagtggctgaccgagcacccgctgatcgagaagatctccttcaccggcggcacctccaccggcaagaaagtcatggccagcgcttccagctcgtcgctgaaggaagtgaccatggagctgggcggcaagtccccgctgatcatcttccccgacgcagacctcgaccgcgccgccgacatcgccgtcatggccaacttcttcagctccggccaggtctgcaccaatggcacccgggtgttcatccaccgttcccagcaggcccgcttcgaagccaaggtactggagcgcgtgcagcgcatccgtctcggcgacccgcaggacgagaacaccaacttcggcccgctggtcagcttcccgcacatggaaagcgtgctcggctacatcgagtccggcaaggcgcagaaggctcgcctgctgtgcggcggcgagcgtgtgaccgatggagcgttcggcaatggcgcctacgtcgcgccgaccgtgttcaccgattgcagcgacgacatgaccatcgtccgcgaggaaatcttcggcccggtgatgagcatcctggtctatgacgacgaagacgaggcgatccgccgcgccaacgataccgagtacggcctcgccgccggcgtcgtgacccaggacctggcccgcgcccaccgcgccatccatcgcctggaagccggcatctgctggatcaatacctggggcgagtcgccggcggaaatgccggtcggcggttacaagcaatccggtgtcggtcgcgagaacggtctcaccaccctggctcattacactcgcatcaagtccgtgcaagtggagctgggcgactacgcctcggtgttctga

SEQ ID NO: 325776 - DNA, 1317 bp, Pseudomonas aeruginosa
atgccatccgcgaatgctcccgaggcgccggcccagcgtccattgacccgcagcgactacaagaccctgtccctctccgccctgggtggagcgctggagttctacgacttcatcatcttcgtgttcttcgccaccgtggtcggcaagctgttcttcccggcggacatgccggaatggctgcgtcagctgcaaaccttcggcctgttcgccgccggctacctggcgcggccgctgggcggcgtgatcatggcccacttcggcgacctgctcgggcgcaagcgcatgttcaccctgagcatcttcatgatggcggtgccgaccctgatcatgggcctgcttccgacctacgcgcagatcggcatctgggcgcccctggcgctgctcctgctgagggtgatccagggcgccgcgattggcggggaggtaccgggggcctgggtcttcgtcgccgagcatgtaccggcacggcatgtcggttatgcctgcgggacgctgacttccggcctgacggcgggcatcctgctgggctcgctggtggctactgcgatcaatagcttctatagcgcgacagaggtgcaggactacgcctggcggatacccttcctgctcggcggggtgttcggcctgttctcggtctatctgcgccgctggctgcacgagacgccggtattcgccgagctgcagcaacgcaaggcactggcagaggaagtgccgttgaaagcggtggtccgcgatcatcgtggcgccgtcctggtgtcgatgctgctgacctgggtgctgtcggccgcgatcgtggtggtcatcctgatgacccctaccgttctgcagagcgtatacggcttcgatgccgccacggcgctcaaggccaacagcctggcgatcgtctgcctgacccttggctgcatcgtcgccgggcgcatggcggatcgtttcggcgcggggctgactttcgttgccggtagcgtgctactggcgctggtgtcctggagcttctacggcaacctcaaggcccacccggactggctctttcctttatatgcactgaccggcttcttcgtcggcatcgtcggcgccgttccctacgtgatggtcaatgcgttcccaccggttgtgcgtttctccggcctgtccttttcctacaacctggcctacgccatcttcggtgggctgacgccgatggcggtggccctgctgctcaagcagagcccgatggggccggcttattacgtggtgactctgtgcctggtcggcttcctcgtcgggctctacctgctggcgcagaaaaagccggctggcgaggcggtttcggtggggtga

SEQ ID NO: 325777 - DNA, 1020 bp, Pseudomonas aeruginosa
atggcgagaaagatcagctaccagcaggccatcaacgaggcgctggcccaggaaatgcgccgcgacccgagcgtcttcatcatgggcgaagacaatgccggcggcgccggcgcgcccggcgaggacgacgcctggggcggcgtgctgggggtcaccaagggcctctaccaccagttccccggccgcgtgctggataccccgttgtcagagatcggctatgtcggcgccgcggtcggcgccgccacccgcggcatgcgcccggtgtgcgaactgatgttcgtcgacttcgccggttgctgcctggaccagatcctcaaccaggccgccaagttccgctacatgttcggcggcaaggcggtcaccccgctggtgatccgtaccatggtcggcgccggcctgcgcgccgccgcccaacattcgcagatgctcacttcgctatggacccacatccccggcctcaaggtggtctgcccgtcgtcgccctacgacgccaagggcctgctggtccaggcgatccgcgacaacgacccggtgatcttctgcgagcacaagctgctctattcgatgcagggcgaggtacccgaggagctgtacagcgtacccttcggcgaggcgaacttcctccgcgacggcgacgacgtcaccctggtgacctacggccgcatggtccacctggcgctggacgccgccgccagcctggcgcgccagggcatctcctgcgaagtactggacctgcgcagcaccagcccgctggacgaggacagcattctcgaaagcgtggaaaagaccggccgcctggtggtggtcgacgaagccaacccacgctgctcgatggccaccgacatcgccgcgctggtcgccgaacgggccttctccgcgctgcacgcgccgatccgccgggtcaccgcgccccatacgccggtgcctttctccgacgccctggaagacctctacatccccgacgcggcgaagatcgaggcagccgtgcgccaggccctggaagggagggacgcggcatga

SEQ ID NO: 325778 - DNA, 612 bp, Pseudomonas aeruginosa
atgccgctagccctgctgctcgccatgggcgcgttctccctgagcctgtcgatttcccccggtccggtgaacctgaccatcgtcgcttccggcgccaaccatggtttccgccggaccctgccgttcgtcaccggcgccaccctcggcttcgtcctgctgctggccttcgtcggcttctggttcgtccgcgcgatcgaggcctacccgcgcttcttcgactacctggggatggccggcgcggcgttcatcgctcatgtgggctaccgcatcgccaccgcggatccacgcctggccctggaggaaaacggggtccccgggttcttccagggcgtgctcctgcaatggctcaatcccaaggcctggatcgcctgcgcttccggcgtggccttgttcgccagcccgagcacgcacgcgccgctgctggtcttcatggccatctacctggtggtctgctacctctcgctggccgcctgggcgctgctcggtgaccgcgtggcgctgctgctcgacagcccccggcgggtgcgcctgttcaatcgggcgatgggcggcaccctggtgctgaccgccggctacatgctctacctgcagctcgccgctagcccggattga

SEQ ID NO: 325779 - DNA, 1227 bp, Pseudomonas aeruginosa
  misc_feature (42)..(49): n is a, c, g, or t
atgccaaggcccaggcggcccaggtcgggatcggcaagtccnnnnnnnncggcccaggcggcccaggtcgggatcggcaagtccgcctacctgccgcgcctggacggccgtctcgacgccagtcgcggctacagcgacatggattatcgcgatgccccctacctctccggcgacggccatcgccaccggcgcggcgccagcctccaattgagctgggtgctgttcgacttcggccgccgcagcgccgccctgcgcaacgcccagcagttgctgctggcagccaacgccagccaggacgcgaccctgcagaacaccttcgccctcgccgcccaggcctactacgacgccctcgccgcccagcgcagcctggccgcctcgcggcaggtcgcggagctggcggcgcagaacctggaagccgccgacgccaagtaccgggccggcgccgccgccctttccgatcgcctgcaggcgcagaccgcgctgtcccaggcgagcctcgcccaggtccgcgacgaaggcgccctgagcaacgccctcggcgtcatcgccctgcgcatgggcctggcgccggataccccgctgcgcctctccggcgagctggaggcgcaacccgacaccggcttcgtcaaggccatcgacgagatgctcgccgaagcccgccgcgagcatccggcactgctcgccgcccaggcgcggctgaaggccgccgccgcctcggtggaggaaagccgcgccgccggccggccgagcctggcgctgagcgccaacctggcacgcagccatagcgaccaggcgatggccttcaacggcgatacccgcgaacgcgaccgcagcatcggcctgcaactgaacatcccgttgttcgaaggcttcgaacgcacctaccaggtccgcaacgccctggcccgccgcgaggccagcgaagcggagctggccgacaccgagcagcaggtttcgctggaggtgtggaacaactaccagtcgctcagcgtcgagacccgcagcctggcgcgcacccgcgaactggtcgaacagtcgcggcaaagcctggaggtggtgcagggccgctaccgctcaggggtcggcagcatgatcgagctgctcaacgccctgaccgcctacgccagcgccgaggaccagcacatccgtgccctcggcaactggcagacctcgcgcctgcgactggcggccagcctcggtcgcctgggcttctggagcctgcgctga

SEQ ID NO: 325780 - DNA, 444 bp, Pseudomonas aeruginosa
gtgctcgccgaagccgggcagaccgtcgacagctcgcgtccgctgctgagcatcgttcccgccgacaccccgttgcaggccgaactctacgcgccgagcaagtccatcggtttcatccggccgggcgacgcggtgctgatccgctaccaggcctatccgtaccagaagttcggccagtaccacggcaaggtgcagtcgatctcccgcgccagcgtctcctatgccgagctttccagcatggtcggcggcgtaccggggctcggccaggatggcgagcagctgtaccggctgcgggtaaccctcgacgaccaggcggtgaccgcctacggccagccgcgtccgctgcagagcggcatgctgctggacgccgacatcctccaggacacccggcgcctctacgaatgggtgcttgaaccgctctacagcctgaccggcaaactctag

SEQ ID NO: 325781 - DNA, 1551 bp, Pseudomonas aeruginosa
ttggtcgccgccgacgacctctggagctgcgccccgcgcaccaacgaagaggttctcgcggtggtcaactgggcctggcagaacggcttcaaggtgcgcccgcgcggcatgggtcacaactggtccccgctgctgctgaaaggcggcgagaactgcgagagccgcatcatgctggtggaaaccagccgttacctgacccgcgtacggatcgacgcccagggcgagttcggcctgttcagcgcgcagaccggcgtcaccatggaagccctgctgaaacagctggagcgggtcaagctcggcttcgtcgccacgccggcgccgggcgacctgaccctcggcggggtgctcgccatcgacggccacggcaccggcatcccggcgcagggcgaaagccgcctgccggggcagagctacggctccctgagcaacagcatcgtggcgctgaccgcggtggtctgggacggcgccgccggacaatacgtgctgaagaccttccgccgcgacgatccggcctgcgcgccgttcctcgtccacctcggacgcgccttcatcgtcgaggcgaccctccaggccggggtcaacaagcgcatgcgctgccagagctacgtgaacatcccggcgagcgagatgttcgccgcggccggcagcggcggaaggaccttcgacagcttcctgcaaaagagcggacgcgccgaggccatctggttccccttcaccgacaagccctggctgaaggtctggacgccgaccccgcgctgcccgttcggtgcccgcgcggtcaacggcccgttcaactaccccttctccgacaacattcccaaggcgctgtccgacctgctggcggcgatcaataccggccacccggaactcaccccgctgctcggcaagctgcagtacgacctggtagtgggcggcatggcgctgaccctgggctacgacctttggggctggagcaaggacctgctgctgtacatcaagcccagcaccctgcgcgtcaccgccaacggctacgcggtgctgacccggcgtcgcgacgtgcagcgggtgatcaacgagttctacctgcagtaccagacgatggtcgccgcctaccgcgccaacggccactaccccatgaacggcccggtggagattcgcgtcagcgggctcgaccagcccggcgagtcgatcgttcccggcgcccaggtgcccagtctgtcggcgatccgtccgcgccccgaccagccggaatgggacacggcgatctggctggacatcctcagcctgcccggcactccgcaggccaacgccttctaccacgagttcgaggcctggctgttcgaccacttcagcggcgactacgcctcgctgcgggtggagtggagcaagggctggggctacagccccaccgccgcctgggccgagccgacggtggtcgaccagttggtggcgcagtcgctacgccaaggcctggtcgcagacaacgattgggacgccgcggcgcgccagttgaacgaagccgatccgcatcggctgttcagctcgccgctgctcgaccggctgatgccatga

SEQ ID NO: 325782 - DNA, 576 bp, Pseudomonas aeruginosa
atgaccgccgtttccactggcgccaacaccactggaaaggcgccgcgtcctcgctcgcgccagcgcgctcgcatcgtgctcgcgggcttcgccgcctgcggccttgctgcgctggcctgggcgtccttcgtgcatccgatgccgcgcctgatctacaacccgtccgacagcgttccggtgggctggtatcgcatcgcgccacccgatgcgccgcgcgtcggctccatcgtgctgaccacgctgccgccagacgccgccgcgctggccgcgcagcgcggctacctgccggcgcgcgtgccgctgctcaagcgcgtgggcgcggtcgcgccgcaggaggtgtgcgttgccagcggcatcgtccgcatcgacggcgtgccttcggccgccgcgctgcccgccgaccgttggggccgcccgctgccatcctggcagcagtgccgccgccttgaacccggcgagcttttcctgttgagcgtgaccaacccgtcgtcgttcgacagccggtatttcggcccggttgccgcatccgccgtgatcggcgtcgcgcacccgatccggctggaggcccgcccatga

SEQ ID NO: 325783 - DNA, 705 bp, Pseudomonas aeruginosa
ttgttgtcacgcatgttccgtttccccgaccgaagccaatggctgatggtgctggtgctgtccctgttgccactgtgggcgtttgcccacggtgtcaccggcgatgatcaggcgtttcttgagcagaacaccggccgtaatttgctggtgttcacctacctcggggccaagcacatggtcactggctacgaccatctgctgttcctgctgggcgtggtgttcttcctgtaccggatgcgcgacgtcggcacctacgtcaccctgttcgcggtcggccacagcgtcaccttgttgctgggcgtgctgggcgggttccacgtcaacgcctatctcgtcgatgccatcatcggcctgtcggtggtttacaaggcgctggacaacctcggtgcgttcaagcgttggttcggcttccaacccaacaccaaggccgccgtgctgatcttcggtttcttccacggtttcggtctggcgaccaagttgcaggatttcgcgctgtcgcgtgatggtctggtgcccaacatgctcgcgttcaacgtcggcgtggagttgggccagttgctggccctggccggcatcctgatcgtgatgggtttctggcggcgcactgccgctttcccgcgccaggccttcgcagccaacaccgtcctgatgaccgccggctttgtgctgatcggctaccaactcaccggctatttcgtttcctga

SEQ ID NO: 325784 - DNA, 669 bp, Pseudomonas aeruginosa
atgtcctacattcctgctccgcaatcgcttcccagcaccgcccgcctgctcaaggccaccgggctggccatcgccgtggcatccgtcctgctggtgacggtcgtgcttcccgccgaatacggcatcgacccgaccggcatcggcacccggctggggttggacgtgctgggtgccaaggccgaaaccaaagccgcgcaagcaccggcattggccgcgcccacttctgacaagacagcggcaacgctgccggcaactgaagccgaactggaagccaaggccattgcggccttcggcaaacgttcgctggggcaatcgctggacgtgcgtgccatgtcgcccagcgccaatgccgtgcgcagcgacaccctcagcctgacgctggagccgggcaagggtgcggaggtgaagatgcacctcaagcaaggtgagggcgtggtcttccagtggaaggcctcgaacgctgtcctgctcgacatgcacggcgaacgtccgaacgcgaagggcgagtggacgagctattccatcgagccggcgcaaaacgaggctcgcggcactttcgtggccccgttcgagggaagccacggctggtactggaagaacgagaacgatgaaccggtcacggtcgaagtggccgtgaccggcttccagcccgatttgcatcaaccctga

SEQ ID NO: 325785 - DNA, 306 bp, Pseudomonas aeruginosa
atgaaactgcgttcgtctctcatgattgcttttgccgccaccgcactgctgaccggcaccgccttcgctcatgacccggcactacacagcaaggaagatgaagccaaggccaagcccgccacctgccaacaactcaacgacccggaacactacgaaatcgacttgaaggatgattccacccggtcgctgaaggcgcgttgcgatgcccgcaagaaggcgcaagagcagacggctgccccggcgcagaagaagccggctacaacgccggctccggcaccccgtcaatcgtccgacggcaagagctga

SEQ ID NO: 325786 - DNA, 300 bp, Pseudomonas aeruginosa
atgcttcggaggaatgatgccattaagaaaatcatcccgttcttgctgatggctgcattggctgcctgcggccagtccgagacgccacagaagcccgctgattccacagtcaacgtcccgacggtggaagaactcgcggccaaccccgagcggctcaaggaactgcggcagcagtgcaagaccgaccgcgccaagctgggcgaagtgctgtgcaaccgcgtggcggaagctacgcgcaaacggttctatggcgacggccaaacgccatatacaccaccgaaggaatcgcccaagttctga

SEQ ID NO: 325787 - DNA, 2115 bp, Pseudomonas aeruginosa
atgcaagggacgaacgtgctgttcggtcagatcgccgtggtattcggcatcgtgatcgccggagtgtggggcgccacacaatggacagcagcagcccttggctatcagctacgccttggctcgccctggttcgattttcttggcacgccgatctactacccgtggaagctgtttgagtggtggttctcttacggcgcctataccccggaaatcttcgacacgggcggagccatcgccggtggcagcggcatggtcgccgtggccgtcgccattgccatgtcggtctggcgctcgcgacaggcacgcctggtcacgacctacggttcggcccgttgggcgaatgcgcaggacattcgcaaggcgggcctcacgcagccggtcggcgtgttcctcggccagtacgatcgccagtacctgcgccatgaagggccagagcatgttctgaccttcgcgcccacacgctcgggcaagggcgtcggcctggtggttcccaccttgttgagctggccggcctcggcggtcatccacgacatcaagggggagaactggcagatcaccgccggctggcgcagccgtttcagccactgcctgctgttcaacccgaccgatgcaaagtcggcggcctacaacccgctgctggaggtacggcgcggcgcgcatgaagtgcgcgacgtgcagaacatcgcggacattctagtcgatcccgaaggcgcgctggagaagcgcaaccattgggagaagacctcgcacgcgctgctggtcggggcgatcctgcatgtgctctatgcgggcgaggacaagacgctgcgcggcgtcgccaacttcctcagcgacccggccagccccttcgagctgaccttgcaccggatgatgaccacgccccacctgggcgatgggccgcatccggtggtggcatccgctgcgcgcgaagtgctcaacaagtcggacaacgagcgttctggcgtcttgagcaccgccatgtcgttcctcggcctgtaccgcgatcccacggtggccgaagtcacgtcgcgctgcgactggcgcattgccgacctcatatccgccgagcatcccgtatcgctgtacctggtggtgccgccttcggacatttcgcgcaccaagccgctcatccgcctgatcctcaaccagatcgggcggcgcttgaccgaatcgctcgacggctctgacggcatcgaacgccgccacaagctgctgctgatgctcgatgagtttccggccctgggccggctcgacttcttcgagacggcgctcgcattcatggcgggctacggcatccgcagcttcttgattgcgcagtcgctcaaccagatcgacaaagcctacggccagaaccattcgattctggacaactgccatgtgcgcgtgacgttcgccacgaacgacgagcgcaccgccaaacgcatctccgagacgctgggcacggccaccgagctgcgcgcacagcgcaactacgcgggccaccggctcgcgccgtggctggggcacctcatggtgtcgcgccaggagacggcccgcccgctgctgacaccgggcgaagtcatgcagcttccgcccgatgaggcggtggtgatggtgtccagcgtggcgccgatcaaggcccggaagctgcgctattacgccgacgccaatttcaagcggcgcgtgttgccgccgcccgcgctggcggactgccaatacgccgacgcgccgccgctgcgcgccgacgactggagcgggctggcaatcccaccaacgcccactcgaaagccgatccacccaaagggtacgatccgggttgagcatgatttccaccacgtcggggtcttcgagcgcagtggcgatcagcggccccatcgccgtgcgcagcatctggatgcgccggtcgagcgaggccgcagcggacgagcgtggctcgggtggcaactgcgaaacggcgctcatgacgcacgctcccgcgcctgggcggctgccgccgcgtcctccatccgcatcgggtcgggatgcagttcttccaccacgtcgcgcaccaagctgcgtccgcgcatcaggtggcggccaagctgctcggtgaactgctcgaagcgcgccttgccctgggcgcgagctgcctcttga

SEQ ID NO: 325788 - DNA, 465 bp, Pseudomonas aeruginosa
atgagccactaccgcctgaacctctttatccagcccgagcacgcccagcggcttgatgaactggccgccaagaaaggcgtatccaagtcgtccatcgtcgcggcggcgctcgcatcgtggctatcgcccgatgctgctgaccagcgcgaagcggccatcgccaagcggctcgaccggctgtcgcgccaggccgagcgcatggagcgcgaccagaacatcgccatcgagacgctggcgctgttcatccgctactacctgaccgtcagcacgccggttcccgaggcgcatcaagaggcagctcgcgcccagggcaaggcgcgcttcgagcagttcaccgagcagcttggccgccacctgatgcgcggacgcagcttggtgcgcgacgtggtggaagaactgcatcccgacccgatgcggatggaggacgcggcggcagccgcccaggcgcgggagcgtgcgtcatga

SEQ ID NO: 325789 - DNA, 1485 bp, Pseudomonas aeruginosa
  misc_feature (954)..(963): n is a, c, g, or t
atgggtgagttcgagctgatccgccgcttcttcgccgcggccgcctgcgcggcgccggcgacggaggtggccctcggcatcggcgacgactgtgccctgctggcgccgcctgccggcgaacagctggcggtctccaccgacaccctggtggaaggtgtgcattttcccgccggttgcgaccctttccttcttgcccagcgcgccctggcggtctccgccagcgacctggcggcgatgggcgccgcgcccctggccttcaccctggccctgaccttgccgaaggccgaagccgagtggttgcagggcttcgcccgcggcctcgacgccatggcccggcagtgcggcctggccctggtcggcggcgacaccacgcgcggcccgctgagcatgaccctgaccgtattcggcagggtgccggccggccaggcgctgacccgcgccggtgcgcgccctggcgacctgctctgcgtcgggggcccgctcggcgaggctggagcggctctggaactggtgctggagcgaagatcggcgcccgccgaggtggccgaaccgctgctggcgcgctactggacgccggccccgcaattcggtctaggcctcgccctgcgcggcaaggccagcgccgccctggacatctccgacgggctgctcgccgattgcgggcatatcgcccgcgcttccggcgttgccctgctggtcgaatgccagcgcttgcaggcaagcgccgcgttgagcggcctgctcgccggcgaggaagccttgcgccagcaactggccgccggcgacgactacgtgctggccttcaccctgccgcctgcgtaccttggcgagattcgcgccgcgtggccggccatggccgtcatcggccgggtcgaggcggggcagggggtgcacctgctcgacgccgacggaaaggaactcataccggccgtggccggctaccaacatttcggnnnnnnnnnncccaacgtgactgagcatcctgatcaggcgccggcgcagccggtgccgccgtcggtctggcgcaatccctggcatttcctcgccttcggcttcggctccggcaccctgcccaaggcgccgggcacctgggggtcgctggtggccatcccgttcatcccgctgtggcagatgctgccggactggggctactggctgatgctgggagtgaccatgctgttcggcttctggctgtgcggcaaggtcgccgacgacctgcgcgtgcacgaccacgaaggcatcgtctgggacgagatggtcggcatgtggataaccctctggctggtgccggagggctggtggtggctgctgatcggcttcgtcgtgttccgcatcgtggatattctcaaaccctggccgatcagttgggtggaccgcaacgtgcacgggggcgtcgggatcatgctcgacgacgtcctggccggggtattcgcctggctggtcatgcagggtctagtctggggatgggtacactggctggtctga

SEQ ID NO: 325790 - DNA, 960 bp, Pseudomonas aeruginosa
atgcacggggtcgaagaccagcacgtcacgctcccgccgcaagccgccatagaggtccagcaagcgagcttcggccagggagaacaaggcctcgccggcaccgatgggccccggatagatatccgccacttcggcctgggtagggaaatcgtgggggtcgcagatgtcctcgaaccaccacaaccccagcggcgccagggctttcgctgcgtcgaccgcgccccccgcgtcgtagcggttcatcgcgtcgaccgccagccgcgaagcgtcgccgagaacccgcagcgccctgtcgatacggcgccggtcctggtccagcccggccgcgccgatcttgatcttggcgtgggtgtagccgagatcgacgaagcgccgcagttcctcttccaggcgtcccaggtcgtcgtgcggataggggtagccgccgccggcgtagaccggtacgcgctgcggatagtcttccgccagccccaggcgtcgcgccaggaagcgatgcagcggcaggccggcggccttggccgcggcatcccacagggccatgtccagggcgcccaccgcgacgcagcgttcgccgtggccgccgggcttctcgtcgcgcatcatcaggtcccaggcacgcaacggatcgatgccactgccgtcgtcgctcgccaggctgtccgccggagcccccagcaggcgcggggcgaaacgctcgcggatcagcccgccctgggcgtagcgccctaccgaggcgtggccgtagccgaccacacgccgaccgtcacgcacggcatcggtgagcaccgccaccaggctggtgctcaaaccaccggtggcagccgccacgccggcgtaacgggaaaggggaatactgcgttcccggacctcctggatgcgcatcgcctgtcggctcctcctcgctggacctctctccaccttagccaaggccgccgccatggtcgtcccgatcggtcgtag

SEQ ID NO: 325791 - DNA, 618 bp, Pseudomonas aeruginosa
gtgctgatatgggccgcgtcgcagatcgtagaggcgcgcgacgcgggcatccgcccgtcgcgctggatacgtgccacgccctacgaaatcctgcgcttcatcgggcggggcacgtccctgaacgactatctgcgcctgaaagccgcgctcgaccggctgcaatcgaccagcgtggcgacttccatccgcgagacgaccgggcggcgcctgcatcgcttctcctgggtgaacgaatggcgcgagctggccgacgccagcggcacaccgctgggcatcgagttgatcctgcccgactggttctatgccggcgtgctcgacgccgccctggtgctgaccatcgaccccgcgtacttccgcctgaaaggcggcatcgagcgatggctgtaccgcctggtgcgcaagcacggggggcggcaggagcatggatggcaattcgacttccggcacctgcaccgcaagtccggcagcgcggcgcgcttctccgacttcgcctacgacctgcgcgcgctggtcgcgcgacagtcgttgcccggctacgtcctgggcatcgagcggatgccggacgacgggttggaactgctgaccttccggcccgtgccggccacggcacgggaataa

SEQ ID NO: 325792 - DNA, 639 bp, Pseudomonas aeruginosa
atgatcgtcgccttgctcaaccagaagggcggtgtcggcaagaccacgctcgccacccacatcgccggcgaactcgcgctgcgcggccagcacgtcatcctgctggatgccgacccgcagggttcctcactcgactggacgcagcgcagaagccagcagggcttgccacggctgttcagcgccgtgggcctcgcccgcgaaacgctgcatcaggaagcgccggagctggcccgccgtgccgatcacgtcatcatcgacggcccgccacgcatcgccgccctggcgcgttccgcgctgctggcggccgagcgcgtgctgattcccgtacagcccagcccgtatgacctgtgggccagcgccgagatggtggcgctgatccgcgaggcgcaggtgttccggcctgcgctgcgcgcggccttcgtcatcaaccggcgcatcagtaccaccgtgatcgggcgcgaagcgcgccaggcgctggccgaccagccgcttcctgcgctgcgcgcggaagtgcatcagcgcatcgtgttcgccgacagcgtggccgctggccggcttgcacgcgagacggcaccggtcagcgccgccgcgcgcgaaatcaccgccctggtggacgaactgctgcggtggacgacatga

SEQ ID NO: 325793 - DNA, 285 bp, Pseudomonas aeruginosa
atgacagcgaagccaccacagagcggcaaacgcacggcaaaacgcgtcggcatcggtgcgcgtcctcctgcgaatccgcacgccgaggcgtggattcgccagggcgatgccgatgcgctgggcaagggcgacctctacacggctcgcctcacgctcgacatcacgcccgcactgcgggcgcgcatcaaggtatcggccttcacgcaaggcgtgaccgtggccgacctgctgcgcggcctgctggagcgggagtttcccgagaaccgcagggagaacacaccatga

SEQ ID NO: 325794 - DNA, 558 bp, Pseudomonas aeruginosa
atgactgcatccactgcacctgctgccgcgcctgccgctggcgcggccacggctgcgccacagccatcattcatcgcaccttccggccagcccgccagcgcgccgctgacgcgcgtggcgctggcctacatcgaggcccgtttcaagctctacctgcgctttggcgaacccgcgcgcacgcaccagctcgaccgctggcgacgctgcgccatgttcctgccgggcgctgtgttctgccgcgtgcgctggcaggccaacgactacggcaccgtgcgctggcagctcatggtgatgcaagcctgcacaccgctggacgcggcgcagcgcatccccggcgtgcagcctggcgcgcgcctgctactgcacgccgagggcgacgggcaagtgcgcgccgtgctggaacgcatcgacgccatcgaggcgctgggcatcgcgcctgtcgccgtctcgcccgcgtactggcgcacgctgggcaaccgtctggcggcccgcctagcgctgcccgaatacaccgccgagcggcacgccgcctggctggccgggagggtgctgccatga

SEQ ID NO: 325795 - DNA, 600 bp, Pseudomonas aeruginosa
atgaccgctgattccaccaccgcacgcacacccgaaatcgcgccgcgtcctcgctcgcgcctgcgcgctcgcatcgtgctggcgggcttcgccgccgtcggcctcgctgcgctggcctgggcggctttcgtgcagccgctgccgcgcctgatctacaacccgtccgacagcgttccggtcggctggtatcgcgtgcagccgcttgaccatcgggccgcctcgctgccacgtcggctggaagtgggcagcatcgtcctgacccgattgcccgccgacgctgccgcgctcgctgcgcagcgcggctatctgccggcacacattccactactcaaacgtgtgggcgcggtcgcgccgcaacacgtctgcatcgtcgccgggcaggttcgcatcgacggcgtgcctgcggccgccgccctccctgtcgatcggctgggccggccgctgcgatcctggcagcattgccgcccgctggccgagggcgagctgttcctgttgagcgtgaccaatccggcatcgttcgacagccgctatttcggcccggtcagcgcatccgccgtgatcggcgtcgcgcatccggtctggctggagacacgcccatga

SEQ ID NO: 325796 - DNA, 1989 bp, Pseudomonas aeruginosa
atgaccgaccgtcgcgacgacgatttccgcatccgccctagtgccccgaagaaccggggccagagctttgtttccaaggtgctcaaacaggcaggcaaggccagcagcggcaagtcctcggtgcgccgtcctggcgctgccagcggctacgggagaggtacgggccagcggcccggctcgcgcctggggcgaggccacacggctgcgcgcttcgccggggcgaaactgacactcatgtcgcggcgcgtgaccatcaaaaccctgctggtcaatcaccaacgggccagcccgcagtcgctcgccaagcacctgcgttacatcgagcgcgacggcgcgggccgcgatggcgaaccgggccgggcctacgggccacaagccgacgaagccgacctcgatgccttcaaggaacgctgcgccgatgatcgccaccatttccgcttcatcgtctcgtcggaggacggcggcgagctggacgatctgcgcacctacacccggcatctggtgaaccgcatggaagccgacctgggcacgcggctggattgggtggcggtcgatcactggaacaccgacaacccgcatacccacctgatcgtgcgcgggcgcgacgacaccggcaaagacctcatcatcgcgggcgactacatcgcccacggtttccgccatcgggccgccgaactggcgaccgaatggctggggccgcgcaccgaactggagatccagcagaccttggggcgcgaggtggaacaggagcggtggacgagcctcgaccgcacgctacaacgcgaggccggcgaggatggccgggtgcgaatcgaacgcttcaacgagccgaacttgcaacgccagcgcctgctgctgatcggccgcctgcaacgcttgcagcgcctgggcctggccgacgagacgcagcccggctcctgggccatccatgccgatgccgagaagaccttgcgcgccctgggcgagcgtggcgacatcatccgcaccatgcagcgggccatgagcggccagccgcgcgagctggcggtgttcgagccgggcgacgacggccgcaccatcgtcggccgcgtggccgccaagggcttggccgacgaactgcacgaccggggctatctggtcatcgacggtacggacggcaaggcccactacgtcgccctgaacgcccgtgacgagctggccaactaccctaccggcgcggtggtggaagtgaagggttcggccgacgtgcgcgccgccgacaagaacatcgccgcgctggcgagcgatggcctgtaccgcgccgatcaccacctggccatcgaacagggccgggccaagcccggacgcgacccgcaggaggctgtcgccgcccacgtccggcggctggaagcgttgcgccgggctggcatcgtggagcgcgaggccgaaggcgtctggcgcgtccctgatgacttggccgagcggggccgccagtacgacgcgcagcggcttggcggcggcgtggtggtggagctgaaatcgcacttgccgatcgagcggcaggcccgggtgatcggcgccacctggctcgaccaacagttgatcggcggcagcaaggggctgggcgacctgggttttggggccgaggtcaaggacgcgctgcgccagcgcgccgacttcttagccgaacaaggactggccgagcatcgcgggcagcgcgtcgtcctcgcgcgcaacctgctggcgacgctgcgcgggcgtgaattggcgaaggccgcgcaggagatcgccgccgaaaccggcctggagcatcggccggtggccgatgggcggcgcgtgactggtatctaccggcgttccgtcatgctcgccagcgggcgctacgcgatgctcgacgacggcatggggttctcactggtgccgtggaagccagtgatcgagcaacggctgggccggcaactggccgtgacggtgagaggagtctcaacatcgtgggagctggggcgaccacgcggccccgctattggctga

SEQ ID NO: 325797 - DNA, 675 bp, Pseudomonas aeruginosa
atgaccacttcgtcagcgcgctcgaaggcgagcacgccttccaagcatccctcgtccactgggggcgcagtgcaatcagaaaaggcgcgccttgtccttgccggcgcaaggactgtcttcttggcaaacggctttagcgctgcgacgaccgacatgattcagcaggctgccggcgtatcgaaatcgacggtgtactcgcactacccaaacaaggaagccttgtttgtggccgtcgtcgaggctgaatgtgagcggtttcttagggccgttcgtaagcccaagtttccagaagaacggctcgccgatattctgaacgcgatggcgctcgcctacttggagattgtgctgtcgcgtgacgggttggcgctataccgcatgattgcggccgaagcgccgaggtttcctgaacttgggagacgcttctacttggccggccccgccgccataaacaacatcgttgcagagacgttggaagtcgcctcctcgaaaggagagctggatcttggaagcattggactcgattccgcggcgtccctgttcgtgaatatggtgcgtggtgaagcgcagatgcaatgcgtaatgcaccctgatgctccggcgtccgctgccctgcgggatcggtgggcgaaagatgccgtcactacttttcttcgcgcctttcagaagaatggctga

SEQ ID NO: 325798 - DNA, 1359 bp, Pseudomonas aeruginosa
atggaaaagcccgcatcaatagacgggcttgcggccaacaagagccttgaggcgcctgtcggtgaatggccaacgcaggcgtggtggaagtcctttggcgatccacaactcgaccaattgatggacgaagcgctggctaactcgccgtcgatggcgcaagcacaggctcgcctcaatgccgctattgcgcgatcgaaaggtgcgcgcgcagcgctgtttccctctgtctcactggacgcatccgccagcgagcagaagctgacgtacaacagcatcttcccaagggacgtcgttcccaaggggtggaacgactatggcgcggcttctctgaatttcggatgggaactcgacttttggggaaagaaccgctccgcactggatgcggccacatccgaggcgctggcggtgcaagccgatgccgccgcagctcgcgtcctgctgacgacggaactcgcaagccgctatgtccaactcaatggcttgcatgtacagcgcgatctggcgagagatacgctcagaaaccgtgaggactccgagcgcatggcgatgcgccgcgttgaccagggcctcgatacacagacaacactggaacaggcacatgcaagggccaagctggcacgggctgacttggccgacgtggaagaacggatagaactggctcgcaatgggatcgcggctctgctggggcgtggaccggatcgtggtctggatatccacgagacgcatctttcgccgagcctgtccttggcgcttccggaaacactgaagagcgatctgatcgggcgcaagcccgaaatcgtggcagcgcgatggcgtgtggagtcggccgccaagcgtatcggcgttgcaaaggcaggcttctatcccagcgtcaatctggtcgccctggttggctacgagtcgctgggcctgaaccgcctgttcgattcgggttccgatgcgggccgtggcggagtcgccatccatctgcccattttcgagggtgggaggctccgagcgaactacagccgagcctgggccgaatacgagttcgcagtagccagctacaacgatgcgctggtccaagcattgagagaaaccgcggacgcggtgaggagcttgcaagcgcttccgatccgcctcgaagcaacggagtcggcggtcgtcagcagcgacaaagcctaccaactcgccaagcgccgctacgagggcggcttatccaactatcaaaccgtgctaacgacggaggatgccgcgctcaatgcgcggatggccgtcaatgccctgtgggtgcgcggcctatccctcgacattgcactgacaaaggcccttggcggcggcttttccgattcctcaatgaatgaacaggtgacccgatga

SEQ ID NO: 325799 - DNA, 1179 bp, Pseudomonas aeruginosa
atgagtgctccgatgccccctgaccctcaagattcttccacaacgccggaggcttcacaaaagcgggcgaagcgcaaacgtctcgttttaattgcgacggttggtttggtcgccatcggtgttctctacggtgcgtgggcgcttctgttcgcaggcaaatccgtcaccacggataacgcctacacggcagcggaagtggcccaaatcacaccactcgttgccggccctgtaaaggaagtcaaggtcagtgacacgcaggccgtcaaggctggcgacgtgttggtgattctggacgataccgacgccaagattgctgtcgcgcaggccgaggcggatttggcacgtactcagcgccaagtacggcaactgctgggaaatgacgagagcctcgcgggacaagtggccctgcgtgccgcggaaatcgccaccgctcgcagtgacctgacccgtgtaactgccgcctatgaaaaagcagtcatcgacgagcgccgtaggcagaaccttgttgaagaaggcgctgtctcgaaagaagagctgacgaatgcgcagacgcagttgcgcgaggcgcgcgctgcgctggagcaagctcaagcccgagttcgcgctgccgaggccgcaaaggaagctgcaagcggcgcccggacggccaactcggcactgatcgtagatagcacggtcgatgacaaccccgccgtactcgcggcgaaggcgcggcttgaccaggcgcgcgtgaatcttgaacggaccgtgttgcgtgcgcccttcgatggcgtcatcgcgcagcgttcggtggagattgggcaacaggttcagacaggcgtgcggctgatgaccgtggtgccgatcgaacgcatctatgtcgatgcgaacttcaaggaaggccagttgcagaaggtccgtcccgggcagcacgtggaactgacctcggacctctacggcagcgatgtcgtttatacgggtcgtgtcgaaggcttcgccggaggatcagggtctgccttcgcagcaattcccgcgcagaacgccacgggcaactggatcaaggtggtccagcgcctacccgtccggatttggattgatcccgagcagttgaagcagcatccgctgcgggtcggtctgtcaatggaggctaccgtcgatctgcgagaccacggtgagtcccagccggttgcgacgaggtag

SEQ ID NO: 325800 - DNA, 1533 bp, Pseudomonas aeruginosa
atgacttcctcggaacacaagccgctttccgggatggatctggtcatcgcggcaatcatcctgtctctggcgaatttcatggtggtgctcgataccaccatcgccaacgtggcgatgcccacgatctcggggtctatgggggtctcgacgagccaaggcacctggatcatcacgtcctatgctgttgccgaggccatcaccatccccctgaccggctggctcgttcgccaggtcggcgaagtacggttgttcatgatctgcgtcgtggcattcgtcctgttctccgtgtgctgcggcctgtcatggtctctggaaagcctcgtcttctttcgcgtgttgcaggggttggccggcggaccgctgattccgttgtcatcgacgttgatgctagcggtgttccccaagaacaagtcaaacatcgcgctctcgttgtggggaatgatgacggtcgtggccccgatcttcggcccaatcctgggcgggatcatttcggataactggcactggggctgggtcttccacataaactttgggtttggcatcctggtcatgctgggcgccatgaaagtgcttcggggccgagacgcactcacggagcgttcccgcattgatggaatcggcctggcgcttctggtgatttttgtcaccagcttccaaatcatgatcgacaagggccgcgagctggattggttcgcctcgccactggtcgtcacctgcgcaatcgttgcagccgtttcgctggtctatctggtgatttgggaactcaccgattccgatcccgtgatcgatttgagcgtcttccgctcgcgcaactggttggtatcttccgtcacgctgagcctgatgttcggcatcttcttcggcaacatcgtgttgacgcctctgtggctccagcaacagatgggctacacggcgacatgggcgggcttcgccaccgcgccgatgggcattctcgcggtggcgacttcaccgatcgtcggtcgtctcctgccgaaggttgaccctcgctggatcgtcacctatggcatgggtgtcttggccgcctcgttcttcatgcgggcgcatctgacgacccaggccgacttcatgtcggtggccatcgcgatgtttgtcctcggcgctggcgttcctgcctgcatgattacgctgacctcgttgggtgtttccgacctgccgcccgagcgcattgctaatggagccggcctgcaaaacttcctgcgcgtgctctcgatggcgctcggatcgtccctgactcaaacctattgggagcacatgtcgaaggcaagccggtccgagctagtttccatcatcgatccgaatgcagggcatgaaatcgcttctgcggcagtgcacgccggaataccgccatcgagttctacagcatttttctcgcgcctggtcgatggtcaggctgtgatgctggctacgaacgatttttatgcgctggctaccgtgctgatgatcctctcgatcggtgctatctggttggtcaagcggccgaaggggccactccagaaagtcacggggcattga

SEQ ID NO: 325801 - DNA, 945 bp, Pseudomonas aeruginosa
atggaaatacgccatcttcgctgctttattgcagtcgccgaggaattgcattttgctcgcgctgccgagcggctgcacattgaacagtctcccctatcgcgcgcgatcaaagagctggaagatgacttgggtgcacagcttttcgtgcgcaatacacgcagcacccgactgactcgcgcaggccagctatttctggaacacgtgccgcgcgtcttcacggctttgcagcaggcgcgcgacagtgtgaaggcggctgccaacggctttcataaccagttacgcgttgcgctatcagatggcatcccgccctcgcgcttctcaacctttctagcattgtgtcgcgaagaagaaccggaaatcgagatacgtctatccgaagtttcgctggcccagcagatcaaagggctgcacgacgatctctacgacgtggggtttgctcggtcggatgaggttggcgacggcatcgtcgccgaagctgtctggagcgatcctttgatggtggcggtgccctctcggcaccctctgttgacgtacaagcgtatcccactggaggaagtgctgcgccatccgctggttcttggcgatccccatgcgtgcgagggatatacacggcagattgaaagggtgctgcgtagggtcgatcaagaaccgctgatcgccgaacgggtggcctccgttgacttgatgatggcaatggtggcagcaggtttcgcccttggtctggccggggcttcgcagatcgccgccagccgtgaacagggtgtggtcgcgcggcctctggctggtcgcacacccatgctcaccacttacctgctgcgccggggcaacgagccttcggaagtgttggctcgtttcatcgagagaacaagcactcttgaaccatccgcgacgaagaagccgaccgtactacccgaccttgatgcttcggaggaaatcgagccatga

SEQ ID NO: 325802 - DNA, 249 bp, Pseudomonas aeruginosa
atgaacaagattgtgctgattctgcttgctgcgatgctgaccgcctgcggcaaatccgaacccaccgaaacggtagaggcacttgccgccaatcccgagcgattgaaggaactgcggcaacagtgcaagacggatcgcgccaagctgggcgacgaactctgcaatcgtgtggccgaggcgacgaatcgacggttctttggcgatgggaaggtgccctatacaccgccgaaagagcagccgaagttttga

SEQ ID NO: 325803 - DNA, 1203 bp, Pseudomonas aeruginosa
atgccacacactaggccggccattagtgctgcaaagacggctctcgtgctgtccggtggcggtgcgcgcgccgcctaccaggtcggtgtgcttcaggctttggtgacgttgcgccgcgaacacctgggcgaaggggcgcccaaccccttcggtatcctatgcggaacttcggcaggcgcaatcaacgccgccgctttagcctgtcgcgcggactcctttgacaccggcgtggaagctatcgccgcagtttggcgcaacttcaatgctggtcaggtgtatcgcaccgacgcgcttggtatcgctcgcagcggcgcaaagtggttgagcgctatctcggtaggctggatgttggcacgctggcgcaaagaagggccgcattcactactggacaatggaccattagccgaactgctgcgacattgggcgcctttggaactgctgccgcacatgctggcccagcgccatctgcgtgcgctggcgatcggcgcgtccagttacaccagcggcgagcacttcaccttctttgagtccaccggcgatatgacgggctacgaacgctcgcagcggctggccgtgcccatgcggctgggattggcacacctgctcgcttcggcggctatcccattcgtgttcccggcacaacgcatcgaacatacggagcatgccggctggtacggcgacggctcgatgcggcagaccgcgccgatctctccggccatccacctgggcgcgcaacgtatgctcatcgtcggcgttggtcggatgcacgaacctcgcgggcgactcgtgcgtaacggcggctacccgacactggcccaagtcggaggacacgtgctgtcgaacatatttatcgacgcgctcacggtggacatcgagcgtatggagcgcgtcaaccgtacccttggaatgatgacgctgggccagcgcctcgccacatcactacgtccggtgaaggcgctggtgattgcgccgagcgagcgcatcgacgacatcgcggcacgccaccaaaagcacctacctcgggccgtacgcgccctgttgcgcggcgtcggctcgtccagcgcgagcggcgacctgagcggcgccgccctggtcagctatctgctgttcgaggctccattcacacaggaggtaatggcgctgggtgagcgcgacacgctggcgcaacggcaggcagtctgcgaatttttcgggtggctctga

SEQ ID NO: 325804 - DNA, 1998 bp, Pseudomonas aeruginosa
atgcaaggtcaaggtgtgctgttcgggcaaatcggtgtcgtgttcggcatcgtaattgtcggcgtgtggagcgccacgcagtggacagccgccgccctgggctatcaagtacgccttggctcgccctggttcgacttactcggcacgccggtctatcacccttggcgcttgttcgagtggtggttctcattcgatgcctacgcaccgcgcatctttgacaccggcggcgcaatcgctggcggcagcggcctggtggccgtgctggtcgctattgccatgtccgtatggcgctcgcggcaatcgaagctggtcacgacttatggctctgcacgctgggccgaagccgcagacattcgcaaggccggcctggacaagcctgccggcgtgtttctcggcctgcatcgtggcctatacctgcggcatgaaggcccggaacacgtcctgaccttcgcgccgacgcgctccggcaaaggcgtcggcctggtagtgcccacgctgttgagctggccagcgtctgccgtcatccacgacatcaagggcgagaactggcagatcacggccggctggcgttcgcgcttctcgcactgcctgctgttcaacccgaccgatccgaagtcggccgcgtacaacccactgctggaagtccggcgcggcgcgcatgaagttcgcgacgtacagaacatcgcggacatcctcgttgatcccgaaggtgcgctcgaacgccgcaaccactgggagaagacttcgcacgcgctgctggtcggcgccatcctgcatgtgctctatgcgggcgaggacaagacgctgcgcggcgtcgccaacttcctgtccgatcccgcgtgcccgttcgagctgacgctgcaccggatgatgaccacgcggcacctgggcgacgtgccgcatcccgtcgtcgcatcggctgcgcgcgaagtgctcaacaagtcggacaacgagcgatcgggggttctgtccacggccatgtcgttcctcggcctgtaccgcgaccccaccgtggccgaagtcacgtcgcgctgcgattggcgcatcgccgacctgatcgcttccgagcatccggtgtcgctgtatctggtcattccgccttcggatatcagccgcacgaagccgctgatccgattgatcctcaaccagatcgggcggcggctcaccgaatctctcgatggcagcgatggcatcgagcgtcgccaccggctcttgctgatgctcgacgagttcccggcgctgggccggctcgacttcttcgagtcggcgcttgccttcatggctgggtatggcatccgcagcttcctcatcgcgcagtcgctcaaccagatcgacaaggcgtatgggcaaaaccattccatcctcgacaactgccacgtccgggtgacgttcgccaccaacgacgaacgcaccgccaagcgcatctcggaaacgctcggcaccgccaccgaactgcgcgcgcagcgcaactatgccgggcacagattggctccgtggctcgggcatctcatggtgtcgcggcaggaaaccgcgcgtccgctgctcacccccggcgaggtgatgcagcttccgcccgacgagtcggtggtgatggtgtccagcctgccgccgatcaaggcgaagaagctgcgctactacgccgacgccaacttcaagcagcgcgtgttgtcgccgcctgcgctcgcagccgggcgctatgccgatgcgccgccagcccgacccgacgactggagcggcttggcgattcccgccgtacccgccgcgccagccacggcatccgccgatgacctgggcagcgccgacgacggcggcccgcgccgtcaacccgaactctccgaaaccgtcgcctacgaccccgagtcggacgcgcacgcgaccgacctggcgctgctcgatgacgacgacctgccgctgccgcttcccggccagctcgaccccgcgatgcagcgcacggcccggctggcatcgctgaaccctaacgacggaatcgacctatga

SEQ ID NO: 325805 - DNA, 474 bp, Pseudomonas aeruginosa
atggttgaaagtaataagaccgctgccgatacctattcgctcgctattttccgcgccatccgccgcctccagcaggccgctgaaatccactccaagcgtctcagccgatacggcggcctgaccccgctgcaattgctgatcctgcatgtcctggcggtggagggagaactgaccgcgacgcaactggccaagctggtcagcctgtcccaggcatcgctctccggcgtgctcgaccgcctcgaaggacgcggcctgctctatcgtcggcgcgacgaacaggaccggcgcaagtcctggctgcacctcgacccggccggccacgaagccctggcggaagcgccgccgctattgccggagtacgtgatcgagcgcttcgccgcgttgcccgagtgggagcgccacggcctgctggccgcgctgctgcgcgcggccgacctgttcggcctgccggaagaggacgtcgaagaagagtga

SEQ ID NO: 325806 - DNA, 1758 bp, Pseudomonas aeruginosa
atgaaaggccacttgcatctgcctcacccgcacaaccagcgcctgcaacgtatccaggcgcccacctacgaacgcctgcaggcgcgtctcgccgaagatcacagcgagcccaccgagaaaccgctgagcatccactgcggctggggccgcctgctgatcgggcagacctacccggacgccgaggaactggcccgcgacctgttgcaggaagcccccggcgaacgcgacatcgcgctctacgtggcggcgccgcagcaggtcctggcccacgccccgcagcagctcttcctcgatccctcggataccctgcgcctgtggttcaccgactaccgcccggcgcgccgtccgccacgcggtttccgcatccgccgggtgcataccgaggaggactgggcggcgatcaaccgcctgtacctggcgcgcggcatgcttccggtgcagaccgagcgcctcagcccgcgccaccagggcgggccgatctactggctggccgaggacgccgacactggcgtcgcggtaggcacggtgatgggcctcaaccacgccaaggcgttccaggacccggaggggggctccagcctctggtgcctggcggtggacccgcaatgcagccggccgggcgtcggcgaggcgttggtgcggcacctggtcgagcacttcatgagccgcgaactggcctacctcgacctctcggtgctgcacaacaaccagcaggccaaggcgctctaccgcaagctcggcttccgcgaactggcgaccttcaccatcaagcgcaagaacggcatcaaccagtcgctgttcctcggccccggcccggaggaagacctcaacccctacgcccggatcatcgtcgacgaggcccaccggcgcggcatcgaggtgcgcgtcgacgacgccgagggcggcctgttcaccctgacccagggcggccggcagatccgctgccgtgaatcgctctccgacctgaccacggcggtaagcatgaccctctgccaggacaaggtcctcacccaccgcgccctgcagcacgccggcctgcgccagccgcagcagcgcctggccggcagcgcggaggaaaacgccgcgttcctcgccgagcacggttcgctggtggtcaagccggtggacggcgagcagggccagggcgtggcggtggacctgcgcaccgcggaagaggtcgaggaggccatcgaggccgcccgccatttcgattcgcgcgtgctgctggagagctaccacgccggccacgacctgcgcgtgctggtgatcggctacgaggtggtggccgccgccatccgtcgtcccgccgcggtgatcggcgacggtcggcacagcatccgcgagctgatcgaggcgcagagccgccggcgccaggccgccaccggcggggaaagccgcatcccgctcgaccacgagaccgagcgcaccctgcgggccgccggctatggctacgacgacgtgctgcccagcggcgaacacctggccgtgcggcgcaccgccaacctgcacaccggcggcatcctcgaggacgtcaccgacgccctccatccggccctccgcgaggccgcgatccaggccgcgcgggccctggaaataccggtggtgggcctggacttcctggtcgaggccgccgaccagcccgactacgtgatcatcgaagccaacgagcgcgccggcctggccaaccacgagccgcagccgaccgccgaacgcttcgtcgatcttctcttccccctcagccgcgaggtgccttcatga

SEQ ID NO: 325807 - DNA, 2529 bp, Pseudomonas aeruginosa
gtggatgcgctcgaagccctcggcgacgatcgcctccaccccggccaggcgcacgcccttggccgcccagtcgcgcgaagaaccctgcccgtagtcggcgccggcgacgatgatcagcggctgcttgcgctccatgtaggtctcgatggcttcccacatgcgcatcaccttgccttccggctcgacccgcgccagcgaaccctgcttcacgctgccgtcggcgttgcgcaccatctcgttgaacagcttcgggttggcgaaggtcgcgcgttgcgcggtgaggtggtcgccgcggtgggtggcgtaggagttgaagtcctcctcgggcaggcccattttcgccaggtactcgcccgccgcgctgtcggcgaggatcgcgttggacggcgacaggtggtcggtggtgatgttgtccggcagcaccgccagcgggcgcatgccgcgcagggtgcgttcgccggcgagggcgccttcccagtacggcgggcggcggatgtaggtgctcgtcgggcgccaggcgtagagcgggtcgaccttctcgcgctcgccgtgggtgatgtcgaacatcgggatgtagacctggcggaactgctcgggcttcaccgccgccctgaccactgcgtcgatctcctcgtcgctcggccagaggtccttcaggcggatctccttgccgtccaccacgccgagcacgtcgcgctcgatgtcgaagcggatggtcccggcgatggcgtaggccaccaccagcggcggcgaggcgaggaaggcctgcttggcgtaggggtggatgcgcccgtcgaagttgcggttgccggagagcaccgcggtggcgtacaggtcgcgctcgacgatctcctgctggatcgccgggtcgagggcgccggacatgccgttgcaggacgtgcaggcgtaggccaccacgccgaagccgagggcttccaggtgcggcagcaggccggcttcgcgcaggtattcggtgaccaccttggagccgggtgccagcgaggtcttcacccatggcttgcggaccaggccgaggcggtcggcgttgcgcgccagcaggccggcggcgatcacgttgcgcgggttgctggtgttggtgcaactggtgatcgcggcgatgatcaccgcgccgtccggcatcaggccctcggcttcctcggcgcgggcccgctcgaggttgccggcgatgcctttcgccgccagttcgctggtggcgaccctggcgtgcggattggacgggccggccatgttgcgcaccacgctggacaggtcgaacttcagtacccgctcgtactcggcgtcgaccaggctgtcggcccagagtccggcggtgcgcgcataggcctccaccagggcgacctgctcgtcgtcgcggccggtgaggcgcaggtagtcgatggtctgctggtcgatggcgaacatcgccgcagtggcgccgtattccggagccatgttggagatggtcgcgcggtcgccgagggtcaggctggaggcgccttcgccgtagaactccaggtaggcgccgaccaccttctgcttgcgcaggaactcggtcagggccagcaccacgtcggtggcggtgatgcccggctggcgacggccgctcagctcgacgccgacgatgtccggcaggcgcatccaggaggcgcggccgagcatcacgttttccgcttccaggccgccgacgccgatggcgatcacgcccagggcgtcgacgtgcggggtatggctgtcggtgcccacgcaggtatcggggaaggccacgccgtcgcgcgcctggatcaccggcgacattttctccaggttgatctggtgcatgatgccgttgcccggcgggatcacgtcgacgttgcggaaggcctgcttggtccagtcgatgaagtggaagcggtcctcgttgcggcggtcctcgatggcgcggttcttggcgaaggcctcggggtcgtagccgccgcattccaccgccagcgagtggtcgacgatcagttgcaccggcaccaccgggttgacctgggccgggtcgccgcccttgtcggcgatggcgtcgcgcaggccggcgaggtcgaccagcgcggtctgcccgaggatgtcatggcagaccacccgcgccgggtaccaggggaagtcgaggtcgcgcttgcgctcgaccagttggcgcagcgaagcctccagggtcgccgggtcgcaacggcgcaccaggttctcggcgagcacgcgggaggtatagggcagcttggcgtaggcgccgggctggatcgcctcgaccgcctcgcgggcgtcgaagtagtccaggcgggtgccggggagcggtttgcggtgtgcgctgttcatggctcggactcaatcacggggtgttcggaagcgtgtcgctcgcgccgtggcgcagcccacgccggcctttcgaattctgggtgcggcaaccgtccggcgcgctcgcgttcggcgcgccggacggcgtggatcagcgttgctccagcggcacgaacgcgcgctgctcgacgccggtgtactcggcgctcgggcggatga

SEQ ID NO: 325808 - DNA, 324 bp, Pseudomonas aeruginosa
atgctgctggtcttcggcctcaacctgctggccttcaccgctctctgcctggccatgaaccgccaccacaagaacctcctcggccaccagccgtcggcttcccgggtgtttctgctacgcggcgtggcgctgctcgacctgggcctggcgctggccttctcgatccaccggcagggcgtggagatcggcatcgtcttctggtcctgcctgctgatgctggcggccggcacgctggtcctgctgctcgcctggcggccacgctgggcattgccttgcgccgccggagtgccgttgctcggcggggtgctggcgctgctgcgctga

SEQ ID NO: 325809 - DNA, 303 bp, Pseudomonas aeruginosa
gtgctccacgccgagttgacctacgccagcccgaacggcgccaacggcatgctgatgctcggttcgagcgtccgcgacaacgcctacggtcggctgatgcggcacgtcgacgaagccggcggcaatacccagagcctctacctggtggtcgccgatcccgacgccctgttccgcagcgcccaggccgccggcgccgagatcgtcatcgacatcaaggacgaggactacggcggtcgcggcttcacttgccgcgatccggagggccacgtctggagcttcggcagctatgatccctgggcatga

SEQ ID NO: 325810 - DNA, 771 bp, Pseudomonas aeruginosa
atggcggcattgagggcgagcaggttggtctgttcggcgatcgagcggatcaccgtcagcacgctgccgatggtcgccgactcctcggccaggcgctcgatcgactgggcgttgccctgcacctcgtcgaccagctcgcgcaggccgcccaggctctcgccgatcacccgctggccgtgctccactgcctggcctgcgctgcgactggcgtcggcggtctggctggcgtctccggcgacctgctggatcgccgcttccatgtcgccgagggcgtcgcggatctgcccggtatcgccggcctggcgctcgaccccggcatgcaggccgctgctgacctcggccagggtctggctgctgccggcgacctgttcggcgcggcggtggatcgcgccgaccagctcggcgaggaagctgcgcaggcggttcagcgaatcttccaggttgcgcaggtcctcggtgcgggtacgcagggatatggggcgtgagaagtcgccgtcggcccaggccgagagcgccggcaccagttgcccgaggacccgtgccaggcgcctttgcaggctgtcgatggcgagggcgatgagcaggatcagggcgatcatcccaccctggatcaggcgtacctggctttgcaggcgctggcgctcgccgcgcacctgcggctccagggtggccagggcctggcgcaccgcgtccagtctggcgccggtgtcggcggacagttgctggcgacgctcgatcaggtcgcgggtgcggcgcaactcgtccggatag

SEQ ID NO: 325811 - DNA, 1206 bp, Pseudomonas aeruginosa
atgcagcgcctgggcccgggagtcgtcgacgatcagtacccggtagggttcgtagaagctcaggcggctgagggtctcgatcttttccagcacgctggaggcgtccagggtgccggtgaagaattcctggccgccggcgcgggctgcggccaggcgggtcggggtgtcggtctcgctgtcgctgaagaacagcaccggcagcttgtgttcgaggccggcctgggcctcgctggccagtcgcaggcccatgtcggggccggcgaagtcgacttccatgacgatcgccgccgggtagcgttcgcgcatgctggcgcggaaggcgtcggcggtctcgcagctcagcgcctgcagaccgaagaactccagttgctgggccaggcgctcggcgcgttcgcggtccttcagtgccaggtagaccggtttgcgcaatggcggcaggacggtgtgctcgagctggtcgccatgccgcaggccggtgcgcgacaggcgctgcatcaactggttgagttcgctgatcgactcgctggaaagccggccgcggttggcctcgacgacgtccagggtacggtcgatggcaccggccagctgggcatgctcggcttgctcgaagcgttcggcgtagcgctgcaggcgcagggtggcgtcggccagttcttccatgccgtcgctgttccactccgcgcgggtcaggcgttgccagacctccagaacctggcgcgcctggttgatcactcgctgggcgaagtggtgcttcaggcggtccagggtcgggtcatcgtgctcggtcatcatgacgcgcttctttcgtggtcttcgcggcagagcgtcgctgcgaatgatggctctatgctatcacctatcgccatgaaagccagcggccgttgggcggctgacgagaggagccttttcttttccaaatgtcatccccacctgttggtgggtgcctttgtgcgacggactacggcatgcttatgcctgtttcggaaaattctcactgagcattccggcacaaaaccggcttccactacgctgaaagccgacgatgccgaggttttcggcgtcctggaagggttggcgcttggcacggaacgcgttcgccatggtccaatcccccatctatcgagctgttttaaggacccttgccatgctggactggaagaagcgtcgtgggaccatgcgcgatcgcgtggacaattccgtggatga

SEQ ID NO: 325812 - DNA, 1866 bp, Pseudomonas aeruginosa
gtggccgacagccgcggcgtatacggcatccgccactggggtgcgggttatttcgccatcaacgatggcggcaatgtcgaagtgcgtccgcagggcgccgactcgacgcccatcgatctctacgagctggtcggccagttgcgcgaggcgggcctgagcctgccgctgctggtgcgcttcccggatatcctgcaggaccgcgtgcgcaagctcaccggcgccttcgacgcgaacatcgagcgcctcgaataccagagccgctataccgcgctgtatccgatcaaggtcaaccagcaggaagcggtggtggagaacatcatcgccaccgagaacgtctccatcggcctggaggcaggctccaagccggaactcatggcggtgctggcgctggccccgaagggcggcaccatcgtctgcaacggctacaaggaccgcgagttcatcaagctggcgctgatggggcagaagctcgggcacaacgtgttcatcgtgatcgagaaggaatccgaggtgcagctggtgatcgaggaggccgccaacgtcggcgtgcagccccaggtcggcctgcgcgtgcggctgtcctcgctggcttcgtcgaagtgggcagacaccggtggcgagaaggccaagttcggcctttccgccgcccagctgctgtcggtggtcgagcgcttccgccaggccggtctcgaccagggcgtgcgcctgctgcatttccacatgggctcgcagatcgccaacctggccgactaccagcacggcttcaaggaagccatccgctactacggcgagctgcgcgcgctcggcctgccggtggatcacatcgacgttggcggtggcctcggcgtcgactacgacggcacccattcgcgcaacgccagctcgatcaactacgacatcgatgactatgccggcgtggtggtcggcatgctcaaggagttctgcgacgcccagggcctgccgcatccgcacatcttctcggagagcggccgggcgctgaccgcgcaccatgcggtgctgatcacccaggtcaccgacgtcgagcggcacaacgacgacgtgccgaagatcgtcgatctcgacgagcagccggagatcgtccgctggctggccgaactgctcggcccgaccgatgccgagatggtcaccgagacctactggcgcgccacccactacatcggcgacgccgccgcgcagtatgccgacggcaagatcagcctggcgcagaaagccctcgccgagcagtgctacttcgctatctgccggcgcctgcacaaccagctcaaggcccgccagcgctcccaccggcaggtcctcgacgaactcaacgacaagctcgccgacaagtacatctgcaacttctcggtgttccagagcctgccggatacctgggccatcggccaggtgctgccgatcctgccgctgcaccgactgggcgaggagccggatcggcgcgcggtactgcaggacctgacctgcgactccgacggcaagatcacccagtacgtcgacgagcagagcatcgagaccagcctgccggtgcacgaggtgaaggagggcgaggactacctgatcggggtgttcctggtcggcgcctaccaggagatcctcggcgacatgcacaacctgttcggcgacaccgactcggtgaacgtctaccagcgcgcagacggcggcatctatcacgccggcatcgagacccacgacaccatcgaggacatgctgcgctacgtgcacctgtcgccggaggaactgatgaccctctaccgcgacaaggtcgccggggccaagctcaccgcccgcgagcgcaaccagtacctggatgcgctgcgcctggggctgacccgctcggcgtacctgtcctga

SEQ ID NO: 325813 - DNA, 1155 bp, Pseudomonas aeruginosa
atgcccaactccatctccaattcctcccgcctgcacagcatcgacgccctgcgcggcctggtgatgctgttcatgctgctcgaccatgtccgcgagacctttttcctgcaccgccaggtcggcgacccgatggacgtcgccagcaccgagccggcgctgttcctcagccgcaccctggcgcacctgtgcgcgccggtgttcgtcttcctcaccggcctgtcggcattcctctacggcgagaagcaccagggacgccgggcggtctcggcgttcctgttcaagcgcgggttgttcctggtggcgctggaactgaccctggtgaacttcgcctggaccttccagttgccgccgacggtgatctacctccaggtgatctgggcgatcggcctgagcatgctcgccctggccgccctgctctggttgccgcgccctctgctcgcggcgctcggcgtgctgctggtggccggccacaacctgctcgatccgctgcatttcgctcccggctcggcctggcacctgccgtgggcggtgctccacgaccgcggctggatcgaagcgggcgacgccctgcgcctgcgcacctcctaccccctgctgccgtggatcggtgtgatcgccctgggctatgccgcaggcaactggttcagcggcgccacgccggcgaccacgcgccgacgctacctgctggcgggcggtggcgggctgctgctcggcttcatcctgctgcgcctgctcaacggctatggcgagaaaccctgggccttcggcgagacgccggcgatcaccctgatgggcttcttcaacgtcaccaagtatccgccgtcgctgctgttcctcgccctcaccctgggaatcggcctgctgctcctggcctggttcgaacgcctggactggagcggtcgcggcaaggccctggtggcgttcggcggagcgccgatgttcttctacctgctgcatctctacctactgaagctgctgtacctgctggcgctggcgatctggggcgccaaccggggcgactacttcggtttctcctcggtgccggcgctatggctgtgcagcatcctgctggccgtggcgctgtacccggcggtgaactggttcgccggtttcaaggcgcggcggcgggatatcgcctggttgaagtacttctga

SEQ ID NO: 325814 - DNA, 1302 bp, Pseudomonas aeruginosa
atgaacgccgctgatgagagcctgggcaacgtcctgctggtcggtctgggcgcggtggcgatccaggtcgcgctggacctgcgccgccacggtgccggtcgcctcggcgcgctgaaccatcccggccggcgcagccagcggatcgccgaggccctggcgcgcggcgcctgcctgcaattggaagggcaggggcagcatcgctggctgtccggcaacgccgcgttggacgtcttccaccaggaccccgctgaacttcgcgacgattggcagaccctggtgctctgcgtgccggccgacagttacctggacgtggtccgcgggttgccctgggagcgactcggcggggtgcgcacgctgctgctggtgtccgccttcatcggcgccaacctgctggtgcgcagcgccctgccggcggggtgccaggcgaccgtgctgagcctgtccagctactacgcggcgaccaaggtgatcgacgagacacaaccgctgcgggccctgaccaaggcggtcaagcgcagggtctacctgggttccagccggccggactgcccggcgcgggagacctggcggcgagtcctggccggcagcggggtggaggtggtacccctggcgacgccggaagcggcggagggccgcaacgtcaccacctacgtgcacagtccgttctttctcggcgagttcgccctcgcccggatactttccgagcaggggccgcccggtttcatgtacaagctctacccggagggacctatcacccccggggcaatcggcgccatgcggcggctgtggtgcgagctgagcgaactgttgcggcggatgggcgccgagccgctgaacctgctgcggttcctcaacgacgacaactacccggtgcacgagacgatgctgccgcgcgcggccatcgacggcttcgccgaggctggcgccgagcgccaggaatacctgctgttcgtgcgctacgcggcgttgctggtcgatccgttctctccggccgacgagcagggtcgccacttcgacttttccgccgtgccgttccgccgcgtcagtcgcgacgaggatggactctggcggctcccgcgggtgccgctggaggactaccgcaagctggcgctgatcgtcgcgctggccgcccacttcgacctggccatgccgcaggcgcgcagcctgctggcgagctacgagaacgccgtgtcccgattcatcgattgccaaggagcgagccagtgccatccaagcctgtatccgatcgacagccgtccggcggcggacgccatctatcgccagtggtgctcgacctgctga

SEQ ID NO: 325815 - DNA, 921 bp, Pseudomonas aeruginosa
atgatcaccggtgctgcccagatggacggcgcgatcctggtttgctcggctgccgacggccccatgccgcagacccgcgagcacatcctgctgtcccgccaggtaggcgttccctacatcgtcgtgttcctgaacaaggctgacatggtcgacgacgccgagctgctggaactggtcgagatggaagttcgcgatctgctgaacacctacgacttcccgggcgacgacactccgatcatcatcggttccgcgctgatggcgctggaaggtaaagatgacaacggcatcggcgtaagcgccgtgcagaagctggtagagaccctggactcctacattccggagccggttcgtgccatcgaccagccgttcctgatgccgatcgaagacgtgttctcgatctccggccgcggtaccgtggtaaccggtcgtgtagagcgcggcatcatcaaggtccaggaagaggtggaaatcgtcggcatcaaggcgaccaccaagaccacctgcaccggcgttgaaatgttccgcaagctgctcgacgaaggtcgtgctggtgagaacgttggtatcctgctgcgcggcaccaagcgtgaagacgtagagcgtggccaggtactggccaagccgggcaccatcaagccgcacaccaagttcgagtgcgaagtgtacgtgctgtccaaggaagaaggtggtcgtcacactccgttcttcaagggctaccgtccgcagttctacttccgtaccaccgacgtgaccggtaactgcgagctgccggaaggcgtagagatggtaatgccgggcgacaacatcaagatggttgtcaccctgatcgctccgatcgccatggaagatggcctgcgcttcgcgatccgcgaaggcggccgtaccgttggcgccggcgtggttgccaagatcatcgagtaa

SEQ ID NO: 325816 - DNA, 312 bp, Pseudomonas aeruginosa; identical to SEQ ID NO: 322011

SEQ ID NO: 325817 - DNA, 636 bp, Pseudomonas aeruginosa; identical to SEQ ID NO: 322012

SEQ ID NO: 325818 - DNA, 603 bp, Pseudomonas aeruginosa
atgcaattgaatgtgaacggcgctcaggctatcgaagtctccgagcgtacctttggtggcgaattcaacgagaccctggtgcaccaggcagtcgtggcctacatggctggcggccgtcagggcagcaaggcgcagaagactcgctccgaagtctctggtggtggcaagaagccgtggcgtcagaagggcaccggtcgtgctcgcgctggcaccatccgtagccccatctggcgtgggggcggcaccactttcgccgctaaaccgcgtagccacgaacagaagctgaacaagaagatgtaccgcgcagcactgcgctccatccttgccgagctcgttcgtctggaccgtctggtcgtcgttgccgacttcgctgtcgatgcaccgaaaaccaagggcctggttgccaagctggacaccctgggtctgaaagacgtgctgatcgtgaccgatggtgtcgacgagaacctgtacctcgctgcgcgcaacctggcgcacgtcgatgtacgtgatgtccaaggttccgaccccgtcagcctgatcgcctacgacaaggtgctggtcaccgtgtccgccgtgaagaagttcgaggagctgctgggatga

SEQ ID NO: 325819 - DNA, 300 bp, Pseudomonas aeruginosa; identical to SEQ ID NO: 322014

SEQ ID NO: 325820 - DNA, 822 bp, Pseudomonas aeruginosa
atggcaatcgttaagtgcaaaccgacttccgctggtcgtcgctttgtcgtcaaggtggtgaatcaggagctgcacaaaggcgctccctacgcaccgctgctggaaaagaaatccaagtctggcggccgtaacaacaacggtcgtatcaccacccgtcatatcggtggtggtcacaagcagcactaccgtctggtcgacttccgtcgcaacaaggatggcatccctgccatcgttgaacgcgtcgaatacgatccgaaccgcactgcacacatcgctctgctgaagtatgcagacggcgagcgtcgctacatcatcgcccccaagggcgttgctgcaggtgaccagctgatctccggtatcggtgcgccgatcaaggcaggcaacagcatgcctctgcgcaacatcccggtgggtagcactgttcatggtatcgagctgaagccgggtaaaggcgctcagatcgctcgctccgctggcgcttccgcccagctggtcgcgcgtgaaggtgcgtacgtaaccctgcgtctgcgctccggtgaaatgcgtaaagtcctggctgagtgccgtgcgaccctgggcgaagtctcgaactccgagcacagcctgcgttcgctgggtaaagccggtgctacgcgctggcgtggtgttcgcccgaccgttcgcggcgtggcgatgaacccggtcgaccacccgcatggtggtggtgaaggccgtacctctgctggtcgtcatccggtatcgccgtggggtcttcagaccaagggtaagaagactcgctcgaacaagcgtaccgataacatgatcgtccgccgccgcaagtaa

SEQ ID NO: 325821 - DNA, 276 bp, Pseudomonas aeruginosa; identical to SEQ ID NO: 322016

SEQ ID NO: 325822 - DNA, 333 bp, Pseudomonas aeruginosa; identical to SEQ ID NO: 322017

SEQ ID NO: 325823 - DNA, 687 bp, Pseudomonas aeruginosa
atgggtcagaaagtacatcccaatggcattcgcctgggtatcgtcaaggagcacacctccgtttggtacgcagaccgcaagaactatgcggattacctgtttgccgacctgaaggtgcgtgagtacctccaagacaaactaaaaagcgcgtccgtaagccgtatcgatattcatcgtccggctcaaaccgcacgcatcaccatccacaccgctcgtcccggcatcgtgatcggcaagaaaggtgaagatgttgagaaactgcgccaggacctgaccaagcaaatgggtgtgcccgtgcacatcaacatcgaggaaatccgcaagccggaactcgatgccatgctggttgcgcagagcgtagcccagcagctggagcgtcgcgtaatgttccgtcgcgccatgaagcgcgccgtacagaacgccatgcgcattggtgccaagggcatcaagattcaggtcagcggtcgtctgggtggggctgaaatcgcccgtaccgaatggtatcgcgaaggtcgtgtgcccctgcacaccctgcgcgccgatatcgactatgccacctacgaagcgcacaccacttacggtgtgatcggtgtcaaggtttggatcttcaagggcgaggtcatcggtggccgccaggaagagctgaagccggttgcacccgctcctcgtaaaaaagctgctaggtaa

SEQ ID NO: 325824 - DNA, 414 bp, Pseudomonas aeruginosa; identical to SEQ ID NO: 322019

SEQ ID NO: 325825 - DNA, 192 bp, Pseudomonas aeruginosa; identical to SEQ ID NO: 322020

SEQ ID NO: 325826 - DNA, 267 bp, Pseudomonas aeruginosa; identical to SEQ ID NO: 322021

SEQ ID NO: 325827 - DNA, 369 bp, Pseudomonas aeruginosa
atgattcagactcaatccatgctcgatgtcgctgacaacagcggcgcgcgtcgtgtgatgtgcatcaaggtgctcggcggttcccaccgccgttacgccggcatcggcgacatcatcaaggtcaccgtcaaggaagcgattccgcgcggcaaagtgaagaagggccaggtcatgactgccgtggtcgttcgcaccaagcacggcgtgcgtcgtaccgacggttccatcatccgcttcgacggcaacgccgccgtcctgctgaacaacaagcaggagccgatcggcacccgtatctttgggccagtgactcgtgaactccgtaccgagaagttcatgaagatcgtctcgctcgcccccgaagtgctgtaa

SEQ ID NO: 325828 - DNA, 246 bp, Pseudomonas aeruginosa
gtgctgaaggttctcgctgacgaccgtctggtcgtcggcggggtgaacctgatcaagcgccacaccaagcccaatccgatgctcggccaacagggcggtatcgtcgagaaggaggcgcctctgcacgtctccaacgtcgccatcttcaatactgaaaccagcaaggctgaccgcgttggcttcaaggtagaagacggtaagaaaattcgtgtcttcaagtcgacccagaaaccggttcaggcttga

SEQ ID NO: 325829 - DNA, 540 bp, Pseudomonas aeruginosa
atggcacgattgaaagaaatttatcggaaggaaatcgcgcccaagctgaaagaagagcttcagctggcgaacgtgatggaagttccgcgcgttaccaaaatcaccctgaacatgggtcttggcgaggcggtcggtgacaagaagatcatcgagaacgccgtagccgatctggaaaagatcactggtcagaagccggtcgtgacttacgctcgtaagtccatcgcaggcttcaagatccgtgaaggctggccgatcggcgtcaaggtcaccctgcgtagcgaccggatgtacgagttcctggatcgtctgctgtccatctccctgccgcgcgtgcgtgacttccgcggcctgaatgccaagtccttcgatggtcgcggcaactacagcatgggcgtgaaagagcagatcatcttcccggaaatcgattacgacaagatcgatgcgctgcgtggcctggacatcaccctgaccaccaccgctcgtacggatgacgaaggtcgcgccctgctgcgtgctttcaaattcccgttccgtaactga

SEQ ID NO: 325830 - DNA, 306 bp, Pseudomonas aeruginosa
atggctaaagagagcatgaagaaccgcgagctgaagcgtcagctgacggtagccaagtacgccaagaagcgtgccgagctgaaagcgatcatcgctaatccgaactcctctgcggaagagcgttggaatgcccaggtcgccctgcagaagcaaccgcgtgacgccagcgccagccgcctgcgtaaccgttgccgcctgaccggccgtccgcacggcttctaccgcaagttcggcctgagccgtaacaagctgcgcgaagccgccatgcgcggcgacgtaccgggcctggtgaaagccagctggtaa

SEQ ID NO: 325831 - DNA, 393 bp, Pseudomonas aeruginosa; identical to SEQ ID NO: 322026

SEQ ID NO: 325832 - DNA, 534 bp, Pseudomonas aeruginosa; identical to SEQ ID NO: 322027

SEQ ID NO: 325833 - DNA, 351 bp, Pseudomonas aeruginosa; identical to SEQ ID NO: 322028

SEQ ID NO: 325834 - DNA, 501 bp, Pseudomonas aeruginosa; identical to SEQ ID NO: 322029

SEQ ID NO: 325835 - DNA, 177 bp, Pseudomonas aeruginosa; identical to SEQ ID NO: 322030

SEQ ID NO: 325836 - DNA, 435 bp, Pseudomonas aeruginosa
atgcaactgaacgatctgcgttccgcgccgggtgcccgtcgcgaaaagcaccgtccgggccgtggcatcggtagcggtctgggcaagactggtggccgtggtcacaaaggtctgacctcccgctccggtggcaaggtcgctccgggcttcgagggtggtcaacagcctctgcaccgtcgcctgccgaagttcggcttcgtttccctgaaggccatggatcgtgctgaagtgcgcacctccgagctggccaaggtcgaaggcgacgtcgtcagcctgcagaccctgaaggatgccaacctgatcaaccagcacgtacagcgcgtcaaagtcatgctgtccggcgaagttggtcgtgcggtcaccctgaaaggtatcgccgccaccaagggtgcgcgtgcggctatcgaagcagctggcggtaaattcgaggactaa

SEQ ID NO: 325837 - DNA, 1329 bp, Pseudomonas aeruginosa
atggctaagcaaggtgctctctctgcgctaagcaacggcggtctgtccgagctctgggcacgtctgcgtttcctgttcctggcgatcatcgtctatcggatcggcgcgcacatcccagttccgggcatcaaccccgatcgcttggcggcactgttccggcagaacgaggggaccattcttagcctcttcaacatgttttccggcggcgcgctggagcgcatgagtatctttgcactggggatcatgccgtacatctcggcttcgatcatcatgcagctcatgaccgctatcagcccgcagctggagcagttgaagaaagagggtgagtctgggcgtcgcaagatcagccagtacacccgctacggtactgtagtcctggcactggtccaggccatcggcatgtccgttggcctgggcagccagggcgtagccttctccaacgacttcggcttctacttcgtggctgtcaccaccttcgtggctggtgccatgttcatgatgtggctgggcgagcagatcaccgagcgcggtgtcggcaacggcatctcgatgttgatcttcgctggtatcgttgcaggcctgccgcgcgccatcggtcagtctttcgagtctgcccgtcaaggtgacatcaacatcttcgccctgatcggcgtcggcctgctggccgtggcgatcatcgcgttcgtggtgttcatcgagcgtggccagcgtcgcatcgcggtgcattacgccaagcgccagcaaggccgcaaggtgtttgcagcgcagaccagccatctgccgttgaaggtgaacatggcgggtgtgattcccgcgattttcgccagcagtatcctgctgttcccggcgtccctgggctcctggttcggtcagtcggaaggcttgggttggttgcaggacgtcgcgcaagcgatcgctccggggcagccgctgaacatcttgctgttcactgcagggatcgttttcttctgcttcttctatacagcgctgatgttcaacccgaaggacgtggcggagaacctcaagaagtccggtgcatttattccgggcatccgtccgggcgaacagtccgctcgctacatcgatggcgtgctgacccgtttgaccatgttcggtgctctgtacatgacggctgtctgcctgctgccccagttcctggtggttgcggcgcacgtgccgttctatcttggcgggacctcgctgttgatcgtggtcgtggttgtcatggactttatggcccaggtgcaatctcacctcgtttctcaccagtatgaatccctgatgaagaaagccaacctgaagggctacggcagcggcatgctgcgctga

SEQ ID NO: 325838 - DNA, 357 bp, Pseudomonas aeruginosa; identical to SEQ ID NO: 322033

SEQ ID NO: 325839 - DNA, 390 bp, Pseudomonas aeruginosa; identical to SEQ ID NO: 322034

SEQ ID NO: 325840 - DNA, 621 bp, Pseudomonas aeruginosa; identical to SEQ ID NO: 322035

SEQ ID NO: 325841 - DNA, 1002 bp, Pseudomonas aeruginosa
atgcagagttcggtaaatgagttcctgaccccccgccacatcgatgtgcaggtggtcagtcaaacccgcgccaagatcacgctcgagcctctcgagcgtggttttggtcacaccctgggcaacgcgctgcgtcgcatcctgttgtcctccatgcctggctgcgcagtggtcgaggccgagatcgacggcgtactccacgagtactcggcgatcgaaggtgtgcaggaagatgtaatcgagatcctgctgaacctgaaaggtctggccatcaagctgcacggtcgtgatgaagtgacgctgaccctggctaagaagggctcgggtgttgtgactgctgccgatattcagctggatcacgatgttgagatcatcaacggtgaccacgttatcgccaacctggcagacaacggcgcgctgaacatgaagctgaaggtagctcgtggccgtggctacgagcctgccgatgcacgtcagagcgacgaagacgaaagccgcagcatcggccgtctgcagctcgacgcatcgttcagcccggtccgtcgtgtctcctacgtggtggaaaacgcccgtgtcgagcagcgcaccaacctggacaaactggtcctggacctggaaaccaacggcactctggatcccgaagaggctatccgtcgcgccgctaccatcctgcaacagcagctggcagcgttcgtggacctcaagggcgacagcgaacccgtcgttgaagagcaggaagacgagatcgatccgatcctcctgcgcccggtcgatgacctggaactgaccgtacgttcggccaactgcctgaaggcggaaaacatctactacatcggtgacctgatccagcgcaccgaagtggagctgttgaaaacgccgaacctgggcaagaagtccctgaccgaaatcaaggacgttctggcttcccgtggtttgtccctcggtatgcgcctcgataactggccgccggcaagtcttaagaaagacgacaaggccactgcctga

SEQ ID NO: 325842 - DNA, 390 bp, Pseudomonas aeruginosa
atgcgccatcgtaaaagtggtcgtcacctgagccgcaccagcgcgcaccgcaaggctatgttccagaacatggcggtgtcgctgttcgaacacgaactgatcaaaaccaccctgcccaaggccaaggaactgcgtcgcgttgccgagccgctgatcaccctggccaaggaagacagcgtcgccaaccgtcgcctggctttcgaccgtacccgttcgaaagctgccgttggcaagctgttcaacgacctgggcaagcgctacgccaaccgtccgggcggctacctgcgcatcctgaagtgcggtttccgcgctggcgacaacgcccccatggcgtacgtcgagctggttgatcgtcctgtcggcggtgaagtcgtagaagctgccgaataa

SEQ ID NO: 325843 - DNA, 420 bp, Pseudomonas aeruginosa
atgatcgacccaaccgacaagcaaacccaacccctccccctggagcagccgaagcgcgggcgcggtcggccagccaccggcaaagccctgacggacgcagagcgagcgcggcgctaccgggcgaacaagaaaaagcgtgacgatcaaccgtcacagaaagtcccggaaaatgtcgatctactgaagcaactcgcacaagcgcaagcgcgcatcgccgagctggaggccgaattagcatcacgcgtcacggaaaatgacaaggccgaggcgaagacgtgggcgattcaagagcgtaagggcaaagcgcgctggcagaccatcagcaagggtctgacccggaaggccggagaacgccagttcgacaagctgctgtcgggcctgaacgacccgcgttacagctaccgcatggttgaagaataa

SEQ ID NO: 325844 - DNA, 1233 bp, Pseudomonas aeruginosa
atgctggacaagttgcacctcttcgttccgttccgcctcgagcacatcgaactgctcggggtggaagggcgtgcggatccggtgcatgtcgtggatctggaaagcctgggcgtgccgctgcaagggcagatcagccgagggcagggcggagagctacaggctgactacctgcggcacgcctgggagtcactgagtacgggcttcacgcctttggcgttcaaggtgtttcaccagtccctgggcaagcgcctgatgcccggcgtagagctgaaggccagcccggcgaagttgctccagggacacaacgtgttcggcccaacatgcatcgagaagggggccgaggtgatgttcaagtggctagccggaagctacccggacctcttcgcgaagctcgatgtgtcagcgacgcaggtctacgccctggactgcacgtattccagccgactgccggacgaacgcacggcgctccaggtcattcaggcgctgaccaacgtcagcaacggccacaccaagagtcgcggcgacaactatcagacgtccgcctactggggagcgaaagagtcccgtctgaagcgcctgaaggcgtatctcaaacacaccgagtttcaggcccagttggacgaattgaagcgggcagggcgggccgatctgtcggccgctcggtctgctcgggtcatgtctgacccacggttgcaggagtgggtgcgctacctgctccgcatggaagccacggtgatgcaccggtggctggaacgccggggcatcccgtctcggcttgttgatctgatcgcctaccagcagcggctccagaaagaggggcgctgcctgattcaggagtgctggcaagcggttacagcggaccttttcgcggcctttgagggtatccagatgcgtgtgattgatgatgaaaaagtgctggccgcactgactgagcgacacctgaagtacgaccggaagggcaagcccaacgatagccacgctcggaacctgtttcggacgtaccgcagtctcaaggactacgggtggcaggaaacgatggactccatgtctcgcccgacgttctaccggcacatcaaggaaatctgcgaggccgggctgtcgaaagccgccctgcagaagctccacgaagccgaccgggcgaacaacgttgtgccgctcctgaggttcgtccaagtcgatttcagcgcccagcgccccgactggtacgtcgagccgaccgtggaggccgcgtga

SEQ ID NO: 325845 - DNA, 345 bp, Pseudomonas aeruginosa
atgctcgctcttatcggcctgtgccagggctattactccgatactcgcaacgtcaataccgccaacggtccttcgcagattgttgagcactcggtgctcgtgcaggttgagcaaaccaataagttcggtatgccggaaaccaaggttattcaagtccgcatttcgaagcggcacatggatggcgggcttaataatgtctggaagatggagaagggcaaaactgtgtccgtcccggtatttatccaggcctgggcgagtaagtccggtaacgccggattcgattattggctgtcgggcgacggcatgccgttgaaacttcaaaccgttcaggagaaagccgcttaa

SEQ ID NO: 325846 - DNA, 231 bp, Pseudomonas aeruginosa
atgaaacaactgaaacaactgttttccctgggcaagcgtgaagccgttatcggtggctcgttgctgatggcgtccggcctctccatggccgccgagggcgatatcgacaccactaaggctctggcctatatcgcaggcggcctggctgctgcggcggctgtgaccggtgccatgttcggcctggttgccctgatcggtgcggccaagaaagccatgcgcgcagggacttaa

SEQ ID NO: 325847 - DNA, 420 bp, Pseudomonas aeruginosa; identical to SEQ ID NO: 325843

SEQ ID NO: 325848 - DNA, 1233 bp, Pseudomonas aeruginosa; identical to SEQ ID NO: 325844

SEQ ID NO: 325849 - DNA, 231 bp, Pseudomonas aeruginosa
atgggtgacgtgatgggcgacctgaaccgtcgtcgtggtctgattcaggggatggaggacacggtttccggtaaggttattcgtgccgaggttccgctgggtgagatgttcggttatgcgaccgacgtgcgttccatgtcccagggtcgcgcgagctactccatggaattctccaaatacgccgaagctccgtcgaacatcgtcgaagcgctggttaaaaaacaaggttga

SEQ ID NO: 325850 - DNA, 531 bp, Pseudomonas aeruginosa
atgagcactacgcaacgcacttcccgtccgacgcagggcggtttcgtttccatcgagatgatcatcgtgctgatcatcatcgccatcggggtcggcctgggcctggccgcagcggctggaatgttcagttcgtccaacgccaacgaggaacaacgcaacatcagcgtcattgcggccaacgcacgcgccctgaagacctcttcgggctacggctccagcggtaccaacctgatccccagcctgatcgcaatcaacggcgtgccgaagaacatgagtgtctcctccggcgtcgtctacaacgtctacggcggatcggtcactgtctcgtccaccggcatgggcttctcgatcaccaccagcaagttgccccaggacgcctgtatcacgctggccaccaagatcgcgaagaacaccttcgagcagaccaaaatcaacagcggatcctcgatcaccggagaagtgaccaccgcagccgcgacccaggcctgcagcagcgacagcaacagcattacctggacctatagttcgtga

SEQ ID NO: 325851 - DNA, 942 bp, Pseudomonas aeruginosa
gtgagtgtgaacccgatcatccaggctcagttcgtcgacctctacctcggtgaaggcttcgccgacgtgaaaggcctggccggcgccggcgcgcgccgagtcgaagtgcctcgcgagtgggagtcgcacgtccaggaactgctccagatctgcaggcaaacgctggaggagctgcaggaccctgagttcgccatcgtcgtcgacggcgttctgcttcgcgtcaccctcctcgaagacgctttcagtggcagcgtcttcgtgctgcgccggtcgagcgcccaattgcgggagttccaagagatcggctatccgagcgaagtggtttccgcactgatggatccgcagttgcagggcctggtcctgttctgcggcgagatggcgacaggcaagaccagctccgccgcctctctgctcctggcccgcctgcaggagttgggcggggtgggctgcgccgtcgaggacccgcaggaaaccaacctcagcggtcagcatgggctcggccgctgcatccaggtcagaacctcacggcgctcaggcggatacagcgaggccctgctgcgcacgctgcgggccggcgccgacctggtgctgattggcgagatccgcgacgaggacaccgcctaccaggcctgcaaggcctctctgaccggcagcctggtgatcgccaccattcacgcgaaaagctgtcatcaggcgatcgagcgcttggtgacgctcgcccagccactggcgagaaacgcctacgacgtggttgccgaaggcatccaagctgtgatctgccaagcgctggagagcgatggttcctcgcgccgcctgaccgccgagccactgctgttcactggcgacgacggcccgtccatgcgcgacaagatccgccgaaaggaggctcatctgctgcaggacgaccaagctcgccagtcccggcaaagcctatggagataa

SEQ ID NO: 325852 - DNA, 1329 bp, Pseudomonas aeruginosa
atgaggagtacgcgcagcagtggattcatctcgatcgaactgatgatcgccctcgtcgtgatcgccatcgcgaccgccggtggcatatcggtcctgatgagctacctggacggcttggacgagcagcacgcggcccagcagcaacagcaggtggccaaggcagcggagaagtacctgaaggacaacttcagcacggttctggccagcgccggcgccacggccccggcggtgatcaccgtcccgatgctgcgcaacacccgttacctgcccgcaggcttccgcgacaccaacatctacggccagcaataccaggtcctggcccgcaagccggcggccaaccagctcgaaacgctgatcgtgaccacgggtggacaggtagcttccgaactctcgatccgccggatcgcgcagctcatgggagccaccgggggctacatctcgaaaaccaacaccagtatcgcccagggcgccgcctggcaggtggccttaagcaatttcggtagcgctcccggcgctggacatctggcgacggcgctgttcttccaggacggcgccatcgccaacgagtacctctaccgcaatgccgtcccgggtcatcctgaactcaaccggatgaataccacgctggacatgggaggcaacaatatcgccgcagccggggcgatcacggccagcggcaacatcaccaccagcgcggacatcagcgcgcgcaacgtgacagccactggtacggtgaaagccggcactgctgacgtcgccggcgagacgtacaccggaggctggttcaggacccgtggtgacacgggctggtacaacgagaaatggggcggcggctggtacatgagcgacagcacctgggtgcgctcctggatgaacaagaacgtctacaccggcggcgagatgaaagcgggcaaactcaccgccgagggccggacggaagtcggcgagtacctacagctcaaaggcgtggccaccgaaggagccaactgctcgccgaacgggctggcaggcatcaccagcaccggactctggctgtcctgccaaaacgggaaatggggacgaaccgccgcctccatgcgcctgaacaccacggccggcgtgatcaaggactggtgtacgttgcatggtcaggatagcgccatggtgaactacgactacgtccgctacgcgatcacctgcggcggccgattctgcgcagtgggcttcaaccagacatttggcaccaactactcgttcgggctaatcactgagatcggcccaggcttcaactacccggaaccctacaagacccccgactcgaccaacgtgaccgttacctgcgtgaactag

SEQ ID NO: 325853 - DNA, 438 bp, Pseudomonas aeruginosa
atgccgctgatgtggatcgtcctggtgctcgcgctcatcaccgggacctggctgagtgtacaaagcgaccacgcgacctcgagcgccgaactggccgaggtcgacaccctggccaggagcttgctgctcttccggtccagtctggcggagtacgcacacgccaaccccggtttcaccggttcgccggcggactccgctcttggtttaccggcctggttccgcaagccagcgcggcttcagggctacatcgccgccggcaccagctacgccttcatcgcctcgccgccggcggggctggcggcggccgtggatgctggtacggaatccgacctggttggcgtcaggcgcaacggccagttagtcacgcgccgcctcggagccactgtcattgcgctccctacgcccatccccgagggcgcggtggtcgcggtcaaataa

SEQ ID NO: 325854 - DNA, 174 bp, Pseudomonas aeruginosa
atgaaatcgaaacgttctgcattcgcagacgatctccgaaaaatcggtaccactgccgttgcggcgagcctggtgggcatcttcctcagcgagcaccgcttgctgacggcatatgctttcgtcatgggtatggtaatctggctcataggtatcgctctcaccgaggaggagtga

SEQ ID NO: 325855 - DNA, 135 bp, Pseudomonas aeruginosa
atgtcccagaccgagttcggcatgatcatcatgaccagcctggtggttatctgctccggcatagccctctggttcagttggcctcaggtcaagacctggtgccaaaaacatcggattcttccccgtcatcattga

SEQ ID NO: 325856 - DNA, 489 bp, Pseudomonas aeruginosa
atgagcaacaacacccaagcccaagaagccaagtatttcgacctgcacaccaccggtatcggctacctcaatcgcatccgcgaggtaccgatccgccgaggtgaaccattcctcgccgtaaccgtcgcagccctccatggcgcggcagacagcgtggaatactcctacatcgactgcaaagtggtcggcgcccaggctgaaaagcttgtccgccgttgcaaggaagcagtcgaggccaagaagaaggttctgatttccttccgtatcggcgatatctgggcggatcccttcatccaccagaaaggcgagaaacaaggcaagcccgacgcaagcctcaaaggccggctgctcttcatctcctggatcaaagtggatggcaccaccgtctacgatgcgaaggaagaagctgaaaaagcccagcaaggcaaaggcgaacctcaaggtgagcccgcagcccccgctgagcacgctgaacaagccgctgcttga

SEQ ID NO: 325857 - DNA, 159 bp, Pseudomonas aeruginosa
atgagcaacatccaaatcgtagaactgcccgccctgccggaagttgaggaggttagcctcagcgacgtcgaggacgagctgctgctcagcagtcagttctgcaacttcgcctggctgttcctggccaacaacaatgcccaggtatctgccctggcataa

SEQ ID NO: 325858 - DNA, 201 bp, Pseudomonas aeruginosa
atgcaatacggaaagctggcgctcgcccatctcagcctggaactgccgttgcaggtacttatgaataagaaccgtgcttactacatcggcacttctgacgaagaaggaccagcctcgcgcgagtcggttgaatattacccctcacgcgaacttgcccaacaggcattagaccacggcacttggacgcaactggaatattaa

SEQ ID NO: 325859 - DNA, 153 bp, Pseudomonas aeruginosa
atgctcacagtcggcctgcgccaaagcttcgattgcatcttgaattacatagagctcgatactgagtccggcatcgccaaattcatcaacccggcctttgcactggatgtactcgaacctgctttgtgcagcatgcactccaatgttgagtag

SEQ ID NO: 325860 - DNA, 708 bp, Pseudomonas aeruginosa
atgactcaactcaacccgtttattcgcggctatgagagtttccgcatcgagcgaaacctgcagatcactgacgaaggcaacaatctaccgtgctaccgcgctctgcatgaaacccagcagcacctcccagacgaatattttcagtgcgagctgtgctacttcaataacgatttcgccgtggtagtccaagagttagacgatgaaagagttgaaaaatgccctcaccaaggaatagtgagaaacgtactttacagcatctacggtgagcaggacggcagaaaaaagcttatcggagatcaatactcactgaccgaagccgagagtgtcgttcgatacctttcgttcggcggcggttataacccctgctgggagatcagaaaaacacatctacccatcagcgcgtggaatagcctctacgaaaggttctcgaccaagatgccaatccgcttgccctcggtgttggtatcgctcttctggtgtaacgagcacggtgccgtgggctttcgcttgcacaacaccccttggacggatgagtgtctggagatcctggagatgaccgcagccgctcttcgacaagaacagcttgccttcggcctcgacgaacaccttgtcgatctgcttcacctcgcgggacaagcagacattcggctcctggtacttgatccattcgcgcccacgctcaagggcctgccgctttatgacgattga

SEQ ID NO: 325861 - DNA, 255 bp, Pseudomonas aeruginosa
atgaatccattgttcaccaacctcacccaggaaaccctcgcctacctcgaggaccaactgtccaacaacgacgtcgccggcgacgacgagctcatcgacttgttcatcgaggagctgtcgctgaccttggagcaggcggaagcggctgtcgcgctacgcgatcagtacctctgccaggtcttcctgatcggccaagggccgctgcaccaagccgatggactcagcttcgaccctcacaccaagagcgttcggtag

SEQ ID NO: 325862 - DNA, 606 bp, Pseudomonas aeruginosa
atgcccagtcccaccccgctctaccagatcgaagagtgtccagacctgtacgtcgacgcctgcgtgtgcgacgagcagtgcaacctggtctttctttcggcctggggccgcgacaccgtgacacaagagttcctggccaggctgacgctgggccgggaagaaaatggcatcgaccatttccacatcatcgtggacggccgccgcttacctgtcttcccaaaccaggatctcctggagaaacgcaccacccgtcagttccgcggcacgttgttcggcagcctgctcaatctttggctgttcgatcggcgcgcctcggcgcccgaccgaggcaatcacctcgccttcgcactcctgcagcgcgatgaggatccacaccagaggctctggccgctggtgatggaaacctgtccgctccccctcctgcagcactggcgcgagccggtgatggaggttctcacccagcaccagatgttgacggccctacccgggacgatcggcaacgtctgcgcctggcgactcgccctgcgggtcgacgtgcttgagcccaccctcggtgagctaatccgcgaaagcattcttaccaccgatgctcaggcgcaagcctga

SEQ ID NO: 325863 - DNA, 1317 bp, Pseudomonas aeruginosa
atggcgtttcagcaaaggcgctgggttgagttgaccggtttccaccaggtggctcacggctgcggtcattacgacccggccagggctgatcagcagcggtgcgggtgcgggggccggctcaggttggggctcttcagcttcttccgtggtcgcggccgaggagctgatggtcagcacgcggccctgattgaccgaggagggtgtcatttcccatgcccggatgatcgggatgaaacggtcggtgaggatcctcacctcggtgatgttgccgtcgtcgtcctcggtgaattcggtcttgcggaccttgtccttgtaggtgtcacccttcacgaccaggatccggcccgacttcgatcgcacgacgccagatatcgcgccggcggccagggccagggccaggtgccagcgagacagctcgcggactggtgggcgcggctgcagccccgcttgcgcgaagtgcaggttgaagtcaggccagagacctcgcagccgctggatttcaccggcgaactgctccggctccagggttactcggtagaagtgctccagctcgctggtggccggcagaaccacgtagggttcccacggccaagccgctggaatttcctcggccttttcctggcccgctccgatcgcctgcaggcgagacctcacctgattggcgtccgcccgggccaggtcctgccgacggacccggatgccgaagatcaccacctgcttgaaggtaggatccgcggctgcgtagatgcgcaggccggtgaagtggttgctcaaccagccagtcagctcatcgtccaagacgtagtgaggaacaatcagaaccatgacgccgccgtactgcagcaacggcaggcagcgctggtagaacgctttctccagacgccggcggccgctgccctggtactgcgacgcaccggagtggtccgccaccaggtcgccataaggcgggttgagccagagcagtccgaacgactgcctgctgatcatggtgtcgaaaaggtcactgtgcagcactcggtcaagcaatcctcgggcatggtcggcgcgctcgcggtcgtactcgacagcgagggcttggacctgatcgcggccgagggtgtgtgctgcctcagccagggcaacaccctcaccggcgcaggggtcacagatcctcatccttcccgacggggcaggagtgagggcctgcagagcgcgttcgagggtgacctcatcggtagggaagtagccgttgcgtgcaaagttgcgcgccaagcgcgggaacatgagggccatggggcctccttgagtctgagagggatggctcaggcttgcgcctga

SEQ ID NO: 325864 - DNA, 1734 bp, Pseudomonas aeruginosa
atgacctctgcggccgtcgagaccaccccgctaacctgtgacgtgctggtcgtcggctccggcgccgccgggctggcggcggcggtgaccgcggcctggcacgggcgccgggtagtcctggtggagaaggacccggtgttcggcggcgccagcgcctggtccggcggctgggcctggttgccgcgcaacccgctggcgcgtcgcgccggtatcgaggaggacatcgagcaaccgcgtacctacctgcgccacgaactgggcgagcgttacgacgccgcgcggatcgacgccttcctcgaagcctgcccgcacatggtggccttcttcgagcgccacacccacctgcggttcgtcgacggcaacggcatcccggacatgcatggcgacacgccgggcgccgccgagggcggccaccagttggtcgccgcgccctatgacgcacgacaactgggcccgctgctgccgcgcctgcgcaagaccctgcgggagacctcgttcatgggcatgccgatcatggccggcgccgacctcgccgccttcctcgacctgacccgctcgctgccggccttcctgcatgtcgcccggcgcttttccagccacctctggcacctgctgcgctacggtcgcgccatgcacctggtcaatggcgtggccctggtagcgcgcctggccaagtccgccgaagccctgggtgtgcgcctgatcgaatcggcgccagcccgcgaactgctgatgcgtgacggcaaggtggtcggcgcgctggtcgagagcgccgagggactcctgcgcatcgaggcaggcgccgtggtcctggcctgcggcggctttccccatgatccgcagcgccgcgccgcgctggcccctaccctggacaccctgctgccgctgccgccgccgggctgcaacggcgacggcttgcgcctgggggaaagcgccggcggccgggtggccgacgacctgcgctcgccgatcgcctgggcgccggtctcgcgagttccccacggcgatggcgagaccgggcacttcccgcacatcatcgagcgcggcaagcccggggtgatcggcgtactggccaacggcaggcgcttcgtcaatgaggcccacggttaccacgactatgtcgccgccctgctcgaggccaccccgcccgggcagccggcacgctcctggctggtctgcgaccggcgcttcctgcgccgctacggcctcggctacgtgcgtccggcgccgctgccgatcaccgcgcacctgcgcagcggctatctcaagcgcggggccagcctggatcagttggcaaggagctgcggcatcgacccgtccggcctggccgccaccgtcgccgaatacaaccgccacgcccgcgagggccgcgacccagagttcggccgcggcggcacggcattcaaccgcaagcagggcgacccggcgtatccggggccgaatccctgcgtcgcccccatcgaacgcggaccgtactacgcggtgcaggtcgagcccggctgcttcggtaccttcgccgggctgaagaccgacgcccaggcccgcgtgctggacggcggcggccagccgatccccggcctgtacgcggcgggcgcggacatggcgagtctgttcgccggccactatcccgccggcggcatcaacctgggaccggcgctgaccttcggctacatcgccggacgccacatcgccggcgccatcggctacgagcaggagcaagcgcagcgcggttga

SEQ ID NO: 325865 - DNA, 903 bp, Pseudomonas aeruginosa
atgcgcataggactcgactaccgcaccgtcggcagctcgccgcactcgggcatcagccgccaggtctatgccatggagcaggccctggaaagcctgcccggcacgcaggtgacccgcttcaccgtggcccctctcgacgacccgctgcgccagcgggcggtctgcccgccgtggggctgcccgcgcaccgcgatgcaccagccgcaccagcgcctgcgcttcgaagccgggttcctcccacgcgccttgcgcgagcaggacatcgacctgtacatcagcaccttcaacatgggcctgccgctaccgccgcgtccgccgggcgtgcgctatgcgctgctgatccacgacctgttccagatcaccctgaagaactaccacgccaaccgcctgaaggcgctggtctatcgagtcagcgactacctgtcgatcgcctatgcgctgcgtgtcgccgaccgtgtctggaccccttcgcagtacagcgccgacgaggctgtgcggctgtttcccggggtcgccgggaaagtccgggtgctgcccaaccaggtcgacggcttcgccggcgaacccgccgacctctcggacgccgaactgcacgcgctgtaccgccaggccgagcggctctggcaaccgtcctacgcggaaggcttcggcctgccggtggtcgaggcgctgagcgtcggcacgccggtggcggtggccagcggcacctcgctggacgaagtcaccccgccgtcggcgccgcgcttctcgcccagcgacggcgccgccctggaacgcctgatgctgcgcctggccgatgcgccgcgcgaggcctcggcggaagaactcatcgcctgggctgcacgcttcaaccgcgaagcctaccggcaacggctggccgcactgatcgaggaactgagttga

SEQ ID NO: 325866 - DNA, 1329 bp, Pseudomonas aeruginosa
atggcacgtaagggactctatctgggcggcagcgcgctgctgctcgccgtggtactgctgctggtgttctgggggcgtcccgcggacgccgagatccaggtactgaaggcgcctcgcgcggtggtctggaaagacttcctcggggtcaacgcgcagttcctctggttcagcccggagcgctacaacaagcagatcgaccgcctgcaggacctggggctggagtgggtgcgcctggacctgcactgggaccgcctggaaaccgccgaagaccagtaccagctggcctccctcgaccagttggtcaaggatctcgaggcgcgccagctgaagtcggtgttctacctggtcggatcggcccgcttcatcaccaccgcgccgttctattcgcccttccaggaccagtatccgccgcgcgacccggaagtcttcgcccggcgcatggcgatgctctcgcagcgctacccgagcgtggccgcctggcaggtatggaacgagcccaacctgatcggcttctggcggcccaaggccgatccggaaggctacgccaagctgctccaggccagcaccatcgccctgcgcatggtcgacccggagaagccggtggtttccgccggcatggccttcttcagcgagatgcccgacggccgcaccatgttcgatgccctcggccacctgggcgtggagagcctcggcaccatcgccacctaccacccctatacccagttgccggaaggcaactacccgtggaacctggacttcgtctcccacgccaaccagatcaaccgcgccctgcgcaacgccggcgtgccggcgatctggagcaccgagtggggctggtcggcctacaaggggccgaaggagttgcaggacatcattggcgtcgaaggccaggccgactacgtgctgcgtcgcctggcgctgatgagtgcgctggactacgaccggatcttcctcttcaccctcagcgatctcgaccagcgcgccagcgtgcgcgaccgcgactacggcctgctcgacctggacgccaaccccaagccggtctacctggccctgcaacgcttcctcaaggtcaccgggccgaagctgcgcccggccgacccgccggtcaccgaggacctgcccgacggttccttcagcatcggctggacccgcgaggacggtcgcaacgtctggctgttctggtcggcccgcggcggcaacgtgcgcctgccgaagctcaaggaggccaccctgcacgatccgctcagcggcaaggtcacgcccttgagcggcagcgacggcctggaagtcccggtgaagtccagcctgcagatgctggtctgggagtga

SEQ ID NO: 325867 - DNA, 1932 bp, Pseudomonas aeruginosa
atgatagaaattcgttccttgcgtgatctgttgcgcctgctgttcatctaccagcgcgagttcaagctggcggccctcagcgcggtggtgatcatcgtcctcggcgccttcctgctgccggccaagtacgagtccaacgcacgcctgctggtcaagccgggtcgtgactcgaccctgccgatcgagatcagcaaccgccaggcactggtgatgccgagcacccagcgcgaccctatcgtcgacgaagaacgcctgctcaccggccggccgatcgtccgccaggtggccgagcgctacctcgaggtgctggccaaccggccgccgccggagggcctgtggaagcgcaccaagttctatgtgaagaaggccatcggcgcggtgttcgacgggattcgcgtgaccctggaaaccttcggcgtgatcgaggaaaccaccgcggtcgagcgcctggccaaggacctggagaagaaattcgaggtcacccatgcggccggctcgacggtgatggagatcagcttcacctggagcgagccggaagtcgcccaggaagtggtcaaggcctggatcgagatctacatggaagagcgcacccaggcgctcggccgcaagagcctgtacgccttctacgaggcgcagaccgccgacagcgcggcgcagatcgaggaccgcctgcaggacctgtccgagcggatcaacgtgctgcgcggcgagcgtttcaactcgatccgcctgatcgcctcctccgacagcgccctggaatccacccgccagcaactcaaggggctgcccagggagatcgtcacggtgcggcagatcgcgctgaacccggcgcagcaggacctgcgccggctgctcaaccagaagcgcctggaacgcgccgacatgatgcgcacctacaccgacgacgcgccgccggtgaaggccctggacgcctcgatccgtgccctggagaaagaagtccaggacgaaggcgccaccgtgcagagttccgaggaccgcgcgccgaacaccctgaccactcacctggaacgggtcctgctggacgagaccagcaacaacgcggccctgcgcacccagctcgcggagcaggaaaagcagctcgccgaactcgaggcgcaacggcgcgaagcgctggacatcgagccgaccctggcgcgcctgcagcgcgagctgaacgccaccgagcgcaactacgcgctgtacgtcgacagcctggagaaatcgcggatcgaccgtgaactggacaagagccagatcagcaacatctcggtgatcgaggaagccacctacaaccccgggcggatcttcccgaaaaccctgctgatgctgttcctcgccgtgcccttcggtctcgccgtcggcctgctggtggtctatctctgctacctgctcgaccagcgcatccacgacggcggcctggtcgaggagaaattcggcctgccgctgtggaccaccctgccggagctgagcaacagcaccgcggagagcagcaacgccttcaccgccagcatctaccggctgtacgggctgctgccctacgcgcgcatcgaggaaaagggcctgaccctgggcctgacctcggcgcgccacggtgaaggcgtgaccttcatcatcgagcaactgcgccgcctgctggaggaaaacggcgtgcgcgtgcgggtcggcggcgaaccggcccagccgggcgaagtggtattgctcgacgcgccggccctgctggacagccgcgaggccttcatcgccctgcgccgcgccgacctgatcgccctggtggtggaggcgcagaagagcaccgtgccggtggtcgagcatgcgctgaccatcctcaccacggcgttcggcaaggtcgacgggatcatcatcaaccggcgccgcttcgaggtgccgagcaaggtcctgcagaccatcgcccgctaccggagcgcgttctga

SEQ ID NO: 325868 - DNA, 207 bp, Pseudomonas aeruginosa
atgaggaaccgggttcgcgagttgcgcgcggagcgcggttggtcacaggcggagctggccggaaagctggaggtatcgcggcagacggtgaacgccatcgaaaccggccgctacgacccaagcctgcccttggccttcaagctcgcccgggtgttcggactggcgatagaagcgatcttcgacgaccgggaaggccaactggactga

SEQ ID NO: 325869 - DNA, 1056 bp, Pseudomonas aeruginosa
atgtttccgaagaacgcctggtacgtggcctgcacccccgacgaactggccggcaagccgctcggccgacgcatctgcgacgagccgatggttttctaccgaggcgaggacggccgcgtggcggccctcgaggatttctgcccgcaccgtggcgcgccgctgtcgctgggcttcgtcgaggacggcgtgctggtctgcggctaccacggcctggcgatgggcgaggacggtcgcacccgcgcgatgcccggccagcgggtccgcggcttcccctgcatccgtcgcttcccggtgcaggagcggcacggcttcgtctgggtttggccgggcgcggaagaacaggccgacgccgcgctgataccccgcctggaatgggcggaaagccctgattgggcctatggcggcgggctgtaccacatccactgcgactatcgcctgatgatcgacaacctgatggacctgacccacgagacctatgtccatgcgtccagcatcggccagaaggaaatcgacgaggccgcgccgaccacgcgggtggaaggcgacgaggtgatcaccagccgccacatgcagaatgtcatggccccgccgttctggcgcatggccctgcgcggcaacggcctggccgacgacgtggcggtggaccgctggcagatctgccgcttcacgccgcccagccacgtgctgatcgaggtcggcgtggcccacgccggccacggcggctaccaggcgccggcggagcgcaaggcggcgagcatcgtggtcgacttcatcaccccggagagcgccacttccatctggtacttctggggcatggcgcgcaacttccaggcccacgaccaggcgctcaccgagagcattcgcgaaggccagggaaagatcttcggcgaagacctggaaatgctcgaaagccagcagcgcaacctgctgcgccatccacggcgcgacctgctgaaactgaacatcgacgccggcggcgtgcaggcccggcgcatcatcgagcgcctgctggcggacgagcgccaggccgccgcccccaaccgcgcccaggcctga

SEQ ID NO: 325870 - DNA, 765 bp, Pseudomonas aeruginosa
gtggtttcccgcgagctgccgggcctggccctgcaggccggacgcttcgacgcggtgagcctgcgcaattcggcggacatgcaggacctgtcggcctggagcgcgccgacgcaggagtcggacggtttcaactacgccggcgccgaataccgcttcaaccgcgagcgcacccaactgggcctgtggcacgggcaactggaggacatctaccggcagaactacgccaacctgctgcacaagcagcgtgtcggcgactggaccctgggcgccaacctcggcctgttcgtcgaccgcgacgacggcgccgcgcgcgccggcgagatcgacagccataccgtctacggcctattttctgccggcatcggcctgcacaccttctaccttggcctgcagaaggtcggcggcgacagcggctggcagtcggtctacggcagcagtgggcggagcatgggcaacgacatgttcaacggcaacttcaccaacgccgacgaacgctcctggcaggttcgctacgactacgatttcgtcggcctcggctggcccggcctgatcggtatggtccgctacggccatggctcgaacgccaccaccaaggccggtagcggcggtaaggaatgggagcgcgatgtcgagctcggctacaccgtgcagagcggtccgctggcgcggctcaacgtgcgcctcaaccacgccagcaaccgacgcagcttcaacagcgacttcgaccagacgcggctggtggtgagttacccgttgtcgtggtga

SEQ ID NO: 325871 - DNA, 1035 bp, Pseudomonas aeruginosa
gtgaccctggtcggctacctgcgggtgttcatcccggcgctggcggatccgctgctgatggtctgcgtggccatcgccgcgatctggctgtgcaccctgatcaacctgcgaggcatcggcaccttcagcgtggtgcagaacctgctgaccatcctcaagctgctgccgttgttgctggtcggtatcctcggctggttccacttcaatcccgagcacctggcgatcccggcgcgcagcgagctgccgaacatgggctatgcccaggcgatcgccaccaccgcggcgctgaccctttggtcgttcatcggcctggagtcggccaccgtgccggccgacgacgtcgaggacccgcgccgcaccattccccgcgcgaccctgttcggcacgctggccgcggcggccctctacatcctctctatcactgcggtgcagggcctgatgccgccggaggtgctggcccgctccacctcgccgttcgccgacgcggcgcggatcctgatgggcgactggggctactacctggtggctgccggggcggtgatcgcctgcctgggcgcgctcaatggctgggtcctgttgcagggccagatcccggtggctccggcgcgcgacgggctgttcccggagtcgctcggccagctcaacaagaacggcgcgccggcccacggcctgctggcctcggggctgctggtgacggcgctggtgatggtcgacgggcatggcgacctggtcgatgtgttcaacgtgatcatcctgctcggcaccatgaccggggtggtcccctacgcgttctgcaccgccgcgctgttgcagctgctggcggtgcgaccggacgagttctcgccgcgttcacgccggcaattgctggtgatcggctcgctgggcttcgcctactcgctatgggcgctgtatggcaccggccagcaggcgatcttctggggcttcctggtgctgatggccggtatcccgatgtacacctggcggcaatggcgcaaccaggtcaacggagtgccgacgctcaaagccaatgactga

SEQ ID NO: 325872 - DNA, 210 bp, Pseudomonas aeruginosa
atgcctttcgaactcgcgatagaccccagcaccctgatcatcctggccgtggtggcctttctcgccggcttcatcgacgccatcgccggcggcggcggcctgttgaccatccctgcgctgctcaccgccggggtcccgccgcacctggcgctgggtaccaacaagctgagctcgaccttcggtgcggcgaccgccagctacaccttctaa

SEQ ID NO: 325873 - DNA, 906 bp, Pseudomonas aeruginosa
atggccgacttgcgccagttccgccagttcgtcgcggttgccgaggagctgagcttccgccgcgccgctgagcgcctgcacatggcccagccaccgctgaccaccgcgatccggcggctggaagaagaagtcggcgccagcctgctggagcgtgacaaccgtatccatcgcctgacgccggcgggccgcgcgttcctcgacgaagcccggcgcaccctggcccaggccgaacgcaccctggcggccgcgcgcagcgccgccagcggacgcagaacgttgcgcctggcgttcgtcgacagcaccatcaatattctgctaccgcgcatactccaggcgttccgccaacagcatggcgcgctggacttccagctccaggaagacaccaccgcggggcaactggaggcgctgcgcgaagaccgcatcgatgccggcctgatcgtcctgccggtcgaccgccagcccggcctgtacacgcatctactggtggacggcgacatgcgcgtggcattgcccgaaggccatcggctggcacgccatgcgcgcctgcgcctggaacaactggccggagaaccctggctgctgttcccaaggcactatgggccgggcatgcacgacctgatcgtcgccgcctgcgcggcagccggcttcgtcccggaggtggtgcaggaggcgcggcagatgcagaccatcgccgggctggtggccggcggcatcggcgtcgcgctagtgccttcgctgctacaaccgttgcgcccgccgggggtcacctttcgtcccctgcaagggcggcgggcgcgaattccctatcggctggcgttggcctaccgcacgccgtcggaactcatcgaacgctttcgcgaaaccgcccaggcgatcgccgccgccccggcttttcgcatggcctag

SEQ ID NO: 325874 - DNA, 150 bp, Pseudomonas aeruginosa
atggctaagccgaatgatacgtccaaccccgaggtaacagaatcgtccccccgcttcgtcccgctgctccccacctcccaggccgacatgtgtccgcgtagcgccacccactccccacgcacttgttcgacaacgcgaaagtgcgcttga

SEQ ID NO: 325875 - DNA, 174 bp, Pseudomonas aeruginosa
ttgttcgacaacgcgaaagtgcgcttgaggtcggcgatcaacatcctggccatgacccgtttgctcgatgagaaagaagagcccggcggcaccctggcctacatcaacggtgcgttgctgtcgctgctcagcgatgccttgtccgaaatcgaggcgggccacccgagcctgtag

SEQ ID NO: 325876 - DNA, 1431 bp, Pseudomonas aeruginosa
gtgatctacacctccggctccaccggactgccgaagggcgtgatggtggagcaggcgggcatgctcaacaaccagttgagcaaggtcccgtacctggaactggacgagaacgacgtgatcgcccagaccgcctcgcagagcttcgacatctcggtctggcagttccttgccgcgccgttgttcggcgcccgcgtggcgattgtaccgaacgctatcgcccacgatccgcagggcctgctggcgcacgtcggcgaacagggcatcacggtgctggaaagcgtgccgtcgctgatccagggcatgctcgccgaagagcgccaggccctcgacggcctgcgctggatgttgcccaccggcgaggcgatgccgccggaactggcgcgccagtggctcaagcgctacccacggatcggcctggtgaatgcctacgggccggcggagtgttccgacgacgtggcgttcttccgcgtcgacctggcctccaccgagagcacctacctgccgatcggcagtcccaccgacaacaaccgcctgtacctgctcggtgccggcgccgacgacgccttcgaactggtgccgctgggcgcggtgggcgagctgtgcgtggccggcaccggcgtcggccgtggctacgtcggcgacccgctgcgcaccgcccaggccttcgtcccgcatccgttcggcgcgccgccgcgccaggtcgccggtacggtacaggcgctcgcccggcgcgccgacggagtgctggaatatgtcgggcggatcgaccaccaggtgaagatccgcggcttccgcatcgagctgggcgagatcgaggcgcgcctgcacgaacgcgccgacgtccgcgaggcggcggtggcggtccaggaaggggcgaacggcaagtacctggtgggctacctggttcccggcgagacaccgcgttccagcgccgactcgccggccggactgatggtggagcagggcgcctggttcgagcggatcaagcagcaactgcgcgccgacctgccggactacatggtgccgctgcactggctggtgctggaccggatgccgctcaacgccaacggcaagctcgaccgcaaggcgctgccggcgctggacatcggccagatgcagaaccaggcctaccaggccccgcgcaacgaactggaggaaaccctggcacggatctgggccgaggtgctgaaggtcgagcgggtcggggtgttcgacaacttcttcgaactcggcgggcattcgctgctggccacccagatcgcctcgcgggtgcagaaggccctgcaacgcaacgtgccgctacgggcgatgttcgaatgcaccacggtggaagagctggccagctacatcgagtccctggccccgagcgagatcagcgagcagaaggccgagcgcctgaacgacctgatgtcgaagctggaaatgctctga

SEQ ID NO: 325877 - DNA, 624 bp, Pseudomonas aeruginosa
gtgggcgaggtcgaagactcgcgcgccctcgcggcgcacgccatcctccagcagccgctcggcgtgggcggcgtcgctcgccagcaggcgttgcaggggcaccgcatgcgccgccagcgcatgcggctgcggcccgtcgacgcccgtttcgacacgccggcgcagcgccacatgccgttccagcaactggcgcaaggcctgttcgatggcgtcggccgtggcgccgactatgcgcaggtgggccagcaggttgtaggaggtgtcctccggcgccagttgctgggccacccacaggcgccgttcggcgaggctcagcccggcggcgccggcgctcggctccggctcgtcgccctcgggcgcggcctggcgcagcagttccagcagggcctcgggggtcgccgggccaccggcgaacgcctgcaacggtacgcggcgggacagtcgctggcgcagcgtcgcgagcaggtgcaccgcccgcagggaatcgccgccggcggcgtagaaaccctgcccggcgcgcggcggcgcgccaagctgcgcctgccaggcctggtgcagcgcctgttccagcggatcgccgggcagcgcctgcggctcggcatcggtcgcctggggacgcggtag

SEQ ID NO: 325878 - DNA, 2040 bp, Pseudomonas aeruginosa
gtgctcgttcagcgcctggagcggcggggcgaacggcgcagccaggtagcctaccaaccgacgcaggccggcgctgtcctcggtgagcatggcgcaggcttcgctcaccccgggaaaactcgccaggcacgaggcgatctcgcccagctcgatgcggaagccgttgaacttgacctggtcgtcgagtcggccgaggtgttccagcacaccatcctcgcgcatgcgtacgcggtcgccggtgcgatagcggcgctcgccgctgcccggatcgacgcggaaacgctcggcggtctgctccggcttgccgaaatagccacgcgccaggccgatgccgccgaggtacagctccccggccacgcccagcggcagcggcgcctcgaagccgtcgagcacctccaccgtggtgccgggcagcggtcggccgatgggcggctcgtcgagcgcttcggcgtgcaggtccagttcgtgcaccgtcgaataggtggtgtcctcggtcggcccgtagagattgaccaggcgccgtacctggggttggccacgaatctgtcgcaccaggtggccgcgcagcggttcgccggccaggttcagcgtgcgcaccccgcccggcaggtcgccgagggcgagcagcgcggcgcacaccgagggcacggtattgagcaggctgatctcgtcgcggcgcgggtagtccggcaggctgaacaggttctccaccaggtgcagcgtgccgccttcggccagggtgccgaacagctcgtagaccgacaggtcgaagcacaccgaggtcgccgccagcaccccgctccactcttcggcggcgtagtgctggccggcccagcgcaggaaggcatgggcgctgccgtgctcgatggcgacgcccttggggcgtccggtggatccggaggtatagatgatgtaggcgaggtgctcggcaccgacctcgctcgcgggcgacgccagctcgttcgcctggtcgccgccctcctccagcgccaggcatggccggcccagcgcggcgacccgctcgcgggtgctggcgtcgaccagcaccagcaggcagtcggcgtcgtcgagcatgtaggccacccgttcctccgggtaggccgggtccagcgggacgtagcaaccgccggcgcggagcacgccgagcagaccgaccagcaggccgctgtcgcgccgcaggcagaccccgacccgctgctccggagccaccccggcggcgcgcaggcgcgcggcgagcgcggcgctttcgcgctccagctcggcatagctgaggctgcggtcggcggcgtgcacggcgatgcgctgcggcgtgcgccgcgcctgggcctcgaacagatggtggagtacgccgcgcggcggcgcggcctgcggctcgctgcgcagggcctgcaaacggcgctcttcgtcggcgtccagccagggcagccggccgacgcaggcctgggcgtcgaccaggccgcgcgccaggcgcgcgagatggccggcgatgcgccgcaatccgtcgtactggggatcgcgcagagccaggccgacgctgccgtccgccgccagcaccagggccagccagccggggctgctcgccgtcggccgcgccgccagcacctggaccgcgcagcgcccggccagggcggcgcgctcctggccctcggcggagagctgccgccgggcgtcatcgagttcttccgccagccgcgcgctacgttcggcggacgactccagcgcccggtaggcggaacgcagcagcgcgggcgcctgccgcccgcgcaccgtgatcggttcgggaaaacccagggtgatctcttcgttgccgtagcgtcccagcagtaccaggaacgccgccagccagtgcgccgccgggaacgcttgcgcggccgcctccggctcgaaccattgccaggcgcaatgcgggtcgcgcagggcgattcgtcccggcaactccagccccagcggggcgccttgcaggtagcgtcgctcctgcgcaacctccgggcgcgctgcgcgtcccgcggtcagcgccttgcccgacgaaaagctgcgtaa

SEQ ID NO: 325879 - DNA, 849 bp, Pseudomonas aeruginosa
atgaacgccgcctcccgccaaccttccacgctccccgccgacgccctgctggcggtggacggagtcagcctcgaataccgcacccgctcgcgcgtggtgcgggccacccagcgggtcagcttcgaagtcgacccggccgatcgcttcgtcctgctcggcccgtccggctgcggcaagtcgaccctgctcaaggcggtggctggcttcatcacgcccagcgagggcgagatccgccttcagggacaggcggtcagggcgcccggccccgaccgtatcgtggtgttccaggagttcgaccagttgccgccatggaagaccgtacggcagaacgtgctgtttcccttgcgggtgtccggccaggtggcgcgcgacgaggccgagcgacgcgccgacgaatgcctcgagaaggtcggcctggcgggcttcgccgaggcctacccgcacacgctgtccgggggcatgaaggcgcgggtggcgatcgcccgggcgctggcgatgcagccgaagatcctgctgatggacgagccgttcgccgcgctggacgcgctgacccggcgaaagatgcaggaagagctgctgcgcctgtgggaagaggtgcgtttcaccctgctgttcgtcacccattccatcgaggaggcgttggtggtgggcaaccgcatcctgctgctctcgccgcacccggggcgggtccgggccgaagtgcacggccacccgttcgggctgcacagcctgggtggcgaagcgctgcaagccgcggcgcgacgcatccaccgcttgctgttcgacgagggcggcgaaccgacggcggccgcgaccctcgacttcgccgacatccgtctggcccactga

SEQ ID NO: 325880 - DNA, 1299 bp, Pseudomonas aeruginosa
atgatcaacatcgagacgccgacctactacacggcgaccaagaagtacgagctgtccttcccctccctggaaaccgacctggacgccgacgtggtggtgatcggcggcggcttctccggcatcaacaccgcgctggaactggccgagcacggtatcaccgacatcgtcgtgctggaggcccgccacctcggcttcggcggtaccgggcgcaacggcgggcagatcatggccggcatcggccacgacctggagaagatccgcaaggacgtcggcgaggacggcctgcgggcgatcttcgagatcagcgacctcggcgccgacatcatcaagggccgcatcgagaagtacgccatcgacgccgacttctgccacggctacggctacatgggcttcaacgcgcgccaggcgaagaccctgcaggcctgggaaaaggagttccggtcgctcggctcgccccatgagatccgttacctgcacggtgccgaggtgcgccagatcatcggctcggacgcctacggcagcgccctgctgcacatgggcggcggccatgtgcactcgctcaacctgctgctcggcgaagccaaggcgctggccggcctcggcgcacggatattcgaatacagcccggcgctggaggtgcaatacggcgagcgcatccgcgtgcgcacggccaagggctcggtcaccgcgaacaagctgctctgggcctgcgacagcttcctcaaccggctcgagcccgagctgcaccgcaccaccatcaatacctacgcgttccagatgatgaccgagccgctgccggacgaactgatccagcggatcagcccgatccgcggcgcctacagcgacatccgcccggtcatcgactactaccgggtgaccaacgagaaccgcctgctgttcggcgccgccacgcccttcgtcgaacgcatccccggcgacctcaaggcctggaaccgcaagctgatgctgaagatcttcccctacctggagcacgtccgcatcgatctcgcctggggtgggccgatggcttgcagcgccaacctgttcccgcagatcggcagcctctcggggcggcccaacgcgttcttcgtccagggttattccgggttcggcgtgacccccagccacatcgtctgcaaggtcctcgccgaaggcatgagcgaaggctcggcgcgctacgacctgctcagctcggtgcgccgcatcccgatccacggcaaggaccacttccgcccgctgctgctcagcgcgggcaagacctggcaccagctctccggctactggaacggccggcgctga

SEQ ID NO: 325881 - DNA, 900 bp, Pseudomonas aeruginosa
atgagcgccggacacgagcacagcttcgcccagaccaactcgacccgcctgaaatgggcgttgctgctgaccggaagcttcctcgtcgccgaggtcgtcggcggcatcctcaccggcagcctggcactgatctccgatgccgcgcacatgctcaccgacgccgtggccctggccatcgccctggccgcgatcaacatcgccaggcgcccgaccaacgatcgcctgacctacggctaccaccgcttcgagatcctcgccgcggcgttcaacgcgttcctgctgttcggcgtggccttctatatcctctacgcgacctacgagcggctcaaccagccggcggagatccagtccgtgggcatgctggtgatcgccgtgctcggtctgctggtgaacctggccagcatgcgcctgctggcgccggcccagggcaacagcctgaacgtcaagggcgcctacctggaggtctggagcgacatgctcggctcgctgggggtgatcgtcgccgctatcgtgatccgtttcaccggctgggcctgggtcgactcgctggtggcggtgctgatcggtttctgggtcctgccgcgcacctggatcctgctgcgcgagagcctgcatgtgttgctcgaaggggtgccgaaggaaatccagttggccgagctgcgcgaagcgctgctggggattcccggcgtgaccgggctgcacgacctgcatgtgtggtcgatcaccagcggcaagatcagcctgaccagccatctggtctacgacccggccctggtcgacgccgaggcgctgctgggaacggtgaaggcgctgctgcacgaccgctacgagatcgaacacagcaccctgcaactggaaacctcggcctgcgcccaggccgaggagccgctggcctactga

SEQ ID NO: 325882 - DNA, 936 bp, Pseudomonas aeruginosa
atggaaataggaagcgacgtcgtccggatggatcgcccgtccgctctccaggcggtctgccgggcagtcggcgatcagcgtatcgaagtccagcacgccctccggcagcggcccgcgctgggccttgagcgcctcgcgctgcggcgccggcaacaggttggccggatcgaccacgacgatcgcgtacagctccggcagctgcgcgcgcaggccggcgaccttctgccacaggtcggtgccggggaacggcgccagggtcaccagcacccgggtgttggaggcgcggatcagctcggcgatgtgctccggctcgagcagcgggttgatcgcattgacgatcccggcagcttcgccgccccagatcacgtagtgggtctgcggcaggttgggcagcaggaaggacaccgcctggtggctttccaggcccagccggtgcaaggcgttggcggtctgggtgacgcgggcgaacagctcggcatagctgatccgcaacggttcttcggcagcgctgccatgcagcaggcagctcagggcgatacgctggccgtggcgctgggccgagcgttgcaacagttcgtaggtgctggatggcaggtcgcgctgttccagcggcacgcgttccagggcttcgatatcgctcagcccggcgatcgatggggacggattcatggttttcttgttcttccgttggtgagtgggcggacactcgccggatcgctccggcaccgtcccgaagatgccacccccgtcgccgccctaccgttgtctttttgtagcgcgccgccggtcgcgcgcacgaaccctcccggaggctctcccgggagcttcgcgcagccccctccaggccccgtccggccaagcctggaggtgaccggccaagcatggatttctccccgctggcaacatgctttacactggcgcccgttcattccttaa

SEQ ID NO: 325883 - DNA, 1782 bp, Pseudomonas aeruginosa
gtgggccgggccggaaagtttctcgccgttgacgatcggcgcggcttgccactggcgggtcaggtgcggcttgtaggcgagctccagctcgttccactggttctggatgttcatgttgatgccctgggagtttttccgcccggcgccgaagatcgcctggggcagagggatacggtcgttggccagcgtcttgaactggcgcagttgggtaaccgggtgctggatcagcgtctccaccggcacgcgcgggtccaccagcttgtgcacgaaggaagagttggcgccgttctccagcaggcggcggaccaggtacggcagcaggtccttgtgcgcgccgaccggggcgtagatgcgcacgttgcggcggtacttctcgatcaccgtgtcgtacagcgcgtcgcccatgccgtgcaggcgctggaactcgaagtcgcgctcctcgccgccggcggccctggcttcgtcggccagggcgaggatggcggtcacggtgtgggcgttgtggctggcgaactgcgggtagatcaccccgcgggtgtgctcgctgagcaggtagcgggcgcaggccaggtaggaagtgtcggtgccttccttgcgggtgtagacggggtagccatcggcgccctgcacctggcactgcttgatctcgctgtcccagtaggcacccttcaccaggcgcagcgggatgcgtgcgccaagctcgcggccgagcagggtcagccataccagcaccggcaggcagcgcttggagtaggcctggatgaccaggccgaactcgccccagccggcgatggccgggtcgcgcatcagcttctcgtagagttcgagggacagctccaggcgatcggcttcctcggcgtcgatggtgatgccgacgttcagcttgcgcgcgcgcaccgccagttccaggacgttggcgaacagctcgctgagcacccgctcgcgctgcgccacttcgtagcgcggatgcagcgccgagagcttgatcgagatcgacggccgcggccccggaccgacctgcggctcggcgccgacagtgtcgatggcctggcggtagtcggccatgtatttctcggcgtcggcggcggtcagcgcggcctcgccgagcatgtcgaaggaataggtgtagccctgctcgcggcatggacgaccgttcttcagcgcttcggagatggtccggccaagcacgaactgcttgcccatcagcttcatcgcctgattcatcgcggcgcggatcaccggttcgccagagcgctgcaccagccggctgatgacgctcggggcgcggccgtcggtgcgttcgtcgatgttcaccaccttgccggtcatcaccaggccccaggcggcgaaattgaccagaacgttgtcgctctggccgagatggcgctgccagtcggcggcggacagcttgtcgcggatcagcgcgtcggcggtcgccgcgtcaggcacacgcaacagcgcctcggccagacacatcagcatcaggccttcctgggtgtccaggctgtattggcgcaggagtgcgtcgagggtatcgacggcgttgtcccggctgcgcacggtttcgatcagtgcgcgggcgttgcggcggatagcctcgatgccgtcgggaccggggtcggcgagctgcagcagttcgcccaggtaggcttcctcgtcgaccgcgtagttggcgctgatgacagggaagaattcggctgcggaccgggtctggtcctcgccctgcaagacgtgactggctttgaacatcacgccctcctcttgtggagccattgttattga

SEQ ID NO: 325884 - DNA, 774 bp, Pseudomonas aeruginosa
gtggccgaggcggtcggccagccagccgccgatatagccgccgctcagcgctgccaggccgatcagcaggaggatcaggctgatctcgccgggcgagcgaataccggccatgctcgccaggtacggggtgaaataggcgaacagggtgaagtgcccgccgagcaacaggatcgataccagttgcgcgagccacagcgcgggctggcgcaactgccgcagatagccttcgcggccgggcaggtcgccggcctggcgttgcggcaggtagcgccagagcagcaggcacaagggcagcgaatagaccgcgatgccggcgaagatccagcgccagccgaaccagtcgctgatctgtacgcccagtggcacgccgaacaccagcgaaccgctgatgcccatgaagatcaggccgatcgcccggccgcgctgggccggggcggccagctcggcggcgagcaggctggcgaggacgatcagcagcccgcaacaggccgacatgcccaggcgagccaggagcaggccgagatagcccggagcgagggcggcgagcgcgttgctgagggcgaacagcagcagggtcgccagcagcaggcggcggcgttcgatgcgccgggtcagccagccgagcagcggtgcggcgagggcgaagccgagggagaacagggtagtgagctggccggccaggctgatggagacccgcaggtcttcggccaggggcggcaggatgccgatcaggatgctttccgccaggccggcggcgaaggtggtcagggatag

SEQ ID NO: 325885 - DNA, 2142 bp, Pseudomonas aeruginosa
gtgcaccggacgtcgaccgatgacgatgaggccgtagagggtgacctgctcgaacgccaccacctggccgcgacgcttctcccagtgcggctcgaagtggttggtcttgatcaggtgcccggccagcggctccagccagtccggctcgatcttcgcgaccattcgggcgaacagcttggtggtctccaccagttccgcggccatgatccattgcgggcgcttgcgagcgatgccgctggacggatggatccagaaacgtcgctggcgagcgccgaggtagtcgccttcctcggccttctgcccgatctggctgagcaggccggacaggatcgctttgtggaccgccgcgtaatcgatccccggtacctcgcgttcgttgtcggccgacgcgcctttcttcgcctccggcttgcgcgcctcggccttggccggacgcccgaacggcagcttcagttcgcggcagatcagggtcagttggcggtgggcgtcgcgccactcacgcaggcgcaggtagttgaggaagttcttccggcaccagctgcgcagggcgttggagcccagcgcctggcgctgttcctcgaagccacgccagagattgatcagcgcggcgaagtcggaatccggatccttccattgcgcgtgcgcctggtcggcggcctgctgccgctccaccggacgctcgcgcgggtcctgcacggacagcgcgctggccaccgtcaacacttcctcgaggctaccctgctgggccgcctccagcagcatgcggcccagcctcgggtcgatcggcaggcgcgccagttggcgccccagcggggtcagctggccttcgcggttgaccgccgacagttcctgcagaagggtgaagccgtccttgatcgccttgccgtccggcggctcgatgaaggggaacgcctcgatgtcgccgaggcgcaggtgcagcatctgcaggatcaccgcggccaggttggtgcggaggatttccgggtcggtgaaggccggacgcgcgttgaagtcctcctcgctgtagaggcgcacgcatatgcccggctcgacccgtccgcaacggcccttgcgctggttggcgctggcctgcgacaccgcctcgatgggcagccgctggaccttggcgcggtagctgtagcggctgatccgcgcggtgccgctgtcgatcacgtaacggatgcccggcaccgtcagcgaggtttccgcgacgttggtggacagcacgatcttgcgtcccgggcgcggctggaagatcttctgctgctcggccggggtcagtcgcgcgtacagcggcagcacctcggtgtggcgcaggttggccttgcgcagcatctccgcggcgtcgcggatctcccgctcgccggggaggaacaccagcacgtcgccgggccgcttgccgacctcgcgttcgtgggcggcgatctcgtcgagggcggcgaggatgccctggtccaccgacaggtcgtcctcgacccggttgccctcctcgtcggtttccgccgccagcggccggtaccaggtctccaccggataggtgcggccggaaacctcgatcaccggggcgccgtcgaaatgccgggagaaacgctccaggtcgatggtcgccgaggtgatgatcagcttcaggtccggacgccggtgcaacagggtcttcaggtagccgaggaggaagtcgatgttcaggctgcgctcgtgggcttcgtcgacgatcagcgtgtcgtagcgctccaggtagcggtcgtgctgggtctcggccaggaggatgccgtcggtcatcagcttgaccagggtgctgtcgtcgctctggtcctcgaagcgcacctggtagccgaccagcgcgcccagcggcgtgccgatctcttccgcgacccgcgtcgccacgctgcgcgccgccagccgacgcggctgggtatggccgatcaggccgtggatgccgcgccccagctccaggcagatcttcggcaactgggtggtcttgcccgagccggtctcgccggcgatcaccaccacctgtggcgcgccgcgcctcgaccttggcgcaggaggcctggaagcgctcgacccactgcgccaggcgcgcgtcgtcgggctgcttgcgcagttcgtggagctgccggcgcaagcggtggcggtcgctga

SEQ ID NO: 325886 - DNA, 1596 bp, Pseudomonas aeruginosa
ttgctggaaaagctcgacgagctggaagccaaggcacgccggcgcgacatcctggccgacgaggaaaccctgttcgcctattacgacgcgcgcctgccggcggacatctaccagaccgccagtttcgagaaatggtacgcccgcgagcggcagaaccagccggacctgctgctgatgcgcgaggaagacgtgctggcccgcgaagccagcgaagtcactgcggcgcagtacccggatcgcctgcgcctgggcgatctgcacctgtcgctgagctaccagttcgagcccggcaccgcgcgcgacggcgtcaccgtgcgggtaccggcgccgctgctgccgcaattgccggccgaacgcatcgactggctggtgcccggcctgctctacgacaaggcggtggcgctggtgcgcaacctgccgaaggcgatccgcaagagcttcgtgccggtaccggacttcgtccgcgccgccctggagcgcatcaccttcggcgaaggttcgctgccgcaggcgctgggccgcgagcttcagcgcatgaccggcgtgcgggtagccgatgaggcctgggccgaggcggcgacgcagttggacgatcacctgcggatgaacatcgaggtggtcgacgcccagggcaagttcctcggcgagggccgcgacctggccgaactcaccgcgcgtttcgccgaagccagccaggcggccctggcgataccccaggccgacaaggaacagcagcgtccggtggaggccaaggccttcgccagcgtcgccgagaaagcccagcagaaggtcgccggattgtcgatgacggtatacccggcgctggtggaggagcagggcgaggtcaaggaagggcgcttcccgacccaggccgaggccgactaccaacaccgccgcgccctgcaacgactgctgttgcagcaactggccgagccggccaagtacctgcgcgccaagctgccggggcagaccgagatgggtctgctgtaccgcgagctgggacgggtcgaggcgctggtcgaggacatcctcctggccagtctcgacagttgcgtgctgcagggcgaaggcctgccgcgcgacggcgccgccctggccgcgctggccgagcgcaagcgcgctgcctggaacgagcacgccgagcgcctggcacgcctggtgctggatatcctcaagctctggcacggcctgcagaagcgcttcaagggcaaggtcgagctggccatgaccgtgccgctgaacgacgtcaagggccaactggccaacctggtgtatccggggttcgtccgcgccaccccgctggagtggttgaaggagtatccgcgttacctcaaggccatcgagcagcgcctggacaaggtcgccggccaggtccagcgcgaccgggtgtggagcggcgagctgggcgaactctgggcgcaataccaggcgcgcctcgccaagcacgcccaggaaggcaagcgcgacgccgagttgcaggtgtatcgctggatgctggaggagtaccgggtctcgttgttcgcccagcaactggggacccggctgccggtctcggacaagcgcctggccaagcagtggagccaggtcgagggctag

SEQ ID NO: 325887 - DNA, 1347 bp, Pseudomonas aeruginosa
atgaccccaggttatcccctcgccctctctcttgccgtctccatggccgtgctcggcagcgccttgccggcccaggcgcgccaggacgatccgtcgctgttcaaccgccaggcccgtggcgaactcagcgagtacggcggcgcacggcgcgtcgagcaggacctgacccaggccctgaagcagtcgctgtcgaagaagaaggcgaagaacgtgatcctgctgatcggcgacggcatgggcgactccgagatcaccgtggcgcgcaactacgcgcgcggcgcgggcggctacttcaagggtatcgatgcgctgccgctgaccggccagtacacccactactccctgcacaaggacagcggcctgccggactacgtgaccgattccgccgcctccgccaccgcctggaccaccggggtcaagtcgtacaacggcgcaatcggcgtggatatccacgaacagccacaccgcaacctgctggagctggccaagctcaacggcaaggccaccggcaacgtctccaccgccgagctgcaggacgccaccccggccgccctgctcgcccacgtcaccgctcgcaagtgctacggccccgaagccaccagcaagcagtgcccgagcaatgccctggagaacggcggcgccggctcgatcaccgagcaatggctgaagacccgccctgacgtggtcctcggcggcggcgccgcgaccttcgcggaaaccgccaaggctggccgctatgccggcaagaccctccgcgcccaggccgaggcccgcggctaccggatcgtcgagaacctcgacgagctgaaagccgtgcgccgcgccaaccagaagcagccgctgatcggcctgttcgcgccgggcaacatgccggtgcgctggctcggtccgaccgccacctaccacggcaacctgaaccagccggcggtgagctgcgaggcgaacccgaagcgcaccgccgacatcccgaccctggcgcaaatgaccagcaaggccatcgagctgctgaaggacaatccgaacggcttcttcctgcaggtcgagggcgcgtccatcgacaaacaggaccacgccgcgaatccgtgcggccagatcggcgagaccgtcgacctcgacgaagccgtgcagaaggccctggccttcgccaaggccgatggcgagaccctggtgatcgtcaccgccgaccacgcccactccagccagatcatcccgccggaaaccgccgcgccggggctgacccaactgctcatcgccgcctacggcccgcaggccgccaatgtcaccggcctgaccgaccagaccgacctgttcttcaccatccgtcgcgcactgaacctgcgcgactga

SEQ ID NO: 325888 - DNA, 984 bp, Pseudomonas aeruginosa
atgtcccgagtgatccgttttcatcagtttggcccgccagaggtcctcaaatgcgtcctggtgcgtgtccaggcgatcggcgtgagctggaaggatgtgctctggcgtcagaacctggccccggagcaggctgcgctgccgtccggtctcggcttcgaactggccggcgaggtgctggcggtcggcgccggcgtcggcgacctgccgctgggttcccgcgtggccagtttccccgcccatacccccgatcattatccggcctatggcgacgtggtgctgatgccgcgcgcggccctggcggtctaccccgaggtactcaccccggtggaggccagcgtctactacaccggcctgctggtggcctatttcggcctggtcgacctggccgggttgaaggctgggcagaccgtgctgatcaccgaggcggcgcgcatgtacggaccggtctcgatccagttggccaaggctctcggcgcgcgggtgatcgcttccaccaagtccgccgaggagcgcgagttcctccgcgagcagggcgccgacaaggtggtggtgaccgacgagcaggacctggtcctggaagtcgagcgcttcaccgagggcaagggcgtcaatgtcatcctcgacgaattgggcggcccgcagatgaccctgctcggcgatgtctccgccacccgcggcaagctggtgctgtatggctgcaacggcggcaacgagtcggcgttcccggcctgcgccgcgttcaagaagcacctgcagttctaccgccactgcctgatggatttcaccggtcatccggagatgggcctggaacgcaacgacgagtcggtgagcaaggccctcgcgcacatcgagcaactgacccgcgatcgcctgctcaagccggtggtcgaccgggtattcgagttcgaccaggtggtcgaggcgcaccgctacatggaaacctgtccgaagcgcggccgggtggtgatccacgtcgccgattga

SEQ ID NO: 325889 - DNA, 915 bp, Pseudomonas aeruginosa
atgaaccgaaacgacctgcgccgcgtcgatctgaacctgctgatcgtgttcgagaccctgatgcacgaacgcagcgtgacccgcgccgcagagaaactgttcctcggccagccggccatcagcgccgcgctgtcgcgcctgcgcacgctgttcgacgacccgctgttcgtccgtaccggacgcagcatggagcccaccgcgcgagcccaggaaatcttcgcccacctgtcgccggcgctggattccatctccaccgccatgagtcgcgccagcgagttcgatccggcgaccagcaccgcggtgttccgcatcggcctttccgacgacgtcgagttcggcctgctgccgcccctgctccgccgcctgcgcgcggaggcgccggggatcgtcctcgtcgtgcgccgcgccaactatctattgatgccgaacctgctggcctcgggggagatatcggtgggcgtcagctacaccgacgaactgccggccaacgccaagcgcaagaccgtgcgccgcagcaagccgaagatcctccgcgccgactccgcgcccggccagctgaccctcgacgactactgcgcgcgaccgcacgcgctggtgtccttcgccggcgacctcagcggcttcgtcgacgaggaactggagaaattcggccgcaagcgcaaggtggtcctggcggtgccgcagttcaacggcctcggcaccctcctcgccggcaccgacatcatcgccaccgtgcccgactacgccgcccaggcgctgatcgccgccggcggcctgcgcgccgaggacccgccgttcgagacccgcgccttcgaactgtcgatggcctggcgcggcgcccaggacaacgacccggcggaacgctggctgcgctcgcggatcagcatgttcatcggcgatccggacagtctctga

SEQ ID NO: 325890 - DNA, 1245 bp, Pseudomonas aeruginosa
atggaacagtcatcccacttctcctggcgctaccccctcgcactcgcggccgtactggtcctgagcgcctgcggcaaggccccggaaaccacccaaggcatggcggcgcccaaggtcagcgtcgccgaagtcatcgaacaaccgctgaacgagtgggacgaattcaccggccgcctggaggccccggagtcggtggagctgcgcccgcgggtatcgggctacatcgaccgcgtggccttccatgaaggcgccctggtgaagaaaggcgacctgctgttccagatcgacccgcgcccgttcgaggccgaggtcaagcgcctcgaagcccagctgcaacaggcccgcgcggcccaggcgcggagcgtcaacgaagcccagcgcggcgaacgcctgcgcgccagcaacgcgatctccgcggaactcgccgacgcccgcaccaccgccgcccaggaagccaaggcggcggtcgccgcgacccaggcgcaactggacgcggcacgcctgaacctgagcttcacccggatcaccgcgccgatcgacggtcgcgtcagccgcgccgaggtcaccgccggcaacctggtcaactccggggagaccctgctcaccaccctggtcagcaccgacaaggtctacgcctacttcgacgccgacgagcgcgtgttcctcaagtacgtcgagctggcccgccaggccggtcgcgacacgcgcagcgagagcccggtgtacctcggcctgagcagcgaggacggcaacccgcacctgggccggctggacttcctcgacaaccaggtcaacccgcgtaccggcaccatccgcggccgcgccgtgttcgacaacgccaagggcgagttcaccccgggcctctacgtgcgcctgaagctggtcggcagcaagacctacgccgccaccctgatcaaggacgaagcggtcggcaccgacctgggcaagaagttcgtgctggtcctggatggcgacaacaagaccgtctaccgcactgtcgagatgggaccgaagctggagggcctgcgcatcgtccgcagcggcctgagcaagggcgaccggatcgtcgtgaatggcctgcagcgggtccgcccgggcatgcaggtggatccgcagaaggtcgagatggccagcgccgacaccctggccaccctcgcgcgcctgcggcagtcggtcggcgacagcgaaccaccgaaggtggcggcgtccaaggacaacgccactcgcaacgagccgcgcggctga

SEQ ID NO: 325891 - DNA, 3189 bp, Pseudomonas aeruginosa
atgaatttctcccaattcttcatccagcggccgatcttcgccgcggtgctgtcgctgctgatcctgatcggcggcgccatctccctgttccagctaccgatcagcgaatacccggaagtggtgccgccgaccgtcgtggtccgcgccaacttccccggcgccaacccgaaagtcatcggcgagaccgtcgcctctccccttgaacaggcgatcaccggggtggagaacatgctctacatgtcctcccagtcgacctccgacggcaagctgaccctgaccatcaccttcgccctcggcaccgacctggacaacgcccaggtgcaggtgcagaaccgcgtcacccggaccgagccgaagctcccggaagaagtgacccggctcggcatcaccgtcgacaaggcctcgcccgacctgaccatggtcgtgcacctgacctcgccggataaccgctacgacatgctctacctgtcgaactacgcggtgctcaacgtgaaggacgaactggcccgcctcgacggcgtcggcgacgtccagttgttcggcctcggcgactattcgctgcgcgtctggctggacccgaacaaggtcgcctcgcgcaacctcaccgccaccgacgtggtcaacgccatccgcgagcagaaccgccaggtcgccgccggcaccctgggcgcgccgccggcgccgagcgataccagcttccagttgtcgatcaacacccaggggcgcctggtcaccgaggaagagttcgagaacatcatcatccgcgccggcgccaacggcgagatcacccgtctgcgcgacatcgcccgggtcgagctgggctccaaccagtacgccctgcgttcgctgctgaacaacaagccggcggtggcgatcccgatcttccagcgtcccggctcgaacgccatcgaaatctccaacctggtgcgggagaagatggccgagctgaagcacagcttcccgcagggcatggactactccatcgtctacgacccgaccatcttcgtccgcggctccatcgaggcggtggtgcacaccctgttcgaagccctggtgctggtggtgctggtggtgatcctgttcctgcagacctggcgcgcctcgatcatcccgctggccgcggtgccggtgtcgctgatcggcaccttcgcggtgatgcacatgctcggcttctcgctcaacgcgctgtcgctgttcggcctggtgctggccatcggcatcgtggtggacgacgccatcgtggtggtggagaacgtcgagcgcaacatcggcctcggcctcaagccggtggaagccaccaagcgtgccatgcgcgaggtgaccgggccgatcatcgccacggcgctggtgctctgcgcggtgttcatcccgaccgcgttcatctccggcctcaccgggcagttctaccgccagttcgccctgaccatcgcgatctccacggtgatctcggcgttcaactcgctgaccctgtcgccagcgctggcggcggtcctgctcaagggccaccacgagccgaaggaccgcttctcggtgttcctcgacaagctcctcggcagttggctgttccgtccgttcaaccgtttcttcgaccgcgccagccatggctacgtcggcacggtgaaccgggtcctgcgcggcagctcgatcgccctgctggtctacggcgggctgatggtgctgacctacttcggcttctccagcacgccgaccggtttcgtcccgcagcaggacaagcagtacctggtggccttcgcccagttgcccgacgcggccagcctggaccgtaccgaggcggtgatcaagcagatgtccgagatcgccctggcgcagcccggcgtggcggactcggtggccttccccggcctgtcgatcaacggcttcaccaacagcccgaacagcggcatcgtgttcaccccgctgaagccgttcgacgagcgcaaggacccgagccagtcggccggggccatcgccgccgcgctgaacgccaagtacgccgacatccaggacgcctacatcgcgatcttcccaccgccgccggtacaggggctggggaccatcggcggcttccgcctgcagatcgaggaccgtggcaaccagggctacgaggagctgttcaagcagacccagaacatcatcaccaaggcccgtgcgctgcctgagctggaacccagctcggtgttctccagctaccaggtcaacgtgccgcagatcgacgccgacatcgaccgcgagaaggccaagacccacggcgtggcgatcagcgacatcttcgacaccctgcaggtctacctcggctcgctgtacgcgaacgacttcaaccgcttcggccgtacctaccaggtcaacgtccaggccgagcagcagttccgcctcgaacccgagcagatcggccagttgaaggtgcgcaacaacctcggcgagatggtcccgctggcgtccttcatcaaggtcagcgacacctccggtccggaccgtgtgatgcactacaacggcttcatcaccgccgaactcaacggcgccccggccgcgggctacagctccggccaggcgcaggcggcgatcgagaagctgctgaaggaggaactgcccaacggcatgacctacgagtggaccgagctgacctaccagcagatcctcgccggcaataccgcgctgttcgtcttcccgctctgcgtgctgctggccttcctcgtgctggccgcccagtacgagagctggagcctgccgctggcggtgatcctgatcgtgccgatgaccctgctgtcggcgatcaccggggtgatcctggccggcagcgacaacaacatctttacccagatcggcctgatcgttctggtggggctggcgtgcaagaacgcgatcctgatcgtcgagttcgccaaggacaagcaggaggaaggcatggaccgcgtcgccgcggtgctggaagcctgccgcctgcgcctgcggccgatcctgatgacgtccatcgccttcatcatgggcgtggtgccgctggtgatctccaccggcgccggcgccgagatgcgccatgcgatgggcgtggcggtgttctccgggatgatcggggtgaccttcttcggcctgctgctgacgccggtgttctacgtcctcatccgccgcttcgtggagaaccgcgaagcgcgccgcgccgccaacgacaaaggcctgccagaggtgcatgcatga

SEQ ID NO: 325892 - DNA, 828 bp, Pseudomonas aeruginosa
gtgcctggcgcgctcggcttccgcctgcagttgcggcacgctggcggcggtggccgccaggcgcgcatcggcgcgcagtacgtcgagttcggcaccgaccccggcgtcgcgcagttgctcggtgagctggcgcgactccttctggttctccaggttgctcagggcaatcttctcgcgcagttgcgcgccgcgcagctggccgtaggcgtccaccagctcggcgatcaggctgacctgcagttgctgcaggtcggcctcggccgcttcgctgagggcgtcgctggactccagctgacggcggatgcgcccgaacagatcaagctcccaggcgctatccaggccaaggtcgtagcgctcgctgttgacccggtcctcggtcactcccggttgctggcccttgccgatgtcggcgctggcgcggctggtgaccaccgggaagcgatcgttggccacgtcgtcgcgcagggcgcgggcggcgcgcaggcgggcgaaggccacgcgcaggtcgcggttgccgctcagcgactgttcgaccaactggttcagggtcggatcgtcgaactgtttccaccacaggctttcgaagcggctgcggtcgtagggcttgctcgccgtggcgtcgatcttcgccgccgcggtgtcgggggtccggtagtccggacccaccgtgcaggcgctgagcgccagcagactgaacagacccagggcgggcgcgagcccgctccggatcgactgcgcgtgaatcatgcatgcacctctggcaggcctttgtcgttggcggcgcggcgcgcttcgcggttctccacgaagcggcggatgaggacgtag

SEQ ID NO: 325893 - DNA, 4416 bp, Pseudomonas aeruginosa
ttgcgcgccatcggtgatgtcgaaggtgacgtaattgccgccttgcccgtagagcaccgctggcgtcgagccgatcaccatgcgcgccgcaccgaaggcgttgagatcgtcggcccgcagcgtcacgccctggaacccctcgctggcctgcgcgccggcgccgacgatctcgatccgctggtcgttgcccaataccaccagactaccgccatagccgcctttggcggcctggaacagcccggtgccgtcgaacgccagcgcatcggcaccgccaccggcgagcaggtcaaggcgcaggctgcgcgcatccaccggcagcatcggccgcgggatgccacggcgagcagcatcggccatggcgaagtcgctgtaactcgtttcgttgtactgcgaatggcgccgcagcacatccgccggggtcagcagcacctggcggaacagttcgtcgcgcaccccggtgccggcgagggacaactgcccggccagcgaccaggagccgctgcgcatgagctgggtgggcgctgcccgtcccagcccggcctggccgttgagttcgacccggtacgcgccgggcagcagggcgtaggtcgacggcaacagggtataggttcccgccgacaggccgggcacgccgctaccgatgctgatctgctggccgaccagcgggtcgacggcgccgccttcggcggccaccggcgcgatgcgctgaacgccgggcacgatggcgtagatcggattgtcggccagtcccggcaggtcgaagcggccctcctcgtcgaaacgcaccagcgggttgtagcgcgcatcggtggagccaccgcggccggaaacgaaaccggcgccgagcagttcgccgccgccggaaagatccagcgtcgctccggacgccacccgtacggagcggccacccaggtcgaccccggtatccattatccccctctcgttgaagctaccgccgacgccggtcagggcgatttcctccccggcatagcgccagacctggccgtctaccgtgccgccgtagggcaaggtcaggccggcgccgctgaccgaggtcaggctgccagacaacaactcgaccttgtcggcgttctggccgatttccagatagcccaacggagcgcgcacgacgccgccctgaacgacgctcgccgcccccagcgacaagcgaccgaagaccgccaggggctgctctggcgtcgtcgcgtcgctgcgctcgatacgcaagctgcgcgccgggtcgaacgccgcagcggcgccatcggcctggtagccgtagccggcgagaatccgcgcgcccgccccggtgcccggatagagctgcgcagcgcggatgagcagatcgccgccactgagcacctgggtgttgatgcgctctacgggcgtcgcgttccccgccagcaaacgcatgtcgcccgtgctggacagctcgacccggtcgaagccacgccggtcaatcgtctgcgtcccgccactggcgtcgcggaaactgccacgcgagccgaagaccaggctgtcgcggatatccagcacctgcgcgctggcttcgaagagcgcctcgctaggttgcctggaaacctcgaacaggccggtcgacagcggctgggtttcgttgttctccgccgcttcgttgacgaatgctcccgccaacagcagggacggtgccgacaacctgacccggctatcgccggcggcgccttcgccaagccccaatgccccgctgtagaggcgcaaacgttgcgccagggacagctccagatcgccggcgaaactcagcaggccgtcgctgaacagggtcaggtcaccgaacccgccatcctgtacctggctcgccgccaggcggccatggccataggcatagtctcgcccttccccggcggcttcgcgctgctggccgacgatcagctcgcgcgggcgcagcacctggtcggtcgccaggctggtcaggtagttcggcgtggccagcgccagcgtcaggctgccggcggcggcaccttccccgccggcgaaggcgcgcaggtcgccatccaggtacaagccattggccgacgccagggagatactgccgccggcgctgctgacccgggtctggccgactccgggcacgtccagaagcgcctgggtgccggaggcatccagcaggcttcccggaagcaggtcgatgaacagttcggcggcatcggccttgccgctggcatgttcgaccgtgccgccgatgacgatgctgccaccatcgaccacctggccgtagcgccgcccctggaagtccagcgcggtcgcagcgcgtgcggcgacatcgagcacaccctcctcgccaacgcggatggcgcgctggtggccgacgctctcgacctggtcgcgcaccggatcgggcaacgccacgctgcccagttcgatcgagccgccccaggcgttcaggcgaccatcgacgttcaactggccgacgctgcgcagctcgatgcgctggccgggatcgacctccagcaggctgccatgaccgatgtcgaggacactggcgaagcccttgtcgaagaacccggcggccaacgccagggtgccgtcctgcgccgccgcgccaatgctcacccgcggcgcctggacgctcagggtgccggcgccggcgacgccatggccggccagttcaccgcccagttgcaggcggccgtcacctgccgccgagccggtgttggccgacagcgtcaggtcgccgcccttgccgcccacctgtttgccatcggcgagcagcgcggccccggacgacacgtcgatccggctgccatcgcccagcgacaggtcgccgctgctacgcagggaaatccgcccgccgtcgagataagctcggtcggcatccacgccgccctgcatctggttgctccagaggccacgcgcatccagcgtcacgccatcgcccagggtcagggcggcacgttggccggcggcgggggtgagataggtatcgatccgctcgccacgggccacctccacctgctccagcacgttgcccaggcgcaaactgccggcgcgcgccgtgaggtcggcgttcacctcgacctcgggcgcgtacaggacgatctcgccgccatcgccgacctgcagggcattgtccaccgcgatccgctcacgggcggccacgcgcagcgcccccaactcgaaacccgacagccgttcgctgtcgagcaggaggacgccccgctgttcctcggccagcgcggtatccagatccaggttcgccgccagcggctcgccgccatcggccaggcgcacctgctgcagggtcggcgcaaggttgtacagcacgttgccgctggcactttcgtagcgcggggtatagctgcccacgatcagctcggcgccgcgcgccactgcgttctgcgcctgctggtagccatccgcccccggctgcggcgcgcgcacctggcgctcgccctggaataccttgccgagcaggtcgccctcgagcaccgccgaagcggtgccgaccaccaggcggccagcatcgcggccgaccatgtagccgctctcgtaacggctttgcggggcgatcagcggattgtagaaatagcgcgtctgcccccagcgcgggctgctgtcctcatagccgcggtagatgccctcgtagagcaggtcgccgggggcgcgggagatttcgtagagacgtccgtcgctgcccttgagccaggtctgccggatcaggccgccctgcacatcgagggtcccgccggagaggttgaccgtcgagccgggctggctcaccagttcgccgccggtgaaggtcagggtgccgccctgggccatccactcgccggccgaatggttgcgcgtgccaaggtagccacccagttccagcaggccgccgccggtataccagcgatcggtggcgtagccgttggtgccggccggaaccaggaccagttcgcgggcatcgacccagacatcattgctggccagtccgccgccgtcgcggttgaccggcgcgtcgcgctgctcgttgccctggacattgatctggatgttgttgctttccatcgccaccttcaccccgacggcgccggcgacgtccacctgcgcgccgtcgcgcagcaggctccggcccgccgcgctgaccgccacctggccgccgctggccagggtcagcgagccgccctggaaatccacgctaccgccgctgacgatctcgacccgcgactgctcgctgcgatcggcgacccggctgaggttgtcgaaacgaccgatcacgttgttggtcggcgtggtgccatccagcgcctgctgggcggcatcgcgctggctgtcgagggcgccggcgccgctggcatcgaccagcaccgcggtggtgctgccctcgcccaggaccacgctgcccctggcgtcgctggccgagttgagcaggtggatggtgccgcgcacgtcggttga

SEQ ID NO: 325894 - DNA, 1194 bp, Pseudomonas aeruginosa
gtgcgcaagcactgccggtttctttttttccggcgcttagccgctttccatgaactttccgtgacaagacttcggcccgccctgttgcgggctgtctttctatcaggaatgcgcgttggcaagccgacgcgtcgagttgaacacgcccaaggaatctcgcgtcatgccgtctcgtccgttcgtgccgtcgtcccccgtcaccgtttcgctcgatggcggcttgccgcggctgaaaccgctggcgcagatcatcgccttgctcatggttgcaggtggcgcccaggcttcccagccgttcagcgccgcctggttcgccgccaagggagcccagcagagcgccggggcggcgcgtccgggcgcgcagttgccgggcatgacgccaccgccgctggcccagcagcagaaggtcaaccagcagttgcagcgttcgctgcaaaacctcaacaacaccgtggcggccatcgccgcgcagcaggccgcccaggcggcgggacgccaggctgcgctggcggcgccgacggacatcccggacggcctgggcgagggcggcctgaaagtggacgcttccctgcctttcgagcaggcctggcagaacgccaaggcgccagtgcagtcgcaggccgacgggcgtaccacggtgacggtagagcagaccgcggatcgggcgatcctcaactgggaaaccttcaacatcggccggcagaccaccctgcagttcgaccagcagagcaactgggcggtgctcaaccgggtcaacgacccgagcgcccggccgagccagatccagggccagatcaaggccgacggcacggtgatggtggccaaccgcaacggtgtggtgttcagcggcagcagccaggtcaacgtacgcaacctggtggctgccgccgccagcatcagcgacagccagttccgcgaacgcggcctgtatttcgacgccaacggcagccagccgagcttcaccgacgccgccggcgcggtgcgggtggagcagggctccttgctgcagaccgccaatccggccagctccaccgcggcgggcggctacgtgctgttgctcggcagcgaggtggagaacgccgggcagatcgtcacgcccaagggccaggccaccctggcggcgggcgacagcttctacattcgccgtggcgtcggcaccgatggcaacctgcgctctaccacccgcggcaatga

SEQ ID NO: 325895 - DNA, 1179 bp, Pseudomonas aeruginosa
atgtacaagcgctctctgatcgctgcctcgctgagcgtggccgccctcgtatccgcccaagccatggccgacatcaacggcggtggcgccaccctgccgcaacagctgtaccaggagcccggcgtcctgaccgccggctttgccgcctacatcggcgtaggcagtggcaacggcaaggcggccttcctgaacaacgactacaccaagttcgtcgccggcaccaccaacaagaacgtgcattgggctggtagcgactccaaactgagcaagaccaacgaaaccaacccctatctgagcgcccatggctccgcctggggtccgctgatccaggtgccgtcggtagccacttctgtcgctctgccgttcaacaagtcaggtagcaacgccgtcaacttcgcagacgtgaacaccctttgcggtgtcttctccggccgtctgaccgattggagtcagattcctggctcgggccgtagcggcgccatcacagtggtctaccgttccgagagcagcggcaccaccgaactgttcacccgcttcctcaacgcctcctgctccagcaccctcgaaggtggcaccttcgccatcaccaccagcttcggtagcagcttctccggcggcctgccggctggcgccgtatcggcccagggcagccaggccgtgatgaatgcgctcaacgccgcccaaggccgcatcacctacatgagcccggacttcgccgcgccgaccctggccggtctcgacgacgccaccaaggtcgcccaggttcgcggcgtatccccggcgccggccaacgtttcggcggccatcggcgccgttactccgccgactactgcccagcgttccgatccgaacaactgggtaccggtcttcgctgccaccgccaaccccaacgacccgagcgtgcgtccgtatccgaccagcggctacccgatcctcggcttcaccaacctgatcttcagccagtgctacgccaacgccacccagacccagcaggtgcgcgacttcttcacccgtcactacggcgccaccgccaacaacgacaccgcgatcaccaaccatcgcttcgtgccgctgccggcttcctggaagcttgccgtacgccagtcgttcctgacctccaccaacaacttgtacatcggccattccaacgtctgcaacggcatcggccgtccgctctaa

SEQ ID NO: 325896 - DNA, 1410 bp, Pseudomonas aeruginosa
atgagcctgctgccctacgcctgggccaaggcgcagcgcgccttgctgcggccgggcgagcatggcgcgaccctgctggtcagcccgcgcacgcccggctgggcgatcagcgaggtgcgccagcggcatgagttggccagcctggagagcgtccgcgacgacgaactcgacaccctgctggccagcgcctactccgataccggcagcgccgcggcggtggtcggcgcggcggagagcgaggtcgacctcgaccgcctgatggacgatatccccgaggtcactgacctgctcgacacccaggatggcgcgccagtgatccgcatgatcaacgcgctgctgacccaggcggcgcgcgatgaggccagcgacatccacatcgagcccttcgagacccattcggtggtgcgctaccgcgtcgacggcgccctgcgcgacgtggtcgcgccgcgcaaggcgctgcacgcggcgctggtgtcgcggatcaagatcatggcgcagctggatatcgccgagaaacgcctgccccaggatggccgcatcgccttgcgggtagccgggcggccgatcgacattcgcgtctccaccgtgcccaccggccacggcgaacgggtggtgatgcgcctgctggacaagcaggccgggcgcctgaggctggagaccctgggcatggccccgggcgtgctggcgccgctggacaacctgatccgccagccgcacggcatcgtgctggtcaccgggcccaccggcagcggcaagaccaccaccctctacgccgccctggcgcggctcgacgccagcaccagcaacatcctcaccgtcgaggacccggtggagtacgatctgccggggatcagccagatccaggtcaacgcgcgcatcgacatgaccttcgccgtagccctgcgggcgatcctccggcaggacccggacatcatcatgatcggcgagatccgcgacctggagaccgcgcagatcgccgtgcaggcctcgctcaccggacacctggtgctggccacgctgcacaccaacgacgcggtgtcggcagtgacgcggctggtggacatgggcgtcgagccgttcctgctcgcctcgtcgatgcttggcgtactcgcccagcgcctggtgcggcgcctgtgcacgcattgccgggtcgaagaggacggcggctggcgcgcggtcggctgcccggcctgcaaccagaccggctacagcgggcgcaccggcatccacgagctgttcgtgatcgacgacgagatccgccgcctggttcaccagggccgcgccgagcaggatctccgcgaagccgcccgcgccgccggcatgcgcagcatgcgcgaggacggcgagcgctggatcgccagcggctccaccaccctggaggaaatcctccgcgtgacccgggacgcctga

SEQ ID NO: 325897 - DNA, 375 bp, Pseudomonas aeruginosa
atggacagggacgcattgatcggcgcctggcgggagtgcatccgtggcgcggacaaatcctgggtgctgttcgcccagggcacttgcgtgatcctcacgcagccggagccggacctcgcggcccaggcgcgggcattgctggccgagtggggagcggtacaggtcggcacgccggcgggcgacttcggcgtgatcaccctggacaacggccgcggctgggtggtgaccgggcatcacccggacatccttaccttcgtccctcgcgaggaactggaggaggacgccggcgagctgctcgtcggcatgcacggccgctcccggcggggcgaggatgccgaggccttggcggtgatccatgtcgaggaccggcgataa

SEQ ID NO: 325898 - DNA, 1401 bp, Pseudomonas aeruginosa
  misc_feature (1136)..(1145): n is a, c, g, or t
atggccaaggccaagcgcatgtacggctgcaccgagtgtggcgcgaccttcccgaaatgggccggccagtgtgcggattgcggggcctggaacaccctggtggagaccgtcgtcgaggccgcgccgagcggctccgggcgcggcggctgggccggccagcaggccaacctgaagaccctggcggaggtcagcgtcgaggagatgccgcgcttcacgaccggttccaccgaactggaccgggttctcggcggcggcctggtggacggttcggtggtgctgatcggcggcgatcccggcatcggcaagtcgaccattctcctgcagaccctttgcaacctggccagccgcgtcccggcgctgtacgtcaccggcgaggaatcccagcagcaggtggcgatgcgcgcgcggcgcctgtcgttgccggaagacaagctcaaggtgatgaccgagaccagcatcgagaccatcatcgccaccgcgcgccaggagcagccgcgggtgatggtgatcgactcgatccagaccatcttcaccgagcagttgcaatcggcgccgggcggcgtcgcccaggtccgcgagagcgccgcgatgctggtgcgctatgccaagcagagcggcacggcgatcttcctggtcggccacgtgaccaaggaaggcgccctggccggcccgcgggtgctcgaacacatggtcgacaccgtactgtatttcgaaggcgagtcagacggccgcctgcgcctgctgcgggcagtgaagaaccgcttcggcgcggtcaacgaactgggagtgttcggcatgaccgacaaaggcctgaaggaagtgagcaacccttcggcgatcttcctcacgcgggcccaggaagcggtgcccggcagcgtggtgatggccacctgggaaggctcgcggccgatgctggtggaggtccaggcgctggtcgacaccagtcacctggcgaatccgcggcgggtgaccctgggcctcgaccagaaccgcctggcgatgctgctggcggtgctgcaccggcacggcggtatcccgacctacgaccaggacgtgttcctcaacgtggtgggtggggtcaaggtgctggaaaccgcctccgacctggcgttgatggcggcggtgatgtccagctnnnnnnnnnngcttgcgcaaccgcccgctgccgcacgacctgctggtgttcggcgaggtcgggctgtccggcgaggtgcgtccggtgccgagcggccaggagcgcctgaaggaagccggcaagcatggtttcaagcgtgccatcgtacccctcggcaacgcgccgaaggaggcgccggcgggattgcaggtgatcgccgtgacgcgcctcgagcaggccctggacgccctcttcgagtgacccgcctcagtcgtcgtgggcgctga

SEQ ID NO: 325899 - DNA, 222 bp, Pseudomonas aeruginosa
gtgcgaatcgccgctgctggtgacctggacgtgcggcgccaggctcgcggcgagggcgccgaaggcgtcgttgaggaccagcacccggcattgcgccgtcacgccccgttcgtgcaactggttgagcaggtattcgtcggcggcgtcgaacgcctggaggggctcgccgtcctgctcgggctggcggaccagatcgagctgggcgaagggggtggcgaatag

SEQ ID NO: 325900 - DNA, 1329 bp, Pseudomonas aeruginosa
atgcatattcaatcatctcagcagaacccgtctttcgtggctgagttgagccaggccgtggccgggcgcctgggacaggtcgaggcccgccaggtggccactccccgggaggcgcaacaactggcccagcgccaggaagcaccgaagggcgagggcctgctctcccgcctgggggctgccctcgcgcgtcccttcgtggcgatcatcgagtggctgggcaaactgctggggagccgtgcccacaccgccacccaggcgccgctctcccgtcaggacgcgccgcctgccgccagtctctcggccgccgagatcaagcagatgatgctgcaaaaggcactgcccctgaccttgggcggacttggcaaggcgagcgagctggcgactttgacagaggagagactggcgaaggatcacacgcgcctggccagcggcgacggcgccctgcgctcgctggccaccgccctggtcgggattcgcgatggcagccggatcgaggcttcccgtacccaggctgcccgcctgctcgaacagagcgttggggggatcgcgctgcaacagtgggggaccgcgggcggtgccgccagccagcatgtactcagcgcaagcccggagcaactgcgcgaaatcgccgtccaactgcatgcggtaatggacaaggtcgccctgttgcgccacgcggtagagagcgaggtaaagggcgagcctgtcgacaaggcgctggcggatggcctggtggagcacttcgggctggaggcggagcagtacctcggcgaacacccggacgggccgtacagcgatgccgaggtgatggcgctcggtctctataccaacggcgagtaccagcacctgaatcgttccctgcgtcagggacgggagctggatgcgggccaggcgttgatcgaccggggcatgtctgccgcgttcgaaaagagcggaccggctgaacaggtcgtgaagaccttccgcggcacccagggcagggatgccttcgaggcggtgaaagagggccaggtcggccacgacgccggctatctctccacctcccgggaccccggcgttgccaggagcttcgcgggccagggcacgataaccaccctgttcggcagatccgggatcgatgtcagcgagatatcgatcgagggcgatgagcaggagatcctctacgacaaggggaccgacatgcgcgtactgctcagcgccaaggatgggcagggtgtgacccgtcgggtgctcgaagaggccacgctgggggaacggagcggccacggcgagggactgctcgatgccctggacctggcaaccgggacggatcgttcaggcaagccctaa

SEQ ID NO: 325901 - DNA, 1662 bp, Pseudomonas aeruginosa
atgcgctacgcccgtcacgcaagccgatactccctcttcaccctggccgtctcggcagccctgctgcccggcgccggctgggccgccaacggcgacctcgccggcgcccgcaagccgcccagcgtcgcctgctcctggaaccgcgaggcagcgttgtcctacgaggagcgccggctcgacacgccgctgccgttcagcggcgccaacgtcgtcacccacgaccagacgccgctggccgagcgcatcgtcaagggcgccggcttcgacggcttcgaaccggccttcgccaagcgcctgtgcgccgccgacggccgcaccccggtcaccagctacgccaaggcactgaagctggtcaccgaagagggccgcgcgctgtggcgcgccgccgtcgaccgggcccaggggcgccgtgccattcccgccggcgcgctgccggccagcgatgaccgcatgctctactggacgcgcctctacatgacccgcaccctgcgccaatgggcgccctccttccgcctcggcaaggcccaggcccaggcgctgcaatggcgcttcgaacgcgcctcgcgcggacagttggacatcgacctgccgcgccgctacgccgccgacggctcgcgctaccggcggatgatcatcagcggcttcgacgtcttcaccctgggcactcccgggacggcgaacaccggcctgcgcaacggcaacccctcgggcgccaccgcccttgcgctggacggccgcgagttcaggctggccgacggcagcctgctgcgtatcgaggcctacctgttgccggtcagctacgacccgttcaaccgcggcatgcaggaagacaccctgggcccctggttccgccccggcccgcgccgggtcgacgcctccgtcaccatcagccagggcggcgccaaccagttctggctggaggcctggaacggccgcttccacggctcctccgccggcaacgacggcatcgtctactgccccgccgacagcgctttgcccaactacgtgcttcccctgggcagcgtgaccaatcccggcaccgcgccgatttccctgcgcggctccggctgcaatatcaacccgccgcgccgctggctcggctacgacagcgccagccgctggcggcagaacctgccggcgcagttctccaaggcctcgctgccggtccgccagttgctcgccgccgatacctggcgcggcatcgagcggccgccgggcgctaccagccaggccgcggaaggcttcgacgtcacctggcacaccaactacgacttcttccccgattgcgccaacccgcgcaccgaaaacgtgccgaccaacggggtgatgaacgccatgcccgatccctccctggtgctcccgccgaaccgacggatctgcgcgcgcaacggcggtggcggcgactacctgtccaacgagagcgcctaccgcaacacggtgctgcgcgacgcgttccgcctggagattcccgccgggcacatccatgtcccggtgatgaacaactactacaccggcgtaccggcgagcggcggcggcgcgcgcaacgacaacgccatcagcgacgcccgctacgaggcctaccgcagcgccatcgtggcgcagacccgggcgctgctggtgggcgtcggcaacgccctggcgcagggggcgcaagcggactag

SEQ ID NO: 325902 - DNA, 609 bp, Pseudomonas aeruginosa
  misc_feature (546)..(555): n is a, c, g, or t
atgggacgccgacgaacgatcgaccgcgaccagttgctcgatgccgccgaggcggtgatcgcccgcgagggcgcggccggcctgaccatcgatgcggtggcgaaggaaatgggcatcaccaagggcggcgtgcagtactgcttcggtaccaaggacgcgctgatcgacgcgatcttcgagcgctggggcaaggcctacgacagcctgttcgaagcggtggcggggaagcagccgacgccgctgacgcgggttcgcgcgcatgccgaggcgacccagcgttcggacgagttgtccagcagcaaggcggcggcgctgatggcggcgctgatccagacgcccgagcacctggagggcagcaaccagtggtatcgcagccggttggaaggcctggacctgtccgcacccgaggggcgccgtgcgcgcctggcgttcctggcggtggagggcgccttcatgttgcgctacttccgcctgatggacattggccaggacgagtgggactcgatgctcgacgacgttcgtgcgttgttgctgacggcggctggnnnnnnnnnngctgcgggtggtcgcctcagtcgaaggcgaagtgctcgctcttcaggtccatga

SEQ ID NO: 325903 - DNA, 405 bp, Pseudomonas aeruginosa
gtggtggtctggcggctggaccggcttggccgctcgatcaaggacctgatctacctggtcgagcaattggaggatgccggcgtgggtctgaagagactccaggagaacatcgacaccacatccaccggagggcgtttggttttccacctctttgccgcgctagccgagttcgagcgcaacctgatcagtgaatgcacccatgcgagactatctgcagcacgtgctcgcggtcggctgggcggccgcaagaaacgcctggatcccgccaagcgcaaagtcgccctgaagctctatcacgagcgccaatacaccgtggtggagatctgtcggatgatgggaatcggccgctcgacgctctacaactacatcaccgaggcagaacggaatgcccaccagcaggcgtaa

SEQ ID NO: 325904 - DNA, 252 bp, Pseudomonas aeruginosa
atgcccaccagcaggcgtaaggccattcccgtcgattcgctgctgcaactgcggcagcgcctggatcacttgccgaagaagagcccggagcgggcccgtcaggtggcccttgtagctgaactgtacggcgtttcctccagtacggtctatcgcgccctggtccttctgcacaggcctaggcagcccaccgctccgaccagggcaagccccgcgtcctgccccaggcggaactggagcgctactgcgaactga

SEQ ID NO: 325905 - DNA, 1083 bp, Pseudomonas aeruginosa
atgtcgccgtcggacctcaagcatattgagcatccgcggtggatcgatcccgccaagggcgaacccaccctgatgctgttcagcgtggtggatgaccgcagcggtgtggcctaccaggaataccactgcgtttatggtgaggatgcggagacggcacttcgttttctgttcaactcgatggcgccgaaagcggacccgagttttccctttcagggccggcccaagctgatctatctggacaacggtccggtggccaagcgtcgcgttttccagagcgtcatgcgggcgctgggcatcgagtggcagacacacatccctgccagcaaggatggaacgcgcaccacggcccgctcgaaaggcaaggtcgaacgtcctttccgcacagtgaaggaagcccacgagaccctgtaccacttccacaagccggaaaccgaagcccaggccaacgagtggctgttgcgctacctagtgcgcacctacaaccagcagacacatcgtgccgaacccctttcacggatcgaggactggatcacccatgtgccaacagaggggatccgtgaaatgtgctcatgggatcagttctgccgctttgctcgggagcccgagcggcgcaaagtcgggcctgatgcccgaatcaccaccgacggtaccgcgtacgagcttgagccagagatggccggcgactacgtcgtgctgctctgggggctgttcgacgatgagctgcatgccgagttcgatggcgagcggttcggtcctcactacccggtgtccggccccattccgcagcaccgctaccgggctttcaagcgcagcaaggcagacgagcgctcggctcgtatccgatctctcgcggaccagttggggctgccgatcgcggcgctttccggggaagatgtacgactagagcccggttctactgactcgacgctccccatccagcccttcgttttcgagccccaggaatcccgcattgcggccaagccggctatcgccgaggaactggcaatgccgctggccaagctttcaatggatgaccgcgccttcatcgaccaggtgctgagcgagaccctggctacggactga

SEQ ID NO: 325906 - DNA, 384 bp, Pseudomonas aeruginosa
atggccatcgagaagcacaacatcaagctggccaccttcatcgccgcgctcttctatgacctttccacccagaaacaggtacgcattcccacccagatcgaaaaacgggatcgcgaactgtacgaactggtaaagaagagcaagcgccccgtggccctgttcgttgatgaagcccatgatctcaatggccataccttgaccggtctgaagcgactgctcgaactggccgaagacgacagcggccggcgacgcttgtccattgtcctggctggccatcccaagctgtgtaacgatctgcgccgccccacgatggaagaaattggttaccgcaccgacattttcgagttgcaggaaaagatgcaaagtgccggattacaggtatga

SEQ ID NO: 325907 - DNA, 1542 bp, Pseudomonas aeruginosa
atgaaaattcgttcgcaagtcggcatggtgctgaacctcgacaagtgcattggttgccacacctgctcgatcacctgcaagaacgtctggaccagccgcgaaggcatggagtacgcctggttcaacaacgtcgagaccaagcccgggatcggctacccgaaggaatgggaaaaccaggagaagtggaagggcggctgggtgcgcgcggcggacggttcgatccgcccgcgcatcggcggcaagttccgcgtgctggcgaacatcttcgccaacccggacctgcccgagatcgacgactactacgaaccgttcgacttcgattaccagcacctgcataccgcgcccaaggccgagcaccagccggtggcgcgcccgcgctcgctggtctccgggcagcgcatggagaagatcgagtggggcccgaactgggaggagatcctcggcaccgagttcgccaagcggcgcaaggacaagaacttcgaccaggtccaggcggacatctacggtgagtacgagaacaccttcatgatgtacctgccgcgcctctgcgagcactgcctgaacccggcgtgcgtggcgtcctgcccgagcggggcgatctacaagcgcgaggaggacggcatcgtcctgatcgaccaggacaagtgccgcggctggcggatgtgcatctccggctgcccgtacaagaagatctacttcaactggaagagcggcaagtccgagaagtgcatcttctgctacccgcgcatcgaggccggccagcccactgtctgctcggagacctgcgtcgggcgcatccgctacctcggcgtgctgctctacgacgccgaccgcatccacgaagtggccagttgcgagaacgagcgcgagctgtacgagaagcaactggagatcttcctcgatccgttcgacccggcggtgatcgcccaggcgcgcaaggacggggtggccgacagcgtcatcgaggcggcgcagaagtcgccggtgtacaagctggcgatggactggaagctggccctgccgctgcacccggaataccgcacgctgccgatggtctggtacgtgccaccgctgtcgccgatccagaacgccgccgccgaggggcacatcggcagcgacggggtgatcccggacgtggagtcgctgcgcatccccgtgcagtacctggccaacctgctcaccgccggcgacaccgcgccggtgctgctggcgctcaagcgcctgctggcgatgcgcgcctacaagcgcgccgagcacgtcgaaggccgccaggacctggaggtgctggccaaggtcgggttgagcgtggagcaggtggaggagatgtaccgctacctggccatcgccaactacgaggatcgcttcgtgatccccagcgcgcaccgcgaggaagcgctttccgatgccttcgccgagcgttccggctgcggcttcagcttcggcaacggctgttccggcggcagcaactccgccgtcaacctgttcggcggcaagccgaccaaccgccgcgacgtgatccaggtcgtgcagatccaggagtga

SEQ ID NO: 325908 - DNA, 432 bp, Pseudomonas aeruginosa
atgaacggcgatatcggcatcgccctgcgcctgcccgagcgcaacgatgacggcagcctgcgcttcgcgctgcgcgtggccttcccgcgcaacgacggtagcggcggcgtgcgcttcgtcctgccgagccgcctggtcgaggtggacaccgtgttcgccatgaccgtgcacaagtcgcagggctcggagttcgcccataccgcgctggtcctgccggacgcgctgaacccggtgctgaccaaggagctggtgtacaccggtatcacccgcgcccgcgactggttcagcctggtggaaagcctgcccggggtgttcgaggaagcagtgcggcgcaaggtgcgccggctcagcgggctgatgctgcatctgcggccggaaagggaagagcagccgccgcatgctccgggtgaacagaccgagctgccgttctga

SEQ ID NO: 325909 - DNA, 3636 bp, Pseudomonas aeruginosa
atgaagattctcgccatccgcctgaagaacctcgcctccctcgctggcgagcaggaaatcgacttcacccgcgaaccgctgtccagcgccggcctgttcgccatcaccggcccgaccggcgccggcaagagcaccgtgctggacgccctgtgcctggccctgttcggcagcacgccgcggctggaaagcacttcggccagcagcaaggttcccgatggccggaacgagctgtccagcaacgacgaacgcaacctgctgcgccgcggttgcgccaacggctacgccgaagtggatttcgtcggcatcgacggccaccgctatcgcgcccgctgggaaacccggcgctcccgggacaaggcggacggcgccttgcaaaagagccagcagagcctccaggacctggagacccagcaaatgctggcagcgaacaagaaaagcgagttccgcgaacagctggagcagaagctcggcctcaatttcgcccagttcactcgcgccgtgctgctggcccagagcgaattcagcgccttcctcaaggccagcgacaacgaccgcggcgcattgctggagaaactcaccgacaccggcctgtacagccaattgagcaaagccgcctaccagcgcgccagccaggccgacgagcagcgcaagcaactcgagcaacgcctggaaggcagcctgcccctggccgagcaggcccgggccgggctcgaggcggcgctggaatcccacgcccaggcgcgtctccaggagcaacaggccctgcagcgcctggaaggccagcaacaatggttcaccgaggagcagcggctgctgcaatcctgcgagcacgcacaaggccaactggccgaggccaggcaggcctgggacgccctggcgacggagcgggaaaccctgcaatggctggagcgcctggctccggttcgcggactgatcgaacgcctgaagcaactcgagcaggaactccggcactccgagcagcagcagcggcagcgcaccgagcagcaagccgcgggcgccgagcgcttgcaaggattgcaggcccgcgtgcaggaggcgcgcgagcgccaggcccaggccgacgaccatctgcgtcaggcccaggcgccgttgcgcgaggctttccagctggagagcgaggccaggcgcctggagcgaacgctggccgagcgacaggcactccatcggcaatcgaaccagcgccacgcccagcaaagcgacgccgctcggcaactggatatggagcagcagcgccatgtcgcggaacaggcgcaactgcaggcggcattgcgcgacagccaggctctcgccgcgctcggcgacgcctgggcgacccaccagggccagctcgccgccttcgtgcaacgtcgccagcgcgcgctcgaaagccaggcgcagctccccgagctggaaaaatccctggcccaggccggggaaccgctcgaacgcttgcaggcgcaatggaccgccctccatggcagcgagccggacgacctggcggcacgcctggacgaattgcgccggcagaccgatagcctggaacgacaacaagcgctccacaaggaatggcaacaggccctcgaccaacgcaccggcctggctcgacgcctgggcgaactcgaccagcgtatggtcgagcaggagcaggcattgctcgacctgaaacgacaaggcagccaatacgccgaggaggtgaaggcggcggagcaggccctggaggtcacccgcgagttgctccaacgccaacgtctggcccgcagcgccagcgtcgagcaactgcgcgccggcctggtggacggcgaggcctgcccggtctgcggcagccaggagcatccctatcaccattccgagcaactgctcgccgccctcggtgaacacgacgaccaggagcaggtccgcgccgagcagtccctcgagcggctgcgacagaccctggtcggtctgcgcgagggctattccagccagcgggaaagactcaaccagagtcgccaggagcagcaggaactgaccggccacctagccgcgctcgatcggcaactggagcaatggacgctgccggaagaactgcgactcctgcagccgtccgcgcagttggagtggctggcacaacgcctggacgacctggcagggcagcgccagcagcgccaacgagacttcgaccggctgatcgcccgccagcgccagacccagcaattgcagcaggaactgcgggccgccgagacgagcctgcaacagcgccagcaggcgctgacggaacaacggcagcgctacgaacatttgcagcagcaggtcgaggaggacagccagcaattgcgtccattgctctccgacgagcactggcagcgctggcaggcagatccgctgcggactttccaggccctcggcgagtccatcgagcaacgccggcagcaacaggcgcggcttcagcaggtcgaacagcgtctgcaggagctcaagcagcgctgcgatgaatcaagctggcaactgaagcaaagcgacgagcaacgcaacgaagcccgccaggcagaggaaagggtccaggcggaactcgccgagctgaacggacgcctcggcgctcacctgggccagcacgcctgcgcccaggactggcaactatcgctggagcacgccgcgcaagcggcgcagagcgctgtcgagacgctccaggcgcccctggattcgctgcgcgaggaacaactgcgactcgccgaagccctggaacacctgcagcagcaacggcagcgccaacaggatgagttccagcgcctgcaggccgactggcaggcctggcgcgaacgccaggacaacctcgacgacagccgcctcgacgccctgctcggcctttccgaggaacaggcgacgcaatggcgggagcaattgcagcgactgcaagaggagatcacccgccagcagacgctggaagcggagcgccaggcgcaactgctccagcatcgccggcagcggccggaaaccgaccgcgaggcgctggaagacaacctgcggcaacagcgcgaacgcctggccaccagcgaacaggcctacctggatacctacagccagttgcaggccgacaaccagcgccgcgagcagagccaggcgctgcttgccgagctggagcgagcccgcgccgagttccgtagatggggccgcctgaacgaactgatcggttcgtccagcggcgacaagttccgccgcatcgcccagggctacaacctcgacctgctggtgcagcacagcaacgtgcagttgcgccagttggcgcggcgctaccgcctgcagcgcggcggcagcgaactgggcctactggtggtggacaccgagatgggcgacgaactgcgctcggtgtattcgctctccggcggcgagaccttcctgatttccctggccctggcgctcggcctggcctcgatggcatcgagcaagctgcgcatcgagtcgctgttcatcgacgaaggcttcggcagcctcgacccggaatccctgcaactggcgatggatgccctggacaacctgcaggcccaggggcgcaaggtggcggtgatttcccacgtccaggaaatgcacgaacggatcccggtccaggtgcgggtccagcgcgagggcaacggcatgagcagcctgaaggtggtcggctga

SEQ ID NO: 325910 - DNA, 264 bp, Pseudomonas aeruginosa
atggaagtcatgatgatcggtcggaagcgcaggcgcgcggcctcgatggcggcgtcgcgcaggctgtgcccctgctcccagagttccttggcgaactcgacgatgaggatcgcgttcttcgccgaaagaccgatgatggtgatcaggccgaccttgaaatacacgtcgttggacatacccgcgaccattaccgcgagcaccgcgccgatggcgccgatcggcacgatcagcatcaccgacagcgggatcgaccagctctcgtag

SEQ ID NO: 325911 - DNA, 288 bp, Pseudomonas aeruginosa
atgaaagccagcggcaggaacaccgccgagagcaccagggtgatgccgacgatggcgccggacacctgcttcatcgccttgaccgtggcctcggccggggaaatcccctcctccgccatgatccgctcgacgttctccaccaccacgatggcgtcgtccaccaggatgccgatcgccaggaccatgccgaacatggtcatcatgttcaccgagaaccccagcaggtacatcaccatcagcgtacccagcaggcacaccggcaccacgatggacgggatcagggtgtag

SEQ ID NO: 325912 - DNA, 1191 bp, Pseudomonas aeruginosa
  misc_feature (1043)..(1052): n is a, c, g, or t
atggtgttgccggtggaggtcctgacggtgcaggccgagtccctggcgctgagttcggaactgcctgggcggatcgaaccggtgcgggtcgccgaggtgcgcgcgcgggtggccggcatcgtcgtgcagaagcgcttcgaggagggcgccgacgtcaaggctggcgacctgctgttccagatcgatccggcaccgctgaaggctgcggtgtcgcgcgccgagggtgagctggcgcggaaccgcgcggtgctgttcgaggcgcaggcgcgggtgcgccgctacgagccgctggtgaagatccaggcggtcagtcagcaggacttcgataccgccaccgccgacctgcgcagcgccgaggcggcgacccgctcggcccaggccgacctggagaccgcgcgcctgaacctcggctacgcctcggtcactgcgccgatctccgggcgcatcggccgcgcgctggtgaccgagggcgcgctggtcgggcagggcgaggcgacgctgatggcgcgcatccagcagctcgatccgatctatgcggatttcacccagaccgcggccgaggccctgcgcctgcgcgacgccctgaagaaaggcaccttggccgccggcgacagccaggcgctgaccctgcgcgtcgaagggacgccctacgagcgccagggcgcgttgcagttcgccgacgtggcggtggatcgcggcaccggccagatcgccctgcgcggcaagttcgccaaccccgacggggtcctgctgccgggcatgtacgtgcgcgtacgtacgccccagggcatcgacaaccaggcgatcctggtgccgcaacgggccgtgcgccgctccagcgacggcagcgcccaggtgatggtggtgggcgccgacgagcgcgccgaggcgcgcagcgtcggtaccggcgtcatgcaggggtcgcgctggcagatcaccgagggcctggagccgggtgaccgggtcatagtcggcggcctggctgcggtgcagccgggggtgaagatcgtgccgaagccggatggtgcccagacgcaagcccnnnnnnnnnngtgccgcaacagtaagggcgggttcgccccgaggattttccgatgtccgaattcttcatcaagcggccgaacttcgcctgggtggtggccctgttcatctccctggccggcctgctggtcatttccaaattgccggtag

SEQ ID NO: 325913 - DNA, 669 bp, Pseudomonas aeruginosa
atgaccctgatttcccatgacgagcgactcatcaaggcgctggcagtcgccatcgtcgaccacccgcgagcgacgctgaaagaactggccgaggcggccggcgtaagcaaggccaccctgcaccgcttctgcggcacgcgggacaacctggtgcagatgctcgagggccacggagagaccgtactgaaccagatcatccaggcctgcgacctggagcatgccgagcctctggaggcgttgcagcgcctgatcaaggaacacctcacccaccgcgagctgctggtattcctggtattccagtaccgcccggacttcctcgacccgcacggcgaaggcgcacgctggcagtcctacctggaagcgctggacgccttcttcctgcgcggacagcagaaaggcgtgtttcgcatcgacatcacggcagccgtgttcaccgaactgttcatcaccctggtctacggcatggtcgatgcggaacgtcgcggacgggcggccagctccaattccgcgcataccctggagcagatgttcctccacggcgcctccaattgtagcgccgcgcgaaattcatcggcctgttgcgcgataaatccaacgcggctcgtctttcagtggtggaaaaggaatttcagaatagcccggcgggttccgcctggatatcccaactga

SEQ ID NO: 325914 - DNA, 1149 bp, Pseudomonas aeruginosa
atgactctctatatggggcctaacaccggcctgctgatcaacggcttgccgggagaagggcattacagcgatctgattcggatgtggcgctgggatgactttctgaggcagccggtcgtcaaggggcgcgtcgccgcgctcccgaccagcggccaggccgagggggacacgtacattttcactggctccggctccaatcagaaccgcctagcgcgctggtgggcaacgggcgccaccacggcaatttgggagtacatgccgccacggctgggctggcgtgtccaggtcgcaaacgagacgacgccgagcggccaggtcaagacgtatgagttcggggccagtggctggacggaactggtgggcgggatggccgacgcgccgagcgacggaaaggcatatgcccgcgaaagcggcgcctggacggagctgggatcggcagcgaaatcggcgctcaacgttctgccgttcatgaacctgatgcccgacatgggccgcttcgcgggaaccgcagccaaccctctggatacgatgttcacaacgtcatggactccaagcaccttcatcaatggctggaacggcgcggccctcgcagatgggggcaagttctcgttcgacaacagcacgaacggcggggcggggccggcgctcaatgcgagggtacaggcacttctcacggcaatgggccgcacctggacatcggtttcaaggtacggcgtcgagttcttcaccaccgttctgacggcgggatcgcagacaacaaccggctcggccggcgcggatggggttacgcgctatctgtgctgctccaacggcagtaagacagttttcaacgcgggcgcgtgggcgacggtggtcatgtggctgcgagtcgaaagcggctcagctcatatctcgtcggcgccttatacgacccatcgcctttggatcaatggcgctgttgctgctccaggggttgtgctgccggcaggccaatgggtgcatctgcgattctcgatgcagtcatataacggctatgacaacgcgtgtccgtacatctacgcatccgcaggggctcagatcgcgtttgcatgcccggcgtggttcggtggcctcgtcgatccgggtatccacgttgcacccatcctgacaatcaacggagcaagcgcatga

SEQ ID NO: 325915 - DNA, 2208 bp, Pseudomonas aeruginosa
atgggcgctaaacccaaggctcagacggtcgggtggcgctactacttcgacatccatttcgccctgggcaagaaggtcgatgaagtctgtgccatccgggcgagtggtaagactgcatggaaagggtcaatcaccagcaatggacaggtccgcatcaatgcgcccgagctgttcgggggtgacaagggcgaaggcgggctcgacgggacgctggatgtcctattcggcgacgaagaccagggcgtcctgccgcgcttggcggcgatgctcggcggcctggtgccggcattccggggcgttaccacgtgcttctattccggcctggtgacttcggttaacccgtacccgaagaagtgggagattctgcgccgaggcgggaaccgcttgtgggacggcaacccctggtatcccgaaaagcagttcatctggctagcggacggtcagatcaaggcgatgaacccggcgcacatcctttatctcgtctacaccggccgggacttccgggggctggcccgcacaagaatggacgaggcgagctggcgggctgctgccgacacgttgtatgccgaaggcttcgggctgtgctttgagtggacccggtccgacagcttcaagaacttctgcgagacggtgaaatcgcatatcggcgccgaggtctacccgaatcgccagactgggcagatcagcatccggctcctgcgtgacgactacaacgttgctgacctgccgctgttcgacgaagacagcggcctcctggagatcacgcaagagaagaccggctcgacgtcgctcgcgccgagccagcttatcgtcaagtacatcgaccagatcgacggggcgcagcgccaaatcatcgtcaacaacaatgcggtcgccgcgtcgcaggggcggcggtcgtccgaggaagtcgagttcctgggcgtgcctaccggggagctggccgggcgagtcggtgagcgggaaatgcgtctgaagacaaccggcctgaagcgctataaaggcgtattcgaccgccgcgcccgtagcctcaacccaggccagccgttcctcatccgttcgaccccgcgcggcatccccgaaaccgtcgtcagggtcggccggatcgaggacaacttcctcggcgacggcaagatcaccctgaccgtcgtccaggaccagtttaatctgccggcgacaaccggcgtggcgccaccgccaccgggctggattccgcccgaccggacgcctcgggcgatcactgtgcgccgactgatcgaggcgccatatcgcgaactggccggcgtgatcgatccggcgaatctccagctcctggacgtgtccgcatcctacctcgctgcgctggccgaggcgccgacaagcttgtcgcagagctacaccttgaccgaccgcgtcggcagttctggcgcgttcgtggatcgcggaaccggcgactggtgcccgaccgggctactcgccgccgagctgccgctggcggccgggccgaacgtggtcacgctgaccaacgccacccggctggaggacgtcactgtcggccaggccgctgtggtggacgacgagatagtccgggtcgatgcggtcaactatgccagtggcaccgtcaccctggcgcgcggctgcgccgataccgtgccggccaagcacttggccggggctcgggtctggttctacgacacgttcgaagcggtggacgagacggtatacagccagggcgtgacgctccaggcccggctgctgaccaacaccagcgagggccagctcgccccggcgctggccgccaccgacagcctcactctgaccgggcgccagggcaagccgtatccgcccggccagttccgaatcaacggcagcgcgtacccgacgaaggtctacggggcgctgtcggtgagctgggcgaagcgcgaccgcatcggccaggccgaccagttgatcgataccactgtcggcaacatcgggcccgaagatggggcgacggtgacgctccaggtctacagcggcacgacgctgaagcgcacctatgccggcctcacatccagtaactggtcctatccgctggccgaagacgtcgctgacggcccgctccaggacgtgcgcctggtcctgcgcagcgtccgcgacggcatccaatcctggcagcaacacgacatcaccatcgaacgacacggcctgggcttccgcttgggcgaagaccttggaggcgtttccgcatga

SEQ ID NO: 325916 - DNA, 219 bp, Pseudomonas aeruginosa
atgatcgtgactgtacagcacctgcacaccgtcccgacttggacgacccgacagggctactgccacggccgggcgcgggagttcttcaagcgccacggcctggactggatggcgttcttgcaggacggcatcgacgctgatctgttgatcgcgactggcgacgcgcttgcgctcaagctggttgagcacgcccgccgggaggtggctgatgggcgctaa

SEQ ID NO: 325917 - DNA, 240 bp, Pseudomonas aeruginosa
atggacccgatcacaatcaatctcgtcatcctggcagcgtcgtacatcttgtccagcgtcctggcgccgaaaccgcagaaacccaagccggcagcattcgatgccgctgacttcccgctatgcgaggaaggggaagatcaagcggtggtgttcggccagtgctggtcgaagtcctggatggtgctaacggtagagcgccgccgcatgaaggccatcaagaccaaagcgagcaagaaatga

SEQ ID NO: 325918 - DNA, 822 bp, Pseudomonas aeruginosa
atgagttttaacagccgcgaaagctcgctcgcggatgggcagccggtgcggctgtaccagttcagccgtggagccatccgctggagctacaacagcagcgaccgggacatcacttatcaaaaccagattttccgcaccgtgccgggcggcatcatcgacaacgggatcatctgttccggcgatccgcagtccgaccagttcgtcatcaccgcgccggccgacctcgacgtcgcgctgctgtacaagtcccggtcgccgagcggtgccatcgacctggtcgtctacgacatgcactacggcgacaccgaggcagcggtttcctgggtaggccagattggcgatgtggactggccgaccatggatagctgccgcataacgtgcgtgtccgaagacgagctgatggaccagccgggcttgatcgacacctactgccgcacctgcacggccatcgttggcgaccaccgttgcaaggtcaacctcgtcccgtatcgcgtgacgctgacgccgcagagcatcagcggctgggtgatctccagcggcgtggtcgccggctacgccgatgggtggtttaccgggggctatgtggagtggcaggtggacggcgataactacgaccgccgcttcatcgagcagcacgccggggccgatctgcacatcctgggcggcaccgagggcattccggctgggagccagctgcgagtttatccgggttgcgacgggctcgcggaaacctgcgacagcaaattcggcaacatcctgaacttccggggcttcaacaagctgcaaggcaagtcgccgttcgacggcgaccaagtctggtga

SEQ ID NO: 325919 - DNA, 1662 bp, Pseudomonas aeruginosa
  misc_feature (1629)..(1638): n is a, c, g, or t
atggcgacgtttccggggttccaggtgccgaagcctgtggaggggatcgttgctggcatcacgccgaatatcgacgccctggagctgaaccaggacatcagccttgcagcggtcgcggcctcgacctggggcggcgcttatggggcgcatcagccggtagaggtgatccattcgacctaccaggctgtccaccaaagcgctctggaagagaactactacaaccgcctctggttgattccgaccgcaatggaactgggcaacgtcgtcagcacccagatacgaccggcatcagtctggaacgcatatttcagtccgcgcacgctgaccgcaatcgaccgcgaagccgcagacggcatcacgctgtctggccaggcgtcgccgccgctgggtttcgccgccctggaggaacgcacctggaccgtcagcattggcacggacggcccgcccgtcgtcaatgcgaggatcgtctggagactccagggcgagccgaacctggtcctggtcatcactggcaatcgcatcatcgcctggacgttcgcaccggactggggcgacagcatcgtcgaacgcctgagcgcatcgacaaatatcctgcaaagcgaatcggccgtgacccagcgccgagccatgcgcctggcgccgcgccgagagttcgacgcgaacatgtacgcggtggatcgcgagcggcagctgctggacatgacgctgttcggctggggcgcgcgcatttgggcgctgccgatctggcctgatatccagctgctccaccagccgctggcggccgggtcgctgggcattccgtgcgacacggccggcctcgacttccgcgacggcggtctagcgatgctgcgcggtgaggacgcttttacttatgaggtcgtcgaggtcaagacggtgaccgccagcggcctggacctggtccggcccgtccaggctgcctggagaactggctcccggttgtacccggtacgcaccgcgcagctgaccgagcagcccacgctgacccggctgaccgataccgcgcagtctgcgcgggtgtcgttcctggtgatggaacccagcagttggcccgaggtgatgccggcgacgatgtaccgggggcgtcctgtcctggaacagcgcccggacgaaagcgaagacctcacctccagctatcagcgcctgctgtccaccctggacaacggcagcgcgattccccgcgtgaccgacgtcgccggcatggcgctgcccgtcatcggccatcgctggatcggtatgggccgagccgagcggtcggcgttccgcagcctggtctatgcgctacgcggccagcagaagccgctgtgggtgccgacccacgccgacgacctgaccctggtcgccaccgtctcgcagctgtccaccgcgctggacgtgcgcaatatcggctatgcccgtttcgccaatggtcggccgggccgtcgcgatatccgcatcgagctgtacgacggcaccgtctatcaccgacgcatccttaccagcaccgagctggacgccgacaccgagcgcctggccatcgacgccgccctgggccggctggtcgagcctggcgacgtggcgcgcatttgtttcatggcgctctgtagcgccgccaccgacgtggtcgagatnnnnnnnnnnacgtcactgatagcgagggcgtag

SEQ ID NO: 325920 - DNA, 924 bp, Pseudomonas aeruginosa
atggcctatttcacaggaacagcgaacaacccggccgacttgctcgccaaggtgcgcgtccacgccgagtcgctcggctgggtcaccgaccgcgcctcggcatcggaatggctttgtcacaacgctgatgggtactggtcattcaatgccggagccaatcagttccagatggcgggcaatacggggttcgataacagcctggcgtggaacgcgcagcccggtaactcggtgcagaacaacccttattcgtcgaaggggccgaccgtcgcacagctgagcggtgggccgttcacgcgctaccacctgtttgccacggcggcttatctgcacctgcacgtcgagattgcggccggtcagttccggccggtgatgattggctcgctcaacaagcgcggagtcgaatacagcggcggccagtacgtatgcggctccgtaatctatcaggcgggccagatgctgacatcgagctggtcctgtcatccgttcgacggctatcacgttcgctatagcgacggtggttgcgtactgcgtgtggatggcctggatggcggcccctcgcccgactggctgccattcgactacacgacgaacatcccccggcgggtcatcgggccaggccgtggaaactacagaagtcagtaccatcctgacgtcggactgatcgacgccagcgcaaacgagctgaacagctcgaccaccactgtgccgtgcgccatctatgcgttcggcgctcagcagcgctcgcgctacgtgggcgaagtgccggactttggcatatgcaacatggccttcctcgcgcctggtgatccgcttgtcgtcggtagcgacacttggcgcgtctatccgttgctccaacgcggaaccgctaccgacttcgacagcaccagcgcctgggtcggctattgcttccgggtggtcgagtga

SEQ ID NO: 325921 - DNA, 234 bp, Pseudomonas aeruginosa
gtggtcaaacaactgcgggattcattcgggaagttcccgctcaaggcgctgtcgttcgtcacccgcgaaaccgagggtcgccgaaacctgggcgacttcgacggcgctttctacgtgccaacgctcaactccggcgccgaggacgtgattgtcgaggacggagtggaccacgttgttttccaaaccgcctggcgctcgggcaacccctggctctacgcgatcaggaaggactga

SEQ ID NO: 325922 - DNA, 1602 bp, Pseudomonas aeruginosa
atgaccacctgcggcgaattcctcgtcaagcaactcgaagcctggggcgtcgagaccgtcttcggcatccccggcgtacataccgtagaactctaccgcggcctgcccggcagccgtatccgccatgtcaccccgcgccacgagcagggcgccggcttcatggcggacggctacgcacgggtcaccggcaagcccggcgtgtgcttcatcatcaccggcccggggatgaccaacatcctcaccgccatggcccaggcctacgccgactcgattccgatgctggtgatctccagcgtcaacgaacgcgcgcgcctggcccacggcaacggctacctgcacgagctgccgaaccagcgcaacctggtaggcaacgtctgcgccttcagccataccctgatgagcgccgaggagctgccggcggtgctcgcccgcgccttcgccgtgttcgacagcgagcggccgcggccggtgcacatcgagctgccgctcgacgtcatcaccgcgcccgccgaacacctggccctgcgcccgcgcaccgtcgccagccgcccggcgccggcactcgcgcccttgcgcgaggccgcggcgcgcctgcgcaacgcgaagaagccactgctgctgctcggcggcggctgcgtcgaggccgccgccgaagcgcgtgccctggccgccgcgctggacgcgccgaccgccctgacgatcaacgccaagggcctgctaccggccgaccacccgctgctgctgggcagcaaccagtcctgcgtgccggtacgcgagctggccgccgaggccgacgtggtgctggccatcggcaccgagctgggcgaaaccgactacgacgtggtgttcgacggcggcttcgccctcgatggcgagttgatccgcatcgacatcgacccgcagcaactgatgcgcaactacacgcctagcctggccatccacagcgacgcccggctggccatgcgcgtgctgctggccgaactgccgggcggcgaggcctcgccggacagccccggggcccggcgcgccgccgccgtgcgccagcgcctggccgaagacttcgccggctggtcgcactatcgccagctgttcgccgcgatcctcgccgagtggccggacgcccgcttcgtcggcgactcgacccagaccgtctacagcggcaaccacctggtcgatctcgacgagccgcgccgctggttcaacgcctccaccggctacggcaccctcggctatggcctgcccgccgccatcggcgccaagctcggcgagccgggacgcccggtggtcagcctgatgggcgacggcggcctgcagttcaccctgccggaactggccagcgcggtggaagccaaggtcggcatcgtcgtgctgctgtggaacaaccacggctatggcgagatcaagcgctacatggagcggcgcgagatcactccgctcggggtcgatatctacaccccggacttcctcgccatcgcccgcggcttcggctgcgccgccgaacgcgcgcgcgatctcgagcacctgcgcgaactgctgcgcggcgccccggcggaccgtccgctgatcgtcgaggtgctgcaagccgcgcccttccatccctga

SEQ ID NO: 325923 - DNA, 1512 bp, Pseudomonas aeruginosa
atggataacaacaataaccaacacgcaatcacacgcatcgaaaccttcggggtcgaacagattcccgaccacgaacgcaacgccacgccggtcgatctgttccgcatgatcttcggcggcgccaataccttcgccaccgccgtgctcggcagctttccggtgctcttcgggctgtccttccaggccggactgtgggcgatcctgctgggcgtcacgctgggcgcgctgatcctcgccccgatgggcctgttcggcccgctcaacggcaccaacaacgcggtctcctccggcgcgcacttcggcgtgcacgggcgcatcgtcggctccttcctctcgctgctgaccgccatcgccttcttctcgctctcggtgtggagttccggcgacgccctggtcggcggcgcccggcgcctggtcggcctggaagagagcgaacggaacctgggcctggcctacggcctgttcgccgtgctggtgctgaccgtatgcatctacggcttccgcttcatgctgctggtcaacaggatcgccgtgtgggccgccagcctgctgttcctgctcggcctgttcgccttcgccggccccttcgacgccgcctacgccggcagcgtgcagctcggccagccgggcttctgggccgccttcatcggcgccaccctgctggccatgagcaacccgatctccttcggcgccttcctgggcgactgggcccgctacatcccacgccagacctcgcaggcacggatcatgctggcggtgatcggcgcgcaactggcgaccctggttcccttcctgttcggcctcgccaccgcgaccatcgtcgccgtccgcgcgccggactacatcgccgccaacaactacgtcggcggcctgctggccatcgctcccggctggttcttcctgccggtatgcctgatcgcggtgatcggcggcatgtccaccggcaccacttcgctgtacggcaccgggctggacatgtccagcgtgttcccgcgcctgctctcgcgggtgcaggccacggtgctgatcggggtcgcctcgatcggcttcatcttcgtcggccgcttcgccttcaacctggtgcagagcgtctccaccttcgccgtgctgatcgtcacctgcaccaccccgtggatggtgatcatgctgatcggcctgctgacccgtcgcggcttctaccgcccggacgacctgcaggtgttcacccgcggccagcgcggcggcgcctactggttcgagcacggctggaactggcgcggaatgggcgcctggattcccagcgcggcagccggcctggccttcgtcaacctgccggggcaattcgtcggtccgctcggcgaactggccggcggcatcgacctcagcctgccggtcgccctcggcctggccgccctgctctacctggcactgctgcgcctgttcccggaaccgccttgcgtctacggcccgcgaggaccgcgctgggtacgcgcgcacggcacgcggagggcccctgcgatagccaccgcctga

SEQ ID NO: 325924 - DNA, 420 bp, Pseudomonas aeruginosa
atgaccgacgaccgcgtcgaacaggtgctggaggccgcccgccgactggtggcggccttcgcccgcaacgatgccgaggcctatttcgccgccttcagcgaggacgccagcttcatcttccacaactggcctcagccgctgcgctcgcgcgcggcctaccgcgagttgtgggagcgctggcgacgcgaggacggcttcgaagtgctggcgtgcgaatccagcaatacctgcgtcagcctgcaaggcgacctggcgatcttcagccacgatgtcgccacccggctgcgcctccagggaacggaaagcctgaaccgggaacgggaaaccatcctgttccgcctagaacaacaagaaggccgttggctggcctgccatgagcacttgtcggcgatgccggagtatctgccatcgactagctag

SEQ ID NO: 325925 - DNA, 543 bp, Pseudomonas aeruginosa
ttgccgtcgcgtacgcgggtgctggtcctgcagcaccccagcgaggtcgggcacgcgctgaataccgcagggttggccgtgctcggcttgcgcaatgcggaattgcgggtcggcgagcgtttcgccgaggagacctggcgagtgccgggctaccgggcctgcctgctgtttcccggcgagcaggcgcgagcgctggcggggatggccgccgaggccgccggtgagcccctcctgctggtggtgccggacggcacctggcgcaaggcgcgcaagctgctgcacctgaacccggccctggcggccctgccgcgggtgagcctggccgaaggcatggcgtcgcgttatcgcctgcgcaaggcgccgggagagggcgcgctgtcgaccatcgaggcaatcgccgcggcgctcgacgaactggaggcgccgcgtacccacgaagccctgctgaagccattcgatgccctgatcgaggggcagatcgcggcgatgggggaggatacctaccggcgcaaccatctcaaccaggagcgccgccgccgatag

SEQ ID NO: 325926 - DNA, 165 bp, Pseudomonas aeruginosa
atgaacagcggcagcatcgccaggcccaggccgcgtaccgcggcgtcgcgcatggtctggccgttgttggtgttgaagcgtccgcgcggggtgatcatccgcgccggctcgccggccacccgcggctcgaagctccatagctgcgacggggtgttgtggctgtag

SEQ ID NO: 325927 - DNA, 621 bp, Pseudomonas aeruginosa
atggcagagaatgtcttcgatgcgttgcagcgggccatgccgttccaggtattccgggctgcaacacactacccggcggctggtgcccagttggcgggcgatcagcgagctgtcctgcaggcgggtgatgcggatcgccaggtcatagccttccttctcgaagtcgacgatccggtcgtccagttgcaggaccacttccaggcgcgggttgcgcgccatgaattccatcaccagcggccccagccagagcgtgccgaagctcatcggcgccatcacccgcaattccccgcacaggtcgttctcgcgcagggccacgctttccgcggcgttgttcaggtcctgcagcgaggccttggccgacttgtagaagaagccgccggcctcggtcggctcgacgttgcgcgtcgagcggtagagcaggcgcacgccgaggtggcgctccaggtcgctgacgcgtttgctgatcacggacttggacaggctcatgcgttcggcggcggcgctgatgctgcccagctcgaccacgttgaggaaggcctgtatgtcttcaaggcgcaggctcatggcgaatctcgaaacaatcgggaggcagactgtcgcatgcgggagaactcctggtaa

SEQ ID NO: 325928 - DNA, 1662 bp, Pseudomonas aeruginosa
gtggaacacggaagcagttttctccagtccggcgtggtcttcctgatcgcggcggtgttcatggtgccgctggccaagcgcctgcaactgggcgcggtgctcggctacctgctggccggcgtgctgatcggtcccagcgtgctgggcctggtggacaacccggaaagcgtcgcgcagatctccgagatgggcgtggtattgctgctgttcatcatcggcctggagctgtcgccgcggcgcctgtgggtgatgcgcaagtcggtgttcggcgtcggcctgctgcaggtgctgctgaccggcgaggatctgcaggccgaaggcggtggacgacagcgccaggctgcgcacagcgacgccggcggtagcgaactgacccagaccctcaaggtagtcggcagcatcgccgcggtggtggtcggtggccgctacctgctgcgcccggtgttccgcatcgtcgcccagaccaagctgcaggacatgtccaccgccactgcgctgctggtggtgatgggtaccgcgctgctgatggagctggccggcgtgtccatggccctcggtgccttcctcgccggcctgctgctggccgactcggagtaccgccacgaactggaggcgcagatcgagccgttcaagggcctgttgctcggcctgttcttcatcagcgtggggatgagcgcggacatcagcctgctgctcaagtcgccgtggatggtgctcggcctgactgtgctgctgatcgccctgaaggcgccggtgctgtacttcgtcggacgcatttccggcggcctcgacaaggcctcggcgctgcgcctgggcgtggtcctggcggccggcggcgagttcgccttcgtcgtgttcaagatggcccgcgaccagggcctgttccagaacgacctgcacaacctgctggtgctttccatcaccctgtcgatggccctgaccccgttgctggtactcggcctcgcgcgcctgctggcgaaggagccggaggcgacgaagccgccgccggaaatggaacgcatcgacaacgacgacaccccgcgcgtggtgatcgccggggtcggccgcatgggccagatcgtcgctcgcgtgctgcgcgcccagcgcgtgccgttcatcgccctggacacctcggtggagaccatcgagctgacccgtaccctcggcgcgatcccgatcttctacggcgacccgatgcgcccggagatccttcgcgcggcccaggtagagaaggccgagttcttcgtcatcgccaccgatgacccggagaccaacatcgagacggccaagcgcgtgcgcaagctgtatccgcacctgaagatcatcgcccgcgcgcgtaaccgccagcacgtccacctgttgctcgacgccggggtcgagccggtgcgcgagaccttcttctccagcctggagatgagccgcatggtgctctgcggcctgggtctgagcgaggaacaggcggacgcgcggatccgtcgtttccgccggcacgacgaagaggtcctggcctcccagcacctgttctacaacgaccgcgacgcgctgatcaaaagcgctcgcgaggcgcgggtcgagctggagacgctgttccagaccgaccagttggaagaccgtggcgcggtagcggcggagaccccggagaaaccttcccgcgcgtcctag

SEQ ID NO: 325929 - DNA, 531 bp, Pseudomonas aeruginosa
atggccaaacatgccccccaactgcccatcgaggtcgacagcgagaccggcgtctggaccactgacgccctgccgatgctctacgtaccgcgacatttcttcgtcaacaaccacatgggcatcgaggaagtgctgggcgccgacgcctacgccgagatcctctacaaggccggctacaagtccgcctggcactggtgcgagaaggaagccgaatgtcacggcctggagggcgtggcggtgttcgagcactacatgaagcgcctgtcccagcgcggctggggcctgttcgagatcgagcggatcaacctcgaggaaggcaccgccgaggtccgcctgcggcactccgccttcgtctacgtctacggcaaggtcaatcgcaaggtcgactacatgttcaccggctggttcgccggcgccatggaccagatcctcgccgcccgcggcagcagcctgcgcaccgtggccgaacaggtctacagcggcgccgaggacggtcacgaagacggcctgttcgtcgtcaaacccctgtaa

SEQ ID NO: 325930 - DNA, 645 bp, Pseudomonas aeruginosa
atgaccgaaaccatacaggcacggcgcggtcggcccaccaacgaggcgcttgcccaaacgatactcgacgccgcgagcgaactttttgtggaattgggttttcaagcgacgacgttggacaaggtcgcccagcgggcgaagatatccaagctcagcatctatagacgtttcgagaacaaggaggcgctgttcagcgcagccatcgcggccggctgccagcagtcgtttgcaccacaggccctgcttgaaggtgtcgaaggttcggtcgaagaccaacttatggcggtgggaacatcactgctgcgcacgctattgagaccagacgtcagcagtatcgaagccatggtcatggccgataaaacgagtcaaaacgccctgagcaagtgccactacgaagccggcgccgctcatgtcatcgccgacatcgatgccttgttgcgccaacttcacgcgaaggcgcttctcaacgtgcccgatcccctccaagccgcccgcttgtttgccgcgctcttcaaaggctccgatctattgatgatcgcccgattcgatcaggcgagagcagaggacgaaatagaatcctattgccggtcggccgtcgccatgttcatcgccgcgcacggtcgcagcgaccacgcgggtggataa

SEQ ID NO: 325931 - DNA, 894 bp, Pseudomonas aeruginosa
atgaatgacgtcatcatcatcggcggaagttttgcaggtctcgccgccgctttgcagctcggccgtgcccgtcgcaaggtcatcgttctcgataccggtcggccgcgtaaccgctttgccggccattcgcatggtctgctcggtcacgatcacacgccgccgctggacatcctggccgcggcgcggcagcagttgacgcgctatccaacggtcaggctagtcaatgcccgggcagagaagatttctggcgtaatagacgatttctgcgttgtcactgacgatcacgaaagcctaaaggcccgccgcgtgatcctgagctatggcgttgccgatcagatgcctgatgttccaggctttgccgagagttggggcacgtccatcgtcccctgcccctattgcgacggctttgaagccgccggccagcattggggcctcgtgtggtccggcccgcaatcgcacaaccaggtcaggctgttcctcgattggaccgacaggttgactgtctttgccgatggtcacgacattacacctgatatccaggccgatctggcgcaccgcaacatacctgtcgtcgacggacggatcgtcgagatcgcccatcaccaggggcatatcgctaccgtcaatctcgacactggctccactgtcgcggtcgacatcctgtttgctcatccgcgcaacaagccgtccgcaaacctgcatgaatcgttgggccttgccacgatggatacgcccaccggcgtcgtgctcaaggtcgacgagcgccgccaaaccagcacgcctggcatctatgccgccggcgatctcaccacccccatattgccctcggtcacccaggcatcatcgcagggcgcgatggcgggtattttcgcccagcagtcgatgctggcttga

SEQ ID NO: 325932 - DNA, 474 bp, Pseudomonas aeruginosa
atggccgtcgagccggacagcgcgggggtgcgcttccctccgcccttcatctatctgggagcgctgctgttggggctggcggcggagcggttcgtcgccctgcactctttcggcatcgattggtggttgctgatcgcaatgggcgcgctgccgttcgctgccggcgcggtaatgatgcttgcggcggcggggctgttccggcgtctgggcaccaacattccgccgtcgcgaccaacgaccctcatcgcaacgaccggtccctatcggtggacccgcaatcccatgtatctcggcatggcgcttatctatgcaggccttgcggtcggcttcgacggaccgatcgccttcgcgttgcttccgttggtgttggtcgcgatccagacgcaggtgatcgcccgcgaggagcgctatctcgaagcaaagttcggcgacgactacctccgctacaaggccgaggttcgccgctggctctga

SEQ ID NO: 325933 - DNA, 192 bp, Pseudomonas aeruginosa
atgcacagagaacacagcacacgtatcgtcgttaccggcctgggcatcgtcagccctctatgctgtggcagcgagacggtatggacgcgcctgcaggccggccactcgggcctagactgcagcagcccctcggcagttagcaaagcgcggctagctgcagccgtcgaaatcttcgcccaagtctatgcatag

SEQ ID NO: 325934 - DNA, 807 bp, Pseudomonas aeruginosa
atgcccaacttcccagtggtcgtcataaccggcgtgtcatcaggcatcggtcgcacggcggccgaacagttcgccggacgcggttgccgcgtgttcggcagcgtgcgcaacccggccactgcgcaggccatccccggtgtcgagctgattcacctggatattcgtgacgaagcctcgattcgccagagcatcgaacatgtgattgcagaagctgggcgcatcgacgtactggtcaacaatgctggcaccacactgctcggtgcgacagaggaaaccgccatcgacgaggcccaggcgctgttcgacaccaacgtcttcggcgtcctgcgcgttacccaggcggtactgccgcagatgcgcaagcaaagcgcagggcgcatcgtcaacgtcagttcggtgctcggcttcctgccagcaccctacatgggcctgtactcggcttccaaacatgcagtggagggtttgtccgagaccctggatcacgaggtgcggcgcttcggcattcgcgtcgcgttggtcgagccttcgttcaccaagaccagcctcgacctcaacgcgccacaggccgccctgcgtatcgctacctacgacagcgagcgggcaaccgtctcccaggccatccagatgaacgtgcagaaggcacctttgcccgatgcggtcgccgcgaccatcgtcgaggccgccctgggcgcgtggaaaatgcgccacacccccaaaggcgaggccaccctgctcagacgcctgcgccgctttatgccggcaggcccagtcgactcgggcctgcgcaagaccttcggcctcggctga

SEQ ID NO: 325935 - DNA, 3090 bp, Pseudomonas aeruginosa
atgagcgaaagtcgtttcaacctctccgccctcgccgtgcgcgagcgctccgtcaccctgttcctggtctgcctgatctccctggcgggtctcgtcgccttcttcaagctggggcgtgccgaagacccggccttcaccatcaaggtcatgaccatcgtcaccgcctggccgggcgccaccgcccaggaaatgcaggatcaggtcgccgagaagatcgagaagcgcctgcaggaactgcgctggtacgaccgcagcgaaacctatacacgcccggggctggccttcaccaccctgtcgctgctcgacaccaccccaccctcggaggtgctcgaggagttctaccaggcgcgcaagaagatcagcgacgaggccaagacgctgcctaccggggtgatcggcccgctggtcaacgatgagtattcggacgtcaccttcgccctgttcgcgctcaaagccaggggcgagccgcaacgccacctggtgcgcgacgccgagaccctgcgtcagcgcctgctgcatgtaccgggcgtgaagaaggtcaacatcatcggcgaacaggccgagcgcatcttcgtcgagttctcccacgagcgcctggccaccctgggcatcggtccccaggacgtgttcgccgcgctcaacgggcagaacgccctgaccccggccggctccgtggaaacccgtggccccgacgtgttcctgcgtctggacggtgccttcgatgagctagagaagattcgtgacactccgatcatcgcccaaggccgcaccttgaagctttccgatgttgccacggtcaagcgcggctacgaagacccggccacctttctgattcgcaacggcggcgaaccggccctgttgctcggcatcatcatgcgtgaaggctggaacgggctcgacctgggcaaggccttgaacgatgaagtgcagcagatcaacgctgagctgccgctgggcatgagcctgagcaaggtcaccgaccaggccgtcaacatcagcgcgtccgtcgacgagttcatgatcaagttcttcgtcgcgctgctggtggtgatgctggtgtgcttcgtcagcatgggctggcgcgtcggcgtggtagtcgcggtggcagtgccgctgaccctggcgatggtcttcgtggtgatggccgccactggcaagaacttcgaccgcataaccctgggctcgctgatcctcgcccttggcctgctggtagacgacgccatcatcgccatcgagataatggtggtgaagatggaggaaggctacgaccgtgtgcgggcctccgcctatgcctggagccacacagcggcgccgatgctctccggcaccctggttaccgccgtcggcttcatgcccaacggcttcgcccgctccacggccggcgaatacaccagcaacatgttctggatcgtcggcatcgcgctgatcgcttcctggctggtcgcggtgatcttcacgccgtacttcggcgtcaagctgctgcccgagatcaagaaggtcgagggcggtcacgacgccatctacgacactccgcgctacaaccactttcgtcggattctgggtaaggtgatcgcccacaagtggctggtcgcaggttcagtgatagggctgttcgtgacggccgtgctcggcatggcgctggtcaagaaacagttcttccccatctccgaccgccccgaagtcatggtcgaggtacagatgccttatggcacctcgatcctccagaccagcgcagctgcggaaaaagtcgaagcctggctggcccagcaggcagaggcgaagatcgtcacggcgtacatcggccagggcgcaccgcgcttcttcatggccatgagcccggaactgccggatccgtcgttcgccaagatcgtcgtacgcaccgacaacccggatgagcgcgaggcactcaagcacaggctgcgcaaggcgattgccgagggtctggccagcgaggcgcaggtgcgcgtcagtcaattggtgttcggcccctactcgccctacccggtggcctaccggattagcggcccggatccgcaacgcctgcgcgagatcgccagcgaggtgcgccaagtgatggatgccagcccgctgatgcggacggtcaataccgactggggcacccgcgctcccacgctgcacttcaatctgcagcaagatcgcctgcaagcggtggggctaacctccagtgccgttgcgcagcagctgcagtttttgctcagcggcgtgcccgtcaccgccgtacgcgaagacatccgcacggtgcaggtcatggcccgtgccgctggcgatattcgcctcgacccggcacgggtgatggatttcaccctggccggcgccaatggtcagcgcatcccgctgtcgcagattggcgaagtggaggtacgcatggaagagccgatcatgcgctggcgcgaccgggtgccgactatcacagtgcgtggcgatatcgccgaaggcttgcaaccgccagacgtgtcgaccgccatcagccagcagttgcaacccatcatcgacaggctgccgagcggctatcgcatcgagcaagcgggctccatcgaggaatcgggcaaagccagcaaggccatgctgccgctgttcccgatcatgctggccgtcacgttgatcatcatcatcctgcaggtgcgctcgatcgccgcgatgatcatggtctttctcaccagcccgctggggctgatcggcgtagtgccgacgctgatcctgttccagcagccgttcggcatcaacgcgctggtcgggctgatcgcgctgtccggcatcctcatgcgtaacacgctgatcctgatcgggcagattcgccagaacgaagcggcgggtctcgatccgttccgcgccgtggtcgaagccaccgtgcaacgcgctcggccggtgatcctcaccgcgctggcggcgatcctggcgttcatcccacttacgcattccgtgttctggggcaccctcgcctacaccctgatcggcggcaccttcgccggcaccgtgctgaccctggtgttcctgccgaccatgtacgccatctggttcggcatccgccccatcccccacgagccactcgcgcaggcacaacctgcatga

SEQ ID NO: 325936 - DNA, 1116 bp, Pseudomonas aeruginosa
atgcgccggcgcaacctccttctgtcccccctggtcggtgtaattccgttcgtgctgctcgcctgtagcgaccagacgccccccgatccccgcactgacgcgccactggttcgcatcaccaccatccagtcggcaaccgctacatcgcgcgccttcaccggcatcgtcgcggccagggtgcagagcgacctgggtttccgcgtgtccggcaaggtgttgcagcgcctggtcgataccggccagaccgtcaagcgtggccaggtgcttttgcgcctcgatcctatcgacctgcaactcgccgcccatgcccagcgcgaggcggtgaccgcagcgcgggcacgggctcagcaggccagcgatgacgaagctcgttaccgcgccctgcgcggcactggcgcggtatcggcatctgcctacgaccaatacaaggcagcggcggatgcggctcgcgcgcaactcagtgcagccgaggcccaagccaaggttgccggtaacgccacccgctacgccgagctgctcgccgatgccgacggtatcgtcatggagacactggccgagccaggccaggtggtcagcgccggccaggccgtggtacggcttgcacatgccggcccacgcgaagccctggtgcaactgccggaaaccctgcgtccagcagtcggttccagcgctgaggccaagctcttcggcaggcaagacgtcagcgtcgccacccgactgcgccagctgtcggatgtcgccgaccgccagacccgcactttcgaggcgcgttacgtgctcgaaggcgagctgtccgacgcgccgctgggcaccaccatcaccgtgcaaatcagcgatccgcaaactgcttcaccaagcacagtgcaggtgcccatcgccgcgctgtacgacgcaggcaacgggcctggcatctggatgattcgcggagagcccgtagaggtggcgtggacgcccgtaaacgttcagtcgctggatgatgagagcgcccgcatcagcggcgcgatcaagccgggcgaccagatcgtcgccctgggcgcgcacctgctgcacgacggccaggccgttcgcctggccgagccggccaccgtggcggcagtcgagaaaggccagccatga

SEQ ID NO: 325937 - DNA, 618 bp, Pseudomonas aeruginosa
atgaacaagaccccctcccccaaagttgcagcacgtggtccggtggatcacgaggtgcgtgatcagatcgtggcagcggcgaccgagcacttccgcctgtatggctacgagaagaccacggtttccgacctggccaaggccatcggtttttccaaggcctatatctacaagttcttcgagtccaagcaggccatcggcgagatgatctgctcgagctgcctgcagcagatacagaccgaggtgaatgctgccatccatgaggtggacagcccgccggagaagctgaggcgcatgctcaaggtgctgatggaagcctgcctgcggctgttcttccaggatcgcaaactctacgaaatcgccgcctccgccgcctccgggcgctggccggcaaccctgctctacgaaggcttcatcgagcagacccttcgcgagatcctgcagcagggccggcagagcggcgacttcgagcgcaagacgcctctggatgaaaccacccgcgcgatccacctgatcatgcgcccctatttcaacccgctgctgctccagtacgggctcgaaaccaccgatgaagcgccggccctgctgtccagcctggtgttgcgcagtctgtcaccctga

SEQ ID NO: 325938 - DNA, 198 bp, Pseudomonas aeruginosa
atgctgtcgaagcgactcctcgttgtactgatcagtaccgacctggtggcaggctgcgcggttggccccgattaccagcgtcccgagatttccctgtccgagcgcttcctggggcaggaggctgtcgagcagcggcctgtgagttccatgggcgatttgatcgattggtgtgctggggctgcgttggcgcctgtttga

SEQ ID NO: 325939 - DNA, 729 bp, Pseudomonas aeruginosa
atgatcagagttcctcaattcctcctcggcttcgttatggcgcatatggtcttcgtcgcgcacgctgctcccagttgtatccttcctgaaaaggccgaaagcggctacgactacaacacgaaccgggacagttacgggaaaaatgactccgcgacgactgactactacaagctcgccataaactggtcaggagcccactgtgcggaaaaggcgaaggagatcgaaaacctaaagaagaaggggaagtttgaagctgctgaaaccgtccgtaataggaacgcattccaatgcttttccaataacaagtttgggtggatcctccatgggctttgggcacagacctgcaatggtaaaaactgggaagactgccgggactggaaggcaatccagacccatccacggctatgccgaggcgaccttcctgctgtcgattacgaggagatcaaaagccacctatgccaatccccgggggcggcgctcctgcagggagagtgggaaaaacacggagcatgtaacttcgcatcggcgtcggaatacttctcgagacaaggccagcttttcgcagacctttccttacccgaaagccggctaccagacaaggagctgctccagtggctcaaggaaaagaatccctctcttgcggacaaggagatccagatcgacggcaacgagttctacgtctgctacgacgtgaacttcactccaatgagttgcccaccgctggagtaa

SEQ ID NO: 325940 - DNA, 1701 bp, Pseudomonas aeruginosa
atggtttccagctacgaaagcaagaacacgtcagatggccttactctgaaactgtatcgcggcgaaggagcggctctgctcgcattcgatctcgatgaagagagggctacccgagatttcgttggcttcaccatcgaggtgcgatacccaggttccctgaagtggggggcaatccgaaatcgcctgcatttcgaatacccaccgactgagcatagagagcggacctataagtccactgaagcaccgctccagaaattccgctggatacacgttcccaccgaaactccggagggcaacttcgaataccgcgttacagcacggtacatgtctgaaaacgagacgctgcacaacggaccgcaagtgacgggaaaaatctcgctgtcaccacagacgattgaggactttgtgaacgtagggtttactcgcggcttcgctagctcacaagcctacgcagatcgtttcgagaacgacaaagggatcctcccaccgcgtgggacgccagcagaaaagtacctcaaccacgacatgaccccattccagaagcactatgagtggctgggttttgaagctcgccggttgatcctgcaaacgctcgaggaggttgagcatgatccgggcctccgcctggacgcgctcgtgtacgaatgcaaggagccagacatcctccagcgcttggagcgtcttggtaatcgcctccgggtaatcatcgacgaccatgatgagcagggagatccagattcttgcgagaccatcagcgctaaccgcctaaaacagaagggcgcacaagtgaagcgcatgcacttccgtcgccaacagcacaacaaggtgctcctcgtgcgccgagcagacggctcggccgcgaaggtgctggccggttcgaccaacttcgccatgcgcggcctctacatccaggcaaacaacgcactcttgttcgaggatgcaacggtatccgaaaaattcagcgagctgtttgatgcgtactggaacacctctaaagatttcagagaaaaccagctatcgaagcaatggtgggtcgttcgtgatgaacccgaatcgcgagtgtccctatgcttctctccacacacggatagtggcctgtcactagacccggtcgctgatgcaattgcgcaagccgacagctcagttctgtattcggtggtattcctgaacatcctcaaaggcacagtgcgcaatgagcttgaggcgcttatgcagcgctccttgttctcctatggtgttgcgcagcgaacaggtggtctctccgtcacgaagcctgatggaagtgtcggcctgcttccctttgcatacctcggagaaaccgctccagagcctttcaaatcggagtggaacggcgacacaactgaattttccaatatggtccatcacaagttcgtcgtgacggacttcaatggaaagcgccctgtcgttttcaccggctcgtcgaatctggcagccggcggcgagaaggagaatggtgatcacctgatatgcatcgaggaccgccggattgctatcgtctacgcaatcgaagcactgcgcctcttcgaccatttccatttcagggtaaagaccaagcctggcgagaatgcccccccaatacacttggcaaaaccaccaactgagggagaggatccatggttcgcctcttactacagaaaggggcaccacaaggaacgggatcgcaagctgttcagtcagtag

SEQ ID NO: 325941 - DNA, 1917 bp, Pseudomonas aeruginosa
gtgcagaccctcgaccggagcctggtgcgcaaggccgacatccgcgacggcgacagcgatcccagcgacgccttcgacccggcggcgcaatggctgggctacccgcgcgacaccttcgccaacctcggccagcatggcgctggtgagcccggcggcggcgaggaggccggcctgcgaccgatccatgaggtgcagggcgccggcgccgaaagtccgctggtgaaccagcgggtcgccatcgagggcgtggtggtcggcgacttccagaacgccagcgagctgaagggcttctacgtgcagcaggaagatgccacggtggacggcgacccggcgacctccgaaggcatcttcgtctacgacggcggcaacggcagcgacgtcaagctcggcgaccgcgtccgggtgaccggccaggtccgcgagttcaacggcctcaccgaactggtcgggccgctgcaggtcagcgtcctggcgagcggcgtggccttgccgacgccggccggcatcagcctgccgctggccagcgccgatgcgctggagcgctacgaaggcatgcgcgtgcagctccgccagacgctgaccgtcaacgaggtctacaacctcggccgctacggcgaggtcctgctgtcctccggcggccgccagatgactccgaccaacgtggtggctcccggcgaacaggccaaggccatgcaggcgcgcaacgacctcgaccggattctcctcgacgacggccgcagcgggcagaaccccgacccgatccgctacccggcgccggaactgagcgcctacaacagcctgcgcgtcggcgatcgcaccagcgccatcgacggcgtgctcgactactcggccggcagctaccgtatccagccgttgcagacgccgaccttcgaggcggccaatccgcgtccggcccagccggcggtggaagggcgcctgcgggtggccagcttcaacgtgctcaactacttcaacggcgatggcaagggcggcggtttccccacctcgcgcggagccaacacggccgaggagttccagcggcagaaagcgaagatcgtcgcggcgatcctcgcctcgaaggcggacatcgtcggcctgatggagatcgagaacgacggctacggcgagttcagtgccatcgccgacctggtcaacggcctcaacgccagcctgccccagggccagcgctatgccttcgtcaacccgaaccgggcgaagctgggcagcgacgagattgccgtggggctgatctatcgcggcgacaaggtccgcatctatcgatccgcggcggtgctcgacagttcggtgaacccggagttcgacgacacccgcaaccgtccgaccctggcccagaccttccaggagatcaatggcggcgaacgcctgaccatcgcggtgaaccacctgaagtcgaagggctcggcctgcgacggtgacccggacaccggcgacggccagggcaactgcaacctgacccgggcgcgcgccgcccaggccctggtggactggctggcgggcgatccgacgggcgccaaggaacctgaccgcctgatcatcggcgacctcaattcctatgccaaggaagacccggtgaacgtcatccgcggcgccggctacaccgacctggtggcgcgtcaggcgggcgcaggaaagggctactcctacgtgttctccgggcagtccggctacctcgaccacgccctcgccaacgccagcctggcgcgccaggtacgcggcgcggtggagtggcacatcaacgccgacgagccccgggtgctggactacaacgtcgagttcaagacccctcggcagcaggacagcctgtacaacgccgagccgtaccgggcctccgaccacgacccggtggtgatcggtatcgacctgcgccgggtggcgatgaagaagcaccgcaggtag

SEQ ID NO: 325942 - DNA, 1326 bp, Pseudomonas aeruginosa
atggagaagcctgacctcggcagccgtggaccagacgtctcgatcctgagctaccacggcaacaagttcgtcagcggcctgttctggcggccgctgtccagccagcggcagtacatgaaggaagcgcgcaagctgggcaaggaagagcatctggacatcgttgccatccgccattcaccgacggtgatccaggccggcttcgtttcgaagtcgcaaggcgcagtcaaggggatgtactccctggcctcggcgctttcaggccagttcgacggcgacttcctggcctgctggaaagtcgacgaggaccgctacgcgctggtcgccacgctcgatggcgcgattgtccccgggcaggatctggtcaccaccctcgacgaggcccgggaccgggtcaggaagctctctacgcgcggcgtgctgcgaaacgcacaggtcttcgttcccgaagggttcgatttccccgtcaaggacttcgacatcgaggaactgctcgcgccgaagcgcctgcggcgcgactaccgcctccggcaactcaccttcggcttgtccgccagggagtggacggcagtggccctgctcggttgcgtggtaggtgggtcgctaaccgcctactacctatggaatgcccaccaggaagagctcgccaggcaagccgcgctcctcgaggagcagaggcgcctcgccgagctggccgagaagaacgcccaggccaagcagccgctggacctggcgtcattgcagaagccttggacgctcatacctgacctcgaggacatgctacgcgcctgtagcaaggcaacgggggtactgtcgctgtcgatccagggctggctcttcgaatccagcaagtgcgacggcagggtcctggtcgccacctaccaccgtaccggcaacagcacagcagccgacctgacagcggccagccagcacctgttcgccgaccgccccgccttcgtcatcgacaacggcaacaccgcggccctgaaggtcgatctgaaggttgccatcggcagtgatgagccgctactgccggcggacgacgttctgcaggcgctgacgagccacctgtaccgtcaaggggtcgagcccaagctgtcgatcagccaggagacaactccgcccctccctggcgcggaagctgcgactgaacagcaagtggtgttgccttcctggaagaaattcaccttcagcgcccagacccggctcccggcagacctgaccttccaggggctgcccgctgccggtgtccgcatcaccaacctcgaaaccacgctcaaggacagccagttggactggactgtcacaggagaaatctatgcgaactga

SEQ ID NO: 325943 - DNA, 1710 bp, Pseudomonas aeruginosa
atgcgtgcccccctgaagaacctcttggcttgcctcctgatccccgcgctggccagttgctcggtcacgcgggtgaacgagtcggcggatcgtgtcgaagctacggcagattccgcgtctacgatcgcagcgcaggtgcgcaacacccgaccggatcggcgcgatacggtggtgttctccgacaaaccctgggtcagcacgaaacccctaagcgtttcgcacaccttgtccagtgactgcatcgtgacgtggcgccctgcaggcgcagcgtcgctgcaggaggccgcccaggaagtcatcaaccaatgccacatggcggtcagtatcacgcccgacgcgctgaacccggccgccttcgccgtgcaacctcagcagcgcgcgagcaacgccccgccgcccatccaaggcggccaggacatggccaccatgctgtttcctgcctccgtcgccaacggcatgtcgctcggtgccggcggcagcatggggtcgagcttcgggtcctacggtccgcggtctctgtacaacatcaaatggaacggcaaagtcagcgggttcctcgatctcatcgccgcccgagccggcgtgtcctggcgctacaacccaaccgagaaaagggtcgagttctactacctggacactcggaccttccgcatctacgccttcgacgacgtcaacacggtggactccaccgtgcgttccggtatgacgacggccgccggcatcagcggggacggctccggatccaccggacagaatggcagctccggcatcagcggcgactccggcagcaagcagaccaccagctcggagctgaagacatcgatcctcagcgacatcgagaacagcatcaactcgatgctgacgccgagcatgggacgcatgtcgctgtcgcgtgccacgggcaccctgaccgtcaccgaccgtccagaagtcctcaaccgtgtccagcagttggtcaaccgagagaacgagagcatcaccaagcaggtgctgctgaacgtcaacgtgctctcggtcgccctgaccgacaaggatcaactggggatcgactggaacctggtctacaagtcgctcaacaacaagtggggcatcggcctgaagaacaccatgccgggcatcgatcaaagcgcgatctccggctccgtgagcatcctggataccgccaacagcgcctgggcaggatccaaggccatggtccaggcgctggcccagcagggccgcgtctcgaccgtccgatccccgtccgtgaccacgctcaacctccagtcggcgccgatccagatcggccgctacgacagctacctggcctccagccagatctccaacgtcgcccaggtcggcagtaccacctcgctgatcccgggcgccgtgaccagcggctacaacatgagcctgctgccgttcgtgatggaaagcggcgagatgctgctgaagatcaacatcaacatgacctcccggccgacgttcgaaatgcagaccagcggggactccaaagcccagttcccgagctacgacatacaactgttcgaccagaaggtacgtctgcgcagcggcgagaccttggtactctccggcttcgaccagaccaccgaggacaccaacaaggtcggcaccggcgacgctgggttcttcggtcttggcggcgggctgacccgcaataccaagcgcgaggtcatcgtggtgctgatcacccccgtcgtgctgggctga

SEQ ID NO: 325944 - DNA, 1125 bp, Pseudomonas aeruginosa
atgaccaggcagttgaccactctcacgctgtgcctgctgctcgccagctgcacgacccacaaggctgagccggccaggccagccttcgacagcagccgcaatccagacctgctttctccggacctgtatccaaacggtgtgcagccggagaaagagcccgtagtgcgctatgggcgctacaccctggtcagcacccagcctgatgccggtcaacgcgacctgatggcccagatcatcgacgtaaccatcccgtcgagcatgaacccgagcgtcaaggacgccatgcagtacgtgatgagccgctcgggttactcgctgtgcccggcagacgccggtcatgtgaacatcctctacacccggccgctgccggcagctcagtacaagctcggcccgatgaccctgcgcaacaccctccaggtcctctccggcccagcctggcaggttaaggtcgacgaggtcgcgcggcaggtctgcttcgtgctgcgcccgggctatcaacttcccccggcgccgaggccgaaaccggtccagcaactgtatgcgaagcccgctgccccaactccgccggcggtagcgcaaccctcctccacggagaaagtcagcacgctggagtcgcccatcgtggtcgcctcggtgccgacaccggcgccgatcacaaccagccacgctccggccaagaagcctgaatccaccactgtgctccccccagccgcaccggccaaggatggccacccctcttctcctcccgcggcttcggcaccgaccaagcctgcggcctccgccgtgaagtccacgccgcccactccacccaccgtggcttccgccccaccggtcaaggtgctcacgccgccggaaccgagccggccgctggcacaggcctggtcagccgagacgggatcaaccctgcgcgacaccttggaagcttgggcaaagcgcgcacgctggaccgtccgctgggagccgcaggatctcaactatccgatcgaggctccactgaccttccacggctccttcgaggacgcggtatccgagctgttccccctgtatgacgctgccgaacggcccttcctggtgaacgccagccgcccgcagtccctgatcatcatcaaggagcgcaagaactga

SEQ ID NO: 325945 - DNA, 1974 bp, Pseudomonas aeruginosa
atgaaccgtccacgcctggttaatcgtacctccgcgacaccttcgacgcttctgcagcgggctatcttcgacggctacgacttcggcttgaagatcccctacatcgcaggcagcaatcgcgcgctgctggagctgtccggcttcttcatcagcgcccgggagcatccgttgcaccgctactggcgggtccccaaaggcaagctgctgcctgaactggacactctgtacaaccgtctcgccgagctagctggaggccttcactcccagtcctggcgggagttcagctccttggtcgaatccgcgcaggcctcgcttgaccgacaggccttcacctgggggatgctgctgcgcatcgcgcccctggccgagggcggcgtcctactgtcaggcgagttccatcctggtgttgtggcggtggctcggcggatgcgcggggtattcctgcgcccatcgagttcctggcgcatcgacaccactcccgagctgctccgaagcaacctgattctggagcttggcctcgccgaggaacaattcgagattctggatactgtccaggagctgctcagcgacggcagcttcgcgccgtcgaccgagctgcccagcatgagcatcggcggtccacagcaggaaccggcagcgccatccctggaggacgagtcagcctctgacatctacctcgccgcggtgccggagatcgagcgcaccgagtacagctcggctgatatcgaggcggcgcttcagggctactctctactggcccaccagcctgacggcatcgctcatctgctgcagagaaccagcgccttattggccgacgacatgggattgggcaagacccgccaggcggtcatcgccgcttcgatccgcgcggcgggcagaccaatcctggtcatcaccctggctaccctgctgatcaattggcagcgggagatccaggaggtctatccctcggccaccgtggccatccagcaggacaccccagaggcgcagtggatcctcgtcaactacgagcagttgagccccttcgtcgccaacgcttcgcgcttcgccgtgatggtcatcgacgaggcgcagcggatgaaggaaccgacggcgcaatgcacgcggcacggtttcgacattgccgcccaagtgccgaaccgctacctgcttaccggcacgccggtgctcaaccgcgagacagagctgcacaccctgctgcgcctctcaggccaccccatcggccaactgccgctgaaagagttctgcgaccgtttcgccggcaacccggagttccgccagagtctgcgggcggagctgggtgactggatgctgcgcaggcgcaaagatgtgctgcccagcctcaagggcaagcagcggcagttgctgaaggtggccctctccaccgaggaacgccagcaatacgacgtgctgcgcctcgaggaccgaccggtcttcgcgcgactcggcgcgctgcggcgttacctggaaacggtgaaagttcgcgtggcgatggacctgttgagcgagctcgacgcagaggacaaggtgatcctgttctgcgagttcaagccgaccgtggctgcgctgaaggaactctgcgagcaggccggacacggctgcgtcacgctggtgggcaatgactcgctcaccaagcggcagaaggcgatagatcgcttccagcaggatcccgactgccgagtgttcatctgcactacggcggccgcagggacgggcaacaacctcactgcggcgaactacgtgtttttcctcggcctgccctggactcccggtcagcaggaacaagccgaagaccgcgcgtaccgaaacggccagctccgcatggtcgtggtgaaaatcccactggtcgaggccacgatcgacgagcaactgtggcaactgctcaacgcgaaacgccaggttgcccaggacctcatcgagcccgagcaggtcgacggaaaccgcgcgcttttagccgcaagcctaactggataa

SEQ ID NO: 325946 - DNA, 1926 bp, Pseudomonas aeruginosa
atgcacatcgtaatcattgaagccccgggcaagctgaaaaagctgaggtcccttctcccctcgattcgtcccgacgtgacctggcaggtcgaggcgacagccggccacatcagagacctacccgttcacgggcaggatccgcagatgctcaccgtcggcgtgggccaggatttcaaaccgcactaccagatcctctcgggcaaggaaaaaaccgtcgcacggctgaaggagctgcggcagaaagccgtggaaatctacgtcgcatcggacccggatcgcgaaggcgaaagcattggctggcacatcctccaagctgccgggatcaagaactacaagcgcgttgccttcaaagaaatcacaaagtcatgcatcaccgccgaactcagctcgccgcgtcgcctggacctcccgaaggtcgcctcgcaggaatgccgtcgcgtcatcgatcgcctggtggggtatctggtcacgccagagttgcggcgcgtgatgggtaggccgaccaccgccgggcgcgtgcagtccgtcgcggtgtacctggtggtcctgcgagagcgggagatccgcgccttcacagcaatcaagcacttcggggtggaactgaccttcgtttcgcccagcgacggccgtacctggacggcggaatgggatccagtgcccgtgtttgccagcgaggagttcccgtatgtccaggatcgtcaactcgcagaactggtgggggctatacgtaatgtcatcgtcgagacctgcattgatagcgaagaaaccgatgcgcctccggcaccgttcatctcctcctcgctccagatggccgccgggaatgcgctgaagtggtcacccgacaagacgatgaaggtcgcccagcggctgtatgaacaggggctcatcacctaccaccggacggacaaccccaatatctcgaaggactcgatgccggatatccgtgctgtcgccaaagccttggggctgaagtgtgttgagcaacagcggatgttcaaagcggaccaagacgcccaggaaggccaccccgccatcacccctaccgactggatggccgctgccgccggtgaaactgctgatgagcaggcgctgtaccagctcattcgagtccgcgcgcttgccagtcagatcgaagctgccgtgtacgcagtgagaaccatcaccctcctgggcgtcggccccgacaaaaagccgctgcgcttcggcgccaaagggaagctgttgaacgtgcctggctggagaaaactgctgcagggtgatgacgccgaggagcagaagaacgaaacgccttcaaaccccatcccgatcccggcgctggagccacgccagatactcaaggtctacagcggcgaggtcctggagaagaaaaccacccctcccaagcgattcaccgacgccagcctggtgggcgagatgaagcgccgcgggattggtcggccatcctcctacgcctcgatcgtgaagaacatcatcgacaagggccaggtgcagatgaaggggcgaagcctgatccccggcgagctgggagaggccaccatcgcgctcctggagcacaacttcagcttcctcagcctcgacttcacccgcaacctcgaggtcgccttggaccggatcgccaacagcgaggacacctacatgaacgtggtccagcagttctaccagctactacagacagagctgcagacactccgcgcgctccccagcgcacaggacgaaccacgcgcaagctccaccgccagtatctcctcggcgccgaccagcgacttcctttgcggcaagtgcggtctgcccctggttcaccgcaagaaagccggcaaaggcggcttcgacttctggggttgcagcggctatcgaacaacagggtgcaaggttagctaccccaccaagagcggccggcctgacttcgacaacccgcgcgggctatag

SEQ ID NO: 325947 - DNA, 471 bp, Pseudomonas aeruginosa
atggctacccccgtcttctgggaaggcaacattggctcggcgccggagcaccgcagcttccccaacggcaacaatcccccgcggcagttgctgcgactgaacgtgatgttcgacaactcgattcccgatggccaaggtggctacaaggatcgcggcggcttctggtgcagcgtcgaatggtggcatcaggatgcccagcgcttcgccgaactgttcacgaaaggtatgcgcgtcaaggtcgaaggcagggccattatggaccgctggccggacaaagagtcaggcgaagaagtccaggcgctgaaggtcgaagcctcgcgcatttccatccttccgcatcgcctggccgaggtcaccctgttgccaacccagcatcaacagtctcggaacgtcccgcagcaacctgctcagcaagatgcgcaatcgcagcaggactacgacagcgccttcgacgacgacatccccatgtag

SEQ ID NO: 325948 - DNA, 477 bp, Pseudomonas aeruginosa
atgcaacaaactgccttccaggcgctgcaacacagtgcctcactaaaaggccttttaaagccttttaaaggtaatagggagctggcccagttggcggaacagtgcgaagccatggagcagggattgcttgaacttgcccagggactgctggcccaggttcgtcgcccacccttcactctactgcccacccgactcatcgagcagcgcacatccgcccgcacaacctttctccgctggcagcacattgcatcccggcggttgggcgtcggggtgtggacggaaatgctgcgccaggacaagaccccggaatacctgctgcaagacctctacgagatggagctgcagcgcatcaccctcaacatgcagatcagcctgatccactccatcggcaagcaggccgccgagtgcgcggaaaagatgggccaggccgaggccgagttcatgggccgactgcagcagagcaccaaccaccactga

SEQ ID NO: 325949 - DNA, 558 bp, Pseudomonas aeruginosa
atgaaagccgaaaaagaaatcttcgtctcggtcgacatcgaggcatcgggcccgattccgggcaagtacagtatgctgtcgatcggcgcgtgcctgacgtcgaatccggctgagcagttctcgtgcttgctgaagcccatctccgaggaatttgttccagcggccctagaggtcacggggctttcattggagaaacttcgagaagaggggctggatcctgcagaagcgatgacacagttcaaagcgtgggttgagtcacttgctggcgttggtcagacggtggtgttcgtaggatttaatgcttccttcgactggagcttcgtgaactattatttccacgagtaccttggtgaaaatcccttcgggatagccgcgctcgacatcaagtcgatgtacttcggagcatcagattgcacttggaggtcaacccgctcgagtgagattgataaagtggtgaggcccgacaactctggcgatcacgacgctctgcacgacgctgtctatcaagcagaattgttcagcctaatccgagaaaaactgatacgcagtgaaggctaa

SEQ ID NO: 325950 - DNA, 897 bp, Pseudomonas aeruginosa
atgagcaacaacagcgtatttgactctgccattgaattgccggacgcccagctaaatgatcgcgaaaaagtcttgctcgggtttacgggccgctacgagcgcgtacagaaccagctccagttgcttctgaaccaagggcaactgtccgagtggagcaaggagcaccataaaagcgtgctcccaatatgtaatttggttgccgatcagtaccctctggtgatcttccacggagacgtcggtaccgggaagacggctacagcggaatgcatcgctaaccggattgtgagcgattctcgcgctgaagattcgttgctgtacaagctgagtaaccgagtccgcggctccggtaaggtcggcgaaatggggacgctcttgacccaagccttcgcagaggtgattgaagccgccggcaaaaaacgccgggcgattctcattatcgacgaaggtgactcaattgcagcttctcgctcgcaaagccagagccaccacgaagataaggttgcagtgaacaccttgatccaaggcgtggacgagctgcgcaagtacggtggccgcattgttgtaattctgtgcaccaaccgcctttcggtgctggacgcagctctccgtcgtcgtgcggccatcgttgaagagttcacgcgccctgatgttgctgagcgcaaagagctgtttagcatggatctggcaggcatggggcttacggagaagcaactgaatgacttggcaaccgtcacaggcgagcgtaacgggcagccagcctggacttactccgatattcggacgcgcctgtaccctacagcgatggccaaagccttcccgaatcgtccgctgagcttcaaggatctgaccgactcgattcttacgatgaagccatcaccggttatggaagacaagtaa

SEQ ID NO: 325951 - DNA, 510 bp, Pseudomonas aeruginosa
  misc_feature (307)..(316): n is a, c, g, or t
atgacctacagcgctacccaaaccacgacctataccactactgacattgaagcagtcgtacgccggatcaccgccgacctcttaatgatcgcctcgagcagcgaagcagtgactgaagccaaggccaaggaatgggcctatgacatcgagctgctggccaagaacgggtatctgaaattcgcggatctcacgctgttgagcaatggcgttgagcagaaggcaacccggtactacgtcaacgagtccggctccctagccaaccagcgcccgggtgatgctcgctggcccaaggtatccaacccgcacnnnnnnnnnnacccgcacctgcggatcgttctgtcctacaacgacagttacacccagcaagcgcgggagaacatgtctggaaagctgaagatcaactggacaacctcttacgacgacatcagccactcccagctcactcagagcggtggtcgcgaatattcgagcaacggctacggcatggaacggaaggactacacccgatga

SEQ ID NO: 325952 - DNA, 2601 bp, Pseudomonas aeruginosa
gtgctgatcggcgagttgctgcagcgcagctacgaactcccagcctattccaccctcaatgacgctgctgaggatgccttagttgcaatgcaggagcggctattcaatctcgttgtgaccagggcgccaattgaggtggtctacaaactgaaagaactgctcgaaacggatttcgggcgacgccaaagtgacttcaacgccctcaagcaggcacccaagaagccatcccgcaaacacttggaagtgctgatagatcacatggcttggctcgagagctttgggaatctagatgccatttttgatggaatcgtcgataccaaaatccgccacttcgctgcccaagctgcggcgtcggacgtcgccgagcttaaggactgttcgctgccgaagcgttacacgctgatgcttgccttgatctatcggatgcgcgtgcggactcgggatcacctagccgagatgttcatccggcgaatctctacgattcacaaacgtgccaaggaagaactagagcaaatccaagcacggcaacgtcagaagctggagcagctggcggccaccctggacggtgtggtgcagattttggttcaggaaccggatgaccaagaggcaggtagcctgattcgggaatacctctcccccgacggcaacctggaacggttacgcgaaacctgtgccgaagtccaggctaccggcggtaataactacctgccgttgatctggaagcatttcaggtcccatcgctcgctgttgttccgtctcagccaccttctccaactggagcccacgactcaggatcggtcgctggttcaggcacttcaactgatacaggacagcgagaatttgcaccgcgtgtggatcgacgagcacgtcgacttgtcgtttgcgtcggagcgctgggtcaaggtcgttcgtcgtcctgccagtgaggggccaccgaccaaccggcgctatctggaagtttgcgtattctcctacctggccaacgaactgcgatccggtgacatgtgcgtacaagggtcggaatccttcgccgactatcgcaagcagttgctaccctgggacgaatgtctccagcgactaccagcctactgcgaaaagatggaactgcctggcacggcgaaggaatttgttacctccctcaagacccagttggaggaaaccgcgcagcaactggatgacaaattcccctcttgccgaggggacgtatcgatcaacgaagccggcgaaccggtattgcgccgagtgacggcgcgcgacatcccgccatcggccatctcgctacagacggccctcatgcaacgcatgccggccaggcacgtactcgacatcatggccaacatcgagcactggattcagttcactcgacatttcgggccgatgtccggcaacgagccaaagctcaaagaacctgccgagcgctacctgatgacgatcttcgccatgggttgcaacctcggccccagccaggccgcgcggcatctggccggtaatgtcaccccccacatgctttcctataccaatcgccgtcacctctcgctggagaaactggacaaggctaaccgcgagctggtggagctctacctgcagctcgatctgcccaaactctggggcgatggcaaggcggtggctgcggacggcacccagttcgacttctatgacgacaacctgctggccggctaccacttccgctaccgcaagatgggagccgttgcctatcggcatgtggccaacaactacatcgctgtattccagcacttcatccccccgggcatctgggaggcaatttatgtaatcgaggggctgctcaaggccgatctcagcgtcgaagctgatacggtgtattccgatacccagggccagtcggccacggtgttcgccttcactcatctgcttggtatcaacctgatgccacgcatccgcaattggcgcgacctggtgatgtgccggccggatcacggcgctgcgtataagcatatcaaccgcctgttcaccgacaccgccgactggcacctgattgaaacccattggcaggatttgatgcaggtcgcgctatcgatccaggcgggcaaaatctcctcgcctatgttgctgcgaaaactcggttcctacagccggcgtaacaagctctaccacgcggcacaggcactgggcagcgtgatccgtacgatcttcctgctcacctggatcggcagtcgcgagttgcgccaggaggttaccgcgaacaccaacaagatcgagtcctacaacggattctccaagtggttgtccttcggtggcgacgtgatcgccgagaacgatccggacgagcaacagaagcgactgcgctacaacgacatggtggcctcgtcggtgatcctgcagaacactgtggacatgatgcggatcctgcagaaattggcccgcgagggctggcagttcaccgatgaagatgtgtccttcctcagcccctacttgaccagcaacgtcaagcgtttcggcgagttcaacctcaagctcaaccggccgccggagccctggatcaaagactcggtgttccagcaggcagccgggtccatccgcactggcaagctcggtactgcggaaaccgaggagatgacctga

SEQ ID NO: 325953 - DNA, 363 bp, Pseudomonas aeruginosa
atgaacattcctcctgcgtcatttcgcgtcacgccctacggcgaggtagatgccgaggcgctggagcgtttgcatgacgactacgacaccatccagttgctgcgtctagtcgatgggctggatctgctgctgaaggaaatgaacaacatcggcggcctcagggatggcctcctgcgggtacatgccatggcgaaaacggtgctcgatggtgcggcactatcggtgtctgtgacggaaggcggcagtatctgggaggaagccgagtcgcttgatgaggatctggtggaactgggcaattggctggccagtgtcagagttcaactgaaacccttgatcgaactcatgccggtcgatcctcattaa

SEQ ID NO: 325954 - DNA, 855 bp, Pseudomonas aeruginosa
atgggcaattcactcaggttcatgatccgctggctcagctacccaacaatctttggcggggccgcagcttggatgatctggttgctctacacgggtattccgtattggcccagcacgccgatcattgccgccctagggattctgctggtggcgctgctggaacgcgtgcagccgttccgtgacgactggttggaggaccaccaggatacccttactgatatcatccatatggtcgtgaacctgtccgtgatccagattacggcgaccgtgctggcccggctgggcgattgggtgcccgcagagttccgtgtcttcccaacagagttaccgctgtgggctcagctagtcattgtcgccgccgtgctggaccttagcttgtacgccatgcaccgcttcagccatcaggttccatggctgtggcgcttgcatgagccacatcatagcgctgagcggctctactggatgaacggcgagcgccggcacccgttgcatgccgccatcatggcagggcctgggctgctcgtgctctttgcgatgggcactccttctgcactcgtggccacctggttcggcatcctgacggtacatttggccttccagcactcaaatctggactactcgttgggctggctacggcgcgtcatcggcgttgcagaaacacaccgctggcatcacaaacgcgacttcgaggatgcgcaggtcaattttggtgagttcttgctggtgtgggatcaactgcttggaaccttctatgacagcgcaagcaagcccagcagcgccgaagtaggactgcgtgaccgggactatccaacaggctatgtgggtcagattgtcgagccgttcagaagtcagtag

SEQ ID NO: 325955 - DNA, 735 bp, Pseudomonas aeruginosa
atgaacgcaacgcagggtatcggctggcatggcagagcctggatttcacccgggctgggcatttttctggggcaggcgggtagccaagattggcatagccacatggcgcatcaaattaccgtcagcttgaacggcagcttgactgtgaagtgtacatcctcgtcggtgacggcaagggccatctgcatcagggcaggggtggcccatcagatcgaagctgacgaagtgttgtcgatctacctcgacgcgctgtccgatgaggcgcgagcacttcccgataacatcggggagggcatcactccgattcagatgggcgatacagcatcgctgcgaaaattgctgagcagctccgatccgtcagcccagcaaattcgggaaatggtgcgccttgttctcaaccttacgactccgccggcctccgatccgcgactgcagtcggtcctcgctgcgttaaaagagccgattaatggcaggcaggcgttggccaagcgcgttcatctgtcgcctacccgattctcacattggttcgtcgaacagaccggtctgccgctgcgcagctaccggaaatggaatcgcctggtcatagcgctccagcatatcgccagcggcgccaacctgactgcggccgcccacgctgccggcttcgctgacgctgcccacttttcccgcaccttccgcgacctgtttggcctcgacccctcatctgccttgggtcatgtcagtctgaaaggctga

SEQ ID NO: 325956 - DNA, 1263 bp, Pseudomonas aeruginosa
atgtccgctttcctttttccacgccgtggctttctcggtgtgttggctgccgcattctgggcagctccctggcttgccgcgcaggcgcagcccctaactttcgaacgagcccaagctctggccgagcagagtgcccctgagaacctcgcgcgccaggcgcaggtggcatcggcacagcaggctgtcgagcccgcagacgccctgcccgatcccaagctgattctaggcatcgacaacctgccgatcgaaggccctgaccgttacacgcttaatcgtgactccatgaccatgcgccgcattgggttcatgcaggaagtccccaacagtgacaagcgtcaggctcggcgccagttggccgaggcttcagtaggccgagccgaggccgagcagcgtgccatgcagttggagatcaagcgccagacggcagtgagctggctggatgtgtactacgccgaacgcagtgttggcctcttcgatcaactggaccgtcagatcgagatgctccgctcgaccgtgcaatcgctgattgccggcggtagtgctcagcctggcgagctgttgcaggccgaccaggaagctttggcgttacaagatcggcgagatgaactgaatcgcgatgtggcagtagctcgtgccaagctgcgccgctggataggcaacgaggctgaccagcctttgcaaggaggtgttcccagtctgaacctggtggcaccgcacctgcagcaacgcattgcctcacaccctgagttgcgcgctgcctccgcccgagtcggcgaggctagcgccgagctgaacgaggccatcgccgagaagacccccgactggggtgttgagtttgcctacaacaatcgcgacaaccagttcggcgatatggtgatggtgcaatttaccttcgacctgccgttgttcgtaggcacacgtcaggggcccaagatcaacgccagacaacaaagcgtgtcgcagatggaagccgagcaggaagcattactgcgcgcccatcaggctgagctggaaggcggtattgccgagcttgagcaactgcgcaggaccttgtcacgcaccgaaaaaaccttgatcccgcttgcaagcaaacgtgccgatctcgaactggccgcctaccaagccggtaacagccagctcacatccgttattactgcccagcgcgacctgattgatgcgcaactgcggcagattgaacagcagcgcaagttgagccagctctccgcaagcctgtactacgcctatgtggagggcctgaaatga

SEQ ID NO: 325957 - DNA, 1461 bp, Pseudomonas aeruginosa
atgaagatatcgacatttggttttgcggtcgccgtgctgaccgtgggcattggcgcggcgggcggtggctactggctggcccagcggcaagccaaacacgagctactgcctagctccgcaccgacggacgagcgcaaggtgctctattggtacgacccgatgcagcctgagcagcgcttcgataaaccgggcaagtcacctttcatggatatggagcttgtccctaaatacgcaggatccgagcaagatccgtctgtcctgagcgtccccgctcaagccgtgcagaacctcggaatgcgaacctcgacggtgatccgcggtgtactgccctcggatatcgaggtggtcggctccctggcctataaccagcgagaggtagcgaacctccaggcccgcgctggcggattcgtcgagcgggtttacgggcgtgcccctggcgatgtactgccagctggaacacccctggtcgacctgctgattcccgagtggtccgccgcgcagttggagttcctcgcggtactgcgtaccggtgacgcccgcttgatcactgcggcccaagagcgcctccgcctgctcggcatgccacaagcgttgatagagcaggttcgccgcagcggcaaaccgcgggcagtgcaaaccctcaccacacctatcagcggcgagctccaagccttgcaggtacgcgccgggatgaccgttgaagccgggcaggatctggcgttgatcaacgggctgtccagtgtctggctcgatgcggcgatacccgaggccatggccggaagtatccaggtcggggacgagatccgcgccaacctgacggcctttcctgatcgaccgctgctgggccgcgtcatagccttgctgccgagtgccgatccgcaaacgcgcacgctcacggtacgcagcgagctacccaaccctgccggtaagttgcgccccggcatgttcgccgccgtacgcctgaacagtgccgtcgaacaatccacgcttcttgtgccgagtgaagccgtgattcgcaccggcaagcgtgcattggtgatgctggccgaaggcgacggacgctaccgcccccaggaaatcaccttgggccgcgaggccgatgggcgtctggaggtgttgtccggtctcgaggaaggtcaggcggtcgttacctccggccagttcctcatcgattcggaagccagcctgcagggcatcctggccggcaatgcagaacaggacagcacggaggggctgcatgtgtctcacggtgtgattcgtgctctggacgcggagtcagtcaccctggagcacgggcccttcgagagcctgaatatgccaggtatgaccatggcttttccattggtcagctcagaagtagctgtgggacttaagccaggagatcacgtacgtatcggcgcccgccagaaaaactccggcctgatgatcgagcagctcagcaaggaaggagaccagccatga

SEQ ID NO: 325958 - DNA, 816 bp, Pseudomonas aeruginosa
atgcccacgaatccagtagcccatcagcaccggtaccaaggtgatcgagaggccagcagcggcagccatggcataggtcttggtgaatgccagcgggccaaacaggcgaccctcctgggcctccagggtgaagaccgggaggaaagacagggtgatgatcaaaaggctgaagaacagcgccggcccgacctcggccgcagcttcgccgatcacccgccagtgcgcctcgccctgaagcggttcaccggggtgtcgagccttccaggcctcgatgtgcttgtgcgcgttctcgatcatcaccacggcggcatcgaccatggcgccgatggcgattgcgatcccgcccagcgacatgatgttggcattgacgccctggtagcgcatgacgatgaaggccatcaggatgcccaggggcagggtgatgatcgcgaccagcgacgagcgcaggtgccagaggaagatcaggcaaaccagggcaaccaccgcgaactcttccagcagcttgtagctgaggttatcgatggcgcggtcgatcaattgcgaacggtcataggtggtgaccacctcgacgccggccggcaagctgcccttcaggctgtccagcttggtcttcaccgcggcgatggcatcgcgggcattctttccggagcgcaagatgaccacgccgcctaccacttcaccctggccatccagctcggcaatgccacgacgcatctctggccccagctgaatggtggccacctgacccagcagcaccggaactccgctggccgaagcccgcagcggcacattgcggaaatccgccaggctctctag

SEQ ID NO: 325959 - DNA, 1491 bp, Pseudomonas aeruginosa
atgactgagctgctgagccgggaggaatacgcggccatcgccgcgacgctggaccttccccagcgcgccttcatcgacggagggttccgcgatgcctgcggcggccgcaccttcgcctcgaccaacccggccaccggcgagctgctggcgcaggtcgccgcctgcgacgcggaggacgtcgggcacgccgtggccagcgcgcggcgggcgttcgaggacggccgctggcgctcgcgcacgcccgccgagcgcaaggcggcgctgctgcgcctggccgagctgctggaagagcacctgctggaactggcggtgatggagagcctcgacagcggcaagccgatccgcgaatgccagcacaccgacctgccggaaaccatcaataccctgcgctggcatgccgaactgatcgacaagatctacgacagcaccgccccggtcggttcggcggcgctggccatggtggtgcgcgagccgatcggcgtggtcggcctggtgctgccgtggaacttcccgctgctgatgctcgcctggaagatcggcccggcgctggcggcaggctgctccgtagtggtcaagccggcccccgagaccagcctgaccgccctgcgcgtcgccgaactggccagccaggcggggatccccgccggggtgttcaacgtggtccccggcggcggccgcgaggccggcgaaccgctgggccgccacccggacgtggcgatggtcagcttcaccggctccaccgcgaccggccgcctgttcctcaagtacgccgccgagtccaacctcaagcgggtggtactggagtgcggcggcaagaacccggcggtggtgatgaacgatgtcgaggacctcgacctggtggcgcaacacgtggtcaacggcgcgttctggaacatgggcgagaactgctcggcgtcctcgcgactgatcgtccacgccgaggtccgcgaggcactgctcgaacgcatcggcgcgcagctccgcgagtggcgcatgggcgacccgctggatccgcgtaatcgcctcggcgcgctggtcagcccggcgcacttcgagaaggtccgcgcgtacctcgaccaggccaggacggagcggttggcggtgcgcttcggcggcgccaccgaggctggcatcttcgtcgagccgaccgtggtcgatggcgtctcgccgcacagccggctgttccgcgaggaaatcttcggcccgctgctctcggtcacctctttcgacgacatcgacgaagccatcgccctggccaacgacaccgtctacggcctcgccgcctcggcctacaccggcagcctgcgccacgcactgcgcctgtcgcgggagatccgcgcggggatcgtcaccgtcaactgcttcggcgagggcgacgcctcgacgcccttcggcggctacaaggagtcaggcttcggcggtcgcgacaagtcggtctgggcacacgaccagtacacagagctgaagaccatctggatcgacgcttcctga

SEQ ID NO: 325960 - DNA, 1152 bp, Pseudomonas aeruginosa
gtgtcccgcgatgtcacccggcgggtcgaggcggaggagaaccgccggcgcctggccgaagtggtcgaggcgaacaccgacctggtgctgttcgtcgagcatggcggccgcgtcacctacctcaatccttcggcacgtgccgccctcggcatcgccgacgggcaggaggcgccggcactggaacgcctgctggccggcgacactcctgcgcggttggccgaagagggttggcgacaggcgcgcgatggcggcgtttggagccgcgaggggcgcctgcaaccgcaggacgggcgtccgtcgctgccggtctcgctggtgttgctggcccatcgcggccgcggcgaggagcgctattactcgctggtggcccgcgacatgaccgaacgcgaactgcgcgaggctcagcagcgccgtcaccaggacgaactggcgcacactgcgcggctggtcactctcggcgaactggcctcgggcatcgcccacgagatcaaccagccgctggcggcggtgatgaactacgccagcgccagccagcgttacctggccgtcctcggcagccagcccgaggccgccgggcgggtggccgaggggctggcgcggatcggcgagcacgccggccacgcggcggaggtgatcaagcgcctgcgcgccttcctgcgcaagggccagcggcgcctgcaggcgctcgacctcaaccaggtggcacgcgaggccatcggcctctgcgcgtgggaagccgggcactggcaagtggcggtggaagaagcgatgaccgacaatcccccgccgctgtatgccgaccgcgtgctgctcgaacaggtgttcctcaatctgctgcgcaacgccatcgaagccaaccgcgaggcgcatcccggctcgccgtcgcgggtcgtcatcggtagccgcgtcgagcccggcgggctgctctgcctgtgggttcgcgaccagggaccgggagtgccggcggatcagctggaacacattttcacgccgttccacaccagcaagccggaagggctgggcctgggcctgtcgatgagccgcagcatcgtcgagggcttcggcggcaccctcgaagccgagctgccggcggatggcgggttgctcatgaactgccggctgccgctcgccgccggcgccacgggaggttaa

SEQ ID NO: 325961 - DNA, 705 bp, Pseudomonas aeruginosa
atgccgtcgagggtatgccgggaaatcaggtcggtggtgttctcggtgatcagccggtacagccggctggcccgcgccgcctcgcgctcgccgcgcaggctggcggtggcgtcgcggcagcgcgccagcacccgggcctcggcgctgtcgggaatgaactgccagagcaggatgcgcccgtcgcactccgcctccacctcgccgagggcccgcgcctgccccaggctggcgcgcaccagttgcccatggttggctgggaggaaggcgcgccaggcctcgcgcggccgctcgccaagcaaggcaaggaaagcctggttgaattccactgcctgcgcctcgccgtcgagcagcagtgccggctgcgggtcggcggcgaggaacggcgcggcgcgggtgacgccacgggcggcggcgagcaacggtgcgaggagcaggccgagccagtccagcgcggcgctctgcggcgtatcgctggccaccagcagcaggccttcgtcgccggcctgcaggtcgagggcgaaggccatgccatgctccacgccggcacgccgcaagcgcgcgccgagccaggacgcggaacgccgcaattcgtccagcgccagccggccgtcgcgcgccaggcgctcgcgcaacgccaggtcgctggcccggttcggctcgccggcgcccggcggcagcgccggcgacggcggcaccggggtatag

SEQ ID NO: 325962 - DNA, 771 bp, Pseudomonas aeruginosa
gtgcaccgcgttgcgtgcgccgagcgcgccgtcgtcgccgaccaggaacttcggcaccaggaacagcgagatgccgcgcgaaccggccggcgcgtcgggcagcttggccagcaccaggtgaatgatgttctcggtgaggtcctgttcgccgccggtgatgaagatcttcgtcccgctgatcctgtaggaaccgtcggcctgcggctcggccttggtgcggatgatgcccaggtcggtgccggcatgcggttcggtcagacacatggagccggcccaggtgccggcgtacatgttcggcaggtacctgttcttcagctcctcgctgccgtgcgcatcgagggccaggcaggcgccggcggaaagggtcgagtagaggctgaagctggcgttggccgcgtacatcatctcctcgaactgcactgccagcatcttcggcatgcccatgccgccatgggccggattgccggtgaggccgacccagccgccctcggcgtaggtcgcgtaggcctcgcggaagccggccggggtgcgcacggcgccgtcctgccactgcgcgccttcttcgtcgccactgcggttgagcggcgcgagcaggccgccggtgaccttggccgcttcctcgaggatggcgtcggcggtgtcggcgtcgatccgctcggccagtcgcggcaggcgctgccacagggcgggggcgtcgaacacgtcgttgagcaggaagcgcatgtcgcgcagcggggcgttgtattcaggcattgcacacctcgtcggtga

SEQ ID NO: 325963 - DNA, 993 bp, Pseudomonas aeruginosa
gtgcccggcaccgatcccacgcaccacgccgcgcaggcgcacgcgctcgtgctgcgcctggatcgcctcgatgcggttgcgcgcgtactgctcgccgtcctggctctgcacgtattcgccgggatagtcgtacagcgggtagtcggccgccgcgtgcggccgggcgatgttcgaacgcacctccaggcgcgcgccggggcgctggaagtcgtagtcgttgagggtcagcgaaccgggctggacctcgcgtgccatctgccagtcgaagaagtggtcgcgctcgcgatggccgagggtcggcgggtagtacggcacgctggcgtagccacccgggctgcgatgcgcgccgtaggcgtcggagagcaccaggatgtggcgcttctgctcatggcggaaccagtagtagatgccctcctgttccatcagccggctgatgaagtcgaagctggtctcgcggtactgcacgcagtattcccactcgcggtaggggcgcgtgagggcatcctcgaaatcggaaaagccgaggtcgcggaacacctgcttgatgatctccggcacgctctggttctggaagatgcggcagtccgaggtgcgcgtcagcagccacggccagggccgcagggtggcctggtagccggcgaactggccgtgcccggccacctggctacagcgcgcgacgataccgtgaaagaagcgccggctgccgccgggcagctccagcgacaggctcatcggcttgccgagcaactgctccagcggcaggttgggattttccgataccaggtgcagctcgtaggcgaacagccgtcccagttcctcgcgtccctccatgcgctgcaacagcagcacgtccggccccagcgggcaatccacctggaccaggcgggtcagttgcatcaatcccatcgacggttccttctactgctctgcgtgtcgccggttgtcactcggcctcggcgaagtcgtagtggaactggttgtcgcggctactga

SEQ ID NO: 325964 - DNA, 1350 bp, Pseudomonas aeruginosa
atgacggacttcgtcgaccaggctggcccggccgagattgctggcgcagcagttgaccgccacccgcagccgttcgtggccggccaggtgcaggctgcgcaggtcgcggcaggcgcgtcgcagcacccagtcgtcgagctggtcgatcatgccgttggcttcggccaggccgatgaagcggtccggaccgagcaggccctgggtcggatggcgccagcgcaccaatgcctccaactggtgtacctcgccgtcggcgagggcgaggatcggctggtagtgcagctccagctggtcgtcgcgcagggcctggcgcagttcctcctccatctgcagttcctgggtcgcccgcaccagcagttgccggctgaagaactgcgcgttgttgcgcccgcaggccttggactggtgcagggccaggccggcgttcttcagcagctcctcgcactgctcgccgtcgttcgggtagaggctgacgccgacgctggcggtcatcaccagggtgcgcccgtccagggcgatgggttccttcatcttctgcatcaggcgttgcgagaggatgtgcgcctcgtggtcctgggtgaggtcggcgagcacgcagaactcgtcgccggcgaagcgcgccaccacgtcgctatcgcgcaacacgctgcggatgcgttcggagacgatcttcagcagctcgtcgccggagtcgtggccgagggaatcgttgatccgcttgaagtgatcgaggtcgaggaacatcaccgccaggcccttgcctctcaggcgacagttctccaggtgctggacgaacacttcgttgaatgccgtgcggttctgcaggccggtcaggctgtcgtagcgagccatctggcgcagcgaggcgtgggcgtggtcgagctggttgagcagggcgttgacccggctgttttcgctgagccggcgctcccgttgtttctccgaccatgcggcccagatgccgcaggcggcgatggcgctggcgagcactccggtgagccagcccaggcgcagcgagtcggcgctggcttgcagttccagcggcgtgccggcgggtacgctgagcaccagcgcggccatcccggtgaaatgcatggcggcgatggcgccggccagcagcaggctggcgatcagtttcatgtagcggtagcgcgcgctgcgccggccgcgcaggtaggggaccgcggcgagggcggtgaaggcggcgccgatggcgatcagtaccgaaagggcgaacagcgatggctggtagtactgggtggccaccgagcgcatcgccgccatcccggtgtagtgcatggcggcgatgcccaggccgatgcagcaggcggcgagcaggcagggcagtag

SEQ ID NO: 325965 - DNA, 720 bp, Pseudomonas aeruginosa
atgatgcggcaaagcgaagacgccatatccaaggcggtcctgggcggcaccctgaccagcaccaccagccagtcaggcggcggcgcttttgccctgggccaggtgcataacgaggttcggcacgacctactggcatccgatgcccgccaactggcggccacgttgtcccgcgatctgctctggccgctcctggtactgaaccgtcctggcagtcccgacgtgcgccgggcgccgcgcctagtcttcgacctgcgcgagcaagccgacatcaccagcatggcccagtcgattccggcactggtcaacgtggggctggagattcccagcgcctgggtctatgacaagctcggcatcccgcagcctgccaagaatgagccagttctgcgttcggctgcgcagcctgcaatcctgagccgccagcatggacaacgggtggcggccttggccaccatcgttggcccgcgctatggcgatcagcaggccctggacaaggcgctggccgacctgccggccaaggacatgcaaaaccaggccaacgacctgctcgccccgctcctggacgcggtcaaccgcggagacagcgaaactgaactactcggcgccctcgccgaagcgttcccggacatggatgacagcgccctgacggacgcgctccaccggctgctgttcgccgccgatacctggggccgcctccacggcaacctggaccggatcgactga

SEQ ID NO: 325966 - DNA, 1287 bp, Pseudomonas aeruginosa; identical to SEQ ID NO: 325052

SEQ ID NO: 325967 - DNA, 468 bp, Pseudomonas aeruginosa; identical to SEQ ID NO: 325053

SEQ ID NO: 325968 - DNA, 423 bp, Pseudomonas aeruginosa; identical to SEQ ID NO: 325054

SEQ ID NO: 325969 - DNA, 225 bp, Pseudomonas aeruginosa; identical to SEQ ID NO: 325055

SEQ ID NO: 325970 - DNA, 972 bp, Pseudomonas aeruginosa; identical to SEQ ID NO: 325056

SEQ ID NO: 325971 - DNA, 915 bp, Pseudomonas aeruginosa; identical to SEQ ID NO: 325057

SEQ ID NO: 325972 - DNA, 441 bp, Pseudomonas aeruginosa; identical to SEQ ID NO: 325058

SEQ ID NO: 325973 - DNA, 168 bp, Pseudomonas aeruginosa; identical to SEQ ID NO: 325059

SEQ ID NO: 325974 - DNA, 447 bp, Pseudomonas aeruginosa
gtgagctactgcacgctggccgacctgatcgagcagtacagcgagcagaaaatccgcgagctgagtgaccgcgtcaataaaccggccacaaccatcgacacggtgatcgtggatcgcgccatcgctgatgccgactcagaaatcgacctgcatctgcacggccgataccagttaccgctcgccagcgtgccaacagcgctcaaacgcattgcctgtggcctggcctacgccaatctgcacatcgttctaaaggaagagaacccggtctacaaaacggccgagcatctgcgaaagctgctgtcgggcatcgccaacggcaagttgagtctggccctggacgctgatggcaagccggcgcccgtagccaatactgatcgagcgtatccgctcagaggttcctgggctggccatcgtttccggggtgtccgatctggcggccttgagtga

SEQ ID NO: 325975 - DNA, 384 bp, Pseudomonas aeruginosa
gtgtccgatctggcggccttgagtgagcaggaccagcccgcccccagcgtctatgtcgtctatctcggcgacgagataggcaccggagcggatcaccaagggggcaggcgcgccattcaggccatcggccagcaatgggcggttgtgctggtggtgcattacgccgactcgtcgaactccggcgaaggagcgcgccgagaggcaggaccgctgctgggacggctggtcaaggcactgaccggatgggctcccgccatcgatgtggcgccgttggcgcgcagcgcccgacagtctcctcccacctacgccagcggctacttctatttccccctggtgttcaccgccaggttcgtctacccgagggtcaagtcatggaaaccgtaa

SEQ ID NO: 325976 - DNA, 186 bp, Pseudomonas aeruginosa
atggaaaccgtaaaagtcacgatctctgctgagaaccccaaccacacccacgcgggcaagccggtggccaagggcgacgaaatcgaagtcacccgcgctgcggcccaactgctgctgcgtaagaagctgatcgaaaagatcccgaaatcagcgcaaggctcggccgttgccgacagcgacaaataa

SEQ ID NO: 325977 - DNA, 774 bp, Pseudomonas aeruginosa; identical to SEQ ID NO: 325062

SEQ ID NO: 325978 - DNA, 498 bp, Pseudomonas aeruginosa; identical to SEQ ID NO: 325063

SEQ ID NO: 325979 - DNA, 3699 bp, Pseudomonas aeruginosa
atggcgaacaatcagcaactgacactggccctccgcatccgcgccgatctgaacgacgcccaggacgcgctgcgtcgtctgaacggtaatgtcgatgaactgggccagagcaccaggacagcggcgcgggatgctgatcaactgaatgccgccacccagcgcatcggtggcggcatgacggcccttgctgcctccatcaaggccgctgcgctggggctgggggcgctgttcagcattcgggagatcatccagaccaccgacgcctggaccaacctccagaaccggctgcgcctggtcaccagcacccaggctcaactggcggcggtgaccgatgacgtataccgcatcgctcagttgaccagctccgcgctggactccaccgccaccgtctaccagcgtttcgcgcagaacgccgaccggctgaacatcagccagcggcaagtcgcatcgctgactgacacggtggccaagtccatcgcgatttcaggcgccagtgcgcagagcgccgaggcggccctggtccagtttggccaggctctggcgtcgggcgttctgcgtggcgaggaattcaactcggtcagcgagcaggcgcccgcgctgctgaaagcaattgccgatggcctcaacgtcaatatcggcgagcttcgcaagatggcgaacgaaggccagttgacggctgacgtcctggtggacgccttgagcaatgcggcggccggcgtgaacgatcagttcgccacccgcatcaagaccgtttcgatggcagtccaggaactggagaatgcgttcactcgcctggtaggtgagttcaccaatggccgaggtgcgggcgaagcgctggccggtgccatttccggggtcgccaatgtcatggacggcctgagcgataacgccgagctactgggcaccgccctggatgccgtgatggtgacggcagccgggcgagcggtggcggccatcaccgggctgaccactacctggctcagcaacgcggcggccagccgcgccgctgccatcgccgccgctcagaaagccacggccgacgaaggcgccgccgtggcggcacagcgagccgctgcccaggagctgcaacgggccaaggccgctgtcgcctcggcagaggccgaggtggtggccagccgcgcccgccaggccgccagcctccagaaccttcgggacgtccaggccgccctggtcgcggagcgcacgctggagcaggcccgccttcaggcgcagatcaccgatattggtcggcagcagtccctcgctcgcctggctgagctacggctgtccgaagcggccattatcaggcaggtccaggccgcagaggcggcgctcgcatccacgacgctggcgtcttcggccgccgtcaccgccgcctatcagcgtaggaccgccgcagtcgcggccgccgcttcggcgcaacaggccctgacggtcgccacgaacaacgcgaatatcgcctctgcggccgccgctgcggcatccagcttcctggctcgcggcatgggaacagtgacggcggtcggtggccggctgctgggattcctgggcggtcccatcggcgttatctcgatgattgccattgcggccacggcattcctggacttcggtagtgacgccgagtccggcatggaccgtgccgccaatgcaaccgagtcggctagcgtccgcatccgcaacgcctcgcggaacatcatccaggcgctgaacctgggtgacctgaagacggccaactacgaccagctcggcaagagcatcgagcagatcaagcagcaactggccgaggccgagcagatacagcagcgtgccgaggccctccaggacacggacgttcctacggtgccgggcatggacctcccgagcctggacgaagccaacgaacgggtacaggcgctgaccggagccctgcgcaggcttgaggcagagcgagccggcgaccgcttcaagaacgtgcgcgagggcaagcagtacctggagaacctggagcgccagaacgaacgcctacagaacctcaccgcgacagaagaagccctgaactacctgcgcaaggaaggtatcgacgccacgtcggagctgggtaggaagatcctggatcaggccgccgccaaccagaagctggacgccaccaacaaggccgaagccgagtccaagcgccagtctgaagcggcggcgcgcaagagcgctcagacgtcggaacaactgcgcaagagccaggagggctacgtcacccagctggaacgccaggcggccctgctgggtatgaatagcgccgaggttcgcgcctacgagctggccgagaaaggacttaccggagcgctaagggccagggcagaagctgcccttgctgctatcgatgccgacgagaagaggcgccaagccgatgccaatgcaagcgccaatgccgaccttcaggccgagtatctgcgggcgaccgggcgcaccgttgacgcggggctgctggagattcggacgaaatttgacgcgatgcgtcgggacttcgaaaaggcgggcaacgacgccggcctggcctggatcgacaagctaatccccgtcgccgaggccaaggtccgtctggatgacgtcaagcagaagatggacgacttgctggccgagcaacagcgagctgagtcatccgtcaacgtccagcaggatgccggcgttatcaacgaaatggacgctcggcagcgaatcctggacattcaccgagcgacctacgagaagctccagcagattcggccgatcctggaacagatggcccgccagcctggcgaggtcggccgagctgctgccgaatcgctcgcccagctggaagctgaagcggagcgactccagcagaccacgacgctgctcgaaaccaccttgcgggacgggctcactaccggctttaccgacgccatcaaggggctggcttccgggaccatggacttgcgcgacgccattacgtcgctgggtgaggctgtgctcaatgccttggtgaacatggcggcgcagaacctagcgcaatcgctgtccagcggcatcatggggctatttggtggcggtcagcaggacaccagcatgacgaccggcgcggcggctgttaccgcgtcggccggcgcgctttcgaccgctggggcgtcgttgctgactggggctgccgcaatccaggccgccgccgcatccctggccgctgctaacggcgtccagggcctgggcgcagccggtggcgcggcgggtgcagccggagcagcggcgggtggcggcagttggtggtcctccatcgctggagcgttcggttttgccagcggcggccatgtacgcggccccggtacgtccaccagtgacagcattccagctcgcctctcggactgggagtacgtcacccgtgccgccgtcgtgaagcaacctggcgctctggcatttctcgaacagttcaaccgttacggcatggccgcactggccggctgggcgaatcctgttcgtcacgcaacgggcggacgtgccggcattcccgcccccaacctgccggcccccgtccgtgtcggcgcgaacctgcccgaaccatccaagaacttcagtacctcggtcgccaactcgatctacctgcacgccgttcaggacacggatcagatggcggccgacatgtgggccggcaaaggcggcgaacacttcctggtctggctgaacaagaaccgccaggccgtcaagcagattatctag

SEQ ID NO: 325980 - DNA, 162 bp, Pseudomonas aeruginosa
atgtccctgaacactccgcgcaacaaaccgtcccgcaccgagaccgaggctgtcgctgccacctcgggacgatccgccgtcggtcggcgggattacaccgagcagctgcgccgggcggcccggcgcaatgcctgggacctctacggcgagcacttctactga

SEQ ID NO: 325981 - DNA, 900 bp, Pseudomonas aeruginosa
atgaacctgccgaagaaggtccgcctggtggaggtcggtccgcgcgacggactgcagaacgagaaacagccgatcgaggtggccgacaagatccgtctggtcgatgacctgagcgccgccggcctggactacatcgaagtgggcagcttcgtctcgcccaagtgggtgccgcagatggccggctcggccgaggtattcgccggcatccgccagcgtcccggcgtgacctacgcggcgctggcgccgaacctgaaaggcttcgaggcggcgctggagtcgggagtgaaggaagtggcggtgttcgccgccgcgtcggaagccttctcccagcgcaacatcaactgctcgatcaaggacagcctggagcgcttcgtaccggtgctggaggcggcgcgccagcaccaggtgcgggtgcgcggctatatttcctgcgtgctcggctgtccctacgacggcgatgtcgatccgcgccaggtcgcctgggtcgcccgcgaactccagcagatgggctgctacgaagtgtccctgggcgacaccatcggcgtcctgctggaaggcatcgcggtattcgacagctcggtggccggcctcggcggttgtccctacgccaagggcgccaccggcaacgtcgccagcgaagacgtcctctacctgctgaacggtctggagatccataccggggtcgacatgcacgccctggtcgacgccggtgtgggggggtggttcttttggcgcgggggagcgggtggcgtcggatggctggaagccagacgtggcgcgggtttaggggtgtttgaccgtctcgcgtataccaaccgaagaatggtatggattgcgagattccagccagattcagaatatttattggcgctagaccgggcaggaatgcgctctcaatag

SEQ ID NO: 325982 - DNA, 681 bp, Pseudomonas aeruginosa
atggattcaaagttagcgcaagcgcaggcagcagccaaagagctaaagcagttcattgcagagttaaaggacaagcgcattcaagcattgagcgtcaaggaaatgctactggaagaaaaaaatcttctgttaagtcaaccactaaatagagatgacttaaagcagttcattgccacctatgtagatgcgcgtgcggaagcgtttccaaaattggcaaaacttggcgacaccttttcccgtatggccaatccctcgcgtggagcctcagcctatgtgcggggaaaggctttgaacctgcgggatgtcaattcatttcctggaaagacaccggaagaagtcagaagcttctttggcggcaatcttgagtttttccctggtcacttgattacggggtctgacatagcggcttgctatttcttcggagacgttatcaagactaaaatgttcgaggcttttgacggtctgttttctggctatgcgttaccggcagaacggcaagacgtgggaacgtcaattgaagagcggcgagcacgaatctctgatattgaccgagaagttgaagggctggaggagcaagtcgcggcaatagatcaacaactgtcagggcttggcgttgtcgagccggaatcgcgcaagcctctggttggtgtacctttcgtgcgaggtagcgcgcatggctaa

SEQ ID NO: 325983 - DNA, 675 bp, Pseudomonas aeruginosa
atggctaacctacatcttctggctcctttgaggctagatagccctgcggccttggcgggtgcgtttcgcgtcgtccctttgggcgagtttcaagccaacgatggccgccccggcgtagggcagagatggcagcttaatgaggttcgagggcaagccatcgttcaagcgctactgaatcggggtgatgctctggtgatcgattacgagcacaagacgttgcaggcaggtgaagtaaaccccgctgccggctggattaagcggatggaaatgcgagtagacgggttatatgccgtggacgttcagtggactgatcaggctaggcaaatgatccggggcgggcactatcggtatatctccccagcccttacttacgatgcggctagtcttgaggtaactgggcttcatagtgtggctctgacaaataaccctgccctcaacggtttaaccgatcttagccttgtagcacttagtgcccttccgccagaacagggtgataagttcgcaggcttgagcctggagtcccgtgcctatttggagcgcatgataggcgtgccacttgagcaagccgccgccgagttggatattctgaggtacgtcccgctagcgcctgaaggtatttcggatgctgactggcagaagctataccaccagtttgggacgaccttgcttgcgtga

SEQ ID NO: 325984 - DNA, 1038 bp, Pseudomonas aeruginosa
atgacttcaaatccgttacagcaatgctgcaattcttcctccgatatgaatatccgcccccagcggacaatgtcggaacctgcccgaaatgcatcggttctcctggctgaagccttgaaaccgggtgcctccctggaccagatcacgctcgcgctcgaggcgattctcgcggtcacggccaaaggcctgggcggtgatgcttcggcttacgcgcagtaccaggcgttgctcctggaactgcacgtaggcagcgatccgcatacggagccgacccgccgctggatggcgagccaggtctacctggtcgaggatcgtttcgctcccgagccggccggtttcagcgccgtcccggtggaggagttccgcaagaaggtcgacgccgagatcgaggcgcgcagccgggtgcgccatcccatgtcggtccacctgttccagggcacgccgccggtcgaggacgtgcgcttcttcctggaacaccattgggtccgttcctacaacttctacagcctcctggcggagctggccttccgcttcgaaaacatcgaggacgcctcggtgttctaccgcaacctctacggcgaggccggggcggagacgccggagcgctcgcaccccgcgttgctgtcccacctgatgacctacttcgacattccgctgcgcatcgatttcccggcgctgcatccgctggagaaggcttacctcaacaaccgtatccgttgcgtgcggcacaccgatgtcgcctggggccttgcgctcctgtacgcggtcgagtcggtgagctgcgtcaaccaccggcgcatctacgaactcctgcagcgcctgggcgtgcccgagcaacccagcgagttccatcgcctgcacggcacccaggacgagatcgataccgaggagatgtgggcgctgatcgccaagttcgcgccgagcgaagacttccagcgcaagttcatgcagtcgctggcgcgccacttcgaaatcaaccgggcctacttcgacctgctctgggagcagatgcaggcgaattccctggccatggcctga

SEQ ID NO: 325985 - DNA, 561 bp, Pseudomonas aeruginosa
gtgcgtccgttgaaaatctcccgcgacgagcttctccagcgctgcgccggcaccttccgtcgctacggctaccacggcaccaccatggaaatgctgtccagcgcctgcggcttgaccaaggcctcgttctaccaccactacccgaacaaggaagccttgctccgcgacgttctcgaatggacccaccagcggctcgccgagacgctcttcagcatcgcctacgacccgctgctgacgccccgcgagcgcctggaaaaactcggccgcaaggccgcccggttgttccaggacgacagcatcggctgcctgatgggcgtggtcgcggtcgacgccagctatggtcgcagcgagctgatggcgccgatccgcagtttcctcgacgactgggcgcaagccttcgcccagctctaccgcccggccttcgacgaggcgcaggcgctggagcgcggccggcaactggtggccgatttcgaaggcgccatcctgctggcgcgcatctatggcgagccgggctatatcgatggcgtcacccggcgagcgctggagcaactggcgggctag

SEQ ID NO: 325986 - DNA, 798 bp, Pseudomonas aeruginosa
atgagcgaagccaacagcggcccgggccgcgtcacccgagagcagcgcggtcatctgtttctcatcggcctggaccgcgcgggcaagcgcaacgccttcgacagcgcaatgctggcggacctggcgctggccatgggtgaatacgagcgcagcgaggaatcccgctgtgccgtgctcttcgcccatggcgagcacttcaccgccgggctcgacctgatggaactggcaccgaagctcgccgccagcggtttccgctatccggacggcggcgtcgatccctggggcgtggtccagccgcgtcggagcaagccgctggtagtcgcggtgcaaggcacctgctggaccgccgggatagagctaatgctcaatgccgacatcgcggtggccgcgcgcggcacgcgcttcgcccatctggaggtgctacgcggcatcccgccgctgggcggatccaccgtgcgcttcccgcgtgcggcgggctggaccgacgccatgcgctacatcctcaccggcgatgagttcgatgccgacgaagccctgcgcatgcgcctgctcaccgaggtggtggaacccggcgaggaactggcacgggccctcgaatacgccgagcggatcgcccgggccgcgccgctggcggtgcgcgccgcgctgcaatcggcgttccaggggcgcgacgagggggacgatgcggcgctgtcgcgggtcaacgagtcgctggccgcgttgatcggcagcgaggacgtccgcgagggcgtgctggcgatggtgcaaaagcgcgcgccggcgttcaaaggccgctag

SEQ ID NO: 325987 - DNA, 885 bp, Pseudomonas aeruginosa
atgacttcgttgactcaacattccgcagcgccggtgcggatggaacgcctggccctgcccgcgaccgacggctatccgctgtccgcctaccgctaccacgcgccgggccacgcccatggcaacctgctggtggccggcgcgacgggcgtcgcccagcgcttctaccggcgtttcgccgaacacgccgcgcgccagggcttcgacgtactcaccctggactatcgcggcatcggcgaatccgcgccggcaagcctgaagggcttcgccatgtcctacctggactgggcctaccgggacctcgccgccgccgtcgagctgctcggccgggaggagcggccgctgtactggatcggccactccttcggcggccacgccatcggcctgctgcccgaccatgggcggctcgccgcctgctacagcttcggcagcggcgccggctggagcggctggatgtcacgccgcgaagcgctcaaggtgcgcctgctgtggaccctggtgctgccgccgctggtggcctggaaaggctacatggcctggagcctgctgggcatgggcgacgacctgccgctgggggtctaccgcgactggaagcgctggtgccgccatccccgctactatttcgacgacccggcgatgcgccacctccaccagcgctacgccgcagtgcgcacgccctgtctgttcgccaccgccctggacgatccctgggcaccgccgcgctcgcgggacgccttcgtcgaggcctaccgcaacgcaccgctggaaaccctcgacctgcgacccgacggtggaccgctcggacacatgggctacttccgcgccggtgcagaggcgctgtgggacgacgccctgcgctggctgagacggcatccggagaacgcctga

SEQ ID NO: 325988 - DNA, 1152 bp, Pseudomonas aeruginosa
atgaaccaggcaatcagggaacccatcgaacacaccactggcgaaaccatgccagcagtcacgcgccggcgccgaacctggctgctgggcggcctcgccggcgccatcgcgctcgccgccctgctggcctggtggtggagcagcggacgcttcctggagggcaccgacgatgcctatgtacgcgccgactgggtggcggtcagcgcgcaggtctccggctacgtcgccgaggtgctggtggccgacgacgccgacgtccaggccggcgacctgctgctgcgcctggacccgcgcgacttccgccagcgcctgcgcgccgccgaggcccgcgaagcggcggcgcaggcggcgctggaagcccagcgcgcgaagctggagaccctcgatcggcaactgctggagcaggtgcagacgatcagccgcgcccgcgccgatggcgaagcggcgcgagccgaatggcgccgcgccgagaccgactggcgacgctaccggcaattggccgacgagcatgccaccagtcgccagcgcctggagaatgccgacgcggcgcaccagcgagcgcgggcggcggcgcggcgggcaagcgccgaggaaggccgccagcgcgccgccagggacgtactgaagagccggcgacgcgaggcggaggcggcgctcgcccagcgccaggcggagctgcaggaagccgcggcggcgcgcgaactggcgcgccacgccctggacgataccgaaatccgcgccccattcgccggccgcgtcggccagcgcaaggtgcgcctgcgccagtacgtcacgccggggctgccgctgctggcggtggtgccgctggagcaggcctacgtggtggccaactacaaggagacccagctcgaacacatccgccccgggcaaccggtagagctggaggtggacacgttcggccgccgctggcgcggccgcgtcgacagcgtggcgccggcctccggcgcggtattcgcgctgctgccgccggacaacgccaccggcaacttcaccaagatcgtccagcgcttcccggtgcgtatccgcctggacaccgacgccgccgagcggggccggctgctgccggggatgtcggtgatcgccaccgtggacactcgcgaaccggacggagcctccgccgatgagcgctga

SEQ ID NO: 325989 - DNA, 555 bp, Pseudomonas aeruginosa
atgcgcaccttgttcatcgccccgcaggcgcgccacgacctaccgcaggactgccgggtggtggacgtgccgccgttgctgcggcaattgatcgtcgcggcgatgcggatcgcgccggactacccgccgggcggccgcgacgagcgggtgatggagctgatcctcgatgaactgcgggtgctgccgatcctcgccctgcacgtgccacagccggtcgatcggcaactggcggcgctgtgccgcagcctgcgcgccgagccggccgccgactggagcctgggcgatgccgcgcgtcgcctgggcgtcagcccgcggaccctgactcgcgccttccagcgcgaaaccggtctcagcttcgtccagtggctgcggcgcatgcgcctgctcgccagcctcgatgcgctggcggcagggcattcgatcctcgaggtcgcactggacctcggctacgacagccagagcgccttcagcgccatgtttcgccggaccctgggcgtttcgccgagcctctatttcggccgcggcgccgcctacggggtggccgagggcgactga

SEQ ID NO: 325990 - DNA, 2187 bp, Pseudomonas aeruginosa
atgaccaagctttttccgtcccggcgagggcgtctgtcggtgctggttctggtaacctgcacagccgtacccggtaccgccttggcgcatcacgtcggatcgcaggaggaggagatcgttgtcttgccggaaatgaacgtcaccgctcggcgtaccgaagagcacgccaaggacttgcccttcagcgtgaacgtcatctccggcgaagaagcagaggagcggcgtctgtacagtctggaggacgccctgcgccagacgccgggagtcgacgtgattaccaacatggggatagccaacacgacgctgcgaatgcgcggcgtcggtgctctgcagaagatcagcggggacgacacgtccgtggtgatcaatgtcgacggtatgccgatgtccgcctccaatgccacgttggatatcctggacgtggagcgggtggaagtgctgaaaggcccccagggcaccctgttcggacgcaatgccgaggccggagcggtcaacgtggtgacgcgcaaacctacacgattctttgagggcagcctgcgcggcgaactcggccaggacaaccagcggctgctggaaggcatgctcagtggacctctgtccgacactgtttcggcacggttggcgatccgcgggtcgggactcgacaactacatcgaaagcagccaaaccggcaagccgttgaacaagcctagagatttcagtggaagagcgagcctgcgttgggacatcggcccggactccgcgctcaatctcagcgcgggacgtgaagtgctgaaacatcgcgactgggtctatctcctgtatccctatggtgatccgcccaagagcgatattccgtcgaacagcgagcgcaaccgccgcgaggtcgaccgctatagcgccgagttcacccatcagttcgacaactctctcttcacggccctgaccggttttgctcggacccaccatcgcagcaccacgcccatctacgagggacgtacctatacgcagctgatcgggttccgccccgacgccacctggaacagcctagtgcgcgaacgcatcttcaaccatgaactgcgcctgagctcactaccggaagcagagacgttctgggtggccggcgccaatctctatcggtcggatcgggacatggaccgattcgactcctacgacaccttcttcctggaaaaccccgccgcctccagcgccaaccgggacttcagctccagagcgcatgcgctgttcgcagaggccaccttcccggtggccccggcgacaaagctcaccctcggcgggcgttacacctgggaaaagaagcgctacgacgcccactggtgggcaaatccggaaaatcccagccctattcgtgaggccagggacgcccaatcgctttccgacagctatgcaacgggccgggtggcgctgagccatgctttgaccccgcagctgaacctctacggtgtttacgcccgagggtacaagtccggaggtttcgacgaggaaggcatcggcttcacctctggcgggcaggatgcgccctacaagccaggctcggtgaacagctacgaaacgggtctcaaatttgaaagcgaggatcggcggctgaccttcaacttggcgatgttcctcaaccaggtcaagaacgaccacctgctgatgttcgatccgcaaaccatggcgacccgcaagagcaaccggaatgtgaccagccaagggctggaggctgactggagttggatgatcaacagccactggagcgtcagcggcggtcttgcctatacccgcgccaagatcagaggcggcggtgatgcttcgggtgctgacggtgttgcgtcaggaaacgacgtgcccgaagtgcctcgctgggaaggggtcctttccatcgcttatcagaagcccctaggttcgatgttcgggctctcctcgccgcacttgcatgcgcgactgaccaaccgctacgtgggtagccgcgccgcgacgccccagaacaactttgacctggcgtcatacaacaagctggatttcagggttggcatacgcaatggcggtaccgaactctatgtctgggcagataatctgctcgacaagcagtatgacctgtacggctaccatatcccggcgtacatgccgggtggggcggacgccaggattggtgcgcccggccgtgagcggacgctgggcgttggcatgaccatccagttctga

SEQ ID NO: 325991 - DNA, 858 bp, Pseudomonas aeruginosa
atgacgttggcggtaaatcagttgaggctgagctacggctcgcgcgaagtgctccgggtggcggagcttcaattcgagcccaccagtatggtgtgcctgatcgggcccaacggctgcggtaagtcaacgttgctcagggctctcgcaggattgaacaggtccacggcgggtgctgtttccctagacggaaagccgttggcttcctggagtccgaaagcactcgcccggcggctggccttccttccccaatcgccggccgtaccgcagggcgtcaccatacgccaattggtcgcctatggccgctacccgcaccagggcctgctcgcgcggcaatccaaccacgaccgcgaaattgtcgggtgggccatggagtctaccggcatctcgcacttgcaaggccgtgacatcggcacgctctccggaggcgaacggcaacgggcatggatcgcgatgatcctggcccaggagtcgagcatcgtcttgctggacgaacccaccacctacctggacatgggacaccaggcggaattgatggaactgctcgcgcacctgcagaggacgcgccagttgaccgtcgtgatggttctgcacgacctcaaccaggctagccaatacgccgaccggctgctggctctgcgagacggccggatcgtcgccgacggggcaccactcgacatcgtcgactcccggctgagtgagcgactgttcggcctcgtcacccagcggatcgaccgcacgagtgccggaaggctcgtgccgtactgcctgcccgttggtcccgcaaccgcggggcgccccactcacgaagaaatggctgcaacccctacggctgagcagcccgaggttttgtcgtactaa

SEQ ID NO: 325992 - DNA, 1065 bp, Pseudomonas aeruginosa
atgcgtagtccgacgcaccaggtggcgatgcgctcaggaggccgatatgcggcagtgctggcactcttgtgcacggcattggcattactggtgctggcttcactgttctggggcgccgtaccgcttgctgcgggcgatgtcctggacgggcttctctcgcggcatgctccttcgctggaaagcgcgctcgtctggcaactgcggctaccgcggactgtgctggcggtgctggtcggactgcagctcgccaccgccggcctcatcctgcagaccgtcatccgcaacccgctagccgacccaggtgtcgtcggcatatccagtggtgccgggctggccgtcgtcgccttgttgctggtgacggacttagccaaggccgactcgctgatcggcaccaatcatgcgtcgatgatggtctggctgccagtggtcgctctattcggagggttggtcgctgcgggcctcgttctgagcatgtcctggcgttcaaaactctgcccgcttcgcctcacgctcaatggcgtcgccgtgggcgccgtgctcaatgcgctggtgatgtggaccatcgtcgtctggggcggcgcacgcaccgagatcgcgctgatttggctggccggcagtctgtatggtcgcgacttcctgcatgtgcacgttctctggccatggtgcctggtcggcatcgtggccaccttggcgttgttgcggccattgtccctgctgcgcctggacgacggggtctcggcgagcttgggcatacgtggaattcgctggcgcactgcggccatcgtcgtggctgtcgtattggccgccagcgcggtggcggtgacggggcccgtcggcttcgtcggcttggtcaccccgcacctgtcccgcctgatcgccggaccgaatgagcgccgcctcttcgtcgtcaacatgctggtcggcagcctcctgatgctcggtgctgactgcctcgcacgatccctgatcagcccactggaaattcccgccggtgcgctgaccaccctgattggcattccggccttcctcttgctgctgcaccgtcaaaggaggcatcgcgtatga

SEQ ID NO: 325993 - DNA, 1023 bp, Pseudomonas aeruginosa
atggacgagtgcgcaattgatgcgcggtcccgcctctcttctcggttgcggtcgctctggatcgctggcctcagcctgttggccatcggcgcgatagtggtcgggaccttggcactgggtgacttcgggattccgtttggccgggtgttgcaggttctcgtccaagacgacggctccgacgcagccttcgtgatccacgagattcgcctcccccggctgttgaccgcgacactggttggggccgccctgggactggccggagccatcgtgcaggcgatcacccgcaaccccctgggcgagcccgggctgctcggcgtcaccgccggagctgcgtttgccatggccctgtgcatgacctacctcagtctgcccacgtccgccgaactcgctgcgagcaccgtcggtggaatcgccgcggcgacactcacgcttgccatcggtatgggagcccggctggatccgttgtacctgacgctgaccggcatgagcatcaacctgttctttgccgctgccatcatcgtgatgctggtgtccgcgaacgtagaggtcaacggtatctattactggctgaccggcagcctgatcaaccggacctgggagcatgtcgcgatgctctggccatgggtcgtgtcaggtttagtcttgggtcttgcgtgcgctgggcgactggacacgatgatcctcgacgaagatgtgctcactgcgctgggcatgcgcgtgacagcttggcgccttttgttcggcctcgtggtggtgctgctctcagcttcggccgtggctgccgcgggtccaatcaccttcattggcctggtcgcaccacacatcgtccgcttcggtctgggttccaggggtattcgccaccggaccttgctaccgctctcggcattggtgggcgccggcctggtgtgcgctgctgattttgccgccaaatggcaggaggtgccggccggcatcctatgcgtacttctgggtggcccagtgctggtctatctggtcggccggagggagacctccgatgcgtag

SEQ ID NO: 325994 - DNA, 951 bp, Pseudomonas aeruginosa
atgcgtaccgctcgatcactcctgacgctgttctttgccgtggggtccgccgccgcacaggcgcaggactacccacggaccatcgtggatgatcgcaaccaatccgtggtgatcgaacgcgcgccacgaaccgtcgcatcaatttcgaccttcggggctgacgtcatggttgcgctcgaccgacaggtcgcggggctttccacgctcaacaaccagcgctccgccttcttgggagatgccgctgccaaggccgttaacctgggcgaagtgcaccagaccaaccttgaggttctggcgaaactgtcgccggatctgaccatcggcttacgcacgtatacggaacccttcgccaagaagatcgaggagactggggcgttcctggcattcgacctgatcacgttgaatgattctgtgagtgcagtggagcgagccacacgagcgctcggtgcggacagccagggcgcggctatgaaccaggctttcctggacgagctggaggcgaccggcaaacgcgcgccgggaaaggtcagcgcggttttcctctggcattggggcaatgctccctatgcctactacagcaaccacctgacgactcaggtgatggagcgcctgggagcaaccaacgtccagggcgaaccgcccaagggcatggaatctgccgattcgtccgtgataaccatggagaccctgctgcggctgaatccggatgtgatcatctcgttcaagggtgatgccggaccgttcaccaagcacccggcttggaatcgcctcaaggcggtccagtccggccgggcctggcgggtctcagaccagtacatcatgtcgcatggccccatagcgcgacggcaggtgctgcacgaaatggcgcatctgctctacccgggggtgttccccgagcccacgggcattccggctgcggcccgcgccaagcccatggatttcgagcgctga

SEQ ID NO: 325995 - DNA, 1827 bp, Pseudomonas aeruginosa
atgggtaatgacctaagtcgtatgggcgcgctgcggatactgctggagttgtcggtgggccaccgtttggccatggcaggagccttggctttgacccttttggctgtactggcggaactggcgccattcgccatcctgtacttcgctgtcgaggccctactcaggacgcctcaagccttcgcccaggaacttctgactctggctccctggctggtgggtggcatagtgctgaagtacatggcctatggcgtcgcctacctgatcagccatcacgctgcctacgcaatcatggccagtacgcgcagccgcctggcggccaagctcgatgatgcgcccttgcactggatacatgcacaggggtcgggcgcgctgaaacagtccgttatccaggatgtcgagcgcatggaggcattcattgcccatcacaccgtggaggtcgccgccgcggtattggcgccactgtgtgtcacgacagccttgctctgggtggactggcggctggcaatggcggcgctggcagtcggtcccttggccctgctcgcttcaacattcgccatgcgcggagtgggtcaaaaccaagatcggttcaaccgggcaacggccagcctgaacaacgtgaccgttgagtacctgcgcaacatgccggtgctcaaggtgttcagtcgcagtgcctccgggttccggctgctgcgacggcagcttcatgcctactatcgactaactgatcagatcactcgcaacaccgttccagggtgggcgctgttcaccagcgtcctgggtgcccacctgctcctgttgcttccggtcggcgcatggcttcatgcgcgtggggaaatcggtgttgctcaagtggtggtggcagtgctgctgggggctgggatttttcgtcccttgctaaaagtcagtcgcttcatcatggacataccgccgattctcgcaggcctacgcaggatggcaccgatactggcgctcagtcgcaagcgggggcgagcagatctgccggtggctgccaccgtacgggtcgacctcgaccaggtctgctttcgctatggcggacgccacgtgctgaccggggtgagcctgtccctggcgtcgggcaccttcaatgtactcctggggccatcggggtccggtaagtccaccatcgcgcaactgattgcgggcttactggcgccagagtcggggtcggtcacgatcaacgggaagtccatcgccaccctcagcgatgaggagcgtacccgctgcatagctctcgcggcccaggacgtgtttctcttcagcggaacggtgcgcgacaacctggtgctcgcgcgcccgcaggcatccgaggcggagatctgccgggccgtgcgtgtggcgcaggcgcaggcgcttatcgaggggcttcctgccggctacgacaccccgctcaatgaactgggcacccgcttatctggcggcgagcgccagcgcctggcggtcgcacgggcattgcttgccgacgcggcggttctggtgctcgacgaatccgcggcgttcgccgacagcctgacgcaacgcgcgttctttcaggcgctgctcgaggagtacccagagaaaacactgcttgtcgttgcacacaggctgcatggaatcgagcaagccgaccagatactagtgcttgaggaaggtgcattgtccttgtgcggacgccatgaccaactcatgagcgagagcgattactaccggtccatgtggatgcatgaggagttcgccgagcgctggagcttgcgcggcgctgcgccgtcccaagacaggacgcaagagtcggcagcattgccggcgacatctaccgcagggggagattga

SEQ ID NO: 325996 - DNA, 1758 bp, Pseudomonas aeruginosa
atggaggcggtcacctcttggacaagcattcgacgcatcatccagcgcagtggcgcgcctacctccgccctcaccttgggattggcgctgcgcgtgctggaacggtgttccgaagtgctgccctatctgctgtgctggctatggcttggcgccgtcctgccactttctttgccaggttttgcctggacagccacctgggcggccagtccgcaatggctggctctgaccctagcttgcctgttcctcatgcaatgggctttcgccttcggcggccagaaatgttgctttctgaacagttaccagatcatcgaacgctatcgacaggggctgctcgagcgagtccgcaacatgccgatcggcgtgttgagaggacggcaggtggggcacatggccgacctgctcaccgacgacatcaatcgtgtcgaagccatatttgcccatgtcctggcggatttcgtcgccgccgcgggcctggcgctgacgacgatcctgctgctggcagctatcgagtggcggctggccctggcgcttgctgggctcgcgcccctggccatgctcgtcctgattgccagtgggcgactgttcgagcaggcggtccagcgcaaacacgcgcgcttcaaggcgacatccgggatgttggtggagttcatcggcggcctggcgacgttacgcctcttcaatcactcgcgcgcctggtcgcagcagttagaccaggcgttcaccgaactcaaggcgctcagcctggggatcgagaaatggggcggcggtccggtcatgctcttcagactgatcgtcgagtgtggcctcgtcgtcctgttcattgcaggcggctggagcatgttctcccatgaataccccgcgctggtttggctggcgttcattctgctgtcttacaagttcattggtccgctgctggagttggccgaatacttggtgatgctccgccatgcttgccagagcgagatgaagctcgacgagctatggcgcgtcccgctcctgcccgaacccgccctggctaggcggccggatggtctggccgtgcagttcgatcgcgtgtcgttcgcctacggcgatcggctcgtgctacgcgatgtcagcttcgtggtgccgcctggtagcgtcaccgccgtggttggtccttccggcgcaggcaagagcacgctgttgcatctgcttgcgcgctttcatatgcccgacagcggcgcgatacgcattggcggcttggatctgcgtgatatcggctccgaccagttgtatcgcgtcgtcagcatggtcttccagcaggtacaactgttcgacggcagcattatcgacaacgtgcgtgcaggtcgcgagcaggccagcgacgaggaggtgattcaggccgccgaggcggctcattgtgatgagttcatcgccaggcttgctgatggctaccagacaaaggtcggcgaatcggggttcggcctttcgggaggagagcggcagcggctgtcgatcgcccgggcactgctcaaggatgcgccgctgctcctgctggatgaagtaaccgcctcggtagacccacgctcccagcacgccatccagacctctctcggccaattggctgcggggcgcagcgtcatcatggtcgcccacaggctcaacaccatcaggcacgccgaccagatactggttctggatcaaggcgccttggtcgaggctggaacccaccagtccctgcttgcgagaaatggtctgtacgccgcgatgtggagggcgcaaacatccaacggctag

SEQ ID NO: 325997 - DNA, 900 bp, Pseudomonas aeruginosa
atgtgtgaacgtcagatcttgtcacgcgcactttccgccagtgccctggcgggcatgctgcaactcagtttccctgcgggcgccgccgctcctttgaacgatgaagagtcggtagttctggactcaattaccgtgacggcgcgtaagcgcgaggagaatctcaacgatgttcccgggtcggtgcacgtggagactggccgtgacctggagcgaaaacgcatgctcgatggagcggcggcattgcgcgatgtggcaggtgcgagcgtgggcattttcggcgatcgctccaacgctttcgtcgtcctgcgcggcgtggcacccattctcacgccgctcagtcccgacgacagctcagtactgaccttcgtggatggtgcgccgatgccgattggcgcatcgttttccccgtatctggatcttgagcgaatggaggtgatgaaggggccacagagcacgctcttcggtcgcaacacctcgggcggcgcgatcaaccttgtgccggtgaagccaaaccatgaattcgaagcctcggttcggggcgaaggggggaccgatggcatcttccgcactgaagccatcatcaacggctcactcgttccggaaacgctatccgcgcgcctggctctccggcgctcaggcgccgacggctacatcaacaacgtcgccggacgcgacttgggagaggagcggacctgggccgcgcgcggctctgtgctgttcacgccttcctcccgggtgcgatggctcctgagtgctcagggggagagcacggatagcgcgccaacggcctacattgcataccggccgggggagcgaagaccgcggcacagaacaagacgatcgacgacatccggatgtacgcattcagctcgcgtctggagtacgacttcgatgacatga

SEQ ID NO: 325998 - DNA, 903 bp, Pseudomonas aeruginosa
atgagcgacagtgaaaaatcgaatagccgcctgttcgacctcgacctgctccgcgccatcgtcacggtggccgactgcggcagcttcaccactgccgccgcgcgcctgcactcgacccagtcgaccgtcagccagaaggttcgccgcctggaggaaatggccggacaccgcctgctggagcgcggcaaccgcgacgtgttgccgaccgacgccggcgatacgctgctcggctacgcccgtcgcctgctggcgctgaacgacgaactggccgaggcgctgtccggcgccacggtggcgctgacggtgcgcatcggcgtgccggacgacttcgccgccggccgcaccaccgagcgactggcggccttcaaccggcgttatccacaggtcaagctggaagtcaccagcggcatgagccgcgacctcagcgccagctacgaccgcggcgaactggacctggtgctgctcaagcagcgccgcgccagccgcgaggcactggcctgctggccggaaaagacatgctgggtggacagcgccaggaacccctgcatcgacctcgacccactgcccatcgtcaccttcccgccgcgcggggtctaccgcgacgagatgatcgccgccctggaagcggtcggccggcgctggcacatcagcttcaccagttccagcctcagcggcctgcaatcggccatcgccgacggcatgggtataggcctgctgccgttgcgcgcggtgagcgcaggccacgcggtgctgccgaagaacgccgggctgccggcggtggacgtgttcgaagtggcgctgctgcaccggccggcggcggatccgatggtgaaggcgctggcgcgcgtgctgtcgcgggtgctggcggaagatacccggagccggcccgcattcgaaaaatga

SEQ ID NO: 325999 - DNA, 546 bp, Pseudomonas aeruginosa
atgcgcgacgagccgtcccgacccctgacggtgatctaccagtccctgcgcgagcagatcgagcgcggcctgctcgcgcgcggcagcaagctgcccagcgaacggcagttgagcgagctgttctcgaccacccgcatcaccctgcgcgaggcgctcggccagttggaggaccagggcctggagctgccggcgctgtcgcgggtgttccagatccgccgggcgcggcgggtcgacgggcggctggtgctgtacgtcgagcactacctgaatcccgcctactttcccggcatcgagcgcttcgacctgactcgctcgctgaccgatctctacgccaaccactacggcatccgctacggccgggtgcgcttcgagatggtcccgaccatcctcccggcggaggccgccgggccgctgcgggtctcggtgggcagcccggcgctacagatcgtgcgggtcaaccgcgaccaggcgggccgcctgatcgactgcgacctggagtactggcgccacgacgcgctacaggtcaacgtcgaggtgcccgagtag

SEQ ID NO: 326000 - DNA, 1491 bp, Pseudomonas aeruginosa
atgactgatctccgcgatacctcccgcgacgaacgcctgctggcggcccacggctatcgccaggaactggagcgcgggctgagcctgtggtcgtccttttccgtcggcttcgccaccatctcgccggtggtgggcatctactcggtgatgtccctcggcgccatgagcatgggcccctcctgggtctgggtggtgccgctgtgcctgctgctgcagttcggcgtggcgctggtctacgccgagctgtcctcgcagtttccgctggccggcggctgctaccagtgggtgcggcgcctggtgggcgaccgcctggcctggttcaccggcttcctctacctggcttcggcgctggcctcgctgactaccgtggcctacctcggtggcttctggctcggcctgctggcgaccggcgcgccgccgtcggccaacggccaggtgctctgcggcgcgctgctgctggcgctgggactggcggtgaacctgctggggatcaacccgttgaagtacttcgtcaatgccgggatcgtcgccgaggccatcgcctccatcggtatcggcgtgctgttgctgctgttcttccgcaaccatccgctcgatctgctgttcagcggcccgggcggcacaggcgatgcggacggttcctacctggacggcgtgctgaccgcgctggcggtgggcggctgggccttcctcggcttcgacgcctgctcgcagatttccgaggaaaccaccgatgcccgcgtctccactccccgggcgatcctgcgctcgatgctggtggtgggactcaccgtgatgctcaccgccttcgccgtgaccctgtcctaccaggacatcggcgcggtggtcagcggccaggtggtcgacccggtcaccccggcggtggtggacgccttcggcgcctgggccgagcggcccttcgtcgcagtggtgctgatcgccttcgtcgcctgcgtggtgtcggtgcagacctacatcggccgggcgatcttcggcatggcgcgcgacgccatcctgcccggctccgccctgctgcgccgggtcgaccggcgcaaggtgccgatggcggcgatggtctgcagcacgctgctggccagcctaggcctggccctggggctgaacgccacggcggtcggcacgctgatcgcgttcggcagcggcggtttcttcgtggtctttctgatcgtcgccgcctgcgccctctgggcccgcctcgtcggccgctgggacccggacaagggcgccttgcgcctgggacgcgcggggctggcggtgaacgtcctggcagtcgcctggctgtcgttcgaggcgctcaacgtcgcctggccgcgggccagcctcgccccgcccgacgcgccctggttccaggtctgggcggtggtcgtggtgttctccgcgctggccgcgttcggcctgctctacatggtcatcgccaagccgcatcggcgcatcgccaccagcctcagcttcgccgctccgccggcggactga

SEQ ID NO: 326001 - DNA, 570 bp, Pseudomonas aeruginosa
atgcttcgactcaaggcttcccccgcgctgctcttcggcctgctcctggccagtgccgccagcttcgccgcgcaaccacctgcgggcatgctgcagccgctgcgcggcaccatccagcaggccgccgacgaccacctgcaactgaaggcccgcaacggccagcaactgacggtcaggctcaccgacaagaccgcgatccgcgccgtgtcgctggcgaagccggaggacatccagcccgacagcttcatcggtaccgccgccgtgccgcagcccgacggcaccctgaaggccctcgaggtgcatgtcttcgcccccagcctgcgcggcagcggcgaaggccaccggccctgggagaacgccgatggcagcgcctcgaccatgaccaacggtacggtcggcaacctggtggtcagccagggccacgtgcccatcgtcagcctggagccgggcgagcgcagcctgctcaagcctggcgccaaggtcgtgctgttcccgcagaagggcgccgacggcagcctcaccgccctggccatctcggtcggcaaggacggcgtgaccccgccgatgtga

SEQ ID NO: 326002 - DNA, 768 bp, Pseudomonas aeruginosa
atgaaggggccggagaagaagcgcgcgaagatcgcgatcgacccgtccagcgagcgacagatggtcgatttgcaacgccgcctgctgttgcgcggcggcctgtccctgggcgccctggcgatgctctcggggtgccggctacaggatggcgattcggtcgacaaggtactctgggccatgtcgcgctggaacgaccgggtccaggcctggctgttcagccgtacgcggctggcgccgaccttcgatccgtcgcaggtggtctcgccgttccccttcaacgcgttctacccggcctacaacgtgccggagatcgacctgccggaataccgcctgcaggtttccgggcgggtccgcgacaagcgcccctggagcctggagcaactgcgccggctgccgcaggccagccaggtcacgcaactgatctgcatcgagggctggagcgcgatcggccagtggagcggagtgccgctgcgcaccttcctggagctggtcggcgccgacacctcggcgaagtacgtcggcttcaagtgcgccgaccgctactactccagcctcgacatgcccagcgcgctgcatccgcagaccctgctggcgctggagatgtccgggcaggcgctgccggaggagaacggctacccgctgcgcctgcggattcccaccaagctcggcttcaagaacgccaagcacgtggtggagatcttcgtcagcaacagcaatcccggaggttactgggaggaccagggctacaactggttcagcggagtctga

SEQ ID NO: 326003 - DNA, 342 bp, Pseudomonas aeruginosa
atgaaagcttccctgatcctcggcctcgccctcgccaccctgaccgccaacgccgccttcgccgccgacggctccagccgcaccatcgaccggctgcaccaggacatgtccagcgtcgaactgcgcatcgccgacaacggcagcgagcagaccatcgaccgcctgcacaaggacatgaccaaggccgaagcccgcctggccgacaacggcagcgagcagaccgtcgaccgcctgcacaaggacatgaccaaggccgaagcccgtctggccgacaacggcagcgaacagaccgtggaccgcctgcatcgcagcatgagccgtttcgacctgcgcaccgcctga

SEQ ID NO: 326004 - DNA, 2193 bp, Pseudomonas aeruginosa
atgcgccttgccctggaccagcccgacccggacatcgaggcggcccgccagggcatcctcaagggcggcaaccatgccgacgacgttaccgcgatcatctggctgtaccgcaacttccacgacttcagttacttcgagcgcgccatcgagctgtggctggtgggcgacaagtacgtcatggaactgatcgacgtcgccggcaagatgcgcgcgggcatcggcaccgggcaggccagtgccgagcaggtgcaacagtggaagaccgagatccacgcgatcaacgagaaggtcacgccggcggccaaggccttcagcgacgccctcggcgagggctcgcgggccttgctcaggctgctgctggtggccaacctgaccaccgccagcgtgctcatcctcctggcgttcctgcgtacccggcagcaactgatgcagcgccaggaagtggagaacgccctcgatgccgagcgcgaacgggcccagatcactctggcctcgatcggcgacggagtgatcaccgccgacacccaggggggcatttcctacctcaacccggccgccgagcagatgaccaactggacgctggacaaggcccgcggcctgcccctggcgtcgctgttccggatcgtcgacgaaagctcgcgggaggagggcatgctgctgatcgagcagatcctcagcggcgagatcgacggcggccgcgagcattccaagctggtcctgcgccacgacggcagcagcgtgccggtgaccctggtgggcgcgccgatccatcgcggcggcgagatcaccggggtggtcctggtgcttcacgacatgacccgcgagcgccagtacatggcgcgcctgtcctggcaggcgacccacgatgcgttgaccgggctgaccaaccgccgcgagttcgagtatcgcctgcagatagcgctggaacgcctggagcgcaacagcgggcggcacgccctgatgttcctcgacctggaccagttcaagctggtcaacgacacctgcggccacgccgccggcgacgaactgctgcgccaggtctgcaccctgctgcaacaaggcttgcgcgagggcgacacgctggcgcggctgggcggcgacgagttcggcatcctgctggagaactgcccggcggaaaaagccgtggagatcgccgaccatctgcgcaagacggtccaggacctgcacttcacctggagcgggcagccgttcaactgcaccgtcagcgtcggcctggtgcacctgctgccgggtatctcgaccctcgaggaggcactgcgctccgccgacatggcctgctacatggccaaggaaaaggggcgcaatcgggtccaggtgttccatcaggacgacgtcgaactgtcgatgcgcttcggcgagatgacctgggtccagcgcatccacctggcgctggaggaagaccgcttcagtctctatgcccagcccatcgtgccgctgggcgaaggtgcggaggagggcttgcacgtcgaactgctgctgcgcctgcgcgacgagggcgggcgcctggtgccgccgctgagcttcatacccgccgccgagcgctacggcctgatgacgctgatcgatcgctgggtggtggagaatgccttccgcaccctcgtcgagcgcgcccaggaccctcgcgccgagccgatcggcacctgcgccatcaacctctccggcgcgaccatcggcgacgagtcgttcctgcagttcctcaccgagctgttcgcccgttaccgcattccgccgcagacgatctgcttcgaggtcaccgaaaccgtggcggttgccaacctggccagcgccatccgcttcatcaacgagctcaaggacaccggttgtcgtttctccctggacgatttctgcgccggcatgtcgtccttcatctacctcaagcacctgccggtggattacctgaagatcgatggcagcttcgtcaaggacatgctcgaggatcccatcgatcgcgccatggtccaggtgatcaaccatatcggccacgtgatgggcaaacgtaccatcgccgagttcgtcgaaaccgtcgaagtgatggaggcgctgcgcgagatcggcatcgactatgcccagggcctggccatcggcgcgcccctgccgttcagtcgccagcctccgggcgcagggctggatgcccagggcctgtggccgagcctcggacagaacctccggtag

SEQ ID NO: 326005 - DNA, 1785 bp, Pseudomonas aeruginosa
atggcgaggccctctgagcagcagcaggaggccctggccgggttgctcggcctgggcagccactccgcgcgcaagagccactacccggagctgctggcgcgcctggaggagctggaggccgagcgcaaccgctacaaatggctgttcgagcacgcggtgcacggcatcttccaggccagcctcggccaggggctgcgcgccgccaatccggcgctggcgcagatgctcggctacgacgatccgcaacaggtgctctggtcgctggaggacatggccgggcaactgttcgtcggcggcgaggccgagatgcgacggatccgcgcgctgctgcgcgagcgcggcggcctgttcggctacgagacgcgcctctggcgcagggacggcagtcacatcgaggtattgatgaacctgctgctcaggcacgacgaggaagaattggtcgaaggttttgtcgccgacatcaccgagcgggtccaggcccagcagcgcctgcagaccatgaacgaggagctggagcggcgggtagccgagcgcacccacgagctggaagagctcaaccgccagttgcgccaggcgcgcgacgccgccgaagccgccaaccacagcaaggacaagtacctcgccgccgccagccacgacctgctgcaaccgctcaacgcggcgcggctgctggtcgacaccctgcgtgagcggggcctgccggccgccgaactgcaactggtggagcgcacccacctggccctggaaggcgccgagaccttgctcaccgacctgctggaaatcgcccggctcgaccagagcgcgatccgtccggacctggacgactattccctcgacgaactgctcgctccgctggcctcggagttcgaggaagtcgcgcgtgccgccggcctggccctgcgtgcgcggatcccacgactggcagtgcgcaccgacgcgcgcctgctgtcgcggatcctgcgcaacttgctcagcaacgcctgccgctacaccgagcgcggcagcgtgctgctgggcgcgcgccggcgtggcggcaaggtacgcctggaggtatgggacactggccggggcatccccgccgaccagttgcaggcgatcttcctcgagttcaaccaactggacgccgggcgcgcttccgagcgccgtggcgtcgggctcgggttggccatcgtcgaccgtatcgccggcatcctcggctaccgcatcgaggtgcattcgactcccggccgaggctcgctgttcgccatcgaggtgccgctggtccgcaagccagcgcggccagtgcccggcgaggcgactgcgcggctttcggccggcgatccgctgccgggacggcggctgctggtggtggacaacgagaccgagattctcttcagcatgtccgcgctgctcggccagtggggctgcgaggtgcttaccgccaccgacctggaaggcgcgcgcaaggcgctcgatggccgcgcgccggatgcgatcctggtcgactaccacctggaccacggcgctaccggttgccagttgctgggcgccttgcgcgaggactacggcgcggagatcgccgcggtgatgatcaccgccgaccgcagcgacgattgccgccgcgcgctggcccgcctgggcgtgccgctgctcaacaagccgctgaagcccggcaagttgcgcgcggcgctaagcgccttgctcggcgaggcccagggcgctccccgcggcgccggagaaggtgcaggtcctagcccggccggcggctgcgtcggtgcagcgcaatggccagggccagcccgctga

SEQ ID NO: 326006 - DNA, 1209 bp, Pseudomonas aeruginosa
atgtccgtcgatatccgccccaccccgccggcgcaggacagcgcccggcagaacgtcaccctgcagatcgtctcggtggtgatgttcaccttcatcggctacctgaccatcggcatcccgctggcggtgctgcccggctacgtgcacgacgacctcggctacggctcggtgctggccggcctggtgatcagcctgcagtacctcgccaccctgctcgcccggccctacgccgggcgcgtcatcgacgggctcgggccgaagcgcgcggtgctctacggcatggccggcagcgccgcgagcgggctgttcatgctgctctcggtggcgatccagggctggccggcgctgagcctggccagcctgctggtcggccgcctggtactcggcgcggcggaaagcctggtcggctcggcggcgatcggctggggcatcggccgggtcggcgcgccgcacaccgccaaggtgatttcctggaacggcatcgccagctacggcgccatcgccctcggggcgccgctaggggtgctgctggtgcagtggctggggctgtggagcatgggcgcgtccatcgtcctgctcggggcgctcggcttcgccctggcctggccgaagttgccggcgccgctggtgcacggcgagcgactgccgttccaccatgtgctcggccgggtcaccccgcacggtatgggcctggcgctgggggcgatcggcttcggcaccatcgccaccttcatcaccctttactacgccagccgtggctgggccaacgcagtgctctgcctgagtgccttcggcggttgcttcatcggcgcccggctgttgttcgccaatagcatcaaccggctcggcggcttccgcgtggcgatcatctgcctcggcgtcgaaagcctcggcctgctgttgctgtggagcgcgccgaatccctgggtcggcctggccggcgcggccctcaccggcttcggcttctccctggtgttcccggcgttcggcgtggaagcggtgaacctggtaccggcttccaaccgtggcgcggcgctgggcgcctactcgctgttcgtcgacctgtcgctgggcatcaccgggccgctggtgggcttcgtcgccaacctgttcggcttccgctcgatgttcctcttcgcctgcctggcctcgctcagcgggctggccctggccattgcgctgcaccgacgcagccgccggccgggctag

SEQ ID NO: 326007 - DNA, 891 bp, Pseudomonas aeruginosa
gtgctggcgctggtcacctgcctgtccttcgccgtgagcctgggcatccagtggtacaacgacatcggcgagatccgccagcgtttctccgagcacctgcaactgatggcgccgcactggttcaccggcctggtgttctacgcggcggccaacctgctggtgctgcatgcctaccgcgagaagcggcagctcgtcgagttccgcccgctggcgctgctgctgatcggctacggcctactcaacctggtctgcggcatgctcgccgggatcggcctggcaccgctgacgctgccgttctaccagtgggtgacggcgcaatccagctacggcgtctggctgatggcgttcaacgaagcgatgagctgggtctacctgctcctgggcagcctgctgccgttggggctggtgctgctcggcagccgggtgaactcgccgcgcctggccgaaggggaagaagcccgcgtcgctgcctggcaggtcgccctgggcgccgcgctgtgtttcgccacgctgtgcttcaagctgatgcagttccttccctacgccctgctgcgctacgacgagccttggctatacggcctgtacctgagcggcgtggcgttgcccgcggcgctgctcttcggtgccgtctgcacgcgcctgccggcgcgcctgcagcgcttcgccgccggccgcgcgctgctgctcgcggtggtcgccatgctgctctggagcgtggcgctgctggcggtcggcggggggctggcgctgctgatgatcctcggcctggcgcccgctggcatcggctatacgctgctggtggcgctgctcggcgtcggcctgttggcgctgctctggccgatcggccggctggccacgcgctggtgctacgccgaccagctcgccgcctga

SEQ ID NO: 326008 - DNA, 549 bp, Pseudomonas aeruginosa
atggatcggaaaaccctcgacgacaccagcaagttcctcagctatgtccttcgccaccagcccgaggccatcggcctgaagctggacggcgaaggctgggccgacatcgacgccctgatcgccggcgcggcgcgggacggccgcgccctcgaccgcgcgctgctcggcgcggtggtcgagaacaacgacaagaagcgcttcgccctctccgccgatggccagcgcatccgcgccgtgcaaggccactcgcatgccgcggtggccatcgcctacgcccccgcggtcccgcccgcagtgctctaccacggcaccgccagccgcttcctcgactccatccgcgagcgcggcctggtccccggcagccgccaccacgtccatctctccgcccgccgcgccaccgccttggaagtcggccgccgctacggcagcccggttctgctggaaatcgacgcgcgcgacatgcatctggccgggcacctattccaccaggcggagaacggcgtctggctgaccgagcgggtacccgtgcggttcatccgcgaggcttga

SEQ ID NO: 326009 - DNA, 1833 bp, Pseudomonas aeruginosa
atgtgcggtctcgcgggttgggtggattacacgcgcaagctcgacgacgaatttccggcgatcttcgccatgaccgatacgctcgccttgcgcgggccggatgccgagggcatctggaagcaccgcaacgccctgctgggtcaccggcggctggcggtcatcgacctcagcggcggcgtgcagccgatgtcctatcgctttcccaccggccaggaggtcaccctcgtctataccggcgaggtgtacaaccacgatgccctgcgcgagcggttgcgccgggccggacatgagttccgcacccgcagcgataccgaggtggtcctgcacgcctatctgcaatggggcgagcgttgttgcgagtacctgaccgggatgttcgccttcgccgtcttcgatggccgcgacggccacctgctgctggtgcgcgaccgcttgggcatcaagccgctgtattacgcgcggcaccgcgagggactgctgttcggctcggagatcaagtccatcctggcgcatccggaattcgccgccaggctcgacgcggtcggcctggtcgacctcctgacgctgtcccggggcacttcgcagacgccattccgcgaggtccaggaattgctgcccggccacctgctgtcctggcgtcccaattcccaggcgaagttgcgccgctattgggaggtgcgccgccaggagcatgccgacgacctgcagagcaccgtgcagcgcacccgcgaactggtcacccgcgccctggggtcgcaattgcacgccgacgttccggtgtgttcgctgctatcgggcgggctcgattcgaccgccctgaccggcatcgcccagcgcatcgcgaaggcggagcacggcggcgacatcaattcgttctcggtggacttcgtcggccaggccgagcagttccgcagcgacgacctgcgtcccgaccaggaccagccgttcgccctgctggccgcgcagtacatcggcagccgtcaccgcaccgtgctcatcgacaatgccgaactggtctgcgagcgagcgcgcgaagaggtattccgggccaaggacgtacctttcaccttcggcgacatggatacctcgctgcacctgatgttcggcgagatccgccggcattccacggtggccatctccggcgaaggcgccgacgagctgttcggtggctacggctggttccgcgatccgcaggcggtggctgcggcgcgcttcccctgggcctccagggtgcgcctgccagccggcttcatcgacgccggtttcaaccgccgctgcgatctcctccagtaccagcaggccagctacgacgatgggctgcgccaggtcgaacacctggccggcgacagcccggaggagcggcggatgcgcgagttcagccacctgcatctgaagcgctggatggtgctgctgctcgaacgcaaggatcgcctgagcatgtgcaacggcctggaggtgcgggtgccctacaccgaccatgagctggtggagtacgtctacaacgtgccctggtcgatcaagagccgggacggcgaggagaagtggctgctcaagcgggcctgcgccgactatgtcccggaagccgtgctcaagcgccgcaagagcccttatccgacttctgccaacctcggctacgagcgtttcctgcgcgggagcgtgcggcgtctgctggaggacgcggcgaacccggtgttcggcatcgtttcgcgagagttcctggccgccgaactggagcatccggaggggtacttcaacacccaggtgagccgccacaacctggagaccgcgctggcgctggaaggctggctcaggttgtacgggctctccgcctga

SEQ ID NO: 326010 - DNA, 1023 bp, Pseudomonas aeruginosa
ttgcagttcggctacagcaacacttggcgccagctcagctacaacctcgcctattcgcgccagcagaccacctggtaccgcgatctgaacgacgactacgacccgtcactgccgccgcaatacaacctgcggcacggcagcgaacgtagcaacaccttaaccctgacactttccatgccgctggggtcctccagccaggccccgaatctcagcgcgatggcctcccggcgttccggcgacagccgcggcagcagctaccagacgggcctcaacggcaccctcgacgaagaccgcagcctgagctacgcgattgccgccgggcgcgacagcgacaaccacggcagcgatttcaacggcagtctgcagaaacagacctcggtggcgacgctgaacgccggctatgccgagaacagcagctaccggcagctcaacaccggcctgcgcggcgccgccgtgctgcatcgcggcggcctgaccctcggcccctacgtcggcgacactttcgccctggtcgaggccaagggcgccagcggagctggcgtacgcggtggtcagggcgcgcgcgtcaacggcaatggctacgccgtggtgccatcactctcgccctaccgctacaacccggtcagcctcgatccgcagggcatgggcgaagaggccgagctgctggagaccgagcgcaagatcgcgccatacgccggcgccgccgtgcatgtgaagttccgcacactgaccggtcacccattgctaatccaggcccaactcgccgacggcagcgcgctaccgctaggggccaatgtgctcgacagccagggtgtgaacatcggcatggtcggtcaaggcggccaggtctatgcccgcgccgagggcgacaagggccgcctgcgcgtgcaatggagcgaacgcccaggggacgcctgtctgctggattacgacctcgacactggccctcgccaggctatcgaacccggacaggcggtgatccgcctgcagggcacctgcacgcccgtctcggaggcaccatga

SEQ ID NO: 326011 - DNA, 1347 bp, Pseudomonas aeruginosa
atgaaaacatccctgcgcgtcctgcctctgctcctcgcgctgctcgcctcgtctagctgggcgacctgctacaaggtcacggcggtaggcaacgccacgactacctccaacacccagatacgtcccggtgaaggctctgccggcacctgggccggagcctgcgatacctgcaacggttccctcggtctaccgagcgtgatcaacgtcagcgacgccagcttccagcccgacggtagcttgatcgccagctcggtggcgccgctcagccaatacggcgacagcgccggctacgacccagagcgcgtgttcttccgctgtgctccagaggacgatgtgtacgagatgttctccaccaatgccgacgatctctacagcggctggtacctaggaggcgacagtgcgggcaactcgattggcctgcagtccgcctatcgcaccgcctggcccaacgtgctgctgcgcctaacccacgtggaaaccgggcagtatttcaccgatgtctggcgcgagcgtctgctcggcgggctcgatatcgactcgcgaggctttcaactggtcaaggcgaagaacctcagcgcggtacgcgccgaactgttccgcgctccgctggagttcatccgctactactcgccgactaccgcctcgcggttgtacgcctacacccagcccgctggctacatcgccatcaagggtcccggcctggcctaccccaacgtcggcgccagccataacgccaactacctcggctggcactacaactggccgggcgccatcggcctgtacaacgacgtgacgctcaagcgctatcccacctgttccgtaaccaacgtcacgccccacgttgtgttcccgtcgatttccctcagtgagattaatgccggcgcgaaccgtgagatgcccttcgaggtggccttcaagtgccaaacgggagtgatcaacagcaccgcctccagcggtactgcactgggtatcagggcttcagccggggcgcaggccgcgtccgctgcactgggcctgaggaacgccaatggcgggctctcctacctagtttccgaccgctacggccagcctggtatggcccaaggcgtgggtatccgcttgctgcgcgacggcagtgcgatgaacctgctggtaagcgaggattccgcgatgggcagcaatgccgaaacacggggctggtatccagtgatcggcaacgcctcgaacaagactggcgaagcgggaggcatcagccagtacagcgagaccttccgtgcgcgcctggaaaaactcaccgttggcagcatgcccagcgttaccccgggacgggtggaggccagcgcgcaggtagtgattcgtgtccagtaa

SEQ ID NO: 326012 - DNA, 717 bp, Pseudomonas aeruginosa
gtgtccagtaagatcctgctgcaaggggcactgctcggcctagcaatgctggccgtgctggacgcccgagccggagtcaccgccgagcgcactcgggcaataatcgccgaggggcaccgcgagacgtcgctgctgctggtcaaccagaatgcctatccggtcatagtgcagacctggatcgacgatggcgccccgaactcgacaccgcagtctgcccgcgcgccgatcatgccgctaccgccggtgttccgcctcgaacccggacagcaacgcagcctgcgcctgctgcggaccggccaggcgctgccaggggaccgcgaatcgctgtactggttgaacctctacgaaatcccgccgcaagccaccgggctgctggccgaaggacagtcacggctgaccgttacactgcgcacccagatgaaagtcatctaccgccctcgccctctggccagaggggcggaagaagcgccacaccagctcaggttcgagcggcggggcgaaacactacagatggagaaccctactccctatttcatcagcctcgccggcgccgagcttggcggccacacccgcctggcggcggccgaactgttgccccccttctccaggcgcgtcctggcgctccgccaggcgctgcccggcggccaggccgaggtgcgcttcagctcgatcgatgacggcggcaatctccagcagggacggagcctgcttcactga

SEQ ID NO: 326013 - DNA, 651 bp, Pseudomonas aeruginosa
atgagtaagctcaagatagtactggccgatgaccatccgatcgtgcgtatgggcgtatgcgacatgctcgagcgcgacggtcggttcgaggtggtgggcgaggcctccacgcccagcgaactggtcgaggtgtgccggcagagcgagccgcatatcgccattaccgactacagcatgcccggggacgagcgctacggcgatggactgaaactgatcgactacctgttgcgcaactttcctcgtactaaggtgctcatcttcaccatggtcggcaaccgcctgatcctcgacagcctctacgatcacggggtgtccggcgtggtgctgaagagcggcgaactcgacgagctgctcttggcgctcgacgtggtgaagcagaaccgcgtctaccggggcgcgaacatgctcgacccgaccagtgttctggcgaaccgcgacgaagtggaaagccgcttcgcgcgcttgtcgatgaaggagttcgaagtactccgtcacttcgtttccggcagcaacgtctgcgatatcgcacggctgctgaaacgtagcgtcaagaccgtaagcacgcagaaggtctcggcgatgcgcaagctggaagtgaacagcgaccaggccttgatgaccttctgcgtgcatgccaacttgttccattga

SEQ ID NO: 326014 - DNA, 3255 bp, Pseudomonas aeruginosa
gtgaagtctgctagtgccttggagcacgacaacaaacttttgctcaaatggacaaccctctcgcagagcctgagcatcggcttgatctgtgtggtggtgctgaccgtattgctgttcagcatctgttactggtcgctggggagattgtttcaggaggaggaggacaaagtctccttccacttcacccgtatgatggatgttatacgggagcatgaggtatttcttgggcgcatcgctcgaaaaagcgacaagaccacccagaagtacgactatgacgtggtgcctttgcagcggcacttgttggcaaaggaaaacggattagcggtctatgagggacgggagttttcctttgctatgccatttctactggctaccaagcacgcgttgagcgccgattcctcgggagatccgttttcgctcggtgtattgctcgccaatttctacggaagcttctggagtgtttccgcctatcccgcgccacagttactgatctttgatctttccggcagcacccgcctggcagtgccgtcgattccctccacagcgcagcgtgacaggttgagcggaagctatccgatgatagtcgagcgcattctggcgcgcttgcgcacccggccggtgggggaggacgctcagcgtgtccattggatacgcgctgatcgctatcgcgactcggcgctggagatgttgggagtcgcccgggttgatctgccggaaacactctggtggcacgacgagccgaaccatctgatcatcgctgcgagcctgcttgatctcaggcgaatcaatgacttcgaacagttggttgagcgcccggcattcgattcgtacagcctggtatcgccggatggcgaggtattgctcggcgcggcccctgcgaccggcctgagggatggcctgaacctcacccgacagggggtcgccgttcaactgcgcagccagcctgagaacggctggctcgcggtctaccgaaccgactacggcaatttctttcgccactcccggtggctggtggcaggtctgctgctgaccccggcgctgctcctggccggttggctcgggatgcgttggtacaccagcagcgtcgtcaacccggtgcatcgggcgcaccggcaactggtggagagcgacaccttcagccggacgctgatacagaccgcgccggtggctctggtggtgctgacccaggatgaccagcaactggtgacctgcaaccacttggccgcccagtggctgggcgggcccacggagatccttgggctgacttccaactggaagcttttcgatgcgcgtgggcaggtaccaggagacatctgtatccaggtcggtgggcgctatttgcagaccgccttcgcggcgacccgctatgccggcaccgaggcggtactgtgcgtattcaacgacatcacggtccactgcgaggcggagaccgcgctgtccaatgcgaagcgagcagcggatgccgccagccaggccaagaccctgttcctggcccgcatgagccatgaaatccgtactcccctgtacggtgtccttggcaccctggagttgctcgacctgaccaccctgaacgagcggcaacgcgcctacctacgcaccatccagagttcgtctgcgacgctcatgcaactgattagcgatgtgctggatgtctcgaagatcgaagcggggcagatggctctgaccctggccgccttcaatccgctggacctagtgcgggaagtgcttggcaactttgccgccagcgccatggccaaggacctgcagttctatgcctgcatcgacaccgaagtgccggcgcaactgatcggtgacgtgacgcggattcgccaggtgctcaataacttggtgaataacgcgctgaagttcaccgatatcggacgggtggtcctgcgcgtgaagttgctctcccgcaatgatggtcgagccctgttgcagtggcaggtcgccgacaccggtatcggtatcgcacacgaacagcaggagcgcttgttcgaggcgttctaccaggtttcgggagcgcaccatgccggcggcacggggctaggactgtcgatctgctggcatctggcggaaatgatgggcggtcacctgcgaatggtcagcgagacagggctcggcagcagcttcagcctggtgctcgagttgcccgaggacgaacagtccgggctggcttgccggccggggctcttgaaatccgcttgcgtccatgtgcgctcgcccgtgcgggagctagccgacagcgtaggggcgtggctgaaagcctggggctgcaaggtcagcagcggcgaggcggcgccctccgagctggagacttgtgtgcttctggagctgctgccgatggcggccgggcctgcttcttcgccctggccaggcccccgggtgcgcgcgtccatggatgcgccttgccagccggagctgcgtgaggacggctggcgtgtcggcctgcacaacctggcgggaatcggccaggccctggcgcaggctctgggtggcgatatccccgagcaaacgccggcaaatgcctgcgcccgctcggggagactcgacctggaagtgctggtcgccgaggacaacccagtcaaccaggcgctgcttcgcgagcaactggaagagctgggttgtcgcgtgagccttgccggcgatgggcggcaggccctgcagctgttcgacagtggtcgcttcgacctcctgctcagcgacgtcaacatgccgaacatgaccggctacgaactgacccaggcgctgcgcgaacgaggcgagacgctgccgatcatcggcgtgaccgccaacgccctgcgagaagagggcgagcgctgccgggcagtgggaatgaacagttggctggtgaagccgatcactctgcataccttgcatgaactgctcagtgagttcgctcgcgcaggtgtcgtgcttcccgcgcaagcgcgagacctcggcccgcccgcgcagctcgacgacggtctctcaccgcaggtgccggaacgcatgcgcgcgcttttccttgagaccatgggcaaggacctggaggccgcccggcaagcgattcgccgcaacgacccgaaggggctgcagcaggacctgcatcgcatggccggctccctggcggtgatgcgtgcgcgaacgctggtggtgatgtgtcagggcgccgaggaaggcctgctggagtcgcgccttgaatgttccgccgtggagattggcgaggtgctcgttcatatcgagcaggcgctggagtttgtgagaaagacgggctga

SEQ ID NO: 326015 - DNA, 1200 bp, Pseudomonas aeruginosa
atgagctggaaatcctatcgggtgctggtggtcgaagatcagccgtttcagcgcgaatacctgctcaacctgtttcgcgagcgcggcgtgcagtacctggtaggtgccggcgacggcgcggaggcgttgcgctgcctgaagcaggacaggttcgacctgatcctcagcgatctgatgatgccgggcatggatggtatccaaatgatcctgcaactgccgtatctcaagcatcgtccgaagctggcgctgatgagctcctcgtcgcagcggatgatgctcagtgccagccgggtcgcccagagtctcggcttgtcggtaatcgacctgttgcccaagccgactctgcccaaggccatcggccaacttctggaacacctggaaagatgcctcaggcagaagctggagccggaaaccgacgagactccgcatgggcgcacggcgttgctggatgccctgcataacgagcaactggtgacctggttccaggctaagaaatccctccacaccgggcgcatagtcggcgccgaggcgttgatacgctggagccacccgcagcatggcctgttgctgcccagctgtttcatgagtgatgtcgacgctaccggtctgcacgaggcgttgctctggcgcgtgctcgaacagaccctgaacgcccaggaatcgtggcgcagggcgggttacgagattccggtttcggtgaatctgccgccgcacctgctcgataaccaggaacttccggatcgactctatgagtacgtcggcgctcgcggggcttgtaccagctcactatgtttcgagttgaccgagagcagtgtcacaactctgtcaagtaactactatgcaggtgcctgtcgcttgcgcatgaaagggttcggattggcccaggacgactttggccagggttacagctcgttctataacctggtcacgacgcctttcacggagctgaagatcgaccgctccctagtccagggatgcgtagaggataacggcctcaatgcagctgtcatcagttgtattgagttgggtcaccgcctgaatctcgacgtggtggccgaaggcgtggagacctgcgaggaactgaatcttcttcgtcgtcttggctgcgaccgggcgcagggtttcctgatttctaaggcagtgtctgctcgtgagttcgagcggcagttaagggaggacggccccagcctccttgtttaa

SEQ ID NO: 326016 - DNA, 1062 bp, Pseudomonas aeruginosa
  misc_feature (18)..(27): n is a, c, g, or t
atggatatgtcaacgtcnnnnnnnnnnggctatgtcaacgtccacctgaaggccagcgtggtcgatgccgaatgtgtgatgctgacctggcaggtcaacgataccggcatggggatcaacgtcgaggatcagccgcgtctgttcgaaccgttctaccagatacgccgctccgagcatccggtcgcaggcacgggcctcggcttgtcgatcagccagcgcctggcgcagctaatgaatggcagtctgaaactggtcagtgagctggggttgggcagcagctttagcctcaggcttccgcttgagcggatcgcgatgcaggctgagccgcaggacctagccgggtgcgccgtccaagtgctggcgcctgtccgcgacctaacggaatgcctgtgtggctggatctcccgctggggtggaagggccatggtcgcgacgccgaggtcgctggacgaggcggacgcgacctcgctgctggtcgaagtgttactgctggagggggcgccgatgttcgaagcatggccaggatgccgggtggagctttcccctcagggtgatatggagccgcaggcacagggccgcgactggctgctcgggctcaacaacctggacggcctgcatcgtgctctgggcctggcccatgggcgtctcgctgatccttcgacgccgccgatacggctggctccgttgcgcaatctaggtctccgcgtcctagtggtggaggataacgcgatcaaccagttgatcttgagggaccagatggaagcgctgggctgcagcgtggagctgctcttcgatggtcgcgaggcgttgctgcactgccagacggcctgcttcgacgtggtgctcaccgatatcaacatgccgaacatgaacggatacgagctaaccgcggagctacggcgccaagggttccggcagccgatcatcggcgcgacggcgaacgccatgcgtgaggagcgcgagcgctgcatgtccgccgggatgaacgattgcctggtcaaaccggtggatctgaatgcccttcagaactgcttgattaatattctcaaggtggatcgatga

SEQ ID NO: 326017 - DNA, 195 bp, Pseudomonas aeruginosa
atgctgcggcagtgggccagcaccgatgaaaccgaagccgtctccacgcaaaagcgtccgcgacgcaccgctccccagcgcctctgcgtccgtagcgagtacgacctgcccatgctgatccagcagcatgtagtttccggcatcattccggcgcaacatcgaatcgaggtcttcgccgagaatctccaggcctag

SEQ ID NO: 326018 - DNA, 972 bp, Pseudomonas aeruginosa
gtgcaacacctcgatctacaggtggtccgccaggcgctgaagtggtccgtgggcggcgaacgggtgtggttctgtaccgtgctcacgacctacggctcggcgccccgtgcgccgggatcgctgctggcggtgaacgccaacggccactggatcggctcgctgtccggcggctgcgtcgaggatgatttcctcgaacgggtcgccgcaggcggtttccccgatcccgcggtgatcgtgcgctacggcgagggtgacgacccgaactcgaacgtgcgcctgccctgcggcggcatcctcgacgtactggtggaaaacctggcgccggactgcgacgtccaggcccatctgcgcgagctggagtcggcgttgcttggccagcgccgcctgctccgcgaggtcgagctgggcagcggcgcgcgcagcctgcgcgacgattccagccacggcccacgggcggaacgcgacggcgagcgcgtgcgcctgcgcgtcggtgccgcccagcgcctgttgctggccggctattccagcgtcgcccatgcctgcgccgagttcggcaagggcctgggcttcgaggtgatcctctgcgacccgcgcgaagaagccttgcgcggcgtgctgctggaggggatcgagatccgtcgcgagctgccctcgctgttcatcgccgacggcggttgccacgccgatacggcggtggtggcgttgacccacgatccgaagatcgacgacctggcgatgctcgaggcggtgcgtaccgaagctttctatatcggcgtgatggggtcgcgggcgacctcggagaaacgcttcgagcgcctgcggcgcatcggcggcctgggcgacgccgaactggcgcggatccacgcgccgatcggcctcaacctggggagcaagacgccggcggaaatcgccctggcggtgctggcggacattcttcgcatccgcaacggcattccccgcgagcggctctga

SEQ ID NO: 326019 - DNA, 975 bp, Pseudomonas aeruginosa
atgggacagttgatcgatggccgctggcacgaccagtggtatgacacacagaaagacggccgcttccagcgcgaaaacgcccagcgccgccattggctgggcgagccggcgttccccgccgagggcgggcgctaccatctctatgtctcgctggcctgcccctgggcccatcggaccctgatcgtgcgcaagctgaaggggctggagtcgctggtcgatgtttcggtggtcagttggctgatgcgcgagaacggctggaccttcgaccccgcccacggctccaccggcgatcgcctcgacggcctggcctttctgcaccagcgctatacccgcgacgacccgcactacagcggccgggtcacggtgccgctgctgtgggacaagcaggcgcagaagatcgtcaacaacgaatcagccgatatcgtccgcatcttcaacagcgccttcgacgccatcggcgccaacgcgctggacttctacccggagccgctgcgcgaggagatcgaccgcctcaacggacgcatctatcctgcggtcaacaacggcgtgtaccgtgctggcttcgccactcgccaggacgcctacgaggaggccttcgtccagttgttcgaggagctggactacctggaaggcttgctcggcgaacgccgctacctggccggcgaatacctgaccgaggccgatatccgcctgttcaccaccctggtgcgcttcgatgcggtgtaccacggacacttcaagtgcaacctgcggcgcatcgaagactacccgaatctctccggctggctgcgcgaactgtaccaacgcccgggcatcggcgagacagtggacttcgaacatatcaaggggcactactacgccagccaccgcaccatcaacccgaccgggatagtaccgctgggcccgcgtctcgacctggcgcgcgcgccaggccgggaacgacttcccggcaagggcatctggggagaaggctga

SEQ ID NO: 326020 - DNA, 1281 bp, Pseudomonas aeruginosa
atgataggcatcgtgcgccgccagggccgccagcgctcggctcaccggatggctgctggcggcgccgaggctggcggccaggcgcagcaccgacgcctcctcggcggcatcggccaggcgcagcgcctgcagacgcaggctgccgtgggtcagggtgccggtcttgtcgaccaccagcgaagtcaggtccgccagctcctcgaggaaggccgagctgcggatcaggatgccatgacgggcggccacgtgctgccggcgctggaccggctggtgggcggacagcaccagggcgcagggacaggcggcgaccagcacggcgagcatggcctgggcatcgttggtgacgaaccaggtgacggcggcgatcagcaacaccagcaacatgtactgcccggcgtagcgctccagcaggcgggtgatcggcggcttggcgcgctcggcctgctgcatcaggccgatcaccttgcccagggtcgaggcctcgccggtacgggttatctcgatgcgcagcaggccgtcgaggttgatcgcgccgccgtagacctccatccccggcgccacctcgagcggcaccgactcgccggtgatcggcgcggtgtcgagactggcctggccttgcaggacccgcccgtcggccggaacccggtcgccggcgcgcacttccacctggtcgcccgcccgcaggctggcgttgtccacctcgctcaggctgccgtcggcctcgatccgccgggcatggctgcgggtcagttcgccgagggcggcgatggcctcctgggagccgatcacgctgcgctcctccagcacgtggccgaagatcatgatgatcggcagcagcgcggcggtcagcaggtcgccgctggcccaggcgccgagcatggccagcgcgatcaactggtcggtgacgccgtgcaggctcggatgccgcaggctgtcccaggccgagcgggccaccggcagcgccaccagcagcgacgcgacaccgagcaggatctggctgaccccggcctggtccgccgccagccagcgccaggccaggccgagcagcaacaggccaagggcgagcatcgccaggctcagctggcgggcggcgcggcgctgctcgtcgcggctgagcaggccgccgccgaacggcaggtgatgatggtgatgcgcgcagccgccatggctgccgtgggcggtcggctcgctcatgcgcacctcccggggcgagccgcggcggctattgcgggaagcgcgcgtccggccggcgtacgtagtccagggcttccttctcggtga

SEQ ID NO: 326021 - DNA, 1041 bp, Pseudomonas aeruginosa
atgagcgacgaagcgcacgaggggctgcgcagcccctggctgcaggccggacgcctggcgttcctcgcactgttcggcgtgaccctcctggcggcgctggcctgggtgttttccaacgtccgccagatcggcccggagaaccgcgccgtagtgctgcgcctgggcgcgctggagcgcctggccggtcccggcctgctgctggcctggccgcagccgctggagcaggtggtgctgctgccgtccgccgaacaggtgatcgaacgccgcgtcgagggcctgctgcgctccgagcaggcgcgtcgcgccgacctcgacgtcagcctgtccagcgacgcgctggccggctccggctacctgctgaccggcgacgccggggtggtgcaactggacgtgcgggtgttctacaaggtcgacgacccgtacgactacgtcctccagggcgcccacgtgctgccggcgctggaccggctggtggcgcgcaacgccgtgcaggtctgcgccgcgcgcgacctggacaccatcctggtggcgcgcccggagttgctcggcaacgacagcgcggtcgccgagcgccgcgaacgcctgcgcggcgacctggtgcagggcatcaaccacagcctggcggcgctggccgcggccggcagcgggctgggcatccaggtggtgcgggtcgacgtgcagtcgagcctgccgcgcaatgcggtaagcgctttcaacgcggtgctgaccgccagccaactggccgagcagaacgtcgccaaggcgcgcaccgaggcggagaaactcactcaggcggccaccgagggggccgaccgcaccctgcaggtcgcccgcgccgaggccggcgaacggctggcccaggcgcgccgcgacaccgccagcatcgttggcctggccccggcgctgggcgcgaccgatcccggcctgctctggcgcctgtaccgcgaacgggtgccggcgatcctcggcaaggccggttcggtcggcagcgtcgatccgcgcgacgacggccgcctgattctgcaaggcgggcagccatga

SEQ ID NO: 326022 - DNA, 228 bp, Pseudomonas aeruginosa
gtgaacaagaacgccgtgccgaacgatccacagagcccgttcgtcacctccggcatccgcatcggcaccccagcggtgaccactcgcggtttccgcgagggcgagtgccgcgaactggctggctggatctgcgacatcctcgacgatatcgacaatcccgaggtcggcgaacgggtcaggggccaggtcggcgaattctgccggcacttcccggtctacgctgattga

SEQ ID NO: 326023 - DNA, 486 bp, Pseudomonas aeruginosa
atgcagatcgcggccaacaaggcggtttccatcgactataccctgaccaacgacgccggggatgtcatcgacagttccgctggtggcgcgccgctggtctacctgcacggtgccggcaacatcatcgtcggcctggagaaggccctggaaggcaagaacgtcggtgacgaactgagcgtcgccatcgagccggaagacgcctatggcgaatacagcgccgaactggtcgcgaccctgacccgcgagatgttcgaaggcgtcgacgaactggaagtcggcatgcagttccacgcctcggctccggacggcggcatgcagatcgtcaccatccgcgacatcgacggcgacgacgtgaccgtcgatggcaaccatccgctggccggccagcgcctgaacttcaaggtcaaggtagtcgacgtgcgcgaggccaacgccgaggaaatcgcccatggtcacatccatggcgaaggcggtcaccaccactga

SEQ ID NO: 326024 - DNA, 2193 bp, Pseudomonas aeruginosa
atgaccgaaaactggaaattccgccgtcgaacctttctcaagcacggcgcccaggccgctaccctggccggcctttccgggctgttcccggagacgctccggcgcgccctggccatcgagccggacatccgcaccggaaccatccaggacgtccagcacgtggtcatcctgatgcaggagaaccgcagcttcgatcactacttcggccacctcaacggcgtccgcggcttcaacgatcctcgcgcgctcaagcgccaggacggcaagccggtctggtaccagaactacaagtacgagttctccccctatcactgggataccaaagtcaccagcgcccagtgggtgagttcgcagaaccatgaatggtcggccttccacgcgatctggaaccagggccgcaacgacaagtggatggcggtgcagtaccccgaagccatgggctacttcaagcgcggcgacattccctactactacgccctggccgacgccttcaccctgtgcgaggcctaccaccagtcgatgatgggcccgaccaatccgaaccgcctctaccacatgagcggacgcgccgcccccagcggcgacggcaaggacgtacacatcggcaacgacatgggcgacggcaccatcggcgccagcggcacggtggactggaccacctatcccgagcggctaagcgccgctggcgtggactggcgggtctaccaggaaggcggctaccgctcctcgtcactctggtacctgtacgtcgacgcctactggaaataccggctccaggagcagaacaactacgactgcaacgccctcgcctggttcaggaacttcaagaacgctccgcgcgattcggacctctggcagcgcgccatgctcgcccgcggcgtcgaccagttgcgcaaggatgtgcaagaaaacacgctgccgcaggtgtcctggatcgtcgcgccctactgctactgcgagcatccctggtggggcccctcgttcggcgagtactacgtgacccgggtgctcgacgcgctgaccagcaaccccgaggtctgggccaggaccgtgttcatcctcaactacgacgagggcgacggcttctatgaccacgccagcgccccggtgccgccgtggaaggatggcgtcggcctttccacggtcagcaccgccggcgagatcgaggcatccagcgggctgcccatcgggctcggccaccgcgtcccgctgatcgccatctcgccctggtcgaagggcggcaaggtcagcgccgaagtgttcgaccatacctcggtgctgcgcttcctcgaacgccgcttcggcgtcgtcgaggaaaacatctcgccctggcggcgtgccgtctgcggcgacctgacttcgctgttcgacttccaggacgcaggcgatacccaggtcgcccccgacctgaccaacgtcccgcagagcgacgcgcgcaaggaggacgcctactggcagcagttctaccggcccagccccaagtactggtcctacgagcccaagagcctgcccggccaggaaaagggccagcgccctaccctcgcggtgccctaccagttgcacgccacgctggccctcgacatcgccgccggcaagctgcgcctgaccctgggcaacgacggcatgagcctgccgggcaatccgcagggacactccgctgcggtattccaggtgcagccgcgggaagtcggcaatccgcgtttctataccgtgaccagctatccggtggtccaggaaagcggagaggaactgggccggaccctcaacgacgaactcgacgacctgctcgacgccaacggccgctacgccttcgaggtgcacggccccaacggcttcttccgcgagttccacggcaacctgcatctcgccgcgcagatggcgcggcccgaggtatcggtcacctatcaacgcaacggcaacctgcagttgaacatccgcaatctcggccgcctgccgtgcagcgtgacggtgacgccgaacccggcctatacccaggagggcagccgtcgctatgaactcgaaccgaaccaggcgatcagtgaagtgtggctgttacgcagcagccagggctggtacgacctcagcgtgaccgccagcaatacggaagccaactatctccgccgcctggccggacacgtcgagaccggcaagccgagcaggagcgatccattgctcgacatcgcagcgacctga

SEQ ID NO: 326025 - DNA, 1845 bp, Pseudomonas aeruginosa
  misc_feature (1802)..(1811): n is a, c, g, or t
gtgatcgaggaagcggccagcggacgtcgcctggtctacgtcaacaccgacctggggatgatcttccaggccgtgcacctgaaggtcctggcccggctcaaggcgaagtaccccggtgtctacgacgagaacaacgtgatgctcgccgccacccacacccactccggtccgggcggcttctcccactacgcgatgtacaacctgtcggtgctcggcttccaggaaaagaccttcaatgccatcgtcgacggcatcgtccgctccatcgagcgggcccaggccaggttgcagcccggccgcctgttctacggcagcggcgagctgcgcaacgccagccgcaaccgttcgctgctgtcgcacctgaagaatccggacatcgccggctacgaggatggcatcgacccgcagatgagcgtgctcagcttcgtcgacgccaacggcgagctggccggcgcgatcagttggttcccggtgcacagcacctcgatgaccaacgccaaccatctgatctcgccggacaacaagggctacgcctcctatcactgggagcacgacgtcagccgcagggccggtttcgtcgccgccttcgcccagaccaatgccggcaacctgtcgcccaacctgaacctgaagcccggctccggtcccttcgacaacgagttcgacaacacccgcgagatcggtctgcgccaattcgccaaggcctacgagatcgccggccaggcccaggaggaagtgctcggcgaactggattcgcgcttccgtttcgtcgacttcacccgcctgccgatccgcccggagttcaccgacggccagccgcgccagttgtgcaccgcggccatcggcaccagtctggccgccggtagcaccgaagacggtccaggcccgctggggctggatgaaggcaacaatccgttcctctcggcccttggcgggttgctcaccggcgtgccgccgcaggaactggtgcaatgccaggcggaaaagaccatcctcgccgacaccggcaacaagaaaccctacccctggacgccgacggtgctgccgatccagatgttccgcatcggccagttggaactgctcggcgcccccgccgagttcaccgtgatggccggggtgcggatccgccgcgcggtgcaggcggccagcgaagcggccggtatccgccatgtgatcttcaatggctacgcgaatgcctatgccagctacgtcaccacccgcgaggaatacgccgcccaggaatacgaaggcggctcgaccctctacggcccctggacccaggccgcctaccagcagttgttcgtcgacatggcggtggcgctgcgcgaacgcctgccggtggaaacctcggcgatagcgccggacctgtcctgctgccagatgaacttccagaccggagtagtggccgatgatccctatatcggcaagtccttcggcgacgtgttgcaacaacccagggaaagttatcgcatcggcgacaaggtgaccgtcgctttcgtgaccggacatccgaagaatgacttgcgcaccgagaagactttcctggaagtggtgaatatcggcaaggatggcaaacagacgcccgtgaccgttgccaccgataatgactggtatacccaataccgctgggagagagtgggtatatctgcctcgaaagcgactatcagctggtccattccaccagggaccgagcccggccattactacatcaggcactatggcaacgcgaagaacttctggacccagaagatcagcgaaatcggcggctcgacccgctccttcgaggggctcggcaccactcnnnnnnnnnnccgctccttcgaggtgctcggcaccactccctag

SEQ ID NO: 326026 - DNA, 450 bp, Pseudomonas aeruginosa
atgctcttcgcccgtttggttttgctggttcaggcgctggtatggggcgcgctgggagtgctgtactgggtgcgtccctacgagatggccaatctcagtggcatgctgctgatggagccttcggcggtcagcgatgcgcgggtgttctatggcggccatcagttcgccctggcgttgttcctgctgttcgccctgcgccgggcttcgctggtgcagccggcgttgatcctggtagtgctgctgcaatcgatcctgactctgtcgcggctattgattgcctggatcgagggcgggatggaggccgacggcaacctgttcggcctgctgttccgcggcgcaatggctgccctggggatcgccgccctgtggtggctgcaacggcggccgccccggctgtcgacgcccggcgagaacaccgagcgccgcgaggacgacttcgacggcctgtga

SEQ ID NO: 326027 - DNA, 855 bp, Pseudomonas aeruginosa
atgtcccgacgctactggcaactcgatgtgttcgccgagcgtccgctcaccggcaacggcctggccgtattcgacgacgccagcaccctcgatgacgccgccatgcaggcctggacccgcgaactgcgccagttcgaatcgatcttcctgctgccgggcgacgacccacgggccttcggcgcacggatcttcaccctggaggaagaactgccgttcgccggccacccgctgctcggcgccgccgccctgctccatcacctgcgcggcggcgacaacgaacagcactggacgctgcacctggccagcaaatcggtggccctgcgcagcgtgcgggcgggcagcggtttctacgccgagatggaccagggccgcgccgaattcggcgccaccccggacgccgggacctgccgctggttcgccgaagccttctcgctatcggccaacgacctgtccgggcatccaccgcgggtggtgagcaccggcctgccctacctgctcctgccggtaaccgccgaggcgctgggtcgagcccgtcaggtcaacgatttgcaagaagccctggataaactcggcgcggcgtttgtctatctgctcgacgtcgacgggcgcgagggccgcacctgggacagcctggggctggtggaagacgtggctaccggcagcgctgccggtccggtcgccgcctacctggtggaatacgggcttgccgcgcgcggcgaacccttcgtcctgcaccagggacgcttcctcgagcggccgagccggctcgacgtccaggtcgcgacagacggtagcgtcagggtcggcggccacgtccaactgctcgcccgcgccgagctgctgacctcggcctga

SEQ ID NO: 326028 - DNA, 1233 bp, Pseudomonas aeruginosa
atgagtgattacgagccgttgcgtctgcatgtcccggagcccacggggcgtcctggctgcaagaccgacttttcctatctgcacctgtcccccgccggcgaggtacgcaagccgccggtggatgtcgagcccgccgagaccagcgacctggcctacagcctggtacgcgtgctcgacgacgacggccacgccgtcggtccctggaatccgcagctcagcaacgaacaactgctgcgcggcatgcgggcgatgctcaagacccgtctgttcgacgcgcgcatgctcaccgcgcaacggcagaaaaagctttccttctatatgcaatgcctcggcgaggaagccatcgccaccgcccacaccctggccctgcgcgacggcgacatgtgcttcccgacctatcgccagcaaggcatcctgatcacccgcgaatacccgctggtggacatgatctgccagcttctctccaacgaggccgacccgctcaagggccgccagctaccgatcatgtactcgagcaaggaggccggtttcttctccatctccggcaacctcgccacccagttcatccaggcggtcggctggggcatggcctcggcgatcaagggcgacacgcgcatcgcctcggcctggatcggcgacggcgccaccgccgagtcggacttccacaccgccctcaccttcgcccatgtctaccgcgcgccggtaatcctcaacgtggtcaacaaccagtgggcgatctccaccttccaggccatcgccggcggcgaaggcaccaccttcgccaaccgtggcgtgggctgcgggatcgcctcgctgcgggtcgacggcaatgacttcctggcggtctacgccgcctccgagtgggccgccgagcgcgcccggcgcaacctcgggccgagcctgatcgaatgggtcacctaccgcgccggcccgcactcgacttcggacgacccgtccaagtaccgccccgccgacgactggaccaacttcccgctgggcgacccgatcgcccgcctgaagcggcacatgatcggcctcggcatctggtcggaggaacagcacgaagccacccacaaggccctcgaagccgaagtactggccgcgcagaaacaggcggagagccatggcaccctgatcgacggccgggtgccgagcgccgccagcatgttcgaggacgtctatgcagaactgccggagcacctgcgccggcaacgccaggagctcggggtatga

SEQ ID NO: 326029 - DNA, 1053 bp, Pseudomonas aeruginosa
atgaatgccatgaacccgcaacacgagaacgcccagacggtcaccagcatgaccatgatccaggcgctgcgctcggcgatggacatcatgctcgagcgcgacgacgacgtggtggtattcggccaggacgtcggctacttcggcggcgtgttccgctgcaccgaaggcctgcagaagaaatacggcacctcgcgggtgttcgatgcgccgatctccgagagcggcatcatcggcgccgcggtcggcatgggcgcctacggcctgcgcccggtggtggagatccagttcgccgactacgtctacccggcctccgaccagttgatctccgaggcggcgcgcctgcgctatcgctcggccggcgacttcatcgtgccgatgaccgtacgcatgccctgtggcggcggcatctacggcgggcaaacgcacagccagagcccggaggcgatgttcacccaggtctgcggcctgcgcacggtgatgccgtccaacccctacgacgccaagggcctgctgatcgcctgcatcgagaacgacgacccggtgatcttcctcgagcccaagcgcctctacaacggcccgttcgatggccaccacgaccgcccggtgacgccctggtccaagcatccggccagccaggtgccggacggctactacaaggtgccgctggacaaggcggcgatcgtccgccccggcgcggcgctgaccgtgctgacctacggcaccatggtctacgtggcccaggccgcagccgacgagaccggcctggacgccgagatcatcgacctgcgcagcctctggccgctggacctggaaaccatcgtcgcctcggtgaagaagaccggccgctgcgtcatcgcccacgaggcgacccgcacctgcgggttcggcgccgagctgatgtcgctggtgcaggagcactgcttccaccacctggaggcgccgatcgagcgcgtcaccggttgggacaccccctacccgcatgcccaggagtgggcgtatttccccggccccgcgcgcgtcggcgcggcattcaagcgtgtgatggaggtctga

SEQ ID NO: 326030 - DNA, 1458 bp, Pseudomonas aeruginosa
  misc_feature (1000)..(1036): n is a, c, g, or t
atgagccagatcctgaagacttccctgctgatcgtcggcggcggtcccggcggctacgtcgcggcgatccgtgccgggcaactgggcattcccaccgtactggtggagggcgccgccctcggcggcacctgcctgaacgtcggctgcatcccgtcgaaggcgctgatccacgccgccgaggaatacctcaaggcccgccactatgccggccggtcggcgctgggcatccaggtacaggcgccgagcatcgacatcgcccgcaccgtggaatggaaggacgccatcgtcgaccgcctcaccagcggcgtcgccgcgctgctgaagaaacacggggtcgatgtcgtccagggctgggcgaggatcctcgacggcaaaagcgtggcggtcgaactcgccggcggcggcagccagcgcatcgagtgcgagcacctgctgctggccgcaggctcgcagagcgtcgagctaccgatcctgccgctgggcggcaaggtgatctcctccaccgaggcgctggcgcccggcagcctgcccaagcgcctggtggtggtcggcggcggctacatcggcctggagctgggtaccgcctaccgcaagctcggcgtcgaggtggcggtggtggaagcgcaaccgcgcatcctgccgggctacgacgaagaactgaccaagccggtggcccaggccttgcgcaagctgggcgtcgagctgtacctcgggcacagcctgctgggcccgagcgagaacggcgtgcgggtccgcgacggcgccggcgaggagcgcgagatcgccgccgaccaggtactggtggcggtcggccgcaagccgcgcagcgaaggctggaacctggaaagcctgggcctggacatgaacggccgggcggtgaaggtcgacgaccagtgccgcacctcgatgcgcaatgtctgggccatcggcgatctcgccggcgagccgatgctcgcgcaccgggccatggcccagacattgcgcatcgaggtgcggcacnnnnnnnnnnnnnnnnnnnnnnnnnnnnnnnnnnnnnggctggcaggcggtgggcaaggcggtctcggaactgtccacggccttcgcccagtcgctggagatgggcgcccgcctggaagacatcgccggcaccatccacgcccatccgaccctcggcgaagcggtccaggaagccgccctgcgcgcgctgggacacgccctgcacatctgactcccacgaacctcggtagccggccaaccaccggcgcacattacccccttgcccgtcgggcaagggggcttttttcgtggccgcgaaccgggtcgtcagcaggtctcaccgccctgcgcgatcccccgcccctcactccgtctccagcaacccatgccgcaagctccccgccgccaggcgctggcgaatatcctcgtcgatccgcggatcgtccgggcggtacaggcgcacctggcggtaggcgttga

SEQ ID NO: 326031 - DNA, 1446 bp, Pseudomonas aeruginosa
atgcttgaaatgctcaacgatttcctttccggaaaagtcctcatcgtcctgatcgtcggcctgggcgcctacttcacgatccgttcgcgcttcgtccagttccgccacttcggccacatgttcggcgtgttcagggaatcactgcgcggccaggccggccagctcagttccttccaggccctgatgctgagcctcgccggccgggtcggcgccggcaacatcgccggggtcggcatcgccgtgaccctcggcggtccgggggcggtgttctggatgtgggtcaccgcgctggtcggcatgtccagcagcttcttcgaatgcaccctggcccaggtctacaagcgcagcgacggcgacggcctgtatcgcggcggcccgtcctactacatccagcacggcctgaagctgcgctcgatggcggtggtcttcgcggtactcctgctggtgacctacggcttcgccttcaacggcctgcagtcctacaccgtcacccattcgctgcagaacgccttcggcttcgccccgcagcacaccgggatcgccctggcggtgctgctcggcgtggtcttcatcggcggtatcaagcgcatcgccgcggtctccgacctgctggtgccgatcaagaccctggcctacatcggtgtcaccctgtacgtcatcgccagccagatcgagcacgtcccggcaatgctggaaaccatcgtcaagagcgccttcggcctcgacccggcgttcggcggcctactcggcagcgccatcgtgatgggcgtcaagcgcggcgtcttcgccaacgaggccggcctgggcagcgcgccgaacgtcgccgcggtcgccgccgtgcgccatccggcggcgcagggcgtggtccaggccttcagcgtgttcctcgacaccttcgtgatctgcacctgcaccgccctgctgatcctgctctcgggcttctacaccccgggcttcgaaggcgacggcatcgtcctcacccagaactccctggccgcggtggtcggcgactggggccgggtgttcgtcagcgtggccctgtcgctgttcgtcttcacctgcatcctctacaacttctacctgggcgagaacagcctgcagttcctcagccgcaaccgcctggtgctgatcggctaccgcgcgctggtgctggccctggtggtctggggctcggtgcaggacctgtccaccgtgttcgccttcgccgacatcaccatgacctgcctggccttcgtcaacctgatggccctggctctgctgttcaaggtcggcctgcgggtgatgcgcgactacgacgtgcagcgccgcgccgggatcaagcagccggtgttcgactcggcgcagttcgccgacctcgacctggaccgcgaagcctggcccgccggccagcacgccgagcccccggcgcaggcggacgccgagccgctgccgagcggcactcgctga

SEQ ID NO: 326032 - DNA, 987 bp, Pseudomonas aeruginosa
atgctcccagtcaagaacctcttcgtgctctacaccggcggcaccatcggcatgttgcagaccccgcagggcctggccccggccggcggcttcgaagcgcgcatgcgcgaccacctgcaaagcctcggcgacgccccggacctgcgctggcgcttcgccgaactgcaaccgccgctggacagcgccaacatgacccagggcaactggctggcgatgcgcgacgccatcgtcgccgcgctcgacgccggccacgacggcgtgctgctcctgcacggcaccgacaccctggcctacagcgccgcggcgctgtccttcctgctcctcgacctgccgatcccggtgctgctgaccggctccatgctgccggccggcgcgccgggcagcgatgcctgggacaacctggtcggcgccctgcgcgtcctccaggagggccacgcgcgcggcgtacaggtctatttcaacgatgccctgctgcacggcgcgcgggtcagcaagctgcgcagcgatgcgttcgacgccttcgccgaactgccgcgaccacgccacgccgagcctgcgccggtgcccgcggcgctcggctaccgccagccgcgccgggaagtgaacctcgccgtgctgccgctctatccagggctgcgcgccgcgcacctgcgcggactgctcgacagcggcgtggaagcgctgctgctggaatgctatggcagcggcaccggcccgtccgacgacgaggagctgctggcgaccctgcgtgaagcccacgcccgcggcgtgctgctcgccgcggtcagccagtgcgcctacggccaggtcgagttcggcgtctacgccgccggcagccgcctgcgcgacgccggcctgctctcggctggtggaatgacccgcgaggcggccctgggcaagctcttcggcctgctcggcgccggcctcggacgcgacgaagcgcaacgctggttcgccctcgacctgtgcggcgagaacgccgactga

SEQ ID NO: 326033 - DNA, 987 bp, Pseudomonas aeruginosa
atgtacgccatcgccgaagacacccttcccgcacgcgtattgaaagaactgttgctctatcgccgccgttaccccgagcatcgccagagcgccagcgaagcggacgaggtccgccgcatcgaacaggtccagttgccgcgtatcgccgccttcatcgaagccggcgagcccatcgagttcgtcctgccggcgtttccggccaagtcgccgaaccccggcaaggtcctcgacagccgtccggacatggccgagcgcctgtcgctgtcgttcctcaaccacctgtgccagcgcatccagctgttctatgcaccgggcgcgaagatcaccgtctgctccgacggccgggtgttcggcgacctggtgaggatcggcgatgcgcacatcagcgcctaccaggatgccttgcgcctgatgatcgaggagatcggcgccacccatatcggcgtgttcaacctggaggacgtacgcgccttcgaggcccagcgcgacaaccacgagcagctccgccagttgctgatcgacggctacgccgagccgctggaaagcatccgcgagaccctgctggccagcgaagaaggcctgctgctgtaccgcgccatcacccgcttcctctacgaggacggcctgacccccgactaccagggctcgaagaccgccctgcaacgcgacgccaaggagcgcgcctacggggtgatccagcgcagctgggcctggggcgcgctgctggccgaccagttcccccgcgcgatccgtctgtccatccatccgcagccggcggacagcctgaagttcggcatccacatgatgccgacccgcgacgactggctgacgccctggcacggcgtggcggtgaacaccgaggaccgcttcgtgctgatgaagcgcagcgaggtgctggaactcggcggcgaactggtgcagatcaacggccagcccagtcactaccgcctgccggccagggccgcccggcgcgccgccgtggcctga

SEQ ID NO: 326034 - DNA, 246 bp, Pseudomonas aeruginosa
atgaagcatcacttggtgatcgaagactgggacggcgacagagctattcgcttgcctgacgacgtattgcaggaaatgggcgtcgacgttggggatacgctctaccttctggaggagtacgtaggcgccacccgttgcctggtgctcagcaagacaccgcgcattcctgatcgcgtagatgagctggttggccactgggagtcgtttgacaaggttgccaccgatttaaacgccaaggatgactga

SEQ ID NO: 326035 - DNA, 1353 bp, Pseudomonas aeruginosa
atggaggatgcgctgcaagcgctgtccgaaatgctggctgcttatgccagccaggagctctacgagatcgacccggatgcaacgcatctccaagcaggtcgtgaacttcgtgaatggatcaagcggcgcctcgtcgtagaacgagaggggcgtatctacgcaaccgacgcgctggagtccgccatccagttcgtcgactcgctggatagtcggatcatgacctccacggcatctcgcctttcggtggtccagcgcgagattgaaaacctggaaacgggtctgaaccccagcccaactggccgtattgccagcctgcgccgcagaatccaggatttggagcacgagctggcgcgggtagaggccggccatgtcgacgtgctggatgaagcgcaggcgatagagggcatgcgcgaggtatataacctggccaccagcctgcgcgcagactttcgacgagttgaagactcttggcgcgaggcggatcgcgcccttcgacactccatcatcagtgagcagtctcaccgtggagaaatcgtcgatcgattgctggatggtcaagatgctctactcaacacaccggaagggcgtgtgtttgaaagcttccagcagcaactgaggcagtccgctgagctggaggtcatgcgtgagcgcttgcgcaccatccttcgtcatcctgcggttccaaaggcgctgaatcgtccccagcaacgtgagctacgttggctggcgttacgcctagttcgtgagtcgcaggctgtgctccaggcgcgcgcccgaagcgagcgcgatgtccgcggcttcatgaaaacggggctggccgccgagcatcatcgcgtcggacagttactcaacgacttcttcaatctagcgctcagcgtcgactggcaacgtcagtcagagcgccgtaagcctgcctgtttaccaccggttggcgtagccattaccggtgtcccggcaatcgagcgtctccgcttcaagactctggatgacgatgatgcgggcgagctggatctgagtttgaagcctgcggggttggagcagattgatgatgacttctgggatgccttcgacgggctggatcgtgaagcgctgattcatgacaccctggctgtgctggtggagcaggggcgccctgtgagtctcggggagcttgcgtctttgcttccacctgctcacgacctggaaacctttgcgctctggttggcgatggcgcgtgaggcaggtatcgaggtgctgacagaggagcgtcagttcgtggagctagttgacgaggatgagcaacgctggggcttcaatctgccttatgtcggactcgaccacgaggcactcaaggacatcgattgggagttgtga

SEQ ID NO: 326036 - DNA, 750 bp, Pseudomonas aeruginosa
atggcagggatcttcgatcgaattgcaggcgcttctggcgccgacgaaacggagctgacggcggagcccatggcgttggatgacggcatggatggtgagcaacctgccatgagcgccaatatacaggtcgatgagcgacggactccgcaacgggtacgtgaggccgtacaggaaatgctcaagtacgggctgctggaagaaagccacaaacccaacctatatcgctcagcgctcaccaatatcgaggtggtggacagaatcctggagccgctcgaccttgccatgggggtcgacgaggttcgggggctggtgtttgttaccgttcgccagggcgaggtggctgagcaggatgactggtcgcaccccctcgtgcgtcggcaaagactgaatctggagcagtccctgctgatagccattctgcgacagcatttcatcgcgtacgaacaggaaagcggtacgggcgctagtcaggcgctggtggcggttgatgagctgattccccaattgcaggtttacctgggcgaactgggcagtgaggcgaaggagcgcaatcgcatcatcacgctgctggatcagctcaaggggcatggtttggtgtcggctctggacgcacatgatcgtgtcatcatccgtcccatcattacccacttggctaacccggagaacctgcaggcactcgtagtatggctgcgagagcaggtggagggtgcggttacgccggctgccggtggtgaggaggacgaggcgtga

SEQ ID NO: 326037 - DNA, 3306 bp, Pseudomonas aeruginosa
gtgaagcaggcactactctggcgtgacagcgagaccttcattctcaccagcatcgagctctataactggggcggctttcagggctatcaccgtgccgagatcgatccttccggcaccgccgtgatcggcccgacggggagcggtaaaacgacgctggtggacgctctgatgaccttgctgtgcgccaatccgcgctacaacctggcatccacgggcgggcatgaaagcgaccgcgatctggtgtcctatgtgcgcggcgtcaccggccccggggacggaggtgtagagcaatctcatatcgcgcgccagggtaagactgtcaccgccattgccgccacgctcgagcgtgacggtgcgcaggttcgactgggcgctgtgctctggttcgagggcaccagctcctcggcgtccgatctgaaaaaactttggctgttaagcgagtcccccgagcagacgctggagcactggctcagccagcatcacgcaggcggcatgcgggctctgcgtcagatggagaaggatgggatggggatctggccgtatcccagcaagaaagccttcctggccaggctgagggattacttcgaggtcggtgaaaacgctttcaccttgctcaaccgcgctgccggcctgaagcagctcaacagtattgatgagatctttcgagagctggtactggatgaccgctccgccttcgagcgggctgccgaggtcgccagcagcttcgatgatctaactgacatccaccgagaactggaaaccgctagaaagcagcagcgctcgttgcaacctgtcgccgatggctgggaacgttatagggccttgcaagaacagttgcaggataaacaagcgctcgaaggcatcctcccggtctggttcgccgagcaggggtatcgtctgtggttggctgaaaccaacaggcttgagaaggagcacaaacaggccgaactggatcaggcgcaatgcaggagtcagcttgagatccagaagggcgtggtcgatcaacatcgtcagcgctacctgcgagtagggggcgcagggatagatcaattacgcgggcgcattgctgattgggtcagggagtgcgataagcggcgcctgaaagccgagcaataccaacgcttggccaaggggcttggactcgcggatgagttatcggccgctgcgctcgaagaaaatcagcagcagatcgcggcacgcctggaaatactggcccagcaaactacagacgcgcgccagaaggcgttcgatgcaggtctcgtccagcaggaactcaatggccgcctgcagagcttacagcaggagcgtgctgaggttgagagacggccaggctcgaacctgcccgggcattttcatgcttttcgaggtgatctggcgcaggagcttggcgtcgatgagtcggccctgcctttcgttgccgagctggtgcaggtcaagcccgaggagctggcctggcggggtgccatcgagcgggcaatcggtagccaccggctccggatcttggtgccgcagggctcatcccaggccgcactgcgttgggtgaaccaacggcacaaccgcttgcatgtgcgcttgttggaggtaaaagagccgtcgtcgcgccccgttttcttcgacgatggctttacccgcaagctgaccttcaaggagcatccgtaccgagaagccgtaaaggcactactggcggacaatgaccgccactgcgtcgaaagcacggagcaattgcgtcatacccctcacgccatgacggcccaagggctgatgtcgggtaaagaacgcttcttcgacaagcaggaccagaagcgcctggatgaagactggctgaccggcttcgataaccgcgaccgtctggccttcttggctgagcagattcgcgaggtcaatgaacagctcgtgcccgccaagctggccctggatgctgcccagggcgatgtcggtcaattggagagtcaagcttcgctgctgcaacgcatcgaagagctgcagttcgacgatattgatcggccgggcgccgagcgtcagctgcagtcgctgcgtactcagctggacaccctgacgcgtcccgattctaaccttgccgtgatcaaagccgagctggatcaagccgaggccctgcgggagtctctggaccaacagctgcaacgactgattgagcagtgtgtgcagttgaaaactcaatttgaccaagccgcatctgctacccgtaaggcctatcgcggcgccgaaaaggggctgagcgatacacagcgtgaactggcgcaagcgcatttcccgatcctgagcacggatgacctcggcgatattgacgagctggaacgcaagcatacgcgtgagcttcaagggcaactcaaaacgctcggcgagaaactgggcgaccagaaaacagagcttgccaaacgtatgtccgacgccctgaaagcagacaccggggcgcttgcagaggtcgggcgagaactggtggatgtacccaggtatctggagcgtctccgtgtgctgaccgaggaagccctgcccgagaaactcaagcgcttcctggaatacctcaatcgctcctcggatgacggtgtcacccagctgctcagctatatcgaccatgaggtctcgatgatcgaggagcgcctggatgacctgaacagtacgatgcagcgtgtcgactttcagcccggacgctatctgcgcctggtggcgaaaaaggtcattcatgaaagcctgcgcaccttgcaacacgctcagcgccaactgaactcggcgcgcttcatcgatgatgaaggcgagagccattacaaggcattgcaggcgctcgttggcctgctcaaggatgcctgcgaacacagcaggaatcagggggccaaggcactgctggatccgcgcttccgcctggagttcgcggtatcggtgatcgatcgggaaggcaataatctcatcgaaacccggacaggttctcagggcggtagcggtggcgagaaggagatcatcgcctcctatgtactgaccgcttccctgagctatgcgctctgtcccgatggcagcagccggccgttgttcggcaccatcgtgctcgacgaggcgttctcgcgcagctcccatgcggtggccggtcggatcatcgcagcgctgagggagttcggcctgcacgctgtcttcatcacccccaacaaggaaatgcgcctgttgcgccaccatacgcgttcggcagtcgtcgttcatcggcgcggcgtggaatccagtctggtttccctgagctgggaagcgttggatgagcatcatcaacagcgcatcagggccatgcatgaagtcgcccactga

SEQ ID NO: 326038 - DNA, 1122 bp, Pseudomonas aeruginosa
atgaagtcgcccactgacatcggccgtaacctggccaggcaatggcagcgctccagcgtgcgcttggagcgcttgctcaatcccggtagctggccgcaaagcctcaacatcggtaagccttcggcacgtctattcactgacaacatccaggcggtgctccggcatgtggagaactggcggagcgtgaacgtgggtaaggtcgactgggaacctgtcagctaccgagcaggtctggcccccatttccttgccgatgcgttggcatttgcgtagcccctccgaatggattgccgcgagcgatgatccaagggtcagccaggaatacgctcaactcgagtatttggtcgagcaggtagacagtgcctttcatacgctgctggtggcacaacggagcttatggttgacgaggacgcctgaagaagtcgtcgccacggcgcaactcgctactcaattagctccgggctgcgctcaaggccgcccattgcgtctgcttgcagagcacggagtggacaccaagttttttgagcgaaacgctaccttactgacgaagctcctcgatgagcgcttcgaaggtgccgcgtcggagcaaggcctgacgacctttctggatgcctttgaagaaagcagtcattgggttctagtcgttcctcttcagcctgggctgctgcccttcaagcggctcaggctgacaacttcggaactggccgaaaccccacttcctggttcgcgattgctcgtagtggaaaatgagcaatgtgttcacctgctacccgaaacgttgccggacaccttagcggtgctgggggcaggactcgatttgcattggttggcgtctgcgcatctggccgggaaacagatcggttactggggcgacatggatacctggggcttgctgatgctggcgcgagcgagactccatcaacctgcagtcgaagcactcctaatggagcaggagctgtttgaacagcactcacaggggaatacagtcgtcgagccggctaaagctctggaatcggctccccctggtttgctggctgacgaggctgatttctatcggtatctgttggtgcagtatcttccaaaggctcaggtggagttggccataagaaagtgggccagatga

SEQ ID NO: 326039 - DNA, 666 bp, Pseudomonas aeruginosa
atggacttcaacccaatcgatctgattctccacctggatacctacctggccatgctggtcagcaactatggcgtctggatctacgccatcctgttcctggtgatcttctgtgaaaccggcctggtggtgactccgttcctccccggcgactcgctgctgttcatcgccggcgccatctgcgccaccggcggcatggacccatggctgctcggcgggctgctgatggtcgcggcgatcaccggcgacagcaccaactacgtgatcggccggaccctcggcaagcggctgttcagcaaccccgactcgaaggttttccgccgcgactacctcgaccgcacccatgagttctacgaacgccacggcggcaagaccgtgaccctggcgcgcttcctgcccatcgtgcggaccttcgcgcccttcgtcgccggcatggcgaagatgcactacccgcgcttcgtcatgttcagcgtggtcggcaccgtggcctgggtcggcggcctggtgaccctgggctacttcttcggcaacgtgccgttcatcaagaagaacctgtcgctgctggtgatcggcatcatcctgctgtcgctgctgccgatgatcctcggcttcattcgccatcgcctgcaggcgagcgccgccaaacaggccaaggcccagagcgactga

SEQ ID NO: 326040 - DNA, 1281 bp, Pseudomonas aeruginosa
  misc_feature (30)..(39): n is a, c, g, or t
gtggcggaacagagcatcgcctccagttcnnnnnnnnnnggctaccgccagctcaccgacgaactggaggcgatgctctgttccgccaccggctacgacgccgtgtcgttgcagcccaacgccggctcccagggcgagtacgccggcctgctggcgatccgtgcctaccaccagagccgcggcgacagccagcgcgacatctgtctgatcccgtcctccgcccacggtaccaacccggctaccgccagcatggtcggcatgcgcgtggtggtggtggcctgcgacgcgcgcggcaacgtcgacgtcgaggacctgcgcaacaaggccagcgagcacaaggaacgcctggccgcgctgatgatcacctatccgtccacccatggcgtgttcgaggaagcgatccgcgagatctgcgccatcgtccacgactgcggcggccaggtgtacatcgacggcgccaacatgaacgccatggtcggcctgtgcgccccgggcaagttcggtggcgacgtttcccacctgaacctgcacaagaccttctgcatcccccacggcggcggcggcccgggcgtcggcccgatcggcgtgcgcgcgcacctggcgccgttcctccccggccacgctcgcggcgagcgcaaggaaggcgcggtgagcgcggcgccgtacggcagcgcgagcatcctgccgatcacctggatgtacatccgcatgatgggcggcgaaggcctcaagcgcgcctcggaaatggccatcctcaatgccaactacatcgcccaccggctggaggagcactacccggtgctctacgccggcggcaacggcctggtcgcccacgaatgcatcctcgacctgcgtccgctcaaggacagcagcgggatcagcgtcgacgacgtggccaagcgcctgatggacttcggcttccatgcgccgaccatgtccttcccggtggccggcacgctgatgatcgagcccaccgagagcgagtcgaaggccgagctggaccgcttctgcgacgcgatgatccgcatccgcgaggaaatccgcgcggtggaacgcggcgagctggacaaggaagacaacccgctgaagaacgcgccgcacaccgccgccgaactgctcggcgaatggaaccatgcctacagccgcgagcaggccgcctatccgctggccagcctggtggaggccaagtactggccgccggtgggccgcgtcgacaacgtctacggcgaccgcaacctgacctgctcctgcccgccgatcgaggcgtacagcgaggagtga

SEQ ID NO: 326041 - DNA, 1710 bp, Pseudomonas aeruginosa
atgaccgataacctgaacctcggcaccatcgacctgggcaccgacgacgaattcatcgcccgccatatcggcccgcgcgccgccgacacccaggccatgctccagcgcctgggctacgactcgctggacacgctgatcggcaacgtgatcccggacagcatcaagggcagcagcgtgctcgacctgccggccggcatgggcgaggccgaggcgctggccagcctgaaggcgatcgccgcgcgcaatcgcgcgttgcgttccttcatcggccagggctactacaactgccacaccccggcaccgatcctgcgcaacctcctggagaacccggcctggtacaccgcctacacgccgtaccagccggaaatctcccagggccgcctggaggcgctgctgaacttccagaccctggtcagcgacctgtccggcctgccgatcgccaacgcctcgatgctcgacgaggcgaccgccgccgccgaggccatgaccttctgcaagcgcctgtcgaagaaccgcaccagccaggcattcttcgcctcccgccattgccacccgcagaccctcgacgtgctgcgcacccgtgctgagccgctgggcatcgaggtggtggtcggcgacgagagcgccatcgaagacttctccgcctacttcggcgcgttgctgcaataccccacctgcgacggcgagatcgtcgactatcgcgaactggtcagccgcttccatgcggtcgatgcgctggtcgcggtggccgccgacctgctggcgctgaccctgctgaccccgccgggcgagttcggcgccgacgtggccatcggcagcgcccagcgcttcggcgtgccgctcggcttcggcggcccgcacgcggcctatttcgccacccgcgacgccttcaagcgggacatgccgggacgcctggtcggcgtctccatcgaccgccacggcaagccggcctaccgcctggccatgcagacccgcgagcagcacatccgccgcgagaaagccaccagcaacatctgcaccgcccaggtgctgctggccaacatcgccagcatgttcgccgtctaccacggcccgcagggcctgctgcgcatcgcccggcgcacccaccggctgaccgcgatcctcgccgccggcctggagcgcctgggcgtggccgtcgagcagaagcatttcttcgacaccctgagcctggccaccggcgcgcgtaccgcggcgatccatgccaaggcccgcgccgccgggatcaacctgcgcgagatcgatgccggccgtctcggcctgtcgctcgacgagaccgtccgccaggccgatgtggagaccctctggggcctgctggccgaagagggccaggcgctcccggacttcgccgcccttgccgccagcagcggggaccgcctgccggtcgagctgctgcgccagtcggcgatcctcagccacccgatcttcaaccgccatcactcggaaaccgagctgatgcgctacctgcgcaagctggcggacaaggacctggcgctggaccgcacgatgatcccgctgggctcctgcaccatgaagctgaacgccgccagcgagatgatcccggtgacctgggccgaattcggcaacctgcacccgttcgccccggccgagcagagcgaaggctaccgccagctcaccgacgaactggaggcgatgctctgttccgccaccggcaacgacacggcgtcgtag

SEQ ID NO: 326042 - DNA, 666 bp, Pseudomonas aeruginosa; identical to SEQ ID NO: 321290

SEQ ID NO: 326043 - DNA, 756 bp, Pseudomonas aeruginosa
atgagcgccgcctgggtccggccgttccgcctgacgccgatgccgcgcctgcgcctggcctgcttcccccatgcaggcggcagcgccagcttcttccgtagctggagcgaacgcctgccgccagacatcgacctgcttgccctgcagtacccgggccgcgaggaccgcttcaacgaggcgccggctacctgcctggaagacctcgccgacggcgccgccctcgccctgcgcgatttcgccgacgcgcccctggcgctgttcggccacagtctcggcgcggcgctggcctacgaaaccgccctgcgcctggaaaacgccggcgcgccgctgcgccacctgttcgtctccgcccatccggcaccgcaccggcaacgcggcggcgcattgcaccgcggcgacgaggcggcgctgctggaggacgtccgccgccagggtggcgccagcgagctactcgaggacgccgacctgcgcgcgctgttcctgccgatcctgcgcgccgactaccaggcgatcgagacctaccgacgggcgcagcccatcgccctggcctgcgccctcgacgtcctcctcggcgagcacgacgaggaagtcagcgccgccgaggcgcaggcctggagcgacgccagccggactcccgccaggctgcggcgctttcctggcggccacttctacctgagcgaggggcgcgacgcggtgatcgagcacctgctgcgccgcctcgcacatcccgacgccctttcccgagaggttgcatga

SEQ ID NO: 326044 - DNA, 1431 bp, Pseudomonas aeruginosa
atgagccggctggcgcccctgagccagtgcctgcacgccttgcgcggcaccttcgagcgcgccatcggccaggcgcaggcgctcgatcgtccggtgctggtggcggcgtcgttcgagatcgacccattggacccgctgcaggtattcggtgcctgggacgaccggcaaacgccctgcctgtactgggaacagcccgagctggcgttcttcgcctggggctgcgccctggagctgcaaggccacggcgaacagcgcttcgcccggatcgaggaaaactggcaattgctctgcgccgacgccgtggtcgagggcccgctggcgccgcgcctgtgcggcggattccgcttcgatccgcgcggcccgcgcgaggaacactggcaagccttcgccgatgccagcctgatgctcgccggcatcaccgtgctgcgcgagggcgaacgctaccgggtactctgccaacacctggccaagcccggcgaagatgccctggccctggccgcctaccactgctcggcgctactgcgcctgaggcagccggccaggcgccggccctcggggccgaccgctggcgcgcagggcgacgcttcggcgctggagcgcaggcaatgggaagccaaggtgagcgacgcggtaagcagtgtccgccagggacgcttcggcaaggtcgtgctggcccgcacccaggcccggcctctcggcgacatcgagccgtggcaggtcatcgaacacctgcgcctacaacatgccgacgcccagctgttcgcctgtcgccgcggcaacgcctgcttcctcggcgcctccccggaacgcctggtccgcattcgcgccggcgaggcgctcacccatgccctggccgggaccatcgcccgcggcggcgatgcccaggaagatgcgcggctcggacaggccctgctggacagcgccaaggacaggcacgaacaccagttggtggtggaggcgatccgtacggccctggaacccttcagcgaggcgctggaaatccccgatgcgcctggcctgaaacgactggcgcgagtccagcacctgaacacgccgatccgcgcccgcctcgccgacgcaggcggcatcctgcggctgctgcaggcgctgcatccgacccccgcggtgggcggctacccacgcagcgcggcgctggactacatccgccagcacgaagggatggatcgtggctggtacgccgcgccgctgggctggctcgacggcgaaggcaacggcgatttcctggtggcgctgcgctcggccctgctcacgccgggccggggctacctgttcgccggctgcggtctggtaggcgattcggaaccggcccacgagtatcgcgaaacctgccttaagctcagtgccatgcgggacgctctgtccgccataggcggcctggacgaagtgcccttgcagcgcggcgtcgcctga

SEQ ID NO: 326045 - DNA, 186 bp, Pseudomonas aeruginosa
atggtgcgccagggcatgagcgcccaggccgcctgccatgcggtcggctacgccagcgcttcgcagttcaaccgcgagttcaagcgtctgttcggccgctcgccgctggcagaagcccggcgcctgcgcgcggggttctcgctgccgccggcgcaggggggagaggagtacgtgtcgtcgcattag

SEQ ID NO: 326046 - DNA, 633 bp, Pseudomonas aeruginosa
atgagcgacaagcgaaacccgcgtatttcctcgcgcaagcagccgcagcaggcccgttccagcgaactggtggcgagcatcctggaggcggctgttcaggttctggccagcgaaggtgcgcaacgttttaccaccgcgcgggtggcggagcgcgccggggtgagcatcggttcgctgtaccagtatttcccgaacaaggcggcgatcctcttccgcctgcaaagcgacgagtggcggcgcaccacgcgtctgctcggcgagatcctcgaggataccgcccggccgccgctggagcgcttgcgccggctggtgctggcattcgtgcgctcggagtgcgaagaggcggcgatacgcgtggcgctgagcgacgcggcgccgctgtatcgcgacgccgacgaggcgcgggaggtgaaggcggagggcgcgcgggtgttccaggcgtttctccgggaggccttgccggaggtcgccgaggtcgagcgcggcctggccggcgaattgctcaccaccaccctcggcgcggtcggcaagcagttctccgaacagccacgcagcgaggcggagatcgagcgttacgccgaggccctggccgatatgctctgcgcctatctcgccgcccttggcgagcgctga

SEQ ID NO: 326047 - DNA, 1278 bp, Pseudomonas aeruginosa
atggcgccgcacgagccgggggtactgaaacgggcggtgctctggctgctgttcctcggcccgttcttcttcgccagctatggcctggccaactggttgaccagccagcgcggcgacgtcggcagcctggtcttcgactgggaacgcgggatgccgctgtggccctggaccatcctgccgtactggtcgatcgacctgctctacggcctgtcgctgttgttgccgcgggacaagcgcgagctggacacccactgcctgcgcctgctcagcgcccaggtgctgtcggtgacctgcttcctgctgttccccctgcgcttcaccttcgaacggccggaactgggcggcgtgttcggctggctgttcgacgtgttgatggggttcgacaaaccgtacaaccaggcaccgtcgctgcacatcgccctgctggtagtgctctgggtctgctacgcgcgctacgccagcggcgcctggcgctggctgctgcatggctggttcgcgctgatcgggctgtcggtgctgaccacctggcagcaccatttcatcgacgtgcccaccggcgcgctggccggttggctgtgcgtctggctgtggccgcaggcgcagcccgcgccgttcgcccgcgccagcctgagccgcgaccggcaacggcggcggctggctgctcgctacggcctcggcgcgctggcctgcgccgccgtcgcctttgccgtcggcggtgcggcgttgtggctgtgctggccggcgctggcgctggcgctggtggcgctgaactacctgctgttcggcgccgccggcttccagaagggcagcactggccgcctgagcgccgccgtgcgctggctgctggcgccatatctgcttggcgcgtggatcaacgcctggctctggacccgtcgccggccgcagccggacgaggtgctgccgggcctctggctggggcgcctgccgtcgtccgcggaactggccgacggccgcttccgcgcattgctcgacgctaccgccgaactttcctgcgagccgcaggggctggcctatcgcagcctgccgttgctcgacctggtcgcgccggacgtcgaggactgccggcgcgccgccgcgctgatcgacgaactgctggcgcaagggccgctgctggtggcctgcgagtcggccgtggcggtgttacgccgggcgcgaccgcaagtgctgctgggcgaggcccagcggcggaccctcgcggcgttgagcgggagcgtgccggagccatcggcggaactgggcgaggtgcgccatgcctga

SEQ ID NO: 326048 - DNA, 996 bp, Pseudomonas aeruginosa
atgaaaacccgtcaactcggccacaacggcccttccgtctccgccatcggcctcggctgcatgggcatgaccgacttctacaccaccggcggcgaccgccaggaggccatcgccaccctgcatcgcgccgtggaactcgggctgaacttcttcgataccgccgacatgtacggcccgcacagcaacgaggaactgctcggcgaggccctgcgcggcaaacgcgagcaggtgttcctggccagcaagttcggcatcatccgcgaccctgccaatccccaggcgcgcggcgtcgacggcagcccggcgtatatccgccgcgccatcgaaggcagcctgaagcgcctcggtaccgaccgcctggacctttactatcagcaccgcatggacccgcaggtgcccatcgaggacagcgtcggcgccctcgccgacctggtgaaggccggcaagatccgccacatcggcctcagcgaagcctcggcggaaaccctcgaacgtgcccaccgggtgcacccgatcagcgcgttgcagagcgagtactcgctgtggactcgcgatccggaggacaccggggtgctcgccgcctgccgtcgcctgggcatcgccttcgtcccctacagcccgctgggccgaggtttccttaccggcaccctgaagcgcccggaagacttcgccgccgacgattaccgtcgtttcagcccgcgcttccagggcgagaacttcgcgaagaacctgaagctggtggacaaggtcggcgaactggccgcggccaagggcgtgaaaccctcgcaactggcgctggcctgggtgctggcgcagggcgatgacctgatcccgattcccggcaccaagcagcggcgctacctggaggagaacgtcgccgcgacggaactgcgcctgagcgcggcggaactggccgagctggatgcgatcttccccgccgaggcggtcgccggcagtcgctatagcgaggaaggcatgcgcctggtcaatctctga

SEQ ID NO: 326049 - DNA, 1086 bp, Pseudomonas aeruginosa
gtggccgacgcccggcatcgccgcctcgaacgccgccgaggacagcgccgcgccgctggcgccgctggtccagacgcccgaggtgatgatcgccaggccggtcaggctgcagatgatcagggtatcgatgaaggtgccgagcataccgatcaggcccgaacgcaccgcgctatgggtcgtgccggcggcctgggcgatgccggcggtgccgaggccagcctcgttggagaagatcccgcgtgcgacgccgaaacggattgccgccatcaccgctgcgccggcgaagccgccggtggcggcgatcggcgtgaaggcgtgggtgaagatcagttggaacgcgccgggaatcgcctcggcatggaccaccaggacgatcaccgaggcgacgatgtagccgacgcacatgaacggcaccagggcttcggcgaccttgccgatacggcggatgccgccaaggatcaccagcccggtgacgagcatggtggcgaccccggtgacccagtcgggcacgccgaaggaaacctccagggcatcggccatgctgttgacctggaccatgttgccgataccgaagccggcgagcccgccgaacagcgcgaaggccgcgccgagccaggcccagcgcttgcccagaccgttcttgatggcatacatcggaccgccgacgtgttcgttgcgctcatccttctcgcggtagtgcaccgccagcaccacttcggagaacttggtggccattcccaccagcgcggtgcaccacatccagaacagtgcgcccgggccgccgaggaagatcgccgtggccaccccggcgatgttgccggtaccgacggtggccgccaggcaggtcatcagcgcctggaacgggctgatctcgccgctgctctcgtcatccttgctacgcccctgccagagcaggcgaaagccgactcccaggcgcaccaggggcatgaatttcaaccccagcatcaggtacaggccggtgccgagaatcagcaccagcatcaacggcccccagaccacgccgttcaggtcgaccacccacttctgcaagctttccatcagcgatccttattcttgttcgaatga

SEQ ID NO: 326050 - DNA, 465 bp, Pseudomonas aeruginosa
gtggaggcgaacagctacagcgagttcaaggccgaggaacaccgcaccacccacgccgagcgcaaggtggaggtccgcgccagcgaccacctcaccgtagccaacgaccagcacctgaagatcgccagcggccagttcgtcgaggccggccaggagatccacctgagcagcggtctgaaggtggtgctggaggccggcgccgaactgaccctcaagggcggcggcagcttcctcaagctcgacgccagcggcgtgaccctctccggggccaacgtccgggtcaactccggcggcagcccgggcaacggcagcggcgcggcgccgctgttgccggggccgctgcggcaggccgacagcgacaaggccggcgccctcctcaccccggcccagatcaataccctgaagcgcaacgcgcccttctgcgaagagtgcgagaagtgcaaggacggtgcctgtgacctctga

SEQ ID NO: 326051 - DNA, 825 bp, Pseudomonas aeruginosa
gtgacctctgacgccctctccccgcgaacctggccggcctcgacgaactggccgctggcgatcttcaggtgcgatggcgtcagcgtcatggaactgccgcgcaagctctaccaatggagcgatactccgaccttcgagccgctgtaccgcgacagccgctggcaggaactgctggacctgtcgccctgcctggtcgccctcgacggccgccaggaccctatcctgcaggcgttcctcgacaacgccgcacaggaatggggctacctgctcttcgcccgcgtcagcttgccgatcctgtcgcagcacctgcgggaccttctgtgcgtccaatctccccatggcgagccggtgctgctgcgcctggccgacccggcagtgatgcatagcctgctggaacatgaacgcatggaactgttcggtccgatcgagcaggcatgtgctccagatgccctggaaatccgctggtggcaacaccggcgaagcggttcggcgatcgctcgcgaccgcacgcagccctaccgtctgagcgaggccgaattcgatgcacttggcgaagtcagcttccgccagaccctcatggacatggatcgccacatgaatctgtatttccccggctatcgcccggccctgtgcggccgagagcgcttccagcacctgcgtatgctggccgagcaggcctaccgtcgtgggatgtgctcggcgcgggacatcctgctctacgccaatatcttcggctacctgggcgaggatgcgctggacgcgcatgcggacatcgccgtgctgctcgatggtccctccagccaatccccaaggatgcattcatga

SEQ ID NO: 326052 - DNA, 837 bp, Pseudomonas aeruginosa
atgctcgtactgcgggagtacctgcgcagtcaactcgccgagctgggtatcgcggaacagcggcggatcctcccagacgtagtcgcgtcgttcgtccggatgggcggcgggtggactggccgggcgctgctggtggggcgggaagcgctgctggccctgctcgtcgcgatgcaccttgttctgcaccacttcggccagccaggtttccgcctgccgtcgggtcagcagatgcggccccccctgctgcgggtcggcgcggcgcagatcgacggcctgcatgaagtgctcgcggtccttcggactggcgagcacctgcatgcacttgcgcgcggtccattgcagctccgaataggccacgtacaggacgctggtacggggaaagaccagttggggctcgccgaccgcgcggctgcgtacgtcggcgcgaacctcggcgtcctgccacagcagcttgtcgatagcgcccttgtcgatgcggtattcgtgcagctttccggttccgccgtcgatcacgtagagatagccattgcgcaccagccgcagacccagcggccggcttttcagggcgaaaggcatcgccagctcggcgctcggatcgacgccttcggtcaaaccgtagcgcagcggcaacagctgcaccttggcgttcatcaacggacaggtgccgctcggcgaacgactatcgctggacgaggcttcgtttgccgccaggttggcgctgtctcgccggggtgtggcctgcgcagtcatgaatgcatccttggggattggctggagggaccatcgagcagcacggcgatgtccgcatgcgcgtccagcgcatcctcgcccaggtag

SEQ ID NO: 326053 - DNA, 1383 bp, Pseudomonas aeruginosa
  misc_feature (31)..(40): n is a, c, g, or t
atgacgcgctggccaaacttggcgccatgcnnnnnnnnnnacgcgctgcatggcgccaagtttggccagcgtggcatcgacgacctgatcgaccgtcccgccatggattccttcctcgccgccaacaggcccaacctggcgcgctggaacgccctgctcgagcagatcagcgcagaccgcacgcagatgcttaccgagcagcgattccatcgcgccgcctggtactacgatttccagcaggccgagcaattgggactggccttcgccacccagtacgcctgcctgaaggatatctgccgcagcgacgaggccagcgaggccgtgctcgccttcctggaggaaaatccgcaatacgatcgcccattgttccagactctgccgttgaacacccaggccgaactgatcgcgcaatacgcgcagctcgggccgcccggccatctctggctctccaagctgaaagagtgggcgcagcagcgcgactcgctggagctgggcaagctgcccgctctcgacggcttgccggaggccacccgagcgcttgccgacagcgcccaggccacgctcaacccggcgttgaccctgggcatcagccggaccatggagggcttcttcaagagcgtaggccagcagcaggcgccggatctcgacgcgctgttccgcaagctgcccaaggcccttcccggtcgcctgctcgacgccgcggtccgcgaaggggtgaccttcaccattgccagcgaagcggaaaaggccatcctccaggccgacctgaaggaagtgctcgaacagcgcgcggaactgcgccggctggtccgccagcgcaagcaggtgaagagccaggccggacacaagtcgacggacgcccgcgccttgctcgccgacatccagcgtgtccgcctccagctcaacgccctggagccgcgcctggccgccgccctcagcccgatcgccgagcttccggacaacagcatccgtctcgccggtgcgacaccaggccgcgccggaatcaccttgatcctgccgtctgcacagttacaggaagttgccagtggtatccgtaacctgcgcaatggctatagcagtgcagccgcgttcaataaggtgggggatggaattggtctggctgtgtttgtggcgcagtttgtcaatatggtgcaggtatggcggggggttatcgcgacttcaccggataagcgtgagctaatgccgctggctggttctattttcaccacaatatctgcgggcgtagcggcagctcaggccattgccgatacagctcttcaggccagaagtgttcagttggcacaggggctgcagaaccacgctgtggaagttgctcatgtacaaatgggaaaactgcacttacgcccgcagatattgtggtga

SEQ ID NO: 326054 - DNA, 327 bp, Pseudomonas aeruginosa
atggtgcgttggttccccgtcaccgaagttgtcggcgacagtctacaggtcgcgtccgccgaaccgttggtgttgctggtgccgcggctagcgccgctggagggtgtgaccgggggctcggtcacggaggatctattactggctgtacagatcgaacgactgaacccgcagggtcaatatcatgccgatcggcacatggttcgcctgtcgccacacagcgaaggagactatcctgcttcgccacaacgtatccaggggcaggaagcatcctggatgctaattgacccccgtttgctgccggattttgccgatgctccagaacgataa

SEQ ID NO: 326055 - DNA, 858 bp, Pseudomonas aeruginosa
atggtcggcacgcctttgttaggtggtgatataagcacggctaaacagttggctgtagggttgtttgatataggaataacatatggctcggggtgtgcgctgtttggctttcttatcttgttaagtgcgtggtggtccaatcatataaagtataaaaagatcatccctactcgcttcaatcgccagcgccgcgaagtttgcttcgtcccagaaagccactccgcccccatcttcgtcccctgggagtccctatcggcctgggtgatccaggcccagggtgccacccagtacggcatccagcgccaatacggcatgggtgtgggcttccatcatgccgccagcggcgaggacttctccctggagttcccttgtgccggcctgcctctggccatcgccaactgggaggccatccgagcctatatggagcatgaggtgcacagcctcaaggagatccaggacccactcgacctgcaaggcccggacgacccgcctcacgaggggctgcacaccttccgcaatgcccgcgctcgtgctcatcgtcgctaccgggagggtgaagtagggcgttggtatatggtcggttggtatctctaccacgcaatggatttatggacgctgccattccatctagtcgaatgggaaatccgccgggtcaagcgcatgcaacgccaggagttgcccgaggccatgcgtgcctggtcacagcccctgccatccgaacagtgggtcaggcccagcgaggagctgcaacgtcagagtcaacgggtgagggccttgcgacagcgtgatccgcaacgctcgatcatcgagatatttaccgaggtacggcgagaggcttcggcgactggcgtgcgctga

SEQ ID NO: 326056 - DNA, 1209 bp, Pseudomonas aeruginosa
atgggccgtggcgccaagggcgcgggccagttcggcgctgcgttcggcggcttccaggtcgagatcggcggcgagcaggctggcgccgcgctcggcgaagctgagcagggtcgaacggccgatgccgccgccggcgccggtgaccaccaccagcttgccgctcatcgagcgcgcgtcggggcggacctgtgcgcgttgcagggccggcggcgactcgccggtttcctgggcgtcgatgaactcgccaagccagccggccagttgctccggctcggccagcagttgccaatggccgacgctcgcctcgcgccgccacaggcgtggcgcccacaggctgaggtgctggaacagctgggcgccgacgtaacggtcgcgggtcggtacgatcagttgcaccggcacttcggtgtggcgcttgcgcggacggaacaggctgcggatgaagttgccgcggtacagcttgaccccgtgccggccgtcgctggcctgggtcgggttgacctgtggatggcggacgccttcggcgcgcttcaagaactgcggccagagccgggccaggccgacgctccagagcagctcgggtacgacgggggtatggaagaaggcgatgtaccaggagtggagcaactggccgaataccgctttcagggccttcggactgcgctgcctgaggtgttcgcgcatccagaagccgacatggtccaggcagggcccggagatcgaggtataggacgcgatcagcgggcggcactgcggatcggtgacgctttcccaggtctggatcgagccccagtcatgggccagcaggtgcaccgggcgatccgggctggtggcgcgaatcaccgcctgcaggtcttcgctgagccgttgcaggtggtagtcgcggctccagcgtggcttgtccgaagcgccggcgccgcgcacgtcgtaggcgacgatgcggtagcgcccagccagttggcggatcagcggcagccaggtctcgtggttgtccgggtagccatgcaccatcagcagcgtcggcttgtcgttgtccggcgcgccccagcaatgaaccgccaggcgcacgtcgccggactgcacgaacagccgttccggctgcaggtcggggagggcgaggagcgcgttcatgcggcctcccgtgcttgcggcagcaggccgcgcgcctgccagcggcggacgtgcggcaggtcgtcgtcgagccagtag

SEQ ID NO: 326057 - DNA, 915 bp, Pseudomonas aeruginosa
atgcagcagattcatgacctacgccgtatcgacctcaacctgctggtggtgctcgacgcgctcctcagcgagcgccacgtgtcccgcgcggcgcagcgcctggccatgtcgcagccggcggtcagccacgccctcgggcgtctccgcgaactgttcggcgatccgctgctggtgcgggtgaaaagccgcatgcagttgaccagcctggcgctggagctggcgccgaagctccaggccagcctcgaccaggtgcgcggggtgatcggcgggccggccttcgagccggtgcgcagccggcgccacttccgcctgggcatgtccgactacggcgcctgggtggtgctgccggcgctgctgcgccagcaacaggcgctggcgcccggggtgagcttcgggatagtccaggaaccgcgcctggaaaccgcccggcaggtcgccgaaggacaactggactgcgcgctgggggtattccccctgcttccggagggcgtgcgcgccaggcgcctgttcgaggagcgtttcgtctgcgtctgtcggcgcagcctgttcgaccgccccgacggcctgtccctcgaccgctacctggcggcccgccacgtgcgcgtctcgctacaggacaacccggccgaggaagtcgacagcgccctggaaaagcgcggcctgcgccggcaggtagcgctgaccctgccgcacttcaccgtggccccggcgctgctggccggcaccgacctggtactgaccatcgccgagcgcatcctcgaacgcctgcggttacccgaggaactggcggtctgcgagccgccgctggcgatcccgcgcttcgactacgtgcagatctggcgcggcgacgccgagcgcgaagcggccggcgcctggctgcgggaacagatccaggcggcggcgcggaagatctga

SEQ ID NO: 326058 - DNA, 1140 bp, Pseudomonas aeruginosa
atgaaacggcacacaaccttggcccgctatttcgggtgtgccctgctgacgctcagtgtccaaggatgcgtgacctgggttgatgtggagaaattcaagcaacctgcgcctgaccccaggactcccagcgaagtgccatcatcgagccagaaggggtttcggtactcgatgccggagccctacctgttggtcaagcccaaggccgatggcactgcaacctacgagtgggtcttcctgcctgaccggaacaacgagtacgtggtagcacccaagtccctctttgccacctacaagatgacggtcgcgaccgagaacggctttctaacgtccgccagctttgatggcacggcgaacgaggtggcgagcaagctggctagcgtcgttggcgacgtgaatgcagcaaacaagacatcggagtcggctgcccagaaggccattgagcaagcagcccagaccaaggcagcagcggatgagacggctttcaacaccaagctggcggctgcgcaaaaggcagtggccgatgcggaggctacacaaacaagtgccgaggccgaacttaagttttacgagtcggacgctggcaagggcgcaaaggacgaggtgaagctggcggcccagctcgcgaagcagaaagcggacgcaacgctcgctttgatgaacaaacgcctccaggacttgcttgtcagcagcagtggcgcaaaggacgccggcgctgccgagccaggcattaagcacgccatggggccggtactgttcaagctcgtgcagacggcgaactcggtctccctagtgcaggtcgacatccagcgcaccttcgagacttccggcacgccggccaaggagacttcaccacccgctggagcagcgcctacgctcaccgcgaagaatgtgagcaataccgcaggaacaacggttgtcgacttctcggcatcggccgcaatcgagatcgtcaacgacgctttgctaactttaaacaaggggaatgtcgcctacgacaagtccaaggttgtctacaagaagggagccggggacaaacagtaccaggccaccttcaagcccacgctgcctgcgggcaaatacacgctgctggtcgtgtacgacaaggacaagtcggcgcagctggagttcaccgtcaagtga

SEQ ID NO: 326059 - DNA, 300 bp, Pseudomonas aeruginosa
gtggatcaggttgaagacgtggccaacctcatgcacgctagtgaacgccacttgccgatcaaactcagcgccggctcgggccgccgcgatggccccaaggaatacgacgcagccttgccgcggaacctgcgtgaacatgtcgacggcctgatcctcgggggtgcggaagcccaggtcaaacatgagtccgaaaatgcgcggggccggctgatagctatgtgcgaacaacagcccgatgttctgcaccggaagctgcgtggtgttgccaagaacctgtgccagcgcctgatgcagacgtag

SEQ ID NO: 326060 - DNA, 1191 bp, Pseudomonas aeruginosa
atgtaccgtacgattgatgttcatgtcgatgagtccagttggcctggcgtcggcaagactccaagttttccacctgctttcacagcaggtaccaataatttcaatctgaatatcaacgcgatgttattgatgatcggttacttgacaacaccgacatctgtcactggcgtttcgcttgcagagttctgggcgtgggttaggtatctggcagcgatcaccccccatgatgcggatctgcgtttgacaagaagttatgcagatcttgatgcgcatcagaaaaccattctgagcgatgacttcggaatgggagtgccgatcgtctggctcattaaacatttgccattggttgaaattgttgatggccgctattttttgcaacgctatggtgcgagacatggcgcacaccagcatcgcacggcaaagcgaggaccaaataagacgcctgacttcgtggcgcgagaccgcgatggcaactggcacattttagaatgtaagggcacccaatctggcgaggctttcaggaatcgtcaaatcaattcgggcgtatcccagaaactctcaatcatatttccgtctggacatacaggccaacggttggtctcaggtcttagtataggcattgaagatggcaattcaagtcacctgaggatcattgatccagtacccgacgatcccgtaacaattgctgaaagtgaactggagtttgctcaagatgcagcaacccgtggcgtaatggctaaactgcttcggtcgacaggtttcgaaatttcggcagaggctgtagctgcaccgttcggcaaaccacaagctatgcctccctcgaaaagaaaggcggataagaaacgcgtcgagtacatagcagatcgagaccgtcgtgcacgagaagagctgttggaaagcacctcaagagatcatcttttcaacggtcgctatcgcggtcgtgaggttactttccagttgccgaggccaatctacattcgtgacgtggcgatttcaaaagttactgtaagacaaggtatcaacctggatgcactagacctgctccgtgagcaacctaccatcgatgcgctggttgacccatcccgcaacaattggatcgacatgatgggcacaaacatcatcagcgatgacgagcaagccgcgacgttgcagatcggggatattttccggtccgagatgattcttgaatga

SEQ ID NO: 326061 - DNA, 2442 bp, Pseudomonas aeruginosa
atggatgatcggatgtcagacaagccgctcggccgcttgttgctcgaaggcctcggcgagatcgcctggatcgccgtgctggtggcccttggcgtcctcctgccgttgccgctggtagcgctgggttgggcgctgctgctgggcgccgagtgggccatggatcgttggcgcggcaaggtgccgtatcgcctgcaacaggcgctgttcttctgggttctgggtggcggcatcgccctgggccaggcactgccgggcttctggctgggactgggcggtggcttgctggcggtgatcggcggcgtgctgctgcagatccgtttcgagcgtggcctgcgcctggagcgccaggctccgcaggcgctggacgtaccgctgccggcgggaggtagcgcctggggcggcgaagcgcccgagcgaacccccgagggcgaggcgatccgcctgttcgacggcggcgagatcgccatgggcggcccgctggtatgccactacctgatgcccgacggttgcttcatccccgactgcaatccttcggcacgcttttccagcgatggccgccacttcgtttcgccgataccgagccgaggcgcgtggggcctggcgatcttcgaccggcaggagcggttgctttaccgctgtgccgtggacaacttctgggagctggacagcgtcaccgagcgcgaggtgatcggccggcacagcccgctgacgtccaacgcaccgcagcgcctcgagctgcaggcgctcaaggccggcagcgaggccgaggccttcgttgccatcggtgacctctggctgcccgaaagcgaatggcagcgctggagcggggatctgcgcgcgcaaccgctaccgtccccgcttggcgggcccgcgctggaaatccgcccctggctgccggccagcctgctggccctggacgatcctttcgcgccgctgcgcgccaaccgcggcgagctgtggataaacggcgaggccagcggcctctacctgtcgcgggaagcgccgccattggcttggaacgatgacggccgggcgctggcgctgcaggcagcaggcgagcccctggggcaggatacctactggctttggcgagaggacggcggcctgcgtgcgctgggcgcgccgtggtcggcgttgcccgccgagccccatgccggtggacccgaactgctcgggctggaggatggctggctgcgtttcggcctggacctggcgcaaccctgcctgacctacgaacgctacggcacgctgggttcgtacagccattccagcctctaccttctgcacgctcgcgatgcggacgaccggccgcgctggcgcgaggccgacatgccgcgcctggacctgttgctgcccctggatggcgcggccggcaggccgggatgcctgttgcagagcgcaccgctggccgatggcagccgggccgtctgggagtggttgcgcgacgatcaggaggcggagcgcggcgcctatgccttgcgcctgggcgactggcgcctggatggcgagtggacgctcgaccaccgcgtgtccgattgcggtcgctacctggccctggtggccttcgccgaggcgccgaccctgccgcagcgcctggccatactcgatagccgggagcggcgtctggagtggctcgccgagccgctggccgatctacacctgcaaggtttcatcgatggccatgtgcatctgctccacctgctcggccgcaacgcctaccagccgccgggcgggccgggcgaaggcgaccccggcctgttgcgccgcttcgacgaaggcttgcccgagcccggcgcctggcacgcattcggccgcttccacgacgactggcggcattactacgagcaggcgcgggtggcgttcgatggcacggcctggcggctgtgccccgcgtcgcgctggctggacgcaccgccgcggccctggagcgacggcaacttcgtcttgccgtcggtgggcgcgaaggacgccgcctggggcttcggtttccactacgagggcatgcaccgcgacgaggacgtgcgcgccgggttcagccgcgatggctacctgctgaccgcgtcgggcatcggcttgggcaacctggcggcgccaatgatctggtcggcggacggtcgctacctggcgctgacccggcacgtccagcgctacgaggaaagcgagctggagcgggaccagtggcgcctgctgctgctcgacgtgcaagagcggacgttgcgtcgctaccgcgacgacctcggcgagtacccgtgcttcgacagcttcgacgacgacctgtgcttccgctgcgcggggacggggcgctacgtgctggccctggactcgctgctgaaggctcccgccgagtcgctacaggcctgcgccggacgctggctgccggccgaggaactgccgcggcggcgctactgggagcgcctggcgtttccctcgcgccctcagtag

SEQ ID NO: 326062 - DNA, 1011 bp, Pseudomonas aeruginosa
atgcaagtactgcgtacatgggcggccaggggcgtccaatgggtcggcgtagccggcgtcattggcctgtccggggcggcccaggcgggggactacgacggctcgccgcaagtggccgagttcgtcagcgaaatgacccgcgactacggcttcgccggagagcagctgatggggctgttccgcgacgtgaaccgcaagcagtcgatcctcgatgcgatctcgcgcccggccgagcgggtcaagcagtggaaggaataccggccgatcttcatcagcgacgcgcgcatcagtcgtggtgtcgacttctggaacaagcatgccgaagacctggcgcgggcagagaaggaatacggcgtgccggccgagatcatcgtctcgatcatcggcgtggaaaccttcttcggccgcaacaccggcagctaccgggtgatggacgcgctgtccaccctcggcttcgactacccgccgcgggccgacttcttccgcaaggagttgcgcgagttcctcctgctcgcccgcgaacagcaggtcgacccgctcagcctgaccggctcctacgccggcgccatgggcctgccgcaattcatgccgagcagcttccgcgcctacgcggtggacttcgacggcgatggccacatcaatatctggagcgacccgaccgacgccatcggtagcgtcgccagctacttcaagcagcacggctgggtcaccggcgagccggtggtctcggtggccgagatcaacgacgagagcgccgagagcgcggtgaccaggggcgtcgacccgaccatgagcctgggcgagctgcgtgcccgcggctggcgcacccatgatgcgctgcgcgacgaccagaaggtcacggcgatgcgtttcgtcggcgacaagggcatcgagtattgggtcggtttgccgaacttctacgtgatcacccgctataatcgcagcgccatgtatgccatggcggtttatcagctggcgggcgagattgcccgcgcgcgaggtgcccattga

SEQ ID NO: 326063 - DNA, 642 bp, Pseudomonas aeruginosa
atgcactcgacgcccaagcgcgttctgctcgccggcgcgaccggtcttaccggcgagcacctgttggatcggatattgagcgagccgaccctggccaaggtcatcgcccctgcccgcaaggcgctggccgagcatccgcggctggacaacccggtcggcccgctggccgagctgctgccgcaactcaacggcagcatcgataccgccttctgctgcctcggcaccacgatcaaggaagccggctcggaggaggccttccgcgcggtcgatttcgacctgccgctggcggtgggcaagcgcgcgctggagatgggcgcccggcattacctggtggtcagcgccctgggcgccgacgccaagtcgtcgatcttctacaaccgggtcaagggcgaactggagcaggccctgcaggaacagggctggccacagctgaccatcgcccggccatcgctgctgttcggcccgcgcgaggaattccgcctggccgagatcctcgccgcgccgatcgcccgcatccttcccggcaagtaccacggcatcgaggcctgcgacctggcccgcgcgctctggcgcctggcgctggaggaaggcaagggcgtgcgcatcgtcgagtccgacgaactgcgcaagctggggaaatga

SEQ ID NO: 326064 - DNA, 1140 bp, Pseudomonas aeruginosa
atgcgcgcactcctcacccacgcctggctgttcctcggcaaatggctcggccgcctgctcctcctcctgctggccgtcggcctcggcggctgggccatcggcagcctctactacgcctggaaattctccggcccggtgtccgcggaagagcagatcgccccggacgaagcccgcatcacccaggcgatcatccaggacgccatccgcgtggtcgaacagcaccgcgacaacacccgcgtcctgcgcgatgcccacgccaaggcccacggctgcgtgaaggccgaattcaaggtacgcgccgacctcgacccgaccctgcgtcgcggcgtgttcgccgaagcgggcaagagctggaacgcctgggtgcgcttctccaacggcaacgcctacccgcagttcgacagcaagaacgacgcgcgcggcatggccatcaagctgctcgacgtgcccggcgaaaaactcctgcccggccgcggccatgacggcgagcaggacttcgttatgttcaaccagccggtgttcttcatccgcgacatcgccgaataccggcagaacttcgccgcccaggccgacggcaagaaagccctggccttcttccccaactggaaccccaccagttgggaactgcgccacctgctgatcgccctgcgcaccctcgcccccgccccggacagcccgctgcacgccggctacaacggcatctcgccgtacaagctgggcgaacacaacatcaagttccgcgtcgtccccgccccggagaagtgcccggcctaccagctaccgaagcagaaccaggacctgcccaacttcctccgcgccgccctgtaccagcaactctccatcgaccgcacccccgcctgctacgccttccaggtgcagcgccaggacccggccaagtacatgcccatcgaagacaccagcgtcgaatggaaggagtcggacgcgcccttcgctaccatagccgacatcattgtgccagctcaggatttcgatagccgggaacagaacctgttctgtgacaacctttcgttcaacccctggcacgcgttgccggagcatcggccgatcggcgggatcaaccggttgcggaaggcggtttacgaggcggtcagtgggtataggttggggaggaatgggtga

SEQ ID NO: 326065 - DNA, 1098 bp, Pseudomonas aeruginosa
atgaacctgaccctccgcccggccggcacggacgacctgtccgccctggtcgagctggaaaaccgctgcttcgactacgatcgcctgtcccgccgcaacttccagtggatgctcacccgcgcccacgccagcctgacggtagccgagggcgacggcggcgtgctcggctacgccctggtgctgttccacgaaggcacctcgctggcccgcctctactccatcgccatcgacccgcgcgcccgcggcatcggcctcggccagaagctgctggaagccgccgagcaggccgcgcgggacaacgaccgcgcctacatgcgcctggaagtgcgcccggacaaccgtggcgccatcgccctctacgagcgcaacggctaccgtcccttcgccaccgtgcgcgactactacgaggaccacagcgaagcgctgcgcttcgagaaacgcatccgcaaccccggccacgaccagcgccgccacgtgcccttctaccggcagaccaccgatttcacctgcggcccggcctgcctgctgatggccatgggcgcgctgcaaccggagcgccagttgacccgccgcgaggaactgcgcctgtggcgcgaggcgaccaccatctacatgaccgccgggcacggcggctgtagcccccagggcctggcgctggccgcctggcggcgcggcttccgggtcaagctggtgctgtccgccagcggcccgctgttcctcgacggcgtacgcaacgaagacaagaaggcggtgatgcgcctggtccacgaggacttctgcgaggaactggacgcctcgggcgtcgagcagaagcgctcggccaggctcgacatcccgcgccagctggccaggggcggccagccgctggtgctgatcagcagctaccgcctgacccgctccaaggccccgcactgggtgctggtcacccactacgacgaggacttcgtctacctccacgatcccgacgtcgaccacagccagcaccgccagccgctggactgccagcacatcccggtaagccacgccgagttcgacaagatgagccgcttcggccgcagcaagctgcgcgcggcggtgatcctgttcaacccggaatga

SEQ ID NO: 326066 - DNA, 270 bp, Pseudomonas aeruginosa
gtgaaaaatctactggagcgcgacttcaccgccctggagccgaagcgcaagtggctcaccgacatcacggaagccgccacctttgagggcagactattcctgcgcgtggtgctcgacctgtacagcaagctggtgattggctggtcgatgcatcatcgtcaggatcggcagatgacgacccgagcggtgggaatggcaatctggcaacgccagggcgattggtcagtaatactgccttcggatcgtggcagccatcaccagtgctgctga

SEQ ID NO: 326067 - DNA, 1080 bp, Pseudomonas aeruginosa
atgaattcagccaatggaatcgacatacccgcctctccagccggcgagctggcactgacccccgaggcgctcgccgagacactgagggttaatgcgcccagtggtcctgtcaccgtcaaaggcatggccaccgatgtgaagtactggtcgaggaatggggacgacaaggttctcaagatatatggccgcctggtactgggggatgccagtatccgcttcgaattgcagccccacgctgctgtccgcaatgatgctcccgtcgttctccatggctcactgcgcatcaagaagtcggagacattccgcacgacccacgaagtcatcctggtgggtgatgtcgtcggtagctgggtaccctatgagccggtcccccttgtgtcacccgcccccctggtacgccagcaaccgcgggtgtccctggaggcggcactcgccaaacacggactggaagccatcgctatactcgccaccggcacggcctggaacgacctggcggcagcggcacaatcgctccccgtcttctcccactgtcgcagggtagagacgaatttcatggagcccgagcagttcctaagcgacctggccaaggtatgccaagaccccgccattcaagtgctggtgattgctagaggcggcggtgatagcctggaagtcatcggagattcacgggaggtggcctgtgcgctattggcctgcgggcgcccgttctatacggctctggggcacgacgacaatgtgatgttgctggacaagcatgcggaccggtcgttctccacaccgtccatcctggggcaggcactgatggagaccgcccgcgacatcacacaacggcaggagctgcaggagagcctgggcaaattcgcccaggaaaacgcatcgctgaaagaacaactgctccaggcgaacgcccgcctggagcagaacctggccaaggagccgtcggccattcatgaggcggacagccaaaaaggaatcgtcgcgcaagtccctgtaccagcgcccacccctgaaatgcgcaggtacgtcatatgggcgattgcgcttctggtggtctttgccatcggccgttgctcgacgtga

SEQ ID NO: 326068 - DNA, 294 bp, Pseudomonas aeruginosa
atggaattcataaaaaatctcttgagcacgctgctactgctagctgtcctcggctttcttctgcgaagggtctatctggtcatcaccgaggcgagccgcgtggccaaatcaacgatgacgctgccggagtacctcaaggcctacccccattgcaaaacagcccatggaatccggtgtgcagcctgcaactcaggcagcatcaagaactggggcttcaacagttccaccgatacacggcgagtattcatatgcaatcagtgcaactcccgactgtatcgagcgggagactggtga

SEQ ID NO: 326069 - DNA, 1197 bp, Pseudomonas aeruginosa
gtggccagaacgacgctcgaatcgatccagcacgccatcgaggtgaattcgtccctggcccttcccatcgccctggagaatctctcgcgtctgacccacctcgcgctgctgaccgtccccttcaacctgatccacattctggtgttttccctgaaggacttccgcccggacctcggccatcagctctggcgccaggaaatcatgtacgcccatggcgccatggccctgctcttcggcggcatcggcctgctcgcgctatggctgcgccgccagccacccaagctgtggcgcatgcgcctgctgatcctgctgggcggcgcagggatcataggcttcggcgtcgccatcgcctgcatcgaccagcgcatcaccagcaacatcacgccgctgctgctggcctgtttcgcctgcgccatgttcatcctgatccgcccggcctacgcggtgcctttctacggcctggccatgctggtcttccaactggcgatgggctacgcccaggccgacccgcaactgcgcctgtcgaaccaggccaacggcctcaccgcgttcggcctcggcctgctgctgtcgctgatcctctggcacgggcacgtgcgcaacctgcgccagcaacgcaagctggagttgcagcggcaggagctggaggagaaaaatcgccagttggagtacctggccggtcacgacccgctgaccggcctgttcaatcgtcgcgaattcgaccagctggtgctcatggaactcgcgcgcatcgctcgccaaccgcagccgctgagcctgctgatggtcgacctggatcacttcaagtacatcaacgaccgctatgggcaccccttcggcgacgaggtcattcgccatgccgccaacctgctgcgcggcaatacccgtagcagcgacagcgtggcgcgcctgggcggggaagaattcctcctgctcctgcccgacaccgccgagcagcaggctcgcagccttgcggaaaaactccgcgaacgcctcgaaggtaccccgctggcgacgcaggacggcgtgctctgcctgaccgccagcttcggcgtggccagcctcgacggaggcggccaggccagctacgagcagctctacagcgccgccgaccaggctctctaccgggccaagagcagcggtcgcaaccgggtcgaagtgattcgcctggccagcctcgcggaaagcctgcggtaa

SEQ ID NO: 326070 - DNA, 1236 bp, Pseudomonas aeruginosa
atgcagagcgctaacgcttcagaactcaccaccgacatcgccgtgatcggcggcggcgcggccggcatcggcgtgatcgccagcctgctgaaacgttcgccggggttgcgtatcagcctgatcgagccggcggacacccactactaccaaccgggctggaccctggtcggtggcggcgcctacgcccagggcgacaccgcgcggccgatggccgggctggtcccgcccggcgtggagtggctgcgcacccgtgtcgagcgggtcgaccccgaggcgcgccggctactgctggagagcggcggcagcctggaataccgcaacctgatcgtctgccccggcctgcgcctggcctgggagcgcatcgagggcctggaggagaccctcgggcgcaacggcgtcacctccaactaccgctacgacctggcgccctacacctgggagctggtgcgcggcctgcgtggcggcaaggcgctgttcacccagccggcgatgccgatcaagtgcgccggggcgccgcagaaagccatgtacctgtcctgcgaccactggctgcgggagggcgtgctgcaagacatcgaggtcgagttcgacctggccggcgcggcgttgttcggcgtcgccgatttcgttccgccgctgatggaatacgtgcgcaagtattcggccgagctggcgttcaattccaacctggtgaaggtcgacggcgcggcgcgcaaggcctggttcgaggtgaaggacgccgacggcaacagcaatctggcggaaaaggacttcgacctgctgcacgtggtgccgccgcaactgccgccgaccttcgtcgccgccagcggcctgggcgacgcggccggctggtgcgaagtcgacccggcgaccctgcaacatgtccgccatggcgagatcttcgccctcggcgatgtctgcggcaccgccaacgcgaagaccgcggcggcggcgcgcaagcagatcgtggtggtggccgagaaccttctcggcctgcgcagcggccgtggcctgccgctgcgctacgacggttacggcggttgcccgctgaccgtcgagcgcggccgggtggtgctggcggagttcggctacgccggcaagctgctgccgaccttcccgctggagcccaccgcggccagccgcttcgcctggctgctcaagcgccacgtactgccctgggtgtactggaacgccatgctcaagggccgggagtggctggcgcggccggggcgctag

SEQ ID NO: 326071 - DNA, 1236 bp, Pseudomonas aeruginosa
atgaccgacgaaaccgcacccaaggatcttcgtgatcaggcgccccggctactcccggcacgcctcatcgagaacgacgcccaggcgttgcaggccgcccacgaggtagccggactggcccgtcgcgaagcggcgctacgcgaccgcgaacgacgcctgccctggcaggaactggaactcttcacccgcctcggcctgggcggcatcggcattccccgcgcccatggcggcgcgcaggtttcccacgtgaccctggccgaggtgttccgcgtcatctgtgccgccgacccggccctcggacagattccgcagaaccagttcggcctgctcagcgtgatcgacaacgtcgccagcccggcgcagaaacgcaagctgttccgtggcatcctcgacggccgccggctggccaacgccggcccggagcgcaatacccgccatacccttgagctgaaggcgcgggtccgtcgcgacggcgacggctaccgggtcagcggcgagaagttctactccaccggcgccttgttcgcccactgggtggcggtcaaggccatcgacgaggaagagcgcgcggtgatgctcttcgtcgagcgcggcgctcccggcctgcgcatcgtcgacgactggtccggcttcggccagcgcaccaccgccagcggcacggtactgctggacgaggttccggtagccggcgacatgctgatccacaacggcctgctggccgagatcccgagcctccagggcgccgtctcgcaactgatccaggccgccatcgacgccggcatcgcccaggcggcgctggacgacgcccaggcgttcgtccgcgaacgcagccggccctggatcgacgcccaggtcgaacgcgccagcgacgagctttacagcatcgccgaggtcggccgcctgcaaatcgagctgcacgccgccaacgccctgctggagaaggccggccaggtcctcgacgaagtggccgcgcggccggtggacgccgagtcggcggcacgcgcctcgatcgccgtggccgaggccaaggtgctgagcaccgagatcagcctggccgccagcgagaagctcttcgagctggccggcagccgcgccacgctcgccgagttcaacctcgaccggcactggcgcaacgcccgcacccacaccctgcacgacccggtacgctggaaggtccacgcggtcggcgactactacctgaacggcgcccgtccggcgcgtcactcatggatctga

SEQ ID NO: 326072 - DNA, 258 bp, Pseudomonas aeruginosa
atgactactcatctgatcaccctagtcatcaagcagccgagcgacgctcaggcacgccaactcatgtaccaggagttgctcggactgatctcacgctacggcggtgaggtgacgtccaaggccttggaggacgagtcgaccctctgcgagctgctggtgcagatgctgcctgatcatgaggtagagcaagccaggaaacaggtgctcgaacttcatgccaagggccgcctgcaggcgccggcaagcctgaaggtgtaa

SEQ ID NO: 326073 - DNA, 363 bp, Pseudomonas aeruginosa
atgcacgaaggtatcgaagccgtacccgatggtgatatgcccctgaactattgcgacggttttcgctctctgcccagcagcgagttcattacgagcgatgaaatcagtatttatctcctgtccatacaggaactgcatattggcctggagggcctccaccttctcacctttgtctccatcctgcatatcttgaaccatgttgatggcttgctgatttatggtggcctgatactcctcaaaggtgatgctattaggacgaacgcccatctcaacaggtgttctcagtgtggtttcatgaattttttggtaaatgtcgcttactgcaatcgggcgacctgccaggttggatatggcactcgttaa

SEQ ID NO: 326074 - DNA, 807 bp, Pseudomonas aeruginosa
atgattggccggcagtcatccatgaacttagaaactggaatggtgtaccgaatgatcctctccagttcattacaaaacgattggaagagcgagccaagtatctggcaatatccttcaactatgagcaatgaggatatggatatgaacaacacagtgagcgaaacgcaacagatcaatatttaccaaaatccggggcagtctatttccggtctctacaaggggctggctaaccagtgctctcctggccagccatttccagaggtacagcttgtggaggcttgggatatccctctcgtactccatccggagtttgtgcctaacggagatgtctcgaaaatcgataaggagtacggaacgatccttgctgctgagtcagctcaggttatcctgcttcaactccaaatggctcaagacaaggctaaggcgtgcggggaggttacagccttgatcagttctgtctcctccaatctcaataccattaagagtcgtcatggtgctaattatctaaacctgctgaaacaatcaccgaaccgatacccgactagcgtcggagttgagatcatgtcaggtggcagtccgaaccaggattctggaatcgaggtctcttacggtgccagtctcggccgtctaactcaatcacaacttcaggcgatgaatctgcctgccagtctcaaacagttgctcactcagggaatcggtgtgaagctttctcagcctgaatattggcctgcttacaacaacatagccactggtattcgttatacaaccggagtggcgataacgttggcctattgggccacggtttag

SEQ ID NO: 326075 - DNA, 726 bp, Pseudomonas aeruginosa
gtgcccagatcaatctgctcgttcatttttttgctcatattcgcgcccacaatgacccaagctgcgaaaataccagcaaatgagtactcattgggggatggaagaggctacatcaatatctggccggaaaaggatgaggctcaggcatttcttatccataatgatgggcctaatggggctacatgcagccttaaaggcactcttagagataataaaggagtggtgcattcgccgtattcctctgcttcatgtttgctaagtatcacccagacagggctgctgtcagtaagcgtcaaacgtgaggaaaattcgccaagctgctctgcatggtgcggtcctagagtttggtttgaaggagcctatagcgtcccgcccaagggctgctactatatgcaaataaggaaaaaaactcgacaaatgttgggtatgattgggaaaaaagagcttgatgccgctcgcgccttatcaaataagcttttgtcagactgcgcaaccgagctagcctatcctgccaagatatacttgacgaacacacttgccatgatcagtgctgaaaagggagagaatgctcgctgtttggagtatgcccatcgggtgcaaaagcaaattcctgtaagagatgacggccaaccggctgaagacttgctcccggcggagcacgctttcgctatggaacaacgcgccaaggctgatgctctgtctgagcgatgcagcgacgagaaataa

SEQ ID NO: 326076 - DNA, 681 bp, Pseudomonas aeruginosa
gtggtttacgacttcagcccaagccgtgccggagaacatgcacgcaacttcctaggcgactggaatggcaagctggtctgcgacgacttcgctggatacaaggccggttttgaacaaggcatcactgaaatcggctgcatggctcatgctcgccgcaagttcttcgacctgcatgtcgctaacaaaagccaactggccgaacaggcgctgcactcaattggcggtttgtacgaggttgaacgccaggctcgggacatgagcaacgaagaccgttggcgaatacgtcaggaaatggcggtaccgatcagcaaaacactgcatgactggatgttggcccagcgcgacctggtgcccaacggctcggccacagctaaagccctcgactacagcctgaaacgctggggagcgctgacgcgctacctggacgatggggctgtgcccatcgacaacaatcaggtggagaaccagatacggccgtgggcgctcggacgctcgaactggttatttgccggatcgctgcgcagtggcaaacgagcagcagctatcatgagcctgatccagtccgctcgcatgaacgggcatgatccgtatgcctacctgaaggacgtgctaactcgcctgccgacgttacggtcgaaagacatcagccagttgctgccgcatcagtgggtacagatctag

SEQ ID NO: 326077 - DNA, 285 bp, Pseudomonas aeruginosa
atgagcgccagccaggtcatccgtattcgcgcgcgcaacggtcagtcggaacggcttggcctgcgcctgcaacaactggtcgaaccggggctggaggcgccgggttgcctggagtaccaggtgcgcagggacgccctcgagccggatctctggctggtgtgcagccagtggcgggaagcgcagcagatgttcgactacctggcctgcgtcatcctgcacttcgaggctcgccgccaggggcgctccctggcggcgagcctcgaagtgcaggatgacgcaggctag

SEQ ID NO: 326078 - DNA, 771 bp, Pseudomonas aeruginosa
atggacagccacagcccgatcgccaccgtcgcccaggccctgcggcgcgccgaacgcatcctggtcatcaccggcgccggcctctccgcggactccggtatgcccacctatcgcggcctcggcggtctctacaacggtcgcacggaagagggcctgccgatcgaggcggcgctttccggaccgatgctgcggcgcgatccggcgctgtgctggaagtacctcgcggaactcggcaaggcttgcctggcggcccgacccaacgccggccacgaagccattgccgagttgcagaagcgcaagccggaatgctgggtgctgacccagaacatcgacggcttccatcgccaggccggctcgccggccgagcggctgatcgagatccatggcgaactggcgccgctctactgccagtcctgcggtgccgagagcggcgccagttcgccatggatctcgatcagccgctcggccggcgacgcggcttgcggcggggtgctgcggccaccggtagtgctgttcgaggaaatgttgccggaagaggcgatcgataccctgtaccgcgaattgcgcaaaggcttcgatgcggtgctggtggtgggaaccaccgcgagcttcccctatatcgtcgaaccggtgctgcgcacgcggcaggcgggaggcttcaccgcggaggtgaatcctggcgtgaccgacctcagcgagcgggtcgatgtgaaaatgacaggacgagccttagacatcatgccgcaggtggtaagtcacatttatcgataa

SEQ ID NO: 326079 - DNA, 1401 bp, Pseudomonas aeruginosa
atggaaagctatgacgtgatcgtgatcggcgccggtccggggggctacaacgctgccattcgcgccggccagctaggcctgaaggtggcctgcgtggagggtcgcgaaaccctcggcgggacttgcctgaacgtcggctgtatgccgtccaaggccctgttgcacgcttcggagctatacgccgcggcgagcggcggcgagttcgcccggctcggcatccgggtcagcccggaattggacctggcgcagatgatgaagcagaaggacgagagcgtcgccgccctgacccgtggcgtcgaattccttttccgcaagcacaaagtgcagtggatcaagggctgggcgcgcttgcaaggcgagggccgggtcggcgtggcccttgccgacggcggccacgcgcaactggaggcgcgcgacatcgtcatcgccaccggttcggaaccggcgccgctgcccggcgtgccggtggacaaccagcgcatcctcgactccaccggcgccctggagttggccgaagtgcctcgccacctggtggtgatcggcgccggcgtgatcggcctggagcttggttcggtctggcgccggctgggcgcacaggtcacggtgctggagtacctcgagcggatctgcccggggctggatggggaaaccgcaaggaccctccagcgcgccctgacccgccagggcatgcggtttcgcctcggcacccgcgtggtcgccgcgcgcagtggcgagcagggtgtcgaactcgacctgcaaccggccgccggcggcgctacggaatcgctgcaggcggactacgtgctggtggccatcggccggcgcccctataccgaaggactggggctggagacggtcggcctggccagcgatcgtcgcggcatgctggagaaccagggacagcgcagtgcggcgccgggcgtctgggtgatcggcgacgtgacctcgggaccgatgctggcgcacaaggccgaggaagaggcgatcgtctgcatcgagcggatcgccgggcatgcggcggagatgaacgccgaggtgattccgtcggtcatctacacccagccggaagtggccagcgtcggcctcggcgaggagcagctgcaggcggcgaggcgcgagtacaaggtcggacgcttcccgttcagcgccaacagccgggcgaagatcaaccacgagagcgaaggcttcatcaagatcctctccgatgcccgcagcgaccaggtgctcggcgtgcacatgatcgggccgggcgtcagcgagatgatcggcgaagcctgcgtggccatggagttcagcgcttcggcggaggacctcgcgctgacctgccatccgcatccgacccgctccgaggcgctgcgccaggcggcgatggacgtgcatggccgggccatgcagaactga

SEQ ID NO: 326080 - DNA, 420 bp, Pseudomonas aeruginosa
atgtttctcagccctagcgcgatctgcctgctcggcctgatcgcctggaccctgttgctggtcttcctgctggtcagccagcgcggcctgctggtactcggcgggcggatggcggtgaacgccttcgccgccgatggcagcaacacgcctggcggtttcggccagcggctggtgcgagtccatgccaactgcgtggagaacctgccgctgctggccggcgcgctgctctacgcgatcgccagcgggcagagcagcctgaccgacccgttggcgccactggtgctcggcgcccggctgttccaatcgctgatgcacctggtcagcacctccgcgctgttcgtctggctgcgtttcgccggcttcttcgtgcagttgctggtgctcgcctggtggctgctgctcctcgcggggctggcctag

SEQ ID NO: 326081 - DNA, 303 bp, Pseudomonas aeruginosa
atgggcgtcaccggcgtgcgcctgaagaaccgcgatggtggcagcgaggagatcgccgtggatggcatgttcgtcgccatcggccatactcccaatacctcgctgttcgaagggcaactggccctgaaggacggctacctggtggtcaacggcgggcgcgaaggcaacgccaccgcgaccaacgtaccgggtgtgttcgccgccggcgacgtggccgaccacgtctaccgccaggcgatcacctcggccggcgccggctgcatggccgcgctggatgtggagcgctatctcgattcgctctga

SEQ ID NO: 326082 - DNA, 624 bp, Pseudomonas aeruginosa
atgcccgataccctccgccacgcccgagtgatcatcctcggttccggtcccgccggttacagcgcggctgtctacgccgcgcgtgccaacctcaagccgctgctgatcaccggcatgcaggccggcggccagttgaccaccaccaccgaggtcgacaactggccgggcgatccccacggcctgaccggcccggcactgatgcagcggatgcaggagcacgccgagcgcttcgagaccgagattgtcttcgaccacatccatgccgtggacctggccggcaagccgttcaccctgcgcggcgacaacggcacctacacctgcgacgcactgatcgtcgccaccggtgccagcgcgcgctacctggggttgccgtcggagcaggcgttcatgggcaagggcgtgtcggcctgcgccacctgcgacggtttcttctaccgcaaccgcgaagtggcggtgatcggcggcggcaataccgctgtcgaagaggccctgtacctggccaacatcgccagccgggtgaccctggtgcatcgtcgcgagaccttccgcgccgagaagatcctccaggacaagctgcaggcgcggtgcttggcgacacgatgggcgtcaccggcgtgcgcctga

SEQ ID NO: 326083 - DNA, 1986 bp, Pseudomonas aeruginosa
atgctgtcgcccattacccgtcctcaccgcatgcccctacgcacacgcctgctctggctgttcctgccgttgctggccgccagtctcggcggtatctggctcttgtcggaaagcatcctgctgagccgtttcgaccgagaggaccagcaacgcctgcaagagggcgccaccgtcctgcacaaccggctggacttcgagttgaagcgccacctggacatcgttcgcacctacgcctggtgggatgccagctacgacttcatccagcgccccaacgagaccttcgaacaggaaaacctcgaccacgagatgctcgacgacctgggattcgacttcgtcctgttcctcgacgaccggggtcacctgcaactgaagcagtggtccccgcccgcgcccgaccagcgcgtgctcttcggcgccccctcggcgagcgaccaggccctgctcgaggcactgcagcaacgcgccatccgcctcggcgcgctggactttcgcggacgcaccgaccacagcctgagcgagctgctgctggtcgacaacctgccgaccctgctggtcagcgtgcctatcagcaacaaccagggtagcgcgccggcgaagggcgcgatcctcgccggctacttcctcgaccgggaacgcctggccaacctccgcgaacagatgcaggccgacctgcaaccgatgcccaacatcgccaccgacgccacctggaagccgctgcgcagccgcagcggcagtacccacaaccaggccctgctcagcccgcggcgattcatcggcgaacatgtccagcaggtctcggtgcagtacctgagctccagcggcgagccgcagctgcgtttcgacatcaccaagaaacgcctgctctacatccagggcgagaaggccatcaacttcttcctcggcgcctccctgctggtcgcgctgggcgctttcctggtcggctacctggccctggagctgtgggtcctgcgccgggtccaacggctcaaccgggaggtcgccgaagtcggacgcaacgcccactcgatacgcctgagcgacttcggcaacgacgagctgggacaactggcgggcgagatgaaccagatgctcgagcgcctggaacacagcgaggcgcgcgaccgggcgatcctccagtcgatgcgcgacggctacttcgaaatggacgtcgacggcgtgatcctcaccgtcaaccccgcgctctgccaactgctcggtcagacgcgcgaaacgctgatcggccacccctactacgaactgctcggcgaagacgacctggcgcgtgcccgccaacccttccagcgcgccatgcagagcggcgcaggcaagaccttcgccatccccctgcagcgcgccgacggcagcctcggctacttcgaggccacggtttcgctgatccacgacctgcaaggcgaactgcggggctaccgcggcatcgtccgcgacgtcagcgaccagatcgcctaccagcagcaattgctggaaatggcctaccgcgacccgctgaccggcctgggcaaccgcaaggccttcgacgaacagctcggccaggcgttgcttcgcgccggctccggcggaagcgaactggcgctgctgtacctggacctggaccgcttcaaggaggtcaacgaccgcttcggccacgacatcggcgatgccctcctcaggaccgtcgccgaacgggtacgcagcaccctgcggcagccggacaaggcctaccgcctgggcggcgacgaattcgccgtgctcctcgaggacagccaggaaaacaatccgcagcgcctcgcagaacgcctgctggcggcgctggtccaaccgatcgcgctgaatggcgaacgcatcgacttcgtcaccccgagcatcggcatcgctctctacccgcggcatgccggcgatgccgaaggactggtccgtgccgccgacagcgccatgtaccaggccaagcgccagcgcaaccactattgcctgtaccaggcgccagcctga

SEQ ID NO: 326084 - DNA, 741 bp, Pseudomonas aeruginosa
atgccagccctgagcggcccgcaatacctcggcgaaggcctgaagctgatcatgcgtcccggcctgcgcctgttcgtgctgatccccctgaccctcaacctgctggtgttcgccctgctgatcggcttcgcgatgcagcagttcagccactgggtcgacctgctgatgcccagcctgcccgactggctgagcttcctgcagtacatcgtctggccgttgttcgtcctgctggtgctggtgatcgtgttcttcaccttcaccatggtcgccaatatcatctccgcgccgttcaacggcttcctctcggaaaaggtcgaggtggtggttcgcggccgcgacgacttcccgccgttcagctgggccgaactgctggcgatgatcccgcgcaccatgggtcgcgagatgcgcaagctcgcctacttcctgccgcgcgcgctggtgctgctggtgctgagcttcgtgcccggggtcaacctgatcgccacgccgctgtggatcctcttcggcatctggatgatggcggtgcagtacatcgactatccggcggacaaccacaagctcggctggaacgagatgctcgcctggctgcgcagcaagcgctgggcgtgcatgggtttcggcgggatgacctacctggcgctgctgatcccgctggtcaacctggtcatgatgcccgccgccgtcgccggcgccaccctgttctgggtccgcgaggaaggcgagaaggcgctggtgaaataa

SEQ ID NO: 326085 - DNA, 855 bp, Pseudomonas aeruginosa
atgctgggccaggtcgggctgttcgccgacggggtggcggtggcgcagatcggcgcttgcaacttcgaggtctgcaaggaccatgtcgacgaggtgatcaccgtcggcagcgacgaaatctgcgcggcgatcaaggacatctacgacgacacccgttcgatcaccgagccggccggcgccctggccgtagcggggatcaagaagtacgtggcccgcgaacgcaccgaggggcagaccctggtggccatcgactccggtgccaacatcaacttcgaccgcctgcgccacgttgccgagcgcgccgaactgggcgaacagcgcgaagcgatcatcgccgtcaccgtggccgagcggccgggcagcttcaaggccttctgcgcggcgctgggccggcgccagatcaccgagttcaactaccgctaccacagcgaccgccaggcccacctgttcgtcggcgtgcagacccatccgctcaccgacagtcgcgccgacctgctcgccggcctgcgtgagcagggcttcccggtactcgacctgaccgacaacgagatggccaagctgcacatccgccacatggtcggcggccacggtaccgaggtgcgccgcgagcggctgttccgcttcgagtttcccgaacgccccggggccttgctgaactttctcgacaagctcggctcgcgctggaacatcagcctgttccactaccgcaaccacggcgccgccgacggtcgggtgctggccggattgcaggtgccggacgaggagcgcggcgagctggaggcggcgttgcaagccatcggctatccgtactgggaggaaacccacaacccggcctaccggctgttcgccggttga

SEQ ID NO: 326086 - DNA, 1941 bp, Pseudomonas aeruginosa
atgcgcaagcgcaacccccggcgggccacgccggaagaactgcgggtctgctcggtactgaaggaaaagggcacccgcgaggaactcgcccacctcgccgcccgcggtgagtggagcaacgtgccggcatacaacgccagccgcgagcagatcgccgaccacctgggcaagagcgtgtcgccggaatccgacgcctcgttcttcgactcgcggcgtttcagcgaggcgatcatcttgctcaagagccggccggtgctgctggtgaagaacggtatcttcgacgaagcgccgctggccggcctggagcagcgcctgaagaagcatcgcgccgcgctggccacgccgatccgctcggtcggtcggctggaattgatcgaccacgacagcatggactggtgcggtaccggctggcgcatcgaggacgacctgatcgtcaccaaccggcatgtcgccagcctgttcgccgaacgccagggcagcctgttccgcttccgtctcaaccaggctggcaagcaggtgcgcacccgcgtggacttccgcgaggaataccgccagccggaaagcgacgagcatgtgatcgcgcgggtcctgtggatcgccccggacgtctccgaggcgccggacatggcgatcctccaggtagtgaagggcgacctgctgccgccgccgctggtcctcgcgcgccaggatgccgagccgcgccaggcggtggcggtggtcggctatccggcgcgcgacagccgcaacgacgccggggcgatggaagatatcttcggcaacatctacgacgtcaagcgtttcgctcccggcgaagtcgtgggattgccccatgacgcctggtacctcacccacgactgctcgaccctgggcggcaattctggctcggcggtgctttcgatcgacggcggcgaggtggtcggcctgcacttcggcggccagttccgcaagaccaactatgcggtgaaggccagcgtgatccgcagcctgctggcgcgtcgcgcctgggtgccggtggccggggcggagctgaagcgcggcgcgccgcgcttccaggaaaagcagcgcagcgtcgccgacctggccgagcgaaagggtttcgacgaggccttcctcgggccgaaggcggccttgcccaagccgggcaagagccaccaggtgctgccggtgggcaagggcacgcgcctggactatctgcatttctcggtggtgatgagcgccagccggcgcttgccgatcctcaccgcggtgaatatcgacggcgcgctcaagcgttcgctcaagcgcaaggattcctggggcttcgacccgcgcatcgaggcggccgtgcaggtcggacacaaggacttctacggtccggcttcgttcgacaagggccacatggtgcgtcgcgaggatcccggctggggcgacagcgatgccatcgcccggcaggccgaggacgacaccttcgtctacaccaacgcggtaccccaggtggcgcagctcaaccagcgcagctggctgtcgctggaggactacgtgctgcagaacgccaggagcgtgggcttccgcatctcggtgttcaccggcccggtgttccgcgacgacgatccgctctaccagggcgtgcaggtgccgctggagttctggaaggtggtggcgatgatcgacgccgacagcggcgaactgggagtgtccgcctacctgctggggcaggaagggatgatgcccagcgaaggcttccgctacggtgcgttcaagacctaccaggtgccgttggcgaaggtcgaggccagcgccgacctgcgtttctccagcgccctgcgcaaggccgacgtgctcgccggcacgccgctggaggaggcgctggaaagcggacgcttcatcgagatcgacggaccggacgacctcctgccgctgaggttcaggccggctgccgccactcgcgtagcagttcgatga

SEQ ID NO: 326087 - DNA, 1167 bp, Pseudomonas aeruginosa
atggccttctctgaacgcatctcccgcctgaaaagctccttgatccgcgaaatccttgccgcggcgcagcgtccggaggtgatgtcgttcgccggcgggctgccggccgagccgatgctgccgaaggtgcagtgggagcagatgccggcctccatgggccagtacggcatgagcgaaggcgagcctgccctgcgcgaagccatcgccgccgaagcgcgcgccctcggcgtcccctgcgaggcgagccaggtgctgatcgtcagcggttcgcagcagaccctcgacctggccagcaagctgttcatcgatccgggcaccgaggtgctgctcgaggcgccgacctacctcgccgcgctacaggccttccaattgttcggcgccgattgcgtgaccgtgccgctgggtgccgagggccccgacctggttgccctgcggcagcgcctggagcgacacaagccggctttcgcctacctgatcccgactttccagaatccgtccggcgtgcgctacagcgagggacgccgcgacgcggtggcggcgctgctcgacgaattcggcgtgaccctgatcgaagacgaaccctatcgcgaactggtgttcgacgagggccgcgcaaccccgctggtcagccgcctgcgcaagtccagctggatctataccggcacggtgtcgaaaaccctgctgccgggcctgcgcgtcggtttcctgatcgccaccccggacctgttcccgcacctgctgcggctgaaacagtcggccgacctgcataccaaccgggtagggcagtggcaggcgctgcaatggttcggcagcgaggcctatcgccagcacctggccgaactgcgcgagttctaccgggtccgccgcgacgccatgcaggaggccctgctggagcacttcggcgagctggccgaatggaatatcccggagggcgggctgttcttctggctgactctcaggcagccgctggatacccgcaccctgctccagccggcgctggccgccgatgtcgcattcatgcccggcgaacctttcttcgccgagccggagcagaacctcgggcgtctgcggctgaacttcagccacgtcgccccggagcgcctgcacgaaggcctgcggcgcctggccaaggtcgtccgcgatgcccaggccgccgaagcggcctga

SEQ ID NO: 326088 - DNA, 435 bp, Pseudomonas aeruginosa
atgaaaaccatttataacttcaaacagcgtatcaaagaagaccccgagtacattcgaaaagcccatgaactcactttgaatacaacgaagcctaaagctggccttaaagggacttatggactactgggctcaaaggaatggtgggacaatcttgaaaacggatcaattccacaaaaagaaatttccggaaccataaagaaagtatatttaacggggcaagacaataccgaagatttcaacacgatagatatagaaacagaaaacaaaaccctctgcacggagggcacttacacaaacaagaataccgacagaaagcattacgaagcaggaaaaaaaatcaccataaaatatgctttcgacccactaaaaaagcccaaaccaaatggagacatcgactattcaaaaatagttgttgagatattaatatccgaataa

SEQ ID NO: 326089 - DNA, 4845 bp, Pseudomonas aeruginosa
atgatctcgtcgttctacgccatgttcatgctgcgcggagtgaacgcgaagcagccggatgccagccagttgatcggcgaattcagctccggggtgctcaaccgctatgaggaatatgcgaacagttggctctggggctgggcactcgacgtccagcagaccatcgccctttccgatgggaacggcaacgagttgaccaggctgaaagccgacaaggacgccaacatcctcgaagacgtcgcctcatgtccggtcaacggtcaactgaaactgctgcatactttcgaatcgaccagtttcgtgcccatcggcaacacgccttacgaaatcactcggataggcagcaggacaccgcagttcaagggcgtactggatgcagatgggatggcgagcataagcggctgcgctcccaatacgctgtaccaggtcaagttctacccagaggtaagcatccaggagatcgacgcgctctaccgctcctacgacgacgtaatcgccaagctgaacgagtggcttctggagcaatggaacggcccgctttccgccgaatggaaaaggctcgcgccggttggcgaccgtaggcggatggagcagataaacgacgcctatctggacggcatgggcaaagcgctggtcaatctctgggatgatgtggtcgagctgttcggcatcctcgcgaacctcgacgagcacgcggcgaaactccttgagttcatcaacgaagcggatttcgaaaagctcaaggctcaggccaaggaactcctcggtaccgccttgctgatcgccagcgacgaaccgcttctgttcatctatgccagcgccatcgtgtgctggacccagttgctgccgcccacgactgccgcggaaatggtcgcggaactctccaccggcctgctcctcgatattctgctcggcatcatcctgaccggcggagccggtctcgccgttcgcctggccgtcaagggctcgaaagcaatcaaggcctccgaaggtgcgatgctgctgcgcaaagccatgcaggtgctgatcgataccagctgtcggcattccctccagttgcacgcggaaaagctgaaacctctggccgtccgcggtgaagtgatggccaacagctccaacaagatcaccgcacagatccagagcaccgcccaaggcatcgcccgcaccgagcacgacaccctgccgctgagccgaggaaagcgcgcgaacacctcgctctccagcagtcaggcgacgcccgatgcctccgcacccggcaggacgcccgccggcaaacccgccgaccaggccgcccagacctgcgtcaaggactgtcccgtttcgatggtcaccggcgaggagctgctgaccctgaccgactgcgagctggacggtccgctgcgtttcgcctggacgcgcctgtaccgcaccagcgcggcggaaatcgacaatggtctgggcttcggctggagccatgccctctcccatcgcctcgatcgcgacggcgacgagctggtatggaccgatcacgagaaccgccggacccgcttcccgatccctgacgcccagcgcccggcgatcaccaaccgactgtcgcgcgccgccatctacctcggcggcgacccatccgaactgatccttgcccaggccggcgaaaagccgcgcttctaccacttccgcaaagacccggacggcgcttacctgatcgccatcagcgacgcctacggcaaccgcctggaactgagtcgcgaccgcctcggccggccgcgccgcctcagccacaaggccgggcgcgcgctactgctgtgctaccagggcaggcacatcgagcgcgtcgagtaccaggtgtaccagcccgccgataacctggaggcctgctggcacaccacccaggtactcgcccgctaccgctgcaacgaacgtggccagttgatcgaagccggaaacgcactctacgaggccgaacgctatcgctacgacgcgcgcaatgtcatcctcgagcgccagttggccggcggcgcctcgttcttctgggaatgggaaggcgaaggcaagcaggcccgcgcggtccatcactgggccagcttcccgcagatggactcgcgctacgtctggaacgaagacggcagcgttaccgcgatcaacgccgacggcagcgaggaagtctatgtccacgacgacaacgcgcgcctggtacgccaggtcgatcccgacggaggcgaaaccctcaggcactacgacgagaagggccaactggtcgccgaacgcgatccgttgggaacgatcaccgagtaccgctacgaccaggccggacgcttggaggcactgctcccggccgaaggcgagccaacctgctatagctacttcgacggcttcgtgcgcagcgtgcgccgcggcgaggcgcagtggaagtacgagcgcaacactcagggcgacatcacccgccagaccgatcccgaaggcaacgtcacccactacgcctacgaccaccgcggctgcctggtggaaatcacccatgccgacggcagcctgcaccagttgacctggaatccgctcggccagttgatagaagaacagcttccggacggtagcgtgcgccgctatcgctacgacacactgggtagacagatcacccgccaggacgaaagcggcgccatcacccggttccagtgggatgcagcaggccgcctgagccagatcaccctgcccggtggcgccagccgcatgtaccgctacaacgcttacggcaaggtcaccagcgagtgcgacgaacagggccggatgacccgctacgaatatcttgacgacctgcacctggtcagccggcggatcaacccggacggcagtcagctgcgctaccgctacgaaaacgcccggctactgctcagcgagatcgagaacgaacgcggcgaacgctatcgcctcgattaccacggcaacggcctgatcagccaggaaaccggcttcgacggccgccgcaccgcctatcgctacgacctcaaaggccagcttctggagaaaaccgagtacggcgacgacggcagcgaactgcgcaccacctaccagcgcgacagtaccgggcgcctgctggcgaagacactgcccgacggcaatcgggtcgactaccgctacgatacgctcggacgcctggtcgccgtcgacgacggcacctggccgctggcctacgaatacgacctacgggaccgcctggtccgcgagcaccagggctgggccacccttcactacgcctacgacgccctcggccagttgatccactgccgactgcccgacggcaaccgcgtcgactaccgctaccagaccggcggcaccctctcggcaatcgatctcaacggccagtccctgacccggcaccagttcggtagcggtcgcgaacgccagcgccagcagggcgaactgctcagccaataccactacgatgagcagggccgcctgctggcccaccaggtcagtcagcggcagcgccatctctaccagcgccagtaccgctatgacgctagcggcaacctggccgccatcgaggacagccgcaagggcattcgcagcttccactacgacccgctggaccgcctgctcggcgtacgcggtgaaaccccggaaagcttcgtgcacgacccggccggcaacctgctcgcccagggcgggcaattcgacgcgcgacagatggaggttcgcggaaatcgcctgctgacgcagggcgaccggcatttcgactacgacgcccacggcaatctcgttcgcgaacgccgcggcaccgggcagaagctggtcaccgaatacagctacgactgccaacaccgcctgatcggcgtcagcctgccggacgggcgccaggtcgtctaccgctacgacgccttcggccgacgcattgccaagcaggtcgacgggcgcaataccgagttcctctggctcggcgaacgcctgctcgccgagagcggcgaccggcactaccgcacctatctctacgaacccgacagcttccgcccgctggccctgctcgacggcgaaggcccggaacaggtcgaaccctgctactaccaactcgaccacctcggtaccccgcaggaactgacccgcgccgatggccgcctctgctggtcggcgcgctaccgggcttacggcaatgtgctcaagctggacatcgccgaagtggataacccactgcgcttccagggccagtatttcgacgccgagaccgggctgcactacaaccgccatcgctactacaatccaagcacgggacgctacctgacccccgatccgatcaggctggcaggtgggttgaacagctaccggtacgtgccgaatccgacggggtgggtggacccgttggggctggcctcaaataaaactcgctgtcccgaagcattagacaataatccccgcaaagggattaactccacatccggcagcaaaaagccggcaggaccaatcgtagagctggatgcgcagggaaacgagatttactaccgaacactaagcgagcagcaccttgagatactgaggaacaactttgaagtacctccgacgagtgagaccttcatctccccgctacaatcctactcccaagagtatgatgggaaattagtaagacttacagccagtccaggcaccatgaatgagctgtctaaaattggagtaactgcaaattccggaaccggcctattgcttccagatctccctcccgcccgaaagggctggaaacagaacaacgcactattcaaactcgaagcactaaaaaagccaacgataaatgaaggaggcggcgttatcaacactggccttggggatggaaaagccctagagattttcaacaagaacctaatagacttcgaagtaatagactag

SEQ ID NO: 326090 - DNA, 741 bp, Pseudomonas aeruginosa
gtgacctctgacgccctctccccgcgaacctggctggcccgacatccgctgcaggcaggcgaatgcctgtacgcgatcttcggcagcgccagcgatgccgcgcccctgcaagcctactaccggaaagacagcccacccctaccgctccctctctggaacggtacgccatatgccgactggcaaccggtgatgccctacctcgcgaagctgtcccccagcagcgtattcctcgattgggctgccagcgaaaagtctcgcgactggggttggctggcagtttccacctggtcgacagacgcaatcctagagcacctacgcagcctcacccaggtacgcatgccggatggcagcgaagtgttcttccgtttctgggacggccgtcacctgctaccgatactcgcccacctcggcgagaaagcgcacgaagtactgccgatgttcggccgttacctgatcaatggcaaagcactcgaaaccggccagggccatccccatgccgcccgtccctacccctggtgggaggttccgcgggcactggtcgacacgctgcatgccgacgacccgactaccgctatcgacaacctgctgcagtggctgcgcgagaaccacgcagatctgtacttcgcctatcccgagcgaagtctgcaattgcgcgccagacgcctcatcgcgaaagccgtcgccatggatgagatcggcggcctgttgttgaaccagttggaaaaggacctgaccccatga

SEQ ID NO: 326091 - DNA, 465 bp, Pseudomonas aeruginosa; identical to SEQ ID NO: 326050

SEQ ID NO: 326092 - DNA, 570 bp, Pseudomonas aeruginosa
gtgcaggcgaaattctccggcctgttcaacctgggcgaggcgttcccggtggacggccgccagttcgaacacctgttcgaggacggcgagtcgttccgcatcggcgccctggaatgccgcgcgctgcataccccggggcataccccggcgtgcatgacctacctggtcggcgacagcgccttcgtcggcgataccctgttcatgcccgactacggcaccgcccgctgcgatttccccggcggcgacgcgcgccagctgtatcgctcgatccagcgcctgttcgcgctacccgacgcgacccgcctgttcatgtgccacgactacacggctcccggccgcgacgagcaccgctgcgaaaccagcgtcggcgagcagcgccggcacaacgtgcacgtccgcgaaggcgtcgacgaggaggcgttcgtcgccatgcgccagcagcgcgatgccaccctcggcatgccgaccctgatgctgccggcgatccaggtcaacatgcgcggcggcaacctgccgccggtggaaggcaacggggtgcgttacctgaagatcccgctggatctgttctga

SEQ ID NO: 326093 - DNA, 1035 bp, Pseudomonas aeruginosa
atgaccttcgagataccggaggagatggagtgggcaacttatgatgcctcacgagtctggcagatatccaaagggggggggcataactttaccgccgaggtgaccgccgtaggtgacaacggcagctatgactacgacagtatgattttttacgtttccgaaaaggttgataaaaatgaattccataacgcctcaaactacataaaaggaacagcagaaatataccaagaccatcttagagaaaacataaaactagataagaaagcaataagtacgctccaaaaaaacaagagcgaagagaaaagtattgaacggataaaaaaaggaatcgcagaaatggaggccaagattcctctcgccaagatctacgaacacgatctcggcatccccgactcccatatccttggcagcaagaatatccccttccatgtcctgctctggcgcaaccagcgggtctattacttcaccttctccaagccgaccgagaactccgcccagcgcatcaaggacctaatcgcccgtttccgcacccgcgagctttacgaagtgccgaacgaaccgggcatctgcttcccctacggctttatcgccgacgacggcaagaccgcctacgaactgaagaacagcctgcgtttcacccgcacgcccaacgtgatcttcagcctgctcaccgcctcggccaacgatccctggcagacccgtcccaccagcggcctctacgacagcgacttccgtcccggctacgaccggcagaaatggaaaaaaagcgcgctgctcgacagcctccacatcggcaagcgcctggccgccttcgaaggctggcgcctcgacccgcgccccgactccggcgaacgggaacgcgcctggttcggcctggcccatacaggcggcaccctcgatccgctggtagcgatccaggtgcagaccttccagaaaggcaccgacgacctcaccgactacaccccgccccccgaagaagtactgccccgcctgaaggccctgagccaaagcatcgagcagcggctggcgcgctga

SEQ ID NO: 326094 - DNA, 3312 bp, Pseudomonas aeruginosa
atgttgcagaagaagccctacaacggcctccacgaaaaggaactcaaccagatcaaccagcaggatggcagcccctgcgtagccatttccgcaccgggctgtttcatcaaggggtccaacctcttttccgaaaagcgggccggtaaccgggtccgcttcttcaccaccggccgggactacttcagcgacctggccagcgccctcgacagcgccctcgacagcgccagttcgagcatcttcatcaccggctggcaggtcaactacgacgtcctcctcgacggccgccgcagcctctggcagtgcctgcgccaggcgctggagcgctcgcccgcgctgaaggtctacgtgatgccctggctcagcccttccggcagcctcggcacctatgacttcgaaaccatgctcgcggtgttccagctcaacgccggactcgagggcggcgcgcgcgccttctgtacgccggcgatccagcagagcgacatgcagggactgggcgtcgccttctcccaccaccagaaatccgtggtgatcgacaaccgcatcggctatgtcggcgggatcgaccttgcctatggccgtcgcgacgacaacgatttcagcctcgacgcctccgggcgccggggcaacgacgcctataatcccggcctaccgcatcttggctggatggcggaggacgaacacgtcagctccatgggcctgatgatggccaccctgttcgacctttccaggccgctcgccagcctgacgctgcatgcgcccacccttcgcctgtcgcccttcccgcacatcgccgccagcgacgaaccgctgctgagcattcccctcgcacccagccgcgcccgcgccctcaacggcgccgcctacctttccgacctgttccgcagcccgatgctgccctccctgcaatggctcggccgcgcctacaacagctcgaaagaaggcctggacgaaggcttcgaacggctcgatgcgctcaggcggcagatggtcgccagcagcatccgcgccattgccaacctgatcgccgacaacctcgacgccctgcccatcgagcctgaactcgaacgccgcctgcgcgcctggctggaggaactgcgcacggccgcgctcaacctgccggaagccctgcggatcaagagcctgctcctgatcaaccagtggatgagcgaaaccgaactgggccaggtcctgaccctgatcagcggcaagggcttcgaagatatcccgcagaacctgagcggcaaggccggcgagttggccggctcgctgttctggacactccacaggctgttgcaggcccgcgccggaggccaccagcaaccctatcgctacctggacgaagcgcctcagccattggcctcgccggacaacgcccggctggccgccgaccagccgcgcatgccctggcaggatgtgcattgccgcatcgaagggccgtcggtgtacgacctggcgcgcaacttcatcgaccgctggaacggccagcaggcctacctggccaagacgccggcgctacaggatacggcgctggtacgcagcgccctggaagccgtgatgaagtggctgaacagcctggccgccgccgcgggattggagaactacctggacgagaagcgcaacctccggctcgaactggacccacccacgccctgctggatcaacgcgccggaacagttgccgcaagagccggaggtgcgccgcggcggcatgaccgtacaggtactgcgcagcgccgcggcgcgcatgctcgaacaggagcaggccggccgcctcggcgcgggagtgaacctgcccttgcaggtcggcgtctccaccgaaggagtccagagcaactgcaaggacgccatgctcctggcgatttccggggcgcagcagttcatctatatcgagaaccagttcttccagagcgagttcggcaaggaaggcgaagttttcaaggatctgcccctttcaggccccatggccagtctgcgcgacgttggcagcctgcgacgcgacttcgtcgtccggatacgcttggaggaagccctggagcagcgcgacctctggctgctggactgggccgaagtggagaagatcgcccaggagcctggcaccgaggcccgccagttcctcaagtcgatgctcgccatgtggggcgtgaacgcccagggctggctcacccacaagctcggcgaggcccagcacggcctgctcaacgagatcggcgaagccctggcgcggcgcatcgaacgggccatccagcgcgagcacccgttccacgtctacctggtcctgccggtgcacccggagggcgcgctgaacgtgccgaacatcatgcaccaggtgcacctgacccagcagagcctggtgttcggcgaacagagcctggtcaagcgcattcagcggcagatggcgctcaaggccctggaaggcaagtccgacccggcccaggcccgggaaatcatcgagcgcaaggacgctcgcggtcgcccggtctacgaacagcaggactggagccgctacctgaccctgctcaacctgcgcacctgggcggtgctcggcgggcgggtggtcaccgaacagatctacgtgcacagcaagctgctgatcgccgacgaccgggtggccatcctcggcagcgccaatatcaacgaccgcagcctgcaaggcgagcgcgactccgagctggcggtgatggtgcgcgacagcgagccgctgacggtcaggctggacggcaagaacgacgccatcgtcggcaaggccatccaccagttgcgggtgaatttgtggaagaagcattttggcttgagccaggggccaggcggtttcgtcaagccggccagcgagttgagtgcttatctgtccatcccggcggctcaagaggcctgggaagctatacaaacattagccaaggagaatactcgtgcctatgaacggactttcaattttattccccaaaatatcagccagactcaactgcaactgactccagagccgcctaaaggatttgaggacggatttcccgcctccatatggccaacctgggcatacagaaaacctggcgagttaagggcgggcggacaactgatggagccgatgccatatcaggaaatcttctggcgctcatctaatctcacttcggtgaaaaccttcccaccacccaacggggtttccggtttcatcacggctctaccaaccagttggacccgtggtgagcgcaatgattctggcttgaatctaagcatcctggcacatcaggacagcagatcgcttcccacccaggtcgccatgaatggagatagctcggcacaaggaaagcatcgcacatga

SEQ ID NO: 326095 - DNA, 834 bp, Pseudomonas aeruginosa
gtggaggcgaacagctacagcgagttcaaggccgaggagcatcacaccgtgcacggagagcgcaaggtcgagctgaaggccgatgaccacctgacggtcggcgacagccagcacgtgaagctcggtcgtgcctacctggccagggccgggcgcgagatccacctgaaggccgggcagaagatggtgatcgaggctgacagcgaactgacggtgaaggccggcggcagcttcatccggctcgacgcaagcggcatcgccatcagcggcccgctggcacggatcaatgcaggcggcgcaccgggaagcggctcggggatcgcgatcaagatgccgttgacgccgggggcggcggacgccgatgtcgcaggacgcccgctacaacccgccaacgccggtctccacgccagcgatccgaagcagaacggcgaataccgcttcgatatccgtttgcaggatattcccggagacgaaggattccccttgattcatacgccctggcgcatcgtccagggtaaggagcacaacctggtattggaaggcgagagcgacgagaagggacggttggtgctggacgacactcaacagcgtcagctatcgaacgcctgcgagcgtgcgcctggcgatgtctggctggtgtatccggggcaacgaataggcatccgtccgcatcgggagcgtgagggttgggacgccacgcgccacgcgctgggcgcgctggacttccatgacaccctgggcggccagcgcgcgcccaccccgctcgaacaccagcgcggcaagctcgacagttgctgcgaaggcgacctttattcccacctactggccaaggactga

SEQ ID NO: 326096 - DNA, 1053 bp, Pseudomonas aeruginosa
  misc_feature (442)..(451): n is a, c, g, or t
gtgttcaagccgctggtatcgctgttctcgccgatcgaaccgagcgtctacgaggcgcgcgggcggctgcccagggagcaactgggggagacccgcctggactacgaccgcaccttccagttggccagcgtcgaagcggcgcggctgggcatcgccgagccgattggcgagctgtactacagcttcgaatacaacttcttcggcgccggcttcggcgaccacgacgaccccatgggcaagtcctggctgttcttccacggcagcgacggccgcctgctcggccaggaagtcgccgggcagggcagttggggagagcgtttctaccgcttgcagtacccgatccacggcgggcgcatcgccggcctgccgggacgcatcgccatcgccgccctcggcctggccatcgccgggctgtcgctgaccggtgtctacatctggtggnnnnnnnnnngcgccgggcgcgccactggaacggccgctagccggctgttagtctggctgcctcccacaccaccagaggatggacgaatgaacgcaaggatcgccgcattgggactgctcctgcccctggccgccggcagcgccgtggccacggaggagggcagctcggtcaaggatgcggccaaggccgcggtgtcctcggccatcgagaccggcaagaacctcctcggcggggtcagcgagggcatcaccagcggccgccagtcggcccagggcgctgatggcgccaaggtggtctccgacaacgccggcttcgccgagatcggccaggtcgaagtgctcaagaccgagccgcgcgaccagcaactggccgtcaccctcggcttcaagaacgacggcgacgccaccgtgcgcctgatcaacctgacccagaccggcgcgctgctggtgatcgacaacgatggctactccaacgccctggtcgccctcgccaaccccgacgacgtcaccgtcccggccaaggccggcatccgccagaccttcgtcttcgaaggcggcgcggaagggatcaaggcggtgcgcctgtggggcaaggacctgccggtgaagtga

SEQ ID NO: 326097 - DNA, 411 bp, Pseudomonas aeruginosa
atgtacgattggtgggttctccaactggccaagctgagcgtcagccgcaagctgatggtcggtttcggtgtcctcctcgcgctgcttctgctggtggtgatcagcagcaaccgcaccctcacgcaccagaccgccctcagcgagcagctcgccgaagtcgccagcctgatggaacaggcccagcaagccgaacaaagccgcctggcattcgaagccggcagcgacccgcgccaggccgagcaggtccgccagaccctggccgggatgctccagcgcctgcaggcgctggagcatcccggccaggcggaagcgacctcgccgcagccgatcagcaacgcagcgccgcccgtggtgtgctggtgggcactgcacagcaggcgctggacagcttcgcccgcctcgaggaactga

SEQ ID NO: 326098 - DNA, 684 bp, Pseudomonas aeruginosa
atggcttcgctggaaacgtccatttcggtagccaggcgctcgatgcgcgtcaccgcctggtcgaccaccgcgtcgccctggcgcgcctcttcatcggcctggcgagcggcctgggaggccagctcggcgttgcgcgcgacgtcctgcacggtggcggccatctcgtgcatggcggtggcgacctggtcggtctccactttctggctgttgaccccggcgcgggtctgctcggtgaccgccgagagttcctcggcggagctggccaactggctgacgccgtcgccgatccgcccgaccagctcgcgcaggctgtcgcccatgcgctgcatgactcgctgcaactggcccagttcgtcgcggcgctggagggtcaggggattctgcgaacgcttgccgaggtcgccggcggcgatggcctcggcctgcgcgagggcttcgtccagcggccggacgatctgccggttgatcgcccagccggcgacgcagccgaaggccagggccagcgcggcgatcagccagaggctggcgcggtcgcggctggcggtgctctcgcgcaactggcgaccggcttcggtgagggtccggccggcccgggccatatcctgggtgctgctttgcatcgcttgctgcgcctggcgcgtgcggacgacgccggcacggaactgctcgatgccgccacgatag

SEQ ID NO: 326099 - DNA, 1389 bp, Pseudomonas aeruginosa
atggtggtagcgcagcagggcggcggcgaagatcagcgcggtgaccagcgcggtcaggccgttgagggcgacggtcagggccaggctggtgccggtgacgctgttgatccgttcctcggtggccaccagcatcagcgccactgcgaggatcgccgggaacgggccgagggcgctggcgatcctgtccgggatcgccggcagccgccaggatggtcgcggcagcatcagcagggcgcggccgaggccggcgatgaaggcgcagaaggtcgccaggctcaccagttgatcggtcaggctggccatgtcggggctcaggctggcgttgctttccaggccccagcgcatcagcgacaccgcgccgacgatggtcaggatggtcgccagcccgaccgccagggccagggcgctgcgccgcaggcggccttccggcagccagcggatcatcgcccaggtaagcatgcgctccagcaggcggcggccgaagctccagaccagcacggtggccagcagggttccggcgaaggcccagcggtgtccgggcgcgatggcgctgtcgaaggcgaccagggcctccgccttcagcttgtccagacggcgcaggtcgtcgtcggtgggacggatcagggtcgaccagaagctcgggctgaacggtgtcgccgcgcggctgctgatctgcgagttgaacaggctgcggcgcaggttgacgatctgtgccgccaggtcgcgggacgactggccgagctgggtggcctggcgttcgtcatcgagcagggcgttcttctgccgggtcagggcctggcgctgggcggcgaggctttccgcctcgtcgggctgcggcgggccgatcactttcaactgatcgtcgagccgctcgatgtcggccacccgcagcgcgagcagggcgtcggcctggcgctggacttgcagcgcgctctggcgcaactcggcgaggaggtcgtcgctggcgtcggcggtgacgcgctggcggatcaggtcgagttgcgcgttgagctggtcgaggctggcgtcctcggccagggcggccggcgcttccaggtcgacggccgcctgcagagccggcctggcggcccaggcctcgctgcccaggctcaggagcaggcccagggccatggcgaactggcagagcaacatatgcaggctggcgcgcctcatcgaatccccctttcgatcctgactggctcaagcagtatggaccggtgcgggcgccgagtaattccccgcgtcgataatcgccaggcggcgctaaagggacatggattctggccatatcgatccctttttggccgccgccgccgttttgccgcgaccgcgcgctgggcagaatccctccaccaagaacaagaaacctgcgaggtctctccatgctga

SEQ ID NO: 326100 - DNA, 912 bp, Pseudomonas aeruginosa
atgcgtaagtccgccgatgccttcgccttccagacgatgctgttgctctgcgtgatctggggcatccagcaggtgaccatcaagtgggcggcgacggacatcgcgccggtcatgcaggcggccatccgttccggcatcgccgccgccctggtcggcctgctgatgtgctggcgcggcggctgggagggcttgcgccagggcaccctgggcgccggcctgctgaccggcacgctgttcgccctggagttcctgttcatcgccctcggcctgcaatacaccacggcttcgcacatgtcggtgttcctctataccgcgccgatcttctctgccctcgggctgcacttcctgcttcccagcgaacgcctgcggcccttgcagtggctgggcgtggcggtgtgcttcggcggcatagcggtggccttcggcggaggcctgtcgtgggcggaaatggatgggcggatgctgctcggcgacgctttcggcctgctcgccgggatgtcctggggcgcgaccacggtggcagtgcgcggcacccggctgtccgaggcaccgccaagcctgacgctgttctaccaattgttcgtggcatgcgccgggttattgctgatcgctcttttcagcggccagctcggcgaggtccgctggaccccggtgagcaccgccagcgtgctgttccagggcgtggtggtgtcgttcgccagctacttctgctggttctggttgctgcgtcgctacctggcgaacaacctggcgatcttctccttcatgacccccctgttcggcgtcaccttcggcgtattgctgctgggcgagccgctcagcctgaacttcgtcgccggcgcggcgctggtcctcgccggcatcaccctggtcagcggcgagcagtggctgcgacgcctgctgcgacgctga

SEQ ID NO: 326101 - DNA, 360 bp, Pseudomonas aeruginosa
gtgctggtcgacgcccgccgcggcctgaaggtcaagccgcagggcaagctgacgccggtggacctgctacccgccccgcaattgcgcggccagggcggcgagcacggcgagtcgccggtttggaagctctatcttgccccgctgcacggcgccaagcgctaccgtgcccaggtggccagcgatccggacttcctgcgcatccagcaggagcgtttctcgagcactccggaagtcagtttcagcggactcaaggcggccttctaccacgtccgtctctcggccttcgacaacgacggcctggagggcgagaccagcgtctacgacattctctactacccgcgaggcggcagtgcccgatag

SEQ ID NO: 326102 - DNA, 297 bp, Pseudomonas aeruginosa
  misc_feature (149)..(158): n is a, c, g, or t
atggcttccgtgaacagcagccacgacgatgacgacgacggcgccgtcgacagcatcaacatcaccccgctggtggacgtgctgatggtggtgctggtgatgttcatcctcaccgccatcagcacgtccaccagcggggtgatgttgannnnnnnnnngaaggccctcaaccccgacttcccggtagtggtccgcggcgacgccacggtgcagtaccagaaggtcatcgaggtcctcgacctgctgcgccgcctggagctgtcccaggtcggcctggtcaccggcaaaccgacctga

SEQ ID NO: 326103 - DNA, 294 bp, Pseudomonas aeruginosa
ttgctggcgcaggcgcaactgctgccggcgatccgtccggcgctggaacggctgaaggtcggcgcggtgtccgagccgatccagggcgccaacggcttccacctggtcaagctgaccgagcgtcgcgacgcccgcctcgccaccctcgacgaggtccgtggtcgcctgcgcgaaagcctgcgcgcgcaacgccaggagcagatcgccaaggcctacctggatggcctggtgaacaacgctaccctgagcatcgacggcgcgttgctcggcaagaccctggcggaactgcactga

SEQ ID NO: 326104 - DNA, 600 bp, Pseudomonas aeruginosa
  misc_feature (234)..(262): n is a, c, g, or t
atgacggagcggcattggcagggcgaggtctggctggcgcgggaccacgcgctgttcgccggggtcaacggcgatacccgcgagcacgcgcactatgcccaccagttgctgctggcggagacgccgctgcgggtgcgcgtcgctggccaggtactggaggcccggcgcttgctggtgccctcgctgcaagcccatcgcgtcgacgcgtcgcagccgttgctggcgctgtacgcnnnnnnnnnnnnnnnnnnnnnnnnnnnnnctcgtcgacggctcgaccgccgcgtcgaaaaggccctggcggcgctcgacgagcaactcgcggcgcgggtcgaggcggaaagactggcgcgcagcgccagtctttcgctgagccaactggagcggctgttcgccgtccaggtcggcctgtcggtacgccgcctggtgctctggcgccgcctgtacctggccttcgccctggccttgcaggggcgcagcctgaccgaggcggcccatcacgccggcttcgccgacgccgcgcacctgtcgcgcagcgtacgcagcctgctcggtatccgcgccggcctgtcgctgccgcacctacgcctggccggctga

SEQ ID NO: 326105 - DNA, 1230 bp, Pseudomonas aeruginosa
gtgcatctggctttccagggcgtcgcgaacgccggcgttgggactggcgaaggtcacctgggtctggtcggcggtcatgtggatgcgcacgtccaggcgtcccagctcggcggggtcgagctggatctccgccgacttcaggttctggctggacatccacatcacccggtccaccaccgcctcgctccagccgttctgctgtatcgccaccggctggccgggcaccgtaccgttcaccggacggttggtcagggcctgctgcgccatggcctgggtcagcccgttgagcttggccgcgaaaggctcgccgcgcggctccgccttgctctccagcaggctctcggaggcggcgctggcgatggccggctcggcggtctgctgcaactgggcctcgagcgccttgccgtcgacggccttgggcaaggagtcggaagtcaggctggcaagggcatcgccgaggttcgcctggcgcggatcggcgctcttcgccggcccgcctttcgccgcctgcgcggcgtcctgggcaccctgctccaaggccatgttcactgccggaacgccgttgagcttgaccagggtcgggtcgctgctggcttcggtcaggctggccggagcactgctagccgtcggcacggccggcggcagcaaagtcgcctgggtattctcgtcgagcatcggcacggcgccgccgaggccgagcaattgcagcggatcgaccggcgtttcgactttatcttcgccgtcggccttggcctggccgtcggccggcaaaggcttgccgtcttcggcaacggccggctgcctgacggcatccgtcggctgcgcttcggcggcgtccttgccggcgtcccgtggcttgtcccgcgaacccttcgcgggaccgtcggcgcgctcggcgggcttcttcgcggtctccttggcatacatgtcggagaagctggaagtcttgtcgttactgggctcaggcgttttctgctggctcttcggcgcagcggccttgggctttacatcaggcgtcggcggcaacaacacaccaggggcgacggccatgggaattctccatttgcgaagggattgcgtcgtggcttgcgcaagggatggagcaaggtccgggccaacttcgccgagagcctccgtgaaacgctcgccagggcgccgcagcaggcacgctcgctttgcccgcaggtcccgtctggactacaatccagagccgcatccctcccgaggtag

SEQ ID NO: 326106 - DNA, 303 bp, Pseudomonas aeruginosa
atggacctgctcgaaacattcaaagccctgtcgaaccggacacgcctggaaatcctgaaaggcctgaaggacccggcgaagaactttcctccgcaggacgagggcgacgtcgacaccgtgggcgtctgcgtcagcagtatccaggagggcgtcggcctgtcgcagtcgaccgtgtccgattacctggcgatcctgcaacgggcgggcctggtcgaagtcaggcggatcggccaatggacctactacaagcgcaacgaagcgaatatccgtgccctcgtcgagctgatcggcgcggaactgtag

SEQ ID NO: 326107 - DNA, 288 bp, Pseudomonas aeruginosa
atggacacccagacttcattgatgatcttccagctcacctgctgcctcggcttcgccctgtggctgagcctcgccctgatcaacaacctgcaggccttcgccagctcggtgggggcgatcggcgtgaccatgtcgatggctcccctggcccagccgcccgcgatcgacatgcccttgctggcgcgggcggtgcgctcgccgctcatgcaccgcctggccttgtcgatcatcgtcgcgctgcaggtcgctgccgtcgtcacggcctggaccggctgttacgaaccctga

SEQ ID NO: 326108 - DNA, 1011 bp, Pseudomonas aeruginosa
atgccccgcccgaccagcccgcatcccgacgccgagcgcaagagcgccagcccgctgcacccgcgcaatcgccacctgggacgctacgactttccgcgcctgatcgccggcagcccggaactggagcgcttcgtcatcctcaatccgtacggcaggcagagcatcgacttcgctgatccggcggcggtgaaagccttcaaccgcgcgctgctgcaacagttctacgacgtacgcgagtgggatatacccgatggttacctgtgcccgcccattcccggtcgcgccgactacctgcactacctggccgacctgctcggcgccagccacgatggcctgattccacgcggtcccggcctgcgtgcgctggacgtcggaaccggagccaactgcatctacccgctgctcggccaccacgaatacggctggcgcttcgtgggcgccgacatcgacccgcaatcgctggcctcggccgctgcgatcctcgccgccaacccacgcttcgccgctgccatcgagttgcgccgacagcctgatcgcaggcagatattccagggcctgatcggcgtcgacgagcgcttcgacatgaccctctgcaacccgcccttccacgcctcgctggacgaagccacgcgcggcagccggcgcaagtggaagaacctcggcaagctcgacccgacccgcaccctgccgctactgaacttcggcggccagggcgccgagctgtactgcgagggcggcgaagcggccttcctggccggcatggccgaggaaagccgggcgttcgccacgcaggtgttctggttcaccaccctggtatccaaggcgagcaacctgccgaacctccaggagcgcctgaagacgctgggcgccagcgatatccgcgtggtggacatggcccagggacagaagcagagtcgcttcgtcgcctggacctacctcgacaagaagcagcgccgggcctggcgcaaggagcgctggacagcagccctcctggaaccactgggcgaatag

SEQ ID NO: 326109 - DNA, 1131 bp, Pseudomonas aeruginosa
atggcgagctgggagattttctgtagcgtggtcgacaactatggcgacatcggcgtcacctggcgcctggctcgccaactggccgccgagcacggtcaggccgtgcgcctgtgggtggacgagccgcaggccttcgcccggatctgtccgcgggcggacccggcggcgcacgtgcagagcctggatggggtcgaagtgcgtgcctggggccggccgtgggcaccggtggcggccgccgacgtggtgatcgaggccttcgcctgcgaactgccggaggcgcaccggcaggccatgcgcgagcgcgagcggccgtccctgtggctgaacctggagtacctgagtgccgaggaatggatcggcagttgccacgcattgccgtcgctgcaggcgtgcgggctttccaagtacttcttctttcccgggttccgcgagcccagtggcggcctgttgcgcgaggccggcctgctggaacgtcggcgccgtttccaggcctctgcctcggcgcaggatgagtttctcgcctccctcggcgtgcggcggaaggttggcgagcgactgatttcgctgtttgcctacgaaaacccggcgctgtctggctggctggaacaactgcgcgacgcccgccagccgagcctgctgctggtgccggaggggcgggtgctggcggatgtcgccgattggctgcgggtggctaccctggccgtcggggacgtccatgtgcgcgacgcgttgcgggtccaggtgctgccgttcatggcgcaggacgactacgatcgcctgttgtggtgctgcgacctgaacgcggtgcgcggcgaggactccttcgttcgcgcgcagtgggcgggacggccgctgctctggcacatctatagacaggaagaggaggcgcacctggcgaagctcgaggcattcctcgaactctattgcgccggcctgcccgccgacctggcggaaaacctgcgcaccttctggctggcgtggaacgccggcggtggacttgccggggcctgggaggggctggagaggcaactgcccgagtggcgtagggaagcgcagcgctgggccgacgaacagggcatgcgtccggatcttgcggcaaggctggtgcaattttacgcagattggctatga

SEQ ID NO: 326110 - DNA, 252 bp, Pseudomonas aeruginosa
atgaacaacgttctgaaattctctgctctggctctggctgctgttctggccaccggttgcagcagccactccaaagaaaccgaagctcgtctgaccgctaccgaagacgcagctgctcgtgctcaggctcgcgctgacgaagcctatcgcaaggctgacgaagctctgggcgctgctcagaaagctcagcagaccgctgacgaggctaacgagcgtgccctgcgcatgctggaaaaagccagccgcaagtaa

SEQ ID NO: 326111 - DNA, 774 bp, Pseudomonas aeruginosa
atgtgtgaactattgggcatgagcgccaacgtcccgacggacatcgtcttcagcttcaccggactgatgcagcgcggcggcggcaccggcccgcaccgcgacggttggggcatcgccttctacgaaggacgcggcgtgcggctgttccaggacccgctggcgagcgtcgattcggaggtggcgcggctggtgcagcgcttcccgatcaagagcgagacggtcatcgggcacatccgccaggccaacgtcggcaaggtcgggctgagcaacacccaccccttcatccgcgaactcggcgggcgctactggaccttcgcgcacaatggccaactggccgacttccagcccaagcccggcttctaccgcccggtcggcgagaccgacagcgaggcggccttctgcgacctgctgaaccgcgtgcgccgggctttccccgagccggtgccggtggaggtgctgttgccggtgctgatctcggcctgtgacgaatatcgcaagaaaggcgtgttcaatgccctgatcagcgacggcgactggctgttcaccttctgctccagcaaactcgcctacattacccgccgcgcgccgttcggcccggcacggttgaaggatgccgacctgaccgtggacttccatgcggaaaccacgccggacgacgtggtcacggtgatcgccaccgagccgctcaccgacaacgagaactggaccttgcagcagagcggcgagtgggtcctctggtggggcggcgaggtgttggccaaggggcgggtctga

SEQ ID NO: 326112 - DNA, 1773 bp, Pseudomonas aeruginosa
gtgcacccagccgctggtcttgccgagctgcgcgccgggggcgccgggcttgcgctggagcagccagacctggcgcgccggctgcgtcggagcgggttcgcggaggccgccgggctggctgttgtcgaggtccacgccccattccgcgagccattcgccgagcgcccgcggctggccgtcgctgggtgcggcgacgaggaaggcggcgacgtcgaagccgatgccgccggcgccgacgagcagcacgtccacgtagctgagtacggtcggtccgccgatgccgtcgatccttggccggcgtggctggatgccggtggccaccaccacgtcgtcgaactgaccgtccagctcgccctggcgcacccggtggccgaggcgcaggtcgacgccgaggcgttccaggcgcacgcggaagtagcgcagggtttcgcggaactcttccttgccgggaatccgcttggccaggttgaactgcccgccgatttccccgctcgcctcgaacaggctgacccgatgcccgcgctcggcggccacgcaggcggcggagagcccggcggggccggcgccgatcaccgcgatgcgcttctgcgtgcgcgccttgcggtagcgcaactcggtctcgaaggccgcccgcgggttgaccaggcaggtggcgcggcggttggcgaaggcatgatcgaggcaggcctggttgcaggcgatgcaggtgttgatctcctcggcccggccggcaccggccttggccacgaactgcgggtcggccagcaacggccgggccatcgataccaggtcggccttgccggcggcgagcagggattcggcgacctccggggtgttgatccggttgctggcgatcaccggcaccttcagttcgtggcgcagccgtgcgctgacctcggcgaaggccgcgcgcggcaccgaggtgacgatggtcggcacgcgcgactcgtgccagccgataccggtgttgagcagggtgatgccggcttcctccagggccagggcgatgcgccgtacttcgtcccaggtattgccgccctcgaccaggtcgagcagcgacaggcgatagcagaggatgaagcgttcgccgacgatccgccggatgccgcggacgatctccagcgccaggcgcatgcggttttccagcgggccgccccactggtcgtcgcggcggttggtgcgcgggcagaggaactggttgagcaggtagccttcgctgcccatcacttccacgccgtcgtaggcggcggccttggccagccgcgcgcaacggacgaaggcgcggatggtcttgcggatgccacgctcggagagttcgcgcggggtgaaccaactgatcggcgacttcaacggcgaggcggacaccgccatcgggtggtagccatagcgcccggcgtggaggatctgcagcaggatcttgccgccctcggcatgcaccgcctgggtcaggcgacgatgggcgggcacctccagggcgctggtgaggctgctgccgaagggcagcagccaaccttcgcggcagggcgcgaagccgccggtgacgatcagcccggcgccgccccgggcgcgctcgcggtagtaggcagcgagcttgccgaagtcccacagacgatcctccagcccggtgtgcatcgaacccatcaccacgcggttgcgcagacgggtgaagcccaggtccagcggggccagcaggtgcggatagggagcggcggcgagcggcgggtaggggttgcgcatggcgcggttccggtagccagggacgcttcaccatag

SEQ ID NO: 326113 - DNA, 1977 bp, Pseudomonas aeruginosa
atgaccaaccactggaccgacatcaagaatgccgatctggtgctgatcatgggcggcaacgccgccgaagcccacccgtgcggattcaaatgggtcaccgaagccaaggcgcacaacaaggcgcggctgctggtggtcgatccgcgtttcacccgttccgcctcggtcgccgactactacgcgccgatccggaccggcaccgacatcgccttcctcggcggcctgatcaactacctgctggaaaacgacaagatccagcacgaatacgtgcgcaactacaccgatgtctcgttcatcgtgaaggaaggcttcagcttcgaggacggcctgttcaacggctacgacgccgagaagcggacctacccggacaagtcctcctggggctacgagatcggtgaggacggctatgccaaggtcgacccgaccctgactcacccgcgctgcgtgttcaacctgctcaagcagcactacagccgctacaccccggacgtggtgagcaacatctgcggtacgccgaaggacatgatgctcaaggtctgggcggaaatcgccgagacctccaagccgggcaaggtcatgaccatcatgtacgccctgggctggacccagcactcggtaggcgcgcagatgatccgcaccggcgcgatggtccagctgctgctgggcaacatcggcatgcccggcggcggcatgaacgccctgcgcggccactccaacatccagggcctgaccgacctcggcctgctgtccaactcgctgccgggctacctgaccctggcgatggacgccgagcaggactacgacgcctacatcgccaagcgcacggccaagccgctgcgcccgggacaactgtcctactggcagaactacggcaagttccatgtcagcctgatgaaggcctggttcggcaagtcggcgaccaaggaaaacaactggtgctacgactggctgcccaagctcgacatgccgggcgccggctacgacgtgctgcgctacttcgacatgatgtaccagggcaaggtcaacggatacttctgccagggcttcaaccccatcgcctcgttccctaacaaggccaaggtcggcgctgcgctggcgcgcctgaagtggatggtggtgatggacccgctggtgaccgagacctcggagttctggcgcaacgtcggcgagtacaacgacgtcgacaccgccagcatcaagaccacggtgttccgcctgcccacctcctgcttcgccgaggaagacggctcgatcgtcaacagcggccgctggttgcagtggcactggaagggcgccgagccgccgggccaggcgcgtccggacatcgccatcatggccgggctgttccaccgcctgcgcgagatgtaccgcaaggacggcggggccttccccgacccgatcctcggcctcgactggtcctacctcaagcccgacgaaccgggcccggacgaactggcccgggagttcaacggcaaggccctgagcgacctggtcgacccggccaacggcatgatcctggccaaggccggcgagcagttgccgggcttcgccctgctgcgcgacgacggcagcacggcgagcggctgctggatcttcgccggctcctggacccagcagggcaaccagatgggccgccgcgacaacagcgacccctacggcatgggccagaccctcggctgggcctgggcctggccggcgaaccggcggattctctacaaccgcgcctcggccgacgtcagcggcaagccgtgggacccggagaagaagcgcctggtgtggtggaacggcaagtcctggggcggcaccgacgtgcccgactacaaggccgacgtaccgccggaagccgggatgaacccgttcatcatgaaccccgaaggggtggcccgcctgttcgccgtcgacaagatggccgaaggcccgttccccgagcactacgagccgttcgagacgcggtcggaacacaggctgcacttgtag

SEQ ID NO: 326114 - DNA, 483 bp, Pseudomonas aeruginosa
gtgaaccccttgcaccgcgacaaccgcaaggcgatcagcaacccggcggcacgggtgttcaagaacgacatggaactgttcggcacggccgacgagttcccctacgcagcgaccacctaccggctcaccgagcacttccactactggaccaagcactgccggctgaatgcgatcacccagcccgagcagttcgtcgagatcggcgaggcgctggccaaggagctgggcatcaatgccggcgacaaggtcaaggtctcctccaaccgcggctacatcaaggcggtggcggtggtgaccaagcgcatccgcccgctgcaggtggacggcaagaccgtgcaccacgtcggcatcccgatccactggggcttcgccggcatggcgcgcaacggcttcctggccaacaccctgacccccttcgtgggcgacgggaatacccagacgccggagttcaagtcgttcctggtcaacgtggaaaaggcgtga

SEQ ID NO: 326115 - DNA, 990 bp, Pseudomonas aeruginosa
  misc_feature (820)..(829): n is a, c, g, or t
atgttccgcccacgactgctcttgaccagcctcgccatcgccctcggcgcctgttcgccgcaagacccgcaggccgtcaccagtgccgccctggcgcaacaggtgatcctgccgacctacagccgctgggtggaggccgaccaggccctggccagcagcgccctggcctactgccagggcaaggaagacctggccaaggcccgcgacgcgttccacgccgcgcagaaggcctgggccgagctgcaaccgctgctgatcggcccgctggccgagggcaaccgcgcctggcaggtgcagttctggccggacaagaaggatctggtcgggcgccaggtcgaacagttgctgaagaacaacccgcaggtcgacgccgcggccctggccaaggccagcgtggtggtgcaggggctctccgcctacgaatacatcctcttcgacagcaagatcgacctcgctgacgccgccaccaaggcccgctattgcccgttgctggaagccatcggcacccaccagcagcaactggcccaggacatcctggcgcgctggaagaacgacggcggcatgctcacccagatgagcaagttccccaacgaccgctacgccgacgcccacgaggcgatcgccgagctgctgcgggtccaggtcaccgccctggacatgctgaagaagaaactcggtactccgctgggccggcagagcaagggcattccccagccctaccaggccgaggcctggcgcagcaacgcctcgctggccagcctggacgccagcctgagcggcgcccaggcgctctgggaaggtatcgacggcaagggcctgnnnnnnnnnnggcctgaagaccctgctgccggccgaacagaaggccctggccggcaagatcgacgccgcctacgtcgacagccacgcgaagctggcggcgctggaacagaaaccgctctccgaactgctcgccagcgaagacgggcgcaaccagctcaacgccctctatga

SEQ ID NO: 326116 - DNA, 3594 bp, Pseudomonas aeruginosa
  misc_feature (3162)..(3189): n is a, c, g, or t
atgctttccaatccaaacctggacctcgtgtcccgcttcgttcgcctgcctctggcgcagcagaaattgttctatcagcgtgtccaggccaagggcatgagcttcgcccgcctgccgatcccgcagactcgccaggagatggacaacctgccgctgtcctatgcccaagagcggcagtggttcctctggcagctggagccggagagttccgcctaccacattcctaccgccctgcgcctgcgcggtaggttggacattgcgtccttgcagcgcagcttcgcggcgctcgtcgagcggcacgaaagcctgcgcacgcggatcgcgcggatgggtgatgaatgggtgcaggtcgtctccgccgacgtctcgctggcgctcgaagtcgaagtgcaacggggactcgacgaacagcgattgctggagcgggtcgaggcggagatcgcacgacccttcgatctcgaacagggaccgttactgcgggtgactttgctggaggtggacgccgacgagcatgtgctggtcatggtccagcaccatatcgtctccgacggttggtcgatgcaattgatggtcgaggaactggtccagctctatgccggctacagccaagggctcgacgtggtgttgccggccctgccgatccagtacgcggactacgccctgtggcagcgcagctggatggaggcgggggaaaaggagcgccagttggcgtactggaccggcctgctgggcggcgagcagccggtgctggagttgcccctcgatcacccgcggcagccgctgcgcagctatcgtggagcgcaattggacctggagctggagccacacctggcccttgccttgaaacagctggttcagcgcaagggtgtgaccatgttcatgctgttgctggcttccttccaggcgctgttgcatcgctatagcggacaggcggatatccgtgtcggcgtgccgatcgccaaccgtaaccgggttgaaaccgagcggatgatcggtttcttcgtcaacacccaggtgctcaaggccgacatcaatggccggatgggtttcgacgagttgctggcccaggcccgccagcgcgcgctggaggcacaggcgcaccaggacctgccgttcgagcaactggtggaggctttgcagccggaacgcagcctcggccacaacccgttgttccaggtcatgttcaatcaccaggccgactctcgttcggccaaccagggcgtgcaactgccaggcctgtcgctggagcggatggagtggcggagcagctccgtggccttcgacctgacgctggacgtgcacgaggccgaggacggtatctgggcatcgttcggctatgccacggatctgttcgaggcctcgaccgtcgagcgcctggctcggcactggcagaatctcctgcgcggcatcgtggccgaaccgggccggccggtcgccgagttgccgctgttgctggacgaggagcgcgattgcctgttgcgggcctgggcagagaacgccgacgagggtgggttgccgcccctggtccagttgcagatccaggagcaggcccgtctgcgtccgcaggcgcaagcactggcgctggaggggcaggcgttgagctacgccgagctcaacgcccgcgccaatcgtctggctcactgcctgatagcgcgtggcgtcggtcccgatgtgctggtgggaatcgccgtcgagcgctcgctggacatggtggtcggtctgctggcgatcctcaaggccggtggtgcctatgtgccgctggacccgacctatccgcaggaccgtttgcgtcacatgctcgaggacagcgccgtcggcctgttgctcagccaggagcatttgctgcccgggctgcctttgcacgaagggctggaggtgctctccatcgaccgcctggaacgggacgcatcggtgtccacggatgatccggtggtgaacctgcggccggagaacctggcctatgtgatctacacctccggctccaccggaaaacccaagggcgtggccatcagccatgcggcgcttgcgcagttctcgcgtatcgccagtggttattccgcgctcaccccggaggatcggatattgcagttcgccaccctgagtttcgacggcttcgtcgaacagctctatccggcgctgacccgtggtgcctgcgtggtcctgcgtggcggcgacctctgggataccggtgagctgtatcggcagatagtcgagcagggcgtgacccttgccgacctgcccacggcgtactggaacctgttcctgctcgatgccctggccgagccacggcgttcctacggtgccttgcggcagatccacatcggtggcgaagccatgccactggaggggccgaagctctggcggcaagccggcatgggccgggtgaggttgctcaatacctatggaccgaccgaggccacggtggtgtccagcgtcttcgattgttccgccgagaacgcccgggtgggcaatgccagtcctatcggccaggcgctacccggccgtacgttgctggtgctggatgaacatctcggcctactgcccgtaggggcggtaggcgagctttatatcgccagccgtgccgggctggcccgtgcctaccacgatcggcccggcttgaccgccgagcgcttcttgcccgaccccttcggcgaaccgggctcgaggctctaccggaccggcgacctggcgcgccgacgcggtgacggcgtgatcgagtacatggggcgtgccgaccatcaggtgaagatccgcggcttccgcatcgagctgggggaggtcgaagcccgcctcctggacttggagggaatacgcgaagcggcggctcttgcgctggacggtcaactggtggcctacctggtggctgaggggggcgaggacgaaactcgccagccggctttgcgcgagcgtatccgcacagcgctacgggcctcgctaccggactacatggtgccctcgcacctgctgttcctcgagcggatgccgctcagtccaaatggcaagctggaccgtcgggcgctgccgaagccggatgccggcctgatgcaacgcgaccacatggcgccggcgagcgcgctggagaaagatgtggccgcgatatggggcgagttgctgggcgtcgaacgggtcggcctgaccgacaacttcttcgaattgggcggnnnnnnnnnnnnnnnnnnnnnnnnnnnngctgctggcgacgcgcctggtctcgcggattcgccaggatctcggtatcgaagtcagcctgaagagccttttcgagcagccggtcctgcagggattcgtcgagagcctgggcgagaaaccggcggaggttccgccgatcacgcccgttacccgcgagcagccgctgccgttgtcctatgcacaggagcgccagtggttcctctggcaattggaaccggagagcgcggcctatcacattcccgccgccctgcgcttgcgcggcggcctcgatgtcgtcgcgctacagcgcagtttcgagcgccttgcacagcgtcacgagtcgttgcgtacccgcttccgccaggaaggcctgcgtaccgttcaggtggtggacgccgatgggcagttgcaggtttcccggcataa

SEQ ID NO: 326117 - DNA, 2082 bp, Pseudomonas aeruginosa
  misc_feature (1979)..(1988): n is a, c, g, or t
gtggtggacgccgatgggcagttgcaggtttcccggcataacctggcgaatgtcgatgacgcgtcgctcagggcggcagtcgaagcggagatggccaggcccttcgacctacggacggatgcgttgctgcggatcagtctgttcgaagtggctccgaatgaccatgtgctggtcatggtccagcaccatatcgtctccgacggttggtcgatgcagttgatggtcgaagagctggtccagctctatgccgcctacagccaggggcgcgaagcggccctgccggcgctgccgatacagtatccggactatgccgtctggcagcgcgaatggatggaggccggagagagggagcgccagttggcgtactggatcggcctgctgggtggcgaacagccggtgctggagctgccgttcgatcgtccccgtcctgcggagcagagctttcgcggcgcgcggctggagttcgaactcggcgccgagcgggccaggcggctgaaggcgcttgcccagcggcagggtgcgagtaccttcatgttgctgctggcatcgttccaggcgctgctgtatcgctacagcggtcagtcggatatccgtgtcggcgtgccggtcgccaatcgcaaccgggtcgaaaccgagcgactgatcgggttcttcgtcaacacccaggtgctcaaggccgacatcgatgggcagatggggttcgagcgattgctgcaccaggttcgccagcgctcgctggaggcgcaggcgcaccaggacttgccgttcgagcaactggtggaagccttgcaaccggagcgcagtctcagccacagcccgctgttccaggtgctattcaactaccaggcggagcggggcgagcacggcttgccggaagtcgcgggactgagcatcgaagagcaggcgtgggaaagccatacggcgcagttcgacctggtgctggatacctgtgagtccgagtcggacatctgggcggcgctggtctatgcgaccgatctattcgatgcttcgaccgcagagcgcctggtacggcattggcagaatctgctggatgcgatcctggcgatgcctgacgctcgcctgggagagctggacatgctcgaccgcgaggagcgcgaagtcatcgggcagctctggaaccgcagcgactcgggctatccggcaacgccgctggtacaccagcgagtggccgagcgggcgcgtatggcgccggatgcggtggcggtgatcttcgacgaggaaaagctcacctacgccgagctggatagccgggccaaccgcctggcccatgcgttgatcgccctaggcgtcggccccgaggtgcgggtggcgatcgccatgcagcgcagcgcggagatcatggtggcgttcctggcggtactgaaggccggcggcgcctacgtgccgctggatatcgaatacccgcgcgagcgcctgctgtacatgatgcaggacagtcgcgcgcacctgctgctgacccatagccacctgctggagcgtctgccgatccccgaggggttgtcctgcctgtccgtggatcgcgaggaggagtgggccggcttccccgcccatgatccagaggtggcgctgcacggcgacaacctggcctatgtgatctacacctccggctccaccggcatgcccaagggcgtggcggtgtcccacggtccgctgatcgcccatatcgtggctaccggcgagcgctacgagatgaccccggaggactgcgagctgcacttcatgtcgttcgccttcgacggttcccacgaaggctggatgcacccgttgatcaacggcgcgcgggtgctgatccgcgacgacagcctgtggctgccggaacggacctacgccgagatgcatcgccacggggtaacggtgggggtgttcccgccggtgtacctgcagcaactggccgagcatgccgagcgcgacggcaacccgccgccggtacgggtctactgcttcggcggcgacgcggnnnnnnnnnnagcaactggccgagcatgccgagcgcgacggcaacccgccgccgaagcagtagacccgtaccggcggcgacgcggtggcgcaggccagctatga

SEQ ID NO: 326118 - DNA, 1062 bp, Pseudomonas aeruginosa
gtggcgcaggccagctatgacctggcgtggcgggcgctgaagccgaagtacctgttcaacggctacggcccgaccgagacggtggtgacgccgctgctgtggaaagcgcgagcgggcgatgcctgtggcgcggcctacatgccgatcggtacgctgctgggcaaccgtagcggctacatcctcgacgggcagttgaacctgctgccggtaggcgtggcgggcgaactgtacctgggcggggaaggggtggcgcgcggctacctggagcgtccggcgctgaccgccgagcgtttcgtgccggatccctttggtgcgccgggcagccggctgtaccgcagcggcgacctgacccgtgggcgtgcggatggggtggtggattacctcggacgggtggatcaccaggtgaagatccgaggcttccgcatcgaactgggagagatcgaggcgcgcctgcgcgagcatccggcggtgcgcgaggcggtggtggtggcccagccgggcgcggtgggccagcagttggtgggctacgtggtggcgcaggagccggcggtcgcggattcgccggaagcgcaggcggagtgccgggcgcagttgaagacggcgctgcgcgagcgcctgccggaatacatggtgccgtcgcacctgttgttcctggcgcggatgccgctgacgccgaacggcaagctggaccgcaagggcctgccacagccggatgcgagcctgttgcagcaggtctacgtggcgccgcgaagcgatctggagcaacaggtcgcggggatctgggcggaggtcctgcaattgcaacaggtcgggctcgacgacaacttcttcgaactcggcggccactcgttgctggccacccaggtcattggccgcctacgcgaacgactgcacctggaggtgccgatcaagtcgatgttcaccgcggagacactgggtgagttctgccacggcgtcgagaccctcaaggccgagagcgcgccggtggaagatgccctggctaaatccctggaggcgctcaaacgtctatctgccgatgaacttgaaaaactgatttcctaa

SEQ ID NO: 326119 - DNA, 228 bp, Pseudomonas aeruginosa; identical to SEQ ID NO: 323684

SEQ ID NO: 326120 - DNA, 555 bp, Pseudomonas aeruginosa
atgtccaagcagcacatcatccatttcaccgggccgatcaattcgtccacctgcggcaatctgatcaacacttgcgccaagatcctgcaacaggaggccgaggagttgcggatcaacatcgccaccatgggcggggaatgcagctacggctttaccctgtacaacttcctgcgcgcgctgccggtgccgatacatacccacaacctgggtaccgtcgagtcgatgggcaacatcctgttcctcgccggcgagcgacgcagcgccagtgcccacagcaagttcctgttccatcctttccactggaccctgcatggcgcggtggaccatgcgcggatggcggaatatgcgatgagcctcgactacgacctggagctttacgcccggatcgtcgccgagaacacccgtgatgcgccggaacgcctggacatcccgagctacctgatggcctatccgcgcatcctcggtccggaagacgccctggcttgcggactgatccatacggtggacgattcgcctatacccgcttccgcctgccagtggagtatccattcctag

SEQ ID NO: 326121 - DNA, 609 bp, Pseudomonas aeruginosa
atgacccgcgaaatggctcggctactgatcagtcccaccaatgcctggcctcgtctgcgccaggactacgaccatcaccctttcgccttcctcgttccgctgttgctgttgccgctgctgccggcggcctgcctgttcatcggcacgacgcaggtcggctggtcgctgccgggcaacgacagcgtgcaacacctctccagcggcagcgccctgctgctggcgacgatgtgttacctgggcttcgtcgccggcgtggtgatcatgggcttcttcgtacgctgggtgctgttccgcacgccgtcgcgtcccagcgtaccgggcagcctgaccttcaccacggcgatcgccgtgcccttgatgctcgccgggatcgtcgccctggtgccctggcgggtcctcctgctgctggccgcggcggctgcctgcgcctactcggtacgcctgctgttcaccggcctgccgctgttcatgcgcatgcaggagcggcagacattgttctacgccttctgcatcctcggcgtcggcttcctgaccctgctgaccaccgccttcatcttcatcgagttctgggggcaaagcctggccggcagcggcgagtacctgcgctga

SEQ ID NO: 326122 - DNA, 855 bp, Pseudomonas aeruginosa
gtggtagcggtccagttcgccttccagcgcctcgatacgcgccgccaggcgctcgcgctggcgctcccagccctgggcgccgccggcgtcggcgaacagcgcttcgagctgctcgcggatgttgcggatcaccggttcgcggtcgcggttgacgtcgttgagcatgacgatgcgctggcccaggccctcggccaccaggcgcttgtgcaccacttccagggcggcgtgcttctggcagacgatcagcaggctgcgctggcggccgatggcgtcggcgaccatgttgacgatggtctggctcttgccggtgccgggcgggccctccaccagcagccccgggctctgccgggcctgcagcacggcggcctcctgggacgggtcgctggccacggtgaagtagcgctgcaactccggcgggctctcgcgggcttccggctcgtcgttctcgcgcaggcgcagcgcggtctccaggccggtgccggagggcggcaggctcttcagctggcgcaggtcctcgccgatcgcctggcccatgaaggtgacgtggaacagcaccgcggcgcaggccagttggtcctggtagggcgtgacctcggtggaactcggcggcaatccttccagcacccgcgcacgcggggtggcgagcaggccgaaggcatccatcacgtcggcggcgcgcagcgcggagcggccgagcaattcgtcggcgaccttgcgccagcgcttgcacggctcggggccgagcaggctttccagggccgggttgaggcgcacttcctcgcgttcgccgtcgaaggccagcgccacctggccgcggctgccgacttccagttgcagcttcagcggccacagtag

SEQ ID NO: 326123 - DNA, 723 bp, Pseudomonas aeruginosa
atgccggtgtcgcgcttgtacagcgagctttgccgggacagcgcgttgagccgcacttccagttgcgggttggcgaggaagctgtccgggtcgaggctcaccgcgcgggcgttgcgttgcagcaggtggtcgagcagagcggcggcggggcgtcgcgcgctatccagttcgttgaggtcgatgcgtggagtgctcttgccgatgctcatgcgcaccagcggcccgcgcatcactgcggcgaccactttcttctcgaagaaatcgaggatctgcgacacgtactgctgcttctgcggttccagccactgttccggcgggatcgccagcagcaccaggaccctcgccaacggcatgcgccgctccaggcggaactgctcggcccattcgtcgaccctgggcacgccgctgcgggcgaagccgctgatgcgttcgtcgacgcggcggtacaactcctgccgcgagtgctgcaacaggccgcgcgcggtctccgcgtcgaacaggtgcacatcggcgtcgcgggccaggccggtggcttcctcgacgatcgcctcggcggcacggaactggccgatgttggcgctgagcaggacgatcaggtcttcctcggcgatcacccggcgctcggccagggccagcaggccggggtgctcggtgtccggcaggaggcgctggcgctcctgccactgcgcggcgaggcgcgcccgcgaggtcgacagcaggtag

SEQ ID NO: 326124 - DNA, 1506 bp, Pseudomonas aeruginosa
gtgctggtgcagggcacgctggcggacgttctcggcgcgggtcttgagccgcgacagccagctttcggtgtgcaactgttcgagcaggtcgggcaccgagccgctgatcagccggtggccctccagcggatgctccagcagccagccgggggtgacgatctcgccgcgctggatcagcgggatttccgggttcagcagcttgagcgccagcatcagccggaagtcgtcctccagcccctcgtgctgggccacctggcgcaggccggcgagcagcctgggcgacaggccgatgtgctcggcccaggtgacgatcgccccgcgcagcaggtggtcgagggcctccgcccagtgctcggcctgggccgcggccagggcgagcactgggatcaggaaggcgttggcgttgaccccttcgaagcaggcgccgcgggtcaactgctccagcaggatcatgcccaggctccaccagtcggaagccgccgccacgccgccggcgatcgcctcgggggccatgtagcggctggtctccagcggcgagacgatatccaggtcgaactccgacaggcgggccgagccgaagccgctgatcaccaggtccagtggctcgtggctgcgcaccagcaggctggccgggcgcaggtcgcggtggcgcaggccggcttcgttgaacacgtgcagggcgtggcccagctcgcggaccacgtggcgcaccgcctcgcggtcctccagcacggtgccgagctcggcgaggctgccgccggtgagttcctcgaccacttcgtaggcgcgctcgtcccagcggccgctggcgaggatttccggcacgtgttcgcgcggcaggcggcggatcacgtcgtagatcgccgggtccggctcggcgcccgggcgatacagggtgagcaccgcctgacgggccctttccgcatgttcggccaggtagcgctcgcgcacgccgtcgctgctgacgatctgccgcagcaggcgccagccgtcgatcagggtttccgtgacggcgggctgcggcgtggcctcggcctgcatcggcagcgggccttcggccggcgcggcgccgcactccaggcacatcaggtcgccgggttgcagcgggtggccgttggcgcagagcggggcggacgccgctggcggctcgctggcgggtggcgcgatggcttcctgggtcagcaccggttgcggtcgccagccggcgggatggatggcttcggcggaaaggtcccagccgcagggctggccctggatcgagccttcgcagaaaatttccgaaagcgagcgttcgctctggcagttggggcagaaacgtatcatcggtatcgatccattcagcgcggccgatgggcgctgacgctaagttggtggccctggtcgcgcagcaggtcctgtagccgcagcaggtcgtcgcggcgcgggatgccggccatccacacgctgccgtcgtggtcgaacatcaggtcgagggccttgtcgtcttcgcgcagtggccgctggtag

SEQ ID NO: 326125 - DNA, 543 bp, Pseudomonas aeruginosa
atgaacgcccacccctacctgctccgtctcgccgccggcctggcgctgctcctgccggccgcctgcacgtcccctgccccgccagcaccgaacctgaccgagctgttcgccgacgccctgcactgccgcggcgacttccccgacgcccgcgcccgcgcaaccgccgagcgcctgcgcgccgagggcgtcgaagtgctggatcgcgcgcccggcgagaccctcgacctgctctaccgcttcgccaccccgctgcgcatcgacggcagcctggtgaacgcggtgcgggtacgcggcgacagcggcgtgctggtgatggcctacgccgagggcgacctcgaagacttcgcccggcgccagggcgcgacgccgcacccggcggaacgcgccgcgctggatggtttcggcgagctggaggtgctctacagccggccgctgtcgccgcgtcccggcctcgacgaaagcccgccgcgcctggtgatcgggcgcgggatcgaggcggcggcgcaggcgttccgctggggctgccggagctacgacggttga

SEQ ID NO: 326126 - DNA, 1959 bp, Pseudomonas aeruginosa
gtgaggaaggcctgcgcctggctgctggcgctggccctctgcggagccggcaacgcgacggcggccctgcgcctgaaactcgacgcgcctgagctggaccctgcgcagcgcgaggccagccagcaactcttggacgaagccgcggacaagctgccgccggccttccacgaacgcctggaccgcgagatcgaggtcgagtggcgcgacgacctgcccgccaacggcatgggccaggcccgtggtccgcagcgcatcgcgctgaaccgcaagtacctgtccgatcttaccgacggcagcgccgccagccgccagaccgggcgcgtgcacggcaccgagcggcgcgagctgctggcgaccctgctgcacgagctgacccacgtctacgatcgcgcgcgcctgtggtcggcggaggaaaaacgcgagatccgccgctgcacgcgccaggaagaaaccctcggccggatcgcccagcccaccgattgccgcgggcagagcgggcgccgcttcacgctctccgacgacccgcgcctgctcgatctcgccggctggccgcagcgcgccggccagcgcgggcggcgcgaggcgcacaatggcttcgtactgcgcagcccggacgtctacgagctgagcaatccgcgcgagttcgtcgcggtgaacatggagtacttcctcctcgatcccagctacgcctgccgccgcccggcgctctaccgctactaccagcaacgcttcggctgggcgccggaacacagtgcctgtgcgcagagtttcgcctacctcaacgccggccgcgacttcggccagcagccgctgggccagctcgaccccgagcgggtctacgaggtcgactacctgctggccgaggccaacgacaacctggtcagccgctggggccacaccatgctccgcctggtgatctgcgcccccggccggccgcgtgggccggactgccggctggacctcgaccagcatctggtgctgtcctaccgcgccttcgtcggcgacctgcaattgtccagctgggacggcctgaccggcgcctatccgtcgcgcctgttcgtcctgccgctgtcgcaggtgatcgaggaatacaccaaggtcgagctgcgcagcctcgcctcggtgccgctgaagctggaccgcgaggaggtcgccagcctggtcgagcgcgccgcgcagagtcactggagctacgacggccagtactacttcatctccaacaattgcgcggtggaaaccctcaagctgctgcgcagcggcatcccccggcgaccgctgcaaagcctggacagcatcaccccctacggcgtgctcgagatgctggagaaccgcaagctggccgatcccagtgtgctcgacgaccccaaggaagccctgcgcctgggctaccgcttcgactccttccgcgaccgctaccaggcgatgttcgacgtgctcaagcagcgcctgcacattccccaggacaaggtcgaggactggctggcgctgccggccagggagcgccaaccctggttcgccaaggccgacctgcgcgccagcgcggcgctgctgctgctcgagcaggcctcgctgcggcgccagctgctgctcgcccaggacgagttgaagcgcctgtacctcggccacctggacaagccggccggcgaccagcgcctggaagtggccggcaagaccttccagcagatcctcgacgacagcggcttcctcagtcgtccggcggaactcctggagggcggctacggcctgccgcaggccgccgagtggaagcacctggaagagcagacccgcgaacgccaggcgcgcctgcgccggctcagcgacgacctcgaccgcgaggtccgcgccctgctcgatcccgagcgccgcgccgagctggaagccaacgaggccaacatcaaggaggtcggcgcgcacctgcgcgagctgcacaaggcggccggcgggctgatgctgccctga

SEQ ID NO: 326127 - DNA, 783 bp, Pseudomonas aeruginosa
atggacttcgaaggcttcggcgatcagcaccgtgccgaccacgatgaggaacgacagggcgagcatcttcagcgacgggtgcttgtcgatgaagtcgctgatggcgccggcacagagcatcatcaccagtaccgcgacgatgatcgccgcgaccatcaccggcacgtgggagaccatgccgacggcggtgatcaccgagtccagggaaaagacgatgtcgatgatcgcgatctggatgatggtgccgatgaagccgcccgccgaacccttcggttcctcgccgctttcttcctcgccttccaggccctggtagatctccgagctgcttttccagagcaggaacaggccgccgaagaacaggatcaggtcgcgtccggagatgccctggccgaacaggtggaagaggtcggcggtcaggcgcatgacccaggtgatcgacagcaacagcaggatccgcgtcaccatcgccagggccaggccgaagaagcgggtgcgtggctgcaggtgcttcggcatgcgcccgaccaggatcgagatcatgatgatgttgtcgatgccgaggacgatctccagggcggtcagggtgaagaacgcaatccagatttccgggctggtcagccattccatgaagcggtcactcgtctcggtcagttactgaacagggggaacaggcccagcagcagggccatggcgaggattgccaggcacaccagcacggcccatttcagggtgaagcgctggtggtcgccgaagtcgatcttggccagccccaccagcaggtag

SEQ ID NO: 326128 - DNA, 222 bp, Pseudomonas aeruginosa
atgacgctaccctacgaacgtacccgctcggtggtgcaggcccaggagtttctcgtcgagctctctcgtgacaccaccttgtcggagtccatccgcaatgaggctcggcggctgctgtgtcactacccgagcaagggcgacatgctgcaggccggccggaatgaggagcaagcggcgggttcgattttcgagcctgtcttcagctcttcgattgaagactga

SEQ ID NO: 326129 - DNA, 972 bp, Pseudomonas aeruginosa
atgaaggacgtcgagcgctacctgcaagccggcacgcgggaaaacacccggcgtagctaccagtcggccgtcgaacatttcgaggtgacctggggcggcttcttgccggccacgagtgactccatcgtgcgttacctggtggactacgccgacacgctgagcctcaacacgctaaagcagcgcctcgccgccctcgcgcagtggcatatcaggcacggcttccccgatcccaccaagaccccgaccgtacaccaggtactgaagggaattcgcaccctgcacccgagccagacaaagcaggccgcgccgctgcaattacagcatctggagcatgcggttgagtggttggagcaggaggctatgtgtctgtttcaagccgaagacctggcgggatatttgcgctgtcggcgggatacggcattgctactaatcggcttctggcgaggctttcgtagcgatgaactgtgccgcttgcaggtggagcacattcaagccgaagccggtgctggcatgacgctgtttttgccttggagcaagggtgaccgggacaaccttggcaccactcactacgtacctgcgctgaggcggctgtgcccagtacaggcctatctcgactggatcggtgcagcagggattgctcgagggatggtttttcgtcggctggaccgttggggcaacttgaacgaggctggcttgaatcctggcagtctgatcgtcctactgcggcagatactccagcgtgcggggatccaggctgacctttataccagccactcattgcgtcgaggcttcgccacctgggccacggccaatggctgggacattaaggcgttaatgacctacgtggggtggaaggacatcaaatcggcgatgcgctacatcgaccctgccatctcctttggcggcctcgctgcgaggcctgctctcgaactaaatgccagcactttgactcaagtgccagcttctcactaa

SEQ ID NO: 326130 - DNA, 930 bp, Pseudomonas aeruginosa
atgaagaacggtgaccgccttaccggcaagatcaccctgttcgacggcggcaagctgctgctgaagaccgactatggcggcgacatcacgctcaagtgggacaagatctccaccttcgagagcgagcagaacctgctggtcaagcaggatgccgagaccggcgagcattccaagggcatcagggccgccgggccgggccaggtgaccctggtcaatggcgagccgaagaccgtggagctggccagcatccagcagatgatgccgcccaagccgatcctccaggactgggtatggaacggcaacgtcgatttctcgctggaccgcaagcaggccgagaacgatgtgtccgactacgacatcgatttcaagaccaacgcccgccacggactctggcgccacaacgtgcagggcgagtacaaccgcgagaagaagaacggcctggtcagcaccgacaattattccggccagtacgcgctggaccgcttcatcgacgaccactggttctggcagggccaggtcgcctacaagcgcgacatgatcgaggacctggcgaagaagcgtaccgtcggtaccggccctggctaccagttctgggacaacgagctgggcgcgttctccattgccaccctggtcaaccgcaacgactacgagttcgccgacggcgagaaggagcacttctattcgtcgagcttcaagtgggactacaaccgctacctgctggccaagcagttcgagctgttcaccaacggcgaggtcagcaagccgctgcaatccggcctggactacgagctgcagaccgaggcggggatccgctacaagctgaccagttgggcttcgctgagcatgaaggcggaatgggacaagttcagcggcaacgacggcaacgtcaaccagcgccgctataccttcggcctcggggtcggctggtaa

SEQ ID NO: 326131 - DNA, 639 bp, Pseudomonas aeruginosa
ttgctgctggcagtcggcgcggcgctggcgcagtgggacctggagtcgatactgagccgtgccgagcagcgctacggcgagctaggcgcggcgaaatcacgcctgggcgactggggccgcctgctcgaacagggcggcacgctcgacgaagcggccaagctgcgcgcggtcaacgacttcttcaaccagtcgctacgcttcaccgacgacatcgaaatctggcagcaggaagactactgggcgactccggtcgaggcgctggtcaagggcgcagccgactgcgaggactacgccatcgccaagtacgtgaccctgcgtcgcctcggcgtcgccagcgacaagctgcgcatcacctacgtcaaggccctgcgcctgaaccaggcgcacatggtgctgacctggtacgccagcccgggcgccgacccactggtgctggacaacctgatcggcgagatccgccccgcttcgcaacgcgacgacctgttgccggtgtacgccttcaatgccgagggcctctggctgcccggcgccgacggcggacgccggaccggcgacagcaagaagctgtcgcgctggcaggacctgctgaccaagatgcgcgccgaaggcctcgacctcgacgcccccaaggaggattga

SEQ ID NO: 326132 - DNA, 2709 bp, Pseudomonas aeruginosa
atgaacggcatcccacccctgtcttcccgcgacgcccatgccagcccgccgcaacgggtgctggaacgattgcacagctccgccgccggcctggacgcggacgaggccgcccgccgcctggcggcgcacggctacaaccggttgcccgcgccgaaacgccaggggccgctgctgcgcttgctgcggcagttccacaacgtcctgctgtacatgatgctgttcgcctcgctggtcaccgcgctgctcggcttctgggtggacagtgcggtaatcctcctggcggtggtggtcaacgcgctgatcggtttcgtccaggagggcaaggcggccaacgcgctggacgccatccgcgacatgctttcgctgcatgccctggtcctgcgcgacggccagcgccaggcgctggacgctgaacgcctggtaccgggcgacgtggtgctgctggcctccggcgaccgggtgccggccgacctgcggctgttcgaaacgaagaacttccatgtcgacgagtcggccctgaccggtgagtcggtgccggtggagaagggctgcgtcgcggtggccatcgacgcgctgctcggcgaccgccgttgcatggcctattccggcaccctggtgaccagcggccaggcgcgcggagtggtggtcgccaccgccggggataccgaactgggccggatcggtacgctgttgcgcgaagtccgcaccctggccactccgctgctgcgacagatcgccagcttcagtcgctggctggccctggcgatcctgctgctggccggcgccaccttcgtcctcggcaccctctggcagggccagccgatggtggacatgttcatgctggtggtggcgctgaccgcctcggcgattcccgaggggctgccggcgatcatgacggtgatcctcgccctcggcgtacagcgcatggcccggcgcaacgccatcgtcagccgcctgccggcggtggagacgctgggttcggtgacggtgatctgctcggacaagaccggcaccctgacccgcaacgagatgaccgtgcagcgtatcgtcaccgccgaccaggtgatcgaggtcagcggcgccggctacgctccgctgggtggtttcagccacaacggcgaaggcctcgatcccgccggacgcgacgatctgcaggagatcggtcgcgcggcgctgttgtgcaacgaggcgcgcctgcaccaggagggcgaggcatggcaactggagggcgaccccaccgaaggcgcgctgctcagcctcggcctcaagctgggcctcgatccgcaggcgctggcggcggaacggccacgcagcgatgcgattccgttcgagtccgagcatcgcttcatggccaccctgcaccacgaccacgcgggccaggcgatggtctacctgaagggcgcgccggagcgcatcctcgacatgtgcgaggctgaacgggtgggcgactcggtgcggtcgctcgacccggattactggcggcgcctggccaccgacaccgccgctcgcggcctgcgcctgctggccatcgcccggcgggcgatgccggcagagcagcgcacgctggatttcgccgacgtggaacatggcttcaccctgttggccctggtgggcatcatcgatccgccgcgcgaggaggccgtggccgcggtcgccgaatgccaggcggcgggtatcgcggtgaagatgatcaccggcgaccacgtcgacaccgcgcgggcgatcggcgccatgctcgggatcggcatcgaccggccggcgctgaccggcgcggagatcgaactgctcgacgaccagcgcctgcgcgaagtgctgccgggcgtcgatgtgttcgcccgcgccagccccgagcacaagctgcgcctggtgcaggccctgcaggccagcggcgaggtggtggcgatgaccggcgacggggtcaacgatgcgccggcgctgaagcgcgccgacgtcggcgtagcgatgggcaacaagggcaccgaggcggccaaggaggcggccgaggtggtcctcgccgacgacaatttcgccaccatcgccaatgccgtgcgcgagggaagggcggtctacgacaacctgaagaaattcatcctcttcatgctgccgaccaacggtggcgaggcgctgatcgtgatcgccgcgatcctgttccagttgaccctgccgatgacgccggcgcagatcctctggatcaacatggtcacctccagcaccctgggcctggcgctggccttcgatccggccgagcgcggcctgatgcagcgtccgccgcgcccgccggcggagcccctgttgtcgctgttcttcgtctggcgggtgctgctggtctcgctgctgatgatggcgggcgccctgggcctgttcctctgggagctggagcatggcaccgggctggagcgcgcgcggaccatggcggtgaacagcgtggtggtgtgcgagatgttctacctgctcaacagccggcatatctacgattcggtgctcagccgcgagggcctgttcggcaaccgccaggtcttgctggcgatcgccgcctgcgtggtgctgcaactgctctatacctacgcgccgccgttgcaggcgctgttcggctcggtcggcctggccccgggcgagtgggcgcgggtgctgctggccgggctcggcctgttctgtgtcgccgaactggaaaagtggctatgtcgccgggtccgtgcccggcaggcctga

SEQ ID NO: 326133 - DNA, 720 bp, Pseudomonas aeruginosa
atgtcccgcgatcccatccttagtttgccctggcccgacgcccggccactccccgacaccttcttcgaccgcgatgcgttgctggtcgcccgcgagctgctgggcaaggtgatccgccatcgccagggcaatctctggctggcggcgcgaatcatcgagaccgaggcctactacctggaggagaaaggcagccacgcctcgctcggctacaccgagaagcgcaaggcactgttcctcgacggcgggcacatctatatgtattacgcgcgcggcggcgactcgctgaacttcagcgccggcgggccgggcaatgcggtgctgatcaagtccggccatccctggctggatcgcatcagcgaccacgcggcgctggagcggatgcagaacctgaacccggacagccagggccggccccgcgagatcggccgcctgtgcgccggccagaccctgctgtgcaaggccatggggctgaaggtgccggagtgggacgcacagcgcttcgatccgcagcgactgttcgtcgacgatgtcggcgagcgccccagccaggtgatccaggccgctcggctgggcattccgaaggggcgcgacgaacacctgccgtaccgtttcgtcgatgccgccttcgccgccttctgcacccgcaacccactgcgccgcggccaggtcgccgggcgcgactatcatctactcggacaccaggacccgcacctgcaatga

SEQ ID NO: 326134 - DNA, 753 bp, Pseudomonas aeruginosa
atgctcctggaccagcgtcatcaggccctggtcgaggtcctggaggtacggccaggcgacggtcatcgccagcagcaggaccaggctcagcgcggccgccacagcggttgcccagcgtttgcgtcgcaggctggcctggactaccacgccgaccagcaccgccaggcaggccgcgacgatcccggcttcgctccagaagccttccggcaacggcaggcgcagggctgcgcccctccaccgacagcacctggaaacgccgaccgcccagccggcggcggcaatcagcgaaacgccgagaaaacggccgaacggcatgtcgagcatgccggcgaccatcggcagcatcggtcgcagggcgccgatgaagcggccgaccagcaggctggcgataccgtagcgctcgaagtacacctcggcggcggtgatccactgcggatggctgcgcaggccgggcaggcggcggatgttctggtggaagcggcggccgatccagtacgagctgaggtcgcccagcaccccgccggcgtaggccagcatcagggtttcgccgaggctgagggcgccgctgccggcgatcaccgcgacgccgaacagcagcaccacgccgggcaggacgatgccgacgatggccgcgcattcgaggaaggcgatgaggaagatggccatccccagccactcggggttggcggccatccaggcgttgaagctgtcgagactcattgcaggtgcgggtcctggtgtccgagtagatga

SEQ ID NO: 326135 - DNA, 831 bp, Pseudomonas aeruginosa
atgggttacgtgacaacgaaggatggcgtcgaactcttctacaaggactgggggccgcgcgacgcccaggtgatctacttccatcatggctggccactgagttccgacgactgggatgcgcagatgctgttcttcctcgccgagggctttcgcgtagtggcccacgaccgccgtggccacggtcgttccagccaggtctgggacggccatgacatggaccactacgccgacgacgtggcggcggtggtcgagcgcctcggggtgcgcggggcgatccatgtcggccattccaccggcggcggcgaggtcgtccactacatcgcccgctatcccgacgacccggtgccgaaggcggcgatcatcagcgcggtaccgccgctgatggtgaagaccgagggcaatccgggcggcctgccgaagagcgtcttcgacgatctccaggcgcagctcgcggccaatcgcgcgcagttctaccaggacattcccgccggcccgttctatggctacaaccgtcccggggcgcagccctcggaagggatcgtccgcaactggtggcggcagggcatgatgggcggcgccaaggcccactacgatgggatcgtggccttttcccagaccgacttcagcgatgacctgaagcgcatcgacatcccggtgctggtgatgcatggcgacgacgaccagatcgtgccctacgagaattccggcgtactctcggcgaagctgttgcgcaacggcacgctgaagatctatccggggttcccgcacggcatgccgaccacccaggccgaggtgatcaacgccgacctgctggccttcatccgcggctga

SEQ ID NO: 326136 - DNA, 291 bp, Pseudomonas aeruginosa
atgaccttcgtcgtgctggaagaatgcatccgctgcaaacacaccgactgcgtggaagtctgtcccgtggactgcttctacgaaggccccaacttcctcgtcatccaccccgatgaatgcatcgactgcgcgctctgcgagccggaatgcccggtcgccgcgattcgcgccgaggacgaggtgccgctcgggcaacggcagttcatcgccctcaatggcgaactcgccgcgcatcccaactggacgcgcctgccgggcaagctggccgaactcgaccgcaacggcgcctga

SEQ ID NO: 326137 - DNA, 2310 bp, Pseudomonas aeruginosa
gtgactacgccgtccccgcaatggaagaagaccgcctgtatcctctgcagcctcaactgcgggctggaagtgcagaccgagaatggccgcatcagcaagatccgcggcgatgacgaccaccccgcctcgcagggctacgtctgcgagaaatcgcagcgcatggactactaccagaacggcgccgaccgcctggacacgccgatgcgccggcgccccgatggcagctacgaagccatcgactgggacacggcgatccgcgaggtggcggagaagttcctcgccatcaagcgcaggcatggcggcgaaagcatcctctactacggcggcggcgcgcagggcaaccacctcggcggcgcctacggcgacagcacgctgaaggccctcggggtgaagtaccgctccaacgccctggcccaggaaaagaccggcgagttctgggtccagggcaagatgttcggtaccggcgtgcacggcgacttcgagcattgcgaggtggccatcctgatcggcaagaatccctggcaatcccatggtttcgcccgcgcccgcgtgctgctcaacgccatggccaaggatcccgcgcgctcgatcatcgtgatcgacccgcgcctgagcgaaaccgccgccctggccgacttccacctgcagatccgtccgggcaccgacgcctggtgcctggcggcgctggtcgggatcatcgtccaggacgggctgctggcgcgcgactggctggccgagcacaccagcggctacgagcacatcgtcgacgaactgaacgccatcccagtggcctactgcgccgagacctgcggggtggcggaagacaagctgcgcgccgccgcccggcggatcgccagcgccagcagcgtatcggcgctggaagacctgggcatgcagatgaacctgcactcgaccctcggcagctacctgcaacgcctggtctggttgctcaccggccattacgggcgccccggcaccagcaacgccttcgtgcccttcctctcgctgtccaaggccagcaagggcgatacctcgatgggcaagaagggcgcgccacgcgtcgagaagcgcagcccggtggccaacgccaagatcatcatcggcctgattccctgcaacgtgattccagaggaaatcctcaccgaccatcccaagcgctatcgcgccatgctggtggagaccggcaacccgctgcattcgctggccgatagccagcgcatgcgcgaagccatgcgcgccctggagctgtcggtggtgatcgacgtggccatgaccgagaccgcgcgccacgccgactacgtgctgccggcggcgagccagttcgaaaaggccgaggcgaccttcttcaacctggaattcccgcgcaacgccttccatctgcgcgcgccgctgttcccggcgcgccccggcaccctgccggaagcggagatccacgcccgcctgctagaagccatgggcgtgctcggcgagaaagactaccggccgctgcgcctggccctcaagctcgggcgcaaggcgttctcggcggccttcctcgccgccgcggcgacccgccccaaggtcatgaaatacgcgccggtcctgctctaccgtaccctcggcccgaccctgcccgccggcatggaagcggccgcggcgatctggggcatctgccaactgcacgtgctgaacaaccgcaagaccgctgcccgcgccggcttcgacggcttgccgccgctggccgccgaccgcctgttccaggccatgctcgacaacccgtccggggtggtcttcgccgaaaccacccacgccgaaagctggcaggccgtcgcccgtcccgaacagcggatcaacctgcacatccccgaactgttgccggaactggccaagctcgcccacagcgcgccaccccacgatccggcctacccgttcatcctcgccgccggcgagcgacgcagcgacaccagcaataccgccgtacgcgacaccggctggcaccgccgcgggcgctacggcaccctgcgcatcagtccgcaggacgccgaggcgctgggctgcgccgacggcgaggtgctgcgcgtggtgacccgccgcggcgacgtcgaggcggaagtggagatcagcgacatgatgcagccgggcaatatctccctgcccaacggccagggcctggactaccgcaacgccgagggcgaggtggtgcgccggggcgtggcgcccaacgaggtgaccgactgcacccagcgcgacttcctcgccggcacgccctggcacaagtacgtgccggcgcgcctggaacggctggcgacgcccgccgctacgaacgcctga

SEQ ID NO: 326138 - DNA, 2625 bp, Pseudomonas aeruginosa
atgaaaagcgctgaaatccgtgaagccttcctccgcttcttcgaagagaagggacacacccgtgtcgcttccagttcgctgatcccggcgaacgatccgaccctgctgttcaccaacgcgggcatgaaccagttcaaggactgcttcctcggcctggaaaagcgcgcctacacccgtgcgaccaccagccagaaatgcgtgcgcgccggcggcaagcacaacgacctggaaaacgtcggctacaccgcgcggcaccacaccttcttcgaaatgctgggtaacttcagcttcggcgactatttcaagcgcgacgccatccattacgcctgggagttcctcaccggcgagaaatggctgaacctgcccaaggaaaagctctgggtcaccgtctacgccaccgacgacgaggcctacgacatctggaccaaggaagtcggcgtgcccgccgagcgtatggtgcggatcggcgacaacaagggtgcgccctatgcgtccgacaacttctgggcgatgggcgataccggaccttgcggtccctgcaccgagatcttcttcgaccatggtccggagatctggggcggcccgcccggttcgccggaagaggacggcgaccgctacatcgagatctggaacaacgtgttcatgcagttcaaccgcactgcggacggcgtcatgcacccgctgccggcgccgagcgtggacaccggcatgggcctggagcgcgtcagcgcggtactccagcacgtgcactcgaactatgagatcgacctgttccagaacctgctgaaagcctccgccgaggccatcggctgcgccaacgacgacgcgccgtcgctgaaggtggtagccgaccacatccgttcctgcagcttcctgatcgccgacggcgtgctgccgtccaacgaaggtcgcggctacgtcttgcggcggatcatccgccgcgcctgccgccacggcaacaagctgggcgccaggggcaccttcttccacaagatcgtcgcagcgctggtcgccgagatgggcgatgccttccccgagctgaagcaacagcaggcacacatcgagcgcgtgctgaagaccgaggaagagcagttcgccaaaaccctggagcaaggcctgaagatcctcgaacaggaccttgccgaactgcagggcagcgtgattcccggcaacgtggtgttcaagctgtacgacacctatggcttcccggtcgacctgaccaatgacatcgcccgcgagcgcgagctgaccatcgacgaggacggcttcgagcgcgagatggaggcccagcgcgagcgcgcccgcgcttccagcgcctttggcatggactacaacagcctggtcaaggtcgacggcgagacccgcttcctcggctaccagggtgtctccggcgctggacagatcgtcgcgctgttcagggacggccaggccgtcgagcgcctggaggagggcgaggagggcgtcgtggtcctcgaccagacgccgttctacgccgagtccggcggccaggtcggcgacagtggctacctcgaggcggctggcgtgcgcttcgacgtgcgcgataccaccaaggccggcggcgcgcacctgcaccacggcgtggtcgcccggggcaacctgagcgttggcgccgcggtcaaggccgaggtcgacgcctcggtacgccaggccaccgcgctcaaccactccgcgacccacctgctgcatgccgcgctgcgccaggtactgggcgaccacgtacaacagaagggctcgctggtggacagccagcgcctgcgtttcgacttcagccacttcgaggcgatcaaggcggaacaactgaaggccctggaagatatcgtcaacgccgaaatccgtcgcaacaccgaggtcgagaccgaggaaaccgatatcgacaccgccaaggccaagggcgccatggcgctgttcggcgagaagtacggcgaccaggtgcgcgtgctgagcatgggcggcgatttctccgtcgagctgtgcggtggcacccacgtatcccgcaccggcgacatcggcctgttcaagatcaccagcgagggtggcgtggctgccggcgtacgccgtatcgaggcggtcaccggcgcggcggcgctggcctacctgaacggtgccgaggagcagctcaaggaagccgccagcctggtcaagggcagccgcgacaacctgctggacaaactcggcgccctgctggagcgcaaccgctcgctggagaaggagctggaacagctcaaggccaaggctgccagcgcggccggcgacgacctttcggcggcggcggtggaaatcaagggcgcgaaggtactcgccgcgcgcctcgatggtctggacggcaaggcgctgctggcgctggtcgaccagttgaagaacaagctcggccgcgcagtgatcctgctcggcggcgagctggacgggaaggtcgtactggtcgcaggcgtgacccaggacctgaccggtcaactgaaggccggcgagcttatgaagcaagccgcggcggcagttggtggcaaaggtggcggacgcccggatatggcccagggcggcggcaccaatgcagcgaaattggacgaggccctggccctggcccagcgcttcgtcgagcaagggctctga

SEQ ID NO: 326139 - DNA, 270 bp, Pseudomonas aeruginosa
atgaggatgtccggcgaggtcttctgggtgaccacgccctgccgctgcacctcgtcgggcaggcgcgagagcacccgcgagacccggttctgcacctggatctgggccatgtcgggatcgatgtgctggtcgaaggtgatggtcaggatcattcgcccgtcggtggccgactgcgaggacatgtacagcatcccctcgaccccggtgatcgcctgctccagcggcgtcgccaccgtctgcgcgatcacgtcggggttggcgccgggatag

SEQ ID NO: 326140 - DNA, 381 bp, Pseudomonas aeruginosa
atgaacactgccgccagcaccgaggtaatcgccatgatcggtccggtgacctcgtccatcgcacgccgcgcggcctggagcggcggctcgccgttctcgatgtggcgctcgacgttttccaccaccacgatggcgtcatcgacgacgatgccgatcgacagcaccaggccgaacagcgacagggtattcagcgagaaacccatcagatgcatgatggcgaaggtgccgaccagcgagaccggcacggccatcagcggaatcagcgaagcacgccagctacgcaggaacagcaccaccaccaccacgaccagcaggatcgcctccagcagggtggtggccacggtctgcaacgaagcgcggacgaacaccgtcgggtcgtag

SEQ ID NO: 326141 - DNA, 231 bp, Pseudomonas aeruginosa
atggccagcgcgccgagatcggcggaggtgcgcgattcgaacgggtcgagcatgaagaacatgaccgcggcgttcggcacgttgacgaagccgttcaccgacaggcccgggaaggccacgacgctctccacccccggctcgtcgaggccgatccgggacatctgcctgaccaccgcttcggtacgctccagcgacgctccgttcggcaactgggcgatgccgaccagatag

SEQ ID NO: 326142 - DNA, 894 bp, Pseudomonas aeruginosa
atgacctccacctcccgcggcctcgccggaacgctgttgccggtcggcctgctattgatcgccatggcctcgatccagagcggcgcctccctggcgaaaagcatgttccccctggtcggcgcccagggcaccacggccctgcggctgttcttcgccgcgctgatcctgctgctgctcctgcgtccctggcgcaagcgcctgagcctgcaatcgctgcgctcggtggtggtctacggcatcgccctgggcggcatgaacctgctgttctatctctcggtgcgcaccgtgccgctgggcatcgcggtggccctggagttcaccgggccgctgctggtggcgatcctctcctcgcggcgcctgctggacttcctctggatcggcctggcggtgttcggcatctggctgttgctgccgctgggcaacagcgccgagccgctcgacctggtcggtgctgcctatgccctcggcgccggcgtgtgctgggcgctgtacatcctcttcggccagcgcgccggcgccgaccatggcgcccagggcgccgcgctgggggtgctggtggcggcgatcctggttgtgccgatcggcgtcgcccacgccggcgccgacctcctcgacccggcgctgatcccgttggcgctgggcgtcgcggtgctctccacggccttgccctacaccctggaaatggtcgcgctgacccgcctgccggcgcgcaccttcggcaccctgatgagcatcgagccggccttcggcgcgctctccgggctgctgttcctcggcgagcggctgagcccgacccaatggctggccatcggcgcgatcatcctcgcctcggtcggcactaccctcagcgtcaagtcgcgtggcgccgccccggcgctaccggccaaggactga

SEQ ID NO: 326143 - DNA, 1128 bp, Pseudomonas aeruginosa
atgatcgaagcggattacctcgtcatcggtgccggcatcgccggcgcatccaccggctactggttgtcggcccacggccgggtcgtggtgctggagcgcgaggcgcagcccggctaccactccaccggccgctccgccgcgcactacacggtggcctacggcacaccccaggtgcgcgcgctcaccgccgccagccgggccttcttcgacaacccgccggccggcttctgcgagcatccgctgctcagcccgcgtccggaaatggtggtcgacttcagcgacgatccggaagaactccgccgtcaatacgaaagcggcaaggcgctggtgccgcagatgcgcctgctggacgcggaacaggcctgctcgatcgtgccggtgctgcgtcgcgacaaggtcttcggcgccacctacgaccccaccggcgccgacatcgataccgacgccctgcaccagggctacctgcgcggcatccgccgcaaccaggggcaggtcctgtgcaaccacgaagcgctggagatccgccgggtcgacggcgcctgggaagtccgctgcgacgccggcagctaccgcgccgcggtgctggtcaacgccgcaggcgcctggtgcgacgccatcgccgggctggccggcgtccgcccgctgggcctgcagcccaagcgccgctcggccttcatcttcgccccgccgccgggcatcgactgccacgactggccgatgctggtcagcctcgacgaatccttctacctgaagccggacgccggcatgttgctcggctcgccggccaacgccgatccggtcgaggcccacgacgtacagcccgagcaactggacatcgccaccggcatgtacctgatcgaagaagccaccaccctcaccattcgccgcccggaacacacctgggcggggctgcgctcgttcgttgccgacggcgacctggtggccggctacgccgccgatgcggaaggcttcttctgggtcgccgcccagggcggctacggtatccagacctcggcggcgatgggcgaggccagcgccgcgctgatccgccaccagccgctgccggcgcacctgcgcgagcacggcctggacgaggcgatgctgtcgccgcgccgcctgtctccctga

SEQ ID NO: 326144 - DNA, 642 bp, Pseudomonas aeruginosa
atgttgaccaacggtgcaactgtccccaagggcgtgcctgttcgcgccgcgaccctcaatgctgcgacgggccggtatgaggtgacggttcccgcaaagtccaccgtgccgaatacaccaccgctgatcttgacctggacccctgccacccctccaggaagccagaacccctcaagcaccactccggtcgtaccgcagccggttccggtgtatgagggagcaacgatcaccccagtacaggccgagccggagtcctatccgggagtgccgttagatctggacgatctgattgtgatcttcccggtgggctcgggggttaagccaatctatataatgttcaatcataaccctcatgatgttgttattgatgataagatcagagagcaaattccaattagagggtggactgaggttgaaattagagatgttatcggaaaaggtgcaacaggtagttcttcagataagcgtcggcctaataagacgatagatgggctggggcggaatgactctgcaacagtatatggaagtcctcctaatggatatatagttgtgaacgataggacaggtgaaattattcaaattgcagatcggaacgattccgcatgggcggttgacgggcgaatcatctggagaaataagtaa

SEQ ID NO: 326145 - DNA, 2211 bp, Pseudomonas aeruginosa; identical to SEQ ID NO: 324276

SEQ ID NO: 326146 - DNA, 1659 bp, Pseudomonas aeruginosa
atgtccgactcccttccccagcgcaacggcgggcagatcctggtagaggcattgcggcgcaatgccgtcgataccgtctactgcatccccggggaaagctacctgccggtgctcgacgcgctgtacgacgccgacggcatccgcaccatcgtcacccgccacgagggtgccgcctcgaacatggccgatgcctacggcaagctgaccggccgaccaggcatctgcttcgtcacccgcggccccggtgccacccatgcggcgaatggcgtgcacacggcgcagcaggactcgacgccgatgatcctgttcgtcggccaggtggaaagcgccttcaagggccgcgaggcattccaggaagtcgactacgtgcagatgttctcgggcctggccaagtgggccgtggaaatcgaccgtatcgaacgcatcccggagctcgtcggccgcgccttcagcgtcgccacctcgggccgaccggggccggtcgtggtcgccctgcccgaggaaatcctcttcggttccgcgcaggtcgccgatgcgccggtgccaagggtgcttccggggcggccgggcgccacggcgatggcggaactgcgcgaactgctggcgaacgccaggcgccccctgctggtacttggcggcagcggctgggacagcgccgccaggaaacggctaggcgccttcgtcgaggccaatggcctgccggtggccacatcgttccgtcgccaggacctgttcgacaaccgcgacccgcactacgccgggcaactgggcttcggcgcggcgccggcgctattggagcggctgcgccaggccgacctgctgctggtggtcggggcgcgcctgggcgaaacgccgagcgctggctacagcctggtgcgtagtccggcccccgcgcagacgctgatccacgtgcatccggacagcgcggaattgaaccgcgtctacctggcgcgactgccgatccaggccaccccgtgtgccttcgccgaggccctggccgacctcgctccgttgccctcgagcacctggcaggactggcgcgaagccgcccatgccgactacctggcctactcgaccccggccgcgagcgaccccgccatccagggcgtcgacctggcgtccgtggtcgcgtacctcagcgaaaacctgccggacgacgcggtgatcgccaacggtgccggcaattatgccgtctgggtgcatcgcttctaccgctatcgccaggcccgcacgcagttggcgccgaccaacggcgccatgggctacggcctgcccgccgcgatcgccgccagcctacgcgatccgcagcgcagcgtggtgtgcttcgccggcgacggctgtttcatgatgtatccgcaggagctggcgaccgccgcgcagttcggcgcgacgccggtggtgatcgtggtcaacaacggcatgctcggcaccatccgcatgcatcaggaacgcgaatatcccgggcgggtatccgccacccgcctggacaaccccgacttcgtcgccctggcgcgagccttcggcgcccacgccgaacgagtggaatgcagcgccgacttccccgccgcgttccgccgcgcccgcgaaagcggacgcccggcgctgctggagctgctgaccgacccacgccagatcacgccgcaggcgcgcctcgcctga

SEQ ID NO: 326147 - DNA, 1461 bp, Pseudomonas aeruginosa
atgaagaagtctatgctttcttgtttgtgttttgtgcttcttctgcactttttattggttttgaaagttgcggcggaagtcttttgtgagtcttgtctacaggtgcgggtggagcgcccgctagtagttagggttgggtctcacgagcctggcctagatactaagttttatgtaataaagctctctgaaaatttattcagaggctacagttccggaggtggtgatgcttacgcaataaccgggccggaggcctggtctatgggctggcctgccaataaggtgttaagtaaaggtgccgcagggtcctacagcgagtgtggagtatggataaattctccggttaagatcggagatgtctatgttgcagccgtgcatcaggagcaaaagtgcgactacatcaatggtgggcagacgcacaagtcaatgggagtatcgttttcttatgacggtctatcttgggttaatccaattactgtgttgaccagccctgaggcaccgaagatggggacccaatctggggagggtgactgttcactggttcgggcccccgatgaaggctacctctatatgtattgtttcaggccggggcgatgggataatatcgtggcgcgtgctccggaggcatcttatatgttcccgtcaagctggaggaaattatataaaggaaattggagtgagcctgcgattggtggtatggcagatagtttgggtactatagggagtagtgttgggtattggcgggctggacgtaaagttattgcgcttgatctcgatccatggtttggcgggataaagctgtcattgtcctcggattataagaatttttttactcttaaggatcctcttgttccgtttgttaaaaatgattgggatcgaaatttaatcgggaagtcaactgacttaatcgcatatgtgggggtcgtgaatctacttggtggcgggaatcgagttgataattccggctggggtatcacctatacttatataccgcatggaggaacgctaaaggaaaagtatctcgtctttcaaggggttaacatgaaggtggttagtgaacctcaacaggcttccgtaggtttggctcttacccgctgggagcacaggagtgggaaatacagagttactactctgcctgtggtgagacaatccgagtacaccgagcgtaatcgtatcgcatatctcctgactcgtcctgtcgttggtattgaaacgcttgaggtggaggagtgtgtgaatagacaggatcccgatgattatctcgtgactgatgcaggaggatgtgacgggagcggacatgatcgaatcgccactatcggttgggtgtataaatgcccacaaaaaaatacggtccctatttatcgctgttactctccgcttggcgaaaatcattttctatcatcgaatgcagggtgtgatgatttgggaagcttggaatggaagcttggatatggtttgaagtaa

SEQ ID NO: 326148 - DNA, 324 bp, Pseudomonas aeruginosa
gtgcccagaatcgactgcctgcgtggcatcaacgccgcgatccgtttcctctccgcggaacccttactagaagacttgggtgaactgaacctgactgacatccattgggtcatcgtcggcggcgagtccggcgccaaggcccggccaatgaagcaggagtgggtggataacatccaccgccagtgcgatgcctttggcgctgctttctttttcaaacaatggggcggctggggctccgatggcgtgaagcgttcaaagaaagctaatggccggctgctgaagggccagacctgggatgaaattccgctgctgaccctcgcctga

SEQ ID NO: 326149 - DNA, 1422 bp, Pseudomonas aeruginosa
  misc_feature (1094)..(1103): n is a, c, g, or t
atggccaaggatgacgagaagtaccgctgggactgggcaacccaaacctttcccaccatcgatccacacagcaagatcaagcaccagatcatcgacgactacatccaggcctacatcgatgtcctgatgcggaatcagcaaatgccactgcttggcctatcaattgtcgatggcttcagcggtggaggtatatataacgacagcgcaggcggtcaccacttcggctccccggtgatcgccctggaagcaatccaggagtcggaagtgcgcaacaacgtggggcgcatcaagcatcgaccgatctgctcgcagcatcactttgtggatgtgaagccgaagaatactgcttgcttgcacgccgtcctggccagccgcggacatcaggcccgcattggacaggacattcacctgcataccgccgagttcaccaaagctcttccggccattgcgcaaagcctcaaggcctttggaaaaagcgagcgcgttctgtttctgctcgatcagtacggctacggcgacgtgccattcggccagatcaaatggatcttccagcacctcagcaatgctgaggtcctgctgaccttcaatgtcgactttctaatcacgtacttagcggaccgccacgccaaccgcaaggctattgccagtatcggtctagaacagtatgtcccctgggaacagctacggcacttaaaagcacatagctcccaggattggcagtacctgatccagcgctatctgtcggacgggatcaagcaggaaagcggcgcgcagttcatgacggtgttcttcattcgcccacacggcaccaaccccatggcctactggttcatccacctggcgaacagctaccgcgccaacgacgtgatgaaagccatacactggaagtacggcaacaatttctcccacctgttatcaccgtcctgcttctttggttacgacgctaaccgggatgtgggggtgaccggccagccggacctactctgcgaaggagaacaccagttcgaccaagtgactgatacccggattcgtggggaactgtccgagctgctacccaaacaggtattcgaagtcgagcgtcgtcccttcatccnnnnnnnnnnccttcatccagctcatgacggagctcaccaacttcaccatggcagacgaaagtcgcgtgaagctggccctggatgtcgcggtggccaacggcgatatccaggcagtggacaaggaaggcaagagcaggcggcgcaaaggcacgagcatcaagtccaccgatatcctgatcgcgccgccgcagaagacgtttttcttctttccccaacagaagaagacgtccagggacacatgaccatcaacaccgctgccgccaacagtgttagatctgatcctggccttgtcgaccgaaacgctggtcaagcgctccactgcggttaa

SEQ ID NO: 326150 - DNA, 1410 bp, Pseudomonas aeruginosa
atggatttttcaattaatcccccccagcgaattgtctttgtgggactaggaacgattgcccagtccttccttcctctcctttctaaggttcacgacttatctactttagaaatctacgcgatcgatccaaaaacaccaccgcttattgagtactttgctaacagttttggcttaaaatttatcaactctgcaattgatcaaatcaactatcgcgacattcttgtgccgattcttggtgaagggacggttctaataaatctatcaaccgatgtctcaagtcttgccctgatagaattatgccgctccgcaggggctctttatttagacacatgcattgagccgtggaagggcggatatgatgacccaaccataccactgcataagcgaactaactatcacttaagagaacaaatgctgtctctgaaaaagaggctaggctcaggggtgacggctctcgtggcgcatggcgcgaatcctgggttggtatcccacttcgttaaacgtgctcttttagatttagcggaagagatattgggtgattgtaaaaagccctctaataaagagcagtgggctatcctaagccaaagattgggtgtcaaagtaatccatgtcgcagagtacgactcgcaaatttctcagaaatctagggagaggggtgagttcgtaaatacttggtcagtgcatgggttcataagtgagtcgcaacaaccggcagagttgggctggggaagtcacgagcgaagtctacccacggatgcgtcaatgcatacagatggatgcggagcagcaatctatattgagaagccaggggcctctgttagagttaagacatggacgccatttaacggccctagcttaggttatttggtaactcatcacgaggcaatttcaattgctgactttttgacgctcagaactgccgatgagacatatagaccaactgtccattatgcctatcgcccaagcgatgaagcaattctctctgtacatgaatggttcggcaatgattgcatgactccagaaaagacaaaagtacttcgtcctggtgatatcttgtcgggttctgattacctcggtgttcttcttatggggcacgaaaaatctagttattggtatggatctatcttaagcatcgaaaaggccaaggaacttgccactctcaacactgcaacaacgttacaggtagcagccggagttctttccggttacttatggatcctgagccatccgtcggcaggaataattgaagccgaagacatggatcatgaagtggcactatcttatatttcacagtatctaggcgaactaaaaggggtttattcggactggaatcctaccaaaaacaacccaggcaccttttcggccatagatagcgactctccctggctgttctcaaattttgtcctctga

SEQ ID NO: 326151 - DNA, 741 bp, Pseudomonas aeruginosa
  misc_feature (51)..(60): n is a, c, g, or t
atgttaagtcgggtattggtcttaaaagctacgaatggtcatccctggagnnnnnnnnnntccctggagttgctgaagggtttgtcaattgaacagataaagtcgaatccctcaaagctcgaggagcgtcggcctttcttttggcatgacatgagctctgaatttgattcaataaacttcttgcgctacttgtttggccgtcgcgacattcaatttagcaatgaatttatcgagttcgtatgcctgtggcatctcgatgagcaaaatcattatcgcggactgagaaagattaatagcgtactttactccatgccggaagacatgattgatcgcgagattagatcgaactctccggacttttctcatatcgaagacttcatgaaggatgaattcacaattcttctctctatcgcatttgatgaagtgaccagcacaagagcctacaagcaagatgtaagcttctttgactcgtttgaaaacgagtctctttcaacctggattagatatgctgcccgtgatgaggcagcccattacggtaatgcaatgaaaattcttcgccttaatcactctcatcgctttgatgaggttgaggcgattctagacaagattgtggaattcgaaacttcagagagcttcgactatcagcgaacctttatatttgaccatgacaccgacgacttttctcatgttttattgaaggatagtcgcgataccatattagaggtacttcgaggaaaatga

SEQ ID NO: 326152 - DNA, 267 bp, Pseudomonas aeruginosa
atggtggcttcgtcggtgattctgcagaacaccgtggacatgatgcgcatcttgcagaaactagcccgcgaagggtggcagtttaccgatgaggacgtgtcctttcttagcccctacctgaccagtaacgtcaagcgtttcggcgagttcaaccttaagctcaaccgaccgccggagccctggatcaaggattcggtattccaacaggctgccggctcgttgcgagtcaactcgaccagtaaggccgcggccgaggaggcaatatga

SEQ ID NO: 326153 - DNA, 276 bp, Pseudomonas aeruginosa
atgagcgaacaggacgacaaccaggaagacggcttcgccgaggaaaaactgatccaggccatcgagaaccagatcgaaagcgagaatccgccggcggcgagcatggcgttgatctcgtgggccagcacgggctacgagcgcgacgaggcactgggcatgatggcctacgtgctggcccacgagatcaacgccatgctcgccgccgaccgcgctttcgacagcgccggctacgagcatgcgctgcgtgccctgccgacgttgccggacgacgaatga

SEQ ID NO: 326154 - DNA, 4869 bp, Pseudomonas aeruginosa
atgaccgggcgcaaccgcgaggcgatcgtcgccctgctcggggtgatgcgcgcggcggcggtgtacaccccggtcaatccggagtttccggcggcgcgggtggagcggatgcgcgaagcgggcgggatcgtcttcgcccttgccgatgccgagtgcgccgggcgcgcccgcgaggccttcgccggggcctgcctggacctgtcgacgctgccgcttgccggcagcggcatgagcctgccggcgccgggcgggcgcgatgcggcctacatgatcttcacctcgggcaccagcggccagcccaaaggcgtggtggtcgagcacgccagcgcgctcaacctgtcccaggccctggcgcgcacggtatacgcgaacgtggtgggcgagggcctgcgggtgacggtcaacgcgccgttctccttcgattcctcgatcaagcagattctccagttgctctccggccattgcctggtcccggtgccgcaggaggtgcgcagcgatccgcagcggatgctggggttcctcgaagaacggcgcatcgacgtgctcgactgcaccccgtcgctgttccgcctgctgctccaggccggcctcgacgatgcccatccggcgctgcccgggtgcatcctggtagggggcgagcgcttcgacgaagcgtcctgggaggtcgccgccggctggcgccgctgccaggtgttcaatctctacggtcctaccgaagccacggtgaacgccagcctggcgcgggtcgccgagcatgcgcggccgaccatcggccgcgccctggccaacgtcgatctgcatgtggtcgatggcctcggtcgtcgcaagacccgtggcgccagcggcgaactgtggatcggcggcgccggggtggcgcgcggctatgccggcgacgccggcgaggcggccgggcgcttcctcgaggagggctggccgggcagcggccgcctgtaccgcagcggcgacctggtgcgctggcgcgccgacggttgcctggagttcctcgggcggatcgacgaacaggtgaagatcaacggctaccgcatcgaactgggcgagatccgcagcgcgttgctggaacacccggcagtgggcgaggcggcggtactcaccgacgaggccgatgcggccgagccgggcacggatcgccggatcgtcgccttcgtcaccgccgccggggagaccgcggacgagtcctggctggaagtcgacctgcccagcgggcaccgggtcgccggactgaacctcaacgaaaccgagtacgtctaccaggaaatcttcgtcgacgaggtctacagccgcgacggcatcgtcctgccgccggacgcggtggtcctcgacgtcggtgccaacatcggcctgttctcgttgtacatcgccagccgcgcgccgcgcgcgcgagtggtcgccttcgagccgctggcaccgatccgccggcgcctggaggccaacctcggacgctacgcaccgcaggtcgaggtattcggcatcggcctgtccgacgccgagcgcgaggaaaccttcacctactatccgggctactcgaccttctccgggatcgccgagtacgccgacgccagcggcgaacgcgacgtcatccgacgctacctgagcaaccagggcgaggagggcggggccaacctgctgctggacaacatcgacgaaatcctcgacgaccgcctgcgcgccgaagcccaccgctgccgcctgcgccgcctcgaccaggtgatcggcgaactgggcctggagcgtatcgacctgctgaagatcgacgtgcagcgcgcggaaatggatgtgctgctcggtctcgacgatgcggcgctggccaaggtccggcagatcgtcctggaggtccatgacaagcgcgacggtgccaccgccggccgcgccgatgccttgagcgacctgctgcgccgccatggcttcgaggtgagcatccgtcaggacgcgctgctggagggtaccgaccgttacaactgctacgcggtgcgcccgggctatgccgagtcgctggccgagcgcatcgactggcgcgcgctcgcgccgcgccccgccgcggcccttggcggcgagctgagcgagcaggccctgcgtggcttcctcgaggcgcgcctgccggcctacatgctgccgagccggatcgcccgggtcgaacgcctgccgctgaccgccgaaggcaagctcgaccgtcgcgcgctgttggcggcgctggccgccgaggcggccgcgcagcccctggaagcgccggccaatgccaccgaggcggccctcctggatatctggaagagcgtgctgaaacgcccggcgattggcgtcagcgacaacttcttccaggtcggcggcgactccatccgcctgatccagatgcaggtcatggcgcgccaggccgggcttgcctttaccctgcgcgacgtgttcaaccaccagagcatccgcgaactggcgcgcctgctggccgctccggcgagcccggcggatgcggtcgggacctcggcgccgcagacgctggagccgttcgccctgttgtcggcggcggaacgcaagcgcctgccggaggggctcgacgacgcctatccgatgaccagcctgcaacagggcatgctcctgcaaagcgaggccagcggcgatccacggctgttgcacaacgtcgtcctgcacgaggtgcatggacgcctggacagcgagttgctggcgcgcgcctgggcgatcctgatcggccgccacgcgatcctgcgtaccggcttcgacctgcacggcggccaggcgcccttgcaatgggtccacccggccacggcggtcgccgccgaagtgccggtgcacgacctgcgcggcctcgatgaggaagcccggcgcctgcgcctgcgtgcctggatcgaggaagagcaggccaccccgttcgactggagccgcccaccgctggtgcgcctcgccgcgctggcgctggacgagtggcgcttcgccctgggcgtcgccgaacaccatagcgtgctggacggctggagcctgcaaagcctggtggacgagctgctggcggtctacgccgacctcctcgccggtgtcgtcgcgcgggaagcggaagcgcccgcggtaggtttccgcgactacgtggcgctggagcgcgaggccgaggccaacgccggctcggcgctgttctggctcgactacctggccggcgcccgttaccggccgttgcccggcctggcggaggaggggccccggcggatggcggcggtccgcgtggacgtgccggccgacagcctgccgcgcttgcgcgccctggccgaacgcagcggcttgcccttgcgttcgttgctgctggcggcgcatggccgggcgttgtgccgcttcagcgatgccgacgaagtggtcagcggcttcgtcagccacgggcgccccgaggagccgggagcggaccgcctgctcggcctgttcctgaataccctgccgtgccggctgtcggcttccgtcgatctgctcgacagcgcccgtcgcgcattcgactacgagcgcgcgagcctggagcatcggcgccatccgctggcggcgattcgcaggcgcaaccgcgagttgcgcctggacagcctgttcaacttcgtcgatttccaccaggacgacgccgcgccggcggcgggagtaaggcacggcagcatcctcgaccaggtggtggtggacgtcgacgtgccgctggcggtggacttcgaggtggccggcgaacgcctcgaggtgggcttccagtacgccgccggacgtttccccgccgagcgcgccgaggcattggccgacgcctaccgcgaggcgttgctggcgctgctcgaggacccggcgcagccgcccgcggcggtccaggccgaggacagcgtggagctgcggcgggtgctcaaggtgttgtcccgggtgctcggccggccgctggcggccgaccagggcttcgccagcgccggcgggcattcgctgctgggcgtgcaggcgatcgccgaattgcgccggctgaccggcaggcaactgagcctggggctgttgcagggcgatccggatgcccgcgaagtggtgcgccgctgccatgtcgccgacgcgccgccgttgccgcccgccaccgagcgcgcccgggccctgtggttgcagcgcagcgggagcgcgcagccgcgcctgcgcctgatcgcgctgccgcccgcgggcggcaacgccggcactttccgcggttgggacgcgcgcctgccggcggacgtggagctgctggcgatccagtatccggggcgccaggaacgccaggacgagccgttcgtcaccgatgtagaggccatgctctgtgccatcgacgacgcgctcctgccattgctcgaccgtccgttcgccctggtcggcgccagcctcggtggcatgctcgcctacgaactggcggcacgcctggaaagcctgcacggcctgcgcgccaggcagttgttcgtgatcagcagccgcgctccggggccggacctggaatacccgcgcttccatgcgatgggcgacgccgagttgctgcgaaccctgcgcgagtacgacgtgctgccgctggaagtgctcgacgacccggagctgcgcgagatcagcctggccaccctgcgcgccgattcgcgcctggccgccgactatcgctaccggccgcgcgagccgttggcgataccgatcaccgcgatccttggcgaacaggacccgggcgtctccagggcggccatcgacggctggcggcggcacgccagccgctacgagctggagactctggccggcggccacggcctggtggtgacggcggcggaggaggtctgcgcgatcctgcggcagcgcctggcgcccgatgtgcctggcggcgtgccggcgaacctggcaacctga

SEQ ID NO: 326155 - DNA, 225 bp, Pseudomonas aeruginosa
atggacgaggtgcttagacggaggctgcgggcggagctgctggaggtggggtttctcaaccagtgctgccttgatctgatggaagcgatggaggccgagttcagcctcaccgaggaccagcgcgaatgcatcgagcagctcggccgattcctgcgggagggcatcggcaagctgaccgctctgtctgagcgggtagccgatggcgatatcgtcgtgctgtgctga

SEQ ID NO: 326156 - DNA, 291 bp, Pseudomonas aeruginosa
atgaccatgaaacgagtcctactgaaaggcgaattcttcgcggaatgggatggcacactggacgaggccgctgcactcgctggcgtccctgtcggcgacttggcgttccacccggatgacgtgctggccgaggtccaggagctgcgccgccaggcctatcgcgcggagtccgacccgctgcgcctggaggccgagtttgacgccatcgccgctggcaccgagccggacctggcggcatgggtcgcagccgtccaggcgatcaaagaacgctatccgctcccccagtcctaa

SEQ ID NO: 326157 - DNA, 621 bp, Pseudomonas aeruginosa
atgttcacaacgtcatggactccaagcaccttcatcaatggctggaacggcgccaccctcgcagatgggggcaagtttgtgttcgacaacagcacgaacggcggggcggggccggcgctcaatgcgcgggtgcaggcgcttctcgcggcaatgggccggacgtggacgtcagtgtcccgatacggggtcgagttcttcaccacggtgctgacagcgggatcgcagacaactaccggctcggccggcgcggatggggttacgcggtatctgtgctgctccaacggcagtaagaccgttttcaacgcgggcgcgtgggcgacggtcgtcatgtggttgcgggtcgaaagcggctcggctcatatctcgtcggcgcgttatacgacccatcgcctttggatcaatggcgctgtcgctgctcctggcgtggtgctgcctgcgaaccaatgggtgcatctgcggttctcgatgcagtcatacaacggctatgacaacgcgtgtccgtacatctacgcatcctccggggctcagatcgcgtttgcatgcccggcgtggttcggtggcctcgtcgatccgggtatccacgttgcacccatcctgacaatcaacggagcaagcgcatga

SEQ ID NO: 326158 - DNA, 837 bp, Pseudomonas aeruginosa
atggaagcctatgccgccgccaaggccaagctgttcgcctggccgggcctgcgctgccgggtgatcaacctggacgacgatttcggccgtcgactggccggcgaggaacaggactcggagttgatcacctacagcctcaccgacagctcggcgttcctctattgccgcgaagcgcgcttcggcgacgccggcatcgaggcggcactggtcactccgcacggcgagggcctgctgcgcagcccgttgctcggccgcttcaacctgagcaacctgctggcggcggtcggtgcgctgcttggcctgggctatcccctgggcgatatcctccgcaccttgccgcaactgcaggggccggtcggccgcatgcagcgcctgggaggcggcgacaagccgctggtggtggtggactacgcgcatactcccgacgccctggaaaaagtcctggaggccctgcgtccgcacgcggccgcgcgcctgctgtgcctgttcggctgcggtggcgatcgcgatgccggcaagcgtccgttgatggctgcgatcgccgaacgcctggcggatggggtgctggtcaccgacgacaacccgcgcaccgaggccagtgcggcgatcatcgccgatatccgcaaaggcttcgctgccgctgacaaggttaccttcctgccgtcgcgcggtgaggcgatcgcccatctgatcgcttccgctgcggtggatgacgtggtgctcctggctggcaagggtcacgaggattatcaggagatcgacggcgtacgccatccgttctccgacatcgagcaggccgagcgcgccctggccgcctgggaggtgccgcatgcttga

SEQ ID NO: 326159 - DNA, 1797 bp, Pseudomonas aeruginosa
atggccgatgcactgatcgacagccaggttcccgccaagagcggcggtgccgggatgctgaagaaatccttcccgggactgtcgttcctcgacaacctttccgagatgaccatgctgcgccagatcggcctgctggtcggtctcgccgccagcgtggcgatcggcttcgccgtcgtgctctggtcccagcagccggactacaagccgctctatggcagcctcaacggggtcgacgcgaaccgtgtggtggaagcgctgaccgcggcggacattccctacaaggtcgaacccaactccggcgcgctgctggtcaaggccgacgacctcggccgggcacgcatgaaggtggcctccgccggcgtggcgccgaccgacaacaacgtcggtttcgagatcctcgacaaggaacaggcgctgggcaccagccagttcatggaagccaccaactatcgccgcggcctggaaggcgagctggcgcgcaccgtgtcgagcctgaacaacgtcaaggccgcccgcgtgcacctggcgatcccgaagagttcggtgttcgtccgcgacgaccgcaagcccagcgcctcggtgctggtcgagctgtatccggggcgcagcctggagccgagccaggtgatggcgatcgtcaacctggtcgccaccagtgtgccggagctggacaagtcgcaggtcaccgtggtcgaccagaagggcaacctgctctccgaccagcaggagctctccgagctgaccatggccggcaagcagttcgacttcacccggcgcatggaaggcctgctcacccagcgcgtgcacaatatcctgcaacctgtgctgggcaacggtcgctacaaggccgaggtgtccgccgacgtcgacttcagcgcggtcgagtcgacctcggagatgtacaacccggaccagccggccctgcgcagcgagcaacgcaacaacgaggaacggcagaattcgtccggcccgcagggcgtgccgggggcgctgtcgaaccagccgccgggcccggccagcgcgccgcagcaggccaccgccagcgcgccggccgactacgtcgcgccgggccagccgctgaaggacgccaacggccagaccatcatcgatccgaagaccggcaagccggagctggcgccgtacccgaccgacaagcgcgaccagactacccgcaactatgaactggaccgctcgatcagctacaccaagcagcagcaggggcgcttgcgccgactgtcggtggcggtggtgctggacgaccagatgaaggtcgacgcgaagaccggcgaggtcagccaccagccctggagcgccgacgaactggcgcgcttcacccgcctggtacaggattcggtgggctacgacgccagccgcggcgacagcgtcagcgtgatcaacgcgccgttcgccccggcccaggccgaagagatcgacagcattccgttctactcgcagccgtggttctgggacatcgtcaagcaggtgctcggcgtgctgttcatcctggtcctggtgttcggcgtgctgcgtccggtgctgagcaacatcaccggcggcggcaagggcaagtcgctggccggcggcggcggtcgcgacggcgacctggcgctgggcgagagtggcctggaaggctcgctggccgacgatcgggtgagcatcggcgggccgtcgagcatcctcctgccgagccccacggaggggtatgatgcgcaattgaacgcgatcaagaacctggtcgcacaggacccgggccgcgtcgcccaggtcgtgaaagagtggatcaacgccgatgagtaa

SEQ ID NO: 326160 - DNA, 807 bp, Pseudomonas aeruginosa
gtggtcccccacgacaaggacaaagacaatcccagcgaactgatccgcggcaaggacgtggcggccttcggcctctggtcgttgccgagcttcgacgagccgcgcgacgagccggccgttgccgcgccgcaggtgcccgcggtcgccgaacccgcgccggcgccggcggcggtggaagaggtcgagctggagaccgtcaagccgccgacgctggaggagatcgaggcgatccgccaggacgcctacaatgaaggtttcgccaccggcgagcgcgacggtttccacgccggccagttgaaggcgcggcaggaagccgaggaggcgctgaaggagcgcctgcaaagtctcgagcgtctgatgacgcagctcctggaacccatcgccgagcaggacgccctgatcgagcagggcatggtcaacctggtcaaccacgttgcccgccaggtgatccagcgcgaactgcacatggactccagccatgtccgccaggtcctgcgcgaggctctgaagctgctgccgatgggcgcggcgaacatccgtatccatgttaacccgcaggacttcgagcgggtcaaggcgctgcgcgagcgccacgaagagagctggcggattctcgaggacgattcgttgctgcccggcggctgccgcatcgagaccgagcacagtcgcatcgacgcgaccatcgagacgcgcctggcgcaggcagtgaagcaactgttcgagcaacagcgcgaacaggcgacccatccgctggccagcgacatccggatcgacctcgacgcccccggagacgtcgatgcgccttga

SEQ ID NO: 326161 - DNA, 2457 bp, Pseudomonas aeruginosa
  misc_feature (1646)..(1655): n is a, c, g, or t
atgaaaacggagacgaaggtgatcaagggacgccagggcatcgcccgcaatcggcacaccccgttgtgcctggggctgctgctggcgctgagtccgctggcggcggccgtggccgacgcgcgcaaggacggcgagacggaactgccggacatggtgatcagcggagaaagcacgtctgccacccagccgccgggggtgactaccctgggcaaggtgccgctcaagccgcgcgagctgccgcagtccgccagcgtcatcgaccatgagcgcctcgaacagcagaatctgttcagcctcgacgaagccatgcagcaggccaccggggtcaccgtgcagccgttccagctgctgaccaccgcctactacgtgcgcggcttcaaggtcgactccttcgagctggacggggtgccggcgctgcttggcaatactgccagttcgccgcaggacatggcgatctacgagcgggtcgagatccttcgcggctccaacggactgctgcatggcaccggcaacccggcggccaccgtcaacctggtgcgcaagcggccgcagcgcgaattcgccgccagcaccaccctcagcgccgggcgctgggaccgctaccgcgccgaggtcgacgtcggcggcccgctgagcgccagcggcaacgtgcgcggccgagcggtggccgcctacgaggaccgcgactacttctacgacgtggccgaccagggcacccgcctgctctacggggtgaccgagttcgacctgagccccgataccctgctcaccgtcggcgcgcaataccagcacatcgactcgatcaccaacatggccggggtgccgatggccaaggatgggtccaatctcgggctgtcccgcgacacctacctcgatgtcgactgggaccgcttcaagtgggacacctaccgcgccttcggctccctcgaacagcaactgggcggcggctggaaaggcaaggtcagcgccgaataccaggaagccgattcgcgcctgcgttacgccggctccttcggcgccatcgacccgcagaccggcgacggtggccagctgatgggcgccgcctacaagttcaagagcatccagcgcagcctcgacgccaacctcaatgggccggtgcgactgttcggcctgacccacgaactgctcggtggggtcacctacgcccagggcgagacccgccaggacaccgcacgcttcctcaacctgccgaacaccccggtcaatgtctaccgctgggacccgcacggcgtgccgcgcccgcagatcggccagtacacttcgccgggcaccaccaccaccacccagaaaggcctctatgccctgggtcggatcaagctcgccgagccgctgaccctggtggtcggcggccgcgaaagctggtgggaccaggacaccccggccactcgcttcaagcccggtcgccagttcacgccctacggcgggctgatctgggacttcgccagggactggtcgtggtatgtcagctacgccgaggtctaccagccgcaggcggatcgccagacctggaacagcgagccgttgagcccggtggaaggcaagacctacgaaaccgggatcaagggcgaactggccgacggccgcctgaacctgtcgctggcggcgttccgcatcgacctggagannnnnnnnnnagaacaatccgcaggaagacccggaccatccggggccgcccaacaatccgttctacatcagcggcggcaaggtgcgcagccagggcttcgagctggaaggcacaggctacctgacgccctactggagtctctcggccggctacacctacaccagcaccgagtacctcaaggacagccagaacgactcggggacgcgctactccaccttcaccccgaggcacctgctgcgcctgtggagcaactacgatctgccctggcaggatcggcgctggagcgtcggcggcggactccaggcgcagagcgactacagcgtcgactaccgtggcgtgagcatgcgccagggcggctacgcactggtcaacatgcgcctgggctacaagatcgacgagcactggacggcggcggtcaacgtcaacaacctgttcgaccggacctactaccagagcctgtccaaccccaactggaacaaccgctacggcgaaccgcgcagcttcaacgtcagcctgcggggcgcgttctgatgccgcgccggccgggcttcggctgggcctggcgggttccgctggcactcgccggcagcctggcggcggcgaccgccagcggctatctgttgactcgcgggctgcccctggacgacccgctcgagcgtctctacgccgggctcttcggcgcgctcggggtgggcttgttgctgcttgtcggcgggttgctggcgcgtgatccgggcaacttcgcctggcgcctgggcggtagcctgctggcactgggcctggcgttgtggctgctggcggggcgcggttga

SEQ ID NO: 326162 - DNA, 2040 bp, Pseudomonas aeruginosa
gtgcagcgcctggcgctgttccggcgagaggtcgcgcggcaggttgcgttcccagtcgaggctgatccaggccttgatgaagtcggcgtcgtaatggtccgggctgccgagcatcaggtaggccttcaggccctcgtagaggaaatcgctgctgccgccggagcgcaactgttcctcgatgcgggtcaccaggcgcggggcgaacaccgcgatcagcagcttgcggtagacgctggcggactcctcgccgagcatgtcgccctggtacagcccgtagccttcggcccagcttggcgcgtcgccggcgagattctgcaccgcgttgagctgtggcagtacggccaggacgtcgcgctgggccgggctcagcgactcgatgccgcgcgccagcgggtcgacgcgctggtcgaccgcggcgatgtagctctggttggcgcggtagctggcgatccataccgccgtcaccgccagcaccaccagcgcggtggcgctcagcgcgccgatggtcagccatttgcggcggcgctcgaccttcgggttggtgccgaccaggccgcgttcgccgaacgccacttcgcggaacagccgctcgatgaagtagctgcgcccggttccggtctgccgcgccaggtgctggcggtcgaggttcatcgactgcgccatgctgccgatcaggcggtcgatcggactgccttcctgggttccgctggtgaagtacaggccgcgcaacagcgggcgttcctcgtaggggttgggcttgaacacgccgttgaggaactcgccgaggcattcgcgcagggcggcgaattgctgcgggaagccgtagaccaggtcgcgccgcgccgggtcgcgctcctgctgcaggcgttccaccaggcgcgcggtgagacgctgttcgagcagggcgaattcgctgtcgaacaccgccagcgggccttccgcgctcttgccgtcgtcgagggcgaaggtcatcccccagacctgcgcgcgttcctcgcggttcaggctgtcgaagaactccatgaagcccggcaccaggtcgaacttggtcagcatcacgtagatcgggaagcgcaccccgagctgctggtacagctcctggatgcgcgcgcggatcgcctgggcatgggcggcgcgctcggcgtcgctgcccagcagcaggtcggaaaggctgatggcgatgaacgcgccatcgatggggcggcgcttgcgctgggtcttgagcaggtcgaggaagcccagccaggcggccttgtccacctgggcgtggctgtcctgggtggtatagcggccggcggtgtccagcagcaccgcttcgtcggtgaaccaccagtcgcagttgcgcgtgccgccgaccccgcggatcgccccggcgcccatctgtgcggcgagcgggaagtccaggccggagttcatcagcgcggtggtcttgcccgaaccgggcgggccgatgatcacgtaccagggcaactcgtacaggttgcgccgctcgctgccgcccagcttggcccgcttgagcagggccagggcctcgtccatgcgttgcttgagggtcgccagctcttcggcggtggcgacgctggcggcgtccggcgcgctgacctcggcgagactctgcatgaccttcgccgcgttgcgccgggcctgcacgatgcgcagcacgcggaagccgatccagaccaggaacagcaggacgatcagcacccagcggctggtcgccgaggccagcggttcgtagttgcccaggcgcagcagcgggccgaggaaccagatgatcaggctcagggcgagcaggccgagcaccggcaccacccagcgcgcgaagaagttgaggaagcctttcattgcgcgccctccgcgaatacggtgatttccacccggcggttgcgtgcgcggccttcggcgctggcgttggtcgccaccggctcggtgtcgctgcgcccttcggcggtgaagcggccggcgtcgccggtggtcgcgccgagcaggtcggcgacctcctgggcgcgggcctgggacagtttccagttggacgggtag

SEQ ID NO: 326163 - DNA, 1626 bp, Pseudomonas aeruginosa
atgaccgccccgctccacctcgattcgctgtttcccagcctcgacaccattcccgagcagtaccgccccgacgcccccatcgagcagcgcgactacctggtcgacggccaactgcgacattgggacggcccgctggcgccggtacgcagcccggtattcctcgccgaggccgacggcgagcgccaggtgatcctcggcagcaccccgctgctcgacgccgacgccgcgctcgccgcgctcgacgccgcggtgcgggcctacgaccacggccagggcctgtggccgaacctgcgggtggccgagcgcatccagcacgtcgaacgcttcctggcgcggatgcgcgagcaacgcgaggcggtggtcaagctgctgatgtgggaaatcggcaagaacctcaaggactccgagaaagagttcgaccgcacctgcgactacatcgtcgataccatcgaagcgctgaaggaactcgaccgccgctccagccgtttcgagctggaacagggcaccctcggccagatccgccgggtgccgctgggcgtggcgctgtgcatggggccgtacaactacccgctgaacgaaaccttcaccaccctgatcccggcgctgatcatgggcaatacggtggtgttcaagccggccaagttcggcgtgctgctgatccgcccgctgctggaagccttccgcgacagcttcccgccgggagtgatcaacgtcatctacggacgcggccgggaaaccgtgtcggcgctgatggccagcggcaaggtcgacgtgttcgccttcatcggcacccattccggcgccagcgacctgaagaagctgcacccccgcccgcaccgcctgcgcgccgccctcggcctggacgcgaagaacccgggcatcgtcctgccgcaggtcgacctggacaacgcggtgaacgaggcggtcaccggcgcgctgtccttcaacggccagcgctgcaccgcgctgaagatcctgttcgtccacgaaagcgtgctgcaaccgttcctcgacaagttcagcgcgcgcctggccagcctcaagccgggcatgccgtgggaaccgggagtggcgctgacgccgctgccggagccgggcaaggtcgactacctcgaaggcctgctgaacgacgccctggccaagggcgcacgagtggtcaatgcgggcggcggcgagcatcggcaaagtttcttctaccccgctctgctgagtccggtgagcccggacatgcgcctctaccacgaggagcagttcggtccgctggtgccggtggtgccctatcgcgagctggacgaggtgatcgactacgtcctgcgctccgactacggccagcagttgagcctgttcggcaacgacccggcgcagatcggccggctggtcgacgccttcgccaaccaggtcggccggatcaacgtcaacgcccagtgccagcgcggcccggacagctacccgttcaacggccggaagaattcggcggaaggcaccctgtcggtccatgacgcgctgcgggtgttctccatccgcaccctggtggcgacccgcgacaccgaggcgaacaagaccctggtcagcgagatcatccgcaaccgcgcgtcgaacttcctcaccaccgactacatcttctga

SEQ ID NO: 326164 - DNA, 1260 bp, Pseudomonas aeruginosa
atgaacgcccgcgtccatcccgaagccaccgccgccagtctctccgaaggcgccgactacgaactgctcgcccagcgtttccgaccgatcttcgcgcgcatcgccgaaggcgccgtcgagcgcgaacggcaacgcgaactgccccacgaggcgatcgcctggctcaagcaggccggcttcggcgccgtgcgcgtgccgcgcgagcacggcggcgccggcgcctcgctggcgcaattggttcagttgctgatcgaactggccgaggccgactccaacatcactcaggccctgcgcggccacttcgccttcgtcgaggaccgtctcaatgccgagcccggccctggccgcgaccgttggctgcggcgcttcgtcgagggcgacctggtcggctgcgcctggaccgaggtcggttcggtacggctgggcgaagtgctcacccgcgtctcgcgcaaggacgacggtcgctgggtggtgaacggcagcaagtactacagcaccggcagcctcttctccgactggatcgatctgtatgcccagcgcgacgacaccggcgccgacgtgatcgcggcgatccgcaccgaccagcccggcgtgcgccagagcgacgactgggacggcttcggccagcgcaccaccggcagcggcacatcgctgttcgaggacgccgaggtggaggaagagaacctcatcgacttcgccagccgcttcaagtaccagaccgcgttctaccagttggtcctgctcgcggtgctggccggcaccggccgcgccgccttgcgcgacgtcgccgccgaggtgcgcgggcggacccgtatctacagccacggcaatgccccgcgagtcagccaggatccccaggtgcagcaggtggtcgggcgcatcgccgcgcgcgtctacgccgccgaggcggccaccctgcgcgccgccgaagcggcccagcgcgcctacctggcgcgtttcgtaggcgacccgcaggcggagaaggaggccaatgtcgccgccgagatcgaatcggccaaggcccaggcgatcgtcgccgaactggtgttgcaggccaccagcgagctgttcgacgccagcggcgcttccgccgtcggccgcggcaagcagctcgaccgccactggcgcaatgcgcgcaccgccgcctcgcacaatcccctgatctacaagcaacggatcgtcggcgactgggagatcaacggcagcgagccgccctacgtctggcagatcggcagcggtccggccacggcgtcccgctga

SEQ ID NO: 326165 - DNA, 1410 bp, Pseudomonas aeruginosa
atgccgcgcgaaatccgtctcaacgccttcgaaatgaactgtgtcggccaccagtcgcccggcctctgggcgcatccgcgcgaccgctcctcgcagtacaaggacctggagtactggaccgacctggcgcggttgctcgaacgcggccgtttcgacggactgttcatcgccgacgtgctgggcatctacgatgtgctcgacggcaatggcgacgcggcgatccgccaggccgcccaggtaccggtgaacgacccgctggcgctgatcacgccgatggccgcggtgactcgccacctgggcttcggcctgaccgcctcgctgtccttcgagcatccctatcccttcgcccgccgactctcgaccctggaccacctgaccaagggccggatcggctggaacgtagtgacctcctacctggaaagcggcgcgcgcaacctcggccagcaggcccagctcgaccacgaccgccgctacgactatgccgacgaatacctacaggtgctctacaagctcttcgaaggcagttgggaggacggcgcggtgctccgcgaccgtcgccgaaggatcttcagcgacccgggcaagatccacgagatccgtcatgtcggcgagcacttccaggtacccggcatccatctctgcgaaccgtcgccgcagcgcacgccggtgctctaccaggccggcgcgtcgagtcgtggcaagcgcttcgccgccgagcacgccgagtgcgtgttcgtcgccgcgccatcgaagaccgtgctcaagcaggcggtcgccgacatccgccagcgcgtcgccgaggccggccgcgatccgcgcaaggtactggtgttcaacctgcagacggtggtgctgggcgaaaccgacgccaaggccagggccaagttcgacgaataccgcgccttcgtcagctacgaaggcgccctggcgctgatctccggctggaccgggatcgacttcggccagtatcggccggatcaggtgctgcggcacatccacaccaatgcgatccaatcggcggtggaagcgttttccagcgccgatccgacgcgcacctggacggtccgcgagctggccgactgggtcggtatcggcggcttcggcccgctgttcgtcggcagcccggcgaccgtcgccgacctgttgcaggagtgggtggaggacaccgacgtggatggcttcaacctggcctatgcgctggcccacgaaaccttcagcgacgtggtcgaattgctggtgccggagttgcagaagcgcggggtgtacaagaccgaatatgcgccggggactctgcgcgagaagttgttcggcgacggcccgcggctgccggattcccatccggcggccggctatcgcgacctgcgggcgctctgggagaaggaggccgggcgcaacgcgctgccggcctga

SEQ ID NO: 326166 - DNA, 744 bp, Pseudomonas aeruginosa
atgaacagcctgttgttgaactgcgatatcggcgagagcttcggtgcctggcgcatgggcctggacgccgaggtgatgccgctgatcgattgcgccaacatcgcctgcggcttccacgccggcgatcccggcaccatgcgccgcaccgtggccctggcggtggagcatggcgtgcgcatcggcgcgcaccccggctaccccgacctggtcggcttcggccggcgctcgctggcctgctcggcgcaggaagtggaagacctgctgctctaccagatcggcgccctcgacggactctgccgcgcccagggcacgcgggtacgctacgtcaagccgcacggcgcgctgtaccaggacatgatgcgcgacccggcgatcctcgccgccgtgctgcgcgcactggcggcctacgaccgcgccctgccgctgatgctgatgagcacccgcgacaacaccgcggcgcgcgcgctgggcgcggcccacggcatcgagctgtggttcgaggcgttcgccgaccgcgcgtacgacggcgccggctacctggtctcgcgcagccagcccggcgcggtacaccacgacgccgagacggtgctcgcccaggccctcctgctggcccgtggcgcgccgctgcgagccagcgacggcagcgccctggcgctggaggcgcagaccctctgcgtacacggtgacaaccccgcctcgctggccgcggtgcggcgcatccgcgacgccctggaggcggcatga

SEQ ID NO: 326167 - DNA, 729 bp, Pseudomonas aeruginosa
atggctgaaacccatcggcttcagatcggctctctccgcagcgatgtcgctctgacgcttcacacctatcacgccgcccgcatctggaccggccggcagaagtcggatgccaagcacagcatcctcggcctctccggcttctgcgcatacgtgaatcgcatgcaccgcggggcagcacaggacgatccgtactccgactggtggctggttcagatcgaagagaaagtcgagagctgccaagccgcactcgaggccatcgaccagcgactggatgacgtcatggccaagctgcccgcgaccctcgatatctccgagaacctgtccgttacaccggtcaaggtcccgttgttcatctccaaccctctcggcttcaaggcagtctatctcctgaccaactacgacgaactcgcccgtcgaatcctgctggcccagcacgtcgggctggtcggtcgccgcgacatggaggtctggctcgacgaaggtgcgtcggtgctgcgaagcctgtttggtctggcccagagctaccagttctcgggcgccactcgcgacgacttcgccgcaaacaatgctcgcgccgaagccgcgcggaagatgtacgagaagttcggcgagatcccgcaggacatcctggagggcactcgacgctcgaacttcgctccgccgatcacccggggccgctctgacggtgatgccgatgatgacgctgaccgtgtcgaactcgaggactga

SEQ ID NO: 326168 - DNA, 240 bp, Pseudomonas aeruginosa
atgttcttgagcatggcccctttctttttggtcgttctcgttctttctgcactttttacagatgcgtggaacgaccgagaactcaggctgttgttaatgctgatcgtgttcgggtattcagtaaccgtgttgaccattacggttgagatgtatcgctttgaaatggcggaaaaagcgatgtggggagctttatgcaacaaagccaactacatgaactgccaaccagattaccaacggtag

SEQ ID NO: 326169 - DNA, 1326 bp, Pseudomonas aeruginosa
atgaggctgtcgcgctttcccatttcgacactgctggactcggcctcggggcatctcgaggcccatttgtataagaagcggcttgctgccgaaagcggcgaaccgctggctcaacaatattccggcatcattttcagcggcaatcctcatgaaaccgttccacggcgcctcctcctggataagcgtcttactccgctggagcggaactgctggcaagttttccgcttgctcatcaacgacgacggactgaccgcgttcccgacatacgagcaactgcgcccctatctcggtatgcagccgggcaagatcgcctcgcgcgaaaccatcgccaaggcactcacggtccttcgtctgacccgctggctcagcctcggccgacgcctgcgcaacgacctcaacggacaggtccagggcaacgtttacatccttcacgacgagcctgtctctccagccgaagccttggagctggacaccgactacatgcagttgctgagccaatccaccggtcacggcaaccgagccatacgcgaaatcgggcagatcatctggcgggagttcagggatgatccggacgtgggtcgccgcctccctacccatctggagaagctcgagggacgcttgaaccaccagcaatgggctatcgatagtcagctcgaagcggatccagcggcagagttcggcatccgaactctgtcggatttacctcattccaccccgagttcggatgccgaactcagtgaaatcagcggcaagcaatgcgctctaccgctgagttcggataccgaaccccgacagaatccgccgagtacgcccttggttcggatgccgaactcatatagtacgtatacatacaaacaagattctgtatgtaaaaagccagtacaaccgcgagcacgcgaggaagcccatccgaactggcaggatctcctgcacgcactggaggccgagcaacggatccaggcagtaagcgcgctcagacgggtgtccgaggatcttcggctacccatcatcgagcagtggcagcaccgttgtgccggcggaacagtcagcaatccgttcggctacctcatgacgctcatccagcgtgcagtccagggcaagttcaacgcttcttgggctccggaagaaccggctgagcgaaccatccccgcaacggaacgccccattcgtgctccggcaccatcaagccccatagcgcctacacagcctcaggtccagccccggggggatacccggacagggagcgaggtcctcagccggctcaaggacctcattcggcccaggcacggatcgagcgtgccatccgagcggggtgatgattcatga

SEQ ID NO: 326170 - DNA, 768 bp, Pseudomonas aeruginosa
atgtcgaagtcgacgatcaatgaagcggtcctgacgcaggtgctcaaccacctgcgcaacggccagctcaggcgttgtgccgagatggggctgcggccggagattctggctcagctccaacagcctgccgtcatgagcatcctgaccaataccccggtttcctgggtagatgtcagagtgaacatcgacgtcatggagaaaatcctggccacagccgagcgcagcgcgcaggaagacctgcagatcgaacgcgcactgaagctgggagccaccacaacgatgatccagagctttttcggtctgtcgccggaggacaccgccaccaagcgcttgatgctggagatccacccgcgccgcggtcgctggcggcagctcgatgaacagatcgagcgccagatatggttccgctgggagcacctgatgcaggaaaatcaggtccgccttgaagacagcatggagttgctggacatcgcgatgatcctcacagaggaaatcaacgccggaatcgaacaagacagtccagaattcatcagcctcgccattgtttggtctctcatccagagctggttgaaagacgggctctatccgtctggcaaatcgagccagagccaggcgggcctgcaaaagtcccaatccactctttacctcgctagcgtcagctcacacctgccccactctgccccatccgcaacaacgcaggtgaacgctgagacagaacgtcaacaactactgaacctggttcagtcggaaggcgacacagcaccatga

SEQ ID NO: 326171 - DNA, 1734 bp, Pseudomonas aeruginosa
atggccaagatcaacccgcaagatctgaaagaccggctacttgcccctggttttaccgcaccgcccaaggttctggagcagttgtcggacccgatcagcgacacgcccatgaggctgacactccacgacgtcctcccctggcacgataacccccggaccactcgaaacccgaaatacgatgagctgaaagaatcgatccgacatcgaggcctcgatacgccgccaccagtgactcgacgccctggagaggacaaataccgcattcgcaacggcggaaacactcgcctggaaattctcaacgacctctacaaagagaccggagacgagcgctatttcagcttcgactgcctgttcaagccctgggacaagcagcgcggcgaaatcatcgcgctgaccggtcatttggccgagaacgatctgaagggcgacctcaagttcatcgagcgcgcggttggggtgcagaaggcgaaatttctttacgaacaagagaacggcggtgaaagcatttcccagcgcgagttggcacgtcggctaaaagcggacggctaccctgtatctcaatcccatatcagtaagatgttagacactattgaggtattggcgccggcgattcctgtgatgctgtattcagggctcggtaaaccgcaaatcgagaaactcctgtcactcagaaagtcggcatcctcctgctgggcacgtctatacgctggtgaaggggttgacttcgaaatgctgttccaggacaccctggcaatcttcgacagtagccctgacgaattcattttcgagcgtttccaggacgaactcatcgaccaaatgaagcgccccctgggcctgcgttatgaccaaatcctgctcgagattaccaacgggcagcaggagcaacgccgcggcactctggtcgacctgcccacacctgccgcaccacctcaactcccaccaattgggcaggaaaaccctgctgcgtcgtctactggacaagcacaaacacagagccccgccgcagatccccaaacgtccaggacaaggagcaacccgggtaatcccctccccccgccggctccgccaccacctgtccaacaaaagcaattgcccgatgaggagcgtgcggcggtcttggcaggccatatcgtgagcccggtatcgactaagatccagcagactcgccaacggctggccggcctcgagggggaacatctacctgtcttcgatgaaacagctctgcaggcaatcccagtgcaagtcggtggcctgcacccgatcaccgatctctggtacatcgagcggtcgatcgatacccccgagatcctgcgacagcacatcgctgatctggctgaagagatcgctctgcatgtcggcgccccaggcgagatcgtcaggattcagggcggtgtgggttacacgtatcgcgagcccaatgaagaccatgagattactgattcagcgctgcacctcatgacgctgcttcaagcggtcagcgggcaggtccaagtcgttctgaacactcacgatcaacagacctgccgcgatgcactgggtgaattccagttctcagctggcctcgctcagttgctgctgggccaacccaccacaagtgacaagccatcctgccaggcaggccgtctcaatgacgaagccctggtgaaactgttccggatcattcgtcttgcccgacgcctggttgaccttgagctgccgccggccgcctccgagcaagcagctactgaccagtga

SEQ ID NO: 326172 - DNA, 249 bp, Pseudomonas aeruginosa
atggcccgagaaaccgaagataagttcgttgtccgtatgcccttgggcttgcgcgatcagctaaagcaaaaagccgcggataaccaccgttcggccaacagcgagatcgtctaccgactggagcgcagcaacgcgctcgaagaagaactcgcgcgagcaaaccgaatggtcgacgaactcttcgccaagaaccagcgcctgcaggctgagctggcggcggcgaacacgcctcaggtggcggaggcatga

SEQ ID NO: 326173 - DNA, 1401 bp, Pseudomonas aeruginosa
gtgatcgtgctccagcggcgcggtgggcggcaggatgagatcggcgtagcgggtcgtctcgttgatgtagaggtcgatgctgagcatgaactccaggccgtccagggcctgttcgagccgccttccgttgggcgtggacagcaccgggttaccggctaccgtgaccagcgcgcgcacctgcccctcgccttcgccgaggatttcttccgccaatgccgccaccggcagttcgccgccatattccggcagccccgagacgcggctgcgccaacggccgaagtggccacccgaggtactcgccaccaggtccagggccggcgaggtgcacagcgcgccaccgacccggtcgaggttgccggtgaccaggttgatcagttgcaccagccactggcagagcgtgccgaaagcctgggtggaaacgcccatccggccatagcagaccgcccgttcggcggcggcgaaatcccgcgccagttggcgaatgctttcggccggcacgccacagcgcacgctcatggactcggcgtcgaagaccgcgaccgcctcgcgcacccgctccagcccgtcgaccggcagcggcgtggggcgaccgaggttctcctcgaacagggtgttgagtatcccgagcaacagcgccgcatcctggccgggacgaatgaacaggtgccggtcggcgatagccgcggtctcgctgcgccggggatcgaccaccaccagccggccgccgcgggccttcagcgccttcaggcgcttctccacgtccggcacggtcatgatgctgccgttggacgccagcgggttgccgccgagcaccagcatgaagtcggtgtggtcgatgtcggggatcgggatcaacaaaccatggccgtacatctgctggctgaccaggtgatgcggcaactggtcgacggaagtcgcggagaagcggttgcgcgttttcagcaggccgaggaagtagttgctatgggtcatcaggccgtagttgtgcacgctcggattgccctggtagaccgccaccgcatcgttgccatggcgctcgcggatctcgccgaggcggctggccaccagcgcgaaggcctcgtcccagccgatcggctgccactcgctgccgacccggcgcaacggctggcgcaggcggtcggggtcgtcctggatgtcctgcagggccaccgccttgggacagacatggccgcggctgaagctgtcctgcgggtcgcccttgatcgagcggatccgcggcacgccgccctcgtcgctctcggtctcgatggcgagcccgcagatggcctcgcagagatggcacgcacggtagtggagggtcttgctcatggctcgcctcttcattgtcgtcgccggccgccgcggcccggcgcgtacgcgaggaccagacgaccggtctag

SEQ ID NO: 326174 - DNA, 2226 bp, Pseudomonas aeruginosa
atggcggctatccaggtgtcggcccagggccaggaaaagctcgacgtggatctgcccgccgcgccgctcggccaggcgatcaacgccctcgcgcaacaatcctcggtacagatccttttcgccggcgatctcggcgccggccgccaggcgcccgcgctgaaggggcgtttcacccccgaagaggcattgcgccagttgctcagggacagcggcctgaaggcgcaggccagggacgaacataccttcatcgtcgttccggccagcgaagccgccgtgcccgctacgcaagcccgcagcgaaccgctggacatggagcagatggaaatcaccgcctcgcgcaccagcagcgacctggtctccgccacgcgccagtccaccgtcatcgagcatgcccagctggaggagctgcgccagggctccgacagcctggccaccgtgctggccaaggcggtgccggggatgtccgattccagccgcaccatcaccgaatacggccagaccctgcgcgggcgcagcatgctggtgatggtcgatggcgtgccgctgaacaccaatcgcgactcctcgcgcaacctggccaacattgacccggcactgatcgagcggatcgaggtgatccgtggcagcagcgccatctacggcagcggcgccaccggcgggatcatctccatcaccacgcgtccggccggcggcgagaaccgcgcggaaacccgcctcagcgccacctcgccgctgacccggctgggcagcgatggcctcggcggccagttccagcaatacttcgccggctccctgggggcgctcgactattcgttcgacgacgcccgccaggacaccgactacgccaccgacccgagggtcgccaggctgccgccgggctcggtcccggccaacgcgatcaagggcctggagctggacgagcagaaccgcatccgcaacaccctggcgaacctcgagtacgagaacctcgacatcctcggcagccggctctccgcgcagctctactaccgcgactacttcacccgcttcaccccgttcgacgcccgcgccgtctccacccgcggcggcaacgtcgaccagatcatgcagaacagcgaagtgttcggcagccgcctgaccctgcgcacgccgctgggcgaaagcggcaataccgaactggtctggggcggcgactacaaccaggaacgcagcgacatgccgctcgacgtgttcgacccggcggcctacgacgccagcggcgggctggtcttcgacaagatcggcaagctcacctacatgccgccgctacgcacccgcagcgccggcgcgttcgcccagttgcagcatcgcttcgacgaacactggtcgatcgacggcggcctgcgctacgaatactccaccgccgaattcgacgacttcatcccgctctccgagtccaaggccgcctcgccggtgaccgtcaagggcggcgacctcgactacgacgcggtgctgtcgaacctcggcatcgtctattcgccggtggctggccaggaaatctatgcctccttcagccagggcttccagctgcccgacgtcggcatccagctgcgcaacgcccgccgtggcttcgatatcggctcctcgaacctcgaaccggtgaagaccaacaactacgaactcggctggcgcggcgccatcggcggcaacaccctgggcagcctggcgctgttctacaccacctccaagctgggcgacgtgcagagcttcaacaacggcctgatcctcacccgcaccaaggagcgcatctacggcgtcgaggccagcgccgactggctcagcgacgacgaagtctggggcgcgggcggcagcgccacctggatgcgcggacgcgagaagccggacggcaaggactggcaggacatgaccggctaccgcgtgccgccgctgaagctgaccgcctacctgcaatacaagccggatgccgactggaacaaccgcctgcaggccaccttcttcgactccaaggactaccgtctcgacggcgtggaaagcttcggccggcgccaggtcagcacctacaccacggtcgacctggtcagccagtaccgcatcacccccgacgaccagttgagcctgggcatccagaacctgttcaaccgcgactactacccgctctacagccagttgctgcgcaacaacaacaacaccagccacctgccggcgccgggcacggtgctgacggcgagctatacgcacaactggtga

SEQ ID NO: 326175 - DNA, 771 bp, Pseudomonas aeruginosa
atgaccctgaaaggcaagaccgccctggtcaccggttccaccagcggcatcggcctgggcatcgccctgagcctggccgaggccggcgccgacctgctcctcaacggcttcggtgaggtcgacgcggcgctggcgcaggtccgcgcccgcggcgtgcgcgcagagcaccacccggccgacctctccagcccggagcagatcggcgaactgatggccttcgccgagcggaccttcggcggcgtcgacatcctcgtcaacaacgccggcatccagtacgtggcgccggtgcaggaattccccatggaacgctgggacgcgatcatcgcgatcaacctgtcctcggtgttccataccacccgcctggccctgccgggcatgctcgcgcgcggctgggggcggatcgtcaacatcgcctcgacccacggcctggtcgcctcagccgggaagagcgcctacgtcgccgccaagcatggcgtgctcggcctgaccaagagtgtggcgctggaaacggcgcgcacgccggtgacctgcaacgccatctgccccggctgggtgctgaccccgctggtgcagaagcagatcgacgcgcgcatcgccgagggcgtctcgcccgaacaggcggaacacgacctgctggcggaaaagcaaccctcgctggccttcgtcacccccgagcaactcggcggactgacgctgttcctttgcagcgaagccgccgaccaggtgcgcggcgcggcctggaacatggatggcggctgggtggcgcagtag

SEQ ID NO: 326176 - DNA, 1431 bp, Pseudomonas aeruginosa
atgcgaagcgcgccccgcagcgccgtggagatatgcccgatgagcgtgatcatcgcccttgccgccctgggcctgctgatgctggccgcctaccggggctacagcgtcatcctgttcgcccccctcgccgccctcggcgccgtcctgctcaccgatcccagcgcggtcgcgccgaccttcaccggggtgttcatggagaagatggtcggtttcatcaagctctacttcccggttttcctgcttggcgcggtgttcggcaagctgatcgagctggccggcttctcccgctccatcgtcgcggcggcgatccgcctgctcggcacccgccaggcgatgctggtgatcgtactggtctgcgcgctgctcacctacggcggcgtctcgctgttcgtggtggtgttcgcggtctacccgttcgccgcggagatgttccgccagagcgacatccccaagcggttgattccggcgaccatcgccctcggcgcgttttccttcaccatggacgcgctgcccggcaccccgcagatccagaacatcatcccctcgaccttcttcggcacccacgcctgggccgcgccctggctcggcaccctcggcgcgctgttcgtcttcgccgtgggcatgctctacctgcgacgccaggcgaacaaggcgcggcgcaacggcgaaggctacggcagcgacctgcgcaacgagccggagaccgccgatgacctgcgcctgccgaatccctggctggcgctctcgccgctggtgctggtcggggtcgccaacctgctgttcacccactggatcccgcaatggtacggccaggtccataccctgcaactggccggcatggccacgccgttgcagaccgaggtcggcaagctcaccgcgatctgggcagtgcaggcggccctgctgctgggcatcctgctggtgctggcgagcggcttcgcggcgatccgcagccgcctcgccgaaggcacccgcagcgcggtggccggctcgctgctggcggcgatgaacaccgcctcggaatacggcttcggtgcggtgatcgcctcgctgccgggcttcctggtgctggccgacgcgctcaagagcattcccaatccgctggtcaacgaagcgatcaccgtcaccctgctggccggcatcaccggttccgcgtcgggcggcatgagcatcgccctggcggcgatgtccgataccttcatcgccgccgccaacgccgcgcagatccccctggaagtcctccaccgggtcgccgccatggccagcggcgggatggataccctgccgcacaacggcgcggtgatcaccctcctggcggtcaccggcctgacccatcgggaggcgtacaaggacattttcggcattaccctgatcaagaccctggcggtgttcttcgtcatcggactgttctacgccaccggcctggtctga

SEQ ID NO: 326177 - DNA, 177 bp, Pseudomonas aeruginosa
atgcccagcgccacgatcttcttgtacagggtcgagcgcgacctgatcggacgggccctggcgcagagtgccggcaatgtggtggaagcggcgaaacgcctgggcctgggtcgctcgaccctgtacaagaagatcgtggcgctgggcatgcgtctcgataacgggacccatctctaa

SEQ ID NO: 326178 - DNA, 723 bp, Pseudomonas aeruginosa
  misc_feature (701)..(710): n is a, c, g, or t
atgaacgctctgacccaaccggccgccctcgccgcctcccacctgaacatcaacctgaccgacttcatcgacgagttcggcgacgagctcctggagtcgctcaatcgctccaaccccccggtctataccggctccgtcaacgctcaccgccagttggtgatggaccgactcaagcgcaagcccttcgcggcccaggccgaggtcgtccaggccatcaccgccctgctgctggaccgtaacgagcaggccggaatcatcaacgccgagatgggcaccgggaaaaccatgatggccatcgctgtcgcagcggtcatgcacgccgccggctatcgccggaccctggtcgtctctccgccgcacctggtctacaagtggcgccgcgagatcctggagaccatcccagccgcccgcgtctgggtactcaatggcccagatactctactcaagctgctcaagctgcgagatcagatgggcgacgcctacgacgggcgccaggagttcttcatcctcggccgcgtgcggatgcggatgggtttccactggcggctcgcctgctggaagaaacgcgccgccggcggccaactgctcgctgcgtgcccggattgcggacaggtcctcgaggacctggaaggcaacctggtcacggtggaggagttcgagcgtggtgaccgtcgacgtacctgttcctcctgccgtggggnnnnnnnnnnctctggacgctga

SEQ ID NO: 326179 - DNA, 1482 bp, Pseudomonas aeruginosa
atgtgccggataccaaccatcggcccggtcagggcggagcgcctgctgaacgacttcggcgaggacttcctggccacgatgttggtggacaacgtctcggagttcatcaacctgatggacgccaagggcaacttcgtcttcagcgatcggcaggccaaacgcatggagcgatcgatggcaaacatcgagttcggcttcggtgaaggcggctaccaaccgaccgagttcatcaagcgctacctacctgatggctacttcgacctgctggtgctggacgagggacatgagtacaagaacagcggctcggcccagggccaggccatgggcgttctcgcagccaaggcacggaaaaccgtgctgctgaccggaacgctcatgggcggctacgccgacgatctgttctatctcctgttccgcatcctcacccagcgcatgatcgaggacggctatcggcccaacgcgcgcggcagcatggctcccgcagccatgtcgttcatgcgcgaccacggtgtgctcaaggatatctacaccgagcgcgacggtgattcgcacaagacagcgcggggcaagaagctctcggtacgcacggtgaaggctcccggcttcggcccaaagggcatccaccgcttcgtattgccgttcaccgtgttcctgaagctcaaggatattggtggcaacgtactgcccgactaccaggaggagttcatcgacgtgcccatggcgcctgagcaggcttcggcctatcagcgcctggcggccacgctgacagcggagctccgccaggctctggcgcgacgagataccacgctcctgggcgtggtcctcaacgtgctgctggcttggccggactgctgtttccgaccggagatcgtcaagcatccgcgaacccgggacacactggccttcgtgccagcgatcttcggtgacgagcagttgatacccaaggagcaggtgctggtggacctctgcttcgaggagaaagcgaagggccgcaaggttctggcatacaccgtctacagcgggacgcgcgacaccacgtccaggctgaagaaagtgctcgagcaatccgggctgaaggtggcagtgctacgtgcttcggtcgataccgctcgacgcgaggattggatcctcgaccaggtcgatcgcggcatcgatgtgctgatcaccaacccggagctggtgaagaccgggctggacttgctcgacttcccgaccatcgcgttcctgcaaacgggctacaacgtgtacaccctgcagcaggccgcgcggcggtcgtggcggatcgggcagaagcacccggtgagggtggtgttcttcggctacgccggcagctcgcagatcacctgcttacagctgatggccaagaagatcgctgtggctcagagcacgtcgggagacgttcccgagtcaggtctcgactcgttgaaccaggatggggattctgtggagatggcgttggcacgacaactcatcgcagcatga

SEQ ID NO: 326180 - DNA, 1227 bp, Pseudomonas aeruginosa
atggcattatctcttattcgtagtctcactgcgtccgcctcacgaaacatctcggcgttgaaacgcgatgccaaacgcttgcagaagaactcctttcttgtgtttggaacagaatatccactcaaggtttgccaaaatgcggtagcagtttctcgcggcttccgctcactcgctgatgtcgataaactggagcagcacattggcatgaatagaagcgctccattctgggtgatccgtggccgcaacgatacacaccagggggtactggaagcgctatattgtttagaccttgaatataccgagaatggccccgtcgtttttactggaaacccaaagcactctatacttccagccttagtcctttttcttgagcaaatgagctttaagaaactacccggactaatcctcatcgaaacaaaagagacctcaatccaaacaacccatatattcgacgcaatagaaaaattagaagtcgaagaaactctaaataaatttcgatttcttgacttgcgagaccgaaaccttcccgtttcgcttagtaccgaggctcgttgctggatcgagtcaattgtcagtttattgccaaacgacatccaagaggaaatacgtaataaaggatggtcaactcacttagagatcagtgcatatgagcatgcaaagtctcgtaatcaagtatttggctcctccaacttcccttgcgtccccttcctctccataaagtcagcgatctatcaactcatttcaggcgcataccctcccttatggatgcagccatcctcctctggcgaaatatctaaagttgatatacgccgacctcctctcgaaaaaagctcagaggaaaccttactttatctcataaaaaaattagagaatcgacagttccacacaggcatttcatgtgagcatgagagtcgatggcggccgtatgtcgtactcttctccaggaatgatccggctagcgaggtactagcaggagttatacactcgtacttttcttggaagcaagatagagaccatcgctcacccaccctttatgtttcagatggagcagttccctatgctcccaagcttctaggtttaggcggccatacggtcattgcaaatggaatcactgaaattcccgacggggatggtcttggggagttctatggctacaagaactcacttaaagtcagctccttatctaacggaatacagttcatgggtaagcatgtatcactaaagtaa

SEQ ID NO: 326181 - DNA, 267 bp, Pseudomonas aeruginosa
atgcgccaacgaagctcttacccgaaaccgttcaaagcccaggtcgttcaggaatgcctgcaacctggggcaacggtgtccagtgtcgccatcagccacggcatcaacgccaatgtcatccgcaaatggctgacgctttatcgagaccagcccgtaccagcctcgttaccagcctttgtcccgctgaaggccacccctaaacggccagccgaaacgtcagtgctcattgaactgcccatggccgggcaaatgatcacggtgaaatag

SEQ ID NO: 326182 - DNA, 336 bp, Pseudomonas aeruginosa
atgatccgcatcgatgcgatctggctagccaccgaaccgatggacatgcgcgccggcaccgagacggcattagcccgggtaattgcggtgttcggtgcggcgaagccgcactgcgcttatctgttcgccaatcgccgggctaaccgaatgaaagtgctggtgcacgatggcgtgggcatctggcttgccgcgcgtcgactgaaccaaggcaagttccactggcccggcattcgccatggctgcgaggtcgaactcgacagcgaacaactccaggccttggtgctgggcctgccgtggcagcgcgtcggcacaggcggtgtgatcagcatgctgtaa

SEQ ID NO: 326183 - DNA, 597 bp, Pseudomonas aeruginosa
atgctgcggctctcgatgccggccctgctcctggctcttgccggctgcgccaccaagccccccgccaatcccgataacctctgcgagatcttccgcgaaaaaccgaaatggcacgaggcggcgctgaagatgcagcagcgctggggcgcgccggtccaggtgccgatggcgatgatgtaccaggaatcgtccttcaagcacgacgccctgccgccgcgctactacttcctcggtttcatcccctggggccgggtcagctccgcctacggctacgcccaggccaaggacgagacctgggccgactacaagcgcgaggccggcggctggggcgccagccgcgacgacttcgccgacgccctggacttcatgggctggtacatccagaagagccaacgggtcaatggcgtctccaagtgggacgcctacggccagtacctgaactaccacgagggctggggcggctaccgtaaccgcagctacgacgccaagccatggctgaagaacgtctcgcagaaggtccagtcccgcgcctcgctgttcggcgcccagtaccgcagttgccagcaggagctgtcgcgcggcggctggttctggtag

SEQ ID NO: 326184 - DNA, 720 bp, Pseudomonas aeruginosa
atgcccctgcctgccctacccctggatgcccttctcaccggccgcgcccggcccttcacccgccccggctcgcgcagcggcatcgccaagtctccgcgcgacggtgcgctcagggtcacccccgtcggcctggagggcgacgaacagggcgacctgcgcgtccatggcggcgtcgagaaagcgatccaccattacccacgcgaacactacgccgcctggatcgccgaactgggcgaacaccccctgctgatgcaggcgggcgccttcggcgagaacttcagcaccagcggctggagcgaagccgacgtctgcctcggcgaccgagtgcgggccggcaccgcgctgctggaggtgtcccaggggcgcatgccctgctggaaactcaacgaccgcttcgaggtcgccgggatgtccctgagggtgcaggagtccgggcgcaccggctggtactaccgggtgctggaggaaggcgtggtggcggctggagatatcctgcaactggtcgaacggcgccatccggactggtcgctgttgcgcctgtccgaggtgctgttcgacaggcgggccgacgccgggctgctgcgccagtgcctggcgctgccgctgacgccatcctggcggcgcaccctggagcggcgcctggaaaaaggccaggtcgaggactgggggccgcgcctggagggagcccccggccaggccgagacgcccaggccgacctga

SEQ ID NO: 326185 - DNA, 1494 bp, Pseudomonas aeruginosa
atgaaaaggaaattctttgtagcggtcctgctatcagcatcgcttaaccaagtggttgaggccgagcctttttggtgggcagcgagctatttcgacccgcatctcaggtcggctcaacttgcctgcgaatataccgccagccgtattttgagatggtcggacacctactatgccgggacagttcttgccatacgggtaaaaggtggttacggggagtgcctaataaaacaccctccatacccaaacgggggaggagcgcttcctccttcctggtattcaatcgtcagatggggcgacggctgcacggaccaccaggaatacgatgccaacaccggcgcctgcctttcccccaatggcccgcccaaccacgggcctgactgctcgccgccgtcactgtccgccggtaatccgatcaacatcgccaccggcaacaagtaccagagcgaaaccgactacgccggcccggccatcgctcccctgctccgcttcactcgtcactacaacagcagcaacggactctggacccacaacctaagcgcccgcctcaccctacagagccatatggtcaccctgcaccgggaggacggtcggaccctcgacttcatccgcctgtacgaccgcatcacctcccaggccgataacctcggccgattggagaagatcgatggcggctggcgctacgacgaaccgagcggcctgcgcctggatttcgacgaagccggcgcgctcgtcgaactggtccaagccagcgaaaagctgcgtctggccagggagggagggcaggttcgcgtttcccacaaccgctaccccggcaccttcagcttcgccgaggatgaccgccaacaaccactgcgcctcaccgctccaggcctggcagtgctctacaactatgaaggcggacacctgatccgggtcgcccgcgacgccgccggccaggccagtgagcagcgttaccactatgaagacccgcgcaacccgcggctactcaccggcatcaccgacaaccgcggcgtgcgcttcgccacctggcgctacgacgaaaagggccgagctgtgtccagcgaacacgccaacggcgcggagaaggtcagcctcgcctacaacttcgatggctccaccactgtcaccaacgaatacggcaagcaggctacctaccgcttccaggtgatccgcggtagcaaacacatcgtcgccatcgaagggcaaccctctcccaactgccccagcagcaattccacctttacctatgacgaacgcggcctgctcaagacccgccgcgacaaccagggcaacctgaccacctacgaatacaacgagcgcggcctggaaatcctacgcaccgaggccgccggcactgcccaggctcgcactatcgccaccgactggcacccgagactggcacttccagtgcggctcgaagaggcgggccgcagtacgcattactggtatgacggcgacggtaacaaagtaggtgagacggtgatagggaactga

SEQ ID NO: 326186 - DNA, 1284 bp, Pseudomonas aeruginosa
gtgtcgatcaagatccatcacggccccaatggctcctacaagacctcaggcgcgatccaagatgacgccgtgcccgcgctgaaagacgggcgggtgatcatcaccaacgtgcgcggcttcaccctggagcgggcctatcaggtcttcccggacctgcccaacacggcggaaatcatcaacctcgatctggagtcgctggaagacctcgaaaagatgcgcacgtggtttcagtgggcgccccgcggggccttcctgatcttcgacgaaacccaactgctgtttcccaagtcctggcgggaaaaagacctcgagcgcttcgactaccccggtggaccggaagcggcccacgcggccgaccgccccatgggctggctcgacgcctggacccggcaccggcatttcaactgggacatcgtcctcaccacgccgaacatctcctacatccgcgacgacatccgcatgacctgcgagatggcctacaagcattccaacctcgcggtgatcggcatccctggccgctacaaggaggcccagcatgacgcccaactcaaccgtccgcccgccgatggcaccatcatcgaatacaagcggatccgaaagcagaccttcgccctctaccagtccacggccaccggcaagacccaagacaccaaggcgggcaagagcctcttccggtcgcctaagctggttcttctactggcattgttggccggcactattggctttgttagctatatggggccaatgcgggttattggtgctaagcctgatccggcggcttccgcgcctactcctaagcctcttccgaccgctactgcgcctgctgctgtggctgctccagcgcgtcctgctgcgaatagctttcttcctcctgggcttgtacctgatgggcctgctgctgcgcctgttgatctgaacgcccatcccttcgccgatcggcggatttcgatcctcgcccacgcctacatgccgtcgaagggcgatatctacatgttcgccctggatgaccctgccggccggcacctggaactcaccagttggcaactcgtgggatccggctacgcgatcaagccacgcggcgagtgcgtggccgaactgctctacggggaatgggaggggaccgtcacctgtgccggctcctcggtccggccggtggcggtcgctggcgtgccgccgttgctcaacctgccgccatcggcagcgggcgcccgcgaacctgacaaggtgccgctgaccatcgtccccgattccgaatacgcctcgcggccctggaggcagaaatga

SEQ ID NO: 326187 - DNA, 186 bp, Pseudomonas aeruginosa
atgaagggcgcgttcgacctcaacctggcggaaggcggcggccagcttccctgcgagtccgtgaccatttggggccgatcctactccctctgcgtcgccgactacgccgaccagctctccaacctgcgtgtggcgctgctgctgatggccgcgctgatcgccgctttcatactgctgagggactga

SEQ ID NO: 326188 - DNA, 534 bp, Pseudomonas aeruginosa
gtgcgcaagatcgtccaggacctgaagaacttctcccgcgtcgacgccgaggacgactggcagtggaccgatctgcaccaggggatcgagtcgaccctcaatatcgtcgccagcgaactgaagtaccgggccgacgtggtccgcgaatacggcgatctgcccgaggtgaagtgcctgccgtcgcagatcaaccaggtggtgatgaacctggtgatgaacgcggcccaggcgatggggcctgagcggggtcgcatcgtgattcgcacggggcataccctggagcatgcctggatcgaggtggaagactcggggcagggcatctcccccgagatcctgccgcgcatcttcgatccgttcttcaccaccaagccggtaggcaaggggaccggcctggggttgtcgctctcctacggcatcgtccagaaacacggcggcaccatcgaggtacgcagccagccgggagtcggcagcgctttccggatcgtgcttcccctggaatcgcctggcaacctggggggagcccacggaaattaa

SEQ ID NO: 326189 - DNA, 243 bp, Pseudomonas aeruginosa
atgagcacgggtaaaaagctgcggctcgggccgctaccgaaactggaatccacgaagatgaccttcgcgtgcccggccagcctacgggccgacctcgaccgctacgcggcgctgcacgcgcagacctacggcgaggcggtcgatgctgcgacgctcatcccgcacatgctggaggcgttcatggcgggggatcggggattcaagcgcacgcacgccatgaacggaaaagccgcccccgcgtga

SEQ ID NO: 326190 - DNA, 1272 bp, Pseudomonas aeruginosa
atgagccaggacgacacccccgaccgtgccgcgccgcaggtgggcaaggtcgcgcccgaggcggtggcgctgcgcgcgcagccgcgcccggtcacgcgccttaaccggcgcacgctggcgatgttcatgggcggcctgtcggtcgccgtgctgggtgcgaccatctggtcattgcagccgcaccggcgcggcgcgggcgagcagaccgagctttacaacgtcgatcgcgtgtccaagtccgaagggctggacggcctgccggccgactactcgaagctgccgcagaaggtgcccgagctggggccgccgctgccgggcgaccttggccccgccatcgtggcctcgcagcagccggtcacgccgacctatgtgccgcccggccacgaccccgaggacgccttgcgcaaggaggctgacgccgctgcggcctcatcggtgttcttccgctcgggccagcagggcaatgccgcagcgccagccacggcccaagccgctgcggctgcgactggcaacgccttggcaggcttcgacccgctggcggctgggcctgcctcgacggcggcccagcctgccgacccgactgccacgcagaaccggcaagaccagaaggaggcattcctgaaaggcggttctacggaaacccgcaattccggcaacctgcaaatgccggcctcgccgtatcaagtcatggccgggacagtgatcgcggctgcgttggtgacgggcatcaagtccgacttgccgggcgacgtgatcggcacggtgacagagccggtctatgactcggccacgggcaagttcctgctgatcccgcagggatcgcgcatcctcggcaaatacaacagccaggtcagttacgggcagagtcgcgtgcaggtggtgtggaaccggatcatcctgccagacacgtcttcgctgaccatcgacaacctggtgggtaccgacccggccggctactccggcctcgaagatggcgtggactaccactggggccgcatcgtcgccggtgcggcactgacgacgctgctgggcgtaggtgccgagttggccgcgcccgagaaccgccaagacggcaaccgcatcgtgatcgcggggcgcgacagcgcccaagacagcatcaatcaggttggacaggagatgacccggcgcaacatgaacatccagccgacgttgaccgaacggccgggcctgccggtgcggatcatcgtcaaccgcgacttggtgctgcgaccgtaccagccgatgttcttcaaccggggagcgatgcgatga

SEQ ID NO: 326191 - DNA, 990 bp, Pseudomonas aeruginosa
atgaatgatgttttccgcaaatccgccttgccgctgatcctgctggccctcgcgggctgcgccacgcagggcaagccgccgccgaccatctcgctcgatgagccggtgcaggcgcagccgctgccggagccgcccgcgccggtggaggtggtcaaggtgcccgagccgctggcgctgccggcgcagttgaagccattgcccgaagccgaggctgccaagcccgtccctgaacctgccgacgaaaccgtgcgcgtctcgcgtgccaacgccgaggcccgcatcgcgcccacgcgcgagggctacgtcaatgcgattcaggtgtggccctacaccgatggcgcgctgtatcaggtctatgcggccgtgggccgcgtgaccgtgatcacgctccagccgggcgaggaactggtgacggtcgccgctggcgacactgtgcgctggatcgtgggcgacacatccagcggcagcggtgatgcgctgcgcgtgaacgtgatggtgaagcccatccgctcgggcctcaagacgaatctggtcatcaccaccagccggcgcacctacctgctggagctgacctcgacagagaagacgtggatggcgtcagtgtcgtgggagtacccgaaggacaagatgctggccttgcagcgccaggcgcaggcggccagcgccgccgcgccagtcgataccggcttgtcgctggagaagatccgcttccgctacgcgatcagcggcagcaatccgccgtggaagccgctgcgcgccttcgatgacggcgagaaggtctatatccagttcccgccgggcatcgcgcaaggcgagctgccgccgctgttcgtcatcggcgcgcagggcgacgggcaactggtgaactaccgcttccgtgcgccgtactacatcgtggatcgcctctttggggcggcggagctgcgcttgggcggcgacaagggcgacgtggtgcggatcgagcgcacggacggcgcgcggaggaactga

SEQ ID NO: 326192 - DNA, 705 bp, Pseudomonas aeruginosa; identical to SEQ ID NO: 325201

SEQ ID NO: 326193 - DNA, 642 bp, Pseudomonas aeruginosa
atgctggcctcgctcaccttgctggcgctcgggatcttcggccccggcatcgccacgggcctcgtgtccggtgcaccgcagctcggcgcgggcgcgatggccggtgccgctatcggcgcagccggaacggcagtggctgtcggtgctgccgcgacgggcgtgggcggtgcggtggccgctggtgcccgcatggccccggccgccgccaagctggccggcagcggcgcgcgtgccgccacgtcggcggctggcagcgcgaagtcggcgttccaggccggttccgcagcagcaggcggcggtgccaaaggcgcgatggcgggcttgggcaacgtcgccaagaccggcgcgcagtccgccggacgcgctgccgcatcccgcgcttccgctgctgggcagcgcatggccgcgccgttccgcgctggctggaaaggcgacgctggcgcgtcagccggccaagccgccaccagcgaagcccccgcaggcgctgccgctgcacagacgcccgagcaacccgcctgggccaagcggctgcaacgccgccagcaactcactcatgccgcgaccaccaccgcccacacgctgcgcggtggcgatggcggcggctccggccaagggccgagcctgcgcgattccgactcataa

SEQ ID NO: 326194 - DNA, 354 bp, Pseudomonas aeruginosa
gtgccgggcggcacgttggccacgccttccctgtccgccaccagcttgccgtacgcctgcgaggtggcccaggtggcgaaggccttcgccgcgtccttggcgcgcgagctggcgggaatcgccagggcccaggaatacagccaggaggcgcccttgtcggtgacttcccggggggcgaaggcgaagccggtggcgtcggcgaccttgctctggctcttgtcggtgacgaacgaaccggcgacgctggcgtccacccagatcgcgcacttgccgctgttgaacagcgccaggttctcgttgaaaccgttgctggaggcgccgggcgggccgtaccgcttgagggtggagacatag

SEQ ID NO: 326195 - DNA, 828 bp, Pseudomonas aeruginosa
atgaattcgtccaacccgcttgtcgattggttattagacagcctcgaagtcgacaccagcctgttccatgtcggtcgctactgcggcggctggcatgcctccacccacggcctggcgcgtgccagcttccacctggtggtgcagggacactgctgggcgcacgtcgccggaagcgcccggggctggcgactggacagcggcgacgcgctgttcttcctgcgcgacgtcgagttccgcctgtccagcgaggccaccgccgaggccgcgcgctgccagccgcgcggcgaaatgcaggcgctggagtggaacgcggcggacggtgccggcctggtctgcgggttcttccacttccattcgggattgtccgggctgatcgtcgacgccctgcccgactggctgatcctgcgcgccggcgatccggcgctggacgcggcgcgacgcctgttcgccctgatcgtcgacgagtgccgccgccagccggcgccgtcgccggttctgctggagcgcctcagccacctgctgttcctctacgtgttgcgccagcaggtgctcgacaacccgaccctcggcggcctggtggcactggcccgccagccgcagttcgccggcctgctggaagcgctgatcgaggcacccgaacagccctggagcctggaacagatggccgaacgcaccggactctcgcgctcggccttcttcaagcgcttcaacgaactcagcggtcagtcgccgggacaggtcctgctggccctgcgcatgcaccgcgcctgcgccctgctgcgcgccgacgccagcgtcgccgaggtcgcggcggcggtggactggtag

SEQ ID NO: 326196 - DNA, 1008 bp, Pseudomonas aeruginosa
ttgcacggcattggcggcggcttcggcgagcccgatgcggatgcggaacaggcgtgccggctggctggcgaactcgccgctggccagtccggcgtgcagcgccgccacgtgtccgtcgagggtttcgcgctgtgccgccagctcaccatccagcagcgaacgactgccgcccaggtgccgctgcacttcgtccagtgcgcggcgcgccaggccgatggccatgccgcattgcaggccgaggaaggccgggcgcacccgtggcaggaactgccgggcgtcgtcgtgcaacagccagtcgcgcccgaccgccaccgcgcgcaggtcaagggcggcggtgttgctgcattgcaggccgagcaggcgcaggtccgccgagcgctgcaagccggcgaggccttcgggaatcgccaggacgaagggactgccaccctcccctcgttcgatcgccgccgccaccacgaaatcgccactgcgcaggttggtcacccacggcaggcgaccgtccaggcgccagccggcctcctccgcgtgcgccaccacctgcagcgcctcgatcccggaaaggaacttcatcgcgttggacagcccggtggcgccggccaggcggccggccagcaggtcgccgagcaggcgttggcgcagttcctggttgggactctgcaacaggtactcgatgaaggcgcgctggccccagaagacgaacgccgcggtcagcgagcgcgccgccaccgcggccacccgctccaccgcgtcggcgagcgtgccgccggcgccgccgaggcgttcctccaccgccacgccgagcacgccggcggcggccaggcgcggcagcagcgcggcgggatcggcgtcgccgcggtcgagggcgtcggcctggcggtcgagccagtcgctcagggtcgggtcaagcatggtcgtcactccttgcgccggcgcggcacgccgcccggcaagcgcaggctcaggcctgcgggttggtccagcgatattgctccagctcggcattga

SEQ ID NO: 326197 - DNA, 522 bp, Pseudomonas aeruginosa
atgcgccccgtcctggttctgctgcaccgctatgtcggtctggctaccgcgctgttccttttcctcgccggtctcaccggcagcctgctggccttccatcatgaaatcgacgaatggctgaaccccggcttctacgccgtgggcgagggcggcgagcgcctttccccgggcagcctggtgcaacgcgtcgagtcacgctatccgcgacaactggtgtggtacatggagtatcccgaggcgggcgggcacccggcgttgctcgccaccgtgccgcgcgaggccggcgccaaggtcgagcacgacgtgttctacctcgacccggtcagcggcgaggaagtcggcaagcgcctctgggcggcctgctgcttccagccggcgaacctggttccctgggtcctggagttccaccacaacctgaccctgccggggaactggggcctgtacctgatgggcggggtggcgatgttctggttcctcgactgcttcgtcggcgcctggctgaccctgccgcgcgcctcgtag

SEQ ID NO: 326198 - DNA, 2463 bp, Pseudomonas aeruginosa
atgaccgccaccgccgtcgtcctccgcaatgccccgtcgtccctcgatttcccccgcgcctcgcgcctgagccgttcggtgcgcgcggccctgctgtcgctggccatggcggccggcgcggcgccgctctgcgcctcggccgccgaagcggcggcggaacaggcgcggccctatgcgatccccgccggacagttgggtgacgtgctcaaccgcttcgcccgcgaagccggcatcaccctctcggccactccggcgcagaccggtggctacagctcccaggggttgcgcggcagtttcaccgtgcagcagggcctggcccggctgctcgccgacaccccgctggaagcggaagaccagggcgacggcagcttcgtcttgcgcgaggcgccggcaaaggacggcgacgtgctgaacatgcaggcggtggaagtcttcgccctcggcaacaacctgggcagcaccgatggctacctggccacccatagccagatcgccaccaagaccagcaagccgctgctggaaaccagccagaccgtctcggtgatcacccgcgagcagatcgacgacaccgcctccaagaccgtgcagcaggcgatgcgctatacccccggcatcttcaccggccaggtcggcgcctccaaccgctacgactacgtggtgatgcgcggcttcgccgacaacagcgtggacaacatctacctcgacggcctcaaggccatgggcgacagcggtaccttcagctcgatgcaggtcgacccgtacttcctcgaacgcatcgatgtgctcaagggcccgtcctcggtgctctacggccgtagcctgccgggcggcctggtggcgctgaccagcaagaatccgttgtacgaggactaccgccagatcaccggcagcatcggcaacatgggccagaaggagatgggcttcgatttcagcgggccgctcgacgaggagaagcgcatcgcctaccgcctggtcggtctcggcaagggctcggacacccagttcgatcacgtcaaggaggagcgctacgccatcgccccgaccctggccatcgacttcagcgatgacaccaccctgaccctgcaaggctacctgcaacacgatcccaacgggggctaccacggcggcgtaccggccgacggcaccctgtcgcaccacaacggccggcacatctcccgcgagttcttcgatggcgagccgagcaaggacgacttcgaccgcacccagcggatgttcggctaccagctggagcaccgcatcgacgacgtctggtcggcgcggcagaacttccgctacctggactccgacgtcgacttgtcgcaggtctacgcctacggctggagcgccagcgagccgaacaagctgaaccgctacttcagcggcgcccgcgagcacctgcaggcgtatatcgtcgacaacatgctgcaggccgaattcgccaccggcgcggcgcgccacaccctgctcaccggcctcgactatcagcgccggcgcaccgtggtcgactggcgttccggctcggcctcggcgctggacgcgttcaacccggtctacggcgacgacgccatcagctatttcccggacgacaaccacacccgccgcctggagcagaccggcgtctacctccaggacctgatcgacatcgaccagtggcgcttctcgctcggcctgcgccaggactgggtcagcgtcaccgacaagaaccgcagcaccggcagcaaggccgacgacgactgggagaaattcaccgggcggatcggcgcgctgtacctgttcgacaacggcctggcgccctacgtcagctactccgagtcgttcaacccgaacgcctattccgacgcctccggcacgcccctggcgcccaccgagggcaagcagtgggaactcggcctgaagttccaggcgccgggcagcaacagcttctacaccgcctcgctgttccatatcacccaggaaaacgtcgcctccaaggagccccaggacaacttctacacctcggtcggcgaagtgcgctcccaggggctcgaactggaggcccatacccagctcagcgacaacctgaagctgctcggcagctacacctacaccgacatcacctacaccaagtcgctggacggcaaccagggccatacgccgaaccaggcgcccaagcacatggcatcgctgtgggccgactatgccttcgacgccggcccgctcagcggtctgagcatcggcggcggcgcgcgctacgtcggcgagacctgggcggacaaggaaaacaccttgcgggtgccggactacaccctggtcgacgcgcggatcggctacgacctcggcaagctcggcctgaaaggcctggacgtcagcctcaatgccaacaacctgctggacaaggactacgtggcgtcctgctacagcctggacttctgctacttcggcgagaagcgcaacgtcaccgcgacggtgaactaccagttctga

SEQ ID NO: 326199 - DNA, 999 bp, Pseudomonas aeruginosa
atgagcggagccgtggacgggacgcgcggtagggtcgacgaagcggtggtcaggcaggccatccactggctggtccgcctgcgctcgcagccggccgacgatcgcctgcagcgcgcctgcgcggcctggcgcgcggagcacggcgagcacgagcgggcctggcagcaggtcagcgcgctcaacgaagaactgcacggacgcttcaaggcgctgcccggcggggtcgcctacggcaccctggacagcagcgcgcagcgcctgcagcggcgccaggcgctgaaactgctgtcgctgctggtggctggcggcgccgtggcctgggtcggtcgcgacagcctgccctggcagcgcctgagcgccgactacagcaccgccaccggcgagcgacgcagtatcgagctggtcgacggcacccgcctgcaactgaacaccgacagcgcggtcgacgtgcgctacgacgccggccagcgcctgatcctcctcgcccgcggcgagatcttcctcgccagcggcgccgatacgcaatcgcccacgcacaggccgctgcgggtacgtaccgcgcaagggctgttcgaggccctcggcacccgtttcaacgtacgcctgcaagatgccgccacctgtctcagcgtcagcgagggttcggtgcgcatcgatgccttcggcgcgcgtccgctgcaggctccggtggccgaggcggggcagagctatcggatcgccgccgacggcgtgcggcgcctcgaacggccgcagatggacgccgtggcctgggccgatggcctgatcgtcacccgcgacatgcgcctggccgacttcctcgccgaggtcggccgctaccgcaacggctacctcggctgcgccgcggaggtcgccgacctgcgtctgtccggggtctaccgcctggacgacaccgacaagctgttgcaggtgctcgcgcggaccctgccggtgcgcctgcagcggcatacccgctggtgggtgagggtggtcgccgcctga

SEQ ID NO: 326200 - DNA, 519 bp, Pseudomonas aeruginosa
atgtccgccccgatccttctcagcgcccaccatcgcgccatgcatgcgctgtacagcgagcaccatggctggttgcagaactggttgcgcggcaagctgggctgcgcggcggacgcggcggacctggcccaggacaccttcctgcgcatcctgctcaagcgcgaactgcgcgagatcggcatgccgcgcgcgttcctgcggaccatcgcccgcggcctggtgatcgaccactggcgtcgcgaggaactgcagcgcgcctacctcgaaagcatcgcccacttgcccgaggcacaggcgccgtcgcccgaggcgcgggaactggtgctggaactgctggaggaaatctcgcggatgctcgacgggctcaagccgaaggtccgcaccgccttcctcctggcccagtgcgaagacctcagccaccggcagatcgccgaacgcatgggggtttcccagcgtagcgtcgagcgctacgtggccgaggcgctgtaccactgctacctgctgcgctacggcgaatga

SEQ ID NO: 326201 - DNA, 159 bp, Pseudomonas aeruginosa
gtggtcgagcacctcgccgggctcggcctggtggccaggctggcgctggagattcccggcgagggcgcggtgggtatgtgctggcgcgacgaaccgcatcgcgaccgcgccagcgaagacctgctggcctgcctgcgcgaaggcgcggcggccgagtag

SEQ ID NO: 326202 - DNA, 861 bp, Pseudomonas aeruginosa
gtgaaaaaggtcctgggaatctacggcaacgccaaccgccactgggtgggcgacggattccccgttcgttcgctcttttcctacaacacactgggccagcatatcagcccgttcctcttgctggactacgccgggcctgctgatttcccccccgcacagcagcgccgcggcgtaggccagcatcctcatcgcggcttcgagacggtgaccatcgtctaccagggcgaggtcgagcaccacgactccaccggcgccggcggacgcatcgggccgggggatgtgcagcggatgacggcggcctccgggatcctccacgaggagtaccactcggaacgcttccgtagcacaggtggaacgctggaaatggtccagctatgggtcaacctgccctccagcgacaagatgaatccgccgcgctaccagaccctgctggatgccgacattccccgcgtcggcctgcccgacagggccggcgaactgcgggtgatcgccggacgctacggccgccaccaggggccggcgctgacccactcgccactggcggtctgggacgtgcaactgaaggccggcaagcacctcgccctcgacctgcccaagggacatacctgcgccgtggtggtcctgcgcggcaccctcgcggtcggcgacgagatcgttcgcgaagcccaggtcgccctgctcgaccgcgacgacccgcggctggaactggaagccaacaacgacgtgcagttgctggtgctcagcggcgagccgctggacgagccgatcatcggctatggccccttcgtgatgagcagccgcgaggaaatcgaccaggccatcgaggacttcgagaacgggcgcttcatccgcgcccactga

SEQ ID NO: 326203 - DNA, 804 bp, Pseudomonas aeruginosa
gtgctggttccagatatccgccaggcggccgctgtagagcgtcgcctggctgccgccgggggcgctgtagctggcgcccagccaggcgatgtgcgggctttcgcgatcggcggcgataccgcccttggtgccgttgccgtagccgctggtgagatgactatggccgctctggttgcgcaggcgggtggcttcgacgaagccggcgtccagttcgagcgcgcggaaatggtagttcttcagggtcacgccacggtagctctgcggcaccatgcgactgacgccgctggcgatcaccgggttctccagcaactggtcgccgatcttcagcaggctgtccaggccgcgcagcttgagggccgcgccggccgccgagaagctgtcggcggggcgaccggcggagtccagcggcagcacgccggcaccgccgctgccgccaccgccgtccaggcgcaggccgtagaaggcgtgcgcatccaggccgatgcctatcggcgtgtcggtatagccggagcggaacgacagcatcaggccctgggcccattcgcgctggtcgcggcgggacggggtgtcgtggttgtcgcgggcgaaatagtagttgcggaggaaaccgttcagcgtcgagccttcgacgaagcccggcggcaccttcatttcggctttctgccgctggttcaggccggtgctgatgttgtcgcgatggcccagggagtcgtcggccaggagcgagcccggacctatggcaagggcaaggcagagcgtagccccgcgcttcatggaggaatcaggcatgggtccggtccgtag

SEQ ID NO: 326204 - DNA, 810 bp, Pseudomonas aeruginosa
gtgctcctggatcagaccctgcaggcgctccagagcgtcgcgctggatctggtgcggatcgtcgcctaccggttgcaggccggcatcggtgtagcgctcctcgtcggagaggaactggccgaggaagtcggtgaaatgggtcagcacttcggcggcgctgggcgcgcggaagccgatcgagtaggtcatgcactcgtcttcggcaatgccgtagtgggcgaggcgcgggggcaggtagagcatgtcgccgggctccaggacccactcgtcgctctgttcgaagtcggcgaggatgcgcaggtcggcgtgctcgcgcagcgggctgtcgctgctgcacatctgtccgactttccagcgccggcgtccgtggccctgaagcaggaatacgtcgtagttgtcgaagtgcggaccgacgccgccgccgggagcggcgtagctcatcatcacgtcgtcgatccgccagctgggcaggaagcggaattgctccagcagttgggcgacttccgggacgaactggtcgaccgcctgcaccagcagggtccagtcctgttccggcaggtgctggtagtcctcctcctggaacgggccacggcgcatttcccacggggttttcccgtgttcgaggacgatgcgcgattccaccgattcctccagcgacagcccggccagctcgtcggcggacagcgggctttcgaagtccgggatcgcctggcggaccagcagcggtttgcgctgccagtagtcgcggaggaattcggcagcggtcagtccgcccagaagttgcaggggagtatcagcattcatggttaa

SEQ ID NO: 326205 - DNA, 711 bp, Pseudomonas aeruginosa
gtgctgttcttccgcgaccagtcgctggaacccaggagccaggcgcgcttcgccgcccgcttcggcgacctgcacatccatccgatctaccccagcgtgccggagcagccggaggtcatcgtcctcgacaccgcggtcaccgacgtgcgcgacaatgccatctggcacaccgacgtgaccttcctcgagaccccggcgctgggagccgtgctcgccgccaagcaattgccgccgtacggcggcgacaccctctgggcgagcagcacggcggcctacgaggcgctgtcggcgccgctgcggcgtctgctggacggtctcacggcgacccacgacatcggcaagtccttcccccgcgagcgcttcggcgtcaccgaggccgacctggcgcgcctggaggaggcccgcctgaagaatccgccgcgctcgcatccggtggtgcgcacccatccgctcaccgggcgcaagggcctgttcgtcagcgatggctttaccacccgcatcaacgaactggagccggccgagagcgatgcgctgctgaagttcctcttcgcccatgccacgcgacctgaattcaccgtgcgctggcgctggcaggaaaacgacgtggcgttctgggacaaccgcgtgacgcagcactacgcggtggacgattaccggccacagcggcgggtcatgcatcgcgccaccatcctcggcgacaagcccttctga

SEQ ID NO: 326206 - DNA, 2037 bp, Pseudomonas aeruginosa
atgcaagaacgcatcccggatgagctgaccctgccagagctcaccctgcgtggcctgatcctcggtgcgctgatcaccgtggtcttcaccgcctccaacgtctacctcggtctgaaggtcggcctgaccttcgcctcgtcgatcccggcggcggtgatctcgatggccgtcctgcgctacttctccggcgccaacatcctcgagaacaacatggtgcagacccaggcctcggcggccggcactctgtcctcgatcatcttcatccttcccggcctgctgatgatcggctactggagtggcttcccgttctggcagaccgcggcgatctgctccatcggcggcattctcggggtgctctataccattccgctgcgccgggtgatggtggtgcagagcgaactgccgtatccggaaggggtggcggcggcggaaatcctccgggtcggcagcgacggcgccgaggacgaggaagacgcccgcgcgccgcgtgccgccggtaacgcgccggggctctacgacatcctcggcggcggcctggtggcggcgctgttcagcctctggagcagcggcttcaaggttctcgccgaaggcttcagcgtctggctcagtgccgggcaggcggcgttccgcctttccaccggtttttccctggctctggtcggtgccggctacctgatgggcatcaccgccggcatcgcgatcctcatcggcgtggtgatctcctggggcgtcgcggtgccgttgctgaccgtcaacagcgtgccggccgacggccagagcctgtcggacctggccacccaactgtggagttcgcaggtgcgcttcctcggcgccggcaccatcggcgtggccgcgctgtggaccctggcgaccctgttcaagccgatggtgcggggcgtctgggcctccctcggggcagtgcgcggcaatagccaggcgagcagcctgcgcaccgagctggacatgccggccaagtggatcctgctgatcgccgggatactgctggtctcgctgttcgtggtcttcagccacttcctcggtgccgccgcgccggacatggccagcccgcagttctggagcctggtggcggtatgcgtggtgttcgccttcttcttcggcttcctgatcgccgccgcctgcggctacatggccggcctggtcggttcgtcgagcagtccgatctcggggatcggaatcatcgcggtcatcctggtgtcgttgctgatactcggcttcggcagcatcgagggcggcctgctggaccgccagaacggcaagctggcgatcgccctggcgctgttcaccacctcggtggtgctggccatcgcggcgatctccaacgacaacctgcaagacctcaagaccggctacctggtcggcgccacgccctggcgccagcaggtcgcgctgatcgtcggctgcatcgtcggcgcgctggtgatccccccggtgctggaactgctctacagcgcctacggcttcaccggggccctgccgcgcgagggaatggaccccggccaggccctggccgcgccgcaggcgaccctgatgacggcgatcgccagcgggattttccacgacgcgctgaactggaacatgattctcatcggcgtcgccctgggcatcgccctgatcctcgtcgacctgctcctgcgccgtaccggcaaggcctgcctgccggtgctggcggtgggcctggggatctacctgccgccgaccatcggcatgaccctggtggtcggcgcgctgatttcctggctactggaaaatgccctgaagaagcgcgcggcggcagccggggtcgacgaagagacctatgccgaagagccgaagcgacgcggcgtgctgctggcctcggggctgatcgtcggcgagagcctgatgggcatcctgctcgccggggtgatcggcgccaccggcgaggacgcgccgctggcgctggccggcgccggcttcgcgggcatcgcccagtggctgggactggtggtattcgtcgcgatctgcgtgctgttctaccggcgagtgctggcgcgctga

SEQ ID NO: 326207 - DNA, 675 bp, Pseudomonas aeruginosa
atggataagactagaattgcttcacttattgcagctatgtctccggcctctgttatatacaaaggtcataaaaaggacggtcttgggagcgaaactgcgttcgaaattcgtcacggatgggatattaatttagccaatcaatgcgatgccgaatggagtagtaagaatatagaaatacttacttttcttcaaaacaatgtaagtgaagatgcactagagcaagaagtcgcaaaactgtacatggaagatgctcactggcgatggttaggtaaggctcttaactactgtacagatgaatacaattggtttttttggacttgcaaagatattgttcatggcgcatgccttatctatcaccccaaagaaagcgtaattgatggccaaggaatattctatattgagtatgtagctgttgctccgtggaacaggccaaacccgcttgcgccaattgtgtttaaaggtattggtacagagctaattagagttgcacacaaatatgctaccgaaacactaaaattaagacccggcttttcgttgcactctctgccaaaggcagcagcttattaccaaaaaattggaatgaaatgtttcccggagcacaagaaagatagtctagactattttgaaatgcctagagaggctgctgagtcttttggaggaattgcaaatgcctga

SEQ ID NO: 326208 - DNA, 837 bp, Pseudomonas aeruginosa
atgcctgaggcccgatccgatttagaggatttttttgcctgctctgactattgcagcccgaaaagtctgttaacagcactaagcacctatcaagccatttcagagaaaacgggaaataaaagtcctctaatctttaaggatctgctttccaatactggaaatggagccctatttagacgatccggggacggagatgcgaaggctatagaaacctttatatggctttcccaggtaaaaaggcttgccgaaagcattgtatcaacaggcaaggtgtcttcattcaaaaatcttgagcttcatcaactaaaagaaatagctaagctctctcttgatgttgaaagtctggagtcaatctcctcacaccttctcaattatggcatagtgcttatatatctccagcaaacttccgggatgaaaacagacggagtgctattcaagctctcttgcggaactcctgtagtcggcatgactctccgatatgatcggtatgattactactggtttacccttatgcatgagcttgcgcatttagtgctccactatgaaaaaattgaagagcctcacttcgattgcgtagatgacggcattaacgatgatattatcgaacttcaagccaaccaagcatcaagggatagctttgtaagtcgtagcgattggcgtactgccactgtgcgccgctttcacagtgatgaagagctatataaaaatgcaaaaaatttatccattcacccagctatattggcggggctagttagatacgaagcaggaaactatactatttttaataaaataattaaccaaataagtgtaagaaggattgttgctcatgatgcctaa

SEQ ID NO: 326209 - DNA, 1071 bp, Pseudomonas aeruginosa
atgatgcctaaatacataccatttctgaaagctaaagcgaatgaatttggtgctataaaggtactagaagatactcagaaagatgtcatcgcacctttttttgacttgccttttaaaaaagacatgacagcagatttgcttaagaaggttatcgacggagctgctagaaagtttgctcttaacatgaaaggagtttctgaatattttgttgatgactatgatattcctgataatctcatcatcaacggtaagcaaggttatgaatacttcgcagagcgcatgtttgctgagaacttaaattttaacccggtagtagggcttgatcggtctgctgcacggcaatcatgtgtttttagcgcagccattagagacatagcaaagaaccgtcgtgtcgcactccgtgtcacagccgatgatttgagcgactatagattagttcgctctgatattttggatctgatcagaaaaggcgagggggtctacgatagatgggtgttagtaatagataacagagtttgtttgggtgctgatgcagcaactcgcgcgactcagatagccagtttctgttctgctgcttacgctgaccatgcttacgaaggaatagttattactggctcttctcttccgcccgtgattggggatatcttagccacaaacaacgaaatccatttagtccgcaatgaaattggcatctacaatctggccgtcaagcttatctctgacgcaaaaatattctttggtgactacaccgttgtaagtccgaactattccgactcggacatagcgcctcagaatatgcttaacgttacagcgccaaaagtggtttattcttacagtcaaaatcattatatcgttcgtggcggcagcctaaaatctcatccgagaggtttcaagcaatataacgacattgcggcaaaaattgtggcgcagccttttttccggcataacttttctgctggcgatttatttcttgccgacaaagcgctgggtaacggctctaatgtcatgcctggaagcatattgaaacctacgatcaactctcacattacttatatgattagtatcttgtaa

SEQ ID NO: 326210 - DNA, 243 bp, Pseudomonas aeruginosa
atgctcaggggcaatggccactgcttttctaatgtggcgagaggtggttacaagtgtaacctttctaaaggcgcgatcataatatcgcccctgctctatgattctctctattttgtcattttcaccttttatttcatagcaatgagcttcgttgtaaactgccactatatctgctatggcattaccgttatggatacgcaactcttctatcagggcttttggctgaggccttcccctgtttag

SEQ ID NO: 326211 - DNA, 273 bp, Pseudomonas aeruginosa
atggaagagtctggaatagtggggttcaccgtcacaggtgctgtggagaaggtcacggacttccgcaccgcgccgttctgctcgcaggcggtcttcgcgcagatgctgggcctggaagacatcacggaagacgtggtgcggggctgggtggaaaccaagacgattccgactgccaagattggccgtcgccgggtggtgaacctgcatcgcatccgccgtgacctcgaccggggtaagtcgatcttctgccagggggattacgacggtgactaa

SEQ ID NO: 326212 - DNA, 315 bp, Pseudomonas aeruginosa
atggctaacatcggcaccttcaccgcagagaaagacggcttcaccggccagctccgcaccctgaccctcaacgtcaaggtcaagttgattcccaacgacaagggcgacaccgagaacgcccccgatttccgccttcaggcggccggccacgacatcggcgcggggtggaagaagaccagcgaagccgggcggccctacgtgtccgtatccctcgacgatccttcgttcccggcgacggtctatgctcgcctgatcgagaacgaggacggcacgcacgacctgatctggtcgcgcagcaagcccaaggcggcctga

SEQ ID NO: 326213 - DNA, 1230 bp, Pseudomonas aeruginosa
atgaagaataaatttgattggtacctaaacccatcgaaggaagagctggacgtcatttggaaagatggaacactgacggtcgatacaaatgttttgctcgacttgtatcgctaccatgaagacacaaggaacagcctgcttgaagtgcttcagaaatttgagggaaaaaaatggatatcgcatcaagctgcaactgaattcttcaggaatagaacaaaagtcatagtctcatcggaaaaatcattcaagcaggcgcaagacgaaatagagaaattaagcgccagccttgatgccgtaacagcacaactaagaggcaaccggataatcccatccgcacttccagacgaactgcacaaggcagttggacccctgatttcagacgccagatcaaaaatacaagaagcaagagacggttatccaaagttcctccgtgaagatccgatccttcagaaactgctcgatctattcaatggagcagttggagatgactttaaagacgaagatagagatcggcttgagaagcaagccgaacagaggaaaaaagacaagatacctccagggtatctagatgacgacaaagatgaagaccgaccatacggcgactattacttgtggctccaagtcattgagcatgcgaaagcaacgaaaaaaccgctgatacttgtcacgtcggaacgcaaagaggactggtgggagaagctgtctggaaaaacaactgggccaaggcccgagctagccaaagaagctaagcatttctctggacaacgggtattgatctatcaaacggagcggtttctagaacttgcgctccagcgacttcagcagcccgttaatgaaatggcgatcgaagaaatacgcgccgttagtgtgtggcgacaggaagcggtgagactgcaaaagcaatccacgtccgagagcacggatctgaggaatgtcggcacgttgacagttgagctaaggcgccaagtacgaaatttcaccgttagcggacatttggagccgaacatcgttgcccctccgacgctaaaagttcgcctgttgaacgctccgggagaattgccggcccacagactcaatgcaggcacaggcactacccatgacttcaatattcatattgtttgtgtagacagggaagcccagcttcctatcggctcctacatttttgaatacgaagcgtcgtgcccaggaattggggatgagtttcacccggaagaagtgattgaaagttga

SEQ ID NO: 326214 - DNA, 255 bp, Pseudomonas aeruginosa
atgagccaggaagcgttctccgacgtgtccagccgtacctacatgagttcgctggaacgcgacctaaaaagtccgaccatgaacaaattggcggagttgtgtgaggtgatggaagttcaccctcttacgcttttgacgttggcgtatgcaggcaacaataccgccaaagccagcgaactttttgcgcagatacaagctgagttaacccagcttacaaccaaccctacattgaccctttcaaaaaatgaagaataa

SEQ ID NO: 326215 - DNA, 351 bp, Pseudomonas aeruginosa
atgacccagccgcttgtcaccgctgaacagcaggcgcaactgcttgccgtcggcgcggcacgcgccgctggccgacgcatcgacccgatgccggtggtacgactgttcacccctgacgcgcacgccacctggctgctggccgcgctcgacccggccgatggcgataccgcctgggggctgatcgacctgggaataggtatgcccggcctgggccatgtgaagctgtccgatctggcgtccatcgtcgggccgcaccagcaacctgtgatgcgcgatcgctacttccagccggtgcggctgctgtcggagtacctgcgtctggccgaggaaaacggctcgatcaccgactga

SEQ ID NO: 326216 - DNA, 798 bp, Pseudomonas aeruginosa
atggctgacccgagcgccgaacactggtatccgaccgccgcgtatctctacacgctgcacctcgacggccccgcgctggcgtgggaatacctgcgccgccaccccgactaccgccgtgactggctgcgccggcgccgccgaccggaggccgccgcgcgctggggactgcgcctgctggaagatcccgccctggatgcgcgcgacgcacatccggcctggttccccgatcacgatgcggtggtgcagctctacccggacgccgacccgccgcccgacgcgatggccttcgcgttctggcgcattcccggccagaaacgcctgatccacgatggcaaacgcctggtgctgctgtcacgctggccgggctgctgcctgcggctggtgatcgctcccggcttggccgatggcatggcctacgcctatgccatccgcgcctgcgccgcatcctgcggacgctatcaggcgctggcggccgaactggacaagctggccgccgctggcgatgcagcgccagcgggaatggcacggtcgcggccggcacccgctgcgttgttggagttgaacacgctccaggcgctcgacggcaccctcgcgggcgcgtctctgcgcaacgtggccgaagggctgttcggcgtcgatgccgtcggcgacgactggtacgccgacagcgccttgcgcgcccgcgttcgccggctggtacgccgcggcgatgcgctgatgcgcggcggctaccgccgccttgcacagcttccgcccattgcacagggacgcgctgcatccccggcaaaacgtccctga

SEQ ID NO: 326217 - DNA, 285 bp, Pseudomonas aeruginosa
atgcgacccgctcccttgcggcctgccgccgctgctgtcgctgcgcccgttcagccccaacgctatctgaccaacgacgaagccgccgaatacctgcggctgtcgccgcgcacgctggagaaacagcgcgtgatcggcggcggccctaagttccgcaagttcggccgccgcgtcatgtacgcggtgtccgacctcgatgcctgggccgaccaacgcagctacgaggccacgtccgacccggaatatgccgagcgtcacgcgggcgactaccgtgatggccgctga

SEQ ID NO: 326218 - DNA, 1158 bp, Pseudomonas aeruginosa
atgtcctggtggccgaagatcggcaccttgctgggcttctgcaacgaggcgcaggcgcgcttccttggcgaaagcgcggagcgggcgatccaggaactcggggagttctgcgcgcggcatgacatcgatgcgcacttccagcagaagggctggctgtggaccgccaccacggcgcaccacctcgacgcctggaacgataccctcgccgcctgcgaacggctcggcgtcagtcccttcgaacgcctcgacgccagcgaagtggcacgccggaccggttcgccggtgcatctcgccggggtcttcgagcgcagcaatgccaccgtgcaaccagccttgctggtgcaaggcatgcgccgcgtagcgctggccctcggcgtggaaatccacgagcgctgtggcgtcagccagatcgttcccggccagccggcacagctgctgagcgccggggcccgggtccaggccaaggcggtggttctcgcgaccaacgcctggtcggccgccctgcccaggctctccaggctgatcgtgccggtgaacagttccatcgcggttaccgaggcgataccgcaacggctggagcgaatcggctggaccggcggggaagccatcaccgattcccaactgatggtggactactaccgcaccacccgcgacgggcgcatcgccttcggcaagggcaccggcgccatcagctacggctcgcgcatcggccgggtattcgacgtcgaccgggagagcctggccctgaccgaggccgacttccgccgcacctatccctcgctaggcgacatcccgctggtcgacggctggtccggccccatcgaccgtacctacgacagcctgccggtcttcggccacctgcacgagaacatccactacggcatcggctggagcggcaacggcgtgggaccgagccgcctgggcgggcggatcctcgccagcctcgccctcggccgcgacgacccgtggagccgttgtccgctggtagaacgccgctgccggagcttcccccccgagccgctgcgctacctgggtggctccctggtgcgcaacgccgtcctgcgcaaggaacgcgcggaactcgccggtaccgcgccctcggccaccgaccgctttctcgcgcgcttcgcccccgccggccttgaagacaaatcctga

SEQ ID NO: 326219 - DNA, 276 bp, Pseudomonas aeruginosa
gtgggcggagacgttcaggcgctggccgagcaccagccccagcgccggctcgccgcacagggcctgggcgctgtaggtgagctggttgaagtcgaggaaggacaggcggccgttcgggctgtccagcacctcgggacgcacccgcgcagcgtcgaacagcgcctggcgggatacgccgtactccgcgacaagatcgaggagtgcctcggcataggccaccggcaccagttcggcggtgaaattgagcggttgtttcatggctgtttattgttctga

SEQ ID NO: 326220 - DNA, 942 bp, Pseudomonas aeruginosa
atgtccgcgacaccctatctgctgcaaccgccgctggcggtcggattcgcccgcctgggcttcggctccctctcgctggagtcgttgcgcgagcgctacgccgcaccgtccagcggctcgcgcttcatcgagctggacggtttcccgctgcactaccgcgacgaaggcagccgcgacaagccggtactggtgatgatccacggcgtggtcgcctcgctgcacacctgggacgactgggtgaaggcgatgtcgccctacttccgcatcgtgcgcttcgacgtgccgggcttcggcctgaccgggccggggcgtgacagccgttactccggcgagcgcatggtggcgatcctcggccagttgctcgatttcctgaagatcgacaaggcctcgatcgccggcaactccctgggcggttatatcgcctggaacttcgccctggcgcagccgcagcgagtggagcggctggtgctgatcgacccggccggttaccagatgcgcaaggtgccgtggatgatcgcctcggcggcgctgcccggctcgaccctggcgatgccgctgtggatgccgcgggcgctgatcgcccagggcatcaaggaagtctatggcgagccggggcggatcaagccgggagtggtcgaccgttactacgacctgagccgccgcccgggcaaccgcaagggcatgatggagatcttccgcgtgttgctgaaggtcaaccgcgaggaactcggcacctccggcgaacgcatcgcccggatcgtcgcgccgaccctgctgatgtggggcgaacgcgaccgctggatctcgccgaagcacgtaccgctgtggcaacgcgacctgccggggatccaggtgaagacctatccgggcgtcgggcatatccccatggaggagattcccgagcagaccgcggcggatgcactgcgcttcctgatggcctga

SEQ ID NO: 326221 - DNA, 1683 bp, Pseudomonas aeruginosa
  misc_feature (925)..(934): n is a, c, g, or t
atgcagggtgcgcgccgtggcgcatgccggctggccgttgagcagagcccggcgcgcctgctgcgcccagggcaacggcagatcggcaggctgctcccaggtgctgtcgcagagacgctggagcagccccacgtaggcttcgaacatggtttccggcaggccttcgggaaacaggccgacgacgctgtcccaggccagcaggataccgtcgcccacccggtagagctggtggtcgagccagacctgcggggtctgcgagagcatgtcgtggagatcgccgaaagcgtcgcggaaggctgccgggacgaagccctcctcgcccaggttgctggcgaacaccaccggcgccgagcgcggctggccctgccggcgcgcctcgcggagcacctccagggcggggaatgcggcgtggtcgatggctccgtggaggttgcgctggaagctcttcaccgcctcggcgaaggacaccccggcctgcatccggcactccagcagcaacagggtggtgaagtcggcgatcacctcgccgatacgcgggtcgtcggcatgccgatcgaacaacggcacgttgaggagaaattccgcgctttcgctccagcgcgccaggaccagcgcgaaggcgcagccgaacacgctggacaaggtcacgccatgctgcgcggcaagacgctccaggcgccggctctcgccggcggaaagctggaatgccaggcgccgggtgcgcggctggcggatgctttccggcgcgcaggccaacggcaaggccggcgcgtccggcaagcgcggcaggcgttccagccagtagtcgcgggcccgcgccgcggcctcggcgcgttgcgccgcacggcgcgccaggtagtcggcgaaatgcagcgccggcggctccgccaggcgctccggcgccaggtaggcgacgcccagttcnnnnnnnnnntccggcgccaggtaggcgacacccagttcggccagcagcaggcgcaggctttcgacatcggcggcaagcaggtcgagactcagccagaggcgatcctcgccgcccggcatgcgcaccagcccgagcaggaacacctggccgcgctccaccgccaggcattcatgggcgcgccagtcgcgcagcgcctgccagtcgcgctcggcctcgtccacctgcaaggtacgccagtcctgcaggtcgaagcaggacagcggcggcgtcggaaggatctgctggcgaccgtcgaagaagcgcgcccgcaacatcgggtggcgttgacgcacgcactccgccgccgcggccaggcgctgcgggtcgacatcccgcgtgcggaattccaggaaggcatggcagctgacgttgcccagcacctcgccggcgccacgtcccagccagtaggcctgctgcacggaagacagctcgaacggctggtcgcgatcctgcaccgtcggcccaggcccccaggcaggggcgctgcgccaactgggcgaagtccagcgtcgagccacgcgcgcgcaggcgttcctgcaggtacatcaggcggatcgagtcgaggccgcagcccagcaggtcgtcgtcgtccgccagggcgcgcacgtcggcaagcggttcgccgagcaggtcggcgagctgctcggtcagccagtcgcgcagggcggtacgggaatcggggggcagatccatgggggctccctagggcaagcatctga

SEQ ID NO: 326222 - DNA, 804 bp, Pseudomonas aeruginosa
ttgtggttccaggggctcgcttccggcttgcgcaacgaggggcgctcaggcgtcagcggcagtcgcgagcgtagcgacggcattgccctgggcctggtccaggcgctcgacgaacgaacccagggcggcgcgacgctggcgcagaccaagggacggatcaacagcgccggcggcaaggtcgagctggacatcacccagctcgccgtgggcttgctacacgccttcgacagcctggaacagggcggttacgtcagtgccatgctcggcgccggctacctcgacgccgccagcaagcggcgcctgccgggctttgccacggccaagggcgacagcgagggctggctctaccacgccagcgtcaagagcggctaccgctggcgcaaggacgattggcgggtcgagccgcgggtcggcctgctggcgacccgcacggaatggaaaggtttccgcgaaaagcacagcgagctggcgctggacgtcgaccgcgcggccagggatgcgaccttcgccaccctggaactgagcgtcgcgcgcagcctgcgggtggccgactggtcgctggagccggagctgaacctgggctacgagcgtgccctgggagtgccggcgagccacaccgaggctagcctgcagggcgtcgacctgaagcaggtttcggcccatcgggggcgcgacctgttcagtgcggggatggcgctgcacgcccgccgcggtccgttgcagggcagcctggagctgcaggggacgaaaggcgagcgggtcggcggcagcgccgtcaacctgcgcctgagctacgacttctag

SEQ ID NO: 326223 - DNA, 531 bp, Pseudomonas aeruginosa
gtgagcctggaactgcaagagcattgctcgctgaagccctataacaccttcggcatcgacgtgcgcgcccgcctgctggcccacgcccaggacgaggctgatgtgcgcgaggccctggccctggctcgggagcgtggattgccgctgctggtgatcggtggtggcagcaacctgctgctgacccgtgacgtcgaggcgctggtattgcgcatggccagccaggggcggcgaattgtttccgatgccgcggattcggtgttggtcgaggcggaggcgggcgaggcctgggacccattcgtgcaatggagcctggaacggggcctggccggtctggaaaatctcagcctgattcccggcaccgtgggtgcggcgccgatgcagaacatcggcgcctatggcgtggagctgaaggacgtcttcgacagtctgacggcgctggatcgccaggatggaaccctgcgtgagttcgaccgccaggcctgccgtttcggctaccgcgacagcctgttcaagcaggagcctgatcgctga

SEQ ID NO: 326224 - DNA, 504 bp, Pseudomonas aeruginosa
ttggacctggtcctctgcgacgatggcttgcagcactatcgcctggcgcgcgatctggagctggtgctgatcgatgccgcgcgcggtctcggcaatggtcgttgcctgccggccggtccgttgcgcgaaccggcggagcgtctggaaagcgtcgacgcgctgctttacaacggcgccgacgaggatcctgacggcggttacgcattccgcttgcagcctactgcgctgatcaacctgcagagcggcgagcgtcgaccgctggagcattttcccgcgggccaggaggtccatgccctggccgggatcggcaatccgcagcgtacctacacggcggccgaactggcgttcagcccgccgctgccgctgctgatgaccgagaaggatgccgttaaatgccgggctttcgcagcggccgactggtggtacctggcggtcgatgcggtgccttccccagcattcgtcgcctggttcgacgcccgactcgagcatctcctggcgcgctga

SEQ ID NO: 326225 - DNA, 393 bp, Pseudomonas aeruginosa
atgacgcagatgatcgttcctgctttccgcttttctgcaaatccggctttgcgccttcccgcgcggtcgcggctgcaccgcctggcccgccctgcggcacaagggctgctgctggccgcgctgctgctgttcctggccggaaccgcgcaggccgccggttcctcgatgccatgggaaggcccgctgcaatccatcctcgaatccatccaggggccggtggcgcgcattgtggccgtcatcatcatcatcgccacgggcttggcgctggccttcggcgacacgtcggggggctttcgcaagctgatccagatcgtgttcggcttgagcatcgctttcgccgcgtcctcgttcttcctgtcgttcttttcgttctctggcggggctgtcgtatga

SEQ ID NO: 326226 - DNA, 2454 bp, Pseudomonas aeruginosa
atgctgaaccttgccgaataccgccagcggcccgcgctgctcgccgactggctgccttgggccggactggtcgcgccaggcgtcgtcttgaacaaggacggcagtttccagcgcacggcccggtttcgcgggcctgacctcgacagcgccacgcaaggcgagctgatcgccacgtcggcacgcttgaacaacgcgctgcgccggctgggttcgggctgggcgctgttcatcgaggccgagcgccgcgccgctgccgactacccgcactccgagtttcccgagccgctgtcttggctggtggacgaagaacgccgggccaccttcgaggaatcgggcaaccacttcgagagcggctaccacctgacgctggtgtacctgccgcccgaggaatcgcgcgcccgtgccgccaagatgctctacgagaacacgccgacgaatggcgtggactggcgcgagcggctgcaagccttcgtcgcggaaacggatcgggtctttgacctgctcgaaggcgtgatgccggaaatcgcctggctcgatgacgcgcagaccctgacctacctgcacgcgaccatctcgacgcggcgctaccgcgtgggcgtacccgaagtgccgttccacatcgacgcgctgctgaccgattcgccgctggtcggtggcctcgcgcccatgctgggcgaccggcacctgcgcgtggtgtcggtgcgtggctttccgacctcgacctggccggggattctggacgacctcaaccgcctgggatttgggtatcgctggagtacgcgctttctgtgcctcgacaaatccgaggcggaacgggaactcggccgcctgcgccgccagtggttcgccaagcgcaagaacgtcatcgcgctgttgcgcgaaacgatcttccagcaggaatcgccgctggtcgataccgacgccagcaacaaggccgccgatgccgatgcggccttgcaggaactgggtagcgatcaagtcgccttcggctacctcaccgccacggtgacggtgctcgatgccgacccggccgtggcggacgagaagctgcgcatggtggagcgcgtcattcaggggcgcgggttcgtcaccatccccgaaacgctcaacgccgtggatgcgtggctgtcctcgcttccgggcaacgcctacgccaatgtgcgccagcccatcgtctcgacgctgaacctggcgcacatgatgccggtgtcggcggtatgggccgggccggagaagaacgaccacctgggcggcccgccgctgatcgtcacgcgcaccgatggcgcgacgccgttccggctggtgacgcacatcggcgacgtgggccacacgctggtcgccggcccgaccggcatgggcaagtcggtcttgctcgccacgctggcgatgcagtttcgccgctatcgcggctcgcgcatcttcgcgttcgacatgggctgctcgatgcgcgccacgatcctcgggctgggcggcgagcactacgacctgggcacggatggcgaaatcgctttccagccgcttgcccgtatcgaccgtgaaggctaccgcacctgggcggccgaatggatcgaaggccgcttgctgcatgaaggcgtgacggtcggccccgatgagaaggccgccatctggtcggcgctggggagcctggccggtgcgccggtggagcagcgcacgatgaccgggctttccgtgctgttgcagagcaatgtgctgcgccaggcgctcgcgccctatgtgctgggcggcgcgcacggcaagctgctggacgccgatcacgaccggctgggcatggccgacgtgcagtgcttcgagatggaggagctgatgcacagcaaggccgccgtcatggccgtgctgcattacctctttgcgcgtttcgatgaacgctttgacggtgcgcccacgctgctgatcctcgatgaagcgtggctgttcctcgatgacgcggtgttcgcggcgcgcatccgccagtggctcaagacgctgcgcaagaagaacgtcagcgtcatcttcgccacgcagtcgcttgcggacatcaaggattcgagcatcgcgcccgcgatcatcgaaagctgcgcaagccgcatcttcctgccgaacccgcaggcgaccgagccgcagattcgcacgatctacgagggcttcggcctcaacaggcggcagatcgagatcgtcgccaccgcgcagcccaagcgcgactactactaccaatcccgcctcggcaaccgcctgttcgacctcgacctgggactggcgacgctggccttcgcgggcgcttccacgccgcaagaccagcgcgacatggatcgcgtgctgctggacgccggcacgcccggcttcgcgggcgcatggctgcgccatcgcggcctcgattgggcggctgacctgctgccctcgttccccggcctcgcgccggtttccttcgctgaccaaccactggagaacctgccatga

SEQ ID NO: 326227 - DNA, 618 bp, Pseudomonas aeruginosa
atggttgtgcgaaacgacgaccgccgcgactacaccaagcacatgatccgcctgcgccacgccagccagatcaacgggcgcgaggccaacgaaatcatcctgctgaactcccatgacggcaccagcagttaccagatgctggccggaatgttccgcttcgtgtgcagcaatggccttgtgtgcggtgacaccgtggccgacgtgcgcgtaccccacaagggcgacgtagccgggcacgtcatcgaaggcgcttacgaagtcctgcacggtttcgaccgggcgcaggaatcgcgcgatgccatgcgcgccatcaccctcgacgccggggaatcggaagtgttcgcccgcgccgcgctggccttgaagtacgacgaggacaagcccgcacccatcacggaatcgcaaatcctgatgccgcgccgtggcgacgacgaccgccgcgacctgtggagcgtgttcaaccgcacgcaagaaaacctcatcaaaggtggcctgtccgcccgcgccgccaatggccgccgccagaccacccggcccgtgcagggcatcgaccagagcgtgcgcctgaatcgcgccctgtggctgctggccgatggcctgcgccagctcaaagcctga

SEQ ID NO: 326228 - DNA, 2118 bp, Pseudomonas aeruginosa
  misc_feature (1731)..(1740): n is a, c, g, or t
atgaacgccgtaacccaaaccgaagcccgcgccatcgaaaacgccgcaccgctggaaatggccgacccttccaagaacctgatcttggttgccctttcgcagttgctgccgcgccgctccaagcgcaacgcccgcaagatgccgcgcctgtccatccccgaactggccgcgagcatcgcccgcatcggcctgctgcaaaacctgatcgtgatcgcatccgccgatggcgagcattacgaggtggtggccggtgatcgccgcttgaccgccttgaagctgctggcgaagaagcgccgcatccccgccgactacgaggtaccttgcctgcttgtggccgatggcagtgcccgcaccgtcagcctcgccgaaaacctgatgcgcgagcagatgcaccccgccgaccagttcgaggcgttcgccgcgctggtcaaggaaggccggcccgtcgaggacattgccgccgacttcggcgtgtccccgctggtggtgcagcgccgcttgaagctggcccacatcgcgccgcgcctgatggccgactaccgcgccggagccgtcacgctggaacagttgatggccctgaccatcaccgacgaccacgccgcacaggaagccgcgttctatggtgcgccggaatggcagcgcagcccgtccgcgctgcgcgcacgcctgaccgagcgggaaatcgacgccacgcacgcgctggtgcgcttcgtcgggctggacacctaccggcaggcaggcggtggcatccgccgcgacctgttcgccgaaggcgatgccggaacctacctcaccgacgccggggtgctggaaactctggtgcgcgagaagctggcaacgctggccgaggacgtgcgcgccgagggttgggcatgggtggaggccgtgccgcatctggcctacgaggaacggcaggcgttccagaacgcaccgcgccaccgccgcgagccgaccgcccgcgaggcccgccgcatcgcctcgctggaaaaccgccttgaaaagatcgacgcagaactggaagaagcctgcgacgccgaggacgaggccaaggccgagaagctggaacagcggcgcgatcaggtgatcggggaactgcaagacgcggaggacgccttacaaggctatgcgcccgaggtgcgcgaggtggccggtgccatcgtcaccatcgaccgcaacggcgaggccgtcatccatcgcggcctgctgcgcgaggccgaggccaaggcgctgcgcacgctggaaaagctgcggcgcggtttcggcaacgccgaaggcgaagccgacaacgacgaaggccacgacgccgacgacgcgcccaaggccgcgagcctgtccgaccggctggcgcagcggttgagcgcacaccgcacggcggcgctgcaaatcgaagtggcacggcatccgcaagtggcgctggccgcactggtgcatggcatggtgcagaaggtcttgcaggacagctactacggcaacgaccaaccgctgggcgtgcgcgtgacgctgcaagaccggctggaaggaatggccccggactggccggaatcgcccgccgccgtggcgctgcgcgaactgcaacaggtggccggtgaaggcttgccgcaggacagcgccgaactgttcgccgcgctgctgacgaagccgcaagacgaactggtcaatctgctggccgtgtgcgtggcttccacggtggacgtggtgacgcctcgcgccacgccgcaccaccccggcgannnnnnnnnngcttccacggtggacgtggtgacgcctcgcgccacgccgcaccaccccggcgaggaactggcgcaggccgtgggcctcgacatggccgcatggtggcagccgaccgcagaaggctacttcaagcacgttcccaaggcggcagtcctgcaagccgtgggcgagtacgcacccgagcaggtttcccggctggcgaagttgaagaaggccgacattgccagcgaggccgagcggctggcgaacggcagcggatggatgcccgccatcttcaaggcagaaggcgcgcaggaaaccacgcaggcagaaccgcaggcgcaggacgacgccccggaggaagccgaggcaatggcggatgaacccgccgtggcgctggccgcttga

SEQ ID NO: 326229 - DNA, 210 bp, Pseudomonas aeruginosa
atgacccgcaccaccacccgccgcccacgcatggcggcaatctacgcccccggcacagtacgcgcccgccgctggcatggcgatggcgacgtgcgcggctaccgtccgccgtcgggctggtcagcccgcgccgacctcaccgacattcaccccatcacgggccacgccttgccgcgtgccgtgtggtggattgtcgaaacgaaggaataa

SEQ ID NO: 326230 - DNA, 930 bp, Pseudomonas aeruginosa
gtggcggtgctggatacccgcgccgggctctggctcgaccagggcatggcctcgctgttgcgcccggggttggaactgaccctcttcgaacgcagccgcgtcctcctcgacgccgccgccacccgcttgccggaacggatcgtggtgcaggcgctggacgacggcctgctacctgccgagcacctcggtcgctacgaccgggtgatcagcttcgccgcgctgcacgcctacgcggccagccgcgaaggcctggcgctggcggcggcgctgctgcgcccgcagggccgcctgttgctggtggacctgctatgcgagtcgccactggcgctgctcggtgcggccttgctcgacgaccggccgctgcgcctggcggagctgccgagcctgttggccgatctcgccgctgcgggattggcgccgcgttgcctgtggcgcagcgagcggatcgccctggtcgaggcgctggcgccggggctcggtctcgacgccgccgcgctccaggccggtctggagcaacgcctgccccaggcgatgcggcccgaacgcctgtggtgcctgccaagcctgccgttgaacggcaatggcaaggtcgatcgtcgccgcctggccgagagcatgacccgcgcactcggcgagtgtcgtgacgagccctcggcggaggagccgctggaagcccatgagcaggcgctggccgagtgctgggaagcggtcctcaaacgcccggtgcgtcgtcgcgaggcgagcttcttcagcctcggcggcgacagcctgctggcgacccgcctgctggccggcatacgtgagcgtttcggcgtacgcctgggcatggccgacttctatcgccagccgaccctggccgggcttgcccgccacttgcaggcgcagaccgtcgagatcgaggaaacccaactggaggagggcgtgctatga

SEQ ID NO: 326231 - DNA, 2820 bp, Pseudomonas aeruginosa
  misc_feature (1009)..(1018): n is a, c, g, or t
atgcagggtgacgaagctggccaggctgcgctcgtgggtctcaccgagcaccacggtggccgccaggttgacctgcggatgggcgcacagcgcggcgtccagctcggccagttcgatacggtggccgcgaatcttcacctggtcgtcctcgcggccgaggaactcgatgctgccgtcggccaggtagcggccgaggtcgccggtgcgatacaggcgacggccatcggggtgacggacgaagcgttcggcggtgcgctgcggatcgccggcgtagccgagcgccaggcccaccccgccgatatggatctcgccgcgcacgcccggcgggcagcgccgcccgcgggcatccaggacttccacgctctgcccgcgcagggcacggccataagggatgctggccagctcggtgtgctgcggacggatcggctgctcgatcgaccagatcgccgcctcggtagcgccgcccaggctgaacagcgcgctgtccggccagcgccgccaccagcgggtcggcaggctgactggaatccagtcgccggaccagagcacgcagcgcggtcccggcaggtggcgttgcggctcgctctccaggtaatcgatgagcatctggccctgggccggcaccgagttccacagggtgatggcgtggcgttccagcagttccgcccaatgcgaaggatcgctgccgcgcgccgggtccgggaggaccacctgggcccccgccgcggtggcgccgaagaagtcgtagaccgaaaggtcgaagctcagctcggcgaggccgaggacgcggtcgttggcgtcgacgccgtagcgctggttgatgtcgagcagcgtgttgctcaccgccgcatggctgagcatcacgcccttgggcgtgccggtggagccggaggtgtagatcacgtaggcgaggtcgtccgccgccacctccgccgcgggcggtggcggccaggcgctgtcggcggccagccggtcgatggccacgcaggcgcagccggcgtccgggacnnnnnnnnnngggacatcgctttccaggcagaccagcgcgaccacttcggcgctggcgaggatcgcctggcgccgcagcggcggctggcggatgtccaccggcacataggctgcgccggcctggaggatgccgatcaccgcgaccaattgcgcggcgcttttcggcagcatcaccgcgacccgccggccacggcccgcgccgtgcgcttccaggacgcggcgcagggcgctggcgtgctgggcgacctggcggtagctgtagctgccggcggcatcgtggatcaccgtggcgtcgggggtcagcagggcacgctcggcgaaaccggcggcgatgctccgggcactaccgggcaacgcctgcggcggcgcctcgacgggttccgtggcatcgccgtcggtccaggcgcgcgggctctgcgccaggcgccggagcagcccgacgaagtcgtcgaacatggcttccgcctgcccctcggggaacaacccgaggcgtacgtcccagccgatctccaggccgccgaactggtcggtgacctggcagtccagccagacctgcggggtctggctgatcatgtagcgtggcgcgcgcggcgcctcgccatcgccgagcaggcgctgcacgctgccgatgccactggtgaacaccaccggcatcaggtcggcgccgcgaccgcgccggcgcgccagttcgcgcagcaggtcgacgcggttgagtaccgtcaggttgagacagaacgccggtgcctggctccagcgaccgatggtctcggcgaaggccgccagggccacgccggcagcgctcaggccgtgttcgccggcgcgcgcgccgagcgcctgccaggcggcctcgtcgaggcgcgcgtggaagtgccggaagcgcgtggaccgggtgtccggctgcgcccgcagcggcaggtcgggacgccccggcagcgcgtcgaggcgcgccagccaccagtcgcggtcgcgctgccaggctggcgactggcgtcggcgctgctcgacgccgacatagtcgcggaaggtcgcctccagcggttccgccgtccattgcggatcgagatagcggcggcgccattcgccaagcagcaattgcaggctggcgtagtcgaccagggtgaaatccaccgagcagtgcagtacgcagtcatcccggccgatactcagctcggggcgcaggaccggccactggtcgagcgccgcgcaggcgtggtcgaggcgttcgcggacccgctccaggtgcgcctggaaagcggcctcgtcgagccccgcgcaggcatgcacggtcagccgctgccagggcacctcgggcaggacgcgctgccaggcgttgtcctcgatcaccgcgcgcagcatcgggtggcgctcgaccatggcgttccaggccgcctccaggcgcgccgggtcggtgtcggccggccagtcgtactcggcgtacagctggcaggcgttaccgccgtagtcgaaggccgcctggcggcccagcacgtaggcggcctgcaccggggtcagcgggaagcgctggtgggccaggtcgggttcggcgcgccagccagggccgccttccaggtgttccagcagggcctcgcgctcggcccgcaggcgctcggcgaggccggcgtcgagggcgccctggggggcgcgatagcgcaggcggcccgcctcgctccagagttcgatgcgccggctgcggcaggtttccagcagttcgccgaggctcatagcacgccctcctccagttgggtttcctcgatctcgacggtctgcgcctgcaagtggcgggcaagcccggccagggtcggctggcgatag

SEQ ID NO: 326232 - DNA, 1995 bp, Pseudomonas aeruginosa
atgagttcgattgtccgcaacagcgacgatgatccgctggtcatcgccatccagcagccccgtatcgccatcgagtcggtcagcccggtggtggaagagggcgcctatcccgcgaagaccgagagcgaccgcgacctgcgcctggccgcgcgaatcttcaccgatggccatgaggtactcggtgccgaggtggtctggcggcgtgtcggggaaaccgcggagcggcgcctgccgctgctgcccgaaggcaacgatttctggagcgcgcagctgcgcacgccgccctgcggccgcctgtacttccgtatcgaagcctggatcgaccgttttgccggctaccgccgcgaactgcgcgccaagcatggcgcgcgcctgccgctggacctggagctgcgcgagggcgacgaactgctgcagcgctgcgccgagcgcggcggtccggagatcgccgccgcctgtgcgccgctggccgaacgcctgcaggcctgccagagcgtcgaggagcgggtggcgctgtggctggcggcgcagaccggcgaactgttgcgtctggtcggcccgcgcgagcacctggtgcgcagccgcgaatacccgctggaggtggagcgaccgctggcgcgcttcgccagttggtacgagctgttccctcgctcggaaagcggcgacccgacacgccacggtaccttcgacgacgtgatccggcgcctgccgcagatcgccgcgatgggcttcgacgttctctatttcccgccgatccaccccatcggccgcacccatcgcaagggccgcaacaattccttgcgtgccgaggccggcgaccccggcagcccgtatgcgatcggcagcgaggagggcggccacgaggcgatccatcccgaactgggcgaccgcgaggatttccgccggctgctcgttgcggtgcgcgagcacggcatggaactggcgctggacttcgccatccagtgctcccccgaccacccctggctgcgcgagcatcccggctggttcgcctggcgtccggacggtagcttgcgctacgcggagaacccgccgaagaagtacgaggacatcgtcaacgtcgacttctacgccgaacaggccctgccgagcctgtgggaagccttgcgcgacgtggtgctgggctgggtcgagcagggcgtgacgctgtttcgcgtcgacaacccgcacaccaagccactgccgttctgggagtggctgatcgccgaggtgcgcggccgccatccgcaggtgatcttcctttccgaggcgttcacccgcccggcgatgatggcgcgcctgggcaaggtcggcttcagccagagctacacctatttcacctggcgcaacgacaagcaggaactggcggagtacttcgccgaactcaaccagccaccctggcgcgactgctaccggccgaacttcttcgtcaacaccccggacatcaatccctggttcctgcaacgctccggccgccccggcttcctcatccgtgccgccctggcgaccatggggtcggggctgtggggcatgtactccggcttcgagctgtgcgaggcggcggccttgccgggcaaggaggagtacctcgactcggagaaataccagttgcgtccgcgcgactaccaggcgccgggcaacatcgtcgccgagatcgcccggctcaaccgcatccgccgggaaaacccggcattgcagacgcacctcgggttccaggcctacaacgcctggaacgaccgcatcctgtatttcggcaagcgcaccgcggacctcgccaacttcgtcctggtggcggtctgcctggacccgcacgaagcccaggaggcgcatttcgaactgccgctgtgggagttcggcctgcccgacgacgccagcctccagggcgaggacctgatgaacgggcatcgctgggtctggcacggcaaggtccagtggatgcgcatcgaaccctggcacctgccgttcggcatctggcgcgtgcggcgcgtcgacgcataa

SEQ ID NO: 326233 - DNA, 1056 bp, Pseudomonas aeruginosa
atggtacaaggacgcggtgatctaccaggtccacgtgaaatccttctacgacgccaacaacgatggcatcggcgacttcgccgggctgatcgagaagctcgactacatcgccgacctcggcgtgaacactctctggctgctgccgttctacccgtcgccacgccgcgacgacggctacgacatcgcccagtaccgtggcgtgcacagcgactatggcagcctcgccgacgcccgccggttcatcgccgaggcccatcgacgcggtctgcgggtgattaccgagctggtgatcaaccacacctccgaccagcatccctggttcatccgcgcccgccacgcgaagaaggggtcgcgcgcccgcgactactacgtctggtcggacagcgacgagaaataccagggtacgcggatcatcttcatcgacaccgagcagtccaactggacctgggacccggtagcccaacagtactactggcaccgcttctattcccaccagccggacctgaacttcgacaacccgcaggtcctgcgcgaggtcctcggggtgatgcgctactggctggacatgggcgtcgacggcctgcgcctggacgcgattccctacctgatcgaacgcgacggcaccagcagcgagaacctgccggagacccaccaggtgctcaagcgcatccgcgccgagctggacgcgcactatcccgaccgcatgctgctggccgaggccaaccagtggccggaagacacccggccgtacttcggcggcgaggatggcggcgagggcgacgaatgccacatggccttccacttcccgctgatgccgcgcatgtacatggccatcgcccaggaggatcgctatccgatcaccgacatcctgcgccagaccccggacatcccggccaattgccaatgggcgatcttcctgcgcaaccacgacgagctgaccctggagatggtcaccgacgacgagcgcgactatctctggaaccactatgccgccgaccgccgcgcgcgcctcaacctgggcatccgccggcgcctggcgccgctggtggagcgtga

SEQ ID NO: 326234 - DNA, 879 bp, Pseudomonas aeruginosa
  misc_feature (224)..(233): n is a, c, g, or t
atgaaacaacgtatcctgatcgtcggtgccggattcgccggcatgtggagcgcgctgagcgcagtccgccagctcgaccgccagggccgcgacgacgtcgaggtcgcggtgctcgcgccgcagcctgagctgcgcatccgcccgcgtttctacgagcctgacgtgcagcgcatggcggcgccgctgggcgaattgttcgccgcggtcggcgtgcgtttcgtgcnnnnnnnnnngtcgaccacgatcactcgcagcgccgccatcggcgcatcgatgggcgcggacctgagcggcttgatcgccgaggcctcggcggaactgggcgtggagtggtgcctggggcgttcggtggcggcggtggatgccgagggcgtgacgctcgacgacggccagcggatcgaggcgaagaccgtggtctggaccgtgggcgtgcgggccagcacgctgaccggacagattccgggcgagcgcgatgcccagggtcgcctgcatgtcgaccgcaacctcaaggtgctcggcctcgacgatgtctacgccaccggcgacgtggcccgcgcggctaccgacgacctcggcaaccatgccctgatgacctgccagcacgccatcgccctgggtcgctcggccggcaacaacgtggccgccgacctgctcggcgtcgagccgattccctacagccaggtgaagtacgtgacctgtctcgacctcggcggctggggcgcggtgttcactgagggctgggaccgccaggtacggttcgtgcgcgaggagggcaagaagatcaagaccgagatcaatggcgtgtggatctacccgccggcggcggaccgcgccgtggcgctggcggcggccgacccactgattccggtggtggcctga

SEQ ID NO: 326235 - DNA, 915 bp, Pseudomonas aeruginosa
atgcacatccgtattctcggttcggccgccggcggcggcttcccccagtggaactgcaactgccgcaactgtcgcggggtccgcgacggcagcgtagcggcccagccacgcacgcaatcctccatcgccctgtccgacgacggtgagcgctggatcctctgcaacgcctcgcccgacatccgtgcccagatcgccgccttcccggccttgcagccggcgcgtcggccgcgcgatacggcgatcggcgcgatcgtcctgctcgacagccagatcgaccacaccaccggcctgctcagcctgcgcgaaggctgcccgcacgaagtctggtgcacgcagatggtccaccaggacctcagcgaaggcttcccgctgttccccatgctttcccactggaacggcggcctgcgccaccggccgatcgccctcgatggcgagcctttcgccattccggcctgtccgcgcctgcgcttcaccgcgatccccctgcgcagcagcgcgccgccgtattccccgcatcgcggcgacccccatccgggcgacaacatcggcctgttcgtcgaggacctcgatagcgccggtacgctgttctatgcgccgggcctcggcgaggtggacgaggcgctgctcgaatggatgcgccgcgccgactgcctgctggtggacggtacgctctggcgcgacgacgagatgctggtctgcgaggtcggcgacaagctcggccggcagatggggcacctggcgcagagcgggccgggcggcatgctcgaggtgctggcgaaggtgccggccgcgcgcaaggtgctcatccacatcaacaacaccaatcccatcctcgacaccgcttcggccgaacgcgccgaactggatgccagtggcatcgaagtggcctgggatggcatgcacatccagctgtag

SEQ ID NO: 326236 - DNA, 636 bp, Pseudomonas aeruginosa
atgccgtgccgacttggcgcagaccgggtcggtggcgtcggcatcgccggtgaggaggaacgcctggcagcggcagccgccgtggtccctctccttctcctcgcaggaacggcagggttcgggcatccaggcgtcgccgcggtaacggttgaagccgaacgattcgtaccagatgtggcgcaggctgtgctcgcgcacgttgggaaactgcaccggcaattgccgcgcgctgtgacacggcagcgcggtgccgtcgggggtgatgtcgaggaatacgctggcccagccgcccatgcaggccttcggccgttcctcgtagtagtcgggggtgacgaagatcagcttgcacgggttgccttcggcggccagccgttggcggtattcggcggtgatccgctcggcgcgctccagttgggcgcgggtcggcagcagcccggcacggttcagcgcggcccagccgtagaactggcaagtggcgagttcgacgtaatcggcttccagctcgatgcacagctggatgatccgctcgatgttgtcgatgttgtgccggtgggtgacgaagttgagcaccatcggatagccgtgcgccttcaccgcgcgggccatcgccagtttctgggcgaaggccttgcgtga

SEQ ID NO: 326237 - DNA, 825 bp, Pseudomonas aeruginosa
atggagcagatcacccatctcagcagcgggattcccggcgtacgcctgatcgacgccgagcacaaccgcttttcctttccccggcacttccacctggagtaccacatcggcttgctgctgcagggccggcatcgctatgccgccggcggcgaacggcgcctggccggggccggcgacgcgttgctgatggcgccggaaagcatccacgacggcagcagcgccggcgaggagggctaccgtatccgcgtcctggcgctcgatgccgactggctggagcgcgccagccgcgacttcagcgacggccgccggggggcgccgcgcctgaccagcagcctggtccgcgacgagcgtctgcagcagcgcctgcgtcagttgcacctgggcatgctcggcggagcggcggcgctggagaaccgtctggccctggaagagcacctctggcaggcgctggcctgcctgctcagcctgggcagcagcctgcgcctggaggagggcgaccgggaaggcttcggccagcgcgactggacgcggctgcgcgactggctggagtcgcgcctggagtacccgccgaacctggaggaactggccgccttctgcggcctgagcccctggcaggcgctgcggcgcttccgccgtcactgtggcctgccgccccaccagtggctgacccaactgcgtctggagcgcgccttgccgctggtactgcgcggcgagcagccgttgagccaggtggcccagcagttcggtttctacgaccaggcgcacttcagccgtctgttccgtcgcacctacgggttaccgccggcgcgcctgcgccagcgctga

SEQ ID NO: 326238 - DNA, 2109 bp, Pseudomonas aeruginosa
gtgatcctcaccggcgagaaacagcgcttcgaagcactgctcggcgacctcgacgccgcgctgatccgccaggccgcacgccagctcagcctggacaaactgaaggtgctcgccgactggctcggcgacgaactgctggaacagctgcaccgcgccatcgccggcaaccagagcaacctgccggccctcggccgcctgcgcgaggcgctaccgcaactggtcgcctaccagcgcttccgtggccgcgccggccagctcgaagccgccgagctggaattcctggccctgctgcgccagcgccaggaacgactcgacgcgattcccgccgaagcactcgaagccacggtgcgccgcatgctcaatcgcgaagcgcggctgggctggaagcagcgcctggaacaagacaatccggaactgctgttcagccaggacgaagccagggccagggtcgccagcctcgccgaagccgatgtgcagatgcgcgcgctgaaccgcgaactgctcggcaagggcatcgacgccgcgcgcctgggcagccgcaagcaatgggaagacgtcacccgcctgaccggcaagcgctcgcggcgcctgcgcgagttcatcgagctgggcgccgaactcggcctgatgagcctgcgcccggtctggctgatgaaccccgacctggccagccgcgtgctgccgctcaaggccgggctgttcgacatggtgatctacgacgaagcctcgcagatgccggtggagttcgccctgccgaccctctatcgcgggcgggtcacggtggtcagcggcgacgagaagcagatgccgccgaccgcgttcttctccagccgcgtggaaagcgacgaggccgaacttttcgacggcgaagcgcccgacgaggacgccgacgaggagcagcgcgaagcctacgaggacacctggaaccgccgcgagatcaaggactgcccggacctcctgcaactggcgcgcaacgccctgcccagcaccaccctgcagatccactaccgctcggcctaccgcgagctgatcggcttctccaacgcctcgttctacggcaaccgcctgagcgtgccggtacgccatccgcaggccaacatcctgcgcatcaagccgctggaactgatccaggtgaacggcctgtaccagaaccagagcaacgagcgcgaggccgagcgagtcgtcgactacctcgccgaactctggcgccaaccctacgcggcgcggccgtcggtgggcgtggtcaccttcaaccgcaagcaggccgacctcatcgaggagcgcctggaactgcgcgccgagcaggacgagacgttccgcgccgcctacagcgaggagcgcgagcgcagcgaagacggcgaggacatgggcgtgttcgtgaagaacgtggagaacgtgcagggcgacgagcgcgacgtgatcgtcttctcctccaccttcggccgcaacggccagggcagcttccggcgcaacttcggcgtgctcgggcagaccggcggcgagcgccgcctcaacgtggcggtgacccgcgcgcggcgcaaggtggtgatgatcacctcgatgccgatcggcgacatctccgacatgctcggcacccagcgctcgccgagcagcccgcgcgactacctgcaaggctacctggaatacgcccgcgcactgtccgccggcgaattcgccggcaccggccagctgctcgagcgcctgcaaaccgaccgcagcgaccagcgccgccagcactaccagcggcacgacggcttcagcgagatcgtcggcgagtatatccgctcgctgggctggtccgccgcgcccgccagcgaaggcgacgccttcggcctcgacttcgccatcgagaacccggccaccggcctttacgccatcggcatcgaatgcgacgccccctgccacccgctgctggaacgcgcccgcgcccgggaaatctggcgcccctcggtgctgcggcgggcgatcccgtacctccaccgggtttcctcccagggctggtaccacgacggcgacaacgaacgcgcacggctgcgcgccgccatcgagaaggccctggcgcccagcgcggaaacccatcccacggcagcagcggaggcctcccaatga

SEQ ID NO: 326239 - DNA, 1350 bp, Pseudomonas aeruginosa
atgagcggaccgaaagtcgtacgaatcgtcacccgggaagaagccatcgccacctgcgagcgcgacctgcaacgcctggacaaggccctcgcgcgctgggaaaaccaggccagccggctcgcccagctcagcgacgccgagcgcgccgccgcccacgcccgccgcgccagcctgcacgccctgctcgaagaggaacgctggctggatgtgcaattgcaggtgaagatcgaaagcgaattcctcaagcgcgacctcgccgaacgcgaagagcgcgccattcgccaggctgcggaaacgcgccagcgacaccgccgcctccaggaaaacgccagcgccctgctccaggccctcgacgccaggcccgatgccgccagcgcggcactccggcaaaccctgcaagcgctggccgacggcgccctccgcgacgacgcggaagccctgctcgcccaaggcttcgccgccctcgccagcgcccccgccgaggaacgcctcagcgcagcccagcacgaactcgcccagcgcctgaagaccgacgaaacgcccatcaccctggaacagtggcgcgcccgccagcaacaggacgccccgcgcgaacagcgcctggcgcgcatcgaccggcacatcgccgaactgcaactgctgcaaggcgaggccagcgcccaagcgttcctcgagcgactggcccgcgccgaagccgaacagcgcccggagcgccgcaacctgctgctcgacagcctggttctcgacctcgcccaggccgcccgcgaacaccagcagcaacgccagcgcctggaacacctgcaagacctcgccagcgaagtcgccgccctgggcgccgccgaacacgccgaactgctccagcgcgccgccgcctgccagcccgacagcgatccgcagcaactcgccgaactcaccgaacgatgcaacgccatcctcaccgcccacctccagcaacaggccgccctcgcccgccgccaggccgtgctccagggcctcgccagcctcggctacgaagtccgcgaaggcatggccaccgcctgggcgcagaccggcagggtcgtcctgcgcaaacccgccacccccggctacggcctggaagtcggcggcaaggccgtcaacggccgcctgcaactacgcgccgtcgccctcaacgccaaccgcgacagccagcgcgaccgcgacatcgaaaccctctggtgcggcgaattccaacgcctccaggccctgctcgccgcccagggcggcgaactcagcgtggaacgcgcgctgggagtgggagaagtggcgttgaaggagattggcgaggaggagcagcgggagatgggggtggcgcggcagagggggttgtga

SEQ ID NO: 326240 - DNA, 552 bp, Pseudomonas aeruginosa
atgctggaacagcagcgcctcggccccctcgtccgcgctcgccgggccggcctgccccaggccgcggcgcagcagcgccgccaggctggccgcatcgacgacgaacgccggcgccgccagcaacagcccctggagcgtctctccggcggcgtccagcagcaggccgagcgccagcaccggctggccttccccgcccaggggcgcagcggcgagacgtgcgctttcgcgcgcgaagcgcccggcccagtcgccgtctcccggcaggcgctcgaccagcagatcggccgcgcgtccatccagtacctgcaccggcaggctcatgcccggcatcgtccggtaagccacgcgcagttgcgcctcgccgtccagcgcccggcgcagccgctccagcgtcgccgcgggatcggccggggcgtgcaggcgcacgccgacaacggtattttccggccgctcggcatgacggcgccaggcgcgggtctgcaagggggacagcgggaatccttcgagcgcttcgctcgcggccggttgcacagcggattgcaggtcttctga

SEQ ID NO: 326241 - DNA, 3048 bp, Pseudomonas aeruginosa
atgctcgtcgccacataccagcgcaatcgcctcaggcgccgacgctacctgatgcgcgaaggccgccgcgacgccgccgcgcggcagcgcctcgagcggtgcctgccaatcccgcagcgcctcctggcgttccccggcgtcgagcagggcgagttcgcccagcgctgcctggggggtctcggccatccgctgcagcagatgcagcaggtgacggtccagttcggcgatgtccgctgcgtcgaaatcgcgccgcgcatagacgtactgcaggctcaggcgctcacccagggtgacacccagcgtcagggggtagttggtctgctcgtggttgcttggcgtggagaactccagatcggcgggagcctggcgcagagcctcggccacggggaagttctcgaacaccaggatgctatcgaacagagcctcgccgccatgcccggcccagcgctggatgtcgtacagaggcgtatgctcgtgttcgcgcagcgccaggttgagcgcctgcatcccctgcaggtagtccgcgacgctctgctgtggctgcggcgcggcgatcaccggcagggtattgataaacagaccgatctgcgcctcgatgcctggcagttccgccggccgtccggccacggtggcgccgaaggctaccgtctcctgcccgcagtgccgctgcaggagcagcgcccaggccgcttgcaccaaggtgttgagcgtgaccttctgaccttgggcgaaggacgccagttggcgggtcgtctgcggatccagttcgcgcagatgctcaccctggccaggctgctccgtcctcgcctggcgcgccaggcgtgtcggcatctccagggaggccagccgatcgcgccagaagaactcggttgccatcgcatcgcggccctgcaaccaaccgatgtagtcgcggtaacgcccaacggtagcggctacctcctgccccgcatagcgctgcagtacctcggcgagcagttgggcgttgctccagccatccatcaggatgtggtgataggtatagatgaggtgcatccgcccattcgccagcggcaccaacaccaagcgttgcaacggcgccctggccgggtcgaaaccggcttcgcgctcagcctctgcctgccgttgcggatcactgcctggcggggccagccgcagctccagcgtcgcctgctcgaataccacctgcaacggctgaggccagccgtccttccagaggaatccgctgcgcaggatctcatgggcatcgagggtggcctgccaggctgcgcggaagcgatccgggtccaatccgccgatatccatgcgcaactggttgacatagtcgccttccgttccatgaagactgtgaaacagcatgccctgctgcatcggcgacaacggatagatgtcccgcaccgaatcaggatccaaggacaattcatcgagctgcgtctgggaaagcccggccagcgggaagtccgacggcgtcacaccccgatgccgcgggtcgagacaatgctcgatcagcgcgtgcagctcccgcgcgtagtcatcgaccaggcgctggacggtcgcctcggcgaacatttcccggctgaagctccagtgcaggctcagctcgccgccgtagacctggccttcgatgctcaaccagttggccagcggggcgcacggatcctgggcggcaccggcgctttccgtggccggtaccagcagcgccgctccatcgaactgacggtcgaaccggcccaggtaattgaaggtgatccgcggctgcggcagcgcggccaggcgggtcgcagcctcctctccagccaggtagcgcagcaggccgtagccgacgcccttgtccggcacgccgcgcagttgctccttgatcgccttcagcgactcgccgaggtccgcggccggggtcaggcgcaccgggaacaggctggtgaaccagcccaccgtgcggctcaggtcgatggcctcgccgaggtcctcgcggccgtgcccttcgagctgcaccagcacgctggcgtcgccgctccagcggcaggtcgcgcgggccagggcggtcagcagcaggtcattgacctgggtccggtaggccgccggggcttcctgcagcaactgccgggtacgctcggcgtccagggtcaggacgagcttgcgctcatggcggttttccagggcgccatgcgggttttcgcatggcagcgcatgcggagcgtcgtgcagttgcgcctgccagtagtcgagttcgtccaggcgcgcgccggcctgttcgtgcaggtgccggctccaggtctggtaggaactgctacgcggcccgagatcggcgtcgaggtcggcatagagacgctgcaggtcttccagcaggatgcgccaggacaccccgtccaccgccaggtggtggatgaccagcagcaggcgctggctgccgtcggccatgtccaccagcagcgcacgcagcagcggcccctgttcgaggtcgaggctgcgctgggcttcttcgcaaagcgccagcaacgcctcctcggaccccgcctgccggcgccacagcggctcgccggcctgctcggcgtaggcctggtgccaggcgccgcgctcttcgcggaaacgcaggcgcagggcatcgtgctgcgcctgcaggcgttccagggcacgccccagccggtcgccgtcgagcggctggcgcgcctgcaacaagagagactggttccagtgctggcggttgggaatcgactgctcgaagaaccagcgctgtaccggcgccagcgccacctcgccgcttgccggcccctgttccgccgtcgccgcacccgccttggccgccagggccaggctgcggatgttctggtgctggaacaggtcgcgcgggctcagttgcaatccggcctggcgcgcacggctgactacctggatcgagacgatcgagtcgccgccgaggctgaagaagttgtcgtccaggccgacccgctcgacgcccagcaggtcctgccagatttccgccagggttcgctccactgcgttgcgcggtgcgctgtagcctgcctgcgccacgcttacttcaggcgccggtag

SEQ ID NO: 326242 - DNA, 180 bp, Pseudomonas aeruginosa
gtggcggaatccttcttcagtagtttgaagaaagagcgtatccgcaaacgcatctacaaaacccgagacatggcccgggcggatgtttttgactacatcgaggtcttctacacccgaacccggcggcacagtcatctgggtggcgtcagtcccgaggcctttgaaagcgcctcgctatga

SEQ ID NO: 326243 - DNA, 549 bp, Pseudomonas aeruginosa
atgaaacctcaaagatctgccctgactatcgccgcatttctcgcattgccgggtatcgcggcggctgccaataccatcaccttccacggagaagtgaccgaccagacctgttccgccgtcgtcgacggacgaaccgacccgaccgtgatactcgacaccgtaccggtaagcgctcttgacggcgcagtcggcaaacccgccggggaaaccagcttcaccctgcaactgaccggttgcgccgctccggcggccgatgccgaggagcacttcagcgtgatgttccaggcggtcaatccgaccagcgccggcaatctgaccaataccgcgtccgccggcgccaccggcgtagcgctgcagctactgacggcaccgggcggcagcgaggtcaatctggccggcgggtcggccgtggctgccggtgacatcgtgctcgcaggaggcgagaccagcaccagctacgactatgccgtccgctacatctccgaagcgaccaccgtcactccgggaccggtgctcggctcggtgacctacaccctgcgttacgagtaa

SEQ ID NO: 326244 - DNA, 747 bp, Pseudomonas aeruginosa
atgaatacttttccactgcctccgctccgtgcggctacgctggcgctcgccctgctgatacccgccatcccggctcaaagcagcgtggtgatcatcggtactcgcgtgatttatcccggcgacgcccgggaaaagaccgtgcagatgatcaatcaggacgcattccccaacgtgatccaagcctggatcgacaacgacgacccctcctccaccccggagactgcaaacgcgccctttctggtcagcccagcggtgacgcgcatagcccccggcagcggccagaccctgcgcctcctgtataccgggctcccgctgcccgaggatcgcgaatcgttgttccatctcaatgtgctgcagatcccgccccgcgacctggccaaggccgagcgcaaccagatgctgctgatgcagcgcagtcgactgaagctgttctatcgccccgccgcgctgcttggcggctcggagcagctagtcgagcagttgcacttcagcctggtgcaggcgagcggcaactggcgtgtgcgggtggacaaccccagcggctactacgcctccttcgccggcgcgatgctgagcatcggcgaacgtcgctggcggctgctgtcgagcatggtcccgcccaaaggccaggccgagtgggcggcggaacgcccttcgccgctcgccccaggaccggtccagttgaacgccctcttgatcaatgactacggcgcgcgaatggaggtccagcatgttctgccacgttga

SEQ ID NO: 326245 - DNA, 1083 bp, Pseudomonas aeruginosa
atggatccgctcgacgaactggttgaaggcatcgccgagcacgccgaattcatcgcggctggtcacggcgaggcgcttggtcaggtcgccctcgccctgggcgatgtcctgcatggcacgacccatcaggtgcagcggctgcatcagcaggcggatcagcaggccgagcaggaccaggatggcgacgatggagatcagcgcggcggcgatggccgagacgcggaacttgctgagcatggcgtaggccttgtccttgtcgatggacagcgccaggtaccaggtcaccgaaggcaggcccttgatcggggtaaaggcgaggatgcgggtatgcccgtgcaattcggcctcgctgaaaccggtggcgatcttcggcgtgttctgcgggtagacctcgctcagggtcttcatcacctgctctttgtccgggtgcaccaggatcttgccgtcgccgctgaccaggaaggcgtagcccatgccgctgaagtccagcgaattgatgatctgtaccagggtcttcaggctgaggtcgccgcccaccacgccgagggtgttgccggcggccttcaccggcgtcgccgcggtgatgatcagttcctgggtggcggcgtcgacgtagggctcggtcagggtcaggccgccggccgctacggcgtccttgtaccagggccggctgcgcggatcgtagccggccggcatcgggctgtccgggcgcatggtgaagacgccgtcctgctggccgaggtaggtgaagctgaaggtcgaggtcagggccggctgttcgagcagggcgctgacggcttccgggctgtggtcgcgggccagggtctgggcggtctgctcgaccagcaacagacggccaccgagccagttctggatgttgctggaggtcacgtcacccatttcccgcaggtagctttcgaggtcctcgcggatcgcgttgcgctgcaggtaatcgttgtagagggtgaacagtgcgaaagcggcgaacaccacgagggaggccgcgaggaggatcttgtggctgaacttcagacttttgatcatgttgtattgcgtccaggagtatgtagcgccagtctttga

SEQ ID NO: 326246 - DNA, 1491 bp, Pseudomonas aeruginosa
atgtcgcaagcgaatgagttgttgatcggcgctggccccgatggccagccggtagggcaggcctggcgcctggccaaccgtcatggattgatcgccggcgccaccggtaccggcaagacggtgaccttgcagcacctcgccgaatccttcagcgatgccggtgtcgcggtgttcgccgccgacatcaagggcgacctgtgcggcatcgccgcgccgggcaacccgcagggcaaggtcgccgaacgcatcgccagcatgccgtggctgaactaccagccgaaggcctacccgaccacgctctgggacatcgccgggaagaccggccacccgttgcgcaccaccatcagcgagatgggcccgctgctgctggccaacctcctggagttgaccgatagccagcaggccgcgctgttcgccgccttccaggtggccgaccgggaaggcctgctgctgctcgacctgaaggacctgaaggcgctgctcaaccacctgaaggacaatccggagatcctcggcgaggaccgggcgctgttcaccggcgcttccgggcaggcgctgctgcgccgcctggccactctggagcagcagggcgccgaggccttcttcggcgagcctgccctgcaactggaagacatcctccgccccgagccggacgggcgggggcgcatccacctgctcgacgccagccgcctggtgcacgaggcgccgaaggtctacgcgactttcctgctctggctgctggccgagctgttcgagcaactgccggagcgcggcgatgccgacaagccggtgctggcactgttcttcgacgaggcccacctgctgttcaacggcacgccgaaagccttgcgcgaccgcctggaacaggtggtccggctgatccgctcgaaaggcgtcggggtgtacttcgtcacccagtcgccgggcgacctgccggacgatgtcctggcccagctcggcctgcgtatccagcatggcctgcgcgccttcaccgccaaggaacagaaatcgctgcgcgcggtggccgacggtttccgcccgaacccggcgttcgacaccctgggggtgctgaccgaactgggtatcggcgaggcgctggtcggcaccctggaggaaaagggcacgccggccatggtccagcgcgtcgcggtggcgccgccctattcgcggatcggcccgctgagcgacagcgaacgcgccgaactggtccagcggtcgccgttgaaggggcgctacgaccagccgatcgatcgcgagtcggcctacgaggtgctggcgagcaaggcggacgccaagcccgaggtgcagggccaggcgcctgcacagcaggaaagcgcgtccggcgtcggcggcatggccgggcagattctcggcagcctgctgtccaattcgacggtgaagagcgccatgcgccaggcggccaaccagttgagccgggagctggtgcgtggcctgctcggctcgttgatgggcgggaagaagcggcgctga

SEQ ID NO: 326247 - DNA, 1398 bp, Pseudomonas aeruginosa
atggtggagcgcgtcatccagggccggggcttcgtgaccatccccgaaaccctcaacgccgtcgatgcgtggttgtcgtccatccccggcaacgcttacgccaacgtgcgtcagccgatcgtttccacgctgaacctggcgcacatgatgccgctgtctgcggtgtgggccgggccggagaagaacgaccacctcgacggcccgccgctgatcgtcacccgcaccgatggcgcgacaccgttccggctggtgacgcacatcggcgacgtggggcatacgctggtcgccggccccacgggcatgggcaagtcggtactgctggcgacactagccttgcagttccgccgctacgtcggctcgcggatcttcgccttcgacatgggccgctcgatgcgcgccaccatcctcggcctgggcggcgagcactacgaccttggggctgatggcggcatcgccttccagccgctcgcccgcatcgacggcgagggctaccgatcctgggccgccgaatgggtggaaggtcgcctgctgcatgaaggcatgaccgtcggcccggacgagaaggcggccatctggtcggcgctcggcagcctcgcgggtgcgccgccggaacagcgcacgatgaccgggttctccgtgctgctgcaatcgaacgcgctgcgtcaggcgctttcgccctacgtgctcggcggtgcccacggcaagctgctggacgccgatcacgaccggctgggcatggccgacgtgcagggcttcgagatggaagaactgatgcacagccccgccgccgtgcaagcggtgctgcgctatctgttcgcccgcttcgacgagcgtttcgacggtgcgcccacactgctgattctggatgaagcgtggctgttcctcgatgaaccgtccttcgcggcgcgcatccggcaatggctcaagacgctcaggaaaaagaacgtcagcgtcatcttcgccacgcagtcgctggccgatatcaaggattcgaccatcgcgccagccatcatcgagagctgcgccagtcggattttcttgcctaacccgcaggccaccgaaccgcagattcgcacgatctacgagggcttcggcctcaacagccggcaaatcgaaatcgtcgccaccgcgcagcccaagcgcgactactactaccaatcccgtctcggcaatcgcctgttcgacctcgacctggggccagccgcgctcgcgttcgcgggcgcatccacaccgcaagaccaacgcgacatcgaccgcgtgctgacgcaggccggcgcacccggcttcgccggcgcgtggctgcgccatcgcggccttgattgggccgccgacctgctgccgtccgcaccggcggccgcttcgttcctcaacgtccaaccgctggaggtttcaccatga

SEQ ID NO: 326248 - DNA, 744 bp, Pseudomonas aeruginosa
atgaagaccaagccccgtttgctgtccgcctcgctcgctgccgcgctgtctgtctcgctgatgctcgcccagcccgcggcggccatcaccgtgttcgatccgtcgaacttcgtgcagaacacgctgacggccgtgcgcaccctggaacagatcaacaaccagatcaaccagctccagaacgaagcacagatgctgatgaaccaggcgcgcaatctggcgaatctggacttcaacatcgtcaaccggctgcgctcgacgctcgccaccaccgaacgcctgatcgccgaggcgcagggtctggcctacgacgtgacgagcatggatcgggagttcgcgcgcctgtatcccgagcagtacgccgccaccgtcagcggcgatcgcatggcacaggacgcccgcgaacgctggcagaacagcttgaacggcctgcgcaccgccatgcggatgcaggcccaggtgtcgcagaacctgacccaagacgaaagcgcgctggccgatctggtcagccagagccagtccgccaccggcgcgctgcaagcgatgcaggcgacgaaccaactccttgccttgcaggccaagcagtccatccaggcgcagcagctccagatcacgcaagaccgtgcggcctcgctggaactggcgcggcaggcggcggccaccgagcgcgcccgcgaagtgcggcggcgcttccttggcaccggcacgccttacacgccgcagcgcgtggacttctacggcaactga

SEQ ID NO: 326249 - DNA, 327 bp, Pseudomonas aeruginosa
atgcgatgcgtcctcgccctgtcgtcttcgctgctggccctgctgctgaccgcgtgcggccagcagcaggccgaagacttggccgatgccttggccgccgatcccgtgcggctcaaggcattgcgcgcgcagtgcgcggccggacggcaggctacgagcgaggacgcttgccgcgccgccgccgaagccttcaggcgacgctttttttccggcaaggccgggccggatgaataccaaacgttggcggacctgccaccgatcccgcctagcttcgacgaaccggacgttacgccgtcatcgccgggagaaccggaggccacgccatga

SEQ ID NO: 326250 - DNA, 384 bp, Pseudomonas aeruginosa
ttgcccaagaccttttcggcgaggaacgcggtcttgttccagagcgcgaatggcaccagcacgaatccggcgagcgtggtcagcttgaactcgatcagcgtgatgaacagttggatcgccagcacgaagaagcacaagaccacgaccagccacgcgaggaacatcaccacgatggggtcgaggttcacgaacacttcgggaaagcccgtcatctcgccgatctgctccagaatctgcgccccagcgtcgatgccggttttcgccagccggcccggctgcaagaagttctccatcgtgatggccgagccggtggcggtgatgcccaatcccgcaaacgagcggaacacgatgctggccagccagttgaagttgttgatgatgtag

SEQ ID NO: 326251 - DNA, 525 bp, Pseudomonas aeruginosa
atgccgtggcgaatcgcagcagaagtcgaccagcgccgtcagctcagccacatagtcatcggccaggcgacgcacctggtcctcgccgaacatctgcgagctgaagctccagtcgatgctcagttcaccgtcgaacacccggccattgagactcagccagttgtccagcggagcgccggggtccatctctgcccccgcgctttcgccagccggatccagcagagccatctcgtcgaactgagcgtcgaactggcccaggtaattgaaagtgatccgcgcctgcggcaaccccgccaggacccgggcactttcctctccagccagatagcgcagcaagccataacccaggcccttgtcgggaatcgcacgcaactgttccttgatcgccttcagggactcgccaagatccgcgaccgggctcaggcgcaccgggaacaaactggtgaaccaaccgacggtgcgactcaggtcgatatcggcgaacagctcctcgcgcccatgtccttccagctgtaccaggcttga

SEQ ID NO: 326252 - DNA, 312 bp, Pseudomonas aeruginosa
atggtggatcaccaacaacagacgctggccgccgtcggccatatccaccaacaggctccgcaacagtgggccgtcggtcaggtccaggctgcgctgcgactcctcgcagagcgactccagcgcttgtcggtccaccgcctcggcacgccagagcagcgcaccgcccagcgttgcttcggcatgttcggcatgccaggttccgtccgtttcatggaagcgcagacgcaatgcgtcgtgatgttcgaccagggcctgcaaggccgcttcgagtgccttcgcattcagggcctcgcgcggcttcaacagcaatga

SEQ ID NO: 326253 - DNA, 270 bp, Pseudomonas aeruginosa
atgtgcgggtgcctgccggcgcttcgtcgaggcctgccggccattgttgccggcctgaggctggccatttctgccgtcgtggtcttgagtctgaatgtgctgggcaagctgatttccttgcctgccccggcttctcgtttcgccttcccaggcgagccccttttgcaagcgtctgtacggaccggagacatagcggacaggtgtgcggagttgccggagaaagaccacgacgccatgagcctgagagatgagttcatttcgaagtcctga

SEQ ID NO: 326254 - DNA, 936 bp, Pseudomonas aeruginosa
atggaactggagatcgaggtgctggaggccgccgccacctggtacgtgcgcttcggcgcggaaccgccgaacgatggcgagcgccaggcctggcgcgaatggctggaggccgacccgcgacaccgtcgggcctgggagcgtatcgagcgcttgcagggccaatgggcggcgctgccggcggagacctccttgcacacgctggcaggcgtgcgtgcgcggcgccgagcgctgctcaagacgctcgccctgctggcctgcgccgcgggtagcggctggctggcgagcggcggcctgccttaccgtgcgctcctcgccggggagcgcacgggcgtcggcgaacgccgccaactgcgcctggcggacggtacccgggtcgacctgagcagcgccaccgcgctggacctggcctacgacgaaagcctgcgccaggcgtacctgtggcggggcgagatcctcgtggaaagcgcgcagagcgctcgcccgttcctcgtgcacaccgcacaaggcagcgtgcgcgcgctgggaacccgtttcagcgtgcgttgcgaggggccgcgcacgcgcgtttgcgtcctcagccatgcagtggagctacgcccgttgcaaacgccgacccggccgatgcgcctgccagccggccagcaggctctcttcgacgagcgacgcggctactcgtcgacgcccttgcgcgaaggcgaaggcagttggacgcagggcgtgctgacggtggtggactggccgctgggcgagttcatcgccgagctgtcccgctatcgcaccggggtgttgcgctgcgccgccgaggtggcggagctgcgcctttccggcgcctaccgcctggaccggatcgacgcggtcctgcagaacctgggcaagtcgctgccggtgcgcgtgcgctacctgacgcgttactgggtcaccgtcgagtcggtctga

SEQ ID NO: 326255 - DNA, 375 bp, Pseudomonas aeruginosa
gtgcgcgtgttcgcctcgcgtagcgccgaggccctccgcgaaccgcgctgctatctgagcgcgagcgtccgggcgctgatgagcgacagcttccgccgctgcgccaccgagcaggcctatctggacagcctggccgcgcggccggagccgctggacattccagcgcaaacgcgactgtcgatcctggagaccctgactgccatcgacctcgccctcgacggcatgggcgagcgtacccgccaggtgttcctcgcggtacagctcgaagggcttacctacaggtcggccggcgagcgcctgggcgtctcgatgaccaccgtggagaaccacatggttcgcgccatgacccgctgcctgttgctctgcaaggactga

SEQ ID NO: 326256 - DNA, 210 bp, Pseudomonas aeruginosa
atggcccgtgcggtgatccgccagcgggtcagcgagtcgggcatgcggaagctgaagctggccttgccctgggcgtcggtgaccagctccggctgccaggcggcggtgtcgacgtcctcgcggcgcggccgctccagtaccttgacgccgcgctcgctgcggttcgcccgtccgggtgcgctggtgctgccgggcaacgccacgtcgtag

SEQ ID NO: 326257 - DNA, 603 bp, Pseudomonas aeruginosa
gtggatccgcctggaggaccgcgccaccgacagcggtccggtcgccgacggccgcttcgcgctggccttcgagcgtcccggtacctattccgtggagctgcgcgacgacaagggccagctccttggcgccaccggccactcggtgagcggcgagggcgtgaagtcggtgcctggcaccgtcgaggtggtgttcgacaagcccgagtaccgcaccggcgaggaagcctccgcactgatcaccttccccgagccggtggaggatgcgctgttgtccctggagcgcgacaaggtcgaggccaccgccctgctgtcaaagggcgccgactggctgcgcctggaaaagctcaatccgacccagtaccgcgtgcggatcccggtgcgcgaggagttctcgccgaacctgaccttctcggtgctctacaccaagggcggcgactacagcttccagaacgccgggatcaaggtcggcatgccccaggtggagatcgacatcgccaccgacaaggagcgctacgaacccggcgagacggtgaccgtgaccctggccacgcgcttcgccggcaaaccggcttccagtcacctgaccgtcagcgtggtggatga

SEQ ID NO: 326258 - DNA, 1029 bp, Pseudomonas aeruginosa
gtgcggcagggtcaccacgttgtccagggcgaacagcggcgattcggccagcggttccttctcgtagacatccaggccggcgccgaggatgcgtttctcccgcagggcggcgaccagcgcggcctcgtcgaccacctggccgcgggcgacgttgaccaggatcgccgagggcttcatcaggcccagttcgcgcgcgccgatcaaccgccgggtctgcgctcccagcggcaccaccacgcagacgaagtcggcctcgccgagcagttcgtcgaagccgaggaagcgcgcgccgagttcctgttccagttccggcttgcggttgttgccgtggtagagcacctgcatgccgaagccgaaacggccgcgccgggcgatggccgcgccgatccggccgaggccgaggatgccgagtttcttgccatgcacatcggtgccgaactgcggggcatcgacggtgcgcttccagttcccggccttgacccaggcgtccagttcggcgacccgtcgcgcggcgctgatcagcagggcgaagccgaggtcggcggtggtctcggtgaggacgtcgggcgtgttggtgagggcgatgccgcggcggttcaggtagtccaggtcatagttgtcgtagccgaccgagacgctggagatgacttccagctgcttcgcctgttccagttgcctggcgccgagcggccggccgacgccgatcatgccgtgggtatcgggcagggcggcggcgtactgggcgtcgatgtcgccctgtttcggttcgagcacgcggacgttgaactggcgttgcaggcgttcgagatgctcgggggcgaggcgactgaagacgaagacgttctttttcatgacgggactctgcaagcgggagcgaaagcgccgaccataccaccgccatcgaagcggcgggcaggggcccgccactgggcgggcgattatcggctcaggagggtcttccgagttccaggcccagctccaccagcgccgcttcgtcgcgctggagcaggccgggcaggctttccttga

SEQ ID NO: 326259 - DNA, 954 bp, Pseudomonas aeruginosa
atggacaccctgcaaaacatgcgagccttcgtctgcgtggcggaaaccggaagcttcaccgcggcgtcccagcagctcaacaccaccaccgcctatgtttcgcgggcggtggccaacctcgagacgcacctgcgcacccgcctgctcaaccgtaccactcgtcgcatcgccctcaccgaggccggccagcgctacctgctgcgctgcgagcagatcctcgcctacgtcgaggaagccgaggccgaagccagcgacgcccatgcccgccccgccggcaagctgaagctgcattcgatgaccggcatcggccagcactacgtgatccgcgccatcgccggctaccgccagcagtaccgcgacgtgaccttcgacctgaccatggccaaccgcgtgccggacctgctcgacgagggcttcgacgtggccatcgtggtggcctccgagctgcccgattccggcttcatttcccagcgcatcggcgagacctacagcattctttgcgcctcgccggagtacctgcgcctgaacggcacgccgagcgagccttcggagctggccagccacgactgcctgcgtctggtcagcccggtggtgccgctggatcgctggctgttcgacggtcccaacggccaggaaatggtctccatcggcgcctcgccgttccaggtcaatgtcggcgacgccatgaccgaggcaatccgctccgggctgggcatcggcatcctgccggtgtattcggccatcgaggacctgggcaagggcaccctggtgcgggtactgccgcaacaccgcctgcaacagctcaacgtctatgcgctgtacccttcgcggcagtatctcgacgcgaagatcaagacctgggtggaatacctcaaggaaagcctgcccggcctgctccagcgcgacgaagcggcgctggtggagctgggcctggaactcggaagaccctcctga

SEQ ID NO: 326260 - DNA, 702 bp, Pseudomonas aeruginosa
atgcgtgccgatgccgccgcgcaggcgacgctgggccagggcgaggatgtcgcgctgctgttgcagcatggccttggcgatgtccatctcggcgtactgcaacgagagctggacgtaggcgcgcacgatgttgccctccagctcgagctgcgcctggcgcgcctcggcggcggccatgtgggccaggtcgacggcgcgctcgctgtcgctgcggtcgcgcccccagagatcgagcttgtagttcagggcgatctcggtggagttgttccaggaagtggtccgcgccaggtcgccggggccgtagaaatagtcgtccggccagcggtggcggaccagcgagcccttgccctcgatctgcggcgactcgatggactccaccagcccggccatggacttcgcctggcgtacccgcgcatgggctaccgccaggcctggattgccgtccagcgccttctcgatccaggcgtccaactgcggatcggcatacaccttccaccactgcgcctgcggccagccggcctcgcgggcggcagcctggatcgcatggtcggtggccagggcgttggcgtcgagcgtggcggcctggggggcgatatcgcctgtactgacacaaccggatattgcggagaaaacgacgagaaaaccgacgaaggagccgaccaaggtcagttccttcctgagagcacgcggcacgttgtctga

SEQ ID NO: 326261 - DNA, 180 bp, Pseudomonas aeruginosa
atgaaaatcgtgattgctcctgattcgttcaaggaaagtctgtcagcgcccgacgtcgccgaggctatcgcccgcggttggcggcgagtcttcccgcaggccgaggtgttgctgcggccactggcggacggcggcgaaggcacggtcgatgcggtactcgccgccaaccgcgggcgatag

SEQ ID NO: 326262 - DNA, 1443 bp, Pseudomonas aeruginosa
ttgcgccccgccggcctgccgccggctgcgatcgatgcgctccaggcggccgctgctgagcaacttgccgaccgaatgcaggaggtcctcgacgtccaggatcagcaccggcgaaccgtcgtccagcaaggcgccggcggaaacgtcgcgcaccttgcccaggcgcggatcgagaggcatcaccaccagggtacgctcgccgacgaaacgctccacggcgacgccgtagaccgcatcgcggtcgcgcactaccactaccgggatagccccttcggtgcggctgctctcgggccgctgcagcagttgcgcagccgagaccaggccgacatggcgaccctcgtaccagaagtgctggcgcccttcgagctggatgatctcctccgcctccagctcgcacatgcgctcgatgtgcgccagcggaaaggcgtaggcctcctcgccgatctccaccaccaggctgcgcaccacggacagggtcagcggcacctcgacgtggaacagcgtgccctgcccctggcgttgctccatgcgcacgccgccacgcaactggcggaccatgtgctgcacggcgtccagtccgacgccgcgaccggacacctcggtgacctgctcgcgcatgctgaagccgggcaggaagagaaacgccaggagttcctcctcgctcaattgcgccgcggtctcggcggtggcgaactggcgattgagcacggtctcgcgcaggcgctgcagatcgatgccgccgccgtcgtcgctcagttccaggaccagcatgccggcgtggtggcgggcgcggatggtgatcctgccctcggccggcttgccggcggcgaggcgggtttccggcgcctcgataccgtgatcgacggcattgcgcagcaggtgggtgagcggcgcttcgagtttttccaggacatcccggtcgacctgggtgctttcgccctcgaccagcaggcgcacctgcttgcccagcgagcggcccaggtcgcgaaccatccgcgcctggccgctaaggacgtcggcgaacggtcgcatccgcgaggccagcgccgcgtcgtagagcacctgggcgcgctggccgccctgccaggcgaactcgtcgagatcggcgatgtgctgcaccagcatctgctggcattcgccgatcagttgccgcgcctcgccgagcatggcctgggcctgcgggtcgagggcggtttcctggaccgtctcgcgtaccacgtcgagcgcgcggctggcgctggactgcaggcgacgcaggcgttgcagggaatcggccagcggcttgatgcgctggaactccaccagcgacttgctggagatatccagcagccggtccaggcgctcggcggtgacccgcaggacccggctgcggcgctcctcggcctgttcgccgcccgcctgcccggcgggctcctcgtcgttgtcgtcgctggcggccgctga

SEQ ID NO: 326263 - DNA, 690 bp, Pseudomonas aeruginosa
atggttgaggcgagcctgaccttgctcgatacccaacaggtggatgactgctggaaccgcatcggcgtgcatggcgacaagtcctgcgaacgcctggccgagcatgtccattgccgcaactgcgaggtttacgctgccgcggcgacctacttgctggaccgcatcgccctgcgccaggaccagctcgacagcgccgaaacgatggacagccagcgcgaacagagcgacctcggcgagacgcgttcgatcctggtgttccgcctgggcgaagagtggttcggcctggccaccggcagcctggtggaagtggcgccgatgaatcctatccattccctgccgcaccagcgctcgcgcgccctgcaaggggtgaccaacgtgcgcggcgcgctggtcgcctgcctttccctcggcgaactgctggatctcgaacccggcgccgcgccggtcagcgagcgccgggtggttccgcgcatgctgatcatttccgccgccggcggtccggtggtggcgccggtggaggaagtcgacggcatccatgcgattccgctggcgcggatactgccgcccaaccacgccgacggccaggcctcgcgccggcacgtggccggcgtgctgcaatggcgtgagcggagcatcaccctgctcgacgaaggccctctcctgcaagccgtagcgcggagcctggcatga

SEQ ID NO: 326264 - DNA, 282 bp, Pseudomonas aeruginosa
gtgcgcgcgctggatctcgaccagccgttgcgcgccctgcaacgccgccatgcgcaggacgatgcgcatcgccaggcgcgcggcttcgccgtgttcgccggcgagcagggcctggtcgaaggcgtccagtcgcgggccggcatcggtcgccagcgcttcggcgggccgggcctccagcggcggcggggcatcgcggtggagttccaggcgaccgtcggccaggcgcgcccagggataggcggcgagttcgtcgaagcgctcgccgagacaggcgatgggtag

SEQ ID NO: 326265 - DNA, 2067 bp, Pseudomonas aeruginosa
atggccgccagcggcctcgaactcgacgaggacgcgctggacgcgctgctcgagcgcagcgaaggctgggtcgccgggctgcgcctctggctgctggcgcgcggcgatccagaggagcaggtcagtcccggggtacacggcgccgacgagctgatccgcgactacctgctggaggaggtgatcgagcggcagccgcccgaggtccaggcgttcctcgcccagaccgcgcgcttcgagcgcttctgcgccgaactctgcgataccgtgcgcgaggccggcgacagcgcggcgatcctcgaccacctgcagcagcaccaggtcttcctcgtgccgctggacgaaaacggccagtggttccgctaccaccacctgttctccgacctgctgctggcgcgtcccttgcccgacttcggtccgtccgccggctccctgcacctgcgcgcctgcggctggttcagccgccatggcctgctcgaccaggcggtggagcaggcgctgcgcgccggccagccggacgtggcggcgagcctggtgcagaacctgtcggaagagcaactgctggcggagcagaacatcgccaccctgctgcgctggaagatggacctgccggacagcctcctggcgagcacgccgcgcctgatcctgctgtacggctgggcgctggcgctggcctgccagctggatgccgcggaagagctggctggccaactggcgcgtttcctgccggcgccggacgagtctgcgcagcgcgacctgctggcccagtggcaggccctgagcggggtgatcgcgcgcggccgcggcgacatcgacaaggccgaggcgcactgccgcgaggccttgcaggacctcgccggggagcgctatggcacccgcctgcaatgcctgtcgacgctgagcaacctggcggtgacccgtggcgacttctggcaggcgcgcaactacaaccgcgacgccctggagttcgcccagcgctacggcaacccgctgttcgaggcactggtccattacgaccgcgcccgcgtcctccaggcgcgcggcgaggtggcgcgcgctgaggaggaggtgcgccagggcctggaacgcctccagcacctgccggcgcaacgccgctacgcggtgcgcgggcggctcctgctgtaccgcggctacctgcgcagcctggcgctgcagccggacgaagcgcgcaagtggatcaagcagggaatcgaggaaacccgcagttgccgggatgtcagcctggtgatcggctattgcgtcctggccagcctggaagggcgcctgggcaactacgcggcggcgttcgcccggcttggcgacgtcgagcggctgatgcatgcctgggatatcccgccgatctactacctggcggcgatcaccctgatcaagtgcgaactctggctggcccagggccagaccgaactggccggcgtctggctacagcgcctgggcggcacctacggcgggcaggcggccacgccgccggaatgcagtccgctgctgccgctgcatgtggagttgctccaggccggcctggagcgccgcgaaggacgcccggaggaggccgcccggcgtctggatcggctggcccgctcgacgcgggagaacggcgcattgctgccggctcgcctggccctcggccaactggccgcgctgcacctggagcagggccgcgagcgcgaggcgctggcgaccctgcaacaagccatggagggcgcagtcggcggagccttgctgccgctccacgaattgctcgtgcagcagccggaatggttgcgcgaacagttgcagcgcttccctgcctgtcccggcgcccagcgcatgcgcgcgctgttgccggagccgcccgccgagcccgcgggcagtgcgggcgaggtgctcagcgggcgcgaactggcggtgctggagctgatcgcccaggggttgtccaaccaggagatcagcgagcggctgttcatctcgctgcatacggtgaagagccacgcccgccatatcaacgacaagctcggcgtcgagcgccgcacccaggcggtggcgcgggccaagcacatggggttgttgcgctag

SEQ ID NO: 326266 - DNA, 1884 bp, Pseudomonas aeruginosa
gtgccggacggcctcaaggacaagcgcctgctggccctggacatgggggcgctgatcgccggtgccaagttccgcggcgagttcgaggaacgcctgaaggcggtcctcaacgaactgggcaagcaggaaggccgggtcatcctgttcatcgacgaactgcacaccatggtcggcgccggcaaggcggaaggtgccatggacgccggcaacatgctcaagccggctctggcgcgcggcgagctgcactgcgtcggtgctactaccctcgacgagtatcgccagtacatcgagaaggatgccgcgctggagcgccgcttccagaaggtgctggtggacgaaccgagcgaggaagacaccatcgccatcctccgtggcctcaaggaacgctatgaagtgcaccacggggtgagcatcaccgacggcgcgatcatcgccgcggccaagctgtcgcaccgctacatcaccgatcggcaactgccggacaaggccatcgacctgatcgacgaggccgccagccgcatccgcatggagatcgactccaagccggaggaactggatcgtctcgaccgtcgcctgatccagctgaagatcgagcgcgaggcgctgaagaaggaagacgacgaagccaccaggaagcgcctggccaagctggaggaggatatcgtcaagctcgagcgcgaatacgccgacctcgaggagatctggaagtccgagaaggccgaggtgcagggctcggcgcagatccagcagaagatcgagcaggccaagcaggagatggaggcggcgcggcgcaagggcgacctcgagagcatggcgcgcatccagtaccagaccatcccggacctggaacgcagcctgcagatggtcgaccagcacggcaagaccgagaaccagttgctgcgcaacaaggtgaccgacgaggaaatcgccgaagtggtttccaagtggaccggtatcccggtgtcgaagatgctcgagggcgagcgcgagaagctgctgcgcatggagcaggagctgcatcggcgagtgatcggccaggacgaggcggtagtcgccgtgtccaacgccgtgcgccgttcgcgcgccggcctcgccgatccgaaccggccgagcggctcgttcctcttcctcggcccgaccggggtgggcaagaccgagttgtgcaaggcgctggccgagttcctcttcgataccgaggaggcgctggtgcggatagatatgtccgagttcatggagaaacactcggtggcccgcctgatcggcgcgcctccgggctacgtcggcttcgaggaaggcggctacctgaccgaggcgatccgccgcaagccctactcggtggtgctgctggacgaggtggagaaggcccatccggatgtattcaacattctcctccaggtgctcgaggacggacgcctgaccgacagtcacgggcgtacggtggacttccgcaacaccgtggtggtgatgacctccaacctcggttcggcgcagatccaggagctggccggcgaccgcgaggcgcaacgtgccgcagtgatggacgcggtcaatgcgcacttccgtccggaattcatcaaccggatcgacgaagtggtggtgttcgagccgctggctcgcgagcagatcgccggcatcgccgagatccagctcggtcgcctgcgcaagcgcctggccgagcgcgagctgagcctggaactgagccaggaggcgctggacaagctgattgccgtcggcttcgacccggtctatggcgcacgcccgctgaagcgggccatccagcgctggatcgagaacccgctggcgcaactgatcctggccggcaaattcgcgccgggtgccagtatctcggcgaaggtggaaggcgacgagatcgtcttcgcctga

SEQ ID NO: 326267 - DNA, 1047 bp, Pseudomonas aeruginosa
atgagcgccgttccgcagttcccgcccgagcctcgttcgtcagccacaacctcactggatcgccgtatccagatgctgcgtaccgcaatggggccggtgatcgccgcagcgctcgaagacccggacgtggtggaagtcatgctcaaccccgaccgcacactatgggtcgatcggttgtcgtcgggccgcgcgccgttgggcgtggagatgcccgaagccgatggcgaacgcatcatccgcctggtcgctgcacacgtcggcgcggaagtgcatcgcggccagccgctgctgaccgccgaattgccggagacaggcgaacgcttcgagggcatcttgccgccggccgcgcccggccccgcgttcgcgctgcgcaagcgcgccgtgagcatcatcgggctggatcgctatgtggccgacggcatcctgaccgccgggcaggccgagttcctgcgccgcgccgtgcgcgagcggcagaacgtcctgatcgccggcggcaccagcaccggcaagactacgttggcgaacgcgctgctggccgagatcgccgccaccggcgatcgcgtgctggtgctcgaagacaccatcgagctgcaatgcgcggcccgcgaccatgtaccgctgcgcacccgcgccggcgtggtgtccatgaccgagctggtgcgcgccacgatgcgcctgcgcccggatcgcgtgatcgtcggcgaagtgcgcggcggcgaagccctcgacctcatcaaagtatggggcacggggcatccgggcggcatcgccacgatccacgccggctccgcgctgggcgcgctgctgcgcctcgaacagttgattctcgaagtggcggtgaatccgccgcgggcgctgatcgccgaagcggtcaacgtcgtcatccacatcgccggtcgtggccgcaagcgccacgtcgaaagcattgcccgcgtcctcggcttcgacgccgctggctaccgcctggcggacgcgatggaaacgccgtttcccgcgctgtcgccgccttcctccccgtcccctgaccaccctggagaactgccatga

SEQ ID NO: 326268 - DNA, 282 bp, Pseudomonas aeruginosa
atgcgaccagctcccttgcggcctgccgccactgtctcgaccgctgccgcgcagccgcagcgttacctcaccaacgacgaagccgccgagtacctgcgcctgtcgccgcgcacgctggagaagcagcgcgtgatcggcggcgggccacgctttcgcaagttcggccggcgcgtcatgtacgccgtggccgacctcgacgcctgggcggccgaccgcagcttcgagacgacttccgatcccgagtacgccgagcaccactcggcggacagccgtgcgcgctga

SEQ ID NO: 326269 - DNA, 771 bp, Pseudomonas aeruginosa
atgactgatcgcagcgccgaccactggtatccgacagccgcctatctctacgtcctgcacctcaacggccccgcgctggcttgggaatacctgcgcaggaatcccgattaccgccgcgactggctgcgccgtcgccgctggccggacgcggcgcaggcttggagcctgcgcctgctggaagacccagccttggatgcgcgcgacgcgcatccggcctggttccctgaccacgatgccgtggtgcagctctatcccgacgccgacccgccacccgaagcccatgccttcgagttctggcgcgttcccggccgcaagcaactgatccacgacggcaagcgcctggtgctggtgtcgcattggcccggctgctgcctgcggctcgcgctcgcgcagggcctggaagacggcgtggcctacctctacgccactcgtgcctgcgccacgccctgcgcgcgctatcgcacgctcgcggctgaactcgacgccctggctgccgccacggttgccgcgcctgcggcggcggcccgttcgcggcccacgcctgccgcactgctggagctgcacaccttgcaggcgctcgacgcgaccctggcgggcgcgtccttgcgcgaagtggccgaagggctgttcggcgtggaggccgtcgcggccaactggcacaaggacggtgccttgcgcgcccgcgtgcgccggctggtgcgccgtggcgatgcgctgatgtgcggcggctatcgccgccttgcacagcttccgccactgccgttgcagtag

SEQ ID NO: 326270 - DNA, 240 bp, Pseudomonas aeruginosa
atgaacgcgcacgccacctggctgctggccgcgctcgaccccgccgatggcgatacggcctatggcctgatcgacctcggcatcggcatgccctcgctggggacggtcaggctgtccgacctggccggcatcgtcgggccgcgcaagttgccggtgcggcgggatcggtatttccaggcggtgcgcccgctgtcggagtacgtccggctggcgcaggagaatgacgcgatcacggactga

SEQ ID NO: 326271 - DNA, 297 bp, Pseudomonas aeruginosa
atgcagaagcgatccgtccaacctggccgcccggccggtgccaccaccttcgatgccgaactggcgcaagccttcggcgcggcggtgcgcgcgctacggacggaacgagggatcgcgcaggaatcgctggcacacctggccggcatcgagcgttcgcacatgggcaaggtcgagcgcggcgaacacatgcccacgctggcacttatcttcaagatcgccggcgcgctcgaatgcagcacggcggtattgatgagcgaggctgaaagccagctcgcagcagcagcggcccagccgtag

SEQ ID NO: 326272 - DNA, 621 bp, Pseudomonas aeruginosa
atgcgcgcgcttgatgccggaattctggtgtgcggcgagtgccaccagttgaatcgcgccgacggggacgagcatccgcgttgcagccgctgcggtgcggtgctgcacgcccggcgcccaaacagcctcacgcgcacctgggcgttgctgatcaccgcggcgatcctctacatacccgccaacctgctgccgatcatgacggtcaacctcttcggcagcggaatgcccgccaccatcatggagggcgtggtcgaactggtgcatgccgacatgttccccatcgccatggtggtgttcgtcgccagtatcctggttcctactttcaaactggtgggcatcgccctgctgctctattcggtgcagcggcaccagccgatgtcggcccgccagcgtatcctgatgtatcgcttcatcgaatggatcgggcgctggtcgatgctcgatatcttcgtcatcgccatcctcgtggcgctggtgaatttcggcaacctggcgagcatcgaggccaacctcggcgccgccgccttcgccagcgtggtggtgctcaccatgctcgccgccgtgacgttcgacccccggctgatctgggacaacaccaatctggatgacgagaatgagtga

SEQ ID NO: 326273 - DNA, 657 bp, Pseudomonas aeruginosa
atgtccgataccgatgtccgtggcctgcaggatcttcccctggaagaactggttgcttgccatgagtgtgatctgttgatgcgccgggaacccctgggaccgggcgagaaagccaattgtccgcgctgcggtttcgagttggccgcgcatcgccatcaatggaaacgccgttgcttcgcgctggttctgacggcgctcttcctctatatcccagccaatttcctgccgatcatgaatctcagcctgctcggccagacccgcagcgatacggtctggacgggagtgctcggtctttacgacagtggcatgcagggcgtcgccatcctggtattcctgtgcagcatggtgatcccgttggtcaagttgctctgccagttgctggtgatgatcagcgtgcgtttcggtatcgcccgtcacatcggcatgctgctctatcgcggctatcaccatctgcgcgagtgggggatgctcgaggtctacctcatgggcatcctggtttccatcgtcaagctgatcgacatggccgacctcagcctgggcgtcggcctggcctgtttcgtggcgctgctgttcacccaggtctggctggaggtcaccatgtcgccgcaccaggtatgggaagcgctgggcggcgaggacgacgatgcgcgcgcttga

SEQ ID NO: 326274 - DNA, 1497 bp, Pseudomonas aeruginosa
atgtccaatgacaacgaagtacctggttccatggttattgtcgcacaaggtccagacgatcaatacgcatacgaggttccccctatcgatagcgcggccgttgccgggaatatgtttggcgacttgattcaaagagacatatatctacagaaaaacatttattatccagtccgatccattgttgaacaaggaacaaaagaaaagaaggagatcaacaagaaagtatctgatcaagtcgatggcttgctaaagcagatcactcaaggaaaaagggaggccacaaggcaagagcgagtcgatgtcatgtcggcagtcctgcacaagatggaatctgatcttgaaggatacaaaaagacctttaccaaaggcccattcattgactacgaaaagcagtcaagcctctccatctatgaggcctgggtcaagatctgggagaagaactcttgggaagaaagaaagaagtacccttttcagcagcttgttagagatgaactggagcgggcggttgcctactacaaacaagattcactctctgaagcggtaaaagtgctaagacaggagctcaacaagcaaaaagcgctaaaggaaaaagaggacctctctcaactggagcgggactacaaaaccagaaaggcgaatctcgagatgaaagtacaatccgagcttgatcaagcgggaagtgctttgcctccattggtcagtccaacgccagagcaatggcttgaacgtgccacaagactggttacgcaagcaattgctgataaaaagcagctgcagaccacaaacaatactcttatcaagaatgccccaacccctctagaaaagcagaaagccatctacaatggtgagctacttgtggatgagatagccagtctacagacccgcttagataagctgaacgccgaaacgacacgacgcaggacagaagcagaacgcaaggcggccgaggaacaagcgttgcaagatgctgttaaatttactgccgacttttataaggaagtaactgagaaatttggcgcacgaacatcagagatggcgcaccaactggccgaaggcgccagggggaaaaatatcaggagttcggcggaagcaatcaattcgtttgaaaaacacaaggatgcgttaaataaaaaacttagccttaaagataggcaagccattgccaaagcctttgattctctagacaagcagatgatggcgaagagccttgagaaatttagcaaaggctttggagttgtaggcaaagctattgacgccgccagcctgtaccaagagttcaagatatctacggaaaccggggactggaaaccattctttgtaaaagttgaaacactagctgctggtgcggccgccagttggcttgtgggtattgcatttgccacggcaacggccactcctataggcatcctggggttcgcactggtaatggcagttaccggggcgatgattgacgaaggccttctagaaaaagcaaacaaccttgtaatgtccatttaa

SEQ ID NO: 326275 - DNA, 1023 bp, Pseudomonas aeruginosa
atgtttgagttcgcctggccctgggtcttcgccctcgccccgttgccctggctgctgcgcctggtgctgccggccgccgacagcggcgaggcggcgctcaaggtgagcttcctcgacgaactcgaaagcctcgccggacgccgtgcccgcgcacgcctgccggcctggcggcagcaggtgcgcttcgccctgctctggttcctcctgctgctcgccgcggcccgcccgcagtgggtcggcgaacccctgccgctacccgccagcggccgtgacctgctgctcgcggtggatgtctccggctccatggactaccgcgacatgcgctggcaggacgacgagatcagccgcctggaactgatcaagaaactcttcggcgacttcatcgaagaccgtcgtggcgaccgcgtcggcctgatcctgttcggcagccaggcctacctgcaggcgccgctgaccttcgaccggcacaccgtgcgggtctggctggacgaggcgcagatcggcatcgccggcaagaacaccgcgatcggcgacgccatcggcctggcggtcaagcgcctgcgccagcggcccgcggaaagccgggtgctggtgctgatcaccgacggcgccaacaccggcggacagatagccccgcagatcgccgcgcaactggccgccgagcaacaggtgaagatctacaccatcggcgtcggcgccgacccgcagcagggcggcgtgcccggcctgttcggcttcaacccggggctcgatctcgacgagccgaccctgcgcggtatcgccgagatcactggcggcgaatacttccgcgcgcgatccagcgccgagctggaaagcatttccgcgaccctcgaccgcctcgaaccggtcgcccagcagactacccgggcgcgcccggccctggcgctgtacagttggccgctggccgccgccctcggcctgagcgtgctgctggtggcgctggaactctggccacgggaaaaccggacctggccgcgccgccgttccgggaggcaaccatga

SEQ ID NO: 326276 - DNA, 1077 bp, Pseudomonas aeruginosa
atggtgctgggtgatgaccaacacatgctcctgcccagccagcgccagcagacgcacgcgcagcagcggcccacgagccaggtcgaatggctggcggatttcctcggccacccgctggcgcaacgttgcttcgctcgccccggcgcaatcctccaggacaatgcgcaacggcatgttcgccaggatcgtctggcgcgcctgaccgtcgacctcctcgaagcgggtgcgcaaggtctcgtggcgcagcaccagccaatcgaaggcctgctgcaacgccgcctggtccaggacgccacgcacgtgcagtacgctggggagatgataggccgcgctttcaggctccagtttccagaggaaccacatgcgttgctgagcatgcgacaaaggcaactcggcgactcgcggcaatacttgcagcacaggggcaacgctcgccgcctgggactccagggaagcggcgaagtctgccaggaccggccgctcgaacaggatgcgcaagggtacgtccagctccagatcctggcgcaggcgcgagaccacccgggtggcgctgagggagtgaccgccgagttcgaagaagtgctcgtcgcgggcgatgccctcgacaccgagcagcgcctcccagatcgctgcgaccgaacgttcgagcccctcccgcggaggctctccggcctggcggcgggcagctgcgtccaccttcggcagcgccttgcgatccagcttgccgttggcgttcagcggcaagctggacagcacctgccaagccgtcggttgcatgtacgcaggcaagcgtccggccagccaggtgcgcagctccgccagaaggtcctcaccccgcatagcgtcacgccccaccaggtaggccgccagcagcggaccaccgacgccatccagcgccacgaccgctgcttccgccacatacgggtgtgcaagcagttggctctcgatttcgccgatctcgatgcggaaaccacggatcttgatctgctgatcggcgcggccgagatattcgacctgaccgtcgacgcgataacgcgccaggtccccggtgcgatacaggcgctcgcccgaacctga

SEQ ID NO: 326277 - DNA, 1008 bp, Pseudomonas aeruginosa
atgactggcgttgtcgacgaaggcgccgatggcctcggcatccgctaccttggcggactgctccgctttcgtcgcgaactcggctggcgccccaccctcgggcgctgccgtttccgcctccggccgcggctcgggctcgacgcagccggcctcggtgacggtttcgtcttccgccgcctcgggctcgtcgatgggctccgccggcccgtccgaggcctcgtccgcatcgtccgcggcgaagacatcgggagcggcgtcttcgaaaagggcctcatggacgagcggcgggacgtccgcgcagggttcctcgccatccagggcggggccgtagccatggggggactcgaaggtgacgagcttcatcacccactcgcgttcgagcaccagggagcggtgttcttcccggcgcgagggggcgatggccgcgtcctgcaggtcgatgaggtggtaggccaggtcgctggtccggcggttgccggtggtggcttcgcggaccagctggcggaacacctggatggccgcctcgcaggcctcgtcggtgtcgaggcggcccaggcggaagccgtcgtcggtcttgaacagggaggcgatgtagacgcgcgagtcgttttcgtcgacctgttcgttgaggctgtaggcgatgaagttgcggtcgctggcgggaatggcgaaaccacacaacaaggccgcattcagttccgtctgctcggcagtttccacactgatggttcgaagaagcataagccctggagatcccgttggtgcttggaaggtgtaacgggcgagggtaccgggagctatgggcgaggtaacttggacgagtcctattgccttgtaagaaaaatcttgaagattttactgcgcaccgtgcccagcgcaccgcgcaggctcgtccgctcgtacggggccggcgcgcttcagcgatccgccatcaggacgacgatggcctcggcgacgaagtcggcgttgcgctccagggtctgcaggtggttcatgacgacatcgtag

SEQ ID NO: 326278 - DNA, 210 bp, Pseudomonas aeruginosa
atgctggatcacgacctgactgtcgccctgctatgccgtctcaaccagaaccagagtgccctcggcatggccctggaggagctggcgatttgggcgaagcgccatgaaggcggcgaaacctacgatgtcgtcatgaaccacctgcagaccctggagcgcaacgccgacttcgtcgccgaggccatcgtcgtcctgatggcggatcgctga

SEQ ID NO: 326279 - DNA, 195 bp, Pseudomonas aeruginosa
atgtcgttctccgagcgactgctcgccgcctggtaccaggggcacccggcgctggcgctgctgcgtccgctggaggctctctatcgtcgggtggcgaacggccgccggacgatcatcagcggttcgtcgccggcctccgcggcgtcctgctcggcccgcacccgccacggcgtggtgggcggccgggcaccatag

SEQ ID NO: 326280 - DNA, 1548 bp, Pseudomonas aeruginosa
gtggtgctgctggatattgccattggcatcgtgctggtagtcgctctgccaggggccgaccttctgccgcagcagttggtagtcctggtcgtactcgcggctgagagtgatgccgttgccccaggtcaggcgcagcagcgggccgaagggcaggtaggcgatctgcccgaccagggggctcggcgccttgtcgcctactgccagggtcacgctggcgacctggccgccggcgttgcgcgggtagccgatggcgaggccggaggggtagccgatctccagcagttggttggccgcgtcgtagcggtaggtcacgcggtcgagcagggtctgctggtcgaggcggatgctgcgtacctgctcgaccaggttgccgcgctcgtcgtagcggtacaccaggctgtcgcgggcaccttcgatggcgcccaggcggccgatgccctggttgccgtcggcggtgaggtcgtagcggtactgtacgtcgaggctcgggtcgctcggcgagtggcgctcgatcaggcgattgagggcgtcgtagcgatactcggtgaccgcaccgcgagcgtcggtgcggcggatgacgttgccggcggcgtcgtgctcgaaggtggtggtgccgctgtccgggctgaccagtcgggtcaggttgccgaggccgtcgtattcgtagcgggtggtgacgccgcgcgggtccttgacctcggtgaggttgtcctgggcgtcgtaggcgagttgggtcttgccgccgaggggatcgctctggccgaccagccggtcgagggcgtcgaaggcctggctgtgggcgaactggcgcgggttggtttcgccgaccggattgtcgttgaggtcgtaggcgaagctgcgtgtctggccgccggcgccgaccgcacggagcagccggccaagctcgtcgtaggcccattgctgctggcgcaccaggctgccgctggcgtccttgatgcgctgggcggtgcgattgcccttggtgtcgacgtcgtattcgaggcgttcgccgaggttgttgccgatcgccaccaggcgccgtgcgtcgtcgtattcgtagctcagccaactaccgtcgccacgggtgacgcgggtgatctggccgaccgcgtcgtagtcgaagcgggtggtgctgccggcggtgctgacggaggccagccagccgtcgacgccggtgtaggcgaggctgctggtgacgccgttggcatcggtgatgctgccgggcttgccgcgctcgtcatagtcgccgaggcgggtgacctggccgagggcgttggtcacctgggtcaggttgccgcgactgtcgtaggcatagagggtgacgtcctgcacatcggtgcgcggaccgtcggcgcgctcgatcaggccgagggcgttgtagctgtagctccaggcgcgctcggccgcctgcgcgggcagggccagggcgcaggccagggcgagggcgccgagacgggggaagtatggggggatgcgcatgggtgtcgtccttgtcagcgggtggtgacggtctcgccggtcttgcgtccctcggcgtcgtactggtag

SEQ ID NO: 326281 - DNA, 339 bp, Pseudomonas aeruginosa
atgcgcaacagccaggtatcggcgaagcgcggcgcgaccagttgcaggccgatcggcatgccggcggccgtgaagccgcagtttatcgagagcgcgggctgttcgcccatattccacggcacggtgaagacgatgtgctcgaacggccgctgcggatcgttcagcggcgaggcccagtcggcggggaaggcctcgacctggttggtcggcgtcagcagcaggtcgatctcgccgaacagccgggcggcgcgccggcgcatctcgaaggtctggttgaaaccgcgcaccgcatcgaccccgctgacccgtgcgccgccctcggcccaggcgtggacatag

SEQ ID NO: 326282 - DNA, 1317 bp, Pseudomonas aeruginosa
atgcgctcccccacccgtcccccggcggccgccgatccggccagccgccgcagcgtctttgccgtggtcctcggcaacgccgtggaattcttcgacttcggggtctatgccaccttcgcggtgatgatcggacggactttcttcccctccgacagcgccttcgtcagcctgctcctgtcggtcaccgcgttcggcgtcggcttcgtcatccgccccctcggcgcgatccttatcggcgcctacgccgaccgcgccgggcgcaagccggcgatgctccttaccctgttcctgatggcgctgggcaccggcggcatcgcggtgctccccggctacgacagcatcggcccggccgcgccgctgctgctggtgttgacccgcctgctgcaaggcctggcctggggcggcgaggccgggccggcgaccacctacatcctcgaggcggcaccgccgcacaagcgcggcacctacgcctgctggcaggtcgtggcgcaaggcatcgcggcggtcgccgccgggctgatgggctacctgctcaccctctggctcgacgagcgccaactgcaggaatggggctggcggattcccttcgcggccggcctgctggtcctgccgatcggcctgtacatccgcctcaacctggccgagaccttttccggacgcggccgccaggccagcacccggaacctgctcggcgagttgttcggcaatcatcggcgggccctgctgctcggcctgctgatcctctccggaagcaccatcacccagtacttcctcaactacatgaccaccttcgcccttaccgagctacacctgccggcgggcatcgcgatgctctcgacgctggtcgccggcgccgcactggcgctctcggcgttgctcggcggcgtgctctgcgaccgctacgggcgccgcgccgtgctgatcctgccgcgcctggcgctgctcgcggtgctgttcccggcactgcaggcaatgacccgtcaccccgagccggcagtcttcctcgccgtcctcgccctgctctcggccctgcatggcatgagcggcgcggcgctgatcgtgctactggtagaaagcttcccgcgggcgctgcgctccaccggtttttccctggtctatgcgaccggcgtcgccgcgttcggcggcaccgcgcagatcgtggtgacctggctgatcggcgtcaccggcaatccgctgtcgccgctgggctacctgctgctggccaacctggtctgcctggttggggcctggctggcccgcgagacctggccgggtcgcggggacatgggaggcgcgccgctggtgctgcgcgactga

SEQ ID NO: 326283 - DNA, 1254 bp, Pseudomonas aeruginosa
atgcccggaccgtggtcgcggacgtggaagcgcgcgcagccttgcgcggtttccaccgccagctccacccgggtgccggcggcggtgtggcgcagggcgttgtccagcaggttgcgcagcgcggcgatggccagcaccgaggggacttccagcggcgcctcggacaagccgtcggccagcttcagttcgaacatccgcacgtcgccgtggccggcgtcgtgcatggccacccgggcggcgtcctcggcgctgcactgcacgccgtcgtcgaacgacaggctgccttccacccgcgccagcagcaacagctggtccagtgtccgatgcagacggtcggcgccttcctcggcgtgggccagggcctgctcggcggcggcgccctcggtcatgcgcgcgacctgcaggtgggtcttgatcgcggtcagcgggctgcgcagttcgtgggcggcatcgccggtcaggcgtcgctcgcgttcgatggcctgggcgatgcgctggaacaactggttctgggtttccaccagcggcttcagttcgctcggcagggccgccagctccagtggctccagcgagtcggcgccgcgccgggtgagggcgtcgcgaatccgcttgagcggcgccagaccctggccggcgccgagccagagcagggccaggctgccgagcagggcgaccgtcaccggcaccgcggcggccaccaccaccgagcgttgcagcacgtcgcgctcttccaggcggtcggcggtgctgacccgcaggtcgccggcctgcacggtgaagctgcgccacagcacgccgttgatttcctggtcgcggaagccgctggcggtgctgtccagcgcccgctccggggtggcatggctctgcgccaggacttcgccgcgcaatgagctgacctggcaggccatgccgttgggaatccccagttgctccgcgctcaggcgcgtggtctggccgtccgccggctgcggctgcggcaactgctggagcaggccggcgaccatccgcgccgaggccgccaggcgttggtcgaaggagcgcatcatctgcccgcgcaggtcgcagagcatccaggccgcggccagcgaccagagcaggatgaaggccgagccgaggatcagggtcaggcgcaggcgcaggctcatgcgtcgtctccgtcgccgcgcgccggcccgaggcggtagccgaggccgcgcacggtctgcacgatggcgttgccgagcttgcgccgcaggtgatggatgtggacgttga

SEQ ID NO: 326284 - DNA, 570 bp, Pseudomonas aeruginosa
atgcatgtactgctcaccgacttcgacgtgctggtcctcgatctcggcctgcccgacgaggacggcctgcgcctgctgcaacgcctgcgccagcagggcgtcgacctgccggtgctggtgctgaccgcgcgcgacgcggtgaccgaccgggtcgccgggttgcaggccggcgccgacgactacctgctcaagcccttcgacctgcgcgaactcggcgcccgcctgcataccttgcagcggcgctccgccgggcgctgcgtcaacgtcatcgaacacggtcgcctcagctacgatccgagcacccgcgaaacctggctcgacggtcgccccgtggagctgtcgcgacgcgaacaggcgctgttgcaggcattgctcaacaaccgcgggcggatcctcagcggcgagcagctcaaggacagcgtctatggcttcggcgacgaggtcgagagcaacgccctcaacgtccacatccatcacctgcggcgcaagctcggcaacgccatcgtgcagaccgtgcgcggcctcggctaccgcctcgggccggcgcgcggcgacggagacgacgcatga

SEQ ID NO: 326285 - DNA, 255 bp, Pseudomonas aeruginosa
ttggtcacccacgatatcgacgaggccctgctgctctccgaacgcatcctgctactgggtgacagcccggcgcggaccctcggcgagtggcgcatcgacctgccgcagccacgcgcggagctggtcgaggaactgggcgcgttgcgcatcgagatcctgaaaaccctacggcgggcgagccgcacccatgcccatcccatcgctcagccggaggcctcccatgtgcctggacgacccgacccattcccgacgtga

SEQ ID NO: 326286 - DNA, 1071 bp, Pseudomonas aeruginosa
gtgcgcatcggctccctgccgatcaccgacgccacgcccttgctggtggcccatgccaacggcctgttcgaggccgagggcatccaggccgaacggccggtgctgttgcgtagctgggcgcaggtgatcgaggcgttcatctccggccaggtcaacgtcatccacctgctgtcgccgatgaccgtctgggcccgctacggcagcaaggtgccggccaaggtggtggcctggaaccacgtcggcggctcggggctcacggtggctccggagatcgacgacgtgcgccagctcggcggcaagagcgtggcgatcccgttctggtactcgatccacaacgtggtgttgcagcaactgctgcgcgacaacggcctgcgcgcggtgagccgtgcggtgggcgcggcgctggccgccgacgaggtcaacctggtggtgctgccgccttcggacatgccgccggcgctggccagcaagcgcatccacggctacatcgtcgccgagccgttcaatgccctggcggagaacctcaaggtcggccgggtacagcgcttcaccggcgatgtctggcgcaaccacgcctgctgcgtggtgttcatgcacgaacacgacctggagcggcggccgcagtggtcgcaaaaggtggtcaacgccatcgtcaaggcccagctatggactcgcgagcaccgcgccgaggccgcacagttgctgtccaaggccggagccaaccgctacacgccgcacgcgccggaggtcctcggccgggtgctggcgccgggcgccgaggagcagcaggcctatctcgccagcggcgcgatccgccacgccgactggcaggagcggcgcatcgacttccagccctatccctatccgagctacaccgaggaactggtgcggcggctgaaggacaccctgatcgaaggcaataatgccttcctcgccagcctcgatccgcgccaggtggccagtgacctggtggacgaccgcttcgtccgccaggccctggcagaggtcggcgggttgcaggcgttcggcctcgccgagggcttccagcgcagcgaggagatcagcccgtga

SEQ ID NO: 326287 - DNA, 765 bp, Pseudomonas aeruginosa
gtgaggcagaccctgcgccagggcgcgctgggcgttgccgggctgctggcgctgttcgccctgtggtggctcggcgtggccctgttcggcgccgccgacggcctttcggcacgcttctcgccgcaggcgacgttgctcagcctgggtgaactgctggagcgccgcgaactctacgagcatgtgctggtgagcctgaaacgggtcctgctgggcttgttcctggcgctgctggtgggagtgccgctggggctgctggtgggcgcctcgcgcaacctggaagcggcgaccactccggcgttccagttcctgcggatgatctcgccgctgtcgtggatgcccatcgcggtgatgctgatgggcgtgggcgaccagccgatctatttcctgctggccttcgccgcgctctggccgatcctgctgaataccgccgccggcgtgcgccagctcgacccgcgctggctgcaactgagccgcagcctcgccgccacgccctgggaaaccctgcgccgggtgatcctgccgggcatcctcggccatgtgctgaccggcgtgcgcctggccatcggcatcctctggatcgtcctggtgccctgcgagatgctcggcgtcagcgccgggctcggctactacatcctcgacacccgcgaccgcctggcgtactccgagctgatggcgatggtgctgctgatcggcctgctcggctacctgctcgacgcggcggcgcgcggactctaccggcgctgggcgcacggagcgctcgggtag

SEQ ID NO: 326288 - DNA, 993 bp, Pseudomonas aeruginosa
ttgttcctcgcgctgcgccacttgcaaggcgacctgctccaggcgtcgagcgtcggggctgagttccagccggccctggccggcgtccagcaccacctgccggccttcctccagctccagcagcccggcgccgagcgccaccaggcacggcaggcctttgctgcgggcgaggatggccacgtgggaggtggcgccgccttcggccatgcacaggccagccgcgccggcatccaccagcggcgcgaggtcggagggggtgatctcccgggcggcgacgatggcgccagcaggcacccgcaacggcgcggtgtcgccgagcagtacccgcagcacgcgtttttccaggtcgcgcaggtcgttggcgcgctcggccagcagcaggttgcccagcgcctggagaatctcgcactgggcctggatcgcccggtgccaggcgtgggcggcgccgacgccctggtcgatcagcatgtcggcggcgtccagcagacccgggtcttccagcagcgcgagatgcgcggaaaagatcgccgcttcgttctcgtcgccgcccagcctggcctgctgcaggctcccctgtacgtcgtcgcgcacccgttgcagggcctggtccagggcgaggtgctgttcctcgggacgatgccggccgtcatccgccggcaggctgatggcgccgagccgcgccaggggaccgctggccaggccgggcgaagcgcagacgccggccagggtaccggcgacagccgcaggtcgcgccgcctcgcccggggcgatggcgcgcggagcctccttcggagcccccgcggtggcgctggcgagggccgcgagcagggcgccgagggccgcctcgctgtcttcgccgcgacagatcacctctacctcgtcctgttcggcgacccccaggcccatgataccgaccaggctgtcgacgctggccacttgcccggcgaagtgcagttcggcctggctggaaaagccctgcgcggtcttgcgtag

SEQ ID NO: 326289 - DNA, 1227 bp, Pseudomonas aeruginosa
atgaccgccaccagcgacctgatcgagtcactgatttcctatagctgggacgactggcaggtgacccgccaggaagcccgccgggtgatcgccgcgatccgcaacgacaacgtgcccgatgcgaccatcgccgcactcgacaagagcggctcgctgatcaagctgttccagcgggtgggcccgccggaactggcgcgctcgctgatcgccagcatcgccgggcgcaccaccatgcagcgctaccaggcacgcaatgccttgatccgcagcctgatcaacaatcccctgggcacccagaccgacaactggatctacttccccaccatcaccttcttcgacatctgcgccgacctcgccgacgccgctggccgcctgggcttcgccgcggccggcgccaccggggtggccagccaggcgatccagggtccgttcagcggggtcggcgccaccggcgtcaatccggccgacctgccgtccattgccttcggcgaccagctcaagctgctcaacaaggacccggcgaccgtcaccaagtacagcaacccgctcggcgacctgggcgcctacctgagccagctttcgccgcaagacaagctgaaccaggcacagacgctggtcggccagccgatcagcacgctgttccccgacgcctatccgggcaacccgccgtcgcgggccaaggtcatgtccgcggctgcgcgcaagtacgacctgacgccgcaactgatcggcgcgatcatcctcgccgagcagcgtgaccagacccgcgacgaagacgccaaggactatcaggcggcagtcagcatcaagagcgccaacacctccatcggcctcggccaggtggtggtctccaccgcgatcaagtacgagctgttcaccgacctgctcggccagccggtgcgccgcggcctgtcgcgcaaggcggtcgccaccctgctggcttccgacgaattcaacatcttcgccaccgcccgttacatccgctacgtcgccaacctggcgtcgcaacaggacctgcgcaagttgccgaagacccgcggtgcatttccctccatcgatctccgcgcctacgccggcaatccgcgcaactggccgcgggacaatgtccgcgcgctggcctcggaatacacctcgcgtccctgggacgacaacctgtcgccgggctggccgatgttcgtcgacgatgcctacgccaccttcctcgaccctggaatgaggttcccatga

SEQ ID NO: 326290 - DNA, 1335 bp, Pseudomonas aeruginosa
atggatgagtttttttatttaaagcttattaatatatttctatcatctttcttcctgctgggcgcttggtgtgcacggaagatttttagtgtatggctaaacccggtatctatattctcgctactttggtttttttatacggtatttccacttctggttgcatttgaggcgccggttagtccctttgctattctctatatattaatattctgttttgttttttcattgtctagcttcgtctttccatggggggttgcattttcccgtaatgaaaataagccgaatgcaagttgttattttgatgtgccgttaatggttttggccttttattcttgttcgggaatttccgccataatgattttttggggtgttttacagcagggaatatcgcttgaacagttgctaaacaaccctgtttctataggtggtatctatgcaggtaaaagatattccggggaaattgtctcaagtgtattttcgcaagttggcttgcagtgcagttattatacggcagtatttggcggcttaatatatggcgctagaagtgaagcgcgcggtcgttttaagttactgttttttacttttttacctgctttgcttgttatgttgttgcaaagtgctaaaggactattctttttctcaatatttttattttttggcgggatgttagtttcgcgagtttataataaaaactatacgctagtaggctttaaagatttcagatttttgctcttatatggacttctaatacttcctatattgattttttcttttctgtctcgtgggatttatcaattggatgatactgctttgatgataaatcggctcaggtactatcttgttacatattcttctgtgcatttgccggctttttcagactggttctctgaacgctatttcggtgagtcgctaatgcattatagacaagagtcatcaactctaggtttttatactttcatgtcgttttttcagttagccggagatgatagaagtgtagctatgggagtgtatgacgagttttttacctatggtgaatatgtaaaaggaaacctctatacagtttttcgaggaataataacggattttggtttgctgggtagtttattttttgcttttatacttggtcttttctgtaatctttgctattggcggcttttgtgtcgaaatggcagcgcatttgctattttatttttttgctattttgtcgctataagctatcagacttatatcattagttcgctgacctggcttactctgccatttgtttttattgttcagtggtttatgcttggttttctgttgaagtttaggttctatacgaggtctaaggtgtga

SEQ ID NO: 326291 - DNA, 738 bp, Pseudomonas aeruginosa
atgcgcgaagccttgcgctcactgctggtcgccttgcagttcctcacccgcctgccggtgcgcctgtcggcgatgccgacgccggaacagttcggccgcgcggtgctctgctatccactggtcggggtgctgatcggcgttgtgctgtacgccgcggcgcggtcgctcgacggtacgccgccgctgttgcaggcagccttgctgctgagcctgtgggtggcgctgagcggcgcgctgcacctggacggcctggccgacatggcggacgcctgggtcggcgggctgggcgaccgcgagcggaccctggcgatcatgaaggacccgcgcagcggcccggtggcggtggtggtcctggtactggtcctgttgttgaagttctccgccctggcggcgctgctcggccagggagaggccgggttgttgccgctggccccgtggctggcgcgcagcagcctgccgctgctgttcctgaccacgccctacgcgcgccccggcggcctcggccaggccatcgccgagcacctgccggcgcgcagcctgccgtgggtgctgggggggagtttcggcctggccctggcgttcggcctggccggcctgctggcgttgctggtgacgctgatgctcttcgcctggctgcgcagccgtttcctcgcgcgcctcggtggcaccaccggggacaccgccggcgcgctggtcgaacttaccgagtgtgcggtgctggtggcgctggctctgtag

SEQ ID NO: 326292 - DNA, 1170 bp, Pseudomonas aeruginosa
atgatgccggcgaccctgtcgatcgtccgccatgtcttccaggacgaacgcgaacgcgccctggccatcggcatctgggcctccgtcgcctctgccggcgcggcgctggggccggtggtcggcggcgtgctgctggagttcttctggtggggctcggtgttcctcatcaacgtcccggtggtggtcgtcgctttgttgctggcgctgccggccatcccggcctgcggcggccagtcgcggcgcccatgggacgccctcggctcgctgcaggtgatgttcggcctggtcggggtggtgtatgcgatcaaggaactcagcacacgcgccccggacttcgggctggccgtcctggccgcgctcggcggcatgctctgcctgtacctgttcgtccgccgccagcgccgcgcccgcgaaccgatgatcgacttcgcgctgttccgcaaccggcgcttcgcccgcggcgtcgcggtggccctggtggcgaccatggcgctggtcggcatggaactggtgttcagccagcacctgcaactggtgcagggcctgacgccgctgaaggccggcctgttcgtcctgccgatcccgctggcctcgctggtggtcgggccgctggccggctggctggtgccgcgctggggcgagaaccgggtgatgtgcgcctccctgctgctcggcagcgccggattgctcggcctggccctgtcctaccagtccgccaccggagcgcaactggccagcctggtgctgctcggcgtcggcttcggcggcgcgatgaccgccgcctccaccgcggtgatgctcaacgtggacgaacagagttccggaatggcggccgccatcgaagacgtgtcctacgaactgggcggggtgatcggcgtgaccctgctcggcagcctgatgagtttcgtctacgggatgtcgctgaggctgccctcggccgagctgccggcgcgggtccgcgacagcctcgacgacgccctgttggtcgccgagggcctggcgccggaggtcgcgtcgcggctcgtcgagcttgcccggcaggctttcgaccaggccttcgtcgccgtgctgctggccgccgccgcgctgctcttcctcagcgccatggcggtcctgcgccagccgcgtccggctacagagccagcgccaccagcaccgcacactcggtaa

SEQ ID NO: 326293 - DNA, 1425 bp, Pseudomonas aeruginosa
atgggcgacttccagggactcggcgtccttgatcaggatgccgtggcgtgcggccacgccggtgccggccatgatcgcggtcggggtggccaggccgagggcgcaggggcaggcgatcaccagcaccgccacggcgttcaccagggcctgctccaggccgaccccggcgaccagccaggcgccgagggtgaccagtgcgatgaggatcaccaccgggacgaagacctggctgaccttgtccaccagcttctggatcggcgccttggcggcctgggcgtcttccaccaggcggatgatcttcgccagcaccgtttccccgccgagcgcggtggtgcgcaggagcaggcggccttcgccgttgatcgcgccgccggtgaccttgtcgccgggagccttgggcaccggcaggctctcgccggtgatcagcgcctcgtcggcgtggctgctgccgtcgagcacctcgccgtccaccgggaagcgttcgccgggacgcaccaccacctcgtcgccgaggcgcaactcggcgatcgccacctcttcctcgcgaccgtcgcgcaggcgcaccgcgcgctccgggcgcaacgcctcgagggcgcggatggcgctggcggtctggcgcttggcgcggctttccaggtacttgccgaggaggatcagggcgatcaccacggtcgaggcttcgaagtagaggtgcggcatgtggccgggcggggcggtcagccagaggtagacgctgaggccgtagccggcgctggtgccgagggcgaccagcaggtccatgttgccggcaccggctttcaccgcgcgccaggcggagacatagaagcgcgcgccgatgacgaactgcaccggggtcgccaggaggaactgcgcccacggcggcagcatccagtgcaggccggcccattccaccagcatcggcagcaccagcggcaacgccagcaacagcgcggcgatcacccaccagcgttcgcggcgcaggcggcgctcggcatcgtcctggcgtggttgccccgcgtcgagcaggcgggccttgtagccggcctgttccaccgcctgcagcaaggcctggctgtccacggcgccgagcaggtcgaggtgggcgcgctcgctggccaggttgacgctgacctcgcgtacgccgggcaccttcttcagcgcccgctcgacccggccgacgcaactggcgcaggtcatgccctcgatggacagttccaggctgcgcgccggaacctggtagccggcctgctcgaccgccgccaccagggccggcaggctgtccgccggggcctgtacgcgggcctgctcgctggccaggttgaccgaggcggccgcgaccccgggcactttcttcagggctcgttcgacacggccggcgcaggacgcgcaagtcatgccgctgaccggcagatcgagctcggttag

SEQ ID NO: 326294 - DNA, 201 bp, Pseudomonas aeruginosa
atgtggcgcgcggtcaacgaggacggcaccctgacctactccttcgtcgaagcgctggccgccggccaccccggcttcatcgtgcgcatgctcggcggtttcatcttcctgctcggcatgttcctgatggcctacaacacctggcgcaccgtcagtgccgccaagccggccgaatacgaagccgccgcacagatcgcctga

SEQ ID NO: 326295 - DNA, 609 bp, Pseudomonas aeruginosa
atgaaacacgaaatactcgagaagaacgtcggcctgctggcgctatgcatggccgtggccgtgagcatcggcggcctgacccagatcgtgccgctgttcttccaggacgtgaccaacacctcggtcgaaggcatgaagccctataccgcgctgcaactggaaggccgcgacatctatatccgcgaaggctgcgtcggctgccactcgcagatgatccgtccgttccgcgccgaaaccgaacgctacggccactactcggtggccggcgagagcgtctgggaccaccccttcctgtggggttccaagcgtaccggtccggacctggcccgcgtcggtagccgctactccgacgactggcaccgcgcgcacctgttcaacccgcgcaacgtggtgcccgagtcgaagatgccggcctacccgtggctggtggagaacaagctcgacggcaaggacatcgagaagaagctcgaagtgatgcgcaccctcggcgtgccctataccgacgaagacatcaagggcgccaaggactcgctgaaaggcaagaccgaaatggatgccgtggtcgcctacctgcaggtgctcggcacctcgatcaagaacaaacggtga

SEQ ID NO: 326296 - DNA, 1395 bp, Pseudomonas aeruginosa
atgccgcgcacgccctctcccgaagacgccgacctgcacaagaaagcccgcagggccggtatcgcctccttcatcggcaccaccatcgagtggtacgacttctacatctacggcctggccgccgccctggtgttcggcaaggtattcttccccgccgacatggatccgggcctggccaccctgctgtccttcgtcaccctctggtcgggcttcatcgctcgtccgctgggcgggatcatcttcggccatctcggcgaccgcatcggccgcaagaccaccctggtgatcaccctgatcatgatgggcatcgccacgacctgcatcggcctgttgccggtctatacgcagatcggcatctgggcaccgatctccctggtggcgctgcgtatcgtccagggcatcgcggtcggcggcgagtggggcggcgcgatcctgatcgccagcgaaagcgcgcccaagggcaagggcatcctgtacgccgccttcgcccagcagggctcgcccaccggcaacctgctggcgaccctggcgttcttcgccctcagcgccctgcccgcctcggacttcattctctggggctggcgcgcgccgttcctgctctccgcagtgctggtcatcgtcggcatggtgatccgcctgaagctggaggagtcggaagacatgaagcgcgtgctggcgcagaagcgcacggtgaagctgccgctcgccgaggtgctgggcaagcattggaagatcgtcctgctcggcgccggcgtgctgccgatcatccacgtcacctacttcaagggcaccttcgccctctcctgggcgaccaagaccctcggctacagccagggcaccttcctcagcatcatcgtggtcgcgctggtggtgcagttcctcagccagccactgggggcgctgctcacttcgcgcatcgacatgcgcaaggcggcatgcctgatggtgctgccggagttcatcctgatgccggcgatgttcttcgccgtggaaaccaaggtctactggatcgccgcggccggcatgtgcctggccacggtgccgcacgcgatgttctacggcgcggtgggcggtatcctcgcccgagccttcccggcgcgggtgcgctacaccggcctgtcgctggcctaccagctctgctcgctgctggtcggcggcggtacgccggtactggcccagtggattctcaacagtaccggcagcatcgtcggcgtggccctggcctcggcctgctacgcgctggtctcgctggcctgtaccctcaccgggttccacgccagcgacctgtcgaccgccgagcgcgccgacgccgaggacttgcagcggcccgcagcggtcgagcgggaaccggtgttgcgcgcccccgcccggcttctgggcggcgatcccggctag

SEQ ID NO: 326297 - DNA, 381 bp, Pseudomonas aeruginosa
atgcagtacgccgacttcaacggccccggcgagcgctcgtggaagatccagtaccaggccagcctggccttcctcgccgccccggactggcaattcggcgccgcctacggccgtggccaggccgacctgacccgggtcgacccggacagcgcgggctacggctacctctacaaccccaatggcaagaacgcccagcactgggaacgcgacctgtcgctgcgctatgccttccccgccggcccggccaagggcctcagcgtgaccctgcgctgggccacccaccgccccggcgaaggctacaccgcccccggcaacacccgcggcaactccagctccgacgaataccgggtggtggtcgactacccgatcaggttgctctga

SEQ ID NO: 326298 - DNA, 363 bp, Pseudomonas aeruginosa
gtgacgaaggatcctgcgacggacagcggcctgaacgtgcgcctggtcgccgcgttcgccggctggaaaggcattccctggctatgctgggcccacagcgacctgtccccgcggctggtcctgcatgcggaccgtgtcgagttccgcgtcatccgcacgcgctcgaagccgtattccagcatttcccgggtggactatcggaaatggcactacaccgagaacatcgtgctggagttcaccgactcgctgacgaccttcatcggcaatacgatgaatcccgccacggcacggcaggcgattcggtacttgcaggaaaagggctgtccgttgtcggagcgggccagcaacctggccatggcgtag

SEQ ID NO: 326299 - DNA, 834 bp, Pseudomonas aeruginosa
atgtcgtttcgcaagaccctgttgatcaccggcgccagcagcggcttcggccaggccctggcccgcgaggccctggatgccggtcaccgcgtggtgggcacggtgcgcagcgaggaggccaggagcgcactggaagccgtggcgccgggccaggccttcggccggctgctggatgtcaccgacctcgccgccatcgagccgacggtcgcagccatcgagcgcgacatcggtccgctggacgtgctggtgaacagtgccggctatggtcatgaaggcatcctcgaggagtcgccgctggccgagatgcgccggcagttcgaggtcaacctgttcggcgcggtcgcgatgatccaggccgtgctgccctacatgcgtcggcgccgccgcggtcatatcctcaacatcacttccatgggcggctacatcaccatgcccggcatcgcctactactgcggcagcaagttcgccctggaaggggtttccgaagccttgggcaaggaggtggccggcctcggcatcgccgtcaccgccgtggcccccggctccttccgcaccgactgggcgggccgctcgatggtccgcagcccgcgcaccatcgccgactacgacgcgctcttcgacccggtccgccaggcgcgccaggaaaagagcggcaagcaaccgggcgacccgcgcaaggccgcgcgcgccatgctccaggccatcgacgcggaaaacccgccggcgcacctgctgctgggcagcgatgcactggggctggtgcggcagaagctgaaggcgctggaggaggaaatcgcggcgtgggaagaggtcacgcggtcgacggatggatga

SEQ ID NO: 326300 - DNA, 858 bp, Pseudomonas aeruginosa
atgttgaaacgctccctggcgctcgccgccggcatcgccctgtccctgtccgccgcgctcgcccacgccgaagccctgaaagaactcaaggtctcggcgatccccgacgaagcgcccaccgaactgctgcgcaagttcaagccgctcggcgcctatctggagaagcaactcggcatgccggtgaagttcgtcccggtggccgactacgccggggtggtcgaggcgctggccgccgaccgcctggacatggcctggctgggtggcttcaccttcgtccaggcgcggctgaagaccggcaacgccatccccctggtgcagcgcgagcaggaccagcagttcaccagcaaattcatcacggccgatccccaagtgaaatccctgcaggacctgaagggcaagaccttcgccttcggctcggtctcctccacctcgggcagcctgatgccgcgctacttcatgcagaaggacggcatcgtccccgagcagttcttctcccgcgtcgcctactccggcgcccacgacgccaccgcggcctgggtccaggccggcaaggtcgacgccggcgtgctgaacgcctcggtctggcagaagctggtggacagcggcaaggtcgataccgccaaggtcaaggtcttcgccaccacgccgacctactacgactacaactggaccgtgcgcggcaacctcgacccggccctggccgagaagatcaagcaggccttcctcgccctcgacccggcgaaaccggccgacaaggagatcctcgacctgcaggccgccagccgcttcatcgagaccaatccggacaactacaagggcatcgaggagtccgcacgcgccgccggcctgctgaagtga

SEQ ID NO: 326301 - DNA, 720 bp, Pseudomonas aeruginosa
atgtggttcctcctcgccacctcgctcctcgccctgtccttccagcgcctgctggctctcgccttgctgctcgcgacctgctgcctcgccttctacgacggagttctcgctccgcctgcggtcgccgccctggctgtactgggcgtcctcgccctgttgcgccggcgcctggcggcacgccgcgcctgggccctgggcctggagctgctgctggtcgccggcgcggtgggcctgttcctgcacctgctacccggcttcgccaaccccagggtcctggacaaggcggtggtcggcccgcagagcctgccgttcaccatgtacttcaacttcgacaaggcactggtgccgttcctgctactggcctgcctgccgagcctgttccgcgacgaagcccgcgctcccggccgcccctggcactggctgctgctcgtggcggcggtgccggcgctgcttctggaagcgctgttccgcggctacctgcagcaacgcctgggccaatggctgggcccctggcccgccctggcgctggcctcggcgctgttcggcctggcgcacttcgccggcggcccgctgctgatgctgttcgccggcctcgccgggctgatctacgggttggcctggctgtggagcggccgcctgtgggtggcgacgctgttccacttcgggctgaacctgacgcatctgctgctgttcacctacccgctctacagacccgcctga

SEQ ID NO: 326302 - DNA, 318 bp, Pseudomonas aeruginosa
atgcattcgaagtcggtagatagcctgtcgctgacacgggctggattcatcgagtacttcctggtcgcgaccaagctggtacacgcgctcaccgccatcgccccggcgctgttcctgctgtactaccccggcctggttcccgtggagctgcgcagcaacatgctcgggctgctgctgttcttcggcgcgctcacggtgatcatgttccaggcactggacgtctactccgacgatatcttcagcaaccgcctgcgcttccgcatcatgttcttcgcctgggcctcggcgttcttccctacctcagcagcaagctggtga

SEQ ID NO: 326303 - DNA, 969 bp, Pseudomonas aeruginosa
gtgatcttctggttcaccggcagcctgctgctgttcggcgtgcagcgcctgctggtgctgcgcctgtaccgggcctggatgaaacgcggcatgtacctgcaacgcacggtgatcctcggcttcaccgagagcggcatgcacctggccgaatacctggtacgcaaccacgacatccgctccggcatcatcggcttcatcgacgaccgctccgagcgggtcccggagaactacaactcgctgccgctgctgggcaacaccaaggacctggagaaactgatccgccaggaacaggtcgaccaggtgctggtcgccctgccctggttcgccgaggggcgcatcggcgccatcgtccaccgcctgcggcaattgccggtgaacgtcctgctggtgccggacatggctgccttccggcatgcccacaaccgcatcgtcgatgtctccgggatccccatgttcaacgcgtccgagctgccgctgcgcggctggtcgccgctgatcaagcgctgcgaggacctggtcctggcgagcatcgcgctggtcctcttcgccccgctgatggccctggtggccctggcgatcaggctcgactccaaggggccggtgctgttccggcagaaacgctacggctacaacaaccggctgatctgggtcttcaagttccgctcgatgtacacggaaaggaccgacgccaacgccgaacgccagaccacccgcgacgacgaccgcatcacccgggtcggccgcttcatccgcaagaccagcatcgacgagctgccgcagctgttcaacgtgctcgccggcagcatgtcgatggtcggtccgcgcccccacgccacggcgaccaaggccgccggcattcccttcgaggaagcggtcagcgaatacatcgccaagtggtcggtgtggttcgacctctacatcctgttccgtacggtgccagccgtactcctgaccaaggaagtctactga

SEQ ID NO: 326304 - DNA, 285 bp, Pseudomonas aeruginosa; identical to SEQ ID NO: 326217

SEQ ID NO: 326305 - DNA, 798 bp, Pseudomonas aeruginosa; identical to SEQ ID NO: 326216

SEQ ID NO: 326306 - DNA, 570 bp, Pseudomonas aeruginosa; identical to SEQ ID NO: 326284

SEQ ID NO: 326307 - DNA, 1155 bp, Pseudomonas aeruginosa
atgtcccgcacctggattcgcaaacccctcgccatcttcaccgccaacggtctcgacgccgccggcggcctggtcgtcgaagacggccgcatcgtcgagctgctcggcgccggccaggccaccaaggtggcgctggccgagctgctgctgtctggctgcaccactgccgccgaccaccactacctgttccccggcggcctcgaacaggctatcgacgtgcaggccggggtggtcgaggaactgggcatgcgcgccatgctcacccgcggctcgatgagcctcggcgagaaggacggcggcttgccgccgcagcagacggtgcaggaggccgagaccatcctcgccgacagcgagcgactgatcgctcgctaccaccagcgcggcgaaggcgcccgggtgcagatcgccctggcgccctgctcgccgttctcggtgactccggagatcatgcgcgccagcgccgaactggcggcgcgccatgacgtacgcctgcacacccacctggcggagaccctcgacgaggaagacttctgcctgcagcgcttcggcctgcgcaccgtggactacctggatagcgtcggctggctcggcccgcgcacctggctggcccacggcatccacttcaacgccgaggagatccgccggctcggcgaggcgggcaccggtatctgccattgcccgagttcgaacatgcgcctggcctcgggcatctgcccgaccgtggagctggaggcggccggcgcgccgattggcctgggagtcgatggttcggcctccaacgacgcctcgaacatgatcctcgaggcgcgccaggccctgtacctgcaacgcctgcgctacggcgccgagcgaatcaccccggaactcgccctgggctgggccacccgtggctcggcacgcctgctcggacgcagcgacatcggcgagctggcccccggcaagcaggccgacctggccttgttcaagctcgacgagctgcgcttctcgggtagccacgacccgctctcggcgctgctgctgtgcgctgccgaccgtgccgaccgggtaatggtcggcggcgcctggcgagtggtcgatggtgccgtggaagggctcgacctggccgccctgatcgcccgccaccgcgaggcggcgagcgccctgatcgccgggtga

SEQ ID NO: 326308 - DNA, 1368 bp, Pseudomonas aeruginosa
gtgcgcctggagcagccgctccaccgtccagttctgcgtgccgcgggtgctgaagctgacgtcgccgccgtcgccgaggaactccgcgccagtgggatagttgcgctccagcagggcgtcgccgctgtccgccgggcccgcgcattcaccggcggcgaccgggcaggtcaggctcaccacgtcggcgctggcctcgtcgttgccggtgccctgccggacgaagcgctcgctctcggcggcggccagggtcagggccagacgggcctgctccggctgctcgcggatcgcttcgcccaggtcgccgccgctgccggggctggccagggcgttgcggatcacctggtcgacctggttccacgacagccgcgccgccaggtagagggcgaccagccgctgcaccggatagccgcactgctccagttgttcccagccgcgcggctggcgatgacgggtgaaagtctccagcggcaggtggcaagcctggtgcgcggtcagcgcggccaggctgccgccctcggggaagtgcaggcgatgactgatgaccgtgggcttgatgtccaggtcatgcttcgccgggttgccggcgagcacccggtagatcttgccttcccaggtatcgtcgaggttgcagcgttgctgggcgaggtagttgtagaccccgtccagcgggtcgagcaggcacaacaccttgccgctggcccattcgctccagcgcttttcccggcgcggctgggtctgggccatgaccacgctgaccccggcatggctgatggcgagcgtcggctgcatctcgttgctctcgtgcgccctgacgaagaaggtggcatcgcgcgccagcttcgccagcaactcgtcgcccatctcgatggtgtagatcggcgacatgtggctgagctggttaccggcgttcagttcgtggatgaacaccttgatgttcgagggcttctcgtggccgatcggtaccagccagttcagcgaccaactgccgcgcgcctggcgcgtgtagctgtagcgcaccggcttgttcggctcgacgccgccttcgaggcggatggtcaggccgtcgctggtgatgctgagggcgttgtcgatggccagcttgagcgcgtcgttgccgccctccaggaccatggagtagtgcagcacgccctggccgttggtgtcggcgatggccgggtcgacgctcatgcggctggaacgcacgccgtccttgaggtcgagcacgcaggccttggcgcattcgttccagaggtcgaaggcttcctcggcggcggacgcgaacgagccgccggcgagcaggccgaggctggcgaccagggggatccaatggggtatcaggtgcatcgcgatggctcctgtgatgggtga

SEQ ID NO: 326309 - DNA, 570 bp, Pseudomonas aeruginosa
atggccggccaagcgttccacggtggaggcgtcgaacagatcggtggcatagtcgaaggaggcccagatgccgttttcgtcttcctgaatatccagcgtcaggtcgaactgcgcagtctggccgtcccaggccaggccttccagacgcaggtcctccaactgaacctcgggcgtcaccgagcgtatctcgctctgatggttgaacagcacctggaacagtgggttatggctggcattgcgctccggctgcaaggcttccaccagttgctcgaacggcaggtcctggtgcgcctgggcctccagcgcgcgttggcgggcctgtgccagcagctcgtcgaagcccatccgaccgtccaggtcggccttgagcacctgggtgttgacgaagaagccgatcagccgctcggtctccacgcggttgcgattggcgatcggcacaccgacacggatatccgcctgcccgctgtagcgatacaacagcgcctggaacgaggccagcaacagcatgaaactactggcgccttcacgctgggccaaggctctcacggcctcgaccagttcccgcgatag

SEQ ID NO: 326310 - DNA, 288 bp, Pseudomonas aeruginosa
gtgctggaccagcaccagtacatggtcgtcctcggccagttgcaacaggttcacccgcagcagcggcccccgttccaggtcgaatggctgcacaacgatggcctgtatccgttcgatcaggccttcttcaccgaactgttcccgctcgatggaaacgctaaccgcaggttgtacctgctggtacgaacgccctccctccagccggaagcgggtacgcaaggtttcatgccgcgcgaccaggctgtcgaagctgcgttgcaaggcatccacgtccagccgcccgcgtag

SEQ ID NO: 326311 - DNA, 324 bp, Pseudomonas aeruginosa
atgttctccgccgcgcacttgaggatgtgcgagccgaccggggtggaaccggtgaaggcgatcttggcgatgcgcttgctggtggccagggcctcgccggcctccctgccgaagccctggacgacattgagcacgcccggcggcagcaggtcgccgatgagttccagcagcacgcagatgcccagcggggtctgctcggccggcttgagcaccacgcagttgccggcggccagcgccggggccagcttccaggcggccatcagcagcgggaagttccacgggatgatctgcccgaccacgcccagcggctcatggatgtggtag

SEQ ID NO: 326312 - DNA, 933 bp, Pseudomonas aeruginosa
gtgctgggcgacccggactcggccgtcggcctggccgcggcgcgagtgctggcggtggacctggcacggcaactgcgggttgcggtgcccgcgccgctggccgcccaggccgagacggcgacgcagcgcctgcgtgaggccggcttgccgttcaccgatgccttgctggcctctcgctcggccgtggacggccagcaggccagcgctctgctgcaacgcctggcgccggcgcaatcgaccctggaacgcgccctggccctgacctggctgcagggcgccctggcccaggcgccgcagggcaagctgccgcagccgccgaaggactggcaggcgcagcgcggcgccaccggcgaaacctactggcaatggcgcggccgcggcattccgagctggatcgacctggacgaggcgccggcccggccgttgccggttgcgctcagctaccgcagcgcccaggcgccgagcgggcaactgccggtgcagatcagccgtcgcctgctgcgcctggtgcccggcgagggggcgttcgagttcaaggtcgaggaggtcggcgacaagccgctttccagcgacgaactgtatctcgacgaagtgaccctgaccgttccggaagacaccgctctacgctacggcatgctggaactgccgctgccgcccggtgcggatgtcgagcgcaccacctggggcatcaagatcagcggcctggccggcgacgaggcgaccaccctggagcgcgcgcgcaacgaaccgggtgagctgttctacggagtgccggtggacagcctgagtggcgagcagcgtttccgtcacctggtgcgtttctcccagaaaggcagcttcaacctgccaccggcccgctacctgcgtctctacgcgccggaacagcaggccctggaagccaagccggcgctggccaaggtcaaggtcgagtga

SEQ ID NO: 326313 - DNA, 1200 bp, Pseudomonas aeruginosa
ttgctctacctgtcccagggcattcccatcggcctggccatggacgccctgcccaccctcctgcgccaggatggcgcgccattgcaggcgctggccttcctgcccctggtggggctgccctgggtggtcaagttcctctgggcgccctgggtcgacaaccattggtcgcgccgtctcggccggcggcgtagctggatcctgccgatgcaatgcatcgtcctcgcctgcctgcttggcctggcgacgctcggcctcggcgtggccagtgccggttgggcggtcggcctgctggcgctggcttcgctggccagcgcgacccaggacatcgccaccgacggcatggcggcggagcacttcagcggcgagctgctggccaaggtcaacgcggtacagatcgccggggtgatgatcggcttcttcggcggcggcgccggcagcctgatcctcgccgggcatttcggccagcgcacggcgttcctggtcatggcctgcgtgccgctggcaagcctgtgctgcgtgctcgccctggggcgcggcgacccccacgaactccccccggcaccggccgccaaggccagcctgctgcgcttcctgcgtcggccgctggcgccttcgctgctggcgctggcactgctgtcggcgatgaccgcggtgtccggcttcggcctgtccaagctgtacctcagcgatgccggctgggccttgcaggacatcggccggctgggcatgagcggtggcctggtcacggtattcctcggctgcggcggcggcgcctggctggtcaggcggatcggcctgtggcgcggtttcgcccttggcgtggtgctcgccggttgttcggcgctgctctggtatctgcaggccggtcgctggttggcactgagtgaaggattggcgtggacctgcgtgctgatcggctcgctggctaccggcatcacctcggtggcgatcctcaccgcggcgatgcgcttcgccggccagggcggccaggccggcaccgatgtcaccgcggtgcagagcacccgagacctcggcgagatgctggcgtcttcgttcctggtcagcctcaccgcgcagatcggctatgccggcggtttcctcaccggcagcgccctggcggtgctggccctgctgctcgccctgcgcctgcaggccggcgaggggcgcggggagtggaaggggcgggcggaagaggcctga

SEQ ID NO: 326314 - DNA, 534 bp, Pseudomonas aeruginosa
gtggacctggccttcgacgccagccagcggctggtacgcctgctgcgcggcgagatcttcgtcgatagccgcgccgacccgcgtccgttccgcgtcgccaccgccgaagcgcggctgcatgccggtgccgcccgcttcaacgtacgccaggagatggccgcgacccgggtcgcggtactcgccgggcgggtcgaactgagcccgctccacggacgcgggcgctggctggaaagcggcgagtcggtgcgcctgggcgccgacggcgaagcgcgccggctggccttcgacggcctgccggacgcctggacccgcggcatgctgatggccgaccggatgccgctggccgaggtgctcgccgaactcgcccgctaccgtcgcggcttactgcgctgcgacccgcaactggccaggctggcggtgtcgggcgcctatccgctgctggacctgcggcgcacgctgggcatgctgcaggccacctatccgctgaaggtgcgcggggtgaccgactactggatcagcctggtgccggcgtga

SEQ ID NO: 326315 - DNA, 468 bp, Pseudomonas aeruginosa
atggcgaaatcctccgaacgattcgaatccctgcgccgggatatcgacgcactggcccgccggctcgacgtgccgtcggtgctgatcatgcgttccctgccccggcacatgcgcgtcgaggcctccgccggacgcctggaggacacctacccgatcggcgccgaaggccgcaagagcgtccatgaagacggcgcccaacccctctactgcgaacgcgtggtcgaccacgacgccccgttgcacgtgcgcgactcgcgccaggagacggaatgggccggcaacgaggatgaagtcgagttcggcctgagcaactaccttggctatccggttcatacgcccgacggcaccccgtacggcaccgtctgcgtactcgacagccgaccgcgcgactattcggccgaggaacgggccctgctggaagaattgcggcgcaaggtcgaggcgctgctggcggaaaccgtctcatga

SEQ ID NO: 326316 - DNA, 468 bp, Pseudomonas aeruginosa; identical to SEQ ID NO: 326315

SEQ ID NO: 326317 - DNA, 618 bp, Pseudomonas aeruginosa
gtgctgatttgggcggcctcacagatcgtggaggcgaaggatgcgggcctgcggccttcgcggctgatccgtgcgacgccctacgagatcctgcgcttcatcgggcgcggcaagtcgctgcgcgactaccagcgcctcaaagcggccttggatcgcctgcaatcgaccacggtggccacgtccatccgcgagacaaccgggcggcgtttgcaccgcttctcgtggatcaacgaatggaaggaactggccgatgccagcggcacaccgctgggcatcgagctgatcttgccggactggttctatacgggcgtgctggatgccgccctggtgctgaccatcgacccggcgtatttccggctgaccggcggcatcgagcggtggctgtaccgcctggtgcgcaagcacggcggcaagcaggcatacggctggcagttcgacttccgctacctgcaccagaaatccggcagcaccgccaagccctacgacttcgcctgcgacctgcgcgcgctcgtcgcgcggcagtcgctgcccggctatgtcctgggcatcgaacggatgccggacaacggcatggaactgctgaccttccggcccgtgccgcatacggcacggggataa

SEQ ID NO: 326318 - DNA, 1032 bp, Pseudomonas aeruginosa
atgagcatcaccaagaacgacaagaacacgcgaaccaccggacgtcccaccctcaacgaagtcgcgcgccgcgccggggtcagcccgatcaccgcgtcgcgcgcgttgcgcggcgtcgccagcgtcgccgaagaactggcgcagaaggtccgcgacgccgcccgcgaactcggctacgtggccaaccccgcggcgcgcgcgctggcctcggcgcaaagccacagcgtggcggtgctggtgccgtcgctggccaacctgctgttcatcgagaccctcgaggcgatccacgcggtactgcggccgcagggcctggaggtgctgatcggcaactttcactactcgcgcaacgaggaagaggacctgatccgcaactacctggcctaccagccgcgcggcctgctgctgaccggcttcgagcgcaccgagagcgcccggcggatgatcgaggccagtggcattccctgcgtgtacatgatggacctggactccggcgccgggctcaattgcgtcggcttctcccagttgcgcgccggcgaggccgctgccgagcacctgctggcacgcggccgcaggcgcctggcctacatcggcgcccagctcgaccagcgcaccctgctgcgcggcgaggggttccgccgcgccttgcaaaaagccggctgctacgacccggggctggaaatccttacgccgcggccgtcctcggtggccctcggcggcgaactcttcgtgcagttgctggccagccagccgcaggtcgacggggtgttcttctgcaacgacgacctggcccagggcgcgctgttggaggccctgcgccgtggggtcaaggtgccggaacagatcgccgtgctcggtttcaacgacctgccgggttcggactgcacggtcccgcgcctgagcagcatccgcaccccgcgcgaagccatcggccggcgcgcggcggagcagttgctggcgctgatcgccggcaaggaggtgcgcgatagcgcgctggacatggggttcgagctgatggcgcgggagagcacctga

SEQ ID NO: 326319 - DNA, 666 bp, Pseudomonas aeruginosa
atgcgcccgccgttgggcatggcgtcgcgggcgttggtggcaaggttgatgatggatagttcgagctggttggcgtcggtcaggccgaggtcgagatccaggggaaagcgcgtctcgatcgatacgctcggtcccagggaatggatcagcaggtcggtcatcccgcgcagcaggtcggggatcgcgcagggctgcggatcgagacgctgcttgcgggcgaaggaaagcatccgctgggtcaggttggcgccgcgctgggcggcctccagggcgttctgcaagaggtcggcggtgcgctggtcgccgggcaggcgtttcttcagcagcccgaggctgccgatgatcaccgtcagcaggttgttgaagtcgtgggccacgccgccggtgaggtgccccagggactccatcttctgggcctggaacagctcctggcgggcccgttccagttcgcgttcggcttcgatccggtgggtgatgtcacgggttaccttggcgaagccgatcagccggccatcgctgtcgcggatcggatcgatcaccacgttggcccagaagcgactgccgtccttgcgcacccgccagccttccttctcgaaacgcccttcgcgttcggcggcggccaggccgcgggccggttcgccggcctcgcggtcttcgggggtgtag

SEQ ID NO: 326320 - DNA, 798 bp, Pseudomonas aeruginosa
atgggcccagcgtgcgtgctgccggctttgcagcaggttctggctgaagcggatcacgcagatgccccagatcgccagcagcgccaggcggtcaagccaccagggcaccgcccgctcgggccagaaatactcgaaaccatggccgctgatgctcagggtcagcaccagcgcgctggcagcggtcagcacgtaccagaaataggcgcgatcgcgcaggctggtgaagaggaacaggttgtacagcagcagggcgaggatcagcccgtaggccatgccgaacagcaggttgccctggctgcggtattccagcagttcgtcgtggctccagagcctcagcggaaaggcgttgccgccgggatcgtagctgcgcaggtagacgcgcaacggcccatcgccgggagggagctggaacagcggatgacgataggcgtggtcgcggccctcggcgaagggcaccgcttcgccgctgcgatgttcgcggaacccgccgcgctcgtcggggaggtacaggcgcaggtcgtgcaggctggcgctggcgacttccagccaccagccgccggataccgcctcgcgtctcggcaggtcgaggcgcagccaccagacgctgcgactgaggccgacgctggtgcggccggcggcggcgacgaagcggccggcctgctccgtttgttcgaggtcctccaccgccaggttgccatcggggtcttcgagcaggtccagcgagccgttcaaccaggcgccgctggccgggggcgctggaaactccggcgcggcgcgcgaaacggcgctggccagtag

SEQ ID NO: 326321 - DNA, 450 bp, Pseudomonas aeruginosa
atgcccactcccccctggtggctgttcgtcctgcccctgctcgccggcgcctgcctgccgctgcaggcggggatcaacggccagttggccaagcaggtgtccagcgtcctcgccgcggcactgatctcgttcttcgtcggcaccctcgggttgctcgccctgaccctctcgcagcgcgagtttcccggcctggcggcattgcgcgggctgagctggtggcactggtgcggcggtttcctcggcatgttcttcatcttcatcgccgccttcgccgcgccgcgcatcggcgcgctgatgttcatggtgctggtgctcgccggccagttgggcatggccgtgagcctcgaccacttcggttgggccggcttccgcgaggcaccgatcagcgcgctgaaactgggcgggttggcactgatcggcgccggcatctggatgatccgcaagggctga

SEQ ID NO: 326322 - DNA, 363 bp, Pseudomonas aeruginosa
atgtaccgcgacgcccaagagcggtggaagaacacgctcaacggcttgcagaccaccatgcagatgcaggcgcaggtgtcgcagaacctgggcgaagacgaaagcgtgctggccgatctggtcggcaagagccagtcagcgcaaggcgcgctgcaagcgatgcaggccatgaaccagttgctcgccttgcaggccaagcagtcgatccagtcgcagcggctccagatcacgcaagaccgggccgcctcgctggaactggcgcggcaggcggcggccaccgagcgcgcccgcgaagtgcggcggcgcttcctcggggaaggcacgccgtacacgccgcagtccgtcaacttctaccgcgactga

SEQ ID NO: 326323 - DNA, 321 bp, Pseudomonas aeruginosa
atgcgatgcgtcctcgtccttggtgccgtgctgctggccgcctgcggcgagcagccggccgacaacctcgccgatgccctggccgccgatcccgtgcggctcaaggcattgcgcgcgcaatgcgcggccgaccggcaggccacgggcgaggacgcttgccgcgccgccgccgaagccttccggcggcgcttcttttccggcgaggccgggccggatgaataccagacgctggccgacctgccgccgatctcgcccagcttcgaggaaccggccgatggcaccgcgccggccttgcccgccgccccggagggcacgccatga

SEQ ID NO: 326324 - DNA, 189 bp, Pseudomonas aeruginosa
gtgcgctggacggaacgtcgctacgtcaacggcgccgccgccgggctggagcggtggacggctgtggtgtccatcgtgcagcagacccctcgcaccgaagaacgcctgcgccacaacccgctgggcatctacgtcaatggcctgtcgtggagccgcgatctggattcttccgaaggagccaagccatga

SEQ ID NO: 326325 - DNA, 810 bp, Pseudomonas aeruginosa
gtggtctgctcagctttcgatgtggcgcggtcttgctactacgtccaccgtcttcgacggcggcgtgtcgatgctcgccgcgtggcgctacgcagccaagtcaaccagttgttcagccagagtcggggctcggccggcagccgcagcattctgggcatgctgcgcgaagagggcgtgaccatcggccgtttccgagtgcgtcggttgatgcgtgagctgggcctggtcagcaagcaaccgggctcgcacgcctacaaacaggccacggttgagcggccggatatcccgaatcggctgaaccgcgaattcgcgaccgagcatcccaatcaggtgtggtgtggcgacatcacctacgtctgggcgcaaggccgttggcactacctggccgcggtgctggatctgctgatcggctgggcgttctcggccaagccggatgccgaactggtgatcaaggccctggacatggcctacgaacagcgcggcaggccacagcaggtgctgttccattcagtccagggcagccagtacgccagccgcctgtttcggcaacggctctggcgctatcggatgcagcagagcatgagccgtcgggggaattgctgggataactcgccgatggagcgcctgttccgcagtctgaagtcggagtgggtcccgtcaacgggttacctgacggcgcaggaggcccaacgggacatcagtcattacttgatgcaccgctacaactggatcaggccgcatcaattcaacgacgggttaccacctgcggtggccgaagaaaaactcaacccactgtccgggatgggttga

SEQ ID NO: 326326 - DNA, 249 bp, Pseudomonas aeruginosa
gtgttccggcctgcgctgcgcgcggccttcgtcatcaatcggcgcgtcagcaccaccatcatcggcagggaagcacggcaatcgctggccgaacagccgctgccggcgctgcgcagcgaagtgcgccagcgcatcgtcttcgcggacagcgtggccgctggccggctcgcccgcgagacggcgcccgacagcgccgccgcacgcgagatcgccgtgctcaccgatgaactgctgcggtggccgacatga

SEQ ID NO: 326327 - DNA, 228 bp, Pseudomonas aeruginosa
atggaaagggccggcggtcgccagcgcaacgacctgcgtgccgtggcgagcgagggccgccagccggtcctggcgatctggggcagcgatgacgcgatcatcccggcgcggcatgccgagggcctgccagcccaggtggagatcattcccggacaggcgcacatggtgcagatggaggccgccgagcaggtcaaccgcctgctgctcgacttcctccgccagcattga

SEQ ID NO: 326328 - DNA, 204 bp, Pseudomonas aeruginosa
ttgcactccaccgccgacgcgaacatcggctcgatcttcggtatcggtttcgccgcctggagcgggggcgccttgcagttcatcaaccagtacggcctgaaggacttcatcgcccgcgcccaatacctggtcgaacagtacggcgagcgcttcgagccgccggcgctgttgctggagaaggcggcgaagggcgagctgttctga

SEQ ID NO: 326329 - DNA, 570 bp, Pseudomonas aeruginosa
atggagaccttctggctgcacctcaaggcactcctcggcttcatcggcctgaccctggagaccctgttccgcagcctggtccgcccggccagttggcgggtcacgccgctggtggcgaacatcgagaagagcggcctggacgcggtgccgatcatcgccctgctgaccttcctggtcggcgcggtgatcgccttcctcggcgccacggtgctggccaacttcggcgcgaccatctacacggtcaacctggtggtgttctccttcctccgcgagttcgccgtgctgctcaccgcgatcctcatggccggccgcaccgccagcgccttcaccgcgcagatcggttcgatgaaggccaacgaggagatcgacgcgatccgcgccctcggcctcaaccccatcgagctgctagtgctcctgatcgccgtgatcggctgcctggaaggcttcaaggtcagcggcagcgcccagtcggtgggcgagcacaccaccaccagcgtggtccactcgatcttcgtggtgatcctgctcgacgccctcgccgcgctgttcttcatggagatgggctggtga

SEQ ID NO: 326330 - DNA, 441 bp, Pseudomonas aeruginosa
atgttcgccctgcaggtcgatgaagctgccgatcaggcgcaattgcacgtccagcccggggttggccttgaggaagtcggcgatcgccggggccaggtggcggcggccgaagggcaccggcgcatcgatacggatcaggccctgcggcgcggtgctcagggacaccgcttcggcgcgggccaggcgcagttcggtgacgatccgccgggcgcggtcggcgaaggccaggccggccggcgtggcgcggaccgcatgggtggtgcgcaccagcagggtgctgccgacggcgcgctccagggcgtccatccggcgcgctacggcggacggggtgagcgggtgcttgcgggcagcggcggagaagctgccgccatcgaggacatcgaggtagagaacgaactgttcgctgagggtatcgggcaacatgctcatgcctttgcgtga

SEQ ID NO: 326331 - DNA, 525 bp, Pseudomonas aeruginosa
atgccaccatcgtcggtctaccacttcttccccagcgtgccggccctgctccaggggctgaccggcgaggtccacgccgccttccgcgcgtgcctcgaacagccggtggaccatgcaggcctgcgctgctggcgcgacctgtcgcggatcgtcgaggagcgcatgctggcggtctacgcccgcgacgcggcggcccgccaactgattctcgccagccacggcctggccgaagtcacccaggccgatcgccaacatgacgtgcaactcggccaggccatgcgcgccctgttcgagcggcatttcctgctgcctccgctgccgaccgatatcgagatcttcagcctggccatggagctaggcgatcgcgtctacgcattgtcggtacagcgtcacgggatcatcgacgcacgcctggcggaagaaggcatgcgggtgttcgacgcctacctggggctctacctgccgccgatcctggaaaagcgtagtgaaccattaaccggatttatatccgatttaaatcgatag

SEQ ID NO: 326332 - DNA, 336 bp, Pseudomonas aeruginosa
ttgaatacccagatcgaaaacacaaaatcccgcttctgttctctgaacaccttcgacgctctagcgagcttggctctatatcacacagagaccaacctacgcttcccttaccctgagcattcagacagctctgtagctgagtatctggcccttgtgtatgagcgcctgattgcggtctctgccgctgccgggatcactgccgagaacgccgcccagctactcgacagaaaggttagcgaggtgcgaaacaagctggaggttagcgagcgtaagaaccttgctgaattcaacgaccagctagcctcccgcctagcctatggccgtcaaaactcgtaa

SEQ ID NO: 326333 - DNA, 384 bp, Pseudomonas aeruginosa; identical to SEQ ID NO: 326250

SEQ ID NO: 326334 - DNA, 351 bp, Pseudomonas aeruginosa
gtgcgcggcggtttcgctggccatggcccagaacaccgggagcgccagggccgggacgaagcgcgccacggccatcgtccagatatcgccggccacggcggccagcgcattggccgcggcgaacagcagcaggcaggcgacgaacagccgcttgcgttcgacgcccgccagcgcggcggtgaggaacggaccgaaggcggcgacgctgaaggcgaacaggctgaccagcaggccggcctgggcgacgctgacctggaggtctgcggcaagcgccgggagcaggccgacgatgacgaactcggtggtcaggatggtgaagccggcggcggccagcaggaggatcggcaatag

SEQ ID NO: 326335 - DNA, 285 bp, Pseudomonas aeruginosa
gtgatcgacgtcgcctgcctcaagccgctcgacctcgacaccctcgaagcttcggtgcgcaagaccggtcgctgcgtgatcgtccatgaggcgccgaagagcggcggccttggcggggaaatcgccgcgagcctctacgagcgcgtcctgttcgatctgcgggcgccgatccagcgggtcgccgcggccgatatcccgccgccgctgtaccgcctggaaccgctgtacatgcccgccgtggaggacatcctggcggcctgcgacaccgtgctcggctacgcctga

SEQ ID NO: 326336 - DNA, 255 bp, Pseudomonas aeruginosa
gtggccggcgccgtcggcggcggctacgccggcaacaaggtgcaggaaggcatgcaggagcgtgacacctacaccacaaccgaaacccgctgcagcaccgtgcatgacagcagcgagaaggtcgtcggctatgacgtgaagtacatgctcgacggcaaggccgggcagatccgcatggagcgcgatccgggcagccagatcccggtcgacaagaatggccggctgatcctcagccagggcgaaacgctgcgctga

SEQ ID NO: 326337 - DNA, 192 bp, Pseudomonas aeruginosa
atgggcccggatcgcgccgcctactgcaccgtgctgttcccggtggtggcgctgaacatctcggccttcgccgagggctaccgctggaccgcaccggcgctggccgggctggtcctggtgatgctcggcaacgtcttggtgttccgcaagccgaaggcgccggcgctggccgggccggcgcgctcgacctag

SEQ ID NO: 326338 - DNA, 282 bp, Pseudomonas aeruginosa
atgatcgaaggcgaggtggccaagctgaccagcgaccgcgaggtgcagggctggctggagcgcgagctgaacaagccgctggatccggccgagatcgcccgtgccgcgagcaccccggagatcgccgcggagatgtacctggccagcctgctgatggtcgacgaggaaagcttcatggagcgctcctacctcgaggagctggcgcggcagctgcgcctggagccgtcgttcaagctggagctggagaaccaggccagacaggcgctgcagcgcctggcctga

SEQ ID NO: 326339 - DNA, 192 bp, Pseudomonas aeruginosa
atggatccctcggtgctctacgccaatccggcggcgatccgcgccgaagtcgcgcggatcctggcggcctacggcaagggtacggggcatgtgttcaatctcggccacggcattaccccggaagtcgacccggcccatgccggcgccttcttcgaggcggtgcacgagctgtcggcgcagtaccacggctga

SEQ ID NO: 326340 - DNA, 147 bp, Pseudomonas aeruginosa
gtgctggaactgatcggcgaagccaagggcgccggcgccgcgttgatcggcatcttccacgaccgcgccgcccgcgaggcggtggccagccgctacctggacatgagccaggagctttcccgccaggagcaagcccatgtcgtctga

SEQ ID NO: 326341 - DNA, 1395 bp, Pseudomonas aeruginosa
atgaccgcgctgcacgacctcccgggaacccgcctgctggcactgttcgcccgccgggaactctcgcctggcgagtactacgagcatctgctggcccacatccagcgctgggaaccgcatctcaacgcgctgtatcgcttcgacccgcaacggattcgcgaacaggccgcggcggccaccgagcgctggcgcaagggacagcccaaaggcccgctggacgggctgccggtaaccatcaaggagctgatcgccaccgctggcgaacctatcccattgggcagcgccgccaccgccctgcaacccgcgccctgcgacgcgccgccagccgctcggctgcgcgaagccggcgcgatcgtcctggccaagactacggttccggacttcggcatgctctcatccggcctctccagcttccacggagtcacccgcaatccctggaacctggccaacaataccggcggctccagttcgggcgcggcagcggcggccgccgccggctacggaccgctgcacctgggcaccgacatcggcggctcggtgcgactgccggcgggctggtgcggcctggtgggcttcaagccaagcctcgggcggatccccatcgacccctactacaccggtcgctgcgccggtccgatgacccgttgcatggacgactgcctgctgctgatgcgctacctcgcgcagcccgacgcccgcgacgccaccagcctgccgccggaagcgctggactggagcgccgagccgctgtcggtgcgcggcctgagggtcggcctgcaactcgaccccggctgcggcctgcagcccgacgcggaaatccgcgccgcgatcgaggccgcggcgcggctgttcgaggagcacggcgcccagctcaggatcgtcgaaccgctgatggaccggagcctgctcgacggcctgaacgacttctggcgcgcccgcctgtggagcgaactgctgctcctcgacgagacgcggcgggccagggtgctgccctatgtccacgcctgggccgagggcggcgcacgggtcagcggggtcgatgcggtgcgcggtttcaaccagaccttcgagatgcgccggcgcgccgcccggctgttcggcgagatcgacctgctgctgacgccgaccaaccaggtcgaggccttccccgccgactgggcctcgccgctgaacgatccgcagcggccgttcgagcacatcgtcttcaccgtgccgtggaatatgggcgaacagcccgcgctctcgataaactgcggcttcacggccgccggcatgccgatcggcctgcaactggtcgcgccgcgcttcgccgatacctggctgttgcgcatcggcaagacctacgaaggctggcgcggtccgatccacggctggccccggccgccggctgactga

SEQ ID NO: 326342 - DNA, 639 bp, Pseudomonas aeruginosa
atgggcaactatttcgagagccccttcaggggcaagctgctctcggaacaggtcagcaacccgaacatacgggtggggcgctacagctactactccggctactatcacgggcattccttcgacgactgcgcccgctacctgatgccggaccgcgacgacgtggacaagctggtcatcggcagtttctgctcgatcggcagtggcgccgccttcatcatggccggcaaccagggacaccgcgccgaatgggcgtcgaccttccccttccacttcatgcacgaagagcctgccttcgccggcgccgtgaacggctatcagccagcgggcgacacgctgatcggccatgacgtctggatcggtaccgaggcgatgttcatgccaggcgtacgggtcggccacggagccatcatcggcagccgcgcgctggtgaccggcgatgtcgagccctatgccatcgtcggcggtaacccggcccggaccattcgtaagcgcttttccgatggcgatatccagaacctgctggaaatggcctggtgggactggccactggccgatatcgaggcagccatgccaatgctgtgtactggggatatccccgccttgtaccggcactggaaacagcgccaggccacggcctga

SEQ ID NO: 326343 - DNA, 639 bp, Pseudomonas aeruginosa
atgaaaaaggaaccgaaaggagcaaaaaacaggatagtcatcgccaaagatgagaagaacgttctgacctgcaccagcgaagggttcgaatatacgccagacatcgtcaagaacgtctacggaaagagcagccgacccgcactggaagactggttcctgacggaacttgatttctttcgcaggtattacccgggatacgaggttttcaccctcggctccagttgtgtcttcggtgaaaagttcgtgaactacctgaccatctgcgaattcgacatagacagtacctacgccttcgactgtctcaagaaggccctgagggagtccgaccaggccattaggcggaaactctccgccatgtggaaatgggacatagccgccaggaaggactggagcatcgtcttcatggttgggcacatggacttcgcctacttcctccagcacaggaaggagttccagggggatgcccataagcgcttcatgagtacattcaccacggcggagacgaaaatcacctctcgcgactacaaggtcatgcatgacggcgcgatcctgcccttcgacgaaacggccctgtcgccggaagacaggttcattttcgagaactatcaaaagataaagttcgaaaccacgccactatga

SEQ ID NO: 326344 - DNA, 234 bp, Pseudomonas aeruginosa
atgaccgtattgatttctggatacctagcatcgggaaatgatgactccttgaagtatgaaaaggccattccttccggatgcatctcgcaagttatggaggtgatgcgctggaagaaaggggagaatattgaaggtgaatatcccgttaaggataatgatgtcgtaaggattgaggagattctaggcgaaaaacttccgcttggattggagtattttattggggtttacgcctag

SEQ ID NO: 326345 - DNA, 156 bp, Pseudomonas aeruginosa
atgcacccgttgccgttgtcccttcgcctgttcgccgtcgcattctggctgggcgtggtcgccgtggagttccttctcgaacgcagccgcgccgaaagccgcgaccggggtttcgccgggagaccgccaccaaggccgacagctttgccggggtga

SEQ ID NO: 326346 - DNA, 1932 bp, Pseudomonas aeruginosa
atgcatagcaagagcctgaaatacaggcctgacatagacggactacgcgccatcgcagttattcttgttctcctattccacttcgaccttggcgtcggcggtggatttataggggttgacgtattctttgtaatatccggatatttgataacagaagtaatacggaaaggcgttttacaaggtacattctccttcacatctttctttgcaagacgattgcttaggctgcaccctgcgctaatagtgacggtggctgcttgcctagccattggataccttctatttgacccggcgtcattttcaaaccttgcaaagtcagggcagtacgcgctattttcagtatcgaacatttatttctggattaatcaggattattttgacccgtcagctcatacgcaacccttattgcacacatggtccctagctgctgaatggcaattttatttggtgtggccattcatcgtatgggcctccctgaaagtatcagagcgattctttgttgccgttctttcattacttacagcaggatccctagtagcctcacagatttggctaagtcacgactcttcggcagcatattttctaatcccttttagggttttcgaactttccgcaggggcgcttgtcgtctattttgagcaccataaaaaaaccgaatcgcaagcatctattatattcttcatcggactcgctttgataataatgccggcgctgttgctcgactcttcctcaccattccctgggttcagggctgctctgccgtgccttggagctattgtctgcatatattcaggagagtcgacggctgccgcaattctgcgcatgcgacctgtagtatacgtagggctaatatcttactctgtatacctagtccactggcctttaagtgttttctataaatattacatgttcagagacatagtgttttctgaaaaaatctcccttcttgtaacttcgttaatacttggtgcgcttcttcaccatttgatagagaagaggttcatcacaaaggtcaggtcacttagaattgcgggatatggagcaatagcttttacagttgccgggtgtttctatagtgcaaaagcggtaatcaataataatggacttcctcagagaataccagaatcatacaggtcgcttatggaaaacccggccgaataccacaaattaaactatggtggatacggatttccgctagaggcttttctgggtgacaaaaaaggtgaagcagtagcgataataactggggatagcttcgcccttcagtacgctactggtctagacaaggctcttcgtaaagacggctcatacatgcttggattctttaggcatggatgcgtgatctctggggagtacacacgtatcctcaatggagtccctagaaacgactgcaaagccacatacaataacgtgattaacgctcttcaaggaaataatctaccactaattatttctcaatcctggggtggatatagtggtcagatatcaaatagaaatggggagaatgtcgaattaaaagggacctcgagaagagacataataatcgattggcttgaaaaaatcagagaggacataggagatcgagacttatacatcgttggcggtcagccatttaagtcaaacagcttagacacagcttcatgcctaatgcgcccgtcctatatacatcagagatgcgaaagcattatctcgtatagaaagtcagactcgaaatcagaagaaacaaattcaatattgattgagtttgctagaaaacacaaaaaaacgcacttcgtagatgtatcaccctctctctgcagcaacggttcatgcactccgttcagggacgggaaaatactatactcagaccctactcacttatcgaaggaagggtctgacatagcgagtttagagataataaaaagcctaaacaagaaaacatggccgcgatag

SEQ ID NO: 326347 - DNA, 1200 bp, Pseudomonas aeruginosa
atgccgcgtgccgccttctggatcctgctgtccggagccctgatcctcgccctgtccctcggcgtgcgacatggcttcggcctgttcctcgcgccgatgagcgccgacttcggctggggccgcgaagtcttcgccttcgccatcgccttgcagaacctggtctggggcctggcccagccgttcaccggggcgctcgccgaccgctacggcgcggcgcgggcggtgctggtggggggcctgctgtacgccctcggtctggtcctgatgggactctcgcagtcggccagtgggctgtcgctgagcgccggcctgctgatcggcctgggcctttccggcacctcgttctcggtgatcctcggcgccgtcggccgcgcagtgccggcggagcagcgcagcatggcgatgggtatctccagcgcggccggctccttcggccagttcgccatgctgcccggtaccctcgccctgatcggctggctgggctggtcctcggccctgctcgccctgggcctgctggtggcgctgatcgtgccgctggccgggctgatgaaggatcgcccgttgccgccgcagggccatgaacagagcctcggcgaagcgctgcgcgaggcctgcgcgcattccgggttctggctgctggcgctgggcttcttcgtctgcggcttccaggtggtgttcatcggcgtacacctgccggcctacctggtcgaccagcacctgccggcgcaggtcggcaccacggtgctggcgctggtcgggctgttcaacgtgttcggtacctacatcgccggctggctcggcgggcgctggtcgaagccgcgcctgctgaccgcgctgtacctggtgcgcggggtagtgatcgtgctgttcctctggctgcctctgagcgtctacagcgcctacgccttcggcgtggccatggggctgctgtggctgtccacggtgcccctgaccaacggcaccgtggcgaccctgttcggcgtgcgcaacctgtcgatgctcggcggcatcgtgttcctcttccaccagttgggcgccttcctcggcggctggctgggcggggtggtctacgaccgcaccggcagctacgacctggtctggcagttgtcgatcctgctaagcctgctcgcggcgctgctcaactggccggtgcgcgagcgtccggtggcgcgcctgcaggtggccggaggcgcggcgtga

SEQ ID NO: 326348 - DNA, 1275 bp, Pseudomonas aeruginosa
atgaaaacaatatggtttaaaacctctctcgcactgaccattagcgctgtctccacctacaccctcgccaacggcatcgccatcaacgaacagagcgccagcggcgccggcaccgcgtacgccggccgcgcttcgtccgcgctcgatgccagcaccatctacggcaacccggccggcctgtccaagctgaaacgcaccgaagtcagcggcggtctggccatcgtcaaggccaaggacgacatcagccaggcccacagcaccgcccagggcagcaacaagggcgactcggtaccgctggccgccgtaccgttcggctacttctccacgccgatcaacgaagatttcactttcggcctgggcatctacgtgccctacggcatcatcaacgattacgaaaacggcttcatgggcagctcccacggctcctatagcaaggtgcaggtgatcaccgtgcagccgaccatcgcctggaagatcaacgacaaggtttccgtcggcttcggtccgaccttcaaccgcatcgacggccagttgaagaacaccctggccaccaatggcctgctcggcagcaacggcgataccaagatcaacatcaagggcgacgacaccgccatcggctacaacgtcggcgtgatggtcgacctgaccgacgacaccacctggggcctgacctaccactccaaggtcaagtaccacctgggcggcaacaccgaagtgaagaacgctccgggtgccctgggcctgaacggcaagtacgatgccaagctggacatcaccctgccggaatcggtggatacctccatcacccacaagttcgacgacaagtggacgggctacctgggcgccgtctggacccgctggagccgcctggagaagatcgaggtgcgcaacagcggcgtaccggcgctcggccaggccctgggcttcaacaccatcggcgaagacctgaactggcgcgacacctggtccttctcggtaggtacctcctaccaggccaccccggagtgggtgctgcgcaccggctttgcctacgagccgtcgccgacctccaacgaggaccgcaacgtgcgcatcccggtgggcgaccgcaaggtcttcaccgtcggtgccggctggtcgccgaaccaggacctgaccgtcgacgtggcctacgcctacctgtgggaaaccaccgccggcgtcaaccaggaaggcagcgccctgcagccggcctacagcgccaagtacgacaacagcgcgcatggcctgaccgcccaggtcacctatcgtttctga

SEQ ID NO: 326349 - DNA, 780 bp, Pseudomonas aeruginosa
atgaaacagaagcgaatcctggtgaccggggccggcagcggcttcggtcgggaagtggcgttgcgcctggccgcccgcggccatcggacgatcgccggcgtgcgcggcgccgggcaggccgccgacctgcgcgaaaaggccgggcggcgtggcgtcccgctgcgggtggaaaccctcgacatcaccgtcgccgccgatcgcgaacgcgcctgggaatgggatatcgacgtgctgctgaacaacgccggcagcgccgaggccggggccagcgcggagatcccgctggaactggtacgcgcgctgttcgagaccaacgtgttcgccaacctggaactgacccagggtttcgtccggcgcatggtcgagcagaagcgtggcggcaaggtgctcttcgtgtcgtccatcgccggcctgatcaccggaccctataccggcccctactgcgcctccaagcatgccctggaggccttcgccgaggccctgcatgccgaactgaagccgttcggcatccaggttggcaccatcaatcccggcccgtaccagaccggcttcaacgatcgcatgatggaaacctggaaacgctggtacgacccgcagcgccacttcaccgaccacagcggcgtgcgctttcccttcgagcagtacgatccggaggaaatgatcgcgcggatggtcgagctggccgaggctgacgaaggcccgttccgcaccctgttgccgcaagctttcgtcgaggtggtgaaggacgagcaagcgcaggcctggcagcgccgcctgtag

SEQ ID NO: 326350 - DNA, 264 bp, Pseudomonas aeruginosa
gtgcccggcagcgccttgccgcgggtgctcggcgaactcttcgaagcgctgcgaccgggcggcgtgctgttcagctccaacccgcgcggcgacaaccgcgagggctggaatggccaacgctacggtgcctaccacgattacccggcctggaaacgcctgctggaggaagccggtttcgtcgagctggagcactactaccggccgccgggcctgccgcgcgagcagcagccctggctggcgagcgtctggcggcgccccgtctga

SEQ ID NO: 326351 - DNA, 849 bp, Pseudomonas aeruginosa
gtgacgggtgccgaagtcgaacgaatagtcgagcgcccccagggagccggcgaagtattgctggaactggccgccgaggccatcgctacccagccgggtcagcggcgaggtggcgctgaggcgggtttccgcacggttctcgccgccggccggacgggtggtgatggagatgatcccgccggtggcgccgctgccgtagatggcgctgctgccacggatgacctcgatccgctcgatcagcgccgggtcgatgttggccaggttgcgcgaggagtcgcggttggtgttcagcggcacgccgtcgaccatcaccagcatgctgcgcccgcgcagggtctggccgtattcggtgatggtgcggctggaatcggacatccccggcaccgccttggccagcacggtggccaggctgtcggagccctggcgcagctcctccagttgggcatgctcgatgacggtggactggcgcgtggcggagaccaggtcgctgctggtgcgcgaggcggtgatttccatctgctccatgtccagcggttcgctgcgggcttgcgtagcgggcacggcggcttcgctggccggaacgacgatgaaggtatgttcgtccctggcctgcgccttcaggccgctatccctgagcaactggcgcaatgcctcttcgggggtgaaacgccccttcagcgcgggcgcctggcggccggcgccgagatcgccagcgaaaaggatctgtaccgaggattgttgcgcgagggcgttgatcgcctggccgagcggcgcggcgggcagatccacgtcgagcttttcctggccctgggccgacaccgccaggagcaggctgctggcgagcaatga

SEQ ID NO: 326352 - DNA, 1833 bp, Pseudomonas aeruginosa
atgaacctcgaactgctctgggtggtcggcctgctcgccaccaccgtcgccctcttcatccacaaccgcctgcgcctggacgtgatcgccctgctggtgatcatggccttcagcgtcagcggaacccttaccctcaacgaagccctggccggcttcagcgatcccagcgtgatactgatcgccgcgctgttcgtgatcggcgaaggcctggtgcgtaccggggtggcctaccaggtcggcgactggctgatcgcccgcgccggcagcagcgaagcgcgcctgctggtactgctgatgctggcggtggccgggttgggctcggtgatgagttccaccggggtggtggcgatcttcatcccggtggtcctgagcatcgccgccaagctgaagatccctccgggccggctgatgatgccgctggccttcgccggactgatcagcggcatgatgaccctggtcgccacgccaccgaacatggtggtcaacagcgagctggcgcgcgagggtcatgccggcttcggcttcttcgccttcaccccgataggcctcatggtgctcgccatcggcgtggcctacatgctgctcacgcgcaactggctgaacgccgccagcccggcggaagtcggcgcgccgaaggcacggcggaccctgcgcgacctgatccgcgactatcgcctggccggccgcgaacggcgcctgcaggtccagctcggctcgccgttgatcggcagcaccctggaagaactgcaactgcgcacccgcctgggcgccaacgtggtcggcctggagcgggtacgcaagctccacagcgaggtggtcaaggtcggcggcagcaccgagctgaaggcgggcgacgtgttgctgctggacgtcttcgcccctccggaggacatggaccggcgctgcgccgagctgaacctggtgcgactgccgttccgcgccagctacttcatcgaccagtcgcgggaggtcggcatggccgaggtgactctgccgccggactccaccctgctcggcaagagcgtcctggaactgggcttccgttcgcagtacgggctcaacgtggtcggcctgcgtcgcgaccacgaagcgctcaccgacggcatgctggaagagaagctgcgcctgggcgataccctgctggtgatcggcgcctggaaggcgatccgccagttgcagggacgcaaccgcgatttcctggtgctcagcctgccggcggagatcgacgaggtggcgccggccctgagcaaggcgccgcacgccctgctcagcctggccgtgatggtggcgctgatggtcagcggggtggtgcccaacgtggtcgcggcactggtcggctgcctgttgatgggcctgttccgttgcatcgacatggacggcgcctaccgcgccatccattggcaaagcctggtcctgatcgtcggcatgctgcccttcgccctggccctgcagaagaccggcggtatcgacctggtggtctcgctgctggtcgacgccctcggcgacgccggcccgcgcgtgctgctggccagcctgttcctgctcaccgcggccatcggcctgttcatctccaacaccgctaccgcggtgctgatggcgccgatcgccatcgccaccgccaagcagatcggcgcctcgccctaccccttcgccatggtggtggcggtggcggcctcggcagccttcatgacgccgatttcctcgccggtgaacaccctggtgctgggccctggccaataccgcttcggcgacttcgtccggatcggcgtgccatttaccctgctggtgatgttcgtctgcgtgctggtgattccgtggctgtttccattgtga

SEQ ID NO: 326353 - DNA, 957 bp, Pseudomonas aeruginosa
gtggcaaagaagggtgttcgagactccggcaccttctccaccaaggccgaggcggtggcctgggcgactcagcgggaggccgagattctggcgggagttgggagccccaaaggggcatcgaacttcactctgaaggaggcgctggagaaatacaaggacgaagtctcacccactaaggccggcaaacgctgggaagagattcgactcgacaagttggtcaatgacttggagttcgtcggcgagcgcatctgtgatatcggcgccgatcagatcgcagcatggcgcgatcaccgattgaagtcggtggccacgtcgtctgtgcgtcgcgaaatgacgttgctgtcgagcgtgttcgagcaggcgcgccgggagtggagatggtgcccgaccaaccctgttcgcgaggtgcggcgcccgaagagccggccgccgcgggacaggcgcatttcggctgccgaggaaaccctgatccttgaggggcttgggtatcaggagggggtagcgccgaccggcaagatgcaggagcttgcctacgcttttctgatcgccctggagacggctatgcggcagggcgagatcctcggcctcgttgctgcccgggtccacttgagggcccgctacgtcgaacttgacaagacgaagaacggcgatgcccgtaaggtgccgctcagttcccgtgcggtaaccttgctccaagttctggtagatgctgctgggaagcgccagaacctgtttacgctgacgtccggctcggccgataccctctttcgaaaggtgcgggacagacagaaaatcgacgggctgaacttccacgacacccgtcacgaagccaccaccaggctcgccaggaagcttgatgtgctcgacctggcccggatgacgggacaccgcgacccccggtcgctcatgatctactacaatgcgactgcaacagaggtggcgagccgcttgggctga

SEQ ID NO: 326354 - DNA, 312 bp, Pseudomonas aeruginosa
atgcgtatactcgttattgcagcgctgttgatcaccctggctggctgcgccagcaacggaacgccgattgaacaggatgacgtccgccagatcgttcaaggtcaaaccacctacgaccagatgctggagcggttcggaaacccgctttcccagtctttcgactccgaaggaaatctccaagcgatttggttctacgtctatgtcgggccttttggaactggcatggagcagcagaacctcacggtccttttcgacaaggaaaacagggtcaagcgatacgtgatgaccaacggccgacccgggaagcgctga

SEQ ID NO: 326355 - DNA, 432 bp, Pseudomonas aeruginosa
atgctttcagatggtgtgttagacgctgatgagtctgccgaactgcttgagattcttagaggctttggtggcctctctgcttccaagccgaaaccaagcgacaatgcctttactccatcgaatgctcttccgctcaacaatccagcgcccaagcttgaatggtcgggccatctctacgttttcactggcgtcatggtctacggccccagaaagcattgcgaagagatcgtcgtcaaccgcggcgggggaatagcctcaggcatcagcaaaaaggtgcactacctggttgtcggcgagataggcaacgagcagtggcttcacagcacctacggaaccaagatcaagcgagctgtcgagttgcgtgaggaaggccatcccatcgcgatcatcagcgagaagcactggcaagcctcgatgttcaacctggtctag

SEQ ID NO: 326356 - DNA, 1233 bp, Pseudomonas aeruginosa
atggatctcaccgagcgtattaaaaagcagatggaggtcaataggatcttcacccctactactcccgtcgatgagagctcgctgttctctggcagacagcagcaactggggagggtagttgaggctgttgcccagaaagggcagcacgtagtgatttatggtgagagaggtgtcggtaaaacttccctttccaacgtccttggtcagttcctcagcgggcaatcgtctgttgttatcgcgccgcgggccacggctgacagcggagactccttttcttctctttggagaaaggttttctctgaaataaccataacaaacaataaacagacgataggctttacagctgataagctcttctctcagcagacgctttccgaccaaattcagggggagatcacacctgacgtggtcagaagaattctttcccaggttggcactcaaagtcttctcatccctattgtcgatgaatttgatcgactcgacataagcgtaacaacagctattgccgacacggtgaaaatgctttctgatcacgctgttcctgcgacaattgttcttgtgggtgttgcagactctgttgaccagctaatcaaagaacatgcctctgttgagagggcattagttcaagttccaatgccaagaatgtccggtcaagagatacgcggtatcattgtgaatggtctggctagactgggaatgaccgccacggaagatgctcttgaacacgttgtcctgctttcacaggggcttccgcattacactcacctgctagggctgaatggaactcttaatgcggttgaggaagacagcactgaggtaacggcgcagcatatcgaaaaggctgtcataaagtccgtagaaactactcagtcttcgattcgctctgcctatagcaaagcgacatctagcaacagggctgaaaatctttacggacatgttcttttggcatgcgctatgacggagccggacgagctaggatttttcgccccaggagctgttcgagagccaatgagtattctgatggggaagcaatacgacattcctagtttcgccaggcatctctacgactttacagaagaagagaaaggaccaatccttgagcgaataggtactgagcggaagtatcgctatcggttcaagaaccctctcatacagccgtatgtgatcatgaaaggcctagctgatggcaagatttcccaagaggcgctagaaagtttccttaagcgtagatga

SEQ ID NO: 326357 - DNA, 315 bp, Pseudomonas aeruginosa
atgatcttcatcgaaacgccagtcttcacgaagcggattctcgcgctggtagacgacgagacctatcgcaagcttcaggaagacctaacgctccaccctgacgccggagtggtcattgaaggcacgggtggcgtgcgcaagattcgcattgcagccaatggccacgggaaaagaggcggcgcccgggtcatctactaccatttcacatccgcctctcaaattgcattcctgctggcctatgacaaggcatcgcaggaagatctgactgccgatcagaaaaagatgcttcggcagatcgttgagaactggagatag

SEQ ID NO: 326358 - DNA, 306 bp, Pseudomonas aeruginosa
atggacaaagaactcttcgctgaactggtcgaaagcgtgacccagatggacgagatcgtgcgtggcgaacgtcaaccttcccgcgagttccacgtcgacgcggtgaaggtcaaagaaatccgacgcgctactggcctgtcccaggccaaattcgcccgaaagatcgatgttgctgttggaaccctgcgcaattgggagcaagggcgccgcgatcccgaggggcctgctcgcgccctgctccgggccattgacaatgatccggttcatgttctggctgcgctgaatggtggcccgcgagaaagctaa

SEQ ID NO: 326359 - DNA, 303 bp, Pseudomonas aeruginosa
atgatcgaagagaatcaccaggcccctgaacaggacctggccggcgccatccgcgacctgctggcacacctgcgcggcccgaaagtggctccggaggacgaactctggaccacgaaagaaatcggcgagtacctcaagctgtcgccggccacgattgaaggtcgcgtggtaactcgttcggacttccctgacccgctacagccgtgcgggacggtcaaggcgtccaaaaggtggtttgcggtagacgtgaaaaggtgggctagacagaacagcagtaagctgccgaaaggacgaaggcgttag

SEQ ID NO: 326360 - DNA, 342 bp, Pseudomonas aeruginosa
atgaccgcgcgccggctgacccgggccgaaatgaaccacctgcgccgcctgatcggttgggttcgctgcgaggtgggggcagagcccgaggaaatcgtcaccgccaccaaagaggcgctcgaccacttccagggcgtgtcggaagacggtaagcggaggttgctcgagcactaccagaaatcagcagccataccgaagtacatccgatctgcgatcaaggccctggagaaggtgtgcctggaagaaccggccgaggtggttgacggtgagatggttgcccgcaggcggcacgaagcaccgcggcgcctggtcgtagtgcgcaacgtgaggagtgagaaatga

SEQ ID NO: 326361 - DNA, 690 bp, Pseudomonas aeruginosa
atgctgatgacctacgagaacctgaagcgtctgctcaacatctgggacaagccagacctctccgcgctcacccgcctcctggtcgcgcgtcgcatggccaggcagtaccagttcggctgggaggccgacaggacctgcgctgatcgaaagatcaaggaggcaaggaagggccttccattcaccagggcccagttggaacaggcgaaggagtttcggaaaacatccagcagctaccacgagaaagcccaagccgcccttggcgcctggctcctgcaggccgagaggtggatcgagggagagattggagtcgatcgcatctgcgatgccctcggcgtcaatccggtccaccgcgccgccatccaaggcgccaagcctgggcagatgctcaatcacatcgccttcgtcgaaggccttgaggacagctcgaatgctttcagcggaaggcgagaggcggacctgaaggacggcccactgttcaactgcatcatagccgagatgctgcgattcgcagaggagaaccccgaggctctacccgatccgttcgcacccggcgggccactttacggtgtaccacagaccgtgatccgcaacgacggaacgatcgagacgaggcgggccgcgctgacgctgcactgccgagacggatcgatgcgcgtgatcgaacggaaaccggaggtagggcgtgagtag

SEQ ID NO: 326362 - DNA, 183 bp, Pseudomonas aeruginosa
atgatcggaacactactcctctgcatcgtctggtgcgcgggcggcctctacgtcggatacgcgctcggctcgctgcggactgcgaagagttacacctgcgagatccaacgccttcaagaacagctctgcaaggaacgtctactccataggatgggcgtggacaaggagccgccatcatgctga

SEQ ID NO: 326363 - DNA, 192 bp, Pseudomonas aeruginosa
atgagaggctccgatattccgccaccaccagggtatcgccctaccccgctcgccaccctcggccagcagttggtccgcctgggccaggcgatgcagaaccccaacaccaagctcggcgagttgaccgaactggtccaggcctgcggggtcgacctgcggatctgcgacacggacaaggggcgccagccatga

SEQ ID NO: 326364 - DNA, 663 bp, Pseudomonas aeruginosa
atgacccatgccctgtttaaacagatcgacctgaccgccaagctcggccaggacggtagctcgctccaggccatgaacgcgctacgcgtcatccgggaaacggtagcgaagcacctggccggcaccgagggtgcaggagagattccgctcgagcgagccctcctggcgctccgcaccatcgccgagttcccctgctccgagcaggacgacctcccggcggcgaacatgcgacagatcgcgctggcggcgttgagtggcgctggagccgattcggagccgggcaaccctggccgcgaacctatttctggaccgggtaatgccggcgagcgaccccaccccgcgccgggattggtcggcgatcacaccgaacttcgccgaattgctatcgcgctcaagaacccgcagctcagcggggaggaggcctcgaacctgatggtgcgttacgaggccttgaccatgcctgaccacatcattgcgctgatcgacggacaggccaaggaggattcggccctccgcgagcttgaggaaagcctgctgatcctggagcactggatcgagcaagtcgggatgacggatggctacgtgggagtggttgagatcgaggccgtagaggcggtgatcaacgcgctgaggcgccagcaggcgggcgggaacggggcatga

SEQ ID NO: 326365 - DNA, 336 bp, Pseudomonas aeruginosa
atgaagcaagcactcatcggcaccgcgatcagcctgctgctcagcgcgtgcctgtacttcggtcaggggtcgcttcaccagttcgccttctatgtggcggcggccacgaacgttctctgctggctgctgatattcgccggcggcatcaaggggcaaggagccgcgaacctgctcgcccatccttggctctccatccctaccggcgctctgcacgtggcggccctggccctcacagaccaccctgcactcgcggcttcgagcctgctggtgcaaatggcttgctacgtcctctcctaccaggcggtgcgcagcgccgagcaagggggtgacctatga

SEQ ID NO: 326366 - DNA, 237 bp, Pseudomonas aeruginosa
atgaaacgagcaaccgttgtaaccgaactgccggccagcgccagccgggatatggacaagttcgttgtccgactgccggacggactgagggccgaggtggaagccgaggccaagcgagacgaacgcagcatgaacagcgtggtcatcatcgccctgcgcaagtacctgcacggtcagcgccggaagcaagcgctcctcgatgctctgaccgctgccaccggagggcaccgaccatga

SEQ ID NO: 326367 - DNA, 234 bp, Pseudomonas aeruginosa
atggcctgggacagaaacgatcctctcaacatcctggcgctacagctcgacggtgaactgcgcgccgcagccgacttctgccatggctacaacgggccggcacagcgcgctttctcccggcacatccagggcctgggaaagtcggtcgacgagcttaccgtggcagacctgaaggcagcggccgcatttgctgaagcagaactgaacgacctgcaacagagagggctgatctga

SEQ ID NO: 326368 - DNA, 771 bp, Pseudomonas aeruginosa
atggtatcgcccgaagaaaatcgagaagcttttgcaaagcgcctgaagcaagctgccgcggacgctggctaccctgcctatggcacggcggcgcggcttgctcgtgcgctgggtatcacgcctaaagccgtggggaagtggctgaatggcgaggcgcgcccgaacgcggagaagatggagtctctcgccaggctccttggtgttgagataggttggctggcctggggaacagggtccatggtccgcatagcgccgtacaaccagcaggctccgcttacacccgagccagaaggcgagatcgttcccttctcgatttgggacgactcgacgcccgttgatgacgacgaggtagaggtgcctttcctgaaggaagttgaattgtctgcagggtctggaagactggccttagaagtcagcaccaaggcgaagctccggttcgggaaacacacccttcgccgttatggcgtccagttcgacaaggcggtgtgtgttagcgtgagcggaaactcgatggaaccgctgctaccggacggaagcaccgttgcaataaatactggtgaccagcaagtagttgatggaaaaatctatgcgctatctcactacgggcaactccgtgtaaagcaactctatcgcctccctggcggcggtattcgcttacggagtttcaacaggggcgagcaccccgacgaagagtacacactggagcagatggtgcaggccgagctgtccattttaggaagagtgttctggtccgccacattttacaattga

SEQ ID NO: 326369 - DNA, 318 bp, Pseudomonas aeruginosa
atgtcacagcaaaacaccatcatgcaacccccgcgctctgctcatcaactcgtatcggacttggtggagtgtgtcgaggtcgctgtcgagacgctcaatgggctgcgtgcaatccttgcgtcggtccgcagggatgagcagtgcaccagccgcatcaagtacatctgctcaatagggctcgggcaggccgagtacatcagcgggaaccttgaggaggatgcgaaaaaggccgatgcggagctcttcgcactggagcgtgtcgcgacccaaatcaatcagctcgaaaacgtgtcgcaacacgaaggaggtgcggcatga

SEQ ID NO: 326370 - DNA, 288 bp, Pseudomonas aeruginosa
atgaacgcgcttctgagagctcgccctatcgacccggagaacagcttcttcaaggtcaacccaggactttccaagcgggaagcattggacgaggccagcgtcattctggccgggctcagcgacatcctcatctccctcatcgagggtagccccatggatggcaatggctaccacgcgctggcgtacctgagtgatgcggcaaaggctttggtggatgccgccatccctctgcccgcggaggaggcggaaatcgccgctgcgctcaatgcaaaggagcgccgccaatga

SEQ ID NO: 326371 - DNA, 309 bp, Pseudomonas aeruginosa
atgaacctctcgacgctgctcagcagtctgtgctcccgggtcccgggcgaagacctgaccgataaacagattctttccatcaagtcagacctggggtcggctcggcaagcggctcagaacatggcgcttggtgtcgccgcggtcgggaatctgctggcgaacgttggcgctgaaggcgaagtcggccaggaaacctcagagcgtctcggctggtttctggaggagatcgggggggccatcttcatgttggttgagctcgagcaggtctgcacggatcgcatcaaccggcagaaggaggctcagcaatga

SEQ ID NO: 326372 - DNA, 279 bp, Pseudomonas aeruginosa
atgagggccactctgggtatcagcttccgggcgactgcgcccgttgatctttcgaagggagatcagaaagcgaatgtcctgtgcgtgatggatgacatcgatgccgacctcgcattggacagcgctgtcgacctgcttgacgcgattcaaggcgggctcctcgacatcctcgacgagccgagtgttagtcgtcgcgtagtcctacttcttcatgcggccgagacagccactgccctggtccgtgctgccctggagggtggggaggtggccaatgactag

SEQ ID NO: 326373 - DNA, 234 bp, Pseudomonas aeruginosa
atgactaggcgcattggagcgaaagcactcggtgaccagctctacagctatatcggcgccatccaggacttggctaccgcagtccgcgaagacttggctttcgatggttgcgagccgggcccacgcctgaccggcgaccaggtggatgcgatccatctctcgattatcactatcgccaggttggctggcgaagacttgatccaactgctgaccgagctggaggtgccggcatga

SEQ ID NO: 326374 - DNA, 765 bp, Pseudomonas aeruginosa
atgactgatctggcccccttcggcggacaggccgccaccatgaccagccgcgagatcgcggatcttgttgggtcgcgtcacgacaatgtacgcgtgaccattgagcggctggccgagcgcggggtgattgctttacctgcaatgcaggaaaagcccaccgctggccgccccactcaggagtacgtcttcaccggcgaccagggcaagcgcgacagcatcatcgtcgtcgcccagctctgcccggagttcaccgcgcggctggtggatcgctggcaggaactggaacagcaggcttcccggccactgaccgccgccgagcaactactggccagcgtgcaactcaccgtcgatctggagcggcggcagcggctgaccgagcagcaggtggcagcgctgaccgaaaccgtcggcgacatggaccgatcgcacccgctgctcgactcgatccccaacggcatggagagcatcaccgctatccggcagcggatagggaagcagtacggccttccgcccagggtgatcgacgcggtggtgcgcgacatgccgcacagcccgcgccccttcgccatggtgcgcagcaagcacgaggaactgaacgcgcgcccctacgcggtctgggcaaaggccgagatcagcagggtgttcgagcgcttcgcgcgcggctgcaccttcgtgacccaacaccgagccacgcacccggatttcggcgccggccgggagcgcttccagatgcgcggcaccccttcgcaggagatcggcgaatga

SEQ ID NO: 326375 - DNA, 231 bp, Pseudomonas aeruginosa
atgaccacacaaccgaaaccgggccggatcaccactggccccaacggccgcccggtgatcgccgggccctggccgtcctaccgtcaattccgcgacctgcccgagcgtgagcgttgggtgctctacggccacgccaaggcatgccgcggtgcgcttgaagaccaagggttcctcatggccgagggataccacgacttcgtgaagcgcgttaccgaggagttagacatatga

SEQ ID NO: 326376 - DNA, 840 bp, Pseudomonas aeruginosa
atgagcgttcaggccatgacctgggcactggagcagcaggtcgttaccgatgccgccatgaggcatgtgctgttgtgcctggcgaactatgccaacgaggcgggaaagggggcgttcccttctatcgccacgctgagcagtgatacagggctatccgagcggactgtccagtacaagctccggtccctcgaggaggctggtgttattcgccgtggaaaccaggcaatcgctgccgcctacatctcgcaccgggatcgcctgccgatggtgtacgacctctcgatggaacggggtgcaacggttgcaccgggtgcaaatgacgacgtaacggggtgcaaaccacgacgtaacggggtgcaactgacgacacaacggggtgcaacggttgcacccgatccgtcacttaaccaccaaagaaccaccaaagaacctaaagagcatgtccaaaccggcgaaaccggttcggacgacgtgggtgatcggaagggaaaaaccgagtctgggaaacggccggccaagcccaatcctctgaatggtttcgaggagttttaccaggcctacccaaagcacaaggatcgagcgaaggcggagaaggcttggcggaagatcgaccctgctctgcaccctgtgatcatggcggcgcttccgaagcactgccgacagcgtgattggctgaaggacaacggccagttcgttccgctgccggccagttggctcaacgggcgacgatgggaagacgagatagcccctgatgctggcccggcatcgagcttcaccaacctccccaaacacacccccgacatgtaccaggaccgcgacgatggcagagcaaatttttaa

SEQ ID NO: 326377 - DNA, 816 bp, Pseudomonas aeruginosa
atggcagagcaaatttttaacttctggcgtaaacccaaccgcaagagcgaagaaagcccttctcttcgctgcccggttcacggtgactaccactcgatccaggtggagcagtttgatggtagctacttgacctggtcttgctctcggtgtgtttgggatggggtgaatcgcgagccggggagcgaggagttttcggtggccctggcggagaaaacccaacgcaagatcaacgagttgctggttggttctggcatccccgctcgctaccgggccagcactttcgagacttaccgcaccgacggcaaggcggagaaggcggcggtgctggaagcatgccgggagtatgccgagcgattcgtggagaacttccaggacggccgctgcctcttgctcctgggcaaccttgggacgggcaagacccatctcgcgtgctcaatcgtccagtacgtcgtacggaaccttcaggcccaagcagtgatcacctcggcgtcggagataatccgtgtggctaagggggcgatgaaccgggcggcgaagtacaccgaacgggacgctctcgaagagctggcgggctttgacctgttggtgatcgacgagctcggcgcgcagggcggtaccgagtacgaattggggctgctccatgaggtgattgaccgccggtatcgggagatgcggcctacggtggtggtttcgaacatgagcgcgcaggaggtcgccaagtacatcggtgatcgtgcggtggatcgtctccgcgagaacggcggcaaggctgttggcttcacctggggctccgctcgccgggaggttctggagtga

SEQ ID NO: 326378 - DNA, 1398 bp, Pseudomonas aeruginosa
gtgagccgagagctgtacagcgaagaggctgagttcggcgtgctcggcgctatcttgcagtccgcgctccagcagaatcaggcgctggttgacgaggccttgtccagcgtgaccgccgccgatttctacttcgaggataacgccgcgctgttccaggcgatcaaggattgctacgaggaagggattcccgtcgatccggtgaccgtgggagtggtccgtgatgtgctgcccagcggcgagaagctcattccctatgccgggaacattgcccgcaatgtgccttcggtggcgaactggaggacgtacgtccggcacgtccgggagcggtccatcctacgctgcttgatcgacacggccgagtcggtgaaggcttccgccacggatgaccggccgttgcctgagatcatcgccagagcgcagcaggcgatggcggacctgcgcgacctcgatgacgaggcgccgaagtacaagcggctcgacgaggtgatgctcaaggctgtcgacgttatcgatgacaagttcaacggccgcgcgcctcagtggcccggcactggcctagccgatctcgacaagctggttcgcggcatccgccctcggaagctcaccgttatcgccggccttcccggcagtggcaagaccacacttgccctgcagatcgctcagtacaacgcctgcgaggcaggggagccctggctggtgttctccctggaaatgcctgaggaggagttgggcgtgcgttccatcgcctcgctggggggagtggacctgaagcgcttggacgatccgcagcaactgggtgacgacgactggccgcgcatcacatctgcggtggccaaggccaagggggcgcccttgttcatctgcgacgatcccaacgtgaccgccagccagatccgcagcaccgcgcggcgtgtcaagcgtgagcacggcttggccggcatcgtcgtcgactacctgggcctgattccaccggaggcgaaagggcgcacgcgcagcgaggaggtgggtaagaccaacaaggcgctgttgcgcctggccaaggaactcggtgtgccggtcattgaactggcgcagctcaaccgcgactcgaccaagcgccccggcaagcgcccgcagtcgagcgacctgcgcgactcgggggagatcgaggccgacgccagttgcatcctgatggtccaccgggacatggacagcgaggccggccagaacggaatcacggagatcctgatgaccaagtgccgacacgcgccaccgggcatgtgtctgctccagcagcagggaatgtatggacgattcgtcaacttcgcgggctcgcgtgaaatgagccaagaggaggttgaaatggggcgtacctacttcgccaacaagcacggcaagaaaaaggggaaggcggcatga

SEQ ID NO: 326379 - DNA, 285 bp, Pseudomonas aeruginosa
atgagcaacgtacaaccgatggcaccccgcaaggtcatgaccaggctggagcgggagtttctcaaggtggccggccaggaactggcgcaggtcaaggtcggtggtgctgcggcactgtccgccctcttgcagatggtcgccaactggcacggcgaccgcggcacgctgggctttcacgactacggccggctctggctgcaggacggcaacgcaaagggcgcagcggtggaaacgttgctgcgtgatctgttcggcctgaacggcacgccgaagggggctgcatga

SEQ ID NO: 326380 - DNA, 558 bp, Pseudomonas aeruginosa
atgactggggtctaccgcgacgtgatgccggcgatcgttcgcgtcctggcggctgatgccatcgacaatacggcgaagcagagttggcagaggcttatcgagcgaaaggtcgacagcgggtttcgggcgctgctttctgcccaagatcagttcgagttcgattgcatcctgcacgccttgttgcaccgggagctttcgccgaccgagtgggacgtgctgcatgctcgctactcgacgcactttgatcggcgcggccaggcaatcgaacgactggtaggcagggtgcattcacctgccccttctcggtttctggagcgtgctgtagcgacctgggccatcccgatgatgaagggcaaggacggaaagcggtcaaccgctatcctgatgctcccgaaggagtggtacgacatgaacaactgggatgaagatgctcgtccggactcaactcgaaaccgctggcgccgggacattcgaaaacagcttgaccgtttcgaggagggggcgctggtacatgtaactgagatacttgatcgtgaaaagctggttgaagtagcgtga

SEQ ID NO: 326381 - DNA, 222 bp, Pseudomonas aeruginosa
atgagaagtccagatatcaaggttgtgaagctcgagggggacgcggttccctggtctatacgcgatgccggccatgaggcctgttttgtggttatgcatggcctgacgctgaggagcgatttcttgtattccgaggaagaggctgaggcagtggcagacgcggtgcacctagagatcatcgaagagatgagatcgatgctggagtctgtccgaggacgataa

SEQ ID NO: 326382 - DNA, 333 bp, Pseudomonas aeruginosa
atgaagatgcctgacaaacccgacacttgggcggctgtgctcgcctggctgagccagcacgcgccgatcatctacgcctccctgctgtcgtgggccatggccatggccaggatcatctacggcggcggcacgcgccggcaggccctcttggagggcgcgctgtgtggtgggctggcgctgacgatcatcagcggcttcgagttcttcggcgtgccgcagagcatggccaccttcattggtggctggatcggcttcctgggcgtcgagaagatccgcgacctggccgaccgttacgctgggatcaagctgccgcgtcgagggtctggcgaatga

SEQ ID NO: 326383 - DNA, 618 bp, Pseudomonas aeruginosa
atgaagatcactgccgaccaactcgaccgcgctaccggctgcggtgccgctactgcctcgacttgggtcgagcacatcaacggcgcaatggcccgcttcgagatcaacacgcccgagcgtgtggcgatgttcctggctcaggtcggacacgaaagccagagcctcaagcgcctggtggagaatctgaactactccgccgagggcttgctcaagacctggccgaagcggttcacgccggccgaggcgaagcagtacgcacgccagcccgagcgcatcgccaaccgcgtctacgcaaaccggatgggcaacgggtcgccggccacgggcgatgggtatcgataccggggacgcggcctgatcatgatcaccggctacgacaactacgccgaagccgcccgcgccctggcgctgccactggtagcgcagccggaactgctggagcaacggacctgggcagctatcgcctcggggtggtggtggaagtcgcggggtttaaacgacctggctgaccaaggccgattcgagcgaatcacgctgaagatcaacggcggctacaacggcgcagacgaccgtgcggctcgccttgaatgggcgcgcgcagcgctggcgggtgcgtga

SEQ ID NO: 326384 - DNA, 450 bp, Pseudomonas aeruginosa
atgccgagacgaccggctaagccctgcgcgtacccaggatgcaatgtgctgatccgacagggctcgcactgcgagaagcatgcggtgctggctcagcagcagcgggagaagcacctgcaggcagttcacgctcgctacaaccagtgtcgggatgagtccgatgggttctacaagaccgagcgctggaagcggctctccgctcgatatcgacggctgcacccgatctgcgaggagtgtgacgaagctccgagccagatcaccgaccacatcaaggcgcgcaagactcaccccgagctgagcctggtctggtcgaacctgcgcgccctgtgtcgggcgtgccacaaccgcgtaggcgagcgcgttggacggatcgagaacggtgcggatcctggcgccccgaggatgccccgaattggtgcatcgaaacgcccaggggaggggggtggctga

SEQ ID NO: 326385 - DNA, 483 bp, Pseudomonas aeruginosa
atggcaggcgtcgccagagtggccggccggggccggaagcccaagccgacagccaagaaggcgctcgccggaaaccccggcaaacgggcgctgaacaaggacgaacccaagttttcggatgtgaccgatatcgatgcgccgggccaccttcggcctcgcgctgcggagatgtggtcgatgatcgtgccggagttactcggtgcgggcgtgctggccattaccgacatgcacaacgtcgaggcgttctgcgtcgcgtacgacaagtggcgcatggctgaggaggaagtgcagagctcgggaatcacagtaacgagtgctcaaggcagcccgatgaagaaccccgcgctaaccgccgccaacgaagcgatgcgccagatggtgacgtttggctcgctgctcggcctggatccctccagccggacccggctcatcggaggcaacaagaagccggaggcgaatcccttcgctgaactactgaggtaa

SEQ ID NO: 326386 - DNA, 1728 bp, Pseudomonas aeruginosa
atggcaaaggccgcctgcgctaacgtcgacaaggcgatggcttgggcgaagaccgtcctgaaggggaaggtacccgcctgcctgtatatccaccaggcgatcgagcggcatttctccgacctgaagaagagccggagtcgggactatccgttctacttcgacgccgaagccgctgagaagaagctgaagctgatccagcttcttccccacacgaagggggaatgggcgcgcctccaactgacaatctcgcttgaggcctggcagttgtttggcctggctgtgaccttcggctggaagaaaaaggctgatggctttcgccggttccgtgaaagctactgggaggtaccgcggaagaacggcaagtcggtgatcgccgctggcaccggaatctcgatgttcgtcgcggatggcgagttcggtgccgaggtctacagcggcgctaccaccgagaagcaggcatgggaagttttccggcccgcgcggttgatggtgaagcgctcggaactgctgatcgccgccgccggcatcgaggtgaatgcctcgaacatgaatacccccgccgatggcggacggttcgaaccgatcatcggtgaccctggtgatggttcctccccgtcctgttcgctgatcgacgagttccacgagcacgacaactccggccagtacgacacgatgctgaccggcatgggcgctcgccgacaaccgctgatgttcatcatcaccacggccggcgcgaacatcgagggaccgtgctacgacaagcgccgccaggcgatcgagatgttgtcgggcgtggtgccggacgacgaactgttcgcttggatctggactctcgacgagggggacgactggacggacccgaagaacctggccaaggcgaacccgaacatcggcgtatcggtttatcgggaatatctggagagccagttggctcgcgccatccgctcggcgcggttcacgaacaccttcaagacgaagcacctgaacatctgggtttcggcgaagacgggcttcttcaacatggccttgtggaaggcctgcgaggacaagtcgctcacgctggagcagttcgctggagaggagtgtgtcctggccttcgacctggcgcgcaagctcgacatgaacagcatggcgcggttgttctggagggatatcgacggccggcggcactactactgcgtgtcgcctcgcttctgggtgccagaggatcgggtctacgacgaagacaacaagcggatggccgagcggttccaggcctggctcaacatcggccacctgtacgccaccgccggcgcagaggtggactaccgcgagatcctcgccgaagcgctggaagcgaacgaggccaaccccgttcgcgagagtccgattgacccgttcggcgcgactggcataagccacgaactggacgacgaagggctgaccccagtggtcatcacccagaactacaccaacatgagttcccccatgaaggagctcgaagcggccatcgcctcaggccggttccaccacgacggcaacccgatcatgacctggtgcatagggaacgtgatcgggaagttcctgccgggcaatgacgacgtcgttcgcccgatcaagcaaggcgaggacaacaagatcgacggtgctgtggcgctgatcatggcgatcgggcgtgtcgttgcgcaggagccgccggaagaaaccctctccgaccacatcgtgaaacacggtatcaggaagctctga

SEQ ID NO: 326387 - DNA, 1224 bp, Pseudomonas aeruginosa
atgggaattttgaagaagctgggccgatggttcggcaagggctccgacccgttgatcatcgatacgcccgaaaagctggcgcaggtgctgggtgttgcgtatgagacggagtcggggcagcgggtcactaccaccaccgccatgcaacagaccgtggttttcaactgcgtccgggtgttggccgagtcggttggcatgttgccttgccggctcttcaaacagacggagcgcgagcggattccggccttgtccaaccgtctgtatgacgtgctcgcagtggcgccgaacgggtacatgaccgcgcaagagttctgggaactgctggtggtctgcctttgtcttcgtggcaacttctacgcctacaaggtcatggcgctcggcaacgtggtggaactgctgccgatcaacccggcggcggtgaaaccgaagctgaaagatgattggacggttgagtatgacgtcacgttcaagagcggcgtcgagaccctttcccaggacgaaatctggcacgtccgcctgttcactcttgatggcctaacggggctgaacccaatcgcctatgcccgccaggtcatcggcctgaatcaggcgatggaaactcacgccgccaagctgttctccaacggcgcggtgacctccggggttctgaagacggaccaaacgttgagcgatgaggccttcgaacgcctgtccgcgcagttccagggcgagcacatggggacggccaacgcctacaagcccatgattctggagatggggcttgattggaagccgatcagcctaaacgcccaggacacgcagttcatcgagtcgagaaagatgaccgaggcgcagttgtgcggtctgttccgcgtcccgcctcacctggtggcgaacctcgacaagatgacgctgaacaatatcgagcacatgggcatgagcttcgtgaactactcgcttgtgccgatcctcacgcgcatcgaggcccgcatccgagtcgggctgctgagcgagaaggatgcgaaaacccacttcgccaagttcaatgccggcgcgctgatgaggggcgacctcaacgggcgatacacctcatacggcaaggggatccagtgggggattctgagccccaacgactgccgcgaactggaagacctcaatccccgccccggcggcgatatctacctgaccccgaccaacatgaccaccaatccggaggcactcgatgctgacaaaacaacgccttga

SEQ ID NO: 326388 - DNA, 654 bp, Pseudomonas aeruginosa
atgctgacaaaacaacgccttgatgtgccgctgacgctgagggcagtcagcgataccggcgagttcgagggctacggctcagtgttcggtgtcgtcgacagctacggcgacgtggttgttcgaggagccttcgaggcctcgctggctcgctggaaggaaaaggggcgcttgcccgcgatgctttggcagcacgacagcgccgagccgctcgggccctacaccgagatgcgcgaagacgaaaacggcttgtatgtgaagggccgtctgttgatcgatgacgacccccttgcgaagcgcgctcatgcacacatgaaggccggcagcctctccggcttatcgatcggctacatgctcgatgactacgagtacgacaaggagaagggcatctggctgctgaaggctatcgacctctgggaggtatctctggtcactttcccggccaacgatgaggcccgtatctccgatgtgaaaaccctgctggcgcgcggcgagacgccgccgccgagcaaagtggagcgagccctgcgcgaggttgggttctctggctcccaggccaaggccttcatggccaaaggctacagcgctgcttgcccgcgtgatgcggatgctggcgccgcgctcgactccctgaaatccctgattaatcgcatgtga

SEQ ID NO: 326389 - DNA, 1203 bp, Pseudomonas aeruginosa
atgcccgctgatatccaagatgtaaaacaggttgccgaagaactcggcgccaagttcgacgagttcaagcagaagaacgacaagcgcgtcgaggccctggaggccgagaagggcaagctggtcgagcaggtcgaaaccctcaacgagaagttgggccagttggacgacatgaagtcggcgctggagaaggagttggccgggatgaagcgcccggatggcaccggcaccaaggccgcgagcgagcacaaggccgccttcatgcagttcgtgcgcaagggcattgataccggtctgggcgaactgcaggccaaggcgttgcagatcggcgtcgatgcggatggtggctacgctgtcccggaggaactcgaccgcaacatcatcgagctgctgcgcgacgagtcgccgatgcgccaggtgtgcaaccagatcaccgtcggcaccccggactacaagcgtctggtaaacctgggcggcgccggctccggctgggtcggcgaaactgcaccacgcccggaaaccagtaccccgaccctggcgcagatcaacgccgtcatgggcgagctctacgccaacccgcaagccacccagaccagtctcgacgatatgttcttcgatgcggagggctggttgaacagcgaagtcggccgggaattctccgagaaggagggctccgcattcctgctgggcgatggcgtcaacaagcccaagggcctgttggcctatcccttcgcagtggctggcgacaagacccgtccttacggcactctgcagcgactggtaagtggcaacgccggcgccctcaacggcgacaacctcattgacctggtgcaagcggtcaaggcgggttatcgccgtgctggcgtctggatgatgaacaacctgacggtcgcctacgtccgcaagctcaaggacagcgaggggaactacctgtggcgccctggccttgaagtcggccagccctccagcctgctcggctacggcattaccgagaacgaggacatgccggatatcgcggctgacgcgaatgccctcgccttcggcgacttcaagcgggcctacaccatcgtggaccgcatcggcacccgcgttctgcgcgatccctacaccaacaagccctatgtcggcttctacaccaccaagcgcgtcggcggcatgctcgtcgactcccaggcggtgaaggtgctgaccctctcggccgcgtaa

SEQ ID NO: 326390 - DNA, 279 bp, Pseudomonas aeruginosa
atgcccaagattctggtcgaaaaggcgttcccgttctctccggacggcaacgttgtcataaccgtggacgtcggcgagcaggaggtttccgaccgctgcgcgctggtggcagtggatcacttgggggtcgccactctcgttgacggtcccagtggtggatctgacctgaagaagctgaccatggcggaattgaaggccctgctgactgcgaagggtatccccttcgacaagggggccaacaaggaaacgctcctcgcgctggtcccgaacgatgattga

SEQ ID NO: 326391 - DNA, 321 bp, Pseudomonas aeruginosa
atgattgacctgagcgtggcgaaggagcatctgcgggttcgccactcccaggacgatgagtacatccagggcttgatcacggatgcggtggaggtgttcaacgctcggaccaaccggaccttgctggctccggatgatccgctgccggaccccgtcggaaactccatccgcatgacgggatcgatccgccgcggcgcgctgatgctgatcgcgcactggtattcgaaccgggagtcagcagtcatcggaaccattacgtcggaacttccgatggccacccaatacctctgggagccctaccgctggatgaacttgcgctag

SEQ ID NO: 326392 - DNA, 183 bp, Pseudomonas aeruginosa
atgcagttcaaagcgataaagccgctctatcgcggcggccgtctggtccagcctggcgagccgttcgataccacgcccgaggacggtgagcgcctggtagcgaatggcgaggccctcgacccgaggtcgcgcaaagcccctgcgaaatcgcccaagggttccacccaggccgaagagaagtag

SEQ ID NO: 326393 - DNA, 552 bp, Pseudomonas aeruginosa
atgcgtgcaggacggctcgacacgccggcggatctgctggtgcttgacgaagacctggcgccgcgatgcatcgactggatctggtgcggcattcagaccaaggagaatgcggagccgccgtttccgggtgggctgcggaacccggcgaaggttgaggttcgggcctggtgggacgagcgcattcggcaaggacgctacctgcgcgccgatgggcgcctcttccacatcgacagcgcccgcgacttcactggtcgtcgggccgaactggcgatcaccgcaacagagctgatcggcgagccggcgacataccggccagatggcgcgccgccgcgaaactgccgggtgtttctgaactacgatgcgccctggctggacgagaacggccaggcgacggcctacaggatccgagccgaggttgcgctgatcgagacggggagggtgcaggtgggcgatctgcttgaggtggatcgagtgcgctactacgtcgtcgactacgccgacggcaccgacgacggaattgtccgcgggctctggctggagcgtgtgcaatga

SEQ ID NO: 326394 - DNA, 594 bp, Pseudomonas aeruginosa
atgagggcgccgatcaggctggtcggcgtcgagcaggcgcaagcgcgcctccgggaagccggccggcgcgttgatccagtgatgcgcggcgcgctgaataccacggcgacgcagacgaggaagcagcgctacaacgagccgatgcgtcctgcgttcaccagcgccttcgccaaccggcggatcgtgatcaagcgggcgagggcgggccggatgaacgcgaggcttattccgtcgtcgtctggcgtcaacgtcacggcataccgacgctggatcttcgagccaatcaactcgacgcgggcgaggatttatgtcgtcggcccgaacggtcggaaagttgccgcaggcttcgtcaacccatcggggcggctgcagcggccgttgtctacccgcagtcagcgggccaggacggcgcggcgccgttcgcccaatgtccccagctacacctatcggcgtgccctgcatgaagcacaaggcccgtcggtggcgtactggttccggctgctgactacggcgaagaccatccgctggaccaatgcgtttctgcgccaagagttcgagcggcgcatccgccgcgagctcgaaaaggccgtctga

SEQ ID NO: 326395 - DNA, 438 bp, Pseudomonas aeruginosa
atgcgaacgaaagcgagccaggtcacacgcgacctgcgggcccgcctgggcgagattcgcccgataaacggctacctgacggacctgcgggcagtttacgggccgacagatcgagtgcccgacaaagccagcgggccttacgcccttgtgcgagtcgcgagcgacgcgcgaaccggaacggcggtacgccaggcgaccaggctccgcacgttcgaagtcgaggttgtattcccgcgatcggcggaggaacacgaactcgatgacgtccacgtcgacattctgcgcgcccttggcttcggagaagaccagccggagcgcaagttccctgggcttgtggaggatatcgacgaggcggtggcgcagtttgccgaggctggtcgcaacttccacaccctgaccgcaaccatcggcgtgatctacgtcgaaacctacaactga

SEQ ID NO: 326396 - DNA, 786 bp, Pseudomonas aeruginosa
atgctctacacccaactgttccgcggcccgacgtcggtcgcaccgtatccgtcgtctgtgtacgaggagctgttcaagctgcaaacgaccagcgccgagccggagtcgaccgagatcaccatccccgacccgacgcgcctcggcctgcctgagctcgacggcgtaacgtccatcacggcgatcaacatcaccggcgaggccgtcaacttttccccgcgcgccgctgcggtgatcctctacggctctgttgagcgtgtgccatcggggaccgtctccgaagaggtgcatgacgcctatgtcgatcgcatcatccgccttgcgcacattcccctcgaggtcagcagcgtcaccggagccggtggcacgccgacctatgtgcgcggcgttgactacgccgtcacccccggcggcatccggcctctgccgggcggcacgctggccgacgcaatcaacgcgaccactgctccgccggatggcgggttgaagcgtttgccgatcgaggtcagctacacctacccgactgtcgacctggtgaagccgttcaccaccggccgcaagttctaccgggtgatgttcgagcagaccaacgaagccggcgatggtgagaagcgtcggatcaactgcttctatgcgcggatcagtctgaatggcggcctaccgctgaaccagggcgccgagttcggcgtgatcccggtacagatccgccttctggccgacccgaacatctacgacgtcggcgaggccgcgatctggacttgggaaatccagaacaccgacgcggcctga

SEQ ID NO: 326397 - DNA, 366 bp, Pseudomonas aeruginosa
atgtctgacctcggaattctgtttcccgaacctgaaaccatctacgtcaacggagcgccggtgatcgtgcggcacgtccgcctcgccgacttcgagttgttcggggatatcgccagtgaccttctcaaggttctgagcgatggcaccgttcccgccatcctgcagttcggcaagaccggttcggccaagctgcggaagatcctgcgcaggaccacgaacctcagccgctggcgcgtttggcgcctaccggtcgacgtggcgatgcagatcgtcatgcaagtgatacgggtcaacgccgcttttttcgcccgcgcccagcaagcggcagtgacgacgctggcaacgctggttgggcagcagcagtaa

SEQ ID NO: 326398 - DNA, 150 bp, Pseudomonas aeruginosa
atgacgcttcaacagatcgaggtgttcctcgagcaggtcggcgaacaggtcaagcaagaccggcgcgaccacctgctccttcgccgcgcggcacgcgcgcccctgaaggggtttaaacagttcctgcaggagttcgatcatggccggtag

SEQ ID NO: 326399 - DNA, 2142 bp, Pseudomonas aeruginosa
atggccggtagagtgaccacgcagctgatcgtcgagggggtgaaccgcacccggcagatgttcaacgaggtgaaccgcgacctcaacgtgacgaacaaggcgttggccgcaagcggcaagctgctcgcaggctatctcacgttcagcgcgctggccgccggggtgaaggcggtagcgaacaccgccgacgcttaccaggcaatgaacgcccgcctgcggctggcaaccggatcccaggaagagttcaacaccgccctcgaggagttgcagcgcatcgcctacaacaccggccagccggttgaggcgctgattacgctgtacgggcggatcagtcgcccgctcaaggaagcgggccgcacccagcaggatatcctcaaggtcaccgaggctgtgtcggcgtcgttccgcgtgtcgggcgcctctgcggtcgaggcagagaacggggtgatccagttcggccaggcgctgggggctggcgcgctgcgcggggacgagttcaacagcgtggccgaacaggcgccacgcctgatgcaggctttggccgacggcatcggtgtgccgacctcggcacttaaggcgctggcggcggagggcaagctgacggcggcagtggtcaccgacgcgctgatcgggcagttgcccaagctgcagagcgaactcgcctcgtttggtgactccgtctcgaaggaatggacggcgatcgaagacaccatccgccgcggcgtcggccaggcggacaccggcccgctgatcgagtcgctgaaggagctgaaggaggtactttccgacccgacgatccagggcaacctgaccacgctggccagcgccctggttcgcctggccgccgcagcggctcaaggtggctcgctgttctccggcttcggagaggatctgggctacctggctgcacgggtgaccgggaacgtcactgagctcgacagggtgaacaaggagatccagaagttgcaggccgccgacgacggcttcggcgtggtcgacttgttcatgtctgacgcgcagatcagcgagcgcctggcagcgttcaagaagtaccgcgagcagttgctggaagaacagaccggcatgacggcggaggcgcgcaaggcggccgaggaagccgccgcccaggtcaaggcggtcgacgacgcacggcagcaagctgcgctctcgtcggagcgtgcgtactccgaagcgctgcgccaagtgcgtgacggccggctgaaggcggtgcatgactctctcaagaagcaggaggcggccgagaaaggcgcgctggcggcggttgagaaagttcggaaggatcgcctggctatcgagaagcgctacaacgaagcgattgccgggctacaagccggcgtcggcggtgacccgagctatgcatctgcgcagaccctcaagcagtccgccgcccaggcgctgcgcaagggcgatgccgagacggcacaggcgcaggcgcagaaggcgctcgaaatgctccagcaactgcaggcggccggagagaacacatacgggttcaccggcttcgctaaggagctccaggccatcgagctcgccgcgaacgatctgcagcagtcgcaggcagacgcgaagctcgacagcatccgcgcgcggatcgcggagctgtccgatgcggcgacctcgctccagggcatcgagatctcgttcaaccttccgccggaggagatcgaggcgatcaaggcacagttgcaagcgctgtctgaaacgcctgtcctgatccctgttcaactggtgcccaccggcgaaatgtccgccgtgagcggcgccacgccaccggtcagtttccccggctacgcgaccggcaccaacagcgccgcgccgggcattgcatgggtcggcgagcgaggtccggaactggttgcgtttggtggcgcggagaaggtgttcccgaacagcgtgtcggcgcttgccagccgcttggccgggatgcgcggtctcgacgggttgtcgccggccgccgccgaggtcgcgacagcggcgccgagctcagggcaactccccaacctgggacggatcgatctgtcgttcggtggctcgactgtctcggtcttcggggatcagcgatcggtaaacgacattctgcggctgcaggcgctcaagcgaggccgcaccgcacgtccgtag

SEQ ID NO: 326400 - DNA, 504 bp, Pseudomonas aeruginosa
atggattacccggttattacgctcggcggagtacccatcccgccagaagccggcgcgccggatcagtcgatggagcccttgttcggtgcgacggtcgtcaggatgagcgacggtgctggcgtgaagttgacccactgggacggcaagctctccggcacgttgaccggctcgggccttgtaccggtcgggctcgacgcgctcgactaccgatcatcactggagatgcaagcgatccagccgatcagcatcgcccaggactctccggcgttcacgctgcccaaggcgccgcgcacggacaaggagccgtgggcgctggcgctggttgaggggcgctgggtgccgacgccatgcgtgcgcgcaggcctggtcgtgaccgttacagagcgtccggcagcgacgctctacatggtccagttcatgcctcgcttcaacgtgttcgcggacccgccgtcgacgtcgatgaacgccgcgcacggatggaccctgaactggcaggaggtttga

SEQ ID NO: 326401 - DNA, 1704 bp, Pseudomonas aeruginosa
atgctgctgaacggcatgccgttgaacgccggcccgctgaacggattcggcacggccggcggcggagatggccctgtcgagatcaagcctggtcaggcgtttgcctggcgcctgcgcctactcgtcgacgatgaggattggacggcaagcctcgttggggctgtcgaagtcgaccgcgaggaaggcgcctctggcaccgctacgttcacgctgtacctcggcactgacccggtttcgccgacgtcgtgggtggggcgggcggtcacgatccgctacctttccactgccgagggcgtgaccgcagacgtggtgagattcaccggccgcatcgcggacccgacgttcgacgcggtagggcggacgctgactgcgcgctgctccgatcagttgcagcagcgcatcgaagcgatggcgatcgcgcagatcgatgcgctggtcggcggtcagtggtcatccgatgtgttcgagcctgttgaggggcgatcgcgctgggactacgcgcaagagcggttgacgaccgtggccgcggccctggattgcgcgcctaccggcgaactgcgtgtgtccagtctgttctcgcagcctccggcgttcgagttcggcgccgggtccaccgtctacaactcggtggaggtcagcctcggtgatctgagctcgcagacgaacagggtcgagatcgagtgcgactaccgattcagccggctctggcagttgaacgcctcgtatggttggcagcaccccggcacggggaacgcggtcggcgaggcggggttctgtaattggcgcggcgacgacaccgagttaccggatgtcgagatgatcacatcggcgaccgaaagcagcggccagacgttgttctatgcaacttggtatccgctgccacccactggggtctactgcaatccgccggcggcatgggtcaacaacttcaccgaattgctgctcggcggaaattggattgctggccggcgatgggtgcagtccgtaaccgagcgctaccggctggtcatggaagttcagccgagcgtggcggcgaccggcccgattgtcggtcggcagcgtgcctcgttcgagatcgagtcggacagggccgagcgctgggaaagcgagccgatcaccggcggcagcaccggccacgacgacgagaaggatggcaaccggcgtttgtccgcgctgaactgcctgctcgctcagggagcaacgacgctcatcgcagcgcaccgtgggacgactgtgacgtgggacgtgcctaccagcatggttttaccgatcgacctggtgcatacgctccgcctcgatgatcagggcgcgcgtgcggtgggcaagtgtcggcgcattgtcgaccggctcgacatcgcatccggaagcgccctgacaacgatctctatcgcggtgatgcgaggcggcgctggcgcagcagatccccttgttccgccggctggctcgtccgatcccgtcagcccaccgtcgggcggcgggcagctctcgacgcagcttgggggccgcaacggaagccccgcgtatgacgatgaggcggatggtttctcgggcaactggagcaatcgcgatcccggcgccgaactgttcccgcggcgcttctcgttgactgcaaacgatattccggagacctaccgggacgaacatgcgccggagatcgcagccacttaccgggtagctgtacctgatgacgtactggagatgtag

SEQ ID NO: 326402 - DNA, 411 bp, Pseudomonas aeruginosa
atggcgagagcctggatcaacaactggaagacgacgctgagcgtagggctgtcgcctggcgcgttgagcctgacggtgccggatgccgccgccgcgctgctgcctctctccggcggtagctgggtgctgttgacgctggcggatgacgctggcgcgcagcatgaaatcgtgaaagcaaccacccgcgccggtggggtggtgacgatcgagcgcgcccaggaaggaacctccgacggcaactggccggcgggaacggcgatctatgcagccgtcacggccggcgacctcatgacgctccaggcgcgcatccaggctctggagtccggggtgtctggcggcacccttgtcgacgaaaccggcgcaacgctggtcgacgacgccggcaacaacctgattatggagaacatttga

SEQ ID NO: 326403 - DNA, 546 bp, Pseudomonas aeruginosa
atggcaactgttacgcacgtcctgtccggcgccggggagccgctcgatccgccaccaagcatcggtgctcactacgtgaacacgaacaacggcgcgctatacctggcgaagggcaccgcgagcggtgccgattgggtgaagctgggtagtggcggtggcagcgctccgagcgaggtgctgcatgtcaataccgacggccagttccttctcgagcctcaacactcatttgttgaggcccgtctgttcgcaattcccgagctcggcactgcagcaattggaatcgatcccagcacatcccgacagttcgacctgaatctcagaaccgcggctccgagcgggcaacaactgcaaatcagggttacatcgggtgaattgcccggaggtatgtcgatcgtgggcacctcgaggcagtgggcggttcaggagtcgtatggattcgtgatcaatgcaaatgacctcaacggcgaggtgtgggcgcgcgtctatttcgatgctgacgagctcaccctgtcgatgcttgtgttcagcgatgtgccgaacgcgtag

SEQ ID NO: 326404 - DNA, 405 bp, Pseudomonas aeruginosa
atggctctatcagacgagcgccgcggcctcggcgcgaggaacgaagcgatccgccgcgccggcggccaacgggttgaagcggagcggcgtggcgaccagggcttgaccgcggcactcaaccggctgatcgagccggagcgtcaggcacgcgcactgcgcaagatcgacccgcgcggcgccctggatgctgcgcgcggcagggccgactacaaccccgccggcaagcagatcggcgggggcggtgtgtcctggccgctggccgagaccgacaagtcgaagcgcacggtggccgacgaggagatcgtgagcaccgatggcctggtcgtcgttgtgttcaagcgcgtcaccagcttcgagatgcaggatggcggctcgaatattggccgcatggagttcaaggcatga

SEQ ID NO: 326405 - DNA, 1659 bp, Pseudomonas aeruginosa
atgaatcaactgatgccctgggacggcgaggtcgttcgtatgggctggccgtggcacggaaagatccgccagccgaacaatgatctggccggctacgtcaccctgccgaacggggcgacgcgcccagcgatcgcgtactacggcaactggccgatgaatcacacgcatctgttcgacatgggcctaccggaccagggcgacccgcaggtcgaggagcagggcgggaagtggtgggggcgaacgatcctccgaggcggaggcaactacgactatcagttgtactacggcggcgcgacgacctcggccgaagggcagtcctatacaggcgacgccccattcagggggctccccctctggtggtctagcgacgaggagccgcggcgcccgctgtatgtggatatctacctcaatgtggagcagggcagctactacctcgatttttggacaaagggcggaacgattcacgcccttcggaagaagataacgcttgaggatgttgggcagggcgcaggacagccggagtgtgcggtaaaagatctgctcgggagcaacttcgactactggttttttggtgaaaacgtcaagcttgactacctgaagctgctcggggtctaccgaaatcggttgctgctgggggtggtggtgacacagggtgacgggatgcggcaggttgacccaccgcccggaacgtcggtggtcagcggttcgtccccgtctggagcccctcaggggttgtatggtctcgtcgaggtgaccattgccccggatatccgagatccagaggcggatcacagtcagacggtcacaatagacgtgatcgagaatcgccaggccgcgctcggtaatccggttcatcaggtgaccgacgagagcagtcagccgggcgatcccatcgaaaccacgctctatcgagaggaatggaaccagacctccgggttgctgaccgcctggtatgacgcccagggaaacatccagaccgcgcgctacaaccgacgccactatgcgcttaaggagtaccgcaacgagcccggcgtgacgacaagaacagcgacggagcgaagcagcgaggttgcgctgttgagcggctccggatcagttgtcgacagcactgtactgacagagcagttcgaggcgatctacatcccagggacaggactgcagatcacgcggacggtgaagtgtacgggggagccggatgacgtcacgacctataccgacccagaccatacgggtgggccggtggtcaccccgccgacgacgacattccccccgggcatgcatatcgtcaacaccgttgcgacctatcagtggctggtgaatgacgagaacatgctggccaaccaggaccagcaccaagtgtggctcgccgcgttgagcaacaacagcgcagccatctgccacatccgcgatccgttcgactatcccgaggggcagaccacaacaaccgtcagcgtccgccaggggccggccgtgcgcctcggcggcgtgacctctggaacggttaccgacaccctgaccaagagtaagcccgcgcatgagtaccggcgcggatttttctgggagccagccgaccgctgggtgcgagccagttgcaacccgatcaccggagagctctctcgcggcccggagtgcatccagtacctgaccagttgggtttag

SEQ ID NO: 326406 - DNA, 588 bp, Pseudomonas aeruginosa
atgacgccggcctgtgtacccctgcgcattgaaaaaggggcgacgttccgcgacacgatgcggatcatgcaaccgagccttgtctaccggccgatcacccagatcgcgtcgaccgctcccgtccggctgaccatccccggccacgggttgcccgacacctggttagcctggatcgatggcgtccagggcatgcccgaactgaaccgcacccggcttcggcaactgcctcaccgggtcgcgtccatcgacgacgacatgatcgagatcaacttgctgtcagccgttgggctggcgcctgttggcgggcaactgatctaccagccacctgttgacctggctggcgccgaggtacggatgcagatccgcgatgcgccagatgggacggtgctgatgacgctggcactcggctccggccttgagatcgctggcgccggaacgatctcgcgcgagatatcggcctccgctaccgcggcgttgatgtggtcgtcggcggtctacgacctggacgtgacatacccggatggaacggtccaccgctattacagcgggccgatcagtgtgagccgcgggggagggtgcgatggatga

SEQ ID NO: 326407 - DNA, 192 bp, Pseudomonas aeruginosa
atggatgacgccgccgagccctgggcgctggcgatcgatgttgattgcgagccgcttgtgctcagcgagatgcaggaatacgcggtcacagtgacgccgccggcagatgtgcttgtggttgttgcgggtgaccaagggcctcccgggagggatggcgtagacggtgcccaatggggcgcgactgattggtga

SEQ ID NO: 326408 - DNA, 561 bp, Pseudomonas aeruginosa
atggcccagattcgatttttcaaagtggcgaccctgccgggtacgctggagccggacagcttctacttcgtggagaacagcaacttcgccgaatcgtatttgacgaactcggcgggtgtggcgcgctcgatcggcaacagcgcgatgatcaatgcgctgatcaacgaggcgttggccagcctgcccggcaccggcgcgccgatcctgttcgtagccgatatcgctgcacgcgatgcactggagcctgagggcgcaatcttcgtcctggttcaggatgcgagcgcggacccgacagtcgaatcgggcgctgcgctgtacgcatggaaccctgcgaccagcgcctggctgaaggtggccgagtatgagtcgatggacgtcgagctcaactgggacgcgatcaacgggcgcccgacgtcgacgccggcgcagatcgacactgccgtttcccaggcgcacacgcacgcgaacaagtcgacgctggacaagttcggtgaggagtcgggcctggtgcgcttcagcggccagccgatcccggccgagtggaatgggacggcctggtaa

SEQ ID NO: 326409 - DNA, 282 bp, Pseudomonas aeruginosa
atggctgtgctccagactcacaaggtcgtcgcgcagttgcctgagcccttggcgccgaacgcgatttacttcgtccgacgcggcaccggctacgaccagttcgtcaccaacggcgccggggtggtggtggcctatccgatgaacgtccgcatcccggcggctgttcctgggtatctcgccgacggctctatgttgcggctcgccatgaacccagacggccaattgccggcgtacaccgccgccggcgctcaactcaacatccaggtgctgttcaatggctga

SEQ ID NO: 326410 - DNA, 984 bp, Pseudomonas aeruginosa
atggctgatatacgcccgacgaaactccaggccgacggcaacggctacggcagtctccgcgagttcgccgacggcgacacggtgccggttgcgcttggcggaacaggagcagcaaccgctgccggcgcgcgcttgagcctgttcgacgccaggctgcagaacttcagccttctgctcggtggcgctgaccagctcccgttccagactggaccgaatagttggtcgcaaaccccgctgacaagcattggccgcgcgatgatcgcggcatctactcaggcgaacgccttgagctacatcggcggcgttcccaagagcctgtcgtccaaccggaccgtctcggaccctaactctgtaccggacgagtgcgggttctacggcatcggcgtcggtccttactcgaacttgccgccaggcatcgatgctctgaaccccatcgggtcgatgctctatcaccacccgtacgacgtaagcaccgctgtgcagatgcttatcccgcgtactctcgatttcatgtacttccgtcgcaaggcggttggaacgtggcagccctgggtgcggatgctttcggataaccaactcgtaggtacggtatctgtcgatggggcgaatgctccgaacggcgcgattatgcaacagaacgggaccacggctaccaacgttggcaccagcctgcgttttgccgacggtactcaaatcgtctacgcgaggcttcgtctagacttcagcgcggttgacatcctgacccgtcagtacacgttccccatgtcttttttctcgccgccgaatgttaccgctaccttgatccaaggccagcaggcggatatcaacccgttgcagttccagcaactcgggccggttctcgtcgctgctattacggtcagctcgtgcaacgtccgagtcatgcgcccgacctacgtgtcgggtagctgggcttcggggaacttcatcgaatgctctgtgattgcttcggggaggtggcgctga

SEQ ID NO: 326411 - DNA, 312 bp, Pseudomonas aeruginosa
atgaaattcatgctgaagcctgacctgcaagtcgggctgcccggccaggagcgggtgagttcggtttctgtgtccggcctgcggttgaccatcgacggcgaagagtacgatttcaccccgctcgcagcgggtgggtacctgcctcccgatgcgtacataagcgtaacccctctacaggaggtggaagtccgaggtgacttccttttcgtgcgctacatccatcaggtgaccgcggatatctcgactgcgtactgcgccgaggtcgatcctatcctggtggaagttgacggacccgtggagctgccgaaatga

SEQ ID NO: 326412 - DNA, 243 bp, Pseudomonas aeruginosa
atgagcatcgactggagtcaactggtaacccctgagcagcaggccgaagaacgccggcgggctgagtacgatgccgcagccgcggcgcgggcaaatgcctaccgactggaaagtgacccgctcaagaccgaggccgagttcgatgctatcaaggccggcaccgagccggactactctgcctggatcgccaaggtcgaggagatcaaggcccgcttcccgttgcctggtccactacccgaatag

SEQ ID NO: 326413 - DNA, 225 bp, Pseudomonas aeruginosa
atggacgagatgttgcggcgtaggctccgggcggagttactggaggtggggttcctcaaccagtgttgccttgacctgatggaaagcatggaggctgagttcagcctcactgatgaccagcgcgagtgcatcgagcagctcagccgatttctgcaggaagggatcggcaagctgacatccctgtccgagcgcgtggcggccggtgatatcgtcgtgctctgttga

SEQ ID NO: 326414 - DNA, 2256 bp, Pseudomonas aeruginosa
atgcagaacgatgccaatgtggtgcacctgaccagggtcgcttccgagccgtcgccgaacgccggagcggggcgcctgccggtcatcctcgtgcaggtgcgcgacaaggcggcgctgcagctgaaacaggcgttgcaggcgttgttcgacaacgccgacgacaccctcttcgaaatggccgaccgagccaccagcaacctcgaacagaacgctttcttcgaagccatgcgcgacctgcgcctcaagcgcaagagtatcgagcgggtctacctgcagaaggtcttcgaggagttctcggcgctcaaccagatacagtccggcaaatccgtgccgaccctggataccgtgtccttcgacagcctcagcctggtacagaacgaggaactggaggagtccgtcgcggtggacgcgatggtggcgcgggtgatgagccgcgatgccaccgcgctggcccacctgagcacccgcctgaacaccctggtcggccggaaggtcgacgagaagagcaaccccctcgctccgcgtccgctgaccgcggctttcctcgatgcctgccaggggctcggcgtcgagatcaaggtcaagctgatcattctcaaactgttcgagaagtacgtcctggcccattgcgaccagttgtacgccgaggccaaccagatcctggtcgctgcgggtgtgctgccggaactcaaatccgcgctgccgcggcgtcagcccgctgtccgtcccgaagctgtgcgcgatgccgggaccctgcaggaacgagctgcgctgctcgacggcggtcagcaggaggtcttcggcgcgctgcaggaattgctggcgcaggttcgcgacaatccttccttttaccgtcgcgaaacgcctgagaatgccgcgccgatttccagcaacgacctgatgcgcctgctttcccacctgcaacagcacctgccgggccccggcgccgcggagttcgacgtccgcgacggggtcgaccaactgctccagcgggtcagccacaagagcggccgttctcgggtggtcggccaggtggacgatgacgtcatcaacctggtgtcgatgctgttcgaattcattctcgacgaccgcaccctgcctgattcgctgaaggccctgatcggtcggatgcagatcccgatgctcaaggtggccctgctcgacaagaccttcttcagccgcggtagccatccggcgcgtcgcctgctcaacgagatcgcatccgcgtcgctgggctgggccgaacacaatgatgcccggcgcgacagcctgtaccagaagatcgaacaggtcgtgatgcggctgttgaacgacttcgtcgacgacccggcgatcttcgccgagttgctggaggacttcattgccttcaccggcgacgagcgccgccgcagcgagctcctcgagcaacgcacccgcgacgccgaggaaggccgcgccaaggccgaactggcccggcaggacgtggagcaggtgctgaaccagcgactgctcggcaaggtcctgccggaggtggtggtgcgcctgctgcgggatgcctggagcaaggtgatgctgctgatctgcctcaagcatggcaaggcttcggccgagtggcgggaggccctggataccatggacgagttgatctggagcgtcggcccgcatgacgatccgctgtcccgccaacagttgctggagcgtgtgcctggcctgctcaaggcgctgcgtgagggattggccagcgcagccttcgatccgttttccaccggagaattcttcagccagctggaaaccctgcatgtccaggggctgcagcgcgacaagcgcggcgaggcggctgtcgcggacagccccctgctcgacgaagcgagcccgggcacggccgcggaaaagccccgggcgccggtcatgctgcgggtggtcgaggaaatcgtcctgacctcgccggacgccgccccggcgcctgtcgagagcgaagtgcgcctgccggacaacgacgaggcactgctgcgggtcgatgcgctgcgtgtcggcagttgggtggagatccaggaggacgccgagcacaagctgcgctgcaagctggcggcagtgatccggcccaccggtcgctacatcttcgtcaatcgcaccgggatgaaggtcctggaaaagacccgcatgggcctggcggtggagtttcgccggcaggcggtacgcctgctggacgatgccttgctgttcgaccgggccctggagtcggtgatcggcaacctgcggcgcctcaagggcgcctag

SEQ ID NO: 326415 - DNA, 738 bp, Pseudomonas aeruginosa
atggcgaagcctcctatcacccaagcccgcgacgtcgacgcggaacttgtgctgcaactgaacaagttcggcagcgccgccgaccttcggagccaacaggccaagttgaccggcgctgcgcgagaaatacgcaagctgactggtggcggtaccgacctgttcgggaagctgggttgctacttgagcttcgagcaaaagcagctcctacaagacgctgcgcgcttgctcgactcggtgaaccagcaggtcgagcatgcgaaggaaaagcgtgatcgcgacgagaaacaggccaagaagcggcgtgagctgcgcgggcgcctggccaagcaactggtcgactcgaactacccgcttccgggaaatacgctcgaagagcggctggaaatcctgcagatcgcgttgatctacaaccgggccaaggtgttcgatcccctgtactccacgcaccagctccactcaaaactcaaacgctggctggagcgtcccaagcagctcatcgggtggcgcagtgaagccgagtatttcgctagtcaggtggggagcctgcgatgtgacttcattagccacctgactcacgaaatcgcctacgacgatggcagtgaagtcgaggagcgcctgcgcgtcatcaagcagaaggtcgctgactgcaccgcacagatcgctctgaccagcgaggagcaggaaacccttcagctctggacagacgctctgcaatcggctccggagggcctcatatga

SEQ ID NO: 326416 - DNA, 498 bp, Pseudomonas aeruginosa
atgaacctccagaaccgcaacaacctcatcctgagcctgatcgccgagacccagttcgacgcctacgtgcaaggctacatggccaaagcaggcgctgccgccggtgcttccgacaatctgctggtcgaggctgaaggtgctgcgatgctgcagggccttgtcgctccggttcgcgctcagcagcgtgcctgtggacagcccctgcagaacgccctgctccaaatcgcccacgacctactgttgcagacgaagtcgcaactggccatcgcggccaatgccagctcgatccacgtgatccagcgggacatgaacagggctatctggaatatcgcgactgccatcgatcacctggccgagttcgcccaaccctcccaggacaccgtgaaggtcatcgagcggctgatgctcttcgtcggcagctcgcctagcccggaaggccagcaactggccgcagaggcaagtgcagtgcttggcatgagcgagggggggctggcatga

SEQ ID NO: 326417 - DNA, 126 bp, Pseudomonas aeruginosa
atgactcgctctgctctctcgaacatcgccatcgagtccgccaaggtggaggtgaaagcgctggagatcatcggcgccccgggcggaagcacgttcatgcagatcggccgggaggactcgaagtga

SEQ ID NO: 326418 - DNA, 1344 bp, Pseudomonas aeruginosa
gtgagtgttctggaactcacgccgccgcactccgtcgaggcggagcaaggggtactcggtggcctgatgctggacaacgcggcatgggacattgtcggcgatcacctgcagaaggaggacttcttccggcatgaacatcggctgatcttcaccgccatcagcgagttggccgcgaaggacgccccgtttgacgtcgtgacggtgtcggaagcgatcgaagaccttccagaagccggcgggctggcctacctcggccagctcgctgacaacacgccctccgtggccaatatcgaggcttacgcgcagatcgttcgcgatcgggcgcacctgcggcagttgatgtctctcgggcatcactgcaccagaaccgcctcgaaccaccaggcgaatccctgtgaggttcaggaggagatcgagcagaagctgttcgccctcggccaagatcagcacaagtccgactttgtcgatatcaacaagggcctcgcgaagatcgtcgacaccatcgattaccgcttcaacaacaacgtgacggtaacgggggtcccgacaggcctgaaggatctcgacgagctctccggcggactacagaagtcggatctcatcatcgtcggtgcccgtccctcgatgggcaaaacgtcgtttgccctcaacttgatcgacgccgcgctgcagagcgaccaacagaagtctgtccaggtttacagcatggaaatgccagcagagcagctgctgttcaggcttgctgccctgctcggccacctggaccttggcaagctgatgaagggccaactgcaagaagaggattggcccaggctgaccgtcgcgatccagcgcataaacgactatggcagccgactggtcatcaacgaccagggcaacctgacgccgactgagctgcgcgccaaggttcgccgtgcagccaggaagtacggccaccccgtactgatcctggtcgactacctgcagctgatgcgctgcccaggcctggaaaaccgagccaccgagatctcggaaatctcccgctcgctgaaagcactggccaaggaaatggattgccccgtcgtggccctgtcccagctcaatcgcagcctggagaaccggccgaacaagcgaccgaacaacgcagacctgcgtgagagcggcgcgatcgagcaggacgcggacgtgatcatgttcgtgtaccgcgacgaggtctaccaccccaacaccgaggccaagggcatcgccgaaatcatcatcggcaagtaccgcaacggccctatcggcaccgtccacaccgccttcatcgccaaccagacccgcttcgccgaccttgcaccaacttggcagggagctcttgcatga

SEQ ID NO: 326419 - DNA, 186 bp, Pseudomonas aeruginosa
atgaccacttcccagcacctggtcacccaccagtgcatgaattgtgaccagcaccacccacaccacttggtgcgccaggttctccccgccgagaacaccccggaaggtgaagccgaggtgttggtctgcccctgctgcgggagctacgacgtccatcagttggaggcagtccgagatgaacactga

SEQ ID NO: 326420 - DNA, 1023 bp, Pseudomonas aeruginosa
atgcctatcaaacacgccatcgtccacctgatcgagaagaagcccgacggcaccccggccgtgctccacgcgcgcgacgccgaactgggcggctcccaggccatcgagaacctgctggccgacctcaacgaaagctacaacgccaagaacaaggcctggggcttcttccagggcgagtccggagcctacccgttcagcggctggctcggtgaatacctggagggcgaccgcgacttcgtcggcttcagccgcgaagcggtcgagcacctgcagaagctgatggaggagtccaatctctccaccggcggccacgtcctgttcgcccactaccagcagggcatgaccgactacctggcgatcgccctgctgcaccacagcgaaggcgtggcggtgaacgagtcgctggaggtctccccgtcgcggcacctcgacttcggccagctgtacctggccgcgcggatcaacatctccgagtggcgtaacaacaagcagtcgatgcagtacatctcgttcatcaagggcaagggcgggaagaagacctccgactatttccgcgacttcatcggctgccaggagggcatcgactcacccggtgaaacccgtaccttgctcaaggccttcagcgacttcgtggaaagcgagggcatggccgagcagcaggcccgtgagaagaccgagacgctggtcgactacgccacctcccaggcgcgcatcggcgagtcgatgaccctcgacgcactctcggaactgatggacgaccagcaaccgcgggcgttctacgactacatccgcaacaaggactatggcctgtcgccggaaatcccggcggacaagcgcaccctcaaccagttccgccgcttcaccggccgcgccgaaggcctgtcgatcagcttcgaggcgcacctgctgggctccaggatcgagtacgacgaggagcgcgacacactccggatcagcagcctccccactcagcttcgcgaccagctcaagcgccgcaaggcggagcaggagagcacgtcatga

SEQ ID NO: 326421 - DNA, 1920 bp, Pseudomonas aeruginosa
atgcaccttgtaataattgaagccccgggcaagctgaaaaagctgcgatcccttctcccctcgattcgtcccgacgtgacctggcaggtcgaagcgactgccggtcatatcagagacctgcccgttcacggccaggatccgcagatgctcaccgtcggcgtgggccaggatttcaaaccgcactaccagatcctctcgggcaaggaaaaaaccgtcgcacggctgaaggagctgcggcagaaagccgtggaaatctacgtcgcctccgacccggatcgcgaaggcgaaagcatcggctggcacatcctccaggctgccgggatcaagaactacaagcgcgttgccttcaaggaaatcaccaagtcgtgcatcagcgccgaactcagctcgccgcgccacctggacctcccgaaagtcgcctcgcaggaatgccgtcgcgtcatcgatcgcctggtggggtatctggtcacgccagagctgcggcgcgtgatgggtaggccaaccaccgccgggcgcgtgcagtccgtcgccgtgtacctggtggtcctgcgagagcgggagattcacgccttcacagcaatcaagcatttcggggtggaactgggcttcgtttcgccaagcgacggccgtacctggaaggcggagtgggatccagtgcccacgtttgccagcaaggagttcccgtatgtccaggatcgtcaacttgcagaactggtgggggctatacgcaatgtgatcgtcgagacctgcattgatggcgaagaaaccgatacgcctccggcgccgttcatctcctcttcgctccagatggcagccgggaatgcactgaagtggtcacccgacaagacgatgaagatcgcccagcggctgtatgaacaggggctcatcacctaccaccggacggacaaccccaatatttcgaaggactcgatgccggatatccgtgctgtcgccaaggccttgggcctgaagtgcgttgagcaacagcggatgttcaaggctgaccaggacgcccaggaaggccaccccgccatcacccctaccgactggatggccgctaccgccggtgaaactgctgatgagcaggcgctgtaccagctcattcgagttcgcgcgcttgccagccagatcgaagctgccgtgtacgcagtgcgaaccatcaccctcctgggcgtcggccccgacaaaaagccgctgcgcttcggcgccaaagggaagctgttgaacgtgcctggctggagaaaactgctgcagggcgatgatgccgaggagcaaaagaacgaaacgccctcaaaccccatcccggcgctggagccaggccagatcctcaaggtctacagcggcgaggtcctggagaagaaaaccacccctcccaagcgatttaccgatgccagcctggtgggcgaaatgaagcgccgcgggattggtcggccatcctcctacgcctcgatcgtgaagaacatcatcgacaagggcctggtgcagatgaagggccgaagcctgatccccggcgagctgggagaggccaccatcgcgctcctggagcacaacttcagcttcctcagcctcgacttcacccgcaacctcgaggtcgccttggaccggatcgccaacagcgaggacacctacatgaacgtggtccagcagttctaccagctactacagacagagctgcagacactccgcgcgctccctagcgcacaggacgaaccacgcgaaagctccactgccagtatctcctcggcgccgaccagcgacttcctttgtggcaagtgcggtctgcccctggttcaccgcaagaaagccggcaagggcggcttcgacttctggggttgcagcggctatcgcaccatagggtgcaaggtcagctaccccagcaagagcggccgacctgacttcgacaacccgcgcgggctatag

SEQ ID NO: 326422 - DNA, 816 bp, Pseudomonas aeruginosa
atgaactggttgaagaaaaaaattaccgagacacccacctacaagttagcatacgcagccgtcttcttaacaaccatcacagggattctgttaacagaatttactgggaagtccgtcatcgcacccacagccattctatcatcagccttaatggtttgcggattcttgctatggtgcgttccagcagttaagttcatgctaagagcatgggacagcccttttgggaaagtccctgtagcggtactgcacatcttgacattcattgtagctactagcctttcccggcagcttgttgcagaaaccttaggcctgccaccgcagactttcgacctgacgaatgcatttcttaccattctactttacatccctgcattactaatcgtaatttcggtaatcatctctctattcagctcaattatatttctagtcttgaccttagctctaccattgcagttcatcattaccttagcaaacaaggccaaacctataaaataccatttcattttccatgccgccggcgcctcaatgttaggcttgctgctttcgaccagttacgaacatattattgagagcaacaagccgtggattagcccgctaataaaaatcatcgccttaaggtgtgacttccataaagcccccaactaccctcaaaccaatgaagacgaatacatccatcctctagaaaatgggttcctagcttatgcccgccctcagcaggatagaagcattacaatcgggattagagctcaaaccatgaatagtcatgaaagatcaataacagacctaaagccaccattctcgcagccgaccttgtag

SEQ ID NO: 326423 - DNA, 159 bp, Pseudomonas aeruginosa
atgagcaatatccaaatcgtagatctgcccgccctgccggaagtagaggaagtttgcctctctgacatcgaggacgagttgctgctcagcaggcatttctgcaacttcgcctggctgttcctagccagcaacaatgcccaggtatctgccctggcctaa

SEQ ID NO: 326424 - DNA, 198 bp, Pseudomonas aeruginosa
atgcaatacggaaagcgggcactcgcccatcttcgtctcgaactgccgctgcaggttcttatgtccaacgccggcttctatatcggcacccttgatgaagaaggaccagcctcgcgcgagtcggttgaatattacccctcccgcgaacttgctcaacaggcattagacaacggtacttggacgcaacgggaatattaa

SEQ ID NO: 326425 - DNA, 153 bp, Pseudomonas aeruginosa
atgctcacagtcggcctgcgccaaagcttcgattgcatcttgaattacatagagctcgatactgagtcctgcatcgccaaactcatcaaccaagcctttgcacagaatgtactcgaacttgctttgtgcagcatgtactccgatgttgagtag

SEQ ID NO: 326426 - DNA, 255 bp, Pseudomonas aeruginosa
atgaacctactgttcaccaacctcacccaggaaaccctcgcctacctcgaggaccaactgtccaacaacgacgtcgccggcgacgacgagctcatcgacctgttcatcgaggagctgtcgctgaccttggagcaggcggaagcggctgtcgcgctacgcgatcagtacctctgccaggtcttcctgaacggccaagggccgctgcaccaagacgatgggctgagcttcgcccctcacaccaagagcgttcggtaa

SEQ ID NO: 326427 - DNA, 921 bp, Pseudomonas aeruginosa
atggaccgcctgaccgccactcgcgtcttcgtcgaggtcatcgacagcggcagccagaccgccgctgccgagcgtctggacatgtcccgggcgatggtctcgcgctacctcgccgagttggaggagtgggtcggcgcacgcctgctgcaccgcagcacccgccgcctgagcctgaccgacgccggcgcggagctgttgccgcagtgccgcgagatgctcgccgtggccgacgccatgcaggccaccggccagacccgccgcgacagcccgcgcggcaccctgcgcatcaccagcagcctgtccttcgcccaggcctggctgacccgagccgccgccgccttcgtcgagcgctttccgggcaccgccatcgaccttcaggtcaacagccaggtggtcaacctggtggaggagcgcatcgaccttgccctgcgcatcaccaaccagctcgatcccaacctgatcgcccgccgcctcggcgactgccgctcggtgatctgcgccgcgccggactacctgcgccgccacggcaccccgcgccgcccggaagacctggcgctgcacaattgcctgacctactcctacttcggccgcagcctctggcagttcgagcgcgacggcgagccgaccagcgtaccggtgggtggcagcctcagcgccaacgaatccaccgtgctgctggaggccgccgccgccggtgccgggatcagccagcagccgctgtactcggcagccccgctgatccgtagcggacgcctggtggcgctgctgccggagtggtcgccgcaggtgctcggcatccacgcggtgtacgcctcgcgccggcagatgccgccggcgctgcgggcgctgctggacttcctggtcgaacggatggcggccgatccgcactgggacgaggcgggccccctggcgctggcttga

SEQ ID NO: 326428 - DNA, 471 bp, Pseudomonas aeruginosa
atgtcgcaagaccagcaagggatacgctatctctccgttgcagatctcgttcgcctcaatgagttgctcatcctggcccagactccggacgagccgataggcgtcctcaaaccgaacgagttggagtccgcacagcaacggccagccaaccatcgttactatgctcgaaccgacgatatcatcacgctggctgcggtctttgcggaaagcttggcaatgaaccactgctttgccaatggcaacaaacgcacggcggcggcggccgctacggttttcctcctgctcaatggcatagagctgacggggcccgctcaggacttcgtcgacatcatggtcgccctcgtgactcgtgaagcgagcgttcaggacctggaagactggatgttctactggcacagaccattcgacgcttacaacctgccggacagcgacgctttcgagcgaatggtcgcccgcttgggcattggttag

SEQ ID NO: 326429 - DNA, 171 bp, Pseudomonas aeruginosa
atgtcgcgatcgctgcgcaaatcgaagaaactcgtcattcctccccgtcctcgcgatgaggtcgtgcgcgcgcgcccggccttgggagaacatcagaagcaggtcgagaacgcctttgccctggccttcgaacgctacgaaaaaaccttcgaagagctggccaaggtttaa

SEQ ID NO: 326430 - DNA, 252 bp, Pseudomonas aeruginosa
atgcctaggcaagggcgagtggttttaccgaattatccgcttcacgtggtccagcggggacacaatcggcaagtggtattcgccgaggacgaggactaccaacgctacctctccgaccctcaagacatcaaggatgcctttggtatcaaggtctacgcattttgcctgatggccacccatatccatctgctcctggcggcttgccggccctcctttttactgctcccgtcccacagcgccccaatgtactag

SEQ ID NO: 326431 - DNA, 744 bp, Pseudomonas aeruginosa
atgcctgtcgccattcgcatccttctcctggccctggccgtgcttgccggcatcggtgccgctgccatccaggccgaggatacgccctgcgccaccgccgcggaatgcaacacgcgcggcacccaggcttatcgacaggagagttatccacaggcgctggacgccttcgcctggcaattgcgcctggccgaacgccaggaacagggcggagccgactcggaacaggcgctgaacaatctcgcgctgaccagcctcaaggccgggcaaccgggacgcgcccgcgcctggatgaacctggcgctggatcgcggctacagcggcaaggccacgcgccacaacctggaacaggttgccctgaaagtcgactatccgtccctccagggcctcgccgggcactacctgcgctacgccgggcaggccgaatgggaaagcctgcagatcgaaccggtgaagggcggctaccaggcgagcttcgccctgatgcgcatcggcaatccggagaaactgatggaatatgggcccgcggcggtcggcgagttgtccggtcggctggaggggcaaggcgccctctaccgactgcgcagcgaaggcctgggcgccggctgcagcctgctggtatggcaggaaggcatcgacctgcgagtggtggagagccttggcggggactgccagggttacggcggcatgggcatcgccgccgccggtaactgggtgaagatatccagtcaggccagggacgactga

SEQ ID NO: 326432 - DNA, 324 bp, Pseudomonas aeruginosa
atgagccccaccagcgccctacctgccctagcctgcctggctgttgcgctcgccacctgtgagttcattcgtcgccttggcagcgcgcgcctgcccgcttcccggttcgtcaccatcgacggcctgcgcggttacctggcgttcttcgtttttctccatcactcgtccatctggtactactatctgaaggatggtctctggcaactaccgccgtcccggctctacgcccatttcggccagaccagcgtcgcgctgttcttcatggtcaccggcttcctcttcgctcacaagctcctgcacagccgcggcacgccgatcagatag

SEQ ID NO: 326433 - DNA, 789 bp, Pseudomonas aeruginosa
atgcgccctctcctcttcagtgcccttctcctgctttccgggcatacccaggccagcgaatggaacgacagccaggccgtggacaagctattcggcgcggccggggtgaaaggcaccttcgtcctctacgatgtgcagcggcagtgctatgtcggccatgaccgggagcgcgcggaaacccgcttcgttcccgcttccacctacaaggtggcgaacagcctgatcggcttatccacaggggcggttagatccgccgacgaggttcttccctatggcggcaagccccagcgcttcaaggcctgggagcacgacatgagcctgcgcgaggcgatcaaggcatcgaacgtaccggtctaccaggaactggcgcggcgcatcggcctggagcggatgcgcgccaatgtctcgcgcctgggttacggcaacgcggaaatcggccaggttgtggataacttctggttggtgggaccgctgaagatcagcgcgatggaacagacccgctttctgatccgactggcgcagggagaattgccattccccgccccggtgcagtccaccgtgcgcgccatgaccctgctggaaagcggcccgggctgggagctgcacggcaagaccggctggtgcttcgactgcacgccggagctcggctggtgggtgggctgggtgaagcgcaacgagcggctctacggcttcgccctgaacatcgacatgcccggcggcgaggccgacatcggcaagcgcgtcgaactgggcaaggccagtctcaaggctctcgggatactgccctga

SEQ ID NO: 326434 - DNA, 879 bp, Pseudomonas aeruginosa
atgtcgctatccccctggtcccattcctgctcggccggtttcaccctgcgcggctggcgcagcgaaccgagcggcaagccgttgctgcatttcctccatggcaacggcttctgcggccgcacctacgaaccgatgctgcgtctgttggcggaggatttcgacctctggctgtgcgacatccagggccacggcgaaagcgaccacggcggccgcttccacggctggaaccgcaacgccgagatggcggtggaggccttcgaggccgggcgcggtccctatggagatgtccagcgactggcctgcgggcacagcttcggcggcgtcctcagcagcctcgtcctggcccgccatcccaccctgttcgcccgcgccgtgctgctcgacccggtactgttcaccccggcgatgatcggcgtgatggcactttccgagaccctcggcctgcaattgcgcggcagcctggcgaagaaggcgcgcctgcgccgcagccagtggcccgatcgcgcagccgcctacgccggcttgcgcggccgcggtatcttcaagggctggaccgacgaggcgctgtgggcctacgtggaatatgcgctgaaggagagcgacggcggagtcgagctgaagtgccggccaagccgcgaagcggagatcttcagctccttccccaggcggctgtggccgtcgctgggcaagatcaccacgccgacccgcgtgctctacggtgaccgcacctaccctttcgtcgccaagtcggtggcgcgctggtgctcgctcaacccccaggtcagcgcccacgtggtggtcggcggccactgcttcatgcaggaagacccggccgatgccgccgaacgcgtacgcgactttctcctgcccaatccatga

SEQ ID NO: 326435 - DNA, 915 bp, Pseudomonas aeruginosa
ttgactcagcgtctgttcgtcaccgggctctccggtttcgtaggcaagcatcttcaagcttatctggcagcggcccacacgccgtgggcgctccttcccgtaccgcatcgttacgacctgctggagccggattcgctgggcgacctctggccggagctgccggatgcggtcatccacctggccgggcagacctacgtgccggaggccttccgcgatcctgcgcggaccctgcagatcaacctccttggcaccctgaacctgctccaggcgcttaaggcgcggggtttctccggtaccttcctgtacatcagctccggcgacgtctacggccaggtggccgaggcggcgttgccgatccacgaggaactcatcccccacccgcgcaatccctatgcggtcagcaagctggcggccgagtcgctgtgcctgcagtggggtatcaccgaaggctggcgggtgctggtggcgcgaccgttcaaccatatcgggccggggcagaaggacagcttcgtgatcgccagcgccgcgcggcagatcgcccggatgaagcagggcttgcaggccaatcggctggaagtgggggacatcgacgtcagccgtgatttcctcgatgtccaggacgtgctgtcagcctatctgcgcctgctctcccacggcgaggcgggcgccgtctataacgtctgttccgggcaggagcagaagattcgcgagctgatcgaactgctggcggacatcgcccaggtcgaactggaaatcgttcaggaccctgccaggatgcgccgggcggaacagcggcgggttcgcggcagccatgcgcgactgcacgacaccacgggctggaagcctgaaataaccataaaacagtccctgcgggcgatcctgtccgactgggagtcacgggtacgagaagaatga

SEQ ID NO: 326436 - DNA, 369 bp, Pseudomonas aeruginosa
atgacaagaagtgcactggtaactgggatcaccggtcaggacggagcgtacctggccaagctgctgctggagaagggctaccgggtccacggcctggtggcgcggcgcagcagcgacacgcgctggcgcctgcgcgaactggggatcgaaggcgatatccagtacgaggacggcgacatggccgatgcctgttcggtgcagcgcgcggtgatcaaggcgcagccgcaggaggtctacaacctggcggcacagagcttcgtcggggcttcctggaaccagccggtgaccaccggcgtcgtcgacggcctgggcgtgacccacctgctcgaggcgatccgccagttcagcccggaaacgcgcttctactag

SEQ ID NO: 326437 - DNA, 1440 bp, Pseudomonas aeruginosa
atgctgattcccgtggtgctttccggcggcgccggtacccgcctttggccggtgtcgcgcgaaggacagccgaagccgttcatgcgcctgcccgatggccagaccctgctgggcaagacctaccgacgtgccgccgggctcctggccgggcatggcgaaatcgtcacggtgaccaaccgcgagcattacttccagagcaaggaccagttccaggcggcccgcctggggcggcaccggggacatttcatcctcgaaccgaccgggcgcaacaccgctccggcgattgccgtcaccgccctggcgctgcaagccgaacatggcgacgcggcggtactggtggtgatgccggcggatcacctgatccgcaacgaggaggccttccgcgaggcggtggggcatgccgcgcgtctcgccgtcgccgggcacctggttaccttcggcgtggtgccggacgcagcggaaaccggtttcggctatatcgagctgggcgaccggctggacgagcagggggcggccaaggtgcgccgcttcgtcgagaaacccgatgaggaaaccgcccgtcgctacgtggaaagtggcggtttcctgtggaactccgggatgttctgtttcacggcctcgaccctggtcgacgagctggcgcagcatgccccggccctgctggagcaggccagggcctgcctggccgccagtgcggcggtgaagatggccgatggcatccagcatgagctggcgggcgaagccttcgccgcgctgccggacatttccatcgactatgcgctgatggagcgctccgcgcgggtcgccgtggtgccggcggccttcgactggagcgatatcggttcctggggcgcgatgagcgcgctgctcgacgcggacgcagagggcaatcgcggcagcggcgacaccctgttcgtcgacacccgtaacaccttcgtgcagagcgacgggcgcctggtcgccacggtcggggtcgacgacctggtcgtggtggatacttccgatgcgctgctgatcgcccgcgccgaccgggtccaggaggtgcgcagggtggtgcagcggctgaaggacgagcggcacgaggcctatcggctgcatcggaccgtcaaccgtccctggggcagctataccgtcctcgaggaggggccgcgcttcaagatcaagcgaatcgtggtcaggccgggagagcgcttgtcgctgcagatgcaccatcaccgcagcgagcactggatcgtggtgcaaggcatggccagggtcaccaatggcgatggcgcgcggctggtcaacagcaacgagtcgacctacattcccgcgggccaccggcatcgcctggaaaacccgggggtcatcgacctggtgatgatcgaggtgcagagcggcgaatacctgggagaggacgacatcgtccgcttcgaggaccagtacggcagggtggtctga

SEQ ID NO: 326438 - DNA, 1266 bp, Pseudomonas aeruginosa
atgggacagatacgcgtatccggcctcggcaaggcctacaagcagtatcccaatcgctggagccggttgttcgaatggctggtgccttttagcccttcgcgccaccacctgcactggatcctgcgcgaggtcgagttcaccatcgagccgggcgaagcggtcggcatcgtcggggtcaacggcgccggcaagagcaccttgctgaagatgatcgccggcaccacccagccgacctgcggcgagatccgcgtggccggccgggtcgccgcgctgctcgagctgggcatgggcttccacccggacttcaccggccggcagaacgtcttcatggccgggcaactgctgggcatgcaggtcgaggaaatccaggcgctgatgccggatatcgaggccttcgccgaaatcggcgaggccatcgagcaaccggtgcgcacctactccagcggcatgcagatgcgcctggcgttcagcgtggcgactgcccggcggccggacatcctgatcgtcgacgaggccctgtcggtcggcgatgcctatttccagcacaagagcttcgagcgcatccgcagtttccgcaaggccggcaccaccctgctgatcgtctcccacgaccgctcggcgatccagtccatctgcgactccgcgatcctcctggagcagggacggatggccatgcgcgggcggccggaagaggtgatggactactacaacgccctgctcgccgagcgcgaggggcagaccgtgcgccaggaaatgctcgccgacggccaggtgcggacgatttccggcaccggcgaggcagcgatcctcgacgtacggatggtcgaccagcggcagcgcgcgctggaggtggtcgaggtaggccaggcggtgacgctggaagtcgaggtcgaggttcgccaggacatcgagcggctgatcctcggcttcatgatcaaggaccgcctcggccagccgatgtacgggatcaatacccaccgcctggacaaggcgctcaccgacctgaaggccggcgagcgcatcacctaccgcttcgccttcgacatgcgcctgggcaaggggcactactcggtggcgctgagcctgtcgcggctggactcgcacctggaccgcaacttcgaatggcgcgactacggcctggtcttccatgtcatcaacaaccgccaggaagacttcgtcggttgctcctggctgggcgccgaaacccatatcagccgctccggcgaggcggctctggaccccacttccgcggagagcactccatga

SEQ ID NO: 326439 - DNA, 1038 bp, Pseudomonas aeruginosa
atgtcccaatccacgcaggtcaaccgccgcatcgtcctcgcctcgcgcccccacggcgccccgacccgggataacttccgcatcgagcaggttccgcttcctgagcccggcgcgggccaggtgctgctgcgcaccgtctacctgtcgctcgatccctacatgcgcggacggatgagcgacgcgccgtcctacgcgccgccggtggaactcggcgcggtcatggtcggcggcacggtcagccgggtggaagcctcgaaccatcccgggttcaaggtcggcgactgggtactctcggccaacggctggcaggactacgcgctatccgacggcagcggcctggcgcgcctgggcgagtcgccggagcatccgtcctacgccctgggcctgctcggcatgcccggcttcaccgcctacatgggcctgctcgacatcggcaagccccaggccggcgagaccctggtggtggccgccgccaccgggccggtcggcgccaccgtcggacagatcggcaagctcaagggctgccgggtggtcggcgtcgccggcggtgcggaaaaatgccgccacgccgtgcaggtgctcggcttcgatgcctgcctcgaccaccatgccgcggacttcgccgaacgactggccgaggcctgcccggacggcatcgacatctattacgagaacgtcggcggcaaggtcttcgacgccgtcttcccgctgctcaacgccaaggcccggatcccggtctgcggcatcgtcgcccactacaacgacaccgagctgccacccgggccggaccgcttgccggcgctgatgggcacgatcctgcgcaagcgcatcaaggtgcagggcttcatcatcttcgacgactacggccatcgctacgatgaattccagcgcgacatgtcgaagtggttcgccgacggcctcatccagtaccgcgaagagcgggtcgacggcctggagaatgcccccgaggccttcttcggcctgctccagggacgcaatttcggcaagctggtggtgcgcgtcggagccgacgcatga

SEQ ID NO: 326440 - DNA, 1251 bp, Pseudomonas aeruginosa
atgacccgttccgctccgaacctgctgaaatccgcctcgctcgctccggtcctgctggccggcctgccgtcgctcgccggcgccgagggctttatcgaagacgccagcgtcagcctcggcctgcgcaatctctatttcaatcgcgacttccgccagcccggcgcggcgcagtcgaaacaggaggagtgggcccaaggctttctcctacaggcgaagtccggctatacccagggcaccctgggcctcggcgtcgagctgatcggccagctcggcctgaagctcgacagcagccctgatcgtgctggctccgggctgctgccacgccacgccgacggacgcgcagcggacgactacgcgcgactgggcgtggcgccgaagctgaagctgtcgaataccgagctgaagctcggcgaactgctgccggaactgccaatcctcctgcgcaacgacggccgcctgctgccacagaccttccagggcggcatgctgacctccagggaaatcgccggcctgaccctgcacggcgggcagatgcgttcgctcagccagcgcaactccagcgaccaccaggacctctcggtggatgggcgcggcggggcgttctccgaccgtttcgactacctgggcgcggagtaccgcttcaatgccgagcgcagccaggtcggcctgtggcaggcgcgactgcaagacatctaccggcaggactactacagcttgagccacaagcagagcttcggcggctggcgcctgggcgccagcgtcgggctcttcgacacgcgcgacgaaggtgccgcgaagctcggtgaactggagaatcgcgcgctgaccggtttcttcagcgcgacccgcggcggccacagcctcggcgcaggctaccagcgcatgtacggcgacgacgggatgctctacatcgccggcaccagcacgccgttggtcaacgacatccaggtgcgcaacttcaccagcgccggcgagcgctcttggcaactgcgctacgactacgacttcgtcgccctgggcattcccgggctgaccgccatggcccgctacgccagcggcgcccatgcccggacgaaggcgatggacgacggccgcgcctgggaacgcgacgtggacgtcgcctacgtgatccagagcggcccgctgaagaacctcggcctgcgttggcgcaacgccatgctgcggtccaaccatgccgccgatgtcgacgagaaccgcctgatcctctcgtattccctgccgctgctctga

SEQ ID NO: 326441 - DNA, 1176 bp, Pseudomonas aeruginosa
atgaaaatcaaatccgtccgtacccgcgtcttcgaatggaagggcaaggtcgtcccgccgcaggcgcacttctgcaccaatgccagcgacatcctgttcgagaagggagacgccatgggttcgttccgcttccacggctggctggtggtggagatcgagaccgacgacggcctcgtcggcatcggcaactgcgccctggcgccgcgcgtggcgaaggaaatcgtcgacctctacctggcgccgatctgcatcggcgaagacccgttcgacaacgagtacatctggcagaagatgtatcgccgcacccacgcctggggccgcaagggcatcggcatggcagccatctcggcggtggacctggcgatctgggacatcatgggcaaggcggtgaacaagccggtgttcaagctgctcggcggccgcaccaaggagaagatctggacctacgcctcgaagctctacgccaacgacaacctcgacgccttcctcgaagaggcccagggctacctgaaccagggcttcaccgcgctgaagatgcgcttcggctatggccccaaggacggcccgacgggcatgcgcaggaacatcgagcaggtccgcgcgctacgcgaactggccgggccggacatcgacatcatgctcgaatgctacatgggctggaccctggaatacgcccggcggatgctgccgaagctcgccgagttcgaaccgcgctggctggaggagccggtgatcgccgatgacatcgagggctacgtcgagctgaagaagatggggatcatgccgatctccggcggcgagcacgaattcaccggccacggcttcaaggacctgctggagcgccgcgcggtggacgtcatccagtacgacaccaaccgcgtcggcgggatcaccgccgcgcgcaagatcaatgccatggccgaggcctggtcggtgccggtgatcccgcacgccggacagttgcacaactatcacctgaccatggccagcaccgcctcgccgatggccgagttcttcccggtgttcgacgtcgaggtcggcaacgagctgttctactacgtgttcaagggcgagccgcagccggtcgacggctatatccagctggacgaccacaagcccggcctgggcctggagatatccgaagagcacctcaaggatttcatcatcatcgagtga

SEQ ID NO: 326442 - DNA, 963 bp, Pseudomonas aeruginosa
atgcagctgcaattgacccaggagtgggacaagacctttcccctgagcgcaaaggtcgaacatcgcaaggtcaccttcgccaatcgctacggcatcaccctggcagctgacctgtacctgccgaagaaccgtggcggcgatcggctgccggcaatcgtgatcggcggtccgttcggcgcggtcaaggagcagtcctccggactgtatgcgcaaaccatggccgaacgcggattcgtcacgctggcgttcgacccatcgtataccggtgagagcggcggtcagccacgcaacgtcgcttcgccggatatcaataccgaagacttcagcgcggcagtggatttcatcagtttgttgccggaagtgaatcgcgagcgcatcggcgtcatcggcatctgcggctggggtggcatggcgctgaacgcggtggccgtggacaagcgcgtcaaggcggtggtgaccagcaccatgtacgacatgacgcgggtcatgtccaagggctacaacgacagcgtgaccctcgaacagcgcacgcgaacgctggaacaactgggccagcagcgctggaaggacgcggaaagcggtacccccgcctatcagccgccctacaacgaactgaagggtggtgaggcacagttcctcgtcgactaccacgactactacatgacaccccgtggctaccacccgcgggcagtcaactccggtaacgcctggacgatgaccacgccgctgtcgttcatgaacatgccgatcctcacctacatcaaggagatctcgccacgcccgatcctgttcatccacggcgaaagggcccattcacgctacttcagcgagaccgcctacgccgctgccgcagagccaaaggagctgctgatcgttccgggcgccagtcatgtcgacctgtacgaccggctggacaggattcctttcgatcggattgccggattcttcgacgagcatctgtag

SEQ ID NO: 326443 - DNA, 1209 bp, Pseudomonas aeruginosa
atgacaacccgcgcactcgataccgccaacgaaaaccctgaacaatcgggctcctggagtggcgtcctggccattgcggtttgcgccttcgcactggtcgcgtcggagttcctgccggtcagcctgctgactcccatcgccaacgacctgggaactaccgagggcatggcaggccagggcatcgccatctccggcgccttcgccgttttaaccagcctgttcatttcatccgttgccggcagcctgaaccgcaagacgctgttgctgggactgacggcggcaatgggcatgtccggcgcaatcgtcgcgctcgcgccaaactatttcgtctacatgctgggccgggcgctgatcggcatagtgatcggcggcttctggtcgatgtcggcagccacggccatgcgcctggtgcctgccaacgacgtgccgcgagccctggccctcgtcaatggcggcaacgctctggcgacagtggtggccgcgccgctgggcgcctggctaggcaccctcatcggctggcgaggggcttttctctgccttgtgccggtagccctggtggcactggcctggcaatggaccaccctgccctccatgcgggccggcgcgcgtgctcccggcccgggcaatgtgttcacggtattcgctctgctcaagcgtcccggtgtgatgctcggcatgctcgccagcagcctgttcttcatgggccagttttccctgttcacctatgtgcgaccattcctggagacggtcaccggcgtacatggcgcgcatgtttcgctggtactgctggtgatcggtgcagcgggctttatcggcaccctgctgatcgaccgggttctgcaacggcgcttcttccagacactggtcgccatcccgttgctgatggccctgatcgccctggtactgacggtccttggcggctggcccgccatcgttgtcgtcctgctcggattgtggggactgaccggtacctcggcccccgtcggttggtgggcctggatcgccagggtgttcccagaggacgccgaagccggtggcggcctgttcgtcgccgtggtgcaactctccattgccctgggctccacattgggtggtctgctgttcgatcgcactggctatcaggcgaccttcttcgccagcgccgcgatgctgctgatcgcagccttcctgaccatcctcaccgcacgctcgaaagccccggccggctag

SEQ ID NO: 326444 - DNA, 921 bp, Pseudomonas aeruginosa
atgatcaaacgtaacctcaacgacctcctgtccttcgttgccgtcgcccgcgagggcaccttcacccgtgccgccgcccaactgggcgtgacgcagtcggcattgagccagtcgataagcggcctggaggcgcgcctgcagatccgcttgctcacccgcaccacccgcagcgtttcgcccacggcggcaggggagcgcctgttgaatgccatcggcaatcgcttcgacgagatcgaggcggaactggacgagctgtcggcgctgcgcgacaaaccaagtggcacggttcgcattacctgtggcgatcacatccagcgaaccctgttgctacccaggctcaccccgttgctgctggaatatccagacatcaaggtggagttcgacatcaactatgcctttcgggacatcgtggccgaccggttcgatgccggcgtacgcctgggcgacaccatagacaaggacatgatcgccgtgccgattgggccgccagtgcgcatggcggtcgtcgcggccccggcctactttgcggcacatccgaagcccaggagtcctcgcgatctggtcgaccacaactgcatcaacatgcgcatgcagtccggcggcggcctgtatgcctgggactttcagcggaaagatcgacacgtgaacgtccgtgtcgatggacagctcattttcaacacctcgccgaatatcgtggatgccgcgctggcggggctgggaatcgcctggctccccgaagaggaattcgctccgcatatcgaggagggccggttgctgcgagtgctggaaaactggtgcccactgttccctggctactacctgtactacccgaaccgtcggcaaccatcgccggctttcagcctggtcgtggatgcgctgcgttacaccaggcccaggggaacgaccataggcggcgggtag

SEQ ID NO: 326445 - DNA, 1347 bp, Pseudomonas aeruginosa
gtgttgaagaaactgggcatcctgttgctcggggccggttgcgcctgggcggcgcaggccaaggtagacgaagtccaggccgcacgcctggaccaggacctgaccccgctgggggcggagcgggccggcaacgccgatggcagcatcccgccctggaccggcggcatcacccaggcgccggccggctaccggcccggcatgcatcacctcgacccgttcgccgccgatcgtccgcgcctggtcctcgacagccgcaacatggccgcctaccaggcgctgctgacgccgggcacccaggccttgctgcaggccaacccggactaccacctgcgggtcttccccacccgccgcagcgcatccctgccgcagcgcctgtacgacgctacccgcgccaacgccagccgcgccgagctgatcgccgacggcaacggcgtgcagggcgctgccgccggcgtgcccttccccctgccgcagagcggccaggaagcgatctggaaccacatcatgcgctaccgcggcgagcaactgcacctgcagaccaaccaggcggcggtgctggccaacggcagctacaacctgctcaagctcgaccgctacctgtacttcgtctatggccgcgaggggatgatcccggagaacctcgacaacacgttgttctactacaagtacaaggtggtcgcgccggcgcgcctggccggttcggcgctggtggtgcaggaaaccctcgaccaggtgctgtcgatccgcaaggcctggcgcttcaaccgtggcgagcggcgcgtgcgccgcttgccgaccctggcctacgacagcctgcagccggataccaacggcatggccacggcggacaccgtggatgtctacaacggtgcaccggaccactacgagtgggcgttgctcggcaagcgcgagatgctggtgccttacaacagctacgcggtgcaccagaagggcctcgcctatggcgacatactcaagagccgcttcatcaatcccgacctgctgcgctacgagctgcatcgcgtctgggtggtcgaggcgaccctgcgcaagggcttcagccatccctacgccaagcgccgcttctacctcgacgaagacagctggcagatcctcgccgccgacatctacgacaaggatggcgtgctgacccgggcccaggaagtccatccgatcaactactacgatgtgccgctggtctccagcaccctggaagcgatctacgacttcaagggcggccgctacttcgtcgatgggctggacaacaacgagccgatgtacgacttcggcgtgcaggtcgggccgcgcgacttcaccccgcaggcgctgcgccgggaggggaactga

SEQ ID NO: 326446 - DNA, 1968 bp, Pseudomonas aeruginosa
atgagcatggaaagactcagccatcaaatcgacgcctacgtcgcctggaagcgcgagctgatgcgggaaatcacccgctatcgcggctggctggagcgcagccggctgaacagcccggcggtcgaggccaagctcgaacgcgccctgcgccaactgcgcgcggaccacatcaccctggccttcgtcggcgagttctcgcgtggcaagaccgagctgatcaacagcctgttcttcgccggctacggccagcgcatgctgccgtcccacgccgggcgcaccaccatgtgccccaccgagctgttccacgatccgcgcgccgagcgcagctacatccgcctgctgccgatcgagacgcgcctggccgacgccagcgtcgcccaattcaagcgcgtgccgcgccactgggtgaacattccgctggacaccggcgacccggagggcatggcccaggccttcgcccaggtcgccaagaccaaggcgctgccggtggaacaggcgatccagctcggcttccacccggacgccctggaagccgccgacgagcccgaccaggtgcgcgtcccggcctggcgccacgccctggtcaacttcgaccacccgctgctgcgccagggcctgcggatcctcgacacgcctggcctgaatgccctcggcagcgagccggagctgaccctgtcgatgctgcccaacgcccaggcgatcctgttcctgctgtccgccgacgccggtgtcaccgcctcggacatggaaatctggcagaagtacatccagccactgcgcgaggacggccacagcagcctgttcgccgtgctgaacaagatcgacgtgctctgggacgacctttccggcgagcgcttcgtacagaacgccatccgcctgatccaggacggcacggcccgccagctcggcctgcagcgcggcgacgtgctgccgctgtcggcgaagcaggcgctgctggccaaggtccgcggcgaaccggcgctgctcgaacgcagtcgcctggatcggctggaagcgctgctctgcgagcgcatcgtcgcgcagaaggaagcgctgctggagaacgccgtgctcggccaggtccttggcctgctgcacaacagccagcatctgctgcgcctgcgcctggagaaggtcgaggaacagcgcgcgctgctcgacgacaagcagcgcgacagcggccaactgctgttcgaactgaccgcgaagaccaaggacgaccacggccgccaccaccgccgcctgctcaacctgaagaccaaccagcgcctgctgcagcaccagggcgcgacgctgcgcgagacgatccgcagcgaacgcatggaacagcacctgcagaaggtgcggcgcaacctcaacggcagcctgaccacggtcggcatcaaccaggcgatcctggcgttcttccgcgcggtggagcacgacctcgacaacctcgagcacgaggccggcatggccaaccgcatggtcgccgccatctaccgccggcacaacgaggagaacccgctctacgccctcgacgcgccgcagctacgggtccagcgctaccagcgcgaactgttgcaactgaagaagaagggcgaccagttccgcctgcagctgaagaccgtgcttaccgagcaacgcctgctgacccggcgcttcttcgccaccctggtgcaggaggtggtcggcctgcaccagcgcctgcgcgaggaaaccgagcgctgggccaacgacgcgctgatgccgctgatgcagcacaccctggaaaacaaacagttgctcgaaagccacatgctccgcctcaagggcctggcccaggagacccagcaggtacgccagcgcagccaggccttcgccgggttcgccggggaattgcaggaacagttgcgcgaagccggcgacatcctccgccagttgcgccgcccctcgcccctgcagcgccaggccaaggtggtcaacctgcccggctcgcagcgcgcctga

SEQ ID NO: 326447 - DNA, 2415 bp, Pseudomonas aeruginosa
atgcctcgcccgacgttccgtcccggcctgctcgccctagccatcgccctcgccgttcccgcaccgttcctccacgccgccccggccgaacaggccagcgtgcgcgactaccgcatcgccgccgggccgctggcaggcaccctgaaccgcatcgcggcccaggccggcctggtcctcaccctggatccggcgctcgccgaaggacgcagcgcccacgccgtgcaaggtcgcttcgacgcgcccggcgcattgcgcgaagcgctcaagggcagcggcctggaactggtggaaaatgccggcggcacctacagcctgcgcaaggtgccggaagacaccctgtcgctgcaggcgatgacggtcagcggcgccgaggaagacccactggggccgaccagcggctacgtggccaagcgcagcatgaccggcaccaagaccgatacgccgatcctcgagaccccgcgttcgatctcggtggcgacccgccagcagatgaccgaccgcgccgtgcacaacctcgacgacgcggtgcgctacatgcccggcgtcgtcgccagcagtttcggcagcgactcccgttccgactggttgaaggtgcgcggcttcaagccgacccagttcctcgatggattgccgatggcgacaggctcatacaacaacccgaagctggagacctggaatctggagcgcctcgccctgctccgcggcccggcctcctcggtctacggccagaccccgcccggcggcatgctcgacatggtcagcctgcgcccgcagggcatcgccagccatgaactgaaggccgagatcggcaactacaaccacaagcaggtcagcttcgacagcaccggcccgatcgacgacgaggggcgctttctctatcgcctctccggcgtggtgcgcgacagcaacactcaggtcgaccatatcgacgacaagcgctacaacatcgccccgagcctgacctggaacatcgacgacgatacccggctgaccttcctcagccaattcaaccgcgacgatacagccgccaccagccaattcttgccgttacgcgggaccaaatacgatgctccattcggaaagatttcccatcacaaaaacctcggcgatccggactgggacttctacgaccgcacctactattggttgggctactccttcgaacggcgcatcaacgatgtctggcagttccgccagaacctgcgctacctgcgcaacgacctgtcgttccagacgcttacgccaaccagcagtatcgatgcggccagcgccgacggcaccttacagcgcatgacgacctcggtggacgaggacatcagtcagttcgtggtagataacaatttccaggctgacttcgagaccggtgcgctgcgccatactctcctgctgggtatcgatcacaaccgcacccgcaccgactacacctcgatctacaacttcaccggtgtgccgccgaccaacgtcaacaacccgatctatggtcagccaattcccaagccatcgcgctctagtgcgttctatgactaccgacagaagacttatcagaccgggctctacgtccaggatcagatcgccctcgacaactggcgcctgaccctcggcggccgcgaggactgggtacatgccggcgccacgttctacaatcagaacgatgccaccaacaccagccgcgacaagaaattcagcggtaacgcagctctgagctacatcttcgacaacggcctggcgccctacctttcctatgcggagtcattccagccaagcaccggcgccgacgatataggctccaacaagatgttcaaacccaccgaaggcaaacaatgggaactgggcgtcaagtatcaacccgtaggctccgattcgctgttcaccgcagccgtctacgacctacgccaggagaacgtgagggtcaccgacaacgtcaatgggacacccactacctcgcaggctggcgaggttaaggtcaccggcttggagctggaagccaccagcaacgtcacagacaatctgaaagtgatcggctcctatagctacgccgacaccgaagtgaaaaaaggccagtacgcaggcaaccgcctgcaacaggcgccgcgcaaccaggcctcgctatgggccgactacacctggcacgagggtacgctgaacggtttcagcgtgggtgccggcgcccgctacgtaggctcgacctacggcgaccaggccaacacctacgacggctacgccggctcgtacaccctgtacgacgccgccgtgcgctacgacctgggccaattgaacggcagcctgaaaggcgtcagcgtggcggtcaatgccaacaatctgttcaacaaggactacctggcgtcctgcgacggctactactgctactacggcgaccagcgcagcgtggtgggcagcgtcagctacaagtggtga

SEQ ID NO: 326448 - DNA, 150 bp, Pseudomonas aeruginosa
atgaacgacgacgacaaggtgatcgacctcagcgccgagcgcgacaagcgcatccacgacgtgcacgagaagcgcctgcaggaggtccgcaaggccttcgaacaggtgttgccgctgggcaagccgcggaagaagccgaagaagcgctga

SEQ ID NO: 326449 - DNA, 237 bp, Pseudomonas aeruginosa
atgaacgggcgcggcatcggccttcccgccctgcttccggggcccctgctggccacgggctgccagagcgggccggacatgctggcggcgccggtgatgggttacaaccatacgtccgcggcgatcaattggttttcggtgaatggggcgggtggaccgcgtttaggcccttatcagggggatggtagccaggtttgttgcggagtgattccaaagaagtggaatccaaatttgtaa

SEQ ID NO: 326450 - DNA, 471 bp, Pseudomonas aeruginosa; identical to SEQ ID NO: 320328

SEQ ID NO: 326451 - DNA, 159 bp, Pseudomonas aeruginosa
atgcctgatcgaaccgctctgccccgcgccttgctcgcggcctgggtcctgctcctccagggcggcggtggcgagtacccgctgcaggacggcttcggctggtccaacggcgtgaccctgcaactgctccgactctacggcccgggcgccggtcgctga

SEQ ID NO: 326452 - DNA, 627 bp, Pseudomonas aeruginosa
atgtccttccaatacaagcgtctagacaagaacgatgccgccgtcctcctggtcgaccaccagaccggcctgctctcgctggtccgcgaccaggacccggacaagttcaagaacaacgtgctggccctggcagacctggccaagtacttcaagctgccgaccatcctcaccaccagtttcgagaacgggccgaacgggccgctggtaccggagttgaaggaactgttcccgcaggcgccctacatcgctcgtccgggtaacatcaacgcctgggacaatgaagacttcgtcaaggcggtcaaggccaccggcaagaagcaactgatcatcgccggcgtggtcaccgaggtctgcgtcgccttccccgcgctctcggcgctggaggaaggtttcgaggtgttcgtcgttaccgatgcctccggtaccttcaacgaagtcacccgcgacgccgcctggacacgcatggtcgccggtggcgcgcaattgatgaactggtttggcgtagcctgcgaactgcaccgcgactggcgcaacgatatcgaagggctgggggcgctgttctccaaccacattcccgactatcgcaacctgatgaccagcttcagcctgctcaccgcagccaagtaa

SEQ ID NO: 326453 - DNA, 801 bp, Pseudomonas aeruginosa
atggaagcagctgcatcagttagtaattcaatatatgccgagaatttttgtggaacttataaggatggcgcttaccttaaatacaaagtgcaaattaaatactcaactgttgacacgctcaacaaaaccctggagttggagatgagcaatggcagccttgtacgcagggaaggcaaaacaccttatctgcttccccccggggatttggaagtcatcttatgctcagagcgagagacacggcgtagagcgcatgaggatgatgtcgacttcctgatgcgctatctgaatatagataaagctgctttattttacttggccgaaatggggggcggagagttactgcctggagatataaaattcgagcaggccgtcgacagaaagtatgacgaattcgatgaggagatattgacggatatatgtaagccagatggcgaaccctatatgaatcttttgtttcggagtcgcggcggccagtattgggtatctctagcgcgcttggcgacgagcgagtacggcctgcttctggtgagttttgctgtaaccaaagcgcgtgaaacatgcaagcaaaagcttacgcttttcttggtggatggtttaatctataactttgatagttataactttgaaaagcttcttggtgtgttgtcgaaaagtgattttcagtcagccctagtattgccgccttatcaggaatctaacattctagataaagatgaaggagttgttgcattaaaggagttagactatcttgtgcagtggcagttgagagtacttgagcggtcagagtggggagagtgctag

SEQ ID NO: 326454 - DNA, 654 bp, Pseudomonas aeruginosa
atggctatcactctcattttgggttgcaagcaaggtgacttcaacgcacggcatgatggctcctgcgaaggcatttccttttatttctgcatgcgcgcgctcgacctgggtccggtgccaggacttgccgacctgatgcaacagcggaatatcggtgggaaggttgagcgaatcatggatctgcaggaccagatctgtggtggtctcatgagttccggcacctatgaaaccggtatcgacggcgtgccgatcagcaaccccagcgggggcaaccttcccggtattcgcaatcagggcaaggcgatccaggcgtttcataacctctactcacaggaggcacagaccctgggatgcaaatcgattggaaccttgtcctccttcttcgagggaggcttcgtccagttgctgacgcacaccatccagctgttgattcgcagccggcgcggcgcggccctgatcgccatgcaaagccctacgccccactcggtggcgcttgcctatgacggtagcgatctctatttcttcgatcccaactccggcgttcacgaattgacgaacctcgcctcggcagctacggaactggagaaccacctgacgacccgctatgcagtcccctattgcgttcacgccaatatgttcaagttgaaccactga

SEQ ID NO: 326455 - DNA, 618 bp, Pseudomonas aeruginosa
atgagtgattacatcgagaccctgcgctcgaaatacgatgcccacttcggcagcgaaccgagcacggtctttccaggccacgaatactgggacgatagcgctggcgtgccggcgatcgacgtattcgtctaccgcaaagaggacacgggcaggccgcacgatgtgctgatcaccgccgggatgagccgccagcccatgaacttcctgcccacctatgaaggagagcgctgggcgagcgaactgatctggtatttcgacgaggcggaccggcacgacctccagaccacccaatggctggccgggcttccgttctacgacaggttcgtcctgggcttcgggcatacggtgcacttcggcatgccgatcttcgagggtgggcacctgcgccatttcctgctgctgaataccctggtgaagatcgatgcgcggctgttcgacgatttccacgcggcagtccatcccgtcgacctgttgtgggtcgtgccgctttccgaacgggaataccggctcaagcgcgaacagggaatcgatggcttgatgccggtctttgcggaaaacgcgcatccggtgacagtggacaagcagcgcggctgttatctgggaggcgagggcgcgtga

SEQ ID NO: 326456 - DNA, 834 bp, Pseudomonas aeruginosa
atgtcgtttcgcaagaccctgttgatcaccggcgccagcagcggcttcggccaggccctggcccgcgaggccctggatgccggtcaccgcgtggtgggcacggtgcgcagcgaggaggccaggagcgcactggaagccgtggcgccgggccaggccttcggccggctgctggatgtcaccgacctcgccgccatcgagccgacggtcgcagccatcgagcgcgacatcggtccgctggacgtgctggtgaacagtgccggctatggtcatgaaggcatcctcgaggagtcgccgctggccgagatgcgccggcagttcgaggtcaacctgttcggcgcggtcgcgatgatccaggccgtgctgccctacatgcgtcggcgccgccgcggtcatatcctcaacatcacttccatgggcggctacatcaccatgcccggcatcgcctactactgcggcagcaagttcgccctggaaggggtttccgaagccttgggcaaggaggtggccggcctcggcatcgccgtcaccgcggtggcccccggctccttccgcaccgactgggccggccgttcgatggtccgcagcccgcgcaccatcgccgactacgacgcgctcttcgacccggtccgccaggctcgccaggaaaagagcggcaagcaaccgggcgacccgcgcaaggccgcgcgcgccatgctccaggccatagaggcggaaaacccgccggcgcacctgctgctgggcagcgatgcactggggctggtgcggcagaagctgaaggcgctggaggaggaaatcgcggcgtgggaagaggtcacgcggtcgacggatggatga

SEQ ID NO: 326457 - DNA, 2010 bp, Pseudomonas aeruginosa
atggacaaggcgatcctcgacgacaagaaggctgacatcagtctgaacgtggaggacgtgcagcttgccgcattcatcaacgaggtattcggcaacatcctcggtttgccgtttgagatcgaaagcgctctgaaggaaaagactgatcgcgtgaccgttcgtttggaacagccgcagactgcacagatggtctacgaagtcgcgcgccaggtgctcgtcaactacggcgtggagatactccaccaaggcgatatctatcgcttccagatcaagcaggtagggctcagcccggacgagccgcccattctcatcagtggcgaagcacggcctagtgtgccgattgcctatcggccggtatttcaattcgtggcgttgcacagcgtcgaccccaaggatgtgattccctggttgaacagtgcctatgaaaaatccggcctgagcgtgatggccgatggtgcgcggagtggcttgatgctcaagggcatgtcttccatcgtcaaccaggccaccgaagccgtccgccttctcgatcaacctttcatgcgtggacgtcacagcctgcgtatcgacccggccttcgtcagtgctgccgacatggccagtcaactcaagaccgtgattgcggcgcaaggctacagcgtcggtatcggcgaagcggtcggcagcataatgctggtaccgctggaaagttccaatggcctcatcgtcttcgccaacgatggccaacttctcgacttggtgcgcgagtgggcgcagcaggtcgacagggctccgatggcggttgccgcaggtatcggcgaggagaaggaaggactgttcttctacgaagctcgcaatacccgtgtcaccgaactggccaagtcgttgcgggcattggtatcggggttcgccggggagggggcctacgggatcacctccggactgcaaagcagcgcttccaagcgatctggcggtggcaggcgcgccggagacgatggtgcggcaccggcggtggctcccttgctacaagccgcaggtgccgcagcgttggtggggggcgacggtgctaacggtttgctcggtggcttggcggccggtatcagcggcagcggcaccatagtggaggacgagaatcgaaacgccatcttgttccgaggagcggcgcgtacctggcagcagatgcagggcttgctccgggaaatggacaagccggcccgccaggtattgatcgaggtgacggtggccagcgtaagtctcagcgacacccaggagttgggcgtggagtgggagatgctcaacggcagtttcaatagcgcgacctcgaccggaagcaagggcagcgccgggaaaggaggcttcaactacgtcatcaacaccgccggaggcaataccgcagccatccaggcaatggcggacaatcaacgagtccgggtactcgccactccccgtatcttggtcaagagcggcgagcaggccaacatcaatgtcggtcgggatattcctatcccaacggcccaggtcaatgacgacagcaccactgctggaagcaccaacctgcgcaatgaaattgcctaccgctctaccggcacaattctgaatgtcgcccccgtagtctactcggatagtcgggtcgatcttacggtcagccaggagttgagcgacagtggcggttcttccggcggcggtggcaaggccagtggcggaggaatcagcgctccggagatttccaggacgtcgctggaaacatcgcttacgttgaaaagcggtgggtcggtgctgatgggggggctgattcgggacaacataacggactccaacgctggcgtgcctctcctgaaggacattcccgggatcggtttcctcttcggacgccagaaagccgtgaagacccgtgaagaagtcatcatgttgatccagccttacgtgctggaaagtgatgccgatgccagggaagtgacggaaaagctgcgcgccatgctgagcaagacactggcctgctccgatagaccgggcgcctgccgtatggaatga

SEQ ID NO: 326458 - DNA, 2241 bp, Pseudomonas aeruginosa
atgactttggggccgatggaggagtgggaaaagccgttcttcagcgaacgtatccatgcctgcccgcgacgtacccactcgaccagttttcaactggtggatgagcggggggatggcaggccctatgccggcctggcctatgaagtcagcgattctgaggaggttgtctaccttggcattctggacgaaacagggactgggaagatcaatcggcactattgcgggccggtggtgctcaaattcgataaagcctatcaagggattgaggatatctatacagctttaagtgggagagatcactaccctctacctatcaccgaactgcaagtgcgtgccgagaagacccgctttgcaaaccctgacggcgcccgcacccggtccaaccccgcccaaggccaggccgattctttctgccaggtcgaggtgagcgaactggtggagcaccgggcccatcttccgcccctggcgctccggtgctttccgccccggcaccaggtgcatgcgctgatgcgccgtccctcggccgccatggcggagttgggatttgctcccaggcctccccgggttcgcggtatcgcgctgttgccgaaccggcaccatgtgctggaggtgcgccccttgcgggcgctgagtccgctcctgtccacgggtgaagcgttctgctacctcaacctgtaccagttggcgctgatgtcgaccctgagctatagcccgtttggccaggaacccgatacgcaaccggtggaaaccgacagtgtgagctttccggcgcaacccagcgtcggcaactggttcggcgatgccctggccaggtccgatgagctgtggcaagtggacgcaactcaggccggcgggaagacttactaccccctgtatgaagacgtggcctactccaggcgcctggaggtcataccgttcgaccccgagctataccccgaagtgaacagccccgagcttggggtggatcaggaacatccgtccaggctccattacctggacgatgccaaaaaacgggatggtaccgatacgcaagcctatatcacccataacaatgagttgatcctgctggtggtacgcggcaccgcgagtatggctgacgttctgcgcgatgtggatgctgcgcagacgccgttcgaggaaaccagcggcaaggtacacaacgggttttacgagtcggccaaggtggccatcaagttctttacaacctacctggataagttctacagcgggcagaagctggtgatcaccggccacagcctcggtggcgcagttgcactgctgatcgccgagatgttacgccacaggagcggtttcacttatgacatcgtgctctacacctacggcagcccgcgcgtaggcgacaagaccttcgtggaaaacgccaggcctctggtacatcaccgcatggtcaaccagaacgatccggtacccagtgtcccggcggcttggatgaaaacgtcctggcgcatgtcgggggcgggcgtcctgctgatgctcttcaacccagccatcggaggggcggtggtgctcctgagtcccgtcaacatcgtcggcgagccttacacgcaccacggcaaactgcgtcatttcatgcccgtgtcgtttgccgatggccacaagtccgcgatcctgtggacgcccggctgcgaaagcattaccgagcgcggcggcgcagcggtttgcgccaaggcactggctgcaaggaatggcttgccggagcgaggcgggctgctgcggcagatgctggataatgccgatcacaagatggtcgccagctacattccgcattgctgggcttccttgcgccgtgcacaagaggccctggaggaaggccgcaccgtggtgactccgaccgagtacgagcgggtcggggaagcgctgcaggacttcaaggcgcagttgcgggaaaaggaggcggcggcctacggttctaccagggaacaacagatgatggggccattgcgcgctgaaatcggcaggttgcaacagaccgctgtgcgactgaaagcattgagcgtcgagcgtgtcagcgaggccaaggtctacggccgggttgccgagcggcccgaggcgctggcggtgagcctggagcgctggctggcgcactcgttcaatcgctcgcatgaacaactcgcgatggccccgccggatgccgacagcaatgagcgcgcgatcgctaccctggtaggcggccatgcccctggagcggtgttcgatctggacatcgatacgcttggatag

SEQ ID NO: 326459 - DNA, 243 bp, Pseudomonas aeruginosa
atggcggccgagcggctagcctgtccgatggtcctcggcctggagatgacccacaagccacgcctgctgcgcatcttcaccgcgcttcaaaccgatgccctgaaagacgggcgtcaccagcacgtgtcggtattgcgcgaacgtcgctacgacgcgcgcctgcccatgtggcttggaacaggtcccaggcaaaaagccgaggggaggcggatatggatagagccctcgatagggtttgtttga

SEQ ID NO: 326460 - DNA, 126 bp, Pseudomonas aeruginosa
atgaatcgcccgccactgcgcgatcaatcgcagggtgtcggcggcagcagcgcaagtttcggcgaaggcgaactggcgctggcggagcggaatccgatggacgtggcggctctgttcgccgcctga

SEQ ID NO: 326461 - DNA, 360 bp, Pseudomonas aeruginosa
atgaaggagatccgttcgcagcagatccgccggcggaacaacatgctcagcgagctggccgaactgatcgtcgaagcgttcgtgcgcaacgggattcctcgggagaaggcggtgcccgagtcggaggaggtggcgttccagctgcatcggcgctgggccggtttgacatttgtttttccggtcaaggatgacctggcccgcaagcgtctggagttgcacatcctgcagcgctacgatggatcgaacgccgacaagctggtccaggagttcggaatttcagaagggctgatctacgaaatcgtcaggaagcaccgcaggcagcgaaaggatcagatgacgctttttgacccggccgaatga

SEQ ID NO: 326462 - DNA, 564 bp, Pseudomonas aeruginosa
atggcactcgctagggggctgctcagcaagatccacatcgctcgccagcagctcggcctgcaggacgatgtctatcggcagaagctgcgagcgatgttcggcaaggggtcggcgcgggatctgaacctgcgccaggccgagcagttgctgacggagttcaagcgcctgggctggcaaccacagcccagcaggcgagcagccggtaagccgcataacttcagtcagttgcccgccgaggtccaggtcatcgaggcgcagttggccgagatgaggctgccctggagttacgccgacaagatcgcaaagcagatgttcggtgtggccaaggtcgcctggctgaagaagccagatcagctcacggcaatcctggcggcgctgcatgtcgagcaggagaagcggtacctactcgctgaagtggatcggctttgccagggactgggcattgagcatccagaacaggcggccggcttggaacagctgccgaaagggtggcggcggcagcgtccaatcctcaaggccctggtggaaacgctccaggcggccgcagatagcaagcggaggtaa

SEQ ID NO: 326463 - DNA, 468 bp, Pseudomonas aeruginosa
atggagcgctaccactcaacggccggcgatccacctcggcgtgatgctgacgtaaagcggcaggaggcccaggagctggacgaactggttcagcagttcctggccggcggcgggcagatcgagaaagtcgggtacaagatgcgcgagctgccggacactttcgtcatcaatcccatgaagacgccggtatacaacggagccctggccgagaactcgtcgctcaaagccaagcctgccgcaccgcgcacgcaagcaaagaccgagccccaacgctcaccagcgcccatgccggctttgcagccggctcctggcgtgaacccgaaggtctggttgagccggatgatcgccgcccaggcgctgctggccgcgcagacggccaggctcgctcgcgaactgggcgtcagcgatgctgagctgcgccggctgggtcgtcggcatggcatggaggtgttccatggcactcgctag

SEQ ID NO: 326464 - DNA, 690 bp, Pseudomonas aeruginosa
atggaccaggaccgtatcctcgacaagatcaagaagtgtctggaaatggccaaggggcggggttcgaatccgaacgaagccgagatcgcactgcgtcacgcccacaaactgatggaagcctacaacctggagatgggcgacgtgctggccagcatggctggcgaagccagggttcccgccggttcggatggcaagccgccggcctggcgggtgcgcctcgcacaggtgtgctgccatgccttcggcacacacctgatcatctgcacctcctggcgcgaaagcgcgtcgttcctgttcgttggctgcgcggcggcgccggagctgacgggttatgcctaccaggttctggagcgccagttacagaaggcgcgcaaggactatctgagcacgcagaagcgctgcaagcgttccaccaaggtggctcgtggagatgccttcgcgcacggatggatcgaggccgtgtacgccaaggtcgaccaattcgcgggcgtcgacgacaacatcgccgacgcgattcaggcgtacatggcgaagcaccacgctgacgtcggcaagttcgagatgaagcgccgcaagctcaaggcacgtgacgaagtggccagtgaagcggggtatgccgcgggcaagcgcgcgcggctgcaccaggggatcgggcaccaggccgtggctcggcttactcagggggtgtga

SEQ ID NO: 326465 - DNA, 624 bp, Pseudomonas aeruginosa
atggctgaacaaacagtgcatgttcccgccggctaccgcatggacgccaaggggcgcctggtacctgaagaaatgatcaagcccattgacctggagcgcgaccgccttgtgcaggagatcgttgccaaggggaaggctctgaacaaggcgttgctggatttcaaactggcaacattcggcgatatcgaagccttcatcaccctgtcggccgagcagtaccaggcgaaggtaggaggcaagaagggcaacgcctctctggtcagcttcgacggtcgctacaaggtcattcgggccatggccgacaacatcgccttcgacgagcgcctgcaggcggccaaggcgctgatcgacgagtgcctccacgaatggacggaaggtgctcgcgcggaggtcatcacgctgatcaacgatgcgttccgcgtggaccaagctgggaacatccgtaccggcagcgtgcttgccctgcgccgcctgcagatcgatgacgaacgttggcagcgtgcaatgcaggccatcggtgaggctgtccaggtcgtgagcaccaaggcgtacgtgcgtatccaggagcgggtcggggactccgaccagtaccgctccattcctcttgatatcgcgggggtgtga

SEQ ID NO: 326466 - DNA, 201 bp, Pseudomonas aeruginosa
atggctgatgttctggaaatcgactgccccgcgtgcagcactccgtaccccgaaatcaccgcaggctctgcagctcatgacccgagcctgatcgagctggtgatcacctgcagcaactgcggacacatcctgaatgcgttcgtctccctggctgagatgagcgttgtaccgaatcccgaagaggaaacctcccatggctga

SEQ ID NO: 326467 - DNA, 612 bp, Pseudomonas aeruginosa
atgaacaaaggcacaaagcggaaccagtgcgacggctgccaggccggcgtgccgctggagaacggcaagcaccgaatgggacgtcctggtggctaccccgacctcatgagctgcacagcccatctctatggggcgccgcaagtacagcctgtggcatgggccattttcgacggcgcctggatctcggaccacacggctgatccaaaccgagcggagcaatgggctgaggatggcaagaacgtgatcgctcttttcgcgatgccggtccagcagccggtatctgctttcgctcgggatgtgctggcagaacggcagcggcagatccgacaggaaggcttcagccccgaccatgacgctgagcaccgaggcggtgaactagcgctggctgctacctgctacgccgacgaagccgttacgcagatctgccagccagaacgagaaccgtgcctgacgcaactggtgccgggctggtggccgttcgagccatcctggtggaaacccagcctggacgctcgaaagaacctagtgaaggccacggcgctgctcctcgcacagggtgacgcgctcgacctgcagattgataccgagctggagggacgtccccatggctga

SEQ ID NO: 326468 - DNA, 444 bp, Pseudomonas aeruginosa
atgagcagctttccggtaaccgtaaagaagctggctggtcgcctacacaccgttgcgcgccatttggatctggaaccggatgaagtcgagctgttcgccagcattcagggtgtgcgcgttccgctgctcaacacgacgttccaggtcgacgacgacggaacgctcttgttcctgggtggattcgacggattccttgacgagctgagggcgcaggtaaaggaggccgagcaaaacttggtcacggagtgcaaccggtacaacgacctctggctccagttcgatcaactgcgagccagcagcgaccggctctgcaacgagctggctgtgatgtgcgaagcacaactcgtcggagatcacaacttggtcatgcgcaaggtcgagcagttcaccgaccgctaccgcgagaactttaagcaggccgcggccaacgggagggtgcactga

SEQ ID NO: 326469 - DNA, 234 bp, Pseudomonas aeruginosa
atggccttcactcccgagctgatcgacgaactggaactgctggcgctcttcaacctgaacaacacccaggaaggactcaaggtccatcacaccgccgacggcaaggccgtcgccgccgcccgacgcctgcacgacaaggggctgatcgaccagcccgacggcggctacctgaccagtctcgggctggacgccgcggagcaggcacagggcctgctgaccatcctcaagggttga

SEQ ID NO: 326470 - DNA, 699 bp, Pseudomonas aeruginosa
atggcactcctcggtagtaccctgctcgctggcgccgcattcgtgggcggctatctctaccgccgcggcctggatcgccggcgctaccgcttcatccagcaattccgcctgccgccgcgggtcgcccaggcggtccgcgagcgctatccgcagctcagcgaggaacaggtccaacgagtgctcggcggcctgcgcgaatacttgctgctatgccgcgccgccggcaagcggatggtcgcgatgccgtcccaggtggtggatgtcgcctggcacgagttgatcctgcatacccggctctaccagcacgtctgccgcaagggactcgggcgcttcctccaccatacgccggcgcaggcgatgcgcagcccccgacaggcccaggaaggcattcggcgcgcctggaagctggcttgtcgccgcgaaggcatcgacccccagaaccccacgcgcctaccgctgctgttcgctctcgacacggaactggcgatcgccgacggcttccgctacaccctgaactgcgcgcagcggcaagacggcggcgcagcggtgtattgcgccagccatatcggttgcagcagcggctgcgccagcgatagcggcagtaccttcggttcggacggacaggattcgcgccacggctgcggcggcgatagcggtggggacggcggcagcggttgcgggggcggtgggggcgactga

SEQ ID NO: 326471 - DNA, 1023 bp, Pseudomonas aeruginosa
atgcgcagcttgggcaacttgctggatgctagcttgacagaaatcaagctcaaacgcgattcgctggcgagggagcagcagaatacttccgtcgtggcgacccaggcggagaagtacaacgctccccacgtattgactccacggacgcgccacctgatcgacgaagccgtggaattggagatcgagcaggcccgcagcgcaggcgctacaggctacatcgcgcactttctggcgcaggccacgcttcctcatacagaccccaagaccaactatttcaagcgtggcacggacaagctgaacctttccatcgtagccaaccccgattatggcgtaccgtacgggggagtgtcgcgcctgctgcttgcgtggatgtgtactgaagccgttcgcacaggtagtccagatttatcgcttgggcgttcccaggctgcattcttgcaaagccttgatctacggaatgatggccggtatatcgcgcgagtgcgtgaccagagcttgcggctggtacattcgatgattaccgtcgagggtgcagatggagatgcgtcgcacgtcagaaacatccttctcgcggaagaggcgtttgtcttctggaactctcgcaacactgtgcgacgagggtcgtgggaaagctcgatcaccctgagcacagactttttcaaacatctgatcagtgctcccgtaccaatcaagatggaggcattacgcgccctcataaagtcgccccttgcgatggatatctatacatggctggtctaccgcatgttcaccctgaacgttggggcaagcaaaggaggcaggcggcttgctcacgtgccatggactggtctaatgatgcagttcggctctggttatgcgaatactcccaaggggctagctaacttcaagaccaatttccgcctgcggctaaatgaagcactgctgttctatcccgaggctcggaaccacatcgaggaaacgaaagaccacctgatcctcacccccgcccgtctgcacatctcggcgacaaagaagaggggataa

SEQ ID NO: 326472 - DNA, 240 bp, Pseudomonas aeruginosa
atggcccttgatccgcgagtacgctttggcctgaagctggctgaaatacggaagaccaaggggtggtcgcaagagcgtctggctctggagagtggtctggctcgtagctatttgggcggggttgagcgcggccagcgcaacatcgcattgctcaacatcttcaagctggccgagacgctgggggtggagccttctgttctgctggaagcaccggctgccgggcaggagcctgcaccgtaa

SEQ ID NO: 326473 - DNA, 543 bp, Pseudomonas aeruginosa
atgttcggcgtggggcctgcgcgtctgtcacagccatcgctgtgggggctgttgaccagtgagctgatgctctatctgctgatttcgctggcactcttcgcgctgtccttccgatttctggcgcgtctgcaggcccgctgccaggcccttgtcaccagaatcaacacccagcatgggctgtcattcgatgctggacatctcctgggttatcccgcgccggcattccttgtgtttgactcccagaatcgcaagatcgcggcctgcgatgtggtcaatgacgcatacaaactgcacgacttctcctggctgctcggctggcagatgacctggcgcgaggtcgagagcatggagatgaacggcggtagccgacaggtcaacgccagcggcatgagcgctccgaccttcgagcgcacggtacgcgccaaagacttcgccattgagctgcaaaccgccgatccacaacgaccagtgctcagttttcccatgagccgccgggcggcggaaacctggtgtgcccggctcaatgccctcttcaacggataa

SEQ ID NO: 326474 - DNA, 645 bp, Pseudomonas aeruginosa
atgaaacactaccgaagcctgttgctgctgccttttctcttgacgggatgtgccacaaccgacatgcagggggcgctggactctctgaatggactgggacaagccattggaaccagtctgtcgcaagtgactacgcctgcaggcgcggcaaaccgcaacagcgtgctggggactccactgcataacgccttgcgccagaatctgtctaccgacggtcgcgccccggagtggcccaaggtagtgatcagcaatctgcaaattccggctgatcagatgacgctgacccgtagccttacgctcaaagccagtgattgcattcgctttgacgccgtgctgtggcacgacgccaagcgttccgagcgcttcagcaatctgtcgctatgtgcaccggagttgccgaaacagtcgaacaatttcgtgctcacctggaagagcttttccatctccggaaaaaccagcggccaggttcgcaccgacggcccaaccccgccgtacagcaagttgcccagtgacccggcgatggaacgctggttaatgaatcagttcggcctttactatgtgggttcgctattgacgctggtcggctatgactccaatttcacgatcgatgaccgtcgcttctggatcaggaacatcaagggatga

SEQ ID NO: 326475 - DNA, 417 bp, Pseudomonas aeruginosa
atgaacgcactgctacttgccgccctgccgcttgtgctgatggacggccaagcaccagatatcgatcactggttgcgcattgagccggccatcgccgccgccgtggaatgccgtcaaaccttgccgctgcacatgctggacggtattgcacccaatgctcccggcagttggtcgctggtgccgacgcgcagcttcacggtgttcgggttaccggtgcagcgcatcgagctgttcatcgacccggatggtgagctgggtgcaagctatacagcggtgattgaaaagcgcagcctgcagcaggcgcgcaagcagctcaacctcatcagcgcgcgcgagcgcataggccagctctcggcagatcagcccaatgatgaagtacagctagtctgcacggtggccgcaacggagcaagggtga

SEQ ID NO: 326476 - DNA, 282 bp, Pseudomonas aeruginosa
atgaaccgatctgatgcccgctgcgcgacaccttatatctactcgggtgagttgcagattcgccccgaagttgacgcagccctggctgcgctgaaagacaaaccctatgccgccgtccccagctggaaaaacgatggcacctgggagctgtggacgatggaaggtgacggcgaaaccgagccctgcatcatcagcggcccatcgacaacctatgccagcgaggctgaggcgctggctgctggtgcggcctggatcgctggcattagctccatcccatgctga

SEQ ID NO: 326477 - DNA, 2115 bp, Pseudomonas aeruginosa
atggcagaaatccaactctttcccagagaacaggtcgtcgggatctttcgtggcttccagcaggggggcatggaattccacgccgacctcgttttgccataccgaaacgagttccagaacatcccaatgcacgggcaattcctcatcgtccaactggagacgccggatgaagcagtgttgggccgcattgcatccttttcctctgagggcaagctgtcgttcggctccggcgaggagttcaacatccgtgcagttcgcgaggaaagacctattccggaggatttgcgtgagcagtatctcaagtatcggatcaacatccgcgtgctcggcgttctacgcaagaacggcaacgggctgacattcgttccctcccatcgtcgacttccccatgttggcagcaaggttgcctttccaagtgccgaggtgttgcgcgagatcgctggacacaacattgatggtgcccctataggccatcttgccttcggggaatacatctacgctgccggcaacaaatcattccaatcgcaggaatggatgcaggtggtcgacccagaggtgttggttcgcttcccgatcgagtccctggtctctcgccgcagcttcatctttgcgcgagcgggcttcggtaaatccaatctcaacaaactgcttttctcgaagctctacgaaaacacgcccttcgtgaccaagcgcgcaggcaagcaggtccctgtgggcacggtcatatttgacccggatggggagtatttctggccagacgacaagggccggcccggcctttgtgatgtcccggcgctggaagacaaggttgtcgttttcaccgaccgaaagaatccaagccctttctaccaatcgttcgttgctggcggtatcaagcttgatatccgccgccttcgccctggcgatgtgatttcaattgcgctcggggcagagcgccaggaacagcagaacgtgcggaagctcagagggcttccacaagatcgctgggagtcgttggtcaatctgatagatgccaatggcaacaccacgccgctcgaagacgtatgtggactgctcgatctcgaccctcagcgacaggaggcggaggcgctggcagcacggggcaacatgacggcgatcgtgaagatgctgcatgacaagagcagccagctcatggacatgctggttcatgcgctttccgagggaaagctgtgcgttatcgacgtctcccagatgcgcggtggccagtccctggtgctctctggcctgatcctgcgccggatcttcgatcggaaccagcaagagttcacggccgccgaccccaagaccatcccgacaatcgccgtcgtcgaagaagcgcagtctgtgttgaacgagaacgcacctgccgccgagccttacattgcctgggtgaaggaaggccgtaaatacgacctgggggcattgctgatcacacagcaacccggcagcattccagttgagatcctcagccagggcgacaactggttcatcttccatctgttgtccgcagccgaccttacatccctgaaacgagccaacgcccatttcagtgatgaccttttgagttcgctactcaatgagccgatccctggtcaaggtgttttctggagttcggtgggaggcaaaccttatccggtcagcctccgtgcgctgtcgttcgagaagatgtattcaatgcgggaccatgactacaaccaacccgtagggaatacatatgcgcaaacgctgcgcagcactttctctggaatgaggcagagtgctgcggcagctcgggttccagacgcaaacgcttcaggctcgctcttttccgctgagactggtttcgaagactccgagccagtggacgtcatggcaaccatagagcagcgagcgattgatgccttgctaggagatgccgacatccgccagaagctcgagtcttcgaatggcatgccttggtatggggttcagcagtttctgattgaccacctgccagaacacttggaagaccgccgtcagtttgcgtacaacctagtttcaaaggcgatgaacgcgattttcggctcacaacccaggggatgggagactttcaagagcacgtccacgggcaagacttggattaaggctcacaagtaa

SEQ ID NO: 326478 - DNA, 1143 bp, Pseudomonas aeruginosa
atgattgacccggcaagccaggcccaactgaaagaggccatcgctgactgcatcggaaccgaccaaggggtgctggatgctctgcgagaagaaatccagccgttgaagagtgccacgcgccgaatccagccgcgcgccacgacgtcgatctcactggttggcaccgatgggggaaacaaccagcttcagttcgacccctttctgattcagttggtccgagtcgtcgatagcagcaacaacgagtactgcctggaggcagtctcgcccacgacaccggtgcagaaacttaaccagcgccagttcgctgagcacgggacgccaaaaacggcactgggtgaaatgatggttttcttgggagtagacagcctgcaggcgctctcccacatgatccggccgacggatagtggcaagccggtttctcccagctgggttcaggtttatcgggagctggtcgagtgggcgatcctgttcaagatcctcgataaagattacggcactgacacgttgatcatctgcgacggccttctgcgaagcaaggtgttcgccaaagacctattccagcgtctgctccaaggaatgaaggagcgtattgacaagcaatggagcaagagccggcggcgtgtttatctcgcgggtgtagccaagcacagcaaggtgctttctcggtatcgcttggccatggctcttgaaggcgtccttcagactgattaccccgcctacgtcgaggtgccccgcgaagtggaggaaaaggcatacgtctggtcggagttcgcgcgaggcgatgaccgaactggcgagggcggcgaaatcaacaagtttgtcggcggcaagatgttcctggtgaagtttggctcccaccgccgtgatcccgtgtggccaatcgacatctttgttccacaagtcagcgagtcccaggcaattctcgggtcaatgcttgcggatgcgatcaacggttttcccgttccccattacccacgctgcctgcaaaaggcgcatgaaaatgcggcgttggtcgatttcgacttcgatattttgcaggacttcatctacgagggtgtgcgttcgagtctcggcggtgacgcgggtacattggatgcgtttcagctgcaggacgccgatcctgcgcagcgtcggtacggataa

SEQ ID NO: 326479 - DNA, 894 bp, Pseudomonas aeruginosa
atgtctgacgaacagcttgacgaccttactcagccgcagcgcgatcgccttgccttcgtggagctgcgcgtgcgcttcatcggagatatccgccgccaggacctggtgtcgcggtttggaatccagtcggccgctgccacgcgtgacctggcgatctacaaggagctggcaccaggcaacatcgattacgacaccaaggccaagtgctatgtccttggagaggacttcaagccgctcttcgattttccgcctgaacgggttctgtcctggctgacgcaaggcttcggagacggagagccctcccagctcaaggcgtggatgacaagtgaaattccgtcaaggctcacgcatcccgatctggatgtgctggcctgtgtgacccgggcgatccatcaggagtgccctgtttgggtggagtaccactcgatctcaagcggccagactgagcgtcaaatcgttccctttgcgctgatcgacaacggcctacgctggcacgtccgagccttcgatcggaaatcccaagagttccgggatttcgtcatcacccgaatcaagcgcccggtcttgttgcgagaggaagaagtgcaggcccatgagcgcggcgaccaggacatccaatggacgcgaatcgttgagctggaactcattccccacccggaccagccacgttctgaagttacggagatggactacggcatgcgggatggcgtgctgcgcatgaagctccgcgccgccacggctggatacattctgcggaagtggagtgtggacagctcgcccgatcacagcctgagagggccggagtaccggctctggctaaagaaccccttggccctttacggcgtcaggaacgcggtgctcgcgcctggctaccgatcgccggaccaagcatga

SEQ ID NO: 326480 - DNA, 1497 bp, Pseudomonas aeruginosa
atgcaagaagctccaatcaatctcagtcagctcgaaggccacctctgggagtccgccaacatcctgcgcggcccggtggatgcggctgacttcaagacctacatctttccgctcctgttcttcaagcggatctgcgatgtctgggacgaggaatacgccgagatcgtcgatgagaccggcgatgccgaactggccctcttcccagagtcgcatcgctttcagatccctgacgactgtcactggaatgacgtccgcgccgtggcgaccaacgtcggcaacgccctgcagcgcgccatgcgcgaaatcgagaaggccaacccggacaccctgtacggggtcttcggcgacgcccaatggaccaacaaggatcggctctccgacgcgctgctcaaggatctgatcgagcatttctcgcgcatctccttcggcaacaaaaacatcgcatccgatgtgctgggcgatgcctacgagtacctgatcaagaaatttgccgatgccaccaacaaaaaggctggcgagttctataccccgcgcagcgtcgtgcggctgatgatcgaaatgctcgaccccaaagagggcgaaaccatctatgaccccgcttgtggcactggcggcatgttgctggcagccgttcagcacgttcaagaacaacacggcgatgtgaaacgtctgtggggaaaactctacgggcaggaaaaaaacctcaccacctcgtccattgcccgcatgaacttgttcctgcatggcatcgaggattttcagatcgtgcgcggcgataccctgcgcaacccggcgttcttcgaagtcgaccgcctggccacgttcgattgcgtgatcgctaacccgcccttctccctcgaaaagtggggcgaagacctatgggtaaacgatcctttcggacgcaactttgcaggtctgcccccgtccagcagcggcgacttcgcctgggtgcagcacatggtcaagtcaatggccgacgtcagcggccggatggccgtagtgttgccccagggcgcgctgttccgcaaaggagccgagggcagtatccgccaaaagctactggagatggatctggtcgaggccgtcatcggtctggcgcccaacctgttctacggcacaggactcgccgcctgcatcctggtactgcgcaagaagaagccggcccagcggcgcaagaaggtgatgattgccgacgcctccaggctcttccgacgcggtcgcgcacagaactacctggaacccgcgcacggcatcgaaatccagggctggttcgagaagttcgaggatgtgcaggacgcagtacgcatcgtcgacctcgatgaaatcaaggccgaggactggacgctgaacatctcgcgctatgtcctgccgccgttgcaggaggatatcccgccgctaccggaggccatcgagtcattcaagagcgcactcacccgctgccgagaagcggaggacaggctggccacggtcatggtggaaggaggctggctgcaatga

SEQ ID NO: 326481 - DNA, 1518 bp, Pseudomonas aeruginosa
atgagtgcccgcattacccaacaagaactcgaatcctatctctggggcgccgccgtgctgctgcgcggcctcatcgatgccggcgactacaagcagttcatttttccgctgctgttcttcaaacgcatctcggatgtctgggacgaggaatatcaggcggcgctcaaggagtcaggcggcgatctctcctatgccgagtttgccgaaaaccatcgcttccagataccagatggcgcgcattggaaggatgtgcgccaggtcccgaaaaacgtcggcatggcgatccagtcagcgctgcggcagatcgagtcagccaacccggacatgctggccggcattttcggcgatgcgccctggaccaaccgtgagcgcctgccggatgaaacgctcaagaacctgattgagcatttctcgacgcaaacgctctcggtcgccaacgtgcccgaggacgagctcggcaatgcctacgaatttctgatcaagaagttcgccgacgactccggccacacggctgccgagttctacaccaaccgcacggtcgtgcacctgatgacgcagttgttggccccgcaggccggcgagtcgatctacgaccccacctgcggtaccggcggcatgctcatttccgcgctggccgaggtcaagcgcagcggcggtgagtaccgcaccctcaagctctatgggcaggagcgcaacctgatcacctccggtatcgcccggatgaacctcttcctgcacggcgttgaggactttcagatcatccggggcgataccctggccgatccaaaacacatcgaaggtgaccggctgcgcaagttcgacgtgatcctcgctaacccgccgtactccatcaagcagtgggaccgcgaagcttggggacaggataagtgggggcgcaacttcctcggtaccccgccgcaggggcgggccgactacgccttccagcaacacatcctggccagcctgtcagaccgtggccgctgcgccatcctgtggccgcacggcgtgctgttccgcaacgaggaacaggcgatgcgcgccaagatggtcgagcaggattgggtagaagctgtgatcggcctcgggccgaacctcttctacaactccccgatggagtcctgcgtcatggtctgcaaccgacgcaagccagccgaacgcaagggcaaggtgctgttcatcgacgcgctgaacgaagtcacccgcgaacgggcgcagagcttcctcaagccggaacaccagcaacgcattctggaagccttccgtgccttcgcgccgatcgagggctttgcagcggtggcgacgctggaccagatcgccagcaacggtgcgaacctgtcgattcctttctacgtgaggcgagtgtcaggctcggcgaacggcaacggcaccaatgaggccgtcagcctgagagcggcctgggagcagtggcaaagcgacggacgcgccttctggcagcagatggatgctttggtggaaacgctcgatgggctcgaagtcgaggaggtcgagcgtgcttga

SEQ ID NO: 326482 - DNA, 1194 bp, Pseudomonas aeruginosa
gtgcttgataaggtaaaaaaacaaggctggcgccaggtgaagttcggcgacgtggtacgccaagttaaggaaagggttgagccagaaacttcaggactggagcgctacgtcgccggtgaccacatggataccgacgatttgcgaatccgtcgctggggtgagatcggcagtggctatcttgggcctgcatttcacatgcgcttccggccagggcaggtactttacggctctcggcgaacctacctccgcaaggtggctgtcgcagacttcgatggaatctgcgccaacaccacctttgtgattgagccgaagaacgcggaggagctgctgcccgagttccttccgttcctcatgcaaacgggtgattttaacgagttctccgtcaagaactccaaaggctcagtaaatccgtatatcaacttctctgatttggcgcgatttgagttcgcgttgcctccgccggaagaacaggtgcggatcgtagaggtgctgcgtgctgctacagaaacagttgagacccaaacagaagccctcgatgccctggaggttgcgcgcaggtccaccatcgaccatgcattttcaatgactcatgggtgggatattgcgcgcttagaaactgtggccagcatgcaaaacgggcggccgtttcccggcaacgaatatgggggcaatggagtaaagctactgcggccagggaatcttggtatatctggctatttctattggggtgtggagaaaacagtatccctcgacccaagttgggcgagtactgcttcagacttcctgattgctccgggtgatgtcgttataaatctcaccgcccaatctcttgacgacggcttcatggggcgggtatgtctcgccagagagggtgatgaaagcctcctcaatcagcggattggccgttttcgctgtaacgaatctgcgttgctaccagagtaccttttcagggcacttcagacttcccgattccgacagcatgcgcatgccaactgcgagggcagcaaggtaaagcacctcttctggcagcacttggccaagtacgagattccaattccgccactgagaacgcaacgccaaatcgccgcgcaatgcgccgagctcgaccaagcaatttcagcctttagagatcggattggaatatcaagggcgatgcagtcgcacttggtaaatgagctcatgggggaagtttga

SEQ ID NO: 326483 - DNA, 2976 bp, Pseudomonas aeruginosa
atgggtttcactgaatccaacaccgtcgaagcctacctctacgacctgctttccggccctgcaaagtccgtcccggccaatgtagtacgggagcccgaagccacctacggccgcagccacaagggtattggctggcgtcgtgtcgctagcgccgagatcccgcgccagcaccaggacgtgctggtcgaaccctgggtgcgcgaggcgctgatccgcctcaacccggagattgccgcgcagcccgatcgcgccgacgaggtgctctacaagctgcgtgccatcgtgctctccgttcgctccgacggcctgatccgcgccaatgaggaattcaccgcctggctcaggggcgagcgttccatgcccttcggccaaaacaacgagcatgtgccggtttgcctgatcgatttcgacaacctcgaccagaaccagtacgtcgtcactcagcagttcaccttccgcgctggcagcgccgagcgtagggctgacctggttctgctggttaatggcctgcccctggtgttgatcgaggccaagacgccgacgcgttcggcggtgagctgggtcgatggcgcgctgcaggtgcatgacgactacgagaagcatgtgccggaactgttcgtctgcaacgtgttctcggtggcgacagaaggcaaggaatatcgctacggctcgctcggcctgcccatcaaggattgggggccgtggaacctggaggacgacagcgacgcgctcaagcacccgctgaaaggcttgaaactggctgccgagagcatgctgcggccccatgtggtgctcgacatcctggccaacttcaccctgttcgccactaacaagaaaaagcagcgcatcaagatcatttgccgctatcagcagtacgaggcggccaacaagatcgtcgagcgggtgctggccggctatccgaagaaaggcctgatctggcatttccaggggtcaggcaagtcgctgctgatggtgttcgcggcgcagaaactgcgcctgcatccgcgcttgaagaatcccacggtgctgattgtggtcgaccgtgtcgatctcgatactcagatcactggcaccttcaccggggccgatatccccaaccttgagaaggccgattcccgcgacaagctgcgccaactgctggcgcaggacgtgcgcaagatcatcatcacgacgatcttcaagtttggcgaagctgatggcgtgctgaacgatcgcggcaacatcatcgcgctggtggacgaggcgcaccgtacccaggaaggcgacctcggccgcaagatgcgtgatgcgctaccgaatgctttcttgttcggcctgaccggcacgccgatcaatcgtttcgatcgcaacaccttctacgccttcggcgcggaggaggatgacaagggttacctgagccgctatggcttcgaggagtccatccgtgacggcgcgaccctaaagctgcacttcgagccgcgcctgctggagttgcatattgacaaggcggccatcgacgccgccttcaaggagatgaccggcggtctctccgacctcgaccgcgacaaccttggcaagaccgccgccaagatggccgtgctggtgaagacgccagagcgtatccgacgcgtgtgcgaggacatcgtccagcacttccagagcaaggtagagccgaacggcttcaagggccagatcgtcaccttcgaccgcgaatcctgcctgctctacaagcaggagctggacaagctgctgccgccggaggcctccgacatcgtgatgacggtgaacgccaacgagccgcagtacagggcctatgcgcgcacgcgggatgaagaggagcggctgctcgaccgcttccgcgaccccaacgacccgctcaaactgatcatcgtcacctcgaagctgttgaccggcttcgacgcacccatcctgcaggcgatgtatctggacaagccgctgcgcgaccacacgctgctccaggccatctgccgggtgaaccgcacctactccgagcagaagacccatggcctgatcgtggattacctcggcatcttcgacgacgtggccaaggcactggagttcgacgacaagagtgttacggcggtggtgtcgaatatccaggaactcagggatcggctgccggaggcaatgcagaaatgcctggcgttcttcgtcggggtggaccgcacggtcgagggttacgaggggctgatcgccgcccagcagtgcctgcccaacaacgaggtgcgcgacaacttcgcggtcgaatacagcctgctcaacaagctatgggaggccatctcgccagatccgatcctcggtgagtacgagaaggactacaagtggttgtcgcaggtgtaccagtcggtgcagccctccagcggccacggcaagctgatctggcattcgctgggtgccaagaccatcgagctgatccaccagaacgtgtatgtcgacgcggtgcgggatgacctcgacaccttggtgctggacgccgatctgctggaggccgtgctctccaaccccgatcctaaaaaggccaaggaaatcgagatcaaggtggcccggcgcctacgcaaacacctcggaaatccaaagttcaaggcgctctcggagcgtctggacgccctgcgcgaccgcttcgagtccggcgtgctcaacagcgtcgagtttctgaagcaactgctgcaactggccaaggaagtactgcaggcggagaaggaaacgccgccggaggaggacgaggaccgaggcaaggcggcgctcaccgagctgttcaatgaagttaagaccgccgaaacgccgatcatcgtcgagcgcgtggtggccgacatcgacgagatcgtgcgcttggtgcgcttccccggttggcaggacacccttgctggcgagcgtgagatcaagaaggcgcttcggaaatccttgttcaagtacaagctgcatgccgatgaagagctgttcgagaaagcgtacagctacatccggcagtattactga

SEQ ID NO: 326484 - DNA, 2100 bp, Pseudomonas aeruginosa
atgaaagcagaagacacgctggttaccaatctgctgcagggcgcgaagcaattcatcgtgccgatctttcagcgcgactacagctggggcacgaagcactgccagcaactgtggaaggatgtgattcgcgtcggtagcgacccaaatgtgaaggggcacttccttggctcagtggtctatgtcgcggccgaggacaacacagccaccatcactcgttggttgttgatcgacggccaacaacgcctgacaacgctgacgcttttgttgatcgcgcttcgtgaccggctggcacaacttcctggaaattcaggccagggagaggaggaagcgacgcccgatgagctggacgactattacctgcgcaaccggcacggcaaaggggagcggcggcacaagctgcatctgcgccgggcagatcacgaaacgctgattgcgcttctggatggaaagacgttgccagaggccgcctcggaacgggtgaaggagaacttcctgttcctgcgtgatttggtcgcccaggcagatgtgcagaccgtctacaacggcatcaagaagctggtgatcgtggacgtgagcctgacgcgcggccaagatgacccgcagatgatctttgaaagcctgaactctactggggtggatttgactcaggccgatctgattcgaaatttcgtactgatgcgtttggacgagtcctcccagacccagctctacgaagaacactggcagccgatcgagcaggctttcgggcggcgctaccgtaccgagtttgataaattcgtgaaggattttctgacgctgcaactgcgtcccggcacgccattgaaggcggccgatatctatcacgagttccgtagctacttctcgcgtactgtcggaaagcgtgatgtcgacggcattctcagcgacctgcgccgcttcggcacctactacacggcattcagtctcggacaggagaagcggccggcattaaaggaggcgttttcccgcctgcgctccctggtcgaggtggcttcgccggtcgtgctgacgctttacgacttttatgaccgagccaagaccctgagtgccgaagagttcgtcgaggcggtcgagttgctggagagcttcgtcttccggcgttcagtgtgcgacatgcaaacccgcagcctcggacaaatattcgcaagcctcgcctatcggatcaccgagagccagccgctgctcagtttaaaggtggcgctgtatcggcaaggcaagaagcgccgctttccaagcgatactgagtttcgtgaggcgctcgaaacccgcgatgtctacgacatgcgaacttgcttctatctgctggatcggcttgagaacttcagcaaggagcgcatcgatacatcgaacttttccattgagcacgttatgccgcagaacgaggatcttcgtccggaatggcgaacgatgcttggtagcgactggaaagcaatacaggaaacgtggctgcaccgcctgggcaatctgacgctgaccggatacaactccacatacagcgaccgtccattttccgagaagaaaacgattgccggcggtttcgatgagagcccgctgcgcttgaacaagttcattcgcgaacaatcggcgtgggatggcacgaccatcgagcagcgaggcaagttgctcgccgagaaggccgtgaccgtatggcgaccattggtcgtcgatttgctggccgtgaagcaacgggagttggaggagcacaaggcctttgccgccaactacaggatcgaggacctggaactagatgacatcgccaagaatttactggaggctttacgtccacagatccaggcatttggtgaagatgtagtcgagctgcccaacgaccggagcgttatctaccgtgtgtttgatttcttcgtcgaaatcatcccgcgtaagcagcggctgagcctcttgctgaatctcgattttgccgactgcgaagatccatcaggcagagcccgggatgccacggagttcgccttcatcatcggcgcaactgaaacggggggagtgctgtacaacctggactcgcaagacgatgtgccggccgcgatcaacgtggtccggcaagcgtacgagcgtgtgacagagtga

SEQ ID NO: 326485 - DNA, 4257 bp, Pseudomonas aeruginosa
atgccgagcactgcaaagaaacgaatctccaaaagcaccttgtccatgttcctgcggaccaagtgcgatcgcgaactttatctgtctttgcatgaagactcggagcttgattcgcatggaatgccggttccgttgcaggcacgtcctggaatcggtgtcctccaaacggcaggacgggattttgaggatgagcgcaacgatcagttgattcaggcgttcggcggtctggtcatctatcagccggacaagggaggcgcaaacaaaccagtcaaggcaccgctcgcgtcgttgcttggcaaggtaacagccttgccatcgatcatcttgcaagggaagttcgagccctcttccttccagaacgccgtgatggcaaatgttggtctgcaacccggacagatcactcaggtcccgccaatcgcagggctcatccctgacatcatcgtcgtgcgccaggccgcagccgatgacgaggaggtggggccagacggatgtcgtcgacgaattgacccggcaactgagacgcggcgtgcattgagcatcattgatgtaaagcacaccagcgaggctaatccgagctactccgccgaagtcgcactttacgcactttttctggcgaactggatcgccgaccaggggttgcagaatgagtatttcgtaacgattcgcagctacctgtggacccgattcaagcaaggccagtctgaactcgacgcgttgatgtcgggcacctccccagcgacagcgattcagtatctcaatgcgctgatcgccgatagcgaagacgccaacttgcgcttctatctgcccaccgttctgcatttcttccgggaggacttgctccgggtcatcgctgttggtgacgcatcaaccaacgggtggcagaaccttgaatggcatgtcgatggcaggtgtagcgcctgcgactggttggggcacgaaaagtgggcaaatgcgaaggacaaagcgcgaattgcggctcagccgaaccactactgctaccccgcagcgaagctgactgggcacttgagccaaatcgcgggtatgacacgaggtgcaagaaagacgctccagattaatgccattcaggacacggcgggtgcggcaagcgccccctccgcacatcctgccttccagcaacacagtcatctcaaaaaggaacgaagccgtatccccgcgcgagcgcaggccctaatttcttcggccacgacggtggacagcgccgccgttctggcgagcttggcgccagcgccacaactccatgtggcgatcgcggtcaacttcgatccgagcgctgggttgctcactggcctttcgatacttggtagagcgacggcctatgtgacgggacagtcgccccggcagtttgcgacgaaatgctttgtcgtggatcagaaggcgctggctgacgagtgggtggctttggaggggctcctgtcgacactgtctgacatgattgatcaggctgagacatttgttcgcgctgccggacgaaccccgctaactgcacaaatcgcgttctgggagaaacgacagtttgaagagctttgtgcggcgatggggcggcatttgccacgggtattgagcctgacgaatcgcaagaccaaggcgctggcctggcttttccctgccgatgaactgatcgaaaagcccgatggcgcagtcagcccctgcgttgttttcgttgatgagattgtccggcgagttgtttttgcccctacacctcatgtgatcaccctgttcgataccgtcgaaacctactattcgggtcctggaccagttcggctgggtgatgcgttctatcgtgaattcctcaccaacggcattcctcgggaacgcatttacgagatttggagcaacgtcaccacgattaaacgggggtccgttactgttccccgcaacaccgtcattcaggaattcggcaatgcgctggagaaacagtgccgggcattgaacagcatcgtcgagagactgcgcacggacttcaaggggcagctcaaggcaaacgctccaaagctgacattgtctattcctcagggtgctcgcgacgtcgcgttcgacagcaagctttgggtttggtgggaggaattgcagtatcacactagaaagctggagtcccaccagcgcctggcgcttgatgccgaggcactagaggctagttacgaagcggttcggctcaccaacgggcaacctacaggaacctcgaatgagtacgtattcgacgtgcttcctgggtccaccgaagccaagctcgacgacaacgaaggctatctggctctcggcaaggaaggtcatcctgggcttcctttgcagcgtggaagggatctgatcgccggtggcgcgccgctttacccagggcagaacgacacgctgctcgcaccgctgtggtccgtactttccgtaacgctcgtgtcctttgacagaggcatgcaaaaggctgtcctgaagctaaccaactggcgtgaaccggctttcgtaccgtatctgctggccaactcgactgttgatttgctgaacgacatctttatcaccaaaggccagggctccttcaagtggtacgagacggtcaagcggattctcactgcagtaggaaacccgtcgatagcggtggcagatagcaatgcggccactgcgatgggggcgaggactccgcgccccggctcagacccggttactcctcttgcccgcgtgctctgggaggccgtcgctcttcacgcgacatccgtcgtcgctgcgacgcaggcctcttcggttgcagcctacgccaaggccaagcacaacctgaacaagagtcagacagatgctgtcacccaggcggcagaaaaagggctgactatcatctgggggccgccaggcaccgggaaaacccagacactagctggatgtattcacggccttgtgcatgatgccgtgcggcgggggcaaccattgaaattgctggtcgccggaccgacgtacaaggctgttgaggagattattggtcgtgttgttgaggcgttagacaacgatgcaacctgtcctgctgaggtctttgttggatattcctcgtcgcaaatgccaaagtcattcacggcaggtaactcgcatctacgggtcgaatcattcaacctaaacaaggacaaccaagaaacaaaggattgcctggctagcctggctaaaaccgatgttgtcacgattgtcgccacggcgacgatgcaggcgtacaagctcgccgagtggacctatggtcgccatgttgcgccgatttttgacgtcgtgattgtcgatgaaagctctcaggttcaggtcacacacgcaatctcgccactggccaccttgaaggacgatgcgagactgatcattgctggcgatcatcttcagatgccgcctatcatggcgcttgaaccacccaagggttccgaatacctggtgggcagcatccagaaatacctgctcgaccgtccgtttggcagccaaatcgttccatgtccgctggaagagaactaccgctcggcggaggacattgttgcctatgcccgcacgatcggctaccgatcgacgttgaaggcgtcaaacgccgcgacggcacttcatctcttggcggcggtgccaactcccgcatcaagttttccaggggccttcccttggtcatctctgtggccggatattcttgaccccacgaagaaggtgctgacgttgctccatgacgatgatctatcgtcccaaagcaattccttcgaagccaagatcgtcgccgccttgacatggtgcctgaggcagacagtgagcgcagaacttgatgggcgaggtgtcgtgacgcatgcgatacctacgcccgatcagttctgggggcagtgcatcggaatcgtgacgccgcatcgcgctcaacgtgccctggtggttcgagaactgcggtcaatattcccgtctgatccgccgaacttgatcgactcggctgttgataccgtggaaaagttccagggtggtcagcggcacacgatcgttgtgacttttggtgtcggggacgcggacgtgatcatgggagaggaagcgttcctgatgcagctagagaggacaaacgtggccatctcgcgcgcgatggccaagtgcctggtagtcatgccaatgaccctggcaggacatgtccctcaagacaagaaggcgatcgaaactgcacacgcgatcaaagactacgtcgacgaattctgtaatcaggaacttgttgatcaagtctcgttcggatcaacgtcgagacaagcgaagctgcgttaccaccaatag

SEQ ID NO: 326486 - DNA, 1149 bp, Pseudomonas aeruginosa
atgtcaaacacaagtactcagaacgtggccctagcctacaaaaaagaaaatgcgctgaacgcaatttgcccttactttacgatgtttccgcttgagtatccgaatagggtgctcaaaaagcatctaaaggaacagccagttgtgctcgacccattttgtggtcggggcaccacgttattctctgctcgaaaatttggactttctgcctggggtattgattcgtcgcctgttgctgttgctattgcaaaagccaagcttgcgagctgcgacatcgaggctcctctaaagcttgctgcggaactgattgcagacgccgagccagccgacttgccagacactccattcttccgtgccgcgtatcaccggtcgacgctccgtgatatttgcgctctgcgcgaaggattgcttggactcggaaatgaaacggatgcgtcgtccatattgcgtgctgccgcactggggtgtttgcacggcccactccccaagcatcttgagaacgcgggctacttttcaaatcaaatgccaaggacttacgcgtcaaaaccggactacgctgttcgattctggaaggaacgcgacctcaaagcgccaaagattgatgtactccgagtactgcgtcgaaagatagagcggttggctggacttgatcaagcctccccatgtccgatatctcatgtcctacatggagacgctcaatcggaagagttgtttcagtcgattagtaatgcgccctcggttgtaataacctcccccccctactatggaatgcgaacatatgttcaagatcaatggttgagaaactggtttctgggcggccctgattccattgactattcagctggcccgcaacttaatcacggtgggcaacaggcatttgcagcctcgcttggaaatgtttggcgcaatattgccaatgctgcttcgtcctccgaatcgctccatatgtacgtccgattcggaataattccgtcagcgttggttgatgcaaaaaagctcttcggagactctttgcaagaatctggagtcaattggcgcttggtttctacgcgctcagcaaagtcagctgatgttggcaagcggcaagcagatcagatgaaagccgagtctgccgccgccgtcgagttcgattttcacgtcgaaagaatttga

SEQ ID NO: 326487 - DNA, 750 bp, Pseudomonas aeruginosa
gtgaagtcagtaaaacacagtgagtacctgcccgacacggaggcaggacgcttactattcagggagcgcctgattgcaaaaattcagcaacatcgcgacttcaaggcgctgccacacgaaattcagtcgagcttctttgaggagttagctgcactcacctttttcggcaccaacaactgttcggtggagacacatagctcacggatacgcaagctcgaaaaactggccgacagttatcgccgggttgccaatagcattgcactgctttcggaaatagatgagctgctgctcgatgatgcctttcaacacagcatgcctttgcaacagcaaaagaaactgatgcgacagctggctgcccaagttgatggcctgataggggggatgcggcagacgtctaccagcacgtctgagcggattttgctacgtctgcagggtgcgagcttgctgaagcaattgggcaaactgggggtcgtctgcaaaatcaacaatgactttcagaaaatcgcccaaactgatgcagggcatagcgaggaaaccgagcaagcacagcgttttctgccggatctgtcgcagagcatgacccttgccatgctctgcaccatgctggttctcttcaacagcggccaggtcgttgaatggagctactgccgcagactgctgttggaagggataaccttgcacaaagcacacactccggatagagctaacgccgccaatggttccctacgcacccattgccgtgtagactaa

SEQ ID NO: 326488 - DNA, 1197 bp, Pseudomonas aeruginosa
gtgcttacagatgcccactgccgtgctgccaaaccgaaggagcagctttaccgcctgaatgaccttcgcggcctctacctcgaagtgaagcccaacggggtaaaggcttggcgctaccgcttcaagctgggcggcaaggggtcgtggttcgcgctgggcgactaccctgctgtcagccttgcccaagctcgggacaagagcgaggaagcgcggaagctggtcaagcagggtatcaaccccgtccaacaccggcagcttgagcgcctcaagcgcgaagaggattccgccaatacctttgagacggtcgccaaagagtggctggccctgcgggactgggaggacatcaccaagaaacgccgcctggacatgctggagcgggtggtcttccccagcatcggcaagctcccggtgcgcgacatcaccccggcgcacgttctcgacatcctcaccaagacagtgaaacgcggtgcgccgaccgtcgccgccgaagccaaacgcaccatgtccggcatctttgaactggcggtcgccaccttgcgggcagacaacgatcccgtctggcccgtccgcaaggcgttgcccgccaacaagacgcaacacaagacggcgttgaccaccgcgcagattggcaagctgctcaacgacttcgacaaccaccgctgcggctatcaggtcaatttctgcatccagttgatgtggtggacactggcgcgtcccagcgaagcggcagaagcggaatgggttgaattcgatcttgatgcggcgctttggacgatcccagcccggcgtatgaaagcccgccgcgagcatgtggtgccgctgccgacgcaagccgtagagatgttgcgccgcctgcatgccatcagcggcgagcggacgcacctcttccccggcagggatgaccgcaacagaccgatgtcggtgcattcgattcggcaggcgctcaaggtgctgggctggagcggcacctacagcccgcatggcaccagaaccacgggcagcacccggctgaacgaaatgggctaccgcccggatgccattgaggcgcagcttgcgcatgcagaacccaactcggtacgccgcacctacaaccatgccacctacctcgaagagcggcggggcatgatgcaggcatgggcggacaagcttgaactctggaagcgggagagcacaggtgaagtcagtaaaacacagtga

SEQ ID NO: 326489 - DNA, 990 bp, Pseudomonas aeruginosa
gtgaaatacgccgtactcggagccaccggcctgctgggacatcacgccgcgcgcgccatcagggccgccggtcacgatctggtgctgatccaccgtccttcttcgcagatccagcgtctcgcctatctggagcccgagtgccgggtcgccgagatgctcgaccacgccggcctggaacgcgccctgcgcggcctcgacggggtgatcttcagcgccggctactatccttcgcggccgcgccgctggcaggaggaagtggccagcgcgctgggccagaccaacccgttctatgccgcctgcctgcaggccagggtgccgcgcatcctctatgtcggttcggcatatgccatgccccgccatccccagggactaccgggccacgaggggttgttctacgacagcctgccgagcggcaagagttcctacgtgctgtgcaaatgggcgctcgacgagcaggcccgggagcaggcgcgcaacggcctgccggtggtgatcgggattcccggcatggtactcggcgaactggacatcggcccgactaccgggcgcgtgatcaccgccatcggcaatggcgagatgacccactacgtcgccggccagcgtaacgtcatcgatgccgccgaagccgggcgcggactgctgatggcccttgagcgcgggcgtatcggcgagcgctacctgctgaccgggcacaacctggaaatggccgacctgacccggcgcatcgccgagctgctcggccagcctgcgccgcagccgatgtcgatggccatggctcgcgcgctggccaccctgggccgcttgcgctaccgggtcagcggccagttgccgctgctcgacgaaaccgccatcgaggtgatggctggcgggcagttcctcgatggacgcaaggcccgcgaggaactcggcttcttctccaccaccgccctcgacgacaccctgctgcgcgccatcgactggttccgcgacaacggctatttcaatgcctag

SEQ ID NO: 326490 - DNA, 444 bp, Pseudomonas aeruginosa; identical to SEQ ID NO: 323502

SEQ ID NO: 326491 - DNA, 579 bp, Pseudomonas aeruginosa
atggaatcgctgttcgtccctaccctcatcgttgccctcgcggaaatcggcgacaagacccagttgctggcactcctgctcgcggcgcgtttccgcaagccgtggccgatcatcgccggcatcgtcgccgccaccctggccaaccatttcgctgccggcgcggtgggcgcctgggtcgccagcttcttctcggaagccaccctcagctggatcctcgccgcctccttcatcgccgtcgccctgtggacgctggtaccggacaagctcgacgacgaagagtccggactgaagaaatacggccccttcctcaccaccctgatcgcgttcttcctcgccgagatgggcgacaagacccaggtcgccacggtcatgctggccgcccagtatccgcatttctggctggtggtgatcggcaccaccctgggcatgctgatcgccaacgtaccggtggtactgatcggcaacctggccgccgacaagctgccgctgaccctgatccgccgcctggccgcggccgccttcgccgcacttggcctgtacgccgcctggcacgccgcgcaattgaccggctggctctga

SEQ ID NO: 326492 - DNA, 2595 bp, Pseudomonas aeruginosa
atgaacgaagacgagtacgaagaagcgatccaaacaggccttcgcaacaatgaagttcttaagcttgtgcacaactactgctcccacgctcgtgtcgtcaaccgcggcggggtaggtttgattgcgcaggcaaccgggcttccgctcggaatgcttggcgtgcactgtgaccacgcgccagcatctggaatggcaggttggtatctcgaacccaatgctgttgatttctatgaccggaattgcgctcattgcgataagcgcatggctgttcgaatgcccaatttgctggcgctagttgatgagcgagatagggctctagaaaggcaaagggaggcccaaaggaaagcccaagcccaagctgaagcagcccatcaaggaaggatcgtgcagagggaagctctccgagtagggcagaccgctgcctgctgctctcttctcgacgacctcgacacacttgatgcctgctcatcggatgaggtgaagacccgcatcgtcgagacagctaagctcgctccggaagtcttcaccgctccgattgttgagtacttcttcgagcttgccaccaccgacaaaatgaatcttaaggagcaagcactttcggttctacgtctagtcagtgcagacaagcctcgcctttccgaagcggcgttcgactgccttgcaaagcacgatgctatcgaggttgccgcggatatcgtccttgcatacccagggatggtggcaccagccaaggtggagagcgctgtaccggcgctgatagctcttgcccggcgtcctcgagcacagcttgatatagatgagccgatctctcagccagaaccgctcaaagcaatctacaaattttggccggaggtagtccgcaacgctatccagcgcctcctcgactcgaagcagtcatacccagttcgtctgggtgtagccgctctgcacgtcctgtgcagagatgatgcaggactacttccaagctttgctaggacaacgatttcaaaactcgcccgtgctcacttgttatttgagaaggatccatctgatcgagagcttggaatggtgtgcggcgacctaaggcgtatcgtcgtagcagccctccttgctgcgcctgaaaataccgacgcattaatctctgagtttttcgatagcgcatcctctgaaggcgaggagcgcttaacccagatatatgaagagctttcgcggcactcaatacgactcggcggggatcgtagaagcgaaatggcacccgctgacgttgctgcgtatgtggtggtcctgaggcgtcttctcaacctcgcaagtacgtctaaaaatcagaaggttctccgcctcgttgttcaggcgttcagaaacgagccagacgaaatcgtcgcagctggaaagcagaatattgatgctttactcggcacagcagctgttttagatgctcgcattgaagcctttgaagcggaacgaaacgccacgccagcagccaacttcaacgagtaccttgaggcccagaattcagcaaccaccctctaccaactgcgcgactcatgtgcgctgatagctgctaaagccgcgaaaggaagtgaaaggctagttctgtctcatattgagtttctcaatagcattgatgaacagcgcgatgggctgagctccacaattatcaaagccactccattcctaattgatagcccccccacactaaatgttgttctacctgctctctattcatcgctggtcggatcctcagttcgtaaacgtgcggcggcaggtgaagcactaggagacctaggtagagctcgcatctccgatctccctgagcttgtactagaagcatttgtactactgttgctggatcagtatgtgatggtgcacaaggcggccgtaagcgctctttccagcatcgatctgccagaacatctagagcgacgtgctggtgcggctctgttgcagctcatcccctactacagtggtaaaagggatgagcaccactttctgatacggtgcattcgcttgcacgtagctcggttcgcatcctctgaacagcttcagtccggtcttggcaatatcttcatcaaattcttgatgacagcacctgccaatcttcacacacgtgatctctcacgaatggggaaagggctcgctgctgcctcaaactttgctgacttagtgattcacacattcgatgatccagaactgagtgagcacggtgaagaggatgccagcagcctcgtgcatctaattccagaagcggtagcccgccaacgggccgacgacttagtcaaattggttaagcgacaatctggacgctttatgctggtgggggcagtggtggagctgctgtctcgcgtcggtgcttggccccaagctgttgaggcgatgcaagcctcttgggaggctgttccagatacggcgccggaaagacgcctcaagtggtatcggagacttcatgtgattgccgtgcagtttgaggctgcagtcgctgcgaaagatatcccccgccaggaggctctgcaaatggaatgggttcaactggaagcaaccctcaaggaggatgaaaaacaatatgcaagcagacgtagttctctcccaagctttctacagtcggattcgggcagttga

SEQ ID NO: 326493 - DNA, 882 bp, Pseudomonas aeruginosa
atgtccgcatccatccacggcatcatcggctacaccatcacccccttcgccgccgacggcggtctcgacctgccggccctcggccgctccatcgagcgcctgatcgacggcggcgtgcacgccatcgccccgctcggcagcaccggcgaaggcgcctacctgagcgacccggaatgggacgaggtggtcgacttcaccctgaagaccgtcgcccatcgcgtgccgaccatcgtcagcgtctccgacctgaccaccgccaagaccgtgcgccgcgcgcagttcgcggaatccctcggcgccgaggcggtgatggtcctgccgatctcctactggaagctcaacgaggcggaagtgttccagcactaccgcgcggtgggcgaagccatcggcgtgccggtgatgctctacaacaacccgggcaccagcggcatcgacatgtcggtggaactgatcctgcgcatcgtccgcgaagtggacaacgtgaccatggtcaaggagagcaccggcgacatccagcgcatgcacaagctgcgcctgctcggcgaaggccgggtgcccttctacaacggctgcaacccgctggcgctggaggccttcgtggccggcgcgaaaggctggtgcagcgccgcgccgaacctgatcccgacgctcaacggccagctctaccaagcggtgctcgacggcgacctggagaaggcccgcacgctgttctaccggcagttgccgctgctcgacttcatcctccgccggggcctgccgaccaccatcaaggccggcctgggcctctccggcctggaggtgggggcgccgcgccttccggtgcaggcgctggataccgagggctgtcggtatctgcaggggttgttggaagagctgcgctga

SEQ ID NO: 326494 - DNA, 537 bp, Pseudomonas aeruginosa
atggctgaaatcctctccctgcgcgaagcggtgcgacgcttcgtccacgatggcgacagcgtcgccctcgaaggcttcactcacctgatcccgacggccgccggccacgagctgatccgtcagggcaggaaagacctgacgctgatccgcatgactcccgacctggtctacgacctgctgatcggtgcaggctgcgcgaagaagctggtgttctcctggggcggcaaccccggtgtcggttcgctgcatcgcctgcgcgacgcggtggagaagggctggccgcaaccgctggagatcgaggaacacagccacgccgacctcgccaacgcctatgtcgccggcgcctccgggctgcccttcgcggtgctgcgcgcctacgccggctccgacctgccgaaggtcaacccgctgatccgcagcgtcacctgcccgttcaccggcgaagtgctggcggcggtgccctcggtgcgcccggacgtcagcgtgatccacgcgcagaaggccgaccgcaagggcaacgtgctgctctgggtgtag

SEQ ID NO: 326495 - DNA, 408 bp, Pseudomonas aeruginosa
atgattaccgagaatcgcttgagaagggctatcgcgttgcgcaaggacgatgtgttcctgcgttccgagttcgctcgttttggcagcccggcccagctctcccgtgccttaaggcagctcattgccgaaggtgtgctggtcaagctgggccttggtgtgttcgccaaggctaaacccagtgtgttgaccggcaagcctattcctgtgcaaccccttgaggtgttggcgccgctggtcttgcaaaagcttggggtcaaggtaaagccctcccaggcagtgcgcgattacaactcgggtacttctcagcaactggctgcgggcattgtgctggataccggacgccgccgtattacccgcaagctgggtttcggcaagcagacggtagcctatgaaagtcatcacacctga

SEQ ID NO: 326496 - DNA, 963 bp, Pseudomonas aeruginosa
atgaaagtcatcacacctgaccaggccgagctgatcgaggcggtattagccgaacgtgatgtcggcctgctgactgccagcatcctggaaaaggatatccacgttacggatgccttgtgcgccttgctgggtatgaagcatcctgctacccagctggtgttctgtggtggtaccagcttgtccaaggcatacggcctgctcgagcgcatgtccgaggatgtggatctcaaggttgtgttggacgagccgagcatcggtggcgcttccgcaatcaaaaagcatctgagccagttgaaggtagaggtggcgcggctgctggagtcaatgggattcgtcgaggactcgcagcagcgtattgcccgtaaccagaaccgctatttcgctactcgatggcagtaccagtctcgctatcagcatgacgccagtctgagaccttacctgagccttgagcttacggttcgtagcccacagttcgctactgcgcgccagcctctggattacctggtagagcgcttggcgtcacgctcccggctcttggggcaaatcgagtgtgtggcggttgaggaaaccttggcggagaaggtgatttcttttttgcgccgatatgcccaacaccgtgcgggtgccatgcatcaggactgggatcggacactggtcaggcatatctacgatgtcttttgcatttgtagagtggacacaaagattaccgagcgagcggtcgcggggtttcaggccctggtggcgttcgatgtccaggagttcggccagcagtttccgccgttcgctgccgagcccaaggcaaccctgtccgctgcactggagcaggccgagaaggatcccgcgattcgtgaggactatgacgcacgtttgctgccactggtgttcggttcggtcaggcctggtttcgatgaggcctatgacgtgttccgccagcaggctgagttcttgattgacgtgctgtga

SEQ ID NO: 326497 - DNA, 1233 bp, Pseudomonas aeruginosa
atgatgaagaactcccatttgatccttttcttggccagccctctggccattgccaccgcaatggcggcaaacggcgcagacagcgccggtagtgcaagtcattcctgcaacatcgatggccttccccagggaggccaggtgattggtggtcaggcgaccatcacgcagcagggcaacagcatgacagtggacacgtccagccaccgaacggctatcaattggaagcagttcaatgtgggctcggacaacaagatcaccttcaaccagccggacggaaagtccgtaaccctcaacagggtgactggtcgcgacccttcgaagatctatggagccgttacgtccaatggccaactgatactggtcaatccgaacggcatcatggtcgggcccaaggcgcatatttcctccagcgctctggttgccagcgccggcttcctgaccgaggagcaagccaggcagttcgccgagaccggcaaactgaacatccaactgaccggcaacgtcagtaacgaaggctgcatcactgtccacgacaacggcatggttgcgcttctcggcgcgcaggtgaacaacgccggcgtggtccaggcgcgaaaaggcaaggttcaactggccaccgggccccaggcagcgctggacttccatggcgacggtctgctgaacatagccatcggcggcgagcccggcggcaacgaaagtgtcaacgccgacctggccggcggcgtatccaacagcggtgagatcgaggtcggcaatggcacggtagtcatgagcgcagcacgcgcggccaagcatctcgactcggtggttcacatcagcggcaatgtcgtcgcggactcggtcaccgaggacggcggaaccatcgtgttgggcgacgcggcaagaacccaggtcgctggcacgctcagcgcgaaaggcaagaacggaggacaaatcaaggtcctcggcgacgaagtgacgctcgccggcaccgccagggtggatgccagcggcaagcagtcatcgggcggcgaggtgctggtcggcggcagcttccagggcaagggcagcgagccggcctccaaggccacgacggtggcccacggcgcacagttgaaagcggacggcaagagcgatggcggccgggtggtggtatggagcgacggcaagactcagttctccggcagcgccagcgccacgggccagcgccgtggtggtgtggtggtgtggtggagacatccggcaagcaactga

SEQ ID NO: 326498 - DNA, 4683 bp, Pseudomonas aeruginosa
gtggagacatccggcaagcaactgacagtggctgccgatgccaaggtcacggcgagcggcgggcagcaatcgggcaaatggctgcttgatccggaaacggtgaatatcgaggccgatggcggcgcaccgggcagcggaacggtggctgccagcgcaattgccgccggactgcaggcgaacgatgtggagatcagcgccagccagcgcatcaacgtcaattcggcgattgtctccggcgacgccggttaccacaccctgcgcctgctggccgacggcaaggtcgctcccgccagcgtctataccgataccggagatccgttcgccgacgccaagcgcaacgacagtggatcgatctatatcaatgccccgatcctgctcaaggacggccatttgtacattgccgccagcggcgacgtgctactcaataacaccaccggatcgcaaaccggtgatgccgggtacatgggtagagcgatcatcgatgtcggcaatggcaccgtctggatcaagacctccaaaagcgcctcggtgatccagcaagagggcacggcactgatcggcaaacaggtcgccgtggagggcgccagcgttctgctcgacagtccgctcaatcatgcaggcacgctggcgggaaaggccaccaatggcaaattcctctacaaccagacctccaacggcgacgtcaacaccggcacggtgcggatcgaccacggcgacggcacgagcgaaaccatggagggagtcagttcctcggcgattgccaagctgggagagcagtggatctgggagcgcaccggcgatacccctcaccatctcaccctagatgaaaccacgccctttcaatacctggtattcgaggcactggaatatgtcgatcacaaagaccacaagccgattgccggggacaggaccgattcggactactgggtgtcgtcgctgacgttcaagaaccccgccacgggagacgtctgggtcgtctcgtccgacccgacttccaccagcgggatttccgtcagcaggaacggcgaagcgaccacggagatgccgccaggcttcgctctgggcaccgacctgggcagcgttacggcctccgccaatggctggggggtgaccggcggcacgggagaccagggcaaccctgccgcgtccaatgcgatcaatcgccatggagccgccaatacctccgacaagctcgtcgtggacctgggcagcaatacctcgagcgtcgacgcgaatgccaacgaactgtggcattccggcaacaagtacgagagcggtgtcgtgagcttcctggggagcaaggacacctccgagaaaggcggcgtcacgctcaagtctcagacggctcaactgcaaggcacgatcgccgatgcacagcgggaatacggtgaggccaacccggcgttcagcgcctcggtcggggttcccggcgacgcctccgagaacagtcgggcggtcaagggcgtggacgacttcgtcgaccggcaactgaatcaaaaccgcttcgacgtgaaggtttcgcccaccacgaccgccaccgtcgaatccaatgtgggcgactacagggtcgacggtagcgttcaagccgacggcttcgtcggccagcgctatcagaccacggtcaagcccggcacgctgcatgtcacgccagccgaactgatcgtcaccgccaaggacaaggagaagtcctatggcgacgccgatccggctctcgactacaacgtttccggcgccaagctcggccagaccggcgcgcaattgctcaatggcggcacgctggttcgccagcctggcgaagacgctggccagtaccgcatagagcaggggcagcttgcgctgaacaatggcttgggcggcaactacacactgaccttcgtcgacggccagctgcagatcaacaaggccacgctgctggttaccgcggacgataagagcaaaacctacggcgacgccgatccggccctgagttaccaggtgtcgggactcaagaatggcgacacgcgggaacaggttctcagcgccggctcggtgcggcgagacgccggcgagaacgtcggcaactatgccataacgaacgacgacctggcgctgttgagcagcaactacatcctgcagttccaggacggtgtgttcagcatcacgcccgccgaactgaccgtcgtggcggatgagaagcagaaggtctatggcgacgccgatccgtcgttcacttaccaggtgagcgggctcaagcgcggcgacacctctgcctccgtgctcaatggcggcgcgctcgtccgagagtcgggtgaaaacgtcggcaagtacggcattcagcagggcatgctgaatctcaacggcgacgcgggccagaactacgtgctgcgttttgtcgagggagatttcttcatcacgcccgcgagcctgaccgtggacgccgatggcaagaccaaggtgtatggcgacttcgacccggcgctgacctatcgcgtcaacggactgaagaacggcgacagccagacggaggtcctgaccgggctcctgcaacgagcgccgggcgaagacgtcggcagctacgacatccgccagggcagcctcgatctcgcctccggcaaggggcagaactatgtcctgagcttcacgggcaacgagttcaccatcacgcccgcgcgcctgaccgttaccgccgacagccagaccaaggtctatggcgacctcgatccaacgctgacctacacggttgccggtttgaaaaatgccgacagtcaggccgaggtcctcaatggtggggcgctcaaccgggcccccggcgaagcggtgggtgattacggcattagccagggcgatctcgcgctgaaccagggcaagggcggcaattacgtgctctccttcgtcaagggcaatctcgccatcacacccgccaccctcacggtcgaggctcaggaccagagcaaggtgtacggaaatgccgacccagcgctgacgcatgtcgtccatgggttgaagaacggtgacagcgcggccgatgtgctcaatgacggatcgctggcgcgcgtggcgggcgaggacgtcgggcagtaccgcatccaccagggcagcatcggcctgaacaatcttcagggcagtaactacgtgctccagttcgtggacggctcgctgacgatcacgccagcttcgctgagcgtcaccgccaacgaccagtccagggtgtacggcgatctcgacccggcgctgacgttctccatcaacggcctgaagggtggcgacagcgtcgctgacgtactgaacggcggccagctctcccgacagccgggagaggacgtcggcacctacgaaatcggccagggcgagcttgggctgggcggcagcaaaggccagaactacatcctcagctatgaggcgggcaccttcaccgtcaccccggcaaccctcacggtgagagccgatgaccgttccaaggtgtacggcgagatcgacccgacgctgagctaccaggtctccggccttaagcgcggcgatacctcctcatcggtgctgaaaggcgctctgcgtcgcgaggccggcgagaatgtgaaagccgatgggtacaccattgggcagggcaacctggaactgaccagccagaactacatcctgcgctatgaaggcggcgccttcaccatcacccccgcgtcattgcggatcgatatcgacgaccagacgaaagtctatggcgacatcgatccatcgctcagctatcgcgtctccggtctggccaacggcgacactgcgagaaacgtgctgagcggtacggtatcgcggacttccggtgagaacgtcggcgactatgcgatcgggaaaggctcgctcggagcgaacgccaactacatcctcaccgtcaacgacggcaccttggccattacacccgctgagctgacggtcagcgccgacgacaagaccaaggtgtatggcgacctcgatcctgtcctgacctacagcgtcaccggcctgcgcaacggtgacaacgccgccgaagtggtccatgggcagctcgtcaggacggcgggcgaggacgtcacgcccgacggctacgcaatctcccgcggcaacgtggtgctgaccagcggcaactaccgcatggttttcaaggacggcagcctgcaggtcaccccggcgccgttgaaggtgaaggcggacgacaagacaaaggcacagggtgagagcgatccgtcgctgacctacagcgtttccggactcaagcgcggtgactcctcctccgtcgtccaggggcagctttcgcggcaacctggcgaggaaccggggcaataccggatcgaggcgcgggaagggttcagcgctggcaacaattacacggtgagcttcgaagaggggagcatgaccatcactggtccgctggctcctgcgccgttgccaccgctgccgatcacggcgcaatccccggggaacacccgctgcacggccatcgagtcgccctcctcggtctccgccaactactcggtgtcgccagcggtcatccgtacctatgccgtccagctcgtctgcaaaccgcgttcctatggcgagaccgaaagcaccgtcccgacgcttctggacgtactcagttatgcgaacagccgtttctctgacggcaagttcatcgttccggactggaaccgaagcgtcattccccatcagcccagcaccactgccaagggagggaaatag

SEQ ID NO: 326499 - DNA, 1263 bp, Pseudomonas aeruginosa
atgaaaactcatccgtaccatctttcccgcctggccgccgcggtgctcgcagggatgctggcgggctacggcgttcaagccgcggcggccccgctgggccagttggacccgggtcgggtggaagtccccgacagaaccggtgtgcggtcctccgcgactgagatgcctggcactctggaattgcccgacaccacagtatttcccgaagcggaagaggcgccccgggagatgacggcattgccggacaacatgccgcgattcctggtcaccaaggtcaccatcgtcggtgcccagagctatccgccgggcacattcgactcgctggcgaagcgtctcgaaggcaatcgggtgagcttgcgagaagtcactgaagtagccgatacgattacccagcgttatcgcaaggcgggatttctgctcgcgaaagcctacgtcccgcaacagcggcttgaaggcggcgcgctgaccattcaggtgttcgagggcaaagtcaacgaggtgtcttttcacggcccctccaacaagacccttgaaggctatgcgcagaacatccgcgaggagacgccgccgaccagtgcgacgatcgagcgcaatctgttactgatgaacgatgtttccggtaacgacagtcgggctgtactccaggcgtcccctataaaggacggaacggacctcgcgattgaaaacaccctgcgcaagtacgaaggcttcgttggcgcggacaatcgagacagccgctacttcggtccctggcaggtttacggcggggtaggtgtcaatgatctcactggtcgaggcgaccacctaggcgtccgcgccggcaggtcggtcgagggggacaagatgacgttcatcgagggtcagtacgaattgcccgttggcactcaaggtgaggtggtgagtgtgcttgcccaacataacgatggacatgccgatacctactcctacctcaatgcccacagctctggcgataccttcgcattgcgatacacgcggccatgggtgcgccagcgcgatgaaaccttcaagacctcagctgccttcacctactacaacggtacgtccgagtatcttcacgacaaaagcctgccgccctccagcgaggatcgcatccgagcattgcgactgggcgcgagctacgactggctcgattcgtggggaggaaagaacctcgccaaggccgagctgagccaggggtgtagtgctctactgatcccggacatcgatttaggcgagaatcctcgccgtgaaagaggtgtctga

SEQ ID NO: 326500 - DNA, 258 bp, Pseudomonas aeruginosa
atggtcataaagcagaaaaagaagcgccgactaaccccggccgtaggggtaacgattccccaaaacgtgcaggacgagaccaaccgactcttcgtcgaagcgatagaccgggacacctttttcggaaaagtgtcgatgagtaaggtaataaccgcgctgcttgagatagccgtggagcgagccgctgccttcgacagttccaaagtgacggacaccgagagcctgaaggctgaactcgagcgcatgttgcagaggtaa

SEQ ID NO: 326501 - DNA, 411 bp, Pseudomonas aeruginosa
atgcaagaaatgcagcacccgcagcttaaccctgatctcgagaacaaagccgccttcgtccagcggcgggagtcgtttggcatccccaccaaaatatgggtaggggtcgtgggtatggggctcattgcgcttttcggctctctctacattttcggggtctggcttggccttttggtcgggacagtcatgtgcctcgtgatcaccatcccggtcttcatgatccacaaggaagatccggacgcctggatattttggctgcaaagcctgacagcccctgatttcttggatcctctcaagttcgatcatgcggtgtacacgagctggttgggggggcgtaagcgccgaattctgctgttgtcctggaacgataacgatccggttatcggttctgctttcactgaaaaggagtga

SEQ ID NO: 326502 - DNA, 336 bp, Pseudomonas aeruginosa
atgaaagtgtctcgcttgaaaaactggctcttctgtatggcggccatcctcgccatcagtcctggggcgcaggctctgaacaacgatgtggatcttggctcgccgaacgacggcccgctgcagaaaatcggcgcgctgatgcagcagatagtcgacttcctgggtggccctggagttcttctggtggctgtcctcgggttcgtcctggcctacttcatgtgggtggtcattcccaagtcggccgggccggcaattggcctggttggacgtgcgctgactggcgcggttgtgatgttcaacatcgcccttctgttctcctggattcaagggatctaa

SEQ ID NO: 326503 - DNA, 2553 bp, Pseudomonas aeruginosa
atggggcgctatcagggggagccaaagcgggtcgagccgttgaacagcaagctgtactcggcaggtgtgtggaagaaattctgcctgacctacgcgggttcgctgttgagcggtatcgagatgggtgggaccgacccgacagccctgggagaacatgatcggcgattgttctccagtgttcagcgcgccctttatcagagcctccacccatccctgagcctctgccagtactactttcacttcgagggtaaagaggttgcattgcgcgagcgggacgacccgcggagtgacctgctttcgaagcggcgcgcccgcttcctgaactcacagcggctgaatgactcccgcttgttctggctgttggagtgcccggcggaggagcatgtaaacaacctgctcagcgtcgggatgctgaagcacttgtttcaagcgcccttcgagtcggaaagccgcctgctattgatgcagcggttccggaaccatgacgcatggatcgcggaagagcggcagttgcagcgtcaggccgacctccttgaggcgagcctgaaagatctgtccagccggtcggagctggtgtcgcctcggtcctccaccatgaatctccagtctctatgggcgcttcaccgcgccctggtgaacatgaacccatcactgctcgacagtgcggtgcatgaggaggtgccggtcgagaactgggacgctcttctttcaaacgggggcatcgagccggtcgagatcgacggcatgacctgcctgaagttccacggtccccgtccggtttacgcgcggatcgcaagcatcatcgcctatggcggtcgttacgttccggagggaatctggatccagactcagcgctccccgctgatgcagaaaggcaactacctggtagtcaaccgctgggtgccgtacagcaaggcggggttgtcaatgctgctgcggaacaaggccaacgaactggcccggcagaacatgaagctgtctgcgattctcaccggtgagaacccgaatagcggcatggaggaaaagctcaaaaacagcgatcacctccgcaagaaggtcaaagaacttgatgatgcggcgaacaccccggatcgctggggctcgtataactctcatgttgtggtgtggaacgagaatccacttgaacttaagagcgcgtgtgcagagatgcacaccgctttgaccgagagcagcctcacggccgtatgggagtcggccgggctgatagagctattcccgaccctgcttcccggctacgcgaagaagtcgatgcgtgcggtggagttcacgagcagccaggccggtgcgacgtctatcgcattcaagtcgcagaagggggtgacctcctggggcccggctaaggaggagcccacctacattctccagacccgagacaactgcgcgttcggatactcggagtttctggcggacaagggccttgttatcgcaactggccccactcgatccggcaagacgttcgcgaaaaattctatcgcgagccacttcatgaagttcggggggctgtaccaggatattggcgttgatgctggtgccgaggcgatggccgcctacttcggatcagatgcgggagtattccgcatcacggacccagcgacgagtcacggtttcaacgcgttctttgcggctgatccggctttgaaggagaaggacgggttattcgtagggcatctactgcacctgttgcggatcatgttcgaactcaacgagtcggcggatctgcgttcgatcgataaggatgaacaggcggatctcgatagggcgatccgtgacatccttcgggttgatgaggccagcatgcggaccctctctggcctgtatagccacttcccgaaaagccttaagcagaagctggagcgctgggttcggccggggatatacggcaacctgttcgacaacgagatagatgggttgggcacctttggtaggcggatgggcatctataacttgagcggcctgaaggacgaccacaggctcgcagcgctcgcccagaccgaaatctttttcagggtgaccaggctattcgaagatccgaagctggtagatcgtatcaagcagctgcagatcgatgagtgtcagtatttcctggacgttccaggggcagtgcagttcctgcttgcaaaggtccgaacctggaacaagtggaacgccggaatcacgttgtggacacagagcccccagcactacgcggccatacccgactggcagatgttacgcgcttcagccaccacgttcctgttcggggcagaaccaaaaatgtcggccgagctgagatcccagtacaaagaggtttatggagtaagcgacggtatcgtcgacggcattgcgtccctccgaccgcagcgcgagatgttcatctggcagcccgaggcggatctagcccaggtggtgcagttgaatgtcgagccagagcagtatgtcgtttcgaccagttcgcctagtgaacagccaataatccgagagatgttcgccaaatatcctggagacgtagacagggctatcgctgaagcggtgaaggccttgagactcgcctag

SEQ ID NO: 326504 - DNA, 852 bp, Pseudomonas aeruginosa
atgaaacgcaagttgcagcctctggcgatagctgtattcctagcaatggcaaccatatctaacagtaacatggttcatgcgtcaggcttccccgttgtagatattgctaacctcactcagatggttgagggatatatccaggacctgaagaactacgatgaatacattcaaacaacggtcctgaaccaagagcagcttgcggaggctctccggctttataagcagactctcgtcgcatatgacgaggttctgcgtcaaatggagtcgctgaaacgcaagctgagtcccagggactggaaagcgctgtttgccagttataaggacattctcgatctatatcctagccaaactcagcgtagcgatgctgagtgggaaaggatcaacgcgaaagtcgatcaggtctatgctcgagggcaaaaaatggtcgagcttcaatctgtcgtcgacgccattccgttcgcgaagaactctcgagagtcaatcttggctgatattagccagtcttccagccgtgtggacatggctacgaatcagcgcgaggcagttcaaaaacagcaggatatgattgagaacaatattagtgagttagaggagctggactttactcgtcttgggttaggtgacgaagataatttaagaacgcttcagtttcttgcggagcaaaatcaaaaatcgttggagttgcagatccagagtctgaatcaacagaataagagctttcagtattctaaccagttgccttcatttgtcttttcaaaggagaaggagtccaaggaagcttcattaagggagctggaagcgaaacgtaaacaaaggattaagatcgataactccccattggcagactggtaa

SEQ ID NO: 326505 - DNA, 1158 bp, Pseudomonas aeruginosa
atgtcgacaatgtggcttgtggtagttatgtgcgcactgatgttcggtgcgtcgggctacctgttctcgcgctggagatacgctcgcttgctagcagcgagcggggtatccctggccagtctgccggtcatgaaggcaagccgtgcgggaactagcgggcggtggtggcagcgtaggtgggtgaggatcggtggccaatcgcttgcctgggccgcactgttcttctcacctctgctactgatgattcctgctacggcggatgcggcgctgtcggagacgttccgaagtgttttcgccggtgaagtcagccggttcgtggtgggcatcatgggggattacacgaacccggtgaatcaatggtccaggatgctgttggggttctgtttcttcgtcctgattgtctccgaggcaacgatattcgtcttggatgggcttaatacactgcgcttggtggccgcttttgtatcgttatctataacggtggctttttggcttggatacgactatggcacgagcgcaatgtggggcgtcggagtcgctatatctcaggggatgcagtcgttcctagtaggcaatactgacaactttttcttcatacagtgggtaaagatcgcttttgataacgtcaagctcgaggacatggggctgtgggacggcataaagtattggcagtattccactgcctgggagttcattgcttttctgcttgaggctgtctactggctggcttccatgtggtctgagcttggctatggtttggcaaagatcgttggggttgtatttatcccgttttatatgcttgagagtacgcgtccgctcttcgatggttggcttaggttcttcgtggggttcatcattctgaatgtcatcctgaaggcgacgatggtcctttctgcgctgttggtgagattcaccctttacgacctgggcatgaacttcaacggagcatggggcgagccaacggaggttgtcccgtttgcgaaggaacaactgtatttgttggcggattctgctgctgctctttttgtcgcggtacttttcgtactttccagctttgtattcgcatcgatactagcttcaggggctgggggcatgtctggcgcattaggaaaagctgcaaacatggtatccagaggggttaccaagaagttcttctaa

SEQ ID NO: 326506 - DNA, 633 bp, Pseudomonas aeruginosa
atggccgaaaaggcctcacgcaatcttgaaatcgcttacgtgaagctgtacccgaatgggaacagggaaatttcttacttcaaacgtcagccctatcaagagtatttgcctgcaacggttgactcgctgctgaaagacttcatcagagtgcgtttcggcgtgttcccgccgactattgctagggactatggccaggtggggatgttcgtttctggagcgctgtatcagcgttttgtcgatgaagagaagagcggcggcttcgatgcagttaagaaggcagctgctatcgctgcgaaagaagcgacagaggaccgcatctcaatagctgatatctggatcgaccattacgacactgtgccggctgttttttccaacaaatcgtcggaagttgtacggaccaatatctactacaccaaagtctcgacgagcccgcaggggttcgagaagggcaggaccgccaaaatcgcgcgactacagtggcgcctggtggataagaaagaactcgaggaattggcctcgaagaacaccaagatcctcgacgtcaatccgattggacttgaaatcgtggactacgaagaaatcgacgatccggcagggatcaaggcgacgcgcagcgaggttcaaccccaatga

SEQ ID NO: 326507 - DNA, 846 bp, Pseudomonas aeruginosa
atgaaacagttcatctcctccattcttgtgctgggctctctcgccgcgtctgcaggagttgcagccgcgccgacggcctgccgcgaaattcactggcgtgagggaacggtcgtgaccatctcctctgcggtgaatcttggcactcgcgttcaattccccgttgacctggtgacgagggtgccgagcaacaaggttctgtgggacgtcgatggcgccgccactgtgatgctggtcaagccaaactcggtcgacgagcccgagggcgccgcaaccatggttcgagcgttcacgactgatggcaacgcctacgacttcatgtttcgccgggtcgcggccgcacagaatgagccgtgcgtgatcgtgaagaacgatggcctgttcttcaatgactcggctcgggcaggcctgcagaacctctccagcgcgcagatgcggcagggcgccgccttcgctcagcagaacgcggccttgacccagcagatggccgaggagcggcgcgcggccgcagacaatagccgtaaggccgtcatggaggcgctgcggcggtaccgctaccacatctacacccgttacagctgggaccagggcaagggcttcgccgcgcagaacctcatttcagacgtgtacgacgacggtcggttcacgtacatccggctgaacacccccaaccgcgggctgctgtccgtcgagtcggtcatcggtgagaagaacgccatcgtgccggtgcgctacgacgacgcctacggcatgtacaccatcaacggcatctacccgtccttcacgctgcgcgtcgacgacgcgcgaatcagcgtttcccgggccgatgcgaaaaccttcggggagtga

SEQ ID NO: 326508 - DNA, 1404 bp, Pseudomonas aeruginosa
atggctgacgaagcacagccgcggatccgggagcgcccggccgcgcacaggacgaagctacagcgctggctgttcgcctcgatcgggctgatcctggttgcccttgtgctcaacttcatctggttcaaagccaacggcggcagtggatcccgacagtcagcggccgagcagcggcagcagcaacggcagtcctcgaacatgggagcaggggccagccagttcggagatctcgtttcccggcagcaatcgcggctgtccgagcgcaactcgttccaggaacaagtggacgaggccgccggcgagctgaagacaacggggcagcaggcttggtcgcagttccagggccgtgacgacacgagcaaggcgagccagggcaagggcaaggcgcgcgagccttctgcagaacagaaggcttacgcgaagtggcgcagtgaggagcgcatgcgcgctctgaagagcgctcagagcccttggggctacaccgatgcggtggcgaaggctcagcgcggcggcgcaggagtggccgttgccagtcgaggcccatattcgacctctgcggccgaggctcagaacctgctcaattcgccgactcagaccgggggcagcctcgaagcgcgccgcaaggacttgcggcagcggatcgaggccgcagaacgcttgcggaaagagcttcagtctgcgccacctggtgaagagccttccttcctggcgcagaagcgcgaggaactcgagcaagtgaagaaaaccttcacgccggcgccgaccgatgttgtcggatacacgaaggagaatccctacaacgcagatatcgagggcatgctcaagctgcctcccggcaccgagatcccggcccagttcatgcgcaagggcgtcagcgacttccagggtggccagctcaaggggctggtcagccgagacgtctacgacattacccggcagcacgtcgcgatccccaagggggctgagatcatcatgcgcgtgcacaaggccggcaacgtcaacgaggccatccagcgccggatgggtatcaccaacgattgggtagtcctaccggatggcaacaagatcgacatgtcgaaggccgccggcctggaccgcgaaggggtcgctgcgatcgccgaccaggtggactatcacctgctgtcccagttccttggcgtcgcagcctacgcgttgatcggcagctcgaccagtcgctccggatctggctctgacaacgactcgacgttcgccggcgacgtcggcgacagcagtcgccggcaggcttcgagtctggtccagaagtacctcaacatcgtccccaccatcaccattcgccccgggcagaccttctacgtctcgctcgaggatgacgtctacgtcaaaccctggaagcacgtctatgaagatctcgctgattactaa

SEQ ID NO: 326509 - DNA, 375 bp, Pseudomonas aeruginosa
atgaagatctcgctgattactaaggccttgctcgccttcatggcgttgccggcgctttcggttgcggccgagcagccgcaacaacctatctatgtagatccgctgagcctgtatgtccggacgtcctggcccgaggacgtgaagacgatcggccaggccgcgcgctatgtgctggagccaaccgggtaccggttcgtcactcagtaccctgcgcccagcgacgctatcaagttcgccgggcgcgcgatcccgccgatcgtgaagctccatcggaccatgccggtcatcgatgcgctgcagctcctggtcggcgtcgataactacgtcatcgtcgaccacaaccacaagttggtttcgatctcagggagcaagtga

SEQ ID NO: 326510 - DNA, 198 bp, Pseudomonas aeruginosa
atgaagaccaagacgattctcgcgaccgccgcgctgctggctctggccgggtgctcgagtaccaagatcgagggcaccggggagttcttccagttgcagcagcgcaacgtcatttcacgcgacctgacccggccggtaggggtggacaatgaacccgtcacgtatcgctacagtgcgttcccgcaagcgctcaagtaa

SEQ ID NO: 326511 - DNA, 783 bp, Pseudomonas aeruginosa
atgaacccgtcacgtatcgctacagtgcgttcccgcaagcgctcaagtaaggcggtcctggtgctggtcgcggccttcacaatgcccgccctgcaggcggctgaggacgagcaggcgctgtacgacttcctgttctccgcaccgccggcgccgatggccgcccagcgcaatgcgctgagcagccttggcgacgactcggcaacgccctggcgttcggaccagttgcaggagctaaagggcgctttcaaggccttcggcgagcaaccgtcacaacaggctcgaccgccggcgccgccggcatctgacgacggggacggtgccattcggctatgggatcttgccgaggagccgcaggcgggcctggttgtgcctgcctcgatggcggccaaggcggcgccgtatgcgcggctgatacagcgctacgcgcaccaggtgcgcatgagtccaaccctggtgacgttgatgatccatgaagagtcgcgattcaaccccacagccgtcagtccgaagggggcgaaagggctgatgcagctcatggatgcggtatccgaggaactcggcgtcgacccgttcgaccccgagtcgaacatccgcggcggcacgaagcacttggccaggctgtatcgggcgttcggtggcaacttgaagttggcgatcgctgcatataacgcaggggagggggctgtacgtaagtacggcggaatacctccctacgaagaaactcagaactatgtaagtcgaatcatggcaggacttgcggcagcggaggcgcgcgcattatga

SEQ ID NO: 326512 - DNA, 324 bp, Pseudomonas aeruginosa
atgaaaatcattgttccggtactcgcattattcgcagttacttcacagccggcagtagctagttcgatctacgacttcaagtggaaagataagaacgatatgcgcggcgcatacatgatgtgtgcaactacaggtttcaccggcggcgaatgtccgaaagtgctgaccaagtgctggcagcctccgatgatctacaagcggaagaaaaagatccgtacctactgcacggactcaccgtccttcaccggtacggagagtgatgcccaggcagcggccgaagaagcctatcgccgtctaggccagccgatcccggaggagaaatga

SEQ ID NO: 326513 - DNA, 396 bp, Pseudomonas aeruginosa
atgagcctgctcacgctcgaggatctggcctggctgcggcaataccgcgagagcctgtccggctggtccaggtaccagctcgcgaaactgcgtggtgctagctgcggcgagcttatggagattgctggccaggtcctggtcctcgaccgtgatcgctatgttctggcccaggacctggcggccagcgtcctcgagggtgtcgggaacagccagatccatgagcagtgggaatacgaatgcgcgtgcgcagttcatcgcgcagccgcacggctttcggcaagcgacggcgaggtactgatagcagctggtggctacgccgaccaatccttgggagagctgtcatccgcctcatccgaggcggttcacgaggccttcctcgccctgtacggcgagtag

SEQ ID NO: 326514 - DNA, 405 bp, Pseudomonas aeruginosa
atggcacgtggaatcaaccgagtgaccctggtcggtaatgtcgggggcgaccccgaagtccgctacaccgccgacggtaaagcggtagcgaacatcaccctcgcgaccaccgaaacctggaaggacaagcagagcgggcagcagaaagagcgcaccgagtggcatcgagtggtgttcttcggtcgcctggcggaaatcgtcggggagtacgtcggaaaagggacgctgctgtatgtagagggcagcctgagaacccggaagtggaaagacaaggacggtaacgaccagtacacgaccgaagttagcgttgactacgacggaactatgcaggttctcgcgcgtgggcgtgcaaaagatgggggtaacccaccacccgttgatgatatggacgatattccggactaa

SEQ ID NO: 326515 - DNA, 591 bp, Pseudomonas aeruginosa
atggccaagtccgatatagaacttaagtttaacctcggaaagcatatcgtatgcgtggaagctgggcacggctacgctgttttagaagacgactctggtgcccctaaaatgtacgacggcgtgagctttactatccgcgagcgcagggaaaaagggcaaccagggacgatgctcgaccgccagtatgatgttaagcggtcgcaaattctggccctggcactgagcatgctggatattgcttcacacatggcagttgaacccatctggcagcgcagtgagaccgtaggttcgggacggctccgtcccctatggcctttgacgaaaaaagaacgtgagttcttgagtgacctgaagaacgaagaagtaaaggccatacgtaagaacgtacagacctcttacgagaatctacgacgccgggtgcatatattgcagcgatgccagtttgtacttgaaagaattagcgatgactcggccagccagttggacatgatgctgactgtactggagcagtacggggccttgcctgttcgcgtcgaacccggtgttgtgccgaactttgaaaatatgccgacttcagagacttcccactaa

SEQ ID NO: 326516 - DNA, 1584 bp, Pseudomonas aeruginosa
  misc_feature (1524)..(1547): n is a, c, g, or t
atgtgtacgcgcgataaacgtgcaaaggccgcttattgccggtcgaaaaagtttttattaaccggggccgcaattctcagcgttgcgtcgactgttgtgcacgcagcaaatacggttgactccaggttcaccaacaccgttgtgaccggcgacggcaacagcgtgacgggcaaccgcgatacccatttctccggggcaacttcggctaatgaccaggttatcgtcggcaaccacaacaacctaaataacactatgtcgtcggagatcatcggtaactacaacaccgtcaccaacagcgatatcgtcattcgcggcgagagcaacacggtatccaacgcatatggccaggtgtccggggactcgaacaagatcgatgcggcgaacgggacaactacggtcattggctcgagcaacaacgtcacagggcagagcaacactgccgttggcaacgggaacacgatgactggccggggatccgtcgcgatcggtgaggcgaccacgacgacggcaagcaacagcgtcaccctcggcacagggtcgagcaacaaccgcgacaacaccgtgtctgtcggcgccgccggcgccgaacgacagatcaccaacgttgccggaggatccgcgcggaccgatgcatcgaatctcggccaggtccaggacggcgacgcggcgaccctggccgcggcgaagggatacactgacacccaggtgagcgcagaggcgcagaagcgggcagacgaggataaccgggttctcggcacggccacgaaccacacgaaccaggcggtggccaacgaagcgcaaacacgcggacaagaggacgcacgcgtcctcggcgaggcgatcgatcatgcgaatcagcaagtagcggccgaggctcaggcccgccacgccggcgatgctgcaaccttggcgagcgcgaacaaccacacagacagcgcgatcaagactgaggcgaaagcccgggaagatgccgatgcggccgaggcccaggcccgggcggatggcgatgcgcagaccctggcgagcgcgaatcagcactcgcagcagctggtggacgccgaagcgaaagcccgcgccgatggcgatgcggcgacgctagccgacgccaaggcccacaccgatcagacggtggccaccgaggcccaggcccgggcggatggcgatgcggcgaccctggcgagcgcgaaccagcactcgcagcagctggtggacgccgaagcgaaagcccgcgccgatggtgatgcggcgacgctagccgacgccaaggcccacaccgatcagacggtggccaccgaggcccaggcccgggcggatggcgatgcggcgaccctggcgagcgcgaaccagcactcgcagcagctggtggatgctgaggcgaaagctcgcgccgatggcgacgcggcgacgctagccgacgccaaggcccacaccgatcagacggtggccaccgaggcccaggcccgggcggatggcgatgcggcgaccctggcgagcgcgaaccagcactcgcagcagctggtggannnnnnnnnnnnnnnnnnnnnnnngcgcgaaccagcactcgcagcagctggtggatgctga

SEQ ID NO: 326517 - DNA, 453 bp, Pseudomonas aeruginosa
atgcaagccgccgacctgcagacgctcaagagcgcgaaccactacaccgacagccgggaggtggcgatccggcaggacatgtacgccggcgacgtgaacacgctgaacagcgcgaatcattacaccgaccagcgcatcgatgccctcgacaactcgttcaacgacgcactcgccggcgcctacaactatgtccgcaaggaaaccgcgcagatgcggcaggagtaccgtgcgatcggtgcacttgcgatggccacggcggcaatcggcattggccccaaagatcttggccggtcgcaagtcggcttcggtatggggacggtgcagagcgcgtcggcgatggccatcggcctgaaccactacgtgaacgactcgaccgtggtcacgttccgcggcgctatcggtaccagcaaagcggtgtcgggcgcgtcgttcggcgtggtcaagggctggtag

SEQ ID NO: 326518 - DNA, 627 bp, Pseudomonas aeruginosa
atgctgattcacatctgccccaccctggagttgccctcgggcttcaacttgccctgcaggctgctcgaggtccaggtcgaagagttcgacctggtgctgaaaggcaatgtcgacgtagttcccggccggccgtttcgcaattcgcgcgcgctggtcgcgcgtcgcaagttagggcggcagccggtgaacggcattcttctggatgtgcctggcttcgcgccgttcttcactgcggtgacgcgctggagtatcgccggcgaggtgttgctgacgcatcgtgtcgaatacgtcgtcctcgacgacgtattcgacgctgtgagcgacttcccgagcctctggctccagctcgacagcaccgagggacagtggagcgaccggaccccggaattcgtgcgtagcccgtatccggcgcgacttgaaacgccggcgatgaagttcgactacccgctcgatctcctcgagcgggttcgcggccgggggctgggtatgcagaacacgaagatattccggctgccgaccatcgaacctggtcggctgatggggcgcgggcgcgctatccagcgccggctgccggcgccggaaacggcaatcaagatcgatagagaacaggtgaactacatgcggtag

SEQ ID NO: 326519 - DNA, 243 bp, Pseudomonas aeruginosa
atggcagtggacctatccgcgatgcgcaagcttttcgaagttggggccttgaaagaggccatagtcgcaccggctcccatggaaaaggggggctggctgctgctggtcaaccgttcggacggtgctcaagagcacctgacgttggcgcgctctacgcggccgaagatctacaagagcctggaacatgtccgggccgacgctgaacgtgtgggatttcgtgaggtgaggctacaggtagcgtaa

SEQ ID NO: 326520 - DNA, 816 bp, Pseudomonas aeruginosa
gtgccgcgcgtgaacaacggcggcaactactgcgggcataaaccggatgcacctcgcctggggctggtgaagcctacgacgctgaaaaaccgtccaaaaatcctgcagcgcctccaggaagagatacgccagtactactactcgccttctcgcctcccgtcgttgaacgccgctaacggcagcaagcgacagcagcgcagcgagcgccgcgaggcatgcctccttgtctcggcagccgtcctcgagtacaccgacttgacttcgctcaggtgtggtatccctacgcccgatggcttccagtcgctgactttcgagttcctggcggaatacatcggcatcggcatgcgccgcatcgagcgcgctgtcgcggatctcaaggccgcaaacattctgacggtctcccagccccgacagctgcaggaggacggctcttaccgtggcctcgctgcggtcaagtctgtgaacagcctgttgttcggcgcgttcggcatgctgaaatggttgaagcatgagcggcagagggccagcgagcgcctggcgaagaaggcaaagaggctgggtggcaacctcggccagtggtccaggagcgcgctggccatcggaaaaatgctggtgatccgccgccgtgggcctggcgacctccctcgaatcggtccctcgcatggaggggccgggccgccccagctcgacgctcagacctacggacatatgctcaacgagctgatactggcgttgaagcaagaggatcccagccgagacggtgcgacgtgccggaaactggctgaagcgataattaccaaaaagctagccggctga

SEQ ID NO: 326521 - DNA, 906 bp, Pseudomonas aeruginosa
atgcatcacgaagagcaaaagcaacagccagagcaagagccggctcaagaagcatctagcaaagcaacccgggcagggcaggaagtgagccccgagcaggttggccgcgagttgaactggtacgaacagaagctcgccgatcggagggaacgcctccaggaacgtgccgcgaagatctcagacgagagtggcgtgctctaccagcgagcgaagaccatggccagcgctatccctttcgggcaaccgatcctggtagggcatcacagtgaaggtcgggaccgtcgctaccgcgaccggatccacagcacttacggcaaggcgttcgcgttgcaggacaaggcgaagcattacgagcagaaggccgcggccgtggggaccgggggaatctcgagcgacgacccggacgccatcgagaagctccaggccgagttgcagcagctggaggcgaaccagcaacgcatgaaggtcgccaaccaggtgatccggaagcacaagaccctcgaggctcgacacgccgccttggttgcgcagggtttcagcgagagcctggccagccagatcctgacgcccgactgcttcggcggcatcggcttcgcttcctacgccctgtcgaacaacaacgccaatatccggcggatacgtcagcgcatcgaggacctgcagaagcgccgggaagcctccgacgtggaggttgaggcggatggctacacgtaccgggaggacgtcgatgagaaccgggtgatgttcatcttcccgggcaagccggatgagccaacccggcagttgctgcgacagaacgcgttcaagtggagtccacgacggggcgcttgggttcgccagttgaacaacgccggccgttgggctgcccgccaagtccgcaagtcactgggcgaggctctcgaatag

SEQ ID NO: 326522 - DNA, 1062 bp, Pseudomonas aeruginosa
atgtcggaacatagaagtaacgacccagcagcagacgttcggactcgcgttttccaggcggcggacagcctctatgaagagttggggcgtgagcgcttcccgccggtgccggatgtgcgccgggcggcgcgggcggacatgcacgcggccacgcggtatatgcaggagtggcgggcgttgcagaccgcgaaacccgagcctgtacaggtcgagctgccctcagccttgcatcaggccgccctgggcttgggcgcggccctctggaccgaggcgctggatctggccaatgccaatctgcgcaaagccgaggcagaatgggcgcaagagcgcgagaatatggagagcacccgggtcgaactctcccagttgtacgaggaacagcagggagagttggagcggcttcagcaggacaaggaaggggtccagcggcgcctggaggaacaggacaccatgctggccgaactgcggcacgagctgggacatgaaaccacgcgggcggacacggccgaggcccgtaccgaggaaatcacccagcgggtggaggacttgaagggcgagcttcagcgtgcccgagacgaagcaaccggcctgcgcaatgagctgtcggcggcacgtcagagtcaccaggccgaactcgagcaggtgaaggcggtggcggccgaagcgatcgaccgcgcgaaggcggagttggccgaggcgaaggggagggcagaggcccagttggaagggattgcggctcgcgccgaggatctccagcagcgcctggatgcggcacagaaagaggtgttccgactccaagcggccgatgaactggcccaggaacagcgcaaacgcgccgcagccgaagcgaacacccaggcgcagcgtttcaccaaggtgcaggccgagcgggacgaggctcggaagcaggctcaagacgccgggcttcgggcggcgcgcttcgagggcgagcttgaaagtctgcgggaaagcaatgcccaactgctggcccatgttggggcatccacggcgaagtcgccggcaaaaggcaggaacaagtccaacaagccagaaggccagtag

SEQ ID NO: 326523 - DNA, 210 bp, Pseudomonas aeruginosa
atggagaagaatgacgcagtagacgccctgattgccgcgatgaccgatgatcgcgttccggtgccgatcaggatcggtgccgcgcgaggcctggcgcatattggcagtgcccatgtgcgtgatgaactggtgacggtgatgacgaaccaactatgccctatggatctgcgggccgccgctgctgaagcgctggggcaggcctcggcctga

SEQ ID NO: 326524 - DNA, 255 bp, Pseudomonas aeruginosa
atgaccccgctggaacaggccctgatcgcccaagctcgcgcggctcaagcgcggacggcccggtatctgtggcaaaccacggccggccagacccctgacgacgaccgggaagaattcctgatgcagtacggggcgctgagcgccctgctgtccctggcgcatgagaaggccagcggtctgacgccggaagcggtgcagcagctgcgcgagatcgaagcggccgaagtcaaagcgaaccgagccacgcgcggctga

SEQ ID NO: 326525 - DNA, 192 bp, Pseudomonas aeruginosa
atggaacgagaagaaccgagcttcaatgagtggctggacacaccggagcgcgaggaacacttgcgcgacatttacttcgacgaccagctcggccctggctccgagttctacaagtgggccgagtcgatctatcggattcgtaaggccaccgccgagcagacgcgttgcccgcgccgttggccgtatgtgtga

SEQ ID NO: 326526 - DNA, 189 bp, Pseudomonas aeruginosa
atgtcatttgaaggcgtaaaagagatcaagcacacccacgatagccgcatggtcaatgcgctgatcgcggccggctgggtgctgatcggaatgaccccgggcacgaccgaggaaggccacccatggccgctgtacacgatgggctggaagcaagacggcaccccggcgcaggtcaagcaggattggtaa

SEQ ID NO: 326527 - DNA, 144 bp, Pseudomonas aeruginosa
atgcgatacgttctcagcgttgccagccactacctgaccggaaagctcacgaccgggcatgcgctttatgcccttcgcgaacggcctgtagccgtggccagcaagggcaaaacttgggttatcgaccctgacctcaaaggttga

SEQ ID NO: 326528 - DNA, 678 bp, Pseudomonas aeruginosa
atgtgtggcaggctttcgcagtacacagggcttcatgagttcgtcgacgcactgtcgatgcccaacgcgctggtcaacctcgtcggcgagcagcccgagcgctacaacgtcgcgccatcgacggccgtgacgacgctacgcctcgaaggcgacgcactggtcgcccagccgatcagatggggatggaggccattctgggcgcgcgatcgcgccgcgccgatcaacgccagggtcgagaaagtggcgcatggacgcttcttcagcgcggcctggaaacaccgagcgctgacgccggtcagcggctggttcgagtgggttgatgaaggcggcggcacgcggaaacagccgtatcacatccagcacgccgacggctcgccggtcttgtgcgcagcgatcggccagttccccgggctcgatgatgagcaggccgagcagcatgggttcgtcatcatcaccgcagactctgccggcggcatggtcgacattcacgaccggagaccggtcgtgctcccacccgatctggcccgcgagtggctggacccggcgacgccgccagagcgcgccgaacagatcgtgctgcaccagggcgaacccgccgaggcgttcacctggtacgcggtcagccgcgacgtcggcaacgtacgcaaccagggcgcctacctgatcgagcctgcgtag

SEQ ID NO: 326529 - DNA, 303 bp, Pseudomonas aeruginosa
atggaaaagaaactttcagatgctcaagttgcgctggtagcagcctggagaaaataccccgacctacgggagtcccttgaggaagcggcctcgatcctgtcgcttatcgtgattcaggccgaaacactctctgaccaggccaatgagttggcgaactatattcgccgccaggggctggaggaggctgaaggtgcctgccgaaatatcgacatcatgagggcgaagtgggttgaggtgtgcggcgaggtcaaccagcacgggatccgagtctacggcgacgccatagatcgcgatgttgactga

SEQ ID NO: 326530 - DNA, 414 bp, Pseudomonas aeruginosa
atgagcaacacgatttcagatcgcatcgtcgcccgctcggttatcgatgcagctcgattcatccagtcctgggaagatgcagaccccgacagcctgactgaagaccaggtcctggccgctgctggtttcgccgccaggctccatgaagggctccaggctaccgtcctgcagcgactggtggaccagtccaatcatgaagagtatcgcgagttcaaggcatgggaagaggcgctgctcaacgcagatgggcgggtcgcgagcagcccgtttgccgattggggatggtggtatcgcatcgccaacgtgatgctggccactgcctcgcagaacgtaggtgtcacctggggaagccgcgtccatggtcgtttaatggctatttttcaggacaagttcaatcagtggtatgaggattga

SEQ ID NO: 326531 - DNA, 240 bp, Pseudomonas aeruginosa
atgagccgaccaacagtcgttacagtgacagaagtttccaggaatccgggcagctacgaggtcaacgtagagcgggatggcaaaatggtcgttggccgggcccgcgcgggaagcgatcccggcgcagctgcggcgaaggccatgcagatggccatggagtgggggagcccgaactacgtcattctcggcagcaacaaggttcttgcgttcataccggaacaactgcgggtgaaaatgtga

SEQ ID NO: 326532 - DNA, 204 bp, Pseudomonas aeruginosa
gtgaaacctgacgcctccaaccacaatccagacccgcgctacctgcgcgggctgtacgagcgagccggcctgaagcaggaagaagctgccaggcggatcggaatcaccgcccgcgcgctgaggaattacgtcagcgaaaccgccggcagagaggcgccgtatcccgttcaattcgcgcttgagtgcctggctagcgagagctag

SEQ ID NO: 326533 - DNA, 480 bp, Pseudomonas aeruginosa
atgaacaacaacactcagaagcaacagcaaaagccggctcaaggagcatctagcaaaccaagggggaacgagaaagttttctacattccaggggagaagttcattgttgacctggctttcgaggtcaatcccggagtttacaagtccgcgtatggacgtaagacacttgctgaaatggaacaggaatttcctggcgttgttcttatggatgaacacgaagttgtcgaaaccataaatagactctgccggactgatcctgtcgagataaccgaggagcgtttctttgttctgttagaagttctccccccgcttcgctgggtccgtaatcatgactccgagtctttcaaaatgtcggagttcaccaacggttctatcacgttgaatgtcgtccgcctcgccgatcggtatttctgtttcgaagatgactaccgcctcacccatgaagaggcgtgtgcgaagtgcaaacccttgctcggttga

SEQ ID NO: 326534 - DNA, 1176 bp, Pseudomonas aeruginosa
atgaacgctacgggagcagtcgtcgcccaccagcgcccggcaccggccggcgtgcagctggtggagcgcattctcaccaacgaccagatccgggtgctgcgcgccgcgctgggcgggcgtttgctcgctgtatgcttcggcgccggggtggattcaacggccatgctgatcgcgctgcgcgccgcaggcctgcgcccgcacctggtgacgttcgctgacaccggcggcgagaagccggaaaccctcgagcacgtccacgcgatgaaccacgttctctccacctggggctggccgagcatcgacgtttgccggaaagccacacgcgccgagaccagttactccgatctcttcggcaactgcatggccaacgagacgcttccgtccctggcgttcggaatgaagtcctgctcgatcaagtggaagcaggatccgcaggaccagtttctccgcggcgccaagactggcccgaacgctcgcgcgccgcatccgctctggctccaggcgaaggctaccgggcagcgcatcgtcaagctcatcggctatgactgcggggtggctgaccggcgccgttcgcgtaacctcaagcctggtgacgcccatttcgactatcagtatccattgcaactgatcgggtgggctcgggcagactgcgttcaggtgattgctcagaccctcggccaggtaatggtgccgatcaagagcgcctgtttcttctgcccggcgtcgaaggcgtgggagctgttctggctagcggcgcatcatcccgatctgctggacaaagccctggtgctcgagcgaaatgcactgaccgggcggcacagtcggttcgacgaggtggagtttggggcgtcctgggaggacctggtgcgcaatgctgatcgcttcccaagctcgagcacgtccgtgggcctcggccgaagcttcgcctggaaccagtgggcgcgcgtcaacgacgtcgttgactcccgtttcaaggttcggcgtgccgccgtcgaccaggcgcgctttgcggcgatggcagaccagttgcaggccgaaaacgacaacgcccttgacgtaaggcgggcgcaccgaatacccgccatcacgattgatggcgagcaaggtcacaaggaaattcaacagcttacggacttatgccgtgctggaggggaacatgaagagactcacgcttga

SEQ ID NO: 326535 - DNA, 276 bp, Pseudomonas aeruginosa
atggagttgaagtggacgagcaaagggctctccgacgtggcacggctctacgagttcctggctacggtgaacagggaagctgccgcccgcacggtgcagcagctgacgagcgcgccgaccgccttgttgaccaacccgcggctgggcgagcgcctggaagagttcgaaccgcgggatgttcgccgcatcctgatcggccactatgagatgcgctatgagatcctggattcctgcatctacgtgcttcgtctgtggcacacacgcgaagacaggtag

SEQ ID NO: 326536 - DNA, 276 bp, Pseudomonas aeruginosa
atgagcacagcagccaaaccaacgcgcaccgtgactgctcacgtcccggtagatctggccgagcgcgtcgatgcaatcgccgagcgcctggagcgttcgaagaactggatcgtcaggcaggcgctgtcagcctggatcgaccaggaagacgagcgtagccgtctgacgcgagaggccctggatgatgtagacgcaggacgtgtcgtcgatcaccaggccgtacaggcctgggccgaaagcctgggcactgactctccgctgccggtaccacgctga

SEQ ID NO: 326537 - DNA, 387 bp, Pseudomonas aeruginosa
atgagtgagtccaaccttgttctcagctgtcggcacctgtcgattctgctgcgctacgtctacccgaaagaccggctgacttgtgacctcgaggtcaagcagatcgagcaggatggccagtgcctgcgcgaggaaaacatccgctccgtccggttcagctaccgggggctcgactacgacgaaggccatttcatccccttcaccttcgacgaccaggccgagttggtttccgccgtggagttgctgaagttggccaacacgtaccatcggaactcgtgcgatgccccgggctactaccagtcgccggcgtatgagttgctgtcgcggatccgcgatgccgccatcgaggacctgcccgggttcaaagaagcccctgtgcaggcgtaa

SEQ ID NO: 326538 - DNA, 294 bp, Pseudomonas aeruginosa
atgagagcacagcaacgattgagccaggcattccagaattgcctggacagccttctggaccgatcgcgcgcgtatacgcttgctgttcggcgcatcgacagcctggtttctgcagggcttggccaagaggcgatggtgaacgcggtcagatcggagattcttatgttgcagatgcagcttgccgagatcgaggaggccttccgccagaagggggcagagatcgcagctcggcagttgctggtagagcacctgcccatcacgattgaacccgaggatcatgatgagctgggctga

SEQ ID NO: 326539 - DNA, 240 bp, Pseudomonas aeruginosa
atgagctgggctgatcgagcggcgccggtagtcagcgaggtcattcgccgcgtggggcgctcagacctgaaggtgctgcgccaggagcttcgaaaggcctaccctttcgggaggcgagcgaactcaccctacaaggcttggctggccgagattcgccgacagctgggccaccctttgaattcacccaggcgggatcccgatgatccgcagaaggagttgttcgactatgacaggccttga

SEQ ID NO: 326540 - DNA, 309 bp, Pseudomonas aeruginosa
atgccggaacgttacaccctggagcactgggagcagtgcctgccggcgatgaaacgcctacaccctgacaccctggcgatcgcccgggccgtcttcgtcgatggcgtgaagccgatcgaggttgcgcgccatactggacgcagcgcgcagaacgtcaactcagcgctgaagcgcgtagaaccgtacctgcagaaaggcgccgcaggcctggttttcgtcggcgtctggttaccgccggatctggccgaacaagttcggcagatggcagcacagtatgagcccaacgatggaggttcttcccatgattag

SEQ ID NO: 326541 - DNA, 333 bp, Pseudomonas aeruginosa
atgattagcccgtctcccacaccctttctcgccggcggagcgttgttgctggctggcatcgttatgggcgtgctcggcaccacagcggccgtaagaggtgagtggtttgcgctgagtcaatcgagcggcgagagcccgtcccttccggctccggaatggccttacgaagagaaccaggcggtggagtcgatcctctgcattggcggccgcgcatacaaggtgcgcttcggcatcgaggaacccatgtacagactggaggagcttccgcgtactcaaagcatcaggcagtaccagttcaaaccaatcccctgcacagctcttcatgagtcgtga

SEQ ID NO: 326542 - DNA, 213 bp, Pseudomonas aeruginosa
atgaacgtaggtttctacagcgatcgtggccagctcctggacgagtccagaatctcatgcagccgcgccgagtatcacctcgaggacctggcccgtgaggcacaggatctcgcgaatgagtgcggttgctcagtagtagcgtttatccgcaacgagcacggcgagccgaccaaccgcctcggtattgaggccaacccgcaacccggccagtaa

SEQ ID NO: 326543 - DNA, 453 bp, Pseudomonas aeruginosa
atgcaatgtctttccgaagaagatcggagcgttctgtcccaggccctggcgattcttgatcgccggattccaggtacttcctacctgaccaaccccgaggacgttcgcgactatatccgcttatcgctgggccctgagttcaacgagcatttcgccatgctctttctcgactcagcccaccggatactttgtttcaagcgcctgtttcaggggactatcgactcagcagcggtctatccccgcgtcattgtccagcaagcgctcgcctgtaatgctgcatcggctatcgccgtgcacaatcatccctccggaatcgtcgagccgtcacaggcagacagaattctgacatccaagatcaaagacgctctgtccttaatcgacgtccgcctactcgaccacttcgtggtcggttcctcgaaaatcttttcgttcgccgaaaatgggctgctttag

SEQ ID NO: 326544 - DNA, 330 bp, Pseudomonas aeruginosa
atggaaaccagagccccctacctggtacagcgatcggagccccttgttcgagaggtctgcttgcgtaccttcgaaagtggctggatcccgcccagcgctgcagaagtgcttgccgtcatgcggctggctgacctcgaaccgcgggacgctgccgttgttctcggcggattgtcgcggcgcgaggttaaccgctggactaccggccaggacgaaatcccctacgcctgctgggtgctgttatgccagcgggcgaagctagcttacagggagcagcctgacgcacagagtacgaacgtccccggtagccagggtggctcccatgaggaatga

SEQ ID NO: 326545 - DNA, 249 bp, Pseudomonas aeruginosa
atggctacagaaaccgaactcgacgttgacgaaccccgcgaactgcccgcattcaacctcgaggagcacgaactgatgcactcggtgcaggccgagcacctggtgctcgacgtcttctacttgggggacaacttcggctgggaactcgtcgacgccgctggccgccgccaccacgccgcagctggcttcgaatcagatgcgcacgccttgcttgcgggcctcacggtcgcgctgaagccaaacgactga

SEQ ID NO: 326546 - DNA, 252 bp, Pseudomonas aeruginosa
atggccacccagaagttgccgccatttgctcccgtaacgctcgccgagttgcgccggatctggcaagaacatccggcggaggatgttcgccggttgacccttgaggtagcgaggtatcgccaggtgatagccgaaatcgacgggcactatcgccacatccatcaatcgtggcgcgacacggtgggcggagaactcttcgcgctgcacctgctcaagcaactgatgtacaccgaacgacagcgcctgggctag

SEQ ID NO: 326547 - DNA, 282 bp, Pseudomonas aeruginosa
atgaacaatgcgacagcgcgcataccccgtctagagcagaccatcatcgacaacgcccgccaggaactggacgccatcctttccttccatcgcaggaaggccgaaggcatcgacggcgaacagctggagcaggcctgccgggactacctggcgcgctaccatgcgctctgcgcgcttctggtgttcggccacctccccgactgcggtatgagcgagcctggtgcccgcgagctgcgcgctatcgaggcggaactccacgccgtgaagaccgcggccaactga

SEQ ID NO: 326548 - DNA, 1974 bp, Pseudomonas aeruginosa
atgaacaacaacactcagaagcaacagcaaaagccggctcaaggagcatctagcaaagcaagggggaaggccaagagcgctgccgcgtcgaaactgccgggcggggtgtggaaagagattccgctcaagaagctccgtctgtgggcgaagaacgtgcgggtatctgccgccagtgccgaggccggggatgccctggaagcgagcctgcaatcccaggggctgttgcagaacctcgtcgtcatcgaggccgaggatggtttctacgacgttgccgccggcggtcgccgcttggcgaagctgcatgccctggtcgagaagaagaagctcagcgccgacaccctcatcatgtgccagatcgtggacgagagcaccgggcttactgcgagcctgtccgagaacgtccagcgcgaagccatgcacccggccgacgagttcatcgcgttccaggaactgtccaacgccggcattcctgttgctgatatcgccgcaagcttcggcgtcaccccggtggtggtgaagcaacgcctcaagctggccaacctctccccaaggctgatccaggcctaccgcgatggagaggcgaacatggagcagttgcaggccctggccatctgcgacaaccacgaaattcaggaagcggcattcttcgacgtacagtcgtggatgcgtcaaccctacgaactgcgccgggcggtgaccaagggagaaaccctggtgcgccatgaacccctggcgagattcgtcggactggaagcctatgagcaagccggcggcgcagtacgccgcgacctgttcggcaacgcggaggactcctacatcacggacctgccgctcctcgacaagctcgctatcgagaagctggagcctatcgccgagccgatccgggcggagggctgggggtgggttgaagtcatgccccgcttcaacgcctcagaactgtacaacttcggacggattcaccctctgcccgtcgagttgaccccggaacaacaggccgagcgtgccagtctcaaggccgctctcgatcagttggaaaccgagatcgaaaacgccgtcgaggccgaggatttcgacaccatcgagcgcctggagcaggagcaaggggaagctgaagatcgtctccacgccctggagagcggagcggtaaggtcctacgacccggaggcgatgaccaaggcgggatgcatcatcagtgttgggcgctccggagacgtggacgtctggcgtgccctggtcaagcccgaagacagggctgccgtcgaaggggccgagaaccaggggacggacggccagagcaccgacgacgcaccgaaggaaaaaacggcgcgcctgtcggaccgcatgggccgccagttgaccgctcacaagaccgcagccctgcaagtcgaactggcccgaaattcaaaagtggccctggttgcagtggtccacaagctggccatccagatcatccacagcgaccactccccgcgcttcgccgtaccggtcggcgtcagcgtctcacagcgcggcggcctgaccgaatacgcttccgacctcaaggactcggtcgtcctccaggcactcgaagacatgcgtgggcagtggcgggagcgactgccgagcgaaccccgcgaactgttcgccgccctcctcgatctgtcgatggctgacctcaacgacctgctcgccttctgcgttgccaccggcgtcgacgtcgtgagcgacaagggcaccgatggccagagcggtgcggacgtcctggcccaaaccctcgaactggatatgcgcaactggtggaagccgaccgccgacgcctatttccgtgaggtgcccaaggggttgaccctggaagccatgcagaccatcgcaccggcagaagtggcccgcctctccaccctcaagaagaacgacctggccaacgaggccggacgcctggccgaagggtcgaactggctgccggcgatcctcgctagccacgagccgaaggcgtaa

SEQ ID NO: 326549 - DNA, 258 bp, Pseudomonas aeruginosa
atggtcaaatacaccgtgcccggggcgcctatccccaccaaaattcgcgagttatggaaggagtaccagggccagggatacggcgtctgcatcgacttcccaccctccaaggctgtccagcgctggagtgctgagcgcaaagccgaggctcgccggcggaagatggtgaagcggatcgagaagaccgccccactcttcgcccaggaactgatcgcccgcgagttccaggagcgaggcgcctacttcaacggcgagtag

SEQ ID NO: 326550 - DNA, 357 bp, Pseudomonas aeruginosa
atgctttttcaactcaaaccgctactccaggacgtggagaaggagatgctgaactacatcaagcagcaggctcctggtacctatctactcttccacgtttgtagactcttggttaagtggggcacgatcttggctttctgcctgatttttacctactttcttaccgctatggcgctgcaattcttagatatcgagcagggcgtggttaacggagcgttgcatcagttggtccaggcccttgcacccgggatcatcggaggaattcttattgctgtccccgcttatattggataccaggtgcaacgagacaagctgttacccctggtacgagacgcagcgcgcagtgtcagtcactga

SEQ ID NO: 326551 - DNA, 201 bp, Pseudomonas aeruginosa
atgcaagaagtcaaccgcgaagatctgcaggatctccgctacgaactgaacgatctggccgagcggtacatccgcacattcggcaacagcaaggaagggatggaagggctcgccgaggacctggtgcggatcgtagcagacgaaaagtatccaggcggctgggcagggctggtgagcttcatcatgaaagccagcggctga

SEQ ID NO: 326552 - DNA, 621 bp, Pseudomonas aeruginosa
atgttcgttcgagcatatctgcgtgcttcgaccgcagaacaggatgcaacccgggcgagggcagaactggattctttcgccctcgagcacggtaaggtcatcgctgcggagtatgtcgacaacgtgagcggcgccaaggccgatcgaccggcgctgaagaggttgctcaaggacgcgagggagggagacgtgctgctggtggagagcatcgatcgcctgactcggttgccagaaggggagtggaagactctgcgcggggcaatcgactccatcgggctccgaatcgtcgccctggacctgcccaccagccaccttggaatgaagccaacccaaggggaccagttcaccagccgcatgcttgctgcgatcaacgaactgatggtcgagatgatggcggctattgcccgtaaggattacgaacagcgacgaactcgccaggcacaggggatccgtaaagccaaggaggcgggagcctaccgaggccgcggcgttgaccagcagttgcacaacagggttcgcgaactcctatctgctgggctaggtattcgagccaccgctcgactggcacagtgctcgccgacaacggtcatcaagattcgtaaccaggcaacgacggaatga

SEQ ID NO: 326553 - DNA, 237 bp, Pseudomonas aeruginosa
gtggatccgtccggcgcggccggcgagcagctggtggatcccgtcgacctcgatcacgtccagggggaaggccatcggcgccggcggcgccgaggacctggtgcggtggatccgtccggcctggccggcgagcagctggtggatcccgtcgacctcgatcacgtccaggggatggccatcggcgccggcggcgccgagcacctggtgccgtggacccgccagacgggaggggaataa

SEQ ID NO: 326554 - DNA, 282 bp, Pseudomonas aeruginosa
atgagtcagcaccttttctcttcggaagttgggaataagaaatttgaagttattatgggttgggataatccaactaagagtttcttcctcattatcttcgataagaaatctgatgaagactatccggtctacaccaacctggatgaagtgatgccccgagacctggactactacgttggaaaatgtcgtgatctgggaatcgacgtgaagccagagatcattgcggaaatacgggatgaccaacggttgaacgtcagcaataaagtgaaggagtggaactga

SEQ ID NO: 326555 - DNA, 1818 bp, Pseudomonas aeruginosa
atgggcaatcttctgatcgtagagtcaccggcaaaggcgaagaccttcgagggctatcttgggccgggctgggaggtcaaggcctctttcggccatattcgggatctcccggaacatgaaatgggggtcgcaggtcctgaataccgccctgactatgtattcataggggagggcaagaaagtatccgaagtcctgaagaacgcagccaggcgagcgctaagctcaggcggagcggtctacctgggatccgacgacgatagggaaggggaggcgatcgcctggcacctccagcaagtcctcggcctgcaggatccaaagcgcatcaccttcggggagatctcgaagaaggagattcttcgcgcggtcgcagaacctcgaaagatcaatgtgagattggtcgccgctcaagaggcccgcaggatcctcgacaggatcgttggctactacatcagcccgatcgtccaggaactgatggcaacgtacgactactcggccggtcgagtgcagagcgtcgcggtgttactcgttgtggaacgcgaaaatctcatccgcgcccacactgcggttacgcatcactcggcacgcttcgccttccagggcggttggtccgctgactgggcacctgatgagaaatgcaccgacctggccactgcggagcgtattgcgaacgctcggcagtttacagtcctcgagcactccgttggtgagtccaggtcctcgccgttcaaaccgttcatcacatctacgcttcaacaggccgctagtaacgcgctcaatcttcggtcgaaggcctgtatggaggcggcgcagaagttgtacgaggcggggcacatcacttatatgcgtaccgacaacccgaacctcaccgacgatatgctggtggccgttcgggattattgtgccgctcagaatctcccgctgtctgacgaacccaggacctggaaggcgaaagccgacgctcaggaggcacacaaggggatccatcccaccgacattacacggctcgaggcaggagaagacgaagcccagcgcaagctgtatcaactgatctggaagcggacggtcgcctgtcagatggcggatgcagtgttcaaggtcaccaaggtcaagttaaagcccgagggattggatgggacagtggctgtcactggtgagcatagcgagctggtcagccccggttacaagacaatcctggccgaggatgacgccgaggacaaaccagacgaagtatcgtacacgacaggggcgattccgccgctggagacaggcgcatccctaaccgcgacttccggtgaggtcgtcacgacaaagacgaaagcagcacgccgcttcaccgaggcctcgttggtgaaggaactggagagccgcgggatcggaaggccttcgtcgtttgccgcaattatggaaaacatttccaagacccggcgctatgtccaattgaagaaggggacgaagttcttggagcctactgaccgtggcgagaaactggtccaggtgcttctgaaccggttcagctttatggacgtggatttcaccagggaacttgaacgcaagttggacgaaatagcaaagggtactgcgaattatcgatcagttatagcgggcttcgatcaacagttgcaggacgaaattgcgaagctgctccgcgagatagaaccacttcacccttgtccaaaatgtggacgcggacttctgctgatcgagaagaaggagaagggtaaggaagccagcgcgttctttggatgccgaggcttcttcgataagaagtgtgacggaatatatccggcaaaggacggagcaccagtaatacagcagtga

SEQ ID NO: 326556 - DNA, 609 bp, Pseudomonas aeruginosa
atggaaaagaagaacgctcctggtaacaagaaagctgccaacaccgtcattacggttcacgacaagttcgtggttgggatatgggaaacctcctcgcgcaggatctccgggcgggtggttgtcgatagcctgttctccgtcgaatcgttcagcacgacgaagaagcctgagcatttggtcgccaaaacactggccaaaaaggtcattccaggcctgcgggaaatcatcgaaagctacgaggccaagttgaccgaaaccctgaaaactatcagggatgaggtcgacgaacgcatggccgatcctctgctcaagagcatcgagttcggcgcgcctcaagagcagacctatgagttggtggtagacggtcgccactcctggcccctggtcaatcgcttcgtccgatcgattgtcctcgtcgatgagatttctcaggcgcttcgccagatgtacctgtccggcttcatcgactacggcgagtacaagaagcgtgagaagaaggcggccaagccgatatggcaatgcatgacccgactcgatgaagtgatcaagcactaccaccagcaacgtaagcagatcgcggcgatcactaccgcggcgaaagtcgggtga

SEQ ID NO: 326557 - DNA, 1023 bp, Pseudomonas aeruginosa
atgagtgatgccatcgccgaactgttgaacagcaaatcgtcggacaacgaaccacgtgaacggatcgtgctgatccaccgctccgacctctacccggacccgatgcaagaccgtgatgactgggaggccgaaagaactctcgcccacatcgccggcatccgcaggagtgcgctgatccccctcgaggagggccgccactacggaatccgaaaagctctttgggtggaaccagcagacgaaacagggaagcacaagatcatcgagggagaatgccgctggagggcgaccgaagacgctccggatgatgtgcagctgctgccgtgcatcatcagtaaaggtggcgttcgcgaacggcgaatggaccatgtgacgggcaacgtcctcggccaggggctgaccgtttggcaaaccgcatgctcgatcaagcgggacaaggaggaattcggattcaccactgaggaaatccttgcggtacacggcatcaaggacaagtcgcgcctgagccgctacatgaaggttttcaagctgagccccgaggcacaggagtttgcgaagctagatgaattccgggacgtcaacatcatctacgacctggaaaagctcgacaagatggggccggataccctgaagaaactgagcaagcgcctggagaaaggggaaagcatccagacggccatcaaggcgctgctgccgcgtgaaaaaaagaaatcggagccgccggcgccgggggcagggcaggggtcagtttcagattctgaaaccggcaccacccagcagccctccagcgaggatggagcggcaaccacgggtagcgcttcaacgagtgacagcgccaatacggctgccacctcttcgggcccagtggtttcagattctgaaaccaacggcagcgcctctctcatgttgaccccgaagagagcccaagccctggccgtactgctgaacatcgaaccgggtcagggtgatctgagcgcgctgatcgaggcgcttgctcaagccctggatgaacttgcggaaaagtga

SEQ ID NO: 326558 - DNA, 810 bp, Pseudomonas aeruginosa
atgccaactatctactccgtaatgacgcccaaaggcggcgtcggcaagaccaccagtctgaccgggctggcctgctacatcgcaggccagctccagaagaaggttcttctggtcgacctggacaacattgccagcctgaccaacaacttccagggggcagatgttcggtactcgcagtacagcaatgttacggatctgttcgttgaccccgacgaacagcgcaagatcgtggtgagccctatctcggatcgaatccacctgatccaggggcactcggatatgtcagcggtaaaccgctctgccagcctcatggttctgaaccagctggaggagaacctcaaacagaacgttcccgacttcgagtcctatgactacgtgttgatcgacacaccagccggcaacggaaacatcgtgctggccgcgctgatcgcttcgcaccgggtctactctccgatcgacctcgacaacaacgcgatcacctcccttcatgagctggcgaagattctgaaggtcattcgcaaccgcatgaacccggacctgtcctgggaaggattcctcatcaaccgagtaccgaagctggtgagctatctcgggaagaaggtgcccgaagcaacgacagaacgggttatctacaacgagctggtcgagaagtaccaggaacgagcgctgctcggggtaatcgcgtaccgcaatccgatcaagaaggctttcagccagggcaagtggattgagccggacaatgactcggctcgagacgccctggccgaagtcgaagccttctgcaagaaactgttggagtccaagcaatga

SEQ ID NO: 326559 - DNA, 2109 bp, Pseudomonas aeruginosa
atggaatttttgagaatcgtgatggagcagacggacccttgggcgccgatgctcgtctccctttttttaggccttatgctggcactgtcagtaggtggagctatccaccacgacactgatgcaagcggcctgacgattgttgcgacttgggtaaggcgcgccgcaatcatcgtgtttatgaccgccctgcccgtttttgcccttactttgtttgtcgtagccgtctatcagttcggctatgacggtggccaggaatattggcttatctggtttgacatactgctcaacagcctgcgagatctgtggtggatagctgttcctttcttcgccctacccttcttcgtcaagatgctgatcctcagggtggtgcgccccaggatttccgccgcctggcgaaactggggagtgatgcagtcaggggacgcgctgagtgacattcgcacggtaaccgccagtctgaaggcaaaggattttttgcccagcgaccattacaaggacgacgagtttttcttcgcgctagacgagaacaacgctccgctctacacgccgctttcggtgtatgtgaaaactcacgtcaaggcgctcggcccttctcaaaccggtaaaggcgtgttcctcggcgtcgagctagaccaagcaatttggcggggctggggggcatggttcattgaccagaaacccgatgacaatatcgttcatatcatgagcgagtcttgcgtccgaaacggcagggctccgatagtggtgtgtgacctcacaggggggcgcgaaacgggctaccaccccttcaagaacggcacccttcgcgagcgccgcgagcgcatcaccaaggtactgggactgaacgacaccggcaccgatgcggatcactataagaagaatgcccgccgcgtcttggatatgctcatgccccattgggacggcagtctttctcatttggcagaactcatccagtatcccccaaactcgctcagtgagtcggaaaagaacctcgtattcacgtatgcggggaacatcgaatcgccacttatggaaatgcgctttatcgacgccctagaacccgaaggcgaggggttaaatattgaaaaggaacttctcgccggcagtgtcgtttatataaaatccgacctgcaagatactgttgttcgcaaggcggcgaactgcatgcttgaagaaattattcaaactgttcgacgcgtccaacttccaaacttcgttaaactaactattgacgaagcacgatttatgatgacagacactttagccaactcgttggccactgttctgtcgaagaaacttttgatgacattagcctatcagtcaatcgaagacccgcttaacttgaccgacaaaacattaaatgccgagtcaattaagaacggtatcgagacaaatacgcaaattacaatcggtcatcgcgcggcggaatataaaacggctgagtggttgtcggataataccggcgttacgcagaaaagcgtgactaagatggaacgcgttgagcgaaatgaaggcggtgctgaagagtggacaggcgagcgcagtattggccagcaagaggaaaacttcatttccactaacgtcatccttgccctcccccctcgggttgccgtgcttattcgccctaacgtactgagcacggtcatgtacagctgctgggtgccctacaagcatgcgtacccactcagccattacgttgctctacagcagagccagaaggacccccagggttccccggctgccgtcccctcctctactgttccagccgttccagcaccgatagagccgagccctgaggacatgatcggcgatgacccattcgcagagcttgaccagcaaccggatgacacgattccgtttgaccaggaggaagaccccttcgcaggcgtcgacgatatcccagtcgctgcagaacaactccagcaagcagatgacggtccggccgggctcaccccggagcaacaagccatgatcgacgcggctgcaaacaatttgttcgcttcttctggcgagaagaagaacaagatgatgaagcaagagaagaaatcacctagcggccagggccaagacgtggacctgtcctctctcgacaacgtagacggaatctga

SEQ ID NO: 326560 - DNA, 1350 bp, Pseudomonas aeruginosa
atgaaaaagcccaaagcaaagagccaggagcgccccgaccaggtggtcggggtgacgccagcgtctgctggcatcatggctccgaaacgcatgcgtttctttgccgaagagcgcgccgctgcatgcagcgtcgtgcctgccctttacgggacaggcatacacccccggaggagcgctccgggggtgtgcaggactccacgacgcatgcgtcgttccgccctctttttctgcctgcgccctggacgggcttgtccgaaaaattcacccgcgcgcccgtccactctcttcgagagcggaccccccagcttcctggggttgcgcaacgcttcgccgcggtccttcgtcccttgctcagctgctccaccccggaacccggggggtccgctctcgccgacttcagccctggcgggcttcagtagtcgagcgcagacgggcgcgcgctgcacgtcgcctgatgcttcgcactccaggtcccggcctggacggccgtccctggagcagaccggcattcggccctggggggcctcggtgccttgcgagccgcgtgggcgcgtctcgcatctgtcaggcttctgtttgtttcggcccacctcgctgacgcgaactgggccgcgcgctgccggaacagcttttggctgttccggagagcggggcgcctgccgacctccgctcgacggctccgccatcgctgtgcatcgcattgccctcgccgacccattcgggcggctgggctcgctcgcttgctcggcgaagcgtcgtcacctgggccgagttgctgggcgccccccgaaacagcttctggctgtttcggaaaagccggaacagcttttggctgttccgaagagcaggggagcttgccgacctccgctcgacgactccgccatcgccgcgcatcgcattgccctcgccgacccgttcgggcggctgggctcgctcgcttgctcggcgaagcgtcgtcacctgggccgagttgccgggctccccccgaaacagcttctggctgtttcggaaaagctgggcgccgactttgcctcgctcgacggcttcgccctgcgcttcacttcgcatcgtctgcgccggcctttacaggcggctgactcgctcgctcgcttggtcaagcgtcgttccctacactgcgtgccggggcgcccaatcgaaacagcttgtggctgtttcgaaagagccggagagcttcgccgccctgtgcagctatcggcgacaaaagctcgtcgtaatcaaacacctgtacccgactgccctgcggaaacagctcgcggctgtttccgagggccggaacagcttcaggctgttcggagtcgggagatgagtaaggagcgagagattgactga

SEQ ID NO: 326561 - DNA, 744 bp, Pseudomonas aeruginosa
atggacggttggaccgggtcccgaggtaaggagcggagccgggaaaaaatcaaagaggtcgtgcggtggctcgccctctttgacttctccaaccaatcgctgttggccaaggcctacggcgctgaggtcagaggtcagactgtgttcttcagacgccttgaggagtctcgcctagtcgttgttacgaaggcgccgggtctcgactggaaaatctactcgctgagccagagcgggatggagatggcaagggtgctgctgccgcacctggatctcaagcgacggcgaacgccgtcgtggatccagctggtccatgcattctccatccagggggcgatcatggcgcgacgggatgagatcagcggcttcatgccagaaaaagagctttccaagatgaaggccaaccatttgccggatgctgttctcgaatacaagaatgggaagaaggtcgctttggaagtggagttgaaccataaaagcgttggtcggatttacaatatcttcctgtcgcacctcaagaacatccataaaggtcactacgatcaggttctctatctgttttcaagcgagcagctcaagaacaactacgaagagaagtacaaggtaaatatctggccgatgtacattattagcgagcgaggaaagcttgttctcagccctgaacaccgtggtggtttcgatgctgccaagatggttcatcccaccgataagttcaggttcatctgcgaggagctgtattcattatga

SEQ ID NO: 326562 - DNA, 1038 bp, Pseudomonas aeruginosa
atgagcctaactgaaactgtatttggtccggttcccagcgatccgaagtctttacgttcgtgggagtcggtaatcctctatgcgaaaccgttccttaagtattactccgatcctgaagttacagagatcatgatcaatggctgggactcgatcttcatcgagaagaacagccgaatgattcgagtcgaggagaaattcgctagcgagtctgacctccagcggttcatcacccaatgcgctaacgcgctcaacctggtggatcctcacaaggaccccgagacgaacgcgcggttgcccgatgcatcccgcatctgtgcaaccatgccggccatcactccatttggcgcgacggtgactcttcggaaggctccaactcgtttgctcaccctggaggacctggtttcctacggggccatgagtgcggagatggccgatttcattggcgagcaggtttcgaagagggtcaacttcctgtgcagcggaaacacgggctcaggaaagacgaccctgcttcgggctgtctccaagtttctcgacccctccactcggatcattaccgcggaagacacgatggaactgcacctccgcacgacccttcccaactgcatttcgatggaggcctcgaaacagtctgatggggtcccgaaggagctttccgatctgatccgtatctcgctccggcagcgtcctgacagcctctgggtaggggagctacgtgatgccaaggcagtcaatgcgtgggtcactgcgatgaacaccggcctggacggttgcgcgtcaacgatccactccaacggcccggccgactccatccaccgctgccagtacctgatggcttcggcgggcgtgatggattacgacctggtcggcaagattctcatgggggacctgcacatgctgatccatgccagccgtaaccaccggctgtatgggcgaaagatcacgcacgtctgccttattcagaacggcaagatcgtcccagtcttcgagtacaacatcgagaagggagaacacatttacctcaagccgagctgctga

SEQ ID NO: 326563 - DNA, 534 bp, Pseudomonas aeruginosa
atgagccgcttccagcgcctcaccaagtacgtcgccatcgcaggcggtgcggccttgttgctcgccggcgcggcctacctcgccggcgcgaaggtcaacaccaccaagagcattccggtcggcctgtactggaaatcgaatgcgccggtggagaagggggcttacgtcatgttctgcccgccgcaagtcggcgtgttttcggacgccaaggagcggggctacatcgccggcggtttctgccccggcgactacggctacatgatgaagcgggttttagccgctaaaggcgacgaggttgccatcaccgacgccggcgtgcgcgtgaatggcgagctgctgcctcacagcgcgctcatcaaggccgacccatcaggacggccgctgcctcgctatcagtccgacagctacaccctggggaccgccgaggttctgcttatgtccgacgtaagcgacacgtctttcgacggccgctacttcgggcctgtcaatcgttcgcaaatcatcaccgtcatcaggccggttctgacctggtga

SEQ ID NO: 326564 - DNA, 1908 bp, Pseudomonas aeruginosa
atgaagaaccgaaacaacgccgtggggccacagatacgggcgaaaaaaccgaaggccagcaagaccgttcccgtcctcgccggcctgtcccttggggcaggcttgcagacggccacgcaatatttcgcccattccttccagtaccaggccggccttggctggaatatcaaccacgtctacacgccctggtcgatccttcaatgggccggcaagtggtacggccagtatcccgacgatttcatgcgcgcggccagcatgggcatggtcgtttcgaccgtgggcctgctgggcacagccgtcacgcagatggtcaaggcgaacaccggcaaggcgaacgactatctgcacggttcggcccgttgggccgacaagaaggacatacaggccgccggcctgctgccccggccgcgcaccgtcgtcgagctggtgtcaggcaaacacccgcccacttccagcggcgtctatgtgggcggctggcaggacaaggacggcaagttccactacctgcggcacaacggccccgagcacgtcttgacctacgcgccgacgcgctccggcaagggcgttggtctggtcgttccgacgctgctttcctgggcgcacagcgccgtcatcactgacctgaaaggcgagttgtgggcgctgaccgccggctggcggaagaagcatgcccgcaacaaggtcgtgcgctttgagccggcatccgcgcagggtagcgcgtgctggaacccgctcgatgaaatccgcctggggaccgagtacgaggttggcgacgtgcagaacctcgccaccctgatcgtcgatccggacggcaagggcctggaatcgcactggcagaaaaccagccaggcgctgcttgtcggtgtcatcctgcacgcgctctacaaggccaagaacgagggcacgccggccacgctgccgtccgtggacgccatgcttgccgacccgaaccgcgacgtgggcgagctttggatggaaatgaccacctacggccacgttgacggacagaaccaccctgcggtcggctctgcggcccgcgacatgatggaccgcccggaggaagaagccggttccgtgctgtccaccgccaagtcctacctggccctgtaccgcgacccggttgtggcccgcaacgtcagcaagtccgacttccgcatcaagcaactgatgcaccacgacgacccggtaagcctgttcatcgtgacgcagcccaacgacaaggcccgtctgcggcccctggtgcgcgtcatggtcaacatgatcgtccggctgctggccgacaagatggacttcgagaacggccgtcctgtcgcgcactacaagcatcgtctactgatgatgctcgacgagttccccagcctgggcaagctcgaaatcctgcaagagtcccttgccttcgtcgccggctacggcatcaagtgctacctcatctgtcaggacattaaccagctcaagagccgcgaaaccggctacggccacgacgaaagcatcacgtcgaactgccacgtgcagaacgcctacccgccgaaccgcgtggagacggccgagcacctgtcaaaactgacaggcaccacgaccatcgtgaaggagcagatcacgacgagcggccgccgcacgtcggccttgctgggcaatgtctcgcggaccttccaggaagtgcagcgcccattgctgacgcccgatgaatgcctgcgcatgccgggaccgaagaagagcgccgacggcagcattgaagaggcgggcgacatggttgtgtacgtcgccggctatcccgcgatctacggcaagcagccgctctacttcaaagacccaatattccaggcccgcgcggccgtaccggctccaaaggtcagcgacaagctgatccagacagccaccgtcgaggaaggggaggggatcacgatatga

SEQ ID NO: 326565 - DNA, 2199 bp, Pseudomonas aeruginosa
gtgatcgccaagcacgtccccatgcgctccatcaagaagagcgacttcgcggagctggtgaagtacatcaccgacgagcaaggcaagaccgagcgccttggtcacgtgcgcgtcacgaactgcgaggcaaacaccctgcccgccgtcatggccgaggtcatggcgacccagcacggcaacacccgttccgaggccgacaagacctatcacctgctggtcagcttccgcgcgggagagaagcccgacgcggagactttgcgcgcgattgaggaccgcatctgcgccgggcttggcttcgccgagcatcagcgcgtcagtgccgtgcatcacgacaccgacaacctgcacatccacatcgccatcaacaagattcacccgacccgaaacaccatccatgagccgtaccgggcctatcgcgccctcgccgacctttgcgcgacgctcgaacgcgactacggccttgagcgcgacaaccacgaaacgcggcagcgcgtttccgagaaccgcgcgaacgacatggagcggcacgccggcgtggaaagcctggccggctggatcaaacgcgaatgcctgccggagctgcaagcggcgcagtcctgggatgacctgcaccgggttctgcgggaaaacgggcttgagctgcgcgagcgcggaaacggcttcatcttcgaggccggcgacggcacgaccgtcaaggccagcaccgtttcgcgcgacctgtccaagccgaagctcgaagcccggttcggggcattcacaccggccgaggacggcgaagccccccgacgccgggagtatcgagcgaagccgatcaagacccggatcgacaccaccgagctatacgcccggtatcagtctgaacgccaggaaatgggggcgctgcgcaaaggcgagctggacacgctgcgcctgcgtcgtgaccgcctgattgaagccgcgatgcgcagcaaccggctgcgccgcgctgctatcaagctgctgggcgaggggcgcgttgcaaagcggctgatgtacgcgcaggcgcacaaggccctgcgcgccgacctggacaagatcaaccgcgagtaccggcgggaccgtcaggcggtccaggagcgcacgcagcgccgcgcgtgggccgactggctcaaggccgaggcgatgaagggcgacgacaaggccctggccgcgctgcgcgcacgcgagggccgcagcggcctcaagggcaacaccatccagggcagcggcgaggccaagccgggccatgcggccgtgacggacaacatcacgaagaagggaaccatcatctatcgcgtcggcagtagcgccgtccgcgacgacggcgaccgcctgcaagtctcgcgcgaggccaccacggacggcctggacgccgccctgcgcctggcaatggagcgcttcggcgaccggatcaccgtcaacggcacagcagagttcaaggagcggatcgcgcaggcggccgccgctggccgtctggcaatcacctttgacgacgccgcccttgagcgccgccgtcaagaactactgacgaaggagcaagcacatgagcaacccgaacgaaatgacggacgaagagatcgcggcggcgatggaggcattcgacctaccgcagccggaaccaccctcaacgccacaggcggcgacggcgaccgacggggcgctcgcgccgtcagcgccggcggaaccgtcgtactccgcaagcccaacgttggacgcattggacgaaagccgccgccccaaagccaaaaccgtttgcgagcgctgtcccaactcggtgtggttcgcatcgccggcggagctgaaatgctattgccgcgtgatgttcctggtcacgtggagcagcaaggagccgaaccagctcacgcactgcgacggggagtttctgggccaggacgagggctaaagcccgaacagcttgcggcggccgagaaatatgttgccgagcgcgagcaaaagcggctaaacggcttcgatataccgaagcatgcacgatatactgattatgttggtgcgctgtcctatgcaggcacccggaacgtcgaggaccaggcgctggccctgttgaagaaagagaacgacgagattctggtgctgcccgtcgataaggccacggcgcaacgcatgaagcgcctcgccatcggtgatcccgtcaccgtgaccccgcgaggctcccttaaaactacccgaggtaggagtagatga

SEQ ID NO: 326566 - DNA, 372 bp, Pseudomonas aeruginosa
atggctgatgaaaccaagccaaccaggaagggcagcccacctatcaaggtgtactgccttccagacgaacgaagagcgattgaggaaaaggcggccgccgccggcatgagcctgtcggcctacctgctggccgtcggccagggctacaaaatcacgggcgtcgtggactatgagcacgtccgcgagctggcccgcatcaacggcgacctgggccgcctgggcggcctgctgaaactctggctcaccgacgacccgcgcacggcgcggttcggtgatgccacgatcctcgccctactggcgaaaatcgaagagaagcaggacgaacttggcaaggtcatgatgggcgtggtccgcccgagggccgagccatga

SEQ ID NO: 326567 - DNA, 405 bp, Pseudomonas aeruginosa
atgccaaagagctacaccgacgagctggccgagtgggttgactcccgcgcggccaagaagcgccggcgtgatgaggctgcggttgcgttcctggcggtgaaggcggatgtcgaggcggctttggcggccggctatgcgctcgtcaccatttgggagcacatgcgggaaacggggaaggtcaagttctcctacgagacgttccgctcgcacgccaggcggcacatcaaggcaaaggccgccgatgtgcccgcaccgcaggccaaggctgcggaacccgcgccggcacccaaaacgccggagccacggcggccgaagcaggggggcaaggctgaaaagccggcccccgctgcggccccgaccggcttcaccttcaacccaacaccggacaaaaaggatctactgtaa

SEQ ID NO: 326568 - DNA, 726 bp, Pseudomonas aeruginosa
atggcgaaaattcacatggttttgcagggcaagggcggggtcggcaagtcggccatcgctgcgatcattgcgcagtacaagatggacaaggggcagacgcccttgtgcatcgacaccgacccggtgaacgcgacgttcgagggctacaaggccctgaacgtccgccggctgaacatcatggacggcgacgaaatcaactcgcgcaacttcgacaccctggtcgaattgatcgcgccgaccaaggatgacgtggtgatcgacaacggggccagctcgttcgtgcccttgtcgcattacctcatcagcaaccaggtcccggcgctactgcaagaaatggggcatgagctggtcatccataccgtcgtcaccggcggccaggctctcctggacacggtgagcggcttcgcccagctcgccagccagttcccggccgaagcgctgttcgtggtctggctgaacccgtattgggggcctatcgagcatgagggcaaaagcttcgagcaaatgaaggcgtacacggccaacaaggcccgcgtgtcgtccatcatccagattccggccctcaaggaagaaacctacggccgcgatttcagcgacatgctgcaagagcggctgacgttcgaccaggcgctggccgatgaatcgctcacgatcatgacgcggcaacgcctcaagatcgtgcggcgcggcctgtttgaacagctcgacgcggcggccgtgctatga

SEQ ID NO: 326569 - DNA, 438 bp, Pseudomonas aeruginosa
atgagcgaccagattgaagagctgatccgggagattgcggccaagcacggcatcgccgtcggccgcgacgacccggtgctgatcctgcataccatcaacgcccggctcatggccgacagcgcggccaagcaagaggaaatccttgccgcgttcaaggaagagctggaagggatcgcccatcgttggggcgaggacgccaaggccaaagcggagcggatgctgaacgcggccctggcggccagcaaggacgcaatggcgaaggtgatgaaggacagcgccgcgcaggcggccgaagcgatccgcagggaaatcgacgacggccttggccgccagctcgcggccaaggtcgcggacgcgcggcgcgtggcgatgatgaacatgatcgccggcggcatggtgttgttcgcggccgccctggtggtgtgggcctcgttatga

SEQ ID NO: 326570 - DNA, 1347 bp, Pseudomonas aeruginosa
ttgagcagctacagcagagccgagcgcgcaccgtggggagacttcccgaaggtggttcgcaacggcgaccttggttccttgaccaatgagcctgaataccaggccgccaagcagggcgacgcggaagcggcgcttaatttggtcgagcgtctgatttcggacgacactgttgcccagctcaagacgctgatcggcgacgacaagccccgcatcgttccggtcctcgccgtcgaggcggcggggaacaacaagattccggccatgatggcggtcgttctggccgaccgccttggccttgaggtcgaaacggacattgtgcagcgggagaaggtcgcccgaaccggagccggttcagatcatcgcctggcgttcaacccgactttcgaggggggtgtgatccccggccagaagtacatcgttgtcgatgacacgctgacgatgggcggcactattgcctcattacgcggctacatcgagaacaacggcggcaaggtcatggcggcatccgtcatgaccgcccatgaaggtgcgcttgacctggcggtcaagccgaagatgcttgcgggcatcaacgagaaacacggtccagcaatggacgcattttggaaggaaacctttggctatggcatcgaccgactcacccaaggagaagccggacacctccgcgctgccccgtccgttgacgcaatccgagatcgcatcgctgcggctcgaaatgaagcagtcaatcgagtggggacaagccgaactgcgacgccggcgcgagcagggcaacagcagtccccggcagtaaagcagtccagcggcaacagcggcgaggatttgctacaggcggcccaggaggccgagacggaacagcaggccctcttagaatccgcgcccatcgagcagacctaccagcagacccttgcgctctacgtgcaggccaagcatgaccaggtggagcgcatcgaggaccgcctagaacagctcgtagaccgtcagcaggcgcgtttgcagcagctacagtccaatgcccccggcttgttgtccctgccgcgtacaaaggccgcctggcagcagcagcaggcccaacagcaggcccgcttgcagaccctgcacacgcggctcgacatggtgcgcgaaatcaaggaaggcatgggcattcacgcacccaagatcgaggaactggcgacgcgcaagatgcgggcggagcatcccgagcttgccggcgactgggattcgatgcgtgaagccgcccgacggcaccaggccctgatgcgcaagcaggaacaggagaagaaacaggcccaggagcgcgagcgcgggcgcagtcagagcttgggcctgtcaaacaagcccagctaa

SEQ ID NO: 326571 - DNA, 348 bp, Pseudomonas aeruginosa
atgaaacaccgcctactggtcatgaatgggcaaagaattgtccagaccgagaacgaaggcgcatggacgaaccagaaggtagataaagccggggcgctgaaacccggcatatacaacatctatatggcccaaaaggctgacaagtcgcagcgccacgacggcaccatcgtccacgcagatagcggcagtatttaccaacaggtggggaaaaactttgtaatgcacgcccggtcagatttcgataaagtacctgaaatcgggagtgcgaaaagcatcaactatgacgcaagtggtaaggcacaggtcagcgccgaaagtgtcaagttgagtcgcggccgcactcgttag

SEQ ID NO: 326572 - DNA, 927 bp, Pseudomonas aeruginosa
atggaactgaacaaagagacgcgcgaccgcatctttgcggctgcggatgagctgttcgagcaaggcgaccgggagaacttcccgaccgtggatgcagtgcgcaaggccgcccgcgtcaacatgaacgacgccagcgccggcatgcgcgaatggcgacgccagcgcacggcgcaggccgccccgttggcggttcaggtgcccgacgcggtgcagcaggccggcaaccaggccgtggccgccctctggcaagccgcccaggctcttgccaatgaatcgttgcaggcagcgcaagccggctgggatcgtgaacgcaacgagttggaggccgtgcgcggggagctggccgacgcctacgaggcgcaagcccgcgagctggaagaagcccaggcgcgcgttacattgctagagcagcaggccgccgaagcggccgagctggccgcacgccagggacaagacctggccgaagcccgcaacgccctggcaggggccgagcagcgggccgcccttgcgacgcagcgggccgacgaggtggagcgtcgggcgcaggagctgcgcgccgagctggactacgctcaccaggacgcccgggcattcagggaagaaagccgcaaggccctggacgcggccagccaggaaatgcaggcgcttcgcggtgagcgcgacgcgaccaggcgcgaagcggagaacttgcgcacggagttggcggcggtgaaggcgaaggcgcaggccgatgccgaggcccaccaggagcaaaggaagttggcggcgcaagaggcggccaggcaggccgagcgctttacgacagtgcaggccgagcgcgacaaggcgcggcaagaagcaaggacggcccaggaagaggccgctacgttgaggggtcggctagacgcggaaacgagtgggaggaatcacaaacagggggaaaagtaa

SEQ ID NO: 326573 - DNA, 528 bp, Pseudomonas aeruginosa
atgaccaatgagcaacagaaccgactcaaggagctgcggacaatccggcactaccttcaagggatgcgccggggcgtttccggcccggatgcttataagggctggttgaccggcatcggcatcgcactggccgggttcctggtcgctaggctgctgccatcccctgcccctggcgttggcctggttgcgccgacggcttgcgtcgctggcgtcatcatcggcggatggatcaatctcaaggggcgctcatggagggccgccatctacgatgcgctggcccgttaccgcccgctcaatgaagcagcgtaccgtgccttgcaagagagggtgaaggaatccggcttcgactctgatgcagtcatggagtggacctacatcgagcaggccgagttcgtgcccctggtgcccaccagggaggacctggcgcgcgacaagttcctgaccgcgacgcgggccgaaagagccgaggacgaggcgcgtgcgcgcttcgtcgtgctccaacccaagaagcgcggccacgacgcatga

SEQ ID NO: 326574 - DNA, 501 bp, Pseudomonas aeruginosa
atgaatccgatgctgttttacatcgcgggaggcgtaggtgcggcgctgctgctggtttccgcgatcatgctgttcaagctgcgcgagccgaagaaggaacacccaccgcagcgcaaggcggccgcgacgccggagccggtcgatagcgagccgctttacacctttcgccggccgtcgcaggccagccaacccgagccatccaccacgccgcctgcgcggcgcactgccccaccgagcagcgaacaatccaaggggagcgacggcgatttcgtcacgtcggccctggtggccggggcgaccaacagcaccatgctgggctacctggccggcggctcgttgaccggggccatgctgggcgatgcgctgcggccagacacgccgtctgcggcgttcgccgacccctcgccgagcttcggcagcagcgacacagacagcggctggaccgataccggcagctcttgcgatttcggttcgtccgacaccgatacgaataactggtga

SEQ ID NO: 326575 - DNA, 1077 bp, Pseudomonas aeruginosa
atgactgcggctcaagccaagaccaccaagaaaaacaccgctgcggccgctcaggaagccgcaggcgcggcgcagccgtccggcctggggttggatagcatcggcgacctgtcgagcctcttggacgctcctgcggcgtctcagggcggttccggccctatcgagctggacctggacctgatcgacgaagatccgcatcagccgcggacggccgacaaccccggtttttccccggagagcatcgcggaaatcggtgccacgatcaaagagcgcggggtgaagtcgcccatttcggtgcgcgagaaccaggagcagccgggccgctacatcatcaaccacggcgcacgccgctaccgtggctcgaagtgggccggcaagaagtccatcccggcgttcatcgacaacgactacaacgaagccgaccaggttatcgagaacctgcaacgcaatgagttgaccgcgcgcgagattgccgacttcatcggccgcgagttggcgaagggcaagaagaaaggcgatatcgccaaggaaatcggcaagtcgccggcgttcatcacccagcacgtcacgctgctggacctgccggagaagatcgccgatgcgttcaacaccggccgcgtgcgcgacgtgaccgtggtgaacgagctggtgacggccttcaagaagcgcccggaggaagtcgaggcgtggcttgacgacgacacccaggaaatcacgcgcggcacggtcaagctgctgcgcgagttcctggacgaaaagggccgcgatcccaacaccgtcgatgccttcaacggccagactgatgccgagcgcgatgcggaggccggcgacggccaggacggcgaggacgacgaccaggacggtaaggacgccaaggaaaagggcgcgaaggagccggacccggacaagctgaaaaaggccatcgtccaggtcgagcacgacgagcgccctgcccgcctgatcctcaaccgtcggccgccggcggaaggctatgcctggttgaagtacgaggacgacggccaggagttcgaggcgaaccttgccgacgtgaagctggtcgcgctcatcgagggctga

SEQ ID NO: 326576 - DNA, 780 bp, Pseudomonas aeruginosa
atgaaaactttggtcacggccaaccaaaaaggcggcgtcggcaagacctcgacccttgtgcatcttgccttcgacttcttcgagcgcggcttgcgggttgccgtgatcgacctggacccccagggcaatgcgtcctacacgctcaaggacttcgctaccggcctgcatgcaagcaagctgttcggcgcggttcctgccggcggctggaccgaaaccgcacccgcagtcggcgacggccaggccgcgcgccttgccctcatcgagtccgacccggtactggcgaacgccgagcggctgtcgctggacgacgcccgcgagctgttcggggcgaacatcaaggccctggcgaaccaaggcttcgacgtgtgcctgatcgacacggccccgacccttggcgtcggcctggcggccgccctcttcgcggccgactatgtgctgtcccccatcgagcttgaggcgtacagcatccagggcatcaagaagatggtcacgaccattgcgaacgtgcgccagaagaacgccaagctgcaattccttggcatggtgcccagcaaggtcgatgcgcggaacccgcgccacgtgcgccaccaagccgagctgctggccgcgtaccccaagatgatgattccggccactgttggcctgcgcagcagcatcgccgatgccctcgcgtccggtgtgccggtctggaagatcaagaaaacggccgcgcgcaaggcatcgaaagaggttcgcgccctggctgattacgtgttcacgaagatggagatttcccaatga

SEQ ID NO: 326577 - DNA, 315 bp, Pseudomonas aeruginosa
gtgttatccatgaagaaacggcttaccgaaagccagttccaggaggcgatccaggggctggaagtggggcagcagaccatcgagatagcgcggggcgtcttagtcgatgggaagccgcaggcgacgttcgcaacgtcgctgggactgaccaggggcgcagtgtcgcaagcggtgcatcgcgtgtggacggcgttcgaggacaagaacttgcccgaggggtacgcgcgggtaacggcggttctgccggaacatcaggcgtacatcgtccggaagtgggaagcggacgccaagaaaaaacaggaaaccaaacgatga

SEQ ID NO: 326578 - DNA, 954 bp, Pseudomonas aeruginosa
atgaatgccacaaacaccgatgtttttgcccaggtaggcggcctggaggcccgaggcgcgaagatgaagaagcggggcacccgcttcctcatcgcggccctggtggtcctcgccattgcggggatcggggcggtaacgggatgggcaatcagcccaagcgcgacgcccggaaatattgacgtgccgcaggtgctggtatcgacactcagcgaccaggtggcaggcagtgagggcggcggcttgcagtccttgcccttcacgtcggtcgccggctcgctgatggacttcatgacaggaccggcgcttttcgcaatggccgttcttggcgtggtggttgcgggtgccgcgctcgtgttcgggggggaactcagcggattcgttcgatccatcttcatgatggcggtcggtgtaggggtgatcctcatggcctcgaacctggtgaacggcatgtttggccgcgacgacgccaagcaggcggacccttcgccgcgtgcgcgattcatggcagcagttgaggcaaagaactatgagcgggtccagacactcatcaacgaggcaccatttggggccgcgtcggccgccgattatgttctcgcacaaatcgcgggggccgaaggtctggaccgcaagcctggtgcgcgcgtcatcgtcggcaaagcggcgggcagcatggcaatgccgcctgcggcgctgggttttacgccaaggggagaagcggcatacgccatcgagcgttccgcctatggtgagccgaggtccagcactgcgaagcagtaccagcaggaatgggaccggaaggcggcgacctggtgggcgatggctggggtagccggcatcatcggcgcgatcctggcggcggcggcaaccggctttgtggggctggcagtgtcgatccgcaaccgagtgaagcgcgtgcgcgacctgttggtgatggagccgggcgcagagccataa

SEQ ID NO: 326579 - DNA, 1137 bp, Pseudomonas aeruginosa
atgaacgcactgaaaacgacgcaagaagccaaggcccctatcgtcgccttcgacatgaccccggcaaccctgcgcgagctgggcttgcaggaaagcgacgtgccggaagtccatgcggtcgcgcagcggatcgaggtcggcagtccgcagaccgtggccgagttcggccgcgacgtggccgaacacacgtcccgctacgccgatagcctgctggaccaggtgcgcaacagcgacctggacgaagccggcgagaagctgacccaggttgtcgccaaggcccgttccttgaacgtcggcccgctgtcggacaaccgttcccgcctgcccctgattggcccgctgatcgaccgcttccgcgtccgctctacgggcttcatggcgcgcttcgacacgacccgcgagcagatcgagcacctggtcagcgaagtgcagaccacccagcagggcatcacgcagcgcaatgcctcgctcgatgaaatgttcgcagccgtgcgcgaggaacaccgccttcttggcgtccacatcgcggccggcaaggtccgccttgccgagctgcgcgagcaggccgagggcctgcgcggcaatgtcgggaacgaccccggccgcgtgcaggagctggccgacctcgatgcgatggttgccaacctggacaagcgcatcggcgacctgatcgccttgcagcattcggccatgcagagcctgccgaccattcgcatgatccaggccaacaaccagatgctggtcgataaattccacaccatccgcgaaatcaccgtgccggcgtggaagcggcaattcatgctggccttgagcctcaacgagcagaagaacgccgtcgagctggccacggccatcgacgacaccaccaacgacctgatgaagcgcaatgcggccctgctgcatcgcacgtccgtcgagacggcgaaggagaaccaacgcctggtgatcgacgtggacacgctcaagcaggttcagacgacgctcatcaagaccgtcgaggacgttattcgcatccagcaggaaggcgtgcagaagcgcaaggatgccgagaagcagatcgctgcaatgcgcggcgatcttcaagccaagctgacccgccagcccgtgcgcgagctggcccaacaggagtccgtatga

SEQ ID NO: 326580 - DNA, 774 bp, Pseudomonas aeruginosa
atggaagaacaaagagtgaacacggcgcgattgaagggggaggttttgcccgccctcttcgcgtcgccggcgacaattggcgagtatggggccggcatcgacggggcggattccctcaacgagctgtcgaatctgatggagcatggcgcagttgctgcgctggccgacaaaatcagccagatcgtggcgaagctggccgacgcggacccccgcaagatcgcggaaaagcctacctggttcgagaagatgcttggccgtgaggttgaacgccaggtgaggtatcaggtcgcccgcaagacgctcgaccagttgctggacgaagccgagggtgtggcgcagcgcgtgcgggacacgttgcgcgccttggatgacatgctcaatacgcatgaggccgaggtagaccggctcaggacttacattcaggccgggcgcgagttcctggacgagaaccccgaggccggtgcggccaaggccggcgtgatcgagttcgacaagccgcgcgaacgcttcgcacgcaagctcgccaacctggcgaccctcatggcgtcccatgaaatgagcgtcactcagatgaagctcacgcgggcgcaggccgtggacatgctggaccgtttctctgaaacggcgtccgtcctggtgcccgtctggcgtcagcacactctcgcgctcatcaccaccaagaacatgaatccggcaatggtcgccgaggcggccaaagctcaccaggcgctcatgcggagcctttcgcagagcctggaaggcatcaaccaataa

SEQ ID NO: 326581 - DNA, 315 bp, Pseudomonas aeruginosa
atgcagagacaggagcctaagcagccgggctacgtgtgcccgacgaccggacgtgtggccgtgctggtcaaggactacgccgacagcgacctaaacggcgacgcgccggcgtactggttcaacccggacgccgagggctggggtatggacccgtggcgattggtcgaaggcgtagacccccacacgcaaggcagttcgatggacgtttgctttgccaacggttccagcaagacggtcgggccgctgatgacgttctttctcagcgcgaaggatgctgcgcgcctggcggcgctcaagggtgaacgccaggagtga

SEQ ID NO: 326582 - DNA, 324 bp, Pseudomonas aeruginosa
atgtcgaagattatcaagttcccaggcgtggaagtggaggccgaggcccctgccccgcgcgttgaggccccaagcaaggccccgccccggttcaatgttgccaagggcgtccaggccctggtccgctttgtatgggtcgttactgtcctggtgtggccggtggcgaagtggatcatctccatcgacgttttctttcagttcctgcggatgctgtaccactggaacacccctggcgtttatgccggctggacgttcctggctcatttcgcggcactgaccgcactcacctatttcgtgtcgctctacaagcccagggggctgtag

SEQ ID NO: 326583 - DNA, 231 bp, Pseudomonas aeruginosa
atgaccgataagttcatgccgtggatcgacgagctgccgaacgtagaccaggagctggtcgcgcagcggaatgctattgccgagaagcagcggcgcgctgatgagctgatgcaccaggtcgagcgcctgcgcatcgaggtcatgcgggagtcgtcgaagttggaggaacgggcgaaacagcgctggaccttcaacgaaatcgacttggcgaaattccgggccggtcactga

SEQ ID NO: 326584 - DNA, 216 bp, Pseudomonas aeruginosa
atgcccaaccgcaagatcgagattgtcaccaccaattgccgccgctgcggcaagtccatttcgacccttagccgcagcctgatcggggcggacgccctgcgcgaagagctgggcagcatctgcggcgactgcattacgccggaggaacgacagcggatcgacgaaggcaccttgctggccgcgctgcggcagtgcgttgccgccgggacaagctga

SEQ ID NO: 326585 - DNA, 234 bp, Pseudomonas aeruginosa
atgaaaagcaagattatgtcctggctcgatgagctgcccggcgcggccgctacggattttctggctcgtcgtgaccagatcgcggcgctgatggaacaggcagcagagcttacccgccaggccgaagagctgcgacacaaggcgtaccttcaaggctgcaccttggagggtgaagcaaagggccactggtccacccaggaagtcgaacgcgcgaaggctcgcgccggctggtaa

SEQ ID NO: 326586 - DNA, 258 bp, Pseudomonas aeruginosa
atgagcgacgtgaatatccggcttgagtgcctgcgcccggcggaacgctgggtgcagccgaccggcgcagaaatccgggaagtcttgcacttggccggcctcaccggcggacaggctgcgcgcaccttgggcttgggtgccaagggcgaccgcacggtgcggcgttgggttggcgaggattcgccgatcccctatgccgcctgggcgatcctttgcgatctagcggggattgggccgatctggaaaggccagggctga

SEQ ID NO: 326587 - DNA, 1386 bp, Pseudomonas aeruginosa
atgcaagacgacaacatcaagcgccgtaacgatgccatcgttgccggccgcttgttcagcggttcggtgcaggaccgcgagacagagcgatgccaccactgcggcgagctgctgcatccgttcccggaacccgaatactggatgcagtacccgttgccgacctgctgcgtcctggacggcttgaagttctgcgacgactaccggaaaccgggttgcatcgacgcctacctggtagccaacccgacgccgcccgaggcgaccaacccgacggctcgccggcggaccaaggcgcgcaaaagcaagccgcagcccaaggacaaggacgcgcgcattgcagcgttggcggcgacgctgcccgaggatcgcgccggcctgctggccgttgcggcggacgcggtagcagcggtgcatgacgcagtgctcaatcgtgccgatttggtggccgacgtggccggcgagcgttacgcggcggcggtgtggaagctcaacgggggcacgttcttcggttgcgccggcgacgaggatgcggccgagagggtcatagagcgccattgccgcgccacgccgggcgtcgtcccgatgtggggccagcaaggcgacttcctggcttcggtggacgggatgcgcgtatgggtggaggtcgaaagcggctacggcggcctaaccacggtgcatttccagttccacgccgtggacctggacggcccttttatttccgaaacgggctatcggtcccatttcgaccatgcgcgcggcggtatgaccgtggaccaggtagcggacggggttttgcgcgccctgttgcgctcgcatcgccggtatctggaacctcgctaccaggaccgccttgccgacgagccattgccggcgtggattgcgggtatcacgccaccgccgcgccgtgtgcgggccgtcgccgaggactggcgggagccggacgaactgccggcgggcttcgcctgggttgatgcggtgctgccggcgcaccaggcattcatcgcccgcaaatgggcggccggtgccaaggcgaagctcgcggccgcgcgtgcgaaagctcaggagccggccaggcagcgccgggagccggttacaccggccaagccggaaccggaaccggccaaggatgaggacgcgccggcgtggccggcgacgttctttcctggcctgcgctgcgagattgtgagcgtgcatcacccggtttttgccaaggaaatcgggaagcacgtcatcattacgaagatcagtcccgaaacgcgacaggtgtgggcgcacgacgacaagccggcgcgctatcgcatcaatcgcaacggtagaaaggtttgtgaatatgacccgcgttgcatcgagtcgtgctacggctacgaccaactgcgggccgccatttga

SEQ ID NO: 326588 - DNA, 441 bp, Pseudomonas aeruginosa
atgactgatgttcaaatcccctcccctatcgttgccactcgcgtcgccgaggcggatcgcctgcggtttctgccgacgtacttcggcccctcgatgctgcgcatgctgcgcggcgaggccctggtattcggctggatgggccgcctttgcgctgcctaccacggcggtttctggcacttctacaccctctcgaacggtggcttctacatggccccggagcatgacggccgcttgcgcatcgaggtcgatggcaacggcttcgcgggcgagctgtcggccgacgccgccggcatcgtcgccacgctcttcgccctgaaccagctttgcgcggagctggccggcacagccgacgcggacgccctgatcgaccgctaccaccacctggcggcgtttgcgagcgagcacgccgaggcggcggcgatctaccgggccatcgactaa

SEQ ID NO: 326589 - DNA, 756 bp, Pseudomonas aeruginosa
atgaccggacgttacgatcccgcccgccatgactgtctgctgggcaccatgaccgaccaggcgctggccgacctggttggcattagcaaggccgcgatcacaaagcgtcggaacgccaagggggtgccttcctacaccgcgcagacagtgccggcgtcgcgcgcgttcgacgagctgctgggcacactgccagatcgagccgtggcgcacctggccgggcttgctgcggccactgtggcgcagcgcagggcgaagctcggcattgcgtcgtactggcagggagaagggaaggccgccaggcgtgccgaccgtgccgcgcggccgaagctgcggccgggccgtggcgcgatcccctgggcgcgctacgaccgtttcatgggcacgatgtacgaccaggacctggctgcggtgctgcatatcgccccgcgcacgatcctcaaccgccgcaaggcgctcggcctgccgtcctatcgggacttggtgccggcattgcagcagctcggggagctgatgggccaggtgcccgacgacgtgcttgcggagcgctctggcctgccggtcgaagcggtacggcgtcatcggctcgcaatgggctacggcatcgaccgccggcgtcgcggccggtacgacccggaacgtcatgacgtaatcctcggcatgatcgccgatgcggagctggccgcgcgcattggcgtgtcggcgcagtcgatagcgcagcgccggcgcgagctggccgtgccggcggccgcgcaatga

SEQ ID NO: 326590 - DNA, 1149 bp, Pseudomonas aeruginosa
atgaatcggacgtttgaccggaaggcatacaggcaagaactgatcgacgcggggttttccgccgaggatgccgaaaccatcgcaagccgcaccgtcatgcgtgcgccccgcgaaaccttccagtccgtcggctcgatggtccagcaagctacggccaagatcgagcgcgacagcgtgcaactggctccccctgccctgcccgcgccatcggccgccgtggagcgttcgcgtcgtctcgaacaggaggcgacaggtttggcgaagtcgatgaccatcgacacgcgaggaactatgacgaccaagaagcgaaaaaccgccggcgaggacctggcaaaacaggtcagcgaggccaagcaggccgcgttgctgaaacacacgaagcagcagatcaaggaaatgcagctttccttgttcgacattgcgccgtggccggacacgatgcgagcgatgccaaacgacacggcccgctctgccctgttcaccacgcgcaacaagaaaatcccgcgcgaggcgctgcaaaacaaggtcattttccacgtcaacaaggacgtgaaaatcacctacaccggcgtcgagctgcgcgccgacgatgacgaactggtgtggcagcaggtattggagtacgcgaagcggacccctatcggcgagccgattaccttcacgttctacgagctttgccaggacctgggctggtcgatcaacggccggtactacacgaaggccgaggaatgcctgtcgcgcctacaggcgacggcgatgggcttcacgtccgaccgcgttgggcacctggaatcggtatcgctgctgcaccgcttccgcgtcctggaccgtggcaagaaaacgtcccgttgccaggtcctgatcgacgaggaaatcgtcgtactgtttgccggcgaccactacacgaaattcatatgggagaagtaccgcaagctgtcgccgacggcccggcggatgttcgactatttcagctcgcaccgcgagccgtacccgctcaagctggaaaccttccgccttatgtgcggatcggattccacccgcgtcaagaagtggcgcgagcaggtcggcgaagcctgcgaagagctgcgaggcagcggcttggtggaacacgcctgggtcaatgaggacctggtgcattgcaagcgctga

SEQ ID NO: 326591 - DNA, 351 bp, Pseudomonas aeruginosa
atgagccataatcagttccagtttatcggtaatcttacccgtgacaccgaggtacgtcatggcaattctaacaagccgcaagcaattttcgatatagcggttaatgaagaatggcgcaatgatgctggcgacaagcaggagcgcaccgacttcttccgcatcaagtgttttggctcccaggccgaggcccacggcaagtatttgggcaaggggtcgctggtattcgtgcagggcaagattcggaataccaagtacgagaaggacggccagacggtctacgggaccgacttcattgccgataaggtggattatctggacaccaaggcaccaggcgggtcaaatcaggaataa

SEQ ID NO: 326592 - DNA, 312 bp, Pseudomonas aeruginosa
atgacgaaacatgaactgtcggagagggcaggggtttcaatttcgtttctatcagacttaaccaacggtaaggccaatccctcgttgaaggtgatggaggccattgccgacgccctggaaacccccctgcctcttctcctggagtcaaccgaccttgaccgcgaggccctcgcggagattgctggtcatcccttcaagagcagcgtgccgcccggatacgagcgcatcagtgtggttttgccgtcacacaaggcgtttatcgtaaagaagtggggcgacgacacccgaaaaaagctgcgtggaaaactctaa

SEQ ID NO: 326593 - DNA, 960 bp, Pseudomonas aeruginosa
gtgagcgggaaagaagagtttcagaccatcaaggagcgggccaagcgcaagctggaacgcgacatgggcgcggacctgttagccgcgctcaacgacccgaaaaccgttgaagtcatgctcaacgcggacggcaaggtgtggcatgaacgccttggcgagccgatgcggtatatctgcgacatgcggcccagccagtcgcaggcgattatagaaacggtggcgggattccacggcaaagaggtcacgcggcattcgcccatcctggaaggggagtttcccttggatggcagccgctttgccggtcagttgccgccggtggtggccgcgccgacctttgcgatccgcaaacgcgcggtcgccatcttcacgctggaacagtacgtcgaggcgggcatcatgacccgcgagcaatacgaggtcatcaaaagcgccgtcgcggcgcatcgaaacatcctcgtcattggcggtactggctcgggcaagaccacgctcgtcaacgcgatcatcaatgaaatggtcgccttcaacccctctgagcgcgtcgtcatcatcgaggacaccggcgaaatccagtgcgccgcagagaacgccgtccagtaccacaccagcatcgacgtctcgatgacgctgctgctcaagacaacgctgcgtatgcgtcccgaccgcatcctggtcggcgaggtacgcggccccgaagcccttgatctgttgatggcctggaacaccgggcatgaaggaggtgccgccaccctgcacgcaaacaacccgaaagcgggcctgagccggctcgccatgcttatcagcatgcacccggattcaccgaaacccattgagccgctgattggcgaggcggttcatgtggtcgtccatatcgccagaacccctagcgaccgtcgagtgcaagaaattctcgaagttcttggttacgagaacggccagtacatcaccaaaaccctgtaa

SEQ ID NO: 326594 - DNA, 438 bp, Pseudomonas aeruginosa
atgacaacggctgttccgttccgtctgaccatgaatcgcggcattttgttctaccttgccgtgttctttgttctcgctctcgcgttatccgcgcacccggcgatggcctcggaaggcaccggcggcagcttgccctatgagagctggctgacgaacctgcgcaactccgtgaccggccccgtggcgttcgcactgtccatcatcggcatcgtcgtcgccggcggcgtgctgatcttcggcggcgaactcaacgccttcttccgaaccctgatcttcctggttctggtgatggcgctgctggtcggcgcgcagaacgtgatgagcaccttcttcggtcgtggtgccgaaatcgctgccctcggcaacggggcgctgcaccaggtgcaagtcgcggcggcggatgccgtgcgtgcggtagcggctggacggctcgcctaa

SEQ ID NO: 326595 - DNA, 258 bp, Pseudomonas aeruginosa
atgggtggtgatcgtgaactggtgatgttctcgggcctgatggcgtttgcgctgattttcagcgcccaagagctgcgggccaccgtggtcggtctgatcctgtggttcggagcgctctatgcgttccgaatcatggcgaaggccgatccgaagatgcggttcgtgtacctgcgtcaccgccggtacaagccgtattacccggcccgctccaccccgttccgcgagaacaccaatagccaagggaagcaataccgatga

SEQ ID NO: 326596 - DNA, 2559 bp, Pseudomonas aeruginosa
atgatccaggcaattgcaattgcaatcgcgggcctcggcgcgcttctgctgttcatcctctttgcccgcatccgtgcggtcgatgccgaactgaaactgaaaaagcatcgctccaaggacgccgggctggccgatctgctcaactacgccgctgtcgtcgatgacggcgtaatcgtgggcaagaacggcagcttcatggctgcctggctgtacaagggcgatgacaacgcaagcagcaccgaccagcaacgcgaagtagtgtccgcccgcatcaaccaggccctcgcgggcctgggaagcggatggatgatccatgtggacgccgtgcggcgtcctgctccgaactacgcggagcggggcctgtcgtcgttccctgaccgtctgacggcagcgattgaagaagagcgccggcggcatttcgagagcctgggcacgatgtacgagggctatttcgtcctcaccgtgacctggttcccgccgttgctcgcccagcgcaagttcgtcgagctgatgtttgacgacgacgcgaccgcaccggatcgcaaggcccgcacgcgcggcctcatcgaccaattcaagcgcgatgtgcgaagcatcgagtcgcgcctgtcgtcggccgtctcgctcacccgcttgaaggggcacaagatcgtcaacgaggacggcacgaccgtcacgcatgacgacttcctgcgctggctgcaattctgcgtgacgggcctgcaccatcctgtgcagctccccagcaacccgatgtacctggacgctctgatcggcgggcaggaaatgtggggcggggtggtgcccaaggtcggccgcaagttcgtccaggtggtcgctatcgaaggcttccccttggagtcctatcccggcatcctgacggcgctcggcgaactgccctgcgaatatcggtggtcgagccggttcatcttcatggaccagcacgaagccgtgaagcacctcgacaagttccgcaagaagtggcggcagaagattcgcggcttcttcgaccaggtgttcaacacgaacaccggcccggtcgatcaagacgcgctttcgatggtggccgacgctgaggcggcgattgccgaagtcaacagcggcatcgtggccgtgggctattacaccagtgtcgtcgtgctgatggatgaggaccgcacgcgcctggaaggtgcggcccgcgacgttgagaaggccgtcaaccggctgggctttgccgcacgcatcgagtccatcaacacgctggacgccttccttggcagcttgcccggccacggcgtggaaaacgtccgccgtccgctcatcaacacgatgaacctggccgacctgctgccgactagcaccatctggaccggcaacgcgaacgcgccatgccccatgtacccgccgctgtcgccggcgctgatgcactgcgtcacgcaaggctcaacgccgttccggctgaacctgcacgtgcgcgacctcggccacaccttcatgtttggtccgaccggcgcaggtaaatcgacgcatctggcgatcctcgccgcgcagctccgtcgctacgccggtatgtcgatcttcgcctttgacaagggcatgtcgatgtacccgctggccgccggcattcgtgcggctaccaagggcacaagcggcctgcatttcaccgtggcggccgacgacgaacgcctggcgttctgcccgttgcagttcctgagcaccaagggcgaccgcgcttgggcgatggaatggatcgacaccatcctggcgttgaacggcgtcgaaacgaccccggcccagcgcaacgaaatcggcaacgcgatcatgagcatgcacgccagcggcgcgcgcacgctctccgagttcagcgtgacgattcaggacgaggcgatccgcgaagctatccgccagtacacggtcgatggcgcgatgggccatctgctcgatgccgaagaggacggcttggcgctgtccgacttcacggttttcgagatcgaagagctgatgaacctcggcgagaaattcgccctgcctgtgctgctctacctgttccgccgcatcgagcgcgccctgaccggccagccggccgtcatcatcctggacgaagcctggttgatgctcggccatccggcattccgcgcgaagatcagggaatggctcaaggtgctgcgtaaggccaactgccttgtgctgatggcaacgcagagcctgtccgacgccgccaacagcggcatcctggacgtgatcgtggaatcgaccgcgaccaagattttcctgccgaatatttacgccagggatgaggacacggcggccctgtaccgccgcatgggcctgaacgctcgccagatcgagattctggcccaggccgttcccaagcgtcagtactactacgtgtcggagaacggccgtcgtctctacgacctggcacttggcccgctcgcactcgcgttcgtcggcgcatccgacaaggaatccgtcgccatcatcaagagcctggaagccaagttcggcgaccagtgggtggatgaatggctgcgcggccggggcctcgcccttgatgaatacctggaggcagcatga

SEQ ID NO: 326597 - DNA, 759 bp, Pseudomonas aeruginosa
atgagttttgcagacaagatcaagggcttgatcttcaagaagaagcccgcaacggccgcagcagcggcgacgccggcagcgtccggcccgcagaccgacaacccgtacctgacggcgcggcgcacctggaacgaccacgttggttccgtcgtgtcgcaaaagcagacctggcaggttgtcggcatcctttcgctgatgatcgtcctcgcggcggtcggcggcatcatccacatcggcagccagtcgaagttcgtgccttacgtctacgaggtagacaagctcgggcagactgccgccgtgggaccgatgaccagggcctcgaaaaccgatccgcgtgtcattcacgcctcggtggctgagttcgtcggcgatgctcgcctggtgacgccggacgtggccttgcagcgcaaggctgtctaccgcgtctatgccaagctcggcccgaatgacccggcgaccgccaagatgaacgaatggctcaacggcactgccgacgccagcccgttcgctcgcgcggccgtcgaaacggtcagcaccgaaatcacttccgtaatcccgcagacgcccgacacctggcaggtcgattgggtcgagacgacgcgcgacaggcaaggcgtggtgaaaggccagcccgtgcgcatgcgggccttggtgacggtctacgtcgtcgagccgacggcggacaccaaggaagaacaactgcgaaacaacccggccgggatctacgtccgggacttctcctggtcgagacttctgtga

SEQ ID NO: 326598 - DNA, 894 bp, Pseudomonas aeruginosa
atgaaaaaggaactgtttgctttggtcctggccgcgtccgttagcgtgcctgcatttgccgccgatcccagcgcggacctgaccgacctgtatttttccggcaagaacccggagctgaccgcgcaagagcgggcggccatcgccatcgccaagaagtgggaggcggggaccgccggcatgcggccggtcgccggccctggcggttcggtgcgtttcctgttcggcgcgcagcagccgagcatcgtatgcgccgtgctgcaagtgtgcgatgtggccctgcaacccggcgagcaagtcaactcgatcaacctgggtgacaccgcccgttggacggtcgagccggccatcaccggcagcggcgcgaacgaaacccagcacctcatcatcaagccgatggatgtgggcctggaaaccagcctggtcgtgaccacggatcgccgcagctaccacatgcgcctgcgctcgcatcgcacgcagtacatgccgcaggtgtcgttcacctacccggaagatgcgcttgcgaagtgggacgccatcaagaaccgcgaacagcgtgatcgcgtcgagaaaaccatcccgcagaccggcgagtacctgggcaacctgagcttcaactactccatcagcgggtccacgtcctggaagccggtgcgcgtctacaacgacggcaagaaaaccatcatccagatgccgcgctcgatggagcagaccgaagcgccgacgctcctggtcgttcgcaaggagggcggcctgttctccgacgatgaaacggtgatggtgaactaccgggtccagggcgaccgctacatcgtcgatacgattttcgacaaggccatcctcatcgcgggcgtgggcagcagccaggaccgcgtgaccatttcgagggggaactaa

SEQ ID NO: 326599 - DNA, 483 bp, Pseudomonas aeruginosa
atgcgtaagattctgaccgtcatcgcactcgcggccacgctggccggctgcgcaacctccaagtacggcagcttcgtccatgacgcgccggccgcctacaaccagaccattgcgaccgatgcggtgaagcagctcgtcaagctctacccgccggcgcaaaccaggctggaattgcagcaggctacgcccgacccgttcggcattgctctggtcactgaccttcgcgcccagggctatgccgtcatggagtacaagcccgacagcaacgcggccgcagctccggctgctgcgtcctcggccgctgcgaagccggcaacgccgcaagcccagggcggctatccgctgcgctacgtgctggatcagttcagcgacagcaacctgtatcgcctgaccgttatggtcggctctcaatcgctcacgcgcgcctacctcgcccaaaacaacactatggtcccggccggcgcatgggttcggaaggagtaa

SEQ ID NO: 326600 - DNA, 1392 bp, Pseudomonas aeruginosa
atgagcgaagatcaaatggcaccggacgcatccccggatgcggtcaagccgaaaagcggggttcgccgcgtcaacaacatgccgatgtacctcatcggcggtgtgctcggcatcttcctgctggtgatggccctggttgctgcggatcgcgctgcgcagcagaaccagccgggagctgcgaaggctgagaaggccggcagcaccagcatgtttgccgacgaaattgccggcaaacagcaggacggcatcatcaaagccaagccgccggcgattccgcaggaacagaccgcccagcagccgacgacggagctgacaccagcaccggcaccgggaaccaccatcacggtcgcccggcccgagaacctggaccagcccccgacgccaccgcagggtgcgcgcaacgaggacctggaccgcatccgcatggcgaagttgcagatgctggaagaggcgatcagggccaagacgacggtgcgcatcgacgcgccgcgcagccaaggcagcgccggcggcggtgctccgcagggccgcgaggaaacccttgcgcgcatccaggagctgcgtcggcaggctgagaacgcccgcgccaatgacccgaccgctgcctaccaggctgcgcttgcgcaggctcgcacgatgggcggcggggcaggggctggcggcatgggcggctcgggtgcgccgaccctggtgcagacctcgaaccgcagtggtggcagcgccggctatgggtcgttcgacaaccgcagcgagggcgaccgttggcggctcgactcgcagccggaggcccctgcaacgccctacgtgctgcgcgctggcttcgtcgttccggctacgcttatctcgggcatcaactccgatctgccgggccaaatcatggcccaggtatcgcagtcggtgtacgacaccgcgaccggcaagcacatgctcatcccccaaggctctcgcctggtgggcagctactcgaacgatgtggcctacgggcagaagcgcgttctggtggcatggcagcgcatcatcttccccgacggcaaggcaatggacattggagccatgccgggcggcgatagcgctggctatgcaggcttcaacgacaaggtgaacaaccactacttccgcaccttcgcgtcggcattcctcatgtcgggcgtcgttgcgggcatcagcttgagtcaggaccgtggcaacaacaacagcggttacggacgacaagacgcgggttccgcgatgagtgaagcgttgggtcaacagctcggccaagtaacggcgcagatgatcgccaaaaacttgaatatcgcgccgacgctggaaatccgtccgggctatcgcttcaacgtcatcgtcaccaaagacatgacgttttccaagccctaccaggcgtttgactattaa

SEQ ID NO: 326601 - DNA, 777 bp, Pseudomonas aeruginosa
atgaagaagctcgctaagaatgttttagccgctaaagtcgctctggtgctggccctttcggccggcaccttggcggtcacgcctgcgcaagcgggcatcccggtcatcgacggcaccaacctgtcgcaaaccactgtcaccgcgattcagcaggttgcgcaggtccagaagcaaatcgagcaataccggacgcagttgcagcagtacgaaaacatgctgcaaaacacgatggccccggccgcgtacatctgggaccaggcgcagtccaccatcaacggcctgatgagcgccgtcgataccttgaactactacaagaaccaggcgggcagcatcgacgcctacctgggcaagttcaaggacgtgtcctactacaagtcctcgccgtgcttctccctcggcggctgcactgacgccgagcgttccgcgatggaagagaaccgccgcctggcgtctgaatcgcagaaaaaggccaacgatgcgctgttccggggcatcgaccagcaacaggacaacctcaagtccgacgctcgcaccctccaacagctccaatcgaaggcgcagggtgcgcaaggtcagatggaagcgatccagtatgccaaccagttcgccagccagcaggccaaccagctcctacaaatccgtggcctcctggtagcccagcagaatgccatcgccacgcagatgcaggcccagcaggatcggcaggcccagcaggacgctgcgagcgcgaagttgcgcgaaggctcgtaccgcgcaagtccggctaagagctggtga

SEQ ID NO: 326602 - DNA, 210 bp, Pseudomonas aeruginosa
atgaagaaatccaacttcatcgcagttgccgcgctggccgccgtcatggcggccagcctggcaggctgcgacaacaagcccgacaccgacaatctgacctgcgccgatctgccgaaggtcacggatgccgctcaacgcgcggagctgttgaagaagtgcccgcgcggagaaccgggaggcttcaagcccagcgaaaagaaagagtggtga

SEQ ID NO: 326603 - DNA, 1596 bp, Pseudomonas aeruginosa
atgaaaatccagactagagctgccgcgctcgcggtcctgacgctggccttgatgccggtagcggcatacgcccaaatcgacaattcgggcatcctcgacaacgtattgcagcgctaccaggacgccgcgagcggctgggccactgtcgtccagaacgccgcaacgtggctgttctggaccttgaccgtgattagcatggtctggaccttcggcatgatggcgctgcgcaaggccgacattggcgagttcttcgccgagttcgtgcggttcaccatcttcaccggcttcttctggtggctgctgaccaacggcccgaatttcgcgtcgtccatctatgcgtccctgcgacaaattgcaggccaggcaacggggttggggcaggggctttcgccctccggcatcgtcgatgttggctttgagattttcttcaaggtgatggacgaaacctcgtactggtcgcccgtcgatagcttcgtcggtgctgccctggcggccgccatcctgtgcatcctcgccttggtcggcgtgaacatgcttctgctcctggcgtccgggtggattcttgcctacggcggtgtgttcttcctgggtttcggcggctcgcgctggacctcggacatggcgatcaactactacaagaccgtcctcggggtcgccgcgcagctcttcgcaatggtgctgctcgtaggcatcggcaagaccttcctcgatgactactaccaccgcatgagcgaaggcatcaacttcaaggaacttggagtgatgctgatcgtcggcctgatcctgctcgtcctggtcaacaaggtgccgcagctcattgccggcatcatcaccggcgcgagcgtcggcggtgctggtatcggccagttcggcgctggcacgctcgtcggtgcggccgcaacggccggcgcggcaatcgccactggcggcgcagccgtcgcggccggggctgcggcggcggccggtggcgcgcaggccatcatggcggccgcgtcaaaggccagcgataacgtctctgcggggaccgacattctgtcgagcatgatgggtggcggtggtggtggcggcggtggcagcgccggcaccagcagcagcggcgacggcggtggctcgggcggcggtggtggttcgggcggtggtgaaaccccaatggcctcggccgccggcgacaacagcagcggcgcacgcggcggcagctcgggcggcggctcgggtggtggtcgctcgtccggtggtatcggagccacggcggccaagggcggccgaattgcagccgataccgtcgccaacctggcgaaaggtgccggctcggtcgccaaggccaaggccggcgaaatgcgcgcatcagcccaggaacgcatcggcgataccgtgggcggcaagatcgcgcaggcaattcgcggcgcgggtgcggcggcgcagaccgctgcaaccgtcgccgatagcagcagcaacagccaggcgcaggaacaacctgcaccggcacctgcaccgtcgttcgacgacaacagcctttccgcaagcaacaacagggaagcggccgccgacgcggattccgaagtggcgagcttcgtcaacaagcccgcccaatcctga

SEQ ID NO: 326604 - DNA, 600 bp, Pseudomonas aeruginosa
atgcaactgaaaaaagcgttctcgtcggccgccctggtggtggccttgggcctcggcgcaactggctcggccagcgcgcaagacgtgctgacgggcgatacccgcctggcctgcgaggccatcctgtgcctgtcaacgggcagccggcccagcgagtgcagcccgtcgctgtcgcggtacttcggcatccacaagcgcaagctgtcggacacgctcaaggcgcggctgaacttcctcaacctctgcccggtgtcgaaccagacgccggaaatgcagacgctcgtttcggcgatttcgcgcggggccgggcgctgcgatgcgtcctcgctgaactccgtgctgcgtgagtggcggagctgggacgaccagttctacatcggcaaccgcctgccggactactgcgcggcctacaccggccatgcctataccgacttcaacacgagcgcgccgcgctacgtcggcacgccggaagagggcggctattgggtcgaggcggcggactacgaccgcgcgctcaaggagtacgaggcgaagctgaaagagcggcagcagcagtacggccgctatggcagcgacgcctaccgtcggttcgagcggtaa

SEQ ID NO: 326605 - DNA, 705 bp, Pseudomonas aeruginosa
atgccgtttgccaagctgctggcacggaacgctctgccggtggtcgccctggtggcggccactggcttcggtgcggcggatgcgaccgctgcacggctcttccccgatctgtcggaacagatggaagagcgcgttgtgtgctcggtgtctgcggccgcgaagtacgagattccggccaacattcttctcgccattcgggaaaaggagggcggcaagccgggccagtgggtcaagaacaccaatggcacctatgacgtgggcgagctgcaattcaacaccgcctacctgggcgacctggcgaagtatgggatcacggcccaggacgttgctgcggcaggctgctatccctatgacctggcggcctggcgcttgcgcgggcacattcgcaacgacaggggcgacctgtggacgcgcgccgctaactatcactcgcgcacgccgtcgaagaacgcgatctatcgcgccgacctgatggcgaaggccgacaagtgggcgaagtggctggatgcgcgtttcgtcaccgtcaactatggccccagctcgccggcgcagccggcagggaaggggaccacgctggcggccgctgatgcgccggcagcagcgccggccgaagcccagccggtgaagcaaggccggatcacccgcaccagcttccgcagctcgggttacgtgccccggcagctcatcatcaacaacacgccataa

SEQ ID NO: 326606 - DNA, 264 bp, Pseudomonas aeruginosa
atgggcattcgcaacctgacgcagcgatacatgaacggggccagggcctacgcggcctgggcggcatcgcaggcaaaagcgccgtttgatcttctggtcctgggcatcgggcctgtcatcgtctttggcctggtcgcgcatacgctgctcgcgttcctgcccgcatgggccatgtacgccgccggcgctctgctgtgcctcgcggccctgcctttggcgctgcacgtcctccgggaatacgcgctgcgctatgggcgcaaatag

SEQ ID NO: 326607 - DNA, 735 bp, Pseudomonas aeruginosa
atgagtacacgcgccatgaacgacgccagcggccgggcctcgctgcctgccctggtgatcgccgacggcaccattgaagccttgaagtggctcgccttgcttgccatgaccggggatcacgtcaacaagtacctgttcaacggtacgctgccatatctgttcgaggcggggcgcttggccctgcctcttttcgttttcgtcctggcgtacaacctcgcccgcccgggcgcgctcgagcgcggtttgtacgggcgagcgatgaaacgcctgttggccttcggcctggtcgcctcggtcccgttcattgcgctgggtggcgtggtgggcggatggtggccgctgaacgtcatgttcacgctgttggccgcaaccgcgatgctctacctggtcgagcgcggccgctcggtcgctcctgtagcgctgttcgtggtggccggcggcctggtcgagttctgttggccggcgctgctgctggccgcgtctgtctggttgtacctcaagcgcccgacgtgggcggccgcgttgatggcgctgctgtcctgcgcgtcgctgtggtacatcaatggcaacctgtgggcgcttgctgtcgtgcccctagtgatcgtcgccgccggcgtcgatcttcgtgtcccgcgcctgcgctgggccttttacacgtactacccgctgcatttggctgctctttggctgatccgcattccgatgcgcgacgcgggctacttgtttttcacctga

SEQ ID NO: 326608 - DNA, 420 bp, Pseudomonas aeruginosa
atgcaattgctcaagaaatgcaccatcgcggccctgccgctgctcgccctgtccggctgcgcactgctgaacatccccatgccgacgccgcccggttcgaccccgccggaaatgctgactgtgccagtggcgcaaatctgccgtgacgccgacaagaacccggttcgggcgacggagctgtacggcaagaaagggttgtcggccaccggcaaggttcaggtgatttccgaaggcttcaagcctcgctaccgggtcctgctgcgcgctggcagcgcctcgatccatgctgggaccgataaccagctcgccatcaagtcagtttccaccggccagaccacgcgcgttactggcaccgttaaggacgtgtcctacgaccataacggctgctcgatctcccttgacgacgccaagttctactga

SEQ ID NO: 326609 - DNA, 696 bp, Pseudomonas aeruginosa
atgctgacacggttaaagggcttccttgctcgtcgccgcgagctgaaggaactggatgcgtccgtggtgagccggccccggccggctccggcggaactggtccaggttgatgcacgcgaggccgtttggcgcgtgccagtgcccggccaggccgaccgcttcatgtcggccaagcctggcgcgatcaacgatgaaatgttcgtggtccgggtggacaccgaagcgttctatcgggcctggctgcgcagcagctcgacgggccgcgaaacgcggtcggacaactgcctgctgcgctcggaaatgccgcaggactacaagttcaagcacgccgtccagggcttcgcgcacggcagggaaaatcctgtgccgctggccttcgccggcgcgcaccaggagcgcgaccgggtggacattgggttcagcaacggggtcacgcgctcgttctggctgattgcgaacaaggctccgtcgttcccaatccaggtccacggccgggaatctgccgaactgctgaacaaggtttgcggcctcgatcccgcgccgctgtcgttcacggaactgtttgcgcaggcccaacgccaggctccgcaggtcgccacgccggcccggccagcgccggcggcggccgctcggccggctccaaaggtgcagccgcgccccggccgcagcggcccgcgcaagagccgcggactctaa

SEQ ID NO: 326610 - DNA, 663 bp, Pseudomonas aeruginosa
atgtatgtgatcgcctgcggcatcgttgccggcctggcggcagcggtggccctgttgggcttcacgccgatgatggaggcgcttgccgccggcgaacgccgcaaggcattcgcgcaatgggcgcggacgatgctcctggtgctgctgccggtcgtgctgatgtgcgcgcccatcgggtccagcatttacgacgcggtgcaggcggatgccggcaagcccatcgctttccacaacggccggatcacggtcgtcatggccctggtcggcagcttggccgtggtgctgatcgcggccgcgcgtgccgtggtcaaccgcaagcatgccagcttctggttcgtcggctgggcgatggcgtcggttctggccggcggcgtcggcgcgatcgccagcgcgaagcaactggcgttcctcgacgaacatagcggcatggtggccttcggcttcttccgcgaccaggtgaaggacatgcactgcgatgcggacgtgatcctggcccgctgggatgaaaaggcgaactcgccggtggcctatcgctgcccgaaggtgtacctgctaaacaggttcgcatccgcgccattcgtgccctggccggactacaccgagggggaaagcgaggatctaggtagggcgctcgcagcggccctgcgagacgcgaaaaggtga

SEQ ID NO: 326611 - DNA, 624 bp, Pseudomonas aeruginosa
ttgaaggtcgcccgcatctacctgcgcgccagtacggacgagcagaaccttgaacgccaggagagccttgtagcggccacgcgggccgccgggtactatgtcgccggcatctaccgcgagaaggcgtccggcgcacgcgccgaccggcccgagctgctgcgcatgatcgcggacctgcaacctggtgaagtcgtcgttgcggagaagatcgaccgcatcagccgcttgccgctggccgaggccgagcgcctggttgcatcgatccgggccaaaggggccaagctggccgtgcctggcgtggtggacctgtcggagctggccgccgaggcgaacggagtggcgaaaatcgtcctggaatccgtccaagacatgcttttgaagctcgccttgcagatggcccgcgacgactacgaggatcggcgcgagcgtcaacgtcagggcgtccagttggcgaaggccgccggccgctacaccggccgcaaacgtgacgccggcatgcacgaccgcatcatcacgcttcgttccggcggatcgagcatcgccaagacggccaagctggtcggatgcagcccgagccaggtcaaacgagtgtgggcggcctggaacgcgcagcagcaaaaataa

SEQ ID NO: 326612 - DNA, 522 bp, Pseudomonas aeruginosa
atgaaggcacgattcagagcggccgcgctggcaatccttttggtcgtggctggcccggctgcggccgagctgcgcggggaggtcgtgcgcatcattgacggcgacaccatcgacgtgctggtagacaagcggccggtgcgcgtgcgcctggtggacattgacgcgccggaaaagcggcaagccttcggcgaacgtgcgcgccaggcgctggccggcatggtgtttcgccggcacgtcctggtcgacgagaaggacaccgaccgttacggccgcacgctgggcaccgtgtgggtcaacatggagctggccagccggccgccgcagccgcgcaacgtcaacgccgcgatggttcaccagggcatggcgtgggcctatcgcttccacggccgcgcgaccgatcctgaaatgctgcggctcgaacaggaggcgcgaggcaagcgcgtcggcctctggtccgacccgcatgccgttgagccgtggaaatggcgacgcgagagcaacaaccggagggacgaaggttga

SEQ ID NO: 326613 - DNA, 195 bp, Pseudomonas aeruginosa
atgcagcagccaggggccgacgccgcgagctgggttttgttggattggacgggcaccgcgccgcgcgaggccggccggttcgccaagtggaacgatgccgatgccgccgcgcagcagctcgacggcaagaccagcatcgaggattcgcgcacgtgggaccggatcaaggcttccggtaagcggggcgtcgcatga

SEQ ID NO: 326614 - DNA, 252 bp, Pseudomonas aeruginosa
atgagccgcctgactatcgacatgacggaccagcagcaccagagcctgaaagcgctggccgccttgcagggcaagacgatcaagcaatacgccctcgaacgcctgttccctggtgacgctgatgcggatcaggcatggcaggaactgaaaaccatgctggggaaccgcatcaacgatgggcttgccggcaaggtgtccaccaagagcgtcggcgaaattcttgatgaagaactcggcggggatcgcgcttga

SEQ ID NO: 326615 - DNA, 312 bp, Pseudomonas aeruginosa
ttgacggcctacatcctcacggctgaggccgaagccgatctacgcggcatcatccgctacacgcgccgggagtggggcgcggcgcaggtgcgccgctacgtcactacgctggaacagggcatcgccaggcttgccgccggcgaaggcccgtttaaggacatgagcgaactctatcccgcgctgcggatggcccgctgcgaacaccactacgtcttttgcctgccgcgtgcgggcgaacccgccttggtcgtggcgatcctgcatgagcgcatggacctcatgacgcgactagccgacaggctcaagggctga

SEQ ID NO: 326616 - DNA, 291 bp, Pseudomonas aeruginosa
atgaacatcgaggcgtacccgcacgattttcgcggctcgctcgccgtggtttctgcgaccggcgtggccggtggcaagacctggacgctgcgcagcgtcgaaaccgggcagcactacgagcttgcgccggcttcgattgaaggctggcctctccctgcgaagcgtgaggacagtcggcccaacagcatcatcgtcaactacgacggcaacgacgtgatcgcgcttgagctggcgaccggcgagctgtaccgcacccgagcacctgcaacggccctacgactacggaggtag

SEQ ID NO: 326617 - DNA, 441 bp, Pseudomonas aeruginosa
atgaacaaagcacagatcggggcaccacgcacatcggcaagccctggcgtcatcatgaagcccgagggcagcgtcaaggtcgccgtgttgaacggcagccgccaggtggaccaggtagtgaacggcgaatggctgacgatgaaggtattgcccgaggcagggctaccgaaaggcattcaccagttgagcgatgcgaaggacgcaagcaagaacgttcacccgcacaagcacgtcggccaggtgctgcacgacgacggccgcaacgtctaccagttcagcgaaggcggaatcgtgaagcacagccggggcatcttcgagaagccgccggttgtcggcaagaactacgaaatcgcctacagccggggccagggcaaggtcatcggcgaggtgtcccaggaacaggcggccaaggccgagcagaaacgctcgcgctcgatctag

SEQ ID NO: 326618 - DNA, 3186 bp, Pseudomonas aeruginosa
atggcagaggtcaaaaagccgttccacgagcaggttgccgaacgcctcattgagcaactgaaagccggcactgcgccgtggcaaaaaccgtgggaaccgggcatgcccggctccttcattccgctcaacccgactaccggcaagcggtacaagggcatcaacgcgatccagctcatggcccagggccatgcagacccgcgctggatgacctacaagcaggccgctgccgccggcgcgcaggtgcgtcgcggtgagaaaggcacgccgatccagtattggaagttcagcgaagagcagaccaagaccgacgagcagaccggcaagccggtcctcgatgccaacggcgatccggtcaaggtgacagtgcagctcgaacgcccgcgcgtgttcttcgccaccgtgttcaacgcggagcagatcgacggcctgccgccgttggaacgcaaggaacagacctggagcgccgtcgagcgggccgagcacatccttgcggcgtcaggtgccaccatccgccacggcgagcacgaccgcgcgttttaccggccgtccacggacagcatccatctgcccgacaaaggccagttcccgagcgccgacaactactacgcgaccgcgctccatgagctggggcactggaccggccacccgtcgcggctggaccgcgacctggcgcatcccttcgggagcgaggggtacgccaaggaagagctgcgcgccgagattgccagcatgatcctgggcgacgagctgggcatcggccacgaccccggccagcacgcggcctatgtcggatcgtggatcaaagcgctacaagaggacccgctagagattttccgcgcggccgccgacgcggagaagatccaggatttcgtcctggcgttcgagcagaagcaaattcaggaacaaacgacccagcaggccatcgagcctgcgcagggggcaactatggagcaacagcaagaccaggtagcacgaccggccattgcgccggccgacgagctgatcgcgcagacgctgcgcatgtaccgcgccggcgcggagccggcggaaggcaaccaatcgctggccgcgctgaccgaaaccacgctgggctttgagctgcctgccgattggaccggccgcgtccaggtccagggcaacgtcgaggtcgagcacgacggcgaacggttcgtggagccggccggcgaccaagagccggagttttggggcgtgtatgcccagcatgaggacggcacacacacctggcttgccgacttcgccggtcccgacgcgcagctaaacgccgacgctctggccgaccgtctggccgtgatcgacgcctacgcgacggccaacgagtacgagcaggccgcgaagttcgcccgcgtccatgaagagcgggttcgccgcgatcccaacagcaccgacgaggaccgcgttgccgccaaggaggcgcgcaaggccgccgaaggcacggccatgctgcacgacgaggacctacagcgccgcatcgccgactacgagcgcgagcagcaggaaatggcccaggccatgaacgccgccgagcagccggcggccgctcaggcccccaccaagcccgagcgcgcctacttgaacgtgccgttcaaggagaaggacgaggtgaaggcccttggggcgcgctgggaccgccaggaacgcgcctggtacgttccggcaggggttgaccctgccccgttcgccaaatgggcgcgcgagggcgctacggcggccgtagaggcccgcgccgaggcccagcctacccaacccccggccgagcgcagcaacgcggcccaggagcgcgtctacctggccgtgccctacggcgagcgccaggttgccaaggcggccggctcgcagtgggacaaggtggccaagtcctggtatgccggcccgaacgccgacatgggcaagctgcaacgctggctgccggacaacgtgcccacccagcagtccccggccgtcaccccggaagatgagtttgccgaagccctgaaaagcatgggctgcgtcgtcacccctggcggcgagcaccccatcatggacggcaagaagcaccgcatcgagaccgagggcgacaagaagggcgagaagtcgggcttctacgtcggccacctggacgggcacccggccggctacatcaagaacaaccgcaccggcgtcgaaatgaagtggaaggccaagggctacgccctggaccccgccgagaaggccaagatgcaggccgaggcggcggccaagctggccgcgcgtgcggaggaacaagaacgcctgcacgaagcgacggcgcagcgcatcggccgccaggctcagagcctggtgccgatcacggaaccgacgccgtacctgcgcgacaagggcctacagttgcacgccggcgtgcttaccgaccaggagggccagaaaacctatatcccggcctacgacgccgacggcaagcaatggaccatgcagtacatccaggaggacggcaccaagcgtttcgccaaggacagccgcaaggaaggatgcttccatgtcgtcggcggcatggatgccctcgcggccgcgccggcgctggtgatcggcgaaggctacgccaccgccgccaccgtggccgaggcgctggggcacgcaaccgtcgccgcgttcgattccggcaacctacaggctgttgccgaggccctgcacgcgaagttcccggacaagcccgttgtgatcgccggcgacgacgaccgccaggtgcagatcacccagggcgtgaaccccggcaggacgaaggcccaggaggccgccaaggcggtcggcggcaaggccatcttcccgatcttcgcgccgggcgagaacgcctatccgaaggagctgccgccgatcaccccggagagctaccgcaatcacctgcacgctgaaaagcgcctcgcggatgcggcggccggcaaggttcagttgagcgaggccgacacggccaagctcaaggaatcgctgttgagcgatgaccagctcgctgccttgtcgaacatgaagaagcacaccgatttcaatgacctgtccgagcgcagcagtctcggcaaagacggggttgaacgccaggtgcgaagtgcggtcggcaaggtgcttctcgacgagggccagcggcagaaggtgcagcagctcaagcagcaggacatcgagcagcaagaacagcggcaacgccgcgcgagaacctactaa

SEQ ID NO: 326619 - DNA, 264 bp, Pseudomonas aeruginosa
atgaacgatcccaagaccgtgcagcaggacgactttgcgccgttcgacgataccgcgaacgccgccgccgccctgcgtgaaaagctcgccgatgcgatgacgcccggcttccaggtcgagttcgaccccgaagaagcggagaaggccggggccttccccgaggacgccttgagcgagcaggacgccgccgagagcgacattgacctggtggacgcgaccgtgcccgaggacacgacgaccgcggccgccaatgacgggaggtaa

SEQ ID NO: 326620 - DNA, 1833 bp, Pseudomonas aeruginosa
gtgcagcggctgcttatcaacgacaacaacgtgaagatcgtgcgccggcagctcgccgcgatgcgcgacaaccgcgagttcgccggcctgtccgctgcggccgaggcccgcagcgtcggcgaccagctctacggcttcaacatcacgcgcctgtacacgcttgcggcacgcgcgaagggctatcagggcctgttgagcgtcgggcgcgtgcagacccctatcctgggccttgtcgtgcgccgctgccgcgagaacgcggctcaccagaaagcctactactacctggtgaacggccagttcgaggtcgagggcatccagttcccggcccgttaccaggtcgccgacggcgatccggtggacgagaaaggccgcctcagcaacaaggagcacgccgagggcatcgcggccgccgtgagcggccaacccgcccgcatcgtgtccgtgacgaccaaggcgaaggaagcggccgcgccgctgccctacaacctgctgaaactgcaaatggacgcctcgcgcaagttcggcttcaagccggaccaggtgaaggacattacgcagtccctgcgggagaagcacaagctcatcacctacaaccgttccgactgcgaatacttgagcgaggaacagcacggcgatgcgccgggcgtgctggcggccatcgcgcagacggccccgatgctggccgctgctgcgcagcgcgccaatccgacgatcaagagccgcgccttcaactcgtccaaggtttcggcgcaccacgcgatcatcccgaccgaaagcacggccgacctgtcgaagctcaccgatgccgagcagaagatttacctgctgatcgcccgcgcctacgtcgcgcagttctggccgaagcacctgtatgaccagaccgacgtgcttgcccaggtcggcgatcatcgtttcagcgtgcgctcgaacgtcaccacgtcgccgggctggaagattctctacaagaacgacgccggcaacgaggacctggaaggcaacgccgacgacattgaacaggacctgcgcaagctgcgcgacggccaggccggcacctgcaccgatgcgaaggccgagcagcaggagacgaagccgcagccgctgtacacgatggattccctgctttcggaccttacgcgggttgcgaaatacatccgcgacgaccgcctgcggaaaatcctgatcgagaaggacaagggcaagcaaggcgagcacggcgggatcggcacgccggcgacgcgcgactccatcatcgccacgcttttcgagcgcggctacctggtggagaagggcaagcacatcgtttccacgccgaccggcgaagagctgtacgacgctctgcccgacacggcgagataccccgacatgaccgcgctctggcatgagcagcagaaggccatccaggccggcgagcgcgacacgctgtcgttcgtcaacgagctgatggagtacatcggcgccgaggtcgccaacatcaaggaaaacggcctcagcatgaagatcgacacgcacccttgcccgtcctgcggcaagccgttgcgacgcctcaagaagaaggacaagaacgaatacttttggggctgcaccggctttgccgatggctgcaagttcgcgtgcgacgacaagggcggcaagcccgtcccgcgcgaggccccgaaagtctccgagctgcacaagtgcatggcctgcggccacggcctttcccgtcggcctggcaagaagcgcggcatgttctggtgggggtgcagcaacttcccgacgtgcaagcagacctaccccgacctgaaaggcaggccggactacagcaaaggccgtaacggcaacaaccaggagtga

SEQ ID NO: 326621 - DNA, 513 bp, Pseudomonas aeruginosa
atgtcctactccgaccccaggcattgccaccaccagcgcgtcacccaatggctcgccgcgatacggcagcatgccgcctggctgtacgctgcggatgagcagtacctgtacctggtgggcgaggcaaacgaactctaccagtgcggaatcgtgggcctgcaggaccgccacaacatggtcaccgacgccttggggatgtacggctgggcgatcgagcacggcatcacgcgcgagacgcactactgcgcggactgctgctacgacgtgctcgacggcggcgtcgtcgtcgggagcgtggacgacgagggcatctaccacgggcccgcacccgcacgacagcgagtgggctgtatcagccaggatccactggacgggcaggtctatctgcgcctgggccaggcgcttgagcgtgccggcattgtgcgcggcctcgtgatcgaactcgacgccggcggcacgctgcaactcgccgagcagatcccggatgacttccggccatggcggtgggcctga

SEQ ID NO: 326622 - DNA, 687 bp, Pseudomonas aeruginosa
atgtgcggcaggctttcgcagtacacgggtcttcacgagttcgtcgacgcgctgtcgatgcccaacgtcctggtcaacctcgtcggcgaacagccacagcgctacaacgtcgcgccgtcgacggcggtgacgacgctacggctcgaaggcgatgcgcttgtagctcagccgattcgatggggctggcggcccttctgggccagggatcgcgcggcgccgataaacgctcgggttgaaaaggtggcgcatggacgcttcttcagcaccgcgtggaaacaccgagcgctgacgccgatctcgggctggttcgagtgggtggtcgaggacgggccacggaaacagccgtatcacatccagcacgctgacggctcgccggtcttgtgcgcagcgatcggccagtttcctggcctcgatgacgaaccggcagatcaccatgggttcgtgatcattaccgcggacgccgatggcggcctggtcgatatccacgaccggagaccggtggtgctgccgcccgagctggcccgggagtggattgacccggcgacaacaccggagcgggcggagcagatcgtgctccaccagggcgagccgagcgagtcgttccggtggtacgcggtcgacccagcagttgggaacgcccgaaaccagggcgcccacctgatcgagcctcagcgctccgcttcgtag

SEQ ID NO: 326623 - DNA, 630 bp, Pseudomonas aeruginosa
atgcctatcactgagcagcagttgctgcatgtcctcccgaacgccggccctcgagccggcgtttttgttggtgcgctgaaccgcgggatgacgcgcttcggtatcacttcgccggtgcgcgcggcggcgttcctggcgcagatcgggcacgagagcgcccagttgacccggctggtggagaacctcaactacagcgcccgcggcctggctgcgacctggccgagccggtacctcggcgccgacggccagcccaacgccctggcgcagcgcctggcgcgcaacccccgagccatcgccaacaacgcctacgcctcgcgcaacggcaatggcgacgaggcgtccggcgatggctggcggtaccgcgggcgcgggctgctgcagatcaccggccgggcgaactaccgcgccgccggcgccgggctgggccagccgctggagcaggaacccgagcttctcgagcaaccggagtgggcggcgatctcggcggcctggtggtggtcgacgcacggcctcaacgaactggccgaccgcggcgagttcgccgccatcactcggcgcatcaacggcggcctgaatggccaggcggagcgcctggcgctgtgggagcgggcgaagagggtgctgtcgtga

SEQ ID NO: 326624 - DNA, 1689 bp, Pseudomonas aeruginosa
atgacttacgacaccagcgaccttccgctcggctcgaaggaccctcgcgttctgtacgaaaacgctgagcatctcgatttggcaatgaactcgctgaatcaagatcgctggatggaccgtgggcctcagcgtcctccggttgcacgatggacctggtggggaatcgagcagtatgtcatgcagtggctggccgctcagggatttgaaccgaccccccttgaatatgtcgacggctctccgctgattgttgatcgcccgactcaactgattcagcgtgacgggaacctgtatagcgttcaactgccagcagatttcccggtcagcctcagcgggaactgggccaccgacgagagtctgctggttgcccaggtcgaccgctcgctgcgtcagcagttgagagctccgggtggcgccggaatgatgggttacgatccggcggaaacgtacccatcagatacggttgggtacgaactgcaggctctacgttctgctcggcgcattgcgatcagttcgttctggccagccggcggaggagatgacggtacttccgcatgcgagtccgcgattgttgcggctggggctggcggagaggtgttctttgacgtccctgacttcatcatcactcgaaagctagttcagcttcagagccagaagtggtatgggcgcggagggcagcgagggacgacgattcgcaagggggcggacatcgacatgatcgaagtttccactctcggcactattaccgacatcaacctagaaggcgtgggcgctacgtatacaggcaaaggatttgttgttccgtctggtttcagccagaacttggtgcgttgccgcgccgtgaatatggggggggagcctctgtatttcgcccttaatgcggggggaggagccaacgtaacggcgttcgagggatatccactcgatacctctctctatgctggtatcgcgattgccggcgatactacacctcacccgcgctttttccgcgggatatggctaagtggggcgaattttgctcttggtcctggggcgggcaatggcggatcgttgacgcagttctatgttcgagacctgagatttgatgcaacctccgcgttgtttcatatctccaatggacgatgcgcaactcttggtgctacgacaacaatcagaggtgctgatcactcaatagacggcgttgccttcgctggccctgttgctcttgaatctgcgcaagggataaatatcgggccgtcctgcaccgttccatctttaatagaaaacaggtcgaattgccaatacaactcggtgtacgttcagcgaagaacatatagtcctgtctggtctcagacttcagctacaccctcaattggaaatgggacgttgactgggaactatattcggtgcggtcatcaatgcttggttgaaatagaaatgattgccggttctacaacagtatttggtgatagcggttcgtcatataggttttccttgccattccctggtcacctgtcatttaaccagcgaggcttccctgtgcgaatatatgactccagcgctggtgcggatttcacgggctgggccgcaattggtgcagatcaggattacatcacgatttctgtcggctcccagcaggtcagagccggggctccgatggtgtgggcacagggtgatacgttgcattgcagcttttcctatatgacacgctag

SEQ ID NO: 326625 - DNA, 198 bp, Pseudomonas aeruginosa
atggccatcttcatcctcaaggagcgcactaccagccgctccatggttgtccgtgcgcgctgcactacatgcgcccgcaccgtggcggtcgagaacgccggtgccgaagggacgatggtatggcgtgaccccaacctctcttctgtcgaactggtccgcgagacggacaagccaggcctcatcctgaaatcggactga

SEQ ID NO: 326626 - DNA, 1410 bp, Pseudomonas aeruginosa
atgtacttcgcccgctacttcttcaagcagcgcatgggcagcaagatgattgttgcgccgcaccaccgtgtcattcaggacacgctggatcgggtggtgagcggcgagataacgcgactgatcatcaacgtgcctcctggatacacaaagaccgagttggcgacgatcaacatgatcgggcgtggcctggcgctgaacaaccgcgccaggttcatgcacctttcctactcgcacaatctggccctgctgaactccagcacggcgcgaggcatggtgaagtcttcggcgtatcaggccatgtggcccatgtcgctgcgagatgacgccgacagcaaggccatgtggtggactgagcatggcggcggggtttatgcatcgtccgccgccggccaggtgacagggtttcgcgcgggccatatggagcctggatggcagggcgcactgatcatcgacgatccggtaaagcccgacgatgcatacagcgagactgttcgtgacggcgtgaatagccgcttcaatgagacgatcaagtcccgcctggcgctggaaacgacgccgatgatcgtcatcatgcagaggatccattaccacgacctgagcggctaccttctgcgaggcgggtcaggggagatgtggcaccacctcaacctgcccgtgatcatcgacaacagcgagccgtacccagcggaaaacactcacggaatcccgatcgagcatggtcttccggatggctggctatggcccttcaagcacaacgagagccaccgcacagcgcttttctcgcatcgacgcactgcagaagcccagtacatgcagaagcctcggcggttcaacgccgagggggcgttgtggacagagcaactgatcaatgcggcgcatcaattgcaaatcagggccgaccgcaagcggtgcgtggtggccatcgatccccaggccaccaacagcgacgagagcgacgaaacgggaattgtggcggcaagttgctacggtgccggagattctcgccagttctcagtggatggtgactacagcgggaaatactccccggcaggttgggccaagaaggccatggctgcacacgagcagcaccaggccgacgcgatcgttattgagacgaaccaaggcggcgacatggcggaagagaccctgaagaacgcgggtttcaaggggcggatcatccgaatccacgccaacaagggaaagttcgcccgtgctgagccgatctcggctctatacgagcaaggcagggtggctcaccaaggcgcgctgtatctgctggagaaccagctcatggagtacatccccgcgacggcgaagaagtcgccggaccggctggacgccatggtctacgccttgaccgaattgggcggagccgcgccgcttggcatccttcttcccggagcccgctga

SEQ ID NO: 326627 - DNA, 480 bp, Pseudomonas aeruginosa
atggcagtactgagcagcgaggtgaaagccttcatcgttcaggccctggcctgtttcgatactcccgcacaggtggcggcatctgtccgagaagaattcggcatagaggtgagccgccaacagtgcgaatcgcatgacccgaccaagagcgcaggccgagacctggccaaacgctggcggactctgttcgaggacacccgcaagcgcttccgcgaggagatcgccgacatccctatcgccaaccgcgcctaccgactgagggcattgggtcggatggctgagcgcgccgagggcatgcggaacatggccctggctgcccagctttacgagcaggccgccaaggagtcgggaggcgtctacacgaacaagcaccggcacgaggtctcaggtccgaatggcgcgccggtggcagtcgccgccatgaccaaggaggactacaagcaggctcgcaaagagatgctggcagaagatgattgctga

SEQ ID NO: 326628 - DNA, 597 bp, Pseudomonas aeruginosa
atgccgtcggccgagatgctcgaatcgctgcggcttaccctgagcccggctatcggcgtgtgggattgggttcagcgcgagatccttgctgacaccggcagcattcataaccccgatcacggccacctgattgacgccaacatcggcgtgctctgggcatcgacgggattcgcgaagcaggggagggtcgtccttggccaggccgagcaggtgatgttccgtgcaggtggatggcagaaggcccggcaagagcagcagatgcgggagtggtttggcgaggagccgagctacctcatcacgctggctgccgactactgcgctcagtgcactgatgccgagttctgtgccctccttgaacacgagttgtatcacatcgcccaggcgaccgatgagtacggagcacccaagttcacccaggacgggctgcccaggctctacctgcgcggccatgacgtcgaagagttcatcggggtggtgaggcgctatggtgccagcgaagaggtacagcagctgatcgacgctgcaagccggccgcccgaagtggccaagaccaacatttcgagggcctgcggaacctgcctgctcaagtctgcctga

SEQ ID NO: 326629 - DNA, 207 bp, Pseudomonas aeruginosa
atgtcgaaagctattgacgcaatactggagagtcaccaacggagcgttagcgatgggcagaagcgtgccattgccgttgccgcagcactgcaaattattgaggcgaaggtcagcaatgcacccaccaaccatgaagtggttgagaatgagttaaacaacttgaacaaatatgccgatcagatcctggccgccctcaatggcgaatga

SEQ ID NO: 326630 - DNA, 258 bp, Pseudomonas aeruginosa
atggtaattgatcatcaggaagctcaggcgattgctgacgagcttcggcgctggcacgacgaagctcgcagcttgattgacgacgccgccgataaatccaagctttcgtctattggtatcgactcactcaaaacccgactctctattctcaaaaacgagatcaaggaagcggcaaagcacgagaccctctcaaggcgaaacaccgcaaagaccgagttggagcagtgcttcttcgggccggcagtcagaagcacgtag

SEQ ID NO: 326631 - DNA, 285 bp, Pseudomonas aeruginosa
atggttgacccttggacgctggtggctgcgatgatctgcggcgctatctgcatgaggctggcgacataccgccggcaaggtgcgaggtatcgccggggcgtttcctggctcgcctaccttctgtgcgtaggcagtggatgcttcgccctgagcgtgatgctcgatgcgctccacggctacaggctgaaccctgtctccccctggctgaccctggtgctggcgatcttgctcggccttgtgtgtcgtgcgcgggggaatctggcccacattctgagggtgtactga

SEQ ID NO: 326632 - DNA, 369 bp, Pseudomonas aeruginosa
atggccgagccgagtggtgcggtagcagtcgccggcctggtcggtattggtgcgtctgcattgatccctggcattgatgccaatgcggtgatcggtgcttttgctggggcgatcttcttcgtggtgtatgccaaggatatttcggcctgggcgcgcctcggttacttcgtcgtgtcctggatcgttggctactacgtcgccggcgaagtcatcgggcgagagtgggccagaacatcgggcctggtcgcgtgtggcggggcattgttctgcgtcgcagtgggcaccagcttgctggagtgggtgcagggggggaagacgcccggttggctccgcttcattgcggaccgctttggaggtcgtaatggttga

SEQ ID NO: 326633 - DNA, 687 bp, Pseudomonas aeruginosa
atgagactgatcagcgcgcgccaggcttggcaggacgcgtaccacatcccgggcgcgtcggtgatggcgaaagccatcgaagacgccgaagaggccacccggaagaccagggcgaagcgccgcaagaaactggtggcccgcttccccgagggataccagggcgagagcaaggagccggagggcctgttccccatcgactcccagatcatcgccgcctacgagacgcggaccgggcgggccgcgggaaacctgaaccgctgccagcacatgctcgccgccggcaaggtgatgcatgcgatcagcacgcttccggcgccgctgcagcatctcggccacttcctgtactcgccgctggcgaacggggtcgaccagaaccgcgcgcagtcctttctgtacttctcggcggatctcccgaagatgaacaagccccgccaggaggtcgcttactgggtggccttggcggctatgcactcgtggaaggacatggtcaacggccgggaggagtggtggcctggcaaggtaatccagttcctggcggactggcccgggttcgtactgtacgccgcgaattgggagcgtgactgggcggcgatctgggagattttcatgcaggagctcaatcggctggacgcccaggcgctggtgcctgtggcgcaggtcgttgccgcccaacgagacgccgcttga

SEQ ID NO: 326634 - DNA, 444 bp, Pseudomonas aeruginosa
atggctgacctccgtccagtgatgttcaccgtgcccggcgagccggtagggaaggggagaccgcgcatcggtcgcgtcggcgcccacgccaggatgttcacgccggcgaagacggcgaactacgaggggctgatcgcgcacagcggacagcaggcgatggcaggtcgcgcgctgttcgatggcccggtgctggtcgagctcgacatcgcgctgagcatccctcaatcgatgtcgaaaaagcggaagtcgctggcgctggccggcggcctgtaccccaccaagaagcccgatatggacaacgtgatcaaagcgatctacgacggcctgaacggcgtcgtctggaaggacgacgtccaggtcgtgaaggcggtggtggggaagcgctacggcgaaacgccgggcgtgcgagtgaaagtcgtccctctcctcgagggcgagcagtga

SEQ ID NO: 326635 - DNA, 264 bp, Pseudomonas aeruginosa
atgaagcagttcgcgaagctgttcgagttcgaagacctgggccaagtgctcgtgatgcttgatcgcggggatgacggcccggaggtgcgcctctacttcaagcccgacgggcttggcgtctgttcagtggcgtgcagcaacttccccggcgatgaagacgagcagtgggactacgccgaaaaggggttcgccacggtggactccgaaggggctcacaagatcgtcgccgaggcaatggaagtcgtcccggatcgcctgggctag

SEQ ID NO: 326636 - DNA, 153 bp, Pseudomonas aeruginosa
atgtggacataccgcgagcgccgcaaccgcgcggctttcagcaacgcgcaactcgcttacgaccgtgccgtcgacccgctctgggaccagccggagccggaaccggagcacgaggacgaagagcaggaggacgaagatggcctgggcgaatga

SEQ ID NO: 326637 - DNA, 192 bp, Pseudomonas aeruginosa
atgaccacccgccccgttcgctcgatcatcgacgaccagctcgacgacctggtgatgccggccggcgccgacatcgccgcggtgctcggcctgccccgcgagaccctggtggtgaatctcccgcgccgcatggcactgaccatcaagcgcggccggaaatgcctgggggtgcgtcgtgaacgcgaagcgtaa

SEQ ID NO: 326638 - DNA, 804 bp, Pseudomonas aeruginosa
atgcaaaccatcaccgtgcgcgcctcgtcctggggcgcgctgttcgactgcgcgttcaagtgggagggcgtacacctcctgaagatgcgcaacccgtcatccccccgggcgctgctcggtaccgcgatccacgccagcaccgccgcgttcgacgctgcgcgggtgaacggcgagccgatcagcgcctacgacgcctcggaactgctggtgcacacgttgcagcagccggagttcgaggtcgactggcgcggctccgacatcagcccgcgcgaagccgagtccaccggactgacgctgcacacgaagtactgcaacgacatcagtccgcgctacgacttcgtcgccgtcgagttgacgaccaagccgatggagatcgactgcggtggcggcatccttgtccgcctgaccggccaactcgaccgggcccgcatcaagcgcgatagctgcggcgtcggcatcgccgacgtgaagaccggcggcgccgcggtgagccagggcgtggccaagaccaagggccacaaagcccagatcggcacctacgaactgctctacgagcacaccaccggcgatgcgatcaccgcgccggccgagatcatcggcctgaagaccaagggcaagcccgaggcggcggtcggcgagatcgtcggtgcgcgccagatgatggccggcagcgagtcgcaccgcggcctgatcgactacgcggcggacatgttccgcaccggcctcttccccccgaacccgcagagccaactttgcagcccgaagtactgtccgcgctggcggacctgcccttaccacgaatga

SEQ ID NO: 326639 - DNA, 819 bp, Pseudomonas aeruginosa
atgagccagacaaccaccctcgaaaccctgcagacgcaagccgtggctccgcgtcagcgcgacaaggcacctgtcgctatgtcgttcttcaacatggacggcttcgagctgatgcagcgcatcgccaaggccttcagccaggccgacctggtgcccaagcagtaccaaggcaacctgcccaactgcatgattgcgctggacatggcccagcgcatgggcgcgaacccgctaatggtcatgcagaacctctacatcgtgcatggcaccccgggctggtcgagcaagttcctgatcgccacggtgaacacctgcggtcgcttctcctcaatgcgctacgagtggaaaggcgagccaggcagttccgactacggctgccgggcttgggcgattgagaagtccaccagtgaacgcctcgacggcatctgggtcacctggaaaatggtgaacgacgaaggctgggcagcgaagaacggcagcaagtggaagacgatgccggaccagatgttcatctaccgcgccgccgcattctggcagcgcgcctatgcgccggacctcggcatgggcctgcagaccgcagaagaactgcaggacgtcatcgacgccaaacgcgacgccgacggctcgttcacggtcgacctcgacgtgctgcggcgccagcaggaggtcaccgacaaggcgccgggcgcgggccagcaggctctggaacacgaacccggagaagtgatcgacaccgtcagtggcgagatcaccaagtcggctcagcgccagcccgccgatcagcagccggacaccggcaccgacgagctcaatctcgagtaa

SEQ ID NO: 326640 - DNA, 933 bp, Pseudomonas aeruginosa
atgagccagaacaacgccgccttcctccacatgaccgccgaaacgctcggcaagagcctgctgcagggcctgatccaggaaatccgcatcctgccggacgtgtggcagaagctgtccgaagccaagcagaccgatgtgatcgagcgcctggagcagcaggtgcgcaacgccgccaccatcgcggtgcacaccatcgccggcgccgagcgcgagaccgtctacggcaagctcgaatccatcgcggccaaggacaagatgaaggccgtcatcgtggtgaatcactccagcccgaacaagcacgaccttctggacgcggtgaatgaggactgcttgctgatcatcggcggcgccgctgagttcctcgacggcatgaaggacgtgaaggcggatccggaccagaacccgctggacctgaacggcggcgacggcgacatggaggaagacggcgcttggggcgctgacactgaccctctgtaccaggcggctgttgagttcgtccgcgagacccggcgagcgtcgatttcggcgatccagcgcaagttgaagatcggctacaaccgcgcggcccgcatcatcgagcggatggagaaagaaggcgtagtcacagcggccgacagcaacggcggccgcgaggtactggatgcagcggttgtcgaggccgagttcgaggaaatcaaagccatcggcgtcgagcgcttcgccggccacaccctgggcgagatcgccatcggcgtcgccaccaagaaggacgtgttcgacgcggcctggctgcaatcgcgcttcgctctcaccaccgaggaagccgagcgcgtcgttctccaactgctggaccagggagtcatcgtgctcgagcaggaaaacgaggagtcccgcgagttgaacacttaccgcgtcgtcaagaagccgggggatatcgccctcgacctggagtga

SEQ ID NO: 326641 - DNA, 1743 bp, Pseudomonas aeruginosa
atgcgcatcacgaaactcgaaatcaccaactttcaggggctgcgtcatgcggcccttgatgtttctgcgccggtgctcctggtggccggccacaacggcgccggcaagagttcgctgctcgacgccatcagccacgccttcaccggtaagcccggccgcgttgcgcagaagcagcatatcggccaactgatcaccgagggcgccaagaaaggggaggcccgcgtcgagtggctggacgatgccggcgaggtgcaggcctgcggggtcgcgctgcccagcggcaaaggctccccgctcgccgactcgccgttcctgccgttcgtgctcgacgccagccgcttcgccgctctggacgcaaaagatcgccgccgggtgctgttcgacctgaccggcgccagcgccagccctgccgaggtcgccaagcgcctgaaggccaagggcatcgacctggcgctgttcgagaaggtgaagcccctgctccgttccgggttctccgccatggtcggccaggcaaaggactacgccagcgaagcgcgcggcgcctggaaagcggtcaccggcgagaactacggcagcgagaaggcgaacgggtgggagccggaggcgccgccggtcatcgtcagcgaggaggaactggaatcggcgcgcgcggaactgcgagccaccgcccaggacctggacgaggcccagcagaccctgggctccagcaagcgcgcccacgccgacgcccaggcacgggccagccgaatcaccgctttgcgcgaaaccgcagcgctggccgaccgccggcgcaacaagctggcaaccgacgaggccaatcaggacgaatggtcggagaaggtgatggcagccgaggccgccgccagcggcgagcccgcccaccagccgctgacctgccctcattgccagggcgccgtggacctgcaggccggccagttggtcgcgcaccagcccccggcgaaggctgccgatcccgaggcggcgaaacgcctggaggagtaccgcgggtatcttgccagcgctcagcgggccgtcgccaacagccagcgggacctaaaggagagcgaggacgccgccgcgcaggccgccgcgctggaagccgaaaccgcccaggcgcccagcgccgaggcgatcgccaacggcgaacaggcgatcaacgaactgcgccaggcgcgtgaccggcagcaggccaaggtgcagtcgctgatggaagcgttcaacgccgccgcgcagcgccaggacgtcatcaagcaggccgccggcttccacgccgaggtctgcgcctggagcaccttggccgatgccctatcgcccgcgggcatcccagcggagatcctggccgatgcgatcggaccggtgaacgagctgctgcagcgcctatccggcaccgccggctggtcgccggtacagatcagcgccgacatcgacgtcacgttcggcggtcgactgtacggcctgctgtccgagtccgaacgctggcggtgcgacgcgacgctggccctggccatcgcgacgatctccggccttcgcctggcgctgctggatcgcctcgatgtgttggacctgccgagtcgtagccaggccctgacactgctgcgtgccgtgaccatggacaaggaaatcgactcagtgatcgtcgccggcacgctcaaggaaccgatggcgaagacgccggcctggctacaggcggtctggatcgacgccgggcaactcgccgaccagcagcaacaggctgcggcctga

SEQ ID NO: 326642 - DNA, 2283 bp, Pseudomonas aeruginosa
atgagcccccgcctgagtgcccttcgcctgagcctggcttatctcgcaatcgccatcgcctgggcgttcctgagcgatcatttgttacaaaaccaggtccaggaccacgaccaactggtgttctggatgaccgccaagcggctgttcttcttcgccgcaaccggcctgctcctgtacctctacctggtacgccagttccgccgcaaggcccaggcctacgacgaactgcacggcagcgagcagcgcctgaaccgcgccctggaagcggtgcgcgacggactctgggactgggacctggtgaccgaccggatgttcgtctcgccgggctacgccgcgctgatcggcctcgctccggaggaactcggcgaccccatcgagacctggaagaagcgcctgcaccccgaagagtacgccaccgtgctggaggcccaccgcaaccacctgcagggcctgaccgacaatctcgaccacatctaccgcctgcgccacaaggacggcgactaccgctggatccactcgcgcggccgggtcctccgcgacgccctgggcaagccgctgcactacactggcgtggcccgcgacatcaccctgcagcggctcaaggaagaccacctgcgccaggccgcggcggtattcgacagcacccgcgagggggttctggtcaccgatgcacaggcggtgatcgtgcacgtcaacccttccttcgagcgcatcaccggctaccgctccgaagacgtgctcggcaagaccccggcgatcctccgctccggccgccaggaccaggcgttctaccagcgcctgtggctggccctgcgcgagcaggacgtctggagcggagaaatctggaaccggcgcaagagcggcgagatctacccgcagtggctgcacatccgcgtggtgcgcaacgaccagggccagctgacccactacgtcggggtgttctccgacctgagcagcatcaagcgctcggagaacgagctggacttcctcgcccaccacgactcgctgaccggcctgcccaaccgcgtgctgctgcgcgagcgcatcgagcaggcgctggagaacggcaaggaccggacggtggccggggccctgctgctgatcgacctcgaccacttcaagcacatcaacgacagcctcggccatacaactggcgacatgctcctcaaggaggtcagcaagcgcctgcaacaccagctcgacgagcgctgcctgctgtcgcgactgggcggcgacgaattcgccatcctcgtcgagaacgacgacccggaagccgtcgcgcgactctcgcagcgcatcctcgacggtttcaacgcgccgttcgacatccactgccagccgatctatatcagcgcaagcctcggtgtcagcctctacccggaagacgccagcgacgtcgaccacctgatgcaacacgccgacgccgcgctgttccaggccaaggacagcgggcgtaacgcctacgccttctacacccgcgtgctgaccgcccgggcccgcgcccatgtccaggtggaatcggccctgcgccatgcgctggatcacgacgaactgcgcgtccactaccagccggtgcacgacctggccagcgggcggatcgtcggcgtcgagtcgctggtgcgctggcagcatcccgagcgcggcctggtgccgccaggcgagttcgtcccggtggcggaggaatgcgggctgatcgccgcgctggacaactgggtgctcaagcgtgcctgccggcagatgcgcgagtggcaacagcgcggcgtcgagctggagttcgtcgcggtcaacgtctccagccggctgttcaaccgcggcggcctggaggaaaggatcgccaatgctctggaagagtccggactggagccccgctacctggagctggaagtcaccgaaagcgcggtgatggaggacttcgagcagtccctcaacctgctctgccgcctgcgtatcctcggcgtgaacctggccatcgacgacttcggcaccggctattcctcgctgatgcgcctcaagcggctgccggtgcacaagctgaagatcgaccagggcttcgtcgccggcctgcccggcgcggtggacgacgccgcgatcgcccgggcgatcgttgccctggcgcaaagcatggggctgcgggtggttgccgagggcatcgagcatcaggaccaggcgctgttcctgcgcgaacatggctgcgacttcggccaaggctactggtacggacggccgcaaccggcggaagcgctgcgcttcgacctgccgcccgtggcgctgccggaagactga

SEQ ID NO: 326643 - DNA, 882 bp, Pseudomonas aeruginosa
atgtggtcccttacgctgaccgacatcatccagttcgtgatcaagaccgtcggtatcttcctggtcctgctgccgttgtcgatcgacggcgccggtggcctggcgcgcatgcaggaggtgctgccggcgggcttcttcgacctcggccacatcggcctggataccatcctcacctacttcctcctgtacttcttcggcgcgctgatcggccaggacatctggcagcgggtgttcaccgcgcgcagcgagacggtggtgcgctacgccgggcttggcgccggcgtctactgcatgctctacggcgccgcctgcgcgctgatcggcgcggcggcgcgggtcctcctgccggacctggcggtgccggagaacgcctacgccgagatcacccgcgaggtactggcgccgggcctgcgcggcctggtggtggcggccgcgctgtcggcgatcatgtccaccgccagcgggtgcctgttggcggcggccaccgtgctgcaggaagacatctacgcgcgcttcctccgccccggtaccaccagcgacatccgtctgagccgttgcatcaccctgctgatgggcgtggcgatgctggtcctggcgtgcctggtcaacgatgtcatcgcggccctgagcatcgcctacaacctgctggtcggcggcctgctggtgccgatcgtcggcgcgctgctgtggcgccgggccagtccgcagggggcgatcgccagcatcgtcgccggttgcctggcggtgatcgcctgcatggcccgcgacggcctgctcgccaactcgccgatcgtctacggcctgctggccagcctggcgaccttcgtcgcggtcagcctggctacccgtcctgccgccagcctgcgagcccagccggaatga

SEQ ID NO: 326644 - DNA, 1383 bp, Pseudomonas aeruginosa
atgaagagtcgcaagatcaacaagtcacgactggccctggccatcactgccggtaccctcggtgccctggcgcaacaggcggtcgccgccggtttcatcgaggacagcaaggcatcgctgaccctgcgcaacttctacatcaataccgacaaccgcaatggcaccgcctcgccgagcaagcaggaagagtggggccagggcttcatcctgaattaccagtcgggcttcacccagggcaccgtcggcttcggcgtcgacgcgctgggcctgctcggcgtgcgcctggacggcggcggccgtgccggcaagagcggcctggaccgccagccgggcaccgtgttcccgctggaaagcaacggcgagccggtgcacgacttcgccagcctgggcctgaccgccaaggccaaggtgtccaacaccgagttccgctacggcaccctgcagccgaagctgccggtggtcacctacaacgacggccgcctgctgccggtcaccttcgagggcggccaggtcacctcgaccgacctcaaggacttcaccctggttgccggccaactggagcactccaagggccgtaactccaccgacaaccgcagcctgagcatcgccggcgccaacggcagcagcgccagttcgcgcgacagcaacaagttctactacgcgggtggcgactacaaggtcaacaaggacctgaccctgcagtactactacggcaacctggacgacttctacaagcagcacttcctcggcctgatccacaactggcagattggcccgggcgtcctgaagaccgacctgcgcgccttcgacagcagctccgacggcaagaacggcagccgttccggccgtgccgacggctacgtcagcagcggctactacggcagcggcgtgaccaagggcgaagtcgacaaccgcgccttcagcggcctcttcacctataccgtcagcggccacagcatcggcgccggctaccagatcctcaacggcgacagtgacttcccgttcctgaaccgtggcgatggcgaaggttctaccgcgtacctgatcaccgacgtgcagatcggcaagttccagcgtgccggcgagcgcacctggcaggtccgctacggctacgacttcgccaccgtcggcgtgccgggcctgaccttcaacaccatttacctgagcggcgacaagatcaagaccgcccgcggcgaccagagcgagtgggaacgcgatatctccctggcctacgtgatcccggacggcaccttcaagggcctgggcttcacctggaagaacgcctccttccgcagcggcctgccggctgccggttcgagcaacaaccagcgcgaccaggacgagaaccgcctgatcgtcagctacaccctgccgctgctgtaa

SEQ ID NO: 326645 - DNA, 2094 bp, Pseudomonas aeruginosa
atgacgctggccccgaaaatcgcaatgtccgatgattttctcaagtcctttgctgccgtgcctcgtgctcagcagttggcagtgctgaattttgtggccaagtttcggcagaaccccatggctaccgggatcaattacgagcgtattcgggatgctgccgatgccaacatgcgctctgtgcgtatcaacgacaatatgcgcgggatcgtgctcaagccggatgtgggtaatgtgtactgcctgctttgggtcgatcagcatgacgatgcgtatcactgggcgcgccgccatcgagttgccattcaccctgatatcggaagtattcaaatatatgcggttcaggaggaggcggcctccactgccgttatccagcctgaggaggccggttcggtaggcttgttcgatgccctcaaggatcgagagattcgccgttttggcgtgccggatgagcgtctagcgactgtgcgggcggtaacgagtgaagaagaactggacgcgctagaggcgattctgccggatgaggcattcgaagcgctctatctattcgcagcaggtgagtccttcgacaagatcatcaatgagcagtccgcgcctgcgacggtcgatcaggcggatttcagtgcggccctggagcgggacagtacgcgtcgtcactttgtggtcttgaccgatgacagcgatctcgaggcgctactggcggctccattggagcgttggcgagtattcctgcatcccagtcagcgcaagctgatcgagcgtgactggaatggtccggtgaaggtcaccggtggtgccggtactggtaagactgtggtcgccatgcatcgtgccgcaagactggctcgtcagtatgcccagttgcctgggcgtccagtgttgttcaccaccttcacgaaaacccttgctgaggacattcgtcagcatttggagctgctgtgtacaccgcaggaattggagaagatccaggtggtgaacctggatcagtgggcctctgggctgctgcgccgatttggctatccccatggcctgctttacagcgaaagtgatcgacgtcgcttctggcaagcggcgatggcggccatgccggcttcaagcgatctatccgcgcagtttatgcgggccgagtacgaacgcgtggttttacctcaaggctgtgaaaccgctgaagactacatgagagcgagccggatagggcgaggggggcagttggggcgggctatgcgtaaagcattgtggcccgtgttcgctgagtatcgcgctcagttgcaggcagtgaatcttcgtgaacctgaggaggctttccgggaggcttgtcaactcttgggcacggagaaaccggcgcttggaattcgtgcgatggttgttgatgaggcccaggacatcagcagcgctgcctttgagctaattcgtgcagcggtagcagaggcggaaaatgacctgtttatcgtgggggatgcacaccagcggatctatcgccacaaagtcgttttgagccgagtgggtatcgaggtgcgagggcgcagccgtaatcttaaggtgaactaccgtacgactgatgaaatccgacaatgggcctgcgctcagcttgaaggctgtgccgttgatgacctggatggcaatgcggattcgctgcatgggtaccgttcgctgacccatggtgatgtgccggatatcatcgaatccgcatctctggtggacgatatttctcacgtacagaccatcctgaaacagcttcaggaggatggcatggagcttcgtcaggtctgtatcacagctcgcaccaacgatgacgttgatggcatcgcacgagcattgcagcagtctggagtcagttgcctgaaacttgagaactcaaccacggatgatcctgctgtgcagggagtacgcctagcaacgatgcatcgtatcaaggggcttgagtttagcgtcgtgatcctggcggcctacaagggggctgctaactatgcggaccagttcagtcgggatgaagatgctggggtcgctgaggatacagagctttccgagcggtgcttgctgcatgttgcggctactcgagcgaagaggaacctgttcctattggcgcgcccatgctag

SEQ ID NO: 326646 - DNA, 6318 bp, Pseudomonas aeruginosa
atgcagccactgatcgtttcccagcagctcacccagggcgtcgctgattttctgcgcacagcattcccctcaaccaccaatggttttgatgggctgctggaacgttttctggcgcagcgcagcaatgtgttcaaggggccgtacctgtcgttgcctctgccttttcgcaagcatgagggggatggcacgtcggcgtttccctggctgtttgctggctttgtaccgcatgcgcatcaggcccgtgcctttgcccgtttaggtggagtcgcggcgcagtcaacgctggtggccactggcaccggttcgggcaagaccgagtgttttctctacccgattctggaacactgccggcaagcccaggccgaggggcggcggggtatcaaggcgatcatcctctatccgatgaatgcgctggccaccgaccaggctggccgggtagccaaggaggtagtcaagacggctgctctggcgggggtgcgtgccggtttgtacgtgggggatgcgcctgccgaactctcgcaaacggtacgccggctggaggacggtagtttttcggtgatcaccgaccgcgatgccttacgcagcaatccgccggatatcctgttgaccaactacaagatgctggattttctgctgattcgcgcagccgatacgccgctgtgggtgcatcagcagccggatacgctgcgttatctggtggtggatgagctgcataccttcgatggcgcgcagggtaccgatttggcctgcctgattcgtcgccttaaaggccggctacaaacaccgccggggcaactggtgtgtgtcggcacttcggccaccctgggtgatgacggtgtcggtgatctgctggcgtttgccggtgatgtgttcggcgaggcgctggatgagcaggcggtgatcgttgaggatcgtgagtcggttggcgattacctggctgaggcgctggtggagttcaccctgagtccgcaaccggcgcaggtccataagctggcgcctgagcagtacgccgaccttcccgcctatctggcggcccaggcggagttgtggtttggcgaaccctgttcggctgaacaagtgcaggatttcaactggcgctgtgcgctgggtgagcggcttaaaagtcactttgcctttcagaatctgttgcgtgacttggagcggctagggccgaagtcggtattgctggatgatttgctggcactgctgcagcgtcgcctgccggtttgtgaggagccgcgttatgccttgctctggttgtccagcctgctggcgctggtggcccatgcacgtaagcctgggcatcaggatttcttcctgcaggtgaaggtggagatctggttgcgtgagctgcgccgcatggtggcggtgctggatgaacatccgcagttgcggcatcacgatgatctgcgcaaagcggatttgacccggctgcatctgccagtgattcactgccgagagtgccatgccaccggctggggcgcgacggtgcagaagaccagccccaatcagctggggcacgatctgcaggggttctatagcgcgttctttgctgaggatgtggcaacgcgttttgttttcccggtgggtagtgagcacaaccctgcggtcttcgagcgcaaacaggtttgtccgacctgtggcaccttgcacccggatgtgcaaagccattgcgctcattgcgaggagcaaccgttggtgcgggtggatatcgcccacaacctgcgcgaaggtacccgcaatggtgccaagttcaccaaagcgcatcacgactgcccttattgcaatggctataaaaccctgacgattgtcggctcccaggcggccagcctggcggcggtgatggtcgggcagttgtttgccagtcgcttcaatgcggacaagaagctgatcgcattttccgactccgtgcaggatgcggctcaccgtgcgggctttctggcggcgcgtacctggcgcctgaatttgcgcccagcactggcacaggtgatcgcccaagctggtgagcccctaaccttggcggagctgccggcggccttcgccgagtattggcgcaccaagctgggtgctgatcattacgtggccaactttctgccgccgcaactgcaatggttgcgcgacttcgaaaccctgatgcaggaaggccagctacccgaaggcagcaacctggggcgtgagctggacaaggtactgccttgggtgttgaaagctgagttcggtcaggacgcgcatatcggccgaaccttggttgcgacggcaacggccagcgtggtgccgcagtctggccgactgcagcaggctgtggcttggatggctccgagactgcaggaggccctggagccattggctgcaactgatgacgatgatttggtggtgtttcttcagggcgtcattggcatgctgcaacgcctgggggcctggcgtgaccaagagctggatttttatgcgcgtatgggcagcagcccctgggggtacaagaagaaccccagccatttcaaactgctcagcggccccaggcctccacgctttgtcaccctgaccgagtaccagcgttgcgctgctgtgaatggcagccatgccgggctgttccgtgcttgggcattccaggcactgccagagttggatgggctggcgttgggtgccgagcaattgtggctaccgctgtatcgcctggcattcgaggctttagccgaggtggggctggtggattatgtggaggctgagggcaagtcggatatccgtgtatggggtttgcagcctggggccttttcagttttacccggaggacgcagctggaggtgcgagcgctgccacagcaatctgatggcgggaccggacgaggatctggctgggcaaccgtgccgccgcaaggattgccgtgggcatttgcaggcatcttttgaacagggtgatttttaccgcaagttgtacctcaatgccgatatccagcgggtggtggcccacgagcacaccggcctattgccgcgtgatacgcgtgagtcggtggagcgcaacttcaagttcgatagcgggcgtccgggggcgataaatgtgctgtcggcaacgcccacgctggagatgggcatcgatatcggtgacctatccagtgtgctgcagtgttcaatacctccgcagcaggccaactacattcagcgagccgggcgggcaggacgcagcacaggtaatgcgctgctgatgagcctggctactagcaagccgcatgacctgtatttctgggaagaccccaagagcatgatcgccggctcggtgcaggcaccgggggtattcctcaatgcctcggcggtgctggagcgtcaactgacggcgttcaccctggactgctgggtgcagcagaacggtcgcaatgcgcagatacctgcagaaattcgccaggtgttcagcaccatcgtcaatcagagcatgacgcgcttcccctacccctggctgagttttgttgagcagaaccgggcgctgctactggagcgcttccttcgactgttcaatcacggggcgcaggcaccactgagtgaagccactcagcagtggttgcaacgttttatcgaaggcgatgaagcacagagcagcccactggcgctgaaaatcatcaatcgtttgcagggcattgcgtcagatgtggaaagcatcaagcgcaagcgcgatgccacggttaaagagatcgacaaactacaggcactgccggtgcgtggcgaggagcaggaggaagagctgacccggttgacgcaggatcgcacggctctgtcgcggctgatcggcagcattgagggcaaggcgacgctgaatgtgctgaccgatgagggcctgctgccgaactatgccttccccgaacagggcgttctgctgcgctcgatgattgttcgggactccaagccgggtactgcgacaccggactcggaaaccttcgagtatgagcggccggggtcaacggccattaccgagttggcgccgaacaacaccttctatgccgaagggcgcaaggtggtgatcaaccaggtggatgtgtccaaggtaaagcccgaatactggcgcttttgccgacagtgctcttataccgagcccttgagttcgggtgatcagcatccgagttgtccgcgttgtggcgatggattgtggaaggacagtggacgggtgcatgagatgctgcgcctgaccacggtatttgctcgaaccctggatcgcgatagccgtattgccgatgactcggatgagcgtgaacgcggcttttatgtgcgccaggctctggtggatagcccgcctgatgccgtgcgtcaggcattcgtattcgatcagcaaagcttcccctttggctttgagttcctcgaccgggtgaccttccgtgaggtcaactttggtgagcagtcggagcagggcgcaccgatggagatcggcggaaaagagctcaaccgccctggcttcagtatttgtaccgagtgcggcaccttgcagcgtaagcgcaaggccgaagagctgttccgtaaccatgcttcttggtgctctaggcgtaagaaccccgaggccagtacccagcagtgtgtgttcctttaccgggagttcagcagtgagggcattcggctgttcctcccggaggtcggttttgctgataccaacgaagcgctactgagtttcgtggccgccttggaactgggcttggccaggcgcttccggggggcggtggatcatctgcggattgcgctggatatgcgtatggcggcgggctcggacaacccacgctgctatctggtgatctatgacagtgtgcccgggggtacgggttatctgaaggagctgatgcgcgcaccggagccgttgctggaggtgtttgaaacggccctcaaggcgcttgatgagtgcagttgcaatcagaacccggataccgatggctgctaccgctgtgtgtatcggtaccgcaacagccatgagcgtcagtcgatctcccgcaccacggcgcaaaagctgttaggtgaggtgatgcagcacaagggggggctgcatccggtcaaccagttggctgatgtgcagcctgacaatcagctgctggaaagtgcgctggagaagcgttttgtcgaggctctgcgccgtgaacatgatggcagcaagttcaagctgagcgaggtgctgttcaagggcaaggctggttatgagttgcaggccggtgcgcgccgctggcgggtggagcttcaggtgcctcttggggaggccgatggtgtggtggtgccgtgcaggccggacttcgtgttctggcctgacgacaccgtagatgatctgccgattgcgttgtttgtcgacggttggcagtaccacaaggacatcgtgactactgatctcgtcaagcgtatggccgtagccaagagcgggcgtttctctgtctggacgttgacttgggacgatgttgaggcggctctcttggggcaggcaactaagaccccatctccctggccaaacctgatagaggctcagtcgcaacaggttgttgagaagctctgtagcggcatggggctgccgggcttctccggctttgccgtgcttgagccattcacacagctgcatcggcgtcttgctggtgttacaggcgcgcagatgcgtcagtacagtgtggcgctggcggtggggctgttgatgccgccgggggatcagaatctattgcaggccatgaaggagcgggcctttttgctacggctggatgagctggccttgccgccgaaccatgccgatttacgccagtcgttcagggcactgggtgatggcgtgtccatgatgttggcgatgcgtgctgaccaattacgccacgtaatgagcggcaaatgctcagcagatgacgagccttggctggccttggagtggctgcaagagaacatggggggcgatgagatcaagctgcgctggcagcaactctggcgtttgctcaacctgctgctgcctttgcgccatctgtgggccggttgtgccgatatgcccggcctggcgatgctgttaaacagccctctgttgcaacagtcggacgtaactgccgattggctggaggcattggagattgtcgctactgaactctcatcctggtgtcaggccttggccaccatgggggttaatgcaccgattgccggttttgagttgctggatgacaagcaatgcgtactggcggaggcagagctggcttggccggcattgaaggtggcgattttcctgccggactactcagacaccctgggtgtattcgagagccaggggtggcactgttttgtcgctgaaggcggggcgctgcctgaaccgttacgtaatcttttgatggagactctggcatga

SEQ ID NO: 326647 - DNA, 231 bp, Pseudomonas aeruginosa
atgcgtagcgccgccgatcttttcgaagacctcaactcggctgataagtccatccgcatcgaggccaagcgcgccagcgagggtgcaaccttgctggggaaggatcgctactaccggcgcaacaggtgcctgatcccgattatgggtgatggcctgctgcggttccgctgctcggaaagcgccaagcactcgcatcaggcccatctggcgacccagccgagggagctttga

SEQ ID NO: 326648 - DNA, 2271 bp, Pseudomonas aeruginosa
atgaggtcggtcgaacaatccttccacggtgatcgtcccatcgacgtatcatcggaggatcgtctgggttttgggcctgctgctaggcatgttgccgaggcaatccacaaaatggcatcgcccgacggtttcgtgatcagcattgaaggggaatggggctctggaaagtcgagcttcatcaacttggtgtcggctgctctgagtgaactagaggacgcgccagaagttgttcgctttctgccgtggttgatcaactcgcgagacggactgctgggggagctgttttccgaaatcagcagagccgcactgcggattgagtccttggagcctgaaccaaaagggtggcgtaaacagcttgcctcgttctggccgcgccggtattcggctcaggttgctcgtaagaaagcactcaagaaacaattttcccgattctcatctcaccttgtgcaggctggaaaggtggttgaggcttttggtctgccatgggtgggcaaagccacggaagcggggaaaaagagcgttgatcagtggctgggtggtgggtcgctcgaaagggaaaagtccctgcttcagaatgaactgcggaagctgaaacgtaagatcgtggtgttcattgacgaccttgatcgtcttgagccacacgaggttacggaagtgcttcgtcttgtgcgggcggtcgttgatttcccgaatgtgatctacgtactttgctattcacgggagatcatcgccaaaaatctctcaacggcattgcatatcgaaaagggcgaggagtttctcgaaaagatcatccaggtgagcttttcggttccacgtcccgaggctttcgacttgcgtcgcatgttccgccatgatctgcagttgttatatccgacattgctggatagcgagagccctcaatcacgcgccatcatggatagactcgctcatgtcatcgacatcgaaggtggacgggcgttgctgacaccacggcatgtggttagagcagtcaatgcactgcgctttcacgccacgccggtgttggagaacatcgacgttccagacatggtgtggctgcaactgattcgtctccagtcggaaaaactctacgaatgggttgagggctacttgatcggcttttccgctaaacatgctggcgcaatgattggcgacgaaggggaaaaggcggagcttcagcggctcaattcgattcttgatgccttatcaaatgctggctcgagccgtgattcgattatgacggaattaacaatgctgcctggtattgatttcgattttgaaaatcagggtagtcaactgggcgtcaagatggtgttgagcctttatggtcacgaggatgtgggggcgaagattcgggaaagacgactgggtagccctcaacactttcgctattacttttccctgactgcgccgcaaggtgcgatccatgatcgagagtatgcggactttatggagaacgcccagcgttctccggaagcggctgttgctcaatttactcaactcgctacatcactgaatccccaggggcgctctgagactcaagcactgttggatcgtctgaagggcgatggtatcaaggatgcaccggatgccgtcattccagggattttggaggcctttgctgagggtatggatatcgctgccctgaagacaggccgaggagactgggggcggtactggatatggcaggatgcggatacggtatttgagggggcgtggtcaaaacttaaggaaaatttatcagagagtgatcggcaggaattgctgcaaaaaatctttgggcaggggcgttccattggctggctgacaaatatttttcgcagggaaatattctctcatgggatttatggtgacgaatcaaagcctgaagcggatcgtattttttcccgtgatgagcttgatgttgtggcgcgtgaactgttgcggcgctacaaatgcctatcagcagaggatcttccgcgcctgccaagggtggctcatgtgctctatgcgtggcaacaatactcgccagagtccagcgaagaagtcaggaaaaaggttcgcgaactttctataagtgacacaggtttcttggatcttctacagggtatgcgtagctggcaagccataaatggtgtcgtttcatatcctttgaacgaatcttctctttccgactttatggagatagagcaagtgaaggctcgtctgcattctcttgctgactcgcaagatccatctattgctggtttggccaaggatttgttggcagcactgagcgctggggccgatgaatga

SEQ ID NO: 326649 - DNA, 4926 bp, Pseudomonas aeruginosa
atgagttttgccattgccggcctgatcaacgccaacgagttctatagccagcactacctggacgagatcctcgaaaaagacctcaagccgctgttcgaccagtggaaggagcagggcaccgatagccctgtttctcgtctacgtaccgcctctggtgccaacggctactttcgcgcccgccagcgtttcctcagcgagcgcaagcccagcgaccgtgccagcctgtttatcgatctggtgcagccgctgctccaggccatcggctaccagctggccccggaaaacctcgccctggccgatggtgagctgccggtgctggctacataccgtgacgccaagcaccagccgctgctggtgatcgccgcggccatcgccgggttggatgacgaggagctggggccgctgcagctcaaaccgcaggcagtcgacggccacggcaaaagccgccaggccgacagtgattgggaggaaaccctcagccgccgcctgttcgccgacgaccacccaccacgctgggtgctgctggtgcaccacgaggaatggttgctgatcgagcgcagcaagtgggggcgcaaggcgctgctcagcttcaaactgcccgacctgttcggcccgcgtgacgacaaactgctgcgcgccctggcggcactggccggcagccagtcggtgctgcccgccgaaggcggcgtggccctgctcgacagcctggacgacaactcccacaagcatgccttcgaggtctccaccgacctcaagtacgcactgcgcgaatgcatcgagctgatcgccaacgaggccatctggtacaagcgcactgtggccaaggagaaggtctacgagcgcaacgacaccgacctggccgagcagctcagccgcgaaagcttgcgctacatgtaccgcctgctgtttctcttctacatcgaggcccgccccgagctgggttatgcgcccatcgacgccgaagcctacctcaagggctacagcgtcgagcacctgcgtgagctggaacagactccgctgactaccagcgaggcgcaggaaggctactacttccatgaaagcctcaagcagctgttcggcctgatctggcagggcttcccaaaccgcgcggacaacagtggacagatggacttcaccgcagagcacgacctgctgctcgacaccggctttaccatcgccccgctgcagggccatttgttcgacccggcgcgcacgccgctgctgggcagcgtcaagctgcgcaattgcgtgctgcaacaggttatcgagctgatgtcgctgtcccgcggtggtggcaagcgtcgccgtggccgtatcagctacggcaccctgggcatcaaccagctcggtgcggtgtatgaatccctgttgtccttccgcggcttctttgccgaggaagacctgtacgaagtgcgtcctgaccccaagggcaaaaaggccagcacgggcgaggagggagaggacgcggaaggcgaggacgacctcgacagcgccgacgagccggaaagccgcgaggcggacaagaagaaggacgccgagctggacccgctcgaagcggcctatttcgtaccggtcagcgccatcggccagtacaccgacgctgagcgcctgtttggcggtaacccgcgcaaatacgccagaggcacctttatctaccgtctggccggtcgtgcccgggaaaagtccgcctcctactacaccccggaggtactgacccagtgcctggtggaacatgcgctgaaggaaatcctcgccggcaaaacggccgacgagattattgagctcaccatctgcgagccagccatgggtagcgcagcgttcttgaacgaagccgtcaaccagctcgccgaagcctacctgcaggccaaacagaaggagctgggccaaagcatcccccacgagcagtacaccgaagaaaagcagcgggtgaagatgtacatcgccgacagcaatgtcttcggtgtggacttgaaccccattgccgtggaactagccgaggtttcactctggctcaacgccattttcaagggcagccatgtgccttggtttggcctgcagttgtataacggcaactccctggtcggcgcccgccgcgaggtattcagcaccgcccagctcacccccggcaaaggcgagaacggtctggccgagcgcgactggcgcgccgccgcccccaaggcattgccgctgacccaggcgctgcaggccaccgagatttaccacttcctgctgcccgccgagggcatgggcatggtcagtgacaaggtggttaaggcgctggagcctgccgccttcgagcagttcaagcaatggcgcaaggcctttaccgcaccgctgaccaaggatgaagtacgccgcgtgcaggcattgagccaggccgccgagcagctctggcagcaacatgcccaggagctggcgcgggtacgcagggccacctgcgacgagctacatgtgtggcccgacccggcggccaaccgcgcgcccaccagcaccgcgcagaaggacgccatctaccagcgcgagatgctaagcgaggcgcagaaaaacgccagcccctaccgtcgcctcaagctggtgatggatgcctggtgcgccctgtggttctggccgctggataaggctagcgaattgcccagccgcgagcactggtggtttgtgctggagactgtgctgctgggtaatgccagcctgaccagcggcctagcggatgatctatttccggaaacccaaccgcagcaggggctggacttcacgcccgagcgtgatcgctatggccatgtcgatatcgccgcactggtcgaggccctgccgcagttgcaggtggcgcagaaggtggctggccagcagcactttatgcactgggcgctggagtttgccgatgtgttcaaggcgcgcggtggctttgatgtgatcctcggtaacccaccgtggatcaaggtggagtggagcgagcagtccctgctgtcggacttcgacccgcgctttgccatccgcaagctcagtgccaagcagacggcagatcagcgtgaggctgtatttgcggcgctgccgcaggcacgagcagattatctggctgagtgtgtggcaactgagggtatgggtgaattccttaatgctcggcagaactatgcgttgctggaggggcagaaggccaatctctacaagtgtttcctgccgctggtttggcacataggtagtggtgtgcaggcattgctgcatccggaagggccgtacgacgatcctaaagggggggcacttcgcgaagctctgtattcacgcctgcgggcgcactatcaatttgccaacgagcgcttgctgtttgccgaggttgataaccatacccgctacagcatcaatatttatggtgaacggagccctgatattgacttcattaccgtagccaacttactcgatcctttgaccttaaaccgtagttggtcgcatgtagggggcggcacaatccccggaatgaagactgaagcaggtaagtgggagctggcaggacatatcaacaggctgattaaggttgacgcatctttgctatctaccttcgctcagctctatgacgctccaggtacatctgcactccaagcacgtctgccggcggtgcatagccgtgagctagtttccgtgttggaaaaattcgctcacgcacctcagcgactgggtgatttgggtgctgacatcttctgtacgcagcattggaatgagtccatcggccaaagcgacggcactattcgccgccgcattagcagtgagcagggctttgtcagtgatcccgctgagtttgtcctgtccgggccgcatttctatgttggcaacccgctcaacaaaaccccgcgcaaggtctgcgactcaaacaaggcctatgaccagctcgaccttgaaatcctgcccgaggactacctgccgcgcggtaactacctgcccgcctgcgacgccattgaatatgcccgtcgcgtgccgcgggtgagctgggtagaggagggagagagtgaggcgagagcggtgacgaggtattaccgccatgtaaatcgcgaaatgattagtccatcggctgagcggtcccttatcccagctctcgtgcctcctgggcagggacatatcaatactgttcttgcgactgctttccgagataaacggcagctagtggactatcacgctctctgcttgtctgtgccagttgactatcgtgtaaaaagtacagggatggggcatgcaaatacgacgttaataagccagctgccattgttgactcagcagccacttagcccgttgcttagagtccgtgcactgactctaaacagtttaagcacgcattacagcgacctgtggcgagagtgctggcagccagctttccaacaagacagctgggccggcaacgactcgcgccttccgcaggacttcttcgcccagctcacccccgaatggcagcgccactgcgccctgcgtagcgactacgcccgccgtcaggcgctggttgaaatcgacgtactcgccgcccaagccctaggcctggccctgaatgagctattgaccatctaccgcgtgcagttcccggtgatgcgccagtacgagcgggatacctggtacgacgccaacggccgtatcgtttttaccactagcaagggcctggccggcgtcggtctgccgcgcaagcccggtaaaaaagacgaaccttgcaccctggttcaccccgacggccgtcgcgaaaacaaacgtctcggctggggcgacgtgatgcccaaggacggtaagccccagctcgccgacggcaccgtcgtcgagcgctgggtgctggatgacacccaacctggcggcccgatcaaccgcatcatccgctacaccgcccccttcaccctcgccgaccgcgaagccgactaccgcgtggcctgggcgcattttgaaagagggagggcatcatga

SEQ ID NO: 326650 - DNA, 2874 bp, Pseudomonas aeruginosa
atgcagttgactcaagccccagcccccggctcccgagcgctgatccgcgatgaagagtggatcatccagaacgccgaccaatgcaacctcggtggctggcagctctcctgcatcggtgtgtcggaaaccgtgcgtaaccgccatgcgctgttcctcaccgaactggaagacatcaccccaatcgatccggccaagaccgagctgatctacgacgagtcgcccaccttcaccgcctcgcgcctttttatagaggcgcgtttgcgccagtcggcgctgcagaatgatgcagtggtaattggtcagcacgcggtgatggatgcgctgccattccagctccagcccgcgcaccgggtgctagagcagttgcgcccgcgtctgttgattgccgataccgtgggcctgggtaaaactctcgaagccggcatcctcaccgccgagctgatgcgacgtggcaaggcccggcgcattctggtggtcaccaccaagagcatgatgcgccagttccagcaggagttctggaaccgctttaccatcccgcttacccgtctggattcggcgggcattcagcgcatccgccgcgacattccggccaaccacaacccgttcaactactacgaccgcaccatcatctcggtcgataccctcaagcgcgacagcgagtaccgtcattacctggaaaaggcctggtgggatctgatcatcatcgacgaggcacacaacgtctcctacaagggcaaccgcacccatagcaaccgcctggccgagctgctctcgcagcgctccgatgccctgatcctgctcactgctaccccgcacaacggcaagaaagacagcttcgccagcctgatgcgcatgctcgaccccacggtgctgccgtccggtgcggactacacccgtgaggatgtcgaacacctgtttatccgtcgctttaagaaagacgtacgcgagcagatgaagcaggacttccccgagcgtgaagtcttccgactggccgccgaggccagtccggccgagaacctggccttcgatgccctggccgaactcaaactgaacagcgggggttcgggggctcgcgacggcgttatgctgttccgcactgtgctggaaaaggccctgttttcctcgccggcggcctgcctgcaaaccctcagggagcgtatccgcaagctggagaacaaagacccgcagcatccagacctcgccggcctacgtgacctgcaaggcctggtgcaggccatcggcccgcagcagttcagcaagttccagcacctgatcgagcaactgcgcagcggccagcactggcgctgggacagcagcaaccctagcgatcgcctggtgatcttcaccgagcgggtcgagactctgaaattcctccagcaggagctgcccaaggcgctggggctgaaggacgaagcggtcgccatcctgcacggccagttgccggatcaggagatccagcaaaccgtcgagtacttcggcaagacccactcgccgctgcgtctgctgatcgcctcggacgtcgcctccgaaggtctcaacctgcactaccaggcgcacaggctgatccacttcgatatttcctggtcgctgatggtgttccagcagcgcaatggccgggtcgaccgctacggccagacccgcgcaccgaagattgcctacctgctcaccgagccacgccacgaacgcattcgcggtgacctgcgttacctggagatccttatcgacaaggacgaacaggccgccaagaacatcggcgacccatcggcctttatgggcctgtacgacgaggagctggaagagctggaagtggccaaggctatcgagggcaacgccaccctggaaaccttcgaggcgctgctggcaggcgatgacgttgatccgttcgaggcgctctgggccagtgccagtatggcggaagcccccgccgtctataccgtgcagccccaaagcgccccgactcaggagctcaccagcctgttcggcaacagctaccagtacctgcgtgatgcgttgcgcctgctggccgagcaatcgccgcgtgactatccaccggtcaaatacgacgacgccaacaagaccctgagcttccagcccagtcgcgatctggcgcagctgctcaagcgcgatctggccagcgagatgtggccggaagacaacaccttcgccctgagtgccgataaaaccgtggtcgagtccgccatccgtcaggcccgcgacaccaacgcctggccgcagctgcactacctctgggcgctgcacccgattgcccagtggctcgactacaagctgatggccctgttcggtcgtcagcgcgccccgttgctgcgggtggctcaagggctacatgccggtgaggccattgtgctgatgctggcgcaggtgcccaaccggcgtggccaggccgtgctcgccgagtggatgggcgtgcagctgggtgcagccgggcaggtacagggcgtactcagcctggaggaagcgctgcagcgcaccggtcttgccagcaacctcggcagcggtgcgaacattcgcgccaacgatggcaacgtaccggatgcccgcgcactgcaagcgtcactaccaggtgtgattcaggccgcccagcagcacattaagccaatcaagcaggccttcgatgccgactgtcgatcacggctggatcgcgagctgggcaagctgaaaaccctgcaggacaaacatgctgcccagttggagctggatttcgccaagggcatcgagcaggtcgttgctgccaagcgcaagcagaaggaaagctacaccgccgagctgttcaacaactaccagcaatggatacgcgacaccctgcaactggacgaccgcgcccagttcaccgtggtcgcggccctgatggcgtaa

SEQ ID NO: 326651 - DNA, 174 bp, Pseudomonas aeruginosa
atggacccacagcttctggtgatcgatgagatcggttacctgccgtttggacgcgatgaagccaacttgttcttcaacgtcgtcgcccgccgttacgagcgcggcagcatgatcctcaccagcaacctgccgttcacccagtgggctggcccttcgccgacggtcagacgctga

SEQ ID NO: 326652 - DNA, 1731 bp, Pseudomonas aeruginosa
atggaacaattcacgcagttcagtgttgagaagcaggctgcgctcggcacgctggagaaattgcgcggtgtactggatgccctgcacgagatgggcgtgaatgtggaaggtgacctgcagaagatcacctcggccatgcaagccgtggagtccgacgtgctacgcatcgccctgctgggggctttctccgatggtaagaccagtgtcatcgcggcctggttgggcaaggtgatggaggatatgaaaatatccatggatgagtcttcggaccgcctcgccatctacaaacccgaagggctgccggggcaatgtgaaatcgtcgatacacctggccttttcggcgacaaggaaaaggaggtggatggtgagcaggtcatgtatgaagacctcaccaaacgctatatctcggaggctcacctcattctctatgtggttgatgctactaacccgttgaaggacagccacagcgagatcgcgaagtgggttctgcgcgatttgaacaagctatcttctacggtgttcgtcatcaacaagatggatgaagtgaccgacctgacggagcaggttctgttcgaagagcaggctgccatcaagaaggaaaatctcaagtccaagctgcagcgggcggccaacctgtcctcggacgaactgacgcggctgaacatcgtctgcatcgcttccaaccccaatggtcgtggcctggagttctggttcggcaagcctgtgcattatgagagtcgttcgcgtatcaacgatctgaagagcatgaccgggcagatactgcaggcgaacgtatcagaagtgctgattgccaagaccggtttggatgtggtgcgagatatcgtcgggcagcgcgtcgcatttgccaaggagcacctgcaggggctggagctgtttgcccagcagcatgccgaggagtcgagacgcttcgagcaggatatccaacaggggcgacgggaagtcaaacgcctggctggcgaactggccagcgaacttcaatctatggaagcgcaattgcttggccgactgcgtcccctctccctagaagatatccgtggatatctggaagatgagcttggttatacggaggagggggttggctacaagctgcacctgcgcatcaagaatgcgatagatcgctttttcgatcactcctccgcagtgaccaagcgattgtccgacgatatagcccgacagctcaattctagcgaaagcttcatcagcgctatgagcgaaggtgcactcaactcactaagcaacgctttcaagggcatttcgaacgtcagcccggaggctatcaagtcgaccatttttatcgctcgtgacactctcggtaagctgactggctacgtctataagttcaaaccttgggaggccaccaagctggccggaaacatctccaagtggaccgggcccgccggcgcagtcgtctccttgagttcggacctctatggtgcttacaaggtgcatgaactggagcaggagctcaagcaggtcaaggactccatcaccagccttatcaaaggggccttcaaggatatctacgacttgcttagtgacgacgagaagaccttcgatttcttcgctccgcagatcaaggaggtggagaaggtcgtgacggaaatgagtgagaaagcctcgagcattcgaaagaaccaggaaaaactgatttccatcagctcccagctcgaacagctgaggttgcctggcgctgccagtattacggtttga

SEQ ID NO: 326653 - DNA, 1560 bp, Pseudomonas aeruginosa
ttggtgcggcgggttgatggcctgattatcggtacgggtgaagcggacttcacaaagggtaatacggcctacacgctgaactacaaggacaagacgttccagttgctggatgtgcccggtatagagggcgatgaagccaagtacgttgacgatgtgtgcgaagcggtggccaaggcacatttggtgttctatgtaaatggcacgaacaagaagccagagaaggccacggtagagaaaatccgctcttacctgcgctggggcactcaggtctgcccgctggtgaatgtgcgtggtagtgccgatgcttatgagttcccagaagatcgcgaggcgctggagcgccacggcggcgcggcctctgcattgaagcagacgcttgaggtgctggggccagtgctcgggcctgaagtgctcatgccgggccagtgtgtccagggtttactggcgttttcctctcttgccttccactccgcgagtggagagaccagcatccacccctgtagggatcgtgatctcgttatccagcagcgtaactacctgaagcacttcgagtccctgaaagcgatgtatgagttcagtcagatcaaggctgtggctcgggtgctgcacggcaagctggcgacgttccagcaagacatcgtggaaagcaacaaggccaaggtaagtgggttgttgtctgggtacttggcggttctacatgaacaacagcaggagcaccgggttttcctggcgagggtggcgccggaatttgaaaagtgtcgtgtggccttcaaggaagctatgaagacattcgagcgaatgtcgctaactgggcgcgagaacgcctggaacgaactgttcaatgagctgacgtccgatgcggacgagatagttgccgagcatttaggcgatgcggatcacatcaagtcggctattaaccaggcgttcaagaagcgccagttcgtcaccggtgagcgcctgcaggagcatttcgacaagaacatcggcaagttgatggagtcgcttcagcaggcaatgactcgactgcttgaggatgtgcagcgtgtggagttccagcaacgagtgagcttcaacacggaccgacgatggaacctggatgacggtattgatctcagccacgggcttggcctgggtgacttcagttcgatggtgcttcagatcggcacctatgccttcacgggcgggactatcggcagtgcatttccggtaatcggcactgccattggagttgcagtgggtgctgcagtaggtgtgctgctgggtctcctcaatctgatgcttggcagggataagcgtgtccgtgctgctcaagggaaggtccgagagagtatcgaaagcgtccgtaaccaattgctcagtgacttaccggcggaggtgagagctttggtgacgtccataaagaaagaaatcaacgacggcatgctagctcaggtcgacagactgcacgaaagcttgctgcgtccgttgagcattctggagcaacagattgctctgatgaacaaactgaagggccagttggagaagatgccttatggaacaattcacgcagttcagtgttga

SEQ ID NO: 326654 - DNA, 597 bp, Pseudomonas aeruginosa
atgagcgctgcccaggacttcaaccgcttgtacaccgatgtggccgagaatatctcgcgggccctgtctgatattgcagagttgaaggtggagaacaaggacggtcagcagcagctaagcgaaatgacgcagcggttgcgagtgatccaggaacgcttcaacacggagttggacttcctggaaaaccatgctgagtgggacaggttcaccatggcgttcttcggcgaaacaaatgctggcaagagcaccatcatcgagtctttgcgaatcctgttcaaggaagagtcccgccagcagttgctgcagaaaaaccagtcggatctggagcagtttgaacgagcgctgaccgagttggtggagcaattgcgaactgatttggggcgagtctacgtagagtatgccggtgaagtcgcgatggtacgccaatgcactgaccgactggcgaagacagttgaagctgagagcagtgcccgtttgcaagtcgctcaggatgagtcttccgtacgtgtcacgcgcaagttgatcgcggcagctgttgccggggttgccgtcggggcaggggggatggtattggtcctccaactggtagggggctga

SEQ ID NO: 326655 - DNA, 279 bp, Pseudomonas aeruginosa
atggatttccttaccttgctctggggcatcgtggctttctcgatgatctgggggctggtcagtgccgggctggttgtctcgttctggctccgttgcgacattttgcaagggcgaaatgaagtactgcagcggctgctggaagctgaacgctcagaccgcgcaaggttggcaagtaacctaatggaacagcaggcggctcttcgggcggagcggtttcatgtggagcaattgacccgcaaagtggaactgcttcagttgtcgatcaaccgagaatcttga

SEQ ID NO: 326656 - DNA, 876 bp, Pseudomonas aeruginosa
atgaaacgcaagcagtcaatcgaatcagtgcgctgggatctcgcgctgcgctatcgcctgatcgagaccgtagcatggtgggaaggccgtctgaccaccaatcacctgattcagagcttcggcatcagccgccagcaggcgtcgaaggacatcaactcctacatcagcgactacgcgcctaagaacctggaatacgacaagcgtttgaaggggtacgtaccaagccgccacttcaagcccttgttcatcgacgatagcgccagcgcctatctacacctactcaaccagaaccatgaccgcgccccgcatatcgaggggctggcattggcctatgcgcacaccgaggtgctgcaggtgccggatcgcacggtacgcccggaactactgcgccagcttctgcgcgcctgccgcgaagggctacgcctggagtgtgagtatgtgtcctttactacaccggatgccgagacacgcttgatcgctccgcatacgctgatttacaccggcatgcgctggcacgtacgcgcgtactgcgagaagaatcgcgactaccgggacttcgtattgagtcgcttccgcggcgtgcctgagctaatggacgacggaacggaacacactcgcgagcatgatcaagggtggggcactgaggtgcaggtaatcatcgcgcctgactcgcgcctgaaacccgagcaacaagccattatcgaaaccgactacggcatgcgcgatgggcgcctgattatcgagacccgcggcgcgctggtgcagtacgtgctgcagcgctatcagatagacacgaccaaagtgcataccaagccgacagcacagcagatcgtggttgtgaatttggatgagttacagggctggctttatcactga

SEQ ID NO: 326657 - DNA, 1059 bp, Pseudomonas aeruginosa
atgagtgttgatacgtatcgtcgtcaggttgccagcgctcgtgatgctttggcaaagctagccagcctgaaggctagggagtcccaaaaggcggttgatgctggtaaaaagtctcatgccgctggaattgctgccagcaaaacgaagcagttatctatagctacttccaagcttaaagaagcaagccgatatgctgatttgcaatctaagcacttgcttgaggttgccaagctggagaagaaagttgctgcagagcagaaaaaattagcgacagctgagcagcgtttggaaagcgaagaagcgaaggcagttaaaaaaagagctgtggaacagcgaaaattacaggaagcacagactaggcaattccgagaggttgagtccagcctgaaaacgcatgattccctgcatcggcaagctgcggcgcggattgataaattggctgcgctgcctgaagaaattaaggttgcgttctttgcgaccgatccagcgacagcctctgatcgcaggctattactggatgaagaagtccgagaaattcaccaaaaaattcgactttcagatcatcgtgatgcggttaagctcgagtcgagatgggcgttgcgtccaggagatatcttgcagtacatgaacgagctaaagcccacgattgtgcatttcagtgggcatggcagcgatcagaatgagttggttctgcaggatcgaaatggtgacgctgcatttgtaccgatggcaagtattgtcgctactttcgaactttacgactcggtccggttagtgttttttaatacgtgtcactcatttaatcaggcagctgcatgcacgcagtatgtggatgcggctattggcatgaatcagtcgattggcgacgaagctgcccgcgtattttcagcgcagttttactcagctatcggcttcggctgctcaattccgatcgctttcaagcaagccaagaatgcgctgatgctggaaggcatttctgaagagtccacaccagagctataccttcgcgatggtgtagatgagagcgacctcatattggttaagcccagggctcagtga

SEQ ID NO: 326658 - DNA, 132 bp, Pseudomonas aeruginosa
atgatcacgttaacctcgctgattgaacaaattttcttgatggttactttgatcctgatcctgatcctgatcctgatcctgatcctgatgctggggttggctcgtttggcttatggcggacagatagactga

SEQ ID NO: 326659 - DNA, 756 bp, Pseudomonas aeruginosa
atgatcagaaccgtatcgctcctgtccggcctggtgctgctgctgagctatcccgcagtcggccaggaggctgcggcaagccgagagaccagcagccagctgtccggtagccaactcggcacgctgaaacaacagacatctcagagcgacctggcccaggagtggggactgaaccaacaggactggacccgctaccagacgctcatgcaaggcccccggggcgtgtactcgcctggcattgacccgctgactgcgctgggcatcgaggcacgatcggcagaggaacggcggcggtatgccgatctacaggtccaggccgaacggcgccgggtcgagaaggaactcgcctaccagcgcgcatacgacgaagccttcgcccgcgcctatccaggcgagggggtgatccgcctcaccgaaagcagcgcggccaacccgtcgggcgcgccgaacatgagcccagcgttgcagagcagcgggcgcctggccctgttcgtccaggacaactgcaccgcctgcatccagcgggtccgcgacctgcaacagcagaacaaggagttcgacctctacttcgtcggtagccagaacgacgcagagcgagtgcggcactgggcaatcctcgccggcatcgacccgaagaaggttcgcagcaagcagatcacgctcaatcatgacgagggccgctggatggccctgggagtgggcggggcccttcccgccctggtacaggaggtgaacggccgatggcaacgtctgtag

SEQ ID NO: 326660 - DNA, 348 bp, Pseudomonas aeruginosa
atggcagatacgctcaccagccgaaagctcctcggccagctactggtcggagtgatgatcgtcgtcggtctggcagtggtcggtacgctgctcagcctcttcgccctgaaccacttcggcggcatccagggcctggaggcctggcggcaaagcaactactggagtttgttcgcctggcgggcgctgctgtactgcgccctggccatcgcctggttccggctcaagcagcgcaaggagctgagcgcgcatgagcggcagcgcattcggcggatcgagatcctggtgctgttgctgatcctgctcatcgaattcagcaaagcctacttccgcacgggaggcgcagcatga

SEQ ID NO: 326661 - DNA, 1536 bp, Pseudomonas aeruginosa
atgaccttcatgaccaatgactacctggagtattacctcaccctcctcggttggatcatcaacaacgggatctggaacatgatctcggatacagggctgttcgcggtgcccttcgtggccattgtgatgcgtgagtggctgaaagttcgcggggaaggcgccgacgagggcaacaaaggcgtgctgtctctggcccgcatcgagacgcatatctacgtcggctacatcgtggtcgccctggcgggaatcccggtcgtcaacgtgagcttcgacaccatcgagttcgaccaggcccgcgcccagcagtgccagtacaacctgccagcgccggcagacaccggctggtcgacctccttcagcagcctggccggcaagagtgcgcagatgccgctctggtgggcgatgatgcacgccctgtccaagggcttcaccgccggcgcggtcgcggccattccgtgcggcacggatctgcggcagatgcgaatggaagtggacaatacgcgcgtgaacaacccgctgctggcacaagaaatcgctgacttttccagggactgctacggaccttcccgtgcgcggctgttcatgcggcaacccgatctgggctccgtcggcgaggacaacaaggcgctgcaggacctgaactggatcggctcccgattcctgttgaacaccccggggtactacgacaccgactactcgaagagtccccgtcagtcgtggccctacaacgccacccgcgacgccgggctgccccaggtgggcggtggtggtggctacccaacctgcaagcagtggtgggctgactcagggatcggcttgcgtgatcggatcaagggccaggtggatccggacctgatgaccagcttcctcaaatgggcgaaatggctggaccaggacgaggtgaccgaggcagtcatccgccaggtgatttcaccgtccagccaggtcaaaggcaacgtctataccgactatggtgggcaggtgggcggtacggtctggaacggcatcgcgagaaccgctggaaccttcggtgtggccctgggcagtctggcctacttcccggcgatggacatggtccgccaggcactgccgatggtgatgtcgttcctgaagatggccatggtcatctgcattccgatggtcctggtcatcggcacctatcaactgaaggttgccatgacgatgacggtcgtcttctttgcgatgatgttcgtcgacttctggtttcagttagctagatatatagacagcacgatacttgatgccttctatggttcgggatcaccgcatctttcgttcgacccggtcatgggactgaatacggcgactcaagatgcaatattgaactttgtgatgggggcgatgttcgttattttacccatgctgtggataactgctataggctgggcaggcgtccaagttggagctctcctcagcgatctcagtaacggggtcaaaggggtccaacaggcaggagtacagggtggtagcgtagctaagcaggcaatatcgtcgttctcccccaaaggggattga

SEQ ID NO: 326662 - DNA, 273 bp, Pseudomonas aeruginosa
atggcaactcgaaacgtcgtccttcccgatccgctggagcaggatatcaacgagctggtggagaccggccgctatcagaatcgcagcgaagtcatccgggcaggcttgcgcctgctgctgcaacaggaagcccagaatagcgccaagctcgaagccctccgcaacgcaacatccagtggactgatgcaactggaacgcggcgagtacgacgagatcaccagcgacgacctggcccaatacctcgacgagctcggcaaccaggcgagccactga

SEQ ID NO: 326663 - DNA, 1056 bp, Pseudomonas aeruginosa
atgactattgaacccaccttcacgtattctgagaaaagccacattgagaggcttcgccctggaaactccggcagctcggaagatcaattcatccaagaagttatcgacttttatcgctattggcagagcaagcgttctcttggcgactatggaagcacggaacaggcgctcttgatgatttttgcggaaacgccggacgtcgatttgggacttaaagactatgtcccaacaacgatctcacgcataagaagacgttcgggtacggtaagtcagggcatagccgtttgcaaccagaactttcgcctgatggtaagactgctcgacgcactaactgttgacgaggcgtatgacttcatcgagcaccacctcggcgatcaacacacttttgtgattgccaagttcggccagcagactatccaaatccatcgtgcaggccagccgttggatgactggattcatgagccggatgaaattttgatcaagagcaccgatgagaatattacgcctgacagtttggcggaggatctacgcgtcttccatcatgaatggctcagtactccacgtgcgattggtgcgcggaccatgtgggagctgaacaaaacaaagacgcagtacgacttgcgcagtggaccagagcgtagtgttcagtcgtacttgttgacttacttgagggcttcctaccgaaggtcaggagtgtttgttaatgaggagataaacaatcagggggggagaacggacctgtatgtgcagcgagaaacaagtccagggtcgaacaaacagataaacacagtcatagagcttaaggtgctatcacctaagaagtctttcgagcgaaatcttgagtgggccaaggaaggaatcactcaggctaaaggctatgcaaatgcgaataccgatgcggcttttgcatgtttatacgatgcgcgacgcaataagcttgctatgccagagcttccggcctttgcgttggctaactccgtaaggcttgagcactatgagatggaggtgcctctaccgccgccaaagaagaaacctgctaagatggcaaaagcatag

SEQ ID NO: 326664 - DNA, 693 bp, Pseudomonas aeruginosa
atgctaagtgataaggcgctccttaagcgtgattacgaaaagctacagtttgtaaggtgggttcttttcttaatcacggcggcagaatctgctgggttgaactcattaagccgagctagactgcatgcgctattgtttatgtcctttgcttccgctcggttttatgggttacaaccgttgcgccagcgtgcgcaacgaactccgcatggtccttattatcgggcagcccacttggccttagggcatttagtatttgccgatcttgtctccgtttctggatttaaggctcatccgtcgcctaaggatctacaatttgacggggtgttcaagcttaaaaagaatggcttgcaggtctgcaaggttcttcgtcaaactgatatgggtaggagaatttatagtttcctgcttgatatctgtcttggcgcggtacaatcgctcgaggcggaaggtatcccggaggagcaggaaggacagtcgctggatcggatgctggttcaggacctgacgtatgtatccgccttgagacggccaggtgaaatgcttctgatcgaagaggatgggagcgaaaacacgccgaccgtcgagggacttagaaaaatacaatctatactcggtcacaagacttttatcaataggaaagatgttctgagtgcctatcagtcgatcctgcgagctcgagcagaggtggcatga

SEQ ID NO: 326665 - DNA, 2034 bp, Pseudomonas aeruginosa
gtgcgttctagcatcagccttccagttattgagcggttggtaatccggaacttctcactctaccctggtgagcatggcaatggactggacattgcattcgaaaatggcatcagtgtgattgcaggtatcaatggtattggcaaaaccacattgctaaccctattgttaaggttattgctcgggccgagtaacccggaaaaggcgaccaagaatgtggggcgggtaagccagcgacgcttggttgagccaaagaagtttgacttcttctcaagccgggttcctgaaaaactggacgatgatgcctacgccactttgtatttcagcgtggggcagaggaaagtggaggtctcgcgatacatgcgagatatgcgtataaagggagtgaaggtttccggacgcaagtatacaccagcaggtgagacggcatttattgaagagctggcctccatgagtggactactatcagcgtacgactttcacatggtagtcagatatcttcagtttttcggtgaggaccgtttgccgttgctatgggagccgtcggctcagtttgaattctttaagatactattctttgacgagtcagtggccgaaacgttaaataagctttttgcacttattcaaaaaatcgactctgagtatcgcaatagaacaaatattctaaatcgcagaaaagatactctaccttctctagaacgtccagccttgtccattgaggttcaaacatctcaaggtcagctcaaagaggcgaaggcggccgccgccgaggccgaggttgagtacatcaatttaaagcaagaatttgacatgttgcagcgcgaagagaatcagctgctgctccagaccgatgatgggcaaataaaacttgctgaacttgaggctcaattcttgcaggccgactccaaatttattcttcaggctttaccctcgcttggagataaggagcgttttttaatgcagggctatgctacgggctgcggttgtttcatttgtggagcaaagtcaaaaaaacagctgtctggtatcagcaagaaaatccgtaaaggacattgcttcgtctgtgactctcagaccccagcatcgaacccgcccagcatcacccccataaatgtaaacgatatccatagaatcgaggcggatcttgactcgattcgacgacacctagctgcgaacgacgcaaagcttgctgaaattgaggagcataaagctagaatcgcaccgctattaagatccgcagcgaccaagcgtgcccttacgctgcaagcagttgagaccttggatatgttgcgccctgtcgatgaaggacaggagatgtatgacgtctactcagagattgaccgagagcaagctgagttggacgtactagctgaaaatcgcaaacgctacacatcggagtatcgggcagccgtcgataatgcacaggaggaaatgtcaactttgaaggctgacctcgaaactcgtctgacgaactacgccatggagtttctgcaggagcgcgtgagtgttgccttcaatcgccagacgccgttcaagatcgccactggtgcagatcgagtcaatattcctgccttcaccgtcaagatgacttccggcacccataagctgccaagcgagcgatcaagcagcagtagcgtttctgaatcccaaaaagagtttctcgacctcgcgtttcgcatgacgttgctcgatatgatcaacactaatggccagaaaatgctggtgattgagacacccgaagcgagtctggatagctggttcatgcgtcgagcggcggatctaatgcgtagttttgcccctgaagattcaacggcaccgagaaaggtaatagcgacctcaaatctcaatggcacggaaatgattcctgccctgttaggactgatcgacgcaaaaggcaaaatatcgaagctacagagccatcgatccaaccactttataaacctacttgaactgactccttcgcccgcagcgctctccgaaggtagagcggttcaactgctgcatgaagagcttgggaggttcttgaatgctaagtga

SEQ ID NO: 326666 - DNA, 1263 bp, Pseudomonas aeruginosa
atgcagatcgcatttgaccaatggactaaaggccgcaaaatcaatacgttagggacgaatgcgggcgcagagaaactgccctttcagacttggcggcatttcaaggaggcattcgcgccagaactcgtcgcccgagcggtcagggaaagtctccttcctgtccgcacctgtatcgacccttttggaggctcgggaacaacggctttggcctgccagtttctaggggttgagcctgttaccatggaggtcaatccctatctggctgatctcattgaagcgaaactcaccgcctatgacagcacgtccctgactcatgacttgggtcagatcattcgtgcggtgcgcagcatacgaggcgaccacgacctgagctggcttccaaccacatttgtagctccgggagtcaataatcgttggctgttcgaacatgacgtcgcgcaaagaatcgagtcctaccgtaaggctattgccagcctatccaatcccatccatcagatgttcttcagagcgatccttggtggctttctggttgaagtaagtaacgtgctcatcagtggcaaaggacgtcgatacaggcaaaattggcagttaaggaaacagagccctgagacggtggatcaacaatttctgaacagggttcaaaaagcgctttacgaaattgcccgttatgcgtctcgccccgtgtcgaagtacacactcatccggggcgactgccgcgaaacgatcgcgaatgcgcctatggcagatctcgcggtattttcgcccccctaccccaactcgttcgactataccgacgtatacaacgttgagctgtgggtgctgggctacctgaacgactccgctgataatcgttcactgcgtcagtcgacattggcgtcccacgttcagattcaacgcaactacgcaccgcgcccacttggatcagcaacgttggatgacgtttcgaagaaactgcatgccagtcgtgagctgctttggagtcgctggattcccaacatggtcgacggctattttgcggacatggccggcgtgatgaagtctttggccaaccgtttgcctcttcaaggtgaagcatgggcggttgtaggggacagtctttatgcgaacattcacatccccgtagcagagatcctgaccgagctcgcgcccacctgtggatttgaagcagtacacgttgaggcgtttcgctcaatgagatcatccgcgcagcaaggcggaaagcaagaactagcagaaagcttggtcgtatttcgcaaggtataa

SEQ ID NO: 326667 - DNA, 579 bp, Pseudomonas aeruginosa; identical to SEQ ID NO: 323297

SEQ ID NO: 326668 - DNA, 2277 bp, Pseudomonas aeruginosa
atgactgagcagggcggcgaggcgctgtaccaggtggcggtgcgcgcgctttgcgagttcagcgccaagcgcggcgacctcgacctgcgcttcaccccgtcgcccagcgccctggaaggcatcgccggacataccctggtgacctcccggcgccccgctcactaccagcgcgaagtggcgctggacggacgctaccgtcacttgcaggtgcgcggccgggcggatgggtacgatccgcaggcgaactgcctggaggaaatcaagacccaccgcggcgacctcgccctgcaaccggccaaccaccggcacctgcactgggcccaggccagggtctacggctggctgctctgcgccgaacggaagctggaggaagtcgaactggcgctggtctacctggaggtcggcagccagaaggagacccgcttcgtcgagcgggtgcgggccgacgagctgcggctgttcttcgagagccagtgccaggcgtttctcgcctgggccgagcaggaactggcgcaccgccagcggcgcgaccgcgaactggccgcgttacgctttccccacgccgaattccgccacggccagcggcaactggcggaggcagtgtacaaggccgcctccgccggttgttgcctgatggcccaggcgccgaccgggatcggcaagaccatcggcacgctgttcccgcaactcaaggcgatgcccgggcagcgcctggaccggctgttcttcctggccgccaagaccccgggccgggccctcgcgctgcatgccctgcgtagcctggaaggggagaccggcggactgccggtgcgggtgctggaactggtggcgcgggacaaggcctgcgagcacccggacaaggcctgccacggcgagtcctgtcccctggcccagggcttctacgaacgcctgccggcggcccgcgccgccgccgtggaggcgcgctggctggaccaggcgcggttgcgcgaggtggcgctggcgcaccgggtctgtccctactacctgggccaggaactggcgcgctggtgcgacctggcggtgggcgactacaactactacttcgatctcggcgccatgctccatggcctggcccaggtcaaccagtggcgggtggcggtactggtggacgaggcgcacaacctggtggagcgcggccggcggatgtattccgccgaactcgaccagggcgatttcctcggtgtgcgcaaaaccgccccggaggccctgaggaaaccgctggagcgcatccagcgtgcctggaacgaactgggcaagacccaggcggacgactaccaggcctacgacgagcctccgcagaagctgctcctggccttgcagaacgcggtggcggcgatcaacgacctgctcgccgagcaaccgcaggcgctggagccggcgttgcaggagttctacttcgcgatcctgcagttcggccgtctcgccgagctgttcggcgagcattcgctgttcgacatcgagaagcgcccaggccgcaacggccgcagcctggcccggctgtgcctgcgcaacgtggtgccggcggcgtttctcgccgagcgcttcgccgccagccgctccaccgtgctgttctccgctaccctcgggccgcgcgactattacgccgacctgctcggcctgccggcgggcacgccctggctggaagtggactcgccattcagcgccgagcaactggaggtgcacatacagcgtcgggtttccacgcgctatgcgcagcgccaggcatccctggcgcccatcgcagcgattctcggcgagcagtttcgccagcggccgggcaactacctggccttcttcagcagcttcgattacttgcagcaggcgctggacgtcttccgccaggcatacccgtgggtgccgtgctggagccagacgccacggatggacgaggcggagcgccgggtcttcctcgagcgcttcgtcgcgggcggcgagggcatcggcttcgccgtgctcggcggtgccttcggcgaaggcatcgacctgcctggcgagcgcctgatcggcgccttcatcgccaccctcgggttgccccaggtgaatccggtgaacgagcagatccgcctgcgcatgcagcgcctgttcggtgacggctatgactacacctacctgtatccgggactgcagaaggtggtccaggccgccgggagggtgatccgcagccgcagcgatcgcggcgtggtgcacctgatcgacgaccgtttcgcccaggccaaggtgcgccggttgctgccgggctggtggcaactgcgttga

SEQ ID NO: 326669 - DNA, 210 bp, Pseudomonas aeruginosa; identical to SEQ ID NO: 318959

SEQ ID NO: 326670 - DNA, 528 bp, Pseudomonas aeruginosa
atgcagcgcgcccgtttgccggaatccgcctgctgcatgtcgcgtcaccttccatcgtctttcgtttccctgcgcagcctggccgggcatgcgcccgctgtgctttgcgtgctgctgctggcgttgctcagcgccagcctggccagccagacgcgctcgctgcgccgcgagctggcggaattgcccgccgcagcggccccggcgccgccagccaacccttcagcggccccgcgcgcggcgttagccggcttgttcggtggcgctccgtcgccgcgcggcgcgacggcgggcgagcgtctgcaattgcgcctgctggcctgcttcctggcgcgtcgcgaggaccgctcggcggcgctgatcgcggtggccgggcgctcgcagcgcttcctgccgggcgccgaagtgcgccccggcaccgtgctgctggcggttcatcgcgaccatgtggtgctgcgcgaccagggttatgaagaacgtctgtatttccccaaagccgaaggggcagaaaccacccatgccacgttgtag

SEQ ID NO: 326671 - DNA, 2331 bp, Pseudomonas aeruginosa
atgccacgttgtagtacccgttccgcccagcgcctgtctccgctgttcctggtcctgtcgctggccgtcctcggcctggcgccgccggtccatccggcacctgccgagactgccgccgcgcaagaggaagagcagtggacgatcaacatgaaggatgccgagatcggcgacttcatcgagcaggtatcgagcatcagcggccagaccttcgtcgtcgatccgcgggtaaaggggcgggtcacggtggtatcccaggcgcggctcagcctggcggaggtctaccaactattcctttcggtgctcgccacccacggctacgcggtgctgccgcagggcgaccaggcgcgtatcgtgccgaacatggaggcacgccaggacgccgcgcagaagaccgtccgcgatgggccgggcagcctggagacgcgggtggtccaggcgcagcagacctcggtggcggaactgatcccgatgatccggccgctggtcccggcccatggccatctggccgccgtaccgtcggccaacgcgctgatcgtcagcgaccgccgcgccaacatcgagcgcatcgaggcgatcgtgcgcagcctcgaccgggccggcgaacatgactacagcatctacgacatgcgccatgcctgggtcgcggaaatcgccgaggtgctcgatcgcagcgtcaccccggccgccgggaagagcgccgccaccgtccaggtccttgccgacagccgcagcaaccgcctggtcctgctcggtccgccgcaggcgcgagcgcgcttgctgcggctggcgcagtcgctcgacgtcccctcgtcgcggtcggcgaacagccgggtgatccgcctgcgccatggcgacgccaagacccttgccgtcaccctcggggagatcggcgaatcgctgcacggcgagcggggccaggatggccggggaagcggcaagcgcggcctgctggtgcgcgccgacgaatcgctgaatgccctggtgatcctcgccgacccggaggatgtcggcctgctcgaggacatcgtccgccagctcgacgtgccgcgcgcgcaactgctggtggaggcggcgatcgtcgagctgtccggcgagatcggcgacgccctcggggtgcaatgggcgctgcgtagcgggcatgtcgccggcggcgctggcttcgccgacagcgggttgtccatcggcaccctgctgggcgcgttgcaggccggcaagccgccggcagagctgcccgacggtgcgatagtcggcctcggcagtcgcgatttcggcgcactggtcaccgcgctgagccgcaatagccgcagcaacctgctgtcgacgccgagcctgctgaccctggacaaccagaaggcggaaatcctggtcggccagaacgtgccgttccagaccggcagctacaccaccagcgccagcggttcgagcaatccgttcaccactgtcgagcgcaaggatatcggggtgaccctcaaggtcacgccgcacatcggcgaggaccgcatgctgcgcctggagatcgagcaggaaatatcctccatcgcgccaaccgccaccctggcggcgaaggcggtggacctggtgaccaacaagcgctcgatcaagagcaccgtactggctgacgacggccaggtcatcgtcctcggtggattgatccaggacgacctgcagcgcagcgattcgcgggtaccgctgctgggcgacatccccggcgtcggccggctgttccgctcgtcccgcgagacccgggtgaagcgcaacctgatggtcttcctgcgaccgagcatcgtccgcgatgccgccggcctggagcgcatcagccatggccgttaccgttccatccagttgctgcgcggtgccgccggcgaaccggcgcgcccgctgttcgaggatgccggcgccatcgacctgcgtcccgccgcccaggtcgcaccggcacctattggctcgccgcgcagctatccggctccagccccggtgctgatggagaagccgcgcctggcggacccggcgtccctgggcgacggtcgcggcggcgaggtgctggaggttcgccagggcacgcacgcgccgcagccgccgtcaccccagcgctacgccgtgcgattggtcgagggcagcagcgaagccttcatgcgcgcgctgatcgagcggcatccgggcctgtcgttgcgtttgcgccgcgaactgcgcgatggccaggagctgttcgcggtggagcggggcgactacctcgacccggagcaggcacgccgggccctggcggaactgcccgaaagcctgccgcgagggaaggcgcgggtgattgcgcatacgccgggaagcgccctgtga

SEQ ID NO: 326672 - DNA, 240 bp, Pseudomonas aeruginosa
atggacgacatcgagaccagagtgaggaaactggtagccgcccggttcggcgtggaggaatgcgacatccggctggacagcgacttccgtaacgacttcggtgccgagtcgctcgaggtagtcgaactggtcatggccctggaagcggagttcggcgtcgagatcgccgatgacgatgcggaacggatcgagaccgtgcgccaggccatcgactatctcgaggaagccgtgccgacctga

SEQ ID NO: 326673 - DNA, 426 bp, Pseudomonas aeruginosa
atggctacacgacggaaaacaacaccccaggaaatcgatgatatccaggaccgcatgggttcgatgcgcgagctcgatttcgacgagcgccgccaggcgcgtaaggcgcggatcggcgacgagcggcccgaggccgaggtggaggccgaattttcctcgcggcgggtacgcgaggcgggccacgctggcgggcagccggacgaggacgatggttaccaggataacgtcggcatggacgatctggcgccggaaaccctgatcgacgaaagcggcgcccgctcgccggccgagcgcggcggcgaatcgcccgcggacaagcgcctgagggtcgtgcatggcaacgagatcggagccggccacggcctcgacgaggccgagctggcgcgtcgtgatccgctcgacggttcctccgacgaggaacgctga

SEQ ID NO: 326674 - DNA, 792 bp, Pseudomonas aeruginosa
atgagcctttcccccgccgatctcaagcaactccaggccgccaagaacctgctggaaaaccctggactcaccgcgcaactcaccagcctgctgggcacgccgatcgaatacggcctgaagaagctgccacggaaggtcaacgagaagctcggttcggtgatcgagggagcgctgctgaaagtcgcccgctcggccaccgccaccctccaggaaaacgccagcggtcagccggcgaaccgcctgcataccctcggcgccgccgtttccggtggcgtcggcggcttcttcgggccgctggcgatgctggtcgaggtgccggtcaccaccggcatcatcttccgttccatcgccgacatcgcgcgcagcgagggcgagtcgatcagggacatggacaccctgatggcctgtatcgaagtcttcgccctcggcggcaaatccgcctcggacgacgcgtcggagtccggctactacgcggtgcgtacggcgctggcccagcaggtcaaggcggccgccgacttcctcggcaaggacgccggcagcaagaaggccgcgccgatgctcctggccctggtgcgcaaggtcgccgagcgcctgggcgtgcagtattcggaaaagcttgcggcgcagatcgtgcccatcgtcggtgccctcggcggcgcggcgatcaacacggtgttcatgaaccatttccaggccatggcgcgcggtcacttcatcgtccgccgcctggaacgccactacggcaaggatgtggttcgcgacgcctacgccctgctgccccggcgcggctga

SEQ ID NO: 326675 - DNA, 1023 bp, Pseudomonas aeruginosa
atgcatcacggtatctccccgccccaggacgccgacctgttcggcctgatctacggtttccgtttccgccccggcgaagcggggcgggaaatcgactcggttaccgccctcgcctgcctgcggcaggctcgcgaggaggcgccggacgagttcctctggctgcacctgaacctcgcccatgccgcctgcgagcgctggatgaagaagcatctggaactgccggattatttcttcgaaagcctgcgcgaggggtcgcgctcgacgcgcatcgaacacgtcgactcggcgctgctggcagtggtcaacgacgtggtcttcaacttcggcctggtctcttcggacgtcgccaccctgtgggtctgcgcccgtggccggctgctggtcagtgcacgagcgcaaccgctgcgctcggtggacaagctgcgctcttcggtgaagcacggcgaacctttccgttcgcccctgcagttgctgatccacctgttgcgcgaccagggcgacgcgctgacccagatcgtccgcgaaaccagcgtcgcagtggaccgcatcgaggaccagctactggccctgcgcctctccgccaaccgcgccgacctcggcgccatgcggcgcgtgctggtacgcctgcaacgcctgctggcgctggagcccggttcgctgctgcgcctgctcaaccgaccgccggaatggctacaggatgccgacctgcgtgagttgcgcgaagccaccgaggagttctccctggtgatcagcgacctgaccgccctgggcgaacggatcaagctgctgcaggaagagatcgcggccaagctcaacgaacagaacaaccgcatcctcttcaccctgaccatggtcacggtgctggccctgccgatcaacatcgtcgccggcttcttcggcatgaacgtcggcgggattcccttcgccgacgatcctgaaggcttctggatcatgctcgtgctggtcgccagcttcaccttcctcgccggccgctgggccttccgcaagcgcggcgactattga

SEQ ID NO: 326676 - DNA, 2754 bp, Pseudomonas aeruginosa
gtgctgcccggttccgcagtgccgctgaggctgctgccgttgctcaggttgacggtcggcgtggtcggcgccacgccatcgacggtggtgctgccctggccgctggtgttgcccgccggatcggtggccgtggcgttgaccacggttccatccgccagcggcgtggacggggtgaagctccagttgccgctgccgtcggcggtgacctggccaatcgggttgccgttgccatcggtcagagtcacgctgctgcccggctcggcggtgccgctgagcgtggtgccgttgctggggttgatcactggcgtggccggggctaccgagtccacggtgacactgctgcccgcactggtgttgccggaggcgtcggtggccgtggcgttgaccacggtgccgttgggcaacggcgtggtcggagtgaagctccagttgccgctgccgtcggcggtgacctgccctatcgggttgccgttgccgtcggtcagggtcacggtagcgcccggctcggcggtgccgctgagcgtggtgccgttgctcgggttgaccactggcgtggccggtgccacggcgtccacggtgacgctggccggcgaactggcgttgccggacgggtcggtagccgtggcgttgaccaccgtgccgttgggcaacggcgtgctcggggtgaaggtccagttgccgctgccgtcggcggtgacctggccaatcgggttgccgttgccgtcggtcagggtcacggtagcgcccggctcggcggtgccgctgagcgtggtgccgttgctcgggttgaccactggcgtggccggtgccacggcgtccacggtgacgctggccggcgaactggcgttgccggacgggtcggtagccgtggcgttgaccaccgtgccgttgggcaacggcgtgctcggggtgaaggtccagttgccgctgccgtcggcggtgacctggccaatcgggttgccgttgccgtcggtcagggtcacggtagcgcccggctcggcggtgccgctgagggtcgtaccgttgctcggatcgacggtgggcgtggccggcgcgacggcatccacggtaacactggccggcggactgctgttgccggcggcatccctggccaccacgttgaccacggtaccgtccggcagcggggtggacggcgtgaaagaccagttgccgttggcatcggcggtggtctggccgatcggattgccattgccgtcggtcagggtcacgctgctgcccggttcggcagtcccgctgagttcgctgccgttgctcggctcgaccaccggcgcgctcggcgccacgccgtcgacggtgatggaggtcgccgggctgctgttgccggcggcgtccctggccaccacattgaccacggtgccatccggcagttggctaccgggggtgaagctccagttgccgttggcatcggcgctggtctggccgatcggattgccgttgccgtcggtgatcacgatggtcacgcccgcttccgccgtaccactgaggacgctgccgttgctggcattgacctggggcgcgtcggggaagtcgggggcttcggcggtgaccggggtgctgctgttgccggccgggtcggtaacgatcaccgtcaccgtctcgccattggtcagcggcgggttcagcggaacctcgaagctgccgccgggaccgaccaccacggtggtgtccggctggccgtcgccgtcagtgtcgacaccgacggtggcgcccggctctgcgttgccggtgacgctgctgccgtccggcgccacctgcacgtcggtggccggcgccggggcggtggtgtccggcgcctcgacggtcaccggggtgctgttgttgccggccgggtcggtaacgatcaccgtcaccgtctcgccattggtcagcggcgggttcagcggaacctcgaagctgccgccgggaccgaccaccacggtggtgtccggctggccgtcgccgtcagtgtcgacaccgacggtggcgcccggctctgcgttgccggtgacgctgctgccgtccggcgccacctgcacgtcggtggccggcgccggggcggtggtgtccggcgcctcgacggtcaccggggtgctgttgttgccggccgggtcggtaacgatcaccgtcaccgtctcgccattggtcagcggcgggttcagcggaacctcgaagctgccgccggggccgaccaccacggtggtgtccggctggccgtcgccgtcggtatcgacgcccaccgtcgagccgggttcggccttgccggtgacgctgctgccgtccggcgccacctgcacgtcggtagccggcgccggggcggtagtgtccggagcggtgacctgggccggcgggctggcgttgccagccgggtcggtgaccaccacggtgaccgtctggccattggtcagcggcgggttcagcggagcggtgaaattgccgttggcatcggcgatcacggtgaggtccggcttgccgtcgccattggtatcgatgccgacgctcgcgccggcctcggcctggccgctgatgctgctgccgtcaggcgctatcttcaggccgctggccgccttcggcggagtggtgtccgggggcaccgaagaaccgccgccgccaccgccgccgctgctgttggaaatcgccaccccggcgccgatggccgccgcaccgaccagcagcgcagtccctgcgctcatgccaccgagcacaccggcgccggtcagcgactcgaaaccggccaggctttcctgcgggatgtag

SEQ ID NO: 326677 - DNA, 783 bp, Pseudomonas aeruginosa
atgaatgtactgttcgagatgaggagcggcttccggaagtcactcattgaacagcaccttttttatatgggggaggctcgcagacgcctacttactcagtttgagagtcttaatgaagaggcagcgactgcggaacaaaattttattgaggagaatggttcaaaatttgatcctgatcgagatgatgcagggagtttttatgaggaatccgctgaggcgggacgtgaattttatcgactcctgagcgatatgcgtgagcagacctaccttagtgttgctgcggggatttttcatgagtgggataagcagttgcgtcagtggctggcaagagaggttaggcgttgtggatttagcgaagcggcggagtcaaagatatggtcggtgaattttagggatatcgtagattttcttgaaggtatcagttataaagttaggagtaaaaaatatttcactcggcttgatgcgcttcgctgtgtggttaatgtctataagcacggtaacggaaactcgctaaaagagctgaagaaaagttatcctgaatatatttcgagtttctctttggctgggtctagggttgcgatggttggttgggtagactactcctatgttaaaatatctgatgaacagcttaaggagttttccgaagcgatagtggatttttggaagggtttacaagagttaatttcggtggacgatattgcttctttccctgactggtttaaaagagcgtgttgtcagggcaaaggtagtggaattttacaaagaatttgttcaagcctctag

SEQ ID NO: 326678 - DNA, 858 bp, Pseudomonas aeruginosa
atgagactgaaattaaacttcgagcaggactggctccaacacctgcaagacaccatgaaaaatacatggaacatggacatatcttccataaagccttcagagattccaattttctacttccacgccgaagctagacgcattcaacctacgccacgcacgataaagcttgcaggcaatttctcctacgacaaagaatactcagatggctggagagaaattaaaaaaaagatagagcaaggcaaggatctttccccgcacttaagcttgggcattgaaatcgcgactaataaggatgacttactatttgaatggggtgtccaccaccttcacttaggtacaaaaccgcactcaaaaaaaaccaatttcgttgagcgcaccggccctttgctttttggacacttcactcacgacacattctacgccattggaatttatactcatgggaactggtgtaatacaaccatcattgaaacacttgtaaacaactggccagagaaattttcaaaatataatatctttggaatcactaaaccagcacagatctacacagagaccgatcgcaaaaacatgcgaaagcgtggagccaacattctaaccactttacctgatgaaacgactctagggccaatcggaggaggctataatgtccaaggcatctcgtttcgcgcaataataaaacaagaccaagagaggaaactcattaaagccatagaaaatgaagttctttccctcaaatctaaaatcgaggaaaaattaattttagaagggtacagcggggaccacgaagtaaccgctcaattagacgtccgcaccaacatggtaacctttaatggctacaatttaaaaatcaaaatataa

SEQ ID NO: 326679 - DNA, 675 bp, Pseudomonas aeruginosa
atgggcatccgcacggcctgggatcttgcacaggccgacgcctggaccttgagaacgaaattcaacgtcgtcatcgagaagacggcgcgagagctgcgcggcactccctgcctggagctcgaggacgctgctccgcctaaacaggagatctgctgcagccggatgttcggcaagcggctgcatgacctcccgccgatccgcgaggcggtggccacctacgctgctcgggcctgcgagaagctgcgtgcccagggctccgtgtgcaagcgggtccaggtcagtatccgtactggcatgttcaatccagacgagcccaagttcgccaagggcgccagtatggagctgccgtatccgaccgatgacacacggctcatcaccaaggcggcgtgcgagggactggaactcctttatcgcccaggcttcgccttcagcaaagctgaggtgctgctgcttgatctccgtcagccaggtgagttcactggtgacctattcgctgaggtacagccggagcgcgcgaccaaggcaatggcggtgatggatgcgatcaacgcgcggtgggggcggggcaccgttcggccaggtggtgttcccgcggcgccggactgggggatgcgtcgcgagcttatgagtcagagtttcaccactaaagttgatcagctttggctagtgagctaa

SEQ ID NO: 326680 - DNA, 2619 bp, Pseudomonas aeruginosa
atgcacgtcacttttggcctgttcctggacgcccgccagggtccgtccccgacaaacttcttcaacactccagtagtcggccgcctcggatttctgtccctactggaaacctacctaggtctaagcgcgccggaagcatccacggtcaaacgcgttgcggtctactccggcctgcttcgggaccatgacaacaactcacgcttctacagtgagtccctgaaggccgacagcatcggtacggccgcgcgcctgctggcctggcgagacgagtggcgactcggcggctgggacggcagcgcacagccaacgaacccttcgcggctccaggagcttgccgccattgagaaggcggcgctcgaagtgctgccgcgcggagaagcggagcgcttgcacctggtggtgcaagctctacgcgagtccggccctggtcccatcaagtcagttgcgctgcttgacatgcccgaggacttcccgctcctctggcgacaagtgctcgatcgcctgcctgccgtggagatccgccttcctgaaccacagggcgaaggccaactccgcgcattgcaagacagagccctgaccgtgctggccggcggcgctgcaggcagtttggccgcgccgactgatgggagcgtcttgctggtgcacgccctcacagccacgaccgccgaaaactggttgagagcacaacactcgcacgcgcctggcgaccgactggtcctggccgaagacaccggcgactcactggacgtgtctctggcggcaacaggcggggtcaactgtgggttcgaacgcccgagtcagcttcgtccagcgcttcaggcattaccccttgccatggagatgtgctgggagcctctcgacatcaatcgactgctggacttcttgacccacccggtcggcccgttcagccgacgtgcgagaagcacgctcgcccgcgctctcgccaagcagcctggaattggcggcgaagcctggactgcggccaaggctaagctcgccgaaggtgacgacgcccaagaaatcgcaggtgacatcaccttctggctggaatccgagcgttggtctcgcaccaacggagtgcccacagatgcgctcatcgctcggatcgaccggctgaaggaagcgatgcggcgtcgtctcactggtgagtccgacgacgtggcgagcttttcggcggcgtatcgccaatgtaccgccgtccatgacgcactgaccgagctggctcgacaaggcttggcgagcgtgctgccacggcaaattgagcaggtggtcgcccacgccacgcctgctggggcaaccaaccccgctgcagtgccccaagtcggctgcatgcgttcggcgagtacggcagccgcgtgcgtcgaggccgccgacgaggttgtctggtggatgccgtccacgcctgttcttccctccccactgccctggtccccctcggaggtggaagctctcactaagcagggtgttcaactgcgagacccggcacgtgagctagtgtccttggcacagcagtggctgcggccactacttgccgcgaggaagaagtttgtcctcgcctgccctccccctaatgcagaagtgcatccgattcgccagcttctgaagaagctcgtaccggacatcgaatctggcgcgctcgatctggacactgcccttggctccacacttcttgggacaacggccgaagtgattccgcctcaaccacttcccgcgcccccaaggcaaatcctactcccgaaccctgtacagctcggggatttcgcgcagtcgttcaccacgctcaacgaactcttcaacgaccccgccctcttcgtcctgaagcgggtggctaacctggagcccagctacgtcctagcggtggaggaagacaaccgcctgctgggcatccttgcgcaccgcgtgttcgagaagctcttcgctcacgacgatgccttgacttggtcgaaccacgctgcaatcgtctggttccgcactgcagcagacatgctcctgcagaccgagggcgccgtactactcatgcaaggcgcaggtgtgagccaacagcacttccgcaaggtctgcgaaggagccatctgcagtctcctcgatcacctgaggtccgctggcgcaatacatgtgcagaccgaagtcgagttcaccggaaccctgggcgcaatcccgctgatcggcaagattgacctccttgtcacgcttggcgacaagcgaactgccgccttggatatgaagtggcgaagcgacaactactacgccggcttgcttcgctcaggcgagcacctgcagttggcactctactcaagcctcatcgaacaaacgaagggtgtcgcaccagccgcgcttggctacttcatcttagaaagcggcgcgttgtacgtcaccgctgccgacaccttcccgaaagcgcaggtcagaaggcctccagacggcgttaccatcgacacactattggaccgcgcacgcaccacttggaattggcgcaagcagcaactggacgctggggccatcgacgtcgttccggaaggcccgcccgacgagttccaaggccctgacggaacccttcaggtcaatggcccaagcaagtgggaccgtgaccacctcgttttgctgggaggctggcaatga

SEQ ID NO: 326681 - DNA, 3177 bp, Pseudomonas aeruginosa
atgatgcgcaacatcgagttcatcagcgcaggcgctggcagcggcaagacctacaagctgaccgaaacgctcgcccaggcgctcgagtccggcgcagcccggcctcatgccatcctggccacaaccttcacggtgaaggccgccacggagctgcgcgaacgagcccgctcctggcttctcgaaaagggacgcctcgacctggctacagccattggccaagcccgtttgggtactgtcaacagcgtctgcggccagatgctcaagcgcttttgcttcgagctgggtctttctcccgaccagactgttctgagcgaaggtcaatccaagcggctgctcaaagccaccctggccgagtcaatggatgcagccgcacaagcggaattggtgcggctcaccgagcgatttggcatcgagcaggcagactggtctaagactgtcgagagcgtcgtcaaggccgcgctcgacaacgacatagcgccagtggcgcttcgcacaatgggtgctcagaacgcggacttgatgctcgcgaactggccggcccctagtacaggtccagatccaaccgaggcactggcagccgcgctggacgaggcgcatcagaaggtagtcgcttatgtcgaacagcagcaggctgccggcgccaaggttgcagaaaacctccgtaagggactcgaaaggctgcagaaactggaccgcctcttccgtgaagcccgctggtgctggcctgactggattggtgcggcagggattgacgctggcgccaaggtaagggacatcttggaaccagtaaaggccgctgcccaggcccacgaggctcacccagcctttcatgccgaggtccatcgttaccttgacctattgttcaacctggcagccgacgttctagatgcctacgagcaggccaagaaggccctgggcgccgttgacttcagcgaccaagaggtactgctactgcgtgcactgaagacaaagtcaaccgtccgcgaagtcttggcggcagagctggatctcatcatggtcgatgagttccaggacaccagccctcttcagctggcgctcttcgtagagttggccaagctcgccaagcggtcggtctgggtcggcgaccccaagcaggcaatctacgggttccgcggaacggacgcgagcctcatcaccggcgtcctcggcgcaatcaaagactggggcggaaccatagggaaggccttggacacctctaggcgttccatcgagagcctcgtctcgctcaccaacgacgtctttcgctctgcattcgagcccgacctaacgcctgcgcaggttcagttgcagccgtttcgaaaggacatcccaaaccaggccgcgctgctgaactggaactttgagagcaaccgaaacgacgcggactatttgggccttgggcaggccgtccgtgagctgctggaatccggagtcaaggtcgaagataaagaaaccaaggaactccgtccgattcaggccggcgatgtcggagtgctgtgtcgctacaacgagcaggtcgagtctgccgtcacgtcgctcacgcgctggggcatcccgtcggccagcccgcgctctggcctgctggggaccgcagaagccatctatgtaatggcctgcctcaggcgcatgaatgacccgaccgacaccgtcgcaacggcactggttctcacccttgccgagggcactccggtcgagacatggctccaagacagattgcagcacctcaccaccgatggtgcaaagtcctacgagtggaagataaagggcaacagcgcccatccgctgttggcccgattggaagagctgcgtccaacgctcaatgcattgacaccacaggaagcactgcgacttgccgctgccgagtcccaggtcgcacggctggtcggccaatggtctgcctctcctcacgaaggccgcaaccgactggccaatgtcgaggcgctggtcgagttcggcaagacattcgaggatgagtctgttgccgcgaagcggccggcgacagtcagtggcatgcttcgttggctggacgaactcgccagcgaagaggacgacaatcgggccacgtcatcaaacaactccgtctcgatcctcacgtatcacggtgccaagggcctggagtggccagtcgtcgtgctgacaagcctagatgcgacggcacgcagttcactttggggcgtccgcgctaggactgttggaggctttgagccgcaacagccccttgccaaccgcttcgtccactgctggctgaaaacctggggcaaacggtcccagccccaggccgccctcaacgccgaggccagcgccactggtcaagccatgcaggccgaagccctggcggagaacaagcgcctgctctatgtcggcctgacccgcgctcgcgatatgaatgtcgcagtatccttcattcgccctcgcggaccgggacaagcttgggttgacgagattcaaggcgcaatcgcgctcttgttcggcgactcaggagccgtggcgcttccgggcggccggcagctctccaggcagtcaaagttctggagcaaggatgactgcgcagtggagccacctgccaagacatctgaggactgctactggttcacccctcgcccacgcgtgcaggccgagccgttgtggcatcgaccgagctcttcctcaggcggcatgttcaaggtcgccgagaccgacgccgtaggcgtcaggctgagcttggcaggcaagcccgacatggcgtcgttgggcacggcgctccatctgtgcattgcgcgcgccgcagtccttggtggcgtcccgggcccagacgtagaacacatcctgaaggcttgggctgtggctgactctgtggacaaggatgctgtttgcgcccaggtcgaagcgttcctgacttggatagccaagcgctggccaggctatcccgttcacgtcgaggtgcccatcgaagcggatggcccgaacggtactcgaatccgtggccgcatcgacctgctagtggaagagcccaacggctggattctgctggaccacaagtcgaaccccggcggtgccgccagagacgaagacttggtggctgagcatgggccacagatcgagtcctatagtcatgctcttctcagcgcgaccggcaagcccgtaagccagcgatggctgtacctgccggtcgctgcgcgagcagttcgtctgtcctga

SEQ ID NO: 326682 - DNA, 1212 bp, Pseudomonas aeruginosa
atggatgtggaattcctgtcggcttcgcagacgcaggcaactctcatagcgctggtcgagagctgcgagtcgatgcaatgggcagtagcctggggcaccgagaacgcagtcttcgacgcagcgatgaaaaacagctcgaagttcgagcacttcgtcgtcggcacccacatgttccagacgcagcccgaggttcttgatcgagctgcaaggctagcgggcgcagccgtcgttcctcccactggcgacctgttccatccgaaggtctacctatttcgcaacgggagacgcatccgctgtgtagtcggtagcccaaatctcacgaacgccgcgatgagccgtaacgtcgaggcaagtgttctgctggatggttcttcagacgatgcagcgctggcagaactcagtcgcttcgtcgcagaggcatggaggggggcggaagacatctcgcacgagtttctctatcggtaccgccaccagtacgcagccaaggcggcagcacgagaggaactgaccaagttcgctgatgttcggccaccttctaggccgaataccaagcgcgcgccacatgatatgagctgggcggactacctcgtgcaagtccgaagctcatcacacccgtctgcgcacctgttcaaggagcgcttgggagtcttgacaaaagcacgcgctcttttcgcgacccgcataccctacgcgaagtggagcgaggacgaccgcaagctggtcgccggcactctcgggcgcaagaagtcccagcagccaggcgtggactacgggcttttcgggagcatgggtgcaagtgggacgttcgcgaacctggtcatcgaggctcccgcaggtctctctgacgccctcgatttcatccctttgatgggcgcggtcacacaggacgactacgaccgctactgcaaagcattcatagcagccttcgaccagaacgggcgagtcggcggactgccgaccgcgaccaggctcttggcgatgaagaggcctgacgcatttgtgtgcatcgattcggccaatcgaaaggacttgtgcgagaacttcggtgtcagcccgagcacaacgaacctggagagttactggcagcgtatcatcgagcctatgcatggagatgcgtggtggagacatcctcagccgagcaatgcggctgacgccgaaatctggttgggacgcgcagcgctactggacgccatctactacacgccccgctga

SEQ ID NO: 326683 - DNA, 1233 bp, Pseudomonas aeruginosa
atgccaagtaatgaagcgcaattttctgtaaagccaggaacgataaaaaagaacagaacaaacgatatatgtatagcctatctccaagataagtggcgagagatcctaaccacaaggtttgactatttcttccaaaagtcaccagaaagtggtcagcgcatggaactgatcatgaactgcatgattcaaggtctgaaatcccttttcttgaatttttcagacttgaaggacacacagttcaataagcaagtcatgcttgatgatgtcggcatatactcccagcggatggcagaaatgctgttttattaccggcttttagggatgggctttgaagacatcaaaagcaaggatgctgggccggactttgtcgccaggaaaaatggcgagacattctgcttcgaagtggtcacaccaaccccgcaggatcatatcagaaatctcattaaacagagaaagttagagcctgaagaccgagatacggttttccgtgagcgattgctgtcggttacgtcggctatcaaggacaagttgaagaagtttgaagatcacaaagcggccgggcacgtaccagaagctgcccattacataatcgtcgtcaatgattcgctgctgttaccctatgaccagccttggtatggagtgctgggtgagctttgctttggcgatagtactttaccgattgccgtggatgcaacgcttggctctggggacatcgatttctctgatcttctcggtgaagaaccttcgggggaggatgacgtcgagttccaaagtcttgtcatgaggagcagttatgggatttctgtcaacggaggggaggcgcaaactccagaagactccttgttacgtgtaaaaatcaggaaaaaaatccccaccaggaagagcactgataccgtcgctgttgatatagccgaatctgtgggcgtgactggaatttaccagataacattgcgtgaagacctgatgttctatcattcgtttaaatctggccgaagtataatgcccgcttccgcactgatcagctcggtaaaaaataagcagttggtcagggaggctatattttttacttctaaatatgctaaagacgaggctctggtacagccatatatgtcatctgcgcgtttgtttggctacgagccagacgaatataacaacttggctgtttataatgcgttcttcaagccggtcttggaaggtggggagttttatcagccgctagaatctaaagattag

SEQ ID NO: 326684 - DNA, 294 bp, Pseudomonas aeruginosa
atgacccagaccagacgacgttttcccgaatccttcaaacgcgaggcggtagaccaggtgcttgccggtacgccgcttcgtcatgtcgccgagacactcggcattgctgaaagcctgctgggcaaatggaagcgccagtacgagcagcaaggtgacgatgcctttccgggcaacggcaagcagcgtggcgagagcgcggagcttcgtcgcctgcgccggcaactggcccaggtcaccatggagcgcgatgttttaaaaaaggcgctcgccatcttctcgcagcccacgaagtga

SEQ ID NO: 326685 - DNA, 468 bp, Pseudomonas aeruginosa
atgacctacgtgcggactgcgcaaggctggctgtatctggccgttgtgctcgatctctattcacgcgccgtggtcggttgggcgatgcaccaccgcatgcagcaagccctgatgcacgccgcgctggagatggccgtggcacgccgacagccacaggcggaggtcctgctgcactcggatcgcggcagccaatactgcgcgtacgactaccaagccttgcttcggcgacatcgcatcgtgcccagccattcgcgaccagggaactgctgggataacgcggctatggagagctttttccgttcgctgaaggccgagcgggtgtacctgacgcgctatgccagctaccaggaggcgaaaaccgacctgttcgactacatccgcttttacaatcaccgtcgtcgccactcgacgctgggctatctcagcccgatggagtttgagcggcgctatgcgagcagtaactcttaa

SEQ ID NO: 326686 - DNA, 807 bp, Pseudomonas aeruginosa
atggcgacgctagagcacgttcatttcgttccccactacctcgttcgcggagagaacgccgtcgcatactcccccagtagcagccggccatccattgaaggcttgccccaaatcttttgggcggattatgccccctggagggaggcaaacctgtgggcagtggaacgagcaacgactggtgacgcttctctgaagaccgtcgccagtaacttgaatggccttctgcattacgcgaagttcctggagtctcgtgatctgcagtggttcgagtttccggctcgaaaagctgaccgctgtctggtgttgtaccgaggagcgttgattaagatgcgcgatgccggccagatcagcccctccacggcgtctgagtacatgcgcaattgcatcatgttctatcggtgggtaaggcatagggagcttcttgctccacacgtccagctgtggcgggataagccctatgtccttaaatacttcgaccaggtggggttcgagcgatcgatcagcggaaccaccaccgacctcagtatcccgaaccgtaagcgaccaggccaaacgcttgaagatgggctgttgccggtctcggagactgatcgcgattcaattctggatttcgctgcagagaacgccacgcccgagctgtacctcatgttggctcttggcttttttaccgggatgcggctcggcagcatctgtgatctcaaaattcaagctcttgagcacgctgtccctgacccgtccgctgatggactgctacgtctagcggttggtccaggtggtctgtcccggaactggtggacaggtagttaa

SEQ ID NO: 326687 - DNA, 216 bp, Pseudomonas aeruginosa
atgccactggtaactgtgaaaggtatcgaaggggttttctctaccgagcaaaaggccgagatcatcagcaagatcaccgacgccatggtctctgtcgaaggcgagaaaatgcgtggtgtgacctgggtcgtttttgaggaagtgaagagcggcgactggggaatcggcggtgagcccattaccaccgagaaggtacgagctcttcagaacagctga

SEQ ID NO: 326688 - DNA, 1098 bp, Pseudomonas aeruginosa
atgaaaaagctgttttctccatacaatttggacagtctggagctggccaatagggtagtcatggcaccgatgacccgcactcggacggaagacaatgtcccgaccgaactgaccgcgctgtattacgcgcagcgggcctcggcgggactgatcatcaccgagggcctgccgatctccgacgaagggcgtggctacctgtacaccccgggaatctacacggacgagcaaacccgcgcctggcgagaggtgactgatgcagtgcatgccaagggcggcaagatcttcgcgcaactctggcacgtgggccgcatgtcccatgtgtcgctgcagccaggcaattctgcgccagtctcggcaagcgctgagcccgctgtgggtaccacggtatacgcttgggctgagcctggtgtccccggcccggttgcaccgagtgtcccgcgggcactgacagtcgctgaaattcgccgtgttacaggtgacttcgttgccgccgctctgcgcgctgtagaggcaggctttgatggcgtcgagctgatggccgcgaatgccttcctgttcgaccagttcctgagcagccagatcaacacgcgtacagatgaatacggcggatcgatcgagaatcgtcagcgcttcttgctggagaccgtcgatgccattgcagacgccattgggagttttcgcgtcggcgtgcgcatctcgccattcggtcggctgtacgacctgcgtccctaccctgaggaagaggctacctggaagagcgtcgcttctgcattgaatgagcgcgagttggccttcgtccatctcaactaccagccaacactggatgcagtaccgttcccggaaggcttctacaagagcttccgctcgctctacaaaggcacggtcatcggcgccggaggcttcaccgcggagctggcagaggccgagctgcagaacggcaatcatgacttgatcgccttcggtaccccgtacatcgcaaacccagacttggtcgagcggatgcagaacggttggcctctcgcaccaagcgatcactccaccttctacggcgtgatcggggcgaaaggctacaccgactatgcgccttaccaggaataa

SEQ ID NO: 326689 - DNA, 555 bp, Pseudomonas aeruginosa
atggacaagcttctcaacggtatcgacgttgctgctctgcaaactttcgcacagggcgtcgctgaagatgcatccaagcgtcacgcacgcttcaacgtgaggaccaagtgggagcatcagactcgcaccgtagccaccgtgaaccgttttcatctgagtggtaacgactacccgcgtgacatcaagattgctgccgacgagccactggagctgctgggcgcaaactctgccccaaacccgcaggaactgctgattgccgctctgaacgcctgtctctccgtgggctatgtggtgaacgcttcggtcatgggcatcaccatccacaaccttgaaatcgagaccgatggtgagctggatctgcgcggcttcctgggtttggacgagagcgtcaaccccggcttcgacgaaatcagctacgtcgtgcgcatccacaccgatgcgcctgccgagaaggtggaagagctacaccgcatcgtcaccaagacttccgtgaatctcgccaacttctccaaggccattcgcatggtgccaaagctggaagtcattgccggctaa

SEQ ID NO: 326690 - DNA, 672 bp, Pseudomonas aeruginosa
atgaagaaaattacggtcgaggtctggtccgactttgtctgtccttggtgctggatagcaaagaagcgcctggagcaggcaattgatgctctcggggaccaggtcgaagttgaaatcgtgccacgtgcgtaccgcttggccaaaggcatgagcccgatcccttttaaacaggcgctgctgcggaagaccggcagccaggatcgagcggaagtgttcctggaagcagtccgtgaaagcgccttgctcgaagggttggaataccggtttgactccatgcgtttcggtgacacgtccgcggctcatcagtacgtaaaggccatctctgatccggccctgcaggcccgctacgtagagcggctctaccgggcaggaaccactgaaggcaaggacatcttcagcgaccgggtcctgctggatctggcgattgaggtgggggctaccgagttcgttggtttcgaatcggcagaagccgcaattctgagtgatgaggctttggttaacggcctcggtgccggcattccgttgttcgtgatcagtggctcccagttcatctctggcgctcaggaatccgcagtgtttacccaggtgctccgcgccgcgatcgaagaactttcgagtgatgaagaggcaaacagtgcaaccagctgttcgatctcgggctgttcgcactga

SEQ ID NO: 326691 - DNA, 351 bp, Pseudomonas aeruginosa
atgtctagtatgcctaactgggaacaaaccatcgccgacgtcagtgcccgcctgaaagagttcggcgcacattcccccgacaccctgcgtggcgtggcaatgctcggtaatgcaggcaacaaaaccaatcgccttgatgcgaagacccgtgagctgatcgctctggcagttgccgttaccacgcgctgcgatggctgcattgcgttccatgcggcagaagccaagaagctcggcattaccaccgaggaagtggcggaagctctcggcgtggccgtgaacctgaatgccggtgcggcagtggttttcagcacgcacgttctggatgcgatggatagccaacctcaaagctga

SEQ ID NO: 326692 - DNA, 786 bp, Pseudomonas aeruginosa
atgcagttcaaaggtcgcaagcttctggtagtgggtggcacgagtggcattggtctcgaaaccgcgcagatggtcgccgagcaaggcggttcggttgtgatcgtgggcaaccgccctgagaaagccgaagctgcacgccaacaactggctgccgtttccggcgaagacaaggtcgcggcctatgctgtggatctgaccgatttcgccagcgtccaagcgctgatcgagaaactggccgcaagccacaaagacattgatctgatggtcaattccgcgggtatctactacccgaaagcattcatcgagcactcgcttgaggattacgacaacttcctgaatctgaaccgcgcgatcttcttcctaacccgtcaggtggcggcggagctggtagctcagggcaaacccggttcgatcgtgaacgtcaccgcggtagcagccaggcaggcggtcgagggagttccggcctcggcctactcgatggccaaaattggcctggacaccttgaccacacacgcggcagcagagctggcccagtacggtattcgcgtcaactcggtcagcccaggcattgtggaaaccaagatcttcgagcgcttcatccccggcgatcagttggctggtgcgctgaatgacttcaacaatttccacccgctgggccgtaacggcactccgcgtgacgttgctgagtccatcgtgttcctgctctccgacaagacttcctgggtgaccggtgctgtttgggacgtggacggtggggtcatggctggccgtaagcaaggtaagtaa

SEQ ID NO: 326693 - DNA, 414 bp, Pseudomonas aeruginosa
atggctagcaagtcgaccgaaccgtccaatggccgctctcgcccaaagactgccgatgcgctcaacaaggtcatcgatagcatgctcgcctgcaacgagaagctctccatctcctcggtcgccagagcggcaggcgtcacccccggcctgatccataacacctacccggccgtggcggagcgtatccgcagcatcatgggcaagtcggtgcgtgcccagcgtgattcgaagcaccaggcgcttatgaaggagaaagaactaaacaaagccctccgcgcagagaacagccaacttctggaggagatcgctcgccttgcctccgtgaatcaacgcctcgtgcttgagcttgctcagctgaaaggtgttgctcaaggcaaggtcatcgagcttgcgccaaaaccaggggcaaagtag

SEQ ID NO: 326694 - DNA, 2277 bp, Pseudomonas aeruginosa
atgttgaatcgagagctcgaagtcaccctcaatctcgccttcaaggaggcgagggccaaacgccatgaattcatgacggttgagcacctgctgctggccttgctggacaatgaggcggcggcaacggtattgcgtgcgtgcggtgccaacctggacaagctgcggcgcgacctgcaggaattcatcgattccaccacgccgctgatcccgcagcacgacgacgagcgcgaaacccagccgacgctgggcttccagcgcgtcctgcagcgtgcggtgttccacgtgcagagttccggcaagcgcgaagtgaccggggccaatgtcctggtggcgatcttcagcgaacaggaaagccaggcggtgttcctgctcaagcagcagagcatcgcgcgtatcgatgtggtgaactacatcgcccatggtatctccaaggtgcccgggcatgccgaacatccgcaggatggggagcaggatatgcaggatgaggaaggtggcgagtcggccacgtccaaccatccgctggacgcctatgccagcaacctcaacgaactggctcgccaggggcggatcgacccgctggtggggcgcgagcatgaagtcgagcgggtggcgcagatccttgcccgtcggcgcaagaacaacccgctgctggtaggtgaggcgggggtcggcaagacggccatcgccgagggcctggccaaacgcatcgtcgatggccaggtgccggacctgctggccgacagcgtggtctactccctcgacctgggtgccttgctcgcgggtaccaagtaccgcggcgacttcgagaagcgcttcaaggccttgctcaacgagttgcgcaagcgcccgcacgcggtgctgttcatcgacgagatccataccatcatcggcgccggtgcggcatccggcggggtaatggacgcctccaacctgctcaagccggttctgtcctcgggcgagatccgctgcatcggctcgaccaccttccaggagttccgcggcatcttcgagaaggaccgggccttggcgcggcgcttccagaaggtcgacgtgaccgagccgtcggtggaagacacctatggcatcctcaagggcctcaaggggcgcttcgagcagcatcaccacatcgagtacagcgacgaggcgctgcgcgccgcggccgagctggcggcgcgctacatcaacgaccggcacatgccggacaaggccatcgacgtcatcgacgaggcgggcgcctaccagcgcctgcagccggaagagaagcgcgtgaagcgcatcgaggtggcgcaggtcgaggatatcgtggcgaagatcgcgcggatcccgccgaaacacgtcaccacctccgacaaggagttgctgcgcaacctcgaacgcgacctcaagctgaccgtgttcggccaggacgacgccatcgagtcgctgtccacggcgatcaagctgtcccgggccgggctaaaggcgccggacaagccggtcggctcgttcctcttcgccggtcccaccggcgtgggcaagaccgaggtggcgcggcagttggcgaaggccttgggcgtggagctggtgcgcttcgacatgtccgagtacatggagcggcataccgtgtcgcggctgatcggtgcgcctccgggctacgtcggcttcgaccagggcggcctgctcaccgaggcgatcaccaagaccccgcactgcgtgttgctgctcgacgagatcgagaaggctcacccggaggtcttcaacctgctgctgcaggtgatggaccacggcaccctgaccgacaacaacgggcgcaaggcggacttccgcaacatcatcctgatcatgaccaccaacgccggcgcggaagtggcggcgcgcgcgtcgatcggcttcaaccagcaggatcacaccaccgatgcgatggaagtgatcaagaagagcttcaccccggagttccgcaaccgcctggataccatcatccagttcggccgcctgagcaccgagacgatcaagagcgtggtcgacaagttcctcaccgagctgcaggcgcagctggaggacaagcgcgtccagctcgaggtcagcgatgcggcgcgcggctggctggcggagaagggctacgacgtgcagatgggtgcgcgaccgatggcgcggcttatccaggacaagatcaagcggccgttggccgaggagatcctgttcggcgagctggccgagcatggcggcctggtgcatgtcgacctgaagggcgacgagctggccttcgagttcgagatcacggcggcggagcccgcctga

SEQ ID NO: 326695 - DNA, 225 bp, Pseudomonas aeruginosa; identical to SEQ ID NO: 326155

SEQ ID NO: 326696 - DNA, 2211 bp, Pseudomonas aeruginosa
atgggcggccgtagcaaagcgcaaactgtcggctttcgctacctcatgggcattctcatgggttttgccagggggccgttggatgagctggtcgagatcaaggcaggtgatcgcactgcatggaaaggatcggtcaagagcaaccagacgatccagatcaatgccggcgaattgttcgggggagacaaggccgagggcggcatcgttgggccgctggacgtcatgttcggcgccccggaccaacctgtgaatcctcgactggcggcgatggtgggcggcctggtacctgcgttccgcggggtcaccactgctttcttcgacgggcagctctgcgcgatgaacaagtacccgaaggcctggatgagccggtggcgacgagcgctcaacggatgggacggtggaacctggtatcccgagaaagcagtgatcagcctagccggcgaccaggtgaaggcgatgaaccccgctcacatcttgttcgagtgccagacaaaccgggactggggccgtggcaaggatcgcggcctgctggaccaggcgtcgtatcgcaaggccgcagatacgttgttcgccgagggctttggtctgtgcctcaagtttcgcgtggcagacgagttggacaacttcgagcagaccgtcctcgatcacattggcgccactcagttcctttcccgctcgaccggactctggacgctgcggctgatccgtgacgactacgacgtcgcgacgctgcccgtattcgatgaggacagcgggctgctcgggatcgacgaagacagcatcacatcgctcgacggcacggcgaaccagttcgttgtcgtctggcatgaccccatcacaaacaccgaccggcgtgcccgtgcgaagaatgccggcgcgatccgcgcggccggcggcgtgataacgacgacgaaggagtatccgggcctaccgaccggcgagttggccggcagggtggcggcgcgcgactgcaacgtgtcgacgtcggctatccgcaaggtccagttgcggctcgatcggcgcgcctatgcgctgaaccctggcgacgtgttctgcgttcgcagccggaagcgcgggatcgaactgatcgtcctgcgggccggcaagatcgactatggcaccctcacgaagggcaccatcgtcatcaccgcgctggaagacgtgttcggactgccggcagccgggacgtccgcagtacagccgccgaactggaccccgcccgaccgcaccccgcgggtcattgcgacccgccggctcatcgaggcgccgtaccgcgacctcgcggcggcactgagcgatgcggatctcgcccaactgcagcccgagacgggtgtcctcgccgtggtgggcatgcggccgtccggcctgcagatgaactacgcgctgctcagccgcgtggggtctgcaccattcgacgagcggacgtccggcgacttctgcccggtcgcgacgatctcagcagatatcggccggggcctgaccagcgtcagcgtcacgcttgtccaaggggttgaccttgacctcgtcgaggtgggctcggccgcgatgatcgatgacgagatcttccgcgtcgacgcgatcaacgccgcggccggcaccgcggtgctcgcgcggggatgtgtcgatacggtgccagcgccgcatgaggccggcgcgctgatctggttctacgaagattgggcgaccgaggacacgcgtgagtacgtgaccggcgagacagtgaacgtgaagctgctgagccgcaccagctctgcgacgctcgcagagagcctcgcgccggtcgactcgctgcgaatgaaccagcgccaggcgcggccttatgcgcctggccgggtgctggtgtgtggtgtggcgtatccgacgaagacctacggtgtgctgaccgtgtcgtgggcgcaccgcaaccggctgctgcaggccgatcagctggttgactcgtctgcgagcagcatatcgctggaagctggcacgacatacacgctgagcatctacagcggtaccagcctgaagaagtcgtacaccggcttgaccggcacgacctggacctacccgctggaggacgacatagcgcatgggctgctgccggtgctgcgcatcgtgctgttcagcgttcgcgacggtctgcagagctggcagcaacacgacatcacaatcgaacgacacggccttggcttccggctgggcgaagaactaggaggcgtttccgcatga

SEQ ID NO: 326697 - DNA, 924 bp, Pseudomonas aeruginosa
atggcctacttcaccggaacagcgaacaacccgtcggatctgctgggcaagctccgcgctcatgccgaaactctcggctggatcaccgatcgcgcatctgcgtcggagtggctctgccacaacgcagacggttactggtcattcaacgccggcaccaatcaatggctgctcaccggaaatacagggttcgacaacgacctggcatggaacgcgcagccgggcggctcggtgcagaacaatccctattcgtcgaaagggccgaccattgcgcagctcagcggcgggccattcactcgttaccacctgttcgccaccgctgcctatctgcacttgcacgtcgaaatcgcggcagggcagtaccggccggtgatgattggctcgctcaacaaacgtggcgtcggctatacgggcggtcagtatgtctgcggctcgttcatctatacccccggtcaggcactgacaaacaactggtcgtcgcatccatttgatggctatcacatccaatacagcaccagtagctgcatgctgcggctcgacggcctcgacggcggacccgctcccgagtggctgccgttcgactacacaacgaacatccctcgtcgcgtggtcggtccaggccgtggaaactacagcagtcagtatcaccccgacgttggactgatcgacgcgagcgccaacgagctgaacagctcgaccaacgtggtgccgtgcgccatctatgcgttcggcgctcagcagcgttcgaggtacatcggcgaagcgcctgatttcggtctgtgccggatggacttcctcgcgcctggggactcgatcacgatcggaaccgacacctggcgcgtcttccctttgctgcagcgcggaacagccaacgatttcggcaacaccagcgcgctggtcggctatgcattccgggtggtcgagtag

SEQ ID NO: 326698 - DNA, 960 bp, Pseudomonas aeruginosa
atggccaccgaattcggcacagccgcgaaccacgccgacctggtcgaacgactcgtccagttcctcaccgccaacccgacgctcgtcgcggccggccaggcctacgagaaggttttcgacaacaccattccagcatctgggacggcgatcgcgattcgccaggtgaccctgcgggcgcctggcctcggcggtgaagacagcatcttcatgggagtccagtcctacggcgacaccgcgctcgactactacaacgtccggctgatgggcggtaccgcgttcaatcctggcgcgctgccgccgggtggtgacttctggacggcgttcgtcaactacagcccgcgagtacagctgcttgcctggaaccagccgatgccctactggttcttcgccaacggccgacgcttctgggtcgtcgtgaaagtctcgacgatctacgagtctgccggcgcaggcttcctcttgcccccgtgcccgccgtcgcagttcccatacccgctggctgtcgtggggtcgtatcgcggagacgtcgccacccgctggtcagacgtgagcgaccgtcatcggggcatcagcagcccgttggagcgcagctgttatgtccgcgacccggcgggccgctggctgggtttcaccgtcgcatcgaacaccaacaacgagtccgactacaacaataggacccttctgccgctcggttgcggtcgctactccagtagcggtggcgaaagcgtggtcaaccagctccgagactctttcagcaagttccccctgaaggcgctgtcgttcgtgacccgagaaacagagggacgccggtacctcggtgacttcgacggtgccttctacgtgccaactctcaactccggcgccgaagacgtcatcaccgagaacggagtcgatcacattgttttccagacggcgtggcggtctggcaatccctggctcttcgcaattagggcggactga

SEQ ID NO: 326699 - DNA, 3765 bp, Pseudomonas aeruginosa
atggcaacgggcaaagaacttgatctggcactacgcatccgcgctgacgggaatcagggcgcccaggccctggataacatcaacagccaggtcgagcagatcggtaccagtgccaccgccgccagcagtcaactgagtgcgatcggcgagagtgccgatcaacaggcggcacggctcaaggccatggtggcggcgagccttcagcagcaggccgcgttcgacgccctggctagcagttccgacaagctcaacacctcaacccgcgctgcaactgccggttggcaggagagcgcccgcgcccaatcggcgtcgatgaacgcctaccacaacgccgagcgtgccaggcagcagcagatcgcaaccgagcagcgagccgccgaagccgccgccaaggcctcggccgagttcgacaagcagcaggcggagctggccaagctgctgggcgcaatcgatccggtcacacgtgagctggagaagctcgacaacctggaaagacgcctgggccaggccagaagctcccgattgatcgatcccgagggcttcaccacctacaacgccaagctccaggagcagcgtgaacgcctgcttggcacgtccgatgccatggctgtggccgggatctctgctggccagtaccgccaggccatgcggcagttgcccgcgcaaatcaccgatgtcgtcaccagcctggccagcggcatgccgatctggcttgtcgccattcagcaaggtgggcagatcaaggacagcttcggcggtgtgggcgcgaccttccaggcgctgggtgacaagatcaagtccttcttcggggtcgcgagcacggccagcgaaggactgggtgagatcgcccgcggggcagacgcagcagcagtatcggccaacaacgccaggaccgcgatgaccggccttagcggggccggcagcgcctttgcgatcgttggagtcgcagccgctgctgccggcgtggcactggccgctgcctacgagaaaggccgctcggaagcgaccgagttgaacaaggccatcatcctgaccggcaactacgccggaaccagcgctggccagctatccgcgatggccgctgcgatcgcgaaggcgaacggcacccagtatgaggccgtggccgtattgtcggagatcaccgccaccggcaagttcacggttgatcagatcgagctggtagccagcaccgccatcgccatgcaagacgccaccggcaaggccgtttccgaaacggtggccgagttctccaagctggccgaagacccggtcagggcgtcgcaacagctcaacgagaagtaccactacctgactgcctcggtgtacgagcagatcaccgccctgaaccagcaaggggacacgttgggcgccgcccagctcgccatggatgcgtacggccaggcgatggatgagcgggccagccagatcgttgagaacctgggcacgatggagcgcgcctggaagaccgtcgctggcgttgccaaaggcgcctgggatgagatgctcggcgtgggccgggcggagacgcccgaggaacggctggagcagctgaccaaggggcaagcctttcagcctggccgcgctgtggccagcggggctgtcttcggcccgttgggctggttcaacgagctgcgcaaggcgtatcagcgcagctcgatgtcggacgacgagcgcgggaagcaattcaccgatgccctccaggaaatccaggacgagggcgagaaggcgcagaaggcgcgcctggatcgctaccttgaagacgaggcaatacgcggccagcagagcatggacaggctgctggagaccgttcgcaccaataaagagaagcgggacaagctgaaccgggagttggatcgcagcatcgccgcgattcaagccacgaacccgaaagacgagcggctgcgcccggagaacatcgctgctgctcggcgagccatcgacgagaagtacaaagacccgaagacaccgaaggggccgagtactccactcgatcagtccaccgtcaccgaagcgaagaaccagctggaccagttgcaggccgactacaggaacgctgagcagaacttgcaggcgcagcagcgggctgggctgctctcctacgccgactatgttgcccgccgcagcgaactgatccgccagaacaaggaccaggtcaccgcagcttaccaagcggagatccagtcgctggaggcgctgcgcagcaagagcactaccactgccgcacagcgcatcggcctcgaccagaagatcgccgacgcccgcaacaacatggtgaaggcacagaagaaatccgacgcggacctggagatacttcagatcaacgagcaaggccgcctcaagaagcaggcccaggcggtgaaggcttacgccgacgcgttgcagcagcagcaagatgctctcgctctgcagggggagcgggctgcggccgccgttgggatgggggcgcaacagcgcaggctgttcgagcagcgcggcaacctcgacgatcgcttcacccagcagagattggatcttgccagccagtatggcgacggctcgcgtggcatgagcctcgacgagtacaacgacaagctgcagaagctgcaggcgaaccacgcggcgatgaccgagcagctccaacgcaactacgcggccttgcaggtcgcgcaggcagactggaccaacggtgcccgctcggcgttcgccgactatctcgactcggccaggaacgtcgcgggccagacctacgacctgttcagcaacgcgatgtctggcctggagaacagcgtcgtttccgccgtaacaacgggtaaggccagcctggatgactttctccgtacgctcgcggccgactccgctcgtatggcgaccaggcagctcggggcatctttgctcagtagcttcggactcggcgagaccaaagacgctggcagcaaagacctggccgtaggtgcctcggcggtctcggcatcggccggcgccctggcaaccgcgggaggcactctcgtgaccggcgccgcggcgattcaggctgcagccgcatcgctagcggcagcgaacggtggccaggtgctgggcggcgcagcctctgcagccggacaagccggtccagcggctgctattgctgccgcgtcgaccgaaggcgcagccgcaatgggcagcgcgatcagcgaagcaaccacgtcgggcggtggcactctggcgagcgcgctggctggagtgtttggtcaaggtgccagtttgttcggcaacctgttcagcagcctactcggtggcggtgctgctggcggcactggcggtggtggctggttgcaactgggcatgagtgccgccagtgcgtatttcggaggtggcttcgccgatggcgggcgtatccaaggaccaggcaccggcaccagcgacagcatcccgatcctggcctccaacgacgagttcatgacccgtgccgccgtggtacggcagcccggcgcactcgcgtttctggagcagttcaaccggtatggcatggctgccctgagcgcctgggcgaacccggtccgccacgctacgggcggcttgatggggactcctgctccggccatgcctgctccgggcctttctgcttcgcgcctgcaggagcccgcaaagaacctcggaaccaccctgaaaaacagcgtgaacctccacgtctatgacgatccgcaacggatcgtcgatggcgcctggagtaaggctgggcaggaaaacttctggctgacactaagccgcgatcctcaacgagcacgacaactactgggaatcaactga

SEQ ID NO: 326700 - DNA, 144 bp, Pseudomonas aeruginosa
atgaccgagcggcagatcctgctgctctacgatgccgagcagcggcgactgtcccaccaccgggctaaccagttcatcgacaccaacctggcgtttgccggcggcaacgacgctaaagaacacctcaagacgcttcggacttag

SEQ ID NO: 326701 - DNA, 507 bp, Pseudomonas aeruginosa
atggggcgcaaggtagaacgtaaggccaagcccggccccgctgctgcgcaaggagcggatgatctgcagatactgcaccccgaacgcgagatcgaggtcgccggccgcaagctgaccgtgcgcgagtacggattcgtcgaagggctgcggctacgccccatgatccagccgttgctcgatgacctgtatgccatcagtcaaggggctgtgcttcccgacctagagcagatcctggtggtgctcggccagcactcggatctcatcccgcacctgatggcagtggcggccgacgtcgacgaagaatgggtgaaaggtttgccgcaccgggatggaaacttcctgctgtacgtctggtggctggtgaacggccctttctttatcggggcggtggtggaccgaattcaaaccgaacgggcagccgaagaggccaggaaggccgttgggcagacatctatgcctgcctcatcgccggaggatacggaaccccaggcaccatcggtcgaatga

SEQ ID NO: 326702 - DNA, 753 bp, Pseudomonas aeruginosa
atgtcgctgttttccttccagggtcgggtctgggccggcgagcgcctgcccaacggcaagctgagccgccctgtgtgggccggaaacgtaccggtcttgaccctgcagatggccaccgaaagcaccaatacaacggagtcgttctcgggcaaccgtctgcagtacggtcgcctgcagcgcggaaagaccgccaccgtcaacatcacctacgacgagtggctgccgaagaacatcgctgcggcgatctgggcctcgcagatcgagctgcccgccgacacggtgaccggtgaagtccttgagggcgatctgaaggccggcgacttcgtgaagctggaccgtcagttcgtctcctcggtggtcctcaccgacagtgccaccacgcctgcggagctggtcttgggtacggactaccgtatcgaatctccaacggctggcttgatcgagctgctgaatgtcaccggcaagacccagccgttcaaggccgcgtatgcctccgaggtcgccaccggttacaccatgttcacctcaccaccgccggagcgctacatcctgctggacggcatcaacaccgagaatcaggaaccggtgatcgtgaccctgtaccgctgcaagttcgacccggtcggtgacctggcactcatcaacgacgagtacggaaacttccagctcacgggtagcgtgctatacgacaccctgaacgccgccgacgccaacctgggcggcttcggtcgcatcgtgcagaagggcgcctga

SEQ ID NO: 326703 - DNA, 210 bp, Pseudomonas aeruginosa
atgagcacccccgccaagaaacaggacatccccgccgtctcagtgccgaaggaggagaaggtgacactcactgctcatcacacgcacgccggcacgaaatacccggccggcgccgaaatctacgtcaacaccctcgacaaggccttcctggtccagcaccagaagatcacggtcgaaactcaagatgcggctcccgccgccaaggagtaa

SEQ ID NO: 326704 - DNA, 456 bp, Pseudomonas aeruginosa
atgtccagcgctccattcgatcacaacctgatcatcgagcgcctgaaggatcaggtagctgtcttggagagtgtcggcggtgcggcggactttgctgccatcaaggcggtccgcgacttccggacaccgaccgcctacgtgatcctcgccgaagaaacgccgatgccgcgctcgtccggagcacccggcgcagcgacccggcagatggtccaggtgcgattcggtgttgtggtcgcaacccgcaactaccgggacaacaagggcaagaacgcgatggacgatctacgtccagtactgggacaggtgcgggatgccctgatcggctgggtgccgcctggtctggtgggagcccgtgactgtcaactcatccagggacaagccgtggactatgacacgtccgttttgatctgggccgacctctatcacacccaacacgctatcgggagaacctcatga

SEQ ID NO: 326705 - DNA, 462 bp, Pseudomonas aeruginosa
ttgtcccaggccgcgacgcctcagcagtaccgtgcggtccagaccgagctgctcgatgccttgctgcgcggcttgccggtggaccagtggacgccggaggagatcgaggtcggcaacgccgctgtagaggtcatcgacagtgcggtgagcgatgcccagtccttcatcgacggattcctgcagcagcgtggttacctgccgctgcaacagcgttttggcatcgtggtcggctggcaccgggcgatcacgcgctacctgttgcataaggaccggttgggtgaaggcgcggagaaagacccgatcgtccgtgactaccgggacgccctgaaatttctgcagctcaccgccgagggcaagttctccctggggcaggacgacccggtggccaactccaccagcggggctccccaggtggtgactccgggccgaactttcagcctcgatcagttgaaggacttctga

SEQ ID NO: 326706 - DNA, 390 bp, Pseudomonas aeruginosa
atgaaggtcgagctggaactgtggcagttgatcactctgctgctgaccttcctcggggcctgcgcgggcggcggcaagctgctgctcaaccagatccagaagagcctggatgcgaggttcgcaagccaagaccaggcacgcctggcgaaccatgagcaactctcctaccggctggacgccatcgagcaggccgcgcgggaagaaaccaaccagtggcagcgcgttgagcgagagctgatgagcctgaaggccgagcttccgttccagtacgtgcttcgcgacgactacatccgcggccagagcgtgatcgagatgaagctcgacagcctggccacgaaactggaaaacgcgcagctgcgcggcttggtaggagcaaaccatgcaaactga

SEQ ID NO: 326707 - DNA, 309 bp, Pseudomonas aeruginosa
atgcaaactgatatggccaagattcgccgggaatccctgcgctggctgattctgctgaccctgaacaatgctcggccggtgggcgcctacgaggggccggtcctctcggttgcacagagcgagtaccccgacgccacaccgctggagatccgtcgcgagctggactacctcgccgaccgtgacctggtgaccctggtcaaggaaccgtccggcaagtggttcgccgatttgacccggtacggcaccgacgtcgccgagtacaccatcgactgcgaacccggcatcgctcgccccaagaagtactggtga

SEQ ID NO: 326708 - DNA, 576 bp, Pseudomonas aeruginosa
atggggcggaaatcatcgatctcccggctaccggaccaagtccgggcctacatcgaggggcgcctggccgatggccggatgaccctggacgagctgatcgcggacctgcaggcgcagttcccgagccaggccgaggccggcgagctgcccagccgggcagccgtgcatcgctacggccagaagctggagcggcggctggcggcaattcgtgccagcaccgaggcggccaagctgatccgtgcccaggccggcgacgacctggacgcacgcagcgaggcgctgacggcgatgatccagtccgagctgttcgagtcgatcatctctttgcaggaggctggtgatgaagagatggacccggctgatcgtgtcggactgctggcgtcagcggcaaagaacatcgcgacgctgacgcgctccagcgtcacgctgaagaagttccaggcagaggctgaacagcggggccgcgagaaacagctccaggaacaggagcagcgcctggaagagatgcgtggcagcgacggcatgagcgagcagctcgaacaacgtatccgggacatcctgctggggaaagcctga

SEQ ID NO: 326709 - DNA, 1704 bp, Pseudomonas aeruginosa
atggccatgcacgcaacgtccgataacctgggctccaagctcaaggccaccagcgcgccgcgcaagatcgacctggccgaggagatggcgttgcatggcgtcgatgtgccgcaggagatctccgaggcgattccctccaacgacgccgtcttcctgggctaccagcagcgctggttcgaggacgagagtccgatcatgatcgcggagaagtctcgccgcaccggcctgacctgggccgaagccgggcgcaacgtgatcaatgccgccaagccgcggcgccgaggtggctgcaacaccttctacgtcggcagcaagcaggagatggcgctggagtacatcgccgcctgcgcgttgttcgcccgcgccttcaacgagctggccgaggctgacgtctacgagcagaccttctgggacgaagggaagaaggaagagatcctgacctacatgatccgcttcccgaagtcggggcggaagatccaggccttgagcagccggccgagcaacctgcgcggcctgcagggcgatgtggtgatcgacgaggcggcgttccatgagtccctggaggaactgctgaaggccgccctggcgctgacgatgtggggtaacaaggtccgcctgatcagcacccacaatggcgtcgacaacccgttcaaccagtacatccaggatgcccgcgagggccgcaaggattacagcgttcaccgcatcaccctggatgatgcgatcgtcgaaggactgtacaagcgaatctgcttcgtcaccggccaggagtggtcgcccgaggccgagaaggcgtggcgcgatgggctgtacaagaacgcccccaataccgagtccgccgacgaggagtacggctgcatcccgaagaagtccggcggcgcctacctctctcgcgtgctcatcgagcaggcgatggtccaggaccattcgatccgtatctaccggtacgaggcgccggaaggtttcgaaggctggacaccacagatgcgggaagacgagatccgcacctggtgcgaagaaaaccttctgccagagctggccaggctggacccggagaacacccacagcttcggcgaagacttcgcgcgccgtggcgacctgaccgtgttcaccccgctgcagatctcgccgaccctacgcaagcgggaggcgttccgagtcgagctgcgcaacctgacctacgaagcgcagcgcgacatcatgttcttcatctgcgatcgcctgccgcgtgtcgtgggcatggccttcgatgccaccggcaacggcggatacctcgcggaacaggcggcgctgcggtatggcccagcggtggtcgagcaggtcagcctcaaccttgcctggtacgccgagtggatgcccaagctcaaaggggagttcgaggccttcaacatcgagctgtccaggcaccaaagcacgctggacgatcttctctcgatcaaggtcgagaacggcattccagtgatcgataaaggccgcaaggctgatctggaatcggcgggcggtaaggcaaagcgtcatggcgacagcgccgtgagcctggtcatggccgtgcgagcaagctacatggctggccgcaagcagcctatcgagtgccagtcggctgggcgccgggcctccgcacaacaagaccttgccggtacccgtaacaccaccaaccgcggctggggcaccgtcgccggccgcaccgacctcggaggctactga

SEQ ID NO: 326710 - DNA, 1479 bp, Pseudomonas aeruginosa
atgcacccgcccaagctcggccaggagatcgccaccacgggcgacggccgcgatattacccgtccattcctctccggcctgcagcaaccgagcgactacatcctgcagcgccggggcggcaacgacctgcgcatctacgaggaagtgctgcgcgacgcccaggtcaaggcgacctggggccagcggcagctggccgtcgtcagcaaggaatggcaggtcgatgccggcggcgaccgccggatcgacaaggccgcagctgagcacctgaagcagcagctgcagaacgttggctgggaccggatcaccaacggcatgctctatggggtgtactacggccacgccgtgtccgaactgatctacggccgcgacgaccgctacatcaccctgcaggcggtcaaggtgcgcaaccgccgccgcttccgttacgacctgcagggtggcctgcgcttgctgacgccgaacaacatgttcgagggtgagccgtgcccttcgccgtacttctggcacttctcgaccggcgccgacaacgacgacgagccctatggcctcggactggcccattggctgtactggccggtgtatttcaagcgcaacggactgaagttctggctcacgttcctggacaagttcggtatgcccacggccgtcggcaaattcgggaagaacgccacgccagaggagaaggccaagctgctggccgccacccaggcgattcagaccgataccggtgtcatcatgccggaggacatgttggtggaactgctggaggcctcgcgctctggcacggccgactacaagatcctgcacgacaccatggatgagaccatcgccaaggtaacgctgggccaggtggcgtcgagccagggcactcccggccgtctgggcaacgacgatctgcaggccgacgtgcgcctcgaccttgtgaaagccgacgccgacctgatctgtgagagcttcaaccagggccccgcgcgttggctgaccgagtggaacttccccggcgctgagccgccatgcgtttaccgggtcgtcgaagaacccgaggacatggacgccaaggccagtcgagacgagaaggtagtgcggttctccggcttcaaacccaccttgggttacgtccaggagacctatggaattgaggtccaggagcaggatcagaaacaggagcaaggtcagccaactggcccctcacctgccgccgagtttgccgaacgtgccgggggaagcgatccggccgcggcgatgacggaccagttggccaaggtcatgcagccggcggtaaaggactggagcgagcaactccgcgctctggtcgacaatgccaccagcctcgacgagctgcaggagcaactgctgcaacttgctcccgagctgagcctggatcaatacgcggccgccatggcggtcggcctgcaggcagcgaacctggctgggcgtactgacgtccaggacgatctggccgcgcgaggtagtgcctga

SEQ ID NO: 326711 - DNA, 1251 bp, Pseudomonas aeruginosa
atggctaccgcagcgacgtatggcagcctctcgtttcgcgagcagatcgctttctttgaggcgaagaacccctcggtcaactacgccacggtgcgcggcgccgcccacgatcagtcgtttgtgagcgcaggtgcccatcgtgcggacctggtcgcagatctctatgccgtggtgcgtcaggcgatccgcgatggcttaaccctggaggagttccagaaggactactacgccgtcctggacaactacggctgggagccggccggcggtcgcgcctggcgtgcccaggtgatctaccgcaccaacctgcgtaccagctacgcagccggccgctacgcccagctgcaggcagtgaaggcaacgcggccgtactggggctatcaccacagtgacgctgtcgagcatccgcgtgagctgcacctggcctgggacggcctggtgatccacgccgacaacccctggtggcagacgcactatccgcccagtggattcggctgcgagtgctacgtcacggcctacagcctggatgagctgcaggcgatggggaagtcgggaccagacgaaccaccgcctggccgcctgcgcaacatcgttttccacggcgaggtggtccaggtgccggagggtatcgatccgggctggaactacgcacccggtcgagccgccttcgagaaccaggtgcaactgaccctggagaagaccgcgccgctgccggccgaaccggcggcacgcatgaacaggcaactactggacgagcagcgtgtcgaggaggcgctgcagcgctcctggacaagctggctggatgaggtcgtggccgagccggtggtgcgtggcagcgcttgcaacgtgggcacgctgagccccgagacggtcgctggcatgcaacgggcgggcgtcacgccacagaccgcgttgatcagcatgcgcgacgagcaattggtgtcactggtcaaggccgtgccggccgagccagaggtagatgacgtgctcgctggactgacgctggccgacctgcggcaacttccgcaggcgctcgcccagccgcaggcggttctcctggatgcatcatccaatgctctggtctacgtgttcgactctggccgacgcggaggctggctctccttgatcgtcaactatctcctgcagggcagctcgcgcagcaatgtcgtccagtccggcagcgtggtcgacgtcgagcagctcgggcagcagttggccaatggacgtttggttctggtggagggtggactatga

SEQ ID NO: 326712 - DNA, 573 bp, Pseudomonas aeruginosa
atgagcggtgcacgtatcgagctggagttcgacagccagcaggtgacacaggcactgagcgcggcggctgcgactctgcgcagtcccaccaagatcctcgaagatctgatcgagccgttgctgcgcattcaccaggcgcgctttcgtgcccagcaggctcctgacggcacgccctggtcggcactgtcgcctcgctacctggctcgcaagcggagaaacagggacaagatcctgacatccgagggattactgcgagggtcactgcgcggccaggttgaaggggataccttgttgttcggtaccgatcgcccgtacggtgccatccaccagttcggcggcacgatccagcgtcaggagaggcagagcacggtttacttcaggatgaatgaacgtactggcgaggtcggtcgacagttcgtcccgaaacgccgtagcaacttcgcccaggacgtgcgcatcggcccctacacgatcaccatgccggccaggccctggctgggcacgtcggacactgacgatgccaaactgctgcagcgagtcatgagcctcataaactcaaccttgcagaattag

SEQ ID NO: 326713 - DNA, 1242 bp, Pseudomonas aeruginosa
atgaaaaagccaaccgccactctgcctatcctccccgccggccggcacgtcgccctcgacggccgcccggtggagttcaccgaggccatcctgcaggagatcgccgcgacctacgatccggcgctcagcgaggcccctctcgtcatcggtcaccccaagctcaatgcaccggcctacggctgggccaagggcctggaggtgcgcgagggcatgctctatgccgagccgcaccaggtggtccccgagttcgcagaagccgcgaaccgcaagatgtacaagaagcgcagcgcttcggtgtacctaccggactcaccaggcaacccagttccgggcaagcactacttgcgccatatcggcttcctcggtgccgtgccgccggccatcaaaggtattcccgatgctcccttgaacttcgccgaggatgacggcgccctggccatcgagttcgcggaagcgccctacgcggtgacggctctgaccgagatcctgcgccgcctgcgtgacttcttcgtcgagcgcgaaggcgccgaacgggccgaccagctcattccgcaatggcagttgtcctcgatcgaggaggacgcgcggcgtgcagtcacccacggcgccagtgcccaggcgtcgttctccgaacccgcaatagaaggcgtcgacgccgcagcagcctctgccgccgctgcggaggagccgcagggcaccgtcaccccatccgacggtgcttccgagtcagcggcagaggctgaccggacctctcacccatcacagcaggacacgaccatgtctgacgaagctgcgctccaggagcgccaacgccagctcgacgagcgcgagcaactgctggccacccgcgaagcacaggtggcccagcaaaaagcccaggaacatcgcaacgaggtcaccgagttcgccgaaggcctggtcaaggccggccgactgctgccgcgccagaaggctccggtgatcgagctgctggtgagtctgcctgccgacacccccctggagttcgccgagggcgacggccaggtcaccaagccggcggccgaggtgctgcgcagcttgctggccgaactgcccaagcaggtggacttttccgagaaatccggcgacggcggcgacctgagcttcggcagtgctcacgccattgcagcgcgagcccagagctatcaggaagaacagcggcaggctggacgccatatcagcacgaccgaggccgttacccacatcaccaagggagccaagtag

SEQ ID NO: 326714 - DNA, 378 bp, Pseudomonas aeruginosa
atgaacattcccggactcatcgccgccaaacgtgccagcggcgccatcgccgcccgccgtatcgtgatccatggcagctcggacggcctggccgcccaggctgccggtagcactgcgctgctgatcggcatcagcaccgaaatccccgccgccgacggtgcggtcttcgacgtcatccgttccgacctggcgccggtcgagtacggcggcaacgtcacccgcggtgatgcgctgacggccgacgcccaggggcgagcggttgccgcgacgctgccgccggccgccaccacttacatcatcggcttcgctgaactcagcggcgtcgcgggtgatatcgggtccgtctacatcgccccggccgttctgccggtagcctga

SEQ ID NO: 326715 - DNA, 855 bp, Pseudomonas aeruginosa
atgcctcctcaacgaccgattctccgctaccacggcggcaagtggctgctcgccccgtggatcatccagcacctcgcgccccaccacacctacatcgagcccttcggcggcgcagcctccgtcctgctccggaaagcccgcagctacgccgaggtctacaacgacctcgacggggacgtggtgaacctgttccgcgtcgcgcgggaccgtggcgaggaactgcgccaggccctggcgcttaccccgtttgcccgggaagagttcgaagccagctacgcggaaacgacggatccgctcgagcgcgcccggcggatggtggtccgcagtttccaaggtttcggcagcgccgcggcgagcggcgaacgcacggggttccgctcaacgtcggcgaggagtggtaccgcgcccgcgctggactggcgcaactaccccgatgcgttggccactatcaccgagcgcctacagggcgtggtgatcgagaaccgcgacgccctggtgctgatggagcatcacgaccggccgagcacgctgcactacgtcgatccgccctacgtccattccactcgcagcaccaaggtccgcaacaacgccaccggcaagtcgtaccgacacgaactggacgacgaccagcaccgggacctggcggcgttcctcaaggggctgaccggcatggtggtcctctctgggtacccctgcccgctctacgaccgcctttaccgccactggcaccgacttgagcggaacgccctcgccgacggcgcacgtgtccgcatcgaatgcctctggctcaacgatgccgcgcgcagtggcctggcgcagctcgacatcttccacgacaccaaggagcccgcatga

SEQ ID NO: 326716 - DNA, 1998 bp, Pseudomonas aeruginosa
atgacttccctcaagaagccctccccgctcgacttcaaaacccagtacggcctggccctggacgacaccgacgacgcgatcatcgtcgacctgttcgccggcggcggcggtgccagcaccggtctggaaatgggcctgggccgcaaggtcgacctggccatcaaccacaacccggccgcaatcagcatgcacgaggccaaccacccgcacgccgagcatctgccgaccgatgtctggggcatcgaccccatagaggccaccaagggcgccaccgtgggctggctgcatgcatcgccggactgccggcaccacagccaggccgccggcggccagccgcgcaagaaagagatccgcgacctgtcctgggttgttgtgaagtgggccggcaagctccagaagctcggccgcgggccctgggtcatcagcctggagaacgtgaagcagatcctgcagtggggcccgctgatcgccaagcgcgacaagtcgaccggccgcgtcgtgcgcctcgacggcactgtagccggtcctggcgagcgggtaccacggcacgagcagttcctggtgcccgatccgaagcgcaagggccgcacctggcgccagttcctgcgcgccctggaaggcttcggctaccacgtcgactattgggtcgagcgcaactgcgactacggcgacccgaccactcgccagcgcctgtacctggtggccaccgacggcggtttcgagcctgtggcggcggagaagacccatgccgcgaagcccggcaaggggctgaagccgtaccgcacggcagcagagtgcatcgattggagcgacctcggccagtcgatccgcatccggaagaagccgctggcggaggccaccatgcgccgcatcgcgaagggtatcgagaaagaagtactccagcgcgccaagcccttcatcgtgccgatcgcgaactggtcgcgcgaagccgtgcatccggtcgatcaaccgctgaacaccatcacagcatggcccaagggtggcgcattctcgatcgccaccccgtcgctgatccaagtcggctacggcgagcgcgacggccaggcgccccgcgtccccgggctcgacaagcccctcggcacggtggtcgccggcggcatcaagcacgcggtcgctgccgctcacctggtcaagttccgcttcgacgccaccggcgccccggtcgaccagccgatgccgacgatcacaagcggcggtgagtgcaaacgcccggccggagcggcgcacgccctgggcatggccagcgcggttctggtgggtgccggaggccccagctacgccggtaagcccgtctcggtcgaccagcccatgggcaccgttgtagccgaaaaccatcgcgccatcgccactgccttcctcgcccaaatgaacggcggctacaacacgaccttcagccggccggccgacgcgccgatgagcacgatcacgaacagcggcagccagcagcagctagtcacggctagccttctgcatctgcgcggcaactgcgacgcacgcgccgccgacgagccgctgcacacggtcagcgccggcggcacgcaccacggtctggtcaccgcggaaatggtcgccagcagcctgacgccggagcaattggacggcgcgctgtgggtgtcggcgttcctgatgcgctaccactcgaccggcgggcagtgggcgaagctggacgatccgctgacaacgatcaccaccaaggaccgcttggcgctggtcacggtctggatcagcggtagcccctacgtgatcgtcgatatccgcctgcgaatgctgaaaccgcgtgagttgtatcgcgcccagggcttccccgacagctacatcatcgagcggggccacaacgggcagcggttcactctatcccagcaggtccacatgtgcggcaacagcgtgagcccgaacacgatggccgcatacgcccgggcaaacgacccatggaagcggcggctacggccgacgccgcaacaggcggtggcggcatga

SEQ ID NO: 326717 - DNA, 429 bp, Pseudomonas aeruginosa
atgaacactgagcagttcatccgggagtccgccgcgcgcgggctttcccgccgcgccacccggctggccctgggcatcggcccctgggtattccgcgaaatgctcagcctgatgccggacatcgagtggccggcgaagggccagtcactggaccacaagcgggccaactcgcagaaacggggccactgcacgccggcactcgcccgcgcactggaccaggcccgccaggcacgcaaggaaaagcacacccacaccgtgcgcggccgaaccggaaccctcgaagagttggtcgacctgctgccgagccccgtctcggccagcaccgttcgccggcgactcgccgcaggcatgtccctcgaggacgcgctgctctccccacacctaccgccgaaacccggccatcgcccacttcagcaggtgcaaccatga

SEQ ID NO: 326718 - DNA, 648 bp, Pseudomonas aeruginosa
atgacgacgaaccagaaccaccccgacgatcaccttgccattgaagcgctccacagccgctatctcgatgtcctgaccggacgcaccagcgatcacctcctgatgttccaggacgaggcctacgcgcttggccgcgcccggggccgcctggacgtgttccgtttcgacctgcacctggagcgccagcgccggttcagcgaacgcacgttcgggcctgggtcgcgcgccgctggcgtcgtcgaccacatccgcaaagagttgcgcgaaatcgaagaagcccccggcgacctggccgagtgggtcgacgttgtgatcctggccctggacggggcttggcgcaccggcgccactcccgcgcagatcatcgacgccctgctggcaaagcaggcgaagaacgagtcgcggtcctggccggactggcgcacggcgccggccgacaaggcgatcgagcacgaccgcgcggacgacccgatcgacgacaacacctacttcgtcatgcgcaacgccggcggcgccgtgttcgtgaagcacggtcccttcttccgcgaccagggcggcctgacggaggactggggaaagaactggacgcgcatcagggccggcagcctcaagcatgcccgccaggtcggggaggagttgctgccgtga

SEQ ID NO: 326719 - DNA, 165 bp, Pseudomonas aeruginosa
gtgacccagcgcatctacctcgccggccccatgaccggcctgcccgaacacaacttccccgccctccaaaccgaagtagcgcgccagagcggcctcgggcgcgagaacctcgcatgtcgaggaggtacggccgccgtctaccgtgccgccgactcagtaccgtga

SEQ ID NO: 326720 - DNA, 264 bp, Pseudomonas aeruginosa
atgtctggagagacagattcgaaaggaaggccgatcgaccagcagtgcaggtactgcgggaagctgttcaccgcgaaggcattgagaaagcacgttgatcagtgcccagggccggacggcgttcgcgtgtgcgacctcagcggtgccgcgcgggcgcgccggattcgcgttgtggttgatggcgtgaagaagaaaaagaagcggaagagtgtgttcactgtttcaggcggtgcatatggccttggcaagagccgcaagcactag

SEQ ID NO: 326721 - DNA, 195 bp, Pseudomonas aeruginosa
atgaccaacttctacccaaagggcgggcgatgccgcgcctgcgagcgacgcctggacgactgttcgagcctcgacttcagcgccatgccggtccaccgccgtgacggccccgacgtgatcgtcatctgcaccgagtttcgacagctcaaccacggcaggtccttacgagtaaaccccaggaggagccatggctga

SEQ ID NO: 326722 - DNA, 990 bp, Pseudomonas aeruginosa
ttgtgggttggatactactacgacggccgcggcgaggacggaaagaggaaggaaatcccgctcggcaccgacctggacctggcaaagctggagtgggcgcggctggatgccagtccggctccgaagaccctgcgcaaatggggtgacgtgttcgaccggtacgaaaaagagatcatccccgggaaagcgccacgcacccagaaagacaacctcctctcgctgacgcaactgcgaaaggcgttttcagaagcgccggtcgaggcgctcaccccccaagtgctggcacagtaccgggacaagcggtccgcgaaggttcgggcgaacagggagctctccctcttctcccacatcttcaacatcgccagggagtgggggatcgtcacgactgaaaacccggtgaagggggttcgcaagaaccgcgagacgccgcgcgacttctacgccagggccgaggtctggaacgcggtatacggcgcggctccaccggaactccgcgacgccatggacctcgcctatctcaccgcccagcggccgagcgacgtactgatcattcgtgaggcggacattcaggatgggcacctgcagatcgcccagggcaagacgtcgaagaagttgcgcatcatgctcgatgtcgacggcagcccgacggcgcttggagaactcgttgcgcggctgtgcgagcagcggcgccagcgcagcgtagccggcccgtacctgatcactacgcccgatgggcgccggatgacatcctccatgctgcgcattcgctttgacgaggcacggtcggccgccgccggcgcggcgcttgaggacctcgacgagactctggccaccgcaatccgtcagttccagttccgggacatccgcccgaaagcagcctcagaaattgctgacctgggccgggcatccaggctgcttggacacaccgacaagcgcatcaccgagaccgtctatcgtcgcgtcggcgagatcgtggagccaacgaagtaa

SEQ ID NO: 326723 - DNA, 489 bp, Pseudomonas aeruginosa
atgcctgatacgacaaatccaatcggtttcaccgatgccaacgaacttcgcgaaaagaatcgcgccaccgtcgagaagtacatgaataccaaaggccaggatcgcctgcgccgccatgaacttttcgtcgaggacggctgtggcggtttatggaccaccgataccggctcgcccatcgtcattcgtggcaaagacaaacttgcggaacatgccgtctggtcattgaagtgctttcccgattgggagtggtacaacataaatatattcggaaccgacgaccccaatcatttctgggtcgaatgcgacggtcacggcaagattcttttccccggatatcccgaaggttattacgaaaaccacttcctgcattccttcgaacttgaagacggcaagatcaagcgcaaccgcgaattcatgaacgtcttccagcaattgcgcgccttgagcattccggtcccggaaataaaacgcgaaggcattcccacttga

SEQ ID NO: 326724 - DNA, 1890 bp, Pseudomonas aeruginosa
atgatcaaaagtctgaagttcagccacaagatcctcctcgcggcctccctcgtggtgttcgccgctttcgcactgttcaccctctacaacgattacctgcagcgcaacgcgatccgcgaggacctcgaaagctacctgcgggaaatgggtgacgtgacttccagcaacattcagaactggctcggcggccgtctgctgctggtcgagcagaccgcccagaccctggcccgcgaccacagcccggaaaccgtcagcgccctgctcgaacagccggccctgacctcgaccttcagcttcacctacctcggccagcaggacggcgtcttcaccatgcgtccggacagcccgatgccggccggctacgatccgcgcagccggccctggtacaaggacgccgtggcggccggcggcctgaccctgaccgaaccctacgtcgacgccgccacccaggaattgatcatcaccgcggcgacaccggtgaaggccgctggcaacaccctcggcgtggtaggcggcgacctcagcctgaagaccctggtgcagatcatcaattcgctggacttcagcggcatgggctacgccttcctggtcagcggcgacggcaagatcctggtgcacccggacaaagagcaggtgatgaagaccctgagcgaggtctacccgcagaacacgccgaagatcgccaccggtttcagcgaggccgaattgcacgggcatacccgcatcctcgcctttacccctatcaagggcctgccttcggtgacctggtacctggcgctgtccatcgacaaggacaaggcctacgccatgctcagcaagttccgcgtctcggccatcgccgccgcgctgatctccatcgtcgccatcctggtcctgctcggcctgctgatccgcctgctgatgcagccgctgcacctgatgggccgtgccatgcaggacatcgcccagggcgagggcgacctgaccaagcgcctcgccgtgaccagccgcgatgaattcggcgtgctcggcgatgccttcaaccagttcgtcgagcgtatccatcgctcgatccgggaagtcgccgggaccgcgcacaaactgcacgacgtctcgcaactggtggtgaacgcctcgaactcttcgatggccaactccgacgagcagtccaaccgcaccaacagcgtcgccgcggcgatcaacgaactcggcgccgccgcccaggaaatcgcccgcaacgccgccgatgcctcgcaccacgcctccgacgccaaccaccaggccgaagacggcaagcaggtggtcgagcagaccatccgcgcgatgaacgagctttccgagaagatcagcgcctcctgcgccaacatcgaggccctcaacagccgtacggtgaacatcggccagatcctcgaagtgatcaagggcatctccgagcagaccaacctgctcgccctcaacgccgccatcgaagccgcgcgcgccggcgaggccggacgcggcttcgcagtggtcgccgacgaggtgcgcaacctggcccatcgcgcccaggagtcggcccagcagatccagaagatgatcgaagagctgcaagtcggcgcccgcgaggcggtggccaccatgaccgagagccagcgctacagcctggagagcgtggagatcgccaaccgtgccggcgaaagcctgagcagcgtgacccggcggatcggcgagatcgacgggatgaaccagtcggtggccaccgccaccgaggagcagaccgcggtggtcgactcgctgaacatggacatcaccgagatcaacaccctcaaccaggaaggcgtggagaacctccaggccaccctgcgcgcctgtggcgagctggaaacccaggccgggcgcctgcgccaactggtggacagcttcaagatctga

SEQ ID NO: 326725 - DNA, 609 bp, Pseudomonas aeruginosa
atggtaatgtcgctgatcctcctggcgccgagctggggcggcatgatcaacggcatgatgaccctctcgggcgcctggcataagctgcgcagcgacccgatcctgcgcttcctggtggtgtccctggcgttctacggcatgtccaccttcgaaggcccgatgatggcgatcaagaccgtcaacgccctctcccactacaccgactggaccatcggccacgtacacgccggcgccctcggctgggtcgcgatggtttccatcggctcgctctaccacctgatcccgaaggtcttcggccgcgagaagatgtacagcctgggcctgatcaacgcgcacttctggctggccaccatcggtaccgtgctttacatcgcctcgatgtgggtcaacggcatcacccagggcctgatgtggcgcgcggtcaacgaggacggcaccctgacctactccttcgtcgaagcgctggccgccggccaccccggcttcatcgtgcgcatgctcggcggtttcatcttcctgctcggcatgttcctgatggcctacaacacctggcgcaccgtcagtgccgccaagccggccgaatacgaagccgccgcacagatcgcctga

SEQ ID NO: 326726 - DNA, 135 bp, Pseudomonas aeruginosa
atggaggaatgtgccgaaggatggtgcaacgaggcccagcatctccaccagcaactggcggaagccaccgctggccaggcggctatcacccagtccggcgccctgatcgtcattccgatggagcgctgcgcatga

SEQ ID NO: 326727 - DNA, 300 bp, Pseudomonas aeruginosa
atgagcaccaaacgcacccacgacagcgtcagccgcgccctgcgagtactcaaggccctacgcggccacaccctcaatgggctgagtaacgccgagcttgccaaggcgctgggcgagagcccggcgaacatcacccgctacatggacagcctgatcgaggccggcttcgccactcgcctcgacagcggacgcttcgccccgagcatcggctttctgcaatacgcgatggccaccgccgaggagctgcagcgcggcgccgcacgcatcaacgagatccaggcgcgcatcagcgcccactaa

SEQ ID NO: 326728 - DNA, 957 bp, Pseudomonas aeruginosa
atggctcgcaaatcacaagccgctgttgaactgctcgaagatgacatcgagcaaggtcaggccctgctagccaagcagcaccaaatggccgcgctcaacaccgaacacgacaaccaggtccgcgctgtggctgcacaactgggctatcaactaccggccgattgcacggacccagacctgatccagcgcgacatcgccgccaacatgcgccgcagcgtagaggcgtgccttgaagtggggcgtggcctgcaggtgttgaaaaaggcatgcggacacggtgagttcgctgatcgcctggaggtattgggaattgaccgtcacgttgctgcccgcttcatgcagtcggccgccaagttcgccagcctgggcaacaactcgacgttgaccaaagctattggcaatcagaccaagctcttcgaaatgctcgtcctggatgatgaagagatccaggagctggaactcactggccagaccggcgagctgagcattgacgatgtggccaccatgtcggtcaaggaattgcgcaaggccctgcgcgaagcccgcgaagacaagaaggccctcgcccaggtcaacgccgacaagaacaccaagatcgacgaactggctgctcaactggcgcgaaagccgctggtggtcgtgcagccgatggatgagcagttggccgaacgacgcgaagaactcgctatcaaggccaccgcggccgaagccgccattgccggcgcactgcatccggccgtccaactgctggtcgagaaaggcgaagagtccgggcaagaccagcgtccgatcatcgccggcatgctcgcccaggtagagcgggcgctgctgcagatccgcgctgaatacaacatccccgccacgccgtccgctagtgccacgccgacctggatggctgatgacagcgaggaggcggtgaaggccgcgttggccgaagccgccaagcagggtgagtaa

SEQ ID NO: 326729 - DNA, 1779 bp, Pseudomonas aeruginosa
atgagcgccgtgatgactcaacgcctcgttgccctggcacacgagctggatcgctccaccgcgagcagaacagagctgtgccaagcggctgcggacgatctgcgcatctccctggcgactctgtaccggaaattgaaggaggtcactgtgacccagccccgaaagaagcgggtcgatgccggcacctcagcgttgactcgcgatgaggcggagctactcagtaccacgctgatccgctccatccgcgataacgacaagcaactcagcaccctggagcgcgccgtcgagcgtcttcgcaacaacggcaagatcgtcgcaggctctgtggatcaccgtacgggtgaagtcacgctcatgtcgctcagcgctataggccgggccttgcgtgcctatggcttgcaccctgagcaactgctgcgcccggccccagcggtcgagttggtcagtctgcatcccaaccacgtctggcagatcgacgcctcgatctccactcagttctacctggccaatgacggcgcacgtgccatgaataaggccgagttctacgacggcaagccagagaatctcaagcgcatcgagaagcagcgcctatggcgttacgtcatcacggaccacaccagcggtaccctgtacgtgcattacgtgctcggcgctgaaagcgcggagaacctctgccatgtactgatcagcgcgatggtcaagcgtggtgataccgacccgttccatggcgtgcccttcatgatcatgaccgaccccggtgcggccatgacctcctcgatgttccgcaacctgtgtcgcgccctgggcatcgaactgatcatcaacaaagtcggtaacgcacgcgccaagggccaggtcgagcaggcccacaacatcgtcgagcgtgagtttgaaagtggcctgcaactgatgcagaaaccgcgcactctggacgagatcaacgggctggccggacgctggatgcggcactacaacgccaccgccatccacacccgacatcaccgcactcgctacgcagcctggatgacgatcaagcctgagcaactgcgcattgcaccgcctgcagagacgatgcgcgaactggccattgccgcaccggagaaacgcaaggtttctgcccggctgcgggtgccgttccgcggtgccgaatacgacgtgtccgttatccagcacttgcaggtcggtgaccaggtgctggttacccgcaacccgttccgcgatgcggatagcgctcaggttgtgcttgttggagacgacggtcgcgagcactaccaggtgatcgagcgtgttgagcgtgacgacaacgggttcgcggctaacgctgccactcgccgggtgattggcgaagagcaccgagccttgccggagacagccgcgcagaaggaccgcaagcacctggaccagctcgccaccggcaccacctcggtcacggaggcagaaaaggcgatcaggtcgcgagcagtgccgttcaacggcgagattgatccgttcaaagaacaggccaacaccgtgttgccaacctacctgcccaagcgcggtaccgagttggagacccgcgtcaccgtggctggcttggcctcggtcgagctgaaaccactgaaccgcatcgagctagccaaggcgctgcgcgcacgtcttggtacagcctggacaccggcatccatggaatggctcaagaccaactacccggaaggcgctatggaggagcaactcgacagcatcgttcagcagttgcaggcacctgcacgcccaagcctgcgcctggtagggggtgagtaa

SEQ ID NO: 326730 - DNA, 1170 bp, Pseudomonas aeruginosa
atgctgcgcctgaaggaagtactcgcaaccctcagccttggccaggctgatctggccagggcgatgaagctcagcccggcagccatcgcccagttggtcaatcacgaccagtggcccaagtccatcgacaagcaggagctgtggggccgcatggccgactggctctatgacgttggtgcgcaagacggcgacatcgccgccttggaagaagaagtggagtcgccgcgcgccaacgcggcgactcctgcaaccccggaaaccaatcacgaaaaccaggagtgccccgacatgctaatggcaaaacaatccctgcggccagacaccaagcgcgccttcggcgtgatggtcgacccgtttggcgatctacgctgcgccgaagacatgtatttcagcggcgatattcgctacatccgcgaatcgatgtaccaaaccgcacgccatgacggcttcctcgccatcgtgggcgagtccggtgccggcaagagcactctgcgtcgcgatctgacccaccgtctgcgcaacgagccggtcatcaccatcgaccccttcgtggttggcatggaggccaacgacatcaagggcaagaccctgaaggcgactcacatcgcagaagccatcatgtatgccgtggcaccgctggaaacgcctaagtccagccccgaagctcgcttccgccaagtccacacctgcctcaagaactcatacgccgccggcaaccgtcatgtcgtgatcatcgaagaggcccactcgatcccgacccagaccctcaaccacctcaagcgcatgcgcgaccagttcgaggacggatttgacaagctgctcagcatcatcctgatcgggcagcccgaactgctcattaagttgtcgccacgcaacgccgacgtgcgcgaagtagcccagcgggtcgagatcgccatcttgccggccatcccctcgggtgatgtagagcagcacctggcatttcgtgtcggacgcgccggcaagaagctggacgaactgatcgaccagggtggcatccacgccatcgttgaacgcctcgccagttccggcaaggacggaaccagccagctctatccgttggctatcggaaacctcttcaacgcagcgctgaacctggctgccgagatcggtgaaagccgcattaccgctgatgtggtcaagggggtgtga

SEQ ID NO: 326731 - DNA, 315 bp, Pseudomonas aeruginosa
atgagtgctgaaaagtaccgctccgagcaggtccagcgcgctctacgggtcatgttggccctgggggccaacgagtttcggggactgctcctgaaggaggtggcggtcgccgccgagtgcgatgcgagtaccgcgctgcgcgccctggagaacctgcgcatcgccggtatagccgatcgcagcccgcatgacgacaagcgctggctgctcggaccgcgcttggtccagttggcctttggcttcgacgaagccctgcgccgcggccaggacgaactcaacgagcgtcgccaacgctacacccgtctcccgaactaa

SEQ ID NO: 326732 - DNA, 882 bp, Pseudomonas aeruginosa
atgaaggtttttctgagctggtctggagagcccagtcatgcagttgcaatggctcttcgtgagtggctaccgagcgttatccaatgtgtagagccctatgtgtcgtctaaggatattgagaaaggtgcgcgttggtcttcggacatcgctggtcagttggacgcatcctcctatggcgtcatctgcctcaccgcttcaaatctagaggccccctggattaactttgaagcaggagccctagggagaagtgttcagcacgctcgtgttagtcctttgtgtttcaggatcaaaaaaactgacgtgaaaggccccctcgttcagttccagctaacagaggtggagcgtgaagacatgtacgcattggtggagtctattaacagtgcgtgcggagatgaaggattgacgccagagagactcgaaagatcatttaatcgctgctggccagaactagaagaggcactcgtcaacatcccgcaagaagccggagcgaaagatgccaaacggacaaaaagtccatcctctgaagttacaccacttattgaggagcttcttgcgttaacgagggaaaacaccaagctgttgaagcggaggctgctgaataggcccttactggaggactcatttacgacacaagtcaaagacaatgctctctccttgttactgcaggaagtgaattctctatggaacttcgtgattacgaatgaggaaacattcaatggaacgtctgttggccaagcgttgattcggagggtcgaggctcttgcaaagacggatgttagagcacactttcctacctcccattgggagggcatcagaaatatcaagttcaaccctagcgatgtccttatcagcagattcaaagtacctgacgacgagaactaa

SEQ ID NO: 326733 - DNA, 210 bp, Pseudomonas aeruginosa
atggctacccagaaggtactgacccctgaccaggtcaaacagcgtttccgccagcgcggaatcaccattacccagtgggccgcagagcatggttacaagcgcaacgctgtgtaccgcgtgctcaacggcttcgacaaagccaactacggccaggcccacgacatcgccgtagccctcggcctcaaggcctgcgaccccgtcgctgcctaa

SEQ ID NO: 326734 - DNA, 1035 bp, Pseudomonas aeruginosa
atgtccatcaatcgctttcaggcttctggccagcgcctggctgcttgggctcgccagcaaggcttggtgccggcatcagttgaaaccttgaacgccgcagcagcacctcgggttcatcaaccagcatcccaagcattcgctgaaacagcacgtcctgaagcgagtccggctctatctgctggttgtgccagtccgcaagtagacgggcgtactccgctgtatccaactgccccgtcttgcccagtgtcagcactaacgcctgaagcagttgcatcagtccctcgatgccttccagaggccagtcccggcccgtttcctgttcttccatccgtcctcctaccgagggtcaccgccatgaccgaccaaccgcaactcatgaccgaggagattgaactgatcccccatcctatggacgcctggcgtgccgcgctcaacgcgctgatcgcctgcgcccctggcgacagtgcagccatcgccgtacacctagccgaagcccgccagcaggccctggtgttcgtcgatcgcactgctgccaccgagggcacccgcaagttggtcgaccgtctgatgctgatcggcgctggccgtatcgtgggtgatcgtcggcagtcacaagccgctccagcaaccgttgcatccctaaaccgccgcgtaaccgcccgcatgaccgtagtggtcaacggcacggactacgacgtatccgccatgcccggcgtgatggtgggcgacatgatctgcgtcgatcccaacaacatgcctccagcgctcaatcctgatgctgttctcggaggattctttcaacttggccgggtgttttccctgcctgaagcaggtactccctcaggacctgatcagccaagtgctcaagaaaatgagctacctccggttgtacctgcaacagatcggcgtggcggcgcatctcagcctgcaaacgctgagtgtcaatcacaccctgctgctgcagaaagccagccaacaccacatacccacgctcaagcgcctcaaaccgcgccgcaaaagcctgatcagccataa

SEQ ID NO: 326735 - DNA, 756 bp, Pseudomonas aeruginosa
atgtccacgcacgaagacctgttgctacaactcatccagcgtgagcccgacaagatcaggagcatcctggggctgcctgctccaaagccagacctgtcctggtacgaaggagcagaggtctggatcgaagctgggcaccgcagcgacagggccgcggaactacgcatagccttcggggagccactcccgcatggctatgccgatttctggataccgttcagcggaccggatggcaatgcgctgggctggctgcgcttcagctacatcaccacggtacgagagaaaccgatgttcactgcctgcgaatggcgttcggcaagcgagctggcaccggccaaagagagccgtctggatctgcctatggactggctgccgaaaggtttcgctcccgagtccagcaacggtgcgaccggatgtgccgatcagcagccagtagagcagataccaagcagtgccctgcgccaccttgaggagtcccggcgcacattagcagcttatcgtacagagatcgaagaggaggccaggcgtcagctcagtgaagcctcttcccatatcgagactgagaacaatgctgaagatcctgccaacagcatggctgcggccgctcgcataattgcgttcatccaggagcacatatccgacacccagtcctgctcgcggatggatgcgctctggctggctttcctggggctgaacggacctgcggcggccaagcaagtgatggagtgctacttgcccatgacgtccaggagctga

SEQ ID NO: 326736 - DNA, 204 bp, Pseudomonas aeruginosa
atgaatgatttcagtgaagaaaccaagcgagaagtcatgaagttggccgtgcagctgactacgacttatgttgagcgccgaaacccggtactggataaccgggaccgacactggctcggcatagaggagcgcaagactcctccacgcttacccgacatcattgaggggatctaccgtcagctcctggacgtcatgggcaagtag

SEQ ID NO: 326737 - DNA, 504 bp, Pseudomonas aeruginosa
atggacttcaaagtattgctgggggcggtgatgctggcgggcctgtcggtggccggatgctccacgaaaaactatggccgacagccggaactgaccgatttcgaacggcagaccatgagctgtcgcgagatcgacttggagcaggccaaggttcagggcttcctgagccatgtacgcgaagagagcgagttcgacggacgctcggtgctgtctttcctgggcgacttcgggatcggcaacctgatggagaaggacgcagcggtcgacagtgccaatcagcgcctgacccagttggcaggtgccaagatgcagcgcggctgcacctatgcctatgaggctgaggccccagctcagcagccgtacgcgccaccacgcgcctatgccccagacgggcccgcatcagcttctgcgcgttctgtcgacgcccagctcgacgagctgaaccgtatgcaattgccctacgaggagtaccagcggcgataccgagaaattacggggcaataa

SEQ ID NO: 326738 - DNA, 231 bp, Pseudomonas aeruginosa
atgaacgtcccgtatccgctccctacccgccagccgtacaccggtgagcgcgtcaaggaactcttccacgctgccggaacggccatctcagcctgggccgaggccaatggctatacccgccatcaggtctacatggtcatcaatggccagttcaaaggccgccgtggcacctcccacgaaatcgctctgaagctcggcatgaagctctccgtcgagcagctcgccgcctaa

SEQ ID NO: 326739 - DNA, 1407 bp, Pseudomonas aeruginosa
gtggccccggcttccgccgtaccgctgatgacgactccattgctcggattgatcaccggcgccggcggggcgatggcatcgacggtgacgctggccggaccgctggtgttgccggctgggtcctgggccacggcgttgatcacggtgccgttggccagcggggtgcccggggtgaacgtccagttgccgctgccgtcggcggtggcctggccgatcgggttgccgccgccatcggtgaggatcaccgtcgcgccggcctccgcggtaccgcttatctcggtgccgttgctcggatcgatcaccggcgccgccggggccacgccatccacagtgatcaccgccggcgcactgtcgacattgcttgggctgcgcgccaccacgttgacaaccgtgccatccggcagcgggatgcctggagtgaaggaccagttgccgctgccgtcggcggtgacctggccaatcgggttgccgttgccatcggtgatgatgatggtgttgccggcgtccgcggtgccgctgatcaccgaaccgttgctcggatccacctgcgggatcgacggcagcgaggaatccaccgtcgtggtagcgggaaggctggtattgccggcggcgtcgctcgcggtcacgttgaccacggtgccgttgggcagttgcgagccgggcgtgaagctccagttgccgctgccatcggcggtggtctggccgatcgggttgccgttgccgtcggtcaaggtcacggtgctgcccggctcggcggtaccgttgagcaggttgccgttgctcggattgaccacaggcgtgttcggcgccaccgcgtccacggtagtgctgccctgcgggccggtattgcccgcagggtcctgggccacggcgttgaccaccgtgccgttggccagcggcgtggcgggcgtgaaggtccagttgccgctgccgtcggcggtggtttcgccgatcgggttgccgttgccgtcggtgaggatcaccttggccccggcctccgcggtgccgctgatggtcgtgccgttgctcggatcgatcaccggcgccggcggcgccaccgcgtccaccgtggtggcggcctgcgggccggtattgccggtcgggtcggtggccgtggcgacgatcaccgtgccgttggccagcggggtgcccggcgtgaagctccagttgccgctgccgtcggcggtgacctgccctatcgggttgccgccggcatcggtgagggtcaccgtggcaccggcctcggcggtgccgctgatgacgacgccgttgctcgggttgatcaccggcgccggcggcgcgctggaatcgacggtcaccgtcgccggcgggctgctgttaccggcggcgtcctgggccaccacgttgaccacagtaccgttggcgatcggcgtggacggggtgtag

SEQ ID NO: 326740 - DNA, 387 bp, Pseudomonas aeruginosa
atgcgcggacgcgagaagccggacggcaaggactggcaggacatgaccggctaccgcgtgccgccgctgaagctgaccgcctacctgcaatacaagccggatgccgactggaacaaccgcctgcaggccaccttcttcgactccaaggactaccgtctcgacggcgtggaaagcttcggccggcgccaggtcagcacctacaccacggtcgacctggtcagccagtaccgcatcacccccgacgaccagttgagcctgggcatccagaacctgttcaaccgcgactactacccgctctacagccagttgctgcgcaacaacaacaacaccagccacctgccggcgccgggcacggtgctgacggcgagctatacgcacaactggtga

SEQ ID NO: 326741 - DNA, 837 bp, Pseudomonas aeruginosa
atgccggtttcgttacccttcgagcaagtcgatgtcttctccgaacagcccttcaaaggcaacgccgttgccgtggtgattggcgccgaccgcctgagcagccggcagatgctggagttcgccgcctggacccagttgagcgagacgaccttcctgttgcggccgaccactgccgaagcagactaccgcgtaagaatcttcaccccgttgcgggagttgccctttgccgggcatccgacgctggggagctgccaggtctggctgaaccaggggggcggcaatgctgctgacgagatcgtccaggaatgtctggcgggcctgatccgcatccgccgcaagggcgccttgctgtcgttcgcggcgcctcccctgcttcgtggcggagcagtcgaagacgaggtgttgcgacggatcgagagcgggcttggcctgtccccggggcaggtactcggcagccaatgggtggacaacggacccggctgggtcgccgttcggctggccacgcgtgacgaggtcctggccattcgcccggactacgcgaagctcgacgggctcaacgtgggcgtggtcgcgccctggcaaggtccccaggcggaggcggatgtggaagtgcgcgccttcatgggcgaggagctcaatgaagaccccgtcaccggcagcctcaacgcgagcctggcgcaatggctgatcggcacgggagtcatgcccgggcgctacacggcgagccagggcacggccttgggtcgccgggggcggataagcgtcgagcagatcggcggcgatatctggatcggcggtgaggtgcagccgggcatgtcggggcaggtcgtgttctga

SEQ ID NO: 326742 - DNA, 645 bp, Pseudomonas aeruginosa
atggcccgcaaatccagtaacgacaaggacaaagcggctgcacctgctgcacctgccgcacctgccactaccggcgcacagccgccggcggaggagagcctgatcgacggccaactggccggcgttcaacaccaggacggcgctatcgttccgctcgccgaactaccggaagcggaactgcgccagatcgctaccgacatggagatccaggacgccgccactctggcgatcgagcagctcgtcgcggccatacaggcgcagaaggtggtcgtgccggccggcgatgaagatggggtggtcaatcccgaagcggcggaatcgcctttgcggatcgcggacgaggtcgggcgctaccaggtgctgctcagcgacggttcgctggcctatctggaagatctggtccaggaggatctcgaagcgctggctgctgcctgttacgaactggcgattcagtcgcgcggcggcgagctgggccggactatcggggtggatctggccgccggcctcaaggaccgcttcatcgtgcagcgcgagcgtctggaccatgacggggagacgtacacccttggtgacccgatctacctggatagcccccaggctgctcagttgctgccattgggcgctatcgagcgggagcagccgtag

SEQ ID NO: 326743 - DNA, 732 bp, Pseudomonas aeruginosa
gtggagttcagcgccaccgacgaaactggcagcaccgaggaccacggcctggacgccccggtgccgcaggcggacatcgacaacgcaccgacgaactacaaccccctgggccacgccaccgagcagaccaccaacctgatcctgctcgatcgcgaagctcggacttccaagttagttttcaaccccaacagctatgccgcgggcaacaaaaggacactgtctggcaccgatcaatggagcgacccggccagcaacccgctgccggagatcaccgacgccctggacagcgtcatcctgcgcccgaacatcggcgtcctgggccgccgcaccgccaccatcctgcgccgtcacccgaagatcgtgaaggcatacaacggctcactcggcgacgaaggcatggtgccgatggccttcctgcaggagctgctggaactggacgcgatctacatcggcgaagcgcggctgaacatcgctcggccggggcagaatccgaacctgattcgcgcctgggggccgcacgcatccttcatctaccgcgatcgcctggccgacacccgcaacggcaccaccttcggcctgaccgcccagtggggtgatcgcgtatccggttcgatcaccgacccgaacatcggcctgcgcggtggccagcgcgtccgtgtcggtgagtcggtcaaggaactggtcaccgcaccggacctcggcttcttcttcgagaacgccgtcgcggtttaa

SEQ ID NO: 326744 - DNA, 378 bp, Pseudomonas aeruginosa
atgaacattcccggactcatcgccgccaaacgtgccagcggcgccatcgccgcccgccgcatcgtgattcatggcagctcggacggcctggccgcccaggctgccggtagcactgcgctgctgatcggcatcagcaccgaaatccccgccgccgacggtgcggtcttcgacgtcatccgttccgacctggcgccggtcgagtacggcggcaacgtcacccgcggtgatgcgctgacggccgacgcccaggggcgagcggttgccgcgacgctgccgccggccgccaccacttacatcatcggcttcgctgaactcagcggcgtcgcgggtgatatcgggtccgtctacatcgccccggccgttctgccggtagcctga

SEQ ID NO: 326745 - DNA, 465 bp, Pseudomonas aeruginosa
atgcctgacgaagctgcgctccaggagcgccaacgccagctcgacgagcgcgagcaactgctggccacccgcgaagcacaggtggcccagcaaaaagcccaggaacatcgcaacgaggtcaccgagttcgccgaagccctggtccaggccggccgactgctgccgcgccagaaggctccggtgatcgagctgctggtgagtctgcctaccgacaccccgctggaattcgccgagggcgacggccaggtcaccaagccggcggccgaggtgctgcgcagcttgctggccgaactgcccaagcaggtggacttttccgagaaatccggcgacggcggcgacctgagcttcggcagtgctcacgccattgcagcgcgagcgcagagctatcaggaagaacagcggcaggctggacgccatatcagcacgaccgaggccgttacccacatcaccaagggagccaagtag

SEQ ID NO: 326746 - DNA, 822 bp, Pseudomonas aeruginosa
gtggtctgttcagctttcgatgtggcgcggtcttgctactacgtccaccgtcttcgacggcggcgtgtcgatgctcgccgcgtggcgctgcgtagccaggtcaaccagttgttcagccagagtcggggctcggccggcagccgcagcatcctgggcatgctgcgcgaagagggcgtgaccatcggccgtttccgagtgcgtaggttgatgcgtgagctaggcctggtcagcaagcaaccgggctcgcacgcctacaaacaggccacggttgagcggccggatatcccgaatcggctgaaccgcgaattcgcgaccgagcatcccaatcaggtgtggtgtggcgacatcacctacgtctgggcgcaaggccgttggcactacctggccgcggtgctggatctgcatacccggcgggtgatcggctgggcgttctcggccaagccggatgccgaactggtgatcaaggccctggacatggcctacgaacagcgcggcaagccacagcaggtgctgttccattcagaccagggcagccagtacgccagccgcctgtttcggcaacggctctggcgctatcggatgcagcagagcatgagtcgccgagggaattgctgggataactcgccgatggagcgcctgttccgcagtctgaagtcggagtgggtcccgtcaacgggttacctgacggcgcaggaggcccaacgggacatcagtcattacttgatgcaccgctacaactggatcaggccgcatcaattcaacgacgggttaccacctgcggtggccgaagaaaaactcaacccactgtccgggatgggttga

SEQ ID NO: 326747 - DNA, 168 bp, Pseudomonas aeruginosa
atgagttcgatcattctggagatgccaaacgcagacgccgaagctctgctgcgatttgtgcagaaagttatcgctcgggaacagtacccctctgacccatgggaggcatcccgtttggagtctgcgctggcagccctggtggaggctctagaggctgatgtggggtga

SEQ ID NO: 326748 - DNA, 297 bp, Pseudomonas aeruginosa
atgtcatcgccgcaaccccggcgccgccgcgcgccgcgtatgaccagctggacgctggtcaccctcgtccttctgatcatcctcgccgccattcgcccggagcagctccaggtcgtcgcctataagctggtcctggtgacgctgggcgcagtggccggctactggatcgaccgcagcctgtttccgtacgtggcccgcccgcacgaatgctcggccaacctggtggtcgtgggtgcctggctgcgccgcgggctgatcgtgctggcctgcatcctcggcctgacgctggggctctga

SEQ ID NO: 326749 - DNA, 195 bp, Pseudomonas aeruginosa
atggcccgtaaaacgagcaacgaccaggatgcacccaacaccgagggtgtcggcgaaaagaaccgctacatcgtcaaacgcgaacgcctggatcacgacggtgagtcctacacctttggcgacagcattctgctgaacagcgatcaggcggaccagctcctgcccatcggcgcgatcgttccagaggtgctgtga

SEQ ID NO: 326750 - DNA, 327 bp, Pseudomonas aeruginosa
atggacaaccagcaccgcaagatcgccggctatcgcgagttgactcaggacgacatcgacctgatgaaccgtgtcaaggccgtaggcgcggaactgctggcattgcaggccgcgttggccggccggctgagtacggacctggaggttaagcaggccgccgcaaaggcgtcgaagctggcacctgagcatgagtcgagcccggagtgtgtcgagcttcgtcgcttcctggctgcagagccgttgcgctgggctgcgatcgccaagaccgacatccagacgggtgtcatggccctggtgcgcgccatcgctcagcccgagggctgctga

SEQ ID NO: 326751 - DNA, 393 bp, Pseudomonas aeruginosa
atgcccggaaccgcggagtggatcgccggcctgtatccggccgcccttggcaccaatcagccgttcaatcctggctgggcactgcgtgcgctggtcacctacgaccgttggctctacgaccgaaaccaggcctccagcgagtgtgatcgctgggcattcgtactgtccgcttacaacggcggccaggggtgggtaaatcgcgaccgtaggctggcctcggcatccggcgccgaccagctggcctggttcgattccgtcgagcgcttcaacgccgggcgctcggccgccaacttccgcgagaaccgcaactacccgcgcctcatcctgctgcgctacgagcggatctatctgcagtggggcgacggtgtgtgcggccagaggtatcagctatga

SEQ ID NO: 326752 - DNA, 1053 bp, Pseudomonas aeruginosa
atgactgaaatatttgttgtacgccccttcgccaacacaagtattatgtggtggtactcagagagagaccaaatagatctttctccaccttatcaacggaaatccggcgtatgggcttccaaagataaagcatacctcatagactcaatcatcaatgggtatgacatacccaaattttatattgctgatttcagctacaccagtagcgatctaaatcaatctggacgcccatttgcggttatcgatggacgacagcgctttgaagcaatatttgactttcttgatggacgattccctttaaatagcgacataaaatatttagcagacgaatctatacacttaggggggatgacatcaagagaattagaaaagttccacccacgcatcctaaaaagaattgaaagcttcaacatatctgtgatgtcagttataacaaaccaggctgaccgaattaacgacttattcgtccgcctcaataaaagcaagccacttactggcgctgaagttcggagtgcaatgactggcgaaataccccagtacataagaaacacggcagcacacaaaattttcaccgagtcagtaggcttctccaatcaaagaaagcagcatgagaacgtcgccgcaaaaattcttctaattgaacacagaggaagtttcgtagagacaaagaaaacgaatctggatagatttgtttccgaagcactgttgactgagagcgaattctcagtaacagcaggacggaccataaacgtactagacaaaatgctcaaaatttttggaaaaaacaacagcctactaaaatcttcaggcatgtttcctgtgtactactgggtcgtaaggaaactatatgaaacccctaacctaaatcaaaaacttcatgagtttgaaagttttagaaagaaaaatccaacccatccagcagttgctgccttcaattctgtaagccgcagtacaaatgatgaattaagctacaatattagattcgccgtaatcgaaaaatacctaaacaacaaagacgacctagacaacttcacaatgagcgatctcatgtaa

SEQ ID NO: 326753 - DNA, 765 bp, Pseudomonas aeruginosa
atgacacagattataaatgtaacaaagctccaccagctaattagcggcattgaagcctcactagaagaaagagatggcccccgctggttccgcggctgcggaaactttcccaatcatcgcctagaaccgactctgctacgccatccaaaaataagatctggcgaaacaaccccgctcattgttgagcaaaacctaaaaaatcgcttccgccaaacaagcgcaccatttctttcaaatacgcccacaacggatttcgattggctttttcttcaacagcattatggcgtaccaactagactactggattggactgaaaatcctttcatcgcactttattttgctctctcgagcagcagtcagactgaaaatgcatgcgtatggatgctagaccccataaagtggaatcagctcgcactgaacaaccctcagctagaccgcgtccctgatgcactaatgccacaagcaactcagtttctaagcaatccgggtgatgatttctccccaagcgaccccattgcgatatttggaaaccatacaaacccaagaattacagctcagcgcggaacatttgttatgttctgccgctccactgatccaatggaagacaaaaattacgcagagcaatgcctaaaatgctatgtaatcaacgcagatttcaagacaaatatctatgaaaaattactctcaataggttacacccactctgtcgtttaccctgatttgtcagggcttggaaccgaaatcaaaacctcttacgggttctaa

SEQ ID NO: 326754 - DNA, 678 bp, Pseudomonas aeruginosa
atgagccgcaccgatccgcaattcaagctccgtatgcctccagcccttcgcgctcgggttgaacaggctgccaaggcctctatgcgctccctgaatgccgaattggtcttccgtattgagcagagctttgaaggcgctgaggtagctcgcgctctgtcgagcaaccctatccatgcgctgctgaccttcttggaaggctatctgctacaaacggcacagccccctagcgaacccttcgaccgcgccctgatgctgatcgatggcctcatggacgccggctacctctcccaaccggaagaatcctatctgactgacctgcgggttgaagctctcgcctggggccgtgctcgccaagataaggaggaagctgaccatgtcgtctccgaattacttgcgccaaacccacgctccggactgcgcctgctctgtgtgctggtccgcaaggcaggtcgttgcgccgttgtgcagccaatctccgtgtacggactgccagccccctgggctgccctatctggaaggtggccgctggctctgccgtccccgtttcttctgcgcgaaacacgacccgtcgcggcgtccgccgaagtactggcacgttgtgtacgacagcgggaaacccacgcccttcgtgcccgtgcgcgaagcattccaattggagggctgacccatgctcgctga

SEQ ID NO: 326755 - DNA, 1293 bp, Pseudomonas aeruginosa
atgaagaaaatcagccatcaaattcgcgtcagtatcgagtcggacggtcaggtcttggaaagcccgaaagggcggttgttcttcgacgacaccacggctcaattcaccgacctgtcaggcgtgcgcattctgcggtgcggcgtggatacggtgcggcagttgtacaacggcaagttgcgcccggaagtgatagcgctgtttgacctctcggtggatgtggtcgagttcgccggctacgagtggtccaagggccgcatcggtcgcgactccggctatcagtaccgtctgcagaacgctgaaatggggctgatcctgctgatcaagaatcacaacatcaaggtcgatacccttggctcgcacctcaagatcgaggtgtcgccccatgccctcgacggtgccgacccgcatatcctccagggcgtgctggatgacttggccgctgccgtgctgagccactgcgagaccaaccaagccgctgtgcatatcgccctggacgtacaaggctggaaaccgcctcgcgatctggtggatcgcatgcattgccgctcgcgtcgggtgcggcaaatcagcgggatcgagcggatcgaattcgacggcaacgcctcggtctacgggcgtggcgagacgtacatgttcggctcggccaacggcctgcaactgtcgatctataacaagaccctccaggctcgggccaccgacaagctcgactattgggaaagcgtgtgggccaccctgaacggggatccattcggcgatggcgacccggcctataaccccctggaaacggtgtggcggctcgaattccgtttccatcactccatcgtccagcaattctccgaaggctcgcgtatggcctcgggggaggtcattggctgccgcacctatgagggcctctgcccgcatctgcaaggactgtggaactacgcctgcgaaagcttcaagctgctgagccggacggcggtctacgatccgttctggagcctgatcagccaggacgcccgcgtccaggtcgagtgcgatccgctgatcgagcgcaccgagtatcggcgctactacaagaccgccaagggcttcagcgggcgtaactgcgagatgttcctcggccagttcgtgagcctgatcgcgcgggagcgtgtcccggcaaaaaaggctattgagtccgcccgtaaactggagttctggcacgttatcgaagaccactacctggccaagggttggactcgtcgcgatctggaaaggcacatacacaagctgatgtgtgatcggtatctgcggcgggggtatgccgtctaa

SEQ ID NO: 326756 - DNA, 993 bp, Pseudomonas aeruginosa
atgtcgatcaccaagctccccgatggccgttggttcgtcgatgtagaaccgatcaagggcaagcgctttcgcaagcggttcaagaccaagatggaggcgcagcaattcgaggccaccgcgcgtcagaagtgtgcggaaaacccctgctggacgctcaggccgaaggaccgtcggcgtctctcggagttggtcgaactctggtatgaactgcacggccagaccctgagcaacgggcatcgttgcgtggcgattctgcggttggtggcaaaggacctgggcgacccggtcgctgtctccctggagcccgcgaaagtggctcggttgcgtagccggcagatagccaatggcatgtcgggcaagaccgcgaataaccgtcttggctacctcaaatccatgtacaacgaattgcgtcaactcggcgtcattgactatgagaatccggtagggcgcatgcggccgctcaagcttcaggaaagaccgctgtcgtacctgaccaagcatcaggtgtccgaactgcttacggccctggatgcgcgcaccacgtcgccacatccgaagatggtcgctcgtatctgcctcgcgacaggggctcgatggggtgaggctcaggcgctgacgccggaacgtctgaaaggtaatgcggtgatcttcgccaacaccaagtccaagcgtgtgcgctcggtgccgatctcggaagaattggccgccgacattcgccggcattggcagacccacgggccgttcacgaactgccttggcgtgttccgcctggtgctgctgtcgacctcgatcaagctgccgaaggggcaggccagccacgtactgcgccacacgttcgccagtcacttcatcatgaacggcgggcacatcgtgaccctacagcacatcctggggcacgcctcgttgtcgatgacgatgcgatatgcccatctgtctcaagatcacctgtctgaagcagtccgtttaaatccactctgtacgactaatttctga

SEQ ID NO: 326757 - DNA, 1089 bp, Pseudomonas aeruginosa
atggaacagccattcgatctggccgcagagttagccaagcaaccccatctgctggaaatagccggcaacctgttgatgaagggcggccccgaagactatatcggtgcagtgctttgcctacgcggcactctctacttcaaagaggcccatacccctctggtacgagagtcattatgccaatgcttcgatgagttcaagcgcctggcagagccccacctcacccggctctggcgtgaagagcctgcacaaggaaagccactgaccgcataccgtgacacccaaccactgcgcgagatgatgggggcaatggatgaagacgatcatctcagcttctgctacaccagcggcaagaaatcccgcgatgcaggcgcctggctgtttgatatttacggcaagcggagctggcaagccaaaatggggcatgatcttagtgttctggagttctccgtacctctgctatatcaagagcagcagccattggatttcctacagctatttatcgacttcgcacgtcgactagagcctgagcaggggtatgcggggcatgcctacaatctctcgccgaccagttgggacaatgacgagccctccgaagcctttatggcggcgcgtatgccgggtttggatgtagggacggcttgtctgttggccaatactcccgagttcaaacctacaagaatcaaaactgtcagttggctaaccctcctgaacaacgagcgcctggcgctggccggcgggctcgatgccctgcgtgcgcaactgccctccagccactttgccttctaccgctacggcgatggcgtggtaatccaggccggtgcctatccctatatcgcgggtgatgcggaagactccaggcccgctccgtatgtgctgctgaaccacgcgctcaaaggcattcgctatgaaaccatcggctcgctacacggcggctcccacgacggcgaattgcggctggtgggctgggcggccgatcaatggctgaaacggctggatgtggaagacagcgagattccccggtggcgcgacaaactgctcagcgctgagccttgcctggacgcgacgaatacgctgccggagcgcctgtag

SEQ ID NO: 326758 - DNA, 519 bp, Pseudomonas aeruginosa
atgagcgaccagcccagcctgtcccggggaggcatgagccccgaaggcaggaccaaccccgtcggcaccctggaacccaggctcgatccgcaggacaagaaggtgctgtgctcggcggtctgccattgcaccagcacgcctaacctcagccaggatggcaaaagcctcaagcaggcgtgcgtggcacagcggctgggagagttggacgaagttctccagggacgcagcccctacaagcccgaggtcagctacgacatgaccaagaacccaccgcagccgattctcgatagccagaccggtaacagtccacatggctggataccgggatggatcagcaagtattgggatgaagatccggagcatccgccgttcaagccagggaaaggaatgattcgcaggcccgacgtgatcatcgttcagaatcccaacaggccgccaacccaggacaatatcaaacaggtggtggagatgaagttccgcctgacccacataatagggaacaacttgaggattatgtag

SEQ ID NO: 326759 - DNA, 1473 bp, Pseudomonas aeruginosa
atgtggcgcgaaaccaaactcttgctgattgacgacaatctcgatcgcagtcgcgacctggcagtcattctcaacttcctcggcgaagatcagctgacctgcaacagcgaggattggcgagaggtagcggcgggcctgagcaacagtcgcgaagccctgtgcgtgctgctcggcagcgtcgagtcgaagggcggggcggtagagctgctgaagcagctggccagttgggacgagtacctgccgatcctgctgatcggcgagccggccccggccgactggccggaagagctgcgccgccgggtgctcgccagcctggagatgccgcccagctacaacaagctgctcgattccctgcatcgcgcccaggtctaccgcgagatgtacgaccaggcccgcgagcgcggccgctcccgcgagccgaacctgttccgcagcctggtcggcaccagccgggcgatccagcaggtgcggcagatgatgcagcaggtcgccgataccgatgccagcgtgctgatcctcggcgagtccggcaccggcaaggaagtggtggcgcgcaacctgcattaccattccaagcgccgcgaggggcccttcgtcccggtgaactgcggggcgatcccggcggaactgctggaaagcgaactgttcggccacgagaagggcgccttcaccggtgccatcaccagtcgtgccggacgtttcgagctggccaacggcggcaccctgttcctcgacgagatcggcgacatgccgctgccgatgcaggtcaagctgctgcgcgtgctgcaggagcgcaccttcgaaagggtcggcagcaacaagacgcagaacgtcgacgtgcggatcatcgccgcgacccacaagaacctcgagaagatgatcgaggacggcactttccgcgaagacctctactaccgcctcaacgtattccccatcgagatggcgccgctgcgcgagcgggtggaagacatcgccctgctgctcaacgaactgatctcgcggatggagcatgagaagcgcgggtcgatccgcttcaactcggcagcgatcatgtcgctctgccgccacgactggccgggcaacgtccgcgaactggcgaacctggtggagcgcctggcgatcatgcatccttacggggtgatcggggtcggcgaactgccgaagaaattccgccatgtcgacgacgaggacgagcaactcgccagcagcctgcgcgaagagctggaagagcgcgcggcgatcaacgccgggctgccgggaatggacgcgccggcgatgctgccggccgaaggcctggacctcaaggactacctggccaacctcgagcagggcctgatccagcaggccctcgacgacgccggcggagtggtcgcgcgggccgccgaacgcctgcgcatccgtcgcaccacgctggtggagaagatgcgcaagtacggcatgagccggcgcgacgacgacctgtcggatgattga

SEQ ID NO: 326760 - DNA, 1209 bp, Pseudomonas aeruginosa
atgcaaccagccctcaacgccttccccgagcagccagccgatacggccgaggccaccagccgcgccggcctcgagcaggccttcgcgctgttcaaccagatgtccagccagctcagcgagtcctacagcctgctggaggagcgcgttaccgagctgaaagggcaactggccctggtcagcgcgcagcgcatggaggagctggcggaaaaggagcgcctggcgaaccgcttgcagagcctgctcgacctgcttcccggcggcgtcatcgtcatcgatgcccatggcgtggtccgcgaggccaacccggcggccctgggcctgcttggcgagccgttggtgggcatgctctggcgtgaggtgatcgcccgctgcttcgctccgcgcgaggatgacggtcacgagatttccctgcgcgacgggcgacgcctgtccatcgccacccgctcgctgaacggcgaaccgggtcaactgatcctgctcaacgaccttaccgatacccgccgtctccaggagcaactggcgcgccacgagcgcctgtcggcgctggggcggatggtcgcctcgctggcccaccagatccgcacgccgttgtcagcggcgttgctctatgccgggcacctcagcgagcaggcgctgccgaccgaccagcagcaacgcttcgccgggcgcctgaaggagcgcctgcacgaactggagcatcaggtacgcgacatgctggtgttcgcccgcggcgagctgccgctgaccgaccgggtggcgccgaaggcgctgttcgacagcctgcgcgcggcggccgaagtccatgtccaggggctccaggtgcgttggcagtgcgaggcgcgcggcggcgagctgctgtgcaatcgcgacaccctggtgggcaccgtgctcaacctggtggagaacgcgatccaggcctgcgggcccgaactgcgcctgaaggtgcatctctatgcccgcgccgacagcctgcgcctcagcgtcagcgacaacggaccgggtatggacccggcgaccctggcgcgcctgggcgaacccttcttcaccaccaagaccaccggtaccgggctcggcctggcggtggtcaaggccgtggcacgcgcccaccaggggcaattgcagttgcgctctcggcccgggcgcggcacctgcgccaccttgatcctgccgctgattccggcggcgcctctttctgcgattcaggagtaa

SEQ ID NO: 326761 - DNA, 1335 bp, Pseudomonas aeruginosa
atgaacaaccacaacggtaccctgcaccgtggctggcaatcgctccagcgctggcgcatccagatcttcgtcatcacctggctggcctacgccgccttctacttcacccgcaaggccttctcggtggccaagctcggcatcgccgaagacccctccttcgaactcgacaagagcgccatggccgatctcgatgccctctacctggccgcctacgccgtgggccagttcatgtggggggtgttcgccgaccgtttcggcacccgcgtggtggtgctcggcggtttgctcacctcggcgctggcggcgctggcgatgggtaccttcgccaccctgccgatcttcgccgcctgcatggtggttcagggcctggcgcagtccaccggctggtcggggctgtgcaagaacatcggcgccttcttcgccacctacgagcgaggccgcgtgctcggcctgtggagtacctgctacgccttcggcgggctggtggcgacgccgttcgccggctggtgcgcctaccggttgacgcatgactggcgcatggccttcctgtcctcggcgggagtggtgctggcggtggccgcgctgttcttcttcctccagcgcaaccgtccgcaggacgtcggcctgccgcccgtggaggccgaggccgcgccccccgccaacgcgccccggccgagccattccggcgccctgctgaaggcgctcaggaatccccacgtgctggtcctcggcatcgcctacttcctgctcaagccggcgcgctacgcgatcctgctctggggcccggtgatcatctacgaacgcatgccggagatcggcaaggtcgcctcggccatcgtgccttcggccttcgaggtcgccgggctggccgggccgatcctcatcggcctggcctcggacaagctgttcggcgcccgccgcatgccggcctgcgtgctcagcctggcggcgctgaccgtgagcctggcgctgttcgtcccggcgatgcagagcggcagcctgtacctggtggtcggcctgctgttcatgatgggcgtcaccctctacgggccggactcgatgatcagcggcgccgccgccatcgacttcggtaccagcgaagcagccggtaccgccaccggcttcgtcaacggctgcggctcggtcggggcgatcctcggcggcctgctgccgggctacttcgacaccctcacggtgttcttcgtgttcaccgccaccgcgctactcgccagcctgctgctggtgccgttctggaacagccggccaggcgcgtgccgcgtcgaaccgaaggcgcatgccggcgggccgctgctggcggccggcaagccgcgttga

SEQ ID NO: 326762 - DNA, 780 bp, Pseudomonas aeruginosa
atgcacctgctttacccctccgcccccgaccgcagcaacgcggtcgatgaactcttcgccgaggaatatgacgcggcccgttcggcaggcttggcctgttcgctgttctgcgaagaggaactggaaagtggacgcttccgcgcccgcccggagtttccggcaaacacccaggtgctgtatcgcggctggatgctcacaccggaaaactacgctcgcctgcacggcgcgatcctcgtcgctggcggacggcccctgaccagtccacagcaatatcggcactgccattacttgccggagtggtatccgctctgtgaggacctcacgccggcgaccctgttcctgtccaggaacgccgacttcgaggcagtgctggcgcaaagcccgtggcgcgcctggttcgtcaaggaccatgtgaaatccctgaccacccagcgcggctcgaaggccaccaatgctgcggaagtgcgggaagtcctcgattcgatcgagcgttatcgaggcaccatcgaaggcggtgtatgccttcgggagttcgaggcgctgcgggcggaaaccgaggaacgctacttcgttcttcacggccgcgctcacgggcgtctcgatgccgtcccgccgctagtggaacaggtggcacaacgtatcgattgcccgttcttttccgtcgacgtggtcgagtcgaccagtggcgagttgcgcctgatggaactcggcgatggccaggtctccgaccgcaagcaatggcccgccgcacgcttcgcggcgatgctggcacaggcatag

SEQ ID NO: 326763 - DNA, 945 bp, Pseudomonas aeruginosa
atggacgctattctccgcaccctatggcttaaggatatccatctagcaaaagggccaagaaaaattacaacagagtcatttctaacaaaaaaaaatgcgaccataatcaacatagaaaacaaaaactcattaactttatacattggaaacccctctctaacaaagaaatttttttctcacgaggcggatagatttgcttgcgcagcatttgaaacactaacatctccagttcctgaaaatgaacctccaaggtctataggctggactctgataaaagcgtactactctgctttcttttcaatgcacgctcttctaagaattcatggctgggcatgtaccaggatagcaggaaacgctataaggttcataaatgacgagctaaaaattttagctccggatgcttcacctgtaggaggcgggatattcctcataaagtccgacccatctggaaggacgttagaactcaaaaaattagaagcaggaacaacaggaggctcacacgagagtctatgggccacactcaacgaatacttcaacaacataacatacctcattcaaaaaaatgaaaacctagacacgcaagaggtatcaaaggctattcagtctattgtagacttcagtacattcctttcttcaaaaggagggcctatttggctaacacaagttagaaacagaataaattatcaacatgcctatggtgcttggcatccatatacagattccacctgcgacctaattagaataagaactgaattagacaagtggaactcgcccatagaacaaactctccccaatgaaaccgccgatgaattaatacaattttcaagttgctgctcttttatagcagcgttatgcaaacagacagtagccgaactctataaaagaggttcaccacaatcccccttcaagcagaacagcggtaaaataataaaaccctccacctaa

SEQ ID NO: 326764 - DNA, 1041 bp, Pseudomonas aeruginosa
atgaaaaaagacgagaaagcaccgcaaagagtaagaagaatcccaagcaccaccataaagcactcagcccccaaagagggtgagcgtttaagattctcagcatcactcatccaacaggcaaacaaacagttctttagcgtaacaattcccaccagcatccttgcggaatgctgctttgtaacgtccagaaatgaagacccacaaactggattccagcgagtcctagacaaaaagcgagcgaaggatatcgcgaactatatagatagcggcgaggggacaatcccaggatctataattttatccgcacaaccagatgcacaactggaactggtaggtggcagtaagacaattgagttcacttttacccagaaggcattcttagttcttgacggacaacatagagtttatggtttctcccttgcagaaagagcatttcgggtaccagtcgtcatatacagcgggctaactccaacagaagaagccaggcttttcattgacataaacaccaaacagcggcaagttccaaacgagctacttctagacatcaaacaacttgcagagcgagaatccaacaaagaaatcactctgagaaatatatttgacttattcactgacgaaccaagcagtgctttgtacggcctaacttctgcctcagcaagaaaaaagaacaaactctctcgcgtcacattcaatctagcatttaagagtgtattaactgtattcaactcccccgacccgcagaacatttacaaaataacaaactcttatatatccgcattttatgatgctctgagcgaagcggaggccggagaaaagcttgtttcacctattgtattccgagccatcatggatacctttcctgaagttgcaagaatctctgcagctcaacatggcaaagaatttacaaaatccaaatttgcctctgtaataagcccaattgcacaacagctttcagcagcaaaaatagagaaaatggggaaatccgtaagagacttgtcaggaatgttctcaagactcatcaaaaaagactttagtatttaa

SEQ ID NO: 326765 - DNA, 3525 bp, Pseudomonas aeruginosa
atgactgcgcaggccacaccccggcgagacagcgccaacctggcggcaaacgaagcctcgtccagcgatagtcgttcgccgagcggcacctgtccgttgatgaacgccaaggtgcagctgttgccgctgcgctacggtttgaccgaaggcgtcgatccgagcgccgagctggcgatgcctttcgccctgaaaagccggccgctgggtctgcggctggtgcgcaatggctatctctacgtgatcgacggcggaaccggaaagctgcacgaataccgcatcgacaagggcgctatcgacaagctgctgtggcaggacgccgaggttcgcgccgacatacgcagccgcgcggtcggcgagccccaactggtctttccccgtaccagcatcctgtacgtggcctattcggagctgcaatggaccgcgcgcaagtgcatgcaggtgctcgccagtccgaaggaccgcgagcacttcatgcaggccgtcgatctgcgccgcgccgacccgcagcagggggggccgcatctgctgacccgacggcaggcggaaacctggctggccgaagtggtgcagaacaaggtgcatcgcgacgagcagggccagcagcgcttcccgccccaccagcagcgcccggccagtccacccgccgcccatccggacgaacgacgcgactacgtatgggaggatccgccgctgttccgcgatacccagttcggcgagttgactgcgcaggtactcccgcagtacgagcatgatgccctgttcctggcgctgcgcgacgacatcggcgtgatgcgcgacctagccgcctaccaggacgaagtggtcggctggctcgaggaatggctgcagggcggcgcccaggccggggccaacgagcgcgactacgtgatcgcctgctacatcgagtcgttgacccagatccgcgccgcggaactgcccaagctggccgacgagagtgcccagccgctgttcgacgatctcgaccggctgccacctcccgagcgggagcgatcgcgccaggccttgctggactacctcaacggcgagccgttgccgaagccgatggacccagccatgccggagccgctgcacagacctgtggagcgacacttcaccaagcggaaaatggcggttgccgatccggccttcgtcgaacgcaacctagacgccctgatccgcctgaagaagagccacggcgaaaaggtcgacgacgcgctgcatggcgccaaattcggccagcgtggcatcgacgacctgatcgaccgtcccgccatggatgccttcctcgccgccaacaggcccaacctggcgcgctggaacgccctgcttgagcagatcagcgcagaccgcacgcagatgcttaccgagcagcgattccatcgcgccgcctggtactacgatttccagcaggccgagcaattgggactggccttcgccacccagtacgcctgcctgaaggatatctgccgcagcgacgaggccagcgaggccgtgctcgccttcctgaaggaaaatccgcaatacgatcgcccattgttccagactctgccgttgaacacccaggccgaactgatcgcgcaatacgcgcagctcgggccgcccggccatctctggctctccaagctgaaagagtgggcgcagcagcgcgactcgctggagctgggcaagctgcccgctctcgacggcttgccggaggccacccgagcgcttgccgacagcgcccaggccacgctcaacccggcgttgaccctgggcatcagccggaccatggagggcttcttcaagagcgtaggccagcagcaggcgccggatctcgacgcgctgttccgcaagctgcccaaggcccttcctggtcgcctgctcgacgccgcggtccgcgaaggggtgaccttcaccattgccagcgaagcggaaaaggccatcctccaggccgatctgaaggaagtgctcgaacagcgcgcggagctgcgccggctggtccgccagcgcaagcaggtgaagagccaggccggacacaagtcgacggacgcccgcgccttgctcgccgacatccagcgtgtccgcctccagctcaacgccctggagccgcgcctggccgccgccctcagcccgatcgccgagcttccggacaacagcatccgtctcgccggtgcgacaccaggccgcgccggaatcaccttgatcctgccgtctgcacagttacaggaagttgccagtggtatccgtaacctgcgcaatggctatagcagtgcagccgcgttcaataaggtgggggatggaattggtctggctgtgtttgtggcgcagtttgtcaatatggtgcaggtatggcgggggggtatcgcgacttcgccggataagcgtgagctaatgccgctggctggttctattttcaccacaatatctgcgggcgtagcggcagctcaggccattgccgatacagctcttcaggccagaagtgctcagttggcacaggggctgcaaaaccacgctgtggaagttgctcatgtacaaatgggaaaactgcacttacgcctagggtttgtgggatatgcggcaggtttttttgcagcagctgttgctactcaaacccactatggcgagtggcttggtgctatacgcagcggaaatgctcaagctcagcaaggtgccgctttagctatggttggctccagcggaatgctggccagcagcgcctacggggtatggcatacggggtatgctttaaaaggtgtgctcagggctgcaacacctgctgccgagcgtacagcctgggcattggctggcacgcgactttcgagcatatttgctcgattcaatatcgccggtgccattttcaccgccctcgaactggtaggaacctattggtataaccgcagtaataccacgccccatgacgattggttgctcagtacaccctggagccgcgacatcggagggcgcctgaaccagtccctggaaatctatcagcaacgacttctggggatcgtccagacgccaagaggtgaggtcaagcacgcgagtcatggcagttggtggcgagacctgctctcctcacctgccactgcggagatcagcctagccttgcctggtatcagtctgggagcactgcagcagaccttggccgggcgccctgaagtacgcttgagcctggcggcctaccgcattcgtagtgtgaaatacgaaagaggttcgcccatggtgcgttggttccccgtcaccgaagttgtcggcgacagtctacaggtcgcgtccgccgaaccgttggtgttgctggtgccgcggctagcgccgctggagggtgtgaccgggggctcggtcacggaggatctattactggctgtacagatcgaacgactgaacccgcagggtcaatatcatgccgatcggcacatggttcgcctgtcgccacacagcgaaggagactatcctgcttcgccacaacgtatccaggggcaggaagcatcctggatgctaattgacccccgtttgctgccggattttgccgatgctccagaacgataa

SEQ ID NO: 326766 - DNA, 942 bp, Pseudomonas aeruginosa
atgtcgtcccgcgaaatccgcatcgccactcgccagagcgccctcgccttgtggcaggccgaatacgtcaaggcgcgcctggagcaggctcatcctggcctgaccgtcaccctgctgccgatgaccagtcgcggcgacaagctgctcgacgcaccgctggcgaagatcggcggcaagggcctgttcgtcaaggaactggaaaccgccctgctcgaaggcgccgccgacatcgcggtgcattcgatgaaggacgtgccgatggactttcccgaggggctcggcctctacaccatctgcgagcgcgaagacccgcgtgacgctttcgtctcgaacacctacgccagcctcgagcaactgccagccggcagcgtggtcggcacctccagcctgcgccgccaggcgcagctgctggcgcgccggccggacctgcagatccgtttcctgcgaggcaacgtcaatacccgcctggccaagctggatgccggcgaatacgacgcgatcatcctcgccgccgccggcctgatccgcctcggcttcgagtcgcgcatccgctcctcgatcagtgtcgacgacagcctgcccgccggcggacaaggcgccgtcggcatcgaatgccgtacggccgacagcgacctgcatgccttgctggaacccttgcaccataccgacacggctctgcgggtcactgccgagcgcgcgctgaacaagcggctcaacggcggttgccaggtgccgatcgcctgctacgccatccgcgagggcgaccaactgtggctgcgcggcctggtcggccagcctgatggcacccagttgctgcgcgccgaggggcgggcgccactggcggaagccgaggcgctgggcgtgcgggtggccgaggacctgctggagcagggcgccgaagcgattctcgaagccgtctacggcgaggccggacatccgtga

SEQ ID NO: 326767 - DNA, 585 bp, Pseudomonas aeruginosa
atggccaatgatccatacatccagtccttcacctgcttcgacggcacgcgccggctgctgacggcggcgctcccggaggttgcgctggccttgaagcaagcggtcgccggcggtgctgccgggccgctgctggtgttcgacaatgccactgggcgctccgtcgatctcgatatccgcggttccagcgaggacctgctggcgcgcctggtcggcgcaggcgagcggcaaccggcggaggaggccgcgccgcgcgggcgcgggcggccgaagctgggcgtggtggcgcgcgaggtgaccttgctgccgcgccactgggaatggctcgccgcgcagcccgggggcgcctcggtggcgctgcgcaagctggtcgaggaggcgcgccgcagccagtccgggcgtgcgcggcaggcgcaggagcgcgcctaccatttcatgaatgcgatggccggcgacctgccgggcttcgaggaggcgacgcgtgcgctgttcgccggggatcgcgagggcttcgccgagcggatcgccggctggccgaccgatgtgcgcgagcacgccgcctggctggcaagcgacggagaatcctga

SEQ ID NO: 326768 - DNA, 1578 bp, Pseudomonas aeruginosa
atgtcccaagacattcacgcccaccgtatcctgatcctcgatttcggctcccagtacacccagctgatcgcccgccgcgtgcgcgagatcggcgtgtattgcgaaatccatcccttcgacatgagcaacgaggcgatcatcgccttcgcgccgcgcggcatcatcctcgccggcggtcccgagtcggtacacgaagccgacagcccgcgcgcgccgcaggcggtgttcgacctgaaggtgccgctgttcggcatctgctacggcatgcagaccatggccgagcagatgggcggcaaggtgcagggctccgacctgcgcgagttcggctacgcccgcgtcgacgtggtcggcaaggcgcgcctgctggacggcatcgaggaccacgtggacgacgacggcgtgctcggcctcgacgtgtggatgagccacggcgacaaggtcaccgagatgccggccggcttccacatcctggccagcaccccgagctgcccgatcgccgccatggccgacgatgcccgcgcctactacggcgtgcaattccacccggaagtcacccacaccaagcagggcctgcgcattctctcgcgcttcgtcctcgacatctgcggttgcgccgcgctgtggaccccctcgaacatcgtcgacgacgccatcgctaccgtgcgcgcccaggtcggttcctccaaggtcctgctcggcctctccggcggcgtggactcctcggtggtcgccgcgctgctgcacaaggccatcggcgaccaactgacctgcgtgttcgtcgacaacggcctgctgcgcctgcacgaaggcgaccaggtgatggccatgttcgccgagaacatgggcgtgaaggtgatccgcgccaacgccgaggacaagttcctcggccgcctggccggcgtcgccgatccggaagagaagcgcaagatcatcggccgcaccttcatcgaagtcttcgacgaagaagccaccaagctgcaggacgtgaagttcctcgcccagggcaccatctaccccgacgtgatcgagtcggccggcgccaagaccggcaaggcccacgtgatcaagtcgcaccacaacgtcggcggcctgccggaggacatgcagttcgaactggtcgagccgctgcgcgaactgttcaaggacgaagtgcgcaagatcggcctggagctgggcctgccctacgacatggtctaccgccacccgttccccggcccgggcctgggcgtgcgcatcctcggcgaggtgaagaaggagtacgccgacctgctgcgccaggccgaccacatcttcatcgaggaactgcgcgccttcgactggtaccacaagaccagccaggcgttcgtggtgttccagccggtgaaatcggtcggcgtggtcggcgacggccgtcgctacgcctgggtcgtcgccctgcgcgcggtggagaccatcgacttcatgaccgcgcgctgggctcacctgccctatgaactgctggagaaggtctcgaaccgcatcatcaacgagatcgccggtatctcccgggtcacctacgacgtgtcgagcaagccgccggcgactatcgagtgggaatga

SEQ ID NO: 326769 - DNA, 348 bp, Pseudomonas aeruginosa
atgaagcctgaattggatgccctagaggcctggctcggacgaccgctgccggctgccttcgtcgccgctctggagcagcacggcggccgcctcgtcgagccgggcctgctgctctacgccgccgacgagttgctggaacgcaaccgggccttcgaaacctctctctactgccccggctacctggccataggcgacgacagcggcggccgcgccgtggtgatggccctggacgatcaccggcaggcgctgttcctggtcgaccatggcgcgatgacgccggactgcttcgaacccctggcacccagcctggaggcctggctggaagccgggccctgcctgcccgaatga

SEQ ID NO: 326770 - DNA, 285 bp, Pseudomonas aeruginosa
gtgctggaaacctgccgccagcactgctgcgaattgcgcctggcaccggcctacgacatcgtcaacaccacggcttatatcccgcaagatgtactggcgctggatgtcgtaggcaacaagaccctctttgcctcgcgacaggggctgctggagttcgcccaggtctgcgatgtagctcagccaaaagaagtgatccgcgagcagttgcaagcactggagcggctgttggcccgctcaactgagctgtgcgagcaggccccgcatgtggtcgtggcaatcaggtaa

SEQ ID NO: 326771 - DNA, 141 bp, Pseudomonas aeruginosa
atgtatgtgttccataccctgaaaaactcagagtggcgcctgtccagtttcccggcccacctcgatactgtactgagtcgaagtaaagaattttattcttccaagcttgaactgctagaacaggaggtgcagctgatgtga

SEQ ID NO: 326772 - DNA, 1092 bp, Pseudomonas aeruginosa
atggcttggcattcgaaaggttcggtttccgtcacgctgaattccgaagcggtgttaggaaacgctactgattttatcgccaatgtgcgaaccggcgatgcgttccgtggccctgacggccggtggtacgaaatcaccaatgtgaccagtgcaacggttatttctatcaagcccaattatcagggtgcgaccgctagcggccaagtttatgcggttgtcccaatacatggttattcaaaaaacttggcagaccaattccgcgacatcaacaaccagtggggggccaccctggcagggatcaaaccctgggcggtgtcctcgacgggccagcaggcgcaggccgacatgggaatctcggctgttggtcgggccctgaacaatgcttcgacgccggccaacgccttgagttacctggggggcgtcgcgcccaatcagatgggctgggctggcaacgcgatgaatacggcggacctcgattcgctgaccgtctcggggctatacgctcatggcacggcggtgccttcgccggtgaacaatgcccagggctatgtcttgcatatgcagcacggcaacccagacttcgccgtccagcagtggtaccagttgaattccgccactggccagtacatgcggatcaaggccgggggtaactggtcgcgctgggtgttgcagtacagccagttcaaccttgtcggactggcgagcttcgatgcatcgaacaatccatccggcgccatcatccagcgcggcgggactgtcggtttcaacgagtatgtacgctacgccgacggaacccagatctgctggggcaacaccactaccaatgtgggagccaccatggcctaccagccggctggtacgttgtcgttctatatcactccggttgcttactcgtgggggttcccggtctcgttctcccggcctccgtctgtcatggtcaacccgatgagagcagcaggaaacaacgcttcccgtccctggggttcgacgatgtcggtcaccgaaacgctgttttcctggtacggctatgacaccgccagcgtggccagcgggatggccgccagctatgtcgccatggggaggtggaattga

SEQ ID NO: 326773 - DNA, 336 bp, Pseudomonas aeruginosa
atgaagctgttgttgaaacctttgttgcagcagggcatcacgcctgacagggaacgtctcagcgatgtccaggtgcgagggtcggtgtttatcctggatggcgtcgaatacgatttcggaagaatgcagcctggggggtacctgcctccggaggcataccatgatacgccattcattgatattcgcttcgtggacggcgaccgcctgtacctgcactacatccaccaggtgacctctgaagtgatgatgcagtttcccagggagatcgagtcaattccggtcgaccaggatggaaaagtcgaggtagcgttcagctatgaacatccaatgggataa

SEQ ID NO: 326774 - DNA, 231 bp, Pseudomonas aeruginosa
atgaacatccaatgggataagtacgtcagccctgcaaaggccgcggcagatgtgcgcgatcaggccttggccagtgctcaggccaagcgccttctggcctatcgggaagaaagcgatccgctcaagaccgaagccgagttcgatgcgatcaaggccggcgtcgagccggactatggcgcctggatcgccaaggtggaagagatcaagtcacgatacccgatgcctgaatag

SEQ ID NO: 326775 - DNA, 339 bp, Pseudomonas aeruginosa
atgaaattcggactcttcgcctcgatcgccctcttcctcctgtcggtctgcgcacttccggcgctggccgccaatagcccctgctcgggaaagaaaggcggtatcgccggttgcgacggcgatatcttcctctgcaacgacggctccatcagcgcctcgaagcgcagttgcgcggcctacttcggcaacgccggcggacgtaccggacaacccgccgtacagcgtctgcaaggcacgacgcagggctgtgcctgtggcagcggctcgttctgcacgggcccgcgcggaggggtgtactgcctgacgccgggcggcaagaaaagctatcggagaaagtga

SEQ ID NO: 326776 - DNA, 1905 bp, Pseudomonas aeruginosa
atgcccctatcgcgactcagccttgccatcctttccgttctcgccggtgccccggcattcgccgacgacagcggcgtcgacctcgaccagggctggaaccagacccagaagaccgcctggctggaagccggccagggctcgcggatgctgccgctggcctggctggtggcgctggagcagcgcgccagcgaagaaccgctgatgtccgatgcgctgatccgccagtacggctatgtcccgcacaccctcggcggttccagcgtgaaggtggtgcagggctacgcggtcgaccgcagcgacgacagcgacctgaccttcaccaagctgcgctggaaagccctgcagggctccagggaaccctgggtcggaccgacctgcagcatgtgccacacttcgcacatcagctaccagggcacccagctgaccgtctacggcgggcagaccatgggcgacctcgccggcttccagctggagatcctcggcgccctgcagagcacccgcgccgacaccgccaagttcgagcgcttcgcccgcaaggtgctcggcgccgatggcctggtcagcggctacaacgacgccaacaaggcacgcctgcaggcagccctggacgccaccatcgtgcgcctgcgcgacggctcgcacttcaacctgccgcacgatcccgagttcggcccgggccgcctggacgccatcggttcgatcttcaactcggtgggctacgaactgcatgccgacgagcagatctatggcgccgaggacgcccccgtgagctatccgttcctgtggaacgtaccgcagctggaccgcgtgcagtggaccggcttcaacccgaaccacatcaacgtggtcgagatcgacaaccgcaagttcgacgtcggcgccctggcgcgcaacgccggcgaggcggtcggggtattcgccgacgtcaaggtgctcagcccgatccagtcggcgctgcacatcggctacccgtcgagcatcaacgtcgacaacctgatccgcatcgaagaccagctcggccaactgaagccgccggcctggccgaaccagctgttcggcgccccggagccgaccagggtcgccgagggccgcgagctgtaccggcaacattgctccagttgccacacgccgctggaccgcaacgacctgcggaccccggtgaagaccgtgctcacccacctgcaggcgcgcggcgaggtcgcgccgatcggcaccgacccgtggaccgcctgcaacagcatcgcccagctgaagaccggctacgtgcgcggcaagccctacctgtccttcgtcggcaccggccagcgcggtttctacggcaagcaggcctatgcggtggacgtgctccaggaagtggtggtccaggccctggccgcgcgcggcctgagcgtcgccctgggtgccttccagaccgccgccctgggcatcttcgacgggcagttgccgccgctgatcagtccggtgccggacagccccgacgccgacagcgtcgaagcgaccgccgcggacgcgccaggcgccctgctcctggccgaaaacgtcgcggccggcagcgacaaggcccggcgcctggagcagtgcctggcgatgaccagcgacctgatggcctacaaggcgcgcccgctgaacggtatctgggccagcccgccctacctgcacaacggctcggtggcgaccctctacgacctgctgctgccgccggacctgaggccacggaccttctataccggcagcgtcgagttcgacccggtcaacgtcggctacatcaccgatgccggcggcgccaaccgcttcctcttcgacagcggcaagccgggcaacgccaatggcggccacgactacggcaacgcgcagttcaacgagcagcagcgccgcgccctggtcgaatacatgaagaccctctga

SEQ ID NO: 326777 - DNA, 210 bp, Pseudomonas aeruginosa
atgctggatcacgacctgactgtcgccctgctctgccgtctcaaccagaaccagagtgccctcggcatggccctggaggagctggcgatctgggcgaagcgccatgaaggcggcgaaacctacgatgtcgtcatgaaccacctgcagaccctggagcgcaacgccgacttcgtcgccgaggccatcgtcgtcctgatggcggatcgctga

SEQ ID NO: 326778 - DNA, 867 bp, Pseudomonas aeruginosa
atggccaaggttaccgtcgcctgttgccagatcgctccgcggatcggcgcacaggagcacaacctgcgcctggccgagcgggcgatccgcgaggccgcacggcgcggcgccaacgtcgtggtgctgcccgagctggccgccagcggctacgttttcgccgatcgcggcgaagccctggccctggcggaaacccgcgacggaccgagcctggggttgtggaaagcgctggcaggcgaactcgacctggtcatcgtcggcggcttctgcgaacgcctcgacccgcagcgagtggcgaacagcgcggcgctggtggacgccgacggcgtgcgggcgatctatcgcaaggcccacttgtggaacgaggaaggcggcatcttcgaggccggcgagcagccaccgccggtggtcgctacccgcttcgggcgaatcgcggtgatggtctgctacgacctggagtttcccgaatgggtgcgcctgccggcgctgtccggcgcgcaactgctctgcgcgccggtgaactggccggcggcgccgcgtcccgagggcgagcggccggcggaagtggtcagggtgcaggccaatgcctcggtcaaccgcctgttcatcgccgcctgcgaccgctgcgggcaggaacgcggggtcgactgggtgggtggctcggtgatcgtcgacgccgacggttacccgctggacgggccgctgcagggcgaggcgggtatgctgctggcccgtctcgaccttgccgaggccgacgagaaacgcatcagtgcgcacaaccacgtgcaccgcgaccggcgcgcgcgataccctgggcgcggcaaagcgtccccggtgtttgccggcggccggacgcagctgggcgaatga

SEQ ID NO: 326779 - DNA, 1431 bp, Pseudomonas aeruginosa
atgagcaataacaacgaggcgtcacgcccgaagatcgaagtgcgttcgatcgattacgttccccgccacgagcgtcacggcaaggtctggcaccaggcgccgttctggttcaccggcaatttcgtactcaccaccatggtcaccggcttcaccgggccggccctcggcctgggggcgctgtactcgatcctggcgatcgtcctcggcgtctgcttcggcaccttcttcatggccttccatgccaaccagggcccgcgcatgggcttgccgcagatgatccagtcgcgtgcccagttcggcctgcgcggggccatcgtgccgttcgccgcggtggtcttcgtctatatcggtttcaacgtgttcaacgtgatcctcgccaccgacgcgatcaacaccgtgctgccgggacaccgcgcgccctggtacgtcctgctgatcggcgtggcggtgttgctcgccatcgtcggccacgacctgctgcataccgtgcagcgctggctgacctacgtgatgatcgcggtgttcggcgtcctcaccgtcagtgcgctgcgcagcctcgaagcggacgcggcgctgggcggtacgccggcgttctcctggagcgcgttcctggtccaactgtcggccgccgccggctaccagatcagctatgcggtctacgtctccgactactcccgctacctgccgcacgaaacgccgacccgcaaggtgatcttctggacctacctgggcgccgccggttcggcgctctggctgatgtcgctgggcgcattcctggcctcggcattgccggcgccggacgccatcggcagcgtgcgcgaggtgggcaaccggctgtatcccggcttcggcaccttcaccgtgctgatcgccgtcccggccctggtggggatcatggcggtcaactgctatggcgccatgctcaccagcctcagcgccatcgatgccttccgcaaggtcactccgaccctcaacctgcgcgtcaccgggatcggcgtgatcgccctggtggtattcggcgtggccctgtcgatcccggaaagctacctgggcagcttcaacaccttcgtcctgctgatgctgtacttcctggtgccctggaccgcggtcaacctggtggacttctacttcgtgcgcaacggtcactacgcgatcagcgaaatcttcaatcccgaaggcatctacggtcactggggccgaccggggttgagcgcctacctggccgggttgctggcgatggtcccgttcatgtccctgagcttctacagcggtcccttcgccgtggcgctgggcggcgccgacgtcgccttcgtggtcggcctgctggtggccggcgcggtctatgccttcatgtgccgggccctggacctggaggcggaacgacggctcgccaccctcggcgagcgcctgctggaagaggggggcgcctga

SEQ ID NO: 326780 - DNA, 2631 bp, Pseudomonas aeruginosa
atgaccgcctatgaagacttcttgcgagcgaaggtccgcctcgccgagccgaaaggcttcgaagtggagccctcggccttcaaccccctgctcaagccgcaccagcgcgccatcgccacctggctggtgcgccaaggccgcgcggcctgtttcgcggccttcggcctgggcaagtcggtaatgcagcttgaggtggtgcgcgtcacccgcgacctagccggcggctacgctctcatcaccattccgctgggtgtgcgccaggagttctaccgcgacgccgcgatgctcggcatcaccgtccggttcatccgcagtttcgacgaggtagacgaccccgccaccatctacctgaccaattacgagaccgtccgcgacggcaagctcgaccctcgccggttcagcgtggcaagcctggacgaagccagttgccttcgcggcttcggcggcagcaagacgttccgcgagttcatggctctgttcgctggtgacgatcgcgccgccggcgtccgcggcgatggcgtccggtaccggtacgtggccactgccacgccaagcccgaacgaatacatcgagctactggcttactcggccttcctcggcgtgatggatgtcggccaggccaagaccaggttcttcaaacgcaactctgagaaggccgaccaactcaccatccatgcccacaaagagggcgagttctggatgtgggtggcgtcctgggcgatcttcgttcagcgccccagcgacctcgggttcagcgacgaaggctacgcgctaccggaactggacatccgctggcacgaagtaccgtccgaccactcgcacgctggccatgagcgtaacggccagggccgcctgcttcgcaacaccgccattggcgtgcaggacgccgccgcagagaagcgcgagagccttcctgcccggatcgccaaactgatggagatccgggccgaggctccagatgctcaccggatcatctggcatgacctcgaggcggaacgccacgcgatcgaggccgctatccccaccgccatcagcgtctacggcgcccaggatctggaggagcgcgagcgcgcgattgtccagttcagcgacggcgagttccaggaactggctgccaaaccagtgatcgcaggcagcggctgcaacttccagcgccactgctcgtgggccatctacctgggcatcggcttcaagttcaacgacttcatccagtccattcaccgcctgcaccgattcctgcagacaggccgtgtgcgcatcgacctgatctataccgaggccgagcgcgacatccgccgccaactcgaacggaagtggcagcagcacaacaccatggttcagcgcatgaccgagatcatcaagcagtacggcctgtccgtggccgccatggcacagaccctcacccgctccatgggcgtggagcgcgtcgagatcaagggcaaggactacaccatcgtcaacaacgacaccgtgctcgaaacctgccgcatggaaagcaacagcgtcggcttgaccatcaccagcatccccttcagcacccagtacgagtactcgccgaactacgccgacttcggccacaccgacgacaacgcgcacttcttcgagcagatggactatctgatcccggaactgctgcgcgtgaccatccccgggcgtctggcctgcatccacgtgaaggatcgcatcattcccggcggaatgaccggccttggcttccagaccgtctaccccttccacatggaagtgactcgagccttcgtcaagcatggctgggcctatatgggcatgaagaccatcgtcaccgacgtggttcgcgagaacgcccagacctaccgcctcttgtggacggaacagtgcaaggacggcaccaagatgggtgtcggcatgcccgagtacctgctgatcttccgcaagccccccaccgacaactccaacgcctacggcgacattccggtggtcaaggccaagcccctgtgcatcgacgaagacggccagatcgtccccttcgccatggacaagaagctcaccgtcacccgcggcaacggctacagccgggcacgctggcagttggacgcccacggcttcacccgcagcaacggcaaccgtccgctgactgaagcggacttcgaaggcattccgcacgacgtgatgttcaagctgtaccgcgactacagcctgtccaccgtctacgacttcgagcaccacgtccgcatcggcgaatcgctggaggtcaccgggaagctgcccaccggcttcatgctgctgccaccgcagtcctggcacccggacgtatggaccgacgtcgcccgcatgcggacgctcaacgcccagcagtacagcaagggccaggaaatgcacctgtgcccgctgcagttcgacatcgtcgaccgggccatcgtgcagtactccatggaaggagacctggtcttcgatcccttcggcgggatcatgaccgtcccgtactgcgcgctgaagctcaagcgcagagcccgcgcccacgaactgaactcccgctacttcctggacggtgccggctattgcaagtctgccgaggaagagatggccatgcccgacctgttcgccctgctcgaggccgaggccgacattatccataaggaacccgccgcatga

SEQ ID NO: 326781 - DNA, 210 bp, Pseudomonas aeruginosa
gtgaagtcgcccccatcgacgatgcagaacgaaacgctcgggcacatccgagcgttctgggcggagaaaggctacgcacccaccgtcgcagaactggcagccaaggccggcgtccgccagttcgccatccagcagcgcctgaccgccctcgagaacaagggctacatccagcgcgacccgaaagtggcgcgcagtatccgcccgctctaa

SEQ ID NO: 326782 - DNA, 1221 bp, Pseudomonas aeruginosa
atgtggttccgcaacctgcaaatctaccgcctcacccaagacctgcaaatcgacgccgcggcgctggagcaggccctggccagcaagccggcacgcccctgcgaaagccaggaactgaccacctacggcttcgccgctccgttcggcaagggcccgaacgcaccgctggtgcacgccagccgcggcttcctgctcatctccacccgaaagcaggagcgcctgctgcccggcagcgtagtgcgcgacgaactggccgagaaggtcgagcaaatcgaaaccgaccagatgcgcaaggtgttcaagaaggagcgcgaccagctcaaggacgagatcgtccagacgctgctgccacgggctttcattcgcaagtccagcacgttcgccgcgctggaccttgagcaaggcctggtgctgatcgacaccaacagcgcaaagaaggccgaggacctactgtccaccctgcgcgaagccctgggctcgctgccggtacgcccgctcagcgtgaaggtcgcgcccagtgcaaccctcaccgactggatgaaggaccaggccgccggcggcgacttccacgtgctggacagcgcggtactcgccgacacccacgaggacggcggcaaggtcgtggccacccgccaggacatgaccagcgaggaaatgcagttacacctgtcctccgggaagctggtcacccaggtggccctggcctggtcggacaagctcagcttcgtgctcgacaccaagctggcgatcaagcgcctgcgcttcgacgacctgctgcaggagcaggctgagaaggacggcggcgacgatgccgccggccagctcgacgccagcttcgtcctgatgatgctcaccttccgcgagttcataccgcaactgctggaggccttgggcggcgaagagttcccgcagggaatcgacggtgcgtacgatgagcccgagccagcgcctggcgccggcatcgacgtaaccaaggcgctagggatgcgcgacggtatcaccgcgaccctccatatcccccaggtcaacgggcccggtgacgacccgctgctgaaggaggccatccgcttcgtccgcgagacgcgccgcgcttcgatctccgccatccagcgcaaactcaagatcggctacaaccgcgcggcacgcctggtagaggaaatggaattgctggatatcgtcgggccgatgcagggagacggatctcgcgaggttctgtcgtga

SEQ ID NO: 326783 - DNA, 498 bp, Pseudomonas aeruginosa
atggcacgcggagtgaacaaggtaatcctggtcggccatctgggccaggatccagacgcaagatctacccccagcgggaaggcagttacgtccctcagcctggccactagcgaaagctggaaagacaagcagaccggccagcagcaggagcgcaccgagtggcaccgggtcgtgctctttggccggctggccgaaatcgcagcgcaatacctgcgaaagggctcccaggtctacatcgaaggcagcctacgcacccgcaagtggcagggccaggacggccaggaccactacagcaccgaggtagtggtggacatcaacggcaacatgcaactgctcggcggcaagcctgagcaggcaggccagtcgcgtggccctggccgcgagccgccaccgcggccgaccactcaccaccagccgcaaccggcaaccgactacgacagctacgacgacgacattccgttcgatgacccctatcgcctgctctggcgtctcgtgtaa

SEQ ID NO: 326784 - DNA, 606 bp, Pseudomonas aeruginosa
atgctcaccaacattttcgacttcgaaacgacgggtattcccgagtggaagttgcccagtgaagacccgtgccagccccacatcgtagaagttgccgctctgctctgcgatgccgccggcaacaccatcgatcgctttgaggcgatcgtgcgacccaacggctgggaaatcagccccgaaatgaccgcgatccacggcatcagccacgaacaggcgatggatgttggcatcagcgaggccgaggctctggagggatttcttgcgatcaacggccgcgcagcccgccgcgcggcgcacaacatcagcttcgacgaccgtatcactcgcatcgcgctgatgcgctaccaggacgaggatgcggccaacgccttcaaggaatcgggtgagaagttctgcacctgctatcgctcccgcgcacaggtcgcgcttccccgcaacaagctgccgaccttggccgaggcatacaagcacttcaccggggaggacctcgtggaggctcaccgcgcgatgccggacgcccaagcctgcgcccgcatctacttcgctttgcagggagtcgatgtggcgccggccagttcggtgccgccggctgaggcggaggcctga

SEQ ID NO: 326785 - DNA, 555 bp, Pseudomonas aeruginosa
atgaccagtatcgactggagcatcgcgcctcattgggcgcaggcagtggtcactaccgagcacggcaacgatatgtactgggttgagggatggggctgccggatcagcaaacgccagcgcgtgggcaacctgcggccagacctcaacacctgcgacatgaccaaactggaccacgcatggcgactggtggaacgtcgtcctgtggctgatgaggcaaaggagcctgtcatacagtggaacggccaagaaggcctgccgccggtcggcgtggaatgcgaatacaggcacatgatctggccggagtatcggcgctgtgaaattcggtacatcagcgacgagtcgttagttgcgtacgacaacggccaagaacagtactaccgcacgcgcgacatgctgttccgcccgctccccacccccgagcagatcgccgcccaggctgtcgatgccatgctcagcgactaccagtacaaggttggctcctgtacgttcatgctcacgcgcgaacaggctgaacggttgtacgccatcggctaccgcaagcacccctcctcctaa

SEQ ID NO: 326786 - DNA, 1017 bp, Pseudomonas aeruginosa
atgaccatcctgaaaaatgttgacctggaaaacggtaccgtcgaggtcgccgagtacaacgcaaccaacgccgccctggcaaaacttcgcgagaagtacgcgacgctgccggacgccaataccgccgatggctacgagttcatcaaggccggtatcaaggaattgaccacactgcgcaccagcctggaagccgctcgcaagcgtgaaaaggcgccttacatcgaggcaggccagatcatcgacgccgaggcgaagcggatcaccgccgcactggtgacgttggaagatccgatgaaggccgccaagaaggaggtcgacgatcgcgtcgaacgcgagcgccaggaacggatcgcacgcctgatgtcgaaggtcgacgccatcaaagggatgccggcccaggtacgcggcaagaccagcgacgagattgccgcgatgatcgaccgctgtggcgaaatcgacaccgcacacgacttctacgacttgacgaaggaagcccaagccgcacagcaggcggccatggacgaactgacccaaatgctgaccgaccgcctggccttcgagcaagcggagcgccagcggcaggagttggaagcccagcaagccgaaatgcgccgccgcatggaggagcaacaggcggaaatgcgccggcagcaagaggaaatgcaacgccaacgcgaagaactggcgcgccagcagcaggagcttgccgccgcgcgccagcagctcgccgagcaggacacgcccgtcgctgtcgagccggaggcgccgaaggccgaggttgcaccagcgcccgcccagatcaagcccgccggcaaggcagcagagcccggcgctatccagtggcgcgcccgcgtcgtcgataaaagcgcgttcatcgccgccatcgccgaaggcctggctaccgaagacttgctcgttgtcgaccagccggccctggacagcctggccaacagcaagggccaaacgctgaatctgccgggcgtgatcgtcgaaaaggcccccgcgaaagcggcctga

SEQ ID NO: 326787 - DNA, 756 bp, Pseudomonas aeruginosa
atgacaaacatgaatagcaacatggctatctgggaccaggtgaaagagacggacaccaggtacacaaggcaggcgaagctcaacggtcaggacatgacgtccatcaacggcttgtatatcgtccgtcgtgcgactgagctattcggccccgtcggcaagggctggggctggaaagtcttggtagagcgcttcgatgaaggcgcaccgcacctcgataagaacggtgcggtcatctgccacgacaagacccacaccctgtacatcgaactctggtatcgccacgacgggacgatcaatcacgcccgccaatacgggcacaccccctacgtctacaagaccgagtggggcttcaagaccgaccacgactacggcaagaagtcactcaccgacgccatcaagaagtgtctgtcactcctcgggttcagcgccgacattcacatgggcatgttcgacgacacgacctatgtcgaaggcctgaagctgaaagagcgcctggccgatgccggcgatcccgagacagccctggacgaagccaaggacgaattcaagacctggcttcgcgcacaactcgacgcgatcgccgcggcaccgaactcccgcgccctggagttaatgcgtaagcaagtcgccgagaaggcccgcgccaaagcgccagtcgtcaacttcaacccctcagagattgagctgcgcgtgaatgaagccgccgatgagcgcctgcgccagctttcccccgctcctaccagccccgaggaatga

SEQ ID NO: 326788 - DNA, 153 bp, Pseudomonas aeruginosa
atgaacgcgaaacgcaaagccatctgggtgggcggcctgattggcggcctcctcttcctgctcattctcgccctaggcccgatctggggcggactgattaccgcggaacaaccagccacggcgccggcagccgtcaagcgagcaacaccatga

SEQ ID NO: 326789 - DNA, 372 bp, Pseudomonas aeruginosa
atgaatccaatcacccgctttcaagtccgggccggccgagacgcagctagccgctgtgagttcgttcgggaaacgaaggcctactacgttcgagccgacggcacgcgcatcgcgaagcgcgctgactggtacaggttctacgccaccgaacaggaagcgcagtctgcaatcgagcgcgacaaccgcaagcgggcggaacgcgcagcacggcggcgcgttgaaagctacggacccgaattactcatcgccctggagcaggcgtactgcgcgctggtcggctatctgccgcagcatcgcaacgcgatcacaactgcggcgatcgaggcggcccgaagcgcaatcgacaaagccaagggaggggcctccgcatga

SEQ ID NO: 326790 - DNA, 222 bp, Pseudomonas aeruginosa
atggccttcagcgatgaacgcgcggtgctgatgatcgaggaaggcattacggcgatgcgccgatcaccgttcccacgcccggaccagaagttcgtccacggccaaattgaactggcctatgcggtcggcttcatcgacacccgtatttacgacgacatgcgccaccggctcgacgccgcgtcggacgcccgctgggcagaactcaggagcactcgggtatga

SEQ ID NO: 326791 - DNA, 150 bp, Pseudomonas aeruginosa
atgatgtggacataccgcgagcgccacaaccgcgcagcgttcaactgcgcccagcaggcctgggaccgcgaagtcgatccgctctgggaccagccggacccggagcccgaggacgaagagcaggaggacgaagatggccttcagcgatga

SEQ ID NO: 326792 - DNA, 504 bp, Pseudomonas aeruginosa
atgatcgacccacgagcgaacagcctggagaaactggtgccgccggcaccgctgccccacgtcagccgcggcgcgctcaagcgcatcaagcatcctcagccaatcccctccggctgcccgcactgcggcggcctggtccggctggtcagcaaccgggtgatctacggtcgcgagtacggcgactggccatatgcatacgcctgtactggcacgggctgcggcgcttacgtgggcctgcatcccgacaccgacatcccgctgggaacgctggccgacaagccgctgcgcgacgctcgcaaccgctgcaagcgcccattcgaacgcatctggcgcgacaagctgatgacgcgcagtcaggcctacgcctggctcgccgctgaactccaaatcacgccgcccgaatgccacttcggactcttcgacgttgaccggtgtgagcgggccaaacgcatctgcgaccagtacctggaagcgatctacaccagttcagcgaggtggggatga

SEQ ID NO: 326793 - DNA, 372 bp, Pseudomonas aeruginosa
atgctgatcctcactcgccgagtcggcgaaaccctgcacattggcgacgacatcaccgtgaccgtcgtcgagaacagaggcggccagatccgcctcggaatcgttgctccggaagcgatggccattcatcgcgccgagatctacgcccgggttggcgccgtccggtccgcctcacccaaagacctggttgaagagtggaatcgcacgcacccggcccaggtggccgttgagtaccgtccgctccgcgactccatccccatccgcaccagaacgctcactcaagccaaagtttccgcctccggcatggcggtgatctggctagaaggtcaggccacgccggtgctgctgcgcaactgcactgctgtttcctga

SEQ ID NO: 326794 - DNA, 213 bp, Pseudomonas aeruginosa
atgaagcgaaacgccaacccggcggcgaccgttgctgcctggaattccgcataccccgccggcaccgaggtcaactatcggtttcatcgccacgccacgccgaagcgcacccggacgacaaccgaagcccaggtcctcggcggccacaccgctgtcgtctggctcgcgggcgtgtctggttgcgttgccctttcccactgcgagccggcttga

SEQ ID NO: 326795 - DNA, 159 bp, Pseudomonas aeruginosa
atgagcaactacgcgctgaacatctacaacgcttgggttggcgaaatggacaagctgagccgcagcggccgccagacaagagccaagtatctgaaggttcgcaagctggcgattctctttattcgagctggcagcgtgcgtgcggccttcccgctttaa

SEQ ID NO: 326796 - DNA, 225 bp, Pseudomonas aeruginosa
atgacaatcattcacgaatgcgaccggtgcaacgcgcccggtcgcgtgatcgagacgtccgacggattccgctgcgatggttgctacgaggaggcgcaggagcaggtgcgcagcgatgcgagctgccccgagtgtgggcgcctgggggtgacggctaccggaatttgttacgcctgtgagaacactgccccggttcgccggggcatcaccgaggaaaggacatga

SEQ ID NO: 326797 - DNA, 207 bp, Pseudomonas aeruginosa
atggctcaattcaacatcgattcccacctgagtgacggaaagagcctgcaatggcttgctctgccggacgctggtgaacagcctctggacgttgaggtgaaggttcgccaggcggccatgaagaagttcggacagtccgtcttcttcaattgttgggagcacgtagttgccagcaacggctacatcaccgtgcggatgcatgcgtga

SEQ ID NO: 326798 - DNA, 207 bp, Pseudomonas aeruginosa
atgaatgaaaaggccttactggctttacgtcagtctcttcgaatcattcgcagggagagcgatgtacaccgagcgcgcatcgagtactacgaaacggtcgggatgttgcgcggattgcactacggcggagcgatcgattcctggcagctattagctctaaccgagctagcaggaagcgcatacatcaacgccggtaaaccctggtaa

SEQ ID NO: 326799 - DNA, 270 bp, Pseudomonas aeruginosa
atggctaagcaacagaagaagcagcaggtggtgaaaccgctgacggcagccgaacggctgggcctgcgcgtttcagagatgatcaattcaccgaaggctcaggatctgaggatggtgacaattcaccggctggacacggattccgatgaagcctgggagggagtgatgggagtacttgccgagacggacggtcttgagctgatctttaacgatgacggtaccgtcactcttaagtgggagaagcaggagagggaggaggaggcctggtag

SEQ ID NO: 326800 - DNA, 822 bp, Pseudomonas aeruginosa
ttgctgaaatattacctgtgggaatacgattcgaagatgagcaaaaaacctcttccaccagacagaaaagacgagtgccttcaactgaaggccatcttcaacagcagaaagcgtgacctcggtctaacgcaggagaagctcgcccacctccttgggatcaaccaaagctccgttagccactacctgaatggcgtgaaccctttgaacgcccaggcagcggcggcattcgcagaaattctccaggttcatgttcgggagttcagtccgcgcctagcggacgaaataacggatatggcgaagactctccggccggcgcctaaagcggagacagagggcgaacttacgcccatgtccagtttcgaggtgggggacccgctcgacccggatgaggttgaaataccgtacttcgacgagatccaaatcgccgcgggggacggtcgctatcccgaccgtgagcaggccaagcaaaaaatcaggttcgcgaaggctggtctgcgcgagtcgggggtggatccaaaacattcggtctgcgtgaatgtcagtggcaacagcatggagcctctgattgccgatggcgccatcatcggggttgacctatccgcccatacgataatcgatggcgagatttatgcgttgaaacacgatgacatgctacgggtgaagttcgtctaccgattgcctggtggtggcatccgcctacgcagttttaaccgtgacgaatacccagacgaggagtacaccaaggaccagatgcgcgagaacaacctcagcatcatgggctgggtattctggtggtcggtactcagacgtaggaagcactga

SEQ ID NO: 326801 - DNA, 201 bp, Pseudomonas aeruginosa
atgaaccgagtacacatcaagacatttgcctccgagcacgggcagtccagggctgcggcgctactcggcatcactcaaggggcactcagcaaggctttgcgtgttggtcgtgacatctacgtcaccgcgcatgctgatgggactttcactgccgaggaggtgcgcacctttccggcccagaaggtgcgcttcgtttcttga

SEQ ID NO: 326802 - DNA, 1017 bp, Pseudomonas aeruginosa
atgcagttcaccgtgacgatcaatcaagcgaaagcgctcgagtgggggctgaactcgcagcaggcgctgctgttcgccttcgtctacgagtgcccgagttgggcgcgcctggttcagacgcccgcaggtgatttctacgccctgagcaaagcgaagatcctcgaggagttgccgctgctgacggacaagccggacacggcgtaccgcttgctgaagcagatcgctgcggccggtgtgatcgatctgtcgagcacagcaaccatcacactcgtgcggctcactgcgaaggggcaggagtggaatcggaaactggacgggtcggaaaaatatccgacccaggtcggagaaaaatccgaggtcggaaattcttccgaggtcggagaaaaatccgatgcaggcagttcggaaaaatctccgaccaagatcggaaaaaaatccggggtaggtcggaaaaaaatccgttcagggtcggaaaaatctccgacaaatcaggtaaccagtaatcaggtaaccagtaatcagggtaccaatcaggatattgccggggaggctgcgccggccccgggcggggaattcgtcggcgccgagcaagagcccgggccgcgctgccagataccggccgacatgccaggcccgaaagacccgaactgcaaggcgtaccgcacatgggccaactacgccatggcctatcgcactcgatacaccgcttggccggtttggaacgcatcggttgccggcaagctttcgaagctgatcgatcgtgtgggccaggccgacgcgccaaaggtggccgcgttctacgtcaagtgcatccacgatgctcgactgattgctcagcaccatcccctcggcctgttgctggcgaacgctgagggctaccacacgatgtggttgaccaatcgcccgaccaccggaacgcaggcacgccagcaggagaacaccgcatcgaacttgtccgccgctgagcaggccctggccgagcagagagcgaggagggctgcccatgctgacgcctga

SEQ ID NO: 326803 - DNA, 858 bp, Pseudomonas aeruginosa
atgctgacgcctgagcaacaagacgaactgctgctttcccttttcggcaccgccgaggcaatgggtcagcaactcacgccggccgctgcccaactcatggttcaagacctggctgcctacgaagagccagtgctgaccgccgcattgcaggccgttcgccgggagggcggacgattcacggttgccgctgtactccggcatgtcgagtccgccgacggtcggcccgagccgaacgaggcctgggcgatcgccctacagagcttcgacgaggctgaaacggtgcttatgacgccggaaatccagcaggcggctgtggtagccgcaccgctcatgaaggggcgtggtgaccgggtgggcgcgcgcatggcgttcattgccgcctacgagcgcctgctcactcgtgccaggcagcaggcgctgcccgccaggtggtcgctgtcgttgggcagcgatgcgggccgccgagctgctgcgatcgaggaagcggaacgcctggggcgtctgccggcgccggcagcgcagttgctgctcgaacagcacgtactcgagccagttacgccggccggcagcgcaatcgccgggcttctgactggaccctccgaccggctactggcactgacgaatgacccactgacccgcaaagcccttgcgagggaggctgctggtgggggggatgtgccagacgactttcgccggcggcttgaagacatcaagaagcgcttggtccgcagggaaaaggcgaaggtccgactgcgtgatcgccacctgcgccacgagcgcgaagacatggaccgtcggcgcgccgcggttcttcaaaccatcgatcagctacagagccaggaggttcaacatggctga

SEQ ID NO: 326804 - DNA, 552 bp, Pseudomonas aeruginosa
atggctgaagcactatcaacccaggcgccggccaagagcgcggcggcgaagaggaagcgcgccgggcggccgatctacctggagttcaagcgcatggtcgacccggacaccggcgaggttcgcctggccctggtcgccgacagcggcatcgacaagtttctgctcaaggagcgcgggtatagagccggcgcaaaggtgcgcgcagagttgaagcaaccgcgggacgttcgtaagcaccgcctggttcacaggttgggccaactggtcgcgcgcaatgtggatgggttccaggggatggatgcgcactcggtgatcaagaagctacagggagacgcaggggtttgctgtagctcggagtatttcgacctgggcgggctggggcgcgtgtcgcgcctggtgccggagtcgttggcgttcgacgaaatgcccgaggagcggttccttgagttctggcgaggcatctgccagcacctgatcgagcactactggacgggcatgagcgaagagcagatcggcgacatgatcaacatgatgcccgaggagatggtgtga

SEQ ID NO: 326805 - DNA, 615 bp, Pseudomonas aeruginosa
atgctggtcgccgcgaagaagcctcgcaagaagacgtgcaaggcgtgccgggaggtattcactccagagcgatcactacagtcagtgtgcagtccgaagtgcggattggcgttggcggctgccaagcgagagagagagcggaagtctctggcgaagatagagcgccgcgagatccgtgcggccaaggaacgcttcaagacccgttcggaccatatgcgtgaggcgcaggccgctttcaacgagtggattcgcctacgcgacgccgacaagccatgtatcagctgcgattccacggcctgtgacacagggctgatcaccggcagtcgctgggatgcagggcattaccgctccgtcggtgcttgtcaggctctgcgcttcgagccgctgaacgtgcatcggcagtgcgtgcgctgcaacagggacatgtccggcaacgcggtggagtaccgcattcgcttggtccagcgcatcggcgccgagaaagtcgaatggctagaggggccgcacgagccccggcggtttcctatcgatgaactgaaggagatcaaggccaagtatcgagcgctgtctcgggagctgaagcgcaagatggggaggggagtagggcatggctga

SEQ ID NO: 326806 - DNA, 495 bp, Pseudomonas aeruginosa
atgaagaaatcttcgacccaggttgtactcgacgcagttcgggaactgcacagccagcagcagatcgtcactcgccagaccctggtcgaactcacggggttgaagcccggcgttgtcgatgaccgcctgtccgtcctggtggacgacttgctggtgctgcgcgtcgagcgcggagtgttcgtaccggcaccgcagttcgatccgcccaggccgatcactatcacgcagataccaggtggctgggcgaaggtcgagatcagcgatgatcacgtcattacgcttacgccagcggagaagcggatgctcggtgaacttctggcgggtgcggctcagcagttcgcagcgatcgatatcgggcattcgaaccagatactggccgcagagctggcgatcaagatacggaagctggaaagagaagtggcagcattgcgcgcagacaggaccgatggcgggcaactcgccttagccatgagtgatgtcgctgctgtgcaatag

SEQ ID NO: 326807 - DNA, 396 bp, Pseudomonas aeruginosa
atgagcctgcggaaggtatgccagttaccgggtatgccggcgatgtccacgttcctccggtggctggccgacgagcagcatgcagatttgcgagagcagtacgcgcgtgcgcgcgaggcacaggccgacacgctcgccgaggagatcctgcagatcgctgacgacggctcgaacgacacatacacggacgatgaaggccgcacgcatgtcgactacgaccatatctccaggtcgaagctgcgcgtagatgctcgaaagtggttggcgtcgaagatggcgcccaagaagtatggcgaccgcatcaccaacgagcacactggcgcgaatggtggcgccatagaggtcaagagcacagtcaccttcgtgcagcccaagccacgaggtgacgacgagtga

SEQ ID NO: 326808 - DNA, 1284 bp, Pseudomonas aeruginosa
gtgaccaccttcgtcgctgcgcctctcaacctgaacatcacgctccccttcaaactggcgccactgtacgaggcgcgccggtacaaggtcatgcgtggtgggcgcggcggcggtaagtcccatggcgtggcccaggtgctgctcgacatgggcgcgcgcaaccccctgcgcatcctctgcgcgcgggaaatccagaagtctatgcgcgactcggttcaccggctgctgcgcgactacatcgtcaagctcggcctgaccgagttctacgaggtgctggacaccgagattcgtggacgcaacggcacgctgttcctgttctccggactgcaagggcacaccgtcgattccatcaagtcctttgagggcgtggacatcgtatgggtggaagaagcccagggcgtgtgcaagaagtcctgggatgtgctgatcccgaccatccgcaaggacggatcggagatatggctgacgctcaacccggcgatggacaccgacgacacctacgtgcggttctgcgccgcgccggatgacgacgtgtggctctgcgaaatcaactggcgcgacaacccgtggttccctgatgtcctcaaccaggagcgcctgcgcgccaagcgctccatgtcgcaggaggactacgagcacatatgggaaggcaagccgcgcaccgtggccgagggtgccatctaccgccatgaaatcctggacctgatggaaagcgggcgcgttcgcccggtgccatacgaccctctgctacccgtccacacggtatgggacttgggctggaacgacgccatgaccatcggctttgtccagcgcgggccgatggacgtgcgaatcatcgactacatcgaggacagccatcgcacgctggattggtacgtggcgcagatcgagaaacgcccgtatcgctggggcatcgactacctgccgcacgacggtcgtacccgcaactaccagaccggcaagagcaccgaggaacagctacaggcgatgggccgcaaggtccacgtcctggccgccaccagcatagaggaaggcatcaaggccgtgcgcatgctgttcccgcgctgctacttcgacaaggacaagaccgggcgtctggtggagtgcctgaagcgctaccgccgcgccctgcaccagcataccggagaggccatggctcccctgcacgacgaatacagccacggctccgacatgttccgctacgtcggccaggccgtggaaatcatgcccaacgaaatggaacgcacctacgaggaagcggaagcgcctgactggcgactgtga

SEQ ID NO: 326809 - DNA, 2322 bp, Pseudomonas aeruginosa
atgcagatcactgagaatgaccgccagtacatgaatggcctgccaccggccggcgacacgccgctgaccgtggacgagtacgccgacatcaactacgaaatcgaggaccagcccgcgtggcgcgccgtcgccgacaaggaaatggattacgcggacgggaaccagctcgacaccgacctgctgcgtcgccagcaggcactgggcatcccgcccgcggtagaagacctgattggcccggccctgctgtccctgcaaggctacgaggccgtcactcgcacagactggcgcgtgacgccgaacggtgacgtgggtggccaggacgtggccgacgccctgaactaccggctgaacacggcagagcgccagtctggtgccgaccgcgcatgctccgaagcgttccggccgcagatcgcgtgcggtatcggctgggtagaagtcagccgcgagtcggacccgttcaagttcccgtaccgctgccggcctatccgccgcgacgaaattcactgggacatgaagtgcggcgacgactgggaggcctgccgcttcctgcgccggcagcgctggctgtcacctgatcgcattgccctggtgttcccggagcatgccgagctgatccgcatggtaggtaagtacggcagcacctggtggggccagcccgatctcggaatgatggaaggcggcacatccaccggtctacacaacgcatggaacgaggcgcgggcctggaccgtgcaggaggaccgctggtacaacccaagcagcaaggaaatctgcctggtggaactctggtatcgccgctgggtgcaggtccacgtcctgaaatcgcccgatggccgagtcgtcgagtacgacccgaacaacctggcgcacaacatcgcgctggcgtccggccgcatttcaccgaagaaggtgacggtatcccgcgtgcgccgctcctactggctcgggccgcactgcctgcacgatgggccaagcccatacacacatcgccacttcccctacgtcccgttcttcggtttccgcgaggatgccaccggaattccatacgggtacgtgcgcggcatgaagtacgcccaggacagcctgaatagcggtatgtccaagctccgctggggcatgagcgtcactcgagtggagcgtaccaagggcgcggtggacatgaccgacgcccaactacgccggcagatcgcacgtccggatgccgacatcgtgctgaacgctgagcacttcgcaagcaacaggggcgctcgcttcgaggtaaagcgcgactacaccctgaccgaccagcatttccagatgctccaggacaaccgcgccaccatcgagcgcgtaagcaacatcacggccggtttccaagggcgcaaaggcacggccactagcggcatccaggaacagcagcagatcgagcagagcaaccagtcaattggccggatcatggacaacttccgcgccggccggaccctggtgggcgaactgctgctggcaatgatcgtcgaggacatcggccaggagcgcactgaggttgttatcgaaggcgatgccgtgaccgccgatcgtgtcgtggtgctcaacgagccgcagcgcgatccgcagaccggcgccgcctacctgtccaatgatctgctgcgcactcggatcaaggtcgccctcgaggacgttcccagcaccaacagctaccgcggccagcagctcaatgcgatgtccgaggccgtcaagagcatgccgccgcagtaccaggccgctgtcctgccgttcctggtcagcctcatggacgtgccgttcaagcgcgacgtggtggaggccatccgagccgttgatcaacagcagaccccggagcagatccagcagcagatcgaccaggccgtgcaggacgccctggccaaggccggaaacgacatcaagctgcgcgaactggagatcaaggagcgcaaggcggatagcgaaatcagtgggctgaacgccaaggcagtgcagatcggggtgcaggccgcattcagtgccatgcaggccggcgcccagattgcgcagatgccgatgatcgcgccgatcgccgacgccgtgatgcagagcgctggataccagcgcacgaaccctgctggtgacgacccgaattaccccgtagccgaccagacggcggcaatgaacatcaagtcgccctacatccaagggcaggggccggcagcggcagaagctgaggccgaggaggctccagtacgcaggaacaccagcccgacatatccgccggtgccggccgatgccccgaccggccagcgcggaatagaaacgccgagtactgctgacaacctgccgcagggttcttga

SEQ ID NO: 326810 - DNA, 807 bp, Pseudomonas aeruginosa
atgaccatcatcaagcccactgtgggccgcatcgtccactactacccaactgccgatgaccagggcgcgaagcctgtcgatggcctgccgctgcctgcattcatcgcgcacgtatggtctgacacctgcgtcaacctggcgtacttcgatgccaacggcctgccgtacaacaagaccagcgtgctgctggtgcaggaaggggcgcagcgcccggttgccggcttcgccgagtggatgccgtaccagaagggccaggcagcgaagaccgaggcaatacagcgcgaggcagtggatgcgctgctgcaggtgcgcgtcccgatcctcgatcagatcaccgaactgtgctgggccatcgagaagtgcggcgcctcgcccgagctgaccgacgcggtgaccaaggccagcgcgttgcgcgagccgatcagtgaactggttcgccaggcgctggtgctgggcatcggtgagggtatcgtgggcgtcagctactccagcaacgcgccgaagcactacgaccgttgcctgcgtcctgtggcgcactgcgatggtcacgaggaccagtccgagccgcccgaacatggcgtgacgggtggcagcgcgtcgcaacagccgtcaccttttgctggtgacgtcaccgtgatgtcacgggctgtaaccgacgcgtcgctcgctcctgcggtctccttgctgctggctagcgccgactgctgcgacaccaacgctgcggtgcgtgacgacagtgagcaggtcgagcaagatcgtgccaacgcggccaactaccgcttggccgccagcttgctgcagccctga

SEQ ID NO: 326811 - DNA, 1026 bp, Pseudomonas aeruginosa
atgattgaactggcaatgggcgataccagcagtttcatgctggacagcgacgtgcccaacgtcgcagccgatgcgggtgccggcgatgctggcgaggccagcgccgatgccgacgatcaggcagacaacacccaacagaacaccgacgcgcagcagggcgcggctgatgacagcgacgctgccagtggcgaccaaaagggcaagacgcccgacgccaccgagttgaacgccgacaacgccgtgatcctggccaaggacggcaagcacaccattggctacgagaagctggtggaagcgagacagggagaacagcactggaaggcacaagcccaggccgcgcaggtagaactccaacgcctgcgggatgaggcagcagcgcgcgccacggcaggcgaggccccgacgtcgcaggacaaccaactggcggcggttcaggctgccatggatcagggggttgacccggcgatcttcggagacttcagcgaggaagcgctggccgcaggcatccagaagctgatcgacgcgaaagtggaagcgcgcgtgagcgcactcgtggaccagaagctggcaccgatccagaagaaggaagccgagagcgccgcgagcgcccacctgaatgcgatctacgaggcccacccggacgccgactccattgcggagagcaaggagttcggggactgggtggcgtcccgtccgtcatatgagcgcgcgagcatcgccaaggtgctggaagacggcaccgcggccgatgtcatcgaactgttcggttcgttcaagtccgccaccggaaacgctcagcagtcgcagcagcagccgaacgcgcaagacgcgaaggctgcggcccaggctgccatcaacaaagccaagaccgaaccgccggccagtctctcggatatcccgggcggcaagcctccggctggcaaccgattcgaggccatcgccgcaatggatccggcatccatgtcggacgccctgcgcggcatgagccccgatcaggtcgaggcattcctgaaccggaacatgtaa

SEQ ID NO: 326812 - DNA, 1293 bp, Pseudomonas aeruginosa
atgaccgcaagcaaaaccaccatgcgttacggtgatccgaacgcgatgatccaacaggccgccggcttgttcgcgctctgccagggccgcaactcgaccctgaaccgcctgaccggcaagatgccgagcggcaccagcgacgccgagaaaaagaccaagggccagtcgagcctggaacttcccatcgtccaggcccaggatctgggccgcaacaagggcgacgaggtgcgtttccacttcgtgcagccggcgaacgccttcccgatcatgggtagcgagtacgccgagggcaagggcactggcctgaagatcggcagcgaccaactgcgcgtcaaccaagcccgattcccggtggacctgggcgatgtgatgtcgcagattcgcaacccctacgacctgcgccgcctcggccgtccgaaggcgaagtggttcatggacgcctacctggaccagtccatgctggttcacctggccggcgcccgtggtaaccactacaacaaggagtggtgcctcccgctggagacgcatccgaagctggctgacatgctggtcaaccgcgtcaaggcgccgaccaagaaccgtcacttcgtggccagcgccgatgccatcactggcgttgcgccgaatgcgggggagtacaacatcaccaccgccgacgtgctggacgtggatgtggtcgactccatcgccacctacatggaccagatcgagctgccgccgccgcccgtgaagttcgagggcgacgaggccgccgaggattcgccgatccgcgtcctgctgtgctcgccggcccagtacaacagcttcgccaagcaggagaagttccgtagttggcaggctgctgcactggcgcgcgcgtcgaacgccaagcagcacccgatcttccgcgtcgatgcgggcctgtggtccaacaccctcatcatcaagatgccgaagccgatccgcttctacgcgggcgacaccatcaagtattgcgccgcatacaactcggaagctgagtcgagcgccgtggtgccggatagcttcggcaatcagtacgcggtggaccgcgccctgctgctgggcggccaggctctggcgcaagcctgggcggcttccgagcactccggcatgccgttcttctggtccgagaaggacatggaccacggcgacaagctggaactgctgatcggcgcgatcctcggctgctccaagattcgtttcgccgtcgaggcgaccaacggcctggagtacaccgaccacggcgtgatggcgatcgacaccgccgtcaagatcatcggcccccgcaagtaa

SEQ ID NO: 326813 - DNA, 480 bp, Pseudomonas aeruginosa
atggcccagtacaagaccatcccgctcggcggccagttcggcggtttcacgccgtatggcaacctgaccaccctgcgttaccagctcgcgaccaatgcggccggcgttctgctcaacagcaatgccgccgccgcgctggcggtgggcgacgtcgtggcgttcgagttcccgttgcccgccggcttcgtcgccgaagacctgcaactggtgatttccgaccacttcggtgccggcgtgaccgctgacgtgggctttgcctacgccgacagcgtggacgacgcgacctatccgcaggacgccgcatattttggcgctggcctgctgctgtcggccgctgcgcgcctgcgcaccagttccaacaaggcgctgttcgcgctgcccaaggacgccaacctggttatcaccatcaaaggcgctgccgtcgcggaggcgggcaggctccaggtgatcgtccacggcgaacgcctcggcgcagcctaa

SEQ ID NO: 326814 - DNA, 873 bp, Pseudomonas aeruginosa
atgaaacccatcctcatcgctaccatcgcccacgcgatcaattccgcctactgtctcgccatcggcgacaaggtggcgccaccgtttgccgagtgcccggaagacatgcagcgcggcatcctggccggcgtgcaactccacctggacaacccagacaccacccccgagcagtcccatgagtcctggctggcggacaagctggccaacggctgggtccatggcgaggtcaaggacctcgaggcgaagacacatccgtgctgcgttccctacgccgagttgcccgagtcgcagaaggtcaaggactacctgttccgcgccgtggttcatgcactcaaggacatcccggacgctgggagccaggacgccgacgcgcgcgtggctgagttgcaagaccaactcaacgaggtgctaggcaagaatgcggccctggtggcgcagattgcgagcgacggcgtgcccatgctggataacggcgtgcccatcaagtacatcggcccgcgggaaagcttcaccgaccgtctgtatggctcggggctgatgttcacccaagggcaggtgcgtagcgtgcccggcgacctggcgcgtcgattcctcaaccatcgcgacctgttcgagcgctccaccggccccgcaccggccggcgacgacaccaagcaggtgatcgcgcaggcccagcaggagcagaaggagcgcattcgcaaggaggaagacctatcggccctgcaccgggaggtggacaacttcgccgacttcaccagcctggcggcattcgccaaggaccgctacggcctgaacctggtcaagcagcacggcttggcgcgctcccgtgatgccgtccacgcacgcatcgaccagttcggtggcgcggtatga

SEQ ID NO: 326815 - DNA, 678 bp, Pseudomonas aeruginosa
atgacgctggccgacctgatccgccgagttcgcacggacgcgaatgacatggtggagccgtatttctggtcggaccaggacgtggccgactggctcaacgacgcagtacgcgaagccgccgtgcgcggcaggctgatccacgagagccaggccgacgccgtgtgccgcatcgaggtggtcgccggaactgccatctaccagttgcatgcgtcgctatacgaactgtcgcaccttggcttctacccggccgatatgtcgcgcccgaccatgccggtgctgaagtcggccgaggtgcttgatgcggagaggcccggctggcgcgcctgcaccggcaagccgctgtacgcaatccagcacgacaccacgctgcgcctggctccgacccctgaccgcgccggtatcttgcgtcttgaaggctaccgcacgcccctggcggacatgacgctgaccgacaaggacaccgtgcagccggagatacaccccgaacaccaccggcacctggtccagtgggcgctgcatcgcggattcagcatccccgacatggaatcgtttgacccgagccgcgccgcactggccgaggatgccttcacggcctacttcggccagcggcccgactccgacctgcggcgcatcacccgtgaggacgttcctcaccatgtagaggcattctggccatga

SEQ ID NO: 326816 - DNA, 207 bp, Pseudomonas aeruginosa
atgagcaagaagatgagcgtggacctgaaggtcggagaggtactgctgatcgatggtactgccatccgcctggagaagaagtccgggcaggtggcgcgcctgcagatctcggccgacgaaggcaccgttattcaaaaccccgcagcagcgcgcaggagtgcgctccaagacctggagcacacccctgatggcaaataccctctatga

SEQ ID NO: 326817 - DNA, 408 bp, Pseudomonas aeruginosa
atggcaaataccctctatgactatgcccgccagcgcttcctggagggccagttcaactggatgaccgacacgatcaaggtgatcctggtcgataccggcgcctacacgccgcagactgcgatccaccagtacctgtcggatatcccgtcgtcgtcccggatcgctggcccggtcactcttaccgcgaagaccaccactggcggcgccgccgacggtgcggatgtgacgttcaccagtgtgtccggcgcgagcatcgaggcaatcatcatctacaaggacaccggtaccgagtccaccagcccgctgattgcattcatcgacacggctaccggcctgccgatcacccccaacggcggcgacatcatcgtcacctgggataacggcaccaacaaaatcttcaaggtctga

SEQ ID NO: 326818 - DNA, 426 bp, Pseudomonas aeruginosa
atgcaagggcatcaacacccgcacgagaagaatgccgactgtcactgcgtggcatgccggccgcttgaacgcccctgtgattgtgagggctgcatgaggctgatgagtggctcgggcaagccgccagcgcagggtatcggtgtcaagggtatcgagcccaggcccattgaactgacgccgagccaggaaatgtacgtcaactggaaggctgtaggcgccttgcctccgttccagatgttcgttcacgagcaggctccatgtccgcccgaccgctgccagcagcagtgggctatcgactacggtgtgcgctacggcgcccaggtcggagacagggtgctgctggagcgctatgcccagtggcaccaggcgaaaggctactggccagacgaaacgatcctcggtcaaccggttgaaggagcgaattaa

SEQ ID NO: 326819 - DNA, 858 bp, Pseudomonas aeruginosa
atggccgacaccatcgacctggacggcgaaaaattcgtctctccatcattcgtcaccagtgcgacatcgctcgacgacatctataccgcctgggtggccgacttccaaggctcaacgactgcctataaccctagctggccgagcaccgatgatagtgcgacgctgctaccaatcccgccgttgtggaccggcggggccgataggttggttgtttcaaccgagtgcggtgtggagattgtcccctaccagttcacctcggccagtacgcactactcacaggcgatcgcaggagttagccggtactactcgatcaactgcgggctgcgcctggcgattatcttccacccgactggtgtcgactcaggtattaccagcttttcgggcaactataacgccgacctggcgctatttcgcggcacgcataaccgatccagtgaaaacgtccaattcgtggcgcgtgtcgttccgggcaggcaaattgatgtggccatcaagaacaccgcccaaactgctggactccccatcaagctggtggtcctcaacggcaccactgtggtgtcttccaccgacctgactacgatcgttcagggtggtgtcacactggtgacatgctccatctacggtggaaccgtctcgggcaccgtcgtggaccaggctggccagcctgctacccgcatcgtccatgttcacgagcgcgaaacagggtcggtgatcggtagaggacgcagcgactcatcaggtctgttcgaaattccggtcatcgcgaaggtgggtaccaccatgtacgtagtcggcctggacgatgagaactcgccgctgatcaacgctgtgatcgccgatcgcatcgtgctggagtag

SEQ ID NO: 326820 - DNA, 2964 bp, Pseudomonas aeruginosa
atgaccacgggcgtagagctgcgttttgacgcagtacccagcggctacgtcccctccagcagtcgcaacgtcacgctgggtggcggcccgccggcgaaccttcccgaaggaaccatcggagcttggggcattcagccaccgctgctctcgcgcgatgcccgggtagtgcggacaatccttccggacccgcacgcatcggcggatctcgacttctctaccgttgaccccggctacgtgccgccagcgtccaatgctgtgctgcttcagtggggtgagttgccgccggtagagggccaaacggttttcccgggcggattcagcgattccatggtaccgccaccggcgatccgtactcagtatcgctttgtgttgcctgtaggatcgtcgcaccaagtgttcggcgccgccaaggcttggaagtacagcacgttcgtttcggcctacggcttcaattcgaacgtcatcggatcccacaacgcacagaacaagcaccgaacggttcagccgaccggatttgtcgcctaccaaagcgggcaggcgaacatcatcaaccgaaaccgctatgtggcggccggcaacattgcgccgccgccgtggggcgcgaatcccacggtttggctgtacacccgctatctgaagcctggcggcctactggcgaccgcgatcccggatgtccaccgcatcagccacgaacgccagttcgtgcagctcaatgctggtgttccagcgccaggcatggggacggcatgggtcagtcagggaacgcgcgttctggagcccattggcacgtttctggatgccgtggccagacctatggtcggcggcacgcgcttcttggagccgccaggctgggattcctcggcattcggcacgcggatcattcccgagtcgcagacggtcgcgcctcaaggcttcgccgagttgtgggggcagcaggcgatcaacaactggctcacctttgccgagccggccggattccagagcaccgtccaggaagaataccgctggggccgcgcagacgtgtggaacctgcgccagtacgtggtccaggagtacgacccggacagcgagttgaacccgccaccctggtcgcagtggacgctggtggagaaccgaaaccgtcaagtgggcaccatcggcgtgccttcgccgccggccggcttcccgcagatcgacaacaatgccaggccgatcttgccaggcggcgtggcgccgccgcagatcaccactgcagccatgattgcctacggccgccgttacctgccgctggaaggcatcgaaccgccgccgatcctgaattggcatgccgtctacaacggcgcgagggtgttggtgccgaccgggaatgctcaaagcgctttcggtgtggcgagactggagaacacgcggcgttacttcgaccgcatcggcggcttcgactcggtggatatcggcatcgcgttcatcgatttcgccattcgcggtatcagcatcgagccgcgctacagcatcgagccgccggatatcaagttgcccgaggtcaagctgtacacgcgctatgtcgatccggcaagcaacgacatgctgaacatgggcctggcggctctgtcgatccacttcaacgcgatcgggccgaggtgggcgcacaaagacctgttcggcgatccgcgcatccacaacgtgacgccggaggtcgcgaccttcggggcgaacgccgaggaattcggttcggccttcgtgcgcctgcaatggcgtccggtggcgccggacggcagcaacatgcagttgttcggccaggcaaagatcgccgaccgcaagcagaccatcacggttccaggcaccaacctgctcaggatgggcgacaagctggtggtgaccaagaccggcgcgccgccgtactcgccgcagaacatcatggttgatcaggcggttaacaccggagcggtgctcggaaagcccggtctgaatcagtacgtcctgtacgcgacaggcatccgggcgccggacatcgaggagccaacggtgcgcatcatgggcgtgaacatcgacgctggcatcaaggtggacggctacggcatgccagccgtgagcttgaagctgcgcaagctgacggtggacgagtggcccgatgctgaagtgttccagccatccaagccgcgcatcacgccgcacaccatctgggcggtgaaggaggcacccgagcaggctaagcagaaccatccagccggtaacctgcactatgtaggggaaacgctggtttatcctccgggcgagcggttcggctcggcgcgcatcagcacctacttgggcatcctcaagccattcccgctgggcgacgtgtcgaaggtgggtgagcacgcgatctacctgaaacgtcgctacctagagccgcggggtctgcaggcgtatcgcatggggtgggcgatcgtgggtgatggcacccagttcgtggcgcagttcgccggtgctgattcgatgtcactgggggcgcctgctgtagcccgtggcccctactacggcccgcaaacggttcggcctgctggtctgctggcccctggcccaggtggggcgacatgggtatcgctgctggatcgtcgactccagatgaccggactctcgtcgctggctatggggtattcgcgtggagagggtccgtaccagtggcagtcgctgcatgttgggccgccgatgccgaccattccaagcggtaccgacacatcagcattcggcacagcctgggtttcgctgcgggtacgaggggttgagccggacggctgggagtcgttcatctgcgaatacgacccgtcgcacttcgcggatcgcatgcgagtccgcaacgtcttcatcccaccgggtccaaatgcccagtccgtggcacctgtagggttggattcagtgggtgtgggcgtgcccaatgtgcggccaggtgtccactacatccgccctgacggcaacgccgatcagtaccgcaaaggagccttctga

SEQ ID NO: 326821 - DNA, 1191 bp, Pseudomonas aeruginosa
atggccacgacttccctggtgccgctggccggcatcaacaacgtcgccgaagatgccgcgctgcaacgcggcggcgagagcccgaggctctatgtgcgtgacgcggtgaacatagacctgtcgccggccggcaaggcgcaactgcgggcctcttcgcgccaggtcacggaccagccgttccgccaactctggcaaagcccactgcacggcgacgccttcggcgccctgggcgaccagtggggaaaggtcgatccgcattcatggacgttcgagccgctcgcacagatcggcgaaggggacctgtcccacgaggtgctgaacaatcgggtgtgcgtcgccggaacggcgggcatcttcacctacgatggcgcgaaggccgagcgcttgacgctggacaccccggcgccgccgctgctggtggcaggcgccggatcgttgagtcaaggcacctacggcgcggctgtggcgtggctgcgcggcccccaagagtcggcgccgtcgctgatcgccttcgcggacgtgaccgatgccggcgcgctggaagtcacctttccgctgtgcctggatgccagcgttaccggcgcgcgcctctacctgacgcgagcgaatggcggcgagttgctgttggccggcgactacccgctgggcgcggccacgctcatcctgccgacgctaccggagctgggtcgaccggcgcagttccgccacctgtcgcccatgcccaccggcaagtacctggcgtactggcgcgggcgcctgctgaccgcgcgcgctaacgtgctgcgattctccgaagcgctgacgtaccacctgcatgatgagcgttacgggttcgtgcagatgccccagcgcattaccttcctgcagccggtggacggcgggatctgggtggggcaggttgatcacgtcgcctttctcgatggtatcgacccggcaagcctgagcgtgtcgcgccgtgcatcgcgggctccggtgcctggtagtgcgatcctggtccccgccgaggcggtaggcaccaacgcatcaccggatggctcgccggtcgccgtgtggctggcggagaacggctacgtcatgggcaccagcagtggcgccatcgccgaagttcatgcgggcgtgctcaccggtatcaccggccgtgccggtacctctgtagtgttcgaccgccgtctgctgacggctgtaagctga

SEQ ID NO: 326822 - DNA, 591 bp, Pseudomonas aeruginosa
atgcaacgcattagcagcgctctgcgcaaagaactggccgccgacctggccactggtagcttcgacatcaccgaaaacggcattgccttcccgcggctcagcgtactggccggtggcgaatacttcggccgcatcaacagcggcgagtgggagaaggaaggtgacaacctgatccccaccgagggcctggcgcacatcctcaacattgcgctgggcagcaagcccaaggtgtcgtatttcctggccctgttcgccgggacggcagcacctgctgccaactggaccgccgccaacttcgccgcggtggcctcggagatcaccagcatgaccgagggttacaccagcgctacccgcccagcctggacgccgaccgataccgctaccggttccatcgacaacatgaacgcggtcgcgaccgtaaccatcgccacggcgtcgcaactcaacgtcaacggcgccgcgttgctgaccaacagcaccaagggtggcaccacgggtgcgctggtatcggcgtcgaagtacgcggcgactcgtgtgttccagaacggcgacacctacgatatcggctaccggctgaacctgactgtctaa

SEQ ID NO: 326823 - DNA, 2598 bp, Pseudomonas aeruginosa
atgtattcgccgcgcccctacggacgtttcgcggaagacgcggagctttccgccgacgatgccgccgctgtcgagcggctggccaggaacctgacgaacttcaagcaggcgtctgacctcgccaacctgaagcgcgttgcgggcctgcccagcggccggcaggcggtggccatcgacatgggcggagtgtttcgcatcctggtgctcgagcagcatgagcttccgcaattccgtttcgacggggtggcacagaccaacatccccatgctgttctccggcgtcatcacccgcgcccaggtgctgaccgatgggcagggcgttggcataaggttgaccgagcaggcccggcgccggctggtggcctacgacccgaaagcggcgcttccgccgaaggacgtggcgttgcaacgcttcgtcatcaagtacgaacctcgtttccaatacttcgagccgcgcgagcagggcatctacacattcactcagtacgtcaagcagcgcccgacctggtacagcggcgccatggccgaggtcatgcaggtggctggcggatatgggcggcaggtcatggccgaactgccagaggacgaccttgagcgcgcaaggatgctgattcctgagcgctacatgcaccgcatccgccaggaagtcggcaacgttcggctgccggcctacacaggctttccggacgagcaaggccagttcaaatgtgactacctcgccagccgctgcaacgccgtcgctttcgatgccggcaacagtccgtggttgctgcagatcaatgcgcggggcgtctacgcgatgccgcttcctgtggtgccggccaccaccaccgaggctttccgtgactacgtgctggatgttggtgacgacgagctgctgaagcttctggaccgcttcggcggcatgcctactggtgaggggttcccacagccggaacaggagttcgaggcgtggcgccgggccggcgtcatcgtcaaggtctgcgacaccgccgacttctacaatttcgaggccatgtacgcggcgtgtggctgggcggtgaacagccgaggcaccgagggcttcaacacctgctggacctatgacgacgccggcctgatgcaggtccatgcgtacaagatgagtctgtcgctggccccggcggagaaccaggggcgactgaagaacacctggaatttcgatgatccagacgatgcagcgaaactcaacgcctacctggcccaggtctatggcgcgctgaccgatggcaccgccagagaactggccatcaagtataagattcggcgggtgccggctggtgagattctctcgcgcgcctcttcggccagcggcccggatctggactactgggacagcctggaactacctcccatcgccacccaccagggccgagtgtcgcgcgtcgccagtggccctttctactggccgtccaaggtcttgaagtcctgcacccgcctgaagttccccgaactgacggggcaggggtgcgagtccttcccgcacatctcgcccgactattccggcggcgcagtgaagtgcgacaccatagtcttcggctgctatgtcgaggaccaattgcgtgtcatcaagtatttctacgacgaacgcaagttccagcaggaaacgacaagtacgttcgagcagtacatgatcgtcggccagtgggagaagaccgagaccttcggcctcagcgggctgatggggttcttctacacgaccgacttcgacgatcggcaggagcagccggcggtaacggtccataccaacatcgtcggcaccgatatgggctacggcaacccggcttactccactccgccgacgctttggtgcgtcggcggcgtgagccggtccaggtattacatgcaccgcaccacggtagacactaccgagacgtttaccctggacgtggcggcgctggtgccggtgttcgagcgcgattgcatgctctacgcctaccaggaccataccgggggacgcagttcccacgaggaaacgacgcagggctctgtgcctgatcccacgtcctacgaactctggtgctacgacgacatctggcactggatggggcagacgcggaacgggaaccggggcgacccgccatccaaggatggggtgcctgtctatgtcgacacgctggtctacagccccaccgaaatcagcgacttcgccgagagtggcaactggctgaacctgccacctggcgggtttctggatgtcactggcatctgtgggccgtacacctaccgcaactccgtccacaacgccaacggcgtcatcatcggcggcgaggcgccaggcttcgatccgtaccggaaggacacccagtaccccaacgagagtagcgggcgcctgagtgtgtgcctgtccgtggccggcgctgttcaggtcaacaaggacatgccgcactcgtggtactggggcttctcgcccgagaacgacttttacttctaccgcgacgccgtgcatgtcgccatcggcgacgcccggtacgccagcatctacgagacgggccaggatggactgcgccgccgctgggggcataccgcacttgccgatcacaaggcggcccaccacttcataggggttatcaatgagtga

SEQ ID NO: 326824 - DNA, 1164 bp, Pseudomonas aeruginosa
atgagtgactaccgcgacgattccaacgacacggcggtaatcagcgactcggcctggatcggcctgaccgcgatcagcgagggaaccgccaggatcagcgagacggtgctgttcggcctgctggtgctgcataccgacaccgcggtggcttccgacgaggcaattgaccgtccggggcacctcctggcggaccaagcacacgccagcgacgaggtgaccgaccagttgcgcgccagggtgctggtggttgaaacggctacggcgggtgatcgcgtcaccggcacgctgcgcgtgctgtataccgatggtgcagtggtctccgatgccgtgatagagcgcgttcgcagcctggccgtggacaacgcccacctgagcgacgaggcgctgggcacccgccacaccttcacgctggtggtcgattccgcgcgcatcagcgacagcacgggccaggtcgctgccgcgctgttcgaagacagcgccctggcgagcgacgaggctttcggcaggctgcatgctcgcgtgttgctgacggacaccgccgcgctatccgacgaggtgctggacgcccatcaggccgtccaggaactgctggttgatggcgcccgcgtcgccgccatggtactggaccacctggccgcacgtgacctagtgacggacttcgctctggtcgatggcgaacccgtgggcggcgagcaggacggcggcctggcttggacggccaacgtcgatagctgggccatgagccgctatgccccgtacaccttcagctcgctggcagtgatcgacggcaaggtctacggtatcgctgcggatggcgtctatgccctggaaggcggcagcgacgccgtggcgggcagcatcaccaccggaaagttggacctggggcagggcgcactagtgcatccgcataccgcctacttggaatacgacctggccgccggcggccaggtcaccatggacgtgaccaccacgcaaagcggcgccgccgcgacctacagctacccgctagagagcgagcccgccgacgaactgactaacggccggttcaagttcggccgcggcctgcgcggcaggcacttcgccttcacgctgcgcttgacgggccagcgcgcctacatcaacgacttgagcgtcgaatcggcgccgaccaacaggagagtgtga

SEQ ID NO: 326825 - DNA, 1893 bp, Pseudomonas aeruginosa
atgggtatcgcaccggatagtatccttggcgtagcggtggacaccgttacggacaagatgaacgatcttgaggcgctgggcagcaagtacagcgcagaactgtccgccgcgctggcgaagatcggcgacatcacggtggctgacgtgccggcaccgacgcggccggatgcgcctatcgcttcgccgccgcccgtcaacctgggcgagcagccgacctacaacccgtcttcgctggtcaagccggaagcccctggcggcctgaacatcgacgacctgctggccgacctggacgtgggcgacatggacgacctgcccgacgcgccgaccataatcccgatcaacatcccggacgcgccgagcatgacggccatcccggtgccggaacgcccggacatcgacaccacggtggagattcccgacgcgccgcagatcgccatgccggacatggaagtgctggaacagatccgcctgccggaattcgtgttccccgagttgcccacgttcgatgccacgccgccggacgcgagcgggatcacggtgcccaacgtcttcatcaactggctggaaccggagtaccagtccgaggtgctggacgagttgcaagcgaagatcaaggaactgatggcgggcggcaccggcctgcctgtacccatcgagcaggcgctgttcgcccgctcccgcgagcgcgacagcggtgaaaccacccgcgccgtgcaggaggcggttgatacctgggccgcccgtaacttctccatgccgccggggatgctcgccaggcaggtggacgtggtgcgcgagcagggccggctgaaagcggccgagctgaaccgcgacatcctagttcaggcggccacctgggaaatcgagaacctgcgcttcgccgtgcagcagggcctggccctcgagcagttgaccgagaacatgcaccagaacatggcgcagcgcctgttcgaggtcgcccgcttccacgcggaaagccagatcaacgtgttcaacgcgcagatcagcctgttcaacgcgcagaacgcggccttcgagacgctggcgcaggtctaccgcaccaagctggatgcggctatctccaagctgactgcctacaagaccgccgtggagggccaggtggcgctggggcagatcaaccagcagcgcgtcgaggtgttcaaggccaagctggacgccgtacagtcgagcgtcgaggtctacaaggcgctgatgcagggcgcttcagtgcgcgccgagacgatcaagaaccagttcgatgcctaccgcgcagacgtgcaggcgtatgccgagcagatcggcgccgagaaggtcaagttcgacgcctacgaggcccgcgtcaagggcgagtcggccaaggcggatgtgctcgatgcgcaggcccgtgcctacgcttcaaccatccaggggctgacgaacaaggccgatgtcaaggtcaagggagcgcagatcaggatggaagcggcgcgcaccaaggtgtcgaagttcttggccgacgtggacgcctacaaggccaccctgcaggccaacctgagcgaggtgcagtacaacacgtcggtgttccaggcccaagtagaagcctggcgcgcagcggccagtgccaacgtggccgacgccgaaatgcaatctcgctttgccgatatgaacagtcggaccaacatcgcttacgcggaaatgcagatcagcgagtacaccgcgaagatgcagaacgctgtacagcaggcgcagatcgcactggaggcagccaaggccttggggcagtacaccgcccagctcgcggccggcgctatgtcggcggcacatgtatcggccagcatcagtggctctggaagtgctagtacaggtgaaacaaaatccgaaacaacttcgacttcttataattataattattga

SEQ ID NO: 326826 - DNA, 2163 bp, Pseudomonas aeruginosa
atgtacggattcaagaagggcgccaagcccaagcaacgatttgcagatggtgggcgggtgcgtggtccaggctctggcacctcagacgacatcgacaccgaggtgcctgcgggcagctacatcatgccggccgactcgaccgagcagattggggaagcggcgttgcagggtatgggggcgccggtcccggtcagcctgagtaacggcgagtaccagatgcctcccgagcaggttcacgccgttggcgtgcaggcgctggacgctgtgaagaatgccactcatgtgccggtagcccagcaggcaaaagggttctctccgcgtaaaaggggagggaatggcgccgagaagccagaattgttcttcgccgacggcggggttgttgatgaagagcgtaaaaagcagacccgtttcgacatcaccaacacgcccgccgcccagcgtgctgctggcgttgtgccggaggcatcggctcccgtagccaccagcggctacagtgcagaccccaccatggcaagggcgcaggccaatatcgatgctgaacggcaagcaatggctgtgcatcggcagcgcactgctgatgccgcgaatcttcagccaggagtggcgcctggctacagcgacaacctctataccgccaacgcccaggcacgttcggatgcagcccggcagcaacaggctgtggcgcagtccggtgcgctgccagatgcgccgtcggcgcaaggcttcgcgccctcgcgacaaggtaatgacccggccagagctgcaaggatgcaggctcagtttgatcaaccggtaacgggccctgatcgatctaaagctgctggtttcactccgcagtaccgcaccgagggaccaggctggcgaaccgattcggttcttcgcgggacgggtgacgacgtagcgcagcagtgggcatctggtgagtatgcccgaggctttgggactggcgtgcgtggggcgcttgcggcggttccggcagcattcgctgatgctggagaggatgtcggtcgattggctgaaccggtggtcaacttcggtaaagggctattcggatgggatgacactccgccggcgcttcgtggtcagcaagcggcccagggtgcagcagctccaagttccagtgctgtgcccgggcgaggccaggtgttgccggctgctggttcgcctaccggagcgttggagtcggcggcgaatactggagccgctatgccaggcgccggtggctcggacctgcccaacaacgtgacgcgggtgggcaacagcttctccggcacaacaatccgcccgggctacaccgttaacggggaagctcaagctgccgggttcaccccaggtggtcagcggagtgctcaaaaccagcgcgcagtggagaacctgctggcccgaacgcctgatgtgggtatggggttcagtccgagtactgtttctcaggtaccgccgatgaccccggacgcgctggctcagtacaacgccggtaactccagcgcgcctcgagtaaccgtggttcccgatagctctcgggccgatagcgttcgccaggccgccttgaatgcagcctcaacaccttatcgcggttcgccgaacgggcagttaactgcccgccagatcgacaacctgttcgggctccagcagagcgatgaccgcaatgctacgtccttggcgagcactcgggcgaataacgacacggccttggcgcgagagcaggtgcagcagcagggcgccaatcagcgcgctgctctacaggaaatggggcagggcgcgcgcttcctcgcctccaacgaactcgatcgccaacgcctggctggtgagcaagaggccaggggtttccaaacccgcgccgcccagcgcatcgagaagctgtacgagcagtacgacaaggctgctcccgaagaccgcgccgcgatcgccgaacagattcgtgtgcttgccggtaaggacgctccgaatcgcttcaccgtggtacctggcggccaggagtacgacccgcagtccatgcaacttctgacgcgccctgcacgagtactcaacaaccagaccggacaatttatcgaccagcaaacgcagtcggcgcaacccgtcgctccgcgaactggtgaggtgcgaagtggataccggttcaagggagggaaccctgccgaccagaataattgggagaaggtgtaa

SEQ ID NO: 326827 - DNA, 225 bp, Pseudomonas aeruginosa
atgcagcgtcttgtctacgacgccatcagcatcctgaaagtcctgctgttgctgtttgtactgatcggtgtgcagatcactcaggaaatccttcgcctcccggggccggaagccgagcatgccgtcctggttctcgaggaacttacctacgcggccctctgttgggatatcagcgaggccaacagccgcttccggaacccaaatcacccccttggccacggatag

SEQ ID NO: 326828 - DNA, 10641 bp, Pseudomonas aeruginosa
atgccggcgaagagcattccgcggaaggtgatagagggcgcaatctccgagggcttccttgaggaactgccacagtccgcatctgagcaggttctgcaaaacctggcgctgggacgggactgggccagcggcctggatgaagcgatggtaatgggaacgctggccgggatggccatgggtgggccggcggcggttctacatggcggtcagccggcagcgtcccgtggcctggcggatgcggacgctaccttcgagagtaccccgggccttgaggggcagaccgagacgactgcgccactggcactcccagctccagtgtatgaggctggttctgacggccaggtccggaccacggtcgaccagaactccgctacccaggcacagcgtcagcaagaggctgaacgtctggaccgaatccgtcgaggtgaagtcaccgatgtgactccggtcccggcggccccaaagcgctccgagcagatgggtctggacccggctgttgggccactgtctggtgctgctgcgcaggccgtggacagtggcgcaactgaccagatggtgcaacaagccgcgctccagcaggcagccgaggaggcgcagaagagcggcaggaaaggtgatcaggtcaacccggaaaccggtgagattacagcggagcagggtgatctgctggcatccgatcctgtcaccgatctgcagggccgcttggaatttgtacgccggcaagcccgtgccaccggatgggacgcgaagaaaatcgccgagctcgatcgcttgcaggaggaactggacaagctcgcgccagcgccggatgccggctacatgcagcgcgtcggtgagcgcgtgaagcgtatcgaggccgcgcagagccccgatgaaattgccgcgatcctcgccgaggatcagcaggatgagcagcgccaccagaacgccgctggccgggtggagctagccgcccgcgctcgcggcttcgccctggaccaggcggcgcagcagcaagccccgacgccaatcggcgtgcaggacgacatccagcaggcccaaggcaaggctgacgcgcagcaggcgcaagccgcacaaccggctgtatcgctggcgccggcagcggaatccgtaccggcagcacctgcgaccgaggcgaaagcgaccaacctgaaggacgccatttcgaaggtacgccaggccaaacagaagcccgagcagcctgcggcgctgcaggccgtgcgtcgcggagaggtgggcggaaagctgggcagtggcgaagtagtgaccaccagcagcgggcggcagacgacgcctttcccgaaggtcagcgtggactccagccgcaaggcgaccagcaccatcaaggccgtggaccagtggctgatgcagaatgccctggatgaagcgcgctcgcgcggcgacgagttcaacgcgcgccagttcgaggcgaacctggcgaagccgcagcgggccgataaggacgctgccgaggaatacctgttcggccaacagcctgctgtgcagccccgcgtgctgaagccactggcgccgaagtctaccgccaccgacaacagcgcaagctgggtcatccgaaacaaggaaaccggtgaggtgatcgcggaaacgttcgaccgtaagaaggttgacgcgctcaacaccgagaaatacgaagcggtgccgatccagcagcacctggcgagcctgaacaagcccaaggtgcccagcatcgaaggcaaggacatcggcgaagggtgggcggagttcagcaaggaatcgggcaccgtgggtatccctcgcgccgacatgccgcagatcaaggccgagcaccgcggcgcgatggtgaacttcctgagcgctcgtggcgtgcagcatcaggaagagacagttcccgcagataccctcaaaccgacgcaggctgaattcagccgcgacaaggtggcgaaggccaaggacttcgagggtggcaaccgctccatcttggtttcgcgcgaaggcaacgtgttggatgggcatcaccagtggatggccgcccgcgacaacggcgaagaggtgagggtgattcgcctggatgcccccatccgcgacctggtgaaactggcccacgagtttcccagttccaccaccgatgccagcagcgggcagggtgccacggttgacgcgagacaggtgaggcccgtgcctgagccagccgctcctgatgtgccgaagaagaggccgcgcggcgtgctggcaaagaggttccaggctgaggcccaggcccgcgccgaatacttcacccccggcaacgtggtgcgaggttacggcgccaactacgacagggttatcagctacaacccgaccgaatcgggaagctggaccgtcacggtgcgcagtgtacgcaaggaaggcgacacctgggtggatgtcccgggcgagagcgagcgcactcacatgacggcgccggatgcgcgcgacatgaagcgcggcccggccggccgtatcgcaacacagggggcgccaaccaccgatgagttccccttgaaggaagccgccgccagctactccggtatctcgaacagcagcagccagcgagcgaagtccgatgcggatgagttccagacctacatcgacgtggcccgcgacgcgggcgctgtcgtggcgcgcaccgatgctcagcaggcggccgtggagcaagccacacgagagttgcgcgccgattacctggcccagtaccgacgcctgatgaacgtgcgcgccggcacctacagcggttatgttgtcgggcgttctggactgaacagcaagcaggcggacaggcgcaacagcgcctacgaccgcgccatcgacacattcgtggcctggcagaaggccaatcaggatcgcgtgcgccaggcggccctggacgcccgtaccgacgaggaaaaggcggcagatcgccaggccgccgagcaggcccgcgccgacaaggcgcagcgcaaggaagacggggaccgcagcctgatgcgcaggattctgtcctggaagaagggcagcgagccggtggcgatcaccaaggccgcgcaccttgccggggtgaacttcggcaaggatggctacccgaccagcattaagttgacgccgaccgatggcagcgtgctgaccagcgacaagttcgacctggcggcgctgttccgtgagcgcggcatgagcgtgccggagtcgaaacgccgcgtgcgtgaactggtcgatttcgtgcgcgccgaggatgcagcccggccccagtccgaaccggcagaggcacccaagcccgagcccgcgcagcccagcgattcgaaaaccccgacgctcgatgcgcatgtagccctgatgcagcgcgcgcgcagtggggaggcgaccgccgacgagttccgccaggcattcgagcgtacgcagaacgcccgcgacgccctggtggccgagctgggcactatgaagaaggatgacctgctgaagtcaggcggctacagcttcttccaccgctaccgcaacgagaagaaggcagcgattgtcgatgccctggtcggtcgcgtgctggaggaatttgcgctgggccgcagctacggcccgagcagctacgtgatgtcggctgccggcctagaagcgcaccgccaggccaaggccagcgcgctggccgagctggtggcgaacaccaccgacgacgacatcaaggcgcacgccgccgaggtcgccgaggcgcagcaggaagtccaggctcgccgggaagcgcagcagaaggctgtcgccaacccgcagaccctcgccgagttccgccaggcagtgagctacaacatggagacgcacggggagtccctgcgggaggcgttcatgcgcctgacgccggaacagcgtattcgctacgacgaactggaggccgagagcactaaggccctgcgtgagcaggccaaggcacaggccaagacccgcgtagccagcgccgggcagactacggccggcgacatcatcgagacgaagcacaccaagcacgggcatgaccttttcgtggtgcaactggccgagcgcgtcagccgcgaggactacgacaccctgaacaattcggcgaagcggctgggcggcagctacagcagttaccgtgggaatggtgctgtccccggcttccagttccgcacccgcgaggcggccgaagcattccgcaagctggtgaccggcgacaccgccgacgcgcaggccgttgcagaagcgcgccgcgacgccttcgaggatgaccgcaaccagagcgccgcccagcggctgcgcaccatggcccaggctctcaacgagcgggccgatgattccctgagccgcgtacgcaagcagaacaccgatcgccgtgcgcggatggccgccagtgccgaagcctcggcgcgcgccgacaaggcactggccgccaccatgaacaacctggctgccgccatcgaaggcggcaaggcgaagttcctggacaccgtgcggcagaaagtgcaagtggagttcctggcgcgggaactgcgcaatgcaaaggacgcgcaaattcgagcgaagtacccgacttatggcgagcaggagaaacaccgtggcgagccggtggacgccgagacggtggactactccacattccccagttacaccgccatgcgctccgacttggcgagcctggcgcgccagatggcggaagtggacggcctgaagaaactggccgcgcgcctggagaaggtcgccgacgatgtgaccgaggcctacacggactgggccaagcagaatcttctgtccgtcagccgcttcacccgcggtgaccagttcgccgacttcaagagtcgcgaggatgccgagcgtgccattcgccgctccggcctcaccggcaaggccatcgtgcttccggtgaaacgcgggcagaaccgcatcgtcatggcccccagcgaagccatgaagctgggcctctggcagggcgacggcgacaagcgcataacgctgtccggcgagttcggcggcgaactggtgcaggccctcggccggcgcagtggcagcaagatcaccgttccgtgggcgctggagagcgcgcacgaaaagcgcaagcgcctggagagcatgggcatcctcaccggcagcgagtaccgctctgcactgcgcgagttcgtagcgctgcgcgaggcgcccgccgagcccgacaagatcagggaaatggaacggtccatgatcggccgtcgaaatgacggactggacttcttcccgacttcggccgccgtcaccgaggaagccgtcgacgccgccgacatccaggaaggcatggacgtgctggagccttccgccggcatgggccatatggccgacgcgatccgcgagcagaccggcgtagagcccgatgtggtggagctttccagcgaacgccgcgagttgctggaggccaagggctacaacctggtcggctccgacttcatggaggtgtccggcaagcagtacgaccgtatcgtgatgaacccgccgttctccaaggggcgcgacatccagcacgtacagcacgcctacagcctgctgaagcccggcggccgcctggttgccatcatgggcgaaggcgccttcttccagagcaacaaggccgccgagaacttccgggcctggctggacggcctgggtgccaccagtgaacggctgccggaaggttcgtttatggacccggcgctacccgtcaataccggcgtgaacgcgcgcatggtggtgattgacaagccggcagccgaagagtcggcagcgccgcagcccggcgaacaaccgcccgtgcagtactcgttcgccggccgcaatgctgtcggcgccaacctgcatgccctgagcacagcacagcagcgcatcgccattggcgaaaacgccgaggtcgttcgccgagataccggctggcaccgtagcgctgatggcaagtggcgcttcgaaatcagcgatcatcaggccagcatcgccgtggccggtgagactgctggcgccatcatcaatatggcccacctcaatgccatcaacgacgagcgcagtcgaccgaccgtcggcgatgtgctcaaccatcctcaactgttcgctgcatatcctgacctgcagcgtatcccggtggcagtgatgccagagggcatcactgcgctggctcgcctacgtcggttcgccacgggtaaccaagttgaggttcaggcgaacatgccgcgcaccgaggttgcctcggcgatcctgcacgaactccagcatgcgatacagatccgggaaggtttcgccatgggtggctcggccagggctttcgtcagcaacttcgacaagactggtgcggcgacctatcgtcgtttggctggagaggtggaggcgcgcaacacgcaggctcggctgaaaatgacgccgcgcctgcgccgggacatcgcacccgatgagtcggcggacatccctgcaagtcaggtgctggtgtcgttcaatggccgcgacatcgagaatggcccgttgccgcagaacctgacggggcgtccgccgatgacctcgcaaagcctggttcgtgctttcgacctgcagttcccagccctgggccaggctgtgcgcaagatgctgaagcgcggcaaggaaggacaacggggcggcttggtggtgatcgacagcgccgacccgttgcgcatcgcgcacacctacgcgcggaaatccggtaccgcactgagcgatgccgttcaactgtttgaggatggcgggcgcatcaatggcttctacgatgccagatcaggtctaacttttctggtcggcccgaacctgaatccggtaaccgcaccggccgtggtgcttcacgaaatggttcacggccagcagcggcagaatctcgaccaggctgcccacgccatgctgatgaatcgcggcaaagtccggagcgccgaactgcgcaccttcctggaccgtgtggccagccgcatgatcgaggccggcgagagccgcaacatgaaggaggccgctccgtatatcgtggagcaggctgttattgaagggcgagagcaggggttcgccgaggctgatagccggttcctgtcctgggtagacagtgcgctgggcaagcaggtgggtgacttcctgcgtaggttcctggccaacatccgtcagtggatgctgcgccacggtctgccggttggccgtatcagcgtggacgatctggtgcgatatgcgatggctggtgtggaaagcgccgccgaaggccgggtacggggcgacggcctagccatgagccaggacgacatgcgcaaggcgcgagtgctgcaaggtccgccggtggccatcctggaggggaatgaagcaccacagggcttcgctgcggttcgcgagtgggcggcgaagctattcgagtctcaaggtggcaaggcagtgaacccggacctgggcgatgtggtgctggatatgcgcgctgtgcgcgactcgatggcgcatggcaaggccaacccatacaagttcttggcgttcgcggccgtcaaggacgtgctggagcgtggtgtggtggttcaccgcgcggactatgagaagggggagagtttctacgtatcggcgccggtggtgatcgacgataaggatgacatcgtgaccgtgttggtgcgccgcgatccgaacatgcagcgcatgtatctgcattcggtggccacaaaagaatatctcctgaaccgtcgagtatccggtgctgatgccacgatggcagtgcagccttccggctcgtccagttcaggagacgtagccagtgtactccagcggctgctgaccgcaagcctgaatgaacccgaaggtccgcagttcagtcgctccggtctgcgcgaactcaccagcaaggctaccgccgaactgaacaagaccttcagcgctccgggaggcctgtcctggtggcacaagaccatcggcaccatgtacaacctcgcagagcgttccccggcattcaaaccggtcttcgagtcggcgcaaggatttatcgatgacgtgagttattacgccagcgatgcgactgatctggcgccgaaactgctgccgaagctggaaacctggcgcgacatcgcaaagtccccggtgggcgctgaggacaacaaggcggtggccaagccggtattcgagggcacgctgatgtgggcgcgcgacgtggacggcaagccggtgcgcgtcgattcgctggctgagcgcgccatgcgtctgacggccgacgagaaggcggacatcctgctgaagcagggcaagattcccgagggactgctgcgcgcctggcgcggcctgagccccgagcagttcgccaagatgatcgacagccgctacgagtcgcagatgctcaaggcaggcatcgtctggaccgacgctgagctgcgcgacatatggaagctcaacgatgctcaggtcgcgctgtaccgcgagttccgcgccgccaccgaccgtagcctggacaccatggcccgcgccgacatgctgcgcttcggcggcgaggatgtgaaggaactgcgcgaccaggtgatggacgcggccgatgcgcaggagggcgccgcgatactgcgcgaccacctggcgcagatggctgatgcatggccggaacgcgccacgaacctgctgaacctggcacacggcatgacggatcgcgccgagaaggtcgcccagttgcagggcgagggctatgcaccgctgtcgcgcttcggcaagtacacagtggacgtggtgggtcaggacggtcagcgtgaatacttcagcctgttcgagacgaagcgcgaggccaaccagatggccgagcagatgcgtggcgcgtttcctggcgccaccgtgagccagggcaccctgtccgaggaagcgtacaagctattcgctggcatcacaccggaaacgctggaactgttcggcaacgccctcggtttcgactcacagggcgatagcgcacgtgatcaggctttccaagactacctgcgcctgacaaagaccaaccgcagcgcaatgcgccggcttattcaccgaaagggcatcgctggttatagcgaggacgtagggcgggtactggcctcgttcgtatactccaatgcgcggcaaaccgccgccggcctgcacatgggcgacctttccgaggctgtgaacggcatcccgcaggcgcagggcgaactgaaggacgccgcggtacggctggccgactacatcaagaacccgcaagaggaggggcaggcggtgcgcggactgctgtttgcgcagtacctcggcgggtccgtcgcgtctgccttcgtcaacatgacccagccggtccaagtgacttttccctggctgagtcagtattgcggggtgaagcgcgctgcggcggaactggggcgggcagcacgacagatggcgcagcgctcctatcagttcgaaccggacctggcccgggcattaaagcgcgcagaggatgatggggtggtgtccccgcaggaggtccatcagttgatggcgcaggcccgcggcagcggctcgctgcgcgccggggacgggacgcgcttgggtgatgctcgagcacttgcgtccaacagcgtggcgcgcctgtcgatggcctggggcaagttgttcggcgccgcagagcagatcaaccgccgcatgacctacatcgcgtcgtatcgcatcgccaaagcgcagaacatggccaaccctgacgagttcgcacgccgggccgtgcgcgagacgcagttcgtatactccaaggccagcaagatgcgctgggggcgtggtgccgtcggtggcaccttgatgaccttcaaaacgtacagcgtggcctatcttgagctgatgcatcgcttgtggaatcagggtgagcctggttcgcaggagcgcaaggacggtcggaaggctgctgccctgatgatcggcatgctgctgctcgtcggcggcgccggtggcttgccgttcgccgaagacgccgaagacctgatcgacggtgcggcgcaactcatgggctacaacttttctaccgcgaaggccaaacaggagtttctggaaagtctgttcggtcgggtgcttgccgacttcattgatcgcggggtgtccaggctgcctggggctccgctcgatgtatcgggccggctgggtatggggaacctgatacccggaaccggtctgctaactgaaaagaccagccatacgcgagacgtcctggaaatagctggcccgatgggagactttgccagccgaatagcgagtggtactcgcaaggtgctgggaggtgatatcggcagcggtatcctggagatgtcgccgggcgcggtgcgaaatgcggccaaaggcgtggatatgctggccactggcatgtacagggacgccaagggctacaaggtgctcgacaccaacgtgctcgaggccgctatgaagtccatcggcttccagccggccagcgtagccactatccaaagggccaacatgctcaaccagaaagcaaaggccttctacaacttgaaagcccaggaaattcgcagcatgtgggcggccggcatcttcgagaaagaccagggcaaggttgagcgcgcgcggcaagcaatagccgactggaatcggcgcaaccctgaccagccaatggccatccgagtgccagacatcatgcgacgagtccgcgaaatgtcgctatcgaaggacgaacggatagcgaagaccgcaccgaaagcgatgcggcagcagatgcgagaggatctggagcgcacccgcgcaacgctggactga

SEQ ID NO: 326829 - DNA, 240 bp, Pseudomonas aeruginosa
atggcggtagaggtggtgggcgtttcggtggccaacaagaccacgctggctggcgcccttgcgggcgcgttgggctggcttgcgcagatcaactgggtggggctgatcggcgtgctggtcgccgtcatcggtctgctggccaatatctatttccaggttcgccgcgaccgccgcgaatcagccgagagcgctgcccgcatcgaggccatccgggggcgttgcgatgtcgaacagccgtaa

SEQ ID NO: 326830 - DNA, 534 bp, Pseudomonas aeruginosa
atgtcgaacagccgtaaccgcgtgctggttgccgcgctgaccgtcagcctggccggcttcggcgcttggatgaagtcggaggatttcagcgcgaaaccatacgtgccgaccaagggggacattccgaccatcggttacggctccacccgctacgagaatggccaatcggtgaagctgaccgatccgccgatcacccgccagcgcggcgaacaactggcgcgcagcctgatggcgaaggacgaacagcagttccgcgactcgctgcccggcgtgaagctgttccaggaagagtatgacctgtacctggatttcacgggccagttcggcatcaccaactggcgcggtagctcgatgcgccgcgacttgctcgccggcaactaccggcaggcgtgcgacgacctgctgaagtggcgcaaccaggcaggccgagactgctctctgccgaagaactgggggccgaagggctgcaaaggtgtgtggaccagacagcaggagcggcatgcgcaatgcatcgccgtgcaggtgccgcaatga

SEQ ID NO: 326831 - DNA, 519 bp, Pseudomonas aeruginosa
atgaccgcccgcgagctgggcgccgtcctggctgcgatagcgctggctggcctggtggccagcacgctgacctatcggcacctgtaccaggacgccaccgccaacctgaagtcgctgagcgaccaggtggagcggcagaacgccgagactgacgccaagctggccgagctgaccgcgcagcgcgacatgaaacaggcagcgctcaataaggccgctgccgaccaagagaggaaggacaacgatgctcaggctgaaatcgctcgccttgctggtgagctgcgcgaccgccctgtgcgcgtgcgcatcgtccccgccgcaggtgggggctgtagtggtggcgccgcaggtgacgcagccggcgccgccgaagctggtgcaggagacgccgcctcggcctacgggctactaccggaagaaaattctcgacgctttaacgactccctgagcgaagtcgaaaccctgagcgcggcctacaactcgtgtcgcgcccggttgattccccaagagccgaccccgtag

SEQ ID NO: 326832 - DNA, 762 bp, Pseudomonas aeruginosa
atgaccaacttcctttggttgaagctccgtacgtatcaagcgtaccagcatcagccatgcagcgctgtcttatggcgctgcggattccagcgccttgattcgggtggaaagcgcggtaaatgcagtttgcagatccggtgctgccgccagaccgctaccagcgtcttcggcgattgcatggttgtggttgccagccgctgcggtagtagcggttataccgatcgcaaggctggatgttcccgcgccaatagccacccttgctgttgcggcatcagcaccagccgcaataacagccggtttccctgtcacatccccccaggcaggcgcatagtttcccgctttggcggtggttgcggtaatgcccaactgcagattagaagtgccggccccgattgctgcacgcccgtcttcctcgttgacggccgtcagcagagatttgccgatgacagaagcatcggcgatgtcctccaccacgatggtgacaggtccggtgccactaccatccggcgtgcccttgaccaaagcctggtagacggccttgtcgtcgggataaagcaggataggcgctccgagcggctgccagccatcggcgatggcctcggtcatgaagcgctcgatctggtcgataggcgccttaagcacccgatatgcggtgtaggccattgtttcctccctacggggtcggctcttggggaatcaaccgggcgcgacacgagttgtaggccgcgctcagggtttcgacttcgctcagggagtcgttaa

SEQ ID NO: 326833 - DNA, 267 bp, Pseudomonas aeruginosa
atgctggtgattcgattggcggggaagtggacgctgaagctcgataggcaggtcggcagttccggcaagcacgggatatgggcattccactgctctgaaagcactttcgcgccgtcttcgaacgacctccggcgcactgcggcgatccttccagccgagcccaaagagggccaggcagtggaagtgtcgatctgcgaaagcccgcactcgacggatggatggatcgccgtcggctcaggcgtagcagcctacgaagcggagcgctga

SEQ ID NO: 326834 - DNA, 513 bp, Pseudomonas aeruginosa
atgtcctactccgaccctaggcattgccaccatcagcgcgtcacacaatggcttgcagcgatgcggcagcatgctgcctggctgtacgccgcggatgagcagtacctttaccttgtcggcgaggccaacgagctctaccagtgcggaatcgtggacctggaggaccgccacgacatggtcacggatgcacttggcatgtactcatgggcgatcgagcacggcataacgcgcgagacgcactactgcgccgactgctgctacgacgtgatcgacgcaggcaatgtcgttgggacggtggatagcgaggggatctaccatgcgcctgccccggggcgacagcgactgggctgtatcagccaggatcccctggacgggcaggtctatctgcgcctgggccaggcgcttgagcgcgccggcgtcgtgcgtggcctggtgatcgaactcgacgccggcggcacgctgctgcttgacgagcagatccccagcgacttccggccatggcggtgggcctga

SEQ ID NO: 326835 - DNA, 678 bp, Pseudomonas aeruginosa
atgagatatccaggcggaaaaggcaagtgctaccagcgcttgatcaatctgatgcctccgcatcagacctatatcgagacgcacttgggtgcgggcgctgtcctgcgccacaagaaacctgcggcccgcaatattggtgtggatatcgatcctgccgttcatgatgcctggactgatcacccggttgaggggcttgaacttatccagggagatgcttcgagctacctgagcggtttcacatacgacggcaacgagctgatctatgctgatcctccgtatgtcacgcagacgcgtcgtcgcgccaagatctaccgtttcgaatatgaccaggcccagcacgagcagctgctttccacgctgtgcagtgtgccgtgcaaggtcatgatctccggctacgacagtgccctgtacaacgaagcgctccagggatggaggaaggtgacgtttatggccaagacgcacacggatgtcagggaggagtgcgtctggttgaactacgctgccccagaagagcttcacgacagtcgttacttaggtgacacgttccgcgaccggcagaccattgcccggcgccaatcccggctccgcgaccgtgtctctgcaatggatccggtagagcgcagcgattttctgcgctggatcacgcagacctatggttccgctcaggaggcccggtga

SEQ ID NO: 326836 - DNA, 771 bp, Pseudomonas aeruginosa
atgcaaaacggtgttgtgttcgtcgactccaagctctacagccgggatttccctgatgccatgagcgaagtgctgcctggtgtttcctgggggttgatcgaggcgttcccgaccccggcctactgggcctatcaggtctgggcaaatgaccaggaaccagagccgctcaactacaagcttggtgctacattggcggaagagatcggggcgtgcctgctgggtggtcacggtatccctgcaaacgttggcctggctgcatttgcccacctgagaaacctcggtgcctttgaagatgaagtgcccagtgaggagctgcttcaggagtggctgaccaccccattgaaaatcggcagccgctcagtgcgctaccgctttgccaaacagaaggcgcgttaccttcattcggcgctcgcagccctggcctcaggaggtgttccacttcattctggccgagcccttcgagactggctgctggagctgccgggcatcggctacaagaccgcgtcctggattgcccgcaactggcttgatgccgatgatgtcgcgatcttggatatccacatcttgcgcgccggggcattggctggctttttctcgcccgacctcacggtcgagcggcactacctgcagctggaagcggagttccttgccctgagcaaagcgattggtgttcggccctccaagctcgacgcgctgatgtggtatcagatgatgtccgcgccatccgtcgttcatagcctgctgaaccaggcgggtttgaaggccgcctag

SEQ ID NO: 326837 - DNA, 681 bp, Pseudomonas aeruginosa
atggactggatcaatctcagtagccccagggttagagcggagccagggcactatcagccgttcacctggccgaatggcacgttccacgcgctgccagagatagaggatgccggcgacaaaggcatcctcaacctcctcgatcacagacgcacccggcgtacgttcaataccttgagtgttgatcagttgggccagctgctgtggcggagcacgcgaacgcaggccattgccgaatcgggctacggctttgacctggaactgcggcccacaccctcagccggcgctatccaccccattcacatcctggcccacttccccggcacgccgcactggcgccgctacgacagtcgccggcacggtcttgtcgagctaccaggatcagtggagaccttcgcggggttggcagagcagtgccagctaaccctgcccagcgagcaggcgacgcggttgctgttggtagctgaacccgggaagacggctgccaagtatcagcatggcgaaagcctgatctggcgagacgccggagcactcctggcgatcatggcggtgatagctgaagccctggactacgcattctgcccgttggggattacgggtgagccctgggctaatcaactcgccccttcaggtgtactcacgggggtgggtattgccttggtgggcgggccggcacgggactag

SEQ ID NO: 326838 - DNA, 606 bp, Pseudomonas aeruginosa
atgaagtgcgctcttctcctctcagggggtatggactctctcgccgtcgcctggtggctacgtcccgaaatcggtatcaccctcgattacggacagctggccgccgaggcggaaatctccgcctcgaccaccctctgcaaacagctcgggatcgagcaccacgtcatctcgatcgattgccgcgttgtcggctcaggcgatatggccggtggcgaggcggatgcgcacgcaccggccagtgactggtggccctaccgcaaccagatgctcgttaccctggcggccatgaaggccatcagcctgggtgtgaagaagctctacctgggtaccgtgaagtccgatggctcacaccgcgacggcacaccggagttcatcgccgccatcaatcaactgatggtcatccaggaaggtgagatgaccgttgaggcgcctgcgatcgaactgagcaccaccgagttggtaaggacttccggggtgccctcctccatgctggcctgggctcacagctgccacaaatccaacgtcccatgtggtaactgccgaggctgcttcaagtactttgaggcttggcacgagatcgaacatggactggatcaatctcagtag

SEQ ID NO: 326839 - DNA, 1209 bp, Pseudomonas aeruginosa
atgatcagcgtatctggcggcgtctactacgaacaatgcatgtgccccacgtggcaggagctgttcggctcgggtggccgggccgctacggcgatcgcgcgcctgggtggggcggtaaacctcacgacctacacggacagcacggcagaatcgatccttcgcctgagagcggctttggagggtttcactcttgagccccaggctatcgatcacagcctgcagttccgctacagccacggattgtccaaaccgtctattcatccagcccccaagcgccaagcaaatctgcaggtggcgtccaggaacgtcgtgcgcttcggatttctggagggtgattgcgtcgtcgacgcgcacaaggcggtttatgatccgcagagttcctactacccggcccccttccatgaaaacggctccagggccgagcggttggcactcatcctgaacaggagcgaggctgaagctctgcatggcagcaacgtggcgaacgccaccgacctggcgcgcgcgttatctgcatcccagggtgccgaaattgtcatcatcaagatgggcccagccggtgcgctgctcttccatgaagattgcacacaccacattccgtccttcgtgacaccccaggtctggaaggtgggctcaggagacgtgttcgtcgctacctttgcgtacttctggcttgaggaggatctgacaccgctggacgcagccctgcatgcgtcacgggcaaccgcctattactgcgaatcccaaggctttgccaccaaggcggagctcagcacgtacaaccctggtgcggccagagtgccgaaaaagtcgaagagcggcagagcgcccctggtgtacctggcggggcctttcttctcgttgtcacagctctggttaatcgaagaagcgcgcggccagctgctggagatggggctgaacgtgttctctccggtacacgatgtcggccatggatcggcagaggatgtcgtgcacaaggatctcgacgccattcatgagtgcgatctgatgctggccatcggtgacggtctggatgcagggacgatctacgagattggctacgcacgagcgctcaagaagcccgtcatcatgtacgtggaaaatgagtcggaggaagatcagaaaatgatggtcggctcaggctgcatcatcaccgatgacttcgtcacggccatttaccaggccgcctggaaggcagcagaactatga

SEQ ID NO: 326840 - DNA, 1578 bp, Pseudomonas aeruginosa
atgacgatcaaaacgctggcagagacgctcgggtttgaagtggatgtcgaggccttgggcaaaaagttccggattgcaaaagaaatcaattttgtaaatgatccgaacggtgaaagtagcggcagtctcggcttggaattaaacgtcaagatgccttgggaggagaactttgagcccttcgcttacccagataatcctgaggtggatgtgtgggggcggatcgcagagttggtggtagaaggcgtgccaacggtcgcctacttcccgacatttctgattaacgtacccgaggaaattgagctggccccatttcaaggggagagttatgaacagcgtcactacagagaaatcgtggaaaaaatcattgcgtatgcagaccatgatgtcgaagagcacatcaatagacgcattgcgcagtacagtgagaaacatggcgcccagtggctcgacaccttttatcgaagccatgaaaagagccagattgatgcggtgttcaagaaggtctcccaagccctgacgagcgaggtgattggcggctggaggcgggtattctcgcgcgagacgacagccaagcgggtcgagctgcagtggtctgtaaccggggctgacagacccactgccatggtgtcctttgctgtcagtaacggtgactctgactacaagatcagtgaacgctccatcggcttcaggtggttcttcacctttttgctcctcaccggcttcaagctggaagacagcaagcgcaaaaccatttatgtcttcgacgaacctgccgctaacctgcactctcgcgcccagattgagctgttgacgtattttgagaaaatgatcggtagtggggacaagatcatttactccacgcacagtcatcacatggtcgaccccaggtggctctcaggcgcctacatcgtcgaaaaccgcgctgccaagcatgatgacgttgacggatatgatcttgagtttttaccggctgaaatcgccgcgataaagtacaaacaatttctagataagtatcccaccagaagtcatcacttccagccggtaatagagaagctgcagtatgtggttcctgagatagttggctcggctccctttgtcattgtggaggggatttcggactactacgcgttcaaggcggcctcgaccacgtgtgacgtcacgattaacttcaccatcgttccgggtgtcggttcgagctcgtccgggaatctgatcagtttgctcatggggcggggcgaaaaatttatagtcctcttggatgacgacagagcgggtcgagatgcgcgtgatcgataccgcaagaagtggctcctacccgactcgtccgtaatcacctttgcggatatcgatgcgacctatgagtcttgggcgcttgaagccttgttgggccgtgatagctttgaggtcgcacaaaggaagctgggtctgaatgcattacctagcaaggatcaatatgggctgtttctggcggagcactaccataaagcagaggcaggcgaaaacctcttttcgccgcaagggcttgagaatctccacgctgtgcttcgtttccttgcccagcaattcgcacagtcttga

SEQ ID NO: 326841 - DNA, 2718 bp, Pseudomonas aeruginosa
atggtttcgattcaggtggaaggtgaggacaagaccgctaagatcagcgactggtcgatttactggagcgacaagtacgaatccctgcaactgacctgttattacccctccaagaaaacctacacgcgcccgctcagcgactgccatgtttcacccacccgcgagttgggcaagatgttgctgaccaagcccggcagcacaatcgtcacgcccatcgccaaggcgacgatctacggcgagcggtatgccgtcgtgcactatccggacgccgacaagccctatgtccacaagatggacggcatcggttttgccgcgccgacggcgatgaaggacacgccggtcttccactacttctcggtcgtggcgaatgcccggcaggatcgcgccacgtcgaaaaccgaccgtgagatcgccgccaatgtcgtgcgccaactggagaagctacccgccagcgccgacactgccttgcaggcctactctaccgggcgcaacggtacgctggcgccgggccaggggctgatctatccgtttggtctgaacgagagccagctcacggcagtcgagcaagcgttccgtgcgcaggtcagcgtaatcgagggcccaccgggaaccggtaagacccagaccatcctcaacatcctcgccaatatcctgctgcgtggaaagacggtagcggtgctgtccaacaacaatgcggcggtggaaaacgtctacgagaagctggagaaatgcggcctgggccacctgattgccagactcggcaaccaggacaaccgtaaggacttcttcgccaacctgccgccttggccatcgagcgaatccgaacccgcaccgacgctggacgagattcaagccttgctggcccgcgtgaagcagcacttgcacgatcacaatcgggcagcgcaactgcaggtcgaacttgatgagctgaccatcgagcgacgctacctgcagcaatggcaggcagaaggcggcgtgcaaaccgccgcctcactggacagatacggactgtcgccgcgcaagaccgctgacttgatggcctacctggcccatctgggtgagcagcgcatccgcctcaaggatcgcatcgagctgctgttcaacttcaggatcttccgcgccaagccgtttacccagggcgatgcacgcttgtccgtctttcatgcgctacagatgcactattacgacaaggcgctgcgagacaaggaagcggagttgcaggcgtgccgcgaatcgttggcgcgcgggaacttcgaagcctccctggaggcattgaggacggcgtcgatgcgccacctgaagcagcatctgcaacgtcaggcgaggccatcggacagcttcgatgccaagacgtaccggcatccgcaacagttcgatgccttcgtgcgacgctttccgatcctgggcagcggcacgcattccatagtcaattcgatcgcaccgggggcgatcctcgactacgtgatcatcgacgaggcttcgctgcaggacatcgtgccgggcattctggcgctgggctgcgcgaagaacctgatcgtcgtcggcgacaaccgccagttggcgcacattcccgtggttctgggcctgccggcgcccgccgaggcttacgattgcgagcgctacagcctgctcgattcgtgcatcggcgtgttcaaagaggcgctacccagaaccctgctgaaagagcattaccgctgccatcccaggatcatccagttctgcaaccagcagttctacaacaacgcgctggtgcccatgaccgaggacaagggcgaagcgccgctgcgcctggtggtgaccgccaagggcaatcacactcgccagaacaccaacttgcgcgagctggactccctgctcaagctgctcgacgacgagggcgagccgatcgggctggacggcgacggacgcgggttcatcgcgccgttccgagaccaagtcaacctctccggtacgcgcctgccgacggatttcgtcaaggacaccgtgcataagttccagggccgggagtgcgacgaaatcgtcttctccaccgtactggacaagaaacgctacaaccaggatcgcaagcgcctggacttcgtcgatgacccgcgcatgatcaacgtggcggtatcgcgggccaagcatcgcttcaccctggtgacgggcgacgaggtgttcaccgccaataacggccacatcgcggcgctgatgcgctacgtcacctattacgcgcaggatgatcagatcgtgcgcgcgcccgtggtatcggccttcgacctgctgtaccgggaatttgaccaatccctcgcgcgcttggacgcccgtttgcggcccgaggattcacgctacagatccgagcagatcgtagcgcaactgctgcgcgaggcgctgtccgatccgtcgtgtcaggcgttgatgtatcacgaccaagtcaagctggatcaggtcgcatcaccgagcaacccggatttgacgcaacccgagcggactttcatgaagcgcgccagttgcgacttcgtgatctatttcaaggtgggcaagaccccggtgggggtaatcgaggtcgatggcggcacccacgaccgacccgatcaggcagcgcgggacgcgttaaagaatgacatcctggcgaagagtcgcattcccatcctgcgcctacgcacggtcgagagccgcatcgaggagagaatcggcgagttcattgcccagtgggccagcgcgacacccagcgtatga

SEQ ID NO: 326842 - DNA, 693 bp, Pseudomonas aeruginosa
atggggaaacggagagctaccgtgccgacagcagacaagattcgctggctgaaaaaagagaacgccgaatggcagtgggtgtgcgactacatagagggtaacgccagcccggcgattgccgaggacatcaggaatatcctcaagaacagagagcccagccacgaggtcgtcgaggagatcattcgacacctcacaaggactgagcgcggtcgcgactttataaagcgcctcagaaatgccctgcgccagcacaggtatcgttcatctgagaagggcaagataatctgcacctttgccctgccaaccaacaccaagaaggccctgcgcaaaaatgcagacaggctgggcaagagcgagagcgacctcgttgacgaagccctcaatcagtccgagaggctgattgaggaacaccggcagcgggaacaacggcttgagaaagcgcgcgagcttgatcgcaaacgagcgaagcagcgcatcgagctactcagggtcaaacaccacgaagcgatgaggcaaatccagatgctcgcgacacgcctctccatctgggagctggctcttggggcggagcatcccgatatcagcgtcgatcaggccatgctggccgatacggcgaaggaaaagaccaaggccgtcaagaaagccatcaaaaccgctgtggccaggtggaactttctccaggcaagggtatga

SEQ ID NO: 326843 - DNA, 1488 bp, Pseudomonas aeruginosa
atggctctgtattttgagcgctttctaaaggtggtttccgcgtgtggcccggacgcccgctttctgctggaggccatcattgctgggccggagcaaaggcatgagccatggcaagacctcagcgtaaagtcgtttgcgaagcaccttcgtttggatgagacggtcgtttccgctgcgttgcgtgagctggtcgccgcgggcgtgctggagcgatgtgtctcccctcgaaatggactcagagggcgggggaaggttacatacgcactgtgcctgggtaatgatcccgaactggcagatcgcacatatccgcagcacgctgagctattgcaggccctgttctcgaaggcggacatggcctttgctgtgctcggaagcgaactggatagagcagcaaaacggggagagctaaacgagtccaaaaagtccaaggaatccgaaacgtccgccgaggagcaggccgccgcggagcctaatgggggaaagcatcagctttccggtgggcgtggacgactgagtactcgcaatcgcctgcttttcgcggtgctgctctcacgctcagaccggttcggtgaggtgcaggtagggcttccagaactggcgaagttcacgggcatgcatcctgagcaagtgaagacccgtcttgctcgtctaatgatgctggggctgattcggcgtcatattcctggcctgtcgagcaaggtttttgcctcgggcaggatcgagagcacttactttctgaatgtcgatgcgctcgcgccgcaggtggccatcgccgttcatataacccatgactgggaaggcaggaggttcacccatgcggatgtgctgtacggcgattgtagtaatgccgtggagggacagttgaatgggctggaaacgccggccagtcttcttcgcctcttgatggggcagccgaggaaagtctttttcctgtttcagcacctgctctgtcggtatgcctcacatctgctctcgcgacattggcagaaattggctttggataagccgattgaggacgccgagttgagggcgtggattgagagggatttcatcaaggcgccaaaacctgcgctggcaagcgaaatcgaacccgaactgaaagcgggaagaggtggcgaagcggtcagtgatctaaaggatggcatggacggcgaggcgaggcagatttgtacgtgcatctacgcgttggcaatggagattgcgcgcgagtatcgagcgcgattcggccaggcggactgggttgagttcgaggcggcggatattcgcattctgccggccatgagcgatctcggttaccgcgtgatcacgatcttgtatcagccggcactcgggggagtcgggcgtttctcggtgctgcatgaggttgagcggggagcggtggccatcgggccgaaaaccaatgaaaccgagttggccttgcagaaccgcctggatttcggcttggccagtttgccgcgcagggtaagaagggcgttggggctgcagtaa

SEQ ID NO: 326844 - DNA, 231 bp, Pseudomonas aeruginosa
atgaggatcattcgcctgaaagaagtcatcgattcgaccggtctggcccggtcgaccatctacaaatacatctcggaaggtacctttccgaaacctgtgtctctgggagaccgctgcgttgggtgggtcgacagcgaagtacacgactggattctggcaaggatcgaagagcgtgatctggcagagggggctgtggtacgccccaccagccacctgagtatggccagctag

SEQ ID NO: 326845 - DNA, 1035 bp, Pseudomonas aeruginosa
atgaccaaacgaaacaccaacaccctccaatcccagtccgataccgccatccgaattgagcgtctcatcaacgccatccaacgtatcgatagccaagccttccgaatcacatactcgaaacacggtgatgagcagatcagtgagaccaggctgtcaaactacttcgatgggatcgtgcggatggtcgcgctgttcgagggcgatgtggcgtatcagtacaacaggcacttgagcctgttccaggaagcctgccaggccattggggtagaacgcagtccctttggcattacctgcttgagtgaggatgaaacacgttacctgagcaccagcgaggcactgaacgagctgaccaaggccattcgtactctccttacccaaaagcgattccagcgtagggagcacgatcagcgctaccagacgactcagcaagagctcgaagttgatcactacattgatgcgatgtttgatcgctacgcccgtatctgcgtgatcagggtcgatctgtattactgtgcagaggctcaggcgaggttgcgtgctgagcacgtattcgatgacctggatcggttcatcgctgaacgtgaacgcaatccgatcttcgaccatgaggtaggttacatctgccgtgtcgagcagggtgaggatcgggggtaccacatccatgcagcgttcttcttcaacggtgctgaggtgagtgctgatatctacagggctcagcggatcggtgagctgtgggagcgcattacccatggtcggggtagcttccacaattgcaacctcgacaaggataaataccgagacaggctggggcttggcctgatccacaggcgtgatctgagggctcgggctaacgtgcattacgccatgcgttacctggccaagaacgatcagcatctgcgactcaagcctgtaggtgctcgctgcttgcgtaaggggcaggcaaggaaggtgtccaggatgactgatcgatccattccccgaggtgcccaactcatcggttcggctgggttgctagcccatgcgagtgcgccgtag

SEQ ID NO: 326846 - DNA, 168 bp, Pseudomonas aeruginosa
atgcaggccgatgccctgcgcgacctgccgggtcactacaagatcaagctgaaggcttccggctaccgccgggtctatcgtgtcgaggatgagcgagtggtcgtggtggtggtttcggtgggcaatcgcgaacgaggcgaggtctatcaatcggccaagaagcgctaa

SEQ ID NO: 326847 - DNA, 861 bp, Pseudomonas aeruginosa
atgagaagcaacctatccggcctgttcaagcaggccggcttttatcgaatggcaatggcgctgctggtcagcgccgttctcgctggatgccagacaccttatcaagccctgcagcaattggctgatgagcagggccgagcactggaaatcctccagggccaatcctatccacttgccctactctcgccgcgacaggttcccacgggtacgcgcctcagggtctacctggagggcgatggccacgcttggatcaccgcgaggcaacccagcctggatccaagcccgcgcaacctgctgatagcgcggctggcagctgatgatcccttcccaaatgtgtacctggcccgcccctgccagttcgtcagcgctccaggttgcaaaccggaactctggacgaatcggcgcttttcccaggaagtcgtagacagccttgaccaggcgctggatcagctcaagatgcgctatggcaatcgggatttcgaattggtgggatactccggcggcgcggcattggcactgctactggcggcgcaacgggatgacgtcagcctcgtccagaccatcgccggtaacctcagcccaaggctatggacacaggctcaaggactcaccccgctcaacggctcgctggaaccgctggattacagagctcaccttacctcgctgccccaaagacacctggttggagagcaagaccgcatcgtaccggcacgattggccgagctataccggcaaggactcaccgtgccctcctgcctgcagattatccgaataccgaaagcaagccatgacgaggaatgggagactgcctggaagcaatggagctctcgaccgaccatgagagccgggtgtcctttttag

SEQ ID NO: 326848 - DNA, 2574 bp, Pseudomonas aeruginosa
atgatccccacgtaccgcaaaaccctgctcgccctagccattgccggcgcagccctgccgtcccatgccgccaccctgcaactgggcgatgccggcctgcgtatcgaaaacacccgctacgccgatagcctggaaatcaccggcgctttcacgggcagcgacctgcccggagataccgatgccatctacatcaacaccgcgaccttcgagcagaatctggttctgaacgccaacatcgaggccaacggcaccgacatttctggcgttgacttcatgatcgatggcccgttgggttcggaaaaccgcatcaagggcgacttggtcaataagggtaccatcgccctcaccggacaggccggcagcgcgatcctgctcgacaccttcaccaccatcgaaggcgacctgcgtaacgagggtaccctcagcgtcacgggcgagccctacctggagccgtcggaaggagatggcgaccgggatgagatggacaccgcgcaggcattggatttcggcgacagtgccgtcatcctcggcaacctggtgaacaccgccagcggccagatcatcgccgaaggcagcgaggctatcggcatcaacctggaaggcggccgcattggcggcaagctggtcaaccagggcttgattcaggcaaccgggctcgatgccgttgccatcgatgccacggaatacgagggcgacttcgtagacatcaccggcatcgagaacagcggtcggatcatcgcccagggcgaaggggcacgcgccctgctgctggacggtgtgagcttcaccggcagcgatgcacacgtgatcaacaccggattgatcgaagcgatcgattcggcaatcgacatccaggtggtcgaccgggacaatgccgacacattggtcatccgcaacagcggtaccctcacctcccaggacgaagccatcgatgcggcatcggctacagtgccggtacaccttgagtgggacgcaggcaccatcaacggcaacctgatcggcctgtcatctatagcgatcaacggcgacgcgaccttcaatggcactgacgccagcgccgacggcgccaacatccgcctgaaggactcgggttggatcgatgtcggcagcgatgcccctggctcttcggcgcacctggagttcggccagccgcacaccacaatcgacggcaacctcgatgtcgaaggcaactcgtcgctggggctcagcctgagctcagccacgaatccaaacaccgctgtggtcgctgtctccggcactgcgcaattcgccaaaggctcacagattcgattggcagcccagggtgacgacttcaaggcccagggcgcgacttataccctgatccaggctggaaccttgcaggatgaaggtgtgagcgtgaccagccgctcgcccctgctgaacgtcgatacctacagcagcggcgaaaaccagatcgtcgccaaggtcagcaccaagagccaggaagaggtaggtgacgtaatcgaccagatcggtggctcggccaacgcgcaacaagcaggtgccgccttcagccaggtggcaggcctgctggcagagggcaaccccaacgaccccgtattccaagcctacgtgaacgcctcgcaagacccggcagccttgaagcagttggccgaacagttgacaccagaggtcaacggtggcgccacgcaagccgccaccagcggccagacgctggtcagcaatgtcaccggcaaccgcaccagcaacctacgcggcgcctcctccggcgatgcgctgcaggagaccggcgtctgggcacaggcactatatagcgatgccaaccaggatctacgcgacggcgtgaccggcttcaacgcctacagccgcggtatcgccatcggtgccgacggtaagctcaacgaccagatcacactcggcctggcctacagcttcctgcacactggcgtgaacagtgacggcggtaataccaccaatgtggatagcaatgccctgacgctgtacgccggcttcgagcaaggtaactacttcgtcgacgccaacctgagttacgggatcaacgacaacgagagcaagcggcacatcgccagcaccaccgccaagggcgactacgatagcaacgtcctcggtgccagcctggccggtggctatacctaccgcctgaatgaacgcgtcctggtcgaaccgcgcctggcagcccgttactcgcgtgtggaaatcgacggctaccgcgaaaaaggctcgtccgcggcgctcagggtcgagaatcagcgctacgaagtggcagaactgggcgccggcgttcgggtggcaggcaacttcccgctcggacgcgggaacctgcaaccccaggccaagctgatggcctaccatgacttcgccggtgacgaggcgaaaagcacttcgaccttcatgctgggtggcacgccgttcgtgacgcagggcgccggatccgtacgcaacagctacgaagccggtatcggcgcagactaccgtctcggtgcggtaacactgggcctcagctacgactatatcggcaagaccgacttcaacgcggacaccttcaccgccaaggtacgttacgacttctga

SEQ ID NO: 326849 - DNA, 1200 bp, Pseudomonas aeruginosa
atgaaaagatcaatcgcacttctcttgaccgttgtagtgctcaccggctgtaaagctgagatagaccatgcagagaccatcactaggaatggtcttatctacaaatatggcgatacagatacatttaccggactggtactgaacattccaatcggcctcccaggaatatcggcactctgtaatgcccgggtagagaacggccgcaacagcgggcaaagcgaatgtttctacaacggccagaaagtgtatgaagtcgaatacttggcgggtaacaaggatggagccgagcgcgtattcgatgccaggtcgggagacaagatctccgttaaatactggaagaatggccgccaggatggcgaagaggagcagtacttgaatggaatcctgatatcgaggaaagcgtacaaggacggcaagcttgatggagaggaaatacgctggagcaataatggcaagaccgctctgacgaaactcatctggcgtggaggaaacaagcaggagggtttcctggaagactccgaaggaaagtacaactacctgaacggccagctacacggcgcacaactcaaatatgactacatcgtcggaagcctgaagcgatatacctctgccgaagaaaactacgacaacggcaagctcgatggcgtgcagaaaaaatacgtcaacaccctgcataccgacctcgtccagcagaagtcggaaattatctacgacaagggtatcgcgcgctccggctggatgaagaaattcgacccgctcgatgggtcgaccctccaggaaatcaagctgacccagtcgccgcgcaggagcgacgaagacttccatagcggatacccgggaaacctggtgcctgacggcgtattgaagcaagaggatacggagagcgaagaagtctgggccaatggggtaaaagtgaaatatttctacaactacggagagccgagcttttacatactggagagcacgatgccgcaggagcgatacagggaagtatcccaggccgaatacagtgcctatgaagtgtcggcctctcctgaatcgaatgccactcagcaccaaggagttttactttctcataacgagagctgccataacgcctggattacagcttaccgaaacgaaattggagatgatgcggtagttacaagcgaacaactttccgaatgggatgactggtgcaaggaaggcaaacttccttag

SEQ ID NO: 326850 - DNA, 222 bp, Pseudomonas aeruginosa
atgtccgcaaatcccttcttgcgtggtttcgacaaactgtcgattcaactgatcgtgcatgagttgcaacctggcagctcattgcacgagttgtcttacgtgattcatgccaaagaccaggatcagtcgctcgtgctcggtgtgcagcccacgctggaacaagcccacacatcgtacagcgcctgcgtttcgagacggggcaattcagtcggtgcagggtaa

SEQ ID NO: 326851 - DNA, 189 bp, Pseudomonas aeruginosa
atgacgctactacggatcttggctgcggtttttatgttcttcggcctactcaccggctgcctggcgattctgctgttggtgatactgatggtgcgcttcccaccgctgccaattgccgcgctgctggcaatgctgctgttccagcgtttcattggccgtgccggcatcagcatctcccgtcgcacctga

SEQ ID NO: 326852 - DNA, 498 bp, Pseudomonas aeruginosa
atgcgcctgcacaagctgaaggccactgaaccgaccgggacctacgtggtcgagtcaccggtcagcgaaaccgacatcctgctgatggcccggcagttggcaaatctgcgtctgcgccgggggcgagcattgagctcaccgaaggaagtgttcagccacctgcaggcgctgctggctgattacgagcatgaggtattcgccctgcttctgctcgacaaccggcaccgggtgatcgtctttcacgaactgttccggggcaccctcgacggcgccagcgtctatccacgcgaggtagtaaaggtcgttctggcgcacaacgccgcagcagccatcctggttcacaatcacccatccggcgatcccgaacccagccagacagaccgcaacctgacgcacaggctgaaggaagcactgaacctgataggggtgcgaaccctggatcacatcatcgtcggccgcgaaggctgcatctccctggccgaacagggtgatatctga

SEQ ID NO: 326853 - DNA, 951 bp, Pseudomonas aeruginosa
atgctgaaaggcctggcaatcaccccgcccgtgttggagcgcatctccatcggcagggtcgtcgagaagaacggcaagcgcctgccggagaaagacgaccagttcaccatcacctcccaggtacagagcaaggatggctggctgctgcacccactcaacgacgagctgcgcaaatcccaggaggacaagctgcgcaacatcccgattcgcctgctgttcaacgaaccggagctgaacttccgcgccgactacaccctgttcgaccggcagaccgggcgcccgctgtgtgtcggcaatggcgaaacctgcaagcgcctgggccaggacggaatccagtcgctgccctgcccctcgccggatgcctgcccgctggccataggcaatgcctgcaagccctatggccgactcaacgtcgtgatcggcgacgacgacccactgggcagcttcgtgttccgcaccaccggcttcaacagcatccgcaccctggcggcacgcctgcagtactaccgtgccctctccggtaaccgcctggcgtgcctgccgctggagctgcgcttgcgcggcaagtccacccggcaaagccatggcacgccgatcttctacgtcgacctgacggtacgtagcggtatggacatggccgaagcgctgctggctgccagtgagctcgatgcacagaggcaaacagctggcttcgatcaggccgcactggatgaagcggcgcaacgtggatttggcaacggagcgttcgaggacagcgaggaagacgctggcgccatcaccgaggagttctatcccaccgaagaagccccacgccccaccacccacactcgccagcgctcggagaaaaccagcctggccgagaagctggacgcgcaagcccagcgccacaccccaccgaccgatcaccctcaaggagcccaccatgcgcctgcacaagctgaaggccactga

SEQ ID NO: 326854 - DNA, 1002 bp, Pseudomonas aeruginosa
atgaaagcgactccgttgagcagcaccagcaagactcgcccggcgctgcgcctgatcagtaccaaggaactgccccgcgaagactggctggccgtgcgcaagcaaggcatcggcagttctgacgcctcggccgcagtcggcctcaatccctacaaatcgcaactggagctgtggctggagaaaaccggccacgacgccaggctgccgaaggccgacccgcatgacgaggaaagcccgatgtattggggcaacgtgctggaacccatagtcgcctggcactacagcaagcgcaccggcaacaaggtgcgacgcatcaacgccgtgctgcagcatgcaaatcccgagttgccctggatgctggccaacatcgaccgcgaggtgatcggcgccgacgacgtacagatcctcgaatgcaagacagccggcttgaacggcgcacgcctttggaaagaaggcgtccccgagtatgtgcagttgcaggtggtgcaccagctcgccgtcaccggcaagcaggcagcggacgtggcggtgctgctcggcggccagacgctggaagtccatcgtatcgagcgggacgagcagatgatcgcccgcctgatcgagctcgaacggcgtttctggcagtacgtggaaacggatacaccgccacccgccgacggcagcgcctcggccgagctcgccctgcgctgcctctatcccgaggacagcggccagacgctagacctcagcggcaatgccggcctggcagcagccttcctggaattgaaggcggtaagccagtcgattgccgagaaagaaaagcgcgaagccgaactgaagcagcgcctacagcaggccatgggcgatgccacccatgcagagttctccagcggcggcatcacctggaagaaagccaaggacagcgtaaccctcgatgtggcgcgcctactcaaggaaaagccctatctccaggccaaatacccgctgctgaaacccggcccacgccgcttcctgatcaactga

SEQ ID NO: 326855 - DNA, 969 bp, Pseudomonas aeruginosa
atggctcatcaaatcgaacaaatggcctatgtcggccaaactccctggcatggcctgggcagcaatctaccgcgcaagcagcccatcgacgtctggcaacgtaaagccggcatggattggcagattctggaaagccccgttcacttcaagtccgatgccgtaggccacctcggtgctattcattcctttcccgagcagaaggtgctcttccgctcggacaccaaagcaccgctgtcggtggtttcccagcgctaccataccgtgcagccacgagaggtgctggagttctaccgcgacctcaccgaggtctccggctacgagctggaaacggctggcgtgctcaagggcggccgtaagttctgggcgctggcgcgtaccggccaaggtgctgtgctcaagggtaacgatcagatcaacggctacctgctgctggccacgtcctgcgacggcaccctggccaccacggcaacgccaaccacggtgcgcgtggtgtgcaacaacaccctgacggttgcactggacggcaccagccgagctatcaaggtgccccacaacacccgattcgatcccgaggtggtgaagaaacagctcggcatcgccgtctcgcaatgggacgacttcatgtatcgcatgcgtgcgttggccgaacgcaaggtgcagtggcacgagaccctgggcttcttcatgaacgtactgtgcgagacctcaccgaccgccgcactgccggacgtgctgccgaacgaacgcgccctgcgcaaggtgcaggagctctacgaaggccggggtcgtggctcgaacctggagtcggctcgtggtactgcctggggactgctcaacgccgtgaccgagttcgtcgatcacgagcgccgcgcgcgcagtaccgaatatcgcctggactcggcctggttcggccagggcgcgcagatcaagcaacgtgccctggacaccgccctgcaattggtcgcctga

SEQ ID NO: 326856 - DNA, 330 bp, Pseudomonas aeruginosa
atgtcattgcagtgcccccgctgtcactccccccaagtcgcttcacaccaccatgcaatgaagatcgccgccgcggtcggtgctgtaggcggtgccgctcgtggcgccagtgctgccctggccggtggtcaggccggcgcagtgattggcgctgttgctggcccgctgggcatcaccctcggctctgtgtcgggggcaatccttggcggcctcgttggcggcgtcggtggctgtgcccttggtgcccagctcggtgacaagctggatcgtcacgtgctggccaacaacctgtgcctgatctgcgggcaccgcttcaacctgccggcctga

SEQ ID NO: 326857 - DNA, 816 bp, Pseudomonas aeruginosa
atgccgacttcgccccggtgtttgactagtttgttattggttgaggagcggcttctggaagctaatttttttgtgcgccggttcaagcgtgcggatccagatactgctggttattttcttaacgcttatctttcctcggcacgcagcgtaacctttctattacagaaagaacttgcacgcgtagagggatttcaggagtggtgggatgctcagcgccttattcttgctggcgacaaggcggcacgtttttttctggagcttaggaacttctctcagaaagcagggcgtgtatcgctgtttggcagtagaaaagggcaggggcgatcagcggcgtggacgtatcagttcgtaggaaagcaagtccacttgcctgacgaacttcggagtgtcgatgtttccgaagcctgcttgatgcatctggctaagcttgcccgtatcgtgcttgcctgcatgaattcctttccatttcaaagttgtcctcgcatggccttgtctccagatggagttaaggctttagggctggacgccaaggccatatttgatgatcttggactgccattcgttgagggcgatgacgaactagcatggcggtttctacagcgggaggtcgatccaatcgacatagcggccattcgcaaaatagctttctggagtcgccggcgtttgcggcgggctcccatcaccgctagagatcaattatccgctgagttactgagcattatggaaaaacagcttcgtagtccagaggcttcgctggatctggcaaggatggccatggagcttttgaatagtgatgcctcgccccctgaccattga

SEQ ID NO: 326858 - DNA, 1659 bp, Pseudomonas aeruginosa
atgaaccagaagcattggcacccgactgacgcagaacaagccattgtccagcagctagaaacctttcaagggaaagcggccagaatatggtggggcaatgaaaaagaggcggtaatcactctggtacgcgctcttgacacctccgcagatattcatatgcagggtatcgggagcaatcgcttcatatcactaggtacagctgcagctttacgcccattcctgtccaggctcgagaaccaaccaagctctctgaaatggaaaccaatgcgccccaaggctgctcagttcgctttttcatacctcgaatcctgtggtcaacttacccacttgtcccgactggcagccctggaacgccaggggttggccactacatcatttctcaactccgaacacatagtcatcaaggttccaaatagcgctcccgagttcgccctgcaatacgcaatcaggtctcggaaaaagcgtacattagccagtaactccatagggagtctggacaagcataggtggcaacagctacacgaacgcatgagctcctacgttgactctcctgatggatggttcattcactacgagagtgataaggaaatcacatcagcatatctggaaaaagccaagctctacggtaaaggttttcttgaagctgaagcctttcctgatgatgtatcgattggcggtagatcatttggcgagtggaagcatgcctgcgaccatgcattgagccgtattttgtgtcacatcgattttgtcggactactacaacggaaaaatccaggcatcagcgcaagtgatgtattgacccgctacgacaagagaaacgccatagaccaaacttggctgacagcaggcctatcagcgaatcaaatcgctcccaccatggaggcgctcacactgaagagcgggaacctaagtgactgggaaaaagcgcatgaaactccctgtagtttctatatcagcctcgacaaagagcatgtactgcttccatgtttcggagctctggccaatccttacttcgccctctttcgccacctgcggcatagttacaaatcggactgggatcgaagtgtcgatcgaagggaggcgatattccgaaacgacttggcgaaggcattcccggagcccaacttcctagtgccttcgcacggcttccgactacgccgtattaacgggtcgcagataacagatgtggacgccataatcctcgacaaacgccacggcacaatggtactggttcaactaaagtggcacgacgtcttcgggttctctctaccggaacgagagagccgcaggcgaaacatcgtaaaggccaacgaatggacgcagcgagttctctcctggatcgacggacgaacctctgccgagctggtcaaagcattgggactggatgccacagcctccgatacgcctcctatcctctatgtcgtagcacgatatgcagctcgttttagcggggagctggaccaggaccctcgggcctcgtggctcggctggccagagatactgaatgtgcttgatgagcaccccacaggagatgtgctgtctctgataccccagctggttctggatcagcagacccgattcgctgagcaggaggatcaacgattcgaattccgtttcccgaacttggcagttgatcttcatatcacgaaggccccgtga

SEQ ID NO: 326859 - DNA, 1191 bp, Pseudomonas aeruginosa
atgagcaacaacttggtgttctctccggaggagttggaaaatgctgatctgctgatcgatgctcgctacgcaggcagccgcaacggtaacgcaagcgatgatccgctgaccagactgctgagcctgagcaaccagggaggcttccgaatccgcggaacccgcaaggatccgaagctgatcgctctgatctcaagcatggaagacccggactggcccgatgagctggatctttccaccgggacgttcacctactacggagacaacaagcagccgggacgaagactggatgagacacaccgctatggcaacaaccttcttgagctggttttcagccgattacatgcgggagagcgagagaaggttcctccgattctggtgttcaccaaggccggcatctaccgcgacttgattttccgtggacttgccgttcctggagccattggaagcacacacaacgatgacttggtggccgtctggcacaccacgaaaggacaacgatttcagaactatcgggcgaccttcactgtactggatctgccatgcatcccccgcgcttggctgcgcgacattatctatgaaggagcagttggaagcgacagtaagcatgcccctgacggatggctgaaatggatcaaatccggacagtacactcctctgatcgccaagcgctcacaacccattcgctccaaaaaggaacagctcccttcctccaagcacgacgccgcactactggcaaccctgcacaaacacttccaggatgatccatatgcgttcgaatcgtgcgcagctcacttggtcaggttgtgcttacccaatacagtggaactggatctgaccaggcgctaccgggatggagggcgggatggaatcggtaagctacgaatcggccgaccagagtcgtcggttctggtggacttcgcaatcgaggcgaaatgctacggccctggaagttcggttggcgtacgcgaggtatcgcgtttgatttcccgactgaggcatcgacagttcggagtccttgtgactacgtcctgggtgcatgaccaagcctattcagaaatcgttgaagatgggcatccggtgatggttcttgcaggcagagacgttatcgaactactcaaggaggccgggctcaacacgctggacgccttgagcaaatggcttgagtcaagcttcgtgctcagtaagacttga

SEQ ID NO: 326860 - DNA, 966 bp, Pseudomonas aeruginosa
atgttctgtggtgctggtggggccagcctgggggcgcgagaagcgggtgcccagattgttggtggcgtcgatctgtgggggccggccgttgagtccttcaagctcaacttcaaggatgcccatgtcttcgagcaggatcttcgcattctcacgcctgagcaggtactggccaagacaggccctattaatctgctcatttcatcacccgagtgcacccatcacacctgtgcccgtggtgccaagccgcgttcagaggaaagcaaggacactgccttccaggtcatccgctacgctgaagtcatgaagccgcgttggatcactctggaaaacgttgtccacatgaaaccttgggcccgctacgacgagctcaaggccgagcttcatcgtctgggttacaaggtgcatgaacagatcatcgacgcttctcagttcggggtcggccagcgtcgccgtcgtttgttcatgatcgcggatctgctggagcagccgcagcaggttcaaccgctgaggccttgttaccagacggtatgggacattctggcgcctgaaaacacttacaagatgaccccgctcagaatcgagcgccgcgccaaggagacgctcgcgcgcgcagaccgggccattgctgagcttggccccaacaaagcttttctgatcgtttactacggcaccgatggtgccggtggctggcaaagaatgagtgagccactccgaaccattacgacagtagatcgctttgcctatgtgaagcctactcccgaaggccacatgatgcgtatgcttcagcccgatgagcttcgtaaagcgatgggatttcccgagagttatcgtttcccgcaggtcagtcgccgggataaggtaaagttaatggggaatgctgtttgctcgcctgtgatggaggcaatcgtgtcggagttgatgaagaaagagcgtttgatcagtttgcgctgtgataaggcggcttag

SEQ ID NO: 326861 - DNA, 2208 bp, Pseudomonas aeruginosa
atggatagtagtgtggaagataacggttcagtttttcgacctcgtgcccgtattatgaagactcttggtgaagagttgataagtaatgacacggttgccattattgaattggtaaagaatgcctacgatgctgatgctaaaaatatattaattaaattttcagaagagcttgtcgagggaagtgggcgaatagatgtaattgataacggctcggggatggatcttgctacgatcaggtcggcatggatgcagccagctacaccttctaagaaaaataataaaagtagtcctgggggcacgcgacgtgtgcttggagagaaaggggttggacgatttgcggctgcaagattggcatccagtctgagcttggagagtcgtaaagcaggtgactccaaggagtcatatgcatatttcgattggacccagttcgatgatgaagaattgtttcttgatgaggtgaaaatagaaacactcgagagagaaccggaagtcattgtggagaactcgcctcttgatgatcgggacttctttaatgtcgatgggaaggttcaaggaacagtgctttctttacgagggctaaggagtacttgggatgaaatgggctttctcgctcttcagagagggctgtcccgattagtctcacccttctcctctgttgatggatttgatatagaaatatcagcgccaaagccttttgagaagttctcgagaactattgagccacctcaggctgttaaatatccacattatactgtttccggtcacatcgacaaggctgggatgtacgatttgacctttaatgtcgtggcctccggtcagcctgtccgattgcaggggcgaatagtgccggtagaggaaatgcgatgggatcttgtcgatatatcacagttgtctgaaagtgatcactttcggagtcctgaatgtggctctcttgatattgaactccgcatttgggatagggacgatctcggaaatattgttcaaatgataaaaagctcaatatccaatgttagaaaggatttggatgcttttgcaggggtgaacatatatcgtgatggcttcagggttcttccgtatggagagccaaataatgattggctgcgcttggatctgcgcagggttcagaatccttctctaagaatttcgaataaccagatttttggatatgtccaaataaccgctgatggaaattcgggcttgcaagatcagtccaaccgagagggattaagagagaatcaggcatattttgatcttagggagatcatgatctccattttgtctcgtatggagacatatcggcgtcagtataaaaggaaggtggttccggaggggccagataaaaaagatacaaagcagccaggattgtttgatccacttaattttggtgatatcaaggagcacctgtctgaaaaacaggatgctcatgctcttggtttagtggaaaaagttgagcgagatttccaaaagaagatatcagaaataaaatctgtgattgctcggtatcatggcttggctactttggggcagctaatagataggctgcttcatcaaggtcggcatcctttggctaagatcgttgggtattctacgcttggtttagagaatgctgaaaagctccacaaaaaaggtgaagaaagtccctttttgataaaatctcttgaaaggttcaggaagatattagagcaaggctccgttttggatggggtttttaaaagaattgagcccttcggtggtcgtcgacgtgggaagccggcgcagctgtatttagaaaagctgattatgaattcatatgaggtgttggaggaggatttccagcgattaaatgtcaggtttgatgctcctctctctcaaacattagtaagtatcgatccctctgaatttcaggaggtcatggttaaccttgttcaaaatagtttgtattggcttagggttgttccgcctgagtccagaatcattgcgatatctgtaaagcgtaatgaaagtggtgctgtagaggtaactgtggctgatagtgggcctggtgttccttgggagaatagagaacttatatttgagccttacttcacaacgaaaagtgatggtattggtctggggctgtctatcgttggtgatattgttacggactattatggcggtagtttggagctgatggactccaatccactgggtggggctgcttttaggattactctgaaaaggagagtttga

SEQ ID NO: 326862 - DNA, 1158 bp, Pseudomonas aeruginosa
atggggaataaatggaattttctgatctttgatgatgaccctcaaatgttagagttgctggttgaaacctttgaggatgaggggttcatagagggagataccgtttgctgtcgcacggttgataactttgaagaggcagcggctctcgttgccacaggtaattttgacctcataattttggatctgcaagacgcagccgctgatggtgaaattcctgctggtgcagccttgagtggcgaaaaaattctttcactgctgaaggagtctcagtttactcctgttatcttcaatacagggttccctgaaaaaatttcgcatttggagagtccgtttgtaagaatctctcggaaggggcaggccgggcttacggatctggttagggaagcttttagtaccaaacttcccagtttgatacgctatattcaagaacaacagagaaagtacctctgggatcatgttgaggggcactggaaagatacgattgagttaaaagaaaataatgatgttgcgtatttgcttgctcgtcgtttagccggtgcattgagtgtggattcaattaggaagttttttaattcggagtcgggctacgttaatactgttcatccggtagaatactatatttggcctccttttgaaggagaggtacggttgggtgatatatatcgagaggttgaaagtgaaagcttttggcttgttataaatccagcgtgcgatctggagcagtgtaaggccgaaaatgctcttctggttcggtgtaaaaatataaaggagttccctgagtattctgatgttgtcgagatattggctcgaggggatgagccttccaaaacgaagagaagtaatttggtgtatttgattggcgacaatcgaaaggtcactgacggtcaaccggaaagatataagtttcttccgggcacttcatttgttccagatttggttgtggattttcagtgcctttcgcaagttccgcttgatgatctaaaggacgctggtaagcatcgtaggcttactacattggatagcccttttgccgaggcagtgcaagcaaaatttgcccgttattatgggcgttttggggttcctgatttaagctttgaagttattgctgatagccttattgaggctattcgtgttgagggtaagcgtgatgcaaagtaa

SEQ ID NO: 326863 - DNA, 1857 bp, Pseudomonas aeruginosa
gtgatcgtttacgaagcgaccaagaagcagttcctgcaagacagcgacaacgacgatatcgaagaggtgatcctccagcatttcaaggcggtcaccggcaaaagcgtcggcaactcggaaatcaactcgtggaaaggctccctcggctacatggccaaggtgctgcgcgacgaggaagtgcccgacgacactggcctggccatcgagctgcatatcccccagacctccaagcgcatcgacatcaccctcaccgggcgcgacgagtcgggagccaagaacgcggtgctggttgaactgaagcagtggagcaaggccagcgccaccggcaaggacgccatcgtccgcaccgccctgggcaatggcctgcgcgaggtcgtccacccctcctaccaggcctggtcctacgctaccctgctggagggcttcaacgaggcggtctacgaggcaagcatttccgtccgcccctgcgcctacctgcacaactacccgcgcgacggtgtgatcgactccccgcactaccgcgactacatggaaaaggccccgctgttcctcaagggcaaggacgaactggcgcgcctgcgcagcttcatcaagcagcacatcaggaccggcgacgccaaggaagtgctctacgagctggccaacggccggatccgcccgtccaaggccctggccgactcgctcaagggcctgctcgccgcccaaccggagttcgtactgatcgacgaccagaaggaaatctacgagtccgccatcgccgcggccaggtcagcctccgagacgcatccccgtgtactgatcatcgagggcggcccgggcaccggcaagacggtggtcgcgatcaacctgctggtccacctcaccgggctcggcctggtcggcaagtacgtgtccaagaacgccgcgccacgcaaggtctacgaatccaggctggtgggttccatcacccgaagccgcttctcccacatgttcaccggctccggcggtttcatcgagaccgagcccaacaccttcgacatgctgatcgtcgacgaggcccaccgcctgaacgagaagagcgggctctacggcaacctcggcgagaaccagatcaaggaactgatcgaagcctccaagtgcgccatcttcttcatcgacgaagaccaacgcgtcaccctcagcgacatcggcagcaagcaggccatccgcgagttcgccaaggagaaaggcgccacgatcgaggaatacagcctcgcctcgcagttccgctgcaatggctcggacggctacctcgcctggctcgacgacgtgctcgacatccgcccgaccgccaatcagcaactcgacgccagccagtacgaattcaaggtcttcgacacccccgaggccctgcacgccgccatcgccgcccggaatcaggacaacaaggcccgcgtcgtggccggctactgctggccgtggcgcagcaagaaggatccccggcaacaggacatcgtcatcggcgactaccagcgccaatggaacctcgaccaggacggcagcctctggatcatcgccgagaactccatcgaacaggtcggctgcatccatacctgccagggcctggaggtcgactacatcggcgtcatcatcggcccggacctgatcgtccgcgacggcaagatcatcaccgcccccgaacaacgcgaccgccacgacaagtccatccgcggctacaagaaactgatgaaggaaaacccggaactggcgcgcaaggagaccgacctgatcatcaagaacacctaccggacgctgatgacccgggggatgaaggggtgctacgtattttgtacggatgaggagacagcgaggtattttcgggggcgtggcggaaggtaa

SEQ ID NO: 326864 - DNA, 225 bp, Pseudomonas aeruginosa
atgaccatcaagaaagcttctctttcgaagtctcggcatttaaaagtcggttatcagctttatgaaagccgtcatagcgactgggaacgtcgtggcaaaccacggcaaattccctacctgcggttgagtggcgattggctggaggctgcgggctttgaggttggctgcaaggtgagcattcaggtcaccaggcggcgccttgtcatgcaagtggttgaggattga

SEQ ID NO: 326865 - DNA, 1278 bp, Pseudomonas aeruginosa
atggaggagaatgatggtgtgcgtactcgcttaacgcattcccatgaggttgccaacctagcacgctcaattggcgcgcgtgctttcaagggagctcgtgaggctttcaggcagcatggctgtgatgaagatagtctcaccgagattattaaccctctgttgctgtcaataggtcttgggcatgacttagggaaccctccgtttgggcaccaaggtgaggtggctattggtcgctggtttgagcgacgtaaaagctggatttttacccacaccaaggaaaatggggacctcttggcggctccagttcctgagaactactggcctgagtttgtcgaatttgatggcaatccacagagccttcgtctcttgactaggctgcagactcatatcgacggacttgggcttgacttgtctgctgccacattagctgcggggttgaaataccccgtgagttacttaaatagggataaaaaagatccagttagaaaaaaagggggctactttgagtctgaaaaagatttggttgactggattagaaagcataccggactggaggaggggcagcgtcaccctttgacttggattatggaggcgtgtgacgatattgcctactccgttctggacgttgatgacgtgctcaaaaaggggattatgtctccagatgacgtacttgtaatactgcgtcagaaattcagcgctgacggtgtggttggtaaaattcaagaaaaatttagagaggttgagtctcgtctattttctccggaaatgcagcgcgacattaaaattgaatatttgcgtgcgtaccttatcgaaaacttgattgagcacgcaagccaaacatttatagagaatgctcctgccatctttggctttaaaccaatcaagcctttaatggatgatagtcggctttgcgaggagttgaagactgtcgcgcagcagaatgcctttaatcattcatctgtactgcgcacggaggcattgggttcggcagccatcgatgacttgatgacggtcctgtgggatgctatctctaaccgtaaggaatttgacagccttcgatcaaagcgactggacgctcgtgctaagtatgtattctcattgattagcccgaactatatcgagcaggccgaccaacctaagagcccatctgaggtggcgtcggggctgcgctatcgtgagcttcgcctgcttacggatatggtatctggaatgactgatacttttgctatgcgcctttggaaagatattaaagtgatgcctgatgccaattgcgcctaa

SEQ ID NO: 326866 - DNA, 690 bp, Pseudomonas aeruginosa
atggaggtcttgcaggctgctttggattcaaactttcgcacctttgatcgggtcgcggtgataggtggccttgttcgtgattttgctcgcgaaggccgagccggctttagatctgatgtagaccttgtaattgacggctctagagaaaaagttgcgttactggccgaaaagcttggtgcgacgcctaatcgttttggaggctacggctataagagtggaccttggaaaattgacttttgggctctagagaccacgtgggcacgtaagcatgtcccgatgcgaaagttagaggatgttttgcttggtacattctttgattgggatgcgattgcatatgatttgtgggagcgaaagctaatatgttcggatgactatctcgaacgcataagagcgaagcggctggatattaacttgcaacctaatccttcccctatggggaatttggttcgagccattcgaaggttagtgttgtggcaggcttccccaggtgaaaggttaaggtgctttattgacgagcacctagacgaaagcacacttcgccatgtgcaggaaaaggaaattgagctatttccgtattgggtttcaactcgctggaagactgttgaggaggctaagtgctgtctatttcaacagagaaagcttgagattcttcaatttgagctgttcaatataaagcaccggaacacataa

SEQ ID NO: 326867 - DNA, 1116 bp, Pseudomonas aeruginosa
atgcgccggcgcaacctccttctgtcccccctggtcggtgtaattccgttcgtgctgctcgcctgtagcgaccagacgccccccgatccccgcactgacgcgccactggttcgcatcaccaccatccagtcggcaaccgctacatcgcgcgccttcaccggcatcgtcgcggccagggtgcagagcgacctgggtttccgcgtgtccggcaaggtgttgcagcgcctggtcgataccggccagaccgtcaagcgtggccaggtgcttttgcgcctcgatcctatcgacctgcaactcgccgcccatgcccagcgcgaggcggtgaccgcagcgcgggcacgggctcagcaggccagcgatgacgaagctcgttaccgcgccctgcgcggcactggcgcggtatcggcatctgcctacgaccaatacaaggcagcggcggatgcggctcgcgcgcaactcagtgcagccgaggcccaagccaaggttgccggtaacgccacccgctacgccgagctgctcgccgatgccgacggtatcgtcatggagacactggccgagccaggccaggtggtcagcgccggccaggccgtggtacggcttgcacatgccggcccacgcgaagccctggtgcaactgccggaaaccctgcgtccagcagtcggttccagcgctgaggccaagctcttcggcaggcaagacgtcagcgtcgccacccgactgcgccagctgtcggatgtcgccgaccgccagacccgcactttcgaggcgcgttacgtgctcgaaggcgagctgtccgacgcgccgctgggcaccaccatcaccgtgcaaatcagcgatccgcaaactgcttcaccaagcacagtgcaggtgcccatcgccgcgctgtacgacgcaggcaacgggcctggcatctggatgattcgcggagagcccgcagaggtggcgtggacgcccgtaaacgttcagtcgctggatgatgagagcgcccgcatcagcggcgcgatcaagccgggcgaccagatcgtcgccctgggcgcgcacctgctgcgcgacggccaggccgttcgcctggccgagccggccaccgtggcggcagtcgaggaaggccagccatga

SEQ ID NO: 326868 - DNA, 3387 bp, Pseudomonas aeruginosa
atgcggttgatcaatttccatactgaacaccctgcaactcaggacgtgttccccggtggtagccatgagaaggtggcgagcgcaatccacggtcatttgctgagtgtcgggccctcaaaggttgtgggcctggatggtgagtttggctccggtaagagctccattctgagcatgctgaagacaaagctgatggctgctgactctgatttcagggtctggtttttcgactgcgagcagaattatcagggatcgacgaagagcaatttcatcgagcttttcaccgatgaggcgctcaaagaagtacctcatgtcagcagggctgcggagatcctgatagcctctcgcgatcgagccctcggacgcttgttcgagtacaacaaacgaacaacgagtcgggtcagtgcctgggcgttagcacttgtcgccagcctgtttttcgccgccacctcattccgggagctttttgcactttcgcgtagctctcatgcgaccatcacagggacgtcgcccgaagccgccgtgcttaccaatacgttgcaagacccgttttggtggctgattgcggtgcaccttctttcccttttgagccctgtcctgattcttggcgctgccaagttttgccataggaaggtgcgggtcggcacccagaaatggagccttctgagcttatttaaaggctctagtgacgatcatattgaggagaaaattgaggttggcaaggaggtgacgccccttgatctcaagaagacgcttctcgaacagctgaaggtggttgaaggcaagcgttttgtcataatcctagacaaccttgatcgcctgccaaaggacagcttgcggtcggtgtggagcgacctggagatctttattgaggttgcaaccaaggctgcgaatctgacggtgatcgttccgttttgctcaaacaaggtggcggaatatctgaaggcagacggtgatagacggtacgatgccagggacttcatatcgaaaaaatttccggtggttttccgttctccgcctgtcatcacctcgggatggaaagatggcttccgtcagttgtggaaccatagcttcccgcatgttgacgggaacgtcattgagcagtgcgcacaactgctgcagcgccacagccccatggccaataacctggtcacgccccgactgcagaagaaattcatcaacgacatcgccacgacagcattggtggtgggggaggagatcagcctcctggctatcgcgagccatcttctgctctgcaaatatgccgacctttcgttggtagagatactgcgcacggatggtttctcggaaacttatcagaaggaaattggggaggagcaaactgggctggtcaaggacactaaaaccctgctgggtgccacccttggcgattccatggagaccgggtggcagatccagttcttgcagattcattatctgactacgggtgatatcgcgatcgccgagctcttggacacgccattggcagaagcctttgccaacgaggattacgacacgttgggcaggcttacttcactgttcggcttctctgatgccatgaaacggctcctatccgagcgtccactactggcttctctgctgccaaccatttccgaggcacaccaggcacgagaaggtgactggattgagcctctcttgaaactgcttaatagcgcgcaactggagctgttcggcgaatcgaaggcagggtctgaggagttctacgaagcggtacgttattgcagaggccatgggttgaaggggcagctactgagtggtcatggcggccagctgaaaaccagcctgctgaaaattctgaactcggcgtttgatcctgagcaactgaagctggcctggaatctcatgcgggaatacgaccattatctccaggcgctaggactggagtttgaagatgtcgttgttaaacgttccgaatacgtgatgcacctactgcctgatattgcccacctcaaagtgatcaaggcaagtgggtttgcctttgcgaacgcgggtctgccagatgcacacgcgcaactggtcagttgtgctgatcaccagataggtatagcggtattgccgaccggttgtgtcgtgcctgcgctcgaatggttgtacggcgagcgtaattttggcggcggtattaccggtggtatctcggctggtgacgtggccgtcttggcgaaattcacaggtgctgccggcgaagtagatagcgcggtgctgggacttgggttggccgcgaatgtcgaccaagtcatcggcactgcgattacaacgttgctggcgaacaataccagttcgctgattaaggcggtagcggcggtgacatacattcggcaagccgacgccgattcgctcgccaagctcggtgatctggacggtgtgttcgagtcttcagtcttccgggctctggcgaacgcatcgcttaccacagctcctttgttccaattggttgacgacccccaagtgggtgagtcggttgctgcctacctggcttacctgattcaagaacagcgtattggactcctgaggtgcgacagggttactactaaatttagtgtgattacccaggcgctttcgaaggttggccttgctgaggccgatgtcgtggcttggctcacagcttgggaccctcatattgcagaagcctccaaggacgctctgaaagtggacgtcggattgatcagtgtcgtcatggaggcggatgaaaatgtgttgccgaaaactcgggcgggtctactcaagcagctcacgagtgaggagcgggctcgtgatgagtgggtacagatcatttcggcaggggccaaacagcatcaggcaatcctgaatgggatagggagcaatgaagtgcccatacagtcgatcgcggctgtcggtgatgccttgatcgacgtgctcacctccctcgcgaacggtactgttacttcgcagtggggagcggcccagtacgccatgatggattcgctgctcaagttgcttgatgcccagcagcgtgacgtcatcggtatccgattgagaatgatgctctttgcggagtccgtggaacctgacgacttcgcaatcccgctatcgaaatatggccatctcattccggatgttcaaccgtctaatccgcaagaggttcaacggatcgtcctgttcctagcgtacctaagccgcaaccccgacagcctaccagccttggccaaactcttcgatgcgaaggccgagcagatcgcggcgttcaggtactcgatagaactcaggaatacgatgggggaagctgttgccaagctgtctgaaatcaccccggccctctacaaaaagtttgctcaaaccaagggcttcaagcgcctgatccagtcgctcaaaagggccgcgcgtgatccgcaacctgagcaagacgcgtga

SEQ ID NO: 326869 - DNA, 627 bp, Pseudomonas aeruginosa
atgaatgccaaccaagcgataagcagagccttacgatctcgcttcaaagccttcaagaaccggaaggacgatgattatgaaagtgaaggggttgctaaaggggcagcgctcctcgccatggacgttggaatcttgacgaacgacgcggtactcatctcggaagcacaagaggtgatcacctacatcgctgaatggcttaacctgctggatgagcagcatgatcagcagatgacggagtggaatgatgagttggaaaaatcccaagaggcccgtcgtcaagcctaccaactgatcaaaaaactggtaggtagagaacttcatgacccgcgctgggagctcctcgtgcaagcctatcaggaggctttccccacattcctggtgagagactcagtctatgtgcggatatcgccaaaggaatcagccagccgcctccgccaggctctggccgatttagttaaagaacagcgcttggagcgagtcccaactattgaggaaattcaggcattgctgccgactgccaaagataatttggttgagagcaccctccgctacctggagcgcgcgctacccggctatgagtttcgagcccacggttcgatgcgagaaggcggtagccaggagccttag

SEQ ID NO: 326870 - DNA, 168 bp, Pseudomonas aeruginosa
atgccaacggtccagatccagcattccttcttgcagaagagcgcgtgcaacgtgcatacgcgcctgtcgttcgaggatctgcagattgcctgcgcttacctgcaggtccttcgcgatcaacttccctgcttcccgaccgtcagtgatgtggggggcatgccgagataa

SEQ ID NO: 326871 - DNA, 762 bp, Pseudomonas aeruginosa
atggagttccgggggcggcaccacctctggcaggtgttcgcggacgcggtggctttcatggccttcgcgatcagcaatcgctgcgacccgcgcatgcaggatgaacgggagcgccgctacatggagggcatcaagcgctactcctctgcagaacaggcccgtttccccctgatttttcaggccctctgcgaggcgatggaagcgaaacccggcgacatcctgggcaggatctttgaagagctaggcctggcgaacgccgaccgagggcagttcttcacgccattccatatcggccagctgatggcccagctactgatcgatccggtgaagcaagcatcggaaatcaagcgttggggcttcatcacgctgaacgagccggcgtgtggcgcaggcgcgatggtcatcgcctttgcccagtcaatgttcgagcgtggaatcaactaccagcagcacttgcacgtcaccgcccaggacatcgatgagcgcgcagtgcacatggcgtatgtgcagctctccctgctcggcgtcccggcggtcgtaatccacgggaacaccctgctggtggagaaccgtggggagtggttgacgccgatgcacgtggcgggggaatggcgcgagcgcctcaaccttcgccgtgccttcgaagcaatgacctcgctgctgtcaggcatccagccggacgacggtgaacaagccgccggcggcaatgttgtccgcccgaagaaagccagcggcatggccgcccagcttgccctcctgtga

SEQ ID NO: 326872 - DNA, 867 bp, Pseudomonas aeruginosa
atgtcccaagacctactgattccagacgccctgctctctcccctgcgccttgaagcctctgtggacgcaggaggatccccggccctggtcgctgctccgaatggaggcgcagtctccttcgagcagtacgaccagttgctcacgctgtgcgtggaaatgtcgcgcctgctttccgagcctgatggtttctcccggcacatgcatgaacacatggtgtccggcgataccaagggtgccgcggcgcaggtctttgcccaggcattcagctcccagttcaagggcagcggcgccgtcaactacatcgaagcccatttcgagtcccgcgaccccgaggtcggcccgatcgtggtgacactgcagcgccgccatggcatgactccagggcaattgcgggctcgcgccgaactggccgcttccagcctccagggattgctgcaggagattctcggcctggatcactggttggacgaggaaattgctccagctgacctcatcgcccgctgcagggtggccacgtccgagccactggtgatcagccagcctttggcccaggccctagttgagcgtatccggcagatcgagggtgaaggtttcaccctgcagggggacttccagtaccgccatggcgaactcgccgcggccgcggcctcctacctgctggattcgcatcgtcaggcattgctcgatgacgtatccggaatccccgccgctccaccgcaggcttggcccttcagcagcgcctggtggaagccggcagatcaacaacgaaacgtagagaaagctttgggcctcggcctggctgagctggagcgcctggccggcatccagcaaggctcgtcgttgtcccatggcaccgataaggagtaa

SEQ ID NO: 326873 - DNA, 1737 bp, Pseudomonas aeruginosa
atgcagcccgcactcgtccgccgcgaatacaagcacttcggcttctgctgcggcctcggttccggcgccgccggcttcaacgacagcgccctgagaatgggcaatctggtcggcagttggcgctgcctgggtggcgttgacgtcgatccggcaggcctggtcgatttcaagaagctcacagggacagagggtacgctgctcgacctctttacccgtgagcagtacaccgcctttcatggacatgaaccgccggcgggctggaaggaagccacggttgatgatgtgcgccgtgcggccggcaatgaagaccctgacgcggtgttcatcagttctccctgtaaaggcgcctctggcttgttgcccgagtcgatgtccgcgacacccaaataccaggccctcaacgaactgacgctcaggtgcgtttggctgatgctcgaagcttggcagcacaatccggtgagcctcatcgtcttcgagaatgtgcctcgcttggcctcccgcggtcgtcacttgcttgatcagatcgtccagctatttgcctactacggctacgcagtggctgagacggtccacgactgcggtgagatcgccggtctggcgcagagcaggaagcgatttctcttggtcgcccgccacgtggagaaggttccggcattcctctatcagccccagactcaccggctccgcggcgttggcgaggtgcttgggcgcatgccgttggctggcgatatcgaactcgccggtcctatgcaccgcgttcctgcactgcactggaagacctgggtacgcctcgcgctcgtcgagccggggaaggactggcgttcgctgaaccgtttcgttgtcgaagatggctacctccgcgatttcctgatcatgcccgagtaccacgccggattcctgggcgtgcatggctggggtgacacgactggcacaattgctggccgttcggggccaaccaacggagcgttctctgtggcggatcctcggccaagcagccgagccgaatacgcacagttcggtgttgtgccgtgggagcggcattgcggcgtagttaccggtcagcgtagccctggacagggaacgtttagtgtggcggatccacgccccgactggaatcgccactccggcaactatcgagtagtgccgttcaaccaggctgctggcacgatcatcgccggcggcaagggtgtccagggcggttggcagtcggtggcggatccgcgaatcctcgatcgccagaaaggtgatgcgtacctgacgggggggcactatggcgtcgtgggatggggagacagtgctggggccgtctcggcacatgctcgacacgacaatggccgctggtcggtggcggacgtgcgcatgcccgcccccaaagaaagcctatcctgcgtcatcaggagcctgcataacacctggaaccgaccgttcaccacgcttgagcttgccgccctgcagtccatgttcgaccccgaggacatctggcggccgcaccctgaaaccggcgacctggagttgatcggtgagcaattcagcttgcacggcgccaacgatggcgcgtggcgagagaggattggcaatgccgttccacggaaagcgggtaaggcgattgctgacgtgatgctcagtacgctgatgctctcggaagccggggagacgttcatgctcagcagcatgccggtgtgggtccgtccgctggcgaccgcaatcagcctatctcagctggagcatgcggcatga

SEQ ID NO: 326874 - DNA, 588 bp, Pseudomonas aeruginosa
atgagcgtagcgatcggtatcgccgggcgtcagcccggctacgtcatggagccggcctgcagcacgggctggattggtgtactcgacccggataaggccttggttgggcgggtgagcacccccgagctctgcgcgctgattgttgggctgctgaacgcccccgatatggttcaagcgattggccaattgaagcaggcgcgcgaggacctggaggtcctgcagagcttgttcgaggtgaacacgaactcactcggcgaccagttgctggggcagaggcaattgctctgcaggctacgcgacctgatgttccagcgtgggctcctgagtgttgatgctgagctccaagcgctgcttgaggggattccctgcacggcagagcccgtgtggaccaccgtggaggatcgcttccctacctggcaggacgccgatgagcgtggagaggtgtggtggacagatggagttgaagtgcggctgtgccattacaccgccgttccgtaccaggagctcaaatcgcagtggcactcgaagggcaaacggttcgcgccgccggcgccgagcaacgacacgatcgaagaggtggtcgcgtga

SEQ ID NO: 326875 - DNA, 162 bp, Pseudomonas aeruginosa
atgctgatgcgcatccacatgaagatcgccattcacgacttcacccgtcgcgctgatctgctcgatcactacctgtcgatcaatgcgggcgggacgccgcacagcgccgatgagatcgaacgagttcgtggcctgttggctcaggccaaagccaagctgtga

SEQ ID NO: 326876 - DNA, 201 bp, Pseudomonas aeruginosa
atgaccacccaagcacgcgcacaagagcggatcaaacgaattggtgatgcgaagtccgagcgagacgcggaccacttcgagtcagaggctatgggctacctagccgccctgctcgatgagggccttctgctccaggtcgagcacgcccgcctgatgaccgcgcttcgcacccagcgcctggcttggcgcaagtccgcctga

SEQ ID NO: 326877 - DNA, 231 bp, Pseudomonas aeruginosa
atggcaacttctgccgacaacatcacgaaggaaggaatcgaggtcaagcctgggcaggtttggaaagacctcgataagcgccagtctggccgtcagtgcaaggtcgtggccattgaagatggcaaggcgaagatgcagcattacgctcgcggccagcttggtagcaaaaccactgtctcaatccggcgcatgcacaagcacagcaccggctgggaactggtaagcgattag

SEQ ID NO: 326878 - DNA, 246 bp, Pseudomonas aeruginosa
atgagccaagacttgagctggcacctggagcaagcggcccaagagcctgatttggattcgattggtttggcccacaacatgggtggagccacgctggatcaactgcacgaaatcgtggcattcgccgagcgcctgaaagaagccgccctcattgaaatgtggggccgcgagcgtgaagccaagggtatggataactctaatctggagctgccacccgagggctataccggttactccccgagttag

SEQ ID NO: 326879 - DNA, 1020 bp, Pseudomonas aeruginosa
atggccagcattggcaaacgccacggtctaactgcggtggcaatggtgaaaagcaagcgttaccccgcagctcaggatgcaatcgctggtacccttggggtgtctgctgctgctctttttcctgagcggtacgtagtcacctggtcggatcactatcagcgcgatgttgaaaaggtgctgccgggtcttgctcagcacggcgacgctcagtttcccggcgtgagcaaggtgaaagagttgcatgcgcactggagaaacatcccggttgacctagtgcatctcccaggtactgcgaaaagccggctggcctggattaggaatcagctaaaggcgcgagggttcatcattactgaggtggctcgctatctcggcgtgagtcggacggccatcaacaacctagtagttgtcgcgtacgcggatgtgcaggccttcatcgcggattgccttggggtaaaaccccagcagctttggccagaccggtatggggaggacggggccccgctaccttctgggcgagcggtgaagtctgcgccgtaccgtaacgcgccgtcctctgtgctggatctccgagaagggctctggctaccggtcgaatcgatcgttgggctacctgggctttccgagtccaccgacgggatcacggctgcggcgaagcggcacgggtggcaagtgcgtgatcgagccggggtggcggaggtcgcattcgcatctctaccagttgagacacgctatcaccttgttggcaggatcgatgtcacgggcggatctccagttggcaggcgcgtacgcaagcgattcaagcgaactgcgttcgaactcgaccagcttacaggtggtaccaggaaggtcgtcgccgttgaagttggggacggcatgtcgacagtcagcatcaccagcgtgggcgcagagagtggaaaagtcgaggcatggcagcacgcggctctcacgcctggagagttgcggcaaatcgcggcggttctccttgatgcggcccaggtctgcgaaattgtgggtgattga

SEQ ID NO: 326880 - DNA, 324 bp, Pseudomonas aeruginosa
atggcgacgctgaccctggccctcaagggcgaatacttcgacgcgatccgggctggcaccaagttggaggaattccgcctggtgacaccctattggcgaaagcgcttggaaggccggcactacgacttcatcgagttgacccgtggctaccctcgtcgaggggaccacgcccggcgcctgttcttgccatggcaaggcctcaggatggcaaccatcacgcacccgcacttcgggcctgagcccgttgtggtcttcgcgatcaacgttcagcagccggccaagccggatgacgccacccacgcgctgcttgaggcccgcggctga

SEQ ID NO: 326881 - DNA, 1041 bp, Pseudomonas aeruginosa
atgggtggtaatgctctggcctccttcggcgcaacacgctgttcgcgggcggttgccttgcaggtccttgaagacttccaaaagcgcttcgcgcagatcacctgtcccctcggcagcgcagcccgggtggagcccatcgcggcatatcggcaaaagcctgattttggcgaccttgacgtcctggtggacagccgagtcttcaaagccatgccgcaccctgccgtagtcaaggcgttgagctccagctatggggcggcgttgccctgggtgaagaacggtcccgttctcagcgtaggactacctctgtcgggagaggggcagtgcttacaacttgatctgatcagcacgccggcggccgagtttgatttcagcctgggctatttcagctggaacgatctgggcaacctggtaggacgggttgctcacaagatggggttgaagttcgggcatgacggactgtggctccccatgcgcgatggcacacacctgcatgacgagctgctgatcactcgtgactttgagcacgcgctgcattttctcggtttcgacgtggaccgttggaacaacggtttcgacagcctggacgacatctaccagttcgtcgccaatgggaaaaggttcaacccagaactctacccgctggagcaccgcaaccacaccgcacgcgtgcgagacaagaaacggccggtctacatgggcttcctgcaatggatcgaagcacagcccatgctgcgccgcttcgactggcaggtagacaaggccgtgtacctgccggaggtattcgcagcgttccccggcctggaggacgaatacgaccgcagtctggccaagctggaccaggcaaaggcaatccgagcttgcttcaacggcgaggtggtttctgccgtcacgggactcgaaggcaagcaactcggggaatttatggcccgcttcaagcgcgagcagggcgagggcatgaatgacctgccaaccctgccggcagaggatctgcacgcactgatccgtggggcatatcagcaatacggccgcgcaaagttataa

SEQ ID NO: 326882 - DNA, 882 bp, Pseudomonas aeruginosa
atgcaacagaacaggcccattcagttcaatcctcagacgggtgaacaactagacgatccttgccgtgctgactcatggcgcaaattgcatcgtttggtttggatatatgacccatggactggcgagccgcgcagccttaaagctgttacagatgacatttttggaagggaaatagaaaacggagtctgccaacattcctgcgtgcttgaagcaattcgagacgaaaaacctcttgctgagattctggagctcatggagagcactggatgcacggccaatgagagaattggtgatgatgaagaatccgttcttatgcttgcggcatactatggattagaaagcttagtggtgaagttgcttcagctgggcgcagatccacgcgcgtactccaaagaaaaaggggctacggtattaagctggggtgcgcggcacagcaatattctgcaaattctcaaggagacgaatgccatcttggatgttaatacgacatttgagcccggtcactttactcctctgatgcaaacaattgatatcgccaatcgaactacaccgccgtcatttgactacgagcttgccgaggacagagccagatctattcacatgctgctcgaacttggcgcagatgtggacgccgtaaatagcttcggaagaaccgccattatgggcgcagcttattctggggtatttaagtttgttgagatactccttaagtacaacccgaatctgaacattatttgtgacgcagggaaaagcgttcttgactatgcaaaaacggaagaaattgaagttttattgcaagaccatggtgctgtagtacgaggtataaatgctagacccagctggatgctgcaccataaaagaatgcaattttggagagaatga

SEQ ID NO: 326883 - DNA, 822 bp, Pseudomonas aeruginosa
atggtcaccaacaagcagaaggccctggggcaatttcccaccccggcttgggtcgccgatgcgctttaccggcaacacttcagccacctcggcgcaaatgacctggtgctcgaacccggttgtggcccgggacggtttctgcaggtaatcccgcctcatgtcccggccatcggcattgacatcgatccggatatggttgaacgcgcgcgcgggcggaccggccgcaaggtgctcctaggagacttcaccaagatcgacctggatttccagccaaccgctgtgatcgggaatcctccatttcaaatgaagctggttgaccaactgctcgaccgctgtcatcagctgctgccggatggcggccaggtcggttttctgctgccggcgtacgccctgcaaaccgccgcgacggtcgtgcggtacaacgcacgctggtcgatgcagcagtcgatgatcccacgcaacatctacccggggctgtccaagcctctggccttcgtcgtgttcacccgagatctgcgccggctgctggttgggttctctctctactacgaggcggccctggtcaactcgctggagcctgaccttcgcgaggagctgaacgaaggtcatccgtcctgggtacgcctggttgagaccgctcttaccgatctcggtggctccgctaggctgcaggacctgtatgccgcaatcgtcactcgacgcccatccgagaaccccgcctggaaagaacagatccgcaagatctgccagcagcgccacatcagggtcgggcgcgggcgctacgcaaaagccggccatgccgccatgtcggcagcagcttaa

SEQ ID NO: 326884 - DNA, 249 bp, Pseudomonas aeruginosa
atgggtgcacggcgcgatgtaaagagtgccgtcccccgtctcttcagcggcagcgcgtccatccaccagcaaggcgcgaacgcccccctccgaggcttgcaatcgtgcagctgcaagcttgatggcatcgtgttccgtgcggcccgcgccgtagatttgatcaccaacccgggcaacgatgtatccgagtgcagagagcatgtttcggtaccgtttgaatttgggggttcttttctaatgcacctctga

SEQ ID NO: 326885 - DNA, 267 bp, Pseudomonas aeruginosa
atgaagaagagttggttgggttcccttgtgctcgccgcagcagcgatgctgctcgattacctgaccagggggccaagttggctgctcctggtttaccttctttgggtaccagttctggtcatcgagtaccactacctcaacggttgggctggtaagcggaaagaacgtcagcgttgggtaccgttcctggcggtcgccctcgtattgctcgtcggcgtcgtcttccaggggacgattgctgttgccaccctgctcgcatccaaatga

SEQ ID NO: 326886 - DNA, 321 bp, Pseudomonas aeruginosa
atgcataaaagctttcgctacgggctcatggtgttgtgcttctgcgcccctggtacttccctgctcgcttctgaattggccggtgaaaataatgccggcgtcgccgccagtgaggactctcctctcacggagtcgtctggcgacatcgacctggtgggttgggtgtaccagcaagtagggaccaagcccaagggtaagcaggtaccctggcttaaagccatgcagggctgcgtcgaggcccgcgataagctgtacccggggaaagcgctatccagcgcggatctcgacgaactttcgggctgtgcagatcgcgggctctga

SEQ ID NO: 326887 - DNA, 336 bp, Pseudomonas aeruginosa
gtgcaatacaaaggcaacctacgccccaccgaagaggcgtaccaggaactgcaactggcgtatgacttctacaaccgccatctgttcggcggacaactgccaacgtgcctgctcacgttccagcgggagaagtccaccctgggttatttcagtccgcgaagattcatccgagtggatggaacggtcaccgacgagattgccttgaaccccgcgttcttcgctgtcattccgctaatggagatcctgcagaccattggtcatgagatggctcatctttggcagttccatttcggtaccccttcacgagcggggtaccacaacgccgaatgggcgtaa

SEQ ID NO: 326888 - DNA, 336 bp, Pseudomonas aeruginosa
gtgccaggccaacgccgctcctatcccaaatctttcaaggcccaggtcgtcgaggagtgtacccagcccggcgcctcggttgccggcgtggccttgagccacggcctcaacgccaatctcgtgcacaagtggattcgccgccagcaggcacagctgcccgcggtaccctcaggttttattccaattcctctcgtcccgagcgtgccggctaccccgagtgcggccgacagggccatccagatcgcaattccccatcgggccggcaaactgtcggtgcagtggccgggcaaggaccctgaaggctgcgcccgctttctgcgcgagctactgaagtga

SEQ ID NO: 326889 - DNA, 336 bp, Pseudomonas aeruginosa
gtgatccgcatcgagcgcatctggctcgccaccgagccgctggacatgcgcgccggcaccgaaaccgcgttggcccgggtggttcaagttttcggtgcggcgcagccgcactgcgcctacctgttcaccaacaagcgcgccaatcggatgaaggtgctggtgcacgatggcttcggcatctggctggctgctcgcaggctcaatcgagggcgcttcgcctggtcgggcaattggcagggacagcagttggaactcagtcccgagcagttgcaggccctggtggtcggcctaccttggcagcgtcttgggcccaatgccgagatcagactcctgtag

SEQ ID NO: 326890 - DNA, 1512 bp, Pseudomonas aeruginosa
atgagtcctgccgctttcgatcacctgacacccgagcaactgcgccaactggccgcgcagttgagtcagcgcgtcgatcacctggaaacgctcaaccagcggttgaaccacgaactcgccgtgctgcggcgccaccgcttcgcccgccgcagcgagcagctcaatgccgaccagctcaatctgctggacgagatgatcgaggccgacatcgccgccatcgaggcagagcttgaaacggcccgaccagagcccgccaagcgcgagccacggcagcagcccaagcgagcgccgctgccggccgaactgccgcgcacgctgatacttcacgagccggacagcacccagtgtgcctgcggctgccagctcaagcgcatcggtgaagacgtcagcgagaagctcgactacaccccgggcaccttcaccgtcgagcggcatatccgtggcaagtgggtctgcgcccagtgtgaaacgctgatccaggccccagtgcctgcgcaggtgatcgacaagggcatcccgactgccgggctactggctcaggtcatggtggccaagttcgccgatcacttgccgctataccgccaggaaaagatcttcgcccgcgccgggctggctatcgcgcgttccacgctggcgcaatgggtcggcgcttgcggtgtccagctgcaacccctggtcgatgccctgcgcgactgcctgctccagcaggacgtcatcctcgccgacgaaaccccggtgcagatgctcgccccgggcacgaagaagacccagcgggcttacgtctgggcctatgcacccagccccttcgccgacctcaaggccgtggtctacgacttcaggccgagccgggctggcgagcacgcgcgcagcttcctgggcgactggcagggcaaactggtctgcgacgacttcgtcggctacaaggccagcttcgagcaaggcgtgaccgagatcggctgcatggcccatgcacggcgcaagttcttcgacctgcatgccgccaaccagagccaactggccgagcaggccctccagtacatcggtcagctgtacgaggtggagcgcgaagggcgagagttgctcgccgcacagcgacggcaactgcgccaggacaaagccaggccgatcatcgatggcctgcatagctggatgcttgggcagcggcagaaggtgccggaaggcagcgcgatcgccaaggcactcgactacagcctcaagcgctgggcagcgttggtgcgctacctgaatgacggcaacctgcccatcgacaacaactggatcgagaaccagatccgcccctgggccctggggcgtgccaactggctgtttgccggctctctgcgcagtggccagcgtggcgcagccttgatgacgctgatccagtcagcccgcctgaacgggcacgatccgtacgcctacctgaaggacgtgctcacgcgcctgccgacgcagaaggccagcgccctggccgagctgctgccgcacaactgggtatccgccggcaaggtgtga

SEQ ID NO: 326891 - DNA, 921 bp, Pseudomonas aeruginosa
atgagacgcaccctgcaggaacacctgcaattcgcggtacagaacactcagaaccagttggcccaggcagtggtgctgaaggagatgctccactacgacatcctgcgggccctcgcggcgagtgagttgggcgatcgcctggtgtttcagggcggtaccgcgctacggatctgccacaacgggaaccgcctgagcgaggatctcgacttcgtcgccggcgccggtgaggttgaacctctggtgctcgatgagatggccaccatcctgcaggagcagatgagcgaccgatacggtctgaccttcgatcgcatcaaagagcccaagaacgcactgcaggccggtagcgtggcggttaagcggtggagcttcgatatccaagtgcaggcactgggcactaccagcaagatccacttcgaagtttgcaacgtgcccgcgcacgacgccgtaccgatggtgcttcgaccagtctatcgccaactggaaagcattgagcctttcacgctcaaggtcgagtcggccgaggaaatctacgcggacaagcttgtagccctgggcctacgaaaattcgtgaaggcacgagactgctgggacctcagcttcctttccaaccgcggctattccgccaactacgacctggtgctgcagaagttgaaagactaccagcagacccccgaagcctatctggccggattggcgcaggcgcaagagcgtctcgcggatccagcaaccatcaaggcgtttgtggacgagatgagccgcttcgtcgatgcaggtatgcagcgtgcgctatcacagaatcccgacagcgcgcgagcctacttgcagcatgccgcccgcgaagccacacagatccgccagtggctggagcaggggcaagcccaggacatgcaagaggactacgacacaggccctagcatgtag

SEQ ID NO: 326892 - DNA, 528 bp, Pseudomonas aeruginosa
atgacgcgcttgaaattgatccgagttctgaacgagttggccgctcagggtatctggtgcatcagtcaccggaaccttgggcggcttttcggagaagccggcaagggcctgacggttacgctcgcgcgccattcaaaggaccagctgatcacccggctcgggaagggcttttatttgatccccaatgcgccgcggccgctcaaccacctggagcaactggccaactggttgagaccggacgactggttctacctgtctctggagtcggcgttgcacgaagcagattggatttcacagatcccgaatcggctgaccttcatgacctcaggtcgctcctacgtctatgacaccccggtgggcatcattgagttcgtgcataccgagcgctcgccggaagagtggctgccgcaaacgaggctcaacgacttccgcggcatccgcatcgcgccgccagagatggcactccaggacctcaaacgggttggccgcaacctcgatctggttcgacctgaagatgaacgtgattag

SEQ ID NO: 326893 - DNA, 891 bp, Pseudomonas aeruginosa
atgaagcgaacgctgaagagttcttggtcgatcgagcgctgcatgcaactcatggtgcaccgcggggatagcctgcggcctgagctggtgacgttgcgagcacattccagcctcgggccgctgcagcagcatctcggccaggagttggttttcctcactggcacgcagaacgactccgaccaggactgtgcgagcccggactgctggcccacggtaggcgaaatgcacgacggccatggcacctgcctgggggaagtctatcggctgacggagcgcagcctcgccggcgccaacggccgagccctagggcgattcctgaagagcgtcggtgattacgccacgctgcaggctgcaaaggacgccgccgaaatgatcaacgtgccactggaagtcgccaacgtcatcgagcagggcgtcgaggatgcgatcgaggaacaggagcgcagggaagacagtgctgctgccacccagctggagcaaccccggcacgagctgcaggtgctggggcaaattctcccgcatatctataccctggaaatgggtgaagcaggtgcgcagtaccacgccaagttcaaacacgctcacccgctgccggcccagtggcgctggcatgaagtgtgggaagcgatgaccgctgcctcccccatccagagcatggcgattgggcctgtgcagctgccagacaacctcctttcgcatcggaacgcatggcttgctgctctagaacgtctggtggagctggagccggaaagctaccagcctgatcgggatgagaagggtttctggaagcacgaacttcaagcgatgcgggacatgtacgccaatcttgacgcccttcagatggcggccgtaagtgaggaagcctgggacagcttgccggcaccggtgtaa

SEQ ID NO: 326894 - DNA, 672 bp, Pseudomonas aeruginosa
atgaaccagatccccccactgcttcacagactcaacatcatccagaaggccctcgactatggccacccggtgaggatcgacgggtacgagtacatccagttggaccgactctactgccgcatggagcggcaccaaggaggcgcggtctccatcgtggcgctggctgccgaacacctggagaaccgaggccagctcatgacggccgtggcggctatgccccatgagcattggctggctgtcgcgactcggacagcgctgattgacactgtgaaggtgggcgctgtcgtagagaaggtgttcgaggcccgggccgcacacgtcgaagcgctgctcaacggggtgatgatcggcaagtaccgcaccaaggatgacgaggtgatcgacctcccgtcgccggtgagggctaaggtcatcggcccgttgcagttctattcggacgagttggatgtcatgggccaagacgtccagagcttcgacagctattggactatcgagtcagcggaaatcgaactgccggctggggcctggatctacgggacaagccacacaatagccggcgatctgacacccccggaggtcctgcaggacgaagtccgagagttgtctgcactgccctcccccgaccaggttgctgaagctctgccgccggcggcattcgatttcagcgtgtga

SEQ ID NO: 326895 - DNA, 567 bp, Pseudomonas aeruginosa
atgatgctgtcacgccggcgtttcttatcctgccttgcctcggcccctcttgccctcagtctcccgatggcggcaaacgccgcggacgccatcgactggcgcgttcgcgtgctcatgcgtgagcgagtgctgaggctcagccggccggactcgaaggaaaacctcaatttttgctactggcgccccagcacggggtgggatgtacgcggctacatggcggcctgccacctactgcgggacgtcaagttcagccagcaaaggcagattgatccacatctgctggacgtcctcttcatcatgcaggtgtggctgcaggcgtacggccaaccgagcgacatccagattctgtctggctatcgcacgcctgagcacaacggccgcctggaaggggcagcgaaaaactcactgcacatgcaaggacgagcggcggacatccatattccaggcatgtccacccaggtcctcgccaatatgggcaagatgattgccgtcggtggagtagggctctatcccagccgtggtttcatccacgtcgataccggctcgctccgctcctggattgggtag

SEQ ID NO: 326896 - DNA, 840 bp, Pseudomonas aeruginosa
atgcgccgccagttcaaggaacaaccacgcctggtgaagcgcgtggcagttaatgcgaccggtcgtgacttcgtctgcggcgatatccatggcgcctacgacctggtcttggaggcgatgcgcaaggttcaattcaagcctgcgcatgatcggctgtttgtcgtcggagatctcatcgatcgtggcccaggctctcaccggtgcgccaggttcctcgcgcagccctacgtgtatgcagttcggggcaaccacgaggacatgctgctccagctttaccccgaagactcgccatctcccccagattcgctccttgaatgggcgtcccgccagaacggctttggctggtggcttgccaccgacggtgatacccggacagcgatcatcgacgcggtgcgcaggcttccgatcgctatcgaagtgcaaaccagtcgcgggacggtaggaatcgttcacgccgacatcccccacgggctcacctggcagtccttcctatctttggtcgagagcggcgacgcaaagacgatcgaatcggcgctttggtcgcgcgagcggctgaaccggcgggatgaaagtggggtgcacggagttggtcgattgttcgtcgggcataccccccaatggggtggtctccagcgattgggaaacgtctatgcggtggacacaggtggtgtattcgccgaactcgacaccgatcgctggccgggtgctcgattcacgttcgccaacctgtccatggccacagcaagcctgaccagcctggcgcacggcgacggacttgtcgaggccagggacggcgaaacacctaacactcccttcagcaattacacaacgtcacggtga

SEQ ID NO: 326897 - DNA, 255 bp, Pseudomonas aeruginosa
atgaccaaagacgatctccgaaaaatcctcgatgaccaggtggagcaattcaagaacgagcatgggggggaggtcaccgtttacgccgcccagcgcaagcccgataagcagccctggaagaagaagcccagcctgcgcgacgaatctttcgagtcctcattgcagaagaccgaggagcagctacgcaaagaagggcgcaccttagactttgccgaagctactggatcgagtcccgcgcgcaaggcggacaggtag

SEQ ID NO: 326898 - DNA, 918 bp, Pseudomonas aeruginosa
atgttccccagagaattggtgctgtatcggatcacgcaaccgttggacatcaccccggaccagctggatgaggcgctgaaatccaagcccgctcgtccgtgcggctcgcaggagttggcgacctacggtttcaccactccgctgattgccggcagcgaatcgctcgtgcacgccagcgcaggctattggctcatcgccgcggagaagcatgagaaaaaactgaagggcaagatcgttcgcgaggaactgctcaagcgcgtagagaagatcgaggccgaacagagccggaaggtttacaagaaagagcgcgataccatcaaggacgaagtcgtcatggacttcctgcccagggccttcgacgagaaggaggtcgttcgcgccatcctcaatgtcgagcagaacctgatcatggttctgaccagcagcgcgaagaaggcagaagacctgctcagtacccttcgcgaggtcctcggcagcctgcctgtgcgcccgttcaccgtgaaggtggcgccgtcggccaccttcacggaatggctgaaaaaacaggaagcggcctcgggcttcttcctcctggacgagtgcgagctccgcgatactcacgaggatggcggtacagtccgctgcaagcgccaggacctgaccggcgaggaaatccagctgcacctgacgtccgggaagctggtttcgaaactgagcctcgcgtacgaggacaagttctccttccagatcgacgacaagctcaccctcaagcgcctgcgctttgaagacgtgctgcaggagcaagcagaacgcgacggcggtgatgatgcagcaggccagctcgacgcgtcgttcaccctcgcggcgatgacgatgggagaattcctcccgatcctggtcgaagcgctcggcggtgagttggtgccggaaggcatctag

SEQ ID NO: 326899 - DNA, 1068 bp, Pseudomonas aeruginosa
atggacctcacgcagaacatgcttcccggcgcccaatgctctctggacctgccggaagacctccccccttcgagctttgacatggacctggtgcccgggagcatcaagggcgccatgaaggccgccggcgccacctcgcgtgacttgtggtactacccgcacgcgatgctccgtcgaatccccgacttcaacgtccgggtcaaggacgctgaatactgggcgcacgtgaatggcatcgccaattcgatcgagaaggacggctacaaaccgtcgcatccgctcgaaggctacgctggcaaagatgcagacggaaccgacgtcatctgggtaacggatggctactgccggatggatgccgtggacatcctcgtcgcgcgcaaggtcccgctggatgatctgccggtcgttgtcgttccgccgaagaccacgtcgatggtggacctgaccatcggcctgatccgccacaacagtggcaagcgcctgcgcccgtacgaagaaggcctggtactgaagcggctcttcaactggggctgggaagtcagcgcgatcgccgaccgcttcgacatggacgtgtcttacgtcaaactgctcctggagttggtgagcatgccccgcggcatcatcgcaatggtgatggctggcaacgtggctccgaccgtcgcggtccaggaataccggaagcacggcgccgagaccgtcaacgtgctgaatcatggtctggccgctgcccaggctgcagccgcggccgccggcaagccggtcgaaaaggccaagtacaccccgaagcacaagcccggtgcaggctgggccaaggtggtcaagagccaatccgaaccgctgtacatggtcgccaaagcagtcgtcgctgaccctggcttcaagggcttgacagaagacacccgcaagtcgctccaggaactgatcgacagcctgaaagcgaaagaagaagagctggcccagaaagaggcggagatccaggctcaattggccaaggccaacgccgagggcggcgatgggcaggatccggccggggacgagacgcatcaggatgacgacactcaggcctga

SEQ ID NO: 326900 - DNA, 138 bp, Pseudomonas aeruginosa
atggtcctagttgaagggcactcaaacaccgaggccgtcgcggcaacgtccatgaccaaggcggcggtgagcaatgccgtgagccgtttccgtaaggctcacctgcgaatactcgacgcctaccgccccccggaatag

SEQ ID NO: 326901 - DNA, 663 bp, Pseudomonas aeruginosa
atgaacacctacgcgccggacgaggagggccagtcggcggcgtacatcgatgcagcctttaccgagcccacgctgtcgcccgaccatttgcgggtgaaatggggccggcttggcggcgatgaggaccttcatgagattttcgacagccgattgaagctcgccgagttttggtacgacatcaaggccggggtggtagtggggggacagtggccggattggttgatcccagcgctggtcgccggcgagatgatcgggaaactcaaagtcgagcccgcgatgctgccgcgtggccaaaaaaccctcgaaaagctgcaggaccagcaaaggaatctggtcaacgcctggggtgaactgccgccgatcttgcttcacggcagtttcgcgttccgcgatgtcgagtgccctaggtccactcaccagttctgctcgatcgcggaagctgtagcagcgttgcgcaagccggggctggcgagcgcgacgttcagccctggtgggttcggctaccagagcaaccagacgctggagttcgctgcgtcaccgaccaacctcactgacgcggaggttaccgctcttttggagatgatgatcgactctgatcggaagcccgccgcggaggcggtcgcagccgaagccgaagcctggggaggccccgaacacccctga

SEQ ID NO: 326902 - DNA, 1899 bp, Pseudomonas aeruginosa
atgcagcgaaacggcatcgttcccgaagccggcctgctgaccgacaaggacgccagtaagatccagatgttcatgcgcgaagcgctcgccgaagaggatcagtccgtgtgggacgtggatgatctgcagctggatgtaatggggcaggcgctgacgatggccaagagcacgctggtcaggctggatcaggaacctccaatcgaagtgcttctgcgcctggccgagggcgatgagcaggttgcccgagcgctggttcgcttcgaggccattcgagcggagcagggattccgtacgttcgacgacctgatctacgacgtcgctcgggcattgcaggatgaccctcgtgcttggcgtctggtgacgaaccggttcgacaacgtgatcgtggacgagtatcaggacatcgatgacgctcagcagctgctgatcaaggctctcatcgggactcgcggccgcgggttggtcgtcggcgatgaggaccagtgcattttcgactggcgcggcgcaaacctgcactacatgctgtcaggcttcgaggaaacgtatgccgacgtcggggtcacccgctatttcctcagtcgaacctatcgctatggccatgagttggccatcggcgcgaacagtttgatccggcacaacaccgagcggccggacaagacctgcatttcggcgccgagcacgccggcgactcgtgtcgagatggtcatgccagcgatggcctcccaggacgaccagtggccggacctggtcctgcaggcgcttgatcgttgggaagtccaaggccggaaactgggtgaagcggtggtgctagttcgagccttcagcattgcggctccccttgagctggcgttgcttaagcagaaacggccgtaccacctggaaggcaagggtgtgctcgaaatgcctgaggtgaaggcgctgatggcctataccgcactgcaaagtgagccctactggcagaacctgagcgccgcccagcgacagacgcagtggcagctgattctggggtacccaggggcattccttcctcgcgccctgatcaacaacgtaaccgaagcgatggccgttgccgctatgcctgctgaggccctggagatcctccgccaggcagcctgggctgacggggtgagcgggcagcatgcacgtgcgctcagtatgcgcgcggatgttatcgatcgcgttcttcgcgcgcccgccgagccggcttcgattgctgaagaggtttggtcgcgcctcaactgggcgcaggacatccgacgtcgcgtgaatgatccgattaaacagcaggagcgtatcgacactctggctttggtacgcgaccagatttcgggctttcagaccctggaagatctgctcgaaacctactcccaaggcgctgtgaaaggcggcgggaagaaggacagcggtcggctgaagatcatgtcgatgcacgcctcgaaaggactggaataccccctggtcatcgtgccaggcctggccgacggccaaatgccgttcattcacccggagcggccaaccaacatggaggcggagcggcgtttgctcatggtcgcgatgacgcgcgcccaagagcaacttctgctggttgccccgaacgacgcggatctcgccaagcgctgggagatcgaggtcaaccagcagttcagtcgccgcggcgacgatgccaaggccgtcaccagccgtttcctcccggaaatcgacgtcgagtcgatccgtgccgcccggacccacttctacaaggtgggagcccaccctatgaccgaggggctcagcaagtatctggaggccatggggcctgctacggctgctgaagaactcgatgctcctgctgtagaaaccaaacgggtgtccaccgcggtgcttgatctggacgagctctttggagggccatcgttttga

SEQ ID NO: 326903 - DNA, 2136 bp, Pseudomonas aeruginosa
atgagccttctacgcgtcgccgtcccatgccctctgcacgccgccttcacctatcgactggaggatgggcagtccgcagcgcctggggtgcgtgtacgggtgcccttcggcaatcgcgtggttacggggctggtcttggggcacgaagagaacgacctggctctttcgccggagaggatcaaggcggtggtcgaggtcctggatgacgctccgctatggccggttgcggtctgggaaacgtggatctggatggccagctattacgcacaccccatcggtgacgccttgaccaccactcttccagcactgcttcgcaaaggcgcctcggcgcccacgcccagtgtgcaagcaagccatgatctctccggcctcgcgaaatatcggccaggcgctaaaccggtcgcggtcacccccaagcagaaagaggcgctctccatcatctgcgcagcgcccgacgggttgagtcgtcaggaatgtctggacagggggatcgccagccgagtgctggagatgctgatcggtacgggctcgatcgaaccggtcattcctccagcggaacgccccaccctgaccgccgagcaactgcaggtcctggcagccatcaccccaacgctcggggcattccgcactcacctagtcgatggcgtgaccggctcaggcaaaacggaaatctacttgcgcctgatcgaggaggtcctggccaacaagcgccaggcactgcttctcgtcccggagatctcgctgacgccgcaaatctgtgcgcggctgcagcagcgcttcggtgaccaggtgggcgtcctgcattccgggctgagcgacaaggagcgcctggagacctgggttcgcgcaaagacaggaacgatccgtgtactcgctggcaccaggtcgagcctgttcacgccgctacccgaactcggcctggtcatcgtggacgaggagcacgacacgtcctatcgacaggacaacggtctgcgctaccacgcccgcgacgtggccatgtacctctgcagcaaactcaacatcccctgcgtgctcggcaccgcaaccccttccgcagagagctaccgcaatgtgcgcagtggtcgaatggagcaccacgtcctcaccattcgcgccactggcgccccgatgccgctgatgcacttgcttgatgccaaatccatgccgcaacccgacggcctcacgccgttcgccattggggccatcacccggacgctgcaggcaggccagcaggcgatggtttaccttccgcgccgcggctacgcgcatgcgctgtactgcagatcctgctgctgggcatcggagtgcccgaattgctccgcccgtatggtctatcaccgcgggcgcaatcaactcatttgccaccactgcacccacaccactcgcgtgcctacggaatgtccgaagtgcgccgccccggacctcgttcaactcggcgccgggacggaaagggctgaagcagcgctgcaggaagccgtcggcgccgacaaggtcctgcgcctggacaccgactcagtgaacagtccggacaagctccagcagcagctggccagagtacgaagcggtgagccgctggtgatcctaggaacgcagatcatcagcaagggacatgacttcccaggcgtcaatctgaccgtggtaaccgggactgatgcagcactattctcggtagacagccgagccaaagagcgtctggcgcagcagatcattcaggtagccggccgagctggacgcgcgcgccaaggcagggtgttgatccagaccagccaagccgataatccctttcttcgtaagctgatcgagtccgggtaccactgctgcctcgacgagctgatcggcgagtatgaggaggccgggctcccgccagtgagccacgccgccctgatcacggtggagaccaacaaccagggcgaagggttggacttcctcaaccaggtgctcgacaccgccgcccatcccgacgtccacgggccgttcccggccgtgctggagcgacgcgcaggaaggtatcgatcgcaggccatgatcttgtgcgaatgccgctcggagcgtcacagggcactgcacctggtgcgcaatgccgcgacacagcacaacccgaagctgcgactgcagatcgagatcgatccggcctaa

SEQ ID NO: 326904 - DNA, 1188 bp, Pseudomonas aeruginosa
atgggtagcgcaatagcggtagaaccggtcgatcactgccagatggtgatgtccaatgcacccggcactcgtggtgatctgatccagttcatcgaggcgagcagcgcgggacgcagttggctcgtcttgcatctcgatatcgcgaacttccggtatttcaaccagattctcggctggcgaactgctgacgatttgctcgcgctcatcggccaagcgctggtccatgatgggcggcaccgttggtatcgtgtcggcggcgatgaatgggtggggatctgcgaagggcgatcgactgaggtcggtgttacccaggtcccggctatccgtcgagccatacagaaagcggccgcccaggcggtgggtgaaacgctgcggctggacgtcgcggtaggcatcgctgtgcatcacgatttggcgcgggccctggtcggggcagagtcagcgagccgaaatgcaaagcgcaatggccgaccggaggtccgtgtcggcattgaagcgggcgatgcgcagtcctccccggtgctgcgtgccttgcttgccggccgccaactgcatgatcttctggagctgcaccatcagcgcattgagcactttgacggtggggcccattacgaactgcttgcccgctgcgcgggacgctcgctaggtcctgtcatcccgacgatcgaggagatggggctcgctcatgtcttcgacatggaggtggttcgccatgctgtcgcactgattccgccagcggcgccggagcatgccatcaacttgtcggctgcctcgattagcagcaacgaggtggtgctggacgttatcagctccctgcgcggtcggaacaacctcagtatcgagataaccgaaacggccgtgatggaggatcccacccgggcccaggtggcaatcgagatgcttcgcactgccggccactccgtgtacctggatgacttcggcgagggggccaccaccatgtcgatgctcgaaatgccgttcagtgcgatcaagctgggaacttctctggcatcgctggcctgcccgcctgatgttcaggcgtcggtcgtccagctaattcattcccgcggcatgctggtggtgggagagggtgtggagacggaagagcagcggatccggctcgcccacgtcggagccgatgcagcgcaggggtatcttctgcaccggcccgcaccgacgggattctga

SEQ ID NO: 326905 - DNA, 852 bp, Pseudomonas aeruginosa
atggcagacgagtatcctgtaagtcagcccgataataaggcgctgggtgttgttattggaatatctgtaaaaaagatcagaaggggtcggtaccagcctcgttggcatttcgatgacaaggcgctatgggagcttgtccagaacatcattgagctcaatggcaacctggttgagccgatcatcgtgcgaccggtacctggcacggacgagttcgaactgatcgccggggagcggagatggcgggccttcaagctcgggaatttcgaaacgattccggcgatcgtccgccacgtggacgacgaaaccgctgcgctgatggcatacagcgaaaacgaatttcgtgagcctttgaattctctggaaaaggcgaagatctggctgcgaatgcgcaatgactttgattggcgccaggaggacttggcaaagcggatcagcgtcgatcggggagtgattgccaatcatgagcgtctactcaagcttccggagccagtccaggagcacctggctgttggcgatctaaccgagagcaaggcgcggcttctgcatggcctggctgaaaagctggcatgcagcatcgccgatgaggcggtcgccaaagggctctcgttgcgcgagatcgaggcactggtcaagcgagcgaagaaagaccagccgccggcgccggtaaggagacgcgaggatccggatgttgctcgatggctgcggcggttctcggaggtgattggtttccagacggaactggagcaggcaaagggcaaggagaagggagggtacctgaagatcaggtactacgagttgtcggacctgagcagcatccagagcagactgggtgtgaggagtggggatgggtag

SEQ ID NO: 326906 - DNA, 381 bp, Pseudomonas aeruginosa
atgaaaatcttcacgtaccgtgccgttctcgccagttccatactggcatgctcgaccctggctcttcctggagtcgctcaagcgggtgattgggacctgtccggcgccttctcttcggactcggacttcgtatcgtcagggagcggcacaagcacttcgcgcacagtcgccaacactctaccgacgatcgcccgtgccaccgacaacagcacagctcgaagcgtgctcagggaaatgggtagttacgccaagatcatcgccaatagcgaggacaagcaatcgacgggcgtcgtcagctgtcgtgacggcgaccagctcggcgacatctccaagcagaacgccgccaagtatcaactgcccaacgtcaagcaggggttctga

SEQ ID NO: 326907 - DNA, 606 bp, Pseudomonas aeruginosa
atggctctccctctcgccgcactgaccagcggcgtcgtcacacgcatcgctggcagttccgctttccggtacctcgccgcaaagacgacgtttagcctcggcgaggacgttttctccagggccctgctgccgaacagcaagaatctctcgctcagcggtggaagcgactttgccccccatatgggcaccctcacccgcgcggataacacgcctggtctcgtcagttcgatcgacctcggtcgaatctggggcaaggcggatattctccgcgacctcgcacaccaggcccaacagcaattgggcgactgggtactcgacgggatggagaagattccaggtgtaggccatagcgtcaaaacctgcaggcttctcaccgatgccgccgagcttttcggccgtgacaagaacatccccgacctcatgggcaagttgagatccctggatcttggatcgcttgacctccctgtaccaggaacggctggcaagctgctcactgacatcaaggaccggctcctcgatctgatcgacgaaactgtccgactcaccggggcagcgacggatgtacgcccgacgcttcccggctacgaaccaggcactcaaccatga

SEQ ID NO: 326908 - DNA, 957 bp, Pseudomonas aeruginosa
atgacagcgcataccaacgcagcggtaccgcaccacgaccccaccctgctcatctgtactgacgtttccaagttcggtgctgatttcccggccaccgcattcgagcgacgaattaccgacccgatctggcggcctactcgaaagcaggtcttgccggacacagtccgcacctggcgaccaatggacgagcccacttgggttgcgatgaatgcccttggcgccttccccaaagatctgcgcactgcagcaaggcgccttcttgaaagtggattttcccagccggaggagcactccatcgagaggatcttcgccggagccagccgccagttcggccccgagggcgtctggtgtaccgcactcgaaatcgtggtgactcaccggcgccatgcgcgcctggctgtagaccttgcagccacgcacgccggcgacggagttcctgaacttctcaactgggccaactatgtgtcacttctgggactgaccagtagcctgcggaatgatcccgttcccgatccacacatcctcatcaaccaactgcgccgatgcctaagctcatctcgtctgaataggctcctcgtcgatgtccaggtgctcctggataactcggaaagcatggcagaagcgctacgcgcatctggcttgggcaactatcgctggctctggagtgatgcagctggccagcccgacgtgcctgtgcgattcgcagggccgagtgaggccctggaatggttgtgcagcagcatctctacggatgggcgcgaggaatccatgcaagaaagccctcgccgccggcttcgccccttgcgagagatgcttcgtcgcggcgaactgcagttgcgtgacgatgcccacggcgaagctgtgcctgcgacgcaactcatccgcggcatggatgacctcaccgtggggcgatcgatcagagagcacaagccgtcgcaggcctcgtccgttctctga

SEQ ID NO: 326909 - DNA, 168 bp, Pseudomonas aeruginosa
atggccaacgctttcaaagatgagcagcagcgaaagcgcgaagcagctctgatggaaaagtgccggcagttgattggcgcgggcaagcgcattgaggctatcagagagtaccgcgctgccaccggctgcggacttgagcctgctcagcgtgcgctgggcctccggtaa

SEQ ID NO: 326910 - DNA, 1017 bp, Pseudomonas aeruginosa
atgccagttgctcaattcccgcagtctgcacagcaccagatgtccacgccgctgctcggagtcatgcagtccggcgaaagcctcaagcatttcatcgatcggcatctggctgccaataacggcggccttgtcacggacgtcgttgttaccccgtcggttgtctatgcctcggttcaggtcggcgatcagatcgaggcgaaggtcttcccctaccaggtggactacggtcagccggcgccgcgagaggtgcgttacggcgagtacagcgagcgggataatccccagtgggcatacgctccacccaggatcatgaatcgcctttcgccgactgatgatgcaactgccgcaacgtggcgttcgcgctgctgggctcaccagctgatgctccgtcaggccagcgaagcgctgcagcctggcgacgtcatgcacgtggtggagcagaaggtcactgccggcggtgtgcttgctccgggcttctatgccctggtgaaggtcaaggaaggctacggactggtgaagccgctcgacggcgacgcgaagtccatcgttgtgcccaacgtcactgcctcgatggtcaaggtgccgctgaccaacgatccgcgcgagcggctcaagcatttcccgatggtagtgaacttcagccttaccaatatcgcccgcgatgatgagcacggctccatgtatgtcctggttgggcgtacggcgagtggaaagcgcatccctctggcgaaggctgactcgggcaactatgaagcgctgctgaagacggtgtgggagctcagcaaggagcgcgaagcgcgtatgcgtgcgttccgcggtgacgatctttaccagttcgcgaccggtcgcggcctggtcaccccgatgctcgcgcaacgcgccggggaggctgtgccgatgctcgacaatctgcaggtcttggttgcggacacgccagagcagttggcggaggtcaagcgcgaagcgagtggagcgttgctcgatttcgacaacccctacgatgggccgagcatgtga

SEQ ID NO: 326911 - DNA, 891 bp, Pseudomonas aeruginosa
atgagcattcaagttaatcgtgaggcaataatcgaagcttcggcaccgttgcgggacgcttatccgacgcttggggatgggcagttcgttgcggcatattcggtgattcgtgagcttgcggacgaaagtgacatgagtatggcgaatgtcgtaagcctgctcaatgcaggcgctttcgtatcgcggtcgttcgtcagcggtacgtctgtcctgcgggttcgccctgagctggcggaaggcgaagcgcaggaggtgcgcgagctggtgggagggtatgcggctgcacacgtcgcgcagttgctgctcgcccaggaggggacccaggcctttgctgatcgtgtgatggccaccgcacttcaccaagttcttcaaggtgctgatgccacgattgcagtgccatcggatgaacttgaggacctcaacgaggtcgaacctgaactcctcggctcgtgtttgcgagcaatggcgactgtggcagaccaggcccggctggaactgagtgtggctctgggcatgctgatgcggggccaggccagttactcctcaccgactgcagctctcgaacgggtggtggcgcgggagctcccaggaatgacccggggggattaccagccgctggtagagcgttcggtcgcctaccttacggaccacaaggacgaactggtagataccctgctgggcgagatgatcgatgagtgggcggaaaatcatcttcccgatgctatcatgcgtgcaaggatgtattttgcggagcagggcgaggaattcgacgagggaatgggcgatgatgccgttctcccagcagaactgctcgaacatcaaggcgccgcggcgcaagatgacctcgatgacgagtggttgaatgatggtggtttcagcctggatcgatga

SEQ ID NO: 326912 - DNA, 375 bp, Pseudomonas aeruginosa
atgtcgccattgatcaagcatgtgagccttcccgacctggctctcgacctcagggtggtgatacccaacgttgaggttgaatccgccttccaggcttacccctctggcactgtccttctttgcactgggggcggggactggcagtggggtgaacgattcctcgtgcacgagcacgccaatgaagacacctatatcgcggtggatctggcccgatgcctcgtccagaccatctcttcactcgaaattgctaggcactgcctggccattcttcctccggaagatcagccctacccttacgaaacgctcgaagatgccgtcgcggccgcgcgcaacagccttccactgtttgccgcacccgcctccgtaggcgactga

SEQ ID NO: 326913 - DNA, 567 bp, Pseudomonas aeruginosa
atggccttcgacctcccgcccgccttcctccacgaggaagtgccacgttcctgcgtggtgctcaccctgcagcgctatcagatcccgccagatctgttcattggctacatgggcatggagagaggccgggtcggaatggcgaacaggaactcaaatggcagttacgactacggcccctcccaggtcaacagcatctggttgcaggagatctcgcagttcggtgtgaccgcggcccagctgcagtggaacccctgcgttaacatctgggtcggtggctggataatgcggcgctgcctgaacaaattccctggtcagttttggacagcggtggggtgctatcacatcggtgagcatgcgctggagaccgccgacctctcgctcagagcgagaagaatgaagcgcgggcagaactacgcccgagaagtctattcagtgatgaccaagtaccggcagccattctggcaatggctgaacaaccgaagcgcttatgctcaaatgccggatgtcggcggcccgacgcaagaccaggccgcctccccatccaagtcagaagtagcgagcagatga

SEQ ID NO: 326914 - DNA, 1104 bp, Pseudomonas aeruginosa
atggacgctaccaaactctacaaggccatgtggagtgtttctcggacgccgaaaccctgggaggctccccatgctgaatgggagagcttccggcagtttgccgaggcgattccggagtccacgcaggaggccttgatcccgctgttgtggcatgcgcgggatcggctgcagtaccaggacgggggtggcctgaatggttacctgaaggaacatgggctgacgaaggctggttggaagcgcgtctgttcgctcaccattgaggagacggtcgatctgtatcgcgtctaccaggcgcagcgagactggctcgcaggtgtaccggcggtggttcagctttgcgccgatgctgctgcgcctgcgactgccaagggtattcaggtgctgatgaacgttccgttcggccagatcaacgaattgcccaaggtgctgcagcaggagcgctatctcctagtgcgcaaggcagttgagcatgcccaggaactcggccaggttgacctggagggtttccgccagcagctgttgatgatgttggactacatcgacgtggaggggtttgcagtcgaggacagcacttccatcgagttgctctgggcgtctactgaggcctggcacgcgaccttgcacgatctgccgggcgaggatcggcacctggatgccttggcgaaccaggaaaatgccgccccgacgccgggaggcctggacgtcttcgaagacctcgaatcgggcctgcaggttgtacgactccaggcttgggaccagttcgttggcgagtcagacctgatgatgcactgcatcggacgtagtccgacctacttcaatcggcatattgcgggcaacggggcgttctatagcctcaggcgccccggggagaaccgcccagctgcgacggtggagctccttaagcctcgtgacgagtggctggtgcagcagtgtcgaggggtcggtaacgctgatcccggcccgcaagctcatgctctggctgcgcgcctggccgaagcacacaacctgggcggaatggctctgtccagtgagcttcggtttgacggacgtggagatgagttggacaactaccaactcaacggatcatctgctcgctacttctga

SEQ ID NO: 326915 - DNA, 3687 bp, Pseudomonas aeruginosa
atggttccgctgaacctcgcttcgcctgtgcggcgcgcactcgaaaaggtggtcgctgaatacggcgatattgaccagttcgtgggggagcgactcggcttcgacatcgatggcctgattgatcgattctatgcggagcaggtggatgcactggcgctcgcgctgcgttgcgtcgataacagtcgcggcttcgtcctgggcgacatgacgggcatcggcaaagggcgcgtcttggcggggctcgcacgctatggcgtccgccaggacatgagggtggtcttcgttaccgacaggcctccgttgttcaactcgatggcccgcgaaatcgctgtgatgggcacccaccatttgatcaaccaacagaacctcctggtgatcaacagcggcgaggtggtgaccagtgagatgggcgatgagctttgccgggggcttcctactgaggaagtgcgtgagctgatcgagcgtggggtcgtccccgatgacgtgaagcttgtcttcctgacgcattcgcagctgtcgcatgctgctaccccgggcagcaaggcggaatggatcatcaacatgtcccgcggcgcgatgctgctcattgatgagtcgcatctctcggccggcaccgacagccattgcggccggaacttgcgcgcgatgcgcgataacgcgcgcgctcaggtgttctcctcggccacctttgcgaaggaggcgaagaacctgtcgctgtactccaccaccgacctgggcctgattcctggtggtgaagttgcgctgctcgatcaactgcagaggggtggtgcggcagcccaggaatccattccggttcttttagccgaggaggggcaatacgttcggcgtgaacatgacctgagccaggccatctatcgaaacctcgatgccagtccagaacactttgacgccattcgtgagcggatggatgcgatttctcgggctctgcggcacatgctcgccgtgcagtcgatcgtttcgggtctggcggcacggtacaacacgggcacgagaaacccgggtgagactgcgatcgaggccgccggccgtacgatcggcctgcaaagtaaccatttctcctcgggcattcaccatttcacttcgcaggcgctgctggcagtgcaggcagatgcgtttgcagatgctgcgatcgcctcgttgcggaacaacgagaagccggtcttcatgttcaagagcactatggacgccgtgatcggcgacatggctcagatgctgatggagcaagacatcaatcccgagggcgctcgcatcgagaccagctttgcccaagtcctgcgccggatggccgagcgtgcattgaaggttcggttggatgctcgcaacggacggggcactttcctgatcaacctgctcgatccggtggcgcagatgccgcgtggtgcgcgtgccaacgacgtcttcaccgcgcttctggatcgtgtccagctggacctgcagcaggagatgatcgcgttcgagcaggcgctcgaagccatcccgaatgatgttccgctgtcgccaattgaccacattcgtgagcgaatcgaagccgctggatactcggttggcgagttgaccggcaggacttggaagctctcgcgtatgagcgccaccgagtatcagctgaatcgccggaccgatgggcacaagcgtcagcggcaagggatcatcaacgcttacaactcgggagcggcaaatgcgctgttgctgaacaaggtaggtgcaaccggcattgacctccatgccgacctgcgcttccaggaccagcgcctgcgcaacatgttcatggtcgattttgacgatgacatcaacgtggttatgcagaccatgggccgcgtttaccgggcgaaccaggcgcaaccgccggcatacagcatgtggaactcgccgattccggtgagccgccggccgatggcggtgctgcgcaggaagttggcgaacctgatggcccaaacgcggggctctcgtgaagtcgatgcggccgaccaggtgccggatctgttcaactgggttggcgatgaggttgctctcgactacctccgcaacaacccggacatcgcacggcgcctggatatcgagttgggtcgggaggaagagcgtttacgaaacgggaatggtggcctggtcaaccgtctgacggggcttgcactgctgctgccgtgcgatgcccaggaagacctcttcgacgatctggaagacgcgtacgtcaacaaaatcgagtctctgctgtcccgcggcatttcaccgttccatagccggcacctggacatcaaggcggcgatggttgacgaagtggaagtcgaggctcggtctggctcttcggtgttccaggcgccggtatcgctgcgcaaactgcgctacgagatcgacgtgcatgcgttccgtagcgacgagctcgcgcagatcctggagcgtaaccgagagaatctcacagtcgccggcggcgcctcccaggaattcggcgatcgaccgctggaggtcgtgttgaacactgttcgggcgaccctgcgtgaacggcagcagcagaccttcgacctctttctgcatgagcgcttcggctcgattgaggaggccgttgcctcggagcacgacaacgcggtggccaagtcggagcagacgctcaacgcattcgagatgattgcgccaaacctgcagattggcgcggccgttcaactggatgttggacgtgacgcccctctggtcgccaacgtagtcgggatcttcccggcgcgcagttcgctgctgcactcgctggtgtcctgggaggtgcagctggtctccccggacacggaataccgttcgttccgtaccggcctcgatcgcttggtgaccgatgccacgttggtgctgcagcgcgagaaagcgcagctggccgagggcgaggagttcacccggaccctcgctgatgtgatgtttgttcccgagttggacctgccgcgtgtctatgatgccggacacccggcttaccagcgctatgaccaggctgccagcggcaagctggaaatcgagcggttcatgctctgcggcaacctgctgcgcgcgatcgaaatcgcccgtagcgagtcgaaggggctgccgtgctcctttaccctcgccgacggcacccgcgagcagggcgtgctgatgcccgccgactacgatggtgttgccctcttgcgccgcccggttgtgctggacgacgccgagttggcggtagtggtcattcggcgcatgcatgagcgcaagcacgcgaagagttaccaactgccggtggaggttcgcgattcggtcgtggagaacgccaggcctaccttggaatcgcggctcagtgcagccgacttcacggtgaaggtcaccccgacgggagacaattatgcgattgaactgcatgttccccgggcgcagcgcaagagtggatggctggtgaaggatgctgaactgaaagatctggcggccggtgctgactgggaaaaggccggcggtgatctgaaacttgccctggtgcggttctccctgaacgacattcgctccggccgcgcggtgggcctgctcgatccggttcttcgccgcctcactgacctcggtgtctcggtgaaaacgccggagaaactgcgcgaggcgcgcgagtggaagaacgagttccttcgccagcgggccgcggagcctgatcttgctatcgcgcctcaggcgcccgagttgggagcgtaa

SEQ ID NO: 326916 - DNA, 504 bp, Pseudomonas aeruginosa
atggccaagcaaccgaaattgtatcggctcctgcccctgttcaagcaccaagaggcgctgatgacctgggggatgatgctggacgaggtgcggtaccgccagttcgcggatcttccgagcggggtggcgtggcgtcagctgatggccgaggaactcgggcgcctgttgcagatggcgctggacgagggggcaatgatgcccgcggatctcgaccagctggcggagacgtacttgccggcaacgaacgtggcgctgctgccgggcgggtcgttgaacccgcaggagctggccagggcgctgctgaaccaggagcgaacgatcgaaacgccggtcgggatgatcgaggcgtttctcgacgccaacctcgccggggacgaccagacgatgagcagcttggtcgaggcggcgaacaagaagtacccgccggaggcggaactgaacgacaagatgctgttcgagctcgaacccgtcgagcggatcggaaggatcgtcagcaacttataa

SEQ ID NO: 326917 - DNA, 222 bp, Pseudomonas aeruginosa
atgattcgaaagcttgtcttaccagccctctgcttcgttgccgggatagccacgaccttcggcctgagcttcgccaaagatgccgtagcacccgctccggagacctcccgcgcgccgatccaggctccggcaattaccaaaaccctcacctcgatcgatcagtccagcacctgccattcgctgacgcgattgaacatccgcaagtccgacaccaaggagtag

SEQ ID NO: 326918 - DNA, 960 bp, Pseudomonas aeruginosa
atgctcaacagcaagaaatggctagccgccaccctctgcgccggagctctcagtctcggcccgcaaccagcatccgcgagtcaggacaccgcaatcctgatgaagattctcgcccaagcaattcagacgctcctgcagctgcaggaactcaacacgaccacggacgaaggattcgacaaaacccaagagaagatcatggaggccgcagagcgcagcacccgggcaatcctcaacggccagatcgatatctacaaccgagaagcgcagcgcgaccaggaggccatgcccttctgccccgctgaccaaaccttgccaaccgaaatcggcaaggccaacacgcaaaccacctacaaccgttcgattggctcctacaaccggcacaacagcccccaggccacccgaaatcctgcgaagttcacagctgagaagaaccggcgggtggacgacgtaaccagccccagttgcaacccgcgcattccggcagaggtcagcaagaacaacgtcggctcgggctcgacacagcaggagtgcactccagaacagatcgacgtcatgaccgatatcatcatcggccgtgacccggtatcgatgcccaccgcccagttcaaggacaaggacaccggcgaatacatccagaaagaaatcgacacctataacagccgcgtcgccctcgcagaatcgggctttagctcaaccgtcaccgaagagcaggatgcgctgattgcgtcttacgagaagctcctcgcctcccccaccgtcgatgagatcaacgaaatggccggcaagggcgcggtcgagcgctcggaatttttcaaccagcagatccaggggcagctacaggttcaacagctgaaagaaaccctccaggtcaaacgcctcctctcggtcatcgtcgcccagggagaagagcggcatcgcgagaagatcggcgaactcactcgtaacgctccgaaacaataa

SEQ ID NO: 326919 - DNA, 498 bp, Pseudomonas aeruginosa
atggccgtctccgagcttaccggcaacgtacgtctgctggcctggctgatccgcaccatgaaaggcgtggtcgatgtccggctcgatgaggtccgagcgcaaaaagaactcgcgaaggtggcccctgaaaccatgtggtccgacatgatccgcgacttcgagataaccgagggcacccttcggcgcggctacaggatcacctactggacagacgttgccctgcttatcggcctggcgatcagcgtcgggattctcatcgtgaacttcaacatctcggccacctcgatcgccaacgtgttcttcgccaacctgatcctcatcctgcacgtcatgcagctccatcgcatgtacatagcccgagaacagcgctgcatctctgtcctcgcccttgccaagcaggtctttctgcacccgagccaattcctaccccttccattgccggaaggctacaaattgcggtcgccttccccgccggcgcccgacgtaaaggagggatag

SEQ ID NO: 326920 - DNA, 2271 bp, Pseudomonas aeruginosa
atgcgatcgctttctgtgctcgtcctcgtttggctgtttggcacatggagcttctccgatctccccgatggcgtggccagcaccgccaccgcggtgacgccggtgatcatcttcgccagctacttcaccaccttcgggttgatgctgatcggcatgctgatcagttgggccatcttccttgggatcttccgcctcagggccaacggcaacttcttcggctctcgcgataagaacgaggccttcttttatcccatgcggatggtcttcggcatgctgctgtgtgcccccgtcatcccagtggcaaccattgccggcgaatcagtaacgcttacccctggacacgcactactgattggcttgtcgaaaaccgcctccacctacggggatatcgcccaagcgtactcgttcaagctgatgtacgagttcgacctgatgcatgaccccgacctcaatatcgcggtctccgtcccggcagccaccgcgcagatctcctcctggtacgtgagcgcggccagcgtcgcctccacaatcaccttcaagaatccgcaagagaagttccagggttctggcaccgcagacctggcaaacgaagtattgaaggcacgatgggcggctgcacgcccctcttccaacgtcggcgccgacgcctggttgatcgacgtggctcgctccgccaacgtaccagtcatcccgccggccggcgtgcagagctccggcgagactgccggctcagggatgactgaaggcaccgcagttgaacgccaactcagcggtcaggactggctttgcaaggccacccagaacaccagcgttctcgggatctccaccgaatgggccgggagctgggcttgcaccagtgaatacctggctctgaaaaaccagtcgtctaccgcaatcaatgaagggatcgccgaggcgcagcgcaatgtctgggccggcgtaatggccaccgccatgtcacgcgccgcccaagtccgtgacggtaccagcaccgaggacaaggcctcacaggaccttgccaaccagaagtacctcaacgagctcggtatctggtacgcaacctatctgcagcagatgatccgcgagaaactggtagcagagcgccgcgcgatggccgccccctactacgcacaaatgtcggaatggggctggatggcaggcggtacgtttgtgctccgcgccgcaaacgacttcgggcgggcccagtcctatgccgaaggtgcaaccgcaatgctggtccctaccggctcgctcgccgccctgactcctggtgacgatcttgctcttatcgtgcagaacgaggcgatccagaacgcagacaaggcttccgaagatggtttctgggcccaggcaaaatccatcatcgtcaacgacgtgctccacttggacatgctgctcagcgcagatccgtcgaagaccaacctgggaaccgtcacttcctggggccggggcgtcgcgggcactggaatgggcttcctcgctgccggcagcgcaaccaaggctgcgggtgcgatcaccgacaaaatgggcaagtcgccgacccccgccggcctgatgggcaaagctgcggagctactgttcggcaagctcggtaccgcgctgctgatcattggcctggtgctgctgatcgttggcgcctttgtcggctacatcctacctgttgtgtacgcggtgttcggattcatgggcgtcgtctcctggctgaccttcctgctcagcagcttcttcggcatcaacctctggtctgccgcgcaagcagcccccaaaggggaggagcactcatcccagatggcggccaagggctggaacgtcatgatcttcatcgcgctgtacccgattctcgccgtcggcggtctcgctgcagcgatcgtgatcaccggcatcggccttcctctgctgaacctcttcatgtcgggtatctgggggatgttcgatggcggcccatcgggcggctggggtgaacaggccgccggcttccttctcggcggctgcatcatggtcgcggtattcggcttcatggcctggtcgttgtgcatgaccgccgcgcagctccagaccaacttcccgcggacagtcctcaacatggtctcgttctccgagccaggcctgagtccttacgagaacgtcagccaaggcgtgatggggggcatcaccggcatcgcccgcggactcgtcgtccagccgatctcgatggcggccaggtcgaagatcggcgacctgctgcgccgcggcccgagcaaccctcccccgggcgcccagggcaccagctga

SEQ ID NO: 326921 - DNA, 699 bp, Pseudomonas aeruginosa
atgctaaaagatgaatcacgtgctgatgcttcttcgacgaagccagcgatagaaccaccggccctggagggcaacgacatggaagctactctctctcgcaaagcagttcgtactactcgcttcggtgatgttgtacgttggatgctgttccccgcggcaatgatgctgcgcggcaaaaacgttgctcgtgtgccgggtgtcaccgacatgcgtatggccggtttcctggacttcttcttcggtgtgccgaacaaggcaggtgcccgcgttgccttctggcgtcgttggccgctggccctggctgtgctgtctgttgtgcagaacgcctgggacaccggtaaagcatgcgcaagcatgtcggtcagcatcctgggtggcagcgtcttcggctatctgtttgccgttccggctgctctgatgggtggcatcgtcggcgccggcgtcgctgtcgcagcgatggttgcttccctggcgtggctcgtcagcgttggccttctggcttttgctggctatgccctggtgatggcggcagtgactggtgcttccgtaactgccggtggcggttttgctgtagtgctggttggcgctttgctgtgctggggtgttgcgcaagtgggtgtggtagttgctactggcgttttcctgcgtgtcggtggcgaatcctccctgttcggcgttgacctgaaagtgttcgagtaa

SEQ ID NO: 326922 - DNA, 855 bp, Pseudomonas aeruginosa
atgaagcggagaatttcggagtcggccctcatcctcccgttcatcaagcgctgcttggtcaaggaccggagcctgctgctgcccgggcgagatgagtgcgaactcgacgtgagggcctatgccaagttcaaagggctcatggagtcgatcggcggacgttacgtgctggggcaaaatcggtttgtctttgacttcgatccctcgggtcttgtcgccagattgggcgaaggcgagaactatgcgcgaagcctgcagttctaccccacgcctcctgaagctgctgctctggtcaccgatcacctgcagattggacgagaccttcgcatcctggagcccagcgccgggcgaggagcgttgatcgaggcgatcttgcgcaccccaggcgttgtgtcgccggcgatcgatgcatgcgaaatcgatcccttcaaccgtgagttgctgtgttcaaagggggtgcgcctggttggagatgactttcttctatataggagcgcgcgcgatcggaaatacgatgctgtggtgctcaacccgccatttcgcggcgagacctacatgcggcacatcgagcatgcctacgaacacctcaagcctggtggccagttgcttttctatgcgccttcctcgtggctggacgcggagcgcgggagccgggcggcagcgtttgcagattttgtgacctcccgtgctggggtgatcgaggacctggggcgcaacgcattcgccgaatccggcgtccgtatcagcaccgtattcgtttcgttacatcgagagctctgggacttggattacaccccagagtcattgccggtagagacgtctgagagcttgcctgatacttttcagcttgcctcataa

SEQ ID NO: 326923 - DNA, 2187 bp, Pseudomonas aeruginosa
atggccaacaccaccgtcgtgctgttcgagaaaccggatcaggcccgtaaacacggggcattcatggggattgcccaacaaaacagaggctatctcgtcgccaagaacggctggatcttgacccatgctatcggtcacctcgccgaactcctggagccggacgaaatttcccctgagtacaagcgctggacactcaacggcctgcccattcgacctggagagtggcgctacaaggccgtcgcggagaaaaaggagcagtacaaggtagtcatcgacctactgaagaaagccgacgaaatcatcattgcgaccgactgcggccgtgaaggtgagctaatcgcccgggagttgatcggtatttctggcaataccaaagcgaagctgcagcgcttctgggcctcttcgctggacgaagaaagtctgcgtaaagcctggaatgcacttcgcaacggccgggagttcgacgggctatatctcgcgtcgctcatacgtcaacgctgcgactggctgtggggcatgaacctctcccgagcagccaccttggcactcgctccgccgaaggtcgtgtatccgattgggcgcgtgcaaacaccggtggtagcactggtcgtatggcgtcacctggcgatcaagaacttcgtgccgaaggactacttcgagctcagcgcaaccatcgcgacccaaaaaggaacgctgaaactgcggtatgcaccgcgagatgatgagaagcgcatcaaggaccggcccagcgcacaagctatggccgatcgcgccaccggcgcaacaggtcccctgcaggtggaaaaaaacaccaggaaggagacgccgccgccattcccccgcctgtcggatctccagaaagaagccaacagacgctggagttggtcactcgacaaaacgttggacgttgcccaggagttgtatgacgcggagtacgccacgtatccgcgaaccgattccaccaagatgcccactgagcaaatcgactcggtagtaccgattctgcagggcctgattcagaacgggatggtcccgccgctgtcggtcaccggcacaaaggagcctatatatcgcaaggatcgcttcgtaccggatgccgtcatccaggaagagtccgagcaccatgccatcctgcctacgctcaacttccccagcatggaacgcctgagcgcggaccagcagaagctctacggcatgatcgccttctggttcatccgtgcaatatcccccgactatgtcttcagcgagtgcgtcgtgagcatgaatgccaatggtgtcccgctgaaggccaccggcaagactccgctgcagcagggcttcaaagcattgtcgatgaagcacgctgcagatgccgatgctgaacaggagcctgcagcggaagaccaaaacgccgtattcccacccttggataacggcgaccaaggacgagtcgataaggtggagatcgaggcgaagaagaccaccccgcccgcctactacaccgaggccagcctcctcgacgacatgatgtccatccacaagttcgtcgaaaacccagcctacaaggcacgcctgaaagaaaagtccggcctgggtacagaagccactcgcgcggccaccgtgaaagacctgcgcaagcggaagctgatcatcccccggggcaagaagcaaatcgatgctcctccagccaccatcgccatgatccagcgcctgcccaagcaactggttgacccaggcctcaccgcagtctgggaagactacatggaggaggtccgtcatggccgggctgatttcaaccaggtgatggcagcgatcgagcagatgatcgccaaacacgtgagcttcttccagaacctgggcctgaacgaagagcgcgcgagcaacgacgccaaattcgaattgaagctggagcacaacgggcacaaggccaactgcccggaatgcagcaagcccatgggctatcgcgaaggccagtacggcggcttctggtcctgcagcggatatccagactgcaccggccgtctgaaggccgacccgacgggtaaaccccttccacctgtgcagcttcagctcggggccatgtgtcccaaatgcaagaagaagccgctcgcgctgcgtaccggccctcgcggccagttctgggcgtgcaccggatttccgaagtgcaagcacacggaagaggttcccgcgggaacgaagaccgcttga

SEQ ID NO: 326924 - DNA, 678 bp, Pseudomonas aeruginosa
atgtcggaccgggcaagagacatggtcgtgcagatcctctgcgagaccaacagcggcatgcgtgccgccacggaacgggagcaggagcagtaccggaagaacaccggcaccaacttcgacctgctgacggtaaacgaccgacctggtcatgaaagccacattgcgaggagccagcacgcgagctacttcgacttcgatcggatctcgcgctacgaccgcaactggttcgaccagaaactgaaggatctgccgaacggccaaccgctgagcgacctgtactccggccgcaccccggatgaccctatgttcaagaaggcggccgacatcctgcgcagctatgctccgcagcatgtgaacgcctttatgcttcacgccagtgcattcaaggggttctccctagcaatggccggcgatttgatcgaccaggctgcgtttaaggacaagagcctggaaccggagcagtacgtccagctcaacacctacctgggcctgctgcagagcaaagaatacgcgctgccggatgcagcgaagcacatcatcagcgacgaccagttccgcatgctcctgaccgacattgaccaggagatgcaggctgaagtcgcttacctggtagaggagctggatgtcgaagagatcgacctcggccacactccaccaccagggcggttcaacctgtaa

SEQ ID NO: 326925 - DNA, 624 bp, Pseudomonas aeruginosa
atgacatttcacattgagccccggcgcgagcgccaactcatccaagatgcagttaccaggctggcggaggcgttcaccttctatcttggctgccgtggcgcgacaactgaatcggccaagtcgctcacgtgcaaggctgcgctgcggtggggctacgagttgatcgagatctacgcgccgccggcggcgctcaagtccactcggaccgcgatcgctgctcgctttgcgatccccaagacctctgcacgcatcgttatctgcgccgcaggtatcgccttcactgaagacgaccaaccacggtacaccaccaaacgaggcggctggctcgaatccaaatctaacgactaccaatcgtgggcgatgaccgtcgaggatgacgagccgctctacgagcccttcaaacatctccatgcagccaaggaatctctcctcgtgaacgaactgcaacgccaacgcgaaatcaacgagaagctcctggccaaccaggagatggtcctcgcatccctggaactgctcttggagaagaaactgaacgcgagccgccaggccttcgaccaggctgcagagggtctgcgcgagctcaaatatgccgtccgcgggatcgagccgcgcaccctgaactga

SEQ ID NO: 326926 - DNA, 240 bp, Pseudomonas aeruginosa
atgcgcaacctgctccagcacctggccaatctctgtgcaatcctcagctgcgcgatcacggtctaccagctgctccatccggcggcccccggcgcgttgcctacgcaaacgccggcgccgctgtatgcagcagccgtggagtttaagggggtgctctaccggctatccggcttgtggtcgccggatgttctggttctggcgtcagggtcgggccgtcctgtagggacagatctgacgtaa

SEQ ID NO: 326927 - DNA, 312 bp, Pseudomonas aeruginosa
atgcgacctggcgacgcgatcccctgccgctgcccgaagtgccgcagcactgacctgacgctgttcgagcaattcaccgtctgcgacgtgatcaccgtggccggcggcaagatgcaggatcgccacgccggagagttcccggagctgactgggcgcgtgtttggcgagtgcgccaatccggcgtgccggcatcgctggcaattccgccggtcgcccctgatggcagcctttgaagcggccaacgcgaagccgcccgtgtcgcataacggcggattacgtcagatctgtccctacaggacggcccgaccctga

SEQ ID NO: 326928 - DNA, 381 bp, Pseudomonas aeruginosa
atggcaaatgagaatgtccaagcctctctaggagagcgctacaccgacgccgagctgcaaaccgagaaagtggttgctctgactcgcactgatctggtgatcctctcctgggggcacgagagcgtgtccttcgtgcctggtagtgaagaggctgcggagtttgccctcgctgagcgcaagattgaccaggcgctggagcgtagcgcgatcgatgctgtggagcaggtggccttgacgctacaagacttgctcatcctcagttggggtcatgaatcagtttcgttcgtacctggctcggattccgcagctgagtttgctgctgccgaagccaagatcgacaaagccctggatgagctacgcaaccagctcgctgccaagtag

SEQ ID NO: 326929 - DNA, 195 bp, Pseudomonas aeruginosa
atgggccacaagttcacgaaggtgcttttcgcagtcgagcatgacggtaaggtatatggcgttcacctgcctgccgataaatttgagcagctgctggccgaagcggcgcgactctctcccagcggctcgcttgagatgtaccccatgccgaaccaggggttgttcaccctggcagtccagaagtccgagtcgtag

SEQ ID NO: 326930 - DNA, 153 bp, Pseudomonas aeruginosa
atgactggtatttccaagcagggctgtttgacgctagctcgttataacaatcgcgagatggtccgtgcccgcaaacgtggcgactggagcatggtgctccactcgcgcctcatgcgcgacagctacatggccagtgctcgtctcaactgctga

SEQ ID NO: 326931 - DNA, 132 bp, Pseudomonas aeruginosa
atgaagctgattgagtggatggtcgataatatcgagcaggccattgtcgtgtttctggtccttggcatgttcgtcattgacgcggtgatgctctggcagattcaccacgatgctggacgaccgtttctgtaa

SEQ ID NO: 326932 - DNA, 231 bp, Pseudomonas aeruginosa
atgtccaacaagtacacagttacctggagcatcgatgtcgaggtcgatggcgattacaaggcggcggcccaggccgtggctgatcgctattttcaaccgaacattgctgctggggaccacgatagcgcctgctcgtttgtcgtgaccgcggaggacaatgtccctgtcgatatcgaccttgcggatagcctttcggacttggacgacgacttcggcatggcattcccttga

SEQ ID NO: 326933 - DNA, 222 bp, Pseudomonas aeruginosa
atgggaacccgcagaagcattcttgaggatgagacgatcgacaagatggacgacacgctgcgcgaggtgttgaccgaagtagcggcaggacggatctcggttagcaaagccttgaccggtatcagccatctgatccatgccattgatactggtgagcagagcgagatcaagacctgggcggagtgcgcggacgggtatcgatctggccaccctgcgagctga

SEQ ID NO: 326934 - DNA, 300 bp, Pseudomonas aeruginosa
atggctgtcggcgccgccggcctgatccagcaggctcgacgctggcagggatggtccaatttccagggcctcggcatcctgaaggtcaaggacgattggcgaggggaggagggcgctggtagatggcattgggttactgccttccgtcaccctgaattcgagattgtcgtattcgatccgttcatggagttccccgccttcaagcgaatgccgctggacgagttgtgcactcggtttgacctctacgagccgaagggacaatggctgcaggtcgagcagcggttttcgctggccagctag

SEQ ID NO: 326935 - DNA, 288 bp, Pseudomonas aeruginosa
atgatgcgcttcgccactctggttctgatgatgtgcttggccgccggttcgccggcggttctggcggccggccagaaggctggcgttcagctagatccgaagccgcttgccgatcccatcggaaagactgccggggcgaccggcacggaactgaccgccgacctgcagaagcaagctaaaaacctgcaggaggacaaggtccagcggttgaagaagcagatcctgagcaatatgaaccgggatcgtgacctcgatcgcctggcgccgtatctaggaccggactactga

SEQ ID NO: 326936 - DNA, 1407 bp, Pseudomonas aeruginosa
atgctacgtcgtactcccatagctgaaattccagactttggtgtggacgaagatctggtgatcaacatccaaccggcggagccggttgcacccgcggcgaaggcagctgtccacccgattcctcgtgactggcagggcgatgcgtgtcgccagttcgacgaggaaatggaacagcgtatgggggggccgtatgaccgggctcagatggtattccgaaaactcatgggtgcagaggagcggattgaggatctgcagcgagatggcagagccctgaccgatgcagagcgcgatgaattgcaggagctgacctcttgggttgccgacacgaagctttggctgcatgagaacgtctacctcaatcccctcatcaaggaaaaaatgttccctgcaattcaggcgcgaacgatcaagttcagtcccgacatcgtagccttcctggatgagatgaaggcccgtgcgctgcagggggtgactcaagcagccgcgagtaaggctgcgcccccggcgagcaccaatctggctcgccatgagggtgtcctgctggagcacggcgccgcccactacaacttcgacaagacggagtctatgagctactacgccaagctccaggtcggtcaagatgcccgttacgtatggggtgtcgatctggaacgaggactgcaggctttggcgccggaaatcggtaccccgatcgtgctgcaatgcctcggcaagaacgatgtgcttgtgccggttaagcaatacgatgccgagggcaacttcacaggcacgaaggaagaaacggtgaatcgcaacacctggtccgtagccgaggcggcccagccggaattggcgaaggtcgccgaggccggcggcgagttggcagggcaggccatggttgtgggggtcgatctggacgcgactgaattgtcgttgacacgcctgcaggtccaagggcttgacgcagcgccgggggctgaaccggatgcacggacgaaagaagagaagcgtaagcgcctgttcgacgaggcgttctgggaagactgcaaatcgatctacctggctccggcggaaaagggcggactgcgcaccgacatccagatcaccgaaacgacggtgaaattcatcctgggcaaactcggtcagatcgatctcgacacgcgcgacaacaccatcggtgtgcgtggtcgtctcgatcctgtgcaagcggctatggccatgatcgagctggcccagaaagcggggtggaagaccctgagcttccatggcgacaagcgcttcatggacgtagcaattccgctggcggagaaggcaggcttcactgtcgtcgatcaggccaccatggctgagatgcttcgtgtgcgttccgatgagaaaaaggcggagaagggagacgagatccccttcgatcaggggcccacgccatga

SEQ ID NO: 326937 - DNA, 2073 bp, Pseudomonas aeruginosa
atgcgtactgcgtcgatgctggtgtacaagtctccgtcctccggtcgagcggaaccgcgccttgcgctggtccgtccagcgagggcggctgaattctttgacgtgcgcgggctcatcgagatgctggtggacagggttcggggtggcgtgaggtacggcggtgtccagtacgtcgctttgctcaacgaggatgtccagcagcagctgcggctgaaacgaaatgcattgcacgccaccgcgttcattgggcagaaccagcggcagcaactgctgcaactgggcgataagcttgattttctgccccctgaccacgccatcccgaaggaatggcttgaagatctgacgcttcccttgccagcttggccggagcgaaacatgccgggcgctttgctgttggcagagcacgcgtttgccgggaaagggactcgccgagcgagggatgttatcgggctgacagcgctggcgatcgacctggatattcacaaattgctgcaggggtcactggaatcacaggatgatccgctgggaattgctgcggtggcggcgacgggatacctgaaccagcggggagacgctgcggcgcttccgcatgaggccattgtgtgggagcggtccaaaggggggcgcccacgaaagccaatggcgcacgagccggcgtacgaccgaacacatccgctggcgggtaagccgctctacgaagcggcggcagggcgatggaaagccttgccgacggagcgctctgaagccgcgctgtgccaactcagaaacgaccgcgcggcactgtccattttgcaatgcgatccctacgtacaggctttcattgctcgctacctactggagctgctcgacacctgcggcctctcaccgacctgtgtgacactttcaggccgtgggctccaccttcggtggcgcctttctgaatgggttccagcaaacgcggcaccgcgctgggagctgatgcagcggatgctccactggctgttacgctgggccggctcggatccaaacgtttcgaccgaccgtgccagggctttccgggttcctgggaccatgaatgcgcgctctggtacccggtcgcaacggtatcgtgcagtgcccggctcccccttcgctgatgtactccgtgatccctggttgttcgaggatcttgccgacgtactgttcagcaagaccaggcacgagtgcagggcactcatgaatgcctggcgtgagcgaaaagccaggcaagcacaactcgcgctggaacaggggccggaccgcctggtacgaaacaccgccgcgggaatgagggtgatgaaccgccggcgtctggaagcgctgaagtcactcgcgctagcgaggggcggggtggtcgagggataccgacaaacgttcttgtggatgaccagctgcctgattcgaagtgcgttgcctccccaagtcagacacaaagtgttcgatgactacgtttgctgtctcgccaagcccttaccggcgagagaagtccggcaactgcatgcccggttgaatgccccgaatgagcccagaaactatcgcatttcgaatcggctgatctgcgagacattggcgatcacgcaggaggagctacagcagttcccagcgttgagcccagccgagccagatgttggcacttggaaacgagtcagtcgtcaggaggctctgaaagcgcttttgcaggcgggcatcgcgacacgaatcatcgaaaagatcatgcagtacaagcccggtaccgtacatgttctgactagccggctgtacgccaaaggcgttctgagcaaggctcgactccgtcttgccaggctgcgttggcaggccgcggcgaagtcgccgagccagcgatccatcagcttcctgacctggcgcaggatcacctatgcggtggctggagtcggtttggacctgatgcgatggatcgcaaacgccgtacaggttccccggtcgccaccgatagttgcagatgacaaacgcctacagaaggttttggagcgagtgacaaaagcgctcgccaattcaatggaacaggccgttggcctgatggagcgcagaaatgctacgtcgtactcccatagctga

SEQ ID NO: 326938 - DNA, 3018 bp, Pseudomonas aeruginosa
atgagcttcctctataacttggcggagctgttcggaacgttcagctcctcccagattcccatcaactcgatagtcaacaacgatgtcgtcgagttgcactcggggttgggttacatgagcgctctgcgcctcaatggctccctggggatgttcggcccacgcgagcgaatcagcgcccatgagttccttctgaccagctgcagcaccttgctgaaggaccagggccagcagctgcagtgggtaacggagaacaatcccgatcaagcacggcgcgatctcagagagatatcccgtgtttcgcgcgaaacatggggccggttaaacgtgaacatggacgttattgctcgcctgacgaaggacaaggaggagcgcctggcagcggtggcgactcgggagaataatttcctgaccgtgacgacgtccttgtccgcactgacacggcagcagcagaacgttgatgcagagaatgctcagcgcagcctcggtggtttgaagctcaagttgagcgatttcacccagatggcaccaacgcagaagcgcacgttgctccagcggcacatgagcaacctcggacagctgaagcagatcatgcagtcgccgcagatccagcaggtcgttgatgaggtgtcggctcatcagttgatccaggaagtacggcggctgttgctcccctatgacactccagagacctggcgccccgcagtgcagggacgaggagcacacttcagtgtgcaaagtcgagctgacgaccattcgcggctaccgcatctcagggaccagattctcccgtatccgatccgccaggcaggggatggcgtactgatggtggggcctaacagaaaaggacggtactttgcgatcgcctacatgtgggttcaccctggaaaatggatggctgcggacacgctgatggatggcatgccccgcgatttccattggtggacgtcgagcacgtgggtaggtggctcggacaagtggaggtcgatcgttcgatcgcaccagggcgtcgcgcaatcgctgaagatcctcagcagtgttaatgcagacatcgccgaacatggcaggaatctgagcactatcgcccagcatgagaacctctgtgggtaccgcatgcaggttgttaccagcgcagaaactgccgagttggcccagcagcagatcttcatcctgctgagccaactgtccgcatggggtgggtccctgtggcggcaagacgttgacgatcccagcgagaccctcaagcacgctctgcctggttgcgatcgaatcaccagctacgccggccagaccttcgctgtccccaccaaagacgccctggtgactatgccgtttagccgcccggggagcgcatgggcgcggcatctcagcggctcgttgatgatgctcaccgaggcaatgcggctctacgcgtacaagcaggctgcaccgggcctgcaggattacgtgtctgacctgctgatcgcaccgatgggtggcggtaagtctgtgctattccaggccatcaaactcgcgatgatcgagggctatgccagtcacggactgctcccgcggatggcaacactggacattggcccatcatcgagtgggctgatcgacctgctcaaggcgatcttgcccaaggacatgcagtggcaagttgagttccggaccctgagccgtgactcggacgacagctgcatcaacccgttcgatacgcagctgtgtgtgtggtggcccacgatcgaagagtacaagttccttgagaacttcctcgtgatgctgttcacctcgcctgagcgtgacgcgccgccggaaggcatctcgggaattattccgatcctcatccagaatgcttacgagaagattttggaggacggaggtactcgactgaagcaatacacgccagggttcaagggctatgaggtgatcgaccaattcgtcgaagatcgaggactgaacagcgaaaagaacctctcctggaaacatttggctgagcggctctttgacgcgaggctgtatcagttggcggagtacgcacagtggagggcgatgccaaccattcccgacctctcggacattctgtcgagtaccagggagatcacggacttcttcggcaagcagatggtggaagggctcggtattacgacgatcgagtacatgcaggcgatgcttgtcagtgcttcgagaagcaagctctacggcggcgcgacgacattcaggaccaacgcccggataaccgcgctggataacaaccaggttgtctcgaccaccggccgggtgggtattcgtgaatccggcctgattttgctactgggccgacacgctcttactcggaagtggtggatcgacaaggacatcctgcagaacctccggtgccgtcctgaggtgttgcgctatcaccatgaagtgtgggagcgcgagaagacgatgccgtcgcgcctggacgttgacgagtaccacatcacgaagtcgctgccgccggtgcgggcacagttcaagcgagatcggcgggttatccgtaagtacaacatccattacggtatcgcatcgcaatctgacgaagatttcgatgccgatgacgctgaactggcatcgacggttttcttcctgaaggcacccagcgacgaggccatccagcgtatagcaaagcgctgggggctcaagagtgcagcaacggccgcgctgcgagacaaggtccgcggggcaacgagggcaggggcccacatcctcatgtgggcgaacaccaaacgcggcacgttggcgcagtacctggtattcccattgccaccgatattcctgtgggcgttcagctcgacgtctgacgacgtgacggtacggcgacgccttgttgagcgcctgggctacctcaacgcgctgttgaccctttcgaagcagttcgccggtggatcagcggaatcacggctggaggagctcaagaacaagcactcggatcagccgccggacgtggttatgaacatctttattgacgagttggaaagctattaccacgagaaccgtgaggcgatccttgccgggtag

SEQ ID NO: 326939 - DNA, 204 bp, Pseudomonas aeruginosa
atgagcaaagaaatgcatttaaagacacaagaaagcatcatgaattgtgttcttaagcaaaatcttctgagtcagctgaagcgtcagcgcgaccccgctctgatcctccagatgaacgagatgaccaatgcagatcgccccgccattgttgatcggttgaacgagctgctggaaaagacacaggaaaacgaggagggcgcctaa

SEQ ID NO: 326940 - DNA, 1158 bp, Pseudomonas aeruginosa
atgaaccaggcaggccagttcccggttggggtggtcattttcgacgaaagcagccagcccatgacctctgctggctacgcggtgtcgcagcgcggagctcgtcgtatcagtcgggtgaccgaccttgaatcggacaccatctggtggacgagtgtcagttacgccgtgttccggaaggagcggatctggcagcacccgaatatgcggaatgatcagctgttccgcattcccatgcagagtgtgatccacgagctgggcctggcccactcctctcaccaggagcaagcggaagctctcttttctgtagcgcagcaagcgctggcgttcctggccaaaaactacgggtaccagggggcagggttcgcccgtttggactggttcctgtcgcagttgctgctcaagcccgggcgccgactttccggtccgctcgctccgttgctgacagctgccaggaatgcgcatgagtatgtgaccgcctcgatggccgggggctcccaggatgcgatcgccaggacgtatgttgctcctcggacgaactacctcgactcgctgctcgacctgcaggttccggcgccccaggcccgctgggaattcgtcaaggtcggcggcgtggtggacggcgatcgcctcatggaaataggtggcaagggggccctggtcgagctttcggttgctgatctggatgccgatctggggatggttgcgccgtttgccgctcgccagacgatctcgtcggagcctcgactttgggcgcctctgcctgaggcgatcttctatgcaaaccagagtcgcacagagatccgaggtatctgggtttgcgatgaggcgtgccaattgcgtgacatcgtggcaaagccggccccccgtaacgacttctccttctccgctgccctggttgccgagaactacctctatgccttgctcggaacgacgcgaggggaggccatgagcaatggtcgtgagccgattgcagcttacgtcgcggcctacgaccgactgatgatgattcagcaagccaggcgggtatacgacctgggctacacgccgatgtcgtcagcctgtggtgggcgccttgttgtctctgtgccggcggcggcaattcaggacttggacgaaatctgtacgaaccttggattcgagccccccgttaccggctaa

SEQ ID NO: 326941 - DNA, 1131 bp, Pseudomonas aeruginosa
atggggcagccggaagagttcgaccaggggcagccgaagaagcgctcgatgagcgcagtgctgcgcgaggtgaaaaacaatcgtgtcgcacttggcatgatcctggccgtggtcgtgatcacgtccgccgtgggttaccggaagttccaggagcgcaagatgatggacggcctgcaggccgggcccacgaggatcgccattcctgacagcgcgattggcgccacgcggaatcaagacgacggcacggtaaaaacgctcgaccaactgacggagcaggccggcgcaaagaaggcgcaggaaaccggcggcacctacatcgcgcccattgccgaaccaactgagccgcttcctccgccggtcgctccgcccaagccaccaaccgcgccggaagccccgaagagtaacgctgcagcagagcgagcagctcagcatcagcagaaagcggacgaaaagatgcttaaggccgctcaagctcagctggacaaactggaccggcaggtttacggcgaccagaagggcagggcgatgttcgtgaacaacgacgtaactgaagagactctgatggcatccagcagcaagcaaaaagctgatggcgtgctgctcggttaccccatggggactgtctggctcggcaagctgactggcggcgccgataccgatcgacctggcacgatcaaggtggacatcgaagagggcccgttcgccggcaaacaagccatctgcaatttcacctggccttcgcgcgagtacatcaacatcgagtgctccagcgtgatgctcgaaaaggaaagtttccctatcaaaatggtggtagtagcacctgaccaaatgccgggagttcctgctgagtacgaggggaaatatcttgctcgactggggactcgattcctcaccgccttgcccgcagcagttgcagaagggatctcgcgcggcggcaccactacctacggcagcaactccaccacgaccactgaaaaggagttgaacggtgcagatctggcgatctacgccgccggcaaggcctccgagccaatcatcgaggaaggccaaaaaatcgctgacgaaatcaagcctagggcgcatgccccagcgggccaaatggtcggcctgatgctcgcggaagacatctga

SEQ ID NO: 326942 - DNA, 1287 bp, Pseudomonas aeruginosa
atgaatagcttcgacaacgacgacttcctcccgccgccgactggtcgcaacccgcgcccagcagaaaacgctggtagcgacacgttcgagaatcacgctcagtccaccgcagatattccgccaaccttcgaaagcctgcaggcggaccatctgctcgttgaggatgcccagaatgattctgcacagctgccccccatccaattccaggtagcccctgagccccctcaggcagccgaagaatcgcacaaagaaaatcaccacgatcctctggcagcacaatccctgactctggatgacctccaattacaggatgatcccgagctcaccgcggcgccccaggcatcagcacccaaggcacagccgacgagcgaagaaacgcagaaagtcgctaggggcgggatcttgtcgaaggtcaagcccatctatgtggtggcgttgatcgccgtagcgctcgttatgtggaatcagcacaagaagaaaacagctgcggcgctccaagcccaacaggcagccgctgcacatgcacagcaggtcccgacatacagccagtcgttgaaggagctacaaaacgcacaaggcccggcccaacaaccagggctgccagccgacaacgacccaatggcagctttctttgatcagggctcccaaccaaccggggagcccttccaggacgcaggaagtcaggtatcgacaggccctaacacaacaggcaccggtggcgctgcaaccgacgacatgcaccaggcacaacagccggtctccgttgcggcaaatcccccagtcaccccatccgcaccggcaccggcaccggcaccggcaccgggcaacgatgtggcagccgtcgtgcccacgccaaacctggatcagtacaaagagcagctggcggcacagcagaagaccatcagcgacctccaaaccgagattgcgcaactcaaggaaaaactgcaaacccagacgcagccgactgcgggcgagaaagccacgacttctaagtcggcggcagaatccggaggcacgaaacccgctgccccacgagttgcgcgagtcgagcaaccgaaacgagaggtgcggcggcaggctcagcccgtctctagttcgcaggccgcgcccgcgcgaccggatatcgcgttccttggcgctttccgggaaggcggcgaaatcgtagcccacaccctgatcggctcgaccgtatacaaagtctcatccggcgaaaagatcgcgggagtgcggatcgacgcagtttccatggatggggttgtcgtcaacggagttcgatatggcaattga

SEQ ID NO: 326943 - DNA, 450 bp, Pseudomonas aeruginosa
atggcaattgagtcgagacgcgcacgccgcggaccaatgcttctgttgctgctcgtgctgatctcgcttttcacaatcagcctcaccagcacggcacacgcatcgctacagaaccccgacagcgctatcaacaagccgccgacggggaccagttcgtcagcgatcgaagcggcgcaaaagatggcctcggaattcggcgccttgatcgaaaacgtgaacaccatcgtggggatttggttcgccttccaggcctgcctgatatgggggcacatgacccagggcagcgcacgtgacgcaacctttggtggattcctctcgcacttcgtcgccggcgtactcgcctatcactcgcgggcattcttcgcgatggtgcacaacacgattccgatgattcccgacttcggaaaactcgtctacgacgggacattgatgaacgcactgctctcataa

SEQ ID NO: 326944 - DNA, 381 bp, Pseudomonas aeruginosa
atgagcatgaccacgatgaaagaaaagctgaacgatctggccctccgcgcctatgtgtccgcaggaatggccatgctgtcgatcgatgcaatggctgcgtcggaccccatcggtgccggcaactacacgcagcagttgggtgacagcgtcggtaacgtcaacgacaacatcggcatggtgccggagctgctgctgaacgtctcccagatcggcggtatcgttctggccatcatggcctggaacacctggaagaaggcgcaggaaggcaaggaccaggcgacccccatgaaggccttgggtctgggccttggcggggtgtttggttacttcctgccctccatgctggggatgggcggcgccacgctgctcccgggcgtctga

SEQ ID NO: 326945 - DNA, 345 bp, Pseudomonas aeruginosa
atgatcaatcagatgatccgtttctatgattgggctgcctacagtggcagaagccagtcgccctatgtgaagcgttgggtggccacctgccaggaattcttcgagctggccgtcaaatcagctgagcatgtgcttggaacggccaatccttcggagctgggagatgtcctgctaaacctcaatcaggagtcctacgaatcgcgcgggacctggcttgatggcttcaggctcgtgcctatcctttttgatgagctcgaccagagtgcagagcagcaccgccttgaactggaaaggcgcaaacactggatgaaccggatcaaaaccatcgtggggccaccaagatga

SEQ ID NO: 326946 - DNA, 495 bp, Pseudomonas aeruginosa
atgatcgaacaacggagctatcaggacctggtggatctttgcatcagcctgcggccacatgcggtgtggagcaatgacatgtcccgccgtagcggggagccggcgttgatgagttatgcgctgaatgcgatgactcatctcctgatcggccgccagattgtgtcggcatcctacgaacgttccaacgacggtctcgccgtaaccccggctgcgccggcgcctacgaacgaacttgctcccggtggggtcgcgctgatgtgcatccgtgtactggagaaacgcctcaccagtgacggaaggtggcgtgacaacctcaatgaattgttccctcaactcggcgcgacacgacttggtgagcccgtttcggtggaattggctccgctatggctgccaaatcttctgaacaagcaatggatgcgcgaacccgcgcccatgctggaaactacggcggaaccccaagcgccggagataagcgatgcagcaccgcggacatga

SEQ ID NO: 326947 - DNA, 873 bp, Pseudomonas aeruginosa
atgcagcaccgcggacatgagccttcccagcccgacgggcaagatctgcatgcactggaaaagcgtgcgctggaacgtcgcgtgactggtttgaaactcgccggtccgctgatctccgcagtgctgcataggccaggtttgggcagccagatcgagcctgacgcttccatgctggacgcattgagcatgctcatggccagggtagtggacctcacacagatggccagcgactacctgcggcagaaaagcgacctgaatacccagttccttcactaccgcctcgcactggaggccgtctggcttgttgcgcatcactggaaaatcggggaggacacgccccgcgaagaccttttccaactgatggtgcgctcaatcgagtcgggcaacaggctcctgggggggatggttgaacgtgagcctcaccccggcgacaaccaggaagaacgactcgcctcctggttgagcgtctctgtcagcattcataccggactactgtctcgcgcagcccttggccacgaacgtcaaaagctcggtgacgaaatgatggagcacctggcgagtgtgctgaatcaaacggctgatcaggcagcactgagcgagtcaatcgcagtgagggtgctcatcaaagagttcggcaatctgtacctgcccctatgggatgctgaaaccgagcaaattcgacaaatgcttgccggcctttcaagagaggatcaggtcaagcgagcacaggagctgaccccgtatcagctcgacgactactttgctcgggttgctcgttgcgcacagctctgtgtcgagacagcagtcgccatcaacgagctactcaagaatgattcggcaactgaaactccagctcccggcgtaggtgactag

SEQ ID NO: 326948 - DNA, 1110 bp, Pseudomonas aeruginosa
atgagcactgcttctgcccaggacaaccaagaaagcgggatcatcgcattggcgatcctgattgccttggcaatttttctcttctggcactacgcggaccggatattgggcctgtggcaaatcctgattgtgccagttgcccgcttcgtcgcgtggtttgccagcacagacatcggtggagagctcgcgaaactactgaagcaagaccctaagactctcgcccgtatccccgagtacgtagggcatctgtcgccggagcaactgaaacagctcggttttgggggagcgaagcggtacggcgattacgtccataggtggaccacactcgtggtcggcccactcatgatcttcaccggctggagattgatgaagcatcgggatcagagcggtgccgtcttcggtgtgatcgaaggcgtgccggccttggcgaagaaactatccgagggctcgggacgtgagtggatgaaacaggtcaaagacctgacgaaagtggcgatgttcgacggcccgattggtcagcaggccccaatcaccccatggcgctgggccgagatctacaagctggccaaaactgacgagcagcgccagttggttgagctagaccatgagcgcactcgccggacgtatctgaagacacttggccgcaggttcacctcgatcgaggcccttcaaaaaggtccaaacgggtggatctggaacgagttgatgaagcaggtccgggatgatgaacgcaagtccgccgccgactacgcgatacgcggccacctgtatgagaagaccgtaatcatcaccttgctgcgcggtatgacgaccaccatgatcgtcaatttcgggccactgcaaccgcttcggcacaaggacctcgccttctttgatgctatttgcagtgtcggccgtcgcacctgctttgcgtcagcctctggcatcctgggccagtaccgctacgaggtcgaaatgctgcgcgcgagcaaaggcaagatcgcgccagagcccggccgcggtgtggaatgggccgtggcctggctagaggaagcccttcgtaccgacccctacgaacagccctggttcgagtccgacgatatctggctcgactttgatcccatgctctaa

SEQ ID NO: 326949 - DNA, 2724 bp, Pseudomonas aeruginosa
atggccgcccgagtacacaatcgacatagcgatgccgccctcgaagtagatgccagccgctactttcgagcgaaccatacccattacgaccgtatggtgtatggcattcaggactacgcgccctatgcagcactcaccagcgggattctgagccttgcagcacccgggctgacggaggtgtgtgcagcatccttcctcgcgagtgccggcgcgtacatggccactcaacgcaaacatggctggccactgtgcgtcccctgcaccgagtccaatgccacgccaatacacaaagcagcgtggaaactcagtggaaacggcaagctgttcgcctcgattggattgcgctccctcatcaaggacccgcgagatgtcccaggtgacggcgtcgtgtacctcggatcggacatggacaacggcggagcccaactctggaccagcctcgactacctagtcagacacctgctcctgatcggttccaccggctcgggtaagacccaagtaatcctcggcatgatcatgcagctgatgagccaggggagtggtgcgatcttcattgacggtaaggccgacgtcaccacctggttctacctgtacaccctcgcacggcacttcggcctcgaacggcaactcctggtcatcaactacctcaccgccggcggcgcgggcaccaagcgatcgaacaccaccaacatattcgaggtggcaactgcagacagcctcatggaaatggtttcctccatgatgggcgaagcgggcggcaacgacggaatgtggcggggcagggcggacgcgctgttcggcatcattatccgggccggctgtgaggaccgtgacctgcgcggcgacacaatcgtgccggacaacctgcgcgagatgatggggttgaacctcatcctcgaaatgccgaacaacatgaagtacagcgagcgagtccgtcgcgaggcgcagctgttcctcaacgacctcccgggctactcggcattcatcaaggcgacgacgccacaagcgaaagagcagtcgatgggccggatgtcggagcagctgggcttcctgcagatgcagttcacccgcatcctcggcctgctgtccggcacctacgggtatatcaccggtaccgacatctcggaaatcgactggatcgatgtcatcaaccagcggcggacgctctacgtcatgctgccggccctcgaaaagtcccccgaatccctcaagcaacttggccggatggtcgtgtcgtcaatccgcaacgccgtattgccgattgtcggcggaggcaaactgacgggctcaaagcgactgttagtggactcgcgtccgatcggtaagagcatcccgtacggcatgttcttcgatgagtacggaagctactgcgtagatggattcggcgacgtggttgcccaaatccgctcaatgggagtcttcgcctgttttgccggccaggactgggcctcgttcaagaaaggctccgaggtggaagccgatcgggtgaacgccaacaccaacatgaagatcttcctgaagaccttcgacgtcaacacgacggatctgctgatcaagacggcaggcaagcgactcatgtctgttgccgggcaatggagcagtcggccatcaggcgctgcaccaggcatcgacacgaagtttcagagcgtggaatcgctctccgttcaggagcaagagaaggccaagatcgagattctcgccgcacagcccgcggggatggcgcacatctacttcagcgggaagctctggaccaaggtcaagatgtactacccgaacatcaagcaggccgcccagagccaggtgaactcgttcgtacgcatgcgcacgcccaagggcatatcaggcgtaatggaggatgctgagaaaaagctctcctaccaacgtatggttgccgaatgggctggaaaactgaacgatcgtccggaattcgatgccgccgcggagaaagaaatcatcccggggttctgccgctggaatgcttccctggagcaggcccagaaagtgcgaggcttcgagttgatcggctggctttccaactcgatcatgtccttcgaaaaagaccgaggtgggcaggctaaacaggctgcaggcgccgtaactgccggcgggggaacatctctcgcaggcacgccgccggcagttaccgcgccgacacctcctgcagcgactgaacaggagcagggaggaagccttggtcgcttgaagtccatcatgcaggccgaggcacccgtgacagcaccatcggccgccgtgacgtctatcgacgacgacttcctcccaccgcctggtgtagggcaagatgccggcccggaagttgccggccggacgatagtaaatccgaagagcgcaggtgaggcaggctcgccaatcgtcattcgattcaccgagacgtcggacgaagcggtactggatatggggttggatgcggatgtcgaggccggcgtggccaggacagccaccagttcctacctgatccagcgcggtaaagagttgagtcggcgaggggccgacgatacgtggcaaagcagcgccggagagcttcgtgcctcggcaaatacaatggtagagcagtccatcccgattgagcagagtgagtaccctaagcaacccgtcccagccagccagcgtgcaggccaactgaggcaggcgcttgagcaactacggtctcagctcctgaacaccgggagcgacaatctggatggtaccgacggacagaagacctaa

SEQ ID NO: 326950 - DNA, 366 bp, Pseudomonas aeruginosa
atgcgagtgacgaaggcgaacccgcttaacctcagcgcagctagggaaagattagggttgttcgtgcaagaaacagagatgccggcagaagtggctgagttgtaccaagacagccagcagccgacctacgagcaatactacgagtggcagatggccgccgaccagggagcaggggagcgagaggaggccgccgttgttgcaacgctgatcgctgaccacgatgccttcagtcacgtcccggtgggctattggcgccatcctctctctctgccggagccagccatcggcgccatcctttcaagccttgggtactcacgcccagaggacgcccgggacgtcaatgcggctggtcgtatcattggctga

SEQ ID NO: 326951 - DNA, 1086 bp, Pseudomonas aeruginosa
atgtttcgtcgaaccagcagcaacgccggcggtagcaacaaacccgtcaacatggccgtcaaggtcctggaatactccgcctctgtagaaggcggcaagatcgacactgtccgcggcatcaacctgaaaacgaaggaagaggtcaccgtaatgctgaccagccagggcgaagcggcatcgcatgccaagcgtccggccctggataccttcgccagcgacaagtacaaccagcatgttgccgtgggcggggcgatcgccttcgacagcgcctggaagttcgatgatggctacaaagctcgctgggctcagtttctcgcccgcgatgaacagtcgctgaacaactacgttcgtgtcggcctggttaccgttaacgccggcgttcgcgccgatcagcagaccaaggatgaagctcgctgggcgaacgtcaccatctggggtaagccgatcgagatcgccggcgccgagcaactccaggacactctcgcgaagctgggcgagcagatgatcgcctccaaggcgcacaccactcccgtccttcgactggtaagtgaaagtggcgaagtggtggactacgctccgctccaccaggcctgggtcagcgaggaaacccgccgccagagcggtagcgagtttgcggatgcggcactgaacgaccccttcgtgaaaggctgcctggacaaagccgcctccggcgtgggcactctggagctcatccccacccagaaggtccagttctcgccgaagaagatggaaggcgaacgcggcaaggccgtcgtaggcctgtcccgcaagttcaacgatgcggaagccgggcgcacctacgccatcgaaagctggtacaagaaggccccgactgacgacaacaacttcatcgacctggtgcacatccagaccgacgagcgtgtcgatcccctgctgcgcgcctccgagcgcttccctgaagtgcgctactccgccgacctgctcgccgagctgcaggcgcaggcctccaccccgaaaaaccaagacccgacgccgtcggctccgcaggagccggagccggacccggcgctggatgaccagttcgccaaccacggcttcgactga

SEQ ID NO: 326952 - DNA, 1044 bp, Pseudomonas aeruginosa
atgagcaaagaactcgttcgcatcgccgccggcattgacgggggctgcaacaacatcaagatttacttcggcaacaatgaaaagctgatcactcgctcaaccgcttcgaccaagcccaccgttgctgcacatctgggaatggctgaggagctggatgagatcgtcctgaagatcaacggcaaaacctacgccgtagggccgaaggtcaatgatccgctggacacccgcttcaacggctaccatgtttccgagctcaacctggccttggtatgtgcgtccctggttcgcagtaagcttgatctcaagaacactgtcatcgacgcctgcttcggtctccccctccatcgcttttacaagaccgatggcactcctcgtgcggacctcatcgcgcaacgtatcgaggcctggcgtcgccccgtcgaggtcgtcaagggcaagaaaaaattcccgaaagacggcatcttcggcgacctgtcgggtgcagctgaaggcgtgggcgcctacctcgactatcgcctggacgaggaaggcaacatcctcaatgaacctgagggtttgaccgtcgtggtggatgtgggtggcagtaccaccgacatcgccatcatcgaagacggcaacgttctcttcagtggtctctccacttcgatcgagtccggggcgctgcatctctatcagcgcgtcgcggaactcacccagcaacaccttgatctgcgcgttgctccttcgatcgtgaaaatcgaggactgcatccgcaaccacagctgcaatttcaagtctgggaacatcagcgagaacatccgccatatcgttgctcaagagcgcagcgccgtggctgaagagatcgcactgaccgtcgagcagcgactgaccaaacgcttggatgaggtttctcgaatcctctatgtcggcggcggcgcagagctgcttggtgatgaattgaaagatcgcaagcttggctccgccagggccatcgtccccgaagacccccaaatggcaaacgcccgcggcttctacaagttcgctgtgcttcagcagcactcgtaa

SEQ ID NO: 326953 - DNA, 651 bp, Pseudomonas aeruginosa
atgtccagaaccatgtccgacgaccaggcaatcgacagcctcgcatttggctttcgcgtcttgctatgggttgtttgcattctcgccgtcgccatggttctgctgacactccttttgggcgggctcggctggtacaccttcaagaaggttgaaaacgtcgagcgcgaatatttcgctgcaaccgatgctggaaacctctggaaattgacccctctcggacaaccggtcggcgggcgtacaaaagtggttgatctgagttccaaatgcatccggaagatgaccgccctcaactatgtggacttcaagcggcagctgactgaagcagaagtcgagtgcttcaccgggcccggctaccagcagtacgaaagcgagctcaagcgaaacaaaatttacgcgagcctggaggatggcaagcagaaactcgtgatgactggcgagcctggtccgggtgagtttctttcctacgagcctcgcctctacggcggcgtacagcgtcagacctatgtcctgcgccacccactcacaatcgttttcaacggtaacgtcacccgcccctggaaaggcttcatcgaggtcgatttgatccgcatcgatcaacgggagcagcccgacggctatgccatcaacgcggtaaggattctccagaaatga

SEQ ID NO: 326954 - DNA, 1644 bp, Pseudomonas aeruginosa
atgactcgactgaagatgcgctgctctctgttagcagcagctatcgcctgcgcgatcatccaaccagcgatggccatcgatggcttcgttgaaaagcggacgggggatccactggtggacaaactcatccagtccaaccatccgctgacctcggaacagcagctcaagcttcgcgcataccaacaaaatgatgcgaaagccctggagttgaaaacgccgtcggatgcaacacgcaacagtcccatgagcgtcattgaccttacccagggagcgccggccaagcaggttgtgctgcagcagggctacgccgcaacattgatggtggtaggggagaatggatcaccttggccaatcgagcgggttacctccggtgataaggggatcgtcgaacccgtcaccttggagtctcgcaaaacggctgtcgagctgaccccaattgctccttgggcaagcaccaacttgttcgtctacctggcgggacgagaagaaccgatcaagctgtatgcgcgcgtctccgcagatcctgccgaaggcctgaacgatgccatcaaggtcattattgatggcgtcccgcctggatcgtcccccctgcttcaagccaatcggatgccggttgacgacaagctgatgaactctctgggccaaggtccgggaagaaactggatcgagttggccgcgaatcagaatgagatgctcccgttccgcatcaattactggatgtcccctgataggaagaccagcatcgtacgactgcgcaatgcgcaactcgtaagcccggactgggacggcgagtatcgcgatacagacggggtggtacgcgtataccgctacgagcgcgttccgctgatgctgcgcattcgtgataccgacggcatcgagcaccaggtgcgtgttgataatccggccgatttgctggcggggcgtgagacctcgaaaagcctgagcgtcaagaacgtcacccccgagcgccctccgctgaccaagcctctggactgggaagcccctgttggcctggtaggaagagaccgaactcaaacggtaatgcgcaccggcacgcccgctgatgacttgcacagccagtacgtcgaattcgacggccaagggaagcgggccccaaaaattcagatcgtcagcgaactcggaatgaatcgggatatcgccaagcagctgattgctgacgcctacaccaagaggcccgctttgccggccaccccgagtgcatcaaaagcaccgcctaccaatcagtcgtttgaaacggccaaggcttcggctgcgccatcgacgccgccccttactgccaccaccacctccctgccgggtaaacctccggttgaggtttcgtcgctcctgggcccgaccaagacggccccgcaagtagctacggcaccggtacccaccggctattcgatgtcggtcaccgcgggcggattgtacgaaaacttgttccggttcaccgaaaaggctgggtggaagcctccgatctgggatctgagtggaacggaagatttccgcatcgtcggtggatatacggtcagcggcagctcaccggaagaggtcatccagaagtacctggagccttacatggactcgtacaacttccatgtcgagatcagtaccggcgaaaaagctgtttggattcattga

SEQ ID NO: 326955 - DNA, 1875 bp, Pseudomonas aeruginosa
atgaataagacggtccagatggtctccctcggcctggcgatcagcatcacccttagcggctgcttgaacgtgccgcaagggaaggacggcaagtcctaccagcaattgcagaacgagctgaacgagttgcgtgcgaagtccgaggccagccaaagccagagcaggatcaagatcaccaacggcccacttgccacgaaccagaagatcccacttcgtcggtatccgtggctgtcagacaagcgtgtaaacctgaacatgggtggcaagaaaacgctgaatggccgtcagatcgtcgagatgctccatgatgaaggcctgaacatcaccactgttctgcctctggagtcgttcacctacgcaggctacggattcagcggcgtcgatgcggaaagcgctctgcgcctgatcttcccggccatggggctcgactattcgatcgacaacgaacgtcgaatcgtgacaatcgtgcccatgcgttcgaagacgtgggtattcaacatcaacccgcagaggtccagcagttttacctcgtcctcggtggcaggttccctggacgcagctgccagcctgaccagttccctgaactccgggagcaacggactcggcggtggtagcagtgcgcttggtggtggcaacacgaacggcggaacctccgaaggacaggccaaccgccagggcgactccaagatcgaatcgaaaagcgacttttggaaatcgatcaaggaagaactggacatgcgggttaccgtcctggtgccgattgccggcggccaggcggcgggcagcaccatgcctgcattcggctcggtaacccctgcggaactgaatgcagcaggtctgccaaaccttcccttgggcggctcggtccccatcgctgcacctgctgcaaaactctcaggaggggagggcggtgacgatatctatcgagctcaaaagctcggccgcgtagcggtcaacccagacaccggggcgattactgttcaaggcccgcaatggcttattgcagagatcgatgaatacctgcagggcgttaaacgcgagttctccaccgcgatccagttcgagggccgtctgctcctggtctcgactaccaaggaaaactcagaaggcctagacctctccgcattcgccactctggctggtggcgacctgggcatgatcatcaacaacagcgctgcgggcggaatcaccatctcgccgccaagcactggcgttcccccggtgatcacccccggctcgactgtggtgggtaatactcgaatcgctttctccaagctcacgggcaacccggccaacgtgttcatcaactacctggagagcatcggtgacgtgagcgtcaagcaacgtccggtgctatcgaccacgtccggcactcctgctgaattcagccggatggagaccgacctcattactatcctgcagcagaatgccgttgcgggaaccaacggcagcagcggtcaggtcggcacccagaacctggtggtcccgatcaagttcggaaccctcctgcgcgtcaacccgaaaatcgacctggcctcgggtctggtgcgtacccagatcaccctgaacgtggctgtgcgttcgaacgtgaagaccatcgatcagtacatcaccgacgtcaacgggacccagaagattccccaacaagtcactctgccctccaacatcgactacaacggcgaaaccctcctgcgtgatggcgataccatcatcatcggcggccaggtcgaagagtcggacgaagactcgggcagcggcgttaccggctacgacaaggcagggccgttcgcgggtttgatcggcagcaccaaacgcactgctcgcgtgcaaacctactacctcgtcatgaccgcgcgcgtgtattcgaggggatga

SEQ ID NO: 326956 - DNA, 456 bp, Pseudomonas aeruginosa
atgggccaacagctgaagctcagtccagccgaactgcgccagttctgggctgttcggcaacctcaaatgctttccttcttcgaggtgctcgaaaaaagggagcactggccttgcaaggaaatcgagcgtgatctcagcggtctcgtcgaagaggtgatcagtctcctcgacgaacatgaggctgattcgggggctgaagacccagcgttccagcaccagttgagagagatgaataagatcctcgctgtgttcccctgtactgcggcagcgtatgtgatggtctggactgagcgcgagttcggccagctcatccactacatgctgactgactgctatcgcggcagccaggacagtgctgagtgcaacgtaatgtggcagcgtgcgcaggtcatggcacgctacctgctgctcaaggaaatcgtggaagacatcattgacgggagcctgggtcaatga

SEQ ID NO: 326957 - DNA, 390 bp, Pseudomonas aeruginosa
atgaccagctggagtacgtcctggagaccctggaccgagttgaacatgtggaccaacgacgccttgatcgggaagactgcagcccaacttctcgacttggcaaaaaaatggaatgagccggtagcaccaacaaccggcggcccaagcaaccatccgatcccattcagcgtccccatgaacgtcgaggatctggaggttgagcagatctgccggcgggtggcgatcctatggagagccctcgaccagcatatcttctggcgcacccaggtactggtgaagtgtgaagtggaaggcaccccggactggcaaggttttgttgctgacgcgaccctggtgctggaacagttcatggcgtcggaaccattcctgaaagtctccaccaagcattga

SEQ ID NO: 326958 - DNA, 1605 bp, Pseudomonas aeruginosa
atgaaagaagtcgtcattatcgaagcgcccggcaaggtcggggcactcaagaacatcctcaaatccctgcgtagaaccgcagaggtggtggcgacctttgggtcgctctacgatcttcccaagtcatccttagggcttgatcctgatcgccttactccgacagggtgggaagttgcgaatgaaaaggccttgagccggttggttgaagccttggaaggagcagccgtcgcctggctgatgacggacggggaccgggagggagaactgattgcctcgcaagcagccaccgcgatacgccagttctgtcctgggttcgggggccaagtgcatcggatcgtcgccaccagcatgactaaagaggcagtgagcctggctttcgcgaatcctcgcgcgatcgagcgggacctcgtcctgcaggcgctggccaggcgagggctcgatcgcgctattgggttcctctgcagcaaccaaagcattgctgacaacgtcgctgggcgtatcagtgctgtgcttgtcggatctgttgcgcatgccccattggaaaaccttaccctcaaggggcgccatccggaaggtcgtgactggcgcgtttctgcggcagcaaccctggcggaacgccggtctctggaagctctatcggaggccttcgcccgcggcgatcccgagttgttttctggaagcgtgcgccggaaggtgtcgcttacggctcctccccctctcaccggcgccgaagcgatcctgcttgttaccagtcagctggccattccggtcaaggatgcggagcggatcattcagcaggggtacgaaaacggcgacctgtcttatcctcgtaccgacgcacgtcaatattcggctgaaactcaagcccgactgcgcgcctacatgaggcagcacaataccagggcggccagccgggaccgcagttgggagtcggcaccccgggcgcaacaagcgcacgagtcgttgcacgtcttaaccaaccgagttcacctgcaggcgagtttggatggattgtcgaagtacgacgcggcactctcgctcatcgctcgacgcagctgtgccgctctcgcccctgatgcggatgtggagcgcactatcattccccaggccgtgattgatggctatttagggaaacggaaccttccatcaatccacgctcgcatctggaaggatgaaccagagtctgctggctggatggttttggagcgagacctcgtgcccaccgcgacattgctggtcatccctgacgaccaggcaatcctgtcgcgaatcatcaatcaagagatagggcgcccctccaccatcgttggacatgttcaaaacgtgctccgccgcggctggatcgaacaaggctcgctcagcgagcgcggtctccgcgaatttgcgttccttcagacaagtttgccgaacctgctggttgctccggatctggagcagtacctggaggggctgcacaacgtcgatctgaaggatgctatttgggatggcgcgcgattcatggggtttgctccggaggctctggccacagacgcgcgtcgcttcaccaagcaggttgagtggattgcactcgcagaagatgcacctaccctggcgggaccaacttaa

SEQ ID NO: 326959 - DNA, 627 bp, Pseudomonas aeruginosa
atgtcccgagtcattcccgtcctgcagttggctgccttgagttggatcggtgtggtgctgaccttccctcaactggtccaccaggtaccggcctcgccgttcacggatgacatcctggagcagcttcgcgagttcagttcaaagccccgggacgagacagaacttaatcgtcttcgcgctgagaacgcagcgctgcaggtgatcgtcaagagtgcgagtttcaacaaagtgattgagggcaccgccccggcggcaagtccgctgggcgatctaggcgccgttcccatgaccaccctgccacccttacccgatttcatggctgagaggccgccgtacggaccggttcgcagtaccgcgaccgacgaggttccggggggtgatagcaaagaagggaaggagggcgcagcgaaagatcagaaggccaagagcccggcgattgctttcaaacctatccgcatcacagacaacggctcgcttttgtatctcgcagcagatgggaacatccgcgtgagtgcgccagggactcacctgtacggggtcaacggcgctttcgtgcgtggcgaagaaggaaaggcggaactcgaaatttccggcagcactgtctggctgccgctgatcggcgaatga

SEQ ID NO: 326960 - DNA, 774 bp, Pseudomonas aeruginosa
atgaaaggtgtcgaggcagctgcgcgtactgccgaagcgaccagcaacaaagacaacgccgaagaagcgatgcgccagaaggcgatgcttgacgctgcacgcaactatggagtgcagatggggcgatacaccaggtggatgcgcctgcagacggtcactgactacgccgcggtggagctagaccaagggttcaggttccaggcgttatacctgcgcaatggcacgctgcagccaccggtccttgatatggccgatgagtaccagtccatcgaagatggtggccgcatgcggaaaatggtggataagacataccgtaccttggtccaggccagattccgtaataccccgctgagttggcgggacttcctcatcccggaagagctcgcaccaccaccaatgccccgcgactcgctgctgccacaagggaaagaaaaggatctctggcgggagcggatgaccgaaggctgggcggaaggggagagcatggccaccgacgaattcgagctgcgagtcgaagctctgcagcgtgcgttcagaggcatggtgctgtaccgactgttggctcgacacggaatgattcagccgccgcgggtcgtcgaacatcgcccgggcgaggtcctgaccaacgattccggggatcgcatgctgatcggtacacgggaagaggttgtcgcccaggactcctacttcgtggccgagccggaccgctggaagccgcttgattacggttttgtctcgccagaggagaagtctcgctcgggtttgggtaagtaa

SEQ ID NO: 326961 - DNA, 1275 bp, Pseudomonas aeruginosa
atggaaagctctcagcgcgaacagttcatgcgtttcgttggacccgatgctcttcctgagcatatggtcgcaggcctacagcaaagcgagttagcgaaactcagcaacaatcggcgaccggtggacttcttcgaaccacgcaatggcgaagaattcgacgcacctacatcgttccgagacaaggctgaccttgaccgtctcttgcgttacgcggcgaggcacaacacgaacgatatccacctgggcgaccaggtcccagtaaaagcgcgggtatccgggacgctgtacacgctcaccgagcgcaacctcacccaggacgaattgcgctcgatgatgacctccatctatgacggctcgggggcggcggtaactgcagttctcggcggaggtcgtatcgataccgcctacgagtgcccgccaactgaagatcaggaccgttcccgatggcgggtcaacatgacgctgcgctacgccaatggcggcaatggcttccgcgtagtgatgcggcaaatcagctctgaccctccgcctctggaaaagatcaagatgccgcgggacatcgtcgatgcagtgatgtcgctgcagcgtggccttttcctgatgacaggccctactggatcgggtaagtccacctcgctgtcgtcgcttgtcggatatcggctgggatcgccagagcacagcgaccacatcgtcaccatcgagtcgccaatcgagtttgtttacgaccggtgccctcgccctttctcggaggtcacccagcacgaagtgccgcggatgatgaagaccttcaatgacggcgtagtcaacgcgctgcgtgaagacccagacctaattctgctgggtgagatgcgcgatcgggaaacaatgctttccgggatcgaggcatcgctcaccggtcacggattgctttcaacgctgcataccaacagcgtggtcgcaactgtcgatcgcattcttaaggccttctctcccaacgagcgcccggcgattcaggcagacctgatcgacaacctccacatgatcgtctcccagttgctggcaaagacagtagatggcggccgtattgctctgcgagagcgcttgtcgatcgacggatccatcaaagaacggctgcgccgcgccaacaacctcgcggagcaacttcgtaaggaaatgcaatccagcgggcggctcatggtcgaagaagcccgtgatgccttcaaagaaggcgccattaccagggaaacgctggactggtacgagcaaatggaccggatggaacgggaggcagcatga

SEQ ID NO: 326962 - DNA, 273 bp, Pseudomonas aeruginosa
atgaacgattccgacctgcaggacctgagtgccgatgccagctcttacgtccgcaactgcctggaggtcgaggcgctgaagatcaacccgatatggattccgatgaccgcggcatcgctgtttttcatgagctattggctcggcggcctaacgatcgtcgtgatggcgtatctcctctggtcgaagcgaaatggggctagcgccgtagaaatgctgcgccggctgcgcagaacgcttgtcggcaaggttcaactgcctttcaggcactggtag

SEQ ID NO: 326963 - DNA, 414 bp, Pseudomonas aeruginosa
atgagaaaaaaggtggtcctgtggggcgcggtcggcgcgatggctctctttgctgatcaattgagcgccgccgccctggtggtacaagatgcggttcaactcactgacggctccacgcgcttggtgacctgcgacaacactaagggactgttcgtgatttacgagccgatcaacatcactgacgcatttgtggttcgcaccgacgtgcgcaatcagcggcttgcggatgtcctcgccggcatcctccccaatgggtggacgatccgctacgttgccccgggcgtggaggatgatcgagtgaacttggccgtttccacctattgggcagacggcctcaaggtgctggctcacgatttcaacctgttcgtgctgatcaacggtgcaaagcgcgaagtgctgatcgggagggtatga

SEQ ID NO: 326964 - DNA, 765 bp, Pseudomonas aeruginosa
atgataacgaaggttcaagaaagcgccgtttggccgccgtcggaccaaccgctaaagggcaaagacctcatcgaatttcgccggcgcttctacttggatatcaaccagatggaagcggtttttggcatcaccagccgtaaggcctggtacgcctccgtgaaagaaaaagctgatgagcctttggatctgtcggccgcaatcctgatgcgtttctatgttgccttctcggatctcattccgttcaccggtgccgaatcggccgaggagctgcgcaaccgtttgaacgtgagtccagcagcctttggtctcctttccggtcgccaggagatctccgttcgccaatgggacgaagaccgtgacccgctgccggtagtgcgcaatcttcaacgcatcgctggaacagcgatgacgatgatggaaggcaaaaaagccatcaactacgatggcgaggaaatcatggccggtctgctgaaagcggccgtgactgagtggcaggcgcggaacgtgacgccggagagccgccgccagagtcccgtaaactacgagaatccgttcgtcatcgaactcctgggcctgctgcctccagaccgcctgatcgaggcaatcggccacgaaccgggccaggctctgcgtcgcacaatcaagcaggagcgcgagaaacgcgtacagggcaaggctgaccggcacaaggccacgagcgacgaccgaaactctctggttgctaaacgcgctctgggcgatatggtgtccccggtcaaattttaa

SEQ ID NO: 326965 - DNA, 435 bp, Pseudomonas aeruginosa
atgacgcaaagcttgagagctgactattggaccggatcgataggtatcgacccggagaccaatgccgctttcctgcacgaagtgcgccagttcctcgaagcgctaggtttggcattcgtaacgaaacagttggccaaatcgtttgacgtgaaggaacaactgcctgcgcgtgccggtggcggcgcaggacatgttgtgctttacctcgtaagcaccaaggacggaatcggtgcaacgttgatcgtagctcaccggccggcccagaatcccttcgtcgaggctcgccctgatggactccaggtgcacgcgcagaagcgtgagatcaaccccgacggtctctggaaatctgaaaccctctggagtaacgccatcaagatcccgtccacggatcgtgtggtgatagaagcagtcctaaccgacatcctggtcggttaa

SEQ ID NO: 326966 - DNA, 393 bp, Pseudomonas aeruginosa
atgcgaggggcgcagtccttcgaactcaagcctatcgaccgcgacctgttggatcgcctcccggaaacgctagatcgcctttcgctgagcagggtggagggcacgcgacgtctgccagagtcaggctatcggtatcgagccacactggtggtgcgcgagttcggcatgagatttgacctggtcgtgctgccatccgctaatggccaggtcggcgcccgactgacgatcgaggagttgatcgccgcgggggagtttcagggttccagaaacgccgccggaccagctggtgtcagtcaggccttccaggagaaggcgattgccttgagcggccccgaacagatcagcgaacaactctacgacctcgccccgtcagcaagctttaccccattctga

SEQ ID NO: 326967 - DNA, 717 bp, Pseudomonas aeruginosa
atggccgatagaccaagcaacaccgatagctcgctcgtcttgggggatgccgttccgctgaacggcgactcgctgctcaacaagatctcccaggccgaaaaggatgtgaagctgccgcacggtgttgaccttgcgttgtcagtggtcaagtcaggtgacctgaaaatggccgccggcgcaggattgttggggcagctgaagccagccgggccaaacgatgaaaaggccgcggagatggctggagcgttggcctacaatccggccgccgccggcgccgcatatgtcgcaggccaggttgctggagaaaaggttggcccggggacgatggcagttctacagggggttggtgttggccttgccgcgtccgccggcgcacccgcaacggtgcttgcctatggggcctaccaggcataccaaagcggcaaggaatggctcggggagatgcgcgagaacatggcaaacgcgaagaggggaccggatccgcgcctgcttgcccagccggaggtccctctgggcgagaaggtttccttgaacattgccgcggcagacatgggtacagagctgccttttcctgagatcgacatgcagcagcaggcgaacctcaaggctgtggagcgtggacagccgctgtactatccggatgtctaccaagcgtacctggagatcgagcagtcgcgcgaagctggcatggaggaaggggcgagatacctcggttga

SEQ ID NO: 326968 - DNA, 363 bp, Pseudomonas aeruginosa
atgtacgccgaaacgctgtctgctgatcgatggtggtcaactcgctactctcgcggcgagttatttacctttctgcgggcactgcgggatatggctggcttccgcgtggtgctgtttgtcgtggataaccaagaaggggtaccgatggcggtggccgcaacacgcagcgatgtccgagggcgcgactatgtccgtaccggcttcagccaccacctgctgctcatgcctcaaggccgctgggaggttcttctgcagagcctatctatcgagccgtacgcgatcgtccaagccagtggccaagtccacccgacgatgcctgagtcgcttctccccaaccctgtggtgtccactgtcaagcgctga

SEQ ID NO: 326969 - DNA, 1242 bp, Pseudomonas aeruginosa
atgtacgaccgtaatcctgttgagaagatcgctgacgaattggatggactaaaggaaaagtccgattcatcctccaaaatgcccgtgccctgggctgatcatcttccagcggggcctggcgaggcgaagaactacaccgaagaccaggcgctccgggttttcctggcaaagtggagtctttcgcccaacacctatcgtcgttacaaatctgagctaatccgcctatggttctgggcggcattccagggcaagagcatctccgagttacggttcgaggactacttggcctaccaagcgttcctgttggacccacagcctgctgagctgtggtgcatgaatcagcgctattctaggaaagacccccggtggcgccccttcactggtccgctcagtatcgaatcggtaaaccatgttttcagtgccatcggtgccatgctgaccacctggaacaagatgggctacctcgatcatgaccccctcgcccctcgacgcaaactcaagccacacatgagcgaagcgccgctgctcacggcttccggaacgccaacgtcggaggactccccctctacgaccgggcgcgttgcctcagcggataaatggtttgatgagcatatgctgcaggcgatctacaaagccctgcaggcaatgccggataaaacgccggcccagtgttccaagcgtctgcagcaccacctcatcatcaggcttctccagaagtcgggctgccgcatcagcgagctggagcatggctttcagggcaacctggtcgaggatcgacgctcaggatggtggctctacgtggtcggcaaaggtggcgaaccgagaaaggtgccgatcccgcatgacttcatcactgaaaccctgatcccctggcggcgctggaacaagctgtcggacctcccgtcgccgggcgaagcgacaccgcttctcccttcacgaaagcaccgcccaggaaaagccggtattagcaacaggatggcgctgaacatcgtgaaggaagtcaccaccgcggcgatcaagtatctcccagagcactcccgccacgcggccctcgcgctaccccatgcgtcaaatcactggttccggcacaccttcgctactgcgttgatcgatgcggacgttcccacgaagacgatcatgatgacgatgggccaaaagtccgaagcaaccttgcggatctacgaccacaagagcgaggacgaacgacacctggctgtaacctcaacttctgcccagctgtag

SEQ ID NO: 326970 - DNA, 1662 bp, Pseudomonas aeruginosa
atgcaaaagccagctcgtttgctgtcggacagtgatatcagcgcaatgctgacggaagcgcaaaatgcgaaccgccccgatcgccttgcctcccatgtctacactctcgccgtggatcgcaagcgactcgccagccgtatcgctgaacttgctcaatccaacagtgcatatgaacagcttgcagcgcaggcgaagtcgatcctgcagcgcgagggcactcgggtcggcttattcgccttcggccgcaaaggccagatcgacgccatgcgttccgagatcgcagcgctggtgcagcagaaccaagacctgatcaaaaccggtgagcagctgcgccgccacgctcagcgcagccaggaagcatcaacccagaccagagcactggagcgcgacctgctgattgcgcaatcccaactgcagcagttccagcagcacgccctggacgcccgaaatgctcaggaaagagccgcgcgactggaggacgacctcatccaggcgcagtcccgcatttccgacttgcaaaatgaactggccgaggcgctctcccgctctaccaactcgccggcgccggcggacgatgaactccaggcccgcctgactgagctccacgaggaactcacagccgccaatgcgaccatcgtcgagcttcgatctgagatcgtccgcatcaagcacgaccagccggcccccagtgacgctatgggctacgccgaacggacgttccaattgcgctacaacgaagcaatgcagaagctcgttgatatggagacccgactggtctccaccgagggcaatcttcaagacgcgcaaaacgccctgcagcgggcgcagcaggagacggaagccaagcagcagcgactggatctgctacaggccgatcacgaccaactcctggccacgaggagctcactccagcgcgagttggaccaggcatccagccaaaatgagcgtttgagtcataccgctcgtgatgccgagcagtcggtgcagcggatccaggcagaattgatcgatcgacaagagcgtgttcgtcagcaggacgttcaactcatcgacctgcaggcgagcctgcgcactctcaacgagactattcgtagcacccagtcggagctcgactcggctaaggctgaattgcgccgatcgagtgaagagttggtcgcgtcgcaggcccaggttcagtcgctgcagacacaacatggcaagtacgtcgatcagatcaatgatctgatcggcaagcatgaggtcctggagcgggacatccgcattcaggaggaagcgcaccaagagcgtcttgcaagcatctcctcgcagctgaccgaaaccgcccgggcgttggcagaggtgacccgccagcgggaggcgctgcaagatcacaacacccgcatgaaagaggtcatcctgcagcagcgtcaggtcatcgcgagcacaagcaaggcacgccacgagttcaagacgctggctcaagagttggcgctggaagtcaaacagaaagaccaagctctgagcgcccagcggctcgaaattgcggcattgcggaggcagcttgatgaagcacttagcatgcagcgcgtgattcccttccgcggcgctactacccctgctgagccgccggcgccggccgcggagagccaagaccagcaatatgtggacagccccagtccgtaa

SEQ ID NO: 326971 - DNA, 1050 bp, Pseudomonas aeruginosa
atgcgaaagaccctacgcggcaagcaggccggcttcactattctcgaactgctcgtgacggtcgtcatcattggcatcctgggttctctgacggcctcgatgttcccgatgttcgccgcgttcaatgaactcaactaccggacagggcagaagctcaccaacgaacaaataggccaaggcatgacggcttgggccgcgagcgaatcgccagttggggatctgccaaccccttacaccggcagcggctacacatccaccgtggtgaacaagggcagtaccacagccaccgacatggccttgatggatctcatgcgccgcaacggcgtagacgccaaacagttcaacgacgacggcacggcgccggcaaacgtgcgcgtctatcagcggctgactgggctgacggaatcattcccgctattccccgactctggcccctacgccaccttgacctatcaactcggcgtgatctacagcacggcctgcgcaaagagcggatcgacctgcaacccctcgccaacaggggtgccaggatccagcccgatattgacagcggccaaccgctccacttgggacgtcgtttccccggatttctctgctgcctacatctccacgctgcctctacaacgctcgaagctcgctgtaaccggctcccgcatgcggcgtatcagcaatgagatggtcaagtatttcaacctgctgagggtttccgctgcaccgacagcgacgaccaacttctatcccgcgcccacgggcggcggggcaccgaacctatcgggccagtcgccggcggcaaatatgggctgtcgagatggctggtacacgcttggaaacgccaacgtgaacgtcctcgaccaactggcgcttcctaaggctgaactcgcagtcaccgcctggggaggtgcaatccagtattgccgcgacttcgatccgttggggaccaacggacctaacgctgaaccccactacggggcgctgcgcatcaacggaaacgtgagcaccggatcggccccgaccgggctgactgccaacgacctgatcgtcaccttctag

SEQ ID NO: 326972 - DNA, 618 bp, Pseudomonas aeruginosa
atgaaccagcacaccatgatcaagcaacggggctttaccctcatcgagatgctggtggtcgtcgtgatcatcggcatcctgatcgcagtggcctggccgagcatcaaccgcatgcttactggtcaagcgtcggcaaccaccgtgctcggcgtttcgcagaacatcaccaaagcggtgagcatgaccacgcaggtcatgcgcgtaccgtttgccgtcaccggcaaccccctgacggcatcgggcaacacgctcctcgacgcggtcatgatgggcgacaaggtcaccggcctcatcagtgcggggtacttgaatacctatcaggtgtctggtctgcgtcctctcggcgactcggtgaccatcgtcacgcaacccagcgccggtagcccgggggtgtacaagctgggggaatcaacgatcacccttcagaaagtctcggcgcgcgagttgggtgttgtcctcactggcgtcacgacggatctgcttcaacagatctgggcggacaagatggacgcgacctccacggcgttcaatgccagcacggctgttagcaccggcccggtgcgctacaccgcagcggctagcggtatgcacaccgtcaccctggtgtacgacctgtaa

SEQ ID NO: 326973 - DNA, 786 bp, Pseudomonas aeruginosa
atgctggccttgaacgcgctggtcgtcgtcttcgtggttgcagtcacgaacaaagtcgagcaggccgtgaactacaagctggctcagctggacagtctgtccgtgcagatcaccagcgatgcgctacgccaaaggctgcttcggacaggaggcctcggcgttgtaacgctggcggatcttcaatcccaggatgaggggtttgagactcggggggttagcccccgagtacaactgatcagtagcacaaacgtgagtgacggggtctggcagtttgatcgcgccctggtgtatgcactcagccccgacaacacgaccttcgatccaagcctgcccgcatccaatacttgcgccaacaccactgcttttgcgacggctagcacctggtgtgggccaaacgatggcatcgtctatcagctcatcgaaacacgcgaaaactacctctcgacgctgacggacgaaggcatgcggatgcagaccagccttcaaaagctcgctcggggatacgacaccgataacgaaattttcccccacggagcccttgccgtggggagtgcggcgctcctctgcaacatcggcggagcgtcatgcgccgcaactgcctgtcgtggagtcattgtcttgaacgacacccctctcgattgtgcagaccagttctcccgttgggggttgcccgtaacgctcaacctcatcactgccaagcacattgccctttcctccacggcaagcggcgtgcggcgcaccaactcgaccaacagaaacatcgctcgcgaattgagggcaccgtaa

SEQ ID NO: 326974 - DNA, 1893 bp, Pseudomonas aeruginosa
atgacttcccatgagtccacgatcgatatccaagcacagcagctctgccgtacctggggatgggatgcgaacccgcccgagtgtctgttggaccatgcccagaccatcatgcagataaatccgcatcgtttggtcaagattggtcaaattgcggtccagcttggcttggtcacgaaccaggagatcgaggcacgcctgggtgagcaacatgacggcgagttgatgctggcattcctcggccgcattttcccggcaaaggtcaagccgcgtatgcagcaaatcttggccatttcgaagcacctggcgtattacgaaacgattccggaacagctgctcatccacgaggtcctcaagagcaccgacgctgtacggcagcgttgcgatcaactggacgcggtactgctcatccaggacaacgttcgaccgatgctcctgttcaccgacagcgaacggttgctgcatttccggcagcaggggactgaagagcaggcaaagtgcgcgatcctgagagcgctgacccaggagagcgacatcaaagtcggtccgcgcgacatactactggggctatccagtcgctcggagatcagcaatcgtctgatgccgctgcgcggggaatcgaaagccagcggcgagacatcggctgccggaaagctgttctatcgcgaaaagcagaaaggggaacgccacaagctgttcgtggagcttctggagaaaggcatcgaattaaaggcaagcgatgtttcgatcgaggccgagcgcgatggcacaggcaaggtcacctaccggattgacggtcttcgggaatactcctatcgcatcaatgcggaagagcggcaaatgctggtcagctttgccgaatcactttccggcgcgaacccgcagaacaccgtattgcggaaaccagtcactggccgcgtttcctatcggggtgagcagtacaacttcgacatgcgctgctccttcattcctggtgaccgacgtgataccgcgggggataacgacactcggatgtccgtctccatgcgctacctgccccaggaagacggggacggcatcgtcaagatcgagaagctcagtttcgagccagatgtacttgctcaccttaagaaggcactgggtgttgagagtggcgtgattctcctcgttgggccaaccaacagcgggaagtccaccaccatcggtggcttcctcggcctgcattacctgctctatggcgacacgctgaaacgggtatcgctagaggacccgatcgaacggaacttcaagggtgtcgaacagttctccctgcctgacgcagaaaacttcacgcttttcctggaaggattcctgcgtcacgaccccgacgtcatcttcatcggcgagatccgcagcgccgctgcagccctggtagcgacgcgcgcggccaagaccggtcacttggtgctgaccactttccacgcaccaagcccgatcgagggctacgcgggggttgcccacctgatggaagacaagcgggagtatgacctgctccagtcgctggtcatgatcatcagccagcgcctggtgcgcaggttgtgcgagcactgccgcgaagagcgggccgctacggaagatgaactcggccgattcgaatacgcaatgactcgtctgggtgtagatgtggcttcgatggacctaccggaaaaactctggttcgccccggggcccggtaatccctgcgagcactgcaaggggaaggggactgcaggggtggtaccgatccacggtgtgctggatttcacccccaaggtacggcggctgcttctggaagggaaactctccgaagtcgaagagcttcaggccttccggttggaagatcaggtattgcgaaaactcaaagccggcgaaatcagccttgaagaggcgtgcctgtaa

SEQ ID NO: 326975 - DNA, 936 bp, Pseudomonas aeruginosa
atggtttcgcgtatcagggaaggtgatccgctttcaaaagtctccaaggaattgctaccaagtgaattgctaaccgtaatcatggcgggagagcaatcgagtggactggcgagtgtccttgatgaaatttatgagacgctcaaacaaaaagacagaactactaaaaaaatccgagcgctttataagccaatggcgatgatgttggcgggcatcgtcatgttcttcggattttcgattctcgtaattccacaaatggtggaaacaacgaaaaaaatgcaagtcggcaaaaagtccgaacctggcatcctgacttccgttatggcgtcgctgtctgagttcatgactcataattggacatatgttcttgcaggtatcgccgcagtaattattgcccttgctatttcgctgcgagatccaaactttcgtgcgagcgcctatggccacgtgctgaccattccctacattgggaaaatgctcatcaatctgcacttctcactttgggctcggtatttggcgatgatgattcgctctggatttccggacatcacccgggccgtagagatcaccagcgagtcgatgccgatggctctgcgaaagggtatcgacctgttccggtcggacctgtcgctcggtactggtctgggggtagcgtccgatcccgccaagctcccccaggatgatccacgccggcaatggccaacctacattcatatcgcgttcctggttggtcagaactcgggggaaacggatgatcaacttctgatggtgtcggaacttttgttggaagacgcagaggtcgctattgagcgaatcttcagcacgacaaacttaattgtcatttccttcaccgcgactacagcagcgctgccgatcctttcatatttgacgcagatggttgacatgatgcagaccgcgatcagcggcatgaagttctaa

SEQ ID NO: 326976 - DNA, 1149 bp, Pseudomonas aeruginosa
gtggcgcaatattttatcagtgactgggcctccatccgtgacgccgatctagcgccgggggatgaggtggtgttaggcgggtctctcgtttatatcggcctagatgaacacgcaccggcgatgcaggatctgatcagacagcccgtccgccctggcagcttttcgctccttggcgcgcagtccagcattcattccggaatatcgcaatcggtcgcgccgattattcgtggtaatccgaaggtgaagttctcactcatgcttgactggtatcttcattatcttcgtcgtcagagcaaggacttggtacttgttgggggcagtccagccgatggggaaactaatctagagatacttgtttggcggaaccggaaagtggttcttgccattgataaacaccttccatcgatcaagtccatcgacttcgctggcgaacttcagatcgccttagacgatgtatatacgcgcgcaggaatggacgcggccgacgtacctgtaaagtggtgcttcccgctccaaccgctcgacaagtacccgggcaactattcagtctctgaaatccctcgcgaggcgttcaagcgcgtccgtttcaagccagcgatgctggtagagaaaaaacaatcgcctttggccgtttggcgcgtaccgacaatgatggcggtggcgggcggcgcggtggcattcagccttattgcctggcaatggcaacggtacaccagcctgcaacgacagttcgacgttgaggtaggggggttcgaggacgtctacaagcaaggcgcatcgcagcttgaactgctgcgtagccgcgaaatgctgcttcaggcggatccacaacagaaggtgttgctcgtgcgctggaagcgattggtctctgcgctcagccacctcgaagatgcccaggtgcagcgagtgttcgtcttttctccgagccaggccaacgcaggattgtcggcctccggccggacgaccgacttcgaaatcgatgtagacgtgccagctgcgctcggagcatcccaccgcgtgcaagctaaacgaatcatgactgagttggcccagcagactggttacagcctctggctgcgcagtgcggagatggagcagaccacgacgcccggcgtacgtcgattcttgatcgagggtgtgtcgcaatga

SEQ ID NO: 326977 - DNA, 543 bp, Pseudomonas aeruginosa
atgaataccaactcctccaattcgctagtgctgatgatcggtctcttcgtggcactgatcatcgtcaccaccgggtggcaggtttcccaggctattgccggcgtggcccagagccaggcgatcgcactcgacaatctgcgtacctggaaagctgcctaccaggctcttctgccagtcaaggacaagtgggataccaccttccaggtcggagtcggctccaacgaacaggatctggtgcgcatattcaactcactgcggcttcgcgagtcgggtcttgatgccgacgacagccagatccgtggggaaaaggtcgaagcggtgacctacaacaacatcggcgtcgggctagttcgcacttgcgtgggcggggagggcgacggcgtgaaggtctacgccaactccatgagcggaatgatccgcggtatggagcgaatggtccgcccggacatcgaggtgggcagcatctcgacgcagctcgataagaacggccggcccatggccatgcttggtggactctgcgtcctggtaagaggtgagcactga

SEQ ID NO: 326978 - DNA, 576 bp, Pseudomonas aeruginosa
atggcgtcaaagcgaactgcggcagctgtagataagctgaagaacctcgatcaacggcagatttccattgcgctcattgcgttgttcctgctgctcgccctcggcgtgtattccctcggggcaccgctcaagcagcggctctctcagctgcctgtgaaggggcaggttaccagtcaggttgccacggtcgatcttccagcaaatcccatggcgattcccgctgctgtcgcggtaccacccgccggcgtaagcgtagcggagacgaatctggaggatgttgaccagattttcttgccggccgataagcctgaacccgaagggaagaaggaagaggaccttagggaaaaggcagagcaagccattcgagccgcgctggggagagtcaccttggatgccgttgccaatcgaggggcgttcctatccggcgagtacatctccgtcgggcagcgcctgggattcagcgtaagcgactccaatgggaaagaactcccagtcgtactgtcgagcatatccaggagccaggtggtgatcagcgcggggccattctcgcatgtcctgaaaatgcggcaggagtga

SEQ ID NO: 326979 - DNA, 588 bp, Pseudomonas aeruginosa
gtgaactgggacctactgcgctatctgttgcccttcgaggcctcgggagatcgtcgattcaaagtggcgctgtgggtgatggtgccagccgtcgcattcgggctgctctggctctcggctgatacggagtttggtcgagctgcagggctggccgagtccaagatgcggctcgcctcagctggccgagctgcctactgggcagtccgcgctgcacgtggtagcgaggacgaaaaggaaaaggggttcacgtaccgcggctacctcgataaggcacagggcgatctcatgttggcatacctatatcggggcaatggcaggcaaagaatcattctgcgcctagccaacgtccaagaggggactgtcaacgtagagcatttcgttgaaacctaccgtggccaggcgctccgattcgacctattcgcactacccacagagcgctatccacgcgcagtcgtctggaaggtggatgtgccgctcaatttggaagtgatcatgaaggccggcggcgcagaacggaatccgccgaccaacgtcgtcgattggatgttcgcaaaatattactggcgattagcttgcaatggcatttga

SEQ ID NO: 326980 - DNA, 603 bp, Pseudomonas aeruginosa
atgcttacatcgagggtgggtgccgtccattcaccattcctatctacaaaaccagcaatgtttggacagcccggcatattcccggcactacctccgcctccaacgacgttctcgtccgtcgcacagaacaccatggcgtactccacggcacattgcgtatttgtcacgatccgggtggcgcccgccaggtgttgccagacaccggattggcaagaaagtattagaccggccgtgttcatgccctggaggcccgtgcccgaacacgcagtgccctccgttacgattcgcggattcaccgccggcagagctccgagcgtggtcgaatcgcctgcgttgcaactcagggcgaccagggcggcgcacagcgccaatgcgatgcggttcatggtgacctcacttgcacatggtttcggttttaaccatcccgcatgggtggttatcaatgtttctccagccctgcccctgcacccagatagccaggcgagggatgtattgcgtagctgtgctgtcggcatatgccttgaacccgccgaggttcgagccaaccccgtagtcgcagactgtcactgcggtcacgtaaatcgcgggtaccttgggaggtga

SEQ ID NO: 326981 - DNA, 1629 bp, Pseudomonas aeruginosa
gtgcaataccgcgagaccagcttcgatttcgtcagccggctgatggagcaggaaggcatctactactggttccgccacgaaaagaagcgccacatcctggtgctctccgatgcctacggcgcgcaccacagcccggccggctacaccagcgtgccctattacccgccgagcctcggccatcgcgagcgcgaccacttcttcgactggcacatggcgcgcgaggtccagcccggctcgctaagcctcaacgactacgacttccagcgtcccggcacccgcctggaagtgcgctccaatgtcgggcgcgcccatgccgcggccgactacccgctctacgactaccctggcgagtatgtgcagagccaggacggcgaacactatgcacggacccgcatcgaggcgatccagacccagtacgagcgagttcgcctgcggggatgcgccaggggtatcggggcgggccatctgttccacctgagcaactacccgcgcctggaccagaaccgcgaatacctggtggttggcgccgagtaccgggtagtccaggaactctacgagaccggtaatggcgggggcggcgcgcagttcgagagcgagctggactgtatcgacgccggccaggctttccgccccttgccgtcgaccccggtgccggtggtgcgcggcccgcagaccgcggtggtggtcgggcccaagggcgaggagatctggaccgaccagtatggccgggtcaaggtgcatttccactgggaccgccacgaccagtccaacgagaacagctcctgctggatgcgcgtctcgcaggcctgggccgggaagaactggggctcgatccagatcccgcggatcggccaggaagtgatcgtcagcttcctcgaaggcgacccggaccggccgatcatcaccgggcgggtctacaacgccgagcagacggtgccctacgagctgccggcgaacgctacccagagcggcaccaagagccgttcgagcaagggcggcacgccggccaacttcaacgagatccgcatggaggacaagaagggcgccgagcagttgttcatccatgccgagaggaaccaggacatcgaggtcgagaacgacgagagccactgggtcggccacgaccggaccaagaccatcgaccacgacgagacggtgcatgtgaagcacgatcgcaccgagaccgtggacaacaacgagaccatcaccgtgcatgccaaccgcagcaagacggtcgaccgcaacgagacggtcaggatcggcatgaacaagacggaaaccatcctcatggcctcgttgcagaacgtcggcatggggcgcatggaaaacgtcgggctcggctacagcctgaacgtcggcatgatgatgaacaccgtggtcgggctgaaccagagcacccaggtgatgaagaagaagaccttgtcggtgggcgatagctacgaagtgagcgtgggcggcagcgacgatggctctaagatcaccctggacggtcagagcatcaccctcggcagccagcgcatcgagctgaccgccgaccgcgagatcctcttgcgctgcggccagagcacgatccgcctgacgccgggggagatcgagatcctctcgcccaatgtcgatatcaactgttga

SEQ ID NO: 326982 - DNA, 708 bp, Pseudomonas aeruginosa
atgatgggcaaagagcaagaaaccgaaagcggcggacggcgccatggcggccgctacatctacgaggaactgcgtcggcagatcctcacgctgaagctcaagcccggcgtacaactggacgaagtgtctctggccgcacagttcggcctgtcccgctcgccggtgcgcgacgccctggcgcgcctggtcaccgaaggcctggtgaccatcctgcccaaccgaaccaccctggtcacaccgttcgagatcgaggaattccccaactacatcgccgcgctggacctgatccagcgcgcagtgacacgcctggcggccagccagcacaaggaggacgacctggagaacatccgtcgggccgacgccgcctacatggaagcggtcgccagcggcgatttccaggccatgtcggaactgaacaaggcgttccacatgagtgtcgccgaggccggccgcaacccatatttcatcagctactacgagcgcctgctgggcgaaggccagcgcctgctgcacctgcatttcgaccacatcgtcagctcggccagctcgatcaagctgggccgcgaccacgacgagatcatcgaagccatcaccgcacgcgacgccgacgccgcggaaaaggccgcccacgagcacaccatgctgttccagcggcgcttcctcgactacatgcagcagaacctcacggccaggatgtcggtgagctga

SEQ ID NO: 326983 - DNA, 1044 bp, Pseudomonas aeruginosa
atgcgctggaagaaaacgctacaactggccgaggtgcactgcgagggcgagatcggcaaagtgatcaccggcggtgtgctcggcatccccggcgcgaccatgctggacaagatgaaccacatcaaccgggtggacgatagccttcgccgcctggtgacgctggagccacgcggctgcctgcagatgtcggtgaacctgctgctgccgccgacccgcccggaggcccacgccggcttcatcgtgcttcaggccgacaaggcccaccccatgtccggcagcaattgcatctgcgtggtcaccgctttgctggagctgggcatgttgccgatgcacgaaccggaaaccaccgtcgtgctcgacaccccggccggcctggtcaccgcccgcgcacgctgctccgacgggcgctgcctgagcgtttcgctggacatggtagcgtccttcgtcgagcagctcgacgtttgcatcgacggcgacgcgttcggcccgctgaccctcgacctggcgttcggcggcgtctattacgcactggtggacgtcgaccaggtcggtctgcgcatcgctgcggagaacgcccgccacttggccgacgccggagtccgcctgaaggagctgatcaaccgccaggtgcgcgtacgccaccccttgtatgccgggatcgacgaagtggcctacgtgatgttccgcaagcgcctggacgcccgcacctaccagacctgcaccaccttgccgccgggtcgggtcgaccgctcgccctgcggcaccggcagctcggccaacctggcgacgctgagtgcgcgcggcctggtacaggtcggcgaacggctgctgtcgcgctccatcatcggtggcgaattccaggtcgagctgctcggccataccgaggttggcggacgacctgcgattctcccccgagtggaaggacgcgcctggctgtatggcctgcagcagctcggcatcgatccggacgacccgctggcagccggattcatgctcagcgatacctggggtccggcattcccgaggccgaccacgccacgctaa

SEQ ID NO: 326984 - DNA, 1479 bp, Pseudomonas aeruginosa
atgaactaccagcagctctatatcgacggccagtggatcgctcccgccagaggcggcagcttcgagaccttcgatccgagcgacgaatcgttgctcgcccgtgtcggcgccgccaccgccgaagacatcgataccgcggtcaaggccgcccgcgccgccttcgacgacggtccctggccgaacctcgccggtgccgagcgcgccgccgtactgcgacgcatcgcccagggcatccgcggccgccagcgggagctggccgaactggaggtacgagacaatggaaagccgctgcccgaagccctgtgggacatcgacgacaccgccggttgcttcgatttctacgccgacctcgccgaacggctggacacgaaccgggagcggcagatcgccctggccgacgagcgcttcagtgccgtggcgcgcagagaacccgtcggggtggccggcgcgatcatcccctggaacttcccgatgctgatggcttcctggaaggtcgcaccggcactggccgccggctgctgcatggtcctcaagccttcggagctgaccccgctgagcgccttgcacctggctgaaatcgcccatgaggccggcttgccggcgggcgtgctgaacgtggtcaccggtctcggcgcagacgccggcgcaccgctggccgagcacccggatatcgacaagctggccttcaccggcagcgtccccaccggcagccggatcatgcaggccgcggcccgcgacataaagaacatcagcctggaactgggcggcaagtcgcccttcgtgatctttgccgacagcgacctggaagccgcggtggagtggatactgttcggcatcttctggaaccagggcgaggtctgctccgccacctcccgtgtgctggtggagcgcgccctgtaccagcccctgctcgaacgcctggccgaggaagcccgcaaaatcaccatcggcaacggcctcgagaaaggcgtcctgctcggtccgctggtgaacaggacccagtacgacaaggtgctgcaggccatcgcccgtggccacgaggatggcgcgcggctggtctgcggcggcaaacgcccggccggcctggacaagggtttctatgtacagcccacggtattcgccgacgtgccggaagacgcctggatctggaacgaggaaatttttgggccggtggtctgcgtgcgccctttcgacgacgagaaggaagccgtacgttcggccaacgcctcgcgcttcggcctgggtgccgcagtgatgtcccgcgacctgcagcgctgccagcgcgtcgcccgccgccttcgtgccggaatcgtctggatcaactgctcgcagccgactttcaccgaggcgccctggggtggctacaagcacagcggcataggccgcgagctgggcgaatggggcctcgacaactacctggaaaccaagcagatcacacgctacgacagcgaccgcccctggggctggtatatcaagtga

SEQ ID NO: 326985 - DNA, 1281 bp, Pseudomonas aeruginosa
atgaacggatcgcaggcccctgtccaggacgcggtggtcatcggcggcggcatcgtcggcgtctgctgcgcgctctacctgcaacgcgaaggctaccgcgtcatcctggtcgaccccgccgctcccggcgacagcacggcgaaatggagttgcgggcagatggcggtgagcgaggtggtaccgctgtccaagccgggcattctgatgaaagtccctggctggctgttcgaccagcagggtccgttggccctgcgccccggcgccctaccgggcatcttgccctggttcctgcgcttcgtcgcctgcgccaggcattcgaagatcgccgagatcgcccgcgacctggcgcggctaacccatcgcgtctacgaggactacgcgcccttgctggatgcctgcccagacaggaacctgctgggccagcggccgatcatcgaggtgttcgactcccccgccgccctggtccgcgaacgtccgcatctggagctgcgcaggagcctgggattcaagtccgaagaactggacgccgccgccatcggcgatctggaaccggccctggccggaaagttcgaccatggcctgctgttccccgactggcgcgcggtgagcgacaccgaaggcttcatcgccgcgctgaccgaaagcttcatcgcccagggcggcatccgtctacgcgatgaggtccgtcgtatcgacgagagcgccgaccgcgccagcggtgtaaccctcgccggcggccagcgcctgccggccagcctggtggtggtcgccgccggcacaggctcgcggcgcttcttcgggcagttgggagtcgccattccgctggtcggcatcgccggctaccaggccgtattacccgcgcccggcgtggaaatccgtcactcggtgatctacgccgacggtggtttctgcttcagccccatgacccgcggcctgcagatcggcggcactatcgaattcgccggccccgacgccgagccgaactttcgacgcgccgaaatcatcctggaaaaagcgcgccgcgtgttgcctcgattgaaaaccgagcaggtcgaattcggcgtcggctaccggccgttcctgcccgataccaagccggtgatcgaccgctcgccgcgcctgaacaacgtgctgatggccttcggccacggccaactcggcctgaccctcggcgccaccaccggccgcctggtcaccgacctggccgcggatcgccagccggcccaggacctgacgcctttctgcgcccatcgtttcgcccttatcggaggactcgcatga

SEQ ID NO: 326986 - DNA, 1044 bp, Pseudomonas aeruginosa
atgacccgtcatacgttccgctgtatcgaaggccataccgaaggcatgccggtgcgcatggtgatcgccggtgcacccgagctgagcggcgccagcatgagcgagcggcgccggcagttcgtcgccgagcacgactggattcgccgcgcgctgatgctcgagccacgtggccacggccacatgtccggcactctgctctatccgccgctgagcgcggaggccgatttcagcctgctgttcatcgagacgtccggctgcctgccgatgtgcgggcacgccaccctgggttcgatcgccttcgccctggaaagcggcctggtcgaaccgcgcacggcaggcgaagtgctggtggacgttccggccgggcaggttcgcgcacgctatcggatggaaggcggcaaggttggctcggtgcgtttcaccaacgtgccgagcttcctcctgctacgcgacctgacggtccagttgccggccttgggcgagttgcgcctggacatcgcctacggcggcaacttctaccctatcatcgagccgcaaccgaactaccccggttgcgagcacttcagcccgcagcaactgctggagtgggggcgcgaagtgcagcggcgaatcaaccgcgagttcaccgtggtccatccgcaggacccgagcatccgcggcgtgcggcactgcatgtggtccggccgccccctggcggcgggctccgacgggcgcagcgtggtgatcgccggcgacagcctggtggaccgctcgccctgcggtaccggtacttccgcacgagtcgcccaacgccatgcgcgggggctgctggcgcccggcgaggtgttccgccacgaaagcctgatcggcagccgtttcgacgcgcgcgtcgagtccgccaccgaactggccgacggcaccccggcggtgtatccgaacatcgagggccgcgccttcatcaccagtcattcggagcatcatgtggaccgcagccacccctattggaacggcttcagcctggaagacttctccggcacagcccatcacgacgagaacctgaaatga

SEQ ID NO: 326987 - DNA, 879 bp, Pseudomonas aeruginosa
atgcacatgcaaggcatcctgcccgctctcgtcacgcccttcgacaaatcaggggccgtcgatcacgacactctcgcctcgatcatcgagtaccagctcgaggccggcgtcagcggcttcgtacccctgggctccaccggcgagtactacgccctgaccaacccggagcgccgccaggtgctggctaccgtcaaggaagtggttggcgaccgcgccctgctgatcgccggcgccaacggctcctgcacccgcgaggtgctggagcaggtcaggcagaccgtcgatgccggctaccacaacctcctcatcgccccaccctactatgcactgccgtcgcaagccgagctgatccagcactacaagactattctcgaggccttccccgagatcaacctggtgctctacaactacccggtgcgcaccaacgtggaagtcggctacgaggtgctcggcgcgcttgccgaccacccacgcgtgatgggtatcaaggagagcagcggcaacctgctgcgcgccatcgagataggcgaaacctacaagggcaggctgcaactgtcctgcggctcggacgaccaggccctggacttctttatctggggcgccagcagttggatctgcgggccggccaactgcttcccggaccaggtggtggacttccaccgcaaatacgtctccggcgacctggccggcgcacaggccgtggtgcgctcgctgttcccggtgatggccagcatggaagccggcaagttcgtgcagaaggtcaagtacggctgcgagctggccggcttcgccgccggcgaagcgcgcgccccgctactgccgctgagcgatcaggagaagaccgagttccgcaaagtcttcgaggcgtcccagcgctga

SEQ ID NO: 326988 - DNA, 666 bp, Pseudomonas aeruginosa
atgcagctcgacttcaccctcgttttcgcctattggcatgtgctgctcaagggcctgggcctgaccctcgctttcaccctgggctgcgcattgctcggcagcctggccggcttcggcctggccctgctgcgcaacgtacgcagccgtctgctgaaggtcccggcgatactcttcgtcgaattcttccgcggcacgccattactgatccagctgttctgggtgttcttctgctttccggtggtgttcggcctggatattccgccctacgtctcggtggccatctccctgacgctgttcatgacggcgatcaccagcgagaccttccgcggcgcgctgaaatccatcgccgccgaacagcacgacgcctgtgtcgcgctgggcctgaccatgcgggtcaaggtgttctacgtggttttcccgcaggccctgctgcgcgcggttccaccgctgctgtcgaacctggtcagcctattcaaggagagcgctctgatctcctccgtcggcgtcgccgacctgatgttcgtcggccagaacatttccaacagtaccgcgcggccagtggagttcctctccgccgtcgccgtcatctatttcctcgtcgccttcccgctgacccgcctggtcggcgtggtcgaggcgcggatgctcagacgcttcgcctattga

SEQ ID NO: 326989 - DNA, 672 bp, Pseudomonas aeruginosa
gtgaactaccagttcgatttccactttctcggcggcagcctgccggcattgctcgatggcctgaaggtcactctggagttggcgctggtgtcgaacctgatcggtctcgtcgccggattcggcctgagcctgatgacgctcagtcgctggttcttcatccgctggccggcgcagctgttcgtcgaattcttccgctgcaccccggcgctgctgcagatcgtgtggttcttctactgcttgccgatgctcttcggcctgttcatcgagcccatcgtcatgggctttctggccctgggtctgaatctcaccgcgttcaacgccgaagcctaccgggccggcgtacaggcggtgccgcgcgaacagctggatgccagtaccgccctcggcctcaagccctggcagcgcacgctccacgtggtgctgccacaggccctgcgcagcgcagtaccggtgctgatgaccaatggcatcggcagcctgcagcagagtgctctggtggctatcgtcgcggtttccgacctgatgtacgtgggcaagagcctggccaccgaggcctaccgtccgctggaaacctacaccctgatcgccctcgtctatttcgccctgtcgctgcccgtcggccagttggtgcagtacctggagcggcgccaggatctggccgtgcagcgctga

SEQ ID NO: 326990 - DNA, 822 bp, Pseudomonas aeruginosa
atgaacattccccatttggtggctacccagccacaggttccgctcgcctcgaacatctccctcgacggcgacttcatccagttgcgcggcgtccgcaaggcgtacggcgaacaactggtggtaatggacgacatgaacctggacatgcgcgccgacgaccgcctggtgatcatcggcccgtccggtagcggcaagagttccctgctccgggtgctgatgggcctcgaaggcatccagggcggcaccatctccttccagggcaagccctacatcaacggcgagcgacgccacggcaagccgctggacgaatccctgcgtacgcagatcggcatggtcttccagcactacaccctgttcccgcatctatcggtgctgggcaacctgatcctcgcaccatgcagggtccgcggctggtccagggccgaggccagcgcaaaggcccacggctaccttgcccgcctgggcctggaaaacaagttgcacgcctaccccagccagctttccggcggccagaagcagcgcgtggcgatcgctcgcgcgctgatgctcgaaccccggctgatgttgttcgacgaagtcacttcggcgctcgacccggagatggtcatcgaggtgcagaacgtgatgctgcaactggccgagcagaagatggcgatgatcatcgtcacccacgacatgcatttcgcccgtcacatcgccacccgagtggtgttctgcgcgaatggcaaggtggtcgagcagggccgccccgaacagatattcagccaacccagggaaacccgcacccgcgagttcctggaaaaggtcgtgcacctggactga

SEQ ID NO: 326991 - DNA, 843 bp, Pseudomonas aeruginosa
atggttcgtttgcttcctcgctccatccgtcacctactggtctgtgcgggtgccctcggcatcctgctcggccacgccccttcccaggccgccgacgatgcttctctgtggcagaacgtacagaaggccggcgtgctacgctgcggcgccgcggtcgccgcgccgtatgtcatgcgcaatgccggcagcggccaatacagcggttacttcgccgacctgtgccgcaacttcggtgagaaagtgctgaaggtcagggtggaattcgtcgacaccaactgggacaacctcgtcgccgggctgcagagcggcaaatgggacctggccatggccctcaaccagacgccggagcgggccctggcggtatccttctccgcaccagcgaccgattaccaggtgtcgctggtggtcaacaaggaaaaccccaagttcagcggggcaggcaacgccatcgcagattacgacaagcccggtgtgacctttgcggtgatgtccggcacagcccaggataaggcgatttccaatgtcgtcaggcaaggccgcgtgatgcgcctgccaggcatggacgaaacccgccttgccctgatgtcgcggcgtgccgacgtgctggtcgatgccagcgacaccaaccatctgtacacgctggccaacgcctgggcgaaagaggtcctgccccggccggcgctggccaaacagggcgtctccttcggtatgcgccgcgacgtttcggcagcggacctgcaggttctcaacatctacctgacccaacgccgcgagaccggcgagatcgaccggctggtggacgaggcgtccgcccaggtcaacgcccaggcttccgcccagtaa

SEQ ID NO: 326992 - DNA, 930 bp, Pseudomonas aeruginosa
atgcaaccgttcgacagccggcaggccgatgaagtcgccacgctcctggccctggccgagcacggttcgttcgccgccgccggccgcgccctgcaacgacatccctcggtgctctcgaagcggctcggcgcactggagcgtcgcctcggcatccgcctggtcgaacgcaccacccggcaactgcgcttcaccgatgaaggcgagcgcctggcgagccgcttccgccaggccgtcgacctgcttgacgaggccgagcacgaagccagcctgggcgccgcgcaactgcgcggacgcctgcgcatcgccctgccgtcggcgatgggccggctctggctcggtccgctgctggcggagttcgccctggcgcatccgcaggtggtgctggaaaccgactattcggagcgcttcgtcgacatcatcgcggaaggcttcgacctcgcgatccgggtcggcgaactggccgacagccgcctggtggccaggcggctgtgcgcccaccggcgcatcctcggcgccgctcccgactacctgaagcggcatggggtaccgcgtatcccggccgacctggcggcacacaattgcctcggcttcagcggactgcactcgtacccggagtggaagctgacccgccaggacgaacagcagcccgtgcgggtacgcggctcgatggtcagcaacgacaacgaggccctgctctgcgccgcacgccagggcctgggcatcttcgccgccggcgagtggctgatgagccgcgacctcgaagccggcaggctggtacgggtgctgccggagtggcaactggacgccgacgccggcgtctacctggtgcgcccctcggcgcgctacgccacggcggcggccagcgcgttccgccaatgggtggaagcgcggttcgccgctggcccgccctggcagcgccagcgggcctga

SEQ ID NO: 326993 - DNA, 645 bp, Pseudomonas aeruginosa
gtgattaaggtgctggtggtcgacgaccacgatctggtacgcaccggtattacccgcatgctggccgacatcgaaggcttgcaagtggtcggccaggccgactgcggtgaagactgtctgaaactggcccgcgaactgaagccggatgtcgtcctgatggacgtgaagatgcccggtatcggcggcctggaggcaacccgcaagctgctgcgcagccagcccgacatcaaggtcgtggtagtcaccgtctgcgaagaggatccgttccccacccgcctcatgcaggccggcgccgccggctacatgaccaagggcgcggggctggaggaaatggtccaggcgattcgccaggtcttcgccggccagcgctatatcagcccgcagatcgcccagcaactggcgctgaagtccttccagccgcagcagcacgattcccccttcgattcgctgtccgagcgcgagattcagatcgccctgatgatcgccaactgccacaaggtgcagagcatctccgacaagctgtgcctgtcgccgaagaccgtgaatacctatcgctaccgcatcttcgagaagctctcgatcaccagcgacgtggagctggcgctgctcgccgtccgccacggcatggtcgatgccgccagctag

SEQ ID NO: 326994 - DNA, 723 bp, Pseudomonas aeruginosa
atgcagcgcgaaacgggtagcgagcgagtggatgtggatatggaaaagccgggcatgatcagccgctggtatgacgacaagggcttcggcttcatcctgccgaagaccggcggggaagaagtcttcctgcatatctccgcgttccgcggcgaccgccgtccccgccagggcgaccaggtgtggtttctcgccagccaggatgcccagggccgcctgcgcgccgagagggcgcggctggacgcgctgaccatcgatccgccaactgtccgccgtggcgcccaggcgccggtgacgcgggcccaggcgcggccggcgccgactccgccgagcgcgttgcagcgcccgttggcgaagctgctggtcctgctgatcctctgcgtgctgccggccgctggcgcctggcggatgtacctggacggacaggccctctggccgctgctggcctatccgctggccagcctgctcgcattcgccctctactggcgggacaagcgcagcgccgcacgcggcgactggcgtaccccggaggtccgcctgcacctgttcgagctgctcggcggctggcctggcgcgctggtcgcgcagcaggtattccgccacaagacccgcaagctctcgttccaactggtgttctggggcatcgtcctgctgcaccagctgttctggctcgacagcctgctcggcgggcgcctgtccgccgcgctgttgcagtggatcggctga

SEQ ID NO: 326995 - DNA, 801 bp, Pseudomonas aeruginosa
ttgcgtagttccttgctgcttgaaccgttcaggatactaagggagaaagtccccttcttagagtatgtgtgcaggagtgctgaccttctactgcgtcccagggtggaaacactgacggagctggagcaagggcaaatgaggtatgctctatatgacatgcttctaagcttgtccgtggtagcgcttatcgtcgcctacagttccgctttcgtgtggggagtagatctgtccagcgccgcatcggtgttttcgaacatccaggccctcttcctaggatttgcctattatgcgtatttttcgacgggttgcttcttcctgctagtccttatatgcatgggaattcgcaagcctacaggccacacgtgtattcagggagcgttcctgctgtccttgcattatgcgcggtgctattccctattcctgttgctgattgttcccctgctgcttttcctgatcggtcggtcgctgcagggagcactcacgatagacgagtatttccagagcagacctgaacatgcactttacttcacggtgccgcttctggcgttgtatctgcactgttgtctgttaccgatgaagcgattctgggcacccagcaagagcggcttcgtttctttcctaattgttttgctaatcacgcaactggcttttacgttcaatgtgtggctgccttccgtggctagactggagttgcagtgggataccgtctgtgcccggatgatggcttcggacaagttggccggcctttccatggaacaacgacaggcgttcgaacgctcatgcctggccaagggagggtga

SEQ ID NO: 326996 - DNA, 378 bp, Pseudomonas aeruginosa
atgttacggggagcggaaaaccaggagcgttatcgaaatgatttcgaggccattcgatcccccgaaaccagagcggcttactggctcatggtcggatgggcggcgaccctgaaagactatgatgtctatcctggcatcaatgggtacatggaaagcctccgtttctataacgaaggcaactggaacttcgccgtcactgctaaccagcagtggctgttgttctatttcaggaagccctgtttcaggctggctcagtattccagagacgaaatactccagcgattcgagggcgtcgtcgaacgggcgtccggtgagttgaagtttcatttgagaaatatcagtgatgtgcaaaggctgatcgactacatagagaaataa

SEQ ID NO: 326997 - DNA, 2103 bp, Pseudomonas aeruginosa
atgagcagaatcttcttgtccatcgtgggtatcgccgtcctggcaagcgcggctgcgacagctgtctcggggtgtgccggtgtgttcgaccgcatcgccgatacgctgcttgccaacgaagtacgcttcgacgaccgggaaacaccacgaaccgcctacgccattccggcgtccgccgatgcactgcagaccttgggcgggcagggtggcggactgagctgcagcctaccgccgggtacccaggcgttggcgttcaggcgcggcgccagacaggcacccatcgcattgcagatgcgccaggcatgcgccttccatgattactgttaccggcacggcaacgcgacctacggctacagccaagccgactgtgatttcatgctacagcaacaggctttccgtttgtgcaagtacatcaatcccgagcattctatcgacagctgcgagactaacgcgcgcaaggttaccctcggtgtgcgtctgggagggttcggtagtttcaagcgcgctcgtgcgctggaggacgaaaaggcttcgaccttccttgagttcgatccctacccggtacgggccaacagctatcgtgtggtacgcatcgccgacgcgccccagcagtggcgacgcgacggcttgttgccgaaggccgtctatcacttcgacatccgcccctccggtagccaggtatatgtcctgggctggaaacctggaggtggtatggtttgcgccagcttcgaactgccgggggcttatgacgtcctcaacggcccgccgatggtggtacgtgccggggccggtggcgaagactggttcgtatggtggaagcgcgaggcgctatcctccaccaggggacgtttcgcgctgctgccaccgggccgggcgacgcgccaggactggaacttggcggcgggtgggtgggtccgtgatgaagaggctctgggctgcgagagcagagcactctggagcctcgaagacaacgtcgctcgacctgcgcaactggctttcgtcagcgagaagaagaacctgggattttctgagttgcacccagtagttggcggtactgggtcgggagtcctgcagttgatgggactgtccacacattcctgcgatggcgctaagacggacctctcgccctgcctagtggaagtaacgttcgataccgtgcaacgggcgtttcgccaacagccgaagagtcctaccctctaccgtgcctcggagcgcaattgcggaggcggccagtcgggagaccgccgcaacgacgattgcagtcgctaccgcaactacgtgagcgcgcctttcgtggtagcctggacgagcccgccatccttgctctggatacgtcgcggcagtggcaacggcgatggctacgagcacaccgccacgctacgccgctacaccgtcggcaagacccgcgccgaccctgccatcgacctcggggatcggttgctgacggcattccccgagaccatggagccggccttcatcaccaacgcggctgccgatgcgcccagcttcgtcagcctggtggccgccggggagggcatccagttgtatagccaggcggcagtggcgcgcggcaaggcgtcgacggcagtcagattggagtgtttgcgcaacgcgccggtttcctggctgcaacgtcccactttcctggcgcaggatccgctcgatgccagtcgtagctacctggtgttctcgcgggtacggctgctcgacggacagggcgtggcacccgcgcaaggcgcgctgctggagattgccgtggctacgctggcgaacgatgcctgcctcggtgttcgggagttcgcctatccgtcattcttcgacggcttcgccgagagggatgagcaagaggccagtgtagccatggcgaccgccacggcacagggcaaccagcccgacaactcgcagcaagaagcattcgagcgttacgcggagcgggtacgcggtgggcagatgttgctggcggacgtcaccggcgacggcgtgctggatctgttacaggtggcccaactgccgcagcagcgacgctttcgggttgggctgctggctggcgatatcgacgcgtcagggctgcattttcagcggattttccgcactgggccttga

SEQ ID NO: 326998 - DNA, 1062 bp, Pseudomonas aeruginosa
atgcgaaagctgcttcttgtgtgctgcttctttgccgtcgctggatgcacgatgttcaccagggagcccgacttcccgtggtcgaaggacgaactgccgtgctttaccgacgggaaaacgatcaggagttgtgatcggggcgatgtactgaaggcatacgcgctggcgcgtatctattgccaccagctatcggagaactatgaggacggcggcgatttcgtcaactcatcgacctttgccattgccggtgtggggacactcgctggcgcggtgttttcccctcttgcaagcggcggcgcgaagactgcctggtcgggcgtatccggctccgccaacgctctgcagacagcgctgaacaccagtttctcgaatgccgtaaatgctcggcgcagggccgaaatcggcaacgccggtgcggcggcgcgggagcaggtggccaaggagagcgacagcactatccaggttctggcggcaatggatatggcctatgactgtaagatggcggtaggtcgggcggacattgcggtgatccaggctctcgaccagatccagatgggagcaggaaggcccaaggagagttccgcggcgagcgtcaggccggaggaaacgcagatagaagctgggaaaaaagcggaagaagccgccaggaacgcggtcaacagcgttgaggttcccgccgctgcgatgctcaattctaccgagcagactgttgtcaaggggctgcgtcagaagataaacgatgcagccatcgccgccgcctccgccgttgcggcgtccaccgcgacagaggccgttcagaaagtcgccacgacagacggtgaggcgcccagtctcatccagacccaggctgcggccagaatagcagccgagatcgcggcggaggcagctgcgaaggtggccgctgacgataaagctgcccagcttctatcggggcaacccacgaagatcagcgcagtcgtcagggaatcgaccgcatcggcggcatcggcggcggcccaggcggcggccgaggcggcagcgtctgctgctgccgcacctgtgcagccggttcgcgcgcaatag

SEQ ID NO: 326999 - DNA, 783 bp, Pseudomonas aeruginosa
atgtcattcgtcccccccgcgccagcgttttcccgcacgcttggcagcaccgaacaggcagacctcgccttcgccgtgtgcaagccggtcctgatcgaacagaacaggaagaccatccagaccggtagctgctcgtttctcctgctgggcggcgaacacttcctgatcaccgcccggcatgtactggagtcccatggctccggcccctacttcgtcggcacgaggcagggccgcttctatctggaccgtggccattacaagagcagcctgtgcccgcagcgggacgacaaacacgacatcgccatctatccgctgaacgacgaggacctggagaaactccagggcaccggcttcatcacccgcgacatggtctgcaccacgaccttcccggaatcccccgccctggtcatcggctatccgaactcgaagaacaagaagattcccccgggcagccccgcccgcgtcgaagtccacggcatcgccacccagaccctctcggttcccacggagaccgctcgccgctacgggaccgggaacgaagcgaacttcttcgtccattacggacgggaggacaagaaggctccgcagctcatgagcccgacaggcatgagcggcgggatcgtgatgatccagttgggaggcaaggcgctcgtcgcgggcattcccatcgagtatcacaagaacatgaacttcatcctgtgcacccattacaacctggtctgcaatagcgtcgaacggctcatcggcaaccccgagcgcccggacaaggcgaagcccgcctga

SEQ ID NO: 327000 - DNA, 1044 bp, Pseudomonas aeruginosa
atgcgtcccgcggccccggagtcgggccgtagggcgaataacgccaccggcgttatccgccgctgcgccggcgtctcatggtggataaccgcaagcggttattcgctctacgcggccttgaagcccacccaaccgcacgcggtcatgcgtcccgcggccccggcgtcgggccgtagggcgaataacgccaccggcgttatccgccgctgcgccgacgtctcatggcggataaccgcaagcggttattcgccctacgcggcctcggagcccatccaaccgcacgcggtcatgcgtcccgcggccccggagtcgggccgtagggcggataacgccaccggcgttatccgccgctgcgccgaggtttcatggtggataaccgcaagcggttattcgccctacgcggcctcgaagcccacccaaccgcacgcggtcatgcgtcccgcggccccggagtcgggccgtagggcgaataacgccaccggcgttatccgccgctgcgccggcgtctcatggtggataaccgcaagcggttattcgctctacgcggccttgaagcccacccaaccgcacgcggtcatgcgtcccgcggccccggcgtcgggccgtagggcgaataacgccaccggcgttatccgccgctgcgccgacgtctcatggcggataaccgcaagcggttattcgccctacgcggcctcggagcccatccaaccgcacgcggtcatgcgtcccgcggccccggagtcgggccgtagggcggataacgccaccggcgttatccgccgctgcgccgaggtttcatggtggataaccgcaagcggttattcgccctacgcggcctcgaagcccacccaaccgcacgcggtcatgcgtcctgcgcggactcggagtccggcccagacgatgttcggggttggacgccgtagccgaatgcccggcgcaatccggcgatcgcctgttgccgatccatgccgcgcacggccggcggatcggcgcgttcgcagaattcgcgccagacgaacagggtcagctcggcgccatcggtaa

SEQ ID NO: 327001 - DNA, 330 bp, Pseudomonas aeruginosa
atgaagctgcaggcgtggcgaaagactgcaggtgcagcgatttccggcaggtacagccgaaaggtgcaggtggtgcaggtgctggggttggtgttcgcgctggcgggatgcgccggccggcaggaagccgagccgcgcacggtgcgcgtagatgtgccggtggcggtgccttgccgagtgccgccggtggaggtgccggcctgggcaaccgctgggctgaagaagagcgacgatatccagaccaaggtccgtgcgttgctcgccgaacgcttgcagcggatcggttacgaggcgcagctcttggctgcgaaccgggcctgtcagaattag

SEQ ID NO: 327002 - DNA, 378 bp, Pseudomonas aeruginosa
atgacctggctcagctactggaagcccctggccctggtgcttgccgcgctgctgctgatcggcgtgggcgccgccggcggtgtctggatcggcgcgcggcactaccggcctcagctcgaccgggccgcccaggacctgacggcctgtcgcgcggcccggggcaacctggagtccctggtaggccagcagaacgcggccatcgccggcctggctgatcaggccgagctgcgccaggcgaaggccgcccaggcggttgccgatgctcagcagcaggcaggccagcgcttcgccgccgcgcagcgcctgcagcaggagcacgccgagggtgaacagtgcgcagcggcagaggcggtcatcgacaaggagctggggctatga

SEQ ID NO: 327003 - DNA, 327 bp, Pseudomonas aeruginosa
atgagcgccttcgtccgagtgtcgccaatcctggagaaggcagacggcaaactgttcttcgattgcccaggctgcgagatgctgcacggcgtcaacgtcgaggtcgacggtccgccgcgctggagctggaatggcagcgtcgacaagccgactttccatccgtcgatcctgtgtcgctatccatggcgcctactggagaacggggagcgcgaacaggtcgtctgccactccttcgttaccgatggccgcatccagttcctgagcgactgcacgcaccacctggctggccagacggtcgatctgccgcaactggaggatgacgaatga

SEQ ID NO: 327004 - DNA, 630 bp, Pseudomonas aeruginosa
atgcctatcactgagcagcagttgctgcatatcctcccgaacgccggccctcgtgccggcgtttttgttggtgcgctgaatcgcgggatgacgcggttcggtatcacgtcgccggtgcgcgctgcggcattcctcgcccaggtcggccacgaaagcggccagttgacccggctggtggagaacctcaactacagcgcgcgcggcttggcggcgacctggccgagccgatacctcggcgccgacggccagcccaacgctctggcgcagcgcctggcgcgcaacccccgagccatcgccaacaacgcctacgcctcgcgcaacggcaatggcgacgaggcgtccggcgacggctggcggtaccgcgggcgcggactgctacagatcaccggccgatcgaactaccgcgccgccggcgccgggctgggccaaccgctggagcaggaacccgaactgctcgagcagccggagttcgctgcgctgtcggcggcctggtggtggtcgacgcacggcgtcaacgagttggccgaccgaggcgatttcgccgccattacccgccggatcaacggcggcatgaacggccaggtagagcgcctggcgctgtgggagcgagctacggaggtattggcatga

SEQ ID NO: 327005 - DNA, 315 bp, Pseudomonas aeruginosa
atgaacttcttgcttgttctttcaccgcagtatggcccggcggaatttggcgactacacaaccgtctcggtttcgggtggcgtgctcactgtggaggggcgtgactatgcgttccccgacctcgaagacggcgccgaactcacgatggaggacttcgccgatccatatcccgtctaccaggttcggcggcgaggcgacacgatttcggtgtggatcatctacagatatccggcaggtgcgacccatgctgccaagtaccctgagccggttgctgtccctgctgaattcgacgggcctgttgatctgccgacctga

SEQ ID NO: 327006 - DNA, 1077 bp, Pseudomonas aeruginosa
atggcttggtattccacaggcacggtcgctgtcacgctgaattcgccgacagtcaccggcactgggaccacattctccgcgaacgtccgggtcggcgatgcttttcgcggccccgatggtcgttggtacgaggtcacaaacgtcgccagttcgacggtcatctcgatcaagcccaactaccagggcagcacggccagcggccagtcctattccgtagcccctgtgctgggctacgacaaggacctgtcggatcgattcaaccaacttgcaatgacctggggatcaacgcttgccggcctccagccctggtcgaccgcccccaccgggggcgccgcgatggacgccatggggttcggcactaccgggaaggcgctggccgcaacggccaatgctgctgcggcgcgcggcgcaatcggagcgtcggcggtcggcgaaaatggctggggcctacaggcgtccgcctcgaataccctgagcgatgccaacgtttcgctcgcgaacggactctatcgcgtcaccccgaacactgccggaacgatgctcggcgcatatgtggggcagatggtccatgcagagcaggacggcgggtatgccgtccagctgggcatgtccgttgccgggccgccggtgatgcgtatgcgtcagcgagttgcgagcacctggcaggctcccgtgaccgtctatcactcccaaaatctgctcggatcggtctcggtttccggcggtgtgccgacgggcgcggtggttgagcgagggtcgaacacgaacggcgaatatgtgcggtacgcagacggtacccagatctgctggatcaacatgagcgtcaccgaccaggcgctcgataccgcctacggctcgctctttaccggaacgaggtcgtggacattcccggtttcgtttgcgggctctcctgcaatagccgtaggcctgttcagatggggcacaggagctggctggggcactggaaacggtatcgcaagcgcgacggcggctacgttgcgcggatttgacattgtgtcgcgcgcggttggaacagcgacagtgatctcggcaacggccgtagggaggtggttctga

SEQ ID NO: 327007 - DNA, 666 bp, Pseudomonas aeruginosa
atgagctatggggtattaatccggggaaacagtgggcagacaattatcgatgactcgaacccttgtattcacattgcggcatcaggaacatacggcgtacagacaactagcgaaactatcgtaagttatccatctgcgatccagtccccgtacgagccgtatgtgtacttcaggcccaatggtccacatcagatctacttgttcaggcatatcggcagtccagggaactggactggattcgccttctggcagagcatctatcgagacgtggatccccctgcctacggcggaaagtggaaggcgggcgcggtcatgttgccgaaaaccggagggtggggaatgcaggttttcgacacccagtcgcgggtgatgttcgacagtaaccgggacatcgttcgctatctcggtggtgcgcaggtttggaataaatatgcgtataacccgaactggcctggcggtttggcgctgcagacgtggtatttgccgttcccctacggaactgaggcttactttcaagttagccacttcaatgtaagcgcatttatcactgccgaggctccgcgtattgggtttcttgagaactcaatgagcttgatatttgtttcatcaattgttcagacggaaactaatcagcaatttaactggccgcttattgcagtagcgtaa

SEQ ID NO: 327008 - DNA, 285 bp, Pseudomonas aeruginosa
atgagctacggcatccgcctgagaaatgcggccggctccatcttgatggaactcaccggccaatcggcgcgcacggtttaccggcaatcgctcggcgccattaccaacgggatgacggtgacggtgccggggttcgatcctgcgcgcggtgttgtgttcatcattgcgagcggaaacgcattcggtgaagtgcccctatacacaatttccggcaacgtggtgacgttccactggaacggttcatccggaacaacctatgtactgcatgcggtgatgttctcatga

SEQ ID NO: 327009 - DNA, 3663 bp, Pseudomonas aeruginosa
atgggcgcagttcatccgcacctggccggccgcaagggcggcagcagcaagccaaaacagccggtcgaggcacccgacagcctgcgctcggtcgcgatggccaagattctgctcgccgtgggcgagggcgagttcgccggcgttccgagcgagcgcgatatctacctcgacaacaccccgctgatggacccgagcggtaacctgaacttccccaacgttaagtgggagtggcgcgcgggggcggtggaccaggactatatcccgggcatccctgccgttgagaatgaaaccagcgtcaacgtcgagttgcgcagcgatacgccctgggtgcgctcgctcagcaatactcagctttccgcagtgcgcctgcgcttcgcctggccggcgctccagcagcaggacaccaacggcaacatcggcgggtaccggatcgaatacgccgtagatctggccaccgacggcggcgcctatcaggaggtgctgcgcgaggccgtcgatggcaagaccaccacacgctacgagcgctcccgccgtatcgacctgccggcggccaccagtggctggcagttgcgcgtgcggcgcctgacgccgaaccagaacaacaaccggatcgccgacaccatgctgatcgccggctacaccgaggtgatcgacgcgaagctgcgctacccgaacacggccctgctgtatgtcgagttcagcgcagagcagttcagcaacattccggccgtcacagtcgactgccgcgggcggaaggtccaagtgccgagcaattacgatccggagacccgggcctacctcggcatctgggacggcacgatgaaacaggcctggaccaacaatcctgcgtggatcacctacgacatcagcaccaacgcccgcttcggcctgggcaagcggatcaagccctggatggtggacaagtgggagctgtacaagatcgcccagtattgcgaccagctggtgccggacggcaagggcggccaggagccacgcttcctctgtgacctcaacctacagtcgcgcgcccaggcgtggacgctgctgcgggacatcgcggcgatctaccgggggatgagctactgggcgcaggggcaactggtgtctcaggccgacatgccgcgcaccgccgacttcgactacgtgttcacccgggcgaacgtgatcgacgggaagatgacctacggcgccgcctcggcgcgcaccaggtacagccgtgctctggtcagctacgacaatccggcgaacaactatgacaccgacgtgacgggctattccgacacgacgttgctgcgccgctatggcgacaacccgatggaaatttctgccattggatgcactcgtgagagcgaggcgcagcgccgcgcgaagtgggtggtgctgacaagcgtgcaggaccgcaccatcaccttcgccaccggcatggagggccggattccgcttccgggctacatcatcccggtggccgattcgctgctggctggtcgcgagattggcggccggatctcgggtgttgctggccgcgtggtaacgctcgatcgcgtcactcaagccaaggccggtgatcgcctgatcatcaacctgccgagcgggcgcgccgagggccggacggtgcagtcggtcaacggcaaggccgtcaccgtcactgctgcctactcggagacgccggagccggaactgtgctgggcgctcgacgccgatgacctggctgtccagctctatcgagtgatgagcaccaagcgtgacgacaacggccaatggaccatcaacggcctgcagtacgagccaagcaagttcgaccacatcgataccggcgcgcgtcttgaagatcgcccgatcagcgtcatcccgatcaccacggtgcctccgccggcgagcgtcacactgacctcgcactaccagttcgatcagggattggcggtcagcacgatgaccatcgcctggccccccgtggaaggggctgtctcttacgacgtggagtggaagaaggacagcggcaactggatccgcctgccgcgtgccggcaccaccagcgtcgatgtgaccggaatctacgcaggtggatatctggcgcgagtgcgcgcggtttcggccttcgacatcacgtcggtctggaagagttcgatcctgacccaactcagcggcaagactggcgcgccgccggcgctggcgttcctgcgtactatcagcggaccgtggaagatcggcctggagtggggattcccggccagtggtgcggcggacaccgcctacaccgagatccagcagtcggtcacccctggcggcagcgaacagaacgcaactgccctgggcttgttcgcatacccgaccgacacccacacgctgacctcgctggcggccggcgctcgcctggccttccgcgggcggctgatcgaccggaccggcaacgtcggtccatggtcggcctgggtcgacggcatcagctcgacggatgcgagcgagtacaacgagctgatcaccagggagtacgtcgagtccgcgctgggcgaacagttcttcgccgaaatcgatcagatgcaggtcgatatcagtggcctgcaggaccagatcgacaatctgaccgatgtgctggcctacgacccgacgaagacctacgcgaagaacgatatcgtgcgggtcggcaaccggctgtatcaggcgaagcaggctgtgccgctcaacgcctctccgccgaacgcgacatactgggccgacatcgggcagtcgatcgagacggccaacggtctggcccagcaggtggccaccaacaccgcggatatcaccgagctcgacggcaaggtcgaggcggctgcttcgagcctggatgttctgcaggctgccgcccgccgggagccggcgaccggagagaaggcggatgcgctgaagggctgggacaccattgctcgagcagccaccgaagtcaccgtgcgggcgaacgaggacgaagcgcaggcgaagcggacgagcttgctggaggcgcggaccgagacggcggaaggcaggatcgcaactgtcgagtcggtcgttgcgtcgaacaatgctgtaaccgtccaacgcctggatcagctcaccggccaggttgcgagcaacgcctcggcgatcagcaccgaacagaccgtccgcgccaacgcggacagcgccctggggcagcgggtggataccgtcagcgcgcgcaccgataccaacgaggcgaacatccagaccacatctcaagcggttacctcgctggatggcaacgtcaaggcgctctacagcgtgaagctccaggcgcatgccaatggccagaagtacgccgctggctggcaactgggcttcgacagcggtacgagcgtgacgaccatggcgttccaggctgatcggttcctctggttcaacagttccagcgggcagaccgtggcgccggtctcgatcgtcggcggccagatgttcatcaacaacgcgatgatccaggacggttcgatcaacaacgcgaagatcggcaacgtgatccagtcgaccgcactcggcgccaacggcgaaccgctctggaagctggataaagcggggagcttgacgatgaacagttccactagcggaggttttatgcggcaaacggcagaggcgatcaaagtgtatgacggaaacttagttctacgagtccagattgggaatctcgacgtatga

SEQ ID NO: 327010 - DNA, 624 bp, Pseudomonas aeruginosa
atgtccgcgagtgtcctgaaataccgacagatgaccatcatcaaattatctgggccactgatccgggagttcggtcgtgaacatcgccggcaactcgacaccggaagcgtccaagaagccttcagcgccctgcgcaacacgctccctggcttcaaggaggcaatcatgcgcctccagcgcttgggtatgcgattcgccatctaccggaaccgcaggaacgtcggagaagacgagttctccacctatggtgccagggaggtgcggattgtcccgattatcgccggcagcaagcgcgccggcctggttcagaccatcatcggtattgcaatggtcgcggtagcgactatcgccaccggcggcatcggcggatttgctgctggcggtgcctggggatttgtaggcgctactggtgcctctttggctctcggtggtgtcgtccaaatgctcagcccccaagcccagggcctgaagcagagtgcggccccggagaacttgcccagctacgccttcggtagcgccagaaacaccaccgccagcgggaacccggtgccgatctgctatgggaagcgccgctggggaggggcgattatctcggcttcgatctatgcagaagataaagcatga

SEQ ID NO: 327011 - DNA, 351 bp, Pseudomonas aeruginosa
atgaagaagttgatcggggtggccgcgcttatggcgatggcagggtgctcgtcgatgagtgagttgcgacaggagaagccctaccggtcgttttccagcaccaagggggttgagcaggcggcagagtgcgttctgtttgcctggcaaaatcaatccttagcaggcgttcattatgacgtttcgctgcagccgctacttggcggcgggcgcactgttgtctcgcaaggacagactgagttcgtcgacgtggtttccaccgacagagggtcagatatcagcatttactttcagtccgggataatgggctggcgaaagaacagtcgaatcgaggcagtcaagggctgcctgtaa

SEQ ID NO: 327012 - DNA, 759 bp, Pseudomonas aeruginosa
atgctcaagcacatccttgccgccgtgcagatgcacgccgcagcagagtacccgcgtgaggcctgcggcgtgattgtcggtgccggcaaggcgcagcaatacgtccggtgccgtaacactgctagccagccgcaggaagagttccggatgcatccggaggactatgccgcagcggaggacttgggcgaggtggcggccattgtgcacagccatccggacgcgaccagccgaccgtcgccgcatgacctggccatgtgcgaagcgtctggcctgccgtggcacatcctcagttggccggaaggcgacctgcggacgatcgcgccggcgggcaacatcccgctgctgggacgtcccttcgtccacggcgcctgggattgctggcaggtctgcgccgactggtacaagcgggagtggggtatcgaattcccgcacttcgagcgttccgacggctggtgggagcgggcagacggtccgagcctctacgagcagcagttcgaggccgcaggattcgtccgggtggaacggccgcagcgcggcgacatgatcgtgatggaggtggggcgtaccgcgcacccgaaccatgcggggatctacctgggcgacgatccgtcgctgccgggcgaggagaccaaagttttcggcgctggcccgttcctgttgcaccacctgtacggaaagcccagcgagatcatcgtctacggcggtaactggcacgagcgggctcgcctagtgcttcggcatcgccaagccaggcaatag

SEQ ID NO: 327013 - DNA, 231 bp, Pseudomonas aeruginosa
atgaagtacctgctgactgtcgaccatctctatcaggagacaggcctcggccgcatcggtgcaacgctgaccatcccgctgttgggcggcggggttgtggtcgatgaggtacgagtctcggggagaaccgagtcgacctatcgccgtactgtcgatgtgccgcccggagccgtgccgggcgcgcacgcctgtgacggctccacaaagttcaccttccagccgctggaataa

SEQ ID NO: 327014 - DNA, 747 bp, Pseudomonas aeruginosa
atgagcatcaacacccagattcagaaactggagccgggcgccgagatcatgctcttcgagctcgacggtagcgagttcggtgccgaggtgctgcgtttccatggccacgccatccctcacactccgcaggagctagcagccgctggcgcaaacgcagaccaactacctgcgaagtcgatctggtggcagggacaggagtactccgcctggcccgtccaaatcagcggcatcgaggcgaacggcaacggcacggcagtacgcccgaagttctcagcaggcaacgtgacgggcagcatcaccgctctctgcctggcgttcgacgatctggcgaacttccaactcaccattcgagagacgctggcggaatatctggatgcggagaacttccccgacggtaacccagatgctgaccctacccaggaatccatcagcgtctggtatatcgaccagaaatccgccgaggacaacgaggctgttacctgggatttggcaagcccgggagatgtcggcaacgaggctgtcggcagacagatgactacgctgtgccactggtgcatgaccggcggctaccgtggccctgactgcggctacacaggcccgtatttcgacattgacgacaacccgaccgacgaccctgcgaaggaccagtgcgccgggctctatcggtcctgcaacaagcgttgggggcagggcaaccagttaccctttggcggcttccccgctgtctcgatcattgccaggagttga

SEQ ID NO: 327015 - DNA, 339 bp, Pseudomonas aeruginosa
atggccgttgagacctttacttggtgcgttcactcacagtcttctggaacaacggactatgcgacgctgaacagaaagttcggcgatggttacgagcaggtggccgagaacgggctgaacaacgtcgcgcagtcctggaatatttccatcagcgggaccggcaccaagatcaaggaaatcaggagcttccttgatcgacacgctggtgcaaaatcgttcctttggacgcctccgcttggcgaacttggtttctaccggggaaccgcaccttcgatcagcggaggagggggtgactactacaccctgaccgccacctttacccaggcataccacccatga

SEQ ID NO: 327016 - DNA, 3159 bp, Pseudomonas aeruginosa
atggcggaagaaagtcgcctctcaataatcatcgactcccggggcgctgagaagaacgcgactagtcttagcgacgcactggaccgagttgagcgcagcggggacgaagccgccggcagcacctctcgcctcagtgaggtgactgtccgcctgggctcgaacatgagcaaggctgcggccgctaccgttgcgtcgctgtcgcgtatcgagcgcgcgacggagtcgaccagttcgcagatgacggcgcttgtctcccgcgctgtcgccctggaaaacgcgatgtcgtcggtgggccagggtatcggtcggctcgacaccggcatcacccagtcgaacgcgcaacttggacagttgaacacccagatgtcgcatctggtgtcgacgttcagcacgttttcccaggggcagagcgcgatcaacgcgcagttatcgcgcatcgcggcgaacatgtcgcgggcagcggacgagacccagaacctggaccagtccaccagccgtgcgggccgcggcgcgcgcgaagccgcgagtgacctcgacgcagaacgcgccggcctggcgcgcctgctggggcagatcaatcccactgtcgcggcgctcgaccgcctcgacgacatgcagcaacggctcactcgctacaagaacttgcgcctggtcgatgctgagacggtggcggagtacaccgagcggctgaaggcaatgcgcaatgcccttggcgacgccgagggcggcatgaaccgcgccgggatgtcggccaaagcgctgtcggcgaacatgcggatgctgccggctcagatcacggacatcgttgtcggcctgtcctctggccaggcccccctgaccgtgctgctccagcagggcggccaactcaaggacatgttcggcggaatcgggccggctgcgcgcgccgtcgggggctacatcgctggactggtaaacccctacaccatcgccgccgccgccgctggtgtgctggcgttggctttctaccagggttcggtggagtcgtcgcgcttgaccaacgccctggtcaagaacggcaacgccgccggaaccactgccggccaactctcggtcttcgcgcagcaggtcggagcagggaacgcaacggtagcccaagcagccagtgcgttgacgcaactggctggcgccggcaaccagctgaccatcctctacccgaagatcgccgccgcggcgatcagttggtcgaaggtcaccgaccagtctgtcgaggaggtggtcgacagcttcaatgacctggccaaaaacccagtcgatgcggtgaagaagctcgacgaccagctcaacttcctgaccgcaagccagtacgcgaacatccagtcgctgcaggagcaggggcgcacaatggatgctgcccgcattgcgaccgaggcatacgccaacgcgctggcgagccgctccacggagatggagcagaacctgggggtggtagagcaggcttggaacggactgaagagtgccgcgaagtcagcatgggatgccatgctcgatgttggccgcaccgagtcgccggaacagcaacttcagaaggtctacaagcagattgagaatgcccagaagggcattgggcgaggtggccgggccgcgtttggcctgggtatcagccagcccagcctcgatgcgctgtataagcgcgccgctgaccttcaggcgaagatcgccgccgatggcgcgaagaacctggagcaggcaacgaacaacgcgatccaggcggccggcaagaaaggcatcgatacgatcaacactacgttcgccgccgcgcagacgcagaccgagaagctccagaagcaactggtggaactcgacaaggctcgaaaggctgccatggaggcgggcggattcacagccgaggaggagaccaagttcgcggtcgcacgcaagaacatcgagcagcagatcgccgacatcaaggcgcgtgaggcgaagaagagcgcgccgaagacccgcggccagaatgtcggcgtgcgtgaggctgacaataccgcctcccgcttgctggcccagtacgacccggccggccaggctgtgcgtaccctgaccaaggaggaaactcagcttcaactggcgctctccagaggcaagatcactcgcgaggagtacagcaaggcgctggctcaggcctcgctgaactacgccgcggcaatcaagggggcccagggcctcaccgcagccgagcagtaccaggcgcagcttgagcggcagttgttgctccagcgtgagcaatacgctgcgcaggcggccgccgtaggtatgggcggtcttgaagcagagcgctatcagcagcgcattcagcttgagcagcaatcgaatgaccgtgtcctgcaactgcagacggagctggcccaggctacgaccgagaagcagcgtcaggagcttcaggcgcagatcgatctggagcgtgaataccttcccaagcggattcaagcgcagaaagagggctaccagcagatggataaggcccgccaggactggctggctggtgcagcttctggggctcggacctggttcgaacagatcgatgacacggcgagccaaacccgttcggcgatgatgcgcggcctggatgggttgaacgatgagctccataccttcgttacgacagggaaggcctcgttccgtagcctcaccacttcggtgctgagcgacttggcgagaatcgcgcagaacaagttcattacgtcgctcatctcgtccatgtctgggagcagcaacggtgtgatcagtgcgatcggcagttatttcaccgcgaacgccaaaggcggtgtctacagttcgccaagcctctcggcattcagtaacggggtgtacaacagcccgcagttcttcgccttcgcgaaaggggcgggcgtgtttggcgaggccgggccggaggcgattatgccgctcaccagggcggcagatggcagtctcggagttagggctattgggagtggtggcgcgaagagtgctggtggcaatacgttccagatcaacaccaatgtcacggtgactgcaggcacgacttcgcagtccgtcacttcggacaccaatgacaactacgccatgcagctatcgaagatgatcgccgatgtggcgcgtggcgtgatagcccaagaatctcaacccggcggcatcatctggagaatgcagaatggccgttga

SEQ ID NO: 327017 - DNA, 489 bp, Pseudomonas aeruginosa
atggccatcaccctgaagaaaaagcccgaaatcgacctgtacggcacccgctggctgcatctcaaactggacgagcaggggcatctgtcgccttgcgacgtagaagcggaggccgacctttcgctgttggtggcgtcgactggcgatccgcttttccaatcccaccacgcgatgatcaaccgccacatgcaggtgatcgatgctcaggccggcgtcggaaccagccagttcagcccgctgactctggccgatgttcagttcgacaatatcgacgacctgctgattggcctggtggccaggcacatcatcaaggactggaagggtgtgcaggacgaggcggcgcccggtgtgcccgccgactacacgccggagcgcggccaggcgctcatgcgccagcaccctgatgcctactggcttgcgctcaagacaggcgccgacatcgcggttcgcgcggatctgcgtacccaggagaccgtgggaaagtcctga

SEQ ID NO: 327018 - DNA, 1170 bp, Pseudomonas aeruginosa
atgagtagcggcgcgaaggtccagcttgcctggatcaaagaggtaacccccggcgtcaccccgccgggcgactggcacacgctcacccgtatcagcaacggggtgacaccgacctacaactccgaggccaacaacgagatcggtgccgaccgtatggctcagggtaccgccatgaccaccgtcgacgttggcggtgacatcgagagcaaatggcgctacggggcgctggatgaattcatggcctcctgcttcggcaagaactgggtcgcgaacgtcctgaccatgggtaacgaccgcatctccttctccctggccacctatgccgcggatatcggcgtcgccggtatcgcccgtggcgcccaggttgcgacgatggcgttcgacttcccgggcgacaacgagatcaccgtcaccaccacgttcgctgccacaagttggagcgataaggccgatgacacctcgttcatcgtcaacgcccagccggagccggcgcagcgccgctactcgttcaaggacatcagcggcctaaagctcaacgaccagcaggtgggagagggcaatgcctgcgtcgacagcttcaacctgcagttcgacaacgcggtacagacccagcgctgtatcggcaacggcaaccctttcccgggcaacatcatccccacgacgttcactccgtcgggctcgatcacgatcagttggtcgaagatggcctatcagctctggaaggcacagcagaccggtgacgccatcagcttggagttcaccgtcagcaatgccgacggcggctatcgcatcagcctcccggagatggaggtcaacgggtcctggccggatgccggcgccgaggaaatcgtccaggtcgaactgaactacaccgcgcgccgtatcccgccgaccatcacccgcctgccggcgccgatcgtgattgcaagtgtcaccgtcacgccggataccgcctcggtcgccgccggtgaaaccgtagacctggaagccgaggttctaccggccggcgccagccagaccgtcacctggtccacctccgatgcagcgatcgccaccgtgaacgacaccggcctggtcaccggcgtggccgtaggcaccgcaacgatcaccgctaccagcaccgcggacccgaccaagaccgatacctgcgcgatcaccgtaaccgcgtaa

SEQ ID NO: 327019 - DNA, 408 bp, Pseudomonas aeruginosa
atgaccttcgaacagatccgggcagtcatcatcacgcgcatgaccgaatgggccgcgatcccgggcgatgacgtcgattacccgaacaacccaaagggcccgttcaagccggacgggaggccgatctgggcgcgcctggcggatatccctggcgcctctgcggctaccgagatcggcaacggcccctgtattcgccgcagcggcctgatcatcgtgcagctcttcgtgccgacctacaaaggcacgctgctgctgacccggaccgccgatacgctgcgcgagcacttcgagttctatagcgacccggtcctgccgttcgagtgctttgccgtctcccaagccgttcccggcgatgatgggcacggctggtaccaggccaacctgacgatcccctaccgggctggttga

SEQ ID NO: 327020 - DNA, 396 bp, Pseudomonas aeruginosa
atggcaaaggggaagggaggaaggtcctggagcatccctccgtcggctttcgccgagaatgtcgggcaggccgtggccaaccaccagcggcggctgaccatcgaaatgctcgagcagatcaccatccgcgcaccggtactcaccggccggttcaaggccaataacctggtcagcgtcggcgagccggtcttctattcggtgaaccgctacgacaaggacgggaacgagaccttggcttatggcgaggcggccctggccggcctggctccgtactcggtggtctacatccagaacaacctgatctatgcgccgccgttggaggatggtcactccggccaggccccggcgggcatatatggcgtcagtttccatagcgtcacggcgagacattcatga

SEQ ID NO: 327021 - DNA, 387 bp, Pseudomonas aeruginosa
gtgcgtgacgaaatgcaggctattttcggccagatgttcgacagcgtgttcagcgagtcggtgacctcgttcgctggcgagtatccggggccgggcgtcttcgatccggtcaccgagaccaccaccagccaacccgtgcggtactccgggcgcggggtcttccacaactacgaggccaaccgcatcgacggaatcaacatcctggtcggcgacatccaactgatcgctctgatcaacgaggtgtcggaccagcccgccgtcggccatgaactgagcactaccgacgtggtgccgatccttggtgggccgttggcgggctatcgcatcgtgcgcgttggcggtgatcccgccggcgtgcatcacgatctgcagttgaggaaagcgtga

SEQ ID NO: 327022 - DNA, 993 bp, Pseudomonas aeruginosa
atgaccgaagccgagatcctgcgcgcaatcgagggaaaggagccggcgttgcagagggcgtacctggaccgggtcaggtcggtgacggatgccgctgtcgtggctgagatcgagcgctacatcaacgagcaggatgaggattccattgtctcggtgctgtcgctggggttgctggcggtgttcctggagcaactgcggtccacctacctggccggcgcgaccctcgaaatcaagtttttcccgggacggccggtcccggagttcgaccctgtaggcccggggccgtcgacctggttatcggagcatgcccgcgtcctgcagcgcgacatcgatgatgctacgcgcctggctgtccgccacacgatccagatggccgacctcctggggcgcccgccgcgcgcgacagcactcgatatcgtcggccggcgaagcccgcagaccgggcagcgaaccggtggaatcactggactctcaggcaactacgcccaggcagtggccaacgcccgcgcccagttgctcagcggggaccctgcgcagatgcgccagtacctgacacgcactcgcagggatcggcggttcgacaggttggtcgagcgagccgtcgaggcgcgtcgcccggtcccgtcggcggatgtcgatcgcatcgtaggccgctattccgagcgactgctgcggacccgtgccgagcagatcgccgcgactgaggcacacgacgccttcagcgccggacgggatcaggtctacgagcaactcgtcgccaatggactggagcgcagcagagtcctgaagacctggcacaacgtcggcgacaaccgcgttcggcacactcattcgccgatgcagggccagcgacagcaactcggtagtccgttcgtgacgggcggtggcgcgctgctgatgttccccggtgaccagacgcttggggccggcgacaacgaaaccgccggctgccggtgctgggtcgagtacgaaatcggaggtatccgtgcgtga

SEQ ID NO: 327023 - DNA, 519 bp, Pseudomonas aeruginosa
atggccgacttctacggaaccgtggctggtgctgatgcctaccaccatgcccggggcaatgccgcctgggcggctgctgctgaggccgacaaggaagcagctctggcccgcgcatcagcctacatcgacggcctcggcacccagcagccggtctctgaatgcgtgctggtctttcctggcaagaaagccggagggcgagcccaagcactgcaatggccgcgcgcaggcgccgttgaccgtgacggggagcccgttccggctgatgaggtgccgcgggaggtcgagcaggccacctacgaggccgcgctgcgcgaactgttgaagcccggcagcctgaatccggactacgttgcgaccaccgcggtgaaacgcgccaaggtcgggccgctcgaaaccgagttcttcggcccagccgaaggcgacgagcagcccaacaagcccttcgtgggggtcatcaacgatctcttggcgccgatcatggtgttgcggtgcccgatgccagcggtattcacggtatga

SEQ ID NO: 327024 - DNA, 432 bp, Pseudomonas aeruginosa
atggcgctcatcaccaataccaaccgcatcacccccatcggcctgccgagcggtgccgtcatcccgccgggcgcgtctgttgacgtgcccgagtgggacgatgtcaaggaccgcaagaacctcgccttctacgtggtcaccggcgtgctggtggtcgagggcggcgtgcagagtgacggccagggcggcgaagaggcgtaccgccagcaactgttcgccgagctgaaggccctgggcgtgaatgccggcgccaacagcaagaccgagaccctggtttcgaaactggcagaggtcaaggccaaggccacgctgcccgctgacgaagcggctcagaaacaagcgctgatcgagcaactggccgccctcggagtgccggctggtcctgatgcctctctggaggaactccagaaggccctggccgagcagcagtaa

SEQ ID NO: 327025 - DNA, 930 bp, Pseudomonas aeruginosa
atgagccgattcaagctgctcgacgcccaggccgccctgggcttcgtggtctcgcagaccacctacatcgagcgccaggtcaacgagatcgtctacccggatatccagtatccgcaactgatcccggtcgacacctcggcgcccgagtggatcaagaccgtcaccttctactccgccgacaaggtcgggaaggccgactgggtcaacggcaacgccgacgacctgccgctggccagcaccgagcgctcgaagttcgagtcgagcgtgcacatggctgccatcggctatggctatggtctggaagagatcagccaggcgcagatgctcggcatcaacctgaccggtgacgatgccgccgccgcgcgtcgcgcctacgaggagttcgtggaccgcgtagccctggcgggtgacgcgtccaagggcttcagtggcctcttcaactacccgggtgttaccgcgggctccgccgtcaccgggaactgggaaaccgccaccgccgaccagatcctggccgacgtgaacaccgcgctgaccctccagacgcaaggcacgctgttcaccgcgttctccgacaccctgctgctgccttacgcgaagttcctgctgatcgccacccgcaaggtgaacgaacagggtctggagacgatcctcacctatctgcagaagaacaacgtctacaccgccaccactggtcgcccgctcaccatccgcggcctgaacggcctggatgccgcaggcgccggcggcaccgcgcgcatggtcagctaccgccgcgatccgtcggtgctgaagatgcacatcccgatgccgcaccgcttcctgccggtgtaccaggccggtccgatccgctgggaagttcccggcatcttccgcctcggtggcgtggatatccgtcgtccggcggaagttcgctacaccgacggcatttga

SEQ ID NO: 327026 - DNA, 456 bp, Pseudomonas aeruginosa
atgcccgccgttcaaaccacctacagcgcgaacatccgccccggcctgccgggaatgatcgtcgacgaagtcccgaagaccctgatctctcgcactgtcgaggcctctgctggcctggcgttcggcatcccggtcatgcagggaaccgccgacaaggccggccgtgcgccgactactggcgataccgccgcgaagttcgtcggcatcagcgtccgcgaccgctccgtcaaggccgaggctaaccagtacagccagtacgagtcggcccgcgtcatgaccgagggcgccatctgggtgaccgcttccgtgcaggttgccgcaggcgatccggtctacttcgtgccggccaccggcgcctggaccaacgtcgcgaccgacaacgtgcaggtcgccggggcgcgcttcgacaccagcaccactggcaccaatcaactcgctcaagtccgcctgggctaa

SEQ ID NO: 327027 - DNA, 1122 bp, Pseudomonas aeruginosa
atgcttctccatgactccgtgtcggtgtccggcgttcgccggaccgctgacggctacctcgtggccgatgcccgggtagcgcgcactggcatccaggaatacctgggttccgaggtcggcaagcccgacatacccattgtccgcgtgtaccggccgccggaatcggttttcgccgaggacgccatgcgctcctacgcctaccgccccatgaccaacggccaccacggcgaggtcaccgctgagaactggaagcagctcgccatcggccagaccggctcggaggtcctgcgagacggcgacttcgtgcgcgtgcctctggtgttgatggatgccgatgcgatccgcgactacgaggcagggaagcgcgagctatccatggggctcgaggcagaggtcattttcgaggatggggtgacccccaccggcgagacctacgacgcccggcttggcccgatgcgaatgaaccacctcgccctggtcgatcacgccaggggcggcgagcaactgcgcatcggggattcgcgcacccccggcgccaagaaacctgcgcacccaacccccacaggaggccatgacatggctgatgcactccgcaaactcctggtcgatggcctcacgatcgagaccaccgagcagggcgcccaggtcgtcgagaagctgcagaagcaactcggcgacgccggggcgaacctcaaaaccatccaagacgcccacgccaccgcgatggcagcgaaagacgccgaactggcgaagaaggacgccgagatcgatgggctgaaggccaaggtactgagcgactccgacatcgacaaactggtgcgcgagcgcgccgacctgatcgccagcgcgatgctgatcgctgacggcgactatgccggcaagtccgccgccgagatccgcaaggcggctgtcgtggccaagctgggcgacgccgccatcaaggacaagccggaggcctacatcgccgcccgcttcgacatcctgctcgaggatgccgccagtaacgacccggttcgtgtccacctgaagcaacaggacagcaagccgacgaacccggctgacaacggtcaggcggcctacgaggcccgtgtcaacggcgcctggaaaggaggtgacaaataa

SEQ ID NO: 327028 - DNA, 1809 bp, Pseudomonas aeruginosa
atgggcgtaaggagcttcctcactgacaagctggtcaacttcgtggccaacttgggcacggagcgagacaaggccgccggcagcttctacgcgccggtcgtgctcaccgatgagcagttgcacaacgcgtatcgcggcgcctggttcccgcgcaaggtcgtcgatatcccggcgaaggatgcgaccaggcgttggcgggcatggcaagccagcaaggcgcagatcgagaagatcgaggccgaggagaagcgcctgcaggttcaggctcgcaccaaggaagctctgaccaaggcgcggctatggggcggcgcagcgatcttcatcggcacaggcgaaactgacaccagcaagcctctggtacccgagcgcgtccaggccggcggcattaagtatctgacggtgatgagccggcgcgacctgtcggcaaccgagcaggatcgtgacgtcatgtcaccgaactacggcaagcccaaggcctaccggctcggcggcagcgcgatcgagattcacccgtcccggctggtgatcttcaccggcgccgacatccctgaccaggacctggccagcggcaaccagttcgggtggggcgactcggtcctgcaggccgtgttcgaggccatccaacagatcgacagcaccatggccaacgtggccagcctcatcttcgaagcgaaggtcgacgtgatccgtatccccgacttcatgcaggggatgcaggacccgaagtacgagaagctggtgttggagcgcatgcgtttggcggccatggcgaagggaatcaatggcgccctgatgctggacaaggacgaggagtacgacagcaaatcggcgaacttcggcacgctgccggacatcatggaccgcttcatgcaagcgggctgcggcgctgccgatattccggccacccgcatgctcagccagtcccccgccggcatgaactcaaccggcgaggccgacctgcgcaactactacgaccgcatccaatccagtcaggagctcgacattacgccggccatgtcggtactggacgagtgcctggtgcggtccgcgctgggcagccgaccgccggagatccattacgtctggaacagcctctggcagaccacggcgaaggagcgggcggacatcgggaagatcaccgccgagactatcaagaccatcgccgagacaaggctcttccccgaggacgcgctcagcaaggctgccgagaccctgctggtcgagaacagcgtgatgcccggtctggagtcggcgctggaggagttcggctccgaagtacccgaggacgagcaggacgaggagggcggcaaccggtcgtccagccaggcgctgaacgacgcggcacctcgcacgctgtacgtctcgcgccgggtgctgaacgccggcgcgatcattgactgggcgaaggaccagggcttcgagaccacgctcccggccgacgacctgcacgtcaccatcgcctacagccggacgcccgtcgactggatgaaggtcacccaggcctggacggtcaagccgaacggaaacctgacctgttccgccggcggcccgcgcctggtcgagcagttcggcaaaggggctgtggttctgctgttcaactcctctgacctgacctggcggcacgtcgaaattcgcgatgccggtgccagttgggactggccggactaccagccccacatcaccttcacctaccagcccggcagcgtcgaccttgaccaggttgagccgtaccgcggcgtcatcgagctcggcccggaggtcttcgaggagatcgacgagggctgggcggatcgcctcgacgaggaataa

SEQ ID NO: 327029 - DNA, 1287 bp, Pseudomonas aeruginosa
atgccgacgctgaataggccccaggcgaagttcctggcgcttccgcacaagttctgcggcttcgtggccgggttcggctccggcaagacgtgggtgggctgctctggcctcgcccagcacgcctgggagtggccgcgcatcaacgccggctacttcgccccgacctacgcccagatccgcgacatcttctatccgacgatggaggaggtggccttcgactggggtctgcggaccaagatcaaccaggcgaaccatgaggttcacctctacagcggcagcgcctaccgcacgacgatcatctgccgctccatggagaagccccagactatcgtcggtttcaaggtcggccgcgcgctgagcgatgagatcgacgttctaccagcgcagaaggctcagcaggcctggcgcaagatcatcgcgcggatgcgctacaaggtggacggcctgcgcaaccgtgtcgacgtcaccaccaccccggagggcttcaagttcgtcttccagcagttcgtgaagcaattgcgcgagaagccgcacctgcaggacctatatggcctggtccaggccagcacctacgacaacgaggcgaacctgccggacgactacatcgattcgctgatggagtcgtacccgccgcaactgatcgcggcgtatctgcgcggccagttcgtcaacctgacggcgggcaccatctacaccgcctacgaccgcactcttaacgcctcgcaggagacggttcagccaggcgagccgatattcgtgggtatggacttcaacgtcggcaagatggccgccgtcgtgcatgtgaagcgcctgggcctgccgcacgcggtcgacgagatcgtcaacgggtacgacaccccggacatgatccgccagatcaaggagcggttctggctgtacgccgacggcgaatatcgccctacacgtcagatcaggatctaccccgacgcctccggcgactcgcgcaaatcggtacgggccagcgagaccgacatcgcgctgctcaagcaggccggctttatcgtctcggcgcccacagccaacccgccggtcaaggaccggatcaactccatgaacgccatgttctgcaacgccaagggcgagcgccggtatcgggtcaaccccgaccggtgcccgacctatgccgacgccctggaacagcaggtgtggggcacaaacggcgagccggacaagtcggccggcatcgatcacccgaatgatgcgggtggctatttcatccacaaggaatacccgatcacgaagtattccctcgcaggtgtttcctaa

SEQ ID NO: 327030 - DNA, 285 bp, Pseudomonas aeruginosa
atggttgacctggtgaccctggcggctgcggccgtctgcggcgctatcagttgccgcatcttcacgtaccagcgccacggtgccacgtaccggttcggcgtctcgctctgcgcgtacatcctcgccgctgggaccggcatgcaggcgctctcgatcagcctggccgtgctgatggcgcgccacgcgacgccgatatcgccctacctgctggcggtcctggttgtgctgctggtgctggtctaccgcaacaagggcaacatcgcgcccatcctgaggctcagttga

SEQ ID NO: 327031 - DNA, 390 bp, Pseudomonas aeruginosa
atggctgaaccgacgagcagcggagcagtagcagcagccggcgccgtcgggctcactgccaccgcaatcatccccggagtcgacgtcaatgctgtgatcggcggcttcgccggcgcgctgctgttcgtgctctgggctcacgacctgaccatcgcaaggcgtgtcggttacctgctggcgtcctgggtcggcggctactacgcagccaccgaggctgtcgggcggggcgcgacccagttctctggtctgcctgccctggtcaccgccgctctgatcgtcacgatcctgatcggcgtgctcgactggatgatcggtggccgcgctccggcatggctccagatcgttctgcagcgcatcgtcggcatgatcggaggccggaaagatggttga

SEQ ID NO: 327032 - DNA, 687 bp, Pseudomonas aeruginosa
atgagactgatcagcgcgcgccaggcttggcaggacgcgtaccacatcccgggcgcgtcggtgatggcgaaagccatcgaagatgccgaagaggcgacacggaagaccagggcgaagcgccgcaagaaactggtggcccgcttccccgaggggtaccagggcgagagcaaggagccggagggcctgttccccatcgactcccagatcatcgccgcctacgagacgcggaccgggcgggccgcgggaaacctgaaccgctgccagcacatgctcgccgccggcaaggtgatgcatgcgatcagcacccttccggcgccgctgcagcacctcggccacttcctgtactcgccgctggcgaacggggtcgaccagaaccgcgcgcagtccttcctgtacttctcggcggatctcccgaagatgaacaagccccgccaggaggtcgcttactgggtggccttggcggcgatgcactcgtggaaggacatggtcaacggccgggaggagtggtggccgggtaaggtgatccagttcctggcggactggccggggttcgtactgtacgccgcgaattgggagcgtgactgggcggcgatctgggaggttttcatgcaggagctcaaccggctggacgcccaggctctggtgccggtggcgcgggtggttgcggcccagcgagacgccgcttga

SEQ ID NO: 327033 - DNA, 762 bp, Pseudomonas aeruginosa
atggaaaccaagcaggaaacgccgaaggccaagccggccatcgtgccgcaaagcgcggcctctcacatcgacagggccctcgctcatgcgtcgaccgcgtcaacgcaatcgtcgcagccaacgaggctgcccgacaggctgctggaacggctctgggtgaagatgaccgagatgtacgggcaccgctggacgtcgagttttggcgacaacccgaatcctgacggcgcctgggctaccgtgctccaggggctgaccggccagcaactggcccacgggctcaacatgctgacgttcatgggcagccggttcgattggccgccggcggcgccgacattccgggagctctgcctgagcgtccaaccggagtcgctcggtctgccggaccacgacaccgcgttccatcaggccctggcgtgccgctaccgccaccaggtggtcaaggccgccgccgaggctaccggcgttttcgatctgcgcaccggggaggtgagtgacgatcgcctccgcaagcgcttcggtttccactacgccgagatggtccggcgctgggcaaacaacatcccgctgagccagcccgtcgtccacgcgattgagcatgacaccgggaagagcttgctggacctggccgaggatgaagccgagcagcagctccgccggcggatgcaggcccagggcctggatgggctcagtggcgcccaggcgcgggaactgctgctggccaagatgcgccgtaaagcgccggaggtgcgtcgtgatgcatga

SEQ ID NO: 327034 - DNA, 597 bp, Pseudomonas aeruginosa
atgcatacgtcgaatcctcgacacgaaacccgcgatgccgtgctgatcgccatcgccgaggacatgatcgcccggaccagcatgtcgcaggacgggttcgccgaacgcttgaacatcgaactgaacctgcgggcgccggaacgctgccgggccaaggattacccggacctgaaggccctggaacgggcggctaccagtcacgtcgactacgcccggatctacaagaactggagcaagcgggttgaacgctggctcgacggcgacgtcgagatcccggcctggattgaagagtcctgggtacaggcactggagcaaccctggcgcgagcgcgcgctgttggagttgtccggtcggtacggcctgctcccggtgcgtccggtcgtggcagaggggatggatgccatgaaggtgttcggcgcactgatgcgtcgccttggtgatgtcgccggcgtcggcaccagggtcttcgacgacatggtcctcgatgcgcgggatggccagttccttccagacctgatcaacgccctggactccactgcggcgaaatgcaccacgctcagccgcatggccaagtcggttctggcgggcgaagggtga

SEQ ID NO: 327035 - DNA, 222 bp, Pseudomonas aeruginosa
atgactacccccaccctggccacgaaggtcaaagacctcctggccgcccgaaagacctaccgcgccatcgcggagcgagctggctgcgatccctccacgatctttcgcatcagtaagggcgccatcgagaaccccagctactccgtgggttccgcaattgacctcatgcatgccgagttgacgcctgagcagcagctcgcgcacctccaagaggccggctga

SEQ ID NO: 327036 - DNA, 474 bp, Pseudomonas aeruginosa
atggacggtccgattgaggtctgggacgacagcacgcctctcccttctgatgaggtgctagtcccattccttaaggaggtagagttggccgcaggaagtggcaagatgtcggtcgaggtgaattcgaggcgtagcctgcgcttcgggaagtacagtctgaagaagcagggggtagaccctgccaatgcacgatgcgtgactattacgggcaacagcatggagccggtactccgtaacggcgcaactgtcggggtcgatgtcggcaatacccggatcgttgatggagacctctacgcgatcaatcacggcggcctactccgcgtcaaacagacttaccggctgccgggcggaggcatccgacttcgcagcttcaaccgcgacgaacatcccgatgaggaatactcacaggatgaaattgtcgctcaagagatcgagatcatcggccgtgtgttctggggcgcgatgttcttctga

SEQ ID NO: 327037 - DNA, 807 bp, Pseudomonas aeruginosa
atggatgatgaacaactgaccgctctgctcctggccgttgaggtcctcgacgagcgtgagagcgtcatccgccagcgcctgctctaccaggaaaagatcgacatcctcgtgacggtccagcagcacggcgccggcgcgatcgccacactcaccaaaggcggtcagatcatctacgaccgagacgccgaggcgaccgccggccccgaccaggattttctggactgggcaatctttcgctcgccgccgggcacccgtgctgatggcctgatctacgatggccctgagacaatccaactgctcgtcatggatcattcctaccccggccgcgcggtgatcggcagctactctccattcaaggacctggcggcgtacgaaacgaagggcgaatgccgcgacgaatcctttctccgcgctcaagagttcttcgctgtgcttgccatagctactccactttccgttttggagcagcatggtcgcatcacaacggacttcacttaccctccgctcgtaccaggtctgaaagatggccgccagggtacgtggctaccgcgcacaatgccgaacctcgaggagttacgcctgcgatgcatgggcagaggtgctacaccctggccgagaaacggcggtgattacctgcgatttctcttgtttgtaaagcggatcatggcctgcccgttgagcgataccgacaaggtcaacctaatccaccgttccgcattcttcttgggtgaggatggccactccttcggtcgcttcatcgacctccacggtgggcctgacgccctgcttcgccaactccaccactag

SEQ ID NO: 327038 - DNA, 264 bp, Pseudomonas aeruginosa
atgaagcagttcgcgaagcttttcgagttcgaagacctgggccaggtgctcgtgatgcttgatcgcggggatgacggcccggaggtgcgcctctacttcaagcccgacggcctgggcgtctgttcagtggcgtgcagcaacttccccggcgacgaggatgagcagtgggaccacgccgaaaaggggttcgccacggtggactccgaaggggttcacaagctcgtcgccgaggcaatgaaggtcgtcccggatcgcttgggctga

SEQ ID NO: 327039 - DNA, 981 bp, Pseudomonas aeruginosa
atgacagcccaaaccgccgcaaccatcggtgaagaactcgtcgacgagctcgccgaagaactgcccagcaacgtcaccgccatcgccgccgaatctctcggtcgagaccttctccagtccctgctacaagaagtccgcgccctaccggatgtttggcagaaactgtccgagcaacgtcaggccgccgtgatcgagcgcatgcgcggcgccgtagagcgcaccgtgaaacacgcagtcaagctgatctccgcaggcgagcgcccggccatcgacggaattctggagtccgtggcgatcaaggaaggcatcaaggcgaccttcaaggttagccagttcaacccgctgcgccacgacctgatcgaccgcaccggcaaggtctgcatgctggtggtggccgacgccgctgagtacctggagggtatggatgctatccagcccgatccggaccagaactcgctcgccctggaaaatggcggcgacgcggacggcactggcgcgcaggacccgctctacattgaagcggtcagccatgtcatcgacacacgccgggtcagcatcagcgggctccagcgctacctgaaaatcggctacaaccgcgccgcgcgcatcgtcgaggaaatggaagccgccggcgttgtatcggcaccgaactccaacggcgagcgcgaggtgatcctgcaatcaccgccggaaccggaaaaagacctgctgagcagtgccgccgagcccggcgccacaacctacggcggccacaccatcgacgacatcaccgtcctggtgctgcgcaaagacgagatcaccccgggctggctgcagtcgcgcttcgcgctgagcaccgacgagtccttggctgtcgccctgaagctgctcgacgacggtgtgatcacgctcaccaccgaaggcgaatcgcctgacctcaacacctaccgcgtcgccgttgccaccaaggccccggccgaagagcccatcaccctggagtga

SEQ ID NO: 327040 - DNA, 309 bp, Pseudomonas aeruginosa
atgtccgtgcacagcctttacgcctggatcaaggtctacaataagccccaagagcagcgtgtgtatggctatcgcaagattcacgatgacctgcgagagttgggagagatctgtgggcgaaatcgagtcggacgcttgatgcaggcagaggggttgcgttcgcaaacgggttatcggcggcgcccagggttttatggcggaaagccagccgtcgcctcgcctaatcaccttgcggggcagttcaaggtcagtgagccgaacaaggtctgggtgacagacattacctacatccgcacctatggacgatga

SEQ ID NO: 327041 - DNA, 708 bp, Pseudomonas aeruginosa
atgcaggcgcgaaccggcatctccgagcgtcgtgcctgtcagttgatcgggctgtcccgctcggtgttgcgctaccagccgcgagccagtgtgcaaaacaccgagctgcaagcccaactggtggaactggcccaagagcgccggcgctttggctatcgccgcctgcacatcctgctgcggcgtgctggcgtgcaggacaaccacaagcggatctatcgcctgtaccgagctgccggcttgatggtgaaacggcgccgccgccgccatggcgtcgcggtggagcgcgaacgtctgagtttgccgagcgcaccaaaccaggtctggtcggacgagatggcgcggtttcgcggctacccgaaagcgatccgcaccgaccagcggcccgagttcaccggcaaggcactcgatcaatgggcctatcagcgcgacatcaagctgaagctgattcagtctggtaagcccacgcagaatgccttcatcgagtcgttcaacggtaagctccgggacgaatgcctcaatgagcactggttctgttcgctggccgaagcgagaatccgcatcgcggcctggcggcgggattacaacgaacaccgaccgcacagcgcgattggcaatctcgccctggcagaatttgctgcaagttggcgaactcgccagcagcagctgaagcaggaaaaattaatatcaaccccagggcctactgactag

SEQ ID NO: 327042 - DNA, 264 bp, Pseudomonas aeruginosa
gtgaaaaagcgttttaccgaagagcagattctcgacttcctcaagcaggcggaggccggtgtgccggtgaaggaactgtgtcgccgacacggcttcagtgatgcctcgttctacacctggcgggccaagtttggcggtatgaccgtggcggacgccaaacggttgaaggatcttgaactggaaaacaaccgattgaagaagttgctcgccgaggcccacctcgacatcgagtcgctgaaagtggtcgcccggggaaaagggtaa

SEQ ID NO: 327043 - DNA, 597 bp, Pseudomonas aeruginosa
atgctgcggctctcgatgccggccctgctcctggctcttgccggctgcgccaccaagccccccgccaatcccgacaacctctgcgagatcttccgcgaaaaaccgaaatggcacgaggcggcgctgaagatgcagcagcgctggggcgcgccggtccaggtgccgatggcgatgatgtaccaggaatcttccttcaagcatgacgccctgccaccgcgctactacttcctcggtttcatcccctggggccgggtcagctccgcctacggctacgcccaggccaaggacgagacctgggccgactacaagcgcgaggccggcggctggggcgccagccgcgacgacttcgccgacgccctggacttcatgggctggtacatccagaagagccagcgggtcaacggcgtctccaagtgggacgcctacggccagtacctgaactaccacgagggctggggcggctaccgcaaccgcagctacgacgccaagccatggctgaagaacgtctcgcagaaggtccagtcccgcgcctcgctgttcggcgcccagtaccgcagttgccagcaggagctgtcgcgcggcggctggttctggtag

SEQ ID NO: 327044 - DNA, 1188 bp, Pseudomonas aeruginosa
atgcggatcgccctcctcgcgcccctgccgccggaaaagaatggcatcgccgactacgccagtcatttccgcaacgccctgcagggtctcggcatcgaagtagccacgccgctcgccggcgtggcggccgacagcgcgaatatcgccagccggctggacagcgtcgactggaacgccttcgacctggtccatgccgaactcggcggcggccgcctgggcgagttcatcgccctgcgcgagctgcgcaagcgcttcccgcgcctgccgctgagcgccacggtgcacgatccggagcgcatggtctggcgccgcgagcgcctgccctggccgctgaacctgctggaacgcctgccctctcccctgccccaggccgccgtggtgctcgccgacccgctgaccctgcgcgaagagcgtgccgtggcccagggcctgacgcgcctggtgaccctcaccggcctgggcggcgagtgcctggcccggcggatgcgcctgccgcccgggcgggtcgaggtgatcaaccacggcaacctggagatcgccacggtgccgctgccgtcgctggacaccctgcgcctgctgtacttcggattcatctatcgcggcaaaggcatcgaggacctgctcgaggccctcgccgacctattcgccagcgcgccggagatgcgccagcgcgtgcgcctgaccctggccggcggcaccgccgcggaaatggccttcggcgccggcggcaactacctcgaccagttgaaggcacagatcgccgagcttggcctggccgacgccatcgactggaacctgaacctggccgccgcggacatcccgcgtaccatccaggcccaccacgtgatggtcctaccgtaccgcgagtcgaagaaactcggtctgctcggccagcagcgcggcaccagcggcgccctgtcctgggcggcagcctgcgggcgcggcgcgatcacctcggacgctcgtgccttcgccgaggaagtcgccagcggcaacggcgccatctaccctcagggagacgtggcagccctctccgaacagttgttgaacctcgctcgcgaaccccgcctggcacaggcctgggccgagcgcgccggagcgatcggccatgcgcggacctggccgcgcaccgcgctgcgcttccaggcactgttcaacgacatggtgggaaccgttcatggcacgtaa

SEQ ID NO: 327045 - DNA, 1026 bp, Pseudomonas aeruginosa
atgaatttaataattattcttcctataatagctgccttggctttcctgctgacggcaattttgcggagatatgcgctggccaatagcgtgattgatgtacccaacgaccgtagctcccattccatgcctactccacggggaggaggcgtctctatagtgataagttttttgctggcaatactgcttctgggtttcttaggggttgccgattggacttttgtgattgcattattcggggcgggccttggtatcgctactattggcttccttgacgaccatggacatatcgctgcccgctggaggcttctcgggcattttgcagctgcatcctggatactttattggctgggcggttttcctccgctgcttcttctaggtaccacccttgatatggggtggtttggtcatatattggccgccatatacttggtttggatgcttaacctctataacttcatggatggaatcgatggaattgccggtatagaagccataaccgtttgccttggcggtgtactgcttcttttctgcctgggaaaggggctggataatgaaggggtttgggttcttgccgtgcttgcaagtgccgttctgggctttttgatttggaacttccctccggcaaagatattcatgggagatgcgggaagcggattcctgggtgtcgttctgggggcgctttccgtcaaggcagcatgggtggccccggagcttttttggagttggctgattcttctgggtatttttgtcgtcgatgcaacatttactttattacgaagacttcttcgtggggatcgcatttatgaagcccatcggagtcatgcgtatcagtacgcatctcgatacttcggaaagcatttgcctgtcaccttgggagttttcttcataaatgttctctggctctttccatttgctctggcagttggcttgggaatggtcgatgcgctactaggtgtgtttgttgcatacttgcctctgatcttgattgccgtgaggtttcgtgccggatcgctggagacggtttga

SEQ ID NO: 327046 - DNA, 960 bp, Pseudomonas aeruginosa
atgagcagaatcctggtgacaggggcctcaggttttgttggaagggctttgtcggagcagttgcagcgtctggggcatggagtcgttgccgctgcacgaagcacatcctctcgcattccttcttctgtacggtctgtattgactggtgacctgtgtcccgatactgactggtccgaggccttgcaggcggtagatatcgttattcatgccgcggcgcgcgtccatgtgatgaatgaaacgcttgccgatccacttcaggagttccgcaaggtgaatgtggaggcaaccttgaacttggcgcgacaggctgcgagcaagggggtacggcgcttcatatttatcagttcaataaaggtcaatggagaagctacagaggatgggcgtccatacagagccgatgacgaaccccggccgattgacccctatggcctgtctaagctagaggcggagagaggtcttctggatctggcagcaagaactggaatcgaggtggttataattcgcccggtcttggtttatggtccaggcgtcaaagccaattttctcaacatgatgaaggttattaataagagaattccgcttcccttccttctggttgacaatcgaagaagcttggtggcgttgaccaatcttgtcgatttgatcacctcctgccttgagcacccttcggccgcgaatcaagtatttttggtaagcgacgatgaagatctttccacgagtgaacttttaaaacgcatggggattgcactgggtgcgcctgcccggctgcttcctgtgcctgtttttcttatgaagtttatagcaagaatgcttggtaagggtgctttctcccagcgattgcttgggtctttgcaggttgatataagcaagacaaaagaacttttggcttggcatccacctttgaacgtcgatgaggctttgaaggagacggcgcgccactttctggattctaaagaatga

SEQ ID NO: 327047 - DNA, 1182 bp, Pseudomonas aeruginosa
ttgagctatttcaattcaaagggggttaagggcgtgcgcatcgccagggtctctactgtgactttttttgttgagacccaattgagagctcaaatttccgcacttgcccatgcgggtgccgagatcacgattgttgctagtgaaaaagagctttctaaagatattgataattgccgttatgcttctattgtaattccaagaaaaatttctccgcttagcgatctcctggctttgtataaactctggcgattttttcgaaaagagcggtttgacatcgttcactctaccactccaaaggcaggtttgttatgtgcgctagcaggaaagcttgccttcgtgcccatccgtttgcatacttttacggggcagccttgggtgggtttaaaaggtttgaaatatcttctttccaagggcagtgacaagcttatagcgcttctcaatactcattgctatgcggatagtatttcgcagcgcaaattcatcatcgatagcggtgttgcagatgatgacgatatctcggttattggtgaagggtcgcttgccggaattgatctgaaacgtttcgcggcttcgcggtatagcttgaatgaaagagtttctctgaaagcttccctgggtatcggaagagcctcgaagactctgctttttgttgggcgtcttactcaagacaagggtgttttggagttattggcggcttttgagagcttagtcggaaatcatgatgtttttcttatgctccttgggccgcatgagatgagcgaagaagagcttttggccggcttttctagtgatctcaaggagcgacttattcttttggggttttctgatgagccggaaaagttcatggctatagcggatatgctgctcctgcctagctacagggagggtttcggtactgtggtgatcgaggccgcggccatgggggtgccgactatcggttcggatatctatggtctgagcgatgccattgtcaatggtgagacaggcctgcttgtgccagtgaaaaactctcaagcgttggctgcggcaatcgatcagctattaggtgatgagcgactctgcaaggaactgggggaaaaggctcggattcgagtggagaaagaattttccagtcaacgtattagcaatcttttgattggagaatatacacggttgctggagaaagacaggggagactcatga

SEQ ID NO: 327048 - DNA, 966 bp, Pseudomonas aeruginosa
atgaacattttggttactggtggtgccggcttcattggaagcaaggtggtttcggagctgctgaagcggggtatgaatgtccgaatctcctcaaggaagatgcaatccatcgttggggttgattgtgtgaaagtcgacctcctcaacagtgaggtcgatctcgacttcctggtgtccgactgtacggttattctcaactgcctcggagagcttcaggatgagagcaagatgcatgctcttcacgtcgaggcaacagaacggctgatcattgctgcgaaaagaagtgctcgccaatctggtatgccagtgcattgggtccaactaagcagtgtgggtgcatacggtcctgttctggaaaaggccaactccgagcgtattgtcacggaggaaaccgcttctgctccggtaggagtttatgaatgcaccaagacgattgccgatgaactggtgatgtcttccgtcgaaaatggtgttttcagctattctattttgcgtccgtccaatgtatatggttcaggaatgccaaacgggtcgttgcgtcaatgggcgcgattgatcaaggcgcactgttttttctatgtggggcccccaggatcagtttctacctatgtacatgttgacgatgttgtcgaggcacttctgctctgcgcatttgaggaaagagcgaagaatcagatattcaatatttccaatgattgcacacaagagagcctagtggaggcgatggcaggattgcagggagtctctccaccttttttgcgcttcccagaagcgttggcgagaatgatcgccttcgttttttcggggataaagatgtttcctctgacatcatctcgtatagattccttggtggcgcgcactcattactcatgcaataagttgaaccatatattaggttatgtgcctagtcgtgatataacaaaagaaatatctgaagttattctcgataaggaaggccggcgttga

SEQ ID NO: 327049 - DNA, 891 bp, Pseudomonas aeruginosa
atgggtgtagatgtttcaattttgatgccggtctataatgaagttttgcatcttgaagaggctctccaaagtatttctgagcagggtgaaaagctttctattgaggtcgtctgtgttgatgatttttctacggatgggacgtggcagttgatggagcagctgcggaataaatataattttctcaagtgctataagaatgaaaaaaaaggtaagaacaatgccttcaattttgcctatgagaggtctagtggaggtgttgtggtgttgttggctggtgacgataaacttgtacctaacaccttgagagcgcgagtagatccagtactggatcaagatgagaactttattactctctgtaaatatagaactttttcaaaaactaagtacctagatggaatggtttttcctaaggatagagagttaggttctctttcgggggggacaatagctttcaatagaagatttgctgagagagtctttcctattccgcctgttcttggaaatgaggatatgtggattaagtgtcacgccacctatgctgaagacgtgaatgttatccatgttccagttgtttctctgttatatcgtttgcatgataataattctttaaagagagatgttgggttttctaaaaaaaacgaaatgatttcgaagagatccattgtttatagtgtttatctagagaggtacaggggagagctctcggtagcggtctccgcttcgttggctaagctcgctgctttagaaactcttcgtgcaaatcgatccattctcagcattctcttcttcaagaatattcctcttgtcgataagcttcgagctattgtttatgcttcgccgttgctccattggattcatattaggctgttaagatggacctcaagaacttga

SEQ ID NO: 327050 - DNA, 1425 bp, Pseudomonas aeruginosa
atggttaatcaagggggcgttgtgatcaagagctctaaaactttgctctttggcttcttgattcttgttttcctttttgtctgttacttttttagttttgatgtaagctcctatgttgatgagctttcgatagcttttatagtgcttgcgctttttgtttatatttttctctcattcctttctttagggtttaagcccacctctttgacagttcttttttttgtatcgacggctgtgttcatttttgggcggtttttttcaaaaatattgaatcccgatgttgatatttttgcaatagacttttttgctacatataaactagctccttatgatggggtgaggcttggctttttatcgatgatattcctgttttcaatgtatatgggagctgtgctggggcgggatatcaagtttaagctaggtagttctggcggtgtagaggaaggaggggggcatttctctcccatgcttcgcatggttatctttttcttggttgtcattatctgctcgataaatctgtatgtagaatacaggaattatgtgatttcgtcatctgatggttatctgtccctatattcttttcagggcgaggcttatgccggtggtaagttttttaaaagcctcttctatattgcacttggtttgagctactcattttgtctagagcgtgagaagaaaataataatactctcgttgtttgtcatggggctcttgtctttgctcgcaggacagcgaggagggtttgttatttctctattcatgctgctctgggcatatggaataaaccataaggtcagttggtttggcgtactggctgccttttctttgttttttctcagcctggttttgtttggctctttaagtgcaaggagtttggccgttaatttagatagtggttggttagggtttgtctccaagtttctatatgatcaggggatatccttgatggtctttgatgtttctactaaggtttctgactatcctctggtggctacgattcagaattttgtccctggtgcgtctaggcttgcatcaatcttctatgacttgcgcatgcaagacgtgagttatgcagactatcttgcatatcacctcgatcctgttacatatcttggagggctaggtttgggatggagcctacctagtacgttttatatatggtcgttcgagcaggtttttctattttctgccttttcagcatgctttggtttcttgttgaaaaccctagataacaagaccctttccagttcattttttctgggcctggcggcttgcctggtttcggtgattatcattcttcctagaagccagttctctaatgttattcctctggcgatatatttttgtgtattttttcccgttttttcggctttcgcaaaaaagtcaaaatatattatgagtagcccggttagcgatagaggataa

SEQ ID NO: 327051 - DNA, 1428 bp, Pseudomonas aeruginosa
atggtttctcggaagatagcggtttttgctataggctctatcgggtcggctgttcttggtctgataacgctccctataattacttggttttattccgctgaagatgttggccggattgcaatgcttcaagttgcctcaaacttctgtgttctccttttttgtctagggttggatcaagcctatgtgcgtgaatatcacgaagaaaaaaatcgctcggcattattgaaatcttgtcttttccccgggttgttttttttgcttttgtcttgttcttttttgtttttttataatgcatcgatactttctgattttatgtacgagaaaagcgatggtctacttgcctatctgacaatgctttgttttgtttttgcattggtttctcgcttcctctccctgattctgagaatgcaggaaagagctcttgcgttctctttgactcagatatcgcctaaaattctttttttgatcgtcattgcgtcattttttgttttttccataccggcctcttttgtaagtttattagtggcgcaagcaatatctatgtttacgatcatgtctatttttgcttggaatacccgtggtgaatggagaccatggaatgcctatacgttgtacaagacacagtttcatgagttgttgcgtttcggtctaccattagttgtgggcggagtggcggcatggggactgtatgtcatggatagactctttttgcgtgccttctctaccttttcagagttggggatatattcagtagcggtgagtatcgcagcaggtgctggtattcttggaaacatttttacgaccatatggtctccaacggtcttcaaatgggctgccgagggggttgatgaaaagaaaattgatgaaatatcggagcatgtactggcgtgcgttttctatatatttataataagtgggctgttctcttggatggttccactttttttacctgaagcatatgcgcccatacagtacatgataacagtatgtgtggcctctcccttactttatgctctctcagaggcaacggcgatcggcatcagcatttctcgccgaaccggtctttctatgctgtcttctattttagctgcgttaactagcttcggtggtaattatctgttggttcctctctatggagcagctggtgcagcggtagctactgctgttgcgttttgggtttttctattctgccgaactgagttttcgtgttcggtgtggcgtaagatacctaggcttaagctttatatggttacctctttctgcactttgacaagctcattgattctgctctccgaagaaaaaaatcaggctcttatcttggttttctgggcattacttggattgaaaggagctttccttttccgaaaatctattgggcttcttctttcggtgcttatttctcactataggaaaagaaaaacatgttga

SEQ ID NO: 327052 - DNA, 1233 bp, Pseudomonas aeruginosa
atgagcagtattctcatacttacaaatgctttcccttattatcctggggagcaatttattgaagatgagatagcattttgggctgagagctcattttccgaggtgtatattttgcccgccacttgcggaaaagatagaagatggctgcctgagaatataacgctctcaaccccgattcaagaaaaatcgagattgaatttgatttttagagcgcttatttccgctgtcttcataaaagagattcgatgtttgataaaagcaagggagttcagctttttaaaattatattatgcattaaaagcgtcggcattgaccaagtcatctgagttggcgttgcgccaattcgtatccaataatggaaaaatcgatgtcgtttattgttattggaatgatgtacaagcttacgcttcttgtttgctgaagcaggaagggttaatcggtaaagtaatctctagagctcatgggttcgatctttacgaagagcgacgcgcgcatggctatatgcctctgaagcgacagtttgttgattgttttgatgccgtatttcttctttccgaacaaggcagaaattattatcaagagcgctattctgcagccgatgaaaaactcaagatttctaagttaggtgtacccattcccaaaggtggttcaaaagtaagtgaggagggactccatctggtctctctttcttcatgtattcctataaaaagaattgacaaaatcatttccactgtgaggcttcttgcccttgaacaccgctccattaaaataaagtggacccacttgggaggaggagctttgaagcttgatctcgagtctctagccaggacggaactaggagagcttgagaatgtaagttttcactttatgggagaagtcgaaaataaagaagcgaaagcttttttcctaaataatgctgttgatttctttattaatgcaagcgagtcggaaggtgtgccggtttccattatggaagcgatgagtgctggcgttcctgcaattgctccttgtgtaggtggaatcagatctctgatagataatagttgtgggcggttgctttctgaaaaccctactcccgaagagtactgtagctcaatttccaaactctatctgggaggagacaggaaaacaatgcgggaaacggcacgtaaaaaaatagagaaagattttagttctgagcagaactataggtcttttataaaagaagtagaatatttagtagaagaaaaataa

SEQ ID NO: 327053 - DNA, 1083 bp, Pseudomonas aeruginosa
gtgattgactttattgacctgcgggcgcagcaggcacgtattaaagataagctcgacctcgcaattgcccgggtacttgagcatggacaatatatacttggtcccgaggtggctgagttagagcaaaagctggccgattatgtcggggttcggcactgtatcagtgtagctaacgggacagatgccctgcagattgcgctgatggcattgaatgtaggggctggcgatgaagttattaccccgggattcaattatatagccactgcggaaacagctgcattactaggggcaacaccggtttatgtcgatgttgaccctcgctcatataatctagatccaaagctgctgaaagcagctatcacagcaagaactaaagcgattattcctgtatcgttgtatgggcagtgtgccgattttgacgagattaatgagattgcagcggagtatggtatccctgttattgaggatgctgctcagagttttggtgcaatctataaaggaaggcgctcctgtagtttgactaaaattgcatgcaccagctttttccctagtaaaccattgggttgttacggtgatggtggagcaattttcacggaagatgacggcttggccgaggttatgcgccaaatagctcgacatggccaagaccgtcgctatcatcatatccgggtgggagtaaatagccgccttgataccttgcaggcagctatccttctttcaaagatggaagtttttgatgaggaaatgcagttacgccaaagagtagcacaacgttacagttctttattgcaggctgcagggcttgactctatgccctacattgagccgtataatgttagtgcttgggctcaatatactattcgtgtgaatgaacggtataatgttcagagctatcttaaagatgcaggtatcccaactgctgttcattatcctatccccctgaataaacagccggcggtttctaacgacaaagcatatctgccagttggggatatggttgcagaagaggtattgagtcttccaatgcacccttatctcactgacgaagcaattgagactattgttaaggctctcgtcaaatga

SEQ ID NO: 327054 - DNA, 627 bp, Pseudomonas aeruginosa
atgaagaaggtcacccattcttggctaaattggtgtgatgttatggggttttatcagcacgatagcgcaattgttgacgaaggagctcaaattggagacggttctcgaatttggcacttcgtgcatgtgtgtgcaggggctagaattggcaaggaagtttctctaggccaaaatgtgtttgttggaaataaagtatccattggtgatcgatgtaaaattcagaacaacgtatctgtctatgacaatgttactctagaggaaggggtcttttgtggaccgagtatggtatttacaaatgtccataatccacgttcgctaattgagcgaaaaagtgagtacctgaatacactggtgaaacgtggcgctaccttgggagccaactgcaccattgtctgtggggtaactatcggttcctttgcttttgttggggctggagctgtagtcacgtcagatgtgccatcatatgcgttgatggtaggtgttcccgcacgacaagttggttggatgagcgagtacggtgaaagacttgatttgccggtgaatggaaaaggtaaggctacttgtccacatactggggatacgtatcgactgtctgcagatggactggtgaaggagttggtggcgtga

SEQ ID NO: 327055 - DNA, 948 bp, Pseudomonas aeruginosa
atgaaacgttttgctctcattggtgctgctggttacattgcccccaggcatatgcgcgctatcaaagataccggaaatgtattgacatgtgcctatgatatcaatgattccgttgggataatcgatagtatctctccgcagagtgaattctttacggagtttgagcgattttatgactatgcttggcgattaaagcgtaggcctgagcaagctttagactttgtctctgtctgctcgcctaattacttgcatcattcccatatcacagcaggtctccgtttgggttgcgacgtgatctgtgaaaagcctttggttcctagttctgaattgctcgatgatcttgccattgtcgagcatgaaaccggtcgtcggctttggaatattctccaattacgtcatcatacagcaattcttgatctgaagaagaaggtggaaaatggcaccaaaacccacaagcatgaggttgacctgacctatataactagccgcggcaagtggtatatggaaagctggaaaggcgatcccagaaaatcctttggagtggccacgaatattggtgtgcatttctacgatatgttgcatttcatattcggtaggttgcaaagaaatgttgttcactactcaaatgaatctaaggcaacaggttaccttgagtatgaaaatgcgcgagtgcgctggttcctttccatcgatgccaatgatcttcccgcctctgttaagggtaaaaaacctacttatcgctcgattacttgtgatggcgtagaagtcgagttttcagaaggttttaccgatctgcatacgctcagttatgagtcgattcttgttgggggaggcttcggaatcgaggaggcacgtcattgcgtagagacagtggaaaccattcgctccctcaaagcagtaaaagctgaaaatgaagaaggtcacccattcttggctaaattggtgtga

SEQ ID NO: 327056 - DNA, 1314 bp, Pseudomonas aeruginosa
atggaaaacctgagagaaaaagttactagaaagttcaaggataaagaggctcttgtcgggatcgtggggttgggctatgtcggactcccgcttatgttgcgttataattcgatcggttttagagtgcttggcattgatatcgacgccgaaaaagttagaaggctgaattccggtgaaagctatattgagcatatatccgcggaaagcatttctcacgcttgctcttctggttttgaagctacgaccgatttctctcgggcaaaagagtgcgacgcacttattctttgtgttccgaccccgctgaataaatatcgcgagccggatatgagttttgtggttaatactacggaagctattaagccgtatctgcgtgaaggacaagtcgtctctcttgaaagcacaacctatccaggtaccactgaggaggagctgctacccagggttcagtccgatgggctggtcgttgggaaaagtatatttctagtctattcgccagagcgtgaagatccaggtaatccgaattttgaaacccgcactattccaaaggtaattggggggcataccccggaatgcctggaagttggagtcgctctttacgaacaggctatagataaagtagttccagtgagctctaccaaagctgcggaaatgaccaaattgctggaaaatattcatcgcgcggtgaatatcggcctggtcaatgagatgaaagtagtcgcggaccgaatgggtatcgatatttttgaagtggtagatgctgcagcgaccaaaccttttggatttaccccttattatccagggcctggtttgggagggcactgtattcccatcgatcctttctacctgacctggaaagcacgcgaatatggcttgcatactcgcttcatcgaactttctggtgaagtcaacaaggctatgccggagtatgtagtcagtaagctaatggatgggctgaatgaaagaggtaaggctcttaaaggcagtcgcgtcttggtactgggtattgcctataagaaaaacgtagatgatatgcgtgagtctccttcggttgaaatcatggaactgattcaggccaaaggaggcattgtctcttatagcgatccccatgttcccagtttccccaaaatgcgtgagcatcactttgaccttgctagtgagcctctgactgccgaaaggctttctcgtttcgatgcggttgtgttagcaactgatcatgatcggtttgattacgatcttatccatgctcacgccagcttggttgtagatagtcgtggaaaatatcgggcgccatcgcagaaggtaatcaaagcctga

SEQ ID NO: 327057 - DNA, 1038 bp, Pseudomonas aeruginosa
atggtagcgttgaaagaagaaaaaaacggtggcggtgaaattgatctcgtaagactttttcagattctatggaagggaaagtggattatcctggtcgtagctcttatatttggcattgttgctgctatatatgcctatacaagtaagccggtttatgaagccagtatcgccgtgttgccaccctcgctgagcaatgttgccggttttaaccaggggcgcaccaaggagtcgggtcttcaggcatttaaggttcaggatgtctattccgtgttcttgcgcaatcttcaagctgatgagactcggcaccgcttcttcgagaatgtctacttgccgtcgctaggaggtgagaggccggcgtcgcgcgatagtctctatagggtatttaatgaaaagatcagtattactctgccagacaagacccagccgagtcgctatcggctaacagtagaacaggaagatcctgagctggccgctgagtggatccgtcgctatcttgccgatacggccgaacattccgtccaagaaatggttaagaatgcgcaccgtgagatagaggtcaaggctcgggatgtcgatcagcggatccaaacgctacgtgaaactgctaagttacgccgtgaagatagaattgtgcaacttagagaggctctaaaagtcgcggatgctgtggggttggaaaagcctccgatgataagtgggcaggtatctgagcagctttcggctatcatgaacggtagcttgatgtatatgcggggcagcaaggcgcttagaggagagatcgaggctttggaaagtcgtgtgtcagatgatcctttcatccctgctttacgaactctgcaggagcaggaaaaactctatagtagtttacgggtaaacaccgacgaggttgctgtgttccgtcaggatggttcggttgagacgcccgattctcccgtgaagccgaagaagcttttactcgtcatgatggggttgttgctcggtggtgcggttggtgtcgtgactgtcgtgtttaattcgctctatcgcaataagcggtaa

SEQ ID NO: 327058 - DNA, 417 bp, Pseudomonas aeruginosa
gtgctgactccggagcaggctgtaaagctgctcacgaagctgtatggcggcgcaccgccaagcagaggcagagcacgtaccatcgacctgtacgacaactgggatgaatacgcgctgctgctattgcccgggcaccaggtcaaatcagcggagcgcatggcacgaagggagaaataccaggaggcactgctgcgcctggccaagcccggcgccaaactctcgatcatcgacgtgatgctcgaagaagccaggcaacgtgcccgggaagaccgcggggtggcgctgcagaagctccttttgatccaggacgggggcgaggtacctgaggattggcagcttgccgtactgtgcggcacaccctacaccggggcgctagcccgccacggtcagccggatatgatcgaggtacgcgcatga

SEQ ID NO: 327059 - DNA, 408 bp, Pseudomonas aeruginosa
atgagacgcagcgaatcgtcccccaggctccagctggtcctgacctgtgacttgggcacactgtggaccggggcggcctggatcgaaccctgggaagagggttcggaaggccaagcgaaaatctaccgcaacccgttggatgcctaccgagacgccttggcgctgaaggtctcggaaagggagtacctggagcagaccgatgcgcgggaaatcgttctgtgccaattggttgcggacttcgacgacccggtgcgactcctcagcaccgcgcttacgagcaatcgacctgcactccggcggcgctggcaagaggctttcaaccaccccctccctgaagcggacctattccccaagcccccgcagcaagccgaagcattcgactcgtacgagtcgccgctccagccctga

SEQ ID NO: 327060 - DNA, 330 bp, Pseudomonas aeruginosa
atgtctgagctgaagccttgcccattctgcggatcacccgccattgcggtggatgacgatggactgaccttcgttcgttgccagcctggatctggttgcaagggaaccggtctgatcagcttctggcagaccgagaactctgatacagccatcgctgcgtggaacacccgcgccctccccgctgaccaggttctggtgccacgagcgctgctcgaagacatcgagatgacctggcgcatattcgacaagaactccaagcctttcaacgaactcggcgagcagaagatcagggatggtctgagcaagctccgcgccctcctccagcgctga

SEQ ID NO: 327061 - DNA, 438 bp, Pseudomonas aeruginosa
atggctgacaacgtggtcgaggtgggcgatttcagcatcgcgcgcaaagggcgcatcgatcgatatgatcggcagaaatgccggcacttgcgcgttgagctgaacgaccacggtgagacggtgatctgctccgactgcggcgtgcaagtatcggcctattgggcgctgaacatggtcgccgagcggttgagcgctgagtggagcaagctccagagggccaagaaacagctgtccgaggacaagtcggaaaacctccacctggttgctgctcgcgtcgtcgagaaggcctggcgcaagcgtgacctggtgccttgctgtccccactgcggcgaaggcatcagcccaacggatggcttcggaaattcgctagtgagcaagcgcatcgacagtgcccggcgcgcggccagggccaagcagagggagtcgcaccatgtctga

SEQ ID NO: 327062 - DNA, 921 bp, Pseudomonas aeruginosa
atggcagctgagattgccgatttacgtgcctccctgcaggcggagaacgcagaccatcgactcgaactgggtgggcagcagatggacttggatgccgtccaggcgcgggtggtgaagttggagcagtccaacgacaacctgcgcaaggaccgcaagcgtttgaccttgcaggctgttgccctccgggatgagattgaggctctgcgcgcgagtgctggagaggggcaggagttgatgcgcttcgagtatcggcacccgaacggcgaatcccacacgatacaggtgagccgggaggatgttttgcagcagatgcccgatttcctctttgaagccctgtgcgcaaagttctgccgctgcgagccgatcggcgagaccaacgtcatcgagtgcagctgcgacgaatacgccgaagaattccagctgctggccgccgcaccgacgcaggttgtgccgaagtggcaaccgcttaccgggcctggtcaggtgaggaaaggcgatgtgctgaagttcacgctcgccggcaaggagatcgaggcgccggctcagctgatcatcaacgaaggcactgggaaggaagagatcgtctacaaccgaggcaagaaccactacttcatcaccagcatggccgtggccggcaccagttcgcatcgcagtgtcatggtgatgggaaagcgccccagcggcagtccagtgagcgaagctgatctggctgagctccaacgcgatgccgcgcgctatcgctgggtgaagcagcgggcctggtacgttgatcgggcggccgaggtgtacgagttggaccgcgtgcgtggatcagccttccgtgaagcggttccggttgatgatgacgacgtcgagtcggctatcgatgctgcgatgcagagtgccgcgcacgacgagatcgaggaaggccgcgatggctga

SEQ ID NO: 327063 - DNA, 864 bp, Pseudomonas aeruginosa
atgactgaaacacaagcccgggcgaccgacatcgtcccccctgaagatatgaagtggctgctccgcttcgcggaagtctgtgaggactccgacgccggcgggcacgatctgcccaaagcagctgtgaagcggctggagcaattgggcgctctgcgctccagcggcttcggccgccacgagacgacagcattcggtgcatggctgctcaccgttgcaccagccgcgactcaaggtgggcagggaccggacgatgatgcattcgctggcattttcgccgagtggtgggaagctgaaggtcaatactgccgctccggtggaggagactatgagcgcacgttcgccttccaggcatggcgccatctctaccccctgctgctgcaggcacgcgccgccctgaccagggtggcggaagcgaccgcagcgccttctttcaactactgcccgtgcggttacgagtgcgagcctgaagtcacgccgaggtccaacaatcttggcaactacttttgggcagagtgccagagctgcagaaagtcggtttctgccttcacggagatcggcctgattcagacttggaacgctgtctgtcgaacgccgcggaagcctgtggcccaggctgggcaggtgcccgagggtgtccgtgcatggttcgaggccaagcaagcccacgtcagcgccgtggatgcctacaacgcacgcctgaagttcgtgcgcgaacattgccctttcggcacaaacgttgaccctgagtaccagctgatggagaaggcagaccggaaggcgcgaggcctggtaggtccgatgttcgatgaactgcgcgaattgctcggtaccgcatcggcccagcgagcaggtatccagccatga

SEQ ID NO: 327064 - DNA, 1143 bp, Pseudomonas aeruginosa
atgagtgaccgtaccggaatcgaatggacggacgctacctggaaccctctacgtgggtgttctcgggtctccgccggatgctcccgttgttatgctgaaggggtagcagcgcgggtcatccgcatggaccggggccgcggagtggccgacggagatggagcctacgatgggctgttggccaagggtggccagtggaacggaacgatcaagatcgtggatggggtgctggaccagcctcttcgttggcgccgcccgcgccgggtcttcgtcaacagcatgtcagatctgttccacgaggccgtgcctgacgaggtgatctatcgcatcttcgccgtcatggccctagcggagtggcataccttccaggtgctgaccaagcgcccccaacggatgcgtgatttcttgagggcgttcaccttcgagcggctggtgaactcctgcaggggcgaggacggcgcgagcgtcatttacggccgtaccatgcaggccttgcagcatcactttgggcagatcatcggtagtggcttaaagggcttcaatcgggttgaccgctggccgcttcccaacgtctggctgggcgtgagcgtcgaggatcagtccactgcagacgagcgtattccgctactgctggatacgcctgcggctgtgcgctggctgtcgatggagccgcttctgggaccagtcgatttgttgagcactggcgacgttctgtgccgttgcgatggatgcttgcaagccgcagcggaaagtccagacatcgcagggctgcagcgtatcgactgggtggtggttggtggtgagtccggccctaacgctcggccgatgcaccctgactgggcgcgggaaattcgccggcagtgtgccgccaacagtgttcccttctttttgaagcagcttggcgaatgggctcctggtgagtgtgtcgtgcgcaatcgcggaatcgttcctgtcgcctggcgcgtcaacgactcctggcagtttggcgaagaagatctcgcggctgcgggcggccatattgatgatgagccggacctgtatcgcgtcggcaagaaatctgctgggaggcgcctggatggcgatctccatgatgggtatccagatggcttccccataagcaacctccccgattgccgaactgcctaa

SEQ ID NO: 327065 - DNA, 693 bp, Pseudomonas aeruginosa
atgtccgaatacctctgtgtccgccgagatcatctgcaggctgtttacgacgcagccttggacgccgatgaaagtgggctggcgagccatgtggagccgatgcgagctgtcagcttgattcttgcatcgcctgggtatcctgtgccccaactgccggctgccggtgcccctccgctggaaggtggctcggcccttcaacatgctcccgcatcgctcgttcgccagctgcagcagttggccggaaatctcggggggacggtcggtggaaagttcctcctcgactcggctggtctggagcggattgcgcatgcggctgtagagccgtatgccgaggtgctccgcgagctggcgtcttggctcggtgccggcggcttcaatgccgacgctgtcgagccgaaagtcttcgaggagaagatccgctggggtgtgaaccatcttgccccaggttctgagcctgcccatgcgaatgccggccaagcggcacgatcggtagcgccttcgacggaaccgctgatgtccatcatggacctcggcgcagatgctgactgtcctctctgcggtgattgccggcatatcgcggtgagtgatccggttgatgcaccgatggatacgatcgcctgcccgatgtgcgccggccacgcggacgaggatccgcctgctgaggctgttgagagaggtgacaggcatgagtga

SEQ ID NO: 327066 - DNA, 1182 bp, Pseudomonas aeruginosa
gtgagcaatctgatcctcgctgccgacagtcgtacgtccgtcgatcaatcgccagaggtcgatgaacttctggccctcgacgcggttgtcgccttcggcgtcagcggcgggaaggactcggttgctgctgccctggcgggacatgagtacctggagaagatcggacaccagggcccgcgggtcctagtccactcagacctcggccgtgtggagtggcgctccagcctggcgaagtgcgaagagctcgctcggcatctgggatacgacctgctcgtgaaaaagcgccaggccggcgacttgatggacaggtggttggtgcgttgggatcggaacgttgcgcgatacacggatctgtcgtgcgtcaagctgatcctgccctggagcacgccgtcgatgcgcttctgcacatcggaattgaagacccacttaatcaacgccttgcttcgctcaacctatcgtgggcagcacgtgatcaacgtgacgggaatccgggccgaggaaagcgtcaatcgtgctcggatgcccgtggccaagccgaacccggcgtgtgcgtcaaaggggggcattggcttcacctggcatcccatcaaggattggagcgtcgccgatgtcttcgcaatcatccggcgccatggactgaccccgcatgaggcctatacccggtacgggatgtcgcgggtgagttgcgtgtactgcgtgatgtcctcagctgcagacctgcgggcagcgacaacgtgcgaggacaatcacgatgtgtaccgagagatggtggacctggaaatcgcttcgacattcgcgttccaggggcagggcttcctcggtgacgtagcccccgatcttctaacccagctacagcgagatggacttgccagggcgaaggaagcagcccgggtccgtcaggatgcagaagcactgatccccgaggggctgctctacacgaaaggatggcctacccggatgcccacggcgagcgaggccgatctgctggcctccatcaggcggcgggtgggggacgcagttcgagttccggttgaccacattgacggccccgcagtcctgcgccggtttaccgagctgatggcgcaccggccaactgctttggacgccgtagaggaccctctgcagcagaactcgttcaaccttcctttcaatcagccggacctgttcttggccgtcggctga

SEQ ID NO: 327067 - DNA, 1290 bp, Pseudomonas aeruginosa
atgccgattcgccacgccatcgtccacctgatcgataagaagcctgacggcaatcccgcgactctgcacgcgcgccaatccgaactgggcgactctcaggccatggagaacctgatggccgacctcaacgaaagctacaacgccaagccgaacaaggcctggggcctgttccagggcgaatcgggggcatacccgttcagcggttggctgaacgagtacctggacaacggcaaggacttcgttgccttctctgtgcaggcagtggagcacctgaagttgctgatggaggagtccaacctctccaccggtggccacgtgctgttctgccactaccagcagggcatgaccgactaccttgccatcgccttgctgcagcatagcgaaggtgtagtggtgaccgagtcgctggatgtcaccccgtcgcgccacctagacctgggccagctgcacatggcggcgcggatcaatatctccgagtggcgcaacaacaaggcctcgaagcagtacatctccttcatcaagggcaagggcggcaggaaggccctggactacttccgcgatttcatcggctgcaccgaaggcgtggacgggccgagcgagacccgtaccctgctcaaggccttcagcgactttgtggaaagcgaagacctgcccgaagagcaggctcgcgagaagaccgacgtgctggtgggctacgccaccagccaggccaagctcggcgagccgatggctctggacgccctctccgagttgatggatgaccaggcgccgcgcgccttctacgactacatccgcaacaaggactacgggctttcgccggagattcccgcagataagaaaaccatcaaccagttccgccgcttcacggcgcgcaccgagggcctgtcgctcaccttcgaggcacacctgctcggaagcaagatcgagttcgacgaaggtcgtgacatgctcatcatccgtggtttgccagagaagcttcgaagcgagctgcgtaccgcatccccctcctccgcgggccagtccaagcaagtttcctcagtgccggcgccggcgcctgcgttgcgcgactcggcctatgtcgaacccgctgatgcgagggagatcaaggacgatccgctttacgatgaagcggagcgcttcgttcgggagactcggcggcccagcatctccgctgtccagcggaagttgaagatcgggtacaaccgcgctgcacggttcctggaggcgatggaacagttcggtgtcgttacgccgatgaacaccgacggttcgcgtgaggtgctcgggtga

SEQ ID NO: 327068 - DNA, 399 bp, Pseudomonas aeruginosa
atgaccgagcaagaacttctggcacagccgcagagcgaatacatgagcaatgcccagcaggcttttttccgaaacctactggtgcgtcagcggggcgatcttgccgtacgcgtgggtgccgagttggaggagatcgccaagctggagccggcgaccgcggaagaggatctcgcgagccgcgaaacccagcgctcctgggatctgcgcatgctggagcgcgatcgccagatgctgagcaagatcgagcaggccatcgcccgcatcgatagcaacgagtacggctggtgtgaggagacgggggagccgatcggcctgcgccgtttgttgctgcggccgactgccacgctgtgtgtcgaagcgaaagcgcggcaagagcagcgtgagcgccacgtggcgtaa

SEQ ID NO: 327069 - DNA, 1146 bp, Pseudomonas aeruginosa
atggctgcccgcggcgagagttcaatggagccagttaatctggaggcagactccggcggtgattactgggtgtactccccattggctgagtggggaacgatggacgtgttctcgttcatcgctgatgtaacaaacggcaggcgtcgtacctacagcgactttgccgagttgaccgaggtatatcgcgacgccggcggcgactgcatggttaatttgcacctgcgtggtgagggcgagcgccgcgcagcgtgcggtcaacgtactgggtgctggtgttgtacggccgtggcgagcgaccggtcgatggagtccatgcttcagaacgagcagtaccgttggatgcgtgggttgaatgacctgcgcaattacatcctggccaagcactatgatcccgcctccaggtgttggttgtcccgcaagatcgacaagaccacggggcaaatccgcatcgctccgaatagctattcgccccagatgtgccaggacttgctgcgcttcgcctgcactctggatgcggtcgagcttgaggacgctgagcgtctaggcatcgagccaagatttcagctgctcgggccgcaacagatcgtagcgatcgagcttctgcatgcgcgctatgggtatcaccggccgttcgaggcttcttcgatctggaaggacatccacctgaacggagcccgctacgccattccgacaggcctgcgcgtgcacagcgcatccgagttgaaggaggtctccgccgctttcgatcgccaggtgccattcgcagatgaccaattctgggggccgtatgaggggatgcgcagtatcgcgcatgccctgggtgactgcgaggacatggttgtccggggcggtgtcacctatacccgtgttgtcgagtcgaatgagtttgacatcgatcttgaaggcgcaagcctcttcctgggcatggagttggattacgccgtagccaagtaccgtggtattgcctccgtaccgcctgcggctgggcttcattacctgttcgggctgggtgtggctgctctcttcaagaactcgtacaaaaactgggacgacatgttgcgcatgtccaaccaggtccatcgccatggactcacaccatacctctcctcccctgccgaactggttgctcgcctatctcataaataa

SEQ ID NO: 327070 - DNA, 1965 bp, Pseudomonas aeruginosa
atgttcatgcgacggtccaagccacctcttctccgggatgcagtatttgatggctacgactacggcctgtcgttttcctatgtcgaagggttgggcaaggtcctcggcggactgggggctcgctgctataaacggcagggccacaaactgcacaacgcatggcgcgtaccgaaaggacggatccacgaggacgctccggagttcttcaaggccttgaaggacttcgccggcgacgccttcgaagaaacccaggaatcattcatccgcaagctcgatcaatcgcgtgagaaggtggaaggcggcgccttcgccgcgggcctgaacctcacccttgcgcgcatgtcgggtggtttcgtactggcctatggcgacttccaccccggcctggtcgctttgtacaagcggatgcagggcatcttcagcaaggtgggcagcgcctggaagattcgcaccacccccgagaccttgcgcgccaatatcatcgatgcgctgggggtgcccgaggaccaagtgaaggtcctgctgggggagcaccagatgctcgacgatggcgcggtggtcaaggctcccgagtgggacaccattgccgttggcggcgttatgcccgaagcaactggcaccgccggcgaggagtcagtcaacgagatctacctggccagcatcgaatcgatccgcaaaatcgactggtcgccggcgaagttgaatgcggcgctgacgcgctacgaactgtatgactaccaacgcttaggcgtggctcacctgatcggccgcagtagcgcgttgctggccgacgacatgggattgggcaagacccgccaagctgtcgtcgcggccgacatccagtcccaggggaggcagacgctgatcatcacgctcaacagtctgctgatgaactggaaacgggagatcgaagggatctgcccgggcgcgaaggtgtccatccagaagtatgaccctactgcgcagtggatcgtagtgaactacgagcagctggaccgctacgtgaacctcgccaagcgtttctacgtgatggtgatcgacgaagcccaccgcctgaaggagccgtccgctgcttggacgcggcatgcattcaacatcgcggctgcagtacccaaccgctacttgctgacaggtactccggtgctgaatcgcgagagcgagctgcacacactgctgaggctttccggccacccgatcggagagatgccgctgaaggagttctgcgagcagttcgccggcagcagcgagttccgatcacaacttcgcgcacgcctatccgactggatgttgcgccggaccaaggatgtcctgacaaaccttaagggcaagcaacaccaaaaactggcggtgagcctctcggcggaagagcggaaggattaccaggaggtgctgcgcagcgacaagacgccgctcgcccgcatcggaacgctgcgcgcgatgatcgagcggttcaagtccaaggttgcgatcgacctggtcaaggacctcgatcccgaagacaaggccatcatcttctgcgaattcaccgagaccgtcgaggcgctgaaatcggcgctcgatgacctgggcatcaaggccgtcacctataccggcaagcacagccggacacagcgccagaaggcagaggacctgttccagcaggacgactcggtgcgcgtgttcatcggcacaacctcagcagccggtaccggcatcaacctcaccgcggcaaactacgtcattttcaccagcctgccctggacgcccgcgcttcaagatcaggccgaggatcgcgcttaccgcaacggccaactccgaatggtcgtcgtgaagatccccctggtcgaagactccatcgaccaggcgctatggaacatgctcggcgcgaaacgcgcagtggcgagagacctgatcgagccagagcctgggaacgccgagcaacgtgcgatggagcaacttgccgccgagatgctgcgcgccgcgtaa

SEQ ID NO: 327071 - DNA, 744 bp, Pseudomonas aeruginosa
atgaatcacgagttgaagatccgcgcgaagcggctgcgccttgcaatatccgaactcctgggactagagatcaagatgtcccagtctcttgagcttgtagcgcgagaggagaactacccaaattgggacgctgcttctgcatgcgctggtcgcacctcccgagcaaccatcgaactggatgtgacgggtgaccggaacacgcccttgagcctagacaggctgtttcccggttacggacgagagatcgagcaccttcgacagataaccgatccgaagtcttcgggaggcgccctggtagtggtcggcggcatgctcggcacaggaaagacgagcactcttcacctgctcttgaaccacttagcggagcaacatcttggcgtaaccacgctgctcgtcggactccaggagtatccgctccctagcacctggcactcgcggaccttatttggcgaccgccaatcgcttcctaccctcgaagttggtacgccgctgctaacgaggaactggaccgaagaattcgtcgtgctattcgaggtccgcagcgaagccgaagcttcgcaggcagtaatgcttgctcaggcaggttacaaggtgtttacgacaattcactgccatcctggacgtaccttggacgcctggcatcagttcctgcgtggcgtctcccagcgactgatggaacaacttatcgctgacggccgggcactgttcatttcgaaacatatacggagcgaggctgtagcctga

SEQ ID NO: 327072 - DNA, 609 bp, Pseudomonas aeruginosa
atgccggagacaaagccgttaacccgtatgatcccgtcgggctacgatgacgggcagatcgagatcgacacctaccaacaaaagcactggccggaaaatcaagagttggtggctgagcgcttcccgctcaatcccatcttgcgtgactggttcgaccagaccccgaacgataagcgcgagcccttggagcttgagcactggtgggatttgccctttatcgtgaccgatgggtgggaagactgcgaggcgcacttccgcaaccaccaggcgcggttgcgtgccgaaggtttcgacggtgcgttgtctgccgcgcaggtagaggcggagatcccggcgcgcaaggcggaatggttcaaggcatggccaactggcacgcgctacgaagtgcgctgcttggacggtggtgcctgggaccgctccacgaactgggggatggtgggcaccttggaagaggccgtggcgaggtgcattgccggtccgacctggagacgagcgttggatgcgatgggcgatgctcagctgtcctcggccttaggcctctaccgcaaagaggtgcgcggcgcccttggcctgccgccggcaccagggcccaccattcaagaggaatga

SEQ ID NO: 327073 - DNA, 465 bp, Pseudomonas aeruginosa
gtggcacttaccattgactctgtgatctgccccggctgtgccgaggagcttccgaagcgaaaccgggggtgctcacattgcggctacgaagacaatgaccgtgggcgcctgctctcgctgcgcgaactcgcccagttgccgagcttccctgatcaggctggggctcagttcaacggtgtttcaccgcggttcatcgcgactgctatcgccgcggcccaaggctgtatgcccatccacgccacagcgatcaagaattgcaaaaattgcggcagcaaagacttggcctggcagacgcacggcgtcgtgcgcggtgcggctcaggacggccggttgaaggtgggcgaagtggtgtgtcaattcgtgttcggctgcaatcactgctccgaaacactggcggcgctgagtgccgaccgcgtagccgacatgatgaatgctgcccagaatggggaggaattcgccccatga

SEQ ID NO: 327074 - DNA, 981 bp, Pseudomonas aeruginosa
atgaccccaccccacattcgcgacgcggtcatctcgttactcatggccggcaagacgccgagctggcgggccgtccgaagcattgtcggagcgggatcagctgacaccctcctcgccaacatcaaggacgtgctcaaggacctggcccaccagcagatggaaggtgtcccggaatctgtgtctcagctcatgtggcagctctggaaaaccgcctgcagcgaatccgccgacaactgggcgctggagcgtgttgaactacaggacaccctgcaggcggccaaccaggcgcatgccgaggctgttgcgcgcgcccaagacctcgctgctgaaaaaacggagttgaccgctcaggtaagaacgctggaagccgaggtagctgcgttgcgcagcaaggtcgagcaccaggacaaccgattagaagaacgcgaccaggcgatcgcgcggcagcgcgatgagatcgacaccctgcacggagatattcgccgacttcacgaggcgcaccaggtgcaggcgcgggagcaggaagagcggcagcatcgcctcctggcagagcaggcagtcgaacacaccaccactatgcggaagctcgaagagcaactgcagctcgaaaaggggcgctacgaaacggacaccgctcgctggatcaaaaagctggacgagcaaacgatccaggctcgccgagacgcccaggaacaaggcgctgccctctccgccctgcaggcggcaaaccaggcgcagttgcagcgcgtcaatgacctcctaactgagaacgtccgcctgcagggcagccttgagcagcagagtcagacggtagcggcggcaaaagatctcgcgcacagactcgatcgcctactggcagaagagaaggagcgatgcatcggcgccgagcgccgcgcagccgatgcagaaggccacctagcggccgcccgggaggaaatcgaccggttgaggagtacgaatgaaaaaaggccctcaagctga

SEQ ID NO: 327075 - DNA, 183 bp, Pseudomonas aeruginosa
atgaccgccaccaagcgtcaaatcaaaccgctgaacaagcctgatgctgttgttcgcttcgaggcggaagcgcgtcgtctggccggccgtgtgtccgagaaccagctccgcttcctcaaggtggccaaggccaagggccaggaaatggagcctgtcggccgaatggccggcgctcgcgcttaa

SEQ ID NO: 327076 - DNA, 468 bp, Pseudomonas aeruginosa
atggagttgctacgtggacaacctgagctgttgcgtgatggtatcgatccgctccagatacgttttgagccgatcaccgatgaggcgatagaggccagccagttatgggggaaggacgcggagttgtaccgatgggaggacgtgccgtcatggaaggacaaggatcgcaaaggcttcgacctatcgctgtggtatggcttccaactttgcgggctctgctatgccacaccccggaagagcagtatctgcatcaaactcattctgctggaaggtaatcccgatgactcgcacccattgaaaggggaagtcgcatccctcgcgctgttggccatcgactactatgcccggatgatcaaatgcaccgagatagaggtccaagatcctgagcctttggttgtgccctggtaccaagagcttggtttcgattacggggaggatggccgacttgtcatccaggtcaatggctaa

SEQ ID NO: 327077 - DNA, 324 bp, Pseudomonas aeruginosa
gtggctgaagactacaaatacgaactgcagatggagcagtaccgagagcagttgggcaatcagatcctgctgaacgcggccatcctcatccagcaaggtgatggtgagcaagtctcggtggacaaggtcaaggaagtgatgcaactgcgcgaggagtaccgcaacgccccgggggtgcatatcgaaggcgaaggaaatgatcctgacgtttggctcttggccgaatgccagttacccgagaagccgacgggcgaccaagcgaatcgccaagtacacgcgatctaccagcgcctgctagcgaagcgcgacagcttcgacgtttga

SEQ ID NO: 327078 - DNA, 333 bp, Pseudomonas aeruginosa
atgcaaacggtcgagtccctcaagtcgcaagcgaaacgcctgcgcagccacttctccgcccagaacatcgagctcaaccattcccaggcgctggaagccattgcggccatccacggcttcaaggattggaacaccgcgagcgcacttagcccgaaagaaatcaagcatccgactaccgacgaatcggtagagcagctgcaagaacgcttcaatgacatggcgcgagagtatgcccgcaggcccgaaggcgcaccattgaccgctgaagaaaagacagcagtggtaacgctgctgcatcagatgggggtggcagcggcagccacaaagccttga

SEQ ID NO: 327079 - DNA, 693 bp, Pseudomonas aeruginosa
atgatcacagcatcgagctatatcaccgacgctaaggcactcctggccgcgttcggtgttcaccaggtgacccatggtgtgtgggccttcaccgatattcagaaggcgagccaggggtatatccaccactcccagcagccggccgccctggccgcctacgcggcagtcaacccgacgttcgccgccggccgcttcccgggctacaccctgaccagcctggtcgataaggtgccgagcatggactacgcggaatacgcggcgctctccttggtctgcggcgctgatattccctcgttcgaaggctgggacgcgcgggcgttcatcttcggccaggcggcctggcagatcgttgagaagtacaaactgcagggctgtttcgagcggcagaacgtgcgggatcacgttccgggcgatcactacaacatgcgcccgcgtggttacaactggggcggggaccatgaagcaatccccggtgccctcaaaagcatgcgcaagtgctatcgggcgatgacacccgttcagcaggtgatgaccctgacggtgatgcacctgtatcgccagggtaaggacaagttcttcctgactggaggggtcccgaccaagatcttggccgccgatgcgctgcacgtactgcgtgagcaaggcgccttgcccgattgggcgcacctggtcacgcattacgctggatggtga

SEQ ID NO: 327080 - DNA, 276 bp, Pseudomonas aeruginosa
atgaaattgcatctttggattgccgttactgttatcggcttggtattcatcttgtattccggcgtgctttcccacggcgatgcccagccagtcagcatcttttcattgttgatgggttgcatattcgtggttgcagggctgatcggcgtgaaactcgaagataaggcttacgccgctagcggtgtcgatggtgacgacgagcgcaagacttctggtgagttttggcctgaactactcaactctatgagggagctatttctcgggccgaagaaatag

SEQ ID NO: 327081 - DNA, 744 bp, Pseudomonas aeruginosa
atggatgtgacgaaatcgcgtgaggcatacatcgaagagcgcctgcagaccgaggccgagcgcaaggcccgtgccgccgaaaagctcaagaatcaccagtacacctgcctggtgaagcagcccgacgttgaggtctggcgttgcaaggcagagggcaccaccgcctatgcctttgacatcgtgatgacccgcttcggaattgcggttctcggtgatatcggcgacctgacgttcagtgtcgggttgggctatggcatggcgttcctggctggcgatgacgtcacctactacctgcacaccaagctcaacgagacccacaaaaaacaggtgttcagcgcaaccctgttccgccaggtgctggtgtcgagcatctgccgggcactgcatgacgattgctctgaggaaatttgggacaccctgccggcgtgggctcaggatgctgatctggttcgcggttcgcattggcaggagtttcgggcgctgaccctgacccatcgccgcgacctcgacaatggtgatgaccgctggatgcactgggatgaactctttgatgatgcagagcggatcgggttcaccgaagaggcacaccagttcatgcgtgaccatgccaaggtgctttgcctgggcgaagagtggtacgaacaccgcatcacgaagacctgcgacagcctctatggccagctgtacctggtcaaccacgcggccaaggcgatcatggcccaggccgaccaagccgccgcttga

SEQ ID NO: 327082 - DNA, 525 bp, Pseudomonas aeruginosa
atgcccactactctgctcccgaaaccgatcctggatggcatccagcgctcctactccatcagcatgttgtgggagggcactcccgcgaacaccaatgtcccggcggagcgccaactgctgaacctggtgctgccgacttggcagcgtgagtttgtttggtccgaggagcagcaacgtgcattcgtcgagggcatcttcctcggcttcggtaccggcttttatgtcgtgaacggccgcgactatgaaggcggtaatgaccgctacatgtctgggtggctgctcgatggccagcagcgcattacgtcaatcgagcgcttcgtgaagggtgagctcgccgtcttcgacggaatccgctacagcgacctgagcattggggagaagcgccgccgcttcgatcacgtggttttcccgtgcatcgaactggaataccaggctgatgaggagcgcctcaaggccctctaccttcgcctgaacttcggtggtactgcccacagtgcggaagacttgcagctgttgtacaaataa

SEQ ID NO: 327083 - DNA, 594 bp, Pseudomonas aeruginosa
atgtccctggttgatgcatgcgcactcaatgcaatgaagaagctgaacgctgaacaggcggcccgcctggacaggttgctatggaccatcgatacggccgactcccagagcctggttacgcggcacaagcatcggctggacggctatctgctgggtttgcaagatgccggtgtgattagcgaggaggattgcaaaacgctggaagcggaagctgcggctcgcgagcatgcggctgctgtccgcgtggagcaactcaatcgctcgatcgctggagggcctgagttggagagaatgattcaggacgagttggcagataccattcgtgacttggctcgccaagatagcccggagtttcgtggccaatattatggcgagtgtcgcggcatgctaaaggtcttgcgactgggcgaaatgctggatgaggcgcagcgtgagcagtggagcgccgacatctaccgagcttcccttcaggcagctgatcagtgtgttgcatccggccagccggtggatgggcatgcagtgaataggcagcgtttccagcttcagcacttggctgaacgcggaatcatcccgcgagaacgattgccgcgctga

SEQ ID NO: 327084 - DNA, 243 bp, Pseudomonas aeruginosa
atggttgaacaagccgataacccgccagtgctggctgccttccgtgatgccagttggtgggcgaagccggacacccgtaccgccaagcgtggccatgtcctgggcgaggacggccatgcggcgtgcggcttggtggcggtcatgtgtgatccagagcccgcggagtccattcctgagctgctgcgctgtcagcgtgccggttgccgcggccgctggccgagctcgcatccagaatccttctaa

SEQ ID NO: 327085 - DNA, 222 bp, Pseudomonas aeruginosa
gtggtcacacgcatcagcgaatcctccacgtccgccggcgtcgctctttggattgacctcgacgcgcagggcctgtatcgcctggactgtgcctggaaggagagaggcggaaaacacatcgacgagttgccgcgcttctatcgtacggcacgtggggccaggcatgccgccgctcttctaaccagcgaacggctgacctgggcgtcgcctgtcgctcactga

SEQ ID NO: 327086 - DNA, 279 bp, Pseudomonas aeruginosa
atgcccagcaacatgacgaagctcgaacaaagcatcatcgccaatgcgcgcgctgaactgtctgcggtcttgtacttttatcgcaagaaggcagagggaagcatgaccattgatgagtttgacgacgcttggcgtgattacctcggccattaccatgcgttgaacgccttgttgatgttcgcgcaccaggccgatgtcggtatgagtgccgaggctgttcaggcgctgcagctgatcgaggatgagcatgccggcgcttacagggcctcgaccaactga

SEQ ID NO: 327087 - DNA, 1929 bp, Pseudomonas aeruginosa
atgaacaaaacagtcctttacctaccgttgctccagtcgcaggcagaaacgctgaaggacttagaaactccgattgccgatcttctactccaatggggagttgatcagcttgcttcagttgtatttattcaaaatataccatcattaagtggtaagcctaaacgcgagggcatgctggagcgtgctctcgctgatttgatcgcgctaggggtggatttgtcgaagagcaagtctgcgggagattttgctaagatagttgttggtagattcaaccggacatatttcgagcaagggttatctctcttgcatgtaatgggtgtcggatttctcgatgaagaaacaatagagtctaatcagcatttgacgcctgaaggctattgggatcgaaagtttacagggcgatacagtgaaactatcaacccactgaaatatgagtttgcttcaagctcggcatcgtttcgcctgacggagcagcaagcacggatatttagggtgctacaggcagagcctgatgaaagcatgcatatcgagggacgtgcagggacaggaaaaacccatctgattgcccgtttggttgaatcgctggcttcgtcaaaattgctgttgctggcattcaccgctgtgcagcttaatgctttgatggagcgattgggtcccttgagtccctcgttgaagggaatgacctttggtgatctggcgaatcatgtattaggtagttaccctggctatcgtaggcctggtaagcggggctacccgcgtcatcaggtatctccaagagaagtggcgactcggctaggattccagtccatagggaagtttagtcctgctcaagtcgcgtcgatatgtgcgcagactgttgctgcattttgtcaaacaaccgaccacgaagttggccctcagcacataccgagacgtattattttgggggctgttgataaaagcgtgctatcgcaatatgcgcatgagttgtggcggcagaccattgagcctacagatcctctctatgacttgccggttagggggtatcaccgcattaagcacatgacactcgtgtgcgagccttatgttgatggcgattatactcacataatcgttgacgaagctcatgacttgcctaggccgttggctgaatttcttgaccggagcaataagccagttatcacgcttggtgatgtcttccagaagttagacggcaactactttgatcgctcaagaataattcgaaagcaagagattaatcgctcggttcgcgctggccgacaaatagaggctgtgattaaccccttaattgagaagcatcctttgctcagtacaggagcaatcgaggggaatgctagtttcgatactaagatagcctactatgatcggccggagatcccgaccggtaacgttacgatcttggtcgattctgagtgggggctttttgaatggtttcagcgattgggacatgccggagcaaaattcagtatattgcctggggcaatcaacgcatttcggttatttgttacggagtgtattgccctatatcataaaggagcccgtccaacgcatagtgctctttatcgttatgctagctggggggcgcttcagtctgaaatggccaacaatgcgagttttcagagaattgacaggatgttgtcgcagaagtatcagattgaggactttgagaaagcattacagcaacttgatttatccggaggtgcctcgctgaaactaggtcgggtgatggatgcgcgaaatagcgaaatcgattcggtgatgcttgcacccgacctcctaggggaggtggcgacaggagatcgtgtctcggcaagcatggccttcgcggctctctataccgcaggaactcgtgcaagatatagactaatcgttccagggtacctcaaggactgggcaaacgatgtagttaagacggtcaaagctcaatag

SEQ ID NO: 327088 - DNA, 285 bp, Pseudomonas aeruginosa
atgaagtacattatctgggccgtagcggcctttttgatcggcaccgttggtggctattggattttcaagtcggcgccggaccaacaggtatctcgggccggcgacgtcttgattctggttgatgaagaggcgactgaccgtgcccagatggctggcccttgtgagccgggccgctggaagaagttacctagcgggcgagtggtgatgtgtgtcgcggacgagccgcattggcagctgccgtcctcgtcggtcgccgccgatggggccccggctccgaatgaatag

SEQ ID NO: 327089 - DNA, 495 bp, Pseudomonas aeruginosa
atgaccaagcatcacgaaggttgcgcatgctgcagcgaagggcgggaagcattccaggagcgcctggaaaagatcatccatgaggttgggcatgcagtgatcaccacggactcggaaatcgccgaggggacgattgcgatggcctacacgatggggctctctgaccagggccttcctgagttattgctgttcgggatcgggggagagcctgcaatggaaatcctcaacacagcagcggacatgcttcggagcggcgaactgccggtagatgttccagtggagaagctgctgaacttgccgatcgtcgtcaaggcagtaccgccagaagcggcggtagagtacatcgtccaggcgaatggtcgggcggggcggcagctgcccgctttgcaactcgtttggccagatcctgaggggcgttttgcctgggagccgcaattcgacgaaggcttccgcttccagccggctccctacgagaagcggcacgtcctgcattaa

SEQ ID NO: 327090 - DNA, 513 bp, Pseudomonas aeruginosa
atgcagatcgaaatgaatgcgctgacaaaccctctcgaaatgacgcttgcctacgattcgggaggggagggccgcaactcgcgaaatgccccaaaattcatagtgcatttcccgctgaacctatatgaggcgctcatccgtctgtcggtgctcgaagagcggagcctgaacggcgaggttgttgcggggttgatatcgggcctgactggccacgcaaaactagaactcgatcgcaagctgtatgccgacgctctgggcgaggagagcgttcaatggctgctgcaaggtcatcaaccgatcgatccggttcgaggaaagaacaagttcgtggttcgcctgaagtgggggatgccggaggtcctaacagtattggcggcgcagcggaagagtgaggatcctgcgttctcgatgcaccagttgtacttggagtatctctgtcgctgggtgaacctgcggcgtgaaacccatctactagccactgcgctgctttcggatgttgacaaggtgcgttaa

SEQ ID NO: 327091 - DNA, 765 bp, Pseudomonas aeruginosa
atggaagaacttcctgaccgttccaagagtgacaacgagcccatcgccctttcggtaatttccgaccgggaggtccgggcggcaatcaagaaaatccaagaaggcgcggccagctacttgtattttctcaacaatgagggaatcccgaagggaaccgcccaagatatcgcctcgtgcctggagttcgagatgaagaagctcggcgaggcccttgggatttccaccgaggcggctgcggttctggagcaacgccatggtgagatccgccgcgcgaacctacgtatccacgaactggaaggcttgctggggactcagcaagatcctaaagcgatacaggctgccttgtgcgcgttgatcaagcaacttagggggtggtgggacctggaaggttttggccatatcagcgaagaggcgttcggtgagtacagtctcacggtgacgttttcctgctcaacgtctttcgccggacgccacttcgaagtgactgaggcagtttcgaaccatgagcgggaaaaactctgggaagcggacatgcagggtcggggcttcgtattcctggaaaacagcgagggagatctccacgactgtccgcagtcgcgccaagcgttggtaaggttgtttgcctcccgtctgccttcggcgcggatcgctcagttcctcagctacgagaccacggctggctcagcgatgcgcgcggtcaaggtttacatccgggacatcagcgagattacttcgctgccagttccggcgaacactacggaatga

SEQ ID NO: 327092 - DNA, 924 bp, Pseudomonas aeruginosa
atggattggaataaggtcggaaagtggtgcgttgactccctgcgagagatggtgggggagcccgtggctatccgtcgctttctggagcagcaccgcgttgcagtgctcgatccgacagagttggaagagacgacctcgatcgccatgagcagcgtccgaccctggcatgcgtggggcgacaacggcgtcactcgttattctcgtgcgatgtcggggtggagggacgccggcggcggttatgaaagcttttccctggagctggcggaattcaatggcttcgggtgtgaggaggtgattgaagcctggtcttgcgacatcacggatgtgcacgggctgctggcatccaaatctccactccaccgatacccgaccctggatgatttcgcccaggttcgggcgccgcggtatatctcgccaatttcagaggaactgctgaacgccaacctggcgcacagcgagattcgaatcctgcacgacaattcggactacctggtgtggcatggctgggatggtcgggtttttctggccaacaccggtggctctcatcacttcgccgcggctcgatacatcgcggcccatctggggaaagcggttcccctgacggcgcgactgtatcgccgcttcctcaacgccgacgcggtgatagccctggcggaggagttcgaggtgttcgtgctgagcgatgacgcagtggcgctctgtgcgttccaggatgcgatggccagcagcagggcgacttacctttggcggccgcttcctgcgccgctggactatatgcgcgccgttttcttcccgcgggacgaagatcgtgcagcgcgggtagcgcgcgagtttcggcgggtgggagcgatcgacctgatgaaccacctcaagaccctggttgccaagcaggacgataacgtcaagcgcatcaagtctctatag

SEQ ID NO: 327093 - DNA, 297 bp, Pseudomonas aeruginosa
atggaagtggccgccggagatcaggtgaacctgtatccgcagggcatctactgtgattcagaggcctccatggaggccctgaagttcgcatatggcaacagcggaaatgtgatccgccccgacaaggcgccggccggttgccgcgggtttcaggtcaaggtcgtcaatgcccagattcttggccaaggccaatcgaaataccccgatgcgggggggtggttggtcgtgaagatggacgctctgggcgtagagaaggcctggatcgaaagctactgggttaaacccaccagaaaataa

SEQ ID NO: 327094 - DNA, 1770 bp, Pseudomonas aeruginosa
atgagtctgcccttgccccagtacctggcccggcctgtcgatggcgccacgacctacggctgcttgcgccgcaccggtgatggcgatcggcaattctggttgatcgaaggtgagccgcaggtcgcggtgatggcgaagaggctcttcccaggcgccgaggggcgcggagcgggagtggcgaagttctccgcgaatcgtcgcacctttggtgacctggtgtggttgctgcatcgctggccgctgcggatcgaagatccggtggtgttcgacgcggcctaccgcgaagcggtcgaatacgcgctgcagcggcaggccgcgaacagcgaaccggttctcgcccagcccgacgtggttttcaaagggacgttgcgccccttccagcaggaaggtctcaattggatgttgaccaaccggcggacgctgatcgcggacgaaatgggcctggggaaaacggtccaggggattgcattcctggccaccgagcaagcgtggcccgcgcttgtcgtggcgcctccacacctgatcctgcattggcggagcaaactggacgagttcctgcaggtcgctggagactcggccgggccactgttcgcagagcaggatgggctgaaggtctgcttgctgcattgcacaccgcggaagatgaaagggccactgcccaaggcacacatttacatcgtgcattacctgttgctgaaagcctggcgatccgagcttcgggagatgggggttcgtcgcatcctcttcgacgaaatccaggacttgcggcacaccaacaccgagaaatatgcagccgcgagcgaattggcggcgctggcagaagacgtcatcgggttttccggcacgccaatctataaccggggacacgagatctggtctatcacaaatatccttgaatatcagtgccttggtgaccgggattcgttcgcccgggagtggtgctggcacgacggtgagaagtctgaaacggtcaaggacacagagttgctgcatgcacatctgcgtcgtgaggggctaatgttgcgccggcgcaagagcgaggtgctcaaggatctgccacccaagcggcggatcgttcagttggtcgagtcggatgactcgatgttcaacgaactggtggccaaggctgtcgagttggccaaaggggcgacgagtctccctgacgccctcgccagagggcggagcgaactggaggccatcaacgagacgcgtatggcgacaggcatcgcaaaggctgcggcttcggcggccttcgtgcgaagtctgctggaggctgagcagccgacaatcgtctttgcacatcatcatgcggtccaggacatgcttttggatctgctgaaggacttcaacccggtgtgcatcaccggtcggcagaccaaagaagagaagtggcaagccgtccaggacttcaagtccggcaaaacaagcctagtgatcatcggcctgcgctccgctacggggatcgatgggctgcaggggcgcgtgaaagcagtggtgtttgcagagctcgactggtcgcccgctgtgcacagccaggcggaagaccgggggcaccgcgatgggcttctggactcgttgctctgctactacctggtctcggagaacggtaccgatccggagatgcaggaagctttgggcatcaaggtgtcccagttcgtcggcttgatgggggacgttcccgagtcggaagaagaccgggtgctggctgctgaggcctctggccagtacatgcgcaaagtgctcgaaaagctgcgggcgagggctgcgtag

SEQ ID NO: 327095 - DNA, 423 bp, Pseudomonas aeruginosa
gtgcagctgtttgctgaccaggagttggtgccgaccgaggagccgtccacctgtggcgaagacatggcacgtatcgttgaggcgctgcgaactgtccgaattgcagtggcgggactggaagagtggcagatccacgacgcgttggctgcggccctcgtcgccgcgcaaattccccattaccgcgagttttccttcgcttccggctgtcgggccgacttgtggattgatgggatcgtcatcgaggtgaagaagcagcgtccggctcgggcagcgctattaagccagatcacccgttacgccggtaagcacggggtgcgcggtgtgatcgtcgtacttgagcgcagcatccatgtgccggcggtgatcgagggtaagccggtacgggtgctcagcctgaatgcagcatggggcatcgcattatga

SEQ ID NO: 327096 - DNA, 666 bp, Pseudomonas aeruginosa
atgcagctgcagatccagtccacgctttgcccagtggtaaaaagtgaggtcttgcaactcgctcgttacggcgaggtgaatggtgttggccggcgtgattggctgcgctttgagcaagaaattcactggatccgtgaaagctcggcgacggtctccttcacgcatggtggcgtcccggtgggtgtgcccaggagttcctacagcgactattgggggtttctggaatcgctcaacagcgcaattcagggcgcccaagaggcttgccggcggctgagcgttacacggcaaagtagcctgcgaattgccgtgtcggtggaagtcctcgacgttcctgcgattgcggccagcggtgaagttccgacacttcaggatgggcggcgccggtgcttttacatgctggagcgccctgacttgaagtgggcccacttcgacaatgaaaaactggacgcttggagctcagctaaatcgctggacgagcgttacaagctccacagtgctattccgtggctgcgaccggcattggtcgcatctacttcggcaatctggtccagtgatttacacgccgattgcgatggccttccaccgagcgttcagcagttcattgccggtcagcgcctgcaggcggagcagggcgtggaggaggtggggcgtgcagctgtttgctga

SEQ ID NO: 327097 - DNA, 762 bp, Pseudomonas aeruginosa
atggcgaacactcatggctggagcttccagcgccccctcaatgagcagcaatgggtaaggacctgccgagatatcgaagcactgctgaaggagccaagctggacgcaaattggcgacaagaacggtgtagagctcgatcggccggaggctgcgctcatccgcccgctttacaccggcgcccctaccgggctcgccgaagcgatcgagttcaacggcgttggtaacgaaagccgagaggcgttctacctgacaccggaaaccctcaccgcatccatcgtcaccgaccagcaacggtacgagccgctggtcatggcctccatgctgatcctcgcctaccacaagccaggcaccgccctgcacagcactgcaaacgagcagacctgggcccccgcctggcttctggccaggcatgttctgcgctctcagcatcctgacgcacatgaaagcgttgatagccacctggctgatcatccgggccatcaccacgcagccgagctccagcagaaggccgccgaggtgaattgcgaattgctggataaagtcgatgcatggctgcaacaggttgaggggaaagcccccgaagatcagttcgcgcaggcgtcgctgaacagcctgaagcttgtccgccggcagctggccgaaggcacaatgaccggcttcgacgcgcgctacgctgtcgaatgcctgggggggtacatgcgcgactccagattcgtcgagccgttgtcatcaaccccgtgcagcgaacccgcaatcagctga

SEQ ID NO: 327098 - DNA, 1803 bp, Pseudomonas aeruginosa
atggttgctctcagcgagaagcacctgtacatggcgaacctgtgggcccagcacttcactacaggggaagccgagcgagaggcttttgtcgcgaattacatcaagcggtcgcgcgagcaccgcttctggtgtgtgagcgccgcggtggatgggcgggaggtcgtggctgcacggatggaagatttcgtccttctgctcgatcgtgggcgcatttggccgattgtcttgaaggatgggaaatattcggaaggagtggcggttaggttaccgcaaaaggtgccgaaggcggcggtggcggtctctgtcatgcggcgtcttgtggaggctgcagctcggtgtgctggtcggttttcggactggtgtcctgatcacaacgagaacgcggactacctgcccaaagctctcaccacgttcagcaaagagtatcgaagcctggtgtcgcgcgccatgtcgcgcgatattggccatcatctgaacgaagggccttcgaaagaccggcgttacacgagttttcggcgtccctactacgcaaagctggccgcgacagtcatgaagcagttctgggtgcacctggatgctgatgctttgcgcgcctgtcgttctgttggttgtcccagtatcgccctttacaactggatcgttcgaggtgacgccgctcggcgtatacaggcggtacaggcatttccggtgttgttgccaggcctggtgcttatggcacaacgcgcgggcagtctggatacttctgcggtcggcccagccgtggatgccggaaatccgttgctgccggtgttggccaggacgtgtcagcagagtgaaaccctggtgcggcagatgggcaagcttcggccgtcaatggttggttctgcccttcggcagattggaaccggcggctggcaccagccatacgagtggctctggatcgggctttctttgggcaatcgccggccaaccagtaagttgggctggacgaactggcgcagtcttttcgatgcgctccccgactgctatttccgttactcgtacccgatgtctggctttttggcaggaatgcctgattgggaatcagaagagtggggggagctggtgggccgtgcccaggatgtgcgagatctgcgcctcgatgagtgcttccgatttggccgcggggaggcgccgagttggactctccggcaactgctcaatgtctcttcggaatggcaccaggtcagagatcgcatcgcgcgggcactggcggagcgcgatgttgtggatgggatgccgaaggaaatgccgtggccggggctgctgcgcgccgacgtcttgcatcccgagacgggtattgtaatcagcgagttgatcaggccgagtgaattggcggtggaagggcaggccatgcgccattgcgtgggtggctacagcaacgtctgctatgaaggccgatcgcgaatcctatcgttacgcaaagacggtgtttcgatcgcaaccgttgaactgcgcctgcggcagcgaactgggcggccctcagtgcgggacatctactgtgagcagctgcgggggcgggccaacgctcatgttcctcccgactcggacgcggggcgagcctttgcgtggcttcagcgatcaatccaatcgtggaagatccgggttgccgtggactgggagccggtaccccatcacctgcgaccggtaagcacagggcaacgagatcgtttgatctttaaagcgatgaagcggtggttgacgcggcgagggcgagtgcctcctccggagaaacgtgcggtgctcaaagggcggtcaagacaagagcgggcccgggcggcgtag

SEQ ID NO: 327099 - DNA, 573 bp, Pseudomonas aeruginosa
atgtacatgggactgggaacctgcaggacctttcaggcgatggtcatgcaatgggcgtgggacgccggcgtgagcgagcggacttcgccgcttgattgctacctggaggcgacagcccaggtgggaaaactcaccaacgctgtgttgcgtgaagatctcgaaggagtcatcgccggcgtcggtggtgtcttgatcttcgtgacgttgcacctctcgctaatcggaatggatctgccgccggcgcagctcccgaaaagcgtcgtagtgccttgtgaaagtgacgtggtcgcccgcgctcgtagggcgaatatcctcaatatcagcgactcgttgctggccgcaactcgggcaatacagctgctgcaggccgaggaggcagcacccagtgattgtgtggcgctgaagcgcgagacgatcacgcgggcggcggagatggtgatccagtccctgattctccaagccgagctctatggcgtcgagctgctattgtgcgggcggtcagcgctggaccaactcagttcaatcccagggcaagtagcgggcgcgagtcgcaagttctggagggctgagtag

SEQ ID NO: 327100 - DNA, 1803 bp, Pseudomonas aeruginosa
atgactcgattcaagcgagcgatcagcaagatcacgctgctggcgttcctcaccagcaacctatccgcctgcgcatcgcttcccggagcgcagggattgaccgatcgcctttccggcgtcctcccgaacggtcatgccgacaagggctcgatgactgaggctgacagccagaatgcctctgccgccgcagcggttttccgaagcgttcagaacggacaagaaaccatcggttacaccaccgctcagttcgatcagcttcaatcgcgattccgagaagcaaaatcccgtgcagcgtcagaaggcgcagccctctcccggaatagcttcctggcgctatccagttccctcactgatctgctgcaatacgtcgatcgggtggaggcagcgaaaggcgcagtgcgttctacaacgccgccgcgcagtaatgccgccagctacctggtgcaaccaggtcagcaattgacgctcaacatggaaggcttctgcctccacgaagagttgcccgctccactgcagggcgagaagttccgcatggagcccattagcggttacttcaagcccgaaatgctcgggacctatcaccaactgatccagggccatcagaaaagcgggaaaagctccctgaaggatccgcagctgcagacgctcctttggaccatgcgcgggttaaagacaggcactgcggacgcgcaggtactcaatgcgctgtccccgcagcaaaaagccatggtcgcgcaagctgaccccactggcctggccttcctgcaggcgcaggctcaagcaaagcaaagcatcaagggcgcattgaataatctatccggagccgccggttcagcgctcaagcaactgaacgtacccgccatttcgcaactcgcaccgcccgcaggcctatcagggtcatcgttcactacgccgtccggaatgattcgaaaccccgagttgctggcgaacccgaatcagttgggcgccgcgatggatgcgtggcttggtagccaggcgcacgccccccgggaagcaccgtccccctacgcgaccgagttcaccctgctggctcccgacgtcgccgtgcgagcagtcgggacggggccgctccagggcaaggtggaagttctcaacctctccgggaaagcgttcaacttccagcccagcgcctacgccctgaactcccgttcggccacccagggcgttgctccgggcaattggtcgtccactggatcgaccaaccaggtcaagctacaagagtccagcaaagacagcagcatccgagacatgctcatcaacgacattgccgaactgggcacgatgaagagcctcgacgccctcgcgcctcacggggagctcggtaagctggccggcacgatggccaaacggttcttctcttcgggcgtggtgaacactttgctgcaaagtgcccccgttgtgggcaacatcatcaacctgggcatgctgctgaccggcaaaaacctcgacggttctgacatgagcccgaccgactacatcatggccggcatcggtgtcgtgcccgtcgccggcaatatctcgaaaatcctacgtcccgcagggaccaagattttcgccaaggagttggctcagatcgacgccttctacaagaacaacgaaggcgtgctggcggctgctgacatcctcacgaccgacacagcggaatacgccatggaccagatcccgatgccggactggctgtcgagttctagctcgaccgctgcacagcaagttctgcgcgatgcacagctgatgatgccgaagacatccaactacatggcacagagtggcatcgcactatga

SEQ ID NO: 327101 - DNA, 837 bp, Pseudomonas aeruginosa
atgatgacgaccatgcgcgcccttgatgccaagttctggcttcccccatctaacgactcatcgccgacaatagcccagcgccccgtcttccttggctcagccaaagctcgtgctcattctcaagtcacggcgttcagccttacctgggttgttgcttcgatgcactgcgcggcgatggccttcggcgccctggtcagcgatcgtcttctcgactcggctgaacgcctcgtagaagctcaattcgcatttgaagctggggttaccacctggctgaccatcctcgtggtactcacctgctcagcgctctgtgtggcggccgcggccgcctcttggctcgccaacggtaccccaacacccgcaaaggcagtgttggtcagtatgacttcactcgctctctgcgccggcgccggcgtaatgctgagcacgacggtactgacgcccgttccgctgattgcgctgctatcgctgtcgctcagctccgcctggcaggcgtcattccccaacgggtccttgcgcaccacggccgcggtcggcggtctggctgccgccggcatcgtgctcaccctggactacttcgtcttccaaggcgtgttcgcacccgagcggcctctttcgctgcaactccccttactgctggcacaactggtcgcgaccttcctcagcattatggtcacgatggctgttctccaatggaacagcagccaagcgacggccggtgccagctggccagccctccttgtgcctgtcctctatcacggcctactggtcagtgccttggtctatttggcctttctgctggctgctattcgacgcatcactggcggcctggttcgctag

SEQ ID NO: 327102 - DNA, 303 bp, Pseudomonas aeruginosa
atgcgaaaggctagtaaggcggatgagttcatccaggccatgcgagttcaccgcggtatcgagtttgcgcggattggcatgatggtcgaggtcaacggcgagcgtgggactatcaagggggcgaactgcagtgccaacctggacgtggtattcgccaacgccttgaagatgggccggcacaagcacaactgccacccttgctggcgggtgaaatatttcgacggtactggagagctgattgctcaccatgatgacgaatgctgggtcctgcggccccaggcggaggcttgctcccatgggtga

SEQ ID NO: 327103 - DNA, 489 bp, Pseudomonas aeruginosa
atgaatagatccaggttctaccgagaccccgcgtggtctgcgctcatggaggcgatccgcccgaagcgctccgcggcattctcgccgaatctgcggaaatggctgttggcttacggccggccgggggatgcggtgtatcggttgcggcctggtcagcattcgtcccgctatggtggtggcgaaggcgccctgttcatcgggcaacccttcaacggctacgcgggtgaccaggacttctccggcattttgctgatgtcggtgctttgtaacggccctggcgccaagcgttgctgcttgccgggcgcgatgcgagatctggaggtcgttgaggatttctggttgcggtatcgcgaggtcggtcggtgcgcgatcgatccggagcaccaggtacttttccgcgatggcggtcgctaccgtcacgtcggtgacgaggcggtgtgctgctggtgcgacgctgtggtgattggtcggtcggcgccggcggcgtga

SEQ ID NO: 327104 - DNA, 291 bp, Pseudomonas aeruginosa
atgatggcttgggccgatcgcatcaaccggtggatcttcctgcgcgcgccgcggctgtggtgccgctatcgaggggccaggctgatgatggtgacggcccgggcgatcctttaccaagaggtggttgaggggaaaaagcggatgccgcggttacaggcagccctcgtgtttttctacacgctgtcgctcccggaaaaggatcagccgattcggattcgggttatgcgtggtggtgacgccggcgaggccggcgccgttcaagaaatcgcgcaggagaagcatgatgaatag

SEQ ID NO: 327105 - DNA, 1233 bp, Pseudomonas aeruginosa
atgcaactcgaccttttctcccacgtcgccgcggcctatcagaagaatcctgatgtcgagctgacgaaccagcagctctatcgcgcggtatgcgctacagccggcatcgctccagccgagctggaggtcaaggttccgattggggcttccgggcagctgcacaatctcaagcgccgccagatccgctgggcgcagcagacgctcaagcggctccgggtagtcgagcgagtgaagggggagcgaggtgtttggcggctcaccgagacggcgaagcaggacctgcaccgggcgaagtccggggtaaagctgctggcgttctcgacggatctggggctggccatctgggggccctgccaggacgtgttcaagcgtctggagattcccatcaccctgtcgtattgcagtccgccctactgccttcgtaaagctcgcagctatggaaatcctgatcagcacgaaatggcagatttcatctgccgggcgttggagcccatcgttgagaatctgaccgaggaagcctctgtcgtcctgaatctgtcaaatgacctgttcgatgaggggatgccttcgcgttcgctgtacctcgaacgcctgaccctggcacttcatgacaggctgggcttgcatctcatggatcgtttgatctggtggaacccatccaagccacctgggcccgtccgttgggcatcaatgacgcgacagcagctgaactgtgcctgggagcccgtgttgtggtttgccgtgaacccgctccgatgcaagtcggacaatcggcgggtgctgcagccccatagcgagcgtcaccagcgcctgcaggcgcggggaggagaggtgcgggatgcggtgtacggcgacggtgcctacaagctgcgcccgggaagtttcggctcgatcaccgaggggcgtattccgcgcaatgtgatcgagcgtggccaccgctgtgccgctacccaggagtaccgtgcggccgtgaaccgtctggggctgccggctcatggcgctggccagccgttgtcagtgccggaattcctgattcagtttcttaccgaacccggcgacctggtagtcgatatgttcggtggccgctgcatgaccgggcttgctgcagagcgtaacaaccgtcgctggatctgcaccgagatcatgctggagtacctgcgcggtggtgctgaactgttccggaactttccgggcttttccttgaatcctgccctcgcgcaggtgggtggctga

SEQ ID NO: 327106 - DNA, 684 bp, Pseudomonas aeruginosa
atgcgactctcccttcaaataagtcggagcatcgctgcactagcgattgccgggctctctgtgcttgcgcaggcagacagaggccccttccccgcccgcttcgaggttctcgtcctcagcacccccaatgaccaggaacaggttggacacagccttcagtcgtccggccaacggctcgacgacggtcgcagcagcgtgctggatgctccggttgaaggggagacgttgcagcagatccaacgcagcctcccccagcttcgcctctcgcagctggcggactatcaactgctagtcagccccgctaggcctgcagcggtggatttctactaccgcactgctgaatcacccgatgtgcgcgccctggcgatcaaggcaaagctgctccctgcggaagccgacggcgttcgcgcactcatcaaggtcgtcaccaccgcccccggcctgtccatcccacccgtcttgatggacgtcgagatcacgtcgaaccaagtcctggtcaccagcgccgaccggaacaagctgatcgccatccgccccaccaactacacgccagccacacccacgtcgtccgacgcacaaagcgaaacgacacccacgtccgaagagcaaccagcctccgccaatccagaggtctggaccttcgaaaacccaggcgttaatccgccaccgcaaccggagaactga

SEQ ID NO: 327107 - DNA, 657 bp, Pseudomonas aeruginosa
atgaaatccatgatcgttagcgcactcgcggccgcactcgcactcaccactgccacggcatccgcaatcgagcaccagagcatccccctggtcatcgcccaagccagcaagcctgacgatgtgctcccgaaggaaaagcacctggctctcacctacttcgtcatccttctcgaagtcgatacggcaaacgccgcggaaggcgatctcaccatcggcgccgatgagtccatcgacgccttcaccaggcgcctggccaagcaagggaagatcaacaccatcacgaaagagatgatccataccaccgaaaacaatcccggcatcagcaaccactgggatgagttcggcattccggtacagaacggtgggaatctcagtgctgtgagcgcgcgcaccggctacggcatctcgatcaagcccatcgtagccaacggcaccgacctgagcactctgcctgccccgggcatcacgacgaacatgtcgattcaactcaacctgcccaccggcgatgacagcctgccgaacgagaagaacgtcaccttcaccgacgtcttcaagaaagaccaggcgcattcccagtcctgggagcaactgggcaagcgctactacttcgtcgtccgcctgaccaaggcagatcccttcagctatccgtcgatctaa

SEQ ID NO: 327108 - DNA, 444 bp, Pseudomonas aeruginosa
atggaccgcatcctgaccatcatcacgcgcctcttcatcggcgccgtagccgttcccgccaccaccattgcgctgatccttctggccgctttcggcgggtccgttgaggacggggtgcgggtttactacgacaacgtctacgacctcgccactcacccggcgaccacccctggcagcctcaggccgctcctccccaactgcacgtcgggcgcgaaaggcataccggaactggcaggccgccccctggcctgcaagctcacgcgtcaggatcgctcgatcgaggccctctctacggaaatggccaacctgatcaagttcgcctggctgctaatcgccacccttggcactgtcgccgcactgctttggcccggcctttggcgccgacaggatacctacgccgaatgcactcccgtttcccccaaccgcactgatctggaggcctga

SEQ ID NO: 327109 - DNA, 237 bp, Pseudomonas aeruginosa
atgccactcgacttcgttgacctcgccgccggcgcgggcaccccaggctcccttcacgaacaggtcgccgacgccatggctgagaccatggtgggcatgctgaacaccagggaagacattctgtcggcgctgcgccgacagtacccggaagaggctgacctgcagcgattcctgactgacgccaacaaccaggttgcccgcgagattcatcgcgccgccggcgggaaaatccattga

SEQ ID NO: 327110 - DNA, 837 bp, Pseudomonas aeruginosa
ttgatcagcgccgcccccagttggatcgggccataccgcaacggcgacaagatcggctacgcccaaggcatgatggcctatgccaattatcatggaaccgatggcagtgcggacctcaatcccgagatagaggagcgccttccctttctcccgcagccgctggtgtcctacgcaagccgaaccggtaccaggaagaatctggaagcaatgcgcgcagctggatggcgtctgctggtatccgccacaggcgtccagcgaaccgaagggatgcgctacgcgatcgatagcggtgcgtggactgcatatcaagccggcactccatttgacgaggtcgctttctgccgcgcagtagagaagctaggcgagtccgcggattggatcgtcctacccgacgtggtagccggcggcctacgctcgctggagatgagcctggcgtggagggatggtttcttacgaggcatcccaactcagctgctcatcgcggtccaagacggcatgagcatcgacgacgtgcgtgagcacctctcgccggcagtcggcctgttcattgggggaaccacccagtggaaggagaccactgcggttcaatggggcgtgctcgcgcgccgtcgcaactgtcacctccatgtcggccgggtcaattcggccagacgcatccggatctgcgccgccgccggcgcccacagcatcgacgggacgagcgtcacacgcttcgccaagacactcggccgccttgatcgtgcagtccggcaagctgacattttctcgccggacacgatgctcctgcgtgatacagcagagcctctgctgttccaccaggagcatcaggagagttag

SEQ ID NO: 327111 - DNA, 768 bp, Pseudomonas aeruginosa
atgcactggggcccagtcgataaaagacgccttcgggcgtttttttgcccaataaactcgggttggcaacggtgtactggcgttatgatccctgggccgccacggaagggtggtggcttcacctggtggttggttgccactgctgatgcagtgagcgcgcgcacttggtgcgccgatgagggagaggtttctatggttgatgcttggctgaataccgctgggaagctggcggaaggcctgtctaatggaaagcggctgtatcacgcttacgctgccttgatccgcttcatcgatgcggacgattggactggggcctgtcacagctcgtcagctgtgctgtacatcctgctatcggagatgggcttctcgccgcggctgatgattggtgaggttcgtgctcctgcagggaccttcgatcactcttgggttgaggtagaggggaagattttcgacgctgcagcgggctatccgggcgaggagcgtatcgacgtgggagggtcggtgttcgcttctgtggatctttggacggggcggcccaccgagaacgattatggcgtgtcgtcgcaggacggtctcgacgatgttgggcggttcgttgcgggggcgaatctctcggactatgcagcagggatgccgcctggtcctagtctgtgggacttagccaagctcattggcgcggcatgtggtgtgaagctcaaggtgggggatttgcgccgtaagtacggcaaggtgcagcggacgctggcgtcctctgaggcggtagcctaa

SEQ ID NO: 327112 - DNA, 756 bp, Pseudomonas aeruginosa
atgagacgtaccgttggcttacctgcggaagacagtcagccttcaaccccagatttgttcaacgaagcgatgtatgacctcaagctgaatggtttcggcacaaccttggcgctggacccaccagcctgggcgatcatctcgcgcagcagttcacccgacatctcgaaggcttatcagtggagtcgcttcaccgaggccggaatcgacgccgtcggcttcggcagctcggtagagagggtggtccgggaggcgctggagctcggcgccgtggatatcgctcctcgggacgtcctggagagcctctcccgccgaccgagcttcgatgcgcaaggcttcagtgtggactccatcatgcggatgcggcttggcgaggccccctaccagctggccctgggcggactggtggttgacccccggttggcagcccaggagcacagccaggcgccggtggagcgcgagctcgctgcggagctgcttgaggtagtgctggagcagctgccggccgctggtcgcgctgaagcactgcgtttgttgatcgccgaccaggatatcgagcgagagcgagtctcggcggaaatcaccgcccaggtttgggagctcttcgagcagaacgaggcggcgacctaccagttgtatttgctggactgcgccctgatgaatgcacatccggcacgatttagtgactggcgaggtttcatgctggagcgatctccagccgagccagaagtggagtacagtccggtgcctggtgtttga

SEQ ID NO: 327113 - DNA, 957 bp, Pseudomonas aeruginosa
atgagcgacaagcccagtacctcccgcctggccgaacgaattcgccaggtccaggaaaaaaacacccggaaaggcaagagcaagcccagcactgacctcacgtcgtccgacgcacagtctggcgccccgctgcagcttcccttctggccagaggctacccgtggggttcccagtggtttcctgcgctccgctctcttcgccggtattcagagcaaggaccgccgcttcctgaaagacgaagtgatcgaggcagttggtggagtcgagatccgcttccgcggtgagcaattggaccagaccgacctcgatgtgtgggaggcagtcctgcacctcgccaggatcaaccaactatcaaccaaagaccgtctgcgcttcaacgctcacggcatgctcaagatgctcgatcgctcaactggtggggatcagcacgactggctgaaaacgacgctactgaggctaactggcgcaatcctggacatcaaggtcgggacgcaggcctatttcggtcccatgctggaaggcggtacccgggatgaggccaccgacgaatacgagatctgggtaaaccccaagatcagggccctatacgaagccggctggacccagatcaacaacgaccagcgcaacgcgctccgccgcaaacccctggcccagtggctgcacggctggtacagctcccatgctgccccatacccgatttccgttgagacgttctacaagctgtcgggaagcaccaacaagcaaatggccggctataaacgcctcctgatgcaggcgcacgacgatctcgtggctatcggggtacttacctcatgggagatcaagaatcgcctcgtggcggtgtccaagccgcagacgcccagccaaagacgcttcctggagaaaaagagccagcgtgttaacgaagagcccgaaagcgggcggcaggccgaactcattgagcaccaaccgatatga

SEQ ID NO: 327114 - DNA, 741 bp, Pseudomonas aeruginosa
atgaacttcaagctacggcttaacgcaacgaacattgcttttgttgcagagctgaaccattccggccggatttactgcaggtctctccaggtccaagagctattggatccgcaatccatcggcggcgtcgtcaaccaacttcgacagctgcggcccgagtggccgcgggaggtcgtaagtgaggtggcggtggtgactggcgataaaaccgtggtggcagtgatgcgccaggagtccgccggccggtgggtcaaacttccgccttcggccccgtacgaggagagtggagtgatcgaccgcactgagtattccccgctccaacgtcctgagtttctgtggtctcgcttgaaggatcccgttcagggcgactcggttattgtggtgatggacctggatcgaggtgggaaaccagttgggcaggcgcttgatgacgtcgttcgacacatcacggctgtggagcggatgcccagggcgtctgtccgttcagctgtgatggtcctgcgcgacggaggtggccgatacgagattcctcactggaaacgcgagggtggcgctgttttagagccagtcgagtacgccggtgagtacgcaacatccttgaaagatgtgctggttgggatggggcgaggggaacttgcagctgtggtcgatgagcctttggcggagctatttggcttaccggatgcgtcggatgacgtgagtctcgacagaggtctcgacctccagtggagcccggtctga

SEQ ID NO: 327115 - DNA, 1050 bp, Pseudomonas aeruginosa
ttgccggccgtgattgtgcaaaactacgaggaccctcccttccaaagcccgagtgatgtgagcgaagggctctattcgctcctgagatcagggtactcagcgaaacttgctggaaagctacccgtaggactcgactggcgggatgcgcaagacgtccttcgtgatcctgcaggatggctagaaagaacgaaccaagcgggccaacacaccacgtcgttcgagacatcattccggctctttgcccaggcgccggcgcagtgggatcagcactacgcgctgcttcccgatgaaatcgaactcatgagccccgcaaaacagctggccttacgaaacgaattaggtctgaaaaacgccggcagacagatcttcgaacaccgctcctaccaagtcatggtcaggatgttttccagcgtccttgattgcccagccgccgcaccctacttccatcacgatccgctgcacgatgtcacggcgctcgcccgattcggcgacgacggcactctgatgaaggcctggtacgacatactgcatccgaaccgaggcctggcagcgctgctgatccttccaagcgcaggcacacaggcgttctcacgccagctggagatccagcgcctggagatccaggatgcgttggcgcgtgacatctatcagtcccttcatggcaacgacccgggacctctcaggttcatctgcgtttcgtctgaggcaccctaccactgcagcgtccatcaccttgatcgcgaaagcacccagctcgggcgtgagcaataccgtgccgcagtaagggtcatccagcgctccgcgcaagagggacactggccaatgttctccggtggcgaccaccaggtttcggtgagttctacccttcgagacgagatcgagtcgaacccgctgatgagagagccggcgttgctgccaatgaacgggccatccacagatcagccacagctatccagcacaagcagcgcgttgctgcatcacgcgaagagacaccgcgaacccaaagctaaaggtgcgtcgaacgacgtgttcaatttcgatgccgattga

SEQ ID NO: 327116 - DNA, 663 bp, Pseudomonas aeruginosa
atgaaacgtaccgtcatttctgaagcgtccaccccctggaccatctctttgcaggacggttgggcagcctctccggtacggatcgaccaccccttcaacgataggccaacggccccgaagggctggagccgtctttggccatgcaccaaagggtccagtgccggcatcttgctcatcacccgcgagcccgaggggcgccgttacgcgcttcacattagccagcagcccctcctgccgctcgacgccgatcggctggagaatagtttcctgcaaggtatcctgatactgccgccaagttcccaattggcccgcgtctacgcttcccggatcctcactctccctaccgagttgcgagacattgccgttgaaaggcttggttcggcgaagctgcacggcgcctaccactccacctccgagttgacgaccgcggtgaaaagcttcatcgcggccaacgatgacagcagtctcaaaagccgtgcggtaagcctcctggcgcaccgcatccgcgtcgcggatccacacacccgtcctgcactgtacgccgagcatcaatcccgactgccgtcgccctggatcgaggaggcgaagcgcatggccttcaccagggccgtgccgactcggtctacggcgggatatgccgacatcagcttcgatttcaactga

SEQ ID NO: 327117 - DNA, 207 bp, Pseudomonas aeruginosa
atgacccaggaaattctgggtttcgaggccggccttgatcgcacctacatctctgtcctggagcgcggagagcgctctcctacgctcgacaccctggtatccctttgtgacgtgcttggcttgagcctccctgagctcgccatccatgtccaaacccagttggacgagatgcatgacgacgaacatgatcctgcgggacgcacttga

SEQ ID NO: 327118 - DNA, 1128 bp, Pseudomonas aeruginosa
atgacgacgaacatgatcctgcgggacgcacttgagcattaccgcgagcgagtttccattttaaagaaaggctacctgcaggaacgctaccgcatccaacaactggccaactccagtctcggctctaagatcacccgagaaatcacttcggttgatatcgcaacgtaccgcgacgaccggctcctgcaactcaatagcaaaaccggccggaacatttcacccgcaaccgtccggctggaaatgtcgcttctctccaatctcttcgagcttggccggattgaatggggtatctgcgacgataaccccgtactcaaggttcgcaaacccaaaacgcctccaggccgcgaacgccgccttaccgcaagggaagaacggcagatcctccggtacgcccacaattacggcaacgccgaactctacacgatcgttgtagtggccctcgaaagcgctatgaggcagggggagatactcaacctgcactgggagcacatcaacctcaaaacgcgcatagcgcacctcccagacaccaagaacggtacccggagggacgtcccgctttcgctgaaagctcgcgatgccctgattcgcctcggagtgaagagcaggggcaaagtgttcgcctacacaaaccagggtatcaagacaacgtggcgagtgatgctgcaacggctcgggatcgaggatctgcacttccatgacctccgccacgaggcgatatcgcggctattcgagttggggaccctcgacatgatggaagtggcggccattagcgggcacaagtctctctcgatgttgaagaggtatacgcatctcaaggcgcaaaggctggtcaagaaattggagggaggccgcaaccgcggacgccaggtcgtgatcaatcatctaatcccctacccggccacggtcgtccactcttcaaacgtggtgactattcgcttattggattttgatgggctctcggcgtcagcgccgacgcgtgaatcggccctggtgcttgcccaggaccagttgctgaggcgcctcatgacatcgctcagggacgcagaaaccattccgcaaccggaccagtacctggagatggtcagcgaaaaggacttggtgatgattgatccgcttgcagcagcctaa

SEQ ID NO: 327119 - DNA, 222 bp, Pseudomonas aeruginosa
atgatcgactggggccacatgaagacgcctgagcagatcctcgaggagcagcgtgcggcagtgcgagagcagcgccgcgaggcctatacgaaagagtctctgccgctctatctggaagcgcagtatctggcagcggtcggccaggggcccgcagatctatcagagtggatagcgaaggttgcagagatcaaggccaggtatccgctgcctgaggctgattag

SEQ ID NO: 327120 - DNA, 405 bp, Pseudomonas aeruginosa
atggctctttcagatgagcgccgcggcctcggcgcgaggaacgaggcgatccgccgcgcgggcggccaacgggttgaagcggagcgccgcggtgaccagggcctgaccgcggcgctcaaccggctgatcgagccggagcggcaggcgcggtcgctgcgcaagatcgacccgcgcggcgccctggatgctgcgcgcggcagggctgactacaaccctgccggcaagcagatcggcgggggcggtgtgtcctggccgttggccgaaaccgacaagtcgaagcgcacggtggccgacgaggagatcgtgagcaccgatggcctggtcgtcgttgtgttcaagcgcgtcaccagcttcgagatgcaggatggcggctcgaatattggccgcatggagttcaaggcatga

SEQ ID NO: 327121 - DNA, 546 bp, Pseudomonas aeruginosa
atggcaactgttacgcacgtcctgtccggcgccggggagccgctcgatccgccccccagcatcggcgctcactacgtgaacacgaacaacggcgcgctatacatggcgaagggcaccgcgagcggtgccgattgggtgaagctgggtagtggcggtggcagcgctccgagcgaggtgctgcatgtcaataccgacggccagttccttctcgagcctcaacactcatttgttgaggcccgtctgttcgcaattcccgagcttggcaccgccgcaattggaatcgatcccagcacatcccgacagttcgacctgaacatcagaacctgggctccgagcgggcaacaactgcaaatcagggttacgtcgggtgaattgcccggaggtatgtcgatcgtgggcacctccaggcagtgggcggcgcaggagtcgtatgggttcgtgatcaatgcaaatgacctcaacggcgaggtgtgggcgcgcatctatttcgatgctgacgaactcaccctgtcgatgctggtgttcagcgatgtgctgaacgcgtag

SEQ ID NO: 327122 - DNA, 411 bp, Pseudomonas aeruginosa
atggcgagagcctggatcaacaactggaagacgacgctgagcgccggcctttcgcctggcgcgttaagcctgacggtgcctgatgctgccgccgcgctgctgccgttatccggaggaagctgggtgctgttgacgctcgcagatgacgccggtgtgcagcatgaaatcgtgaaagcaaccgccagcgccggtggggtggtgacgatcgagcgcgcccaggaaggcaccaccggcggcaattggccggcgggaacggcgatctatgccgccgtcacggctggcgacctcatgacgctccaggcgcgcatccaggctctggagtccggggcgtctggcggcacccttgtcgacgaaaccggcgcaacgttggtcgacgacgccggcaacaacctgatcatggagaacatttga

SEQ ID NO: 327123 - DNA, 1710 bp, Pseudomonas aeruginosa
atgctcaacggtggaccgctcaatagcgctgcgctgaactcggccgctcaatccgttgtgcctggtcctgagccgatcatcccaggctacgctttcacatggcgagcaatcgtgcgtgttggcgatgacgacgttacaccgctcctgaccggggagatcgaggtcgatcgtgaagagggggcggctggcgtcgcgtccttttcgatctatctcggcgacggccctgttgtccctacagactggatcggccgaaccgtaaccatcgactacgcaacggagaccgccggggagctgagtcagggccggcggtttacgggaagggttacgcagccagcctggaatcctgttcggcgcgtcctggacgtcagttgcacggaccagttgcagcagcgtgtagaggccatggagattgcggccatcgacgccctggtcgtcggcgcctggtccgcagatgtgttcgagccggtcgatggacgctcgcggtgggactacgcccaggagcgtttgaccagcgtaactgggagcttggactgttcgccatatggtgctctccgcgtcacgtcatggctttcggtggctcctgccttcgagttcggccaaggctctacggtatacggatcgcttgcggtcgagttggccgacctgagctcgcagacgaacaggatcgagatcgagtgcgactaccgattcagccggctctggcagttgaacgcttcgtatagctggcagcaccccggcacagggaacgctgttggtgaggctgggttctgcaactggcgcggcgacgataccgagttgcccgacgtagagatgatcacatctgcgaccgaaagcagcggccagacgttgttctatgccacctggtatccgctgccgcccacgggcgtctactgcaacccaccggcggcctggatcaacaacttcaccgagctgctgctcggaggcaactggattgctggccggcgctgggtgcagtccgtgaccgagcgctacaggctggtgatggaagtgcagccgagcgttgcagctaccggcccgattgtcggtcggcagcgtgcctcgttcgagatcgagtcggacaaggcttcgggctgggaaagcgatccgatcaccggcggcagcacagggcacagcgatgagaaggacgacaaccggcgcttgtccgcactgaactgcttgttggcccagggcgccacgacgctcatcgccgcgcaccgcgggacgactgtgacgtgggacgtgcccaccagcatggtcctgccgatcgaccttgtgcatacgatccggctcgatgatcagggcgctcgcgcggtgggcaagtgccagcggattgtcgaccgactcgatctcgcatccggaagcgccctgaccacgatctctatcgcggtgatgcgcggtggtggtggcgccgctgatgcgctggcgcctccgtctggctcagttgctcctgacagccctccgtctggtggtggccagctaccgacgcaactcggcggccgcaacagcagcccgatctatgacgacgaagcggatgggttcgcgggcaactggacagagaatgatctcgacatcaatccgagcctggagctgttcccgcgccgcttctcggtgaccgcaaaagacattccggagacctaccgggacgagcatgcgccggagcttgcggccacctaccgggtatccgtgcctgacgacttactggagatgtag

SEQ ID NO: 327124 - DNA, 522 bp, Pseudomonas aeruginosa
atgatcattccgaacgtgatgctcgggggaataccgatcgtgatacacggtggcgccccgcagtgtcagtaccaggctgtagatggcggcgtcgagcgattgaggctcagcggaggtgcggcagtacagatgacgcactggcgcaagacggcaatcaccatcagcggttcaggatggatcggtacggggatgcttgggctcgacttcgacagcccgctggagctgcgatgcaatgcgtcgcttggcatctcgggtcgtactgccgccgaccgagtattcaccatcccgggcgaggttcggccggacgccggtccatgggggctggcgctagtcggtcgtgagtgggtcagaacggacgtctcgtctgccggccaggtggtaactgtgtcggagatcccgggcgcgcaactctaccgcgtagagtggtggccgctgttccacgtcttcgcgtcggtccctcctgaagcgcttgattcttcgaacaacagccggacctggcaaattgtcgctgaggaaatctga

SEQ ID NO: 327125 - DNA, 531 bp, Pseudomonas aeruginosa
atgagtgaaattgatcttgatgaggccagcctgcgtgacctggtaatggtcaatgacggccaggtcgtaacgacatcgctgaaggtggccgaacgcttcggaaagcggcacgacaacgtccttcgggctatcgacaacttggattgctcggctggtttccgtctcctcaattttgaggagacggtcatgtggcgggaaaatccgagcggcggagaaccgatcaagagtcgaagcttcgacatgaccaaggacggcttcatgttccttgtgatgggctttaggggtaaagccgcagctgcctggaaagaagctttcatccatgccttcaactggatggccgagcagttgttcaaacgctcaatggacttcaacaccatgcgcaacgagctgatggcggagtaccgacaagagagagggattgccagcctggccggcaagaccctgcgtcgatggcagatcaaggcacccgtcatcgaacagaagatcattgaggtcgagcgcgaagggcagctgcagctgtttcacgcctga

SEQ ID NO: 327126 - DNA, 222 bp, Pseudomonas aeruginosa
atgagaagtccagatatcaaggtcgtaaagcttgagggtgacgcgctgccctggtccatacgcgatgccggccatgaggcctgtttcgtggttatgcatggcctgacgctacggagcgatttcttgttctccgagcaggaggctgaggcagtggccgacgcggtgcacctagagatcatcgaagagatgaggtcgatgctggagtctgtccgaggacgataa

SEQ ID NO: 327127 - DNA, 390 bp, Pseudomonas aeruginosa
atgagcagaactcgaacctacgtggacaagctgctgggcgataccgagtacctcctcgagcagtgggggtggtggcgaatggatggaatgggggttcccggatatgtgtcgccggcagccgctatcatgagccaagccatgccaatgtcgagccccaaggcctaccacgtcactgatgatatggccttggccgtcgaccgggtcattgctcgactcatcgacagggcgccgcaggccggcgacttcgtgtggctctactacggcgcgaagtggccggccctgcgcatcgcgcgtgaacaccagatcggcgaggccaaggtgagggagactctgaagttggcggtgggatgggtcgatagcgctctggagcggttccgcgagagcgcttga

SEQ ID NO: 327128 - DNA, 279 bp, Pseudomonas aeruginosa
atgagcaacgtacaaccgatggcgccccgcaaggtcatgaccaggctggagcgggagtttctcaaggtggccggccaggagctggcgcaggtcaaagtcggcggtccagcagcgctggctactctcttgcagatagttgccaactggcacggtgaccgtggaacgctcggtttccacgactacggccgtctctggctgcaggacggcaatgcgaagggggcggcggtggaaacgctgctgcgtgatctgttcggcctgaacggtccgggggcggcatga

SEQ ID NO: 327129 - DNA, 690 bp, Pseudomonas aeruginosa
gtgacactggttcagcgctttgagcgcaacaccgctgggcgtgacttctgcgttggcgacgtgcatggctgcttcgatctgctggaggcgttgctggcgcaggccgccttcgacaaggcggttgatcggctgttcagcgttggtgacctggtggaccgcgggccggggtcggacctggtccaagaatggctaagccagccctggttccacgcggtcagagggaatcatgagcagatggtcgtcgacacgtacaagcatggcggcgacgactggctccatgtcgccaatgggggcgcgtggctgcttggattgccggagacagagcagcggggctacgccgagttgttcgacgacttgccgctggccatcgaggtggagaccgccgctggcgccgtcgggatcgttcatgccgagtgccaggcgaagagttggcaggcgttctgcgccggcgtggaggctggagagaaagcgcacgtcaccgccgctgtgtgggcgaggtccagggcagcgaacgaggactccactcctgtcgagggcgttgccgcagtactggttgggcacacaccgcacaacaggctcaccagactggggaacgtgttctatctggacacaggcgcatgtttcggcggttcgctgagcatgctgtgcctgaacgactggagcgtcagctctgcgcgaggtacccgatga

SEQ ID NO: 327130 - DNA, 372 bp, Pseudomonas aeruginosa
gtgaataccgaacacaaattcccgatcaccctcccgaacacgctggaggagtgcgaagagttgatggagcgcttgagcgcgtcctgcatcagttgtcgcagccagattgaggcggccaaggctgagcagaaggcgacggggcgcagcgttgacgagatctggtacagccgggcaagcaccgcgctccgctggatgaaccgagacaaggtccgtctccagaaccatatcgcgaggctgcgcaaggacagtcgccgggcccataacgacttggccaaccggttgctgatcgaggccttgcgtgagcatgtggggatagaggtgtttcaagcctgtgcggagaaagccaggcagcggatggagggtatgcagtga

SEQ ID NO: 327131 - DNA, 1431 bp, Pseudomonas aeruginosa
atgaccggatacctcgagatgcaggatgtcccggtgatgggctacgaggtgccagagtcgaagctctacagccacgaagccgagtatgcggtgatcggcgccatgatccagaggggcgacctgatcgaggacatgggcgccaagctggaggtttcggacttccaccaccccgcttgcgcggaactgttcgagctgctgctggcctgccaggcgaaaggcgtcgcggtcgacatcgtgaccctctacgaggcgcgggctcaactggcggacgggcagagcaccctgcaggtcgctgcccgcctggtgaagaacaccccaagcgccgcgaacgctgatgagtacgcccggatcatcaagcagcggtcggtggcgcgccgggtgatcgccgcggccgaggtgatgagccagcgtctgcaggatggcgaaccgctggacgaggtgctgagtcagggccagcaggcatgggttgccctcgaggccgaggggctcgactcccggcgccggtaccgcttcatcggcgaggtgctgccggaggccatcgacggcatcgacaggcgctttaaccgtgaggtgaagctggggtacgacaccggcctaccctcgttggacgccttcatcccgggtatctgtcccggccacatggtggttgtggccggcgagccgggcagcggcaagaccacgcttggccttgggtttgccgagcgggtggcgctggcgtgcaacgagccggcgttggtgttcagcctggagatgaccgatgtcgagttggccaaccgcgtgctgtcatcggtgggcagcgttccgctcaagcacattgccgaaggccactcgatggccgattcagactggccgggcctgactggtgcggtgaacaagctcaatcatgccccgctgatcctctgcgacgacgcctcgctgacgctccgggacatccgccagatctgccggacagtgaagcgcgagcatggactgggcttggttgccgtcgactacatcggcctgatcaagggcgagcagcggaacgcgagccgctacgacgtggtgaccgagatcagcaagggtctgaaacgactggccaaggagctcggcgtgcctgtggtggtgctggcgcagctcaaccgtgggccgaaggcgcggggcaacaagcgtccgaccaagagcgacctgcgtgactccgggcagatcgaggccgatgcggacgtggtggtgctggtccacagggaccaggaaagcgacgccggcaaggctggcattaccgaactgatcgtcgacaagaaccggcacgggcaggtgggtgtggcgcacgttcagcaccagggccagtaccaccgcttcgtggagatcatcggcggctatcagcccagcgaggaagaagtcgaaatggccagaccctacaagggccgtcagtacggcaaggggaaaacagcgtga

SEQ ID NO: 327132 - DNA, 783 bp, Pseudomonas aeruginosa
atgaccaaaaaccaagtgaaaaccagggacgagacttgccccgttcacggcggcttcgagagcaagcagcaggagcagttcgacggcgggttcgtctggactggatgctggcgctgcgagttcgacgctcgccaatcatccgatccggaggttcgctccaaggcgcaggctgcgcgtgatgcccggatggtcaatgccgcgttgctggagagccagataccgccgcgcttccggccggcgaccctggagaactaccgcaccgacttcgcaccggaccagcaatcgccagtcctggctcgctgcaaggcttacgcagacgacttcgcctcgaactggaaggttgggcgctcgctgatgctgctgggcaccatgggaaccgggaagactcacctggcctgcgcgatcatccagcaggtgctgcgcaccgaaggtctggctggcgcgactgcgcgctacatcaccgcacccgacctgatcctgggcgtgaaggacacgtttgggcggaagggtaagagcgagtccgaggtctacgagagtctgcacgctccggacctgttggtgatcgacgaggtaggagcccagcacggcaccgacttcgagcgtcaggtactgttccaggtcgtcaatggccgctacgagcgcctgcttccgaccatcctgatcagcaacctgagcctggtcgatatccggcgattcatcggggatcgcgtgattgatcgcctctgcgacgctaacggcgaagtggtgctgttgcgctggaaatccgtgcgaggttcggtatga

SEQ ID NO: 327133 - DNA, 858 bp, Pseudomonas aeruginosa
atggctggtgactggatcaagttcgagttggccaccctggagaaacccgaggtgtgtcagttggcctcgctggccaatgtcgacatggatgcagtcgttgggaaactgctgcgtgtgtggggttggttcgaccagcacacggaagaaggtaacgccccaagcgttagcaagttgttacttgatcgtttggctggcgttaccggtttctgcgatttcatgtgtcaagtcggttggatggtcgaagagggcggcgtcatcagcctgccacgattcgaccggcacaacggcaagactgcgaaaaacaggctgctcacggcgaagcgcgtggcaaaccacaaggcggctaacgcaaagggtaacggtgcgagcgttagcgatgcgttacctagagaagatttagatgtagagaagagtaagagaaaagatatagagccccccttaccccccgagggggatgccgctggcgcggctagtgatcggcctcgccccaaaccaaggaagtcgaccaccgtcaccgcaaccacgatgaccaacagcgtcactgggctctcccaggacgtggcagaggcgtatctggttcaccggaaggccaagcgggcacctttaaccgacctcgcctggaagggcatagccaagacgctcctggatgccgcccagctcggtgccgctccggacagggtgctaagcaaagcgattgagcgcggatggacgggccttgagcttgagtggctgatcaactccggggtcctttcctcaggtcaccagggcagtccgccccacttgaacctggatcagatcgatcacgaagagggcctggagcgccaggccgacggcacctaccgaattgcgagaccatga

SEQ ID NO: 327134 - DNA, 231 bp, Pseudomonas aeruginosa
atgaccacacaaccgaaaccgggccggatcaccaccagccccaacggtcgcccggtgatcgccgggccctggccgtcctaccgtcaattccgcgacctgcccgagcgtgagcgctgggtgctctacggccacgccaaggcatgccgcggtgcgcttgaagatcaagggttcctcatggccgagggatatcacgacttcgtgaagcgcgttaccgaggagctgaacatctga

SEQ ID NO: 327135 - DNA, 771 bp, Pseudomonas aeruginosa
atgactggcctgacctcaattggcggccaggccgccaccatgaccagccgcgagatcgcggatcttgtcgaggctcgccacaacgacgttgtcacgaccatcgaacgtctcttcgacaaggggcttttacgatcaagtcgtaaaactcgccgggagtccaccggtggccgtccgatcgctgtgtatgacctgatcgagagggatactcacctggtcgttgctggttacagcgatgagcatcgtgcccgagtgatcgaccgctggcagcagcttgaggctgagcgtaccggtcgcgattaccagatcccgcgtacccgagccgaggccctgcggctggctgctgacctggaggaacagaacgccgtcctgcaactggagaatcagcaccaggccgagaccatctccagccttgaatcgctgttcatggtaggcgagacgcctactcagttctgcaagcgcctgaacggggtgaactgcgccaaggtaaacagcaccctgtgccaactcggctggctcttcaatgagcagcgcgaagaggagggcgcaccgcggtatcgcgtcgccagccgtgtccgcgacaagtacctcaccgagcgcccgcgcaaaatcgcccccgagggcggtgactccttcatcaagtacgacctgcagttgctgctggccggcgcccagcgcctgcaccaactctacatgcagcaaaagctggtcatgaaagccacctgggacggccggttcacgcaggccaagtacaccggggagaccatccaatga

SEQ ID NO: 327136 - DNA, 492 bp, Pseudomonas aeruginosa
atgagctctgtgtctgatgcaaaacgccctcgtcgaggcaagaagccacaggggatatctctccacccgcgcgccaaggaaacttggcagcgcttgcccttcgtaggcaaggaccatggtcgctactcaatgtgggatgttcctttgactggtagctacctcaccggtctcgaggccggcaagagtatcgcgcacatctatctgaagtatgtccgggatgtggacgactggatggcttgcgaggtgctcaggagcatggtgcgcgatttgatcaccaaagccccttcggacgagcaagaggaaactgtcaaacgcggccagttcgcggggttcatgggcgagatattcaactggctcagggtatccgcccagtttgccggaagcagtctagaccgagtggaagaccaggacctggtagatcgggtgaaccactacctggatgcaggcgtagccgatgcaatagatgcggctattacgagggcttcgacatga

SEQ ID NO: 327137 - DNA, 234 bp, Pseudomonas aeruginosa
atgactagccgcatcggagcgaaagcgctcggtgaccagctctacagctatatcggcgccatccaggacttggctaccgcagttcgcgaagacttggctttcgagggtttcgagctgggcccgcgcctgaccgccgagcaggtggatgcgatccatctgtcgattatcaccatcgccaggttggctggcgaagacttgatccaactgctgaccgagatggaggtgccggcatga

SEQ ID NO: 327138 - DNA, 279 bp, Pseudomonas aeruginosa
atgagggccacgatgggtatcagcttccgggcgactgcgccggttgatctttcgaagggagatcagaaagcgaatgtcctgtgcgtgatggatgacattgatgccgacctcgcactggacagcgcagtcggcctgctcgacgcgattcaaggcgggctcctcgacatcctcgacgagccgagtgttagtcgtcgcgtagccctacttcttcatgcggccgagacagccactgccctggtccgtgccgccttggagggtggggaggtggccaatgactag

SEQ ID NO: 327139 - DNA, 273 bp, Pseudomonas aeruginosa
atgagcgcgatcaagctcgggctgtctgcactgaatggaccggtatctcagcttccgccgcgaagattcgcagcgattaacccgaccacgacggtcgaagaggcgttgagcgaggcgatcgcgctgacgctaagtgtttctagcattctcggagcactgaccacctccgacgaagagcacgcgtgcttgtatgcgctggagattgctgcagagatggctggcgacttggttgacgccgcgctcgactccctgcgtgaggagggccagcaatga

SEQ ID NO: 327140 - DNA, 222 bp, Pseudomonas aeruginosa
atgactgatgctgctgaagaaagaatcccgaccatcgatttacagtccctcctagacacgcttaacgcgctgcccaaagacacccgcgtaggcttcagcggcctgaccttctaccgcgtcaagtggcgaggccagacgatggtgaatatcgagttcagcgagcatgttcatcggaactcgaaaggtgaggttgttgttgaagctcctgggccagagaactga

SEQ ID NO: 327141 - DNA, 273 bp, Pseudomonas aeruginosa
atggagcccttgatctctgacggcgctactatcggcgttgatacggccaccaaacacatcaccgacggcgagatctacgccatcaagcacgacgacctgctaagggtgaagttcgtctaccgcctgcctggcgggggggtccgcctgcgcagctataaccgagatgagtatcccgacgaggagtacacccctgaggaaatgaggagccaacaaatcagcatcattggctgggtgttctggtggtcagtggttaggattcggcgaaagctgtga

SEQ ID NO: 327142 - DNA, 384 bp, Pseudomonas aeruginosa
atgaccatcaccatcagcactgatacctggcaaggccgcctcggcatgggcctcgctccgcgtgaactggaggccaccctgcatgcggcgagcgacctgaccgcaaaggagatcgccaagctgatgggcatcgcgccagggaccgtatccaagcgattggatgatgcgcggttcaagctcggcgccaagaccatccgcggcctggtgctggaggcatacaagcgccagatcatcagccccctgtgcgttggaatcctcgccatcctggcggcagcacaacccctcctcgatgaagacccggccatgcgggcgcgccgtggcggcgaaaggaagatcgaaactcgcctgactgctcgccgcgatggcgtggcctgggtggcgtga

SEQ ID NO: 327143 - DNA, 234 bp, Pseudomonas aeruginosa
atggcctgggacagaaacgatcctctcaacatcctggcgctacagctcgacggtgaactgcgcgccgctgccgacttctgccatggctacaacgggccggcacagcgcgctttcgcccggcacatccagggcctgggaaagtcggtcgacgagcttacggtggcagacctgaaggcagcggccgcatttgctgaagcagaactgaacgacctgcaacagagagggctgatctga

SEQ ID NO: 327144 - DNA, 267 bp, Pseudomonas aeruginosa
atggcaagccctacccaagttgcgcccgaagcattcgacctggccgccaaggcctacgattccatcgagctcgccgtcagcaccctctacgacctgtccgccatcttccgggcgatctaccaggccgaacagttcccgtcccacaacaagcgcctggccggtgttggccagtatttggccgacgactggggaagtctgctcgatggccaggtaggcgagttgaaagcaatgctcgaagccactcgcgaaaggagggctgcagcatga

SEQ ID NO: 327145 - DNA, 768 bp, Pseudomonas aeruginosa
atgagtctgatcaccacaaccaacgccgtcaccatgtcgagccgcgagattgccgaattgactggaaagcgccatgacaacgtcattgccgatattcgcaagatgctccttgagctcggatatcagatcgacgccgacggaagatctcctgacttttcaggagatgtcccggacgcttatgggcggctccagcattgcttcaatctgccccgccgcgaggtcgaaatcctcctgacgggctacagcattccgctccgcgcgaaatgcctggatcgactgcacgagttggaggcacgggccaagcaaacgctcccggccctccccggtgactacatccaggcactggagcacctactggaatccaagcgctctgagcagaaggccatcgaagagcgcgaccacgccatcgccaccaaggcagagatcggttcccggcgagaggccactgcaatggcatcggcttccgccgccgtccgcgaggcacgtcgtcttgcagatgaactcgggcgtggtacccggcaggcgacggtcaaggcagtagagaacctcaccaagactcaattcgacccgcaggcctggcgcaaattgcgtgcatggtgcgattcccacggagtccagcccaactatgtcgaagaccctctctatggccgtgtccgggcgtggcctgcggatgcctggaaggaggtgtacgacatcgacctggacggactgttcggttatcaccaacaccggatcaccgaagggggtgcaagttcggcatgcccctga

SEQ ID NO: 327146 - DNA, 237 bp, Pseudomonas aeruginosa
atgaaacgagcaaccgttgtaaccgaactgccggccagcgccagccgggatatggacaagttcgttgtccgactgccggacggcctgagggccgaggtggaagccgaggccaagcgagacgaacgcagcatgaacagcgtggtcatcatcgccctgcgcgagtacctgcacggtcagcgccggaagcaagcgctcctcgatgctctgaccgctgccaccggagggcaccgaccatga

SEQ ID NO: 327147 - DNA, 336 bp, Pseudomonas aeruginosa
atgaagcaagcactcatcggcaccgcgatcagcctgctgctcagcgcgtgcctgtacttcggtcaggggtcgcttcaccagttcgccttctatgtggcggcggccacgaacgttctctgctggctgctgatattcgccggcggcatcaaggggcaaggagccgcgaacctgctcgcccatccttggctctccattcctaccggcgctctgcacgtggcggccctggccctcacagaccaccctgcactcgcggcttcgagcctgctggtgcaaatggcttgctacgtcctctcctaccaggcggtgcgcagcgccgagcaagggggtgacctatga

SEQ ID NO: 327148 - DNA, 192 bp, Pseudomonas aeruginosa
atgagaggctccgatattccgccaccaccagggtatcgccctaccccgctcgccaccctcggccagcagttggtccgcctgggccaggcgatgcagaaccccaacaccaagctcggcgagttgaccgaactggtccaggcctgcggcgtcgacctgcggatctgcgacacgaacaaggagaatcgggcatga

SEQ ID NO: 327149 - DNA, 777 bp, Pseudomonas aeruginosa
atgaagggcgcaacgatgcatcggctgatcgacctcagcgtcgacagcagccgtaacctgcgcgtgcgtatagcagccctccggatgttcatccgggcagtgcacgccgatcgcgatgccagcttcgcagagcatcgccagaagtggcgacgacttctcaagggcatgccgttcaccgagcaggcgctggagcgcgaacggatggcatatcgggagcgagccagagttgcggcgcaagccatggaggagtgcggtgcttggcttatcggaaactccgccatgatcgagcaggctctgtcgttcgacgacctgtgcgatctccttggggtgaatcatgcccaccgtgccgaggctgccgaggtctgcgcgggcgatgccggagtcgttggcggcctgctctggattggcggggagttcgaggacagcgcagaccacaagagcggccgctccaaccgagggaacacggggccccttaccgcagcggtccagaacatgttccagaagttcctgcttgaaaatccgtcggtcatccctgacccgttcgccccgggcggccctttctacggtgccccgcggcaggagatggcgccagatggaacggtgcagattcggcgaccggcactcaccgtccacagccaggacggatcgatccgcacggtggagcgaaaggcggaggtggttggcggtgagttggttgcccgcgggcgccacgaagtgccgctacacctgatcgtagcgcgcaacgaagaggagatagggaatgggaagctcgactag

SEQ ID NO: 327150 - DNA, 243 bp, Pseudomonas aeruginosa
atgggaagctcgactagccccgtatccgagttcctgtccgaagaggaagtcgccgagctgactgggcgcaagtacccgagccagcagatcgagtggctgaataggtacggctggaggtacgccgtgaccgcggcgaaccgcccgatagttgggcgcgtatatgcccgcctgaagctggcgggcgtgaagccgacgatggaagcaaccgagaagtggagcctggacctgtccagggttagatga

SEQ ID NO: 327151 - DNA, 1053 bp, Pseudomonas aeruginosa
atgatgagaccgcggagcaacaagaaccggggcctgccgcctcgcatgatcaagcgtacccggacgatgaagtcaggaaaggtctgggttggctactactacgacgggcgggatgctgaggggaggcgcaaggagatcccgctgggcacggacttggatgaggctcgggagaagtgggcgaagctggagagaaaggccgtgccgccaaccactcggaccgtcggcgatctgttgcgcaggttcgagcgggacgtggttccgacgaaggcgccgaagacccagaaagagtattcgaagatgatccgccaactgctgggcgcctttgacgaagccccggtagaggacattacgccgagcaccatcgctcagtaccgagacgccaggacggccaaggttcgagcgaatagggagatcaccctgctttccttcgcctacaacatggccagggagtggggcatcaccagcatggaaaacccctgtcgcggggtgaagaagaacaaggagcagccgcgcgatgtgtacgtcacggacgaggtgtggaaggcgctctacgagaaagccccggacgatctgcgggtgacgatggacctcgcgtatttgacaggccaacgcccggctgacgtgaggaagctgcgcaagaacgacgtttccggagactacctgctggtcgggcagaacaagacgtctcgcaagctccggatacgactccgccgcgccgacggacagatgacccaactcggccacctggtcgagtcgatcgcctccgattctccggcgctggtcaccaacgagaagggccagccgatgacagagaagatgcttcgcaccaggttcgataccgcacgcaaggctgcggccgatgaggcgatcaaggcgggtgaccaagacttggccagggagatcatgcagttccagttccgggacattcgccccaaggcggcctccgatatcgagagcctggccgacgcctcagacctgctcggacacacgacccaggagatcacaaaacgcgtctaccgccggatcgggaaggccgtgaaccccgttagatag

SEQ ID NO: 327152 - DNA, 300 bp, Pseudomonas aeruginosa; identical to SEQ ID NO: 323605

SEQ ID NO: 327153 - DNA, 1794 bp, Pseudomonas aeruginosa
atgcacgacctcatccagcacgccgacgccttcgtcggcgatcccgaccaggaatccggcggcctgtcgcgccgcagcttcctcggcaagagtgccacgctcggcgcggtcggcctggtggccggctggaccccggccttcgtcatccagcccgccgaagccgccgccagcagttgtccggcgccggcaggctttccggccggcctcgaactttatcggcgggcgttccgcaactggtcgggggaaatcgccgccgacgacctctggagctgcgccccgcgcactaacgaagaggttctcgcggtggtcaactgggcctggcagaacggcttcaaggtgcgcccgcgcggcatgggtcacaactggtccccgctgctgctgaaaggcggcgagaactgcgagagccgcatcgtgctggtggaaaccagccgttacctgacccgcgtacggatcgacgcccagggcgagttcggcctgttcagcgcgcagaccggcgtcaccatggaagccctgctgaaacagctggagcgggtcaagctcggcttcgtcgccacgccggcgccgggcgacctgaccctcggcggggtgctcgccatcgacggccacggcaccggcatcccggcgcagggcgaaagccgcctgccggggcagagctacggctccctgagcaacagcatcgtggcgctgaccgcggtggtctgggacggcgccgccggacaatacgtgctgaagaccttccgccgcgacgatccggcctgcgcgccgttcctcgtccacctcggacgcgccttcatcgtcgaggcgaccctccaggccggggtcaacaagcgcatgcgctgccagagttacgtgaacatcccggcgagcgagatgttcgccgcagccggcagcggcggaaggaccttcgacagcttcctgcagaaaagcggacgcgccgaggccatctggttccccttcaccgacaagccctggctgaaggtctggacgccgaccccgcgctgcccgttcggcgcccgcgcggtcaacggcccgttcaactaccccttctccgacaacattcccaaggcgctgtccgacctgctggcggcgatcaacaccggccacccggaactcaccccgctgctcggcaagctgcagtacgacctggtagtgggcggcatggcgctgaccctgggctacgacctgtgggggtggagcaaggacctgctgctgtacatcaagcccagcacgctgcgcgtcaccgccaacggctacgcggtgctgacccggcgtcgcgacgtgcagcgggtgatcaacgagttctacctgcagtaccagacgatggtcgccgcctaccgcgccaacggccactaccccatgaacggcccggtggagattcgcgtcagcgggctcgaccagcccggcgagtcgatcgttcccggcgcccaggtgcccagcctgtcggcgatccgtccgcgccccgaccaaccggagtgggacacggcgatctggctggacatcctcagcctgcccggtaccccgcaggccaatgccttctaccacgagttcgaggcctggctgttcgaccacttcagcggcgactacgcctcgctgcgggtggagtggagcaagggctggggctacagccccgccgccgcctgggacgagccgacggtagtcgaccagttggtggcgcagtcgctacgccagggcctggtcgcagacaacgattgggacagcgcggtgcgccagttgaacgaagccgatccgcatcggctgttcagctcgccgctgctcgaccggctgatgccatga

SEQ ID NO: 327154 - DNA, 999 bp, Pseudomonas aeruginosa
ttggaattcgccgcaccagagggtttcgatgtcgcggtcgcgctggctgtcgcggttggcgttgagggcgacggcgcgcagttgcaggcggccgttgtcggccttgccgccgacttccaggccgtagccgggggtggcgggtttgcgcaggacgaccctgccggtctgcgcccaggcggtggccatgccttcgcggacttcgtagccgaggctggcgaggccctggagcacggcctggcggcgggcgagggcggcctgttgctggaggtgggcggtgaggatggcgttgcatcgctcggtgagttcggcgagttgctgcggatcgctgtcgggctggcaggcggcggcgcgctggagcagttcggcgtgttcggcggcgcccagggcggcgacttcgctggcgaggtcttgcaggtgttccaggcgctggcgttgctgctggtgttcgcgggcggcctgggcgaggtcgaggaccaggctgtcgagcagcaggttgcggcgctccgggcgctgttcggcttcggcgcgtgccagtcgctcgaggaacgcttgggcgctggcctcgccttgcagcagttgcagttcggcgatgtgccggtcgatgcgcgccaggcgctgttcgtgcggggcgtcctgttgctggcgggcgcgccactgttccagggacatgggcgtttcgtcggtcttcaggcgctgggcgagttcgcgctgggcttcgctgaggcgttcttcggcgggggcgctggcgagggcggcgaagccttgggcgagcagggcttccgcgtcgtcgcggaggacgccgtcggccagcgtatgcagggtttgccggagtgccgcgctggcggcatcgggcctggcgtcgagggcctggagcagggcgctggcgttttcctggaggcggcggtgttgctggcgcgtttccgcggcctggcggatggcgcgctcttcgcgttcggcgaggtcgcgcttgaggaattcgctttcgatcttcacctgtag

SEQ ID NO: 327155 - DNA, 771 bp, Pseudomonas aeruginosa
atgctccgtcccgcgcttcccgctgtcctctgtctttactgcctgctgctggtgctgccggcgcgcgccgccctcgacgaccagcaacgcgccctgcaacaactgcaggtccaggcctgtcgcgcggtgggcagcctgttgttgctgcgcggcgagggtttccaggaacagcacgcggcgcaactggagaaggacctcgccagcctcgaccgcgcgctcgccgccgcccccgagggggtgctcctgcggcaagacgaaaagacgctggtggcgcgcatccgtgaaggcgcggcctacggcccccgcgaagaggacctgccctggcgctacccgcagcaactgagccgcgccctgcgtgacttcctcaacctggtggaacgccaggtgccaccgcccccgccaggccagcccctgccgctctggcagttgccggtgcgggtcgagtacctgtccctgcaatacctggcgcgcgcctacctgggcgggctggagactgcccgcgagcagccccgggactatctcggccaggacgagagcgtgctggtcccgctgatcgaccggcgcatcgccctgctggtggcgcaaagcgccaacccggcgggactgaagaaactggaaaaccgctgggagtacctgagccaggccctgcgcgacctgaacagcaagagcagcgcgctggtcagcgcttccggcaggccctgggcgccgatcatcgtcgaccgccacgcgcgtgccctgagcgaaagcctgatgcgcctgagtgcggagtga

SEQ ID NO: 327156 - DNA, 708 bp, Pseudomonas aeruginosa
atgctgatcgccaacggcctgcgcaaggtcgacatgcaggacctgctggtcttcctacaggtccaccaacgacagaacctcgtcgaggtcgccgaacacctgaacctcagtccgtcgacggtcagctactgcctgaagaagctgcgccaggccttcgacgacgagctgttcatcgccacccgcggcggcatgcagccgacccacaagagtcgcgccatgctgccccatgtggaggaaatgcttgcccgcatcaacgcctgtcacgccgcccagggcagcttcgacccgcgtggcgagccgcggacctttaccctctgcgcgccggaatacgtcgagctgctgatccttccggcactcctgcgacggctcgccgccaacggcccgaggatcggcctggacatccgccgcctgggtcccgaactgcccaccgaagcattgctcgacggccaggtcgacctggtcttcgacttcggtcctgagtaccaccgaccggcaccggagctacaggcgctcgccctgttcagcgacgaactgctctgcgtgcaggatcgtgcccagccgcgccacgagcgcctggaactggacgagttctgccggcgccgcttcgtcttcccgaccccgctcgacgccagcaacgccaacctggtggacacgtggctgcgacgccagggccgcagccgcgaagtcgccgcgcgcgccaacagctaa

SEQ ID NO: 327157 - DNA, 1422 bp, Pseudomonas aeruginosa
atggaactgcaactgatcctcgacggccgccacgacctggtcggccagctctatcgccagctgcgcgacgcgatcctccatggtcgcctggccaccggcgatcgcctgccagccacgcgctacctcgccgaacgcctggaagtgtcgcgcaagaccgtcagcgaagcctacgagcgcctcgccagcgagggcttcctcgaaggccgggtcggcagcggcaccttcgtcgcccgcgggcccgccggggaagcgccgccgcagcgcgccgacggtccgttgcggccggccgcgcgctgggcacgcatcgaaccgcagtccggtctgatggaccagcgagcaccgctccgctacagcttcgccggcggcacgaccgacaagcgccgctttcccttcgatacctggcgtacctgcgtgctccaggcgctacgcctgcaacagcgctcgccggcgttctacaaggaaaccgaaggcgaccccgagctgcgcctggcgatctcccgctacctggcgatcaaccgcgccgtgcagtgcgactggaacgccctgatggtcacccagggcgcccagcagggactcgacctgctggcccgggtgatgctcgaccccggcgacctggcggtggtcgaggaacccggttatccgccggcccgcgccagcctgctggccaccggcgccgaggtgcgcggagtgccggtggacgccgaggggctgcgcgtcgacctgctgccggacaacgccaagctggtctacgtcaccccgtcgcaccagttcccgctgggcatgccgatgagcctggagcggcgcctgcagttgctggactgggcgcagcgccaccgggcgctgatcatcgaggacgactacgacagcgagtaccgcttcgacgggcgttcgctggagtcgctgcgcagcctcgaccggaacggccaggtggcctacctcgggaccttttccaagaccctcttccccgagctgcgcctcggctacctgctgccgccggcaagcctgcgcgaagcggtgctggcggcgcgcaagctggtcgaccggcacagcgagaccttgcagcaacgcgccctcgcgctgttcatccagcgcggcgacttcgcccgccatacgcgccgcctgcaacgcgaatacgcccagcgtcgcgggcgcctgctggaacgcctgcacggcgacctgagcccctggctcgaagcgctgccggcggtggccgggatccacctcgcggcgcgctgtcgcgaaccgctggatgtgctgcgcatcgcccgtcatttgcgccagcaaggcctggaggtcggcaccctgccgcccttctacgcggaaaccccggcacaggccggcttcctcttcggcttcggctgcatcgaacgggacgacatcgacccggcgttggacctgttgcgcgccgagctgcggcgctag

SEQ ID NO: 327158 - DNA, 1041 bp, Pseudomonas aeruginosa
atgcggcaggggaaggcagtttatcaggaaagccagacattcgaccggaaggcggcggcccagaactggctgaagcgccgagaggcagagttggccgctccaggcgcgatcgagcgagccaaccgcaagggcgtcactgtacgggaaatgatcaagcagtatcttgaggagtacgggaaactgcgaccgttgggcaggaccaaggaggcgacgctccaggcgatagctgcgacatggctgggggatgtggtcgaccgggacctgacttcccaggtgttggtcgagtacgcaatggatcgcatcgagaagggcggcgtgcagccgcagactgtaggcaacgatctttctcacctcggtgccgtcttgacggttgcgcgcccagcatggggctacgaggtggatccggtggccatggccgacgccaggcgcgttctgcgcaagatgggaggggtttccaggagcaacgagcgggacaggcgcccaactttggaggagcttgacaccatccttgcctacttcgttgaaatgcgggagcgtcgcaagcagcagatcgacatggttcggatgatcggctttgcgattttctcaacgcgccgccaggaagagatcaccaggatccgctgggacgccatcgacgaagcacgccaggcagtactgatcacggacatgaagaatccgggccagaaatacgggaatgatgtctggtgccacctgccagaccaggcatggcgcatcttgcattcgatgccccggcgcgaggagttcgtgttcccgtacaacgcgaagtcggtcagcgcttcgtttaccagggcttgcagcttcttggagatcgatgatctccactttcacgacctgcgccatgatggcatcagtcggcttttcgaaatcggatgggatattccgcgcgtggccagcgtctcgggccatcgggactggaattcgatgcggcgttacacgcatctgagagggaacggcgacaagtacgaagactggccgtggttggagcggataatagagggccccacgaacgaggcccggtag

SEQ ID NO: 327159 - DNA, 285 bp, Pseudomonas aeruginosa
atgaacaccctgtttctgttgatggctcagtacgatggcgccgccatcattcccctcgaacgcgtctgcgccgactacttcagccacctgactcccgagaaaatgaagatgaaggtagcggccggcgaaatcgacttgccgctggtgcgcatggagaacagccagaagtctgcgcgtggcgtacacctgacggacctggcgaactaccttgacgaacggcacagaacggcgaaggaggagcacgaaaagctcatggggcgcagaaccctgcgccgtgcatcctga

SEQ ID NO: 327160 - DNA, 333 bp, Pseudomonas aeruginosa
atgcagatgcacagcgtcgacgtggtattggtcatggcgctggtgctccagcaccacggcacggcggacgctgttcgccgcgccgccggtcagcttcgcgacagagtgtgtgccgagcaccggcccaagatgaccgcgctcatgcgcatgcaagacgacgcggcggcgctgcaagtggcgctcaacatcgtccaacgcgccaccgacgccctgggcatcctgccgggaacgccgtttccggccagaccttcgcccagcgaaagcccaccggatcaggggcacatgcccgccaaggctggtcccgtcaccggtgagccggtgcatcctacctga

SEQ ID NO: 327161 - DNA, 123 bp, Pseudomonas aeruginosa
atgcgtagagcactgaccgccctcggcatcatcgcagccctcggcctggccgtggtggggctggtggagatactcccgatcgttcgcacgctggcggcctggcagacggggtgcttcggatga

SEQ ID NO: 327162 - DNA, 1326 bp, Pseudomonas aeruginosa
gtgtcgtctcggctggtagtcgaagccgcccagcggctgtacgagttcgagtccactccggagaaagaggcggagcgcatcgagcggctccaggcgtttcgcgagcaactcgacccactcaacctcgccccgcatgcggaagcgttcaacgaagcgcctgccgatgcgctcagacctgagcaggcagaggcggagcggccggaggggccaaccgaggacgagcttgaagcagccgggctcggctacccgctgcacaaggaagaagcggtaaagctctggtattccgggttccgctccgaggtgatcaccgttctggaggcgtgggaagccatcggccacgacatcggtatgaacccggacaaaggcgaactgctggattcgctgcgctacatgctggaaaagtgcgaggcacatgacgccgccctggccagggtcgcagagctggagaggcagcagccggtggcatggatgcacgatcagccaaaccgcgtcgatgtcatccatcgagacgtcaaggatctgctacagcgcgtgccgggcagtagtagaggaatctatcgcccactcgatgtcagcgagcattacacgattccactctacgccgcccctgtagcccaggctcagcacagcgtgccggaaatatctggcatcggtcgcgatgccgaacatcccagagctgtagtgctgtatctgcgtaacgaacccagcgaggaagatatgcgagcaattcagaactttttgcgcgccatatccgccgacgtgctcacccaggctcagcacagcgcgggctacgccgaggccagaatgtgcgcgaactgccggcacatcggcatcaacgacgccgccgactacgccgcttgccatgactgcaattggactggaccagaaccggatgaggacaagtgcccagggtgcgcgggtgagaactgcatggcggcagcttgcccggagtgtggtggtcgttacgacctggtcgcggaggcgaacatcactgccccggctgggcaagtgccgcaggcgtggctcgacgtccaggccgagcgccgccggcagatcaccgccgagggatggacgccggagcacgacgacgagcacgacaacggggagatggcccgcgccgccgcctgctacgccctggccggctccagcgctccgagcgatggaaccgctgccctgctggtgtcgctggcatggccctgggatgaacagtggtggaagccgagcactgctcgacgcgatatggtcaaggcctgcgccctcgggctggccgagatcgagcgccttgaccgggtagcggcgagtcagggagggccaagtgatgcgtag

SEQ ID NO: 327163 - DNA, 555 bp, Pseudomonas aeruginosa; identical to SEQ ID NO: 323296

SEQ ID NO: 327164 - DNA, 1188 bp, Pseudomonas aeruginosa
atggactctgaccgcgacgccgccgccctgcgccggcaactggccgacccgttgctggcggctacccacccggtctaccggccgctgctctggaccctgctcggttgcgtgctgctgttcatcggctgggcggcctgggcgcaactggacgaggtgacccgcggcgacggtcgggtcgtgccgttcagccgcatccagaagatccagagcctggagggcggcatcctcgaccgcctgctggtgaaggagggcgacctggtggaagtcggccagccgctggtgcgcctcgacgagacgcgcttcctcaccaacttccaggagtcggcgaaccaggccagcgtgctgcgcgcggccattgcccggctcgacgccgaggtgctaggcaagaagagcatcgagttcccgccggacgtcgatcccgaggggccgctggcgcgttccgaacgcgagctgttcaagtcgcgccgcgacaaactggtggagggcacccaggcgatccagcggcagattcacctggcgcagagccagctcgacctggttcgcccgctggtggccaagcgtgcggtgagccagatggaggcgctcaagctgagccaggacatcgccaccctcagcggcaagctgaccgagctgaaaagcacctatttccaggatgcctataccgagcgcgcccagcgcaaggccgatctcagcgccctggaaccgatcgtccagcagcgccaggaccagttgcgccgcaccgagatcctgtcgccagtgcgcgggcgggtgaacaccgtgctgatcaacacccgcggcggggtgatccagcccggcgagccgatcatggaagtgatcccggtagaggagcgtctgctggtggaggcgaagatcaagccgcgcgacgtggccttcctggttcccggcatgccggccaaggtgaagatcaccgcctacgactacaccatctacggcgacctcaagggcaccctggagcagatcagtgccgacaccatcgaggaggacaccccgcatggcaaggagtcctactaccaggtgctgatcaagaccgatggcagccagttgaagcgcggcgaggaggtgttgccgatcattccggggatggtcgccgaggtggacatcctcagcggcaagcgcagcgtgctcaactacctgctgcggccgctgatcaaggcgcgcctttactga

SEQ ID NO: 327165 - DNA, 1278 bp, Pseudomonas aeruginosa
atgcgcgggcgcaggcagtacgcgcgcaagggacggcggcatgggaagggagccatctggctcctttccctgggtctgccgatgttcgcgtcggccatgcccctcgaccaggcggtcagggcagggctggcgatccacccggaagtacgatccgcgatggccgaagcggaccgtgcaggcaccgaggtggagatggccaaaggggggtactacccctccgtgacgatgtccggggggccgcaggagttcgacttcggcgagatcgtctacgatctcaccgcgtcgcagatgctgtacgactggggtcgggtgacgagcaaggtcgacagcgccagcgcgacccagcgcaagctgtccgaggcggtgctggtggcgcgcgacgatgcggcgctggatatcgtcgagacctacctcgatgtgcttgcctcggagcgccgggtggaggcggtgcgcgaacacatccagcgcctcgacggcatccgcgagatgacccaggcgcgcggcggcgacggctacgccgaccgcagcgagctggatcgcgccaatctggaactgtcgcgggcccaggagcagttgtcgctggagaagggcaacctgcaggacgcgcgcaaccagtacgcgatcctggtcggccaggagcccgccgacctggtggagcccgagccgatgtcgctgcaacgctacctggcggccagcgatatggcgcgggtgatccgcgaatcgcctttgcagcgcaaggccctggaggacgccaatgtcgccgaggccgaggtccgcgaggccaaggcgtcgctgctgccgcaactgaacctggaggccagcgcgctgcgccgggagatcggcgggcatccggaaagcgactcggtggtatccctgcgcttccgcatggacaccttccaggggctttccaacttccgccggccgaccgccgcgcagcagcgcctggagtcggcgaaatggagcgccgacgcgatgcagcgcgacatccgccggcaactgcagaacctcttcgacaacggcgacacgctgcgctggcgggaacagtcgctgacccagcaggtgaccgagtcggagcaggtcggcgagttgtatcgcgaacagttcgaggttggccggcgcgacgtgatcgacctgctcaacgtgcagcgcgagcggttcgaggcagagcggcaactgatcaacctgcggatcgaacgcaagcgcatcgagtatcgggcggccgcgcaagtcggcctgttgggtccgctattggagaaccggctgaatcatggaagctga

SEQ ID NO: 327166 - DNA, 2031 bp, Pseudomonas aeruginosa
atgaagaccaatcgagcgtacagcacccttgaggtgaaagcgctggacgatgagaagcgtgtaatcactggtattgcttccactccatcgccggatcggatgcaggacgtggttgaaccgaaaggcgcccagttcaagcttcctattcctttcctctggcagcacaaccacgacgagccgattggccatgtcactgacgcaaaggtcactcagaagggtatcgaggtgtcggttcagctaacgcaggttgaagagcctgggaagctgaaagaccggcttgatgaagcatggcaatcgatcaagtcgggccttgtgcgcggcctttctatcggcttctccgcaaaagagttcgagcagatccccggttcttgggggctgcgcttcttgtcctgggaatggttcgagctttctgctgtgaccatcccggcaaacgcagaggcaaccattacttctgtgaaatccatcgaccgcgagcagcgcgccgcgcttggcatcaagtctgttccggtcgtgcgtatcactcccgccggcgcttcggcaatcaagaccaaaaccatcaaagttccgaagccccaggagggcaacgacatgaagactaccgctgaacaaattgccgagttcgaagcaactcgcgtaagcaaggctgccgaaatggaagccatcatgaccaaggctgccgaggacggcgtgaccctggatgccgagcaatccgaggcgttcgacaccctcgaagccgaagtcgccgccatcgacaagcacatcggccgactgaagggcatgcagaaatcccagggcgctactgccagaccggtatccgaagatccgcgcggcgctcaggcgctggaaatgcgtgaaggcctgcaagtgcgcgcgaagaacaccgagaagcttgagcccggcatcgagttcgcccgctacgccatgtgcaagatggcctccaaccgcaacccgctggtggccttcgagctggccaagacccactacgggcacaacgatcaaatcgtcaaggcgctggaattcgaggcgcgcggcggcaagatggccaatatcatgaaggctactgtcgaagccggcaccactctggacgccacctgggcgggtccgctggtgcagtaccaaaacttcaccggcgatttcgtcgagtacctgcgtccgcgcaccatcatcggccagttcggcaccactattgccggtggtattgcggtgcccagcctgaaccgaatcccgttcaacgtgcgcatcgccgggcagacttctggcggcaatgcctactgggtaggcgagggtgcgccgaagccgctgaccgccttcgacttcaccgccaccgaactgcgctgggcgaaggtcgccaccatcgcggtgctgaccaacgagttgatccgcttcagcaacccgtccgccgagcgcctggtgcgtgatggcctggctggcgcggtgatcgagcgcgtcgacctcgacttcgtcgacccggccaaggcggccgtggcgaacgtcagcccggcgtcgatcaccaacggtatcgccggcatcccgtccagcggcaccgacgccgatgcgattcgtgccgatgtgaaggcgctgtggcagccgttcatcaacgccaacaacccaccgcgcaatgccgtttacatcatggacagcaccaccgcgctggcggcgagcctgatgcagaacccgctgggtcagtcggagtttcccggcctgactatgaacggcggcaccttcctcggcgtcccgtgcatcgtctctgactacctgccgcgtgattccggcggcggaatggtgatcctggccaacgcatccgacatctggctggcagacgatggccaggtgaccatcgacgtgtcgcaggaagcctcgctgcagatgctggacaacccgaccaaccacagtggcactggttcgcctaccaccatggtgtcgatgttccagaccgactctacagcgttccgcgctgagcgtttcatcaactgggcacgtcgccgcctatccggcgtggcgtacctgaccggtgtgaactggggcgcgtaa

SEQ ID NO: 327167 - DNA, 423 bp, Pseudomonas aeruginosa
atgccagtctctgacgcagatatcgacaacgcggtaccagctggtggaatcccttcccgcaccctgaccaatgcggtgctgaaagcgatccgcaccatcgcccaaaacggcgagaacgcggcatccttcgtgcaacgggtggcatcaccggctgatggttcgacggttgaagtcaaccaagtgcggcagaacggaatcgtcattctggaaccatctaataacctggcggccctgaccattcgcctgccagtagcgccgaaccagcgcgatggccagatcatccgcctggtgacaaccaaagacatttcagccctgagtttcgtcgacgccacgctgctgaatggcatcgacaccatgctggcgaatgatgcattcgccttccaagtcattgacgacaacacttgggtgaggaccgtcggatga

SEQ ID NO: 327168 - DNA, 912 bp, Pseudomonas aeruginosa
atgagactaatgctggcagtactggccctgttttcatcgctctgcttcgccgctggaaacgatgtcgccgtggagcagcgcaacgccgccaacagtggctgggtcacgcgtctgatggccagcccggccaccgacggcatcctgatctacaacaagaccacgctgcttccgcaatgggtaacgctgggcagcggtttagcgatcagctcgggtgtgctggtgccgacgcaggcagattgggcggcggtcagcggtccgtcggtaattctgaataaaccagtcatcccggatgcgcaggtgcagaccgattggaacgccaccacagggctcggcgtgctgctgaacaagccatcgctgtccgcggttgccacctctggcgcctatgccgacctcaatggcaagccgagcattccagcagcacaagtaaatagcgactggaacgcaggaagcggtgtcgcacagatactgaacaagcccattctgtccaccgtcgctactactggaagctacacagacctgagcaacaagccggccattccaacagagttctcggtgggcccgccgacttcgcgcagcgtgtcgctcgccacggcctaccaatgtaccaataacgctaggccatgctcgatcacgattaccttgcaggcgcagagttcggtcagcttgagcggtgcgagtaacaacgagggcgcagtcaccatcggcagcacatccggcgtggctaccggaaccggtaccaatatcgcgacctacaagaacaacctaggcggcacgctggtgatcggcctgaatctgaatagccagcaggccaacacctattcggtgctgcttcccgctggctggtacttcgcggtacgccagacagcaggctcaggccttcaggttgtgtccgctttcgatcaagcgctgtga

SEQ ID NO: 327169 - DNA, 234 bp, Pseudomonas aeruginosa
atgaacgtccaagtcgtcgatctgaaaaccggcaagctgaagacgatgcaggtcaagtacgccaacatcttggtcaagatgaagcgggcacgctggcctgaagaagttgccgaggtggagaaaatccacgttccggaaactgaaaaagaagtcgaagcggaatccgatgagagtcccgaagagttgccggaaatgccgaagaagcgcggccgcaaaccaaaggttcaggagtaa

SEQ ID NO: 327170 - DNA, 1395 bp, Pseudomonas aeruginosa
atggctaacagcctgagcattttcgcgaccgtaaaagccgccgccgtgagtagcgaaaaggcactccagaacgtgcctgtttcccgcggctggtggccgctgattcgagagccattcactggtgcgtggcagcggaacaaggaagagcggatcgacacgcttctccagtatccgaccctctacgcgtgcgtttcgcggatcgctacagacattgggaagatgccattcagcctaaaggctaaaaactcgaatggaatttgggaggttatcgagagcccggcgttcagccccgttctccgcaaaccgaatcactaccagaccgcccagcagttccgcgagcactggtcgctctcgaagaagactcagggaaacacatacgccctgaaaggccgcgatatgcgtggcgtagtcatcggattatatattctcgacccttgccgcgtgatgcctttggtgtccgattctggtgaggtgttttaccaactctacactgacaatctgaatcttctgccggatggcgagacggacttaatcgtacctgctacagaaatcatccatgaccgttgcatctgcccgtttcatccgctaattggtcttccgccgattgcggcagcctactggcctgccctcaagaacatgcgcatcctgcgctcgtcgtcagagttctttgcgaacaatgctcagccttctgggattctctctgcgccaggtgctatctctgacgggactgctgatcgtctacgggcgtactggaacgagaacttcactggcgcgaatgctggcaaggttgcggtagtaggagatggtttgcagttcgtgtccctggcatctaagtctgtcgattcacagatggtggagcaactccgctactcggacgagcagatttgccagcctttcggtattcctccgttcaaggtaggactcggttccattcctgccgggctcggcgtcgacgcgatcaaccagctctactatgacgatgctttgcaggccgatatccaggcgatggaatgcctgctcagcgaagggttgaacacctatccctacaaagtcgatctcgacgagtctgtgttgatgcgaatggacgccggcaagaaggccgattaccacaagacgctcatcgacggcagcatcgagacgatcaacgatgcgcggatgtcgttcaacctgccacctttggttggcggaaataccgtgtacatgcagcagcaggatttccctctggatcaggtgcgcaacaacgttttgcctaaccaggcgcaagctgctgaaccggcgcaaaatcctgagcccactgacgaagaaatccttgccaccgaagaaacccagaaggccatggatgagctgtttttcctgaaggctatccaagccgcacgcactgaggccattcaatga

SEQ ID NO: 327171 - DNA, 996 bp, Pseudomonas aeruginosa
atgatcgacccagtagagttcggcaaggcgatgggcgccatcgtccgcgaagccacggcgccgctgattgcccgtatcgagcagctggaaaaggcactgtccgcccagacgatcccgtccgccgacgaggtcgctgcacggatagaccttggcgctctggcgaaatccgcagcagaaatggtgccccctccccaggatgccgacatggaagcgctcaaggagcacctatccgaactggtgaaggccatccctgcgccggcggatgggcaaagcgtgaccgtggaagatgtggcaccgctgattcgcgaagaagtggctaaggcagttgcagagcttccgccggcgaaggatggcgagtcggtcacggctgacgatgttcgcccaatactaactgagctggtggattccgcagtgaagttgttgccaccggcagcgcccggcaaagacgccaacatgggcgagctgaaagatcatctcgccgaactcgtgaagggcatccagctgccatctgttccgactgcggaagaggtagccggcctgttcgagcgtcgattctctgatctgaccttgcactgggagcgctccgtccgcgaagaaacaagcaaagctctggatcgaatccctgcgccgaaggatggccgcgatgcgctgccgctggaatcgttcgagcttgagcttggcgatgatggccgcaccgtcaccattaagatgcaggccggagatgttgttcttgagaagtctgtgaagattgcttcggtgatcgatcgcggcgtttacagcgctgataagtcctacgagcagggcgatggcaccacttacggcggctgctactggatcgcgcagaaggacgcgccgacaggcgttccgggtggttctgatgattggcgtctagctgtgaagaaaggccgcgacggaaaggacctgcgcgatagcgcgtccaggcacgatccgagcaagggcgtgaagattcgcaaggacgaggatgacgacaaatga

SEQ ID NO: 327172 - DNA, 375 bp, Pseudomonas aeruginosa
atgatgtacgtcacccttgagcgcgccaaggcccatctcggcatggaccatgatgaggacgacaccctcatctcggcttacatcaccgccgcatccggcgccgtgaagaactacctcaagtcggcatcggcctacgaagtcgaacgcgacagcaacgatgacccggttctggatagcaatggcgatcctgtatatgcccgtgatagtagcgggtccaaagaagttcggcttgaggtccagcaggcagttctgctgttgatcggtttcttctacaaggaccgagacgagaacccggatggggcttttgagcaaggctacttgccgaagcctgtcacggcgctcctctatccgatacgtgacccggctcttgcatag

SEQ ID NO: 327173 - DNA, 342 bp, Pseudomonas aeruginosa
atgagcttgaaagcaggccgtctccgccatcgcgtggacattcaatccaaagtccaagagcaagacccgcagacaggcgagatgatcgacagttgggtgacaacctggccccaagtgccggcagagatcgcacctttgagcgttcgagagtacatcgctgcgcaggcgatccagtcgaacatcagcgcccgaatcgtgattcggtatcgggatggcatgctgccgacgatgcgtatcctgcacaagggccgtatctataacccggctggctggcttcctgatccagtgcgcggaaatgagtacctcactgccccctgttccgaaggcgtcaacgaaggctaa

SEQ ID NO: 327174 - DNA, 873 bp, Pseudomonas aeruginosa
atgaaacccgcttcggcgggttttttattgcttggaggaggcgctttgttcattcgcggaatgatgggtctgggggatggaatctttcagcgtgccttcgtcaagaactaccccggcgcctatctagaaaccccgtggcctgagctatatagcgatctcgacgtaaagtgcgttcgacctgacacgcagctcaggacgcaggccaaaaacatcggtcggaacagccaatggcacgctccggcgtcgggtggaatgctgcgtatcgcctatcaccgtgagccaatagtccagggcatgcggaaatgcttccgtgtgaatccgaaggagttcgatctaccagacttcggtttcccgccagtagaaggtcgctatgtcctggtaaggccagcgacagttcgtgctgaatggcgtgcagatacgcgaaaccctcttccggagtacatcgccagcgcgtcggcagaaattcgccgtaggggctggaaagtggtgtctgtggccgatctcgaagagggcaaggaatgggccgtgggcgaactgcctcctgctgatatgcgcttccacaagggcgagcttcgcgtaacgcaattgctgtctctactacagcacgcagatgcagtcatcggcggcattggctggatcgtgccagccgccatcgccgccaaggttccggcctggatcatctgcggcggacagggcggtttcaacgcgccagaaatgatcactgacccatgcatggacctgtcccgcattaccttcgcggttccagacaggttctgccgctgcacgctaaaagaacataactgcgacaagagaatcatcgactatgaccgcaagtttgccgaatgggctgaccgactgcctgctctggtctga

SEQ ID NO: 327175 - DNA, 615 bp, Pseudomonas aeruginosa
atgaccgcaagtttgccgaatgggctgaccgactgcctgctctggtctgaagagcttggcatgggcttccacccgcgcccgccgatggactatagcgggccttacttcgccaagtaccaacagatggactcaacgccgatgggcgctgcgttgacacgcgctcgcgtagaactggttcgtcgtcactttactgggaaggttgtggatattggcatcggcggcggccgtttcgttattgattctggcgctctggggtttgatgtcaatcctgatgcagtcgcttggctgaaagcacatgaatgctattgcgatccatataagggcgtggcggccatctcatgctgggatagtctggagcatattcccgatcctgaggccctagttcgctcggtcggtgagtgggtattcgtctccatgcccgtctacaaagaccaggccgattgcctgaagtcgaagcacttcaaacctggtgaacacctgcactactggagcgttcggggtctagtcgggtggtttgcaaagatgaatttcggctgtgtcgagatcaacgagcgagagtcagaactcggtcgagagggtatcaccagctttgcgttccggagattccatggctga

SEQ ID NO: 327176 - DNA, 492 bp, Pseudomonas aeruginosa
atggctgataccgttgagttcagcatcaccggtctagattcactgcttggcaaactggactcgattacggatgacgtgaagcggaggggcggacgcgccgcgttacgtaaggccgcaatgatcgtggtgaaggcagctaagcagggtgcggaaaaagtcgacgatccaggaaccggccggagtatttccgacaatatcgcgttgcgctggaacggtcgtctcttcaaacgcacaggagacttaggcttcagaattggagttctgcatggcgccgttcttccgaagaaaagtgagcgatcggataaggctgcaaacgccccgacgccgcactggcggcttctggagttcggcaccgagaagatgcgtgcccagccgttcatgcgtaatgcattggctgacaacattgcagcagtgactgataccttcatctccgaatacgagaagggtatcgatcgagccatcaagcgcgcgaagaaaaagcaggaggcctga

SEQ ID NO: 327177 - DNA, 366 bp, Pseudomonas aeruginosa
atgtatccaccgatcttccaagtatgcagcgcctcggccgcagtaaaggaactgatcggcactaatccggtcaggctctatccgttcgacgaggcgccgcaaggcgtcatctatccgtatgtcgtgtggcaactggttaacggatctccggagaattatctcggtgaccgcccagacattgacggctataccacgcaagttgatgtctatgccgacagcgcgaccgccgcgcgaaacgtggccaaagcgttacgcgatgcgattgagcctgccgcctacattactgcctggcgtggcgagtccaaggacgacgccaccaagaagtaccgctatagcttcgatgtcgattggctgacgccacgctag

SEQ ID NO: 327178 - DNA, 522 bp, Pseudomonas aeruginosa
atggcaattttggcccaaggaactcagatttatgccctggttccgtccagagattctagcggaaccccgactggtgattacgaagtcatcgaggtcgagtgcgctaccgcattcaaccccggcggcaaccctgccgaccagatcgaaaccacatgccttagcgaaactgttcggcgctacctgcgcgggctgcgcacgccggggcaggcttcgcttactctcaacgctgacccgcgcaacagttcccatatccgcctctatcagctttcggagtctgacgaccaggtcgaccaggacatcgctttcgcggttggctggtctgacgggatcggtattgcacccaccgaggcccaggacagcaacggcgactgggactttgttctgccgccgacgcgcacttggttcgtcttccgcggctatgtgagcgatttcccgttcgatttcgcagccaacgctgttgtcacttcgaccgcaaccattcagcgctccggcggttccgcctggattcgcaaatccgcgtaa

SEQ ID NO: 327179 - DNA, 360 bp, Pseudomonas aeruginosa
atgcatctgtcgattgattcgcttaaagaagctggtgccttcactggggctcctatcgaaaaagagatcacctggaagcagggcgacaaggaacttaccgccaccgtctacgtccggcccctgtcgtacagcaccgccgtatccgacctccttgcgatgaatggaaaggtcgatggcgtagcgggacgtatcgctgcgtcaatcgtggatgaagagggtaagccggtattcacgccggcagatatcaccggcgaggctgaccccggtcgtggcgccctggatggaaacctgaccatagcgttgctcactgtgatcgctgaggtgaacaacctgggaaagacgaccagctcagtgaactag

SEQ ID NO: 327180 - DNA, 2529 bp, Pseudomonas aeruginosa
atggcatcacgcagcctagggacgcttacgctcgatctggtcgccaaggttggcgggttcgtgtcgggcatggatgccgctgagcgccggtctgaaaaatggcgcagggaagtagagaagaatgcggcaaaggtagggactgcaattggtgctgccactgcggcaggtatcaccgcgcttgctgccctcactgtctcgacagttcgcaatgccaatgaaatcgcaaacttggcgagcgttgcgaacgcaagcacgaccgaatttcagaagtatgccgcaggcgcaaagctggttggcattgaacaagagaagctcgctgacatcttcaaggatgtgaacgacaaggtaggtgacttcctcaataccggcggcggagcgcttgctgatttctttgagaatgtagcgccaaaagttggcgtgaccgcagaccagttccggaatcttagtggtcctcaagcccttggcttatacgtctcaagcctggaaaaggccaatgtcagccagtcggacatgaccttctatctggaagctatcgcgagcgatgcgactgctctgctcccgttgcttcgcaataacgctgagggattcaagacctttggtgacgctgcccaggccgctggtgcgattctcgacgagaagacgattaagtcggcgaatgagcttcaggctgcaacatggctagttgagcagagcgcctcgggcctaaaaaaccaactaagcacagcgctgataccaattctgagcgatctcgctgactctatattcgacgtgaccaaggaaggcacggcgatggtgagtgttggcgaattcgttgccgattcgttccgttggatagcgaagacagcgattggtgctgttgccgcctttgagctggtagggaagtcgattgccggcgctgctgcaacggccaaggctggctttgagggtgtgacatggcttgagcttgcatccggccctgccggtcttgctaaacgccttgcgcaaaactgggacggaatcaaggccagcgccggtgtggcagcagaagacctgtccaatacggtctccaagtatgccggcattatggacagtatcgaccgcgccggaacgggtggaaccaatggacaggtagccaagctcgccgaaacgctagcttcgcttcgtgagcaggcgaataagcctggagctttcaaggctcttaccaaggagcagaaggaagccgggaaagaagcagaggctgctgctaagaagctgcaaagcgcctacgaaacggttgagaagtcgtatcagcgacagatagcgctgatcaacacggaagtcgacaagcgcaaggatgccaccgaggtagcaaagcttcagttcgaaattgagtcgggcaagctggttggaatcaatgccgagcagcagaaacgcttgaatggcttggcagaagagcttgatcgcctgaagcagctaaagcaggcgaacgaggatgcggcgaaggctcaggctttccgtgcaacgctcaatgaatcgaacgcaactgctcgggcaggatttgcgattgaactggcgggatctggaagcggagacaagctgagagagcgactgcgggcagacctggagattcagcaggactacaacaaacagcttgccgatctccagaagcagttcaacagcgccgaaatcagcaaggaactctacgaccaagaaacggacatgctccgccaggctctcacggaacgcttggaaatccagcatgagtactacgcagctcaggatgaggctcagagcaactggctggatggcgtcacgtctgcctgggagaactaccgcgacacagccacggactatcaacagcaagctgccgacttcaccacgcagacgctggacgggctcacatctgctgtaggagacggcatcgcttcgatgatcatggacggcgagagtcttgccgatgttttcaagaacatcgcgcagacgatggccacaagcatcatcaacgccctcgcgcagatggccgcgcaatggctggtctatcaggcggtgcaactggtgagcgggaaggctgctcaggctagcgccgcctctactctcatcgcgaacgcacaagcaactgccttccaggctcaactggcggcatttgcgagcaccgctgcaatcccaatcgtaggcccgctgttggccccggcggcggctgcaacagctgctgggattacagccccgatggttgccggcgttgctgcctccgccctagccggcatggcccacgacggtattgatgctgttccggagaccggaacctggctgctccaaaagggggagcgggtaacgaccgcagagacgagtgcgaaactcgacaagacgcttgatgacgttcgctcaaatcagagtggcggtggtgcgccgaccatcaacctgatcgaggatcgtagtcgggcaggacaggttaatactcgccgccaggacgaccaatacatcatcgacgttgttgtggccgacctattcggcgatggccgtacatctaaggctatcggtagttcgttcggcatgcgcaggagcggaacatga

SEQ ID NO: 327181 - DNA, 2730 bp, Pseudomonas aeruginosa
gtgatcgaaatctatccgagcaggcttgacggcgagcctctggagcggcatccgctcgcccgttcaacgaccattcgtgcatggctggtcgaaaacgtaaagaactactcggatcaggagcggccgcctatcagcattgggattattccagctgaggttgatcgctgcgaagagttgagtgatgcgcagaagcgcgctcatgaggaactgatccccccatctgaatggggcgctcgaatcatcgagcgaggcgatgttgtacgcatctatccggaacctcttggtaccgatcccttcacgatcaccgcggcattgttcaaaggtgtacaggctgcgtttcgaatgctaatgccgcagcttccggggatgcctgccaatcctggccaaggtgagtctctggctgactcaagcccgcgcggcaataaagtgaaactgggagacgctatcagagacgttgctgggcatcgcttgatctacccagactacattcttccgcctcgtcgctactttgccggtccccgtgagcaatggacagaaatgatgctttgcatcggtaagggccgattccaaatcgccgatggtggagtaaagatcggcgataccactttcctggcgcttggggctgaggcttcttttcagatatttgagcctgggcagaatgtgagtggacatcctgcgtccatctggtggcatagcgctccagaggttggtgctagctcaactggcaatgctggcctagaactcactgaaactaccacattaacgccaaacccgagcgcaaccacgttcacgttctcagggaacaacatcatcatcccctctggcgccgggtcattcccatcggattgggtggtagggaccattcttcgtgttgaggcacaatacccctatacggtaactgatggtggtgggagtgcaagagatactgtctccggagatatcgcccagcttgggctttccgcaggcgctcagattcaggttgttggtacaaactcagggctctacgtagtaaacagcctcacgtccactacgatgacgctgaattacgataatggctcgcctgtaaacgctctacaggtaggatctggggacgctgctatcgggctgagagggctccgcttcaggataacagcttatagcgcaaatcagataactgtagagcggttaacttccgctggagcgagtgatcctagttggcctgggttctcgcctcttaactccagcacatcccgtatcacggtcgatacatcaaactctgagggaggatggcgcggtccattccctgcgtgtccggctggtgaagtaaccacaagaattgagtgggacatcttctgcccgaatgggttgatcttcatcgaccgaaagggaaaccaaatacccttgagtggctactacactgttcagtaccgtgacatggctataggtggcgcctggacttcgctggactatgagcacaatggcgcaacactagaccaaattggatttactacacagcttaacttgccgtacccaatgcgccccgaagtacgcatgcgtcaacgatatcctattggcaagaatgaactagagttccgagataccttgcaatggtatggtctcagggcgcggctcaatgcgccttcttcatatccaaatgtgaccactgtcgctattagatataggtcttcagataggatatccgctcaaacagaaagccgtgtttcagtcgaggcaactagaatattgcctgttaggtctgatggtgcttggcttcctgagcaagcgaccagggatatagctccatatgtgatatatcaagccaaggagcgtggttacatagatgatgatatcgatcttgaggagttcgacaggctggatgagatttggaagtctcgcggcgacaagttcgatatgatctatgacagcaccagcataactgtaaagcagattcttcaagaggcgttggctgctgggttctctgagctgacgatcaaaagaggtgttattagcgctgccagggatgagccgaggacgttgtacggtcacatgtacactcctcagaacatgtctcaagctctcaagataagcaaaagcgcgccgtcagaagatgattatgatggtgtggacgtggagttcgtaaactctaacggctggatcgaagatacgatacaatgtagactcccagaagatgttggacgtaaagttgagaaaataaaagccgctgggatcactgacaggaacagagcctaccggtacggtatgcggcgacgtatggttcagaagtacagaaggacgaactactcattctcgactgagcttgacgcgcttaatagcgagtactgggactatgttgctcttgctgatgatgtgccaggtttcgggcaaagctctctattgctcggagctataaataccggttcaaattggctcctaaagtcaagcgaaccgtttgactggtcggcacctggcccttatgtggttgctatacgtagaccggatggtacgctatctggtccctatgttgcgtatcggtacgataactaccacctgacaattccaacgcttgatttcacccctgatacatcgtgggagattgaacctcctcatctgctttttggcacgtccacccgatttgcgtatcccgcgttgattagttcaatagatcctgacggattctcaggagcttctgttcaggctgtgaactacgacgaacgcgtctacacgtacgacaacgccagcgctccaaactga

SEQ ID NO: 327182 - DNA, 2466 bp, Pseudomonas aeruginosa
atgacgacctacgccaccggtaacccgctgggatccaaagacccgcgtgatctgtccgataacgccgagaacttcgatgcggcgatgaacgaccgggtaaataccacgtggagtgatcgtttcggcgttagtcgcccaacgatgaaaggctatgaggaacaattcaacgactggctggatgctcaaggattcgagccaggattccttgaatatgtcgacggctcaccgctgaccgtagaccgtccgacccaactgatccagcgtgacgggaatctctatagcgttaaacgtccagcagattttccagtaaacctaacgggaaactgggctactgaccagaatctacttgttgcacaaactgatcaatctcttcgccaggatctgtctgcttcaaacggcggtacaaacgtagggttcaggagtagaaatgtcgatgcaaagctaaatgagattatttcgttaggagacttcggtggcgtggctgattactcaggaactccagaatatgatgggaatgatggaactagaatcacagctaccgataacactgccgccttctctgcgctgattactgaggcaataagccgaggtgacgcatgcgttcacattcctgctggtcattggggcgtcaaggttgggcaacttaatttcagcaacttcgataatatcagaatcgttggcgatggcatggacgcgaccatcatagacttcattcatgagtatgccccagtaactggtggtgggtatgtcacgaatgatattgctcatgctattgcaaagttcgcatcgggagatagcattgagttctcaaacctgactatcaaaggaactaccaagaaaggtttagtaactggagcgccagggtctaactggacatatgagggcgctgtatggggtttcattctccaaaacgttaatcgcattcgtcttgatcgtgttcgcgtagagcatttcaattatcgcggattctcgatgtatgggtctgatactaaagaggtaatcatcaatgagtgtgaagggttctacaacgtaggttcaggtttctgggtcgaagataccgactctatgctcgtaactggcggagagttcgcatacaacggtatctccggagaagttggaaccggctatggagtcactggttccactcgcgtcggtaacatggttgtgaatggtggttactatcatcacaactacagaaagggacttgatacgcacggcgtgcatcacttcaaactgcttggcggattgttccaggcaaacatatatagtcattgcgatgttctacgttattcgactgaccccactggatgtaccactcaatttaagggggctacatttacttccggtattgacccggatgagcaatcatggattctcgcagagtacaaccttcgcaagactaatggttacacatttgcaggtggacatgtcttccgtgtaatcgacaactccgctggtaaaagttcttctgtccatgttagtgaaatcactgttcgtgggcactatgctccgcagaggacagtcggatttactgaaggtggtcctgtcccgtttcagttctccacgactctaggtcgcctttcttggatcggaaatgaaatcgatcttaccggatatgagttctcggcttctggaacgtttggcactcactgcctctttgatggtcttgctgctgagttcgaattcaaggatgggttgcttaactgtccggcagatggctcgttcacaaatacgacaacaggcctatccgacaagggtaatgtgtttattctacaaggtgtttctacttacacctctagggtgtcgttcgataactggagggttcgcgttaataacctgtacctgtcttcggcagcttcttctgtaggaactggcgctactcggcagagtatcaattgggcgaacacaggaagaatcgtaacgaactgctctttcggttgggcaattgagccgtatactgcgcttgcgccacttgagcgattcaacaatattcatttccttggagcctggcaagctggtcctctgaatagctctctttcttacctaaagaataactatgttattaccggaggtcgtacgtatgcccttcctgatgatagccttgcaatattgaacagtcgtaagccttactctttccccaatgtgactaaagcgcttggtgctcaggtcttctctattgtgatggacaaacagtctggaagcttggtcaaaatttctacaggactgagcggagaggaactgaacatttctgtctacagtggagacttcacaggcatttctggatctggttctaacccatatctagagttcgattccgctgacccaaactacctggtgaacggagtagcaaaactgcgcctgaacgtaaaagccaagatcgcgttaaataacatcaatctgtttggggagatatgggcgtacggtcgatatccgtctctcggtatcgagtacgtatttgcgacctaa

SEQ ID NO: 327183 - DNA, 540 bp, Pseudomonas aeruginosa; identical to SEQ ID NO: 322840

SEQ ID NO: 327184 - DNA, 153 bp, Pseudomonas aeruginosa
atgtattggaaggaggcgatgtttttcccgcgggtcctccatttttttcacatgccccggttgcatgtgagtacgtatctaatggtgagcaatcccctcttctatagagacgtaattttccgtaattctcagttcctgcagatgggccgctaa

SEQ ID NO: 327185 - DNA, 1017 bp, Pseudomonas aeruginosa
atgtcccaacgcaaagcgaccgatgagcagctgatcgaagcgctgcagcacaagacagtacccgaggttgctgcgctgttcggcatgcatccgcgccgagtttacgagcacaagtctcgcttaaagcgtgagattcaggcccccattgtgcagttgccgcctgctgctgatctcacctatagcgagcttgtacaagaccgcatccgccgctacaagcgcaaaatgcagcatgaggaaggccgcaagctgatcaatgtaagagtccctattgagggaccttatgctctggtcttcatgggtgatccgcacgtcgacgacgacggcaccgactggatgaccctacagcgtgatatccagatcatcaacgacacggaaggcatgtacgcctgcaacgtgggcgataccactaacaactgggtggggcgcttggctcggctctacggtgagcaatccacctccgccaaagaagcttggattctcgcagagggattcatcaaggagctgaagcacaagtggctgttcctgatcggcggaaaccacgatgcatggagcggcgcaggtgatccgctcgactggatcactggcagcgtgaacgcgctgtatcagtccagcgaatgtcgcctgtccgtgaacagcgggaagcattccatcgtgatcaacgcccgccatgacttcgccggccactcaatgtggaacccggcgcacggcgtcatgaaggctgtgcaaatgggcacctgggatcacatcagcgtctgtggccacaaacacgtaacaggctacatgccgctcaagtctccgagcgggcgcatctgtcacgcaatgcaggtcagcagctacaagatcttcgaccgctacgcccgcgagaaggggtttcgcgatcagaacataagcccggcaatggtggccgttgttaaccctgcatactccgacaacgatccgcgaatgatcacaatcctgcatgacgtggccgaggctgccgagtttctgcgttggaaaagagagagggaagcggcatga

SEQ ID NO: 327186 - DNA, 741 bp, Pseudomonas aeruginosa
atgaccgctgaactccagggcgtcctgatctttacctcagctttcgcccaggtcttcctcctcgggctgaacagcaagctccttcgtgacgacaagatcgccgccggcttcgtagtgtcctggatgatcacgctagcccagttcggctacatctgggccgtcgcgcactcgcgcatcgataccgtccctttcctggtgatctctggcttcggaggttccatcggtatcacctccgcgcagtacttctaccgctggtacgacaagacttttcatcgcaaaaggggagagcgcatgagcgacgtcaagccgaccaatcccaaagacctaatcggtagcgggaagctgccgcttcacctttggccgactaccgctaccgcgatgggctgcattggcctgctagaagggatgctgaagtacgggcgcagcaactggcgtgaggctggtgtgcgtgcatccatctacgtggacgcctgcaagcgccatctggatgcatggttcgagggtgaagagtgcgctccagacagcggatcaccccatctcgccaacgctctggcatgcctggcgatcctggttgacgccaaagcggccggtaagctcgtagatgaccgccagtacaacggttccggttaccgggaactggttgaaagcctgaccccgcaagtggcgcacctcaagggcctgttctccgacaaggcgccgaagcactacaccatcgctgacaacgcacaggagcaagcctaa

SEQ ID NO: 327187 - DNA, 216 bp, Pseudomonas aeruginosa
atgagcgacgacaaagttgttccgatgaagaagcgcgaggaccgatatgaggccctgattagggacgaagcgatgttcgatgagcttgtgctcggcgcgatcaagttcggcaaggaccacggtctgcccgagtcgatgatgaagggcattctcatgagcgcgatcatcgatctcgacttcaactgcatcgtgtttgagccggaggacggggcatga

SEQ ID NO: 327188 - DNA, 234 bp, Pseudomonas aeruginosa
atgagcaacatccgcaacgtccagtggaacgaaggggcgccggacgagattctcccgggaatgcttttgctttgggaggacaccgatggatcaatttatctcgtcgggcatgagcatgacatctgcgatgaagagagccagtacatcgcgcgctgggcctggctcatccagccccacgaactcgcctggctcgaagacatggcaaacaagcacaaagcgagggcgcggggatga

SEQ ID NO: 327189 - DNA, 234 bp, Pseudomonas aeruginosa
atgagccagtggattgacgttacaaagcagcttccgccgatcaggaagattctctcggaaccatgccagatcgacggacaggaggttcctcacctttaccggtctggcgaggttatctgctgggacggtaagagagtttcaggcgggatagttgaatggttccacggccaaaagccgctaagtggtgtgactcactggatgccgctccccgagcagccggagacttcagcatga

SEQ ID NO: 327190 - DNA, 180 bp, Pseudomonas aeruginosa
atgagccagaagacagacgactgtctgtgcgcggcgctctgcgatgagtgccatcgccagattgataacggcggggacctgacccgcgaggaacggcgtgcgcttctcgaccgcgccatctgcgacaccatcgcccagctagcgcgcatgggccttatcgatgcgaaggagggggtatga

SEQ ID NO: 327191 - DNA, 609 bp, Pseudomonas aeruginosa
atgaaaatcgcccaacgctcccaaccctaccgctcccgcaaatggctggcagttccaggttatgagggtatctatgaggtaggcgatatgggcgaggttcgttcgcttgcgcgattggattctcgcggatcaaaaaggcccgagaagctgataaagcccttccgggatggggataagggatacatggcggtctgcctaacaaaaggcggagtttcaacgcgattcaagctgcataggctcgtcgccacggtatggcatggggctcctgagcatggccagcaagtcaatcacttgaatggtgacaagaaggataacgctccagcgaatcttgcttggtgtagtggcgctgaaaacatacagcacgcatatcggaaactggggaagaagtcttctggaggccacaaaggcaaaactggcgcaaaacatcacgcgtcaaggcctgtagttgccaaaaatttagattccggtgaagagactagatacgagagcgcggccgatgctgcgcgccatatcggaatcccagcgggttcaattccgcgttgctgcaatggccattatcgcagttcgcacgggttctccttcagatacgaggatgatcgaaatgcttaa

SEQ ID NO: 327192 - DNA, 264 bp, Pseudomonas aeruginosa
atgagcaagttcaaggcgggcgatctagctctaaatctgcaagaaatcccaagctgcatcagcgctggagtggtagtcgagttgttatctcgactttccccaggtgatctatttgtcgaagacggccagacctttctggtgaatcgggcagcctggtgggtgctccatgaaggtgatcggctctatatccctgaacggtatctcatgcccctccgcggcgacttccaatccgagcagcagaaggcgaagggggtggaggcatga

SEQ ID NO: 327193 - DNA, 402 bp, Pseudomonas aeruginosa
gtggctaatccacgcttccacctgcgcaacgagactgaccgtcagcgcgctatagcgatccttcagcgcgttgacttgacggagggcaagacttggagcctgcacgacgaagcccgcagcgatgcgcaaaacaggcgtatgtgggccatgttgcgcgacatcagtcagcaggtcgagtggtatggccggaagctggacgacgaaagctggaagcacatcttcagtgcggcagtgcaacagcaggacgctgttcccggaatcaacggcggcttcgtggtcctcggcgtctccacccgcaagcaatccaagaagtggttcaacgaaatgttccttgtgatggagtccttcgctgctgagcgcggagtgaagttcaccacgcgggactactgggaggctgcatga

SEQ ID NO: 327194 - DNA, 216 bp, Pseudomonas aeruginosa
atgcctaaattcgaactgatccgcatggaaggcctgcgcacctacggtcggcaagttgaggccagtacctggcgcgaagccgagcagcaatgccgcgacggcgagatcgtaaacggcgaactgatcggtgtgtacgactgcgatccggtgactgaggcggtctgcactgcgcgcaatgacgtgatgattgagcggatggaggtgtgctgtggctaa

SEQ ID NO: 327195 - DNA, 909 bp, Pseudomonas aeruginosa
atgaaaacctctgaacgcatggttggtcgctgggctgatgcacttcgctcctacggactgaccgataggcagctttgcggaaagcatactgagtgcccgatctgtgggggtaaggaccgcttccgcttcgacgataaggaaggctctggctcttactactgtaacggctgcggtgctggcgatggcttcaaattggccatggctgtgaccgggatgagcttcaaggagcttgcccatgacctcgatggtaaggcaggtgtcttgcgggagatggtgaagcaggagcgtgaccatcgcggtctcctgaaacgaatccatgacggcaaccttccgcttgctgatatcgatcccgttgtcctttatctgcggtcccgcggcatacaggcaatcccccgcagtttcctgcgtttcaatcctggtgcttggaattggagtgacaaagcctcttccccggccatggttgcggccatgttcgacgtggaaggcaagcgcaaaggctatcacctgactttcatcactaaggaagggcgaaaggcctcaatgaacagccagaagctctacacgccaggccagacgggtgactgcgtaatccgtctctgtgagccatccatgcaccttgggttggccgagggtatcgagactgctctgtcggctacgcagctctacggaattccgtgctgggctactggagatgctggccgcatggagcgcttcaagctccctgccggcgtcgagcaagtgacgatcttcgctgatgtagaccactcccacaccggtgaggctgcggctgaatcgctcgcccgtcgcctgatcctgcagcacaagatccccgttgaagtccggcgcgattgcccgcgtggccaggactacaacgatctgctcatgcagcgcattagggaggcctcttga

SEQ ID NO: 327196 - DNA, 1485 bp, Pseudomonas aeruginosa
atggcgcaggttttgaggctgtaccagagtgaggcaatgaacgaacttcgccgcggaatccgcgatggagaactggttcagatgttgatggccccaactggtgcaggaaagacaactattgcatcggcaatgaaacagggggcgtgcgcaaaaggtaagcgcgcattcttcatcgtggactctctggagcttgtggatcaggccgcaactcgtttttacgaggacggtcttgaggttggagtgattcagggagatcactcttggaccgactacagcaagccgattcaggtttgcaccatccagactcttcggtcccgctggcaagggcttcctgactacctgaagcctgatctggtggtgatcgatgaggcccatgtgctgcataaaatgcacaaggagatcatcgaggagtgcgttgagcggaagatccctgtgattggactgagcgccactccgttccgcaaggggcttggccgggtgtttggacggttggttgtctcagcgactttggctgagttgactgatcaaggtttccttgttcctgcgcactgctatgcgccaagcattcctgacctcaaaggcatcaagactagtgcagatggtgactgggcagacgatgcgctggctgaagtgatgggcagcgccaagatcatgggtgatgtcgtcaccaattggctgcaacttgccaaggggcggcagacggtagtcttcggctgcaatgttgctcactcacgagagcttgcccgtcagttcaccgaggccggcatcctcgctgctcatgttgacggctatatggacgagcttgagcgggcgaagattatcaagaactaccgccacgggtccattcgcgttctctgcaacgtcgctgtgctgaccaagggatttgatgccccagagacttcctgcgttgtactggcgcgcccgacgaagtctctgatgatgcattaccagatgatggggcgtggcctccgtccggctcatgggaagtccgactgcatcattatcgatcacgcaggtaattgcctgcgaaacggcgttcctactgagccgcttccaacggaactggacgacggcgccggcaagaacagtgaccgccgtgagcgtaacaaggagaaggcggagcgtcttccccgtccgtgtccgaaatgctcgcacctattcgctaccagtatctgccctgcttgcggcttcaagccccaggcccacgaggatgtcgagtgggttgacggcaagcttgtccctataggcagttccaagaagcgcaccttcagcactgaagagaagcgcgatatctacgcccagcttctcgggtacgcacagcagcacatgttgaaaccaggctgggcttacttcaagtgccaggagtattgcggaagcgctccgagtgccaccaagtcggtagctccgaagcgtccttctcctgaaatcgagaagtgggttcgccatatcaacatcaagtgggctaagcggaggacagcagcatga

SEQ ID NO: 327197 - DNA, 189 bp, Pseudomonas aeruginosa
atgtacgacgacacacgacacctgaaagaccgcgagatcaagtcgcgctacgacgaagaaacctatgaggccgtgaaggcagtagcccgactgcatcgccttcagcctgctgtgttcgttcgtatgtgcgtcgaggaaaagctgtcccgactggttgagcaggataccgaagagtccatgacggcctga

SEQ ID NO: 327198 - DNA, 204 bp, Pseudomonas aeruginosa
atggaagagcacccgatctgtaaggcagtcaaggctgccggcggccagtccgccctggctcgcatcctcaacgtcactccccaggcagtgcagaagatgtgtgcttttgggcgggtgcctgccaagcgagtcctcgaaattgagaaggctactggcgtttctcgccatgagcttcgccccgacctttacccgttagccgcataa

SEQ ID NO: 327199 - DNA, 774 bp, Pseudomonas aeruginosa
atgctgcgcctgactacaactcaaattcacaatgatttctacaaccgctggttgcatcatttctgcatgagcacgataggaaagcgcattgcgcgcaaacgcgaagaagcaggcctgaaccagtccgagctagcccggcgcctaggggtttctccccaggccgttcagaaatgggaatctgaggtctctacaccgcgtgggaagcggctggaagagatagcattcaatttgaatacgactgcctcctatctattctctggagaagagcctaaagctcgaggccccatcagtaacgcccagctccttggcccgatggacgtttgggacgatgaaacacctctagagaacgacgaggtttacgtgccttttctcaaggaagtagagctttctgctggtagcggcaggaccgcaatacagcagtcctctagcaggaagcttcgttttggaaagctgacactgcgacaacaacaggtagacccatcagatgctgtatgcgtgaccgtaagtggtaacagcatggagccagttttgcctgatgggagcaccgtaggaatagaccagggaagcactgtcgtggtcgatggcaagatgtatgctctcgaccacggcggagaactcagagtgaaggtgttgtaccgcctcccaggcggcggtattcgcgttcgcagctataacagcgatgagcacccagacgaagagtacacacatcaggaaatgatgaaccaagagatcagagtccttggtagagtattctggtcatcagccctctggtaa

SEQ ID NO: 327200 - DNA, 186 bp, Pseudomonas aeruginosa
atgacgcgtaacgagtacgacgagatggaagcaactgcaaacgtggcgttggctggccttctggctggcgactgccaactcgcaaacaaccctcaggagcttgtggagtgcgcattcgatatcgccgaagccttcaacgccgaaaagaagcgtcgcctcggccagcgtcctgaatgggacaactga

SEQ ID NO: 327201 - DNA, 252 bp, Pseudomonas aeruginosa
atgtgcccaggcatgaccccaaccaagtttgcggttcgtatccttctcgcggcctacggcgtatgcgccgagcaaatcgtccagaccgccgccgtcgataccaatgtctattacctcgcagcgctcgatcaactgatcaaacgtgcatggctcaacagcgtcttcccagaagtctgcaccggcccagcgatccgaccgcagcgccaggccgatttcgacattgccgtgcttggccaggaaccctcggaatga

SEQ ID NO: 327202 - DNA, 171 bp, Pseudomonas aeruginosa
atgagcgagcgcgtggagtcattactggagcagcagcttcaggagatgaagcagaccaacgctcttctggctcaactgatcgagagcaacgcagcgttgatcgaggctctagctcagagtgacgatgcggagctcccgatgctgagttacttggatggttcaaggctgtga

SEQ ID NO: 327203 - DNA, 195 bp, Pseudomonas aeruginosa
gtgcaaacgctcaaaacgatcagcttcgcgctgacatcgcttctggtgctcgccgggtgtacgtcaaagccggttgtccagtgcagcatcccggagccgccccaggctctgatgcaggaagagccgagcttgctcccgctgatggacaaactgtttcagatctccgagccggcatcgagcgaaaagaagcgctga

SEQ ID NO: 327204 - DNA, 177 bp, Pseudomonas aeruginosa
atggaatggctcggcgcgatcctcatcctcgctgtgatcgcacggaactcctacctcgttattgatgagtggtccactggcggaatcatctggcacgtcttgatggtcctgggctggttggctctgttctggatccacgtatcaggcatcgtactcggcaaggtgttctgtgactaa

SEQ ID NO: 327205 - DNA, 165 bp, Pseudomonas aeruginosa
atgagcacccaacatacctacgaagaaatcgctgaagacttccgtctctggggcgagtacatggaccccaacgcagaaatgaccgaagaggaattccaggccctctccaccgatgagaagatcgctatgcaggtcgaagcatttggcatggaaggtgagcaatga

SEQ ID NO: 327206 - DNA, 423 bp, Pseudomonas aeruginosa
atgagcaacacgatttcagatcgcatcgtcgcccgctcggttattgaagcggctcgattcatccagtcctgggaagatgcagaccccgacagcctgactgaagaccaggtcctggccgctgctggttttgccgccaggctccatgaagggctccaggctaccgttctgcaacgactggtggaccaatccaatcatgaagagtatcgcgagttcatcgcgtgggaagaggcgctgctcaacgcagatggacgagtagcgagcaacccgtttgccgattggggatggtggtatcgaatcgccaatgtgatgctggccgctgcctcgcagaacgtaggcgccacctggggaagccatgtccatggtcgtttaatgtctatttttcaggacaggttccaacagcattatgaggatgaggaatgctga

SEQ ID NO: 327207 - DNA, 213 bp, Pseudomonas aeruginosa
atgctgacgcctgacgcctccaaccacaatccagacccgcgctacctgcgcgggctggtcgacaaagccggaatcagtcagcgccaagcggcggaactactcggcctgtcgtggcctggcttccgcaactacctgcgcgacgagtcacaccagctctatcgagccgcaccctatacagttcaattctctcttgaatgcctggcctctgactga

SEQ ID NO: 327208 - DNA, 318 bp, Pseudomonas aeruginosa
atgcctgaaaaggacccgaacttctggtcagcggcattggcgtggctgaccactgtgtcgccgcagctttacgccctggcgttgtcggtagtggtcgcggtcacacgtgttatttatggcggtggaactcgtcgacaagcgctgatggaaggcgcgctctgtggcctcgttacgctgaccatcgttcctctcctgacctatttcaatctgccggaaaacatggctgccttcgctggcggcttcgttggcttcctcggcgtggagaagatccgcgcagtagctgagcgttacgtcaactcgaaggtagacaagcagtga

SEQ ID NO: 327209 - DNA, 747 bp, Pseudomonas aeruginosa
atgtccactgcactagcacctcttctgaacaagttcgccacccgatacgagatgggcacaacgcctgaagaggtggctagcactctaaagcagacctgtttcaaaggtcaggtcaatgatgcccagatggtcgcgctgctgatcgtagccgaccagtacaagctgaaccccttcaccaaggagttgtacgcattccccgacaagaacaacggcatcgtgccggttgttggtgtggatggctgggctcggatcatcaacgagaacccacagttcgatggcatggaattctcaatggaccagcagggaaccgaatgcacttgcaagatctatcggaaggaccgcagccatgccatcagcgcgactgagtacatggctgagtgcaagcggaacacccagccttggcagtcccatccgcgccggatgcttcgccacaaggcaatgatccagtgcgcacgcctcgcgttcgggttcgccggcatatacgaccaggacgaggccgagcggatcgttgaacgagacgtcactcccgcagaacagtacgaggacgtcagcgaggcggtctgcctcatcaaggactccccaacaatggaagacttgcagtcagcattcagcaatgcctggaaagcctacaagacaaagggagcgcgcgaccagcttacggcggccaaggaccagcggaagaaagaactgctggacgcccctatcgacgttgaattcgaggagaccggcgatgatcgagcagcgtag

SEQ ID NO: 327210 - DNA, 621 bp, Pseudomonas aeruginosa
atgatcgagcagcgtagtgatgaatggttcgcacagcgcctggggcgggtgacggccagcaaggtcaaggatgtgatggcaaaggggcgcagtggcgccccttctgctacccgccagaactacatgatgcagctcctgtgcgagcgcctgaccggcaagcgcgaggaaggattcaccagcgccgcaatgcagcgtggtaccgacctggagccgattgctcgctcggcctacgagttcaatgcaggcgtaatgacgatcgaaacaggcctgatcatccatccgcgaatcgatggatttggcgcgtcgccagatggcctcgcgggggagcatgggctcgtcgagattaaatgcccgtctaccgcaacccacatctacacgatgcagtcgggcaagcacgacccacagtacgagtggcagatgctcgcccaaatgtcatgcagcggccgcgagtgggtcgacttcgtgagcttcgacgaccgtctgcctgatgaattgcagtacgtgtgcttccgctaccaccgcgacgaggaacgcattcgcgagatggagtccgaagttaaagcgttcctggaagagttggccgaactggaagcagacatgcgccggaggatggcggcatga

SEQ ID NO: 327211 - DNA, 450 bp, Pseudomonas aeruginosa
atgagtagaggcatcaataaggccatcatcattgggaactgcgcaggcgagccggaagcgcgattcctaccgaatggtaacgccgtaaccaacgtcacggtcgttaccaacgaaacctggaaagacaagcaaacaggacagcaacaggaacgcgccgagttccaccgcgtggtgttcttcggtcgcctggcggagatcgccggcgagtacctgcgcaagggttcccaggtctacgtcgaaggcagcctgcgcacacgtaagtggcagggccaggacggccaggaccgatacaccaccgaggtaatcgtcgacatgcacggacagatgcagatgcttggcggaaagcctgtaaatgaccaggcggctcagagcaggcaatctcctcagcagcagagcgcaccgcagcagcgtagcgctcatgacgaattcgacgacgatatcccgttctaa

SEQ ID NO: 327212 - DNA, 600 bp, Pseudomonas aeruginosa
atggaaaccgacattcccgagattctaagcgacctgagaatcggcgctgatgcgtggtgcggcgtgcaagagcaggttgcccatgcgctgactcacgatgacattcaagacgcagttgctgagtacctggcagcgggaggggtcatcacgaatatccctgcgggcgtctcttcaaatcagccagtcacgttcaataaccgcattaccggagcatctaccgggatggagcgagagcagcagaagcgtgttcaggccaagcgcacggcaaaggacatcgaatactgccagatgctcgaagacttagtgatcctcgattgcggtcgatgggagatcggccctgccatggggataagcgatcacaccgtacagcgactgcttcgcacctatttctccacccgcaccgagttcgacaagtggagggcatccggacatgggaaatcgacgcgcataaacggcgcgaaaccatgctcgaagtgcaagacgctcaaacctctatctgagtactactcgaatccgagcaagaaggacggccattgcagcgaatgtaaggcctgtgaaaacgcgcggaggcgagcagcaaatgcaaagcaagcggcttga

SEQ ID NO: 327213 - DNA, 186 bp, Pseudomonas aeruginosa
atgcaaagcaagcggcttgagttccccgaatcggcagacgaataccgcgagggcgtcgaagcacgcgaccgcggcgaatgtctccaggcctgcccctacggactgcacatgctctatgagcgttcgttatggctcgcaggacatcacgacagagacatgggcatagccccgagggtagcagcatga

SEQ ID NO: 327214 - DNA, 225 bp, Pseudomonas aeruginosa
atgagcctgcacgaacacggctgtttcgccgacagctaccaagtccgacatatcaacgcgcagtgcgtcgtcggaaaggtcttccggcacaagccgactaatcgtaggtacatcgctgttctcgaagctggaggatccgtagagcttcaagaggctagcgggcacagcacgtacacatcaatcgaagcgctcggcaatgctgaggtgtgggagagcttgaaatga

SEQ ID NO: 327215 - DNA, 1284 bp, Pseudomonas aeruginosa
atgagcatggaattgaacaaggaatcggtagagcaggcaggcggggatgagcacgcagggtttgaagcatggcttgcgcaggttatgtcgcatcacttcgatcctgagcttgacctcgccaaatacgaggactcagacgagtaccgctacaacccagccgccgcttactggaaggcatggcaagcccgcgccgccctggcgcaaccctccccagtgcgctcgagtctcttgatcaacggataccagttgcgcgccgccctggacttcattgcgccggatggcactgccgagcaactggaaagcgaggcctgcatcgagtggcgccagcaggatgccgatttcctcgaagcaggcctatacgccttctgcgctgagtatcccgaagaaggcggcgtcttgttggatgaggagccaaccactgcgcaaccatccccgttgcagtccgagcaggcagaggcggagcggccggaggttgtggctcgcgtcgtgcattcgaatcctgtcgtcctcggtcagtgcggtccgctcaatgcaaacgatgaactgatgactgtcgcgcagcatgcagccagcgtcgcccgttgggcagaaatgttcaatcgagtggagcaagagcgcgacgccgccctggccagggtcgaggaactgggggcgaagctgggagcggcgctggaattacttcgggaatcgcgcggtttcgtcgatcgcgataatcctctcaacgagagcggtcaaatcaagcttcttgaggaaatagacgtattccttacatcacctatagcccagactcagcacagcgtgccggatgtgtccggttgccgcaggaacggcagcgcacttaccgatgcgcagatgcgccggctctacgatagcagcaccgagacagaaaacgagcggcttgggttcgcagcgttcgcgcgcttgatgcgccgggccgaggctgtccaccagatcgccgccgcgcccggcaaggaagtgccgcaggcatggctcgatgttcaagccgaacgccgccggcaggtcgaggtcgagggctaccacggatttcgtgacaatcattacatcagctacgaactctcgaaagccgcgcgagcgtacatcgaggtttcgtggcatgcactcagcggcgggctgccgtgcaagaagccggagtcctggccttggatggctgggttcaagtggtctgacggtcgaacgatgctggtcaaggcctgcgccctggcgctggccgagatcgaacgtctcgaccgcgccgcgcacggcaaggaggtaggtcatgagtga

SEQ ID NO: 327216 - DNA, 414 bp, Pseudomonas aeruginosa
atgagtgaggttcaccgcttttccgtagtgaagatgctttccgaggcgggcaacaagattagctacgacccacacggccctgaaattgtgatggcgaaggattacgacgccctcgccgccgaggcccaggcgctaagggaggaagtcgcagcactgcgcgcaagggtggctgttgtgccggaccgcctgccgcgcagctctgacatcgcggcgatccatcagcacagcattggctggaacgcctgcctcgacgaactgacgcgcctcaacggcctgacggtcagcgaggggctgttgcggcgtgtctgcgcggaacagccagccacgtgctgtatggacgacgagatgagttggcggcgggatcgcgactcggcgttgatcgaactccgtgccctgctgagcgagcaagagtaa

SEQ ID NO: 327217 - DNA, 1083 bp, Pseudomonas aeruginosa; identical to SEQ ID NO: 323680

SEQ ID NO: 327218 - DNA, 330 bp, Pseudomonas aeruginosa
gtgatccagggcatcaagcgcatcgtcgccatcgaaggcgaaccctctcccaactgccccagcagcaattctaccttcacctacgacgaacgcggcctgctcagcagcaaacgcgacaacaacggcaacctgaccacctaccagtacaacgtccggggcctggagacctcgcgcaccgaggccgccggcactgcgcaggcgcgcaccatcacaaccgactggcacccgaccctgttcctcccggtgcaggtcagcgagcccggccggatcacccgctaccagtacgacgccgagggacgcaagaccggcgagaccgtcactacccgctga

SEQ ID NO: 327219 - DNA, 1545 bp, Pseudomonas aeruginosa
gtgctgctggatattgccattggcatcgtgctggtagtcgctctgccaggggccgaccttctgccgcagcagttggtagtcctggtcgtactcgcggctgagagtgatgccgttgccccaggtcaggcgctgcagcgggccgaagggcaggtaggcgatctgcccgaccagggtgctcggcgccttgtcgcccactgccagggtcacgctggcgacctggccgccggcgttgcgcgggtagccgatggcgaggccggaggggtagccgatctccagcagttggttggccgcgtcgtagcggtaggtcacgcggtcgagcagggtctgctggtcgaggcggatgctgcgtacctgctcgaccaggttgccgcgctcgtcgtagcggtacaccaggctgtcgcgggcaccttcgatggagcccaggcggccgatgcccttgttgccgtcggcggtgaggtcgtagcggtactgtacgtcgaggctcgggtcgctcggcgagcggcgctcgaccagccgattgagggcgtcgtagcgatactcggtgaccgcaccgcgagcgtcggtgcggcggatgacgttgccggcggcgtcgtgctcgaaggtggtggtgccgctgtccgggctgaccagtcgggtcaggttgccgaggccgtcgtattcgtagcgggtggtgacgccgcgcgggtccttgacctcggtgaggttgtcctggacgtcgtaggcgagttgggtcttgccgccgaggggatcgctctggccgaccagccggtcgagggcgtcgaaggcctggctgtgggcgaactggcgcgggttggtttcgccgaccggattgtcgttgaggtcgtaggcgaagctgcgtgtctggccgccggcgccgaccgcacggagcagccggccaagctcgtcgtaggcccattgctgctgacgcaccaggctgccgctggcgtccttgatgcgctgggcggtgcgattgcccttggtgtcgacgtcgtattcgaggcgttcgccgaggttgttgccgatcgccaccaggcgccgtgcgtcgtcgtattcgtagctcagccaactgccgtcgccacgggtgacgcgggtgatctggccgaccgcgtcatagtcgaagcgggtggtgctgccggcggtgctgacggaggccagccagccgtcgacgccggtgtaggcgaggctgctggtgacgccgttggcatcggtgatgctgccgggcttgccgcgctcgtcatagtcgccgaggcgggtgacctggccgagggcgttggtcacctgggtcaggttgccgcgactgtcgtaggcatagagggtgacgtcctgcacatcggtgcgcggaccgtcggcgcgctcgatcaggccgagggcgttgtagctgtagctccaggcgcgctcggccgcctgcgcgggcagggcgagggcgcaggccaggccgagggcgccaaggcgggggaagtatggggggatgcgcatgggtgtcgtccttgtcagcgggtagtgacggtctcgccggtcttgcgtccctcggcgtcgtactggtag

SEQ ID NO: 327220 - DNA, 324 bp, Pseudomonas aeruginosa
atgacccagcgcatctacctcgccggccccatgaccggcctgccggaacacaacttccccgcgttccacgccgaagccgcgcgcctgcgcggcctcgggtaccaggtcgagaaccccgccgagcacggcgagattccgggcttcgagtgggccgactacctgcggcttgacctgcagaagccgctcacctgcgaagccatcgccctgctgccgggctggatggactcgaagggcgccaggctggagttcaccgtggccaccaacctcggaatgcgcgctctgcacgcggagcacatcaccggtccagcggaggatgcgccatga

SEQ ID NO: 327221 - DNA, 555 bp, Pseudomonas aeruginosa
atgaccgacctcttctacctgcaggacagccgcagcaacgtcgggagccgggccatgttctggcgcgccggcggcggctacaccaccaacctcgacgaagccgagacgttcaccagcgcccatgccgttcggcagtacaagtgccgggaaaccgatctaccctggccggtcgactacgtacgcgcccgggctgaactcggtgtcgatcaccaggacctggacctgtcccgggcgcaggcactcgccaccgcccctgcggacgaccgcatctacgtcgcctacgacagggactgggacggcaactgtctggtctgggtacccgaggccgccggccggacatccaatctggccgccgcacggacctggccgctcgaccacgccggaatactcaccgcgcgcgggcgcgcgccctggccgaagtcctacatcgaccagcatgtcaggcctgttgctgtggtggcctccctcaaccacaagcaggccctccggctgttcggcctgaagttgcccaagcaggcgctggacaagagcgcccagcccaccctcttcacctga

SEQ ID NO: 327222 - DNA, 1176 bp, Pseudomonas aeruginosa
atgagcgctttgcacatacttataatcccgtcgtggtatccagaatatccaggcgatatcaacggtagttttttcaaggaacaggctgaagcgttagcgaagcatggatgcaaggttggggtgatttaccctcaacttcgatccctgaggaactggcgtggattattgaaaggcggatccggcctttcttacgaatcagaaaacggaattccgacatacagatggcacggtgtgaactggtttccgaggatagccaagctgaacgggtggttatgggagttgcatggcaaaaagctttacaaaaagtacgtagagaatcacggaactccagaaataatccacgcccattcactgctttatgctggtcacttggcaagtaagatttcagaaaaatcaggaattccttttgtagtcactgagcacagcactgcatatgcaagaggaatattaaataaatcacaaattgaacttgctaagtctgcgtctaaaaaagcatttgaaagaatagcggtaagcaatgaatttggaaaatttctaacaaaggtttttaatttaaacagcagcacatggatttacattccaaatattgttaaccagcttttttttgataaaagaattaaaataacgaaagaagaagaaactttcactttcctgaatatcgctatgcttgacaaaaagaaggaccaggcaagccttataaaagcattctcaaaagcatacgctaacaacgatagacttcgccttaagatagggggatatggtccttgtagagaggaacttgaacgtctatcaaaggatctagaggtatctgacagcgtaactttccttggaaagcttggacggtcacaggtaattgacgagattcaagaatcagatgcttttgtactttcaagcgtctatgaaacgtttggcgttgtcgtggctgaagcaatggcacttggaaaaccggtaatatccacatcatgtggtggaccagagtcaataatttctaaagaaagtggaattctagttccgactaaagaccctgacaaacttgctcaagctatgctgtcactcttccataatcgtcataagtacgacaatctcttaataagagaatactgctacaacaagttcagtgaggcttcagtagttaattcccttaagcaggtatataagaaaatcgttaatacgtga

SEQ ID NO: 327223 - DNA, 171 bp, Pseudomonas aeruginosa
atgtcgattgcaaacgcccgcctgatcgctgcggcgcctgagcttctggatgctctcgaggacgcggtgaatcggcttacttctagcctgatccttctgaaatgtgatgacgacttcatcaagaaggagaccgcaaaagccagagccgcaatcgccaaggcaaccgcctaa

SEQ ID NO: 327224 - DNA, 177 bp, Pseudomonas aeruginosa
atgagcgaacaaatcacagcgcttgagtacgtcgaacgccgcaaggccgaattggaaagatttgtcgcctactggactagccaacaaggcgatccggattggcctgacaaattgccagaaggcgactggttcgagcaggaagcagccttcctttcctacgcagagcgccacaactga

SEQ ID NO: 327225 - DNA, 1284 bp, Pseudomonas aeruginosa
ttgacgctgcgctgcatctggctgatgggcgaggcatgggctgatgaccctgtgccgctgatcgttttcgagaacgtcccgcgcctggccagccgcggccggcacctgctggaccagatcaacagcctgctcggcggcttcggctacgccgtggcggaaaccactcacgactgcggcgaactcggcggcctggcgcagtcccggaagcgcttcctgcttgtcgcgcggcacgtcgaaaaagtgccccccttcctgtacgagccagagaagaagagcctgcgcgccgtcggcgacatcctcggccgcatgccgctgccgggcgacatcgatgccgcggggccaatgcaccgcatcccatcgctgcactggaagacctgggtgcgcctggccttggtagaggccggcagcgactggcggagcctgaacaagctggcgatcgaggacggccacctgcgcgacctggtaatcgtgccggagtaccgctccggctacatgggggtgcatgggtgggacgacactgccagcactatcgccggccgctccggccctaccaacggcgcattttcggtagccgatcctcgctaccgccaagccgcaaactggaaccacggccagcagttcggggtgatccgctgggccgaatcagcgccgactatcccagggcaaacgatgccaggccaaggcacattcagcgtcgccgacccgcgccccaactggaaccgccacagcggcaactatcgggtgatccgctacgaccaacctgcaggcaccatcatcgccggcggcaagggcgtccagggcggccagcagtcggtggcagacccgcgcatcctgcaccgcggcaagggcgacaactacctgaccggcggtcactacggggtgatcggcttcaaccagcattccggcgccatcgcggccagctcccgctacgacagcggccgattcagcgtcgctgatccacgcatcccagcagcggacgaacgcctgacctgcatcatccgcagcctcgacggcacctggcaccgccccttcaccacgctggaaaaggcagccctacagagcctggtcgagcccgaggaatacctggtgctcgacggtatgagcgacaaggactggagcgagcgcatcggcaacgccgtaccgccggccgcggccgaggccatcgccggcgtgatgggtacaacgctgctgcttgccagcatgggcgagacattcatgctcagcagcatgccgatctgggtgcagccggtggctatcgctttaagtgttcaacaggcaaattga

SEQ ID NO: 327226 - DNA, 414 bp, Pseudomonas aeruginosa
atggaagaacgaagtcttattgcgcatgcgtctttcagggaaagcagtgagaagtttgaccacttgatcttcgcggcaattatcgccgtttgtgcttatttggttcagacaatcccattcggaaagattgggctgaatgttgaaacgatgttcctctatgtcctccttgtcttcggcgcggccggtgtattcgcgttcaagcgctccgagtggaccgttcaggtgcattcagcgaaccacttgatgctggacgcaatggaaaagcgagaccaggcgcgatccaaaattgcacgattgaaaatggataaatgtcagcggaagacatatatctactatcgcgcccggaatgttttcttctttagtggttttgtttgctatgtgttggtaaaggtttttcagcaatatgtaatttga

SEQ ID NO: 327227 - DNA, 450 bp, Pseudomonas aeruginosa
gtgaacaccgaacagttcatccgggagtccgccgcgcgcgggctttcccggcgcgccaccatgcacgcgctcggcctgggcccctggaagttccgggagctgctgaccctgatgccggagatcacctggccagcacgcggatgctcagccgaccaccagcgtgcgaacgagcagaagcgcggacgctgcacgccggcgcaggccgcagcgctggagcgcgcgcacgaacgctggagcgagagccgacgattaaccgtcgacggcgtgaccgggaccatcgccgagctggtggagcacttccagagcccggtccacgcaacgaccgtccgccgccgcgtcgccgccggcatgagcctgcgcgacgccctcaccaccccgcgccagcagcccaagcccgggcgcaggcatccctggaaccgctcgaagcaggagcacgcactctccaactga

SEQ ID NO: 327228 - DNA, 1218 bp, Pseudomonas aeruginosa
atggctcgaaagcctttgggtatgcccaccggggtggaagtcatcggcaactctatccgtatccgcttcatgtggaacggaacaaggaagtgcgaaacactcccctatcccgcgacgcaaaaagggattaagactgcatccggtcttagagatcaggtagtccaggcaatcaagctgggcatcatggatgaagccaagtatgcagagttcttccccgggtctgcgattgcggaatcggtcagcagccaaattcccctgttcggtgagcatgctcaactctggctagacagccgagagatcgtgcttgggacacgcaagaactacaagagcatcctcaaccaatactggatgccgcatctagcagtagcccggcttgatcagatcacccctaccctcttgcgccgaatcatcagcagcatcgagtggacgtcgccaggcgtgaagcgaaacgcgatgttcaagctgtcgacgatcctggattccgctgtgaaggacggtctgatcaagaagaacccgatggctccccttgagaagccccgggtgtctaagaagctggtagatccattcacccgggacgaggcagaacgcatcatccagcacctgtacgcgacccttgggaagtactcaaggatctacgccgcactgtacgaattcctgttcttcactgggctgcggccaggagaggcattcgcccttcgatgggatgaggtagacgaagaggcgcgacgcatccatgtatgccggatcgtcatagatcgagggatcgaggagcgagtaaagaccaagcatgagcgcgacgtgctgctcaatgatcgtgccttaaatgccctggcagaggccaagcggattgcgcgcctgaagcgcgtcgcatccgtctcggagttcgcggtcagcccgttcgtattcccgcccagcaaaggcgggctgtggatcaaggagccaagtgttaccataaagcacttccacgccgcgcttgatgcactatccatccgaaggcgccggcagtacgacacccgccacacatacgcgaccatgtgcctgatggctggcatgaaccctgcgtttatcgctgggcagctaggccacagcgtgcagatgctgctatcgacctatgccaagtggctgaactccgcctctgattggagcgagttggagaagctacagaccagggttaaaactggtacggaattggtacaggaagcagaggaaggcgcgtaa

SEQ ID NO: 327229 - DNA, 261 bp, Pseudomonas aeruginosa
atggcagcaatgactgagcgcatttgcgccaacaagtcgtgcaagaagccgttcatggctcgcacggcagacgtgaaaagaggttgggcaaagttctgcaataagtcctgtaaggcgatcaagcaggagcagagaaccggacaatattccgagttgctcagcaggaactccggctgggatgaccgctacgacgtggacatttcagatatggattacggcgccagtgatggcggcggctatgaatcgatacgtgagggttaa

SEQ ID NO: 327230 - DNA, 366 bp, Pseudomonas aeruginosa
atgaacaccgcattgaaatacgcccaggaacgctgggacaacgcgctaccgcccgacgatgacggtgaccgcgagtatgtcactgagcaagtcggcaggctattgaactgcgaggacggtgattgcgtgccgttccatgacaagcgacagcgggccttttcagggcctgacttcactgtctacggattcgccggattcgtgcctgagtggattgcagaggtcgacagcaaagagtgcccgatgactcagctactgcttgcagtgcgccgcggcgatatcgatctggcccaacgcatctggttccgcacattcgaatccacgcttatcgagaacgctgaacgactggtcagggagaggcgagtatga

SEQ ID NO: 327231 - DNA, 177 bp, Pseudomonas aeruginosa
atgagctatggattaggctgctttaccgctaagaatctccgcacccccgagcagatcgccgccgtggagcgggagaaggcgattgaagaaatgtgcttcgcagaagagacgctaaccgtcaagcaagccaaagcactctacgacgccggctatcgccgccaggagtcatccacatga

SEQ ID NO: 327232 - DNA, 171 bp, Pseudomonas aeruginosa
atgaagcgcgcaccagtcgatttactccgcaaggccatagaggccgcccaggtgctcaaaaatacgggcgttctgttcgtgcccatgcctgtccttagccaagaggaccatgagcagctaaccagtgaaatgctggctcggctgacaaagcttgaggaggacgaggaatga

SEQ ID NO: 327233 - DNA, 138 bp, Pseudomonas aeruginosa
atgaacccacgccgcacagcaatctggctaggcagcctcttcggcggcctgctgtacctgttcattctcgcagccggcccgatctggggcggcatcatcaccgcagaagctacgcacctgtccgcagcaggccggtaa

SEQ ID NO: 327234 - DNA, 1407 bp, Pseudomonas aeruginosa
gtggccccggcttccgccgtaccgctgatgacgactccattgctcggattgatcaccggcgccggcggggcgatggcatcgacggtgacgctggccggaccgctggtattgccggccgggtcctgggccacggcgttgatcacggtgccgttggccagcggggtgctcggggtgaacgtccagttgccgctgccgtcggcggtggcctggccgatcgggttgccgccgccatcggtgaggatcaccgtcgcgccggcctccgcggtaccgcttatctcggtgccgttgctcggatcgatcaccggcgccgccggggccacgccatccacagtgatcaccgccggcgcactgtcgacattgcttgggctgcgcgccaccacgttgaccaccgtgccatccggcagcgggatgcctggagtgaaggaccagttgccgctgccgtcggcggtgacctggccaatcgggttgccgttgccatcggtgatgatgatggtgttgccggcgtccgcggtgccgctgatcaccgaaccgttgctcggatccacctgcgggatcgacggcagcgaggaatccaccgtcgtggtagcgggaaggctggtattgccggcggcgtcgctcgcggtcacgttgaccacggtgccgttgggcagttgcgagccgggcgtgaagctccagttgccgctgccatcggcggtggtctggccgatcgggttgccgttgccgtcggtcaaggtcacggtgctgcccggctcggcggtaccgttgagcaggttgccgttgctcggattgaccacaggcgtgttcggcgccaccgcgtccacggtagtgctgccctgcgggccggtattgcccgcagggtcctgggccacggcgttgaccaccgtgccgttggccagcggcgtggcgggcgtgaagctccagttgccgctgccgtcggcggtggtttcgccgatcgggttgccgttgccgtcggtgaggatcaccttggccccggcctccgcggtgccgctgatggtcgtgccgttgctcggatcgatcaccggcgccggcggcgccaccgcgtccaccgtggtggcggcctgcgggccggtattgccggtcgggtcggtggccgtggcgacgatcaccgtgccgttggccagcggggtgcccggcgtgaagctccagttgccgctgccgtcggcggtgacctgccctatcgggttgccgccggcatcggtgagggtcacggtggcaccggcctcggcggtgccgctgatgacgacgccgttgctcgggttgatcaccggcgccggcggcgcgctggaatcgacggtcaccgtcgccggcgggctgctgttaccggcggcgtcctgggccaccacgttgaccacagtaccgttggcgatcggcgtggacggggtgtag

SEQ ID NO: 327235 - DNA, 978 bp, Pseudomonas aeruginosa
atgttccaggcgtaccgcgtccgggctgccggtgggcacgcgcagggccacggtgcggttgtccaggccccagctcggcgcgttcggcacgtagaactgcgaaccgaagcggcggtaggagttgacgttcgggcagaggaaggccatggaggccggcagggtctcgagcacaccgccgatcgcatggcgcaatgcggcgttctgctcgggatcctcgctggtgaagatgttgttgccgtgcttgtcgagcagcgagatatgcacgtgcagtccgttcccggcctggcccggatagggcttggccatgaaggtggtgtccatctcgtggtcgtaggcgatgttcttgatcaggcgcttgagcagcaccgcatagtcgcaggccttcatcgggtcggcgacgtgatgcaggttgacctcgaactgcgccggtgcggattcggcgacgatggcgtcggccgggatgccctgggcgcgggcgccgtcgatgatgtcctggaggcactcgacgtattcgtcgaggtcgtcgatggagtacacctgcaccgactgcggacgcttgccggagatcggcgagcgcggcggctgcggccggccgttcacgttctcctggtcgatcaggtagaactccagctcgaaggcggcgacgatggtcagttccatctcggtgaacctggccaccacctggcgcaggacttcgcgggggtcggcgaagaagggatcaccttccagctcatgcatggtcatcagcagttgcgcggtcgggcgcttctgccagggttccatggagagggtgccggggatcgggtagcagatccggtcggcgtcgccgatgtcgagacccaggccggtactctctacggtggagccggtgatatcgagggcgaacagggaagcgggaaggttgatacctttttcgaagactttgggcagactgttgcgttcgattcgcttgccgcgaaccacgccattcatgtctga

SEQ ID NO: 327236 - DNA, 153 bp, Pseudomonas aeruginosa
atggaggggccggcaaatccgtcccgcagggacaggaccgaacggcactgccctctattttctgagggcaaaaaagacgcgggccgcaggtggtggaacacctacgacccgctaaccacaacccagcttactaaggagctgacctatggctaa

SEQ ID NO: 327237 - DNA, 345 bp, Pseudomonas aeruginosa
atggccaacgccgtcgccgagaactgccgtgcgatggtggagttgatcctcatcgagcgcggcgaacacccgcacaccgcggagcaggcgaacctgccgacgatgttcggagcgctgcaaggtgttgtcctggccgccactgtggacccacgcggcacgtgcgccggctgtgcctatcgtctcggcaccccggcgaacacctcgccggtcaccacctccgatgccatctactgccggcaggaactcagccggttctattgccacgccgacctggacgatctgggcaacccggtccgcacctgcgtcggccacgccaaagccatgaagcaagacgccacgaaatga

SEQ ID NO: 327238 - DNA, 147 bp, Pseudomonas aeruginosa
gtggacaacgacaacgaaaccatattggcagtgatagtcatcgttctcttcgtcctgggaatcttccgggttgtcggggatatgcaggaactctacaggcagaccgagttgaaaggacaggagttgagcagatggagcaagcaatga

SEQ ID NO: 327239 - DNA, 255 bp, Pseudomonas aeruginosa
ttggtcaagaccaaccacatgccggtacgcttcctgatctacgtggcgatgaccgcgctgacccgcctgatgatcgccgacatccagcacaaccatacgccggacgatggcatcatcctggtctcggtggcgttgctgctgctggcgctggcgatcctggtggtgcgcttcgcctcggcgcgcttcccttcggcgaagtccgacggcgccgccgcgcggcgggtggcgagcgaggacgccgaaggggaagcctga

SEQ ID NO: 327240 - DNA, 894 bp, Pseudomonas aeruginosa
atgtataattccaaaagtagctgttcgaattttcgaccaaaggactgtcaattgaaatcgattagttttgtaaatatgaaaggcggcgtttccaaaacgaccttagcggtcaacgtcgcagactgcttggctcgcagacatgatcttcgcatacttattattgacttagaccctcaattcaatgctactcaatgcattatgtcaggcgaagcttataaagggcatttacaacaaaatgagcacacagtcattgacttatatgatgactctccacgacccattgttggtgcagtcaaaggagctgcgatttctgaagttattacgatagatcaaatatcgcctgttgaaatcaaaaacaacctccacttactgccaggtgcgttagagctttacagattagaaatggcaggaggccaaggccgggaacttcgacttaaaaactatgtagactttctacgagataaagatctttacgacatcgtaataattgatacaccaccaacaccctctgcctggatgtcctctgcattgatcgcatctgacgcatacctagtcccagtcaaaccagaacctctttctgcaactggcatagaccttctccgatcagtaattactagagtcagttcgaattacaatttaaaaattgaatgtgccggagtggttctaaccattgcagaagaacaaacagttgtttttcgtgaagcgaaagattttgttgacaacgctgctttctggaaaggcaaacgcttcgctaagcacctccccaagcgaacagcaatcgctagaggccagggaaaccagagcctaattctcgacatgcaggatagtgaattaagactagccattactcaaatctcgaaagagcttttaactcgactggggatagaggaataa

SEQ ID NO: 327241 - DNA, 738 bp, Pseudomonas aeruginosa
atgacacgtgccattcaagaagatttcgagcacgtccagaaattcatcggtaattatcgcctcgaaaccctacttagtgacgacgaggctataaagaaaataaaatccgctcacgcgaaatactttgccgccctgacaattttccacgaactcaaacacaaaaatcccacacttcaactcccacccactaattcaccagaaaaaaacattaagttagctggtaatttttgggcatatctcgaggagatactctcagaactcgggagcactttattccttattgcaaatgggttctacaaagctgccgaattagtactgcgaagcacacttgaaaacttcttcaagatcaatgcagctttccacacgccagatatattcgaaacaaagagcacttacgaagttatagagctatcgaaaaatagcgaagtattcaagagcgaacctggcacggatatctttgaaaaactaaagagtcattacgtaacgctatgcaaatccgtacatacagcggatatagagaacatgcaacaagtaaccgcactaggttactttccgcacattgacaaaaccaagctagccgccacatcaaaggcatacgtatctataacatcaaagtacgtggaaatactctctttgatatttaaagattcattccacgaaatgcactataaaaacaaagatataattcagacatgcttcacaaaaccaaccaacgaaaaaatacacctcaaaaaataa

SEQ ID NO: 327242 - DNA, 1332 bp, Pseudomonas aeruginosa
atgagcgggcaggcgcggttgcgcgaagtcggcgccggcggcgcggcgctggaactggacgagaagcgtttttcccggctcggctgggggctggtgctgctcggcttcgtcggctttctcctgtgggccgggttggccccgctggacaagggtgtcggggtctccggcacggtgatggtggccggtagccgcaaggccgtgcagcaccctaccggcggcctggtcaggcacatccgcgtgcacgaaggcgagcgggtggaggcaggacaggtgctgctggagatggacgctacccaggcccgggcccaggccgatggcctgttcgcccagtacctggcggcgctggcgagtctggcgcggctgagcgccgagcgcgatgaaaaggcgcggatcgagtttcccgccgagctgctggcgctggacgacccgcgcctgccgaccctgctggaacagcagcggcagttgcacgacagccgtcggcgggcgctgcgcctggaactcgatggtctcgccgagacggtcgccggcagccaggcgcaactggacggcctgcaagccgcgctgcgcagcaaggagcagcagcgcgccgccctcgaggaacagttgcgcggcctgcgccaactggccagcgagggctacgtgccgcgcaaccgcctgctcgacagcgagcgcctgctggcccaggtcaacggcgagatcgccggcgacctcggcagcctcggcagtacccgccggcagatcctcgaactgcgcctgcgcatggcccagcggcgggagaagttccaggaagaggtgcgcgccagcctggccgacgcccaggtgcgcgccgaggagttgcgcaatcgcctggccagcgcgcgcttcgacctggccaacagcgaggtacgagcgccggtcgccggcctggtggtcggccaggaagtgttcaccgagggcggcgtgatcgcgcccggccagcaactgatggaaatcctcccggagcgccagccgctgctggtggacgctcggctgccggtggagatggtcgacaaggtccgcgtcggcctgccggtggagctgatgttcagcgccttcaaccagagcactacgccgcgggtggagggcgaagtgaccctggtctcggccgaccgcctgctggacgagcgcagcgaggcgccgtactaccgggtgcgcatccgcgtaggcgtggagggcgtacgtcgcctggccggcctggagatccgcccggggatgccggtggaggccttcgttcgcagcggcgagcgctcgctgttgaactacctgttcaagccgctggccgaccgtacccacctggcgctgggggaagaatga

SEQ ID NO: 327243 - DNA, 1908 bp, Pseudomonas aeruginosa
atgtcgaacggttatccatatcccaaatatcgcgcggatatcgatggattacgtgcggtggcggtactttccgtcgtcgctttccatgcctttcccgaatggtttcaggggggcttcatcggtgtagacgtatttttcgtcatttccggcttcctgatttccagcatcattttcaaaggactggaaagggggacgttccgcttcgtcgatttctatgtgcgtcgaatcagaaggatcttccccgccttattgctggtgctggctgccagcggtgtgatgggatgggcagtgctacttcctgatgagtacgcacaactaggcaagcacatcgcggcgggtgctggattcgtttccaacctcgtgctatgggcggaggctagctatttcgacagtgcggcggagttgaagccgctgctgcatctatggagcctgggcgtcgaggagcaattctacatcctctggccgttgctggcctggatagcatggagggtccgtatcggtttcctctggcctgtcgtgctgttggccggagcttccttcggactatgcgtctatcggctggacggcgatccggtcggcgcgttctattctccgttgacgcgtttctgggaactgctcgcgggctccgctctggcctggttaactctgcgcaacgagcgagcagagtgtgttctggatgtattcggcaatgacgttctaggtcgtgctttgctttcggcgagcggtattttgctgttggcttgcggtttcgttctgatcgatcggcgctccgcgtttcccggcatcttggcactgcttccggtacttggtgctgttctgcttatcgcagcgggtgagcgtgcttggttcaacagggtcgtactgagcaatccgttactggtctggatcggtttgatcagctaccccctatatctctggcattggccgctactggcgttcgctcggattgcagaggggaatgtgccgagccttgaggtgcgcgcatcgttggcggtgctttcaattgtgctggcatggctcacctatcggttgatcgagagacctgttcgacgcgctgatccggtattcggtagcgctctcctaccgttggcggtcatggcgatagctggtgtctgtggttacaagattcacttgctggaaggcgttgcggagcgtttccccagactcgtccaggatctggcgaaatacaggtttccttatgctgtcagctatcgagaggggagttgcttcctcaagccggaacaggcgtaccagagcttccagaagtgcccgccagtcagcgtaggtaagcagggtaatctcttgttgtggggggactctcatgccgcgcacctgtatccgggctacaaggcggtttatggaggggagttcggcatcacgcaacgaaccgcgagtggttgtccgccgttgctgggacttgaaatcgcaagccggccccattgtcgctccatcaacgatgaagtcatgaggtacgtgacgacggcacatccgaacaaggtcgtactttcagccatctggaccaattatgatctgtccgctctcaaggggactatcgatcggctgcgcgcggcgggagtcatcgatatcgatctcatcggccctgtgccgcagtggctagacagcttgcccaagcaactgtatttccggtttcgggaaagcatgccgcacaatgtgcccgctcggatgaccagcggtctggacgagcgtttcattggagtcgacgacatccttagggaaagagctagggaactgggtgtcaactacatatctccgcgaagaattctctgtgacagcgggggatgtctaactcgcctgggagataccggggaccagcttgttgcctgggactatggccatctcaccgatgctggctcggcgtttctcgttggtaagtttgcggcgcattga

SEQ ID NO: 327244 - DNA, 687 bp, Pseudomonas aeruginosa
atgccgcgtccctataatgaacgtttcgttccgcaggagtcgcaccgtgcccgccagcaaaccagtcgcggatcccgcccggagtaccgatccgcgcgattaccagcgagtcggccggccgctcggggtcatggccaagaccttcccggcgggtttcgtggtcgccgagcaccggcacgagcgggcgcagttgatccatgccctgtcgggcgtgatcgaactgcatgtcggtcgcacgctatggctggtcccgccgcagcgcgcggtatggatgccggcggggatggcgcacgcgatgctggcgcgcggcgaggtccgcttgcacactgtctatgtccggccgcagtcctgcccgccggaattcccccgggtgccgcgcggagtgatggtcagcccattgttgcgcgagttgatcgtgcgcgccgccggcctgccgttgttgtacgacgagcgcggccgggaggggcggttgatggcggtgctgctggacgaactggagtggtcgcgggaacagcccctggccttgcccgaccccgcggaccgacgcctgggaagagtctgccaggcgctgctggagaacccggccgaccctcgcgggctggaggagtgggcgcgctacgtgggggcgctacgtgggggcgtcctcgcggaccctggcacggctgtttctctccgaactgggagtga

SEQ ID NO: 327245 - DNA, 369 bp, Pseudomonas aeruginosa; identical to SEQ ID NO: 319700

SEQ ID NO: 327246 - DNA, 351 bp, Pseudomonas aeruginosa; identical to SEQ ID NO: 319702

SEQ ID NO: 327247 - DNA, 2289 bp, Pseudomonas aeruginosa
atgagcgatgattcacctattattgtttacgcaaacagtccagcggaagttattctaaacccgactcgcgacaggaatgacatattaaacaattacccggccgggaatccctttattggcttaacgtatgccattgaaaaagatttcaaagagaggaaaaagaacctggaagcaggggtgcagtcagaactggatgcgatagacgcaaaatatccatcattaccgaaaggctttacaccggagcaatggttggagagggctactgccgttgtcaccgagttgctcaatcaaaagcggccgaagctagattatgagctgggtatagtcaagaattcggctagttttgataagctgcaagcaagctacaacgcaatcatcctgaatgatcagatcaatagtcttcaagagcgcttgaacaagctcaatgctgaaaccgaccgccgccgggcggaggcagaagcccagcgtcaggcagaagcggacgccaaacgcaaagcggaagaagcggcacgcctggaagcccagcaggtcactcaacagctcggtgccgacttcaacgcgatcaccgctccgaccgccaccaaggtccagcaacgtgtgaaagcagtggatgctagtctgtctcaggtttccacccaggtcagtggtgcagtcgcctcggcaacccaggcggtgcaggtcaagacagcgcaagcccagcaacaagccaacagccagatttcgtccagccagaacctgatcagcgcggcatttcggaatcagattgccttggcagcacaggccagtggagaagcccaggtcacggctttcaacaccaaagtcaagcagatcgtcaacgaagccacggcgttttcgacagcacgaaaacaagcgctggctcagtttgctgccaatgcggccgccgaggtcgaaaccgaggtcaacaggctaaccgcccaggtcaaggccagccccaccaaggcggcttcgcaagctgcacaagcaacccttcgacaattcactgaaagcacctatgccaaggtgaacacctttgcccagcagaccgaagcagcgctgcaggctaaggcaaaagaggtctcagcagcggtagccgaagcacagcgtgcggcgaccaacgatttgcaaaaaacagccgatgtagtaccaggtcagatcatccaggctgcgaacaccttggcgatgccggccacctctgcgccgctggtttcggtggccgggtttggtagtgcggcagtggagacggctcgcctggcggcttccctaacgaatgctgtcaatcgcttgattcagattgctggtagtggacctggcgcatacgtggccaccttcgcggtgctgtcgctgtattccgaccaggctggtaaagacagtgacaaggttcctgccggcgttcgcaatgcattggcactggaggcgtccgctctgggtcttcctggcacggctgatttgcaaagcgccgccaaggcaggtggcacggttgatatgccggtacgactcacgagtgctgcacaagagagcccgagtggtaaatcgcagattgccgcggtgctgaccaacggggcaactgtccccaagggcgtgcctgttcgcgccgcgaccctcaatgctgcgacgggccggtatgaggtgtcggttcccgcaaagcccaccgtaccgaatacaccaccgctgatcttgacctggacccctgccacccctccaggaagccagaatccctcaagcaccactccggtcgtaccgcagccggttccggtgtatgagggagcaacgatcaccccagtacaggccgagccggagtcctacccgggagtgcctttagacctggacgatctgatcgtgattttcccggcgggctcggacgttcctccgctctatctggtcttttccaagccgccggttaagctactggaggtggacatctatggtaactttgcgggacgacctcgtgatggaaaccatcttgaccatatgccctcacagggcgcgcttgccgaatcgttgctctcaaaaaatcctgggctcacttacgataatattcgagggtacctgaaaaatggggccagcgttgcaattcctgcgcgcatacatcagaaatatagtgaaacatacggcggacgcaacacgaaggaacggcaaagaaaagacgcctctgacttgcgagccgcagtagatagtaatttcgatgcaatcaagggagccctgttggaacagggggtttctgagaaagaactagagatagctcgtgcatccatgcacagaatcaatgtagaacaagggtggtacgaatga

SEQ ID NO: 327248 - DNA, 666 bp, Pseudomonas aeruginosa
atggacctatatggaattgttggcgcaggtgggttcgggcgtgaagtcattccattggcaaacaagaaccttcgcatggtcagccagggcaatttccgcttggtattcatcgatgatggcgatgtggcaaagaacgtaaacggctacgacgtactcaccaccgagaaattcctggcgcagaaggcgggcgaacgattcttcaatatcgccatcggcaatagcaggatccgcgagaaggtatgcaacatcctgctggatggtggcgccagacccttctcgatctcggcatcgaacgcagtcgtcctggacggcaacgaacttgccgaaggcagcatactctgcccattctccatggtgacctcgaacaccaggatcggaaagttcttccatgcgaatatctattcttatgtggcacacgattgtgagataggcgacttcgtgaccttcgccccttccgtgaaatgcaacggcaacgtcaggatagaaagtcacgcctacatcgggacgggggcggtcatcaagcagggaacgccggagcatccaatagtgatcggcgaaggtgccgtggtgggaatgggagctgtggttacgaaaagcgtaccggcaggtgccgtggtggttggcaatccggcgaagccgctggtgcgcaaggaagtggcggggtaa

SEQ ID NO: 327249 - DNA, 1308 bp, Pseudomonas aeruginosa
ttggagcaacatcaagcaagcacagtggaagagctcgaaatgttgtttgcgcgctttggtgacgacgtcatcttccgtggccaaaactcgcactacggtgaacccggtcagccgtctataggctcctcctttgatagaaaggggtgcattcctagcctgatgttgaagtggagccggtactgccaaaacgttctcgacacgtttatccaaggtcacctaggcgaccttgcttatcaacaggcgcttttgcagcactatggatggcgttcgttctacgttgactgtacctcgagccgagcagtagctgcgtggtttgccagccacagctactcggatgagggggttattgagatgatagaagactgcgaagaacgtccagtctggctgaggaagcgtatggccaattacgcccttaacgaaggggaaggccatttctatgtactggacaagcttgccgcatctcgagtaggcctagtcaatctcgccgccctgagtatagctgggtttagacctcgtacggtcgcacaatctgcttggctcataggcccgctgcgaaatagaaccatccctcaagactgctatgtctcacatataacagcccctcgtagcgtacttcgcgactatgcatcaaagtacggacttctcgataccaatgcgctcttcccctccgccactgaagatccaattcttaaagcgttgctgggcctaccttgggaagaaattaaaatcgacgaagacataaaaggcccacctgcattccgacgagcactcgacctccccgaataccactcgagccgcgtgaagattgcgccgccgagcacagccttctaccggggagcgcgaatcatcgacttcctgggctccattgatggtgaccctgaaggcgcgaagcttgtggaaattcccgaaattgcacttttcggctctgccgacaggaatacccctctccgcttccccaacatcgacaagctaattgatgaatatggatcggtggcatttgaagccgatactctaattaagcacgcccagcttggtgagaaaacgctttatcaaaagggcgtcggagtcgtgcgccacgagcccaacctttttgaggtctgcgagttagcggttagccacccagggctagcattgataggggccggcttcattcgcggatggttctaccgccgacaagcagacgggctctggactagagaagtccatccgttggaatgcacctgtggcaaggactacgtccatgggcaacacatatctgcactgcacatagctgaagagtatttgaaggatcctgattcgttctactga

SEQ ID NO: 327250 - DNA, 960 bp, Pseudomonas aeruginosa
ttgagcagcttagacgagttgaagaatctactattcaccgaccacgtatctgaagatactgtttcacgtgcagaaaggctgaagcaaccccatatccccagaagattattcaaatacagaagtttcgatgaaaaagaccgaaacatcgcagccttagagagtgatacgatctggtgctcaagcccattcaactttaacgacccttacgactgctccttgcatttcggattcaaaaaactagccaacataataagaagagcactggaaaacgtaaatcatatatttagctccgctccaaaacatcaatttcttcccgaggaaattgatgagatatgcaattctgacgacatcttaaaatccatcgccgaagtggtggacaagaaaggaattggaattttagccgcagccacgttcagatcacagctagaagacgtcatacatgagaaaagggacgggttagagaaggcccttaggggctcccttcaggttgcatcactctgcgaacgctacgactcgatgctgatgtggtcacactatgccgaggatcacaaaggattcgctgtcgaatacgatgtttcgagagatcagtctctgagcaagatcctatggccagtattttatcaaaaggaagtatttgatattagcgagacgatatttggcgaacattcagaaaaatataacgaagcatacatgattggcgcagcctccgtgaaatctgacgactgggagtatgagagggagtggcgattagttcggcttcgccaaaccaatggagatggatcaaacattagcaccccaaagcctactgctatttatttaggtgcttttatatccgaccagaacaaagagaagatagttaaaatcgcctctactcgtgagataccggtcttccgaatgcagcgtgagcgcggcaggtttaggatggaggcgcgggagatggttagcacgctcggcagctga

SEQ ID NO: 327251 - DNA, 207 bp, Pseudomonas aeruginosa
atggtggtgccgttaactcaggatcagctgtgtcagtttggcatcgtgagccggcagttcgtgagccgccatcttagcatctgggccgagaagggctgggttgcaacacgataccgccgcattgagctgctcgatccgaaggggctcacatcgatcttcgatagcgacttgcatccgatgatgctggccttgatgtctcaccgctaa

SEQ ID NO: 327252 - DNA, 1086 bp, Pseudomonas aeruginosa
gtggatagaaaactaaagagtagtctggaaaaggttgagatctgctttctgtaccttggcgcgacgcaaaggttgtcaaaggaaaatattaatgaccatgctaaaaggtctgttctgcggttcttttttgttcagattgggaatctattatgtctttctgctgtagcttgtaatcttctttataagcgcaaggtgattggtgttaggcaaaaggggtttattaaaaataagatcgcgattttaaggggcagctatgaaggctcctatgacgtgattcgagataaagttgcggcccacagccagccaatagatttgctttctcttttgagtgtttggaatgatattgatcagacgacgatagatgtgctttataatgatgttgaggagataaggctagagttctctaaatctgccggtatagattttcttgctcttgctgaacctgatttgcttaagtttgatagcaagatttctgctacgccagtttctatggcgccgtctgtatcagtagaccgcttgtcgctagctaagcaaaatgtcatatcgatggtggcgttggacgagagtcaggtcaaggctcagacaattttctctatcatggattttcttgagtgcgatttccttctgactgctgcggttgataatccggataccttttataagagaatggttttcgatattggttgggttcttgtgatattggatctatgctctttggtagataatttatttgaggatgatgagtacgatagatctctcttggcgtattggcgagagctgaatattaaagggcatgaattgctgcttctgctttctcaggaaagagatcaggaattggagaggcaggtgcgcaatattcgtaacaagcttggggcgcatattgactcggtggaaagcgtttcgagtttgattcatcttcttgagagggttagtcttcgggaaatacataattattcggtgaagattgtaaatgcattttgcgaagcctgttcactagatgttagaactaagccttttctcgtccatggtatggcgattaacgctgtctcggttgcatctgataatagtgttccattcggcgtgtga

SEQ ID NO: 327253 - DNA, 942 bp, Pseudomonas aeruginosa
atggactggaaaaaaccgattggggacttctttaaaagtactgcttatgattcagccgaacgcgacaaggtaaatgcgtacaaggcacagtatattcctcggcgactttttaagtatcgctcatttagcgggcatgctttagataacttcagaaatggtaccttgtggtgtaccactgcttctaattttaatgatccgtacgactctgcattaagctttgacgcttacagtgatgaaatgattgctgaagcggcggcccgtagccttggggtttactctgatgcagaggttgtagagatccttgcgagcgataactgcatttcggaagtgttctcccgggtcgttcagaagtatccagatttaaatgctgagttggtggagaaggttgtaataaatttgcggactgttcagagagatcatagagttaagatgatcgacttagtaaatggcgggctgcagtctacgactaaaatttgttcgctctgtgagaggatagattctgttgtgatgtggagtcactatgctcagaatcatacagggtttgctatagagtatgacttctcggttttgcctccttcagattttttggtgcgttcactttggccggtaatttatgataacaaactttatgatgccacggggcatctgggattggcgctgaaaaaggacgagccggcgagtttgtttttaatcggggcggcgcttcataaggcgcaagactggagctacgaggcggagtggcgtttggttattcctgagtcgcaagacgatcctcctcggagctttaaagcgcctgcgcctagtgctgtgtacattgggtcgcggatgagtgataaaaatgttgagtctgtattgtcaattgcacgacatttagatgtccccgtttatcagatgcagttgtcgcggtttgagttttcaatggaggcagttctgcgaggctaa

SEQ ID NO: 327254 - DNA, 369 bp, Pseudomonas aeruginosa
atgtccagactcgctgaattccgtgccgccgaaaaagcccttgcagatcaacttgctcacctggagtcgcttaagaacgacgcgggcctgaagaaagagatcgaatttgagcaaaagctggttgccctcatgggggagtacagcaagagtctgcgagatgtcattgctattcttgatccggaagctggtcaggaaggtcgtaaggttccccgtgcgactgccggcctgcgccgcgcacgtgctatcaaggtctacaagaatccgcacaatggtgaggttgttgagaccaaggggggcaaccacaaagtgcttaaagcgtggaaaagccagtatggcaacgacgcagtagagtcttggctccaagcttaa

SEQ ID NO: 327255 - DNA, 1206 bp, Pseudomonas aeruginosa
atgatcaaatttttatgggaagtgctcaagtacgcacctgttgtggctatcccgctaacaggttgcaccatcacggaagcgccacaaccgaccaccgcccctcctgacatcgtactgccaactcagacacttgagattaagtctccgccgctcgttttcgtctcagcgcccagccaggttggcaacgctgtagtgcctccaacagcctcggacgacaacgtgattattcgcacttattacgggacgaatcgaaaagcgaccggctcagcaactccgtctgaggccttcagcaccgaggaggccggagtcagttacggcgttgccgatgtcagcattcctaaagagcacagattggggcacttagagggccctatcatagacactcgctatctcaagaacccgagcaagcacgtcctgctgatggggataagaccacttgagaaggatgtcttgctcaccctgattcgccaagaggtggaaaaatcccaaggcaagagcgctctggtattcattcatggctacaacgtttcttttgaggatgcagctaggcgtacggcacagttgagctacgacctcggctttgaggggccaccaattttctacagctggccctccaagcaaaacgagatccggtacaaggatgacggcctggccatccagcactccattcccatgattactatattcttggaagacatctttaaaaaaacagatgctgacaatgtttatctcgtagctcatagcatgggaaatcgggccatggccgctgccatggcgaccttgatccaggatgaatccatccgccccaaggttaagcaattggtattgactgctccagacatcggcgcagacgagtttgaatcaaaatttgctcctgccttagccaaagccggcgcgcctataacgctctatgcctcgtcaaaggacgtggcactcaaactatcgaagaaatacaaccacaatcggcggcttggcgacaccaatggcagtgtgtccgtgatcaaagggatagagacgatcgatgcaagcgcagtaaaaaccgattttctgggtcactcctacttcgctgaaagcggctccgttatatcggacatctactacctgttccgaacagatttgaggcctggacaacgcttcaacatgaagggtatcgatagccccaacggcaagtactgggcgtttcagtcgaacctctgcatgccatag

SEQ ID NO: 327256 - DNA, 699 bp, Pseudomonas aeruginosa
gtggctatcatcgaaaatacaggcaatgcgtggagaccaagtagatcaattctactcttctccctctttaccatctggatcctaattttcatcttccatagggaaatcggtgcccgcatgggaatttcggaggtaaccgacatccagcgatccacaggactcacaattgcagcactagctatctcggccctagctcatgtcagcaagctttcctcgattaaactccatagccgacacgggggaaccgttctgacctgggtcgcctttccagttttcaccgtgctcctctggttgttctatcaagcagtgatagcggtctttccaattccgcctgaaccaggcatggatggagccaaagaggcactacttgccggctggccagcggcatttatgatggttctttctgcctgtttgatggcgcccataaacgaagagctcattttccggcagatactggcagatgtcttttggggtaccggtactcgtacccagctattcgtcgcgtggctaatctctagctccgttttcgccttcgcacaccttcagtatgagcagcctttgaccttcgcttggatattcgggctggggacggtctgcttcatggcgagagtgacttcaggcgggatagccctaccgattctcctacacatcatctgcaatgccctcgcctgcgcgtctatctattgggcgttgctctga

SEQ ID NO: 327257 - DNA, 657 bp, Pseudomonas aeruginosa
atgcaactggatcagttactgttgcgctcggccgtgcttgagggagagctcggcggcttccttggccttcctttggccaacagttccggacgtctccgcgcctcacaagcactcgcgagtctcggcttcgagcatgctcaaagcctgaagcacctagttgcggctggattgcacacatctgctgccgcccttctgcgagcgcagtcagaatcgctggttcgcgccttatggatgctctacgtcgcgtccgatgctgaagccgaattgatggtggctgagctgacgcatgagactgccaagcgcgcgagcaagtccccgacgttcagcaagatgctggacgaaatcgaggagaaagctccccacgcgccagttgcccacctccgcgagttcaaacactactcatggcgcccactcaactctttcgtgcacggtggcatccacgcagtgaatcgacatggaagaggcttcccgctggagctcgtgttaaccctggtcaagcactcgaatgggctcctagggatggccggcaacctccttctgatactcggaggagtcccgccagaagcaggaaaaatggcaagcatctatcgcgagttctcagactgcttcgcctcagcagaccctccctataggcgcaccacagatccagcttactga

SEQ ID NO: 327258 - DNA, 645 bp, Pseudomonas aeruginosa
atgaccgatgcccgaaagccctccatcgcagatctgctgattcataacgtcccgcgaaaccttgtcatgggcgtcgaagatgcctgcgatgcaggtgcgctccgtgcccacctggttacgaaggacatggacgacaagcatcgtaagaatgcgctagggcaaatgcgggcattccacatgaatgaactgtttgacgaggccctccaagctgccggcgcagttcacacctcgcttcggggaaatggggtcgtcgttggtaagtcggggatcttcaagttcagtcgagttaacatgtcctcggcaatgtggaacaactgcaggcgcagcgccatccgccgccagcttgcggaggccaaccagtcgatgacgcaattggtgcaaccatcgctgttcgcccaagaacctattaccaccgggacattcttcttcgtagcttgcttcagcggctcgctaacgattcagcccgagaaaccactggaaattcacatagcggtgcccgacgccaagatcgaaggttggctgttccgcgagcccttgagccaattcctggctcgctatgatgaggctccgacccagcagatcgacttggctaagccgaagctcaagccgggcctactcgaaactggacagcacacagcatcatga

SEQ ID NO: 327259 - DNA, 1200 bp, Pseudomonas aeruginosa
atgagtcgtggaattacagggttcgagccggggcggctgattcaagcgctcgcggctcgaggtctttctcaagtagcactggccaacatggttggcgtttcacctgccaccatcagcaagtggaagagcgggcaacaatccccggaagcagaggcgcttcagagccttgcccaggtcatcaatgtgaccccggagtggtttacccgccccttgccggaaaaatgctcactccctctcttccgaagcaatgcatcggcacatgccctcgcccgcaccatgctggaagcacggctagagtgggctcaggacatagcattggccctgagtgagttcgtcgacttccctgacgtgaacctgccccagcgtgcctttacagacccggagcagatcactagtgccgacatcgagcatgcagcagacgaatgtcgagaactctggggtcttggccgtcgggcagtacccgatcttgcaatggcagtcgaaggtgccggcgtaatccttgtgcgtgaggaaactggcgtatcaaccattgaaggtctgtcggcctggagcgaggccttggggcgcccaatcgttcttcttgcttcggacaagcaaaacggttttcgcagccgcttcgatctggcccatgaactgggccacctgatcctgcataagggaatcgatcgctctaccgaccccgcgcggcataagctaatggaagaccaggcccaccgatttgcgggtgccttcctgcttcctgcggaatcgttcgccatggacgtgaaaagcccggtcaccttggacagcttgctgctcttgaagcaacggtggggcgtttccgtggcagcaatggtgatgcgcctttgggctttggacatcattgatgacgatgccaaaggagtacttttcaaacgccgctcggccagatggggagtcaaagctgagcctggcgatgacggccgcgctccagagcaagcgcgcttgctcaagcgcaccattgagctgcttgcatcctcaggggttttgcctgtcgatgcagtgagcgcttacgtcggcctgtccagcaatgacattgagatgctgacgggcttaccggagcactatctcagtggaaatgctgcagtggttcatttggccaagctgaaaagcgcgttgggctcctctccgaacctctcaagtgagccgggagtgattcttccgttcaaccggaagcggtga

SEQ ID NO: 327260 - DNA, 180 bp, Pseudomonas aeruginosa
atgaaccgcatcattaaagccttaggctttggcaccaaaggtgactttacggccaaagtattgaaccgttacagctctaagaaggctgtgggctccttcgcgcgcgggctatttaaattagagaatgctgactcgatcaacgagcggtttgccgaagccaagcgtaaagtttctcgataa

SEQ ID NO: 327261 - DNA, 687 bp, Pseudomonas aeruginosa
atgccgaagcaaggacgcataaaacctctgtccccccaacttcctgccagcaactgcccctctcctagcaacctagcggctgctacttcgccttctactggctataacgttgtctatcagcaactagtcaaagatgaagacgacatcattggccagctcgcttattgtctttataagcaaagcaagcagcagtacctgcaagagttcgagaagcgaaacaataggcgccctaccgacgaagagctacgcaatcacgtcgactgcgcggaagtacctgccctcgacatgtacaaagagaaggcaacctcagtattctccgagttgctagctcaagctgctcaagaaaagcaggacgagctggaaaagcacttcaagcaaagactctggcagttcatcaacaggcatcagcatgagggctttggcgagcgcacttggcatctcattaagagcttgatgttcggtggctttggcggagttgttggaaacttcttaactaccgtcgtggtgcttctattccttttctgggcagcctcaagcgcttccagagatgagttctctaaaagcgccaaggagagcctcatttcaggccttgccgaaattgttggagttggcattagcattaattcggccaataaacagagctcgcaggctgcccccctcctaccggccgaagctgataaaaactga

SEQ ID NO: 327262 - DNA, 2145 bp, Pseudomonas aeruginosa
atgccgatgattccttatctcgtctcagagtttgaaaagcagaccatcagcaacctggttaccgagtgtttcggatctgacttccctgacatcttcaagaagccccaggttgggtacatttttaagtacctagagacgttgggcgcctcgtcagtgcttctagagctgaactacatcgacaaagactatctagaggatttctctcggtactacgtcaagcgctttggcaacaatggccatcagtgtgctcggatgcatttcttctctacagaagtgcaccatcgtcagatcaaccgcatcctagagggcggggagggtactgacgaactggtcaaggccttgaatgatgcctaccttggcttcatggtgatcaagccgttgcccaagaccttcattggtaaaacctgcttgaaggtcatgtcggatctgcatgctgtacccgggaagcagaagcggcggctttcgcgaaactatcgagtggatctgttcggtatcgagttgaatgtgcactcgattgcattccaggagcaggacaaggtggtagctgcatgcgcgacgaccgcgatctggtctgcgctgcactgcttgaagtggagagatgccaagacaatccactcgtgcagcgagatcacccagaacgcgatcaaccacatcgatgggtcttcaaacagctttcctaacaaggaactgagcaacaagcagattctgcgatcgctcgatgttgaggggttgcgtcatcactccgaagaccttgccttggttaagcaaaaagccttcctggcgacggtcatcggtcatatcgacagccatctacctttgctggtcacaggcgaggtgttcggggttaaaggaaagaccagaaaccttgagtcctatggtgctgggcatgcgattacgatcgttggctacaaggttgaaaacaacgaatgcgtcgtttacgtacacgacgacaggcttggcccctacgcgcgcgccaagctggtcagcttaaagaagtacaagtcaaagcgacatttcgttgagacctgggcgctaggtctgcagtggttgagtgctgacaaggagagctgggacgatccgcatgagctcatcgttccagagtttttggcgatccccgccgataaaaaggccaggttgccgttctactacgccaactttactgctcagatcattcaaatcgagttcaaaggcatctgccgagccattgacccaggtgcacccgggctagacctcacctacgacatcacgctccgtgaaatctccgccatccggcaggaagcgcgagattacatcgctccccggcgctataccgatccgacctctggtcaagagttcgaagtggataaggacgattacgcgcagtggcagaaggacaaggtcaaattcctaacgttgggctttgcgcgtttgcagtggcagattcagttcagccttgccggtcagaaggcctttagggtctttatcgacgccagcgatatcccgcaaggagatgcggtctcagcggtttttgaagacaacatcctcttcagcaaaccaatcctggagctcttccgagagcggggggcgttcgcctcgaccgatacggcgccgggacacttttacgagtcgttcctccgcaatttgcgggtaaaggagcaaactcatatggagtatctcgatgagaagtacggccccctccgcgcgccaatcaagctgaaggagcaggaattttctggtgggaacatttacaccaaccccaccaggcaggtgcttcacgatagtccgcgctgtcaattgaaggagctgcacgaggccttcgctaacccagacgttaagtacctcatatgggcgatctcacgcgatggggcgctgctcattggccaagaagtctggattgacacgaacgaagtgatgaagccgtgcggacatcccagtatcaccaagtttcgaccggcgcgtattgctggagagctttggaaatcttcggatggatggctgattaactcgaaatctgggcgctatagcttcgactacgaggactcgggccggctcttgggtaacgcgcttcagaagttccaggcctttttccctgacgacacctttgcgatcaagccgccggactccttaagtcctccggtggtagtcgttccagacctgccagcataa

SEQ ID NO: 327263 - DNA, 174 bp, Pseudomonas aeruginosa
atgagcttacaggcactgatcgctatctcccgtactcgcgaccttgatcgcgatagcaacgttcggctcgaggaagctcgccgtcgtgtgcaagcgtacgatcgggacattgagaagcagattgcctctaaggccgtgagccgcgaactgctggccaagacctgcagcctctga

SEQ ID NO: 327264 - DNA, 333 bp, Pseudomonas aeruginosa
atgtccggctcaagcaacaccgaatcattcggcaccttctcgtccaatgagactgcttgcgactcgcttgtcctcgatacccagctcgcttcccctaaagaggcggtcgtcgacctgatcgagataggcgacgtcctcgacgtagccctcggcaatgccaacggtctcgttacagtagaagtcttacggaacggccaggtagcgggtggcgtggcatccccaaacatccagcgcctgctgacgtgcatgaaacaaggcacggtctacatcgcgacggtctacgagaaaatcggtggccaggtcaaaatccggatctctccagccggcaactga

SEQ ID NO: 327265 - DNA, 168 bp, Pseudomonas aeruginosa
atggacgtaggaaaatcccgcactctcgcgtacgtcagttacgtgaagctggaagtcctcgagcgcggcgcgttgttgaaacacctccgcgaggtcagggtctgcgtaggcatgcagctcaacctgggcgcccatgcgtgcgagtgcggtcgctgcccgccctcctga

SEQ ID NO: 327266 - DNA, 678 bp, Pseudomonas aeruginosa
gtggtggtgatcaagatgggcccaatgggggccctggtctattcgaatggccagttctctcaggtgccagcgtacgaaacgacgcgggtgcgaaagattggttctggtgacaacttcgtagctcacttcgcctacggttggcttgaggcaggcctatcaccgcatgacgcagccgacgcagcatcgcgagccacggcttacttctgcgagaaccaaggcttcgccacacccaaaattctaagtagctaccagcctactccgctgcaggtctcagacagttaccgccaaggtaaccgccccaagatctacctcgccggccccttcttctcccttgctcagctctggcttgtagaggaggcacgcaacaccttccttgccatgggtctgcctgtcttctcgccgtaccacgacgttggccacggatcagctgccgacgtcgttcagaaggacattgacgccattcacgagtgcgaactcatgttcgctattggtgatgggctcgatgccggaactctctacgagatcggatacgcccgggcgctcgataggaaagtggtgatgtacaccgagaacgagtcagaggaagacaaaaagatgatggagggctcgcactgcatcctctgcgacgacttcgtcaccgccatctaccgcatggtttgggaggcagtagcgctatga

SEQ ID NO: 327267 - DNA, 699 bp, Pseudomonas aeruginosa
atggactggatagatctcaagagcccgtcacctaaaccgacgccagaagcgtacgcaccattcacatggcctgcaggacgctacagagcattggagcccgtcatcgaaaatgacgggccttcaaaagtacctactgtattgggggccttgcagctcttagatcgacgaagaagccagcgctccttcactcacctccgcccggaagagttatcggcgctgctctggttcagcgcccgcactcaagcgaccgcgaactccaacttggggtttcagcttgagcaacgaccatccccttctgcaggagcaattcatcctgtccacgtcctggtgctgatccctggcgataccgagtggtgcaggtatgacggccgggcaaatgccctgatcgaggtgccaggctcgtctgacattctccaaggactctccgtccagatggagtcgatggtgccggcgccggaagcgacgaaaactctactagtcgcagaaccaggtaagacccaagcgaaatacttcaaccatgaaagtctggtctggcgtgacgcaggagcgctgcttgcaacaatgggcatcgttgcagaagcactcaacctgagttactgcccgataggcagcacgggtgagccgtgggcaagcatgctcagctcagaaggaaatctggttggcgtaggggcagcattggttggtggccgggcacgctga

SEQ ID NO: 327268 - DNA, 771 bp, Pseudomonas aeruginosa
atgcagactggtgtggtgattctcggctcccaggtcttcagtaatgagttcccttctgctcacgctgaagtgttgcccggggtgaagtgggggctaattgaggcgttcccatctcctgcttactgggcctatcaagcgtgggccaacgagcagcaaaccacccctattaattacaagcttggaagcaccctccaggaagaggtcggtgcatgcttgctgggcgggcacggcattcctgcaagtgttggattggcggcgttctcccatctgaaggggaggggggcattcagcgggtctgtgccctctgaacaagagctcttctcttggctatccgagccactcgatgtctcgggacggccagtgcgctaccggtttgctcgacagaaggctcgctaccttagcgcagctctactgaagctcgactctggtatggcgccactgacatccgggcgagctctgcgcgactggttgacttcgatccccggcattggattcaaaacagcttcctggattgcgcgaaactggttggatgcggacgatgtcgcgattctggacatacacgttttgcgagcgggattgctgggtgggttcttctcggcaggcctcactgttgagcgccactatctgcaactggagcaggagttcctcgcgctgagtcgagggctaggtgtaagagcttcggtactggacgctttgatttggtaccaaatgatgtctgctccaggcgtcgttcacggaatgctgaaccctaaagagactcaggctgcctga

SEQ ID NO: 327269 - DNA, 723 bp, Pseudomonas aeruginosa
atgctcgttgacatcatcgtcacatctgacgatgatcgttgcatgagatatccaggtggtaagggcaagtgctatcagcgcttgatcaatctgatgcctccgcatcagacgtacattgagacgcacctcggtgcgggcgctgtactgcgtcataagaagccggcagctcgcaacatcggtatcgacatcgatccagcagttcatgcgttatggcagcaggacgggaatgacgagccttttgagttggtgcaggcagatgccgtggagtacctctcctcgttccccttcactggaagcgagctcgtctacgctgatcctccgtacgtaaccgaaacccgccgtcgatcgaagatctaccgattcgagtacgacgatcagaaccactgcgatcttctcgcgttgctggtaagcctgccatgcatggtgatgatctcgggctacgacaatccgctgtacgctgaaattctccagggttggacaaggtcaacgtttaccgcgaagacgcacacagggctcagggaagaaagcgtatggatgaatttccctccgtcgaatgtcctgcacgacacccgttacctcggccacacattccgcgagcgccaaaccatcgcccggcggcaagagcgattgcgcgagaaaattaggtcgatggattccattgagcgcaacgacttagtgcgctggatggtcgagacgtatggcagcgttcaggaggtggggtga

SEQ ID NO: 327270 - DNA, 963 bp, Pseudomonas aeruginosa
atggatgagaaaaatcttcaggtgcttcgtgatctccagaaggaaatggaggatcaaaagggcactaatactcctactcagccacctaggaagccgcacatcccagggaatggcttcagtgaggagtccgagcagtttttcagagacctagcaaagaaaaaattcagcgaatcctcatcctctgaacctcttcagcctcgagtaagaatcacctctgaagataagaagattggtagagagatcggcaaaacgaaaaagagaggcaagaagaacaacgcccctcccaaagcccctatctcagtaagccctccccccgaacaaagattactcaatagtcctctgctgaagaatgataaggcttcaccgcctgagctatctggaatacccattgaaaagctttcaacaagcttctccatccggggaaagcggggcgtgcgcgacgggaacgcttacttcaggggggtgccagtttcccttaaggactacaaagaactcagagaagctttcgaccacatgatctatgggaatgatcagaaagccctgcagaaaaagcaaaatgctctgatgctgtacctggccagatctcctggagacaaagaagctaggctgattcttgagaaggtcaacgcattggtggccgcagggcctgccaatagatttatccctgtcgagcgggggaaaaagcgcgaaacctgggtgagcttcgagcagctcaaatcccgagaatcaaacagtgcgcaacaaccgagtaactcagcgtccaagtggattaagaaaatctgtcactggtgtgagaaagaatttgcgattcacaaggactgggtatctccgccaaacaagtgcaagacctgcactgaaaagctacgactcacacgaatcagcaaagggaagggaactaaagctagttacacttccttcgtcattgtaagtggaggagcccccggtctaggcaagcgccactga

SEQ ID NO: 327271 - DNA, 1632 bp, Pseudomonas aeruginosa
atggagcaacgtttgagagtggtaatggcccagctgaacatccgcgttggggatgtgtacggcaacgttgagaaggtcatcgaagcggctcgtaaagcccgcgacgatctcaaggcccagattgtggtgttccccgagctgactctttgcgggtatccacctgaagatctgctgctccgctcaagcatgcaaagcaggatcgagaaagctcttctgcgcgtccgagaggcagcccagggcatcgttatcgtgatcggcttcccttgggtcgagaatggagcgcgctacaacagctgtgcagtgatttctgaaggtgaggaggtcgctcggtactacaagcagcggcttccgaactaccgcgtattcgacgagaagcggtacttcgagcccgggagtgggccgtgtgtagtcaagctactcggcgtgcaagttgggatcacgatctgtgaggacatatggttctccgaaccgctccaacaggcctgcgatgcaggcgcgcagatcatgctgaccctcaacgcatcgccgttccatcgtggaaagcaagcagagagagaggagctcctcgcgaggcgggcagatgaatgctccatcccgatgatttacgtcaatcaggtaggtggtcaggacgagcttgttttcgacggaaatagcttcgttgttgatggtaacgggaaggtcactcaacgagcccctgcattcgaagaagggctgtttgtctcggactttgaaatcaaagatgaatccctggtgcctattgctggccctgtttctgagttgctctctctcgaagcgagcgtctaccaggcgctggtcgttggggtgcgggactatgtgaaacgcaatggtttcaaaggcgtcgtgctaggtctttcagggggaattgattccgcactatgtctcgccgttgctgttgatgcattgggcgccgaaaacgttgaggcagtcatgatgccttaccattatacggcccagatgagtcaggacgatgctaaagaagaagctgaaattcttggcgtcaggtacagcgagttgccgattgctccaatggtagaagcatttctgcatacgctcgggccaatgtttgaaggtttacctaaagatactaccgaggaaaatcttcaggcacggtgtcgtggaacgatgctgatggccatctcgaacaagaagcggtatttggtactgactacgggtaacaagagtgaaatggccgtaggttacgcgacgctctatggcgatatggcgggcggattcgatgtattgaaagacgtgcctaaaactctggtgttccggctgagcgagtatcgcaataccctgggatacgttatcccgcaacgggtaattgatcgcccaccatcagctgaactctcgcctgatcaaaaggacgaagacagcttgccaccataccctgtccttgatgaaatcttgcgtctctatgttgagcaagactattcagccgacgccattgttgagcgcggttttgataaggagttggtgcacaaggtaattaggctcgttgacttaaatgagtacaagcgccgtcaagcggcagttgggccacgagttacagagcgaggatttgggcgagatcgccgatatccaatcacctcaggttggtgcattggcgaataa

SEQ ID NO: 327272 - DNA, 306 bp, Pseudomonas aeruginosa
atggggttcttcaccaagttcggcgacggcgcctgcgacctggctccgctcagcggcctggccaagcatcaggtacgcgccctcgcccgcgccctcggcgctccggagaacctggtggagaagatccccaccgccgacctcgaggacctgcgccccggccatccggacgaggcttcccacggcgtcacctatgccgagatcgacgccttcctgcacggccagtcgctgcgcgaggaagctgcgcgggtgatcgtcgacacctaccacaagacccagcacaagcgcgaactgccgaaggcgccctga

SEQ ID NO: 327273 - DNA, 2208 bp, Pseudomonas aeruginosa
gtgccgatcatcgcccgcttcacccttcgctcccgcgtcctggcggccctgctgctgtgcctctgcgccgccctgttctactcgccgccgggcgccgcggcgctgccgaacccgttggcggggagttcctccggtggcgagaaggtcagcgatgcgcagttggaacaatcgctgaaccaggtcatccagaccctggagaacgacaggcagcgcgccgacctgctgaaaaagctgaaacagctgcgggacgtgaccaagaaaggcaaggaaagcgagggtggggtgctggggctgatcggcgataccctgaccagcctggaaaagcagttccagggcgcgaacagcccggtcgcgttatggggcaaccagttccagctggcgcgtgccgaactcgaggagcgctttcccagctggcgcgacctgccggcgatggtcttcgatttttcggtggtgatcctcctctgggcctgcctggccagcgcgctgctctggctcagccggcgtatgcgcgagcgcttcggcctgtcggcggagttgccgcagcatccgaagacccgcgacctgctgctgttttccctgcgcaagctgggcccctggctggtggccttcctcatcaccctgtacctgtcggtggtgctgccggactccctgagcaagaccctggcgatggtcatggcctatgtgctggtctgcggcacgctgttctccgcgctgtgcgtgatttccctctcgctgctcagcggcccgcaccgccagcgcgccctggatatcctgcggcgccaggcgttccgcccgttgtggctgatcggcagcctcgccgcgctgggcgaggtcgcccacgatccgcggctgatcgccggcctcggcgagcacacctcgatctgcctgagtaccctggccaacgccagcgccgcgctgttcaccgcgctgttcgtgatgcgtttccgccggccgatcgcccacctgatccgcaaccagccgctggagcgccgcctcaagcgccgtagcctgcacgacctggtgcaactggtcggctcgctgtggttcgtgccggtgctggtgctggtggggatttccctattcgccaccttcgtttccgccggcgacagcagttcggcgttgcgccgggcgctggtctgcgcggtgctggcggtggtggcgatgaccgtgatcgggctgatccgccgccgttccagtcgggtcggcgccggcccgcgccgcagcgcgccgtacatcgagcagttgcaaagcttcggctacaccctgctgcacatcttcgtggtgctgttcttcatcgaggccgccttgcgcgtctggggcatgtcgctgattcgctatgcggaaggcgagggcgagcagatcagcatgaaggtagtcagcttcggcaccaccctgctggtcgcctggctgatctggatcctcaccgataccgcgatccagcacagcctcggcctgggcggcaagagccggccgaacacccgcgcgctgaccatgctgccgctgatccgcaacgtactgttcgccaccatcgcggtgatcgccctgatcgtcgccctggccaacatgggcatgaacgtcaccccgttgctggccggtgccggcgtgatcggcctggccatcggcttcggcgcgcagtcgctggtggcggacctgatcaccggcctgttcatcatcatcgaggactcgctgtcgatcgacgactacgtcgacgtcggcggccaccttggcacggtcgagggcctgaccatccgtaccgtgcgcctgcgcgacctggacggcgtggtgcataccatcccgttcagcgagatcaagagcatcaagaactactcgcgccagttcggctacgcgatgttccgctggccggtgccggcgagcatgccgatcgacgacgcggtggcgctggtgcgcgaggtcgcgatggagctgcgcagcgacccggcggtctaccgcaacctgtggtcgccgatggaattgcagggcgtggagagtttcgacaacggccaggcgatcctgcgcttccgcttcaagaccgcgccgatcaagcagtgggaggtccagcgggcgttcaacctgcgcctgcgtcggcgcctcgaccaggccggcctcgaactgtccatgccgcgtctcaacgtacagttgagccgggcgcccaaggcgaaatccgcggaaccggacgagccgggcacgccggcggacggcggcatctag

SEQ ID NO: 327274 - DNA, 573 bp, Pseudomonas aeruginosa
atgatcccgcgcattctcggcgccctcctgctgtgcctggcctgcgccgcgcaagcgggggtctacacctacatcgacgccgagggcaaccgcgtctacaccgaccagccgcccagcgggcgcaaggcccaacgcgtcgaactggcgccgggcaacagcgtggcgccgccgggcatacgctatcgtccgcccgccgcgccgctggaggtgaagccgccggcctaccagctactgcgcatcctcttccccgaaccggacgcaaccctgcgcgccaacagcggcgacgtcatcgtcaccgtcaccagcgagccggcgctgctgcccggccatcgctatcgcctgctgctcgacggcaagcctgccggagcgccgggacgcagcccggtgttcccgttgaagaacctcgatcgcggcacccaccaggtcgcagtggaaatcatcgatggcgacggcatgaccgtcgaaagcaccccgagccagcccttccacctgcatcgagtgagcatcgccgggcaacccctgccggaggtcgatacgccgctggtcagcgcgatagagccaagcgagcgctag

SEQ ID NO: 327275 - DNA, 603 bp, Pseudomonas aeruginosa
atggtccgtcgcgcgcccgtgccaagcgagacgccgccccagcctcggcagggcgcccgcccggcaccgtcgatcaaaccgtggcgtagggcgaataaccgcatcgcggttatccgccggttcggcagggctgcggcccttgcccggattttgggcagcgtgcaccagcaggcgacaaatcggcatcaatcgctggcggaaaagcccgctccgtcatttttccgcaatcgacttcccacaaacccctgggatgccgccaagcccttgatccacgggcttccagaggcattcatcaccagctcgcccacagacttatccacaatccttcaggaaagcgagcgcgccgccagcgcgctcatgagaattggcacagcccctgcattggagcagataacgaagatttcgggggcctcggtacaggcaggctggggaatcccctcttttacacccggcggcagacgcagcatccgcgcgcaaccgccacacccgtttcggggacctcggtacaggcaggctgagaactcccctcttttatgcccggcggtagcgcagcgatccgcgcctccgccctcccgtttggggacctcggtacaggcaggctga

SEQ ID NO: 327276 - DNA, 1614 bp, Pseudomonas aeruginosa
atgcgtagaaacgccgtcatccgctccgcgatcattccctcgctgctcggcgcagcgctggtcgccgccgttccccaggccttcgccagcaacctgatcttctgctcggaaggcagcccggccggcttcgatcccgcccagtacaccaccggtaccgatttcgacgccgcggcggaaaccgtcttcaaccgcctgacccagttcgagcgcggcggcaccaaggtccttcccggcctcgcggaaagctgggacgtcagcgacgacggcaagacctataccttccacctgcgcaagggcgtgaagttccacagcaccgactacttcaagccgacccgcgaattcaatgccgacgacgtgctgttcaccttcgaacgcatgctcgacaaggatcatccgttccgcaaggcctaccccaccgagtttccctacttcaccgacatgggcctggacaagaacatcgccagggtcgagaagctcgacgagcatacggtgaagttcaccctcaacgaggtcgacgcggccttcatccagaacctggcgatgcccttcccatcgatccagtccgccgaatacgccgcgcaactgctcaagcagggcaaggccagcgacatcaaccagaagccgatcggcaccggcccgttcgtgttcagccgctaccagaaggatgcgcagatccgcttcaagggcaacaaggactactggaagccggacgaggtgaaggtcgacaacctgatcttcgccatcaacaccgacgcctcggtgcgcgcgcagaagctcaaggccggcgagtgccagatcaccctcaacccacgccccgccgacctcgacgcgctgaagaaggacccgaacctgaaggtgccctcgcagccaggcttcaacctcggctacatcgcctacaacgtcacccacaagccgttcgacaagctggaagtacgccaggcgctggacatggcggtgaacaagaaggccatcatcgacgccgtctaccagggtgccgggcaactggcggtgaacggcatgccgccgacccagtggtcctatgacgaaaccatcaaggacgccccgttcgatccggccaaggcccgggaactgctgaagaaggccggcgtcgccgagggcaccgagatcaccctgtgggccatgccggtgcagcgtccctacaaccccaacgccaagctgatggcggagatgatccaggccgactgggcgaagatcggcatcaaggccaggatcgtcagctacgaatggggcgagtacatcaagcgcgcccatgccggcgagcatgacgccatgctgttcggctggaccggcgacaacggcgatccggacaactggctggcgaccctctacggctgcgactcgatcaacggcaacaacgtatcgaaatggtgcgacgcggcctacgacaagctggtcaaggctgccaagcgggtctccgaccaggacaagcgcagcgagctgtacaagcaggcccagcacatcctcaaggagcaggtgccgatcaccccgatcgcccactccaccgtgtaccagccgatgaacaagtcggtgcatgacttcaagatcagccccttctcgcggaacgccttctatggcgtagccaaccagccctga

SEQ ID NO: 327277 - DNA, 738 bp, Pseudomonas aeruginosa
atgaatgagaagattagggcgttcgctgttcactttctaatttctgcccttgtctgttcattgttttcctgttttgcgttttgggtttggtatccagggccgttgtcggctcgtttggggttgtggcatatactattgctgttggtgatggtggacgtcgttcttgggccgctcatgacctttatagtgtatcgtaagggaaagaacagccttttttttgatctttcggttatttgccttcttcagtttgtggcctttgcttatggtgtatggactattgctgaaggtcggccggcttggttggtgttcaatgtggatcgtttcgatttggttcgggtttccgatttagatcgagtgagtgtcaatgttcgggagcaataccggcgagctcctctgtggggggcgggcatggtggcagtagctttacctttgcttgcaaaggagcgtagcgagttgctaatggatgtcctgcggacgggtagagatataccttttcgaccagagctttatgtgccgcttgcccaacagaagcaggctatcagatccaagctaaggcctctgtcagagctttctgtgttgaatacacggtggcagttggtaggtacccttaccaaatatcccgaagctgattgctggctgccgctgagagttgaaaatgattctctcgtggtgttgatgaccagagaaacggcgcaaattgtggcgattgttgatttgcgggcctggaagcaaggctaa

SEQ ID NO: 327278 - DNA, 3090 bp, Pseudomonas aeruginosa
atgagcgaaggtcgtttcaacctctccgcactcgccgtgcgcgagcgctccgtcaccctgttcctggtctgcctgatctccctggcgggtctcgtcgccttcttcaagctggggcgtgccgaagacccggccttcaccatcaaggtcatgaccatcgtcaccgcctggccgggcgccaccgcccaggaaatgcaggatcaggtcgccgagaagatcgagaagcgcctgcaggaactgcgctggtacgaccgcagcgaaacctatacacgctcggggctggccttcaccaccctgtcgctgctcgacaccaccccaccctcggaggtgctcgaggagttctaccaggcgcgcaagaagatcagcgacgaggccaagacgctgcctaccggggtgatcggcccgctggtcaacgatgagtattcggacgtcaccttcgccctgttcgcgctcaaagccaggggcgagccgcaacgccacctggtgcgcgacgccgagaccctgcgtcagcgcctgctgcatgtaccgggcgtgaagaaggtcaacatcatcggcgaacaggccgagcgcatcttcgtcgagttctcccacgagcgcctggccaccctgggcatcggtccccaggacgtgttcgccgcgctcaacgggcagaacgccctgaccccggccggctccgtggaaacccgtggccccgacgtgttcctgcgtctggacggtgccttcgatgagctagagaagattcgtgacactccgatcatcgcccaaggccgcaccttgaagctttccgatgtcgccacggtcaagcgcggctacgaagacccggccacctttctgattcgcaacggcggcgaaccggccctgttgctcggcatcatcatgcgtgaaggctggaacgggctcgacctgggcaaggccttgaacgatgaagtgcagcagatcaacgctgagctgccgctgggcatgagcctgagcaaggtcaccgaccaggccgtcaacatcagcgcgtccgtcgacgagttcatgatcaagttcttcgtcgcgctgctggtggtcatgctggtgtgcttcgtcagcatgggctggcgcgtcggcgtggtggtcgcggtggcagtgccgctgaccctggcgatggtcttcgtggtgatggccgccactggcaagaacttcgaccgcataaccctgggctcgctgatcctcgcccttggactgctggtagacgacgccatcatcgccatcgagatgatggtggtgaagatggaggaaggctacgaccgtgtgcgggcctccgcctatgcctggagccacacagcggcgccgatgctctccggcaccctggttaccgccgtcggcttcatgcccaacggcttcgcccgctccacggccggcgaatacaccagcaacatgttctggatcgtcggcatcgcgctgatcgcttcctggctggtcgcggtgatcttcacgccgtacttcggcgtcaagctgctgcccgagatcaagaaggtcgagggcggtcacgacgccatctacgacactccgcgctacaaccgctttcgtcggattctgggtaaggtgatcgcccacaagtggctggtcgcaggttcagtgatagggctgttcgtgacggccgtgctcggcatggcgctggtcaagaaacagttcttccccatctccgaccgccccgaagtcatggtcgaggtacagatgccttatggcacctcgatcctccagaccagcgcagctgcggaaaaagtcgaagcctggctggcccagcaggcagaggcgaagatcgtcatggcgtacatcggccagggcgcaccgcgcttcttcatggccatgagcccggaactgccggatccgtcgttcgccaagatcgtcgtacgcaccgacaacccggatgagcgcgaggcactcaagcacaggctgcgcaaggcgattgccgagggtctggccagcgaggcgcaggtgcgcgtcagtcaattggtgttcggcccctactcgccctacccggtggcctaccggattagcggcccggatccgcaacgcctgcgcgagatcgccagcgaggtgcgccaagtgatggatgccagcccgctgatgcggacggtcaataccgactggggcacccgcgttcccacgctgcacttcaatctgcagcaagatcgcctgcaagcggtggggctgacctccagtgccgttgcgcagcagctgcagtttttgctcagcggcgtgcccgtcaccgccgtacgcgaagacatccgcacggtgcaggtcatggcccgtgccgctggcgatattcgcctcgacccggcacgggtgatggatttcaccctggccggcgccaatggtcagcgcatcccgctgtcgcagattggcgaagtggaggtacgcatggaagagccgatcatgcgctggcgcgaccgggtgccgactatcacagtgcgtggcgatatcgccgaaggcttgcaaccgccagacgtgtcgaccgccatcagccagcagttgcaacccatcatcgacaggctgccgagcggctatcgcatcgagcaagcgggctccatcgaggaatcgggcaaagccagcaaggccatgctgccgctgttcccgatcatgctggccgtcacgttgatcatcatcatcctgcaggtgcgctcgatcgccgcgatgatcatggtctttctcaccagcccgctggggctgatcggcgtagtgccgacgctgatcctgttccagcagccgttcggcatcaacgcgctggtcgggctgatcgcgctgtccggcatcctcatgcgtaacacgctgatcctgatcgggcagattcgccagaacgaagcggcgggtctcgatccgttccgcgccgtggtcgaagccaccgtgcaacgcgctcggccggtgatcctcaccgcgctggcggcgatcctggcgttcatcccacttacgcattccgtgttctggggcaccctcgcctacaccctgatcggcggcaccttcgccggcaccatgctgaccctggtgttcctgccggccatgtacgccatctggttcggcatccgccccatcccccacgagccactcgcgcaggcacaacctgcatga

SEQ ID NO: 327279 - DNA, 1086 bp, Pseudomonas aeruginosa
atgctggctgagggcatcgatccgattgcgtccaagcagcaggccaaggccgaggcggttgtcagagggcacacctttgagcgcgttgccttgggctggcataaggaaatgtccgtgaagtgggcgcctggccattcgaggaccgtgctgagtcgtttgaagactcacgtattccccctgcttggcgcacgggccatcgttgatctggataccttcgacctcatgcaaccgcttgaggcaatcaagaagcgcggcacgattgatgtggccttaagggtacaaaactaccttcagagcatcatgcgtgaggcgaagcggctgcggctgatcacggtgaaccctgcatatgaccttgagggcttcatcagcgcgccacgggttacgcatcggcctgcactcccgctctctcgtttgcctgagttgatggaccgcatcgagcactacaagggacgcacgctcactcggctgacagtcatgctgtcgctacacgtgttcgtgcgctccagcgaattgcgcttcgcacgttggagtgagttcgacctgaagcgcggcatatgggagatacctgacacgcggcccgcgttggacggcgtcccgtattcgacaagggggacgaagatggcaggtgacattcatcttgtccctctgtcaccgcaagcggtggcgttactcgaacagattcatgcgatcacggggtacttcgatctggtgttcaccagtgacgctcgctcgtggaagcctatgtccgagaacacagtcaacagcgctttgcggaacatgggctacgacaccaagaccgaaatctgcgggcatggcttccggtccatggcgtgcagtgctttggtcgaatccgggctttggtcagagacggctattgagcggcagatgagccacagggagcgtaacaacgttcgggcggcgtatatccacaaggccgagttcctggaggaacggcgaatgatcatgagttggtggagtcgttaccttgacgcgaaccggcaggaacacatttcgccgcatgagttcgcgaagcagaccggggtaaacgtatcgagccttagagcaaggcgtggcgcagtcgagtga

SEQ ID NO: 327280 - DNA, 981 bp, Pseudomonas aeruginosa
atggcattggtgggtagacgcgatggccgcaatttcggctacggcaggcaactgagctatgcagggccgcaggctttgaaagacatgttcggcggcggccactacggcacggtcaaagcgcacagtgatcgatggttggcattcgtcaattggtgccgttccgaacaggggcccggtatcaatgatgcgcggcagattgatcgaaaggtgttggccgactacgcagcgtatctgcgcgacatggttaggcgcggtgacctcgctgtaagcaccgcacaaaaccgactatccagcgttaacaggaccatggcggcgcttcgcggtgatcagtacgtgaagttgccaagtccgagcaaggcgttgggtatgcagcgcactggggttcgccagtcggtgccgcagggccaagaccgcgaacaggtgaagcagatcgtcgatgcgctttgcagccttgaccagagacgggtcgcagcgatcatcctgctggcgcgagccaccggcatgcgcttgcgcgaggccatcttggctgacctgccacggctgagccgtgaggctaacgacctaggcaggatcaacatccaggatggcaccaaaggtggccgctccggtgcctcagcgccacgttggattacggtggacgaccatgttcgaggtgcccttgggtttgcatggcaggtgtcgcctgcaggtagccgcaacctgattgcgccacacgaaagctatctgaatgttctgcaagaaatcattcgccctgcgcgggacatcctccatgggcacaacctcaaaggcttccatgagctaagagcggcatacgcttgtgagcgctatgagcaagtcacccaacaccgtgcgcctatcaatggcggccacttatgccaggtagataggaaccttgatcgtgaggcccggaagcaaatcagctacgagctggggcacgctcgggccgatgtggtagctgcttacattggagggcgcccgtga

SEQ ID NO: 327281 - DNA, 1869 bp, Pseudomonas aeruginosa
atggatttttatgatattggctttcctggttctgcacggcaagcgcagacggcgccggaggcctatgaatctgcacgctcagcaatggatgccatcattgcttataccgaccctgaaaggaggtttgaccgagttccggtaaactgggttgcagcggagcaatcattgctcggagaggatcaagttctccaaattagcaatgctgaatatccgattttttatagttcgctggtggagaccggttggtcaggtaacaccgtgcgagccaaggttgtcgaatatggtctcgcacgctggggcacgcttcatgaggcaatcaaatccatggcgattaggtacatacctggccatgccaaaggtgtttcatatgttcacctccaaggcgtcttaagagattttccagcgcttgtaaacgatggcgagctatttgatgaatttattcactcaatccaatttaaatgtacgcagcttgaaatagcgctgactcaactccgggttctacgcggaaacgaaacgcatgttactcgagtacttcgtgcaataggagcagctggctacagtgaagcacatcatcaatttgctctgctgtgcgctgagtgggctggagaaagtgcttacgggaaactgcaatacgcgttgtggtatgacagcactcaacacaatagacatgagcctcttgttgaaatctatattcctccccaagtggaaaaacttgccagtttgttcgttgagtttggcttaggtccaaaggcggctagaaatcattacaatctatcgtatatgtcgagcgcggcaatagcttcgtggcggaatgagcttgcagccgttgttggcggcgatcgtgagctaacagcagcggcgctggaaacgttttttgttatggggccggctggccatgatcgtgagctactatccgcgaccgtaaaactcgcggagctactacccaaagaagccttggtagcccacgtaagtaatgaaacaacactagccaaccggcgggctcgggcctgtctcggcatcatagaggaatcggatgatgtcctagatctaatgcttcatacgtatgggggcaacattgaatatgatgtaaatttgaagtctcagccatctagaacctggttaggagactctcgtatagagcagctatttgagtacactgtcaatgagatggcgaagattgttggagacgaaatctttgataatctgcatgcgggggaagaaacacatttaagtgagcttttcaaagagctgaagttctgtcttgcaaagctatcacgtcaacttgcctacgtggccaatgagttggacgcatctgagcaattcagttttagtctttcgcaaaggatcatcggaaagccagaagagggtggggagggagtcgaccattctcgtttttcaactgatgtgtgccttatcttcaaagccatggacgatggggtttgcttcagtgagcgagctacgttgattcaggccaagagacttcaagttaccaatggacgggcattttcttactcactaaaacgcgatcagctcgatgatatcgctacacaaacgcttgcaagctttttactactcttgggtccagcctatgggaagtgccgactgccgataatgccagccggactcatggtagatctaatgaagaataacagttccatgtcggtgtcaccatctagagcagccggattaggcaagagttttggtacttggttgttggaggatgttatcggactctggacgggcgataaggctgcaaaagttatcgagaaggcgcttggccgagaaaatggccgaccgaggctaattttcgagcttatcgtagagcgccaatcaaaaggggctgacggctggactggcccagttcgctaa

SEQ ID NO: 327282 - DNA, 888 bp, Pseudomonas aeruginosa
atgcttgacttcacagaactttcagataacggccaagaccttgagcttctgattcgagagctactattcagcattgggtacaaagtctattggagtggtcgtggtccagatggcggtcgcgatcttatatgtatcgaagagagcaatagcatatttctaaaaacatcgaaaaaatggttgattcaatgcaagcataaggcaagatcaggaaatagcgtcggaactggcgatctagatgatatcatcacaagttgtgttcagcatgagtgtgatggttatgttttggtaacatcaacccaaccctcttcggcagtggtctcgcgacttgaacaaatcacaagcaatgacaaaacaccaattattgccacgtattgggactcggttgagttagaaaggcgactaagaaccgctcaacagtggaatatagcgcaacgcttcttcccgaagagtgccagtgggtggcaaatattctcaagcgaaagaccaaaccattggacggcgaatttcaatggatgttattttcatataacaaatcgcattggatcaagctgtcaattctatctaaaaactatcgagtctaagctagagcaactgattgcatgcccgctcccggaaaaacatttcttcagattgcgaagcgtatattttgacgataagcatggcacgttcgtctggtacgttgactatatgcatccgaatgcacagcaacctctctataccgaagaacaactagctgaagctctacctcaagactggaatgatagttacgacataaaaattagaggctatctagagcatagcgatcattatgaccaagatcattatgacttctatgatcgttacatggggcagttcattcttggaatgtatcggccgcgcggcgcatag

SEQ ID NO: 327283 - DNA, 957 bp, Pseudomonas aeruginosa
atggcaaacaacaactatcgcccatcaagcactatcttgtgttttgagaatgttaaagaggcatcgctgtattttgatcgcgtgcttcctttgagcatgggacgaatgcgtggcgattcgactgtcggcgacattctggttggctatccagaagaagttccatctgccgccctttcccatcttattgatgggatcgaagggaatacagttacctatagtcacgccactcgcgtaatggaattcaccgccaacagatgggttgaattcgctagagaggcggagccgtatgcgaggctatggccatccgaccccaggcgtcccaacaatgatgacgttcgcaaccaataccaaaagctccaagaatcctatttcgcagacgcgtcgattcctggggttactccgattcgcgaggcgttccgccgctacgcgaagggtatcgggttcgatcatttctgtgttgctgttccttcggcaattgggtcaggcggaagtcaatgcgaccctagcattaccctatctaagctgaatctcattgatgctagtcaagccgaatggcgtcaaatcatagagcttcgaaaagacactgtttcgcaccggaagttagcgagattacggctgttcattcatgagaattacgcagactgctcattcgcctacatagaggacgatctttcacagcggctcgaagaatatgagcgtgtgacgaaaaaatttgggttgaaaacaactttgtcctcactgtcgctactgcttgacgctaagggtctccagacatctgctggaacgggtcttgtggctgggctgcttggagggccgcttattggcctagcagccgcagcggcgattgaagttgggaagattgcagtcaatatcgcggagaagcaccacgacctgaaagactggcagtcgggacatgagctcgcgtttatctttgacacaaagaaggccctatcttga

SEQ ID NO: 327284 - DNA, 2079 bp, Pseudomonas aeruginosa
atgcggatcgagcgcgttgagattcaaaatttcagactgcttcagaacgtctgtcttggcctagaagacggcacaacactgatcgtcgggcgcaacaattgcggcaaaacctccatagctgaggtgttccgccggctcctttcagatcggactccctctttcaggcttgaggatttctccctggggagtcacgaagagttttggacggcattcaatgcgtttcacggcggaatagctcgctccgacgttactgccatgcttcccgttgtcagggtcacattggacatctcctatgacgtggatgccccagacctggggcagctcagcgaatgcatagtagacctagatccagattgctcttgcgcgcgcatcgtcctgacgtatggaccgcgggcgacaggccttgagtcgcttttcgcggaaatgaatgcccccgacactctgcaggaggatcaacgtcttagcttcttcagcctgataaagaagcgtttggcgggggcctacgagccccgtttggaagcggttgaccccaatgatcctacgaaccgcaaggacctcgacctaaaatcactcaccacgttgatccgcggcggattcatcaatgcgcaacggggcctggatgacgatacacaccgagagcgcgatgtacttgggaaggtggtggaggtactgttccaatcggcattgactgaccccacagatcccgagaaacgaactacggcggagcagctccatggagcggtggagaaaattcaaaaggagctgcatgacggtttcaacgctggactgacttcgctgctccctacgttcgagcttttcggctacccagggctagaagacccaggcctcaccactgtgacgaccttcgatgtcgagcgcctgcttaaagaccacacgcaggtcagatacaggggggtaaacggcctgaccctcccggaaagctacaacggactcggcgtccgtaacctggtgtacatccttctgcaattactgaaattcttcagagagttccaagctacgccggcagccgcaagcgtacacctcatcttcattgaagagcctgaagcccatttgcatccgcaaatgcaggaggtcttcatccgacaattgcacctgatcaagggcgcgttcgagcagcagctgaatggcagccgtccgtggccagtgcagtttgtaatttccacccactctccacacatggccaacgaagcgcgcttcgaaaccatgcgttactttctctctgtgaccgatgaaaacggaatccggcagtccaagatcaaagacctgaggcagggcatgggtgaggctcctgcaccggacagagattttctctatcagtacctgacgctcactcgatgcgacctgttctttgcagacaaagccatcttgatcgaggggacttcagagcgattgctgctaccaaccatgatcgccaaaactgacgcggctgcggtgggtgaacctcagttggctagtcagtacttgacggttatggaggttggcggcgcgtatgcgcaccggtttcatgatctactcaccttcttggaactgcgcacgctgatcgttactgacatcgactccgtcaaaccgaatgcagatagaaagcggaaagcttgtctcgtttcagagggtctgtttacgagcaatgcgtgcctcaaagactggtttgaggccgaagtcactcctgcccaactgctggcgaaaacgccagcagagaagaccagagggttgaggcgcatcgcctaccaagttccggaggggaacgaacccgggccttcaggcagaagttttgaggacgcgttcatcctggcgaaccttgatcggtttcaacttgggcagggcgatgtcgcatccctagcttacgagcatgcggcggaccagaaaaaatcagcttttgcgttgaagtacgcgatcgatgatacgaactggaacgtgcctagatacattgctgaaggattgcgttggctagcagttggggcgccgatcgttgatgcccaaatggctgctcgggccatggccgcagtagttgaggttgttggtgaggcagtggctgctgaaggagagcaaggcgatgcctga

SEQ ID NO: 327285 - DNA, 1755 bp, Pseudomonas aeruginosa
atgcctgacaatcacgaaagtcccgcggacagagcagggcgagaagcgctggagcgcatgttcgcttgtttggatgaaggtctaagttttcgcctggaagcaggtgctggggctggtaagacctattcgctggagaaggcgctcagtcgattgattgaacaccgaggtcctgcgttgatccgggagcgtcagcaagtcgcgtgtatcacttacaccaatgtggcgaaagacgaaatcatctctcgctttcaagcgcatcctgcgatccgagccgagaccgtccatggcttctgctggtcgttgctcagagattttcaaacatcactgagaggatttcttggcgctgaagctttttggcgagagcgctttgagccggtgggtggcgtaggtaacaggcgcatccattacgaaatgggtattccacgcgtatcggaggacgaggtctcgattcggcacgaagatgtcctgacattgatggttcaggcgcttccgtctccgaagttcagggccgtattgacttcccgatacccgatcctgtttgtcgacgaatatcaggacacagatgaacattttgtcggtgcactgaagtcgtggtttctagatcgcggtgagggaccgatgattggcctgtttggtgaccattggcaaaaaatctacgacgagggctgcggcctggtcgtgcatgacgcccttcagccgatcgaaaaaaatgcgaatttccgctcagcatcgcggattgtcgatgtgctgaatgagatgcggccaggcctgcaccaggaagtgagcgatcctgacttgatcggtgaagcccgagtgttccacaccaacctctggcctggagagcgacggacaggaagcgggggaggacactggactggcgataccagtcctgaggctgctagtgcctacttcgaatacttgaaagctcagctcagcgtggaaggatgggatttctctccgaaaacgaccaaaatcctcatcctgaatcacaaaggcattgcccgtgagcaggggtactcctcgatccgtgaaatttatgggcagtacaatgatccgtggctgaagaaggaagatcctcacatcaagtatttggcagatcagcttgagccagcgtgtgtcgcctaccaacagcgtcgatacggtgcgatgttcgggcacctggcaagcgatcggccaacgattcgaaggcacagcgataaagtcgcttggtctgaggcaatggatgcactcctcgaattgaggttgaccggtaccatcggcgaggtgattgactacatcatagccgtgccgcagatgcagctccccaatgctgtgctacggcatgagcaagggttacaggccgccggtgttgaaccaggtgaggacgagccacgcaggattacccagcttcgaaagctcagggcagtaccttacacagagctgatcgcgctagaccaattcattgatgggcatacgccattcgcaacaaaacacggggtcaagggagccgaattcgaaaatgtgatcgttgtgttggggcggggctggaaccaatataatttcgctgaaatgctcgagtggtttcagccggggccaccgtcgaacaggcgtgaaaaattcgaaagcaatcggaatctcttctacgttgcgtgctctcgtcccaaggttcgtttggctctgcttttcactcaactgctgagccaggcagcgcttgctcagatcaccgcgtggttcggcgctgagcatgtattcgagttgcctgctaaccctagttga

SEQ ID NO: 327286 - DNA, 1734 bp, Pseudomonas aeruginosa
atggtccagagcgccccagccagcgaaatcgccgccctcatcctgcgcggtttcgacgattaccgagagcagttccgcgagatcaccgacggcgcccgtgcccgcttcgagcaggcgcagtggcaggaagcgcagcgcgcctcggcgcagcggatcaacctctacgaggaaaaggtcgccgagacggtggccgggctgcgcgcggggctggccgacagcgagctgctggacgtggagcgctggccgatcatcaagagcgcctacatcgcgcagatcgacctgcggctggacgacgagctggccgagacctggttcaactcgatcttctgcgggctgttcagccacgacaacatcagcgacggcacgatgttcgtgcacaccacccggccctcgctgcgcgcccacgcccgcgcgccctacacccgcacctaccggccgggcggcgacctgcgccaggcgctggagaatatcttcgacgactaccgcttcgacgtgccctacgacgaccgcgagcgcgacctcgaacggatcgacgcactgctgcacagcaacctgccggactgggtgtgcaaggacccggacctggccatcgagctgatcggctcggtgttctatcgcaacaagggcgcctacctggtgggccgcctgttcaccccggacgagcagtggccgctggtgttcccgctgctgcaccgcgagggccacggtatccagttcgacacggtgatcaccgacgaggcggaagtctcgatcatcttctccttcacccgctcctacttcatggtcgacgtgccggtgccggccgagctggtggccttcctcaaacgtctgctgccgggcaagcacctggccgagctgtacacctcgatcggcttctacaagcagggcaagagcgagttctaccgcgccctgatcaaccacctggcgaccaccgacgaccgcttcgtcatggcccccggggtgcgcggcatggtgatgagcgtgttcaccctgcccggcttcaacacggtgttcaagatcatcaaggaccgcttcaacccgtcgaagagcgtcgaccacgccacggtgatccagaagtaccagttggtgaagaaccacgaccgggtcggacgcctggccgacacccagcagttcgccgacttccgcttcccggtgagcaagttcgagccggagtgcctggccgaactgctggaagtggcgccgtcgacggtggtgatggaaggcgacgtggtgctgatccgccactgctggacggagcggcgcatgaccccactgaacatctacctggagaacgccagcgaggcgcagacccgcgaggcgctgaacgactacgggctggcgatcaagcaactggcggcggcgaacatcttccccggcgacatgctgctgaagaacttcggcgtgacccgccatggccgggtggtgttctacgactacgacgagatctgctacctcaccgaggtgaacttccgctacatccccgagccgcgcttccccgaggacgagatgtcgtccgagccctggtattcggtggggcccaacgacgtgttcccggaagaattcccgcgcttcctgttcgtcgacctcaaccagcgccggctattcgccaagctgcacggcaacctctacgacgccaaatactggcagggcctccaggagcagatccgcgagggcaaggtgatcgacgtgtttccctatcggcggcaggagacgcctgagcagttgctcgggtag

SEQ ID NO: 327287 - DNA, 672 bp, Pseudomonas aeruginosa
atgcatatccatgtactcgtcgtcgaagacaacttcgatctcgccggcaccgtcatcgactacctcgaggccgccggggtggtctgcgatcacgcccgcgacggccaggccggcctcaacctggcgcgcgccaaccgctacgacgtgatcctgctggacatcatgctgccgcgcatcaacggccggcaggtctgtcgccagctacgcgaagccggcctgcagaccccggtactcatgctcaccgccctggataccctgcaggacaagctcgacggcttcgacgccggcgccgacgactacctgctcaagcccttcgaactgccggagctgctggtccgcctgcaagccctcagcaggcgccgcagcggccaggcccagcgcctgcaggtcgacgacctggtgatggacctcgacagccgccaggccagccgcggcggcacgcccctggcgctgtcccccaccgcctggaagatccttgagtgcctgatgcgcgccagccccgcgctggtcacccgcgagcagctggggcgcagcgtctggggcgacgaaccgccggaaagcaacaccctcaacgtgcacatgcaccacctgcgcagcaccgtcgacaaggggttcgccacccctctgatccataccctgcacagcgtcggcttccagctggagcgcaaatga

SEQ ID NO: 327288 - DNA, 318 bp, Pseudomonas aeruginosa
atgagcaccactaacccagagtccgcctataactacaaggtggtccgccaattcgccatcatgaccgtggtctggggcatcgtcggcatgaccgtcggtgtcctgatcgccgcccagctggtatggcccgacctgaacttcggcttgccgtggacgagcttcggccgcctgcgcccgctgcacaccaacgcggtgatcttcgccttcggcggttgcgcactgttcgccaccagctactacgcggtgcagcgcacctgccaggtgcgactgttctccgacaccctcgcctccttcaccttctggggctggcaacggtga

SEQ ID NO: 327289 - DNA, 1185 bp, Pseudomonas aeruginosa
atgagtccattgagtataattcctgcactggtatgcgttgcgttagccttgctgacctgtgggatcatccgctacctgaaacctattcctctgcccctctctcgcttcagtactatagatggactaagaggatacctcgcgttcttcgtttttctccaccacgcagcgatctggtattactttctacgaagcggtgcttggcaagtgccgccatcaaatctttatactcattttggtcaaaccagcgtaagcctgttcttcatgatcacaggctttctattcacccataaattattacaaagtaaaaaccgacccatagactggctgcagctttacatctctcgatttatgcgaatatacccggcatatatttttgccattgcgattatgtttacaatagcattcttcatgactggatatactcttcatgagtctgtgctttcgttgttaaagaaaactatccaatggggcgctttcagaactccggatattaatggcctcgtagaaacgagacgaataatggccggagtaacctggacacttccttacgaatggctgttctatctctgccttcccgccttgagccttctgatcgggcgtagagctccaatgactgctctggccacgaccattatcattgcgtcgcttatcctcagcttctggagaccgtctcccatactcctatgtatgttcctcgcaggaggtatcgccgcactgactgctaggtcagaatggttacagtcgctttcaaatggcagactgggaagcttattatgcgtgtgcctgatcggttccgctgtcattatctttccgacagcctataccttgggaccagcaattcttttaagcctagcttttatcttgataaccgcagggtgtagcatattcgggttactgaacctcagcgtatctcgcttctttggggaaataacttatagcctttatttgctgcatggtatcgttctttatgtgatattcgaaatagtcttgggaaatcaagcggcaaaagagttcgacacacggcaacactggatgatcatttatgcagctactccgatcactgttgttttatcttatctttcttttcggtatatagaacgcccatccatgagtgcttcaaaggggctcggagcccgaattaaaagtctattgcggaatacttaccgaccgcgtaccaacagctaa

SEQ ID NO: 327290 - DNA, 156 bp, Pseudomonas aeruginosa
atgggtggtcattcggcaaaatgcatggagcttgttatcaaaggcatcctcgaggtcccgtcgatcggagaggtaacgctggtagtcctcgtcctcggcgaataccacttggcgactgtgtccccgctggaccatgtgaagcggataattcggtaa

SEQ ID NO: 327291 - DNA, 333 bp, Pseudomonas aeruginosa
atgagtagcctctacaacataatagcagttctgtgcgccatcactctggtagtcttagagctaaaaagaacaacattcataagaattttaaagaaagaagagctaaacacctgggagaagcttggcaggccatcagggtatttcttatcctatctagtaaaaatagacgacttcaagcttgagaaatttatattccgaaatcaatacaattccttgaaaaataaagaaatcaggaaaagagggaggcaactcctttacctgcaatcaacttgcctcaccttaattattgcactcatcgctttgatgactttacagttcacaataaaaaactga

SEQ ID NO: 327292 - DNA, 525 bp, Pseudomonas aeruginosa
atgaacgcaaggatcgccgcattgggactgctcctgcccctggccgccggcagcgccgtggccgcggaggagggcagctcggtcaaggatgcggccaaggccgcggtgtcctcggccatcgagaccggcaagaacctcctcggcggggtcagcgagggcatcaccagcggccgccagtcggcccagggcgccgatggcgccaaggtggtctccgacaacgccggcttcgccgagatcggccaggtcgaagtgctcaagaccgagccgcgcgaccagcaactggccgtcaccctcggcttcaagaacgacagcgacgccaccgtgcgcctgatcaacctgacccagaccggcgcgctgctggtgatcgacaacgacggctactccaacgccctggtcgccctcgccaaccccgacgacgtcaccgttccggccaaggccggcatccgccagaccttcgtcttcgaaggcggcgcggaagggatcaaggcggtgcgcctgtggggcaaggacctgccggtgaagtga

SEQ ID NO: 327293 - DNA, 516 bp, Pseudomonas aeruginosa
atgtcctactccgaccccaggcattgccaccaccagcgcgtcacccaatggctcgccgcgatacggcagcatgccgcctggctgtacgccgcggatgagcagtacctgtacctggtgggcgaggcaaacgaactctaccagtgcggaatcgtgggcctgcaggaccgccacgacatggtcaccgacgccttggggatgtacggatgggcgatcgagcacggcatcacgcgcgagacgcactactgctctgactgctgctacgacgtgctcgacggcggcgtcgtcgtcgggagcgtggacgacgagggcatctaccatgggcccgcacccgcacgacagcgagtgggctgtatcagccaggatccactggacgggcaggtctgtctgcgcctgggccaggcgcttgagcgcgccggcattgtgcgcggcctcgtgatcgaactcgacgccggcggcacgctgctgcttgtcgagcagatccctgatgacttcaggccgtggcgctggccaccataa

SEQ ID NO: 327294 - DNA, 687 bp, Pseudomonas aeruginosa
atgtgcggaaggctcagccagtacaccggcctgcacgagttcgtcgacgcgctgtcgatgcccaacgtcctggtcaacctcgtcggcgaacagtcagagcgctacaacgttgcgccatcgacggccgtgacgacgctacggctcgaaggcgatgcgctcgtagctcagccgattcgatggggctggcggcccttctgggctagggaccgcgcggcgccgatcaacgctcgggtcgagaaagtggcgcatggacgcttcttcagcgcagcttggcgccatcgcgcgctttgccccgtttcaggctggttcgagtgggtggccgagggcgggccgcggaaacagccgttccatatccaacaccgggacgggagtccgatcctatgcgcggccatcggtcagtttcctggcctcgatgacgaaccgggagaacagcatgggttcgtcatcatcaccgccgatagcgccggcggcatggtcgacatccatgatcggcgtcctgttgtgctgtcacccgaactggcacgcgagtggcttgaccctgcgacgccgccggaacgcgcggagcagatcgtgctccaccagggtgagccgagcgagtcgttccggtggtacgcggtcagccgagacgtggggaacgtccgaaaccagggcgcccatctgatcgagcctcagcgctccgcttcgtaa

SEQ ID NO: 327295 - DNA, 261 bp, Pseudomonas aeruginosa
atgagggtggtgctgatgctggtgatggttgcgctggcgggatgcgccggccaggtcgagcctgagccgcgcacggtgcgcgtagatgtgccggtggcggtgccgtgccgggtgccggcggtggaggtgccggcctgggcagcggctgggctgaagaagagcgacgatctccagaccaaggtccgtgcgctgctggccgagcgccggcagcggatcgggtatgaagcccaactgttggctgccaacagagcatgccagtag

SEQ ID NO: 327296 - DNA, 1950 bp, Pseudomonas aeruginosa
atgcacaacaagttcctggcatatcgccctgaaatcgatggtctacgagcgatagccgtactacctgtaatcctgttccacgtcggtctctcacagttcagcggcggttttgttggtgtagatgtattttttgtaatcagcggatatctaattacatctattctcctgaaagaacgtcaggagaacaaactaagcattctcaaattctacgagcgccgcgcgcgaagaattcttcctgtactatttacgatgatcttgtgcgtaatccctttcgcgtggataacgctgccgcctgaagaaatgaaaaggttcgcgcagagcgttgcctctaccgcaaccttctcgtcaaattttcttttctggtatgaatcaggatactttgactcagcagcagaacttaagccgctacttcacacatggagccttgcggtagaagaacaatattatatatttttcccagttgttataatgattctgtggagatttggcttctctgcactatgcgcgactattgccgcaatcggaattgcaagctttatatattcagacataacagtgtccgcagagccaatgacggcattctatcttcttccgtcacgcgcctgggaattgatggttggcgcaattgtggctcttatcctcttcaagaggccgagtctgcgcggcagccacattggaggcatagctggcctcgcattgatcgcatactcggtctacgcatttgatcaggcgactccgttccctggctcaaatgcgctttacccaacgatgggtacagcactaatcattctatttgcacgcccaggaacagccattggcaccctgctgagcttcaagcctctggtctggatcgggttacttagctacagcgcgtatctctggcaccagccgatcattgcacttgcgaaagtgaagatgatgggcgagcttacggtcgcagcgcagatattgatcatcgcgctcaccattgcactctccgtagcttcgtattggatcgttgaaaaaccatttcgtaagagcggagcaagtcgcgctcgcgtgctctcctatgccgctgcggcatccgttctggtaactgccaccgggatatacggacaccttcaaaaaggtttcccggacaggatgaacaacgtctactcgaaagaggccagatcatacgaggagtccatccttgcaaagtacacaacagactcaatgaaggtccctgaatacgctagccctaccgacgcgaagacaatattcatagttggtgattcgtacctgagaaattggtcatccgcgctaaactcaattattgaccactcgaaatacagagttatttcagcctcataccttgggtgcgacgtaaaattcgaaaacggagatataaagtccgacccattgggcgcgccatacaaagcaaactgcgcagacttcaaaaaaattatcaacgacaaagaattaatgaaatccgtcgagaagataatacttacatctcacagaccatttgaatattcgtcgaatcgattcagatttgagatactaaactatgtccactccgttggaaaaagtcctaagacatacgtcataggaagctactaccaaatggacggtaagaaacacgactcttgcctcatggcgatgtttgtatcatggagagacgcctcaatttgtcgtgacatagcatcttacccaactgaaaaacaggatataaccaagttaccacttttcaaaagctacacagtaccattcgagtatatcgatcttatagggatgacatgcacgaatgagaagtccgcgtgcccctatgaatcggacggtgttccgtttatcactgactggaaccaccttacagcagcatttattcgctcgatcatgttgaaagccagtgtcagccatcgaaatgagtttgagcgaattggactcggcgatgtgtttattaagagcagagatgtagctacgaacctttga

SEQ ID NO: 327297 - DNA, 2076 bp, Pseudomonas aeruginosa
atgcccgtccgctacaacaccatgaatccggtcgagcccaatggatcgtccgacttccgcgacgcccacgacaacaccggcaaccttgatctcgcgatgaacgggacggcacttgcttggacggaccgtctcggccgttctaaaaagtcctgggtaggcatcgaggatcaggtaaacaccttcctcgcccgatctgggttcgagttgccaccgttgcagtatgttgacggcaccccgcttgtggttgactcgcccgccaagcttatccagcgcggcgggaacctctacagtgtcaaactgccggcatcgttccctatcgagctctccggcacctggtccgccgacgagccgctgctcgtattccgcaacgaccagtcgctccgccaggagctcgcagagcaggacggtggcacccttgtaggctggaagcggactcaactttccgcgtcgatcgacaccattcagcaactcgcggactctattccgatccgggtctgggagttcgcgtcgctcgtctctgacaagccgtcggcggacccgtcgacctggaactggactccggcgttccaggcgatggtagataccgctgagtcctacatgcagtcatctggagcaaggcgaatcacctgctatgccgggcctggcaagtttctgattgactcaattgtgtggcgctctggtgtgcacatgtattttggaggtgctgagctaaaagctcatcctgactctatagatggaaactcgctaatcaacgcaagccttaaactaagcgatatcgggttctatggtcctggtatagttaacggtgataaggatattttcgggccggaacataggcagcacggaattcattgcgtggcaaaaagagtaaaggtaaaggatctttacattgagaatataggaagtagctcggttttctcgctgggtgatggtgtaatttttaggccaacaatcccagagggagattttcagtgcgaggactgtgaggtttcagggtgcacatttagcaatatagaaagacagtgtataaccgttgagtctgggtttaatatccgtattttgtcgaatgggttctataacagcacttactctgctgttgatattgagaatgctgggtacaccatgggagatgtcgatggtgttctctttcaggggaattatgttgatggatgcctgtatggtgttactgccgtcagtgcccagccagttgacgcgcagaggaatatcgtgtgtgtagggaatacctataagaatgtgacggatgcttataacttccgaggatgttcgaatgttaaggtaggttatggtgatattgccgaggtaagtcggtacggagcctacatctactcagatggcgttactacagcccagaatatcgaaatatctgaattcaccacatcaggagggacgtatggagtgtttgcgcaggcagttggtggtgggtctattagtagacttaaactgaccaatctgaagattaccggtacttccacctcgccggtcactgtgcagagcacatctggcttgaggatggaaggggttgacgtactgatcaacaccggcacaggtgttgtgatccagaactgcgcatcgccaattgtcagaaacgtgaagatggttggcgcggtgacgctttccgttccgtcagtgtcgttcactggcaccactacgaacccgcgagttggggggctggatatctctggcttcactattggcgtttctgtcacaacttccgcgacgacgacagttcacaaactcagtgataatgtgttttcaggagttgcgaccccatggtcggtgaatccgggaaactacattaaagggcaattctctggaaccttcacaatgaatgctgccgcaagcatgaacgtcaatagtgttggcatgaatgtaacgtcatctgttgtgaggttgattcccacaaacgcggcagcagcaacgcttcaagctggctcaaaaatggcctgggtggtcaactcggcttcgagtaataacgtatcgttcagagtgcagaccgcagatggaacggcggcggctgggacggaaacttttgctttcgtgatagagaacctataa

SEQ ID NO: 327298 - DNA, 2748 bp, Pseudomonas aeruginosa
gtgatcgaattcttcgcgaacaagctggatcctgagccgctgcgccagtaccccatccgcgcgcggatgccaatcgacacctggctgcgcgggaacgtggcgagctatcgccgcaatcggcgccgtatccgccggggggagttgaacccggtgagcatcgcggtcaacggtcaactcgttcacttcagtcgctggcgcgtgaccgagatcggacccgacgacgaggtccacatctggaaagagccgaagggcatcgacccgatctcgatcacaatcgccgcgatcaagagcgcccaggcgctattccggttgttcatgcctcggatcaagatgccgagcacccagaacccgcgccagggcgacccgttggagagcgcgcggaccaaggcgaaccaggtccgctacggcgacatcgtccgggaggcgtttggccggaacaagatctaccccgactacatcgtcccgcaatgccggcgttttcccagcgagcgcacggagtgggtccagatgctgctggcggtcgggatcggcgactacgagattcaccccagcgacatcatgatcggcgacaccccgatcatttcgctcggcgataacgcccggtaccgcatctatcggccgggtgagagtgtgtccggcgacccggctgcggagtggtggcactcggttgccgaggtcggcgccacggcgacgggcaccgcggggatcgacctccggactaccaccacggtcgaccagtctgcaaacgcccaggcgtaccagttcgacggcgacctggtcaccgttcccgtcggggccggccagttccccactggctgggctgccgggatgatcgtccgcgtcgaagtgatgtatcagtacaacgtcaccgcaggcaccggagtgggcggtcgagacacaatctccggcccgctcgcccagctcggcgcgttcccaggcatggttatcgaggtcaccggggcgaacgaaggcatctacgtcgtcaacagctacaccgcgccggcagggtctacgccagcgtcgatgacgctcaataccaccagcggcgcgcccgtttctgggttgcagtacggaaccggctgggcgtgtattggataccgcgggctccggtaccggatcaccgctgcgagctccagccaattggcgttggaccggttgaccgataccggctccgacgacactgcctggcctggattcgactacatcgagagcaactcggcggtcctgaaactggacggctccacgctggagggagactgggccggcccgttcgcagggaacccggaggccgagaaagccaccgcgatcgagttcgactacatgttcccgcaaggcctcggcggcgtggataagaaggggagactcttcaattggcaggtcgagatcgagcttcagtggcgcgacatggccctggccggcgcatggacctcgtaccgagagaccatcagccgggcgactctggaccagatcgcgttcacgcgccggatcaacctgccgtatgcaatgcgccctgaggtcaggatgcgtcggatcggtgcgaaatcgaccgagaccaccatccaggacaccgtgcagtggtatggcctacgggccaggctagcgagcccgtcgtcgtaccccggaatgaccgtcatttcagtggcggtcgccggcggcggccgcttgggtgcgcagtccgagaatcgggtctcggtgatcggtacccggatacttccgacgcgccagaacggcgcgtggacggagccgcggcctgtccgggatctggtggcgccgttctgctacgtcgcgaagtccgtcggctacgaggatgcagacctcgacctggtcgagatcgatgcactggccgatatctgggcgcagcgaggcgacacgttcgatcaccagtacgagtcgacgtcgacggtgaaggaagtgctgggcgatatcctcgccgcgggattctctgaactgaccattgggcgcgggcggctgcgtccggttcgcgatgggctgcgcgagggtgtcgatcatctctacaccacgccggcggcgaatggcgaggtctgggcctactcggcacagaacatgaaagggtcgctctccagaaccttcagcacgccaaccccagacgacaacgacggcgtcgacgtcgagcacattgacggtcgaacgttccagaaacagacggtcaagtgccgcctgcctggccagttggggttgaagcccgagaaggtcagcgctgtcggggtgagcgacgtcaacaaggcgtatcaaaagggcatgcgccgggcagcagagcagcgctaccggcggtggaactattcgttcgagacggagctcgacgcgaacaatagcggctatctcagcctcgccgctgtgtcggatgacacgccggggagcggccagagcgcattccttaagtcgctcacgccccaaggcaccggcttcgtgttagagagcagcgagccgctggactgggcatctatggcaatggcgagggtcgccctgcgcaagccggatggtcgcgtagacggcccctggagggcatcgagaattgacgaataccgcatgtgggtaccctcacttggtttcgcccccgatctctcctggacccgtgaaccgccgcatctcctgttcggccgcatccacccggtgctgatcaccggcgtggacccgaagggcctcgagagctgctccgtccgcggcgtgaactacgacgagcggctctacatcaacgacaacgccaccgcgccgcctgaagcggtctga

SEQ ID NO: 327299 - DNA, 414 bp, Pseudomonas aeruginosa
atgctcgatcgatatctcgccgccgtctacgaagacggcgggcgtgagctgccgcgcgtcgattgctggggactcactcggctggcgcgtcatgagctctacggcatgcccatgctctccagcttcggagaggtgagacataccagcccgcaccatttccagcgcgcctaccagcgccaggtccaggccgccctggaagagtgcgaaccattcgccggcgccatcgctgctggcatggacggggcggtctgcgtccacctcgccctggtcgtggccagggaagggcggctgcaggtactcgaaatcaatccagggtccggcgcacgcctggtgcgcctgcaggacttcctcgaaaacttcacccgggtgatcttctaccgtgatcgaattcttcgcgaacaagctggatcctga

SEQ ID NO: 327300 - DNA, 486 bp, Pseudomonas aeruginosa
atggacccgctcgaagttgcctttgcttcgccggcagacgaggtgctgattccaaccctcgagatcacctgtgatgcatggccggcgccggtgttgctgacccacggttacgacaatgtcaccgccggcaccgaggatggccgaactctgacctacgaggctggagggatcgatgcctcgttgccgaagtcggacaacaccgggaaccagacgatcacctttgccatcgacggcgtgaccggaaagtcccagaacctgatccagcaggccgtcgatgcagagaagcgggtcagactgaccatgcggctctacctcagcacggacctctccaggccgaagcgcgactaccacatgaccgtcaagagcggtgtgctggaggtcgatcatgccgagattcaggccggctacttcgacctgattggcacccgctggccccgcgtcgacttcaactcccagaacgcaccctgcatcaagtacgaaggctga

SEQ ID NO: 327301 - DNA, 2481 bp, Pseudomonas aeruginosa
atggctgagaatgtcggcagcatctactacaccgtcgaggcggatacctccagcctcgtaaacggtgcgaacgccgccgatcgctcgctggacagcatgcagggttctatgcagcggaccgatgcgactgctgggaagttgcagacccgcatgaccagagtggcgggggctgtgcggcaggccaaccagcagatcggcgcccagacctcggcatacagcgggctgacccgggtcgttgctgcttacctttcgctccggacgctccagtcggtcatcgaactatccgaccagtacggccagatggcctcgcgcattcggaacgctaccagcagcgccgaagagtacgccatggtgcaggagcggctgttgcagaccgccaacggcaccttccgggcgctgagcgaggctcaagaggtctacctggctacggctgacacgctccgggatctcggctacaccacgtccgacgttctggacatcactgactcgttctcctacgcgctggttcgcgacgccgcgcgcgccgaccaggccaccaccgccatggatgcgtggtccaaggcgttgatgaagaacaaggtcgaggctgatggctgggcctcgataatggccgcgactccgtcgatcgtcgaaggcatcgccgaggctaccggccggacccaggctgaaatccggcagttgggcgccagcgggaagctgtctgtcgaggcgctgaacgaagggttgcgccgcacccgggacgagaacaaggcattggccgatgagatggaaacatcggtcgcagactcgtttaccaagctgcgcaacagcatgacggtgttcatcggaaaggtgaacgagtcgagcggcgccagccagattctgaccagcaatatcgccgaactcgcggatgcattgcaggaccccgagaccattcgtgccgcccaggacctggccgcaggggtggtaagcgccctaaaccagatcatcgccggcgcgaaagaaaccgttcggatcgtgaaatgggcggctgaggggattgccgcagcactgcacggggcagcgtctgatgacattgtccgcctggaggaccagctcaacacctatcaggagatgctggccaacccgcttaagcgcctgcgcattggcgggaaagggcaggcgattgcgctattcagcgaggacgaaatcaaggccaacatcgctgcaacgcaagcgctgatcgatcagttctacaaggaccaggagaagacgcccccggtagttgtgccgaacgtagagtcaccgtctccccagggtagatcgggcgggaagaccggtaccgtcaacgccgaggccactgccacggcaggcacgaagaagctcaccgaggcgcagaaggcagccaagaaggccgcccaggaacttgcccaggcgcagaaggaaaacatcgacgccattgccagccttggccagcaactcgcccttgtcggcctgaagggcaaggaactgatgcagacccaggctgaacttcaactcaacgagtacgccacgccggagcaggtcgcccaggtccgcgcgctcgccgcggcactgtatgaagcgcaacaggtcgaagccaacaagcagttgctgggtcagatggacccgatcgccggcgaagatcagcgctaccaggccgaactggagaacctgaagaagctgaacgaggccaaattgctcgaggaccagcgctacctggaactcaaggcgcaggccgagcaacagcacgatgccacgatgaagcaactggaggaggagcgattccgccgacaggctgccggcaacgagatgatcatggcaacgcttgatcaggtgcagcaggccggcacgaacgctctgacagggctgataaccggggcgaacaatggtgctgacgccatgcgacaactggccggcgccatgctcaaccaggtggtagatgccctcgtcaaggtcggcatcgagcaggccaagaacttcatcatgggtcagacccagcaggcggctgcggcgacgacagccgcagcgaccggcgccgctatggcttctgcctacgcgccagccgctgctgccgcttcggttgcgtcattcggcggggcggcaacggctggccttaccgcaatggcggccgccatcccggcaatgattgggatgttcgctggaggtcgccagtacggcggtcccgtaggggcgggcggcatgtaccggatcaacgagaacggcgcaccagaggtattccaggctgcgaatggccggcagtacatgctgccgaacacccgtggagaggttgtcagtaatcgtgacgcctcggcgcagtatcaggcgcagcccaacatcgagatccacctccatgaggatccatctcgagctggacaggttcagcaatcgagaggtggagatggaaggacgatgatcaacatgtgggtagatagcctactcggcgatggagaggtccaccaagccctgcagggggcgtatgggctacagaaggtgggcagatga

SEQ ID NO: 327302 - DNA, 561 bp, Pseudomonas aeruginosa
atggcgctaacagcaaaacagcgccgcttcgtcgccgagtatctgctcgacctcaatgcgacccaggcggcaatcagggccgggtacagcaagaatcgcgcgtccgagatcggttaccaactgctgcagaagccgggcatcacatccgccatccaggaagctatgaaggagcgcaccgagcgcactcaaattgacgccgactacgtgctgcgccggatgatcgagattgaccagatggatctgttggacatcatgaccgacgcgatggagctcaagccggtcagccagtggccgcgggtgtggcgccagtacctcagcggcttcgacttggccgagatgttcgaggggcgcggcgacgagcgcgagatgatcgggttcctgaaaaagatcaagtggcccgacaaggtgaagaacctggaactgctcgggcgccacttcgggatgttcaaggaacgggttgagcattctgggcctgctggcgggccaatagcggtggccgccatgaccaaggaggactacaagcaggctcgcaaagagatgctggcagaagatgattgctga

SEQ ID NO: 327303 - DNA, 870 bp, Pseudomonas aeruginosa
atgagactgatcagcgcgcgccaggcttggcacgacgccttctacgagagtcggagctcagtgctggcggtggcggccgacaaggccgcgctgggcaagaaggggcgggtggccaacgagacgcaccccgaccgcaaggacaccaacgggcgtagcgcccacatgctggccgccggcctggtgcaggctgccatccgctcgctgccgaagccgctgcagcacttcggccacacgctgtactcgccgctggccaatggtgacgacgtggcgatcgctcacggcctggtctggatcggcgccggcctcggccaactgactcggcgccagggcgagcgggcttactggatggcgctggcggcgatcaactcgcacaagcgcgccgtcaacggccgcgacactctgcgcccgggcgaggtctgcctgttcatcgaggagcgtctcggctgccggatcgaccccagccactgggctcgcgactacgccagcacctgggagcggctggcgcgccacgtcgacaagctggatgcccaggcgctgaggccggtcgccgaggtggtggcgaagcagtgcggcctgcggaaggggccgggctggcgctggcaccaggtcgaccgcgatgtggcggcgttgcagcgcgccgaggcctacgccgagcgccgggagcatcaccagcagcgcctggcggaacgtctgcgcgggatgtcggaccaggagctggcgcggtgggcggcgaggatgaagcggtacgcggaggcataccgggaggagtggggcgaggacatcctggaatgccccggtgtccatcagcgctaccatgaccgcgtggcggcctactgggcccagcgggagcgcctgaaacgggtcgcttga

SEQ ID NO: 327304 - DNA, 444 bp, Pseudomonas aeruginosa
atgcatgacctccgcccggtgatgttcaccgtacccggcgaaccggtggggaaggggagaccgcgtatcggtcgtgtcggcgcccacgcaaggatgttcacgccggcgaagacggcgaactacgaggggttgattgcgcacagcggacagcaggcgatggcaggtcgcgcgctgttcgagggcccggtgctggtcgagctcgacatcgcgctgagcatccctcaatcgatgtcgaaaaagcggaagtcgctggcgctggccggcggcctgtaccccaccaagaagcccgatatggacaacgtgatcaaagcgatctacgacggcctgaacggcgttgtctggaaggacgacgtccaggtcgtgaaggcggtggtggggaagcgctacggcgaaacgccaggcgtgcgagtgaaagtcgtccctctcctcgagggcgagcagtga

SEQ ID NO: 327305 - DNA, 762 bp, Pseudomonas aeruginosa
atggaaaccaagcaggaaacgccgaaggccaagccggccatcgtgccgcaaagcgcggcctcccacatcgacagggccctcgctcagccgtcgaccgcgtcaacgcaatcgtcgccgccaacgaggctgcccgacaggctgctggaacggctctgggtgaagatgaccgagatgtacgggcaccgctggacgtcgagttttggcgacaacccaaatcctgacggcgcctgggctacggtgctccaggggctgaccggccatcaattggcccacgggctcaacatgctgacgttcatgggcagccggttcgattggccgccggcggcgccgacattccgggagctctgcttgagcgtccagccggagtcgctcggtctgccggaccacgacaccgcgttccaccaggctctggcgtgccgctaccgccaccaggtggtcaaggccgccgccgaggccaccggagttttcgatctgcgcaccggcgaggtgaacgacgatcgcctccgcaagcgcttcgggttccactacgcagagatggtccggcggtgggcaaacaacatcccgctgagccagcccgtcatccacgcgattgagcatgacaccgggaagagcctgctggacctggccgaggatgaggccgagcagcagctccgccggcggatgcaagcccagggcctggatgggctcagtggcgcacaggcgcgggaactgctgctggccaagatgcgccggaaagcgccggaggtgcgccgtgatgcatga

SEQ ID NO: 327306 - DNA, 573 bp, Pseudomonas aeruginosa
atgcgaagcgaatcgcacaccctgatttccacgctgctcggcgtggtgaaccaatggcgccgccgagaggggtggagccgagagaccgttgtccagcacatcgtggaggcgcacgagcgcatccagggagcgctggtcaccggcatcgtcttcgatccgccaacgcgcgatgcaaccgagcggatgaaggtcaacgccgaccgcgtgttccgctggctcgacgacggaaccaaggacaccaacctggtgccggcaaacttcgtacccagcatcctcgcggcgctgccgactgacctgaaggtccaggccctgggcgacatcctgacgccgctgggcgtgtcggtgcgcttgatcggcggcgatgccggccagcggccggaggtgctctgcatgctccggacactcatcaaggagaacggtgaggcgcagcaggccgtggccaacctcgtcgacggcgctgatgaccaggaactgcaggaggcccaccgggagctctccgaatccagggcggcgaccgatgaggcgctgcggatgatcgaccagatgcgccggccgcgccttgttcaggggtag

SEQ ID NO: 327307 - DNA, 573 bp, Pseudomonas aeruginosa
atggagatgctccagcgccacggtaaagggttgagcggcgaagctaaggagaaaatcgcgcaggcagtagccgagtctctcgatggcgatcaatcgacgacatcgaacgtgattcacgccgacttcagccgcaccaccctggtgaaaggaaattcgatttcgatcgcccagtacgacgtgcgcgctgccatgggcggcggtcaggtaccggccgagtaccgcgagttcgtcaggaatctgatcgtcgacagggtccaactggatgatctcggcctgaagtacaccgatccggccaacctcaagatcatcaccggatggggtcagagcatgctgggcaccatcgaggacaagtccccgatcctcgtcgacgtgggcatcaccgacttcgtcgaggaaggcgtctacgtcttcacctggctgcagcacctgttcgtgaagcgggtgcagatccacgatgccgagcactacctgctggtgtcggacaacaagtccttcgagccgcagaaggcccgcatggaggacgtccatttccaagcaaaagtgctgggagcctggaatttcagaaagctataa

SEQ ID NO: 327308 - DNA, 354 bp, Pseudomonas aeruginosa
atgaaacaattcgcaaaccccactcccatcggcactctatttgccaaccgagcagtgggcactactgttgtgcagatagtcgcacctggaaacaacttgtacggtttggtcatccgcactctatttgcaaactccgcatcgggcgtgatcggcgtacaggtatttgcggacaccgctccgccgacggaatacggtgacagcacgaagcgcttgattttcatcggcacccccgtcccatctgtagggatacaatatccgttgtacgtgcccccaggtcagggcatttgggctattgccaatggaaatggcagcatcaacatgacctatgacctactgacgccacctctcggttaa

SEQ ID NO: 327309 - DNA, 336 bp, Pseudomonas aeruginosa
atggctgcacagaaggagaacacccaggcgaaaggacaggtctctccggtagagaaggtgcgtctacgggtatcagcgatgatcagtagccctcgggctcaggcggagcgcagggcgtcaatctggaaggcgcagggggattcggaagaggcctggctgcaggtgctggaggagttggccgaaaccgatggactcgagatgtcgctgggggaggatggagtggttgcgctcacctggcaggcgggagaggaggagggcgttgaagtggtcgatgggattgaactggtgcaggagctggacatgatggtacagcgccttcacgaggagcggatctag

SEQ ID NO: 327310 - DNA, 324 bp, Pseudomonas aeruginosa
atgagctactcacgggaagactactttgccgaagggcttggggagtcgctggaggagcatggcgtggtggccaccagcgaacagatcaaggcgattgccagggacgttgtcttgttcgcagagaacattggacaagccttctattccccggaagatccaaggtcacgcgaagccgactcgcttcgcaaggaacttgagaaggagcgggaaaaggttgtttgccgggtatgtcaaggcaccggtaacaccgtatcgcacggcccgcaccattctgcctactcctcctgctggaggtgcaatggggccgggaggcatgcgccatga

SEQ ID NO: 327311 - DNA, 138 bp, Pseudomonas aeruginosa
atgaatgccaagcgtaaagccaccctccttggcgccctggccatgaccgccttctacatcctgctcatcttcgcccctgcctggggcggtctgatcaccgccgaacaacccgccacggcacccatcgccgggaagtga

SEQ ID NO: 327312 - DNA, 216 bp, Pseudomonas aeruginosa
atgaaatccgaagacctgtacgtccgcctcaccgacccggccggcaagcgccgcgaggtaatcaaccaccaccgcgtctgggatcgcggccagttcctcgaggcccagcgcaagcagcacaacaagccggacaagcccgacgagcaccgcgtcgtgagcgttgcgaccgaggccgagtaccggaaattcatgggttacaaggagacagcagcatga

SEQ ID NO: 327313 - DNA, 1005 bp, Pseudomonas aeruginosa
atgagcgaacccacccaactggagcagttgaagaccagcgccgtcgcgaggtcaaccaacgatgcgccgatgtccctcctcaccggcgccggcttcgaccagatccagcgcgtcgcaaaggcgctcagcgcgtctaccctagtgccggtgcagtaccgcgccttcgccgaggtgaaagagtacggcaaggtcaccggatacaccccgaacggcgccgggctgccgaactgcatcgtcgctctgaacatggcgcagcgtatgggcgccgatccgctgatggtgatgcagaacctgtacgtgatcgagggccggccgagctggtccagccagttcatcatcgcctcgatcaacagttgcggccgtttcaacccgctccgctacgacctcagccagccgggcaaagagcaggaggtttcctataaggcgactacctggaagaacaagcagaaggtcgaggagacgaagaccatcaaggttcggcatcagacctgcacggcctggaccaccgagaggggcgttcaaatcccgaccttcagccccgaggagcttcgcaaaaagtcgatgctccagttgtgccgcgagtacggagtgcccgtgatcgaaagccccgaagtgtcgattcaaatggcgctcgacgagggctggctcaccaagaacggcagcaagtggcagaccatgcccgaggtgatgttgcgctaccgcgctgccagcctgctcggccgcctgtacgcgcctgagttgctgatgggcctgcagaccgtcgaagagctcaacgactacatcgaaccgcgggacaccgatatccatggtgaaaccgtgaccgtgcatgtcgatgatctccgagacaaagaaccggcgccgccggctgtcaccgccgaagacgatggagacgagccctctccgccggacggcgtgaacaccgagacgggcgaaatcaccgaacccgccccgggccagcagtcggacaccgtcgacaccggcaccgaagagctcaatctcgagtaa

SEQ ID NO: 327314 - DNA, 201 bp, Pseudomonas aeruginosa
atgcccagccttactgtccttgagcggtacggccaagtcggggagttcgccgcgctactcggcgcggccgagctcaacgccgctacggactgggacgagcagttcctggccgacctccgcagcaacttccagcgctacggcgcccacacctacctcagcgacgcccaactcgagcagttggaacggatcgccaacgaatag

SEQ ID NO: 327315 - DNA, 270 bp, Pseudomonas aeruginosa
atggggccggtaaataggtgtcagatgagcaacagacaactggaagagatactggaagagaaaagaagccaggcgctggcagacgcgctggggatctccaaggacgaagtcgaacagtgggtcattgatgactacccggagaccagcgacgatggcctggtctatggtcatgtcatcgagatttccgaggacgccccaactgatctgatccagaagctcggcggaatttcggttaacatcggcccgcttcaggtcgacgaagaagagtag

SEQ ID NO: 327316 - DNA, 798 bp, Pseudomonas aeruginosa
atgagcagtcaggtcgacatcatcaagcccgaatcgcgcatcgtggtccagttcagttgcggcgcggcctctgcggtcgccggcaagctggccctggcccagtacggcgatacccacgacgtccagttcctcaatgcctacctggccaacgagcatcaggacaaccggcgcttccttgccgactgcgaggtttggactggccggaaaatcacggtgctacgcgacgaaaagtacggcgccgacgtactcaacgtcttccgccgcgagcgctacatgaagggccgcacgggcgcgccctgcaccaagctgctgaagcgtcgcctgctggacacctggaagcatcccggcgacgtaatggtgctcggcttcacggcagaggaaggccaccgactggacgacttccgggagcgaaacccagaccgcccggtgatcgcgccgctgattgagcgcggcctgggcaaggaggactgcaaagccatcatcgcgcgcgccggcatcgaactgccggccatgtaccgccagggctacgagaacgcgaactgcatcggctgcgtgaaaggcggagaaggctacttccgggcgatccgggaggacttccccgagcagttcgaagccctgtgcaaggtgcaggacgagcttggcccgggttcgtacctcttccgcaaccgtaagaccggggagcgctactcgctccgcgaccttcccgctggaccgatccgccgcaacgaagccgtcccggcctgcagcttcttctgcgagctcgccgaggccgacattatccataaggagccggcatga

SEQ ID NO: 327317 - DNA, 411 bp, Pseudomonas aeruginosa
atgttcacgctgcaggccagcgcgcagcatggtgtctgcgtcaccggcgacatcacccacaccctgaaggcggaaggcttcgacgccagcgaggatggaactggccgcggccaaccaatcgttgccgatgtcgcgccgacgcttcgctccggcaacttccgcagccacagcaacccggccacgcaggccgacagcttggtgatcgcctccgcagtacggcgcctcaccccccgggaatgcgagcgcctgcagggattccccgacgactacacgctgatcccttggcgtgggaagcccgctactgaatgccctgacggcccgcgatacaaggcgatcggaaactcgaaggctgtccctgtcgtgcgctggatcgggcgccgccttaaagctcatctggagaaactctcatga

SEQ ID NO: 327318 - DNA, 324 bp, Pseudomonas aeruginosa
atgatgcatcgcgtctatcttgcgggtccgatgaccggcctgccggaacacaacttccccgccttccacgccgaagccgcgcgcctgcgcagcctcgggtaccaggtcgagaaccccgccgagcacggcgagattcccggcttcgagtgggccgactacctgcggctcgacctacagaagctgctcacctgccaggcaattgccctgctgcccggctggatggactcgaagggcgccaggctggagttcaccgtagccaccaacctgggaatgcgcgctctgcacgcggagcacatcaccggtcctgcggaggatgcgccatga

SEQ ID NO: 327319 - DNA, 249 bp, Pseudomonas aeruginosa
atgcacaccctcaacctgaccgcgctgttcctggacggcgaggatggccagcgcctggccgaggtcaacggcctcccacgcctcggcgccctgctctcctcatctcaactgcgccagctcgcgcgacaactgaacgagatcgcaaacgacgcagaccaggacgcaactggtttgcacacctacgcagcgccaccgtacggagcctgcccgcaatgtcattcgacgaaaacgccgcataccgccgcataa

SEQ ID NO: 327320 - DNA, 123 bp, Pseudomonas aeruginosa
atgcgtagagcactgaccgccctcggcataatcgccgccctcggcctgaccgtggtggggctggtggagatattcccgatcgttcgcacactggcggcctggcaggcggggtgcttcggatga

SEQ ID NO: 327321 - DNA, 675 bp, Pseudomonas aeruginosa
atgaagcagaaaccaggcatcgcacttccccgctggctccttcgcacaaccacgatgcagatgcacagcgtcgacgtggtactggtcatggccctggtgctccagcaccacggtacggccgacgctgttcgccgcgccgccggtcagcttcgcgacagagtatgtgccgagcaccggcccaagatgaccgcactcatgcgcatgcaagatgacgcggcggcgctgcaggtggcgctcaacatcgtccagcgcgccaccgacgccctgggcatcctggcgggaaagccgtttccggccagaccttcgcccagcgaaagcccaccggatcagggcacatgcccgccaaggctggtcccgtcaccggtgagccggtgcatcctacctgaaatcatccatgccgcggcccaacggaaagggccgctatttcatgagggaacagcgatgtccctttcagagtttctatcccctgacgaactcactgaattagttggaaagaaggtcgtgagcaaacagatcgaatggctcgaaaatcaccattggaactatgaaaccaacgcagcgggccgccccatagtcggacgggtgtatgcacggttgcgtctggcaggcgttcatcccacaagaaccacagtttccgaccccgcctggtcgctcgacctgtcgaacgtgtcctga

SEQ ID NO: 327322 - DNA, 1038 bp, Pseudomonas aeruginosa
atgccgccccgcatgttgaagcgtgtccgaaaattgaaatcggggaaagtctggatcggctactactacaacggccgagacgaggagggaaatcgaaaggagattccgctgggtagcgacctgaacgaggcgcgcgccgaatgggctcgcctcgagcgaacgacaacgccgaagattgtgcgctacatgaaagagctgttcgatcgctacgagcgcgaggtcgtcccgacgaaggcgccgcgtacccaatcggacaatcaagccgagctgaggcaactacggaaagcctttgatagcgcgccgatcacggcaattactcctcaggtggtcgcccagtaccgcgatgccaggacggcgaaaactcgtggaaaccgggagatagcactactctcgcatgtcttcacgctcgcgagggagtggggctacatcgatggcgaaaacccctgcgcccgggtacgacggaacaaggagaaggccagggactactatgcctccgacgatgtctgggaagcggtctacgctcatgcctgccaggagcttcgagacgcgatggatctagcctatctcaccggccagcgacctgcggacacgctgaaagtctcaacaggcgatctggcaggcgagttcctgctggttgcccagggcaagacaggaaagaagctcaggattcgcttgctcgatggcgaacagccaacagggctgggcgtgttcatcgacggcctgttcgagcgccggaaactggcgggcattaccagttcgcgcctcatcacgaacccatcaggcctccgcatgagctacgccatgatgcgaaatcgctgggacgaggcgcgagcagaagccgccgcccaagcagtggccgcccgagacgagccgcttgctgaacgaatcaagcagttccgcttcagcgatattcgccccaaggcagccagcgaaatcgagaacctggccgatgcaagcaagctgcttggccacacaaaggaacagatcacgaagaacgtttaccgacgcgtcggcgaggtggtaagcccaacgaagtga

SEQ ID NO: 327323 - DNA, 3786 bp, Pseudomonas aeruginosa
atgcagtttgtccgccaaggccccgacattcctgaacgcctgctgcaggcacatgaggatggacgcgtcgtattcttttgcggtgcaggcatctcataccccgcgcgcttgcctggctttgccgggctggtaacgaaggtgtatgaagccctgggcgccacacccaatgcggtgcagcaggcggcaatcaaggccgggcagttcgataccgccatcggtctactggaagcagatatcgtcggcggccgcgaaacggtgcgccgggcgctggctggcatcctaacacccgatttgagcgccccaaacgcgactgcaacccatgaagccttgctgacactgagcaagtgccgcaatggcaattcccgcctcatcaccaccaacttcgatcgcctgttcgaggaggtgattgcggtaaagtccctgcccatcaagcagtttcaggcgccactgctgccggtgccgaagaaccgctgggatggactggtgtatctgcatggcctgcttggtaccacaccgaacgcgagcgagctggatcgcttggtcgtctccagcggagatttcggcctggcctatctcaacgaacgctgggcggcacgtttcgtcagcgagctgctccgcaactacaccgtatgcttcgtcggttacagcatcaacgaccccgtgctgcgctacatgatggacgcgctcgccgccgaccgcctgctcggtgagtcgccgccggagatgttcgccttcggcagtttctccaaaggcaaggaggaggaacgtagcaacgagtggcgggccaagaacgtcacacccatcctctaccgcgagcacaaccgtcatgcctacctgcacaagaccctgcgcgtgtgggccgaaatctaccgagacggcgtgcgcggcaaggagcgcatcgcggtcgaatgcgccatggcccgtcccttggcaagcacccggcaggacgacttcgtcgggcgcctgctttgggctctgagcgacccgggcgggctgcccgccaggcgctttgccgatctggacccggtgccctcactggattggctggaaccgctgagcgagggacgctaccggcatgccgaccttggccgcttcggtgtcccgcccagaacgaccgtagacaaaaaactcaccttcagcctgacccaccgaccttcgccgtatcagctcgcaccgtcgatgtgtatcgtcgatgccggtgcgcgcagcagccgctgggacgaggtgatgcgacaactggcgcgatggctcacccgtcatctgaacgaccctgcgttgctgctttggttggtcaagcacggcgggcagcttcatgacgatctaatctggtggatcgaacaccgtctggacgaactggccaaacttgaacgtgacggcaacactgccgagttggcgcgaattcgtgagggcgcacccaacgcgatccccagcccgctgatgcgcaccctatggcggcttctgctaaccgggcgtgtgaaatcatggctgcgcgacttcgacctttaccgttggagcgaccgcttaaagcgcgatgggctcagcgctaccctgcgcctggaactgcgggagatgctgacacctcgggtatcgttacgcgaaccgttccgctggcacaccgaagacggtgaaagccgcgagccgaatggcattaaggatctggtggaatgggagatcgtgctgtcgacggaccatgtccattccagcttgcgcgatctgccaaaggatggccgctgggacgccgcattaccggagctgctgcccgatgtcagcgctttgttacgcgacgcgcttgatctgatgcgcgaacttggcagtgtcgaggacaggagcgacctgtcctacatgcatcaaccctcaatatgtgaacacccacagaaccgagacttccatgactggaccgcattgatcgacctgactcgagatgcgtggctcgccactgtcgcgcaatcaccagcgcgggcagcactggtggcgcaatcctggtggcacacgccctatccgctgttccggcgcctagccttctttgccgccgcgcaggacaacgtgatcgcccatcgccaagcactcgactggctgctggcggacgatcactggtggctgtggtcggtggaaaccgaacgggaagccatgcgcttgctggtggcgatagcgccacacctcgatgaggtaatgctgcgggaactggaacaggccgtactcaccgggcctccgcgcgacatgttcaaggacgacatcgagccggagcgctggacccgtatcgtggaacacgaagtctggctgcggctggctaaattggctgacattggcgcagtcttgggtgctgacagtaatgatcgactcaagaggctctcggcacagtatccggagtggaagctggcagcggatcagcgcgatgaatttccttactggatgggcgagggcgacgagtggcgcaagttcatcgctactccgcgtcttcgccgtgaactgatcgagtggcttaggcagcaacccaacctagatcctcggcaggaggatgactggcggcagcgctgtcgcgataacttcgccaccaccgcgtgcgctttgtacgcattagcccgggaaggcgtctggccgacgagacactggcgcgaagcactgcaggcctggtcagaggaaaaactcctgaagcgctcctggcactacatggcgccgaccctagctaccgcgcctgacgaggttctacagacgctcgcccacggcgtcagctggtggctgcaggctattgctaagaccttcgagggcgacgaagcactcttcttcgtgctagctcgccgtatcctggctcaggatcatcaggacggagtcgataccgacgaaccagtaatgcgcgccatcaaccatcccgtgggccacgtcaccgaggcactgctgcgctggtggtatcgacgctctctggaggatggacaaggattaccggaagagctcaagcctacattcaccgaactttgcgacccccgtatcgacatgttccggcatggccgcgtattgctggcagcccatatcatcgcgttattccgcgtagacgtggattgggcaacgcagaacctgttgccgcttttcgattggcggcgctccgaagccgaagcacgtgcggcatgggagggtttcctatggtcaccgcgactttaccgtcctctaatggaaatgctcaggacagccttcctagaaaccgcgcaccactatgcagcattaggcaaacacgacggacaatatgcatcgctgctgacattcgccgccctcgagccaggtgatacgttcacgactgtcgagctggcggtcgctacacgttcacttccaccggacggtctacacgacgcagcgcaagctctggtgagagcactcgagggatcgggagatcaccgggccgactactgggctaaccgggttgtcccttacctccacgccatctggcccaaaactcgggacaatatttcacccgccatagcagaaagcctcggccgcctgtgcatagcggcacaagacgcattccccgaagccttggcgctgctccgcgcctggctgcaaccggcgaccagccccagccacctagtgcaccgtcttcgtgacgccgctctttgcggcgagtacccggagcaggcgctggactttctgagcctggtcataggagagcagacccaatggccgccgagccacctcggcgactgccttgaggcgatacggacagccgcaccggaactaggggctgacccgcgttttgagcaactgatggcgtatttacgcagacatggaagaacggggtag

SEQ ID NO: 327324 - DNA, 1077 bp, Pseudomonas aeruginosa
atgtcggcagtcagatcaattctgtgggcgttctggtcgtatggggtttctctgccgatgcacttgctgagggcagcgctgtccggtgccctgagcttcttctatccgcgtggattcataccatgcaatgagttagctgatccttttgccgaggaatgcgcgacccgtccggttgggcaaagcgtgcggctgccgtgggtggacagttcggcgtcccaaatcctggcaatgaacagcactgggcgcctgctttcctacatcgctattgcgagcggctggttcggcgtggcggtgaaggagggcactagccgctcaatcacgaagcgatcctaccgttactactaccgccgcagcttgaccggcaactggtttgcagaaatctggtctgtgcctaagtcgggtgttatcgctgcgatcctggcgctcccgttcatcgatatggcacgtgctgtaatgaagggccaagagcatggccatgaaggtctgctgttgctggcttctggcctgctgctggtgacgtgcttcctgccgcgtgcgttgcttggccggggtactcactttgctgcaatcgcgccgatcaactgcagtgggctcggtggctatggcttcgcccacatcatcaatatggctgcggctctggggggcctgtcgttcctttgggttgcatttagcgccgggtggagcgcctcggcatccgcgagttacgccgcaggctttctcagcgggcaagtgcagatgttcgcccatgaggctgcggtcaatggcgtactgatgaccgtcgcaacgacaccggtctgggtggcgttgggttgcctattcggtatggtctggacggtattgccggcagccgcgttctgggtcgtgtccctacgcttcatggccgcacgcagcgccaaaaccagactggaatccctgccgttcaactcgattcaggccgcgatgtatcgtggtagcgactttgagagagccgccgagttggtcgccccacaggtgacccttggttacttggtctacatctgcctgacagttggcatcatcctctaccccatccaggtgtgggtgcggtcacttttctga

SEQ ID NO: 327325 - DNA, 240 bp, Pseudomonas aeruginosa
gtgaaccagcaaaatctcgccgacttcatctggagcgtggccgacgtgctgcgtggcgatttcaaacagtccatctacggccgcatcattctgcccttcaccccgcgcgacgtggtgcgcctaaccaccaccctggagctccccccggatcaccaagcactcaatggcgaaggtgtggtgcgcaccgtgtacgactgcgccgctggcaccggccagatcgatctgagggaaacggtatga

SEQ ID NO: 327326 - DNA, 954 bp, Pseudomonas aeruginosa
atgagccaaggccgcagcctgcgtctgtttctggtggatggcacgcctaatggtctgctgactgccgagatcatgaactggaccggccatgtgctgaccggcccacgctctaagctggccgagctggtgcagcgctccgagtgcgcacgcaccggcgtgtactttctggtcggccccgacccggacaacagcctgcgctcgaaggtttatatcggcgagtccgacgatgtggccaagcgtctcaaaacccacaaccgcccggaggatgccggcggcaaggacttctgggagcgcgtgtgcctggtcacgagtaaggatcagaacctgaccaaggcccatgtgaagcacttggaaagcctgctgataggcgtcgccggcaatctggggcgctgcgagctggtcaacggtaccgcgcatgaatacggcagtagcctgccagaatccgaccgcgccgatatggctttcttcctggagcagattcgtactgtactaccagtgctgggcttcgacttcctgcgtgagctgatcaagccttccaaacttgttattgcgccagccgagcagcccgttagccagtcgccgcgcttcacactgcagcttcctaaaagcaaagaacgcgctctagcgcaagaagttgatggtgagttctttgtgctaaagggctcccgggcacgtgctcagtggattggaactgcggaccaccactaccgaaacctttacctacagttggtgagcgacggcgtaatggtcaacgacgggagcgaatatctagtgttcaaggacgattatgccttcagtagcccgagtgctgctgcagcggttgtatatggacgcgcggccagtggtcgaacttcctgggtagtggaaggctccagcgaaacatacgctgcctggcaggacagcaaactgagtggcattggtgtattgccggtaggcgaggtagccaatgactaa

SEQ ID NO: 327327 - DNA, 681 bp, Pseudomonas aeruginosa
atgactaaggcggagcagtcgcagcgtttgatcctggtggactacgagaacatcggcaagattgacctgtcagtgctcgatggctcctaccgagccatcatttttgtgggcgccaagcagaacacgcccaaggcttcacggacgccttccacggcacatcgcttttctcgtgtggatttccagaagatcgaaggggtggggaaaaacgcgctggatttccatattgctttccaactgggacgcatcttcgagacggcgcctgagacgcagtgcgtcgtcctgtccaaggacaagggcttcgatccgctgttggcttacctgaacaagaatggcttggcttgccagcgcattgaaggacttgatgagctggtgtcggaggagttgcctgagccagtggtgccagcgtcggatgatgcctgttcgagctgcggcaaagccagttgcgttgaacatttgggggggcagtggtgcacccattgcggcaaattctctagcccgcccgatccgcaactgatgccgtcgcgccaggcgaagtatcgcgagaagaaaaaagacagctacagctacgagccgctgatgggcacctgtgcctggtgccatcaacgcaccgacatgggtggtggcatatacgacgacggcgagtggatgtgtccaggctgtgtaggcagatacgccggttaa

SEQ ID NO: 327328 - DNA, 1647 bp, Pseudomonas aeruginosa
atgaaactcaccaccagctggttgaaaccaccctacgcaagtagcggcattgaccacctcggcactcaggcgccctgtgtgatgatctacggccagctactgcctggcattaccaatgttaccgatcgggcgcgctactactcgttctatccttggttggtatggtcttatgaccagcgctatgcgaaggatgattacaaccacttcgtcgaacggtttcggcgcgcggactgcctgtttaccctgattgccgagcggcacgcgcaggcgactgatcacaaaaacgagcgacacggtgtcgctatggtcggtcgcaccaagctggttccctcgctcaccagcctgaaagccggtgagccactacggttatccctctacgcgacgaccagggaaacgccccagcgctacttcatgaatcggctgggtggtctttcgcagtactacgcaggaactctggccgatctacaactgatggagtcctccggtcgatcctggagctcctatagcagccagtatggcgcaccgcttgcgcaaagcgttgagttgtccgtgcctggtgatcggttctgggaggttgtcgagaacgactcggtgacgctcgatgaactcgacgagatgagctccttctgtgcctgcaatattcccggtagccagggtgagcttcagcagctcgcagacatttttttcgatgctgacaaccgctattcggaggaaggcgctcagcgacgacgaagcctggggctgattcagcaactcgcggacaccctggcgaacggatgggacctgacagaggaagtgttccgaggctgtgtctatagtgccgcgttgcccaatggtgaggcgtgggaaattcccgatgccttgcaagccactcgggcgcactgggctgtctatgtgcgcaatgacctgatgtcagtggctttccagacaatcctcgccatctgcctacaggaacttcagccgcagtctgcggcgcagcgacgcgtctttcacagcgtcgaggcgttcgctgactggttttccggttcggaaaccgtcgccagagttgtgagtgatcttggggcggccagtttcgacgatctggttacaagcagtagggcgaatgctccagagctaactgactggacaaatgaagcccatgagattcagctgagttggcagttgattggtggttgggcgccgggcgtgaatattgcgccgctgctttcacagagcctgagtttgttggcaatgctggctgctcgcgatgaccttgagcagcagccgtattctgggttggcgataacttcagaggcgctgcgtgactatccgatcaacctcatcagcttccgtagccgtaatgccgactggaagacgatgcctctagagcatgtggttgctgacctggtcatttggtgtctggatacccatcttcgagtggcgctgcgcaaactccggcagtccaaccgctcgacattccatctgcgaccgtccgagcgaggcttggaagtggtgggcgaccagattccaccaccatcctcgaccacgcctcgtttccggcaggcggtacagatcctccgtgaccttggcatgctggagcgtgatgaaagccacatgatcaggctgactgcctcggggcggaagcggatggaggtcgctagtgtctga

SEQ ID NO: 327329 - DNA, 2550 bp, Pseudomonas aeruginosa
gtgtctgacgatgtctcccttctcgaagtgatcaagcgaggaggttacgaggcctcgctgattactaccttcaatgcgacgctgcccttctatgaggaggtagtgctgcgaaagctggttactgccggttgccggcataacgtggtgctgatggaccggagccagtgtgccgcttcctgggaaagccaggtcgctcggcctcgcttggctggccatgcctacacgcttttaccgatcggcgtgaacggcgccttccacccgaaggtatgcctgttggtggggcccaagagggcctcgatcttggtgggtagccacaatctcacgctgtcgggactcggcttcaaccgcgagatcaccaattggatcgaggtaggtgatagcaaggatgctgagggcgctgccgttctcagatatgtctggcagatgcttcgcgagtggattgagctggagcgcggcaaggttcctgaacctcttttggagtcggcgctagcaatcggccgtttcatcagtcctttggttgctaacaccggcgtcatgagctcgcctgcggtactggcgcaaggtccaggagggcagacgctgattgatcaacttgttgagcggattactgcaccggtcaggaagattgcggtgctgggggcgttcttcgatcgtgagctagccctgctcaagcagttgaaggctcaatggcccgccgcagatatcgtggtaggtatcgatcccgacacggtccagcatcctggcagctatgacgttgaaatggtccggtatgttgatgcgcgcgaggttgctgatcgggtcggctatctacacgccaaagctctctatctcgaaacacatgacgctgctgccgatgtgtttgtcagtggcagcgcgaaccccagccgtcccgcctggatggacgcggcgaatggtaatgtcgaggccgtggtgctccaatcaggcagcgctgcccgacttgctgctgaggccacttcaatgctcagcctgttcgagttgccagagctggaggctgaggtgttcgctgagatccaggagcgccacaaggtcgtcgagttcgagcagcagatgtctttgcctctgctttcgggcttttcggacggggaaaatggcctgatccgcatcagctatcggggtgagccgatgtcggtaactgcagccgtactgcttggcccgaaccaggagaagctggagacgcttactccactggaactacgtgacaacgaggtcgtgttcaggtctgaggtcgaggcaacgaacattcgctcctgtctgttggagaaggatggtaggccggtcgctcgggcgatgatcctgcacccttccattattgagtctagttcccggtcctcaaggcagtatcagattcgctcggcgttgagcgagctggggtcaagcgatgccgatatatccaaggtcatcgccagcgtcgaaaaggtcatcttcgcgacgcagactgattacgagatacaggctgctatccgtgagcaccgagagaaacagggtgggcctgcaactgaaggtggcccaaaatcgttggtgatcagcgttgctgatatgacgcgagtcaagcgcaagcagcgcctgctgaagtccggcgatctggcctatctaatcgatgtgctaatgcgtcgtctgagcgatggtctcgaagttcagagtgtagaggttgaccgtgctggccggagcgaagaggagcagatcggcctggaagacgagggtggcgaagagttcattagtctggtcgagacgcccaggttttccgatgctgaaattgcccaggtcgttgccagaaaggcgagggctttgagtaggaaaatggtcgagcaactgaagctggcgagccaggacgaatcgaggagggtcggcgcatcgatccagctgatcgcagtgcttgctctgattcgtgagttgcgccatctcgacaagcagaagcgctggcgggcaaccgggcaggatctcgtagaggagcgggaccgtcgctatcttctcgatgaaagcatcaggtacttgctcggctcggagtcacagctgttcgaagcgatcgacgagatagtcaatgacgatgcagacgagacgatgcagttgcgtaccttgctggcatggctggcttgggatctgggtgatgagttgacgaccaatgtcagcctaatgtggggcgcggacgaaaagcgtcgtaggttgcagacgaatgcagtgtttctcaggctgatgccgtcgatcgctgcagatcaggaagccggtaaagagttgcgcgaaagcattcagcgaacactcaaacacactccgagcgccaccattcaggcggagcaatggctaggtctgcatatggcttatggttcctcttggtcgcaggaacagaaggagaccgacgagttggagcttggcggatactgcaggattcatggcctggatgatgagccgagggtcatcatggagcttgatcagaataacgtcggcttctgggatttcggtgatgtacggaagttcaagcgtgaccgggtagttgggttgatgccgatacagccagcaagtcgcgctccgaattga

SEQ ID NO: 327330 - DNA, 636 bp, Pseudomonas aeruginosa
atgcgggtttacacgtatgtgatcgccacggacgcaggctccgcgccgaactacgatccgccggccgtaactctagctgtctgcaagccgcgcatccgcaagaaggcgaaggttggcgatctcgtgctcgcatttgcaggttcgaaggtgaatcccatctcaggccacagcgtcgtctgggccggcatcgtttccgaggtactgaccttcgccgaatactggaacgaccgtcgcttcgcctcgaagaaacctgaacgtaccgtcgtaccggacaacttctataagcctatcggcaacggcttactcgcttggcaacccaatcccgttcacgggcctgaggctcatgatcgcgacaccggcggactgaacgtcctcgtgttcgatcactcctggcgattcggcgcttttggccccgttctaccagaggagtttgatctgcgcatgagcgttggccggcgcggggagagggttgccgatctcaccgattccatgtggcagcgtcttgaaagttggctgaatgcccagccgcaagtaaccattgaggccgccaatgaccgcaagtcgagccgcagctgcacgccccgcgcgctgccaagatcatcgcggcctgcttcctcaacacgacggcaatgctga

SEQ ID NO: 327331 - DNA, 1257 bp, Pseudomonas aeruginosa
gtgtttttcgatttccgctacgtggcgccggtccgtggtatccggccggtggacgccggggcgcgcagcagctacggcagtccggcccgcttcgatgcgttgcggcggattccctgggcatgggggcggccgaccgatccggtgccgacgggcattgtctaccccgactatccggggccggtggtaccgatagatccacccgccgagcccgagatactggagacctacatgataggaaacacggtcaccctggtggtgctgccgagtcgcacgccgctggatgcgaccagcattcgcatcggcctggatatcgactcgttcgcctggtcgttctcggctgacctcttcggtcgcacctcgctggacctggcggcgccggatgccaacgggccgaagacggtagagctggagatcaacggctggacctggcggtttctggtcgagcgttacagcggcagcggcaagcatccgagcgagcgctacaccatcagcggcgcgagccgcacccaactgctggacgcgccctatgcgccgaagcgcagcgcggtgaacacggcgccgctgaacgcacgtcaggttgtcgacgaccagttgcagtacaccggcttttcagtgtcctgggacgtcgagaacatggggccgccggactggacgctgccggccggcgccttcagctaccaggaccagacgccgatgcaggtcatcgtcaagctggccgaggtcgccggcggcatcgtgcggccgggcctgatggacgactcgatgacgatcctgccgcggtatcgtgaggcgacctggtactgggacaccgcgattcccgaccggatcatcccggccgccatcgtcgccgagtggggcagcgagtggagtccccagccggcatggaatttcgtctacgtcagcggtaccagctacggcgtcagcgtgcaggtgcggcgcgccggtaccgccggcgaggagtcggcgcccgacgtcatggaggactggatgaccggcaccgaggtggcgcgctcgcgcgggatctgcgagctgtcgaagggcggtaaccaggcgatcgagacgcgccgtatcccgctgttccagaaggatgatggggtaccgggcctggtgcagcctggaatgctggtcgaggtgagggacgaacaggcgacctggcgcgggctctgcctggccaccgatatctcggccgagggggtaggggctagccgcgtgtggcagaccctgcgcatcgagcgccactacccgggaggctcctga

SEQ ID NO: 327332 - DNA, 237 bp, Pseudomonas aeruginosa
atggcgacggtcaatccctggcgtcggttcatcgggctcttaccgggcggcgcgcgcacggtgggggaggtgatcgatgtcgacgagggcgccggcacctgccgcgtccgcctgcgaaacaacgtcgtgatcgcggctcggggcacggcggtgccggcagggcagatggcgttcatcagcgatggcatggtgaccgggccagcgccgcagctcccccagttcgatatcgaggtttga

SEQ ID NO: 327333 - DNA, 225 bp, Pseudomonas aeruginosa
atgctcaccaaactcaaactcgccttcgtgaccggcttgctactgctgatctacggttgtcaatcctggtcgacgctggatccgttgccgcccagggttgtgactgcggactgcgagaagccaccagcgccggaggcctggttcatggagccgtacgcgcccaacttgaccgagcgcatgctcaacgaattgtcgccattaccgacgaaggcgaccgaggactga

SEQ ID NO: 327334 - DNA, 831 bp, Pseudomonas aeruginosa
atgttactcgctaaaagctgcatgaaagattacaacataaaacatggaacaattaagcttggaacattacacgaatacaaaacaactgaattgaaacacatcgcagatccccaagaaggatatctgaaatttaaattaaaattcgacggaaccgttgaagtagaaccaagatggttcaatgcacttgccggtggagcaatgcaaataggtcatgaggctcccattcggtacccgggcaaaaccaatgccaaatttgaagtaatgaacatcgtcagagccgacgcagaaaaagtcatcctaaaaaattcagaagcaaccattgagcgcgaatcactaaatgggttcgtctactgtatgtctcagataagaaaaacaagagactgcaaaggtattttccccgagtatgatgattactggttcataacagaaactaaggcgatgcaattcggcgttacactcggcgggattctgaggaatgccatcatagttggccgagcgagcggtaatcatttagcgcccgaatccatgcctattgaaaatttctcagtaaatgtggaaatgggaccggtacaatatgttccccgagagatccaggtatccaacggcgaagcattcaaacttgatgacttcatgagtaaaatggccagcatagcgttcatcaagccaccaactccatttgagaaagagcgcgaatatagattcaactacaccattatctctgacaacaaaatcattgaacccagcgtcaaatatgcactcctcgactcaaccccactccaaaacttagtaatacaggtagatttaaccgatcatccaagcaccccagcgtaa

SEQ ID NO: 327335 - DNA, 3027 bp, Pseudomonas aeruginosa
atgaaattcttcgaactcgaagccagtgatatttcagccctcgatgatggcgatttacgtgaattggttgcgcgtctgtgtgaggcagagttaattcaacaaggtttaccgccttcggtcgtaacttggggaggcgctcaggaagctgcggatggcgggcttgatgtaattgtaaggagctcgcaagtaatacctcatcccaacttcataccaggagaaaacacagggtttcaggtcaaaaaacactcgatggggaagtcggcatgtaagaaagagatggaagagaagggagcgctcaaggcaatcataaaggaccttgctactttgaaaggggcctacataattgttagcggtaaggatgactgctcagaaaaaatgttgcgtgatcgcctgcatggaatgcaggaagctgtaagcttattgcgagaaaagaaggatctgcgtctggatttctacggccgagaccgattgttgaattggttgaggcagcatcctagcgttgctctatgggttcgctcccgtttgggaaaacctttggcgggatgggagccctatggccgctgggcggctactccgttgcttcaggatgacgagttcctcgttgatgatcacccttgtgtgattgacgcaaactctggttcgaaagagccgatgtctgcatccataggaatccagctaactcgtgacaggttgagaaagcgaggaagcacggtgcgaattacggggctatccggagtcggaaagacccggttcgctcaggcgctgttcgagaccggggttggtagagatgcgcttcctgcaagtgatgtgatatacgccgacctcggctgtgaccttactcctacagcttcggaattggtcgcttacttaatggcaaaagacttttctacatatttggtattagataactgtccgccggatgttcatcgtaaccttcaaaaacaagtcgctaaaaatggcgcgaaattacacctcctcactatcgaatacgacatctccgacgacaggcctgaagagactgatgttatccatcttgagccaaccagtgaggctacggtgtccaggcttgtgcaaaagagatttcccgatcttggccgcgttaatgcagaccgagttgctgagttttcaggtggaaattcgcgtgtcgcacttgcactcgccagtcgggtggattcggaggagacattagcgagtttctctgatgaggatctctttcggagattgttcattcagcgcaaagagtcttcatccgatctattgcagagcgccgaagtactatctctcgtatattcattcaatgttgctcgttcggagtccaatgacgagctaagcgttctagatgcaatttccggtgtagagcggaaggtcttacatagagggcaggctgagctatttcgccgaaaactgatacagcaacgtggaagctggcgagcgatccttccacatgctttagctaatcgcttagcgaagcgggcactcgagagcatctctccagaggacataaatgcggagctattcaaagcggaaaaccttcgcttgcttcagtcatgcgctcatcgtatggggtaccttcatgactttgaaccagcacaaaaattagctcttacttgggtccagtcaggtgggccgctgcataatattgcattttgtagcgaccagcaccttttggttcttgagtacgtcgcgccagtatttccagatttagttttacagttaatagagcaagcatctgcaacgcctgggtttgcttcgcgtgataatggaaatttcattcggttcgtgcggcttctgtgtcatttagcgtatgaggatgagtcttttgaacaggcagtagagattcttcttaaatttgccgagactgaagaggtcgatgaaaaacacgacagtattgtcgggtacatgcgacagctcttttccctgcatctctctgggacggaggccacacctgaacggaggcaaaattttatacagaggctactcggggcggagacgccaagatatcgagaaattgctaggaagtttttagactccgcctttgaagcgaatcattggtcttcaactacaagcttctattttggtgcacggaagaggggggctgggtggcaccccaagtcttatagcgaggaagtcgcgtggtatgtggggcatattcgcttgctcgagccgatgttaagttcaagtcgagaagaagactcggcctgggcgaagtcgcttttaaaagatcacttccactctctttggtctattggtgggtgtctcgatatactcgaggagcttatacagacccatgggtgcaatggaggctggccagaaatttggatagtcattaagagaacaattcatcttgatggagtggggtatgctccggaaatactcgctaagcttgaacgccttgaaaggatgacatccccatctgacccttactctgaaattagggcgtttgccttggttgatacatggatgcatgctgagattggtggcgggaatttcgtagagaataccagaaaaattaatgccaagattactcagttgggaatttttgcagcatcaaatctcgattgtctggatcgattgggtaccgagctttggatggtgcgttcaaactcagcctggttgtttggtagaggtatagcggcaggaagctcaaactggatcgcaatatttgatatgcttgtggcttctttccaaatacatcgccgggaacaggccagtcttaaccctattctggggtatataaatggaatatacgatgcaagccctgctcaggcgcgtgaaattatagagcgtgctctagatgtgccttttttgaaaccatatgcggtaaacattatctgtactatccctattgaatcatggggaacaagaaagttgcaggagttggcgcgcgaaggcagccttgaggcatggcggtttgaacaaatagggtatggcggtgttcatgagtttatttctgatggcgatctggctattctcctctcaagtgtcaatgttttaaaaaaggttatatttcggtttttgaaatattaa

SEQ ID NO: 327336 - DNA, 1185 bp, Pseudomonas aeruginosa
gtgcacctggaactcggcgaacaaacccgtgccgatgccgacgatcaccgccagtaccagcgacttcaagaaagcactggcacaagcaaccgggaggaagcagaacagtacctaatacaccggctcgagaagctccgacaggagaaggtctacggtattcgccggatcaggagctggcgcgaagctgcgacccgctacctggtggagtgcaaggacatgccgtcgatcggcctggccgccatctacctcgagcagttggatccctatatcggcgacctaccgctcacgcacgtcgatgacgagtcgcttgctccgtacattaaagacaagctgaagccgggcaggacatcgaccggcaaggtgaagcctggtgtaaccccaaggacggtgaacattgccctggagaaggtcatccgcattctcaacctgtgcgcccggaaatggcgtgacgaagagaaacggccctggctggacacggtaccgatgatcagcaagctggacgagaagcgatcgaggcgaacgccctacccgctttcgtgggaagagcagtcgctgctgttctcggaactgccggaccacctgcggcgaatggcgctctacaaggtcaactgcggctcccgggagcaggaggtggtcaagctgaggtgggactgggagatcccagtaccggagctcgacaccagcgtcttcttgattccttcggattttggaggcagggacaagggatcgggtgtgaagaacggagaggaacggctggtcgtgctgaacgcggtggccaaatcgatcatcgaggggcagcgtggcctggatccggtctgggtattcccgtatgggatacccgacaggaacggcaaggcgacaccagttcatcggatgaacgattccgcctggaagaaggcgcggatccgggcggcgaagaagtaccaggaacgtttcctgcgaccggcaccgaagggatttgcctcgatccgcattcacgacctgaagcacaccttcgggagaaggctccgggcagccggtgtaaccgaggaagacaggcgggccctgctgggccacaagaacggcagcatcaccagtcactactcggcggcggagctaggaaaactgatcgatgaggccaacaagatttcggcgacggactcgcgagggccggcgctgacgatactgaggaggaaagcaggatga

SEQ ID NO: 327337 - DNA, 207 bp, Pseudomonas aeruginosa
atgaaggttttgttcgacacccgtaggattcagaaactggggcgcgtggcgctcagtgagcagctgctaaggaatgctgggctagaagagggggatcaggtcgacatctatttcgacgccgcgactaaacgtatcatcatcgagcctgcagcccagcaggccgatcagctggtatcggacaagctgtcatcagggaggagcgcatga

SEQ ID NO: 327338 - DNA, 912 bp, Pseudomonas aeruginosa
atgatcgcgggagcacttcgccgagaggagcgttattcggggcatgagtctttcgtgtgccgctacggctggctccctaagctgcataatgccatttccagtgatccgttggtgctaaaggatgaggctcaagccaccatcaccttgggtatcggccgtaacatggttaagtcggtgcagttttggggggaggcattcgggatcgtcgaggcccgggatgcgggaggctttcaatctggtccgttggggcggctcttgctttctagtgatgatggatgggaccgattccttgagcagcctgactcgctttggctgctgcattggtggatcacgacgcatgccgacgttgccgtttggagccttgttttcggcaagagcacctactcgcgctttgatcgtaaaacccttatcgcaggattgacggatcgcgccggaaaactcggcaaaaagcttgctgccacaacgttagaacagcatgccagtatttttctaaattcttataaacgcgaagagtccgcttcagacgatacctcctggtgcccactgcaagatcttggcctctttgaggaggcgactgctgatgatgggaagaccgtgtatctcgtcggcagaaatgccccctcgggtctatcgcctcgaattttcttgtttgcagtgttggatttctttgcacgtcattgcgcggttacccgcaacctgactgatctcatttacggagagttcagcccgggtgttgttttccgactagacgaatttcaggtgcgtgctcttctggagggcgtggagcaggaatttcctaacgttttgcgctttgttgacactgctgatactcagcaagtgattcttgagcctgtattggtgccagagtgggcggcatgcttgtgggaagccggggaagaattgaatgtctga

SEQ ID NO: 327339 - DNA, 3462 bp, Pseudomonas aeruginosa
atgtctgagtttttgataaaccatctcgagttagactcgaagtttctgcgttctatctctcttagccgagacctgcgttccccagagtccctggacagctatctcattactccggcggtgctgacagtgctgcgccagataggtggagcattaaaggccggaagcgtccagcgtgcctggaaggtgatcggcccgtacggcagcggtaagtccgcattgggcttgctgctggctcgtttactggagggcaaggaaagctcgcgggccatctataagcagctcgaatcggcttctcttgagaccgccgggttgttcccgcaggagcagaatcgctttgcgctggccatcacggggtcgcgctcttcacttggcgacgccctggctcaatcggtgatcgatgcgctggaatacttaccgagcagtcggctcgcgaaagagctgaagcgccagctggatctgaaaagtcaaacctatcgtgatctcccgttcaacgccgcagcaggcagcttgttgagtgatttcgttgcggtcactcgatccgctggtcacagcggcgtgctgctcctgatcgacgagcttggtaagttcgtcgagcatgcagctctctaccccgaagcaggcgacttgatatcgcttcagcaaatcgcggagacagcctcccatcctatggatgatggcttgctggtcctgaccatgttgcatcagcacttcgacgcatatgcaaagggcgtcggtaggagtctctcggacgaatggcacaaggtatcggctcgctttgacgatgtgccgttcgatgagccggttgagcgttacgctcatttcgccatgcatgcgcttggtgctgggccagccattaccgagtctcgcgcgattcagcaaaaggctcgggagacttaccaactcagcattggctttaagtttttccgtcactcagcggagagtgatttgttcgctcgggcagaggctctttatcctctgcacccgacggctttggccgctttagccgtaatatccaaacgctttggtcagagcgagcgttccttccatgcgtttatgcgcgggcatgaaataggtgctctgcgcgactacgctggacgttcgccggttcatacagatgcttggtatgggcttcaggagcttttcgactacctaacgacaggtatcggattgcgcttccgtgatctggaggccgagcgccgctgggagtatgcccgctcggtgattgagcgcagcgatgcagatttgacggcgcttcaggtcgaactgctcaaggcaatcgccgtcatcgagctggttgctccgtctcttcatatcgttgcgtcgcctgaaactctgggctttgctttgatgggggcgagcggcgaagtagagcagatagcctccgctttggccgatcttgagcgcagaaccattctgcaaagcaggcaggccagcagagactatgtctttgcgatgaaccaagcagtcaacatcgaagcgctttaccaagagactaagaagcggtccgacgacgagctgatgttcagcgggatctcttacgctttggctgagcggagtgttatcgcaagtcgccactatcagcagaccggtactctccgttcggtgagagtaatagctggtaccccagacacggtcaaccaggccatcggtaactatggccagcacgatggttgcatcgggttgatgtttgtggattcagcatcttctgatcagatcgcatcggcaagcacggtcgttggtgcggcagcggacgttttgactcttacggcaatagtgcacgtgggggctcgagagcgcagtgcgctggtggaatactcgcgctgggtcatggtgcatgaccaggtgaagagccgcttccttgatccttggactgaacgccatgtggaaacacagttagctaaatcgagagaggaggtttctcgcctcgttcttgctctgctgaaccgccaagcgaaggacagttcggcgatgacttactggtatctggggaaagaaatccagggcagtgagtcgatgaatctcagtcaagccgcgtcttggctttttgataccgtgttcaagtccgctcccacgatcaacaacgagttgatcaataaggacaaaccctcgtcggcaatcacggccgcgcgacagcgtttgtttgaactgcttgataaaaacggcagcgaggagctgcttggaattaccgacttcccgcctgagcgcctgctgtatgtctcgctcttgcagtccacaagattgcataggaagacaggtgcccgttggtctttagcggctcctgacaaggattctgatgctggggttagaaaggtttggctggagctcgatgccctgctcaagacggacaagccggtcagctttgctgatgtaataagtaggcttgctcagccgccattaggcgtacgcaacggccctgcctccatatggtgtgtggtctatctgctgctaaacagagagttctgcgcgatctttgaacgcggcagcctggttctggagctgacgtctgatcacatgcagcggatgttccgaagcccacagacgttcacattcaggcggtttgctgcggttgagcgcaaggcactgattcaagactatgcaacggcactgggtgctgtgggtgttcaagtcagcctgtactcctcgtatcttgacgtcactcgagggctaattcgctggtacatgcagttaccccagtactcgcaggaaacgttacgcctgtccgctcagaccaaagcattcagggatgttattaagcgggctactgatccagtcgctctgctcgctcaagacattccacgcgtgctaacgggtgtgaaaggcaaggagggagtggactttgtcaccctactgacagattcgctgacggagctgggtttggcatttagacgtctccaggatgaggtaagcctttcgatggcccaggcatttgcgattactgggcctctcaaaaccttgcgtacacaactgcaggaagagtgcgccgatgcggctcgctccctggcagatgcggatctgaaagcgttcatcatgcgctgtgctgatatcacgctcactgatgacaagtggttggattcgatcgcaagtgtggtcgcacaccgacccctggatatttggacagacgctcaggcgcctcagtttgcgaatagggtgcaagatctctgcggacgctacaaacgttggctgcgtgtggcgatgtcccgaggcgactttgagcgccaagcgcagcgttttgtgggcgttaccctgactctgccgagtggcgaagaggctgcaatgttactgacttctgatcaggagacgaagcaagtagcagatgatctgcttcgtgaccttgagaaacaggtaggtggcaatctggataaagtggcatccgcccttgcccaagctctgttgcaagtgcagcaaggctctaatgcgaataacgaggaagagctgactaatgagcaacgaaccgcaggttag

SEQ ID NO: 327340 - DNA, 828 bp, Pseudomonas aeruginosa
atgagcaacgaaccgcaggttaggcacatcctcagcctctcgggggggaaggatagcgctgcattagcaatttacatgcgcgatcgtgtgcctgagatggaatacatattcagtgacacgggtaaagagctgccagagacctatgactaccttcagcgtttggagaactatctaggcaagcctctacaccgcctcaatgcagatctggggttcgaccattggtacaccatgtacggtggaatgattccatcgaaccaccgtcgttggtgtaccaagatgctgaagctgaagccgtttgaggactactgcggtgatcagccggtggtgaattatgtaggcctccgtgcagacgagaatcgctcgggttatatcagccataagaccaatattaaggctgtctatcctttccaagaggacggcctgattctacgagacatcgaagaaattcttcggacatctggtgtagggatgcccccctataccaaatgggggcgtacacgttccggctgcttcttttgcttttatcagcagaagatcgagtgggttcgcttaaaagaaacccaccccgatctctatgagaaagccaaggagtatgaagtaccgttcgagaagaccggaaatttcttcacttggagtcaaggagaaagcttggcagagctcgagcgccccgagcggatggcgcaaatcaagcgtgatcacgcattgcgtgtcgagcggatggctcaaagaaaagataattctacgttgattgccgtcttttcagagcatgaatccactgaggcaccagaggacgatgacgatcaaggatgcttggtctgccaactttga

SEQ ID NO: 327341 - DNA, 2373 bp, Pseudomonas aeruginosa
gtgggtttcaaaattgcagctcggacacttttggagttagggaaggaacttataagctcggatgaggttgctatctatgagattataaaaaattccgtggatgccagggctagtaagataaaagtctcggcaaatattgttttggctcatgccgattatcagcgtgcaatcgatgatgtctcggacggagtgagaacagaaagcatatatggccgaatttctgaaaagattttgcctgacgggccctccgatgcggttaactcctttttgaatgaagttaagaagggggttggaaataagaaagagtttaaacgggcgcttgaaggggcgtatcgtaaatataattggcttgagttcagtgatgatggtcatggtatgtcatttgatgagcttgaccaggtctatctaacggttgggactcgttcaaggcggaaagataatatccaaggttctatgtacttgggcgataaaggggtgggtcgattatccgttatgcgcctaggggagctgttgcaggtagagaccacggtttctggtgaatctagatttagtgagctgaatattgactggtcagtgtttgatcatgactcagatgaagaaatcggtagcatacaaattgatccagagagggggcggattaaatctgagagttctgtgcatggaacgactatcaaagtttccaatcttcatggtgactggcccgctgaaaggtttgctgagaagttaaatgggcctgtggcaaggatggttgatccttttgttcctggacgggcaaactctttaattcaggcttaccacaataatcgccgctatttgattaattcaatacctgcaaaactactcaaggctgctcatgcattctgtaaggtgagtatgcgctttgaggatggcgagcctgttatttctggattgatgaattatagcttgcggcaagcagagagaaaaatttctcttcgtggggttgaggtctactcggttacgcaaagagtcctgcagaggaaaggtaagaaagggcatgcagcgatacttgggacacctataagggctcaggcacttaaggatttaggtgagtttgaggtcgagttctactggtataaccgcctgattgtcgaggcgattgatggtctcactgataaggcgaaagagaccaaggagcaaattgccaaatgggctggaggcttgatgctatttaggcatggcttccgagttctaccctatggtgagccagatgatgattggttggagttggataagcgcgcgtttggctccgcgggtttcaagttgaatagacaacaaataatcggagccgtccgtgttcactctccccatacttcgctgggagagcagacaaatcgcgaagggcttatggagactcaggcggctagcgcgttaaaatctatactgatgtggctgatgcattcagagtttcgtgggtttatcaatgaaatagatgagtatgaaagtataaacaagcgtgaagctagggccgtcgccgagcgctttagggagacggaaaaatatgtttatgcgaatattgatgagctccggagtgtggcgtcggtcgaaagcctttctgtatttaggcagctcgaaagaaatgtaagaaagctggcggatgagtgctcggcgctggtgggtaatactgagaaaattataaaagagtccgccgaagagtatagcaagtttctacaccttgcagggatcgggctaataactgagtttatctttcatgagctgtccagaactgtagagagggctttgagctctgtcaaagatgcgctgggtgagtttccgtctaatcgggttcttcagaatctagatgagcagcttaaaactcttggcaaaagagtttctgctttcgacgatatgacgggggagaagcgtcaaacaaaatcaagtttcgatctttctgaattgatttcgtctattttggagagccattcgagccagttcttaagggatggtgttgacgtagatttcgatcggccaaattgcccggttaatatccatgcggtcaagggtatggttatccagattattgagaatttgatatctaactctatgtattggcttagatatcaaggtgagtactctaatgagtttgagccgcgcatatctataagtattaatttggatggacctgttcttgaatttactgataatggaccaggtgtagaccctgagagagctgagataatatttagacctttggtgtcatcgaagccggccaatcaaggtagaggattaggtctttacatttcgagggagattgctagctatcatggctggaggctctttatggatcagaccattggctccgttcgtaagggtcggttgaatacatttattttggatatggataagtcgaaatga

SEQ ID NO: 327342 - DNA, 1884 bp, Pseudomonas aeruginosa
atgatagctcagcagacccttgtaggggccataaaaggtagcggtgtctcgagagttgcaattatcgatgacgcttttgatgcgcctatgattaaggatgagaagtggggggaggttctggatttctttagccagcaggatgggcgtcaggcatgtagtaaggctggagtctctgagaacttagttgatgaggctgttcaggctatttctgaatcagattatgatgctgagtcccttcggcagtgtattttttcgctatatagaaagtatatatctgacctttcccgggagtttgatcctggcggggtttttagagaggtgaagggagataaccttattaatgtgattccggtagttaaactgctaaaagcttgcatgccggagttggatattgtcacgcttggtgctcttgacaaggtgcccgcagatacctctgtcgatgttgtttttgttgatttgtttcttgatcaagatcttgctgcgggagaggatccagataccgaaaaaggtaatatagctgttcggacatctttggataaggttgcgccattcctttctaactctccctcagtgattctcatgtcgtcgcatgctcatggtatgaaagcggctagttacagagagcagcttgagcacggtgtgtttgcaagtagatttaagtttatagctaagcaacgcctcaagttggagggggaagatgttcgcttagaggatgatgttgctgaggcattgttggatatttttcagagctacaagttctctagagggctggataatttcttggggtgctggtctaagagtgctacggctgcagtaaataatgtcaggcgccaagtggcggagctagatcttcgtgagctgtcatacctagttcagtttagacttgctgatgaagggcagagcttatctagttacttggagtggttcataggtgagctcctcttggatagtttgagtgaaagcttggatgaaattaagggggagctagattttaagaaaacgctttccaaggaggttgctggcttaattgatggtgttttcgatgggcctaccgatacgattgcaaagatgtatcatagggttcgtattgactctcgtagaagagagccaaaagataattttcgtctcggtgatttgtatattgtaagtgaggaaggtcggccgagttctgtactgtccatcatgaatcctgattgtgatctaatgatgcgtcctaatgggaagcgggcaattacggatgctctgctggttactggagatctccaagggtttgatgcccctcagacttcgtcaggagatttcataatggttgatggtgccccatttaatattagttggaagtataagaaggttaaaagcctgccgttttctggttttctgaaggagcccgggctctcagaggggcagcatgtatatgctggggctcttaagccgctgtacgcacaagaagttcagcggaacttgcttaatagtttggggcgaataggggtatatgttccacctgctattgctataagtgctagtgcaaaggtggaggtcaaagttggaggctcagccagaaaaacaataactgttgatggggttgaagacacctcctgttatctgtttccgtctcgtggaggaacctctaaggctgtcgtggtctttaagcgaagctttgtgtctggacttgaaagcgccttgcgtgctattgattcggatgatcctagtattaaggctggagttaaagcactgagagctgagtctcttgtaaaattggtgaagggggtgccgcttggagattctgtgtgtggaatccttttgagcgataactcaaaagctaaacttccggagctcccttggtgttggataactattactattccagtagcaggaaatgaatga

SEQ ID NO: 327343 - DNA, 1350 bp, Pseudomonas aeruginosa
atgagcggaccgaaagtcgtacgaatcgtcacccgggaagaagccatcgccacctgcgagcgcgacctgcaacgcctggacaaggccctcgcgcgctgggaaaaccaggccagccggctcgcccagctcagcgacgccgagcgcgccgccgcccacgcccgccgcgccagcctgcacgccctgctcgaacaggaacgctggctggacgtgcaactacaggtgaagatcgaaagcgaattcctcaagcgcgacctcgccgaacgcgaagagcgcgccatccgccaggccgcggaaacgcgccagcaacaccgccgcctccaggaaaacgccagcgccctgctccaggccctcgacgccaggcccgatgccgccagcgcggcactccggcaaaccctgcatacgctggccgacggcgccctccgcgacgacgcggaagccctgctcgcccaaggcctcgccgccctcgccagcgcccccgccgaagaacgcctcagcgaagcccagcgcgaactcgcccagcgcctgaagaccggcgaaacgcccatgtccctggaacagtggcgcgcccgccagcaacaggacgccccgcacgaacagcgcctggcgcgcatcgaccggcacatcgccgaactgcaactgctgcaaggcgaggccagcgcccaagcgttcctcgagcgactggcacgcgccgaagccgaacagcgcccggagcgccgcaacctgctgctcgacagcctggtcctcgacctcgcccaggccgcccgcgaacaccagcagcaacgccagcgcctggaacacctgcaagacctcgccagcgaagtcgccgccctgggcgccgccgaacacgccgaactgctccagcgcgccgccgcctgccagcccgacagcgatccgcagcaactcgccgaactcaccgagcgatgcaacgccatcctcaccgcccacctccagcaacaggccgccctcgcccgccgccaggccgtgctccagggcctcgccagcctcggctacgaagtccgcgaaggcatggccaccgcctgggcgcagaccggcagggtcgtcctgcgcaaacccgccacccccggctacggcctggaagtcggcggcaaggccgacaacggccgcctgcaactgcgcgccgtcgccctcaacgccaaccgcgacagccagcgcgaccgcgacatcgaaaccctctggtgcggcgaattccaacgcctccaggccctgctcgccgcccagggcggcgaactcagcgtggaacgcgcgctgggagtgggagaagtggcgttgaaggagattggcgaggaggagcagcgggagatgggggtggcgcggcagagggggttgtga

SEQ ID NO: 327344 - DNA, 6297 bp, Pseudomonas aeruginosa
atgatacgtttctgccccaactgccagagcgaacgctcgctttcggaaatcttctgcgaaggctcgatccagggccagccctgcggctgggacctttccgccgaagccatccatcccgccggctggcgaccacagccggtgctgacccaggaagccatcgcgccgcccgccagcgagccgccagcggcgtccgccccgctctgcgccaacggccacccgctgcaacccggcgacctgatgtgcctggagtgcggcgccgcgccggccgaaggcccgctgccgatgcaggccgaggccacgccgcagcccgccgtcacggaaaccctgatcgacggctggcgtctgctgcggcagatcgccagcagcgacggcgtgcgcgagcgctacctggccgaacatgcggaaggcgcccgccaggcggtgctcaccctgtatcgcccgggcgccgagccggacccggcgatctacgacgtgatccgccgcctgccgcgcgaacacgtaccggaaatcctcgccaccggccgctgggacgagcgcgcctacgaagtggtcgaggagctcaccggcggcagcctcgccgacctcggcaccgtgctggaggaccgcgaggcggtgcgccacgtggtccgcgagctgggccacgccctgcacgtgttcaacgaagccggcctgcgccaccgcgacctgcgcccggccagcctgctggtgcgcagccacgagccactggacctggtgatcagcggcttcggctcggcgcgcctgtcggagttcgacctggatatcgtctcgccgctggagaccagccgctacatggcccccgaggcgatcgccggcggcgtggcggcggcttccgactggtggagcctgggcatgatcctgctggagcagttgacccgcggcgcctgcttcgaaggagtcaacgccaacgccttcctgatccacgtgctggccaacggcgtggcgctgcccgacgacctcgacccgcagttgcacctgctgctgcgcggcctgcttgcacgcgaccgccaccagcgctggcagtggccgcaggtacaggcctggctgaacggcgaggcggtggacgcgccggcctcggcggacagcgaaaaggacgacgccgaaggcgccagcatcgccctcggcgcacggcgcttccgcaagccgacggtcttcgccctggccgcggcccaggccgagcactgggcggaggccctcgaccacctgctgcgcggggcgatcgtcacctgggccgagcacatcggcctgtcgcccaggctgctcgccggcctgcgccaggtggcccagcacgaggggctggaggacgacttccggctgatgctggcgctcaagctgctgaacccggaaatcccgctgatccagcgcggcgagatcgtcacccccggctggctgctggagcatccactggagggctaccggctgatcagcggctcggtgcccgacctgctcgaacagttgcacaccgaaagctggctgtcgcggctcaagacccgcgccgagaacgtccgccagcgcgccctgcaccagcacatcgaactcgccgaagaacagttgcgcatctacctgctgtcgacctcgcgggcgcgcctcgccgcgcagtggcaggagcgccagcgcctcctgccggacaccgagcaccccggcctgctggccctggccgagcgccgggtgatcgccgaggaagacctgatcgtcctgctcagtgccaacatcggccagttccgtgccgccgaggcgatcgttgaggaagccgccggcctggcccgcgacgccgatgtgcacctgttcgacgcggagaccgcgcgcggcctgttgcagcactcgcggcaggagctgtaccgccgcgtcgacgaacgcatcagcggcttcgcccgcagcggcgtgcccagggtcgacgaatgggccgagcagttccgcctggagcggcgcatgccgttggcgagggtcctggtgctgctggcgatcccgccggaacagtggctggaaccgcagaagcagcagtacgtgtcgcagatcctcgatttcttcgagaagaaagtggtcgccgcggtgatgcgcgggccgctggtgcgcatgagcatcggcaagagcaccccacgcatcgacctcaacgaactgcacagcgcgcgacgccccgccgccgccctgctcgaccacctgctgcaacgcaacgcccgcgcggtgagcctcgacccggacagcttcctcgccaacccgcaactggaagtgcggctcaacgcgctgtcccggcaaagctcgctgtacaagcgcgacaccggcatcgacgggctctacctgggcttccccttcctgctcaaccgcgacccgcgcggcaccacccgcacgcgcatcgtgccgctgctgctgtggccgctgaagctgcaactggaagtcggcagccgcggccaggtggcgctggccttcgacggcgagcgcgaggaagtgcgcctcaacccggccctggaaagcctgctcggccccgagccgtgcaagcgctggcgcaaggtcgccgacgaactgctcggccgctccgcgctgcgcgccgccgacgtgatggatgccttcggcctgctcgccaccccgcgcgggcgggtgctggaaggattgccgccgagttccaccgaggtcacgccctaccaggaccaactggcctgcgccgcggtgctgttccacgtcaccttcatgggccaggcgatcggcgaggacctgcgccagttgaagagcctgccgccctccggcactggcctggagaccgcgctgcgcctgcgcgagaacggcgagccggaagcccgcgagagcccgccggagttgcagcgctacttcaccgtggccagcgacccgtcccaggaggccgccgtgttgcaggcccggcagagcccggggctgctggtggaaggcccgcccggtaccggcaagagccagaccatcgtcaacatggtcgccgacgccatcggccgccagcgcagcctgctgatcgtctgccagaagcacgccgccctggaagtggtgcacaagcgcctggtggccgagggcctgggccagcgcatcgtcatgctcaacgacgtcaaccgcgaccgcgaaccggtgatccgcaacatccgcgagcagctcgaagcgctgttcgccgacgccggcggcgcccagggctgggagcgccagcgcgagcgcctggcggcgcgtatcgaggcgctggaaggcgaactggaccgctaccaccagagcctgcaccgcgtggacgaggccaccgggctgagctaccggcgcctgctcggcgaactgatcgagctggagaaaggctcgccgccgctggacttcccggccctgcgccagcgcctggcggcgctggacatcggcagcctggcgcgcctggaggaaaactgcgcgccgctggtccgcctctggctgccggcccgctacgaaggcagcccgctggcgcaactgcgcgccttcgccaccgaccaggccaccctgcaagccttcgccgacagcctgcgcgccttcggcgaagcggagaacgcccggcagaaagccctcgacgaacacccggcgagcttcgaggtcgacgacccgacgccctaccgcgcctggctggcaagccaggtcggtaccctgctgaatttgcgcgaggagcaacgccagcgcctggcccactggttgccgctgttccgcgacgccgcgccaggacagccgagccgtggcgacggcctgctggcggaggccgagcagatcgaacggcaactgcgccagctcgacctcgaacggcacgcgccgctgctgtctcctgccctcgccacgctcgaagagaacaacctcgaacgcttccaggcccatgccagccaggtgctcgaggcacgcacctggctggcccggctcaacccgctgcgcctgctgcggcgcggccgcctgcggcgcttcctgcgcgagcacggcgaggccgacgacgacaatcgcctggccgtcctcctcggcgcctgcgacctggagcgccaatggcggccgctgcgccggcaactggcggcgctgcaacagagcctggggctggcggcgctcgccgctgacgccggccccgaactggccaacctggccggccacgccagccagcaactgcgcgagatccaggccctggctcgcggcctggcccaagcgccgcgcgccgagcagctcgacgcggtgatcctcaccggcgagaaacagcgcttcgaagcgctgctcggcgacctcgacgccgcgctgatccgccaggccgcacgccagctcagcctggacaaactcaaggtgctcgccgactggctcggcgacgaactgctggaacagctgcaccgcgccatcgccggcaaccagagcaacctgccggccctcggccgcctgcgcgaggcgctaccgcaactggtcgcctaccagcgcttccgtggccgcgccggccagctcgaagccaccgacctggaattcctggccctgctgcgccagcgccaggaacgactcgacgcgattcccgccgaagcactcgaagccacggtgcgccgcatgctcaaccgcgaagcgcggctgggctggaagcagcgcctggaacaagacaatccggaactgctgttcagccaggacgaagccagggccagggtcgccagcctcgccgaagccgatgtgcagatgcgcgcgctgaaccgcgaactgctcggcaagggcatcgacgccgcgcgcctgggcagccgcaagcaatgggaagacgtcacccgcctgaccggcaagcgctcgcggcgcctgcgcgagttcatcgagctgggcgccgaactcggcctgatgagcctgcgcccggtctggctgatgaaccccgacctggccagccgcgtgctgccgctcaaggccgggctgttcgacatggtgatctacgacgaagcctcgcagatgccggtggagttcgccctgccgaccctctatcgcgggcgggtcacggtggtcagcggcgacgagaagcagatgccgccgaccgcgttcttctccagccgcgtggaaagcgacgaggccgaactgttcgacggcgaagcgcccgacgaggacgccgacgaggagcagcgcgaagcctacgaggacacctggaaccgccgcgagatcaaggactgcccggacctcctgcaactggcgcgcaacgccctgcccagcaccaccctgcagatccactaccgctcggcctaccgcgagctgatcggcttttccaacgcctcgttctacggcaaccgcctgagcgtgccggtacgccatccgcaggccaacatactgcgcatcaagccgctggaactgatccaggtgaacggcctgtaccagaaccagagcaacgagcgcgaggccgagcgagtcgtcgactacctcgccgaactctggcgccaaccctacgcggcgcggccgtcggtgggcgtggtcaccttcaaccgcaagcaagccgacctcatcgaggagcgcctggaactgcgcgccgagcaggacgagacgttccgcgccgcctacagcgaggagcgcgagcgcagcgaagacggcgaggacatgggcgtgttcgtgaagaacgtggagaacgtgcagggcgacgagcgcgacgtgatcgtcttctcctccaccttcggccgcaacggccagggcagcttccggcgcaacttcggcgtgctcgggcagaccggcggcgagcgccgcctcaacgtggcggtgacccgcgcgcggcgcaaggtggtgatgatcacctcgatgccgatcggcgacatctccgacatgctcggcacccagcgctcgccgagcagcccgcgcgactacctgcaaggctacctggaatacgcccgcgcactgtccgccggcgaattcgccggcaccggccagctgctcgagcgcctgcaaaccgaccgcagcgaccagcgccgccagcactaccagcggcacgacggcttcagcgagatcgtcggcgagtatatccgctcgctgggctggtccgccgcgcccgccggcgaaggcgacgccttcggcctcgacttcgccatcgagaacccggccaccggcctctacgccatcggcatcgaatgcgacgccccctgccacccgctgctggaacgcgcccgcgcccgggaaatctggcgaccctcggtgctgcgacgggcgatcccgcacctccaccgggtttcctcccagggctggtaccacgacggcgacaacgaacgcgcacggctgcgcgccgccatcgagaaggccctggcgcccagcgcggaaacccatcccacggcagcagcggaggcctcccaatga

SEQ ID NO: 327345 - DNA, 948 bp, Pseudomonas aeruginosa
atggccaacgaatcccccgtaccccaagcggtcgacagcccgatcacccgcagcgcgatcttcctcgtcgcgaccctggcgccaggcgaggaacccgccgccaccgtgcgcgccctgtgcggcgacatcgcggcgctggtgcgctcggtcggcaagcgcgtgccgggcggcgacctgtcctgcgtgaccggcttcggcgccgccgcctgggaacgcctgttcggctcgccgcgcccggcgtcgctgcacgctttccgcgagatcggcagcggcgagcgggtcgccgtgtccaccccgggcgacctgctgctgcacatccgcgccgaacagatggacctctgcttcgaactggcgacccagttgctcggccggctcggcacagcggtcaaggtggtcgacgaggtccacggcttccgctacttcgacatgcgcagcatggtcggcttcgtcgacggcaccgagaacccgaccggtcgcgacgtcgcccgccataccctggtcggtgacgaggacccggacttcgccggcggcagctacgtactggtacagaagtacctgcacgacatggccggctggaacggcctgaccaccgaggcgcaggagcgcatcatcggccgcaccaagctgtccgacatcgagctggacgaagcgctcaagccgagttgctcgcatagctccctgaccaccctggtcaaggacggcgaggaagtgaagatcctccgcgacaacatgcccttcggccgtcccggctccggcgagttcggcacctacttcatcggctacgcgcgctcgccgcagccactggaggaaatgctcgagaacatgttcgtcggccgtccagcgggcaactacgaccgcctgctggactacagcagggcggtgaccggcagcctgttcttcgtaccttccgccgacctgctggaggcactggccgacaaggctccgtag

SEQ ID NO: 327346 - DNA, 639 bp, Pseudomonas aeruginosa
atgaaggtggttgcagtcaaagcgaaaaccctagacctgagcaattctgtccttgcccaaggtgagtaccgggagcagttcctggcccagcctgaagccaagcatccagaggtgaaggtaacggggtgcgtgttgatagggagcgaagaacagctgcagccacttagctccgcctacctctgccgcaactaccgaaacaacctgctggctgatgccaccaccacgtcgtacgcaagccgcatctcgtatcttctggataacctgaagacccaggtggagttcgaaagcagcgaacgtgacgaggcgctgttgagcgtcaccctgggtagacttgagagctacctggccggcctgaacaccgcaggtttggcgcccaagaccatccaaggcagagacgctgctcaccaccacctctttaatacgttcctgtgcaaacgcttcgacgaaaccccggccttgagggaagacaacccctataaggacggcctgatctggaatggtaaggcgaacacccttgggatcatccagccctgcagcatggacgagctagagcaactgatcttgcacacggactcggaacgtgagcggtgtctaatccaagctgtcttcgacacaggaatgcgagagtcagaagtgtag

SEQ ID NO: 327347 - DNA, 1185 bp, Pseudomonas aeruginosa
atgaatatgcctgaagaaaaaataatctctaaagattctgctcagtcatctctgcaccagatgatcgtattgaatgcgattacggcagatctatttaaagctcagaacggagcattgacatattacgatgcgaagataggaaaaaactgggatctcaaaaaaaataccgcattggattttgttaaagtaatcgagagaaagtttgcgaaaaataacaagtttcatggctatttctctcccaagaaccagcacatggctccagtagttctgcaggagttcgtagatggaaagatccgcttcgagcaactggttaaggcttttgttgataatgcctgtgatgaggctaacttaccaactcgtgggactttgactttgggtcacttggtaatggttcattacaaaactcagaatgacgctgatgatgtcggtagatttctagctgtgcttgtgggcaagcaagatggattcgatttcgactctgatctccaaccagttgatctaacaagtattaatactagcgagcttcgccacgctgcaatgtttgacttgaccctattcaaagagacctttcccaagaatgacggagatgcatatctaaagtttattactggaaaatcgaaaagtgcatttctgaaagacgccttcgggtgttccgatcacatacctaatcgagatagtgtggagcaagtgcgtgccgccgtattggatttcttaaatgatccatctatcccagagtcgcggcgtctaaagatcgtagatggtgtgactatgcatcttgtggttgccgctaaaagaaatatctctgtctccattcaggatattcagaaagtaataaatgactctctacctttggggtcaaataagattgatggttttagtggttttgtaaatgatggtggctatacgattagtgaaagatttcagccgacccgtataagtgcacagcttttacagaacgtggagattgctgatcctcaagctggctttaaatgcagtattaatattcagtctattagttatgctgacgctgaagatagaaaaatcataacggtagatgaagaccttacaagtatcaacatacctctcactccgcaggcgcgagaggtcattaagaagatactcggtggaaagggagaattagatcagcagcgaacagatacggtcgacactgcctctggtcaataa

SEQ ID NO: 327348 - DNA, 1677 bp, Pseudomonas aeruginosa
atgagactggttcatatttatataggtgaacataagggtgttcgggatctaaatgtttcccttggtggggaaacggtgtttcatgttgacggtcagactcttagtgttgagcatagggttgacacatccagatattacaatgggtatcactgttctgcgattattggggctaatggggttgggaaaagcacgattctggactttctagagtctgtgtactttccaatagactccagcggggttcttattttcttggatgaaaattcaagaattcacgtttgccaagtcaactaccatatactccattgctctgtccagttcgaaaggtatgatgactatgaggtttttgcgaaactctttaagactgtcttggttaaaataaataatgtatctgccgctcagtctagattaggatacgaaaggaaacataaccactctctgattcaagagagatccttagagcactacaccacgggtgctagtcgaaagaaaatgtactttgacaacttgcttgattacctaaggtggaatcaatcgagcagaaatgttgttcaggatgttggttttgaattcagatttcaaaactcatttaagcgcatggcatctttggttagacctgacgtgtactatcctggtcgccgggtggagctggagaatgcctacaacactattcagaagagtagaaagctactgagtccaagtagtcaaaaggatatatttgagcttctggtggcagcgctatctacatcaattatcgttgagcttgcagcaagctcaggcgctgcgcgcccagaagttctggctgtgctgcagttgcacttcatcagtgcgcttgctgtcggggatttaaattttcgtcgcagtatttcacagtcactagaagctctaagatacgacgaaaactgggacgtatttgttaaagacaagcaaggcaatagctttaagtctgttaattcaatagacgttgacattaatagaatgcaagcactttactctgaatatttagaggcccttcgcgacatctcagaaatcttagcttcaggtcgtcgtatatccatcgatgaaagcggatctttgattgttttggtagatcaattttcttttgctagtaaagtggtttatttgtcgacaaggcttccgagaaatatcctttcaaatataaattgggggtggagggggattagcacaggggaaatggcttacacccatcttttctccgagacatataattgcgcaaagaagtcaagaaaagcaaactatataatagtaattgatgaggccgatctttatctgcaccctgagtggcaacggggctttcttgactcctatcttgggttgctagataggttggattggaaaggcgcgctgccacagataatcatcactacccactctcctattattgtaagcgattttttacctcaagatattgtgtcattagtaaaagacgctggcggcaaggttgagattaaagagtcgcttggctttggaaccaatattacaaacttgtttattgatggaatgcaccttactgccacggtcggcgagcactcgaggaaagccatcgtctcgcttgtagaaaaatccgaatcccaaacattaagctccttggataaggcgctaattaaagggatgggcaacaagtttgtcagggagtaccttttgcaaaatgattaa

SEQ ID NO: 327349 - DNA, 1080 bp, Pseudomonas aeruginosa
atgaatgcatatattcatgcacttccaatagagcatcaagctagatttagctattttgatgacgccaaaataaatgagatcctaaattgcctgccaggcgatatccttggtcatatatatgatatttatggaaggtttccagaactagcagatagatattggccggcatacttcataaaagatgcgcccatcccggcgggtgtcgataaaaatggcgctcaaacacgtgaagagaaggctgttttagatgagctatcggagcaggctatcgcttatttagagcccatcgctgcgccggagttgacttacataagccatttgttgatgtcgcttaaaggggctgtaacttattccgctaaaagagaaattctggcgaatatagttaaggctgcgcggggagaaaatatagcgacagaaaaatttaagaagatctttgatgattggattaacagttttgaggatgtctttagctactcagcgctatccttagacattggtcatgacataactgatgaatggaaaatacatgtttgcttgtattgcaatgatgaacctatacagacaaaagggagtcgcgtgagatttagaacagatctcgatcatttctatccaagaactaaatttccatttttggctgtgacactatctaacttggttccggctggcaagacttgcaatcaatcctataaaggaaataaggatatgattgagtatgagcatccttttgtcaggggcgtcggtcagtcccgtgtatttcatctaaacactccatttggcaagataatcacagaggaaaatttctccgttagtgttgtggagcagggtggaaaattagatttgaatttgtccgaattcgagattgcccataactacgaaaatagtgatgaaattaagacttgggtagctgatgcggcgggtacggtcgagctaattgttgggtgcaatagtccgcaggtgaaagctgcgttgttgagaggcttaataaaagctgacaaaccatctcatcgtgagcggcacaagaaattcaaggctgattcaattaatcagtttgctggcaaagagattgtttcgttcttctaa

SEQ ID NO: 327350 - DNA, 285 bp, Pseudomonas aeruginosa
atgatgaaacgaatccttctcgatggcgaactatttgccgaaaactcgttatcaacccttgccgaagtagcgatcttggccgatatcgatgtatcgcgcctgtccttccaccctgacgaccttttcgccgaagctaataaaaaacgccaggacgcctaccgcctggaaagcgatccgctacgtttggaggcggaatacgatgccctcaaggccggcagcgagccggactaccgagcctgggtggcaaagatcgacgagatcaaggcgcgatatccgttgccttga

SEQ ID NO: 327351 - DNA, 1395 bp, Pseudomonas aeruginosa
atgccttggtattccacaggcacggtttccgtcgtcctcaattcggacacggtgaccggcagcggcaccgccttcagcgccaatgcgcgcgccggcgatgccttcagagggccggatggccgctggtacgagatcggcaacgtcagcagcgccaccgtgctgaccatcaagcccgcatatcaaggagctaccgccaacggccaggcatattcgatcaccccggtgcagggatattcgaaagcgctggcggatcagcttcgcgatctcaacaatctgtggggaagcaccctggcagcggtcaaaccgtgggctactgcggcgaccggccccgccgccctggatgacatgggcttcggcgtaacgggcaaggccctggccgtcagcgccacgccagttgcagccagatccgctttgggggtgcctgccgtgggtgactatggaatcggcctgacggcgggaagctccaataccttgagcgatgccaatgtggtcattcccaacggtatttaccgtgtagcatcgactaccgcagggaccatgctcggctcctatatcggacagatgctccatgccgagcaacagggtggatatggcgtgcagttggtcatggcggcgcagacccccccgcagatgcgtatgcgtgtaaagaatgcgggagcctggcaagcgcctgtggacatcttgaccagtaatgacgcggcgaatatgccgttggttaacctgatgcccgattctggacgctatgccgggacggtcaatccactggcgattactctcgcgcagccgtgggcgaatagcacattcagttcggggtggaacggagcatctttcatggatggaggaaagttcacccatgacaacagcagcaatggaggtggtggtgctgaactgaatgctcggatccagagtttgctgcagacgatggggcgcagtgcaggaggggcgcgctatggtgtcgagttccatgtcgctgtgatgacggcgggaattggacgggcgaatgagtccgttgggctggatggcggaagtcgcttcctggcgatgaccaacaacagcagagcactattctgcagcaatcaatgggctacggtggtcatgtgggttcgggttgaaagtggctccatgcatatcgcgacgccggcacagaccacggtggctgtttggatcaatggcgccgcaaagtccccgggtcatgtcttgacaccagccgaaggctgggttcacgtccgggtggcgacacgggcctggggtggctacgataacgcgttcccctatttccacaccgtaccgggatccgcagtggctatggcttgtccggcctggttcggcgggctagcggatgtcggcatccatacagctcctatcgccacgatcaatggagccagcgcagcatga

SEQ ID NO: 327352 - DNA, 675 bp, Pseudomonas aeruginosa
atgacttatggtgttcgtctagtcaatgatcgggatcagataaatgtagatgacaataatccaatctattatgtggtgcaggagggggtgtatacgcaaactgttaaatacccaaatagtattgtgttcgatgaaagttacaggcatacccttcagaccccgctggtttttgtgaaaccaaatgccggtggcggtcagttgtgcatgttactgaagtattttggatctgctggtaattggcaggggtgtgagtggcataccactactgttccaggtgcagccccaggcgtagtaggagggagatacaaggtagttgttccctttatgccaaagtctactggctgggggatgcatgttatggactccgctggacagattgtatttgactctggctataagcctgcgatattcaccggagggtcccagtactggacctactatgcttggaaccctaaccctcctgggggcggtggttcaggggtgaactcttggcagtcggttccaggtatgcctgcggatacctatttctgtatcactggtctgatggaggactgggatggtagaaacacaatgataggtgacctctggggtaatcgccaatatttgtatgtggtgcagtggagaagttatcagaataaaggagtttatccatctccactgctgatgattaagtag

SEQ ID NO: 327353 - DNA, 1074 bp, Pseudomonas aeruginosa
atggccaccatcgtcaaaacggaagcaggcacctggaaggctctggtacgcaaaaccggctggccgaccaacaccaaaaccttccgcaccaagcgcgatgccgaagactgggcacgccgcaccgaggacgaaatggtcagaggcgtatacatccagcgcagcggctccgaacgcatgaccttggcaatggcgctgaaacgctacctcagcgaaatcagccctaccaagaagccaactacccagcgcgcagaagccaccaaagcccaacagctggtcaaccacctgggcaaatactccatggccgccctctcggccgagatcatcgccggctaccgtgatacccgcctggcctcgatcaccaatcgcggcaagcccactagcaacaatactgtgcgcctggagctggccctgctcagccacctgttcaccgtggccatccaggaatgggggctgggtctcagcttcaacccggtgctgaacatccgcaaacccagccccggcgaaggccgtgaccggcgcctgtctgcagaggaagaacgctgcctgctgactgctgtgaacaatcacagcaaccccatgctcggctggattgtccgcatcgccctggaaaccggtatgcgctcgtctgagatcacatccctgcgcaggcatcaggtcgacatgaaaaagcgagtggtgcgcctctctgacaccaagaacgacagcgcacgcaccgtccctctcagcaagtgggccacagagactttccaggcagcgctgaacaatcctgtgcgaccgattgactgtgacttggtgttctttggcgagccaggcagaaatggcaagcgcagcccctacgcattcaccaagacctgggggctgctgaaaaccaagctcggtatgccggatctgcgattccacgatctgcgccatgaggctgttagtcggttggtcgagggcggcctgtctgaccaagaggtctccgccatcagcggccacaagtcgatgcagatgcttaagcgctacacgcacctgcgagctgaggatctagttagcaagctagataagctaagcctcgagcgtaaagcaccgtag

SEQ ID NO: 327354 - DNA, 438 bp, Pseudomonas aeruginosa
atgggcagcccggtgggaaaggcctggatgccgatgtcggttacgcgcccaaacgttgaccaggccgcgttcaccttgctcgaactgctggtggtgctggtgatcgtcggggccattgctgcggtggcgttgcccggcctggtgaggatgcaggagacctgggcgcgcaggaccgcgctggacgatctgttcaatcaattgcagaccttgggctatcgcgtgcgcagcgatgggcgggagctgctcattggtgagagcggggcggttcccgagcagttgctgcgactgcccgatggctggacggttactgctcggccgccgatacgttacatggcaaacggagtttgcctgggcggaaagttgcaggtccatcatgggcgcgcgacacatacgctgctgcttcagccacccctctgcgcgcccgggacgatccgctga

SEQ ID NO: 327355 - DNA, 1275 bp, Pseudomonas aeruginosa
atgtcctctgaggccgtttccccgggcctgcagatgacggccgagtggataccgctggggcagcgtttgctcgaacgcgggttggtgagcggccaggaactcgagcgggcgctcgacctgcaacgccggcttggcggccgtctgggaggcattctcgtgcgttccggagccatctcggaaaataccctcatgcaggtgctggcggagcaactgcggttgccgctggtgggggacgacctgcggaagccgagcgaagagtccatcgccgcattcctgctcagtaccccgatcaataccgactggttcgtcgaagagcaactggtggtctgggaggagggcgagcaactgctgttcgcggcgcgtgatccgttatctccttcgatacgcgaaaccctgggctatttctatccggagcgctcgattcaagcagtgctgtgccgctcccaggatctggacggctggttggagcactccctggacctgacccggcaaggtgcggatcggcacgcctacggcagcgaagacatccgctacctgcgggagttggcggaggaggcgccggtagtcgaactcgtcaacaacgtgatgagccaggccatggaaaagcgttcttcggatattcacatcgaaccccgggagttcgacttccgtatccgcttccgcgtcgacggcgtcctgcacgaccaactgagccttccccgcgagcgattcgcggcggtcgtctcgcggatcaagctgatctccgccatcgacatcgcggagcgacggttgccgcaagatggacgcatgagcatccgggtcagcggtacggagctcgacgtgcgggtctccaccttgccaggggtgcatggcgaatcggtggtcatgcgcctgttgccgaaggagcgcgaggggttgcgcctggaccggctcgggatgctcccggaccacttgcggaggatgcgtgcatgggtagcggaaccccacggcatcatcctggtgaccggccccaccggatcgggcaagtccaccacgctctatggcgcgctggaggaaatcaatgatggcgtgcgcaagctcatcagcgtggaagatcccgtggaataccaggtgcccaatatcacccaggtccaggtccatgccgacatcggcctgaccttcgctgccgccttgcgctcgatcctgcggcaggatcccgatgtgatcatgatcggggagatacgcgacctggagacggcggagatcgccgtacagtcctcgctcaccggtcacctggtgctaccaacgatgcggtga

SEQ ID NO: 327356 - DNA, 885 bp, Pseudomonas aeruginosa
atggctttcgtcgttagtttcctgtcgagcttgctctacctgacattcaccggcttgatcggtacggaaactttctacgcgctgttcggtggcggcgctggcgtggcgttgctgggctggcttgacgaccatggttacagcatcaccgtcgggcttaggctgttgggacatttctccgcggctttatgggtgcttttctggctcggaggcatgccgccagtccccgtattcggccacaccgtcgatctgggggtattcggcaacctgccggctttgctttatctggcctggttgttgaacctgtataacttcatggacggtattgatggcctcgccagtgtcgaggcgatctgtgtatgcctggggggaatactgctgctgtggacgctagcggccagtggcctggggcctcattatggcgagggcgtatggctactggccttgcttgcctgcaccgtattgggttttctcatctggaatttcccacccgcccgcattttcatgggggattccggcagcggtttcctgggcatcgtcctcgggacgatttctttgcagatggcctggttttccccctctctgttctggtgttggctgatcctgctcggggtattcgtggtcgacgcaacctttacgttgctgcgtcgtctgctacgaggcgataaaattcaccagagtcatcgcagccatgcctaccagcacgcagcccgcatgctgtcgcggcatttgccggttacccttggagtggttgcgatcaatctcttctggttattgcccctggcattactggtagtgctgggcattatcgatggggtcttgggaatgcttatcgcgtatgctcccctgatttggttggtagtcaggctcggggctgggaagccctga

SEQ ID NO: 327357 - DNA, 1206 bp, Pseudomonas aeruginosa
gtgctgaatacacctttttctccgtggccatcattttccgaagaggaggccaatgccgttcgagatgttgtcctgtccaacagggtcaattactggaccggccaggagtgccgcgagtttgaaaaagaatttgcgacctgggccgactccaggttcgctgtcgctctcgctaatggaaccgttgccttggatgtagcactgaaggcccttgggatcggagttggcgatgaggtggtggtgacctcgcggacattcctggcctctgcttcttccatcgtcaatatcggggccgttccagtattcgccgatgtcgacctggatacccagaacgtgaccgttgactccatccgtgctgtcctgaccgagcgcaccaaggcgatcatctgtgttcacctggcaggatggccgtgcgacatggacccgatcatggcgttggccgaggagcatgggctgaaggtggtcgaggattgtgcccaggcgcatggagctcgttataaagggcgttcggttggctccattggacacattagtgcttggtcgttctgccaggacaagataatgaccacgggaggagagggcggtatggtcactaccgacgaccgcgaactctggtcccgcatgtggtcgtacaaggatcacggaaagagttgggaggcggtctacgagcgggagcacgcgccgggtttccgttggctgcatgaaagtttcggtacgaatttccggatgatggaggtccaggctgtcatcggtcgtatccagctacgccggatgggcgactggcatgtccgccggcttgcgaatgcgcagcgcatctgggagaaagcccggaatctacctgggttacgagtaccgatcattcctgaaggtatcgaacacgctgcttataagtgctacgtattcgtggatccgccgcgtttggctgaggggtggacgcgtgatcgtatactgtccgaaatcgtcgcccgcggtgtgccgtgcttttctggctcatgctccgagatttatcttgaaaaggcgttcgattcgacggggtggcggccggaagtacgcttgcccaacgcggtgacgctgggtgaggacagcctcatgttcttggtccatccaaccttgagcgagagcgagattcagagaacactcgatgtgctggaggcagtcatgctggaggcctgccgggattctcaggtcgcgggggcgagtatcgggtaa

SEQ ID NO: 327358 - DNA, 636 bp, Pseudomonas aeruginosa
atgagaaagctggctattctcggcgctggcgggcatgggaaggtcgttgccgatacggcggaatgctgtggctgggaagaagtgtttttcttcgacgatgcctggccgggaaagagtgccaatggcagatgggagattgtcggtggtttcgatgatttgatggcccgtcttcccgagttcggtggcgttgtcgtggctatcggcaacaacgtcactcgccatgcaaagctcgaggcgttgaaggtggccggagctggactcatcgtgctttgccaccctcaggcaagtattagccgctatgcgtcgctggggctgggcacagtggtgttcgctggtgtggtggtgaatgtcgatgcccgtatcggagagggtgtcattctcaataccggttgcagtatcgatcatgattgcgtgctcggagctgccgtgcacgtcagcccgggggcccgaatcgcgggtggtgtggagatagcggagaaggcctggattggtatgggggcctgtatccgtcaattgacacgtatcggggctgggtcaatagtgggggccggcgcagtggtgctggaggaagtccccgagtcggttaccgttgtcggcgttcccgcaaagattctgcatatgggacagcacctctga

SEQ ID NO: 327359 - DNA, 600 bp, Pseudomonas aeruginosa
ttgatcaagcgcctcttcgatatcgttgcttctttactggggttgttactgctatctccggtcattctgttcgtcgcctggcagatacgccggaaactcggcaagcctgtgcttttccgccaggtacgacccggcgtcggcggacatcctttcgaaatgatcaagttccgcacgatgcgcgatgccgtggatgcgaacggaaacgcattgcccgatgtcgagcgtatgaccccctttggcaactttttacgttccaccagcctcgatgagttgccggagttatggaatgttctgaagggagacatgagtctggttgggccgcgtcccctcttgatggagtatcttccgttgtattccgtcgaacagtaccgaaggcatgaactaaggcccggtgttaccggctgggctcaggtaaatggacggaatgcgctgagctgggaggagaagttcgagctggatgtctggtatgtcgataatcgttcgttctggctggatcttaaaatcattctcatgaccttgaagaaggtgtttgtccgcgaaggaatcagtgcggatggagaggcgacgatgtccaaattcaccgggagcgagaagtcatga

SEQ ID NO: 327360 - DNA, 1110 bp, Pseudomonas aeruginosa
atggtgtgcggcagctatggcggagggcagactggtttggatgtgccctttagtaaagggagaagacagggcacggtggatggaatagacatcatcgagttcgatctggcgtattccaacactgatggtttcatcaagcgcactactacttttttcagttttgcccttcgtagcataagactggcgatgacggaggagtacgatctcgttttcgctacgactactcctctgactgccggcattccggggatctttgctcgttggctgcgtggcaaggcattcgtgttcgaagtccgcgatctctggccggaattgccgaaagccatgggtgtgatcaccaacccggtggtgctgggaatgatgtctgtcctagagtggctgagctatcgttccgcgcaccggctgatcggtttgtcgcctgggatcgtcgaaggtatcgagcgtttaggtgtgccggcgcacctagtggaaatggtgcccaacggctgcgatctggatatttttgcctccgactccgagccgtggcgtccagagcgggtcaaggcagacgacttgctcgcggtattcgctggaacccacggcgtggcgaacggtctggatgcggtgttgaacgcagctgcggagctgaagaagagaggccgggatgatatcaagttgcttttggttgggcaggggaagctcaagccggttctgcagcagcgtgccttccgtaaagggctggataatgtggtttttcacgagcccgtgaacaaggcccgactggcagggctcatggcctcggcggacctgggattgcaggtgttggccaatgtgccggctttttactatggcacttcgccgaacaagttcttcgactatatagctgcaggattgccggtgctgaacaattatcctggttggttggcagggatgattgctgacaatcaatgcggctttgccgtcgagccggacagtccgaccgctttcgccgatgcactggagcgcgctgcggacgatcgtgagtcgctgagagcaatgggggagcggggtagagccttggcggtccgagagttcgagagacacaagcttgcggaccggttcgtcgattggttggaaggggcgaagtcttga

SEQ ID NO: 327361 - DNA, 1833 bp, Pseudomonas aeruginosa
atggtaaaggccaggacggcgtgggcgctcggtgcccccaatctgctgcgggtgttggcttatcgcatgggggtgatgacagggctcaatcccgtccggcgtttgcaggagagagcgccgtccggtgatttcttcctgccgacgccgccccgtccctcggtagtttcctggctcgacaagacgccctggctgggtcgttacttcggctacgtgccttatgccgctgattccgttcccgattggcacagtaatctgctgactggagtgggaatgaccaattctgatcggaattggtgggagatccccgatttcgatctggcagtgggagacatcaaggctgtctgggaggcgtcgcgtttcgactgggtgcctgctttggcgcaaaaagctctggctggtgagagtggtgcgctggacaaactgaatgcctggttgaacgactggtgcatgaataatcctccttacaaagggccgaattggaaatgcggccaggaggcttcgatcagagtcatgcacctggccctggcggccattctgctgcagcaggtgacagctcctcctgccgcactgctcgacttgctgcgcatccatcttcgaaggatcgtgccaaccattcgctatgcgatagctcaggacaacaatcacggtacctccgaggccgcagcgttgttcattggtggcagttggcttcgggctcacggcgagcctgacgccgttacctggatgcggttagggagaaaatggctggaaaaccgggcgaaacatctgattggcgaggacggtagcttcagccagtattcgctgaattaccaccgggtcatgctcgatacgttctcacttgccgagctgtggaggcgtcagctttcccttgtggaattctctgctcgctggtattcgcgggcaagtgcagcgactcactggctgcacgcattcattgaccctgccactggtgacggtccgaaccttggggctaacgatggtgcacgactgctacctctgacccagaccgattatcgtgactatcgacctgcggtgcagttggccatggcattgttcaccgataccaacgcctatcccggcaatcaagagtgcagccgaccgctgctgtggctggggctcgatctgccttctgccgagtctcctgtaccccggagccgagtgttcgacgagggtggctacgccattctgcggagcgggcaggcaatggcaatgctgcgttaccccaggttccgttttcgccccagccaggcggatgctcttcatcttgatctttggctcgaagggcgaaatctgctgcgcgatgccggcacctacagctacaacaccgaatccgcttggctgagttacttccccggaacggccagtcacaacacgatccagttcgatggtcgcgatcagatgccccgtctcagccgttttctttttggcgactggttgaaggcgacgcaggctgtgccgctgacttcggagcgagcgtcggaggaaatgaatgcattttcggcggcctataccgatgggtatggcgccaggcataagcgggaggttgccttgtttccggatggactcaaggttatcgatgagatttccggcttttccgcgagtgccgtgctgcgctggaggctggagcctggaagctgggtgttggatggaaacacgctcaagggagagaggggagacgtgctgattttcgaaagctcgatgcctcttctgcgtatcgagctgacaatcgggtgggagtcgcgctactaccttgcgaaagaggaggttcctgtcatcgagatagaggttgggcaggcgggaacattgaagacggattacaggtgggcccgatga

SEQ ID NO: 327362 - DNA, 2142 bp, Pseudomonas aeruginosa
atgaagcaggttctccaggatatggccaagggtgggacgctggtaactgaggcgcctgcgcctcaagtgtccaaggaacatatcgtcatcaacagcagggtctctcttatttcggctggcaccgagcggatgctcgtcggatttggcaaggcctcctatctggaaaaggcccgccagcaacccgagaaagtcaagatggttctggagaaggtccagaccgatggcctgatgactactatcgaggctgttcgttcgaagcttgggcagcccctgcccctgggttactgcaatgtaggcgtcgtttccgaggtcggttccggagtggaaggtttcaaggtcggagaccgggtcgtatccaacggacctcatgccgatgtcgtaaaggtgtcgaagaatctttgcgcgcgcattcccgacgaagtcgatgatgagtcggcggcattcgtcgtcgtcgccagcataggcctgcaaggcattcgccttgctcagccgacactgggcgaggcgtttgtagttacgggtgtcggcctgatcggtttgctcacggtgcagttgctgcgtgctcatggttgccgtgtccttgccatcgattatgacgagaacaagctttccttggcccggggatatggagccgcgacctgcaaccccggtcggggagaagaccctgttacggccgccatggcgttcagtcgtgggcaaggggtcgacggtgtgatcatcaccgcttccacgcaatcatcggatcctgtaacccatgccgcacgaatgagtcgcaagcgtggccgtatagtcttggtcggtgtcaccgggctagagctgaacagggcggatttctatgaaaaggaacttacgttccaggtttcctgttcttatggccctggtcgttacgatcctaactacgaggagaaagggcaggattatccgctcggattcgtgcgctggacggaacagcgtaatttcgaagccatattggatatgctcgcctgcgggcaactggatgttcaggccctgattacccatcgcttcgctttcgaagacgctccgcaagcgtaccaggctctggttgacgacaaggagaaggccggtcttggaatcctgttgcagtacacggcggatgcggccagccgtgcgatcaggcaactcgaacttagacagggggttaccttcgatccggttcgtccggtgctcggtttcatcggagctgggaactatgcgtcacgcatgctgattcccgccttcaaggcagctggggcgcagtttcataccattgctaccgccggcgggatcaatggcgtcattcatgggcagaaggccggttttgccgaagcatcgaccgacgtcgatgcgatgctggccaacccgacgatcaatactgtcgctgtcgttacccgtcacgacagtcatgctcgtttcgtttcccaggttcttcgggccggcaagagtgtcttcgtggaaaagccgctagcaatccatgcaggcgagttgcaagaggtcagagacgcctatcaggcagccaactccaatggcgcttctgcacagctcatggttgggttcaaccgccggttctcgccgcaggtgcagaagatgaagtcgttgctggctgctgttaaagaacccaagtcctttatcatgacgatgaatgccggggccattccggccaatcattggacccaggacaaagcggttggcggtggtcgcatcatcggcgaagcgtgccacttcatcgatctgatgcgcttcctggccggcagccggatcgtttccgtgcaggctcgcagcatgggcgatggcgcaggcgtcgaggtgacggaggacaaggcatccataaccctggggttcgaggatggctcctttggcactattctgtacttggccaatggcgcggccagtttccctaaggagcgggtcgaagtattcacggctggacgagtgctgcagttggataacttccgcaagttcaagggatatggctggccaggcttttccaagctcaatttgtggaaacaggacaaagggcagaatgcctgtgccaaggcatttctcgacggactccagagcggacagcaggcgatacccgccgaggagatcttcgaggtggcggacgttaccatccaggtcgcagagttgctgcgtaaccaatga

SEQ ID NO: 327363 - DNA, 1014 bp, Pseudomonas aeruginosa
atggttaatgcaggaagatatatcattgtcatcggtggttttcccgatccggtaggcggtgtgactgcatttgtcagtcgcttggctgagaacaatatggtttcagaggttatcgacatatacccctcgcccagcaaaagcgtaccttccgaattcaagggtagagtggtttttcgtaaaggatttacgggattcctgtcttattatcttgccaatcatcgtcagtgggccggcaggctgttgcacttcaatttttccacgtccagggctatagttttctttctcgtccttccaaagttcgcttctgaattctctttaatgcttcatcatggaagcctacaggtgaaaagtagcaggaagtggctgtatcgggcagctctttccagacttgactatgtgttttgtatgaatgaggggcatcgccagttctatcgaggtctgggggttcccgaagagaaaatgcggctggtcagttcctatataaagatacctcctctttcttcgatcgttgaacccaggaaggatatcgagcagttcttcgatggtagccgcgttctggtggcctcgggatacccctcttcgctgtacaatcatgaatggtgtatcgattacgtttctgcccgggagggcttgaaactggctattttcctttatggttcaggagatgcacttcgtaatattgaggaacgcgccaattccgaacgtgtaaaaatattctggaactgcagtcaggctactttcaatcatgcgctttcgcgtgcttccgtctatctgcgtcctacctcgaaagacagtttcggtgtggcagtagcggacgcagtggaattgggtgtccccgtcgtcgcttcggacgtatgtaaacgttatccgggggctgggcttttcccggttgacgacttttcagccttctgtgaaacggttgactgcatattgaatgggacggacattcgcacggaagatagtgaggggttccgtgctttttcttattctgatttggatttgagggacgtatga

SEQ ID NO: 327364 - DNA, 1065 bp, Pseudomonas aeruginosa
atgcgcattcgtgaagcttcaatgctaaaatccaacagggttgatcccatactggtggtactgctgaactggaacgggtggcaggatacaatagagtgccttgagtctttacggcatctggagcagccgcaggatatcttggtattcgataatggctccgagaatgattcagtctaccaacttgaggagtacttgcgctctatctcgattgcgcaacacgaggaggctttcgagttagatgggcatgttctgcacatcgtccactatgatgtctctggtattttttataggctgtgctctcttggggagaatctaggtttttcggctggatgcaatttggctgtcaagtacgctgagagtatgagctatgtgtatgctctcttgctgaacaacgataccgtgttggagtcagattccttacggataatgcatgaggttttctcggatgtctcggcagatatcgtcattccgcaaattcgttatttcgataggcctgaaattatatggaattgtggaggagaggttagtcgctgggggcgtgttcgttattacttttccggaaaaaatggcacttacttggaaataaaagaagcctttccggtcggctttgctaccggctgttgcatgctcttcaaggttgacttcttcaggtctatcggtgggtttaccgagcagtttttctttggcgaggaagatgtagagttgagtttcaggcttcgtcgaagaggaactcatgtcgtttgcgcagcacgtgctatcatttatcataaggtaggtgccagcatccgaggaaaagacgagcttatttttcgcaagacgttcattcactacttgaatcgctttatcaatatgcgcactcagttgcctgtcgccgtctggaacgcttggcggttcctgatcgttttcaaggtagctatcactctgagaaagaatttcggcaagtcctcaggtgaaattctcgctttcatacgtctccttatgcgccagtcttcacgtttgccgggggtcgacaaggctctattcaagagcgtattgagcaaggggttggattacaacgatggttaa

SEQ ID NO: 327365 - DNA, 1251 bp, Pseudomonas aeruginosa
atggctagctattatatagaaaactctttgaaattcttgttttttgtcttgttgaccttgatgctttcttttcccaagtcatttgcagttataaagatagtaattcttgcttttatgttttcaatggtttttttacatatcgttcttggaggggttagaagattttctctggatattatttttttctatctgctgttcattttgctggctgtaatttggttgatcgtcgggcttctgaatgatggctatgcgatcgcattaggtgatgctttcaggttgtatgtggtcttttcgttgatatttttggttctttatctctggttggagaatttcgattatctacccttgattttttcttcgatcatggtttccacgataatcatatttgctttctgtttcttgtctattttcgaggcgctgtattcggtcagtctcttccccgactttcttcgcgttgaattaaatgtcatggctggtgtgcatgaggggcattttcagctcggaaataatagtgtaaattcgctattctttactgttccttttcttttgtctgcgcttgtgtgctctagcgagctttccaagagatataggtttcttttctttgtctccttggttcttggagtgatcgccgttctcctagctggtagaagagcccttatgttgattctattgatggttccgtttcttgccgtattctttcggcggattagcggtgtttcctccatcgagggtgggagaggggttgggaagattatcttcgtatttaccttttttgctgtttgtgtgggaggggtcattcttttggctggcctgaacgtaaatcaggccgcagagcgtatcgagagtgcctttgcaggtgatagcgtcagggtggatcaattcatttccctctggaagggattcaccgattctcctcttctcgggtctggcttcggtggatctgtcgatgtcattcgaagcgaagagcggccttggatgtatgagctttcctatatgcaattacttttcaatggtggtttactggggttttctctgattactggatgcattggcttcttctatctgaaagcattatttgtgataaagaatttttccctttacagggcagaggccatatccactcttgttggcgtattggttttttgcgtgggaagtgctaccaatccttatttttcgggatttgactctctgtttcttttaggtttcatcccgctcattgctagcgtggggaaggtgtatgcgcattcgtga

SEQ ID NO: 327366 - DNA, 1116 bp, Pseudomonas aeruginosa
atgctgatatgggctttggttgggtacgcaagtattttcgatgctgggctcggtaagtcagtggtaaggcaaattgccatctcttcagcggagcctgaaaaacgaggaccgatcctaggctcttccctgctgtttgttcttctctcgggggggctggcggctgcattggtccacttttttgcggaatatttggttgtagatatattcaaggttgatcgttcctcctatgaggatgccttgacgggaactcgagtggcggccctgtgtattcccttctttttagcatccttggtattacagggttatctcgagggggtggaggatttttattcttttaataagtatagggctctatcaggaactcttacttatcttcttccggtagcctttttactatttgagaagaccttttcttcattgatctatgggctgctttttgcgcgggctggttcttgctttctgattgcattaattgtttcgcgtcgttgttcagtttggacgtggcggtgggatgttaaggtctttaaaacgcttataagctttggtagttggctgactattactaatataattagtcctgtcatggtctatatggataaattcctgatagcaagaattacgggtgcaggagaacttgcatattatgctgcaccatccgagttgataaatcgtatgtctattctgcctgtagctattacgcgtgcagtatttcctcgtttatctgctttgggggggcagggatctgcctctgtgaagagacaggctctcctttattctggaggattggttctacctataattattgttctattttttgtagcgccttggggtatgggcatatggttgggtccagagtactcggggacggctgctcaggttttccagatcatgcttgtaggttatttgttcaattcgattgcactagttccatataataatctccaggcgaagggatattctcggacaacagcaatggtgcatctcttggaggtgcttccttatttgatgctgatgtacttttcggttcagcaatggggggttgtcggagcggcatccatctggtccttaaggatggctgtggactgcattttgatggcttatctggactcgaagtga

SEQ ID NO: 327367 - DNA, 1263 bp, Pseudomonas aeruginosa
atgagtttccagactatttccgtaattggacttggttatataggtcttcccaccgcagctgttttcgcttctcgacagaaaaaagtgattggtgttgacgtcaatcaagcggcggttgataccatcaatcgaggagagattcatatcgtcgaacctgatctagacatggtggtgcatgctgccgtgacagagggttatctgcgtgcgaccaccaatcctgagccggccgacgcattccttattgccgttcccaccccattcaagcatgagcacgagcctgatctcactttcattgaggctgccagcaaatctatcgcacctgtactgaagaagggtgatcttgtcattctagagtctacctctccggtaggcgctactgagcaaatggccggttggttggctgagtttcgtccggatctcactttcccgcagacacatggagaggcttcggatattcgggtcgctcattgcccggagcgtgttcttccggggcatgtattgcgcgaactggtagagaatgatcgggtgattggtgggatgtcggaaaagtgctcagaggcggcatcacggctttacaaaatcttcgtgaaaggcgaatgcattatcaccaatgctcgcaccgctgaaatgtgcaagttgacggaaaatagcttccgtgatgtcaatattgcgttcgcgaatgagctgtcgattatctgcgacaagttggatatcaatgtctgggagctcattcgtctggccaatcgtcatcccagggtgaatatcctgcagccgggtccgggagtcggagggcactgcatagccgtcgatccctggttcattgtaagcaagacacctgatgaagctagactgatccggagcgctcgtgaagtcaatgatcataagcctttctgggtcttggagaaaataaagctagctgtcgcagatgttcttcaaaaacagcctgagaagactgctagggatgtgtccgttgcatgtttcggcttggcattcaaggcaaatatcgacgaccttcgtgagagcccggcaattgcaatcgcgcagcaggtcgttgcgtctcatccgggccgagtacttgtagtggagcccaatatcgaggagctcccgggaaaattctcgggaaacttgactcttgcttctactgactcggctatgcaggaggcggatgtcgtggttcttcttgtggatcacaaagaatttcgagatatcgctccacatcctcgccaactcgtagtggatacgcgaggtttgtgggaggcttga

SEQ ID NO: 327368 - DNA, 249 bp, Pseudomonas aeruginosa
atgaatattctcgacaccggagagaagccgatttactggttcccgtacgttcggattcaggtgaactggatagacgatatcgatctccgggtgatttctggcgacctcggccaaggcccggcagattctctcgaaacctcctccgaagctttcgcggcgatgaccggtgacgaggacgaacttgcgggaggaatcgagaaactcggtcggagccgccgcttggcgagcaagcaccacatcgtgtcttaa

SEQ ID NO: 327369 - DNA, 189 bp, Pseudomonas aeruginosa
atggtaataggccgcaaggctagcagccaatgtggtggctgtatcgccgtggacaaggataatatcgggtttgaactgggcgaaaacctctttcattccttgcagaatggcgacagtgatatcagtcagatcctgacctgtacgcataatattgagatcgaagtcagggacgatcttgaagagatttag

SEQ ID NO: 327370 - DNA, 303 bp, Pseudomonas aeruginosa
atgcaatggttcaggcgatctgccgctgtagcggttctactggtggtatctatcgcagtcgtggttttcgtgctggaaaaccaaggagtggtccagttggccttccttggagtccagtttcctcaatggcctctggccgtctatatcatcattgccttcatccttggtgggttgctgggactggctgcccagctaccgttcctgaccatatcgcgtgtgcgagccagtagcttgcgcgccgagcttgtacaagctcgtaaagaggtcgacaccttgcgcgcggaaccttcgaaagtttcctga

SEQ ID NO: 327371 - DNA, 1029 bp, Pseudomonas aeruginosa
gtgtctattagaatatttacgaaagaatatgataatgtaattaaaagcgttgttcttacaggtgaaacgacttacggctttgcgatagataatatatttcctctgattaatagattctctgctcagcgaaaaatccaaaacccagctttttatgatcgtctacgcaatgatatcttaaaaggctgcttaatgcctcccataactctagctcttattgatacggaggttagtaatttcgaaaccacggaatctgcatccgaatatgcaaacagaaatatatccgatggatatgttctagatgggatgcagcgcctaaatacgctgaatagcattaagagtgatgagaatttccctcgagataaagctctatatcttagcttaatagtttctggcaacaaagatatgctgctatatcgcatgatcactctaaataatggtcagcgcccgatgacaccgaggcatcaaattgaggttttaacagaggagctatttgattttactggtctagaaattgagatacagtctgaaaaggagcgcggtgagaaaattaagcgtggcgcgtttaatctttccgatatctctaaagggtatctggcattcttcactaacagtgttcataatgagaataataagattattagtgagaaaatggatgagattatagttggaaacataatgtcggccgccgtcgtggaaaacggcctggagtttcagcaggtcctggagttggttgataaatttgcagtcaatgatacggctaaagcatggcttaaagtgcagaacaacctaattggattttgtgttggcgttaaggcatcttacggctatttagttgaattgactgataaacagtttggagaggctgtagagcgatttgatgcagcattcaagtctatcgatgccggcaaggttaatctcggaaaatatcggcgcgagcttagtaaaagatttattgaaaacattcaagacctaatacatcatagtgaactcgacctgctatcttacctttcggatgagattgcaagctaa

SEQ ID NO: 327372 - DNA, 813 bp, Pseudomonas aeruginosa
atgatattcagggtgttatcaggtagctgccaagttaccaatctaaatacagaggaaaatgtagagcttataactaactatttctacagcgatttgagagagaatccgacagggggattagacttcctaaatgaatttgaagaaggcatggctctgccggactatgaggagcaaataaatagagtagggtttagaaatagaaagttttataagagcttccttgccgagctttcgagttgcatataccacgaacatctggagaaacatacagctgcgttcgtgcatctttatcgatcctatgaacatctctcttatgcctttcctatgatttacgcatcgaaagcggatgactatatagggacatttgaaagtcttcgccaatggatgagtgcatcaagctctgacggaaacgtaggtgagctaaaatttcataaaaattttgttgcaagtctatttaaggggctgccagagttaagcaggacaattgacattgaaataaaaacaaagcaggaatatagggactctatatttgaggctcttgctaagaaagttgcaggatggaactcgcccgaaaagtatagcccagagactcgataccccgacaaactagcaattccatttatagagtatcacagttttcttgtgaatttacggaatagatttttccactactctaatgcaaggagcgataacattggcctggacgacattgtagaggcggatctgcttttttctttcgttaacaaggctaccctgaactatatttctacaatctttcatgcaattgtaagacatcaaatacaaagctcttaa

SEQ ID NO: 327373 - DNA, 927 bp, Pseudomonas aeruginosa
atgccgtacgatttagaaaagagattagtaataggtttagcctcaagcgccctctttaatcttgaagagtcagatagtgtctttagatcagaaggagaggatgcctacaggaaatatcaaagggaaaatcaaaacaaaccactcccccatggggtagcattctcctttattagaagactactttccctaaacaaactttcccctaaagacccaccagtcgaagtcatcttactttcgcgaaacgatccagatacaggcttaagagtcatgaaatcaattgagcaccatggcttacctatgactagagcagtatttctacaaggaaggtcaccacaaaactatatacctgccttaaaaatcagcctattcctttcagcaaatgaaacagatgtaaaacaagcaatgattgctggctaccctgctggacaagtactaaagactgccgcatatgacgaccctgaagataaagagctaagaatagctttcgactttgacggtgtaattgctgatgatgaagcggagtcaatttatcaagaaacgagaaatttatctgacttccacgatcatgagcaaagtcttgtcaatacaccacacaacccaggtccacttgcagagttccttaaaaaaatatcaaccatacaaaaattagagcaggaacaacaagaaaacgaccccacatactctccagtacttaacatcagcattgttactgctagaaatgccccttcacatgagcgcgtaattaatacaatgcgccactggaacataagagtaaattccgcatttttcttgggcggaatcgaaaaaaaatccgtattagaagtattgagccctcacatattttttgatgaccaaagactacatctagaccctgcctcatctgtactacgtcagtccatattccctttggcgtggctaacaacatag

SEQ ID NO: 327374 - DNA, 303 bp, Pseudomonas aeruginosa
atgtgggagtttccaggcggcaagcttgaagctgacgaaaccccgcaagcttgcattgtccgcgagttgcgcgaagaacttggtgtcgaatctgaggccggcgagatacttaccacatccctgtacacatacccgggcggcgccgtcgagctaatcgcggtagtggtcttcctacggtctacagcgtttaagctccaggtccacgacttggctgagtgggtccccccccatgaattgctgggctacgacctggctcccgcagatatcccgattgccaaagagatcatccatacatatggttag

SEQ ID NO: 327375 - DNA, 825 bp, Pseudomonas aeruginosa
atggttagctttacgccgccaatacctggcgcaacgctcaataaccacgaactcacctcgttttttctatgcagcggacagggcggtatgcgccggtccaaaagaaccaatacacttgttattgtttctaaccatgtagagtcattatatgacgatcgttggatagacgatgttctgcattacaccgggatggggcagactggtcctcaatcacttgatttcaaccagaacaaaacgctgcgcgagtcacctaccaatggcgtagcagtccacctgttcgaggttttcaccaagcgcgtttacacctacatcggtgaggttgtcctggccggaaatccctatcaagaacagcaactagatgcagaaggaaacaatcgtccggtatgggtattcccgttacgactgaaggcgggctctttgccggaaataccagatacaacattaaaagcacttgaagaaattaaagaaaaaaaagctcgctacctaagcgacgctgaagtcgagaaacttgcaaagcagcaggggcagacaaaggtaagcacgcgcaacgtcagcgcaactcaacaccaacgctctccctgggtggccgagaacgcacgacgccgagctaaaggttactgtgagctatgtgatgagccagcgccatttaaacggaaggacggcaccccctatctggaaacacaccatatcgagtggcttgcgaatggcggagcagacacagtagagaacaccgtagcgctttgtcctaactgccatcggaaaatgcatatcgtaaacaatgccactgataagaaaaaactcagaatacaggcgagtaaaggatag

SEQ ID NO: 327376 - DNA, 972 bp, Pseudomonas aeruginosa
atgagtccgatcacgcctgtaacagaaaaaattcttgctctctctctgctaaagggggtggggcctgttgcattacgcaaaatctcatctcaccctgactttaaatatgcctctgttgatctgctttcccgtcatttctctgttcttgataaagcactttccacaagcagtgcttgggaaattgcttccgatttagcaaagctacaggttgaagaggccatcaatcacgatgctagaataatttcatctgtcgatgaggactatccaagcctgctcaaggctactaaggatgacccttttatactttttattaaaggaaaactattgccaacatctaagaattccgtcgcaatcatcggtacgcgccaaccaacaaaacatggtggaatgattgccacgagaattgcacgcttcttcgctgagaatggatggagcattgttagcggacttgctgtagggtgcgatgccattgctcatacagcagctcttaaagcaaatggacatacagtagccattcttggtcatggattgcaaaccatatatccggctgctcaccgcaagctttcggatgacatactgaacgctggtggcgctctaattagtgaatatgcttttggggttaagacccagccgcagcagcttgttaaacgggacagaattcaggcaggcatggctcaaggtgtcataatggtacagtccgatataaaagggggcagtcttcatgctgcgcgcgcggcattggattacaagcgctggcttgcagtcccttaccctacactagaggatatagaaaatttagagtcaaaaatccaagcaaacctacttctggcagggaacgatcaaaagcaaaagcttgacttgcttcgttgtgatattgaagctttgagtggcttagtaataattagaggaaaggaggggtatcaggggttgttaaataaacgcataaatgaagatgctctatctcttttctga

SEQ ID NO: 327377 - DNA, 1236 bp, Pseudomonas aeruginosa
gtgtttgatttatgcctttttgatcttgatgatactcttataataacttcagatctggaggatataaggcaccaaggtcgaaatgatgatactgacgagtatcgagaggagcttgtagagcggttagagggaaataaagatcgggtaaggtatactcaatgtctcctggactccattcgtactgagaatcctcaaataaagattggcatatttactagagctcctagagcttatgtagaaacggtacttgagtgggcgtatccaagatacaattgggacgtaataatagcatttgaggatgtggaacatactaagcccaatggcgaaggtatagacatagcgatgcgtatatgtgaggttgaatacatcgattgtgtcgctcttgtaggtgatagtgaattcgatattcgcgcggcataccatgctggggttgtttcaattcttgatagaggcagttggcctgatagactacaatcagcccagtggaatgcactctcatgggttcctgatgcgataattagaagacctagggaaattctccaggccttatccaatctagcttcatatcttcctgctcttgaggcaggcctggaaagcgaaggcggctatttttctgagagatttgatcggtttaactattttattcctagctctcttggcggcgaccgaactagtttccctgtttcctatcttgggaggcattttgctggttatgattgtcttaaatatcgcgctcagtggcacgttctaactgaaagcattcacgatcataaagactcagaggacttcccgggagagtggattgtttctattataaattttatacggcaccattactctttttttggttttggaagtttaattgtaacttgcgttccggcaaggcctggcaggccgcataggcttcaatatttacttagtcagcttcagctagaagttgaaggggcaggtttttttagggatatacaattccgtccacatcttcttgcttatgcggaaggtgtacagtctaatagtagagagcatctttctcgagaggagagatttcgaaatattcgagatcatctgtttgttaatcagccagacgctatacctagtagtgctgagattctagtgattgatgatgtggttactagtggggcaacctttgtttactcaaagctataccttgaaaggcatgctggatgtagagtaacctgtttagcacttgcaaaaaatatcagtagagtcatatga

SEQ ID NO: 327378 - DNA, 1218 bp, Pseudomonas aeruginosa
atggacgatctattgcaacgcgtacggcgctgcgaagcgctgcagcaacccgaatggggcgatccgtcgcgcctgcgcgacgtgcaggcgtacctgcgcggcagtccggcactgatccgcgccggcgacatcctggccctgcgcgcgaccctggcgcgggtcgcccgcggcgaggcgctggtggtgcagtgcggcgactgcgccgaggacatggacgaccaccatgccgagaacgtggcgcgcaaggccgccgtgctggaactgctggccggcgccctgcgcctggccggccggcggccggtgatccgcgtcgggcgcatcgccgggcagtacgccaagccgcgttccaagccgcacgagcaggtcggcgagcagaccctgccggtctatcgcggcgacatggtcaacggccgcgaggcccatgccgagcagcgccgggccgatccgcagcggatcctcaagggctacgcggcggcgcgcaacatcatgcgccacctgggctgggacgccgcgtccgggcaggaggcgaatgcctcgccggtctggaccagccacgagatgctgctgctcgactacgagctgtcgatgctgcgcgaggacgagcagcgccgggtctatctcggttcgacccactggccgtggatcggcgagcgcacccgccaggtcgacggcgcccatgtggcgctgctggccgaggtgctcaacccggtggcctgcaaggtcggcccggagatcggccgcgaccagttgctggcgctctgcgagcgcctcgacccgcgccgcgagccggggcgcctgacgctgatcgcgcggatgggcgcgcagaaggtcggcgagcgcctgccgccgctggtggaggcggtgcgcgcggccgggcacccggtgatctggctgagcgacccgatgcacggcaacaccatcgtcgcgccctgcggcaacaagacccgcctggtgcgcagcatcgccgaggaggtggcggcgttccgcctggcggtgtccggctccggcggcgtggccgccgggctgcacctggagaccaccccggacgacgtcaccgagtgcgtcgccgattccagcggcctgcaccaggtcagccggcactacaccagcctctgcgatccgcggctgaacccctggcaggcactcagcgcggtgatggcctggtccggcgcagaagcgatcccgagcgcaaccttccccctggagaccgtggcatga

SEQ ID NO: 327379 - DNA, 624 bp, Pseudomonas aeruginosa
atgagcggcattcccgaaatcaccgcctatcccttgccgaccgcccagcagttgccggccaacctggcgcgctggagcctggagccgcggcgcgcggtgctgctggtgcacgacatgcagcgctacttcctgcgcccgctgcccgagagcctgcgcgccgggctggtggccaacgccgcgcggctgcgccgctggtgcgtcgagcagggcgtgcagatcgcctacaccgcccagccgggcagcatgaccgaggagcagcgcggcctgctcaaggacttctgggggccgggcatgcgcgccagtccggccgaccgcgaggtggtcgaggagctggcgccggggccggacgactggctgctgaccaagtggcgctacagcgccttcttccactccgacctgctccagcggatgcgcgccgccggccgcgaccagttggtgctgtgcggcgtatacgcccacgtcggggtgctgatctccacggtcgacgcctactccaacgacatccagccgttcctggtggccgacgccatcgccgacttcagcgaggcgcaccaccgcatggccctggaatacgccgccagccgctgcgcgatggtggtcaccaccgacgaggtgctggaatga

SEQ ID NO: 327380 - DNA, 474 bp, Pseudomonas aeruginosa
atgccggtacaacgcccctacaaccccaacgccaagctgatggcggaaatgctgcagaacgattgggcgaagatcggtatcaaggcgaagatcgtcacctacgaatggggcgaatacatcaagcgcgccaagggcggcgagcatgacgccatgctgatcggctggagcggcgacaacggcgacccggacaactggctcggcaccctctacggctgcgacgcggtggacggcaacaacttctccaaatggtgcgacgtcggctacgacaagctggtcaaggatgccaagcgcaccaccgaccagggcaagcgcaccgagctgtacaagcaggcccagcacatcctcaaggaacaggtgccgatcaccccgatcgcccactccaccgtgtaccagccgatgcgcaagacggtacacgacttcaggatcagtcccttcggcctgaactcgttctacgaggtcagcgtcggcaagtag

SEQ ID NO: 327381 - DNA, 1599 bp, Pseudomonas aeruginosa
atgcgaccacgctctgccctgcgctacagcctgctgctgctcgccctcgccgccagcgccgccatccaggcccagccgaagaccctggcggtgtgcaccgaagcggcgccggaagggttcgatccggcccgctatacctccggctacaccttcgacgcctcagcccatccgctgtacaacgcgctggccgcgttcgctccgggcagcgccacggtgatcccggccctggcggaaagctgggacgtctccgctgacggcctcgtctacaccttccgcctgcgccaaggcgtgaaattccacagcaccgactacttcaagccaacccgcgaattcgacgccgacgacgtgctgttcagcttccagcgcatgctcgatccgcagcaccccgcccacgacctttcgcccagcggctacccctacgccgacgccatgcaactgcgcgacatcatcgagcgcatcgagaagatcgacgaacatcaggtgcgcttcgtcctcaagcacccggaggcgccgttcctcgccgacctggccatgccgttcggctcgatcctctccgccgaatatgccggccagttgatcgccaggggcaagggcgacgaactcaacagcaagccgatcggcaccggcccgttcgtcttcacccgctaccgcaaggatgcccaggtgcgctacgcagccaaccccgactactggaagggcaagccggccatcgaccacctggtgctggcgatcaccctcgaccccaacgtgcgcgtgcagcgcctgcgccgcaacgaatgccagatcgccctgacgcccaagcccgaagacgtcgccgcgttacgccaggacccgcaactgacggtgctggaagaagcggcgatgatcacctcacacgccgcgatcaacacccggcacgaaccgttcgacgacccgcgcgtgcgccgggcgatcgccatgggcttcaacaagtcgtcctacctgaagatcgtcttcggcgaccaggcccgcccggccatcggcccctacccgccgatgctgctcggctacgacgacagcatccgcgactggccctacgaccccgaacgggccaaggccctgctgaaggaagccggcgtcaccccggacacacccctgaacctctacatcagcaccggcagcggccccggcggcaacccggcgcgagtggcgcaactgatccagtccgacctggccgccatcggcatccgggtgaacatccgccagttcgagtggggcgagatggtcaagcgcaccaaggccggcgaacacgacatgatgctctacagctggatcggcgataacggcgacccggacaacttcctcacccacaacctcggctgcgcctcggtggagtccggggaaaatcgcgcgcgctggtgcgacaagggcttcgacgaagccatccgcaaggcgcgcatgagcaacgacgagagccaacgggtagcgctgtacaaggaagcgcagcggatcttccacgagcagatgccctggttgccgctggcgcatcctttgatgttcgacgcgcaacgcaagaacgtcagcggctaccgcatgagcccgatgtcggcgcgggacttttcgcgggtgaagctggactga

SEQ ID NO: 327382 - DNA, 1218 bp, Pseudomonas aeruginosa
atgaccgtgggtgttggcgggagtacccctgcgcaggcgctggagcgtctgcggaacatgatggacggcgcgcagccgatcggcctggcgtcttaccgtgcgcgaatcgccgcggcccaggcgtggatgggcgagcatggcatcgccgcggcgtacctgcatgcaggcagcaacctgcgttacttcagcggcgtgcaatggcaccccagtgaacgcctggtgggtgctctactgcccgccgagggcgccctcgaataccttgcgccggccttcgaggaaggtacggtgcgcgacttccaggtggtcgatggcgccatccacacctgggaggaacaccaggatccctatcgcctgctgctcgatcgcctggaggcgctcggcgtgggcgagcgcagcacggtcgcactgtgtccgagcctgccgttcggcatgttcgagcgcttgcgccaacaggcgccgggcaggaacttcgtcagcgccgcgccgctgatcgaccagggacggatgcgcaagtcggccgaggagctggcgctgatgcagcgggccaaggacatgaccctggaagtgcagaaggccgcggcgagcattctccgcgaaggcatcagcaccaccgaagtcgccgagttcatccaccaggcgcaccgcaaggtgggcgcgcctggttcgaccttctgcatcgtcctgttcggtgccgccagtgccttcccgcatggggtgaagcatgcgcaggtgctgaaggatggcgacatggtgctgatcgataccggctgccaggtccacggctaccagtcggatatcacccgcagctatgtgttcggcacgcctagcgcacgccagcgcgaattctgggggatggagcgcgacgcccaactggcggccttcgaggccgcgcgtctgggccagccctgcgaggcggtggacgccgccgcgcggcgttcgctggaggccaacggcctggggccggactaccgcctgcctggcctgccgcaccgcaccgggcatggcatcggcatggacgtccacgaaggcccgtacctggtgcgtggcgatcgcacgccgctggatgtcggcatgtgcttcagcaacgaaccgatgatctgcgtgcccggcgagttcggcattcgcctggaggatcacttctacatgacgaaggaaggaccgcgctggttcacccaaccgagcccgtccatcgacgatcccttcggcctcggcggctga

SEQ ID NO: 327383 - DNA, 564 bp, Pseudomonas aeruginosa; identical to SEQ ID NO: 320834

SEQ ID NO: 327384 - DNA, 1146 bp, Pseudomonas aeruginosa
atgaggattaaacgaacgctgctggttctgctgacgttgttcatgagcgtttgcgccagtgctgaggactattactggccgcgtggtactcagaaatatggaagctatatggaagtggtcgaggaggcgcgaaaagcggcgattgccaacaatcctggctattcgcgtgtcgaggctgtgcgcgttatctaccctgccaatggcaggcaggatatggcgacctatggactcgagttctactgccttagccagggcgtggaaaggatgtgtagcacgtcctataacaatccggtgtataggaaaggggagggttgtaccgcgcccaagattccggacgaaacaaccgggacgtgtaaagaaccccccacgccaccagaagactgcatcaaagggctgacggatctgttcagttcaccgccctcgaacatcttcgtgtcgggcggcagaaacttcgtgaatagctcgccgcccactggctgcaagaatggctgccagtacctgccgaccacctcgaagaccaccagttgctatcgctatcccggcagcgacaaccaaggcttctgcaactacgtgttgatgacggacggtagtgcctgcgccgctgactccggcaatcccggcatgaccggtccctcgttgaacgacaccccgccgaccaatcccgacgaaccgccgtccgacccgaatgatcctggctgtcctcccggctatagctggtccgggacgacttgcgtcaagacgcccacggattcgactgagccggggggcgatggcggtgatggtggtgatggcggtaacaccggtggcggcgatggcgggggcgacaacggcggcggcaatgacaacgggggtggcgacggcggcaccggtggctccgatgggagcggcggcaatggggagggcggcggcgatggaagcgggggaggcgacggcagcggcggcggaaccggtggcggcgatggcgcgatggcggcaactgcgacccggcgaaacaggactgctcccccggccctgccggccccggcggcgaactcaaggaacccaagcccggcacctgggatgacgccatcgccacctgggaacagaaggtcgagcaggccaagaaagaactcaaggacaaggtccgggccaacgtcgatcagatga

SEQ ID NO: 327385 - DNA, 669 bp, Pseudomonas aeruginosa
gtgaagttccacttgatgccctggctgccgaccaggcaggtcagctccacgccggccgcggcgttctgcgagaggaggctggcggtgtcttccaccaggacgcccaggtcgaacgggatctgttccaggaccagttgcccggcctcgaacttggagaggtcgagcacgtcgttgagcaattccaccagcaccttgccggagtcgtgggcgatcgacagctgctggcgctgttccggggtgagcgggccgtcgaggctcagcgagagcatgccgagcaggccgttcagcggcgtgcggatctcgtggctcatgttggccaggaagctggcgcgggcctgggccatatcgagagcggtctggcgggcttcttcgagttcctggttggatagcgtcaggcgcgcgttggcggccttcagctcggcggtacgggcggcgacgatgctttccagctcctccaggtactgggtcaggcggttctccgcctcccggcgctgttcgatctctaccgagatgcgcccgagctggcggttgatgacttccaccagcacgccgatctcgtcgcgttcgtggcccttggggcagggcaggcgcatgcgtgccggcgagcgtggatcgtgtccgctgagggcctggatcaggctgaccaggggcttggtcagcagggtatag

SEQ ID NO: 327386 - DNA, 1653 bp, Pseudomonas aeruginosa
gtggcaccagcctcggcggtaccggcgatcacgctaccgttgctcggatcgatcaccggggctgctggcgccagcgagtcgacggtggcgctggtgggactgctgttgttgccggcggcgtcctgggccagcgcattgatcaccgtgccattggccaacggcgtagcgggcgtgaaggcccagttgccgctgccgtcggcggtgacctggccgatcgggttgccgttgccgtcggtgaggatcaccgtggccccggcttccgccgtaccgctgatgacgactccgttgctcggatcgatcaccggcgccggcggggcgatggcatcgacggtgacgctggccggaccgctggtgttgccggccgggtcctgggccacggcgttgatcacggtgccgttggccagcggggtgctcggggtgaacgtccagttgccgctgccgtcggcggtggcctggccgatcgggttgccgccgccatcggtgaggatcaccgtcgcgccagcttccgcggtaccgcttatctcggtgccgttgctcggatcgatcaccggcgccgccggggccacgccatccaccgtgatcaccgccggcgcactgtcgacattgcttgggctgcgcgccaccacgttgaccaccgtgccatccggcagcgggatgcctggagtgaaggaccagttgccgctgccgtcggcggtgacctggccaatcgggttgccgttgccatcggtgatgatgatggtgttgccggcgtccgcggtgccgctgatcaccgagccgttgctcggatccacctgcgggatcgacggcagtgaggaatccaccgtcgtggtagcgggagggctggtattgccggcggcgtcgctcgcggtcacgttgaccacggtgccgttgggcagttgcgagccgggcgtgaagctccagttgccgctgccatcggcggtggtctggccgatcgggttgccgttgccgtcggtcaaggtcacggtgctgcccggctcggcggtaccgttgagcaggttgccgttgctcggattgaccacaggcgtgttcggcgccaccgcgtccacggtagtgctgccctgcgggccggtattgcccgcagggtcctgggccacggcgttgaccaccgtgccgttggccagcggcgtggcgggcgtgaaggtccagttgccgctgccgtcggcggtggtttcgccgatcgggttgccgttgccgtcggtgaggatcaccttggccccggcctccgcggtgccgctgatggtcgtgccgttgctcggatcgatcaccggcgccggcggcgccaccgcgtccaccgtggtggcggcctgcgggccggtattgccggtcgggtcggtggccgtggcgacgatcaccgtgccgttggccagcggcgtgcccggcgtgaagctccagttgccgctgccgtcggcggtgacctgccctatcgggttgccgccggcatcggtgagggtcacggtggcaccggcctcggcggtgccgctgatgacgacgccgttgctcgggttgatcaccggcgccggcggcgcgctggaatcgacggtcaccgtcgccggcgggctgctgttaccggcggcgtcctgggccaccacgttgaccacagtaccgttggcgatcggcgtggacggggtgtag

SEQ ID NO: 327387 - DNA, 1062 bp, Pseudomonas aeruginosa
atgccccgcctttccgccctgctgttcctcgccctcgcaccctggctggcccaggccgaggagaccctgcgcgtctacaactggaacgactacatcgacccgcaggtgctcgagtccttccagaaggacaccggcatccgcgtcgagtaccacaccttcgccaccgccgaggaactggacaaggcgctgcgcagtggcgaggcgatcgacgtcgccgtcccctcccacgacaccctgccggccctgctgaaggacaacctgctgcggccgctggacttcacccagctgcccaaccgcagccatctcgaccgtcaattgctgagcaaactggccgcggtcgatcctgacaatcgccacgccgtcccctatctatggggtgccgtaggcctggccatcaataccccgcaggccgaagccgcctatggcgggccgctgcccaacagctggagcctgctgttcgacgccagccagagccagcgcctgaaaagctgcggcatcagcctgctggacgcgccggacgaaaccctggcgatcctcctcaactaccagggccgcaacctcggtcgtactgcgccgagccaggtacgccgcgccgccgaggcgctgcacggactgcgaccgaacctgcgctacgtcgacagcgagcgctacatcgccgacctcgaaggcggtcgcctctgcctggccatggcctgggtcggcgacgccctgcgcgcggccaaggcgggccagccggtaagtttcgaggtaccgcaggaaggctcggtgctgttcatcgacaacctggtgatcccggccggcgcccagcatccacgcgaggcgcaccgtttcatcgactacctgatgcaaccgaagatcgccgcacagatcaccgccgccaccctctaccccagcggcaacgccgacgccgccggcttcctcgatcccgccctgcgccagcaacccggcctgtatccggaccgcgacaccagccgccgcctgttcgccctggaaacgccgccggaaaaactccggccggtggtcgacgagatctggaaggccttccgcggcgccagccactga

SEQ ID NO: 327388 - DNA, 309 bp, Pseudomonas aeruginosa
atgagcaagcaacgacgtacgttttccgccgagttcaaacgagaggccgcggccctggtgttggaccaaggctacagccatatcgacgcctgccgttcgctgggggtggtggattcggccttgcgccgttgggtgaagcagctcgaggcggagcgccagggtgtgaccccgaagagcaaggcgttgacgcctgagcagcaaaagatccaggagctggaagcccggatcaaccggttggagcgggagaaagcgatattaaaaaaggctaccgctctcttgatgtcggacgaactcgatcgtacgcgctga

SEQ ID NO: 327389 - DNA, 822 bp, Pseudomonas aeruginosa
gtggtctgttcagctttcgatgtggcgcggtcttgctactacgtccaccgtcttcgacggcggcgtgtcgatgctcaccgcgtggcgctacgcagccaagtcaaccagttgttcagccagagtcggggctcggccggcagccgcagcattctgggcatgctgcgcgaagagggcgtgaccatcggccgtttccgagtgcgtcggttgatgcgtgagctaggcctggttagcaagcaaccgggctcgcacgcctacaaacaggccacggttgagcggccggatatcccgaatcggctgaaccgcgaattcgcgaccgagcatcccaatcaggtgtggtgtggcgacatcacctacgcctgggcgcaaggccgttggcactacctggccgcggtgctggatctgcatacccggcgggtgatcggctgggcgttctcggccaagccggatgccgaactggtgatcaaggccctggacatggcctacgaacagcgcggcaagccacagcaggtgctgttccattcagaccagggcagccagtacgccagccgcctgtttcggcaacggctctggcgctatcggatgcagcagagcatgagtcgccgagggaattgctgggataactcgccgatggagcgcctgttccgcagtctgaagtcggagtgggtcccgtcaacgggttacctgacggcgcaggaggcccaacgggacatcagtcattacctgatgcatcgctacaactggatcaggccgcatcaattcaacgacgggttaccacctgcggtggccgaagaaaaactcaacccactgtccgggatgggttga

SEQ ID NO: 327390 - DNA, 345 bp, Pseudomonas aeruginosa; identical to SEQ ID NO: 318213

SEQ ID NO: 327391 - DNA, 726 bp, Pseudomonas aeruginosa
atgccgcaggtacagcgcgacctggcgcatgacttgcaggaaaagcgggagcagttgaagcaggtcagggaaaacctacatcccgatccctatgtccggcgcggccaggaaaacaacatcgaacggctggagcgcaagatcgaggcgctcgaagagaaaggcgtgacgccggaagtcgagcaacgcctcggcgatctcggcgcgcaggagattcccggactggcgaagaacaccggcgaggacgacaagccctatcaactcgtcgaagtacccggcctcaaggtggtcgtcgccaccctggccaccagcgaccccgcccccggcagcccgccgccagcgcgcctgtccgccgaagccgaggccgccctcggggcgccgccgctgaaggcgcgctacaagcacatctacgtgcactccaagctgctgctggtggatgacctctataccctgctcagctcggccaatatcaatgtccgcagcatgcatggcgacagcgagttggggattgcccagcccaatccggatttggcgagggcgatgcgggaggagttgtgggagctacatgcccagaaagtggctgcgacaaccgaaaaaaacttcaaactctggaatcagaaaatggatgcgaattggagacagcaacgtaaagacgagcctttggtagctaacttgcttcgcttctgggatgtcgtgacaccttatagccccggtctcacggtggactga

SEQ ID NO: 327392 - DNA, 1533 bp, Pseudomonas aeruginosa
atgagcgacctaccgagcgtcgtgttcggcgacggcccgctgcgttggcaggaactggtcgcggtggcccggcacggtgcgcgcctggaactgtcggcggcggcctgggcacggatcgacaacgcccgcgccatcgtctgccgtatcgtcgccaacggcgagcgtgcctacggcatcagtaccggcctcggcgcgctgtgcgacgtcctgctggaaggcgagcagctcgccgagctgtcgcgcaacaccttgctcagccatgcctgcggggtcggcgagccgctgcgcgacgaacagacccgggcgatcatctgtgccgccgtcgccaactacagccagggcaagtccgggctcgaccgttcgctggtggaagggctgctggcgctgctcaaccacggcattaccccgcaggtgccggcccagggctcggtgggctacctgacccacatggcgcacgtcggcatcgccctgctcggcatcggcgaggtcagctaccgcggcagcgtcgtgccggccgccgccgcgttggcggcggaaggcctggcgacggtgcgcctgggagccaaggacgggctctgcctggtcaacggcacgccgtgcatgaccggcctcgcctgcctggccctggacgacgcgcagcgcctggcgcagtgggccgacgtgatcggggcgatgagcttcgaggccctgcgcggccaactggcggcgttcgacgccgagatcgttgcgctcaagccgcatcccgggatgcagcgggtcgccgccaatctgcgggccttgctggctggcagccaggtgctggagaacgcccgcggcatccgcacccaggatgccctgagcatccgctcgataccgcagatccatggcgcctgccgtgaccagttggcccacgcggcgcggcagatagagaccgaactcaactcggccaccgacaacccgctgctgctgggtacgccggaggcctaccgggtggtatcccaggccaatccccacggcgaatcggtggcgatggccgccgacctgctggcgatcgccgtggccgagctgggcggggtcgccgagcggcgcctggatcgcctggtcaacccgctggtcagcggcctgccggcgttcctggtgggcaagccgggagtcaactcggggatgatgatcacccagtacgtcgccgcctccctggccggcgagaaccgccagctggcgcagccggcggtggtcgacaacttcgtcacctcggcgctccaggaggaccacctgagcctcggcaccagtgccgcgctcaagcttggcagggccctggagaacctccggcggatcctcgccatcgagtacctgctggccgcccaggccttcgaattcctcgccccgcaacgcttcggccagggcaccgcggcggcctggggcatcctgcgcgagcgcgtgcccgcgtacgacaccgaccgctggctggctcccgacatcgccagcgcggcggccatcctcggcgagcggaagagtctcgcccggctggccgcgagcataggagacctgcaatga

SEQ ID NO: 327393 - DNA, 366 bp, Pseudomonas aeruginosa
atgctccgcctccttcctctcctgctatccctcgcctgtctcgctccggccttcgccgacgagcgcgccgacacccaacgccagctggaacagacgcagaaggacatcggcgagctgaagaagctgctggacggcatccagcaggaaaagagcggcgtgcagaagcagctgaagtccaccgagaccgagatgggcgacctggaaaaacagatcaaggccctgcaggacgagctggacaagagcgaagccgagctgaaacggctggatggggagaaaaaaaactccaggacgcgcgcattgagcagcagcgcctcctcgccatccaggcccgcgcggcctaccagagtggacgcgaggaatacctga

SEQ ID NO: 327394 - DNA, 573 bp, Pseudomonas aeruginosa
gtgtgggcgaccctgaatggggatccgttcggcgatggcgacccggcctataaccccctggaaacggtctggcggctcgaattccgcttccatcactccatcgtccagcagttctccgaaggctcgcgcatggcttcgggagaggtcatcggctgccgcacctatgaggggctttgcccgcacctgcaaggactgtggaactacgcctgcgaaagcttcaagctgctgagccggacggcggtctacgatccgttctggagcctgatcagccaggatgcccgcgtccaggtcgagtgcgatccgctgatcgagcgcaccgagtatcggcgctattacaagaccgccaagggctttagcgggcgtaactgcgagatgtttctcggccagttcgtgagcctgatcgcgcgggagcgtgtcccggcaaaaaaggctattgagtccgcccgtaaactggagttctggcacgttatcgaagaccactatctcgccaagggttggactcgtcgcgatctggaaaggcacatacacaagctgatgtgtgatcggtatctgcggcgggggtatgccgtctaa

SEQ ID NO: 327395 - DNA, 1761 bp, Pseudomonas aeruginosa
atgtttatgtctaggatacgcgtaaaaaacttcaggtcacttgtagatgtggagctgaaagtttcagattatactgctctagtaggactgaacgactcgggcaagagtaatttgctaagagccttaaatcttttctttaatcaggaaactgacccaggacatcctttagattttctcaacgacttcagtcagcatgcaaaaaccatagatagaaaagcaaagcaaattgaaattgaaatagagttctctcctcctaaaaattattctgataacacatcaataatctggagaaaactatacaggtcagacttgaaggatcccgcagaagagttttacaagacggatcgatcagaattttcaaagggttcaaaggctgaatattgggtgcgcaacatcgcttatgagtatgtgccagccattcgggggaagcatttttttgggttattaaagcgtcgtctctataaaacactagctgcgactgtagcagcaaacctgaaacaagcatctagcatgtttctcgccaatctaagacaagaagtgaaaaatatagaaacagaatcactcaggcttctgcaactaaaaacagagttttccctcccatccgacctaggtgacttgttcgaagcattaggttttgactctgaagatgactatacaaagaccgcactacagtacagaggagacgggatacaaggtaggcacgtcccattaatatacaaattccttgctgatcagcgtaaaaaaaattcttcaaaaggaaaacctagggctgagacaatttggggctttgaagaaccagaaaataaccttgagcttttaaggcaaatagaaacagctgaagaatttaaaaattattctaatgagattcagatacttataagcacgcactctcctgctttttatggaatggcaaaagaggcgggaaaaataagtatagccataagggattctggaaaaacaagctttgtggatagcatttcacctgaagacatagactcgcagcttggccttatggcttttgttgaaccatacattcgtaaagcgcaaactgaaagagagaatctaattcgatctataaaaaacttaaaagaggacaccttaatatttaataagccagttctgtatgtggaaggcagcacagacaaaaaaattatagaggccgctttcaaagcccttaagatatcgatgaattttgaggttgtttgtaaggaaggacttaatggaggagccaattgggtggcggactgctgtatagcaagaagcgccctaacagacgtttcctttaaaacagcggcactacttgatgacgatcactcaggtagagaggcgtctaggaaaataagtgagattgctaagagtttaggtcgggaaggaagagtcaagataataaccgtcggaaaaaataacggcaatgatcttgctcgacaagtaaagaaatgcggcgtagatataccaatgaatattgaagaactctgtagtgtaaatgcgtggagatttgcagagagtaagggctggcttgaggagagagatactttagtaaaagataatgcggaaaaaataaataagaatacttcattggcagacttgattagcgaaaaaatagaaaatcccgacattaggctgctagttgaatataaggttaaaagtacgaaaaaggggagtttctcaaataaagttgctgacttatgggaaagtggtgaggagttgccaactccatctttagaagcactggttttagaaattaataaaattttctcttaa

SEQ ID NO: 327396 - DNA, 195 bp, Pseudomonas aeruginosa
atggagcgcctgttccgcagtctgaagtcggatcgggtcccgtcaacggattacctgatggcgcgggaggcccaacgggacatcagtcattacctgatgcaccgctacaactggatcaggccgcatcaattcaacgacgggctaccgcctgcggtggccgaagaaaaactcaacccactgtccgggatgggttga

SEQ ID NO: 327397 - DNA, 261 bp, Pseudomonas aeruginosa
gtgctggatctgcatacccggcgggtgatcggctgggtgttctcggccaagccggatgccgagctggtgatcaaggccctggacatggcctacgaacagcgcggcaagccacagcaggtgctgttccattcagaccagggcagccagtacgccagccgcctgtttcggcaacggctctggcgctatcggatgcagcagagcatgagccgccggggcattgctgggataactcgccgatggagcgcctgttccgcagtctga

SEQ ID NO: 327398 - DNA, 258 bp, Pseudomonas aeruginosa
atgagcaagcaacgacgtacgttttccgccgagttcaaacgagaggccgcggcactggtgttggaccatggctacagccatatcgacgcctgccgttcgctgggggtggtggattcggccttgcgccgttgggtgaaacagctccagcaggagcgcgatggcgtgaccccgaagagcaaggcgctccccccgaacagcagaagatccaggagctggaggctcggatcaaccggctggagcgggagaaagcgattctaa

SEQ ID NO: 327399 - DNA, 360 bp, Pseudomonas aeruginosa
atggacgtcttgaagcatctgcagacggagctagccaagttcgcctccgaacgtgactggaaccaattccacacccccaagaatctcgctatggcgctatctggcgaagcgggcgagttacttgaacgcttccaatggctgaccccagagcaaagcgagcgggtagctttgtcgagtgaagccttggaaggcatcgaagaagagatggccgatgtattgctttacctaattcggctagctgatcgcctcaatataaacttggcaactgccgcccaaactaagcttaaaaggaacgcggagaagtaccccatcgaccaagccaagggaaacgcagtcaagtactcgaggagaagcaaatga

SEQ ID NO: 327400 - DNA, 984 bp, Pseudomonas aeruginosa
atgactgcccgagtagtctaccaaccctgctcggacgatactgcacgcaagaatctacagaccaccattctcaacccagtgcagctcagtgaagtcgaagacttgctagagccagagttgcgagctgagctgcattccgcataccccgacggcaagcttttcatctggggacttgcatcacctagaacaagaaatgcctggcttaccatggagccaggtgacaccgtcatcttcaacactaaagcagtcgtcacagtcagtgcctgctttactcatcgtacgcataatcgcgatcttgccttgaagctatggggttgggcagatgcctcatctggcatcacatgggaaaacatctacttcgtaactgatgtacgccaccacgcaattcgcttcaaatccatacaagcgcatatcggcagccaacatgaccgctccttctatcgatacaacgaggagcagagcgcagcgatccttgaaggttttgcagagcttgaccacgactacggcgacaacgacgtcaccttggaggatgcccgttatgacatccaaaaccaacctactgacggagtcgcgaaccgtgccactcgattagaacataagtacatcgtacggcacttattccaaaacaagctcaccagtacctgttgcatttgccttaaggaataccctcggcatttgctggtagcggcacatatcaagaggcggtctgcttgtagctcagacgagaagctcgacatcgaaaatattgcagcccccatgtgccggcttggttgtgatccattgttcgagcatggctacatttctgtgagaaacggagaagtcgtcatgcatccttctcgcgaaatgaccgaggctacagctagctatgtcaatagcgtgctgggcaagcaagtgtcggtatggaacaaaaagaacagaaagtactttgactggcatctcaatgctcatgggtttgaacctgcagagctggcaaacataaattga

SEQ ID NO: 327401 - DNA, 729 bp, Pseudomonas aeruginosa
atgcaaatcaatatcattggcaatcatttcgccttcatggacagcgccatgttgctgcatattcccgccatcttcaccgccgaggaagtctcccggatccgcgcagccctggagcaggcggaatgggccgacggcaaggcgaccgccggctaccaatcggccaaggccaagcacaacctgcaactgccgcaggaccacccgctggcccgggagatcggcgaagccatgctgcagcgcctgtggaaccatcccctgttcatgtccgccgccctgccgctcaaggtcttcccgccgctgttcaactgctataccggcgggggctcgttcgacttccacatcgacaacgccgtgcgcgacatccatggcggccgcgagcgggtccgtaccgacctgtcctcgaccctcttcttcagcgacccggaggactatgacggcggcgaactggtgatccaggacacctacggcctgcaacaggtgaagctgcccgccggcgatctggtgctctaccccggcaccagcctgcacaaggtcaatccggtcacccgcggcgcgcgctacgcctcgttcttctggacccagagcctggtccgcgaagacagccagcgcaccctgctattcgaaatggaccagtcgatccagcgactcacccgcgacgtccccgaccatccctcgctgatccgcctcaccggtacctaccacaatctcctgcggcgctggtcggaactctga

SEQ ID NO: 327402 - DNA, 2022 bp, Pseudomonas aeruginosa
gtgaagaccgtactctatcccgccatcgcgctgatgaaccggctcagcttcggcatgaagttcggcctgatcagcgtgctgttcttcctgccgctgctgatcaccagcttctatctggtgcgcgatgcctatcgccagttcagcgacacccggatcgaactgcagagcttgacgctgctgggtagcggacttcagatccggcgtggcctggagtccctcaacgatctgttgcagatcaatgcggtcatcggccagtccggcaaggccggcgatctggaagcgcgcatcgcggacgtccagaaggggctgcgcgggcggctcgaggcgctggcgccgctcagcgaggatggtgcggcggtagccgaattcgaggcccagcgcgaccggttgctcaacggcttgcaggccgtggaggccgaagggtccctgcagggcaagggcgcacgggcggagaagctgctcggtagcgcacaggtattcatcaagttgctcatcgcccaggccgggctcagccaggacagccagcgccaggtgcgccagctcagcgagctggtcggttcgataacgccggaggtgacggcggccatcagcaaggggcgcgccatcggcgcctactccctgggccagggtttcctcaattcgtcctccagcgcgcggctcgacgaactgctgctggagttcgagaaactgcatggcgagtacggcctgaagctgcaggagtccctggccggcagcccaccggcgctcgaggaggccgcccaggccagtcgcgagaccctgaagagcctggggcagttgttcgaggaccgggtgatcgtggccgagacgctggataccccgtggacgcagttctacgatcaggtcagcgcggcgatggacaagacctaccagctcgacgacgccgttctcggctatctcgatacccagttgcaaaagcgcctgcaacaggtgcgcacgcagatgctgttgctagtcgccgcgctggccgtggttttcgccgcgatcctatacctctacggcggtttctacgtttccacccgcgccaccctgaaggatctcgggcgaatgatggagcgcgtcgccggcggcgacatgacggtcagcttccaggcccgcagccgtgacgagctgggcgagctgggacaatcgttcaacgaatcggtggcgaagatccacgacctgatcgagcgggtcagccagaccgtcggcgaggtcgagcggcagaccctgcgcgtcgagtcggtgtcggccgaaagcaaccaggcggtagccgggcaacgcagccagatcgagcaggtggccacggcgatgaaccagatggccgctaccgcccaggaagtggcacgcagcgcggcgatggcggtgagcagcgcgaacagcgtgaaccaggaaaccctcagcgggcgcagcctggtcgagtcgcaggtgggtagcatccagcgcctggccggcgagatcgaccagtcggtggcggcgatcaatcgcctggccagtgacagcgcctcgatcagccaggtgctggatgtgatcaagggcatcgccgaacagaccaacctgctggcgctcaatgcggcgatcgaggccgctcgtgccggggagcaggggcgcggtttcgcggtggtggccgacgaggtgcgcacgctggccaagcgcacccagcagtccaccgccgagatcgaacagatgatcctgcgcctgcagggcggcgtcgatgcggcggtgaaggcgatgggcagcagccaccataccgccgatggcacggtcaacgagtcggcgcaggtgcagcaggcactggagaatatcctcggcgcggtgggcatgatcgtcgaccagaaccagcagatcgccgccgccgccgagcaacagaccgccgtggcccacgatatcgaccagaacatcgtcgagatcaaccaggccggcgagcgcaccgcggaaggcgccagccagaccgaacgggccagccgcgaactgggcgcccaggtgacccagctgaaacgcctgatcggcgcgttccgggtgtag

SEQ ID NO: 327403 - DNA, 381 bp, Pseudomonas aeruginosa
atggcaggatcggtaagagcgcccaacagtacggccggcgagatgctggctgcgctggcggatcacgtcgcgcagtccgcaatcgagaccctgcacgtcagccctgagctggccgaggcgcacggttcggaagtggcggcgcagatggcacaggtatggggcggccagcagctctacgttccgaagggggtgagcgtacaggcgtcgaagctgcaccagcaactgttcgacgagttcaccggcaggaaccagcgggagctggcgatgaaacataacgtgacgctgcagttcgtgtatcgggtcttgaagcggatgcggctggcgttcatcgctcgcaaccagggagacttgtttcatagtcatctggacgaggaagagtga

SEQ ID NO: 327404 - DNA, 423 bp, Pseudomonas aeruginosa
atggctacgaccaaccccaaccgtctacgcctgatcaagctcatccacgttggccggcgcgagctgggaatggatgacgaaacctaccgcttgctcctggccggcatgaaggggctggacggtgcgacatcaaccgcgcagctcactgttccaaatctctaccgagtactggaacagctcaagctgcgagggttcaaggtccgtccgaaccggcagtcccgtcctctggcggacgacagccagtcgcggaaaatccgctcgctctggctggaaatgcatcagcagggaatcgtcaacgatccatcggagcgcgcgctcgctgcattcgtgcagcgggcaactggcgtcgccgcgctccgctggctcaaggccgaccaggccagcaacgtcatcgagaggctcaagaaatggcaggatcggtaa

SEQ ID NO: 327405 - DNA, 444 bp, Pseudomonas aeruginosa
atgtcgtcaacccttatcgagttccaagacaacggccaggactttctggtctggctgttgaaccaggacggcgtggttattcggagctggccttatcagaccgatgtatggggcgggacgaaggttacgaacctcaagacgcttaagcgtgatggcatcgtgaaagctgagtttcacggccgcccctgggtgtgtcggcatgctgttgccgctgttcatccggttcaaccggtggacgtttcggtcaaatgggacggcattgctggttacgtcaccagcacggtacggggtaagcgggcatcgtgtactcatgactgcgaagaccctgtgaggcgcttggctgagaggattttccccagcctcaaatccagcattgagcggctggagtgccaacctgtcggcaaggtccatagcctctggcgtatcactccggagggcacgtaa

SEQ ID NO: 327406 - DNA, 396 bp, Pseudomonas aeruginosa
atggccgaagagatcaacatcgataccatcatgtcgcaggcccaggtcttcgccagcgcctggtcgctggtcgggggcacattcgacaacggccacgccatcgagaatgcggaggaagccaaggctgaactgcgcgagatgctggaagacttctgctcaaacactgacctgcagcacgtagccgagttgctcgtttcctggcaccagaaaggcattggcaatattgaccaggttctgagcgcgcccccagggatggagatccacttgggggacgatcctatagtgctgagcggttcgagagctgaagggtttcgaatgggcctgcaagtagctcgcttctggcttggcgaactgccgctgtctctcggtacgaacgagccggcagaggaggattga

SEQ ID NO: 327407 - DNA, 624 bp, Pseudomonas aeruginosa
atggctgaacaagcagtgcatgttcccgccgggtaccgcatggacgccaaggggcgcctggtacctgaaaaaatgatcaagcccatcgacctggagcgcgaccacctcgtgcaggagatcgtcgccaaggggaaagccctgagcaaggcgttgctggatttcaaactggctacattcggcgatatcgaagccttcatcaccctgtcggccgagcagtaccaggcgaaggtaggtggtaagaagggcaacgtgtctttggtcagcttagacggccgctacaaggtcattcgggccatggccgacaacatcgccttcgacgagcgcctgcaggcagccaaggcgctgatcgacgagtgcctccatgaatggacggaaggtgctcgcgcggaggtcatcacgctgatcaacgatgcgttccgcgttgaccaggcgggaaacatccgcaccggcagcgtactcgctctgcgccgcctgcagatcgacgacgagcgctggcagcgtgcaatgcaggccatcggcgaagcagtccaggtcgtgagcaccaaggcttacgtgcgtatccaggagcgggttggagacaccgaccagtatcgttccattcctcttgatatcgcgggggtgtga

SEQ ID NO: 327408 - DNA, 201 bp, Pseudomonas aeruginosa
atggctaatgtcttggaaatcgactgctccgaatgcggcacgccgtaccctgaaatcactgcgcgctctgcagctcatgattcgagcctgatcgatcttgtagtcacctgcagcaactgcggacacatcctgaatgcgttcgtctccctggctgagatgagtgctgtaccgaatcccgaggaggaaacctcccatggctga

SEQ ID NO: 327409 - DNA, 645 bp, Pseudomonas aeruginosa
atggacagcaaactttccgcatctatagcggccctgctcaaggctgtgaagagtcctaatccagcgatgttctggcaggaagccatgggccatgtcgccatagtcctagatcacctgcaggcgctgatcagtgacggacggcctgttccggtaccaggcccgaaaggttggtacgagatcgacgacgagttgctcggctgggtggtggaccaggtgttcgacggagccattgaggatgacacgccgatccgcgacatctatcgcctgatcgcgcgtgacctgcttgccgctcggcattacacccactcagcaccggagtctctccgcgacgtgctatccgagcgcatccgacagatcgccgacaaggggcaccatccggagcacgacgacgagtactccgatggtgcgcttgtgctggccgcagtctgctacgccgaggaagcccactgccgaatcaacgatccggagcgctctatgagtaccgccaagatcgtcccagacctgtggccgtgggatgaagagtactggaaccccagcgactgtgaccgtcgcaatctggtcaaggcggtggcgcttcttctggccgagatcgaccgcattgaccgactccatcgtgctccagtgctggaggttgagcatggctaa

SEQ ID NO: 327410 - DNA, 306 bp, Pseudomonas aeruginosa
atgaccgtcataactcacgcttacaccccgctgatggatgttgatgccatgagcgaggaggactgccgcctggccctgaaggacgttctgcgcgatggcttcgcaaaggaccagcagatggtcgagctgaagaccatcaaccacacgttgaatcagcagctcaatcacgcgaacaacatcttggtgcaactcgcacggctgcagctggctggcgaaaccgaggcagtcctggaggagatgcagcgcctggccgcctactaccaacagcagaagacggccctgcgggccgcgaggcagatgcactga

SEQ ID NO: 327411 - DNA, 339 bp, Pseudomonas aeruginosa
atgcgcgcgacagtcactcttcacgccgttccgaagcggccactgcgcgatccattcttcgcgtgccacgtcctgaccaatgagctggccgaaaagctcgcggcggtcaatgcagtcacccgtgcgctccgcgaagtcggcattcgcgtcgtcgcgacatcagttcccgatgaatcgctgttcatcgaccgggaccaggcacagagcctggccgatcacttcatgccggagtttcgcagcgctcattgcaagaccgttggcatgactacttgcaacaccgtgcgtctgcgcggggtgaaggtgtcgtgggtgacccaggtgaaggagcaagagcaatga

SEQ ID NO: 327412 - DNA, 1233 bp, Pseudomonas aeruginosa
atgcagatgaagttgaagcgggtacttgccgacctcggcattccgcaaagcgaactggccgcatccctggagaaaccggacggccaacccctcagccaggcagccgttgcgcagttggtcaatcacggccaatggccgaagaccatcgaccgctccggcttggagcacaagatcaaggaaaccctgttcgcccgtggggcgaacgatgaccacattcgcgacttgttcgtgatggaagccgatgcagcgccgcccgccaagactgacgctgcaccggcactcaacaatgcagacagcaaagagagcgacaccatgctactacgaaagtacaccctgacccccgaagccaaacgccacttccgtctgccgcgtgatccgttcacctacgagatgcagtcagcagatgacgtatttctgtccgatgacatccgttacgtgcgccagtccatccgtcagaccgcgaagcatggtgggatgttggcggtgatcggcgagtccggcgcgggcaagtccacactccgcgaggacctggccgagtggattcaggtcaaccaggagccgatcaccatcatcgagccctatgtactgggtagcgaggacagcgaccgcaagggcaaaccgctcaagtccatcgacatcatcagtgcggtgattcgcaccatcgctcccggcgataaggctcgcggtagccttgaggatcgctccgagcagatgcaccagttactcaagagccaggtcggcaagaagcacgttctggtaatcgaagaggcacacagcctgtccgaggcaacgattaaacacctcaagcgcttttacgagatcaagagtggtttcaagcaactgctgtccatcatcctgatcggccagaccgagctggacgtcaagctttctgagaacaacgctgcggtacgcgaggtcgtgcagcggtgcgaaaaggtctggttgcagcctctggacaacaatgtcgaggcctacctgaagcacaagcttgcacgggtcgatgtcgactacctggacgtgttcgagccgtccgccttcacggaaattcgtaactgcctgcgcagcaccgtaccggttgggcgcggtggccatcgcagcgtgcagacctcctcgctgtgctacccgttggcggtcaacaacctagtcagcggagccatgaacgaggcggtgaaggtctgcgaacccaaagtcactggcgagctgatcgcagccgccgtgcgggcgggggtgtga

SEQ ID NO: 327413 - DNA, 1800 bp, Pseudomonas aeruginosa
atggacgtgaagggagcggttgaaatgacggtcacgccggatatccgcgattacctgatggatcttgccaggcgactggatgccgcaggctggagccagcgcggcggcatcatgtcctcggcccaggagttcctgggattgtcgtcggcgaccatataccgccagctcaagtccgtctgcggctggcagtcgggccgtaagacccgcaacgacaaaggctcgaccagcgtagccaccgaggcgctgcaaatgctgggaagcatgcagcgcgagaacatccgggataacggcaagcaggcgatgttcacgccttcggcgcgctcgatcctggagcagaacggtatccatctcggcgtcagcaatgcccagctcaatcggttgatggcggcccgcagtctcaacgtggccagccaacgccaggtcgaccccgtccaggcactgcgcgcacctcatccgaactaccttcacgaggtcgacccgtctctgtgcctgctctactacctcaagggccgccagcacatcatgcgcgagcgcgagttctacaagaacaagctggagaacttcgcgaaggtcaagctgaaggtctggcgctatgtgctctatgaccgcgccagcggagcgttggtgacctggtactgcgagtcagccggcgagagccagcatgcgttgttcgagttcctgatgtacgcctggggcaaacaagaggggcgcctgattcacggcgtacccaagttcctgctgtgggacaagggctccgccaacaccagtaacgcgatcaagaatctgctggatcatctggaagtcgagcctctagaacacgctgcgggaaacgcccgcgccaaggggggcgttgaagtcggcaacaacatcgtcgaaacccagtttgagagccgcctgcgcttccagccggtgaacgacattgccgagctgaacgcctcagcccaggcctgggctgaggcctataacgcgaatctgattccgcatcaggattcgcggctgcaccggaaggggctggatgcgccggtcgcccgctacgacctgtggcaactgatccgtgccgagcagttgcgtctactacctccggtagaggtctgccgagcgctgatgaccagtagcgaggtcgagcgcaaggtcaacccggacctgaccatccagttcaagcatccaagcgccgatgcctcggccttctacagcgtgcgcggcctggacggcgtcaccgtgggcagcttcgtcagtgtccggtccctggtatacggcgactgcgccatccagatcgaggtgccgcgctacgacggcgagaccctcaagtaccgactggagccgatccggggttacgacgtcttcggccagcgcctggacgcagcggtacctggccaggagtacaaggctcagccggagactgccatcgagcatgccgccaaggccatggacgaactggcctatccggagcaggacgccgagcaggccagggcgaagaacgtcactccgttcggcggccagctcgactcccaccagcacctcaagcaggtggaacaccccacctacctgcagcgccagggcagcactatcgaaacgccggagcatctgcgcattgacgtgccgaagctgtccgccatgcaggccatgttgcggatcgcccaggcgattggccgcaacctcacggcgcaggagaacacctggctgcgcagcacctttaaggagggcgtgcccgaggaccaggtcaacgcccttatcgaacagttcacccggccggtcgctgttcctccggcctccaacgtcagcggcctgcgggccgtgtag

SEQ ID NO: 327414 - DNA, 999 bp, Pseudomonas aeruginosa
atggctcgcaaagcaactcccgtgaaagtagaccccatgccagagatcaaccaggaagctcttcaggaagaggtcggtgctctaacaatgctgggtgatattgccctaggtattcaggaagagcgcgacctcctgaatcaactgcttggccaggctcaaatggccggagcctttgaggagttttcccgcaccgtgcggacttccaagctcgcctatgtcaaagagaacaagctctatcgggctcttgcaggacggagtagtccgcacggtgcggaaaatctctctggcacctgggaagagttctgcaacttgcttggtcgctctgttgaccaggttgatagggacatcgccaacctccgtgccttcggcgaagaagccctcgaatctatgtcccgcatgggcatcggctatcgcgagctgcgtcagtaccggaagctaccggacgaccagaaaacagccctgatcgaggtggccaagaccggcgacaaggaagccttcgttgatcttgccgaggagatgatcgccaagcactcgaaggaaaaagaagagctgcaggcgaagctggaggatgttcagcaggactacgacgccctgtccaaagtcgaggcggacaccagcaagaaactccgcgatgtcaagttggagctgcagcgcgctcaactgcgcactgctccctggagcgagaaggtcgctcccttccaggaggagatcgccaagcgccaggtgctgatcgacgaggcccttggtcgccatctccaagctgttgaggccctggacgcctggtggatcggcgaagcggtcaaccagccgggctacgaccccgaggcttacgttgagatgccgctcgaagtacgcacggtactgatcgagctggacgatgccatcacccgcaccgcccacctggtggcggcagcccgcgaccaaatcctcaaccgcttcggggacgaactggctctggctcgccggcaccagttgcaacccgaagagcaggcccagtga

SEQ ID NO: 327415 - DNA, 315 bp, Pseudomonas aeruginosa
gtgagcaccgacaaataccgctcagaacaggtccagcgcgttctgcgtgtcctgcttgccctggccggcaacgagttccgggggatgctgctgaaagaggtggccaccgccgctgaatgcactaccgacaacgctctgcgcgccctggaaaacctgcgcaccgcaggcctggcagatcgcagcccacatgaccatcaccgctggcttctcggcccgcgtctggtgcaggtggccttcgccttcgatgaagccctgcgcaaggcgcagcacgaactcgacgagcgccgccagcgctacacccgtaccccgaattaa

SEQ ID NO: 327416 - DNA, 480 bp, Pseudomonas aeruginosa
atgaaacgccgcaattggaagaacgcccagccaaccaacctccggcaggccctggagtggtgcaaagaccatggccgggaacggcggcggctcagcgttgaacgtatcgccgagcagatgggactgccggaccattccgcgctttacaagtggctcgccaacggccgtatgccagcggtgctgatccccgtctacgagcaggtctgcggcatcaacctagtaagccgatggctcgcggccagcgcgggcaaggttttgatcgacattcccaccggacgagccagcagcccgtccgacatccaaagcctgcaagccgtactgcaccaagccgctggggcgctgatggcgttctatgccgatgagcaagatgcggcggccaccctctgcgccatccagtccggactggaggaactagcgtggcatcgcggcaacgtgcagcagcattcccaccctcaattcgactttggagaaccgtcgtga

SEQ ID NO: 327417 - DNA, 225 bp, Pseudomonas aeruginosa
atgaagctacgtacccctgatcaagcccgcgaagcgctcaaggccaagggtatctcgatcacccagtgggcaatcgccaacaaattctcgccgaacctggtgttcgaggttctcggcggccgcaagaagtgcgttcgcggccaggcccatgagatcgccatcaagctcggcttgaaggccggcgagatctgcaccgatccagccaaagctctggatgtcgcgtaa

SEQ ID NO: 327418 - DNA, 468 bp, Pseudomonas aeruginosa
atgcgatccaatcccccgcgcggtatccgtaacttcaatcccggcaacatccgccacgccaagggcacccgttggcaaggtatgtcggccaatcagaacgattccgcgttcgtccagttcaccggcccccaatggggcatccgagccattgctcgcacgctgatcacctaccaggacaagcacgccctgcgcacgatccgccagatcatcagccgctgggcgcctccgagtgagaacaacaccgagagctacatccgccaggtcgctgcccgcgtcggtgcggcccccgacgcgcgtatcgacgtgtacgactaccgcaccatgcgcaccctggttgaggccatcgtcaggcacgagaacggtcccggcccgcttccggaagggagctggtacggcgagggactgatcaacgaaggcctgcacctggccggcatcgttgctggcgcctaccacggggagccggcatga

SEQ ID NO: 327419 - DNA, 222 bp, Pseudomonas aeruginosa
atgaagctgatcgacaactgccactgctgctggaagctgcatagcgtccagctggcggttgccatcgcgctgctgggtttcctgcaggcgacggtactgccgatgtgggaggcccaactctctccgaccctgtacgcctcgatcaacagcgtgctggccatgctgctgttcgccgctcgcctgatcaggcaaggcccaccggacaccgaggaggaaccatga

SEQ ID NO: 327420 - DNA, 612 bp, Pseudomonas aeruginosa
atggccgtgcttagctggttgcgccgcagttggccgctggtcgtggtcatcggctatgcggcaacgctgtacatctacggcagcactcagcggggtgtcggctatgcgacggccaaggccgaaggtgaccaggcgttgacggccctacgcctggagtatgccgagcaacgtgccgcagttgcagatgaaggtgctctgcggctacggcagcagatcgctcgcgccgatcaggccgaacaactcatgcagcaaacgcagcagcagctggccgatgcgcaacggcagctccaggagcgaatcccccatgtcacgaccgtataccggccggcgcctgatgtcgcgcctgttgctatccctcgctgtgtgttcactcgtggttggctgcgcgactacaacgccgccctcggcgccgatctgcccaccgctcgaacctctggtagtaccaccgtcgctgaagaagcgccccgcgccgcccccggcgctgacaccgaactactggaaagcggcatcactcccgccgacatcctggctcacgcccaggactacggccgctgggcgctcggcaacgccgcccagctccaccagttgctcgatctgcaggaagggaagtag

SEQ ID NO: 327421 - DNA, 228 bp, Pseudomonas aeruginosa
atggacgttgtagaccgctgtaccgaacagaacgatttcactgaggccgcgctggaggttcatctgtcgagccaccagcgccgttccggcccctcggcctaccgctgcgacgaatgcggtgacgcgattccggaggcgcgccgtcaggccgagccggggacgcaacactgcgtcgagtgcaagcagtacctggagcacctgcagaagcgaggaccgcaatggatttga

SEQ ID NO: 327422 - DNA, 294 bp, Pseudomonas aeruginosa
atggatttgacggacatgcagttgggcttttccagcgtgcaatgggtagtgatgaccgtcctcggcatctacacctggctcaccaaccggcaggccgccagcagccgtgagctgctggagctacgcactcggatcatcgctctggaggccgccgtgcaacacctgccggaccaggcggcgatcaccgagctgctcggcgacatgaaagcggttcgtgccgagttgacagccatgcagggcctgacccgtgcggtggaccgcatcaatgactatctgctgcgagagagaccatga

SEQ ID NO: 327423 - DNA, 294 bp, Pseudomonas aeruginosa
atgacgccttatgccgaattcctgcgccaggacatgcgcctggtgatcctgcgcctgctgtcggaaatgccaggctatcgggcgaacagctccatgctgaacgccgccctggatcactacggccacactgccagccgtgaccaggtgaagagcgagcttgcctggctggccgagcaggggctggtcaagctggaggatatcggcgcggtcctggtggctacgctcactgagcgcggccaggacgtagcagctggccgcgcacgggtgcctggcatcaagcggccgggagcctga

SEQ ID NO: 327424 - DNA, 552 bp, Pseudomonas aeruginosa
atggcgggcaaatcctcagtcaaccgcctgcctcccgtggtcaaggcttatctccagaagctgttgcgcgaagaccggatgaccctcgaccagatgatcgaggacctgcgctcccgcttccccaacgagaaggtgcccagccgtagcgcgctcggtcgcttcaagatcggtttcgagcaactgaccgagaaagcccgccagcaccgcgagcaggcagaagccttcgtcggcgccttgggcgaagacgccagcgacaagaccggcgcactcctggtcgaggcagtttcgaccctgacctatcaggccgccatgggcgcccatgagaaggacgacgtcaccatcaaggaggttgccgctctggcccgcgccgccaaggcgacgatggaagccaggacgctcagcgtgaaggagcgccaggccatcgagaaagcggcgcgcgaacggctgctccaggaacaggccgctgaactggacgcagaggtccgtagcggcggcatggacgaggaacaggcgctgttctggcggcagaagttcctcggggtgaaagtgtga

SEQ ID NO: 327425 - DNA, 1620 bp, Pseudomonas aeruginosa
gtgagcgccccggccgtcaaaccgagcagtagcacgctccgggtcgtcgagtgggacgagctgccggagtcggtgcgcgccatcccgcaggggtacaaccccatcgcggaaggtctgctcatggcgcaccaggccgattggctggccattcaggcgcagatcaaactgtgcgagaagggacgccggacgggcatcaccttcgctgaggcgctggactcggtgatcacggccgcctcgcgccgcagcgctggcggcatggacgtgttctatgtcggcgacacgaaagagaaaggcctggagttcatcggctactgcgccaagttctcccgcgtgatcgccgaggcccaggcttccggtgtcagtgagatcgaggagttcctgttcgaggaccaggacgactccggcaacacccgccagatcaacgcctaccgcattcgctacgccagcggcttcaagatcgtcgcgctgtcaagcaacccggcgaacctgcgcggcttgcagggcaaggtgatcatcgacgaagccgcctatcaccggaacgtctcggcggtgctcgatgccgcgaccgcgctgctgatctggggcggccgcatcgtcatcatcagcacccacaacggcaagtccaacccgttcaacggcatgatcgccgacatccaggaaggccgttacggcgatgccgccgtggtgttcaaggccaccttcgacgacgcggtagccaacgggctctacgagcggcgttgcatgatgcgcggcgaggaaccctcggccgaaggcaaggaagcctggtacaagtcgatccgcaacgcctacggcccgcgtaaggcgcagatgcgcgaggaactggacgcgatacctcgcgacggcaacggcgtttgcgtgccaggcgtgtggatcgaggacgccatgcgcccaggccgggaagtcctgcgcctggccctggacgagggattcgccctgcaaccggtttaccgccgcgaagcctggatcgaggcctggatcgaacagcacctggtgctgctgttgcagcagctcgacccggaggtgcggtggttcctgggcatggactatgcccggcatcgcgacttctcgatcatctgcccgatgtccgtcgaccagcagcggcatcgggatgtcccgttcgtggtggaaatgcacaaggtgccaacccgccagcaacagcaggtgctgttcacgatcctgcgcacgctgcccaacttcatgggcgctgccctggatgcctccggcaacggcgagaccctggccgaggataccgccgacgagttcggccatgaacgcatccagcaggtgaagctttcgcgagcctggtacggcgcctggatgccgcgcttcgtcggcctgttcgaagacggcaccatcaccctgcccaaggatgactcgctgcagcaggacatccgcgccatcgaaaccgtcgacggcattccgatgatcgtcaaggcccgccaacaggacctcaaggacccggacctctaccggcacggcgactttgccggagccgccgccctggctaacttcgccaccctggaggtggcctctggccctgttaccgtcaagtcccgtcgccgccgtatggcggtccgcatcactcaggggtacgcatga

SEQ ID NO: 327426 - DNA, 1497 bp, Pseudomonas aeruginosa
atgagcaaccaaggcgtgtgggtcacccccaccgagttcgttcacttcgccgaggccaagcgcgacaagagcctcaccgaccacattgccagtcgtggccgcagcttcgatgcccaggcgctgggcatgtacttgcccaacccggatccgatcctcaaggcgcagggcaaggacatcaaggtctaccgcgatctgcgcagcgccgcgctggtcgggggcaacatccgtcgccgcaagtcttcggtgctggccctggagcgtgatttgaagcgtggccaggccccggtccgcgtcgaacgattcgttcgggattggctggctgacctcgatctcgaccgcatcgtccgtgagctgctcgacgccgcgctgttcgggtaccaaccggtcgagctgatgtggaaggccgtgggcctgcacctggtgcccgaggacctgctgggcaaaccggccgaatggttcctctacgaccaggacaaccgcctgcgctttcgcgcccgtgacgcgggcatccagggcgagctatgcgacccgcagcgcttcgtcgtggcccggcaggacgccacctacaacaacccctatggcttcgccgatctgtcgatgtgcttctggccggtcgtcttcatgaagggtgggctgcgcttctgggtccagttcaccgagaagtacggcagcccttggctgatcggcaagcacccgcgcagcgcatcgaccaaggaaaccgacgagctgctggacagcttggagcagatggtccaggacgcggtggcggtggtgccgaacgactccagcgtggagatcaaggaagcggccggcaagaccggtagcgccgaggtctaccgtgagttgctgatgtactgccgtagcgagatcaacgtggcgctgctcggtcagaaccaaaccaccgaggcgacctcgacccgagccagcgcccaggctggcctcgatgtcacagacgacatccgcgacggcgatgccagcatcgtggccgctgcgctcaatgccgccatccgcctggtggtcgatctcaatttcggcgagaacatcgaggctcctgtgtacgagctgtgggagcaggaacagatcgataagaccctggccgagcgcgacaagtcgctgaccgactccggcgtccgcttcaccgagcagtactgggccagaacctacaacttgcaggccggagacctcgcaccgacggcgccggccacggacacgaccgaatttgccgaggcggcggtacgtccggttctcgaccagtacgccctggaccaggccatcgatggcttggctgcggctgaactgcagcagcaagccgagcaagcgctgctgccggtgattgaggcgctgcagcaggggcgcgatgagtccgaagtgctcggcctgctggccgagaccagcccggacctggatgctgccgccctacaggcgaacctggctcgcctgatgttcatggccgacacctggggccgtctgagtgcgtccgctgatctggaggactga

SEQ ID NO: 327427 - DNA, 813 bp, Pseudomonas aeruginosa
atggcatccccgacacctgtgaacccggccgacctcaaggccatcttcggcctggagcccgccgccgccatcgagtacctcaagcgcaagggctactcgatcacctgggactggcaggaaatgctcgactcagctcacgaccgcgccttcaccgtggcgaaggccatgcgcctggacgtgctatcggatattcgcgaagccctggagcgcgccttgcaggaaggcaagaccctgaagcagttcatcgaagaactgcagccggtcctggagcgccaaggctggtggggcaggcaggtcctggtcgacggcgacggcaatgccgaactggtccagctcggcagcccgtaccgtctcaagaccatctaccagaccaacctgcagagcgcctacatggccggccgcaaggctaccatggaggagtcggcggacacgcatccctattggcgctatgtcgcgatcatggatggcaagacccgccccagccatgccgcactcaacggcgttgtgtatcgacacgatgatccggtctggtcctcgatctatccaccgaacgggttcaactgccgctgccgcgtgacggccatcagcgagtccggcatgaagcgccggggcctgaccgcgcagagcagcgccggccaggtccagcaggaaacggtcgagaccgggatcaacaaacgcactggcgagatccgcaccgccgatgtgacggtggtcaagaccggtcgaggcaggtcgttccgaaccgaccccggcttcaatcacagccctggcacgggcctggctgccgcactcaagcgcaaggagtccgaatga

SEQ ID NO: 327428 - DNA, 483 bp, Pseudomonas aeruginosa
atgatcaacatcgacctggagcaccagcgtgtccagcaggcgctcgctcgtgtggagtgggcgattggcgagctggcaccgctgatgcgcggcattgccgccgagctggcctcgatcaccgaggagaacttcgagaacgaaggccagagtggcgaaccatggccggcgctatcggaggtcacgaccaatcgccgcgagttggccaggacctggccgggacagatgctgcaggtcaccgccgggggcctggccgcttcgatcaccacccaggcaaccgacagcagcgccttggtcggcagcaacaagccctatgccgccatgatgttcttcggtgggcgccgcgaagactttccgcatctgtggggcgacattcccgcgcggccgtatctgcccatggacaccgagggcaacctgcagtccgaagccgaggaggctatcctggatctggcgctttcccacctcgaaagagccgctcgcctgtaa

SEQ ID NO: 327429 - DNA, 1131 bp, Pseudomonas aeruginosa
atgtactaccacccaagcgcacagcccatgaaaagcatcccgttcttccgtgccggtcggcacctggacagccgggggcatcaggtcgagttctccgaagccgatctcgatgccgccattgccggttacgacccggcgttgcatcgcgccccactggttatcggccacccgaaggacaacgggccggcctatggctgggtcgggtccatcagccgtaattcgaagggtgaggctgttgccacccccgtgcagttgcacaacgacttcgccgaaggggtagccgctggcacctggtatccgcgttctgcgtcctggtacgccccgaccgacccgcgtaacccgaagcctggcgtctactacctgcgccatatcggcttcctcggcgcccaacctcccgccatcaaggggctttccgacattgaattcgatgacggcgaaggcgtcgtggagatcgagttctccgacttcggccacgaggtcggtgcgagcctctggcggaagtttcgcgagtggctgatcggcgagcgcggtatcgagaccgccgacaaggtcgctcccagttgggagatcgacagcctggccgaagcgggccaccgcgacgaacctcgctctcccgcattttccgacccaaccccaaccaccaccgaggaatcttccgtggatgaagcgcaagcggccgccttgaaggcggaaaacgaacggctccagcgcgagctgaaacagcaccaggacgcgcagcgggactccgagcgcaagaatcgccacgctggcaacgtcgagttcgccgaggggctgatcaaggaaggacgcctgctgcccaagcatgccgccgcgctggtcgcagccctggacttcgccgaggacggcgagcagcccctggagttcggcgagggggatgcccgccagccagttgtcaccggcctcaaggcgatcttcaccgatctgcccaagcagctcgacttcgccgaacaagccagcaaggaacgccaggcatccagccgccaagcggttgacctggagttcgccgagaagaacaccgaccccgaccgtttggacctgcaccagcgagcaaccgcgctggcggcagagaagaacatcccctacgagtcggccgtgcgccaactcatctga

SEQ ID NO: 327430 - DNA, 924 bp, Pseudomonas aeruginosa
atggcagatcgtttgaagcaactccgggtcgtcgatccggtcctgaccaacctggcgcgcggctaccgcaatgcccagttcatcgccgaagcgctgttcccgattgcggagatggacaaggaagccggaaccatcccgctgttcggcaaggaagccttcgaggtctacgagaccgagcgcgcgatccgggcgcaatccaacatcatgaaccccgacgacctggacggcttggacgtggtactgcgcgagcacgacatcgcctatcccgtggactaccgcgagcagaacgagtccatgttcgacgccgaggcccgcgcctctcgtcgcgtcgtcgacgtgatcgacctgcgccgcgaggtggcctgcgcgaagctggcccaaaatcccaacacctacctgtccggcgccaaggtcaccttggccggcaccagccaatggagcaacggcggcggcgatccgatccaggtcgttgagcatggcaaggaagtcatccgcagtcgcatcggcgttcgcccgaacaccatcaccatgggcgcctcggtgtacgcctcgctgaagttccaccccaagctgcaggaagcgctgggcagcaacgagcgcaagttgatcaccctggagcacctgaaggccttgttcggtgtgccggacatccacatcggtgaggcgctggccaacaccggtacgttcggcgacatctggaacgacagcctgcagctggcctacgtggcgaagccccagggcggcgccaagtccaactacgaggagccgagcttcggctacaccttgcgccgcaagggcatgcccgagatcgataccttcgacacggctggcggcaaggtgcgctacgtgcgcaacaccgacatctataagccggtggtcgttggcgccgacgctggctacttgatctccgacatcaacgcctga

SEQ ID NO: 327431 - DNA, 330 bp, Pseudomonas aeruginosa
atggccgcgaagacccagccccaagataaagacacgcagaaagccaaggatgaccagcccctgatcgacaagagcgcacaggtgccggaggcaccggtcgctccttcgccgagcgatggtcaggccgacagcgacggtgctgctgaaaagaccagtgccgagaacaacgacccggcaccggagcccgaaaagcagcaatacctggtcactggccgcaccgacgtgctgcacaacgccgacctgtacaccgaaggcgatagcctctggctcaacgaggacgacgcctattccttgctcaaggccggctgcatccagccggtaggacggtaa

SEQ ID NO: 327432 - DNA, 333 bp, Pseudomonas aeruginosa
gtgaagacgaaacaacctgtactcaccacctcggtggtcgccctggtggatctcccgcgcttcctctttgccggcctcgatggtggcctgtgtgcggccggcgccaagtcgcttggcacggttgcggccgacaccgaggccggtagcgtggcaccggtcgatgtcctaggcatctgcctggtcattgccggtggagccgtcgcggccggcgccgaggtggaagcagatgcctccggccgcgccgtcactctggcagagggcaagagcaacggtaccgctctggatgcggcggcgacggccggcgacatcatccgcatcgtgcgcggtatctga

SEQ ID NO: 327433 - DNA, 432 bp, Pseudomonas aeruginosa
atgcgctactgcacccgcggcgacatcggcagtgccattccggagaacatcctgctgcagctctccaatgatgactctgccgccgagcagcccaatgagagcgtgatcctggaagctgtccgccaggccgaggagttggtggatggctatctgcgaggccgctacgtcctgccgctcgatccggtgccgaccgtgctgcgggatgcagtggtgtacctggccaggcactggctctaccagcgccgaccggagggagccatcccggatgcggtgaaggacagccgcaagaacaccatcggattgctggagagcatccgggatggcgcggtcaccctcggcatgccaaccggtgaactggcgccggaacctggtgaaatcaaggttcgctcgcgccgtcagcagttcagcgacgatctgtggaagggctactga

SEQ ID NO: 327434 - DNA, 480 bp, Pseudomonas aeruginosa
atggcacagaagactcagaccgtcagtctcctggaagcgatgctggcacgcctgcaggagcactttggccgcgagctggcggtggagctgttcccggagcaaccgggcaactaccgccttaaccatccgcgcgggtcgatcctgctggcctacggtcgcagtcagttcggccagcccgaggcggctgatgccgtgctgcaggaacgcaacctggtgttccgcctgaccctggtgtttcggcagctcaacggcaaggacggggtgaccagctacctggatcgcatccgcgagagcctcaccggttggtatccgccgcactgcgacaacccatgccgcccgctttccgaacagttcctgggacacgtccagggcgtctggcagtacgccgtggacatcgccacccgtgccacccaactgcaggtgcagggaccggaaaccggtcctctgctgactaccgcgaggttcgaggaggacgaatga

SEQ ID NO: 327435 - DNA, 237 bp, Pseudomonas aeruginosa
atgagcctgacccgctatcactacaacggcccgcccagtggcgttgagctgcgcctggccgatggcacgctcctggaggttcggctgtgtccgggccgcctggcagagctgccggccgaccatgaatacacctggacgctactggcgcttcagcgcctggagccgctcgctcagcgcgaggccggtgaatccaccagcggtactcgccgcacccggacgaaaaaggagccagaatga

SEQ ID NO: 327436 - DNA, 1428 bp, Pseudomonas aeruginosa
atgagcgccaattaccttcacggcatcgagtccatcgaggtcgaacgcggtccacgcgccatccgtgtggttaaatcggcggttattgccctggtgggtaccgctccgaccggcccgcagaacacgcttgtgctctcgcagaatgagcaggacgcggcgcagttcggccaggctctgccgggcttcagcatcccccaggcgctcgctggcatctatgacttcggcgccggtacggtgctggtggtcaacgtcctcaacccggcggtacatcgcacccaggcaccgcccacgacactgtcgttcgacagcaacgacgtgctgcagctggagcacggcgccctgatcgcactcgtgatcaaggacagcgccggtgagaatctgtactcgaaggacgtggactatcgcgttgacatgcaaaccggccgtctgcagcgcctggccggaggcaccattccggtgggcggtacggtccaggtcgaatgcacctatgccgacccgagcttggtgacgcctgctgacatcatcggcagtgtcaacgccgctggtcttcgtaccggcctgaaggcgttcgcggacagctacaacctgttcggcttcttcccgaaaatcttcatcgcgccggggttctctccgttgaacagcgtcagcgttgagctgatcgcggccgccgaacagatgcagggtatcgcctacatcgacgcgcctatcggcaccaccgtgcagcaggctatcgccggccgtggtccgtccggttcgatcaacttcaacaccagcagcgaccgggcgcggctgtgctatccgcacgtcaaggtctatgacacggccacgaacagcgagcgcctggagccactgtcgatccgtgccgctggtctgcgcgccaaggtcgacaacgacaacggctactggtggtccagctccaaccaggagctgctcggcgtcatcggcctggagcgcccactcaccgcccgcgtcgatgacccgaacagcgaggtcaacctgttgaacgaggccggtatcacgacggtgttcaactcgttcggcactggcttgcgcctgtggggcaaccgcacggccgcctggccgacggtgacccacatgcgcaacttcgagaacgtgcgccgtaccaaggacctagtcgacgaatcgatccgctactcctcgctgcagttcgtggaccagcccgtcacccaggccttgatcgacagcatcatcgaaagcgtcaatttgttcggccgcaagctgatcggcgacagcgcgttgctcggcttcgaatgctggtgggaccccgcgcgcaacccgcaaacggagatcgagtcgggccacctgctgttcaactacaagctgacggtgccgctgccgttcgagcgcggtaccttcgaaaccgaaatcaccggggaatacctggccaacctgaagggggctgcataa

SEQ ID NO: 327437 - DNA, 525 bp, Pseudomonas aeruginosa
atggcaggcttcgtagctcaccgcatcaccaacggctctgtgtatctggacggcaacagcttcttcggcaaggtcgaggagatcgagctgggaacggtcaaggccgtgatgtccgacttccagggcctgggcatgatcggcctgatcgagttgccggatggcctggacaaactggagggcaagatcacctggaacagcctctacaaggaagccggcatcaagctggccagcccattcaaggccgtccagttgcaggcgcgctccaacgtccaggtgttcaacaacggcggcctggtcgacgagataccgctcgtcaccactctgaccatcatggccaaggaatacggcctggggacctacaaaccgcgcgaggcgatgaagcaggagacgccgttctcggcgacctacgtgcgccaggtgctcaacggtgaggaggtgttactgctggactacctggccaacatcttcaaggtcaatggcgaggaccagctggcgcgatatcgccgcaacatcggccaagcatag

SEQ ID NO: 327438 - DNA, 192 bp, Pseudomonas aeruginosa
atggaatacgaggtatccctagaaatagatggcgtcacctacatcgccatctgtatgcagcatggcgatgagctggtggtgtttttaccggatggcactgagcgcagaaccactctgcgagggctggatccagagcacgcagcgaagtcgcacctgcgaggctatattcatgcgctaaagcacaaaggttag

SEQ ID NO: 327439 - DNA, 315 bp, Pseudomonas aeruginosa
atgtccacccctcctgtaattcgtctgcttttcccgttcacctccgctagcggcgagcgtatcgaggagctggctattcgtcggctcaaacgccgcgaccttgccgacgcgcagcgtcactccaaggatgaagccgtgatcgaggaccatctgctctgcaagatgaccggcctgaccctggaagacctggagacactggatctcgccgacagccgaacggtgaccgaggtgtttcgggaactggtggcgggccgagacggtactgcagtcttgggacgaagcgctgctcctggtgctgcggatgcagccgagtga

SEQ ID NO: 327440 - DNA, 258 bp, Pseudomonas aeruginosa
atgttcgaaaacgtcgccagtcgcaccgctcgcatcctttacagcctgatcatggggctgggcgttctactgttcgcctggacatgcctggcgaacttgccgctctggggcgcggcgctggcgttctgcctgggcctgcctctgctggccctggtagccacccccattgcggcgggtggctctctgctggtgggagtgacggcgggactagtggctaccggtttcgcattccttcggcggcctcgatgcgacggttga

SEQ ID NO: 327441 - DNA, 2688 bp, Pseudomonas aeruginosa
atggccaatgaagtcctggtaggtctcaagatcggcgccgccgtcagcggcaccctccgtaccgccttcggatcggcgcgctcgaccgtgcagcagctcggccgcgccaccgacagtcttaccgtcaagcagcaacaactcggtgccgaactttccgctgctctggccaggggcggcacaggtattgggcggatgcgccgccagtacgacgaggtcgggcgtaccatcgaccagatccgcctgaagcaagaacggcttaccgcaagcatcgctcgaggcgaaaccctcaagaaccagcgcgctgatctgcgcggccaggccatggagaccatcggtaccgctgccgtgcttggtgctcctctggtcaaggcgctgcgtaccggcatttccttccaggatgaagtaagggatatccgcatcactgcgggattcgacgccagtcaggaaacggaactggccaagatggtccggggtaccgcactggccaaaaatcagactcaaggcgatgtcaacgtcggggtcggtacgctggttgccggtggtatcagcgacctgcaggcgctgaaagagtacacgccgatcatggccgaggtggccaccgcgaccaaggccagcatggaggaccttggcgcgtcaacgattgccctgcgcgacagcatgaacatcaccgcccaagactataaggcggtaatgaacatgctggccgccgggggtaaagaaggtcagttcgaacttcaagatatggccaagtggctcccgaccttggccgctcaatatggcgccatggggcagaagggtaagaacgcggtggcagagcttacggctgctctgcaggttacccggatgggtgccggtagcagtgaccaggctgcgaacaacttccagaaccttctttcaaagctgaccactcccgacaccatcaagtctttcaaggacgcgggcatcgatcttcaggacagcatgcggcaacaagcggtccaggggctgactcctcttaaatcgatgctagccactattggtacgtacctcggtagcgctgggccagcagccgcgaagaagtaccaagaggcgctgaagatcaaggacgaccaggagcgggacatagcgctccagcggctggacgaggcctacaaacttggtgaattgttccgtgatcagcaggtgatggccgccttgcgcccgctactggccaatcgtgacaagctcgccgatatcgagtcggtatccaagagtgctgcggatcaggatgttattggcgccgactttgcgctacgagtagatactgctggcagctcggttagagcctttcagattggcctgaatgaactaggcatcactctcagcgatgctcttctgccggcagttaatgaactgttgaaagacgtcatcccggtagttcgccaattctctgtttgggcctcgaagaatggccaactgatcaaatggaccattggcctggctggcggattgttggccgggaagttggccttcataggtttgcattatggagtcaacttggccctgtcacccctgaatgccatgagcaccaccgtgacggcactctccgctcgctggacggtacttagggggatgctgctttccaccagcctgggcccggtgaccaccggagcgagtcgcctttccggagtgctttatgggctctctggtggatttgccgcgctgggcggcgtgattgcggcgacgcctatcggctggatcatcgccggaattgccggcattgcggtcgcagggctgcttatctacaagtactgggagcctatcaaggcatggacctctggcttcttcgaaggcctgatcgaagggttagggcctatcggcgaagccttctccgcagcctttgcaccgattgcaccactggtctctgaactgggcatgttgttgcagccggccatccagtggttccgtgagttgttgatccccgtgcaactgtctggtgaagaactcggcaaggcaagcagtgcaggactgagttttggccgggtggttggcaatgtactttccacaatgctggcccccttgcgcttggcgctggtccttatcggagagatacccaaggtatttcagggcggaatcgccggagtgtcggcactgattgccaacttttctccgctggagatgttctacagatcattcgccggggtgttgggctacctgggtattgagctgcccggtaagttcaccgagttcggcggcatgctggtgcaaggcctggtcagtggtatcacccgtatggccggttcggtgaaagacagcatcgtgggcatcggcacatcaattaaagattggttcgccggcacgctgggcatccactctccgagccgggtcttcatcggttatgggcgcaacatcggcgagggagccgccattggtatcgcgtctcagacagggctagttcgtcagtcagccctggccatggcatcgtccagttcggtgccgttggcaccgccgaacctgcaggcggcagctacctccagttccgccttcaatggtgcggccgcaggttcgatggaaatcaacttcagtccggtcatccaggtgcaaggcggaggtgatgtgaaggaccaggtgcaggccggcctgcagcaaggctacgccgagttcgaacgcatgatgcagcgctggcagcaatcgcagcagcggctcagcttcaagggaggagcgttctga

SEQ ID NO: 327442 - DNA, 870 bp, Pseudomonas aeruginosa
atgtgggccgtcctgggtaagatcgagttcgagttggtcagccatccctccgtaatggaggaacgcacatcggccgactatgcagagcatgcgctcatcaatagcaagccgatgcttgagcacgtcggcgacggcctggacgagctgatgctcgatatccaactgcatgcctcccaggtcgatccagaggcgcagatcaggcaactgaaacaggcgcaggcagctcacgaaccgctgcctctggtgctcggctccggcgactatcgaggcgtctacctgctgaccggggtcgataccagagtcagtcgcaccgatggagctggccgcctggtaaatgccacggtcagcctcaccttgcgcgagtactccgggaagtacaccaagccactgcccaacccgctagccctgaagagcgctgccgcactgcctggcgccaagatcggcggcatctccagcctgttctccacgccgatgcaacaggtgctgggctctgccgtctcggccggcaacctgttgcgcgctggcgtggaggcctacgacacggcccgcaccgttcggaacaatccctccgtcctgctgggccaggccggcgagctgatgcgcatgagccagcaggtactggagccgctcggcgtgatgggcaccgccgcgcagttgctgggcaatggtggtgacctggtccggctcagcgcatcggtcggtcgtgacgttcaggacgccgttcagtcgatgcgcgacgttcacatcggcaatatcgttgcgcaggtcgacagcgcctccgttcgaatgaacacggcctacggccagttgcaggaagctgcgcctcgtcttgctggcctggcggccaacatcattaccaggagaggctga

SEQ ID NO: 327443 - DNA, 216 bp, Pseudomonas aeruginosa
atggctgagtacatcacgcacgtcacgcgggagggtgaacgctgggaccagctcgccgtcacgtactatggaaatccctaccggtacgagccgatcacccgcgccaatccacaggttccgttgacggccgcgttgcccgctggcctgacccttcgtattcctgtcctggatgaccaggtgctcattaccgaggatatgccgccatggatgcgttga

SEQ ID NO: 327444 - DNA, 1095 bp, Pseudomonas aeruginosa
atggatgcgttgatgccgaacgaggttcccgcttccgcctttcggttgacctaccagcagcgtgacatcacccaggacatcacgcgggatctgatcggcctcacctataccgacaatctcagcggccgctccgatgatctgcaggttgatctcatggacgtggaggggcgttggcgcagcacctggtaccctggccacggcgatacgttggcactttccatcggctggaagggcaaagcgcagcgggcgcttggtcgcttcgagatcgatgagatcgaggccgcagggcctccggcaacagtcagcatcaaggcggtggcggcggggatcaatcgcccgatgcgcaccaccgagcaccgctcctacgaaggggcgaccctggcggccattgccggccaggtcgccggccgtctcggtctgcagctcaccggcaagattgcaccgatcaagctagatcgcctgacacagcaggaaccggacctcgaatttctcgcacgtctggccgaggactacgactacgccttcaagatcgtcggcggccagttggtgttccactccatcgcggacctagccgcaggaccatcggtcgccaccttgaacctcaccgacctcacctcatttcgtttccgcgatcagatactgatggtgcccaaggctatccaggtgaagcacaaggctccggccaagaagcagttgatctcctatcacatgatcaatggcgagatgaaagcggtgcccagcagcgccagccaggcgacctccagcgccgacacggccaagcaccgtaagcgggccgtctctgctcaagttgcgatggcgcgagcgaaagccgaccaagcgcgccagaatcgcgagcggacgaccgcgtactggacccttctgggccgcccgaatctggtcagtggcaacatcgtcacgctgaacggtgcaggtcagttcggcggcgcgttcctgatactgtcggccaggcaccggctagaccgcgcggggggttatgtcgtcgagctggaagtgtgtcgggtcaaggcgccaagcttgaagttcgacgccacacagggcgcctcactggatagctatgggatgggcaaagcatga

SEQ ID NO: 327445 - DNA, 531 bp, Pseudomonas aeruginosa
atgagttccttggagttcggcgatgtggcggcggtcgactacgcgagctgccgtgtccgtgtgcgactggacgagcgagacggcttggtaacctactggctgcacgttccgcaacgacatacccaagggacgaaggcgcgcccgctgatgccggagatcggcgaacaggtcgcggtgctcctggaagacgacggcgtcgagggcgttgtcctgggcggggtctactccgccgccgagccgccccctgtggctgatgccgatacccactacatccgattcagtgatggcagcagcgttacctatgaccgaaaggcgcaccagatggccgttcaatgcgtgggggcggtgacgctgaaatgcactggccccttgaccgtcgaggcaggacagtcggttatggtgaaggcgccagccgtgaccctggacaccccgcaaaccaccctgcagggcaacctgcaggtgaatggcaatatcaacgccacgggggccgttatggacgctgggggcaactccaaccaccacacccactag

SEQ ID NO: 327446 - DNA, 384 bp, Pseudomonas aeruginosa
atgactacgcccgttccttacaccagcatcaccgccgcccattggcagcccgcccttggcacgcccggcgaggccgttcagggcctgcgcgatatcgaccaggccatccgcatcatcttgacaacgccgcgcggcagcgacccgcaccggccggagttcggcagcgatctgcacctgtatatcgactggccgaccaaccgggtagtaccgcacctagtacgcgaggcggtggatgcgattcgccagtgggagccccgagtaaccgtccagcaggtgctgactgacatcgatgcctcctcgatcacgttacgtgttcagtggtcggtggccaatggcgtgctgcagcagacggaggtgccctatgcgcgatcttccaccgcctga

SEQ ID NO: 327447 - DNA, 1122 bp, Pseudomonas aeruginosa
atgcgcgatcttccaccgcctgagttcgtaaagatcgatccggccggcatcgaggccgacctgatcgctcgctatgaggcgaagtcgggcaaagccctgtatccggcgcaaatcgagcgcctgttcatcgatcagatcgcctacgcgcagagcctggtgctctctgccatccagcacgccggcgagcaactcctggtccgcaccagcgcggcgccgattctcgactacctgggcgaactggtcggtaccgagcgtctgttggcgcagcccgcccgctgccgtctggcgttcactttgcctgctccagcgacattgccggtcgtgatcgacgccggcactcaggtcagtacctcggatggtcggctggtatttcggactgaccaggacgtgacgattgcagctggccagaccatggctcgcgtcatggcgacgtgcgagacatcaggtacagcggggaatggatgggcggttgggcagatatccagcctggtccgcattccggtcgacgggatgacggctcgaaacgagaccgtcacagccgatggcgtcgacgaagagtccgatgaacgctacagggaacggatcatccttgctccggaggcctataccaacgccggtagccgcggtgcctatcgctatcacgccctggcggttcaccagtccatcgttgacgtggcggtccatggtcccgccgaagggcaactacctggccacgttgcactctacccattgaccaccaccgggctaccgagcgatgacctgctcacccgaatagcgggccaagtcagcggtgaacgtgtcaggccactgtgcgacacggtcaaagtgctggtgccgacagaagtgccattcacgatccaggcgcagctgaccttctacctgaacgcggatcgcaccgaggcgatggcggcagcgcaggcggcggccgctgcttatgcggccgaccggcgcgccggcctgggccgagacattgtcccggaacaactcattgcggcgctgcaggtgaacggcgtctaccgcgctgacctggtccaaccctcagcactgcgcgtcctggccggtaacgaatgggcgaattgcggttcgatccagctggttgatgcgggagtggctgatggctga

SEQ ID NO: 327448 - DNA, 555 bp, Pseudomonas aeruginosa
atggctgatcaacagctaccgccgccgctggctggagacgaacgcttttcgctgctcctggagctgctgcaggagaccttcgctggcaccgacctaagcgtcatggcggtgtacctggtcgaccaggttcgcgcctcgctgctgccggtcctggctgatcaattctcgctcctcgatgaggccgtgtggggactcgcggaatccaacggcaccaaacgtgcgctgattaaaggttctatcgagttgcatcgctacaaggggaccccgtggtcgatccgcgaggtgttcagcctgctggggttcggggaggtcgtgatccatgagggcgctgcggccgtcgacatcgagcccccaccagggacagatgtatggccctactaccgggtgctgatgagtcgcccgatcaccaatgagcaggctgcacacatccgcagcctgctcaactccatcgcaccggcccgttgcttactcgcggcgttggactaccaggcggtcgccatccgctacaacaacaccgccaagtacgacggcaactacaaccacgggagcagctaa

SEQ ID NO: 327449 - DNA, 2052 bp, Pseudomonas aeruginosa
atggcaaccttgcccgaatcccctgagtacgcatcaggcatctaccagatcgaaacgtcggaccctgtggtcggtggccccggtggggtttccaacaagcaaggagagcagttggcatgccggacagcctggctcaagatgcaggtcgacggcttggtcaccggcagcatcgtggctggcaaggctgcacggctatctgccgtgcgtaccttgtccatcactggggcaggtaccggtagcgcagcgttcgacggcagcgcgaatgctgccatcgccctgacgctagccaacagcggtgtgtcggcaggtacctactcgaaggtgacggtcaatgcgaaaggcctggtaacggccggcgcggcgctggtagcgtcggacatcccggcgcttgactggagcaagatcaccaccggccgcccgacaacgctgggcggatacggcatcaccgacgcgctggccaagagcgatgcggtgacctctccgacgccgaacaagctgctgttgatgaacagtgctggacagcttcccgcctcgatcacgggtaatgccgcgacggccaacaagtgggccgttgcacgcacgctgtcgatttcaggggacgcgaccggtagcggtacgctcgatggcagcgcaaacgccggaatatcggtcacgctagccaactccggggtcagcaccggcacgtatacgaaaatgagcgtcaactccaaaggactggttacaaacggcggctggctgggcgctgcggacattcccgcgctggatgcctcgaagattgcaaccggcctgctcgatttggaacgtctgccgttggtttcccaaggcctggccaccgccgtgcccacaagcgtggatcccaactccgtagtcattccgctggtactgaccaagcatgcgaatggacccgtggcggatcggtactactacattcaaacgatgatgtatccgaccgtggggggcaacgctgtccagattgcggccgggtatgccggcgtggctgacatgtacgtgcgttatgcctattcggcgaccgccacgacggacccaaatagccgggtgtggtcggcctgggttcggtgcgatctaggcggtgctttcgcacatacacccgatggcgaattgggggctggggtcaatctggactcgatgattgcgtcgggatggtggcaccaaccgttcacggcgaacgcaaagaacggcgcgaactatcccgtgggagaggccggcttgctgaccgtccacgcgcccatttccacgatgatttatcagacttaccgtggctacgccgccggcggcgtgtactggcgctgccgctacaacggcacctggtcagcctggtatcgcgcatgggactccggcaatttcaacccgggctggtacgtcgccaagtcggagtacagctggtcttcgctgccaggaaagcccgagacgtttccgccgtcaccgcatatccatgatgcaacccagatcacctctggcgtcttaccccttgcgcgaggagggctgggtaacggagctggccaggctcaaacagccctcaagcttgctactgccaggactatttcaatcacgggggcgggaacagcctccgtatcgttcgacggtagtggaaacgtcagcctgccgttggtggttaacgccagcaatattcagacgggcatcttaccgcttgcacgcggtggcctcggcgcggccgacgcaccgacagcgagaagcaacataggcgcgggggctattgccaccgcaagcaaggcgggcaacggctggttcaaggacaacgacacgggacttatcttccagtggctccacttggctgtgggtgatcaccctgggggattcctggacaaggccgtgacgtttcccacgcccttcccgaatgcgtgcctgcatgtgattccttcggtaagggagttggggaggccagccacctcggcctcaacggttaccctggcggagaagaatatgtccaagacgaacgtcaccatcgtaacaactgagtacatcagcaccgtgcagaacttcggcatcaacgtattcgcgattgggtattga

SEQ ID NO: 327450 - DNA, 1122 bp, Pseudomonas aeruginosa
atgaggatcgatatcgcgcaccgctgcgacaacttcgacagctaccgggccgcccgagtgagatccctgttcaacgtcgaccaggggagcaaggtggcaatttcggctgagttgcccctggatgagcggtcgtgggggatcggcgttgtcgttggcccgtccggctcagggaagaccagcattggccgcgtcattggcccgctgtattaccctacctggcccaagaaccagccgattatcgacgccatcgctccagctggtgagttcgatgctgtcaccggggcgctttctgcggtggggctgggaacggtgccggcttggcttcgcccgcaccaggtgctttccaacggcgagcagttccgcgcgaacctggcgcgcctggtatgcgaagcgccgccgctggcagttgtcgatgagttcagttcggtcgttgaccgccagattgcccggataggcgccggggcgttcgccaaggcgtggcggcgtaccagcgggcgcgcggtactgctgtcgtgccattacgacgtgctcgactgggttcagcccgactgggtctacgataccgccagcggtgttttccaatgggggtggcatcggcgccgaccgcgcatcgagctggaaatccgcgaggctaagcagcgcgattacgtcctgtttgagccgcatcactatctgagcctgccaccaatggtggccagcactcactatgtggggtgggtcggcgacgagccggttgcccatgtcgcgttctccacgcgcccagggctggtggaggcgcgggcctgccgtttggtggtaatgcccgagtggcaaggcgcgggcgtaggcatgcgcttcctcaatgccatttgcggccgttggttggccgggcagaaccgctacggcctgccactgcggactctgttccacaccagccaccccggcctggcagcggcgctacgccgtgacccgaagtggacacaggtatccgcccaactgctgggcggcaacaaggcccgcagccacgcaacgctcatcgaatcgtctcgccggctgggacggccgcgatccggcggcggctacggcggtcacttccgcgcggtgcagggcttccgatatctaggagctgatcaatgcgagtag

SEQ ID NO: 327451 - DNA, 618 bp, Pseudomonas aeruginosa
atgcgagtagtgttggtggggcagaaatggttggctgttcaactgctggaacgttgccggatgctcggcatcgagatcgtcctggtcgttgttcccgcgccagtggatggccagccggacagcctggagcgcgctgcggccgcccaggggctggcggtatgccgaacggggtggcggcttggcgctgagcaggtgccgccgtgcgacttggtcctagccgcccacgcccatgcatatatagacgcgggcgcgcgtggccaggcccgtctcggtgccctgggttttcacccctcgttactgccccggcaccgaggccgggacgcggttcggtgggcagtgcatatgcgggaggcggtgacgggaggctcgttgtactggatggacgacggtgctgacacggggccggtagttgctcagtcctggtgccacatacgccctgacgatactccggcgacgttatggcgccgtgaactagccccgatgggactggacctgttcgaccaggtgctggccagactgttggcgggggagcggtgccaaggcgtggctcaggacgaggcgctggcgacatgggagccggcgtggtcgggtaagcggctgggcgttcgtaccggctaa

SEQ ID NO: 327452 - DNA, 912 bp, Pseudomonas aeruginosa
atggcccggcttgaagtcaaccgttccggcgaactggaggtgtttgcccgggtcgtcgagtcggggggcttttccgccgccgctcgacgttgcggcatgacgccctcggcagtcagcaagctgatcacccggctcgaacagcgcctgggaacccgcttgctgaaccgctccacccgtcaattgcaactgacgcccgagggatgcgcgttctacgagcgcggggtgcgtatcctggccgatctggaggaagccgagcggtgtgcgagcgaaaacgcggcgccgcgtgggcgcttgcgagtcaacgccaacgtgcctttcgggcatcacttcctgctgccgctggtgcccgagctcctcgcgcagcatcccgaggtgacgctggatatcgtgctgaccgatgaggtcgtcgacatcctcgagcagcgcaccgacgtggccgtgcgcgcggggccgctgaaaagctcgagcctggtggcgcgcaagctggggagcacgcgcatgctgatcgtcggtgcgccggcctatctggcccggcatggcatgccggccacgccgcaggcgctgctggggcacaaccgcctcggcgccaactatgtgcgaacgcgctccggctggccgctgcgggacgccggcgaggaactcgtggtgccgttgtcgggcaacgcccaggccagcgatggcgaggcgctgcgccgtctggccgtggccggcctgggcctggcgcggctggccgcgttccaggtgcgcgaggacatagccgccgggcgcctgattcccgtgctcgaggcatacaacccgggcgacctggaggaagtccacgccgtctacgtcggccagggcggctatctgccgctgcgcgtgcgggcgttcctggactttctggcggagcgcgtcgatatgagccagggttga

SEQ ID NO: 327453 - DNA, 975 bp, Pseudomonas aeruginosa
atggcgttgcatcgctcggtgagttcggcgagttgctgcggatcgctgtcgggctggcaggcggcggcgcgctggagcagttcggcgtgttcggcggcgcccagggcggcgacttcgctggcgaggtcttgcaggtgttccagtcgctggcgttgctgctggtgttcgcgggcggcctgggcgaggtcgagaaccaggctgtcgagcagcaggttgcggcgctccggccgctgttcggcttcggcgcgggccagtcgctcgaggaacgcttgggcgctggcctcgccttgcagcagttgcagttcggcgatgtgccggtcgatgcgcgccaggcgctgttcgcgcggggcgtcctgttgctggcgggcgcgccactgttccagggtgatgggcgtttcgtcggtcttcaggcgctgggcgagttcgtgctgggctgcgctgaggcgttcctcggcgggggcgctggcgagggcggcgaagccttgggcgagcagggcttccgcgtcgtcgcggaggacgccgtcggccagcgtatgcagggtttgccggagtgccgcgctggcggcatcgggcctggcgtcgagggcctggagcagggcgctggcgttttcctggaggcggcggtgttgctggcgcgtttccgcggcctggcgaatggcgcgctcttcgcgttcggcgaggtcgcgcttgaggaattcgctttcgatcttcacctgcaattgcacatccagccagcgttcctgttcgagcagggcgtgcaggctggcgcggcgggcgtgggcggcggcgcgctcggcgtcgctgagctgggcgagccggctggcctggttttcccagcgcgcgagggccttgtccaggcgttgcaggtcgcgctcgcaggtggcgatggcttcttcccgggtgacgattcttacaactttcggtccgctcattgggaggcctccgctgctgccgtgggatgggtttccgcgctag

SEQ ID NO: 327454 - DNA, 1599 bp, Pseudomonas aeruginosa
atgccctctacccaacaccaactgatcaagcagtgcgccacccgcctgcgcggcatcgtcgaagccctggacaacatccacgacagcaccccgctccgctggtcgacggacctcgacgatgttcactcctcagccgagagcctgctggccctgatcaaggaccaggcgccggctcgatcggaagccagcttcgaagagtggctggccaacgaactcgagggcgaggacggccagcctgttccggccgcagcctgcgacattaccctcgcccgccgagcattcaaccactggccgaagctggaacaaccagccaaggttggtggcgtccgcttcagcgctggcgtgtcgtcgcggctggtagtcgaagccgcccagcggctgtacgagttcgagtccactccggagaaagaggcagagcgcatcgaccccgaacaggaattggtagagcaggcaggcggggatgagcgcgcggcgtttgaactcttcgtgcgcaagcactgcggcatgccggcgcatatcgctgtgaactgggacgccaagttcaccaatgatgcatgggaggggtggcaagcccgcgccgccctggcgcaaccctccccgaagtgcgcgacatgcaatgactccggccagatcgtcgtcagcggcccccactaccagggcgagttccagccccccgaatatgaaaccgagccgtgcgatatgtgcgcacaaccctccccagcgcaggcagaggcggagcggctgcgcgaggcttacgagtggggctatggcgacggacagaacaaccccaatgggtacagcgacaagaaagaacgtgatgcctgcgttaacgagctgctgaaacaaccatccacggtgcaggcagatgcggagcgaccaacctacgaatgcaccatgggcgttggtggcggcgacggcaatctgttcgttcatggcgaccacgccagcatcaaggctgcccagaagatcgtgctggagcgcgacgccgccctggccagggtcgcggagcttgagttgggtattgccaggatcgcaggcgacttcctgcccgacaacagcggacaggccgaactggccctggatgaaatgcgtcaagcattgcacgaacttctcgccgccgcacccacccaggctcagcacagcatgccaggagagttcatcgggcgcctgtccgaattcctcgcgcagcgcggcgctaccgggaaagctctgctccgagaactgcgcgccatgctcgctgccgcacccacccaggttcagcacagtgtgccgcaggcatggctcgacgtgcaggcagagcgccgccggcaggtcgaggccgagggctggacgccggagcacgacgacgagcacagccacggccagatggcccgcgccgccgcctgctacgccctggccggctccagcgctccgaatgatggaaccgcagccctgttggtgtcgctggcatggccgtgggaccagcagtggtggaagccgaccagcgcgcgccgcgatctggtcaaggcctgcgccctggcgctggccgagatcgaacgtctcgaccgggcaggcatatcgcaaagtccccagccgggagccaccacggcctcttcctga

SEQ ID NO: 327455 - DNA, 642 bp, Pseudomonas aeruginosa
atgaccgacctcttctacctgcaagacagccgcagcaacgtcgggagccgggccatgttctggcgcgccggcggcggctacaccaccaacatcgacgaagccgaaacgttcacccgcgcccgggccgtacggcaatacgagtgccgcgagaccgatctgccctggccggtcgactacgtgcgcgcccgggtcgagtacggcgtcgatcaccaggacctggacctgtcccggacgcaggcactcgccggcgcgccggcggacgaccgcatctacgtcgcctacgacagggactgggacggcaactgtcttgtctgggtacccgaggccgccggccgaacatccaacctggccaccgcacggacctggccgctcgaccacgccggcatactcaccgcgcgcgggctagcgccctggccgaagtcctacatcgaccagcatgccagacctgttgctgtggcggcctccctcaaccacaagcaggccctccggctgttcggcctgaagctacccaagccggagcaccagggccagcgccgcctgagctacagcgccaggctgaattgcagcggctgcggacgcttcatcacagagcatcagcgcttcgacgactgccccaactgcggggcaaggaatgcaccatga

SEQ ID NO: 327456 - DNA, 2094 bp, Pseudomonas aeruginosa
atgacttccctcaagaagccctccccgctcgacttcaaaacccagtacggcctggccctggacgccgccgacgacgcgatcatcgtcgacctgttcgccggcggcggtggtgcgagcaccggcctggaaatgggcctgggccgcaaggtcgacctggccatcaaccacaacccggccgcaatcagcatgcacgaggccaaccacccgcacgccgagcatctgccgaccgatgtctggggcatcgaccccatagaggccaccaagggcgccaccgtgggctggctgcatgcatcgccggactgccggcaccacagccaggccgccggcggccagccgcgcaagaaagagatccgcgacctgtcctgggttgttgtgaagtgggccggcaagctccagaagctcggccgcggcccctgggtcatcagtctggagaacgtgaagcagatccttcaatggggcccgctgatcgccaaacgcgacaagtcgaccggccgcgtcgtgcgcctcgacggcactgtagccggtcccggcgagcgggtaccacggcacgagcagttcctggtgcccgatccgaagcgcaagggccgcacctggcgccagttcctgcgcgccctggaaggcttcggctaccacgtcgactattgggtcgagcgcaactgcgactacggcgacccgaccacccgccagcgcctgtacctggtggccaccgacggaggtttcgcgccagtggcggcggagaagacccatgccgcgaagcccggcaaagggctgaagccgtaccgcacggcagcagagtgcatcgattggagcgacctcggccagtcgatccgcaaccggaagaagccgctggcggaggccaccatgcgccgcatcgcgaagggtatcgagaaagaagtattccagcgcgccaagcccttcatcgtgccgatcgcgaactggtcgcgcgaggccgtgcatccggttgaccagccgctgaacaccatcactgcctggccgaagggtggcgctttctccgttgccaccccgacgctgatccaagtcggctacggcgagcgcgacggacaggcaccgcgcgtccttgagctggacgaaccgctcggtaccgtggtcgccggcggcatcaagcacgccgtcgctgccgcccacctggtgaagttccgcttcgacgctaccggcgcgccggtcgaccagccgatgccaacgatcaccagcggcggcgagtgcaagcgcccggccggcgcggcgcacgccctgggcttgggcagcgcggtcttggtcggtgtcggcggccgcgccggccaaaccgagccacgctcggtcgccgagccgatgtacaccatcacagcgaaagctgactgcggagtggccaccgcgttcatggtccaggccaacgggggctacaacaccacccacagccgcccggccgacgccccgatcagcactatcacgaacaagggcagtcagcagcagctcgccacggcacacctggtaacgctgcggaagggatcgcatggcgccccggtggacggaccgctgggcacgcaaaccggcacagaccaccacggcctggtcgccgcccacctgctgcatctgcgcggcaactgcgacgcacgcgccgccgacgagccgctgcacacggtcagcgccggcggcacgcaccacggtctgatcaccgcggaaatggtcgccagcagcctgacgccggagcaattggacggcgcgctgtgggtgtcggcgttcctgatgcgctaccactcgtccggcgggcagtgggcgaagctggacgatccgctaaccacgatcaccaccaaggaccgcttggcgctggtcacggtctggatcagcggtagcccctacgtgatcgtcgacatccgcctgcgaatgctgaaaccgcgtgagttgtaccgcgcccagggcttccccgacagctacatcatcgagcggggccacaacgggcaacggttcactctgtcccagcaggtccacatgtgcggcaacagcgtgagccccaacacgatggccgcatacgcccgggcaaacgacccatggaagcggcggctacggccgacgccgcaacaggcggtggcagcatga

SEQ ID NO: 327457 - DNA, 441 bp, Pseudomonas aeruginosa
atgagcagaagcggatacagcgacgactgtggcggctggagcctgatttgctggcggggggcggtcaactccgcgatcaagggcaaacgcggccaggccttcctgatcgagctgcgcgaggccttagacgccatgccggacaagcgcctgatcgccgaggaactggaagctgacggccagttttgcaccctcggcgtgcttggcgccaaacgcgggctagacatgagcgggctcgaccccgactgccgcgaagctgttgcggcggccttcgacatcgcgccggcactggccgccgagattgtctatgagaacgacgagcaccctgggtgctaccagcggcaggacgacggttcgatgaaatgggcgcgcgagacgccagaacatcgctggaagcgcatgcgtgaatgggtggagaccagtatccaggcggtgacgccatga

SEQ ID NO: 327458 - DNA, 222 bp, Pseudomonas aeruginosa
atggccttcagcaatgaacgcgcggttcggatgattgaggaaggcatcacggccatgcgccggtcccacttcccgcgccccgaacagagcttcctccacggccagatcgaactggcctacgcagtggacttcatcgacacccgcctctacgacgacatgcgccgccggctcgacgccgcagcggattcgcgctgggcagaactcaggagcacgaacacatga

SEQ ID NO: 327459 - DNA, 153 bp, Pseudomonas aeruginosa
atgtggacataccgcgagcgccgcaaccgcgcggctttcagcagcgcgcaactcgcttacgaccgtgccgtcgacccgctctgggaacagccggagccggaaccagagcacgaggacgaagagcaggaggccgacgatggccttcagcaatga

SEQ ID NO: 327460 - DNA, 540 bp, Pseudomonas aeruginosa
atgctgaacatcaatgaagaagacctgaaagccgccatcgtcgcgaaagccgcagacgagatcctgagccatgacagcgaactctcagggctgattgccagggaagtgaaatcgcgcatcgacaagatcttcgccgaacgcgcaatggcccaggtcgagaaagcaatcgacgaaaccgtgcacaactgcttcgagcgcgattaccagcgcgtcaccgcttgggggcagccggaaggtgagccgaccagcattcgcaaagagctggagcgaactgtaagcggctattggtctgcgaaggtcgatccacgcactggtagagccgatggcggttacaactctgtcacccgcgccgaatacctgatgacgcaaatctgcgccgaagacttctcgaagcagatgaaggacagcgccgtgaacatcaccggtcacctgaaggacggcctgcgcaatcagatgggcaaggtgatggatgacatcctctctgagctcttcaaggtcaagagcctgcaagaccaaggaaaggtcgagaaaccgtactga

SEQ ID NO: 327461 - DNA, 600 bp, Pseudomonas aeruginosa
gtggaggaccactccgttctcgccctgctactggcagtcgaagttattgacgcgccagaggcgtcaattcctccggacatccttcccgatcatctattgctcgtcgccctagatcagacgcaccccaagcgcgccgtcatcgattcctggtcgccattcattgcactcgccgcgcgccagcgtgcccggggagttctgggcaccgacgaggtcatctacggctaccggttctcagcgacagtacaactacggacaccactgcacgcgctacagcaacacggacggatcgagcgcagagagcgccccctgctcccacagatcgcagaggagccgtggcagggaacctgggtggcgaagacccgtcccgatacggccggccagatggcctcggacatcggacccatcgacgccgacggcggtgactatctgcgtttcctcctgctctgccgccgcattatggcgtgcccgttaagcgataccgataaagcgaatttggtgcatcgctccgcgaacttctacggcgccggcggccacgcattcggccagttcatcgaacaccacggtgggccggacgcgctgctccgcaaactcaaccgatag

SEQ ID NO: 327462 - DNA, 384 bp, Pseudomonas aeruginosa
atggagtcgtgcgacaatttcctacctggcgatgccgaggagtggctgtcgtccgaggagaacgcggggaccaatgggtattggcttgaggtcaaagggcgatcgatgttcgacccaactggccttgctccggtgtcgttcccgccagggcatcgcattctggtgcagcctgaaggcttcgacgtgatcagtggaaagttctatgttgcccgcttgcgcggcgaggacggtcgctgggaaacgacgttcaagcagtacgtccgcgacgcaggtagctcctacctccaacctctaaatcccaccttcgaaacgctgaaggttgacgacaacgtcgagatcatcggaagggtcatcgattccagaccaccgcgctcagtgttctga

SEQ ID NO: 327463 - DNA, 231 bp, Pseudomonas aeruginosa
atgaatcgaatccgtgaactccgcgagggcgcgaacgtaaagcaggccgatctctatcgccagttgaagtggaaacaatcccgcttggcgaactatgagcgcggtgcgcgcacccccgggctagatgaggcaaggcgcattgtccatgcgctgaacgccttgggtgtgtcgtgctcgatggcggatgttttcccagagcctgaaaccggcgccgagcgcctggccagttga

SEQ ID NO: 327464 - DNA, 186 bp, Pseudomonas aeruginosa
atgcatgacgaacacgctcggttgaaagacgagtttcgccaactccagatccaaatgcacgaagcggtggccaaagcggcccagtataacgagcaggctgcggagtctcttgagcagtacgccagggctctcgagcggagcatggcgatcgtgcagcttatgaaacgcggggtgcacgatgtctga

SEQ ID NO: 327465 - DNA, 453 bp, Pseudomonas aeruginosa
atgatgactgacctccgtccagtgatgttcaccgtacccggcgagccggtggggaaggggaggccgcgtatcggtcgcgtcggcgcccacgccaggatgttcacgccggcgaagacagtggcgtacgaaggcctggtggccatggcagcccaggaagcgctcgcaggtcgatccctgatcgccggccccgtgctcatcgaactgcggatgttccaccccattccgcggtcctggtcgaagaagcgccaggccatggcactgatcggcgaggtcatgcccaccgtgaaatgcgatgccgacaactgcctgaaggcggtgtgtgacgcgctcaacggcgttgcgtggaaggacgacacccaggtcgtcaatgtgatgctcgcgaagcggtacgccgaggtgccgcgtgtcgaggtgaagattgttccgctgatggcccagggagcgcagcggtga

SEQ ID NO: 327466 - DNA, 390 bp, Pseudomonas aeruginosa
atggctgaaccgacgagcagcggagcagtagcagcagccggcgccgtcgggctcactgccaccgcgatcatccccggagtcgacgtaaatgcggtgatcggcggcttcgccggcgcgctgctgttcgtgctctgggctcacgacctgaccatggccaggcgcctcggctacctgctggcgtcctgggtcggcggctactacgccgccacagaggctgtcgggcggggcgcgacccagttctccgggctgcccgcactggtcaccgccgcgctgatcgtcacgatcctgatcggcgtgctcgactggatgattggtggccgcgcgccggcatggctccagatcgttctgcagcgcatcgtcggcatgttcggagggcgtagggatggttga

SEQ ID NO: 327467 - DNA, 285 bp, Pseudomonas aeruginosa
atggttgacctggtaaccctgacggctgcggccgtctgcggcgctatcagttgccgcatcttcacgtaccagcgccacggtgccacgtaccggttcggcgtctcgctctgtgcgtacatcctcgccgctgggaccggcatgcaggcgctgtcgatcagcttggccgtgctgatggcgcgccacgcaacgccgatatcgccctacctgctggcggtcctgctggtgctgctggtgctggtctaccgcaacaagggcaacatcgcgcccatcctgaggctcagttga

SEQ ID NO: 327468 - DNA, 597 bp, Pseudomonas aeruginosa
atggcgctgaccaagaaacagcgcctgttcgtcgacgagtacctgatagacctcaacgcgacgcaggccgcgattcgggccggctacagcacccggcgcgcgacggagatcggctatcaactgcttcagcggccggaggtcgcccaggccatccaggccgccatggccgagcgctcgaagcgcaccgaagtcgaggccgactatgtgatccgccgcctgcgcgagatcgacgagatggacgtgctcgacatcctcgaggacgacggatcgttccggtctatccgcgattggcccaggacgtggcgccagttcctgtccggcatcgagatcgccgagttgttcgagggccgcggagacgaccgccgcatcgccggcgtgctccgcaaggtcaagtggccggacaagctccgcaacctggagcttctgagccggcatgtcggcaccgagtctgccgcgctcgacttggagctcaagcgcctggatgtcgcgaagaagcgcgccgaactgaagctgctggagaaccctgaggacgaagcgccgccaaccagcgtcgcggtgaccatcatcgacgcgagggtgcgcgatgccgacgcttaa

SEQ ID NO: 327469 - DNA, 471 bp, Pseudomonas aeruginosa
atgagcgacgacatcatcaaatatccggcgcaactgccgcacccgctgcaacagggatacgccttcgagacgacgaacccgaagctgtcgaccccgatggcttcgggatacgtccgagaacgacggcgaacccagagcgtgccgaccagggcaaaagtcacctggaacatggatagccagcaggccgctttcttcgaggcgtggttcgctcgcaccctggtggacggaacgaagtggttcgaagcgatgctgcagacgcctctgggcttcctgccgtacacctgccgaattctcggcatgtatgagggggccgaactggtccaggtcaggcgctgggagtacagcgcgacgctcgaattgcgcgaacgccccctgatgccgccaggctgggagcagttcccggactactggttcaacatgaacatcttggatctcgcgatgaaccgcgatggccactggccggaggcataa

SEQ ID NO: 327470 - DNA, 1686 bp, Pseudomonas aeruginosa
atgcccgtccgttacaacaccatgaacccggtcgagccgaatgggtcttccgacttccgtgatctgtctgacaacactgcgaaccttgaccttgcgatgaatggccaggccctgacctggacgaatcgaattgggggtgaagagaagtcttggcggggcattgtgcagtggattgccgattggctcgccgcgcagggattcgaaccaggcttccttgagtatgtcgacggctctccgctgattgttgatcgcccgacccaactgatccagcgcgacgggaatctctacagcgttaagcggccagcagatttcccggtcagcctcagcgggaactgggccaccgacgagagtctgctggttgcccaggtcgaccgctcgctgcgtcagcagttgagagctccgggtggcgccggaatgatgggttacgatccggcggaaacgtacccatcagatacggttgggtacgaactgcaggcgctacgttctgctcggcgcattgcgatcagttctttctggccagccggcggaggagatgacggtacttccgcatgcgaggccgcgattgttgcggctggggctggcggagaggtgttctttgacgtccctgacttcatcatcactcgaaagctagttcagcttcagagccagaagtggtatgggcgcggagggcagcgagggacgacgattcgcaagggggcggacatcgacatgatcgaagtttccactctcggcactattaccgacatcaacctagaaggcgtgggcgctacgtatacaggcaaaggatttgttgttccgtctggtttcagccagaacttggtgcgttgccgcgccgtgaatatggggggggagcctctgtatttcgcccttaatgcggggggaggagccaacgtaacggcgttcgagggatatccactcgatacctctctctatgctggtatcgcgattgccggcgatactacacctcacccgcgctttttccgcgggatatggctaagtggggcgaattttgctcttggtcctggggcgggcaatggcggatcgttgactcagttctatgttcgagacctgagatttgatgcaacctccgcgttgtttcatatctccaatggacgatgcgcaactcttggtgctacgacaacaatcagaggtgctgatcactcaatagacggcgttgccttcgctggccctgttgctcttgaatctgcgcaagggataaatattggtccgtcctgcacagttccatcattaatagaaaacaggtcgaattgccaatacaactcggtttacgttcagcgaagaacatatagtcctgtctggtctcagacttcagccacaccctcaattggaaatgggacgttgactgggaactatattcggtgcggtcatcaatgcttggttgaaatagaaatgattgccggttctacaacagtatttggtgatagcggttcgtcatataggttttccttgccattccctggtcacctgtcatttaaccagcgaggcttccctgtgcgaatatatgactccagcgctggtgcggatttcacgggctgggccgcaattggtgcagatcaggattacatcacgatttctgtcggctcccagcaggtcagagccggggctccgatggtgtgggcacagggtgatacgttgcattgcagcttttcctatatgacacgctag

SEQ ID NO: 327471 - DNA, 369 bp, Pseudomonas aeruginosa
gtgatctcggcccgcgtgatttcgatcgcgctggcctgcctggtgctggtcggcctcggcaccgccggcggtgtctggatcggagcgcggcactaccggccccagttggatgccgcgagcgcggatctggctgcctgccgttccgctcgtgggagcctggaggccgcagtagtggagcagggcgggcagattgccgcgctgcgtcaggctggtgagcagcgcgcccgggatgccgcgcaggctgtggatcggggacggcagcaggccgcggagcagtatgccgcggcacagcgcctgctgagccagcgaaccgccggcgagcagtgtgcggctgccgaggcggtcattgatcaggagctgggtctatga

SEQ ID NO: 327472 - DNA, 687 bp, Pseudomonas aeruginosa
atgaacgccatccatatcgggccgttctcgatcactccggctgcccgcggactgcattacgggggcctgccgcatcaccggtggaccctatactacgggccccgggaaatggcgataaagaccctaccggacagttacacctcgtcggaggtgagggacgagttctcagacatcatcgccgagttcgtcatcgacgcccgggaccgatacgcgcccgatgttctggaactggtgaactcggatggtgacgcagtgctcgcgcgagtcgccgtgagccgactgccagaagcgttgtccgggtgcataccagacgatcgattcccatactggctcctgaccgccagccgcccacggctcgggctccctgtctccctgaacgagtacaccgcgctcgcggtcgaactcagcgcccctccacttgcatggatcacagggctcctccctggcgaggtactgacacatgacgccgaggagtggcgaccgccgaccagttgggagctacgccacgttgttggcgaggggtcgtttactggcgtaagcggcgccgctgcggccgctctgctcggaatgtccgcgacgaatttccgaaagtacacagccggggactctgccgcgaatcgccagaaaatcagtttcgcagcctggcactacctactcgaccggctcggcgtgaagcgggcgagctga

SEQ ID NO: 327473 - DNA, 480 bp, Pseudomonas aeruginosa
atgaccaatttccagacctggctcgacagcgccgacattcccgcccagcagaatgggcagtggattgacctcgaaaccgggatcgcatatgacccgtcgtacgactacgcctcgaacacccgccgggcctctttgagcccgcgcggcatagacgctcgcgccgtggcaaaggcctttggcggtcgcgccctcaccggcacagccaggcagaaggagtgggccgagaagatccgcgccgagaaggtacagcagatgaatcaagaccaggcggaaatggcctgcgatccaagcggcctgctcactgccgccaaattctggatcgaaaatcgcaacgctagtgctcaggagatcgccggattcgtaatgcagcagaaggccttgcttgcccagcatcgttctgcccaggccgccgggcaagccgacaaggtggccaaaatcgctgctgagtacaacgcgcttaccgctcgctgggggttctga

SEQ ID NO: 327474 - DNA, 513 bp, Pseudomonas aeruginosa
atgtcctactccgacccccgcatctgccaccaccagcgcgtcacccaatggctcgccgcgatacggcagcatgccgcctggctgtacgccgcggatgagcagtacctgtatctggtggccgaggcaaacgaactctatcagtgcggaatcgttggcctgcaggaccgccacgacatggtcaccgacgcgctcggcatgtactcctgggcgatcgagcacggcataacgcgcgagacgcactactgcgcggactgctgctacgacgtgctcgacggcggccgtgctgtcgggacggtggacagcgaggggatctaccacgggcccgcacccgcacgacagcgcctgggctacatcagccgggatccgctcgacgggatagcatacctccgcctgggccaggcgctcgagcgcgcgggcgtcgtacgcggcctggtgatcgaactcgacgccggcggcacgctgctgcttgtcgagcagatacccgatgacttccggccgtggcggtgggcctga

SEQ ID NO: 327475 - DNA, 1407 bp, Pseudomonas aeruginosa
gtggccccggcttccgccgtaccgctgatgacgactccgttgctcggatcgatcaccggcgccggcggggcgatggcatcgacggtgacgctggccggaccgctggtgttgccggccgggtcctgggccacggcgttgatcacggtgccgttggccagcggggtgcccggggtgaacgtccagttgccgctgccgtcggcggtagcctggccaatcgggttgcctccgccatcggtgaggatcaccgtcgcgccagcctccgcggtaccgcttatctcggtgccgttgctcggatcgatcaccggcgccgccggggccacgccatccaccgtgatcaccgccggcgcactgtcgacattgcttgggctgcgcgccaccacgttgaccaccgtgccatccggcagcgggatgcctggagtgaaggaccagttgccgctgccgtcggcggtgacctggccaatcgggttgccgttgccatcggtgatgatgatggtgttgccggcgtccgcggtgccgctgatcaccgaaccgttgctcggatccacctgcgggatcgacggcagcgaggaatccaccgtcgtggtagcgggagcgctggtattgccggcggcgtcgctcgcggtcacgttgaccacggtgccgttgggtagttgcgagccgggcgtgaagctccagttgccgctgccatcggcggtggtctggccgatcgggttgccgttgccgtcggtcaaggtcacggtgctgcccggctcggcggtaccgttgagcaggttgccgttgctcggattgaccacaggcgtgttcggcgccaccgcgtccacggtagtgctgccctgcgggccggtattgcccgcagggtcctgggccacggcgttgaccaccgtgccgttggccagcggcgtggcgggcgtgaaggtccagttgccgctgccgtcggcggtggtttcgccgatcgggttgccgttgccgtcggtgaggatcaccttggccccggcctccgcggtgccgctgatggtcgtgccgttgctcggatcgatcaccggcgccggcggcgccaccgcgtccaccgtggtggcggcctgcgggccggtattgccggtcgggtcggtggccgtggcgacgatcaccgtgccgttggccagcggcgtgcccggcgtgaagctccagttgccgctgccgtcggcggtgacctgccctatcgggttgccgccggcatcggtgagggtcacggtggcaccggcctcggcggtgccgctgatgacgacgccgttgctcgggttgatcaccggcgccggcggcgcgctggaatcgacggtcaccgtcgccggcgggctgctgttaccggcggcgtcctcggccaccacgttgaccacagtaccgttggcgatcggcgtggacggggtgtag

SEQ ID NO: 327476 - DNA, 669 bp, Pseudomonas aeruginosa
gtgctgcccggttccgcagtgccgctgaggctgctgccattgctcaggttgacggtcggcgtggccggcgcgatggcgtccacggtagtgctgccctggccgccggtattgccggccgggtcggtagcggtggcgttgaccacggttccatccgccagcggcgtggacggggtgaagctccagttgccgctgccgtcggcggtgacctgcccgatcggattgccgctgccatcggtcagggtcacggtggcgcccggttcggcggtgccgctgatctccgcgccgttgctcggattgaccaccggcgcggccggcgccaccgagtccacggtggtgctggccggagcgctggtattgccggtcgggtcgctggccgtggcgttgaccacggtgccgttagccagcggcgtgcccggcgtgaagctccagttgccactgccgtcggcggtgacctggcctatcgggttgccgttgccgtcggtcaggctcacggtggcgcccggctcggcggtgccgctgagcgtggtgccgttgctcgggttgagcaccggcgccgccggggcttgcgagtccacggtgacgctggcgcccgggctgctattgccggcggcgtcctgggccaccacgttgaccacggtgccgttggcgatcggcgtggacggggtgtag

SEQ ID NO: 327477 - DNA, 471 bp, Pseudomonas aeruginosa
atgatgagacgacaggcttccgtgttgctgctggtatccatggtatcggcgaccgtcttgccggttttcgcccgtgcgccgggcgagcgcgagccgtcctgcgccgcgacgagcatcgtcctgccagcgggggcccggtatcccaacggcatcgcccatgccgccgatggaacgctgtacgtcggcctggtcaccagcgggcgcatcctgcgcaagcctcccgggggcgagtgggaaaccttcttcgccggcagcctggcgatcttcgctgccaccgcgctgcggctggacgagccgcgtggcctgctctggggcaattcgccggacttcctacccgctggccggcgccggccgcatggggtgttcgccctggatctcgcgaccggtgccgtgcgccgatatctgagaccctgcccggcgacgggatgggcaacgatctcgcggtggcgccggacggaacggtctacctga

SEQ ID NO: 327478 - DNA, 2145 bp, Pseudomonas aeruginosa
atgactgacgctatccgttacgaaaaaggccaggacaacgtcgtcgtcctgaccatggacatgcccgggcagagcgccaacaccatgaacggtgtctaccgcgaggcgatggcgaagaccatcgcacggctggaggcggagaaagaggggatcgccggcgtggtgctgacctcggcgaagaagaccttcttcgccggcggcgatctcaacgagctgatcaaggtcaccaaggccgacgccccggccttctaccagggcatcctcgaactcaagggccaactgcggcgcctggagaccctcggcaagccggtggtcgccgcgatcaacggcgctgcgctgggcggcggctgggagatctgcctggcctgccaccaccgcatcgccctggacaatcccggcgtgcagctcggcctgccggaggtgactctcggcctgttgccgggcggcggcgggatcgtacgcatggtgcgactgcttggcctggagaaagccctgccgtacctcgccgaaggcaagaaggtgcgtccggctgaagcgctcaaggccgggctgatccacgaactggccgacagccccgaggaaatgctggagaaggcccgcgcctggatcctcgccaacccggcggcgaagcagccctgggacagcgccggctacaagattcccggcggtacgcctgccagtcccaacgtggcgcagatgctggccatcgcaccgtcggtgctgcgcgacaagaccaagggttgcttcccggcgcccgagaagatcatgtgcgcggcagtggagggcgcccaggtcgatttcgacaccgcgcaactgatcgaggcgcgctatttcaccgagctgaccaccggccaggtggcgaagaacatgatcggcaccttctggttccagctcaacgagatcaacgccggcaagtcgcggccgcaggggtatccggtgcgggcgacgaaaaaggtcggcgtgctcggcgccgggatgatgggcgcgggcatcgcctacgtatcggcggcggccggcatcgaggtggtgctcaaggacgtctcgctggaagcggcggagaagggcaaggcttattcggccaggctgctggacaagaaagttgcgcgcgggcacctgtccgccgagaagcgcgacgccttcctcgcgcggatcgtgccgagcgtcagcgaagccgacttcgaaggctgcgacctgatcatcgaggcggtcttcgaggaccgcgcgctgaaaggcaaggtcaccgccgaggccgagaagcatgccctggccgatgcggtggtggcgtccaatacctcgaccctgccgatcaccggtctggcccaggcggtggcgcggccggagaagttcatcggcctgcacttcttcagcccggtggacaagatgccgctggtggagatcatccgcggcgaaaagaccagcgacgaaaccctggcacgcggtttcgactacgtgctgcagatcaagaaaacgccgatcgtggtcaacgacagccgcggcttcttcacctcgcgggtattcggcaccttcaccaacgaaggcatcgccatgctcggcgaaggcgtgagcgccgcgatgatcgacaaccaggcgcgccaggccggtatgccggtggggccgctggcgatttccgacgaagtctccctgagcctgatgacccacatccgcaaccagaccgcccgcgacctcgaggccgagggcaaggctctgccgacgcatcctgcgttcgccgtgatcgacctgatggtcaatgagtacaagcgcccgggcaaggcggccggcgccggcttctacgactacccggcgaacggcaggaaacatctctgggcggaactcaagagccgcttcgagaagcccgatgcgcaaatatccgccgaggacgtacgcgaccgcctgctgttcatccaggctatcgagaccgtgcgttgcgtggaggagggggtattgcactccaccgccgacgcgaacatcggctcgatcttcggtatcggtttcgccgcctggagcgggggcgccttgcagttcatcaaccagtacggcctgaaggacttcatcgcccgcgcccaatacctggtcgaacagtacggcgagcgcttcgagccgccggcgctgttgctggagaaggcggcgaagggcgagctgttctga

SEQ ID NO: 327479 - DNA, 1161 bp, Pseudomonas aeruginosa
gtgtacgtggccgatggtccagtcggtgtagtgggagagggcgttgacggtcttgatcgccatcatcgggccttcgaaggtggacatgccgtagaacgccagggacaccaccaggaagcgcaggatcgggtcgctgcgcagcttatgccaggcgcccgagagggtcatcatgccgttgatcatgccgccccagctcggcgccaggaggatcagcgacatcaccatgcccagcgactgcgcccagtccggcagcgcggtgtagtgcaggtggtgcgggccggcccagatgtacaccgcgatcagcgcccagaagtggacgatggacaggcggtaggagtagaccggacgctcggcctgcttgggcacgaagtagtacatcatgccgaggaagccggcggtgaggaagaagcccacggcgttgtgcccgtaccaccactggaccatggcgtcggtggcgccggcgtacagcgagtaggacttggtgaaggtcaccggcagctcgaggttgttcaccacgtggagcatggcgacggtgaggatgaacccgccgaagaaccagttgcccacatagatgtgcttgaccttgcgcttgaccagggtgccgaagaacaccaccgcgtaggcgacccagaccaccgtgatcaggatgtcgatcggccattccagctcggcgtactccttggacgaggtgtagcccagcggcaggctgatggcggccagcaggatcaccagttgccagccccagaaggtgaaggaggcgagggtgtcggagaacagtcgcacctggcaggtgcgctgcaccgcgtagtagctggtggcgaacagtgcgcaaccgccgaaggcgaagatcaccgcgttggtgtgcagcgggcgcaggcggccgaagctcgtccacggcaagccgaagttcaggtcgggccataccagctgggcggcgatcaggacaccgacggtcatgccgacgatgccccagaccacggtcatgatggcgaattggcggaccaccttgtagttataggcggactctgggttagtggtgctcatgctatgggcttccatccacggttatacgctatggctttttccggcagttgggatgccgggcgtccccccattggggctggtctaattggcgtaattagcgagaggaagcatggataa

SEQ ID NO: 327480 - DNA, 1059 bp, Pseudomonas aeruginosa
atgagcgctcccctgcccccgcgcggtcgcggtaccgccagcaaccccctcaaccgcttcgccccgacccacagcgaggccttcgacgatggctgggagcaggacgtgccgccgatccagctcaccgaggtgcgcgaggagatcgcccgcacggtgatctcccgcaaccagtcgccggacctccctttcgatcgttcgatcaatccctaccgtggttgcgagcatggctgcatatactgctatgcgcggcccagccatgcctattgggacctctcgccggggatcgatttcgagacccggctgatcgccaagagcaacgtcgccagcgcgctggagcaggaactgagcaagcccggctatcgctgcgcgccgatcaacctgggcgccaataccgacccctaccagccgctggagcgcgaacgccgcctgacccgccaggtgctggaggtgctgttgcgcttccgtcacccgctgaccatcgtcaccaagggctcgctgatccttcgcgacctcgacctgctgcgcgaactggcggagcagaacctggtggcggtgatgatcagcctgaccaccctcgacgacgagctcaagcgcattctcgaaccgcgcgcggcggcgccctcggcgcgactgcgggcgatccgcacgctcagcggcaacggcatcccggtgggcgtgctctgctcgccgatgatcccgatggtcaacgatatggagctggagcgcctgctccaggcggcgcgggacgccggcgcgcgcagcgccgcgtacatgctcctgcgcctgccgcgcgaagtcgccccgctgttcgaggaatggctggcggcgcactacccgcaacgcgccgagcatgtgatgagcctggtccgccaatgccgtggcggcgaggtctacgacagccgcttcggccaccgctttcgtggccagggaccgttcgccgacctgctggcgcagcgtttcgcggtggcgatgaagcgcctcgggctggaccgccgcgagggcttcgggctggattgcagccggttcgccgtgccgggggcgcagatggcgttgttctag

SEQ ID NO: 327481 - DNA, 3099 bp, Pseudomonas aeruginosa
atggacatagaacttccgggattcgacatcgaacgcgagctgggcgaaggcgccatggccacggtctacctggccacccagcgctcgctgcagcgcaaggtggcgctgaaggtgatggccgcggcgctggccgccgacccgagcttcgccgaacgcttcctgcgcgaaggtcggaccctggcgcggctgtcgcacccgaacacggtgaccatccacgacatcggcaacgtcggcagttgctactacatggccatggaatacctgcccaacggcacgctcaaggagcgcatccagcagggcctcgatcccgagctgggcctggtctacgtacggcaggtggccgccgcgctcggctacgcgcactcccagggcctggtgcatcgagacgtgaagccggccaatatcctgttccgcgccgacggcaccgcggtgctctcggacttcggcatcgccaagtcgatcgaggacaatacccagttcacccaggtcggcttcgccgtcggcacccccagctacatgagcccggagcaggcccgcgggcaggagatcgacggccgcgccgacctctacgcgctgggcgtggtgctctacgagatcctcaccggcaagctgccctacaacggcaaggattcgctctccaccgccctggcccacctcaccgagccgctgccggaactgccgatcgaacagggccgctaccaggacatcctgcgccagttgctggccaaggacccggccgagcgcttccccaccgccggcgcgctgatcgccgccctcgaccgcctggcgccgagcgccctggaagccacccagatccgtccgctggcgacgccgcagggctcgcctcgagcgagcaacccgccgccggccgaacccgcgcccatgccgcccgccgacctcggcggcctgcaaccggtatcgatccagttgccgccggtcacgcccagcgccggcggcgccacgccgcccccgcctccgccatcgcaagcggcgaaaccgccatcgcccccgccgcctccgctgccaccggcgaagccgcgtgccggcggcagccgcacgccgctgatcgccgccgccgcggccgccgtgctcctggcgatcggcggcggcgcctggtggctgctgggctcgggcgacgcgccgagcgctgccgatccagcgccgctgggacagacgccggcggacaagccgcagcagcagaccccggtggccgatgccgaacaggacggcggcgagcgtccgctgctgatgccaggcaagaagaccctgttccagcgcgtcctgaccaaacccggcgcggccatctccgccgaggctggcggcccgccccgggccggcgcggtgccggccttctcggtgctctacgtgtacgcccgcaagcaggtcggcggcagcccctggctgcgcgtcggcgcctccagcaacggcgagggcgacggctggctgccggccagcgcggtgagcgactggaagcagagcctggtgctgaagttcaccgaacgctccggccgcgcgccggtgatgttcctcaacagcgccgagcaggtcgagcgcctgctcggcgatacccgcgcagcgcgcgacaccctgacccaggcggtggatcacaagggcgatccgcaggtggtcgcggtcgagcccaacgaccgggcgatcccccaggaccagttctacctgctgccgatcttcgactcgaaggaaagcttcgacgccgacggccagccggcgcagttgctggaggtcgcctcgatcgaccccggcggcagcgccgcggcaccccaggcgccgggccaggccgggcagggcggcgccagcggcgcggcgagcgacaccttccgcaccggcatcgtcctggtggtggacacctcggtgtcgatgcagccctacatcgaccgcgtgcgcgaggtgatcgacggcctgcagcggcagatcggcgagcgcggcgacctggacaaggtcagcttcggcctggtcggtttccgcaacaacaccgacaagacccccggcctggaatacgtcagcaagaccctggtgccgctgcaaccgggcaacgacgcgcagcgcttcgccgagttgagcagccaggtgcgcgccaccgacgtctccagccactcgttcaacgaagacgccttcgccgggatcatgcaggcggtcgacgaaatggactggtcgccctacgccgggcgcgtggtgctgctggtcaccgacgccggcgcgctgcgcaagaacgacccgctcgggcgcacccagatgaacgaggccgaggtccgccaggcggcgctgcgcaagggcgtgaagatctatgccctgcacctgcgcaccccggccgggaagaacaaccacggctacgccgagcagcagtaccgcagcctcaccgccgacgccaacccgaagatcgccgacctctacatcccggtggccggcggcgaggtgaacgccttcggcaacacggtgaaggagatcggcacggtgttcgccgacctggtccacgacgccggcaaccgcaagccgcaggcgccgcgcttcgacgccgcgccaagcgtggcgagcaagtcggcggccatcggctacgccatgcagatggaattcctcggtcgccgcgacccggtgcgcgcgccgcaggtcgtcaccgcctggaccgccgaccgtgacctgaccaacccggcgctgccggcgttccaggtctgcgtgctgctgagcaagctgcaactcaacgaactgcaacagtcgctgaaactgatcgtcgacgcggccaagcgcacccagacctcgcccaaggacttcttccaggaaatcgccagcgccagcgcctacatgagccgcgacccggcgcaactggtgaagggcagcaacctggcgcagagcggcgtgctcggcgaatacctggaaggcctgccgtaccgcagcaagtcgctgaacatgacccaggacctctggctgtcgctgagcgtcgccgaacagcaggacttcatcgacgaactggagtcgaagatccgcctctacgaaaccttccacaacgacgtcgccaactgggtccggttcggcgacgccgacgccggcgacgcgctgtaccgcgtgccgctgtcgacgctgccatga

SEQ ID NO: 327482 - DNA, 651 bp, Pseudomonas aeruginosa
atgccgctgcgattgaccatcaccagctaccacaagctgacccccggtcagtgttcggaaaaggtactggaccagggacagctgaccatcggtcggggcccggacaacgactgggtcctgccggacccggagcgcctggtctccagccgccactgcaccatcctcaaccgcgacggggtgtactacctcaccgacaccagcaccaacggcgtgctgctggtcaatgccgggcaccgcctgcgccgcggcaacagcgagccgctgcaggacggcgagaccgtccgcctcggcgaatacgacatcctcgtccagctcggccatgacatcgccctgcccggcagcggcaatccgcagaccgatccgttcaccagcttcgacgccctgatgagccggcaggccgccggatcggcgcctgccttcgccgaaccggcgcccaccccgcaccccgcggtgacggcgcatttccagggcggctcgccgctggacaccaagcccgacctgttcgacttcctcaccccgccgccgcccggcgcggcgccgcgtccggaccatgtaccggccgaacagcacgacttccgcccgccggaaccggtgatcccgccgccccccgcgaccgcccggcgccaccgcccgctggcggcgcaccgctga

SEQ ID NO: 327483 - DNA, 2709 bp, Pseudomonas aeruginosa
atgagtgagatcagtcgcgttgcgctgttcggcaagctgaacagcctggcctacaaggccatcgaggccgccacggtattctgcaagctgcgcggcaatccctatgtcgagctggtgcactggttccaccagatcctccagttaccggactcggacctgcaccagatcgtccgccagtccgggatcgacccggcgcgcctggccaaggacctgaccgaggccctcgaccgtctgccgcgcggctcgacctcgatcaccgacctgtcctcccatgtcgaggaagcggtggagcgcggctgggtctacggcagcctgatgttcggcgagagccaggtgcgcaccggctacctggtgatcggcatcctcaagacgccgagcctgcgccatgccctcaccgggctgtcggcggaattcgccaagctcaaggtcgaggcgctcaccgagcgcttcgacgagtacgtcggcgcctcgccggagaacggcctgtcggccagcgacggcttcaacgccggcgccgccccgggcgaggccagcggcgccctggcgccgagcgcgatgggcaagcaggaggcgctcaagcgctttaccgtggacctcaccgagcaggcccgtagcggcaagctcgaccccatcgtcgggcgtgacgaggagatccgccagttggtggacatcctcatgcgccgccggcagaacaacccgatcctcaccggcgaggccggcgtcggcaagaccgcggtggtggaaggcttcgccctgcgcatcgtcgccggcgacgtcccgccggcgctgaaggacgtcgaactgcgcgccctcgacgtcggcctgctgcaggccggggcgagcatgaagggcgagttcgagcagcgcctgcgccaggtgatcgaagacgtgcagagttccgagaagccgatcatcctgttcatcgacgaagcccacaccctggtcggcgccggtggcgcggccggcaccggcgacgccgccaacctgctcaagccggccctggcgcgcggcaccctgcgcaccgtggcggcgaccacctgggccgagtacaagaagcacatcgagaaggacccggcgctgacccggcgtttccaggtggtgcaggtggacgagccgtccgagcacaaggccatcctgatgatgcgcggtgtcgcgtcgaccatggagaagcaccacaaggtgcagatcctcgacgaggcgctggaggcggcggtccggctgtcgcaccgctacatcccggcgcgccagctgccggacaagtcggtgagcctgctggataccgcctgcgcgcgcaccgccatcagcctgcacgcggtgccggccgaggtcgacgatagccgccggcgcatcgaggcgctggaaaccgagctggcgatcatccgccgcgagagcgccatcggcgtcgccaccgccgaacgccagcgcaacgccgagaccctgctggccgaggagcgcgagcgcctggccgccctggagcagcgctgggccgaggaaaaacgcctggtcgacgaactgctggagacccgcgcccgtctgcgtgccgccgccgaagcggtggacgccggcggcgtgccgctgggcgaaggcgaggcgcgtctcgacgaggaacagcgccaggcgctgcatgcgcggctggcggagctgcaggcgcaactgagcgcgttgcagggcgaagagccgctgatcctgccgaccgtggactaccaggcggtggcctcggtggtcgccgactggaccggcatcccggtcggccgcatggcgcgcaacgagatcgagaccgtgctcaacctcgaccggcacctgaagaagcgcatcatcggccaggaccacgcgctggagatgatcgccaagcgcatccagacttcccgcgccggcctcgacaacccgagcaagccgatcggcgtgttcatgctcgccggcacctccggggtgggcaagaccgagaccgcgctggccttggccgaggccatgtacggcggcgagcagaatgtcatcaccatcaacatgagcgagttccaggaagcccacaccgtctccaccctcaagggcgccccgcccggctacatcggctacggcgagggtggcgtgctgaccgaggcggtgcgtcgcaagccctacagcgtggtgctgctggatgaagtggagaaggcccacccggatgtccacgagatcttcttccaggtcttcgacaagggcgtgatggaggacggcgaaggccgggtgatcgacttcaagaacaccctgattctgctcaccaccaacgccggcaccgagatgatcgccagcctctgcgccgatccggaactgatgcccgagccggaagccatcgccaagtcgctgcgcgaaccgctgctgaagatcttcccgccggcgctgctcggccgcctggtgaccatcccctactacccgctcagcgacgacatgctcaaggccatttcgcgcctgcaactggggcggatcaagaagcgcgtggaggcgacccacaaggtgccgttcgagttcgacgagggcgtcgtcgacctgatcgtctcgcgctgcaccgagaccgagagcggcggccggatgatcgacgcgatcctcaccaacacgctgttgccggacatgagccgcgagttcctcacccgcatgctcgaaggcaagccgttggccggggtacgtatcagtagccgcgacaaccagttccactacgacttcgccgaggccgagtga

SEQ ID NO: 327484 - DNA, 3801 bp, Pseudomonas aeruginosa
atgcagtttgtccgccaaggccccgacattcctgaacgcctgctgcaggcgcatgaggacggacgtgtcgtattcttttgcggtgcaggcatctcataccccgcgcgcttgcctggcttcgccgggctggtagcgaaggtgtataaagccctggccgccacacccaacgctgtgcagcaggcggcaatcaaagtcgagcagttcgacaccgccatcggcctgctggaagcggacattgtcggcggccgcgagacagtgcgccggacgctggctggcatcctgacgcccgatctcagcgccccaaacgcgactgcaacccatgaagccttgctgacactgagcaagtgccgcaatggccatacccgcctcatcaccaccaacttcgatcgcctgttcgaggaggtgattgcggtgaagtccctgcccatcaagcagtttcaggcgccactgctgccggtgccgaagaaccgctgggatggactggtgtatctgcatggcctgcttggcaccacaccgaccgcaaacgagctggatcgcctggtcgtctccagcggcgatttcggcctggcctatctcaccgagcgctgggcggcacgtttcgtcagcgagctgctccgcaactacactgtgtgcttcgtcggttacagcatcaacgaccccgtgctgcgctacatgatggacgcgctcgccgccgaccgcctgctgggtgagtcgccgccggagatgttcgccttcggcagtttctccaaaggcaaggaagaggaacggagcaatgagtggcgggccaagaacgtcacacccatcctctaccgcgagcacaatcggcatgcctacctgcacaagaccctgcgcgcgtgggccgaaacctaccgggacggcgtgcgcggcaaggagcgcatcgtcgtcgaatgtgccatggcccgtcccttggcaagcacccggcaggacgacttcgtcgggcgtctgctgtgggctctgagcgatccgggcgggctgcccgccaagcgctttgccgatctggacccggtgccgttactggattggctggagccgctgagcgagggacgctaccggcatgccgaccttggccgcttcggtgtccctcccagaacgaccgtagataaaaagctcaccttcagcctgacccaccgaccctcgccgtatccgctcgcaccgtcgatgtgtatcgtcgatgccggtgcgcgcggcagccgctgggacgaggtgatgcggcaactggcgcgatggttgacccgtcatctgaacgaccctgcgttgctgctttggttggtcaagcacggcgggcagcttcatgacgatctaacctggtcggtcgaacaccgtctggacgaactggccaaacttgaacgtgacggcaacaccgccgagttggcgcgcattcgtgagggcgcacctaacgcgatcccgagcccgctgatgcgcaccctatgggggcttctgctaaccgggcgcgtgaaatcatggctgcgcgacttcgacctgtaccgctggagcgaccgattcaagcgcgatgggctcagcgccaccctgcgcctggagctgcgggagatgctgacacctcgcgtatcgttgcgcgagccgttccgctggcacaccgaggacggtgaaagccgcgagccgaagcgcatcaaggatctagtggaatgggagatcgtgctgtccacggaccacgtccattccagcctgcgcgatctgcccagggatgatcgctgggacgccgcattgccggagctgctgtccgatgtcagtgccttgttacgcgacgcactcgatctgatgcgcgaacttggcagtgtcgaggacaagagcgacctgtcctacatgcatcaaccctcgatcagtgaacacccacagaaccgggacttccacgactggaccgcattgatcgacctgactcgagatgcgtggctcgccactgttgcgcaatcaccggcgcgggcagcactggtggcacagtcctggtggcacacgccctatccgctgttccggcgcctcgccttctttgccgccgcggaggacaacgtgatctcccatcgccaagcactcgactggctgctggcggacgatcactggtggctgtggtcggtggaaaccgaacgggaagccatgcgcttgctggtggcgatggcgccacacctcgatgaggggatgctgcgggaactggagcaggccctactcgccgggcctccgcgcgacatgttcagggacgacatcgagccggagcgctggactcgtatcgcagatcgcgaaatctggctccgactggcaaagatcaccgaggccggcgcggtcttgggtgctaacggcaaccagcggctaacggcgctttcgacacgatatccagagtggaccctggcggcggatcagcgcgatgaatttccatactggattgggagtgactgggtcggagacagggatccatggcgggatttcgtatcaatacctcgcagcaggcgcggggtgctgaactacttgattgcaaacccggtactgtccgagtccaaacaagatgactggcgagagcggtgcaaggatagcttccaagccactgcatatgccttatgccacctagcaagacaaaatatctggccaaacgatcgctggcgggacgctttacaggcgtggtcagaagaggaactacaaagccgctcttggcagtacatggccccattcttggtcaatgcaccagatgtaatgctgcagaccctaagccacggcgtcagctggtggctgcaggctgttgctaagaccttcgagggccacgaagcactcttcttcgtgctcgctcgccgtatcctaactcaagatcatcaggacggcgtcgataccgacgaacccgtaatgcgcgccatcaaccaccccgtgggccacgtcaccgaagcattgctgcgctggtggtatcgacgctcgctggaggatgggcaaggcttgccggaagtactcaagcccacacttaccgaactttgcgacacccgtatcgacaagttccgacatggccgcgtattgctggcagcccatatcattgcgttgttccgcgtagacgaggattgggcaacgcaacacctgttgccacttttcgattggcagcgctccgaagccgaagcacgtgcggcgtgggagggtttcctatggtcaccgcgtctgtaccggcccctgatggaaatcctcaagacggccttcctcgagaccgcgcgccactatgaggcattgggcaagcacgacgagcaatacgcatcgttgctgacattcgccgccctcgatccgggtgacacgttcaccaccgctgagctgtcggccgcgacacgttcactacctctggacggtctgcacagctcagcgcaagctctggtgagagcgctagagggtgcgggcgatcaacgagccgactactggaccaaccgggttgtcccttacctccatgctatctggcccaaaacccgggacaacatttcacccgccattgccgaaagcctcggccgcctgtgcgtagcggcacaagacgcgttccccgaagccttggcgctgctccgcgcctggctgcaaccgctgccccatcccgactacctggtgcatcgtcttcatgacgccgctctttgcggcaagtacccggagcaggcgctggactttctgagcctggtgataggagatcagacccaatggccaccgagcaacctcggcgcctgccttgaggcgatacggacaaccgcgccggaacttgaggctgacccgcgttttgagcaactgatggcgtatttacgcagacatggaagaatgggatag

SEQ ID NO: 327485 - DNA, 465 bp, Pseudomonas aeruginosa
atgcttgtagggatcaaggtggatgattaccgccgtcacaaggcaagtctgctaggcctaccagagaacgcaagcgatatggacgtgcatacgcacatcatgaaaggcatccccgtcgctcagctggcaaagctgctcaggaacggtgacatcgatacccatgcgtgtgagcagatctcgccaggcctcgcactaaaggagcgcctggccgacaggatgaccactccaggtacctcactagatgatcgactatctgcgggtgagagcgaccgactctttcgcgtcgtgcataccgtcgtggtggccgagttcctgtttggttcacgtgacaaagcccagcgctggctctcgaagccgaaggaccgattctccggcaactcaccgctacaaatgctggcatctacggcaggagcccagcttgtcgaggaactgatgactcagttggcagagggcctcgttctatag

SEQ ID NO: 327486 - DNA, 420 bp, Pseudomonas aeruginosa
atgcgaaaccgagatcgcacctacagcgggtgtcctgttctgactctggcgacacagattaccccttatctggatgacggggccgttccaggcaacgtggaatatttggaggttccacctggcaaggtagtgcgtaagcgaggattttggctgagcccgggctatcgaatacaccacgcggcggtgctgttcctgataagcaccgatatgtacgcgatgaacgccgacgacttctacgagcgtcgagatcagatccactgctacctcagccataagaccggaacagcctatatcggaagggtcgagcaggccgacgaatctcagcagctactgcaccccctcctgcccgatttgcaccagcctctcgatatccagctcaatgagctggcatacgtaggacgcgtgatttctgctatctga

SEQ ID NO: 327487 - DNA, 252 bp, Pseudomonas aeruginosa
atggataaggacctgaatacggcaacggaaacatcggtgctcttgtctgatcagatgactcaggcggagattgatgtacgcctggccatagccggctacctgatcccccgacttgctggaactccggccgggcgcgaggctttcaatgcactggtcgccaagtttcaagatcgctatccgcaccacaagctgctaactcatctactgattgcacctgaatacttggagcacgcccctgacacccagttgtga

SEQ ID NO: 327488 - DNA, 270 bp, Pseudomonas aeruginosa
atgggcacagaagtaacaggaagcggagctggcggtctcttcgacgagatcaaacaggagatggcttcattcatcgacaagggtttcgccgttctcgaaactgagcaatccaaggtcaataaggcgttttttgatgcactgaccatgcagcagcgtgacgccttctgtcagtcgttagcgagtcaaggcgtcaaaccgagccggatggagcggatcactggcaaaagccagccaaccgttaaccgtcatctgaatggaaaacacagctaa

SEQ ID NO: 327489 - DNA, 690 bp, Pseudomonas aeruginosa
gtgagcgatctagaacaaatagcagctatagtcgcccagcgcgcgtacaagtcagcagccaaatcgacgcgccaggggtcgcctgaaagagcccggcgtgagagttgcaaagaactgagtgacgtgctcattcgtgccggtgagcttgatcgaaggagcatcgattgcggcaacgggtgctcgtactgctgttacatcagggttatcgcaacaccggtcgagatattcggcttgatcgaccatctacaagcctgcttgagcactgaagagttcaacaacttcaagaatcgagttgatgccgccgccgcagccattaagcccttaactgccaatgaacacttgcgtacaaatgttcaatgcccagcgcttcaggatgggcgttgcattgcttacgctgctcgaccaatgcgctgccgagcacatcactctgtcagtacggaattttgcaaggacgaatacgataaccctaacgctactatagggccgcagaccgcgctgccgttccgaaagatcttaggcatggcacacatggagggcttcgaaacggggcttagccatgtcggtttcgatggcgattgctacgagttgatcgccgccttgcatgaggctctgaacgagccgtctgctcgtgccgaatttctggcgaggcggaaggcattccgaagtgtttcaagagagcaaagatattaa

SEQ ID NO: 327490 - DNA, 3231 bp, Pseudomonas aeruginosa
atggcttctacacagttgctcgacaatatcgaaactgtgtttaacgtcgcggttgatcgcatgccccatggacatcctttgctcgggaatggctgtggtgcgcttcgccgtgatcagcgcacgatctacgtcagaaatgacgtatcacgagctgacgattcctatctgatcgcccacgagctcggccactggttcctcgacgcagacaagaaagagctcaccgtggctgagctttcggcaatttacgcatctcatggaagttcggcgacgatggttgtcgaatcgtatggaacgcatgagcggctagagctacaggcaaatgtgtttgccagggagcttttgttgccgagagacttggctcgagaattatggaatcaaggactaacgtcggaacaggtcgccgcccagttggtcgtgccgctagaggtcgtccggcagcaaatgattgatgcattgatgctgccagccctgccaccgcatcctggatcaccattgccaacactcgaccaagctcagcatgatgcggccaccgccactgagcgatttgtcaacgttgtcgcgggaccaggaaccggaaaaacaacgaccctcgttcatcgcatcaagcatctgattgaaagcggagttgagccgaataaaattctagctttgacgttcacaaataaagctgccaatgaattagttgagcgtcttaaggtgtcagctattcagggagcatcagacgtctgggctggaaccttccacgcattcgggctggagtacctccgtaaatttcaccacctgcatgacctccccccagaggtacaggttgcggacttgctgatgcaggtacgactcttggtacggcagctgccgaaggtcactttaaagtattacctccgcctccaagatccttacgactggatacccagcgttttggggtacatcaaacggctcaaggaagagttgatctcccctcaagagtaccgcaatcggctgagtcgccttgggccatgcgacgcagatgttgcagcccagcgccacgacgttgcagtcatgtatgaggcctaccaggccgcaatgactgagcagaagctcgtcgattataccgatcttatcgcccttccctcgcggcaagctaagtcaaacagggcgtctataggactgttcatcgatcattacgaccatgttctggtagacgagtaccaagacgtaactgaggtcatggtcgagctcctacggcatctcgcagtgagtgcagaatcggtatgggtcgtaggtgatgtaaggcaagcgatccaccattggcgtggcgcttcaatcatgagcctggtgaagtttgggccagcattttccgcccttgcagcgcagtcgaccgctaagagctactcgttgcaaatcaatcggcggagcagcccagaaatccttagcctgttcagcatcgcaggtaagtaccatgccttggagtcccgtcaaccgctcgaggcggtacgtccttcaaaaactccaacaggcaaggtgcctgcgttattcagctgcatttctccgcgcgctgaatccgctacgctaattcagaacatccagcgcctgcaccagtcaggtacagattatcgagatcaagcgattatcagccgccgctccgctgacattgaacgcatcgccgaggacctcgcgctagccaacgtgccgttcttgcacatcggagacctatcgcaaaggcccgaaatcaaaaaactggtgtgcttgatacagcttctatgcacccggcaacccagatcgctagttggccttatgcgcgacccacaattcgggtttgaggtagccgatattgaattgctcatccgggcaaccgccgcaggcactggtaccggatttcagcgaggcaaatggattttcaaaccccttagtggcttgagctcgggcggggcgggagcaaaagccaacttggcaacactcctcaaggggtgtaaccgccacatgaccccttggcagcttgtgtgcacgctggtgattgatcgccgcttcggggttcctccgctgattgatcattccattgcggcccataccattcggctatccctctggctatttgctcaaagcattcgaaacgctgatggtgatggcctgcagccaaagctatcggagtttctgttgcgcgaggacttgcggcgccgtatcggggagaaactagcagaccgagggctgccgcccgaagcacgagcactcgatgccatttcgctcctgacggtacatgctagtaaaggactggagttttcggcagttcacgtaactgatgtcgataactctgcgtatggggctgatcgtccgttcaactatgactatcggccattaatgatcgtcccgccagagatctttaacagcagtgcagccgaacaccaattcgaggagtctgtggagcgaaacaacctgctgtatgtcgctctatcccgggcgaaggatagtcttctcctttacgaagtagataccacaaaaaggccaatgcctattcaggctgccggtactgcattgcagtatttcgacggaattcggattcgtcaggtatcgacatccgctccggccgtagccgctgcgcctcctgtatcagcggtaaactttggggcatttgaaacctatttagcatgcccacttcaataccattatcgatatgagctttctctaacggccgagcaggagattgatatctccgtacgcgccagatgggccgtgatggacatgcttcgagcgcatcgcgttgataacgcccctccgcaacagtccttggacgacgcttggaaaaaacatcaattaccttccaaggcagatgatccagggttgcgtcgcgacgctgtggaggctgccaaacgagggctgaagctctttaatgagctgaatggcaccgtggtggatggtctcgtgtcggaaattgcggggctgcagatcacgctgccttggcttatctacgtaaaggatatcaacggtcatcacctccactggcttcgagctcaagggcttggacacacactcagccagttcaggccattgatgatttccatcggtgggcaacgagtggccaacggtacggtgcattccctgaccaccgatactcgggagtctgccggatgttcaaaaaggcccgagagcaccgctgtatacaaagcggctgtcagctttgtatcaggagaacgagaaccaaagaaaggatgggcctgtagtcgatgcgcatacctcagcatctgcaataaccggccgtag

SEQ ID NO: 327491 - DNA, 1065 bp, Pseudomonas aeruginosa
atgaaaaatcccaacgttaatgccgccgattgtctcaagagctgggccgattttctaggcaacctggctgcgaatgtgagcacccgaaaaacccgtgcaggccttcaatgtcgggtttctctaccgtcgggacagaacgttgttgctgtcggagaggactccacctgcgctgttcgaaacctgctggttgagctgaccaagcagatgccggcactgccaggatgcgagcatggaacagccccggcctcatttgaagtccaggcagcgtctggaaagattcagttgatagctaagggtatggatgagggtaagcgtatggactctttgactaaagcacgccgagaaaccataggcgtgactacgaagaaaacattgcataacgctatcgctcagcttgcggctgcccgcgagatggacaaggcagccctagcaaggacgcttttgacagatggctgggagcgatttcggacagaacgtctaacatccgacccagatgagctgcttgaccaatatgagaaggtagcgagcagctcaggtggcacggattctgagcaatggatggttcgtgttgatcgaaaactagcgatcaaaatccactcggctgcgaaggagtatgggcgctcagcgtctgcgattgctcgcggccttctggctgaggcctttcgttacgagtcggttgctgcgtctcaggtagctgaagggtcggataaaacagctgtgagcaaagcaattgaacagattgctcttcaccggggccctgcggccaagcaattggctcgccaggtagggcttggtgatcaacgggttcttatgaacgaaatcctttccggtgctgtaaccccaccgattcgtgttttgaataatgttgcctccgcgctggacctgccccccgaagtcttgaaggttgcgttgaatgattgcttccaacttcagacggtttcgggattcaaggctcaagatggtaagcccgaggtgcgaattcagccgcagacctggcgagaggcggtggtcgcgcttggacttcctcgggaggaagagcagcgcctgctgagccttgatcagtga

SEQ ID NO: 327492 - DNA, 1032 bp, Pseudomonas aeruginosa
atgattgttgctcatttttgcgcagcggttcgtgcggctgttggggagtggatggcttctcattcagaagccgatgtccaagcaatgcttggagatccagtgaccttgggggctcaaatcgtccccttgattgaggcaaagctggcgttgggcgggggtacgaccttggccagcgtaatcgagtacgcctggtctgctcctaatgtccacctacaggccatttttgacgctggcgacctcccagacactcctgaagccttcacttcggtgccgtcatgcccgggcaccacgcttgcgatggtcactgccgtggctgcatttgccgctttgggctctgcaactgtgtcttatggatctgagaacgacgggcatctctttgtgaatctcgtcgtgattcccggcaagggcgacatacccaaaaaatccaccaagtctatgtccggccataccgacggtgtttccttcccgattcgcgggctgaacgatccaggggatttgaggatcgccccatctccggattttgtggggctgtgctgcatgcgcaatccaaatggcgtccccactaatgtcatgcccctaaaggctgtgcttgatgcgatgcctgggcatctggtcgaagagttgcgcaaaccgcagtactggatcacctcgcaacgcactttcgaagaaggtatgcgaaagatccttggcgacgaattggttttagacgaggccgaattactatttcgcgttgagaatgcagattggattcgctacagccacagcagcactgggccggtcgatgcgggttctctatccgaggaggcaatagatgcgttccaagcagcatgtgttgagtgtgtccaaggcattgctctgttgccgggtgacatcgtgttggtcaacaacaggattgcactacacggcaggtctgaggtaggcagcgagtttggagggcagaccagatggctgctgcggacatatgggttggatacctcgaacctagccgcagaacaacgctatccggatagtccgtttaagctgttcccctga

SEQ ID NO: 327493 - DNA, 768 bp, Pseudomonas aeruginosa
atgagcataaaaatctcaagcttggtgtgggaacactacccggccggcggctgcgagctgctcacagctttggcctatgccgaccatgcacacgatgacggtaccaacatccggccgagcgtggcgtatatcgcccgaaaaacccgccaaagtgaacgtagcgtccagcgccaccttgcccaaatgaggaagagcggctggctgctgacagtcagatacgccaacggcggtcgcagctttgccacggagtatcgggtaaaccccctgtggataactaaccctgacaatttgtcacccttagccacagaggtgaatgaatccctgacaaatcaggtactgaaggatgacagcagaggtatacaaagggtgacacgcatgtcaccccaaccaccaagaaccataaaggaaccccaaacgggccaagggaatgatgcgccggcgacctccgaagcattttcggcatcgaaacaagcagcagttcataagctgctgcagcaatgccccatcgcattgcgacaactcgtgattaacgaagtttccacccgaattgcagctgaccaggtccgcaaccccatcggattgcttcggaaacttgttgagctggctcagcaaggcaacttcgtgcctagcgtcaagtcactacagcgccccacaggcagatcgcaacgaaagccagaccaggatcgagagcgcgacaagcgctacggcaatcagtctatccaggcggtaatggagatgctcgggatgcccatcaaagtcaaaaattga

SEQ ID NO: 327494 - DNA, 228 bp, Pseudomonas aeruginosa
atgcccacaacccaagaaatgctgaccgagcgctgcggaattctgatgacctacgagcagctcggcaaaatcatgcatcgcagccctgaagcactgcgaatcacgctctccgacaacagaactgattgggcaaaaagcatcaacgccgccaagctcaagtgggggcgcagagtgctattccgtacggcggatattgcgagattgatcgaccaaggcctcaacgattaa

SEQ ID NO: 327495 - DNA, 282 bp, Pseudomonas aeruginosa
atggatcaatcgctccccctctggaagctcggcgtgagcctcaacctccactatcagcgcgctgacatgctttttaagcgcgagtctgaaatgcacggggcgcagtgtttctttagcagcctgctccgaaagctcaacgacaagcggaacccacgccttcacacgccaccatccgtgcaccttacaaagatggaaaacgagggaattcacctgcgacatccagttaggttcatgtcgaatggccctcagtgcgaaatcaagataattgcgaaatatcaatga

SEQ ID NO: 327496 - DNA, 1458 bp, Pseudomonas aeruginosa
atgagccacgatacgctgcgggtaaggctgctcgcattcctcttcctgattcccctggcgctctacgcctggtccgccgtgcaggccttccgggtcgactcgaccctgcgcgacgaacagttcatgcgcgactggagcgcctcggtgcgcaacgacccggacgccgccggcgccattccccgtcacctgttccgtccggcctatggcgtcgaaggtcatcttcaccagttcgccgaagacgccgaggccatccgccgcgaccatccttggctggctctgcgcggctggctggccgctatcggcaagctctgcgcgctggcgtcggcgctggtcgcggccgccttgctggcgagactggaatacgacgggcgccgctcgatgcgctcgcaagcctacctgctcggccacctcgcgccggcctggcggcgcctcggtcgactagtcccgctgcacgccggcctgctggtcgccgccctggccagccagttgctctacgaagcgctgtggagctacagccactggcacagccacggcttcgtcgccctgctcttctcactgccgctgtggctgctgttcctcggcggcctgctcatgctgcggcgcctgcgcggcgaactgctgccgctggaggaaccggtgctccacctgctcggccgcgaactcgaccgcgtcgccgcgcccggcctctggcaatggctgggacagatcgccgaccgcgccggagcgccgctaccggaccatgtcgtcaccggcatcgagcactgctacttcgtcacccaggccaaggtcctgctggcaccccgcggcattccgctggaggggcgtaccctgtacatcccgctgacctatgcctcggtcatgagcgaggccgaaagcgccgcgatcatcggccacgaactgggccacttcgccgccggcgacaccgcccacggtgcatccctgtcgctcctgcagcggcaggtgcgcctgcgcatcgaacgcatcgccgcccccgaggatgggcatgtcggcctgctcggcaagccgggcctgtgggccgcgctgtacttcctcgatcgcttcgagcgcgcctacctgcactggaatcgccgccaggaactggccgccgacaaggtcggggcgcgggtagccggcgcgcgggtcttcgccatcgcgctgctacgcacctgcgcccttgcaggactgatcgaacgcctgctggccagcccgcagacgcgcaacctggtgcatgcgctgaccgactatctgcgcgggaactccctggaactggacgaacacgacagcgctcgccgcctggaacaccccttcgacagtcacccgccgaccttccagcggatcgcggacctttccctggcgctcgacgacgatctgctgcgacaggcaaggcgcatcgtcagcgccgacgacacgcagtggctcaaccgcctgctcgatgcaggccacggggaaagccggtga

SEQ ID NO: 327497 - DNA, 945 bp, Pseudomonas aeruginosa
atggaaagctggaatccctaccacgacacggagctctatttcgacgctccttcacccctgagccagtcgcagatcctcgacgcgcgcgaaatgctcggcagcgccaccggtcactaccaggcgcggacggtgcgcccgtcgatgcagtatttcgattgcgacctgagcttcaccgagccgctgcgaacccacaaggtgctgccggaaggcctgtgcatcgtgcagatgttcgacggccagtggcggcacagcgtcgacggcggcgagccttatctctacaacctgggcggtccttcggtgctcggcaccggcgagccgatggaggccttcgatatcctgccggcgggcagccgcgtgcgcctgggcgggctgcggatcgccgccagctatctggaagaggaactggaaaccggcgatggcgccctgcggccgctggcgcggctgaagggcgacggcgcgagctttacccagttgtcccgttgcggcgccatcaccgccctgttcgagcgcctctaccagaatccataccgcggcgccctcggacgcctgcacgaagagagcctgaccctgggcctgctggtggagctggccgcctacctgggcggcgcggaccttcgtcgcgcgcgcaccccacgcgcccagcgcgacctggcccatgaagcgcgccgcctgctggaggcgaacctcggtgagccgccggccagcctcgaactggcgcgccaactgggggtcggcgaaaccaccctgcggcggattttcaagaacgagttcggtcgctcgatgttgcagtacgtccgcgaccggcgtctcgagatcggccggcagatggtccgcgagggtcgctggcagatcgcgcagatagcctatcgcctgggttactccagtccggaaaacttcacccatgcctaccgcgcgcgcttcggccatccgccggggcgcgagtga

SEQ ID NO: 327498 - DNA, 1254 bp, Pseudomonas aeruginosa
atgaagctgattcagtgtcgtttctcgtccggtcagcgcgtgccactgcttgtacaagatggtctagtagcgccattgcccaagctagtcccgttcatctacgtccagctcaagctcaggcaccgcgcatacaacactgccgcagcgcacctgcgtgcgatccaagctttctacacctatgccaaaagccgggagctggatatcgatgaggtcatcttggcctgtcactttgaagcgattctggctctactggacggttacgccctttggctccaaagcggccgtcaggccgataatctggtcgcccgaataggcacagctgcaatggcatcttttccacagattgatccgcgcacccgtgaccagcacctgcggctgttgaagcagtacctgtcctggtgcgtcacccgatacatcccgcgcgctcgtcagaactcaaccactctggctaacatcgaggtggcattcgcagatgtcgccgacgtcattgaacgacgttttgagagccatatcatcaatgttcgtcccgaccacattcgttaccgcagcctgacagatacccaactccagatcatccgcacactgattcgcccaggcgctgcggagaatccgtttccggaacgattgcagttgcgcaattggctaatgattgaattgtttctggaaaccggtatccgccgcggagagcttctgaagctctacaccacggatatcaaccaaggttctcagcatgcctatgtcagcatcaatgaccgcgaacatgacccagacgacccgcgtactgaagagcctgcgctgaaaacacacggacgaaccgtaggtatctccgcgcagttgtatgaggtctacgagcactatatccagagcgaacagcgccctctgcgtaacggcaaaccgatgaaattgctgtaccgctatctgttcatctctgacagaggccgcccgctgtcgattcgcgcattgtcgaatgtccttgaccggctgtttctgaccattgaactggctcatcccgggttgttgcctagtctttctgcgcatgactttcgccacaccttcgccgaccgtttcttagcttacctgatcgagcaacgtgggcacgatctggagcgcgccacggacgaactccgacgagtctgcggttggtctgacacttcggcgatgccgcgccgttatgcgagtcgttatctcgccgagtcggccaaccgccataacgcgcagcgtgcctcggcagcctggagccgacttgaaagttaa

SEQ ID NO: 327499 - DNA, 1896 bp, Pseudomonas aeruginosa
atggcgaaagttctgttgtgcatcggttgtgacgattacgaggcccttaataagctgtctggggccgagcgtgacgcgcttactatccatacggtgctttccacagggccattgagcagtatccagccagcggacgcctatctgcttagatctccggcccggcatcagctggacgcaacgctgcttgatattcaagacaggtacgatgagattgagagtttcacgctcttctttgcaggccatggcggagaagccaatgacagttatttcctgtgcctgagcgatacccgaggtgatcgcctttccacaacggggtttgccctaagtcgtctgttcgagtacttcaacgagctcaaagctgctcactgtaacgtcatcatagatgcctgcaacgcaggcggtatggtttccaacctaggcatcctgctgaagcccgaagtgatcggtaaagccaagacattcggcgtttcattttttgtgtcgtccgcggcagatcagtacgctggcgagaccagtcgtggtgggtatggaaccctcgcgttactcaaagtgctgagtggagagatcgacacgggttcccgggccaggatgctcgatctgttggatataggccgacccgctgcgcagtatgtggcagaacagacccagggagggcaaatgccatccgtatggggcgtcaatctctacggtcacatgccgctgtttggcaatccgcatgctaccgagaatccaacatcctctttgctggggatcactgggatcatacccacatccccagctggacaagccatcagcagtcattccgccgagctctacacgctcgtgttcgccccggaacacgagctcaccccggataaactttttcctgtcctcaccaaattcgttgatcgcttggccgacatacccaactcagcaggcgccttcattggtgggatatggcaatcattggagaagagcgcagggcgtcacgccaacagcttctcgcgagtagagctgagcgcgacatgtgtggctctgcttcttcagtcgtcccataaggacagcaccgcgcgcaactgcattgtgggacttgcccacgagattgtaggggatgttgagcagctgctttgcgatatcgtccatgcacttcgagagaatcccacctcgttatgccgtcatggtattcccgacctgttctaccttccgcagcgcatatcgcgggttttgggctgggcgggcgctgcggtgcatctggctcgtgaactcggcatctgtgatgctccactcaaagaagcactggagcacctgagcgctcttctgctggagcactacgccagcacgtgtgctggtatgagcgaagacgaagctccgtactgggccgcgttccttacagccatcaaaaccgatgacctgaatggtcttggcgagctagtcattagcacgctgatcaacgctctcgttgagcatcagggccggcttgctaggcccttgctgccggcagcggatgtgtatgcgtatctcaaggcacgcgcagacaaggactcagctgctttggagcccttgagcaactcgccctctgaaacactggcgcttgtcctgctcatcagtggacgacactcgctggaggaggaattggactacaacctggcgagtctcgatcacgcgtacctcaacatctttatcccgcaaagctacctggagttcagtcagccattcgttcctaatggcataaaccatgtgttccagatcggccacaaggtttggacggtggcagatgttgctcagcgctggactgatgtgtgcaagccgcagatggataatgacctgtcgcttcgagaccctgcaacgcggattggcgccatttgcgcatcattgcttttcccgaatcgagtgccctggtttctactcaacgattga

SEQ ID NO: 327500 - DNA, 621 bp, Pseudomonas aeruginosa
atgaaagataaggcccatcctttcccgtttgacgcccaggcggaactcgtcatgaaaacgttcatgaaagctacaggggaaaggctcgatcaagcgcgcagacaagtgggtggcggcgatgaagtccagcacttcagtcacggaggatcgtggcagtcacatcacagctatgccccgggccgggtcgaccagatgaagacgattaagcacgaaacaaggttgcgcctcgaggacattatggagggtcggctcgacgtcattgagcgcacagtcgatgagatatccaacagcatggcggacagctatgccaaagcgttttaccagatgatctccgatacgtgtgaggagagcggtaacatcattgatggctccacagggagcttgggcgagcagatgctcaaggctatcgagcaagtcgaatactcggtggatcgggatggccaggtatcgcttccagaattttgcatgcaccccagcctcgccaaacgcctacattctgatccttcgctccaagaaccagcactgctggcgagggccgaggagattaagaaactcaaaatcgctcaggcgttggcagaggaagccgcacggaagtccaaatttcggagcagggagcagtaa

SEQ ID NO: 327501 - DNA, 1386 bp, Pseudomonas aeruginosa
atggaagagcttaagtggtatgtatttccgaggaattcgctacctgaggctctactttcagtgggggcacctgagctcttgggaggggcggcagtgggggatccggcattagtatcgagtgatttagtgctggggtatcatattgacgatcttaaaaggaggtactatgcgccttcggtgttgattctgccagagcaaaagccagcagaaattttggcctggctaaaaatctacgcaccggaaacatctccccttagtcagtttgggcgagtccttagccttggcgattataggcttatacaaaaacatcccactaaagcccacaagtacactaagcagccgagcaggtggtcctcgattatccttggggaaatacttgctcaaggggacatggagtcgtctattgaggcgctacctctttctcgtgctcaggcaaccttttcgagtgcaatggctaatgctgtaatgcattacaatgacgaggacttgattgagaactgcatagttcgcctggagcaactcgaaaaagatggaaaatttgtagcgcgcgccctggctataagggatttaaagctagtatggcaaatctctaatgaagcactaggcgctgactacggcatttcttctatctttaagctgttcgcctcttcaaatgcacaggggaatgacttattctcaaataactcttccctctcaagtctaaacgattatccagatttattaagtgactcagtggagtccagggttctggcatataggaaattttccgatgccgtacttaatcttggcactgagtatcggacaaaatatgtagcagcaaatatagctgcagcagcatttttggtagggcgcagcacatcgcatgcatttcttctgaagagcatttctcgagagtttcctgctgtctacacttggtttggactgatcgccggccttgcaggcccaaaatactgggaggtagattgggctcgcgcaactagaggaatcgaaaagaatctcagggctaaactatctttcagtgaaccgtcgcattttgatatatcctgggacgaatataagtggctgacaaaaacctttaccaacaatcctcttttggagttgcctaagcagctgcctaaggtgctgtctattgaaatatttcccggctcaatatgccagctccggttaaaaatagagtccagcgagcagcatgctgagtcaaagtctggccttgggatcgatccgcaagaactaaatgatttgcgaagcgctcttactggctttatagatctcgctgagaaggccaagaaacaactctccggccggacaccaaataaaacaagcacccgcccaaattcagaatctaaaaatctaaagacatccaagagaaccaggcgagtagaatag

SEQ ID NO: 327502 - DNA, 1161 bp, Pseudomonas aeruginosa
ttgaataccagctggtggcggaatcaaaagcagatggatcaagctcagcgtgacttcatcggcctgccgatcgagggacgttactttatatctggcccgcctgggtcgggcaaaacaaatttgctcctactgcgcgctgaagtcacgattggcagtggagagcgagatattttgtttattacatacacgcgctctttggctgattttattcgaagtggagccgtagcaagagggcttatcgagagccatcaaattaagacttttcactcctgggcatacgagcacgtccttcagcattcaggtgagcgcttcataaccaaagaaggcgattttgataatgaggttcgtgagcaggccctcaggcagattcaagaggcaaatagccgcagaccatccaaacacctctatagcgctatatttgtagatgaagcacaggacttgagcgttggagaattacaatctctattgcagctctctgaaaatgtgtgcatctgtggcgatggacgtcaaggaatatatgagcgtgatggcattcaaatccacgaattagagagcttggaaacatatcatttggataagcattttaggattgggcaggcaatagctaaagtagccgatagactaatgccccctgcggcagacacgcccagtttagaagacacatgcaactatgatcctgccactcagggcaaatccactgcagagctccatccatgtgacagtcgggatgctcaattcgagcttatgattgaaaaaattcgtctccagctggatgcgtttaacggtgactctattggtgttttttgtcctagacaagaagataggaacgagttaagagatcggtttgatgccactgatttagcagataaagtctttgtgcatggagtggacgaacaagcgacgtttgcatccacaaagcctgttcacgtactgacgctgcacggctgtaaaggtaccgaatttaggtgcgtgcatatatttggcactgaaagcttgacacgtttcccgctgaatagaaccaagctcagttacaccggcgtcactagggctaaaacagcattaaatgtatatcgaacaggcccaacgacaacaaagctagaaaatgctttttccaagaaaaagttatttggcttgggtaaccttctaccggaagaagaatga

SEQ ID NO: 327503 - DNA, 1413 bp, Pseudomonas aeruginosa
atgcctgatctgtcgcaagaaatagttgaggacctggccggtcgcttgcgaagtcatctttcaaaaaaagatggttatggagaaatagagttcttaaatgccggcggctccgcagcagtttataaagtcgagactccttgcggagtaagagcatacaaagtttttgatcctaaattcgtaaacgatgatgataattcaaaggagaaacaaaggctagagcttcagaagcgcctaatcaatcatgactgtgagcagttagttcaaacctactccatcgaaatggcggagggaactgcatttgtcgaaatggagtttgttgcctggcctcaactcaagaaaatacttaaggatgttcctgacgagtcagtgatcccccttatcaagcagctcactcaagcagtccgcttccttgaagatctaaatattgtacatcgagacataaagcctgaaaatatacatgtatcgcctgattgggcttgtttgaagctattggatcttggtgttgttagggagtttgatccggggcctgacgcagcggagacagatcaaggtagccttcgcccattcttggcgacagctcaatatagctcgcccgaatatttgtttcgcttagatgaaccatctgctgcgctatggcatgccttaaatttttatcaggtcggagctgttctgcacgatctagtaatgaaagaatcaatatttcagccagaaatagaggcaggcaatagatggctggtcgcaaaagccgtactaacccaaatgccatcgtttacagatggtaatcctgcacgacttgcccatctcaaagcgctcgcacgcaagtgcttaacgaaggacatttccacgcggctaaatattgttgattggagcgctttcgatctgctcgactcaaacgaaacccttctgaccctaaggcggcgattggagtctcgccgggcgctaggcgatgacgaagccacgaggcggcttagatttgaccgggagcagtttcgagatgcattgatagcaaaagttcgagagcaacttatatcagcctgtcaaacagatctgcctatcagattttattctgccgcccccggagaaaacgagagttcagattttttattaacccctgtaatcggtgcggttattggtattaggcttatgatggattggcagacagggatatatttaaaaacggccaacatcaagatgtcggctggaatatttgcaggtgatgagcatgtggattttgacgcacttcaccagtcgattgcttgttgcgtatcgatagataacaactctgatgagtgtgcggctgagctgtgcgtagagattgcaggcctaataggctgcgctctagatatagtagatagtgtggctcacgaccaagggcaattgttgtcgctcaataaaaaagatcttttgatatag

SEQ ID NO: 327504 - DNA, 657 bp, Pseudomonas aeruginosa
ttgtactggttagggccatttcagtactcatctaaacaagagctgcttgatagactcaaggtcttcgtggccaccgcaccggttggcagggtttctcacaaaattgccatccaaaaactccatctgctcattgctctacaccctgatgcagagcggaagattggctcaggtgtcgaccacttcaaaattgagcggaatgcactaggtgcaggccaggggctttggctcgttcgtagtgatggtacagagacctcattttcctataaacgctgcatcaccggggtgcgacagtcatcctatgggaaggtttgcgaggccctcagattctcggttcgctcacagttgatagcgtttagagagacacagcaggtgcccgccaaatgtgcgatcagcggtaaggacatcgtgtgccgtcgtgatctgcatatagatcataaggttccgttctggaagctgctgcagtccttcgcagaggctcagcaagttgacctatccctgcttgatacggtgggaagcggggagacattagctctggttgatcaagagatcagcaaggcctttgaagcattccacctggcccacgctgaactccaaccttccagcaaaaccgcgaatgctctgaaaggtggaagactctcgtttcctagccgcggctga

SEQ ID NO: 327505 - DNA, 1137 bp, Pseudomonas aeruginosa
atgcgtatcgacggtcatcgtcaggtggtttctaacgcaacggcacagcccggaccgctactgcgccctgcggatatgcaggcacgggctctacaggacctgttcgatgcgcagggggtgggggttcccgtcgaacatgccttgcgcatgcaggcggtggccaggcagacgaataccgtctttggcattcgcccggttgaaagaatcgtcaccacgctgatcgaagagggtttcccgaccaagggcttctcagtgaaggggaaaagctcgaactggggtccgcaggcggggttcatctgtgtcgaccagcatctcagcaagcgggaaaaccgcgacacggcggaaatacgcaagctgaacctggctgtggcgaagggaatggatggcggagcctatacccagaccgacctgcgcatctctcggcaacgcctcgcggagctggtgcggaatttcggcctggtggcagacggtgtcgggccggttcgcctcctgaccgcgcagggccccagcggcaaacgctatgagttcgaggcccgccaggagccggacggtctctacaggatcagccgcctggggcggtcggaagcggtgcaggtactggccagcccggcttgcgggctggcgatgaccgccgattatgacctcttcctggtagcgccctcgatcgaggcgcatggcagtggtggtctcgatgcaagaaggaataccgcggtcagatacacccccctcggtgcaaaggatcccctgagcgaggacggattctatggcagggaggatatggccaggggaaacatcactccgcgcacgcggcaactggtggacgccctcaatgactgcctgggccggggggagcacagggagatgtttcaccacagcgacgatgcgggcaacccaggctcccatatgggtgacaacttcccggccaccttctaccttccccgggccatggagcatcggctcggagaagagtccgttcgcttcgacgaggtctgcgtggtggcggatcggaagagcttttcattgctggtcgagtgcatcaagggcaacggctatcacttcaccgcccatcccgactggaacgtgccgctgcggcccagcttccaggaggcgctcgactttttccaacgtaaggtctga

SEQ ID NO: 327506 - DNA, 345 bp, Pseudomonas aeruginosa; identical to SEQ ID NO: 318923

SEQ ID NO: 327507 - DNA, 555 bp, Pseudomonas aeruginosa; identical to SEQ ID NO: 318922

SEQ ID NO: 327508 - DNA, 1077 bp, Pseudomonas aeruginosa
gtggtcgagttcgccggctacgaatggtccaagggccgtatcggtcgcgactccggctatcagtaccgcctgcaaaacgcagaactggggctgatcctgctgatcaagaatcacaacatcaaggtcgacacccttggctcgcacctcaagatcgaggtgtcgccccatgccctcgacggtgccgacccgcatatcctccagggcgtgctggatgacttggccgctgccgtgctgagccactgcgaaaccaaccaagccgctgtgcatatcgccctggacgtacaaggctggaaaccgcctcgcgatctggtggaccgcatgcattgccgctcccgtcgggtgcggcaaatcagcgggatcgagcggatcgaattcgatggcaacgcctcggtctacgggcgtggcgagacgtacatgtttggctcggccaacggcctgcaactgtcgatctataacaagaccctccaggctcgggccaccgacaagctcgactattgggaaagcgtgtgggcaaccctgaacggggatccgttcggcgatggcgacccggcctataaccccctggaaacggtctggcggctcgaattccgtttccatcactccatcgtccagcagttctccgaaggctcgcgtatggcctcgggggaggtcattggctgccgcacctatgagggcctctgcccgcatctgcaaggactgtggaactacgcctgcgaaagcttcaagctgctgagccggacggcggtctacgatccgttctggagcctgatcagccaggacgcccgcgtccaggtcgagtgcgatccgctgatcgagcgtaccgagtaccggcgctattacaagaccgccaagggcttcagtgggcgtaactgcgagatgttcctcggccagttcatcagcctgattgcgcgggagcgtatccctgcaaaaaaggcaattgagtccgcccgcaaattggagttctggcacgtcatcgaagaccactacctggccaagggttggactcgtcgcgatctggaaaggcatatgcacaagctgatgtgtgatcggtatctacggcggggatacgcgatctga

SEQ ID NO: 327509 - DNA, 951 bp, Pseudomonas aeruginosa
atgggtcggctcggcgaacaggcagtgcaccgcgtcgccgaacgccagcttgaggccgaaggccaccccgccgggaccgccgccgaccccgcagggcagatggacgaacagcgggtgctcgctgtcgacgcggatgccggcggcgtccaactggccgcgcagtcgctcggcggcgacggcgtagccgaggaacaggtcgcgggagttttcgtcgtcgacgaaatgggtgtagggatcgccggccgcttcgcggcggccctgttccaccgcgacactgtagtcggaggcgtactccaccaccgtcacgccgtgggcgcgcagcttgtccttcttccactggcgggcgtcggcggacatgtgcacgctggcctggaagcccagcgcggcgccgatgatgccgatggaaaggcccaggttgccggtggagcccaccgctatccggtggcgggcgaagaatgcccggcaatccgcctcggccagccgcgagtagtcgtcgtcgaggccgaccaggccgtgctccagggccaggcgctcggcatgggcgagcacttcatagatgccgccgcgggccttgatcgagccggagatcggcaggtggctatcgcgtttcagccagagccggccgggcagttcggcggcgtaatgctggcgcagggcatcgtggaaggtggcgacctcgaccaggtcggactcgatgatgccgccgctggcggcggtttccggaaacagccgggcgatcagcggggcgaagcgctgcaggcgggcgctggcgtcggccacgtcggcggcgccgaggccgacgtcggccagggcttcggcgctcggcgcgatggccgggttgaaccactcgctcggacgcagggcgatgaggtcggccaggcgcgggaattcggcgagccagtcggccttgggtgttccgagaatcaacggcagtactcctgtggcgggtag

SEQ ID NO: 327510 - DNA, 1152 bp, Pseudomonas aeruginosa
atgactctttatatggggccgaataccggcctactgatcaacggcgcccccggtgaggggcattacagcgatctgattcggatgtggcgctgggacgacttcctccgccagccggtcgtaaaggggcgcgtcgccacgttgcccaccagcgaccgggtcgagggcgacgtctatatcgtcaccggctcgggtgccagccagaaccgccttgccagatggtgggtggtaggcgccacggctggcacctgggagtacctcactccgaaactgggctggcgggtgcaggttgcgaacgagacaaccccggcaggccaggtcaagacgtatgagttcggggacagcggttggactgagttggtgggcggtatgtcggacgcgcccagcgacggcagcaactacgcacgcaacaacggggcgtgggggaagcttggaaccgctgccgtggcagacctcaacggcatgccgtttctcaatctgatgcccgacagcggacgattcgccggcatcatcaatccgctgattctgcgcttcaccgggtcgttttccagcacgttcctctcgccgtggaacggggcgacgattacggacggcgggaagtatatttacgacaacaccactaacggcgggacggcgggcaacatcaaccagcgcgtccaagatttgttagtggcgatgggacggccgagcggtagccttgcccgctacggggtggagttctataccgccctggtgacagcagggccgaacgcgacaacgggttcctctgggctcgacgggactacccgctatcttcaaatgaccaacgtatcgcgagcgctattcatcgccgatggatggagtacggcggttctgtgggtgcgcgctgaaaccggatcgctccatttcatgccggcgggggttccgacgacagattaccggatatggctaaacggcgagcccgtattaccggggcaggtactaacccccgctgatgggtggaagcatgtccgcctttcgaagcgatccgcgcaagggtacgacaacggttttccgtacttctacatgactctaggcggggttgcggctatggcgtgtcccgctttcttcggggggctagttgaccccggaatccacttcgcgcccattgcaaccgtcaactcacagagtgcatga

SEQ ID NO: 327511 - DNA, 2211 bp, Pseudomonas aeruginosa
atgggcggccgtagcaaagcgcaaactgtcggctttcgctacctcatgggcattctcatgggttttgccagggggccgctggatgagctggtcgagatcaaggcaggtgatcgcactgcatggaaaggatcggtcaagagcaaccagaccatccagatcaatgccggcgaattgttcgggggagacaaggccgagggcggcatcgttgggccgctggacgtcatgttcggcgccccggaccaagccgtgaatcctcgactagcggcgatggtgggcggcctggtacctgcgttccgcggggtcaccactgctttcttcgacgggcagctctgcgcgatgaacaagtacccgaaagcctggatgagccggtggcgacgtgcgctcaacggatgggacggtggaacctggtatcccgagaaagcagtgatcagcctggccggcgaccaggtgaaggcgatgaaccccgcccatatcttgttcgagtgccagacaaaccgcgactggggccgcggtaaggatcgcggcctgctggaccaggcgtcgtatcgcacggccgcagatacgttgttcgccgagggctttggtctgtgcctcaagtttcgcgttgcagacgagttagacaacttcgagcagaccgtcctcgatcacattggcgccactcagttcctttctcgatcgaccggactctggacgctgcggctgatccgtgacgactacgacgtcgcgacgctgcccgtattcgatgaggacagcgggctgctcgggatcgacgacgacagcatcacatcgctcgacggcactgcgaaccagttcgtcgtcgtctggcatgaccccatcacaaacaccgaccggcgtgcccgtgcgaagaatgccggcgcgatccgcgcggccggcggcgtgataacgacgacgaaggagtatccgggcctaccgaccggcgagttggccggcagggtggcggcgcgcgactgcaacgtgtcgacgtcggctatccgcaagctccaggtgcggctcgatcggcgcgcatatgcgctgaaccctggcgacgtgttctgcgttcgcagccggaagcgcgggatcgaactgatcgtcctgagggccggcaagatcgactatggcaccctcacgaagggcaccatcgtcatcaccgcgctggaagacgtgttcggactgccggcagccgggacgtccgcagtacagccgccgaactggaccccgcccgaccgcaccccgcgggtcattgcgacccgccggctcatcgaggcgccgtaccgcgacctcgcggcggcactgagcgatgcggatctcgcccaactgcagcccgagacgggtgtcctcgccgtgatgggcatgcggccgtccggcctgcagatgaactacgcgctgctcagccgcgtggggtctgcaccattcgaggagcggacgtccggcgacttctgcccggtcgcgacgatctcagcagatatcggccggggcctgaccagcgtcagcgtcacgcttgtccaaggggttgaccttgacctcgtcgaggtgggctcggccgcgatgatcgatgacgagatcttccgcgtcgacgcgatcaacgccgcggccggcaccgcggtgctcgcgcggggatgcgtcgatacggtgccagcgccgcatgaggccggcgcgctgatctggttctatgaaaactgggcggccgaggacacgcgtgagtacgtgaccggcgagacagtgaacgtgaagctgctgagccgtaccagctctgcgacgctcgcagagaaccttgcgccggtcgactcgctgcgaatgaaccagcgccaggcgcgaccctatgcgcctggccgcgtgcttgtgtgcggccaggcgtatccgactaagacctatggtgtgctgaccgtgtcttgggcgcatcgcaaccggctgctgcaggccgaccaactggttgactcgtctgcgagcagcatttcgctggaagttggaacgacctacacgctgagcatctatagcggtaccagcctgaagaagtcgtacaccggcctgaccggcacgacctggacctacccgatcgaggacgacatagcgcacgggctgttgccggtgctgcgcatcgtgctgttcagcgttcgcgacagcctgcagagctggcagcaacacgatatcaccatcgaacgacacggcctgggcttccgcctcggcgaggaacttggaggcgtagcacaatga

SEQ ID NO: 327512 - DNA, 960 bp, Pseudomonas aeruginosa
atggccaccgaattcggcacagccacgaaccacgccgacctggtcgaacgactcgtccagttcctcaccgccaacccgacgctcgtcgcggccggccaggcctacgagaaagttttcgacagcaccattccggcatctgggacggcgatcgcgattcgccaggtgaccctgcgggcgcctggcctcggcggtgaagacagcatcttcatgggagtccagtcctacggcgacaccgcgctcgactactacaacgtccggctgatgggcggtaccgcgttcaatcctggcgcgctgccgccgggtggtgacttctggacggcgttcgtcaactacagcccgcgagtacagctgcttgcctggaaccagccgatgccctactggttcttcgccaacggccgcaggttctggctggtcgtaaaagtctcgacgatctacgagtccgccggcgcaggcttcctcttgcccccatgcccgccgtcgcagttcccgtatccgctggctgtcgtggggtcgtatcgcggagacgtcgccacccgctggtcagacgtgagcgaccgtcatcggggcatcagcagcccgctggagcgcagttgctatgtccgcgaccctgcaggccgctggctgggcttcaccgtcgcatcgaacagcaacaacgagtccgactacaacaatcggacccttctgccgctcggttgcggtcgctactccagtagcggtggcgaaagtgtcgtcaatcagctccgcgattcgttcgggaagttccccctgaaggcgttgagcctcgtgacccgcgaaactgaaggcaggaggtacttgggcgacttcgacggcgcctggtacgtcccgacgctcaactccggcgccgaagacgtcatcaccgagaacggagtcgatcacgttgttttccagactgcatggcggtctggcaatccctggctcttcgcaattagggcggactga

SEQ ID NO: 327513 - DNA, 2991 bp, Pseudomonas aeruginosa
atgaacgcctaccacaatgccgagcgtgctcgcgtccagcaggcggcggccgagcaacgcgctgccgaggcggcagccaaggctgctgctgaaacagccaagcaggatgcggccgcacgtaagttgctgggtgccatcgatccgactcagcgctctctcgctcgcctggccgagcaggagcggcagttgaccgagcatttccgggcgggccgtgttgaggccaatgcctatgccagcgcgctgaacaggatcaaggcccagcgtgacgtgctcactggagtgggtaacgaggccaaggcctcgaccctggcgctcaatggcatgggagctgcaattcgacgggtccaggggctgctgttcgccggcatcgccggttacggcctggcctctttctccaaggaaatcgtcaacaccaacctgcagtggcagcaggcgttgtacaccatggaggcagctacggggtcggcggcgaaggcgaggcaggagctggagtacgtccgcgagatctccgaacggcttggcctggagctgctcaacaccagccaagcctattcccgcctggtggcggccgcgaaagaaaccccggagctgggcagttccctgcgcacgatcttcgaaggcgtcgcctcggccaccactgcgctgcacctcacccgccaggaaaccaatggcatcctgctcgccctggagcagatggtcagcaagggcaaggtccagacccaggagctagttctgcagctcggccagcgcgttcccggcgcgttctcgcttgccgccaaggccctgggcaccaacacaaagcagctcagcgagtggctggaaaagggcctaattccggcggccgagtttctgccgcggttcggcgaggccctgcaggaggcctatggtccagcctcacagcaagcggctggcggcctgcaggccgaactcaaccgcctgcagaacgcattcactgacctgaagatccaggctggcgagtcggggttcatcgacaccttcacccaagcggtgcgagacctgcgtgatgtgctgaaagatccggcagttgttgagggcctgaatctcctgatcaagggcctgggtactgccattggttatgcggccaagggagctgcaggcgtcgtcaacgtcaccaagttcgtctcggaggagattgcggcgcgcgtaaacggtcccgccggtgatgacgtaccccgcttggaagatgccatcgctcgggaaaccgagtacatggtgcgggtccagtccgcgcttgacgatgcatacgagaagaacgacaagaagcgcatccagcgatacgaagaggcactcagcaaggcacaggcgcagatccagcaatggcaggatcagcgtgacgctgtgctgaacggtgccggccaggtcgcggcgctacctgcgactacggtcaccggaactggccccaccaccaagacacccttcacgccatcaggcggcgaagacaaggccgctgcgcgcctggccaagcagaacgaagactgggtcaagcagttggagaaggaagcggcgacctacggcaagggccgggctgcgttgcgtgagtacgagctggaccaacgcaatctgacaggagccctggaagcccgcgctcgcgccgcctgggcgaccctggacgcggcagaaaagcagaagaaggccgacgagcaggcaaagaaagacgccacaaccctgaagcaactcaacctggactaccttcgggccaccggccaaaccgtcgaggcggccggcgccgagatcgagaagaagtacggcgacctgcagaagcgtctgctcgccacgggtgacaccgaaggcgccggcctggtcagcaagctgatgggaatcgagaaggccaaggctgagctgcagcagctccaggaccaggtcgaccggatcttcggcgagcagtctcggcaggagtcgagtatccaggccgcccagcaggccggtctcgtcagcgaactggccgcgcggcagcaactgctagacctgcatcggtccaccgccgacgaggtggagcaacttgtgcctcgcatggaggagctagccagggcaactggcgatccggcagcgatcgagcgtgtgaaggatctccgccagcagctcgacaatacccgcctggccgccgaccagctcactttggctctgcgatccggtatcgagaatggcatgcagaatgcgctgcgcggtctcgccgatggcaccctgtcgctgcaggaggccgcggtttcgttcctgcagtcggtcagccgatcgctggccgacgttgccgcgcagcagctggcccagaaggctaccgcaggactcatgagtctgttcggccaaggtgagcaagacaccagcatggtaacgggagccgcggccgtgacatcggctgcgggggctctggctgcggccggaggaacgctggttactggcgcagctgctctacagagtgccgccgggagtctggctctggcgaatggggtaaagggagcaggtgccgctgccagtggtgccggtgcggcaggtgcggctgccggtggtagcgggtggtggtcctcgatcacaagcatgttcgggttcgccgatggcgggcaggtgcgcggccctgggactccaacaagcgacagcatccctgcctggctttcggatcaggaagtcgtcatcagggccgcggccgcaacccagcctggcatgaccccgctgctcctggacatcaacaagcgtggttgggctgcgctgcatgactggtccggcgctgtgcgccacgcgacgggcggaatagccaccatccccgcgcccgcaatgcctgctccgggcctttctgcttcgcgcctgcaggagcccgcaaagaacctcagcgcgacgctgaagaacaaccagaacttctacctggtcgacgaccccagccgcatcggtgatgtgatggcaggtcgttacggcgacgaggcaatggttctgcacatcagccgcgacccgcagaaattccgtcaactactgggaatcaactga

SEQ ID NO: 327514 - DNA, 795 bp, Pseudomonas aeruginosa
atgtccgcccagcccatcatcccctggatagggggaaagcgccgcctcgctgaccgcatcttcccgcttttcccacgccactcctgctatgtcgagcctttcgcaggtggggcggcactgttcttcctacggtcggtgccggcggatgtggaagtgctcaacgacatcaacggcgacctggtcaacctgtaccgcgtcgttcagcatcatctggaagagttcgtccgccagttcaaatgggcgctcagctctcgccaggtcttcaagtggctgcaggagacccggccggaaacgctgaccgacatccagcgcgccgcgcgcttttactacctgcagcagagcgcgttcggcggccgggtcgatggccagagctacggaaccgccaccacctcaccgcctgggctcaacctgttgcgcctggaagaagcactgtcggcggctcacctgcggctgagcaatacctatatcgagcacctcagctggcaggactgcctccggcgctatgatcgagagcacaccctcttttatatggacccgccgtactgggagacggagggctatggcgtgccattcggcttcgagcagtaccaggagatggcagtgatgctccgccaactcaagggcaaggccatcatcagcctgaacgaccaccccgagatccgggagtgcttcgcctctttccacatcgagtcgaccgacatcacctacacggtcggaggcggccaaggttcggcagcgcgggaagtgctgatcttttcctgggatctatcagcagaacctgcaggccttttctga

SEQ ID NO: 327515 - DNA, 153 bp, Pseudomonas aeruginosa
atgacggaacggcagatcctgctgctccatgaagccgaacagcgtcgccagttgaagaaacgcgaacaggctttcatcaccatgaacctggcattcgccgggggagaggaagcaaagcggcatctgaaagagctgcaggatctgctgaagtaa

SEQ ID NO: 327516 - DNA, 507 bp, Pseudomonas aeruginosa
atggggcggaaggttgagcgcaagatccagcccgccccggccaccgatccgggggcggatgacctgcagatcctgcatcccgaacgaacgctgaaggtgcagggacgaacggtcaccatgcgcgagtatgggtttgtcgaggggctgaagctgcgagccacgatacagccgttcctcgacgatctgcacgccatggtggtcaatgatcgaggcttgccgccgctggatcggatcatcggcgtcctggccgaccaccattcgctggtcgcgcagctcattgcccaggcggcagatgtcgagctggaatggatcgagaagggcctgcgcgcacggcctggcaaggatctgatgtacctctggtggagcgtcaacggccctttctttgtcggcgaggtgatggaccggatcgccacagatcgcgccgaggcaagcctccgcgctgggcagacgtctacgcatgcctcatcgcaggaggatacggaacccctgccaccctcggtcgaatga

SEQ ID NO: 327517 - DNA, 753 bp, Pseudomonas aeruginosa
atgtcgctgttttccttccagggccgggtctggtctggcgagcgcctggccaccggcaaactgagccgtccggtgtgggcaggcaacgtaccgaccttgaccctgcaaatggctacagaaagctccaacaagacggaatcgttctcgggcgaccgcctgcagtacggtcgcctacagcgcggtaagaccgccaccgtcaacatcgtcttcgatgagtggttgccgaagaacatcgctgcggcgatctgggcctcgcagatcgagttggacgccgacacagtgacaggtgaagtcctcgagggtgatctgaaagccggcgacttcgtgaagctggacggtcagttcgtctcctcggtggtcctcaccgacagtgccacaacgcccgcggagctggtcctgggggccgactaccgcatcgagtcgccaacggccggcttgatcgagctgctgaacgtcaccggcaagactcagccgttcaaggccgcgtatgccgccgaggcctccaccggttacaccatgttcacctcaccaccgccggagcgctatatcctcctggacggtatcaacaccgagacccaggagccggtgatcgtcaccctgtaccgctgcaaattcgacccggtcagcgatctggcgctcatcaatgacgagtacggcaatttccagctcacgggtagtgtgctgtacgacaccctgaacgccgccgacgccaagctgggtggtttcggtcgcattgtgcagaaggccgcctga

SEQ ID NO: 327518 - DNA, 210 bp, Pseudomonas aeruginosa
atgagcacccccgccaagaaacaggacgccaccgcttcccccgcgccgaaggaagagaaggtgaaactcaccgctcgtcacacgcacgccggtacgaagtaccaagccggcgccgaaatatacgtcaacaccctcgacaaggctttcctggtacagcaccagaagatctcggtcgaaacccaggacgcggccaccgccgccaaggagtaa

SEQ ID NO: 327519 - DNA, 465 bp, Pseudomonas aeruginosa
atggctgacgggctctgcgcacctttcgatcacaacctggtgatcgagcgcttgcgtgatcaggtcaaggtgctcaagcacgtgggcggcgccgccgaacttggcacgatcacccaactgcgagatttccgcacgccagcagcctatgtgctgctggccaaggagactcccttacccaagcccgccggccacgccggtggcgcgacccggcagatggcaaccgtgcacttcgccatcaccgtcgcggttcgcaactaccgcgacaacaaaggcgtcactgcagcggatgatctgcgccccgtactcggcgacgtacgcaaggccctgatcggctggacaccgcccggcctggcaggcgctcgcgactgccaactcgtccaggggcaggtggtggattacgacgcctctgtcttgatctggactgacctctatcagacccaacatgccatcgggagaacctcatga

SEQ ID NO: 327520 - DNA, 519 bp, Pseudomonas aeruginosa
gtggccgtgtacatcacgctgccggagctggccgaacgtcctggtgccgaggagttgtcgcaagcggctacacctcggcctctccaagcggtcgacagcgagctgctcgatgccttgctgcgtggattgccggtagatcgctggacgccagaagagatcgaagtcggccatgccacggtggaggtgatcaacagcgcggtcagcgatgcccaaggctacatcgacggcttcctccagcgccggggctacagtctgccactggccaagcgttacggggttgtcaccgggtggaccagggccatcgctcgctacctgttgcaccaggaccgcttggggccaggcgcagagaaagaccccatcgtgcgggactatcgcgacgccctgaaattcctgcagctcatcgccgagggcaagttcagcctcgggccggatgaccccctgaccccgccaggcggtggggttccgcaggtactggcgcccgctcgcaccttcagccacgacaccctgaaggactactga

SEQ ID NO: 327521 - DNA, 393 bp, Pseudomonas aeruginosa
atgaacattcccggactcatcaccgccaaacgtgccagcggcgccatcgccgcccgccgtatcgtgatccatggcagctcggacggcctggctgctcaggctgccggtagcactgcgctgctgattggcatcagcaccgagattcccgccactcccgacgcggtcttcgacgtcatccgctccgacctggcgccggtcgagtacggcggcaacgtcacccgcggtgatgcgctgacggccgacgcccaggggcgagcggttgccgcgacgctgccgccggccgccaccacttacatcatcggcttcgctgaactcagcggcgtcgcgggtgatatcggttccgtctacatcgccccggccattctgccggtagccgcaggagcaaccccatga

SEQ ID NO: 327522 - DNA, 1248 bp, Pseudomonas aeruginosa
atgaaaaagccaaccgccactctgccaatcctccccgccggccggcacgtcgctctcgatggtcgcccggtggagttcaccgaggccatcctgcaggagatcgccgcgacctacgatccggcgctcagcgaggcccctctcgtcatcggtcaccccaagctcaatgcaccggcctacggctgggcgaagggcctggaggtgcgcgagggcatgctctatgccgagccgcaccaggtagtccccgagttcgcagaagccgcgaaccgcaagatgtacaagaagcgcagcgcttcggtgtacctaccggactcaccaggcaacccggttccgggcaagcactacttgcgccatatcggcttcctcggtgccgtgccgccggccatcaaaggcattcccgatgctcccttgaacttcgccgaggatgacggcgccctggccatcgagttcgcggaagcgccctacgcggtgacggctctgaccgagatcctgcgccgcctgcgtgacttcttcgtcgagcgcgaaggcgccgaacgggccgaccagctcatcccacaatggcagttgtcttcgatcgaggaggacgcgcggcgtgcagccacccacggcgccagtgcccaggcgtcgttctccgaacccgcacccgcaatagaaggcgtcgacgccgcagcagcctctgccgccgctgcggaagagccgcagggcaccgtcaccccatccgacggtgcttccgcgtcagcggcagaggctgaccggacctctcacccatcacagcaggacacgaccatgcctgacgaagctgcgctccaggagcgccaacgccagctcgacgagcgcgagcaactgctggccacccgcgaagcacaggtggcccagcaaaaagcccaggaacatcgcaacgaggtcaccgagttcgccgaaggcctggtcaaggccggccgactgttgccgcgccagaaggctccggtgatcgagctgctggtgagtctgcctgccgacacccccctggagttcgccgagggcgacggccaggtcaccaagccggcggccgaggtgctgcgcagcttgctggccgaactgcccaggcaggtggacttttccgagaaatccggtgacggcggcgacctgagcttcggcagtgctcacgccattgcagcgcgagcgcagagctatcaggaagaacagcggcaggctggacgccatatcagcacgaccgaggccgttacccacatcaccaagggagccaagtag

SEQ ID NO: 327523 - DNA, 573 bp, Pseudomonas aeruginosa
atggcaggcatcaccctcgaatgggacggacggcgagcactggacgtgctcaacgcgggcagcgcagcgctgggagatccgagcgggcttctgcaggatatcggggagctgttgctcaacatccatcgccgtcgattccaggcccaggtatcgcctgacggcacgccttggcagcccttgtcgccggcctacctgcggcgcaagcgaaagaaccgggacaagatcctcacgctcgacggccacctgcgcaacctgctgcgctaccagctggacggcagcgagctactgtttggtagcgatcgtccctacgcagccattcatcatttcggggggacaatccagcgccaggcacgcagcagcaccgtgtacttcaggcagaatgaacggacaggcgaggtcggccgggagttcgtgcccagaaggcgcagcaatttcgctcaggacgtgcagatcggcccctacacaatccagatgccggctcggccatggcttgggacttctagccaagacgacgacaccattctgcagcgggtagagcgctatctgcagcgcgcgctccgcgaacgcgcctga

SEQ ID NO: 327524 - DNA, 1257 bp, Pseudomonas aeruginosa
atggccacccgcgccgcatacggcggactctccttccaggagcagatccgcttcttccaggccaagcatccgtcgatcgactacaacgcgatccgtggcgcggctaacgaccagtccttcgtcagcgccggggcaaatcgcgccgacctggtggcggatctgcaagccatcatcgatcaggccatccgtgacggcatgaccctggcggagttccgcaaggactacgacgcggtcctggaccactacgaatgggagccggagggtggccgagcctggcgggcgcgagtgatctacgagacgaacctgcgcaccagctatgccgctggacgctatgcacagctgcaagcggtcaagggcgagcgaccgttctggatgtacaaccacagcgatgccgtcgaacacccccgcgaactgcacctggcctgggacggcctggtgatccatgccgacaatccctggtggcgaacgcactatccacccaacggctggggatgtcagtgctcagtcagcgcctacgcggaggacgagctggcatcgctgggcaaggacggcccggacgagcctccgagcggccggatgcgtcggctgacctaccgcggcgaggttgtcgaggttcctgaaggtatcgaccctggctgggactacgcgccaggacggagcaacttcgaacagttggtccagggcgcgctgcagaagaccacgccgctgccacccgaaccggctgcgaaactcaaccagcaacttctgcagaaccgctcggtggccaccgccattcaaaccgactgggagcgctggctcgatagcgtcgccaatgacccggtccgtcgtggccgccgggtccacgtcggcacgctttcaccgcagaccgttgagggcatgagcgcagctggcgtggaagccagcacggcggtcatcagcgtgggcgacagcgatatcctgcatgtgctgcgcgacgcgaaagccatggcgacaaccgcggcaggactgcccaaggcgttgtcattggctgagctagcgaccctgccgcagatcctcgcccagccgcaggccgtgctgctcgacgccaagtccaacaccctgatctacgcgtttgctgcacagcgtcgggaagcaggaaagattgcggtgctggtgaacttccagctcaaagggggcgaggcgaccaattccgtccgatctggatcgctgatcgactgggcggacgtggcaaaggacgtcaaggcagggaaactggtggtgctggagggagcgctgtga

SEQ ID NO: 327525 - DNA, 1479 bp, Pseudomonas aeruginosa
atggaaaagcccgcccttggccgggagatcgccaccagtggcgacggccgcgacatcactcgaccctttatctctggcctgcaggtgcccaacgattcgatcctgcagcgccgtggcggcaacgacctgcgggtgtacgaggagatcctcagcgatgcccaagtgaaaactgtctggggccagcggcaattggccgtagtcagccgcgagtggaaggtggaagccggcggtgatcgcccgatcgaccaggctgcggcagagcacctggagcagcagctgcagcgcgtgggctgggaccgcgtcaccagcaagatgctgttcggcgtgttctacggttacgcggtatccgagctgatctacggccgcgacgaccgctacatcaccctggaagcgatcaaggtccgcaaccgtcggcgcttccgctacgaccaggacggcggcctgcgcctgctcacccccaacaacatgttcgagggggagccgtgccctgcgccttacttctggcatttctcgaccggcgccgacaacgacgatgagccctatggactgggcctggcccattggctgtactggccggtgttcttcaagcgcaacggcatcaagttctggctgatcttcctggacaagttcggtatgcccacggcggtcggccgctatgacgacaagaccgccacccccgaggacaaggccaagctactggcggccctgcatgccatccagaccgactcggcgatcatcatgcccgccggcatgcaggcggagctgctggaagccgggcgctccgggaccgccgactacaagaccttgcatgacacgatggacgcaaccatcgccaaggtcgggctcggccaggtggcgagtacccagggcacccccggccgtctgggcaacgatgatctgcaggccgatgttcgccttgacctggtgaaggccgacgcggatctaatctgcgagtcgttcaacctcggcccggcccgttggctgaccgagtggaacttccccggcgcgcagccgccacgggtgtatcgcgtgatcgaggagccagaagacatcaccgccaaggccgagcgggatgaaaaggtgttccgcatgtcaggcttcaggccgacccgcggctacgtacaagagacctatggggtcgaagttcaggacggctctgagtccacccaggccgaggccacggcgccgacgccttccaccgagttcgccgagggcgatcagccgtccgacccagcagcggcgatggcgccgcagctggccgaagcgatgcagcctgtcgtcggcaactggacgacccaactgcgcacgctcatcgagcaggcaagcagcctggaagatctgcgcgagcgcctgctcgatctagctccccagctcagtcttgatcaatacgcccaggccatggccgaggggctggaggcagctcacctggccggacgtaatgacgtccaggaagagctagatggacgggagcagatctga

SEQ ID NO: 327526 - DNA, 1461 bp, Pseudomonas aeruginosa
atgaaacgcaaaggcaatgccaaggtcatcccggccaaccccgaggcgatctttctgccgtaccagagcagatggatcaccgatccgagccgcctgaagctcatgcagaagtcccggcagatcggtctgtcctggtccaccgcctatgctgccgatgagcgcactgctgccgagtccgcgcgagtggatcaatgggtgagcagccgtgatgacctgcaggcgcgcctgttccttgaagactgcaagatgtgggcggggatcatgaaccaggccgccaaggacctgggcgagatcgtcatcgacgtgaagaacaagatctcggcctacgtcctggagttcgccaatggccgtcgtatccacagtatgtccagcaacccggacgcgcaggccggcaagcgcggtggtcgcatcctggacgagttcgccctgcaccccgatccccgcaagctatggtcgattgcctatcctggcatcacctggggtggcgctatggagatcatctccacccaccggggtagccagaacttcttcaaccaactggtgcgtgagatcgtagaaggcggcaatccgaagaacatcagcctgcatacggtcaccctgcaggatgccctcgaccaggggtttctcttcaagctgcagcagatgctgccggtcgacgatgagatccagggcatggatgaggcgcagtacttcgacttcatccgggcgggctgtgctgacgaggagtctttccagcaggagtacatgtgcaatccggccgacgacgacgtggccttcctggagtacgacctgattgcctccgcggaatacccgcagaccactaactggcagcagaccgagggcggccgactgttcgcaggcgtcgacatcgggcgcaagaaagacctgaccgtcctgtggatcttggagctgctcggcgatgtgctctatacgcgccacgtcgagcgcctgcagaacatgcgcaagtccgcccaggaagcgattctctggccttggttccagcgctgtgagcgcatctgcctcgacgccaccgggctgggtatcggctgggcggacgacgctcaggaccagttcggcgagcaccgtgtcgaggctgtgaccttcaccccgcgagtaaaggaggctttggcctacccaatccgcggcgccatggaggaccacaaggtccgcatcccctatgacccgaagatccgcgccgccttgcgcgaggtcaccaagcagacgacggctgcgggcaacatccgcttcactgcggagcgcactgctgacggccatgccgacgagttctgggcgctgggtctggcgatccatgctgcttccggccttgtcgacatgcccatcgactatcagtccgccggcacacggacgcagctcaatgactacgtctccactccggggggaatcatcgtgccgcacggcttcggcgcggtgcgcggtaataacgactttggaggctattga

SEQ ID NO: 327527 - DNA, 573 bp, Pseudomonas aeruginosa
atggggcggaaatcatcgatctcccggctaccggatcaagtccgggcctacatcgaggggcgcctggccgatggccggatgacgctggacgagctgatcgcggacctgcaggcgcagttcccgagccaagccgaggccggcgagctgcccagccgtgcggccgtgcatcgctacggccagaagctggagcgacggctggcggcaattcgtgccagcaccgaggcggccaagctgatccgtgcccaggccggcgacgacctggacgcacgcagcgaggcgctgacggcgatgatccagtccgagctgttcgagtcgatcatctccctgcaggaggctggtgatgaagagatggacccggccgatcgtgtcggactgctggcgtcagcggcaaagaacatcgcgacgctgacgcgctccagcgtcacgctgaagaagttccaggcagaggccgaggaacgtgcgcgccaggcgctgctcgctgagcagaaggccaagctggatgcgatgcccagcaagggcggagtgaccgaggcgaccaagcaagcgatccgggaagcgctggggatcaactga

SEQ ID NO: 327528 - DNA, 612 bp, Pseudomonas aeruginosa
atggccgtccttagcctcctacgcaccagtacgttctggctcgtgctgagcgcagtgctgtgcggcgcagccgtagtaatccacggctccgcaagctacgaccgtgggtacgccaccggccgcgccgagggtgacgctgcgctgctcaacctgcagctgcagcacaccaacgaacgcgcccaggcccttcaggacgccctggtccagtacaagcagcaggtcgcgcgcgccaaccaggccgaggagcacctgctgcaggtacagcagcaactgaccgacacccgacaccaactccaggagcgaatcgcccatgtatcgaccgcctaccgagcggcacctggtgctgcgcctattgctatccctcgctgtgtcttcactcgcggctgggtgcgcgacttcaacaccgccctcggcgccggtttgcccgccgcaggagcgcgcgccgattccgccggcgctcaaacagcgacctggcccgccgccggttctgacgccgagctactggaaagcggcgtcactccggcggacatcctggcctttgcccaggactacggggcctggtctcttcgcaatctcgctcagctcaacgcactactggaacaaggggaatag

SEQ ID NO: 327529 - DNA, 732 bp, Pseudomonas aeruginosa
atggggattccgcagacgatcctgatcgttgccgccatgacctatctcctgtcgtcgtatcgatcggatggtctcaccaccagcgtgaacgtccggcgccgagcatgctgggtcggtgcgctgatgctcctgctgctggccggcggtttcttctcgtcggccaaggccgatgagatcccgcgggccgccgagcagtatcgccgcgtgctggttcgagcggcgcatgctgagtgggggctgtcggcgccgatcgctacgttcggtgctcaagtgcatcaagagagccgctggcgtgctgatgcccgctcgcccgtcggcgcacagggcctggcgcagtttatgcccggtaccgctgagtggatcgccggcctgtatccggccgccctcggcaccaaccagccgttcaatccaggctgggcactgcgcgctctggtcacctacgaccgttggctctacgaccgaaaccaggcctccagcgagtgtgatcgctgggcattcgtactgtccgcttacaacggcggccaggggtgggtaaatcgcgaccgtaggctagcctcggcatccggcgccgaccagctggcctggttcgattccgtcgagcgcttcaacgccgggcgctcggccgctaacttccgcgagaaccgcaactacccgcgcctcatcctgcttcgctatgagcggatctacctgcagtggggcgacggcgtgtgcggggagaggtacaccctgtga

SEQ ID NO: 327530 - DNA, 297 bp, Pseudomonas aeruginosa
atgtcatcgccgcaaccccggcgccgccgcgcgccgcgcatgaccagctggacgctggtcaccctcgtccttctgatcattctcgccgccattcgcccggagcagctccaggtcgttgcctacaagctggtcctggtgaccttgggcgcggtggccggttactggatcgaccgcagtcttttcaccttcgcggcccgcccgcatgaatgctcggccaacttagaggtcgtaggtgcctggctgcgccgctccctgatcgtcctgggctgcatcctcggcttgaccctgggactgtaa

SEQ ID NO: 327531 - DNA, 366 bp, Pseudomonas aeruginosa
atgtccaggcatgaagacctgttgctgcaactcatccagcgcgagcccgacaagatcaggagcatcctgggactgcctgctaaacagcctgacctaccctgttacgaagaggcagacgtctggatcgaagcgggtcaccgcagcgacaggggtgcggaactacgcatagccttcggggaacctctcccaaacggctatgccgatttctggataccgttcagcggaccggatggcaacgcgctgggttggctgcgcttcagctatatcaccactgtgcggggaaggtctcaatttgcagccagcgaatggcgttcgacgggtgaccaggctccggcagaggatagccgcctaacccttccgctgtga

SEQ ID NO: 327532 - DNA, 504 bp, Pseudomonas aeruginosa
atggacttcaaagtactgcttggggcagtgatgctggtcagcctatcggtggccggatgctccacgaaaaactatggccgacagccagaactgaccgacttcgaacggcagaccatgagctgccgcgagattgacctggaacaggccaaggttcagggattcctgacccatgtgcgtgaggagagcgagttcgacgggcgctcggtgctgtctttcctgggcgacttcgggatcggcaacctgatggagaaggacgcagcggtcgacagtgccaatcagcgcctgacacagttggcaggtgccaagatgcagcgtggctgcacctatgcctatgaggctgaggctccatctcagcagccgcacgcgccaccacgcgcctatgccccaggcgcacccgcatcagcttctgcccgttctgtcgacgcccagctcgacgagctgaaccgcatgcagttgccctacgaggagtaccagcggagatatcgggagattacaagtcaatga

SEQ ID NO: 327533 - DNA, 231 bp, Pseudomonas aeruginosa
atgaaagtcccgtatccgctccctaaccgcaagccgtataccggcgagcgcgtcaaagaactcttccgtgcctctggcacggcaatttcggcctgggccgaggctaacaactacacccgccaccaggtctacatggtcatcaacggccagttcaaaggctgccgtggcgcctcacacgaaatagccctgaagctcggcatgaagctctccgtcgagcaactcgccgcctga

SEQ ID NO: 327534 - DNA, 225 bp, Pseudomonas aeruginosa
atgactacccccgatcacctggttcttgatgcgtcgatgcgctcggcgtttgtggctcttgcgcgtcgcctgtcgattgatcacgggctggatctggacggcctagccgacgatctggagacgctggcggatgctcagccgggcgatatgtggcaaatgccccatcgcgatctggcaggggtgctgcggcatgttgccgagcggacgcaagtagccgcgagctga

SEQ ID NO: 327535 - DNA, 486 bp, Pseudomonas aeruginosa
atgaagcgccggaactggaagacctgggtgccgcgctcgccctgtgcatccattgagggctgcgtggagcacggtacgcagaggtacaaccgcggggtcgagcgcctggccatcgaccacctggggcagaccaaccaatccagtctctacaagtggatggccaacggccgactaccgctgtgcctggtggtgcctctggagaaagccactggcattccgctgatcacacgctacctggcggccgcccacggaaagctcctcatcgacatcccgactggtcgcacgacgtcgcccaaggatgtgcagcagttgcagaccgtcctgcatgacgccgttggggcgctcctggctttccatgccggcagccaagaccgagacaagaccttggacgcgctgcgggcgggcctggagtccctggcctggcaccacggaaacgtcacccaacacgaacacccccagctcgaacttggagattccgatgactga

SEQ ID NO: 327536 - DNA, 309 bp, Pseudomonas aeruginosa
atgactgagaaacgcgtcaacgaaaccgcgctgcgcgtcctgcgcgttctgatcgcgctgaaaggacacaccttgacgggcctttcgaatggcgaagtcgccaaggctcttggcgagagcccggccaacatcacccgctacatgcagaccctcatcgaggccggcctggccgagcgtagagaagacggccgattcgctcacagcgtcagcatgctgcagatagcccaggcccatgcggaccacgtcagccgcatgcagaaccgcatcaacgaactcaaccgccgggtcgctgccggctccatgatctga

SEQ ID NO: 327537 - DNA, 927 bp, Pseudomonas aeruginosa
atgggacgtactgccaccaaaccgaaacccgcagtagagctgccggagctggatagcgccgctatcaaccagaacatcgccaccatgacggagcacagtaccgaggtcatggcgcagttcggcgacggcctcccttacgaccgcatccgcgtggtcaatgaggcgcgcttctacatggcccagtcggcggaagccatgctggaagccggaaagcgcctgatcgtgctgaaggagcatgagccccacggcgagttcactcagatcgtcactgaacagctcggactcgcggatcgcacggcgcgtctcatgatgcaggccgcgttcaagtatctctctccggcgctggagtcaaaacggcaagcgcttgccgttttggggaagacgaagctcttcgagctgctggcagaagatgatgaagacctggctgcgctggctgacggaggaacgatcgccggccttgatctggacgacatcgatcgaatgacatcccgcgagctgcgcaaggctctgcgcgacctccgcgaggacaaggaagcgcaggggcgcctgctggccaacaccaccgagaacctgcagaacaccaagctcgaactggagaagacacgccgccaagtggaaaccatgacggccgaccagcgcgcggcagagctgcgtcaggaagtcacgtccatggcctatgaggtcgaggtcgggatcatggggcaactgcgtgaaggcttcgccaagttggccgagcaggccgaggagcaaggtgccgaccatcgcgccttccaggctgcactgatcgttcacctggaatcactcctggaggaggtacgcaacgagttcgacctgcctgcagagcttggtcgcgaccaggcacccgactgggtgggggccgatatggccgccctggatgcccagttcgcggacggagtgggagcctga

SEQ ID NO: 327538 - DNA, 1782 bp, Pseudomonas aeruginosa
atggccgcgtctgccgtcatcacccagcgcctggttgacctcgaccggcagctacagagcgccggtcaggggcagcgcacggcgctatgcaaagcagccgcggcagagctgggtctgtcgctggcatcgctgtaccgcaagctgaaggatgtacaggtgcgtgagcgcgcaccgcgtaagcggcgcaaggactcggggcagagccacttggggcgtgacgaggcactggtgatcagcacggcgctgatccactcggcccgacataacgcgaagcgcctgtattccgttgctgatgcggtcgaggatcttcgcgccagcggcttgatccgtgcggagtctgtcgaccgacgcaccggagagatccgcccgatgtcgatcagcgcgatcagccgcgcgctgcacagctaccgcctgcatccgtcccagctattggcgccggagccggtcaccgaactgcgcagcctgcatccgaaccacgtctggcagatcgatgcgtccctctgcgtcctctactacctgaagcctgggaccaacaagaaggctagcggcctgcaggtgatggatcgcaaggagttctacaagaataagccagcgaacctggatcgcgtggccgctgaccgtgtgtggtcctacgagatcaccgatcactacaccggctggatctacgttcgctatgtgatgggcgccgagagtggcgagaacttctgcacggtgctgatcgaggccatgcaagagcgtggtggagccgacatgctccacggcgtgccacgcatcctgatgatggaccctggttcggccaacatctcggcgatgtcgaagaacctctgctgctccctgggcatcgaggtcatcgtgcacgcgccaggcgcggcgcgggttacgggctcggttgagaacgcccggaacatcatcgagcgcaagttcgagtcgaagctgaagttcgaaccggtcaacgacctggacgaactcaacgcccaagcgaagaagtggcgcgcccacttcaatgcgacggccgtccacagccggcataggcgcaccaggtcagaactctggatgaccatccgggctgaccaactgatcaaggcgcccacggtcgagctgtgccgggagcttgcagtgagggcaccagagtctcggaaggtcacggccaaacttcgcgtctcgttcggagggtgcgagtacgacatttcggttgtcccggacgtgaacgtcaacgaccgcgtgctgatcacccgcaacccctggcgcgaagatgcagtgcaactggtcacggtcaacgagcagggccgtcaggtcttctatgtccttcccaaggtcgagaaggatgagggcggctacgcgaccacttcaccggtgatcgggcagacgttcagccgtcaggctgagactccggcgcagaaggcccgcaaagctgttgaccaactggcctatggcgtcgaaagcgaaacggaagtgcaggctgcgcgcaaggccaaggccgttccgttcggcggtgccttgaagcccttccaacatatcgacgacacccaactgcccaccttcatgccgcgacgcggcacggaacacagcttggtagctcccatcgtggaggttccgctccttccgcatgtcgaggcggccaaacgtctacgcgcgcagttgggtgaagcctggaccacggactcgatggcctggctcaagaagacccaccccgaaggcgtgccggaagaccagctcgacgccatcgccaaccagttgcgcaagccggcccggcctggcctgcgcgtcgtaggaggcaactga

SEQ ID NO: 327539 - DNA, 1173 bp, Pseudomonas aeruginosa
atgttgaaactcaaggaagtgcttgccggggtcagtaagacccaggccgacctggctcgagcggtcgacctgagcccggcggcgatcgctcaactgatcaatcacggcctctggccgaaatcgctgaatcagcaacagttggcttggcggatcaccgaatacctgatgggccatggcgcgcagtttgatgacgtgcgccaggcatttgaagaagtggagccccggcgcgccaacgccgaggctcctgcaacccccgaaaacgttcaagaaaacgaggagtgcgaccccatggtaatgaacaaacaggtactgctaccagcgacgaagaaggctttcgacatccgtcgtgaccccttcgaagagctgcagagcgctgacgacatgtacgtcagccccgacattcgctacgtccgcgaggcgatgtatcacgtcgcccgacatgacggctttcttgcggtggtgggtgagtccggcgccggtaaatccaccctgcgccgcgatctggtgcaccgcctgaacaccgagaatgctccagtgatccctatcgagccctacgtcttggccatggaggacagcgataccaagggcaagaccttgcgtgtcacccacatcgccgaagccatgatggctgcggttgcgccactggagcggccgaaatcgagcccggaggcacgcttcgcgcaattgcaccgagccttgaaggtcagccatgccgccggcttcaagcacgttctgatcatcgaggaggcacacagcctgccgatcgccacgctcaagcacctgaagcgcctgcgtgagttggaggacggcttcaccaaactggtcagcatcatcctgatcggccagcccgaactgggcaccaagctttccccgcgcaacggtgacgtacgcgaggtggtgcagcggatcgagatcgtagagctggagtcgatcccggttgctgccgtggaaaagcacctggagttccgcttcggccgggctggcaagcagttgtccgacgtggtggacgcaagcggtatccaggcgctgatcgagcgcctgagcaccagcggccgcgacaagacgagccagctctacccactggccatcggcaacatgatgatcgcggcgatgaatctggcggtgcatgtcggcgaaccgctcgtcactgccgatgtgatcaggggggtgtga

SEQ ID NO: 327540 - DNA, 342 bp, Pseudomonas aeruginosa
atgaacgtcgtaccgattactggccgcctccctgaagagcatccgaaaggtacccatctgccgctctgcaccgtgctgacgccggagctggcccgttgcctggaagccgtcaacagcgccacccgcgccttgcgccaggccggcattccgattgagcagacgtcgttactcgatcgccgcctgttcatccgcgaagaggattcgctgcggctgcaccgccgcttccgcaacgccatccgcggcattcgccagaccactcgcgggatggtcaccgtccatgtcgtcagcctgctcggtgttgacgtggcctggacgaccccggtgaaggagcaagaccaatga

SEQ ID NO: 327541 - DNA, 306 bp, Pseudomonas aeruginosa
atgaccgtcatcacccatgcctacaccccgctgatggacgttgattccatgagcgaagaggactgccgcctggccctgaaggatgttctgcaggatggcttcgcgaaggaccagcaactggttgagctgaagaccatcaaccacacgctgaaccagcagctcaatcacgcgaacaacatcctgatcaagctggcggagttgaagttggcctatcaacacgaggcgtatgaagccgagctggagcagttggccgcttactacctgcacctcaaggccgagcagcagactgctgggagggtgcactga

SEQ ID NO: 327542 - DNA, 255 bp, Pseudomonas aeruginosa
gtgatccagagcacccgttacgacactctcgtcattgagggagccagcggcaccaccgtacctaaagaggtagacggagggcgtgtcgtgtcctgggcgaagggacatgcactcgcaggagccgacccgcttgaagcattcgtgcaggctctggccaatggcgactacaacgaacttcccggtgatgccctgcagctgatggccgaaggcgtcatcgcccgccacaaccgacaactggaggctggctatgactga

SEQ ID NO: 327543 - DNA, 771 bp, Pseudomonas aeruginosa
atgagtttcgatccctttggtgacttcgaaacgactggctacctgcgcaacagcttgggtctgaaagatccggcggaagtgaaggaaaacgaacacttctccttcgaaatggggctcgatgaagccctttcctatctcgaacgcacaaagaacctgaactaccaggcccttttgcaggtacacaggttgttgttcgagaaattctacccctgggccgggcgtgaccgtctcgagctggtccctcatctttctgtctggaaaggtcccaagggcgcccccagacgtaccttcttcgaaagtcccgcgatgatcgaacgcgcggtggactatgccctgagcctggcgagcaagaagcagggattcatgcagaagcccggtgaggtcatgggacttctttgctttgcgcatccctttctagacggcaacggacgctcgattctgctgttctacatggagctcagttatcgagccggctttgccatcgactgggccagcacacgtaaggacgactatctccaggccctggacgatgagattcacaatcctggcaagggtcacctggaccgctaccttgtcccattcgttgtgcctatccacagccgtgatcagtggcctgagatcatcgggcaaatcaacggactcgatggtatggatggtgagaacattacctacgaaaacctcgatgatcccgaggttcagaaagtctatgcggcgtatcacgccgagcatccctacccagccaaagatggcacacccgactccgaaccctaa

SEQ ID NO: 327544 - DNA, 1194 bp, Pseudomonas aeruginosa
atgggatacccattttccgacaatccacttgacgagtatcttcccaagatatttcagctgaaaatagatgaatttaacgctaattgtactagggaagatgcaacagcaacgaaggaggaaagagatgccgctggggttgaaatcgctaacttaagcacaaaaattcgcgaactaaaaaataaattcagattgccagatcgggatttcgatcaattcaaaagctcacctgagcttgcagttgagagatttctacttgagaaccctgagcctccaaggccggaggcatatggctgcaggcatagccaaacgcgtgtagttcggcgaaagtttcgcaacgaaacattgcacgtcgtcactcaatgcgtaacgtgtggcgctcagtcaaaggcgctacagaagaaagaatacgacattgaaaaactaccagaatttgatgagggcttatataagcggctcacgtttgaatgggatatttggaattcagctcgccatgatgtttacgttactgaattaaataagggaaatagtctccccgagttcgacgaggtgggatttaatactgtatttcagttagaagacccgcctcccaacttcgaaggttgcgatcacagccacactgatgctcgcttacgcacttataaatcgggagggactgctgtcgttatgcaatgtactctctgtgggcatcacacaggcagcgttagtaaaagcaagtatccagacctagcatcgctcccctctttcgatgagttcctgaaagaacgatccaaggaagatcttacagcttggtacagaagaagaggagatgcttggagaagggcatatctagaacatcgggaacgaattcaaagattgattcaagctggcgagttagcgacgaaagataactcaagatttggaacctattataaatccccggaatgggaaagaacgcgagcccgaattcttcatagagatgactacgaatgtcaagcttgtaagcgacccgctgaatgcgtgcaccacatcgtctatgacaggctcggtgccgagaatgatttagatcttatatctctttgcaacagctgccacaatcttatccaccaagaacaaaggcatctccagaatatcttccggatgccccctagccaaattcgcgagttgcatgaagattcagatgagtattctgaggatgatcatgccgaggacgattga

SEQ ID NO: 327545 - DNA, 1896 bp, Pseudomonas aeruginosa
atgcgcaccgtgaaaaaggctctgctggttgtcggcgtgatcgtgctggcggtcgtgggggtggtggtctactacgtcgccaatcccaacctgccccactaccaggcgccgagcgaggtacgctacctgccgcaatggaaggacgaggcccgccagcgcttctactacacgccccagggtaccctggtgaagggcctgcactacgactggttcagcgctctcgaactgcccttctccgaagaacccttcgccgcccccgaatacctcgcccgcttcggcttcctcgtcgatccgcagcagaaggccagcgacctcaaccccggcaacctgccggtgggcttcagccagcaccgcgacgagaagaccggcacccgctacctggacatcacctgcgccgcctgccacaccggcgaactgcgctaccagggcaagtcgctgcgcatcgacggcggcgccgccatgcactccatcgccgccaccgtgccgaccctgcgcggcggcgccttcggccaggcgctcggcgcgagcatggccgccacctactacaacccgttcaagttcaaccgcttcgccaggaaagtcctcggcgaacgctacgaacaggacaagtcgcaactgcgcgccgacttcaaggccgtgctcgacaccctcctgcgcaccgcctggaacgacacccgccgccacctctaccccaccgaggaaggccccggacgcaccgacgccttcgggcgcatcgccaacagcgtcttcggcgatgccatcgacccgggcaactaccgcgtcgccaacgccccggtgagctatccgcaggtctgggacatctggaaattcgactgggtgcaatggaacggctcggccatgcagccgatggcgcgcaatatcggcgaggccctcggcgtcggcgcgcgcctgcagatcttcgacgagcacggccagccgctgcggggcgagcagcgctacgcctccagcgtacgcctgcacgacctgcacgccctggaagaaaccctgcaacaactgaaaccgccaacctggccggaagacctcttcggccgcatcgacctgcaacgcgcctcccagggccgcgccctgttcgaagccaactgcgccttctgccatgcacccaaggtgcaaccggcggaatacgccgcccccggacgcaatcccgagtggcgcatgcacatggtgccgaccgaggtgatcggcaccgatccgaccaccgccgacaacatcgccgaccaccgctacgacctgcgcaagctcggctggagcgtcgacgaactggcgcggatgaacgtccagctgatcggcgccgatccgcagcaactcgacctctcgcaactgtcctcggccaagggcctggcctacatcaccgccttcgtcgagcagcgcgcctaccgggacgccggcatcccgccggaacagcagaagaccatgaacggcttcgacctgccgatcggcgtacaggaactgcgcgcctacaaggcccgcccgctggacggcatctgggcgaccccgccgttcctgcacaacggctcggtgcccaacctgttccaactgctctccccggccgccgaacgctcgccgcagttctacgtcggcaccttcgaattcgatccgaaattcgttggattccgcaccgagaaattccccggcggcttcctcctcgacacccgtctcaccggcaaccgcaacagcggccacgaattccgcgacggctgccggcagaacggcgtgatcggccgcgccctcagcccggaagaacgctgggcgctggtggaatacctgaaggtgctcggcaaccccgaattcgagcgccgcctggtcccggcccagaccccaccctggacgcccggcccgaaatgcccggcgccggagcaacggaccgcgcaacgctga

SEQ ID NO: 327546 - DNA, 777 bp, Pseudomonas aeruginosa
atgccaagttttgtttgggacagagacacagaggaagcgtggagtgaaccctatgagtatggtgggcaggagcagttccaccgagaggcttataaggttctatcgctaataaaacttcactatgcagaaaaagatatgcactttgaccgagatgaaaaaactctcgacaaagcaatctggctaatacagatagatgctttagaagcgctaattgatgccttgaaattaacagaggagaagagacaccgaattgcctcgcgcttatttcgtgatgcggtcgagacaatggatatttcggcctacttttatttggctggtgatgaagcaaggaaagatctcgccaaatggtacaataacgaagtgattccacataaggtttttagagaatttataaaaaagtatgaatgccaagataaagctaaaaatttaagcaacctttatagcgatctcagcaagtatacacatcggacatatagcgcgataaccaaaagctacctgctcggcaggaataacaaaattgcctatgatggattttctgaggccggcttcagggtgcttccacacgttatatccctttcgtatgcaataatcgcagcattgataaaaagatttgtcacgattgccgaaaacagccagcaaattgattcagccaaaatttgcgatatttgggcggcatcattggagcgagagacagtaccgagacgctttggcccaaggccaggtcaggtgctcagaagtgctcctatagcgtttgacctgaggttggatgaagattaa

SEQ ID NO: 327547 - DNA, 1371 bp, Pseudomonas aeruginosa
atgaacagccaaatcaccaacgccaagacccgtgagtggcaggcgttgagccgcgaccaccatctgccgccgttcaccgactacaagcagttgaacgagaagggcgcgcggatcatcaccaaggccgaaggcgtctatatctgggacagcgagggcaacaagatcctcgatgcgatggccggcctctggtgcgtcaacgtcggctacggccgcgaggagttggtccaggccgccacccggcagatgcgcgagttgccgttctacaacctgttcttccagaccgcccacccgccggtggtcgagctggccaaggcgatcgccgacgtcgctccggaaggcatgaaccacgtgttcttcaccggctccggctccgaggccaacgacaccgtgctgcgtatggtccgccactattgggcgaccaagggccagccgcagaagaaagtggtgatcggccgctggaacggctaccacggctccaccgtcgccggcgtcagcctgggcggcatgaaggcgttgcatgagcagggtgatttccccatcccgggcatcgtccacatcgcccagccctactggtacggcgagggcggcgacatgtcgccggacgagttcggcgtctgggccgccgagcagctggagaagaagattctcgaagtgggcgaggaaaacgtcgccgccttcatcgccgagccgatccagggcgccggcggcgtgatcgtcccgccggacacctactggccgaagatccgcgagatcctcgccaagtacgacatcctgttcatcgccgacgaagtgatctgcggcttcggccgtaccggcgagtggttcggcagccagtactacggcaacgccccggacctgatgccgatcgccaagggcctcacctccggctacatccccatgggcggggtggtggtgcgcgacgagatcgtcgaagtgctcaaccagggcggcgagttctaccacggcttcacctattccggtcacccggtggcggccgccgtggccctggagaacatccgcatcctgcgcgaagagaagatcatcgagaaggtgaaggcggaaacggcaccgtatttgcagaaacgctggcaggagctggccgaccacccgttggtgggcgaagcgcgcggggtcggcatggtcgccgccctggagctggtcaagaacaagaagacccgcgagcgtttcaccgacaagggcgtcgggatgctgtgccgggaacattgtttccgcaacggtttgatcatgcgcgcggtgggcgacactatgattatctcgccgccgctggtgatcgatccgtcgcagatcgatgagttgatcaccctggcgcgcaagtgcctcgatcagaccgccgccgccgtcctggcttga

SEQ ID NO: 327548 - DNA, 1104 bp, Pseudomonas aeruginosa
atgatgaaacgtttcggtaagaccctgctcgccctgaccttggcgggctctgtggccggtatggcgcaggctgcggacaacaaggtgctgcacgtgtacaactggtccgactacatcgcgccggacaccctggagaagttcaccaaggaaactgggatcaaggtcgtctacgacgtctacgacagcaacgaagtgctggaagccaagttgctggcgggcaagtccgggtacgacgtggtggtgccgtccaactccttcctcgccaagcagatcaaggccggggtctaccagaaactcgacaagtccaagctgccgaactggaagaacctgaacaaggacctgatgcacaccctggaagtcagcgacccgggcaacgagcatgcgattccctacatgtggggcaccatcggcatcggctacaacccggacaaggtcaaggcggccttcggcgacaacgcgccggtggattcctgggacctggtattcaagccggagaacatccagaagctgaagcagtgcggcgtcagcttcctcgactcgccgaccgagatcctcccggcggccctgcattatctcggctacaagccggacaccgacaatcccaaggaactcaaggcggccgaagagctgttcctgaagatccgtccctacgtcacctacttccactcgtcgaagtacatttccgacctggccaacggcaacatttgcgtcgccatcggctactccggcgacatctaccaggccaagtcccgcgccgaagaggcgaagaacaaggtcaccgtcaagtacaacattcccaaggaaggcgccggcagcttcttcgacatggtcgccattccgaaggacgccgagaacaccgagggcgccctggccttcgtcaacttcctgatgaagccggaaatcatggccgagatcaccgacgtggttcagttccccaacggcaacgcggcggccaccccgctggtgtccgaggcgatccgcaacgacccgggcatctacccgagcgaagaggtcatgaagaagctgtataccttccccgacctgccggccaagacccagcgggcgatgacccgcagctggaccaagatcaagtccggcaagtga

SEQ ID NO: 327549 - DNA, 1041 bp, Pseudomonas aeruginosa
atgagactgtcccgcccgcgttttaccctttccgccgccttgctgctttctctttccctttccggttgcgtgtcggaactcgattcgggcgcctatggcagcatggacgatccgcgcaacgcgcagatgctggacctggtggaccaggcgctgaaggggaacatggccgtggtactggtggccgacgtgatgccgcacaagtccctgagcgatgccctgaccatgacccagtggacgccaacggcgatctgggagtacgagaaggacccgaaggtgaccttcggccgcaagttccagaccaacgcgctgcagcggaagcccgacgagacctatctgttcaaggccttcgaggtgcatatcctgccgcccggcaagtacctgctgaccggcggcgacgactaccagatccatggcttgctcgaccaggtcggcgcccgcagcggtccgcccggttcgggccatggcgccaacggcaccgcgtacctgtcccccgagctgtatcgcgagtactaccgggaagaagtctggaaagatgccacctatggcagcgagatcaagaccgagaaggtctgcaccgccgtgcatgtggcctcgggcgcctgcgtgagctggggcgagcagcaatacacgcagacgacccagggctcccaggccggctattaccagcagaccgactcccgcgacgtgccctcgatcaaggtccaggcgcgcctgccggtcgacaaggcgctggccagcttcaccgtgcagggcgggcaattgctgctggccccgcgcatgcacctgaagacccccggctacaagtaccagcagtcgaagtgccgggcgatcgatccgaagaagatcgaatgcccattggaaaacctgaccgtctacacctggccggcgccgatggacttcagccagtccctgatcgcccagcgggccctgagcgacaagcaccggcaactgctgtccagactccagcccctgcagatcacgccgctgcgcaagcagggcatggaagacccggtctggggcgtgccgctgtcattgaaatag

SEQ ID NO: 327550 - DNA, 264 bp, Pseudomonas aeruginosa
atgcacgaggcgccgcaggtcctgcacttcggtcgcgctggcgcgggtgcgcggctgaaggccgggatgaccttcaccatcgaaccgatgatcaaccagggcggccacgcggtgaagctgcacaaggacggctggaccgtgaccactcgcgaccgccgcctgtcggcccagtacgagcacaccgtgctggtcaccgagcggggttgccgggtcctgaccctgcgcgacgaggagcgcgaggcgctggccgacctggctggctga

SEQ ID NO: 327551 - DNA, 1215 bp, Pseudomonas aeruginosa
atgagatcagtggagctattcgcgggcgcgggtggcctggccatgggatgcgagatcgcggggtttgagcatctcgcggttgtcgagtgggacaagtgggcctgtgacacggtgagggagaaccagcggcgcggttatccgctgctggcgagctggaaccttcacgagggggacgttcgcgcgttcgattggggctcggttccccaggacatcgagcttttggccggcggtcctccatgtcagccgttctccattggtggaaagcacaaggctcaggccgacaagcgggacatgttccccgcgacggtcgaggtgatccggcggctcaagccgaaggcgttcatcgtggagaatgtcaaggggctcacccgcgcgacctttgccaattattttcattacatccagctccaacttgagtttcccgagttgcctcccatcggcgacgaggactggagtgagcacctcaagcgtttgcaggaagagagaacctccggcagaagcaagggaatggggctgacgtacaacgttgttccgaccctggtgaacgccgcgaactacggcgtgccgcagaagcgcgagcgggtcttccttgttggattccgtgacgaccttggtgtcgagtggtcattcccggagcccacgcacagctatgacgctttattgcacgagcaatgggtcactggcgcctattggcgacgccatggcctgtcgatgccggcggtgccggccaagctcgtcggtcgcgttgaaaagctccggcaggcgaaggcgccgttgaccacattgccatggcgtaccgtcagggacgccattcatgacttgcccgatccccggtcgcgcgcggccgcgaagatccccaatcatcagttccaagatggggcgagggtgtatcctgggcacacgggtagtcccctggatctgccggcgaagaccctcaaggcgggggatcatggtgttccgggcggggaaaacatgttggtccgggatgacggcagcgttcgttacttcaccgtgcgcgagagtgcgcgtattcaaaccttcccggatggtttcaggttccacggcagctggaccgagactatgcgccaactggggaacgcggtgccggtgctgctggcacaacgcgtcgcctcgagcgtggcggagaagttggcgatggcggagttgggcaaactgaaaaaaacaaacacgggcaggggaagggcgaccgcgtga

SEQ ID NO: 327552 - DNA, 651 bp, Pseudomonas aeruginosa
gtgacggggaaggtaattccatttaatccgctggacaaaaagaatctgggcgcgagtgtcgccgaagcattgctgaccaaggaggttcacccgctgggggatctgccggtgttcgagggggcggggatctacgccatctattacactgggggcttcgcgccctacgcgcaggtctctcggctcaacgccgatgggaagttcatgctgcccatttacgtgggtaaggccgttcccccgggcgcgcgcatgggggcgagcctggagctcgcggcgggcaaggtgttgcacaagcgcctcaaggagcacgccgaaagtatcaaggccgccgagaacctggacatcaaggacttccactgccgcttcctggtggtggacgatatctggattccgcttggcgagtcgctgatcatcgcccgtttcactccagtgtggaattcgcttattgatggctttggcaaccacaatcccggcaagggccgccacgcgggcatgcgtccccggtgggacgtgctgcaccccgggcgcgagtgggccatgcgcttggctgagcgtccggagacccaggcgcaaatagcccaggatgccgagacctatcttcgagtgttgccggcctgcctttccgggcagttcatcgaggccgagggcgagtag

SEQ ID NO: 327553 - DNA, 768 bp, Pseudomonas aeruginosa
atggagtatttcaaggatctggagtttgatctgccttccgcgctgttggcgcaattggtggacttgttcgagcgcatgacgccggggccgctcgatgaggaggcggttctagctgtcccggaggcgcagggggtctaccagctgtttttcaatggcgagctggtctacgtggggaaaaccgatgcggacgccggtctgaggcaacgactgctgcgccacgcgaagaaaatccgctctcgccggaacctgcagcagagccaagtgaccttcaaggccgtacggatctacgtgttcaccgcaatggaccttgaggatctactcattaagcgctaccgccatttcaagattcctctcgcgtggaatctgagcggcttcggatccaacgatccaggcaggaatcgtgataagtcagaagtcaaagacagtcacttcgacagcatgtatcccattgatcttgaccttgaggcgcgtgtcgttcaggcggagggtgactgcagtgtggccgaggtgttgaggcagttgaaggatcaattggcctacacgtttaggtttcagaacaaaggtgggaagtccaagaagccacattctgatcttgagcaagcgatggtgcggttgcgcttcgaaaggagcagcgttttgagcattttgcgacaggttaaaacggctctgggggcggaatggcaaattacggctctgccaggctacgtgatcatctacaaggagcgagaggattactcctgcgggacagtcatcgaggctgaaaagtag

SEQ ID NO: 327554 - DNA, 408 bp, Pseudomonas aeruginosa
atggtggacaccatcagcgccgacgagcgcagtcacatcatgtcccttgtgaagggcaagaacacccgtcccgagatgcttgttcggcggttggtgcatggcgccgggttccgctatcgactgcacgacgccaagctacccggcaaaccggatctggtgttctctcgcaagcacaaagtcatcttcgtacatggttgcttttggcatcgccatgagggctgcgccctgactagaattcccaagtcaaaccaggaattttggctggcaaagctcgagggcaataaagctcgcgacgaggtcaacctacgaaaacttcatgacgccggctgggagacattggtgatctgggagtgtgagctacgagatctgggtacgctaacgcaacgtctgcgatcattcctcgagtaa

SEQ ID NO: 327555 - DNA, 882 bp, Pseudomonas aeruginosa
atggaaaaactagcatcggagcgactggaacctggagccgtttacaccaggggagaccttagagctctcttcgaaattcatgatgcgaccctcaacaatggcatcttccggcccaggggatacgactccgtctggctatttgtgaccgagcggaaaacacccgatagaacccagtacatcgacactcttacgggcgatacgctccacatggagggacagctcaagggacgaaccgacaccctcattctggagcatcgcaagcgtggcctggagctattggttttccaccggaaagcgaagtacgagcatcctggcgcgggtttccgatatgagggcgccttcacgtatgaaagccattcgggcgggaaccccacttccttcgtgttgaggcgcaagcccacagctgacggcgacgcgatcccagccaagattgagcgggaactggatacgcggggcgtcttcaaccccggcgacatcagtgacgcgcgcgagcgcaccctggcctcgatcgttcggcggcgcggacagcctcgcttcagaaagcagctgctgaaggcctaccaaggccgctgcgccgtgacgggttgtatgctagagccgatattggaggccgcccacattcacccttaccttggcgatgaaaccaacgtggtctcaaacggcctactgttacggacagacgtgcacaccctgttcgatctgggactgttgtggattgaaccgcacagcctacgagtcaggctctcggagcaattgaggtatagcgagtacagttcattggagggccagtccctggtggtgccggaaaacgaaccggatcacccgagtcgaccggctctggaattcagactcaatactcagcgaaacgacaaagccgaataa

SEQ ID NO: 327556 - DNA, 405 bp, Pseudomonas aeruginosa
gtgtaccctcacagcctgatccgggccccaagacgccggcacataagggcatggtgcgaggaaaagaagagttttcgcgatttcacgctagggcgaatcgcggtcgccgagcccttggacactccggcgccatatcgacgtgatgacgaccaggagtggaacaacatccttgagctggtcatcgtggctcatcccgggctgtccccggaccagcaagagatgatcgctgcggagaacttcccaggtgcccgcgcgaggcgactgaaggtgcgtcaatgcctcgccagctacatcattcaagatcttcgcctggcgctcgaccccgttaaacaccccaccccagagtatcaactgatggttggcaacgcggacaagcttcccccgctcttcgtaagcggctcgtga

SEQ ID NO: 327557 - DNA, 297 bp, Pseudomonas aeruginosa
gtgacaaacgcatcgcccccctcctccttggtagacgtcggccagctcgccgccgccctcgagcgtttcgccgccgagcgcaactgggcccagttccactcgccgaagaacctggtcatggccctgaccggcgaggttggcgaactcagcgagatcttccaatggatggacgaggagcagtcgaaagacgccgcgcgccatcccgacaccgcccaggcggtgcaggacgaactggccgacgtgctcatgtacctggtgcgcctggcctcggtccatgagcacgccaacggggagtga

SEQ ID NO: 327558 - DNA, 1440 bp, Pseudomonas aeruginosa
atgaataaactagacgaacctaaaaagccattctacgagacacctttaaacgatataaacgaagacgaccttgatcaaataaaacacctagaagaaggctggtttattgaattcaagtccaacttcactgacacatcaaaaatagcaaaaagcataagctcatttgctaatacttatggcggattaattataatcggagtacaagaagcaccaaaaggaagaaaattcggatcttactccccgctatcggaggatgaagctgaagcaacaatcgctcgccttagagatgcagccgtatcccatatacaaccctgtcctttctttgtgtcgagaagaataaaatctccagactcttcagatcacgatgagaagaagtggatagtcatcgtaaaggttccaaagagcgatagagcacctcacttacatagtagcggtgcgatctatactcgaaaaggcgattcctcatcacctacaactcttacagatcaagggcttctagaaaggctatggtctgacagagcacaaaaaaccagggagatagaaaatcgaataaaattcttacacaaacaatcttcaagcagcatcccaaagattgatatttttataacaaaaaccttagactccaagcctaaagatcctgatgactacttaaaatttgacaaatttttagaaacagccagtcgacgacacttaccatctgcgcagcctatattcaatactttctaccctctagaacgatcttatgtagctagacgcatagaaaactcacccgaggctactggaataatgtgggagtacgattgggactggtctattcaccacatccagatacctcttccatgtcacgagtgggatggagaaaaattcaacgaaagcatactaggaaatgaacgagttgaatctttaaaagaaactccatcacttcgcaacaaactcccaaaccagaaaactctaataatagacaccacccccgtattgctcatcatttcaatactatttttcatggtatttaaaatacaaaaaattgaaaataacaatagcaaactaagaataaacatgaaggtatcatctgtccgaaacgcagcaatatattcaagccttcccgaattcaaaaagcaaatagaagaattaggaatccccatcatatatagagacataggattctttaatgattcaatgaacccagacagatggttagaatttgacccaacggataacatctcggaaaaagaagaacatgtatcacttgaactcggcaacagcctgcgtatttttgcacgcattttacaaatgctaggaatatcaacaaaagttatttttggtcactacgacctttcgcacgtagaagcaaacgaaaatgagcttattgagttattcaaaaaagtgacattaaccaaccattcattctcttccgtttccaatccttcagttacgcaataa

SEQ ID NO: 327559 - DNA, 255 bp, Pseudomonas aeruginosa
atgacctctgacgcacctccgaattttggcggaatgcttcactcgccaccaaccgaagaccgcaacttcttagatcactatttctccaacatctataacaagctgcagctacgacccatcgatcctgaagacctggcaaaggccaagaacattaccccaacccatgcagttcccgctgcgagttataaggtagcaatcagagcaagaatgaaagagaccttcacccaaggctatctcaccggagtcgccacatga

SEQ ID NO: 327560 - DNA, 699 bp, Pseudomonas aeruginosa
atgaaagctgacaaggatgatgcaccggaatacttgagaagaaaacggagccaaagccttggtaaatgggcgcttccagtcgttctagggctggggctttcagggttggccttagacatggcaggaaacaaactcactttatttccaaaaccccaacccagccaaccctctaaccttgaaaaacctgctcacacccctgtcgataacgctccccaaaaccagcctcaaaagacatcagaagaaattttttgggaaagcgttaatgcacccaatcaccaacagagtcagcctaagcaaactatttataacgatagtaattacagagcacaaaagccgaccaacatctacacaccgccagccccccaacgagtagtatccgcgccccagcaaacacaacaaaaccgaaccaaacgggcaaatcgtgaacgtacttctacatggattaaaagttggaatggcggtacaaactatctagcagaatggctatccgtaaacaactatatagatggccacagtgtctgcgccaatcaccgacgcggatcaatcgactaccgcgagtgtcgtaaggctgccaagcagaatttccatgagcagtgcagaatctggcgtgcacgttatgacaatgatcgaaaagcaagcagtgatcgaatgaagacacgttactgcactgcggcgagcagtttcaatccaatgggataa

SEQ ID NO: 327561 - DNA, 213 bp, Pseudomonas aeruginosa
atgcgttacctcgtagagatttgcaccttccacggcccgacccggcaacgccgctggcatcgcgtccatcagggcatttcccgcgtggaatgccaacgctgggtcgaagagttggtggctgtcttcccgactgaagaagaagctcgccgctccttcggcctgacccgcgaacgcgctcggcaggtgtaccgcatccgtggggtgagggcatga

SEQ ID NO: 327562 - DNA, 342 bp, Pseudomonas aeruginosa
atggcgcgcccgccgggcaagaagaacagcaccatccacttgttgtccggcggggaaaaggcgctgaccgcgctggcgctggtattcgccatcttccagttgaacccggcgccgttctgcatgctcgacgaagtcgatgcgccattggacgatgccaacgtcggacgttatgcgcgattggtgaaggagatgtcggaaaaggtgcagttcatctatatcacccacaacaagatcgccatggaaatggccgatcagttgatgggcgtgaccatgcatgagccgggctgttcacggcttgttgcagttgacgtggaagaggcggtcgcattggctgaagcctga

SEQ ID NO: 327563 - DNA, 525 bp, Pseudomonas aeruginosa
atgagttgggagcaagatgtggcggacgcagtgaatggcatggccgaagagattgctgagattagaaagtttcaagcggcctgtgagagagatagggatatcgggacgctaatgcagctcaacgagaagctgatgactcaggcctcaagctacacgaacctaatcatggtggcagggtatgcggggctctttgggttatggtctaccttggttgggcgtctgcctcaatggctttatgccctgtgcggtctgctggcattgctatctcttctcctcttcgtttcttgggaaattatcaagatggtttggagtagcgtgtacgtgaaacgcaccaaccagatgatcacaacgatggctagagcgacaaatccgatagatatgtatcaagcggcaatgtccctctacagcgtcaaggtgcataaggtttggttgtggtttttcgttccaaccgtagcgttgggagtgggggctgggcttttgcttgtcggttacttcagttttgaggtgtggtgctcggtgagctga

SEQ ID NO: 327564 - DNA, 243 bp, Pseudomonas aeruginosa
atgaacaccaagaaatcatccgcaaacgccgccactctggcctcggaaactctccgcgacccaaacgcatcggcaatcgcaaaaagcttagcagcatccgtgctctcgcaatcgtcctcgaccaaggagacgggcaaggccatggaagctaaagcgtctcaggtgctccagtccgagaagtacagcgagacaaccaaaagcctcgttggctccgtcctctctcagtccaacaagcaacgctaa

SEQ ID NO: 327565 - DNA, 252 bp, Pseudomonas aeruginosa
atggccctgtatttcatcgaatacgacctgcgaaagcagcggaactaccaagccttatacgacgaattggccagcttcagagctgtccggattctggaatcgctgtggtgcttcaaccgtgtcaacacgaccgccgctaacctacgcgattacttcaggcggttcattgataatgacgatgggatcatgctctcggaggtatcgaactgggcgagctggggcgctaaaggaaacccgaataatctgaagtag

SEQ ID NO: 327566 - DNA, 420 bp, Pseudomonas aeruginosa
atgaaaacgcctactgatttggtgatcctccgactcatctacaagctctactacgaagagttcaagaacttctcaatagaggctggcgtcgagaatggacgaaagagcaagatcttcgttcctatcgactgcaagctgatagccacgcagctgaaagtcgatgccgacattgtcttcggtaggctctattaccacatggaggagaaatacggctacaggcgagatgacggcagcaaagttgccttctacacgtcgctagagggagaagctaaccgctgcgtcaattttcctatgctcgcttcagtactcgcgggattagaggaggagaacagcaaggcacagacggcgatctacctctctcttttcgctacggctgtagcaattatcgccgttgtcgtcacatggttgacagctaaatga

SEQ ID NO: 327567 - DNA, 825 bp, Pseudomonas aeruginosa
atgccaattaattttgacattgtaatcgatacagaagcatatgaagtagatatgaaatctggattggattcaatgcagggaatttctgatgcgactcgtattattggcgaaactcttctgcttggtcgagttcctgagagagttacagcaaaaagtagtgtgcgaacaacgctaaagaaaaccttcaaaggttcgtatgggctaagtttcaggttggatgtattggatgaacaaccccagaaagaattgaagaagataggtaacgtagtttttactgagcttatggcgtattttatgaaagaggcgctatacctcgaggctccagatccttcagagaaagcacagaaggtgttggataggttgggcgatcacgccgaagaacttatcagacagcttcggcaatctgcaatgaaaaacgtacatgaagtttcagtaaagtttggatatgatatttcgataaaatatcgaaaaagttttgaggatagggtgcctcttgttaagtttacaagagatacggttcatgccgtgcaggccacaaaaactgacgagcgcctgaacctgacggcgagtattaggcgctttaatacgaatacaggaaacggccggcttcagttagagggtgagcacgatacagttgcttttggttttcgtgtgaactacagggatgttgattttgcgatgaaaaagaaattttccgaaaacttagataataataacggaattgaagaggagcgatgggagtatcttgagctggttgctaaccctattcgccaattagatgggcgggtgattaaatatctggtggttggtttttttgatgtttaa

SEQ ID NO: 327568 - DNA, 738 bp, Pseudomonas aeruginosa
atgtttaatcgatatgtagtcacctcaatagtgctcgcctctttggtgctgctctcttatattgcacggttttattttaatcttgggtttgtgatttctgatagtcctgaagcatgggggcaacttggagattacattggtggcaccctaaatccgctcttgagctttgtgtcgatagtgttgttgattcgctctctttcattgcaaatggaagcgaacaaggagttaaaaagagaagtagaggcggcaagaaaaaccgagaagcttcgctcatttgaaatgcagctctttaatatgcttgactcgcaaaaaacatattttgaatcttttaaaattgatgtagatgtatctggtgagctcaagaggctcttcgggggcgaggcggtcataagggttgaggatgatattgagacgattcgtagctcagatgatgagggtgtttcggttactaagtatttggaggaggttgactcagctgatcagttgtatagtttgactagggttttttataatttggtgagaattgttgatgataagctcagtgaatcaaatggcttttctcaagaggatagaaatagctattatttgaccatcataaatttcacggatttctcattgcttcgtctaataatgatgagtgctcaattcatggattacgcttcgacgagttatttgaagtcaaatggcgggttcaatgctgtgcttgatgaggtgggtcttagttacagcctttattag

SEQ ID NO: 327569 - DNA, 165 bp, Pseudomonas aeruginosa
atggcaaatatcaccgcagccaacaacgttcgtatgagcaagatcaacagctgccaagatggtatccgctcccatctcgaatcctgcctgtacaacaaggtgaacacattgcaatcggtcgctgactgcctgaacaagaaagggacttcgcaccccacgtggtag

SEQ ID NO: 327570 - DNA, 612 bp, Pseudomonas aeruginosa
atgttcatccgtgcttacctcagagcttcgaccgactcccaagacgccagccgtgccaaaggagctctcgttcagttcgctgctgacaacggtcacaagatcgccgccttctacacagagaacgaatcagggaccaagctccaccgaccagaactgtttcgtttgctggacgatagccatgatggcgatgtgttgctgattgagcaggtagaccggctgtcccgcttgtctcctgatgactgggcgagcctaaaagccatcatcgcagcgaagaaggtcacagttgtatctctcgacttggctaccagtcatgccgcattaaagcccacccaaggacaagatgacttcaccagaggcatgatcactgctgtcaacagcatgcttctcgacatgctggctgtcgttgcacgcaaggactatgaagaccgtcgccgtcgtcaggctgagggtatcgagaaagccaaagccagagaggtgtacaaaggccgacaggtcgatcaggcacttcataaccggatcaaggaatgccttgatgcaggcaagagcatccgcaagaccgccgagattgttggttgtgcagtgtcaacggtgcaacgagtgaaggcagcgtaa

SEQ ID NO: 327571 - DNA, 207 bp, Pseudomonas aeruginosa
atggatgaccgcactgccatcaccgcagacacgctggaactgcttcacctcaatcagcaagcacttcgtgccggccttgaagagttttcgctatggatagcccaacgcggctcaacctacgtgcacgacaacatgctgagcatcctgcacaccctcgacactaacgccgaagccatcgcatcagggatcgactctctgcgaccttga

SEQ ID NO: 327572 - DNA, 315 bp, Pseudomonas aeruginosa
atgaacgaaaagcttttcgtattggccagccagaagaagacgaccaaccacgtgctacacctgctgctttgcatacccacgtttggcttgtgggtcatcgtctggctgctggttgcgagcagcaatagcaagcacaacactcgtattcagaagcaaatgggccatgtgctggattataaaatgcaggggctgagcgatgttgaaacctaccgcagggtgggggccgatgaagcagccagcaagctcagaagcgatcaaattttcgttttcactgtggttgctgtgactgtaggcttgttcttcctgctcaaatag

SEQ ID NO: 327573 - DNA, 852 bp, Pseudomonas aeruginosa
atgcagcatccatccgttttgaatttgcctgccagctcggccaatgacgagcacgctcaagcaccagcccccacgccacaagcaccggccatcactgcgtccacgcctgaggaatgggcagtacagctgcgtcgtgagggaaaatcttacgctgcaatcattgcagccactgggcttcctgagcgtaaggtaaaactgcttgttaaagatgtaccaaaggaaatcgccactccactgagcaagtcagtgagtcgcgtatacgagctcgcaattcgtgcacaaggagtcaaagactttgagctccggggcattctgcacgaagaatacggctgcaagtggaacgctgccgaaggacgctatgagagctcctttgattccagcgtaatcagacgtgtcaaagagaaggtgcgtgaacgctccacctccaacggcacccaatctgtgttcgttatggattgggtcgatgaccaagcacctactgcaagtcgtctgcaccttgaacagtcagcattgaatctgatagctcgtgtcgatgaagccatcaacgaatacatggagctccacgctgtctgtgcctcagaggacagtgaaagtgctgacttggctcaacaaaagcaagcgtatgctgcccggcaatacatcctgaagcttgtcagcggacttggtacagagccgactgctacgctccttgaacgcacaaccaaggtcacgaatgcacttcagggcactccagaccacgcagcaccatcggtgcggactcctgagcgtagacgccaaatgccagagcctattggtgctgatcacttccttgatttcgttgaatcacaaggatggttggcagctacccactaa

SEQ ID NO: 327574 - DNA, 1293 bp, Pseudomonas aeruginosa
atggcctacatcatcaagcgcggggcgctctactacctgaatctcaagctgccaaagcacctattcccgaggtgtaacactttgcgtttgagcctgaacatacggcatcgtcaaagcgccatctttattgccacatcactggtgcagcggttgcatcaccaccttagcgagcaccctcttgaagacctccagacgcttcgtacgttgtgttcacaatggcgggactctacacccacgcccactatccaaaccgctccacggatcgctacggcagtctcagcgaaacggaatagcgacagccctaccctcgctgcactctccaagctttatatagaggaagggaaacggggaggcacatggcgacaggtcagcaccgaggaagtcgagcgagccttatcagaccttttcgagttggtgggtgacatgcccgctaaagccttcgatgcgcaccaagcacgccttctaaaggaacggctcagcctatgcccgcaatatttcggcttacgccccgagttcaagggaaagacactgaggcaggtggttgactcaggaagttcttacaagaccatcaccgctgtcacagtgaacaatcggctacgcaagctcaccgccttcctgaactggtgcaaaacgaatgggtacgtcacagacaacccactgacgggcatgaaagtcatgacaggatcagcgaaggaagcccggctgtcttttgaaccacacgacctaaatgccctgctgaaccacgatgcactgcgaagagaagcccgaaagcacccgtggcgttactggctgccactccttgggcgaaccactggggcacgattggaagaactgtgccaactgcgtgtcgatgacttcattgagcaacagggcgtccagtgcatccgcatcgatgacagccgtgaaggccagaaccttaagaatgccagcagccgccgagtacttcccctgcacccttcactgattgagttgggattgttgcagtacgctgaatcggagaggacagatggagctgatcgcctgttccccgagcttgaagcagtacgcggtaaacgaggtcacgcggcatctaaatggtttggccgctataaggcgaaactgggtatcaccgacccacgcaaaaccttccacagcttccgccacaccttcatcgatgacctgcgtgatgctggcgtgcaagactcgttaatcaaacgcatggtgggacacgaagacagctccgtaaccttcggcatatacggcagcaggacaccaatcaaggctatggttgaggccatgagtcacatcaaataa

SEQ ID NO: 327575 - DNA, 369 bp, Pseudomonas aeruginosa
atgtcatttgaatgcacattagagataactgccaaccctagtctaaaatttgaccttccttcatttatcacaagcctacccatccgacacacattcaaaaacaagaaaaatagcactatctcagtatccacggatgacttcagcttctctaactggatggaatttgaaaataatgcttactccttccttaagggcttgaccttcatgactaatgaggaagaaattagcaacctaatctttagaatcgcaatttactacaatacagatgaaaccgtcatatttcctttccacctttcaaaaaaaatgatcaataaaatccatgaaatgaaactttccgtagaaataaatggctacccaagcaccaactaa

SEQ ID NO: 327576 - DNA, 1602 bp, Pseudomonas aeruginosa
atgcagagaatattatctctagggactcgccagttgcggagttttggaaaagatcaaagccctattccaatcaagccgataaatatttatgtaggcaaaaatagttgtgggaaaagtactttcctacggacatttcctttgttgagacaatcaatacaggccaatacaaaatccccaatactttggtttggtgatttggttgactttggagattttgatacagctcttcatgacggtggaaaagaaatatcattcgattttgagacagcattggaaatctacgatcacgaggacgtgtgggatttctcatctgttggtatatcatttgagccacttacaagagcgaataaaaaaaatatatatgacaccaaggtttgcatttcaattagcaaagttgcagaaaagcaactaaagactagactgtcttttgtggtaaataactctgctattgaaattatttatagtggcgattcggtcgagtcagtaacagcgaaaaatacaaaatatgaaaaggagtttgagtttagtgcgaagttggtgactgaacatggatccctgtttccactaagagttcgtggattgagggaaattaagtctacgaatgacttaaagcattttacgctaactaatccatttcaatcagaagcaattgcacaccttactaagcaccttttttcctatcaccatggcagcaaaaagccaagtaggttgcgggcggagtgcgaaacattatcaatacttccgcatggcgacttacgaagaaagattggtcaccttttctcacgggacaagtactttcaaaaattattcgaaacggaacatgaagaaataaccgatattagtttcactatcttgcttgcaaaaggcttggatagattgttggcatcagcagataaactattctcgaatttcttctctggcgtgcgatatcaaggcccactgagagccgctggtgagcgtttctacagatatcaagacttaagagtagatgaagtggaccacacgggaggtaatcttcctatggtaatccactcattggattcggctgagaagtctagactaagcaggtggattctagagaactttggctttgagctgaagcttctttcgaatgggcttcattatgaattgctgattagggaggaggaggatacccggtttcacaatattagcgatatgggattcggttactcccaagtactgcctgtcatagtttctatatggcttgaattcgtctctgatagtcgcgctagaaaagttaaactatcaaaacaatctgcaccaagaataattgttttagaacaaccggagcttcatcttcatcctgcattgcaatataaatttggacgatcgcttgctaaagttattaataaaacgaagcgagcggatctgtactttgttatagagacgcatagtaaacacctgattgatgctattggtgagtctatcagggagaatgagatttcagcctcagtaattaatattactctttttgaaaagcagaaaaatggagttacccatactcagatatcggggtttgatgatgaggggtatttgattaactggcctgttggttttctctctccagaatatgattattag

SEQ ID NO: 327577 - DNA, 1017 bp, Pseudomonas aeruginosa
atgattattagaattcagggcgaattgtgcttggccgtggatcaagcagataaaataatagcgctagagaatattataaaatctcatggggaggggaagcaccatgtttggattccggcgcctactattaaagagctatgtcaggtagatggctttggtcacttcacaaggcgcacccttgatgcaatggttagtcaggcttcggaaggtgcctatctacataaggaatttgacttctatgcagttgttaattttgtcgataaacatgctctctcgcatgtgaatggcgtgctcgatatagggtatgcacactttttaaatacaacgacaacccaggaatctattcttttagctgagaatgagcttgacggtgaggcctactactggggggctaaaacttacctgcagttaaaaagggttagaggcgcaaaggtaaaccttgaaatagcgcatggcggggggaatacaacttataattattttatcagactcgataatgggcgtcgttttttcgcatcaattgttgatagtgatagagaacatccgaaaggaagcctaggcgctacggcggcgagatttagacatactaaagttggctatgatagaaagcgatattttgaaatactatcatgtcatgaaatagaaaatataatacctttaagggtattgacgtctattaatgaggctaagcttaaggaaagcttagtgtatagacctgacaatattgatttcagggtttacccagatcacaagacaggcctgtcattgaaagacgcaaaaaaatctgacaagttacataaagatgaatactggaagaaatttgatgatttagatccagacacactactttgcagcaactttggtgaaaatctgttgaaagattgtgtggagtatgttcgtaggctatctcccaaggaatccagagagcatatagatgaagaggttgataaagagtggctgcggatatgcaaagtgattgcatcttggggggtctctagcagagggcttctgagctag

SEQ ID NO: 327578 - DNA, 1206 bp, Pseudomonas aeruginosa
atgtactcctccagtggctctagcactcctgccgaagcatgcgagaaagcacgggttgttgcggataggtctccggattggaactatacaagcgccacgcccaagatgaatgggttggataattcatattgttctgttgtgtatgtttctcgtagagaccctagtgttgttaatacttgtgatgactgcgctagctggaagctttttagaaagggggatcagtgtgccaatgctgatgatacctacaatgcctccactggtatttgtgagccgccgcccaaggagtgtaaggaaggcgaactgttcccggccaagggcccggactcgcccgtagttacctcgggaggccgtaactatgtcggtgacggcggcgccccgaccgcctgctatcaaagctgtgagtatggcggcaatcccagcccggccagttgctatctggtcaaaggctccaccacgacgggcttctgcaactacattctcaagggcaccggccaaagctgcggtgccgactcttacaccttctcccagaccggcgattcgctgaacccgcccgacactccgaacaccgatccttccgacccgaacgaccccggctgcccgcccggctggtcgtggtcggggactacctgcgtcaagaccccgaccgatcccacggatccaaccgacccaaccacgccgggcggtgatggcgacggcggcggcgatggcaatggcggtggaaacaacaacggcggcggcaacgacggcggcaccggcaatggcggcgacggcagcgggggaggggacggcaacggcgggggcgatggtagcggcgacggtgacggcagcggcacgggcggcgatggcaacggcacctgcgacccggcgaaagagaactgctccaccggccccgaaggccccggcggcgaactcaaggaacccacgcccggcacctgggatgacgccatcgccacctgggaaaagaaggtcgaggacgccaagaaagaactcaagaccaaggtgaaggccaacgtcgaccagatgaagggtgccttcgacctcaacctggcggaaggcggcgggcaactgccctgcgagcccatgaccatttggggcaagtcctactccctctgtatctccgactacgccggccaactctccagcctgcgcgtggcgctgctgctgatggccgcgctgatcgccgccctcattctgctgaaggactga

SEQ ID NO: 327579 - DNA, 363 bp, Pseudomonas aeruginosa
atgaaggagatccgttcgcagcagatccgccgccggaacaacatgctcagcgagctggccgaactgatcgtcgaagcgttcgtgcgtaacgggctctctcgggagaaagcagtatctgagtcagaggaactggtgttccaattgcatcggcgctgggccggtatcacgtttgtctttccggtcaaggatgagctggctcgcaagcgcctggaactgcatatactgcagcggtacgatggctcgaatgctgacaaattggtccgggagttcggcgtcaccgaggactggatctacagcgttgttcgaaagcaccggagacaacgccgaaccgatcagttgggcctttttgacccggccgaatga

SEQ ID NO: 327580 - DNA, 564 bp, Pseudomonas aeruginosa
atggcactcgctagggggctgctcagcaagatccacatcgctcgtcagcagctcggcctgcaggacgatgtctatcggcagaagctgcatgcgatgttcggcaaggggtcggcgcgggatctgaacctgcgccaggccgagcagttgctgacggagttcaagcgcctgggctggcaaccacagcccagcaagcgagcagccggcaagccgcataacttcagccagctacccgccgaggtccaggtcattgaggcgcagttggctgagatgaggctgccctggagctacgccgacaagatcgccaagcagatgttcggcgtggccaaggtcgcatggctgaagaaaccagatcagctcacggcaatcctggcagctctgcacgtcgagcaggagaaacggtacctcctcgctgaagtggatcggctctgccaggacctgggcattgagcatccagaacaggcggccggcttggaacagttgccgaaaggatggcggcggcagcgtccaatcctcaaggccctggtggaaacgctccaagcggccgcagatagcaagcggaggtaa

SEQ ID NO: 327581 - DNA, 690 bp, Pseudomonas aeruginosa
atggaccaggaccgtatcctcgacaagatcaagaagtgcctggaaatggccaaggggcggggttcgaatccgaacgaggccgagatcgcactgcgtcacgcccacaaactgatggaagcctacaacctggagatgggcgacgtgctggccagcatggctggcgaagccaaggttcccgctggctcggatggaaaaccgccggcctggcgggtgtgcctcgctcaagtgtgctgccatgccttcggcacacacctgatcatctgtacctcctatttcgaaagcgcttcattcctattcgtcggctgcgcggcggcgccggagctgaccggctatgcctaccaggtgctggagcgacagctgcagaaggcgcgcaaggacttcctgagcacgcagaaacgctgcaagcggtccaccaaggtagcccgtggagatgccttcgcgcatggatggatcgaggccgtgtacgccaaggtcgaccagttcgcaggcgtcgacgacaacatcgccgacgcgatccaggcgtacatggcgaagcaccacgctgacgtcggcaagttcgagatgaagcgccgcaagctcaaggcacgtgacgaagtggccagtgaagcggggtatgccgcgggcaagcgcgcgcggctgcaccaggggatcgggcaccaggccgtggctcggcttactcagggggtgtga

SEQ ID NO: 327582 - DNA, 375 bp, Pseudomonas aeruginosa
gtgtctttggtcagcttagacgggcgctacaaggtcattcgtgccatggccgacaacatcgccttcgacgagcgcctgcaggcggccaaggcgctgatcgatgagtgcctccacgaatggacggaaggtgctcgcgcggaggtcatcacgctgatcaacgatgcgttccgcgtggaccaagctgggaacatccgtaccggcagcgtgcttgccctgcgccgcctgcagatcgaagacgaacgttggcagcgggcaatgcaggccatcggcgaggctgtccaggtcgtgagcaccaaggcgtacgtgcgtatccaggagcgggtcggggacaccgaccagtaccgctccattcctcttgatatcgcgggggtgtga

SEQ ID NO: 327583 - DNA, 1062 bp, Pseudomonas aeruginosa; identical to SEQ ID NO: 327387

SEQ ID NO: 327584 - DNA, 996 bp, Pseudomonas aeruginosa
atgctcgagcgcctcgccagcgagatgatgctcctggtcgtaggtcgggcgcttgaagctgtagtcccgctgggtctgtcgagccgtacgaacattttcgctgtagcggaaagaatgaagcaccggctgcgggttgtcgccctccggctgggcgctgaacagcaccgggccgccggcgatacgctcctggacgtagagccggtcgctgcagaccagggtgtggcggtgttcgtcgaagcggaagtagtagaccaggccttcctcgaaggccagccggtcgtgcaggtagtgatcgctgtcgccggcctgcacgcagtattcgcgcggcaggtgctcatggtagatgcgctgttcgtagtcgagcacccggtgctccttgagcagcgcctggagaatctccggaacactcttctcctggaagatccgccagttgcagcacagctccaggcgcgccaactgtggttccagcagcagttcgtagcgggtccggcgaaaacccgagctgccttgggtgaagtggctgacgatgccatggacgtagcgggccggacggccgtcctgccagagggtgaaggtgcccggctggtcgagtacctgcttgaaatcgatggcgttcttgtcgctggccagcttcaggttcaggcggaaaggctcgcagagcgcttcttccagttcgaactcgacgacatcgaacgcgagtttcccttcgccgacgacgaaggtgaatttcaggtccctttgacgcatggatcgttccttgttcctggcgggcggttcctcccccatccgttggagaagcgagccccacgttactcttgctcagccgctgccgaaagtcttggctcggtgtctatttcgcgaagtagcggacattttcggctcgacggagaaccggccgcacaggtgtacgaccggtgtgcctgtcaactcaccctgcgaccggcgagcgccagtcgtcggagccggaggtgccagagacttcgtgggtccaggtga

SEQ ID NO: 327585 - DNA, 609 bp, Pseudomonas aeruginosa
atgaaacacgaaatactcgagaagaacgtcggcctgctggcgctatgcatggccgtggccgtgagcatcggcggcctgacccagatcgtgccgctgttcttccaggacgtgaccaacaccccggtcgaaggcatgaagccctataccgcgctgcaactggaaggccgcgacatctatatccgcgaaggctgcgtcggctgccactcgcagatgatccgtccgttccgcgccgaaaccgaacgctacggccactactcggtggccggcgagagcgtctgggaccaccccttcctgtggggttccaagcgtaccggtccggacctggcccgcgtcggtagccgctactccgacgactggcaccgcgcacacctgttcaacccgcgcaacgtggtgcccgagtcgaagatgccggcctacccatggctggtggagaacaagctcgacggcaaggacatcgagaagaagctcgaagtgatgcgcaccctcggcgtgccctataccgacgaagacatcaagggcgccaaggactcgctgaaaggcaagaccgagatggacgccgtggtcgcctacctgcaggtgctcggcacctcgatcaagaacaaacggtga

SEQ ID NO: 327586 - DNA, 186 bp, Pseudomonas aeruginosa
atggatatcgggacgctgcgaggactcggcacgctgctgatcatggtcgccttcatcggtctggtgatctgggcctacagcggcaaacgcaagaagagcttcgacgaagcgacgatgctgcccttcgcagacgatcccgaagccaaaaagcacgtcgagcaagcttctaggagtaacaaagaatga

SEQ ID NO: 327587 - DNA, 435 bp, Pseudomonas aeruginosa
atgaacatgtttgcaacccaaggcggcgtcgtcgaactgtgggtcaccaagaccgacacctatacctcgaccaagaccggggaaatctacgcctcggtccagtccatcgccccgatcccggaaggcgcccgtggcaacgccaagggcttcgagatcagcgaatacaacatcgagccgaccctgctggacgccatcgtcttcgaaggccagccggtgctctgcaagttcgccagcgtggtccgtccgacccaagaccgtttcggccggatcaccaatacccaggtcctcgtggatctgctggccgtgggcggcaagccggtggcgccgaccgcccaagccccggcccgcccgcaagcacaggtccaagccccgcgcccggcccagcagccgcagggccaggacaaacaagacaagtccccggacgccaaggcctaa

SEQ ID NO: 327588 - DNA, 345 bp, Pseudomonas aeruginosa
atgtacaagcagtcactggcggcactgttcgtgatggcaaccctggccggctgcgcgtcgaccaaggtgcagaacccggtcaactacatcaccttccgcaacgaaccgctggtcaaggatgtcgagaaaggcatgagccagcaggaagtcctgcgcatcggcggcacgccttccggcacccagaagcgcctgatgaaaccggggagctgcaacagctacatcctcaacaaggacggccagcagcagccgttctacgtcagtttcgacggcagcggcaaggtcgacggctcgggcttcctgagctgctccgagctggaccgccacgagcgcgacgcccgcccctga

SEQ ID NO: 327589 - DNA, 1266 bp, Pseudomonas aeruginosa
atgaacccgagcaccgccgcccgcgccctgggcatcgattttggcacctccaactccaccgtcggctggtggcggccggaggtcgaaccgctgatcgagctggaggacggcaagatcaccctgccctcggtggtgttcttcaacgtcgaggagcgccgcccggtctacggccgccaggcgctcggcgagtacctggagggctacgagggccggctgatgcgctcgctgaagagcctgctgggctccaagctgctgaagagcgagaccaccgtgctcggcagcgccctgccgttcaaggacctgctcggcctgttcatcggccagctcaaggcgcgcggcgaggccgccgccgggcaagccttcgacgcggtggtgctgggtcgcccggtgttcttcgtcgacgacgacccggaggccgaccgcgaggcccaggacaccctggtgcaggtggccaacaagctcggcttcaaggaggtttccttccagtacgaaccgatcgccgcggccttcgactacgagcgcggcatccagcgcgaggaactggtcctgatcgtcgacatcggcggcggcacctcggacttctccctggtgcgcctggcgccggagcggcgcaacctggccgagcgccaggacgacatcctggccaccggcggcgtgcacatcggcggtaccgacttcgacaagcagctcagcctggaaggcgtgatgccgctgttcggctacggcagccggatgaagagcgacgccttcatgcccaccagctaccacctgaacctggccacttggcacaccatcaacgcggtgtacgcgcagaagtcgcaattggcgctgaagaacatgcgctacgacatcgtcgacagcaccggcatcgaccgcctcttcaggctcatcgaggaacgcgccgggcactggctggcgatgcaggtggaagacagcaagatccgcctgaccgaaaccgagcgcctgcacctctcgctggagcgcatcgaggccgggctcggcgtggagctgacccgtgggctgttcgagaacgccgtcgacggactgctggagcgcgtgcgcaacagcgtcgcgcaactgctggcctcggccggggtcgacccggaccgggtcgacacggtgttcttcaccggcggttcgagcggcattccggcgctgcgccggagcgtctcggcgatgctgcccaacgcccgtcatgtcgagggcaacctgttcggcagcatcggcagcggcctggccatcgaggcgaagaagcgctatggctga

SEQ ID NO: 327590 - DNA, 993 bp, Pseudomonas aeruginosa
atgaaagcgttgatactcaaggcgtttggcggtccggaatccttcgagctgcgcgaggtgcccaaaccggtgccgcaggcgggacaggtattggtgcgggtccatgcgacctcgatcaatccgctggactaccaggtccgtcgcggcgactaccccgacctggtagcgcttccggccatcaccgggcatgacgtgtccggcgtcgtcgaagcggtagggccgggagtgaccgccgtcgcaccgggagacgaggtctggtacaccccgcagatcttcgaaggccagggcagctatgccgagtaccacctggcagcggaaagcatcatcggcaggaagcccgccgcgctgagccacctggaggcggcgagcctcagcctggtcggcggcacggcctgggaagcgctggtcacacgcgcggcgctgagggtcggcgaaagcatcctggtgcatggcggcgccggcggcgtcgggcatgtcgcgatccagttggcgaaggccatgggagcccgggtcttcaccacagtgcgcgaggtcaacttcgagttcacccgccagatgggcgccgatgtgctcatcgactaccagaagcaggactacgtcgaggccatcctgcgggaaaccggaggccacggcgtcgacgtggtgttcgacagcatcggcggcgacaccctgtcgcgcagccccgaggtactcgcgcagctcggccgcgtggtcagcatcgtcgacctcgcccagccgcagaacctcctccaggcctggggccggaacgcgagctatcacttcgtcttcacccggcagaaccgcggcaagctcgacgagttgagcgccctggtcgagcgcggccggttgcgcccgcatgtcggcgccgtctattcgcttgccgacatccccctcgcccacgcccgcctggagagtcgcgacaatggcatccggggaaaaatcgcgatcgcggtcgagccgtcggtcgatcccgcacaggcgttcgcccgctga

SEQ ID NO: 327591 - DNA, 456 bp, Pseudomonas aeruginosa
atggtggggcgttggagtgcgtggatcgtcgccgtggcgatctgtctcatggtcggggacgcgaccgccgctggctggcgttcggcaaacttccgtgtctatagcggcgactacaacggcgacggtcagccggacctctacctgaaggcggtcacttcggtggtcgtggtggggggcgaagtggctacgccgattccgctcctgccaccgttgaagaatgtcgtcctgctgcgcaatggtgccagctacagcgccctctacgatccaccggcggcggatctgaacgccgtggcctggacggcggcgccctaccagagcttcatcggcgacctgaatcgcgatggcatcctcgacctggtcctgcagccgaacgattccagcgactcgctgctgatcgtcagcggcaacccttccgcgcacggcgtactgcaggtagccagcggtaccgggcgttga

SEQ ID NO: 327592 - DNA, 600 bp, Pseudomonas aeruginosa; identical to SEQ ID NO: 325099

SEQ ID NO: 327593 - DNA, 990 bp, Pseudomonas aeruginosa; identical to SEQ ID NO: 325098

SEQ ID NO: 327594 - DNA, 366 bp, Pseudomonas aeruginosa; identical to SEQ ID NO: 96026

SEQ ID NO: 327595 - DNA, 351 bp, Pseudomonas aeruginosa; identical to SEQ ID NO: 325093

SEQ ID NO: 327596 - DNA, 963 bp, Pseudomonas aeruginosa
atgactatcaggcaaacccccatcaattcgggattcggagcgaaaacgcaggccagcgaggtgatggcggggcaagacctctccggaaagaccgccatcgtgaccggcggctactccggtcttggcctggaaaccacgaaggcgctggcctacgcgggcgcgcgggtcatcgttacggcgcgcagaccggatgtggcaagggaggcgctgctcgggctcgacgaagtcgaggtgcaggcgctcgacctggccgagttggcctgcgtgcgtcggttcgccgaggccttctccgcctcgcgccgtcgtgccgatatcgtcatcaacaacgccggtgtgatggcctgtcctgagacccgcgtaggcccgggctgggaggcgcagttcgcgaccaatcaccttggccactacgccctggtgaacctcttgtggccgtcgctcgcggacgacgcgcgagtggtcgccgtgtcctccgccgggcaccactactcggcgatccgctgggacgacgtgcagttcgaacggggctacgacaagtggctggcttatgcgcagtcgaagactgccaacgccctgttcgccatccagttggatgcgctgggtcgcgagaggggtgtgcgtgccttcgcagtgcatccgggcagcatcgccacaccgttgcaacgccatgttccacgggcggagatgatcgccctgggctggatggacgaagccggcaatccggccagccccgatacgctcaagaccccgcagcagggggctgccacccagctatgggctgcgacctctccgctgttggcggggatgggcgggctctactgcgaggattgcgacatcgcaggcgtcgcgccggacgactcgcgcaccctggccggcgtacgcgaacatgcgatcgatccggagcaggcccgccgcctctggaggctttcggcgacgctcaccgggatcgacgcattcgcgtcctag

SEQ ID NO: 327597 - DNA, 612 bp, Pseudomonas aeruginosa
atgactcagggcacgaaggtggcgtttcggcaccgggtgcacggggactgcctggcgggccgtgaatgcgtgcactggcccctagctcccgtcgctgcctgcacggcagtaaggggagcgcttgagcgggcgtcgtggttgccggtcaagctgcttgtcgtgcttgccttggcctcttgtttcgcctttccaggcgagttccttctgcaagcgtccaaaagactcgcccaccactcggagggcaagccaggagcccaatccgtagggcgaatgaccgcttgcggttatccgccggctctccagggcatcggcggataccgcctgtgggggtattcgccctacgggacgttcgagcgggcttcatgtttgctgctcaagctgcttgtcgtgcctgccttggcctcttgtttcgcctttccaggcgagttccttctgcaagcgtccacaagactcgccctgccactcggagggcatgccaggagcccgatccgtagggcgaatgaccgcttgcggttatccgccggctctccggggcatcggcggataccgcctgtggcggtattcgccctacgggactatatcactcgcgatttcttagctacacggcagtga

SEQ ID NO: 327598 - DNA, 645 bp, Pseudomonas aeruginosa
atggacgccgcgactcgccgttcgatgctgcgcaatgccctcctgctcgggctcttcgccctggtcggagtgggcctggtagcactggtgcagcaattcaccgaagcgcgcatcgccgaagcccagcgcgaggcgcgcggccgcgccctgctggaactgctgccgccgggcagctacgacaaccatccgctggacagccaggtgccaaccttcgcgccgaagctgctcggcctggatgcgccgcgtccggcctatgtcgcccgcctgcacggccaggccagcgcagtgatcctccaggccagcgcgccggatggctacagcggcgccatccagctactggtcggggtcaccgcccagggccggctgctcggcgtacgggtcgtcgcgcacaaggaaacccccggcctcggcgaccgcatcgaactggccaagagtccctgggtgcacggtttcgacggcaagagcctgggcgatccggcggacgccggctgggcggtgaagaaggacggcggtacgttcgaccagttcgccggcgccaccgtcaccccgcgcgccgtggtccgcgccgtgcacaaggcgctgcgctacttcgacgccaaccgcgaacgcctgctcgcccccgaagaggctgccggacatgagtga

SEQ ID NO: 327599 - DNA, 990 bp, Pseudomonas aeruginosa
atgatcagcaagtggctgtttagcggcgccttcctgttcgagctgagcagttgggcgagcgtcttcgccgacctgccgttcggtcaggcgctggcgctctacctgttcgcccacggcctgggcagcgcgctgctgtgcgtcggcgtatggctgctgctgccgcggcgctacaagttcccgctgccgtggagcccgctgttcctcttcagcctggccttcttcgtgccgctgatcggggcggtcggcgtcgctgcggcggtattcccggcgctgtacctgccgcgccagcgtggcgagcaggcctggcaggcgatgggcgtccccgagctgccgttccggccgaaggaaaagcgcctcgacatgatgttcagcgacggcggtctgcaggacgtcctgcgccatgcgccggacccgaaccagcggctcacggcgatcttcgccacccggcggatgcccggcaaggaggcgatcccgatcctcaagctggccctgcgcgaccccgccgacgacgtccgcctgctggcctactcgatgctcgaccagaaggaaagccggatcaaccagcgcatcgaggccgccctcggccgcctcgccggcgccacgccggcgcgacgcggcgcgctgcacgggaccctggcgcgctggtactgggaactggcctacctggggttggcccagggcagcgtactggagcacatcctcgagcaggcgcgcgagcataccgaccaggcgctgcgcggcacaccctcggccgacctgcatctgctggccggacgcatcgccctcgaacaaggccgcctggaggatgccgggcacgccctccaggccgccgaggaggcgggaatcgatagcgcccagctggcgccgttccgcgccgaggtggcgttcttccagcggcgctaccgggacatcccccggcttctcgccggaatgcccgacgacatgctgcaacggccgcccttcgcggccctggcgagatactggacatga

SEQ ID NO: 327600 - DNA, 2847 bp, Pseudomonas aeruginosa
atgcggttcagcaagaaaggaatcgccgtgctgcgtctgccgtcctgccgtaacacccttcgacccatcgaacgcccgctcgcctggcttgccggcctggcgctggcgctttgtgccggcgctgccgcaggggctgccggcgggccgtccagcgtggcgttctggtacgccgagcggccgccgctggccgagctttcccagttcgactgggtggtgctcgaagcggcgcacctcaagccggccgatgtcgggtatctgaaagagcagggcagcacgcccttcgcctatctgtcggtcggcgagttcgacggcgacgccgccgccatcgccgatagcggcctggcccggggcaagagcgcggtccgcaaccaagcctggaacagccaggtaatggacctcgccgcgccgagttggcgggcgcacctgctcaagcgcgccgcggagctgcgcaaacagggctacgccggcctgttcctcgataccctggacagcttccagctacaggccgaggagcgccgcgagggccagcgccgggcgctggccagtttcctcgcccagctgcatcgccaggagccgggcctcaagctgtttttcaatcgcggtttcgaagtgctgccggagttgcccggcgtcgcgtcggcggtggccgtggagtcgatccatgccggttgggacgccgctgccgggcaataccgcgaggtgccccaggacgatcgcgattggctgaagggtcacctggatgccctgcgcgcccagggcatgcccatcgtcgccatcgactacctgccgccggagcggcgcgacgaggcgcgcgcgctcgctgcgcgcctgcgtagcgaaggctacgtgccgttcgtcagcaccccggcgctggactacctgggggtgagcgacgtcgaggtgcaaccgcggcgcatcgcgctgctctacgatccgcgcgagggcgacctgaccctgagccccggccacgtctacctcggcggcctgctcgaatacctcggttatcgggtcgactacctgcccaccgaccagccgctgcccgaacgtccgctgagcggtctctacgccggggtggtgacctggatgaccagtggaccgccgctggccagcgacgccttcgacaactgggtcgctgcgcgtctcgacgaaaaggtgccggtggcgttcctcgccggcctgcctaccgagaacgacggtctgttgcagcgcctggggattcgccgactgtcgcagaaactcaaggtcaagccgagcaccgagacccacgaccaggcgctgctgggcgccttcgaggcgccgctggtgatccggatccgcgacctgccggcgctcaccgtactcgacccggcgcgggtggccccggcgctcaagctcaagggcgacggcaaggagtacgtgccggtggcgaccgccgactggggcggcttcgccctggcgccctatgtgctggaggagggtagcgagcaccggcgctggatcctcgatccgttcgccttcctgcgcaaggccttgcgtcttgtgccgctgccgagtcccgacgcgaccaccgagaatggccggcgcatcgccaccgtgcacatcgatggcgacggcttcgtctcccgtgccgaggtgcccggcagtccctatgccggccagcaggtgctggaggacttcatcaagccctatccgttcctcacctcggtctcggtgatcgaaggcgaggtcgggccgaagggcatgtacccgcacctggccagggagctggagccgatcgcccggcgcatcttcgccgacgacaaggtcgaggtcgccagccataccttcagccatccgttcttctggcagccgcaactggccgagcagggcgagaacttcgaggcccagtatggctacaagatggccatcccgggctacgacaaggtcgacttcgtacgcgaggtgatcggggcccgcgactacatcgagcagcgcctgaccaccccgcggaagccggtgaagatgatcttctggtccggcgacgcgctgcccgacaccgccaccatcaagctcgcctacgacgccgggctgatgaacgtcaacggcggcaataccgcgctgacccgggcctttccctcgctgaccggactctacccgctgatccggcccacccgcggcggcgtgcagtactacgcgccgatcatcaacgagaacgtctacaccaatctctggcaggggccgtactacggcttccgcggcgtcatcgataccttcgccctgaccgacagcccgcgccgcctgcgcggcctgcacctgtactaccacttctattcggggaccaagcaggcctcgatccgcaccatgcaccagatctacgcggcgatgcaggcggagcatccgttgtcgctgtggatgagcgactacatcccgcgcctggaaggcctgcatcgcgccagcctggccaagcgtgccgatggcagctggcagttgcgcggcttcgccgccttgcgcacggtgcgcctggacccggcgctgggttggccggacctcgctcgctccacgggagtcgcgggcgtgcgcgacctgccccaggggcgctatgtacacctgagtgcggcgaatgcgcgcctggtcctgcgcgacagccgcgatccgcggccggcgctggaggaggccaacctgccgctgaagcactggcgctaccgcgacgatggccgcgtcgagttcgccttcgccgggcacctgccattgcgcctggtggtgcgcgcggcgggcgattgccggctgagcgcggccggcaaggccttcccgggaaaggccggcaacggcctgtggacgttcgagttgccgatggagcaggtgcgcgatggccaactcgtctgccgctga

SEQ ID NO: 327601 - DNA, 2925 bp, Pseudomonas aeruginosa
atgtcgcggacgacgcgttggaaggatgttcgaaagtgcgggatacgcacactggtgccgctgggcgtttcgctatcgctgtcgccctgtgcgttggccgaagcccggtccagcggctgggagcaggacttcatcggcgtgccggtcgcgcgcgcgttgggcctgaccggcaaaggcgtggatgtcggggtgatcgatggcggtttccttccgcagcatccggcgttcgccggccaggcgatcactccgctggccaaccgagtggccatcgacggcgaggaagcgatcgccgatccctcccggccgctcttcgatcgcgatgagcaaagcggagaaatccaggtcgccagccatggcgcgaatgtcagcggaatcatcgcggccaggccggaggtcattgccgatttcacctatcgtggtggcgtggcgccgaaggtcgggcttttccagacgcaaatcaggcccagcgacgaagccgatgacgaggatgccgacatagaggaggaacaagatgaagcggcgagccaggccagcctgctgcaaccgggcagcgaggaactcgtccatggcgccctgagcaccctctaccggggcgcgccgacggtacggatcatcaacaacagctacaacgacgatcctatcggcaatgacgccgccgcggtggatgccgcttatgcggcgatcgatcccgcagcgccgcatccctacctgaatgccctggccgacggcgtgcgcgacgggcgcctgctggtgttcgcagccggcaacgaaagccgcgcgcagcccggcttgctcgccaccttgccgcgcttcatgcccggactggaaagcggtttcctcagcgtggtcgcgctgggtccggaccgcgacctcaccgactactccaaccagtgcggggtgacgaaagactggtgcctggcggcgcccggcgacatgtacgtggccgcggcgaacggtgcctcggccgaacgcttgacctacacctatgccgaccagagcggtacctcctacgccacgccgctagtcagcgccagcgcggcattgctggccgagcgttttccctacatggacatggcgcaggtgcggatgaccatgttgagcaccgccgtcgatcttggcgagcctggggtcgacgcgcgtttcggctgggggttgctggacctggcccgggcggtacgtggaccaggccagctgttcggcgatcagcgggtgacgctggacgcggcgcgcggcggctggaatgccagggatgcctggaacaacgacatccgcgccggtggcatgcttggcaaggccggcagcggcgcgctgcggctgtcgggcgataaccgtttcgccggggtcgcggtcgaggccggcgaactggcgctcgccgggcgcaaccggttctctgccgccagcgaggttcgcggcgggcgcctggtggtggacggcacgctcgaaggaccggggttgagggtagcccgggccggcgagctgggcggcggcggcaccattgccgcgccgacccggatcgacggtgtgctcgccgccgaccgcctcgcgggcgcgccgagcttcacccgctcgctcgaactgtcgccgtcgagcacgacccgggtggcgctgggcgggcaaccgccgatccgcctcgacggcgcggctgctttcgcccggttgggcgggcggctgcaactgacggcggccgatgcggcgggggcggggcagaagttcctgacggtcgcgcggggcgccacctaccagggcggtttcgatgccttgcaacaggcgccgggcctggccgcgcggggcctgcgccacgacttgcgcttcgctgcggatggcatcgccctggccctggctccgctcgacctgccggggcaggtcaacctacaaggcaacgccgggcgttccgcggcggcgttgaacgcgctccgtgaccggcccatcgccctgcgccccggcgcctacaacgattggctgcaggccagcctggcgcgcggcgatctcgctggcctgccacgcagcgccggcggccaggtgtatgccgacagcctggcctacctgagtcggcagccgtcgcaagtggatcgcgcgatgtttggcgagctttcctgggcgcagcccgggcaggcgccgcggttgtggttccaggggctcgcttccggcttgcgcaacgaggggcgctcaggcgtcagcggcagtcgcgagcgtagcgacggcattgccctgggcctggtccaggcgctcgacgaacgaacccagggcggcgcgacgctggcgcagaccaagggacggatcaacagcgccggcggcaaggtcgagctggacatcacccagctcgccgtgggcttgctacacgccttcgacagcctggaacagggcggttacgtcagtgccatgctcggcgccggctacctcgacgccgccagcaagcggcgcctgccgggctttgccacggccaagggcgacagcgagggctggctctaccacgccagcgtcaagagcggctaccgctggcgcaaggacgattggcgggtcgagccgcgggtcggcctgctggcgacccgcacggaatggaaaggtttccgcgaaaagcacagcgagctggcgctggacgtcgaccgcgcggccagggatgcgaccttcgccaccctggaactgagcgtcgcgcgcagcctgcgggtggccgactggtcgctggagccggagctgaacctgggctacgagcgtgccctgggagtgccggcgagccacaccgaggctagcctgcagggcgtcgacctgaagcaggtttcggcccatcgggggcgcgacctgttcagtgcggggatggcgctgcacgcccgccgcggtccgttgcagggcagcctggagctgcaggggacgaaaggcgagcgggtcggcggcagcgccgtcaacctgcgcctgagctacgacttctag

SEQ ID NO: 327602 - DNA, 672 bp, Pseudomonas aeruginosa
atgcatatccacgtactcgtcgtcgaagacaacttcgatctcgccggcaccgtcatcgactacctcgaggccgccggggtggtctgcgatcacgcccgcgacggccaggccggcctcaacctggcgcgcgccaaccgctacgacgtgatcctgctggacatcatgctgccgcgcatcaacggccggcaggtctgtcgccagctgcgcgaagccggcctgcagaccccggtactcatgctcaccgccctggataccctgcaggacaagctcgacggcttcgacgccggcgccgacgactatctgctcaagcccttcgaactgccggagctgctggtccgcctgcaagccctcagccggcgccgcagcggccaggcccagcgcctgcaggtcgacgacctggtgatggacctcgacagccgccaggccagccgcggcggcacgcccctggcgctgtcccccaccgcctggaagatcctcgagtgcctgatgcgcgccagccccgcgctggtcacccgcgagcagctggggcgcagcgtctggggcgacgagccgccggaaagcaacaccctcaacgtgcacatgcaccacctgcgcagcaccgtcgacaaggggttcgccacccctctgatccataccctgcacagcgtcggcttccagctggagcgaaaatga

SEQ ID NO: 327603 - DNA, 843 bp, Pseudomonas aeruginosa
gtgaaaatttgtctggttcctgtttgttataatgctcacgatgatgcagtaaggtttcttgactctgtaaataccgcatttagcttctgccttggggtggaactagaggtgatattatctgacaactctacgctctcctcagttataacgtttgatgcacgaaattattcgtataactttcgctatctgcagaatagtaatattgggtatttccctgcatttgctcgggcgctatctacactgactgaacctattgatagttatgattttgttatggtttgtaatgttgaccttgttgtatctaaggatttctttatagcactttcatctgtctctcctggtaaggatgtagggcttattgctccggggattttttctgataaagatgggcgagacctaaatccaaaaattatgcgtcggccaagtctgagaaaaatgaagttcatgcgcatggtttgctcaagtactgctctttttcgttggtactctatgctggtacgtgctcgtgaacgtactcgtgcttgtacgcagcgtaaaatagcaaaaaaagggggggcgataggggggcaaccggctatgtacggtgcgcatggatcttttattatattcactcagctatactttaagcgaggtgctcatgttttatatcctcgctttttatttggtgaggaggtttttgttgcggagcagttacgattgaataatatgcttattcagcatgttcctgatgttcgggtgtctgataaggagcatgcgtcaacctctaaaattaaattaaaatttatttgccccgagcatagaaagtcatatgagtatttgctgtcaaagttttttgatgattaa

SEQ ID NO: 327604 - DNA, 1263 bp, Pseudomonas aeruginosa
atgttagtgaagcttaatgaaaactctgtaaacgctttgtctttagttgcaatacagggcgcaaatgcactgcttccattgttagctttcccatatttgtttggcgtattagaacagggtgcttttgcgaggctagtagtggctgaagcattagctttttatgttttgactgtgtgtctttatagttttgatataagtggcgttcaagtaatagtcgatgcgaaagaggaaagagaggtagaagcaaagttttttttcaatatatttgctgctagggttggattattaattttttcttctgtttttttggttggaggtggatatctattttggggcgccgatgtgttgttggtagttatatggcttttttttgttttgggtatgattcttcagtctaattattacttccaagcagttgaaaataactggttgctggcaacatttgtagtctcttcaagagttactgcggttttagccgtctatgtctttgtacataaggggacggatgtttttcttgcttccatcatattggcaggtagctttttagtttcagggggagcggtatttggagttctacttactcgttttggtttgagtgaatttaagaggattagaggtgatgttgttgtctcattactgtggagtggtcgtcatctgtttctagggaacttatcagttactttatttcgtggtgcaaatgttttaattttggctggtgtttcaaatagtgctgctgttgcagtttatgcactctccgagaaaataattaaaagtactcaagcactagcgaggccattgaatcagttatttttgccaaaagttgtaaaagcttgggcctctctctctgaacgggaaagaaacaacgcctttgcttttagacttgtctggaaaaatacatatgctcaagtattgcttatggttttctttcttccggtttttatctttctcttatatttctgttgggttttaggagtgattccgggttttagtgagaaagttttctttctaattgtattgatgtcgccagccgtgatttttggtgttgctaattctatgtttggtgcagtagggctgagtttaatcggagggcaaacctactttgcttattctgtttctatcattggggtttgtgcttttttgatttccctggttatgtcttatcttctctctgataccggggctgcgatgacttttgtgctggcggaggctttgcttttatttgcctttctctgtaaatatcgtgggaagccaagacatggatga

SEQ ID NO: 327605 - DNA, 1269 bp, Pseudomonas aeruginosa
atgtctttcgatactatttctgtaattgggttgggttatattggtttacctacagctgccgtttttgcttctcgtagaaaacaagtgataggggtcgatgtaaactccaaagcagttgaaactatcaaccagggaaagattcatatcgttgaaccggacttggatatgctcgtccatgcggctgtgactaatgggtacttacgagcagtttctgtacctgagcctgctgatgcatttttgatcgccgtgcccaccccgtttaaggagcaacatgaaccggacttgcgatacattgagtcagcgtgcaaggcaattgcccctgtattgaaagcgggcgatttggtaattctggagtcgacatcaccggttggcgcaaccgagcaaatgtctgcgtggctgtctgctgaacgtccagatctaacgttcccccagagtcacggagatgcttctgatatacgtattgctcactgccctgagcgagtcttgcctggacatgtattacgtgaattggttcagaatgatcgtgtaattggcggtatgaccgctacatgctcggcggcggcagcttctttatataagatatttgtggagggggagtgtgtaattactaatgcccgtaccgctgaaatgtgcaagctaacggaaaacagcttccgtgacactaacattgcttttgcaaatgagctttccattatctgtgacaagttggacatcaatgtatgggagctgatccgactcgctaatcgtcacccgcgagtcaatattctccagccagggccgggagtgggggggcattgcatcgcagtcgatccttggttcatcgtaagtaagacccctggagaggctcgcttgattcgaactgcccgtgaagtcaatgatggaaagcctttgtgggttctgaacaagattaaaatggctgtcgcggagtttctgcaagcgaatccggaaagaactgcgaaggatgtaactattgcgtgcttcggcctggcatttaagcctgatatcgatgatcttcgtgagagtccagctgtttctattgctcagaatgttaagatgtctcaccccggtactgtcttggttgtggagcctaacattgctgaattgcccgaaaagctggctgagagattagatctggtatctattaactctgctcttgagagatcagaagtgatagtcctactggttgatcacaaagagtttaaagagttttctccatgtgatctcggtgcttataaagtaattgataccagaggtgtttggaacgcttaa

SEQ ID NO: 327606 - DNA, 2577 bp, Pseudomonas aeruginosa
atggcacagcctttcaccatcgaaccggacccgaacaccctcgaccatccaccggccttcctggccaacggaggagcggtcgggaaactgttgctcagcctcgacgcggccagttcgcccctcggcccgccggacgcctggtcggcgagcctgaagacgacgatggccacgctgctgccggccaaggcgcagatcgtgctgttctggggcgcggaattcgtcgccctgtacaacgatgcctacgcgccgagcatcggcgacaagcatccgcgcgccctcggccggccggcgatagagaactggcgggagctgtgggatgacctcgaaccgctgctgcgcggggtgtacgagaccggtgaaaccttcgcggcaaaggatcggcccttctacatcgaacgccatggacgcggcgagacggtctatttcgacgtgtcctattcggcggtgcgggaaaccgacggttccgtcggcggcgtgctgtgcatcgtcaccgagaccaccgagcgggtgcgtttcgaacgccgccaggcgttcctcctggaactgggccagaccctgccgtccctggccgatcccctggaaatcgaagccaccgccctgcgccggctcggcgaggagctgggcgcgtcgcggatattcttcggcgaggacaacggcgacggcatgaccttccaggtccatcgcgactatctccacgacggccgctcggcggtcggtcggcatcgctacctggcgttcggcgccaccctgtccggcgaactgcatgccggacgcagcgtggcgcgggaagacctcgccggggagcgcggcatgagtctcgacgaggcggcgagccgcgcgcgcctggggctgggcgccacgctgcacgtcccggtgctgcgccacggccggctggaggcgctgctggcgatccacttcgcccatccgcaggcgctcggcgaagattcgcgccgcctggcggaggaagccgccaagctggcctggacctcgctcacccatgcccgcgcggagctggcgctgcgcaccagttccgcgcaactggcggcgatgttcgaccaggccagcgcgggcatcgcggtatgcgaccggaactggcgcttcacccgggtcaacgatcgctactgcgagatcgccggccgttcgcgcgagaccctgctcggcctgcgcatgcaggacatcctcgaccccgccgacttcgccctccctgcggcgccaggcggagcgaccggcgcggcgttcgagatgagcggccgctacgttcgccccgacggcgatacggtgtgggtgcagaaccaggtcacgccgctggtggacgagcagcatgccgccagcggcctgctctgcgtgtgcatggacatcagcgcgcgggtacgcgccgagaacgagctgcgcgaactcaacgaaagcctggaagaacgtgtcgcgaccatgctcgcccagcgcgaaagcgccctggcgcagcttcacgaggcacgcaagatggagatggtcggccagttgaccggcggcatcgcccatgacttcaacaacctgctgacgccgatcatggcctcgctggaactgatccgccggcggctcgacgacgcccgctccaccgacctcatcgacggcgcgctacagtccgcggagcgggcgcggaacctcgtcggccgcctgctcaccttcgctcgccggcaaaccctcaagccgcaggcggtagccctgcgcgaactggtcgagggcatgcgcgacctgatcgagcgctcgctcggcccgaccatcgaggtccgtatcgagatcccggaacgcctgcctgcggtggtggtggatccgcaccagttcgaactggccatcctcaacctcgcggtgaatgcccgcgacgccatgggcgaaggcggccgcctggaaataggcgcgcggaccgacctggtgatcgacggcgcggtggacggtctcggcgccggccgctacgtgtgcctggaagtcgccgacaacggcggaggcatgcccgccgaggtgctggcccgctgcatggagccgttcttttccaccaagggcgtgggcaagggcaccggcctcggcctgtcgatggtccagggcctggtcgcccagtccggcggcggcctgggcatccattcggagatcggcaaggggacccgggtgagcatctggctgccgatcaccgcggagcagacgcaatccaccgcagaaagctgcccggacgcaccggaagcgttgcggccgacccacgtgctgctggtcgacgacgacaggatggtgcgctacaccaccgcgctgctgctcggcgatctcggctaccaggtcagcgaggcggcgtcggcggaggaagccctgggcgaggtcgagcgcggcctggcgcccgacctgctggtcaccgaccatctcatggccgacaagaccggcgtgcagcttgccgaggaactgcgccagcgcttcccgcaattgccggtgctggtcatcaccggctacgccaatctcacgcccgagcaactcaacggcttcgaggtgttgaccaagccgttccgccacaacgaactcgccgaacgcctcgcccggctgctggaagcctcgccgtga

SEQ ID NO: 327607 - DNA, 894 bp, Pseudomonas aeruginosa; identical to SEQ ID NO: 325931

SEQ ID NO: 327608 - DNA, 528 bp, Pseudomonas aeruginosa
atgcgaaacataaccatggttgttgcggcggcttacttctgcagtggctgcgccggcgtcactgtgcattcactgggatcatcatccagtgcggactcacaggcacgcggcttccgctactggcagacggcccctttcctctttgttcgatcagatgggcagggcgggctctcgggtgaaatcaagtggcttcccgacacgacacagaagatgtccgcgcggccattcgccatcttttcaagcaacgaatcgaagttggatttcaccaacggcgtgctgacaagtgcaacgatcaaggccaatgagacggaagtcgtcaatgcgtcgctgacggccctcagcaaggtattcgtggctgctgcagatggttctgcacacacacctccgggcaggctgccccttccgcacgtctacaagatcgtcatcgaagggggcaagatcagcctgatcggaggtgccgcaaaaagcatggatggcattacggacgctgtcatccttgcgactcccgagaaaggggggcagcaatga

SEQ ID NO: 327609 - DNA, 507 bp, Pseudomonas aeruginosa; identical to SEQ ID NO: 325553

SEQ ID NO: 327610 - DNA, 351 bp, Pseudomonas aeruginosa; identical to SEQ ID NO: 325551

SEQ ID NO: 327611 - DNA, 825 bp, Pseudomonas aeruginosa
atgcaactcgcatcccgtttcgcttcccgttccccggcactgcgcagcgattacccgctgaccgatgaccaaatccgcagggtggccccgtccatcttcgcggacgccccgcacgaaagccgctccgagcggtacgcctacatccccaccgcgaccgtgttgcaggaactgcgcggggaaggcttcgagcctttcatggtgtgccagacccgcgtgcgccacgacgaccgccgcgactacaccaagcacatgatccgcctgcgccacgccagccagatcaacgggcgcgaggccaacgaaatcatcctgctgaactcccatgacggcaccagcagttaccagatgctggccggaatgttccgcttcgtgtgcagcaatggccttgtgtgcggtgacaccgtggccgacgtgcgcgtaccccacaagggcgacgtagccgggcacgtcatcgaaggcgcttacgaagtcctgcacggtttcgaccgggcgcaggaatcgcgcgatgccatgcgcgccatcaccctcgacgccggggaatcggaagtgttcgcccgcgccgcgctggccttgaagtacgacgaggacaagcccgcacccatcacggaatcgcaaatcctgatgccgcgccgtggcgacgacgaccgccgcgacctgtggagcgtgttcaaccgcacgcaagaaaacctcatcaaaggtggcctgtccgcccgcgccgccaatggccgccgccagaccacccggcccgtgcagggcatcgaccagagcgtgcgcctgaatcgcgccctgtggctgctggccgatggcctgcgccagctcaaagcctga

SEQ ID NO: 327612 - DNA, 315 bp, Pseudomonas aeruginosa
atggctaacatcggcaccttcaccgcagacaaagacggcttcaccggccagctccgcaccctgaccctcaacgtcaaggccaagctggttcccaacgacaagggcgagaacgaaagcgccccggacttccgccttcaggcggccggccacgacttcggcgcggcgtggaagaaaaccagcgaggccgggcgggattacctgtcggtggccatcgacgacccttcgttcccggcaacggtctatgcccgcctgatcgaaggcgagaacggcacgcacgacctgatctggtcgcgcagcaagcccaaggcggcctga

SEQ ID NO: 327613 - DNA, 297 bp, Pseudomonas aeruginosa; identical to SEQ ID NO: 326271

SEQ ID NO: 327614 - DNA, 351 bp, Pseudomonas aeruginosa
atgaccctgcagcttgtcaccgctgatgaacgcgctcggctgctggcccacggcgaggcgctcgccgctggccagcgcctcgacccgctgccggtggtgcgcctgtttacccccgacgcgcatgtgacctggctgctggtgtcgctcgaccccgccgatggcgatacggcctatggcctgatcgacctcggcatcggcatgccctcgctggggacggtcaggctgtccgacctggccggcatcgtcgggccgcgcaagttgccggtgcggcgggatcggtatttccaggcggtgcgcccgctgtcggagtacgtccggctggcgcaggagaatgacgcgatcacggactga

SEQ ID NO: 327615 - DNA, 771 bp, Pseudomonas aeruginosa; identical to SEQ ID NO: 326269

SEQ ID NO: 327616 - DNA, 858 bp, Pseudomonas aeruginosa
atgtccatctccgcgctgccatttcggcagcggcccccgcaagaacgcgaacagctcgacctgttccgcgccttgccgggcgacatggcaccgcgcgacagccaggacttgatggcctatccgttcttctcgctcgccaagtccaagcgggtcaagcccatcgacttccgggcgggcaacgtcacgatccgcgtggaaggcacgcaggagcatggcatcgccacgatttgggatgccgacgtgctgatttgggcggcctcacagatcgtggaggcgaaggatgcgggcctgcggccttcgcggctgatccgtgcgacgccctacgagatcctgcgcttcatcgggcgcggcaagtcgctgcgcgactaccagcgcctcaaagcggccttggatcgcctgcaatcgaccacggtggccacgtccatccgcgagacaaccgggcggcgtttgcaccgcttctcgtggatcaacgaatggaaggaactggccgatgccagcggcacaccgctgggcatcgagctgatcttgccggactggttctatacgggcgtgctggatgccgccctggtgctgaccatcgacccggcgtatttccggctgaccggcggcatcgagcggtggctgtaccgcctggtgcgcaagcacggcggcaagcaggcatacggctggcagttcgacttccgctacctgcaccagaaatccggcagcaccgccaagccctacgacttcgcctgcgacctgcgcgcgctcgtcgcgcggcagtcgctgcccggctatgtcctgggcatcgaacggatgccggacaacggcatggaactgctgaccttccggcccgtgccgcatacggcacggggataa

SEQ ID NO: 327617 - DNA, 285 bp, Pseudomonas aeruginosa; identical to SEQ ID NO: 325793

SEQ ID NO: 327618 - DNA, 558 bp, Pseudomonas aeruginosa
atgactgcatccactgcacctgctgccgcgcctgccgctggcgcggccacggctgcgccacagccatcattcatcgcaccttccggccagcccgccagcgcgccgctgacgcgcgtggcgctggcctacatcgaggcccgtttcaagctctacctgcgctttggcgaacccgcgcgcacgcaccagctcgaccgctggcgacgctgcgccatgttcctgccgggcgctgtgttctgccgcgtgcgctggcaggccaacgactacggcaccgtgcgctggcagctcatggtgatgcaagcctgcacaccgctggacgcggcgcagcgcatccccggcgtgcagcctggcgcgcgcctgctactgcacgccgagggcgacgggcaagtgcgcgccgtgctggaacgcatcgacgccatcgaggcgctgggcatcgcgcctgtcgccgtctcgcccgcgtactggcgcacgctcgccaaccggctcgctgcgcgcctgccgctgcccgagtacaccgccgagcggcacgccgcctggttggccgggagggtgctgccatga

SEQ ID NO: 327619 - DNA, 2001 bp, Pseudomonas aeruginosa
atgcaagggacgaacgtgctgttcggtcagatcgccgtggtattcggcatcgtgatcgccggagtgtggggcgccacacaatggacagcagcagcccttggctatcagctacgccttggctcgccctggttcgattttcttggcacgccgatctactacccgtggaagctgtttgagtggtggttctcttacggcgcctataccccggaaatcttcgacacgggcggagccatcgccggtggcagcggcatggtcgccgtggccgtcgccattgccatgtcggtctggcgctcgcgacaggcacgcctggtcacgacctacggttcggcccgttgggcgaatgcgcaggacattcgcaaggcgggcctcacgcagccggtcggcgtgttcctcggccagtacgatcgccagtacctgcgccatgaagggccagagcatgttctgaccttcgcgcccacacgctcgggcaagggcgtcggcctggtggttcccaccttgttgagctggccggcctcggcggtcatccacgacatcaagggggagaactggcagatcaccgccggctggcgcagccgtttcagccactgcctgctgttcaacccgaccgatgcaaagtcggcggcctacaacccgctgctggaggtacggcgcggcgcgcatgaagtgcgcgacgtgcagaacatcgcggacattctagtcgatcccgaaggcgcgctggagaagcgcaaccattgggagaagacctcgcacgcgctgctggtcggggcgatcctgcatgtgctctatgcgggcgaggacaagacgctgcgcggcgtcgccaacttcctcagcgacccggccagccccttcgagctgaccttgcaccggatgatgaccacgccccacctgggcgatgggccgcatccggtggtggcatccgctgcgcgcgaagtgctcaacaagtcggacaacgagcgttctggcgtcttgagcaccgccatgtcgttcctcggcctgtaccgcgatcccacggtggccgaagtcacgtcgcgctgcgactggcgcattgccgacctcatatccgccgagcatcccgtatcgctgtacctggtggtgccgccttcggacatttcgcgcaccaagccgctcatccgcctgatcctcaaccagatcgggcggcgcttgaccgaatcgctcgacggctctgacggcatcgaacgccgccacaagctgctgctgatgctcgatgagtttccggccctgggccggctcgacttcttcgagacggcgctcgcattcatggcgggctacggcatccgcagcttcttgattgcgcagtcgctcaaccagatcgacaaagcctacggccagaaccattcgattctggacaactgccatgtgcgcgtgacgttcgccacgaacgacgagcgcaccgccaaacgcatctccgagacgctgggcacggccaccgagctgcgcgcacagcgcaactacgcgggccaccggctcgcgccgtggctggggcacctcatggtgtcgcgccaggagacggcccgcccgctgctgacaccgggcgaagtcatgcagcttccgcccgatgaggcggtggtgatggtgtccagcgtggcgccgatcaaggcccggaagctgcgctattacgccgacgccaatttcaagcggcgcgtgttgccgccgcccgcgctggcggactgccaatacgccgacgcgccgccgctgcgcgccgacgactggagcgggctggcaatcccaccaacgcccaccgcaccagccacggcatccgccgatggcctcggttccgccgacgacggcggcccacgccgtcagcccgaactctccgaagccgtcgcctacgaccccgagctggccgcgcccgcggccgacctcggtttgctcgatgacgacgacgacctgccgcttccccttcctcgccagcttgatccggccatgcagcgcacggcccggctggcttccctcgaccccaacgacggaattgagctatga

SEQ ID NO: 327620 - DNA, 465 bp, Pseudomonas aeruginosa; identical to SEQ ID NO: 325788

SEQ ID NO: 327621 - DNA, 1071 bp, Pseudomonas aeruginosa
atgagcgccgtttcgcagttgccacccgagccacgctcgtccgctgcggcctcgctcgaccggcgcatccagatgctgcgcacggcgatggggccgctgatcgccactgcgctcgaagaccccgacgtggtggaaatcatgctcaacccggatcgtaccctttgggtggatcggctttcgagtgggcgcgcgccgatgggcgtggagatgcccgaggccgatggcgagcgaatcatccgcctggtcgcggcccacgtcggcgcggaggtgcatcgcggccagccgctgctatcggccgagctgcccgagacgggcgaacgcttcgagggcatcttgccgcccgccgcgccagggccggccttcgcgctgcgcaagcgcgccatcggcgtgatcccgctggagcggtatgtcgtggacggaatgatgaccgccgcccaggcgggctttctggtgcgcgccgtgcgcgagcgtcagaacgtcctgatcgccggggccaccagcagcggcaagaccacgctcgccaatgccttgctcgccgaaatcgccgccacgggcgaccgcgtgttggtgctcgaagacacggtggagctgcaatgcgcggcccgcgaccacgttccgctgcgcacgcgcgcgggcgtggtgtcgatgaccgagctggtgcgctcgtccatgcggctgcggccggatcgcgtggtggttggcgaggtgcgcggcgccgaggcgctggatctcatcaaggtgtggggaacgggccaccccggcgggatcgccacgatccatgccggctccgcgttgggcgcgctgctgcgcatggagcaactgattctcgaagtggcggtgaacccgccgcgtgcgctgatcgccgaggcggtcaacgtggtgatccacatcgccggacgcgggcgcaagcgccgcatcgagagcatcgcccgcgtcgtcggctccgacggcgtgggctaccaactggcggacgcgctggagacgccgtttcccgaactgccgctatttcccgaagccgcacccgctgcggcgacttccccgtcccctgaccaacctggagaactgccatga

SEQ ID NO: 327622 - DNA, 393 bp, Pseudomonas aeruginosa; identical to SEQ ID NO: 326225

SEQ ID NO: 327623 - DNA, 273 bp, Pseudomonas aeruginosa
atgagcggcccggataccttcgcggcagggttcgaggtgcctttgcatcgctcgctcaccgagccgatcttgctgggcggcgcaccgcgcaccgtggcgattgccaacggcacgctggccgccgctgtcgggctggggctgcaactgtggattccgggcgtggtgctctggatcgtcggccattcgctggcggtgtggggtgcgcgcgtcgatccgcagttcatggccgtgttcgcccggcacatcaaacaccgcccgctgctggacgtgtga

SEQ ID NO: 327624 - DNA, 2454 bp, Pseudomonas aeruginosa
atgctgaaccttgccgaataccgccagcggcccgcgctgctcgccgactggctgccttgggccggactggtcgcgccaggcgtcgtcttgaacaaggacggcagtttccagcgcacggcccggtttcgcgggcctgacctcgacagcgccacgcaaggcgagctgatcgccacgtcggcacgcttgaacaacgcgctgcgccggctgggttcgggctgggcgctgttcatcgaggccgagcgccgcgccgctgccgactacccgcactccgagtttcccgagccgctgtcttggctggtggacgaagaacgccgggccaccttcgaggaatcgggcaaccacttcgagagcggctaccacctgacgctggtgtacctgccgcccgaggaatcgcgcgcccgtgccgccaagatgctctacgagaacacgccgacgaatggcgtggactggcgcgagcggctgcaagccttcgtcgcggaaacggatcgggtctttgacctgctcgaaggcgtgatgccggaaatcgcctggctcgatgacgcgcagaccctgacctacctgcacgcgaccatctcgacgcggcgctaccgcgtgggcgtacccgaagtgccgttccacatcgacgcgctgctgaccgattcgccgctggtcggtggcctcgcgcccatgctgggcgaccggcacctgcgcgtggtgtcggtgcgtggctttccgacctcgacctggccggggattctggacgacctcaaccgcctgggatttgggtatcgctggagtacgcgctttctgtgcctcgacaaatccgaggcggaacgggaattggggcgcttgcgccgccagtggttcgccaagcgcaagaacgtcatcgcgctgttgcgcgaaacgatcttccagcaggaaagcccgctggtcgataccgatgcgaacaacaaggcggcggacgcggatgcggccttgcaggagctgggcagcgatcaagtcgccttcggctacctgacggcgaccgtcaccgtcatggacgcggacgccagcgcagcggacgagaagctgcgcatggtggagcgcgtcattcaggggcgcgggttcgtcaccatccccgaaacgctcaacgccgtggatgcgtggctgtcctcgcttccgggcaacgcctacgccaatgtgcgccagcccatcgtctcgacgctgaacctggcgcacatgatgccggtgtcggcggtatgggccgggccggagaagaacgaccacctgggcggcccgccgctgatcgtcacgcgcaccgatggcgcgacgccgttccggctggtgacgcacatcggcgacgtgggccacacgctggtcgccggcccgaccggcatgggcaagtcggtcttgctcgccacgctggcgatgcagtttcgccgctatcgcggctcgcgcatcttcgcgttcgacatgggctgctcgatgcgcgccacgatcctcgggctgggcggcgagcactacgacctgggcacggatggcgaaatcgctttccagccgcttgcccgtatcgaccgtgaaggctaccgcacctgggcggccgaatggatcgaaggccgcttgctgcatgaaggcgtgacggtcggccccgatgagaaggccgccatctggtcggcgctggggagcctggccggtgcgccggtggagcagcgcacgatgaccgggctttccgtgctgttgcagagcaatgtgctgcgccaggcgctcgcgccctatgtgctgggcggcgcgcacggcaagctgctggacgccgatcacgaccggctgggcatggccgacgtgcagtgcttcgagatggaggagctgatgcacagcaaggccgccgtcatggccgtgctgcattacctctttgcgcgtttcgatgaacgctttgacggtgcgcccacgctgctgatcctcgatgaagcgtggctgttcctcgatgacgcggtgttcgcggcgcgcatccgccagtggctcaagacgctgcgcaagaagaacgtcagcgtcatcttcgccacgcagtcgcttgcggacatcaaggattcgagcatcgcgcccgcgatcatcgaaagctgcgcaagccgcatcttcctgccgaacccgcaggcgaccgagccgcagattcgcacgatctacgagggcttcggcctcaacaggcggcagatcgagatcgtcgccaccgcgcagcccaagcgcgactactactaccaatcccgcctcggcaaccgcctgttcgacctcgacctgggactggcgacgctggccttcgcgggcgcttccacgccgcaagaccagcgcgacatggatcgcgtgctgctggacgccggcacgcccggcttcgcgggcgcatggctgcgccatcgcggcctcgattgggcggctgacctgctgccctcgttccccggcctcgcgccggtttccttcgctgaccaaccactggagaacctgccatga

SEQ ID NO: 327625 - DNA, 726 bp, Pseudomonas aeruginosa
atgaagaagcgccttgtcgccgctgccatcgcggccatgctttgcaccgccaccgcccatgcgcaatgggtcgtgatcgaccccacgaacctcgtgcagaacacgctgaccgcgatccgcacgctggaacagatcaacaaccaaatccagcagcttcagaacgaagcgcagatgctgatgaatcaggcgcgcaacctcgccagcctgccgtccagcgtcgtcggccagttgcgcgccaacctggcgaccaccgagcggctgatcgcccaagcgcgcggcttggcctacgacgtgacgaatctggatcgggagttcgcgcgcctgtacccggagcagtacgccgccaccgtcagcggcgaccagatgtaccgcgacgcccaagagcggtggaagaacacgctcaacggcttgcagaccaccatgcagatgcaggcgcaggtgtcgcagaacctgggcgaagacgaaagcgtgctggccgatctggtcggcaagagccagtcagcgcaaggcgcgctgcaagcgatgcaggccatgaaccagttgctcgccttgcaggccaagcagtcgatccagtcgcagcggctccagatcacgcaagaccgggccgcctcgctggaactggcgcggcaggcggcggccaccgagcgcgcccgcgaagtgcggcggcgcttcctcggggaaggcacgccgtacacgccgcagtccgtcaacttctaccgcgactga

SEQ ID NO: 327626 - DNA, 321 bp, Pseudomonas aeruginosa; identical to SEQ ID NO: 326323

SEQ ID NO: 327627 - DNA, 705 bp, Pseudomonas aeruginosa; identical to SEQ ID NO: 325201

SEQ ID NO: 327628 - DNA, 1377 bp, Pseudomonas aeruginosa
atggaggcgttacccatcaggaaccggcgcttgctggtgatcgatgagcggcaggcggatcgagaccgtgtatgcgggttgttgcagggaaccctagaggccgaatcgcctcccgtggcgcctgagcggggctaccaggtggatacggcgggaagcgccgaggaggccttggggcggatacgctcggccctccaggccgatgcgccgtatgccgtggtgtttctcgggatgtcgtcggtaggcgcggatattcccgttctcgagcggttctggcgtctcgactcccgcttgcaggtcgtggtgcatgcgcctcccgccgattttccgctattggcgccgtgggccgcggaagagcgcctgctgctcctcggcctgcctttgcagggacaggaggtccgccagatggccggcaatctcagcgccaagtggaacgtgacggctcacctccaattgcagatgagccggatggaggctgccatccaggagatcacccaggaagtcggccaggccaaggaggcgctggagaaagagatcggcgagcgcaaggagctggaaagccaactggtgcagacggagaagcttgcctcgatcggccacctggccgccggcgtcgcccatgagatcaataaccccatcagctacgtttcctccaactacaccaccctggaggagcacgtcaggcgtttgctggaggtacttgaagcctatgaagaggctcgccccgcgatccgcgacgaggcgctggcaagacgcctggagcagctcggcgagcgggtcgaactggccttcgtcaaggaggatgtcgctgtgttgctgcgcgaatccagggagggaatagggcgggtgcgcaagatcgtccaggacctgaagaacttctcccgcgtcgacgccgaggacgactggcagtggaccgatctgcaccaggggatcgagtcgaccctcaatatcgtcgccagcgaactgaagtaccgggccgacgtggtccgcgaatacggcgatctgcccgaggtgaagtgcctgccgtcgcagatcaaccaggtggtgatgaacctggtgatgaacgcggcccaggcgatggggcctgagcggggtcgcatcgtgattcgcacggggcataccctggagcatgcctggatcgaggtggaagactcggggcagggcatctcccccgagatcctgccgcgcatcttcgatccgttcttcaccaccaagccggtaggcaaggggaccggcctggggttgtcgctctcctacggcatcgtccagaaacacggcggcaccatcgaggtacgcagccagccgggagtcggcagcgctttccggatcgtgcttcccctggaatcgcctggcaacctggggggagcccacggaaattaa

SEQ ID NO: 327629 - DNA, 591 bp, Pseudomonas aeruginosa
atgaaaaacattctcctgctcaacggcggaaagcgtttcgcccattccgacggtcgcctcaaccagaccctgcacgaaaccgccctggcccatctggaccgccgtggcttcgacctgcgccagaccttcatcgacggcggctatgacatcccggcggaggtggacaagttcctctgggccgacgtggtgatctaccagatgcccggctggtggatgggcgccccgtggacggtgaagcgctacatcgacgaagtcttcacggccggtcatggcagcctctatgccaacgacggccgtacccgctccgacagcacgcagaaatatggcagcggcggtctggtgcagggcaagcgctacatgatctcggcgacctggaatgcgccgcagcaggcgttcgacgatccgagcgacttcttcgaagggaaaggcgtggatgcggtgtatttccccttccacaaggccaaccagttcctcggcatgtccggcctgccgacgttcctcgcggtggatgtgatgaagcgcccggacgtcccggctgccgtcgctgcctaccaggcgcacctggacagggtgttcgggcgcgccggctga

SEQ ID NO: 327630 - DNA, 897 bp, Pseudomonas aeruginosa
atgaattcggcgttggccaatgccttcaaccgcttcgtcgagcgtatccacgaatcgatccgcgaggtcgccggcaccgctcgccaactgcacgacgtggcgcaactggtggtgaacgcctcgaactcttcgatggccaactccgacgagcagtccaaccgtaccaacagcgtcgccgcggcgatcaacgaactcggtgccgccgcccaggaaatcgcccgcaacgccgccgatgcctcgcaccatgcgtccgacgccaaccaccaggccgaggacggcaagcaggtggtcgagcagaccatccgcgcgatgaacgagctttccgagaagatcagcgcctcctgcgccaacatcgaggccctgaacagccgcacggtgaacatcggccagatcctcgaggtgatcaagggcatctccgagcagaccaacctgcttgccctcaacgccgccatcgaagccgcccgcgccggcgaggccggacgcggcttcgcggtggtcgccgacgaggtgcgcaacctggcccatcgcgcccaggagtcggcccagcagatccagaagatgatcgaagagctgcaagtcggcgcccgcgaggcggtggccaccatgaccgaaagccagcgctacagcctggagagcgtggagatcgccaaccgtgccggcgaacgcctgagcagtgtcaccggacggatcgccgagatcgacggaatgaaccagtcggtggccactgccaccgaggagcagaccgcggtggtcgactcgctgaacatggacatcaccgagatcaacaccctcaaccaggaaggcgtggagaacctccaggccaccctgcgcgcctgcggcgagctggaagcccaggccgggcgcctgcggcacctggtggacagcttcaagatctga

SEQ ID NO: 327631 - DNA, 1440 bp, Pseudomonas aeruginosa
atgacgcaatccgatcagaaagcgccgccgtattacccgaaaagccacttgttggccgccagcggtgttgcagcgctcctcagtttggcactactggtgttcccctcgagcgaagtcgaggccaagaggaccacgctcaatctggagcttgaaagcaacaccgatcgcctccttcaggagaaagacgacctcctgccgcaatcggtcaccaattccagcgacgaaggcacgcctttcgctcaggtagaaggcgcctccgacgacaacaccgccgagcaagactcggacaagccgggcgcatctgtagccgatgccgacaccaagcccgtcgatcccgagtggaagaccatcaccgtcgccagtggcgatacgctgtcgaccgtattcaccaaggcaggcctttccacctcggccatgcacgacatgctgaccagcagcaaggatgccaagcgcttcacccatctgaaggtcggccaggaggtcaagctcaagctcgaccccaaaggagagctgcaggcgctgcgagtcaagcagagcgaactcgagaccatcggcctggacaagaccgacaagggctactccttcaaacgcgagaaggcccagatcgacctgcataccgcctatgcccatggccgcatcaccagctcgctgttcgttgccggtcgtaacgccggcctgccctataacctggtcacgtcgctgtcgaacatcttcggctacgacatcgacttcgccctcgatctgcgtgaaggcgacgagttcgacgtgatctacgaacagcacaaggtcaacggcaagcaagtggcgaccggcaatatcctcgccgcccgcttcgtcaaccgtggcaagacctacaccgccgtgcgctataccaacaagcagggcaataccagctactaccgcgccgacggctccagcatgcgcaaggcattcatccgtacgccggtggatttcgcccgcatcagctcgcgcttctccctgggccgccgccacccgatcctgaacaagatccgcgcgcacaagggcgtcgactacgctgcccccatcggcacaccgatcaaggccaccggagacggcaagatcctcgaagccggacgcaaggggggctacggcaacgccgtggtgatccagcacggccagcgctatcggaccatctacggacacatgagccgcttcgccaagggtatccgcgccggtaccagcgtgaagcagggccagatcatcggttacgtaggcatgacgggcctggccaccggcccgcacctgcactacgagttccagatcaatggccgtcacgtcgatccgctgagcgccaagctgcccatggcggacccgctcggtggcgcagatcgcaagcgcttcatggcgcagacccagccgatgatcgcgcgcatggatcaggagaagaaaaccctcctggccctgaacaagcagcgctga

SEQ ID NO: 327632 - DNA, 279 bp, Pseudomonas aeruginosa
ttgggcctggcgccctcgctcaactggggcaacggcctggctctggccgaaccggtccacggcagcgccccggatatcgtcggcagcggccgcgccaaccctctggccgcgatcctcagcgccgccttgctgctgcgccatcactggcaacgcgaagacctggcgctccgggtggaaagagcggtcgagcaattcctgcgcgaagagtggcgggaagacttggcaggggagaccacgcgggtggtggctgaaggtgtgctgacgagactcggccaatag

SEQ ID NO: 327633 - DNA, 309 bp, Pseudomonas aeruginosa
atgaccaagcaacgtcgttcctttacgcccgagttcaaacgagaggccgcctgcctggtactcgaccaaggctacagccatatcgaagccgcccgttcgcttgggctggttgagtcggccctgcgccgatgggtaaaccagctccaagaggagcgcctgggcgtgaccccgaagagcaaagcactgacgcccgaacagcagaaaatccaggagctggaagccaggatcgaccggctggaacgggagaaagcgattctaaaaaaggctaccgctctcttgatgtcggacgaattcaatcgtacgcgctga

SEQ ID NO: 327634 - DNA, 2316 bp, Pseudomonas aeruginosa
atgaactacacggataatgacctattcggtggcgtagatatcgctgctgtaattcgtcaatttctgcagcaatccagcactggggagctcaaaactaaggggctttatccggagcaattgggcggttataagctggaggtcagcttcgggcagggtaatgtgtccggcattccttggattgcggtgctgggcgaagggcagaaggtttcacgtggtatctacccggtttttctgtattacaaggctgatgaccatttgatcttggcctacggcatcagcgaaacagaggctccgccatttggttggggagctgccgtagccggggctccgagtatttcgcagcgtatgggggggcatggctttgcggttaaacgctacggggactcttttgtcgctgctgagtactcgcaactgacacagcgtgtgcagagcgcttccttcgatcagcaggtgaaggatgatttggccaatctgctgaccgtatatcgtcaagtgctaagcaatcctccggtagcagaagggcaaactctggctcacgttgaccctgccgaagagcatcctgaaaatgctgtggtgagcgttaataacacccccctgaatcaaatcctctttggcccgccgggcaccggcaaaaccttccacaccattaatcaggcgctggccattctggcaccggactttctggcgcagaacagtggcaatgacccggcgacgcgtaagcgtctgaaggtggagttcgaccgtttcgtgaccgccgagcgggtgcgctttgtgaccttccaccagagcttcagctatgaggactttgtagaggggctgcgggcggattccgatgcggaaaccgggcaggtgaagtattccgttgagtcgggagtgttcaaacgcatttgcgacgatgcgcgtacgcgtccggcttccgaccttggggtgcgggccaatcctgcgatctggaagatttccattgcaggcactggcgcatcgcccacaaagagctattgcctggcacatggcgaggcgcgtattggttggggggaaactggtgatctgcgtggtgactttgagcagaacacctactaccagtcgctcggcggtggcgataaaggcacgctcaactacttcgccgagcagatggtggtgggtgacatcctgctgtgcatccactcggccgagcaggtcggctcgataggcgtggtggccggcgactaccgttatgaggagcaggtgccggccggggtgatcggcgactaccagcatgtgcgctcggtgcgctggctgtatcgggatatcaacttgtccattctgccgctcaatgacgagcgccaattcacgctgaaaaccgtgtatgcgatgagccgcttcacctgggctgatctgctgtcatacctgcagcagcagggcgtgaagccggttgagtcggtgacggtggcaggggcagacagtgagccctatgtgctgatcattgatgagattaatcggggtaatgtttcccgtatcttcggtgagttgatcaccctgatcgaggagtccaagcgcgagggtgccgatgaggcgctgagcgtgaagctgccctattcgaaaaagcctttcagcgtgccgaagaatgtttatctgatcggcaccatgaacaccgccgaccgctcattggccgggctggatattgctttgcgccgtcgcttcgtgttccgagagatgccgccgcggcctgagctgctggatgatgtcgaggtggaagggctaaatattggtcagctgctgcgggtgatgaaccagcgcatcgaggttctgctggatcgcgatcattgcctgggccatgcctactttatgtcgctgaaggggggcgccacactggcacggctggaggcgatcttccgcaaccagatcctgccgctgctacaggagtatttcttcgaggattggcagcgtatcgcttgggtgctgaatgaccagcgtaaggcgccgaacgatcagttcattcaggagcggagcagtttcgctgaagcactgtttggccgggacgtggggcaaggcctggcgggcagctactggacgctaaatgatgaggcgttcgatcgaatggaggcctatctgggcattctcgatgcctcacgggtgactgctgatcgggtggtaaagcgcgaagcagttcagggtgagttcaccttgcgagagctggccagcggctccgtagaggtgtggcgtgcggatatcttgcagcagccgactaagcccattttacgccagttggctgaacagcttggtgttagccagcagaacagcagcggcaaccttttgaatacccgaagcctggggctgtag

SEQ ID NO: 327635 - DNA, 699 bp, Pseudomonas aeruginosa
atgttcaacgatatcgacaccacccaacgctacccactccgtcatccagccaataccaatctgcatctgcactacggagagaccttcgaaggctttcccattcagagcaaagtaggcccctttattcgggagtacctgtctgatctccagcgcactatcgacctggcattggctgagcatccgagggtcttggccttcagagtggatctgcgtttgcctcagggtgtcgagctacccgacttcgcctatacgaatcaggtcatcagccgtttcttcgaatcgtttacgaagaagatccagtaccaccaggagcgggtggctgagcgtggctactcgcgtggttgcaaagtacggtacgtctggtcgagagagatcggtcaggccggccggcagcattaccatctgctgatcctgttgaaccgcgatgcctactacaccattgggcgtctgggctcagaccgggtgaacatgatcagccgtatagaggagtcctgggctggtgcgctggggctgcccgtcgacctgatgacggggctggtgcatatcccgaagaatgctgagtacctgatcgatcgagtaaagcgtcaaggtaagggcgatgagctggctgatctgttctaccgagccagctacctgtgtaagaaagcgaccaagtcctatggggatcgtcaacgagggttcggtaccagccgagggtag

SEQ ID NO: 327636 - DNA, 231 bp, Pseudomonas aeruginosa
atgcgaatcatccgtctgaaagaagtcatcgactcgaccggcctgtctaggtcgaccctgtacaagtacatctcggaaggcaccttcccgaaaccggtatcgctgggcgaccgctgcgtcggctgggtcgatagcgaggtgcacgactggatcctggccaggattgaggagcgggacctggccgagggtactgcagtacgttccaccggccacctgagcatggccagctag

SEQ ID NO: 327637 - DNA, 1239 bp, Pseudomonas aeruginosa
atgctcagaaagcctgactggctgggtgcgccttatgagatcaagtcggtagcgaaggagctctgcttgacggagaggttcgctagagatgcgtcgagggagctgatcagggctgggcttctgatagaaaataagcagcacggtggtcttgggcgcccaggtgtcggttacgtagcctcggagtacgtacgcagagtgctttgcgaagtggacagagatcttgcccaccacgagctcatcgttcgcctttttcttgagccgaatatctatgcgactgggctggaggccacgtcgacatcgatagctcagaaggaaaaatcatcccgtccagctatccgcaaagatggtcggcctgccgccccgggggctaagggacggctgggcgctgcaagtcgtgttttattggcggctcttcttagcgaggccgataagtgcggtgtagtggcggagcttagcgggcgcaagctgagggaaatgacggggctcgattcctcgtcgatcaagcaccaattgaatcgtctgttgagcttgggttttcttcgaagctatgtgccgggggtgtcgaatggggtcttggtcggctcgaagactatgagcatctactacctgaacctcgaccacccccagctcccagtgaggcaggggaagcaggagcggggcttggtggtgtatgcagttaaagggccgcaaaagtacgacctggtcgaagctgcgctgccttcaacggtgcagctagcaggagtggataatcaagttaaagagatgctttatcacaggctggcaagtcatgcgtcacagctgctgacggctctctggtctgatcctaagtgcgatattgccgatctgaaggctgcaggcttcgaaagcgttggcggtaagtcaatcgagccactgacggttagccccgaaccgagcgagcctgaccgatggagtgacttcaaggaaagcttgcatgctgaggcgtgtcgatgggccgaaagcatctacaaagggctgcgccgtatgaacgtatggccagaatacagcccacagctggtgaggctcatacctgcacctgacgcaggggatggctggagcgtcgtgtcgctgattgtctatccagcgcccaaggccagtaatacatgcctttgggtgtgggacgtgcgcggagggaggtctgacccgtatgtgggagaggaggcgttgggtttggagctgcgctacaggctggcgctcttgaccaagaccaaggtgccctag

SEQ ID NO: 327638 - DNA, 675 bp, Pseudomonas aeruginosa
atggagacgaccgggaataagccgggctggctaaagaagctcgatcgagaggagacagtgtgggctgcaaactacctgctgaatcgatggcctgatgaacttgagcctaagcccgacccgtcgcccgccatggttttcatcacctttggcgactcgatccgcaccctggagtcagatgtagcaggcgtgaagctcattgaacgactgagaaacgccatcagacagcggcgctatcggcaagcagaaggcggtcgaaagacgtgctcgttcaccctgcctctcaacaccaaggacaagctaaaaatccttgcaaaaaatgctgacaccaccgaaacagcgatcatcgaaagcctgatcgcaggcgccctgcagtcgagccaagatcagaaagagggaaagcgacgcgaggccctggagaaaacaatcacccgcaactcaagcaagcttgcgcaggagctgaacaagatcaggctcgaagtgactaccaagcacctggacgccaacctgagacgactggctggctggcaggtatacctcaacgagcagacccctgaactttcggctgagcaggagtccgaagctgacaggattgccgagaagcgaatgcgcgagatccaggaggcaatcagggccgtcgtagcgaagcatgaaatgatgagccctaggaacatctga

SEQ ID NO: 327639 - DNA, 1491 bp, Pseudomonas aeruginosa; identical to SEQ ID NO: 325959

SEQ ID NO: 327640 - DNA, 1623 bp, Pseudomonas aeruginosa
atgtcgatcttcgaacagggtctcgcgcccgccgccgtcaaccacatcgccctgacgccgctgagcttcatcgagcgcaccgccagcgtctatccgcactaccccgcggtgatccacggcaacatccgccgcgactgggcgcagacctaccaacgctgccgacgcctggcctcggccctggccgggcgcggcatcggccagggcgacacggtggcggtgatgctgccgaacatccccgagatgctcgaggcgcactatggcgtgccgatgatcggcgcggtgctgaacaccctcaacgtacgcctcgacgccgaagccatcgccttcatgctgcaacacggcgaagccaaggtgctgatcaccgactacgaattccacgaggtgatccatgccgccatcggcatgctcgaccacccgccgctggtggtcgacgtcaacgaccccgagtatggcgaaggccgcccggttggcgaactggactacgaggcgctgctcgccgagggcgacccgcagttcgcctgggaatggccccgggacgagtggcaggcgatctcgctgaactacacctcgggcaccaccggcaaccccaagggcgtggtctaccatcaccgcggcgcctacctgaacgcgctgggcaaccagatgacctggtccatgggccagcacccggtgtacctctggaccctgccgatgttccactgcaacggctggtgctatccgtggacggtgaccgcgctggccggcgtccacgtctgcctgcggcgggtcgatccgcagaaggtcctcaccctgatccgcgagcaccaggtcagccacctgtgcggcgcacccatcgtgctcaacgccctgatcaacatgcccgactcggccaaggccgccatcgaccacccggtgcatgccatggtcgccggcgccgcgccaccggccaaggtgatcggcgcggtggaagagatgggcatccgcgtcacccatgtctacggcctcaccgaggtctacggcccggtcacggtctgcgcctggcacggcgagtgggacgaactgccgctggagcggcgcgccgcgatcaagtcgcgccagggcgtgcgctacccgaccctcgaaggggtgatggtggccgacccgaagaccctcgagccggtgccgcgcgacggccagtccatcggcgagatcttcatgcgcggcaataccgtgatgaagggctacctgaagaatcccagcgccaccgaggaagccttcgccggcggctggttccataccggcgacctggcggtctgccatccggacggctacatcgagatccgcgaccggctcaaggacatcatcatctccggcggcgaaaacatctccaccatcgaactggagggcgtgctctaccgccacccggcggtgctggaggcggcggtggtggcgcggcccgacgaaaagtggggggaaacgccctgtgcgttcattaccctgaagagcgatcatcaggggctcgccgagagcgagatcgtcgcgttctgtcgcgaacacctggccgcgttcaagattccgcgtaccgtggtgttctcggaactgccgaagacctccaccggcaagatccagaaatacgtgctgcgcgagtgggccgccgccctctga

SEQ ID NO: 327641 - DNA, 1044 bp, Pseudomonas aeruginosa; identical to SEQ ID NO: 325702

SEQ ID NO: 327642 - DNA, 591 bp, Pseudomonas aeruginosa; identical to SEQ ID NO: 325499

SEQ ID NO: 327643 - DNA, 1077 bp, Pseudomonas aeruginosa
atgcgcgaagaagaccgcgccttgctcgaggaactcctgctggcacgtggccccggtggccaggaagacgaggtcagggccatctgccagcgggaactcgagggctgttgcgacgaggtcggcagcgatgccgccggcaacctggtcgcgcgcatcagcccgccgcacctgccgcgcgagcaggcgcggcgggccgcggtgcggctgctcgcgcacctcgacgagatcgccatgatcgtcaagcgcgtcgaggccgacggtaccctgcgcgtagtggcgctcggcggcgcccagccggtgagcttcggcgtctgtccggtacagatcctggccggcgaggcggtactcgacggcgtgctgtcctacggcagcatgcatgctaccggcgagtcgccgcagggctccgacgtgctctcgggcgcggtgcactggcgcgacgtacacgtggtcacccggcgcagcgccgaggaactggcgaacctggacgtgcgaccgggtacccgcgtggtgctcaaccgtctgtggcggcgcccgttgtacttccaggattgcgtcgccgcgcacttcctcgacgaccgcgcaccgctgctcgccgtgctcggcgtggctcgcgagatcgcccggcgccgcgacgagttgcacggcgacctctacctggtgctcaccaccatggaggaggagagtaacgccggcgcgctgttcgccgcgcgccgactgccgggcgacatcagcatcgcggtggaagtcggcccaacggtagccgaatacggcacccggctgtgccgcgacccgatcgtcaacagcggcgactccaagggttattacagccgccatgtcaccgaccgcctgttgcgggccgccgaacgctgccagtaccagccgcaggcggcgctgctggtggacttcgcctcggacgccagcgccctgctgagccacggcgaggccgcgcaggtcggctgcatcggcattccgaccgagaacacccacggtttcgagatcgtcctggaagagggcatcgaggcttgccggcggacgctggtcgagttcctcgtgcaaccgccggacgacgaagcctga

SEQ ID NO: 327644 - DNA, 939 bp, Pseudomonas aeruginosa
atggatcgcccccgtttctccagcgctttcctccatccccgctactggccgctctggttcggtctggggctgctctggctggtggtgcagttgccgtatcccgtcctgctgatgctcggccgtggcctgggggcgctgatgtaccgcttggtcggctcgcgccgcgagattgccgcgcgcaacctcgaactgtgctttccggaaaagtcgcccgccgaacgcgagcgtctgctgaaggagaacttcgcctccagcggcatcgccttcttcgagatggccatgagctggtggtggccgaaggcgcgcctggcccgtcttgcccatatagaaggcctggagcatctgcgcgaggcccaggccaagggcgagggggtgatcctcatggccctgcatttcaccaccctggagatcggcgcggcgctgctcggccaggtgcacaccatcgacggcatgtaccgtgagcacgacaacccggtgttcgactacatccagcgccgtggccgcgagcggcataacctcgatgccaccgccatcgagcgcgaggacgtgcgctcgatgctcaaggtgctgcgtggcggccgcgccatctggtacgcaccggaccaggactacggcgccaagcagagcctgttcgtgccgctgttcggcatcccggcggccaccgtcaccgccactaccaagttcgcccgcctgggccgggcgcgggtgttgccgttcacccagagccgcctggccgatggcagcggttatcgcctgaccatccacccgccgctggaggacttccccggcgagagcgaggaagccgattgcctgcggatcaaccagtgggtcgagcgctgcgtgcgccagcagcccgagcagtacctgtgggcgcaccggcgtttcaagacccgcccgccaggcgaagccaagctctatccgaaacggcgcaagcgctga

SEQ ID NO: 327645 - DNA, 2325 bp, Pseudomonas aeruginosa
atgatccaagaaactattgcccagcttaccgggcatttgaagtttgttgttgactcccgcccactgcgtgaattcgaacgcaatctagccagagtacagaccaagctaagccagtttgccaagactgcaaaccagaagattcaattcaagcccatgctgaatgccaatgtaatggcccaacagaagggtgcatttcagcaactaatgcagcaagccaagcttcagcgcatcactaacgataacgcccatcgtagtgttatggctaacatgaaacagcagcaacaggccgctatgggtaatgccaagcttcagctagctaatgcccgcattcagcagcaagccgctattgctggagcccgcctgacagcagcaacagcagccgctgagcgtagagcccaagctgcccgtctgacaatgaaccaacgtattgccgctgctactacccgtcaacgccgtctagatgaactccacgccatccgcgtacagagggctcaactcggcctacaacgcgctcaggcagcttctagagccggaggcggtgggttcggtggggtcggagtcaatgctggtgctatcgcttccatgatgcccggtggtgggttctcttccctgatctctggtagtggtgctgccgctgctggtctgggagcgctggctggtgctacagcaggcgcaatcatcggcctccgcatgctggctacagaagctcagaaggctggagactggcaggctcacgcatccgcacagatgaaggtgtttgatagtcaagctgtccagcagaacatggaatggctcttcaatatcgccaatgacctaggcgtctccgcccgggacacacagcaaggcgtaatgcgggctcttattggtatgcgtgatggcggcatgagcacaaacgcagccaagcagtctacatacgatgtaatggcctatgcccgggcttccggcctagacacagccactgtagacctcgtattccgtgcgatgggccagatgctgtcgaagggtcaagtttatagtgaagagcttaagtctcagttcgccgaacatatgcccggagctatgaagattgctgctcaagcttgggcagaactaaacaacctcccagccgacgaaggctctatgaaacgcctttccaaggatatggaagatgggaagatcgccggggctatggtggctccattcattgagcgcatgacctcgattatgggtagtcgtgccaacgatggaggccgcctcgatatcatccggcagagcggagacgcagcaatcgcccgccgtgagaacgtaatgcaacagaacctagccggtgcatggaacgccaatggcggggaactgaagaacgctgttcaagagttccaaggtgcggcggttcctcttctccgtgagcttggccctctgctaaaagctctcgctccgtacagtgctgctatcgtcaagagcactacggatatggccgtttctctggctcagttccttccggggattacagccgggatcgaaggattctccgagaacccatacttcaaacgaatctctgagtctatcgataagtataaccaagctttcgccagcttcttcgacgtagttaagccagttctaaccggacctgttgccgaccttgctaagttcctgcttggtggcgttgtcgaggttatcgctagacaactggagttcattggcacagtaatcaacgtagctgcccgggcaatcgaatggattgcaaacaagatgggtgcaaacttccgcccagcctctcaacagcgttccgctgaaaagggagccgagcaagccgcacgcaacatgccttctctggttaaacgtcgctggacagaagaagagattgatgcctccgcttcggaacaacagcgtcgagtccgcaggaatcagaatgcttactttgatcagtatgtgcaacagatcgatagagaggctgccgaactcttcgcccgtggcgctatgggtccaatgtctgctaattctttcaataagctagacccaatggctcgatacgaagctgtatcggctgctaagggccgtgagcttgcctctggtgttacttctgctccatccggctacctagatagtcagaagatgctagacacaatcaagagcgttaacgacagcacagttcaggctatcaaacaggctggcattgatagtgccgcagcaatgcgggaagccaccgaagctatgagtcatccacaagctccagtcacattcaatatccacggtgcaactgacccacacgaagtagcacgggaagttaaccgcactttggatgaacgtcaacgtagggaagaagccgcagccgggcaaggattctaa

SEQ ID NO: 327646 - DNA, 507 bp, Pseudomonas aeruginosa
atgactaaacaaatccgcctaagcaggcctcagaaagagttcttcactaagcacgttaatagcctgctattcaacggactggtagaaaccttctctcaagtgccgggagactacacaagcgagcagatcgccgacttcgttcttgctcaagaggctgaggaaatggaaaccctagtaaaacagttcggctactccgtcctctctaaggttgacttccgcacctacaagagggttatggatttcatcgcttccgatgaatacgcctctgttcttcaggctatcgaagaagccagcccggctatctctgacaagtttgctcagatggaaatcgatttcagcgaggctcacgcagagcaatacatggaagctgtatttaaggcatcgaccgaggatatcgaagctaccgccgacgctgccgggatgcaggacacagaaatgagggaagctcttaaagggttccttgagaaagaaatgtctaaactccttggcaagatgaagggggtttaa

SEQ ID NO: 327647 - DNA, 387 bp, Pseudomonas aeruginosa
atgaaaaagcaattgatttacctcgctggtgccctcggcttcgctagcatcctcgccatgggcggcgcagccggcatgcacatttacaacaccatgaccgctccactaacccctgagcagaaggccgccaagattacggagattcgcctagaggttgaggaagagtcccgcaagcggtatgaggctgtgcaggccgatcctaatgccctcccctctgacagtgccgttgattggaaggctgctcaggcttgtgcggattactaccatgccaactctttcgttctttctacggaagttttcggaatctgccacaagctggccactcatggccctaacagcactccgctgttcttccaaatgcaagaacgaattgccgaggtaaaatga

SEQ ID NO: 327648 - DNA, 192 bp, Pseudomonas aeruginosa
atgactgagaatgacctactgaaacagattcaagacagcttcgataacatcgatagctttgcctctgccaatctccgtgtgaatatgaaacatgattttctagccgctctagctgctcaagaaggaccattctccagtttcctagatgacgcagacgattacataaacgaagccgaagagagcttcgaataa

SEQ ID NO: 327649 - DNA, 744 bp, Pseudomonas aeruginosa; identical to SEQ ID NO: 325645

SEQ ID NO: 327650 - DNA, 1026 bp, Pseudomonas aeruginosa
ttgagcaagcgtgtccgctcctccctgatcctgcccgccgtctgcggcctcgggctggcggccgtgctgttgagcagttgctccagcaaggcgccccagcagccggccaggcaggcgggcatttccgggccgggcgactattcccgtccgcatcgcgacggcgccccctggtgggacgtcgacgtgtcgcggatccccgatgcggtgccgatgccgcacaacggttcggtgaaggccaacccctacaccgtgctgggcaagacctactacccgatgaacgatgcgcgggcctaccggatggtcggcaccgcgtcctggtacggcaccaagttccacggccaggccaccgccaacggcgagacctacgacctctacggcatgaccgccgcgcacaagaccctgccgttgccgagctacgtgcgggtgaccaacctggacaacggcaagagcgtgatcgtccgcgtcaacgaccgcggcccgttctattccgaccgggtcatcgacctgtccttcgccgcggcgaagaagctcggctatgccgagaccggcaccgcgcgggtcaaggtcgaaggcatcgacccggtgcagtggtgggcccagcgcggccggccggcaccgatggtcctggcgcagcccaagcaggcggtggcccaggcccccgctgcgacgcaaactcaggcggtggcgatggcccagccgatcgagacctacaccccgccgccggcgcagcacgcggccgccgtgctgccggtgcagatcgactcaaaaaaaaacgcttcattaccagccgatggcctgtatctccaggtgggcgccttcgccaacccggatgcagcggagctgctgaaggccaagctgagcggcgtgacggctgcgccggtgtttatcagctcggtcgtacgcaaccagcagattctgcaccgggtgcggctgggaccgatcggttcggcggacgaggttagccgcacccaggacagcatccgcgtggccaaccttggccagccgacgctggtacgccccgactga

SEQ ID NO: 327651 - DNA, 414 bp, Pseudomonas aeruginosa
atggaacgcgcaatcgatctgtcggcctggggcgagcgtccgcctgtcttcgtccagctgctggccgccgaggtggcccgcagcagccagacgaaagccggcgaggcaatcggcatgagccgttcgaccgtcagcaccatcctcgccaaccgctacccgtcgccctcgacgatccgcgtcgagcgtcgtgtcctggccgcgctgagccgtattgagtgcccggccttgggcgaggcggtgacctcggtcgagtgtagcgagtacctccagcggccggcgccgctgaacaaccccgtcgcgatgcgctgctggaaagcgtgccgcgcctgtccacgcaacccgcataccgcccccatgaaacgagaggaacaaggccatgagaaccgcattgcccttgaaagtcttgacgcctga

SEQ ID NO: 327652 - DNA, 312 bp, Pseudomonas aeruginosa
atgagaaccgcattgcccttgaaagtcttgacgcctgacttggccttgagcctgcgcactttcaacgatgccgcccggctgctccagcgcatgggggtccgccttcatcgtctggagccgacagaggggcgcgtgaccatcgccgcagatgacgcccgccggctcctggagaaggggctcctgctgggtttccagcgcgacgcctcggccggcagcacccgttacatcacccgcttccagggcatcaccctggcctggagcgaaccgatcagctaccgcgacttcgccggcagcaaccccgtaattcactga

SEQ ID NO: 327653 - DNA, 204 bp, Pseudomonas aeruginosa
atgggcgtcctgaccgaaatgaagtggccgaaaaccacactgctggacttgctgaacgacgccgagcggctcgacgtggacctgttcgacgtcgtccatctggagttgaacagcggccgggactacctggtggctgtgatcactggggagaaagcggccaatgccgccgaactgctggagcggctgcgctccaaggacgtgtga

SEQ ID NO: 327654 - DNA, 309 bp, Pseudomonas aeruginosa
atggcccgcaaccgcgcgcaacagctgtgcatcgtcaccttggactatcagcgcttcctgttaccccaggctgatgcactcaagctgatagacatcatgagtcgagccgcagaggttcaggccgactacgcctctggagctgggttcaagtacaccgtcggcgaagtgccggaagtcgagttgacgatagtacgccccagtcaattggtcatgccgcaggccgagccggccccagctacaccacgcgctcgccggaagtctccggcccaggtcacgcacgatgccattcggctgctggaggggctctga

SEQ ID NO: 327655 - DNA, 282 bp, Pseudomonas aeruginosa
atgaccaagacgttcgccatgtgccgcatcgacggcctgatcgagctgcgggaggaacacccaggcgagggctacttcgcccttgccgtgggcgacttggccagcgtgcgggcggcggtctttgcaaccgctgagccgcaccaggtcggcaagaaagtcgcccggcgcgtgccgggtgtgagccccgacgccaccgaccgcgaaaacctgggctccatcgcccggtacatccagaccctgggccagcaggatcggcccggcttccgtgcgctgggggtgtga

SEQ ID NO: 327656 - DNA, 402 bp, Pseudomonas aeruginosa
atgacctggcgcctcggcttggccctggccctgttcctggtgatggttgcgaccagcgcctggtggagtggtcgcgtggcgggcctggccgatgggcgcgccgcctgcgccgacgcacagacccgcgcctaccgcgacgtcctggagcaatcggcggcacaactgaaggcggtccaggacaccagcgcggctcttttccagcgcctggcccagcgggccgacagcgaccaacaaactactcgggagcttcgccatgccctggccgaaaccgctgctgatcgcgctgcctgccgctttcctgctggcgtcatgcagcagctcgaaaccgcccgtcaacgtgccgcccaggccactaccggcggccttggctcaaccgtgcccgaccccggtggcggtgactga

SEQ ID NO: 327657 - DNA, 495 bp, Pseudomonas aeruginosa
atgatggactggattgctggtgcctacggcggcatcaaggcggccactgacattacgcagagcatgctcacgctcaagacggatgcggctgtaacgaccaaggtggtcgaactgaacggcgtgctgctcgggctgcaatcccagctgaacagcgcccacgcggatcagacgacgctgacccgccgcataggcgagctggaagccgaaattgctcagttcaaacgctgggaacaggagaaagagcgctaccagctccaccagacggaagcgggtggacttgtgtatcgcataaagccagaggttcaaggcaccgaacctctgcatcacatatgtgccgattgctaccaaaaaggaatcaagaccattcttcagccttgcaatgatggctggtacaaggccttgaaatgtcacccctgcaattctgttgttcatgtcgaaaagattcctgatagcggacccgtggttgtcagtcggtacgaccccttcagcgaatag

SEQ ID NO: 327658 - DNA, 237 bp, Pseudomonas aeruginosa
atgaagttcatcaaatacctcagcaccgctcacctgaactatatgaatatcgccgtttacgaaaatggcagcaaaatcaaagcccgcgttgagaacgtcgtaaacggcaaaagcgttggtgctcgtgattttgactcaacggagcaactggaatcctggttttatggtctgcctggcagtggcctcggtcgtattgaaaacgctatgaatgagatttcccggcgtgaaaacccctga

SEQ ID NO: 327659 - DNA, 180 bp, Pseudomonas aeruginosa
atggaaaccgtgaaggtcaccatcaccgccgagaaacccaatcacacccatgccggcaagccggtggcgcagggcgacgagatcgaagtcagccgcgccgatgccgagttcctgctgcgccgtcaactgatcaccaagattcccgccgagcccaaggccgacgagaaacgcgacaagtaa

SEQ ID NO: 327660 - DNA, 771 bp, Pseudomonas aeruginosa
atggcacaggaaacgtatttctacgggcaaggcgagattgacgccgcgcctatcgtcaacggcgtcctcggcaaatggcgctggattcaagatgtctcggccatgagcatccagctcgcagtcgagaaggtcgagcacaaggaaagctacagcggccagaaagccctggcacgcagcttccctatcggcaagaccgccaccgtcaacatcaccctgcacagcatcggcccggacaacctggcgctcaccctctatggcaaggtcgtggccaaggcggcgggctccgtgacgggcgaggtactccccgccgacctagtggctggcgatgtgatccgcttggccaatttcggcgtcagcgaactggtcatcaccgacagcgcgagcagcccggcgcccctcgacccgcagtattacgccctgcgagccgatggagcctacggcgaggtccaactgctgggtctgccgacgccggccccgacccagccgttcaaagcggcctatgagtacgccgccaccaagcaggtgggcatgttcaccgcgccgcagccgaccgtcgccctgcgctacaagggcatcaacctggccgaaggcggcgcgccggtcatcgtcgagctgtacaaggtcgcgaccgacccgctccaggagctggcattgatcagcgacggcaataccgtcgccggtatgcagatcagcggcggaatcctgctggacaccagcaagccggataccggcgacctgggccgtttcggccgcattatccagttggggtaa

SEQ ID NO: 327661 - DNA, 477 bp, Pseudomonas aeruginosa
gtgaatcctcgcggccagccggccgactcggcgcccgacgacagcctgagcgtgctgttccctgaccgtcaactggcggtcgggggcgtcgaggtgaccgtccgcgagctgagtttcagcgagcaactgcgccacaaccacttgctcgctccgctggccgatgccctggcggcagttcccccggagcagctcgacgggccggagtcaatcaacgtcatcttcgacgccctggcccggcacgctgacgcgctgcgcgagctgctcgccatcagttgcggccagtccgtggactgggtggacgcgctgccggcagatgacggcgaagccctggtactgacctggtggacggtgaacaacggttttttcgtgcgacggctctggcggcctcgcctgctggcgatggcactgggcaacccgcgccctggagccgagtcttcgccgatctcgtccgcgccggccactgccgcgaaaccctag

SEQ ID NO: 327662 - DNA, 957 bp, Pseudomonas aeruginosa
atggccaccgaattcggcaccgccacgaaccaccagaacctggtcgagcgcctcgtccagttcctcactgcgaaccccgacctggtcgcggctgggcaggcttacgagaaggttttcgacaacagcatccccgcgtccggcactgcgatagccgtgcgccaggtaacgctgcgcgcccccggcctgggcggcaccgacagtatctatatggggattcagagctacggcgatacggcactggactactacaacctgcgcttcatgggcggtacggcgttcaatgctggagcgatcccgcccggtggcgatttctggaccgcgtttgccaactacagtccgcgggtccaggcgctgctgtggaaccagcccatgccgtactggttcttcgccaacggccggcgcttctgggtcgtcgtgaaagtcagcacgatctacgagtcggccggcgccggcttcatcctgccaccctgtccgccgtcgcagtatccgtacccgcttgctgtagtcgggtcgtatcgcggggacgtcgctgtgcgctggtccgatgtgagtgaccggcaccgaggcatcagcagcccctatgagcgaagctgctatctccgcgatcccgccgggcgctggctcggtttcactgtagacggaggggctgccaacgagtccgactacaacaatcggacgctcctcccgctgggctgcggccgttatgcgggcagcagtgacaccgtggtcaaacaactgcgggattcattcgggaagttcccgctcaaggcgctgtcgttcgtcacccgcgaaaccgagggtcgccgaaacctgggcgacttcgacggcgctttctacgtgccaacgctcaactccggcgccgaggacgtgattgtcgaggacggagtggaccacgttgttttccaaaccgcctggcgctcgggcaacccctggctctacgcgatcaggaaggactga

SEQ ID NO: 327663 - DNA, 924 bp, Pseudomonas aeruginosa
atggcctatttcacaggaacagcgaacaacccggccgacttgctcgccaaggtgcgcgtccacgccgagtcgctcggctgggtcaccgaccgcgcctcggcatcggaatggctttgtcacaacgctgatgggtactggtcattcaatgccggagccaatcagttccagatggcgggcaatacggggttcgataacagcctggcgtggaacgcgcagcccggtaactcggtgcagaacaacccttattcgtcgaaggggccgaccgtcgcacagctgagcggtgggccgttcacgcgctaccacctgtttgccacggcggcttatctgcacctgcacgtcgaaatcgcggcaggtcagttccggccggtgatgattggctcgctcaacaaacggggcgtcggctatacaggcggtcagtatgtctgcggctcgttcatctatacccccggtcaggcactgacaaacaactggtcgtcgcatccgttcgatggctaccacattcaatacagcaacagcagctgcatgctgcggctggacggcctcgacggcggcccgtcgccggaatggttgccgttcgactacacaacgaacgtcccccggcgcgtcgtcggccccggtcgcggaaactacagcagtcagtaccatcccgacgtggggctgatcgacgccagcgcaaacgagctgaacagctcgaccacccctgtgccctgcgcaatctatgcgttcggcgctcagcagcgctcgcggtacgtgggcgaggtgccggactttgggctgtgcaacatggctttcctcgcgcctggtgatccgctggtcgtcggcagcgacacctggcgcgtgtacccgctgctccagcgcggaaccgccagcgatttcggcaacaccagcgcatgggtcggctactgcttccgggtgcttgagtaa

SEQ ID NO: 327664 - DNA, 1704 bp, Pseudomonas aeruginosa
atggcgacgtttccggggttccaggtgccgaagcctgtggaggggatcgttgccggcatcacgccgaatatcgacgccctggagctgaaccaggacatcagccttgcggcggtcgcggcctcgacctgggccggcacctacgcggcgcatcagccggtagatgtgatccattcgtcgtaccaggctgtccaccaaagcgccctggaagagacctactacaaccgcctctggttgattccgaccgcaatggaactgggcaacgtcgtcagcacccagatacgaccggcatcagtctggaacgcatatttcagtccgcgcacgctgaccgccatcgaccgcgaagccgcagacggcatcacgctgtctggccaggcgtcgccgccgctgggttttgccgccctggaggaacgcacctggacggtcagcattggcacggacggcccgcccgtagtcaatgcgcggatcgtctggaagctccagggcgagccggacctggtcctggtcatcactggcaatcgcatcatcgcctggacgttcgcaccggactggggcgacagcatcgtcgagcgcctgagcgcctcgacaaatatcctgcaaagcgaatcagccgtgacccagcgccgagccatgcgcctggcgccgcgccgggagttcgaagcgaacatgtacgcggtggaccgcgagcggcagctgctggacatgacgctgttcggctggggggcgcggatttgggcgctgccgatctggcctgatatccagttgctccaccagccgctggcggccgggtcgctgagcattccgtgcgacacggccggcctcgacttccgcgacggcggtctagcgatgttgcgcggcgaggacgcttttacttatgaggtcgtcgaggtcaagacggtgaccgccgtcggcctggacctggtccggcccgtccaggccgcctggggaactggctcccggttgtacccggtacgcaccgcgcagctgaccgaacagcccacgctgacccggctgaccgataccgcacagtctgcgcgggtgtcgttcctggttatggagcccagcgcctggcccgaggtaatgccggcgacgacctacagggagcggccagtgctggagcagcgcccggacgaaagcgaagacctgacgtcgagctatcagcgcctgctgtccaccctcgacaacggcagcgccattccccgcgtcaccgacgtcgccggcatggcgctgcccgtcatcggccatcggtggatcggcatgggccgagccgagcggtcggcgttccgtagcctggtctatgcgctgcgcggccagcagaaaccgctatgggtgccgacccacgccgacgacctgaccctagtcgccaccgtctcgcagctgtccaccgcgctggacgtgcgcaatatcggctatgcccgtttcgccaacggccggccgggccgtcgcgatatccgcatcgagctatacgacggcacggtctatcaccgccgcatcctcaccagcaccgagctggacgccgacaccgagcgcttggccatcgatgccgccctgggccggctggtcgagcctggcgaagtggcgcgcatttgtttcatggcgctctgtagcgccgccaccgacgtggtcgagatcgagcacgtcactgatagcgagggcgtagcaactgccgccctgacgttcaagggagttcgtgacgatgagttttaa

SEQ ID NO: 327665 - DNA, 822 bp, Pseudomonas aeruginosa
atgagttttaacagccgcgaacgctcgctcgcggatgggcagccggtgcggctgtaccagttcagccgtggcgcgatccgctggagctacaacagcagcgaccgggacatcacctaccagaaccagattttccgcacggtccagggcggcatcactgacaacgggatcatctgttccggcgatccgcagtccgaccagttcgtcatcaccgcgccggccgacctcgacgtcgcgctgctgtacaagacccggtcgccgagcggtgccatcgacctggtcgtctacgacatgcactacggcgacaccgaggcagcggtttcctgggtgggccagattggcgatgtggactggccgaccgtggacagctgccgcataacgtgcgtgtcagaagacgaactgatggaccagcccggcttgatcgacacctactgccgcacctgcacggcagtcgttggcgaccatcgctgcaaggtcaacctcgttccgtatcgcgtgacgctgacgccgcagagcatcagcggctgggtgatctccagcggcgtggtcgccggctatgtcgatggctggtttaccgggggctacgtcgagtggcaagtggacggcgacaactacgatagccgctacatcgagcggcacgccggacccgatctttacatcctgggcggcaccgagggcattccggcaggtggccaactgcgggtttatccaggttgcgacgggctcgcgcagacctgcgacgacaaattcagcaacctccccaacttcagggggtttaacgcgatgcaaggcaagtcgccattcgatggcgaccaggtctggtga

SEQ ID NO: 327666 - DNA, 240 bp, Pseudomonas aeruginosa
atggacccgatcacaatcaatctcgtcatcctggcggcgtcgttcatcctatccaaggtcttggcgccgaagccgcagaagcccaagccgaccgcctttgaagacatcgatttcccgcgctgcgacgagggtgacgaacaggtcgccgtcttcggtcagtgctggtcgaagagctggatggtgctgaccgtgggcaactacagaacgaaggcgatcaagaccaaagggagcaagaaatga

SEQ ID NO: 327667 - DNA, 219 bp, Pseudomonas aeruginosa
atgatcgttacggctcagcacctgcataccgtgccgacctggaccactcggcagggctactgccaccggcaggcgcgggacttcttcaagcgccatggcctggattggatggcgttcctacgggacggcatcgaggccgacgtgctagtcgcgaccggcgacgcgctcgcgctcaagctggttgagcacgcatgccaggaggtagccgatgggcgctaa

SEQ ID NO: 327668 - DNA, 2208 bp, Pseudomonas aeruginosa
atgggcgctaaaccgaaggcacagacggtcgggttcgagtacttttttgacatccatttcgccctgggtaagaagatcgacgaggtctgtgcaatccgggcgagcggcaagaccgcatggaagggctcgatcaccagtaacggccaggttcgcatcaatgcgccggacctcttcggcgggaagaagggcgaaggcgggctcgacggaacgcttgacgtgctgtttggcgaggaggaccagggcgtcctgccgcgcctggcggcgatgctcggcggcctggtaccggcgttccggggcgtcaccacgtgcttctattccggcctggtcaccgccatgaacccctacccgaagacctgggagattctgcgccgaggcggcaaccgcctgtgggacggcaacccctggtatcccgaaaagcaatttatctggctcgcggacggtcagatcaaggcgatgaacccggcacatatcctctatctcgtttacaccggcagggacttccggggactggcccgcacaagaatggacgaggcgagctggcgggccgctgccgacacgttgtatgccgaaggcttcgggctgtgctttgaatggaccaggtccgacacgttcgccaacttctgcgagacggtgaaatcgcatatcggcgccgaggtctacccgaaccgacagaccggacaaatcagcatccgcctcctgcgggacgactacaacgttgctgacctgccgctgttcgacgaagacagcggcctcctggaaatcacgcaagagaagaccggctcgacgtcgctcgcgccgagccagcttatcgtcaagtacatcgaccagaccgacggcgcgcagcgccaggtcatcgtcaacaacaacgcggtcgccgcttcgcaggggcggcgctcgtctgaggaagtcgagttcctgggcgtgcctaccggggagctggccgggcgagtcggtgagcgggaaatgcgtctgaagacaaccggcctgaaacgctataaaggcgtattcgaccgccgcgcccgtagcctgaaccctggccagccgtttcgcatccgttcgacacggcgcggcatccccgaaaccgtcgtcagggtcggccggatcgaggacaacttcctcggcgacggcaagatcaccctgacggtcgtccaagaccagttcaatctgccggcgacaaccggcgtggcaccgccgccaccgggctggactccacccgaccggacgcctcgggcgatcactgtgcggcgtttgatcgaggcgccatatcgcgagctggccggggtgatcgatccggccaacttgcagctcctggacgtgtccgcgtcgtaccttgccgccttggccgaggcgccgaccagcctgtcgcagagctacaccttgaccgaccgcgtcggcagttctggcgcgttcgtggatcgcggaaccggcgactggtgcccgaccggcctgctcgccgctgagctgccgctggcggccggtccgaacgtcgtcacgttgacgaacgccagccggctggaggacgtcgctgtcggccaggcggccgtggtggatgacgaaatcgtccgggtcgatgcggtcaattacgccagcggtactgtcaccctggcgcgcggctgcgccgataccgttccggccaagcacttggccggggctcgggtctggttctacgacacgttcgaagcggtggacgaaacggtatacagccagggcgtgacgctccatgcccggctgctgacgaacaccagcgagggccaactggccccggcgctggctgccaccgacagcctcaccctgaccgggcgccagggcaagccgtatccgcccggccagttccgcatcaacggcagcgcgtacccaacgaaagtctacggggcgctgtcggtgagctgggcgaagcgcgaccgcattgggcaggccgaccagctgatcgataccactgtcggcaacatcggcccggaagctggagcgacggtgacgctcctggtctacagcggcacgacgctgaagcgcacctacgccggcctcacatccagtagctggtcctatccgctggccgaggacatggcggatggcccgctccaggacatgcgccttgtcctgcgcagtgtccgcgacggcatcgattcttggcagcagcacgaaatcacgattgaacgccacggcctcggtttccggctgggcgaagaactaggaggcgtttccgcatga

SEQ ID NO: 327669 - DNA, 1149 bp, Pseudomonas aeruginosa
atgagtcttacgatggggccgaataccggcctactgaccaacggtgcaccaggcgaggggcactataacgagctgatgcgcctgttgcgctgggatgactttctgaggcagccggtcgtcaaggggcgcgtcgccgcgctcccggccagcggccaggtcgagggcgacacttacatttttaccggcagcggtgcgaaccagaaccgcattgcacgctggtgggcgactggtgcgagcacgcctatttgggagtacatgccgcccaggctgggctggcgggtgcaggtggcgaacgaggccacgcctgctggccaggtcaagacgtatgagttcggggccagtggctggacggaactggtgggcgggatggccgacgcgccgagcgacggaaagccatatgcccgcgaaagcggcgcttgggcggagttgggatcggcagcgaaatcggcgctcaacgttctgccgttcatgaacctgatgcccgacatgggccgcttcgcgggaacaacagccaacccgctggctacgatattcacaacgtcatggactccaagcaccttcatcaatggctggaacggcgcgatcctcgcagatgggggcaagttctcgttcgacaacagcacgaacggcgggacggggccggcgctcaatgcgagggtacaggcacttctcacggcaatgggccgcacctggacatcggtttcaaggtacggcgtcgagttcttcaccacagttctgacggcgggatcgcagacaacaactggctcggccggcgcggatggggttacgcggtatctgtgctgctccaacggcagtaagaccgttttcaacgcgggcgcgtgggcgacggtggtcatgtggctgcgtgtcgaaagcggctcggctcatatctcgtcggcgccctatacgacccacaagctctggatcaatggcgctgtcgctgcgcctggcgtggtgctgcctgcgaaccaatgggtgcatctacgattctcgatgcagtcctacaacggctatgacaacgcgtgtccgtacatctacgcctccgcaggggctcagatcgcgtttgcgtgtccagcctggttcggcggattggtcgatccaggcatccacgttgcccccatcctgaccatcaacggagcaagcgcatga

SEQ ID NO: 327670 - DNA, 288 bp, Pseudomonas aeruginosa
atgatgaagcgggttctctacaaaggggcgttcttcactgagtgggacggcccgctggcggccatcgctgaaactgccggggtgagcatggacgatctcgcgttccaccccgacgatgccttggccgaggtccaggagctgcggcgccaggcatatcgggacgaggctgatccgctgcgcttggaggccgagtatgacgccatcgctaccggtacagagccggacctgtcggcctgggtcgcagctgtcaaggcgatcaaagagcgctatccgctcccccagtcctaa

SEQ ID NO: 327671 - DNA, 225 bp, Pseudomonas aeruginosa
atgaacgagatgcttagacggaggctgcgggcggagctgctggaggtggggtttctcaaccagtgctgccttgatctgatggaagcgatggaggccgagttcagcctcaccgaggaccagcgcgaatgcatcgagcagctcggccgattcctgcgggagggcatcggcaagctgaccgctctgtctgagcgggtagccgatggcgatatcgtcgtcctgtgctga

SEQ ID NO: 327672 - DNA, 894 bp, Pseudomonas aeruginosa
atggagcttgccgtccccacctcccaatccctggatatcgtgttgttgcgtacctttctcgaagtggtcgacagtggcggcttcgccctcgccgcggacaatctcgcgctcactccctccgcggtcagcgggcatatcaagcgcctggaacagacagccggcgtcagcctgctcagccgcaccacccgccgcctggagctgacccaggcgggcgagacgctctacgcctatgcccgcaacatcgtcgagctggagcgcgaggcccgcgccaggctgcacggcacgccgatccgcgaccgcctgcgcatcggcgcttcggaggacttcgccagcgcctggctgccacgcgtcctgcaacgctttcgccgctggcaccccgaagcatccatcgaactcaaggtcggtatcaccaccgacctgctccgccagcaggcccaggggcgcaccgacgtggtgttcggcaagcagtgccggcgggtcggagacgacggcgaactgctctgggaggaaccgctggtctgggccgcggcgaccgcgatcgagctgcccgtgggcgaaccgctgccgctggcgctgttccccgaaccctgcgtctaccgcgaagcggcgattacagccctcggcgccgctgcgcgtccctggcgcctggtgttcgagagcgccagcatggccggctgcctgtccgccgcgctggccggtttcgccgtgacggtggtggcgcgcagccagatgcgcgaggggctgcgcgaactgggcccggaacagggttttccgacgctgccggaggcgcgtttctacgccttctcgcgccaacccagcctggcggccgatgcactgatcgaggcggtgcggcagctcggccagcgcagtcgcttcgttaccgcacagggatga

SEQ ID NO: 327673 - DNA, 1113 bp, Pseudomonas aeruginosa
atggctgatctcaagatccgcaacctgcagaaaggcttcgacggccaggccatcatcaagggcatcgacctcgacgtccgcgaccgcgagttcgtggtcttcgtcggcccctccggctgcggcaagtcgaccctgctgcgcctgatcgccggcctcgaagaggccagcggcggcagcatcgccctcgacggcacggacatcaccgacaccccgccggcgaaacgcgacctggcgatggtcttccagacctacgcgctgtacccgcacatgacggtgcgcaggaacctctccttcgccctcgacctggccggcgtcgacaagcgcgaggtcgccgccaaggtcgacgccgccgcacgcatcctcgaactgcaagcgctgctggagcgcaagccgcgccagctctccggcggccagcggcagcgagtggcgatcggccgggcgatcgtgcgcaacccgaagatattcctcttcgacgaaccgctgtccaacctcgacgccgccctgcgcgtgcagatgcgcctggaactggcgcggctgcaccaggaactggcggcgaccatgatctacgtgacccacgaccaggtcgaggcgatgaccctggcggacaaggtcgtggtgctcaacggcggacgcgtcgagcaggtcggctcgccgctggagctttaccaccatccggccaacctgttcgtcgccggcttcctcggcacgccgaagatgggcttcctgcgcggccatctcagccgcaatcagggcgagcgctgcgaggtcgccctcgaatgcggcgcgcgcgtcggcctgccgctatgcgccggcgagctggccaccggcagcccggtgaccctcggtatccgcccggaacacctgaacatcgcccgcccgggccatgccttccagggcctgctgcgggtcgccgccgacgtcagcgagcgcctgggcagcgacagcttctgccatgtccgcgccgactcgggggaaatgctcaccctgcgcgtgcgcggcgatttcgcaccggactacggcgcccccctggagctgggcttcgatccggcgcactgccatctgttcgacagcaacggccaggccctcgacaaacgactgcaacaggcggcctga

SEQ ID NO: 327674 - DNA, 2037 bp, Pseudomonas aeruginosa
atgtccgaaccacgcaagatcctcgttaccagcgccctcccctacgccaacggttccattcacctgggacacatgctggagtacatccagacggacatgtgggtgcgcttccagaagatgcgtggcaaccaggccgtctacgtctgcgccgacgacgcccacggttcggcgatcatgctccgcgccgagcgcgagggcatcacctccgagcaactgatcgacgccgtgcgcgccgagcacatgggcgacttcgccgacttcctggtggacttcgacaactaccactcgacccactcggaagagaaccgcgagctgtccagcgcgatctacctgaaactgcgcgacgccgggcacatcgacacccgcccggtgacccagtacttcgacccggaaaagcagatgttcctcgccgaccgcttcatcaagggcacctgcccgaagtgcggcaccgccgaccagtacggcgacaactgcgaggcctgcggcgcgacctacgccccgaccgaactgaaggacccgaaatcggcgatctccggcgccaccccggtgctcaaggaatcgctgcactacttcttcaagctgccggacttcgaggccatgctcaagcaatggacccgcagcggcgcccttcaggagtcggtggccaacaagctcgccgagtggctggacagcggcctccagcagtgggacatctcgcgcgacgcgccgtacttcggcttcgagattcccgacgctcccggcaagtacttctacgtctggctggacgcgccgatcggctacatggccagcttcaagaacctctgcgcgcggcgtcccgagctggacttcgacgcgttctggggcaaggactccagtgccgagctgtaccacttcatcggcaaggacatcgtcaacttccacgcgctgttctggccggccatgctcgaaggcgccggctaccgcaagccgaccgcgctgaacgtgcacggctacctgaccgtgaacggccagaagatgtccaagtcgcgcggcaccttcgtcaaggcgcgcacctacctcgaccacctggacccggaatacctgcgctactactacgcctccaagctcggccgcggcgtcgaggacctcgacctgaacctcgaggacttcgtgcagaaggtcaactccgacctggtcggcaaggtcgtcaacatcgccagccgctgcgccggcttcatccacaagggcaacgccggcgtgctggtcggcgccgatcctgcgccggagctgctcgccgccttccgcgaggccgcaccgggcatcgccgaggcctatgaggcccgcgacttcaatcgcgccatgcgcgagatcatggccctcgccgaccgcgccaacgcctggatcgccgaacaggcgccctgggcgctggccaagcaggaaggccagcaggacaaggtccaggccgtctgcggcctgggcatcaacctgttccgccagttggtgatcttcctcaagccggtgctgccgaagctggccgccgccgccgaagccttcctcaacgtcgccccgctgacctgggccgaccaccggaccctgctggccaaccaccaactgaacccgttccagcccctgatgacccgtatcgagcccgcgaaagtagaagccatgatcgaagcctccaaggaagacctcgccgccgccgcatcccaacccgccggcaacggcgagctggtcaaggaacccatcgccgcggagatcgacttcgacgctttcgccgcggtcgacctgcgcatcgccctgatcgagaagtgcgagttcgtcgaaggcgccgacaagctgctgcgcctgtcgctggacatcggcgacgcgaagcgtaacgtgttctccgggatcaagagcgcgtatcccgacccgagcgccctggaaggccgcctgacgctctatgtggccaacctggcgccgcgcaagatgaagttcggggtgtccgagggcatggtcctggccgccggcccgggtggcgaggagatctacctgctgagtccggacagcggcgccaagccgggccagcgcgtcaagtaa

SEQ ID NO: 327675 - DNA, 801 bp, Pseudomonas aeruginosa
atgaacgcatggaagcttgccgccggcgtcctgctggcggcgctctacggatgctccgccgaacacgccgaaagcgtctccggcaatgccggtttccagggcgagacgggcaaacccggcaccgccctcgcctacgaacaccgcgtcggcatccgcctttccgccgcgcgtatcgacgcgcaactcgccgccagccgcgacgcctgcaacagcgagcgcttcggccagtgcgacgtgctcgccatcgaacaacgcggcggtatcggccattacgccgaactcaccgtgcgcatcgtcccggacggcgtggagaagctggtcgcggccgctgcccagggcggcacgctggaaagccggcagacccgcgccgaggacctggcccaggcggtcgccgacacccgccagcaacgcgagcgcctgcaacgcgagtaccagaccctgcagcaataccaggggcgcaaggacatgagcgtcggcgacctgctggccctggccaaggaaatcgccgcggtggaagcccaactggccgacaacgcccaggccggcgcccagcagcagcggcgcatcgccaccaacctgctgaccctgagcttcagcagcgaggcgcagccggacagccgcctcggccagctcgccacggccgccgggcaactgctcgacgaccttgtcgatggcaccatcgccgcgatgaagttcttcgcctacagcctgccgttcctcgtcgtgctgctgccgctgggcctgttgctgcgcggcctgtggcgctggctgcggcggcccggcaagaacgaggcgcgctga

SEQ ID NO: 327676 - DNA, 702 bp, Pseudomonas aeruginosa
atggatgccctcttcggcacagaggcgctggacgaaatgcaggtcgctttcgtcgtactgcacgcagtattcgcgctcgggataccgggtgccgagctggaagcggtaggcgtcggcgaggatgccgtgctcctcgaggaccagggcgacgatctgcggcaccgtgaggtgctggaagatccgctggttgctgcgctgcgcgaggtaggccagttgcggcacgagggtgaggcgatagcgggtcaggcgcttgcccgcgtcggcctgggcggcgccgtagaccaggccgtggacgccctggccctgcggggtgaaggcgaggaaggcgggtcggtgcatgagcgcttcgaggtcgaggccggcgcgctcgctgaccagttcgagttcgaagcggtagggccggctgatgccttcgtggccgctgaattcgagaacctgcaggtcgtgacggaggccgtcgaggctgaggctgaagtgggtctggttggccgggttgaacatccgctgtcccctgtttctcgaaaaacctgcacggctggcgtccctgttcgccgtgctcgatccgaagtgcgtgatcgcgcggatgctacgtcaaaaaaactgtgcaaattgttgcgcacatcgccggaaaaccgcggcgcgcctgagtctcagtactatgaaacaaaatatgtcagggaaaatccgatgggcgcagactga

SEQ ID NO: 327677 - DNA, 741 bp, Pseudomonas aeruginosa; identical to SEQ ID NO: 326090

SEQ ID NO: 327678 - DNA, 477 bp, Pseudomonas aeruginosa
atgcctgacctgaaaaaccacgccgtccagcagcaggccatgatggaagccttcttcttcgcgtaccaggccttcaccaccaagcctgacgagatgctcgcccgccgcggcctgggtcgcgtgcaccaccgcgtgctgttcttcatcgcccgctatccgggcctcagcgtgaaggaactgctggccctgctcggcgtgaccaagcaggcgctgaacatcccgctgcgccagttgctggagatgaacctgatcggcagcgccaccgccgacgacgacaagcgcaaacgcctcctcggcctcaccgccgagggcgtgcggttggaaaaggcgctgcgtcgcgagcagtcgcggctgctccaacgctgcttcgaggaagccggcggcgaagcggtctccggctggctggcggtcaatcgcaccctggctcgggcgcatgcaggcagccgcggcgaagcggcgacggaggccgccgactga

SEQ ID NO: 327679 - DNA, 519 bp, Pseudomonas aeruginosa
atggcaacacccgcctatatgtccatcaccggcaccaagcagggcctgatcaccgccggcgccttcaccgaggattcggtcggcaacacctaccaggaaggccacgaggaccaagtgatggtccagggcttcaaccacgaagtgatcatcccgcgcgacccgcagtccggccagccgaccggccagcgcgtgcacaagccggtggtcatcaccaaggtcttcgacaaggcctcgccgctgctgctggccgccctgacctccggcgagcgcctgaccaaggtcgagatccagtggtaccgcacctccgccgccggcacccaggagcactactacaccaccgtcctggaagacgcgatcatcgtcgacatcaaggactacatgcacaactgccaggacccgggcaacgcccacttcacccacctggaagacgtgcacttcacctaccgcaagatcacctggacccacgaagtctccggcacctccggctccgacgactggcgctccccggtcgccggctga

SEQ ID NO: 327680 - DNA, 639 bp, Pseudomonas aeruginosa
atgagtagaattcttgcagtgcatgccagtccgcgaggcgagcgctcgcagtcccggcgtctcgccgaggttttcctggcggcctatcgcgaagcacatccgcaggcccgcgtggctcgccgcgaagtcggccgggtaccgcttccggcggtcaccgaggccttcgtcgccgccgccttccatccccagccggaacagcgttcgctggcgatgcaggccgacctggcgctgagcgaccaactggtcggcgaattgttcgacagcgacctgctggtgatctccacgccgatgtacaacttcagcgtgcccagcggcctgaaggcctggatcgaccagatcgtgcgcctcggggtgaccttcgatttcgtcctcgacaatggcgtcgcccagtaccggccgctgctgcgcggcaagcgtgcgctgatcgtcaccagtcgcggtggccatggcttcggcccgggcggcgagaaccaggcgatgaaccacgccgatccctggttgcgcaccgcgctgggtttcatcggcatcgacgaggtcacggtggtcgcggcggaaggcgaggaatccggcggcaggtccttcgaggactcctgcgccgaggcggaacagcgcctgctggcgctggcgcagtcggcctga

SEQ ID NO: 327681 - DNA, 1029 bp, Pseudomonas aeruginosa
ttggccatcgaccgcgccaggcagctgttcggcgccgactacgccaacgtccagccgcattccggttcctcggccaacgccgcggtgtacctggcgctgctcaacgccggcgacaccatcctcggcatgagcctggcccatggcggccatctcacccatggcgccaaggtgtcgtcctccggcaagctgtacaacgccgtgcagtacggcctggacaccgctaccgggctgatcgactacgacgaagtcgagcgcctggccgtggagcataagccgaagatgatcgtcgccggcttctccgcctactccaagaccctcgacttcccgcgcttccgcgccatcgccgacaaggtcggcgcgctgctgttcgtcgacatggcccacgttgccgggctggtcgccgccggcctctacccgaacccgatccccttcgccgacgtggtcaccaccaccacccacaagaccctgcgcggtccgcgcggcggtctgatcctggcgcgcgccaacgaggagatcgagaagaagctcaactccgcggtattccccggcgcccagggcggcccgctgatgcacgtgatcgcggccaaggcggtgtgcttcaaggaagcgctggagccgggcttcaaggactaccaggcgcaggtgatccgcaacgccaaggcgatggccgaggtgtttatcgggcgcggctacgacgtggtttccggtggcaccgacaaccacctgatgctgatcagcctggtgaagcaggggctgaccggcaaggccgccgacgcggcgctcggagcggcgcacatcacggtgaacaagaacgccgtgccgaacgatccacagagcccgttcgtcacctccggcatccgcatcggcaccccagcggtgaccactcgcggtttccgcgagggcgagtgccgcgaactggctggctggatctgcgacatcctcgacgatatcgacaatcccgaggtcggcgaacgggtcaggggccaggtcggcgaattctgccggcacttcccggtctacgctgattga

SEQ ID NO: 327682 - DNA, 1158 bp, Pseudomonas aeruginosa
atgaagtcgcccactgacatcggccgcagcctggccaggcaatggcagcgctccagtgtgcgcctggagcgtttgctcaatgccgctagctggccgcaaagcctcaacatcggcaaaccttcgccacgcctgttcactgacaacatccaggcagtgctcctgcatgtggagaactggcggagcgtaaacgtgggtaaagtcgactgggaacccgtcagctaccgagctgggcttgtccccatttccttgccgatgcgctggcatttgcgcaacccttccgaatggattgcagcgaccaatgatccgagggtctgcgaggaatacgctcaactcgagcatctggtcgagcaggtcgacagtgcctttcatgcgctgctggtggcgcaacgcagcctgtggttgacgaagccgtttgaagaagtcgtcgccacggcgcaactcgccacccgcttgtcgccaggctgtgcccgaggccgtccactgcgcctgcttgccgagcacggcgtagacaccaagtttttcgagcgtaacgccagcttgctgacccggctcctcgacgagcgtttcgaaggcgcggcgtccgagcaaggcctgacgacgtttctggatgcctttgaagaaagcagtcattgggtactagtcgttcctcttcagcctgagctgctgcccttcaagcggcttaggctcacgactgcggaactggctgaaaccccgcttcctggttcgcggttgctggtggtggaaaatgagcaatgtgttcacttgctgcccgaaaccttgccggacaccctggctgtgctgggtgcaggactcgatttgcagtggttggcgtctgcgcacttagccgggaaacagatcgcctactggggcgacatggacacctggggcttgttgatgctggcgcgagcgaggcttcatcaaccagcggtcgaagcactattgatggagcaggagctgtttgaacagcactcaccgggcaatgcagttgttgagccggccaaagcgcgggagtcggccccacctggtttgctggctgacgaagcggatttctatcggtatctgctggtgcaagagcgaggacgtcttgagcaggagtacctgccaaaggtacaagttgagcgcgctatcgagcagtgggctcgggcggtccctgtatag

SEQ ID NO: 327683 - DNA, 183 bp, Pseudomonas aeruginosa
atgagatggtttttcgtggtgatgctttgcggtggggcaggtctctggctaagcgcccaatatcaagttcctcaatggttgctttggctgctgctggcgctgggaaccacggtatggggcctggccaagtggatggaacagcaggaggccgagacggagcacgatcaggatcgcaggtgctga

SEQ ID NO: 327684 - DNA, 264 bp, Pseudomonas aeruginosa
ttgaccctcccttacgaaagaacacgcgccatcgtcaaaacagaggagttcctgcgtgaactctcccgtcattcggggttaccgcaggatatccgcagctatgcgaaaagcctgctcaggcactatccatctgccgaccagattttctcgctggggcgccttgaggaatgtctggtaaacgaagcgcttgaagatgaataccgacggcgggtgatcgccttccaccagcagctgctctgctcgtcgctggagtcgactcgatag

SEQ ID NO: 327685 - DNA, 606 bp, Pseudomonas aeruginosa
atgtcccgcccagactttgaaccgccggtgtctcacctcgtcgcgcagcggctgaagcatctgcgcaaggggaggcctttcagcatcaggtgtcttgcagagcttggttcgagctcggccatctccaaggcagtcgcccaacttgttcgccgtggcgagcttgagcatgtgtatcgtggcatctacatgcggccgaaatacagccagtacaccggtcgggttcatcgtcctgggccttcggacttggtgaatctgattgccaggcagaaccgttggaagctgcagatccacggcgctgatgccgtgaggcgattcgggctgagtactcagatgccagtcattccgatctattacacgagcggccccagccgatcgctatttgtggggaaggccgagatcaggctcgtgcatgctgctccgatggtgatgcagtgcgcaggaactaaagtggggatgaccatcagcgctctgttttatctcggcaaaggtggtactacgccggagtgtgttgctgtaatcaaaaaagctctcagccccgaagacctgagcaaaatagtggcctgcagaatgccgaaatggatgcgcgcagcgctggagacaacatga

SEQ ID NO: 327686 - DNA, 1038 bp, Pseudomonas aeruginosa
atgaaaatagatgcccgcaaactcagcccccaagaacaacgtgaaaagcgctctacggccctacgcatgcgtgagcagggttacacctacaaggctattggcgaagcggttggtgttcacccccgcactattgctcactgggcgcaggtcgcagaacataaaggcgaaaaggctgccatagccggcggccagcgtggtgtgcgccagggtgatcgccgcagtttgagctccagccaggaagtgctgattcgcaccttgatgaccgataagatgcccgaccaactcaagctcggctttgcgctctggacgcgtgatgccgtgcgagaactgatccgccagcgctgtggttttctcatgccggttcgaacggttggtgaatacctcaagcgttggggctacaccccgctgcgaccactgcatcgggcttatcagcagaaacctgaagtggttcagtactggctggataatgaatatccacgcatcgcacagcgggccaaggctgagaatggtgagattcagtggggcgacgaaaccggtatgcgcagtgacagccatgctggccgcagctacgcccctattggcgaaacgccggtgcgcctggtcagcggcagtcgtttttccaccaacatgatttccaccgtgaccaatcggggcaaactgcgcttcatgttgtatcgggaaacgctgacagccccagtgctgattcgcttcctgagtcgcctgattcgcgatgctcagggccgcaaggtgttcctgattctcgacaacctgcgcgtacaccacagcaaaaaggtgagcgcctgggttggcgaccgcaaagagcaaatcgaactgttcttcttgccggcctacgccccggagttgaaccctgacgagtatctgaattgtgatttgaaacatcaggttcgtacgggcttgccggcgcgtaatcaggacgaactggaagggcgtgttcgctcggtcatgagacgattgcaattacacccccaaagaatccgttcttatttccggcatccacgtatcgcctacgcggcatga

SEQ ID NO: 327687 - DNA, 1587 bp, Pseudomonas aeruginosa
atgcgtaacttacatctacctggccgttccccggtacgtgcccagcgcggcatgatttccacttctcacccgctggccagccaagccggcctggatattttgcgccgtgggggcagtgcgatggatgctgccgtagccgctgctgcggtattggcggtggttgagccgcaagccaccggtattggcggtgactgctttgtgctgttggcaggtaaagatcaaaaggtgcgcgcctttaacggctcgggccgctcgccaaaggccgccacccttgattggtatctgcagcagggccttgatgccattcccggtcgcggtgcgcatagcgtgacggtgccgggtgcgattgatgcctggtgtcagcttttggatgagcacggcgttctggcacgtgaagaagtctttaaagacgcgatcttcttcgcccgcgaaggttatgtggtggccgacagagtggcgggagactgggcgcaaaacgagccgtggctgaaagaaatcgacaatgcgcgtcgggtgtttttacctgaaggccgcgcccccaaggctggcgaaattcatcgtcagcccgaactagccaataccttggaggcgattgccaaatttggtcgcgatgccttctacaccggcgctatcgccgaggatatggtggaggcgctgcaagctggtggcgggctgcacacgctggcagattttgccgagtgccggggcaattatgtcgaccctattaaaggtagttaccgtggctttgatttgtatcaggtgccacccaataaccaaggcttaacagccctactgatgctgaataccctgagccacttcgatttgaaagagttgcatcctgagagtgccgcacgccttcatttggaagttgaagcctcgcgtctggcctaccgtgagcgtgatctgcgccttgccgatcaggcgtctatgaacacatcggtggagcaactgctggcgcctgaagtgggcgaaaaaatggcccggggtattaaccttaaagcgacaggcgagctgcctgactcggtgctggatcactcggatacggtgtatctgtgtgtggtggatgaaaaccgcaacgtggtgagttttatcaattcaatctacaacgagtttggaagtggtgtggttgctccaaaatccggtgtgctgttgcaaaaccgtggcaaaagttttcgcctgagtcctgaacatccgaacgttatcgccccgactaaacggcccatgcataccattatgccgggtatgctctgtaaggacggtcaggtgattgcaccacttggtgtgatgggtggagactaccagccggtggggcaggtacatgttctgaccaacatcatcgactacggcatggatgcgcaagaggcaatcgatgcgccacgagtgttcttcgagaacggtgtggtacaggtggaggcgggagtcagtgctgatacccgtctgggccttgaggcgcttgggcataagctggtcgattcacccagctataagccgctgggcggcggtcaaattattctcatcgatcctcaaaccggcaccctgactgccggttctgatccgcgtaaagatggttctgccatcggctactag

SEQ ID NO: 327688 - DNA, 996 bp, Pseudomonas aeruginosa
atgaatatcctgattacccataaccgcgacttattgaaaaacttcttcagtgcccgcgcggtaactaccctgcaggggcttggcaatgtacggctaaacgatagtgacgagcccttgcggggcgatgcgctagtagcagcagccaaagattgtcaggtgattatttctgatcgcctggcgccgggcgaggccttggtgtttgcgggtctgccgaacctgctggcttttttgcgctgcgcggtggatgcgcgcaatgtcgatgtgtcagcagctagtgctgcaggcatcttggcggtgcgttgcagcgcaggttacgccgaggcctgtagtgagctggccttgggtttgatgattgatctgggccgcggtattacccaggctgccacactttatcatcagggcgtgcatcagcagccgatggtctttggtcgccagctttatggagccagtgtaggcattgtcggctatggcgcgattggtaagcgcatcgcggccctttgtctgtgtgcgggcatgcaggtgtcagtctatgacccttacgcagagatcaccgaacagggcattgaaaaggtgcgttttgaggagctgctggcctcctctgattatgtggttgccgcagcctacgccacgcccgaaaccatagagatgtttaacgctagggcgtttggccaaatgcgcaaagacagcttttttatcaatatcgcccgaggcattctggttgatgaggaagcgctttatcacgcactcacccgcggtcagattcaaggcgcaggccttgatgtggggcgcggccttgatgagcagccgaatccaaaaattgccgtgctcgccaatgttattgctacccctcatgttgccgggctgacacccgaggccagtgattaccaagccatggaatgtgtggcacaagtccaggacttgttagccgggcgtgtccctgccttggccttaaatccagaacatgccagccgtttgcggagttttcaccatgcgtaa

SEQ ID NO: 327689 - DNA, 1128 bp, Pseudomonas aeruginosa
atgacgatccactctgcgaagtacctctggagcggcactgaactgggcgaggcccgtgctcttgcaccgcactactacaccagtgaagaaatcttcaaacaggaagtggagcatatccatttaaagaactggttctttgccgcgcgtaccgatgagcttgccagctcgggcgactaccgctccattgataccgtgggcgggccggtgctgctgacccgtgatgagcaaggcgagctgcacgcctttgccaacttttgccgtcaccgtggctcgattctgctggaaggctgcggtaaccgtcgcaacatcctctgcccctatcacgcctggagctacaagttggatggcagcatgatgcgggcgcccgggatggctgatgttccgggctttgatccggaacataacgcgctggtgccgattcgcatgagcgtgtggcgcggcaatatctttttaaatttcgacgacaacgcgccggatttaatgacccatctaggtgactttgatgagctggtcgggaccaacaaattagaggatatggtctgcgtttggcgcaaagacatcatcgccgaatgcaactggaagctgcttttggaaaacgcaatggagacctatcacaccgggatcgtccatgccaaaaccgtaggcgcgcaaaatagcctgacctttgcagccaaaggcgaatggcacgccattcaagtgcagtcgttgatgacgagcgcagtcctcgacaaaacccaggacgcgccttttccgcaaattgaaggcctgagcgaacaggctaaacaaggcactttcttcactctggtcgagcccactacccaattctgctgcgctcaagattgcatgtggtggctggtagtaaggccgattgcggtggatcgtacgcacttgtcggtgggcggctgcttccccaaacacttgctggagctgcccgactttgaagagcgcgctcagccttactaccaccgctggggcacagtagctctggaagatgttggcatcctggaaaaacagcaaaaaggcctgagttcggttcgttataccccggggcacttgtcgtggcgtgatgatgtggtgcatgacatgaacaactggctgttgcgtcatctgccaattgccaagggataa

SEQ ID NO: 327690 - DNA, 744 bp, Pseudomonas aeruginosa
atgactgcgccattaattcaggtcgataacctgtgcgtgcgttatggcgccgttgaagcgttgaccgatatcagtctggcggtgatgcccggtacgatcaccagtctggtcggcagtaatggtgcaggtaaaagcaccactctgaaagccatttcagggctggtgaaaccggtcagcggcagcatccgctatatcactcacgaccttttgaaattacgcgctgaaagccgctccgaactgggcattgcccatgtaccggaaggccggctggtgtttgccagcatgacggtcaccgagaacttactgctgggcgcctacattcagcgcgacaagcgcgccatcgaccgtgatatcgacgagctgcacgagctgtttccgatcctgaaaacccgcgccaaacaactcgccggcaccctctccggaggagagcagcaaatgcttgcgattggccgggcgctaatgtcgcgcccgcaatgcctgatcctggacgagccaaccatggggctggcgccgcagatgattgaccgggtgctggaagcggtagccagtattcgcgacaagggcatcacggtgctgatggttgagcagaacgcccttgaagcaattgccattgctgacagcgcgtacgtgctgcggcagggccgtcttgtctaccaaggctccggtgcaagtctggatgccgaccttttaaaacaactgtatctgggcggcggtgccgctacacctgtgactggagttgcatga

SEQ ID NO: 327691 - DNA, 786 bp, Pseudomonas aeruginosa
atgaacgccctgctaaatgctcaaggtttaagcgtgacatttggtggcttgaaggcggtggacgggctggatatcagtatccgggagggccatatacatgcgcttatcggtcccaatggtgcgggtaaaagcactgtggtcaatgccctgtctggtttcgttaaaccgacagcggggtcattgaccatcagcgggagtgaagtctgtgggcgtgaagcccatgtgatcgcccaggcagggctggcccgcacctttcaaaacatccgtttgtttggtgcgatgagtgtcttggaaaccgtgttggtcggtgcccaccggcactttgacgcaaacctctggcacctgctgtttttacgtcgggcgctgcgcgtgcatgaggcacagatggttgagcaagccaaagcacttctgcgctttgtcggtctggatgaaagctttgatgagcgtgcccccaccacccttgcctacggccatcagcgccgggtagagattgcccgcgcgctgatctcacgcccccgtcttctgctgctggatgagcccttggcgggtatgaacctggccgaaaaggaagagctgtcggccctgattaaacgcatccgtgacgacggcaccagtgttcttttggtcgaacacgatatgagcatcatccatggtctagccgaccggatcacggtgctctaccacgggcaaaaactggctgaaggcagcgtgaccgaagtcttcgccaatgaagccgtgcaaagcgcctacttcggcaaacaaaaggtgaaaggaggcaaagcatga

SEQ ID NO: 327692 - DNA, 1986 bp, Pseudomonas aeruginosa
atggaatactttgctcagcttttgcttaacggcctgaccattggtgcgatatacgcactggcggccgtagccttcagtctcgtctacggggtggtgcgcatggtgaacttcgcctttggcgagttcttcatgttgggcgcctttattaccgtgagcttgatgctcgaccagatcagcctgtttggagtttcggtggcgatgccgcacttcgcgctaccgttggcagctgctttcggaattgttctggctggaatattaggcgttgtggtggatcgtttggcctaccggccactgcgcaacgccccgcggttggcgcctttaattacctctatcgcaatctctgtgctgctgcaaagcggggcgcaaagtatctggggtgctgaagagctgcgcttcccggaaaacccgctttcagagatggaagtgatcgtcttgttcaactcgctctatctcactgtgccagaagcactaaccattatcgtggcggttgtggcgatgctggggttgcaccagttcgtggcgcgcagccgccttggtcgggcgatgcgggctacggctgacaacagcacggcttcaaccttaattggcatcccggtaaaccgcattatcgccatcgcctttttacttggctcaggttttgccgctctggcggggattctttacgcgcaaacctacggctttgcccacgccactatgggctttatacctgcgcttaaagcgctgaccgcagcggttttgggcggcattggcagcattccgggtgctgcgttgggcgggttgttgctggggatgatggaaaccttgggtggtggttacttgccgaacggcaacgcctggaaagacgccatcagtttcagtgtgctgattttgctcctgtacttccgcccgcaaggcctgctcggccggccggaaaccgttgctggtgagcgtggaagtttgttgggcaacagcccgcaaagcggctggttgatggctcgcgttgagcacctgctaggtaaattcgccagcccaagtccttggctgatgatcgctctggtggctgttgcagctagtcttgccttcgtcgtgaccagcgactactggctgcggattttaatcttcgtgctgatctacgggatgctcgccagcggtctgaacgtggtggtgggctttgccggtttgctggatctgggctatgtcgccttctgggcggtgggctcctatttcacctcaatcatcttcattctggtgatgcgccagggcttcggcattgaatctgctgaggtttggtggctgatgtacgccaacttcatcgtcggcggtgtactcgcagcgctggctgcaatgtgtatcggctacccgacgctaaagctgcgcggcgattacctggccatcatgaccctgggctttggcgagattattcgcatcgtggctatcaactgggtggatctgacccgggggccgatgggcattcgcgatatcccgttgccaaacctgtttggttacgagttggccagcgctcaggcccaatacctttatgcgttggcgctggcggccttggtggtgttcgtgattgctcgcattgtgcgctcccatgttggtcgggcatgggtggccatacgtgaagatgaagacgctgccgaagccatgggcatcccgacctcgcgctacaagctatatgcctacgccttcggtggctttattggtggactggttggcaccttttatgcccacagccagcagtacatcagccctttcaacttcagtctgtttgaaaacattctgctgctgatgctggttgttctgggcgggttgggtactttgattggtccctttatcggcgcgttgatttgggtggtgttcctgcagctggcgctggatttgccctttgttgaagccttccctgaagcgcgttttgcccttctgggcctgttgttgatccttttgatgctgtaccgacctcaaggacttgccgccaaagcgcgggtcaagctggtggcgcaatga

SEQ ID NO: 327693 - DNA, 672 bp, Pseudomonas aeruginosa
atggggcgttacgccacggaaaagctgggctttaagcgcgtttatatcctcaaccagcaagatgactatggtatcggcctatcaagcgccttcagtgatgctgcggcgaaaaacgctgagattgttggtcaggaaagctacctgctgggcaccaaagactttaaaaccctgctgatcaaggcgcgtgctgccaagccggacgcgatctttatcggtggtttttattctgaagcagcaaaaattgccgaacaggcacgcgccttgggaatcaaggttcagctcctaggcagtgacggatcgctcaaccctgatttgatcagtctgggccgcagcgcggtggagggtatgatcgcctacggaatgtttgatccgtcggtttccaccgagaccacggccccctttatcgacgcctaccaaagcgcctatggcgagcagcccaatgcttgggcggcccttggctatgacgccggtaaaactctggccgcagcggtgactcaagccaagagccagggcgcactcacccgtgagtcgcttaatgaggccttctccaccatcaaagatattccgggcgttactggtccaacgacctttgaggctagcggcgatcgcgtggggtctttgtacttcttgcaagtcaaagacggcgcgtttcgcttagccgacacccagtaa

SEQ ID NO: 327694 - DNA, 768 bp, Pseudomonas aeruginosa
atgaatggtttgcctgaaatcttaattggtgcaaatggttcaggtggaaacaatgtcttaggcatcaccgcagtcaactccaaagagcagctgctgagccagcttttgggggcgatgcgcaccggcagattaaaagtcggagacaggcttttaaatgagcgtgacctggctgaattttcaaccctttcgcggtccaccgtgcgcgatgtccttaacacccttgagaagcaagggctgctagagcggcgcgtcggacgcggtacttttctgatcgcccttcccgggcatgagccgcttggagagccggggaacgaatccctggttacgcccgctgagctgattgagtttcggctgacagtggaaccggccctggctgatttgctggtgctcaaattgagcgatgctgaaattgacaggattcgcggtgagctgttagcaggccgacatgccaccagctgggatgaagtggaaaggatcgaccgcgacttccacctaatgctctacagcgccacacaaaacgccatgttcatcgagtccggacgcaaggttgcgcgcatgcgcaacaacccggcctggctgcgtcttaaagctcatcgttttaaccgcgagcgctggctggtgttccagcgcgaacacgaagccattctggatgctctcgccatgcgcgatgcgcaaaccgtagccgacctactgcgccaccatatctctggggtgcgtatggattacgccctgaaccgctctaacgcgataaacgtacccaaggagtag

SEQ ID NO: 327695 - DNA, 1443 bp, Pseudomonas aeruginosa
atgcctgagtcttcgcacaagcatcttttgtttattgacggccattggtgctcaggccaaaaagatgcatggctggcagtggataaccccgcaaccagccaaacggtaaatgaagtggctgttgccgaaatcgaagacttggatatagccctaaacgcctgcgccaggggcttttccgtttggcgcaaaactcccgcaataaagcgcgcggatgtactgcttgaggcggcgcgactgatccgtgagcgccttgagtcgctagcgcagaccttaagccttgagcaaggaaaacccctgcctgaggcacgcatggaaataaattcctgcgccgagcttttacagtggtacgccgaagaagggcgacgcgcttgtggtcgtctggtgccggcacgcgacagcaaagtgatcaacatggttcggcgtgatccggtagggccggtggccgcattttcgccgtggaactttccagcctcgcaagctgtacgcaaactcgcgccggccctcgcggctggctgttcgattatcttgaaagggccagaagaagcgccgggcgcgctgattggggtggtgcaggcactggtagacgccggcctgcctgacggagtgctggcgttggtgtttggccggccggctgagatttctgcgcatttgattgcctcaccgattattcgcaaagtctcgttcacaggctccgtgccggttggcaagctgatcgccacccaagcggcacagaacgtcaaaccctgcactctagaactcggcggacatgctccggttctggtattcgaggatgtggatatcctcgactgcgcacaaaagctggcacaggccaagttccgtaacgcagggcaggtatgcgtctcgcctacccgcttttatatccagcaaagtgtttttgccgaattcacccaggcatttgtcgaggccgtacaacgtataaccattggcgcagcccaagagccaaccacacaaatgggcccactaatcaaccaacggcgctgcgcgcaaatcgccgacttagtcgccgatgccaaggtcaaaggcgctaccgtcctaaccggtggagggccgctaagagactccggctatttttttgcgccaaccgtgttaaccaacgttccagaaaacgcccgcgcgtggatggaagaaccttttggtccactagcgctgctggcgccgtttaactcggtggatgaggcaattgagctggccaacaacacaacctttggtcttgctgcctacgcctttagccacaacctcgcagtctgtcatcggctaagcgacgagctcatcaccggcatgcttgccattaatcactttgcgttggcctttgctgaaacaccttttggcggtgtgggtgaaagcggttacgggcgtgaaggcggcagtgaaggcttggatgtgtatttggttaatcgcctgattactcaggcagtggcttag

SEQ ID NO: 327696 - DNA, 816 bp, Pseudomonas aeruginosa
gtgcttgcccagcgcgtgatccatgccgacgaaaccccggtttcgatgctcgcgcccggcgagaagaagacccaccgtgcctacgtctgggcctacagcaccacgcccttcgccgatctgaaggccgtggtctacgacttcagccccagccgtgccggcgagcatgcgcgcaattttcttggccagtggaatggcaagctggtctgcgacgacttcgctggctacaaggccagcttcgagcaaggcatcaccgaaatcggctgcatggctcacgcccgccgcaagttcttcgatctgcacgcggcgaacaaaagccaactggccgaacaggcgctgcactctatcgctgggctgtacgaagtcgaacgccaagtgcgcgacatgagcaatgaagaacgcgggcgaatacggcaggaaaaggcttcaccgctcctcgacgcactacatgactggatgctggcccagcgtgatcttgtgcccaacggctcagccacggcgaaagctttggattacagcctcaaacgctgggtagcgctgacgcgctatctggacgacggcgccgtgcccatcgacaacaaccaagtcgagaaccagatccgcccgtgggctctaggtcgctccaattggctgtttgccgggtcgctacgcagcggcaaacgggcggcggcaatcatgagcctgatccagtcggcgcggatgaatgggcatgatccgtatgcctatctcaaggatgtgctaacgcgactgccgacacagaaggccagcgctctggccgagctgctgccgcacaactgggtatccgtcggcaaggtgtaa

SEQ ID NO: 327697 - DNA, 822 bp, Pseudomonas aeruginosa
ttgttcactgtcgccaagcttgatgactttgtgccagcgacccaccccctgcgcgccatccgtaagctggcagacaccgctctgcagcggatgagcgtcctgttcgacaccttgtatgccgacaccggccgcgcctcggtcgcccccgagaagttgatgcgggcgcagttgctgcagttgttctactcgcttcgcagcgagcggatgctgatggagcagttgggctacaacctgctgttccgctggttcgtcggcctggccattgatgatccggtgtgggatcactcggtcttctcgaagaatcgtgaccgcctcaatgcccaggccgtggccgccgagtttctgagcgaggtggtacgcctggcggagaagcaggggctgatctcggatgagcacttctcggtcgacggcacattgctgcaagcctgggcctctcagaagagtttccgtcccaaggacgatacgccagacgccccgggccccggcccgcgcaatgccccgccggacttcaaggggcacaagcgcagcaacgacacccacgcctcgaccagcgatccggatgcccggctgtaccgaaagagccacaacaccggcgcgcagctgagttacatggggcatgtgctgatggaacaccgcagtggcctggtgcgcagtgctcatgtgactctggccggtggctgtggcgaacgcgaagccgcgctggcgatgctgagcaagctgggtggtcgccgtcgacgcaccttggctgcggacaaggcttacgacacggcagacttcgtggccgtcagccgcacctccagctgcttcttcaccagtttgtag

SEQ ID NO: 327698 - DNA, 1131 bp, Pseudomonas aeruginosa
atggcggcgccgcgagtagccatgcgaaacatcaaagaatgtctgcgcctcaagcttgaggccggtttatcccacgagaagatcgcccgcgccttgcagctgtccaagggcgtcgtcagcaagtacatcgcggcggcgcgtgtggccgggctggattggccggcgctggtggccatggacgaggccgcgctggcggccgccttgtttgcgccagcgtcgacgggcaagccgcgcggtgagcgggtgctgccggacgtgctgagcatccaccgcgagctgcgccgcaagggtgtcaccttgcagctgctgtgggaggaatatctcgccgcgcatccgcagcagccgacctaccgctacacccagttcgtcgagcactaccggcgttacgcccagacgctcaagcgttcgatgcgtcagctgcaccgcgcgggcgagaaactgttcatcgactatgccgggccgacgctgccggtggtcgatccggccaccggcgaagtccgccgggcgcatatcttcgtcgcggccctgggcgcctcgaattacacctatgcctgcgcgacaccaggtgaaacccaggtggactggctgacctcactgggccaggcgctgacctacttcggcggcgtgccggagatggtcgtgccggacaacctgcgcagcgcggtgagtaagagccaccgctacgagccggacatcaacccgagctaccgcgatctggccgagcactatggcgtggcggtggtgccggcgcgggcgcgtaagccgcgcgacaaggctaaggccgaggtcggcgtgcaggtggtcgagcgctggatcctcgcggccctgcgcaaccgccagttcttctccctgaacgagctcaacacagccatcgcggcgctgctggccagactcaaccaacgccctttcaagaagctgcccggctcgcgccagacggccttcgacagcctggatcgtccggccatgcgcgcgctgccggagcaaccctacgtgtatgccgagtggaagaaggcgcgcgtgcacatcgactaccacgtcgaggtcgatggtcattactactcggtgccctacaaactggtgaagaagcagctggaggtgcggctgacggccacgaagtctgccgtgtcgtaa

SEQ ID NO: 327699 - DNA, 2514 bp, Pseudomonas aeruginosa
atgccagatacatccaatcattcgaagagtatggaccagccacacatcagccctgactcacggcatgcacagctgctagcgttggctgcagatgctgggcgtgatgttggtgtgatagtggagatgctgaggtttctagatgttcattcgcagctaattgatttccctcgggtcatgcagggggttgttaatgcgcttgatgccatggacgtagcgccagagctcagcctaggtgcgcacgatctcagagcctggcgggacgagtgctgttggattatttcaatccgaaacaatcctgattttattgcggctttgggccccatgttttaccagggagatgagctgcgtacacgtaacccggtcatcggtaagggggtacaggagcgcgcattcccatacgcgacgctgtggcacgaacctgcagactcagaaagcggacaggattactaccggcttattgggcagctacttgtggcctatcagcaaagggcggatggcctgggactgcgcgggcagagatacagcgtctacctagagctccgagcgctctgcgcattgcagatactgtccataccaagtgatctaaatatatggtccagttctgctgtatttgcgcagggctgtcgtcaattcgacgccggcaattcaactaattatcttgcagagtacttcgcgccgatcgttcgcctcgtccgttacctcggtggtgaggaaccgccagaacgtcacggtggtggtggccatcgtcagcatggcggctcaaatagcgcaggcctaggcgtactaattagccagggtgccaccgagttcccgctcgaggatccagacgacccagatttgctccctggatatataagttttgtggcgtctcaaccgctagacgataatttagatgaagcactgccgctgggcgaaagaactgctgcaagtgaaatatgtttgatcgatacaagaggtgaagtcaggccatatgtggctgaattgctcagccatgagggtatgctcgctcatattgctcgcagtcggcagtttttaccgtttggctacaacctgctcacgcagtatgaactagcaaacctactatttggtgtcactgatgaatttttgctctgtcgggagcgaattcgtaatgctcctgcccaagagcagataaagaatcggaggcgcttggaggcactgctggtacttcatctcatgctctggttcggtcgttcacttgaggactgcaaaaaactacggatagctgagcgcaatgcgcgcccgagctcggtgctggagttggttctggctgatgaggcagggccggcggagttcagattttttgcacctacaccggactatgcagcggaagagcacttgcctcgaaaggccgttcgagcatctcagccaacaatatcggtaccggacatggttggggcagctgcgctagttatggcaatcagggacctgtcgccggtgaatggttccgccgttatcacttgcaaggtcaaagacctagaacgtgaaatccgcactttgttgagcgagcttgggggcgaagatcctcgctacacgatgcacaaagtgcgctcctacctacatcgccaaatcatcatagactctcacgatgtggttgcagccaccatgctatcggggatgccttgtctatcggccaacacaccactgtattacagccagtacagcattaactatttacgaggcctttatcaccagtcagttcagaaggttttaaatggggtttatgccaccgtggggctggaggcgccgagtgccccaatgccctccgttccggaggcggctgttggtgcccgaaattgccttagactggatacggtaaagggtaatctcgaggcgttgctggtagtgctgcgtaaacgccctcgaaaaaatcttcagcagcttgtccattggcataactgcttttcgctgtggacggttcaaatgttctttatggcgaccggatgtcgagctattcgcgacccgttgaagcaggaagacgaatttttatcgcctgggggacacggcgcgctgggggacaaaggctcagatgataggcatatgagtcgcctagtagtgttgactgacctgctaaaacgacagttaaaagcctataagactcactgcagagcaattaccgcacaactcgagttacatgcaccggctcctaccaacggatttttcctgcgcttaaccgatgatggttgtctttgctacgaggaaattcgaccgctccatatcaaggcagtaatgcgccagatcgagggtttcacacctcatccagtgaatggattccgcaaattcttgagaactgagctcgccgagcgcggatgtccgcctgagacactgtcggctctgatgggccattggctaagtggcgaagaaccacaagatatctactcgagtttttgcccgcgtacctatgtccaaggtcttcatgcccacctgttaccactcatgcgggagctcggttggacggttcgcaacagccacctgattgtggaggctgatgcatga

SEQ ID NO: 327700 - DNA, 3114 bp, Pseudomonas aeruginosa
atgaatagctcacgactttcggatgaaatgctgtctgttgtctggagcccagataaacatgatccagagtggaaaagcggatatctgataacactccgggagcgctgccaaaactccggcaacagtattggtgaatggctctgcggacaacgttcgctgcgtagctttcccatcaaggagatgcaaaatctcgagaatcagctcgaaagctcgacattgcgcaacacactgctagatgtgacgcgtcgggcacagcgttttaatccgagcttgccgctggctcggatagcgatcgaaacgccgcgccgacctaatccgattaatccagacctatacaactcagaaaatttgccagccagtcaagatgtgatcaatacgctagaacgtgcaatcagactagaccttgaaaaacttacatcccatgaacgtattgggatacttctgctgagtgctgcctattacggcgctctgattgacattccccagctgaacgcgctaactcaacttgatcctgggcaggtcatttggatatccggaataccagagttccggttgcaactctcaatccgaggtcaacctgaggctgagagccggcagtggtttccagacccaataacgctctcgcttctgtcgcgctgcgctgcagatctagccgagaaccggtcttacttggatcgaaagggcgggaagttaaagtgtattcaagcggcgctggccaaaggagaaatttgccctgataaccagccagcctctctagaacgagtgtttgagttgctgcgtattgagcgtcaaacacagttgccacagttgtcaataaattatgctacaagatccaactttgtgtcgcattctgttttgtcggactcttggcagcatttgaacggtagtgcaccggtaccaagtagcgaagagaagcagaaacggaaaaagcaccggtttcgcaggccccgacaaaatgttcccgaatggttgactgtgttgtgccgaaaagtccgcaagcggcaaatttcaccagtcgagaatctatctccacctcagacgcttgaagctttgattaatggctgggcggcattcctgcttcacggccgctcgttttacggcaacatgttacagcccaaaacagttgccaactatgttcgggatgtcggtgtaggtttggacaatctgctctgtgccgactcgatcttggaagtttcgccggatgcgcttgaggagctctatgagctgatgctagaggctcagcccacctcgtctatgaggaggaatctcgccaggggattgttggagtttcatggtcacctgcagaaaacttttgcgtatccgccaatcagcccctatagcacgctgggcattgggaaaacacctcagttcgtcgatgctcagatcctcaatgaggaccaatatcgtctggtcctccgggacttagccacaggccctttgagcctgcgctcaccacgtctcgccatcgttgctcaagccatgatgatcttcggatttcgtctgggattgcgccgcaatgaggcgctgaaattgctgcgtcgagacctgcaattgccttcgctgcctgatgcgcgagccgctgcagtaaggcgtcgacatcagaacctcaagcggctatcgcctgagcgatttactgttcttgagcgaccgatcaacttgcttattcgaccacatgctcagcgcgcgttaaaaacacgcaactcgacacggacgctgcaacttcacgtgttgcttgagccagatgagttgcagctcattgagcgcctggcccagctacgtgatgacgaagagctgaagagtccatattcggaattcttgttctgtatcccggaattccagactcgatgggtatctgagtcaacactgatgccagctattcatgacgcactacgccgggtgactgggtgcagcgatatgcactatcaccacctgaggcattcggccgcgacgtggttgacgtttaagttagccgcgtcagcattcggtattagtcaggaggctgggttgctgttcggtgagcatccgcaaaccatgaaatggctgctggacacagaacggttcaatcgagcctttcttcactccccggagtccgccactcgacgtgtgatccatatcaccagcgctgtgctcgggcatgcgagtcccaaaatatccctgctccactacatccattgcatgccatggttatcagcgctgtgctggcagtggaatcctgaattttggccgcctggccatgtcatcgcgaaaattgcccaggtcagtttgccaaacaagccggacgacctacctgcgccaggcctgcatgcagagattcggcacatgcggagaatcatcggccgtatgcgggtctataggcgcagcaaccaaggaaaaattaagcgtccgctgatttcccatcagacgagtgagggtggatgggcactgacgagaatgaatgaaatctcatccatgctctcctatgaggcatacgcggaggcatcggggcagtcggtcaacatggactgggttgagtttaccgaagctgatcggtcggccatgctggaacgggcgaggtacattagccacctcggcaagcatcgcctgcagagtccagcaatttctgactcagatcatagaattgagcttgtcccaagaccgcctaaacacggaggtctggccggggtggtggcctatgcggatcagctctatcgcctgctaagcagccggcataaagccaaagctggtcgagtgctggacgatttcgtggaacgctgctgggcgagcgagacgacactgcgcttctaccccggtagggatgatcagagtgctcgtgagtacctgtggctgttatctgagctgggcgtcccttgggctgatattgagttcatcatttacgatgaacgcacgcccaggcaaaccaaaagtcgttggcgcacggttctgggaaaacctcgtttgaggatcattgaacaagtcccggagaatcgaagcagccagaacagtcacataggcattcgagtgatgctgcgtttgccaggtgccaagcccactgctcaggagcagaaccatcactccggcgccgccttgcgctacctgatgctgatggcctccatcgactggcatttccgtgcctga

SEQ ID NO: 327701 - DNA, 213 bp, Pseudomonas aeruginosa
atggtcaagtgccatttgtctcgcttactgggcgagcggaaactgaagatcagtgacgtggtcagggacaccgggatcaaccgcggaaccctcacgcggctctatcacgagaccgcgcagagggtggagctcaaggacctggaaacgatctgccagtacctgaactgccaggtgggggatttgctggaattgcaggatgatccggagggctga

SEQ ID NO: 327702 - DNA, 234 bp, Pseudomonas aeruginosa
atgtctcacacatacctgactaccgaggaactggccacgcgcatgaagtacgacgcgcgcaccatccgtaatcgtttgaaagattcagtcctgctcgaaggaattcactacttccgtccctttggcggccgcaagatccttttcatctgggaggccgtcgaagaagacatgcagaaattctcgcgggcttctgggctggttccgatggctggtggaggcatctgccatgggtaa

SEQ ID NO: 327703 - DNA, 1161 bp, Pseudomonas aeruginosa
atgggtaagattcgtgcccgtgccgacaacgaaaagttgttctttgacttcacctacctggatcagcgctgccgcgagcagaccacgttgcctgatacgcctgctaaccggaaaaagctggagaagatccttgagcgcatagaggcggaaatcaccctcggctgcttcgactacgccacctacttccctcaaagcagcaaagtgcaagagatcagtcggctgcaggctggctgtgcatcgctgaaaacaccactgttcaaggattttgccgaattgtggtttgaggagatgagggtcgagtggcgtgatacgcacgccaaaaccgtgcgccttacccttgataagcatttgctgcctgagttcggcaaaaaagaggtcagcgccatcaccaaagcagaacttctgtcattccgctcggcactcggcaaagtccccgggcagaaaggtcagagtctgacagcgacgcgaatcaaccacatcatgacgccattgcgcatgatccttagtgaggcagctgaccgcttcgagtttacctcgccatatctcaacatcaaatcactgaaagtccccaagacagacgtggaacccttcaccttggatgaggtgctgcagatcctcagcacagtgcgtgaggacttccgcaactactacaccgtgcgctttttcacaggcatgcggacggccgaagttgatggtctgcaatggaagtatgtcgactttcagcggcggcagattctgatccgtgaaacttgggtgggcggcaagctcgactacaccaagaacgacggctcacagcgtgagatcgatatgtccgagccggtttaccaggcgctcctcggccagcgggagaaaaccggcagcggccagttcgtcttctgcacccgcgaaggtacgccgcacgcataccgcaacatcaacgaccgggtttggtacccgctgctgcgacacctgggtttgcgcaggcggcgtccttaccaatcccgccatacagccgcgaccctctggctggcggctggtgaaaacccggagtggatcgcccggcagatgggacacaccaccaccgagatgctgttccgtgtctattcgcgctatgtccccaacctgacgcggcgtgatggcagtgccttcgacaacctaatcaaagccaatctcaaggcctga

SEQ ID NO: 327704 - DNA, 285 bp, Pseudomonas aeruginosa
atgaaactgatcaaacgtgacaacgtaacccctctgtatccatcgatggaggctcgcgagcataagtatctcaagcatctggcttcagccatgagtcactaccttgagaacccccatggcaccgagcttatttgcatcctcggctccggctacgagaaggataatcggcatgccctcgaaacctgggtcgcctaccaccgcaacgaagttttcgagaagcgcctggagggtcgcagtccgctggactatctgatcgagaagcttgagagcctgttgggtaactaa

SEQ ID NO: 327705 - DNA, 1482 bp, Pseudomonas aeruginosa
gtggtaaacaagcaacgcgtattggccagttgggttggcgggaatgatctaaaggcagttgcaggtgctgaggcaggcccgatcctggcgaccctgagcacggtgtcctttgattgtgtcgagctgatttgctcataccccgccgagcgcgttgaaccctatctggactggctccgccagcaggtcgatgtacccgtcaccgcgcattacgtgaccttgtcttcccccgttcatttcggggagatctaccaggccgccagtcagcatttaaagcgcctcaatactcccgcaaaccagctctccattctgctcagccccggcaccccggccatgcaagcggtgtggattctgctgggcaaaacgcgatacccggcgactttctaccagtcctcacttgagcaaggcgttcagcaggtcgaagtgcctttcgagatcgcggctgagtatgtaccagcggccaatgccatcagcaccgacaagctggttcagctcgccgggctggatgcccctgtggatgcagccttcgacagcatcgtgacgcagagcgagcgcatgctgacactcaaggcgcaggcgcagatactcgcgacgaagcaggtcccagtactgatttacggtgaaaccggtaccggcaaagagttgtttgcccgcgccattcacaatgccggcccacgttctgttgcgccctttgtggcggtgaactgcggggccattgtgccggagctgatcgactccaccctgtttggccacaagaagggcgcattcaccggagcgattgccgatcggcccggagtgttccaacaggcccatggcggcacgctgtttctggatgagttcggtgagctgacgccggatgtgcaggtgcgactgctgcgtgtcctgcaggaaggcaccttcaccccagtcggctccagccaggaattcaaggtcgatgtgcggctgattaccgccacccaccgcaacctgatgcaggaagtcgcccaggggtgcttccgcgaagacctgttctaccgcattgctgtgggcgtactgcacctgccgccgcttagagagcgcgaaggggatctgctgttgctgtccgaagcgctgctggcaggtattgccagccaggacaccagtctcggcgataagaaaatttccgcagaagcaaaaaatcttatccttcagtatccctggcggggcaacgttcgtgagctgcaatccaccttgttgcgcgcagcgctctggtgtcagggtgatttgattactgcccacgatatcgagcaggcactgttcaagctgccgcaagcgcaggctgatgtattggccatggatgttacccaaggtattgatctacaacaggtaattgctgaggtagcagggcattatctgcgtaaagcgctgacgcttaccggcaataacaagacccgggcggccagcctgctaggcctcaaaagccagcaaacgctgagcaactggatggaaaaatacggcatcgattaa

SEQ ID NO: 327706 - DNA, 3402 bp, Pseudomonas aeruginosa
atggacagaatcgcctttatgaaatcagtcaacttcgagttcatccgccccggcaacgagctgctggccaacctcgccggtcttgcagaggctgtcctgcacatcgatccgggcagcgcgctcacccgtatgcgcagctttgccgaagagctgaccaaagccatctacaaggaagaactgctgccgcgtatgccgcagtcgagcttctacgacctggtgaaaaacccggtgtttgttgattgcgtcagcaagccgctggtgcaccagatcaacttcctgcgcatccagggcaacgacaccgcccacggtgccgagggcgatttgcgcaatgcccagctggccctgaagaccgcctaccaactggccatgtacatggccatcaagtactacggcatcgcgcaagcttcgatccccgcatttgccgaggtcaaagacccaacggcgatgctggccagcctgcagaaaaccgtctccagctatgagaaggaactcaaccagcagcaggaagcgctgcagagcgtgatggacaagctggagcaggagcgcacccgccacctcgacaaggtcgacccgcctgccaagcctgaccagcaaaagcgtcagcagcagagccagcaggtggccgacagcctgcagtggaatgaagccaaaacccgcgcactactgatcgacgccatgcttctgcaagccggctgggatgtcagcaaccccgcacaagtcggtcaggaagtcgaagtcgatttccccggcaacgtctccggcaagggccgcgcggattacgtgctatggggcgacaacggccagccactggccgtgatcgaggcgaagaagtctggcaatgtcagtctgcaagccgggcgcgaacaggcgcgcatgtacgccgatggcttcgagcgcatgggcatgcagcgtccggtgattttctacagcaacggctacgaaacctttatctgggacgacaagcagtacaacacctatcgcccggtatacggcatctacagcaaggacagcctcgaatacctcgcctatcagcgccagtatcgcgtccccacgctggagaaacacaaccccgagctgagcatcgccgaccgcccctaccagatcgaagcgatcaaaactgtcgccgcgcacttccagcagcagcgccgcaaagccctgatcatccaggccaccggcaccggtaaaacccgtgtggccatcgccctggctgaattgctgctgcgcaccggctgggccaaacgcgtgctgttcctctgcgaccgcaaagagctgcgcgtgcaggccgatgacgccttcaagcaaaacctacccagcgagccgcgctgtgtgatcggcgaaaccggcaaggtcgaccagaccgcgcgcatctacatcgccacctacccgggcatgatgaaccgcttcgcccagcttgatgtgggcttcttcgacctgatcatcgccgacgaaagccaccgcagcatctacaacaagtaccgcgacctgttcgactacttcgacgcgctgcaggtcggcctcaccgccacgccggtgaagttcatcagccgcaacaccttcgatattttcgactgcgaaaccaccgacccgactttcgagttcggcctcgatgctgccatcaataatgagccgccgtatctggtgccattccgcgtgaaggacctcaccaccgacttcctacgcgacggcatccactacaacgacctcagcgacgagcagaagcgccagctcgaagaggacctcggcgaggaagaggccaagcgcaccaccatcgccggcaaggacatcggtcgcaaaatcttcagcgaagacaccgaccgcatcatcctggaaaacctgatcaacaacggcatcaaggatgaaaccggctcactggtgggcaaaaccatcgtcttcgcccagcgtcaggaccacgccgagcacctggaaaagctcttctgcaagctctacccgcagtacggcaccaaggtctgcaaggtcatccacaacgccattccgcacgtggacaccctgatcaaggaattcaaaaagccggataacgacttccgcatcgccatctcggtcgacatgctcgacaccggcatcgacgtaccggaagtggtcaacctggtgttcgccaagccggtcaaatcctgggtcaagttctggcagatgatcggccgcggcacgcgcctgcgccccaacctgtttggccccggtaaacacaaaaccgagtttctgatcttcgaccactatggcaacttcgatttcttcgagcaggagtatcaggagccagaagacaccggcagcaaatccctgctgcaaaccaccttcgaggcccgcctggcgctggcccaggccgccctgcgtcacaaccatgccgccgccttcgatgccgccattgcgctgttaagggctgacatcaacgacctgcccgacaccagcgtggcggtaaagcgtgagctgcgcgcggtgcaccagttgcagcaaacccaacagctgcagcagttcgatggcaaaacccaacacctgctggccaacaccattgccccgctgatgtccgcccgcgtgctgcgcgacaaacacgccaccgcgctggataagctgatcgccggtattcagtgctgcctggtcgagcaggcaagttgcttcgaggacggcaaaattgccctgctggccgagctggacaagctcgccgtcaacattcaggccgtccgccagaaggatgctctgatcgccgaagtacgtagtgccgacttctggctgcagccgggcatcgacaagctggaaaacgcccgccaggaactgcgcggcatcatgaaataccgtcagaccggcaccgggccgggtgatggcataggaaccaccaaaaccaaggatggcaacctgctgggcgacgagcgcgcggtgtacatcactggcgccagcgaggccatgatctaccgccgccgcctcaaggacattctcgccggcatgcttgccgccaacccgaccctgcagaaaatccacaagggcgagcccattgccgagagcgagttgaagacgctgacctcgaccatcctcaccagccaccccggcgtcagcctggaggtgcttaacgagttctacggtcgcacagcggatcaactgcacctcaccgtgcgcgaaatcatcggcctggatgcccatgccatcgaggaacacttcaaacagttcctccatgcccatcccagtctcaccgcccagcaggtgcgctttatgaacctgctgaaaaactacatcgcccagcacggcagcatcgtgattgaaaccctctacgacgcgccgttttccagcatctcccacgagggcatcgacggcgtgttcgctcccgccgatgtcaccgagctggtggccgtgctcaaaccttttttgaagaaccccgaccaccccggcgcacccgcctga

SEQ ID NO: 327707 - DNA, 1584 bp, Pseudomonas aeruginosa
atgctcaccggcaaaatccgcaacgacatcgacaaactctgggaaaaattctggactggcggcatcaccaacccgctgactgtgatcgagcagatcagctacctgatgttcgcccgcatgctcgacatgcaggaagacgtggccgagcgcaaagccaaccgcaccggcaagcccttcgaccgcctcttccccaataccccggaaggccaactgctgcgctggaagaacttccgcaacatgagcggcaaggagctgcacagccacctcaagcagaaggtctaccccttcttcgcccaactcggcgtcgccgaaggcgagggcggcgagcgtgaaggccttggccatatcagcgagtacatgcaggacgccgacctggagatcaagaacgagtccgtgcttacctccgctgtggagatggtcaacgacctgccgctgacccagagcgacgtaaagggcgatatctacgaatacctgctgagcaagctcaccaccgccggtatcaacggccagttccgcacgccgcgccatatcatcgacgcgatgatcgagctgatcgccccacagcccaccgaggtcatctgcgacccgtcctgcggcaccgcaggctttctcgcccgcaccatggaatacctcaaccgcgtgcactcaagccccgaaggcaccttcaccgacgaagacggcaacctgcattactccggcgacctgctcgaaccctaccgccagcacatcaacagccagatgttctggggcttcgacttcgacaccaccatgctgcgcgtctccagcatgaacatgatgctgcacggcgtgaacggcgcgaacatccgctaccaggactccctgagcaaatccatcaaggagcactacccgcgtcaggaacagaacttcttcgacgtggtgctagccaacccgccgtttaaaggcagcctggatgaaaccaacaccaaccccgacgtgctcggcctggtaaaaaccaaaaagaccgagctgctgttcgtcgcccatatcctccgctcgctcaagctcggtggccgcgccgcggtgatcgtgccggacggcgtgttgtttggctcgtccaaggcccaccagcaactgcgccaggagctgctcgacaacaaccagctggaaggcatcgtcagcctgcccagtggtgtgttcaaaccctacgccggcgtcagcaccgccatcctgattttcaccaagggtggcaccaccgagcgtgtgtggttctatgacttgcaggccgacggttactcactggacgacaagcgcaccgagctgaaaggcgaagccagcaacgacctgcccgacgccatcgcccagtggcacaaataccggcagatggtcgagggcaatatcagcgccagcaccatcaataccctgttcggcgacaagcgcaaaaaggcctttgtcgttccggctgaggatatcgccgccaacaagtacgacctctccatcaaccgctacaaggaagtggagtaccagcaggagcagtacgaggaccccaaggtgattctgcaacggctaaaaggggtggagcaggaaattctggcggatctggatgagctggaggggatgctgtga

SEQ ID NO: 327708 - DNA, 1188 bp, Pseudomonas aeruginosa
atggtgaagttgggtgatgtggccgaaagagttgattatggtctcactgcgtcggccaaagaagataatgaaggtcctcgatttcttcgtatcactgacatgcaggatgatgctgtcgattggagtaccgtaccgtcttgtgaatgttcggagaaagagttcaaagagaatgagctctcggtcggagatatcgtatttgctagaactggggcgacaacgggtaagagctttttaatcaggaatttaccaaggccttcagtttttgcatcgtacctgattcgtgtgcgccccacggatgaagtagattcaaagtacttggcatacttttttaaatctccgcagtactggtttcaaattacagcgatggcagaaggtgctgctcagcctggggtaaactcaagcaaactcaaggagctggaaatccccctcccacccctgcccgaacaaaagcgcatcgccgccatcctcgacaaggccgacgccatccgccgcaaacgccagcaagccatccagctcgccgacgatttcctccgcgccgtgtttctggacatgttcggtgatccggtgaccaatccgaaggggtgggaggttaaatcagtcgctgacttaattcgagcgggtgtaatacttcaggttcaggatggaaaccatggtaatgaccatccaaaagtaagtgatttcacagaaagtggtattccgttcgtaaccgcaaatgttgtgcgtagagggaaaattctctttgatcagtgctattaccttgatcattcttggctggataagcttcgtatcggctttgctaagcccagagacgtacttatttcacacaaagggtcgttggggtttactgcagtcctagatgacacatacgaagattacatttttagcccccaaactacgtattaccgggtcaacgaagaaaggctgttgcccgaatatcttaaagggtattttgattcaggcttctttcagagcttatttgcgaaggagggcattcagtcgacgcgtgcttacctgggtattacaaggcagaaagatctcccagtaatgatcccggagatatctgctcaaatgaaatttctggatgttttttcaaagtacaaaaatttatctgaaaaactatttgagcctacagctagcgctgaatttttttcatccctaagccaaaaagccttctggggcgaactgtga

SEQ ID NO: 327709 - DNA, 147 bp, Pseudomonas aeruginosa
atgcgtcttaagtccgtcaaactcacccattttcgcggctaccgcgccaccaccgttattcccatcgacgaagccatgaccggcatcgtcggtcgccatggcgatggcaaatcggccagccttgagaggtcgggctcgcttgaatag

SEQ ID NO: 327710 - DNA, 2931 bp, Pseudomonas aeruginosa
atgactgctgaatcctcatcgatagatgtcgccccgcactggttgatgcgcctgtttggcgcgcaagcggccaccttctcgttgggtgacaaagggttagaggtcaggaccaagagcggtgagaactacctgatcgaggcgacatcgctggctaacgaggccaccttccgcgaggggatcgttttctcccgtttggttctgcaaacggactgtggcgaaaaggtgttccctggcctgcgcaaggctgacggtgaacggctatttcactggctgcgagcgcactggttacgcaaactggcgcccgagatagagcaggtcgttggtaaaatccgggccctgctgaacaaaggctatccccgccaatcccggctggacgcggccagggttatggccgagcaagccctgcagcgttttcagcgtgtgcctgagccacagtggtgcagcgatgtagatgtcaccccattcaagtggctggcagcggttacccggtggcaggaagcggactgggaaaagctgcgcaagcaatacgttgatcggcaactggcgcgcaacagcgccttcttcgacacggtagagaaccagccgctgaccgagcgccagcgcgttgcctgtgtcgtggatgaagataacaacctggtgctggcgggtgccggtacgggcaagaccagcaccatggtaggccgtgcagggttcctgatcgcaagtgggcaggcccgggcagaagatattctgatgctggctttcgccaacaaagcggcaaaggagatgcaggagcgcatcgatcaccggctgggtaagtgcggtatcaccaccagtacgtttcacaaactgggtaagacgattattgccaaggtagagggcgagcagccctccctttcacccttggcggaagacgacaaggcgctggcctggcaggtgagccagtggttcgagcagcatctcaagactcccgagtaccagcggctggcgattgattatttccagcaccacctttacccggaggcgaacccctttgagttcgcgtcagagggggagtactacgactacatcctagccaatgatatccgcacccttaaaggcgaggccgttaaaagcctgggtgagtgcctggtggcgaactacctgttcaagcagggcatcgcctaccagtatgagcctgcttacgagcacaagacagccagccccctttatcgccaataccagccggatttctatctgcccgagcagggtatctacatcgagtattacggtatcgaccggcagggcggtaccgccccctatgtagaccgcgagcagtaccaccagggtatggcgtggaagcgccagttgcatgccgataaaggtacgcgcctggtggagctgtaccactatcagttaatggaaggtgggttgtttgatgccatcgacgcgcagctggccgcactgggtgttcagtaccaggaattgcccccggaagcggtgctcgaaacattacgagaatttggcgcaatcaacagctttgccgtactgctggccgatctgctgaagcgctaccgcgctaattgttacgagcaagggcaggtggaggctgcgatcaagcgcgcgaagaacccgaagcaggtggacgctgcgctggcactgctgcggcccattctggacgactatcagaccttgttggatagcgccgggcatatcgatttcgatgacatgattggcaaggctattgagtacgtccgcgaagggcgtttccgtagcccgtggcgatatattctggtggatgagttccaggatatctctgaggcgcgtgcccgcttgatcaggtatctgcgggactctgcgccggagtgctcgttattctgcgtgggtgacgattggcaggctatttaccgcttcaccggcagtgatctgagctttacaacggcatttagtgaacggtttggcacgaccaaagtaacggccctcgatctgacgttccgcttcaataacagcatcagcgatgtggcgacgcgtttcgtgctggcaaacccgatccaggtcaggaagcagcttaatacgctgcaaaaggttaaacgccctgcggtatccctgctcagggaagacaaccggcccaaacccggcaacgaggagccaagccggctggagaaggtcgttgcccgcatcgcagaaattgccgagcctgggagcagtgtttatctgcttgggcgctacggctttaacttgccagacagaggcgaactgcggcgactcgcatcgagtttccctacgttagcgctggagtgccacaccattcacgctgccaaaggcaaagaagcggattacgtggtgctgctcggtctggagactggcaagcatggtttcccctcgcagaaaaccacgcatccgttgctggaggcattgctgccggcacaagaggatttcccttatgctgaggagcgtcggctgttttatgtggcccttacccgggcaagacagcgtgcttatctgatcgccgatatggccgtcgcgtcggcttttgttgtcgagttgttgaagaacgaatacgagctcgatctggacgagttctcaacatcactcagccagcaattgctgcacatgctcaagtgcatcaagtgtaaaaccggcaccatggtgtcacggcaaagccagtttggccggttttttggctgcaataaattcccgctctgcgctcacaaggagcgcggctgcgcgcattgcgactcgcaaatgcgccgcgctgggcgcttcaaggtttgtatcaacccagactgtcagcgttgggtgcctacgtgcccgaagtgtggtgcggaaatgacccagcgcaaggggcgaaatggcgagttctgggggtgccggaactatcggtctgagggtgagggctgcaggcataccgaaaacaggatcatgttcgattcgggtttgctgcttgcaggtagtcatgaaagtcgtttttag

SEQ ID NO: 327711 - DNA, 1797 bp, Pseudomonas aeruginosa
atgtcggcacagaaatactcggttaaccaacacctgatcgaaaccctgctgagctgggttaaatccggcgagatcgccattccggaaatccagcgaccttttgtgtgggatgccacgaaggtgcgtgacctgatggacagcctgtatcagggctttccggtgggttacatcattgcctggcgcaacccgacggtgaagctgaaagacggctcgctggccgagggcaagaaggtgctgatcgatggtcagcagcgtgtcacggcgctgaccgccgccatcgccgggcagcaggtggtcaaccaggattaccagcaggtgcgtatccgcatcgccttccaccccatcgaagaacgcttcgaggtgagcaacccggccatcgagaaggacaaaacctggctgcctgatatcgcccccatcgttaacggcgagcagcggtcgtacaaggtggcgagagactatctggagctaaatccggatgtgaaagaagatctggttttcgagcgcctggacaggctgtgcgatatcaccaagaagcagatcggcctgatcgagctggcggcggatttggatatcgagacggtcaccgagatctttatccgcatcaactccaagggtgtggtgctgagccaggcggactttgtcatgtcgaagatcgctgccaacgaggagttcgacggcaacaccctgcgcaaggccatcgactacttctgccacctgtccattgcgcccgagttttacgcgcacattgagaacaacgataaggccttcgtgcagaccgactacttccgcgccatgcgttggttgaagagtgagaacgacgacctctacgaccccagctactcggacatgctgcgcgtggccttcaccaccaagttcaaccgtggtcggctgtcggatctggtcgggctgctctcgggccgtaacttcgaaacccgcagctacgagaaggaaatcgaagaagcgtcctttaagaccctgagcgaaggagtcagggagttcatcaatgaaacgcacttcaagcgcttcctgatgatcattcgttcggcaggctatgtggacagctccatgatcggctcggtcaacgcgctgaacttcgcctatgtgctgtacctcaagctcaagcgcgacttgggcaacaaccccaacatcgaaagctgggtgcgccgctggttcgtcatgtcgctgctaacggggcgctactcgggttcgccggagtcgcgcttcgacaaggacatcaaggccgtacacgagcgagcgtttgctgacgtactggctgatatcgaagcggctgaactgtctgatgccttctgggacttcggtctgccgcaggcgttgaacacctcttcagtgaacgccccggcaatcaaggtgttctgggccgcgcaggctaatcggggtgacaagggcttcctgtccaaggacatcaccgtgcgtgacatgcttacgcatcacggcgatatccatcacatcttcccgaagaacttcctcaagcagcgggggctgctcagaagcaagtacaaccaggtggccaactacgtgtacgtgcagcaggaagtgaacatcaaaatcggcgacaccgccccggccgtttatatggcgaaggtctttgaccagtgtcagcaaggcgcagcgcactatggtgcgatcatcagcctggatgaccttaaggccaacctggcggccaactgcctcccggatgacctcgctgcctatcagcctgagcagttcgaaaccttcctcaccgaacgccgccggctgatggcgcagaagatcaagcagtattactgggggttgtga

SEQ ID NO: 327712 - DNA, 819 bp, Pseudomonas aeruginosa
atgggttttgccaaataccaggaagacatcgtgagtcgatatgtcggtgatctcgcgatgcgctccaccaaggcgccggcttcactacccaagaaaccaagcctgagtaagaagaatcagcctgatcaaaggacaaagaagatgagcagtctcaaaaaattcgctgtcgccacgccccggcctctccccgtgatcgtcttggctgacacaagtggcagcatgggggagaacggcaagatcgaagcgctaaatgctgcgatgaaggagatggtctcaactttcgctcaagagagtcgtctgcgcgccgaaatccaagtgggcttgatcaccttcggtggaaaggcgcagatgcatctaccgttggttgcagcgcatggcgtaactggagtctcggaatttcaggctgccggtgctacgccgatgggtgcggcatttgacctcgctcgtcagttgctggaagacaaggatcgcatcccctctcgagcctatcgccccgttttgattctgttgtctgatggacaaccgaccgacgactgggaggggcctttcaaggctcttcgcgactccgaacgggcacaaaaagcgacccgtcttgcaatggcgattgggccggatgccgatgaagcaatgctgaaggattttgcgaacgacgcagaggctcctattttcaaggcccacaacgcccgggacatccaccgtttcttccgtgcagtgaccatgagtgtgaccactcgcacggcaagccaaaatccagacgtctcaaccgcattcgttgtcccgcccccggatgatgacgcgctggacctcgacttccaatga

SEQ ID NO: 327713 - DNA, 705 bp, Pseudomonas aeruginosa
atgaggtttattgcctgcggcgcgagcgtcatcggcccccgacacctggatctgggcgagccaaatcaggacgcgatggttctcgcgggttgccgtggtggctggattgcagctgcagcagacggtttgggatcgcgagcacgtagtgatctgggggcacgtagtgcctgccaagttacccggcggatcttgcgcgccacatcgagcagtttcgatctgccggcaacgctgcccttgattcatcagcaatggcttaaagcgattggtccgacaactcctcgggacgccgcgaccacgctgctgttcggccgcgtgacagatcaaggcgaggtccatgcagcccaattgggtgatggtcttctgttggtgaaatacgcgggcgagttccgtcgcgtcacgccagagcgcacagcctatggcaatcagacttgggcacttgagtccacacacctgcaggacaaatggagctatacgaaaggccggttcaccgagccgggtgatggcgttgtcctgatgacagatggcgtggccgatgacctcgaacctgcccatcttgccgacttctttgatgcgctttatcaagacgtgagcactcggaatcggcgcagaggcaggcgctggttgcagtctgaactgaatgactgggccacacccttacacagcgacgacaaaacactcgtggccatttttaggacgtctgaatga

SEQ ID NO: 327714 - DNA, 1428 bp, Pseudomonas aeruginosa
atgagcacagcaacaccagaagcgccaaagaaaaacaggacggtgctggaccaacatggtcagtcctatgagctgacggggcgtatcggagaaggcggtcaagggatcgtttgcacgaccaactaccccaacgttctcgtaaaagtcgcgcgtgcaaccacagaagaaaagcgagtcagttggacgagcaagattcgcgcacttatgcgtcagccacttgagggccttccaatcgctcatccacaagctctcattacgcagccgcagcccggttacgtcatggaactgatggatggactggccccaatgactgaactgatgcaggtggcgacggacgccttgatgtcagatgaaggcctatccggttatgtgaagacaggtggtctgttgcgccggttgaagatgctcgcgcgactggctcgggtgctggcggatctgcatggtcgaggactcgcctatggcgatctttctcctgcaaatgttttcgtatcccagtcactagagtacgccgaagtctggttgatcgacgccgacaacgttgcgagtcagtcgcgtgacggtcagcaaggtgtattcacccctgattacggggctccagagattctgaggggagagtccggcatcaatacactgaccgacagctggagttttgcggtcatggcgtatcgcatcctcacgctggttcaccccctcaagggggacgttgtgcttgaaggtgagcccgagcgtgaagaggcggccctccgaggcgaactcccttgggtagatcacccagttgatcgcagcaacgccttgtcgataggacttccccgcgaaatcacgctcaatgcgccactgcgtgcgctgtttgaacgatgcttcaatgccgggctgaacaatccgggtgagcggccaagtctgaatgagtgggcagatgcattcgaggctgccacaggccattgcgatcaatgcgagtcttgcggcagcacgtttttctacacctcgaagcacatctgtccattttgcgatcacgcccaggacacgaatcgcacgattctcttgcaggaatatcactatatgcctccggatctgctccgggagggcttgccggaagatgttccagagtcgttgattcgaaaagagtgctggactcgcacaggcaaggcgatggttttgagtatgagccctgccgagttaaagactttgcccttgggaacgtctctgtacgcggatgcccgtccgctatgcactgtcgaacttgctaaggatggcttgtggatagagccatcagtcggtacgcaagtttccttgcaaagagcatctgacgacaaagtcgtcgcggttgcgcgtcggcagcggctcaagtcagacagtcgttcaggagtgtctttctggctccacctaggctcagtagaagaagagcatgtcgtttggcgtttcaactggtga

SEQ ID NO: 327715 - DNA, 3315 bp, Pseudomonas aeruginosa
atgaaactctgcgactttcctcttctgtcgggtgaacttgccaagttcacatgtgacgacctgggagccgattggcaaatcggtgaggccgtgtcagtacaggcacacggtaatgactatcttctccgacagggcaactccgtttgcgtcggcaaagtagaaggacgccaagatcgaactgcgcttcaggtacaacgaggcctgacgttgtgggtgttaagacaacggcatggcgaggttctccaccttcaatcgctggatttggtcgagcagatccagctggatatggcgatttctgttgatgaggccattgcggagcaattggccagcaggggtgagatttctgctccagacgtacccactgcagttggttggttgaatgagcaattcatctcagctgaaaaagcaccgaccgcagaaatggatcgtgtttttcttggccgtttcgacaacgcttccgatgagagcttcgttctctttggtgcaggctggcgcggcaacgccaaacgagatgctggcgtactgaaactgatgagcgtcactcgtctcaagggggctacagcacgtgtagcgatggccgttggcaagatctcgttccaagatgccagtgtcgccgtgcgtctccagagtacagagcaacgcgcacttttggatgccgcgctgcgcgacaacggcagctacctacgtttatggcaagagtatggtgcgctcgaatgggagcaggctcgagattgtgcgagggaactgggttctcttcgcttcaagagtgcggagctcgtcgaaggtgaactgtgggcctggtttctaaaagttgatgcggatcacctaagggatttccggaaacgatggaaagctttggggctggcaaacacaacgcaagtggagcttggggatcgggagcttgatcttgattccgaggttgaagacgtgccgggcagagctgaccgagcacgccgtcgcccggttcgtggtgtattgcggttcgagcgggatggcgtggtcttggttccgagccaggaccggcgctcagaacgtcccccaaccaaggggtttatctactactcactatcgggtgatgaagccgtacagacccgtcgtgcacgcgcaaggcaatctatcaatgaaggacggcgactgccgcaactgagctacttgctggaaggggtggctccgccaagcgcccggcgacgtcagctcgacggcttatccacctacgccaaatcttgcttcaagggtgttccgaccaagcggcagattgaggcgctggagaaggcgatcaatacacctgatatcgcacttatcgttggcccaccaggaacgggtaagactcaggttattgcagctttgcagcggcgccttgccgaaacactcggtgaaaactcgctgcagcaccaagtgctgattagcagttaccagcacgatgcggtcgataacgccctgaatcgtgcagaagtctttggcttgcctgccgttcgaattggcggtcgagggcgccgtgacgaaggcggtgtcgaccccgttggtgtttggtgtgaacgcaaacagaaagaaatctctgttcgactcgacgcgattcggctgaatgagccgctgactcaaccattggaagagctggatcgacgtatcacagcattgagactcgcgagcatgtcggcacaggaacgtcaaacacagttcgagcaaattgatgtccttttgcgtcagctgttcgatcttgacgttcgtctcccggcccaaattaaggaccgatgggatgagtttcttgcccagcagaagagagtcgaaacccagcgtcaggccaatgagcctgctgggcttgtgcgcttgctgagggctctgcgcaccagttctatcgggttcgccgacgacgggccggacagagctcatcagcttgagcgcacgctgcggcgcagcaacgtcaaacttcaagattcggaatggagtttgctccagcgactttcaacggttgccgatgccactgaagcagatcttgctgaattggctgcgtttaagctgtccatgctggatcgattgagccccgattacaggcccccacagctaaagcaagcgctgagcggcgaagcacttggtctcttggccgacatcgagcacgcaatcgacgcgcctttgcgtcaatctcgccgtggcatctctgcggtagtggcctcgtaccacgcggcactgtcccaagcccccaatgaggcagcgagagcggtccgcgagtacgccagcattgtcggtgcgacctgccagcagtcagctggtaaggcgatgagtagtttgaaagagttgagcgacctagatgcatcagaaggaattgagttcgacacggttgtcatcgacgaagccgccagggcaaaccctctagaccttttcgttcctatggcgatggcgcggcgtcgcatcatcctggtcggcgaccatcgacaactacctcaccttgttcagcgagagttggaagacgaactcatttcgagacaaagcctgactgaggctcaagcgaaggcgtatgagcagagtctttttgagcggctggtgaagcagcttagggagcaagagaaagtcgacaacatcaagcgcgtcgtgatgctcgatacgcagtacagaatgcatccgacactgggcgacttcatcagcaaacagttctatgaatctgagggattggacgtcttgcactcggggcgacctgcggaggatttcgctcacacgattcctggctaccaaggcaaatgtgcggcttggttggatgtgtctctgcaggacgggaaagaaagattcctaaaacccggttatgaaagacgtgcggaggcaatttctattgcaaaagaggttaagcggattgcagattcttgtgggccgtcgctgagcattggggtcatcagtttctaccgcgcccagtgtgacctgatacttgatgcactggctgacgagggcttggcagaggaagaggatggggaaatccgtatcgcgcgctcctaccggcagactgaatcaggtgatgagcgactgcgcgtcggcacggttgacgcgtttcaaggcaaagagtttgacctcgtcttcctgtccgtagtgcgtgctaacgacgtggtgattcccgatcagaaggaaggggaagagcgcgaacgattactaaacagcaagtatggacacttgcggttggcaaatcgcatgaacgtggcgatgagtcgccagaggaagctcctcgtcgccgtcggtgccaaacacatggccgaagggcccgagtccgaggaaggggtcccggctctggctgcattcctcaagctttgcagagaggagatggcgcatggccgctaa

SEQ ID NO: 327716 - DNA, 1464 bp, Pseudomonas aeruginosa
atggccgctaaccgctatcttcgcttcgatgtccgtcgccccccgggtgggcggccgcttctgtggcctgtccgcgtttggaaggtcctttatccaacaaatcgtgtcctcaagttgaacctgttccagcaggcgatccttggactggcaagggccagatgccaagacagttcggaaatggctgagttgctgaggctggaccaagagctggtggccttcatcattgcaactcaactgatcccgaatggctggatgaacacctcgggatcagtcacctctcaaggtgagcgtgtcctcgaagaggctcaggatgccagcgaggaagtccgcatggggtacgcatatcaggacgcgatttcggggaactggctgccgcgattcactgaagaacttccagagatcgaagcgaagcgagtcgatgaacgtggtttccccgtgttcctgcgagacctcgattccggaaaggaggatcgcccgttccgcctcaatcacttccgagagggcgtactggacacagcggccatctttgatgcgtttcagcgctatcggacggatcacgaccatgccaaacagcgtgatgacgagctttcggcacgtgtccggattgagagcctgagctttgtcgaagattcggcgcagccgatgtggttgtggacatggatttttcccgacgaggctgggccacaaccctggttggttgcagatccattcgggttgcagcgggctgcgtcgtggttacgcaaacccctgcaggaagtcttgccgcgaaacgatgcacttgcaagatacatcgctgacgcggtaggcgagacgagatcgaacgatttgtcggcagaggagtggctccgatccctggagaatcagatcgacttgacactgcttgctgactacaactggtcgcggaaggtgccgattgttgagggatacctcgccagcgttctgagacgaaggtccgtgctggctagtcaggagaggtcttggcaggaggatgtgactagccttctcattgagactcacaacctggcagaaagcgtactgcagtggctgttgaatgcatacccatcggacattcgtagattgccgcactggaaagaccagagggattggaaagatggggaagcgcaatattacctccagttcctcaaccttccttgcctcaccgatgacgtaatcaagcgtttgtctcagcagcgcctagatcaggtgcgcacagcggtaaagcgcggtaccagttcgctcaaggcgttgttgtttgcaggacttctagggacagtggatcaagcatcacaccccttcctcaagctatccgctgatgagcttcgactgactcgtctacttgatatggcagatgctcgcaacaaaaaagccgggcattcaggtagcgagagaatcgatagagaagaagctatggaacacgctgactttgtcatcgaatgggttcaaatttttaagggctggtattga

SEQ ID NO: 327717 - DNA, 2373 bp, Pseudomonas aeruginosa
atggcaaaacacaataaggggaacaaagccccagtcgcgcaaaacgcaaatactgcacaaagtccggtcgcatcggcatggcagaaagcaactgctggaattggctcccttgcatcgctggtgcaaggcgatgcttccgctgtggcactccctgacttggagaaaggtcaggtcagcgagttggataaggtagagcccgagaaaaaaatcgagctcgagaggttgctggcggatatctctgatgccgcaaagagagttcgtgatctacatgaagacgcacagaagcgcaccgatgacctggctcgcaaggaggaggcattctcccgccgaagcgatgagaacaagaagcgaaccgaagagatcaacaaactcgacgaagagttgaagcaaagacaagttgagataaaaaagtccgaatcaagtttggccgataaggagcgtgagcttgagaagcgagaactggatgcgcgttccggttttgccgcccaaaacgtggccgcactcagtgatctcaagaaagaaatcgtggagcttgagtctaggaagactgagattcaactcggcatccttcaagcggagcagaaagcacgtgacgatgagtccgcgcgcgcatccgaagtgatggaacgtgaagcggagactgcaaacaaggagagaggtctacagcaaaaacagcggcaactggatgctgagtggaaagagctagagcgtgagcgggcacagatccgcgaagatgcacttcgcgaggccagtcaggaaattgccagattgaccgatgcccgactacgcgcagaggcacgccttgaaaaggtttaccgcgattggacatcgactgaacagaaactagagcaataccgggagttctcagaagctttggcggggaggtctgcccgcgagatactcgacgagttggctgcccaaaaacgtcgtgtcactcaattggaaaatcaaattgtaaacagccaggatgatcagttgcaatttgagaaccaggcgctgcgaaagctccgtgatgagcaaaaggctcaactcgacgaggttcatttggatttggctgatgcaaaagctcagcttcatcgcctccgcctcggcgtgagtgacaaagagaatctggaaaaagaaaagcgcgctctggaaaagaacaatcagatcttgagtgcaaggctcaatgacttgggcaaaacggtagatgacctaacccagtcacagcaatctgagaagccgttccctcaaatggcatggatggattccgcatccactgccgattggatcaaggatcgcaaggccaaggagttgagcctgccggagcaagacgttcctgatctgaaaaaattctcggttgaattgcggcaccggatcgctcaagcggaggaaggtacagaacttcattttgatctcgaagttattcagttattgattgccggattggccatgagcccgcttcacatctttcagggaattagcggcacgggcaaaacgagcctggcaaaggcgttcgccaaggccgtgggagggcattgcactgacattgctgtccaagctggctggcgagatcgtgacgatctactggggcactataacgctttcgaaaagcgcttctatgagcgcgactgcctgcaaggcctctaccgtgcgcaaaccgcagcttacaagaaccggtgcaacatcatcttgctggacgagatgaacctgtcgcgcccggagcagtattttgctgaattcctctcagcgctcgaaaagaatgacccaaatgatcgattgatcagtttatcggagagccagttgccgaacgcgccagcgatgttggtcgaggggcgaaagattcggattcctcacaacgtctggtttgtaggcactgctaaccacgatgaaaccacgaacgagttcgctgacaaaacctacgaccgtgctcatgtcatgacgcttccccgccacgaagcgaaattcaagttggaaacaaagccgaaggccagctttagctatgaatcattgatggagcgtttcggtgctgctgtggaacaaaacgctgatgaggtttcagagttgttggaggagttgaccacgggtccactcacgagcatcttgcaggatcgctttgaccagagttggggcaatcgactcgaacgtcaggccatgcgatttgtcactgtttacatggctgccggcggtcgcaaagaagatgctctggaccatttgcttgccagcagaatactcaggcgcggtaaggtcacagaaagattcgataagaccatcgatgatttgaccgccgtcgaacatgcgcttacgactgtttggaaaggatggcaatctgagcctcgccgttctatggacttgctggctcaagaccgtcgccgtaaggaacgtgtggcatga

SEQ ID NO: 327718 - DNA, 1824 bp, Pseudomonas aeruginosa
atgatatttctggatcgccttacgggtaacaaattcagccgcctacccgaagcgcttctaccggggcgttactgcttgcttgagccactcgtggtcaatggacacagctgcttgcagcccggtgatctgctcgcggatgatggctcgggcatcctccgggtccaagacactgaatcccggatgctcgctatcgatcagtctgacgacgatcaggcggtctccgacctgtctgcagaggcgattatttccatcgccggcaaaatcgctcacgcacatggtgcaaatgtctcgcccttgctgccctctgagatggccgaccaatgcgcgctcgaagaactcgagcgcgacttggcggtggtactcaaaaatggtcatctgcattcaatatcagaccgcccccgcagagaccttcgatatgacgacttggttgcgccagtggcgcgagctcgacggctcgcgacttcagcattaagtcacctcgcatcacactcggattgctggcagcagcgaacgctcagcggtgtgcaaccgcgcaaggttcttgcacgtttcagcgaggacgactatgccatctatgagaacaggctctacaagcggttattggatcgcctagatcgacaccttgccaggagattggctcgcatccgcggagtcaattcacgactggagcgagctttggagttccaagactctgagcagacgcattttcgacttcgccaggatatttgtcgcctttggggcgagtcatatcttgatgacaggactgggatgcagttggaggcaggaaagcgtgccctcagcgatttggagtcccatttgcgcgcaatcagaggtttgaagcaaagggggctttattcgctcgtgcctcctgcatctgtggttcctgcccaagttcaccggacaaacattctcaaccacgatccgcactatcgccatctgcccccgctttgggagaagttgaaagatgatcgagaaggtcggctcttacccccggaagaacgcttggcgcggcaaatgcaatttcaactggcgtatgtcagttacgttggtcttgtgatcaggcgtgcgcttgaacggtatggcctgcgcagggttgatggaaattacgtcttcagttgggcaggacggagtttcgtactccggcatgatgtacatgattgggtcgtaactcagtcagagggatctaccttgaggatcgtaccgattgcctggttcggcgcgtcaataaatatcagtgagagtctggcgcctggtcgcatcgtgtgttggccaggcgggccaaccagtgtcgcatcgccgcagagtcttcctgtctctccgctggacctttatgtcgtggagaaggtggggaagttgatcgatgagtggatgttgcggcaattgctccaaggtcatggccgaaaattggggccgttgcccacaccggccaaaaggctaaccgaggcttggccagaacagtttgaatctatttcgtctacccatgtcaggctcctcgcgccagtcgatgctcagaaagcagccgaactgaaggcttcactcaaaggttcagctaactcgcaagtagttgatgccgtcggggatgccattgaacagatctcagcattcgcccaactttgtgggcatccggctcgattcgagcgcgggcagcagcaggacttctactgtaaatgcgaaacatgtcaggcaacttggtcgctcaagaccacaggcaaacggcgacacttcgctatgcgaccgaagggagcatccgctattccagaagaggacgggtttctttggtctgggagggattggattggattcgatttgagttcagaaaagtga

SEQ ID NO: 327719 - DNA, 387 bp, Pseudomonas aeruginosa
atgcccgaagaacatctgtttcaggatggaaccctcagcttcctgccgacccgtttgaaccggcaaccggtagtcatcggcggcctgaccgcagacgaaatgtggatcacggtcttcaccagcggagcagccgggttcgttcttggcatcccggctgccttggtcgcaggtaacgctgcctgcattccactgggcgcgctgctggtcggcgccctcggcctaggtatcggcagccgcgtcctgcggcggatgaagcgggggcggcccgatacctggttctaccgccaggtggagatggccctctcgctgcgctttcccgtcttcggcaaccgtcgcctggttacgcgctccggcgcctggaccagtcgacgcacggagtccccatga

SEQ ID NO: 327720 - DNA, 357 bp, Pseudomonas aeruginosa; identical to SEQ ID NO: 325475

SEQ ID NO: 327721 - DNA, 651 bp, Pseudomonas aeruginosa
atgttcgggtcgctgatcggcgcaatcatcgtggagtgggtatgcctgtatttcttctggcctgacgcgggctggaagcatgcccaggccatgtttgagtacgaactcagttggctgtcgcaggggctgctacacagcgtcgtcgtgcaggagccaggtcgaaccgccacctggctggcccagttggcctatgactggttgttcgtgaagaccgggatggtcgactggatgaccaacatgactaccatcgcgcaggccgggccacggagcccgctggacgttcgctatctcaccgcccagggtgtctccacgctgcagaactacggcctggccgcgctgtacacggtgctgacattcgtcgtgcgcctggtgatcctggtcatgacgatcccgttattcgtgatggccgcgttcaccggcctggtggacggcctggtgcgccgggacctgcgcaagttcggcgccggccgggagtccagctacctctaccacaaggcgcgcggcagcatcattccgctagcggtcgtcccttggacgctctacctggcaatccccatcagcatcaatcccctgctcatcctgttgccctgcgccgcgctgctcggcgtagcggtatgcatcacagcatccaccttcaaaaagtacctgtag

SEQ ID NO: 327722 - DNA, 1002 bp, Pseudomonas aeruginosa
atgacaaaactctactttgatcttctgaactcgcctgccgaggctcattcgtcgatacaaaagtctttatctgtgcaggcaatctccacaactgtcccaatactggagtttccttcggaaaccgtatacgcctatgcatcgtacataaatgcattaagtatcggtcaacgcatagatcctgcattcacccagagcttaacgagtgccatatccaacctggcaggtcgcccgattgcagtaagcgacatttaccaaaaaattcatgaaaccacactgagaacacctgttgagatgggcgttcgtcctaatagcatcacctttgaggagtatcaggccaccataaatcagcaagccatcaacatggttcaagatatgcaggatggagacaaaggtgagaaggtggaggccctccaggccaatatgcagttcctgtatggacaggagataaatactgatttcatcgctcgtaatgaactcgctgctgggcagagagcgaaaaccgtcgcaatagttcaggggcatatcaccatcgggtacggcttcgataccttcgtgcatgaagcgtccgagctaaactctttgaatcttgttggttctacgcgacagaaggtattacctgcattgcagctatcaacgtccgacccaggcttctggagcgtctatgccttgctgggacaaagtctcacggatgacgatgggctattactctttagtgccaaagcgcgagctgttgttcaacgcatagcaagcaaccagtttgcaggtaagtggaatgggctacccccagctatcaaaacggttgcgcttgatctatattatcaatatgggcagactggtaattttccaaaatttcaacaagctataaatagccatgattggccggcagtcatccatgaacttagaaactggaatggtgtaccgaatgatcctctccagttcattacaaaacgattggaagagcgagccaagtatctggcaatatccttcaactatgagcaatga

SEQ ID NO: 327723 - DNA, 1536 bp, Pseudomonas aeruginosa
atgacttcctcgcccaaccttgaccagatgaccccggaacagcttcgtgccttggcggcacaggcgttgcagttgcaatcccaggtcgaggcgatgagcaggaaaatccgcaacaatgaaaccctcatcgaacagttcaagttcgaaatcgctctgctcaaacgccacaagtttgccaagcgcagcgagcaaatcagttcggcgcaaggcagcttgctggatgacctgctcgacaccgaccttgaagctatcgaggccgagctgaaacaactccttccagcttcgccacaagccgagccacggcaatccccgaaacgttcgccattgccgccgcagttcccgcgcacggtgattcgccacgaacctgaaaatacccaatgcgcctgcggctgccaacttcaacgcatcggcgaagacgtcagcgagaagctggattacacgccgggcgtgtttaccgtcgagcaacatgtgaggggcaaatgggcctgccgtcagtgcgaaaccctgatccaggcgccggtgccagcccaggttattgataaaggcatcccgaccgcaggtttgttggcccacgtgatggtggccaagtttgccgatcacttgccgctgtacagacaggaaaaaatctttggccgcgccgggctgccaattgcccgctcgaccctggcgcagtgggtcggacaaactggcgtgcggcttcagccactggtcgatgcactgcgtgaagccgtgctgaaccaggacgtgatccacgccgatgaaacaccggtgcaaatgcttgcaccaggcgagaagaaaacccaccgggtctatgtctgggcctacagcacgacgccgttttcggcgctcaaagcggtggtttacgacttcagcccaagccgtgccggagaacatgcacgcaacttcctaggcgactggaatggcaagctggtctgcgacgacttcgctggatacaaggccggttttgaacaaggcatcactgaaatcggctgcatggctcatgctcgccgcaagttcttcgacctgcatgtcgctaacaaaagccaactggccgaacaggcgctgcactcaattggcggtttgtacgaggttgaacgccaggctcgggacatgagcaacgaagaccgttggcgaatacgtcaggaaatggcggtaccgatcagcaaaacactgcatgactggatgttggcccagcgcgacctggtgcccaacggctcggccacagctaaagccctcgactacagcctgaaacgctggggagcgctgacgcgctacctggacgatggggctgtgcccatcgacaacaatcaggtggagaaccagatacggccgtgggcgctcggacgctcgaactggttatttgccggatcgctgcgcagtggcaaacgagcagcagctatcatgagcctgatccagtccgctcgcatgaacgggcatgatccgtatgcctacctgaaggacgtgctaactcgcctgccgacgttacggtcgaaagacatcagccagttgctgccgcatcagtgggtacagatctag

SEQ ID NO: 327724 - DNA, 336 bp, Pseudomonas aeruginosa; identical to SEQ ID NO: 326182

SEQ ID NO: 327725 - DNA, 1890 bp, Pseudomonas aeruginosa
gtggcacctctcgacaacgccccccctagcgggccgctacaggatccatccctggcccgctacagcgagcggcagctcgccgtcgccaacacctgggcaacacatttctccctcgcagggacagctcgaaccaagttcatccgtcactacctgcgcagcacatctacgaccaggtgctggtgcatcacagtcgctgctgacaacggtgtgcgttacaccatcatgcgtgcagggccgctactccaggtattcgacggtcaactaattggtgcgtgggagtgcaagcctgcccatcgtatcccggcaagcacgccgtctcgagcaggggccttgaagctgctacagcgccttcaaaagttcgacgacgcagttgctgtactcagctcatacacaaagcgagcgcacgacctagccacacagatggccagggacgatctcggacttcaacatcgcctcgtgtatccgagccacagcaacaagcgctactacgcgccaaggcaccagttctacttgaagcagatcggagcggtcttgcgaaccttcagacaggtcctggaccaagacctgctgttcgccatccgctcggttcggtgcctctcgccccagctctacaactggctggctcaaggcgaccaggtgcgccggctgcaaatgctgaaggctcagccggtcttgacgccgctactggtggattgcgaggagggagtctggcctcacacgacgaccaacgacaacggcgagagcatccgccattaccttccttgcccctttccccagcttgacagtgaacgaccgcaggccgccgccatgccatgcgacttgtacctcgatatgggccgtattcttgggcaggtcgcggacgaaggaatttcggtcatcaactttttcgcctggctatttcaggcgccgcgggcctcgattcgatttcttagtcacgtcagtcccggccgtgcgggaggagctctcttccatcgcaaacgggaaggccgacattcgggatggcatgctctcctactggcggcatcgctaggtaaccggcggccgatcactcgcgctcaatggacagcattctatgccgcctacaatgcgatcccttggcaagttcacaacgccaagcccgactacaaccgtctcttcaacggctgcccgtcggattggcaggatccggcatggcttgcaatcactgcacggctgagagacatcaaggagttctataccgccctcgaccaggggaactcacaggttgttcggcaggcgcgcagcgccctgaaagcgtatctgggtcattgtacctaccgacaagctggcaacctggtggacgactaccaccaggtccagagggagctgcgtgccgcagtgcagagcagcctgcccgatctggtcgacaccgacgagtacaccacctgggagggaatgctgtctgtcggtcttatcgattgccctaatggactgcagatcgtcgagctccgctgtcctgccgacctatatgccgaacatatcgctctggcacattgcatcgatagctacgaccaggccgcctaccgaggagactgccgactgctctcagtacgtgaggctggtcgtccgctggcctctgccgaattggagctcaggcgtgagcatggcgagcctataggtaggccctggagtcccaagcacctttccacggtgcaactgcgcgaattcgataatgcccccgtgccgaccgactcgcctgccggccaggcataccgctggttcatggaacgaattcgctctggagccatagcgacgaacctgaactggcccgacatgaccgtccacatgacgcgcttcgccaatggtcgctggaaggcgggcctcgccgaagccacggcgaagtggctgctcactcagttggaagaccgatga

SEQ ID NO: 327726 - DNA, 1326 bp, Pseudomonas aeruginosa; identical to SEQ ID NO: 326169

SEQ ID NO: 327727 - DNA, 2709 bp, Pseudomonas aeruginosa
atgagtgagatcagtcgcgttgcgctgttcggcaagctgaacagcctggcctacaaggccatcgaggccgccacggtattctgcaagctgcgcggcaatccctatgtcgagctggtgcactggttccaccagatcctccagttgccggactcggacctgcaccagatcgtccgccagtccgggatcgacccggcgcgcctggccaaggacctgaccgaggccctcgaccgtctgccgcgcggctcgacctcgatcaccgacctgtcctcccatgtcgaggaagcggtggagcgcggctgggtctacggcagcctgatgttcggcgagagccaggtgcgcaccggctacctggtgatcggcatcctcaagacgccgagcctgcgccatgccctcaccgggctgtcggcggaattcgccaagctcaaggtcgaggcgctcaccgagcgcttcgacgagtacgtcggcgcctcgccggagaacggcctgtcggccagcgacggcttcaacgccggcgccgccccgggcgaggccagcggcgccctggcgccgagcgcgatgggcaagcaggaggcgctcaagcgctttaccgtggacctcaccgagcaggcccgtagcggcaagctcgaccccatcgtcgggcgtgacgaggagatccgccagttggtggacatcctcatgcgccgccggcagaacaacccgatcctcaccggcgaggccggcgtcggcaagaccgcggtggtggaaggcttcgccctgcgcatcgtcgccggcgacgtcccgccggcgctgaaggacgtcgaactgcgcgccctcgacgtcggcctgctgcaggccggggcgagcatgaagggcgagttcgagcagcgcctgcgccaggtgatcgaagacgtgcagagttccgagaagccgatcatcctgttcatcgacgaagcccacaccctggtcggcgccggtggcgcggccggcaccggcgacgccgccaacctgctcaagccggccctggcgcgcggcaccctgcgcaccgtggcggcgaccacctgggccgagtacaagaagcacatcgagaaggacccggcgctgacccggcgtttccaggtggtgcaggtggacgagccgtccgagcacaaggccatcctgatgatgcgcggcgtcgcgtcgaccatggagaagcaccaccaggtgcagatcctcgacgaggcgctggaggcggcggtccggctgtcgcaccgctacatcccggcgcgccagctgccggacaagtcggtgagcctgctggataccgcctgcgcgcgcaccgccatcagcctgcacgcggtgccggccgaggtcgacgatagccgccggcgcatcgaggcgctggaaaccgagctggcgatcatccgccgcgagagcgccatcggcgtcgccaccgccgaacgccagcgcaacgccgagaccctgctggccgaggagcgcgagcgcctggccgccctggagcagcgctgggccgaggaaaaacgcctggtcgacgaactgctggagacccgcgcccgtctgcgcgccgccgccgaagcggtggacgccggcggcgcgccgctgggcgaaggcgaggcgcgtctcgacgaggaacagcgccaggcgctgcatgcgcggctggccgaactgcaggcgcaactgagcgcgttgcagggcgaagagccgctgatcctgccgaccgtggactaccaggcggtggcctcggtggtcgccgactggaccggcatcccggtcggccgcatggcgcgcaacgagatcgacaccgtgctcaacctcgaccggcacctgaagaagcgcatcatcggccaggaccacgcgctggagatgatcgccaagcgcatccagacttcccgcgccggcctcgacaacccgagcaagccgatcggcgtgttcatgctcgccggcacctccggggtgggcaagaccgagaccgcgctggcgctggccgaggccatgtacggcggcgagcagaatgtcatcaccatcaacatgagcgagttccaggaagcccacaccgtctccaccctcaagggcgccccgcccggctacatcggctacggcgagggtggcgtgctgaccgaggcggtgcgtcgcaagccctacagcgtggtgctgctggatgaagtggagaaggcccacccggatgtccacgagatcttcttccaggtcttcgacaagggcgtgatggaggacggcgaaggccgggtgatcgacttcaagaacaccctgatcctgctcaccaccaacgccggcaccgagatgatcgccagcctctgcgccgatccggaactgatgcccgagccggaagccatcgccaagtcgctgcgcgaaccgctgctgaagatcttcccgccggcgctgctcggccgcctggtgaccatcccctactacccgctcagcgacgacatgctcaaggccatctcgcgcctgcaactggggcggatcaagaagcgcgtggaggcgacccacaaggtgccgttcgagttcgacgagggcgtcgtcgacctgatcgtctcgcgctgcaccgagaccgagagcggcggccggatgatcgacgcgatcctcaccaacacgctgttgccggacatgagccgcgagttcctcacccgcatgctcgaaggcaagccgttggccggggtacgtatcagtagccgcgacaaccagttccactacgacttcgccgaggccgagtga

SEQ ID NO: 327728 - DNA, 510 bp, Pseudomonas aeruginosa
atggctgaactgaccctccaggagcgcctgcagccgtcgctgctcgaccgcctcaccgacgacgagccgggcaacctcaaggaagccgcggagcgccgggtgctgaccctgagccagctgaaggcctcggtgctgcgcgacctggcgtggctgttcaacaccacttcgctgttcgaccacggccccgccgcacggatgccggccggcaactcggtgctcaactacgggctgccggcgctggccgggcacaccgcgtcgagcgtcgacgtgcatgccatcgaggcgctgctcaccgagaccatcgccaccttcgagccgcgcatcatccgttcttcgttgcgggtgcgcgcgcaactgctgcccggcgagatggaccacaacgccctgagcttcgagatcgagggcgatctctgggccgaaccggcgccgctgcgcctgctgctgaccaccaacctggacctggagaccggtcacgtgcgcgtcgcccagggcgagcggaggcgtacatga

SEQ ID NO: 327729 - DNA, 222 bp, Pseudomonas aeruginosa
atgagcaagctgctcaaaaatttcatcttctacatcctcactacacccgggaaaaatgtcataaatatgagtatgattaacaaatctctctacagactggatatcatcttcgaatcttgccatccagccattaaacttttctgcctcatagttcatctccagtattaccgcccccctatccaagataaaatcaggaaaaaccaatttccccaagatcaataa

SEQ ID NO: 327730 - DNA, 309 bp, Pseudomonas aeruginosa
atgagcaagcaacgacgtacgttttccgccgagttcaaacgagaggccgcggccctggtgttggaccaaggctacagccatatcgacgcctgccgttcgctgggggtggtggattcggccttgcgccgttgggtgaaacagctccagcaggagcgcgatagcgtgaccccgaagagcaagacgttgacgcttgagcagcaaaagatccaggagctagaggctcggatcaaccggctggagcgggagaaagcgatcctaaaaaaggctaccgctctcttgatgtcggacgaactcgatcgtacgcgctga

SEQ ID NO: 327731 - DNA, 2532 bp, Pseudomonas aeruginosa
ttggatgaactgctcccgctgcatgtgctgcggctgttgcgcagcctggcccaagatcatgatgccgatgatcagcagcgcagtagccttgagctcaggcaactcaatcgtgactacctcaaactgcgtatcaagggtggtcactcctgggcgaagattgttggctttggtgacgtgcggcgtgcattggctagcaagttcctggaactgttggtcggtaagctaccggcaggattgcgtggcgcggatctgctggtcgaaacgagttttggcgaattgctccaggtgatcgaaggtgacctcgaactgccgcatctgattccgccgaacaggcgccgtaaggtgattgagcatgtcctgctttatttgcatcggcaggacattttgaccctcaaccacggcatgacggtcatgcgtcgggccatgaccatcgaggtcaagaaggaagacaagcgtaagaccttcctcaaggaggactacttgcgactcgacgagcactaccgcgagaagcgcattcaggttcatgtgatgcgtgaatatgcggaagtggcgctgaaggagatggctgaggcgttgcgcctggtgctggactacttcaccgactccaagcaggcgtttatcaagcggcattttaatgggcgggaggacgtgctcaagctggcgaccagcgaggagtcatggaaatcgattatcgagtcgctgagcactactcagaaactgatagtcgccgacgatgacgacataaatcggctggtgctggctgggccgggctccggcaagacacgtgtgatcgtgcatcgcatcgcttacctgctgcgggtgcggcgagtaccagcgaccagcatcgtggcgttgaccttcaaccgccacgcggcgaacgagatccgcaagcggctgttggccttggtcggggccgatgcctacggtgtcagcgtcctgacctatcacagcatggccatgcgcttgaccggcacccgtttcgagcgaggcgcgacggtcgacgagcgagccctcaaacaagtattgagcgatgccgtcgagttgctggagggtaagcgcaatattgagggcgaggacgacctgcgcgagcagctactgcgcggctaccgttacatcttggttgatgaataccaggacatcgacgacctgcaataccgtctggtcagtgctctggctgggcggcacgcggaggaagatggtcggttgtgcatcatggcggtaggcgacgatgaccagaacatctatgcctggcgcgataccaataatcgttatatcgagcgcttccgcgaggactatgaggcctcgaccagcttcctggtcgataactatcgttcttccctgcgcatcattgaggcggccaaccaactcattggccagaatttggctcgactgaaagaggccaatcccatccggatcgacagggctcggcaggagctgcccgctggcgggctatgggaagagcgggacgagcagcggaaaggtcaggtaatgcgactgctgatcgacccgagcgaccgtgagcagggcaacctgcaggcacaggcggccatggtggagttgggacggttactcgcgctagaacaggggagctggaacggctgtgcggttctggctcggacgcaccgctatctgtggccgatccaggcttggtgcgagcagcacgatattccttatttcctggcagcagacaaggaaacggcgttacccattactcggcagcgcagttttgtggctgcaatcgactatatgcgagaaatcaaaggtgctttgtgcgcggctgacgcatggcagcgtttgtcgggtagcaatcaactggtggaagccgagtggaagagttttttccagacggcctttgagcaaatgcgaggagaattgggcgactgccaacttggcagtggtgccttgatcgactggctgtacgactacgcccgtgaattgcgtcaacagtccaaggacggcctctatcttggtaccgtgcattcggccaaaggtctggagttccgccatgtcgttctgctggatggtggctggagcacgcaggtcgataccctggctgatgagcgacgtttgtactacgtgggggtgacgcgagccgaacagaccctgacgttgtgcgaattcgctgacggcaatccattcagtcgcagcctgatgagagatgttcagcagcatgagtttcagggacaacctcttcctgggttggaggtgcgctttcagcaactcacgctgaaggagatcgatattggttttgccggtcgtcaatcaccacatgcccagatacacaaggccattgaggcgcttcgcgagggcgatccgctgacgttgaaggaagaggctggtcggtatcaactgctcgacaggcaaggcaacgtggttgggcgaaccgctaagtcattccagccacagatcggcttcgatcaatgcgaagtcgcagccgtcatggtgcggtttactgaggatagtgaggagcagtatagggatttgaataagtgtgagcgctgggaggtggttgtgccgagggggagagggtag

SEQ ID NO: 327732 - DNA, 1635 bp, Pseudomonas aeruginosa
gtgaagcgttcgctgttcaattgtgcgcacccgtttcgccagcgctggtcgatcggttgcctggctgtcgcattgtcgtgcgcttcgctggccgacgaggcccctcccgccgcggcgggagccgagccccagcgtctggtggacatcaacgagtacgtggtacgcggcaacaccgtgctggacaaccgcgccatcgaggcggcggtgtatcccttcctcgggccgcagcgcagcctgggcgacatcgagggggcgcgcgatgcgctgcaggccgcctaccaggagaagggctaccagtcggtctacgtcgagctgccggagcagcaggtgagcggcggggtggtctacctgcaggtcaccgagaccactgtcggtcgcgttcgggtggtcggtgccaagcactattcgccggtggagttgcgcgaggaagtgccggccctggaggagggcaaggtacccgacttcgcccaggtccagcgcgagctggcgcaggtcaaccgcacccccggccgccaggtgctgccgatggtgcgcgagggccagcggcccggcaccatggacgtcgacctgcaggtggaagacaagaatccctggcacgccagcatcggcctgaacaacgactacagcgccgacacccgtcacttgcgctcggtggtttcgctgggctacgacaacctctggcaactcggccacgccatctcgctgacctatttcaccgcgccgcaggaccaggacaacgccaaggtctggtccggctcctataccgcgccgctgagccagcgctggagcgtgcagttgtccggctaccagtccgacagcgacgtggccacggtgggcagcatgaatgtggtcggccagggccactcctacggcgtggcggcgatctacagcctgccggtcaccggcctctggtcgcactcgttctccttcggcgtcgacttcaaggacttcgaggaacagacccggatcggcggcaacaacgacagggtgccgatcaagtacgccccgctgactctcggctacaacggcttccgctacaccgaacgttcccagttggccctcggcctgagcctggtggccggtaccggcagtctcctcggctacggcgacgacgacgaggaattcgaccgcaagcgttatcgtgccaagtccggcttcggtgtgctcaagggcgatctcaaccacaccctgaccttcggcggcgactggcaggtggcgaccaaggcggccttccagctcgcctccgggccgctgatttccaacgaacagtttgccgccggcggtgccaccagcgtgcgtggctacctggcggcggagaacaccgccgacgacggctacctgctctcccaggaatggcgtacgccgtccctcggacgcttcctcggcaagcgcgccggcggctacgtcaacgactggcgcttctacgtgttcgccgagggcgcgcaactgcgcctgcaggatgcgctgcccgaacaggacgacgacttcagcctggccagcgtcggcatcggcacccgcgcgcaactcgccgactggctgtccggcagcctcgactgggccttcccgctgctggaagggacgaacaccgacaaacacgactcgcgcctgcatttcagcgtgcaggcgagcttctga

SEQ ID NO: 327733 - DNA, 1848 bp, Pseudomonas aeruginosa
atgtatcgcttattgctgacatcgctgatctgcctgggcctgctggccccggccagcgccagtgcctggtggcaggacgactggcagtaccgcaagcaggtctcggtcgataccaccccgcaaggcgcggcgatcaacgagagtctcggtcgcctgccgttgctggtgcgcctgcataccggcaacttcaccttcgacggggtcaacgagaacggctcggacatccgcttcgtcgccgccgacgacaagaccgtgttgcgccaccaggtcgagagcttcgacccgctgatgggcatggccctgatctgggtcgacgtgccgcgggtggagggtggccagcgccaggacatctggatgtactacggcaacgccaaggcgccggagagcggcaacggccagtcggtgttcgacccggactacaccctggtctatcacttcgacggtgcgccgggcactccgccgcgggactccaccgcctacgccaacaatgcgcagaccgccgccggcagtccggtggagggcgtcatcggtcgctccgcgcaactgctgggccagccgctgctgctgccggccagcccatcgctggcggtgagcgccggtggcaccttcagcttcagcggctgggtgcgtcccgaccaactggccggcgaacaggtcctgctgtcgcgccgcgaaggcggcaacgccctgttggtcggcctggcccagggcgcgcccttcgtcgagctgaacggtcagcgcgctgccgccagccaggccctggcgcaggggcaatggcagcatctggcgctggtcgccgacggtacccggctggcgctgtatctcggcggtcgcgaagtcgccagcctggcggcggcgctgccggcgttcagcggcgcgatcgccatcggcgcggaaggccaggccgcgcctgcggtcgccaccgaagcggcaagcggggaaggtgaggcgagcgccgcggcgccgaccctgcaacccttccagggcgccatcgacgagttgcgcctgtcgaagatcgcccgcccggcggcgctgctcctcgccgatgccaccgcccagggcgccgagtcgcgcctggtggcctacggggtcgacgagaagcagtccggcttcggcttcggcaagctcggcttcctgctcaacgcagtgccgctggatgcctgggtgatcatcgcgatcctggcgctgatgatggtccagtcgtgggtcatcatgtaccgcaagaaccagaacgtcggccgtgtcagtcgcgccaacgggctgttccgcgagcgcttcgccgaggtcggcacgcgcctggaactgctcgccgacgaccgcgagctggccgcccgcctgcaacactcctcgctgtggcgcctgtaccaggtggcggtgaaggagatccgcacccgccgcgagcagggcgccgacacctcttccgtctccgcggccaccatcgaggcgatccgcgcctccatggacggcgtgcgcaccaaggagaaccagcagctcggctcgcgcttgtcgagcctgtccaacgccatcgccggcggcccctacatcggcctgctcggcaccgtgctggggatcatggtggtgttcctcggcaccgccatggccggcgacgtcaacatcaatgccatcgccccgggcatggccgccgccctgctggccacggccatgggcctgttcgtcgcgatccccgcgttgttcggctacaaccgcctggtcacgcggaacaaggaagtcagcgcggacatgcgggtgttcgtcgacgagttcgtcacccgcctcgccgaggtgcatggcgaaagccagctcagcgaagtggcccatcgtcgcaacggccagccgttgccggcctga

SEQ ID NO: 327734 - DNA, 243 bp, Pseudomonas aeruginosa
atgcccgcaccgctctggagcccttccgccgaacgcatcgccgccagtcgcatggaggccttccggcgcttcgtcaaccagcgccatgccctcggtctggccgactacccggcgctgcatgcctggagcgtgcagcggcgcgaggcgttctggcaggccatcgtcgacttcttcgaggtgcgcttccagcaaccgccgcgtgcggtcctcgaggaaggcacgcagatgccctcggcgcgctga

SEQ ID NO: 327735 - DNA, 1182 bp, Pseudomonas aeruginosa
atgcaagacgtcgtcatcgtcgccgctacccgtaccgccgtcggcagcttccagggctcgctggccggcattcccgcccccgagctgggcgccgcggtgatccgccgcctgctcgaacagaccggtctcgatgccggccaggtcgacgaagtgatcctcggccaggtgctcaccgccgggtccgggcagaacccggcgcgccaggcggcgatcaaggccggcctgccggtcggcgtgccggccatgaccctgaacaaggtctgcggctccggcctcaaggccctgcacctgggcgcccaggcgatccgctgcggcgacgccgaggtgatcgtcgccggcggccaggagaacatgagcctggcgccctacgtcatgcccggcgcccgcaccggcctgcgcatgggccatgcgaagctggtcgacagcatgatcgaggacggcctgtgggacgccttcaacgactaccacatgggcatcaccgccgagaacctggcggagaagtacggcctgacccgcgaggagcaggacgccttcgccgccgcttcgcagcagaaggccatcgccgccatcgagggcgggcgcttccgcgacgagatcacgccgatccaggtcccgcagcgcaagggcgagccgctgagcttcgataccgacgagcagccgcgcgccggcaccaccgtcgaggccctggccaagctcaagccggccttcaggaaggacggcagcgtcaccgccggcaacgcctccagcctcaacgacggcgccgccgcggtattgctgatgagcgcagccaaggccaaggccctgggcctgccggtgctggcgcggatcgccagctacgccagcgccggggtcgacccggcgatcatgggcatcggcccggtctccgccacccgtcgcgcgctcgacaaggccggctggagcctggagcaactggacctgatcgaggccaacgaggccttctccgcgcagtccctggcggtgggccgggagctgggctgggatgccgccagggtcaacgtcaacggtggcgccatcgcccttggccacccgatcggcgcgtccggctgccgggtgctggtgaccctgctgcacgagatgatccgtcgcgacgcgaagaagggcctcgccaccctgtgcatcggcggcgggcagggcgtcgccctgaccctggcccgcgactga

SEQ ID NO: 327736 - DNA, 957 bp, Pseudomonas aeruginosa
atggccaacgacaagcagacttcgactcccggcccccgacaaccggccaagggcggtgcggcgagcaagcgccaggggcatgcggcggagggcacgcgcaagccgcgtgcgcgcggcgaggagcggaaagagaaaccggccgacggacgttcggccacggcgctgaccgccaacgagcggcgggagatcgacgacaagcagccaccgcgcgccgctgtcctgcacgaggtgattcgcgtccagggcgaacacgagttgcagcgcacggtggcggcactctggtggtcggcggtagccgcggggctgaccatcggcctctcgttgatgggcatgggcctgttccgcgctgccttgcccgagcaggagtgggcgatcatcgtcagcagcttcggctatcccatgggcttcctggcagtgatcctcgcccgccagcaactgttcaccgaaaacaccctgaccgccgtgttgccggtgatgaccgagccgaccctggaaaaggcctggcaactgttgcgtctctggagcgtggtgctgttcggcaatatcgtcggtacgctgctgttcgcctgggcggtgctgcatctgccgatcttcaatgaagcggccgacgcggcgttccttgagatcggccgcgaggtgatgcacaacgacctggcgcagatgttcgccaagggcatcgtttccggctggatgatcgccaccatggtctggctgatcccggcggcggagggcgcgaaggtctggatcatcgcgatggtcacctacctgatggcgctgggcagcttcacccacatcgtggtgggttcggcggaggtaggctacctggcgttcgccggggaaatcgactggtccgagttcctgctgaagttcgccctgcctaccctgggcggcaacatagtcggcggtagcctgatcttcgccctgatcagtcatgcgcagatccgtagcgaaggttga

SEQ ID NO: 327737 - DNA, 969 bp, Pseudomonas aeruginosa
atgactctagcaccgcgacacctgcgcatagaacaacgaggacgcgtcctgcaagtcctgctcgacaatcccccggcgaacttcctcaccacggcggtgatgcaggaactggccgacctgctggacgatctggagcagcgccaggacatcggtgccgtcatcctttccggagcggcggatggggtcttcctgacccacttcgacgtcgacgagatcgagcgcgccgtcgcccccatcaccttctccatgccggcctggctgacacgcctgctgctggaaagcgaaagcctcctgcgccacttgcctggggcgaggaagctgctgcggcgcaccctgctggcaggcgtcgtcgacatgaacctgttccatgaggttaccgcgcacatgcgccgcatggacaaggtgttcatcgccgcgatcaacggcctggccctgggcggcggctgcgagctggcgctggcctgcgacctgcgcctgatggccgaggacgaccaggtggaacgcttcctcggccagccggaagtactcatcggcctgataccgggaggcggcggcacccagatgctggcgcgcagcctgggcgtagccagggccctggagctgtgcctggaagggcaactgctggagccgcgccaggcccttgcgctgggcctggtcaacgggctggcgccagcggaggagctactggaagccgccgacgcgctggcgcaacgcctgtcccggcgctcgccgcaggcggtgcacctgatcaagcgttcgatctaccaggcggcttcccgcgactggacggagggtatggccagcgaaaaggccggcttcctctccgccgcctcccaaggcaatacccgtcgcgccatgcgcgaatacatcgaacgggtgcgcaccatcacccgcgaagagcgtcctttccgccgtgcggatttcgacgacctgaccgaaggcaacgccatcgacatggcctacaggtga

SEQ ID NO: 327738 - DNA, 696 bp, Pseudomonas aeruginosa
atgagcaacctgcctgcgatcatcctggtccacggcttctggggcggcgccgcccactggagcaaggtcattctcgaactgaaacgcctcggccacgacaacctgcatgccgtcgaactaccgttgacctcgctggcggacgatgccgagcggacgcgcaagatgatcgcgcagcaacaggggccggtcctgctggtcggacactcctatggcggcgcggtgatcaccgaggccggcaaccagccgaatgtggtcgggctggtctatatcgccgccttcgcccccgacagcggcgaaagtcccggtggcatcacccaggagcacttgcccctggccgcagcgaacctggcgccggacagcgatggctatctctgggtgaaggcggacaggttccacgaaagcttctgccaggatctcgctgcggacgaagggctggtcatgggcatcacccagaaggctccgctggccagcacttttggcgatgccatcggcagcccggcctggaagagcaagccctcctggtaccagatttccagcgccgatcgcatgattgcgccggagaaccaggagcggatggccgcgcggatcgcaccgaggaagatcgtcaccctcgatgccagccacgcgtcactggcctcgcgagcgaaggaagtagcggcgctgatcgacgaggccgccgtggccaccgcccactag

SEQ ID NO: 327739 - DNA, 1425 bp, Pseudomonas aeruginosa
atgcaaaccaaacttctgatcaatggtgccctggtggccggcgaaagcgagagccacgcggtgtacaacccgtcccagggcaacgtcctggtgcgaattaccgaggccagcggcgcccaggtccatgccgcggtgcagagcgcggatgcggccttcgacgcctggtcgcaaacgccgcccaaggatcgcgcggccctgctgctcaagcttgccgagcgcatcgatgcccaggcgcacgtgttcgctcgcctggaggcggacaactgcggcaagcctttcaacgccgtgctgctggacgaactgcccgccgtgtcggacgtgttccgtttctttgccggcgccgtgcgctgcctgcagggctcggcggcgggagagtacgtcgcggggcatacttcgatgatccgccgcgacgcggtaggcgtggtcgcctccatcgcgccgtggaactatccgttgttgatggcagcgtggaaactcggcccggcattggccggcggcaacaccgtggtgctgaaaccgtcggagcacacgccgctgagtaccttgaaactgggcgagctgcttgccgagatcttccccgccggcgtggtcaacatcgtccacggtcgaggtgcctcggtgggtgagccgctgaccagccatgcccaggtgcgcatggtgtcgctgaccggctccgtgcgcaccggcagccggatcatcgaaggtacggccgagagcgtgaaacgcatgcacatggagttggggggcaaggcttctgtactgatcttcgacgatgccgacatcgacgccgccgtcgaaggcatccgcgccttcggcttctacaacgccggccaggactgtaccgccgcgtgccgcctctatgtgcagaaaggggtctaccaggagttcgttcgcaagctcggcgaggccgtatccagcatccggtgcgggctgccggacgatccggcgaccgagatgggaccgctgatcaccaaggagcatctggagcgtgtcgaggggttcgtgaaccgggccagggagttgccgcacatcgaagtggtcaccggcggcaagcgcgccgagggtgccggcttcttcttcgagccgacggtcctggccggcgctacacaggaggatgaggtggtgcgccgcgagatcttcggcccggtggtgaccgtctcgtcgttcgaggatgaagcccaggcgctggcttgggcgaacgactccgactacggcctggcgtcttcggtatggaccgccgatgtggggcgcgctcatcgcctggccgcccgcctgcaatacggctgcacctgggtcaacacccacttcatgctggtcagcgaaatgccccacggcggggtcaagctgtccggctacggcaaggacctgtcgatgtacggcctggaagactacaccgtggtgcgccacgtgatgttcaagcactga

SEQ ID NO: 327740 - DNA, 3150 bp, Pseudomonas aeruginosa
atgatcgcacgcctgatccactggtctatcggcaatcgctttctggtgctgctggcgaccctgttcatcaccgccctgggcatctggtcgctgcgcaacacgccgttggatgcactgccggacctatctgacacccaggtcatcatcagaaccagctttcccggacaggcaccgcagatcgtcgagaaccaggtgacctacccactggccacaaccatgctctcggtaccgggggcgaagacggtgcgcggctactcgttcttcggcgactccttcgtctacgtgctgttcgaggacgacaccgacctctactgggcgcgctcgcgggtgctggagtacctcaaccaggcgcaggaacgcctgcccgagggtgttaccaccacccttgggccggatgccaccggcgtgggctggatctaccagtacgccttggtcgaccgcagcggccagcatgatcttgcccagctgcgggcactgcaggactggttcctcaagtacgaactcaagagcctgcccaacgtagccgaagtggccaccctcggcggcatggtcaagcaataccaagtgctgctcgatccgcagaagctggtggcttatggggtaactcagcaggaggtcgaagcggcgctgaagagcgccaatcaggaaaccggcggcgccatcctggagctggcagagcgcgagtacatggtgcgggcttcaggctatctagagagcctggcggatttccgcaatgtgccgctgcgggcttcggccagcggagttccggtgctgctgggtcaggtggccaccattcagctggggccagagatgcgtcgtggcattgccgagctggatggccagggtgaagtggtaggcggcgtggtcatcttgcgctccggaaagaatgcccgcgatgccatcgccgcggtgaagaccaagctggacagcctgaagggcagcttgccggccggcgtcgaggtggtcaccacctatgaccgttcgcaattgatcgaccgcgccatcgataacctcagctacaagctgctggaagagttcgcggtggttgccctggtttgcctgatcttcctctggcacctgcgctcgtcgctggtcgcgatcatcaccctgcccctgggcatcctgatggccttcatcgtcatgcgctaccagggcgtcaatgccaacatcatgtcgctgggcgggatcgcaatcgccatcggcgccatggtcgatgccgccgtggtgatgatcgagaacgcgcacaagcacatcgaggcctggaaggctcgacaccccggtgaaccgcttcagggcgaggcgcactggcgggtgatcggcgaagctgcggccgaggtcgggccggcgctgttcttcagccttttgatcatcaccctgtctttcctcccggtcttcaccctggaggcccaggagggtcgcctgtttggcccgctggcattcaccaagacctatgccatggctgccgctgctggcctctcgatcaccttggtaccggtgctgatgggctactggattcgtgggcatatccccagcgaacaacagaaccccttgaatcgttggctgatcggtgcataccggccggtgctggagtgggtgctggcttggcctaaggtgaccctagcgctggccttgctagtgtttttgtccagtctctggcccctcagcagactcggaggagagtttctgccgccgatggacgagggcgacttgttgtacatgccatcagccctgcccggcttgccggccagcaaggccacccagctgctgcagcaaaccaaccggatgatcctcacggtgcccgaagtggcacgggtattcggcaaggccgggcgagcagagaccgccaccgatccagcaccgctggaaatgttcgagaccacggtgcagttcaaaccacgcgatcaatggcgcgcggggatgacacccgaaaagctgatcgaggaactggatcgcgcggtaaaagttccggggctgtccaatatctgggtgccgcccatccgcaaccgcatcgacatgctggcgacggggatcaagagccccattggggtgaaagtgtccggaacctccttggtcgacatcgagcgcataacgcgcgatatcgaggccgtggccaaagaggtgcctggggtgagttcggccttggcagaacgccttactggcggccgttacgtggacatccagatcgatcgactggccgcggcgcgctatggcctgagcatcgccgatgtgcaggcggtggtatcgggcgccatcggcggcagcaatattggtgagacggttgaaggactggcccgcttcccgatcaacctgcgctatcccaaggagtggcgagatagtccgcaggcactacggcgtatgccgatcctcacgcaagccggccagcagatcaccttgggcaccgtcgcccaggttagtctgaccgaagggccaccaatgctgcgcagcgagaacgggcgtctgtccggttgggtgtatgtcgatgtacgtgggcgcgacctggcatcgaccgtgcgcgagttgcagcaacgcgtcgccgagcgggtacaactcgacgccggcatgaccgtctcctactccggtcagttcgaattcctcgagcgcgccaatgcgcggctggcctgggtggtgccggcgactctgttgattatcttcgtgctgctctacctgactttcagccgcttcggcgaggccctgctgatcatggccaccctgccctttgccctgtcgggcggcatctggctgctctactggttcggcttcaacctgtcggtggccaccggcgtgggcttcatcgccctggccggcgtctcggccgagttcggggtgatcatgctgctgtacctgaagaacgcctggcatgcgcgtgtggataccgggcgcagcggtgatccggccctactggaggcaattcgtgaaggcgcggtgctgcgtgtgcggcccaaggtgatgacggtggccgtgatcatcgccggcctgttgccaatcctctggggcggaggtgccggatctgaggtgatgaagcgcatcgccgcgcccatggtcggcggcatgattaccgcgccgctgatgtccatgttggttttgccggccgcgtactggctgatgcgaaggcagcgtacacagaaggttcgcgcaccgcaggagctatag

SEQ ID NO: 327741 - DNA, 1161 bp, Pseudomonas aeruginosa
atggaattcaagttcttactccccgccaaagtcgtgatgggacccgacctgcgtgagcgcaccggcgaatacctgcgggaactcggcatggcgcatgtgctgatcgtgacggacgccggggtaaaggccgcaggcctgttgaatggcgtgtatgccagcctgaatgagtgggagatcgcgttcgacgagatatcggacgtcaaggcaaaccctcgcagcgaagacatcaaccaggcggcgcagctgtatcgcggcaaaggtatccaaggcctgctggccatcggcggcggcagcgcgatggacgcggccaaggcgatcagcctgctgctaacccacgagggtcggatcgaagactacgagggctctttcaccctcaggcacgccatcccgcctatcgtcgccatcccgaccaccgccggaaccggcagcgaagtgacctgtttctcggtgatcaccgataccgcccggcatttcaagatgagcgtccaggattaccgggtgggccccgttctggcattgctcgactcccgcattctcgacacgctgcctgcatcgattgccgccgcaaccggcatggatgccctcacccacgccatcgaagcctacacctgccgcgtgtcgaacccgatcagcgacgggctggcgctgcatgccatccgcctgatcagccaatacctcaggcccgccgtactggagccggacaacctgcatgcacgcgagcaaatgctggtggccagcctgatcgccggcatggccttcggtaacgcggacgtcggcagcgtgcactgcatttccgaagccatcggtggcatgtacgacacgccacacggcgtgggcaacgcgatcttcctgcccttcgtgttcggccataaccgcgacgccgacatcacccgccacgcgcaggtcgcctatgcactgggtatcgaccccaacctctcgccggccgaggccgccgaggccgccgttggctacctgttccagatgagcaaggacctgggcatcccccgcttcgccgaggtgaaaggcgtgcgcgaggaagacttcctgagcatcgccgaaaagtcgaagaagaatttctccgacggcagcaatgccaagcaaatgacggtggaaacctaccgtgaaatcgtcgccgccgcttacggggtcatgccgagataa

SEQ ID NO: 327742 - DNA, 2301 bp, Pseudomonas aeruginosa
atgaaggcgctcgaccgccaggacgagcccagccaggcgcagcggctgttccgcggcctggtgcgcgaatggctgctggtcagcctgctgctccttccgctcaccgccctgctttcgctgagcagcggcctgccgctgaacaacctgctctacgaccgcctgcgcaacctcaccccgctggccgtcgatccgcgcatcctcgtcgtcgccatcgacgaccgtagcctggaaagcctcggtcgttggccctggccgcgcagcgtccacgccgagctgctggatcgcctggccgccgccggcgcacgcagcgtactgctcgacgtgatcttcagcgaaccctcctccaatccggacagcgaccgccagttggcaagatcgctgtgccgggccggcaacgtcctcctgccactgctgcgcgaaagcgtgccgcgctacggcgaaccgccacgggagataccgccgaccgcgccgctggccggctgcgccgccggcatcgggcatatcaacgtcgaagcggacagcgacggcacggtgcgcagcgtctacctgcgcgaaggaccgctcggccagccgcgcccgctgctcgcctggcaagcattcgccgatgccggcgccatgcccatgcccggcctcgacgacatgcgcaacctgcccggctggcagcgtgaccacgccatccgcattcccttcatcggtgccgacgcgggcttccccagcgtgccctacgtcagcgtgttgcgcggcgaggtgccggacagcctgctgcgcgaccgcctggtcctggtcggcgccaccgcgccgggcctcggcgaccgctatgtcaccccgctgtcggccagcctcggcaccacgccgggggtggagatccaggccaacatcctcaacggcctgttgcagcagcgcaccgccgtcgacctgcaaccctggctcgccgccctgctctccgccgccagcgtagcgctgctgctcggcctgatgctgttccgctcgcgccacgccttgctcctcaccctggcctgcgcggccctggccctgggtctttcctgggcgctgctgctcaacggctggtggtggtcaccgctggccagcctggtcggcctgctgctggcctacctgatctggagctggcgccggctgaacgcggtgctcgcctacttcggctgggaactggcgcgcctcgaccgcgagcccaaggtgctgcccgagcgggccagccccccgcgcgccggcaacgatccattgcagaaccgcatcgccgccctggagcaggcggtcagccgcacccgcgacagccggcggttcatggccgacggcctggaaggcctgccggtggcgaccctgatctgcgacccgcaggggcagatcctgctggccaaccgcaaggcacgcgacctgttcggcggcgagctgcgcggcgccgaactgcgccagtgcctggccgaactcggccatccgagcctcgccggcggcgcccgcccaacgctggaaaccctggaagccatcgagttccgcgaccatcgggaacgcgacctgcgcctcgacctggcgcgcctgctgccggtcgaaagcgaaaccgccatcggctggctggtgagcctgatcgacctgagcgccgaacgcgatgccgagcgccagcgcgccaccctcctgcgcttcctctcccacgacctgcgcgcgccgcactcggcgatcctcgccctgctcgacgttcgccccgccgaggacgaagccggccagcaggtctaccgacagatagagcagcaggtccgtcgcgccctgggcctgaccgacgccttcgtgcaactggccaaggccgaatccgacgcctaccgcttcgaagcgtgcatgttcaccatgttggcgatggacgccgccgaccagctctggcccctcgcgcaacagaaggacatcgacctgcggcgcgactgggacgacgagcaggaaccgatggtctgggccgaccccggcctgctcacgcgcgcgctgttcaacctgctggagaatgcggtcaagtacagcccggcggggaccgtcgtcagcctgagcatccgcctcgaaggcgactggctgagctgccggatcgtcgaccagggcaaaggtatcgcggccgccgaactaccgcgcctgttcagccagtaccagcgcttcgcttccgccgagggcagcaccggcctgggcctggggctggccatggtcaagacggtgatcgaccggcacggcggcaggatcggttgccagagccaggttggccagggcaccactttcgagattcgccttccgctgctgaaaggcgaggaataa

SEQ ID NO: 327743 - DNA, 735 bp, Pseudomonas aeruginosa
atgaccgccatcggcaccattttcagacgcgagctgagcagctacttcgccacgccgctcgcctatgtgttcaccctggtattcctcgtcctctccggcgtggccaccttctacctgggcgatttcttcgagcgcggccaggccgacctggcgccgttcttttccagcctgccctggctctacctcctgctgatccccgcgctggccatgcgcctgtgggccgaggagcgcaagtccggctccatcgagatgctgatgaccctgcccgtctcccgcgccaccctggtcaccggcaagttcctggcggcctggttctgcgccgggctggcgttgctgctgaccttcccgatgccgctgacggtgaactacctcggctcgcccgacaacggcgcgatcatcgccggctacctggccggctggctgctgtccggcggctacctggccatcggatcctgcatgtcggcgctggcgaagaaccagatcatcgcctttgccctgaccgttctcgtctgcctgctgttcgtcggcgccggcactccccacgtgcaacaggcgctctccggctggcttccgcaatggctgctggacggcattgcctcgctgagcgtgctggtccgtttcgaggcgctcggccggggcgtgctcgacgtccgcgacctggcctacttctgcagcctgatcgtcgcctggctggtcgccaccaccatcgtcatcgacctgaaaaaggcagcgtag

SEQ ID NO: 327744 - DNA, 1206 bp, Pseudomonas aeruginosa
atgggcaagctgaccagcaagaccgtggagtcgatagccaaggctgcaacgccaggaaaaaccaatgatggcgatggcctgtacttccaggtatccaagagcggcggaaccagctggatcttccgttacaagctggatggccgcagccgcgaaatggggctaggccccttccccgccatcacactcagccaagcccggcagctggccgctgatcaacgcaagctcctcgcttccggaagcgacccactggcaactcgcgatgcggcaaaggaagccaagcgcgaggccgaacgccaggccgcagcacgtcgcacgacgttcgaggatctcgctcgcgaataccaacaggcacatggcggcagctggtctgagaagtggcgaaaaggctggctgcgcaaactggagctctacgctttcccgagcatgggcaagttgtcggctgacatcatcagcaccgagcatgtgcttgctgcattgcaacccatctggataaccaagacccggactgctgatgaagtcagaggccagatcgagcaaatactggatgcagccaaggccaggcgcttacgcgagggggataatcctgcccgctggcgcggacacctagacaacttgctgagcaaggcagagaaaaagaaggccaggcagcgccagcactttccagcactgcaatggaaagacaccccgaagctggttgccgctctagcaaaaatcgatacacgtgacgccatcgcagccagactgctgattctgaccggcgctcgttaccacatgatccaacatgctcaatggcccgagtttgacctcgaaactggcacttgggcactgccggctgagcgcatgaagatgcgaaaacctttcgtcatcccgctatcaccacagatagtcgagatgctggaaagcatgaataagactcattcaatatatcttttccctgggcaagggaagactggtgtcatgcatggcaacgccgtacgcaatctgctgcacaagctggggcatgcagacatcacgagacacggttttcgatcgaccttccgggactgggcaaacgaatgcaccaactacccgcgagaggtgtgcgagcttgcgcttgcccatgacgaacgcgaccagaccgaagcggcctattcacgctccgatcttctggaaaaacgcaggtcattgatggcggaatgggcagagttttgcacgagccaaaagtga

SEQ ID NO: 327745 - DNA, 753 bp, Pseudomonas aeruginosa
atgtccaaagccaaaaatgcgcgccattccaagattctggccgggctcgtcagcagtccgagccttcgtattgctgatctggcgcgcctgcacggcgtggctgcagagaccatccgccgtgatctggatgaactaacgcgcgccggcttgctcaaccggacttacggtggggcggtgaaggccgctccagctgagcccgtggtcagtgagcggcatttgttgtacgtgcgtgaacgcgagcaaatcgctgcgcgcgcagtggctgaacttaaaggggccaaaacactctttgtcggctcgggttcgaccacggtgcacattgcccggcgcatggccgccgagcttaaagacctcaccgtgctgacccattcctttggcgtggccacggtgcttgctcacaacccgcgcatcaaggtaattgtgctgcctggtgaatatcaggccagcgaaggggccatggttggagcccagtgcctggattttattcgcagctttaacgttgactggaccatcttgggcgctagcggtatcggtgtagatgggcccagcgaggcgttgattgagtgcagcgcggtgtacagcgctatggccgcgcgcgcgcagcaggtgatgattgcagcggatcactcaaaatttaatttgatctatccaggtcagtacctgacttgggcgcaggttgactgcctggtatgtgatcgggtaccgcccgtcgagctggctagccgtattggagccggtaaattgcgtctctaa

SEQ ID NO: 327746 - DNA, 1002 bp, Pseudomonas aeruginosa
atgatgtacgagcctgaatttctgcaacgcttgcaacaggcgctgcgactcgccttacccgcttggggtatgcccagcgatgcggcactcaagctattgtcgatctccgagaatgccacctatctggttgaagacaccaccacaggcgcccgtttggtgatgcgcatgcaacgccccgagtaccacaccgacgcagagattcaatcggaactggcgtgggttggcgcgctgcgtgaatccggtttagtgcataccgcagagccactgcgcactaaaaacgggcaatggatccacaaggttgaagatggcgagatcacccaccgcatcaccgctttcagctttatccaaggccaggaacctgccctggaaggtgaattacaccattggtaccggatgctggggacgactaacgcacgtctacaccagcacagtcgccaatggaaggcgccggccggatttgtacgtaaacactggaatttcgacacattgatcggcccccaagcccactggggtgactggcgtgaagcacaaagtctgaccgccgccgacatcagcctcttggagcaggtacaagcgcgccttaaaaccctgtgccaggcctacggcaaggctccaaaccgttacggcctggtgcattgcgacatgcgcctggccaacttgctggtagaaggcgaaaacctagcggtggtggattttgatgactgcggttttagctggtacctctacgactttgccgcctgtatcagctttattgagctagacccacgtgtaccacaactgcttgaagcctggcttgagggctatcgcagcgtcagcccggtggccgatgaggatgtggacatggttaaccatttcatcatgctgcgtcgtatgcagctcaccgcctggatcgcaagccacgccgaaacccccatggcgcaaagcatgggtgaaacctatgtgcgcggcaccgtgaccatggggcaggactttcttgcgcgttttcaggagtgcgaggcatga

SEQ ID NO: 327747 - DNA, 1332 bp, Pseudomonas aeruginosa
atgaacgatgccaaacagattctgcagttgaaccgctttgaccccgttgacgcgaacctggacgcgcgcacccaaagcctggttgaaagccggtttaaggcctttggccaatcctcggtattgttctaccagcagcccttggaaattgtccgcgcccagggtactcagatgtttgataaaaatgggcgcagctatctagatgtttacaacaacgtgccctgcgtcgggcactgccatccggccgtggtcgaggcgattgccgaacaggccgcaaccctggccaccaatagccgctatctgtaccaaaaccttaatgattacgccgcggcgctgctggccacctaccccgcagcgctttcggtcttggtactgacctgcaccggcagcgaggccaacgacattgccttgcgcatcgcctgcctgcattcaggtggcacgggcatcgtggtaactgaaaccgcctatcacggcaacaccagcgccgtaatggcagcgtcaccctcgtcctacaaaaagggtacgcagctgccggcgcacgtgcgcaccatccgagcccccagcgcctaccagttgcccgaaggcagtgatgtaggtgcggtgtttgccgccgacctgcaagcagccattgatgacatggccgcgcacggcatccgctttgccggcctgttggtcgataccatcttctcaagtgacggcgtattcgccgcccccctgggctttttaaaaccggcgctggaggtggtgcataacaacggcgggctgttgattgccgatgaagtacaacccggatttgggcgcaccggccagggtcattggtgctttggcctgcacgatatcgttccggacatcgtcaccatgggcaaacccatgggcaatggctacccgatggccggggttgtcacacgccccgagctgctcgactgttttgtcagcgaaaccggttacttcaatacctttggcgccaacccggtggcggccgccgccggtcatgctgtgcttaaagtgctagagcaagagcaattgatcaccaacgcccagcgcgtgggtgactacctgcgcaccggcctggcaaagctcggcgagcgtgatgcccgtatcggtgaggtacgcggtgccgggctgtttattggccttgagttttcaggccccaacaaaaaccctgatacagcactgaccacctggatcatcaatgccatgaaggatgagggcatcctcatcggcgcggcaggcgcctttggcaacgtgctgaaaatccgcccggcactgtgctttacacaagacaatgccgatcagctgatcgacaccctcgcacgcctgcttgcgcgcatttag

SEQ ID NO: 327748 - DNA, 765 bp, Pseudomonas aeruginosa
atgtttaagtcactacaaggtcgggttgccatcgttactggcgccacgcgtggcatcggcttagggatctccaagcgctttgctgaggcgggcatccgggtgttggtggtgtcgcgcgcgcaaaccgacgcggatcgggtggctgcgcagattggtgcaggcgccacaggctttgctgcggatgtgagcgatgcggcggcctgtcaggcgatggtgcaggtggccatcgaacgctacggacagattgatattctggcggccaatgctgggattttcccgtctgcgccgctggctgagatgacggttgagcagttcgatcacgtgatgaacaccaacatgcgctcgacctttttgtgcacccaagcggtgctgccgtacatgaaagcgcgccactttggccgcatcatcctcaccagttccattaccgggcctgtgaccggctttcccggttggagccattacgcggccagcaaggcggcgcaactgggctttatgcgcaccgccgcgcttgaagtggcgcgcgatggcattacggtcaacgcggtgatgcctggcaatatccgcactgaaggacttgatggcttgggtgctgattaccaggcgaaaatggccgcttccattccgacttgtgtactgggggaggtggctgatatcgccaatgcgacgctgtttttcgcaagccttgaagcctcatttatcacaggccaaggcttgattgtggatggtgggcagatattgcccgagtcagcggctgcgcttgcttaa

SEQ ID NO: 327749 - DNA, 1149 bp, Pseudomonas aeruginosa
atgaaaaacgtatccaggcgggacatgttgaaactcatgggcgtcagtgccggcgcattggctgccaattcggtactgggatcaatgccagcctttgcgggcaaccgcagcaaagagctgaacattctgtgctgggaaggctacaactcagccgaagtgctggacccatttcgcgccctgagcagggccaccatcaaggccgaaagcctgaccaacgatccgaccatgatcaaccgcctgcgcggcggtgaaaccaaggtctgggacctgattaacgtcaacaacccctgggcacgcaaaatcatggccccggccggtttgatcaagccgctaccgcgcgctgagttcgaaccctacttcgacgccatgctgccgcagttcaaatccccctacaaatgggccatgagcgaagacggtaaggatcttttaggcatggcacagcgttttgggccgttcaactatgtggtcaacaccaaaaaaatcagccgcgccaccgccgaggatatcggctgggatctgttcaatgacccagcgctgtccggcaaatacggtattcaggagtccgatgactggaacgtcttcgacatcttcctgatcgccggcatcaacccttttgtggtgcacaccgaggccgaaatggccaagttcgagcagaccgcaatcaaggtgttcaaaggcgcgaagatggtcggcgatgtagccagcctgaaccaggccatggttgccggtgaaatcgacttctacatgaccggaggcacctacaccgcatcgcctgcacgcgccgatggcttcagcgaaatccgcggcatcacccccttacgcggaccggtcaacggcaaaggcggcgtgtcctgggtggaaatcacctcggtggtcaacaaccccaatgtctcgccgctggcctatgagttcctcaagtacgtgcagaatcccaaagtcgcccaccaggtggccttcgctgagggcaccttcaacccagtcagccaaatgggcaaccccgagtgcttcaagctctttagcagcgaggagctcgacattctgcagtgggatagcctcgatgaagagatgtcgcgctgtgtcgagtacgacatcgtccatgaatacgaccaggcgctggaaatgatcagcaccgctaaacgcatgcgctaa

SEQ ID NO: 327750 - DNA, 1098 bp, Pseudomonas aeruginosa
atgaacacgcaaacctcaaactccacaaaaaatcgtcctccggtgctgcaactggtagatgttcgccgccagttcggagattttactgctgtatcgggcatcagcctggacatccgtgagggcgagtttctgaccattgtcggcccttccggctcaggtaaaaccaccatgctgaaaatgctcgccggcatggatgcgcccaccagcggcaacatcaccctgcgcggtgagctgatcaaccatgtaccggcgcgcctgcgccccaccgcgctggtgttccagtcgctggcgctgttcccgcacaaaaccgtgggcgagaacatcgagttcccgctcaaggtaaaaaagatgtcggtcgatgcgcgtaaagagcgcgcccttgaactcttgcgcatgctgcgcttgcctgagcattactacggcaaaaatgtgatgcagtgctccggcggcgaacgccagcgtgtggccctggcccgcgccttcgcctacgacccggacgtattgctgttcgatgagccgctttctgctttggactacaaacttaaaaaagtgctggaaaaagagcttaaagatctgcacagaagctccggcaaaacttttatatacatcacccactcgcttgaagaagccatggtgatgagcgatcgtatcgccgtgatgcgtggcgggcgcatcatccaagtcggcacacccgaagccatttacgccactccggccgatgatttcgtcgccgagttcttcggcgaggtcaataaattcgcggtcaagttcagccatggtgccggctggcacagcgccgagttggcacaggcattaagcattgatgtaccagcgccactggccgaagccaccgatgcggtcgtggtggtgcgtccggaatacatgcactttgtcgaacccggtcagcactacgacaaccaactgcaaggcaccctgtttaacgagtactcgctgggttcacgcattcagtaccaagtgctctgcggcaaacacagcgtgctgattgaggtaccgcgtacctggggtgggcgcctcaacactggcgataccgtaaccctaggctttaaccgtgccgacatattagttgctggggtgtaa

SEQ ID NO: 327751 - DNA, 771 bp, Pseudomonas aeruginosa
atggtggtcggctacgccttcgccacgcccaaaagctttgaggtattcaactcctttagcctggccaactttgcagcagccctagacccctcaggcaccgtgtggacctcctttgtctggtccattggcttagctatgacctgcaccgttctgctggctatcatcgcctaccccattgcctatggactcaattatgtctttggcaaatggtcatccttagtcagtattctctttgtgtttccgctgtttatctcggaaaacgtcaggctttatggctgggtacagtttttcatcaagggcggggtgatcgatggggcgctgaagtttttcggcatcgactttaaccctgacgtgctctacagccctgaaatcaccctgtttggtatggtctatgtgtacctgcctttcatgctattccccatgaccctgggcctttccatggtgccgcaggatttgatcgatgctgccgccgacttaggcgcaggacgccttttgatctggcgcgaggtgcaattgccgctagcgatgccaggcattttgatcggtctgctgctgacctttgtgctctcagtcggcgcggtggcggaggccaaaattctcggtgggcagtcggtgatcaccgtggtgcatgacatcgagatcgcctttacctacgcacaaaactggcccatgggcgcagcccttgcgctgattctggtgttgatcatcggcagcctgacgctctgggcactgtcgaaagttgatctggaccgcatgctgggaggccgatga

SEQ ID NO: 327752 - DNA, 810 bp, Pseudomonas aeruginosa
atgcttgatcaagcccaacgccgcaacaactttttcgtgcgtacctgggtcgccttcgtgctcgcggtgatctacctgccgatcctgtgcagcgctttggcgagcctgtcgaaaagccgctacttcatgttcccggtgcgaaaatattcaaccgaatggtggagcaaaacctggtcatcggttgaggtgcacaccttggtcggcaactcgatcagcattgccgtgctggtcacgctgatctcagtaaccctggcctttttcggcgcactggcctttgcgcggtacgactggaagggccgcacgctgtaccaaaaactcttgcttctaccgatcttcttcccccaagcggtactggggttggcactgctgctgtggatgaacaccttagggttgatgccaagctggaaaaccgcagttctggcgcatttggtgtggatcgtgcctgtggttacgctggtcatcgcgatcaaggtctacagctatgactccacgcttgaagatgccgccgcggatctaggcgccagtcgctggcagatcttccgcgaggtgactctgccattgttgtggccggggatctggtcgggtggcttgttcgcctttttgttgtcctggggcaactttccgttgtcgctgtacaccgcgggcgccgattccactgtgccaaagtggctttactcgaaaatggtcgcaggctacacacccatggtcccggcactgggcaccatgaacaccctaggcgccattgcagtgctggcactggtcggcacactggtcatgtccatgcggcgccagcgagtaaccagcatttaa

SEQ ID NO: 327753 - DNA, 1140 bp, Pseudomonas aeruginosa
atgcgtcgaacactgcccatcggcctgctgctctccaccgacggcacctaccgccggatggcccgccatgcgttggctggcgcccgcgatgccttggccgagatcaatgccgacccgcagctggacttccagctggccgccacccactgcaacccgcgtggcgagctgagccgctacggcgaggcaaccgccgcgctgatgcagcagggcgtgcggcacctgttcggcaccatcacctcggccagccgcaaggaaatcattcccgacctggaacagcagggcgggctgctctggtatggctgcccctacgagggcttcgagagcagcgagagcgtgctctacctcggcgcctgcccgaaccagacgctggtgccgctgctgcgctacgcgctggccaccttcggcgcgcgcggctacctgatcggctcgaactacgtgtggggctgggagagcaaccggatcgcccgcgaggtgctggagctggccggcggccgggtgctcggcgagaagtacgtgcacctgggcggcaccggcttcgccgaggcgattcccacgctcatgggccaggcgccctcgttcgtgctgaacaacctggtgggcgagtcctcctacgccttcctgcgcgagctggacgccgcctgcgcgcaggccggcatccgcctgccggtgctcagctgcaacctcaccgaggcggagctgggcgaggtcggcgagcggccgaacctgcgcctgctgtcctgcggtccgttcttcgagagcgtgcatgccgaattcagccggtgccagcaactggtgcacgggctcgaccgctgctcgcactactacaccggcgcctacgtggcggtgcacgccttcgccgaggccctgcagcacaccggcagcgacgcgcccgaggtgatctgcgactacctctaccggcatccgctgcccggcgtgctcggcgagctgcgggtgtcgtcgcgcaacaaccattcgagcctgccctgccacatcgccgagctgcgcgccggccgcttcgagctgctgcacagcgaggccgcagcgctgcccgccgacccctacctcaccgccaccgacctcggcgccttccaggcgctgcgtcacgaggtcccccggcagcacctgaggatcgtcaaatga

SEQ ID NO: 327754 - DNA, 603 bp, Pseudomonas aeruginosa
atgaagtccctgtcgcgtcccgatttcgagaacggccggctgctgctggtcgactgcgacgagcgcaccctggccagcctgcataagagcctgcggcgcctgggcatcaccgccgaggcggtggccgccgacacgttgccggcgctcgatggctgcttcgccgccatcgtcgaactggagcatttcgccagcccggcgaccctggccagactcgaggccgccggcgtgccgctgatcgcgctcaccgcccacgagacgctgtcgcagatccagcgcgccatcgagctcggcgtcaccgcactactgaacaagccgatcacccagggctcggtgtacaccacgctgatgatggccatcgggctgcgcgcgcggctggccgaggcgaaccggcagcaggcggcgctggcccggcgggtcgaggccgggcccttgctggcgcgcaccctggcgcggctgatggtggagcggacgctgaccgagcagcaggcctacgagcaactgcgcgagctgtcgatgcgcctcaaccgcagcgtcgaggcgctctgtgccgaattcgaggtcgaccgcctgggcgccgatccgcggcaggagcggcagcgatga

SEQ ID NO: 327755 - DNA, 849 bp, Pseudomonas aeruginosa
atgaacatcctgctggcgctgctgcggcgcccctcggtggcgctgtcgctgctgttcgtgctgaccgtggtgaccttcgccgtgctggctccctggctcagcccctacgacccctccgagcagtatatcgagggcctgtcgctggaaggcgcgccgctgccgccggattcgacctactggctgggcaccgacctgctcggccgcgacctgttctcgcggctggtctacggcgcgcgcacctcgctcttcatcggcctggttgccaacggcctggcggtgctgatcggcaccctggtcgggctcaccgccggcttcgtgcgcggctggctgggcagcgtgctgatgcgctttaccgacctgatgatggccttcccggcgctgctgctggcgatcgcgctggcggcgatcttccagccgagcgtgtggatcgtcgcgctggtgatcgccatggtgaactgggtgcagatcgcccgggtgatctactcggagacggtggccctggccgcgcgcgacttcgtcgcggtggagcgcaccctcggcgccagcgcccggcgcatcctgttcagccacctgctgccgcacctgctgcctaccattctggtctgggccacgctgggcatctccacaaccgtgctgctggaggcgaccctgtcgttcctcggcgtgggcgtacagccgccgacgccgagctggggcaacatcatcttcgagagccagacctacttcaccgaggcgccctggctggtgttctttcccggggcggccatcgtgctgctgtcgctggccttcaacctggtgggcgacgcattgcgcgacgagctcgacccgaccctgtcggggagacgctga

SEQ ID NO: 327756 - DNA, 927 bp, Pseudomonas aeruginosa
atggctcctttcatcctgcgccgcctcggctactcgctgctgatcctgctcggcgtcaccctgatcacctacctgctgctgttcatgctgccggccgacccggcgcggcaaatcgccgggcgcagcgcgacccctgaggtggtggccagcatccgcgcccagctcgggctcgaccagccgttctacgtgcagtacgggcgctacctggccggcctggtacagggcgacctgggccgctcgtacatccagcgcagcgaggtggccgagctgatcggcgcacggctgaagccttcgctgcagctgatggccgccggcatcggcttcgagctgctgatcggcatcggcctcggggtgatcgccgcgctgcgccgcggcggcttcgccgacaagctgctgatggccttctccttcgtcggtgtgtcggcgccgcagttcatcgccgccatgctcgcgctctacttcttcgcggtgaagctcggctggttcccgctcggtggctacggcggcgttgagcacctgctgctgccggcgctgacccttggcgtgctcggcagcggctggtacgcgcgcatgacccgctcctcgatgatcgaggtgctgcaccaggacttcatccgcaccgcccgcgccaagggcctgagccggctgcgggtgatcgcccgccacgtgctgcccaacgccatcgtcccggtgatcccgatgatcggcatcgatatcggcattttcatgggcgggctggtggtggtcgagtcggtgttcggctggccgggcatcggccagctcgcctggcaggccatccagcaggtggacatcccggtgatcgtcggcgtgaccaccgtgtcggcactggccatcgtcctcggcaacctgatcgcggacctcaccgttccactggtcgatccgcgcatcgacgtcaagaaacactaa

SEQ ID NO: 327757 - DNA, 1608 bp, Pseudomonas aeruginosa
atgaagcgcaaggcaatttccctggccatcgcggccaccctgttcgccggcccgctgctggccgccgagcccaaggccggtggcgacatcgtggtgacctaccagaacgacgtggccacgctagacccggcgatcggctacgactggcagaactggtcgatgatcaagagcctgttcgacggcctgatggactacaagccgggcaccaccgagctggagaaggacctcgccgaggactacgacatctccgaggacggcaccgtctacaccttcaccctgaagaagggcgtaaagttccacaacggccgcgagatgaaggccgcggacgtcaagtactcgctcgagcgcaccgtcaacccgaagacccagagcccgggcgccggcttcttcaactccatcgccggcttcgacgccatggccgagggcaaggccgagaccctgagcggcattgaggtgctcgacgactacaccgtgaagatcaccctgagcgcgcccaacgccaccttcctacacgtgatggcgatcaacttcgcctcggtggtgcccagggaagaggccgagaaatggggcgccgacttcggcaagcacccggtcggcaccggcgccttcaccctggccgactggcagctgggccagaagctggtgttcaagaagaatccggactactacaaggccggcatcccgcgtctggacggcatcaccttcgaggtcggccaggagcccatggtcgccctgctgcgcctggagaagggcgaggtcgacatcgccggcgacggcgtgccgccggccaagttcctgcagttccgcaaggacccgaagtacaaggacctgctggtggtcggcgaccagctgcacaccggctacctgacgctgaagaccacgctgccgccgttcgacaacctcaaggtgcgccaggcggtgaacatggccatcagtaaggaccgcatcgtgcgcatcatcaacggccgcgccaccccggccaaccagccgctgccgccggccatgcccggctacgccgaggactaccagggctacgcctacgatgtcgaggacgcgaagaagctgctcgccgaggccggcttcgccgacggcttcgacaccgagctgttcgtaatgaacaccgacccgcagccgcgcatcgcccagtcgatccagcaggacctggccaaggtcggcatccgcgcgcagatcaagtcgctggcgcaggccaacgtgatcgccgccggcagcgagccgaaccaggcgccgatggtctggtccggcggtatggggtggatcgccgacttcccggatccgtcgaatttctatgggccgattctcggttgcgccggggcggtcgatggcggctggaactgggcgctgtactgcaacaaggcgctcgatgccaaggccgcgcaggctgatgccatggccgacccggcgcaggaagccgagcgcatcgcgctgtggaaggaggtgttcctcgaggcgatggccgacgcgccctgggtaccgatcttcaacgagcagcgcttcaccgtgcgctcggcgcgcatggccggcgacgacgcgctctacgtcgacccggtgcacgtgccggtcaactacgactacatctcggtgaaataa

SEQ ID NO: 327758 - DNA, 948 bp, Pseudomonas aeruginosa
atgtgtcagaactgcttggtcaagacgattcacagcgtccacagccacttcggctgggacaacagcttcaccccggtggagcgggtggcgcccggcactaccctcgagttcgaatgccacgactcgtccaacggccatttcaccaaggactccgtcgtcgccgacgtcaccagcatgccgttcgaccggatcaacccggtcagcggcccggtgttcgtcgaaggcgccatgcccggcgacgtgctcaaggtcaccatcgacagcttcaagccgtccggcttcggctggaccgccaacatccccggcttcggcctgctcgccgaccagttcctcgaaccggccctggcgctctggcagtacgacaccgagagcctggcgccggccgccttcggcgacttcgcgcggataccgctcaagcccttcgccggcaccatcggcgtcgccccggccgaacccggcctgcactcggtggtgccgccgcggcgcgtcggcggcaacctggacatccgcgacctggccgccggcaccaccctgtacctgccggtggaggtcgaaggtgcgctgctctccatcggcgacacccacgccgcccagggcgacggcgaggtctgcggcacggccatcgaaagccggatgaacgccgtggtcacgctcgacctgatcaagggcgagaagctcgccgcgccgcgcttcagcactcccgggccggtcacccggcacctcgacggcaccggctacgaagccttcaccgggattggcccggacctgatgcaggccgcccgcggcgcggtcagcagcgccatcgactggctctgccgcgagcacaggatgccggccgaacaggcctacatgctctgctcggtgtgcggcgacctgcgcatcagcgagatcgtcgacctgcccaactgggtggtgtccttctacgtgccgaaggtggtgttcgcctga

SEQ ID NO: 327759 - DNA, 1737 bp, Pseudomonas aeruginosa
gtgaacacctcgacatcccccgaccgccccgtgctctccgtcgaacgcctgaccatcgactttggccccaggcgggtggtcgacgagctgagcttcgccctgcaacgcggccgcacgctgtgcatcgccggcgaatcgggcagcggcaagtcgctcacctcgctggcgatcatgggcctgctgccgcgcgccgccagcgtgcccggcggggcgatcatcttcgagggccgcgacctgctcggcctgcccgagcggcagctgcagccgctgcgcggcaagcgcctggggatgatcttccaggagccgatgacctcgctgaacccgctgatgacggtcggccagcagctcgaggaaacgttgcgccggcacgagccgctggggcgccgcgagatcgcctggcgcgcccgcgagatgctcgacgcggtgcgcatgccgcacgccgagaagcgcctggcgcagtacccgcacgagctgtctggcggcatgcgccagcgggtgatgatcgccatggcgatgctctgccgaccggacgtgctgatcgccgacgagcccaccaccgcgctggacgtgaccatccaggcgcagatcctcgaactcatgcgcgagctgcagcagagcttcggcaccggcctgctgctgatcacccacgacatgggcgtggtcgccgagatggccgacgaagtggtggtgatgaaccaggggcggatggaggagcgggcgccggtgcgccagctgttcgccgcgcccgccgcggcctatacgcgcaagttgctcgccgcggtgccggtgctgggcagcgccggcgagcccgaggcgctcggtgaacgcccaccgctgctggaggtgaacgacctgtgcgtgcgctttccggtgcgtggcggctggctcgaaccggtgcgcaacgttcacgcggtggagcacgtcagcttcaccctgcgccagggcgaaaccctcgggctggtgggagagagcggctgcggcaagtccaccaccggcaaggcgctgatgaacatgctcgcctaccagggcagcgtgaagctcgacggccgcgagctcaacggcctgcagggcgaggcgctacaggccgtgcggcgcgacgtgcagatgatcttccaggacccctacgctgcgctcaacccgcgcaagacggtgctggaactggtcggcgagccgctgctgattcacgaccgcctgccgctggccgaacgccgcgagcgggtcgccgcgctgctcgaggacgtcggcctggccgccgacgccatgacccgttacccgcaccagttctccggcggccagcgccagcgcctctgcatcgcccgcgcgctgtcgctcaacccgaagctgatcatcgccgacgaatcggtctcggcgctggacgtctcggtgcaggcgcaggtgctggaactgctcgagcggctgcgcgagacgcatggtctgagctacctgttcatctctcacgacctggcggtggtcgagcgcatctgtcaccgggtggcggtgatgtatggagggaagatcgtcgagatcggtcgccgcgaccaggtgctgcacaatccgcggcatccctacacgcggcgcctgctagaggcggtgcccatgcccgacgtcgaccgccggcgcgacttcaaggcgctgctcgaggccttcgaggcgcccgatccgatcaagccgcagggcttccgggcgccgccgcagcgcttcgacgcggtcggcgaggatcatctggtggcggtctga

SEQ ID NO: 327760 - DNA, 417 bp, Pseudomonas aeruginosa
atggaccacttccagtggatcgtcgcgctgacccggatcatgtccgcggtgttccgcaagggcggcgactgcaccttcctggtggaggaactgaaggcggtattcgacccgcgtggcggctacctgaagaagggcggcgtctacatgccgtcgatcgtcgccgagatcggcgcagtgctggagcgccatctgatcgccatcggcatgctcgaaggccatgcgctggacgagacccagctcaagtacctggccgagaagcgtgccgcctacgaggcgagccagggtgcggtggcggtcgagccgggcgagggtttcccggccggcgcgcagctgtgcaacaagtgcaacacccaggcggtggtgcagatggacggctgcgcgacctgcctcaattgcggcaactccaagtgtggttga

SEQ ID NO: 327761 - DNA, 510 bp, Pseudomonas aeruginosa
gtggtgctgatcggtgggccaggcaccggtaaaacccacctagccaccgcgctggccgtgtccggcatcacccggcacggtaagcgcgtgcgcttctactccacggtcgatctggtcaatctgctggagcgcgaaaaacacgacggcaaagccgggcggatcgcccaggcactgctgcgcatggatctggtcatcctcgacgaactgggttatctgccgttcagccaggctggcggtgcgttgctgtttcacctgctgtccaagctgtacgaacacaccagcgtggtgatcaccaccaacctgagcttcgccgaatggtcgagcgtgttcggcgacgccaagatgaccaccgccctgctggatcggctgacccaccactgccacatcgtcgaaaccggtaacgagtcctatcgcctgcaacacagtagcttggcggcccaggccaagatcaaatcacgggagcgaaagcgtaagggcggccaggaaccggaggacgatgagccgttctga

SEQ ID NO: 327762 - DNA, 1005 bp, Pseudomonas aeruginosa
atgagctctcgtggctatctgaactttttgaaagaccatcccgcatacaaaaatctaaacaaagattggcatgttgaattaaccaattataacgttttttggtttgatctgctaatcaacgctccgggaggctctgactatgaaagcatcgtatcaaagtttttgaacgcgtaccgtgaagaggtaaagcagaacaacgacaaacgttttgtatattttatcgctgcacgggatcgggtgcgatttcacaccgctatagcccctcgtttgagtcgattgaagaatgaaatcgtgatccatttggaggtgggagtagaaaagaaaataaaggaaattcggatgctcgcgcgccctgaaattttcggaatgaatattccgaaacttcttgatgacgggcggttcatcctgcttcaatttcctggaatggaacatccagtgggaattaatatccacgagtttttgatgatgcactgcatcaacattggcgtagacacagaagttctctatgtgggctcaactgacgaccctgcccggcggccacttaaacgaaatcatcgtggctatagcgattcaatctatggagtcaataccaccgagaaagatgtgtttgtttactataatttattcaaggcaatttctatttctcagcgtagccctcacaaccttcaattcatgcttggcaattcaatgattgatgaggtgcaaaagaaagatgaagggatgctgcttgaacatggtctaatccattattttggagcaaagagccaggaaaaaagcaaagggctggagtatggcaggcttcggagtgggctaaggaaactaaagcaaaaatacaacatttcctcagtaaactatcacatagaagctgaaacttcgactgaatactggaatctgtactcaagagaagtttctcgttccggtcgccatgaattttcgttggtactgcaagagaatcgggtgttgatcggcaaggcaaagggtaccatgactgatccacttggttag

SEQ ID NO: 327763 - DNA, 492 bp, Pseudomonas aeruginosa
atgacctacagcgctacccaaaccacgacctataccactactgacattgaagcagtcgtacgccggatcaccgccgacctcttaatgatcgcctcgagcagcgaagcagtgactgaagccaaggccaaggaatgggcctatgacatcgagctgctggccaagaacgggtatctgaaattcgcggatctcacgctgttgagcaatggcgttgagcagaaggcaacccggtactacgtcaacgagtccggctccctagccaaccagcgcccgggtgatgctcgctggcccaaggtatccaacccgcacctgcggatcgttctgtcctacaacgacagttacacccagcaagcgcgggagaacatgtctggaaagctgaagatcaactggacaacctcttacgacgacatcagccactcccagctcactcagagcggtggtcgcgaatattcgagcaacggctacggcatggaacggaaggactacacccgatga

SEQ ID NO: 327764 - DNA, 945 bp, Pseudomonas aeruginosa
atgccactcaccaacactcagatcaagtattacgacagtaacgtgctgcgcttgccgaaggacaagcgggagacctacaacgcccaggtcgaccgcctgatagcagcgctgaaggacagcctgaagaagcaggacaaaatcactatcaagaaggtggtaaaggcaggctcttttgccaagcacaccattctgcggcccaacgctcagaaccccgccgacgtggacgtggttttctacattagcggcgagaaggtagatgaggagaccttcgcaaccctcagccagaaaatctacgacgccctgatcaagctgtatccgaacaagtctgttgaagacttcgaaatccagcgtaaggcagcgaaggtcaccttcgtgggtaccgggctcgaggtcgatatcgttccggtcattgagaacccgagcaaggaaaactacggctggcagttcgatcgtatcgatggctcgaagactgagacctgcgccccgtgccaagtgaagttcgtgaaggatcgcaaggatgtagatccggacttccgcaccctcgtacgcctggccaagcgctggcgtacctggaaagaggtgccgctgaagtccttccacatcgagctcatcatggctcatgtgctcgaactgaaggggaagaccggctcgctggagaagcgtttccgtgacttcctcctttacatcgctgagtcgggtctcaaggaagtcatcaagtttcctgagaacggtaatgtccccgagttctccgatacggttgtaatcatcgatccggtctgtgacaccaataatgtcgcgagccgcattactgaagatgagcgcaaagagatcgtccagctcgccgacgagtcctgggaaaccgcccacttcgcttcggtggaagacgacttcgagatctggaaagagctgttcggcaagggcttcaaagtcgaggatgcagcatga

SEQ ID NO: 327765 - DNA, 900 bp, Pseudomonas aeruginosa
atgacagacgagtccaaacccacggacgaccaacccaccagcaagggacggcaaggagcacgttggggccaggagcgtcggttggaattcatcgactatcgactacggtgggatgggcagatcaaccgcagcagtcttactgacttcttcggaatctcggtgcctcaggcgtcactggacatcaccgagtatgcgaaactcgccgagagcaacctcgagtacgacacccgggccagggtctatagggctaccgagtcattcaaagcagtcttcccttccagtgcagttgagcgctacctggatgacctgctgcgcgtcgccgttcagccagagatcccctacggcagcttcttgggctggcaatcccctgtcgcagctgtgcccaaactgggccgtcgcctaaatgcggacatcgttggggtaattctccgcgcgattcgcgagaccggatttatcgaggtcttctaccaatccctgacagaccctgaaggcggtgagcggatgctctctcctcatgccttggtgcacgacggtaaccgctggcacgtccgggcgtactgccacaagcgtaaggccttccgggatttctctcttacccgtatcaaatgctgcaaatatgtggggcaggatcgggatcgggctgatgaagactatgcctggaacacaatggtcaatgtggttctcacccctcacccgggcctcacccccgcacagcgcaagctgattgagaacgacttcctgatggagggcggcgagatgcatgtcgagtgtcgccgagcacttctcttgtacctcctattccagctcaacctgaatgaagaccaagccgatcagaggcccgaggtcatccagttggccctgaagaatagggatgagatcaaagacctcatccagtactaa

SEQ ID NO: 327766 - DNA, 1527 bp, Pseudomonas aeruginosa
atggaaaagcttgaaaatgaattcattctgattgcgggcagcatctccaaaaagacagagaaggcctcgatcgatctcgcgcacgacttcacccgtgcgatgaccaaaagcgtcttggcggcacagggtggactcgttgtctacctcgcagggctccctaccaatgaggctggtgacccgctgactttcgattggacggtggtgtacgaggcggaaaagctgttggctggttgctcccctgcccgccaattgaaaattgtgacgtctaagtcggccatgcaggaaaagatgactcctgagcagcggctgctcatccgccgcctctcggctgaagactttgcggagatcatctacctcgaggacgacgtgatcaccggagggaacattggagacgaacaagttgaggtcgcaacagcgatgatcgccttgggtggcggcaagggtgtctcagaccgcgcccgcaaaatgcgtagagataagcgtcccgtgctgccattcgacctccagctgggtggattcagcgaggacggccaaggagcgctcggcctgcacgcaaacttcttcaaagagcccctgacgatgttccctctcaccggcgagcaagtgaaaggacgcctggatagcatgtccctacaggagcctatctacggcttggacaagatcgcagatctctctgttggattgttccaggctgaaattgaggcccgggaagcagcacgatctccggatcttctggtgatcacggccatcgccattgagttggcagctgcaaaaaaagttttcggtgttggcgaagatgtaccagcacgcttcaccgcccacggcgtccactattggccagtgacgattcaacgagctgacggcccactttcttgcgtcatcgcttctctcggcaatgctggcaacgtcaatgcaaccgccatcacaacgcttctcctgtctgagctaaaaccgaaaaaagttttgatgatggggattgcagcgggccgccgtaaaaaactgagcctcggtgaagtcattttgtccgaacgcgtcgtgtactacgaaggggcggcagcactcgccggtggcaaggttgcagcgcgaccggagatgccgcgacctgggctttccacccagcaaaacctcaatgcttacttcgcgaccgcctccctgcccgatcgcttgcaagagcatgcgaacaaactcggctttgcgatgccgactgagtccaaagcaggcgaagttgctgccaggttgatggtgtcaccagcgaccattgcttccggcgaactactgattcgagatcggaagcttttcgaaggattccaaggccttcacgacaaagctgttgtcgcagagatggaggcttacggagtattcgacgcttgtgacaagcagaacgtgcctgtcttggtcgttcgcggtatcagcgattacggggacacgaccaaggacaacactttccacaaggtggcttctgaagcggcagccattgtgacccttgattacgccacttatggatggagccgaagaccggctcagtaa

SEQ ID NO: 327767 - DNA, 1074 bp, Pseudomonas aeruginosa
atgacactgctcctgagacacagcaacttcctccctgctcgataccttcgacctgccagatatcatttcgaagcatccccgagaatgctgaatggaaggacaaattttatcgccgttacccaaaagctagtggagaccactggtcggtacatgaacctatccaacctggacggcatcaccatcggcttcgactacgatgatgcgcttgcctctgtcgacttgggttacgagtcaacgattgcgaaacaatacaccaagcaggaaaacctcctcggcgtaggtaaagcgctgagggttcgtcgaaacggcgagatcaaaatgcacgtcgtgctgaacggacatgtcctgctcgatctggttgaacatgaaccgacgagtgacgagttctggggggcagccaacattcttgcccatgagctcggccatgtgcagaccgcaggatggttcgaagcacactctcctggagtcatgctggcccaacatgagggggactgggccacaagcacgctacgggagacagctcatatcctctgggaagaatatgcagcgtgccgacttagcgcgcttataagccagggatcgttgatgacagtcagctacacacaaggcttagaaatttcggttctaggtgctgtagaccgagcccgttccgcgattaaagactatcgaacgcacagcgacgtcgctcggcttctggtcgagacagcacgtgaaattgccatgcctctgaaaatgtctgcctacctgcttggtcatctggatggtctcgatgaagaagtcgatatcgactcgcgctgccactttgccggcgaattgaccccgcacttccatgaactactgggtgcactcagagatgcgtgggaaactcgagaatcgtgggatggccttgccagtcttgattcaatcgttgatgtaattgtgaacgcgccgcagacagcgggaatcgacatcaccctgagtcaactaccgccaggctcccgcgtagacgtcccctacagggcggagacgctgcccaatggcgaggcggatatggcgataatccgactgaggcaagcgctcgggctcgaaccgtaa

SEQ ID NO: 327768 - DNA, 285 bp, Pseudomonas aeruginosa
atgagagctctgaattcgctgacccagaacctgatcgacaacctgacccagatcctgcagaaccccgaagaggatgccctgcagacgctaaggatatgcgctcctgtactgatagaggagctgcagcagattcaactgagggcagtcgatcgccgggatatcgtcccgcagataaagcagctcttggatgaatggctgcaacaacatccacagcctgatacggcccaacaggcgctcattgaggccgtggaccgcgcggagatcctacagcggaggcaagcgtga

SEQ ID NO: 327769 - DNA, 885 bp, Pseudomonas aeruginosa
atgatccggaagtcgacaggctcgctcttgctaatgcttgccctacccacactggcccacgcggtggagattctgcgctgggagcgcattccgttggccattccattgacggtcggccaggaacgcattgtcttcgtcgacagaaacgtgcgagttggggttcctcgggatctgcagggcaagctgcgcgtccagagtaccggcggcgcactctacctgctcgccaacgagccgattcctccagcgcgcctgcgcctacaggacgcgaccaatggcgagcagatgctcatcgatatcgccgccaccgaagcaacggccgaccaacagccgcgcgagccggtcaggatcgtcgccggcgagccagtggatccgcattatggccagtcccgggaagcccagccatcggcagcagcgaaacagaccgagcacgcagaagcaccgaaggccgtgccgcgcgaaacgcccgtccccgtggttctgacgcgctatgcggcgcagatgctctatgccccgcttcgcacggtggaaccggtggatggcgtcggtcaggtgcgcgtcaagcgacagctcgacctgaccaccctgctccccagcctacccatcacggctaccgccttgggcgcctggcggctggacgactactacatcacggcggtgaagctgcagaacgccagcgcccagcacctggccctggatcccagggacctgatgggcaatttcgtcgccgcgaccttccagcacccgtacttggggccccggggcgacgcctccgacaccactaccgtgtatctggtgacgcgcggccgcggccttgccgacgcgctcctgccctcctccatcagccagatcgatcccaaaggaggccgtcgtggcgctgaccggtaa

SEQ ID NO: 327770 - DNA, 261 bp, Pseudomonas aeruginosa
atgagtaagccgactaacattccggcgctactgcgccgcttggacgaacaagcctatgaccagctctgcgccgaagctgcgcgccttgccgaagagaacgaacacctgcgcaccgaactgacccgcatggaggagtgtgccgaagggtggtgcaacgaggcccagcgtctccacgagcaactggcggaggccaccggtggacaggccgctatcacccaatccggtgctctggtcgtcatcccgatggagcgctgcgcatga

SEQ ID NO: 327771 - DNA, 600 bp, Pseudomonas aeruginosa
atgaaagtaaatggactggctgtattggtatgcactctctcactatttggtacgacggaagcttctgcagcatctaaacctgaagaaataaatcccccaacttttcgatctgctagccctgaatcgctcgctgctgcaaaacagtatttgagtgatctagaccaagcgatgctcgatagcatcactgtgctcaagaaagggcagttgcagggtctgcatgctcaaagcaagtatttcaactaccaagtagagaaagggcgaagcctgtttggatcaactatttttgagccgctcggccgctgctttgcggccggaaactattctcgtgcctggtggcaggaacagctcagcgcagctcagaggggcggtactgagtctgtgcctggctcaatcaaagagaccttggacgagtaccaacttaatagagttgaatgcctaaaagatgccgacccagtcgcttctggaaaggcagaagctgagcttgatgaagaactgaagaaaaagtttggtggtggtcgagaatgccttgcagtcatcactgttgaccctgaaacaaaagaggttgtaaccagaccgaaacctgcccactgcaaaaactaa

SEQ ID NO: 327772 - DNA, 330 bp, Pseudomonas aeruginosa
atgtcattgcagtgccctcgctgtcactctcccaaagtcgcttctttccatcacgcaatgaaagccggcgctgctatcggcgcggtcggtggcctcgcacgtggcgttagcgctgctctggcaggcggcaaggccggcgcagcgctcggcgtaattgccggccctgtcggtataaccctgggctcggtatacggtgccattctcggcggtcttgccggaggcgtcggtggctgtgcgctcggtgcccagctcggtgagtcgctcgaccgccatgtcctggcccacaacctctgcctgctctgcggtcaccgtttcaacctgccggcctga

SEQ ID NO: 327773 - DNA, 969 bp, Pseudomonas aeruginosa
atggctcatcaaatcgaacaaatggcctacgttggcgctactccgtggcacggcctgggcaacaacctgccgcagaagcagcccatcgaagtctggcaacgcgaagccggcatggactggcagatcctggaaagccctgtgcatttcaagtcggacgccatcggccacctgggcgcgatccattcgttcccggagcagaaagtgctctaccgctcggacagcaaggcaccgctgtcggtggtctcgcagcgctaccacaccgttcagcccaaggatgtgctggagttttaccgggatctgaccgaggtctccggctacgagctggaaaccgctggagtgctcaagggcgggcgcaagttctgggcgctggcgcgtaccggacagggcgctgcactcaagggtaacgaccaggtgaatggctacctgctgctggccacttcctgcgacggcactctggctaccactgcaacgcccaccaccatccgcgtggtctgcaacaacacgctgaccatcgccctggacggcactagccgggcgatcaaggtgccgcacagcacccgcttcgacggcgatctggtgaagaagcagctcggcattgctgtctcgcaatgggacgacttcatgtaccgcatgcgccacctggctgaacgcaaggtgcagtggcatgaggcactgggcttcttcatgaacgtgatgtgcgaaaccagcccgaccggcgccctgccggaacagctacccaacgagcgcgcgctgcgcaaagtgcaggagatgtacgaaggccgtggtcgtggcagccagctggactccgcacgcggcacggcctggggtctgctcaatgccgtaaccgagtacgtcgatcacgagcgccgggcacgcagcaccgagtaccgcctcgactccgcctggtttggccagggcgcgcagatcaagcaacgcgccctggatacagctctgcaattggtcgcctga

SEQ ID NO: 327774 - DNA, 1005 bp, Pseudomonas aeruginosa
atgaaagctacttcattgaatcgcagcaccagcaaagcccgcccagccctgcgactggtcagcaccaaggagctgccacgcgaggactggcttgagatccgcaagcaaggcatcggcagttcggacgctgcggcggcggtcggtctgaacccctataagtcgcagctggaactctggatggagaaaaccggtcgtgatgctggcatgcccaaggctgatcctcaggacgaggaaagcccgatgtactggggcaacgtactggagcctatcgtggcctggcactacagcaagcgtacgaagaacaaggtacgtcgcatcaacgcagtgctgcagcacccggacccggagctgtcgtggatgctggccaacatcgaccgcgaggtgatcggggccgacgatgtgcagatcctcgaatgcaagactgccggcataaacggggcacgcctctggaaagagggcgtgcctgaatatgtgcagttgcaggtgatgcaccagctagccgtcaccggcaagcaggcggcggatgtggctgtcctgctgggtggccagacgctggagatccaccgcatcgagcgggatgaacagatgatcgctcgactgatcgagctggagcgaaagttctggcactacgtggagactgatacgccgccaccggccgatggcacggcttcggctgagtcagcgctgcgcagcctctacccggaggacaacggccaggtcgtcgacttcagccagcatgctggtctttcagcggcttacatcgagctgaaagccgtgcgtcagtcgattgccgacaaggaaaagcgcgaggccgagctcaagcaggtgctgcagcaagccatgggcgatgccagccgggcggagttctccagcggctacatcagctggcgcaaggccaaggacagcatcggcctcgatgtcgcacagctgctcaaagacaagccgcacctgcaggccaagtacccactgctgaagccgggtgcacgacgcttcctggtcggctga

SEQ ID NO: 327775 - DNA, 951 bp, Pseudomonas aeruginosa
atgctcaaaggtctggctatcaccccgccggtgctcgggcggatttccatcggtaaggtcatcgagaagaacggcaagcgactgccagagaaggatgaccagttcaccatcacgtcccaggtgcagggtaaggacggctggttgctgcacccgctcaatgatgagctgcgtcagggcaaagacgacaagctgcgcagcatcccggtacgcctgctgttcaacgagccggagctgaacttcagggctgactacacgctgttcgaccggcaatcgggtcggccggtttgcgtcggtaatggcgagacctgtaaacgagttactcaggacggcatgcagtcactgccctgcccttcgccggatgcctgtccactggccaagggcggtgcctgcaagccctatgggcggctaaatgtggtcattggcgatgaagatccgctgggcagttttgtgttccgcaccacgggtttcaacagcatccgcaccctggctgctcgcctgcattacttccaggccatctcgggtaaccgcctggcttgtctcccactggagttgcgcctgcgtggcaagtcgacacgccagagccatggcacgccgatcttctacgccgacctgacggtacgcggcggtatggacatggctgaagcgctggtgactgcaagtgaactcgattcgcggcggcaagctactggcttcaatcaggctgcactggatgaagctgcgagacgtggcttcggcaacggagcctttgaagacagcgaggaggatgccagcgccatcgtggaagagttctacagcgagggtgaagcaccggctgcagcaacgacctatccatccaatcccaccaaacccagcctggctgaaaagcttgaggcacaagctgcgcgtcaaaactcgccaactgatcaagaccaaggaggccgtcatgcgcctgcacaagctgaaagccagtga

SEQ ID NO: 327776 - DNA, 498 bp, Pseudomonas aeruginosa
atgcgcctgcacaagctgaaagccagtgacacaaccggcacctatctggtcgagtcaccggttacggaaaccgacatcatgctgatggcacggcagttggcaaatctgcgtctgcgccgggggcgagcactgacctcaccaaaggaagtgttcagccacctgcaggcattactggccggatacgagcatgaggtgttcgccctgctcatgctcgatagccaacaccgagtgattgcgtttgaggaagtgtttcgcggcaccctggacgcagccagtgtctaccccagggagatcgtgaagatcgcactggagcacaacgccgccgcaatgatcctggtgcacaaccacccctcaggtgatcccgagcccagccaggccgaccgtatcttgaccagcaagctgaaggacgcactgagcctggttggggtcagaacgctcgaccacatcgtggtagggcatgaaggttgtacatcactggctgagcagggctgtctgtaa

SEQ ID NO: 327777 - DNA, 969 bp, Pseudomonas aeruginosa
atgactcggcaaaaacaaacgcagcgcgagcggcgcatgttcttcggtggcgtggcggtgctggcgctggccgggctgtgcatcgacagcagctacctgctgcacgtgctgatcctggccatgctgtggtgcatggtggtggcggcctgggacctgctgatgggctacgcgggcatcctcaacttcgcccagctggtgttcttcgcggtcggcggctacgcctcgcagatgctgatgctgagctcgggaatgcagccgctggcggcgctggtgctggcgacggggctgacggcgctgttcggcctgctggtgggcttgccctgcctgcgtctgcgcggcgagtacgtggcgttgttcaccttcgccgtgcacctggcctttcccaccctgctgcagcagggcagggcgttcggcaccggcggctcgggcgggctgatgggcgccgagccgctgagcatcggcggcctggtgttcgccagcggcgacaagcaggcctggttcttcctgatgctggcgctcagcgcgctgagcgtgtggctgatctaccaggtgctgctcaagggccgctggggccgcgccttcatcgtgctgcgcgatgctgaggtgccggcgcgctcgctgggggtcaacgactacggctacaagctgctggtgttctccctctcggcggccctgaccggccttgccggcgcgctctacaccagctacatgggcgtgatcacgcccaacgtgctgggcaacgagttcttcctcatcgtcatggtcatgctctgcgtcggcggcttggggcgcttcccgggcgtgctgatcggcgccttcgtcatcaccctcggtaacgaggtgctgcgcgagtacagccagttccgcctgatcctgctcggcctgctggtgatcatcaccctgctggtgctgcccaacggcctggtggacctgccccggcgactgcgccagcgctggggccgcggctga

SEQ ID NO: 327778 - DNA, 870 bp, Pseudomonas aeruginosa
atgtcgacccttctctacatcctgttttccgggctggtgaccggcgcggtctacgcgatcttcgccctcggcctgtcgctggtgtacggcaccgcgcgggtcctcaacttcggctacggttcgctgtacatggtggcggcctacctggcctacgccctgggcacgcacctggggctcggctatgtggccatcgtccccctcgtgctcggggtgatgttcctgctcggcgtgctgctggaagtggcgatgatccgcccgctgcgcaagcaccccaactggaagatggcgaccatgatggcctcgctgggcctggcgctggtgctggacaacctgatgctggtgatcttcggcccgcagcagcgacagatcccgctgctattcgatggcgccttcgaggtcggcgagctgctgatcacccaccaggacctggccgtgctgctgatcgccgctaccacggtgctggcgctggagttgttcctcaagttcatgccgctgggccaggcgatgcgcgccgtgtctcaggacatggaaggcgcgcgcatggtcggcatccgcgtcaatcgtgtgttcgcctgtgccctgggcctgtcggcagtgctggcgggcgtggcggcgctgctgctgacgccggtcacgctgatctcgccgcagggcggctggacgctgtttctcaaggccttcgtcatcgtcgtcttcggtggtttgggcagcacgcgcggcgcgctgatcgcggcgatcctgctcggtgtcatcgaatcgctggtggtgtaccagttcggcgccacctggatcatgccggtgtggctgctggtgttgttgattgtcctgatggtgcggcccaaggggctgtttggagtgtgggcggcatga

SEQ ID NO: 327779 - DNA, 696 bp, Pseudomonas aeruginosa
atgctcagggttgaatccattcatgccggctacggcgacttccgcgtgctgcacggggtctcgctggacgtcggtcagggccaggcggtcggcgtggtcggccccaacggccacggcaagagcaccctgctcaaggccgtctgcggtctgctgccggtgagccaggggcgggtgatcttcgacggcgaggacatcaccgcgctggacgcccagcaacgggtcgagcgcggcctggcctacgtcgccgaggaccgccgcctgttcggcgacatgagcgtgctggagaacctccagctcggcgcatacctgcctcgcgcgcggcgcctgcgcaagcagaacctggagcgcgtgttcgccctgtacccgcgtctggccgaacgccgcgaccagctggcccgcaccctcagcggtggcgaggcgcagatgctggcgctgggccgcggcctgatgtcggcagccacctgtctggccatcgacgagccttcgctgggcctggcgcccaagctgatcgagagcctgctgctgaccatcgccgagatcaaccgcgagggcaccacggtactgctggtggagcagaacctggcgctgatcgcgccgctgatgcagcgcgcctacggcctggaagaggggcacctgagctgcatcgaactgggcgcggccagcaactccctgatcaactcggcgcaggaggcctga

SEQ ID NO: 327780 - DNA, 732 bp, Pseudomonas aeruginosa
atgcttatgtcgctgaataacgtcggcaagcgcttcggcgccttgcaggtactcaaggatgtctccttcgacatccggcccggcgagatcttcggaatcgccgggcccaacggcgcgggcaagagcaccctgctcaacgcctgcaccggactgatccgcccggacagcgggcaggtgcatttcgccggccagcgcaccgatcggctgccgccgcaccgcctctgtcacctgggcatcgcccgcacttaccagatcgcccaggtgttcgattcgctgtcggtacgcgagaacatcgagaccggtgccatgttcggcgcggcgcgcctgaagagcgagcggcgtgccacgctcaaggccctgttcgcactgatcggcctggagcactgcctggacgagcgcgccagcgacgcgacgctgctgcagcgcaagatgatcatgctcggcgcggcgctggccacgcagccgaccctggtgttcatggacgagccgttcggcgggctgaacagcgaggagatcgaccgctatgccgatctgctgctcaagctgcgccaggagctgggcgtgtcgttcgtcatcgtcgagcacaagatgcgcgccctggcgcggctttccaatcgcctgctgatcctcaacttcggccaggtgatgtgcgtggataccccgcagcaggtgctcaacgacccgcaggtcatcgatatctacttgggggccaccggtcatgctcagggttga

SEQ ID NO: 327781 - DNA, 1215 bp, Pseudomonas aeruginosa
atgaagccttgcagtcacatcattcgcattcccgcagccgttgccgccctgtccctgggcctgacctgtggtctggcccacgccgagggcatcgagatcggcctgccgattcccatcaccggcccttacgcggtcgacggcaaagtcatggagcagggcgcgatgctcgccgtggagcacctcaatgcccagggcggcgttcttggccagccgctgagcgcgcgcgtgttcgacatcggcgacctgactccggacaagctgcaggcggctgccgccgagctgatcgagcgccgccaggtgaccgcgctgatcaacggctacggcggcatgggcccggacatcccggccttctgcaaacacccgcagccgtacctgaacaacaacgccaccacctacgtggtggagatggccgagagcatgggctgtgacaacgtgttcatggccgccgacgtcgagcgcagttacgggcgccaggtgttcgcccagctcgaggcgctggggcacagcttccagggcaagcgtatcgccgtgctgtacggcccgtacgattgggaggtgggcttcaccggcggcatccgcgaggcggccgaggcctccggctggagcgtgacgctcaacgaagaggtgccctatggcaccagccagtgggccggcacgctgaacaagctgcgcgcgcagaagccggacctggtggtgctggacatgctcgacccggcctcggtggccaccttcctcgaccagatgcgccgtcagccgctgaagggctcgctggtgttcgccggctacagcctggccaccccggcgctggccgaagtggtagccaagggcggtctggacggcgtgctgggcatgaccctgtcggcgcagcgttcgggggccgagggtgaggcgttcgaggccgcctggcagaagacctacggtgagccggcgccgctgagcatcggcgcccaggtgtacgacgaggtgatggcctgggccgccgcggtgcagagcgctggcagcgccaccgactacgcccaggtcaaggccgcgctggccggcaacgcccatgtcggcgtgaccggcaccctgcgcttcaacgagcgccgctacgtgccggccagcgacgccacccagccggtgcagctgctgcaggcccagggcggcgtcgtcaagccggtgatggtgggcagccagtcggtcaatccgttcgtggccccgacctggctgcagtaa

SEQ ID NO: 327782 - DNA, 1011 bp, Pseudomonas aeruginosa
atgtcgaagctgcccgggaagaaagtgaccattcgcgacgtggccaaggtggccggcgtttcggtgaccacggtgtcgcacgccctcaacggcaggggccgcatcgaggcggagaccatcgccagggtcaaggaggccgccgaacgcctgggttatcgcgccagccaggcggcacgcaacctacgcggcggccgctccggacgcatcgccatcatcaattcccagtcctctccgcatcaggtctcgctggtcgatctcgaacatttcgtgcgcctgctctccggcgcctcggagttcgccgtggagcatggctacacgccggtgctgaccctgcccgccagccagggccagggcgcccaggtggacggcgtgatcatcgtcgacccggtcaagggcgagccgctgataggcgcgctgaggctcgccggcatccccgtggtgaccaccggccgcgacccctcgcagcgccgcgaagatgaacactgggtggacaacgacctgtaccgcgccaccctggagatgctcgatcacctggctgcccagggcgccaaacgcgtcgacctgctggccgcctcgtcgatctactcctacagcgaggacgccatccgcgcctaccgcgactggagcgcgcagaagggcctgcaagcccggatgcacgaggtggaaggcccgctcagcgaaaacggcgcctacctcaccagcctgccgctgctgcagtcggccgagcgcccggatgccctgcactgcgtgaccgaccgctacgccttcggcgtgatgctggccgcgcaatcgctgggcctgaagctgcccggcgacctgctgctcagcgccggcaccgacagcgacctggccgccaaccaccaaccgcccctgaccgccctcaacctcagccccgagcagatcggccgcgaggcggcgcagctgctgatcgacctgatcgagggcgcgggtggcgagccgcaccgcgtagtgccctactcgctgcaggtgcgcgccaccaccgccggctag

SEQ ID NO: 327783 - DNA, 1254 bp, Pseudomonas aeruginosa
atgagcatgcagcaaatgccgtcgatcaatgttcagcggctgtggaaccacatcgtcgagaccggccagtacggcgccacgcccaggggcgggctgacccgcctgaccctcagcgccgaggacgtgcaggcgcgtaactggctgcgtcagcgctgtgaggcgctgggctgcacggtcaacgtcgatgagatgggcaatatgtttgccctgcgccaggggcttgataacagccgcctgccgatcgccatcggcagccacctggacacccagcccaccggcgggcgcttcgacggcattctcggcgtgctggcggggctggagattctgcagaccctgcacgagcagaacatccagacccgctcgccgctgctgctgatcaactggaccaacgaggaaggctcgcgcttcgctccggccatgctctgctccggcgtgtacgccggggtctttgacaaggaagaggtgtatcggatcaaggaccgccagggcatcagcttccagcaggcgctagaagacagcggctacctgggtagcgagccggtgggtaagcagcgctttgccgcgcacttcgagctgcatatcgagcagggcccgctgctggagaaccacgacatccccatcggcgtggtgcagggctcgcaagccgtgcgctggcatgaggtcacactggagggcaagcgcgcccacaccggcaccacgccgatgcacctgcgcaggaacgcgctgctcggcgcggcgcggttggtcgagcggatcgacgccattgcgcttgcgcacggcccgctgggcgtcggcaccgtgggtctgatggaggtaaagccgaactcgcgcaacgtgatccccggcaccgtgttcttctgcgtggacctgcgccacccggacgatgccaccgtggagaagatggacgcgcagttccgccaggcgctggtcgaggtctgcgccgagatcggcctggagcacgagctgaagaccgtgtggcattcaccggcggtgaagttcgacgccggctgcatcgctgccgtgcgcgccggggccgagtcggccgggttgccggccatggacatcacctccggcgccggccacgacgcggtgtacatcgcccgggtggcgccgtcgaccatgatcttcgtgaagagcgtcgatggcctgagccacaacgaggccgagtacacctcgcccgaggattgcgggcatggcgcccaggtgctgatgaacgcggtgctgcactacgaccgccggccggacggcgcctag

SEQ ID NO: 327784 - DNA, 612 bp, Pseudomonas aeruginosa
atgtgcaacagcgttaccgtaccggcccgtgaaggccgtggcatccgcgtcaacaaaggccagcgcatgcgcctgaccacgccgaagggctcgcagtgtgcggacttcttcgccttcaacgccgagaacgtgcaggagtggctgtcgtgctcgcacacctgggtgaccaacttctccatggtgccgcgtgagggcacggtgttcctgtcgcgcttccgccggccgatggtcaagctggtcgaggatgccgccgacggcgcccacgacatgctgatcaccacctgcgaccagttccgctacgagttcttcggccacaagggcccgcacgccaactgcgccgacaacctgctgacctccatgcgccgcttcggctacgagctgccggtggtgccgcaggcggtcaactttttcgccaagagccatgtcgccgaagacggcaccctgagctcgccgcccaacccggtggcccccggcgcctatgtggtggtcgaggcgctgatggacctgatcatggtggtcagtgcctgcccgttcgatctggaagtcgaaggctgggaagtcagcggcgggcatcgccacgagctgtccgaactggtgatggatatcgtctga

SEQ ID NO: 327785 - DNA, 954 bp, Pseudomonas aeruginosa
atgagcggccccgttcatcccctgaacctgcgcatcagccagatcagcctggcggcgcaggacgtcatcgccctgaccctgcgcgatgccgagggccaggcgctgcccgagtggcaggccggcgcccatctggagctgcagctgccctcgggcctgctgcgccactactcgctgtgcggcgatctgcatgaccgcttcagctaccgcgtggcggtgctcagggatgaacagggctgtggcggttcggccgaaattcacacgcagctgcgcgtcggccaggtgctggccgccagcgcgccgcgcaacctgttcccgctggcgcaggccaagcgctacctgttcgtcgctggcggcattggcatcacgccgatgctgccgatgatccagacggtcgccggccacagcccgtggcagctgttctacgccggacgcagcgccggcaggatggcattcaccggcgagctggcgcagtggccgtggaacgtccgcctgtgggccgacgacgcccagggcatgcccgacctcaatgccctgctggatcagcagagcgccgacaccgccgtgtactgctgcggtccggccgggctgatcaaggcgctgcaggcggcctgcaaggcgcgcggcctgagcttcacctgcgagcacttcggcgccagcgagccgattccccggccggccgccgatgtcggcagcttcgaggtggtgctccagcgttcgggcaagcgcctgaccgtcgcccccgaccagaccatcctcggggaagtgaagaaggtgctgcccgacgtcagctactcctgcgagtccggcttctgcggcgcctgcgaaacccgcatcgtcgagggccaggccgagcacctggacagcctgctggacgaggctgacaagcaggccaaccgcagcctgatgatttgcgtctcccgggcgcgctgttcgcgcctggtgctggacctgtaa

SEQ ID NO: 327786 - DNA, 1038 bp, Pseudomonas aeruginosa
atgaacgaacgttattcccccgagcgcctgtggcgcgcctaccgccactgctggttcgtggtcgcccgcagctgcgatatcgccaccccgcagaaggccaggctgctggatcaggatctggtagtgttccgtgatgcccagggcgtggcccgggtcaccgaccgtcgctgcatccaccgcggcgccgacctgtcgatgggcaaggtcaccgacaagggcatccagtgcccgtaccacggctgggccttcaatggcgagaacggcgagtgcaccgatattccggcgctgtgcgacggcgcgaccatccccggcaacgccaagatccgcagctacccggtgatcgagcgcttcgagcacgtctggacctgcctcgacgagccgctgatggacgtgcccaatccgccggagctggatggtgccgagtggacctggctgccggcggcgccgatcccggccaggtgcggcttcatggccgccaccgagaatttccgcgacatggcgcacttccccttcgtgcacgaagtgtcgatgggcgaggtcagcccgctggtgcccaagctggaagtggcccgcgacggtcgccgcctgggcgcctcgttccgctacgagcgcgtggaaggctcgaccttctccgacatcggcgatgcctggatgcactaccacagctacgcgccgggcttcgccgcgatcctctatgaatacgacaccgccggcaaacgctacctggtcgacttcccgaccccggtcagctacggcgagtgcatcatccactgggccgtggccgtggataaggacttcaccggcggcagcgtcgaggaaatcctcgccatcgagaccgtggtgttcgacgaggacaccccggtgctcgaaggcctcaatccgccggaggtgccgctggccggccaggcgctggaagtgtcctgcgccgccgacgtgtacaccctcaactaccgccgcgcgaccatgtacgtggtcgatcacatcctcgatcagctcgatgcacgcgacgccgcgcgcatcccggccgcggaggtgtaa

SEQ ID NO: 327787 - DNA, 879 bp, Pseudomonas aeruginosa
atgagcgctgtactgactgctgctgaacccatcgtctggcccgaaggcaagcgctgcgccgcggccttcaccttcgacgtcgacgcggaaaccccgctgctggcccacgacccgaaactggccgagcgcatggggctgatgtcgcaccaggcctacggcccgctggtgggcgtgccggccattctcaaggccatgcgtgaagtgggcgtgcgcggcagcttcttcgtgccgggctacaccgcgctgcgctaccccgagcagatcaagcagatcgtcgtcgacggtcacgagatcggccaccacggccacctgcacgagccgctggccggcgtgtccgaagcccaggaacgcgagttcctgatgcgcggcctggacgccctggacaagatctgtggcgtcaccccaaagggttaccgcgcgccgatctgggagctgaactggcgcaccccgggcatcgtcgaggaggccggctttctctacgactccagcctgatggacgccgacgtgccctacgagctggacgtgggcaacggccgctcgctggtggagttgccgatcaactggattctcgatgactggcagcagtacgcctatatccccaacttctccggttgcggcgtgatcgagacaccggccaaggccatcgagctgttccgcagcgaattcgatgcgatgcgcgacaacggcggtctgtgggtgctgacctgccatccgttcctctccggtcgcccgggccgcgtcgccgcgctcaagggcctgatgcagtacgccaaatccttcgatgacgtgtggatcgccccgctggacgagatcgccgcctatgtgcgcgagcagcgcctgaccccgcgcagcctgaatcagcccgacccaagcctgtag

SEQ ID NO: 327788 - DNA, 750 bp, Pseudomonas aeruginosa
atgccagtgaacaatctgcggggcgccaccgccctggtgaccggggccgacacgccactgggcgaggcgattgccctggcgttgcacgccgccggcgtgcgcctggcgatccatgtgctcaatgcccagcccgatgacctggaggcggaactctgcgtgcgcgccgacccgcgtgacagcgtcgaggtggcgagcgccatggagtgggtggccgaggagttcggcgaactcaatctgctggtcacctgccatgcccagccgctggcctgcgccctggcggagcaggacgaggccagcttctggagtcatgtcgatgcgcagctgggcggcaccttcgccttcgtccagtccgccgagccgctgctgaagaaagccggctgggggcgcgtggtgctgctgacctcggcctggggcgtgggcgcgcgagatctggcggcggtggcggcggccagcggcggcgtccaggtgctgtgcaagagcctggcgcgcgagctgggatcgcacggcgtgaccgtcaacgcgattgcccatgccttcaccgacagcgactggctggcgctcgatgcccacgccctggatatcggcgagaacgtgctgcgcaccgcgccgcaggcctatgtgccggcagcggcgctgggccagccggcgcaggtggcgcacagcgtgctgctgctgtgccacccggtactcggcgccgccaccgggcagaccctgcaatgcaatggcggctacttccgccaccgaacctga

SEQ ID NO: 327789 - DNA, 696 bp, Pseudomonas aeruginosa
atgatgaatccagtagcagtggtaagcggggccgccagcggcattggggcgcgcatcgccagcgagttgacggcgcatggctggcaggtggtctccttcgatcttcgcgccgccgagggggttgcgcgcagctttgtcaccgatgtcagcgatgcggcggtgatcagtgcggctgtggctgcggtggaggcgcagatggggccgatcaccgcggtggtggccaatgccggctactacgaggaaaaacggtttaccgagatcgccccgggcagctggcagcgcatgatgcgcgtgcatatcggcggggtgttcaacctgatgcgcgctacgctgccggccatggcagcgcgaggcgagggcgcctttgtcggcatcgcttccgagcgcgccctggccggggccggtcacgacgcccattacgccgcggccaagggcgcggtgctgggcctgctgcgcagcgcggccgccgagtatgcccacgccggcgtgcgcatcaatgcggtggcgccggggccgaccgatacgccgctgctgccggccgactcctgggagcgccaggcagactttctcgcgcgcctgcccattccccgaattgccaataccgacgagatcgccctggcggtgcgcgagctgctgatgacgccgcacttcctgcacggcgagatcttctccatcaacagcggaacggtgatctga

SEQ ID NO: 327790 - DNA, 2007 bp, Pseudomonas aeruginosa
atggcaaccttgcccgaatcccctgagtacgcatcaggcatctaccagatcgaaacgtcggaccctgtggtcggtggccccggtggggtttccaacaagcaaggagagcagttggcatgccggacagcctggctcaaggtgcaggtcgacggcttggtcaccggcagcatcgtggcaggcaaagctgcacgtctatctgccgtgcgtaccttgtccatcactggggcaggtaccggcagcgcagcgttcgacggcagcgcgaatgctgccatcgccctgacgctagccaacagcggtgtgtcggcaggtacctactcgaaggtgacggtcaatgcgaaaggcctggtaacggccggcgcggcgctggtagcgtcggacatcccggcgcttgactggagcaagatcaccaccggccgcccgacaacgctgggcggatacggcatcaccgacgcgctggccaagagcgatgcggtgacctctccgacgccgaacaagctgctgttgatgaacagtgctggacagcttcccgcctcgatcacgggcaatgccgcgacggccagcaagtgggccattgcgcgcacgctatcgatttcaggggacgcgaccggtagcggtacgctcgatggcagcgcaaacgccagcattacggttacgctggccaataccggtgtcgccgacggcacctacaccaaggtcagggtaaaccccaagggtctagtcatcggtgcaaccacgcttactaccgacgacattccctctctggacgcctcgaaaattacgtcgggcatgttcgccgatgcccgcctgccctggtacgcacaagggctatgcaccagcgcacccaacacgacggacccgaacaccacgaacatcccgctcatcctcacgaatcacgagaacggtccgattccggggcagtatttctatatccagacgatgatgtacaaccagcgcaacggcaacgctgggcagattgccgtgcgctacgcggcgaacgccgaaatgtatgtgcgctacatgtacgacgtcggcaacaagcgcggggtctggtccgcctggaagcggtgcgatgtgggtggctcgtttgcaaaagagcccgacagtcgcatcggagacgctttcgatctgaacacacttgaatcatccggctggtggtatcagaccgccaatggctacgcagccagcggggcaaactacccgattgcaaaggcgggtcggctgatggtttatcgagtcagcagcgacttcatctatcagacgtaccagacacatgacggattcatgtttcatcgttgccggtacgcgggtacctggcagccgtggagggagcagtggtcgacagtcaacttcaacccagcaaactacgtggcgaagtcggagtattcctgggcgtccttacctgggaagccggcaaccttccccccatcggggcacaaccacgacgcaagccagattacctctggtgttttgccccttgcgcgaggagggctgggtaacggagctggccaggctcaaacagccctcaagctggcaactgccagaaccatttcaattacgggggcgggaacagcctccgtatcgttcgacggcagtggcaatgtcagcctgccactggtggttaacgccagcgacattcaaaccgggattctgccgctcgcgcgaggtgggacaggcgcaaacaacgctgccacggcgcgcagcaatatcggcgccggaactatcgcaaccgcttcacttggcaccagcggctggtggcaggacaacgacacgggacttatccgacagtggggcgtcacggcctctatcggcatggacagctcggcgacaatcacctttcccagggcattcccgcgcaacgtgttcggggccaactggaagcaacgcgcaccaggtgatcaagcttcgtcaggcaaccaggtaatcaccaatctgacgaccacaaacatgacgatctaccagggcgataatactgctggccctgtctattgggaggcgtggggatactga

SEQ ID NO: 327791 - DNA, 456 bp, Pseudomonas aeruginosa
atgatcgactacatgttttcaccgagccgcgtggcgttctaccccgtctctatgcgcgaaacatacgaggccagcggtagctggcctgatgacggggttctcatcagcgaagaggtccacaccaggatcatgcaggaacaggaagatggccgagtggtttgcgcaggcccggatggacagccgatgacgaaggagccgctgccgccctccaccgatgaactggcggcgatagagcgcgcctggcgtgaccgccagctcgacgccaccgacgctctggtggcacgccaccgtgacgagatcgaggacggtgccaccacgctgaccggcgagcagtaccagattctgcaggcctaccggcgcgctctgcgcgattggccagagtctgaacgattcccgcagtcagaatatcggcccgcacagcctgaatggctgttgggagcgctttcgaagcgttag

SEQ ID NO: 327792 - DNA, 150 bp, Pseudomonas aeruginosa
gtgaaaactcgcaaaacaccaggtcgcaacggcttcaagtacaagccccggttcggcctgatcattccgtgccgtgacgaacaagaccagcaacagaagttcgcccagctcaaggcgcagggcctcaaggtccgggtggtgtgcgtatga

SEQ ID NO: 327793 - DNA, 246 bp, Pseudomonas aeruginosa
atgaaacatcacgttgtgatcgaagactgggacggcgatggcgccattcgcctgcctgacgacgttctacaggaaatgggcgtcgacgttggggacacgctctacctccttgaggaatacgtgggtacgacccgctgtctggtgctcagtaagtcaccgcgcattcctgatcgcgttgatgaactggttggccactgggagtcgtttggcgaaatctctgccgagataaacgccaaggacgagtga

SEQ ID NO: 327794 - DNA, 420 bp, Pseudomonas aeruginosa
gtgctggatctgctgatcggctgggcgttctcggccaagccggatgccgaactggtgatcaaggccctggacatggcctacgaacagcgcggcaggccacagcaggtgctgttccattcagtccagggcagccagtacgccagccgcctgtttcggcaacggctctggcgctatcggatgcagcagagcatgagccgtcgggggaattgctgggataactcgccgatggagcgcctgttccgcagtctgaagtcggagtgggtcccgtcaacgggttacctgacggcgcaggaggcccaacgggacatcagtcattacttgatgcaccgctacaactggatcaggccgcatcaattcaacgacgggttaccacctgcggtggccgaagaaaaactcaacccactgtccgggatgggttga

SEQ ID NO: 327795 - DNA, 705 bp, Pseudomonas aeruginosa
gtggctgagactgcgctccggttgcaaggcttccaccagttgctcgaacggcaagtcctggtgcgcctgcgcctccagcgagcgctggcgaacctggtgcagcaatcgctcgaaccccatctgcccatcgatgtcggccttgagcacctgggtgttgacgaagaacccgatcagtcgctcggtttcgacccggttgcgattggcgaccggcacgccgacacggatatccgactgaccgctgtagcgatacagcagcgcctggaacgatgccagcagcaacatgaaggtactcgcaccctgccgctgggcaagcgccttcagccgcctggcccgctcggcgccgagttcgaactccagccgcgcgccgcgaaagctctgctccgcaggacggggacgatcgaacggcagctccagcaccggctgttcgccacccagcaggccgatccagtacgccaactggcgctccctctctccggcctccatccattcgcgctgccagacggcatagtccggatactgtatcggcagcgccggcagggccgcttcgcgcccctggctgtaggcggcatagagctggaccagctcttcgaccatcaactgcatcgaccaaccgtcggagacgatatggtgctggaccatgaccagcacatggtcattcggagccacttcgaacagactgatccgcagcaacgcatccgtccgtag

SEQ ID NO: 327796 - DNA, 1176 bp, Pseudomonas aeruginosa
gtgctgcactggtggacctccgccggcgagaagcgcgccgccgaaaccctgaagaagctggtcgaagccaagggccacacctggaaggacttcgccgtggccggcggtggcggcgaggcggcgatgacggtgctgaagacccgcgcggtgtccggcaatccgccggccgcggcgcagatcaaggggccggatatccaggagtggggcgaactgggcctgctcgccgacctcaacgcggtggccgccgaaggcaagtgggacagcctgctgccgaagcaggtggcgcagatcatgaagtacgacggcgactacgtagcagtgccgatcaacgtacaccgggtcaactggctctacatcaacccggaagtgttcaagaaggccggcgccaccccgccgaccaccctcgacgaactgttcgtcgccgccgacaagctcaaggccgccggtttcacgccgctggcccatggcagccaaccgtggcaggacggcaccgtgttcgagaacctggtgctgagcaagatgggtccggaaggctatcgcaaggccttcgtcgaacaggacaaggcgaccctcaccggagcgcagatggtcgaggtgttcgccgcgctgaagaagctccgcggctacgtcgatgccgacgccgccggtcgcgaatggagcgccgccacggcgatggtgatcaacggcaaggccgggatgcagatcatgggcgactgggcgaagagcgaattcaccgccgccggcaaggtgccgggcaaggactaccagtgcctgccgttccccggcacgcagaaggccttcgactacaacatcgactcgctggtgatgttcaagctgagcaacgcggagaaccgcaaggcccaggaagacctggcgcgcagcgtgctcgatccgtccttccagaaggacttcaacctcaacaagggctccatcccggttcgcctggacgccgacatggcgccgttcgacagttgcgcccagcagtcgatgaaggacttcaagcaggcttcccaggacggcaacctggtgccgagcatggcccacagcatggccgcttccagctacgtgcagggggcgatcttcgacgtggtgaccaacttcttcaacgaccccgccgcggacccgcagaaggccgcccagcaactggcggccgccatcgaggcggcggcgcagtaa

SEQ ID NO: 327797 - DNA, 315 bp, Pseudomonas aeruginosa
atggctaagccgaatgatacgtccaaccccgaggtaacagaatcgtccccccgcttcgtcccgctgctccccacctcccaggccgacatgtgtccgcgtagcgccaccctgtacgtggacacccatgcactccccacgcacttgttcgacaacgcgaaagtgcgcttgaggtcggcgatcaacatcctggccatgacccgtttgctcgatgagaaagaagagcccggcggcaccctggcctacatcaacggtgcgttgctgtcgctgctcagcgatgccttgtccgaaatcgaggcgggccacccgagcctgtag

SEQ ID NO: 327798 - DNA, 237 bp, Pseudomonas aeruginosa
atggacgacatttctcccagcgaactgaagacgatccttcactccaagcgtgccaacctgtactacctgcaacactgccgggtactggtcaacggcgggcgggtcgagtacgtcaccgacgaaggccggcattcgcactactggaacatccccatcgccaacatgagagagagtgagataaaccagaagggtaaagcgagaaaattgtgggatatagaggaagggaaagggatttag

SEQ ID NO: 327799 - DNA, 246 bp, Pseudomonas aeruginosa; identical to SEQ ID NO: 326034

SEQ ID NO: 327800 - DNA, 219 bp, Pseudomonas aeruginosa
atgcggcaccaggatacgcaggcggtggctgccgattgcccgctcgatggcaccccgccaggccagttcctcgggcttgacctgcaccagctcggcgacgaaaggcagggccgattcatcgacgccaagcgcctgcgccagatctcctcgaaaagcatggaaatgcccgggcaggttcgagcctggccgtctctccacctcggcacgctcctgctgtaa

SEQ ID NO: 327801 - DNA, 1791 bp, Pseudomonas aeruginosa
atgactgtgcttcgccgccttgaccacgaagttgccgggcatgcccagctcgatgttgccgcccttgagggtcaggtaggcgccgccgcacatcagggtgatgtgctccttcgcggtgaccagcacgtgctgctggctggcgctgacctccacgctctgctcggcctccaggcggatgtcgttcttctgcgcctgcagcagcatcggcccctggtgggtgatctggcgcagctcgccgccctgggcgaacaggccgatgtcgctgccggcgttgatcaccaccttctgcccggcggtcacctgctggttctgccgggccacgctgtcgacgtgctcgccggcggccagggtcaggctcgccggcgtcgccgcggcgatccctgccggaccgctcaaggcgatcgccggcttgcctccgttgctcttgccggactcgtcgttggcaccgtggccgaggtcgcgcacggcttcctggagggtttgctgcggcgccgcgtcgtgccccacgccctggtgctccccggcgtagtcgcccagctcgcgggccagctccagcgccgcctccagcacctgcaccacgacgcctcggtcgagatggccggcgccggccctgagctgctcctcggtgctcagcagcaggcccctggccgcacgcaccgcgccatgttcgtcggtgcgcagttcgaagccctcgccgcgcggcttgccgccttcgggccgaggatgggtcaggtagcccaggtgcagcgcgctggcaccgtggtcgctcatcagcgccgcactgatctgcgccgtggtgtcgtcgatgcgcagctcgttggcccgactgcccttgtactccttgctcttgatggtgctgaggatcttgtggtcgggcagcgcgtagggtggtcggttggtcgcccggtaggtgcgcccggtgacgatcggctggtcgcagtcgccgtccaggtaatcgacgatcacctcctggccaatccgcgggatcgccatgtttccccagtcggcacccgcccagttctgcgcgacccgtatccagcaggtactgaactcatcgtgacgtccctcgcgatcccaggggaactggactttcacccgcccccactcgtcgcaatggatctcttcccctgccgggccgactaccgtcgcgatctgcggaccatcgatacgcggccgaggcagcggtgcgggacgccattcgacgtcctcgggcaccagttcggcgcgcaggtcgtagctcacccccagaggggcgtcggcggactcttcctcctggccggcatactgggtgccgcgatggaccacccgtaccggccgccaccaggcgttgaagtcggcacgcggatgaccttccagggcaaaggcgtggcccgggatcagccgcgggtcgtcgccgctgaccgatgccacccgcgcatcgcgccggtgccctctgaggcggctttcgctgaaaggccggccggcgccgctctgcttgtagcgaccggggtagtcgtagcgctcgtaggacgagccctgatgctcgagcgcctcgccagcgagatgatgctcctggtcgtaggtcgggcgcttgaagctgtagtcccgctgggtctgtcgagccgtacgaacattttcgctgtagcggaaagaatgaagcaccggctgtgggttgtcgccctccggctgggcgctgaacagtaccgggccgccggcgatacgctcctggacgtagagccggtcgctgcagaccagggtgtggcggtgttcgtcgaagcggaagtagtagaccaggccttcctcgaaggctag

SEQ ID NO: 327802 - DNA, 249 bp, Pseudomonas aeruginosa
atgaaagcaatgaagcaacgcatcgccaagttcagcccggtcgcctcgttccgcaacctgtgcatcgccggttccgtcactgccgcgacttcgctgccggccttcgccggggtgatcgacaccagcgcggtcgaggccgcgatcaccgagggcaagggcgatatgtccagcatcggcggctacatcgtgggcgccctggtgattctggccgtcgccggcctggtctacagcatgttgcgcaaggcgtaa

SEQ ID NO: 327803 - DNA, 477 bp, Pseudomonas aeruginosa
atggtttccgccgacactcgcactcgcactcgcaaggcagcacccgccgcccgtaggccaacggaataccttttccaaagtgactctgaccagctcagtccggtcatggtctacaggctcacggtcaaaggcttcgacctgaaagacgtgcaagacatgcttgcgatttctgatctgtattcgacgaagaagatcatgagtcgcattgtgggcaagtccatcaggacgattcagcgccagggcagcaagcaaccagcacacctcaactcccaacagagcgccgtggcatttcagtacgcgaaggtgctggagcacgcgatcaatgtattcggcactcaaaagctggccgaagaatggctagggcgcccttgcaagtatctggacggtgacgtgccgctggacgttatcgacaacccagtgggttttcaggcagtcgaggactatctggagcgcatcgagtacggggtctatcagtga

SEQ ID NO: 327804 - DNA, 276 bp, Pseudomonas aeruginosa
atgttgatcgaccacgcccttctggatctcaagctgactcctgcattgcgcctgatccagttcggcctgtttgtgctccttctcaagcctgttggtttcagccaaccacagacgatacccctgctcggcgaaccagaccgggaggatgccttcgagcgcttgtttatcctgcaactgttcttgcaaggccctataacgttcccagccatcggcgacaggttgcaacgagcgctgctgctttctagcggtttccagttctcggtggatgtcagttag

SEQ ID NO: 327805 - DNA, 591 bp, Pseudomonas aeruginosa
atgcgcttgcgccagttcacgctgtgtatcgctcagccccttttcggcgccgcgataggccttacgggtagcagatgcggcttggtcaaattgagttttcaactgcacacactgctcaatcagtcgttgcagctgttggtccagagactcccgcagggcctcggcttgatccagctcggctttgatcacggcaaggttagaatcgggacgcgtcagggtgtccagctgagtacgcagcgactgcagctgacgctcggcgcccggccgatcaatatcgtcgaactgcagctcttcgatgcgttgcagcagcgaagcttgactctccaattgaccgacatcgccctgggcagcatccagggccagcttggcgggcacgagctgttcattgacctcgcgaatctgctcagccaagaaggccagacggtcgcggttatcgaagccggtcagccagtcttcatccaggcgcttctggtcctgcttgtcgaagaagcgttctttacccgacatcagcccttgggccgtcatggcgtgaggggtatgacgcaattgctccgtgctttcgacgcagtggcggtcattgtccgccagtag

SEQ ID NO: 327806 - DNA, 978 bp, Pseudomonas aeruginosa
atggccacaggcggttgcgctgatcctcgacgaacaacggctgagctacggcgaactgaatgcgcgggccaatcgcctggcgcactgcctgatcgctcgcggcgttggcgcggacgtgccggtcgggctggcgctggagcgttcgctggacatgctggtcggcttgctggcgatcctcaaggccggcggcgcctacctgccgttggacccggcggcgccagaggagcgcctggcgcatatcctcgacgacagtggggtacggctgctgctgacccaggggcatctgctcgagcgcctgccacggcaggcgggggtggaggtgctggccatcgacggactggtgctggacggctacgccgagagcgatccgctcccgacgctatcggcggacaacctggcctacgtgatctatacctcgggctcgaccggcaagcccaagggcacattgctcacccaccgcaacgcgctgcgcctgttcagcgccaccgaggcctggttcggcttcgacgagcgggacgtgtggacgttgttccattcctacgccttcgatttctcggtctgggaaatcttcggcgcgctgctctatggcgggcgcctggtgatcgtgccgcaatgggtgagccgttcgccggaagacttctaccgtctgctgtgccgcgaaggcgtgacggtgctcaaccagacgccgtcggcgttcaagcaactgatggcggtggcctgttccgccgacatggcgacgcagcagccggcgctgcgctacgtgatcttcggtggcgaggcgctggatcttcagagcctgcggccgtggttccagcgcttcggcgatcgccagccgcaactggtgaacatgtacggcatcaccgagaccacggtgcacgtaacctaccgtccggtgagcgaagccgacctggagggtggcctggtcagtccgattggcgggaccatcccggacctgtcctggtacatcctcgaccgtga

SEQ ID NO: 327807 - DNA, 228 bp, Pseudomonas aeruginosa; identical to SEQ ID NO: 323684

SEQ ID NO: 327808 - DNA, 1317 bp, Pseudomonas aeruginosa
gtgcgatggcaccatgtattccggcaggcgctcgcgcagcgccgtcttcaactgcgcccggcactccgcctgcgcttccggcgaatccgcgaccgccggctcctgcgccaccacgtagcccaccaactgctggcccaccgcgcccggctgggccaccaccaccgcctcgcgcaccgccggatgctcgcgcaggcgcgcctcgatctctcccagttcgatgcggaagcctcggatcttcacctggtgatccacccgtccgaggtaatccaccaccccatccgcacgcccacgggtcaggtcgccgctgcggtacagccggctgcccggcgcaccaaagggatccggcacgaaacgctcggcggtcagcgccggacgctccaggtagccgcgcgccaccccttccccgcccaggtacagttcgcccgccacgcctaccggcagcaggttcaactgcccgtcgaggatgtagccgctacggttgcccagcagcgtaccgatcggcatgtaggccgcgccgcaggcatcgcccgctcgcgctttccacagcagcggcgtcaccaccgtctcggtcgggccgtagccgttgaacaggtacttcggcttcagcgcccgccacgccaggtcatagctggcctgcgccaccgcgtcgccgccgaagcagtagacccgtaccggcggcgggttgccgtcgcgctcggcatgctcggccagttgctgcaggtacaccggcgggaacacccccaccgttaccccgtggcgatgcatctcggcgtaggtccgttccggcagccacaggctgtcgtcgcggatcagcacccgcgcgccgttgatcaacgggtgcatccagccttcgtgggaaccgtcgaaggcgaacgacatgaagtgcagctcgcagtcctccggggtcatctcgtagcgctcgccggtagccacgatatgggcgatcagcggaccgtggggcaccgccacgcccttgggcatgccggtggagccggaggtgtagatcacataggccaggttgtcgccgtgcagcgccacctctggatcatgggcggggaagccggcccactcctcctcgcgatccacggacaggcaggacaacccctcggggatcggcagaagctccagcaggtggctatgggtcagcagcaggtgcgcgcgactgtcctgcatcatgtacagcaggcgctcgcgcgggtattcgatgtccagcggcacgtaggcgccgccggccttcagtaccgccaggaacgccaccatgatctccgcgctgcgctgcatggcgatcgccacccgcacctcggggccgacgcctag

SEQ ID NO: 327809 - DNA, 180 bp, Pseudomonas aeruginosa
atgaatcagcgcttcacgatccagcccgtcgaaggcatcccagaagtcatcatcaatctgctccaaccccgcaggcttcaaactcagatccagctcgcccgcatcatcgtcatccagagtcttgaagcggagacgctcgattgccgggacaccggtaatggctacgccaaccggtggtaa

SEQ ID NO: 327810 - DNA, 570 bp, Pseudomonas aeruginosa; identical to SEQ ID NO: 326309

SEQ ID NO: 327811 - DNA, 1146 bp, Pseudomonas aeruginosa
atgaagtcgcccactgacatcggccgtaacctggccaggcaatggcagcgctccagcgtgcgcttggagcgcttgctcaatcccggtagctggccgcaaagcctcaacatcggtaagccttcggcacgtctattcactgacaacatccaggcggtgctccggcatgtggagaactggcggagcgtgaacgtgggtaaggtcgactgggaacctgtcagctaccgagcaggtctggcccccatttccttgccgatgcgttggcatttgcgtagcccctccgaatggattgccgcgagcgatgatccaagggtcagccaggaatacgctcaactcgagtatttggtcgagcaggtagacagtgcctttcatacgctgctggtggcacaacggagcttatggttgacgaggacgcctgaagaagtcgtcgccacggcgcaactcgctactcaattagctccgggctgcgctcaaggccgcccattgcgtctgcttgcagagcacggagtggacaccaagttttttgagcgaaacgctaccttactgacgaagctcctcgatgagcgcttcgaaggtgccgcgtcggagcaaggcctgacgacctttctggatgcctttgaagaaagcagtcattgggttctagtcgttcctcttcagcctgggctgctgcccttcaagcggctcaggctgacaacttcggaactggccgaaaccccacttcctggttcgcgattgctcgtagtggaaaatgagcaatgtgttcacctgctacccgaaacgttgccggacaccttagcggtgctgggggcaggactcgatttgcattggttggcgtctgcgcatctggccgggaaacagatcggttactggggcgacatggatacctggggcttgctgatgctggcgcgagcgagactccatcaacctgcagtcgaagcactcctaatggagcaggagctgtttgaacagcactcacaggggaatacagtcgtcgagccggctaaagctctggaatcggctccccctggtttgctggctgacgaggctgatttctatcggtatctgttggtgcaagagcgggggcgtcttgagcaggagtatcttccaaaggctcaggtggagttggccataagaaagtgggccagatga

SEQ ID NO: 327812 - DNA, 1227 bp, Pseudomonas aeruginosa
atgagcaagacgcaacatcccatcactgacgagctgctggatcagctcttggccaactaccagaatcctgaagacctgatcggtgctgacggcatcctcaagcaactgaccaagaagctggttgagcgtgcgctggatgctgaactgacccaccacctgggccacgacaagcatcagccggtcagcaactcgactggcaacacccgcaacggcttcagccgcaagaagctcaagggtgagttcggcgaactacccatcgaagtgccgcgcgaccggcatggcactttcgatccgcagatcgtcgagaagcaccagacccgctggacgggcttcgacgacaagatcctctcactctatgcccgcggcatgactgtgcgcgagatccaggcgcacttgcaggaaatgtacggtgccgaggtgtcgcccagcctgatctcctcggtgaccgatgccgtagccgatgaagtgaaggcctggcagtcgcgcccgctcgatgcggtctaccccatcgtctacctcgactgcatccacaccaaggtgcgcgaaggcgccgtgcgagtgaaggcggtgtatctggcgttgggtatcaatctggctggcgagaaggaaatcctcggcctatggatcgcccagaacgagggcgccaagttctggttacaggtggtaaccgagctgcgtaaccgtggcgtgcaggacatcttcgtcgcctgcgtggatggcctgaagggcttccccgaggctatcgaagcagtgttcccgcacaccagcgtgcagctgtgcatcgtgcacatggtcaggcacagcctgaactatgtgtcgtggaaacggcgggctgaagtggctactgacctgaagcgaatttaccagtccagcacggcagacgaggccgaactgcgcctcggtgagttcgaggccaagtgggacgatgactacctgccaattggtcagtcctggcggcgcaactggccacgtatcacgccgttcttcgacttcccgccggagatccgcaaggtgatctacaccaccaacgccatcgaatcggtgaacatgagcctgcgcaagatcaccaagaatcgcggatcgtttcccagcgacgaggcgctgctgaaactgttctacctggcgctacgcaacatcagcaaaaaatggacgatgccgatccgcgactggaaggcggcgctgacgcgctttacgattagctacgaagaccggctgccgcagcagtaa

SEQ ID NO: 327813 - DNA, 729 bp, Pseudomonas aeruginosa
gtggcgctacgcagccaagtcaaccagttgttcagccagagtcggggctcggccggcagccgcagcattctgggcatgctgcgcgaagagggcgtgaccatcggccgtttccgagtgcgtcggttgatgcgtgagctgggcctggtcagcaagcaaccgggctcgcacgcctacaaacaggccacggttgagcggccggatatcccgaatcggctgaaccgcgaattcgcgaccgagcatcccaatcaggtgtggtgtggcgacatcacctacgtctgggcgcaaggccgttggcactacctggccgcggtgctggatctgctgatcggctgggcgttctcggccaagccggatgccgaactggtgatcaaggccctggacatggcctacgaacagcgcggcaggccacagcaggtgctgttccattcagtccagggcagccagtacgccagccgcctgtttcggcaacggctctggcgctatcggatgcagcagagcatgagccgtcgggggaattgctgggataactcgccgatggagcgcctgttccgcagtctgaagtcggagtgggtcccgtcaacgggttacctgacggcgcaggaggcccaacgggacatcagtcattacttgatgcaccgctacaactggatcaggccgcatcaattcaacgacgggttaccacctgcggtggccgaagaaaaactcaacccactgtccgggatgggttga

SEQ ID NO: 327814 - DNA, 378 bp, Pseudomonas aeruginosa
atgaaatctggtatcgcgacccgtcgcctgttcatcaacgacaccaaggctttggtgcataccgtcgacgggaccgccatgctggtcacgccaggaatcttcaagcgttatgtccaggagcatccggaggttgaaaagctggcccaggccaaggagaccgccggctggaagctggtgcagcgcgcgttcgagaaacagggtcttcaccgaaagaccagtaagaacctgaatatctggaccatcaaggtttctggtcctcgcaagacgaaagagctcaaggcctacctgctccaggatcccaaattgctgttccctgtgcagcctctggacaacccaagcctcacggtcatcaccgatgccgaaggaggtgtggaatga

SEQ ID NO: 327815 - DNA, 420 bp, Pseudomonas aeruginosa
gtgctggatctgctgatcggctgggcgttctcggccaagccggatgccgaactggtgatcaaggccctggacatggcctacgaacagcgcggcaggccacagcaggtgctgttccattcagaccagggcagccagtacgccagccgcctgtttcggcaacggctctggcgctatcggatgcagcagagcatgagccgtcgggggaattgctgggataactcgccgatggagcgcctgttccgcagtctgaagtcggagtgggtcccgtcaacgggttacctgacggcgcaggaggcccaacgggacatcagtcattacttgatgcaccgctacaactggatcaggccgcatcaattcaacgacgggttaccacctgcggtggccgaagaaaaactcaacccactgtccgggatgggttga

SEQ ID NO: 327816 - DNA, 336 bp, Pseudomonas aeruginosa
ttgaagccagcggggttggagcagattgatgatgacttctgggatgccttcgacgggctggatcgtgaagcgctgattcaggacaccctagctgtgctggcggagcaggggcgccctgtgagtctcggggagcttgcgtctttgcttccacctgctcacgacctagaaacctttgcgctctggttggcgatggcacgcgaggcaggtattgaggtgctgaaagaggagcgtcagctcgtggagctagttgacgaggatgagcaacgctggcgcttcaatctgccttatgtcggactcgaccacgaggcactcaaggacatcgattgggagttgtga

SEQ ID NO: 327817 - DNA, 483 bp, Pseudomonas aeruginosa
atgctggcgcagaatggcgatcagcagggactgctccaggttcagcctttgcctgcgcacaagggggtgcgaccagtcatcctgctcggccacctcgccctgacgaacggtgacgaacaccagcccgcgaacctcgtcgacccccatggccaggtcgaggggttccaggattgtgtcgaccgcctcgatattggcaagcgccgagcgatacagattgggcttgtgactttcttccagcagcccgtacttgagcatttcctgtacggcctcacgtacccgttgcggcgtccggcgctcatcgacctgaacagcggcgctcataagaggctgttcatcatccatgccgtcatccaacgctatgggctccaccgtcagctccgtttcgtcggcgccagaggcgcctgcaattcgatcgaagatccctgccatgctcacaactcccaatcgatgtccttgagtgcctcgtggtcgagtccgacataa

SEQ ID NO: 327818 - DNA, 750 bp, Pseudomonas aeruginosa
atgccccgattactactcaacgacgagcattggtcgaagctgcgggaaattctcctgcacaaggccatctacaacaagcgtgatctacgaatgaccgtggagggcatgctgtaccgcatgcgcacgggatgtccctggagagacctgcccaaggagtttggtaactggaataaggtctacaaacgcttcaacgcatggtctgctgccggcaaatggttcaaggtcttcaagatgctggtggaggagcccgacatggagtgggtgttcattgatggcagctatgccaaggctcaccagcacagcgcaggtgctgccagcgcaaacgatgaagctacagggaaaagccgagccggcaataccagcaagattcatctggcggtggacgcccatggtttgcccatcgagtttgaaatcacgggaggccaaatcaatgactgcactcaggcacccgcattgatttccaagctcccagcggcagaaaccatcgttgcggataagggctatgacagcgagagaatccgagagcaagttgagcgacaaggggccaaggccgtgatcccgaggaagcgtaactctgtgaaaggcaacgcgaatctggacagaggtctgtaccgcaatcgccacctggtggaaaacgctttcgcccggctgaagcactaccgggcggtggcctctcgattcgacaagctcaagagaaattacgagagcgtggtggccatggcctgcgccttcctatggttgcccatgtaa

SEQ ID NO: 327819 - DNA, 714 bp, Pseudomonas aeruginosa
atgcgtgagcgcttgcgcaccatccttcgtcatcctgcggttccaaaggcgctgaatcgtccccagcaacgtgagctacgttggctggcgttacgcctagttcgtgagtcgcaggctgtgctccaggcgcgcgcccgaagcgagcgcgatgtccgcggcttcatgaaaacggggctggccgccgagcatcatcgcgtcggacagttactcaacgacttcttcaatctagcgctcagcgtcgactggcaacgtcagtcagagcgccgtaagcctgcctgtttaccaccggttggcgtagccattaccggtgtcccggcaatcgagcgtctccgcttcaagactctggatgacgatgatgcgggcgagctggatctgagtttgaagcctgcggggttggagcagattgatgatgacttctgggatgccttcgacgggctggatcgtgaagcgctgattcatgacaccctggctgtgctggtggagcaggggcgccctgtgagtctcggggagcttgcgtctttgcttccacctgctcacgacctagaaacctttgcgctctggttggcgatggcgcgtgaggcaggtatcgaggtgctgacagaggagcgtcagttcgtggagctagttgacgaggatgagcaacgctggggcttcaatctgccttatgtcggactcgaccacgaggcactcaaggacatcgattgggagttgtga

SEQ ID NO: 327820 - DNA, 291 bp, Pseudomonas aeruginosa
atggccgccagtccctactacctgcgccaaacccacgccccggactgcggctgctctgtgtgctggtccgcaaggcaggccatcccattgcacagcccgtcgccgtgtacggactgccagccccctgggctcccctatctggaaaatggccgttggacttgccgttcccgttccttctgctcgaaacacgacccgtcccggcgtccgccgaagtactggcacgttgtgtacgacagcgggaaacccacgccctttgtgccagtgcgcgaagcattccaactggagggctga

SEQ ID NO: 327821 - DNA, 147 bp, Pseudomonas aeruginosa
atggcacgcgaggcaggtattgaggtgctgaaagaggagcgtcagctcgtggagctagttgacgaggatgagcaacgctggggcttcaatctgccttatgtcggactcgaccacgaggcactcaaggacatcgattgggagttgtga

SEQ ID NO: 327822 - DNA, 180 bp, Pseudomonas aeruginosa
atgaatcagcgcttcacgatccagcccgtcgaaggcatcccagaagtcatcatcaatctgctccaaccccgctggcttcaaactcagatccagctcgcccgtatcatcgtcatccagggtcttgaagcggagacgctcgattgccgggataccggtaatggctacgccaactggtggtaa

SEQ ID NO: 327823 - DNA, 519 bp, Pseudomonas aeruginosa
atggcaacccccgcctatatgtccatcaccggcaccaagcagggcctgatcaccgccggcgccttcaccgaggactcggtcggcaacacctatcaggaaggccacgaggaccaggtgatggtccagggcttcaaccacgaagtgatcatcccgcgtgacccgcagtccggccagccgaccggccagcgcgtgcacaagcctgtggtcatcaccaaggtcttcgacaaggcctcgccgctgctgctggccgccctgacctccggcgagcgcctgaccaaggtcgagatccagtggtaccgcacctccgccgccggcacccaggagcactactacaccaccgtcctggaagacgcgatcatcgtcgacatcaaggactacatgcacaactgccaggacccgggcaacgcccacttcacccacctggaagacgtgcacttcacctaccgcaagatcacctggacccacgaagtctccggcacctccggctccgacgactggcgctcgccggtggcagggtga

SEQ ID NO: 327824 - DNA, 1038 bp, Pseudomonas aeruginosa
atgacggctgatggtgaggttgacctggtgaagctggtcaaggagctttgggttaacaaggttctgattcttctgactactcttcttgcattaatcgggtcttttacctatgcgtatctgagtaagcctgtatatgaatatagggttgcagtagtgcctcctgctcttgggtctatcgaaggtttcaatgttggtagaagggagaatggcctagatgcatatactgttagaagtatctatgcgatcttttcgcgcaatctgctttcggatgagaataaaaaagagttcttctataagatataccttccccaggtgggtgagggagcggaaagcgaagatgagcaggaggagttttataagaagttctccaaagaggtaaagattgatcctgctaacaagccagatgcagaccgttatacggtaattgtggagggcacgaagcgagaggttcttgctacatgggcacaagctttcgtgcgtttggctgcggatcgggccgtgcatgaggttattgatagtgcaggtagagatttccaggtaagaaatgctgcaatgcagagccgcataaccgtgctgcagaatatggcgaagggccgtcgtgatgatagaattgcacgtttgaaggaggcattgctgattgcggagtcgctcaagatagatggcccgccattaatagaaggggcgtccgagcaacaactctcctcgatcatggatggtgacttgatgtacatgcgaggagctaaggcgctgcgcgctgaaatcaacaatcttgagtcgcgtagtgtagatgctccattcattcctgagttgagaactctccaagagaaactatcttggaactccagtttgtctgtggattctgatgcggtggctgtctacaaggaagacgagggactctctttttcaaatcaacccattaagccgaagaagattcttatagttactataggtactttggcaggattgataattggaattctactcgcagtgctcgctggttttataaggaagcttcgtagcgatggctctcttcgctaa

SEQ ID NO: 327825 - DNA, 1236 bp, Pseudomonas aeruginosa
atgtcaataaggcggggcgttttctactccggtatatccatgggcagcaactatcttttgcctcttgctgcgattccttttctcacgagaacattgtcaagcgaagcgtttggccaattggtgattgcccaggccgtggctgtcattctatgtcaactggtagactttggatttattctggcaggatcaagaaaggctgccattatcgataacaaagttgaactgtctagtttcttttctgttgtacagagtgctagattcttattgttgctgctttcacttttagtgctggccattttggctgtatcttctattttaccaatccccttgcttgtattggttgcggctgctcttccggcagtagttggaaattatcttcaagcagtatggttctttcagggaagagcgctgtttggatggttggcgcttaccaattttttgtctaaggtattttatttcctattggtcgttttttttgtcacgaaggattctgaccttgtgctggcttcgttggggtttggtttttcctatgtcataggtggaagtgctctctgttgtattttattttctatgggaatacggtggcgcccggttctcgagaaagacagaattctcgatatattgcgtgacggtgctcgatcttttctttctctggcttttcttagcttgcacatgcaagtgctcgttgcggcggttggtgttgttggtggagcctccgcggccggagtgctttctactgcggataaattccttcgcgggatcgcggctgctacttcacccatagctagcgctctatttccgacttttagcaggatgtatgcgagtgccgacccggcagtcggcagtttaagaaggaaagcgctaggtctgatgttactaatagctattcctagttgtttatttcttttcttattttctgaatacatttcatatctcctattcccggaacagtccagaggtctaactgttgtaataagaatgttttcgatagtgccagtgtttgcttgtattggtgttctgtatggagggttgactcttgttccttctgggtatgatggtgtatatttgcgagcaattttttttgcggaattgggcggggtattaacatttatcctcttggcgctttggggggatgagctttttggagcgtggacgctggtcgttacagaggtctctttggggatgggaatgtttttcctggccacggttaagttgagagagaaaaggggactttga

SEQ ID NO: 327826 - DNA, 1005 bp, Pseudomonas aeruginosa
atgttgttgagtgtcgtcgttagtacttggcgtcgtcccaaggaactaaaattggtcctggccggccttgtagcgcagtctctggcttttaaggattttgaagttattgttgtcgacagtaatagtggtgatgaaacacccgatgtggtccgcgagttcgaagcggttcagggcttcaacgtccgtcttgagcaggccgagctgaattcggctagtgcaaaacgaaataaaggcgttcgtttagcgaaggggcgctacgtagtgcttcttgatgatgattgtgtgccagatcctgctcatctctcgaattttctgaacgctgctaactctcgaaggggggaacgcgttatctggtgcggtggtgtcagattttcttgctcattggtgtcgacgagtaattactatcgctatagggatagttgtcacttctctgctgacaagccgctgcccaactccttggggtataaaactattgttaccatgaatatgcttgctgagagggatattctgctccaagataatgctctttttgatgagcgatttgttggatacggctttgaagatacggagtttgggttaagggttggcaagcttggttattctgttcttccttgtcgggctgaaatcgagcatgtcgaaccggaaggcagtatttcgaagttctgtcgcaagtactatcatgccgcccgtgacggaatgccggaattcatgaaagttgcaacaactgatgaccttgagactcttggtcctatacgatggatggagccgggctttgctttgtcaagcaagtttcagagtctattcagagcagtgctgtgtcttgcgctggagtcaaagttttcaaatattcttattcattctctagagaaaacggactctattcgatggctctactctagagctgcttataggctcgttttggcctcatcctatcggaagggggttctcgatagaaagtcgaaactttccaaagagaaagcaaacaaagatgggtggtactcgtga

SEQ ID NO: 327827 - DNA, 1236 bp, Pseudomonas aeruginosa
gtgaagcagagaagcgttgctctggttctcctttttgtgtttctctttcatattctccggaatctatccggtgcgtattatttagttcttgctgggttttgtgggctgttttttctattatttattaataactggagggatattaaatatagcgcattaggaatatttgttattttcttctggacgtatgcctcgctcgtttcggtgttatggttcgatctatatggagactattccatagggattttcaggttgtgggcatcattacctcttctctttgttgctatggttcttgccagagataatctaaaagtgcccatgcaacttatttcatttttcttcagtctggcggctctttcttttctctggcagtatgtatttggacctatagaatggttcgctgaagccagtgagcgtgctgggggcgcccgttttgcatcattggtaggaagtttgaccgcatatggtgttatggtgggagttcccgcacttgcttcactcttttatctaaagggttgggcgcgcgtggtatgtttctttcttctttgcttgggggcgatgctgtcgctgcagaaagctgctctggccaatatcgtcattgtcttattctttgcctattggctaaaactgatcaaaaagacatacttgtttttcaccttccttcttgcagggctgggtttatctgtatttttccttgcagacttcggggctggcagtctggaaaccgtgcatcgactgattgtcgggctcctcacctccgattcctcagtctcgcaagatgttccattcttcgaatccatattcgatcgggtaactgcactgcctttggaaacattgtctttctacggtagcgagatacttgttttgggcgcgggcgtttttgggggagggggggttctagggtatgcgcaatatccaatggcgcacaatggtattgtcgagctgctttgcatctatggtttcatttttggtggcttggctgttcttttgctattgttgctttttgtctactctgtatttttgcttgtcttccggcgaagaaaaacagcttgtacagagttaggcttcttatgctctgcatttataatctggttcgttaattatgtctttagcggcggtgggcttttccatccggtaggggctgcattgttctggctcgttgtttttcgctttctttatattttgaggcggaaaagggacgttgaacacattagtaaagaggtggtgtatggataa

SEQ ID NO: 327828 - DNA, 1035 bp, Pseudomonas aeruginosa
atggataagaactctgttctgttaattaccggtggaactggttcctttggaaatgccgttttgaagcgttttctggatacagatattggtgaaatacgcgtattcagtcgggatgagaagaagcaagatgatatgcgtaagtgctatgctcaccccaagttgaggttttatattggagatgtccgcgactatcaaagcactctgaatgctactcgcggtgtggactacattttccatgcggctgcattgaaacaggttccctcttgtgagttctacccgatggaggctgtgaagaccaatgtcatcggaacggaaaatgtcctcgaatctgctatccagaatggcgtcaaaaaagtcgtttgtctgagtacggataaggcagtttacccaatcaatgccatgggtatttcaaaggccatgatggaaaaggtcatggtcgccaagtctcgaaacctggaacgcactcctaccgtaatttgtggcacccgttatggtaacgtcatggcttcaaggggctcggtcattcctctctttatcgagcaaatgcgatcaggccagcctctcacaatcactgatccaaacatgacacgtttcatgatgacgcttacggatgccgtagaccttgtgctttatgctttcgagcatggtaccaatggagatctttttgtacagaaagcaccggctgcaaccatcgaggtgctggctcatgcgcttactcaattgcttggcaagaatggttatcctatcaatgtaataggtacgcgtcatggagagaagctttatgaggcgcttcttagtcgagaggaaatggcctgtgctgaagacatgggtgactattatcgtatccccccagatttgcgtgatctgaactatagtaagtttgtggagcaaggcgaggaaaaaattactcatacagaggactataattctcataataccaaacgtctggatatcgaaggaatgaaaaagctgttgctgaagttggatttcattcgtgctattcagcgtggcgagagtgccagtccagaggaataa

SEQ ID NO: 327829 - DNA, 1119 bp, Pseudomonas aeruginosa
atgaaagttcttgtaactggcgcgaatggatttgttggaaggaatctgtgcgctcatcttgcagagcggggtggtatcgaggtggtgccattcacccgcgagagtagtgttggtaatttgcctgagctaattcgttccgtcgattttatttttcatcttgccggggtcaatcgtccggaaaaaccagaagagtttaagatcgggaattccgaactcacgtatgctctgtgtgaggcggtaaggtccaatggacgagccataccacttctttatacttcatccattcaggctgaggtggataatgagtacggtttaagcaagcgagccgcagaagagcatctccaagtgctaggtgaggatattggttgtcctgtctacatatttcgccttcctaatgtattcggtaaatggtcgcgtccgaattataattcagcggttgcgactttttgtcataatattattcgagatattccgattcaaattaacaattcctcggcagagatcactcttgtatacatagatgatgtggttcgcaccttcatgaaagtcatggatgggaagctatccaatgcagtttcactacaggtcgagccccagtatcagatttctgttggtgagctcgcagaacaattgtatgagtttcgtaatagtcgaaagtcactgactaccgcaagggttggctcgggattgacgcgcgccttgtactcgacttatctaagtttcttgccagaagatagttttagttacgacgtgccaatgcattcggatccgcgtggcacattcgtcgagatgctgaagaccgcggactctggccagttctcgttttttacggctcatccaggtgttaccaggggcgggcattaccatcactcgaaaacagaaaagtttctggttatcaaagggatggcacgtttcaagtttagaaacatcctgaccggggcattttacgaaatttgcactaatggtgaaaaggcagaaattgtcgaaacagtacctggatggactcatgacattactaatgtcggaactgacgatatggtagtcatgttgtgggctaacgaagtatttgatcgggaaaatccggatacctacgcttgttcagtaggcgaaggtgcgtaa

SEQ ID NO: 327830 - DNA, 1131 bp, Pseudomonas aeruginosa
atgcagaagctaaaagtcgttacggttgttggaactcgtcctgagattattcgcttgtctagggtcatggcgaagcttgatcagtactgcgatcatgtacttgtccatactggacagaattatgattacgaacttaatgaaatattttttcaggacctcggtataagaaagccggattattttctaaacgccgccgggtcttccggggctgaaacgatagggaatgtaataatcgcagtcgatcgtgttctgggcgaaatagatcccgatgcgctgctcgtgctgggtgataccaatagttgtatggcggtactgcctgcaaaacggcgtaagataccgacctttcatatggaagcaggcaatcgctgtttcgatatgcgtgtgcctgaagagataaatcggcgcattgtcgatcatacagctgatgtaaatttgacctatagtacaattgcgcgtgattatctcttgcgtgaaggactttctccagacatggttatcaagactggtagccctatgttcgaagttctcgagcactatcgtgacgggatcgagtcctccgatattcttgaaaggctcgggttgaaaacagagcggttctttgtcgtgagtgcgcaccgagaggaaaacatagattcggataagaatttcttgaagttggtttctatgctcaacgctgtggcagaaaagtactcgctgcccgtcatcgtatcaactcaccctagaacaaaaaagagaattgaggcgacggaggcaaagtttcacgagggtattaaactgctgaaacccctcggctttaaggattacaataaactgcaaattacagccaaggcagttatttctgacagtgggaccatcagtgaggagtcttcaatactgaattttcccgctttgaatattcgtgaggctcatgaacgcccagaaggcatggaagaggctgtggtgatgatggtaggactggattcggatcgagtactacaagcactcgaggtgttggagggacagaggcgcgacgcagagcgcatgttacgcttggtcgctgactatagcatgcccaacgtttctgaaaagattgttcgcatagttcatagctatcgggactatgtcatgcgaactgtctggaaaaaatattaa

SEQ ID NO: 327831 - DNA, 1203 bp, Pseudomonas aeruginosa
atggcaaggatatttgtggtttctgagtatgtcggtgccaatcagaactccacgggatactattgggagaagataataggaaagatgcagcgggagtttggtgggctaaccgtaattttcccgctgaccgcaggtgaaaccccgcctgtggtttcaccttccgttgagcaagaatgctttaagtttccgaggagcaataagaataggctcctttctagaggattagcgcagatttttcaggcgtttctgttctcagtaaaattgacttctcgtgccagacgaggagatgtggtattgagtggaaccaaccctgctcttctactgatgacgtttcccttgctaaggtatgccctcggtttcaagtgggtgctgctggtgcatgatgtgtttcccgagaacttggtgccggcgggcgttctgaagaaagatagtattgcctaccggcttctacgtcgtctcttttctttcatttactcatccgctgatcgtctagtcgtaatagggcgcgatatggaagctcttatgaaagagaaggtgaatgacccgcgatctttggtctttatttcgaattgggcctgtgagaaagaggttttcccagtaccgagagaggatgctccttttatcaatattcctgaatggaaaggtaaaagggttttccaattttttggtaatgtcggtcgattacaaggtatagaaaacatactttctgctattcagttggttaaaaacgagaaggcggcttttgcttttattggagatggtgccttggtcgacagtgtaaaaaaacacgcgctggaagatcagtgtgctcggttgaggtattttggaaggctgccattagccgaaaagaattttggtttggctgcctgtgacgttgccttagttaccttagaagaaggaatgttcgggcttggggttcccagcaaggcatatttctccatggcagcagacaaaccgattctagctgtcatggaaaaaggggctgaaatctcccgtataatagatgagaccggaatcggttggaactgtccgccgaatgatccggttgctttggcaagattgatcgatgagatttgtgaactcgacttgtctagtttaggcggagtcccgcggagtgtccttcagcaaaattattctgaatatatttcattggaaaaattcgctgcctgtgttcgaccgcttctgtctgagtcgaaaatatga

SEQ ID NO: 327832 - DNA, 945 bp, Pseudomonas aeruginosa
atgatgaaggtgctggtaaccggggctagcggttttgtcgggagtgcgctttgcaggtcgcttgctgccggcccctttcaggttgtcggacaagtacgatccctgtgcaatcctgttacgggggttgagtatgttcgagcggagctgaaagagagcactaagcttgatgctgcgctgcggggtgttgaatgtgtagttcatctagctggacgagcccatatctttggaaggcagcgtgattcactagatatttttcggaaggtgaatcgcgatgctactctggcgcttgctcggcaggcgatcgaagcatctgtaaagcgtttcatttttgttagttctattggtgtaaatggcgctttaaccaaagaaaagcccttcgatgagaactccaagccggctcctcatgcagaatatgcgatttcaaagtttgaggctgaagtagcgcttcgggagcttttcaagcagtcctcaacagaacttgttatcgtcaggcctccactcgtttacgactggaatgctcctggaaatttctcgcgattgttgaagctggttgcttcgggacttcctcttccatttggttgcatagataaccgacgaagttttgtttctctggataatttagttgactttctagcttgctgtatgacgcacccttctgctgccggcgaactgtttttggtatccgatggtcaggagatttctaccaagcaactggtgactgcgcttgctgcgggaatggggcgtcgccccatcatgtggcctgttcctaggtttattctgaggtttcttaaattagtaggaaagggtgggttatacactcagttatgctgctcactagaggtcgactcgtcgaaaggcaggcttttgcttggttgggaaccccgcaagagcaccctttccgcgttggaagatgttggtagaatatatgtcaaacgtactgaatga

SEQ ID NO: 327833 - DNA, 1026 bp, Pseudomonas aeruginosa
atggaagaatggtatttgttactcgctgcagctggggtttcgggactgcttacaggcctcttgcgtcgttatgccttagcgaggagcttacttgacacccctaactctcgaagttcccatgtcgttcccactccacgcggaggaggggtcgccattgtagttactttttgtctcatgctgcctatttgggctgtactgggaaatatctcatgggccgtgtcctgggctttacttctcgctggcggcggggttgccattattggattcatggatgatcacggtcatatcgccgcacgctggcgtctgctgggacattttagtgcagccttggtctcattgtactttttgaatggcataccaccatttcagattgttggtgtcagttgggacctggggtggttcggaggacttctctttgctttctatctcgtgtggttgctgaatctctataacttcatggatgggatcgatggacttgctagccttcaggccatttttgtctgtgttggtggggcattattatactggctgaatggccaactgacgcaggctttgctccccttatcgctagcttttgccgtttttggattcttgttctggaattttccacccgcaaaaattttcatgggagatgcgggtagtggttttctggggattgttttaggaattctttccattcatgccatgtggatgaatacgaattttttctgggcatggttggtcctgttaggcgttttcatcgtcgatgcgacctataccctgattcgtcgcttgctgagaggggacaaggtgtatgaggctcatcgaagccatgcctatcaatacgcaagccgatactatggaaagcatgctcctgttacgattggcgtcacggcattgaacgtcatctggctcctccctatagccttgttggtcgggagtgggtctctagagcctttgatgggcatcgtcatagcctacgtccctctcgtttttctggcagtgaggttcaaggcgggtaagctagagtcgtccgctcaggcctaa

SEQ ID NO: 327834 - DNA, 1935 bp, Pseudomonas aeruginosa
atgacactctctgatctgaccgtgcggcaagccaaggccgccgagaaaacctacagcatccccgacaccgatggcctcggcctggtggtcgcccgcaccggcggcaagtcgtggcatttgcgctattactggctcggcaagcaaaagcgcatctccctggggaactaccccgagatcggtttgcgcgaagcgcgcaccttgcgcgacgaagcccgggcgcttctggcaaagggcgtcaacccccataccgatcggaaacagaagcgacacgcggtcaagcttgcggccgactacaccttcaaggccgtcttcgatgcgtgggtcgagcatcgccgcaaggaaatcaaggagggcaggaacagcacgctgtcgcagatcctgcggatcttcaacaaggacgtgctgcctagcctcaagcagatgtcgatctacgacattcgccggccccaactcctgggcgtcctggcgaggatcgaggagcgcaaggcgttcaccactgccgagaaggtccgcacctggctggggcagttgttccgctatgccctcgtcatcgtggaggggctggaagccaatccggcctccgacctggacgtggtggccgagcccaagcccccggtgaaccacaacccctacctgcatcttccggagctccccgagttcctgcacaagctcaggctctacaaccctcgtggttggcagacccaactcggcatccggctgctgttcctgaccggcgtgcgtaccggcgagctgcggctggcgaccccggaccagttcgatctcgaccgtggcctgtggatcatcccgccgcagatcgtcaagcaactccaggacgagatgcgcaaggccggcaagcgcccgcaggacgttccgccctacatcgtgccgttgtccgtgcaggccatcgagatcgtgcgctacctgttgggtgtgatgaggccggcccaggtccatctgctcacgcaccgcagcgaactcaagaagcgcatcagcgagaacaccctcaacgcggccttgaaacgaatgggctacgaggatcaactgaccggtcacggcatccgcggaaccatctcgacggcgctcaacgagatcggctatcccaagatttgggtggacgcgcagctttcgcactcggacccgaacaaggtgagttcggcctacaaccacgccaagtatgttgagccgcgccgccggatgatgcaggactgggcggatcgtctcgatctgctcgaacagggccaagtggaagcggccagcgcgcacctcacgatccatatcgagggcgtgccggccatggcagaggaggacaagcccaacaccatcgtcgctgctgcttctgcggcatccgttccgcctgtggtggccgaacccatcgtcgtgacgccaaacgacgggggaatcacattccagcgactgtcgcaggtaccaccgcccccgacgcatgcgccagagccggaggtgtcagtcatccagcgcgagcgcgaggaaatgctggccatctacgaatcgccgagcagtctgccggtcccgctgttcggcaagttggccgggaagtccaaggaccagatcaaccgcgagctgaaggcgggcaagctgctgtctatcagcttgggcaaccgcgggcaacgcgtgcccgactggcagctggtacccctcaagcacaagctggcacaggtgctcatgaaccagtgcccgcatgcggatccgtgggacctgtaccggatgctgacccgcccacatccggacctgggtgatcgcgcagccatcgacatcgtgacaccaggaaatttgggcatggtcgtgcgggtcatcgcgggcacccagcagcagccaaacaggcccggacctgactcgtctgtgcaaggtattccagaggagactcgccagcgcattcaacggttgctaaatgatgcggcaatgttcgaaagtgcctga

SEQ ID NO: 327835 - DNA, 1308 bp, Pseudomonas aeruginosa
atgtttactcccttttttggcgcccccgaggggcgcccgtcggcgtacggccgaggcacaacgccggcctcgatgcgagtgcatcgtctgaaagctatcagcatcgcgttggcgggcagtgcgcttgtctcgcctgtagcctacgccctcgattttgctgaggcacgccttatcgcggagcagcagagcccacgcataagcgcgcagcagttgcaggttaacgtcgccgaatccgtgcagaaggcagcaggctcgctgcccgaccccaagctctcgctcggcatcgaaaactaccccatcagcggcatggatcgctggagcatgacgcgcgaatccatgacgatgcagcgcttggcgctcatgcaggaagtgcccaacagggccaagcgcgacgcccaggtcgccagcgcgcaggcgcgtgtggatcgagaacgcgcggcgctggttttgcagcgattgcagatccgccaggagctcagcctggcgtggatcgccgcgcaggcggtggagcaacgggagatactgctgacggaactgctcgcggagaaccagcgcctgcaagacagtctccccgctcgcgtcgccggcggcaccgcccaggctggcgatctgttggtcgcgcaacaggaggcgctgacactcacggaccgccgtgacgatctacagcgggaccgggccaaggccagggccgcgttgcggcgctgggtgggctccagggccgacgaagcactgcaaggcgatccaggcccgctcactcgccccgtcgcgcaactgcgcacagaactggcgaatcacgcggagcttgaactctatccggcgatgcaaagcatggcccgggccgagtcccgcgaagcccaatcagagacccgcggcgattgggcctgggagatagcctatagccggcgtgatcgccgatggggcgacatggtgtcatttcaggtgacattcgatctgccttggcagaaggatcgacgccaagtgcccatgatcgaggcaaaacggcacgagttggaacgtctggacgccgaacgcgaagacgtggcgcggcggcatttgcaggagctggacgacagcgccgccgaactccaagcgttgaacagccagatcgaccgcctgcagaccgccggcttgcaactggtacggaaccgagcggcacttgcattgagcaactaccgatccgccaagggggacctgagcgctgtgctcagtgcacgcgcccaggtgctggagacgcgcatgcgtctgatcgaccttggagcgcagcgcgacagcctcgtcgcccgactgaacagcctgatcgcggactga

SEQ ID NO: 327836 - DNA, 273 bp, Pseudomonas aeruginosa
ttgatcaaggtcagtttccaggatgaattgatgcgtctggacggcgccttggcccgaaccggcacccgctgcaaatccaccggcaagggcgggcaccgcacgtggttgtcatgctttacgcgcctcggcaactcgcaaggctctaagctcaaatcgatcagctacaagattcgtctgtcccgagagtcgctgcaggtgcgtaatgacctcgtaggggccatcggctattgggcgcgtgcagattccgcactggctagcggtttcgatgcgtga

SEQ ID NO: 327837 - DNA, 387 bp, Pseudomonas aeruginosa
atgactaggcatacggagtcaatcgaggtagtcgtgaaggaccagcgccgcaggcgctggtctctcgcagagaaggcggcgctggtgcgccgaacctacgaaccaggcatgagcgtgtcattggtcgctcggcaggaaggcgtttcggctggactgctgttccagtggcgcaagctcgaacgccagggggctttgaccgccgtctccgctggcgaggcagtcgtgcccgcatccgaactggcggctgcccgcgcggaaatcgccaagctgcagcgcgtgctcggcaagaaaaccttggagaacgaaatcctcaaggaagccgtggagtacgccgcagaaaaaaagtggattgcgcgctcgcccttgttgcccggggacgaccagtga

SEQ ID NO: 327838 - DNA, 855 bp, Pseudomonas aeruginosa
atggggctggcgcgctcgcatgtgcgcgacctgcttgggcgcggtgaagactggaccgatggccgcagccatcgcacacccagcgacgatgccgggctgctcgccgaactgcgccaggaaattgccgacttgcccagctatggctaccgacgtgcctgtgccttggtgaaccgccagcgtgcggcacggggcgccccgagggtcaacgccaaacgcgtctatcgcgtcatggcacaagccgctttgctgctgcccaaggcgcctcgccgccgccagtccgcacgcacgcatgagggccgtgttgcggtctcgcgcagcgaccttcgatggtgctccgatggtctggaaatcaagtgcgattcagggcagaccgtgacagccgccttcgccaaggactgctgcgaccgtgaggtgctggcttggcgtgcatgggagggcaagggactgccaggcgagccggttcgcgagatgctcatcgaggccgtcgaacgccgattcggctcggtcgaagcggtcccgcagggccaggagttggagttcctcagtgacaacggcggtgcctacatcgcctccgaaacgagggcactggcacgcgcgctgggcctgaagcccatcaacacgcccgtctgcagcccgcagagcaacggcatggccgagagcttcgtcaacaccttcaagcgcgactatgtggcgcgcatggacctaagtgacgcgcagacggtactggcacaactgccagcggccttcgagcacttcaacgaggtgcatccgcattcttcgttgaaaatgcgttcgcctcgggagttcaggcggcaacaggctgcaggggctgaccaagtgctttattgcgaatag

SEQ ID NO: 327839 - DNA, 486 bp, Pseudomonas aeruginosa
atgaacatgcaccacgacagaagccagggcaaagtgccgagacgccaggcattgatcgctggcttgttggtgatggcactcgcaggaccgagcctggcgcagagccgaccgattgccaaggtctggaaggacccgagctgcggatgctgcaaggactgggtctcacacctgcaaggcgcaggcttcgatgtgcaggttctcgacaccgggaacaccgcagcgcgcacgcggctgggcatcccgcagaagtacggttcttgccacacggcgcagatcggcggctatgccatcgagggtcatgtgcctgcctcggacattcaacgcttgctgcgcgaagccccgcaggccatcggcctcgcggcgcccggcatgccggtcggttcgcccggcatggatggtccggcctatggtggacgcaaggacgcctacgacgtgctgctgattgggaaaaacggtagcagcacggtctatcagtcgcatcgctga

SEQ ID NO: 327840 - DNA, 1194 bp, Pseudomonas aeruginosa
atgcgtcattcttccacgacggacgaccagcacgacgccaactggccggcggtactatccatggcaatcaccatgtttgcgctggtctgtagcgaactgctgccgatcagcattctgacgcccatggccaaggacttggaactgtcggtcggcgaggcaggccaggccgtgaccgcaacggccgtggtcgccgccgttgccagccccgcggtcatctttctcgccgggcggattgaccgacgtttgctgattcgtgggctgaccgtcgtcctcttgctatcgagtctgctggcgtcggtcgcgaccgatcagtggacgctgcttttcgcgcgcgggctgctgggggtggcactgggcggaacctgggcgatggtgaccacgctagcactgcggctggtatctccggcccaggtcgcccgggccatgagcatcatcttcacgggcgtaacagcggcgagtgtcgccgcgcccgccgctggtgcctttctgggcgaaacttggggttggcgtggcgtatttcttgtcacggcaggcttgggcgtgctggcgttgctcgcgcaattgtcgacccttccgcgccttcccacgatgcatcgtccggcactgaacgctttcggcgatgcgctcagccgggctccggtgctgggcgggttggtcacgattgtcctggtgctttcaggacagtttgccggctacaccttcatccggccgctgctggaacaggtggttaacctgaatgtcagccagatctcgctggcgcttttgctttatgggattgggggcctcatcggaggtgcggtcggcgggctgctggcggcgcgcaacgcgtcactatgtgcagcgggagcggcgcttgtgatggcactgatggccgccttgctggcattcgctggaaccacttccctgatctcgctattgctcctcgttatctgggggctggccttcagcgctttctacgtctcgatcgcgacgtggcacgcgagagtggcccctgaccttgctgagagcgtcggtgccctgcaggcgaccgcattccaattctccattgcgctcggcgccggcgtcggcggcgttgccatcgatactttcggcctctccggcgtcttcacctacgcttgcgcagcgttgctggcaggggcggccgtgatcttgacaacgggcgtgcgatcccagaggaggagcccatccctttga

SEQ ID NO: 327841 - DNA, 1455 bp, Pseudomonas aeruginosa
atgaagagcccgagcgtcctgaagatcctcgcagcgagcaccgccgccgcgctgctgtcggcgtgcgccgtgggccccgactacgtgcggccgcagcccccgcaggtggacgccttcgtccgccaggatgccgcggtcaccgtcaacgcaacggcacagaccgaccccgagttctggcgcgcctttggtgacccgttgctcgaacgcctggttgacaccgcgctggcgaacaaccaggaccttcgcgttgcgctggccaactacgagcaagccaacgcactgctgcgcggctcccggtatgaccggctgccgaccatcactgccgacgccgaggcaagcgatgtgcgcgacaccgccaatcagttccctttggccgatcgcgatgcccgtgaccacaatcaataccaggccaccatcggcttcacctgggagctggacctgtttggccgggtacgccgcagcgtggaggcgcagcgcgccgagaccgcggcgagcgccgaggacctggccgccatgcaggtcgtggtagtcagccagttgtcccgcacctacttccagctccgcggctggcaggagcaactgcgcatcacccaagagaacgccgacaaccaggcccgcactctgcaattgctcgaagtgcgtctcaaggcaggcatggcgacaccgttcgacgtggatcgcggtcgcacgcaactcgaaagcacccgtgcgcgcatcccttccttggaggccgacatcgccgtcgccacccaccgaatcgcggtgctgaccggcagaccgccgcaatcactggtcactgtgctggaggcccccggcgaactgccggcattgccgcagaacatcgccgttgacgccccgagtgatctgctgcgacgtcgtcccgatgtggcagcggccgaacgtcggctcgccgccgctaccgcacgcatcggcgtggcgaccgccgatctttttcctcgctttacgctcggcgggttgatcggaacccaggccttcgacgcgggtgccctattcgagcgcgacagcgagatgcggctgctcacgctgggcgtggatggatcgtttctcaatgtcggccgcgtgcgcgcgcgcatcgctgcgtccaacgcggccgaggctggcaacctggcaacttacgagcgcaccgtgctgactgcgctggaggagaccgaaaacgcgctggtgcaggtttcccgcagcgcacgccagaccgcgcacctggagcaggcggcggcagccgggacgcgcgccgcgagcatggcgaggttgcgcttcgaccaaggctcgatcgacgtgttggagttgctcgacgccgagaacgcgcgcttgcagagccacgacgccttcgcgcagggccgcgtgcgcagcacactggccgtcgtctcgctgtaccaggcgctcgcaggcggctggcctcgccatcaccctgctgcccataacgtggcgagcaagtag

SEQ ID NO: 327842 - DNA, 1284 bp, Pseudomonas aeruginosa
atggcgttcctcaccctgaagccgttcaacgaacgcacggggcgcacggccgcgcagatcaacgccgagatcaaccagaagatcgccgcactgcaggaagggatcaccttcgccatcatgccgccgccgatcctggggctcggcaacggcgctggctattcgctgttcatcgaagaccgagccggcctgggctacggcgcgctgcagggcgcggtgggcgccttccagggggcgtcttcgcaggtgccgggcatgcacttcccgatcaccacctaccaggccaacgtgcctcagttcgacgcgcaggtggaccgcatcaaggccaaggcgcagggcatcccgctcaccaacgtcttcgacacgctgcagacctacctgggctcggcctacgtcaacgacttcaaccagttcggccgcacctggcaggtgatcgcccaggccgacgcgccgttccgcgacagcatcgaggacatcgcccgcctgcgcacgcgcaacgaccgtggcgagatggtgccgatcggctcggtggtgacggtcaaccgcacctacggccccgacccggtgctgcgcttcaacggcttccccgcagccgacctcagcggcgaggccgatccgcgcgtgctgtcctccagcgaggcgatggccaaggtcaccgagctggcgaggcaggtgctgccacccggcatggagatcgagtggacggacctgagctaccagcaggccacacagggcaacgccgccatgatcgtgttcccgctcgccgtgctgctggctttccttgtgctggccgcgctgtacgagagctggacgttgccgctggccgtgatcctgatcgtgccgatgtgcctgctgtcggcgctgttcggcgtgtggttgaccggcggcgacaataacgtgttcgtgcaggtgggcctggtggtgctgatgggcctggcctgcaagaacgcgatcctgatcatcgagttcgcccgcgagctggaaatgcagggcaaggacatcctggaggccgcgctggaagcgtgccgcctgcgcctgcgcccgatcatcatgacctcgatcgcgttcatcgccggtgtgctgcccctggtgctctccgcgggcgccggggcggaggtgcgcgccgccacgggcatcacggtgttcgccggcatgctcggcgtgaccctgttcggcctgttcctgacgccggtgttctacgtggcactgcgcaagctctccggccgcaagctggtccagcacggcgaatcgaacgtgaccacgcatacgcagcccgcccatgcatga

SEQ ID NO: 327843 - DNA, 798 bp, Pseudomonas aeruginosa
gtgaacgtcggcgtgcgcgattcgacctacgtgctcgacggcctgctgtaccacgagtccgacttgcggatcgaggagcattacaccgacacggcgggcttcaccgatcacgtcttcgccctgatgcacctcctgggcttccgcttcgcgccgcgcatccgcgacctgggcgacaccaagctctacatcccgaagggcgacgccgcctatgacgcgctgaaacccatgatcggcggcacgctcaacatcaagcacgtccgcgcccattgggacgaaatcctgcggctggccacctcgatcaagcagggcacggtgacggcctccctgatgctccgaaagctcggcagctacccacgccagaacggcctggccgtggcgctccgcgagctgggccgcatcgagcgcacgctgttcatcctggactggctgcaaagcgtggaactgcgccgccgcgtgcatgccggcctgaacaagggcgaggcgcgcaatgcgctggccagggcagtgtttttcaaccgcctgggtgaaatccgcgaccgcagtttcgagcagcagcgctaccgggctagcggcctcaatctggtaacggctgccgtcgtgttgtggaacacggtctatctggaacgggctgcgcacgcgctgcgtggcaacggccatgccgttgatgacgcgctgttgcagtacctgtcgccgctcggttgggagcacatcaacctcaccggcgattacctctggcgcagcagcgccaagatcggcgcgggcaagttcaggccgctacgaccgctgcaaccggcttag

SEQ ID NO: 327844 - DNA, 366 bp, Pseudomonas aeruginosa
ttgtccgtcggcagcatcgtcctgaccacgttgccgccagacactgctgcgctggccgggcagcgcggctacctgccggcgcgcgtgccgctgctcaagcgcgtgggtgcggtcgcgccgcaggaggtgtgcatcactggtcgcatcgtccgcatcgacggcgtgccttcggccgccgtgctgcctgctgaccgctggggccggccgctgccatcctggcagcaatgccgtcgcctcgaacccggcgaactgttcctgctcagtgtgaccaacccggcgtcgttcgacagccggtatttcgggccggtcaatgcgggcgccgtgatcggcgtcgcgcatccggtctggctggagtcccgcccatga

SEQ ID NO: 327845 - DNA, 1116 bp, Pseudomonas aeruginosa
atgtcttaccaatcttcactttggacgcgcgcgctctgtgttttcgcaatcgcgctctctctcccgtcggtggccctggccgccgacgagttcgacgtttcagccgcgcagatgcaagccctgggcgtacagctacaacgcctagacaagcctgcatccattccgggtatggcttacccagcccgcgtcgtgctgcctccctcgcaggaatatgtcgtcagcgcaccgctcgctggcgtggtcgatcaactactgattggtcagaacgaagccgtcaaaccgggccaacccttgctgcgcttgagcagcccagaattgggcgaacagcaactcaaactgatggaagctgcttcgcgcaaccgtctagcgcaaaggaacttgcaacgcgagaagcagttggccgccgaagggatcgtgcctgagcgcagagcgcaagacgcggagacttcagcaacggaggagcgagcccgtctgcgtcaagctgaagctgccttgaggctcgcaggcatggatgcgggcgctatcagtcgtgtcgccgcaggtggcgcgatgcaggacgcgctggtcatccgagcacgcgcggggggcatcgtgactgatcttggcgtcaagccggggcaacgagtccaacaatctgatccccttgcgcgtgtcgcagacacgcacaagctatggcttgatatccaattgcctgtagagcgccagtcgagcgtgacggcgcgtggcggccaagtcaccgttgttggcagagatgcggttgcggtcaccaccagcctaggaacgaccgtcagcgacagccagacaatagtgctgcgcgcagaggtcacacgcggggcggcgtcactgcggccgggcgagttcgtccaggcccaagtagcctttgcggctggcggcgaaggttggccagtgccggtcgccgccgtggtgcgccagggcgacaaggcctatgttttcgtgcgaaccgataaaggcttcgtcgccacgccagtggctgtattggacagcgctggccaagcgttgcgggtcaagggtgcgcttcgcactggccaggaaatcgccgtcacgtccgtgatcgggctgaaggcggcatggctcggcaagggcgggggcaattga

SEQ ID NO: 327846 - DNA, 3093 bp, Pseudomonas aeruginosa
atgttgacccgcctcgtgcaattcgcgcttgcgcagcgcctttttatcctgctggccggtgcattactagccggtggaggctggtacgccttccgcaacctgccgatcgatgcgtttcctgacgtggcgagcacgcaggtcaagatcatcatgaaagcaccgggcatgacgcccgcggaaatcgaaacccgcattgctgtaccgatagaagtcgagatgctgggcattcccaaccaacgcatcctgcgctcgatgtccaaatacggcatcgtcgatattacggtcgatttcgaggacggcactgatatctattgggcacgtcagcaggtcgcagaacggttgtccaacatcagcgccgatctgcctgggggcattagcggtggcatggcgccgatcacgacgccgctaggcgaaatgttcatgtttaccgtcgaatccaaggagatgtcgctggaggagcgacgtagcttgcttgactgggtgatccgacccgccctgcgttcggtgccaggtgtggcggatgtcaatgcgttgggcggcaaagtgcgcacgttcgaggtcattcccgatccagtgaaacttgctgcggtgggtctgtccaccacacagttgcgcacagccatcgaggcaaacaaccgcaatgacggcgcaggacgcctcggcgaaggcgatgaagtgctgctggtgcgcagcgaaggcagcatcaagagcatggacgacgtgcgcgccatcgtcgtgaaagccgagggcggcgcgagcgtgcgaatctccgacatcgctcaggtccgcgaaggctacctcacgcgctatggcgtggtcacgcaaagcggccagggcgaggccgtgcaaggcttggtgctcggattagccggggccaatgcgcagaaggtcgtacggggcgtgacgcagaagctggaggaactcaagcccaccttgccgcagggcgtcgaaatcaaggtcttctacaaccgcgccaacctggtcgagacggcagtcggcacggtgtccaaggcgttgctggaggccatcgtgctggtgctggtcctgctgggggcattcctgggcaatgtgcgggccgccgtgacggtggccgtggtgctgccgctgtcggcgctggccaccttcatcctgatgcgctggtacggcatgtcggccaatctgatgagcctgggcggtttggctatcgctctgggcatgctggtcgacggcgccgtggtggtggtcgagaacatcgtccagcacatggcccatgacggcaaggacaaactgcctcgccagcacatggtgttccgcgcggtgcgagaggtagccgcgccggtagcggccggcattctgatcatcgccatcgtgttcctgccactgatgacgttgcagggcctcgaaggcaagttcttcgtgcccgtggcgatgacgatcgtgttcgcgctaggcagttcgctcatcctgtcgctcaccgtcattcccgtgctggcttccttcctgttcaagaaggtggcgcacgacgatccctggctgccacgccatgcgttgcggctttacacaccgatcctcgacttcgccctgcgccgacaaaagctggtctttgtgatggccggtgtcatgctggccgcagcggtgggcatctacacactggtcggcaagaccttcatgccggcgatggacgagggagacatcattgtcggcatcgaaaagctaccttcagtgagccttgagcagacggccgaactcgacctgaagatccatcaggcgctgatgaagggcgtgcccgagatcactggcatcgtcgcccgagctggcgccgatgaaatcggcctggaccccatgagcctgaaccagaccgacacttttctcgtgctcaagccacgtagcgagtggcccgaaggcggcaagcctgcgctggaagacaagattcgcagcgtactcgatcaactgccgggcgtcggctacagcttcacgcagccgatcgatatgcgcgtgtccgagatgatcatcggcgtacgcggtgacgtagcgatcaagatcttcgggccagacctgaaaacactcaatgacctcgccgcccaggtcgagaagctgatcaaggaagtgcccggcaaccaggacgtctataccgttgagaacgatggcgtgcagtacctgcgcgtggtggtcgatcgcttggccgccggtcgctacggcctgtcggtcgaggacgtgcaggatgccttgcgcgtgcagatcgagggccagcgtgccggcacggtgatcgacggcaaccgccgcatcccgatcgtggtgcgcgggccggacgacgtgaaggtctcgcccgccgagttcgcggcgctgcgcatcatggcgcccggcggtcaaaacgtcgctctggatcagctcgcccgattggagcgggaaagcggtccagtgaagatcgatcgcgagatgggaagccgctatagcgtggtgatcgccaacgtcaccgggcgcgatctggtggggttcgtcgaggaggccaaagccaaggttgcgcaagcggtgacgctgcccactggctaccgcgtcgcctggggtgggcagttcgagaaccagcagcgagcggccgcgcgtctgtcgctcgtcgtgccactctcactgggtcttatcttcgtgatcctcttctccaccttcggctcggtgcgtcaggctctgctggtcctgagcaacgttcccttcgcgttggtaggtggcatcacggcgctgtggctcacgggcgagtatctgtccgtgcccgcctcagtgggtttcatcgccctgttgggcatcgcggtgctaaacggcgtggtgctggtgagctacttcaaccagttgcatgccgagggcctgccccttgtcgaatgcgtgacacagggagcacgtcggcgcttacgcccggtattgatgacagcctcgatcaccgcattcggcctgataccactgctgttcgccactggtccaggctcggagattcagcgccccttggccatcgtcgtcattggcggcctgatcacagcgaccgcgttgacgctgatcctgttgcccattctgtacctgcgattcgcgcaccccaagtcatccgagcccgtggaggtgaaccatgcctaa

SEQ ID NO: 327847 - DNA, 303 bp, Pseudomonas aeruginosa
atgcctaagtcctgcctgaccttggttcttgatccacaaatcgaggaaaagttgctcgacctgctgcttgaggtcgcgggtgacgaactctttgttagcacaccgacattcagtcacggcacagcctacgggcggctatcgaacgaagaaaaagtgatggggcgcagccacgcggtcctggtgcagatcctagtcaccgacgggaagcaggaaaaactcctgcaattgttgcaagaacgttttgctggcaccgggttgcgctattgggcagcgccgctgtcgattgatggagagattgcatga

SEQ ID NO: 327848 - DNA, 1242 bp, Pseudomonas aeruginosa
atgaagtcttggatcacgatgaccttgggttgggtgctggtgctgccgctacaagtggttgcgcagcctgtcactccgtccgacctgccccctgacgaacttgcgcgcgcggctatcgagcaggagccttctgtcttgaaggctcggcatgcgttggaagcagcaggtcatacaggacgcaagatcgctgcatcaccctacgagtggtctgtaggaatcgacggtcagagacgccgctatgacacaggtggaaattccaacgaatggaccgctaggatcgagcgaccgatccgaattggcggcaaggccgaactcgatcaagacctaggcgacactaccgaacggatagctcgcgcccagttagcggaagcacgacatgaagcggcgcgtgcattggctgacttgtggatcgactggttggcagctatccaagcgcgagagttggccaaggaacaactcggctttgccgaatcgagcgcatcggcagttgccggacgtcgcagggccggcgatgcgtcgctgctggatctcaacgctgcgcaagcggatgcggccgaggcgcgtcgaaagttggacgtcgcgctggtacaagaggccaaagcgatccttcgtcttcgctcacgctttccgtctttggtgatggagccgcggcccttgagtgaacctgtggaacttgagctcgacgaagcgcagtggcgcgaacgagtccttgcagagagcgacacgctgcggatcatgcaggcttcgctaaaacgggcggaattgactgccgagcgggcgcgagctgatcggattcctgaccccaccgttggcattttcacagcctcggaggctcgtcgcagcgaacgcatcgtgggcatcagcgtgagtatcccgctcggagggacctatcgcaaggaaaccatgctggaggcgctcaagcaggcggacgttgcgcgggctgaactagagcgccagcgcaaggaaatcgaactagcgactgcggaaaccatcaacgatgcccgcgctgcactgcggcgctggaggttagccgaacagtccgcgcagatggcccacgagaacgccaagctcggccagcgtggctacggccttggcgaaggggatttgcaatcgctgctgctgctgcgtcggcaatccgttgatgctgccggggcatcgctttcatcccgcattgaagcgttgaaggcgcgcaatcggttgctgatcgatgctcatttgattcttgggctggccgatgaataa

SEQ ID NO: 327849 - DNA, 648 bp, Pseudomonas aeruginosa
atgttcgcaagtgcgaatcaggcactggctcatgctgtagccgagggcgacaagggctacatccaagaaatatctggcatcaatgtcatccccttcatgtatctaggggcgaagcacatggcgacgggatacgaccatatcctgttcctgctaggtgtgatcttcttcctatatcggatgaagcatatcgccctgtatgtgacgctatttgccatcggccattcgaccacgatgctgcttggcgtttatttcaacgttgggatcaacagctacatcatcgacgcgatcatcggtctttcggtggtttacaaggcgctggacaacatcggtgcgtttcagcgatggctcggctttcagcccaacacgaaggtcgcaactgttgtattcggactctttcacggattcggcctgtcaaccaagatcattgaatacaaaatttcgccggatggtctgattccgaatctgttggcattcaatatcggtgtcgaaatcgggcagttgctcgcgctcggcaccattctgatcgcaatgagctactggcgccgaacagcaagtttctggcgccatgcgtacaccgcaaacgtggcgatgatgtgtgccggcttcattctgatcggctatcagctcaccggctacttcgtttcctga

SEQ ID NO: 327850 - DNA, 627 bp, Pseudomonas aeruginosa
atgtacaacgtatccaagccaaccctcgacgatctgccttcatcgaaacaactgctgcgctcgacgttcattgcactcgtcgccgccatcgcaattctggtcgccatcgttcttccctccgagtatgcgatcgactcaacagggattggccgtgtactcggcctgacggaaatgggggaaatcaagacgcaattggccgaagaagccgctgcggacgccgcgaaggatgcggcggcagccgctgctgtgacaacaggaaatgcaggcaccgccgcacctgtacaggcacaaagccccgcggcgagcgaggctgcttggcgcgatgaaatgcgtgtcgtactcaagcccggtcaaggggcggaagtgaagttgagcatgaagggcggcgagcaggccgagttcagttggattaccgaaggcggcgtagtgaacttcgatacccacggcgatggcggcggccagtccatcagctatgaaaaagggcgtgctgtgcccgcaagtgatggcgtgatccaggctgcctttagtggcaaccacggctggttctggcggaaccgtggcgatgctgatgtgacggtgattgttcgtgctcgcggccaatattcggaaatgaagcgtgtcttgtga

SEQ ID NO: 327851 - DNA, 264 bp, Pseudomonas aeruginosa
atgaagattcgtccatttttgattgtcgctctagccagtgcatcgcttgcttcaccgttcgtgatggcccaccccggcgggcataacgatgatgaaaaggcgatgccgaagacttgtgagcaattggcagatacgaagcggtatatcaatgacgtggcttacccggcagtcaagaagctgaaagagcagtgcgacgccgcgaagaagaagccaaccgcaacgcagtctccagcagcccgccgtacatccagcgacggcaactga

SEQ ID NO: 327852 - DNA, 945 bp, Pseudomonas aeruginosa
atggagctgagacatctgaaatgctttctcgccgtggcggaggagcttcatttcgctagagctgccgaaaagctgcacatcgagcagtcgccgttgtcgcgcgccattaaagagctggaggaagaattgggcgtggtgctgttcgcacgcaccacgcgcagcacgcgattgacccgtgcgggcaatttattcctggagcacgtgcgccgcgtgttcgccgccttggaacaagcacgcgacagcgtgaaagcggccgccaacggctttcacggacaattgcgcgttgcattgtcagatggcatcacgccttcgcgcctaccggctttgctggcgctatgccgccaggaagaaccggaagttgaacttcgattcttcgaggttccactgtcacagcagatcaaagggttgcatgatgatctgtacgacgtggggtttgcgcagtccgatgaagtgggcgatggcatcgccaccttgcctgcttggagtgacacgctcatcgtgactgtgccagcgcggcatccgctgcttgcacacaagcgcatccctttggaggaactgcttcgctatccgctggttctatgcgatccacaagtgtgcgaaggtcatgccaagttcgtcgatcgggtgctgcgccgggccgacatggaaccgttggttgcagagcgggttgctacgtgtgatctgatgatggcgttggtatcggctggcttcgcgctcgggttcacgggcgctgcgcgcattgccgccaaccccgactcgggtgtggtggcccgaccgctggcgttgcgcgtgccgccgctgacaacctacctgcttcgcctcgaaggtgagccatccgatgttctggcgcggtttatcgagcgcgtgcaggctatcgagtcaccggaacctccaagacccaggcggggtcatcaatccgatttccttgaggagcctgcgccatga

SEQ ID NO: 327853 - DNA, 384 bp, Pseudomonas aeruginosa
atgacgcagatgatcgttcctgctttccgtttttctgcaaatccggctttgcgtcttgcgcgactgcgcagcctggcccgccctgcggggcaagggctgttgctggccgcgctgctgctgttcctggccggaaccgcgcaggccgccggctcctcgatgccgtgggaaggcccgctgcaatccatcctcgaatccatccaggggccggtggcgcgcatcgtcgcggtcatcatcatcatcgccacgggcctcgcgctcgcgtttggcgacacgtcgggcggctttcgcaagctgattcagatcgtgttcggcttgtccatcgccttcgccgcgtcctcgttcttcctgtcgttcttttcgttctcgggcggggctgtcgtatga

SEQ ID NO: 327854 - DNA, 273 bp, Pseudomonas aeruginosa
atgaacggcccggacattttcgcggatggcttcgaggtgccactgcatcgctcgctgaccgagccgattctgctgggcggtgcgccgcgcaccgtggcgatcgccaacggcacgctggcagccgccgtcgggctgggcctgcaactgtggattcccggcgttgtgctctggatcgtcggccattcgctggcggtgtggggtgcgcgcgtcgatccgcagttcatgcaggtcttcgcacggcacatcaaacatcgcccgctgctggacgtgtga

SEQ ID NO: 327855 - DNA, 2454 bp, Pseudomonas aeruginosa
atgctgaacctcgccgaataccgccagcgcccggccttgctggccgactggctgccctgggccgggctggtggcgccgggcgtcgtcttgaacaaggacggcagcttccagcgcacggcccggtttcgcgggcctgacctcgacagcgccacgcaaggcgagctgatcgccacctcggcacgattgaacaacgcactgcgccgcatgggatcgggctgggcgctgttcattgaagccgagcgccgcgccgccgccgactatccgcgctcggagttccccgaaccgctttcgtggctggtggaagaagaacgccgcgccgcctttgaggaatcaggccatcacttcgagagcggctatcacctgacgctggtgtatctgccgcccgaggaatcgcgcgcccgcgcagccaagatgctctacgagaacacgccaacgaatgacgtggactggcgcgagcggctgcaagccttcgtcgcggaaacggatcgggtctttgacctgctcgatggcgtgatgccggaaatcgcttggctgcacgacgcacagacgttgacctacctgcacgcaaccatctcgacgcggcgctaccgtgtgggcgttcccgaggtgccgttccacatcgacgcgctgctgaccgactcgccgctggtcggtggcctggcgcccatgctgggcgaccggcacctgcgcgtggtgtcggtgcggggcttcccgacctcgacctggccggggattctggacgacctcaaccgcttgggatttgggtatcgctggagcacgcgctttctatgcctcgacaaatccgaggcggaacgggagttagggcgcctgcgccgccagtggttcgccaagcgcaagaacgtcatcgcgctgctgcgcgagacgatcttccagcaggaaagcccgctggtggacacggacgccagcaataaatcggctgacgcggatgccgccttgcaggagcttggcagcgatcaagtcgccttcggctacctgacggcgaccgtcacggtcatggacgcggatgccgctgtggcggacgaaaagctgcgcatggtggagcgcgtcatccagggccggggcttcgtcaccatccctgaaacgctcaacgccgtggatgcgtggctgtcgtctattccgggcaacgcttacgccaacgtgcgccagcccatcgtctcgacgctgaatctggcgcacatgatgccggtgtcggcggtatgggccgggccagagaagaacgaccacctcgacggcccgccactgatcgtcacgcgcaccgatggcgcgacgccgttccggctggtgacgcatatcggcgacgtgggccacacgctggtcgcggggccgaccggcatgggcaagtcagtcttgctcgccacgctggcgatgcagttccgccgctatcgcggctcgcgcatcttcgccttcgacatgggccgctccatgcgggccacgatcctcggcctgggcggcgagcactacgacctgggcacggacggagaaatcgccttccagccgctcgcgcgcatcgaccttgagggctaccgcacatgggccgccgaatggatcgcaggccgcctgctgcacgaaggcgtggcggtcggccctgacgagaaggcggctatctggtcggcgctgggaagccttgccggtgcgccggtggagcagcgcaccatgaccgggctttccgtcctcttgcagtccaacgcgctgcgccaggcgctgtcgccctatgtgctcggcggcgcgcacggcaagctgctggacgccgaccatgaccggctcggcatggccgacgtgcagtgctttgagatggaggagctgatgcacagcaaggccgccgtcatggccgtgctgcattacctctttgcgcgcttcgatgaacgctttgacggagcgcccacgctgctgatcctcgatgaagcgtggctgttcctcgatgacccggtgtttgccgcgcgcatccgccagtggctcaagacgctgcgcaagaagaacgtgagcgtcatcttcgccacgcagagcctggccgacatcaaggattcgagcatcgcgcccgcgatcatcgagagctgcgcaagccgcatctttctgccgaatccgcaggcgaccgaaccgcagattcgcaccatctacgagggcttcggcctcagcaggcggcagatcgagatcgtcgccaccgcgcagcccaagcgcgactactactaccaatcccgcctcggcaaccgcctgttcgacctcgacttggggccggcggcgctggcgtttgcgggcgcttccacgccgcaagaccagcgcgacatagaccgcgtgctgctggacgccggcgtgcccggcttcgcgggcgcctggctgcgccatcgcggcctcgattgggcggccgacctgctgccctcgttccccggcctcgcgccgggttccctcgctgaacaacccctggagaacctgccatga

SEQ ID NO: 327856 - DNA, 726 bp, Pseudomonas aeruginosa
atgaaaaagcgtcttgtcaccgccgccatcgcggccatgctttgcaccgccaccgcccacgcgcaatgggtcgtgatcgaccccacgaacctcgtgcagaacacgctgaccgcgatccgcacgctggagcagatcaacaaccagatccagcagctccagaacgaagcgcagatgctgatgaatcaggcgcgcaacctcgccagcctgccgtctagtgtggtgaaccagttgcgcgccaatctggcgacgaccgagcgactgatcgcccaggcccgaggcttggcctacgacgtgacgagcctcgaccgggagttcgcgcgcctgtatcccgagcagtacgccgccaccgtcagcggcgaccagatgtaccgcgatgcgcaggagcgttggaagcacacgctcaacggcttgcagaccaccatgcagatgcaggcgcaggtatcgcagaacctgggccaagacgaaagcgtgctggccgatcttgtcagcaagagccagtcggccgtcggcgcgctgcaagccatgcaggccacgaaccaactgctggccttgcaggccaagcagtccatccagtcgcagcggctccagatcacgcaggatcgcgccgccgcgttggaactggcgcggcaggcggcggccacggagcgcgcccgcgaggtgcggcggcgcttcctcggtgaaggcacgccgtacacgccgcagtccgtcaacttttaccgcgactga

SEQ ID NO: 327857 - DNA, 297 bp, Pseudomonas aeruginosa
atgcgatgcgtcctcgcccttggcgtcgtgctgttggccgcttgcggcgagcagccagccgacaacctcgccgatgccctggccgccgatcccgtgcggctcaaggcattgcgtgagcaatgcgcggcccatccaccacaggtcatgcaggccacgggcgaggaagcttgccgcgccgccgccgaagctttccggcggcgcttcttctccggccagtccgggccgaatgaataccagacgctggccgacctgccgccgatcccgcccagcttcgacgaaccggaggacacgccatga

SEQ ID NO: 327858 - DNA, 1368 bp, Pseudomonas aeruginosa
atgaatgacgtgaccatcatcgaccagttcctcgccacctttgccgcctacatcgactcgggtttcgggctgctgcggggcgaagtggcgttcctcacggccacgctcatcgtcatcgacatgacgatcgccggactgtattgggcgatgagccacgccaccggccagggcgaggacgtgatcgccaagctgctgcgcaaggtgctctacgtcggtgccttcgcctacatcatcaacaacttcaactggctggccagcatcgtgttccggtcgttcgccgggctgggcatcaccgccacgggctcggccatcacgatggagaacttcttgcagccgggtcggttggcgaaaaccggcattgacgccggggcgccgattcttgagcagatcggcgagatggccgggttccccgaggtgttcgccaatctcgatcccatcgtggtgctgtttctcgcgtggctgatcgtggtgctgtgcttcttcgtgctggcgatccagcttttcatcacgctgatcgagttcaagctgaccacgctcgcgggcttcgtgctggtgccgtttgccttgtggaacaagaccagcttcctcgccgagaaggtgttgggcaacgtggtggcctccggcgtcaaggtgctggtgttggccgtgatcgtcggtatcggctcgggcctgttctcgcagttccaagtgcatcccgccgagccgtccatcgaccacgcgctggtcatcatgctggcctcgctcaccttgctggcgctgggcatcttcggccccggcatcgcgacgggcctcgtgtccggtgcaccacagctcggcgcgggcgcgatggcgggtgcggccatcggcgcagccgggacggcggtggctgttggcgccgctgcaaccggcgtcggtggtgcggtggcggctggcgcgcgcatggccccggctgccgccaagctggccggtgctggggcgcgtgcggccacgtcggcggcgggcagtgcgaagtcggcgttccaggccggctccgccgccgcaggcggtggcgcgaaaggcgcaatggcgggcttgggcaacgtcgccaagaccggcgcgcaggcagccgggcgaggcgctgcatcccgggcctccgctgccgggcagcgcatggccgcgccgttccgtgccggctggaatggcgacaccggggcgccaggcggccccgccgcaggcgaaggcccggcaagcgccactgctgcgcaggcgccggaacaaccgacctgggccaaacgcctgcatcgacgccagcaactcacccatgccgcgaccactgccgcccacacgctgcgcggtggcgatggcggcggctccggccaggggccgagccttcgtgattccgattcctga

SEQ ID NO: 327859 - DNA, 705 bp, Pseudomonas aeruginosa
atgcgattcaaaagaccgcaggtgcgctatgccaacacaccgcagcctgctaccccgtaccaatccgccgcccaggcctgggacgagcgcatcggctcggcccgcgtacaggcgaagaactggcggttcatggccttcggctgcctcactttggccgtactgatggccggtggcctggtctggcgttccgcgcagtccatcgtcaccccctacgtcatcgaggtggacaactcgggtcaggtgcgcgctgtcggcgaagcggccacgccgtaccggcccagcgatgcgcagattgcttaccacctcggccgcttcatcggtctggtgcgctcgctgtccatcgaccccatcgtggtgcggcagaactggctcgatgcctatgactacacgaccgacaaaggcgccgtggtgctcaacgagtacgcccgcgtgaacgatccgttcgcgcgcatcggcaaggagtcggtgacggtgcagatcaccagcgtgacccgcgccagcgacacgtccttcaacgtgcgctggacggagcagcgtttcgtcaacggcgccgccgcaggcaccgaacgctggaacgcggtgatttccatcgtgcagcagaccccgcgcactgagcagcgcctgcgcaagaaccccctgggcatctacgtcaacggcctgtcctgggcgcgcgaactggattcttctgaaggagccaaaccatga

SEQ ID NO: 327860 - DNA, 549 bp, Pseudomonas aeruginosa
atggctcggcatgaaataccgctattgaaacgcctcgcactggccgccctgtgcacggccctgcccgccctcggcgtcgccgcggacgcctcgctgcacgtgtacggcgcggtgcagcgcgagctgcgcctcgacctcaccgcgctacgccagctaccggcgcaagacagcggcaagctggcgatggtctgccagtctggcgcccaggtcggcgccgagcgcgagtaccggggggtgcgcctgagcgacgtgctggaccaggccgggctggacatgcccggccaccaggacgcgcggcgcagctatgtggtcgcgcgcagttccagggacggttatgccgtggtgttttcctggggcgagctgtacaacagcgaggccggcgacgagatcctggtggcctaccagaagaacggcctcgccctggatcctggcgaaggcccgctggcgctggtctcgacaggcgatctgcgcagcggcccgcgccacgtcaagtggctcgacggcctcgaggtggtgcgcctgccacgaggcccgctggctacgccctga

SEQ ID NO: 327861 - DNA, 2028 bp, Pseudomonas aeruginosa
atgcataacgagatcgccgctaccatgcaaaaccttctttccaaccggctggtccccagcctggcactgtccctggtgggcgctgccactgcccaggcggagacgccgatcgcgcttcccgacatggaagtcagcacctggggcaattccctcagcccgccggacagcgtcgcccgcgaagacttccagcgcttcgaccgccgcgacgtcggcgaggcgctgaacaccctccccggcgtctacctgcaaggcggcggcaaccgcaacgaacgccaggtcagcgtacgcggcttcgactcgcgccaggtgccgctgttcatcgacggcgtgccggtctacgtgccctacgacggcaacatcgacctcggccgcttcctcacctcggacctggccggcatcgaagtgtccaagggctacgcctcgctgttgcaggggccgaacatgctcggcggggcgatcaacctggcgacccgtcgcccgacccgccccttcgaggccggcttcggcctcagccagggctgggcgcgcgacgcagggcgggtcggccgggcggcggatttctccctcggcggcaagggccgccagggcttcttccaggccagcggcgcctggctcgaccgcgacgcccgcgccctccccggcggcctgcgcgacagcgacgacctgggtagccacggcgaacgcgccaactcggccagccgcgacgcccgcggcaccctgaagctgggcctgacgcccaatgccagcgacgaatacgtgctgacctacttcaagcaggacggcgacaagcagtcgccaccctacgccggcagcgatccgtcgttccagagccgctactggcgctggccggactggaacaaggaaggcctgtacttcaactccagcacccagctcggcgaacgcacgcgcctgcgtacgcgcctctaccgcgacaccttccagaacaccctggagcagtacaacagtcgcgccgacctggaggcccgcaagggcagtcgcagccagtacgacgactggtccgacggcgccggggtggaactcagccagggcctgcgcgaggacgacagcctggccttcgccctgcactggaagcaggacgtccaccgcgaacgccaggaccgcggaccctgggggcgcttcgaagaccgcacctggtcgctctccagcgaataccagtgggcccttgacgcggccacgcggatgatcttcggggtcagctacgactggcgggaaagcctggaggcacgggagtacaagaccgaccgccagggccggaccagcgagaaggaatacccggacaacgacgccgaggcgttcaactggcaatggagcctggtgcatccgctcgacgaagccagcgaagtccagctgaacctggccgaccgtagccgcttcgccaccctcaaggaccgctacaccaccttccgccccgccgtcggccagaccgtgctggtcaaccccgacctcgacccggagcgcgcgcgcctggtcgaactgcgctaccgccgcgccttcggccaggacaccacgctggacctcgcgctgttccacaaccgggtgcgcgatgccatccaggccaccgacctcgggccgaacctggcgcagaaccgcaatgtcggcgagatcgtctaccagggcctcgacctgggcctgcgcggcaggcctgcgcagcgcctggagctgggcgccaactacagctggatcgacagcgactggcgcagcagcgaggccggcgtggtcaccggcctgccgcgccacaaactgttcgcctgggccgactggcaagccctggagccgctgcacctggtgctcagcggcgaagcccgttcccggacctacagcgataccggcggcagccggcgcgccgccggcttcgcgctgctcaacctgcatggcgaataccaggccagccgcgaactggccctgagcctggcgctgaacaacctggcggatcgccgatacgcctacaacgaaggattcatcgaagaaggacgcaccctatggctcggcatgaaataccgctattga

SEQ ID NO: 327862 - DNA, 1041 bp, Pseudomonas aeruginosa
atggacgagaacaagaagcgcgccctggccgcggccctgggacagatcgaacgccaattcggcaagggcgcggtcatgcgcatgggcgaccatgagcgccaggcgatcccggccatctccaccggctccctgggcctggacatcgccctcggcatcggcggcctgcccaagggccggatcgtcgagatctacggtccggaatcctcgggcaagaccaccctgaccctctcggtgatcgccgaggcccagaaacagggcgccacctgtgccttcgtcgacgccgagcacgcgctcgatcccgactatgccggcaagctgggcgtcaacgtcgacgacctgctggtctcccagccggacaccggcgagcaggccctggaaatcaccgacatgctggtgcgctccaacgcggtcgacgtgatcatcgtcgactccgtggccgcgctggtgcccaaggccgagatcgaaggcgagatgggcgacgcccacgtcggcctgcaggcgcgcctgatgtcccaggcgctgcgcaagatcaccggcaatatcaagaacgccaactgcctggtcatcttcatcaaccagatccgcatgaagatcggcgtcatgttcggcaacccggaaaccaccaccggcggtaacgcgctgaagttctacgcctcggtccgcctggacatccgtcgtaccggcgcggtgaaggaaggcgacgaggtggtgggtagcgaaacccgcgtcaaggtggtgaagaacaaggtttccccgccgttccgccaggccgagttccagatcctctacggcaagggcatctaccgtaccggcgagatcatcgacctgggcgtgcaactgggcctggtcgagaagtccggcgcctggtacagctaccagggcagcaagatcggccagggcaaggcgaacgccgccaagtacctggaagacaatccggaaatcggttcggtactggagaagaccattcgcgaccagttgctggccaagagcggcccggtgaaggccgacgccgaagaagtggctgacgccgaagccgattga

SEQ ID NO: 327863 - DNA, 2406 bp, Pseudomonas aeruginosa
atgagtcagattctgcccagtcaggacgagttgcttgcccatgcggcggccgagccggcgtttgccgcgtggctgcaaggccatggtccgctccagcatagcgcagagacccgcgccgccgtgttccgcaccgctcatcaattggtccaagccgggctgcaaccggacctggccagtgtctaccagctgttccgcgccctcgaccggctgaccgccagcgccctgcgcatcgtcgtgcacatgacctacgcccggcgcatccgcctggacggccagccgttgcaggccgaggatttcaagacacagcccgagggccacaccggcggagccctgaacatggtcccggcctacgccggctacctggcactcaacgtcctgaccggcaagactcgcgcctggctgatgggccagggccattgcgtggccgccatcgacgcgctgaacgtcctgaccggcaacctgcacccggagcaggagcgcgcctatgctgacggcgaggaggggctgaaccgcttgctgcaggacttctacggctacgcccaggcccccaacggcgcaccggcggcgccactgggcagccacgtgaatccgcataccgccggcggtatcgccgagggtggctacctcggcttcgccgaattgcagtacgcgcacatgccgctgcccggcgagaccctggtggcgttcctctccgatggtgccgccgaggaacagcgcggcagcgactggattccgcgctggtggcgagcagaggattgcggggcggcgctgccggtgatgatcgccaatggccggcgcatcgagcagcgcaccgaactgggcacccatgaggggctggagggcttcaagctgcatctgcgccgctgcggcttcgatccgatcagcttcgatgggcgcgacccggccgccttcgtctgtacgctctgggagatggaacagcgcctggagcggcgcgtgcaggagaagaacagcggcatcctccgctacccgctgccgattccctacggcatcgccgagacggtcaagggcttcggcttctatggcgccggcagcaacgccgcgcacaacctgccgctgccgggcaatccgcataacgacgaacaggcccggcaactgttcaaccagcatgcaaacgaactctgggtcgagcctgaggctctcgaattggcccgccggctgttcgccgagcagcgcggcgagcgtcccctcgaacgggacaacccgctggccctgcgccatcccatcgaaccgatcatcccgccgctgcgctatcgcgacgacccctgctcgccgatggccgcgctggaccgcttctataccgaactggtggaggccaaccccgacctgcgcgcccgggtcggcaatcccgacgaattggccagcaaccgcctcggcggcgtgctcaaggcgctcaagcatcgggtcagcgagccggagagcgaactggaatcggtgagcggtcgggtcatcaccgcgctcaacgaggaggcggtggtgtccgcctgcctggccaaccagggcggactcaacctggttgccagctacgaggcgttctgcgtgaagatgctcggcgcggtgcgccagaccctgatcttcgcccgccagcagaaggaagtcgggcgtccggccggctggctgggctggccgctggtcgctacttcgcatacctgggagaatggcaagaaccagcagtcgcaccaggacaccaccttctgcgaggccctgcttggcgagatgagtgacatggtccgggtgctcttcccggccgatcacaacagcgccctggcgctgctaccgacgatctaccgcagccgggggcaactggcctgcctggtgatccccaagcgcgaccggccgatggtgttcgacgccgtccaggccgagcgcctggcccgcgacggcgcgatcctggtcgaggagcgctgcggctccgatccactgctgctgatcgccaacggcagctaccagcttgaacagatgcgccgcgccgcgcagcgtctggccgaggccgggcaggcctaccggctggtctacctgcaggagccgggacgcttccgcgcgccgcgcgatcgctgggaggtcgaggcggtggccgacgaggcgttggtggaacgactgttcccggatagccatgagcgccgcgtgctactcacccatatgcgcgcggaagtggcgcgcggtcatctttggccaatcctgccggatgcccggcgcacctcggtactcggctatcgcaaccgcggcggcaccctcgacgaggcgggcatgcagttcgccaaccgcgcctgctggggcaacgtgctggcggcttgcgcccgcttgatggaggtgccgcgcaccgcgctgctgaccccggaggaagcggcggcggtggccggcaagggcgatccggcgttgttgcgctga

SEQ ID NO: 327864 - DNA, 903 bp, Pseudomonas aeruginosa
atgcccttgcctccactccatgcgtttcgggtattcgaatgtgttgcgagactcggacatgtcggcgcggccgcggctgaactccatgtcactgcgggggccgtcagccagcagattcgggcattgcagaactcgctgggcgtcgacctgttctataagcaaggtcgccaactggtcctgacggagcgcggtctggcattgcaacgctcagtggcacgcggcatcggtgaaatcacggagggagtgcggcagatatccgatgcgcagtatcaggagccagcggcgaaggtcctgaccatttcgaccgagccaatcttcggcgcgacctggctaatgccgaagctgttcgcctttcgcgcgcaacatccgcaccttcatttgcgagtcatcagtgcggacgatatctcggaggtggattggcgcagggccgatattgccgtgctctacgacaagccgaactgggagggcttctggtggcggcccttacaaagcctgcacatgttccctgtctgctgtccgcaattgctacgcggcccgcacgcgctcaagcagccttctgacctcatccatcaccgcctgttgcatgaggatgacggaacccaatggcgacgctggttgcttgaggcacgtctgccctatccgggcgacgccgacgttcacctagagaacttcggtatcgctctgcaggctgcccgagatggatatggcgtggcgctcagcgatgaaatcaactcgtcacgcgacttggacgaaggacgcttagtacaacccttcgcactgaaggtgccaacggggatggattacttctgcatctgcaatgaggaaagccgcagcattccggagattgccttgctcatcgattggcttatcgagcaggcgaggcttgctccggcatacgcgtaa

SEQ ID NO: 327865 - DNA, 1164 bp, Pseudomonas aeruginosa
atgaaaaacacacagcaacagccgtggcgaaaaaccgatgcagatactgcttcaccgtccaggcgcactgtcggcgcaggcaggctgcgtgccctgctggtggcggctctcgcagtactcgccgtccccgcgccggcggctgatcgagtcgtgcgactctatgcctgggcggagtacgtcggcaccgacaccctgaagaagttcgaggccgaaacagggatcaaggtccagtacgacactttcgacagcgccgacgtgctggaaaccaagatgctgaccggcggaagtggctacgacgtggtcgtgcccagcatcgccatgctggaccggttgatccaggccaaggcgctgcagcccaccggtctgacgcagatgccccacgccggcgacttcgacccccagctgattgcgcaactgagcactgtcgacccgggtaactacttcgctgtcccctacacctggggaaccaccggcctggcgttcaatcgccaagcggtggaaaagcgtattcccaatccaccggtgaatagcctggacctgctgttcaagcccgaatacgcgagcaaactgaaagactgcggcatttccatcatcgactcgccccaggaggtgatcagcatcgcgttgcattacctgggcaagccagccttcagcaaggaccccgctgatctccatgaggcagagaaactgctgacccagctacgcccctcggttcgctacatttcgacgggcacgcaaagtaccgatctggccaacggtgatctctgtctggcgctgacctacagcggtgatgcggtgctggcgaaaagtcagtccagcgcggcccacaagcccttcaccatcgattattcaatccctcgcgaaggaaccctgacctgggtcgattccctggctattccggcggatgcgccgcatccgcaagaagccaaggccttcatcgagttcatcacccgcccggcgtctatggtcgaactcaccagcaccttgttctatgccaactccaaccgggccgcgactccgctgctggactccgcaatcaccggcgaccctgccatctaccccccggaaggcatccgcaaggagcttttcggtgagcaaccgctacccctgcgcgcactacgcgaacgcactcgcgcctggaccgccttccgtaatcagcagtga

SEQ ID NO: 327866 - DNA, 957 bp, Pseudomonas aeruginosa
atgaccgacaataacccaatcatcgaccaagccatgacgcgaatgagcctccatggcaccgatgccgaaccgacctacggtggcattaccagcttcatgcggcgccgctacacgcgcgacctgcaaggcgtcgacctggttgtcagcggcgtgccgttcgacaccgcgaccagcaaccggccgggtagccgctttgggccacgggcaattcgcgaagcatcggtccagtccgcgtgggcgcgccactggccctgggagttcgatccgttcgacctgctggcgtgcgtcgactatggcgactgccatttcgatttcggcactccggaagcgaccccggcagcgatcagggcgcatgccgagcgcatcatcaattcgggggcggcgatgctgacgttgggcggcgaccacttcatcagctacccgctgctgcaggctcacgcggccaagtacggcccgctgtccctggtccatttcgatgcgcaccatgacctggaatgcgatggcgaggataagcgtattgaccacggctcgatgttctaccacgccgtccgcgaaggcctgattgccccagagcgatccatccagattggtcagcgcaccacatgtgatgacgtgatggggctccaggtgctcaatgccagtgaggtgcatggccgttcggccaacgaactggccgaagtcatccgtaagcgcgttggcgacaacccagtctacttgaccttcgacatcgactgcctggaccccgcgttcgcacctggtacaggcacgcctgtgtgcggtggcctcgcgacccaccaggcccagcggattctccgcgagttgcggggcatcaacctggtcggaatggacgtggtggaggtcgccccgccatatgaccatgcagagatcactgcgcttgccggagccgcgctggccatggaaatgatctgcctgtacgccgctcggcataagctgtaa

SEQ ID NO: 327867 - DNA, 873 bp, Pseudomonas aeruginosa
atgaaagcgagtcagttcagcctatggatagcccagcttcccactctcaacactgagcagcgagagcagttgaaggcgagcctattggtacgaggcccgttccccacagacgtgattgccccccccagttgctgcccgcactgtcagtccagtgagttacgcccctggggttctagctgtggtctgcctcgctaccgctgcaagtcctgcggcaaaaccagcaacgcactgacgggcactccgatggctcggctggtcgatgccatcaaccatcgcgctgccgcgcatgtcaccgaaagcacggtgttcgggcccttctacatcgccggcatgcctgagcgcggctatggcgagaacatggccttcagccccggtgtcccggcgctggtcaccggccgggggctcgacgacgaagggcggcctgtggccggggcgtcgctggatgtctggcagaccgcggagaacggcatgtattccggccaggacgaaacacagcagcacggtaacctgcgcgggcgctatttctcggacgagcagggtcgctacgccatccgcaccatcgtcccggtgagctacccgattcccaccgacggtccggttggccaactgctgaatgcaaccggccgtcatccctggcgacctgcccacctgcatttcatgatcaaggcccctgggcatcgccgcctggtgacgcacctgttcgaccagcacgatccttacctggattcagacgccgtatttggcgtcaaggactccctgctcgtggcctacgagccttgcaccgtcaaccatcccctggcagcggaattcgacatggacgacgatttctgcgtaattgcatcgcacttgaccgcccaattgcattgccgctga

SEQ ID NO: 327868 - DNA, 954 bp, Pseudomonas aeruginosa
atgaccgactacacagcaaaacctctctcccaatccgacatcgctatccagatcgaacgactcgtgaacgcagtgattcgtcatgactgtcctgcattcaggatcagctatgacgcacaaggggatgaggtcatcgagaggaccaggctctctcggtacttcgatcacgttcggcagatgtaccacttggtgcatgacgagacgtacgccttgagtgagcacctgctcgcattcaaggaggcgtgctacgacatcggtatcgagttcgggatgtttgggatgacgtgcatggatgagagcgagggacggctcctgtcagaggcccagacctacaactggctcgtggagaggatccgggtgcacgtaccgactaagtggttcaagcgtgggaagagtgaacgtgcttaccgggaaaaggagaatcggcagacggtgactgaatacgtggagcggatgatggatagtcgttcacgtactgtggtggtgagggtggacctgtactaccgggaggcagcacgtgctcgcttgacggtagaggacgtcttcgaggacatggataggctgattcgagcgagggagcacaacccgatcttccagtatgagacgggctacatctgcgctgtggagcagggggaggatatgggctatcacatccacgcagagttcttcttcgatggccgggaggtccgtagtgattacgccaaggctgaggccatcggtgagctgtggaggaagatcaccgagggttgggggtacttccacagctgcaaccacgagaaagaaaagtatgaggatgaccgtggggtagggatgttcagccgtaaggacgcagttggtaggcgcaatgtgatcaaggcctgccactacctgatcgaggatggccaatcgctgcgggtgaagccagtgggggcaaggagttttcgtcctgggagtgcacggcggttggtcgactga

SEQ ID NO: 327869 - DNA, 702 bp, Pseudomonas aeruginosa
atgtccagccatccccatatcgccaatcgctaccctctccgtcatcccgacaacaccaatctcagcctgcattacgacgacaccttcgaaggctttcccgtaatgatcgagaaagggcctttcatgcgggagtatcttgctcgtctcaagcacatcatcgatttggctatagatcagtatccgagggtattggccttcagagtggatctccgtctgccgagagatatcgacctgcccgactacgcctataccaaccaggtcatcagcaagttctttgaggcctttactggcaggatcgaataccaccgcagccaactgcgtgagcggagtcgctatgcccgtgactgcaaggtccgctatgtctgggccagagagataggcaggggagaaaggccgcactaccacctgttgatcctgctgaaccgtgatgcctactacgggcctgggcgtttacggtcagaggaaaacaacatattcaatcgcatgcaggaggcctgggccagtgcattgggtatacccgtggactgggtagaaggcttggtagaaatccctgagaacccggtttaccggatcaaccggagtgtgcgggaggggcgagaagatcagctacctgcgctgtttcatcgtgctagctacctctgcaaggctgctacgaagtcttacggggatcgccagcggggattcgataccagtaggggatag

SEQ ID NO: 327870 - DNA, 576 bp, Pseudomonas aeruginosa
atggccaagatcggccagtcactgatcaccctagaatccgaaggccagcatgagcatggagccccctcaccagcctccggcgtgttggaaggcgtctcggtaaaggtcggtgacgaagtcggcatcgacgaactgatcctcaagctcatggtcgaagacgcccatcaccgagcacaaatccgtcttggcggtacctgcgctagccaaggccatcctcctgttccggccccctgccgcgacggtgtcaagattcacgcaggcccggcgggccgcatactggcccgcgagttcggcgtcgagcggagcgaagtgaaagccagcggtcctaagagtcgaatccttaaggaaaacgtcttggtcttcgtctgcaccaaatccgacggcgagggcgccaccggcggagccggcatcccgccaaccccagaagtcgaccgaactaagttctgtaaagtggaagaagtggcgatgcaccgcctgatacaggccggcaccctttttttggaaaaagacaccccgcccgaccagccctcgggatcgtctactggtaactcaccgttactgtggccgtccccttga

SEQ ID NO: 327871 - DNA, 1092 bp, Pseudomonas aeruginosa
atgcaccatcgtctcaccgaagagcgcgcgctattccgtttcctgccacctgcctggcgctgcgtttcggccaggctgcgcgtggccgcgctggtcttcgctgtagcgtcgttctccccgctggcgcacgcggggttgtgcggcatgatgccgaactaccaggaggggcccgacatagacatcagcatggggcgcatctcggttccgtcgggcgtggcggtgggggaggttttccatacccgggaattccccattggccgaagctactacgccattgtttcctgtaaggcgacgggtgactatacagactggcgtacgcagggcagcgtgacgagtttcgccaatgtatacacgaccaatatcgaaggcgtaggcatgcgcacgagttgggtgccggcagggtccaccacccactactacgctggggaacgtacctcctggcggttcggtatggccggggtcagcggcgtgccgggggggacgagcgcgattacggtatcgggtttggttgtcgtcgaactggtgaaaatcggcgccaaggtcggttccggagccctagccggcggccgctatacgtggaacgtcgcgcagtcggcgtatccattcaactccggcactttcctgagtacccacatcgccggcggcggcagccagattgtgcccgaaacgggaacttgctccattgggaaccagcaggtccccatggacccggtccccgtggggcgcttccacgggatgggcagcactagtggcgagacttctttccctgtgcagttttcctgcagcggcgccaatggtgcggtgaccctgaccctggacgccgacaggctgaacgccgatggcagcctgggtttgctcaagccccagagtggtggaggcagcgcctcctgcatcgctctgcagatacttgatggcggcaccaggcagcccgtggtgctcgggaaaaagaacgtggttggcacagtgctgagtacctcgaccagtttcaacctaccttacttggtgcggtactaccagaacgggggcggcagtagctgcgtttctcctgggctggtcaaggggacggccacagtaacggtgagttaccagtag

SEQ ID NO: 327872 - DNA, 2475 bp, Pseudomonas aeruginosa
atgacccgcgacgagttttccttgcccagggccgccatgcagagtgattaccaggacgctgagttcaacagcgccttcttggtcggcaatgccaagaatacggatatgtcgcgttaccagaagggtaatccggtattgcccgggcgttatgacctagatatctacataaacggcaagcaggcattgcgcaccaaggtggagttcgtcagggtggatgacggcaacatcgcccaggcgtgcctcacctatgaaggactgcggcgaataggcatcgatagccaacagatccaagcttatggcggttgccggccgctgactgccgtcatacccgatgcgaagtcctatgccgatatctcgcagcagcggctctaccttagggttccacaggccagcctgcggcgcacgccccgcggctatgtcgattcgcaatactgggacgcgggaatcaccgcggccaagttcgactacaacctgagctacttcggcagcgaccacgacgatttcggcagcaatgactccgcctacctgggcttgcgcagtgccatgaatttcggcctttggcagtttcggcacaatgcgaacgtcaactggagcaatggcagcaagacccactggaacaagatctccacctatctccagcgaccgttgccaggcatcaagagcctgttgaccgcgggcgagatcaataccaagggcgagggcttcgacagcgtcgcggtgcgtggcctgagcctgtcgtccgacgagcgcatgtacccggactcgcagatcggcttcgcccccacggtccgcagctttgcccgcaccaatgcgcgcgtcgaggtttggcagaacgacatcaagctctaccagaccacggtcacgccggggaatttcgtgatagatgacctgtacccgaccggctatggcggcgacctgaatgtggtggtcacggaggccgatggcagcgttcgccgtttcgacgtgccctacgcatcggtgacgaacctgctgcgccccgggcggaacaagtacgacctggtcatggggcgcctgtacaaccagagcctggccgatgacagccacgtgctgcaggggacctggtaccacggggtcgacaactacctgacgggatatggcggccttcaggcaagcgatgggttccatgccgtgctcgtcggtgccggcctgaacacctccatcggtgccttctcgctggatgcgatcacggagaggaccgatatcggcagcggccacggctcgtccagggggcacagcgtcaagctcgcctacagcaagctggtgagcgaaactcggaccaacgtcacgctggctgcctatcgctattcgtcatcggagtacctgacgctgtcccaggccgtggatgcgcgcgagcgtgccagggatacccgcttcgaggatgaatggttctcctacaacagcgagcgcaaccgcttcgatatcagcgtggaccagccggtgggcgagtatggctctctgttcctcaccggctccaccagcaagtcctggggcgacggcggttccagccggcaattcgaggtgggcttcaatggctatctgggcgaggttagctacagcatctccgccagccgtaacaacgacgaattcttcgattcgagcacccagtatttcctgagcgtcaacataccgctgggccatggggccaagtcgcccacgctgagctcccagtacaccaccggtcggggacgtggcagtacgttgcgctcctatctgagtggcgtggccgacgatgccgggcggctcagctatggggtaacgggggccacggataccaatacctccagttccagcagcgtgaatgcacagtatcgcggcaaccgcaccaccgtacggggctcgtacgaacagggcagtgactacaagtcgttttccatgggcagcgatggaaccctgctggtacatggcgatggcctgacgctggcgccgaacaccggcgagaccatcgcgctggtctcggcgccgggcggcgagggtgcaaggatcgcgggtctgtccggcatggagctcgatggcgatggctatgggttgatgccctacctctccccgtatcggctgaataccgtcaacctggaccccaagggcagttcgatgagtgtcgccttccagaccacttcccagcaggtcgccccctatgccggggcgatagtcaaggtggactttccgacgcgcgtcggtcagtcggcggtcatccacataaccaatggcagcagtctggagttgccattcggcgccgacgtgcaggacggccaaggcaatgtcgtcggggttgtcggccagggcaataacgtgttcgtccagggcatagccgacagcggcacgctgatggtgggactggatggcggttcaaactgccaggtgtcctaccggttgggtaaggccgcagccaaccaggccttgcagaaggtcgaagcgccgtgccagcccgtccggaacctcggtcttagcagccgatga

SEQ ID NO: 327873 - DNA, 771 bp, Pseudomonas aeruginosa
gtgtttatgcaaatagccatcctgtttatgcgaatagccatcctgttgaccagtctgctggtttctcatttcctggcattcgaggcctgcgccaatgtcgtactgggcgggacccggctcatctatcccgagcgcgagctcgaggtgacgattccacttgcgaacaaggggatagcgccagccctggtgcagtcctggatggatgatggggtcgcggactctacgccggagaacagccatgcgccgtttctcgtcatgccgccgatcgtgcgtgtggaaccccagcagtcgcagacgctgcgcatcttggtcaatggcgtttcgctgccgcgggatcatgaatcgctgttctggctgaatgtgctcgagattcccccggtctccccggagtcgaagggcaagagcaacctactgctggccatccagagccggataaaagtcttctaccggccctcgggcatttccggttcgctgcacgatgcggcacaaggcctgacctggcgtgtccagactgaaaccggcatgcagtacctcgtctgcaacaacgcatcaccattttatatttcctttggggatattcatctattccgtgcggggaaaactttcgtgaatgacgatggaacccgcatggttgctcccggcgcgcgggagaagttcgctctgaaaatgaagggcagtgcatcggccggcaagaaagaaggcgaaatcgagttcacctacataaacgactatggcgccctgaagacaatcagcaaggccgtggagccatga

SEQ ID NO: 327874 - DNA, 558 bp, Pseudomonas aeruginosa
atgaaaaaatgtaatgttctattcgtggctgccctggccggaaatatgatcggactcttcatgacatcgagcgccgccctggctgctgagtccggcactattaccttcaatggcaaggtgacggacgaaacctgtgaggtcaccaccggttctaatggtgatttcaccgtggatctggcatcggcgaagacgtccgcactgacccaggctggggatacagcagtacccctgaacttccgtatcgcggtgaacaattgttcgtctgctgttcagaaagtacgtacgcagtttctctatgacgccagtctggttgaactgagttcgggcgtgctgaaaaaccagcagagcggggctacggcagccacgcaagtcgctctgcaactcttcaatcctgatgacagcagtgtcatcaagcccggtgatgccggggcctccaaaagtttccctgtcaccaatggcgtggccgagatgatatatggcgtccagtactacgctaccggacaagctactgcgggtctggtcaagagccaggtcaagtaccagttgagctacaactga

SEQ ID NO: 327875 - DNA, 906 bp, Pseudomonas aeruginosa
atgagcgctatgatcgaatacccagaaaagccggagttccaccgtatcgatactcctttcgatctcgaaagcggggtgactctgctcacgtcgagcgagggtatgggctggacgggcgtctacgcccaggtgactcaagaaggtccgcgcgagtccctgtaccaggacacccgtgacatctggttcgtgttgccgctgcaaccgctgaaagtgaaccttcgtatcggcctgcgacagcagcaggggctgctgccgcccgacagaatcgtgctgacgagtgccgaggagtcggcgcgtgtccagttgggcaacaagacgcggctgctgcatgtgtttatccgatgcgccatattcgaggaggtagtccgcgacatgatcgattcccgcagacatgtccgagggccgatcgcttccatgttcggcatacgtgatcgtggcctgagcatgatgttgcgtagcatcaagctggccctggattatcccacggacgtctcggccatgaaggtcgaatacctggcgcgagctatcgccatccatgccctcagtcacaatgatgactgggcgatgcgagaccggcagcgcctgagtagccagcgtttcaaggcggtcattgagtacctgcaggataacctcggccatacgttacgcctggaggatctggccgcgatcgccaatctcggacgcaccgccttcatccgccagttcaaggccagcacagggcagacgccgcaccagtacgtgatgctcgtgcgggtgcgcagggcctgtgagatgctcgagcaaacccgcttgcccctcagcgacgtcgcctacgcctgcggcttcgccgaccaggcgcacatgagcaccagtttcaagcgcctggtcggggtcacgccgtcccgctaccgcagagagtttttctga

SEQ ID NO: 327876 - DNA, 1218 bp, Pseudomonas aeruginosa
atgacgatggctgcctgttttaagtccgcctgcctctcccgcgaatgcttagtggggcaacgctgcactcggcagatcacgcatgtcttcgtcttgttgcagaactacacccatctatacgacgcctatggtgaggctctggtcaaggctgtaatgcaggcacttttctttcggctgagcgcaagaggggaactggtagccgtgactggccaggtcttcttgctggccatcgcacacgacgctgcttcgtccgcccccttgctggaagacctattgctggcctgcacctgcgagcccgtcgaatatcaggacatggaggtgctgccggtggtttcggtggggttcgcccgtatcgattccagcgccgaggcgttcgctcacgtcgagcgttgcggtcccggtgacatcggatggctggcgccggtgcaatactgcttcgcttggcgccgggattatcggcgcgacatggcgctggccctggagttcgtccagcacctgaagcaggggcgggtgttcctgatcttccaggctgtccgcagcgttgcaccaaggcagggggaactctatcgggagtcgctgctgcgcgtcgttgcgcctgcggggcacagggaacgagatacctccgaattcatcgctgttctggagcgcttggggttggttcgcctgcttgatcactgtgtggtccgtgcggtgatcgagttgctggagtcgaaccctgaactgcgcctgggttgcaacatctcgatgcagagcgcggtaggcgacgcctggtggggcgccgccctcagttcgttggggcgcgataggcaagtggcgcagcgcctgacggtcgaactgaccgaaagcgcttctgtcggtaccggggaggaagtgctcgagttcgtcaaccgcttgtgcgcactgggctgccacctggcggtcgacgacttcggcgctggcttcagcggtatggggttgctgctggccgcgcagttcgaggtcgtcaagctggaccggcgttttctccaggctgcccgcttggggccggctggcagcgggatgttcgacagcgcggtgcagttgtgcagccggctcgcaccacaggtggtggtcgagggcgtggagcatctcgaggacctagtgcgcctggaggggcagccggtgccgctatgggggcagggtttttttgtgggcgtaccggggcaggccgtgcgtttgagcttgcccgagccagggtag

SEQ ID NO: 327877 - DNA, 1491 bp, Pseudomonas aeruginosa
atgactcttatcttcgaaaaccttttagaggatggcttttcatgctcacctgatgctcgcttcatgttggaggtcatagctagggattcagggtactggcgagaaccagcgaatgagctgagcgtgaagccgttttcgaagaagctccatgtggcggagagagtcgtctctgccgcgttgaatgagctagtcgaagctggtgccctggagcgtgatgctccctcccgagtaggaagcggaggaagggcatcagttgcctacaagctgtcctcgtgtcatgtggacgcattggaggatggtttctacccccaacatgctgagttgttgcaagtactgttctcgggcgcggacatggtttttcctgtgctcggacgtgagcctgatgagggtgacgaacaagacgaagaggacgaagaggacgagcaagacgaacaaggtgagcaagacgaaaaaggaggggagaagatggccgcggcgaagcctaaaaagaagaggcacccgccgccaggtggccgtgggcggctgagcatccgtaatcgtctgctttttgcggttttgctctctcgctctgatcagtttggtgaggtacagattggatttcctgaactggcccagctcacgggcatgaagcctacgcaagttaaaaatcgcctctttcgcctgatgcaccttgggctgattcgtcgttatgtggcggggctttcgagcaaggttttcgccttgcgcaaagtcaacagcacctacttcctgaatatcgatgccctcgggccgcagggaagtattgccatacacatcgcacgtgacccggaggctaagaggtttatccatgctgaccttcttcaaggcgattgtgcgaaagccatgaggggcgagtccgacggagtaaggacacccagcagtcttctccagctcttggctgggcaggaatggggagtcttttccctgttccaacatttgctctccaggtacgcctctcatctgctatctcgccactggcaagatttgggttctggggtgcagattgaagacgcggagctgatggcgtctattaagaaggacttcatcagggagccacagcctggggcggtaagtgaaaccgatattgagtcagaggagggagccagcagcgaagctacgagtaagctgaaagatggggtgggtggtgatgccgagcaaacctgcgaatgcatctactcaatggcgatagatattgcacgtgagtaccgagcgcgattttgccaggctaactgggtagatttcgagtcggcggatattcggattcttccggcgaagcgacggaccggatacagggccattacgcttatgttccggccggcgcttgtggacctcccccgcttctcggtgtttctcgagggccctcgggagagttcggaaatatggtcggcgaatgatgagaccgaaataaccctgaagagtcgattgaagttcgggttggccaccttgccgcccaaagcgagaaaggttctatag

SEQ ID NO: 327878 - DNA, 669 bp, Pseudomonas aeruginosa
atgtcagagaatgagaagccgcttaagtggctgcgcaggcaggatggagagtgggaatgggcagccgattacctggagcaacggctcaatgccgagtacataaagtcgatagcgcccaatccgatcaatcgactgggaacctacgaaaacgtagtttctgccatcagaaaactccgaaaagataaccccgagcttgtcatcaggctgcagggggcggtacggcaacgtcggtatcgatccgatagcaacggcagaaaaccgcttacgttcacccttggcaaagaaaccatcactaggttgaagcatctcgccaagcggcacgagacaagcgaaacggcaataatcacctcgcttatagatcaggcagggcaagcagccgaagccgagaagaactacgaaaagcagctcaaggaatcaattttaagagagcgaaaaattgccggccaggtaacggcgtccctgaggactcaacgggacgaagcactgaaacatgcagagcgctacatgaaactgctaacccgctgggaactaatgtggcccggcgaaaccccatcagaagccagcgatgaagagatagccaagctggttgagccaaaaatgaaggacctcaaagacgctctaaaatacatcgcctccaaagacagcctgaccactgagcgcccaacctaa

SEQ ID NO: 327879 - DNA, 279 bp, Pseudomonas aeruginosa
atgagcaccctgaatctttccaagaccgaacgcattgacgttcgcgccagcacgccggtcaagcaactgctgcaggaagccgcacgcgcctgccacaagaacgtcagcgagttcctgctcgacgcgggcgtgacggcggccgcgcagacgctggcggatcgtcgccagttcgtgctggacgacacacagtggcaggccttccaggaggcgctggaccgcccggtgcaaagcaagccgcgtctgaagaagttgctgcgtgaacctggggtgctggattga

SEQ ID NO: 327880 - DNA, 504 bp, Pseudomonas aeruginosa
ttgagcaatgactactcgcccgttcgcaagctgactgcaacggatcaggtcgatgcgttcgactgcggccaggccgcgctgaaccagttcctgcagcgctacgcgctcgtcaaccagaaggccaacagcgcgcagacctatgtctgctgccagggtgacgtggtggtcggcttctacagcctagccgttggtagcgtcgatccggaagccgcgccgtcgagagtgatgaaggggctggcgcgctacccggtgccggtcatgatcctggcccggctcgccgtggacaaggagcatcagcgtaaaggtctgggccaggccttgctcaaggatgcactgctgcgcaccgcacaggccgccgacattgcgggtatccgctgcctgttggtccatgccaaggacgacgcagcacggcagtggtacgaatcgtgggaattcgagcccagcccgactgatccgtaccatctgttcctgatgctcaaggatctcaaaggcatgttgagctga

SEQ ID NO: 327881 - DNA, 432 bp, Pseudomonas aeruginosa
atgagcgacatccgcatccagaaaaccggcgagccggacatcctgcagaccagcgacggcaggctgaccctgtcggtgccgattcagatcaagcggcgcagtggccgcaagctggtcaccttgccgaacggagaaaccgcgccggtcagaccgtgggacgttgcaccgacctccattcaattggcgctggccaggggtcaccgctggctggcgatgctggaatcgggggaagcgaagtccttgaaggagatcgccacgcgggaggggatcgacaacagctacgtcagccggatggtcaacctgaccacgctggcacccgacatcgtggcggccatcctggacgacgaattgccgaaccacgtcacgctgtttgatctggcggttgatccgccagcgctgtgggatgagcagcgggagagagtcggactctga

SEQ ID NO: 327882 - DNA, 1356 bp, Pseudomonas aeruginosa
atgagcgaagtcttgaagcgccgcatgcgctgcgcggtctacacgcgcaaatccaccgatgaagggctggaccaggaatacaactccatcgatgctcagcgcgatgccggtcacgcctacatcgccagccagcgcgcggagggttggattccggtcgccgacgattacgatgatcccgccttttctggcggcaacatggagcgcccggcgctccagcgcatgatggcggacatcgaagctggcaagattgacgtggtcgtcatctacaagatcgaccgcctgacgcgtagcctggcggacttctccaagatggtcgaggtgttcgagcgctacggcgtgtcgttcgtgtcggtcacccagcagttcaatacgacgacctcgatgggccggttgatgctgaacatcctgctctccttcgcgcagttcgagcgcgaggtcactggcgagcgcatccgcgacaagatcgccgccagcaagcgcaagggcatgtggatgggcggcgtgccgccgctgggctacgacgtcgagaaccggcggttggtgcccaacgagcgtgaggccaagctgatccggcacatcttccagcgcttcgtcgaactcgggtccagcaccgcactggttaaagagctaaaactggatggcgtgacgtcgaaggcgtggaccacgcaagacggtaagacccgcgatggcaggccgatcgacaagggtcacatctacaagctcctaagcaaccgaacctaccttggcgagttgcggcacaaggaccagtggtaccaggccgagcatccgcccatcatcagccgcgaactgtgggacagcgtccacgcgatcctcgataccaacggccgggtgcggggcaacacgacgcgggccaaggttccctatctactcaagggcatcgtgttcggcaacgacggccgtgcgctgtcgccgtggcacaccaccaagaagaatggccgacgctaccgttactacgtgccccagcgcgacgccaaggaacacgcgggcgcctcaggcctgccgcgcttgccggccgccgaactcgagtcggcggtgctcgaccaactgcgcgcgatcctgcgtgccccgaatctactcggcgacatgctgccgcaggcgatcaagctcgatccaaccttggacgaggcgaagatcaccgtggccatgacccgactcgacgcgatttgggatcaactgttcccggcggagcagacccggatcgtgaaattgctggtcgagaaggtgatcgtgtcgcccaatgacctcgaagtgcgactgcgcgccaacggcatcgaacgcctggtgctggaactgcgtcccgagccggtcgcgcaacaagcggaggccctggcatga

SEQ ID NO: 327883 - DNA, 507 bp, Pseudomonas aeruginosa
atgaacacgcaaacaccatcattttccacgccgccatcggtggcggcgcagatcgccaggttgcccgagatgccgatggcagagatccgggcactctggcagaaactggtcggtggcgacacgcccacccacaaccgccagttcctcgaacgccggattgcctaccggctgcaggagctggagttccgcaaggtcgatgccaacctgctggatcgcaaccagcgtcgtatcgaatctctggtcgaaaccggcaaggtgaaaaagcgcgaccgcgactaccgtccggccgcaggcacggtgctggtccgtgaatacaaaggcgtcgagtaccgcgtgatcgccaccgccgacggccaatatgacttccagggccgcatgtacccgagcctctcgatgatcgcccgcgaaatcacaggcatgcgctggtccgggccactgttctttggactcaggccaccgtccaacgccaaggccaagcccgccaccaagaagagaggtggtcgatga

SEQ ID NO: 327884 - DNA, 219 bp, Pseudomonas aeruginosa
atgcatcaaatcaaccatctaccaccggagcggatgacgccggaacagcgtcgccacgagatcgcgtcgttgctggccaatggcctggcgcgcctgcggctcaccggcacagaacagtccgcaaccagggcagaagcgagcgagtttgagcttggcttctctggcagccagcgcgttcatacagaccccgtcaacaagacaactacggagtcgaaatga

SEQ ID NO: 327885 - DNA, 1215 bp, Pseudomonas aeruginosa
atgagcgcccacaagtggcaattcgtcccccgtttccgccggcatgcgtttggctggcggtccgacacgccggtgcagcggatcaaggaagccatcacggagatcaagcaggtcgcccgcaaggagcccgtgctcgccgctgagggagccatcatcttgctggaaaaactctccccggcgctggaacaggtggacagttcatcgggcgcactgggttcggccgtcaacaagaccatcgataccctggtgcccatcatcgtcaaggccgacgtcgagccgaagctgcgacaacgctggctcgaacgcttgtggcaagcgctgcaggatgatgagatgccctacatcgaactgctcggcgattactggggcgagttgtgcgtgacgccggagctggcgtcgcactgggccgatgagtttctacctgtcgtcgagagcgtgtggagcccgaatgcatcggggcacggattcttcaagggcaccagcgcttgcctggcgtcaatgtacgcggcgggtcgctaccaggagttgctggcactgctcgacaaggcacggttcaagtggtggcatgatcggcgttggggtgtaaaagcgttgtcggcgatgggcaggaaggccgaggcgatccgatacgccgaggagtcgcgcggtctcaatgatcctggctggcagatcgcccaggcctgcgaggagatcctattgtcctccggtttgctagacgaggcctaccgccgctatgccatcgaggcgaatcagggcacaacgaacctggcgacgtttcgcgccatcgccaagaagtatccccacaagcagccggaagaaattctgcgtgacctggtgtccagtacacccggtgccgagggcaagtggttcgcggcagcgaaggatgcgggattgttcaatgtggcgatcgaactggccacgcgcagcccgaccgatccgcgcacgctgacgcgcgctgcccgtgactatgccgagaagcagcccgcattcgcgcttggcgcaggtctcgccgcgttgcgctggatctctctcggccatggctacgacatcatcggcgctgatgtgctcgatgcttattcggcagtcacgcaggcggcggagaacgctgggttgccaacccagcaggtcaacgagcagatccgggacatgatcgccagcaaccagccaggcaattcgttgatgaagaccatcctcgcccgtcatctggcgagctaa

SEQ ID NO: 327886 - DNA, 912 bp, Pseudomonas aeruginosa
atgacggacgcgaaaaagcccatggccgaggccaaccgcatctcgtccatgctcaacacggttctcggtgcggatcgctttccggtcaaggttgacgaactggccttggagtattcccgccagtgccttgcagactcgccgatcgacacggttcggggtgaggatctcgacggcttcgatggcctgttgaaggccaataaggcgcgttcgaagtggctggtcctctacaacagcgccaccccgtcggaaggccgcaagcgcttcacgatcgcgcatgagttcggccactacatcctgcaccgccatcagcaggacctgttcgaatgcggcgacgacgacatcgagacgggtgacaacaacgagcgcgacatcgaggccgaggcggatctgttcgcctcgaccttgctgatgccgctggacgactttcggcgccaagtggatggacagccgatcagcttcgatctgctcggccactgcgccgaccgctatggggtatcgctgacagccgctgctctgcgctggaccgagatcgcacccaggcgcgccgtactggtggccagccgcgacgatcacatgctctgggccaagtcgaacaaggcggcgctcaggtctggtgcctactttgcgacgcgcaagaacaccatcgagctgccgcacgatgcgctggcgcacagctacaacggctttgacatatgcgacaaccggacggggcgtgcccagtcctggtttgcccgtgaacccgccagcatgccggtcacggagatgacgcgcgtcgcgggtcagtacgactacacgctgaccttgctactgctgcccgaggccgagtggcagggcgtgcgccacgacgatgatgaaccggaggaagacacttacgaccgcttcatccgcaacggccagtacccggtgcgatag

SEQ ID NO: 327887 - DNA, 402 bp, Pseudomonas aeruginosa
atgggtttgtcaagcaggtacgaaagcgttcggcgtagtggtattattttcggattgaagccaacaaatgaggaaatgccggtgccatcgcccctgggggacaagatccgcgcactgcggaaacagaagaagctcagcctggaacagttggccgaactgaccgactccagcaagagctacatctgggaactggaaaacaaagacgacccgaaaccatcagccgagaagatcggcaagatcgctgccgtcctcgaggtcacgacggagttcctgctgaccgagtcggcaaccaccccggacgaggaagtgctcgatgaggccttcttccgtaagtacaaaaacatgtccgagccggacaagaagaagatccgcaagatcctcgatgcctgggaagatgaatga

SEQ ID NO: 327888 - DNA, 1230 bp, Pseudomonas aeruginosa
atgaacgatgcagaaaacctgagcaagctcctgggccacctgccaccggtggtgttccgtgaatttatggtggatgaattcggcctggccatgccggatgtggacgccaagacgccgaagaaagaacagcgcgaacagatggaggccgtgctgtctgcccttggtgtgggcgagcggcaacggatcgaagaagtggccgaacggatcgtgctgctgtcggatggcgccggccaggacgtcatcgacggcttcaaggatgacatcttcgatgacgccgctcgggaagccttcgccgcgattccgaaccagtacgagcgggcgctgtggctgcacatccatgaacccgtgatcttcgaggaagccctcaacgcccgacaggccgacgtattccggcaaaacgcctcctgctactccggattcatggcacctgccaacctggcggtactcgacgacgcagcggccaaggcggcgtttcaccagaccgtcgcccagcaactcgggtgctccgatgacgcggtcgcgatccagatcttcaagcgcctccggcccgatacacagaccggcgaggacgtggatctgtaccagatcagcatccatcacaaccgcccaccggaaatcatcgactgcgtgcaggccagcgaattggtgccccaggaggtgatccgggcggtgtcttcgcacatcacttacgagccggccaatgggcacctggaggtgctgtcgaaagatacggcgggccgggaagcgttggcccgcatcgtggctgacaccctgctgcaatcgcccatcaccggcgagaagatcccgctcaagcaatacgactaccagagcttggcggcgccgcgtaatttcgacttgtccggcgagccggtggcgttcgtcaaggtcgtcgagctcggctacgccgccggcaatggccggtcgctcctggtgaagatctggaccaaggacgtcgatgacatctacgcggccgcccggtcgttgattggccccgccttcgacttccgcgatcaccacctcaactacgccaggctgtccatcaagctgaaaaaggtcggcaaggaccgcgcgcggacgattaccgtgatcctgcgcgacgacaacaagtgcaacatcaagaccaagcgggaaaaggatcgggcgctgtgcgaccgactgctggccaaatggcatctggtgaaggagatcggccatgtcgtcgaagcccctgccgacacagtcgctgcttga

SEQ ID NO: 327889 - DNA, 1005 bp, Pseudomonas aeruginosa
atgtcgtcgaagcccctgccgacacagtcgctgcttgatctgatcgacctgttcgaaaagtctgggcagccgattgccgacggcgacggacagcggctgcacggtgttcccggctgggagctatcacgcaaagcaactctttctgaccgtgatttggctgcctggaccgaatgtgtcggttatgccggttgctacccggcaccctgcggcgacgagcacatcctggtggacatcgaggaggactctgatccagggttgtaccggtaccgttgcccggaaacctttcgggtgaaacacattcctgccgagacagctgtcgtccgtgcggtcactgcgacgaagtttctgaactacctggcagatcttctggatatcccgcaggcgctacgacgcggcatcagtaccgccgccatcgacggtgtgctctggcaccttgggaggatgcgcatcggacttcttcacaccgatgtttggctggcccgagggctggcatcgcgcatcgaaacggtattccagcattttcagcaagcgactcttcctgataccggcatcctctttagcaccgggccagccttggctgcgatgattcaaactcccaggaactaccgggtcattccattggccagtgtgttgacaccacacagcgcaaccccggtggtagacaccgaactgatccgtcgtctgttggtcgccgctccaggggaaacagttgatcacacgcctgcggtgcggttcgatgaaaccaccaacaccctgtacatcaccacacgttcggttgcgccttggactatcactggccccaagcaaattgcagtggtgaggtatctggtcgagcagttccacaaggggcggcatcgcgtttccgccggagatatcttggtcgcggctcacgggtcgcgggaggccgcgcgcggtaagcgggttccgagcatcttcagtggcaacagtcagtggctggattacatcgagcatgacgatgctgggtacggcatcaagctggaatga

SEQ ID NO: 327890 - DNA, 213 bp, Pseudomonas aeruginosa
gtgagtgtcaaacatctgaatcaaggccaactggccgaacgctggggagtcagcgaagccacgcttgagcgctggcgttccgagggaatcggcccggtatttttgaagctgcaaggccgcgtcgcctatcgcatcgaggacatcgaagcctacgaggccgagagcctgcgcaagagcacctccgaacgcgtcaatgcgggaggtgcactgtga

SEQ ID NO: 327891 - DNA, 471 bp, Pseudomonas aeruginosa
gtgaaccgtatctcccccgacgaagtcctgaccaccccagccggcgagctcgccgcccttggcagcgagtcgctgttccagctcaagaacgacgcggctgattttctggctgctgccaaggcgatcgtcgagcacgtcgatcgcgcactggacctcaagtacgccgaccgcgcccaccagctccgcctggcagcaggcaaggacaccggcggcgtccatttcgacgacgggcatgtccgcatcaccgccgatctgcccaagaaagtcgactgggatcagaagcggctcgccgagatcacccagcgcatcgccgccaacggtgacgacccgtccgagtacgtggagatcagctaccggatctcggaaaccaagttcaacgcgtggcccgagtcgctcaaaagcgccttcgcgccggcacgcaccctcaagaccggcaagccgggctttcgtctcgctctgcttcaggagtaa

SEQ ID NO: 327892 - DNA, 372 bp, Pseudomonas aeruginosa
atgacaaccaacgaagtgaagttgcgcgagccgcaggcgagaggtcgcgaagcggccggcaaaaccaaacctacgctgctcgaactgctgcgcaagcagccggaaatgtatctccgtgatctgccggaaaacatccgcatcccggcgctggacggcaatcgctccgacgaagtcgtgcgtcgcctcgaagacgccaccatcgatgacctggccttcgcgatccagggcatggagtcggagtcccgtctgatccatcgccgtctgggcggtctgcgcgacctgtacgaaatggcccgcaagcgcggcgcactcggcgtgaccaccatcgctgacgcgttcgccaacatcagcaccgaggaggccggcaaatga

SEQ ID NO: 327893 - DNA, 888 bp, Pseudomonas aeruginosa
atgagcctccccatcattactgcagaccagcgcctggccgagcgccgtggcgtgaaaggcgtgctcgtcggcaagagcggcatcggcaaaacgtcacagctgtggacgctgaaacccactgccacgcttttcttcgaccttgaagctggagatctggctgtcgagggctgggccggcgacacgatccgtccgcgcacctggcaggagtgtcgtgacttcgcggtgtacatcggcggaccgaacccggcgctgcgcgacgaccaaccgttcagccaagcccacttcgatgccgtgtgtgcgcgcttcggcgatccagccgtgctggacaagtacgacaccgtgttcgtcgactccatcaccgtggccggacgcctttgcctgcaatggtgcaaaggccagccccaggcctactccgagaagaccggcaaacccgacagtcggggtgcgtatgggctgatgggccaggaaatgatcgcctggctgacccacctgcagcacacgcgcggcaagaacgtctggttcgtcggcatcctcgacgagcgcctcgacgatttcaatcgccgggtgttctcgctgcagatcgacggctccaagaccggcctggaactgcccggcatcgtcgatgaggttgtcaccctggccgagctgaaggccgatgacggcgccagctaccgcgcattcgtctgccacacgctgaacgcatggggataccccgccaaggaccgctccgggcggctcgatccgatcgaagaaccgcatctcggtcggttgatggaaaagatcgccggccctgccaggcccgccgccgagcgactcgacttcgcgcgccccgcgccatctgccgcgcctgtccctaacaccgaatccacttccactcaggagtcctaa

SEQ ID NO: 327894 - DNA, 603 bp, Pseudomonas aeruginosa
atgacctatttcgatttcaattccgcttccgaacagacctctttcgacctgatcccgaagggcacgctggtgcgcgtccgcatgaccatcaagccgggtggcttcgatgatccgtcgcaaggctggaccggcggctacgccactcgcaacgccaacaccggctcggtgtacctgaactgcgagttcgttgtgatggagggcgagttcgcccgtcgcaagatgtggtctctgatcggcctgcacagcccgaagggccctgagtgggccaacatgggccgcaccttcgtcaaggcgatcctgaactccgcgcgcggcgttcaccccggcgacaacagtcctgctgcgcaaaacgcgcgccgcatcagcgggtttgccgacctcgacggcatcgagtttctcggcaaggtcgactgggacaaagaccagaacggccaggacaagagcgttatcaaggccgcgatcacgcccgaccacaaggactacgccgccctcatgggcggggccgcaaagcctgcggtgtcaggggccgccaacgggtcgaacgcgtatgcccaggctacgggacgtgcctccgtgccgggtcgcccgagctgggcacagtaa

SEQ ID NO: 327895 - DNA, 1677 bp, Pseudomonas aeruginosa
atgatgcttcgcccccgccaagccctgttggtcgagcgctccctggcggctctcgcccaacacggcaacacgctgtctgttggccccaccgggtcgggcaagaccatcatgctgtcggcggtggccggcagcctgttggccgagccagatgccaaagcctgcatcctcgcccaccgcgacgaactgactggccagaacctgaccaaattcgcacgggtgaatccgggcatcagcacctccgtgtttgatgccaaggacaaatcctggtcagggcgcgccacgttcgcgatggtgcaaacgctgtcgcgtgacaaccatctcgccgcgataccagcgctcgatctgctggtgatcgatgaggcacaccatgcggcatcggcgtcttaccgccgtgtgatcgatcgggtgctggacaagagcccgaacgctcagatcttcggcgtcaccgcgacacctgcccgcagcgatggcaagggactgcgggaggttttcagcaacgtcgcggaccaaatcacgctgggcgagttgattgcctccggccacctcgtgccaccccgcacctttgtcatcgatgtcggcgcccaggaacaactgacgcgagttcgtcgcacggccaccgacttcgacatgacggaagtcgaggccattctgaacaagacgcccatcaccgatgccgtgatccgtcattggcgggagaaggctggcgaccgcaagacgatcgtgttctgctcgactgttgcccacgccgagtgcgtgtgccaggcatttcacgatgccggtgtgaccgccgtgatcgtgcacggcgatctgtccgatacggagcgcaaggcacgccttgccgagtacgaatccggcgccgcacaggtggtcgtcaatgtggccgttctcacggagggctacgacttcacgcccacgtcgtgtgtcgttctgctgcgacccagctcgcacaagtcgacgctgacccagatgatcgggcgcggcctgcgcaccatcgatcctacggagcatcccggcgtcatcaagaccgactgcgtggtgctggacttcggcaccgccaccttgatgcacggttccctggaacaggacgtcaacctcgacgggcaccagcatcacggggaagcgccgaccaaggactgcccgtcctgtgaagccaccgtcccgctcggctgccgtgaatgcccgctgtgcggattcgtctgggagaacgagaccaccgaggaaggtgatgcactggccgatttcgtgatgaccgagatcgacctgctcaaacgctccaactttcgctggtgcgatctattcggctgcgacgacgcattgatggccaccggcttcaacgcctggggtggcgtgttcttcctgaatgggcgctggcacgccgtgggcggtggcaaggatctgcagccacgcttgctggccgtcggcgaccgcaccgtctgcatggccaaggccgatgactggctgaacgatcgcgagtcggcggactccgcgcacaagacccggcgctggctgaacgaaccgccgaccgcgaagcaactgcagtatctgccgcaggcgctgcgcgccgacttcggcatgacgcgctatcaggcctcggcgctgctgtccttccagttcaacaagtcgtcgatacagcgcctcgtggtggctgccaacgatgcccaccgggaggccgcgtga

SEQ ID NO: 327896 - DNA, 264 bp, Pseudomonas aeruginosa
atgatcgacccgagtgatatggaactggccgccatggcgtcctgcctggccccgctgggtgagtacgtgggctccatcggcatgcagcgaccgctggcggactacagcaaagacgaagtgctgatgctgatcgacgtggtggtgaccgcctaccaggaacacatgctcgtcgagcacgagcggatggcggagaaggaccgcgcttttcttgaggagcgactcgcccgccagggtaagtctgcttcgacgggagtgccattctga

SEQ ID NO: 327897 - DNA, 756 bp, Pseudomonas aeruginosa
atgctggacttcaatcaccgtcccaagatccatgagcagatcggcgtgctcatcgataccgcgctgagcgccgaacgtgaaacccaaccccggcgcaactatctcggtgcgtctcgcttgggcgttgcctgcgagcgggcgctgcaatacgagtatctccaaacccctgtcgatgctggaagggacatgccgggtcgcgtgttgcgcatcttcgaggtgggacacgctctcgaagagctggccattcgttggctgcgcatggccggattcgatctgtacacgcaaaaggccagcggcggtcagttcggcttttccgtcgcgggcggtcgcatccaagggcacgtcgatggtgtgctgaacggcggtcccgcagcgctaggaatgagctatccggctctgtgggagtgcaagaccatgaacgacaagtcctggcgggacacggtcaagcacggcgtcagcaaatccaaaccggtctatgccgcgcagatggccatctatcaggcctacatggaggccagcattccaggcatctccgcgaacccggcgttgttcaccgccatcaacaaggactccgaggagatctggttcgagctggtgccgttcgacggcggcctggcgcagcgtatgtccgatcgcgcggttcgggtcatcacggcaacggacagccaggaactgctgccgcgccatgcaaccacgccaacgcatgtcgagtgcaagttctgcccctggcaggaccgctgttggagttcgacatga

SEQ ID NO: 327898 - DNA, 2190 bp, Pseudomonas aeruginosa
atgatggccgacaacatcatctggctcgacttcaatgacgcgcccgagcagcgcgaagaactgacctctgacaccgatgccttgcgcgctggcttgctggatcgactcgaggctgttctccagtacctttttccgcaggggcgcatcaggggtggcaagttctacgtcggtgatgtcgatggcaacccgggcaagagtctggtggttgagctggacggaccacggcgaggcctgtggaaagacttctccaccgacgagggcggcgatgtcatcgatctgtgggcgcgctcgcagggtcgctccgctcgcagcgacttcccacgcatcgctggagagatccggcagtggctcggcattgctaccccggttggcacgccgatgcgccgtgatgttcgcagcgtgccgatggatgacctcggcgcctacaccgccaaatgggattacctgactgccgatggcgaactgatcgcctgcgtctaccgctacgacccaccgacgggcaaggaatatcgcccctgggatgttcgtgcccgcatgtggcgcgcccccgaccccaggccactctacaaccagccggccatcgcgaaagcgcgagaggtcgtcttggtcgaaggtgaaaagtgtgcgaaagcgctgatcgcccagggcattgccgccaccaccgcgatgaacggcgccaaggcaccagtcgacaagaccgactggcgtccattagccgggaaatccgtggtcatctggccggaccgggatgcccccggctgggactacgccgagagcgcagctcgcgcttgcgtgatggcgggcagcgcatacgtggccattttgctgctgccgaccgacaagccggccaagtgggatgcagcagacgctgtcgacgaaggcttcgattgcgcggcattcattgcccagtgtgaccggcggatcgtaaaggcagcggctccctctctgcccaccttcacgctcggcgaactgctcgatgacaactcgccactgccgccggatctaatcgctccacgcgtgctgacaccggcaggcatgttggtattcggcggcgcaccgaaagtcggcaagagcgacttcctgctgtcttggctggcgcacatggctgcaggcgcggtattcctcggcatgcagccaccccgtccgctgcgtgtgttctacctgcaggccgaagtccagtaccactacctgcgcgagcgcgtgaaggatgtgcgtctgccatcgcaccggctgttggatgcccgcgccaacttcgtcgccacaccgcagttgcggctggtgctcgatgacgctgggctggcgcaggtgatcccggcgatcgcacaggctttcggcggcgagcctcccgacatcatcgccatcgatccgatccgcaatgtgttcgacggcggtgacgccggtggcgagaacgacaacggcgccatgctgttcttcctgtcccagcgggtggagcgcattcgccaggcagtgaatccggacgccggcgtcatcctcgcccaccacaccaagaagctcgccaagaagcagttcgaggaggacccgttccaggcactggccggcgcgggaagtctgcgcggctactactcgaccgggatgttgttgttcaggcccgacgagaccagaacgacccgccaactgatctttgagctgcgcaacggcgcgggtatcccgcaacggcacgtcgacaagatcaacggcgagtggcgcgaggtcgataccaacgagcggctggtgatgaaggactacggcgagcgcttggatgccgagcgccgccgcaagcgcgacgcgatcctccagatcttgttcgaggaggccggcaacgggcgctgctacaccgccaaccagttcgcggagtccttcgagggcaaggctggcctgggtggcgagcgcaccatccgcgaacgcgtctccgcgctctcgacgcagggctacatcaagtatttccgcaacgcggctgactacgggctgccctccagcggccgcaccaagttcggctatctctgcgtcgaaggcatggtgctgcgcatgcctgcgggcgatgtcgacacggccaccggcgagctgccgatgcgcgagcacacggtgctccccacccactacaagtgcccgcattccggcgcctcgatgcctgtcgagaaccccgaggtgtgggtctaccacgacgaactgaacgacccggaggcctcatga

SEQ ID NO: 327899 - DNA, 342 bp, Pseudomonas aeruginosa
atgcgctatctgcgattcaagcgctggctcaccgagatcaagcagtcctgcgacgggatcgacgccgtgtacttcgaggaggtgcgccgccacgccggggtcgatgcggcacacgcctacggcggcttcatggcccacctcaccgcatggtgcgagcaccaccagatcccgtaccaaggcgttccggtgggcacgatcaagaagcacgccaccggcaagggcaacgcgaacaaggatcagatgatcagcgccgcccggttgcgtggccacgcaccggctgacgacaacgaagccgatgccattgcgctgttgcactgggccgtcgagacacaggaggtgtga

SEQ ID NO: 327900 - DNA, 213 bp, Pseudomonas aeruginosa
atgaaggttccgactcccgcctaccgctgtgccctggctcgactgcagcccgatccgcgccccgatccggagcagatcaagcgtgagggctggcgcgaccagcagatcctggtgatctcgcccgacgacgcgcggctcgactgggtcgaacgcgaactgctgcgccggatcggcgatcggctgtacggggcgaaggagcgtcgacatggctga

SEQ ID NO: 327901 - DNA, 378 bp, Pseudomonas aeruginosa
atggctgaatggacgatcgagaccgtggccgaccggttcatcgaggccgcaagaaccgcccaccgccttcctccggttcgcgtgcagggctacttcaactgctggccggcgatcaaacgcatgccatgggaaaacctcggcgcagagccaccggtctaccgctttcctcccgaccctgcggccatcgaccggatgctggagaccatgcggtgggtccagtggctggaagaggaacagcgacacctcgtctggatgcgggcacagcggtacccgtggaaagatatctgctgccgattcgcctgtgaccggaccactgcctggcgtcgttggcaggcggcactggcgatcgtggtcgagcagctgcaagcggcgaagtga

SEQ ID NO: 327902 - DNA, 1434 bp, Pseudomonas aeruginosa
ttgaatacgctcaacgtcgagtaccgcaaggtcgaggcgctgattccctacgcccgcaatccgcgcactcattccgaggcgcagatcgccaagatcgccgccagcatcgtcgagtacggctggacaaacccggtcttggtcgatggtgacaacggcatcatcgcgggccacggtcgtctggctgccgcgcgcaagctggggctggatcaggtgccggtgatcgaactggcccacctcaccaccgcacaaaagcgcgccctcgtcattgccgacaaccggctggcgctcgatgcaggctgggacgaggagatgctggcgctcgaactggcggaactctcggaaggcggatacgaactggcgctgaccggcttcgagaacatcgagatcgatgcgctgctggcagatgccccgtcgactgaaggtgaaccggcggcgcaggatggtgtagacgccgataaacccgatacgaccgatgacctacctgacacgccagtggtggcggtgtcgcgcgagggagatgtctgggccatcggctcgcatcggttgatctgtggcgacgccaccgacccagccgtggtcgccacgctgatgcagggtgacaccgcgcgtctgtgcttcacctcaccgccgtatggcaaccagcgcgactatacctctggtggcattggcgattgggatgctctgatgcgtggcgtattcggcaatgtgccgatgacggacgacggacaggtgctggtcaacctcggtctgatccaccgcgacaacgaagtcatcccctattgggacggctggctgtcctggatgcgtcagcaagggtggcggcgcttcgcgtggtacgtctgggatcaggggccaggcatgcccggcgactggcagggccgattggctcccagcttcgagtttgttttccacttcaatcgcagcacccgcaaacccaacaaaattgttccttgcaagcacgcgggccaggaatcgcacctgcgcgccgacgggtcgtccacagcgatgcgtggtaaggatggcgaggtcggcggctggacgcacaagggtcagccgacgcaggacacccgcatccccgattcggtgattcgcgtgatgcgccacaagggcaagatcgggcaggacatcgatcacccggctgtgttccctgtggcgttgccggagtttgccatcgcggcttacaccgattcgggtgacgtcgtgttcgagcccttcggcggcagtggcacgacgatgctggccgcgcagcgcactggccgcatttgtcgcagcgtcgagattgcgccggagtacgtggacgtggccatcaagcgctttcagcaaaaccaccccggcgtgccggtcacgctcatcgcaggctgtggaatgaaatcgggccagtccttcgacgacgtggccacagaacggctggcgaccacggaggtagaacaatga

SEQ ID NO: 327903 - DNA, 1242 bp, Pseudomonas aeruginosa
atgagcgcgtcctggttggcagacaagatcgagcagtggccgacagccaaactgctgccctatgcccgcaatgcgcggacgcactcggatgatcaggtggcgcagatcgccgcatcgattgccgagtttggcttcaccaatccgatccttgcaggcagtgacggcatcatcgtcgctgggcatggacgcttggccgctgcgcagaaacttgggcttgagatcgtgcccgtggtcgtccttgatcacctgagcccgacccagcgccgcgccttggtcatcgcagacaaccgcatcgcggagaacgctggctgggatgacgccatgttgcgcatcgagctggagtccttgcagttggaaggtttcgatctggacatcaccggcttcgacgccgacgcgctggccgaactgattgcgggcgatgagccgaacaacgaaggtcagaccgacgacgacgcggtgcccgaggtcagcgagacacccatctcgcgcccgggcgatgtctggatcatgggtcagcaccgactactgtgcggcgactcgaccgtggcagagagctacgaccggctgatgcaaggcgacgtggccgacatggtcttcaccgacccgccgtacaacgtgaactacgccaacagcgccaaggacaagatgcgcggcaaggatcgcgcgatcctcaacgacaacttgggcgatggcttctacgacttcctgttggcagcattgaagcccaccgtggcgaactgccggggcggcatctatgtggcgatgtcatccagcgagctggatgtgctgcaggccgcctttcgcgccgccggtggtaagtggtcgacgttcatcatctgggccaagaacaccttcaccctgggccgtgccgactaccagcgccagtacgaaccgatcttgtacggatggcccgagggtgcgcaacgccactggtgtggtgaccgcgatcagggcgatgtgtgggctatcaagaagccgcagaagaacgatctgcatccgacgatgaagccggtggagctggttgagcgagccatccgcaattcgagccgcccgggtaacgtggtgctcgatccgttcggaggttctggcacgacgctaattgcggccgagaagtcaggccgcatcgcgcggctgatcgaactcgatccgaagtatgtggatgtgatcgtgcgccggtgggaggacttcaccggccagacggctatccgcgaggcggcagaccaggaagtgtgcgccagttaa

SEQ ID NO: 327904 - DNA, 225 bp, Pseudomonas aeruginosa
atgaaaacgccagccaccgaacgggagcaggcgctgcgctggctgattgccaaccggcgtccggacatctccaccgaacaggccgtgcgcgtgatgtgcacggcactgccccgtgatctcaccacgatgcaaatcctgcggcgcattgccgaggaagaagaagccaagcagcccggccagccatttaactggcgcacacttcctggtctgccgcctcgcggatag

SEQ ID NO: 327905 - DNA, 363 bp, Pseudomonas aeruginosa
atgaccaccaaccagatacccaccacccaaaacgatgcctggggtttttggggcacgatgaacgaacacgccagcgccgcatggcccctggccatgaacgccatttcggacaccacccaccagcccctcgaatcggtgcgggtcttcctggacagccgccacggacgccactttgccgacgacgtccagaacggcttgtaccaaggccaagccctgctggatgcaatcaaggccgccacccaacgctggatgggttggacgattggccgccagaccagcaagcagtacggcatcccgcgcggtctgccttacctgacaggctttgtgatccactgcgaaatctgcgacgaaatggccgcctga

SEQ ID NO: 327906 - DNA, 360 bp, Pseudomonas aeruginosa
atgagcaccatgaccatcaccatcgaacgcaccccacgcactctgcagttcgcaggccaaagcctccaggtcgaagagttgagcatccgcctaccgtttgcacgcaaacctgccgacctcggcgaactgggcgggagcgaccagcacaagatctacgtcaccgagaccaaggagctcacccctgacgaattcgacgcctttgggcgcagcctgctggtgtcacgcgactggctgcgtggcaagggtggtggcactggcgacgggtatctctgcgtcgaggtcaccgcacccgggcgtccctacctctacgtcaatcccgagggtggtgactacgcccgctacgtggcccgtctcgggtga

SEQ ID NO: 327907 - DNA, 564 bp, Pseudomonas aeruginosa
atgaccaccacccaactgacccctgcccagcacgcgatcctgacccacgcggttgaacacagcagcggcaagatcgactggttccctgacaacatcaaaggcggcgcacgcaagaaggtgctcgacggacttttcaaccgcgcactgatcaccaccgatggcaccgactggcttgtcgctgtggagggctacgacgccctgggcattgcgcgccccggattgaacaagaagcgcgtcggtcaattcgaagccaatctcgaccggatcatcgccaacgctgaaggcgcgcctgcggccgcgatcgatcccgaactggaagccgtcgtaaccgccgccgaagcaacgtgggtcaagccacgcacccgcgagaacagcaagcaggccgaagtgatccggatgctgcaacgccccgagggcgcaaccatcggccagatctgcagcgccaccggttggcaggcgcacacggtgcgcggcaccttcgccggagccttcaagaaaaaacttggcctgaccatcgtctcggacaagccgcagggtggcgagcggatctaccgcatcgcatga

SEQ ID NO: 327908 - DNA, 198 bp, Pseudomonas aeruginosa
atgagcaagctcgaacaactcctgacccagatcgcgcaaaacaagctgggcatcgaaaccctggaaacccgccgctcagacagccttgatttccacgacgtggcggtctggtgcttgcgcgacgcgcttgaagccgccttcaacgcgggcatcgatcagggccgcaatgccacgcagtcggacaaggccaacacctga

SEQ ID NO: 327909 - DNA, 537 bp, Pseudomonas aeruginosa
atgggtatttcgattcgtgcctacgcacgccaccgaggggtgtccgatgcagcggtacgcaaggccatcgctgctggtcggatcacgccggaggcagacggaacgattgatgccgagcgcgtcgaccgcgagtgggcgcgcaattccgatgcaccgcgcaatggcacggccacccgcgcggtcaaggtcgccgtcccggaacccagcggtgccgcaggagacggcaccgccgcattaccagcaggcggcacgtccttgctccaagcgcggacggtcaacgaagtggtcaaggcgcaaaccaacaaagtgcgcctggcccgcctcaagggcgagctggtagatcggccgcaggccatcgcccatgttttcaagctagcgcgctccgaacgcgatgcctggctcaactggcccgcacgcatctcggcacagatggcagccaagctcggcgtcgatcctcacacgatgcacatcgccttggaggcggcggtgcgtgagcacctgcaggaactgggcgagatgcgcccgagggtggattga

SEQ ID NO: 327910 - DNA, 1962 bp, Pseudomonas aeruginosa
atggacatggactacgaaggcgctgccgagatcgaacgcgcgtggcgcgaaggactgacaccagacccgctgctcaccgtgtccgaatggtcggatcgccaccggatgctctccagcaaggcgtctgccgagcccggacgctggcgcaccagccgcacgccgtacttgaaagcgatcatggattgcctgtcgccgacctcgccggtcgaacgcgtggtgttcatgaaagcggcacagcttggcgcgaccgagatgggatcgaactggatcggctatgtgatccatcacgcacccggtccaatgatggcggtgtggccgacagtggagatggccaagcgcaactccaagcagcggatcgatccgctgatcgaggagtcgtccgcactggctgaactgattgcaccggcgcgcagccgggattcaggcaacaccatcctggcaaaggagtttcggggtggtgtgctggtgatgaccggggccaacagcgcggtcggcctgcgttcgatgccggtgcggtacctgttcctcgacgaagtggacggctacccgctggacgtcgagggcgaaggcgacgcgatctcgctggccgaagcgcgcacgcgcaccttcgcgcgacgcaagattttcattgtctcgacgccgacgatctcgggcgcaagcgccatcgagcgcgagtacgaagccagtgaccaacgtcgctacttcgtgccgtgtccgcattgctcgcatcgccagtggctgcgtttcgagcagctgcgttgggacaaagggcaaccggagaccgctgcctacatctgtgagtcatgtgacaccgcgattgccgagcatcacaaaacgtggatgctggaacacggcgagtggcgcgcgctgatcaccgatggcgcgggtaagacggctggcttccacctgtcgtcgctatacagcccggtgggctggcgttcgtggcgagagatcgccgctgcgtgggaagccgccgtcagtaaagagtcgggatcggccgccgccatcaagaccttcaagaacaccgagctaggcgaaacctgggtcgaggaaggcgaagcaccagactggcaacgactggtcgaacgccgcgaggactaccgcgtcggcagcgtgccgcaaggcggtctgcttttggtcggcgcggccgacgtgcagaaagatcgcatcgaggcgtcggtctgggcctttgggcgcggcaaggagtcctggctggttgagcaccgcgtgctgatgggtgacaccgcccgcgacacggtgtggaagcgcctcgctgaaatgctggccgagacctggacacatgcttcgggcgcatcgatgccgctggcgcgctttgcactggataccgggtttgcaacgcaggaggcctacgcctttgtgcgggcttgccgcgattcgcgtgtgatggcggtcaagggtgtgcctcgcggtgcagccttgatcggcacgccgaccgccatcgatgtctcgcagggtggcaagaagctgcgccggggcatcaaggtgtactcggtggcggtcagcatcgccaagctggagttctataacaacctgcgcaagagcgccgatgtcggagaggacggattgaccacggtgttcccggccgggtttgtccacctgcccaagatcgacgctgagttcatccagcaactctgcgcggaacaactgatcacccgccgcgaccgcaacggcttcccggtgcgtgagtggcaaaagatgcgtgagcgcaatgaggcgctcgactgctacgtctacgcccgcgcggctgcatcggcggcgggtctggatcgcttcgaggaacgtcactggcgggaactggagcgacaactggggctggccagtccgccagcccttgaaacacctactgaatcgatcaacgaggccacccaacgcggtggcctcgctgtttctggcaaccgtaacaccggtcggcgcgtgatcaaaagccgctggctgtcctga

SEQ ID NO: 327911 - DNA, 492 bp, Pseudomonas aeruginosa
atgagtcttgctacccgtatcgaaagcctggtcatccgcgtcgcgcaggagttcaacgacgtccgcgccaaggcaggcaacctggccaacctgaccaccaccgacaaatccagcctagtcgccgccatcaacgaattgaaggcggccgtcgtgtcctcggcggtgatcgacgatgcgcaggtcgctactaccagcacctattcgtccagcaagatcgtcacgctgctcgacgcgctcaaggcggaaatcctcggtggagcggacgccgcctacgacacgctggtggaaatccagcaactgctgcagaacggcaccagcggtctggacgccttgctggcggcggtgaacaaccgcgtgcgtttcgatgccgcgcagacgctgaccgccccggagcaggcgcaggcgcgcagcaacatcggcgcggtcgccgccagcgatgttggcaacaccgataccgactttgtcgcagtgttcgaaggcgcgctggtctga

SEQ ID NO: 327912 - DNA, 393 bp, Pseudomonas aeruginosa
atgagcctcgcatcgcgcatcagtgcgctggccagccgtgtcgggcttgaggtcaagaccaagatcgacgccacccaccccggcgtggcccgggcgtgggtgtgtttcggctatgtcggcacgcaggtcgtcgtgcgcgcatcgcacaacgtggccagcgtgacccggacggcggcgggtcgctaccgcgtgacctttgctgctgccatgccggacaccgactactgctggacggcactcgcccgcagcagcaccaacagcggcacgcagcgcatcgccattgtgcgatccacctccgaccagaagacctcccagtacgtcgacatcagttgcgcgacgagctcggcgtcgttttccgactcctctgaaatcaacctcacggtgttccgctga

SEQ ID NO: 327913 - DNA, 222 bp, Pseudomonas aeruginosa
atggcttacacacaagcacacctcgacgcactggaagcggcgctggtcaagggcgaaaagcgcgtgacctttggcgacaagaccgtcgagtaccgcagcgtcgatgaactccaggccgccattgcggcggtcaagcgtgacctcttcgagcaggccgtggacaccggactttggcctggcgcgccacgccagatccgggtcaccaccggcaaagggttctga

SEQ ID NO: 327914 - DNA, 1533 bp, Pseudomonas aeruginosa
atgcaatggtttgaccgaatgcgtagacgcgtcggcatgagtctgcttggcggcaccccgttctatgacggtatcggtggcggccgtcgcgcattggcgtggcaggtcggcaatcccggcgcagtcgcagcactggcgttcacccagaacgaattgcgcgccaagagccgcgatctggtacgccgcaatgcctgggctgcggcaggcgttgaagcctttgtctcgaacgccatcggcaccggcatcaagccgcagagcatgctggccgatcagcccctgcgcgaagcgatccacagtctgtggtgggactggtgtgaggaggccgatgccgccggactgaccgatttctacggactgcaggccttggcctgtcgcgccatgctcgaaggcggggaatgtctggtgcggctgcgctatcgccgcccggaggatggcctgccggtgggcttgcaactgcagttgctcgaacccgaacacctgccagccacgctaaaccaggagttggcatcgggaaacgtgatccgcgcaggtatcgagttcgacaagctcgggcggcgtgtggcttaccacctgtatcgctcccacccgggcgatggctcactggccccgatgtcgggcacgggcggcatggtgggcggactcgacacggtgcgtgtcctggccagcgaagtcatccacctgtttcgtcccttgcggcctggacagatccggggtgagccgtggctcgcccgggcgctggtcaagctcaacgaactcgaccagtacgacgacgccgagctcgtgcgcaagaaaaccgccgcgatgttcgcgggtttcatcacgcgcctgtcgcccgaggacaacctgatgggcgaaggcttgccggatgccagcggtgcggcatttgccgggctggagccgggcacgatgcagatcctggagcccggcgaggacgtgaagttcagccagcccgccgacgttggtgcgagctacgccgagttcctgcgcatgcagttccgggcggtggctgcggcgatgggcatcacctacgagatgttgaccggcgacctgacgcaggtgaattactcgtcgatcagggccgggctgctcgagtttcgccgccgctgtgaggcaatccagcacggcgtgatcgtccaccagctgtgccgcccaatctggcgtgcctggatggagcaagcgctacttgaaggcgcgctggcgctgccacagttcactgagaagaagcgcgattacttcgcggccaaatggattccacagggttggcagtgggtcgatcccaagaaggaattcgacgcgatgctgacagccattcgcgccgggctgctgtctcgctcggaagccatctcggccttcggctacgacgccgaggacatcgaccgcgagatcgccgccgacaaccagcgtgccgacgagctcggtctggtctttgactccgacccgcgccacaacaaagcgccccaaccatcggcatcgggcgctcccatgaatgcggtcgccacggtggccgtgccgcaagaccaacaggacaactga

SEQ ID NO: 327915 - DNA, 1308 bp, Pseudomonas aeruginosa
atgcaactcgttcatctggcgtcccgcctctacgggacgccgctcctcattgcgcgtcccaaactcgacgtgatcctctccgtgttgggttcccgcatcggcttgcccgatctggacatggcaatgccgctgcccatgccgcgccaaagcgccacatcgggtcaggcgggcattgccgtcatcccggtggtcggcacgctggtcagacgttcgatgggtatcgaagccgcctctggcctgatgtcctacggcgagatcgaagcccgactggacgccgcgctggccgacccacaggtggcgggcatcctgctcgatctggattcacccggcggcgaggcctcgggcgtgttcgaactggccgagcgcatccgcgcagccagcaccatcaagccgatctgggcgcacgccaacgatgccgcgtactcggcggcttttgccatcgcggcagcctgtcagcgcttgacgctgtcgcagaccgctggcgtcgggtcgattggcgtgatcgcgctacacgtcgaccagtcggtgaaggacgccaaggacggcctgaactacaccgctgtcttcgcgggcagccacaagaacgatttctccccgcacgagccactcaccccgcaggccgccaccgcgttgcagaccgaggtggatcgcctctacgacatcttcgtgaatcaggtcggagagatgcgcggcatcgatccggataccgtgcgcgccaccgaagcggggctgttctatggcgagcaggcggtggcagcaggcctcgccgacgcggtgatgccgtttgatgcggtgatgaccgagttcaccgacgcgttggcggccaagcagcggttggcgcagcctgacgtggcccgcgcctcgccgcgaagcatgtccactcaatccatttcaaacccgccccgaagcaaacctttcaccctggagaacacgatgaccgaccccaaagacgaccacgagaacccgagcgatccggccgacaccgccccacagggcgaccagtcgcagaccgacagcgatcttgaaccgacgcctgccgcccaagccgcactggcgcagtcgttcgccagcgggcgcggccaagctcaggccattgcagagatgtgcctgatcgcgggccaatcccgacgcacggcggaattcctcgccgcaggcttctcggaagcgcaggtgcgccgcgccttgctcgacgcccgtgccgaccaacccgaaatcgcctcgcgcatcaccgcagaggcaggaaccattcagcgcccggaaaacagtccggtggtcgctgccgtcaagaagctcaccgccaaggagtaa

SEQ ID NO: 327916 - DNA, 378 bp, Pseudomonas aeruginosa
atgcccactgtctctcaacccaagaatctcggcgacctgttgaagtacgaagcgccgaatctctactcgcgtgacctggacaccgtcgcggccacgcagaacctgtcgttgggcaccgtggtgggtcgcgaaacggctaccgccaagctcaaggccctcgacccgagcgcctcggacggcacggaaaccgccgttggcgtgctcggcaatgacgtcgatgcgacgctgatcgaccgtgaggacgcgatcctgatcgcccgtcacgccatcgtcgcgcgcggcgcattggtctggccgaccggtctgacggttgcacagaaggcaactgccgttgcccaactcaccgcccttggggtgctggtgcgcgacagcgcctga

SEQ ID NO: 327917 - DNA, 1023 bp, Pseudomonas aeruginosa
atgcagaacccttttgaaaaccccggcttctcgatggccagcctgacggccgccatcaacctcctgcccaaccgctacgggcggctggagcaactcaacctgttcccggccaagccggtgcgcacccggcagatcattgtcgaggagtacgccggtcgtctgaatctgctgcccacccgggcgcccggttcgcccggcacggtgggtgaacgtggcaaacgcaacctgcgatccttcgtgatcccgcacataccccacgacgacgtggtgctgcccgaggaagtgcaaggactgcgcgccttcggttccgaaaccgagatggaagccatcggtggtgtcatggcccgccatctggagaccatgcgcaacaagcatgcgatcaccctggagcatctgcgcatgggtgcgctcaagggcaagatcctcgacgctgatggcagtgagctcgtcgatctgttcgacgagttcgacatcaccgcgcaatcggtatcgtttgagttttcgacggcggccgacaacgggcaaatcaagactgcctgcctcgagttgctgggcctcatggaagatgggctcactggcgagttttcgaccggcgtgcatgtactgtgttcgaccgagttcttccgggcgctgaccacccacaaagaggtcaagaccgcctaccagaactggcagcagggcgcggtgctgatcaacgacatgcgctcgggcttcagctacagcggcatcaccttcgaggaataccgtggccaggcttcctttgtgcaggccgacggcacgctagggtcgcgccgcttcatcgccgcaggggaagcccatgccttcccggtcggcacggtggataccttcgccacctacttcgcgccagcggacttcaacgagaccgtgaacaccatcggccagccgctgtatgccaagcaggagccacgcaagttcgaccggggcactgatctgcacacgcagagcaacccgctgccgatgtgccatcgccctggcgtgctgatcaagctcgttgctgcctga

SEQ ID NO: 327918 - DNA, 279 bp, Pseudomonas aeruginosa
atggatgtcgcgacgttgtacgaggcggcccgcagtgcaggactgctgacctccgtcacggtggcgggcaccacagtccactgtgccttccgtgcccccgacgaaaccgtgctggatggttttgcgctgtcgcgggactaccagatcgactacccggcgtcctggctgacgctggcagtcggggacacggtcgaggtggcaggcaacacctttcaggtgcgcgacgtgcgtgccatcggcgacggtaccgagcgtcgcgcctcgctctcccaactctga

SEQ ID NO: 327919 - DNA, 426 bp, Pseudomonas aeruginosa
atgaactccgtccgcgagcgcgtcttgcgggaaatcgtcgcgcgcctggcttctgcgattgccccgacgccggtgctgcgcatgcctgcagtgccggtgacccgcgaggccagtccggcgctgttgctgttcgtcgatggcgacagcatcaccgcccacgccaaccacctggtcgaccggctgctgatcgtccggcttgccgtgtttgcacgcggtgcggatgccttcgacgtcgccgaccaggcgctggtcgcggcccacgcggcaatgctcgccgaaccgaatctgggcggtctggccatcgccgtgcgcgagatcgactgcgaatgggagttcgacgacgccgacgccggggccgtcgcgctgcccgcccgttacgagatccgttaccgcacccacgctatcgacctcacccaaacaggatga

SEQ ID NO: 327920 - DNA, 213 bp, Pseudomonas aeruginosa
atgcaaaccctctccatcgagctactgaaaccccatacccacgcaggcaagcgcctcgccgtgggtgatcgccttgatctgaatgacgccagcgcccgttggctgatcgcacaaggcacggccaaagcggccacccccgccactgattccaaacccacccgccgtgatgccacgtccggtgtttccacaactgcagccacccaaggagactga

SEQ ID NO: 327921 - DNA, 753 bp, Pseudomonas aeruginosa
atggcttacttttctggacaaggccgcgtctacatcggcgcacgcgatgaattcggcaaccctgctgggctgactttcgtcggcaacgtgcccgaactgaaggtatcgctgtcggtggacaccatcgagcaccaggaagcgcagtcgggccaacgcctgaccgacctgcaactcatcaagaccaagaaaggcgagttcgcctgcacgttggaagagctgatcgccaccaacctggcgctcgcgctctacggcaccacgaccacgatcacccccggcacggtgaccggcgagctgctacccaatccggtcacgccgggcagtctctacccgctggcgatgcagaacgtgtccgccgtgcagatccaggactcggatgccacgccccagacgctcccggccagccagtacagcgtcaatgccaagcacggttcgctcgtggtgctggatgccacgtcgggcggcccctacaccgaaccgttcaccgtcgattacgcctatggcgcggcgcagagcacggcgatgttcacccagccgctgcccgagcgctggattcgcttcgaagggcttaacaccgccgacggcaaccgcgaagtggtgatcgacctctaccgcgtggccatcaacccggccaaggagctttcgatcatcacggacgaactgctcaagttcgagttgtctggccaagtgctggcggatctgaccaagccggtcggtggtgatctcggtcaattcggccgtctggtgctgctgtga

SEQ ID NO: 327922 - DNA, 402 bp, Pseudomonas aeruginosa
atggatgacttcaaaaccttcccgcctgaaccggtggtcgtgacgctgtccgggaccgcgttggagctgacgccgatccggctgggtgagttgccacgactgcttgccgtggtgcgcccgctggccgaggagatcagcagtgatccggactggatggcattgctggggcggcacggtgatgccgtgctggatctgctggcgatcaccacccggcgtgagcgcgcgtggatcaacgatctgtcgctggaggacgccgtgcaactggccgctgccgtgttcgaggtgaacgcggattttttcgtggcgcacgtcgttccggcagtgcaaggcgcagcccagcgactcgcaccgacgctgagctcgctgacgaactcgggtgggacgctgccgtcgcccgcctga

SEQ ID NO: 327923 - DNA, 156 bp, Pseudomonas aeruginosa
atggcctacacgctcacgcaggcacaagcctttctggatgccgacggacagatcgagcggcagcaactcgcccagctactcggcattcatgccgtggcagcccaaggcgagaagcgtgacatcgaacaactgcaacgcgatctgctcaaggactga

SEQ ID NO: 327924 - DNA, 642 bp, Pseudomonas aeruginosa
atgcgcctctctctgaccacgaccggcctgctggacccgcgccagttggcggcgtggagcagcgagcggcgtcgggccattcacactgccgtcgccaagggtatgcagtcgggcgggcgcgaggtgcgtgacgcggcgcgatccgagatgcgcagcgccttcaccgtcaagcgcaacagcttcatctcctcgatgggcgtgaaggtgttcgacaagaagccggagcaactgcctgccttgctggtgggcagcaagatcccgtggctcggtctgcacgaaaaaggcggcacggtcagcggcaatctgctcatcccgctgctgcccggtcgcatcggcccgaagcgcttcaaggcggtcatcgatggcctgatgcgttcaggcaatgccttcttcatcgagaagaacggccgcgtgctgctgatggccgagaacatcaaagagaacgcctcgcagctgggccgcttcaagcgtgccgagcgtggtcgtaccggggccaagcagatcaagcgtggccaggagattcccatcgccgtgctggtcaagcgcgtcgatctcaaacgacgactgaatctggcgggtggcgtgcaacgcgccttgcctgccttggcgcgggcgattcaacaagaactggacaaagtctga

SEQ ID NO: 327925 - DNA, 2706 bp, Pseudomonas aeruginosa
atggcaagcaatcgtgcccaaatcctgatcagtgccgtcgaccagaccaagaccgctttcgactcgatcaagcgcgggctgggcggcctcaccgacaccgccaagagcgtcaacggcgtgctggccaaccttggcgtgggcgtttcgctggcgggcatcggggccatgatcaagtccagcatcgattcggcggatgcgctggacgagatggcccagcgtaccggcattgccgtcgaatcgctgtcgctactggtacctgccgccgagttgtcggcggtgtccaccgacaagttcgaagccgggctcaagaagctggccaccggcatgctggaggccgcgactggctcggaagcgtcggcacagaatttcgatgcgctgggcgtggcggtccagaaccaggatggccccctacgcgacagcgaacaggtgttgctggatctggccgaccgcttccaggctatgcccgatggcgcggggaaagcagcgctggcggtggatatcttcggcaaggccggtgcggaaatgatccccttcctcaaccaagggcgggagggcattggtgcgctgaagcaggaggcggctgaactggggttgcagttgtccgccgacaccgccgcccaggcaggcaacttcaacgacgcgctcgacaagctgaagctggccacccagagcatcggcaaccagatcatcgcgtccttgctgcccgccctgaacgatatggccggtggcatggtcgagtcggccaagcaaggcggcacactgcgcgcgatcctggatggcgtggtgctggtgctcaagaccctggtactgggtgccgccaccgttggcaaggccttcgtcgccttgggcgaggccattggtgccggtgtggcggcggcggtcgaggcgctcaagggcaacaccgatggggccaaggccatcattgccgacctcaagggcaatctggtcaagcggctggatgaactggcgtcatttcgtgacagcctgttcgaccccaagcccatcgaggtcaaggcacccaagatccaggccgatccggaactgcttcagcgcctgaccaagcccaaagccgtcaagccagcgcaggacacgaccggcgcgcagaccacgctgatgaaagcgcagttggacgccgagttcgcgctgctcaaggacggtctgaaccggcaacaaaccgcgctggatgcggcgctcgaagaccgtctggtctcggtgcgcgactactacacgcagaaaactgccctcgaacagcgcgaggtcgatgccgagattgcgcgcaagcagcaggagctggcccgcagtcagcaagtcgccgccacgggtaaatcggaaaacgaccgcctgcgtgccaaggctgaagtggccaaggcggaagccgacctgatcacgctcaacaaccggcgcacggacatcgagcaggccaatgcccgcaaggcggcacaagccgagcgtgaattggccgacgccttggcgcaggcgcgtgaggaactggcccagatcaccggcaccgcgacggatgccgaccggcaagccgccattgagcgcagctaccgcgatctacgggcgcgactggcggcagaaagcgatgccgacggcgtgtcgctcgttgatcggctgatcaatgtgaaggctgcacaggccaatctggctgcgcttgaagctcagtggcggcaagtcactgagcgtctgcgcaatgcgcaggaggcgatccagacccagcagcaggccgggttgctgaccgaagcacaggcgcgtcagcaaatcgtgatcctgcaacagcaatcggccaccgagatggagcgcctgctgccgaccatgcaacaagccgcgcaggccatcggcccggatgcggtgatccgcgtgcaggcgtggcgcaacgagctggatcgcaccaagctcaccgtcgatgaaatggccccgctgtggaatcgcatcggcgagagctttggtggtgcgctcaacgggatgatcaccggcgcgcagacctggcgcagtgccttggcgagcatctttcagcaggtggccgacgcctttctgcagcagctcgtgatccagcctttccagcaatggatcgccatgcaggcgcggatgctggcgctcaaactcggtttcatccagcaggaacagaccgtcgatgcggccgccagcgccgccaaggtcgctcagaaaaccaccgagaccaccgccttggtgtcgatggatgctgcaaaggcgggagctggggcggcggcatcgcaggcttccattccctacgttggcccggcactcgcggtggccgcgatggtagccatggtcgccgccgtgatggcgctcttgggtggaatcaagaagttcgcgggaggcggcctggtctccggccctggcagcgccacatcggactcgatcccggcacgcctgtccgcaggcgagtacgtggtgcgggcagccgccgtgcgccaggtcggtgtggccttcctcgactcgcttaacggcttgtcggccggcccacgtttcaagggtggcgaactggcctttgcagcaggcggcctagtaccggaggtgaaagtgccgcccgcgcagccgcagatgaatcaggccgtgcgcatcgtcaacgcggtcgatccgggtgtgacccacgaccacctgcagtcgcctgccggagagaaagtcatcgtcaacatcatcgggcgcaatgcacgggccatccgtgcggcgctgcaagggtaa

SEQ ID NO: 327926 - DNA, 1059 bp, Pseudomonas aeruginosa
atggcacttctgttcatcgacggtttcgatcactacgacccacaggccgtggacagctttggcgatccgtggctggcgcgtggcaaggcagcgtatctctcgccgcaggccacccggatcaatggccgtcgcccgtcctcctatgctctgcgcctgccggaaggttcgggcggcggctacgtcaagaacctcgacgccaccaagaccagcctgatcgtcggtgcggccattcgcgtggtgccgtaccagaacacctacaccgagcctttgctgctgggcgtgcgtgacgccaactcacaagtcgctcacctcgtcaaaatcggcgaggacagtcggctcaagctctaccgctggcaatacggctatgaccagttgatctctgtctcagtcgccagcgctccggcgcgcggctggcactacatcgagttgcaggtcacgcaaggcaccagcagcggtgtgctgtcagtgcgcatcaacggcatcctggccatccagatgaccgcgcagaacaccattcagggcggcggccaactgctcacggcattcgtgggtgcggtgcctggccagaactgcccgctcaccatcgatgtcgacgacttctacatcgccgataccaccggcacgatcaacaacacctttctcggtgatgtgcgcgtcgatgccttgcaggctcaggccgatggcagtttgaaccagtggactcccagtccggtcggcactgctgcctgggaagccgtcagcgacgatgacgaagccacggcaatcagtgcgcccaacgtggggctgcgccagtccttcgatgtcgagccgctgccggtaatggccacgcccgccatctacggtgtgcaactgaccatgctggcgcgcaagaccgacgccggtctgggcaaggtcaaaggcctcgtggtcagtggtgcgcagagcgccgtcagcaccgacatcgtcctgcaggagcaactggcgtggcagagcacgctgttcgagcgtaatccgaacggcaacgtgcaatggacggaggccgccttcaatgccgctgagttcggcgtggagtcggcatga

SEQ ID NO: 327927 - DNA, 1572 bp, Pseudomonas aeruginosa
atgacggaacgtgtcgtcgttcaggacattgcggaggtttccagcaagccgacgccggggagcgaactgcccgccttccagggtgaagtgctctcgcgggccaccttcggggcgagcgcagccagcttcacgccggaaacagctgtcgctccgctgccgcccaatctggtggccagcctgctgacggaatccttggcgggcccgtggccacccatcgatgcgccgatctttctggtcgaagtgttgcgccgggacacggcctcaagcgccatcgtcgccaccggtatggatgcctttggcgaccagcattggccggatgcgcaacgcggcgtgtttgccttccgtcatgattggatggagcccctcgtggaacggctggagtggcagaccagcgtcacgcggctggccagtggcaacgaatcccggcaggcacgccgacgcgttcctcggcgctggctcacctacaaggtgggcaacgcccggcagaccgatgccttggtggccgactggctggcagatcatctcggtcaaatggcgctgtggccgctaccgcagtacgcggcgcacctgacccagtcctgcgaacgtggcgcactggcactcaatgtgaccgaagctgatgggcgacagttcgggccactctcggccaatgcccatctgacctacgacggggtgcagggctggcaggagactgagagcaatggccgctgggtgctgatcatcgccgtcgatggatggcagatcgcccaacttagcgatgtggaaagcgatctgttgtggctggcggagcccttggcacgcgccgcagccgtgggcagcaccatcatgcccttggtgtggggcaaggccatcgatccggcggatctcacgcagtgggtacccggcatggtcggcggcaacgtccccacacagatccagcctgcgccactgcccgaccaggatgttctcgatgacccatggctcgacgagatcccggtctggccagatggcaactggcgtgacgatccaacggccgccgcgcaagccacgatcacccgccaagacttctcgcctgcagatccgtgggtgcgccgggacgatccgtgggcgacgacaactttgcagcggcgctatctggccagctcactcgatgaaatcgagatctggcgggcgcggttgtggcgcacccaaggccgtctggaggccttctggctgcccgatggcttggctccgatcctgtgggtgaacgtcgaagccgatcccgaagatggctttctgcgcgtggatggcaaagacatctcagccttctggcatcgccccgccgcctgtttgatcgtgcatccggacggattccagcagtacgccctgacggcggcctgccatctggatcaaggcggtgtgctggtgctgcgctcgggcctcgacgactgggtgcccgaaggcagccgcgtcattcgtctcgtgcgctgccgcctcgaccacgacgccatcgatctgtactggcacagcccgacgctgctggagatcaccctgacagcacgtcagttgcccgaaccacgcggaaatgatcgtcaaacctacgagggagagtaa

SEQ ID NO: 327928 - DNA, 789 bp, Pseudomonas aeruginosa
atgagccagaacccattgctggaagtcgagctatacgccttcgccagcaacagcgcgcagttctatctaacgccgcacgaattcgacgttgatctggatggcaacctctacaagagcctggccgtggaacgcaacgaactggcgctgggtgctgaagctgcgaaggctggcttggatctgaaactgccgccgaactgtgatttggtgcgccacctgctcgccaactcgctgaccggcgacaccacctcgatcaccctgcgtatcggacggcgcgatacctggggcgactactggtggatctccggcacgcgctggatgggccgggtgcttggcgtcgaagtcgctgacgatgtcgctcgcgttcgctgcgagtcggcgcaagtcagtctcaagcgcatcgggttgcggcggctctacagccgcaagtgttcccacgtgctgtattcggctgcctgcggtgcctcaccgatttctgccagcgccttggtgagcaacagcaatggccgcaacgtcgatctcgatggcggcgtgcccggcagcgtcagcggtggtctggctggtggctggctgcaaaccccggaaggtgcccgccacatgatcgtcaatgactacggtggcggcgtggagctgctctatccggtcgccattgaagtcggtaccgaggtgctgctgacggtcggctgcgaccacagcacggccacgtgcgagtcgcgcttcggcaacctcgacaactacggcggctttcccgccatcccgagcaaaaacccgttctcgaccggcgtgttctga

SEQ ID NO: 327929 - DNA, 228 bp, Pseudomonas aeruginosa
atgtggtacctcgtcgtcatcgtggtggcggcgctggtttcggtcgcgctcgcgccgaaaccgcccgaacccaaaccggcagccctgtctgacgtcgatgcccccaccgcagaagaaggccgaccgatcccggtcgtgttcggcaccgtgctgctgcgcggctccaacgtcgtctggtacggcgatctcgcagccgaccccattcgcaagaaaggaggcaagaaatga

SEQ ID NO: 327930 - DNA, 204 bp, Pseudomonas aeruginosa
atgaaaacgaacgtgatcgtcaccatcgacgatgtgcgcgccgttggcctgtgcgtgaacggcacgcgcacttggtttgcgcgtcacgatctggattttcgcgccttcctgcgcgatggctgtgacgccgaaaccttgctggccactggcgatgcgatggcgtggcgtgtggttgagcatgccaggcaacaggagcctcgctga

SEQ ID NO: 327931 - DNA, 2274 bp, Pseudomonas aeruginosa
atgggtggtagcagcaaaaagcaaaccgtcggctaccgctaccgcatgggcttgcatctggtgctgtgccaggggcccgtcgatgccgtgcaggaaatccagatgggcgaccgtaccgcgtggggtgatgccgaccgtgcgccgctgtccagcgggcatgggctgaccagtctctcgatcaacaagcccaccctgtttggcggcgacgagcgcgaaggcggcgtggtcggcaccattgatgtgctgtctggtcatgccggtcaggggcgcaacgactacctgatgagccgcctcggcagttccatcccggcattccggggcgtgctgtcattggtggcgcgcaagatcctgttcgcggccaacaacccttacatcaagccatgggcggtacgggtgcgtcgcttcacggcgggttggttcgatgcgccgtggatggagtggaacgctgaagtccgcacctggggtgaggacgaaggccaggaaatcagcgttggcatgaacccggcgcacatcctggtgcaatgcctgaccgatccgcactggggcatgggctatccgcagagcaccatcggctggagtttctggaacgcagcgtgggccctatcgagcgagggcttcggcctcaatctgatctggacacgccagcagcccatcgaaaatttcatcggccaggtcatcgaccacattggcggcatcctctacaccgatccggagcgaggcacgtttgagctcaagctgctgcgcgacgactactggatcgacagcctgccgcagttggggcccgacgaaatcgtgcggctggaacgcttcgagcgtgcccagtggggcgagctgcccaacgaactgacggtggtctacaccgactggcaaaccggcggtgatgcgacggtcacggtcgagaacctggccgccatccagttgcaaggcggcgtgatcaatcagcgccgcgactacccgggcgttaactacgggccgctggctgcgcgtctggccttgcgtgacctgcgtgccttgggttcgcccctggcccgtatgagcctgaccgtggcacgcgacacgctggaacgtgcgccgctgccgggcgatgtattcctgctgaactggccgcgtttgggtgtagatcagatggtggtgcgcgtgaccggcatcgacaccggcaccttgggcgcagccgaatggcgcatcgaagcgatggaagatgttttcggaatgagcaacaccgtgctgtcgcccccgccaccacacgtcgaagagccgaccatcgaacctttaccgcccgccctggtgctagccgttgaggtgccgtattgggaactggcccggcgcttgtcgcgcgcagatctggcctacctgaccgatacggacacctatctcggcgcgctggcggccgccggtggcaccgggcagttgaattggcaactggccaccggcgcatcgagtagcgacctcggagccgttgtgggcgaggactacgcaccacttctgacgcttgatgcagccttgcctgccagtgaggtcgatgccatcggtgtaccagtgacggccattagccagccggacaggctggccgtaggcgactacgcctatctggtggatgccagtggggcgattgccgagaccgttgccgtcctggccttcgatgctgccaacgcgaccatcgatctcgcacgtggcgtgctcgacaccacaccccaagcacatgcctcggggactcggttgatcggtgttggcgaatggctggcatccgaaggtgcggagcgcgccccgggcgaatcggtgtttgtgggcgcgattcctcgcacgtcgaccgatcagggcgatcctgttctggccgccaatgggcagccgatggtgcttaccggtcggcaggctttgccgtatccaccgggtcgcatccgcatcaatggccaaaccgagcctgccgtggtggccggtgacctcaccgtcgcgtgggcgcatcgcgaccgcacgcagcagaccgcctacctcgtgcagcaagacgaaggcgatatcgggccggaactgggcgtgacctacacgcttcgtatccgcaatcgcaacggcgtgctggcgcacaccgaaacgggactgctcggcactgcctttatctggacggcagcagtggccgcgctggatgccggtgcgctgggcgaccgcatcacagtcgaaatcagtgccgagcgcgatggtttgagtagctggcagccgcaggtgcgggtcctggatcgcgcgggctacggcctgcgctggggacagtattggggaggtgtgtga

SEQ ID NO: 327932 - DNA, 597 bp, Pseudomonas aeruginosa
atggagccgcgcatcgatgttcatctgctcaccctgaacgagcctgctgaatggcgggaggcctgtatcgccagcctcgaggacgcaccgatccagttgcacgttttgcccggcattccgggccgtattggtgaggcacgcgcggcaggctatgcacaaggcacgctgccgctggtgtcctttgtcgatcccgatgatttgtacgaagccagtgccttcacacaactggccgacgcgctggatgcctgcccgcaggccgtgatggcctacaccgacgaagcactgaccgacgaaaacggccaggacatcgcggtacggcgtctggcctacagccgttggcaacacgccaacggcgccagccacgtgcacggcctgatcgtgatgcgtcgatctgcgatcgaagccgtgctcgaggaaaccacggacctcaacaactttgccgactggctgctgaccctgctcgtagccaagcgcggcggcgtgctctacctgcccatcgtcgggcgtcactggcgacagcacccgcagcaaagtcatcgcaccggcgacccggaagcagtccggcgtattcgccaagcatcgaatctctggagataa

SEQ ID NO: 327933 - DNA, 351 bp, Pseudomonas aeruginosa
atgtcatcaaccgatccgaaccttggactcaactacggctggacgctcggcgagagcggctgggacaccggcatggacgccaacctcaagcgcctcggcgctgtggtcggcctatccgtgaaagaccgcgacctgaccacgccacctgccggccccgccaacggcgaccgctacatcgtgcctgcggctgccacgggcgtgtgggcgggaaaaaccaaccagatcgcggtgcgcattgccgatgcctgggaataccacgcgcccaagatcggctggctttgctacatcgaggacgaggccaagctctcggcctacaagtccaccggctggagcgctggcatcgccatctga

SEQ ID NO: 327934 - DNA, 306 bp, Pseudomonas aeruginosa
atgaccgaacccgaacaacaacagcctgcgctcgtcgagaacatgctcctcttgcgccgcgaggacttcgacgaactgctggaccgcgccgctgaacgcggagccgagcgtgtcctgacccaccttggcctggaaaacggccacgccgcacgcgacatccgcgaactgcgtgatctgctggatgcgtggcgcgacgcccggcgcaccgcctggcagaccaccatcaaggtcgtcacgaccggcatcctggccgcgctgctggtcggtgccgccatcaagttgaaactgatgggaggcccgcaatga

SEQ ID NO: 327935 - DNA, 477 bp, Pseudomonas aeruginosa
atgatcgagaccttgctcggtggtctcctcggaggggccttccgtctcgcacctgaaatcctcaaatggctcgaccgtaaaggcgagcgtggccacgaactggcgatgcaggacaaggcgctggagttcgagaagattcgcggtgcgcaacgtatgtcggaaatcggagcaggtgccgacgccgcgtggaacgtcggagccatcgaaaccctgcgcgaagccgttcgcagtcagggcgagaaaaccggcgtgcgctgggccgatgccttgtcttgcagcgtgcgccccgtcatcacctactggttcatggcgctgtactgcgccgccaagaccgctgcattcgcggcagctgtcactgctggcgcgggctggggaacggccatcctgcacgcttggacggaagccgatcaggcgctatgggccggggtgctgaacttctggttcctcgggcgcgtgtttgaccgggtgcggccgtga

SEQ ID NO: 327936 - DNA, 474 bp, Pseudomonas aeruginosa
gtgattgaggtgccaaaagcggctatcgagctggccaagcgctttgagggattcgagcgcaaggtgaagcgcggaatcgagatcaccgccgttccctacatttgtcccgcaggcttctggacgattggttacggccatctctgtgatcctaagcacccgccgatcaccgaggccgaagccgaggtctatctggcgcgcgacctccaatcggcgctcgccgccacattgctctactgcccggtgctggccaccgaacccgaaagcagactcgcggccatcgtggatttcacattcaacctcggcgctgggcggctgcagacatcgacgctgcgacgccgggttaaccagagagactggggccttgccgaacaggaactaaagcgatgggtctacgggagtggaagagtcttgccagggctgattgcacgtaggcaagccgaatgcttgttgttgcggggaagagctgatctatga

SEQ ID NO: 327937 - DNA, 1167 bp, Pseudomonas aeruginosa
gtggctgataagaagttgaaacctggctggaaggtctggcgcttcgatcagatcgccaccaacgtcaatgtccgcatcgataatccatccgaatccggcatggaccattacgtcggtctggaacacctcgatcccgattcgttgcgcattcggcgttggggcagccctgacgatgtggaagccaccaagctggtgttcaagaagggcgacatcattttcggtcgccgtcgggcctatcagcggaagttgggtgtagccgagttcgacggcatctgctcggcccacgcgatggtgcttcgcgcaaagcccgacgctgtgctgccggagttcctgcccttcttcatgcatagcgatctgttcatgaatcgggcggtggagatttctgtcggctccctttcgccgacgattaactggaagacgctcgcggttcaggagttcgcgttgccaccgctggaagaacagcaacggctcgttgatgtgctgcaagcgatcgagcatacaaaggaagctcatcacaatatccggcagggcgcagatcaactcgtccgctcaatgctgtcagagcttctcaatggcgattggcccgttgttgagctcggctcagtcgttcacgaaacgcagtacggcctttcaatcaatgccggacctgatggtcaatacccgatgctgcgcatgatgaacatcgaaaacgggctctgcgttgaaaacgacatcaagtatgtgaacctcaccgagaaggactttgaagcctatcgactggttcacggagatgtgctgttcaaccgaaccaacagctatgaattggttggccggacgggcgtatacgagctggaaggcgatcacgtctttgcgtcttaccttgtgcggatcaagacgaacaaggaaaagctggagccgaagttcctcacgctctacttaaattccgactttggtcgtcgccaggttctggcctacgcgacaaaggcggtcagtcaggcaaacgtgaatgccagcaatttgcttcgtgttcgtctgccgttaccgccactggagatgcaacaaaaggtgctggatgacatagcgcgagccaaatctgcagaagatgcggtggtcgcacgctactcattgctcgatggaatgaaaaagcggtttttgactggaaatgcggagggtgcaggtggcatttaa

SEQ ID NO: 327938 - DNA, 747 bp, Pseudomonas aeruginosa
atggccaaacctgtcgtcatcggctcgcggagcttccgaacccagaaaagcgcactggaccattacaaggcgctgctacaccggtaccaggacggggatcgcatctcagacccaggggaccacgccgacctcgtggccctcatcgaacgttatgacccgattcttgaccaggttggcgagctggcgaagggctgtggccagatcggccacttcgaacgccgcctgaacaccggaacgggctggagcaactccggcttttgggtggtgcgccaggacgggtccgccacggacttttcgtacatctgggccgtgaaaggactgccaggggatcggtcgaaggacttctatggcgcatgccgggaggctgtcgcactcgatctcgttctggccaagaagcgcgccttcgcggagcatggggacgctcatgggctggttgcatgcgaacttactggtgtgatggtcagcatcgacgacgcccatctggatcacgcttggcccaacttctctcacatcgtcagcggcttccgggcggccaggggctggtcaggtgacatcccggacggaatcgtgtccgccccagctgacgggcagacgacgcccaccttcgtcgacaaggcagttgcggacgccttccgggactaccatcacaaccaggcgatgctgcgaatcctctccaagtcggccaaccttcagaccgccagccaagctcgaagaccgaagattgcacgcccagtgcggctggcttga

SEQ ID NO: 327939 - DNA, 618 bp, Pseudomonas aeruginosa
atgctcaatccaactgaagccatcagccactggatcgacgcgcagccggagggggccttgatcaggagtctggatctggagcgcctggtcaatcgcaatcaagcgtcgcgggcgctggcacgcttggcacagcgtgggcggttgatgcgtgtagcgcgcggcatgtacgttgccgtgacggtcagtcgcttcggcccggtcccgccgccggtcaacaaggtggttcagtcgctcgcgcgcatcaccggacactccatcgtccgtcatggcgctgcagcggccaatgccctggggctgaccacgcaggtttctgtccggcagatctacctgaccgatggctgtgcacggacgctcaatttcggcaagcaggtcatcgagatccgccgtgcgctcaagtggatgctgatgctgggtgacagcaccgccggtgatgttgtcagagccctcgaatggctcgggccggatcttgccgagcaggcgatcggtaagctggacgggcgtatcgggcaggacgactggggcgccgtgctcgaggctcgggcgcatttgccgacgtggatggtggtggcgatccaaaacggccttgccgcatcgaagcatgttccgttttgtcggtaa

SEQ ID NO: 327940 - DNA, 216 bp, Pseudomonas aeruginosa
atggaagtcgctcacctcaatcaaaaacaactcgctgcccgctggtgcatcagcgaggccaccttggaacgctggcgcagcgccgggattggccccaagttcctgaagctctgcgggcgggtgctctaccgccaggccgacatcgatgcctacgaggagtcgtgtctgcaggtatcgaccacgcagcttgatgtcgcccatgctcaatccaactga

SEQ ID NO: 327941 - DNA, 1125 bp, Pseudomonas aeruginosa
atgaatagcggcgattacaaatacatctggcaggccagtgactggccgaactggcgcttcgacctggcggcgttggctggccccatggccgaagtcagtcgtgcccagggattattgatggggcgcctggccgacgtcggcatggccttgcgtgaccaggcgagcctcgcggcgctcaccgaggacgtggtcaagaccagcgagatcgaaggtgagcagctcaacgtcgagtccgtgcgctcgtccatcgcccgcaggctgggtgtggacatcggcgcactcgctccggtcgatcgccacgtcgaaggcgtggtcgagatggtgctcgatgccaccgccaactgccaggcactggtgtcgcgtgagcgtttgttcggttggcacgccgcgctttttcccacgggctactccggtctatccaagatcaaggtcggcggttggcgcgacgatgtcaccggcccgatgcaggtggtgtccggccccatcggccgtcagcgggtgcatttcgaggcgccgcctgccgaccgtctcgaagccgaaaccagcagattcctcgactggctgaatgccgcgtcgaacgaaccgccgctgctcaaggctggccttggccatctgtggttcgtcactctgcacccattcgacgatggcaatggccgtatcgcccgggccatcggcgacctgctgttggcgcgtgccgatggcagcccgcagcgcttctacagtttgtcggcgcagatccagcgcgagcgtaaggcctactacgacatcctggagcgaacgcaaaagcggtcactggacgtcaccgagtggctcgcgtggttcctcgacacgcttcatcgcgcggttgaccaggcccagcacacgctggatgccgtcctgacgaaagcgcggttctggcagcgctgggcgaccatgcccttgaacgagcgacaggtgaagctgctcaatcggctgctggacggcttcgaaggcaagctcaccagcagcaagtgggcggccatcgccaagtgctcgccggacactgcgctgcgcgacatcaacgatctgctgacgcggggcgtcctgagaaaatcagatgctggcgggcgcagcaccagctacgagctgaacgacctgccggagtag

SEQ ID NO: 327942 - DNA, 225 bp, Pseudomonas aeruginosa
atggacgagatgttgcggcgtaggctccgggcggagttactggaggtgggattcctcaaccagtgttgccttgacctgatggaaagcatggaggctgagttcagcctcactgatgaccagcgcgagtgcatcgagcaactcagccgatttctgcaggaagggatcggcaagctgacattcctgtccgagcgtgtggcggccggtgatattgttgtgctttgttga

SEQ ID NO: 327943 - DNA, 1494 bp, Pseudomonas aeruginosa
atgtttcccaatagtccgctcgatgaagctccgcaggtatgggggtggccatggcacggcctaatacgacagccaatcaacgccgttgattcgaccctgacgttaccaagcgggcgcacgatgacgatgccgcctgtcaggctcgcaaataatacggccctttgggacgtaggcatgcctatccctgaagtggaaaccgatgatccagatgagcagtggctaaaccgagcgattttgcgtggaacggatttgtccgaagcttatggcggggtttccttacagcctgcatttattcgtggttacacgattcgatacggcgtaagcgttcaatacaatttttttctcgaaacaatagctgctagctgtttgtttcgggatggatttacagggttttctgggacggtcagtagtaatgcaatatctctgtcagaccttggattgcccgtcaagccggacggtatctctttcgaagttctggatgtaaataacgacggaacacgccgtctctacctggctagatatcaagagaccgctgggagtggattcattggtgttggtgggatgcttgagttgcgtgtgagtgcgagcggcgcgaacagctttcaggcggaactgtccgtggttgcgccttgggcgcagatacaattcgagactatcgacagcagccgaacagatgttgacccgaatacccatacccgcttttggcgtgggacgccggaggacccagacggcccgttcaatgaaagcagtggagagccgccacccccgccatacccggggcatccgtgggcgcctcacgtgtatagagttctaatcggagagttttcagcatcacttcgcgcaaggtcaactgctggagcgtggtatggattgtctggctcccttgaactaataacgctcgaagtttctatcgtgtcaacgatgtcgcgctcggcaggtatctctggcgaccacatctcatttagcatgaccgaagatatttcgttttcctacaccttgagctcttcttccggcgggtcctcagagtcgctgtacaactcgctttctacgagcggagttcttaatgggcctggttctatccaatgggctgacagcatcactggtcaaagtgtcgcgagtggctcggagtctattagcttgggtgatatatacctgcttactcctgatgttggcgacagttatgcggaaggattggactggtcgtcaccaattgagctgttcccggggcgtccgtcgacgataagcgaccaatctgcgtggccggtgcttagatactcaaacaagcttttaggcctttttttctatcgtggtagagaccgtcggtttgctggagtggctctcaccccgcatggcccccacggatcgcgtcaggttgatgtggatgttagtggcttttccccgttagagatggaggcgtggggcaagggctcctacaaccctctcaccggcgacgctatacgcaacgacccgaacgccttctattcctacgtttga

SEQ ID NO: 327944 - DNA, 2484 bp, Pseudomonas aeruginosa
atggctgacgtaaagatccggctgaccgctgacctcgatgatgcgctgcgcgaggtctcaggcttccgcaaggagtatgccgaactggtcaggcaggtcgcgcaacctctcaagcgtttaaacgatttcactgctctcgaaagcactctcgaggacacgcaacgccaggcgcgctcggcgcgcgagcagatccgcacgctcggcaacgagctggcatcgacgatcaggccaagtcgcgaattgcagcaggcttaccgggactccatttcggacctgcgaagcctggagcgggcagagaccgtccaggtagccaagctcggagcgatgcgccgggagttgaagcaggccgggctggatacgaggagcctgacatccgaacggcagcggctccagcgggagctggatcgaaacctccaggcgggccggaatgatgcggctaccaccagcctccggcaacaggccgcagcgatcaagcagagcgcgatagagcagcgccgcttcaacttggagcaagcgcgtagcaccctgggagtcgccagggtgcgcgaactgcaggctgctatcgggcagttgaaccagcaatatcgcttgcttcgatcgagcggaacgctgtctacaagggagcttgcgattgcccagcgggcgctcaagaagcagatcgcagagaccaagggtgaactcaactcgctgggtgccggctcgcggctgtcgagcatcggctctctccgcgggagcggtccagcgctggcggttgcgggtctcgccgccgcagtaggcgctgcaacggcgaagctagcgaacggggctgacactgttggccggctcgactcccggcttcgcctggcgactcgctcgcaggaagagttcaacaccgcgcagatcgaactcgaccgtatcgcggatgatgttcagggcgacgtcggcgacctcatcggcctttattcgcggttgcagcgccctctgcgggatgcgggcatggatcagcgcgccgccctcgaaaccgtagaggcggtatcccttggcctgaaaattggtggggcatctgccgaggagtcggcctcggtcattacccagttctcccaggccatcgccagtggtgtcctgcggggcgaagagttcaataccgttctggagtcctcggatcgaattgctggcgctttggcggactccttcggggtgactgttggccggcttcgtgagatggctgccgccggtgaactgacctcggagcagatcgttatcgcgctgcggaaggaacttccgaagctccgcgaggagatggcttcgtttgcgccggagatcggcgcggggctgaaccggatcttttccgaaacccagaaatattgggggcgcagagcgaaggaaacaggcatcgtcgactgggttgcgaaccagttgaacgatgttgccaaggggatcaacacggcgaatacgctggtgaaaaagggcgagggcagcctcacggccaccctcgccgccgagaaggcgcgtcaagagcagatcgtgaagcgccagaacgatgccctgaagcgggctcgggatcagaacgtcgctgatctccagtctgaggttgttcggaccaaggccctacttgagcagtccaccaagaacctcaacgacgcgctttcgcgccaggcagatgtccgcaaggagtttgccgacctggtgaagggtatccaggcgacgcccgcctccggaacgcagaccttcggtgatgccactgcggcccaggcctcggctcggaacgcgctgaccgccggcaacaaccaaaaggcgatcgaggaggcgcgccgcgcgctgcagatccttcagcaactgaaggatgctggcgcgaacagctacggcttcgaaggcgtggccaaggaggtggagcgaatcgccaacaaggccgcagaggtagaggctggtaatgccaaggctgcggatgacgtcaaccgcctgaacctggccgacctcgaggagcgcatcaaggctgtgcaaaacgtcgaggtgtcgttcggaatggacttcgaaagcgcggagaccttgaagcaacaggtcgccgacatcgccgccggcctggctgagcaactcgtgatacctatcacgctggttccgcctccggagatgggcttgcctggcgtgcccagcatcacccccaagatacccgggtttgccactggtacgcagagcgctccccctggtatggcgtgggttggggagcgtgggccggagttgatgatgatgcggggaggagagcgcatcttcaacgcggtgcagtcgctgcagatgtcgcagaggtatcaacgaactctccccgagataccagagattccgaccgcggcgcttcagcaggcgaatccgctggcagccatgcaaaacctgggatcgctgaccctcaacctgggtggagacgatgccggcttcaccgttttcgggacacacgacacgctccgagacatacgcaaggccgcctcgaagttcgggcggacgcgcccaaaatga

SEQ ID NO: 327945 - DNA, 2091 bp, Pseudomonas aeruginosa
atgggcagccaacggaagatgagtagcgcgccgctgctggccccacaggccatggcgtgcgcattgaccaacgacaccaagccggcggaaagctggtacagcatcaaggcgctttcccgaggcgttgccgagattctgctgtacgacgagatcggcgcttggggcatcaccgcccagcagtttgcccgagagctgaaggcgcttggtgacttgtcactgatcagcctgcgggttcactcgccgggcggagatgtctttgagggaactgcgatctacaacctgctcaagcatcatccggccagagttgaaggctacgttgatggcttggctgcatccatggccactgttgttctcatgtcctgcgatgtgatccacatccccgagaacgcaatgatgatggtgcatcgcccatggggaatccaggggggcgaggcggacgacatgcgccgctacgctgacctgctggaaaagatcgagggcaccatggttgccgcctacatggcgaagaccgggaagtccgaggaagacatcaaggctttgctcaaggctgagacctggatggatggccgcgaggccgtcgaggccggctttgccgaccaacttaccgagccgctcgccgctgctgctcaactgacctcaaaacgcatgaaggagtttgcccacatgcccgaagcactgaaagccctgatgcagccgcgcgcgtctacccctgccgccgctgctccgaccccatctccggccgcacctacctcgcagccggctcccgccgcaccggatgaagccgccgtgcgtgcccagatcaacgccgccgagaacacccgccgggaaggcatccgcgccgtgttccagccgttcgccgcctcccacggcgaaatgctcaacgaggtgctgctcgacagcagcgtcaccatcgagcaggctcaagccaagctcctggcctcgctggcctctggagccactcccagcgccggcccttccggcagtcagggcgcaaacagccacgtgtacgctggcaacggcaatctggttggtgactccgtccgcgcctccgttatggcccgtgccggcctggaagaacagcagagcgacaaccgctacaacttcatgagcctgcgcgaactggcgcgtgcttcgctggtcgaccgtggtattggtgttgcctcctacagtccgatgcaaatggttggcctggctttcactcataccaccagcgacttcggcacgatcctgatcgacgtggccaaccgctccatgttggccggctgggacgaggccgaggagaccttccaactgtggacgaagaagggcatgttgtccgacttcaaaacggtgcaccgcgttggcctcggcgagtttccgtccctgcgccaagtgcgcgaaggcgccgagtacaagtacgttaccgtcggtagtcgctcccagccgatcgccctggccacctacggcgagatcttcagcattacccgccaggccatcatcaacgacgacatgaacctgctcaccgacatcccgcgcaagatgggcatggcggccaaggcaaccatcggcgatctggtctacgccatcctgaccagcaacccggtgctgtcggacggcaaggctctgttccatgccgatcacaagaacctgcagaccggcgcaagctctgcgctgtccatcgagtcgctgagcaaggctaagactcagatggctactcagaagaccgaggtggaaggtggtaagcctcgcacgctcaacatccggccggccttcgtgctgacccctgtggctctggaggataaggccaagcagatcatccgctcggcctcggtgcccggcgcagaatcgaactccggcatcgagaacccgatccgcaacttcgccgaggtgatcggcgagccgcggctggatgacaactcggctactgcctactacctggccgctcgccagggctcggacaccattgaggttgcgtacctcgatggcaacgaactgccctacatggagcagcagcagggcttcaccgtcgacggtgtagcaaccaaggtccgcatcgacgccggcgtggcgccgctggacttccgtggcctgcagaaatccaacggcgcctga

SEQ ID NO: 327946 - DNA, 1647 bp, Pseudomonas aeruginosa
atgaactggattgatcggctgctggcgcctctggcaccgggttttgtcgctcaacgcatgcgccatcaggcggtgatccgtgcgtatgaagctgcgaggccttcgcgcacccacaaggccaagggagagacgcgttctgctgacgccgccttgcaatccgccggccggtctctgcgagagcagtgccggtggctggacgagaaccacgacatcgttactgggttgttcgaccgcctggaggagcgagtggttggcggtagcggcattggggttgagcccctggtgttggaccaggctggcgaggtgcatctggagttttgcgctcagatcaagagcgcttgggccgagtggtctttgaggccggagacggcgggtgagttgactaggccgcagatggagcggctggtttgccgaacttggctgagggacggtgaatctctggcccagaaagtcatggggccggtggcgaactacaagcaccttaccgccgtccccttcgctctggaactgctggagccggactatctgccctttgagttgaacgacactggcaagggaatcattcaggggatcgagcgcgatgcctggcgccgcatccgagccttccatttgctcaaggcgcatccaggagacattggaagcgggatcttccagcagaccaagcgcgtggaggctgagcgagttattcacgttgccaatcgcaagcgcatcggccagaaccgtggcgtaccgctgctacatgccgcactggttcgtttggcagacctgaaggactacgaggagagcgagcgcattgccgcgcgtatttcggcggcgatggccttctacatcaagaagggggaagcagccgactacggcgtaaaccaggctcctgccgacaagcgcggatcattcccgattgcgccaggaatgatcttcgacgacctgcagccaggtgaagacctggagatgttcgaaagcaaccgaccaaacccgatgctagagggataccgcaacggcatgctccgcgcggttgccgctgctggtcgaagcgcttattcgaccatcgcgcgctcctacgacggtaactattcgtcgcagcgccaggagttggtcgaggcgcaagagggctacgacctgctgcaacacgacttcatcgacgactggtgccgtccggtataccgcacctgggtgcctttagcgattgcctcaggcgtgcttcgggtgccgccggatgtggatgtgagaaccctgttgtcggccgtttaccaaggtccggtgatgccctggatcaatccggttcatgaggccaatgcctgggaaaccttggtcaagggtggtttcgccgatgaagccgaggtggctcgagccagaggacgcaacccgcaggagttgaagaagtcccgcgcctccgagatagcgcagaaccgcgagttgggcttggtgttcagttcggacgcagcgcacagcctgaccaaggatcggcaattgaccgccgtcgaggcgatccagaaagcctatttgggggttgggaaagtactcaccagcgacgaggcgcgacgcctggtcaaccagtacggcgccgatctggagatcccaggccccgacttcaccgaggaagagaaaccgacaggaggcgccgatgggcagccaacggaagatgagtag

SEQ ID NO: 327947 - DNA, 225 bp, Pseudomonas aeruginosa
atggctatgaaccttgagcaatcgcgcgagattctgcagcgctacatcgaagcagagcaggatgttcttctggggaaaaccgtctcgttcaacagtcgcgtcttgaccatggtcgatctgggcgagattcggcgcggtcgccaggagtgggagcgcaaggtggcagctttggagcgcctcgccggtgggcagtctcgtccctacaagctggcggtcttcgaatga

SEQ ID NO: 327948 - DNA, 1977 bp, Pseudomonas aeruginosa
atgagtaccttgcaaccctggatgaatgacctgcgcaatgcggtcaagctgggcttgcaggccatgttcaaagacctgccgatgacggcggtccaatgggccgacgataacttctatatgtcggccgagtcctcgtacaacgagggcgattggaagacggccccgttccaggtcgcgatcctgaacgcgatgggcaacgacctgatccgggtggtcaacttcgtgaagtcggccaggatcggctacacgaagctgctgatggccaacatcggctacaagatccagcacaagcgccgcaacatcatgatgtggagcccgacggacccggatgccgagtccatcagcaagaagcacgtgatggggatggtgcgcgacgtcgacgtgatgctggccctcgcgccctggtatggcaagaagcacagcgacaacaccctggacaacaaggtgttctcgaaccggcggaacctctggattctcggcgggaaggccgccaggaactaccgcgagaaatcgcccgacgaggtgatctacgacgagttgtcgaagttcgacgctgacgtcgagggggagggctcgccgaccttcctcggcgacaagcgcttggacggtgcgatctacccgaagtccatccgcggctcgacgcccaagacggctggtagctgccagatcaccaaggcggccgaggagtcgccctaccggctgcacttccacgtcgcctgtccgcattgccaccaagagcagtccctgaagtggggcggcaaggattgcgcattcggtctgaagtggcggaagaacgcgctgggcgaggccgaggaggcctggtactcctgcgagcactgcaatgcctgcttcatccatcgcgacatggtggcagcccaggagaacgggcgctggatctgttcggagaccggcatctggacgcgcgacagcatggactggttcggcccggacaacgagccgatccgcacgccgcgctcggtcagcttctactgctgggccatctacagcacctggaaagactgggtgtcgctggctgatgagtggctcaaggtcaaaggcgaccgcgagaagctgatcgccttcatcaacaccacgcgcggagaggtgtgggaggaggaccagggcgagcgtgtggagtggcagacgctctacgctcgccgcgagaactacccgaaggtgccaccccaggcgctggtcctgatgggcggcatcgacacccaggacgaccgctacgagggccgcgtctgggccttcggattgggcgaggaggcctggctggtgcatcgcttcatcctgaccggcgatcccgccagcgaggagttgcggcgcaaggtggggctggagattcaccggcagttcacccgggtagacggcgtgccgatgcgtgtcgagcggtggtgctgggatgctggcggccactacgccgacgaggtggaggccgagagcatcaaacacggcgtgcattgggtgatcccgaccttcggtgccagcgcctacggcaagcccatcgcgaacttcccgaagcgtcgcaagcgcaaggtctacaagactgaactgggcaccgacaacgcgaaggagctgatctacagccgcctgcgcattgatgtgcccattccgtggcagccgacgcccggctgtgtgcactttccgatcgacagcgacatctgcgacgaagacgaactgaagcagatcaccgccgagaagaagaagccggtgatggcgaagggtgttcgcgtcctgcgctgggattccggcgggcgccgaaacgaggcgttggattgcttcgtgtacgcccttgccgcgctgcgcatcagccagcagcgcttcggcctcgacctcgatcagatggaggcagcccgccaggtcgttgccaggccggcggtcgccgaagtggtagagaaacatacctccaatcaatctgcgcaggacgtgaccaacgcgttcctgggtacaacaggtggcagtccatggctatga

SEQ ID NO: 327949 - DNA, 546 bp, Pseudomonas aeruginosa
atgagcaaaaacgaaacaaccaagcagcgcggatggttgaacaagtccgagatggcctcgagcctcgggatttctccgcaagcctttgataaatggggcgttcaaccaatcgagcgaataggtcgagaggccttctacacggtggcggatgtggtcgaaaaccgcatccagcacgccgctcggaaacaacaacctgagggggagctaccggaaggtgttgatccctacgtcgaagcgaaactgatgcaggcgcggctcgaacttacacgcgctcaaacctacgcccaggaacagaagaaccaggtgaatgacaagctcctggtccccgtcccatttgccacctacgcgctggccaagatcgccgccaagataggttcgaagctggagacggtcggaaagaccgtgagccaacgccacccagagatggaccccttaatcctggaagccttcgagcgggagatcgccctggcgcgcaacctctcggccgacttcggcgacgaccttccgggatatctcgatgagtaccttgcaaccctggatgaatga

SEQ ID NO: 327950 - DNA, 618 bp, Pseudomonas aeruginosa
atgaagatcaccgccgatcaactcgaccgcgctaccggctgcggtgcttctactgccggcctctgggtcgaccacatcaacggctccatggctcggtttgagatcaacacggctgagcgggtggcgatgttcctggcccaagtcgggcacgaaagccaaagcctcaagcgcgtggtcgagaacctgaactactccgccgatggcttgctcaagacctggccgaagcggttcgcgctggtagaggctcgccagtatgcccgccagcccgagcgcatcgccaaccgcgtctacgcaaaccggatgggcaatgggtcgccggatacgggcgatgggtatcgataccgtggccgcggcctgatcatgatcaccggacacgacaactacgccgaagctgcacgcgccctggcgctgccactggtagcgcaaccggaactgctggagcaacggacctgggcagccatcgccgcggcatggtggtggaagtcgcggggtttaaacgacctagctgaccaaggccgattcgagcggatcactctgaagatcaacggcggctacaacggtgctgaggatcgagtggcgcgtctcgaatgggcgcgcgcagcgctggcgggtgcgtga

SEQ ID NO: 327951 - DNA, 333 bp, Pseudomonas aeruginosa
atgaaaatgccagaacgccctgaaacttgggctgcgctgcttgcgtggctatctgcgcactatccgcagctgtacgccgccggcttgtcatttgtggtcgcgctgacccgggtgatctacggcggtggaacgcggcgccaggcgttgctcgaggcaacgctctgcaccctgatcaccttgggcctgattcctgtccttgagtggtttggccttccgcagaacatggctaccgctgctggggtgttcaccggcttcctaggggtgaagaagatcgccgagttcgctgatcggatcgccgactggaagtttccgcgtcggggggctggcgaatga

SEQ ID NO: 327952 - DNA, 390 bp, Pseudomonas aeruginosa
atgagcagaactcgaacctacgtggacaagctgctgggcgataccgagtacctcctcgagcagtgggggtggtggcgaatggatggaatgggggttcccggatatgtgtcgccggccgccgctatcatgagccaagccatgccaatgtcgagccgcaaggcctaccacgtcactgatgatatggccttggccgtcgaccgggtcattgctcgactcatcgacagggcgccgcaggccggcgacttcgtgtggctctactacggcgcgaagtggccagccctgcgcatcgcgcgtgaacaccagatcggcgaggccaaggtgagggagacgttgaagctggctgtgggctgggtcgacagcgccctggagcggttccgcgagagcgcttga

SEQ ID NO: 327953 - DNA, 1278 bp, Pseudomonas aeruginosa
atgacccagcataccctacaggtccgcctctcggacgcggagatccgccgccaggctgccgggcaggtggtgacgctgcgcgatcctcggcaccctgcgctgcggttccgcttccaccgtgatcgtgcgatgggatcgtggttcgtggtgatcggcggcacttggcgcaaggtcggtagctacccggcgctgacgttctcggccctgaccgctgtgctacccgaggtgatcgcccgtctgacggccgatccggcagcgtcgagcgtggccggcggcttggaaaccctggaccaggtgctggagtggcagttggagcggcagttgcgcaatcgcgcgctgtcagccaagcgcaaagcgtcggtcaagtcgatgatccggcgccacctggtgccgcggctgcgcggggtgcgggtggcgaacgccgataaggcgacgctcgaccggttgctgttctggccgctgcaggaggaattcagcgttggctacgtgcgacaggcctatggcgtgctgatggctgcactgcgccaggcccaccggctggacctgatcaccgccaacccgatgggctcgatgaggttcactgactttgtgcgcagcaagatcctgccgcgctcggcgcgcctgcggccggaggggctgtcgctgctgctggccaacctgcaggcgagctaccgggagcagccggaagtcacgctgctggcgttgctgatgctctgccacggcacccgccttggggagactcggacggcccgctggcgtgacttcgccctggtggatgcggtctggaccatccccgccgacgtgaccaagacgcggaccgagcaccagttgccgctcaccgatcaggtgctgtcgttgttgcgtgcccatcgagcgcatcagcaggcgcgcggcgtcgactcggtgttcctgttccccggcgcgcgcggccagtcgatctccgcgaaccaggcgacgctgatcttcagtgacctgagtgccggcgactggaccagccacgacctgcgcaagctggcgcgtacctgttggacggagatcggcatcgaccacctgatcggggaaatgctgctgaaccacgtcctgcgcggggtgctagcggcgtacatccagacccaggcgcgggagcgcaagcgcgaggccctggaacgctggcatgcgcaccttgatcggcacggcttcgctgcgattcacggagagacagagccgggatgcgctgcgcaacaaaacaccgggaatagccgcgatacggcggctgaaagcacttttcaggttctctaa

SEQ ID NO: 327954 - DNA, 1392 bp, Pseudomonas aeruginosa
atgagccgggagctctacagcctggaggcggaacatggggtgcttggcgccatcctgcaagccggcctgcagaatgaccaggcactgctcgaggacgccatcggtagcgtgaccgtcagcgatttctacttcgaggacaacgctgcgctgttcgaggcgatcaaggcttgttacgaggagggggtgccggtcgatccgctcaccgttggcatcatccgcgacacgcttcccggcggcgcgaagatcattccctacgccggcgagatcgcccgcaccgttccctcgatcgcgaactggaaggagtacgcccggcacgtccgggagcgcgccatcctgcgccgcttgatcgctgctgcggagtcggtgaaggcctcggccactgatgaccgaccgctgccggagatcatcgccggcgcgcagcaggcgatggcggacctgcgcgaccttgaggacgaggcgccgaagtacaagcggctcgacgaggtgatgctcaaggttgtcgacgtcatcgacgacaagttcaacggccgcgcgccgcagtggcccggtactggcctgaccgatctcgacaagctggtacgcggcatccgccctcggaagataaccgtgatcgccggccttcccggcagtggcaagaccacgcttgccctgcagattgcccagcacaacgcctgcgaggcaggcgagccctggctggtgttctccctggaaatgcccgaggaggagttaggtgtgcgcgccatcgcctcgctgggcggagttgacctgaagcgcctggacgatccgcagcagttgggtgacgacgactggccacgcatcacgtcggcggtggccaaggccaagggggcgcccctgttcatctgcgacgatcccaacgtgaccgccagccagatccgcagcatcgcgcggcgtgtcaagcgtgagcatggtctggccggcatcgtcgtcgactacttgggcctgattccgccggaggcgaaggggcgcacgcgcagcgaggaggtgggcaggaccaacaaggctctgctgcggctagccaaggaactcggcgtgccggtcatcgaactggcgcagctcaaccgcgactcgaccaagcgccccgggaagcggccgcagtcgagtgacctgcgcgattcgggggagattgaggctgacgccagttgcatcctgatggtccaccgggacatggacagcgaggccggccagaacggcatcaccgagattctgatgaccaagtgccggcacgcgccgccaggcaagtgccacctgcagcaggaggggcagttcggcaggttcggcaccctgaccggctaccgcgaggtcagcgaggaagaggtggagatgggccgcccgttcaagggccgccgctacggcaaggagagcgcggcatga

SEQ ID NO: 327955 - DNA, 840 bp, Pseudomonas aeruginosa
atggcccaaatttctaacttcgtccgcgccccggagcgtacccagggccccgacaacgacgccgagtgcgcacagcacggccgctacaccgaggtcagtgtggagcagttcggcggcggaactctcgccagcggctgtccggcctgccacttcgccgccctgcgcactgcccccgtcgacagtgaacagtaccagcgggccttgcaggtccagcagcagcgcaggctgaacgctctgctgatcggatccggcatcactccgcgctttcgtaatgccacgctggagaactacgagactggggacgacgtgcagatggccggcgtcttggctcgctgccgcgacttcgccgagcagtttccggggcactacgaggctggccgttcgctgctgctggtgggcaacgtcggtaccggcaaaacgcacctgggcagtgccatcgtgcagcacgtgattcgcgcgcatggcgcccaggccgtgatcgtcagcgccgcgcaggtcatccgggtcgccaagggggcgatggcgaggaatgctcagtacaccgagcgcgatgtgctcgccgaactggtgggctttgacctgctggtcatcgatgaggtcggcgcccagggtggtacggagtacgagcgaggcctgctgcatgaggtgatcgatcagcgctaccagcaggtggtcccgacgatcctgatctcgaacctgccggccgacgatagcctggcgatgcctggtgcgccgacgctgcgcgacttcatcggcgagcgcgcgctggatcgactgcgccaggggggccgcgccgtgcgcttcacctggggctctgctcgccgcggggtaagcgcatga

SEQ ID NO: 327956 - DNA, 1041 bp, Pseudomonas aeruginosa
atgagtgatgcagtgccagccgctccgctggtgccggcggaggtcgacttgcgcggccttccgttcatgccgctcgacgttgtccggttgctcgacagtgacttgttcgcgctcaccagcggcgacgagttcaaggcagcgctctccttgtggtgcaaagcctggctgcaggtcccggccgcttcgcttccgaacgatgatcgggtgctcgctcatctttcaggagccggtgcgcgttggcggaaggtgagggacatggcgctgcgcgggtggcaactgtgtagcgatgatcgcctgtatcaccctgtcatcgccgaaaaagcccttgcggcgtgggacgaacgtgttgcctatcgcgagcgccgaggcaatgaaactgagcgtcttcgccggcaccgcgaagagcacaagcggctacgcgatcagttgcgtgaactcgggttcacatacccccataacgcgccgatggaaacgcttcgagccgcgttgcaagacgccgaactgaacattcaccgaggcgtttccagtaacgcacctgtacgcgtttcaggggcgtcacctgaaacacaaccgctacggctaagagagggacagggacagggacagggagagggagagggacagggagagggatatttaaaagatccccccttaccccctgagggggttgccgctagcgcggcgggtggacagggtcagtcgccatcgaagcctgtgcgcaagaagcgtgaccctgcctttgaccccatgaccgccaagccggacaacgtcagcgctgaggtatgggcgaagtgggttcagctacgcaaggagatccgcaagccactgactccgacagcctgccggcagcaggccgaacagttggcccgtcaccccaacccggatgcggtggtgctcaagagcgttgccaacggttggcaggggctgttccccgacaaggtggagcgcccgccggtgaccaagccctcgaacttcaccaatctgcccacgcatgcccctgatcagtacccagaggagcctgaacatggcccaaatttctaa

SEQ ID NO: 327957 - DNA, 234 bp, Pseudomonas aeruginosa
atgactagccgcatcggagcgaaagcgctcggcgaccagctctacagctatatcggcgccatccaggacttggctaccgcagttcgcgaagacttggctttcgaaggttgcgagccgggcccgcgcctgaccgccgaccaggtggatgcgatccatctgtcgattatcaccatcgccaggttggctggcgaagacttgatccaactgctgaccgagctggaggtgccggcatga

SEQ ID NO: 327958 - DNA, 279 bp, Pseudomonas aeruginosa
atgagggccactctgggtatcagcttccgggcgactgcgccggtcgatctttcgaagggagatcacaagacgaatgtcctgtgcgttaaggatgacatcgatgccgacctcgcgctggacagcgccaccgatcttctggacgcggtgattggtgggcttcaggaaatcgttagcgagccgagcgtttcctcccaggtttcgctgatgcttcacgcggtcgagaccgcgcaggccttggtccgtgccgccttggagggtggggaggtggccaatgactag

SEQ ID NO: 327959 - DNA, 309 bp, Pseudomonas aeruginosa
atgaacctcgcgacactgctcagcaatctgtgctccccggttcccgatgaagttctgaccgataagcagatccgctccatcaagttggagcgtggtacggctcgccatgcggctcagaacatggcgcttggtgtcgccgcagtcgggaaactgctggcgcttaccagtgctgaaggcgagatcggccaggaaaccgccgagcgtcttggctggttcttggaggaggttggcggtgccatcttccagttggcggagttcgagcaggtctgttctgagcgaatcaaccggcagaaggaggctcggcgatga

SEQ ID NO: 327960 - DNA, 273 bp, Pseudomonas aeruginosa
atgagcgcgctcaagctcgggctgtctgcactgaaggcgccggtatctccgcttccgcccgcagggttcgctgcgatccatccgaccactacggtcgaagaggcgctgagcgcggccactgctctgacctccagtgtttccagcattctcggagcactgactacctccgacgaagagcgcgtagatatggacgccctcaagctctgctctcgcctggctggcgacctggtcgatgccgcgctcgacgccctgcgcaaggagggccagcaatga

SEQ ID NO: 327961 - DNA, 318 bp, Pseudomonas aeruginosa
atgcaacagaaaacccaaaatgcgcaacccccgcgctctgctcatcaactcgcatcagacctgctggatggcctcgaagccgctgttgagaccgtcaaggggatgcgcgccatccttgcactggtccgtagagatgagcagtgcagcagttacctcaaggatatctgcacgataggactcggtcaggccgagttcgttggcgggaaccttgaggatgatatgaaacaggccgacgcagaattgttcgaactggagcgtgtcgcgacccaatccggaaatgctgaaaacgtgtcgcaacacgaaggcggtgcagcatga

SEQ ID NO: 327962 - DNA, 255 bp, Pseudomonas aeruginosa
atggacaacaaacctctcatcaagcccgggaagctcttcctgatctgtatcgcgctgctggtctatgcagggttgtccgtcgccctggtgggcggcattgggccggccctggtcagcagtcgcgacgatgttctggtcttcgcgggattcgccatccccggcgtctggttgatcgcctcggtctgcctcggcatccacctcgccaacacccgccgcgaagaagcggccaccaccagcaaggagaaagaccaatga

SEQ ID NO: 327963 - DNA, 837 bp, Pseudomonas aeruginosa
atgaagcggattcccgctgctgcaatgctgtgcctgctcgccctcctggcgggctgttcgaaggtgcctgccggcaacgtcggcgtgatcgtcaacctctacggctccgagaagggcgtggagacgcgcgaggtcggaactgggcgctactgggtaggcgtgaacgaggaactctacctgttccccaccttcacgcagaccgaaacctggggcggcgaggaagcgatcagcttccagaccgttgagggtatgaaggttggcggcgccgtcggcatcacctactcggtatcccccgacaaggtgacgacgctgttccagaagtaccgggcgggaatcgacgaaatcacgaacaagttcctgcggaacatggtgcgcgatgccttcaacgatgttgcctcgaagcttccagtcgagagcgtctatggcgccggtaaggcggacctgctgctggccgtcgagaagcgcgtgcgcgaccaggtggcgcccatcggcatcaacatcgagcgcatctactacgcatccgacctggtcctcccgccgcaggttacgcagagcctgaacgcgaagatccaggccacccagatggccgagcagcgccgtaacgaggtcgcccaagccaaggcagaagccgacaaggaacgcgctcgggcccaaggggaggcggacgcgaagctgaccctggccaccgccgacgcgaaggcgatcgagatccgcgcccaggcgctgcgctcgaaccccgacgtcgtgaccctcaatgccgtcgagaagtgggacggaaagctgcccacctacatggccagcggctccccgcttcccttcatcggcatcagcaaatag

SEQ ID NO: 327964 - DNA, 429 bp, Pseudomonas aeruginosa
atgcgcaagcctacctacacgctctcaagcgaaggcgccacccgcctgatctatcgaaacgggagtttcatgacgacccagcagacggtcgacgaactcaacaagctcgaccgactgctgcaggtgttcgtcccgcccgtcgcgctccgggatgcgacagcggcctacctcaagcacatcgaggcagaagacttcaaccagaggaatgacgacgagcatcgccgaggcgaacttgtgaaggcggcaatcagctatgcagtcggcgccactcaccttgagaacgtcggcggccaccgaatcaacatatggccttggttcgctgaccagtttcaccccaccgaccgacggggaaacctgctgcaagcgatagccctgttgctgcgtgaaatcgaccgggtcgaccgtgaacgcaaggaacctgccgcatga

SEQ ID NO: 327965 - DNA, 432 bp, Pseudomonas aeruginosa
atgaacaccgaacagttcattcgcaacgcggccgcgcgcgggctttctcggcgcgccacccggctggccctgggcatcggtccctgggtgttccgcgaaatgctgaccctgatgccggatatcgagtggccggcgaagggccagtcgctggaccacaagcgggccaactcgcagaaacgaggttactgcacgccggcactcgcccgcgcactggaccaggcccgccaggcccgaaaggacaagcacacccacaccgtgcgcggccggaccggaaccatagaggaactggtggagacgctcccgagccctgtctcggccagcaccgtccgcaggcgactcgccggaggcatgccgctcgaggaagccctcctcaccccagcgactccgccgttcagcaactacaaacgggagaatcccgatgatcacgaataa

SEQ ID NO: 327966 - DNA, 702 bp, Pseudomonas aeruginosa
atgatcacgaataattcaaaggctccttcatgcacttgcccgagcggcaacggctcgctgcgccatccctgtccggcacatccggcgtcggtagagcaggcaggcagagatgttgagccagcaccctgccccttctgcggtggcgaggtagaccccacgggctggcttcgcggcgatggcacacgcggtccagagtgcaactactgcggcgctacagcgcggagcatggaagcctggcagacccgtaccgccctggcgcagccagagggcggcccggtgatcgggtgcctctgcggcatgccgatgagcgagggccatcactcgccggccggctgcagcagcctcgaagagttcgcaacgcactccgaccaggctcagcacagcgtgcctcgcgcatggctcgatgttcaagccgagcgacgccggcaggtcgaggcagagggatggacgccggagcacgacgacgagcacagccacggccagattgcccgcgccgccgcctgctacgccctggccggctccagcgctccgaacgatggaaccgccgccctactggtgtcgctggcatggccctgggatgaacagtggtggaagccgaccagcgcgcgccgcgatctggtcaaggcctgcgccctcgggctggccgagatcgagcgccttgaccgggtagcggcgagtcagggagggccaagtgatgcgtag

SEQ ID NO: 327967 - DNA, 192 bp, Pseudomonas aeruginosa
atgagaggctccgacattccaccaccaccagggtatcgccctaccccgctcgctacccttggccaacagttggtccgcctgggccaggcgatgcagaaccccaacaccaagctcggcgagttgaccgaactggtccaggcctgcggcgtcgacctgcggatctgcgacacgaacaaggagagtcgggcatga

SEQ ID NO: 327968 - DNA, 444 bp, Pseudomonas aeruginosa
atgccaagctctatcgatgtggcgaagtttttcctcgcccaatccaacgaagaggccggcgaccttgtgtccaacctgaagctgcagaagctcgtgtactacgctcagggcttccatctcgccgtctacgatgagcctttgttcactgactccatcgaagcatggacgcacggtcctgtcgtgccgaacgtctatcaccactacaagcagttcggctcgggcagcatcccagcgcccatagacttcaatctggaagcgttcagccccgagcaagtagaactgctcaatgaagtgcagcagatctacgggcagtattcggcttggcgactgcgcgagatgacccacgaagaagccccctggcggaacaattatcaggcaggggcgatgagccgtgaaattcctgcggacgacatgcgccagttctttaaaacccttgtgaagtaa

SEQ ID NO: 327969 - DNA, 1710 bp, Pseudomonas aeruginosa
atgagtctcgagaagctaaccgtctataagatcaaagaacacataactagtttcgacgaatttattaatgagacagatggtaaacgccgtcctctgccaccgttaagacctataagaattgaaaatgcaccggccggcgttgaagttcaggcgtcattttctcacaaaaaacatgaaacacagaagactgctgcagatgtcccctggatagtttttattaacgaggggaccgatgagcccataaacttcaactgcagaaacactttcccatgcgctgtcgtcgcaataaaaataacaactcaaaacatctcgaaattttacgcactgacattcggactaggcgcagaaacctttctggacaatgaaaagattgttcgagacttcggactgagagtcgcaatgaatatttgcgataccgaaaaattacgacgaatacagacgaatatacatgaagcagtatccacgcacgcagaaagacaaatcagcacaggaagcaacctaagtgtatttcagattaatgatgaaaaggagtttcttagatcagtaacaggagtcgctcgcgcagaatacaacttcataaaatccttcactggcaaagataacatctcactcaagataaaaaatgacaaccccttgaactgggagtctctaataccaaaattgcaaaccctagaagatgcctacaaccaagataactacctgcaagtcttccaaggctattcaaaattccacttcgagaacgacccaaatactatacagcagctagacagtgaagtatttgaaaggatcaggaatggaaacttcgagaacatccatctctcccccccggagtttacagacttcgagagcaggtatttcacatacaaggcagagggcggcgaccagcacgacgatctatctgttgacgatttcataacttcacgtagagcgtttagcgatagatcgagcattaacagcttgaagacgcataaaatttacgtttggagtagcgagacaggaaacaaagttacgagctggccagtttataggtgtttagtcgcagaaatagaattaaacaacgacacctatatactaagcatggcacaatggaaaaaagtatcgacggacttcaagcaagaagttgaagactacgtatcagatatcccctccaatcaaagtgcataccttaccaacaacgtatcaatatgggacgctcagagaaaccaaaatcgggaggaaatctacaaccaagagctatacaacacaaacaatgacatttttctttttgacaaagcaaaagtccatatagctggggagcgaatttacgaggtatgtgacttactacactcagataaatcgttaattcacgtaaagcgactaaagtccggctccgcctctatcagtcacttattccttcaggggaaattttattccgacgcattcatatcagatcaaaagtgccgagaaagcatgcgcgaacacattacagaaaaccacaacgaaaggcccacccaagccttcacagacatactcccagataatcgaaacgacatagtaacaaacgactacacaattatattttgcatattgaccgaaaaagcagatccagacattaactcgcttcccttcatggcaagatatgagctcatgcatagtcacaagcacattaatcaagcacttggatttaagtgcgaatataaattagtgagtgtagtactaggcccaccttaa

SEQ ID NO: 327970 - DNA, 987 bp, Pseudomonas aeruginosa
atgtcgatcaccaagctccccgatggccgttggttcgtcgatgtagaaccgatcaagggcaagcgctttcgcaagcggttcaagaccaagggcgaagtccagcggttcgaagccaccgtgcggcaaagaaccattgaaaactctgcctggacgccaaagcctaaggaccgtcgtaggctctccgaactagtgcaactctggtacgacctacatgcccactcactgcgcgacgcaccccggcgactctccaagccgctgcaattggctgcccgactgggtgacccgattgcgacggccctggatgcatcctcttacgcgagcttgcggcggaagcggctggaggaggggatatccgggaagaccctgaacaacgaactgggatacattcgcgcggtgttcaatgagctgaaggacctgggccagatcgactacgacaacccgctggccggggtgaagctgctcaagctgcaggagggggaactgtcctggctgacgaccgagcagatcggcgagcttctcgactccatccgcaaccggtgcgacaacccacataccgagctggtgacgctgctctgtctggctaccggtgctcgatggtcagaggctgaaaagctccccgctcagcggctccagggcaacgtcgtgacctatgcgggaaccaagtcagggaaggttcgccacgtaccgattccagcagagctggctgaccgggtgagggcgcactggccgatgcatggtccgttcacgtcctgcatcacatccttccgccgcgccctggagcgcaccacaattcaattacctcaaggccaggctagccacgctctccggcacaccttcgccagccacttcatgatgaatggcgggaacatcctcacgctgcagaaaatcctgggtcattcgacgctgacgatgaccatgcgatacgcccatccgtcgcctgatcatcttcaggacgctgtgaaatatgggccattaaggtgggcctag

SEQ ID NO: 327971 - DNA, 228 bp, Pseudomonas aeruginosa
atgggcttctccggcaagaactgcgagatgttcctgggccagttcatctgcctgatcgcacgggagcgcatccccgcaaaaaaggcgattgagtccgcccaccgactggagttctggcacgtcatcgaagaccactatctcgccaagggttggactcgtcgcgatctggaaaggcatatacacaagctgatgtgtgatcggtatctgcggcgggggtatgccgtctaa

SEQ ID NO: 327972 - DNA, 678 bp, Pseudomonas aeruginosa
atgaagaggcagaccatgaacacgcgacctttctcattaccgatctgggcccaggcgctgctcgccggggccgccttcgccgcctacgccagccaggcggcctacgccgacagcctggaggaacgcctgcgtgcccagttgcgcagcaccacccagcaactccaggcgctgcagaccgaacaggcccaggccaccgcggcgaaagccgcgctggaaagccagcgcgatgcggcgctggcccaggtcaagcaactgagcgccgagctggcccgggccaagggccaggccgagcagctctcggcccagcaacagggcttgcacgaccgggcgcggcagatggtcgaggcgagcaacgagcaactgggcaagtacaagcaggcctacgacgagttgctggtcatggcgcgagccaaggaggccgagcggcagaagctcgacctggcgttccgcgagcacgaccagcagttgcagcagtgcaccgcgaagaaccgggagatgtatggcgtggccaaggagatcctcggcgcctacgagaacgtcagcgtcgccgaggtgatgaagatccgccaaccgttcgccagcggtgcgcgggtgaaattcgaagagatggcgcagaagctcggcgacgacctctacaagacccaggtcgagaaccgccaggcggcgctcgcccagtga

SEQ ID NO: 327973 - DNA, 1635 bp, Pseudomonas aeruginosa
gtgaagcgttcgctgttcaattgtgcgcacccgtttcgccagcgctggtcgatcggttgcctggctgtcgcattgtcgtgcgcttcgctggccgacgaggcccctcccgccgcggcgggagccgagccccagcgtctggtggacatcaacgagtacgtggtacgcggcaacaccgtgctggacaaccgcgccatcgaggcggcggtgtatcccttcctcgggccgcagcgcagcctgggcgacatcgagggggcgcgcgatgcgctgcaggccgcctaccaggagaagggctaccagtcggtctacgtcgagctgccggagcagcaggtgagcggcggggtggtctacctgcaggtcaccgagaccgctgtcggtcgcgtccgggtggtcggcgccaagcactattcgccggtggagttgcgcgaggaagtgccggccctggaggagggcaaggtacccgacttcgcccaggtccagcgcgagctggcgcaggtcaaccgcacccccggccgccaggtgctgccgatggtgcgcgagggccagcggcccggcactatggacgtcgacctgcaggtggaagacaagaatccctggcacgccagcatcggcctgaacaacgactacagcgccgacacccgtcacttgcgctcggtggtttcgctgggctacgacaacctctggcaactcggccacgccatctcgctgacctatttcaccgcgccgcaggaccaggacaacgccaaggtctggtccggctcctacaccgcgccgctgagccagcgctggagcgtgcagctgtccggctaccagtccgacagcgacgtggccacggtgggcagcatgaatgtggtcggccagggccattcctatggcgtcgcggcgatctacagcctgccggtcaccggcctctggtcgcactcgttctccttcggcgtcgacttcaaggacttcgaggaacagacccggatcggcggcaacaacgacagggtgccgatcaagtacgccccgctgaccctcagctacaacggcttccgctacaccgaacgttcccagttggccctcggcctgagcctggtggccggtaccggcagtctcctcggctacggcgacgacgacgaggaattcgaccgcaagcgttatcgcgccaagtccggcttcggtgtgctcaagggcgatctcaaccacaccctgaccttcggcggcgactggcaggtggcgaccaaggcggccttccagctcgcctccgggccgctgatctccaacgaacagttcgctgccggcggtgccaccagcgtgcgtggctacctggcggcggagaacaccgccgacgacggctacctgctctcccaggaatggcgtacgccgtccctcggacgcttcctcggcaagcgcgccggcggctacgtcaacgactggcgcttctacgtgttcgccgagggcgcgcaactgcgcctgcaggatgcgctgcccgagcaggacgacgacttcagcctggccagcgtcggcatcggcacccgtgcgcaactcgccgactggctgtccggcagcctcgactgggccttcccgctgctggaagggacgaacaccgacaaacacgactcgcgcctgcatttcagcgtgcaggcgagcttctga

SEQ ID NO: 327974 - DNA, 879 bp, Pseudomonas aeruginosa
atgctgcacgtgcacctgatacagaactggttcagctacagcgatccgacgatggaggaagccctgtatgagacaaccatcttgcgccagttcaccggcttgagcctggagcgcattccgaacgaaaccaccatcctcaacttccgccggctgctggagcagcacgagttgacggctggagttctggcgatgatcaatggctatctgggggatcgtggcttgtcgctgcgggagggcgccattgtcgatgccacgctgatccatacgccgagttcagccaagaacaaggatggcaagctcgatccagaaatgcaccagaccaagaagggtaaccagtactacttcggcatgaaggcgcatatcggtgtggatgacgcgtctggtggtgcacagcgtagtgggtacggcgggcaacgttgtggacgttactccggccgacaaattgctgcacggcgacggaacgtagtttgtacggatgcgggctacggggttgaaaagcgtccagagcatgcagttcgcggctacccacaggcgacccgcacggaccaaggccccgtattcaccggcaaggcgcttgatcagtgtgcgtatcagcgcgacatcaagctgaagctgattcagcctggcaagcccacgcagaatgccttcatcgagtcatttaacggcaagttctgggacgaatgcctcaatgagcactggttctactcgcaggccgaagcgagagtccagatcacggcctgccggtgggattacaacgagcaccgaccgcacagcaccattggcaatctcaccccggcagaatttgctgcaagttggcgaactcaccagcagcaactgaagcaggaaaaattgatctcaaccccagagcctactaactag

SEQ ID NO: 327975 - DNA, 660 bp, Pseudomonas aeruginosa
gtgagactcttgaagggcggctgggcagcgaaacgatttcaaggtcccgccctgccctgggcggggctgctgctggtcttgctggctgcatccgccgtaggggtagagcttctggtgaagggcctgccagccaaccacagcctctacggcgatgcgaaagcgcgctggacgatcaatgaatacgccgacctggagtgccccttctgcaaggtctacaccccgcggcttaagcgctgggttgacagccatccggacgtgaacctggtttggcgccatcttcccctgcagatgcatggcgaggcggcccgccaccaggctcgcctggtggagtgcgcggggatccaaggcggcgccaaagccttctggagcgctatcgatgcgatcttcgctcagtcggccggcaacgggggcgggctgcctggcggcacattggactttcctgaactggaccaggctcgactggagaaatgtgcgaaagacaacgaacttattgactcagatatcaagttggacatcgacattgcacggtcgaagggcattacagcaacccctaccctcgtcatccgggacaaccagacgggacgaagcgtgaagcttgaaggcatggccgacgagaccaccttgctgtcggcgatagactggctagccaaggatctctag

SEQ ID NO: 327976 - DNA, 219 bp, Pseudomonas aeruginosa
atggagcgcttgctcgagagcatttacatcaatgctcggccggcaatggagttgaggcttagcctcaccagctccggccgcaagagaatggtaaagattgtggatgggggggaggtcgaggttctgccaggtgaagtgcagtgcatcctggaggcccaaaagagggatgttggaatcctcgccgatttcttagccaagagtctcttggcgcgacgctag

SEQ ID NO: 327977 - DNA, 270 bp, Pseudomonas aeruginosa
ttgcagggacaccgtatcggctatgtccgggttagcagcttcgaccagaacccggaacgccaactggaacagacccaggtgagcaaggtgttcaccgacaaggcctcgggcaaggacacccagcgtccccaactcgaagcgctgctgagcttcgtccgcgagggcgacaccgtggtggtgcacaacatggatcgcctggcccgcaaccttgatgacttgcgccgcctggtgcagaagctgacccagcgcggtgtgcgttcgagttcctga

SEQ ID NO: 327978 - DNA, 255 bp, Pseudomonas aeruginosa
atggccaacctgatgctttcggtgatgggggccttcgccgagtttgagcgtgcactgatccgcgagcggcagcgcgagggcattaccctagccaagcagcgcggcgcgtaccggggccgcaaaaaggccctgtccgacgagcaggcagctaccttgtggatgcgggcagcggccggtgagcccaaggctcagctcgcccgcgcgttcaacatcagccggcagaccctctaccagtacctccgcacgaacgagtga

SEQ ID NO: 327979 - DNA, 726 bp, Pseudomonas aeruginosa
gtgcccagatcaatctgctcgttcatttttttgtccataatcgcgcccacaatggccctggctgcaaaaattccagcaaatgagtattcgctgggggatggaagaggctatatcaacatctggcctgtacgggatggctctcaggcatttcttatccataacgacggccctaatggggctacatgcggactcaaaggggtacttagagataataagggaaaagttgggtcgccggaaaaatcaaatttatgcctactgcgcattacccagacagggctgttgtcagtaagtgtcaagcgtgaggccaactcgccaagttgctctggctggtgtggtcctagagtttggtttgaaggagcctacaacgtcccacccaagggttgctactacatgcaaataaggaaaaagactaggcgcgtttcagacttggttgaaaaaaaggaatttgatgctgccttctcactatccaaggaccttttatcaaaatgtcggactgagttacccgatagcaccaagatatatcaaacgaacttgctcgccatgatcagcgctgaaaagggagatagtgctcgctgtctggagtatgcccgttgggtgcaaaaacaaattcccgtaagagatgacggtcagccggctgaagacttgcttccggcagagcatgctttcgcactggagcaacgcgccaaggctgatgctctgtctgagcggtgcagcggcgagaagtaa

SEQ ID NO: 327980 - DNA, 999 bp, Pseudomonas aeruginosa
atgactaaactctactttgatctactgagctcacctgctgaggctcattcgtcgatacagaagtctctatctgcgcaggcactctccacaactgttccaatattagagtttccttcggaaaccgtatacgcctatgcctcgtacataagtgcattaagtatcggtcaacgtatcgatcccgcattcacccagagcttaacgagtgccatatccaacctggcaggtcgcccggttgcagtaagcgatatttaccaaaaaattcatgaaaccacactgagaacacctgtcgagatgggtgttcgccctaatagcatcaccttcgaagagtatcagaccgccataaatcagcaagccatcagcatggctcaagatatgcaagatggagacaaaggtgagaaggttgaggcccttcaggccaacatgcagttcctgtatggacaggagataaatactgatttcgtcgctcgcaacgaactcgctgctgggcagagagcgaaaaccgtagcaatagttcagggacatatcactatcgggtacggcttcgataccttcgtgcatgaagagtccgagctaaactctttgaatctggttgattctacacgacagaaggtgttacctgcattgcagctatcaacgtccgacccaaatttctggagtgtctatgcttcgctgggacaacgtctcacggatgatgatgggctattactgttcagtgccaaagcgcgagcggttgttcaacatctggcaggcgaccagttctcgggtagatgggagggtttaccagcagcggtcaagacggtcgtccttgacctctattatcagtatggtcaatggcaaaaattcccaaaattccaacaagcaatcatcagtcatgattggccagaagccatccatgagctccgtaactggaacggcatgccgaatgatccgaacttatctgttaccaaacgtttagaagagcgcgctaaatacctggcaatatccttcaactatgagtaa

SEQ ID NO: 327981 - DNA, 2967 bp, Pseudomonas aeruginosa
atgccgcgtcgcttgatcctctcgaccatggagcgggacaccctgcttgcgctgccggaaaaccaggatgatctgatccgctactacaccttcaacgactccgacctgtcgctgatccgccagcggcgcggcgacgccaaccgtctgggtttcgcggtgcagctctgcctgctgcgctaccccggctatgcgctgggcaccgacagcgagctgcccgagccggtcatcgtgtgggtggccaagcaagtccaggccgacccggtgagttgggcaaagtacggcgagcgcgacgtgacccgccgcgagcatgcccaggaactgcgctcctacctgcaactggtgccgttcggcttgtccgacttccgcatcctggtgcgcgagttgaccgagctggcccagcagaccgacaagggcttgctgctggctggtcaagcactggagagcctacggcagaagcggcgcattctgccggcactgggagtgattgaccgggcctgctcggaggccattgcgcgagccaatcggcgagtctatcgcgccctggtcgatccactcacgcactcgcatcgagccaaactggacgaactgctgaagctcaaagccggcagcaacatcacctggttgacctggctgcggcaggcaccgctgaaacccaattcccggtacatgctccaacacatcgaacggctgaagacctttcaactggtggacttgcccgaaggcctgggccgatacatccaccagaaccgcctgctcaagctggcccgcgagggtggccagatgacgcccaaagacctcggcaagttcgagccgcaacggcgctacgcgaccctaactgccgtggtactggagagcaccgcgactgtgattgatgagctggtcgatctgcacgaccgcatcctggtcaagctgttcggcggcgcgaagcacaagcatcagcagcagttccagaagcagggcaaggcgatcaacgacaaggtgcgcctgtactccaagatcggccaggccctgctggaggccaaggaaagcggcagcgatccctacgccgccatcgaggcggtgattccctgggacgagttcaccgagagcgtcagcgaggccgaactgctggcccggccggagggcttcgaccacctgtacctggtcggtgagaacttcgccaccctgcgccgctacacgccggccctgctggaggtgctggaattgcgcgccgccccggccgcgcaaggcgtgctggcagccgtgcagaccctgcgcgagatgaacgccgacaacctgcgcaaggtgccggccgatgcccccaccgccttcatcaagccgcgctggaagccgctggtgatcaccccggaagggcttgaccggcgtttctacgaaatctgcgcgctgtccgagctgaagaacgccctgcgttccggtgacatctgggtcaagggctcgcggcagttccgcgacttcgacgactatctgctgccggcagagaagttcgccgcgctcaagcgcgcacagaccctgcctctggcgatcaacccgaacagcgaccagtacctggaagagcgtttgcagttgctggacgagcagttggccaccgtcacccgcctggccaaggacaacgaactgcccgatgccatcctcaccgagtcggggctgaagatcaccccgctggatgcggcggtgccggatcgggcgcaggcgctgatcgaccagaccagccagttgctgccgcgcatcaagatcactgaactgctgatggacgtggacgactggacgggcttcagtcgccacttcacccacctgaaggacggtgccgaggccaaagaccggacgttgctgctatccgcgatcctgggcgatgcgatcaacctcgggctgaccaagatggccgagtccagccccggcttgacctatgccaagctgtcctggctgcaagcctggcacatccgcgacgaaacctattcggcggccctggccgagttggtcaatcatcagtaccgccatgcttttgccgctcactggggggacggcactacctcatcctccgatggtcagcgcttccgggctggcggccggggcgagagcaccgggcacgtcaacccgaagtacggcagcgagccggggcggctgttttacacccatatctccgaccagtacgcgccgttcagcacccgcgtggtgaatgtcggcgtgcgcgattccacctatgtgctcgacggtctgctgtaccacgagtccgacctgcggatcgaggaacactacaccgacacggccggcttcaccgatcacgtcttcgccctgatgcacctgctgggcttccgcttcgcaccgcgcatccgtgacctcggcgaaaccaagctctatgtgccgcagggcgtacaggcctacccgacgctgcgcccaatggtcggcggcaccctgaacatcaagcacgtgcgcgcccaatgggacgacatcctgcgcctggccagctcgatcaagcagggcaccgtcaccgcctcgctaatgctgcgcaagctcggcagctacccgcgccagaacggcctggccgtggccctgcgtgagctgggccggatcgagcgcacgctgttcatcctcgactggctgcagagcattgagctgcgccgccgcgtgcatgcaggactgaacaagggggaggcgcgcaactccctggccagggcggtgttcttcaaccgccttggcgaaatcagggatcggagcttcgagcagcagcgctaccgggccagcggcctcaatctggtgactgccgccatcgtgttgtggaacacggtgtacctggagcgcgccacccaggcgatgggcgacacgggcaagccggtggacgacgagctgttgcaatacctgtcgccgctgggatgggagcacatcaacctgaccggcgattacgtctggcggcagagccgcaggctggaggacggaaagtttcggccgctacgaatgcccggaaaaccttag

SEQ ID NO: 327982 - DNA, 939 bp, Pseudomonas aeruginosa
atgaccagcctcaacctccgccgcctggcagcggcggtcgccaccttcagcctctcgttcacggcctcggccgcgatcaacagcgctgccatcgtctcctccaccctttcccctcagtgcctcgaatacaaggtcgtcgggatctgctactggctgctctgcggaccgcatggctgcaaagtgaagacgtcggtcaaggtccgccactacgtgcctgacgcagtcgtctccagctacgcgaataccgggagcaacccctggaccgaggtgtcggcgctgggtacaccgaatccactcgcccaggccggcaatgacgcaaccaccaactacaaggccgagaacagcatcggccgcttcaaggaagcggatgtgatcggccatcctggcggggccacgttcagccggttcgctagcgcctctgggtacgtttgccctggcgccaccttcccgctggtgccctatttcctcagcacactggacgccattggctggcggcatggaattcccgagcaggtgtaccccgaagcgttggttccagggctgcgcgaggtgggtggaatcttctccggagacatgtgggggaacctctatccgcgcagcggattcctgcaccagaccgacgactacaagacggcggccgtcatcgcccagcgcgccggcgacatcaccacacgaatcggccagctccacgtctacctccccatgcgcgcagctccaaaggacggttactggccggcgggcgagctgagagagggcgatgcctcgaccgggaaatggcaggagctgaccccgtccctgagcctcaactgcgcggtgtttcccaactcagggccgaagacgcaagccgtcgacggcgattacgcctgggcgctctggcgaccctactcctgctgccagcgcaaggggcagatcttcctcggcagtaccgacttccaataa

SEQ ID NO: 327983 - DNA, 273 bp, Pseudomonas aeruginosa
atggcaacgcgaaacgtcgtccttcccgatccgctggagcaggatatcaacgagctggtggagaccggccgctatcagaatcgcagcgaagtcatccgggcaggcttgcgcctgctgctgcaacaggaagcccagaatagcgccaagctcgaagccctccgcaacgcaacatccagtggactgatgcaactggaacgcggcgagtacgacgagatcaccagcgacgacctggcccaatacctcgacgagctcggcaaccaggcgagccactga

SEQ ID NO: 327984 - DNA, 870 bp, Pseudomonas aeruginosa
atggttatggatcttggaactaccactatagtcgccgggcaaggcgatttttcggcctacaactatgggaacaatggggctaactggcctgcgcctagtcctgcccaagtcgggtatatttctaaggggcagcgtgatgtcgcctatgtgaacggtgattgggaaaaacctctactcgcactctgggcgcagtgggctaactggggaaccactctctatggctatccaagccttccttttccaaattatgagtttatttgggatatttttgatttgccccaggctgattacaatcagttttctctgggtgatgatagaattactgcgatgaatcgggcgcaaaatcaccagtatcccttcccaaataatgaaggtatccctagctgggatcgtcctaaaatagatacgttcaatggcggggtctacacgccagcggctgcttttgctcactacctaacgggcaaaggtaagaaaatgaatttccctattgaacgtttgaatattaaacctaatgtaaaggctatgcctcagtttattggggttctgacgagcagtccaatggggcaaaccaccgtggattttaatgtcccatatgctactgctaaggatagttgggtggcgggaaacacggttggagaaattacgctccgaattgtagggattcttgttaagtccacctccggccaatggagctttcgtggggagatccgtgcatatgatgatctgtatgacttcaatccttcaaatcacagaaccgaaactgctgaagggatgactcgcttagggcgtgaagtgggtcagaagtttaaagatacgactccctatcccattgggattccgggagctatccctgtaaatatttctggttaa

SEQ ID NO: 327985 - DNA, 126 bp, Pseudomonas aeruginosa
atgagcaaccagcgttaccccaaagaactcaaaatcgaagcggtcagacaaatgaccgagcgcggcctgcgcgttgcggaagtagccgagcgtttgggcgtgtcggtgcatagcctttacagctga

SEQ ID NO: 327986 - DNA, 6666 bp, Pseudomonas aeruginosa
atgagtgatgaggttattcagcagccaggtagcgagctgcctcaggattcgcacgccaccgtagaggctatcgagccggaggcgataaagaccgtccgcattcaagcgacgctggtcgccaagctcaacctggccgacttccagaactcggtaccggtgattcgagagctgcgcctgatcaacgacagtgatcagaagtacagcagactggagcttcagctcctttccgaccctctcgtcttcaagcccaagacctggcatatcgacgcgctgggccctggcacactccttcccataccagggctcgatctgcagatcgatggtgccctgcttgcccggcttactgaagcagagagcgtggccgtcacctttgttctgacgtccctgggcaatggtgacgaagagcgccaagaagtcacccgtcttgaactcactctggagctactccctcgcaatcaatggggcgggttatcccatcttcccgacatgaccgcggccttcgtccagcctaacgacctcgcggttgagcggctgctgaagaaggccgcggagttactgcgcgaccaagacaagaaccccgcgctgaacggttactccagcggctcagcacacgcctgggagattgcatcggcgatctgggccgcagtcgcgtccctaaaactagactacgccctccccccagctagtttcgagcagttcggccagaaagtacgcagtccaagccacattctcgagagtggcctggcgacgtgcttcgacttgtcattgctgttctgtgcagcgctagagcaagcaggcctgaacccgctgctgatcttcactcgaggccacgcattctcgggcttctggctcaaagccgaggagttctccaacagtaccgtcgatgacatcaccgcgctgcgcaaacgcatgaagctcaacgagctgaagctgtttgagaccacactgatcactcaacccaacatcccgtcactgtcctatgccatagagcgcggtgcccaacatctggctgagggccaggagcaggaatttgagctcgccctggacatccggcgtgcccggctgcagcggatcaaaccactggccactacagaggcagctcctgctcttggtaccgctagtagtgagcagaaccaggctggccaggaactactcatcgacttgccacccgaactgcctgacgaggccccggttgaagttgacgttgcgtcactagatcccaaagatcgcctcgcccgctggcaacgcaagctgctcgatctgtccttgcgtaacaacctgttgaacttcaaggccggcaagaaagcggttcgcttggaggcaccagatgccgcggcgcttgaggacatcctcgccagcggacagcagctcaagctgcacacacgccctgacctgatggatggtgctgacccgcgcgatcaagccttgcacgaagaaagggaacgcgaagaccttcgacgtcagcatgctttggatgcattgaagcgcaatgaagtgttcgtaggcctgccggtcactgagctcgatgcccgcctcaccgaactctatcggggagcccgcacgaacctgcaggaaggcggctccaacacgctgttcctcgcgctaggcttcctgacctggacacgtgaggacagagaaagccaacgctatcgagcgccgctaatactggtaccggtaacgcttgagcgaaagagcgctcgtgcaggctttactctggtgattcacgacgacgagccacgcttcaacccaaccctgcaggaaatgctccgtcaggactttgagctaagtctgggcatcggagatggcgcgctgccgaaagacgactcaggtctggatgtcgcgttgatctggagaacggttgcccacgcgatcaaggacatcaagggctgggaggtcagcgaagatgtcgtcctgtcgatgttctcgttcgccaaatacctgatgtggaaggacctctcggagcgctctgatgcgctgcgccaaagccccgtggtcaagcatctgctggataccccacgcgatgcattcaacggcggcggtggtggggcattcccggaagagcggaagctggacacgcaatacagccctcagcaggtcttctgccctcttccctctgactcgtcacaactctccgcggtgctgtcggcagcacagggacgcgacttcgttctgatcgggccacccggcaccggcaaaagccagacgatcgtgaacatgattgctcagttcattgcgcagcaaaaacgcgtacttttcgtctcagaaaagatcgccgcgctcgatgttgtataccggcgcctacgcgaggtaggcctgggtgagttttgcctcgaggttcactcgagcaagtcgaagaaaaccgaagtccttgcccagctgcactccgcctgggaggcccgtggcactgctgacgcagacacatggcaggccgaggcacaacgcctgcaagggcatcgtgatgtgctgaaccagtatgccgagagactgcacgagcgctaccccaatgggtacacgatctatgatgccatcggcatcgtcagcaccaatcaggatgtcgctccgattaatctcgcgtggacatcgcacacgcagcatcagtccgcggatctactcgctaagcgggagatcgccgatcgcctggaagtcaatgctcaggcggtcggtttcggcacgctgaaccaacacccgctgcatctgattggtaacaacgattggtctccaacctggcagcaccaggtgatcgaggcggcacgtgagctcggccctgccatccatgcggtgcaaaaggccagtgagcgttacatccaaatgtccggcctaccctcgctgccagccaatatcaggacgctcaaaggactggccgcgttggcgaagatccttcccgccgccgcaggacagaactggagcttcgtgctccgtcccgatgcccgtgcaatcgggcaacgtctggatgcaggcctgaaactcatcgagcaacaccgcacgctcaaccagacgctccccgcattctggacatccagtacgctggaggagtgccaacgcggactgggactgctggcccggcatgcggagctcagatctggtctgccccaaccctggccagtagcgagcatgattctgctcaaccagggcctggagacccttgcagaggttgcacgagtcacgcagacgctgtccgtgggttactccgatgccattgaggcactggatgtccgtgctctgctgcaggagtgggatcaagccggcaaatcgatgtggccgaaatcctggcttgtccaacgcagaatccgcgggcacgtggtgagcactcaatcgacgccggcgcctacgaccattgcggaagatcttcagctctggaccaccattcgtgaactccgcgctcgcctcgacgccattgatccagggccctcttccagcgctgtatggaagggtcacaacactgacccagcccttctgtcggtggtcatgcgcctgcaggcttcgctcgctgcgtgcgttgaaggccgtgcttggtcagacgacggcttcgacctcatcagtcaggggcaggcgggcctcgcactgaaggaaacgctagagcgaatgcgagacgtccgggcgctcgagggtgagatttccacactcaacccactcacccccgcgacaggatcgctttgggccggactgcagacccaaaccaaagcgctcaacgctgcgctggccttccagcgcgcaagacggtctatccagcaggaaggacgcctggaggacgagcatgagctcgttgctagcggcgcctgtggagagcggctccaaggtgagctgaaaattctccggcagcgagaagccatcgagcgagaactaagcgacctggcagacctgcgagaactgacatccggtctgtggctgggcctgcatacgaaggaagacacggtctcccgcgtactcaagttccacgcccacctcgccagcgccatctctgcccttgtgcaaacaccagaacatgtcgagggcgtcaaatcagcgttggggcgtttgctaggtgacgccaatgccctgctcgagcccgagggtcagttggcccaggccggcgggcagttgctggagtcgcttgataagtacgtcgcgcatacgcagaagctcgtcgacgccgggcatttcttggccgaggacgcggccgacttcacggagcaggagctgagtcagcagcatgtgcagtgtgagcagatcgtgcaatccggcaatggcctgcacgcctggtgcgcctggaagaaagcatgcgatgaagcatccgctctcggcctgcttccgctggtcgatgcgctgaaagcagggcaggttccacaaggctctgtgcgcaaggcattcgaaacgaactatgcccgttggtggttgaacacggccgttgatcacgagcctgtcattcgcacattcgtgagcgtagaacacgagcagcgcattcgagacttccgtgccctggacgaccgcttcaccgcgctgacccgtgatttgctgcgcgcacgcctgtgtgccgagctccccacacaggactcggtgagcaagaactcggaatggggcgtccttcggcacgaaatcacgaagaaaacgcgccaccttccgctgcgcgagctgatgtccaaaatccccgatgccctcaccaagctgacgccgtgcttgctgatgagtccgctctccatcgcccagtacctggcagcgaactccagcgtcttcgatgtagtgatcttcgacgaagcctcacagattccggtatgggatgcgatcggcgccatcgctcgtggcaagcaggtggtgatggttggcgaccccaaacagctccccccgacctccttcttcgatcgtgctgaatccacccaggatgacgttgatgtcgaggccgacctcgaaagcattttggatgaatgcatcagtgccaacctgccgatccgcaacctgaactggcactaccgtagtcgacacgaaagcctgattgcgttctcgaaccagcgctactacgagtccaagctggtgaccttcccctcccctgttacaaatgatcgtgccgtcagcctgcacgtcatcaacggggtgtacgagaaaggctctgcacgtaccaaccctgcagaggccaaggcattggtcgctgacctgatcggccggttgcgtagccctgggttcaaagagagcaagctgaccatcggcgtcgtgacatttaacggcgaacagcaaaagctgatcgaggatctgctcgacaccgaacgccgaaaagacccggcgctggaaagctacttctcggagagcgagcttgaacccgtcttcgtgaaaaacctggaaagtgttcagggtgacgagcgcgacattatgtacttctcgattacctacggccccgatgctgcaggcaacgttgccatgaacttcggcccgctcaatcgcacgggaggtgagcgtcggctcaacgtcgccgtcacccgggctcgccatgaacttcgcgtcttcagcaccctgcgagccgaaaagatcgatctagcacgcacacaggccttgggcgtccgcgatctcaagcacttcctcgagtttgccgaccgcggtgctcgcgcacttgcaggagccgataccgggagcctaggcggatacgacagcccctttgaggaagccgttgcgaacgcgcttcgtcgcaagggctggcaggtcgtcacccaagtcggcgtgtcgtcgttccgcatcgacctcgcagttgtcgaccccgatgcgcctgggcgctacctcgccggcgtcgagtgcgacggagcaacctaccaccgcagcgcaacagcccgtgatcgggacaagctgcgcgagcaagtgctacgaggtcttggttgggagattctgcgcatctggtcgaccgactggtggatcgacgccttgggcacggcacagaaaacccatgagcaccttgaggctctgttggtcgaaagccgtcagcaacgtgcggctcgtgaagcccaggagcagttggccgcgaatgccgctgagtaccaagctccgctggccgacaacgttgtagcactccctgtcgaccgtccccagctcaaaacccctgatgagtcagtggaacctgaaaccgagaacgagacgttggacatgccgagcgtgcgctacgccgatatgcaggcagacgcagcacgcacttcgataaccttcccttactaccgagggagcgacccgctgagcgccgtggaaggcgtggatccggatgcattcttcgatccgcgctatgacactgtcctggcgatgatgatcaagcatgtggtcgacgaggaaggccccgtcctcgatacctcgctcgcccgccgaatcgcccgggcacatggctggactcgcactggcgcacgcattcgtgatcgtgtcgtcagcgtggccgatcgcgtacaccgcaaggttgaagaggacgctgggcacttctattggcccagccgcttaccaaactgcgaagccgtagcgtatcgccgaccgaccggcgctgatcacacccgtcctgtcgacgagatctgcagcttggagctccttgccttggcacgtgcattggcagaccaaagcctcgtcggcgaagacttgctctacgccatggcacgagagctcgggctgagcaaagtctcggcatcaacccgggccagaatccaaggcgtgatcgaccagttgttctcctga

SEQ ID NO: 327987 - DNA, 1098 bp, Pseudomonas aeruginosa
atgggattgtcagtgcgtaagtcagtgagagtgggcccgttcaggttcaacctctcgaagtctggaattggtgtttccgccggtattaagggcctccgggttggaactgggccgaggggcaattacattcacatggggcgcggaggcttttactaccgccaaaccctcccatccaatggctcggcccctgccattgcatcacccaagccggcgagagcgcctaccccggtagtcgatatcccatcgcatacacacgagcccctcaaggaaatcgatagtggcaagatcggcttgatggtggattcctcatcgcaagcgctcgtcgacgagctgaataccaagcgaaagcgcttgcgcctttggcccttcgtcgccgccctcaccgtcggcgcgtttgtcctctcggcgaagcagctgccaccctgggcactgcttaccctactcatcattggcggcctgctaatagccgtaacgtactactgggatctgctgagaaaaacgacggtcatgctctacgacatcgagtcagaattcgccggtgtcgtcgagcaattgcacaccgccttcgacggcgttcgaagctgtcgcgcaacctggcatcttcaggcgcaagggaaggtacatgatcgcaagtaccacgccggcgccagtcacctggtgaccagaagctcgatcgcactcggactgcaaaacccgcccttcgtcaaaaccaacgttgccacccccagcatccccgtgggccgccagaccctctatttcttcccggacaaggtgctcgtgttcgaagccaacggggtcggcgcggtgtcctatgaaaacctgcgaatcgacatctctacgacaaacttcatcgaagacggcgccgtcccgaaagattccgagatcgtcagcagaacctggaagtttgtgaacaaaaaaggtggcccagacaggcgcttcaagaacaaccgagaactgcctgtcgtgcgctatgaggaggttcagttttcgagcaacaccggcttactcgagcgcatccagatatcctgcgtaggacgcacatccagcttggcccaagctatcggcagaatcggcagagcaaaaggcgagcgccagtag

SEQ ID NO: 327988 - DNA, 2031 bp, Pseudomonas aeruginosa
atgggcaacaagatcgtcaatcgacttgtccagaacgggctgcttccagaagccaggatagaacccaaggatcatctgcggacgaagattgccaaggacgctttcacccaggtgtttaaagcgatcaacggcagcaacgtcacgccggacaaggagttgatcgatggatttatcgccttcttgctgctggtcaagtcgagcacgcacagccccgaggaggtgttcgaaacacgccagtacgggccgataacccaagggtacgtcgaggcatttcgtctctatgaagagcaccgggcgcaactgaaggtcaggttttttgaagatcagctgtacgaccccgtcaagctgatgctgaggcaacccgcgacacagcgatacgttcagaaccgggttgatcacctcatcgtcgatgaagcccaggacatgaacggcatccagatcgctctgctgaaaatcctcgccggcgatcgggccaaggtcatgctcgtcggggatgaagaccaggccatctatgattggcgtggtgccgaacccgactacctcatccggggctttgaacaagactttccagaagccacccgatacaccctgccgcacacgttccgctttggccacatgctttcgatcgcggccagccaggtaatcagctgcaacaccaatcgcaaccccaagatcagcatctctgcggagggcacaccgcgcacgcgtatccactgcctgccgctggccctcgggctggctgacctgggagaacacgtagcagagcggctcacctccgggctgaagctccaggacatcgcggtgctggtgaggacctacgacctgagcgtcaccttggagctggatctgcaccaacgcggtatcccctatcacgtctatggccggccgccgctgatgcgtattcccgagatcagcgcgctgctcggtgtcctccagttggccagtggccgctggaaaaccttggatgccaaccagctccgatacgtcatcaagagtttgatgtaccgccctacactctacttggacaaggcagcaataaaccgtgtcgtagagctcgtcgtgcgtcagccagaatgccttgttgaagccatccgctcgaccatcacactgcaaaccaaagactatcaagccaaccagattcgtgaccgtgcggatttgcttgagatcctggcgaccgccaccgatccgcaggataaggtgctcaccgtcctggatcgctatctgctggcaacggagttcgaacgcaatatcgaaaagcagtcccccaccgcggatcaggcggctgccgtcatggcgaacgtccaggccttccgtctcattgccagccggcatgaaggcagcatcgacgcgtttctggatagcatcgacccgctcatcgactcatcggccatggaaccaccaacaacgccacacgtgtggatcagctccattcatcgagcgaaaggggcacagtggtcaagggtcttcgtacctggagtcgtgagaagcggctttcccagagacgacctaagcgccgatgaaatcgaggcagagcgccggctgttctacgtggccatcacgcgcgccgtcgatgaggttttcattgctcaccccaacgacctggagtttcagcgcagcctggagcgcccggacatcactgaaacgcatccggaaacgagctccgtatctcgctttctttgggagatggatattgccttggctcggcatgcaggagccgctgtcgaagaaggacgcttcgcggcccttggagaggtagaccgccccgaggtcgcgaatacctatttcgcaaccttccctttctctaaagactggcgctatgcaaagcgcccacagccgccctcacccgcgtccgcgggagcaaaccacgacgtcgtcggcgcggcaaaaggaacgcgggtaattcatgccatcttcgggagtggaaccatcgacagatggatcgacgatcgcgttctgcgagtcgtttttgacgatggggatacgcgtctgctggtggccagtatggcgccgatgaagatagcgtcggcataa

SEQ ID NO: 327989 - DNA, 366 bp, Pseudomonas aeruginosa
atgagtgactcaaatgaagctaaggtagcgaagtggatggagaaggaaacgctggctgagcatctggggcctctgcttgaacgttacgatgtaaaataccgtgggcatgggattatttatgtcgaccacgaacaatacaatattttaaccattcagcaaattcttgcggacatgagttcctatctaggcgtttcaaaagagctgattcgctctaggttgatagactttggttggctcatcgatgtccgcagagtcttgcctgtccgggacagtgctgcgcgtgtcattgacaatctggagtcttgggcggcggacgaaccagaggagaatgcccccgaaatggacgatcaatatgaccgagattaa

SEQ ID NO: 327990 - DNA, 1962 bp, Pseudomonas aeruginosa
atgcacccagaacactttgatttatctagctctccattcctaccggttgcgactgaaacctgcttaagtttgttaggtgctaatggcgcaaaatctcttaccgatctgacggatccagagctggctgcgatcttggtgatccagaacttggcgagtgaggcagcggagcagctcacctctcattgggtagaaagtgttctggccaagctcattgcttgggcagttgacactcggaaaacagaggccccaggattattgtcggaggcacaacgactttttgagccgggtaagttctactctggttgcaaggttgctaaacgtttgaatctgcgatttctcctccctgatgaagtttcagcacgggattacttgttgccaaatggaaaatgggatgtcacatttaaggcccgccactgcagaaataaaagcccgtttagcgagcaggtagttacgccctggcaccgtgagcgatggttgacccctgcgcaggacaaattgatcaggactttccgcgccaatctggatgaacacctgcatattcaaggttatgcagggataggcaagagccatctgttaggcgccctgagagagtgcctgcgccccgaaaacacgttggtgctggcacacacagagggaaagctggaagctcttcgcagacgcatgggcggagcgcatgccaaggaaacgagctttaccttcatgaggttcgcacagagtcttctgcccgtatacagacctcaatctgggagcgcgccggccaggaacccaagcaagttagcattgtcgcaggagctgagtatcctcggtcttgctggatacgataagcttgcgacgctgaatatctgtttgaaggtgatcgagcgctattgccagtctagagacgtcttgctatcagccaagcatctacctaagtttcagccccccctgtctaacttggataccagggtgcttctgcaatattcaagtcgtctatggatgtacgttgaggcaaatccaaccttggacaaactggttgggctcgagacgttactgccgataaagcgcgcaagtctagcgggctgtgtggttccggcgcgttattcccacgtcctcatcgacgaaagccaggacctccctgaatcgctgcttcaaatcattgagcgtggccgccaagtgctaattacccttggtgatgaatatcaacaagccggtggcgcaatagttaatagaaaacgtgaagttaggcgaagcgatattagctattccgttcgctcaggtcgtaacgtcgagagcctggtcaacccactaatctaccggcactcgaagaaaggtaagatccccttcgaaggcgctagcgaagatgacgtcgttatcaaatattacccccagaactttctgccctcagacggttgcgtagtactgactgcatcatactgggacacgatgagatggatcatccagatgaacgccgtcgagcgaccgctaagtctatggaatgcaaacgcgctgatggattttaagcagtttatggctaccgccatagcactgttcaaaccggacttctacagagtcgatcaaattagtggtggaccgcatctgtattttagtgagacgtctaactggcagcaggtgcgtgaggcgaacaagtatgacggggcgtttctttgggtggaggctgaactggaaaaaggcttcaatattgccgatatgaaccagctaaaatggatgctcggccagcaagacaaaagctgtactataatgatggcgagagaggccggagggatggagttcgaccgagtctttctgacccctgagctacttacaaacgaaaaattcaaaaattcggatgagttcgatgaacaaatctgtgctgtatacattgcgatatctcgtgcaaaacggaaactctaccttccttgcgacgtgatcgagtgggtcgaacttcacaaccgccagcaattccgcgagctgagtggctactaa

SEQ ID NO: 327991 - DNA, 1920 bp, Pseudomonas aeruginosa
atgtttcaactcctttcctggatatccaggaagccgtcccccaccccaccaaccaaagctgccccagggggattcatccctcctctgagcagcatggaactgctcggcacgcctcggcgccggcagctactggagaacatctggcaacgtgcctcgctatccaagcagcaattcgaggagatctaccggcggccactggccaactatgcagagctggtccagcagctccctgcctcggaaaaccatcaccatgcccatccaggcgggatgatcgatcacggcctggagatcgtggcctacgcactcaaggtacggcagacctacctgctcccgatcggcgcagcgccggagtcacagtcagcccaggctgaagcctggtcggccgccgcggcgtatggcgccctggctcacgacataggcaagatcgtcgtagacctgcaggtggagctgcaggacggcagcacctggcgcccttggaacggaccgatcaaccagccataccgcttcaagtacgtgaagtcccgcgaataccagctccacggcgctgcctcagcactcctcatccaccaactgctaccgcgcacggcactcgattggctcagtcgctttccagagctgtgggctcaattgatctacctgttcgctgggcagtacgagcacgccgggatcctcggcgagatcatcgtgaaggcagaccaggcctcagttgcacaggagctaggaggcaatccggatcgagctctggctgcaccgaagcagtcgctgcagcggcagttggcagacggccttcgcttcttggtgaaggacaagttcaagttgaatcaacctagcggcccgtccgatggatggctgacccaggacgcactctggctggtgagcaagcctgccgccgatcaactgagagcctacctactggcccagggtatcgagggggtgccctcctccaacgcgccgttcttcaacatgcttcaggaccaagccgtcatccagacaaatgccgaggacaaggccatctggacggccacggtagacaacggtgctggatggagaaacaagttcacgctactcaagattgctccagccttgatctggacagatgctgccgagcgcccctcaccctacagcggatcactggtcgttgaagatggaaccgcctcaacggaaaagccggaaacgacctgtgaaattcccaacgagccggctgaacagcagcaagcaccagaaacgaagatgacgctccatcaacctgcgccgagcgttgcgaaaccgtcaaacgagatgcgggcgattgcggagccctcaactgatgaccaggaagaaacagacgatttgtacgcgcttcttggtaatatcacttcgccatcagaagagctagacactagccacgactcaccggctgcttctcctacgaacactcgcggggaggagaacctacagcagccactagggaacaaggagccaacagattgcgctcctgaagcagttgaagatgtatttatgcctagcagaagcactgatctgggacagggattcgttggctggatgaaatctggtatcgcgacccgtcgcctgttcatcaacgacaccaaggctttggtgcataccgtcgacgggaccgccatgctggtcacgccaggaatcttcaagcgttatgtccaggagcatccagagctcgaaaagctggcccaggccaaggatacgactggctggaagctggtgcagcgcgcgttcgagaaacaaggtcttcaccgaaagaccagtaaaaacctgaacatctggaccatcaaggtttctggtcctcgcaagacgaaagagctcaaggcctacctgctccaggatcccaaattgctgttccctgagcagcctctggacaacccaagcctcacggtcatcaccgatgccgaaggaggtgtggaatga

SEQ ID NO: 327992 - DNA, 1284 bp, Pseudomonas aeruginosa
atgacgccgcagcagctcaccgaagagtacatcttcgcgcacgatctccgggaagccagcgcgaagatctaccgcgccgcgaccaaggcgctgctcaagcacttcggtcctacggcaaccgtacaggacgtggaccaccgggctgtcctgggatggcggcgcaaggtactggaacaaggcctgtcgaagcggagctggaacacgtactcgaatcatctgcggacgatctggggctatgccatcgagcacgagctggtgacacactcccaagtcaacccgttcagaaagaccaccgtcatcccccccaggcgagcaagcaaaaccgtcgccgccgaagccatcctgcgcgcccgccattggctcaacatgcaggtcggcgccgagcgcggcaccggcgaacgcgcacggatcacgcccgcctggttctggctttgcacgtttgaggtcttctacttcaccggcatccggttgaatgcgctgttgtgcatccgcaagcgcgacatcgactgggaaaatcaactgatcctcatccgcggcgagacagagaagactcacaaagagttcgtagtgccaataacggaggggcttgtgcctcacctatcgaggctcctgcaagaggccgatagagccggattcgccgatgacgaccagttgttcaacgtcaaccggttctcgccgcactacaagagcaaggtgatgaactccgaccaagtcgaagccatgtaccggaagttgaccgagaaggttggggtgcggatgaccccgcaccgtttccggcacaccctggccaccgacttgatgaaggcacccgagcggaacatccacctcacgaagtgcctgctcaaccactcgaatatccagaccacgatgagctacatcgaggccgactacgatcacatgcgtaccgtgctgcatgctagaagcctggcccaaggcgcgctagagaatatcaggaaggtggattacagcggctccccgcaagcctctgccaaaccgaaaccatgcgggcaacctctcgctcgagtgagtgaagcgccgccaccggaggccaggacagagcctgcagaaccaagggagcacacaccatggacaggcattcagggaggtccaaccgcgtgggaagcagaagcgctaccacagccacctgacacctttgagcaaagcgtgctgttcactctgatggctcaacacttatcgaaccgtgccgcctcggcgtccgcggctcccgctgcaacaagtggaactggtggatggggatctgccgcccgaagcagtctcgcctag

SEQ ID NO: 327993 - DNA, 1257 bp, Pseudomonas aeruginosa
atgtgcgcccaagcctcccgcctctcggacctcaaggtcaaagccgccaagcctcaagagaaggactacgtcctgagcgatggtgacggccttcaaatgcgagtgagaagcaatggctcaaagctctggaacttcaactaccggcacccggtgacgaagaaccggatcaacatgggccttgggaccttccccgaagtttcattggcgcaagcacgcaagcgcaccgttgaggcacgcgaactcctcgcccatggtatcgaccccaaagagaaacgggatgccgtacagcaggccaggaaggcggcgaccgaacacaccttccagaacgtggcgacggcctggtatgagctgaaaaaggatgcggtgacccaggcctacgccgaggacatctggcgctccctcactctgcacatcttcccggacttgggcaccacgccgatctccgccatcaatgcccctcaagtcatcaacctgctccgaccgcttgaaaccaagggcagtcttgagacagtgaagcgactgacacagcggctcaacgagatcatgacctacggggttaattcgggactgattcacgcgaacccgctcagtgggatccgctccgtcttcaagaaaccaaagaaaaagaacatggcagcgcttccccctgatgagctaaaggagctcatggtggcgatcgccaatgccagtatcaaaagaacgacccgctgcctcatcgaatggcagctccacaccatgacccggccagccgaggctgcgaccgcccgctgggtggacatcgacatcgagaagaagatctggacgatccctgcggaacgcatgaaaaaacgccgtacacacatcgtcccgctcacggagcaggctctcgcgctcctggaggcgatcaaaccctacagtgggcaccgggaatacgtgttccctgcagaccgaaacccacgcacccactgcaacagccagaccgccaacatggcactcaagcgcatgggctttgaagggcgtctggtcagccatggcatgcgctcaatggccagcaccattctcaacgagcatggctgggaccctgaactgattgaggtagcacttgcccacgtcgacaaggacgaggttcgcagcgcctacaaccgggcggactacatcgagcgcagacgcccgatgatggcttggtggagcgagcatatccagaaagcagctaccggcaacctttcgatgtcagccatcaaggaaaatcgagataagaaagtcgtatcgatacgctaa

SEQ ID NO: 327994 - DNA, 1452 bp, Pseudomonas aeruginosa
atggttagtcccgcgcaaggatcaaaacttcccccattcgccttgctagacgagccgttgctttccttttctcccttggatgctgagcaggtagacgtacatccgctcagaggtctcgtcaactttgggccgtactccaagggatcctttggcggatacacctcgcagattcggattgcaactgttggtcctgagagcgcgttcaaacgccgtggcgaactgatggcagccctacgcaattcataccagcctggtgaccgatccgaatatgttcctcaataccctggttttgaggcgctatttggcgtgaggttagggtccgcacgtggtggtgcgcatgtcaaatggccggactccctaaatcagttctccggtgatggtgatccgcaagcccggcttttccaggctatggacgcggccctccgccgacttgacactatgcgaaatgagttcgacgtcgtgttggtgcacttgccggattcctgggctccggcgacacgtgccaagtttttcgatgcgcacgacgcgctcaaggcgctgggggcgaaatacaacatccctacccaggtaattaatgaccgggttttctcgttcaactacaaggcatcgctcgcatggcgtcttgcaatcgcactttacgtaaaagcggcgggaacaccttggaagctagcgccgttgaagggggtgccaactgacacggcatacatcggcctcgcctacgcattgcgtggcaatcaacgcgacgctcactatgtaacttgttgctcgcaagtatttgatatggatggtgggggaatgcagttcgtggcctttgaagcgcgcgatcctgttgcagatatcgctgaagcccgccgaaaccccttcttgagtcgagatgacatgcgtgctgttctcgctagaagcctggagctctaccagggtcgaaacggaggcaatctacctaagagattagttatccataagaccaccgctttcaagtcggaggagatcgagggtgcgttcgacgccttgtcaggcgtaccggaggttgaatgcatcgaagtcggagcggcgtcttgctggagaggagtttggctgattccgtctggtcaaccgaggccgttgaccaagccgtctggttatccggttccgcgtggaacgatggtcgttcgctcaggaaactcggccctagtctgggtagcaggtaatgcaccggaggcgtccagtaaaggtgattactaccaagggaagaagagcatccctaagcctctccaactgattcgccatgcgggaagaggttcactcgaactcattgctcacgaagcgctggctttgacgaagatggattggaataacgatgcgctctacgaccctgttccggtgagcatccggtattcgcagagattggcgcgaaccattgccaacgtgccggatctgccgggaaacgtttatccctatcgtctattcatgtga

SEQ ID NO: 327995 - DNA, 1242 bp, Pseudomonas aeruginosa
atgaggcatgtactcgtcgaggccagcaagcgctttggtatggtgttcgttggttacagtggtcgcgatgcctcggtcatggaggcgctaagctctgttctgcgagagactgcaccctttccgaatggcctgtactgggtcacgtcgtcaccatctcggcttctccctgtagttactcagttccttgagcaagctcttcttctaggtgtggatgttgcggtggtcgagtgcaaaacgtttgatgaacttgccgctgaagtcatcaagcatatcgatctgccccagatattgatggataacgtgatgcaggggcgagcatctcctcgtctgattccagtcaacctgcctaatgttgaagcaaagcaattcccggtcctcaggctttccgcactcctcatcgaatcgttgccaaggacggcacgtcgaataaccctttcgaaggccacaacgtctcctgctgttcgagctctgttgagagaacaacgctgtaaagcgatcgtagcggcaaacggccgagagctggcagtattcggcaaggatgaggaggtgctggcggcgctttcttctctcggcccgcagcttgcggggactgtgactctggatgcgaccaaggacagctgggcgcatggcctcatctacgacgcactagtcaaggctctatcgcgtcatcgccctctcattccaaggtacaagcggtctggccattcattggttgtcactgcctcgcgagaaggcgaggatccggaaagggctctgcagcgatcgcaggaccttactcaacttagcactgcttatgcgagctcgctgacagggagtgttcccaagctcggttttccctttcatgaaggtgtctttctgaagctagagctgatagagggacgctggtggtgcggctttgaaccgtacacatttgtggatatcccacggcctgaacgtcctgaacaggcggtgcaactcaattcagcgagcactggacacgacgcgttgggggggccgtttgagctccggagaggagaccctgctggtgactggcgcagagagcgctgggctccgaagtacaacaagcagtgggcggcgatcatcgacgcatgggcaacgctgctcgccacaactcgggatggcaaagtatgcgcctttggtctcaacgaagccgttggtattgacgcggtgtttaatatctcgcgagtcactggttggagtcgacctagtcatcatcattcttacttcgataggaccaaatga

SEQ ID NO: 327996 - DNA, 330 bp, Pseudomonas aeruginosa
atgtcattgcagtgccctcgttgtaactctcccaagatcgcatctctgcatcccgccatgaaaatcggtgccttcgtcggcacggtcggtggtgccgcgcgtggtgcttccgccgctcttgccggtggccaagccggtgcggcagtcggcgccattgctggtccgttgggcatcaccctcggctcgttgtccggcgccattctcggcggcctggccggaggtgtcggcggttgtgcgctcggggcccaacttggcgaacagttggatcgccacgtgctcgccaacaacctctgcctgatctgcggacatcgcttcaacctgccgacctga

SEQ ID NO: 327997 - DNA, 969 bp, Pseudomonas aeruginosa
atggctcatctcatcgaacgtatggcgtatgtcggcgaagccccctggcatggcctgggcagccgcctctccccgaaacaaccgctggaagtctggcagcgggaagccggcatggattggcagatccaggaaagtccggtccacttcaaagcagacgcagtcggtcacctcggcagcatccattctttcccggagcagaaggtgctctaccgctccgacaccaaggcaccgctctcggtggtctcccagcgctaccaggtagtgcagccgcgggaagtgctggagttctaccgcgatctcacccaggtctctggctatgagctggaaaccgctggcgtgctcaagggaggccgcaagttctgggcactggcgcgcaccgggcagaacacctcgctgaaaggcaacgacctggtcaatggctacctgctgctggccacctcctgcgacggcaccctagccaccacggcgacgccaaccaccgtgcgggtggtgtgcaacaacaccctgaccatcgccgtcgacggtgctacccgagcgatcaaggtgccgcacagcacccgcttcgacgcccaggcggtgaagaagcaactgggcatcgccgtctcgcaatgggacgagttcatgtaccgcatgcgccacctggccgaacgcaaggtgcaatggcacgaggcaatgggctacttcatgcaggtgctctgcgatgcccagcccaacaacccgttgccggatgccctaccgaacgagcgcgcgctgcgtcgggtgcaaagcctgtatgaaggccgtggccgtggctcgcagttggaagccgccaatggcaccgcctggggcctgctcaatgccgtcaccgagtacgtcgaccacgagcgtcgcgcccgcagcaacgagtaccgcatggactcggcctggttcggtcaaggggccgtgatcaagcaacgcgccctggatgctgccctgcagttggtggcctga

SEQ ID NO: 327998 - DNA, 411 bp, Pseudomonas aeruginosa
atgggctggctgttctcgtcccgcacccggtcagagctgatccgggacctgactcaacctgaagatcatacacacgcccacgttcgcgtcatcgcccacaccctgcggggcaacgtgctgtggtcggtcaccgaagtgacggcgaaaaccgaaggcgttcatccagaccttgctcccggcgaatccatgcgctacatccgttgtgatctgctgcaacgcagcggtggcgagtgggggtacaaagccatggacgaatccatgacgccgtactactacaactgcccgctgcgctatctcgacatggccaaggagctctcgcctggctggcgcgagcgggttcgtgcttatcacgcacagcgacggcagtcggtgaccgccacgactggaggggcaacccagtatgcggggtaa

SEQ ID NO: 327999 - DNA, 243 bp, Pseudomonas aeruginosa
atggacaccctgcgcattgcagtggcctgccgcaacgcatcaggcatgcccgatatgcccatctactccatcgcaacctctccggaggaatacgatcaaggcattcattacgacaaggccattgagctggccgaagaggccggctacgaaggtccattcatttgcttcgatgcgcaggaatgcaccccgatcctgctagcggcccgcaccttcgaccccaacctgacaccagatcgaggctga

SEQ ID NO: 328000 - DNA, 1011 bp, Pseudomonas aeruginosa
atgactcggtctcatgcaaccaccacccgccaatcagagttccaccgccctgcccttcgcttggtgggcaccaaaaacctctctcgtgaagagtggctggccgtgcgcaagcacggtatcggcagctcggacgcggcggccgcggtcgggctcaacccctacaagtcgcagctggagctgtggctggaaaagactggccgcgatgccgggctgcccaaaaacgatccgaacgacgaggaaagcccgacctactggggcaacatcctcgagcccatcgtcgccagccactacgcccggcgtaccggcaaccgagtgcgacggatcaatgccgtgctacagcaccctgattccaagttggactggatgctggccaatatcgaccgcgaggtgatcggcgccagcgacgtgcagatcctcgaatgcaagaccgctggcatcaacggagcccgtctctggaaggaaggtgtaccggtctatgtgcagttgcaggtgatgcaccaattggcggtcaccggtaagcaagcagccgacgtggccgtattgctcggtggccagcacctggagatccatcgcattgagcgcgacgacgagctcatcggccggctggtcgatctggagcgcgacttctggggctacgtgcaacgcgatacgccaccaccggcggatggttccgactcggcggagcaggtcctgcgctgcctataccctgaggaccagggtcacaccctggacttcacccaggatccggtgttgtcggccaccttcgatgaactgcagacggtacgcgccagcctggagattcagggcaagcgcgaagccgaactgaaacagcaactgcagcaggccatgggcgatgccagccgggccctgttcaccaacggtgcggtgtcctggcgcaaggccaaggacagcgtggtgctcgatgtgccgcggctgctcaaggaaaagccctacctgctggtgcgctaccccaccaccaaggtcggcagccggcgctttctgatcacctga

SEQ ID NO: 328001 - DNA, 921 bp, Pseudomonas aeruginosa
atgctcaaaggcttggccattaccccgccggtgctcggacggatttctatcggtaaggtcgtcgagaagaacggcaagcgtctgccggagaaggacgaccaattcaccctcacctcgcaggtccagctccgcgatggctggttggcccatcccctggacgaagaactgcgtaaagtccaaggcggcaagatccgcagcattccgatccgcctgttgttcaacgcaccggagctgaacttccgcgccgagtactgcctgttcgatcggcagtccgggcggccgctgtgtgtcggcaacggcgaaacctgcaagcgccgtggccaggacggtatcgcgtcgctgccctgcccttcgccggatagctgtccgttggccaagggcggtgcgtgcaaaccctacgggcgtctcaacgtggccatcggcgatgaggatccgctgggcagcttcgtattccgcaccactggcttcaacagcatccgcaccctggcggcccggatgcagtacctgcaggcgatctccggcaaccgcctggcgtgcctgccgctggagctgcgcctgcgtgggaagtccacccgacaaagtcacggctcgccgatcttctacgtcgacatcacggtgcgcagtgggctgtcgatagaggaagcgctgctgcaggcgcgggagctcgatgaagcacgtcaggcctccggcttcgaccaggtggcactggatgccacggcgcgcctgggctttgccaatggtgccttcgaggacagcgacgaggaaaccggagccatcgccgaggagctcttcccagagccgactcctgaatcgcccccttcaactgctcctgcagcagagccacacaccacaccgaaacccaccctatcgacgctgctgaaagcccgcgccgaagctcgggcccaacacgccgcggagtga

SEQ ID NO: 328002 - DNA, 183 bp, Pseudomonas aeruginosa
atgaacttggtgcgcttcattggtttgctgttcgtgttcatcggcgtgctggccagctgtgcggtggctgttgcgctgctggtgctcatgctgcgcttctggccgttggcactggccatcgtgctggcgctgatattgttccaccggctcctccaacgggtcgggctccgcatttccctctag

SEQ ID NO: 328003 - DNA, 336 bp, Pseudomonas aeruginosa
atgatcacacggtgcctgatctgtaactcttccgtggtgctgtccaaggacgccgccaaggcgctggccaggctgatgggtacgctggatggtttcttgcgcggcatccaacagtcgccagcccggcagcagccgatcacctcgaacctacattgcgacagtccgctggagcgcgcgtttcatctgatgctcgatggcatttgcggcgcggcggcgaactggaacagcactggcgacttcattcgcgatgtgcgccgcttccagttcatggaatacgactgcttgtgcctgcgttgcggggcgaagtacaacgaagagcccgtaccgcgcagctag

SEQ ID NO: 328004 - DNA, 348 bp, Pseudomonas aeruginosa
atggttggtacggatcagaaagcactggctgaagcggtagggcgggcgattgccaagcagcgcatgcgctgcgggatgacgcaggacgaagtggcggaggtcctgggtgtggggaatgaggcggtatctcgcattgagcggggaatcgtcatgcccaacattgctcggctgttcgagttcgcgacgatcttcaattgcaacgcgatggaactgctgagcgaggccagcttgcgcccggatgaccaggcctcgcggatcagcggattgctgaatgccctggaggagagcgaccgtcagttggtcgtggagatggtggagcggttgagcgagcgactcagtcgcgggtga

SEQ ID NO: 328005 - DNA, 447 bp, Pseudomonas aeruginosa
atgcacaagcaactgcttctggcttctctcctcggctggctggccaccagtagtgctcacgccggcacctacgaatggacgtccggctacacccaaggcgtcgaagaacacctggtcgacgatggcaatggcaatgagctgaacatcacctgcccagacgatggagaaagcgcggtctccgcctacgccactatcgccggcaagcagtactcctccgaaaacgatggcttcgatgtcatcgtcgacggcaccaccttcagcaaccccttctacaccgactgcgaagcctgcagtgccagcttccctggcttctgggccgcgctgcgcaaggcccataccctgcagctcagtgccggtggccagacggtgaaactcccaacccagaaccttccccaggttctcctgcccctgaccagtaagaagaacctctgccgctccggctggtaa

SEQ ID NO: 328006 - DNA, 360 bp, Pseudomonas aeruginosa
atggaacaagaacacgaaacggcggacacgccgaatgatctgcccgccagtccggaggtgatcggctggggcgtcgcctcgctcgtcctcaccatcatttttcttaccttcaacacctcagcaatggtgttgggcgccagcttcatgttgaagctgctggccggcctcgttggtttgataacaggctggatcggcgccctggtgggcaacgcggtccgcaagtttgcccaacccgatgcgatctacaccaacggcggcgcacttcacctgatctggctgaaagtgttctggctgattggcccgcaagtcattggcctggtagttggcatcggcctcggatgctccctggtattgagataa

SEQ ID NO: 328007 - DNA, 264 bp, Pseudomonas aeruginosa
atgaagagcaagttctatctggtgctgggcctgttggtcctggcgggctgctcggatgacaagtccaagctacgcggagagtttctctccggttgcgtgcaaggcgggtctcccaagcctatttgtatctgcatctatgagcgtttggaaaagacgtattcgaccgctcagttgaagcagatccagacagggcgaggcccgctggtgtcgtccttcctccaagacagcgtcacgcacgcaaaagcctgtatagcggagcagtga

SEQ ID NO: 328008 - DNA, 2562 bp, Pseudomonas aeruginosa
atgacaccgacgtaccgcaaaaccctgctcgccctggccatttccgccagtgccctgcccctcgccgcccacgccctgacattgaccaacagtggcctggacagcgaaggcaacacctacaccgacagcaccgaagtgaccggcgccttcactggcagcgaccagccccttcgtttctacagtgacaccttcaaccacgacctggtgctcaatgcccaggtacaagctaccggcgacgacctcaacggagtcgacctgtcctacgccggagacgatgacacgccctcgcccatcggtgcgcccaccgaggtgttcggcaacctgcagaacaagggcaacatcacggtgaagggcgcgggcgtcaccggcctgctgatcgacccggccatcatccatggcaccttggtcaatgaaggcaccttgcaggtggcgggtggcgtactcgagggcgacggtattcgtggcctcaagttcgccggccaatccgagctgcagggcgatctggtcaacgcggccagcggcaagatcctcgccgacggcgacgaagccacgggcatccagctcaagggcggcaccatcactggcaagctgatcaacgatggtctgatccaggtcagcggtaccgaatcgacgggcgttctcgccacctatgacgacgacatgggtggtccggatcgagtggacctgggcggaatcgagaaccatggcagcatcgtggccagcggcacaaatgccacggccctgcgcctcgatggcgtgagcttcgctgacgctccagtgcaggtgctcaacaccggcaacatccaggctgacgatgcggccatcaaggccggtgccttcgatatcgacggcgcgaatgccagcaataccctggtcatccagaacagtggcaacctaattgccaaggacgaagccatcgatgcctcccaggccagtggcggtgtgcacctggtgtggaatgccggcagcatcaccggcaacttgatcgacctgtccaacatcgaagtgaacggcgacgtgaccttcaatggcaccgacgccagtaccgatggcgcgaacatccgcctgaaggacgccggttggctggatgtcggcagcgatgcgggaaacacgccggcacacctggaattcggtcagccgcacaccactatccagggcaacctgaacgtggccggcaactcgtcgctggggctcaacctgagttcggcgaccgatccgagcaaagccgtggtcgcggtctccggcaccgcagagtttgccaagggttcgcagatccagctgacggcccagggcaacgacttcaaggcgcagggtacgacttacaccctggtccaggcgggcaccctgcaggatgaaggcctaagcgtgaccagccgctcggccctgctgaacgtcgacaccgtcagcagcggcgacaaccagatcgtggccaaggtcagcaccaagggccaggacgaagtcggtgaggtgatcggccaagtcggcggctccgctaatgcgcagcatgcgggcgcggccttcagccaagtggtggccgggctggcgcagagcaatcccaacgatccggtgttccaggcctacgtgaatgcctcgcaggatccagcagcgctgaagcaactgacggaacagttggcccccgaggtgaacggtggcgctacccaagcagccaccagtgggcagacgctgatgagcaacgtcacaggcaatcgcaccagcagcctacgcggtgcatcctcgggcgatatgctgcaacacaccggtgtctgggcccaggcgttgtacagcgatgccaaccaggacctgcgtgacggcgtagccggcttcaacgcttacagccgcggtatcgccattggtgccgatggcaagctcaacgaccaattgaccctcggtgtggcctacagcttcctgcacacccgcgtgaacagcgacgacggcaacaccaccgatgtggatggcaatgcgctaaccctgtacagcggcttcgaacagggcaactacttcgtcgacgccaacctgagctatgggatcaacgacaacgagagcaagcgtcgtatcgccggcaccaccgccaagggcgactacgacagccaagtgctgggcgccaatgtggtcggtggctacacctatcacctgaacgagcagttcctggtcgagccgcgcctggccgcccgctatgcgcgcgtcgatatcgacggctaccacgagaaggggtcgtcggcggcgctcaaggtcgatagccaacgctacgaggtggcagagctgggtgcaggtgtgcgcgtggccggtgatttccaggtcggcaacggcaacctgcagccgcaggccaagctgatggcctaccatgacttcgccgcggacgaagcccagagcacctcgaccttcgtgctgggtggcacgcccttcgtgagccagggcgccaaggccgtgcgtaacagctacgaagcgggtgtcggtgcggactatcacctgggtgcggtcacggttggtgtcagctacgactacaccggcaagaccgacttcaatgccgacaccttcaccgccaaggtccgttacgacttctga

SEQ ID NO: 328009 - DNA, 900 bp, Pseudomonas aeruginosa
atgagccactacctttccggcctacatgtgtgggccggttttcttcgagttctcccggcgctgctcggcgccctcctcgccggctgccagtctccccgcgaggcactgcagcagttggctgacgagcatgggcggcaactggaaatcatgccggggcagccgttcccgttggccatgcttccaccgcagagccccacgaaagccactcgtttacgcgtctacctggaaggtgatggccacgcctgggccacggcgacccaacccagcctggatccgagtccgcacaacctgctggtggcgcgactggcactagatgacccaacgccgaatgcctatctcgctcggccctgccagttcgttatggcaccggcctgtgaaccttcgctctggaccaatcggcgcttttcgcaggagatggtcactagcgtcagccaggccctggaccagattaagcagcgttacggcaatcgggagttcgagctggtgggatattccgggggcgctgcactggcactactgctggccgcccagcgagaagatgttgctcagctccagacacttgccggcaacctcagcccgcggctttgggcaaaaatgaaagggctctcgcccttcaccggctcactggatccgctggactatcgggatcgcatagcgtcgatatcacagcgacatctggcgggcgacgcggacgacgtggtccccgcgtcgctggtcacggcctacttggagcagctacgtccatatgcctgcagtcaggttgtaatttctcctgctaccgatcatgagcaaggctggaagagcacctggaaaatctggcgaaatcagccgttatacggcgagaacaactggccatgcctaagccatcgaaattttcgccctcagcaacgcggccagtga

SEQ ID NO: 328010 - DNA, 981 bp, Pseudomonas aeruginosa
atgaagcagatgacctttgtcgacgccgagtacgccggcaagcgcaagcagaaccgtaaggagctgttcctgatcgagatggatcaggtggtgccgtggcaggggttagtggccctgatcgagccgcactactccaagggtgagggcggtcgtccggcgtatccgttgatggcgatgctgcgcgtacatctgatgcagaactggttcggttacagcgattcggcgatggaggaagcgctgtacgagaccacgatcctgcgccagtttgccgggcttagcctggagcgtattcccgatgaaaccaccctcctcaatttccgtcgcctgctggagaagcacgagttggcggctggggttctggcggtgatcaatggttacctgggcgaccggggcctgtcgctgcgccagggcaccatcgtcgatgccacgctgattcatgcgccgagttcgaccaagaaccaggacggtaagcgcgacccggaaatacatcaggccaagaaaggcaatcagtggtacttcggcatgaaggcgcacattggcgccgatgccgagtcggacttggtgcacagcgtggtgggtacggcggccaacatggtcgatctcacccaggtcgaccaactgctgcacggcgaggaaaacgtagtctgtgccgatgctggctataccggagtagagaaacgcgaagagcatgcagggcgccaggtcatctggcaggtcgcggcccgccacagtacctaccagaaactgggcaagcgcagcgcactgtacaaagccaagcgcaagatcgagaaggccaaggcgcaggtacgggccaaggtcgaacatccgcttcgggtggtcaaacgccagttcggctacgtgaaagtgcgcttccgtggcttggcgaagaacaccgcgcagttgctgacgctgttcgccctgtcgaacctgtggatagcgtgccgatatttgctggccagcgcaggagaggtacgcccgtaa

SEQ ID NO: 328011 - DNA, 978 bp, Pseudomonas aeruginosa
atgtcgaaaatcgattggttgagccagctcctgagaatcatcaccgttacaggccaactacaagttcgatgctcctacggcgcaccgtggcgtgtaagttgggagaagtcggcaggacacgagattccctatcacgttgtactgagggggcgtgcgatcgtcgaggacctggagagagggaccactaaagaactcgtgggtggggacatcgtgcttttcccccatggcgaagcacatgtgttacatgacggcagtggtgacgagcccgccaagggatccattcggcgtagcgcggcgggatgggcggtgagtgagaatagtgcccagggcgaacgcctggatatgctatgcgggcacttcttcatagcgccaccccatagccacttgatacgtgattatttgccggtagatttggtcgttcgggcgctggatgacccgaccgccaataacggtctatcggcgtcgacccatttggctggcttattgaacctgatgcgcgtggagtccaatgaggataagccaggcgcaggggccattctcaatgctctgaccgctgcgttgttcgcattggtgcttcgcgctgccagtgaagccgaacaagctcctgtgggcttgttggcgcttgccgggaatccacggctggccccggcaatttcagcaatgttctccaacccggctcatccctggagcctccctgagttggccgagttgtgcagcatggcgcgcgccactttcatgcgacatttccagagagaactgggacgatcagccaacgacctgctcctcgatatccgcatgagcctggcagctaacgaactgaggaaacccgcagccacgaccgaggctgtcgccgactcagtcggctatcgatcagtggcggcgtttcgacgtgccttcactgacaggatagggataacgccagggcaatggcgccgtcgagctctcggcgaaagcgaagcagccgctaccacgtggtaa

SEQ ID NO: 328012 - DNA, 546 bp, Pseudomonas aeruginosa
atgaccagaacgatcgtactcaagcccgaacaagtgccagccgattctcaagccacgcttgactcgttcagtaaggggctggggttcaccccgaacatgatggcgagctttgctcaaagcccgatcgcatttaacgcatgggcgacgctgctcggctctctgagcaagacgcttgatgtgaagactcgagacagcatcggtttggctgtgtctgaagtgaatggatgcaattattgcctaggtgtccacagcttcaccgcggagcatctggcaaagatgccggccgaggacatcctcctggcccgtaaaggtcacgctaatgatcccaagcgcaatgccgccgtgcagttcgcgcgcaaagtcatcgagacccgtggccaggtcaacgatgccgacctgcagagcgttcgggatgtcggctacacggacgcgaacatcatggaaatcgtagcgctggtagcgatgtactcgctgacgaacttcttcaacaacgtattcgccccagaaaaggatttccccgccgtcagcccggcaggctcgatctga

SEQ ID NO: 328013 - DNA, 618 bp, Pseudomonas aeruginosa
atgactaacgccgtcatcgaaaacattctgagccgaagtgccgccaagtactacgatcctgacgccatcctgagcgatgatcagattcgtgacctggtgagcatcggaacttccgcgccgacttctttccatctgcaaaactggcgcttcatagccgtacgaacacccgaggccaagtccgggttgcgctcgatcgcgtgggaccaggcggtgatcaccgaagctgcggtgaccttcgtgatcatcggtcgattagccgatgccagcaccatcccggatcgtctggcgccagtagtagaggcgggtatcatgccggcgcatcttgtgcccgaatgggaaaaccctgctcgcagtctgtacgacgatcaacctcaacggcagcgcgacgaggcggtgcgaactgcgaccttcggcaccgcagcaatgatctacgccgcccgctcgctgggctggggttcgacaccgatgatcggctttgatgccgaagccgtgcaccggaagttcggcctagcaggtaatgaaataccggtgatgctgctaagcgttggaccggagcgtgccgggaattggccgcagaaaccgcgcatgccagtcatcaatgtattgagctttgcgtaa

SEQ ID NO: 328014 - DNA, 954 bp, Pseudomonas aeruginosa
atgtccgaatcgcccttgtccgcgcatgtgatcctggagcatttgctggccgtgcttgatgtcggcgttacccatttcaccgtctgcgatatacgtaccggttggggaatgcgcttcgactcctgcgagacggcgagtctgcattattgcctggaaggtgccggcagactggttgtccggggagaggcccccatccagcttgagtcacacagttttgtactcttgccgccgggagtttcgtatcatcttgaaagcgcctcatccgaacctgtgcggcttgagtggaaggcccgcacgcacggggtaccggtacaggagtccgttccgacgctgatcgccggcgatggtcagaagggtgtcactacagcgtgcggagaaattcgcttggggttggtgggtggggcagaccttttcaccgctttgggaaagccacttgttgtgcacttcggtggcgccgacgggttgcgagaccagtttctgatgctgttggccgagtcggcccgaccaggggtgggctcacgtgtcctgatcgaggcattgcttaagcaatgtctgatactggccttgcggcgctggatcgaaagtgattcctcgccgttgccctggttgactgccatggcggatacgcggctgagtcgtgccttgcttgctatttttgagtatcccgctaccgcatataccgtagagagtcttgcgcaaatcgccggtatgagccgttcggcgtttgcttccgcattccggagcgcatttggtcaatctccgatgactctggtcaagttggtacgattgcgtcgtgccagtgaactcttgatcactacggcacagccaattgccgaggtcgccaggcgcgttggattctccagcaggagcaacttttctctggcatttagccagcttcatggcatggaccccagtctctatcgtcgtacgtactcgataatcagaaaaggctag

SEQ ID NO: 328015 - DNA, 597 bp, Pseudomonas aeruginosa
atgcgaatccccctgctctttgctactgcggtttccagcactcttttcatgacagccgcgctctcccagtcgtcatcgaatgacggcgacatgccagcaagcaagcgatacctccccgaatatacgacgtctggtgagttgatactgccaaagaacttcaatgaatggatcttcgttggctcgcccctcacacctaacggactcaacggtggaaaggccaacttcccggaattccacaatgtctatatcgagcccggctcatacgcgatctacaaaaataccggcgagttcccggaaggaacgatctttttcaaagagctgcagttaaccatccccggtgagaatcccgatggttcgcgcaccgaagcatccgggcgtggctacttccctggaaaactgaacggtgccgacgtgaccgtcaaggactccaagcgctacgccgacactgggggctggggttatttcaatttcaatcaccatgaaccgaaggcggcgacggccaaggtgaaagccaaagccgaatgtgcgtactgccacatggcgagcgccaagaaagacgacgtctggacacagttctatccgctgctggacaagtga

SEQ ID NO: 328016 - DNA, 579 bp, Pseudomonas aeruginosa
atgaaaatcgtcaggccgttatgcgtaaccctggcagggttggccatggtaattatcgtcaatgcctacgggcaggctggcatgcgctcggcatacggggaaatcacttccgccgtagtcgacgacaaagggaacatgcgcgtcccctccgactatcgaagcgcataccaagtgttgggcacttgggcagttgccgcagacaacagtccagggtcaaaggagatgcacgtggtctatgcatcccctggagccgtcagcgcataccgcaaggccgggcactttcccgacggcaccgttctcgtgaaggaagtcttcaagacgacaacaaaacccatgacaaccgggacggtaagcagtgcgggcactttagccgggtggttcgtcatggtgaaagacgatgccggccgatttccggatagcaagctttggggagacggctggggttgggcgtggttcgatgcggccgatcctgggaaaaccacatccacgaactacaagcaggactgccagtcctgtcacgtgccggcccaagcgtcagactggatctatacccacggctatccgcccctgagccaataa

SEQ ID NO: 328017 - DNA, 174 bp, Pseudomonas aeruginosa
atgcgcaaatacgcccgtggcatcctcgccagtgctcgtttccccctgcacaccagtgtcctggaaggggtgaacaaccgcatcatggtgatcaggcgcatggcctatggcttccgggactcggactacttcttcctgaaaatcaaggccgcctttcccgggaaagcgcgatga

SEQ ID NO: 328018 - DNA, 951 bp, Pseudomonas aeruginosa
atgagcatattgttcttgagcgctgctatggcatttgtagcggggtttgcaataaaacgtggaaatatttgtgccgtggcagctatgcatcaatgggtggtccaccgtaatacacatcatctgagagcacttgttattgggacctgttgttccggggtcatattgacggcacttgcctggggctttccagataccgccagcgtatctgccgagtatgcagtgacaagcgccaccatcctggcaggcgtactcttcggcgctggcgcctggctcaatagagcctgtgtattggggactatcgcatatctatgcaagggcgacctgaactatatgggcacactcctgggtatgtttttcggcggtttcatcgggcagtacgcgtataaaccgctgttgacttccggtgtttcacctttgcagatgcccacgatgttggcggcaggcattgtctgtgtgtatgggttcgttttatttctgggcgtttggaagcattttcatagtcagcgagtggacgacaagccacactccatccatctgcgttcgcatgacctattgcccatgatcattgtggtaggagcttgctgcgcggctcttcacgcattgaatggggagtggacttatctggcagctctcatgcgggtagcagaaaatgtgacaacaaatatagacaagccactagggccaatcttgatttattcaattgccacgttctccggtggattactggcggaaagatgcagaggcaaaatcaagatacgtgttccggtgccggggttgctcgctcaacgattgataggcggcatggcgatggggttggcagcttgcatgatccctggcgggaacgaatccatgatgttcagcggtgttccatcattgctcccccacgcaatcatcgcctatgtggcgatggcgctgactctgttgatcatgactcgggcttttcgacgctga

SEQ ID NO: 328019 - DNA, 513 bp, Pseudomonas aeruginosa
atgaccacttccatcattgatcgcgttaatgctgctggtcttttcaagaacggactgggcgcgcaagtcacccgcttcggggtaggggccatttatttcgctctgacggttatctatttgtggttcggaggcatgaagttctccgggtacgaagcgaacggcatttatggatttgtcagcaacagtcctctgctttcctgggtgtacagcttcatgagcgttcaggggttctcgaactttctcggtgtcctggaaatttccattggcgtgcttatcgcggcccgagtcttttctccaaagttctcggccttgggcggggtgctgtccgcgggcttgttcgtcacaacgctgtctttcatgttgacgacccccggcgtcttcgagcctagtctcggtttccctgcgatttcagtggttcccggccagtttctgctgaaggatctggggcttcttgccgcttcgatcttcattgccggtacctcgattgccgcgcttgaacaggaaatcggctag

SEQ ID NO: 328020 - DNA, 840 bp, Pseudomonas aeruginosa
atggatcgcttatccacgctattgacgctattcggtgttcgcgctgacctgttttacagcggtgggctttgtggggtgagccaattcgactcggcggatcggaaggggtacatacatctattgcaggaaggggagctggggttggtaatcgcggaccgaccgcaggtacttctgaccgagcccagcctgattttcgtcccccggcccagcacgcaccaactgatcggcactgagaacggcggcgcgcgcttgcaatgcgcatcgctagagttcgctggcggcgctaacaatcccctggcggcatcgctacctaattcgatcgtgctaccgctaactgaacttccaatgctttcagacacggtcaaatggttgttcgccgaagctgccagtgatcattgtggccgccacgcggctctggatcgattgttcgagcttacggttatccagttattgcggcacctgctcgaccatcatcaactaaaatccgggatgatggcgggcctggcagataaccgtctggcccgttcactggtaagaattcacgaggaaccgcaccattcatggtcgatctcggaactggccagcgaatcgaatatgtcgcgggccagctatgccgcgcatttcaagggtattgtggggcaaacccctgccgagtatctgttgagttggagaatcagtcttgctcagaagctgttgcaggaaggcatctccatggccttgatttccgatcaggtgggatatgaaagtccctccgccctggctcgtgcctttcgacgaaaaaccggcttgaatccgcgtgactggatgaaatccatcagcgcaaacggttctcgtccctga

SEQ ID NO: 328021 - DNA, 327 bp, Pseudomonas aeruginosa
gtgattctggacaacagcgcgacgcacaagaccgccacagtcaaggcgtggctggaaaagcatccccgtttcaagctgcacttcacaccgaccagcgcctcctggctgaatgccgtggaggactggtgtgctcaactggagcagtgggcgctctatcgggacgcgttcagcagtgtctcggctctgcaagcggtcatccggcgtttcattgaggcccataacgaacattcagtcaagccgttccagtggaacaaaaccgttgagtccatcatcaactgggtacatcgggcaaagctggccgcaatcaagcataagttattggattaa

SEQ ID NO: 328022 - DNA, 378 bp, Pseudomonas aeruginosa
ttgaacgcggacgcgatcctgttgtgcgcactggaggagatacctgacggaggcgccaggccgctgcaactgaatcactcaggcgaagtccttgtgctggtcgcggtgcgccgtgctgaccaggcttgggtctatcgcaattgctgcccgcatttttcggtgccgctggatttccacccgggtgagttctgcacgtacggcggggccttgctgatgtgcgcccatcacagcgccatgttccgcttcgacgatggagtgtgcatcgacggcccctgcgcgggcgcgcgcttgagtgcgttaccgaccgaggtcaggcaggggagcctgtggttgtgcactaatgctccccccgtgccgtctaatggactgtctggttaa

SEQ ID NO: 328023 - DNA, 312 bp, Pseudomonas aeruginosa
atgcaccagtattttgccgtgttcgccaccgacaagccggagcagcaggcggtacgccagcgcatgcgcctcgcgcaccgtgaacacctacgcaatccttcgccgcatcgcgtcatcgtgcggttgggcgggccaacgctggatgcctccggtagttgcatgaacggtacgctactgatcgtgcaggcggcgtcgctggatgaggtccgtgccttcctcgacgacgacccttatgtgcgtgcggggatcttcgagcgcatcgatattcgcccgtggaactggggcttgggcaatccggagttgagaacttga

SEQ ID NO: 328024 - DNA, 441 bp, Pseudomonas aeruginosa
atgatttttttccatgccgccactggcggtttctattcgaaggatgtccacggcgaccgcatgcccatcgacgcgcggatgtatcccctcgaggaagctgaatacctggcgctgttggtagcccagagcgagggcaagcagatcgtcgccgacgccgccggccgtccgttctgtatcgacccgccggccccggcagaagaggtcctggcccaccgtgagcgcatctggcgcgatcgccagttgacgcttactgatggccccatcgcccgtcaccgggatgagctcgacctgggcaagattacgaccctgaaccaggcgcaactgctcgaactcacgctgtaccgcgccagccttcgagactggccggcatccgcggcgtttcctgatttaggcgcaagacccgagccgccgctgtggctcgaaccgctcatcaccccctga

SEQ ID NO: 328025 - DNA, 1026 bp, Pseudomonas aeruginosa
atgaaagccgcagtaattcatagttttggtgcgccggacgttttgactgttgaagacgtccttaagcctgagcccgggccggacgatgttttgataaaagtgctcgctatagggcttaatcgaattgatcactatgtacgtgaagggtggatcaatcctgatattcaatttccgcatgttctgggttctgatatttcaggtgaaatcgaatcagttggagagaatgtaaaagagtttaaaaaaggtgacagagttgtcccgttaccggggtatccagtggagagcgatgagatgccttccagtcctcttgctgctacgccaagctatgctattaggggagttaagcattggggggcttatgcagagtacatggttgttccggctcggtgggttctacacgatagtacaggtttgaatccagaggaggtcgcagcattacctatgaaactggtgacttgtattcaagcggttaggagtgtggcgcaagtaaaacaaggtgattacgtgttgatccatgcgggagcgtctgggacaggaagcatcagtatccaggtcgcaaaagcattaggtgccaaggttgcaaccacgttgcgaagcatggataaacaagatgtcgtgcgtcagctgggcgccgatttgattatcgattcgacaaaacagaattttgttgaggagattctgagttggacggctggaaaaggtgttaacgcagttatagataatttggggggggagtttttctcgcgatcaattgatgctcttcaacctctaggaacacttgtatccatggggatggtcgcgggtaatgaggctactatacaactagtcccctttttctttgctcaaaagcagatcaaaggatcggttatgggagggctcggggatatgcaatggggtttagagcaagtcaaattagggactatcaagccagtcgttgacaagattttcagcttggacaacatatccgaggctcatgtgcggcttgcggcaggcgaagctttgggcacgattgtagttaaactatga

SEQ ID NO: 328026 - DNA, 873 bp, Pseudomonas aeruginosa
ttggggcgctggcaccgcttcgagacgccccgcatcctgggcattgacgagctatacctgaacaagcgctaccgctgcatcctgaccaacatcgaggagcgaaccctgctcgacctgctggctacccgccgtcaggacgtggtgaccaactacctgatgaagctgaaagaccggcagaaggtcgagatcgtcagcatggacatgtggaacccctaccgggcagcggtcaaggccttgctgccacaggcccgtatcgtggtcgataagttccatgtggtgcgcatggccaacgatgccctagagagagtgcgcaagggcctcagaaaggagctgaaaccgtcccagagccggactctcaagggagaccggaaaatcctgctgaaacgcgctcacgaagtctcagaccgggagcgcctcatcatggagacctggacaggcgcgttcccgcaactgctggccgcctacgagcacaaggagcgcttctacggcatctgggacgccaccacacggctccaggcagaagccgccctggacgagtggatagccaccatcccgaagggccaaaaggaagtctggagcgatctggtcagggcagtgggaaactggcgcgaagagaccatgacctacttcgagacggacatgcccgtcaccaacgcttacacggagtccatcaaccgactggccaaggacaagaaccgtgaagggcgcggttactccttcgaggtgatgcgggcacgaatgctctacaccacgaagcacaagaagaaggcaccgactgcgaaggtctctcctttctacaagaaaaccatcggttacggactgccggacttcgcagaggaactcaactacggagtcgatctatcaaccatctga

SEQ ID NO: 328027 - DNA, 3441 bp, Pseudomonas aeruginosa; identical to SEQ ID NO: 289727

SEQ ID NO: 328028 - DNA, 255 bp, Pseudomonas aeruginosa; identical to SEQ ID NO: 142950

SEQ ID NO: 328029 - DNA, 897 bp, Pseudomonas aeruginosa
atgagcaaatcctgtggtggcgcctgtggcggtgatgcaacgtccgcagcggataccgatatacaggcctcctccgaggcgccagggagatgggtcagtgtttatgccgtgccgaagatggactgtccatcagaagaacgaatgattcgcctagccctgaacggctttgaggagattcgggcgctgtccttcgacttgtcgaaccgccggctgaaggtcgtgcatgacggcgaggtcgagcccgtcacctcgaaactgaagaccttggggctaggcgcctcgcttcaggaaaccgtcgctgcaaatccggagaccatcaaggccgccgagttttcggcagcttctgctaagcaagaatccgggaccctgcgctggttgctcggcatcaatgcacttctgttcgtggtggaaatgactgccggtctgatcgcccggtccaccggcctgattggagaatccctggacaattttgccgatgcggcggtgtacgggcttgccctttatgcggttggacatagcgtgaaaatgcaggtacgtgccgcgcatcttgctggtgtactgcaactgatcttggctgtgggcgtactcatagaggtggtgagacgctttgtattcggtagtgagcctgaatcgctggtgatgatggctatcgcattcgtcgcattgattgccaataccagttgtctgctgctcatatccaaacatcgggagggcggggcgcacatgaaggcaagctggatattctcggccaacgacgtggtgatcaacctgggggtcatcaccgccggcgccctggtcgcgtggaccggttccaattatccggatctgattatcggcaccatcgcggggggcattgtacttaacggtgccagacgcattttggcgttgaagggttaa

SEQ ID NO: 328030 - DNA, 408 bp, Pseudomonas aeruginosa
atgcgcattggtcagttggcgcagttggtaggggtcgaaacacagacgatccgcttctatgaacagcagggcttgttgccgccgcctgatcggcaggacaacggttaccgtgtctatatcgagaagcatggtgaggggctggccttcatccgtcgctgcagaatcctgggcctgtcactggctgagattcacgaactacagagctatgaggacgaccctcatcagccttgtaccgccgtcaacgccttgctcgatgatcacatctctcatgtgcggtcgcagataaccgctctgcaagcgcttgagaaacaactcgtttcactgagagcgagttgcaacgatgaccgggaagttgaggcgtgtggggttcttgctggaattagcgaaggaaacatgcaccagcagtag

SEQ ID NO: 328031 - DNA, 555 bp, Pseudomonas aeruginosa
atgtccaagcagcacatcatccatttcaccgggccgatcaattcgtccacctgcggcaatctgatcaacacttgcgccaaggtcctgcaacaggaggccgaggagttgcggatcaacatcgccaccatgggcggggaatgcagctacggctttaccctgtacaacttcctgcgcgcgctgccggtgccgatacatacccacaacctgggtaccgtcgagtcgatgggcaacatcctgttcctcgccggcgagcgacgcagcgccagtgcccacagcaagttcctgttccatcctttccactggaccctgcatggcgcggtggaccatgcgcggatggcggaatatgcgatgagcctcgactacgacctggagctttacgcccggatcgtcgccgagaacacccgtgatgcgccggaacgcctggacatcccgagctacctgatggcctatccgcgcatcctcggtccggaagacgccctggcttgcggactgatccatacggtggacgattcgcctatacccgcttccgcctgccagtggagtatccattcctag

SEQ ID NO: 328032 - DNA, 174 bp, Pseudomonas aeruginosa
atgaaaattatcataaagcagcatgataaagaaaggatgagtcgtgagtttaaaggggcgggagtggacctttgggaggtgtatcagggggaggtacttgttggagtataccaaagtgaagacgaagcgataaagtataaggagtccttggaagaaagaacgaaggaaagctga

SEQ ID NO: 328033 - DNA, 858 bp, Pseudomonas aeruginosa
atgaaaaacaatactaaaccaactcagcatagtgccatagtcaatggagtgcgtttgcgttacagtatttcaggctcgggtgaacctctggtattgcttcatggttggccacaaagtagaagagaatggcgtcatgtcatcccttctttagcttctcacttcaccgtcattgctcctgacatgcgaggtttcggtgactcagacaaaccaagcagtggatacgacaaaagaacagttgccaaagatattcatgaactaattcatcaactgggttttgaaaaaatatatctcgtcgggcacgatatcggtttaatggttgcgtatgagtatgcagcctcgcatcctaacgaggtaaaaaaattagtcgtaatggaggctgcgatcccgggcctaggtctagaggccttacaagatacagctcgctttccacatctttggcactttggcttctttatagctccaggtgttgcagaatcattagtaacagggcatgaagaagttttcttgagatatttcatacagcaccttgcttatgatgcatcagccattacagacgaggatatagcccactactctactaacatgaaaactcccggaggattgcgaggtggatttgaacattatcgagcgttcactgttgacgcaatcaataacaaagaaaacgcatcaaccaaactgccgatgccagtgctgggtattgggggttcacacggaatgggcaaccatgtgggtgaactcatgaaacctttggcccagaatgtaaaaaccattgtaatcgatcgtagtggccactggattccggaggagcaaccggagcaactagtaaatgtgcttataaatttcttaaatagcaaatag

SEQ ID NO: 328034 - DNA, 612 bp, Pseudomonas aeruginosa
atgaagttgttctatgcacctggaacctgcgcggttgcatgttggattgcacttgaatgggttggaactcaatatgatctgataaatgtcgattacacctccaaagagtttcagcaagtaaatcctcttatgttggttccggccttggatacagggggagggcaagttttgacacaggctagtgctatattgacctacatatccgagcaatatcctttagcatcaatagggtgcggtgatagtgtagaagctagatcgaagttcaatgaggtaatgtctttcttgtcaagtgactttcatccatctttctggccatttttttcaccccagcgctttacagtaaatgaatcctcagaagcacttgaagacgtcgttggcgccgcccacgtaagaataaatcgagtaatgactcaccttgaccaacttgttggagaagaaggatacctgtacctaggacgacgatcagtagcagatgcgtacgcatatgtcatgattcgatggactgaaagactgccgaaaaaatggcgagagtaccccaatattgctaggttctattctctaatggaaaaagaccctatagtcaaaaaggtcatccagctctccaacgcatga

SEQ ID NO: 328035 - DNA, 741 bp, Pseudomonas aeruginosa
atggttatgcctattactctttctgttcagcgtatgcgacatggtgatggatttaatgcttacatgctacgcaatgcgcaaggagtgctggatcctttccttggggttgatcacgcttggatgagtgcgcctactttcccgcctcactctcactccggtttttctgctgtttcgtatctgtttcttgactcagagacgagcattcacaatagagactcgattggaacggataatactattagagcgggcggagtgcattggactactgccggggtaggagtgattcatgaagaggttcctgctgagaccgataaaacggtacattcattgcagatttttgtagatttaagcattgagaaaaaaaatctcgagccatatccactaatacttgagccagaaaatgtacctgtagttcgatttccgggagtcgaagtgcgtgtgcccataggcagtttcttcgatatgaagtcacctctaacgccgcctactgatgtgacgttgcttgatattttaattgaaaaggataacggactttctgtgcctgttgaagcggggaaaatagcatttgctattccaatttttggaaagattgaaataggtggagattcttatgagtgcgaggatcttaagattcccttgtttccagtaagcccagagccatatattgttgagataaaatcgagtaatggacgcgctggagttgcaatgttcgttgggagtccgcttcatacagcgttgtaa

SEQ ID NO: 328036 - DNA, 1482 bp, Pseudomonas aeruginosa
gtgcgcttgcgtgtgtgcgtggtagtgatactaagctcttttttgtcgtctggttgtgttccaaagcacataaggccgcagtctgaggttttacgggcagaagacttcggattgaaaaagactaatggcaaattctcgagaactatatggccaacgctagattggtggaaagtttttggcgataaacagttaaacctattagttcaggaaggaatagccaatagtagtgacttacgggctgcagaagcgcgtattcgtcaggctaatgcaattgctgggtcagtagagtcagagctatggccgagtttaaatggtacggcagagttttcgcgtagtcgcacctcattgtacggtagaggtaatggggcttggagcaaattgtacgatgcgaaaattagttcttattttgagctggatatctgggggaagaaccgcgccgctcttaaagctgcaattggtcgattaaaatcgaaagagattgaacgatacgctacgcaattatccttggctcattcaatcgtgcaggcttatataaacctagatcagctatacagcgagcttgctattcaacaggaaatgcttgaaacctataagagcttgctagaattgactcgtcagcgctattttgccgacttggattcattagtaagtgttaagcaagctctggcggctattcctgctacccgtgcagaaatagcgtctttgagagagtctctggagttgactcgtaaccagtttgtaatgctagttggaaaagggcctgatagagggctgcaaatagaagagccaagtataaactatgctgatattactatggttcctgacaacctgccggcggagttgcttgggcaccgtccggatatagtcgctaacaggtggatggttgaggcgaaaagttatgatgtgcgcgtttcaaaagccgagtattatccgaatataaatttatcatcttttattggagtgcagtcccttggcttttcaaatctgcataaaagaaatagttatgagttttcagttggaccagcgctttctttaccgatttttgatgcgggaaggctcgactctaacttggctgatgctatttctagttatgatctggcggtggaaaactataatgcaggcttgaccggagctctgcaggatctagcggatcagatgacttctctaaagtggctgaaagagcgtctgaaagagcgtctgaaagagcgtccgaaagagcaaggagaggcactgaaaacctcccaggaaagcgctgatttagcattggctcagtacggtgcaggactagtaagctatttgcaagttatctctacacaaagtgtggtgtttagtcagaagttactattgtctcagctgacatctcgcggtttatcgctttatgctcaattaaacagagcactgggaggtggttattctcctgataatctgccattggtttcagatatttcttctaatctcttagagcctagaaatgaacgataa

SEQ ID NO: 328037 - DNA, 1209 bp, Pseudomonas aeruginosa
atgaacgataagagttctgcgtcacctgcttcgtcaaagttagggggtattgtagcccctattcaagatggtgggaaaggtattttgctggtttctatagtcattgtctttgttttgataacattatctgttttttggtatttctatgagttaaatgtggaaagaactgaagatgcacaggtaaatgggaatgtcgtgcaagtgacagctcaaattgatggtacagtaattgcgattcatgccgatgataccgatcatgttaaagccggcacgccccttgtacgactaaatcctgtagatcaggagatcatttatgaaagagctcgtgctgcgcttgctaaagctacgagatctgtgcgttcactgtacttacaggtctccgaagccaaagccgatctagttcaaaggcaagcggatgtcaaaaaagctaaaactgatttagccaggcgcatgcgaattgcgtcggtgggggctgtctctcgtgaggagatcagccatgccgaagacgctcttaaaagcgctcttgctgctcaggactcaactcagcagattctttctcagcgtttggctcaggtggataatacggtaatacgctcacaccctgatgtggccactgctgcggctagcttgcgggaggcttatatcgcgagaaagcggactattattccagcacccgttgatgggatgataactaaacgcaatgttcaagtcggtcagcatatcggcgccggagttgcacttatgtcggtggttccattagatagtttatgggttacggctaactttaaagagtctcaactggaagatattcgcatcgggcagcctgttgagctaacagccgatatgtatggttctgatgttgtgtatcacggagaggttgttggcctggatgcaggaactggtagtgcgttttcactattccctgcccaaaatgcaacagggaactggattaaggttacacagcgtgttcctgtgaagatatccctggattcaaatgaggttgtgaggaatcctttacgtgtaggtttgtctatgcatgcagtagtcgatactagtaatgttagtgggaaggctattaggacaggtattgtttcaaagttcacctatgatacacaggtttttgatcatgaacttaagaatgctaacgatgaggtggaagaaattattcgaagtaatgaaggctttatgatgtcgccgccaaaattctga

SEQ ID NO: 328038 - DNA, 1449 bp, Pseudomonas aeruginosa
atgttgggttttgcctcgactcctattcgtggagagatacaggctagtccggaagagtatagttttattgccgtcttgtatgcttgttttgcagttctgtccatttcaaaggttcgatggttcattgagcgtatcggatggagatattatgtatttttttcaattattttgtatttagttggtgcgctggtctgtagcctcagtgacgaaaaaataagcttctcgatcgggcgtgccattatggctttgggaggagggacatttatgactatcgggaggctccttgcaaatacgctcccaggtcatttacgtttcaatggaatttgtttttttgcaacaggcgtcctgcttggtaccatgggcgggccttggctagctgcgttaactgttagtgaaggccattggcaagcgatgttctgggccctgctgctattggcatgtatcgttgctttgttgactattatttatgctccgaaaatggagcttcctagagagacctggtctagtagtagtttttcttttgtttttttgttagggcttttttcattctttatactctatttgctgcagcgctcttattatgatttttataatgaaggagtgatattggtatgttttgttttcttgttccttgggggcttgatatctattttttatactgagcatcagcgtgaaaggccgctatttcggttgagggatattcttactaaacgttatgtggctggtgttggattgttttgtgtgtgttacctcttgatcggtatgaataattatgtacaacctcagtatctgtcgactggcttaaaatattactgggagtctataggtgtgtttcaggctgtagctttgttatgtacactggtgatttggatgccagtgatgcgttttttattacccaagtatccttcccctgtaaagtattgggtgtttgcattcggctctcttgcggtatatgcgtggatcttttgttccttttcaccagtggttgatgtgtgggctcatatcgtaccggctctagtgttgagtggattttttattagcgcggggatggggactacggcaatgcaaacctttagggaatttggtggcaatgaacaattatttgcgcatgcttatcagttgaaaaatatgttagggcagattgtacaggctatagggacggctgctgcaactatattcatgcagtggcggcagacggttcagtatgggaacttgaacataaatatggtcaccggtgatcctttgtatagcaggagtatagaggagatgtcaaagtatatttcccttacgtatggcagcaagcagtccgacgcgctggcaatatttcaacagtctcaagagttaagtcgacaagctgtttttttggccggagttgaatactactggttgattttttgggtttccatgattgttttgttggtctcagtggttcagcgagtttttaggtaa

SEQ ID NO: 328039 - DNA, 891 bp, Pseudomonas aeruginosa
atgttaagactcgatgatatggaaattttcgtagaggttgttcggcagaatagtcttcgaaaagcggcggaaaaactaaaaataccagtttctacattgtcaagaagattgtcagttttagagaaagagataggcgttcgactaattcggagaactactagaaccttagaggttacagagcttgggaacgcatactatcaacgatgcaaaccaatagtagatgaggcacgtgtagcaaatcaaagtttgagtgatatggcttcggcgccgtctggcctgcttcgagtttcaatgccggtagatttttccatagcatatataatgccattggtcattaagtactcggaaatttatccagatattgattttgagtttgatctcactcctcgtcaagtagatttgacgagagagcctctggatgtggcgataaggctaggagagcaacaaagctctagtttgatagctaggcatttgattacgattcctcgctatttatatgcatctcctgaatatttgaaggtcaatggttatccatcctccccttctgaactacattctcataaatgtttgataatgaatacgccgcaggagagaaaatactggagcttactaggtaaagatgaagaagcggaagttgaactaaagggacggtttcttatgaatagcataggcatgttaaaaaatttagctataatgggggagggaattgcaatgattgctccaggagtggtcagaaaagaagcatccgatggtgaactggttagggttttgccagaatggagtggtaaaccactatccgtatacgcattaaccgaaaacagattgagtccagttaaaatatcaagtttcatagattttctgtatgatggtcttagaaacgagaaggattga

SEQ ID NO: 328040 - DNA, 2037 bp, Pseudomonas aeruginosa
atgcgcagccccgctgattcgggcatcgcgcgcctgcgcgacttcctcgcgggcgagctgcgctcctacccaggccggctcaacctgatgctgcgcagcctgctcggctgcgccttggtaatcctcgtctcgatggccttgcagatccccttcctagcgctatcgttgatcgtcgtcttctacgtcacgcagaccaacgtggtggtcacgcgcctgatcggcagcctgttcgtcgtcggctcgacgctggccatcggcctgtcgatcctgctgctgaagttcacctacgaccaccctatgctacgcatcctcggcgcctccctgctgttcttctgcagcaccttcctgatgcgcaccacgcggatcggcacggtgttcttcgtcatcggcatagtggtcatctactcgcagagcttcgccgatctcaccgaccaaggtgaaatcgtcctgcgccagttgctctgggtctgggtcgcggtgaactatgcgatcatgctgaccctgctgatcaataccctgttccttccactggagccgcagaaacaactgcgcacgcacctgctggggcaattgcagataatcgccgccagcctgctgccagacaccgccacaccggctgcgcgcatggccccgctcgatctccagcgtagcctcctggcctctcagcagttgctgcgcttcgccagcatgcgcgacccgcgcttccgcgccgagcagggcgctcacctggcccgcgtcggcgcaatctcccgcctgctcctgctcgcccggcaattgcaggaaacacccagcgcatcaccggctctactggtgttgcagcaggccatccataccctacggatcgccacggaaaacgcacaagccccgcgcttccccaacgagctggcacagctcgacacccgtgcactgccgagcgcctgccaggaaatgcgcctggtcctgctggccctatgcgaacacgacaacgccagcccgaagctgaaggccagcagcaccccgccgttgatggtcggcgacgccttcgacaacccggcctatatccagttctccctgaagaccctgctcgccgccctgctctgctacctgttctataccgccagcgactggcagggcgcgcataccatcatgctgacctgcctgatcgtcgcccagcccagcctcggcgccaccggccagcgtagtctgctgcgggtggtcggagccttgcttggcggtagtctcgcattggccatgatgctctgggtggtgccgcacctcgatgacatcatcggcctgttgggtatggtcctgccagtaatcgcgctagcttcctgggtctcggccggatcggagcggatcagctacgctggcacgcagatcatgttcaccttcgccctggccctgatggaaggcttctcgccgagcaccgacctgacggaaatccgcgaccgcctgctgggcatcctgctgggcgcgggcatttcctgggtcatccatgttctgctctggccagaggcggagggagaagccctgcgccaacgcctggctcggttgtcgcgcgcggtagccacctcgctgcgacgcggacgcaccaacagcgccaccacggacccacaactctggagcgaactgaacgacagccaggacatgctcgcgcgagtaatccttgagcccagttggcagtctggcgaaggccagcaggaggtgctaacactgcgcctacaggagattcttgcagcgatcagggtgatcgtcctgaccagtgatagcctacagacggaactcgctcatgcccggttgaaaccggaattacgcctggccttgctggagttctgcgaacaggccgccgcctgcctggaacggtacgcagactggctggccggtcaactcgacgcggcgttgatgcctaccacaacgctggacgaaagctggtacagactccgtcgtgaactcgaagacttagagaaatcgccgctacccagcctgctaaacgagttggtaagggaaatcgagcacctgaagacgcagcctttatttgaccgccctgcccggccataa

SEQ ID NO: 328041 - DNA, 1080 bp, Pseudomonas aeruginosa
atgacccagacagttcctgcccggcgtagccgactgcccgtgttgctgctcactctcatctgcctggtcatgctcggctatgtgatccatcgtctggaaacggcgccaagcaccgacgatgcctacgtctacgccgataccatcgatgtcgtgcccgaggtcaacgggcggatcatcgaactgccggtgcgcgacaaccagttggtcaggcagggcgacctgctcctgcgcatcgacccgcgcccctaccgggatgcgctggcccaggccagggccagcctgatcaccctggaccggcagatcgagctgacccagcgctcggtcaacgcccaggaatacgaagccgcctctgcggtcgccgcagtggagcgcgcccgcgcccaggccaagcaggccggcgacaccctgcggcgcctggaaaagctgctgcccggcggctacgtctcggcagagtcggtagaccaggcgcgcaccgcgcaacgctccaccggcgccgaactgaatagcgctcggctccaggcccaacgcgcggcggcggcggtaagcggggtcgacgcgctggtggcacaacgtgccgagattgaggcgcagatcgccatcgccgaactgaacctggagttcaccgaggtccgcgcgccgttcgatggccgcgtggcggccctgcgcaccaccgtcggccagttcgcctcggcctacaagccggtgttcactctgatcgatgcgtgccactggtacgtcatcgccaacttccgcgaaaccgacctcaaagacatccgcgccggaacaccggccacgctctatctgctcagcgataccggcaggcattttcgcggccgggtcgactccatcagctacggagtcacgcccgacgatggtggaaccgtcgtcgggggtctgccacaggtgcagcggagcatcaactgggtgcgggtgtcgcagcgcttcccggtgaagatcgcggttagtgccaccgaccccgagctattccggataggcgcgtcggcggtggcgatcctgcgtcccgatgacgcccaggaacccaccgcggcggcccctacctcccatgcgcagccccgctga

SEQ ID NO: 328042 - DNA, 270 bp, Pseudomonas aeruginosa
atgccaattcccactcgacccaggcaggcactgttgctggccagtatcctgctcggcggttgttcgatgtctccctcgctcgtgctctttggcgcggcctttccagactggctgttctgcatcatcggcggcgtcgtcggcatagcgctcatccacgcgctcctgagcagatccgacaggcaccgacggctggagccgctggcgctgagctatccactcctcactaccctgctcgccatgtcgctatggctcgtctttttccatcgctaa

SEQ ID NO: 328043 - DNA, 1149 bp, Pseudomonas aeruginosa
atggagggttaccgggacctctccgcagaggcccgtgaaagcgtcgacgagttcctggtctgctccgtggaactctggtgcgaagccctgctcagtggcgccggcctgtccgccgaggcgcgcgaggtttttgccggctacgggcggcgccgggcacaccagggagtgcccctccaatcgctgatgcgtgcattcagcatcggcattcgcgagatctggcagggctatctggaactggccggggacagcgaggaattgggcagggaactgctgttcgaggtgtcccgctacatgttttgctacttcgacgaggtcgccgaagaaaccgtccaggcctatctggacgaacagatcaggaaggtgcgctggcgcgaatacttgggccagcggctgtactacatcctgttgcatacgccggaggacgagacgggcttccgcgaagtgctggttgccctcggtctcgacccgagcatgccacgcgtagcgctcgcgctggacgtcagcatcgacgcggagaaactgcggagtcgcgaggaagagatcgagcgcctgctcctacaggtctcgcgtgccttcagggtggcgacggcggacctcgtgcgcacctggtaccgtgagcgcctgatcgtctggctgccctgcgcccacggcgaagccatcagccaggccgaccagcgcctggcccggggcgtggcggcgttgctcgcctcgcaggcggagatctaccaggctgggctggggatcatgaaccacggcgcgcggggctgggcccgttcgatggaggaggcgctgaaggcgctggatttcttttccggcgaacgcgccgagcgagcagtcaggcgctactcgaacatcctggtcgaggatggcatccgtggcagcgagaatgcgctgcgctacctggtgtcgctgctcgaacaactgggcaacgagcccgacctgctgctgaccctggaaacctacctgaacctgggacgccgtcgcggccatacggcgaaacgcttgggcatccatcctaacaccctggattatcgcttaggacgagtcgaggaattacttggagcgcgcttggctgatgccgactgggtcaacaggctggatatcgccttgaggttgcgtcggtattcatctgggcggagtggtgtgtga

SEQ ID NO: 328044 - DNA, 162 bp, Pseudomonas aeruginosa
atggagatcctcacccagcaccagatgttgaccgccctaccagggacgatcggcaacgtctgcgcctggcgactcgccctgcgggtcgacgtgctcgagcccaccctcggtgagctgatccgcgaaagcattcttaccaccgatgctcaggcgcaagcctga

SEQ ID NO: 328045 - DNA, 2148 bp, Pseudomonas aeruginosa
atgtcagcgaaccactcgcaacagctcatcgacgctccccgtttcgccagtcttactccattgatcgaaccacgctcggtcgcggtgatcggcgcttccagcgacccgacccgcatcggtggccgtcccatcgcctacatgctgcgccatggctatgccgggcaaatcctcccggtcaatccgaatcgtgctgaaatccaggggctgccggccttcgccagcgttgcggagctgccgcaggcaccggacgtggccattgtcgcggtgcctgcgcctcaggtgctggagaccgtccgggcgctgggccgccagggggcgcgcagtgccatcgtgttctcttccggattcagcgaggtcggcgaggccggcgcggcgatgcaggatgcggtggtagccgctgcccgcgagcacggtatgcgcctgctcggtccgaatgcgctcggcgcgttcaacagtaacctgggttattacgcgttcttctccaccagcctggaacgtggcgtaccgctgcccggccgggtaggcatcgccacccagtccggtgcctacggcgcgcacctgctcggcatggcgcgccagcggcgcctgggaacccctatctgcgtggccaccggtaacgaggccgacgtcaccctgggcgacagcatcggttggctggtggagtcgccggagatcgacgtggtgatggcctacgccgaatccatccgcaacgtcgacagcttcctcgccgccctggaggccgcgcatcgcgccggcaagccggtgattctgcacaaggtcgggcgcagcgccctgggtagccgcgcggcgctgtcccacaccgcttcgctggccggcgacgacaaggtgctggacgccgtgctgggcgactatgcggtgatccgcgccaggaccaccgaggaactgatggacatcgcctacctcgccacccggcgtatctatccggtgggcaacagcctcggcatgatcaccgtcagcggcggcgccgggatcatcgtcagcgatgccgccgaggaggtcggcctgccgatgccgccgatgccggacatggcccaggagcggctgaaggcacggctgtccttcgcgtcgccgatcaacccggtggactgcaccgcgcaggccctgaacgatctgacgctggtgcgcgactttaccgagtcgatggtggtcgacggtggctaccgttcgctgctcgccttcttcacccaggccggcaccgccgcctccatcggcgcgcgtctggccgagcagttccggcggatcaaggaggctcatcccgagcgtctgttcgtggtctcggtgatgggcgagggggaggagctggcaccctacgaggaggccggcttcgcactgttcgaagaccccacccgggcggtagtggcgatccaggccatggggcggctcggcgaagccttcgcccggccgttgcgcctgcgccggcctgccggcgggctacagttgcccgcctccacgcccggcgaagccgaggccaagcgcctgctggcgcgcgccggtatcgagtccgccgccgaggcggtgctgggcagtgccgaagaggcggttgccttcgccgagggcatcggatacccggtggtgctgaagctcgcctcggcggacatccagcacaagtcggaaatcggcggcgtgctgcttggcgtaagcgatgcggacgcggtacgcgccggtttccaactgctcctgcgccgggccgccgagaaggcgccgcaggcgcgtctcgatggcgtcctggtggcgcgtcagctgcagggtggggtggagtgcttcatggggatccagcgcgatccgctgttcggcccggtggcgctgttcggcctgggcgggatcttcgtcgaggtgctgcaggacgtggtgttccgccgctgcccgttcgaggtcgacgaagccgaggcgatgatccgtagcatcagaggcgcgccgctcctgctcggcgcgcgtggccggccgcgggccgacgtcgcggcgctggcacggctgctgtcgaatctctcgcggttcgcctgggaggcgggagagcgcttgcgctcggtggacctcaacccggtcatcgccttgccggagggccagggcgcctgggcggtggatgcggtgctggaagtcgaggaggtggccgatggcgctcgatcctga

SEQ ID NO: 328046 - DNA, 183 bp, Pseudomonas aeruginosa
atggtgaccatcgacatggctacccacttcatgggtagcgcccgcggcgagcttcgtgcggttggcagggtagtgcgacggacccgcacgatctgcttctgcacggcggaaatctgcaacgaggacggcgaggtcatcgccatggcctcgggcagcttcaggtaccgcgcggctaagccgtag

SEQ ID NO: 328047 - DNA, 225 bp, Pseudomonas aeruginosa
  misc_feature (183)..(192): n is a, c, g, or t
atgagtgagcaagacgagtgggccggcgagcgcgagcagcgtctgcggatgatccgcgacagcgcggcttcgctggtgccgcgcgacggcgacctgagccgcgtgcgccgcggtcgtttcaccggtagcggggtggaccgccaggcctggcgcgaggtctgcgccatgggctggcggtccacnnnnnnnnnncgccatgggctggccggcgctgcgcctggatga

SEQ ID NO: 328048 - DNA, 2301 bp, Pseudomonas aeruginosa
atggctgatgcaccaccgccactgattgttagatactcaagtcgccccgggaaacctggcggagttagcatagacgtatcacgagacaggcaggacatactaagcaactatccgttcggtaaccctttccgtggttttactctggccatggaggctgacttcaaaaagaggaaagagagtctggaagccgacgttcaggcagagttggatacggaagctgccaagtatccggcactacctgccagcttcacacctgagcagtggctggaaagatcaaccgtagttgtcaccgggctgctaaatcgaaagcgccctgaactagataacgaattggatgtggttcagaactcggctagtctggataagctgcaagcaagctacaacacaatcatcctgaatgatcagatcaatagtcttcaagagcgcttgaacaagctcaatgctgaaaccgaccgccgccgggcggaggcagaagcccagcgtcaggcagaagcggacgccaaacgcaaagcggaagaagcggcacgcctggaagcccagcaggtcactcaacagctcggtgccgacttcaacgcgatcaccactccgaccgccaccaaggtccagcaacgtgtgaaagcagtggatgctagtctgtctcaggtttccacccaggtcagtggtgcagtcgcctcggcaacccaggcggtgcaggtcaagacagcgcaagcccagcaacaagccaacagccagatttcgtccagccagaacctgatcagcgcggcatttcggaatcagattgccttggcagcacaggccagtggagaagcccaggtcacggctttcaacaccaaagtcaagcagatcgtcaacgaagccacggcgttttcgacagcacgaaaacaagcgctggctcagtttgctgccaatgcggccgccgaggtcgaaaccgaggtcaacaggctaaccgcccaggtcaaggccagccccaccaaggcggcttcgcaagctgcacaagcaacccttcgacaattcactgaaagcacctatgccaaggtgaacacctttgccctgcagaccgaagcagcgctgcaggccaaagccaaggaggtttcggcagcggtagccgaggcacagcgtgcggcgaccaacgatttgcaaaaaacagccgatgtagtaccaggtcagatcattcaggctgcgaacaccttggcgatgccggccacctctacgccgctggtttcggtggccgggtttggtagtgcggcagtggagacggctcgcctggcggcttccctaacgaatgctgtcaatcgcttgattcagattgctggtagtggacctggcgcatacgtggccaccttcgcggtgctatcgctctactccgaccaggctggtaaagacagtgacaaggttcctgccggcgttcgcaatgcattggcactggaggcgtccgctctggggcttcctggcacggctgatttgcaaagcgtcgccaaggcaggtggcacggttgatatgccggtacgactcacgagtgctgcacaagagagcccgagtggtaaatcgcagattgccgcgatgttgaccaacggtgcaactgtccccaagggcgtgcctgttcgcgccgcgaccctcaatactgcgacaggccggtatgaggtgacggttcccgcaaagtccaccgtgccgaatacacccccgctgatcttgacctggacccctgctacccctccaggaagccagaacccctcaagcaacactccggtcgtaccgcagccggttccggtgtatgagggagcaacgatcaccccagtgcaggccgaaccggagtcctatccggaagtgccgttagatctggacgatctgatcgtgattttcccggcgggctcggacgttcctccgctctatctggtcttttccaagccgccggttaagccgctggaagtggacatttatggtaattttgcaggaagacctcgtgatggaaaccatcttgaccatatgccggctcaaggtgcgttggcgacgagtttgagagctatttatccagacatcccctatggagaaattcgcaaattaatgaagaaaggggggagtgttgccataccagctagagtgcatcagaggttcagtgaaacctacggaggacgtaacaccaaagaaaagcaacagaaggatgcctccgacttgcgtgcagcagtcgatagcaatttcgatgccgtcaagaaaggattgctagaggaggggttctccgaagatgatattgagagggcgcgcgcagaactacacatggtgaacaaagaacaggggtggtactga

SEQ ID NO: 328049 - DNA, 534 bp, Pseudomonas aeruginosa
atgaccgcatccgcttcgcctgccgctggcgcggccacggctgcgctcgcagcaccttccggccagcctgccagcgcgccgctgacgcgcgtggcgctggcctacatcgaaccgcgcttcaagctctacctgcgcttcggcgaacctgcgcgcacgcaccagctcgaccgctggcggcgctgcgcggtgttcctgccgggcgccatgttgtgccgcatccgctggcaggccaacgactacggcaccatccgctggcagctcatggtgatgcaggcttgcacgccgttcgatgcggcgcagcgcatccccggtgtgcagcctggcgcgcgcctgctgctgcacgccgagggcgagaacgctgtgcgtgccgtgttggatcgtatcgacgccatcgaggcactgggcatcgcgcctgtcggcgcctcgcccgcgtactggcgcacgctcgccaaccggctcgctgcgcgcctgccgctacccgaatacacagccgagcggcacgccgcctggctgatcgggagggcgctgccatga

SEQ ID NO: 328050 - DNA, 273 bp, Pseudomonas aeruginosa
atgacagcgaagccgccaccacgcgcaaagcgcgtcggcatcggcgcgcgtccgcccgcgaatccgcacgccgaggcgtggattcgccagggcgacgccgatgcgctgaacaagggcgacctctacacggcccggctgaccctcgacatcacgcccgccatgcgttcgcgcatcaaggtgtcggccttcacgcagggcgtgactgtggccgacctgctgcgcggcctgcttgagcgcgagtttccagaacaccgcagggagaacgccccatga

SEQ ID NO: 328051 - DNA, 639 bp, Pseudomonas aeruginosa
atgatcgtcgcgctgctcaaccagaaaggcggcgtgggcaagaccacgctcgccacgcacatcgccggcgagctggcgatgcgcgggcagcacgtcgtgctgctggacgccgacccgcagggttcatcgctggactggacacagcgcagaagccagcaaggcttgccacggctgttcagcgccgtgggcctcgcacgcgaaacgctgcaccaagaggcgccagaactcgccaggcgggccgatcacgtcatcatcgacggcccgcccaggatcgccgccttggcgcgctccgcgctgctggcggccgagcgcgtgctgatccccgtgcaacccagcccctacgacctgtgggccagcgccgaggtggtggcgctgatccgcgaggcgcaagtctttcggcctgcgctgcgcgcggccttcgtcatcaaccggcgcgtcagtaccaccgtgatcgggcgcgaagcgcgccaggcgctcgccgaccagccgcttcctgcgctgcgcgcggaagtgcatcaacgcatcgtgttcgccgacagcgtggccgctggccggcttgcacgcgagacggcgcccgacagcgccgccgcgcgcgaaatcaccgcgctggtggatgagctgctgcggtggacgacatga

SEQ ID NO: 328052 - DNA, 858 bp, Pseudomonas aeruginosa
atgtccagcaccgcgctgccgtcccggcagcggccgatgcaggagcgcgaacagctcgacctgttccgcgccttgcccggcgacatggcgccgcgcgacagccaggacttgatggcctatccgttcttctcgctcagcaagtccaagcgggtcaagcccatcgacttccgtgcgggcaacgtgacgatccgcgtggaaggcacgcaggagcacggcatcgccacgatttgggatgcggacgtgctgatatgggcggcctcgcagatcgtggaagcgaaggacgcgggcctgcgcccgtcgcggctgatgcgcgcgacgccctacgagatcctgcgcttcatcgggcgcggcaagtcgctgcgcgactaccagcgcctgaaggccgcgctggatcgcctgcaatcgaccacggtggccacgtccatccgcgagacgaccgggcggcgcctgcaccgcttttcgtggatcaacgaatggaaggaactggccgatgccagcggtacgccgctgggcatcgagctgatcctgccggactggttctatgcgggcgtgctcgacgccgccctgatgctgaccatcgacccggcgtatttccggctgaccggcggcatcgagcggtggctgtaccgcctggtgcgcaagcacggcggccggcagccgggcggttggcaattcgacttccgctacctgcaccagaaatcgggcagcaccgccaagccctacgacttcgcctgcgacctgcgcgcgctcgtcgcgcggcagtcgctgcccggctacgtcctgggcatcgagcggatgccggacaacggcatggaactgctgacgttccggcccgtgccgcatacggcacggggataa

SEQ ID NO: 328053 - DNA, 768 bp, Pseudomonas aeruginosa
atggccgaccgcgccgccgagccttggtatccgactgccgcgtatctgtacgtgctgcatctggacagccttgcgctcgcctgggagtacctgcgcaggcaccccgactaccggctcgactggctgcgccatcgtcgccggccgcaggcggcacaagaagcggcgcaacgctggggcttgcgcctactggaagacccggcactggatgcgcgcgacgcgcatccggcctggctgcccggccacgctgccgtggtgcagctctactccgatgctgatccgtccgtggatgccgaatccttcgcgttctggcgcatccccggccataagcaactgctccatgacggcaaacgactggcgctgatcgctcgcagcccaggccattgcctgcgcttcgcgctggcacccggcctggaagacggcatggctgtcgcctatgcccatcgcagcggcactgccgcgcccgcgcgcggtcatgtgcccggcgcggccttcgctgccacgcctagaccaacaccttccgcgctgctggaactgcacaccttgcaggcgctcgacgcgaccctcgcgggcgcgtccttgcgcgaggtggccgaagggctgttcggtgccgacgccgtggccgactggtacgccgacggcggcctgcgctccaaggtgcgccgcctcgtgcggcgcggcgatgcgctgatgcgcggcggctatcgctgcctagcacagcttgcgccgcttgagaagggtcgttttgaaggcaacgcaaaacgaccctga

SEQ ID NO: 328054 - DNA, 519 bp, Pseudomonas aeruginosa
atgaccatccagctccgacacgaaacctcggacgacattgccgccatcgaagcggtcacggtcgccgctttcgccgatgcaccgcacaccagccacaccgagcaattcatcgtgcgtgccttgcgcgccgccaacgaactgacgctttccatcgtggccgaggagcatgggcagatcgtcggccacgtcgcactgtcccctgtcacgatcaccgatgaccagggacggaaggccgatggctggtacgggttggggccgatctccgtcctgccgcaaaggcaggggcacggcatcggctcgcgcctgatggaacaggcgctgtctgaactgcgggccatgcaggccgcaggctgtgtgctgctcggagatcccgcgtactacgggcgctttggctttcaggcccatgcgggcctgcaactgccgggcgtgccgcccggctacttcatggcgctggccctgcatgggccagtgcccgaaggcatcgcgcgctacagcgatgccttcaacgccgccgcctga

SEQ ID NO: 328055 - DNA, 279 bp, Pseudomonas aeruginosa
atgagcagccatcacgactacatcatcgaaatcacggcgcagcacgatgcgctcaagccgttcgcgccggagaacgggaagcccttgcgcttcaagatcggcgacgcggtgatctacaccaacgagtttggcgcgcagttccggcgctgcgtcaccgggttctaccagcctaccgagccttcggggctgtatgcgcgtggcaggcgctactacctgaactcgacttcgccttggatgccggttgcggaatccagcctgcgtcctgacgactcggcgtga

SEQ ID NO: 328056 - DNA, 351 bp, Pseudomonas aeruginosa
atgaacaacgcactcatcactgccgagcagcgcatcgtgctgctggccaacggccgcgaatccttggagaacccggatttcgatccggcccccgtgctcaagctgttcacgccggacgctggcgcgacctggctgctgactgagattgatcccgacgaccacgaccacgcctttggtctttgcgacctgggcctgggtgcgccggaaatcggctgggtcagcttgggcgagttggcgacggtgcgcggcgggctgggcctgccgatcgagcgcgacctgtctttccgcgccgagaagcggttgagcgcctatgcgcgcgatgcgcggctggccgggcggatcgttgtctga

SEQ ID NO: 328057 - DNA, 1554 bp, Pseudomonas aeruginosa
atgaaccatgttcttcgcccgaaggcggcagatctgcgcctcggcctgggcgcttcgctgctgtcctttgcgctggtcgccggtgcccagccggccgcgaccatgaccgacgacaacggcgccacggtaggcgacaaccagaattcgcagaccgccggtcccaacggtccggtgttgctgcaggatggtcacctgctgcagaagctgcagcgcttcgaccgcgagcgcattcccgagcgcgtggtgcatgcgcgcggcaccggtgcgcacggagaattcgtcgccagcgaggatctctccgccctgacctccgcggcgctgttccgccagggcgaggtgacgccggtgttcgttcgcttctccacggtcatcggcggcagcgggtcgccggaaacctctcgcgatccgcgcggtttctccaccaagttctatacccgccaaggcaactgggacctggtgggcaaccacttgccggtgttcttcatccgcgacgcgatcaagttcccggacgtcatccactcgctcaagccgtcgcccaccaccaacctgccggaccccgagcgcaccttcgatttcttcgcccgggtgccggaagccacgcacatgctgacccggctgttctccgactacggaacgccggccagctaccgccacatggaaggttccagcgtgcatgcctacaagctggtcaacgcccgtggcgaggtgcactacgtgcgtttcgactggcaaccgttgcagggcgtgaagaacctcagcgccaagcaggccagcgcgatccaggcgcgcgattcgaatcacgcgacccgcgacctggtcgaggcgatcaaccggggcgactacccgaagtgggacctgtacatccaggtcctcgccccgcagcaactggacgacttcgccttcaacccgctggactcgaccaaggtctggaccggcgtggcgcggcgcaaggtcggcaccctgacgctgaaccgcaatccggacaacgtgttccaggagaccgagcaggtcgccatggcgccgtccaacctcgtacccggcatccagccctcggaggaccgcatgctccaggggcggctgttctcctacgccgacacgcagatctaccggctcggcgccaacggcctggaactaccgatcaaccggccgcgggagattcgcgtggtcaacggcaaccagttcgggggcggcgacaacgggcacagcctgtcggacgtgaactaccagccgggacagcgcgagccctgggtcgaggatccccgttcgcgggtcgtgccgatgccgctgagcggtaccgtgcagcaacggcgcatcgccaagaccctcaacttccagcaggccggcgagttctaccgcagcttgtcgcgcagcgaacggaagaatctgatcgccaacctgtccgccgagcttggccaggtgcgcagcgtcgaggtgcgccagaccatgctcgcgtatttctacaaggccgatgccgactacggccaggcgctcgcccggacgctggacgaggacgccgcgcgcatcgctgcgctggccgcgaggttgcgcgagtaa

SEQ ID NO: 328058 - DNA, 1017 bp, Pseudomonas aeruginosa
atggagctcacctttaaagaaggatcacttgaagccggattggaggagacttttcgtcaaatccaagtactgcaaaacaaggtgaatggcacggatgtcatccggctgcagagagaggaaattgccagcctctttcaaattgtgcacgagcacgttctgccggcctatgcgggtaagcagctcctgttgcatggggggcggcctgcacgatcctttgataccgagctacagcgtctatgggccctggcactatccgaattcatcaatcacttccgacctcgtcttccatcgtttctgaatcaaatcatggctgttcaggaggatggaggcgaagcacagctgcagagcttcatgaaaatggtgcttgaacgcatcaccattcccttgctgaacggctacgagcaaccaggtgacgatcttttcctgctgattctggactcggtggtgcatcttgaaggtaagagtttgtcggatcacatcgctgacacccttgaaactccccagcaaacccaggcatcggtctatgccatctgcggcctgctactacaggcccagaaagctgcggaggccggcaaaattgacatcgcgtactcctacctgattgacgcgaactatctgctcgggatgcgtaaggcgtcagatttcatcatgcagcggttcgacacaattgcggacaccaggaaagccaaggccaatgcccggaaaaagcactcgaacgcagcccaagtgaacttgggcaaaaagagggtcaccgagctctactacagcctgcgcggcacagggcctcttttgacgctgacgccctggaagagtgccaatatcgcgacagataagatcatggaggtgatagatcgggaaggtgatcccaagatcacaatctcagaactaacgactcgcaagatctgcagggagatgatgaagcaggaggagaaggagcgtaagcgccagggggttgtcgtcacggcaagctatcgcctgccggacggctccaccctgacggttactcctgaggattag

SEQ ID NO: 328059 - DNA, 363 bp, Pseudomonas aeruginosa
atgtacccaccaccaaccctcgacgatgcttgctttgtactccagcaactggacagcatcccacgcccgtatggcgataacgaaggcgacgccatcaacagcgacagcgtctattacgcacttgagccccatcaccagcagatcgtggatcaggcatacactgtagtgtgtgcatacacccgtaagcctggcgggatggaagcgaacacgagagcagtcaacgcactgacacgccggggctacccaacctatttggggcccgaccagtacgacgcatatcgcctggtcggaacggcggagaccgaaaactggtgcctgatcatctccgacccaggttctagcaacgctgacgatgactgctaa

SEQ ID NO: 328060 - DNA, 2811 bp, Pseudomonas aeruginosa
atgaacggcctccctgactctgtcagattcctcgaaagtgctgcttcctccgcagcaaaggccagaggggttgagccagtgttgccgaccgcagacccattcgatgtagcgacggcactcaagtgcatcagtgcattccaagttcgcgtaggagtggaggtacttgaggcacttgatgacgagagcaaagcgcagcctcttgtcgcagcagctcggatcttgcaatcaacggcacaaaacctgcgacgtgaaacaaatccaccgaacgttgctgatcttgatgacttgtcgttccatgccgcgcttgcctttgctatgcatggcaattttcccagtgcacgcgctgcgctttctgatgtgtcctcaggttatctcaaggaaagcttagtgttccgtatggtcgcagcgatatgcgacccatccagtaaatacgttcgataccgttcgctcgatgtgaatttcaacgagtttcgttcctggtggtaccgcgccttgcgtcactctaacaagcggagacgtaccgaagcgttcgaaaatgcgctcgagctctttactgaggctgcaaaggcaggaaccatggcggagtatgcactcttgctgggtgggcggatggcagctaaccaagcgagacgattagcaaccgttaatcttctagacgacgctcccgaaattccgagatggtttatcctgcaatccatcaaagctggcatggtgaccctactgcccccgcagcacattcttctgagcaagaaacgtattgctaagcatagacgcaacaccctattaacgcttccaacaagcactgggaagacattcgtcgctgaagcgtgtatggctgccgatttagcggatgaaagtttgtgtgtctatgtcgctccgtatgttgccattggggagcaggtgaaggattcgcttcggaaatgctttggcgatgaggtccctgttgtttccatgtttggcggtttccaatctgaggctttaaacagcttcgccgagaatgaggttgtcgtcgctacccctgaacggtttgacggttggcttcgtactggtgaaaaccttgaccgactgcgtacagtcatcttcgacgagatccatattcttgagaatggatctcggggtgctcgggtggaaggcttggtttcaagacttcggctgcttcagcgaaacaatccaaagcttcggatcattgggttgtcagctgtgttgactgagccgcaacgcgtctgtacatggcttggcgtgcaagaaatcgacctgcatcaaattggctggcgacctacagcacgccgattagccatgtgcctcgcgaacggggatatgtactggatccatgggaacgacgcgctccgtccctcgaacgagctagccacttcggccgtgtcagaaccgatcaaagtcagacttccggggaagataaaaccggcgcggttcgcgaatgctaatgagaagagtgcggccgccaatgttggtgcaatagcacgagatcttgtgattcgactaggctcgcccggcctgatcgtgtgcccaagaaagctggacacacggctacttgcccgtgagttgctggaaggccgagaggaggttgagaatgacgacgttctaaagaccgcagccaacatccttgaccgctacccttacttgaacttcttagccgagtgtcttcggtatggagtgtcgtaccacaacgcatctctgccctttgatgtgcgacgcgatatagaaaaattaactcgtgcacgcgctctgtcagttgtatgcgcaaccaccacactcgctgaaggtgctgaccttccgttccgatggactatcgtcgctcactggctcagcagcatgcgtgatgatggtcgggtaatgaagtcgatgactttccgtaacattgcgggccgttgcggtagagcgggtgccttttctgaaggcgatacgattctcttcgaaaacttgatggggcccccatccttgaagcgggggcagcgaaacaaacgtagcttggaagaagtcatgtttgcatcctcaccgctccagtcgacgcttgggggggagtgggacgagaccccaatccaagggcagaaactgctggaggcaacaatcagtgcgcaactgctcgcgtgtatcggagagcatcccgacactgaagatatcgtgtcagtattgacggaggcctcttacgctgggcataccgatggcaagcaaaacgtacgtcgaatcttgtcggagaccgtcagcacaattttagacgatcaggaggctggcggtgcaatggcagtcatgaacagcccaatcagactcacggaatttggccaagctgccaacctcagcggcttctcacccggaacatgtcggctaatggtggaatttctgtccgaggagtccttcgaaactggcgcggggctctacagtgagcttctggagcggttcaacgacgtccccgagcagtcgaatgagacgttaaaaaaaatcttctccggagttaaccacagaaacgtggttaagactgaaaacatcgaagagatgctaaacaacttactattgcgcatggacttacgccaggtctttgaagggctgcgcagcaagaaatccgcagctaagccggacacggttgagacgatgttcgaggagttcgtatcgttcattaatggtgttgtggccaatttcctaccatggattcttagagctctcgggaaacttagtaagttcggaagcgaaaaggcagctgccacagactggtcgaaaatggctaagacgattgagactgcgttgggcgctagaagcggcgatacagaattcgacgacttgctgattccaattgaatag

SEQ ID NO: 328061 - DNA, 807 bp, Pseudomonas aeruginosa
atgcagcagaggccgtgtgctagaacagggaatgagataccgatggccttcactaaattgccctcgacttcatccaatggatggcagattcagcttttccgaggtgatcccgattgcggggcgttctaccagtggattcataccgagctcgcgaaggcgaccaaaatctggccaccgaaaatcacgaagctcactaccggccgaaagggcaaccttggcgaatttctatcgtacaaggtcgctcataagtcaggattacgcggaaagggcaacgggtacacggtggcgctgatgggagccctaactccgcttcaaaatggcgccccgacggggctggacatcaccatcgtccacctggatccaggaggcgacaagagcaaggactgcctttacatcatggagattaagactactggcgccgccgcgctgacctacgcgaccgcactaattgacgactacgacaagcttttggggaaaacaacggtcgctgggtcgttaggtcagagatttaactggctacagggttacctgatggaggttcacgagttcgatgacgatgcgcttgagcgagttggtaatcttttcatgccagaggcgaaggactgtaaaggcattaaattgctgcccacgctggtgcacgaccgtgctgtcggtgatcaggcggctgttgacgcgctggacaatgtcgccgtgaagattgaacaacaaggctggggcaagcaaactattgagccttggagcatcgcgatcagcaagctgactcagtgccttgtgcatctttcaaataacggaagtacgatgccatga

SEQ ID NO: 328062 - DNA, 2025 bp, Pseudomonas aeruginosa
atgagcgatcatcagaacgggctgcacctcgaggcggaaaactggccgcgcgcgctgttcgccgtggccctggccttttccgtgttccaggtcgtcaccgcggcctttcccctgatttccacccaggtcctgcgggcaatgcacgtcggactgctgttgctggtggtgtacatcagctatcccgccttcggcatacgtcgcccctggcagccgttggcctggttgctgggcatggccggcctgggcacggcggtctaccagtgggttttcgaggccgacctgatccagcgctccggagagctgacccaggccgacatggtcgtcggcgtggtgctgatcgtcctggtcttcgaggcggcgcgacgggtgatgggcatcgccttgccgatcatctgcgcgctgtttcttgcctatggcctgttcggcgaacacctgccgggcgacctggcccaccgcggctacggcttcgaccagatcgtcaaccagctgtcgttcggtaccgaaggtctctacggcacgccgacctacgtgtcggcaacctacatctatctgttcatcctgttcggcgccttcctcgagcaggccggcatgatccgcctgttcaccgatttcgccatgggcctgttcggccaccgggtcggcgggccggccaaggtctcggtattctcctcggcgctgatgggcaccatcaccggctccggcgtggccaacgtggtcaccaccggacagttcaccatcccgctgatgaagcgtttcggctacaagccggcgttcgccggcggcgtcgaggcgaccgcgagcatgggcagccaactgatgccgccggtgatgggggcggtggcgttcatcatggccgagaccatcaacgtcccctacgtggagatcgccaaggcggcgctgatcccggccttgctgtatttcggctcggtgtactggatggtccatctcgaggcccgccgggccgacctcaagggcctgccgcgcgagcagtgtccgagcgcctggggtgccgtccgcgagcgctggttcctgctgattccgttgctggtgctgatcgcgctgctgttctccgggcgcacgccgctgttctccggaaccattggtctggcgctgaccgccatcgtcatcctcggttcggcgatcatcctgcgggtgtcctcgctcggcctgcgcatcgccttctgggtggcgctggggctgctctgcgcggggttcttccgcctcggcatcggagtgatcttcgttgtgatcgcggccctggccctggcctgctggttcgtccgtggcggccgggaaaccctgcgcatttgcgtccgcgccctcgccgaaggtgcgcgacatgcgattccggtgggcatcgcctgcaccctggtgggagtcatcatcggggtgatttcgctgaccggcatcgccaccaccttcgccagctacgtgctcgacctgggacgggagaacctgctgctgtcgctggtcctgaccatggtcacctgcctggtcctgggaatgggcatcccgaccatccccaactacatcatcaccagctccatcgccgcgccggcgctgctggaactgggggtgccgctgatcgtctcgcacatgttcgtcttctacttcggcatcctcgccgacctcactccaccggtggcgctggcctgtttcgcggcggcgccgatcgccaaggaaaggggattgaagatcagcttctgggcggtgcgcatcgccctggcgggtttcgtggtgccgttcatggcggtgtattccccggcgctgatgctgcaggaaggcggttggggggcgacgctctatgtcacctgcaaggcggtgctggccatcggcctgtggggcatggcttccatcggctacctgcaggggccgctggcctggtgggagcgcctggtggcgttcgccgcgggggccagcctggtcctggccttgccgatcagcgacgaactgggcttcgtcctcggcgcgctggtgatcggctggcacctctggcgccagcgtgcgcgcgaggcggtggcgtga

SEQ ID NO: 328063 - DNA, 324 bp, Pseudomonas aeruginosa; identical to SEQ ID NO: 321673

SEQ ID NO: 328064 - DNA, 579 bp, Pseudomonas aeruginosa
atgaacagagttttcctgaccccggcagccgtggcgctgtgcggcgcgtcttccctgagcctggccgaaccggtcagccttgccgaccaggtggtgaccgccacccgtaccgcccagaccgcttcccagagcctggcggcggtgagcgtcatcgaccgcgaggatatcgagcgcagccaggcgcgcagcgtgccggagctgttgcgccaggtacccggcgtgtcgctggcgaacaacggcggtttcggcaagaacaccacgctgttcctgcgcggcaccgagtccgaccatgtgctggtgctgatcgacggcatcaaggtcggctcggccagcgccggcctcaccgcgttccaggacttgccggtggagctgatcgagcgcatcgaggtggtccgcgggccgcgttccagcctgtacggctcggaggccatcggcggggggatccagatcttcacccggcgcggcgacggccagggcgccaagccgttcttctccgccggctacggcacccatcacaccctggagggcagcgccggggcagcggcggcgctggcaacggttggtacagcctcggggtga

SEQ ID NO: 328065 - DNA, 1881 bp, Pseudomonas aeruginosa
gtgcgccatcctcttgccctgctcgcggtcatcttcctgctactggccagcgccgtttcgcgcgccgcgccggagtttccagcgcccccggccagcggcgcctggttgaacggctcgctggacctgctcgaagaccccgatggcaacctggcggtggaggacctcgaacaaacggagcaggccggccgcttcgtcgccgccgccggccgcaccagcgtcggcctcagtcgcagcgtctggtggctgcgcctcgacctgccgagacgcgaggcggtatccggcggctggtggctggaagtcgccagcgccagcctgcacgacctgcgcctgtacctccccgacgagcgcggcgggttccgcgaacatcgcagcggcgaagcggtgcccttcgccgagggccgcgaccacgcctatcgtcatccgctgttccagctccctcccggcgatgggccgttgcgcgtctacctgcgcagctacgatcccggcggcaacgcctttccgctgaggctctggagccacgacgaactgctggaataccgcagccagggcaacctgctgttcggcatggcctacgggctgatcctcgccctgctgctgtacaacctgttcctcttcaccagcctgcgcgatcgcgcctatttctggtacgtgctgaccgctgccagcgcgctggtgctgaccctgagcatcagcggccatggtttcgagtatttctggcccgagcgggcggtgccctggtggcttgaccgcctggcgctgctggcgatctggggcatctgcgtgatccgcttcagccagaacctgctgcaaagccggcagcacgcacgctgggcccatcacctgctgaacgcctgttgcctgctgttccttgcctgcctggcgttcaacgccgccggctggcgctggcaggcggccggcgtgctggcgctgaccctgctggccaacctgccgatcgccatcggcctggcagtgcagcgctggcgccagggttcggccacggcgcgcctgtacctggtcggcttcggcctggtgctcggcagcgtcagccttggcgtgatgcgcgccaccgcgctggtccagccgacctcggccaacgccatggtcttcccgctggcgctgaccctggaggccctgctgttctccctggcgctcgcctcgcgcatccaggatctgaagcaggaaagggccctggccctggaccaggccgaccaggaaaagaacgcgcgcctggccctgctgcacagcgcccagcgcgacctggcacgcgccgtggaagtccgtaccaacgagctgagcgaggccaatcgccagttgcagatgcgcgaagcgcaactgcagtacgccgcccatcacgactcgctgaccgggcttggcaaccgcaggcacctgatggaattcgccgaaagcgccctggacgatgcgcgccgccacggcaacagcatggcgctgctgctgatcgacctggatcacttcaagccgatcaacgatacccatggccacgatgccggcgacttcgtcctgcagaacgtggcccagcggctgcgccattgcgtgcgcaccgaggattgcgtggcacgcctcggcggcgacgaattcgccgtgctggtcggcgggtcgaatgccgagcagcatgcccgcgacatcgccgaacgcctgctgcgagaactggcgaaaccggtggagttcgccaagcagtggctggtgatcacaccgagcatcggcgtcgccctgtttcccggcgacgccctgcagttcggcaaactctacaaggccgccgaccaggcgctgtaccgggtcaagggcgccgggcgcgccggctatgcgatggtccaggagctacagttggagcaagccatggacagccttcgaacttacaaatga

SEQ ID NO: 328066 - DNA, 246 bp, Pseudomonas aeruginosa
atgaaccgggacttgcgccgcgctctcgacgacgaaccgatgcggccgttccagtggctggcggtggctgtgtgcatcgtgctcaacctgatcgatggcttcgacgtgctggtgatggccttcaccgcatcctcggtggccgccgaatggaacctgggcggcgccgagatcggcctgctgctcagcgccggccttttcggcatggccgccggctcgctgttcatcgcgccctgggccgaccgctga

SEQ ID NO: 328067 - DNA, 1341 bp, Pseudomonas aeruginosa
atgaacaggcaatccgctgcggcggtgatcgacgctgcccgctttaaccgtactcactggctgatcctcggctgggggtgtttcatcatgctgttcgacggctacgacatggtcatctacggctcggtggtgccacgcctgatgcaggagtggcagctgagcccggtgcaggccggcaccctcggcagttgcgcgctgttcggcatgctcttcggcggcaccctgctggcgccgctggcggaccgtttcggccggcgccgcctggtgatcgccaccaccctgctggcgagcctcgccgccttcctcaccgggcacgcccgcgacccgctggaactgggcgccggacgcttcttcaccggcctggcactgggcgcgctggtgcccagcgcgatcaacctgatcagcgaattcgccccggccgggcggcgcagcaccctggtcacggtgatgtcggccttctactcggtgggcgcggtgctctcggcgctactggcgatcgccatgatccccgcctggggctggcaatcggtgttctacgtggcggtgctgccggtactggcggtgccgctgatgttgcgctggttgccggagtcggcggcgttcctcgaactcaagggccgccgcgccgaactggacgcgctgctgcgcaaggtcgatcccgactaccggcccggcgccgagcgggcgaacgctgtcgcggccgaagcgccgagcggacgggtcgcccagttgttcgaggggcgccaggcactgggcaccctgctgctgtgggtggccttcgccatgtgcatgctgatgagctacgggctcaacacctggttgccgaagctgatggccggcggcggctacgccctcggttcgagcctggcgttcctcgtcaccctgaatgtcggggcgaccctcggtgcgttgttcggcggctggctggccgaccgcctcggcgccggccgcaccctggtgctgttcttcgccctggccgcggcctccctggcggccctcggcctggggccaggcccctggctgctcaacggcctgctggtggtggccggcgccaccaccatcggcaccctggcggtgatccatgcctacgccgcgcagttctacccggcctgggtgcgctccaccggggtcggctgggccgccggtgtcggccgcctcggcgccatcgccgggccgatgctcggcggcagcctgctggccctggagctgccgttccagcagaacttcctggccttcgccgcgcctggcgtgatcggcgcgctggcgatcgcctgcatccacctgcggccgcgcgtgccggcggaagtgtccgtcgacgcgacggcgaagaaacccctgtga

SEQ ID NO: 328068 - DNA, 441 bp, Pseudomonas aeruginosa
atggccgagatcaatccgctttcaacggacctgcaacagcaactggcggacttgcaggcacaggggcttgccttgcttggcatcgccgcggacgagacgccggcgcagatcgtcgccgccgtcaccgattacgtgcgcgatgcgagggcgcaggggcgcagcctcgacgacgaggcggtcttcgccctcggcgcgctgatcggggcgcagtacgtgcgtggcctcggttggcattggggcgacgtgacctgggacggcgacccggacagcgccgccgtcggcgtgctcagccccgacgaatcgctgttcaacaaccccatcggctgggtaagccagatcgccgaaagcggcggcggggtgccgttcatgctcagctacaacatgatcctggccaaccaggtgccgctgttcgagcggggcagcgccaccggtctctattga

SEQ ID NO: 328069 - DNA, 549 bp, Pseudomonas aeruginosa
gtgcccgggctcgacgccaagccgatcatcgacatcctcctgctgccgccgcccggccacgatccgcagcggctggtagccccgctggagggcctcggctaccagttctggcgcgagaacccgaacacccagcggatgttcttcgtcaaaggcatgccgcccttcggccatggccgcacccaccatgtccatgtcatgcccctggcccaggccgaccgctacctgctgttccgcgactggctgcgcaaccaccccgacgacgcccacctctacgccgaaaccaagcacgccctggcccgccgctaccccaccgaccgcgaggcctatacccgtggcaaggacgaggtcgtcgcaaggattctcggccgggcgctggcggcgacgcggcacccaatgatacagagtggcctggtaaggggagaacgcgaaatgcacgccagggaactgcgtgaaacgctggtcgccggcgcggaatcgacgccaggcggccccgccgatacagcctatttcgagttgctgcgcagccgggtaagcaagccccaggactga

SEQ ID NO: 328070 - DNA, 2241 bp, Pseudomonas aeruginosa
atgtcctcacgcgcccttcccgccgttcccttcctgctgctgtccagttgcctgctcgccaacgccgtacacgccgccggccagggcgacggctccgtcatcgagctgggcgagcagaccgtggtcgccaccgcccaggaggaaaccaagcaggcgccgggagtttccatcatcaccgccgaggacatcgccaagcgaccgccgagcaacgacctgtcgcagatcatccggaccatgccgggggtcaacctgaccggcaacagctccagcggccagcgtggcaacaaccggcagatcgacatccgcggcatgggcccggagaacaccctgatcctggtcgacggcaagccggtcagctcgcgcaactcggtgcgctacggctggcgcggcgagcgcgacagccgcggcgacaccaactgggtgccggccgaccaggtcgagcgcatcgaagtgatccgcggcccggcggcggcgcgctacggcaacggcgcggcgggcggcgtggtgaacatcatcaccaagcaggccggcgcggaaacccacggtaatctcagcgtctacagcaatttcccgcagcacaaggccgaaggcgccagcgaacggatgagcttcggtctcaacgggccgctcacggaaaatctcagctaccgcgtctacggcaacatcgccaagaccgactcggacgactgggacatcaacgccggccacgaatccaaccgcaccggcaagcaggccggcaccctccccgccggtcgcgaaggcgtgcgcaacaaggacatcgacgggctgctcagctggcgcctgacgcccgagcagactctcgagttcgaggccggcttcagccgccagggcaacatctacaccggcgacacgcagaacaccaacagcaacaactacgtgaagcagatgctcggccacgagaccaaccgcatgtaccgcgagacctactcggtcacccatcgcggcgaatgggacttcggcagctcgctggcctacctgcagtacgagaagacccgcaacagccggatcaacgaaggcctggccggcggcaccgaaggtatcttcgaccccaacaacgccggcttctacaccgccaccctgcgcgacctgaccgcccacggcgaggtcaacctgccgctgcacctgggctacgagcagaccctgaccctcggcagcgagtggaccgagcagaagctcgacgaccccagctccaacacccagaacaccgaggaaggcggctcgatccccggtctcgccggaaagaaccgcagcagcagttcctcggcgcggatcttctcgctgttcgccgaggacaacatcgagctgatgcccggcaccatgctcaccccaggcctgcgttgggaccaccacgacatcgtcggcgacaactggagcccatcgctgaacctgtcccacgcgctcaccgagcgggtcaccctgaaggccggtatcgcccgcgcctacaaggcccccaacctgtaccagctgaaccccgactacctgctctacagccgtggccagggttgctacgggcaaagcaccagttgctacctgcgcggcaacgacggcctcaaggccgagaccagcgtgaacaaggaactgggcatcgagtacagccacgacggcctggtagcggggctgacctacttccgcaacgactacaagaacaagatcgaatccggcctgtcaccggtcgaccacgccagcggcggcaagggcgactacgccaacgcggcgatctaccagtgggagaacgtgcccaaggcggtggtcgagggcctcgaaggcaccctgaccctgcccctggccgacggcctgaagtggagcaacaacttcacctacatgctgcaatcgaagaacaaggaaaccggcgacgtgctctcggtgacgccgcgctacaccctcaactcgatgctcgactggcaggccaccgacgacctctcgctgcaagccacggtcacctggtacggcaagcagaagccgaagaaatacgactatcacggcgaccgtgtcaccggcagcgccaacgaccagctctcgccctacgccatcgccggcctcggcggcacctatcggttgagcaagaacctgagcctcggcgccggcgtcgacaacctgttcgacaagcgcctgttccgcgccggcaatgcccagggcgtggtcggcatcgacggggccggcgcggcgacctacaacgagcccggacggaccttctataccagcctgaccgcgtcgttctga

SEQ ID NO: 328071 - DNA, 2070 bp, Pseudomonas aeruginosa
atgctgttctcccaacacacccgcctggtacacgtggactccccgctgggccccgaggtcctgcaactgcaacggctggagggtcgcgaagagctgggccggctgttcagccacgagctcgaactggtctcgagcaatcccgccttgcctctggatgccctattgggcaagccgatgagcctcgcgctggaactccccggcggcagccggcggcacttccacggcatcgtcgcgcgctgtagccagggcgccggcgccggccagttcgccagctaccaggtcaccctgcgcccctggctgtggctgctgacgcgcacttcggactgccgcatcttccagaaccagaaggtcccggacatcatcaagcaggtgttccgcgacctcggcttctccgacttcgaggacgccctgagccgctcctaccgagagtgggaatactgtgtgcaataccgcgagaccagcttcgatttcgtcagccggttgatggaacaggaaggcatctactactggttccgccacgaaaagaagcgccacatcctggtgctctccgatgcctacggcgcgcaccacagcccggccggctacaccagcgtgccctattacccgccgagcctcggccatcgcgagcgcgaccacttcttcgactggcacatggcgcgcgaggtccagcccggctcgctgagcctcaacgactacgacttccagcgtcccggcacccgcctggaagtgcgctccaatgtcgggcgcgcccatgccgcggccgactacccgctctacgactaccctggcgagtatgtgcagagccaggacggcgaacactatgcacggacccgcatcgaggcgatccagacccagtacgagcgagttcgcctgcggggatgcgccaggggtatcggggcgggccatctgttccacctgagcaactacccgcgcctggaccagaaccgcgaatacctggtggttggcgccgagtaccgggtagtccaggaactctacgagaccggtaatggcgggggcggcgcgcagttcgagagcgagctggactgtatcgacgccggccaggctttccgccccttgccgtcgaccccggtgccggtggtgcgcggcccgcagaccgcggtggtggtcgggcccaagggcgaggagatctggaccgaccagtacggccgggtcaaggtgcatttccattgggaccgccacgaccagtccaacgagaacagctcctgctggatgcgcgtctcgcaggcctgggccgggaagaactggggctcgatccagatcccgcggatcggccaggaagtgatcgtcagcttcctcgaaggcgacccggaccggccgatcatcaccgggcgggtctacaacgccgagcagacggtgccctacgagctgccggcgaacgctacccagagcggcaccaagagccgttcgagcaagggcggcacgccggccaacttcaacgagatccgcatggaggacaagaagggcgccgagcagttgttcatccatgccgagaggaaccaggacatcgaggtcgagaacgacgagacccactgggtcggccacgaccggaccaagactatcgaccacgacgagacggtgcatgtgaagcacgatcgcaccgagaccgtggacaacaacgagaccatcaccgtgcatgccaaccgcagcaagacggtcgaccgcaacgagacggtcaggatcggcatgaacaagacggaaaccatcctcatggcctcgttgcagaacgtcggcatggggcgcatggaaaacgtcgggctcggctacagcctgaacgtcggcatgatgatgaacaccgtggtcgggctgaaccagagcacccaggtgatgaagaagaagaccttgtcggtgggcgatagctacgaagtgagcgtgggcggcagcgacgatggctcgaagatcaccctggacggtcagagcatcaccctcggcagccagcgcatcgagctgaccgccgaccgcgagatcctcttgcgctgcggccagagcacgatccgcctgacgccgggggagatcgagatcctctcgcccaatgtcgatatcaactgttga

SEQ ID NO: 328072 - DNA, 1269 bp, Pseudomonas aeruginosa
atgagcaaacgtatcgtcgtcaccggcatgggcgcggtcagcccgctgggctgcggagtcgaacccatatggcaacgcctgctggccgggcaatcgggcatcgccacgctcccggcggagctgatcggcgacctgcccatcagcatcggcggccaggtccccgaccgtgtccaggacccacaggccggcttcgatcccgacctgctgctggccgccaaggagcaacgcaagatggaccgcttcatccttttcgccctggccgccgcgcaagaggccctggcgcaggccggctgggcgccgcagagcgccgaggcgcaggagcgcacggcgaccgtcatcgcctccggggtgggcggcttccatgccatcgccgaagcggtgcggaccaccgacggcaaggggccgcgacgcctgtcgcccttcaccatcccgtcctttctctgcaacatggcggccgcccatgtgtcgatccgccatggcttcaagggaccgctgggcgccccggtgaccgcctgcgcggcgggcgtgcaggccatcggcgacgcggcgcggatgatccgcgcgggagaggtcgacgtggcgctctgcggcggcgcggaagcgaccatccaccgggtgagcctggccggcttcgccgccgcgcgcgccctgtccagcgatttcaacgacagccccgagcgcgcctcgcgccccttcgaccaggcccgcgacggcttcgtcatgggcgaaggcgccggcctactggtcatcgaggaactggagcacgccctggcgcgcggcgccaagcccatcgccgagctggtgggctacggcaccagcgccgacgcctaccacatgaccgccgggccggaagatggcagcggcgcccaccgggccatgcagcaggcgctgcgccaggccggcgtagaagcggccgcggtgcagcacctgaatgcccacgccacctccacccaggtaggcgacaagggcgaactggccgccatcaaggccgtgttcggcaccggcagcgggctcgccatcagcgcgaccaaatccgccaccggccacctcctgggcgccgccggcggcatcgaggctatcttcacggtcctggcactgcgcgaccagctcgcccccgccacgctcaacctggaaacgcccgacaccgacgccgagggcctcgacctggttcgcagcgaagcccggcgctggccgatggaacatgcgctatccaatggcttcggcttcggcggggtgaatgccagcctgttgttccggcgttgggtgtag

SEQ ID NO: 328073 - DNA, 471 bp, Pseudomonas aeruginosa
atgcgccaggccctgctgatcgtcgacgtgcaaccctgtttcgccccgccggactggctgctggaaggcattggccaactgctcgggcggatgccctcggtggccagcgtcgagcgccatgacgagtcgcgtacgccgttccagcgccagctcggctggcgaccgccgctcgacgatgcctgcctggtggcggccgaccgggtcttcatcaagcatggctacctgccgacggcggaactcgtcgaccatctgcgtgcgctgcgagcggaacgggtgctggtctgcggcatccaggccgacacctgcgtgctcgccgccggcttcgccctgttcgacgccggcctgcaaccgaccctggtcggcgacctggtgctcggctcctcgctggatcgctcgggggagctgggtgtgcgcctgtggaagcatcatttcggccaggtcgtcagcctggccgaggtgctggcggattga

SEQ ID NO: 328074 - DNA, 762 bp, Pseudomonas aeruginosa
atgtgtataagagacaggctcggcccggccgggatgcaggcggtggtcctggccgccatccaccgcgaccaccaccatgtgccgctggatcgcctcgatcgccgggaggaagcgttcgcggttgaaaccgtcggcgtacaactgctccggcggctggttggaggtggcgaccagcaccacgccctcctcgaacatgatgcgcagcaggctgccgagcaggatggcgtcgccgatatcgctgacgaacagctcgtcgaagcacagcacccgcacgtcccgcgccaactcgcgggccagggcgcgcaacgggtcggcggtgccggtcagttcgaactggcgctggtgcacccactgcatgaagtggtggaagtgctggcgccgcgcgggcacgcgcaggcactggtagaagtggtccatcagccaggtcttgccgcgccccaccggcccccacaggtagacgccctggatcgcgccgtggcggtgcggctcgtgcagggcctggaaacaacgctccagcgcctcggcggcgcgccgctgcgcctcgtcgggagcgaaaccgcgctgttccacggcctgacgataggcggcgagcggcgacgtggccggcagatcgggagaggtatcgggcatcgggcggttccacctggcgcagagcgcggagccagacgctccgcaaagcgccgagtctactgcgcccggctgggtttgggcgaatgccgcagcgccggcacggcggatagtcgcgggaggttggccgaataa

SEQ ID NO: 328075 - DNA, 411 bp, Pseudomonas aeruginosa; identical to SEQ ID NO: 318710

SEQ ID NO: 328076 - DNA, 1167 bp, Pseudomonas aeruginosa
atggccttctctgaacgcatctcccgcctgaaaagctccttgatccgcgaaatccttgccgcggcgcagcgtccggaggtgatgtcgttcgccggcgggctgccggccgagccgatgctgccgaaggtgcagtgggagcagatgccggcctccatgggccagtacggcatgagcgaaggcgagcctgccctgcgcgaagccatcgccgccgaagcgcgtgccctcggcgtcccctgcgaggcgagccaggtgctgatcgtcagcggttcgcagcagaccctcgacctggccagcaagctgttcatcgatccgggcaccgaggtgctgctcgaggcgccgacctacctcgccgcgctacaggccttccaattgttcggcgccgattgcgtgaccgtgccgctgggtgccgagggccccgacctggttgccctgcggcagcgcctggagcgacacaagccggccttcgcctacctgatcccgactttccagaatccgtccggcgtgcgctacagcgaggaacgccgcgacgcggtggcggcgctgctcgacgaattcggcgtgaccctgatcgaagacgaaccctatcgcgaactggtgttcgacgagggccgcgcaaccccgctggtcagccgcctgcgcaagtccagctggatctataccggcacggtgtcgaagaccctgctgccgggcctgcgcgtcggtttcctgatcgccaccccggacctgttcccgcacctgctgcggctgaaacagtcggccgacctgcataccaaccgggtagggcagtggcaggcgctgcaatggttcggcagcgaggcctaccgccagcacctggccgagctgcgcgagttctaccgggtccgccgcgacgccatgcaggaggccctgctggagcacttcggcgagctggccgaatggaatatcccggagggcgggctgttcttctggctgaccctcaggcagccgctggatacccgcaccctgctccagccggcgctggccgccgatgtcgcattcatgcccggcgaacctttcttcgccgagccggagcagaacctcgggcgtctgcggctgaacttcagccacgtcgccccggagcgcctgcacgaaggcctgcggcgcctggccaaggtcgtccgcgacgcccaggccgccgaagcggcctga

SEQ ID NO: 328077 - DNA, 1335 bp, Pseudomonas aeruginosa
atgaggaatctgttcgccttgacgccgatggcgctggcgctgtgcaccgcgtccgccgcctgggccgatgagggggaagccaaagaaggcttcatcgaaggctccagcctccaattgctgacccgcaactactacttcaaccatgaccgccggcacgcttccgggcacgacagcaaggaatgggcgcaaggcttcatcgccacctttcagtccggctacacgcccggcgtggtcggcttcggcgtcgacgcctacggcatgctcgggctgaagctcgacggcggcggcggtaccggcggcaccagcatcctgccgatcaccgcgccgagcaaggaaggctacgagtccggcaaggcgcccgatgagttctccagtggcggggcggcgctgaagatccgcgccttcgacaccgagctgaagctgggcgaccagttcctcagcaacccggtggtcgccggcggcgagtcgcgcatgctgccgcagaccttccgcggcgtgagcctgaccaacaacagtttcgaggacctgaccctcacggctggccaggtcagtttcaccaagtactacaaccagagcggccaccgccgcctcggctcgtactacggcgaactgccgagcgaccgcgacagccatcatctcagctggctgggcggcacctggggcggcatcgagggcttcaccagcagcttgtacgccgccgaactgcagaacgtctggaagcagtactacgccgacgtcgactacacctacgagatcgacgacaactggtcgctgaaccccggcgcgcactactacaagaccgtcgacagcggcgactcgctgctcggccggatcgacaacaacacctacagcctgcatttcgcggtcggctacaagcagcacaccgtcaccgcggtgctgcagaaggtcaacggcaacacgccgttcgactacatcaaccagggcgacagcatcttcctcgacaactcgcagcagtattccgacttcaacggtcccaacgagaagtcctggaagctgcaatacgactacgacttcgtcgccctcggcctgcccggcctgagcgcctcggcctcgtactcgcgcggcaagctggacctgacccgggtcgatccggacagccccggctacggcggctggtacagcgccgacggcaagaacgccaagcactgggaacgcgacctcgacctgcagtacgtggtccagggcggtccggccaaggacctctcgctgcgcctgcgctgggccacccaccgcggcaccggcggctacagcgcggtggacaacgacatcgacgaataccgggtgatcgtcgactaccccatcgacgtgttctga

SEQ ID NO: 328078 - DNA, 369 bp, Pseudomonas aeruginosa
gtgatctccgcccgtgctttatcggtcgcgctagcctgcctgctgctggtcggcctaggcgccgccggcggtgtgtggctcggcgcgcgacactaccggccgcagctcgatgccgcgcggtcggatttggtcgcctgccgtgccgctcgggatagtctggatgccgcagtagcggagcaggaccggcaagttaccgcgctgcgccaggccggcgaacagcgcgccagggaggcagccctggcggtggagcaagcgcgtcagcgcgccgacggcgagtatgccgcggcgcagcgcctactgctggagcgctccgtcggcgagcagtgcgcggccaccgaggcgattatcgatcaggagatggggctatga

SEQ ID NO: 328079 - DNA, 630 bp, Pseudomonas aeruginosa
atgcctatcactgaaagccaactgctgtacatcctcccgaggtgccgcccggttgttggggtcttcctgcccgcgctgaaccgcgccatgttgcagttcgatatccagggcggagccaggcaagcggcgttccttgcacaggtcggacatgaaagcgcccagctcacgcggctggtagagaacctgaattactcggcgcaggggttggcgaatacctggccgagtcgatatcgcggcgccgacggacacccaaacgctttggcgttgaacctcgctcggcaccccgaggccgttgcgaataacacttacgccaaccgcaacggcaacggcgatgagtccagcggagacggctggcggttccgcggtcgagggttgctgcaaatcaccggccgtaagaactaccgggctgccggcgccggcctcggcctgccgctggaggctgagcctgagttgctggagcagcccgagcacgcggccaggtcgagcgcctggtggtgggcggcacatggactcaacggcctggccgattcgggcaggtttgcacttattacccggacgattaacggcggcatgaacggccaggtggagcgcctggagctgtgggagcgcgccaaggcggtgctgtcgtga

SEQ ID NO: 328080 - DNA, 186 bp, Pseudomonas aeruginosa
gtgagcgtaaggaacatcgctaaacggtacgccgagaaacaactaaccggcgctgaagcgctggccgaactgaaggaaaaagacctcctcggcgacgcccttatgaccctgctggtcgaccacttcgaacaacgctgggaacgggaacagtccctgcccgacgagtacaggtcagaggactggtga

SEQ ID NO: 328081 - DNA, 1053 bp, Pseudomonas aeruginosa
atgaagccgatatttcgggtgatcgcggacaaggccgatatcaccgcgcgtatcaacgaccggttgttgctgctgcgcacggtcgacaagccgggaatggagtccgacgagttcgagttgcgcattgacgaccgcgacggtgccgtggtgttgccggagcggggggcgtcggtcgagatccagataggctatgacgggcgcgggctgacccggattggcatctacaccgtggacgaggtggagttatccggcccgccggataccatcgtcatccgcggcaaggccagcagcatgcgcggcagcggcaagacgatccgcgacggaggctgggagggggtgacgctcgcgcggatagtggcggacattgccgcacgcaacggctggcagagcgagtgcccggtgcagacggtggttccgcgtgtcgaccagattggcgaatcggattttaacctgatcacgcggctggccagacagtacggctgcacggccaaggtggcggcggacaagttgcttgtactgcctcgcgaaggtggggagcgagcatccggcgcgccactgacgaccgtcacgctgacccggccggagatcacccggtttcagtttcggttcagtgaccgggccacgcagaaggcggtcaaggccgcgtatcaggacaagaagacgggcaagctggaggttgtcgagctggcgaatgcagaggctccggccgggcttccgcccgtgcataccgaccgccacatccatccgaacaagagcgccgctgagcaggccgccaaggcgcggttggctgcgttcaaccgctccacggctggggtgcgcctggaaatgccagggcgaacggatctcttcgcggaacgaacaatagtcgtcgccggcattaagtcgggaatcgatggttcctacctggtggagtcggtggaacaggtctttacccaggctggctggagcacgacggttgagtgcaacgccggcaagaagggcaaggccaaggccgccggcaagaagaaacagaaaaagccacttcaggtagtggccatcgggaaagcatcgtga

SEQ ID NO: 328082 - DNA, 207 bp, Pseudomonas aeruginosa
atggagacgatctgcagaacgtctgacggggatctgctggacacgctctgcgtccagtattacgggcatctggtggggacagtggaggcggtctacgacgcgaaccagtggctcgccgatgagccgcagcccttccgggccggcctgctgatcgtcatgcccgaggtcgaagtgccggtgaccggcgaggtgcagttgtggggctga

SEQ ID NO: 328083 - DNA, 840 bp, Pseudomonas aeruginosa
atgccgtatatcgaaatgatggaatccggcctgcgccaagtggtgcgggccggggaggaggggcgtaggagtgtcgacggcatgttggcgcccatcacgggtgcggtttccgatctcacgggcgctgccgatgagctgtccacgctgcccggcttcccggccgggttgggcgaccgggcgctgcgactgactcgcagcctgggcgtggcacaggcaaaggtgggtggcgtcatgaatacctacagcagtgctgcccgtgcgctatctgggctcgatcagcggtatggagcgttgtccgacgccgtgtcgaaggttaccgggcaggtcgggcggctcgccggcgttgccagtcccaagctggccaacatcatcccgaccggcttgcgttcgagcatgacgccgagtgcggccgcctccaagccgtttgcgcatctgctggtcatgcagccgcgggacgtgaacagtagcccgttctacttcaatctcgacacggccgcgttcgatgagctgcggagacagacggcgtttcgttgggctgctcaggaacgacttacccggccgccggcgcaacaggcggtcggggagggggaggacaagctgacgttgaagggggctgtcttcggtgttcgggtcggcctggggcaaatcgagcagctacgtgaaatcgggcggcgccaggtgccgctcagcctgaccacgggttacggccaggtgctcggcctgtggtgtctggcgagtatcgaggaggagcagtcggcccttgttcaaggcggcgcccctcgcaaacaagcattcagcctggagtttgtccgctatggagacgatctgcagaacgtctga

SEQ ID NO: 328084 - DNA, 2691 bp, Pseudomonas aeruginosa
atggcgtccaatcaactctccctcgggctgctgatcggcggcgccgtgagcggttcgctgaatgcagcattccgcaccgtcgagggcagtatcgaccagctccaggccaaagggcgggagctggatctgttcaaggcccagaccaaggcggcgttggagttgggcaacacacagcgccgcagcaccttgcgggcctatggcgaacagcagagggtcggcgcggcgctggagtctcagcatgcagcagccaccgcccggctggcatcgctcaatcgcgagttggccgcggcggatcaggctcggacccggcgactggctacgcagtcgacggaaatggaccgcctgcgctacctccagtggcagctcgcacaagaggccaaccggcaagccgagggcggcaacaagggggaggcgaagcggttgcggggccaggctcaggcggcggccgaactgtacaagcaacgccaagcccaggcggcggccgacaacaaggcctacgcggaaaaggtccgggggattcagcgccggatcgaggtggcgcagcgtgaagcccagcaagccaagcgcagcttggcggaccagcaaacggaaatgggccggctgcgtaacgtgctgcgagacaacgccagggaggcggggcgactcggcgatgccttccgccaggccgcccgcgaggcgcagggcatcaagctccaagccagcggcatggctcgcctggaggccgggaagtccggtatgcgctcgacggtcggccaggcggtcgccggtactgccgctctggctgtgcctacgaagatcagcgcggactaccaggcaatcgttcgggatatcgcgatcaaggctggggtggccggttccgctgaagagcgggatctgtcgcgcacggtcattaccacttcccgcgacaccgggatggcgcgcaacgaagtggccgatgtgatcaaccaattggtcagcgcgggcatggatctggacgtggcgtcggggttctctccggtcgcggccaagttcgtggtggggcagggcgccggcggcgtggataccgcgaggatgatgcaggcgctccagcagaacgcgaagatctccgatcccagggtgatggagaaagcactggaggctatcgccttccaggggcaggccggctcgttcgaggccagtgacatggcccgatggtttccccaactgctcgcggaaatgggcaagttggagatcttcggcatggatgccgtcacgcaactgggctcgatgcttcaggtgcaaatgaagaccgccggcggtgccgatgaggcggccaacaacctgaagaactggatggccaagatcggctccagcgatgttgtgcgagcctaccagaaggctggcatcgactatcaaggctcgctcaatactggcttgcaaagcggaatgtcgacgctggaagccagctttgcattggcccagcagtacatccagcgcaccgatccagccaaggccaagaagatggccgaggcaaccgcagccatcagcaaggaggcggacccggccaaggccagggcgatgatggaggccctggagcagacactgcgcaccggcgatatcttcgcggatatgcaggtcaaggcggctctcaccgcctacacgcagaacaaggcgctgtacgagtcgctgaagagggaatcggcatcggccacaggcattctggaccagaacctgagagagcgtcgggaggcctcagcccagcgctgggctgaagtcgcccaggccgcgaacgaagggatgcgggcggttggtgacgcgattcgtccgatgactgatgcggcggccggcgccttgcggccattgttccaggggcttactcgactcaccgatgcggcacctggggtaactgccggagtcgtgggcgtcggtgccgcgttggtcgtgctccgggggatcgtcaacgcctggaggattggccgtggactgatggatattgcccggggccgctcgatgatgggcaatccgaatatcgttcaacgtgtgttcgtgaccaaccccggcgccggcggcttgggtggtgatgtgggcggtggttctggtcggcgtggccgggcaggtggtggtcgcagtgggcgcctcggcgccgcagggcgcggtgcctggggtgtgctccggggcgctgggcgcttcgccaaaggggcgggaccgctggctcttgtcggtgcaggcctccaggcggccgacaccttcgtgaacgcggagacgcgagacgaaaaggccgaaggctacggcgcggccctggggggcctcggtggcacgctcgccggcgctgcggcgggagcggcgattggatctgtcgttccgatcattggaactgcgattggtggcctgatcggcgggatgatcggggcctggggtggttccgagctgggggccgccggcggcaaagcgctgttcggcagcggcggcctgttcggtgggtctccaccggcagagcccgcgaagcccgctgttctgcctgtcactgcggtggtggcggagccggcgaaaccggcgccggtgccggtgaaacaagagttcagtttctcgccgaacatcagtctcactgtccagggggatgcgaaagatccccaggcgttgctccaggcgatcatgccagagcttcgccggcagctcgccgactttgccgggcagatgcagcgggtgtccctgttcgatgagcccaatgtgtag

SEQ ID NO: 328085 - DNA, 297 bp, Pseudomonas aeruginosa
atgaaagagaaaacccccgcatggttggaattgcgtgccaccggcgccacggtcagcttgcgatccacggccgaggtcaacggcgtgaaggtcgataagctgacccttcgcgcgccgacggtccgtgacatcctggcgtcggaagagcagggcgctgagacagaggcacagcgcgagctggccctgttctcgaccctggccgaggttggccgaaaggatctggaggggctgacaatggtcgattaccggcgcttgcaaaccgcctactttcgcctggtgcaggacgacggggtatag

SEQ ID NO: 328086 - DNA, 510 bp, Pseudomonas aeruginosa
atggcaatgattccgcaggtactgaccaatactaacctgttcatcgacggtatcagcttccagggcgatgtgccgtcgttgaccctgcccaaggtcaccgtgaagaccgacgagttccgcgccggcggcatggatggctccatcgacatggacatggggctcgagcgcatggagtcgtcgttcaccaccaatggggtgcggcgcgaggcgctgaacttcttcggcctggccgatggcacagcgttccgtggcgtctttcgcggctccttcaaggcgcagaaaggcaaggtaacggcggcggtcgcgacgatccgcggcaccctcaaggaagttgatccgggcgattggaaggctggagaaaaagccgaattcaagtattcggtgggcgtcacctactacaagctcgaagtcgacggccgcgtggtcttcgagatcgatcccttggcgccgttgcgggttatcaacggtgtcgaccaactggctgaaacgcgcgcagcgctgggcatttaa

SEQ ID NO: 328087 - DNA, 1161 bp, Pseudomonas aeruginosa
atgagctttttccatggcgtcacggtaacgaatgtggacgtgggcgcgcggaccattgctttgccctccagctcgatcatcggtctgtgtgacgtgtttactccgggagctggagcgaccgccaagccgaacgtgccggtcctgatcagcagcaagaaggaagcggcagcggcgttcgggatcggttcgccgatctacgctgcgtgcgaggccatctacatgcgcgcccaagctgtcatcgtggcggtcggtgtggaagcggcgggcacgcccgaagaacaggccagcgcgatcatcggcggcatcaacagtaccggcgagcgtaccggcctggaggcgctgctggacggcaagtcgcgtttcaacgctcagccgcggctgttgattgcgcctgggcattccgctcggcaggcagtagccagtgcgatggacgccctggccggccgcatgcgggcaatcgggatcatcgacggcccgggcaaggatgatgagaccgccatcgcctacgccgccaacttcggcagcaagcgcctgtacatggtcgatccgggggtgcaggtctggaacaccgagaccagcagcaccaccgacgctccggcctcggcctgggtggcgggtctgttcgcctggaccgatgccgagtatggattctgggccagcccctcgaataaggagttcgtcgggatcacgggtaccacgcggcccatcgagtatctggacggcgacccgacctgccgagccaacctgctgaacaatgccaacatcaccacgatcatccgcgatgacggctaccgcctgtggggcaaccgcaccttgtcttcggatgcgaagtgggcattcgtcacccgcgtgcggacgatggatatcgtaatggacgcgatcctggcagggcacaaatgggcggtcgaccgctcgatcaccaagacctatgtgtctgacgtgaccgaggggctggagtccttcatgcgcgacctgaagatccagggcgcggtcatcaacttcgaggtctacgccgaccccgatctgaatacggccagccagctctcccaaggcaaggtgtattggaacatccgattcaccgacgttccgccggccgagaaccccaacttccgcgtcgaagtcaccgaccagtggctgaccgaagtcctcgacgcagcataa

SEQ ID NO: 328088 - DNA, 465 bp, Pseudomonas aeruginosa
atgagttccagtgactatgttttctcgccgtctgcggtggcgttctatcccgtttcgttgcggaaggtctacgaggaaggcagcggttggccgctcgatgcggtgccggtcagtacagcgctctatgagcggatattggccgggcaggagtccggtaagcggatttccgtcgattcctctggccttccaatgttggtcgatcctccgccgccagacgagcagcggctcgtcgcgcgggctcgtgcatggcgcgacgcacaactaatagtgaccgatggcctagtggcgcggcatcgcgacgagcgcgaactcggcaagctggccacctccctgtcgtctgaacagttcctcgaggtaatgagctaccgcgaggccctgcgcaattggccggacgacccggcattccccgaccccgcctccaggccggagccgcctgcctggctggccgaagaaggcaccaactaa

SEQ ID NO: 328089 - DNA, 1710 bp, Pseudomonas aeruginosa
atgagcaagcaatacgggggcttccttaccgacaagggggctgccaagcaaatcgaggcggcggctggcgggctgcggcgtgacattacccatatgttgattggtgatggaggcggtgcgcccggggagactcctgatccggtccctagtccgtcgcaaaccgcgcttatccgacagcgctaccgggtcaaactaaaccggttggtagcggccgaggatagtcctagcgtgctagtggccgaagccattctgccgcaggaagtggggggctggtggatgcgcgagctgggactggaggattccgatggcgacctgatcgctgtagcggattgtgcgcctagctacaagccgttggtcagcgagggggcggggcgaacccagaccgtccggttgcatatcgcagtcagccacgcagaaatcgttaaccttctgatcgatcccaatgtagttaccgcgacggtggcagatctggataaggccctgttggaggttcgggcgatcaatgatgccactgggcagatgacgctagagcagggcggcggtattacactgcctttatccttgagtccgacgggggttgctcctggtacctaccgcagcctcactgttgacgcgaagggccgagcaaccagtggcagcaatcctactaccctgggtggctatggcatcaccgatgccctggcgaagagtgaggcggtggaagagccaacaccgcacaagctgctacggctcaatggagcgggccaactgccggcgtcgattaccggtaatgcagcgagcgctacgaagctgacgtcggagcgggttcttgcgtgtagcggtgctgcaacaggcagcgcagtattcgatggaacacgggacgtttccatcgcgctgaccctcgcagatagcggagtggtgcccggtgtctatcccaaggtgacaatcaacgccaaaggtttggtgacagcaggtgcatcgttgtccgccgctgatatcccaagtttggattggagcaagatcaacagcggcaagcccactacgttggcgggctacgggattaccgatgcgctgaacgcaggattcaacagtcagagtccaattttctattcggcggtggcaggcgatgggctcgcgcaagccgccatccaaattcgtgaagccgaattgattggcgcgaacgggcgaatttacaaatatgcgccgcgactctggtttcactggagcggcgtatacgcgggcgacctcgggatgaacgatgttggaaatctgctttggcgcgggagtccaatctacaccgcggcgaatctggatctctcggtgtatgcccgtgtctcgcatacgcacgatgctagccaaatcacttcagggattctcccggtacatttggggggaacgggcgcgaataactccacgggggcaagggagagtcttggagccggtgtaccttcgaccgcgtggctctattccaccggctggtggcgggataacgacactggatttatccgccagtgggggcgcgtgacggtagcgggtgacgggacggcgactatcacgtttccgattcctttcccgaacgaatgcctaggcggtttcgctggtcagaccgcctatttccatccgggcaccgacgcgagcaccgcattctatggacagacaacgacaggggcgaccctcgaaaatagctatcaactccaatccgtattgttctgggaggcattcggtcgatga

SEQ ID NO: 328090 - DNA, 531 bp, Pseudomonas aeruginosa
atgagtcagctaccgagcaacgcgaccgagctggagcgcgccctggagttcgcgacggacgaagaaacggacgtgcctctgcggctgctggtcaaccccgatacctgcccggaacacatcttgccgtggctggcctgggcctggtcagtggatcgctgggacaacgaatggtcggtgccgacaaagcgggcagcaatccgctctgccttcgagatccacgcgaggaagggcactatcggcgcgctacgtcgggtggtcgagccaattggctacctgttgacggtgaccgagtggtggcagaccgacccgcccggcgagcccggcacgttctccatcgaggttggcgtgagcagcggcggtatcactgaaaccacctatcgcgaggtggagcgcctgctggatgacgcgcggccggtcagtcgccatatcgtcgggctcgacattcgcttcgagcccaagcttcaggtcttcactgcggttgtagaaaccgatggtgacatcttggatgtattcccgaggttcattccatga

SEQ ID NO: 328091 - DNA, 885 bp, Pseudomonas aeruginosa
atgagtaccgtagatctggcctcactgccggcgcccgaagtgctggagccgttggagttcgaggcggtatatgccgaggagctggcggatttcagggcttacatgggcgaccagtggaacgcggcgctggaaagcgacccggtggtgaagcttctcgaacaggcggcctaccgtcgaatgcagaaccgcgctcgggtgaactcagcggccaaggcgttgttgctggcctatgccgagggtagcgaccttgaccagttggcggcgaacgtcaagctacagcgcctggtgatacgggaggccgacgagtcggcggttccgccgaccgagcgggtgatggaggacgacgccgcgttgcgggagcgcgtacagctagcctatgaaggcctgaccaccgcagggcctcggtccagctacatcctgcacgcgcgcagtgcgtcggccctggtcggggatgcgacggccgaaagccccaggccggcggaagtggtggttaccgtgttgcacgtcgaagggcagggcgtcgccgaccaggcgctgctcgataccgtctatgcccgcctgagtgatgaggatatccggccggtcggtgaccggctgacggtgcagagcgccgaggtgctgccgtacagcatcgatgcggtggtgtacatggagggcgtcgggtcggagaacgaggcgatccttgccgagtgccagcgtcggataagcgcctggatcaatccgcgccgtcgcctgggtgtcgaggtgtcccggtcggcgattgacgcccaattgcatatcaccggcgttcgcaaggtggtattgaacggttgggtcgatatcgtgccgaccaaggctcaggcggcctactgcacgtccgtgaaggtcgtacagggggacgcatga

SEQ ID NO: 328092 - DNA, 327 bp, Pseudomonas aeruginosa
atgattgggctggatcgacggaccgggcagccgctatccggcgtggcccacttgaagcaatccatcgaggacattctgactaccccgttgggcacccggcgcatgcgcccggagtacggcagtaagttgcggcgcctggtcgatctgccggtgaacgacggttggaagagtgccgtgcaagccgaggtcgcgcgggcgcttggccggtgggaacctcggctgcgcctggagcgtgtccgggtggtggcggtcatgggtgggcggatcgatctggagttggccggggtgtacctgggtgactccgtaatgctggaggtcagcgcatga

SEQ ID NO: 328093 - DNA, 222 bp, Pseudomonas aeruginosa
atggccaaagccaagactgaagaagcggaagccgtccaggcgccggttcaagaccatccgacgcccgagttgccggtgacgttcatcgatcaggcctaccgacagcgcaccctgatcatgcccggcggcgtgacggtgcaggtgcgcaatagcgaggtcgtcgccgacaccgaagaggtgttcgagtggttggtggctcgcgcggaattcgttcgtaagtag

SEQ ID NO: 328094 - DNA, 558 bp, Pseudomonas aeruginosa
atgagctacgcgacagcggaacatgaccgcatgattgcggcgatgatcaagccgtgcgtggttgctgcggtggatctcgcggccgctcgggtgcgcgtgcaggcgggggcttggatcagtggctgggtgcgctggcatagcctggccgccggcacggcgcggcactggcgagcgccgagcctcggcgagcagggtgcgctgatcagccctagcggcgtagccgacatgggaacgttcattcccggcttgtacggcgttgccggcgaccagcccgacaaccgtgcgaacgtggaggtctggcggtttcccgatggcggctccctggtctacgactggcaggcgaagagctacgcggtgaccctcccggcaggtacctgcacgacgaccgttggcggcgcctcggtcactgttaccccggggcaggtagccgtccaggccggcgagatcctgttggctggcagggtcacggtggccggtacgctgcacgtcaccggcaatatcaccagcggcggctcgatcatggacaccacgggcaacagcaaccatcacacacactga

SEQ ID NO: 328095 - DNA, 537 bp, Pseudomonas aeruginosa
gtggctgacttcgtgctgctcgacttctaccgggcgattgagacagagctgaacgcatcgctcgccggtatgcgctctatcgcgttcgatacgcagatcgaggaccggatgccagcgccgtgcatcctgctggaggtgtcggagttcgagccgagccaggatcccgaccagggcacgggcgaggtgggactgaccttgcatgtgcaagcccggatcgtcgtaggccgggagcgcgcggagaaccgcaccaaggccgttcaactggcaacccagcttgcccatctgctgcgggaccagacatgggatctggacgatgtttcgcaagccgagttcgtccaggccggcgaggactacacgaagcctgagctggacgccttctgtgtctggctggtggagtggacgcaaacggtctatgtaggggccgaggagtggccttggaaggacgagtctggcgaggagctgctgttcggcatcgatcccgacactggtcccggtcatgagggggactacttcgcgcccgaggatatcccgctatga

SEQ ID NO: 328096 - DNA, 669 bp, Pseudomonas aeruginosa
atggctatcggtaccacccatcgggtggccgcgcgaggcggtacgctgaacgtccagccgaaggccgccgatatggcggccttctcgactctggcggcggcgtacccgaaggcggcgatgaacgcgcagcgccgggcgatcaacaagacgctcggttggctgcggacgcatatcgccagggcggtcggccagaaggagcgcatagcggttcgggcagtgcggcagcggctgatcgcgtatccggtgcgtggctcgggtagccagggcaagctctggtttggcatcaaccccatcgaggccagccgaatcggccggcctcgtcagggaaaggcgggggtgacggtggccgggcgaacctatcgcggggccttctatgcccgtgtgtacgggggcgagccagatatctggattcgaacggccagcccgcacttcgacccgagcgattacccggccagcgacgttcgatcgatggcctacggtcgccgcggttcgatggacgcggacatgtacggccgctttcccttggccaaggcaaaggtgctgctggacgacgtgcgtccgctgttcgatgcctgggccaagcgggccgaccagaaactgcttgagttcgcccagcgcgaacttgcctacgaactgcacaagctgaccaagggaggcgcgcgtggctga

SEQ ID NO: 328097 - DNA, 315 bp, Pseudomonas aeruginosa
atgcgctttcatgagcgattcgctgatctcgatgcgctgctgttcgatgagctgggcgaccctgcccatttcgaagggcgggcagagcctgtgctgggggagtttaccgccccatggcaggctccgcgcatgggtaccgcgccgcttccattgcgtgagccgcggttcaccgttctggccagcgatgcggcgagcgtggaggtcgggcagggaatcgtcgtggatctccctccgccagacggcggcgcctatatcgtcgtgcggcgggagcctgatggcaccggcctagtcgcgttgctgctgaggagggactga

SEQ ID NO: 328098 - DNA, 186 bp, Pseudomonas aeruginosa
atggccgccgcaaagtcgaagtacatcgtcattaaggggtgcgtgcaggacgggcgcgatatctatcggatgggcgagccctacgaaccggccagcacggagctgcgggaggagttgctggctgcgggcgttatcggtctggccaaggaccacgcccaggcgcagagcggcgaggacggcgaatag

SEQ ID NO: 328099 - DNA, 1038 bp, Pseudomonas aeruginosa
atgaccgatattttcgactgccgcacgatgctcgatgcggtggagcagatggtgcggccgcgtactttcctgcgtgacctgttcttcaatggcgccaacccggtaaccttcggtaccactgcggtggatatcgatatcgtgaagggcacccgcaagatggctccgttcgtgcatccccgcctgccgggaagcctgtcgctgcgctctggctaccggagcacgacctacaagccgccgtacatccagcccaagcgtgaaaccaccgcagagctgattctgaagcgttcgcctggggagaacccgttcgctaccaagtccgcgctccagcgggccggcgagcaattgggcaaggatctggcggatctcgacgacgagattacccgtcgtgaagagtggatgtgtgcccaggcgcttactaccggcagcatcaatgtgaagggcgagggcgtcgatgatgttatcgacttccagatggaagatacccacaaggtgacgctggccaccggcaagtggggggccagtggcgccgacccgattggcaatctgcggacttggaagcgccgcattgccaaggattccgggcgcacagcgaacgtgtcggtgttcagcggcgaggccctggatgcgttccagaacgacgaaagcgtcatgaaaaagctgaatacccgtcgcgtcgacctgggcatgatcaaccccgaggaactgcctgatggcgttacgtacctcggctatctcaacgatccggggttggatctctacggctacgatgagtggttcgtgcccgatgatggcgacgaggaggagcagccgatgatctcggcgggtggcatcatcctgggctcgaccaacacccgtaacgcgatgttgtacggggcgattcaggatctcgacgccatcgagagtggcctggtcgaggcgtcgcgcttcccgaagagctggacgaccaaggagccgagcgtgcgctgggtgaagctccaggctgctgcgctgtccggcctgctggagccggatgccttcctgttcgcgaaggtggtgtga

SEQ ID NO: 328100 - DNA, 351 bp, Pseudomonas aeruginosa
atgtacgaagttcaacgcaatacctacgtcccggaccaattggcggccggtgatttccccattgcgaccggctccggtgtgatcgctgccggccaggtactcaagcgcggcgcggtgctgggccgggtcactgcttcgaaggagtacaagctgtcggttgccgccgccgacgatggctcccaggcgccgagcgcggttctgctggaggccgtcgatacctcggcaggtgccaaggtcgcgccgctgcaactgaccggcgatgtgcgtttcggcgcgctcaccgtaggcgagggccacgggcgtgacagcctggtcgatgctctgcgcccgttctgcctcttcgttcgctga

SEQ ID NO: 328101 - DNA, 1221 bp, Pseudomonas aeruginosa
atgcgcgcattcgagctggctgcatcgcagccctggctaatgctgcccgagcatctggagaacctgctggccatcgctgagcgaatgggtgacccccaagcgctggtgacccgcgaaggcgagcgcctgaacaaggcccgcacggtgactgttcgcaacggcgtggccatcgtgccagtgaccggccccatcttccgttacgcgaacctgtttaccgagatcagcggagccaccagcacccaggtgctggccacggacattcagcgggcgctcgatgacccggcagtccgcagcatcgtactgaacatcgatagcccgggcggtgtggcatccggcatcaacgagctggccgagctggtgtacgaggggcgcaagcgcaagcggatcgttacctatgccggtggctacctggcaagcgctgcgtactggatcggaagtgctgccgaggaaatcgttgtcgacgagacggcgatggccgggagcatcggcgtcatcgttgaggcggtggttcagcccgatggaccggacaagccgaagcgctaccaggtggtcagtcgcaacgccccgaacaagcggcctgacgtcaccaccgaagaagggcgcaagaagatcggcgagaccgtcgatgccctggctgaagtcttcgagaacaaggtggcccgcaatctcggcgtggctgctgaacgtatcccggaaatgggtgactacggcggccttctggttggcgccgcggcggtgaaagccggcctcgcgcaccgacttggcagcctggaagccctgatcactgaactggccaaaccggccgcaacccaaccgaggaaagcaagtatgaaagtcgtgaagaccacggcggagctgcgcgaggcgctggccagcggcatcgacccgaacaccatcgaagtggccagtgccggcgccgaggagatccaggcggcccgtaccgacgcggctgtcgctgaacgcaagcgtattcagggcatcagcgcactggccagcaagggcttcgagaaggaggtggctgctgccatcgaagccggtaccagtgtcgaagcgaccgccctgcaactgctccaggcggcctctgatcgcggcattaccctcgccggaatcgttgccgactccaccggggcctcggcctccacgccggctggcgacgacgcggccagcaaggagcgtggcgctgcggtatccgccatcgtgaccggtgccaagcgccgctaa

SEQ ID NO: 328102 - DNA, 1473 bp, Pseudomonas aeruginosa
atgctccgcagtatggccagttggatccctggcctgggcagtcctcgtcgagacctgaaccgcggcgagcgcaatatgctgatcgcccgttctcgggatgccctgcgtaaccacctgatcgcgcgggctgtcgtgatgcgcctgcgcacgaacgtggtcggtacggggctggtctgtcgggcgcaggtcgaccaccaggcgctcgggatctccggtgaagaagcggagcggctgaacgctcaactggactggatctggaaccactacgccgacagcccggccgagtgcgatgctgaggcgacgttgaaccactaccagctccaggcgctgaccctggtgtcgtcgctggtcggcggcgatgtgctggtggcaacgcccttcgaggagcgacccggctgcatcttcggcacgcgcctgcaactgatcgaggccgagcgcgtttgcaatcccgggcacggcctggatagcgcagggctggtcgatggcatcgagtccaacggactcggcgcaccggttgcctaccacgtctgctcgggctatccgaacgacctgccgacggccgggccgctaacctggcagcgtctaccggcattcggtgcgcagaccggacggcgccgggtgttgcacgtcatgtcggacaaggagcggcccggccagaagcgcggcgcgccgtacctggcgccggtgctggagccgttgcagaagctggagcgctacagcagcgccgagcttatggcggcggtgatctcagcaatgttcaccgtgttcatcaagaagggctccgactacaacaacgccggcggcctgccgatgacgggcctggtgaacggtggtggtagtgcctccaccgacgacgaagcaccgcccctggagctgggcgagggggcggtggttgacctgggcgagggcgaagagcctgttgtcgccaaccccgcccggccgaatgcgcagttcgatccgttcttcatggcggtggtcaaggagataggcgccgccctggagatccccgcggacgaggtgcttttgcactacagcaccagctacagcgccgcgcgggccgccatgctgcaagcctggcgattctacagtctgcgccgctggtggctgacctgcgatttctgccaaccgagccgggagctggtgattgacgaagcggtggctcgcggcctgatcgacctgcccggctatcacgatccgatcaagcggcgtgcgtactgccaggcgctatggattgggccggcgcgtggcgccatcgacgagctgaaggaggcgaacgccgccggtaagcgcatcgagtacggcctgtcgaacgagaccctggagactgcggcgatgactggtgagccctggcagcaggtgttcaaccagcgcttgcgggagatcgagcagcgccgcgctaacaacctgtacacgctgccgaagggccgcgaaaccgaggcgccgccggcgcccggtcccgacgacgaggaataa

SEQ ID NO: 328103 - DNA, 216 bp, Pseudomonas aeruginosa
atgaccacagcgaaacagcgcctggaggaagtccgggcggcgatatctgacgtcctgtcaaaggggcagcgcctgaagcgtggcgagcgcgaggtctacaaagccgagctggcgtctctgcggatgcttgaacaacagtacgccgcagccgccgctcaggaagaggccgcccagcacgggcggggtcgtaaccgcgtttactacctgaagatttga

SEQ ID NO: 328104 - DNA, 1887 bp, Pseudomonas aeruginosa
atgagcattgccgagtgggcgcggaagtaccgttggctgtctcccgaggaggcggcgaagcctggtccgtatcggttcgaggtgaccccccatctggtgtggccgggtggtcctctggaggccctggacgatccgaatgtgaccgaggtagtcgggcgcaagtcggcccaggtcgcatggacctctggcgtgctgggcaactccctcggcaaatggatcgatctggatccctcaccgatcctgatcctgttcccgaaggccgacgctgccaagcagtatgtggccgagaaactggaaccgatggtggaggccacgccgcggctgcgcaataagatcgatcttcgcagccgcaagctccagcagcggcaagatttcaagcgcttccccggcggcttcctgaaactggtcggctccaacagcccctccagcgtgaagtcaacgccggtaccccgtgtctgcgtcgaggagcccgacgactgcaacctgaacctccgggggcagggggacagcatcaagctggccaaggagcggctgaagacctaccgacgatccaaggtgatcatcggcggcacgccgacgctcaaggggctgtcggccatcgatgccgagtacgagctgtcggataagcgcattgccatggttccttgccacgactgcggccaggaacacgaactgagcttcgatcacctgcactgcccggaagatccgacgcagtatcacgaagtgtacgggcacaagcgccccgagctggcctactacgcctgtccgcactgcgggtcggtgtgggacgacgcgcagaagaacgcgaacctacagcatggccgctgggtggcgacggctgagttccgcggtatagccggctacgacatgaacgagctgatcgcgacgttctacggttcacgcttcgcggtgctgatggagaagtggctacaggccgagcatgccgccgcccagggcaacatcggccccatgatcgcgttcgtgaacagctcgaagggtgaaagctacgagttcaagagcaatgcgcctgggatcgaggagctggtgaagcgcgccgaggcttacggcgaatggacggcaccggctggcgtgctgctggctaccgcaggggtggacgtacaaggcgaccgcctggcggtgattgtcgtcggttgggggcgtggggaggagtcctggcgcctgttctggaacgagctgcgcggcaatccggccgaccccagcgatggggtctggtctgaactggatgcgctgctggcaaagccgatgccgatggagggcggcggcgagctggctatatcggcggtgagcatcgacagctctgacgggaacaccaaccacgccgtctacgcatacgtccgggaccgccagcgcttcaacatcatggcgatcaagggggcctcccgcgatagcctggagaaagagattttctcccggccgtctgcctcagtggataccgcccgcgacaacaccaaggccgcgaagtacggcctgcgggtgtacatcgtcggcacgcacaaggccaagaccctgctcgactcccgtgtgcgcctggtgggtgctggggcggggcggatgcactggtacagcgatatccgccaggactacttcgagcagttcacaaacgaggtgttggcgccgcacccgcggattcccacaaagatgatttggcagaagaaagccggtcggcgtaacgaggcgctggattgcgaggtgtatgccctgcatgccgcgcgcagcctgaaaacccaccttctgcgggatgacgaatgggatgccctggagcgccaggtgcggcaacccacattgttcagtggcgaccagcccgtggcaccaatgcccaagcgggcggtgccgcgcggtcgcggtacacgcagccgggtcggctga

SEQ ID NO: 328105 - DNA, 525 bp, Pseudomonas aeruginosa
atgggtcgcagagtgacgaaagccgacctggccgagatcgtcgggcgcgacgaacgcaccttgagccggtggcagcgtgagggaatgccggtggtgtcggtcgggctcggtcgcgggaacgagaacgagtacgacaccgaagacgtgatcggctggctggtgcaggtcgcctccctcaacggcaagaaagaatcggtacgagaccgcctggacaggctgcgcgccgaccgcgaggagattgccctggcccgcgatgtgggcgaggtggcgttggtggccgatatggcgaccgcatacgaagcgatgatcactgcggccaaggtcgagttgctgaacacctaccccgacgcgctggcagcgtcgctatcggcccgctatggcattgagatcgacgaaagcctgattcgcgaaccgatggaagagaccctaaggaaactggccgagtatgaaccggatgacgccccgtcagacggggatactgactacgcgctccctgaagagggctttgaagaagacggcgattaa

SEQ ID NO: 328106 - DNA, 309 bp, Pseudomonas aeruginosa
atgaaccaatcaactatcaccgacacccaggcaacgcggctggcagcaatggtgcttaagctggcaacaaccgcccggacgtccgaccggcccagcgatattgaagccgcagatcatcaggcacacggcgcaacactattcgcgatgacggccggaatcatcgacagcgacgcataccttgcactctgcaatctctcgacggatgcgcgctatcagcgatccaccgaactcatcttcgaccagccgctgtacaccggcgcggcccgcgccagggctcgccactccgctgctctacgggctgccgcatga

SEQ ID NO: 328107 - DNA, 318 bp, Pseudomonas aeruginosa
atgagcactcctcacgacaatcaacccgagcttcgcctgactccggccccgcgcgcggagacggtggaactcctctaccgcacgttcggcgacgtactgatcccgctggagcaactgcgcaccaggtacttcaggaacctcaacgaagacagcttcagcctggccatcaaagccaagcggatagccctcccgctgaccaccctggaccccagccgcaaagcgcctttgttcgttgacgtgcgccaccttgcggccctgatcgactcccgagcttggcaggccgacgaggcatatgcccgacccggcagtaacgagtaa

SEQ ID NO: 328108 - DNA, 312 bp, Pseudomonas aeruginosa
atggccgaccaacgtacgatcactatcccagcatgcgagcaacacggcagccagctctccatgaccgttaccgttccgtggcactgcagagaatgcggcctaccgcgcggcgaaccattcccgagccgcagcttcgacggcggccgtcaactcgacgtcgattcatggaacaactcctgcgggcacatcgagaaatacgccgacattcgccaggttctcgtccagcaggcagaggcggacatgccgcaaaccgtcatcgaatcgctcaaggaccaggcagcggcgagtcagggagggctaagcgatgcgtag

SEQ ID NO: 328109 - DNA, 195 bp, Pseudomonas aeruginosa
atgagcgcctacgcacgctacatcagacgccgcgcgctcgccgccgcggaccgcccggcgcagcgttcgccggacgccagcgaggaggcacgggaccaaccgccccccagcaggccggcgagcggaaagcgcctgctggaaatatcggacagcgatgcggccaagctcttggccgtgctgaaactgctcggatga

SEQ ID NO: 328110 - DNA, 876 bp, Pseudomonas aeruginosa; identical to SEQ ID NO: 323902

SEQ ID NO: 328111 - DNA, 312 bp, Pseudomonas aeruginosa
atgctgatgtcacccgttcgcctcgcctggcaagtacaagtagttcgtcgcggttttctggccgtgtccgcccgcttcgctggcccttttgccccaaacaagcgcaatcatgcctgcgttaccaccaaagttcgcccccgccagttgctgttcctaaagggcatcaagctcaacgccatcgccgaccggccagcgtatttcgcatcgctgcgtgcccgtcggggccagcccatcgtcatcctcgcagagctgggaccggacgaggcattcgccctgtggaagcagcatgtactgggcgacaggcctcgctga

SEQ ID NO: 328112 - DNA, 618 bp, Pseudomonas aeruginosa
atggctgagctgggcgatgtgctcgatcaggcgttgcaccggacggaccaggttgcgattgaccagccacaggctgagcagggcgacggccaggctggcgccgatcagcaccaggctgccgagcagcatggtgcgccgggcctccgcgctgatggcggcggaacggagatcactggcctggtgcagttcgtcacgcaaggcctgcatctgcgcggtggtggcgcggtcgatgccggtcaccgcctggtcgccggcgatggggtcggcgcccgcctcgaggaaccgttgcctgccttgtcggtaagccgtaccgagtcgccggtgctcttcgcgcaggcgctcgacacgatccttcaactcgccttcggccacgctgcccaggcgcccgaggatgtcctgcaccgctcgttcctgggcttcgaactggctccagtatttcgtctgggcctctgcctggcgtccgcgcagcaggacgttcttccattcctggacctggccgcggaattgcaggttggcctcgtcgatcagttgcgccgcccgcacggggccgccgagcagctcgcggtaggcgcgtacgtcgccggtcagcgagccgaagcaggccagggctatgagtag

SEQ ID NO: 328113 - DNA, 243 bp, Pseudomonas aeruginosa
atgacagagagggaagcagctttggagcaagctttaggtgccgtagtggcagtggcccgtcagctggggatcagcatgacgctactggctaaagctaaaactgaaatccttttccaagcacctgagtcagaggctgcaaagcaacaggccctagaggctatccgcgagatagaactttcggcccagggctcaggcaacgatctcccaattgtgccgaccatcgatgtaaagaggcaggcatag

SEQ ID NO: 328114 - DNA, 1224 bp, Pseudomonas aeruginosa
atgagcggctacgtagcaaacaaccgggatgtgcggtctgcccccgagatccccgtttacaacggcgccttcgatcagcagccgcgccggcaaacggttagacctagtccgcttatgccggaaccgcttcccgtaccaccgacacaatgtgtcttcgccaagcccaattcattacccctcggctccctggactatccatcagtggtgcctgctgaattggcgagtgcctatggtcagacagccatcctagctacaaccgatgttccagctgctggcggcgggctgctgctcgcgcgagcatatggccaactggtaggaggcggcacatgggccattcagagcgcagcaggtgcaggtgggaccgccgcaggtagcggtgcaacaggagcagcagggagcggtattctcgcaactgctgctaccactgctatcggcttcgttgctctcctttggccctcgcccatgggcagtagcgatttgtacccaaagtcggagctcgaagttctcagcacagccaagactaggttgcgcttccacgtcgagcatgactgggtcaatggctccatacgcacctatggcttccacaccagttctcgtagcggttttgattccgttccggttgttgcagctcgcgctcagggcgaacaagccgttgttgatctaggtgatggggtcactatcctgtggacgccacaggtagatccagctgtaggagctccaccgccacctgaggatattcaggggctaacggagactgtttggatctatccggtcagccagaatgcagctcaggcgctggaaaatccgatctacccttcggactacaaagacttcatcatcacgttcccggatcaccccggagtgcagccagtttatgtggtgctgagcacccagctggagaagaataaggtccgggggcgtgagtttgaggacgaggtgtatggcgattacagctcgactcgctccgagacgggacgagaggtgaccgtgaagacaaagagcggtacccgcactcgtatcgatatggttggccgagagcctgacggcacaatctcgtgtgtcgaatgtaagtcttctgacaccgcaccattaacgcctaatcagaaggtagcgttcccggagattgaggagagcggcgcggtcgtggttggcaaaggaaagcctggttttcccgggggaactgagatacctccaacaaaagttgacgttgtacgaccgaactaa

SEQ ID NO: 328115 - DNA, 336 bp, Pseudomonas aeruginosa
atgtctgtagcagaggccggcgtaatcgacatgtggggtatccctgattgggataggagcaagattgagctagtcatcagcgatcacctcggctgggagccagaggaggagatggagcacctcctaatgcttcaggaaaagatcaacgcctacatctccttcattgagagcggagaaatcaatacggcaatcccctcagcggcaggcaagacccccattatcagggtggttggaaagtacgcgctttccaagcaggccgaggccttcatcgatcgcgtcaccgaggttctgagcgatgccgatattgagttcgaatttgtactcaggcagggctag

SEQ ID NO: 328116 - DNA, 879 bp, Pseudomonas aeruginosa
atgcacatccgaggtgcacgcaatccaaggcagcgagcaggctattcgcttcagttctgccggcggtgcttggccgaggacgttgaaccacatttccgttgcatctggcgcctagctctaagcgctatctgcccttcacatggcatatacctggccgatgagtgtcctcgatgccacagccctgtggttccaacggtgtgtgatcgtggccagcgcctgctacccctcgaaacgccattggcgaggtgctaccggtgcggctgggatttgcgagagccaatagctgacgatctggttgcggcagacgagaacctggtttttcagcaatgtctccttgatgcattgacccaggggcactccggtcatctaccgggaggagcctgcttctctttactactctttcgagggctcaagcacttgttgcagctgctaggaggagagggccggttcaagcgagtccgagagctgatgtttctcgagagcggtcatctagatttgccactgcaggacggcccgtatttctgcttggaaacgctccgggtaggagatcgggcgctgatgctgtcactgcttcgacgggtgctagagggctggccagacagcttcatggatacgtgtcgtatcgcgcgtgtctcgagctcctatcttgtgaactacagggacggcctgccctattggatctatcagcctatccgtgatcagttgttcgacaagccttattcaccttcgccgctggaacggcaggaggcaaggcaatacctgattcgtaatggtgttcctgcgagcgcgagtgcaataaggcgattgcttggcatgtggacggcgagcgattcctggaagcttgagcatcctccgtggaaccgccggcgcccgttataa

SEQ ID NO: 328117 - DNA, 906 bp, Pseudomonas aeruginosa
atgactaagctcgatgtcagttgcctggcggtgcgcccgactccagagatgaaggtccgcctggctgcctttcgggaggaacgctggattggctatgacagtgcggttcggatccgggagcaaattgaaagcctgctcgatcacccgaagacgcaccggatgccgaatctcgtgctgattggcgagagcaacaatggcaagtcgatgatcctgaatagtgttcgggatcgtgccaatcctgcttacgatatcaatgtcaccaaagtgcagctgccagtgatcatggtgcaggcgcctccatctcctgatgaggggcgcttatacactaggatcctggaaagcttggggctgcacgttgcgtcaagggaacctgaggattcgaagctcaggcggatcaaggtcatgtttcagcatttgaacgtgcagatgctgatattggatgactttttcaacattgccgcaggctcgattgctcgccggcgcaaattcctcaacgccttgaggaacttgagcatggatttgagcattccaatcgttatctcgggcacgcctgagacccagaacatcctgactgccgactcatccatcgcaaaccgttttaagccggtattcgttcgtaggtggaacgaggaacgcattgaggagtacgcgacatttatcgtgagtattcggcctcgcctagagctagctgagggcatggatatcatgcagcgagctacgctcatgcggctgctccagttcagtggcggactgctgggggagaccgttgagatactgcggctgtttgccagttgggctgtgcgtagtggtaccgagcgcatcactggcgacatggtgacttgggaaaacttgcatgccctgggttatgtcctgccaagtgatcgcacacgccacctggagctttga

SEQ ID NO: 328118 - DNA, 1935 bp, Pseudomonas aeruginosa
atgacatctgcaaccgtcactattcatgctggagcggttatctcctacttcggacgaaccttttgcgtcaggaaattgatttctccggaagaggttttggctacagatgtggctgccggcgaagaccaattgctgaagctcagcgatatcaccaggagctttggggaggtcgctgaccaagaagctgagcgcttagacctggtctccattcctgaagacgattggcaggatgccatggagcgttacagggcccttgcaccgttgttgggcctgccatcgcgaactgccgctcatgtcaaagttgtagctgatgagctgctggtctctgtggcgacagtctataggtggttggatcgtgttgaacgagccggctcggttagctgtttgctccgtaagcgtcgatctgatgctggagtgaggcgtctggatgcgagggttgagcaggtcatcaaggaggtaattctctcggactacctcacggagctgaaaaagagcccgactgctgtaacgcgcgtcataggcactcgctgccggagcgaggggcttcctgtcccaagtaaagttgccgtcttagcgcggattgacgccatccttcccgaagagcgcgcgcggaagcgtgaagggcgcaatgcagccctcgttcatagagccataaaaggctcaatgccaggcgtcgataccctctactcggtgtggcagattgatcatacacctgcagacgtaatgctcgttgacgagatagaccgaatcgctattggtaagccatggataactatggcgattgatgttttctcaaggatggtcgttggttggtacatctctttcgatccaccaggggcgctagcaacagggctatgtatctcgaatgccattcttcctaaggacgagatccttggacggctaggcgttaattttccttgggtctgtcagggcaagcccgcgattatccaggctgataacgccagagagtttcatggcgagatgcttcaggaagccagccaagagcacggtttcgacatgaagtttcgcaagcttaagaaaccgaattacggcgcgcatatcgagagattgttcggcacctttgccgagcgcatccatgagctggatggcaccaccttctcgaacactgtagagaagggtgactataagtctgagaagaacgcgaccatgactcttgtcgagttcgagcggtggtttgcgaacttgattctgggggagtaccaccacgacgtgcactcgacgctcggcgttccgcccattgagcggtaccgagaaggtctgttcggtagcgacaaattcccagggctggggatgatgcgtatggcatcagacccctacaagctcaggatcgacttcatgccggtcctgcgccgtactattcagacctatggggtggtttcggactttatctactaccacgacccggttctcgataaatggattggcgcacctgagccgggaaataagcgtaaggctagggagttcatcttcaggtatgaccccagggacattagtcatctgattttctgggacccccagcttcggcagtactttaggattccttatcgcaataccgcttacccgcggatcagcttgtgggagctgaaggcgatcaaggccttcatgaaggatcgtggcctcaagcttgagaacgaggagcagatattcctagctcgcaaggaaatgcagcgcatcgaggagcaagccagatcggatacccgtagtagacgtgccggcaagcaacccgtagaaactcgaaagaagcgaatgaccactgagcgcaatcgcatgcataaggtcttgcctccagttcctcttccgtctgaccgagttgctcctttgcctgtggatccttctggtttgtcatcggtaccaagcacggcaaaagatatgatcgacgacttctctcatctgactccctttgaagagcggtag

SEQ ID NO: 328119 - DNA, 705 bp, Pseudomonas aeruginosa
atggctgctcgcaaaatcggcaagagtgcatacagcgtcactggctacgtctccaccgagaaagcggccaagatccagcgcgccgagtcctctctggagcaggatttcctaacattgctggagtacgactggcgcgtcctccgctacgcgactcagccattcaagattcattggaaagatgggaatggcaggccccggcgcttcacgccagacatagccgtggcctaccactcgctggctactgagcaagacccttcactgcgaacaaccatttttgaggtgaagcaccgtgcacacttgaaggctcggtgggctgaggagaaacctcggctgaaggcggctttcgcgtgggccaaagattacggctgcagattcaaggtgataacggagcaagagatccgtacgccctatctagccaacgctcggttcttgctgggctttaaaaaactgtatggggatcaagacctttaccaggcgcgcctcccccatatctgcgagctacttgttcggcttggcccgaccacaccgcaggctctcttggacgaggtccgcggtgatgaagtccgccgtgcagaatacatcccatacctgtggcatctgataaccattcgagtgattggtatcgacttgagtcagcctctcaacatggcctccccaatctggcctaccggtcatacgaaatggttttcggagaactggggatga

SEQ ID NO: 328120 - DNA, 1323 bp, Pseudomonas aeruginosa
ttgtcattcgcaaataccatacttgtctttctcatatatcataatatctcagacaaggacggcggtcgcttcgacctggccatcgcactcggcatcctcgccgccagcggccagttgcccggcaccaccctcgacggcctggagtgccttggcgaactggccctgtccggggcgatccggccagtgcgaggcgtattgccggccgcgctggcggcgcgcgacgcaaggcgcgttctggtggtaccgaaggaaaatgccgaagaggccagcctggccagcgggctgacggtgttcgccgtggaccacctgctggagatcgccggacacctctccggccaggccccgctgctgccctaccaggcccgcggcctgctccgcgcgcccttcccttatccagacctggccgaggtccagggccaggccgccgccaagcgcgccctgctggtggccgccgccggcgcgcacaacctgttgctcagcggcccgccgggcaccggcaagaccctcctggccagccgcctgcccggcctgctgccggcgctcgacgaggacgaggccctggaggtcgcagcgatccattcggtggccagccacgtccccctcaggcactggccgcagcgaccgttccgccagccgcaccactccgcctccgcgccggccctggtcggcggcggcagccgcccgcagccgggcgagatcaccctggcgcaccagggcgtgctgttcctcgacgaactgccggagttcgagcgcaaggtcctggaggtcctgcgcgagccgctggaaagcggcgagatcgtcattgcccgggccaacggccgggtacgtttcccggcgcgcttccaactggtggcggcgatgaatccctgtccctgtggctacctcggcgatcccagcggccgctgccgctgcaccccggaacaggtccagcgctaccggggcaagctgtccggaccgctgctcgatcgcatcgacctgcacgtcagcgtgctccgcgaaagcaccagcctgcagccaggacacggcgaaaccgctaccgccgagatcagcgaacgggttggcgccgcacggcaacggcaactggcccgccagggctgcgccaatgcccatctcgacctccaggcgatgcaccgcaattgtgcactcgccgaagcggaccgccgctggctggaggctgccggagagcgcctggaactttccttgcgcgccttgcatcgcatactcaaggtggcccggacgctggccgacctggagcgcatcgatgccatcgaacgccggcacctggcggaagccctgcagtatcgggcaacgacctccacgtga

SEQ ID NO: 328121 - DNA, 303 bp, Pseudomonas aeruginosa
atggagggcaaacctccagcggaggacggacaccttcgccactggctgaagcgtcgaaccggcggaacgcccgcctgcatcctgcccaagggcctgcgcaatccgcagccccttttggacacactgcccgatttgtgtagtgcttggccgctgccccaccaatggtggatgagtatgctcaaaactgagcacacccggttgctggcaccggggattgataccggatcatccggcaacagattgaggtccgataatcggactccccgggataccctgaaagctttgggcgtctgcccccagtga

SEQ ID NO: 328122 - DNA, 1209 bp, Pseudomonas aeruginosa
atgccgctgactgacagcgccatcaaaaccgccaagccaaaggaaaagccctacaagctaagcgatgctcagggcctgtatctgctggtcaaccccaatggttcgaagctctggcgccttaagtaccgagtgggcgggaaagagaaagggctcgcgttcggcgcctacccgaccgtcaccctccagcaggcccgccagcgccgcgatgaggcgcgccagcaactggcccagggcgaagaccccggcgagcagaagaaggcttccaagcaagcgaagaaggtcagcgagctgactttcgagacgctggcgcgggagtggtacgcatacaatgccccacgctgggcggagagtacggcctacaaggccaagctgtacttagagaacgaccttattcccggcatcggctcgcgccccattgccgccatcacacgtcccgacctagtggacctggtgcgcaaggtcgaggcgcgcggtaccttgaacgcggccggcaagatcaggcagtggctccatcagatttaccgatacgcactggccaagggcgtggtagagagcaacccggccactgacctagacgtggtggcagcgccagctaaggcagcccgccaccatccgcacctcccgttcgccgaactgccagagctgctggagaagctggcaaccgccaagctgcacaccctcacccgctcggccattcgcctgctgatgctcaccgctgtgcgccctggagaactgcgcgccgcgccctggtgcgagttcgacctcgatacagccacctggaccatcccagccgccaggatgaaagcccgccgctcgcatgtcgtccccctgcctcgccaggccgtgaccatcctgcgccagctccatgaactcaccggcagctattccttgctattccccggccagcagaacgcggagcgccccatgagcgagaacaccatcaacaaggcactgcgtctggtgggttacgggggccgacagaccggccacggcttccgccatctactcagcaccgagctgaacagccgaggctataaccgggactggatcgagcgtcagcttgcacacggcgacaaggacgagatacggggcacatacaaccacgccacctacctcgaacagcgccggggcatgatgcaggcttgggccgactctatcgacgcgctgtgctcgggcgccaacgtgctgagtctcaagcgccaggcgtaa

SEQ ID NO: 328123 - DNA, 450 bp, Pseudomonas aeruginosa
atgagcacaatcccagacgctgcggcgctttcagcgctacccccacaatcaaagccctacaggatcaccatcgggcatgggctctacctagaggtcacgccccagggctccaagctctggcgcatcaagtaccgattcgccggcaaggaaaacaagctctctctcggcgcattcccctccgtcaccctggagcaggcgtgtcgcgctcgtgacgatgcacgcgcactgatcaaggccggcgtcgaccccagcgccaaacgcaaggcggagcgcgccgagcgcatcacccagcgcgcacgtgccaatgccttccgcctggtaatggcccttgatggcgccctgaccatcgaaacaccccgccagatgctgcgcctcactcctgagcaaaccgcagccgtacgcgccttcctggcggtcaccccggagggcagcaaccatgccgctgactga

SEQ ID NO: 328124 - DNA, 1542 bp, Pseudomonas aeruginosa
atgacgcaagccaacaacgccgtgtacaccgatatcagcgccgcccaactggtagaagaagccattcgccgcggtgagggcgaactggccgccaacggctcgctggtcgtacgcaccggccatcgtaccggccgttcgccggtcgaccgtttcatcgtcgaagagccgagcaccaaggacgcgatcgcctggggcaacatcaaccgtccgttcccggccgacaagttcgatgcgctgtgggcccgcgtggaagcgttcaacaacgcccaggaccatttcgtttcccatgttcatgtaggttccgccgaggcttactacctgccggtgaagatgaccaccgctaccgcctggcagaatctgttcggccgttgcctgttcatcgagccggagcagtacaacccggccggcaaggacgagtggcaggtcctcaatgtcgccaacttcgaatgcgtgcccgagcgcgacggcaccaactccgacggttgcgtgatcctcaatttcgcccagaagaaagtgctgatcgcaggcatgcgctatgccggcgagatgaagaaagccatgttctccgtgcagaacttcctgctgcccgagcgcgacgtgctgccgatgcactgcgctgccaacatcggcgaagcgggcgatgtgaccctgttcttcggcctgtccggcaccggcaagaccaccctgtccgccgatgaaagccgttacctgatcggtgacgacgagcacggctggggcgagggcgtggtgttcaacgtcgaaggcggttgctatgccaagtgcatcgacctgtccgagaagaacgagccggtcatctggaaagccatcaagttcggcgccgtgctggagaacgtggttctcgacgaagagcgtgtgcccgactacgccgacgacagcctgacccagaacagccgcgccgcctacccgctggagcacgtcgagaagcgttcggagaagaacctcggcggcgagcccaacgcggtgatcttcctgacctgcgacctgaccggcgtactgccgccggtatcgatcctgaacaacgagcaggcagcctaccacttcctgtccggctacaccgcgctggtcggctccaccgagatgggttccggcggcggcatcaagtcgaccttctccacctgcttcggcgctcccttcttcccgcgtccggccggtgtctacgccgagctgctgatcaagcgtatcaaggccttcggctccaaggtctacctggtcaacaccggctggaccggcggtggctacggcgtcggcaagcgcttcaacatcccgaccacccgtggcgtgatcgcggcgatccagagcggcgcgctgatcggcgcggaaaccgagcacctggacatcatcaacctggacgtgccgaaggccgttccgggcgtcgagaccaatctgctcaacccgcgcaacacctgggctgacaaggctgcctacgacgaggcggcgaagggcctggccaagcagttcatcgaaaacttcaagaaattcgaggtttccgatgcgatcaaggccgccggcccgcagctgtaa

SEQ ID NO: 328125 - DNA, 894 bp, Pseudomonas aeruginosa
atgtcccattcagatcagagccagcgtttccttttcgacgataccgacgtgcgcggcgagatggtcgatctcgagcgcagctacagcgaagtgctggccaaacatccctatccggaaccggtcgcgcagctgctcggggagatgctcgcggcggcctcgctgctctgcggcacgctcaagttcgacggcctgctggtattgcaggcgcgctccagcggcgcggttccgctgttgatggtggagtgttccagcgaccgccaggtgcgtggcctggcccgctattcggcggagtccatcggcgccgacgccggcatgcaggaactgatgcccgaaggcgtgctgaccctcaccgtggacccggtcaagggccagcgctaccaggggatcgtcgccctggagggggtgaacctggcggaatgcctgtccaactacttcgccagctcggaacagctgccgacccgtttctggctcaacgccaacggccgccgcgcccgcggcctgctgctgcagcagcttcccgccgaccgcctgaaggaccccgaggcccgcgaggccagttggcagcacctgaccaccctggccgacacgctgaccgccgaagagctgctggcgctggacaacgagaccgtcctgcaccgcctctaccacgaggaaaccgtgcgcctgttcgagccgcaaccgctggtcttccattgcagttgctcgcgggaacgttcggccaacgccctggtcagtctcgggcaggccgactgcgagcggctgctcgaggaggaagaaggctcgatcagcatcgactgccagttctgcaaccagcgctacctgttcgacgcctccgacgtcgcccagttgttcgctggcgctggcagccaggggccttccgagacccgccactga

SEQ ID NO: 328126 - DNA, 804 bp, Pseudomonas aeruginosa
atggataatgcctctccgttccaagcggcctggcaatggcgcaagttcgccacctgtcatcttctggcgctcctgctgctgatcctgtggctctggggccccacccgcgagctgatgaacggcttcgacttctggctcttcgacaagctcaacggctccctcgccctcaacgaaacctggctgaaactctggggcctgctcagtacccgaccgttcgacgcggtggtcggagtgatcctgctctgcctgctgattcgcggcgactggctgctgccggcgaaccaggtacggcggctgaccttcggcttcatcgtgaccctgctgatcctggtggtgatccgcgtgctctacgcgaagatcgcccaccatctgcactggcagcacgccagcctgtcgatgctgatggacaaggccatccacctcagcgaccacttcccggactgggaacgcgtgtgggaaatcaaggaccgctccaagcgcagcttccccggcgaccacgcctcggtgctgctggtctgggcgctgttcatgtcgctgttcgctcgccgcgccgggcagttcctgctgatctggaccctggccgtgctgttcatgatgccgcgcctggtagccggcgcgcactggggccaggacgactacatcggcggcctgcagatggccctgctggccctcgcctggggctgctacacaccgctggcggcgaaggccagcggctggctggtgcaggtgaccgaaccgctgttccgcctgctggcgaaattgccgctgatcggccgcctcggcgtggtccgcgactcggcctga

SEQ ID NO: 328127 - DNA, 498 bp, Pseudomonas aeruginosa
atggacttcaaagtactgcttggggcagtgatgctggtcagcctatcggtggccggatgctccacgaaaaactatggccgacagccggaactgaccgacttcgaacggcagaccatgagctgccgcgagattgacctggaacaggccaaggttcagggattcctgagccatgtacgcgaagagagcgagttcgacggacgctcggtgctgtctttcctgggcgacttcgggatcggcaacctgatggagaaggacgcagcggtcgacagtgccaatcaacgcctgacccagttggcaggtgccaagatgcagcgtggctgcacctatgcctatgaggagccggctcaacagccgtacgcagcgcctcgggcttatgccccaactgcacccgcgtcagtttcggctcgatctgtcgacacccaactcgacgagctgaaccagatgcaactcccttacgaggagtaccaacggcggtatcgggaaatcacggggcaatga

SEQ ID NO: 328128 - DNA, 1782 bp, Pseudomonas aeruginosa
atggccgtgtctgccgtcatcacccagcgcttggttgacctcgaccggcagctacagagcgccggtcaggggcagcgcacggcgctatgcaaagcagccgcggcagagctgggtctgtcgctggcatcgctgtaccgcaagctgaaggatgtacaggtgcgtgagcgcgcaccgcgtaagcggcgcaaggactcggggcagagccgcctggggcgtgacgaggccctggtgatcagcacggcgctgatccactcggcccgacataacgcgaagcgcctgtattccgttgctgatgcggtcgaggatcttcgcgccagcggcttgatccgtgcggagtctgtcgaccgacgcaccggagagatccgcccgatgtcgatcagcgcgatcagccgcgcgctgcacagctaccgcctgcatccatcccagctattggcgccggagccggtcaccgaactgcgcagcctgcatccgaaccacgtctggcagatcgatgcgtccctctgcgtcctctactacctgaagcctggggcgaacaagaaggctagcggcctacaggtgatggatcgcaaggagttctacaagaacaagccagcgaacctggatcgcgtggccgctgaccgtgtgtggtcctacgagatcaccgatcactacaccggctggatctacgttcgctatgtgatgggcgccgagagtggcgagaacttctgcacggtgctgatcgaggccatgcaagagcgtggtggagccgacatgctccacggcgtgccacgcatcctgatgatggaccctggttcagccaacatctcggcgatgtcgaagaacctctgctgctccctgggcatcgaggtcatcgtgcacgcgccaggcgcggcgcgggttacgggctcggtcgagaacgcccggaacatcatcgagcgcaagttcgagtcgaagctgaagttcgaaccggtcaacgacctggacgaactcaacgcccaagcgaagaagtggcgcgcccacttcaatgcgacggccgtacacagccggcataggcgcaccaggtcagaactctggatgaccatccgggctgaccaactgatcaaggcgcccacggtcgagctgtgccgggagcttgcagtgagggcaccagagtctcggaaggtcacggccaaacttcgcgtctcgttcggagggtacgagtacgacatttcggttgtcccggacgtgaacgtcaacgaccgcgtgctgatcactcgcaatccctggcgcgaagatgcagtgcaactggtcacggtcaacgagcagggccgtcaggtcttctatgtccttcccaaggtcgagaaggatgagggcggctacgcgaccacttcaccggtgatcgggcagacgttcagccgtcaggctgagactccagcgcagaaggcccgcaaagctgttgaccaactggcctatggcgtcgaaagcgaaacggaagtgcaggctgcgcgcaaggccaaggctgttcctttcggcggtgccttgaagcccttccaacatatcgacgacacccaactgcccaccttcatgccgcgacgcggcacggaacacagcttggtagcccccatcgtagaggttccgctccttccgcatgtcgaggcggccaaacgtctacgcgcgcagttgggtgaagcctggaccacggactcgatggcctggctcaagaggacccaccccgaaggcgtgccggaagaccagctcgacgccatcgccaaccagttgcgcaagcctgcccggcctggcctgcgcgtcgtaggaggcaactga

SEQ ID NO: 328129 - DNA, 342 bp, Pseudomonas aeruginosa
atgaacgtcgtaccgattactggccgcctccctgaagagcatccgaaagctacccatctgccgctctgcaccgtgctgacgccggagctggcccgttgtctggaagccgtcaacagcgccacccgtgccttgcgccaggccggcattccgattgagcagacgtcggtgctcgatcgccggctgttcatccgcgaagaggattcgctgcggctgcaccgccgcttccgcaacgccatccgcggcattcgccagaccactcacgggctggtcaccgtccatgtcgtcagcctgctcggtgttgacgtggcctggacgaccccggtgaaggagcaggaccaatga

SEQ ID NO: 328130 - DNA, 624 bp, Pseudomonas aeruginosa
atggctgaacaaacagtgcatgttcccgccgggtaccgcatggacgccaaggggcgcctggtacctgaagaaatgatcaagcccattgacctggagcgcgaccgccttgtgcaggagatcgttgccaaggggaaggctctgaacaaggcgttgctggatttcaaactggcgacattcggcgatatcgaagccttcatcacactgtcggccgagcagtaccaggcgaaggtaggtggcaagaagggcaacgcctccctggtcagcttcgacggtcgctacaaggtcattcgggccatggctgacaacatcgccttcgacgagcgcctgcaggcggccaaggcgttgatcgacgagtgcctccacgaatggacagaaggcgctcgcgcagaggtcatcacgctgatcaacgatgcgttccgcgtggaccaagcagggaacatccgtaccggcagcgtgcttgccctgcgccgcctgcagatcgatgacgaacgttggcagcgtgcaatgcaggccatcggcgaggctgtccaggtcgtgagcaccaaggcgtacgtgcgtatccaggagcgggtcggggacaccgaccagtaccgctccattcctcttgatatcgcgggggtgtga

SEQ ID NO: 328131 - DNA, 690 bp, Pseudomonas aeruginosa
atggaccaggaccgtatcctcgacaagatcaagaagtgcctggaaatggccaaggggcggggttccaacccgaacgaggccgagatcgcgctgcgtcatgcccacaaactgatggaagcctacaacctggagatgggcgacgtgctagccagcatggctggcgaagccagggttcccgccggctcggatggaaaaccgccggcctggcgggtgcgcctcgctcaagtgtgctgccatgccttcggcacgcacctgatcatctgcacctcctatttcgaaagcgcttcgttcctgttcgtcggctgcgcggcggcgccggagctgaccggctacgcctaccaggtgctggagcgacagctgcagaaggcgcgcaaggacttcctgagcacgcagaaacgctgcaagcgatccaccaaggtagcccgtggagatgccttcgcgcatggatggatcgaggccgtgtacgccaaggtcgaccagttcgcgggcgtcgacgacaacatcgccgacgcgatccaggcgtacatggcgaagcaccacgctgacgtcggcaagttcgagatgaagcgccgcaagctcaaggcacgtgacgaagtggccagtgaggcggggtacgccgcgggcaagcgcgcgcggctgcaccaggggatcgggcaccaggccgtagctcggcttactcagggggtgtga

SEQ ID NO: 328132 - DNA, 219 bp, Pseudomonas aeruginosa
atggctagcaatctcgaagtagtcacccaactgatggagtactcgcgctcaggtccattgatgcaggtgatgattctccaagccctggaccagttcagcagcggcgttctggccagcccgaagggttccttgcgcaatgccattgtctcggaagaggcttggagagcttgcgcgaaggaaatccagcagacactttccaagcacttgctggagcaatga

SEQ ID NO: 328133 - DNA, 468 bp, Pseudomonas aeruginosa
atggagcgctatcactcaacggccggcgatccgccgcggcgcgatgctgacgtaaagcggcaggaggcccaggaactggacgaactggttcagcagttcctggccggcggcgggcagatcgagaaagtcgggtacaagatgcgcgagctgccggacactttcgtcatcaaccccatgaagacgccggtatacaacggagccctggccgagaattcgacgctcaaagccaagcctgccgcaccgcgcgcgcaagcaaagaccgagtctcaacgcttaccagcgcccgtaccggctttgcagccggctcctggcgtgaacccgaaggtctggttgagccggatgatcgccgcccaggcgttgctggccgcgcagacggccaggctcgctcgcgaattgggcgtcagcgatgctgagctgcgccggctgggtcgtcgacatggcatggaggtgttccatggcactcgctag

SEQ ID NO: 328134 - DNA, 369 bp, Pseudomonas aeruginosa
atgaagcagagttcgattctggcggaaactcgccatgagctgctggacgacattgcggcacatacagcaacagtactgtctgaacatggtattgacgctggcctggctgaacaggccggccatgcggtagctgaccatctggcgaaccagtggcgtggcgccacgctgtacatcccctccgactatcgccaccaggttaccaagcgtgatctccagattctctccgagttcaacggacgaaaccatcacgccctggcccggaagtacggactgacgcccagttctatatataagctgttaaagcgtattcaggatcgtaagttcgaacgtgaccagggcaaactggacctcggcgacggcctggcctga

SEQ ID NO: 328135 - DNA, 1404 bp, Pseudomonas aeruginosa
atgctgaaaaagctgatccagaccattcgttcccccctgcgccgtccgcgcgccgtccgtacaaccccggaagtcatcggtaacaaccagcattccctgcgccgggaccagttcagccggaacgccgtcaaggtcgtcgagatcctccagcgggccggctaccaggcctacgtggtcgggggctgcgtacgcgaccagatgctcggcatcgctcccaaggacttcgatgtcgccaccagcgccacgccggagcaggtccgcgccgaattccgcaacgcgcggatcatcggccgccgcttcaaactggtacacgtgcacttcggccgcgagatcatcgaggtcgccaccttccgcgcccatcatccggaaggccaggacgatggcgatagccgcgcgtccagcaacgaaagcggccgcatcctgcgcgacaacgtctatggcagcctggaagacgacgcccagcgccgcgacttcaccatcaatgccctgtacttcgacgtcaccagcgagcggctgctggactacgccaatggcgttcacgacatccgcaatcgcctgatccgcctgatcggcgatccggagcagcgttatctggaagacccggtgcggatgctgcgggcggtacgtttcgccgccaagctcgacttcgagatcgaaaagcacagcgccgcgccgattcgccggctggccccgctgctgcgggaaatcccttcggcgcgcctgttcgacgaggtgctcaagctgttcctcgccggccgggccgagcgcactttcgagctgctggtcgagtacgaactgttcgcgccgctgttcccggccagcgccaaggcactgcaggccaaccccgactacaccggcaagctgatccgccaggccctggccaataccgatgcgcgcattcgccagggcaagccggtaaccccggccttcctcttcgccgcactgctctggccggccctgccggcgcgcgtcgcgcagttgcaggagaaaggcatgccggccatcccagcgatgcaggaagccgcccacgaactgatcagcgaacagtgccagcggatcgccattcccaagcgtttcaccctgccgatccgcgagatctgggatatgcaggaacgtctgccgcgacgccagggcaagcgcgccgacctgctcctggaaaacccgcgcttccgcgccggctacgacttcctcctgctgcgcgaaagcgccggcgaggaaaccgaagggcttggccaatggtggaccgattaccaggaagtcagcgacagcgagcggcgcaacatgatccgcgacctggtcagccaggaagacggcagcgccccgcgcaagcgtcgccgcggcggcaacagcggccgtcggcgccgcgggccgcgcaaggaaggcagcggcggaagcggcgaatga

SEQ ID NO: 328136 - DNA, 1011 bp, Pseudomonas aeruginosa
atgaggttgggacagggtggggagaagagctttccagccctcgccgaggtggcagggaaagcagatctggtagccattcaggaagtgatgaatgaggaaggactgacaaagttggaggcggagcttgagaaacggaccggggagcaatggtcgacgttggtcagccatgcggtgggctcccgctcctacaaagaactctatgctttcctcatgcgtgagagcgttgtcgtatacgaagacggggcagtcgtgtacatggatcgaggcgatcgctttattagggagcccttatcggcccgatttaaatcgaaacgagatggtacgttatttgctgtggccagcattcacgtgttgtacgggaaaggtccccaagaccgtgagccggaggtcagggaattggagagctactgggcgtggctggaaagcatctacccagaaaccccggtcatgctggtaggtgacttcaatatgtctccctctcaccccgcattttccggcctctcacagcacgcaacgcccctcattacaaagggcgcaaccacgctttccgcacgcgaagggctctacgccaatctttacgacaacatctgggtatccaggacgcatcgtctgaagctggataacgcgggcatcatggactacccccggatgatcggctggagccatgagaaaagccggaagcacgtgagtgatcacgctcccgtattcgtcaccctgggaaatgcgaagctgcgccagggggttgtaacggtccgaccggaggcagaaaggagtcgagttgcggggggcggaatgaagcagattttcccgtctcaagctcagaagagcactgcagccatcgcctccaacatagacgatgccgaccatatccgcggaaatgctaactcccgcattttccactggccgggctgcccgagctacgacaaagtatcaccaaagaaccgagtggagttcagcagtgtccaggaggcagaagccgcagggtaccggttggccggcaattgtcgctga

SEQ ID NO: 328137 - DNA, 1248 bp, Pseudomonas aeruginosa
ttgagagttgcgatcaggctctgtttctccgataacttcagcactctactgaacaccaaaccttgcgtgcacgaggttctgaaagacgctcaagatgcggccagggtgatatttagatcttggcgatacactccagtagaatgctggatgccggttgatacacgccgagcccccgttatcgccccttccaccataaacatggctgatcgccttttttgcccggccgcagccaccctgaggatgcatatcttgatttggtttcttgagggacagtccagccagcgggacatcattctgggagcgcgtgaagccctcccgccggaagtgaggatttttgcttcacatcgccaagacaggcccgaaatcaccggaagcgccgatgtaagtttccttgagccgaaggacaaccaggaacgaatcgactgggtgatcgagaccgccctaaggcatgggatcaaagtcatcctagtcggccgcgtggggagtgtctttgaggctcagcgccaccgattcgaggccgctggcctggttttggttaccggcggcgcgagcatgggtacgttcgagttggtagacgacaagagtaaattcacggcggaagcagaacgtgcaggccttgcctgtgtcccggcgatcacggcacgtaatgcgaaggaactcatcgatgcctacgagtcccttcgtgttctcggcgacgtctgtgtcaaaccagcggtaggtatatatggccaggggttctggcgcttcaagtctgaagcggattcgtttcgttgcttcgccaaccccgattctcgggaagtccagtttgagacataccttaatgcctaccgggctggagcggatcgttccgccatgctggtcatgccgtacatgacaggaagcgagtgctcgatcgacatggtttgcgaatccggccgccccgtggcattcgttggtcgccggaaagaagggctgcaccagaccttcgagaatgactcgccagcggtagagctcgctctgaaggctgccgctcacttccagtgcgatggcctggtcaatgtccaaacgcgggatgatttagacggtgtcccacatctactcgagatcaatccgcggtactccggtggcatcggctacacccgacatacgggagtgaacctgccaggcatcttcgccactagaaggcttggtctggctgagccggtgagtgattggataccgaacatcagggtgaaagccataaccgttgcggtgccagtgacaacttga

SEQ ID NO: 328138 - DNA, 1140 bp, Pseudomonas aeruginosa
atgatggtgatggcgcctggcgcaaacacagctttgggagcggcgcaatgttcctggacgctggagtgcggcaatccctctgcattcggggactatgccgctgtcgctctgcttccgctggacgataagcgtcacccaaaaggggaagcagcacttttccaggtttcccaggcctggatgcagtggagtggtgggcaagagaaaatctgctgcaacttgaatctcggccaacttccgaccggtgccgacagggtgctcttggtcgtgtacaccttctcggcaatggggccagtaagcgacctgcgattactccgcttgcagatcgactctcagatcgagttcaacttgaacctgtccgacaatggtgaatcagcgatcattgtcggtgagttctattgccgcaatcaccagtggaaattccgtgctctggccgaggggtcggcctatggcctagcagcacttggacgtcgcatcggcctgaagatcgacgatgctcacccgcaccgccgctccagttcctcagaacagagccgaccggcatccggagcgacaggcaccggctttgctgtgacttccacccatattctcacctgtgcgcatgtcattgaggacatgaaagagatccacatcgcttcgttcgaaggacgccatcgtgccgaggcagtggttgtagatcagcgcaatgatttggcactacttagagtgcaaggagcgccagcctttaagccggtggctttccgggatggagttgggtgtgaccttggcgagcctgtggtggccctcgggttcccacttgctggtctggccggtgggggggtgcacgtcacccaaggtggcgtttcagcactctttggcctgcacaatgactccagtctgctccaattcactgcaccaattcagccgggatcaagtggtagccccctctttgacgcagctggatcagttgtagggatggtgacttccacgatccctgacgcacagaacatgaacttcgcggtcaaggccgggcttgccctggcgtttcttgacgcctgtggtgtcgagccaactcgtacaccaacaggaaggactttctcgacatctcaaatggcccgtgaagcccagcaatcgctatggaaaatcgaggcgcgtaatccatag

SEQ ID NO: 328139 - DNA, 1128 bp, Pseudomonas aeruginosa
atggaaaaaatcatagtaccaacgtccgtacgcgcccaactcaagcgagggctcctcgaggtcaaagtcgaagacaccgttctccctccagctgacctgttcggcttcgcagagcgccggaaccccaagcgagcattccttttcgtgtcgaaagtgctgggccgccatatacccgtgcgcccctcggttatggctgccagcttcgagagtctagccgccgaaatcccgcctgatctccctggcccggtgctggtcattggcatggccgaaactgcggttggcctcggtgccggtgtgcaccgcgccttcagtaccactcgctctgacagtgtgtacctcatcagcactcgccacccccttggtaccgacctcttcgctcgattcgaggaagagcatagccatgcgagtgcgcacctgatccacatgcccgtcgatcccgaaatcagggaagcgatgcttcaggcgcggtcgctggtgctggtggacgatgaggcttctactgggaagaccttcgtcaatctgcaccgcgccttggtagaggccggactgagcaagatcgaacgtatcgtcacctgcgtcctcacggactggtctgctggcgctgtgcgcaaaaccatcggggaatcagccactgcagtttcgctgatgcagggttcctaccagttccatgaaaacccagctgccccgccacccgaaatgcccgatgtgggagcagtttccatcggcgagtggcctctttcggctgacaaggactgggggcgtttgggcgttcgtcgtgtggacgacacgcttgcccccgacatccgggttcaccctaacgagaaagtcatcgtggtgggtacaagtgagttcgtttggcgtcccttcctgctggctgagcgactggaacgtgctggtgtggacgtgcacttcagttctaccacccgctctccaatcgccctgggccacgccatcgagcacgccctgtcgttctcagataactacggtcttggcatcccgaacttcctctacaacgtgaagccggggcagtttgaccgagtcctgatctgctccgagactcccgagcaggctgctcctgcagagctggttgctgccctgaatgccgaggtgattttcgatgggcactaa

SEQ ID NO: 328140 - DNA, 759 bp, Pseudomonas aeruginosa
atgggcactaatcgtcccctggtattcgtcgacctcgacgacaccctgttccagacctctcgcaagatggtcgaaggtacgccgcgtactaccgcgacgctggacgtacacggccaacccaatgggtacatgaacccgatccagcactccttcatcagttggctgctggcttctgccgatgtagtgcctgtcactgcgcgtgacgttgaggcctacagccgcgtcaagctccccttcaccgagggggctatctgctcgcatggtggtgtgatgctccactctgacggctcactggatcaggactggcatggccagatggcaaaatccctttgggccttccaggatcgactgccagcgttgagcgaagcaaccttgcggatcgggaaggacatgggctattcgctccgcggttgggttgtggaagaagaaggtctgcgccactacgtggtgaccaaacagaacgaatctgatgacgctgtcctctccaaggttctggccgaggttcaagcccgaggcatgctggaaggcatgcacattcacgccaacggcaacaacctcgctttcctgcccaaggggctggccaagcgattggcagttcaagaatggctgcgccgtgacgccaagatcaatggagatcgcccagtccttggcttcggcgacagcattactgacctaggattcatgggcctttgccacatgtgggctacacccgctcgcagccaattggccaaggccgtggaggagatgatcattgagtaa

SEQ ID NO: 328141 - DNA, 1095 bp, Pseudomonas aeruginosa
ttgagtaatctccttgccaccctgaataccgtcggcagcggaagctacgcgccggaagacgtccatttccttctgcggtcggtgcaaatgaatgtcaccgatgtcgaggagaaggagcgcctgattcagaccaatcagaagcactattcggagatgatcagccaagaacacgcgcctaccgacgttcacaagtccttgtacgctcgcgcgctagtgctgaacggtgctcgcatggctgaagatgttcaatctctggctttggcgttgagtgccgtctgcaccggctccagcatcgcactggtttccttcgtgcgcgccggccttccccttggcgtcctgctccgtcgggcactggtcgagatgggccgtgacgcccaccactatggcgtaagcattatccgtgatcgtgggatcgatacagtggccctcgaagcgatcatccagttgcacggtgctgagaacattgtcttcgtggatggctggaccggcaagggagcaatctctggcgagctcaagcggacgctaggtgccgacaagcgtttcccggaagagccccgactcgttgtgctagccgacccctgcggccgcgcatggctcgccgcctccgcagaggactgggttatcccgtccggaatcttgggcgcaaccgtttccggcttggtgtctcgctccatctggccgactcaaggtgggcttcatggttgcgtggtctacgaccacttgagtgaacacgacgttactcgtgaattcatcgacaagatcgaggctgagcgccaagcgctgagtagcgtccaaaccgcatcgccctggacgcacgagcagagtctgaagctccaggccgcggccgaaaacgtggttacctccctggctacccgctttggcatcagcaacctgaatcgcgtgaaaccaggtattgccgaggccacccgagcagtcctgcgccgagtgcccgatcacgtgctggtgcgagatcgtaatgacggcgacgtgcaactcctactgcatctcaccgagcgcgcaggggtaacggtggaggagaccggcgaggctcttggaccttatcgtgcggtaaccatcatccggagtacgaactga

SEQ ID NO: 328142 - DNA, 948 bp, Pseudomonas aeruginosa
atgaaggcgatttctccattcgccctcggggcgactctgtacatgccggcaacccgcgatgacatcctggatgtggtgttcgggatgaagatccctgagcttcgctcactcgttgtgtgcctggaagatgcagtggcggcgatcgacgtcgaaagtgcactcgcaaatctgcaggccctactcatgggcattcaggcccgtggcggccgcccggaacaagggccgttgctcttcctccgtcctcgcgatgcagagatggcagcagtgctgaacggatggccgctgatgaagcacgtcaacgggttcgtcgttcccaagctgacgctgaagtctcttcctttttgggaagccgctgttagcaaccctgacctctatctcatgccaaccctggaaacgagcgatgtttacgacccgggtgccatggtggagctcggccaggctctgaaggccaacctgaaccaacgcatcatcgcactccggattggcgggaacgacctcatgggttgcctcggcctgcgccgcaaccctgccaccacgctctacaacacaccgatgagctacgtgattcccatgctcgccggcgtgatgggagcacagggatttgccctgacggcccctgtattcgagcagttggccacgcctcatcttcttcaggaggagttgaagctcgacatcgcacatggcctggtaggcaagacggcaattcatccaagtcagatccgcatcattcaggacaatctccgcgtgagcctggaggacctcaactgtgccaagctgatcgtcaacgatgtagcccccgccgtcttcaagcacaacgatgcaatgtgcgaaccggctactcattacaagtgggcagtgaacatccttgagcgcgccaagtggcatggtgtgaaaaccgccgatatgggcaatggcgagcacagtgtccgcctggccgaggcttactaa

SEQ ID NO: 328143 - DNA, 729 bp, Pseudomonas aeruginosa
atgagcatcgaaatgctggaggctgggccgaaaggagcgaaggtgctctcggtgtttgacttcgatggcactctcacccggcacgacagcttcgtgccgttccttcggtttgccttcggcactcgcgagttcacccaacgcattctcaggttggcgctgcccaccctgaggtatctctccaggggcatgtcccgggatgagcttaaggcccagttgataggcacatttctcgctggcgtggaagccaaatgggtatgtcagaaagctgaagatttttgccagttggtttggcccaagctcatgcgcccatcaggggtaagatcagtcgcggccgaaattgcgtccggagcggaggttacactctgctcggcttctccggcgctagttctgcggcccttcgccgaacgtctcggcatcaagctcatcggtacagaactggaagtggtcgatggtcacttgaccggcaggatcagcggaaacaactgtcgctgcgagaacaaggtacgccgattggaagccatatatggccctctgacacagtatcggttgagggcctggggggatacccatggcgatcatgaattattggatgcagcgcaagatgcgcattggcgtcattttcaccccgcgtggcggcgttcccgctcgcggtatagcaaggccgggagcccggagagtgtttctccgcgtgactcccactcgaactctgaagatcaacaaggagcgtaa

SEQ ID NO: 328144 - DNA, 594 bp, Pseudomonas aeruginosa
atggcaatcaccctgagcaaaaatcagagcatttcgctggaaaaaactgccggcagcggcctgacctcggtcagcctcggactgggttgggatccggtaaagtctggaggtttcctctccaagctcctcggcggtggcaacgacgagatcgacctcgacgcctcctgcattctgctggacgggaacatgaagccggtggatctagtttggttccgtcagctcagctcgaaggacggctccatcaagcactccggcgacaatctcaccggtgaaggcgatggcgacgatgaaaccatcaacgtcgacctgcagcgtctgccagcctccgtccagcacctggtgttcaccgtcaacagcttccgcggtcagaagttcgaccaggtggaaaatgcttattgccgaatcgtgaacaactcgaagagccaggagctggcgcgcttcaacctcgctgagaagggccagcacaccggcgtagtaatggctagcctcagccgcaagggtaacgattgggacttcaaggcgatcggccagtccactaacggccgcactgcggacgacctcgtcaacttggctattcaggcggtacgcgcatga

SEQ ID NO: 328145 - DNA, 1182 bp, Pseudomonas aeruginosa
atgacaaccctggtacctggcggtaatgcgccggttgccaccggccaactgcgtgtggacatcagttatacgccggctccaggcgcagacatcgatatctctgcattcgccctaaccacctcggggaaggttcgcggcgatggcgacatgtgcttctacggtcaaaccagtattctgggtggagctgttcagctaacagccaattcggccggtcgtgctgagttcacagtcgacctcagccgtgttgatcctgccgtggagaaagttgccctcaccgcaaccatctacgaaaacaaggcaaccttcgatcgcgtgtcgacgctatcgctagcgctcactggagggatcgaagctcagatcccaacacacgggatgaatgaaaccgccctcatcctcggtgagttctaccttcggcagggagcgtggaagtttcgttgtgtcgcccagggcttcgcgggaggcttgggaccgctggcaaagcacttcggcgtcgaaatcgctgcacctccttccgcgccggcaccgactcccgctgcgccgcctcaagtacctccagccccgccgaagccgaccatcagcctcagcaaggtaacgctcgacaagtctcgctcgagcatcagcctggacaagcctgctgcagggtttggtgagatcaaggtgaacttgaactggaaccaaggtggaagtggcggtgtactcggcggcatctttggcaagagcaagtccgtcgacctcgacgttgggtgtctcttcgaactgcaagatggctacaagggagttgttcaggccctgggggaggccttcggtgatctgaacgatgagccctacattcagttgatgggcgacgaccgaactggttctgttgctggcggcgagtggatgcacatcaacggccggcagtggagcgagatcaaacgcatcctggtcttcgcgttcatctacgaaggtgctccgaactggaaagctaccgacggcgtcgtgacgatcttcatcccgggccagccagaaatcgaagttcgcctgaacgaagaaggtggacgctatgggatgtgcgccatcgccttgcttgaaaacgtaaacggggccgttaaggtctcccgcagagtcgacttccaccgtgggcaccaagatatggacaaagcctacggctgggggatgcgctggacggcgggctccaagtaa

SEQ ID NO: 328146 - DNA, 450 bp, Pseudomonas aeruginosa
atgctcgaatggctgaaaaccaacgcgacgaaagctcgcgagactctgacgactgaggtcgccaagttcaaaaatcgcaccttcatggaggcagtagcaaatgcgtgcgcgctgatctccgcggcggatggtgaaatcaaatccgaggagaagatgaagatgaccggcttcatcaataactccccggaactgaaggtcttcaacctgaacgacgtgatcaaagtcttcagcgacgcctgcggcaagttcgagttcgacttccagattggtcaagctgaagccctgaaggcgatcagcaaggtcaagggcaaggacggcgaagcacggctactggtacgtgtggccagcgccatcggcgcctccgacggtgacttcgatgataaagagaaagcggcatgccgcctgatttgcctagagctgggtctgaacccggcagacttcgaactgtaa

SEQ ID NO: 328147 - DNA, 1035 bp, Pseudomonas aeruginosa
gtggaaacgactcacattggcttcccaccgctgaccatggcggtattcgtcggccttgcacttgccgccctgctgctggacatggttacccatcgcgatgacaagccgatcaccctagcgcgcgcctctatctggtccgtgttctgggtggcgatttctctggcgttcgcaggtttcctctacgtgcagcacggcgctgaagtcgccagcctgttcgtcaccggctacgccttggagaaagtgctgtcggtcgacaacctgttcgtcttcatggccatcttcgcctggttcaaggtaccggatggcctccgtcaccgagttctctattggggcatcatcggcgctatcgtcttccgtggcgtattcgtggtcatcggtaccggcctgctcgcatttggcccctgggtcgagatcgtcttcgcgctgatcgttgcctggaccgctgtgatgatgctcaagggcggtgacgatgatgatgaagaggaggactactcccaacatcttgcctaccgcttcgcgaaaaagctcttcccggtatggccgaagttatacggtcataacttctttgtgagccgcaagaagctagaagtcgaagtgcagaaacccgagaacaaagacataagcctggcggcgaaaggtggtcttttcgccactccgcttttcttatgcttggtggtagttgaggtgtccgatgttctgttcgccttcgactcggttccggccgtaatcgcggtgagccgtgaacccctgatcgtctactcggcaatgttgtttgccatcctgggtctgcgtaccctctacttcgttcttgaagcactgaagcgctatttggtgcacctcgagaaggcggtcatcgtgctgctgttcttcatcgctgccaagctcggcctgaacgccaccaaccacctgttccatcacggcatcagtatcgacccgaataccagtctgcttatcgtcctggcagttctggcagtcggcatcctcgcaagcgtgatcttcccggaaaaggaagaagcgcaagtcgaaaaccagtaa

SEQ ID NO: 328148 - DNA, 579 bp, Pseudomonas aeruginosa
atggcactgtctctgcaaaaaggtggcaacctctccctgtctaaagaggcgcctggcctaaccaaaattctggtaggtctgggttgggaccctcgctccaccgatggcacccagttcgacctcgacgccagcgctttcctgctaaacgcctccggtaaagtccgcggcgatgcagacttcatcttctacaaccaactcaagagtccggacggttccgttgagcataccggcgacaaccgtgatggcgccggcgacggtgacgacgaggctatcaaggtcgatctgagccgcgtgccggtcgacgtcgacaagatcgccttcaccgtgacgatccatgacgctgaaaatcgtcgccagaacttcggtcaggtcggcaactccttcatccgtatcgttaacgagaccaacggctccgagattgttcgttacgatctggccgaagacgcctcgactgaaaccgcgatgatcttcgccgagttgtaccgccacaacagcgaatggaagttccgcgctgttggtcaaggctacgctggtggcctgaaggccctggccaacggttacggtctgaccgtcaactga

SEQ ID NO: 328149 - DNA, 579 bp, Pseudomonas aeruginosa
atggcagtttctctccaaaagggcggcaacgtcagcctgtccaaagaagcaccaggtctgaccgaggtcatcgtgggcctgggctgggatccgcgcgtaactgacggcaccgagttcgatctcgatgcctccgttttcgtcactggcgaaaacggtaaagttctcaacgacgccagcttcattttctacaacaacaagacgagcgctgacggctccatcgagcacctgggcgacaaccgctccggtcagggcgatggcgacgacgagcaagtcaacgtcaagctgaacggcctgggcgcagacgtgaagaagctagtcttcgccgtcaccatccatgacgccgaagctcgtaagcagtccttcggccaggtgggcaatgcctacatccgtgtcctgaacaaagccgacggcaaagagattgctcgcttcgacctgtccgaagacgcctccaccgagaccgccatgatcttcggcgaactgtaccgtcacaacgacgagttcaagttcaaggctatcggccaaggttttgctggcggcctgaagcctctggctgaagctcacggcgtgagcatcggctaa

SEQ ID NO: 328150 - DNA, 1332 bp, Pseudomonas aeruginosa
atgaagttaaaatcactggcaatggcagtgcctttagcactggctggctgcggcttcgttaacgaccagaagctcaattttgctcatcaggagtatatgcaggagtgctttgccactttttcaaatagttgtaacgacaaggcgatcgactacaacatcatgcttctggaaacaattaaggacaaaatgattgaggcagggcctgagcgtctagatctcaaaggggaaagtgccgagagatttgaagagcatgtagaaaaatccatcggaaaaatggtcgagcattttgaagtcatgaggccgggctttttcactcgtgtatttatgggtaggttcgagccatttgatgggaagtctgtaagaattcttgaagcatcagatgcagacgaactttttagtgtaatccttgaagagtatacgaagcggctcctagaaaacagaaagaaactacaggaaatttgggaaaaaacgccggatatggtttccgaagcgtcagagccggtcgggcctctcaaagaggagcctgttcaatctacctcgcaaaatgttgaggctaatgggcttaaggtcgcggttgacgcggcgattattgagcatgcacagcagaatgccgccagtgaatacggcgaagctcgccgttacctgcaggtggatttcgacgggaatggcagcactgatgcagttgtgatgtacactcttgagccaactagtggcggtaattacagcaaccaatatcttgttcccctcatccataacggtgatgcgtgggaagctaagacacgcctcgatatcatgaactccgcctctgatttggctgacgaaggcaatggcgttctgagctatgtcgagctctcgcacggcccagatgatgcagattgctgcccgtccatggagacaaagcgtctgtataagtggaatggttctgtcttgcaggagtacaaaaatgatggtgcagtgccaacacaggcatcatccaaatctcttgctgaaccgcctttctactcagtgctcacgctgaatgattcatcggacgaaaaagaagtgacgaccaagcgagttttagagtgcagcatggcctcaaagcttgttgggcagttagagtcgatagacatcatcgcagataagattaatcggaccggcttggccaatactattaaccctaatccagaaattatggccgattaccatctgatgattaaaaaggattggtcgctaaaagatatgaatcgagcaagccaagatgagtatttagtggggatctataattctgaattctgccataagctccacgagcagccggcaattcaggtttccgatgtcccagccgattag

SEQ ID NO: 328151 - DNA, 1194 bp, Pseudomonas aeruginosa
atgggatttcgcttcagcaaacgaattacgatcgtgcctggtgttcggctcaacatcagcgggtcgggtatcagcacctctgttgggccacgtggactaagcttaacgatgggcaagcgtggtacctacctcaacgctggcctgcccgggaccggcctcgcgtatcgtgaacggctggaccgatcggggacaaggaacgcgccaaaccctgctgcagactcggcaggctattccgggccgatcaaggtcaaagtcgacgatgatggttcgttgattatcaccgacttggaagacgctccccttccgccggcaatcgtgaagagggtgaaggtagagaagagtgacgagatccaggcgcttctggaaaaagctgcagccaagatcaaccaggcgctcaatgagtgcctatcggctcatatgatgacccctcggccgggttctctgccggcgctaccaccggcattcgatctggacgaaccgcggcgaccttcaacggacgctccagggctgctcgacaagatgctcctgcggagttctaggatggaaaaggaggctcaggaactagaagcacagtaccagcaagatcttgtcgagtggaacgctgcacgtgatgctcacgagaaggcgcgatccgacattgataaggccattcgacttgccgcaaagggatacagcgctcagatggagcgtgccctcgactatgtcctatccggcattgcctggccgaaagaaacgctcctcgagtacgagttctcgcatgacgtttcgggcattgctctggacatagatttgcctgatgaaggggatgtgcccaaccgaacggctgaagccaggggcaatggcaagctcacctttaaaacccggtccgaagctcagactcgtaaggacttcgtctcactttgctacggcaccgttttccgcgtggttggggaggtttttgccttgctcccaggcatccaaaagtgccttgcttccgggtacattcagcgcacagatttggcaacggggagtatcggggatcagtatgtaatctcggcgctgatctctcgtgatcaatgggaaaccttggacttcagccggctggaggcgatagatccaggtgcgacgttgaaggcattcggggccgtggtgagcgtcgatagaacatcgcggttccgagaaatcaccccaatggacttagccacccttggctga

SEQ ID NO: 328152 - DNA, 966 bp, Pseudomonas aeruginosa
atggcagacggcggtgagggcaccgtcgacgccgtcctggctgccaccggtggagagcggcgggtcagtaccgtccaaggaccacttggggcggaagtccaagcagctcggggctggcttaacgagtctcgcaccgctgtgattgaaatggcggcagccagtggcattcacttggttctggccgcggaacgcgacgctacgcgcgcttccaccttcggaaccggtcaactggtccagcaagccctgagtgctggcgcgcaacgaataatcatggggtttggggggagcgcgaccaatgatggcggtaccggaatgctgcgagcgcttggtgccaggtttctcgactctgccggcgatgagatcgaggagggtggcctggcgctcaaagctcttcgccagatcgacttgaacagactcgatgagaggctacataaagtccggattgaagttgcctgtgatgtcaacaatccattgaccgggctgcacggagcctcacacgttttcggcccgcagaaaggtgcaacgcctgatcaggtcttggctttggatgaggctctgaatacgtatgccgatattgtggccgcgcttcttcagaaagacgtacgtgactttcctggggctggcgcggcggggggaatcgggttcgccgccaaagcatttctacatgcggaattccggcctggtgttcaactgatcgcggatttgtctggactgagtcaggctgttcaaggagcagaccttgtgatcaccggcgaagggaggttggatgaacagacgctgtacggaaagacccctgccggggtggctgtcatcgcttctgctgcgggagtgcctgtcgtggcaatcgctggcacgctgggagtcggatatcagcggctgcgcgacattggaatcgttgcagccttctccatcacctctgggcccatgacggggcgaatagagaaaacggaaaaaatcgtacgctaa

SEQ ID NO: 328153 - DNA, 2967 bp, Pseudomonas aeruginosa
atgccgcgtcgctcgattctctcggctacggagcgcgacaccttgcttgcgttgccggaaagccaggatgacctgatccgctactacaccttcaacgactccgacctgtcgctgatccgccagcggcgcggcgacgccaaccgcctgggcttcgcggtgcagctcagcctgctgcgctaccccggctatgcgttgggcaccgacagcgagccgcccgagccggtcatccagtgggtggccaagcaagttcaggccgacccggcgagttggttgaagtacggcgaacgcgacgtgactcgccgcgagcacgcccaggaactgcgcacctacctacaactggccccgttcggcctgtccgacttccgcgccctggtgcgcgagctgaccgagttggcccagcagaccgacaagggcttactgctggccggtcaggccctggagagcctgcgacagaagcggcgcattctgccggcgttgagcgtaattgatcgagcttgttcggaggccattgcgcgggccaatcgccgagtctaccgcgccctggtcgaaccactcacggactcgcatcgggccaagctggacgagctgttgaagctcaaggccggcagcagcatcacctggttgacctggctgcgacaggcaccgctgaaaccgaactcccgccacatgctcgaacacatcgagcggctgaagacatttcagctggtggacttgcccgaaggcctgggccgacacatccaccagaaccgcctgctcaagctggcccgcgagggtgggcagatgacgcccaaagacctcggcaagttcgagccgcagcgacgctacgcgaccctggccgccgtggtgctggagagcaccgcgacggtgattgatgagttggtcgatctgcacgaccgtatcctggtcaagctgttcagcagcgcgaagcacaagcatcagcagcagttccagaagcagggcaaggcgatcaacgacaaggtgcgcctgtactcgaagatcggccaggctctgctggaagccaaggaaagcggtagcgatccctatgccgccattgaggcggtgattccctgggacgagttcaccgagagcgtcagcgaggccgagctgctggcccggccggaaggcttcgaccatctgcacctggtcggcgagaacttcgccactctgcgccgttacacgccggccttgctggaggtgctggaactgcgcgctgccccggctgcgcaaggcgtgctggcagccgtgcagaccctgagcgagatgaacgcctacaacctgcgcaaggtgccggccgatgcgcccaccgccttcatcaagccgcgctggaagccgctagtgataaccccggaaggcctcgaccggcgcttctacgaaatctgcgccctgtccgagctgaagaacgcgctgcgctccggtgacatctgggtcaagggttcgcggcagttccgcgacttcgacgactacctgctgccggcagagaggttcgccgcgctcaagcatgcgcaggctctgcccctggcgatcaacccgaacagcaaccagtacctggaagagcgcttgcagctgctggacgagcagctggccaccgtcacccgcctggccaaggacaacgagctgcccgatgccatcctcaccgagtccgggctgaagatcaccccgctggattccgcggtgcccaataccgcgcaggcgctgatcgaccagaccagccatttgctgccgcgcatcaagatcaccgaactgctgatggacgtggacgactggacgggcttcagccgccacttcacacacctgaaggacggtgccgaggccaaagaccggacattgctgctgtcagcgatcctgggcgatgcaatcaacctcgggctgaccaagatggccgagtcgagccccggcctgacctacgccaagctgtcctggctgcaagcctggcacatccgagacgaaacctactcggcggccctggccgagctggtcaaccaccagtaccgtcataccttcgccgctcactggggcgacggcacgacctcttcttccgatggccagcgcttccgggcgggtggtcgaggcgaaagcaccggccacgtcaacccgaagtacggcagcgagccggggcggctgttctacacccacatctccgaccagtacgcaccgttcagcacccgcgtggtgaatgtcggcgtgcgcgactctacctatgtgctcgacggtctgctgtaccacgagtccgacttgcggatcgaggagcactacactgacacggctggcttcaccgatcatgtcttcgccctgatgcacctgctgggcttccgcttcgcaccgcgcatccgcgacctcggagaaaccaagctgtatgttccgaatagcgtccaggactacccgacattgcgcccaatggttggcggcaccctgaacatcaagcacgtccgcgcccattgggacgacatcctgcgcctggccagctcgatcaagcagggcacggtcaccgcctcgctgatgctgcgcaagctcggcagctatccgcgccagaacggcctggccgtggccctgcgcgagctgggccggatcgagcgcacgcttttcatcctcgattggttgcaaagcgtcgagctgcgccggcgcgtgcatgctggactgaacaagggcgaagcccgcaactccctggccagggcggtgttcttcaaccgcctcggcgagatcagggatcggagcttcgagcagcagcgctaccgggccagtggcctcaacctggtgacggccgccatcgtgttgtggaacacggtgtacttggagcgcgccacccaggcgatgggcgatgcggggaagtcggtggatggtgagctgctgcaatacctgtcgccgctggggtgggagcacatcaatctgaccggcgattatgtctggcggcagagccgcaggctggaggacgggaagtttcggccgctaaggctgcccggaaaaccttag

SEQ ID NO: 328154 - DNA, 561 bp, Pseudomonas aeruginosa
ttgcagggacaacgcatcggttacgtccgggtcagcagcttcgaccagaacccggaacgccaacttgaacaggtcgaggtcggcaagctgttcaccgacaaagcctcgggcaaggacacccagcgtccccagctggaggccatgctcggtttcgttcgcgaaggcgacaccgtggtggtgcacagcatggatcgcctggcacgaaacctcgatgatttgcgccgcctggtgcagaagctgacccagcgcggtgtgcgcatcgagttcttgaaggaaggcctggtgttcaccggcgaggactcgccgatggccaacctgatgctgtcggtcatgggggcctttgccgagtttgagcgcgccctgattcgcgagcggcagcgcgagggcatcgccctggccaagcagcgcggtgcctaccggggccgcaagaaagccctctccgacgagcaagccatcacgctgcggcagcgggccgctgcgggcgagccgaaggcgcagctcgcccgcgagttcggcatcagccgagaaaccctctatcagtaccttcgcaaggacgactga

SEQ ID NO: 328155 - DNA, 1488 bp, Pseudomonas aeruginosa
atgctccactcgttaaaacaaacctggttatccaacatccgtggcgacatcctcgccggtcttgtggtcgcactggccctaatccctgaagccatcgccttctcgatcattgctggcgttgaccctaaggtcggcctttacgcctctttctgtatcgctgtggtgatcgcctttgtcggtggccgcccaggcatgatttcggccgcaacgggtgccatggcactgctgatggtgactctggtcaagaaccatggtcttgaatatctgctggccgccacgctgctatgtggcgtgctacaaattgctgctggctacctgaagctcggatcgctgatgcgcttcgtctcgcgctcggtggtgaccggttttgtcaatgcactggcgatcctgattttcatggctcagctgcccgagctgactaatgtcacctggcacgtctacgccatgacagccgcaggcctcggcatcatctatctgttcccctatgtccccaagatcggcaagctcatcccatcgccgctggtgtgcatcatcgtgctgaccgccgtcgccatgtcggttggtctggatatccgcacggtcggtgatatgggtgaactgccggatacgctaccgatcttcctctggcctgatgtgccgctgacattcgagacgctggccatcatctttccttattcggcagcactggctgtggtcggtctgttggagtcgatgatgaccgcgaccattgtcgacgacctgaccgacaccccgagtgacaagaaccgcgagtgcaagggccagggcgtggccaacattgcttcgggtctgatcggcggtatggctggctgcgcgatgattggtcagtcgatcattaacgtgaaatccggcggtcgttctcgcctgtcgtctcttgccgcaggcgtatttctgctgctgatggtggttttcctcggcgactggctgaagcagatcccaatggctgcgctggtggcagtgatgatcatggtgtccatcggcaccttcagttgggattcgctgcgcaacctgaagaagcatccgttgtcgaccaacattgtcatggtcgtcaccgtggtggtcgtggtggccacccacaacctggccttcggcgtgttagccggcgtgctactggctgcgatgttcttcgccaacaaggttggccattacatggcgatcagttcttcgctggacgaagccggcgagcatcgtagctataacgtcaccggtcaggtgttcttcagctcggctgacaagttcgtcgcagccttcgacttcaaggaagccctgaacaaggtaaccatcgacctgaatcgtgcacacttctgggatatcaccgctgttgcagccctggacaaggtagtcattaagttccgccgtgaaggtactgaagtcgaagtgctgggcttaaacgaggccagcgccactatcgtggatcgctttggtgttcacgataaacctgacgccattgatcaactcatgggccactga

SEQ ID NO: 328156 - DNA, 852 bp, Pseudomonas aeruginosa
atgacccacgtaattgcctgtatcgacggttccacctcggctccagctgtttgcgactacgcggcctgggccagtctgagcctggaagcgccgctgaccttcctgcatgtgctggatcagcgccagtatccggttgcagcagatttgagtggcaacattggccttggcagccgcgagcacctgcttgatgagcttgcttccctggatgaacagcgcggcaagttggcccttgaacaagggcgaatcatgcttgcagccgcgaaagaacgggccgtgaatgatggtgtgcgcgcaccggagtccaagcagcgacatggcgatttactggagagcttgcaagagctgcaaagtgaaacgcgcttgctggttatcggtcgccagggcgagtctagtggcggtctgagtcagcatgtcggaagccagctggaaagcgttattcgtatcatgcaccggccaatcctggtcaccccggccaacttccaaaagcccaagagcgcgatgctggcattcgatggcggcgctacaacccgcaagggtgtggagatgctggcagccagcccgctgctgaaggggctgccgatccatctggtcatggttgggcccgtgaacgacgaagcgtccgcgcagctggactgggcgcagaaagtgctgatcaacgccggatttaccgttcgcgctgagactcggagcggtgaaatagaacgtaccctgcacgcctatcagaaagagcatggcatcgatctgctagtgatgggggcttatggacactcacgtatccggcagttcctggtcggcagcaccactaccagcatgctccgtaccaccaccagtccgctgttactgctgcgctaa

SEQ ID NO: 328157 - DNA, 360 bp, Pseudomonas aeruginosa
atgagcctggacgacgccctcgatcttgcccatttcaagaccctactggaacagcgggctgccgagctggatcgattgctgggagacgctgagtctcgctcgcaatcggtagagctggatcaaagcaaggtggggcgtctatcgagaatggacgcactccagcaacaagcgatgaacgatgcgatccgcagtcgtgcacggcatgaacgtgtccgtctccaactggccctcaagcgctggcacgagggcgactatggctggtgtaaccaatgcggcgagttgatcgcctcgggccgtctggagttcgatccggccacgccgttgtgtatcacctgtgccagccgcgccgagtcgggttga

SEQ ID NO: 328158 - DNA, 786 bp, Pseudomonas aeruginosa
gtgtggctgcctggctatcgggttgagctggatgctaaggcggttcccggtgtggacaacaacctttcgggcctgaccttcgatcctgacctaaatctgctgtgggcggttaccaatggcccgaacgagctgctggccctcagtcgtgacggtgacgtggagcgacgttacagcctggatggcttccacgacgtggaagcggtgtcctatgccggcaacggtcaactggtcattgccgaagagcggcggcagagcctggttatcgtggatatccccatcgacgaatacggtaagctttctcctgatcgaccattgaggctagaccagtattcagcgctaaccttggcgcttggcaaggaggacaacaaaggccttgaagggctcgcctacgacctaaaaggtgatcgtttgtttgtgaccaaggagcgtgacccccggcaattactggaagtgagcggccttcgtgccagcctggaaggaggcgtttccctgcacgtccgcgacatgtccaacctagtaaaagacaaggtgtttgccactgacttgtcttcggttgtattcgatcaacagagcggccatctgatcctgctcagcgacgagtcgaaactgctgattgaaatgaccgacgagggcaaggtggtgagtttccgctccttggcgagggggtttgctggtttgctgaaaggtataccccaagccgaaggcgtaaccatcgacgatgaagggtatttgtacgtggtcagcgagccgaacttgttctatcgctttacccgcgagacagattga

SEQ ID NO: 328159 - DNA, 132 bp, Pseudomonas aeruginosa
atgtattacgtcctcagccacaatgttaatatcaagctgcaacatatcgacagccgcctgcttcaacacatgacattaatggagctgggcaggcttgaagtgaataataaattttacaagctaaaaaactaa

SEQ ID NO: 328160 - DNA, 708 bp, Pseudomonas aeruginosa
atgcaaaacatagatgacgcagcccatcagacaatctaccgcctgcgcgaggcagatgactggttcgcaagcttgccgggggaagtgcaagacaaaatcatccagtcttccgtattgcgccactatcgcaaagggcaggtgatcactgcccaaggcagccgaccgactgcagcctcagtagtgcttgaggggcgcgtgcgggtttcgcggctgctattcgagggtgaggagaagctttatatgattggcgagagaggattttggttcaacttcctcgacctgattacaggcgaaaaggccgatgtggctgtgatcgccgataccaatgtgcaattactaatgctgcctctgcagcaattcgagcgaatccttgaagaggaacctctctattgcaaggcaattacactttttattgccaagcgctatgccgcttttatgcggcactttgccgatggccagatgatcgtgccgctgcaacggctgcgtacaggtttagcagaactgttgttgctgcaaccaccggcaacaggctctgaggaagttattttgaatgtttctcaggcggatttagcctccatacttggttcttcccgccagactatcaacgggctgctaaaacaactggaaaaggcgggactgattaagatcggttttcggcatattcgagtaattgatccagctgggctttctgagcacgcggctaactga

SEQ ID NO: 328161 - DNA, 621 bp, Pseudomonas aeruginosa
atggctcagccgcacttccttcaaacctgctgctttgtggacttcccaatgaatgccgatgccatttccgacttgatcttggctgtggttgccttttccattgcctttgtccagctgcgccagcgccctgctctagccattggttgcggcctgatcggcctggcggcagcgattggtacactgcattaccagtatggtgagttgttcgccggcccacatcgctttaccggcctggttgccgccagcgcaggtttcccgctgctggtcattgcactgcgctggccagatgactctgttgctcagcgcatcacggccgcagggcgcttcgcgctcttggttgggagcttcggggtggtgattagcgtgtcgggatttgacacctggcgcatgctggtgcctcttggctctgtcttgttaatctgtgccacagccttagtgacgcggcgggtaatgccactcggggcggcgctagtgttcatcgttagtctagcggccggtgcaaccggtgaagagatgctcggaccgctatctggcatccaatggctgcactacttgctgtctttagccctgctgctgctgcaccgggatagggtggtgccgctgttagctgcgagccgttaa

SEQ ID NO: 328162 - DNA, 1227 bp, Pseudomonas aeruginosa
atgaatctgatcgtgtttgccataccgatttttttaaccaccaccttgctggaagcatggctggcgcaccgccgcgggctagcggcgtattccatacctgatgccatcagcagctaccaatatggtctattgagccaggtggttggggcgttcaccaagttggcgaaactgggcgtttacactctggtattcgaagcctaccgcgccacgaccttgcctagcgatagcctgtgggtatgggtcggagcccttgtggcctacgactttttctactactggcatcaccgtatgaaccatgaaattggcttgctgtgggccgggcacgtatcgcatcactcttccgagtacttcaacctggcaacagccatacgccagtcctcgacgagcgcacttctgggctggatattctatctaccgatggcagtggccggtgtgccgcccagcgtgtttgccggggtgatgctgatcgacttgctttaccagtactgggtgcataccgaggtaattggtcgtttgggctggcttgatcgcatcttcgtcacaccctcaaaccatcgcgtccatcatgggcaaaatgactactgcatggacacaaactacgggggcattctgattctctgggatcgcctattcggtaccttcgccgaggagcgcaaggacgagaaggtcatctacggcgtgcgcacaccgttgcagagccttaacccattctggggcaacatgcattactacattgagctctggcagaaatccaaagccaccccgggctggcgggctaaacttggcgtctggctggcaccacctggtggctggcacgatgaggcgagcgagccttacgagccgtcgcagtttaagtattacgatccgtgtacacccgatgcggtcaaacgctatgcggtagtgcatcaggtgcttgcaatgttgttcctcatgcattttctgacgctactcaacaccttgccgaagaccttactggcactctacgccgctggctttgccatttcggcaatctctctcacgtcactattggaaggacgtgccaatgcacggcgttttgagcagtgccgtgtcataggactgggcattgcctttgctgctctacctgactggttcggttttagtatgcccatcgcactcaagctgatgttattggttgtaatgctaggcagcgctgcatggctcagccgcacttccttcaaacctgctgctttgtggacttcccaatga

SEQ ID NO: 328163 - DNA, 693 bp, Pseudomonas aeruginosa
gtgagtaaagtagtcgcaattagcggtggattcggttgtctaggtatagcggtaggcgaggcgttcgcggccaatggttggcgggtggccctgattgatcaggccagcgtgccgcgacccctggccgacacggcgcgctctgaaaaactgcttatcggcgcggtcgatctaaccgatctgcacatggcaaattgtgcaatgcagcaggtgcagcagcattttcaaggattagatgcgctcatcaacgtggcgggtggttttcgctgggagaccatcgagggcggcgatcttgcgacctgggatttgatgtatcaaatgaacgtgcgcactgccgcaacggctagcatggccgcgctgacacacctgaagaaagccgaagccgggcgcattatcaacattgcagccggagcggccagtaaggccagcctaggcatgggggcctatgctgcagcaaagtccggggtgatgcgccttacggaggcgttggccgaagagttgaaagatcagcgcatcacggtcaatgcgatcatgccatcgatcatcgataccccgcagaaccgcctcgatatgcctgatgcggatgccacccgctgggttacgccagagcaggtcgctaatgtgatcgtatttttagcctctcaggaggctagtgcaatcacaggtgcagctatcgctgtaaatgggcggtgctaa

SEQ ID NO: 328164 - DNA, 1278 bp, Pseudomonas aeruginosa
atgccaggccctcgttcgtgtttttggcgctacggcccggtcagtggtgacccctacatcaacatcgccttccctgacgccggaacattctattggggagcagctttctcggtgccgaagggcgcgaagctgcatttagagggcagttttccgcatgctcgctatatgtccctaatcagctatgaccgtttgggtgctcctctcgactcagtggccgactacctgatcgcgccgaagccaggtgctagcaacccatatctcttcggtgcagaccgcaacagtaaacagcgcggctataaaatcgaagtggttagcgagccgttgagcactcctattccatggggcgtttaccaagaagccaagacccgcgacaagatccatgcgcctggtcaagccgaaaacggccagcagcaactgatttatcggatctacgcaggggacaaaaataccgacgaaacagcaggttccggtctgccaactccggtactcactctcgctgatggcaaggagctgcgcggacaggatgtttgtgccagcttgagtagcttccagccattgtcgtttgatcaggcagccctggcgaccccgcgtgagtacctcaataaactgacggaggtggccaaggcgcgtggcggtccggccatgccggccagtaacccgccgacctggagcaagagttcggaaagcatgtcgcgttatgccatttacaccggcgacaacacagtggcgagtggtaccaataagaaagacgggaccttctttgccaacctcgacaaccagtatgtgcgcacctttatcaaccgtaagcacggcgaggttttcgtaatccgcgccaaagcaccaactacgccaaagacctataacggcaacaccaagtttgaagatggtgatctgcgctactggtcgtggtgctctcagcagggctacgcatctggtcgggtcaataagtgtctgttcgatgagcagattccggtggacgctaacggctactacaccttggtacttagtcgcgaaagtgaccgcccacgcaatgcaatcaacgagtgtggtgtgtcctggttgccaatcgcggatgtgggcgacggtaccggtgatccggatctgagtttcctggttctgcgcaacatgctgggccgtggtgagttcaaacacgcagtgcagaatattaagtcgcaagaaactatccagcaggatatgggcgactacttcccgcgtgctcgctacaccacagtttcttcgttcgagacggcagttccttgccaagtagagaaacgttaa

SEQ ID NO: 328165 - DNA, 393 bp, Pseudomonas aeruginosa
gtgagatttgaaagaagtgagtccggcctgattaatccgttgttgttgaagatgacagcttgcataaccccgctagcgctcatgatttcactgcaggctcaggcgggtgagtttgcattaggtgaaatcacggggcgcgccaacggtagcatcagtgtgggtggaatctggaatgctgagaaacccgattcaaacctgatttttcagggtaatgctgatcatatcggctacggctcggctggtgagttcaacccttcaggtgcgcgtaacggtgatgacggccgcctgaattttcgtaagcgcaatttggtgtcttcaccgatcaccctattggcggaaaccgagttgaactggcgtaattatggggtctttctgcgcggtaaggcctggtag

SEQ ID NO: 328166 - DNA, 435 bp, Pseudomonas aeruginosa; identical to SEQ ID NO: 230936

SEQ ID NO: 328167 - DNA, 351 bp, Pseudomonas aeruginosa; identical to SEQ ID NO: 230937

SEQ ID NO: 328168 - DNA, 276 bp, Pseudomonas aeruginosa; identical to SEQ ID NO: 307113

SEQ ID NO: 328169 - DNA, 1686 bp, Pseudomonas aeruginosa
atgacccatctaaaaatcaccggcatgacctgcgactcgtgcgcggcgcacgtcaaggaagcgctggaaaaagtacccggcgtccaatctgccatagtgtcctatgccaagggcgcggcccagctcgcccttgatccaggcacagcgccggacgcactgaccgccgccgtggctggcctgggctacaaagcgatgctcgccgatgccccgccgaccgacaaccgcactgggctgttcgacaaggtgcgcggctggatgggtgccgccgacaagggcagcggcggcgagcgcccgttgcaagtcgccgtgatcggcagcggtggagccgcgatggcggcagcactgaaggccgtcgagcaaggcgcgcaggtcacgctgattgagcgcggcaccatcggcggcacctgcgtcaacgtcggttgtgtgccgtccaagatcatgatccgcgccgcccacatcgcccatctgcgccgggaaagcccattcgacggcggcatgccacccacaccgccgacgatcttgcgcgagcggctgctggcccagcagcaggcccgtgtcgaagaactccgtcatgccaagtacgaaggcatcctggacggcaattcagccatcaccgttctgcacggtgaagcgcgtttcaaggacgaccagagccttatcgttagtttgaacgagggtggtgagcgcgtcgtgatgttcgaccgctgcctggtcgccacgggtgccagtccggccatgccgccgattccgggcctgaaagagtcaccctactggacttcgaccgaggccttggtcagcgacaccattcccgaacgccttgccgtaatcggctcgtcggtggtggcgctggaactggcgcaagccttcgcccggctgggtagccaggtcacgatccttgcgcgcagcacgctgttcttccgcgaagaccctgccatcggcgaggccgtcacagccgccttccgtgccgaaggaatcaaggtactggaacatacgcaagccagccaagtcgcccatgtggacggcgaattcgtgctgaccactggacagggcgaagtgcgcgccgacaagctgctggtcgccaccggccggacaccgaacacgcgcagcctggcattggaagcggcgggggtagccgtcaatgcgcagggggccatcgtcatcgacaagggcatgcgcaccagtagcccgaacatctacgcggccggcgactgcaccgaccagccgcagttcgtctatgtggcggcagcggccggcactcgtgcggccattaacatgaccggcggcgacgccgccatcaatctgaccgcgatgccggccgtggtgttcaccgacccgcaagtggcgaccgtgggctacagcgaggcggaagcgcaccacgatggcatcgaaaccgacagccgcacgctgacgctcgacaacgtgccgcgtgcgctcgccaacttcgatacccgcggcttcatcaagctggtcatcgaggaaggcagcggacggctgattggcgtacaggtggtggccccggaagcgggcgaactgatccagacggctgttctcgccattcgcaaccgcatgacggtgcaggaactagccgaccagttgttcccctacctaacgatggtcgagggcttgaagctcgcggcgcagaccttcagcaaggacgtgaagcaactgtcctgctgcgccggataa

SEQ ID NO: 328170 - DNA, 366 bp, Pseudomonas aeruginosa
atgaacgcctacacagtgtcccgactggcccttgaggccggggtgagcgtgcatatcgtgcgcgactacctgctgcgcggattgctgcggccagtcgcctgcaccacgggcggctacggcttgttcgatgacgccgccttgcagcggctgtgctttgtgcgggccgcttttgaggcgggcatcggcctggacgcattggcgcggttgtgccgggcgctggatgcggcggactgcgatgaaacagccgcacagcttgccgtgctgagtcagttcgtcgaacgccgacgcgaagcgttggccgatctggaagtgcagttggccgcgatgccgaccgcgccggcccagcaagcggagagtctgccatga

SEQ ID NO: 328171 - DNA, 237 bp, Pseudomonas aeruginosa
atgaacagccccgagcgcttgccgaccgagacacacaagccgttcaccggctacctgtggggtgcgctggcggtgctcacctgtccctgtcatttgccgattctcgccattgtgctggccggcacgacggccggcgcgttcatcggcgagcactggggtattgcagccctcacgctgaccggcttgtttgtcctgtctgtgacgcggctgctgcgggccttcagaggtcgatcatga

SEQ ID NO: 328172 - DNA, 990 bp, Pseudomonas aeruginosa; identical to SEQ ID NO: 25157

SEQ ID NO: 328173 - DNA, 1206 bp, Pseudomonas aeruginosa
atgcaacttcgtgcagcagtctccggtctgcttctggccctcctggccggccaaactgtggcagcaagctttgactgctccaaggccagcagcttccccgaaacagaaatctgccgtgatggctacctgtccgggttggacgagtggttagctagatcctataagaccgccctggaggtaaatcctggccagtctgatgcggtccgtcagtcgcaacgtgaatggctcgcgacaaggaatgcgtgtactgaccagcagtgcctcgacagcactatcggcgcccgcatccaggcgcttgatcaatatgtgacggcggagaagggtaaggctgcatcggctttagcccatgcccagctgaacaagcaccaggaagcggaggccatcaggcagcggcaaactgcggagcgtctagcgactgaagaagcagctcgacaggcgcagatcgagaatcagcgccagttggcaatcatcgaactccagcagcgtgctcaggccgcccaagcgctcgaaactcaacgtgctggagagcaccagcaggtaccagcccagatgccgcagtaccaaccccctcaaaaggttgcgccagcttcgagtgcaacctcgtcctcgccgtcataccgctcgccggagaagactctgtggcagcagttcaaatctagcccggcctggaagtacttgctgctggcgggggcacttctgacagcttgggcgatgtggagacaccatcaggggcaaacaaccatctacaacgactacacggatgccgcgattacgaacctcttgccggctgcaggcgtggtactggccttcttgatgaactggctcgagctgcctcgtcaactcgcaatggtggcaggcctcacgggtttcatgtttgcattgatgttcgcggtgtatgcgtctgtgcgaaccaatcagggatggatgagcatcagcttgtcgctcatcgccaagatgactctggtgtcagtattctatgcagtaataggcgtactggtggcatcgctattcttaagcaccaagtacaaaggggagtcccaggcgagagcgaatgcaaggaaccgacgggagaagaaagaaacgatggccatgatctccgtgctcactactgcctacaccttcctttcggcttggctgtgccgacggcaagagttcatctctgtttctgaatgcctagcttttgactcgaccgcaagcgttgcttaa

SEQ ID NO: 328174 - DNA, 1251 bp, Pseudomonas aeruginosa
ttgaatcaatccctcaagcccggcgagaacaccaccatcaaccagtcgaaaggtcaggtgctggtaacgcattctgccggcgcaaacctcgacgtgaacctgacggccttcctcatcactgactccggaaaagtggtcgatgacagtgggatggtcttcttcaatgcgccggagcatgcgtccggcgcggccgcattctcgcctcccatcatccaggccggctcgatcagtcacagcatcagctttgatctgagtcgcctgccagccgctatctcgaagatcgccatcaccttgacccaagatggcaccggaggaggtttcgcaggagtaccaaacctcagcgcacgtgttcttgccggcgaccaggtgctggatcttgcgcctggggcatttgagcgggagacgggcatcatcgtactcgagctctacgtccgaaacggtcaagcgaaggcgcgctctgtctggcagggtttcgcctcgggcctggtcgggctctgtggcatgtatggagtcgaggtcgacgatgagccggcaactgccccgatcccagccgcgccccctgcgaaaccggtcagcatcaccaagacggtgatcaccttggacaaacccgggagcacgcacaaggtctctctggagaaaggcgcggccgcgccgaaggtcatcaaggtcagcgccaggtgggtggacaacggagacggtcgagacaacgacgaccttgacctgcgaatcggtatccttcgcccagacggtcggatgtccatcattcaggcgcctgacaagcgcggttccttcgaggctgaccccttcgtgttccataccggcgatgtggtaagcgcgagcacctctgccccagggatcgaaaccgtcgagatcaatgcagccatctctcatcttatgggcggcaaagtcgcgctggtctgcagcgtctattccgccgtcgacaacggagcagtgtcggttgcctccctcaagccgaaaatgcggatggagtacggggacgaggtcgtagagtgtgccttcgaattcaaaggaggatttttcagtagcctggtttacacctacgtcttggggatgatcgagatcgatggcgacgaaattcgcatcagccccagtggcgttacctccaaaactggatcggaagccacgccttggctaacccgcaaaggggacagggtcgagttgacgatggacggcccgcatgtatttaaaggccgtccgcttgagcgcaaagggaacaagcattacgtgtga

SEQ ID NO: 328175 - DNA, 612 bp, Pseudomonas aeruginosa
atgctcagcactgatcaagcccagtcggtatacgcccggattacgcaacgagtcaagcgactacctaaagggcagccgttcagcattagccgtttcacagggtttggaacgaaaaatgccgtatccaaggcaatagctcgactggtcaaacgaggcgaactcgaacgggtgtatcgtgggatttatatgcgcccgaaacccggactttacgttgccagggctcgtcccaaccactggcaattgatcagcgtaattgccaggcagaagcacttgtctttacaaatccatggtgccaatgccgtcaggaggtttgggctcagtacccagatgccgcttattccaatcttttacactaacggcgccagccgctcagtattcataggaaacgctgaaatcaggctaatacatgcgacaacgatggtcatgcagcatgcaggaactgaggtaggggtggctatcagcgcactgtattatctcggcaaagaaggctccactccggaatgcatagcagcgatcaagaaaggactcagacctgaagactttgtcaagttgctggcctgcaaactaccaaaatggatgagcacggtgttgaaggttgaaagtgtgaaatag

SEQ ID NO: 328176 - DNA, 303 bp, Pseudomonas aeruginosa
atggagattaagtcgcaggcattggtcgatgtcgttgaggatgtgatctgcgacgtgtgccgctctggcacgggtattcccggctacggtccccaatacggcaagcttgaagcccaatggggatatggctccccgcatgatgggcagcactaccgggtgcatctctgtgagccctgctttttcagggtgctgagtgggttgcgtcgggagcgcatggtcaatggtatgttcgatgatgatcagccatttgcttctgaagattttggtctggtcagcaaagataactactgggaaaaaaactga

SEQ ID NO: 328177 - DNA, 1404 bp, Pseudomonas aeruginosa
atgatgagcagttcgctacggagctggcaggacagctgcatcactcgggcgttggagcactttaccgtcacgccgcacttcttctgccaggctacgccgggagccggaaagacacgcatggctgcagaactggccagccgactgcttgagcaggacagaatcgatttggtgctgtgctttgcgccgtcctgccaggtcgtggagggttttcgttcgacctttgcggctgtgctaggcaggcgtctcgacggccagataggtgccgtgggcgcggcttatacctatcaggccatggaataccgtgatgagggattctggcagctgcttgatgactaccgggtgttcgtggtcttcgatgagatccaccattgcgccggccacgatccgctgctcagcaatgcctgggggcagcagatactgcatcggatacaggatcgggctgccttcacgttggccctgtctggcacgccctggcgttcggacgacaaggccatcgcattggctcgctactcttcgcccgaggggcatctgatctgtgattaccgttatggcttgaaagatgccattgccgacgacgtgtgccgatcacctcgcattgtgttgctcgacaatcagaaggtgaaacttacggaagagcttggcgcgaatagctccgtgaggctgtttcccagcatcgccaagcttttaggggagtcacctgtcacctatgaggaacttctgcgtcatgacgaggtgatcaatccaatcctcgatcttggctgcagcaagctgaacgagctacgccagatcaaacctgatgccgctggtttggtggtggccacagacatcgaacacgcccagcaagttacactggctctagaagcaatgggtgaagagtgccgcatcgtgaccaacaaaaccccggatgcgcagcaggtgatcaatgcattccggagcagcgcctgccgctggattgtggccgtcggaatgatcagcgaaggtaccgacattccccgcctgcaagtgtgctgctatctcagccgtatccgcaccgaactgcattaccggcaagtgctgggacgagtgctgcggcgcacaggtgagtccgacgaccaagcgtggctattcatgttagcggagtcaacgcttcagggctttgcggagcgaatatcgaatgacttgcctgatgacctggcagttttgagcgatgtgcagatgcctggttttactccagggtccaaacctgagccgatgggcactttgggtcatgtcgaaggtttcggcggtgcggggttaggtagtgcagaaccgggtattggatcgcagcctacggacatcatttcgctggatggctttgcaattgagcccgcttaccaggtcagcttttcccagcattatcggcagcagctactggcttgtttttga

SEQ ID NO: 328178 - DNA, 588 bp, Pseudomonas aeruginosa
atgaaatcggcctcgcttatcttcgacaggcgtctgtatgagctgcttcaggagccagggcgtacaacgtttacgacccgtgaactgcgcgatgcttatgccgctcgcttgagtggcacacatttccgtatcgccgatgtgcgccgctatgtgtatgagcagatccgccgattagtgcgcgcaggctgggttgtgctggataaggatcgtcgtgttcgaggacaggtctaccacctgcagccgattccagtacatctgcaactggaactgatcgacaacggttttgagaacagccttatggttgccggagtgcccgaaccagacacggcagtacccgacgtggaagctttgccacttaagtcgtcagccaatacggatttgcagttggaagcgctccacaaggaaatccgcttggactttctcacctcaatgggcgaggcagagcgattcaaactgcttctggacgaaatgccgcatttccgggacaagcttgaaggcgattacctggaagccagggatcgcagttctcgcctcttggggcatctgcgcgccatcgaaaaggccctcaaaacgctcgctgcaccatga

SEQ ID NO: 328179 - DNA, 228 bp, Pseudomonas aeruginosa
atggataagttggcgaaagcgttaggggaacgcatccgaatgcagaggaaggtctgccggatttcccaagacgcattggcgctggcgtgcagtctcgaccgcagctatgtaggtcgcatcgagcgtggcgaggtcaacattaccgtcgagaagctctaccgcatcgcaggcgaactcgcctgcgatccttcaagccttctgccaccgccatctgagattctgagctga

SEQ ID NO: 328180 - DNA, 2079 bp, Pseudomonas aeruginosa
gtggcttacgatccaagacgcgcgttggaattactccaaattggctccggaagtgccgatgccaatttccgtgacggccaagaagatgccattcgccacatcgttgaaggcaaaggccgcttgctggtggtgcagaagactgggtggggaaagagcttcgtctatttcatcgcgaccaagttgctgcgtgaagagggctccggtcctgcactactgatttctccgctgctggcgttgatgcgaaaccagatcgccgcagcagatcggatgggcgttcgtgctgccacgatcaactcagacaacatggacgaatggacggcagtcgagggtaaactagctaagggggaggtcgacattttgttgatctcgcccgagcgtctggcaaacgagcgcttccgcacccaggttttggctggcatcgccgcacagatctccctgctggttatcgacgaagcgcattgcatttccgattgggggcatgacttccgcccgcactatcgtctgttggagcgcatcgtcaaaacgctgccgcccaacctgcgactcctcgctaccacggcgacagcgaacaaccgcgtgatggaggaccttgctgccgtactcggtccgaagcttgatgtctcgcgtggagacttgaatcggacttcgctttccttacagaccatccgcatgcccagccaggctgaacgtcttgcttggctggcagagcaactctctacactgcaaggtcacggcatcatttatacgctgaccgtgcgtgacgccaatcaggtcgcggaatggctgaagacccaaggcttcaatgtggaagcctacaccggggaaactggtgatcgccgcgagcagctggaacaggcgctgctcaataaccaggtcaaagcgctggttgccactacggcattgggcatgggctatgacaagcccgacctggcgtttgtcattcactatcagatgccaggctcggtggtcgcctactaccaacaggttggccgcgcggggcgtgcgttggactccgcctacggcgtactgctaagcggcgaggaggagttcgacatcacggactggttcatccgcagcgccttcccaacccgaaaggaagtggccgatgtcctgggagcgctcgaagaagagcccaacggcttgtccgtccctgagctgctgagccgagtcaatctgagcaaagggcgcgtcgagaagacgattgcgctgctctcactcgaagcgccggcccctatcgccaagcaaggcagtaagtggcagctcacggcggcaatgctgagcgaagcgttttggagtcgcgcggaacgtctcactgcacttcggcgagacgaacaccagcagatgcaggactacgtcagtctgccgtttggtgagcacatgggctttctgattggagcactcgacggcgatccaagtgctgtcactgaaccagccttaccgccactgccaataagcgtggatgctgagctggtcaaagcggccgtcgcatttcttcgtcgcaccagcttgcccattgagccacgcaagaaatggcccgatggcgggatgccccagtacagcatcaagggattcatcgcgcccgagcatcaggccgagtccggcaaagcgctatgtgtctggggagacgctggctggggcggcttggttcgacagggcaaataccacgacggtcatttttcagatgaccttgttgctgcctgcgtgaagatgatcaaagagtgggatccgcaaccagcgccgacctggttgaccagcgtaccttcgcttcggcatcccgatttggtaccgaatttcgcacaacgcttggctgccgcgctgggtctgccgtttcatatggtcatctcgaaaacagacgcaaggcccgaacagaaaacgatggcaaacagtacacaacaggcgcgcaacattgatggctcgctcgcacttaacggccagcccatcccgcccgggcccgtcctcctggtagatgacatggttgattcacgctggacgctaacggtgtctgcgtggctgctacgcaagagcggcagtggcgcggtttggccgatggccctctcgcagacggggcacgacgaatga

SEQ ID NO: 328181 - DNA, 846 bp, Pseudomonas aeruginosa
atgcgtggtgcacttgaagcgggtggcaaggtctgcggcgtactggcagacagcctcgaaaagaccaccatgaaccgcgagcaccgcaacctgctgcttgatggccaactggtgctgatctccccctacgatccaagcgccgggttcaacgtcggcaatgccatgcagcgcaacaagctgatttatgccttggcggatgcctcgctggtggtgagttccgacctcaacaagggcggcacttgggcgggggccatcgagcagctcgacaaactcaaattcgtccccgtctttgtccgttcgacgggcgaatcgtctgccggcttggacgctctgcgaaagaaaggcgcgctgccttggccgaatccgcaagacgttgatacgttcgctgaagtgttcaacgtgcagatgccgacggtcaccgattctccacaggttggcttatcgctgcttgacggatcaccggctgccgtcaccacggcacctataccgccagatgccgcttcgttacctacgaccgagagcgagccagctgtttctaatgcgcagccttccgcagcgacatccgatgaactgccaatagccacttcggaagcattggcgccagcgggcgagaccaaggagtcaccgcagccggaatcgatcccggccgacgtgctcttcgcagcagtgcgtgtagcgattcagcagctcttgaacgcaccgatgaaagatgccgaagtggctaccgctctggacgtctccaacacgcaggccaaggtatggttgcagaggctggtcgatgaagggctgatcgagaaacagaagaagcccgcgggctacatcctgaagcagaaacgactgctctag

SEQ ID NO: 328182 - DNA, 1497 bp, Pseudomonas aeruginosa
ttgagcgatcaacaaatcaccctcagccaacttgagagccacctctgggagtccgccaacattctgcgcggcccggtggatgcagctgatttcaagacttacatcttcccattgctgttcttcaagcgaatctgcgatgtctgggacgaggagtttcaggagattgttgatgagagcggcgacgagcaattggcttggttcccggagtcgcatcgatttcagattccggactactgccactgggagcaagtgcgtgagaagtcgatcaacgtaggggccgctttgcaatgggccatgcgagagatcgagagagccaaccccgataccctttacggtgtgtttggcgatgcacagtggtcgaacaaggatcggttgtcagatccattgctcaaggatttgatcgaacacttttccaagcttccgctgggcaataagaacgtcagctctgatctactaggcgatgcctacgagtatttgatcaagaaattcgccgacgccactaataagaaggccggcgagttctataccccgcgcagtgtcgtgcggctgatgatcgatatgctcgaccccaaagaaggcgagtcgatttacgacccggcttgcgggactggcggcatgctgttggctgcagtgcagcacgttaaagagctgcacggagacgtgaaacggttatggggcaagctctacgggcaggagaagaaccttacaacctcatccatcgctcggatgaacctgttcttgcacggcatcgaagacttcaagattgagcgtggtgacacgctgcgtaaccccgccttcttcgatggagatcggttagccactttcgattgcgtgatcgccaatccgccattttcgttggaaaagtggggcgaggacctgtggctaaacgatccttttggtcgcaacttcgctggtctgccaccgtcatccagcggtgatttcgcctgggtgcagcacatggtcaagtcgatggccgctgttactggccgaatggctgtggtgttgccgcagggagccctgttccgcaaaggtgtggaaggtagcattcgtcagaaactgctggagatggacctggtcgaggcggtgatcgggcttgcccccaatctgttctatggcaccgggcttgctgcctgcatcctagtcctacgcaattgtaagccggctcagtttgaaaaaaaggtgctgattgccgacgcatcgcgccttttccgccgcgggcgtgcacagaacttcctggagcccaagcacgccgcagagattctcggctggtatcggggttttactgatgtccaggacgcggttcgtgtggtcagcctcgacgagatcaaggccgaagattggacgctgaatatttcccgctatgtgctgcccccactacaggaagacattcctccgctacctgaggccattgcgactttcaaagatgcacttaaccgctgtcgcgaggctgaggagcggctggcacaagtcatgacggcagggggatggctgcaatga

SEQ ID NO: 328183 - DNA, 1524 bp, Pseudomonas aeruginosa
atgattcatccaagcaaacgcattacccaacaagaattagaaagctacctctggggcgctgctgtcttgttgcggggcctcatcgacgcgggtgactacaagcagttcatcttcccgttgctgttctacaaacgagtctcagatgtctgggacgaggaataccaagccgcgttggtcgattccaacggcgatctttcctacgcacagtttgccgagaatcaccgctttcagatcccggaagcggcccactggaatgatgtgcggcaaacgccaaggaacgtcggtgccgccatccagagggccatgcgcgccatcgagtcggcaaaccccgacatgctcgacggcatcttcggtgacgcaccctggaccaaccgcgatcgcctgcccgatgaaacgttgaaaaacctcatcgagcacttctcgaccaagaccttatcggtggccaacgtccccgaggacgagctgggtaatgcctacgaatacctgatcaagaagttcgcggacgattctggccatacggctgccgagttctataccaaccgcaccgtcgttcacttgatgacgcaactcctggcgccacaggtgggcgagtcgatctacgaccctacctgcggcaccggtggcatgctgatctcggcgctggacgaagtgaagcgctccggcggtgagtaccgcacgctcaagctctatgggcaggagcgcaacctaatcacctcatccatcgctcgtatgaacctgttcttgcacggtgttgaggacttcgaaattgttcggggcgacaccttggccgaccccaaacacatcgaggacgaccgtctgcgacagttcgatgtgatcctcgctaacccgccgtactccatcaaacagtggaatcgcgaggcatggagcagcgacaagtgggggcgcaactcgctggggacgccaccgcaggggcgtgccgactacgcctttcagcaacacattctgaccagcctctcggccaagggccgatgtgccgtgctctggccgcacggcgtactgttccgcaacgaggagcaggcgatgcgtgcccaaatggtcgagcaagactgggtcgaggctgtcatcggcttggggccgaacctgttttacaactctccgatggagtcgtgcatcgtcatctgcaaccgccagaagacgtccgaccgccacggcaaggtgatctttattgacgcggtgaacgaggtcacccgtgagagggcgcagagtttcctgaaaaccgagcatcagcagcgcatcctgagtgcataccagacgtttgcagatgtgcccggcttcgccaaggtcgccaccctggccgagatcggtgcgaatgccggcaatctgtcgatccccctctacgtgaagcgtgttgccgcagccagtgccagcgacagcaacggtgaggcaatatcgctgcgcacgtcctgggagcagtggcaaaacgacggccgtgccttctggcaacagatggatgcacttgtggaaacgttggatagcatttcaaaggcagaggacgctgtatga

SEQ ID NO: 328184 - DNA, 1905 bp, Pseudomonas aeruginosa
atgaagcttcaaacgattcgtctatcgaatttccagtcttttggagtacagcctactgagctcgggctggatgatattacatacctgattggccccaacggctcaggtaagacagctgcgctccaagcgctttgccgcctgtttgctttcgatccatccttgcgccgcatcctgcgatcagactttcacgtccccttcgatgaggagatcgtgccggaagagcgccagctctggatagaggccgatttcctcttcccggagctggcggaagatgaagacaacagcaccgttgctcctcactttggccacatgcggcttgatgaggcggatggaattccgcgtgttcgttttcgcctcagtgccaccatgggcccggatggtgacatagaagagaccttggtttatgtcttggacatcaatgcggatggttcgccgctcaacacagcgcaagtgccccgttctgagcgcaaccatatccatgtccactacctgccagcccgccgtgacccagctgatcacattgcctacggcgccaatgcgttgctcgggcgcatgctgcgtgcggtgaactgggatgcagagcgtgatgttatcaagggtctcactgaccaaatcagcgacagtctggcggccaacccatcggtagatgcattcagcacaagcttgaaagcggcttgggatactttgcacaaaggcagtttctttaccgacccgaaaatcaccttcgtggcctctgaggtcgaagccttgttgaggcatatgtcggtttccttttcgcccgggcacgatgagcagttggttgacttctcacgtctgagtgatggccagaaatccatgctctacctgtccctcgtgctctcgtcacaggccattggtcgcgccgtactggctgaagaggacaaatcattcgatgtcgacaagttgcggccaccagtttttaccttggtggcagtcgaagaaccggagaacagcctttcgccccattacctcgggagaatcgttaattctctgaacttgatgacaggtaatggcgacgcgcaagcgctgattgctactcacgcgccgtcgatgctgcggcgcgttgctcccgaacggatccggtatctgcgtctgaccgaggggcgaacatcgcgcgttacccatatccagttgcccgataccgcggacgaagcacacaagtttgtgcgtgaggctgtgcaagcctttccggaagtctatttctcccgccttgtggttctgggggagggcgatagcgaagaaatcgtgcttcctcgactccttcaggccaaaggtgctcctgttgacgagtcggcagtctcgatagcgccgctgggcgggcgtcacgttaatcacttctggcgattactgtctgccctgaaaattccttacctgacgctgcttgatctggatgtcgcgcgccatcaggccggctggggtcgaatcaaatacgtgaatgatcaattgggtaaatatcggctagatcagcagcttcccaaggattatggcatcccaaagtgggactcgaccgagaatatggttcgggacttcgacaactatcttgaggcgcttgaggatagagatgtgtacttctcgtaccccatggacctcgatttcgcaatgctactcgcctacccggacgcctacggcgtagtgagagaaaagcccgatgagtcaacgatcaaggctgtccttgggaaaagtcaccacgatgcaagtcaatacagcgaggacgaacagaagttgttcggcacatatcaccgcagcttcaagcttggcagcaaaccggcagcgcatattgatgcgctcgccaagctcagtgatgagggcctgctcgcgaacatgcccgaatctctcggacgcttggccgatgccgtgatcgccaaactcgcggagttgcccgagtga

SEQ ID NO: 328185 - DNA, 1551 bp, Pseudomonas aeruginosa
atgcttgcgcagcgtgcagatttccttctacgcacaggagcctgccgctatcccaaacgaattctggctatctcgttcaaggtggacgccagtagcaacctgaaagagcgggtaaagcgccgctgtggctctgagctggcctcgcggtttgacagctacacctttcacgcttttgccaagcgcattatcgaccgcttccggcccgtgctaacgggtgagtacgcgttggatgctgggtacaaaattgctgatcgaaaaccaggaccctcgcggagtctgatcgagtttgccgacctggttccgctggccatccagattcttcagaaatcagaaatggcacgtaatgccatccgccagacctacagcgatgtctttctggatgagttccaggactgcaccaatctgcagtacgagcttctgaaactcgcctttcaagacaccagcattcgccttaccgccgtgggcgataccaaacaaaagatcatgggctgggcgggtgctctggacggtatcttccaaaccttttcagccgattttgcagcgacaccgctgaacatgtaccgcaactttcgttcgaagccgcgcctgctgcgcctgcagaacgaaatcatccgggtgctcgaccctgcgtcagtcatgcccgatgagcagcttgtcggcgatgagggcgaggtattcgcttggcgcttcgaagacagccgtaaggaagctgagtatctagcggacttgattgatggctggataaagaccgaacagctaccgcccgcggaaatcgcgattctcatttccaaacagctcgatctttacgctgaccatctcatggtggcactggaggcgcgcggcattcctttccgcaatgagcagcagatgcaggacatcacggtcgagcccgccgcccgcttgatcgtggactatttatcttgcctctacggccaacgcgagccaaaagcctggattcggctaatgaatcaactggttcctttcgcggatgaggacattcagtcgaatgctcgcaaggatcttgatcgactaatcaagcaacaacggaaagaagcggctattgctgacctggtcgcggagccttcttctggctggtgggagtttgttcgagtcttcttgaagcaaatcagtctcgaaaccctcgtggcgctgtcgccggactatgagtcccatgaacggctcaaagaggtcgtccgaaacaccaggacgcgcatcgaagagttgctcaagctggagccagacttgcctaaagccctggagcgtttttcagacgaccaagcggtacgaattctgaccatccacaagagcaaaggtcttgagttcgattcggtcatcatcatggccgtcgaaaacgaaatcttctttggcaatcaggctgaaaaccgctgcgcatattttgtcggggtttcacgcgccaagaggcgactagttcttacccatgcagatcagagggagcgccctgctggctatacgaaacgttgggatacgcatcgttctgcccaaactgaatattttggctacgccataccgtttttgagccaacagcaatga

SEQ ID NO: 328186 - DNA, 135 bp, Pseudomonas aeruginosa
atggtcgcgccattctcgacgaaggagttcgactggcagggaaatccgaagaacatggaagccgcttccgtcagatacgaagtcatcaacgattacggtggccgcaataccctcgatagggcactcggcaaataa

SEQ ID NO: 328187 - DNA, 2781 bp, Pseudomonas aeruginosa
atgcccaaagtttctcttcataggtgcttgtccgctcccgcttacggtgggcaggtcgccctgttgcgaatggcgatacagggagggatcgccgttcgttccctgcgattcgcctgtctgctggcactgtttccttcgctgtcctcctgccagtcctggtcctccgtcggcgccgccggcgtagccggggcgaaagcgaaggaggccagggcgggagcaccggcgaaacagccgcaggcgcccgcggtggccgttgcgtcaccggccggcgggttggacgcaccgtcgcggcggatcgtcttcgacgcgcagatgctggccctggggccgggcggacgctcgatcgatacgtcgcgtttcgagcgcggcgacgtcatcgagccaggccgctatcgcctcgacctgctgctcaacagccgatggcgcggtgtcgaggaagtcgagctgcgccgccagccggggcgggaaagcgcggtcttctgctacgaccggggcctgctggagcgggcgggcatcgacctggagaagagcgcgcgtggccaggatcgttcctcggctcgcgatcctctgcccgaaggtttgcactgcgacccgctcgagcgctatgtgccgggggcccgggtcaagctcgatatcgccgagcagtcggtctatgtctcggtgcccagctattacctgagcctggattcgtcgaagacctatgtcgatccggcgagctgggacagcggcatttccgccgccttgctcaactacaacagcaatctccacgtcagggaaaaccacggcaggagcgccaccagcggctatgccgggatgaacgccggcttcaatttcgggcgggcgcgcctgcgccacaacggcacggccacctggtcgcgccgcatgggcagccactaccagcgcagcgccacctatgtgcagaccgacctgccggcctggcgtgcgcagttgttgctgggagaaaactccaccagcagcgagttcttcgatgcggtgtccttccgtggcgtgcagctttccagcgatgaccggatgctgccggattcgctgcgctactacgctccggtggtccgtgggaccgccagtaccaatgcgcgggtatcggtctaccagcgcggctacctcatctacgaaaccacggtggcacccggggcgttcgctctcgacgaactgcagaccgccagctatggcggggacctggaagtgcgggtgaccgaagccagcggggaagtccgcagtttcatcgtgccgttcgccaccaccgtgcaactgctgcgccccgggaccacgcgctacagcctgacggccgggcggctcaacgatcccagcctggagcgtcggccgaacatgctgcagggcgtctaccagcgcggcctgggcaacgacgtcaccgcatacgcgggcggggccttcaccggcagctacatgtccggattgatgggcgcggcgctgaacacgccggtgggcggattctccggtgacgtgacgctggcgcgtaccgaggttcccggcgacgaccgccttagcggctccagctaccgtctcgcctacagcaagaacctgccgaacaccggcaccaacttttcgctgctcgcctatcgttactccaccggtggctatctcggcctgcgcgacgcggccttcatgcaggaccgggtagagcgaggcgagccgctggagtcgttctcgcgcttgcgcaaccgtctcgacgccaacatcagccagcaactgggcaacggcggcaacctgtacctgaacggctcctcgcagcgctactggagcggcggcgggcgggcggtcaacttctcggtcggctacagcaaccagtggcgcgacgtcagttactccatttccgcgcaacgcctgcgcagccactacgaaggcttttccagcggtgacaggcgcggcgagaccagcacgctgttcagcctgaacctgtccattccgctgggcggcgcgggacgcgggtcgccgaccctgagcagctacctgacccgcgacagcaacagcggaacccagctcaccagcggggtttccggcatgctgggcaagcgtggcgaggcctcctactcgctgtcggcctcccatgaccgcgacagccggcagacctcgaagagcgccagcctcgactatcgactgccgcaggtcgaactcggctccagcctctcgcagggaccgggctatcggcagttgtcggtcaaggccgcggggggcctggtcgcgcacagcggcgggatcaccgcggcacaaaccctgggcgagacgatcggcctggtccacgcgccaaacgccaggggcgcggctgccggctactcgggaagccggatcgaccgccacggctatgcggtgattcccaacctgctgccctaccagttgaacagcgtcgacctcgaccccaacggcatggccgacgagatcgaactgaggtccagttcgcgcaacgtggcgcccaccgccggagcggtggtgcgcctcgactatccgacgcgggtggcaaggcccttgctggtggatagccggatgcccagcggcgagcccctgccgttcgccgcggaagtgctcgatgcccacagcgggcagccggtgggcgccgtcggccagggcagccgcctggtgctgcgggtcgagcaggatcgcggctcggttcgggtgcgctggggcaacgagccgcagcagcagtgcctggtcgactatgcgctgggcccgcgcgagacgacgcctcccgtcctgcaactggcatgtcgcccggcgtcggccgccgaccgggagcgcacgctgtga

SEQ ID NO: 328188 - DNA, 912 bp, Pseudomonas aeruginosa
atgacatctgtaccagctgcatcagttaagcccgcgcgttccaagctgatgactcagcagaaaatcgataggagaatcaaatctggtcgtgggagcggcgtgaaagaatcctatgagccctggatcaaggtgtgggatatcaaatccaaaggtgtctctcaccttgtgtcaggggtgaaggtacaccgcactcatcacctgatatctaatgccgagcgcgactacctcacagttctggagcacgaaaattccattattgatatccgtgagcagtttcctctgctaacgcaagccgaaacccaagcaattgctaacagcctaaactatcgccatccggtctatccaggaactcaaattccagtagtaatgacgaccgacttcctgatcacatttctcgattcatcgggggaagtgaaagttgctgcgcgctccgtaaaatatcggaaagagtttgaggatgccaatattggtgtgcagaacaggatggcagagaagctagctatcgaggaaaagtattgggcgtccaggcagatagaatggaaacttgtgctgcacgaaaacttgtcaaaagttcgaatagcgaacctcactattctccggacctatgcgagtattcacccatcgttacctaccgaaaaaaacattggtaacttattcggttttttgagtaagtgtgaaaccgatcaagtgccactgaaggctctattggatcaagcttcgaaaaatatctatatagactatatgggtgtaaaaagtcttttccatcatctgctatggaatggccgcttgcagatggacctaacttcaaaggtgatcagcttatctcagccgctacatgtatggattggtcaatactctccggctgttatagctccaatcgaggtgtccgccaatgctaaatctgcgagttaa

SEQ ID NO: 328189 - DNA, 1425 bp, Pseudomonas aeruginosa
atgaccctttatctgcaactcgccgagaccctcggttcgcgcatcgaacagggcctctaccgtccgggcgaccggctgccctcggtgcgggccatgagcatcgagcacggcgtcagcctgagcaccgtgcaacaggcatacaggctgctggaagatcgcgggctggccgaaccgcggccgaagtccggctatttcgtcccggccgcgcgacagatgccgccgctgccggcgatcgcccgcctggcccagcggccggtggaaatctcgcaatgggagcaggtgctggccctggtcagcacggtgccgcgaccggacgtggtccagctcggccgaggcatgccggacatctccagcccttcgctgaaaccgctgacccgcagcctggcccggctcaaccgccacgccgacgcccgtgcgctggcctacgacgggatccacggctcgccgttgctgcgcgaggaagtcgcccgcctgttggtggactccggctgtcgggccaccgccagcgacgtggtgatcaccaccggctgccacgaggccctgtcggtgagcatccgcgcggtgtgcgaaccgggcgacatcgtcgcggtggagtcgccgagcttccatggcgccatgcaatcgctgaaaggcctcggcatgaaggccctggagatccccaccgatccggtcaacggcatcagcctggaagccctcgaactggcgctggaacagtggccgatcaaggccatccaggtgaccccgaactgcaacaacccgctcggctacatcatgcccgagtcgcgcaagcgggcgctgctggccctggcccagcgctacgacgtggcgatcatcgaggacgatgtctatggcgacctggcctacacctatccgcgcccgcgcaccatcaagtcgtacgacgacgatggccgggtgctgctctgcgggtcgttctccaaggtcctggcgccgggcctgcggatcggctggatggtacccgggcgctacgccgaccgcgtgctgcacatgaagtacatcagtaccggcgccagcgccctgcaaccgcaactggcgatcgccgaattcatcggcaacggccactacgagccgcacttgcggcgcatgcgcgcccagtaccagcgcggacgcgacctgatgatcgactgggtggcgcgctatttcccggagggcacccgcgccagccggccccagggcggtttcctgctctgggtcgaactggacgaggcgttcgacaccctgcgcctggacaaggccttgcgcaaccgcggcgtacaagtcgcggtgggctgcatcttctccgcttccggcaagtaccggaactgcctgcggatgaactacgcggcgttgccgaccccggccatcgagcaggcggtcaggcgagtaggggagagcgcttgcgagctgctggagccttgcgaggcctga

SEQ ID NO: 328190 - DNA, 243 bp, Pseudomonas aeruginosa
atggtggtcggcgaggcctggcgcaaggtgggcaactatccggcccttacgctctccggcctggtcgctgtgctgcccgaggtgatcgcccggctgacggctgatccggcagcctcgaaggtggtcgactggaccagatgctggagtggcaactgcgggctgtcggccaagcgcaaggcctcagccaagtcgatgacccggcccagccgaggcattgcctgtcactctgtgacaggtccgtga

SEQ ID NO: 328191 - DNA, 507 bp, Pseudomonas aeruginosa
atggaccggagttacaccacttactacttggaaatgacctcggctgccgcgctgagagcaaagccacagccgcacgatcttcagatcatcgaatgtgaagtgcctcaggcagcattgaatcggtttctctacgaactggttggaacgccctgggaatggggagatctggatgcctggagcgataccgattggcaggcacttgtcgagcaggactgccatcggacctgggtcgcctatcaccgcggggcaatcgctggctactacgaactgtaccggcctgacggctgcaacaccgaaatccgttacttcgggctggcatctcagtttctagggcacggcttcggcggtgcgctgttgagccatgccatcgaatcagcatggcaatggcctggtacaacgcgggtatgggtgcatacctgtacatttgaccatccggctgcacttggaaactatcaggcgcgcggctttcgcattttcaagcaggaggaaacggagctaagccaatga

SEQ ID NO: 328192 - DNA, 300 bp, Pseudomonas aeruginosa
atgatccgtgacaaacagaaagcgttcgtcatcctcgaggggctccgcgcctacgagttctacaaacctgtcgatctccgcgggctcaagggtagctactcgaaggaggagttgctggggaaaatgccggacgacgagttcgagcactatctcaaactactcgagggagagggcttcattcgctccacggaagccgcaccagacggtaagcaggtgttccatttgacctggaaaggccacgacttggccaaggagcttgaggactattacgaaaatgaggatgaagacacagatggctaa

SEQ ID NO: 328193 - DNA, 819 bp, Pseudomonas aeruginosa
atgagcggcaacaacgaactgaaccaactgcaacaacagcgccaggatctcattgaggagcgggagcgtctggaggcagacctaccccgcctggaaaacgcccttgagcaagctcccactggctggcacctgggcaacatggtaggcagtgaagagaagcaagcggctcgcgacgccctgtccaacaccagggctagcattgactcgattgaccataacctccgtcaactcgacatccgcattgcctacgccaaaaagttagctggcgctgatgagcggatcgccctggcgacagagcaagagaaggctgctgcggtacgtatcgccagcatcaccgaaagcctggagcgggtgcgcggccatctggagcagatacagggcaacaccgagcagtcgctccagcaggccaaggacgtcgaggtagcggcagcccaggaaatggccagggccacggcgagcggtgacaagaaggccgccaaagccgcccaggcgaagatagacgcggccggcactgcggcaaaggcggcgcgcgcatcagcagaggccaatgccccactggttgcagctctagaggaggaggctgcgggtctggccgaacaactggccgaggcgcaccaagcagaacaagcggcacaggtggagcacagggacgcgacatgtattcgcctgggtgctgaatgggaccgcgctgctgccgccttggccaagatcggtgcccaactcgtggcgcaaggcatgcgagatcacctgggaggcctgaagctgccgacgtttgcgcctgacacccaggcgataaccctggcggatctgtctacctga

SEQ ID NO: 328194 - DNA, 297 bp, Pseudomonas aeruginosa
atgggcgctgctatcgacttcctccgcgaacgtggcttgaccgccaaggcacaggggaagcgcatcatcgtctcccctgcatcaaagctcaccgatgacgtgcgtaagtacgtcaaagcacaccgcctcgaactgctcgccgaactggccgccaacgatggcatcgagcgtcgggcgcactggcgggtatgcctccctgattgccgtcccttcgtcatggttggcgagccctgcactcatgccgaagcgctggcgcacgcgcaggggatatggcctgacgccgaggtaggaccatga

SEQ ID NO: 328195 - DNA, 1551 bp, Pseudomonas aeruginosa
atgacagctcaagaccgctttgcagaccaatgggccaccgttgaccaagtggctgatgcgctcaagagactggaggaggatgctggcgccctgtacgagaccaccatcctcggccagctcaagaagatgcgcgccaaggaccccgctgcctttgcccggctgcgcgcccaggtcaaggacgccaaggtgctaagcatggccgagttcgatcgcttaaccgcctgcgtggacgacgacgccgggcccgctaacgccagcatcttcgaagaggtggagccgtggccggagccggtggatggtgcagacctgctcgatgacgtgacccatgccctggcccggcacgtgatcgcggacaaggaaacgctgcgggctgccgcgttgtgggctgccttcacctggctggtggacgtggtgcaggtggcgcccatcgccaacatcactgcgccggaaaagcgctgtggcaagtctatcttgctcaccgccctgggcaagttggccaaccgtcccttgcaggtgtcgaacattgcccccgctgcgctgtatcgctccatcgagctgtgggcaccgacactactgatagacgaggtagacgccttcctggccgcccacgaagacgcccgcggcatcctcaatgccggcttcacgcgagacagcgccatcgtcattcgctgcgtcggagacgatcacatgcccaccgcattcaacgtgtggggcgccaaggcgctgtgcggtatcggcaagatcgccgacaccctggccgaccgcagcgtgccattgcgtctgcggcgacgtaccgctggtgaaaacgtggagagcctgcgccactccgaccccgccttgtgggagtcgctgcgttcgcgcctggcccgcttcgcgctcgatagcgccgaggccatcggcaaggcaaggccggcccccatccctggcctgaacgaccgcgccaacgacgcttgggagcctctgctggccattgccgacctagccggcgaccactggccgaagtcggcccgcaacgctgccatcgccctgcacgggctggaaggtgaatctcctagcatcggtgccgagctgctggcagacgtaaaggcggtgttcgaggcgaagagcgccagcaaggtattcagtgccgatctgctcgaggcactggttgccgatgaggaggcgccctgggcgacctggaaccgaggcaagccgatgtcaccccggcaactgtcggccaagctggcggagttcggcatcaagtcgaaggacatccgcatcggctccaccaacaagaaagggtacgaccgtgccgacttctccgacgccttcggacgctacctttcccccgaaccctcccttccatccgcgacagcgcgacacgcctactcccacgcgacctccagagattttaaatccgcgacaccacccctctctgtcgcggataaaaaaacctcgcagcccagtaacgacgcaggctgtcacggtgtcgcggataaaacaccccctcccaggaaagaggtcgagaggccggaaccgatctgggacgagagcgatgcggaggcactgtga

SEQ ID NO: 328196 - DNA, 375 bp, Pseudomonas aeruginosa
atgacccccatcgataagctgctgccacgcctggacaaggtgaaggcggacggcaaaagccgctggaaagcctgctgtccggcccacgacgacaagtcacccagcctgcgcgtcaccgagaccgaggacggtacggtcctgctcaagtgctgggttggctgcacggctgccgagatcgtggcggcggtcggcttgcagatggctgacctgttcccgggcgagaagcgccaacgcaccggccccagccgtgaagccatccagcatgagcgagcggtgtacctgatcggcaagaacctactcgagcaaggcaaggaaatagccgccgaagacctggcgcgcttccacctggcaaagcagcggttgggggtcaaatga

SEQ ID NO: 328197 - DNA, 291 bp, Pseudomonas aeruginosa
atgaccactgtccagcagcgccgcgaggcgctgacgggatcggcttgcccggagaacgccgcccagccggtcgaactgttctacgtccattaccccgaggtcagccgtgcgctcctcggcccgttcctctcccacgctgatgccgagtgtggtcggcacctgatgcgcagcgctggcgcggttgtcaggtccgcgctggtcgatgaggtgagcgagtccactcgctggcatgcatggaacaacggtgaggtctgccgcaccttctgccagaggcaagggggtggtcaatga

SEQ ID NO: 328198 - DNA, 306 bp, Pseudomonas aeruginosa
gtgattcggtactactgcatccaggcccgcgacaagacagcattcccctacggcaaggccggcccgatccgcaccctggttgaggcaagccgggccctgcgcatgctgcggcgcgagcaccccggccaggcgctggaaatctacgagtgcgtctggttcctcggcgtgggcgagttggagtgggacgagcgattcgcccccaagcgaggtaagcgcaaagccccagcgcccaggcgcgcatctagggcggcggttcagactctcgccctcttccccggcctgaccagcaccgcccaggaggcctaa

SEQ ID NO: 328199 - DNA, 270 bp, Pseudomonas aeruginosa
atgagcgctcatgacaagttggccatggttgccgaggaagccatcgagcaggtccgctatagccgggagcaggcccgctggctggatgcggtggtcaagtcgattcacgacgtgctggagggtggccgggctgatgtgggagtgaggatctcccgggctcaggacctggccagcttggccagctacctggccttcgacttgcacaactactccgacgttcgggtctctgatctgcaggctcagctcgacgctgcgggaggtgcccagtga

SEQ ID NO: 328200 - DNA, 234 bp, Pseudomonas aeruginosa
atgcgtaacctggtgacgctctccgactccatcggcggcaacctgaccggcgcgggcttcgccctggaaaccatcgccaacctgcttggtgccgacggttccgagcacttcctcaacaaggaccacatcaacggtctggtccatgcggtcctgacgatctcggtctacgtcaaagacgctggttacagcctgtgtgaggcagccgagattgcccaggaagggggtgcccaatga

SEQ ID NO: 328201 - DNA, 249 bp, Pseudomonas aeruginosa
atgaccacccgtaatccgtccaaagcacgcgtcgccgcccaccgggcaatggcccttgctgccctgcgcagcaattcctcccttgccgttcgactcaaccgctacaaccaccaccgcgctatccagcgctccctcgaagcccagtccaacgcctgcgcctggctggagaacctagagggcgatgcctgggccgatgcctgcgaagagatcgctgctgctctgaagaccaaggaggtgtcccatgcgtaa

SEQ ID NO: 328202 - DNA, 225 bp, Pseudomonas aeruginosa
atggcaagcaccaccagcagtacccaacccatccgccgctttatcaagcgccaggccgtggaagagatcaccggcctttcgtgctccgagatatatcgccgtatcgcagccgggactttccccgcacaagtcatccttggtccgaagtccgttgtttggatcgagtccgaagttatggactggtgtgacgctcgcgtagctgaaagccgaggggaggtcgcatga

SEQ ID NO: 328203 - DNA, 903 bp, Pseudomonas aeruginosa
ttggaaaaggcatatcgatttttcccgtggttgtcgattgagcaagcttctaggtggctaaggcagttaacaggaactgagttggatatatttgagactcttcagctttgtgagtttggggagtgtcctgtctacctcaattgtgaaggttggcgcggaactttaataaactatgaggagagtgattccataagtgttgctggggtggggtattctcgcgtgtgcaatccgtctcagctttataatgacagttcggtcgagttgattggcgatatttctgatttgtcttgtgttagaactcttcatgggtgtcgctggtgcttggaagagtacgatgaatcgagagggcccgaggttaggcccgcagacatcgagacgttggcgcgtaagatgaacgcttcgcttcccctcatgtcgaaccacccagtggcccggtcatccgaggatctaattagaagtcgtgttgagtcagttggcctaaatactattgctcgtgtagttggtgtggatgcgcctgtactgtatggaagatacggaaatgatatagctctaattgggagattgcttgaacttttaaagttgagggtggtgggtgaggagcttgtggtcactggtccagtggactctcctgtaacgggcggagaggacgtccccttagctggcagttcttctgaaccaggaattgcctttccctatgccaccagagagctcaaggccatgcacgctgctgctatgaagtactgggcagactatacgccagataagaggcagccgacccagaaggagatcgggattgaaattggagagttattagatctttcgcttcagtcaaataatgagccggcgcgtaaagcaatagtattggcatcagctatcaagcccgactcgatatcgggcgattga

SEQ ID NO: 328204 - DNA, 702 bp, Pseudomonas aeruginosa
atgccaacatatccatcgatctatcgttttcgtgttttagctgcggctgtgatggcgagcgtatcgatttatctattctcagcttcgttgggcatggatgttttaaaaagttatgaggtgttggcagatatctatcctgagaatatgaatgactatgcttcaagactgaccgctgaagagaaatttcaggatgagctgctccggcagcttaccgataagatctatctggagcggtattcgatttgtgcgcttattttggcgctcgctatattcttcctgccatctccggtagtcgtgaggagaagtcgtgtgcttttggtttttctctatttggcgactccagcttccattgtgctttcagaagttttagcaacctctttgagtctggatagaatgctgtatccaacgtggagggacaatatagtagtttcctggtttatctcttgcgcggtcgcctttgccgtctgttttatgctcctgccgttgctgattctaggttggcggagaacctctggaggactgatatttcgcagtaagaccacacaggtgttgagtggaattcttcttgcggtttggctggtaggatttgcctgctcttttttcagtggggattatgaggcaatgcttcccctatggctggggttcgtatttttttactatgtactttcctccagcgatgagaaaacacctgtcaataaatag

SEQ ID NO: 328205 - DNA, 921 bp, Pseudomonas aeruginosa
atggacatcaagcaactgaaattcctctgcgccctcgacgaaacccgccacttcggccaggccgccgcacgctgccacgtcacccagccgaccctgtccatgcgcctgcgcagcctggaggaagaactcggcctggaactggtgcgacgcagccagcgcttcgaaggcttcaccgaggccggcgagcgcgtactggcctgggcacgcagcctgctggcggcccaggaagggctgtacgcggaagccgccgcttgccgcgggcaactggtcgggaccctgcgcctgggtgtggtgccgctggccagcttcgacccgatgcgcctggtccagcacatggccgggcgccacccggagttgcgtttccagctctattccctgagttcggaacaagtactcgaaggcctggcgcgcaaccagttcgatctcggcgtctcttatctggaccgtctggaccgcagccatttcgagggcatcgaactggcggagacccgcatgggcctgctccatcaccccagccatttcccgctcgacgccgcgctgctgaactgggatgcgctggctggcctgccgctgggcctgctctcggcgggcatgcacttccgccaatccatcgaccacaacttccgcagccgcgggctgagccccatcgcgcgcctggaaaccgactcggtgcagcaactgctgcaggcggtgcagcgtggcttgtgctgcgcgatcatgccgttgggcagcgaagtcgacgacgagttgcgcctggtccccatcgaggacgcccataccctggcagcgctcggcctgatcattcgcagcggacagccgcgctcggcgctggccgaagcctgcttcgaggaggcccggacctggctggcgcccgccggcttgatagaccctgtcgatcagggtatcggcacaaccgattag

SEQ ID NO: 328206 - DNA, 603 bp, Pseudomonas aeruginosa
atgcatatcgaagacgccgttcggagtcgccgtgccatcaagggctacgactcatccttcagcctgactcgcgaagagaaggaccatctcctggacctggcgctgcatgcgccttccgccttcaacctgcaacacgtgcggctggtcgaggtcagcgatctgcaattgcgcacgcagttgcgtgaagtggcctgggaccaggcgcaggtcaccgacgcggcgatgctggtggtggtgtgcgcccagctcgacagttgggagcgcaacgcgcagcgggtctgggacggtgctcccgaggcggtacaggcgttcatggcaggcgccatcgacacctactaccgcggcaagccccaggtacagcgcgacgaagccatgcgcagttgcggcctgctggcgcagaccctgatgctggtcgcccgcggccagggcctggattcgtgtccgatggatggtttcgacttcgatgccgtggcccggctgatcaacctgccggacaaccatgtgatcggcctgatggtcgcggtcgggaaaaaggccgttgaaccctggccgcgcagcggcaagctgccgcgggaagaactggtcatccgcgaccgcttctga

SEQ ID NO: 328207 - DNA, 147 bp, Pseudomonas aeruginosa
atggccccggaaaaccaggggttcgccgctttccgtggtccagttgccggcgcagccgtcctcgacgaacaggctgtgccgctgcaaccgttcggcccccttcatgcgcatgtagtgctcgaccgtggcacggttgcgccgccgtaa

SEQ ID NO: 328208 - DNA, 300 bp, Pseudomonas aeruginosa
atgttcaccgtgcgactgttgagggcctcgatgttggcgcaggaggcgctgatcttctcggaaagctcgttcatcgcgcggatggtctgctcgaccacctgcttgccgtcttcggcctggtggttggcgtcggacgcatggtgcgaggcatcggcggcgttgcgggcgatttcctgggcggcggcaccgagttcgttgatcgctgcggcgacgctgttggtgcggttggactgctcgtcggagttggccatcgaggagttcgaggcgttcaccaccagttgcgccacgtcgtgcagttga

SEQ ID NO: 328209 - DNA, 1173 bp, Pseudomonas aeruginosa
atggctacctcctatagcgcgcgcagtcgggccatcgagcctttccatgtcatggccctgctggcgcgggccaacgagttgcaggccgccggccacgatgtgatccacctggagatcggcgagccggacttcaccacggccgagccgatcgtcgaggccgggcgcgccgccctggccgccgggcatacccgctacaccgccgcccgcggcctgccggcgctgcgcgaggcgatcgcgaaattctacggcgaacgctacggggtcgacctcgacccgcagcgcgtgctggtcactccgggcggctccggcgccctgctgctggccagcagcttgctggtcgaccccggccgccactggttgctcgccgacccgggctacccgtgcaacaggcatttcctgcgcctggtggaaggcgccgcgcaactggtgccggtggggccggacagccgttaccaactgacgccggatctcatcgagcgacactgggattcagacagtgtaggcgctctggtggcgacgccggcgaatccgaccgggaccctgctcgatcgcgacgaactggccggcctgtcgggcgccttgaaggcccgcggcgggcacctggtggtggacgagatctatcacggcctgacctatggcgtggacgccgcctcggtgctggaagtcgacgacgacgctttcgtcctgaatagtttttccaagtatttcggcatgaccggctggcgcctgggctggctggtggcgccggcagcggcggtgcctgagctggagaagctggcgcagaacctctacatcagcgcgccgagcatggcccagcaggccgcgctggcctgtttcgagccgaccaccatcgccattctcgaagagcgtcgcgaagagttcgcccgccgtcgcgacttcctcctgccggccctgcgcgagctgggtttcgggatcgccgtggagccggaaggcgccttctatctctacgccgatatcagtgcgttcggcggcgatgcctacgccttctgcaagcacttcatcgagaccgagcacgtggccttcaccccggggctggatttcggccgccaccaggccggccaccacgtgcgtttcgcctatacccagaacctgccgcgcctgcaggaagcggtggagcggatcgcccgcggcctgaagaactggcggccctga

SEQ ID NO: 328210 - DNA, 1491 bp, Pseudomonas aeruginosa
atgaacagtggcctctcgcgcctcgggatcgctttgctggccgccatgttcgcgccggcattgctcgccgcggacctggagaaactcgacgtggcggcactgcctggcgaccgggtcgagctaaagctgcagttcgacgagcccgtcgccgcgccgcgtggctataccatcgagcagccggcgcgaatcgccctcgatctgccgggggtgcagaacaaactcggcaccaagaatcgcgagctgagcgtgggcaatacgcgcagcgtcacggtggtcgaggcgaaggatcgcacacggttgatcatcaacctgaccacgctgtcgtcctacaccacccgggtggaaggcaacaacctcttcgtggtggtcggcaattcgccggccggcgccagcgtcgcttccgccgctccggtcaaggcaagcccggctccggccagctatgcccagccgatcaagcccaagccgtacgtgccggcgggtcgtgccatccgcaacatcgatttccagcgtggcgaaaagggcgagggcaacgtggtcatcgacctgtccgacccgaccttgagcccggatattcaagaacagggcggcaagatccgcctggacttcgccaagacccagctgccggatgcactgcgggttcgcctggacgtcaaggacttcgccacgccggtgcagttcgtcaacgccagcgcgcaatccgaccgtaccagcatcaccatcgaaccgagcgggctctacgactatctggtctaccagaccgacaatcgcctgaccgtcagcatcaagccgatgaccacggaagacgccgagcggcgcaagaaggacaatttcgcctataccggtgagaaactgtcgctgaacttccaggacatcgacgtgcgttcggtactgcagctgatcgccgacttcaccgacctgaacctggtggcctcggataccgtgcagggcaatatcaccctgcgcctgcagaacgtgccgtgggaccaggcgctggacctggtgctgaagaccaagggcctggacaagcgcaagctcggcaacgtgctgctggtggccccggccgacgagatcgccgcccgcgagcgccaggagctggaagcgcagaagcagatcgccgagttggcgccactgcgtcgggaactgatccaggtgaactacgccaaggccgcggacatcgccaagctgttccagtcggtgaccagcgatggtggccaggaaggcaaggaaggcgggcgcggctcgatcaccgtcgacgaccgcaccaacagcatcatcgcctatcagccccaggagcgactggacgaactgcggcggatcgtttcgcagctggatattccggtgcgccaggtgatgatcgaggcacgcatcgtcgaggccaagtcggttacgacaagagcctcggtgtgcgctggggtggcgcttatcacaagggcaactggaacggctacggcaaggacggcaatatcgggatcaaggacgaggacggcatga

SEQ ID NO: 328211 - DNA, 525 bp, Pseudomonas aeruginosa
atgagagcccgcctgattctgagcagcctgctgctcgccagcctggccggatgcggcggcggttccgatttcgccgatctgcagtcctacatggacgaggttcgcgcccgacccaagggtaccatcgagccgttgccgaagttccagccgtacgaggccttcacctatagcgccgcgtcgctacgcagcccgttccagccgccggtgaagatcgacctgaccgtgcggcagaagggcaacaaggtgatcaagcccgatgagacgcgggtcaagcagttcctggaaggcttcaacatcgagaccttcgagatggtcggcaccctgtccaacgcccagggcaccttcgccctggtgaagggcgcgggtggcgtgcaccgggtgagggtcggggactacctggggcgcaacgacggcaaggtcgtcggcatcagcgaaggaaaaatagacgtgatcgaaatcgttcctgacggagaggggaactggctggagcgtccgcgcagcctgactctcaaggaacgctcctga

SEQ ID NO: 328212 - DNA, 624 bp, Pseudomonas aeruginosa
atgagtctggccagttccctggaaagtctgcgcaagatcgacgtaaacgacctcgatctgaacaacatcggttcctggccggcggcggtcaaggtcatcgtctgcgtgctgctgaccgcggcggtcctggcgctggggtacaacttccatctgagcgacatgcaggctcagctcgaacagcaggccgcggaagaggagacgctcaagcagcagttctccaccaaggccttccaggccgcgaacctggaagcctacaaggcacagatgaaggagatggaagagtccttcggcgccttgctgcggcagttgcccagcgacaccgaggtacccgggctgctcgaggacatcactcgtaccggcctgggcagcggccttgagttcgaggaaatcaagctgcttcccgaggttgcccagcagttctacatcgagctgccgatccagatcagcgtggtcggcggctaccacgacctggcgaccttcgtcagcggcgtgtccagcctgccgcggatcgtcaccctgcatgacttcgagatcaagccggtcgcgcccggcagcacgtccaagctgcgcatgagcatcctggccaagacctatcgctacaacgacaaggggctgaagaaatga

SEQ ID NO: 328213 - DNA, 1065 bp, Pseudomonas aeruginosa
gtgctagggctcataaagaagaaagcgaacaccttgctggggatcgacatcagctcgacctcggtaaagctccttgagttgagccgctccggaggccgctacaaagtggaggcctatgccgtcgagccgcttccgccgaatgcagtcgtggaaaagaacatcgtcgagctggaaggggtcggccaggcgttgtcacgggtgctggtcaaggcgaaaaccaacctgaagtcggccgtggtcgccgtcgccggttcggcggtgatcaccaagaccatcgagatggaggccgggctttccgaggatgaactggaaaaccagctgaagatcgaggccgaccagtacatcccctatccgctggaggaagtcgccatcgacttcgaggtccagggactctccgcgcgcaatcccgagcgcgtggacgtactcctggccgcctgtcggaaagagaacgtcgaggttcgcgaagcggccctggcgctggccggcctgaccgccaaggtggtcgacgtcgaggcttacgcgctggagcgctcctatgcgctgctgagcagccagttgggtgccgacaccgaccagttgaccgtggcggtagtggacatcggcgcgaccatgaccaccctgagcgtcctgcacaacggacgcaccatctatacccgcgaacagctgttcggcggtcgccagctcaccgaggagatccagcggcgttacggactctcggtggaggaagccggtctcgccaagaagcagggtggtcttccggatgactacgacagcgaagttctgcgtccgttcaaggacgccgtggtgcagcaggtttcccgctcgctgcagttcttcttcgccgccggacagttcaacgacgtcgactacatcgtcctggcgggcggtacggcgtctatccaggatctcgatcggttgatccagcagaagatcggcaccccgaccctggtcgccaacccgttcgccgacatggcgctgaacggcaaggtgaatgccggcgccctggccagcgacgctccggcgttgatgatcgcctgcggcctggcgttgaggagtttcgactga

SEQ ID NO: 328214 - DNA, 1704 bp, Pseudomonas aeruginosa
atgtgtataagagacagcgtcgaggacgctgccgatctgctcgctgtcgttcttcaggcgcgccatggcttcgctggaaacgtccatttcggtagccaggcgctcgatgcgggtcaccgcctggtcgaccaccgcgtcgccctggcgcgcctcttcatcggcctggcgagcggcctgggaggccagctcggcgttgcgcgcgacgtcctgcacggtggcggccatctcgtgcatggcggtggcgacctggtcggtctccactttctggctgttgaccccggcgcgggtctgctcggtgaccgccgagagttcctcggcggagctggccaactggctgacgccgtcgccgatccgcccgaccagctcgcgcaggctgtcacccatgcgctgcatgactcgctgcaactggcccagttcgtcgcggcgctggagggtcaggggattctgcggacgcttgccgaggtcgccggcggcgatggcctcggcctgcgcgagggcttcgtccagcggccggacgatctgccggttgatcgcccagccggcgacgcagccgaaggccagggccagcgcggcgatcagccagaggctggtgcggtcgcggctggcggtgctctcgcgcaattggcgaccggcttcggtgagggtccggccggcccgggccatatcctgggtgctgctttgcatcgcttgctgcgcctggcgcgtgcggacgacgccggcacggaactgctcgatgccgccacgatagccctggaggctgcccatggcctgttccagcgccgcatcggcctcgccgggcaattggcctcgcagcgtcgtgccggcctggcggagggcgtcgaacgcggcgaacgcggcctgctcggccttgtcgctgcgctcgaagacgtagccgcgcacctggtaacgcaccatgagcaactgttggtgcaggtcggccaccgcacggctgcgttgcaaggcctgcgggtcgccggcctgctgcgcgaggctggcgtccatcagttcctcgaggcgggcgaagctgtccagcgcctgctgtgcagtgcccaccagcacaccacgggcggcgctgcgttgctgatcggctgcggtgaggtcgtcgaaggccttgcggtaggcttcgatggcttcggcctggtgggccagggcggccgggtcaagctcgctgtcgcgcagcgcctgcaggcgctggagcatcccggccagggtctggcggacctgctcggcctggcgcgggtcgctgccggcttcgaatgccaggcggccttgttcggcttgctgggcctgttccatcaggctggcgacttcggcgagctgctcgctgagggcggtctggtgcgtgagggtgcggttgctgctgatcaccaccagcagaagcagcgcgaggaggacaccgaaaccgaccatcagcttgcggctgacgctcagcttggccagttggagaacccaccaatcgtacatcgtcattactccaggcagtgcgacaccctgggttggcagccccatggcgtggcggaacaggtaatggctcagcgtcgtcgcgtccggcgtgcgggcgcggagggccggtacgtggccggcgggcgaggtcttatggttgtcgtgcggagccctgcgcgacagaggatgtcggccgggcgaggaaaaccttcagtcttttaccggagttttttcagaacaaccgcgcaagcaaggcgctga

SEQ ID NO: 328215 - DNA, 447 bp, Pseudomonas aeruginosa
atgccagcagcttttacccggttcgcaccaggctggcgaacccttggcctggccgtggcgctgccggcgtccctggcggtgttcagcccggtcaccttcgccgccgacgtggtggtcgtcaccgacggccaccacccggtcaagaccatgggcggcgaacggctgatcgagctggatgaagcgccgcgcatcgaggccgagctttcggcgaatctgcccaccgaccccgaccaggcgacagccctggtcaagcgtcggctgacccagggaggcactgaccttcagcggcgcatcgcgacggcctaccagggcgtgacggacgcatggagcctgggcatcaccgccgtcccggccgtcgtggtggaccagcgctatgtggtctatggcgagccggacgtggcccgcgccatcgcgcggatcgaacagcaccggaggaccgaaccgtga

SEQ ID NO: 328216 - DNA, 360 bp, Pseudomonas aeruginosa
atgagcgcaatgcgcatgacctggcgccccttgcgctggctgttcagccggcgcgcggcgaaagcactgctgtgggcggtggtgatcgtcgccgctgcggtgggggccaacgtcgccggcatctacctggtcgggagcgtggccggctgggagcggtggctcgcggccgcatcgggctacttcttcgtgtggcggttgtgcctgtacggggcgacggcctatggctgggtctggatgcggcgccggctgctggtacgtgaggacgacgcccaggcgcggcgccgcctggtgcgcaccgaggtcgcgggcgtcgtcgccatcgtggcgctggaagccagcctgctgatgcaggccggttga

SEQ ID NO: 328217 - DNA, 378 bp, Pseudomonas aeruginosa
atgaacaccacgacacgcatcagcaccgcagaacgcctcggccgcaccttgggtcgcggatggcgtgcctacgtgcgcggcgaacgccgggcatcgagttggttggtgtccaaggggatgccggcggccggtgccaccgcgttcgtgtgggtggtcaagctggttgcgctcggggtgctgctgtacaccaccttctggctggcggtgttgctactgctgggcgttgcggcggcatggttggctggcaattcggctagggatgatgaccgctgggcgcaacaggatgaactgcgcaatggcgaggcgggctttggcctgtattcttccaatggccagcggctcgaccctcacgacccgaacgatccgttcgatgactga

SEQ ID NO: 328218 - DNA, 459 bp, Pseudomonas aeruginosa
atgcaacggcatggctggacgctgctcttccacgactgcgtgatcgagcagttgcagaaactgcatgcggccgcgaggcgcgcgcaggagaatgacccggcgggcttcgagtccaatgccaacgtcaagctcttccgggccctgagccagttgatgttggatgtggtgccaggcgatccggcacgcgacgagtaccgccagggcaacaccttgggacctgcccaccgccactggcgaagggccaagatcggacggcggttccggctgttcttccggtacgactcgaaggcgaaggtcattgtgtacgcctgggtcaacgatgaacagaccctgcggtcttcgggtagcaaatcggacccgtatgtcgtgttcgagaagatgctcggacgcgggaacccaccagacgactggcacgcgctgatacaggcaagcaagcaggattggagcaaactggaatag

SEQ ID NO: 328219 - DNA, 318 bp, Pseudomonas aeruginosa
atgcctgccatccacgaagtcgccacgctgacctctaaaggccagatcacgctgcccaagcccatccggcaggcgctcggcgtcgatgccggcggcaagctcgcgttcgatctgcggggcagcgaagtcgtcgtcacccgtgttgatgccgagcacgaggaccccgccattggcgcgtttctgagcctgctggcccgcgacatcgaagctggccggaacgtccggggcctgcccgaggatctggcgcgcgccatgctggagcatgctggccacggtgtgaacctggacgaggagatcgacgggaaagtggaactctga

SEQ ID NO: 328220 - DNA, 255 bp, Pseudomonas aeruginosa
ttgctgcagtacatgatccacgccgagacgatgatgaaacaacgatctgtacgaacagccaccccgacgacggtggtcgccaagccttttgccacggaacgtgtgccaatggttggcgacgtcgccagcctcggcggcgtaaccgtgtccaacgttcgtttctatgaagcagagaggttgatccatgctacgcgcacggcaggcaaccagtgcctctatgggcccgtatctagcacctatgccagtttcaagtag

SEQ ID NO: 328221 - DNA, 1530 bp, Pseudomonas aeruginosa
atgcgattgccgcgatgcgcggcctgcgctcgttcatggtcgagcttcctcctgaacggatccaacggtccgggcgccatcgtgcagcaggccggcgacaccctggcgcgcattcccggcgtcggtgaggtcaatgttttcggcggcggcgactacgccatgcgggcgtggctcaaccccgaggccatcgcctcgcgaggcctgacggccggggacgtgatcgcagcgatgcgcgagcagaacgtacaggtctcggcgggccaggtcggcgccgaacccatgccgaacagcgacttcctgagcctgatcaatgcgcagggcaggctgaccacggtcgaggagttcggcaacatcgtgctcaagaccggcgacaacggccagatcgtgaagctgtccgatgtcgcccgcctcgaactcggcgcgggcgactacacgctgcgcgccaagctggaccagaacagcgccgtcgtgggcatgggcgtcttccaggcaccgggggccaacgcgctggacatccgtgaccaggtgatcgccaccatggacgcgatgcagaagaccttcccgccgggaatcaagtacgaagcggtgtatgacaccacggtgttcgtgcgcgaatccatcaactctgtggtcgccacgctgctggaggccgtggccctggtggtgctggtggtgatcctgttcctgcagacctggcgcgcctccatcatcccgctgatcgcagtgccggtgtccatcgtgggtacgttcgcggtcctgcacctgctcgggttctcgatcaacacgctcaccttgttcggactggtgctggctatcggcatcgtggtcgacgacgccatcgtggtggtggagaacgtggagcgccacatcgaggccggcgcgcagccattggaagcggcgcacctggccatgcgggaggtgtcgggcccgatcatcgccatcaccttggtgctgtgcgcggtgttcgtgcccatggcattcctcgacggcgtcaccggcgagttctacaagcagttcgcggtcaccatcgccatctcggtggcgatctctggcctgaactccctgacgctgtccccggcgctggccggccggctgctgcaggcccatggcgcccccaaggatgcactgtctcgcggcattgaccgggcatttggatggctgttccgcccgttcaaccgcttcttcaaccgcagctccaacaagtacgagcgcggggtctcgcgcgtgctcggtcggcgcggggcggtgttcgtggtctatgcgctactgctgctgggcacgggtctgatgttcaaggccgtgcccggcggcttcattccgacccaggacaagatgtacctgatcgcgggcgtgaagctgcccgaaggctcctccatcgggcgcaccgatgcgctgctgagcaaggtcatcgacgtcgcactggaaaccgacggcgttgccagcgcggtggcattccccggcctgaatgccctgcagatgaccaataggggtcgtctcagaaaacggaaaataaagcacgctaaggcatag

SEQ ID NO: 328222 - DNA, 459 bp, Pseudomonas aeruginosa
atgaccgccttgcattccgatcccaccatcgccgcacgacagcgctggatgggcgtgctcgcccgcgcccgtcgcgaggagctggacgcccatgcggacgccctgcgcgatgccgactatcacctgctgcgcgccgccgagaccggcatgaccctggtgcgcggacgcatgggtggcaccggcagcccgttcaacctcggcgagatgaccgtgacccgctgcgtggtgcggctcgctgacggacgcaccggctacagctatgtcgccgggcgcgacaagcgccacgccgaactggccgccctggccgacgcgcacctgcagggcgccgatgcggcggcctggcaggcgcgcctgatcgaaccgctggcccgtacccaggccgagcgccgtgccgcccaggaggcggaaatcgccactaccaaggtggagttcttcaccctggtccgaggagaagattga

SEQ ID NO: 328223 - DNA, 723 bp, Pseudomonas aeruginosa
gtgcgccctttccaaaccatgcacttgtctagacaaagcgaaccgctgtaccgcgaactggccgaacggctgcgccaggaactgctggcctaccgccccggcgactacctgcccggcgagatccagctggcccagcgcttcgcggtgaaccgccataccctgcgccgggcgctcgacgaactggtgctcgaaggccgcgtgctgcggcgccagggcaagggcacccaggtcctggaggcgccgacgatctacccgatgggcgccgccaacgcctacaccgagtcgctctcggcccagggccaccgggtcgaggctcggctgctggaggcgcgccagcgtccggccggcgccgccgaggccacccacctggggatcggcgagggcgggcgggtgctggaactgaccaccctgcgttacctcgacggccagccggtgagcctgatccgccattgttacgccgtttcccgcagcgagctgctcgccgactaccagggcggttcgctgcgtcgctacctggccgacaaaggcctgccgctgacccgcacctacagcctgatcggtgcgcgcctgcccaaccgcgaggaggcggcgcgcctgctgatgccccgccatgcgccgttgctcaccgtcctcaccctgtcccgcgaccgtaccggccaaccggtggaactggcccagtcgatcagccgcgccgatcgcttccagtaccaggtcgccccctag

SEQ ID NO: 328224 - DNA, 405 bp, Pseudomonas aeruginosa
gtggtcgccgacgaggtccgcaccctggcgcagcgcaccgccgagtccatcgccgagatccaccagatcatcgataccgtgcagagcggcgcggtgaatgccgcgcgcgccatcgaaagcgggcagtcgcgcagcgaggccggtgcagagcaggttgccaacgccggcgccatgctgcgccagatcaccgcctcggtcgaatcgatccgcgacatgaaccgccagatcgctaccgccgccgaggaacagaccgccgtggccgaggacatttcccgcaacctcacggaaatcgcctcgatcgcctccagcaaccaggaacaggtggagcagaccgaggccgccagccgcgatctccacagcctctccgcgcaactgggcgatgccctgcaacgcctgcgggcctga

SEQ ID NO: 328225 - DNA, 513 bp, Pseudomonas aeruginosa; identical to SEQ ID NO: 320574

SEQ ID NO: 328226 - DNA, 828 bp, Pseudomonas aeruginosa
atggtgcatgaccttctccgagatcgtgcggatctagaggcgcgttggaacccttccgcctacatgcagttcgcccgattgcgccagcggccggtggtcgagttgctggaccatatcgagctgtgctgtccggaacggatctacgatcttggctgcggaaccggcatcgccaccgaattgctcgcccgccgctggccgctggccgaactgcacggcgtggacagctccgtggagatgctcgaggaggccgcgcgcttgccgatcaaggccagttgggaacgcgccaacctgcgccactggtgcgccgagcgccctgccagcctgctgttcgcagcggcggtactgcactttctcgaagatcacggcaagctgctgccacgcctgctggggcaactggctccgggaggctgcctggcggcgcacatgccgaactggcgcgatgcttcctggtatcgcctgatgctcgatgcgctggacagtgcgggccccggcggtgcatcgctgggcagccccgcgttgcgctataggctgcatcggcgcaatgtgctgtcgctggacaactactaccggctactggcaccgctgacggcggagctggacatctgggagaccgagtacctgcaagtggtggacggcaacgacccgatcttcgattggatcaaggtctccgccttgcgtccggtgctcggcgaactggacgaggaggcgcgtcggcgcttcctcgaccgttacctggaactgctgcaccgtcactatccacgggaactggatggacgaacgctgttcccgttccgccgagtattcatcgtcgccagtctcggccgctga

SEQ ID NO: 328227 - DNA, 591 bp, Pseudomonas aeruginosa
atgaaaaacattctcctgctcaacggcggaaagcgtttcgcacattccgacggtcgcctcaaccagaccctgcacgaaaccgccctggcccatctggaccgccgtggcttcgacctgcgccagaccttcatcgacggcggctatgacatcccggcggaggtggacaagttcctctgggccgacgtggtgatctaccagatgcccggctggtggatgggcgccccgtggacggtgaagcgctacatcgacgaagtcttcacggccggtcatggcagcctctatgccaacgacggtcgtacccgctccgacagcacgcagaaatatggcagcggcggtctggtgcagggcaagcgctacatgatctcggcgacctggaatgcaccacggcaggcgttcgacgatccgagcgacttcttcgaagggaaaggcgtggatgcggtgtatttccccttccacaaggccaaccagttcctcggcatgtccggcctgccgacgttcctcgcggtggatgtgatgaagcgcccggacgtcccggctgccgtcgctgcctaccaggcgcacctggacagggtgttcgggcgcgccggctga

SEQ ID NO: 328228 - DNA, 1875 bp, Pseudomonas aeruginosa
atgattttggctaagggtgttagctattatcaacaagaagcactgagaaaggctcgtgaaggtcacacgcacctgcctatagcagtcaccgctacacggctaggggacgggacatacaaagtcttaagttacctcgcggatgacgtttggcgattcccaaacgcgatttttccacctgggactgctgaccacgataaatgcattcggttcggtaagattccagagcgttggcgctcagttctgaaaatagttatgcttgaatactatttaaacggcatagagggccgggtgcgaccagtcggatcttcgttaatttcttttttcaaaaacgtatcattatttttgaagtttgctggtgcttatgtcgagtgcttgtctgaaatttcagaatttctgtgtatgcagtatgttaattatttaaaaaatagtagcagtagatctggtaataagttttctaagtcctatctttgtacgcgattgagctcggtgcacacactgcatctgctcagtaaagtcactactactcccatggtgcacccttggcctgaaagtagcgcgactgagttgtcaggcgcaaatcgtgcttactgggcccaatcaaagaccttgccaattccagataacaagctcgcggaaatttttcgtgcggctgtatcacgtctagagcgcgcagacgagacattagcgcttgcggaaatggtttccgaatggcaagcccaatattcctattctggcactgtaaacgcaaaacttgcggctacgggataccggggtggcattttagggttgagacttgagaaaaatctcctgctagatgcctgcagtatcgtcattcttctaacgagcggtataagagtttcagagctcatgagcttaaaagtaggcgctcactacgtacgtgatggggaagatggtactaagttttactggatgtctggagtatccacaaagaccaaagagggtaaggtagattggctagtcacaaagcttacccatgaagcgctagatgttgcgggaaaggtcaccgcagagattcgtgccgagctaaatgatagatacagtttggctaagtcggcaagtaatctgatagagatgcatgattatgaagcgcatctcgattctttgttccttgggtggggagggcatgcacataaactccaagtttttgctgcacaaaccattagggcaagattaaagcggtttatgctggctcataatattgactgggaggtcgcaccacaccaatttagaaggacgttcgctcgatatgtggctcgcagtcaactcggtgatgttcgttatcttcgtgatcatttcaaacattggacgctggatatgactgcgatatatgcagaggatcaagttagagataaagagctgtttgatgaaatctatgttgcaatgcgtcacgaaaagatgctggtgcttgaaagtgtttttgaagaagatgcattggtttctggtggtttggcagagaccattcgtatttttcgatcctctgatgaggcgattcggacgtacaaaagccgccgtgaaatggttcagtttgtatcggaggttgtgcatctgagaagtactggtattgcatggtgtactgcagatagtacgggctgctccggtggcagtgtattggataaaactcgatgcggtgattgctcgaaaagtcttatcgatgaatcgcggctgccacattgggtaggcatatatgctcaaatgttggagcttaaagctatcgctaatgactgtggtccaggtgcgggtgcacgaattgacagcgatattcgacggtgtgaagtcgtccttcaagagcttggagctgatattgaggagcttaagctcggtgttttacttgaaggggggcttcgtcatgcataa

SEQ ID NO: 328229 - DNA, 1668 bp, Pseudomonas aeruginosa
atgaatatggcgcgcaaagatttttcttctgctgctctggtgatagataaaggctcatctaaccacatcatcgcggatcatctgtcaaagaccattaattttgttccggagagttatgttattaactttccggaaagtccgttgacagtgcggaaattggatttcgggcgatattatggtgtagggtgtgatgaggttacctattattgccataaagtcatcgaagtgctgctcgggtctgctatagcttcgcaaggtaagactaagtccgtggcgagtattattacttatgcaaagcgcgtttcgagaagctttttatgctattgctcatttatgtcaatggctatgaagggtgagataggtttgcgacatattgatagggggtttgttgcatcttttattagatatctcgaggcctctggtgctggatatacaactcagaaaaatatttacacctgttgtaagtcagtgcttggcgagttggtaaggtgtgggttactttcaagtgatatatttcctcctaatccttacccgcactccaataggaggaaaagtagtgaaaaagctttttcaaagaaagagtttacacaagttattaatgctttgaaaagagaggtgattgcagtaaaggaggcgtctggtcctattttggcggagggcttggccttttgtgcggttgcaatagtagctcgtactggattgaatcttacgcctttaatcgaactttccatgggttgtttgcttcctcatccgcttaggcgtgatcgtagtattttgattacttataagcgccgcgctcataaagtgaactatcagtcagttagtagtggcgctgtgtcaacgctggatgatgaagtagataccctgagtgtggtgctgcccgatatttccgctattataaaaatggtcgcagaaaggaatgactctataaggagtaggggggagtggaaagataggctattcgttcgtgagcgccccttaaagaatcctgatgaaagaactcctgcacctataactattaatactattaatcgagctttggaggcgctggtagttcgtcatgagttgatttctgataatggtgatagactggttgttaatgtgtctagattaaggaagacctttgccaataaaatatgggagctctcaggtaatgatccttttttaactgcaatgttggctggaaatactccaaaagtcctcttggatagttatttggaagcgccggctgatgctgagaaaaattgggcgttgatgggggaggttcgtaataaagaacttctcgaaaatgatcatgccgatcttggtattattccggtaaaagaggtaaatactgctgtggcccgttgcaaggataccgttaacgggcacagggctcccaagaatgggagtcattgtgtggagttcttaaactgctttcgctgcagctctttcgtagtgactgcggatgacctgcatagattattaagcttctattggttgttggttcgtgagcgcgggcgaatcggtgcaaaaaattgggtgaggttatataggcatataattaaaattattgacgaaaaaatcttgcctaaatttgataagtccactgtcgtggctgctagggaaaaagctaggcagaatcctcatccattttggaaagatcctgaaattttggggttggcataa

SEQ ID NO: 328230 - DNA, 1140 bp, Pseudomonas aeruginosa
atggagttggtcttcgcagatgaggggttcaaaataaacggggttagctaccctggatttcctatcatcctaacagcagaactacggtcaattcccgaggtaagcgccttcttgatttaccgctgccttcacagggggcgagttgaaagtaaacatacatgggcttcatacgggcaagccctttacgactatttaggttttctaaatgctgccaatcgagactggagagatgttggtttttttgagctgggctcgagcccactggctgcataccgtgactggtcgatgcgtagttgcgggcttagcgaaaacaccataaatcttagactgcgagttgtttgctctttctataactatgcaaggcgccaaggttggatagagagggttccatatgatgttgaaacagtaagggtcgcagtccattctgtatttttggctcatgtggatgtaactggaggatatgtcgcttctcccgatatactagtgaaggggaagagaacagcaataaaagttttaactaaagagcaggttagaatttttttaaattccgtaagttgttctactcaaaagcttattgcacgactggccctaagcagtgggttgaggaaagaagagctccttacatttccaagctcctatatatttgatcccgctcaaatatctaaaggcagttctcactttagagttttctgtagtccaaaggatatggagctcaaggggaataaggcgcgggagattgacatccctcgctcgcttatggccgcgctctggcagtacaaaattcatgagcgtaatcggagtatgcagacctcatgtgtagagtcaattccgttgtttctatctaggtatggtgtgccttacagtcctaaaggccagagtctaaaccatatgtggaaagatctggggcttcctttcacggtcactcctcatatgctccgccatacctatgcgacgcatacactccatgacatgcgcaggcgtaagagtgttatagatccgttgctatatgtgcgggataggctcggccactccagtgtggctactacgcagaggtacttgcacttaatttctatgatcgaagatgatgttatgggagagtatcaagaatttattgattctgtctgcgttggaagaatatga

SEQ ID NO: 328231 - DNA, 1140 bp, Pseudomonas aeruginosa
atggcgcgcgccggcctaggtggcgattgggactgtttgttcgctaatgacttggatcgtattaaggcgtccacttatattgaaaactggggtgacgcccattttgataaccgcgatgttagagacgtaaagacatcggaccttaaggggattggggatttggcttgggcgtcatttccatgtcaagacttatctgtggcaggaaatggcttaggaattggtagctctggtggaaatgagatcacaaggtctggcgcactttggccttttcttgatcttatagagcagctccgtttagaaaatcgacagccgccactattggtcttggagaatgtagtaggcttgcttacgctggaaggaggtcgtgacttttccgccatctgtgagcgcctcagggaaatgggttattgctacggggcaacgatagtggatgccaagcactttctccctcaatctcgtcctcgagtctttatcattgcaatcctaaagggaattaatatccctacaaaattatttcgcgggatggccagtagtcactggcattcccctacattgcttcgcacttatagggctctcccctctcgcctacatgaagactgggtctggtgggatttaggggatcctcctgctttaagagaagacgcacttcacagtttcattcagcgcaagaatgtgatctggaatacgcaagaggaaactgatcggttaattggcatgatggcgccatcccaccttgcacgcctcgacaaggcaaaactttcaggcagattagctattggcagtctttacttgcgaatgcgcagagagggcggggttaataggcagcgagcagaaataactttctcaccattgctgggttgcttacgaactcctcgaggcggcgcatctcgacccagaatcatcacgatagaaggcggctcggttaaaactcgtttacttacgtctaatgaggcgtctaagttgatggggctggaggattcattcttattgccaagcatatatcaccatgcatttaaggtaataggtgatggagtcgcagtccctgtcgttcgctttcttgctgaacgtctacttgaaccgcttgcatgggcagctcggctacaaaataaccttcagggtcaaacggtggttatgggatga

SEQ ID NO: 328232 - DNA, 2553 bp, Pseudomonas aeruginosa
atgaaccctcaatctcccaaaactttcgaagagtgggagcgctgcctagttcggcattttctagttgtgggatcagacggggatgctagtgatatacgctcttttgaggtaacccctactactttagcgctcgcctgcggggcaggaattgatcaagagcgaaatatcgaagaatcattcagaatatttatggctgggatttcaaatcttccaaaccggctgaatattggaatgcaaggagcatccacccgcgagctgcctaatttcttcatctatctcgtcatgacactgttgattgatagccagctggaaggaagtggcgacgggaatgaatttcgagggaaattgcggaagtggctaaattctgaacatggttttcagcagcttcctggcgtaaatataatgtggggggcgcttgggcgctggctggacaagcgagtcgacgaaggtttaccttatcgccgacttattctaccgattattccaaaaacttggtgccacatcggctatacgttgagattaaccttccctaataaggttgatcttcggctgatggaggtttttttagcgaactgccctcaggctgaatctgacccaggtctagtggtaagaagctttccagccatattactcaacgatcgagcatctgatgcacttaaatcagccttcagtgagttccgcgaatcctatttgctaggccggcgcgccctagctgacctacgtttctggcgcttgcttcgccgcgctcacgcccactctgaaaagctcgagcgacacagcgtagtggtcgacatgatgtttgatgctgacgggaccagggagtatttttcttctgcggatcaaacgagtcaggcagtgtttcaccctaccctatttctcgctttgaacggcgtttctgccgagtcgagcttgaatttgagcgccgcagttaaaactggtctcttattctttcgacaaattggtgtaggccgctggcgagcagaggctcggctctgcagcgctccacagggtctccatatggctctggcgcgaaggcatgtgtcacatctaggcagtcgattggggcgattagtgtgcgagggtgattggtttttaacaaccactgtgcacagctaccactccctgcatgaaactcttactcctatgggttttttcccgcgcgcttccgagcagatcgtacgacctcgtctctcaggaggtgtacgtgtagctcatggttggctgggacgaccaggctttttaccgcacattgagtccgatacgactgattacataattaacccagtagacgtccgactcgagaaagaatccattgtgatggagggcgggcagctaacggcattggttccggtcgagggctcctttgtcatagaaccagagcgtgaattagtagagaaagctgccccctggcggcttcgagtgcagttgattcgtaatgcattgccccatctcggcttgggttcgagtgctcgatataagttggagcagctgaacgactggtcgcgagtctcaccttcctccgtcgttttcgaagggcaggatcctttagtttgggaagagatcgtctccgaaagcgaagacttgcttgaggcgatctacgccgacggtgctagtggatgggaagaggcagcgcttgtcactcttctacgaggtgtcgatacaagcacatgggacttacttcgctgtcttcaggacgcaggcattatcgagcctaggctgcgaaacggttggaaaggccgtgcctggactcttgtagcgcctcggctggtcggagtaacgaggggtaatcagaacatcgctgtcatcgagggggcagtctgcgcatcacttatcgacgagttccggtctgtggtcgctaggttgggtggccagtgctttaggcggaccggtgtaagcccttggtctcctccagtaatcggggcgagcgttgcatccgttgaggccctggcagaaaaaatggattggccgttggcacttcaaccgatgatgcctgacgcagagccactggcattcgtcgagactcatcgcatgtcagacttacatgaggtcgcctctgcatgggattggaatgagagacgattcaaggaaagtgcctcccgcgaagagccatttaagctgactcgtttctctcatcccggcgggcgagatcacgacctctactgcctgacgagtcgcagtcgcctgatgaattatctgtcacgtacggctgcaattgctgctgcgcacgcctcttcgcacacccccctgtttgagcagcgtgacgacaatctactagtacgcctcacttgcgacggggggcttcccgacgcggtcgcggccggcctcagacgacgactgctccgcacagcgggtcccgtgggaaatgaatatttttatccgattactcagcaagctcttagttggcttagctcactgttgccaggctgtctagcagggccggatttgattgatgagcgtccccctacccgtcttgtggctgaggcacgtaggtcaagggggcagcaacgattgcactggcgcaaggggcgcctgacgctgccgcgtcacacgtaa

SEQ ID NO: 328233 - DNA, 2136 bp, Pseudomonas aeruginosa
atggcttcaactaccccatggtacgccgggacttgtgaaagacggaatgacatgaccgtccagctcaaggtggtagcagttaaaactaagttgggctggagcttggttgagaacccacacaagttgttccgcaaatcgggagaagtcgagatgcgcggggcagatgtcgcatcactccgatttggggaatgggtgaaatttcaggtagggccaagcgagcgcaaggatcaatggagagctactcggcaccatcgcctatacgcctattacgatttgtcatctgctcaatctgttgaagaagcacgccaaactcttacgtttaacggggtagcgacgcatcggccgccagggatatggatgatccgcatcaatggagatcaggtcgtccagatcgagtttacccggtcgggagacgatctcctattagcatctcacatcactacactaccggcgtatgagtttgatcaggactcggtgatatcaatgccgaccgggtcttctgagcacctgttctatgatcttggttctgacgccaagccctgctacacctacgactggacacctgaaagtggatacattgaacgtgtcatccgtcgcctcgcaggtttccaatcaccacagttggcagagattatttcctggcttcagcagcacgctgatgagcgcactggccgaattaccgttaaccctgatgacgtgcttgccgcccatgaggcgcttcgttcaggtgagctagccaaacgcctaaacgccgaacagacgcttttacgttcattggtggacgcgctgacaggtgatgcccgcatggcaggtctccttgagcgtgaacgcaatgctctaatcgagcaggaacgcaacaccatacataccaatctcgagatgcagttggctgtggaaatggagttgcagcgtgatcttcgcacttctcagctcgaagtccagctaaaagagcatgaagcggccagtcgtgctcaaataaaagaacagctggatcatgatcggcaggaagcggagtccgccatagcggcgtatcaagccgcacaaaaagtcgagatcgataaagttatctgctctcggctagccgcgctggagcaagaaaaggcggagcttacggagtattgcgccaacctatcgcaatctagggacgagctcatcttgacgctacatgaactcgagataaaagccgaagatttaaacgccttggtcggagatctgagtgcagctgttacaattctgaaagaacaaagagagcatggtacagctgaagtcgaacgcctaaaagaaattagccgagtagcatcagaggggcgcggttatgctccggtgactgtcgtcccattttaccgtcccaaacactcgacggcctggtgttgctctgaagctggagaggtattaaagaactgtgcgttgctgacaagtaacgggaaaaaattgatggagcagtttatcgcgctatctctggccggtgagataccgctgctagtaggtcccgatgttgcagactttttgttggtcgctgagtcactagtagcctcaggacggtcagcgcgcttggaagcagatccgacaatcctgacatttgaagatttgtgggtgcgagcaggaacggggttgccaacatctttggctcaaggattaacactagccagcagccaggagccatgctccgttttgggggtaatcgatcgagctgagcgctctgccgcgaggttctggctgcctgcgttgacggaccgagcccgtcgtggagacctccccagacggctcttgctatgtgccactgttgaagacgatagctgcgaagaggctgaagctctgcggggcagccagatttggctgccagtcaaggaagccatcgctaaggatgcagccactgttgccccactgtggctctctccgagccagtatcgagaattagatcccggcgattgcccggttgaaagcatcgagggtggcctcaatgttgcccaaaagctcgcaaaccgccttgggctcgttaacacgctaagagcggttcgatcagcagcagaggtagctactttctataaggggaaggaagctatagatgctattgcgcgaatgaatacattgtttcttaattccgtaggttcggagcaacctgcggtagcatattaa

SEQ ID NO: 328234 - DNA, 5841 bp, Pseudomonas aeruginosa
atgctggaccctattggaagtttttatcgcattcgggatttttttatttcatatgttgaaaccagctttcgaatttccgaccctctagcttctgaagcacggcgtgccctgctcaagaccagcggcatcctggccacagctccatttattgagccagtgcttcgctacgaatcttcggataaaaatcttgaggacctaattgaggaggcagatggcgtcctcaagccactgtcgctaaagggccgcaaggccttcgttgaactggctctgtctggtctgtttgatgggagctctgatgacggccctttactccggaagtcccaatacgcgccataccggcatcaggtctcgatgcttgaacgaggcattcgacctggccgccccggtattgtaacttccggcaccggctcaggaaaaacagagagttttatgcttccgatactggctgctctttctaatgaagcagtcgagtggcaaaaaccggaatccaaatatttgcaagaacactggtggaaaactccgaagtcccaatgggccccccggagagctggcgagaaacggccgagtgccgttagagcactcgtactctatcctatgaatgctcttgttgaagaccagatggttcgcttgcgcaagactctcgactcacaagatgcacatgaagtaatggatgctcgattcgctgggaatcgtcttttcttcggacaatatacgagcgctacccctgtaacaggctacgagcaacatcctcgcctcgcaggtgacaagcaggaagcgaagcgtcgagctcgacgcatctctagattgcgtaaggcgatgcaggatttcttctgcaaccagagcgcagcccgcaaatttgatgaaaattctgagcgtcagcaaggacgtattcgagagaccacgcgctacatcttcccatcgatagatgggggcgaaatggtttcgcgatgggatatgcaggcttcgccgccagacatactagttaccaacgcatccatgctgggagctatgctgtcgagagaaattgaagatgcgattttcgacaaaacccgtgaatggctcttatcagacaaagactcctatttctacctcgtcttcgacgagcttcatttagttcgcggctccgccggcactgagattgcctgcctaattaagtccctgattcagcggcttggccttgatcaaccggagcacgcgtacaaactacgtctacttgcatcttcggcctctcttcctttggaaggcgccgaaggtgttcagtcaaggacatacttacgtgatcttttcgcaccattcggcacaagcatcagcgaagacgatccaggttctaccgatccaagattttggaatgagtgcataatccagggtgtgccgcatatccctcccgcgagagcgggtggcattccttctgaaccattcgctcaattgatgatggctgcacttgaggggaaagatggatttgtcggcatactggatcggactcccgcattagaggctgctatatctaaggcagctgcagcgctgggtgttgtagcaacggcgcaagcctcgcttgagaagttgctagccgaagcggcagccggactactaacacatgcttgtaaaaacgatgacactatccgggctactacacccgaatcgattgctgctagggtatttgccccgggcagcgacgacactgagttggctctccgcggactgatgctggcccgagcgcttccagaggctaacgattcgcgggctagagttgcaggtgcaacgccagccttccgtgtccataccttcattcggaatatagaaggcctatttgcttccgtcaccccacgtcagcatagcgtgacctttagcgatttctctgtagaacggggaacttcgcattcatcccccgcaacgggtcaagcgcgaggccgccggctttttgagcttttatattgtgaagcatgtggggatttgtttgtcggtggccagcgaggccagagtagcggttcaactaatgctactgagctactgccgtcggcagcgaatctggagcacttacctgagcgcccaggagcagaatattacgatgacatgactttagatgagttcgcagttttctggccgcgacgtggtgactggatcggatcagataagggctatgatcaatggatgcccgcccatctcagtccggatacaggtgtagtggaactgggcgagactgcgaaggaaggaaatatagcaggttatctttattatcagacagaaacggcgattagcaaaggaaagaataagcctgttcagcaaccctctgcgcaaccgttttgctgcccaaaatgtggcaccgattactcaaaccggcctgatacaaatcgttcacgctcaccgatccgcgcatttcgtactggcgtgactaaatcttcgcagctagtggcaacggagcttttcgaactgctacatgctataggggccgagcctaaaggaattgtcttttctgatagtcgccaggatgcggctgggcaagctatggagattgagcggctgcatttgcgtgatctgcgtcgtgaaattctagttacaaccgcgagatcctacataaaagaagcatcgatagaagctctcagctcagctgaaataatcgagcttctgggtaaagctcatgctgcgagagataacaacgagatccgcaggttgtccggcctcttaactaaacagaccgaaaatgatgcatctagaactcaaaaggtaaagctggacagacttctagagttaagccaggatggttctattggtagaataacagccgagctagtgcggctaggtatatcgccctataagagcagctcatctagcatcaaagagctcccctggcatcaggagttcgagaaatctggagaagttatttcctacgacaatgcgctgtccctacctcaaatatctgaaataaatctagacatcattgatagtcaatatgaactagtcgacgatgtgattttcgccaatacattcttcgctctcgaggaaactggtctcgcctacccttgcctttcgagtgatgaagaaaatcaagcgttggatgcatggcttcgtatttttgcaagcgcctatcgtgttaaggaaaataagtattttgataagaacaaggtaaagctttggcaaagagggggcgacatcagcaatagtcgaatcaagaaaatcgcccaggcattgtacggtaactcactgtatattgatgaactaacgacggtcttatataaatttgaccgctctggacatcgcggcggcttattcaatattggaaagctattcctgaaagttactaagccgggtgatttattttggcgctgcaccaactgcgaacgtgttcacttgcatgaagggctagggatatgcactcgctgcgctacgccgctgccagagccaagtggaaaggttgaggagctctggtctaccaatttcctaggaaagcgaatcattcgcagcgagcgcgatggtgtggggcgcttccgcttgcgcgtggaagaactaacaggtcaaacagatgacttctctgatcgactcagaaagttcaagggtattttcgttgatgaagttagcgaattagagaggctagcttcagagatagacatgctgtctgtcacgacaacgatggaggttgggatcgatatcggcgctttacagactgtgtatcaagcgaacatgccacctcaacgattcaactatcaacagcgggtggggcgcgctggtcgtcgtgggcaagccttttcgttcgtcgtaactttctgtcgcgggcggagccacgatgcatattacttcgcacatccgcacgcgatcactggcgacccgccacctcctcccttccttgcgcccgctcacgacgccattcctatgcgtctccttcgcaagacttggctgcgagccgcttttaagcagctaagggatcagtgcgccgaacgaggtgagatatttcctggtgatctacttactcctccagatgtgcacggagaatatgtcactaccagagactattaccacaaccaagacatcgactggtctgctcgtttgcatgcggcactggcgcagacccaggcagtgcgagagcagttcatcaacgctgtaacctttgatcaagaacagcgtcaacgactgagggataagttaagcgtcgatctattaattagtgagattaatgaccaacgccctaacgctccatccgatgagatgggactcgctcgatttttagctgagcgaggtttgctgccaatgtacggtatgcctacccgcgttcgtaatctttacgtaggtcttcgcgaaagcaacagccatggcgggggcgcagagtacgaatggtcaacaatggatcgcgatcttgatttggctgtgtttgagtacgcgcctggggcggttcttgttaaagataagaagaaacatagagttgtcggatttacgggaaatctgactgacccacaaatacaggggcgagctatcgaagggatacgttcggtcaccgattggtgtgaatcaaaaacctacgtagccatttgccctacatgtggttcggcttgtcaaagcattgaagtacctggcgaggctttgaaatgcagtgactgccgagcactaatcccgaaggaatgcttcctgctctacgtgacacccgctgctttccgtactgattttgtgcccaaagacgagctcgatgagtttgaacgcatgtctttgcgtaccgttgcgaccgtgttgcgcgaaggcgaagacttggactgcggagccctaaaagttcgaagcggcgcaggcgtaaccatccttcagcttaacgatgggccgaccgatggaaagagtgatggacgccagtttactgttgatcttgttctggaccagagggtgccagtgcctttctcacctcaacgaccaccaattgatggcattcaagcaatcgagtcaggctggcgtcgttcaaataatacacaacgctggggcgcatctcagggggagcaatgtttcggcttgatctcgaaaaaggaaacggactctattcatctcgagctaacaagctttgacgagcgtctaactctaaatatggtggcccgcaaaggtgaattcatgcatttacctacccgagctgcagccatcagcgccactcaaattttggttaacaaagctgcactggccttagacgtttctccagatgaattcgaggctctcgagcctagactccgctcaggaagtccgatgttacaaatagctgatgccctaattaatgggtctggcctttgccgtcggctgggggaaccgggtgccgattcgcgcacacctcttatcgtagacttgctgcgtgagactctcacgaacaccaatgtatggcctcttcaggacttccttgggaccggcgccgatggagtgcacacagctcaatgccagacatcctgctaccgatgcatccagcgatacgggaaccggagatatcacggcttgctcgactggcgcttgggtatggcctatttgcgcgcactggtaactccgaattacgcctgcggtctcatccctggcgatgaaaggtatcctgagattcaaggctggaaggagcgggcctgccagcttgcggaaaacgtcgaagcaatgcgcaaaggcacagttcgctatgaatatctgcgacattcgggcctgccctgtctcagcgagcagaaggacggggctgaactgtggcgcgccgttgtaattcaccctttgtggcggcacacggaagtcggggcaatgcgtgacctgttaggcccggattggtcatcgtcgttaagatatctagatacctttgagctagaacgacgaccactgcgccgcctggcagccttaaagcaagaggaatcttaa

SEQ ID NO: 328235 - DNA, 954 bp, Pseudomonas aeruginosa
atgagccagggaaggcgcgaacgcatcctcgacgaagcggcgcagtggatggcgctgctgcaatccggccatgccggcgccgaggagcgcctggcgttccagcagtggcgccaggccgacgccgagcacggtgcggtgttcgaccggctcagcctgggcttgcagtcgtttcgcgacgagcccttgcacggcttgcgcgccgagcaattgatcggagccctcgaggcgccgtccgcccgtcgccggtttctccagcgcagcctcgccctggcggcgttcggcgtggcgacgctggcgctggggcggatcggcatcgtcggcttcccctggcccggcgacctgtataccggcaccggacaacgccagagcttccgcctggaggatggcagccaactggtgctggacgcgcgcagccgggtacgccccgaattcgatggctaccggcgtcgcctgcgcttacgcgaggggcgcctgctggttgacgtggcacgggatccggcgcggccgttcgtcgtcgacaccgggcgcggccaggtcgaggcgcagggaacccgcttccaggtcagcgatgacggtgccagctcgcgggtggtggtgctcgagtcgcgggtgcggatcaccacggccgacggacggcaatgcctgctggaacgtggccagagtgcgcgtttcgacgcctcggcgattctcgcccgaggtcctgccgaaggcggcgagagcgcctggctggatggccggctggaggtccgcgaccgtccgctgggggaggtgctggaggcgttgcgcgcctatcgccgcggcatcgtcagcgtcgccgacgacgcggcggcgctgcgcgtcagtggtatctacccgctggacgacagcggcgtggcgctggcattgctggagcagagcctgccgatccggatcgactaccacgggccctactgggtcagcatcgccagccgctga

SEQ ID NO: 328236 - DNA, 336 bp, Pseudomonas aeruginosa
gtgtctcgacagcgccgtacattccccaaggctttcaaggcccaggtcatcgaagagtgcgcccagtccggtgcttccgtcgccggcgtggcgctcagccacgggctcaatgccaacctggtgcataaatggattcgtaagcagcgcgagccgctaccggtcgtatctgcacgctttatcccggtgccgctcggcatcctgccttcagagcaggccagctctgaagagctgacgatacgaatcgaaatcccctaccacgccggcagtctgtcggtgcactggccggtgcaggacggcgaaggctgtacacgcttgctgcgcgggctgctcgcatga

SEQ ID NO: 328237 - DNA, 321 bp, Pseudomonas aeruginosa
atggccaccgcccgcccgcagctggaggtactgaccatggagcataccaatactccaccgcctgaaacggtcatagacatcacttgtgatgtctgctgccagagcattcgcgcagaaggctatggccaacagtttggaacccttcaggcaaactgggggcatggttccaagcacgacggtgagcgttatgaggttcggctgtgcgaagtctgcttcttcagaaccctgagccatcttcgccgcaagcgcatggtcaacaccatgtttgatgaggagcccgataccgctcaggatgagttcggcctgctgcgaattaagtag

SEQ ID NO: 328238 - DNA, 645 bp, Pseudomonas aeruginosa
atgacactacttgagactgccagtgagggggctgcggaacctgtccgcttgactacgccgctgggccaggccattggtaatctgttcgcccgggccttgccgctactgaatggcaatccgccaggctcgctcaaggtcttcatcttcggcggctgcgcggtgcacctgctcacccatgcgcgtggtagtgcggacatcgatgcggagatcgaggcggcccgtgtgctgcgtaaggaagagatcatggccgtctatacaccgccagagggttatgaggacagcgacggccgcgacttgcaggtgtacttggatcagaactacaccaatgccctcgggccattgcacgaggactaccgtgagcgtgccatccccatgcagggtttcgagggtgagcagccgctgcatgttttcgttgctgccggcgtggatctggcaatatccaagctcggccgctttacggaaaacgatcaatctgatatcgaacagctcatcgaatgcggccgtgtcgatgtcggccagtttgttacactggcaacagaggcaatcgattatgctgtgggcaaccgaagcgcaatgctaggctgcctgaaactggtcacagcgaagtacctggaggatcggcgagatgccacgtctggatcgtaa

SEQ ID NO: 328239 - DNA, 999 bp, Pseudomonas aeruginosa
atggcccgcggcggcatcaacaaggcactggttcagaaggcgcggcaggcaattctggcgcggggcgagaaccccagcatcgacgcggtaagggtcgaacttggcaataccggctcgaaaaccaccattcaccgctacctgaaagagctcgaagacgccgagcgcggccgagatacggcctcgatcccgctcagcgaacagctggccaatctggtcggccaactggcagatcagttaaaggaagatgcgcaggcggccgtggcccaggagcgcgaacaactggcacatgaccggcttgatttccagaaccaagcgcggctggccgaaagccgaatccagcaattggaaagtcagtgcagcgggctcacagaacagctccaggttgtccagcacgcgctacagcaggagcagcagcgacgccaacagggcgaggtcgagaatgcccgcctgttgcaggccaaccgcgacctggaggagcgcctgcaagaccgcgatgggcagattcgctcgctagaggaaaagcatcagcacgcacgtgacgccttggagcactaccgccaagccagcaaggagcagcgtgagcaggaacaacgtcgacacgagtcgcagatgcagcaactgcaactagagctacggcaattgcagcagaccctgatcgtcaaacaggacgagttgacccaactgaaccgcgacaatgcgcgcctgctcgcagaagcgcggcagttgcaaaaagagcagcatgcgcagcaacagctactggcacagaaagctcaggccctggaggccttgcaaaacacgctgaccggcgccgagcgcttgaatgaaaccctggaacagcgttgtcgcacattgcatgaggaggtgtcccggctgggtgaagcctccgcgatccagacgcaacaggcgcaaggcctgcaggagcgcctgatcgaagccactgcacagctgaagctactcggggcgccgcttgcgaacagcgatggcgcacgtagcccatga

SEQ ID NO: 328240 - DNA, 972 bp, Pseudomonas aeruginosa
atgaaggatgtcggtcgctatctgcaagccggtacgcgggaaaacactcgccgcagctaccaatcggccatcgagcacttcgaagtgacttggtgcggcttcctgcccgccaccagcgacagcatcgtgcgctacctggtggactacgccgacaccctaagccttagcacgctcaaacagcgcctggccgccctggcccagtggcatatcgcccagggctttcctgatccgaccaagacgcccacggtgcgacaggtgctcaaaggcatccgcacattgcatccggcgcaaacgaagcaggctgcaccgttgcagttgcaacacctggagcaggcggttcactggctgaatcaggaagccgaacgggctcggcagtccggaaacttgacaagcctgctgcgcagtcggcgcgatgcggcgctgctgctgatcggcttctggcgcggctttcgcagcgacgaactctgtcgactgcaggtcgagcatatccaggccgaggccggtgctggcatgagcctgttcctgccgcagagcaagggtgaccgggaaaacctcggcacgacccattacgcaccggccctgaaacgcctctgcccggtacaggcctatctcgactggatcagtgttgccggcatcacccgcggcgcagtgttccgccggctggatcgctgggggcggctgagcgacgaggccttgcatcctggcagcctgatcagcttgttacggcacatcctacagcgcgccgggataccggctgagctgtacaccagccattcgctgcgccgtggcttcgccacctgggccacggccaacggctgggatctcaaggcgctgatgacctacgtgggttggaaggacatcaagtcggccatgcgctacatcgaccccgccatctcctttggcggcctggcggcgaaacccgcccttgaactgattactggcactttgacgcaactgccagcttctcactaa

SEQ ID NO: 328241 - DNA, 744 bp, Pseudomonas aeruginosa
atgagtacgcagaccagcatcgaatggacggaaatgacctggaacccggtggtgggctgcaccaaggtatcgccgggttgcaaacactgctatgccgagaacatggcccaccgcctgcaagccatgggcacgccgggttacgagaacggtttccgcctgagcctgcggccggaaaagcttcaggaaccgctgcagcgcaagaaaccgaccatctactttgtcaactcgatgtccgacctgttccacgagcaggtgccggacgagtacatcgaccaggtgttcgaggtgattcgccaggcgtctcaacacaccttccagattctcaccaagcgtgccgagcgcttggccgactacttcagccagcggactccgcccgtgaacgcctggctgggagtatcggtcgaggacaaagcctatggcgtgccgcgcatagactgcctgcgccgcatagacgcaacaatccgcttcctctcggccgaacccttgctggaggatctgggcgagttggatttgaccgacatccactgggtcatcgttggcggtgagtcgggtggcaaggcgcgtcccatgaaggaggaatgggtcgacaacattcatcgccagtgcgatgaattcggttcggccttcttcttcaaacaatggggcggttggggagccgatggcgttaaacgctcgaagaaagccaacggccggctcctgaatggccaaacctgggatgagatcccgctgctcaacctcgcctga

SEQ ID NO: 328242 - DNA, 1320 bp, Pseudomonas aeruginosa
atggccaaggatgacgaaaaataccggtgggattgggcgagccagacttttccaaccatcgacccgcacagcaagatcaaacaccagatcatcgatgagtacattcagacttacattgatgtcctgatgcgcaatcagcagatgcctgcgctgggcctgtcggtcgtcgatggctttagtggcggtggtatctacaacgatgacgcgggtggcaagcacttcggatcgccggtgatcgccctggaggcaattcaagaatccgaagttcgcaataaccttggccgtattaaaccccgtcccatccgctcccagcattattttgtcgatgtgaagaaagacaacatcgactgtctgcacgccgtcctggccagccgaggccacagccagcgcttcggccgcgatgtacacctgcataccgccgagttcacccaggcgttaccggcgatcgcccacaacctcaaatcgttcggcatgagcgagcgggttctgtttctgctggatcagtacggctacagcgacgtgccgttctccaagatcaaatggatctttcagaacatagccaatgccgaggtgctgctgaccttcaatgtcgacttcctggtggcctatctctccgaccgccaggccaatcgaaaggccatctccaatatcgacttggaacggcatatcccatgggacatgcttaagcacctgaaggcgcataacccgcgcgattggcagtacctgattcaacgctgcctatccgacgggatcaaggaggaaaccggcgcaccgttcatgaccatctttttcatccgccccgtgggcgccaaccccatggcgtactggttcatccacttggcgaagagctaccgcgccaatgacgtgatgaagaagatccactggaagtacggcaacaacttctcccacatgctgtctccctcatgcttctttggctatgacgccaatcgcgacatcaaggtgacggatcagcaagagctgatattcgaggaggagcatcagttcgatatcgtcacggatacccgcatccgaggtgaactgtcggagttgctgcccaagcaggtttacgaggttgaacagcaatcgtttggaagcctaatgagtgggcttgccaattacacgatggcggacgagtcacgggtgaagcaggctctggatattgcagtctccaatggtgatctcctcgccgtggacaaggacggtaagaaaaaacgccgcaagggcagcagtatcaagataaccgataccctagtggccccaccccagcggccctttttctttctgccaccgcctccgaaagcgaaggtggatgagtcttga

SEQ ID NO: 328243 - DNA, 219 bp, Pseudomonas aeruginosa
gtgctgctcaccggcgacaacgagctcacggcgacctgcccgctctgcggcttcgccaagccggaaaccatgcccgcggacgcctgccagttctattacgagtgcagcaactgcaaggcgctgctgcgccccaatccgggggaatgctgcgtgttctgttcgttcggctcggtgaagtggccgccgatccagcagcagctgcgtgggtgttgcccgtag

SEQ ID NO: 328244 - DNA, 330 bp, Pseudomonas aeruginosa
atgaaaaaactgaaacttttgcttgtgcctgtatcgatacgcacaagacgagccacagctctactcgctgcagtggcgctgctcgtggctggaggtatggctcatgccgctcaggaacaagccatacaaggggtacagggcgatattcagcagatcccggtcgagacctaccactacgggatgaagctggatattgcccgggtcttgtccatcagcgatacgagccaggagtgcggcgttgtgccttcgatcatgcggtacgaagacagcagcggagccccacgggccttggagtatcagatttatggcggcggttgttctgataattga

SEQ ID NO: 328245 - DNA, 483 bp, Pseudomonas aeruginosa
atgcgctacctcaaactgccactgatcgcacttgtttcggccctatgcgcgacctacatcgtgctctggctcacgaagcctgcccctctcgagaacaccaccattcctccgcttatgatcaaggaagagcagaacgagctcttagtttggggcggctggagcaccatcgagggataccaaaaaccaggaacaaatgcagtcgaaattcgctgcaaccgcacatccaatacctgtcatgaagcattcgcaacgatcctgcatcacaccgaaggcgaagaccttgaggcgcaggtgttcagctacaaggtcagcagctgggataagaccaagcttgaggccgtagcggagctcgcaatgggggagtgcttggagcggcgcctggtcatccacctgcctgataaatccgctgctctaagttggtctccacccaccggatgcgagggtgacaaaggccgggcggttttagttggcgaccctttatag

SEQ ID NO: 328246 - DNA, 363 bp, Pseudomonas aeruginosa
atgtcaatcattgccgaatacaaagctctggaagcccaaatcgccgagcagcaaaagcgcctcgaagccctgaaaggcgatgagaagctcaagcgtgaaatcgagtttgaaaccaaactgcgcgcactgctggccgactacagttactccctgcgcaacgttatcgccctcctcgatccgaatgctgccaagaccgccacagcgccggtgaaaggtgctcgtcgtgagcgtgctctgaagcgttacaagaacccgaataacggtgaagttgtagaaactaaaggcggcaaccacaaggtactgaaagcttggaaagaacagtatggcgccgagactgttgagagctggctgcagttagcttaa

SEQ ID NO: 328247 - DNA, 393 bp, Pseudomonas aeruginosa
atgcgctctctcctcaccatcctcgcggttgctgtgctcgccggttgcggcggcagcgagccgtttccccgagtggacttccctatgcagcctggaaattatctccagttctacacccagtctggccacccggtggtcgagtttgtccaggttgatcagcgccgcgaggcccactccgtgcagtccggcagctggcatgggaaggttcctattgcacagcgtatgacgaaccagacggcccttctgcaggagtgcgggcttgtcacgttcagggaggacgacagcgaaaaggtgcctgtttcctactcccgctacaacgcgacggaagaatgcccgttcaagcccttcccggcactttggactcgcgtcggtcgagtgcccgctaacaactag

SEQ ID NO: 328248 - DNA, 201 bp, Pseudomonas aeruginosa
atggcttgcactgtagaaatccacaaaggatcccaggtaatcatcgttgacggtgtttcttttaacgccccgttcaatgaatcgagcatcgaaagcgggcacccgcacggccctgtcttcagcaatggcgcagccaaagctgtgatcagcgaagcggatgctgcgatgttgattgctgctggcgtaatcgaccgtcgttaa

SEQ ID NO: 328249 - DNA, 1212 bp, Pseudomonas aeruginosa
atgatcaccatcgtgggaggcgtttaccgggagcggtgtatgcgtccgggttgggacgatatctatggatcggcaggacgcgcggcaacggcgattgcccgtttcggcggtaaagctgaactgtatgcctgcgtagatagcggaacccaagacgttgtagaggcgcgcgcagccgctgagggcttcaagttcaatggcgcacctgctgaagcaggggtgacctttgagtacatccatggtctggccaaccccgacattcgacgtggtactcatgccaggtcaactttggcggtgagcggagagaaggtcctccgcttcggcatgatcgatggaaccgcagtggtgaatgcagacttcgcggtgtttgatccccagaacgctgatgagcctgaatccttcagcgccaatggctccaccgccaagcatctggccttggtcctgaatcgccatgaagccaacttgctgttgcccggctcccgcggattgtcccctcaggacatcacggctgctttggcgaaacaggaaaacgcggaagttgttgtcatcaaaatggggcccttgggtgcctttgtgtacgacaacggcaagatctccacggtacctgcctatcgcacggagcgcgtatggaagatcggttccggtgacaccttcgctgcccactttgcgctggggtggttggacaacggtctttctgctcacgatgcagcttcgcttgcgtccatcgcgactgccttctattgcgagagccagggcttcccagaccaagccttgttggctgcattcaagccgaaggccttgcagccctctcagcggtaccgcgatggttacatacccaaggtctacctcgctggtccgttcttcacgctcgctgagctgtggatggtcgggcaggctcgccgggacctgaaagccatgggcctgaatgtcttctctccctaccacgatgtcggcctgggcaccgcggaagacgttgtggaaaaagacctcgaaggcgtgcgcgattgcgatgtgcttttcgcgatcggcgatggtctcgactcgggtacgattttcgagattggttacgctcgagctttgaacaagcctgtcgttttctatgcggagaatgagtccgagcaagatcagaagatgatggagggctccgattgcaccatggctgatgactacgtcagtgcggtctatcagatggtctgggaagcggtggagctatga

SEQ ID NO: 328250 - DNA, 606 bp, Pseudomonas aeruginosa
atgaagacagggttgctgttgtccggtggcatggactccttgacgctcgcctggtggaagcggccagacatcgccttcaccctgaactacgggcaactggcggctcaggcagagatcgaggcttcgcgcacgatctgccaggagctaagcattcctcaccatgtgatccagatcgactgccgccagctgggatcaggggatatggccggtacacaagccgacaacctggctcccgcctcggactggtggccataccggaaccagatgctggtcacgctggcagcgatgaaggcgatttcgtttggcgtgacgcacctgtggctcggcacggtgaaatcggatggtttccacaaagatggttcgccagagttcatggccgcgatcagccatctgctctccctgcaggagggcggtatggtggttgaggcgcctgcaattgagctttctactgctgagctcgtgcggcagtcgggcatccctgccgggctcttggcctgggcccacagctgccacaaatcccacttggcatgtggaaactgccgcggctgcaacaaatacatggaggtcttcctagaggtcggctatgacctggatcgacctggctga

SEQ ID NO: 328251 - DNA, 681 bp, Pseudomonas aeruginosa
atgacctggatcgacctggctgatcccctgcccaggagtgctcctgagccttacaccccgattatgtgggagctgggtgagacttgctcgctcccatccacctcgggtgtgcctgatcggccgttcagcgaggtcatagacgcccgcgcgtcgcatcgtgagttcggctctgttgatgaccagcagctcggggcatttctctggctggcttgcaggacgcgaggcgtgggtgcttcagaacttggtttcgacctggagcatcgagcggcgccgtccgcaggcgcgattcatccaatccatgttgtcgttaaacgacctgaggatgaccggtggtggttgtacgtgcccaggagtcatcagctcgctgaaatcaagcatgcgcctgctaagctcgcaggcttgctcgatctaagcctgcaggttctggctggtgatcaggcaatccgtttcctattcctggccgagccagggaagaccctgggtaagtaccaggatgggtgcagccttatctggcgcgatgcgggtgcattgcttggagtgatggctttgacagctacagcccagggactcaacttctgcccgctcggcattactggagagccttgggtcagtggtttagccgatcagggcaagctgaccggggttggtcttgcgcttcttggcgcggccgcgagcagctga

SEQ ID NO: 328252 - DNA, 834 bp, Pseudomonas aeruginosa
atgcaacttggcgctattttcatggaccaggtggtcttcaatgtcgagctaccccagcccgaggcagaggtccttccaggcgttccatggggtgctatggaggcgtttcctactccggcctattgggcgtatcaggtttatgcccgccggctcaccggcaaccgaatcaactacaagctcggcgccactctgaaagaagaagtcggcgcctgcctgttgggtggccatggcattcctgccaacgtcggcatcgctgccttccatcacttaagagagcgcggtgctttcggtgagaagcccccaacagaagaagtcctgcttgcgtggctgcaggaaccgctcgcgatcgacggacgccaggtccggtaccggttcgccaagcagaaggcgcgctatctcagcgccgcgcttcagaagctttccgctgaacgaccgcctctttcctcaggaaaggaacttcgtgactggctgctggatatcccaggcatcggttacaagaccgcgtcgtgggttgcccgaaactggctggacgccgacgacgtagccatcctggatatccacatcctgcgagccggcctgctgggcaagttcttcgaggacaacctgacggtcgagcgcaattacctggagctcgaggaacagttcatccgtttcagcattgggctcggcgtcagggcttccgagctggatgcgctgatgtggctggaaatgatgtcctccccctccacggtgcacaacatcatggggatcgggcaccacaatcctgactcagctgctcgcggccgcgccaagaagcgcaagaccaaccccggtcagcttgccctgatcggctaa

SEQ ID NO: 328253 - DNA, 678 bp, Pseudomonas aeruginosa
atgagatacccgggcggaaaaggcaagtgctaccagcgcttgatcaacctgatgccaccgcatcagacatacattgagtcccaccttggtggtggcgccgtcatgcgcaacaagaaagctgcgcagcggaacatcggcttggaccttgatgccaaggtcatcgagctctgggagtcgaagctccccgggacctgcgagcttcaccaggtcgacgccgtgtccttcctcaaaagctatgcgttcgaaggtgaggagctggtgtatgtggatccgccctactttcccgaaacacgccggcgcgagaaggtctaccgctgcgactacaccgaatctgatcacattcggctactgcgctgcttggtcgccctaccttgcaatgtgatgctgtcgggctatgactgtgatctctacaaccgagagttggtcgggtggcggaaagtgagttttccagcaaaaacccatgtagagatgcgcgaggaagtggtatggatgaacttcgcaccacccagccggttgcacgacacccgcttcctgggcgagacattccgcgatcgccagaccattcaacgccgccaaaccaggctccgcactcgcatcgagagcctggaccccatcgagcggcacgaattactgcagtggatgcaagagctctacggcaacgacgaggaggccgcctaa

SEQ ID NO: 328254 - DNA, 357 bp, Pseudomonas aeruginosa
atggagatcgtcacccttgtccaaatcagcttaaatcgcatcgggacagccagtggcgtcgggagcggctttatgccaaccaaatcgcgcatggtgtacgcagaaactaaagatgcggaaattcagactttacgcgacgtggttatcaaggcagccgaggaaaacggagagatgggggctctcgataatctcagtcaccggccatcctatggatcagcggacatagtcttcgacattcagggaggcaacgtctcatacagccaggcttatgcgaactgcgaggcgttcccggcgctcaagtctggagaccgctacttccgcctcgacgaagtcaaaacaacgacccgccatttgtga

SEQ ID NO: 328255 - DNA, 954 bp, Pseudomonas aeruginosa
ttgccgaatgtgtttttctcatactgtcacgctgacgaggcgctgcgagatcagcttgagaagcagctcgccatgctaaaacggcaaggagtcatcgagacttggcatgatcgaaggatccatgctggccaggaaatcgatactgccattgatgagcatattaacagcgatgagatcatcttgttgttggtcagcccggacttcatcgcttcggactattgctacaacatcgagatgaatcgggctatggagcgccatcatgcgggggaagcgatcgtcatcccggtaattctgcgcgcatgcgattggcactacgcgccattcggcaaactgcttggcactcctcaggatggaaagccggtaacgcagtggcctgacagggatgaggcgttcctgcaggtggcgaaagaggtccgtaaagcggctgaaaatttgcgcagcactcatgcgaaagctagcccgcaagctgctcgagtcgaactaattacccctcaacaggcagtgcctagcggaccgcgatcaagcaaccttcgcctggccaagacgttcactcagctggacaaagaccgattccagattgataccttcgaatacatcgcccgctatttcgaaaactctctgcaggagctccaggcacgaaaccctggcttcgagggcgtgtttcgtcgtgtcgacgccaataggttctccgcgaccatctacaaagatggccaagacgttgcgagagcaacagtcttcgttggggggcagatgggggcggggatctactacagccagggcgcttcgttcagtggcaactcgtacaacgaaatgcttacggtgcaagcggatgaccagtctctctatctcaccagcttggggatgaccttccgtagggggcaggaccagaagctgtcccaggaaggcgccgctgagctgctgtgggaaaccgtcatcgcccctcttcagcgttga

SEQ ID NO: 328256 - DNA, 1803 bp, Pseudomonas aeruginosa
atggctcgtcgcctgacctaccacaaactgctccatcgggacggcctctggcgcattgtgaacctcaagtatttagtacagagggaatcaaacactaacttcgatgcggatcgagtggatgactccagagaggatctacgaattcaggtcgtcatcggaagagttgtgaaggtcggagaacggacagaaacagaagatctcgaaaccgtcccggttccgattggcgacctccctctactgcgccggaatagactcgtccgagacggatacctgcttcatgaacagtacaagctgggcgaagaggcggatctgcgccttaccctcgacctctcgcccgagaatctgaacttcttcaggcgtttcgccacagacaaatcaggccccatactcaatagcaccaagcacagctcagaagacgataaagaatcgctgtttgtaggcattggctacaacagcgatcccttcggaataattatcccttgcgtggatatattctctttcttctatgcaaactccactttcttgacacagcttgttctgagcgaatcgattttaaagccagagaccgcagtctatgacagtgaaaaatcaaaaataagcggacgttaccgtaagatttggctaaaggaaggcatcccatctaaagatgctcgcttcctagccatgctgcttttcgataaatatgcattagaggccgcccagagcatctatctacatagaggccctgaaggtcgtaacgctaaaatctggtctatccgcgccacccctcctattaaaggtaaaaccaaattaaaagttaaaggcagataccagggaagccgcctaatagttactgagattctcaaatgcgactggacaccccctttcgactatttggaatgggagcgcgacaatagatccagcacatccacaagcgggactcttaatccaggccccataaggaaactggtagatatagattcaccagagaaaatctcagacgaacctggagatcgcagaacggttccaagtgaagtgaagcaagactatctcggccataggttccctcgcctcaaagcagtttccgtaaagcgctctccgaaacccagctctagtgataaaaatagtgctcgatacgctagggaaaatgtaccaactaaagaggccacaactgccctaggtggatccggcccaagcaagcgtagagctgacattagagaaccagaagagccccctcgcgagacgacaacgcagcgagaactcgaaaacgttcaaccccaggcagaagacattagcgaccagtgcgtctcatctgcattaatgctacttgctgcacacaaccatgatcttgcctgggtcgactttatcaatccgggatttgcaaagacgacattactgagtgacgaggatcatattcctctctgcttactccccagcacaattgataataaagagagcgcctggctatttagtgacaagtctaaactaaggcagcgtgtggcactcatagccagggtcgaatatcgaggcgaggtacgcttcgtgattgaactacaaaagagaatgaaccagagcatttcaacgacccttatatggagaaatccagatagtgaaattcaaaaatccctgctaaataaactattgttgctgatcgctggcccaaccaaacccactgagcgcacaagattcacaacagcacatgatctgcagtgggggcggtgctggcataaaacgctgaagggcacagaattccagcgtgccgaagagtttttaagtcgactattcgaaacctctccccttcaagaagaggacgaaggctactag

SEQ ID NO: 328257 - DNA, 1146 bp, Pseudomonas aeruginosa
gtgccctgggtgtcccgcattggtaggcttgccggcaccgagtcgagacaagagcgaaaagccgatgaagttgctgttgcgttgcctgctgctgggggcgtgggtcgtctcgccgagcctgtgggcctggtccaaccatacggtgggcagctacctggcattacgcgagctggcggccatccgcgaggcgccggaagtcgaggtggagccgctggaggcgttcctcgccgccgagcgcggcggactggccgccctgctggacgagcaggaggcctacgcccgtgcgcatatcggcaactacccggcgcgtccggacgccctgcgcttcgccgccgacggcgaggccggcgacttgcgccaggcgttcctcgcggcgctgcgggtcaacccggagatccgcctggcgctggcgatccagccgcttcccgggcaggaccagccgcagcgcccgcacctcaagccacaggaggtgctggtgttccagaacctctcgccgtggaccgcctggcgtttcatccgcctggagcccggcgagcgagtcgcgcccctggcagtgctggccaccgccgccgacgaaccggactacggccacgacatcaacctgttcagcgacaaccccggcgaggccggccagcgctacggcttcggcacccagccattcggcgacccgcgcttcgagttcagctcccaggcgccgttccacatgggcttctaccacgaggcggcggtgatctacagcggcgcgccgttcctcgcccgggcctggccggaatggcgcgcctaccagtacttcggcctgtcccgcttcgccttcgccagcggtcatccctactggggctaccggttccttggctggggcatgcactacatccaggacatcacccagccctaccactccacgccgctgcccggtgccagcctggcggcgatgctacagatggagggcaaggcattgctcggctacccggaggaaaagcaggcggccatcgagcgtgtcgcgaaccgccataccgcggtggagaaataccagttcgactggctgcgccaactgctccgcgacggccgcccgcagccgatgctcgacgcctacgccgacacccgccgcgacggtgcctatccggcctattcgccgacctacttgcgtga

SEQ ID NO: 328258 - DNA, 795 bp, Pseudomonas aeruginosa
atgctgaacaccctgaaaaccctgagcctggccgtcctcctcggcagcggcccggtccaggccgccgacgccccgctgaagatcggcaccaccgccgccttcgccccgccgctggaagtcgccgtgagcgaagccggcaagcagggactgaaggtcgaactggtcgagttcagcgactggaacgcccccaacatcaccctcgcccagggcgacatcgacgccaactacttccagcacgtgcccttcctggaaaacgccaaccgcgaaggcggcttccggctgaagccgttcgcgccggggatcatcaacaacgtcgggctctattcgaagcgctacgccagcctcgcagagttgccggaaggcgccagcgtggccatcgccaacgacccgatcaatggcggccgcggcctgcaactgctacagaaggccggcctgctgaagctcagggacggcgtcggctacaaggcgaccctcgacgatatcgtcgacaacccgaaggacatccgcatcaccgagctggaggcggtgcaactggcgcgcgccctcgacgatttcgacctggcccagggctacccgcactacctgcgcctggccgggaccatcgacccgacccgggcgctgctgttcgacgggatcgacaaccgggaatacgtgatccagttcgtcacccgcggcgactaccaggaccgcgacggccgcctggcgcgcttcgtcgacatctaccagcattcgccggtggtccgcgccgcgttggacaaggcccatggcacgctgtaccagccgggctgggagtga

SEQ ID NO: 328259 - DNA, 3048 bp, Pseudomonas aeruginosa
atgaagggcggtttcaacctgtcggactgggccctgcgccaccagtccctggtctggtacctgatggcggtatcgctggtgatgggcgtgttctcctacctcaacctggggcgcgaggaggatccctcgttcgccatcaagaccatggtcatccagacccgctggccgggcgccacggtggacgacaccctggagcaggtcaccgaccgcatcgagaagaagctcgaggagctggactcgctggattacgtgaagagctacacgcgacccggcgaatcgacggtcttcgtctacctcaaggacaccaccaaggccggcgacatcccggatatctggtaccaggtgcgcaagaagatatccgacatccagggcgaattcccccaaggcatccagggaccgggtttcaacgacgagttcggcgacgtgttcggcagcgtctacgccttcaccgccgacggcctggacttccgccagctgcgcgactacgtggagaaggtgcgcctggacatccgctcggtgaaagacctgggcaaggtgcagatgatcggtgcgcagaacgaggtcatctacctcaacttctccacccgcaagctggccgccctcggtctcgaccagcgccaggtcgtgcagagcctgcaagcgcagaacgcggtgaccccgtccggcgtggtcgaggccggccccgagcgcatctcggtgcgcacctccggcaacttccgttcggaaaaggacctgcaggcggtcaacctgcgggtcaacgatcgtttctaccggctgtccgacctggccagcatcagccgcgatttcgtcgacccgccgacctcgctgttccgctacaagggcgagccggccatcggcctggcggtggcgatgaaggagggcggcaatatcctcgagttcggcgaggcgctcaatgcgcgcatgcaggagatcaccggcgaactgccggtcggggtcggcgtgcaccaggtgtcgaaccaggcccaggtggtgaagaaggcggtcggcggtttcacccaggcgctgttcgaggcggtggtgatcgtcctcatcgtcagcttcgtcagcctcggcctgcgcgccgggctggtggtggcctgctcgatcccgctggtgctggcgatggtcttcgtgttcatggaatacaccgacatcaccatgcagcgggtttccctcggcgcgctgatcatcgccctcggcctgctggtggacgatgccatgatcaccgtggagatgatgatcacgcgcctcgaactgggcgactcgctgcacgactcggcgacctacgcctacacctcgacggccttcccgatgctcaccgggaccctggtgacggtggccggcttcgtgcccatcgggctcaacgccagctccgccggcgagtacaccttcaccctgttcgcggtgatcgccgtggccctgctgctgtcgtggatcgtcgcggtgctgttcgccccggtgatcgccgtgcacatcctgccgaagactctcaagcacaagtcggagcagaagaaggggcgcatcgccgagcgtttcgacagcctgctgcacctggcgatgcgccggcgctggacgaccatcttcctcaccgcgctgctgttcggcgtgtcgctgttcctgatgaagttcgtccagcaccagttcttcccgtcttccgaccgtccggaactgctggtcgacctcaacctgccgcaaaacagcagcatccacgagaccagggcggtgatggaccgcctggaagcgacgctgaaggacgacgaggacatcgaccactggagcgcctacgtcggcgaaggcgcgatccgcttctacctgccgctggaccagcagttgcagaacaacttctatggccaactggtgatcgtcaccaaggacctggaggcccgcgagcgcgtcgccgcacgcttgcgcgatcgcttgcgcaaggactacgtcggcatcagcacctacgtgcagccgctggagatggggccgccggtgggacggccgatccagtaccgggtcagcggaccgcagatcgacaaggtccgcgagtacgccatgggcctggccggcgtgctcgacggcaacccgaacatcggcgatatcgtctacgactggaacgagcccgggaagatgctcaagatcgacatcgcccaggacaaggcgcgccagctcgggctgtcctccgaggacgtggcgcagatcatgaacagcgtggtgaccggcagcgcggtgacccaggtgcgcgacgacatctacctggtgaacgtcatcggccgcgccgaggatagcgagcgcggctcgctggagaccctggagagcctgcagatcgtcacgcccagcggcacctcgatcccgctcaaggcgttcgccaaggtcagctacgagctggagcagccgctggtgtggcgccgcgaccgcaagccgacgatcacggtgaaggcgtcgctgcgcggcgagatccagcccaccgacctggtcgcccggctggcgccggaggtcaagcgcttcgccgacggcctgccggcgaactaccggatcgaagtgggcggcacggtggaggagagcggcaaggccgagggcccgatcgccaaggtggtgccgctgatgctgttcctcatggcgaccttcctgatgatccagttgcagagcgtgcagaagctgttcctggtggccagcgtcgcgccgttggggctgatcggggtggtcgcggcgttgctgccgaccggcacgccgatgggcttcgtggcgatcctcgggattctcgcgctgatcggcatcatcatccgcaactcggtgatcctggtgacccagatcgatgccttcgagaaggacggcaagacgccctgggaggccgtgctggaagccacccaccaccgcacccggccgatcctgctgacggcggcggcggccagcctggggatgatccccatcgcccgcgaagtgttctgggggccgatggcctatgcgatgatcggcggcatcgttgccgccacgctgctcacgctgatcttcctgccggcgctgtacgtcgcctggtaccggattccggaaccgggacgctga

SEQ ID NO: 328260 - DNA, 1368 bp, Pseudomonas aeruginosa
atgaatgccttcaacggagcggcacgcaacaatgccgaacccatgagattccgcagccttggcggatgggtggagcagccagacgacctgcagccggcgctgacaggccacgagcacgcagacgtagtcgtggtcggcgccgggttcgccggcctgtcaacggcgctggaactaagggcgcgtggagcgaacgtcatcgttctggaacagcagttcgcaggcttcggggccagcgggcgcaatgccggctatctgctcggcagcatgggcatagaatgcgaggttttcgtcaagcgagtggggcttgagcaggcacgtaagttcgtcggtttctatgacgaggccgtcacctatgtggaagagcgtttggctgcgctggacatcgattgcgattacacgccctcgggaatcatccgggccgccgtccatcccagccaggaaaagcgactgcgagcgaacatggagcttggccacgcgctgggctctgtcacgcgcttcgtggatagcgccgagatgcgcgcgcgaggcataccgcccgcattcctgtttggcagcgagcagcgtggcggcaccttgaatccgggaaagtacgtcaacggcctgcgtcgtgcggcaatcaaggctggcgtgaaattgtacgaacgcacgccggtgctttcctactgtgaagggcaggtgattacctgcaatacggcccagggtatcgccaccgcccctgtaatggttctggcgaccaacgcctacacgcctcagctgggagtgctccgcaacaaggttgcaccgatccgggtttcggcaatcgaaacccagccgctatcggcggagcaactggcgtccctgggttggcaagagcgtgaaggcctcattacgccgcactacaccatggaaagtcatcgcctgacggcccatgacaccctgctgctgaccgtgaagcaattgggttatgcctacggctcgaagacacccaatgttccggaccacgccgcctacgccgcgttgtcgagagtgttgcgcgagcgttttccttccttgcagggccttgccattcggcattgctggagcgggtatatcagcggggcctacgacttcctccccgtggtcggggtgacaggggccaggcagaacatcttctatacggcgggatgttcagggcatggccttgccactcaatcgctcatgggcgcgcttttcgccgagcgaatcggcggtggagagcctccgctgctagcggcgctggaacacaagacgccatccatgctacccgagccacttcaatggtgcgccataaagacggcctttgcggccgccaggctactggatgcatggaccgacaagaaagtgcgcaaagacaaagccttgaacggctga

SEQ ID NO: 328261 - DNA, 411 bp, Pseudomonas aeruginosa
atgcgggtcgtgttggataccaacatcctgttcagcgccctgatctcgccacatggcgcgcctgatgcgatctaccgtgcctggcgcgccgcgcgtttcgaggtggtgacctcgcggatgcagctcgatgaaattcgccgggccagccgctaccccaagcttcaagccatcctgcaacccgccaaagtaggggtcacgatcaataacctgcaacgggctgtggtactggagcggctgaccatcgaggtcgaagccgatgacccggatgactcgtttctactggccatggccttggcgggcaatgcggactacctggtgaccggtgatcgccgcgcgggcctgctgcaacgcgggcacatcgaacgcacgcggatcgtcacacccgccgtgttctgcgccgaggtgctgtga

SEQ ID NO: 328262 - DNA, 240 bp, Pseudomonas aeruginosa
atgaataccattcgctggaatgtcgccgtctcggccgacaccgaccagtcgcttcggatgtttctggccagccagggcggcggccgtaagggcgacctgtcgcgcttcatcgaagaagcggtacgggcacacatcctggagctgagcgctgagcaggccaaggccgctaacgcccctctgagtgaggcagaattgaccgacgcggttgacgaagcgctcgcctgggcacgtaagcgctga

SEQ ID NO: 328263 - DNA, 936 bp, Pseudomonas aeruginosa
atgaagattggttatgcgcgagtgagcactcgggatcagaaagccgacctccaggtcgatgccctgaaacaggccggatgcgaacgcatctaccaagacatcgccagcggcgcgaaaagcgcccggccagaactcgacaaactcttggccaacgtgcggccgggtgatgccgtggtgatctggaagctggatcgcctagggcgctcgctcaagcacctggtcgagctggtcggcgagctggcagagcgcaaggtcggcttgcagagcctgaacgaccccatcgacaccacccacgcccaaggccgcctggtgttcaacctgttcgcctcgctggccgagttcgagcgggagctgatccgcgaacggactcaggcaggcctctcggccgcacgggcgcggggccgaatcggtggccgtcccaagggcctgccagccaaggccgaggcgaccgccatggcggcggaaacgctgtactgcgagggtcggttgagcgtcagcgccatcggcgagaagctgcatatatccaagagcacgctgtacagctacctacggcaccggggcgtcaagatcggcgcatatcagaagagcgcccggacacgcgatcagcagctcaccgccttgtcgtcatcgccggcagagccgtccgccgtcgagcgggtggccaccgtcacgctgcgcctggcagtggtgaataacagcaagttcgtgcgcggccgaaagcgggcaacggagaacatcgagcgctattgcctggagccctacggcatgaagcggctggagactggccactacgagctgaccattccgtatcggagcgacgacgagctggacaagaccgtacatgacctgctgaccgaaatcagccaggaagccgacatgcgcaactgttttatcgaagcggatgcctgggaagaaggtacggaacggcgctggtag

SEQ ID NO: 328264 - DNA, 372 bp, Pseudomonas aeruginosa
gtgcactttctgttccactgctccccaaaccccaacttcagcggccgcagcgtgaccgctgtaaagcaggactttcatgccgctcaactgttgaagaacctggcgctgttgatgcagcacctgctacagccggtcatcgaacagcgccacaaaggtcgcaagctgcgatggaaagtcaacttcacccaaggcgtgtcacggctcaaaaataccctggtcgagctgctggtgcggcactgtgctcaggggctgagcaatgtgctggccttgatggctaaaagcctcagtgccgtacgctcaggccgtagctttgcgcgccaacgcaaacgcgcagccagccgaggttgtgagggctacaaaccgacgcgctga

SEQ ID NO: 328265 - DNA, 267 bp, Pseudomonas aeruginosa; identical to SEQ ID NO: 239726

SEQ ID NO: 328266 - DNA, 282 bp, Pseudomonas aeruginosa; identical to SEQ ID NO: 160018

SEQ ID NO: 328267 - DNA, 273 bp, Pseudomonas aeruginosa; identical to SEQ ID NO: 54417

SEQ ID NO: 328268 - DNA, 747 bp, Pseudomonas aeruginosa; identical to SEQ ID NO: 54416

SEQ ID NO: 328269 - DNA, 210 bp, Pseudomonas aeruginosa
atggtcgccctcagttatgcgggcaagccactttcccgcgatcatggggggccggcgcgtcttctagtgccgcacctttacttctggaaatccgccaaatgggtgaatgcgctgcaattcacgacgcgtgacgaggccggcttttgggagctgcacggctatcacatctacggcgatccgtggcgcgaacaacgatacacccatgactga

SEQ ID NO: 328270 - DNA, 471 bp, Pseudomonas aeruginosa; identical to SEQ ID NO: 54414

SEQ ID NO: 328271 - DNA, 291 bp, Pseudomonas aeruginosa
atggaagcgttcgtcgtctttacgcgggaagaaaccagcgacccacatgcactcgcaacctattctgcaggcgtcggaccatcgttcgatggtcacgacgttacctttctcgccgcttatggcgcgatccagcatttggaggggccgcccatcgaaggggccgtaatcttgcgtttcccgacgatgcaggccgctcgcgactggtatgacagtcccgcctaccaaaccatcgctgctcatcgctttgccggttcccgttaccgcgcctttatcattgaagggcggcggtga

SEQ ID NO: 328272 - DNA, 432 bp, Pseudomonas aeruginosa; identical to SEQ ID NO: 54412

SEQ ID NO: 328273 - DNA, 1014 bp, Pseudomonas aeruginosa; identical to SEQ ID NO: 54411

SEQ ID NO: 328274 - DNA, 969 bp, Pseudomonas aeruginosa
atgagcatcatcgccgcctattattacaacgaaggcaagcgagttcgcgaaatcgcgctcgatgagcacgtcaagttgggcgagagtcgctcgggcttctgctggatcgcgcttagcgaacccacccccgaggaactactcgcgatccaaaggacatataatcttcatccgttggcgatcgacaacgcgatgcacccgctgtgcccgcccaagctcgaggtctacaacgatgagttgtacgtcgtcgcgcagaccgccgagctggtcggcgaccggatcagctacggcaagatggcgatcttcaccggtcacaatcaccttatcaccgtgcggcacggcaatgccggagcgctgggcaaacttcgggagcaactcgaggcatcgccgacgcagttcggcaagggtgtcgactatgtgctgcacgcgatcttgcatcgcgtggtcgaccagtatctgcccatcttcgaaatgatcgaggacgacgtcctggcgatggagcgacggtcgctgcacgatttcctcgggccagaagaggtggcgcgaatcttcgaactaaggtccgaactcacgcggttccagcgcacgctcagggctatggccgagctggtgcgaaagctcgttcgcggccactttccctgcatcagcgccgaaatgacaccatatttccacgacgtcgcggaccatgtccaccgcgtgcagtccatggtcgacggcctcctgcttgtcctgtccacggtctttgaggccagcagccttctggaagcgcaaaggatcggtgtggtcacccgccagctcgcggcctgggcggcaatactggcagtcccgacggcgatcgctggaatatacggcatgaactttaagcacatgccggagctggacacggcctacggatactttgtcgtgctcggagtgatagcgatatcgtgcgttttcctatttgtgcgcttcaagaaggctaagtggctgtga

SEQ ID NO: 328275 - DNA, 705 bp, Pseudomonas aeruginosa
atgccagacctctcgtcctttccgatcacgcagcgctggccggcatctcatcccgatcgcctgcaactctacgcagcccctacgcccaatggcgtcaaggtctcgatcatgcttgaggagactggcctggcgtacgagccccacctgatcgacatctcgaacaacgagtcgaaggatccggcgttcgtgtcgctgaacccgaacggacgcataccggcgatcatcgatccggctggccctgacggtagacccatcgccttatgggaatccggtgcgatcctcctctatctggccgacaagacgggtcagttcatctccaccgaaccaggccagcgttacgagaccctagcgtgggtgttctttcagatgtcggccatcgggccgatgttcggtcagctcggcttcttcctgcgatttggcggcaaggactatgaggacaagcggccgcaacagcgctttatcgacgaatccacgcgtctgctggggattctggatcgccggctggaaggccgcgactggatcgtcgacgactattcgatcgcggacatcgcgacgctcggctgggtgaatgcgctggtggaattctacgctgcgggtgacatccttggcctcagcagcttttcgaacgtccgcgcatggcttggacgcgggctggctcgaccggccgtccagcgtggcctccacattcccgcgaggccagcatga

SEQ ID NO: 328276 - DNA, 540 bp, Pseudomonas aeruginosa
atgcatcagcgcgctgttctcgcaggaggatgtttctggggcatgcaggatctgatccgcaagcggcccggcatcatctcgacccgtgtgggttacacgggcggcgatattccgaacgccacgtatcgtaatcacggcacgcatgccgaggggatcgagattgtcttcgacccgacagtgacgagctaccggaacatcctggaattcttcttccagatccacgatccgacgacgctgaaccgccagggcaatgatcgtgggctctcctaccggtcgggcatctattatgtcgacgaggagcagaagcgcgtcgccgaggatacgatcgccgatgtggatgcctcggggctgtgggatggcaaagtggtgaccgaggtccagccggtcggcgagttctgggaggccgagcccgatcaccaggattatctggagaagcgcccgggcggctacacctgccacttcgtccgtcccggctgggtgcttccgaagcgccaaaaggttgacgacgtacagccagcggccgggaccgcggcggaatag

SEQ ID NO: 328277 - DNA, 444 bp, Pseudomonas aeruginosa; identical to SEQ ID NO: 54407

SEQ ID NO: 328278 - DNA, 804 bp, Pseudomonas aeruginosa
atgcgtgatttgatggcggaactcaaggaactgcgcctgcacggcatggccacggcctgggcggagttaactgcacagggtgagtcgaacacagcctcatccaagtggctgctcgaacacctgctggaacaagagcacacagatcgcgccatgcgctcggtgagccaccagatgaacatggccaagctgccgatgcaccgcgatctggccagcttcgatttcaacgcctctagcgccgacgcacgcctgatcagcgagctggccagcctggcctttaccgacaccgcgcagaacgtggtgctgatcggtgggccaggcaccggtaaaacccacctagccaccgcgctggccgtgtccggcatcacccggcacggtaagcgcgtgcgcttctactccacggtcgatctggtcaatctgctggagcgcgaaaaacacgacggcaaagccgggcggatcgcccaggcactgctgcgcatggatctggtcatcctcgacgaactgggttatctgccgttcagccaggctggcggtgcgttgctgtttcacctgctgtccaagctgtacgaacacaccagcgtggtgatcaccaccaacctgagcttcgccgaatggtcgagcgtgttcggcgacgccaagatgaccaccgccctgctggatcggctgacccaccactgccacatcgtcgaaaccggtaacgagtcctatcgcctgcaacacagtagcttggcggcccaggccaagatcaaatcacgggagcgaaagcgtaagggcggccaggaaccggaggacgatgagccgttctga

SEQ ID NO: 328279 - DNA, 2967 bp, Pseudomonas aeruginosa
atgccccgccgttcgatcctctccgccgccgagcgcgaaagcctgctggcgttgccggacaccaaggatgagttgatccgtcactacacgttcagcgaaagcgacctctccatcatccggcagcggcgcggcccggccaatcggctgggcttcgcggtgcagctctgctacctgcgctttcccggcgtcatccttggcgctgatgagccaccgttcccgccattgctgagactggtcgccaaccagctcaaggtcggcatcgaaagctgggacgagtacgggcagcgtgagcagacccgacgcgagcacctggtcgagctgcaaacggtgttcggcttccagccgttcacgattggccactaccggcaggctgtccagttgctgaccgagctggccatgcaaaccgacaagggcatcgtgctggccagagccttgatcgagcacctgcggcggcagtcggtcattgtgcccgccctcaacgccgtcgagcgggcgagcgccgaagcgattacccgcgccaaccggcgtctctacgacgccttggctgagccgctgacggacgtgcatcgccgtcgcctcgacgatctgctcaagcgccgcgacaacggcaagacgacgtggctggcctggctgcggcaatccccggtcaaaccgaactcgcggcacatgctggaacacatcgaacgcctcaaggcgtggcaggcgctcgacctgccctccggcatcgagcggctggttcaccagaaccggctgctcaagatcgcccgcgagggcggccagatgacgcccgccgacctggcgaagttcgagccgcagcggcgttacgcgaccctggtggcgctcgccatcgagggcatggccaccgtcaccgacgaaatcatcgacctgcatgaccgcatcctgggcaagctgttcaatgccgccaagaacaagcatcagcagcagttccaggcatccggcaaggcgatcaatgccaaggtgcggctgttcgggcgcatcggccaggcgctgatcgaggccaagcaagcgggccgcgatccgttcgccgccatcgaggccgtcatgtcctgggatgctttcgccgagagcgtcaccgaagcgcagcggctcgcgcaacccgaggacttcgatttcctgcaccgcatcggcgagagctacgccacgctgcgccgctacgcgccggaatttctcgacgtgctcaagttgcgggccgcgcccgccgccaaggacgtactcgacgccatcgaggtgctgcgcagcatgaacagcgacaacgcccgcaaggtgcccaccgacgcgccgaccgagttcatcaagccgcgctggcagaagctggtgatgaccgacaccggcatcgaccggcgctactacgaactgtgcgcgctgtcggagctgaagaacgcgctgcgctccggcgacatctgggtgcaaggctcgcgccagttcaaggacttcgaggactacctggtgccgcccgcgaaattcgccagcctcaagcaggccagcgaattgccgctggccgtggccaccgattgcgaccagtacctgaacgaccggctgacgctgctggaaacgcagctcgccaccgtcaaccgcatggcgctggccaacgagctgccggacgccatcatcacggagtcgggcctgaagatcacgccgctcgatgcggcggtgcccgataccgcacaggccctgatcgaccagacggcgatgatcctaccgcacgtcaagatcaccgaattgctgctggaggtagacgaatggacgggcttcacccggcacttcgcccacctgaagtcaggcgacctggccaaggacaaaaacctgttgctgaccacgatcctcgccgacgcgatcaacctgggcctgaccaagatggcggaatcgtgccccggcacgacctacgccaagctggcctggctgcaagcctggcacatccgcgacgaaacctacggggcggcactggccgagctggtcaacgcgcagttccgacatcccttcgccgagcattggggcgacggcaccacgtcatcgtcggacggccagaacttccgcaccggcagcaaggccgagagcaccggccacatcaatccgaaatacggcagcagcccagggcggacgttctacacccatatctccgaccagtacgcgccgttccacaccaaggtcgtgaacgtcggcgtgcgcgactcgacctacgtgctcgacggcctgctgtatcacgaatccgacctgcggatcgaggagcactacaccgacacggcagggttcacggaccacgtcttcgcgttgatgcacctgctgggcttccgcttcgccccgcgcattcgtgacctgggcgacaccaagctctacatcccgaagggcgatgccacctacgaggcgttgaaaccgatgatcggcggcacgctcaacatcaagcacgtccgcgcccattgggatgaaatcctgcggatggccacctcgatcaagcagggcacggcgacggcctcgctgatgctcaggaagcttggcagctacccgcgccagaacggcctggccgtcgccctgcgtgagctgggacgcatcgagcgcacactgttcatcctggactggctgcaaagcgtcgagctgcgccgccgcgtgcatgccgggctgaacaaaggcgaggcgcgcaacgcgctggcccgcgccgtgttcttcaaccgcctgggggaaatccgcgaccgcagcttcgagcagcagcgctaccgggccagcggcctcaacctggtgacggcggccatcgtgctatggaacacggtctatctggagcgggccgcgaacgccttgcgtggccacggtcaagccgtcgatgacggcctgttgcagtacctgtcgccgctcggctgggagcacatcaacctgaccggcgattacctctggcgcagcagcgccaagatcggcgcgggcaagttcaggccgctacggccgctgcaaccggcttag

SEQ ID NO: 328280 - DNA, 291 bp, Pseudomonas aeruginosa; identical to SEQ ID NO: 16838

SEQ ID NO: 328281 - DNA, 387 bp, Pseudomonas aeruginosa
atgagcgagaaccgcctgcccgattacctcgaccacattcagcaggccgcaaccgatgcgcgcagcttcgtggaagggatggccaaggacgacttcttggccgacaagcgcacccagcaggccgtcatcatgagcctgatcgtcatcggcgaggcggccacaaaggtgatggatggctacgtcgagttcacccaggcgcatgccgacgtgccgtggcgcagcatgcgcaatatgcgtaatcgcatggctcacggctatttcgacatcaacctcgatgtggtgtgggagacggtacaggaatggctgccggcgttgctccagcaattgcccgccgtgcgtcaggatgccgacgatgaagaccgtaacgacaaaggcatggagccatga

SEQ ID NO: 328282 - DNA, 327 bp, Pseudomonas aeruginosa; identical to SEQ ID NO: 91887

SEQ ID NO: 328283 - DNA, 501 bp, Pseudomonas aeruginosa; identical to SEQ ID NO: 85998

SEQ ID NO: 328284 - DNA, 372 bp, Pseudomonas aeruginosa; identical to SEQ ID NO: 85999

SEQ ID NO: 328285 - DNA, 558 bp, Pseudomonas aeruginosa; identical to SEQ ID NO: 86000

SEQ ID NO: 328286 - DNA, 2223 bp, Pseudomonas aeruginosa
gtggggcgcgcacagcgcgcaattcgacctgaccctggacacctacgaatcggaacagggcgtgcacgccgaattcacctatgccaccgacctgttcgaggctgcgaccgtggagcgcctggcacgtcactggcgcaacctgctagaggccgtcgtcgccgagccgcgaagacgcctcggcgacctaccgctgctcgacgccgaggagcgcgccacgctgctgcaacgcagccgtctgccggcgagcgaatatcccgccgggcagggtgtgcatcgcctgttcgaggcccaggccgggctgaccccggacgcgccggccttgctgttcggcgaggaacgcctgagctacgccgaactcaatgcgttggccaaccgcctcgcctggcgtctgcgcgaggagggtgtcggcagcgatgtactggtcggtatcgcgctggagcgcggcgtacccatggtggtggccctgctggcggtgctcaaggccggtggcgcctatgtgccgctggatccgcagtatcccgcggaccgcttgcagtacatgatcgacgacagcggactgcgcctgttgctcagccagcaaagcgtgctggcgcgcctgccgcagtcggatgggctgcaaagcctgctactcgacgacctggagcgactggtgcacggctacccggcggaaaacccggacctgccggaggcgcccgacagtctctgctacgcgatctacacctccggttccaccggccagccgaaaggcgtgatggtccgccatcgagccttgaccaacttcgtctgcagcatcgcccggcaaccgggcatgctggcgcgggaccgtctgctgtcggtgaccaccttctccttcgatatcttcggcctcgagctatacgtaccgctggcgcgtggcgccagcatgctgctcgccagccgcgagcaggcccaggatcccgaggccctgctcgatctggtcgagcggcagggcgtcacggtattgcaggcgaccccggcgacctggcggatgctgtgcgacagcgagcgtgtcgacctgctgcgtggctgcaccctgctgtgcggtggcgaggcgctggcggaggacctggcggcgcgtatgcgcggattgtcggcatcgacctggaatctctacgggccgaccgagacgacgatctggtcggcacggttccgcctcggcgaagaggcccggccgttcctcggcgggccgctggaaaacaccgctctgtacatcctcgacagcgaaatgaacccatgtccgcccggcgtcgccggcgaactgctgatcggcggcgatggcctggcgcgtggctaccatcgccgccccggcctgaccgccgaacgcttcctgcccgacccgttcgccgccgacggttcgcgcctgtaccgcaccggcgacctggctcgctaccgcgccgatggggtcatcgaataccttggacggatcgaccatcaggtgaagatccggggattccgcatcgaactcggcgaaatcgagacgcgcctgctggagcaggacagcgtgcgcgaggcggtggtcgtcgcccagccgggggtggccgggccgaccctggtggcctacctggtgcccaccgaggccgcgctggtcggcgccgagtcggcgcgccagcaggaactgcgcagcgcattgaagaacagcctgctggcggttctcccggactacatggtgccggcgcacatgctgttgctggagaacctgccgctgacgccgaacggcaagatcaaccgcaaggcgctgccgctgccggacgcgagcgcggtccgggacgcccatgtcgcgcccgagggcgagctggaacgggccatggcggcgatctggagcgaggtcctgaagctcggccacattggtcgggacgacaacttcttcgagctgggcggccactcgctgctggtgacccaagtggtttccagggtacgccgccgcctcgacctgcaggtgccgctgcgtaccctgttcgagcacagcaccctgcgcgcctatgcgcaggtcgtggcgcagttggcgccggccgcccagggcgggatcgtccgatgcgccagggacgcatcgccgcagctgtcgttcgcccaggaacgccagtggttcatctggcgcctggatccgcacagcgcggcctacaacatcccggtggcgttgcgtctgaagggaccgctgcggcgcgatgccctgcagggtgccctggacctgctggtgcagcgccatga

SEQ ID NO: 328287 - DNA, 681 bp, Pseudomonas aeruginosa
atgcgcacgctcatcctttccctgctgctgctcgtcgacctcaccgcccaggcggcgaccctcggctttcccgccctgcccggcggcggcctggtctacaagcaggtgcagagcatccgcgagcggcgcttcgccgacctggtcgagcagaagaccgatttcagctgcggcgccgcggccctcgcgaccatcctggagaaggcctacggcgccccgctcgacgagcaggcggtgatccagggcatgctcgcccacgccgacccggagatcgtccgcacccagggcttctccatgctcgacatgaagcgctacgtcgaatccatgggcatgcgcgcgcgcggctaccggatcgaggcggcgcaactggaacaactgaagatccccgccatcgtgctgatggaaatccgcggctacaagcacttcgtcgtcctgcaacgcacccagggcgagtacgtgtacgtgggtgacccggcgctggggcacaaacgctacgcgctgacagagttcgccaagggctggaacggcatcgtcttcgccgtgatcggccagggatacgaccgcggcaatccgctgctgacgccgcccgaaccgctgaccgcgcgccatcgcctggaccgcttcaaaccggtcagggacgccgaactgatggagttcggcttcatccagagcgatttcttctga

SEQ ID NO: 328288 - DNA, 1311 bp, Pseudomonas aeruginosa
atggcaggacgaggcccgccagcgcttctactacacgccccagggcaccctggtgaagggcctgcactacgactggttcaccgccctcgaactgcccttctccgaagaacccttcgccgcccccgaatacctcgcccgcttcggcttcctcgtcgatccgcagcagaaggccagcgacctcaaccccggcaacctgccggtgggcttcagccagcaccgcgacgagaagaccggcacccgctacctggacatcacctgcgccgcctgccacaccggcgaactgcgctaccagggcaagtcgctgcgcatcgacggcggcgccgccatgcactccatcgccgccaccgtgccgactctgcgcggcggcgccttcggccaggcgctcggcgcgagcatggccgccacctactacaacccgttcaagttcaaccgcttcgccaggaaagtcctcggcgaacgctacgaacaggacaagtcgcaactgcgcgccgacttcaaggccgtgctcgacaccctcctgcgcaccgcctggaacgacacccgccgccacctctaccccaccgaggaaggccccggccgcaccgacgctttcgggcgcatcgccaacagcgtcttcggcgatgccatcgacccgggcaactaccgcgtcgccaacgccccggtgagctatccgcaggtctgggacatctggaaattcgactgggtgcaatggaacggctcggccatgcagccgatggcgcgcaatatcggcgaggccctcggcgtcggcgcgcgcctgcagatcttcgacgagcacggccagccgctgcggggcgagcagcgctacgcctccagcgtacgcctgcacgacctgcacgccctggaagaaaccctgcaacaactgaaaccgccgacttggccggaagacctcttcggccgcatcgacctgcaacgcgcctcccagggccgcgccctgttcgaagccaactgcgccttctgccatgcacccaaggtgcaaccggcggaatacgccgcccccggacgcaatcccgagtggcgcatgcacatggtgccgaccgaggtgatcggcaccgatccgaccaccgccgacaacatcgccgaccaccgctacgacctgcgcaagctcggctggagcgtcgacgaactggcgcggatgaacgtccagctgatcggcgccgatccgcagcaactcgacctctcgcaactgtcctcggccaagggcctggcctacatcaccgccttcgtcgagcagcgcgcctaccgggacgccggcatcccgccggaacagcagaagaccatgaacggctttga

SEQ ID NO: 328289 - DNA, 1167 bp, Pseudomonas aeruginosa
atgcaaattcagaacgaagcactattcaagcaccacttactgaacggaatcaatctttttaccggttcaggcttctcggtactagcccatgggatgctgagagacatccctaaaaccatgcccgttggcgatggtttgcgaaaagagcttttagattacttcgacagagaccctaactccaacctttcattatctcagctttgtctaatcctaagtgcaacaaaaaaagatgaattaatagagtttttaaaaaccagatttaccaccataaactataacaacgaatacgacgcccttgaacgggtaaacatcaaatcaatctttacaacaaatatcgacgacttaacgtatcgaatttacgaaaacagcaacaactactacctgaacgacattgccattcgcggcccttcgattaatgaccgcaacgcaattgactacatagcgcttcatggctgcgtacgttacgaggacggcaattttgatttttctccagtagaactttcgtctagcttcgaacgcgacaaggataaatggtacggctacatcaacagaatcaaaaccacaccaactttatattggggttacagcgtatcagatgcgggagttctacagtccctcgcgaaagaaacaacaagcggaaaggatagagctccgtcttggattgtcttgcgaacagacgataaagaagcgaaggaatactatagctccttgggcttccaaataatagttggcgaaacccagcagctactcaactacttcaagcaacttaaggcaacaaacaagccagacaaaaaaagaatacgtgccgcctcctcattcaaagagtacaccgtcccagaaaaagcccaaatgccagttagaaccctaggagagttttacctaggtgccgagccaatctggtacgatgtattctatggaaaccttcacaaaaatgagcattttcaacgaatcagcaacaacatagcagctaaaaaaaacgtcatacttaccggcggcgccctcacaggaaaaacaactctcttaaagctactaacaataacttccgccgacttcgggtggccgttcttcattgaggaaatcacacctgaaaaagcaaatcttctaaagcgcgagattgactctgaaggtagacgcgttctgctcttcataggcggcggcaaaaactga

SEQ ID NO: 328290 - DNA, 1068 bp, Pseudomonas aeruginosa
atggttctatggcttcgttgttggtatgcccaaatggatcagatcctttccctcctgtcggagactatccctcaagctcgatctctggagcagctcgctcggcctctgttgtcgctgctcagccagatcacgggcatggagtcgacttatctgacgactattaacactgacgaaggtattcagcgggttgaattttcccggaatacgggggagatggtcataccagaagggcttgttgtgccttgggcagataccctgtgtaagcgggctctggaagaaaatcgcatgttctccgacaacgtcgccgagtgctggggagactctgacgctgccaaagccctcggtatcaagacctatctgagcgccccaattcgatcccaggatggccgtgttctgggtaccgtctgtgcggcaagctcagagcaggttgcacgttcacccagtgtcgagccattgctggggttgttgtcggggcttttgggatactcccttgagcgcgagcttttggtgggtcagcttcaagccgctaacgctgaactggctacgcttgccctgaccgactcgctcactggccttgccaatcggcgggccatcctgcgggatctggatcatctatttgctctagctcagcgtgacaacaagtacgtgctgatcggcgtcatcgatcttgatggattcaagctgatcaatgatgcctacggccatcacgcaggagatcagttccttcggggtgtggcatgccaactaaagcagtgtctccggagcagtgatagcgttggtcgcgttgggggagatgagttcatcgtaatcgcgcaaggagcgtcaccccggagtgcggatctggacaaagagctaggagctgctgcagcgctcatgcaggcgcgtttgagccaggtgacagtcgggagctatacgctggctgatggccttgcgcctctcgattacaaaggcgcgagcgttggagtggttgcagtgatgcccgacaaaactacagtggaagaggccgttacgttggcggacggcgagatgtatcgtgttaagcagcaacgcaagcggcagatcacgtag

SEQ ID NO: 328291 - DNA, 870 bp, Pseudomonas aeruginosa
atggaataccacacttcgctgagtacgagagtggcccgagtttctcctattattttggttgtgttctccattttttcggtgcaaatcggcacggcgattgctatatatctatttcatgcggtaccagctagtggggcggcattctacaatgccctcttttctgccgttgtccttggaatattctctcggaacgcaaagatccagctaagtcttaatggtgtggcatatttactctgctttggcgcttcaatcgcagggatgttcttgacgtttttctacgctgttgagcgtataccgatggccatcgggtcgacaattgaattcatggggccacttgcgttgtcagttgtctttgcgcgccgtccaattcattttttattcatactcttagcaattgccggtgttgtggttctaatgccatctgtcggctcaaaattagatgctatcggtgtgttttatgctgttctatcagctgctttctgggctttgtttattctgctctgtccaaaagtgacagagaactgtcatggggagtctggtctcgcccttggtatggcaatagccgcggtcattatttttccgtttgcttggctgcaaaatgggctgctgaacataaccctatctattttgtttggtgagtttctgatggctttattttcaacaattatcccgctgtccttggagtacattgctttaagatcaatgtctgctcggtcttttggtgttgttgtgtcaatggagccagttgcttctgctttagtggctttcgttgttttggctcagccaatataccctcgaatggctattgcgatcattgctgtgactgttgcggcgataggtataactttaactgaagagaaaaatgaataa

SEQ ID NO: 328292 - DNA, 1128 bp, Pseudomonas aeruginosa
gtggagaaatttaagtgcattaaaagttttattgctgagtctcgcccggcagctccatacttttgtctgaatctagatgaaatcagaagatgtaccgagagtctggtttccatgtttccaggtgaggttgcgtatgcggtcaagtgcaatccgcatcgcctagtgttagaagaaattatacgcagtggcggtcaagcttgggatgttgcttcgattgaggaaattaggcttgtaaatagtttgtctagagtcctccctagttactttatgaatcctattaagtcggcaagcgatatttttgaggcgtactctgattttaatataaaagagtttgctattgatcaggaggaggaagtaagtaagtttatacggcttgagatccctgctgcagatataactctgtctgttcgacttgcggtttccggtcatggagcactcgcgagtatggctggaaagttcggtgttgaattttccgaggcggtacgtctaattaaattcatacatgctcacggtttcaagtgtgggattacttttcatgttgggtcgcaatgcctagctcctgaggagtactctaagagtatcgcccaagctatcgctattgccgaagcttctcaggttccaatctcagctttagatattggcggggggtttcctgcgaaatacgaggggcacgagcctgattttgatttatataaagatgtaataaagaagtctttgagtgggagtgttttagaaaaatctcatctacgatgtgagccggggcgagctatagcggcaagttctgtcatggtgctcacaaaggtgctggcggtcagatctaacggccttgtgcatattaatgatggtatatacggagggttgtctgagataaatttcctgaattgcactttccctgtggcagtctggagtgacgctggggagcgactgacggggggggtaaggtcttggaagatagcgggcccaacctgtgatagctccgatatgtttaagaaagaatatctcctcccagcctcgattaaggttggagattacattggcttcggcatgctgggtgcttattccccatcgcttgcaaccagatttaatggatatggtgcgcaagactgggttcaagtttcaaattattga

SEQ ID NO: 328293 - DNA, 813 bp, Pseudomonas aeruginosa
atgattagagaaactcagtatcttcaggttgaagaagcagtaaaggatattatgggggctaatctcaagtacgaggatttggctcgtgagcttgagaagttaattggtgataagtacgggtctttgagtacggatacaaatccggccataacaaatcttgctcactggcaggaggatgacattagattcttggtgaaggagtactctgggttctcaaatgattcaattcatctatttcatgatgcattaattcgacttgaatgggacggggttaaagaggaggttaagcgcaatctatcagaagaaatgggggcgttaactaatgacgttccgcaccttgagctcatgaggcgtggctacaagcaggaattaggtgttgaaactgagggtgttgagtattccacatgcacagaggcattgttgaccagaatgcgcagaatattcagaagctccaataatgcatatctctgcggcgccttgcttgctctagaagcaaccgcaacgtttgagttcaagggcgtagagaaaattcttcgtgcattaaaacacaaaatggatggtggggagattgctgcgaactcagtgacaggccaatatattcttggtcatgtatctgattctccggaaggggaaaatcctgaagacgatcattatgccggaatgagatccgcgattgggtcatatatatcggtagagaaaaataatgaccttgtcagagggtttgtttctgtctgtacggcactaaattcttggtgggagaatatttcaatagaggtctattctcgtaagttggatttggctccgtccaattaa

SEQ ID NO: 328294 - DNA, 1467 bp, Pseudomonas aeruginosa
gtgcacattgtattcgttcacactcccatggcaacagtaagcctaccagagcgggaggctttctggcgaaattttgacatccggtaccatgcgacacatcccggcctaaagccaatgaaaaacgtcctttgggaactttctcattggatgacttggttggcgggagtgctagtcgatgcaggttatacatcccttcaagcaatggatctatacgcatcagagtgtactatgacgggtatagatacattcaagatgggtaataccattaaggaatacccggctgatgtgtacttgctatccccaatgacaccaaatttaccttttgcttatcagattgccgatctaattaagataatacatccaaggagtattgtcatatttggtggggttgtggcaacgccgttgcacaaaactatcgcgtcacatccaagtgtggattatgtggtttttggtcgtggcgagttggctttgcctgcattaataaaagcgcttgaccagaaagatggccctgaatttctcggtaatctttcttttagacttccggatggtcgggtccacacatctcacttcgagtatccgtggttgcctgtcaatgatattccaaagccaaagattgatttatttgatatatcaattggtgaggatatacgttatttgcgtcaggtttatgctctcggatgtccgtacaagtgctcattctgcaccatacaaactatcgggaggaaggcggattactttgctctcgatagagtaattgatgagatagcgagctatcgagattactacggtgagcatcataacgtgtatttcggcgatgaaacatttacagtaagtaaagatcgcaccttggatatttgtagcgcccttaagaataatggaagtataagatatgatattcaaacgcggctcaactgcttgaatgatgacgaagtgctgaaggcgctgaaggaaagtggatgcagttgggttgaaattggaatagagactgtaaatcaagatagccaaaatattcacaagcaaaaaattaaactaaaagagctcgagaacaccctttctagggttcaggatgcaggccttgctacctgttctttccttgtgaatggttttcccgatcagaccattgatgatatgaagcgttctactgattatgcctgtggcttaatcgataggggcttattgcaagcatcttatctttttggcctggttccatatcctggtagcgaattattttcctctcctgagtcatttggcatggaattactgcataaggatttcaggctttatcatgaagagttggcccccgtatataaaacacatcacgcagggccggatgagatatacgaggtttttctatctggtattacggcgttagctgaggcaatggggaagacctcgaatatattagattattctttctattcggattcattcgaatacggaaagttttggtctgagtctcatgtctaa

SEQ ID NO: 328295 - DNA, 1140 bp, Pseudomonas aeruginosa
atgcgtaacgccccccatcaacttcaaattattcttcagcaccttggcgcattacagattgactctgtatgcgccctgattcgctcacattatctacctctttactctcgtataggtcattatgagcgcgccgaacttgaccgtttggcctgggggagcggaagggaaagagcgctttttgaatattgggggcatgaagcctcattgatgccgctggcactctaccccttgttacaatggcgcatgcagcgggcccgtatcgggagggggattcataaacagataattaaatttggtcacgaacagcagccacttatccaacaagtattaaaatcaatagtggatcgtggcgcactgacggctggagatctagccaagcgcgacaaacctggcggttcatggtgggactggagtgcagagaaactcgcgctggagtggttgtttgctgtcggtgaactgacagtatctcgtgggcgtggattcgagcgccgctacgatctacccgagcgagttattcctgaatcgatacttaatcatcctacaattactgagggcgaggcgcatcgccgattgctgatgcatgcagcgaatgcactaggggtagctacagaacaagacttgcgcgactactttcgcttggatgctatagatactcgcttgcggctttctgagttggtcgaggacggtcagcttagtgcagttttggtggatggctggatcaaacctgcatggatgactaagggtctttcacagtctaagtcacgcaagccaagtgcgttgctttcaccgttcgactcattaatttggtcacgtgaacgcactgagagactatttgactttcgttaccgattagaattctaccaaccgccctctaaacgagtgtatggttactacgttatgccttttcttttccgaggccaattggtaggcagagttgatgtacgagctgaacgcgcacagcgacgcctgacagtgcacgcagttcatgaggaaaagatcggtttaagcgacgcagcgttgtccgagctagctcttcagttgcagtcactcgcaaagtggttagggcttgaggcagttttgctgaactgcaagcgcccggtggcacagcgcttactggcaaccggactcttggctggttag

SEQ ID NO: 328296 - DNA, 1128 bp, Pseudomonas aeruginosa
atggtaactgagagattggatgtgattgtcagcgcactgagacggcagacccgcaagagcacagtcttgcagggaggagggctaatcgatcggctggcacgcgaaactggattggatgcagcgacgatacggcgctgcctcacggatatgaggacgcgtggttgggttgaggccagttcatggtcgggaactggaaaccccgtggggcgcgtcaagataaacttgccatcgctgccgccaccatcatgggccgagcagtggaggcacaccctgatggcttgtgatcagctttccgacgctgatcgcatggcgctgttcgagtgtggagccattctgtccgatatgagtgcatctgagctcccacaaatcttagatggcctaattcgactacgtgagaatcagtctaggcacgttggcagccccgccttcctcgttagcgcacgttacttgcgcggctcgtcaaagatgctcggcaaattgggtgctcgcgcaattaaagcattcggcattgatctttctcagtttcccgatcaccccccttatgtcgtcactgccggggcagccgatccccaggcggtagtgctagtcgaaaatccgacggcgtttgaactggcggccacaacgtcggcagttgatcgctgtgcatttatcgccaccttcggctttgggctaaacaaggtctcggaggattttggcaatcaactggcgggtatggtcgaggaatgcttctcccaagcggtgacattggtgcgcgagggttcaagaaccccctcggcgagagaattgctctcgcatcctaacatcacgttctggggcgacctggacatcgcagggatgcagatttttgagcgaattgccaagcgcctcccgagactacagctatctgcactgtatgggccgatgatcgatgccataacgaaggatgatgatagacatccttatgtcgctgccactggcaagcctgggcaggcgacatttctgtctacccgagaggactcctcagccatgctaaattattgctgtgaatgggcagtagatcaggaattggtaacagcaactcatatcgaagagcttgctggagatccacttgtcctgcatagggaatggaatatctttcagaagggatag

SEQ ID NO: 328297 - DNA, 945 bp, Pseudomonas aeruginosa
atgaagcggcctgcagattgctctgggagtttcgggcggtttcgaaaagggctgtcggtgctggatgccgagtggctgcaaagtcaggatcggtttgacgcgccgacagaaatgaaggttcagatcgaggccaacatcgaaagcaatcggggcctgttgcaacaggccaccacaagccttgagtttgctcgcgacaagaccacagagatgctgacgattctggcaaaggatgcggagcgggctgtgtcgatactggaagaggcgatggcaacgacaccaactgctcgtttctatgtcagagccaacgtcatagcaccggataagatcggtgatctgctagatcgtctttacagcgacatccaggcgcagatgcggcgacaagctgattcaggctcgaaaatcaccgagaaacgccagaggaagcgggctctagacgagctccggggagaggtctaccgctccttgtttgcagatgtaagcgtggagtttcgccatccttccatttggggaggtggtcaacaccgactgacctcaaagggcttgagcgaagggatgaggactgcggtcagcctgatgtggattgcgaaactcgctgaattccgcctgcgccaggcgatcgatcaaacgggcggtatgaggaggcagaaccgcgccgcattacgcaaagaacgatacttcatgattctggatgggctcttttctaacctcagtcacgatgatctgattgactctgccatggagtcacttcgcctctcagccgggcactttcagttgatcgggatgatccatcaccccagatacatcaacaatccgaagatattcccttcatatttcgttgggcggccgtatcgtgccagtaacggcaaacatgcgtggcttacggtggactggcagaagaatgcccccgactcgcttggcgtcttcggctcgcattttacgcaatag

SEQ ID NO: 328298 - DNA, 867 bp, Pseudomonas aeruginosa; identical to SEQ ID NO: 321962

SEQ ID NO: 328299 - DNA, 2403 bp, Pseudomonas aeruginosa
gtgaacggttctgtaaagctacctgaggccccgacacgtggcctgttgtcatatgtcgaaggtgtgttgttcaggcatcgccggctggtgctggcgagcctggcggtattcacgctgatcatgggctggttcgccgtacagctgcgcatggatgccggcttcgaaaagcaattgccggtaggccacgaatacatcgagacattcgaggcctaccgcaatgacctgctgggggcgaaccgactgaccatcgtggtcaaggcccgagagggcgatatctggagcgccccgggcctgaagcggctgtatgacgtcacccaggcggtgaccttcctcccgggagtatcgcgcagcagcgtgcgctccctgtggacgcccaacgccttcgtcaacgaaatcaccgaggaaggttttcgtgctgatccgctggtacccggaacggtttctcccgagcacctggatgaccggatcatcgcgaagatcgccaattccactgcccagggcggcttcatcggtacgctggtttcccgggaccagagcagcgcgatgatcacggtggaactcaacgagtacgatagccagggcgcccatctggactacgtaaccttcaaccatcggctggagaaagagatccgccagcgcttcgaagacggcgatttcgaaatccagatcatcggtttcgccaagcagatcggcgacatcgccgacggagcttcagccgtgctggagttctgtttgctggcgttgctgctgacggcgggggcggtgtactggtattgccactcgctgcgtttcaccttgctggcgttggtctgttcgctggcctcgctggtctggcagttcggcagcttgcgcctgttgggctacgggctcgatccgctggcagtgctggtgcccttcctggtattcgccatcggggtttcccatggggtgcagcaaatcaacttcatcgtgcgcgagatcgccatcggcaagagcgccgaagaggcggcacgctcgagcttcaccgggttgctggttcccgggacgctggcgctggtgaccgcgctggtttccttcgtgacgctgctgttgatcccgatcccgatggtgcgggaactggcgatcacggcttcgcttggcgtggcctacaagatcgtcaccaacctggtgatgctgccgttgatggcgtcgttgctgcgcgtcgacgacaagtacgcagccgcccaggaggtttcccggcagcgtcgcagccgttggctgcggggcctggcccggctcgccgagccacgcaaggcgcagtgggtgctcggcgcggccttggcggtgttcctggcggcgatctggcaaagccatgaccgcgtcgtcggcacgctgcaggcgggtgcgccggagttgcgcgaggactcgcgcttcaatcgcgacgcggtctccatcgccagcaactacgacattggcctggactggctcagcgtggtgttcgaagtcgacaaggctccttccgaggtggcctgcgaggatgttgccctgggccagtaccaggatcgtttcgtgtgggccatgcagggggtgcccggcgtcctctcggtcgcgtccttttccaccaccatgcgtcagttcaacgagggctacaacgaaggcaacccgaagatggcggcggtgcccatcgacccgatgaactacgccgcgctggccaccgaggttgcgcgaacccccgggctgatgcgcaccgattgcagcatgtcggccgtgcacctgtacctggccgatcacaaggccacgaccatcaaccgagtggtggacgccgccaaggcgttccgcagcgagtatccgatgtcaggcatttcgatccgcctcgcctccggcaacgccggcgtcctggcagcgatcaacgaagaggtggagaagagcgaaacccccatgctgctttacgtctatgccgccatcgccttgctggtgttcgtggtctatcgcgacttgcgggcagtcctggtgtgttgcctgccgctgaccatcggcaccttcattggctactggttcatgaaggagctgcagatcggcctgaccatcgccaccttgccggtgatggtgctggcagtgggcattggcgtcgattacgccttctacatctacaaccgcctgcaactgcacctggcccatggccagacgatcaccaaggcggtggagtacgcgctgctcgaggtgggcgtcgccaccattttcaccgccatcaccttggccgttggcgtggccacctgggccttctcggagctcaagttccaggccgacatgggcaagctgctggccttcatgttcgtcgtcaacatggtcatggccatgaccgtgctgccggccttcgccgtatggctggagcgggcgttcccgcgcaaacgtcccgtgcgcatgatcggcgcgctggtgcactga

SEQ ID NO: 328300 - DNA, 1647 bp, Pseudomonas aeruginosa
atgaaaaaaataattacgaaagcctcaggccttgtcatcgcgtgcacaaccccactggcaatgggattcacgttcgaaaccgaaaccctcaatggctctttcgactccacgatcaccgcaggcatgggtctgcgtaccgagtcacggggctgcaacctgatcaaccagggaccgaccgggcacaacgcgccctccggctgcctggcgcagagctccggcgtggccgaccagggcgacctgaactacgaccgcggcgacatgttcaccaactacctcaagggcacccatgagctgttgctgaagatgcccgaggacatcaccttcatggcgcgcggcacctggatccgcgacttcgctgccaccgataccaccggcacgctgtcgttcaacaccccggagagcgtcggcagcaacgggctgagcgacgacgcccgcgatgacctcgcgttcaaggcccgcctgctggacctgtgggtgagcaaaggcttcgacgtgggcgggcagcgggtccgcgcacgcctgggcaaccaggtgatcaactggggcgaaagcctgttcgtggccggtggcatcaacaataccaacgcctacgattaccaggccttggcgcgccccggcgtgcagctcaaggaggccgtgctgccggcgccgatgctcagtgtcgcgtcgggcctgggctcgggtgtcaacgtcgaggcctactatcaattccgctggaacaagagcgaattgccgccggtaggcagctactggtccaccaccaacgcgctgggtgagggcaggggggactatggattctccgaaaaggacgcccgcgacagcggccagtggggcctttcgctgcgctggcagccggaggacagcgacgtcgcctatggcttctacgtaatgcgttatcacgacaagttgccatcgttgcgtgtcgccattctcgacccgaacaccttcgcggcggcaccgacctgggagtaccaggaagaccggatgatgtacggcatcagtgccaacatgccgatcggtgactgggccgtcggtacggagctgtcgtaccggccgaaggactcggtcatgctcaacccggtcatcgacctgtgtaccggcaacggcggcaaatgctggaaggacgagaagaaattccagtggcacctgacaggcctgtacagcttcacgccgtccaattccccgacgcttctggatttcagcggggccagcacgggcagcttgctgaccgaactggtggtcatcaagtacccggggctgcatgacgaggtcaatggcgaaccgctcgccgcgggactcaatgcctggcagctggatcctgccagagcgccgaagtcccgtggcgacaagacctcttcagggatcaacctggacttcagcctgacctatgacggcaccttgttgccgggctggcaggtcacgccgggcgtcttctatgcacggtcgctgggaggacggacaccgaacctcagcgcaaccttcaccgaggacgcgagcagcatgaacctgtacctgaacttcgtgcggaacccggccagttggcagatttccctcaactacgcgaagttcatgggcggtgagacgccctacgaccagctttatcgtgaccgcgattatgtcggcatcgcgatctcccgcaccttgtga

SEQ ID NO: 328301 - DNA, 1425 bp, Pseudomonas aeruginosa
atgaaagatgtaactgaacggctggaaggtgaagcgcccacccgtcgtgttttccagcagcagttgttcatgaccctcgcggtatcgaccgtgctctgttcggtccaggctgcgccccagggccccgaggcgctggggtcgaaactgacccccttgggcggggagatcgcagcgagtgcaagcggggatattcctgcctggacgcagcctggacagcaggacgagggatggagctacggccaggtgcgaggagagcactggaagttcaagggcgacaagccgctctacagcatcgacgcgaacaatctcgcgcaacactcgagcaagctgtcccccggacaggtcgagctgttcaagaggattcccggctatcgcatggatgtgtatccgacccgtcggacctgtagcgctccggacttcgtggtcgagaacacccggcagaacgttggtttcgccaagctcgatgctgccggcctcgctctggacgaggctcacgttccgggcatcccgttccccatgccgagtaccggtgccgaggtgatgtggaacatgaagatgcgctaccgcggcgttggcgtcgaaattccccggaccatttccggaatttctccacgcaaagggggggaatggttacgtcagtcgacagataccttcttcttcacgccctgggggaaaaaggggagtgcgctcttctcgtcagttggccgcctggagaatgcgaccttcttcaactacctcgagccggctgctctggccggccagtccgcggtacagactgccgtggccggcgaacaggccacgaccttctactacttccccggccagcgccgcgtgcggcgaatgccgtcgtactcctacgatgcgccacagatcggcctggataaccagtacaccgtcgacgaggcgaacgtcttcttcggcaccatggaccgtttcgactggaagctgatcggcaagcaggagttgctggtgccttacaacgatttcggtgcctacgacactggcgccaaggtggagacgtttgccggcaacgactcgatcgcgccgcagtcgcgtcgctatgagctgcatcgggtctgggtcgtcgaggccaatgtccgtcaaggcatgcgccatcaggcgccgaagcgcatgttctacatcgacgaggacagctggaacccgttgctggcggtggactacgacaagcaagggcagatctggaaagtgcgcgaagggttctcgattcccgtgtacgagacaggcgcctgcgacgtccaggcccaggtccagtacaacctggcggatggccgctacctcttcgacatgacctcgatcggtgcgggcaagaacgatattcgctggctcaccgaagacaacggctccccccgcctgaagcgtgacttcttcacctccgacaatctgcgagccatcagcgagcgctaa

SEQ ID NO: 328302 - DNA, 663 bp, Pseudomonas aeruginosa
gtggaaccgagagacttgttcgctctgctctcatgtattctcctggtgatttccggattgttttatggcgctgcattcatcaggcggaaaaactatttgcttggtctggagttcttgatcgtaggtatctcggcatcgaacttcactacattcatagccaccggctggcaagccaactacaacatcgcgatctttctcgacgccttttcgcgaggggtgggagtgccagttatcgctacgctcgggctaatggcagttacccacgattacaaaccgtcgcccgccaaggatatcctcatttttgtagctggctttgccgctaccggcgtctacttcctgtctggaatcatcgagggattcctcccttatttctatgtattcatgtggtcagcctataccttgtatctttgctacttcaccttgcaactggcccgtgcaggcgaagccctccatactctggccaccatcgctggcgggctggcgggcctggtagtagcgctcaggtatgacttcttcccgattccgggagacgacacgaagatggtcttcatgaccatggccttcctggcttggtcctattccatggtgcagttgtactatgcctatggtgcgctggagcgttcgaacaaggtatacggccaagcgtttcctcgtccacgataa

SEQ ID NO: 328303 - DNA, 3903 bp, Pseudomonas aeruginosa
gtgcaggcactgccttcggccgttagggctcagggcagcctgcctcgcctcgaagagcggagcgccgttcttgccgagcctccggttgggcagccggcgctgcaaaccctgccgtcggttgcgcgcgttgagggcgtgcccagcaatgccacaccgagcaacagccacaagtatctgatcgagaccaacccggcgctcaccgagctgaagcagttcctcaactcggactacctgctcggtggcctgggtatcaatccggatgacagcaagaagcgcctgggcgacggtctatacgagcagcgcctggtacgcgaagcgatcgtccagcgtacggggcagcgcttcatcgccggattgaacagcgacgaagcgatgttccgctatctgatggacaacgccatcgccagcaaggacgtattgggactgacccctggcgtcaccctcagcgccgcccaggtggcggcgctgacccacgacatcgtttggctggaagaagtcgaggtgaatggcgaaaaggtcctcgcccccgtggtctacctggcccaggccgaggggcggttgggcccgaacggcgcgctgatccaggggcgcgacgtgaacctgatcaccggcggggacctgaggaacgccggcaccctgcgcgcgcagaacgacctcagcgcgacagccggcaacatcgacaacagcggcctgatcgaggccggcaaccgcctcgacctgctggccagcggctccatccgcaatgaccagggcggcatcattgccgggcgcgaggtaagcctctccgcccttaccggagacgtcatcaatgaacggacggtgacccagcaccagtcctcctacaggggaaccggtaccactgaggcatttgccgatagcaccgcgcgtatcgaggctgcgcagaaactgaccgtttcggcaggacgcgatgtagccaatattggcggtgtcatcgacagcaagggtgacctcgctttgcaaggcggcagggatgtcctggtttcggctgcggtagcggagcggggctggacggcaggaagccaggcataccagacccagacgacccagatgggcgccgaggtcgtggcggggcgcgatatcagcgtcagtgccggacgcgatatcagcgtcgcgggcagccgcatcgacgctcgtcgcgacgtgacattcgaggcgggtcgcgatgtgggcctggtcgcggctgccaacgaagagcatgcctatggcaagaccaagaaggtcactttccaggacgacaagatcacccagcaggccactcgcgtggacgctggcggcgatctggcgatcaatgccggacaggacctgcggctggtcgcgagccaggccagcgccggcgacgaagcctacctggtggccggcgacaagctggagctgctggccgccaacgacagtagttactacctctacgacaagaagagcaaaggcagcttcggtagcaagaagacccggcgcgacgaaatcaccgatgtgacggcagtgggcagccaaatatccagcggcggcgtcctcaccctgctcagtggcggcgaccagacttaccagggcgcgaagctggaatcgggcaacgacctggccatcgtcagcggcggcgcggtgaccttcgacgcggtgaaggacctgcaccaggaaagccacgagaagagcaagggcgacctggcgtggcagtcgtcgaagggcaagggccagaccgacgaaaccgtacgccagagccagctcgtcgcccagggcaacctggcgatcaaggccgtggaaggcctgaagatcgacctcaagcacatcgaccagaagaccgtgagccagaccatcgacgcgatggtgcaggcggatccgcaactggcctggttgaagcagatggagcagcgcggcgatgtggattggcggcgcgtgcaggaactgcatgacagctggaagtacagcaactccgggctgggcgtcggcgcgcagttggcgatagcgattgtcgtgacttacttcacggcgggtgcggcgagtgcggcattgggatcgatggcgggtgtgggggcgggctcaggaagcatgatggctgctgccggtagcactgcaatggtccaggccggtacagcagtaggaacagctgccgccggctgggcgaatgccgctggaactgccgtggctatgggcatggccagcaatggagcgatcagcaccatcaacaaccggggaaacctgggggatgtcgtcaaggacgtgacctccagcgatgcgctgaggggctatgtagtcgctggcacgactgcggggctgactgccggcgtctacgacaaatggacctcgacccagaccggcacctcgaccgctctaccgaacaccggggccgtggcgcccgccgcagggttgggcacctggcaaggtgtgggccagttcacctcgaaccagttgctgcagaatggcacttcggtgctgttggaccgagcgctgggcggcaagggcagcctgggcgatgcgttgcaaaacagcctggcaaatgccttcgcggcctacggcttcaagctgattggcgacaccacccatggcgtactggacgacggcagcctcggcaagatcggcttgcacgccctgatgggaggtctggccgccgaagcggtcggtggcgatttccgtaccggagccctggctgcgggagtcaacgaggcgctggtggatagcctcgccaagcaatacgccagcctgcccatcgatgacaagaagggcctgctgaccatgagttcgcagttgatcggcgtgctggcggcttcgacgcagggcgatgcggacgccaagagcttgcagacgggagcctgggtggcggggaatgctactcagtacaacttcctcaaccatgcggaaaatgaggagcgttggaagtcccaaaaggcctgccaaggaggagacgaggccgcctgtgggcgtgcggatgcttgggataagttggaccgcgaccgagatctagccttgatgactgcctgctctacgggcggacaggcatcgacttgtagtgcattgcgtcaagaagcctggaaggctgctcaaagcctcaagcaggccagttggagcccggaagcgagggaacaatacgcgcaagccatgcaaaatccggaattgcgtgcttacacgattgagtcagagcttcgaagcatcaatcaggtaaataatcctattaccgctggagattcaaagcgcctcgctaaagctttggccagttttggatccgacttcgtccccgtctacggtgacacaaaagcattttctgaagctcaagacccctttgactatgcaatggcaggggtgggactggttcctggtgctggagatgcggcacagaaagtattgagcaaggcgaaaaagctcttccaagaagggaaggtggcagagtctgctgatttagtagagggattaacaaaagaggtaaaaaacagtaacgctgcaaaaggatttattcctgcagaaaggactgggcttaattttgaagagaaggtaaaaaataaggccggagggtatgttgatgttgagttgtctgctaggcagaagtttgataagtcaggtgttgtagtagatagtaaattcgcccaaagcgatctagttgctcgttactcgcccgatgggaatctgtatatagattggtatggcactactgtgtctgggaagggagttggtagcgagatgatttctagagcaattgaggcagtaggagcaaataaggttaagacggtttcggcgcagttaggaaaagacaatcttgatgcttttaaagctgggtcttcgagagggctttccaaggagcaggcagtatggaatactccactaggtaagacaatgagctctttaggttttacggaagttgaggttcatggggcaagtgttaaatttcttcatttagagtga

SEQ ID NO: 328304 - DNA, 837 bp, Pseudomonas aeruginosa
atgacatcgttgctgcaaagcaagcgagtcgttgagatgatcagtcgcgtagttcgcatggcttcaactgaggtcgccttgggcgacgtttggctgcaaatccatcaggcctatggggtcggcaggatcagtgggcgcagacttttgcttgacgctgaggacaggaaggcgctacgcagtcttgctgagcggcataccggctgggacccgcatgtggcgggtagcaagattcagggtggtcgcgctgagctggctgcatccatgcgcaacgaaaaactgtccggtgagcgtgtcgctaaggacctcgtcctggtctcagccccctccgggaagatacagctgggggactctgtccagccgctgatgcctggatgcatgttgacggtgccttcaaggctggttgccgggcagcgccggattatcatcgttgagaacctgcaggccatgctcgatgcgtcgcgctttgtccttccggagggtctggttgacgctcctttcgtgttccgagggtcgcctcagttctcgataggggctgtggtggatttggctaagcgcgtgcccgaggtttactacttccctgatgcggatccacagggcttggtaaacgcaaacaaagaggtcctatcaaagggcacccttgggccgagtcctgaggccttccagaccatgcacgatgcaggtgttagtaagcttcaggattacgagactcaagctagtctcatgcctgggctcttagcagccgacaatccgttggcgaagatcattcatcattaccgcgcagggttctcccaggaatcgatggctgcgttctcgtgcccgctactttgctacgtatga

SEQ ID NO: 328305 - DNA, 1251 bp, Pseudomonas aeruginosa
gtgaaggcggataactggcgagagttcggtgctcatctggtcgctaatgcggacatcatcgaggacatttgccaggctgacgaagagggtgtgccaaagtcggaaaaaatgacggccgggctgtcttggttggtcagtcagcgactggtcgatgactgcgacgggtgcctccatccttcctccatgctgcttgacctgggggcccgcattggcgcgcagcgctttgagctgtctgcgcctgacctgcaggaactgttgattcgtatagaacatggctgtgaacgattccactcggccaaggagggggcgccttctgagctggatcgagagctgcagcaggtgcggctttctgttcgtcaggtcgtcacccatttgcgtgatgaacaccgggcggcgactgactttatcgaggctcgatacgggtactcttcacggttcagagaccgcctgagggatatcgacagcgcggtgaagcgcctcgggcgcctgtctgaaaagctgatggccttcgatcgtgacaagctgagtcagtggtgtcacggtgatcggtctcttcgtcgtttgctgctgaccagcctgtatgagtcgatggatcgctgcaagacgggcatacgtgacctgatcgaccgactgaaccagctgggcaccaccatgcgacggcgtaaccattatcgccgggcggcgcagggcgtattctcctggctgcaggatggcaacagtcctgatctggatgggatcctggagcgtgccgatgcagctaactgggttcgtgctacgcgcctgaccaatagcggctacctgttcccgcctgtagaggatgaaaaagccatacaggaaatgttggccctgattcaggcaatgcctttgccgaaagtcagaaagatgctgctcgatccgttggtaagtcgcgaagccgtgaaggtggttcctgcggcgcctgaggtcgaggatgccccagagccatttgtcgagccgcatttccatcgcatgctcgcagcgctaaagcgtgatctgtcgcctcagagtgcgctggcttactggacggaagtcgccgccggaggtttccgcagtgccatctggctctatgcattggatgcctactacctgaaactcatggcggatgccgcccgagtcgggacgattccgcgtttcgtgttgtcgccggtgctggcgccgccgcatgaaggcttcggtaatcaggtcgtggtcgacttggtgttgcgcctaaggaataaaggggagcggtcatga

SEQ ID NO: 328306 - DNA, 648 bp, Pseudomonas aeruginosa
atgagaaaagttctcgaaggactcatcgacgggcagttcttctgtccttactccaatcgcgatgtttacgagcagcttcggcagcctgagtatgctgctgccattgatggcgcacttcgcccaattggacgggcgctggcgcgtctgggcgaaggcgaagatgtcacagcgttctttgcccgttacgtcgacctggccgactctggcgatcggcgtgaggcgatggaggaactgaagcgcgttcgcgatcagattatgcctgttctgcatttcatccatctctacagccgagcagggcaaggggatgtttgcctgtcaccaggagaggaagtctcctttggtgagttgctgatgcacgtagatcagttccaggtcgcccgtgagcagcttcgtgatctctgcgtttacccgctgttctctcgggtaaagactgtcgatgccaacaaggaaaaactgaatgtcgtattcaaaggactggtggaggcgggctatctggttcccaagggggctgagtccagcctttatgtggccactggcaagatgggctacttctaccaggtagtgtcctggatcgccgatagccagaaattgctgcctgcagaagatgttgagcctgatgagagccaggtcacgggagagcttctgtga

SEQ ID NO: 328307 - DNA, 3738 bp, Pseudomonas aeruginosa
gtggccaaacttcttcgagtcatcctgattgattcactttgccgaggcgagatcgtcgaggtgaaagcagacgaaaacacctgcctgacaggcaccaacgggatcggtaaatcaacctttctgaagctgatccccttgttttatggggccccagctgggcgaatggttcgtaaggggaccaataccaccagtttcgctgatcactacctgcctaatgcgtcgagctacatcgtgttcgagtacgagaaccacgagggcgcgcttcggctggccatcctgcatcggtcatccaatggttacgcctaccagttggcagcctctggctggaggcctgagctgctttatgtggatcaggactccggcgagctggtgctgcctgggaaggtcagcagtcgtatccagggcatgggagtcgactgtacgccggaactgagttggagccattacagcaagatcatccagtacaacactggatcggcagacatggacggcatcacggatgcggccgtgaaaaagatgatcaacctcttccggcgcatgtattccctggcgccgttgaggcgcaactttgctggcatcgacagcctgatgttctccctgctcgaatccaagggcacctttgactccatggagtctgctgtcggagaaattatccggcaggagaccatgcgtagcgagatcgacctttcaggtatcgatgtccagtccttcctaagtgcgatcagcaaccgggcgagctacctggtaatggatagggaagtaaaacccaagattctcaatctggcggccttgcgcagccggctgatggcttgcgatctgcagcttggacgcctgaagacggtcgctgcgacgcggcagttttccgtcaagaaggagcaggaggctgctgcggaagccatggaaacgcagcgcaaagaggagctttctgcgcaagatgtttctcgtgatgagcagcggcagcttgattgtcgtctgggcaacgcccgtgcagcttccgctgagcaattgcggctgctgaggacgctggaagagcagaagatcgggtatgacaaggccggtatgccggcattgcttgctgaaatcgacagcctcccttcgatgcaggaggatctggccgctaagcgagagcagttggggctgatgaccagtaaaagtgcggacatcgtgtcgcggttttccgccatggaacgtgccgccatcgattcgctgtcgtctcgacgtgaaaaccgccacggcgaggcgcaggcccgcttctctgaacttgatgcgcagttgcgcgcgcacaacgaggcctcggaagaggcgcttgggcaggctcacaaggcgtatacggatgatctcgctcagcatgagtgcacccgaagtagtctggctgcgatcgacgcttctgctgcggcagaagtggccttcctatcgaggcagaagcatctgccggatatggcagagcagattgatgcagaacagaccgccttggctcagctctatgagtcgcaggagcaaacccggaatgacctggccaggctcgatgctgatgttgctgccgttatggaggagcagcaggaacttgccgccgaaatgtcagggctagcccgtggccgtgatgagctgcgggcgcaagtcaagtcgctctccgctcgtttgagcgcagctgatgacacgctgctttcgtttcttcgcagcagaatgcctgactgggaaaataccgtggggcgtgtcatcgatccccggctattgctgcgtgaggatctgtcgccagtgattgctgcacaatctgtcggggtctttggcctgcagattgaccttgagcgtcttaagcctgttgaggtgctcagcctcgaagagctggagtcgcagatcgcgctgctgaatctgcgaatcgaagaatgcaatgaggccgaggcggccctcaatcgtcgttccacagccgctcaggtgcgacgcaatgaactgcgtgaggagcgaataccgctttacgcgcgtacgtcaaaccttgaggctgatatcgccgccagaaagcagcgcctagagtcacttcgtgatgagggtgcagagctgctagcaatggctcgcgccaaggcgcaggaggcggccgacaaggcttctgttgcgctgtcggaaaagatcgtcgagatcgatgagttgaaggccgcttttggtcgccacaaggttgagctgaagagcattgcagatcaggccagacaggacattgcggcccagcgaagctccgttgaagaggctcttgccgctgccctgactgagcttgagcgggatcatagcgaagagatcaagcgcattgaggccgaccggttctctgctctgcagggcgccggcattgatgctggcgcggttcgccgactggaaaccacggtgagcggtctcgagcaggcggttagacgcctggttgagctgttgcctcgaattcaggaatacaaagcatggcttgaatccgcctggcctaccgtggctgcccgtgaggccgcctacgcagaggcagaacaagtggtcactcggattgagcgtgagctgcaggcgatgcgtgcggcagatgaggctcgacagaaggcctataaggcacggcaagctgaacttgcggcccgcaacagcgtgctcttcgatcaggccagcgcgctgcgttcggttctggatcgtcttagctcggttgctgcggtctcctccggcactgagagcctggagaagttttctccagcggatattgagtcggaagtcgggcggataatccgggacgctcaccagatcaagcaggaggggcgcggccttcttcgtgatattgaggctccctttaattttgcgcatcgggccacccccgaggccggtgttgtgcacgaaatcatcatgcgcgccaggcatgccgatagctcgggtgagcgggtctggttttacgccgcgccagaactgcagatgtatatcgatgatggccatgatgtgcagcggagcaagctggtcacctatatccgcacgctgtgcaaccaacttgtcgaaggcggcaaaatccttgcagaagtcgaccgcataattcaggacgttggccggcgtgcgacgctgaaggtctctgaggtactcggtcgtttcccggagttcaccaatttccacctccatgtggtctcgaagatcaaagatctgaagatcaatgacctgccgatctgggagcacattcgagcgattgagctgcaatcggctcgatggggcgtcatgggtaatgatgcctttccgcccgatgggcttgatcacgccctgcgtatgcttcactcggccatggttgataagcagtggcggggtgcgcagatcgaagaatgcttcgaggtcagcctgtcctggcaggtgaacgggcagccgcgtgtcgcgcgcaacacgacagacttgggcgatggattgagtaccggtcaactgaagattgtggtcgggatgatctacttggcacttttcgaaatgatccgtcgggatgctgacttcgagctgatcgtgcctgtggatgaggcgctggagctggaggtcaacaacgcagctactctggtgggcaatttcaactcgcgcaatgtcaagctaatgctggggttcccaggtggagcgccagagctgatgcgtcacttcaaaaatctatacgcccttgatcggcgccgttcgggcggggtgtatctgaaagagtatcggggcgctgatccggtggctctggatgagctgaacgccggccttcccgaggaagaagaggtgtccgcatga

SEQ ID NO: 328308 - DNA, 879 bp, Pseudomonas aeruginosa
gtgtccaacccatcccccattgaaggcatcccacagaagcaacgggacagactggcgttcattgagcaacaggcatggttctgcggcgcggtttctcggagggatgttgtcagtcgcttcgacatccagacggccgcagcaaccagagatctgtcgctataccgcgaactggcacctgaaaacctgtttctggaccaccgagagaaggtgtaccgcccgagcgaaggctttaaccctatcttcacctactcggtttcccgcatcacaacttggctgagtcagggatttggagatgaggagcatttgagttggtcgacggggatcccatgcactgtcagcgagtccttggcacaacccaaaattggcatcctggcagctgtctgccgcgcgatcaggcaacagcgtgctatcgagattacgtacgagtcactcacccgatgcagcaccagggttatcgcaccgttcggcctgcacagtgatggtcggagatggcacgcgagggcatacgatagggaaagctcggagttcagggattttgtgataacccgggtgggatcgataaaagatgctggacaggcccgcgtgaccgaatgcgccaatgaggatgacgattggtctcgccgagtcgtgcttgagctggtcccccacccagagcttgaacgcaaagagccggtgctatgcgactaccccttcaacaaagacggcgtaatgctcgtaaaggttcgagcagccgtcgcaggctacgctctcagacagtggggagttgactgctcgctcgatcactctggatcagcgcgcgagtaccagctctggctgcgtaatcgggaagcattgtacggagtccccaacttggtgcttgcgcccggatacgcaccctaa

SEQ ID NO: 328309 - DNA, 897 bp, Pseudomonas aeruginosa
atgcctacaattaaaagcttgtccgttggtaatggagatatgttctacatccttcatggaggggacagcttcaccatgattgattgcaatttaactgctgaaaactctgatgatatcattgcagaattgaaggacgtatcgaagacaaaaggagtgcgtcggttcatttgcacacatcctgatgaagatcatttcaaaggcatagaaaaacttgatgctcagctgcctatagcaaatttctactgcgtgaaaaataaagcgcaaaaggatgagttaacagactcattccttcactattgcgccttgagagacggcggtaaagctttctaccttgaaaagggtgttaagcggaaatggcttaacgagggcggcgcagagcgaggctcttccggaattcagattctttggccggacacctctaatgaaaatttcaaggatgccctccgcaaatgcgatgccggcgaaagcttcaataatgtttcgtgtgtcttgagatactcggtcaatggtggcgcgagcttcatgtggctaggcgatcttgagactgagtttatggaaagtatcgtagatgatattgagcttacaaaaacaactgtggtttttgcatctcaccatggtagaacgtctggaaagattcctgattcttggctagaaaaaatagatcctcaaattatcgtaatcggtcaagctccatcgcgtcatcttgactactacactggatacaacattattacccagaatagagctggccatattacaatggactgcgtgggaggcatgttagatatatatgtcacaggtgaaaattatgaacgcgactatcttgaggaccttggaaagaaccgattcccagggtacataggctcgctagaggtggagactgagtatacgctctga

SEQ ID NO: 328310 - DNA, 882 bp, Pseudomonas aeruginosa
atgagcaccctaaccgcacgcaccggccgctgggggcaggatcgccgcctggaattcattgacttcaggttgttctgggaggggcgtctcaaccggtcggacctgacgacattcttccggatatcggttccccaggcatcgctggacctggcggcatatcaagatatggcaccaggcaatatggtctacgaccgcacgcaaaaaacttatgtggcagcccccaccttccagcccgtactgacaagctcggacagcagccactacctcaatgagctgttatggcgagagattggtactgttgctgccagcgatagcttcattggatgggctccgcctatcgcaagcctgccgtcacctacccgacaggttgactcgaaaattctcatcagcctgatcagggcccttcagaagggggacgcgctgacaatcgactaccgctcaatgacacatttcgatgagccaacgctgcgaaccatctacccggcctcttttgctcatgatggcttccgatggcatatacgggcgttctgcttcaaagctcacatcttcaaggacttcgtcctgggacggattgcatcagtccttgacgcccatgcgcctccctcaccagtgcccgcggatattgagtgggagacttacgttgacgtggtcatcggacctaatccgcattatccgcaaaacaagcgtcgcgcgatcgagcacgactatcagatggtgaatggagaaaccaagattcgcgcgcgcaagccacagctctattacctaaataagcgccttaacctgaacgttaatcctggtgatccggtcgacgagagccagcagatcgtcatgcttcgtatagaagagcacttgcccgcagggagcacacagccagatgcctga

SEQ ID NO: 328311 - DNA, 1191 bp, Pseudomonas aeruginosa
atggcggcgaagatcacgtttttccaagtcggcaatggtgacatgaccctcgtgaggcttgccgacacaagcgtcacgtccatccttatcgacagcaatattcgcgtcgcggctgatgatccggacgatgagacccctgacgtcgccagtgcgcttcgaaagcgcttactgatagatgcaaatttgcgcccttatgtggatgtgttccttctgagccatcctgatcaggatcattgccgtggactggccaaacacttctggcttggaaaacctggtgattacccagatgacaaccttccacaggcggaaaagcgcatcttgatccgagagctatggtcgtctccactgatcttcaagcgctgctcgaaaaaccacacgctttgtgacgatgcgaaggcttttgacaaggaggcgcgtcggcgggtcgagtattggaagacctatcgaagcgcgggagatggaaaccgcattgtcatcatgggagaggatgtcgacggcaagaccgatggtctaagccccatcgtgattaagtccggcgagaaattcagttcgatcaatggaagcgactattccgcatatttccgggcacacctgctcgcgcctacaccgcatgacgaggacgctgatcttgaagagcgcctcagcaaaaacgaatccagcgtgatcatgaatatcgagatttcctctgccgcatacgccagcgccaaaactcggtttttggtgggtggcgacgcggcggtactcatctgggagcgtatgtgggaacgtttcaaaaacacacctgaagtgcttgagtacgacctgctactcgcgccgcaccactgctcctggcgtactctgtcttatgacagctggtccgagaaaggtgaggacgccgagctgaacgagggcgcgcgcagtgctctaggccaggctcgcagtggtgccactatcgttgcgagtagcaaagaaattctcgatgacgagatcgacccgccgaacatccgtgcgaggcgggagtacaagtccattctgagcgatgtagatggatggtttggttgcaccggagatctcaaggatgaggccgttatggagttcactgtggagccaggaggcaaagtcaagaaggccgctgtggctgctgcattggccgggaccactaccacgtcagtggcagcagctgcggcacctcgagccggtagtagtaaatga

SEQ ID NO: 328312 - DNA, 2229 bp, Pseudomonas aeruginosa
atgatcgagtactttgtacttggcgaactgcttgaagccccccgggagggggagctttatcccgagacggtggcgcttctgaatgctttccgagcgtgcccttacacagaggttcgcgaactgcgctacgaggcgactgaatcatctcgaaccgaatacattgtcattgacgcgggtgacggcacagttgatgccgacaacccggctgggattcgccggcaggaacgccttgcgataagtatcgatccgcagtaccgcgttaaggtgctggttcataccttacggaaggattttccgtcgctctcccatcagcacgcgagagtgcctggtcgcccgcggaccctgtgtctgtatgaggcgagctgggcggcggttgagctgagctggacagctcaacgcttcatagcgcgaatgttctggtggctcagagattcggcgcaactgaagttgcaccgagatgatcagcccctggagcagcttttctacatgagcccctaccagctgatccttccgtcgaactacgccgaatacgcaaccgcaggtgggaaaacgctttcgattggaaaagtcagcgtgggtgagtccgtgatgctgcgtgcctttccgtccaatggcgcggaatcgcaatccaaagccatgcgggtcgtatccttcttggtcccaccagtggattctacttcggtggttagcgcgccagagacgctgggtgagcttgagagtcagctaaaagcctggggcagcgagcttgagcagcagctgtatgaatatgtttatgaagccatctcagaaggagtttcgccctcaacgggcataggggaaggcatcctagtccttgtgggggttccccgtaccaggcagggtgattctgagcggttggatgtattgggttacatgatgcgggcgtctctattcgagcttgctcaagcgttcgacatgctcggtccccgcgagccagaaggacattatttgcgcattcaattggttggaggggggcatggagctgcttggcgatctcttgagctagtacctgtagaggtgcgctgggaacttacagcaaaggcggcacgggacctatcggctatctcaactgaagagccccagttccatgccgttttagccggtgtaggcgcacttggtagtgcattggcagacctctggattcgccagggctggggtaactggacgtacatagaccctgaccgcttgatgccacataacctcagtcgccatgtagcgttcgagaatggcattggtcatgcgaaagtcgacgtcatgaaaaatcatgcagcgagcatctacacagaggagccgctacctgctgctatcgcaaagagcatcctgtcccaagacatagatgtgcagagtgccttaaaagaatcccagctagtcgttgatgtaacgactactctcgaagcgccccgacagctggctcgcgagcccaatgcccctcgcatagcgagtctattcctgacaccttcgggattatccagcgtgatgattcttgaggatcagggtcgacagcagcgtgttgatggtttggagggtcagtactaccgcgcaatcctcagcaatgactggggtagtgaacacctagtaaatcaccttggagatcgatgggtagggggcggctgccgagacatctcaatgcgtatagccagtgagtgcattcatcttcacgctggcattctttcacggcagctgaggcaatcagtcgcgaaacccgaagcacgtatctgcatctggagttatgacgagcaatcgggggcagtggcctctcatgaaatccctgttgccaaagttttcaccgtgacctcgaatggctggaccatcaaatacgacgctgcgttcctcgacaagcttaagcgagcacgttccgcagcgctgcccaatgagattggtggctctattgtggggatgaccgatttaaaggcccgaacactcgtaattgtcgacgtgctgcccactcctcctgacagtaaatccagtcctgtccatttcatcagaggtgaggaagggcaacagacggagcttgagagggtgctagatagaactgcacgcgtggtggactacttaggcgagtggcattcacatccagatggcgtgtcagcacagcctagtaaagaggatgagagtctactcaatacggtgcatcgcaagatgagcgcggaggggttgccagctctgatggtgattgtcgcgaaaaacgatatttctctctctgtgcagtaa

SEQ ID NO: 328313 - DNA, 846 bp, Pseudomonas aeruginosa
atggattggattccacttatcgcatcgaccgcacgcttgatcgacttgcatgacagcaatcgtgcggctggtcatgccgcaagccaatatgacctctatcgcgagacacgtggaggaaaccacgacgggttatggcttgatgtcgcattgacggtgatcgaatacctacgtgagcgtgaaaatgaggtcgtagggggcttcatctcgggtacggaagtccgcgaggcgctacaaaaaaggattgccgggctaactgaggaggatctgaggtttgtcttatcggcactcacgacaccggcggaaatatggtttgtcgagcgtatgggagacggaagcaggccgatcaactcgaccaaggaaacccatctcgtcgagcgatcgcgaacggcagacgcctaccgcctcgcaccagctggacggactgcggcagggttagcagcaaacgtgcgcgacattgcttacatcgcgggctccgcaaagaatctgcttacggcaatcaaggctcgcgacttctggaaaatcaccgagctctcgacaatcatcatcgatgtcctgcggacattcaggctcgaaattgaaactcgccgagaaggtggacgccgggatgatgttcaggagtttttcaaagagcgcggcgaagtaatcaaggagcaaatcgaagaggcagcccagattctcgtggaggccaatgaatttctctctctccaatcgacgcgggacgaattccaagtgtgggttgccgcaatggatcgggccggcaaaccgtccttcggccacggttacgctattgagcacttacggcgcgttgcaggcccgccgcgtcaggatagttgtcgtgtgagttga

SEQ ID NO: 328314 - DNA, 846 bp, Pseudomonas aeruginosa; identical to SEQ ID NO: 160023

SEQ ID NO: 328315 - DNA, 519 bp, Pseudomonas aeruginosa; identical to SEQ ID NO: 160022

SEQ ID NO: 328316 - DNA, 975 bp, Pseudomonas aeruginosa
ttgaaaattgtacaaaaaataaccagtccgctcgattgtcccgccttcatcgccgcccaccgccagaatcctcaagactttacccgccgacgccagctcaccttcaagaacctcgtcctgttcctgctcaatcagccgcgcacggccctgcaaaccgaactcgatcagttctatcgcgtactcaatcaggcgtcgactgagacgcaaatggtcactgcgcaggccttctgcaaagcgcgcaaaaagctcaaccccgaggtatttgaaagtctcaatcgcctcctgcagcaacaaattgactgcttcgggctgcgtcagaagtggcgtgggctgagggtgctcgcggtggatggctcgaccgtgcatttacccctggagtcgaccatggcgaccttctttggcagtcactctggctttcccatggctcgcttgtccacactctacgaagtcgctgacggtcaaaccttgcatagcctgatcgtgcccctgaccgtcggcgagcgcgactgtgcccatctgcaccttgagcacctgccggctgacagcctgacgctgtttgaccgtggttaccctgggcactggttattcgcgctgttcgcgcagcaacagcggcactttctgatgcgcctgccctgtggctataacgcccaggtcaaagcgtttctacactctggccaagttgaagacacacagcttttcgtggccaaccatcctgaagcacgtctgttctgctccgaggctggcgttgatcctgccagccagatcgagctgagactgatccgggtcgagttggccaacggcgaaagcgaagtattgctgacctcgctgctggatcgagaagcctttcccgctgaggtgtttgccgagctttaccaccgccgctggggcatcgaaaccgatttccgtcgcctcaaacaaaccctgacgctggacaacttggggtttggggagcaatggaacagaaagtgcacttaa

SEQ ID NO: 328317 - DNA, 456 bp, Pseudomonas aeruginosa
atgaagaagattgccataagcgaactgcgtctgggcatgtacgtgagcaagctgggcggctcctggctgaagcacccgttctggaaaggaagctttctgctgcgtgacccaaaggatcttgcggcaattctggcgagcggcattcaggaagtgtggatctcgccagacaaggggctgttggagccagagcaaacccctgaagtgaatacgcgcacggaaacgcctgcgattaactcggatagccacaaaccccggcagcagtgtcaccgcgtggcggacgagattcagcgcgcccgccagatttgtctggcggctaagaaccaggtggtggacatgttcgccgatgctcggctgggcaaggcggtagatcctcaggcaaccgtaccgctggtcagggacatcgccgactccgtgctgcgtcaaccggcagctggaagtgctcaacaagccgggtaa

SEQ ID NO: 328318 - DNA, 1581 bp, Pseudomonas aeruginosa
atgcgacagaatttgcccgttacgggccgcaatcttgaactgccacgcgatgccaacatcctgtccaccaccgacacgcaaagccatatcacttacgtcaaccccgatttcatcaagatcagcggtttcaccgaagccgagctcttagggcaaccgcacaacctcgtcaggcacccggacatgccgccggctgcgtttgaacacatgtggaagaccttgcgcgccggacgatcctggatggggctggtgaagaatcgctgcaaaaatggggatcactactgggtcagtgcctatgtcacccccataagcaaaaatggtcaaaccgttgagtatcaatccgtacgtaccaaacccgatccgcaacaggttcaagctgcagagcaactctacgcacaaatacgagctggccagagccccctcactcggcgtttcccactgggccttcgcgcaaaactcgctttgctgatcagtgtgattactgtcttggggctgatgggcgctgccgctattttctctctgcctttcggcagtgtgctactggccgcaggcctgattagcggcttgagtgcagccagcgttgcgatgctcctcgcgccactcgatgcgcttgtgagcaaagctcgcggcatcgccgacaacccgctgagccaacggctctacagtggacgcttggatgagttcggtcagatcgattttgccctgcgtatggggcaggccgagactggcgcggtgattggccgcatcggtgatgcggccaatcaacttggggagtacacccacagtctggtcaagcaggtcgatgacagcaacgctctgactgccgagcaacaagcggaaacggatcaaattgccacggccatcaatcagatggcagcgagcgttcaggaagtagccagtaatgcgcagaacgcagccagtgctgcggagaaagccgacagcgaaacccgttcgggccaacgcctagtggcctccactagcgagtcgatcagcgagcttgagggcgagatattgcaagccgcgcgagtgatccatgagctggaaagccacagcaatgaaatctccaaggttttggatgtaatccgtggcatcgccgagcaaaccaacctactggcgctcaatgcggctattgaagccgctcgcgcaggggaacaaggccgcggtttcgccgtagtcgccgacgaggtacgcagtctcgccgcacgcacccagcagtccaccaccgatattcagcagatgattagcgtacttcaggatggcgctcgttcggccgtgagtgtgatggagaagagtcgcgagcaagcacaatccagcgtcagtcacgcccagcaggcagctactgcgctggctggtattggccagcgggtcaatgaaatcaccgagatgaacacgcaaatcgcggcagcagtagagcagcagggagccgtgagcgagagtatcaaccgcagcatcagcagcattcgcgacgctgctgacacaaacgtcagtacggggcaaaacaaccgtagaagtgctggggaagtggcgcgtttaaccacggcgctgcatgagttggcgcagcagttctggacgcggcgatcttga

SEQ ID NO: 328319 - DNA, 801 bp, Pseudomonas aeruginosa
gtgcccggcacgctgcgcgacagcctggtgttgctggcggtcgtgctggaacagcagaccgagttgcagccgacgcaaatcatgaccgacaccggggcctacagcgatgtggtgttcgggctcttccgcctacttggctaccacttcagtccgcggctggccgatgtcggcggtacccgcttctggcgcacgcgcccggacgcggactacggcaagctcaatgggctggcccgccagtcggtcaaactcgacctgatcgccgagcactgggacgacctgctgcgcctggccggctcgctcaaactcggcagggtaccggccaccggcatcatgcgtaccttgcaaacgggggatcgtcccacccggctggcccaggcggtggccgaattcggccggatcgagaaaaccctgcacacgctgacctacatcgacgacgagtccaagcgccgggccaccctgacccagttgaaccgaggcgaaggccggcacagcctggcccgcgccgtgttccacggcaaacgtggcgagctgcgccagcgctaccgcgaaggccaggaagaccagctcggtgccttgggcctggtggtgaacatcatcgtgctgtggaataccctctacatgactgcggccgtggaacgcctcaagcagcacggctacccggtgctggaagaggatttggcccggctatcaccgctgatctacgagcacatcaacatgctcgggcggtattcgttcgcggtaccggatgaagtcgcccgaggggagttacggccattgcgcaatccagacgaggatctttga

SEQ ID NO: 328320 - DNA, 936 bp, Pseudomonas aeruginosa
atgagtcgaagtattgcgatcctgctgctgggcctttcgctgaccggctgcgtcgaggcacgctcggtggtcccggcggatggcccgggcccgctgctggtggcccaccgcgccggcaccgcggactacccggagaataccctgctggcgatccgcaaggcgctggacaacggcgccgacgcgctatggctgtcggtgcagttgagcgccgatggccatccggtgctctatcgccccgctgacctgacggtcctgacccagggcgccggcgcggtcggccagtcgagcctggccgagctggcgcgcttgaacgccggctatatgttcaaggccgaggacggcagctatccctaccgccagaagccgctgcggattccgacgctgcgccaggcgctacgggcgatcccgccgcaggtgccggtgttcctcgacatgaagtcgctgccggtggagccgctggtcgatgccgtggccggcgagctggaacggcagaaggcctggtcgcgggtgcgtttctattccaccgagaaggccgccaacgactacctgacgcagcgctacgcggaccgcgcgcgacagttcgaaagccgcgatgcgacgcgcaaccgcctggtcggcctggccttcggcgagcgctgcgaggcaccgccggccggcggcacctggatgggcatcgagctgcgccgcgaactgacggtgaccgagcgcttcacccttggcgagtcctcctacaaggtgccggcggcgcagttgtggacgcgcaaagcgatggactgcgtgcgccgcgagccggtgaaggtggtgatgttcggcatcgagaccgccgaggactaccgcaccgcgcgcgccctgggcgccgacgcggtgatgagcaactcgcccaggaagatggaggcgatccgccgccgggtgctcgccgatcagcccggcgggtag

SEQ ID NO: 328321 - DNA, 3642 bp, Pseudomonas aeruginosa
gtggccagcgccctcgaagcgcgccgcgacatcgccctctccgccgggcgcgacgtgaccctggcggcggcggcgaacgaggagcacagcttcgccaccggcaagaaggtgacggcgaagaacgatcgggtggaacaccaatcgaccgtggtcagcgccggcggcgatctcagcgtgcaaggcggcaatgacgtgaccttcgttgccagtcaggcgaaggccagcaacgaggcctatttgtacgccggcaacgacctcaatctgctggcggctcacgacgaaagctattcctactacgcgaagaagaaaaaaggctcgttcgggcgcagcagtagccggatgagcgagagcgaaaccagtaccgtggtgtcgtcgtcgatccaggcgggacaaggggcggaactggtcgctaagcgtgacgtcaacgtcgaggcctcttccgcctccagcatgaagggcgagctgacggtcgtggcggggcgcgacgtgaacctcacggcagctgcgaacagctactccagcgcgtccgcgaaatccaagtccggaggcctggggctgtcatccaccagcaaggccaacgcccagtcctcttcctacaccagcgttcagggcgccacgttgagtggcgataccaccgtggtgcaggcgagaagggacatctcggtggccgccagcaatgtggtttctaccgggaagactgcgctgcgtgccggcaacgacatcatcatcgacagcgtggcggagacgtcggagtcgcatcgcagcgagtcgaagaagaagtccggcctgatgagttccggagggatcggcatcacgctcggcacggcgaagaatgcctcgacgcaggacacccgtaccgtcgtcaaccagggcagcaccatcggcagtgtgctcggcgatgtcgacatgcgggcgggcaagaacctgtctatcacggcttcggatgtggtggccggcaaggacatcaacctcgtcgggcagaacgtgagcattctcgctgccgacaaccagaacgtcagcgagcagacccgcaagaccagcaagagcggcttgacgctggccttgtcgggaacggtcggtagcgcaatcgacgccacctaccagaatgccaagcaggccaggaacgaagacgacagtcgcctttccgcgttgcaggggatcaaggccggcttgagcggcgtccaggcctggcaggcagctcagcagaacggcggcatgacgggcgagaacagcgcgcagttcgtcggcatcagcgcttcgctgggctcgcagaagtccagctctcggcagcgccaggagcagcagatcagccagggaagcacgctcaccgccggtggcaacctgaacattatcgccacgggttccggggctgtcggcgaagacggcgacttgcgcgtgcaaggcagcaagctgcaggctggcaaggacctccaactgatcgccaaccgcgacgtcgtgctggaagccgcggccaatacgcagaagctcgatggcaagaacaagagcagcggcggcgctgtcggggtaagcgtcggcgttggttcgggcgaggctggcatcagcattttcgccaacgccaacaagggcgccggcaaggaaatcggcaacggcaccacctggaccgaaaccaccctggacgcgggccagaaggccagcttggtcagcgggcgcgacaccacgctgaaaggggcgcaggtcaatggtgaaagcatcctggcgaaagtgggtcgtgaccttaccctgcaaagcctgcaggatcgcgattactacgattccaagcagaagaacgtcggtggtggggcgagtttggctatcgttggccagggtggcggcgccaacttgagtctcagccagagcaagctgcattcgaagtacgacagcgtgcaggagcagaccgggctgttcgccggcaagggcggcttccaggtggaggtgggcaagcacacgcagctggatggcagcgtgatcgccagcaccgccgaagccgagaagaatcgcctgagcacaggctccctgggctggagcgagatccgtaacaaggccgagtacaagagccaacttcagagtgtcagtgtcagcagcgccaacgatggcgccggtgcgttcgtcagcaacatgcctagcggcatgctcattgcctacaaccacggcgatagtgccagcggtaccacgggttcggcgatatccgaaggcaccctggaggttcgcgatccggcgcgccagcaacaggatgtggcgacgctcagccgtgacccgagccgcgccaacgatagcgtcagtccgatcttcgacaaggagaaagagcagaagcgtctgcagcaggtccaactgatcggcgagatcggcacccaggccatggatatcctgcggacgcagggccaactcgacgccgacaaggcggcgcgggccgaactggaagcgcggggtatctccgcgccggacgccggcgccagcgagcggcaagtcgaggactaccgcaaagcgcttctgggcacgaatgcctaccaggacatcatgggcaagtacggcaccggaggcgactaccagaaggccgcccaggcggtgaccgcagccttgcaagggctggccggcggcgacattggctcggcgttggcgggagcttcctcgccctatgtggcgggcgtgatcaagcaggtggcaggcgacaatgacacggcgcggatcatggcccacgcggttcttggcgcggtggttgcgcaggcccagggcaattcggctgctgcggggggcgcaggagcggcggggagcgaactggcggcgcaggtgatcagcgagcgactgtacggaacccgtgatagcgcgacgctgaacgaagcgcagaagcagaccatcaccgcgctggccagcctggccggcggattggcaggctccgttgtcgatgggagcagcggaggagccattgccggggccgcaggcgggaagaatgcaacggaaaacaacttccttggcggcggaactccgccgggcttgatcagctacggtcaagcagcgagttccttgaccgagtacatgcgcaagaacggcgcgacagccgaggagatcacccaggcgcaacgtgatctggcccagggacagggcttcgatggcgtacagccagcgaatgagttcatcaaggcctggggcgaggccatggttgcggaagctgccggccttgggattgttgcggggttgggtagatttgggttgtggggtgcaaagggagcgactcctgttgtaactgctgaggggcgaatcggtaactcagtatttacggatgttaaccagacggctagaccagcagcccaggcgaatcccaaccaaccgaccttgattgccgatcgagtggacgcaaagatagcggctaaggggacgcctcatccgaatgggaatatggcggatgctcatgcagagattggcgttattcagaaggcatttaatgaaggtaaaacggtaggctccgatatgaccatgaacgtagtaggtaaggatgtttgtggatactgcagaggtgatattgctgcggcagctagcaagtctggtttgaaatctttaactattcaagccaaggatgatattacaggtttgccgaagacgtattactgggaggtaggaatgaagtcaattagagagaaaaaaatatga

SEQ ID NO: 328322 - DNA, 606 bp, Pseudomonas aeruginosa
atgtgtattggacgactaaacccacaagatgaaactcctcaaaaaacgtttcagatcaccgctggggatttttatcaggcatttcccgatgtgggtttaagtaatgcggaaagacgcttacaagaagctatagatagactggctgaacgatggatattgcttcgctgtgaaacagaacaacgagaaattcgctggatacaggagaaagctaaatattttacaggtgagggtaagatcgagattgtttttgctgattccatcatcccgtatcttactcaacttcaagggcagttcaccaaaattgtcattaaaaatgtctcggcattaaaacgcacttacagtatccgtatctacgagttattaatgcaatttaagagtattggtgaccgcgtgataagcatagacgattttcgttctatgttaggcttagaaaaaaaatatcaaacatttaaatcattaaatcaactggttataactccagcgataaaggagttaaacgaaaaaagtgatctttcagtatccgttgataccgttaaacaggggcgaaaagtggttgcattacactttcgattcactgaagacaagcaaataaagatcaactgttaa

SEQ ID NO: 328323 - DNA, 267 bp, Pseudomonas aeruginosa; identical to SEQ ID NO: 302250

SEQ ID NO: 328324 - DNA, 1158 bp, Pseudomonas aeruginosa
atggcaaccacacaagacgcagtagattcttattggggaaccggacttaacggcggcagtgcaaatcttgttgtgcctagtaatccaccgttagagggacaaccagcccaatatgacagcaacttttttcagactgcccatgagattattaccgatatattgaaatcgtccacacagggcaaaatgggcgaatttattgatatcgcttattctctcggtaagttcggtgttcaggcgtatatcctctggtatatcttcactattcttgctgggaagcagcaaaaaaccgttcctgttcaggattttatctggaatgtccttcggttcactttcattctgatgatagtccgtaacgtggacggttggctggacacgtctgtttcatccatttacgggctgaaaaacctgtttgcgggcggagacgtttatctttggctcgatcagttgtgggtcaaaaccgtacagaccgcagagaaaatatttgatttagataattctaaatatgtaccagcctccggaacacttggcgcgttgttcacttatttaggcgggttaattgctctgatgtgtgctgctctgacgttctttgcggcggaagtgaccctgatgttacttaccatcactgcaccgctgtttattatgtgtctgatgttcggttttctacgccagatgtttaacaattggttgcagatgattttcagtgcgctgctggttttcctgttcggtggtttagcgttacgggcgggaacgtggtatctgaacactattctgacgaccaatattgctactgcgagtaatcaaaacctgatttatatgggtgcgagtgcgctggcaggcggtatttttatggcgtttgttatctggcaggcaaaaacttatgcctcacagattgccggtgtcggggctgagggtgcgttgcagggagcggctgctatggggcttaccgctggcgcatttggtatgggtcgcatggtgtcaggcggtttacgcatggggaaaaatgcgggtgtcggtgcgggtcgcggactcatcggacagcagggcggctttggtaaatcggaaggtttttccggtaaagcagggaatgtgaccggacaggcgacacgccggatcggaaaagaggtcgcggcgatttataaaaaacggtttgaacaataa

SEQ ID NO: 328325 - DNA, 591 bp, Pseudomonas aeruginosa; identical to SEQ ID NO: 302252

SEQ ID NO: 328326 - DNA, 288 bp, Pseudomonas aeruginosa; identical to SEQ ID NO: 302289

SEQ ID NO: 328327 - DNA, 1053 bp, Pseudomonas aeruginosa
atggagcactacgtgggcttggaacatctggacgcggactcactcaagatccgccgctggggcacaccggatgacgtggaagctaccaagctgatgttcaagaagggcgatatcatcttcggccgccgccgggcttaccagcgcaagctaggcgttgccgagttcgacggaatttgctcggcccatgcgatggtgctgcgtgccaagcctgacgttgtgcttccagcgttcctgccgttcttcatgcagagcgatctctttatgagccgggcggtggaaatctcggtgggttcactgtcgcccacgatcaattggaaaacgatggcggttcaagagttcgtgttgccacccctagaagagcagcaacgggcagtccacttcctttcggccgtagaggatcagtcagaggcagttctgcatgcgcttacggctgcgacgaaattaaggaagtcgatggcgctggaggcgttttcaagaagcgattatccaatagtcagaatgggctccgtggcagagataaaaaacggttcaacaccgcgtcgagcgactgatgcttactggaaagggaccattccttggcttccgacagggaaggttaacgagcgggtgattcaagctgccgatgagttcattactgagaaagcgttatcggaatgctctctagcaatgatccccgcgggcgcaacactagttgccatgattggtgaaggacaaacgcgcgggcgtgcagcaatgctagcgattgactcctgcattaaccaaaacttcggcgcagtcattcctggaggctcgctggacccttggtatctattttatctgttggagtcaaactatgaggcccttcgtcattggtcgcagggtacgaaccagcgtgcgctgagttgcggcttgctgaaaaattacccgatccctgttcctccactcgaagtgcagcaggaactggtgggccagctcaaggaaattgaggcgacagaaagtcagttggcattgcggcttgatatggtccatgagatgcgccgtgctgcccatctaacagcgttgtcaatggagtag

SEQ ID NO: 328328 - DNA, 2994 bp, Pseudomonas aeruginosa
atggctgttttcaacgagtccaacactgtcgaagcctacgtccgcgatctgctcgctggccaggtcaaggtggtaccggcaaacgccgtccaggagccgcacgccagctacggcctcagcccaaaaggcatcggctggcgctacgccgccccggctgaggtgccgcgccagattcaggaagtacttgtcgagccctggttgcgcgatgcgctgatccatctgaaccccgagatcgccgcccagcccgaccgcgccgacgaagtgctctacaaactgcgcgctatcgtgctgtcggtacgctcggatggtttgatccgcgctaacgaggaaatgaccgcctggatgcgcggcgagcgctccatgcccttcggccacaacaacgagcatgtgccggtgcggctgatcgacctggatgatctgtcacagaaccagtacatcgtcacccagcaatacatataccgcgccggccctactgagcgccgcgccgatctggtgctgctggtcaacggactgccgctagtgctgatcgaggccaagacgccggtcaagaagtgcatcagttgggtggatggcgcaatacaggttcacgacgactacgagaaattcgtgccggagttgttcgtctgcaatgtgttctcggtggctaccgaaggaaaggcgtttcgctacggctccatcggcttgccagtaaaagactggggcccgtggcatctagatggtgacggtgaagatggccaacaccatccgctgaaatcactcaagctctctgccgagagcatgctacgtccgcatgtggtgctggacatcctcggtagctttaccctgtttgccaccgacaagaaaaagcgccgcatcaagatcatttgccgctatcagcagttcgaggcggccaataagatcgtcgagcgcgtgctggcaggctatccccggaagggactgatctggcacttccaaggttcaggtaagtcgctgctgatggtgttcgctgcgcagaagctgcgcatgcattccgacctgaagaatcccacggtgctgatcgtggtggatcggatcgatctcgacagccagatcaccggcaccttcaacggcgcggacattcccaatctggaaaaagctgatagccgcgagaagctgcagcagctactggcgcaggatgtgcgcaagatcatcataaccaccatcttcaaattcggtgaggccacaggtgcgctgaacgagcgcagcaacatcatcgcgctggtggacgaagcccaccgaacccaggaaggtgacttggggcgcaagatgcgcgaggcgctgcccaatgcgtttcttttcggcctgaccggcacgcccatcaaccgagccgaccgcaataccttctatgccttcggggcggaggaggatgagaagggctacatgagtcgctatggtttcgaggaatcgatccgcgacggcgccacgctgaagctgcatttcgaaccacgtttgatcgatctgcacatcgacaaggtcgcgctggatactgcctacaaggaccttaccggcgggctgtcggacctggataaggataacttggccaagaccgctgccaagatggccgtgctggttaagacgcccgagcgtatccgcaaggtgtgcgaggacatcgttgcgcattaccagagcaaggtagagcccaacggtttcaagggccagatcgtcaccttcgaccgggagtcctgcttgctgttcaaggccgagctggacaagctgctgccgcccgaggccacggatatcgtgatgtcggtgcaggcagccgataagaaagagcatccggagtacgcggcctacgaccgttcgcgcgacgaagaggagcgcttgcttgaccgcttccgcgacccagccgacccgctgaagctgatcatcgtgacggcaaagctgctgacggggttcgatgcccccattttgcaggcgatgtacctggacaagccgctgcgcgaccacacactgttgcaggctatctgccgggtgaatcgtacctactcggagcagaagacccacggcttgatcgtggattatctagggatcttcgatgacgtggcggcagcattggagttcgacgaccagagcgtcaagcaggtggtcagcaatattcaggaactgaaggacaagctgcccgaagccatgcagaagtgcctggccttctttgccggctgcgaccgtaccctggagggctatgaggggctgattgccgcgcaacagtgcttgcctaacaacgaggtacgcgacaactttgctgccgagtacagcgtactgaacaagatctgggaggcgctatcacccgacacggtgctgggtaccttcgagaaggactacaaatggctgtcgcaggtataccagtcggtgcagccttcgagcggtcacggcaaactgatatggcattcgctcggagcaaaaaccatcgagctgatacatcagaacgtgcatgtcgatgcggtgcgcgatgacctcgacacgctggtgctcgatgccgacctgctggaagcagtactctcgaaccctgacccaaagaaggccaaggaaatcgaggtcaagctcaagcgccgtctgcgcgggcacggtggaagtccgaaattcaagcagctttccgagcgactggatgcgctgaaggaccgctttgagtccgggcaaatcaacagtgtcgaattcctaaagcaactgctggagattgccaaggaaaccctgcaggccgaaaaagaaattccacccgaagaggacgaggatcgtggcaaggctgctctgaccgaactgttcaacgaagtaaaaacagccgaaacgccgatcctggtcgagcgagtggttgcggacatcgatgagattgtgcgcttggtgcgctttcccggttggcagggcactcaagctggcgagcgtgaggtgaagaaggcattgcgcaaggccctcttcaaatacaagctgcatgcggacgatgaactgttcgagaaagcctatagctacattcggcagtattactga

SEQ ID NO: 328329 - DNA, 1242 bp, Pseudomonas aeruginosa
atgaccgtgttgcactcagctcctgcaaccgccatagataatgctgccgatgcgtgggaggcgataaacctcctctcagacagcccgaatatcacggtaattgcagctgaacgcgactacatatacgacagcgtcgcccatagatttccgcgtcgaaaatttgagcacatagatgttacaggtttaactccactagacgtgcaggcagtccgggacaaaataccggcagggctaaaacgacgagaagttttcaagcctcttcccagagagttagatgttgaaacccccccaaccttttttgaggttatcgacagtgctattgcggaccactctctgacagacaggtttattgacgcgctcaaaagccttaaaattgagtcaccctttaagcatgacctactcgtaatgtgttgctacttgtactcttgtcgcgtaccgacatctttagacgtggcaatcgcttactctcgaaaccatactactgatcctcaagaggtacttgaaactctcagatcaatgggaagcttcctttccgcgtatgaaggttcactatcagacgcaacacaggcttatttcgtcccacgctctcgctcagtggctgacgccgtgatgcgcaaaattccgtcggaagatcttaaacagttactcctcacgttccatagcgaagtttcaccaaccaaaataagcagatatgatatttttcgaaggggtgcctatgaggccggactagttggaaaagctttctccaactgggaagaaggtttagcattctacgagctttcttcaacacgagacaactcccactcgctcaagcaacaaggcgcaatctatttagcacataaaaagcaatatcatttggcttttagctggatcgatgaagcgttgactatggtcggtagacggaatgcacctgtccgaaatacttatgcagtaatcctcttctctgcaaacagcgacaaacccctcgacagcgacgtaatctctacacttatcgaaagcatggagatcttagcatcatgctacaacagcgatatacgaaaagcatatcacgcaaaagtattcgccgaccaagcaataaagtttgcaaatcgtctacctaatcaacccgagagcattcaatatttagatcaagctcgagattggcttgaggctgaattagcgtcgagaattggagataggacgatgacgagaatgatccagcaactgcggcaggcaaaacgcgctataaatcgcacgatgtga

SEQ ID NO: 328330 - DNA, 339 bp, Pseudomonas aeruginosa
atgagtgacgaagtagacgttctgcggcaacgcctcagcaacggcagccttgacgaatgcgatgccatggtaagagggattgcccagttagccatggaccaaggattcaataacctcaccgcacgtcaacaggccgtgcttcgaccacacctgacccaagagtgtgcaggggttacaaatccaggcggccaccacaacgactgtaatgtgcttcttaagggcaagaagctggcggctgcgctagagcaagaacgttattacggcgacgctctttgcgaagattgcatcaacgaaaccgaacagtaccgccgagagtgggagcggatcgaagcagaatag

SEQ ID NO: 328331 - DNA, 1605 bp, Pseudomonas aeruginosa
atgagagacaaaaagaacaactttaaatcatccactcttcgaaaactgaaaaacagagttggaaatgtatgctcaaacccttcctgctatgcacctactagcggggcaaaaactggcgaggaggaaggtgagcttaatatgggcattggagcgcatatttgtgcagcgtcacctggcgggccccgctatgtcccacacatgactccagctcaacgttcagcttacaagaatggaatctggctctgtataccctgctcatataaaatcgacaaagacccgactgcatacccagctgagcttctacatgagtggaaaaaaacagccgaacaacgtagccaagccaaaattggtatacctgcccaacctgactccgccccacaagacctactgttaacggcactttccggaatgccaatcaagtctggtattgcccaagcaattaacaatgttcacggagctgtagagagggcatttagcgcccttgataatcgcttccaagtcaaaaccgtacacaagtctggacaaaccatattccatataaccccccgagagaacctgaaagtaccactaaccttagagctcaaaaacccaaagagatatgtacaagggtaccgtcaactcatcgaagaaggaaaatctttgataatcgatacctatgatgtaaatctaacaggctctccactattcgaaaaaatagctaccgaatcaagcaaattagaaattggcagcccatcccgagcatgcaccttaagagtctccacaatagataaatccactcaaaatattgagacttttaatgacatatctggcaatctctctttcggcacagtgagtggtacttttactggtttcgcgatggagagaatgttaaagattgagatatctataagcttacagaaccgcaacaaacctaacatcacaatcacaccttatacggaatactggaatggacttcccatcaccgacctaccttatttctcaaaaataaagaacctcttgctaaacataaacaacggtcacattatcaatttaaccctagaacacaaaggtgaaaaagtactatctgcctcaagcgagcccttatcatttaaagaccaattcaagaacatagagatgctattcctctacctggatgccgcgagagttatatcaagatttaccaatacaactatactttttgatgacactcaaacaatacccggagaggatatcgatagactaatcgccatgtcatccatgatagaaggaacttacataaaactagaaaaagacttatcaaaaccaatccaattcaagctcaccaaagaagacaacataagcgatcagctaaaaattatagaaaaagatgtagacttacaattgagaaacacccaaaaagaaaaggaaacagtttcaatatttggaaagcctataaaaatgccacgaaagacccttgaactcacaagggtacgaattaaaatcctcaatagagaaacaatatccacagataatgacattgcgtgcgaaataataccaatggaaaatttctccctaaaaattttttacctcagcgaaacagatagctcaacagcagaagacataccaaatttaccatcagaagactga

SEQ ID NO: 328332 - DNA, 813 bp, Pseudomonas aeruginosa
atggacatggaagacatggggcaagttgtcgcgtacttacttcgccatcgcatcgtcgagacgcggccggctagcggacgcagcaacgacgaagagcgtgcagtagcgaaactgctgttgtcgatgacgccagatgagcgccgctcgcttgaccgcatgttcctcggtatgcggctcgtgttcgtcgattttgactgggatgccatccctgcattaccgaaaggcgggcgcgttttcctgctggcccgcgatattggaaaaggcgagccgtccagcgtcctttcccccgaggttgtgattgagaccatgcgagagaaaggtaatgagtctgccagggaggcggctgcatggttcgtgcatctctggctgatccatctcgacctcatctataccaaccaggggcgctcgccatctgagttgcagacctatccgaaggggatgttcgatttcgatgtctttcttgcccgagtccgagagcatttcgaggatttgcgacagggcctagatcgcaatgaggtacctgctgatgccgtgtttaagaccttcgaaaaggcaagccatgcagagggggagcgacgatgcaggcgcttcgtcaaccttatgctcgatgccggtctcctcacgaccatcgctaaggatgtgtaccagcaaacactgctatcagcatacgaaaccaagagaaattacgaacggggtttgcagcactttgttacggacgccggtgcaaagaaatacctgctggcaacatcgatcctgaccggtaccgacaacaccatcgatatcgatatggaggagcaggcaacatgtcgctga

SEQ ID NO: 328333 - DNA, 285 bp, Pseudomonas aeruginosa
atgtcgctgattgcacggattcaatacgtcaacttcctgacctacagccacccggacagcaaggagcggaagccagcccttcgggtcgtggagttcgcgccgctgaagtattcgaccgcgatcaacatcccgaatggccatggcaagaccaacatgatttccgcgctgctctatctcttgagtcgagacagcaaactcaaggaaaacgttctgcctttgttcacccccccgccgaagtggcgcaccctctcatatccgcgttcagctctgggatttgagagatga

SEQ ID NO: 328334 - DNA, 873 bp, Pseudomonas aeruginosa
ttgctcggcgaagccgaacacgacggcagcggccggaaactgcgagcccagtattacctgtggctggacagcctgccgctggccaccatcgacgccgactacgacgcccagggcaaggtcggcaacccgaccctgctctacctccatggcgaccacctcgacaccccgcgcctggccaccgacgccagcggccagatcgcctggcagtggcagtccgacgccttcggccgcggcgaagcgctgagccagggcagcacccaggtcaacctgcgcttccccgggcagtactacgatgcggagagcgggctgcattacaactacttccgcgactatgatccagagactgggcggtatgtggagagtgatccgattgggttggtaggaggattaaatacatatggatatgtagagggaaatccactcggactttcagatccactaggactggctccaggggatatgtttgcaacagaggctgcggcacgagcagatgctcttgcttatcaggagtctgtgaacagtagcattgatagatggctatgggggaatatggtctatggcttccgtgtgtttaaaacctccgattgcctttggacctacgaagtacagaccccagtcttgggaattgcgcctccacttggccccaaaggtccttggaaggtcaacaagccaggagtttcaggaaaggcaggagctaaagacgttccaagctgggcaaaaggggataggccatatcaaggcgaatcagggaaagactttgccaaacgcatcatggatcaaaaatatggcaaaggtaactggaaagacggaccaggctctgaatacaaccagatcaaaaagtggggtgacagatcgttcatagaccccaagtaa

SEQ ID NO: 328335 - DNA, 1389 bp, Pseudomonas aeruginosa
atggtgcaggaggtgcacgatagctggaagtacagcaactcggggttgggggctgcgccgtcactggccattgccatcgttgcggctgcttacctggggcccgtttatggcgcaatggccagcaatcttgcgactgggaccataaacaatggcggtgacttcggaaaggggctgaagtttgcgacgagctccaatgctttgaagggatatgccgttgcgggtgcgacagcttatttggtcagtccgcaactggatgagatgtttggtgtaagcaccgacaacgtcaataaagtcactaaaggatttgacctgagcactatgagtggtctaggtgggttcgccacctattctatcattcaaggtctctctcaagcgggtattcaaactgccgcgtttggtggaagttttgcagacaacttaggtgatgcaatggccggtcaagcaacaaacttggctatggctgctgggttcaatctcatcggtgattgggctgatggaaagtttgattctggctctccgcaaaaaattatggcgcatgccttgatgggaggattgctcgcccaagcaacaggtggagacttcaaaactggagctatggcagcaggggctaacgaagcgcttgtcaatgtgctgtctaacatggccggtggcgaagaaaagctagagcttatggcctcacagctaacaggtcttcttgctgctactgtagttgatggagatgttgcgaaaggggcagagattgccaagaacgcaacggcctacaatcagcaggttcaccgggacgctctgagtcgactgaaaagaggaatgagtgcgcttcatgaacaaggcaagtatgctgatcttgagccggagatagtgcttgctgagctgcaaaaaatagccagtggcgaagccaaaagcgtttcggatttgaacccgaaagtggttcagtttctgaatagtgaattttctcctgcgagcctgagagaaacgttgttcgagccggagtcctgggaagaatatgctgcgatagccgtcgacgtactttatccaacgcctggggggaaggcagcagctattgagaaggcaggtggtaagctgtctaaagaggcgttggaagctctggagaagaagttttctgaaagcactaaacaggagcttaagtcaaaacttttacaggaagacccaaggaatctaattcctactcagactaaggccgaaatgtcaggctcgcagattaaaaggattgtgaaaagcattaaggagaacggatttgatcaagaaaaaccagtagacgtttggcgtaatccaaaaaccgggcgccttgaaattcaagatggacatcatcgaacggaggcagcaaagaaggccggattagataaaatacctgtaagcatatgggagtga

SEQ ID NO: 328336 - DNA, 411 bp, Pseudomonas aeruginosa; identical to SEQ ID NO: 269212

SEQ ID NO: 328337 - DNA, 348 bp, Pseudomonas aeruginosa
atgacgatagccaaagcggttctgaatatcggtggcatgtatccagcggcgatgatcgctatagcgctggaggcagtcggggtctggaatcgccagttgtcggcaaagcacctgcaggacttccaccggcacggcggcgggcttgtccggcagaacgccaacgaagcggacggtggtcagcagaacggcataacccagacggttatggttaccccgcagcacctggatggcttcacggtcttcatcgctcaggtggaagtaacgttccagctcttcacggctgggcgaatcaacatagcggccaaaaccgtcgcgttgctcttgagtcagaaaaccgaccggcattga

SEQ ID NO: 328338 - DNA, 411 bp, Pseudomonas aeruginosa; identical to SEQ ID NO: 269212

SEQ ID NO: 328339 - DNA, 348 bp, Pseudomonas aeruginosa; identical to SEQ ID NO: 328337

SEQ ID NO: 328340 - DNA, 348 bp, Pseudomonas aeruginosa; identical to SEQ ID NO: 328337

SEQ ID NO: 328341 - DNA, 411 bp, Pseudomonas aeruginosa; identical to SEQ ID NO: 269212

SEQ ID NO: 328342 - DNA, 465 bp, Pseudomonas aeruginosa
gtgcggcagatgatgccgcccttgaaccggacggtgccggagctggtggaagcgacaggcattactgatgccaccctgtatgcttggcgcaaacaggccagagcagcgggagcagtggtgccgggagatggacagcaggccgaccagtggtcgagccaggacaagtttcgggtggtgctggaaagcgccagcctcaatgcggctgagctggcggagtactgccggcgcaaaggcctgtatgtcgagcagatcaacgcctggcgcgaagcctgcgagcaggccaacagcctggctcagccgagcaagacccggcgcgaacgcgaagaggaaaaggccgcgaagaagcgcatcaagcagctggagcgtgaactgcggcgcaaggatgcggcgctggcagaaaccgcggctctgctggtgttgcgaaaaaaagccgaggcgctctgggggaaggacgaggacgaatga

SEQ ID NO: 328343 - DNA, 1050 bp, Pseudomonas aeruginosa
atgatcagcgccccggatcgccgtgaaacgctgcagttgatcgaggacgccgtggcggcgggagcgcggcgggcgcaggcctgcgccgaactgggcctgtcgctgcgcagcctacagcgctggcagcactgcccggaggatcggcgtccttcggcacaacgagctgagccggccaacaagctgaccccgcaagagcgccgccgcgtgctggaggtcgccaaccagcccgagtttgccagcctgccgccgcagcagatcgtggcgcggctggccgatcagggcacctggctggcctcggagtcgaccttttaccggttgctgaaggacgccgaacagcagcatccgcgcggccgtagccgcccaccggtgaaacgagcgctgacgacccatgtggccgacggcccgaaccagctgtggtgctgggacatcacctggctgccgaccacggtcaagggccgttacttctactggtacatgatcaaggacgtctacagccggaagctggtggccaacgaggtgcatgaaagtgaaagcgccgagcaggccgcccagctgctacgccaggcctgcctacgtgaacagcgggcaggccagccgctggtactgcactcggacaacggcagcgcgatgaagggctcgaccatgctggcggccatgcagaacctgggtgtgatgccctcgttcagccgcccgcgggtgagcaatgacaacgcctatgccgaggccttgttccgcacggcgaagtactgcccgctgtggccggagcggcccttcgacacgctggagcaggccaggaactgggtgaacagcttcgtggcctggtacaaccatgaacatcgccacagcgccctgaagttcgtgaccccggcgcagcgacatactggccaggcggaagagttgctgcgcaagcgtatcgagctgtacgaggcggcgcgtgcacggcacccggagcgctggagcggcaacatcaggaactgggtgctggcaccaatcgtgtgcctgaacccggagcgggaagcggtactgcagcaaacatcaaaggcagcgtga

SEQ ID NO: 328344 - DNA, 1368 bp, Pseudomonas aeruginosa
atgggacagttaccgggaggacaggcgcgcctgttctactcgttcaatctggaagatcacgtcccgtcgcaacacctcctgcgcagcatcgaccagtgcctggatctcagtgacctgcgcgcccacctggcggatttctacagcgccatcgggcggccctcgattgacccggaattgatggtacgcatgctggttgtcggctactgctatggcattcgttccgagcggcgattgtgcgaagaggtgcacctgaacctgggctatcgctggttctgccggctgggcctggaggatgaggtacccaatcactcgaccttctcgaagaatcgccacggccgtttccgtgacagcgatctgttccgctggttgttcaatgaggtgctgcggcgctgcatggcggccggtctggtcaagggggaaggcttcgccgtcgatgcgagcatcatcaaggcggatgccagccggcaacgtggcgtggcgggagatgaggtcgactggcgcgatccgacgctcagcacccgcgccgtgcgcgagtacctcgaagccctcgatgaggaagcgctggccgaagccctgcccaagaagatgtcgctcaccgatcctcagtcccgttggaccgcagcgccaggcggcccggcttactttgcctactccacgaattacctgatcgacaccgagcacggcgtgatcatggatgtggaagctaccccggcgcaccgtaccgccgaagtcgattcgactaggacgatggttgagcgtgtcgaagcgcagttcgacctcacgccggaacgcctcatcggcgataccgcctatggcactgccccgatgctggcctggatggtcgaagagaaagacatcgagccgcacgtgccggtgtgggacaagaccgagcgcaaggatgacagcctctccagcaacgactttcactggagtcaggaggccaatgaataccgctgcccaaatggcaaaccactacgcagtgaatggcgtgctttcacccagcagcgctcgcgggtgaccaaggccaacaccatcatctaccgctccagccaagccgactgcgccacctgtccgttgaaagcgaagtgctgccccaatacgccgaatcggaagatcgtccgcagcatccatgaagcggcccgcgacgtggctcgacgcatcgcgaagacaccggaatatctcgtctctcgctgcgaacgaaagaaggtggagatgctcttcgctcacctcaaacggatcatgaaactcgaccgtttgcggctgcgcggcctgacaggcgccactgacgaattcaccttggcggcgaccgtgcagaacctgcgccgcatggccaagcttttgcctcaagggccaccgctcacgggatag

SEQ ID NO: 328345 - DNA, 276 bp, Pseudomonas aeruginosa; identical to SEQ ID NO: 269209

SEQ ID NO: 328346 - DNA, 213 bp, Pseudomonas aeruginosa; identical to SEQ ID NO: 269210

SEQ ID NO: 328347 - DNA, 927 bp, Pseudomonas aeruginosa
atgcgcttcgtcgtaccggtgcgcaccgtgcatgccggccccaacccgaagtatttcggtaccggccggggcgtcacctggtacaacctgatttccgaccagttctccggccttaacgccatcaccgtgcccggcacgctgcgcgacagcctggtactactggcggtggtgctggaacagcagaccgagttgcagccgacgcagatcatgaccgataccggggcgtacagcgacgtggtgttcgggctgttccgcctgcttggctatcacttcagtccgcggctagccgatgtcggcggtacccgcttctggcgcacgcgcccggacgcagactatggcaagctcaatgggctcgcccgccagtcggtcaaactcgacctgatcgccgagcactgggatgacctgttgcgcctggccggctcgctcaaactcggcagggtaccggccaccggcatcatgcgtaccttgcaaacgggggatcgtcccacccggctggcccaggcggtggccgaattcggccggatcgagaaaaccctgcacacgctgacctacatcgacgacgagtccaagcgccgggccaccctgacccagttgaaccgaggcgaaggccggcacagcctggcccgcgccgtgttccacggcaaacgtggcgagctgcgccagcgctaccgcgaaggccaggaagaccagctcggtgctctgggcctggtggtgaacatcatcgtgctgtggaacaccctctacatgacggcggccgtggaacggctcaagcagcacggctatccagtgctggaagaggatttggcccggctatcgccgctgatctacgagcacatcaacatgctcgggcggtattcctttgcggtaccggaagaagttgcgcgcggcgagctgcggccactgcgtaatccagacgacgacctgtga

SEQ ID NO: 328348 - DNA, 1215 bp, Pseudomonas aeruginosa
atgagcagcgaaccgctcgagccgaatcaggatgtgatcatccctcgctctcgcgacagtctgggacggcctgtctacaaggcgcagttgacccgtaccgacaaccagagcgaaaaggtggcactgattcggcagaccgctcccctgccggtgatcttcattccggggatcatgggaaccaacctgcgcaacaaggcagataaaagcgaggtctggaggccgccgaatggtctgtggcccatggatgacctgtttgcctccatcggtgcgttgtggacttgggcctggaggggtccaacggcccgtcaggagctcctgaaggctgagcaagtaaaagtcgatgaccagggtacgatcgatgtcggtcaatctggtttgtccgaagaagctgcccgcctgcgcggctggggcaaggtcatgcgcagtgcgtataacccggtcatgggattaatggagaggcgactggataacatcgtcagccggcgggaactccaggcatggtggaatgacgaagccctctctcctcctggagatcagggtgaggagcagggaaaggtggggccgatcgatgaagaggaattgctcagggccagccgataccagttcgatgtctggtgcgccggctataactggctacagtccaaccggcagtcggcgctggatgtacgcgactatatcgagaataccgtgttgcctttctaccaaaaggagtgcggtctcgatcccgagcaggtgagacgtatgaaggtcattctggtcacccattcgatgggagggctggtggctcgcgccctgacgcagttgcacggctatgagcgcgtattgggggtggtgcatggcgtacaacctgcgacgggttcctcgaccatctaccatcatatgcgctgtggctatgaaggtatcgcacaggtcgtgctggggcgaaatgccggtgaagtgacagccattgtcgccaattcggccggcgcgctggaattggcccctagcgccgaataccgggaagggcgtccttggctatttctgtgcgacgcgcaggggcaggtgctcaaggatatcgatggaaagcctcgggcttatccgcagaatcaggacccttatgaagagatatacaagaacactacgtggtatggattggtgcctgagcaaaattcacaatatctagacatgtcagacaaaaaagaaggggcggcggcaaaaactgagtgcaacacctga

SEQ ID NO: 328349 - DNA, 306 bp, Pseudomonas aeruginosa
atgcccggcaacttcgtggtcaaggcggcgaagcacagtcatgtcggtcccgctcatgcatcgaccagcttcaacgcctgggattcgacaccgttcgatgaccggtatgtcctgcgcgacgaagccacgctggagccgttacccaatatcgccgttgaagtgatacgaggcgatggtggtgtggtgaaactgatgaccgacagccagggccgtttacccaagcaacaacacctggccatggacccggtgcagatacgcatcctgggcaagggcagtcacaacagcgacacggagtccaacacatga

SEQ ID NO: 328350 - DNA, 657 bp, Pseudomonas aeruginosa
atgataaaagcagcgctacctgaagggcggtgggtcatgctggtagcctcatcatttctgccatacagctcggaagtcagggagatcgtactgaatacttgcccacatctcgaaggccagtacctggttgaacggtgggatctagcaaaggcagagatcgatatcagttctctccagctcgactcgatgctcactctgagcaaaagcaaagcgctgccactcacacagaaaattcagatgtggtcagggcttcgcctagagacgattgaaagcaaaccggaagcggttccagagctcggccgtgtatctatgctggccaataaagctggcgaaaggtttgctgatccgctgatgcctgtgctgcgacatctggttcgcaacgcgagcctaacctcggagcagcgctctgaaatgctgacacaatgtcttcctgggatgaagtggccggaggttgccgcagctctagggttgctcgacgatgaggacttcaaaaccgtgagcgcgaaggtcaagaagatcaaggtaagaaacaccgagtcaaaccggaggttagtcaacgagatgagatctgaggggtacttggcaacggtgacctcagaggacgacgtcatcatcgcaaccaccaggccctcggcaatgacatctgaggacgcctga

SEQ ID NO: 328351 - DNA, 309 bp, Pseudomonas aeruginosa
atgagcaagcaacgacgtacgttttccgccgagttcaaacgagaggccgcggccctggtgttggaccaaggctacagccatatcgacgcctgccgttcgctgggggtggtggattcggccttgcgccgttgggtgaagcagctcgaggcggagcgccagggtgtgaccccgaagagcaaggcgttgacgcctgagcagcaaaagatccaggagctggaagcccggatcaaccgattggagcgggagaaagcgatattaaaaaaggctaccgctctcttgatgtcggacgaactcgatcgtacgcgctga

SEQ ID NO: 328352 - DNA, 348 bp, Pseudomonas aeruginosa; identical to SEQ ID NO: 328337

SEQ ID NO: 328353 - DNA, 411 bp, Pseudomonas aeruginosa; identical to SEQ ID NO: 269212

SEQ ID NO: 328354 - DNA, 471 bp, Pseudomonas aeruginosa
atgcgtaccctgcaaacgggagatagacccacccggctggcccaggcgctggccgaattcgggcggatcgaaaagactctgcacacgttgacctatatcgacgacgagtccaagcgccgcgccaccctgacccagttgaaccgaggcgaaggccggcacagcctggcccgcgccgtgttccacggcaaacgcggcgagctccgccagcgctaccgcgaaggccaggaagaccagctcggtgctctgggcctggtggtgaacatcatcgtgctgtggaacaccctctacatgacggcggccgtggaacggctcaagcagcacggctatccagtgctggaagaggatttggcccggctatcgccgctgatctacgagcacatcaacatgctcgggcggtattcctttgcggtaccggaagaagttgcgcgcggcgagctgcggccactgcgtaatccagacgacgacctgtga

SEQ ID NO: 328355 - DNA, 213 bp, Pseudomonas aeruginosa; identical to SEQ ID NO: 269210

SEQ ID NO: 328356 - DNA, 276 bp, Pseudomonas aeruginosa; identical to SEQ ID NO: 269209

SEQ ID NO: 328357 - DNA, 1029 bp, Pseudomonas aeruginosa
atgtcttataccgaactcagcgttgaagagcgcgccaccattcaaatcggtcgtacccaaggcttcagcctgcgcaggattgcctgcttgatcaaccgatccccttcgaccatcagccgtgagctgcgccgtaaccgaggtgcttgcggtggctactcggcccgcctggcccagcagcaaatgcaggcccgccgccaggtttgtcgaccgatgcgaaaactgttgccgggtagcgagcgcttcgaactggtgacccatatgctgcgtgagcgtttgtctcccgagcagattgccggcaagctgcgcagcatgaacatacctaacctgcgagatgcctacgtctgtcgcgagacgatctacaacgcgatctatgccctgccagtgggtgagctgcgtaaggagctgatcatctgtctgcgccaaggcaagacgacgcgcaggccgcgctctggtggcgtggatcggcgcggccagatccccgagatggtcagtattcatgtgcgcccgccggagattgaagacaggctgatgccggggcattgggaaggcgacctcatcaagggtaaggccaacgcctcgtccgtcggtacgctggtggaacgcaccagtggctacctgatgttggtgaagatgaacgacgcgacggcgacctcggcgctggaaggcttcagcgcagcgctcaatagcatgccgctggagatgcgcaagagcatgacttacgaccagggccgggagatggcgcgacacgccgagatcacccaaagaaccggcgtggcgatctacttctgcgacccgcacagcccctggcagcgcggcagcaacgaaaacatcaacggcctgattcgccagtacttgcccaagggcacagacctgtcggtacatagccaggaggagctggacgccattgcgctgcaactgaacatgcgaccgcgtaagcgcttcgacttcaaatgcccaatcgaagttatggacgaggtgatgcagaaggccatggctatgcggcatgatgctccagtttcaattcaatga

SEQ ID NO: 328358 - DNA, 276 bp, Pseudomonas aeruginosa; identical to SEQ ID NO: 269209

SEQ ID NO: 328359 - DNA, 213 bp, Pseudomonas aeruginosa; identical to SEQ ID NO: 269210

SEQ ID NO: 328360 - DNA, 219 bp, Pseudomonas aeruginosa
gtggtgaacatcatcgtgctgtggaataccctctacatgactgcggccgtggaacgcctcaagcagcacggctacccggtgctggaagaggatttggcccggctatcaccgctgatctacgagcacatcaacatgctcgggcggtattcctttgcggtaccggaagaagttgcgcgcggcgagctgcggccactgcgtaatccagacgacgacctgtga

SEQ ID NO: 328361 - DNA, 399 bp, Pseudomonas aeruginosa; identical to SEQ ID NO: 269206

SEQ ID NO: 328362 - DNA, 213 bp, Pseudomonas aeruginosa; identical to SEQ ID NO: 269210

SEQ ID NO: 328363 - DNA, 276 bp, Pseudomonas aeruginosa; identical to SEQ ID NO: 269209

SEQ ID NO: 328364 - DNA, 135 bp, Pseudomonas aeruginosa; identical to SEQ ID NO: 103823

SEQ ID NO: 328365 - DNA, 189 bp, Pseudomonas aeruginosa
atgacatcacatcagttattacgcctgaaacaggtcgaagaaaaaaccggtctgaaacgctcgcaaatctatctgtatatgaaagggggcttttttcctcgttcaataataaaggttggccctgccagcgtagcctggctcgaatctgaaattgatgaatggatcaacctcaaattagccaaccgctga

SEQ ID NO: 328366 - DNA, 504 bp, Pseudomonas aeruginosa
ttgtggcactgcccgtgggccatcatcggggtattactggcctcctgggtatgcagtctgttgattgagtgggtcgggattgcgtttttctgggcggacgaaggggcggagcacagccggcaggtgatgttaaccgagagcgggtatctgtcagaagggtttacccgtagtctgctgatgtccagtccggcgcagtggctggctcataccgttgaacaggcataccggtggctgtttgtggagtccgggctgatggagagctggcagaacgtgtatcctgtcagcgggaatgcagttgcccgtgaactggatgactggcggatttggtttgtgtccgagctgagagactatctgctggcgacggtttatgtgacgctgaccttttttatccgggtgactattctggtgctgtcgatgcccctgtttgttatggtgctgttggtgggcatggtggaaggctttaaccggcgtgatttgcggcgttatggtgccgggtatcaatga

SEQ ID NO: 328367 - DNA, 411 bp, Pseudomonas aeruginosa; identical to SEQ ID NO: 269212

SEQ ID NO: 328368 - DNA, 375 bp, Pseudomonas aeruginosa
  misc_feature (297)..(306): n is a, c, g, or t
atgaaaaaacgatttttatctctttccggattgctgatgctgtcgctgtcatgcctgccgttgaccgccggggcggcagtggtgctgtataccacgcaggatgacgctctgccgcagacggacatcccgtttgaggtggtgtatctggatgcgtctgaacgcctgctggatgaggccctgcttcagccggggacggaactgagtgaagcggatgccccgcacatcaccgccctgttacaaagtccggcctggcaggccagagaaacggcattacggcaggcttatcagggcgtggtnnnnnnnnnnctctgccggcggtcgtcgttgatgcgcagtgggtggtttacggcaccaccgatattgcacaggcggtga

SEQ ID NO: 328369 - DNA, 444 bp, Pseudomonas aeruginosa
atggactacaccgatgtgagcattcagtacagtgaggcgaagataaacaagcggattacggaagagcagcaggcccgtattgagggggaggaacagaccctggcggccgcaaaccgctataccgatgagacgttcgggcaggtgacccacacggtgctggacaatgcccggcagtataccgaccagcgtttcagtcagctggacaataaaatcagtcaggtggagaaacgggccaatgcggggattgccggggtgaccgcaatatcttccattccgtatgtgaacagtgagcgtttttcgttcgggatggcgatggggcattaccgtgatgcacaggcgatagccaccggggtgcagtataagccgacggccaataccaatgtgcgcctgaatgcgtcatggaataacggcggcgataccagtatcggcgccgttattccatga

SEQ ID NO: 328370 - DNA, 240 bp, Pseudomonas aeruginosa
atgaataccattcgctggaatgtcgccgtctcgaccgacaccgaccagtcgcttcggatgtttctggccagccagggcggcggccggaaaggcgacctgtcgcgcttcatcgaagaagcggtacgggcacacatcctggaattgacggccgaacaggccaaagctgccaacgcccctctgagtgaggcagaattgaccgacgcggttgacgaagcgctcgcctgggcacgtaagcgctga

SEQ ID NO: 328371 - DNA, 240 bp, Pseudomonas aeruginosa
atgaataccattcgctggaatgtcgccgtctcgaccgacaccgaccagtcgcttcggatgtttctggccagccagggcggcggccggaaaggcgacctgtcgcgcttcatcgaagaagcggtacgggcacacatcctggagctgagcgctgagcaggccaaggccgctaacgcccatctgagtgaggcagaattgaccaacgcggttgacgaagcgctcgactgggcacgtaagcgctga

SEQ ID NO: 328372 - DNA, 267 bp, Pseudomonas aeruginosa; identical to SEQ ID NO: 317232

SEQ ID NO: 328373 - DNA, 231 bp, Pseudomonas aeruginosa
gtggacgacgactactacagccagccggctgcgctgttccatctgttcaccgacgagcagaagcagcggttgttcgccaacatcgccgaagacattcgcgatgtcccggaacagatccagcggcgccagatcggcctgttccttaaggtcgattcagagtacgggaaaggtgttgccgatgcgcttagtgggcggttgcaggagctgagtgcaacacggtcattgaattga

SEQ ID NO: 328374 - DNA, 1326 bp, Pseudomonas aeruginosa
atgaaccctgccgactctgaatatgatgtttacgatgttttcactccttcccagccagccaagctagcgttcgtagaccgagaaacaattaatgatagtttagtaaatgctctaaaaacccccggaaaacagatagtagtttatggtcactctggaagtggcaaaacaactttgttaacgaacaaattatttcaaatttatgagggacatataacaagtagatgcatgaaaggaatgtcctttgagcagataatgatcgacgccttcgatcaacttgagtcattctatacatcagataagactcaaaggcttagcgaaactcaaaaagcttcccttcaaggaacttatgcaggaataaaaactgcaattgaaaatagctcttcatctgaattatcaaagagtgaaaaaagagtccttcctccccagctgacccctcaatccctaggacgccttcttggagcgtccaatcaatgctgggttattgaggactttcataaaatcgactcaagtgagaaacaaaaattatcacaattacttaaagttttcatggatctcgctgtagagtacaaaaaccttaagattatctgtcttggggccgtggacacggccaggcaagttgtagattacgatgaagagatgaaggagcgcgtggcagaaatccacgtccccttaatgaacgacgaggagataaatctgataatcacaaaaggacaaagcctattacatataaacatcccacagccaatccgaagaaaaataataaaacacgcatgcggagtcgcttctatatgtcatcaaatttgtctaaacatgtgcataaacgcagaaatagaaagaaaatgtgaaacacaaaaaaacctaagagaggataattttgacaatgcagtaagaatgtatatagataacgcatccgacacactgaaaggcgctttcgataaagctctaaaaatcagaaaaaaaacaaaatttgacagctcaaaactaataataaaagcattagcacatgcccctgagagaggacttgcccgtctcaagcttcttggcagaatccaagaagaatctcaaacctatacagatgcaatattaaagccacacattaaaaaactacttgaacccgagtacggctcaatcttgaggctcgactcagactccggactttactcatttaaagacccattttatcgagcatacgcacaaacgatattgcataatgagaataaaacatcagcagagacagccccttcaagaacaagaataataaccatgatatttaacacaatgcaggaaagtagcacctccatccttgagttcgaggacagcttttaa

SEQ ID NO: 328375 - DNA, 309 bp, Pseudomonas aeruginosa
ttgttggagctgggggccggtttcaacatggagtacaccggcagggaaaacataatcttcaatgccatgcttcttggattgggcgagcaggagatttctgaacgcctcgacgagataatccagtttgccgatatcggtgagttcatcgatcgtccggttagaacatattcgagcggtatgttcgtgcgtttggctttctccattgcggcatatgtcgatgccgatgtgctgatcgtggacgaggccctggcggtaggtgacgccgcgtttcagttcaaatgcctgaaccgcttgaagaactgctgctga

SEQ ID NO: 328376 - DNA, 972 bp, Pseudomonas aeruginosa
atggaccagatcaacctcggcctcgacccgctgcccaagaagacgcgcaaggaagtcttccttgaagagatgaaccaggttgtgccctggtcgacgctggtggcgttgatccagccccatgcccgcggggcgcaccaggccctgggaggccgcccaccctttgcagtggagaccatgctgcgcatccactgcctgcagctgtggtggaacctgagcgatccggccatggaagaggaactgcacgagcgccctctgtaccggcgcttcgtcgggctcgacggctcggcgcgcatgcccgatgagaccaccatcctgcgctttcggcacctgctggagaagcagcaactcgcgccgaaggtgctggccgccatcaacgccaccctggcccggcagggcttgatgctcaagaccggtacggtggtcgacgccaccatcattgccgcgccgagttcgaccaagaacgccgagggcaagcgtgacccggagatgcaccaggccaagaagggcaaccagtggcatttcggcatgaaggcccacatcggcgtggatgccgattcggggctggtgcataccgtcatcggcacggccgccaacgtcgccgatgtcacccaggcggcggccttgctgcatgggcaggaaagcgatgcctggggcgacgcgggctaccagggcgtggacaagcgcaaggagtgcgagggcagcgtcgtgcgctgggaagtggccatgcgtcctggcaagcggcgccggctcgatccagcgcgggagctcgacaggcttcgggagaaggccgagaagctcaaggccagcatcagggccaaggtcgagcatccgttccgggtggtcaagcagcagttcggctacgccaaggtgcgctaccgcggcttggccaagaacacggcccgcctgaccatgctgttcgcgctgggcaatctgtggatggtgcgagcgcggctgctggccatgcaggcataa

SEQ ID NO: 328377 - DNA, 3120 bp, Pseudomonas aeruginosa
atgatcgccaagctgattcgatggtcggtggccaatcgcttcctggtgctgctggccaccgccatgctcacggcatggggcgtgtggggcgttcgcagcacgcccgtggatgcgctgccggacttgtcagacgtgcaggtcatcattcgcaccaactacccaggacaggcgccgcagatcgtcgagaaccaggtcacctacccgttggccaccaccatgctgtcggtgccaggggccaagaccgtgcgcggcttctcgttctttggcgactcgttcgtctatgtcttgttcgaggacggaaccgacctgtactgggcccgctcacgggtactggaatacctgaaccaggtccagggccgattgcccgccacggcgaagccggccctgggtccggacgccacaggcgtcggctggatcttccagtacgcgctcgtggatcgcacgggcaagaacgatctggcgcaactgcgtgcgttgcaggactggttcctcaagttcgaactcaagagcctgcccaacgtggccgaggtggcatcggtggggggcatggtcaagcagtaccaggtcgtgctcgacccgatcaagttggcgtcctatggcctcagtcaggctcaagtccgcgatgccctgatggcggccaaccaggagaccggcggctccgtcctggaattgtcaggcgcggagtacatggtccgcgcgagcggctacctcaagaccctggacgagttccgggagatccccttgacggcacgcggcggtgtgccggtgcggctgggggatgttgcgacgctccagataggcccggagatgcggcgtggcattgccgaactcgacggagaaggcgaggtcgccggcggcgtggtggtgctgcgctccggcaagaatgcccaggagacgatcgctgccgtcaaggccaagctcgcggagctgcagggcagcctgccgccgggcgtcgagatcgtcaccacctacgaccgcagcgcgctgatcgagcgggccattcgcaatctcacgaccaagctaggcgaagagtttctggtggtggcgctggtctgcgcactgttcctttggcatcttcgttctgcgctggtggccatcatctcgctacctctgggcgtgatgacggcgttcttggtcatgcgctaccagggcatcaacgccaacatcatgtcgctgggggggattgccatcgccgtgggggcgatggtggatgcagcggtggtgatgatcgagaacgcccacaagaagctggaggcttggcagcacgcgcacccagatcaacggctgcagggcaaggaacggtgggacgtgatcacacaggccgcggaggaagtcggtcctgcgctcttcttctcgctgctcatcatcacgctctcgttcatcccggtcttcaccctagaagcgcaggaaggccggctgttcggcccgctggcgttcaccaagacctacgcgatggccgcggccgcagggctgtcagtgacgctgattcccgtactcatgggctactggattcgcgggcgtatcccggatgagcagaagaaccccatcacccgcatcctgattgcagcctaccggccagcactggagtgggtactgcgccggcccaaggcgacgctgctgatcgccgtgctggccttggcgaccacggcctggcccttggcgcggctcggcggtgagtttctgccgaggttggacgaaggggacctgctctacatgccctcggccctgccgggactctcggcgcagcgcgccacggagttgctgcagctgagcaaccgcatgatcaagaccgtacctgaagtggacaaggtgttcggcaaggcaggacgggccgaaactgcgaccgatccggcgcccctggagatgttcgagaccacggttaagctcaagcccagggaacaatggcgtccaggcatgacgcccgagaagctcgtggaagagctggatcgtgccgtgaagatcccgggcctgtccaatatctggattccccctatccgcaatcgcatcgatatgctggctaccggcatcaagagcccgatcggggtgaaggtgaccggcaacgacctgggcgtgatcgatcgcatcgctgcagaggtcgagcaggtcgccaagggcattcccggcgtgacgtcgtcactcgcggagcgcttgacgggcgggcgctacgtggatgttcagatcgaccgcgtagccgccggtcgctacggcctgaacatcgccgatgtccaggcggtcatcgccggcgcggtgggtggcgaaaacgtctcggaaacggtcgaggggcttgcccgctttccgatcaatctgcgctacgcgcgagaatggcgtgattcaccacaacggctggcagaactacccatcttcacgccgatgggtcagcagatcacgttggggaccgtggcacgcatcgcgatcaccgatggaccgcccatgctcaagagcgagaacgcacggccctccggttgggtctatgtcgatgtgcgcggccgtgatctagcctcggtggccaacgaactgcgcgatgccatcgggcagcaggtcaagctggagccgggtgtgagcatcacctactccgggcagttcgaatacatggagcgggccaatgcacgcctgaaggttgtggtgcctgccaccctgttgatcatcttcgttctgttgtacctgaccttcgcgcgtgtggacgaagcgggcttgatcatggcgaccttgcccttcgcgctcacggggggcatctggttcctgtacctgctgaattacaacctgtccatcgccaccggcgtgggattcattgcgctggcaggtgtggcggcggagttcggcgtggtgatgctcatctatttgaagcaggccttggcggaacgttgccccgatgggcgcaacccaacgcgagaagaactgctagatgcgatccgggaaggggcggtgctgcgcgtgcgcccaaaagcgatgaccgttgcggtcatcctggcgggcctggtacccattgtttggagcagcggcacgggctctgaagtcatgagccgcatagcagctccgatgctcggcgggatggtgaccgcaccgttgctgtcgctgttcgtgattccggctgcctatctgctgatgcgtaagccgcgctaa

SEQ ID NO: 328378 - DNA, 198 bp, Pseudomonas aeruginosa
atggccagatacctcaagatatggggcgcggtgctgggggcactgatcatggcgtgcgccggtgcgacggtgctactcaacggcgagcccggccgcgtgctggcgccctcgatcgtgctggcaatgtgtgtgctcgccggcctgctgcacgatggcgcccgcaccgttggatccgttcaggaggaagctcgaccatga

SEQ ID NO: 328379 - DNA, 1818 bp, Pseudomonas aeruginosa
atgctctctctgttccagcgaaaacggcccgcggacgctaccgctccgacgccacctcccgcatccgacctcccgaaagggttgatgcggcccgagtcggccgcatcgctgctggccaccccgcgccggcagaaactgctggagcacatctggcagcgcacgtcgctctcacgtaagcagttcgccaccttgtaccgggcgccactggaacgctacgccgagctggtccaggctttcccggcttccgaggcgcatcatcacgcttaccccggcggcatgctcgaccacggcctggaaatcgtcgcctacagcctgaagctgcggcagtcccatctgctgcccattggcgccagtcccgaagaccaggcggcgcagtctgaagcctggactgccgcagtcgcttatgccgcgctgctgcacgacatcggcaagatcgccgtcgatctgcacatcgaactggccgacggctcgctgtggcacccctggcacggcccgctgcaccagccataccgcttccgctaccgcgacgatcgagaatatcggctccacagcgctgcgacaggtttgctctaccgccaactcctcgaccgtgatgccctggactggctcagtggctatcccgacctgtggggaccgctgctctacgtcctggccggccagtacgagcacgccggcgtgctgggcgaacttgtcgtacaggccgaccgcgcttccgtggcccaagagttgggaggcgatcccgcgcgcgctatggccgcccccaagcacgcgctgcaacgcaagctgctggacgggttgcgctacctgctcaaggaagagttgaagctgaaccagcccgaagcctccgatggctggctcaccgaggacgccttgtggctggtgagcaagacggtttcggacaagctacgtgcgcacctgctgtcagagggcatcgatggcatccctacgaacaacactgcggtgttcaacgtgcttcaggaccacggcatattgcagccgacgtcggacgggaaggcggtctggcgcgcgaccgtgaccagtgcgaccggctggtcccactcatttaccctgctgcgtctagctcccgcgctgatctgggaagctggcgaacggccagcatcgtttaccggcacggtggcaatcgacgctgcggcaatcgagaaggatgctggctcggaggctgccccgcctatgactgccgcgaagcctgtcttggaagaacagacgacgccaccttgggaaggcagcagccccgctaacttggcttcaccgcccgcagttcagcccctgcctgacgtcatggaagacatgctggcgatggtgggctccggacacctccttgcgacgcgacaggatgcagagcccgtcccggccttcgcaacgagttcgctggtactgcctgtgccagcgtctaaatcttcggcatcgacacagcagccttcgggcgagcacttcatgggctggcttaggcatggcttgcagagccgaaagctgattctcaacgatgccaaggcactggtgcataccgtggacgacacggtgttcctggtaagccctggggtgtttcagcgctatgtccaggagcatcctcaagttccagcactcgccaagcaggatgccgttgtcgactggcaatgggtccagaagcgcttcgagaagctgcaggtccatcgcaagcagcccagcagcttgaacatctggacctgcgaggtcaccggcccgcgcaagtcgcgcaagctgcatggctacttactcgatgaccctggccaactgttcgatgagcggccaccgaacaatccctacttgaaactggcatag

SEQ ID NO: 328380 - DNA, 1995 bp, Pseudomonas aeruginosa
gtggaccagttcagcgagttcgtgcgcggcttcaacccctcgctcgatcaggacctgatgcttgccggcgtgcaggcggcgcagctggcgcagcgtcgcctgcggttggcgaactccgaacagaccatcgccgcctacccgcagaagatcgcagcggtcgagggcctggaacaagctttggcgcagcgcatgtcacctggcgcgacctatcaagcctgcgtggactggctgctgggtacgccgcagcagcaaggacggctaccgtatgtccaggctcagctggacgccaacccgcctgccattcacgaggtgacccaggcccgcctgcaagcgttgctggcagaggcctaccgcgtccagggactgtggcaagcgtcttccgcgcaactcgcggcccgcgcgggcgaggtgtcgtacgcgaagctctacgaggccgtgcaagcgttggcggacggggcgaccgtgtgtccggcatgtggaaccggactggccgctgtggcacaggacccgttcgccagggcgcgaatgggcctggagcagctcgcgcaactggccgtcctgcagcagcaagaggccgggcatcggacgcagttgagcgaggcggtccgagcgctgtgggacgaaatgcgccgcgtggtggcggcggctggggtcgcttgtcctgccgaatcgcaggccgcgggcctgccactgctgcctcccacgtcggcgggcaattggctcggcggctgggtgaatggggaccagcgcgcctggcaagccctcttacggatcgcacagatcatcgaaggcttcgacgcgcaggcgcgcgacgtgaatgcccagcgcggcgcgatggcccaggagcgggaccgcctgcaacagcatcagctggagatcgaacggctgcggaccatgcgcacgactgcggatcaggagctggcggccgcccgccaaaccgtggcccagttcgacgacgcgaaccgcggcctaatccaggcggccacggacgaaatgccggtggtggtgcaccatcagcgggtcaaggccgcctacgacggcttcctacccgagattcaggcatacctgaccgctctgccgggggttctgctacaggggctgggagaccaagcccgccatctctacaacgcattcaaccgggccgatccgcccggcgatctgctgcacgcgctgtggttgcccgtggccgagaacggcaagatcgaggtggagttcgccggcgagccgggcgtgcgctacgacgcgttgatcgtcttcagcgaagggcacatcaaatgcttgggtctggcgattctgcttgccaagaacctcgcgcagggctgccccgtggtcatcttcgatgacgtcgtcaatgcgatagacgacgaccatcgcgatggcatctggcgtaccttcttcgaggacggtttgctccacggcaagcaggttatcctcacctcgcacgcagaggagttcctgcaccacatccagcaggagttgggcgtgcgccgcgccgcggccatcaagcgctacaagtttctcccgcatcagggagagcacgaactgcgggtcgacagcgacccgccagcgaagaactatgttcttctggcccagcaggcgttggcggctgacgagaaacgcgaggcactgcgccaggcccggccggcgctggagagtctgacggaccgcctgtggacgtggctgggtcggcgggcggacggccggatcgacatcaagctgagcgggccccgcgcgccttgggagctgaacaataaatgcaccaagttgcggtcggccgtcgagcgtatcgcggcgcaacatgcgggtgcgccggatgccgtaggggcgttggtcaggctgctcaatgtcagcggtacgagtattgaatggggttacctcaatagcggtgtgcacgacgctcagcgcgatcatgagttcgatcgggcgacggtaagaacggtcgtcgaggcggttacggcgttggatgctgctcttgataccctgcagaaccgatga

SEQ ID NO: 328381 - DNA, 549 bp, Pseudomonas aeruginosa
atgacggaaccacatccggtccatctcgcgctcacgggcctgctcatgctgctggcaggcctgccgctagtctcgcgtgccggcgagccgctgatcgtggtcgaagactgcggcggcacgtcggcgctgccatactacgaggccctcaacctccagccgcgcgccaatgcctcggcccggccacccatcccgacgccccaggttcccgccacgccagtggacgaagccgcgatgctgccggtgcgcagcgccaagctcacacccggcaccgtcgcgcggcgcgtgatcgaagcacccggcctgcggccgttcgtggtcatcggcgacgacgaggcgtcccaggcctggctgcgccgccacgcggacgcgttgcgcgagcgcggcgcggtcggcctggtggtcaacgtcgagaccgcgcagggcctggcgcggctgcgcgccctggtgccgggcgtaccgctcgcgcccgtggccggcgacgacctggccgatcgcctgggcctgcgacactacccggcgctgatcacggccaccggcatcgagcaatga

SEQ ID NO: 328382 - DNA, 726 bp, Pseudomonas aeruginosa
atgaagccctcgatcttgctcaccctgttcctgctggccgcagcgcagttgcccgtctgggcgcagcagcccgccacggcccagtcccgcaatgcccagagccaggagcgtcccgtgatcggccgcatcctggacgaccgcgtggcgagcgactggggactgcaaccgcaggagtgggcgcgctaccgcgaactgatggaggggccgctgggcatctactcgcccaacctggacccgctttccgcgctgggcgtcgaggctcgctccgatgaagagcggcgccgctacgccgaaatgcaggtgaaagccgaggcaaggcgcgtcgagaagttgcttgcctaccagcgcgcctacgacgaagcgtggcagcgcctgaaccccggcatgcagcgagtgaacctccccgatgatctgccgaccgccgcaggcgtgcgcggcagtagccgcacggcggtgttcgtcaaggacggctgcgcggcctgcgggcaactcgtgcagcgcctgcaatcctcgggcgccgagttcgacctctacatggtcggcagccgccaggacgatgcgcgcatccgcgactgggccaagcgcgcgaacgtcgatccggcgcgcgtgcgcgccggcagcatcacgctcaaccacgacggcggccgctggctgtcgctgggcctgcccggcgatctgcccgccgccgtgcgcgaagtgaacggccaatggcagcgccagccgtag

SEQ ID NO: 328383 - DNA, 636 bp, Pseudomonas aeruginosa
atgaacaacgcaccacggccttcccagcgctcgaccgccgccgtgatcgtgcagagcctgctctggctttggctgatcggcctgagcgtcttcgttgccctgaaccaccaggcgatgaatggcctggccgaccaggaacgggtggattccggcctgcagcagctcgaagcacaggtggtcgggctgaccgagaccgtacagcagcggccggctaccgcaaccgcggcggaattgcagcacatccggcaggcgctggaagcccgcatcgcgcaggttgaacaggcgctgggcggccatgcctccaacgacgaccttcaggccctgcgcgccgaggtcgagcaggccaaggctcgccaagcgacggttcgtgccgctgtgcctgcgcagccgcgctcaccaagcaaggccgccgccaaacctgagcctttcccgttgccgctccgcatcgtgggtgccgaactgcgagccggccagcgcagcctttccgttgcaccagcgacgggcgagttcactgccgaccaggttcacgtgctgctgcccggcgatgcggtcggcccgtggcgcttgcaggcgatcgagggcaacaccgccgtcttccaggccggcgagcagacccgccgtttggcgattccctga

SEQ ID NO: 328384 - DNA, 567 bp, Pseudomonas aeruginosa
atgcccgcaatccatgtatcccggcacctggtcggcgccggcctcctggccgcagccttggccagcggctgcgcgaccaccacggcgccgctcgcacccgatgccatcgaggaagtctcggccgcgcccgaacccgaggcgcccgagtacatcccggtcgtgcgctacggccgctacaccctggtcgagttggcacccacggcggcgcagcgcgacctgctgttgcagaccatcgacgtgtccatgcccgaggatgcccgcgccacggttggcgacgggctgcggcatgtgctcaagcgcagcggctatggcctttgcgagaccgcgcatgccgtgatcgagctgtacgcgctgccgttgcctgcggcacatctgcacctcggccctatgaccttgcgcgatgcgctactcacccttgccggcccggcctgggacctgcacgccgatgaccggacgcgacaggtctgcttcgagcggcacggccgcgatgcagatgccgatccggttcccgaaccactcgccaccgaggcggtgcagacgttcccgctcgcgggaggtcagccatga

SEQ ID NO: 328385 - DNA, 2280 bp, Pseudomonas aeruginosa
atgtccctcgatctcgaaaccactgccgctgacgccgcgcccgtacagggcgaactgctcgacgcggaatcatcccctctgaccctgagccttcaggatttcgtcggtgagttcggcgacgaactgctcgactcgctcaaccgcgccaacccgccggtctataccggccaaccgcaggcgcatcgccaactcgtcgtcgccagcctcaagcgcaagctgttccaggctcaggccgaagtcgtccatgccgccgccgagctgctgatcgaccgtggcgaacgcgccgcgatcgtcaatggcgaaatgggctgcggcaagacgaccgttggcatcgccacggccgccgttctcaacgccgaaggctactgccgcaccctggtactttcgccgccgcaccttgtttacaagtggcggcgtgagatccaggagacggtggcaggcgccaaggtctgggtgctcaacggcccggatacgctggtcaaactcatcaagctgcgcgagcagttgggtgtgcagcccacgggccaggagttctttgtcctggggcgcgtgcggatgcggatgggattccactggaagcccgtcttcaccacgcggcgcacccgccatggcgacgtggcagcgtgccctgactgcggcacggtcatcaccgacctcgacggcgagccggtcaacccggtcgcgctcgaagccgaggagtaccgcaggaagtgcagccattgcgccgcgcccctgtggacgctgatccgcccgcgcagcctgtccggcagcgaccagtcctcggccgtgctgaaagccttgaagcgcatcccgaccatcgggcaagtcactgcgcagaagctgatgcagaagttcggtgacgggttcctggcgtcgatgctgggcgacaacatccatgagttcatcaacctcatggacggcaacggcgagctggtgttttccgaccgccaggctacgcgcatggaacgcgctatggccaatatggagtttggctttggcgagggcggctaccagccgtccgagttcatcaaacgctacctgccgcaaggcacgttcgacctgctcatcgccgacgaggcccacgagtacaagaacggtggcagtgcccaaggccaggccatgggcgtgctggcagcgaaggctcgcaagaccttgctgctgaccggcacgctgatgggcggctacggcgacgatctgttctacctgctgttccgagcccttcccgggcggatgatcgaagacggctaccgcccgaccacgagcggcagcatgacctcggccgcgatggcgttcatgcgcgatcacggtgtcttgaaggacatttattccgagagcaccggcacggcgcacaagaccgcgaaaggcacgaaagtcagtgtcagaacggtcaaggccccaggcttcggccccaagggcgtgttgcgctgcatcctgccgttcacgatcttcctgaagctcagagacatcggcggcaacgtgcttccgccgtatgacgaagagttccgtgaggtcgcaatggacacggcgcaagccgcggcctaccgcgatctggcgggtcggctgaccgcggagttgaaacaggctctggcgcgacgcgatacgaccttgctgggggtggtgctcaacgtgctgctggcctggccggattgctgcttccggtcggaaaccgtggtgcatccgcgcacgcgcaacaccttggcgttcgtcccggctcagttcaacgagttcgagatcagccccaaggagcgtgagctgatcgagatctgcaaggaagagaaggcccagggccgcaaggtcctggcctacacggtctataccggcacacgcgacacgaccagccggttgaaggtgctgctggagcaggaaggttttcgggtggcggtgctgcgcgcaagcgtggatgccagccgtcgcgaagactggattgcggagcaactggatcgtggcatcgacgtgctcatcaccaatcccgaattggtcaagacggggttggacctgttggacttcccgacgatcgtattcatgcagtcgggctacaacgtgtactcgctccagcaggcggcacgccgctcctggcgcatcgggcagaagcagccggtgcgcgtgatctacctcggctactccggttcctcgcagatgacctgcctggagctgatggccaagaagatcatggtctcgcagtccacctcgggcgacgtgcccgaatccgggctggatgtactcaaccaggacggtgattccgtcgaggtcgcactggcccggcaattggtcgccgcctga

SEQ ID NO: 328386 - DNA, 261 bp, Pseudomonas aeruginosa
atggacccgatcctggctgcactcccgctctcgctgttgaagctcgttgaaggcagtttgtccaacgacgaagtttcctccgacgaggaaatgctggggtacttcatcgacaacggcctcaccgaggagcaggcacggcaggcgctgacctaccgcgaccagtacctcaacaacatctacctggacggcttcacgccgatcaccgcggtggacgaggcgcttcacttcaatccgcacacccaacagttcgagccggactga

SEQ ID NO: 328387 - DNA, 408 bp, Pseudomonas aeruginosa
atgggctggtatttctctccccaatcgcggtctgaactgatcgcggaactgatcgcaccacagcagaccgagcgcgtcagcgcgaaggttatcgctcacgcattgcgcggcaacgtgctgtggtccgtggtcgaactgaccgccaaggtcgaaggtgtgcatcgtgatctcgcgccgggccagtccctgcgctacatccgctgcgatctgctggaacgcagcggcaaccagtggggctacaagccgctggaagagtccatgcatccgtactattactcgtgcccgctgtcctatctggacctcgcaccggagcagtccgccgactggcgtgcaggcgttcgcgcctaccacgcccggcggcgcacacccacggctgtcacggcacccgccgcggcgctgttggcctga

SEQ ID NO: 328388 - DNA, 342 bp, Pseudomonas aeruginosa
atgttcaccatcgcttgcgataccccgcgttcaacgttggatgaacccgcgtggcgggaactctgcaaggcggccgccgcacacgcccagcgcggttgcggcttgtcctacgaccactacgtgacgctcttcagttcggcgatcgacgcacaggccaatcgtttgccggatgagcaacgtgctcaggctctcgaaatcgcggcccaggaatgggactacgcaacacctgccgaacggcaggaaacccaggactggaatgcggagcatggctattgctcgcatgggatcgagttcggctgctgcccggccggttgtgatcgcgacgatgacgactgggactaa

SEQ ID NO: 328389 - DNA, 690 bp, Pseudomonas aeruginosa
atggcagccacaccggcacccgagaaatcggtcgcgcccatcgtcgtccccggccagctcacgctgcgcaccattcgcggcaagaacggcccgttcacggtcggccgcctcgcgacgcacctcggtacgttcgaggtcaaagacccggaactggagcagtaccccgaagggaaatacgacggggagtttgtgatccgctacatctttccgaagtcctacccggtcgggggcggcatgcggttcgagatccgcgccagcctcgacgggatgacgctcaatggcatcgacaaactgagccgcgacgaagcccgcagcttcgccacccaggacgtcgatccgctcgatgaagagcaaggggcgcagcctgcggcaacgccggccaagcccgccaaggcatccaggcctgccaagcccgcacccgtgcaggcgtccgcggacccgctggtcgataccacgcccttcggcgtggatgcgccaccgcctgctgcggccgctgcccccggcagcaccgaagacggtgacgccgcgctgttcggcctgctgtggccgctgggcgagtccgtgaaactggattcgaccatcgaccgccgcaccctgcgcgcgcagatcgcccgcctgggcgagctgggctacgcgctggacttcaagacgcaggagtggagccgccaggccgaaccacaagctgcgtga

SEQ ID NO: 328390 - DNA, 930 bp, Pseudomonas aeruginosa
atgaacaccacgtccaacgagaaatcgtatttcgaccttcacacctcgggcatcggctacatccagcgtgtccgtgaagtgcccgtccggggcggccgccgtgcgcagcctttcctggcttgcaccatcgccgcgctggtcggccccgcccgggaccccagctaccgctacttcgacgtcaaggtctcgggagccgaggccaagaagctcgttcagcgctacatcggcgttgacgatcccaagcagcgcccgctggtgcgctttcgcctcggtgacctgtggggcgatgcgtacatccgcgacaagggtgagcagaagggtcaggccgccgcgtccctcaaggcgcgactgctcaaggccgaactgatcgaccgggccgaactggcttcgatcgagcagcacgagctgatcacccgcggcatcggctatctcaatcgtgtgaaggacgtcaccccgaaggctggcgactcgttcctctcttgcacggtcgcagcactggccgggcctgtcgatgaaccggagtatcggtacttcgacatcatcgtcgccaccccggaagccgagcatctggctcgccggtgcgtccaggccatcgagggggaccgtaaggtcctgatcgccttccgtctgaacgacatgaagatcgatccgtacatccgcaccaagggcgagcacgccggggaaccggccgcaagcctggaatcgacgctggtccacatcggtctcatcaagatcgacggtacccaggtctatccgacgagccaggcgcaagccgaggcgtcgccggccgaagacgcatccgcgtccgaagccgacgaagccatcgacactgctgccgaccccgctgcagaccagcctgccgagcccgccgagcgcgagcccgaggcgcaagtcgaggagcaggagccggcattggctgcttcgttctga

SEQ ID NO: 328391 - DNA, 510 bp, Pseudomonas aeruginosa
atggataagacgccgacctcgccgaggctgcatctgctgccggtgtcgctccgcacggccaatgccttcgtgctggcacaccatcgccaccaccacccggttcagggtgcgaagttcgccctggccgtcacgctggccgacagcgacctgatccgcggcgtggccatcgtcggccgtccggtcgcgcggcacctggacgatggctggacgctggaagtcacgcggctgtgcaccgacggcgcacccaacgcctgcagcaagctttaccgcgcggcctggaaggtggcaagggcgctgggctacatccgcctgatcacctacaccttgtccgacgaaggtggcgccagcctgcgcgccgccggctggcggctggtcggcgcgcgcggcggcggcgcctggagccgtcccggccggccgcgcgccgatacccccgagcacctgcgcggccctaagtgcctgtggcaggcgcccggcggcgaggacaaagggaagcgcccggatgccgattga

SEQ ID NO: 328392 - DNA, 843 bp, Pseudomonas aeruginosa
atgcacgacccgttcaagatcagtcagcccacctgcatcagcttttcggggggacgcaccagcgcctacctgctctggcgcgtgctgcaggccaacggcggcctccctgccgacacggtggtctgcttcgccaacaccggcaaggaagtggaagcaaccctgcgcttcgtgcgcgactgcgccgagcactggcaggtgccgatccactggctggaatacctgcccacggagcctggcttcgcgctggtcgatttcgaccaagccagccgtcagggcgggccattcgaggcgctgatccgtaagcgccagtacctgcccaatcccgtcgctcgcggctgcacgaccagcctgaagatacgccccatgcaccgctatctgcggcatctgggctggacggactgggaccagatgatcggcatccgcgccgacgagcagcggcgtgtatcaaagatccgcgcacgcgggcactccaccgaatcgacccacgagaccatgtgcatgccgctggcggacgccggcatcaccgtgcgcgatgtgggcgccttctggcaggtgcagccattcaacctggacctgctgacagtgaacgggcgcacgctcgaaggcaactgcgacctatgctttctgaagccgcgcgggcagcgcctggcgctcatcaaggcccggcccgaggcggcggtgtggtggattcgcatggagtccctgaacctggcgagcaagcccagcggcgccagattccgcgccgatggtcccagctacgccgacctggcgcgcttcgccgccgaccagggtgacctgttcgacgccgccgaggaatcgatcgcctgcttctgcggcgactga

SEQ ID NO: 328393 - DNA, 354 bp, Pseudomonas aeruginosa
atgtcactgcgattcaaaggcgccgacctgcgccccgtgctgaccgaagccatcgccaatcagtgccgcatcgtcctggtcaaggaccagggcgtgtacttcctcgccgagcgtggggagcgtcgcccggatggacgccagcaactgctcgcctacgcggtcggctgcaacccggacaccgacccgttcgatgactggtggcacctcgccggccgcgagctgggcggcgacgattttgcggagtatttcgacccgaaggacggcctgttcacgcgcctcctgcactcggcggacgatctcgtgctgtccgccaccgccacgcacctgtccttggccgtggtgcctcccgcctga

SEQ ID NO: 328394 - DNA, 825 bp, Pseudomonas aeruginosa
atggaccgttcccttatcaaatccatgatgccttcgctggtcgccggccatgtgccccgcaacgtgcggtcgttcaagtaccgtgtgttcgatgatcagccgctgtcctcaacgctgggcttcgccatcgatgcccaacccttcgacggcaaggtggtcgccgcgaccgacgatgccatcgtcgtcaagctcaagccttccgagttcgcggtgctcgatcccaacctggtgaccacggttcctgccgaaggcgccaaggtgcatgtccaaccctatgcccgtcgtcgcttcgacggactgcgcgcggacacgccggaggtcatcaccgagaagacttcggatggaacgccatacaccatcacgaggcacatcctcggctcggcgccggccaagctgcccattcccacgccgcagtgcatggagttgggccagctcatcgagcagttggaggagatgccggcccccgatcgcttccggcgcctcacccacatgctggtggatgccggtgcccgcgacttcacctgggtcgatcccacgccctccaagatcatcgagaccccgccggcgatcagcttcacggtctcgaccgcgaagttcgagggccgggtgacgatcctctacgaccgcggcggagacacctacgtggtggaactgcaccgtcagaacggtgaatcggtcgaactggtcgatcggcacgacgagatgtatttcgacatgctcggcgaagtgctggagcggctcatcgacgacgggcgctggcgccagatcgacgtgagcatcctcgacgcgaaggcggcccgtaagcgccaagccgtcccggcatga

SEQ ID NO: 328395 - DNA, 279 bp, Pseudomonas aeruginosa
atgttccccgacctcatcacacccgcatccgactttgagcaccagcttggagcctgcgtcaacgccatgagccaggacgatgccatcggccagatcctggtattcgagcgcatgagcggcatgctgcacatgcgccatatcgccagcgccgacctggtggacaccgacgtggatgactacgaaatggtcatcttcgacggtggcaacacaagcggggatacgtggaagcacgtgttctttccgcgtcagcgcgagcactacttcgtgtaccaagcctga

SEQ ID NO: 328396 - DNA, 738 bp, Pseudomonas aeruginosa
atgtcccagaatcccaatccctttctacgcggctactggaatctgaaaatcgtccgcacgctgtccatcagccacgaggacggaagcccgcatgtctggcgaaacatccacccgagccagcatcacctctccgacgaggcactggtttcttccccctgcatcgtcaccggcggcttcgcggtggtcaggactggcaccgaacctgtcggcgccgcactgatggccgaatgcgatgccgttgaaggcgtcagcggcgaaggcgtggtgggtgccgtggtgtacgcgatccacggcgacgacttcgacggccgccccgtccacgtcggcgacacttattcggccgaggccgcacgggaagtcgtgcagcggttgagcttcgagaccggctactacagccggtgctgggaagtcagcagcgcgcacatcagccatgaaaccggccagtacctggccaacctggcggacctcgcgacgccggaggcctttttgttcgttgcgttccgggttccctacagcccggcgatcggcgtcaagctggtctccacgccctggacggaccagcacctgcaggacgtcgaggggatcaccgccgagcagcttcggcaggagcaccgcagcaagggcatgccggacgacctggcacagatccttgcactggccggccaggccgacgtgcgcatcctcatcctcgatgccgacgcacccgtgttgccgggcctgccgctggccggcgaatag

SEQ ID NO: 328397 - DNA, 393 bp, Pseudomonas aeruginosa
atgaaccagctactgccacaggaagtcgtcgatcagatcgttcgggaagaacggcatttcagcgccgcgccccaagcctttttcgaggcatggaagcgtggtgtcgagatcgccggcccgcaatggtttggcgatggcacccgtgaaggtctgaaccaggccaagagcaagtgggatctgcgtcccgacatgctgcgcctcaacgacgccctcggcgtcctgagcagcggggaacgcatgtttctgtccgcgatggtcagcttctacaacgcgcgcgagggcggtgccatgctcaagcgctgccacttcaacgggttgtcggacttcgacggcctcgatctgcctcgtcgccaggtgatcgccaacctgctgctgaactacagcggttggtga

SEQ ID NO: 328398 - DNA, 222 bp, Pseudomonas aeruginosa
atgtcccagcaagcctctttcggccgattcggtcaattggccttgacctactgcggcaagttcctgccgctcgaagtcctgcacagcgccgccggccactacatcggcacgcgcgataccgaaggtcccgtctcgcgggaatctcgtgagtacttccgcagccatgccgcggctcaacgtgccctcgaaagaggcggctggtcccagctcgccattccctga

SEQ ID NO: 328399 - DNA, 558 bp, Pseudomonas aeruginosa
atggacaccatcacccgacaagaccgcatcacgctcaagaacctcaaggtcgcggatttcgcgagcgaggaaacgctgtgcttcaccgccaccgtcatgttcgacggcaggcccatcgccgaagcccgcaatgacggacacggcggctcgacgttcgtgcgcgcgttgcaaggccaggccgcgctgctggcccaagccgaggaatttgccaagagcctgccgccggcatcgctcgacgtcgagcgcgaggacgacgagccacttctcatcgacatgacgctcgacttcctcgtggaccagttggccgatgccatgcacgcagagcgcaagctgcgcaccgcgttcaaccgcgacatcggcaacaaggtgctgttcatcaaggacggccggctgctgttcctcaagggcatcaagctcaaggccattgccgaacgcgcggcatatttcgcaaagctgcgcagccgacaggaccagcccatcgtcatcctggccgagctgccagcggacgaggcattcgccatctggaagcagcatgtcctgggcgacaagccccgctga

SEQ ID NO: 328400 - DNA, 1611 bp, Pseudomonas aeruginosa
atgcacccgaaactttgcgcaccgccacgcaacacgccgctgctctacggcagcgtctgcagcggcatcgaggccgtgagcctcgcttggcaaccgctcggcctcgaagccgcgtggttcgccgagatcgagccgttcccgagcgccgtgctcgcccaccgttaccccctcgtgcccaacctgggcgacatgaccacgatcgcccgccaggtccgcgccggcaccgtgcccgcgccagacctcctggtcggcggcacgccgtgccagtcgttcagcgtggccggcgcccgccgtggcctggctgacccgcgcggcgccctgacccttgcctatgtggagcttgcaaatgccatcgaccaaacccgccgccaagaccgccgcccgccggcaacgctcgtctgggaaaacgtccccggcgtcctcagcgaccgcagcaacgccttcggacacttcctgggcgcactggccggcgaaagccgtgcgctcgaaccgccagggcaaaaatgggcgcacgcaggttgtgtgtctggaccccggcgccgcatcgcctggcgcttgctcgatgctcaatatttcggcgtcgcccaacggcgccgtcgcgtgtttcttgtggcaagtggtggaggtggcgtcgatcccgccgaggtactttttgagcgcccaggcctgcgcggggattcttcgccgggcttcgcgccgtggcaagacgctgccggcgctgctggatcgggcgctgcggcagcaggctggtactcgggatatgcaggactgaagcagccctacggcaaggccacggtgacgttcggattcggcgggggcaacaccgcaggacccatcgacgtcgcggcctgcctgaccgcggcgcccggcccgaagaacgacttcgaggtcgagaccttcgtggcgcagtccatcgcgggcagcatcagccacacgctcagcaccgccaacggcggcaagggctgcagcgaggacggcaccggcaagggtgtgccgatcattgccttcaccgcacagggctgcggggcggatgcgacgacgaaccatgcaccgacgctgcgtgccggcggacatcgcctcagccacgcgaacgccggcgtggtgccggccatcgcgttcgcgcagaactcgcgcggcgagctgcggctggaatccggccacggccagcttgccggggcgctctccacgggtggcggcaagccgggccaaggccggccgatggtgatcggcgtggcgctgcgcggtcgcaccgaaggcctggccgctgaactgggcgatggcgtctcgaccgcgctgcgcaccagcagcggcggtgccgacaagccccatgtgctggcaccggacttcgaggcacatttccgctacgactggaataaccccggtccgggcgactggtcgcagtggcgggtgcgtcggctgatgccggtcgaatgcgagcggcttcaaggcatgcccgacgactacacgctggtgccgtaccgcggcaggccctccgccgacgcgccgcgctacaaggcgatcggcaactccatggccgtgccgtgcgtcgcgtggctgggccagcggctggtgcagtgcctgcacaagacgggatcgagcgcttcggattga

SEQ ID NO: 328401 - DNA, 2022 bp, Pseudomonas aeruginosa
atgcggctgtttctgtgcgagaagccctcccagggcaaagacatcggccggattctcggcgccacgcagcgcggtgaaggctgcctcaacggctccggcgtcacggtcacctggtgcatcggccatctcgtcgaagcggcagcacccgaggtctatgacgcggcgctcaagcgctggtcgttggagcagttgcccatcatccctcagcagtggcgggtcgaggtcaaaccgcagaccgccacgcaattcaaggtcgtcaaaacgcttctggcgaaggcgacccatctcgtcattgccaccgatgccgaccgcgagggtgaactgatcgcccgcgagatcatcgacctgtgcggataccgcggccccatagcacgcctgtggctgtcggcgctcaacgatgcgtccatccgcaccgcgctcgccaagctgcggccctcggccgagacgctgccgatgtattactcggcgctggcgcgctcgcgcgccgactggctcgtcggcatgaacctcagccggctgttcaccgtgctcgggcggcaggccggctacgacggcgtgctgtcggtcgggcgtgtacagaccccgacgctcaaactcgtggtggaccgcgaccgagagatcgcggccttcgtgtccgtgccgtactgggccatcgacgtgtccctgtccgcaggcggtcagacgttcaccgcgcagtgggtggcacccgacgccagcaccgacgacgccggccgctgcctgcagcagcccgtcgcacagcaggccgcgcaacagatccgcgccgcgggcagtgcccaggtggtgtcggtcgagaccgagcgcgtgcgcgaaggcccgccgctgctgttcgacctgggcaccttgcaggaagtctgttccaagcagcttgggctggacgtgcaggaaaccttggagatcgcccaggctctgtacgagacgcacaaggccacgacgtacccgcgctcggattcgggctacctgcccgaaagcatgttcgccgaggtgcccacggtcctggacagcctgctcaagaccgatcccacgctggccccgatcatgggccagctcgaccgcgcccagcgctcgcgcgcctggaacgacagcaaggtgacggcgcaccacggcatcatcccgacgctcgaacccgcgaacctctccgccatgagcgagaaggagcaggcggtgtaccggctgatccgggcgcattacctggcccagttcctcccgcaccacgagttcgaccgcaccgtggcggacctctcctgcggccagcagaagctggtggccacgggcaagcaggtcgtcgtcaagggctggctcctggtgctggccgagccagaacgtgaaggcagcgccgacgaggacggcgatgccccgcgcagccaggtgctgcccgcattgcgcgacgggatggcatgtcaggtcgccggggccgacatcaaggccctcaagacgatgccgcccaagccctatacccagggcgaactggtcaaggcgatgaagggcgttgcgcgtttcgtgaccgacccgcgcctgaagcagaagctcaaggacacgacgggcatcggcaccgaggcgacccgggccaacatcatcagcgggctgatcgcccgcggctacatcgtgaagaagggacgctccatccgcgcatcggatgcggcgctcacgctgatagacgccgtgcccgcggcgattgccgaccccggcaccaccgccgtctgggaacaggcgctggacatgatcgaggccggacaactcaccctggatgtgttcatcggcaagcaggctgcatggatttcgcagttgatcgcgcagtacggcagcacgtccctgtccatcaaggtgccccaaggaccggcttgtccgcagtgtggcgcgcccacgcgccaacgcaccggcaagagcggcccgttctggtcgtgcagtcgctatcccgactgcaaaggcacgctgccggtcgaaaccggcacgtccaagcgtggtgcctcgcgcccacgcaagagcggccgcaaaggctcctga

SEQ ID NO: 328402 - DNA, 453 bp, Pseudomonas aeruginosa
atgagcacgcatttttcgggcgaaggcaacatcggctcgccccccgagtaccgggagttccccaacggcaacgacgaaccgcggcgcttgttgcggctgaacgtgtatttcgacaacctcgttcccaccaagggcggcgactatgaggatcgcggcggcttctgggcgccggtggaaatctggcaccgcgacgccgcgcactggaaggacctctaccagaagggcatgcgcgtgctggtcgtcggccgcatggagcgcgaaccctggaccgacaacgaggatcagccacgtgagacttggcagatcaacgcgcgcagcgtcggcatcctgccgttccgcatcgagtccgtcgtcctgagccccaaatcgcaggagaccgcacaggacgcgcagcccaagccccaggccgcccaggaaccggctgcgccgaaggagcccaagcgcaggaagtga

SEQ ID NO: 328403 - DNA, 528 bp, Pseudomonas aeruginosa
atgagcgatctgaaccagccgacccgctacttccggggcctgcaacagggagccttcatgcgcctggaacacgcggcctctctaaaaggccttttaaagccttttaaaggtaaaggggacttggaggcctgggccggccagtgcttcgccatgcgcgacgagttgatcggcttggcgcagcgacaagtgctgcaacaggccagtgggcatcccttccacctgctgcccgtggaactggcccagcagaccactggcgcgggaacgacgttcctgcgctggcgcaggcacgaccgctcggccatgggcgtggccctgtggcaggagctgatggcgagcaccagcacgccggtcaacctgctggccgacctgcacgcgatcgagctgcagcgcatcacgctgaacatgcagatcagcctgttgcacaccctgggcaggcaggcgcaggagtgcgccagcaaggccgccgaggcggaagacgcctacctgcgccggctcacgtcctttcccgccgcaatgcgcgatcggtga

SEQ ID NO: 328404 - DNA, 2781 bp, Pseudomonas aeruginosa
atgacgccagaatcaaaagcacgccagcagattgaccaaaagctcgagcaggctggctggatcgtccaggacatgaagcagctcaatttgggtgcggcgcgtggtgtggctgtgcgggagtttcacactgactccgggccggcagattacatgctttttgtggaccgggccccagtgggggtaatcgaagctaaaaaagacagcgcgggcgaaaacctcaccgtcaccgaaagccaaaccgagcgctacgccaacgccacactcaaacatcgtaaggacaacatcccgctgcgtttcttgtttgaggccaccggccagattatccgctttaccgatggcgcagatccggtgccgcgttcgcgcgaaattttccacttcttcaagccggaaacgctggccgcctggctggcgcagcctgaaaccctccgtcgccgtctggccgaacaaatgccagcgctgccagaaagaaatctacgcgactgccaaatcagcgccgttagcgggctggaaaaatcactggctttgaacaaaccccgcgccttggtgcatatggccaccggcgcgggcaaaaccttcaccgccatcacctcggtctatcgcttactcaagttcggtggtgctaagcgcatcctatttctggtcgatacccgcaatctcggcaagcaggcccatcaggaattcatggcctacacgccaccggacgatggccgcaagttcactgagttgtacaacgtgcagcggttggcctcgcccaatatcgatccgcattcgcaggtgtgcatcagcaccatccagcgcatgtactcgattctgagtggtgagccgattgatgagtctgccgaggatgtctcgctcaacgaagtacagcaaaccgccaagcaggaaaaactggtccgctacaacccggtcgtgccggtggaaacgttcgacttcatcatcatcgatgaatgccaccgtagcatctacaacctgtggaagcaggtgctcgattacttcgatgccagcttgatcggcctcaccgccacacctgacaaacgcaccttcggcttcttcaacgaaaacatcgtcgccgaatacacctacgagcagtccgtggcggatggtgtcaacgtcggctacgacgtgtttgagatcgaaaccgaaatcacccagaagggcgcggagctgaaggccaaagaatgggtggaccatcgtgaccgcgccacccgtaaaaagcgctggggcgaaaccgaagaagacaccacctacaccggtaaggagctggataagtcggtggtgaacgtgagccagatccgccaggtgatccaggcgatgaaaacagcggttgagacgcagattttccctgcgcgcaaagaaacacccaaaaccctgatctttgccaagaccgatagccatgccgacgacatcatcaacatcgtccgtgaggtctacggccacggcaacgccttctgcaagaaggtcacctaccgcgcggaagaagacgccgacagcatcctcagcagctttcgtaacgattacaacccacgtattgccgtcactgtggacatgattgccaccggcacagatgtgaagccgcttgaggtgctgctatttatgcgtgacgtgcgcagcaagggttactacgagcagatgaagggtcgtggggtgcgcagcctcgatggcgaaagcctgaagcgtgtcagcaacagcgctgatggtgccaagacccgcttcgtcctaatcgacgccgtaggcgtagaaaaatcactcaagactgaaagtcgcccgttagaaaagaagccaggtatggcgctcaaggacctgctgcaaggcgtggccatgggtagtcgcgacgacgacaccgtgctctcgctcgccaaccgacttgtgcgactggccaagcagctggacgacaaagcacaggcgcgcatcgagaaggtcagcggtggcatttcaataggtgaactcggcaaaggtctgctcgccgcgctggacccggacgctatcgtgcaagctgcgctagccacggccgaggccaaaggcatcacgcgctctgaggacaccttgctgcccgaagagattgaagccgcccgagctgagcgcgttgctgctgcctgtgcccccttcgacaaacctgaactgcgtgacgagttagaagtcgcccgccgcgagcgcgagcagctcatcgaccatatcaacctcgatcaggtcaccttcagcgggtttagtgagcaggccgaaacgcaggccaaggcggtaattaagatctttgcggattacatagcggagcacaaagacgaaatcgccgcgctggattttttctaccagcaaccctaccagcgtcgcgcacttaccttcgacatgctcgaagagctgcacgtacacctgagcaaaccgccattgatgctcaccactgagcggctgtggagcgcctatgcccgtgtgcaggcctcggccgtaaaaggcgccgaccgcaaacgccagctcaccgatctggtggcactggtgcgctttgcgctggggctggacactgagctcaaaccctttgccgacgaagtggacaaacgctttcaggcttggatcttccgtcacaacgcccaacgcggcaccgcctttactcccgaacaaaccgactggctacggctgatgaaagaccacatcgccagcagttgcagcatcagccgcgacgactttgattacacggatttggcggacaaggggggcctgcagaaggcctggggcttgtttggcaaggaactggatacgctgatgaatgaaatgaacgaggagttggtggcgtga

SEQ ID NO: 328405 - DNA, 1782 bp, Pseudomonas aeruginosa
gtgacagatatacctaacggctggatgaaagttgcgctagatgatgtctgtcaaatcatccggggaattacctttccgaccaccgaaaaacgattccagcccggcaccggcctgattgcctgccttcgcactgcgaatgttcaagcaacggtggattgggacgacctttggtttgtgcctcggcagtacataaagaatgacgagcagttagtatcgctggatgacatcctgatttcgactgcgaacagttatgagctcgttggaaaagtttctcgcgttacccatacgaaatttgcttcaacgctgggcgcatttatctctttgctgcgcgcatacaagggcgttgatgctggatttctctactaccagatgtcgtcggagagtgtgcagcgctctattcgagagatgtcatccacaactacaaatatatccaatgtctctggagcaaagctcaagacactcggattaagccttgcgccttcggccgagcaaacccgcatcgtcgccaaactcgaagagctcctctccaacctcgatgccggcgtgaccgaactcaaggccgcgcagaagaaactggcacaatatcgccaatcgcttctgaaagaagctgtggaaggtgcgctcaccgccgagtggcgtgcccgacatactcccaccgaaaccgccgcccaattgttagagcgcatcctcaccgaacgccgcgcccgctgggaagccaagcaactggccaagtttgcaggacaaggcaaaactccacctaaggactggcagaagaagtaccccgaacccgtgcagcctgacaccaccgacttaccggatttgccggagggctggatctgggcgagcctcgacatgcttggagagattgcatcaggtgtggccaagggcactaaacgtgatgcagcagtcgaagttcatgaagtgccgtatttgagggtcgcgaatgttcagcgcggttttctcgacctctcggaggtcaaaaagattttggcaacccaacgcgatatcgccgaattaacgcttcaggctggggatgttctcttcaacgaaggcggtgatcgagacaaactaggtcgtggctgggtttggcgcaatgaggtggaaaactgcatccatcaaaaccatgtatttcggatgcggccattccttccggaagtgctgccagagctgatttcgcaccatggcaatacctttgggaaagcttggttccagagtgcgggcaagcaaacgaccaacctagcttcaatcaatatgaccatgcttcgcaggttcccagttcccctcgggcctgcggatgagcagcatgagttgctctgccagctagatgtgctgatcgaacaactggaccgccaggaaaaagcggtcgagcttggccttaaacagtccgctgcccaacgccaaaacatcctccgcgccgccttcgccgggcagttagtgccgcaagacccgaacgacgaacccgctagcgtgctaatggaacgtatccacgctgaacgagctgaacgcgatcggcaacccaaggtgcgcaagactaaacaacagaaggagatcaccgccgtggtgagcaaattgatcgacgtgctcgctgaggagggcgactggatcccggcgcaagaggccttccgccgatgcggcgtggccgatggcgccctgaccgagcgcatcgaagagctttatgccgagctgcgcaagctggataaggccggccgcttggcggtggaggccgtgatcgatgcgcagggccgcaagctgcatgacaagctcaaactactggcgggctaa

SEQ ID NO: 328406 - DNA, 1731 bp, Pseudomonas aeruginosa
atgcgtctggacaagctcaccatcggcagccccaagaaaagccgtacccaccagtttaagaacctgaaaaacgtcaccatagacttcgagcaggatcactgggtaacggttgtgatcggctggaacggcaccggcaagtctaatgtgctggaggcgctggccattatcttccgtgatctgatcaccaaggaacggaagcctgcctttgccttccagctagcctatcgcatgggcgctgacgagagtttgcggcacattcacattgatgcggatcctgatcgcaagaaggagcctttcacgattcacgttgcgacagacgctcaggcccgcggcgaaggaaccctgacctcactcatcgaagatgaaaaagcggtatcagccctgcgtggcaaggctatcaagctcacctcattcttgaatgcgggcggcgagtacctgccacgctacgtgttcagctactactcaggtgagagcctgcgcatgcacgaggtatttcgcccttacctcgaaaactacgacagcaaattacgcaacggcgaagaccccggcctgaagcggctgttctatgccatgccggtgcatagtcagttcgtattactggccttcttgattcaacagtccgatgtggtgcagacattccttgatgaacacctcgggcttgaccccgacgaaggtattgaatcggtgctgtttgttttgcggcaaccgccgtggaaatccaaagcagcggatggtgacccgcgcttctggaatgcgcgaggtgtggtgcgagacttcttgtctcgcctatacaacatcgctttggcacccatcgaggtcagtcgccgcgtctcgacttcgatctggaacaaggaaacgcttcagttcaaatacctttacgtgaaagacatcgcagccttgcggcgcttggtcggcaaccaggcaccagcgcagttttttcgtgatctggagagcacctacgtctcggaattgattgaggaggtgcgcatccgggtacgcctcaagaagaacgacggcagcgttaccttccgcgagctcagcgagggtgagcagcagttgctaacggtgctgggcctgctgcgctttactgctgaagatgaaagcctgttcttgttggacgagccagatacgcatctgaatccgcgatggagcgtggattacatctcctatctaaaacagttcattgccagcggcacaaagcaggaagaaaccagccatattctgctcaccacccacaacccgctggccgtcgctgaactggaccgtgaacaggtgcagattctgcggatgaccaagcaggatgggcagcgtcagatcgtggcttgctatccggaaatggcgccgcgaggtatgggctatgcggcgattgtcaccagcgacatgttcggcatcgcttcatcgttggatcaaccaacacaagagctgttggaggcgcagcgtgcatatgctgccaaggagcagctaactccagatgaactgcgcgagttagatcgcatcaatgctcaactggatcggcttgggttccgcttcttccaccccgatgacgagtactcgcgttacctgcggttgcgcaatgacttacttgtccagaaatttggagcaatgcagcccacggagctcgcatcgcatgtggtgcagatgtctcgggctgggcgtgaggcacttgccaaacagcttatcgctgagctgctagcaaatgagtccaatttgccaaaagggacggcatcatga

SEQ ID NO: 328407 - DNA, 813 bp, Pseudomonas aeruginosa
atgaggtatgtcgatcgcttaaagcttgtgaagccaactggctggagtcaacgagctcataccgccacacaggccgtagcaaatggtgaggatccgaatgaccatagccaggtttggcgtgacctcaaggacggacttgctgcgcttctgcacgacaaatgttggtactgcgaaacgcctatggaccgatctgataacgctgtcgatcactttcggccaaagaaccgtgttgcagatgcagcaaacccgcacgcgggctatcgctggctggcctttgacgagagcaactttcggtatgcctgtacctattgcaacagccgacgcatagatcaggagggaggaaccgcgggcggaaaggcggatcgttttccattggtcaatgaagcccagcgtgtgtacgtggctgggtcattggtggcggagcaaccaatgctgctcgatccctgtgaaatttctgactggcgcctactcggctgtcaccaagagaatggccaaccctgcgccactggcactgatcctgtctccaagagacgggcagaagaatccatcgagatttaccacttgcattacgagccgacatgcaagcgacgccataccgcagccgttcagttgatggcggatgttgacgaggggaaacgcttgtttgatttggccacccaagatccaaatcgtgagggtgacttcaaggtagtagcagcgcgactgcggcgtgcaattgatcgtgattcgccctacagcggcgatatgcattttcttctgcgggggcagcgaagtgacgcccatccgtggatacaagagctcttagaggcctga

SEQ ID NO: 328408 - DNA, 1521 bp, Pseudomonas aeruginosa
atgaacacaagcacccttgtccagaaagtctggaacttctgccacaccctacgcgatgatggtgtgggctatggtgattatctcgaacagctcacctatttgctgttcttgaaactcgcccacgagtacgcgcaggaaccttacaaccgcgatacccatatccctgagggctatgattggaccagcctaactgccaaggtgggagaacccctggagaggcactatttccgaacgctcaataaacttggcaaagaagacggaatgcttggcgccatcttcttcaaggcacaaaacaagatccaggatccggccaagctttcgcgcctggtgcaattaattgatgccgaaagttggatcagtctgggcgccgataccaagggggacctgtacgagggactgttgcagaaaaatgccgaagacaccaagagtggtgccggacagtattttacaccgcgagcaattatccaggccatggttgcatgtatgcagccgcaaccgatgaaaaccattgccgatcctgcttgtggaacgggaggcttcttcctggtcgcgaacgaatggctttccggtactggtgaatggcttaaggataacgccagttggttaaagcgcgatttacacaaacttaacagtaaacaagccaaattcttgcgagaggaaaccttccacggcaatgagatcgtacctaacacgcgtcgcatgtgcttgatgaacctgtttcttcacaacatcggcgagttggacggagagccttcagtcgagcgttctgatgccctgatttccgagcctaagctcaaggtggattacgtgctggccaacccgcccttcggcaagaagagcagcatgaccatcaccaatgaagagggtgaggaggacaaggaagcgctgacctacgagcggcaggatttctgggaaactacgtcgaacaagcagcttaactttgtgcaacacatcgtcagcatgctgaaggtggacggtaaagcggctgtggtgttgccagacaacgttctgtttgaagggggggctggcgaaaaaattcgtcgcaagctgctggagaactgcgatgtgcacaccatcttgcgcctgcccaccggcatcttctacgcccagggcgtgaaggctaatgtggtgtttttcgacgctaagcccaaggacggaaagatccacaccaagggcatctggttctacgatttgcgcaccaacaagcacttcaccctgaagacgcgcacgctcaagctggacgatttgcaggatttcatcacctgctacaacccggaaaatcgtcacgagcgagtggcgaccgatcggttcaagttcttcagctacgaagaactaatggcgcgcgacaaggccagtctcgacatcttctggctcaaggacgacagcctggacaatctcgacgatctgccgccaccggatgttctccagcaggagatcattgagcatctcgaagcggcactgcttgcttttcgagaggtttctttgagtctacctcggtcagaattgattgatgaagtttga

SEQ ID NO: 328409 - DNA, 993 bp, Pseudomonas aeruginosa
atgagtcgtatgtggatggtgcgtggtgagtcaggaagcctttacgatgcttttcgcgagcgtgaagtggcggcagtcggctggagtcagttagcacctcatgcaaagctcggcgttgggcgtaaagagctcactgccatgtatcaagcacttgagccgcagctcaagaagggctctgtggtcgcaggcgcttcgcaagtgtggcgcttcgtcaacgaagtcgcggtcggtgattgggttgtgacctactcgccagctaaccgcttgtatcttgtcggtaaggtagtcggtcaggcggagcatcatccggaatgggcagagcaaggcatggctctggtgcgtaaggttcagtggcagcaacaagagctgccccgcgataacttgggtaccagcaccaagaatagcttaggttcgactttgaccttgttcgaagtaccttccgatgccgttgctgaagtgtttgaggcgttgaaaggcaagccagtaacgccgaaggaagatgaggccgaggaaagcattgctgacccgctggcagatgttgaggctcaggcactagagcgcatcaaggatcgtgtaagcgaacttgattgggacgacatgcagcagctcgtagcaggaattcttcgcgctatgggctacaagacccaagtctcgccacctggttctgatcgaggcaaggacattgtcgcctcacctgacggcttcggcttcgagcacccacgtatcgtcgtggaggttaagcaccgtaaagggcagatgggcagccaagatatccgcagttttctgggcgggcggcataaagatgatcggggcctctatgtaagcacggggggctttagcaaagatgcccagtacgaggctgaccgggcctctattcctctggcgatgtggacattggatcacgtggtgcgcgcgctcattgagcattacgacgcaaccgacgctgagaccaagcgcatcgtgcctttgaagcgactatattggcccgcgtga

SEQ ID NO: 328410 - DNA, 195 bp, Pseudomonas aeruginosa
atgttcgatgacattgtgcccaaggagaaagccagctccatcggacagcgcatcgacttcagcaagaatctcagggaggtttttcgagaccttacgatcaagctcgacaccaaggtcaggccgcgctgccccgaccttaaagatacgatctggatgcccctcctttccgggagcgacctccaggtcgagaactaa

SEQ ID NO: 328411 - DNA, 4188 bp, Pseudomonas aeruginosa
atgcagggcagacatgtgctcgcgatcctggcaaccggtggtggtaaatcgctgtgttatcaactgccggcgctgaatcgttttcatcgcaacggcagcctgaccatcatcatttcgcctctgcagtcgctgatgaaggatcaggttgacgggcttcttgagcgaaatgtgcagtgtgctgcgacgctcaatggcctgctgaccatgcctgagcgtgcggatgtgctggagaaggtccagatgggcgatgtcggcattctgctggtatctcctgagcagttccgcaacaaggctttccggcgtgcgatacgccagcgccagatcggcgcttggattttcgatgaggcccactgcttgtcgaagtggggcaacgatttccgcccggattacatgtacgcctcgcgcttcattcgcgagcacacaggcaatcaacccctggcccccattggctgcttcactgcaacggctaagccggatgtgttggctgatatccgtgcgcatttcaaggaaggcctcgggattgagtttgatcagttcctggggactcatgagcggacgaatctcagctttgaagtgctgccctgcagtcgtggcgagaaatggcccagaacccatcaattgcttgaggatcacctcggcggccaggacggaggtgcggtcgtattcgttgcaagtcgcaagggcgctgaagaactttcggagtttctagtcgggcagggatggccgtgccgccatttccacgccgggattgaacccaatgacaagaaggatatccaggacgacttcaaggctgggcggctccgcatcatcgttgccaccaatgcctttggcatgggcgtcgacaagtccgatatccgcctggtagttcacgcagacattcctggttcgctggagaactaccttcaagaggcaggcagggcagggcgtgaccaggatgcagcacgctgtgtgctgctttatgactcgcaggatattgagacccagtttgggttgtgcgagcgctccaagctcagcctccgtgacatccaacaaattctccgcaagctgcgtttcgagtatgccaggcgtaagggcggcgagctggtcatcaccgccggcgagattctcatggatgagaccgtcgagacctcgttcgacgctgatgacagtgatgctgaaaccaaagtggtcactgcggttgcctggctggagcgggggcaatacctcaagcgagaggaaaacagtacacagatttttccggcgcgcctgagtctgagcgaagcggacgccgagcagcgtttgctcaaggccaatctgtcggagcggcgccgtgaagagttcggcgcaattctgaaatacctctaccaggccgacgccgatgagcgggttaatacggacaacctgatgtcgctcaccagcctgacttctgaggaagttgttagcaccctgaagcagatggaggagctgggcctactcgtcaacgacactcaactgaccgtattgctgcgccacggcgtggtggacgcctccattcagcgcctggatcagaccctggcattagagggaacgctattcgaggtactcagcgagctggcgccagatgctgagtatggtagttggcaggatctcaatctcgcggcactgacggcggggctcaaagccagactagagcacgaggatgtcatcccgctgcaagtgcttcgcctgctacgcagcctctctcaagatcgtgaaagcaacagccagccacgcagcagttttgagctcaagcaggtcaatcacgactacatcaagctgaaagttcaaggtaagtacagctggtcgcagattgaacgttttggtgaaaagcgccgaaccattgccagcaagctgcttcagttcttgataggaaagctggctccggcctccaagggcaaggatctgatggtgcagtccaccttcggtgaattggtcggcgtgatcgagtcggacttggaactctcccaggtcatccctccgaaccaacgccaaagagcaattgagcatgtgctgttgtatctgcacaaacaggaggtgttgacgctcaaccatggaatgactgtgatgcgtcgggcaatgaccattgaggtaaatgcggacaaaaagggcagttatctcaaagacgattatctgcgcctcgatgagcattacagcgagaagcgtatccaggtccatgtgatgcgtgagtatgccgaggtcgcgcttggcgccatggcgagtgcgctggagctggtgctgcactatttcacggactcaaaagatgcctttttgcagcgctatttctccggccgcgaggaggtgctcaaacatgccaccagtgaggagtcgtggaggtccattgtcgaggacctgagtactcagcaacgactcatcgtggttgatgacgacgacgtgaatcgcttggtgttggcagggccagggtctggaaaaacacgcgtaattgttcaccgtatcgcttacctgctacgtgtccgacgagtcccagccaatgccattgtggcgttgaccttcaatcggcacgcggccaatgaaatacgtaagcgcctcctgagcctggttggacctgatgcctatggtgtcagtgtcatgacctaccacagcatggctatgcgcctgacaggtactcgttttgagcgtagggatgttgtggacgaaggggctctgaaacaggtactggaggatgctgttgagcttttagagggtaagggaatcgccgatggggaggatgacctacgtgagcagttgttgcgtggctaccgctacatcctggtggatgaataccaagacatcgatgccctgcaataccgtttggtgagtgcgcttgccggtaggcagtccagtgaggaagggcgtttgtgcattttggcggtgggagacgatgatcagaatatctacgcctggcgcgacaccaacaaccgctacatcgagcgctttcgcgaggattactccgccgctaccagttaccttgtcgagaactatcgctcgactcaacgcatcattgccgcagcaaatcagctggtcggcaacaaccctgggcgcctgaaagcgtcctatccgatccgaatcaaccgtgagcgccagtcagactctctcggtggtcagtggcaggcgcttgatccaggtcgatctggacgggttacacgattggcaattgaccccagcgatagagctgtcggcaacctccaggcacaggccgctatagaggagctcaagcgactgctggcgctggaggagggcggctggagtgggtgcgccattcttgcccgcatccatcagtacctctggccagtccaggcgctttgcgagcttgccggagttccatattttctggcctcagataaagacagtgcgctgcccatcactcggcagcgtgatttcgtggcggttgttgatcagcttcgagatctcaatgagacgctttcggctgctaaggcttggcagcacgtgtctgcgggagtgggtgagagctggtgtagctttttccaggaggctttcacccaattgcaggtcgagctgggtgagtgccagctcaacagtgctgcaatagtagactggctctatgactacgctcgggagatgcggcagcaggccaagagtggcctgtatctaggcactgtgcattcagcgaaaggcctagagttcaggcatgtcgttctgcttgatggtggatggaatgtacagactgaggggcttaacgatgagcgccggttgtactacgtgggcatgacgcgcgcagagcagacgctgacgctgtgtgagttcagtgcagcgaatcctttcagtgggagtttgtcggccgacatcgtgcatcagaccttcgccggcgattacaactcagctttggagcggcgttatttgcagctcagtttgaaggacatcgacattggctttgccggacgtagctctgtaacaaaccccatccatgaggcactgaggtgcttggagccgggagcggagctgaagcttgaacagcaaggcgagcgctacctaatacgggacggtcaggggcgagttgtcgggcggacttctcagtcctttaagcgggatcttgaggttgagcgatgcgaagttgcgggtgtggtagttcggttcctggaggacagcgaggagcaatatcggtctctgcagaaatgcgagcgctgggcgatcgttgtcccaaggatttgtggagtgccgctgcccgccttgtag

SEQ ID NO: 328412 - DNA, 189 bp, Pseudomonas aeruginosa
gtgttccagagcttctgggatcaacagagcggcaagattgacgaaagcacctggaaaacccgctttgccagcggcaagcgagccgctcaattggccctcgccagcggcaacacgccggcgttactcggcgtgctgttcaaccgcctctacaccctgcgcaaccagcttatccacggtggcgcgacctag

SEQ ID NO: 328413 - DNA, 1704 bp, Pseudomonas aeruginosa
atggaaaacaccctcgacaccttcaaggcccagcaggcgcgcgcattggatctgctcggaaagctgcaacgcttcctcggacagggagtggaggctggcgtttccattgacccggccctgagcggcaagctgcaaaatgccatcgacagcgtagctggcgaaagactcaaggtcgccctgattggcggtttctccgaaggcaagacctcgatcgcggcggcgtggatggagaggctggacaaatccagcatgaagatcagccaccaggaatcctccaacgaggtgaaagtctacgaagtcggcgaagacttcgtgctaatcgacactcccgggctgttcggtttcaaggaacaggaaaatgctgaaactcacaccatcgagaaatacaaggacatcaccaagaagtatgtgagcgaagctcatcttgtgctttatgtgatgaactcgaccaaccccatcaaggaaagccacaaggaagacctcacctggctgttccgcaccctggacctgttgccgcgcaccgtttttgtcctcagtcgcttcgacgaagttgccgacgtcgaggacgagcaggactaccaggccaacctgcaggtgaagcaaaacaacgtgacaggtcgccttcgtgaactggtcgggctgaacgatcaggaagcggcggagctgtccatcgtcgccgtggcggccaaccccttcgatctgggggtagatcactggctggccaatctcgaacagttcaaggcgctatcgcacatcgccacgctgcaatcggccaccactggaaaaatccggcaaaacggtggcagcgccgcgctggccaacgaaatgcgtgccagcgtgatccgtgacgtgctcaaccaccagctgccggtcgccatcgaaaacgaccagaaggtttccgaggaagtcggaaagctcgacgagctcaatgctcgtctgaccaaacagctggcagcgactgggcagcaaatcgaagacgcacgcatcaacctgcgcgagttcgccacacgctatttctccgatctgattcttcaggccaagggttgcagcctggaaaccttcggagacttcttcgaacgagaggtcggtgctgaaggcattgtcctggccacgcgcctccaaaatgaattcagccgccagacccagtcgatcacgctcgaggtcgaaaagatgcaggtcggcttcgacaacgaggtcaaccacttcaacaccactgtctcggcgctgggcaagcagggcatcaaccacctgctcaaaggcaacctgatcaacaacaccacggtactggccgcacgcgatggcatcactacgattgccaagacggtaggcatggatattggcaagtatctgaagttcaaaccctggggcgcagtgaagttcgccaaaggcgccaacggggcactggccgctctcggcgtggccctcgaagcctgggatagctgggaacagtacaagcgcgaagaggcattcaaaaaggctattgcagaaatggtcgacaacttcgaacagcagcgtcaggactttctcaacctcgtgaactccgagcgcttcaaggaagagttcttccccgactacctgctgctcaatagccgccgacaagaactgcaaagcagtctggatgaaggccgcggacgtcagcagcgcttccaggcatggcgagccgaagcagaaagcatcgacgcagaattcaagacactggactga

SEQ ID NO: 328414 - DNA, 3240 bp, Pseudomonas aeruginosa
atgcctcaatccttcagcttccagacttccccgggcgccggcctcgacgcgacagaagccaatatcttcattcacggctacagcgccgggcatagcgacgaggataaaaagctcctgctcgacaaaattcccggccaactcaggaactacaccaacatcttcgcgttctggccctcgaatcactaccttcatttcgacaagtcttcgcttttggcacttggcgcagcgggtctgactttggtgacaggaggtactggggcccccctcgcttattggggcctggcgagctctttcgccaaggaccggaggagcaactttactgaggcccgctcgcgggcggaaagaatgggtgcagtgctacttgaacaattgagcgagtacctgcgccgcgaccacccacaggttaaaactatcaacctgatcggccactcgctcggaggtcgagtggtcatcagcagcctgagaaccttcacaaagcggcagcagctagcgattaacgatgtgctgctgatggccgccgcagtcgaagtaacagccgtcgaagcgcagcaaatgcgcgggctgctccagggccgcctgatcaatgcctattccaaggcagacaagaccctgctgttgaactggggggaaacctgcctagggcgtaacgaggtcgagcatttcgagagcattgagatgaacgactttggccacaccgattactgggagcgactacccgaggtgttggccgaaacaggcttcaaagcgtccaagcccagctcgccagagcctgctcaagcccccgctgacgtattcacgccagcaccaccgcccgaaagaaccgtcgaagaacaagacatgacacttgaactgaacagcccaggcgacatttaccagagaatcagtgacgaactggcacgcatcatagacaaactgcgccaccccaccgccgacgaaaccctggacaaggcgcaaaaggaagcacacacgctactcgctgagcaccaggcagcgctaagcaaacagcttgcagatttggaacggaatgctgagtggaacacgttcaccattgccttctacggagaaaccggcgcgggcaagtcgaccctcatcgagaccttgcgcattctgctccaagagcccgacaagctggccagccagcaagcgttccgcgaactccgcgacaagcatggtctgagtgaagagaatctgcagcggctgcaacaggccatctcacaaactgaaactcgactcggcgaactggcgcagcagttgagtgccacgctgcaacgatacgaacaaccactcagggaggcccatgccgccctcgaccaggccaatgcccgatctggcgagctggcgcactcactgggtagaacgctccagcagcacgagcaactacaccatgacgcccttgaggccgtctcccgccagcaaaccctcctcgccgagcgcatacgcaccgcttctctctggcagaaactattgaatctgttcagaaaaatgccggaagagatcgaactgaatcaggccactgccaagctgtcagcggccacggcgacacgcgacagtacctccgcgaccctggacgccgaacaacagcgggccgagcaggagcggcttgtcctggagcggcaattgggcgaaatcgtgatggcacgggacagcgccaatgcagcgcttgtcgcgcaacaggcagaggtgacgcaacatcagcagctcctgacgaaacagcgtctggaaaatgaaagtcagctggcgcaactgctggctgaactggagaggcaagctgacggtggaatcatcggcgacggcagagccgacttcacccgtcaaacacagcgttatgacctcgagctgaacggctaccccttcgccctgttggacgtgcccggtatcgaaggtaaggaaggcctggtactcagcgagattgaacgtgccgtccagaccgcacacgcggtgttctatgtcaccaatcagcccgcgccgccgcaaaccggcgatgaacagcgtcaaggcacgctggagaagatcaagcaacatctgggagcgcaaaccgaggtgtggacaatcttcaacaagaagatcaacaaccccaagcactcgctggctggccgaccgctaacctcggatgacgagaacaccagcctcgccgggctgaacgaaaaaatgcgcgagcagcttggcaaccactaccgcgatgttttcccgctctccgcacgtcctgcgttcctggtatcgaccgatcatttcgtcccggactcgaagaacgccaaggatcgtagcaagagcctcgcggatttcagctccgacgaattgctggaaaaatccggaatgcgtgattttctaaagcagctgggcgagcagttgatccacgatggaaaagccaagatcactcgggccaacttcaacaaagccaagaagacgctcaaccaggccagcaccaccctcgtgaatgttcaacgaaactttgccgagttatcggaaaaactccaccaggacggagacagtgccaagagccagttgaacagtagcttcaaagcactgaaacagcgtctggagtcctgcggagaaacgctgatcgacgatttcgccagcaaagtacgtaagcagatgtatacgcttattgagagcgatatcagcaacgacgagttcaaagatgccctccagagcaaaattgacagccagcaaaaacaactgagcaaacagctcccagaaaccatgggtaaagaaatcgagcgctttcagaaggatgtcgaagacattctgaatcgcttcgaaaagcaggcccgtgagctgaacgctatttacgccaagctcaacagcacccagttgaacggaaaattcaacttcaaacttgatcttgataatggcatcaaggtgggaagcctcctcctgacgataggcggcaccattgccgcagttattggaacgggcggctggatcctggcgataggcttggcagggttggttttttcttttgcgaaagccgtgtggagcttcttcgactcggattacaagaagtctcaacagaaaaaatctgtcgaggaaaacttgcgcagcatcaccgagcagttacgcaaatcgctacgcgatgccctgaaaggtaccttgcccgagatgcagcagaaattcagccagctcgaacaggccatcgaagccccctccaaacagactgtcgcactggtaaagacgttgagccagtcgaccagtcagttgaatgccctctcccgccaaattgaaatcgcaggaaatctgtaa

SEQ ID NO: 328415 - DNA, 1005 bp, Pseudomonas aeruginosa
atgtccgaagccaaggacactctcctcaggcagctaacgctgttgcgcctgatccccgagtacccgcgctacacctcttcccagacgttgcacgaaaagctgcaggaccgtggctacaaggtagagctccgtactgtacagcgtgatctgaaccggctttccgcgcccttctcgctgaccaacaacaagaagggtgggcgcaatgaatggagctacacaaaaggcacgccgctggatctgagagatatggagccttcgacggcgctggccctctatctggccgaaagccacctgagcacgctgctgccgcagagcgtactggacctgctgggaccgcagttcaatagggctcgcaactacctcgacaacctcggccagaacgatctggcccactgggccaggcgcgtccgcgcccaccccaatggcaaggccttgctgcccgcccaggtcgactccgaaatctggagagcggtgtccaacgcactgttggtgggccgacaactgcgggtcgactacctcagtcgcagcaaggccgatgcgaagatgctgatcatccaccctgccggcctggtttcccgccagtccatcggctacctgatcggcaccgtcgatggctacgacgacctgcgccagttcgccctgcaccgcatccgtcaggccgagtgcctcgacaccccggcctgcgagcgtcccgacttcgatatcgaccactacatccgccagaacctcaacaccaccacccccatcgagcaggtagagctggtggccaacgtatcaccgcagatcgcctggctgctcggcgaaaccccactgagtacacagcagagtctggaaccgctggaaggcagcgattggaaacgcctgcgcgccacggtaccggacgaccaggagacgctttggtgggtattcgggctgggggagaacgtgcgggtgcataagccagcgacatggattcagacggttcggcaaaaggccgccgggctggaagcgctctacgcaccgtga

SEQ ID NO: 328416 - DNA, 516 bp, Pseudomonas aeruginosa; identical to SEQ ID NO: 321476

SEQ ID NO: 328417 - DNA, 351 bp, Pseudomonas aeruginosa
atggggatgcaactcaccgggaaaggctcgctggtcgcgagttcgctgaccgccatcggtgcgtcggtgtgctgtgtcgggccactggtgctgttggcactcggtgtcggcggtacgtgggtgggcgctctgaccatgatggagccactacgccccctcttcatcgggttgactctactgttcctgggattggcattccgcaagctctacctggtgccacaggtttgtacgccaggtacaccctgcgccgatccgcgcacgctcgtgcgacagcgactcgtgttctggatcgtcagcgtgctgctgctcggcctattggccgtgccgtggctcgccccgctgttctactga

SEQ ID NO: 328418 - DNA, 240 bp, Pseudomonas aeruginosa; identical to SEQ ID NO: 269213

SEQ ID NO: 328419 - DNA, 447 bp, Pseudomonas aeruginosa
atggaaaggctccgcgaaaaactggatttgccgagaggccactactatctgcacgtcgccgtactggcgggcctgccggtgtcgttgatctccgatttggcaagcgagttggagcgatcgccagcgcagatcgcgcagtggatcactgcgtcccccggcagtgccgtgatgtctatacaggctggtgaggtgttctgtcgtcttatcgagatcctcgatgcgctattggagctgtacgatggggatctaggaggtgcgctccactggctaacggcaccgaatgtcgtgctgtccaatgagaggccggtcgagggggtttggggagcaacggaacagaaagtgcacttaagcccagcgcctgcccgcaaacccttgtggcgtctggttagttcgggaaaaccatcgttttgtcgaaccattgcatcgccctttgtgattggcgtataa

SEQ ID NO: 328420 - DNA, 249 bp, Pseudomonas aeruginosa
ttgagcgcgtacgaatcaccaccttcgcgggttgaacgacacaacggacaggacctcatcaagtggatcgccctgctcacgatggtgctcgaccacatgcgtctggcatggccatcactggataacctgttcattctgggacgcctctcgttcccgctgttttgcctggcgatcgccgtgaatgtctgtcgaacggaagttggcgcgttgttcactcgcagcaatggccgctacctaaggaaggtctga

SEQ ID NO: 328421 - DNA, 441 bp, Pseudomonas aeruginosa
atgtttgagtacggcggttacctcggcctgtttctggctgcattcggcgcggcaaccctgctgcccatgcaatcggaggcagtgctgggcggactgctgatatccgagcgtttttccacagccatcctgctggtggtggccaccacaggcaacgtactcggatcggttgtgaactggctgctgggacgaggtatcgaggcttatcgcgaaaagcgctggtttccggtaaagcaagcggccttcgaaaaagccaaagcctcctatgaacgttacgggtactggtcgctgctgctcagttgggtacccatcattggagacccgctaaccgtgatcgccggcgtgatgaaagagccgctctggcggttcgtcctgatcgtcacgctcgccaagggcggacggtatctggtccttgcgattctcatcctggagaacctgagttga

SEQ ID NO: 328422 - DNA, 306 bp, Pseudomonas aeruginosa
atgtcagaacacgttcacgaccaaccgcatggtcacgctcatacccaccagactcacgacgccatcatcaaacgcctcaagcgagcggacggccacctgcgcagcatcatcaccatgatcgatgaaggacgtgaatgcgtggacatcgcccagcagctccatgctgttgaaaaggccgtgtgccaggcgaagcggacactgatccaggaccacatcgaccattgcctggaagactcggtgacagccctgagcaagggcgaccgttcggcactggacgaattcaagcaaatcaccaaatacctgtag

SEQ ID NO: 328423 - DNA, 738 bp, Pseudomonas aeruginosa
atgcattcgcactccctaaagggtgggggcctgttcgccatgcgttcacgccacctgttgtatctgctgttcctgctcgtcgcctcgctgttcatcggcatgccagaagctctggcccatgccgtggccgagggtgacaagggcttcatccaggaaagcaccggggtcatgctgatccccttcatctacatgggcgccaagcacatggtcacgggatacgaccatctgctgttcctgttcggcgtcatcttcttcctctaccggctgaaggatgtcggcctgtacgtcacgctgtttgcggtcggccattcggtgacgctgctgatcggcgtgctgacggaagtcagcatcagctcgtacgtcatcgacgcaatcatcggtttctcggtggtgtacaaggccctggataacctgggcgccttccagcgctggttcggctatcagccgaacaccaaggccgccacgctgattttcggcctgctgcacggcttcggcctggcaaccaagatccaggaatacgagatctctcccgatgggctgatccccaacctgatcgccttcaacgtaggggtggagatcggtcagctgatggcgttgagcgccattctgatcctgatgggcttctggaggcagaccccaagcttctggcgtcatgcctataccgccaacgtcgcaatgatgagtgctggtttcctgttgatgggttaccagatctccggcctgtttctgaccgcttaa

SEQ ID NO: 328424 - DNA, 681 bp, Pseudomonas aeruginosa
atgttcaattctccactcccatcggcaagcgaattgccgagcagccgccaactcgttcgttccaccgtcattgccctggctgtcgccatgggcctgctggtcaccgtggtgatgccttcggaatacgcggtcgacccgaccggcctgggccgcgccatgggcctgacgcaaatgggcgagatcaagatcaccctcgctgccgaggctttggctgacgaggctgcgtcgaaagcggcagctgctccggccccagctcctgtcgttgctgctgcaccggcacctgcaccggtagcgccacccgtacagcaagtggcagcagcccctcagcccgcggctcccgtatccagcaaacctgctgccaacgccaagtccgatcaggtcaccgtaaccctgacgccaggcgaaggtcgggagatcaagctggaaatgctcaagggcagcactgtgagctatgaatggaccgcatccggcccggtcaaccacgacacccacggtgagatctacaacgccgcccaaggcgatttccacagctacagcaaagggcgtcaggtgaaaggcgacaagggcgacctgaccgcgctgttcgatggcacccatggctggttctggcgtaaccgcaccaacgccgatgtcaccatcgtgctgaacacgactggcgactacctgaacgtgaagaagtaa

SEQ ID NO: 328425 - DNA, 1305 bp, Pseudomonas aeruginosa
atgctatccgttctaaaaaatcgtacttatcgacacctctttctggcccaggtgatcgccctggtgggcactggtctggcgacggttgccctcgggcttctggcattcgacctggccggcgcccaggcgggagctgtattgggtaccgcgctcgccatcaagatggcggcttacatcggcgttgcaccggttgccgccgcgttcgccgagcatctgccgcgcaaggcgatgctggtcaccctcgatctggtcagggcagcggtcgcgctgatgctgcccttcgtcaccgagatctggcaggtgtacgtgctgattttcgtgctgcagtcggcctctgcggcgtttacgccaaccttccaggccaccatccctgacatcctgccggatgagcgcgagtacacccgggcgctttccctttcgcgcctggcctatgacctggaaagcgtgatcagtccgatgctggccgcgctgttgcttacggtggtcagcttccacagcctgttcgcgggcacggtggtgggcttcctggtgtccgccgcgatggtcggtaccgtggtgctgcccctggcggcacgaggacccaaacgcagcatctatgaacgcaccaccaagggcatgcggattttcctgcgcaccccgcggctgcgtggccttcttgcactgaacctgacgatcgcagccgccagcgccatggtcatcgtcaacaccgtggtactggtgcaatccaagttcgcgctgccccagagctctaccgccatggccttgatggccttcggcggtggctcgatggtggtcgccctgatgctgcccaagctgctggaacgactggacgatcgcaaggcgatgctggccggcggtgccgtgctggtagccggtttgatcctgggtaccttcgtctccagttacccggcgctgatcctgttgtggctggtgttgggtgccggctactccctggcacagacaccgtccggacgcattctgcggcgctcgtcctcagcccaggatcgacctgcgctgttcgccgcccagttcgccctttcacacgcctgctggctgatcacctacccgctcgcgggatggttgggggcaagcgtcagcctgacggcttcgttcatcggactgagtctggttgccgccgtagcctggctggtgagcaagcggatctggcgcccggagtatgaggaagacgtggtagcgcacaatcacgatgacctgccggaagaccacccgcacgtggccaacggcaatgcgcatgcgcactcgttcgtcatcgatgacgatcaccggaaatggccaaagccataa

SEQ ID NO: 328426 - DNA, 942 bp, Pseudomonas aeruginosa
atgaaaaattggcttcttcttgtgttggcactccccacggccaacgcgaccgaacgtatgcgtgcctggcgggcgttgaaggcttgcggcgctgccgtgctgcgcgacggtgtgtacctgttgcctgagcaggacgcgggccgcgaggcgttcgagtccgtggagcgcgatgtgacggtcagcggcggcactgcgtttctgctggcattcccggacgaagaaactcgcttcgccggcctgttcgaccggagtgaggagtacagcaagctgcgcgacgaagtcgccgcgtgcagggagggactgcttcccgagaacgccctgcaggtcgctcgccaggtcagaaaactgcgcaagagcttcgcccagttggccctgatcgacttcttccccggcgttgcgaagcagcagacggagaccgcgctggaagcgctggagacggcaatcagccgtgccctctcacctgatgaaccgcacattcaggatcatcccgtcacgctgctggaccacagtcattaccaggggcgtcgctgggcaacccgtcgacgtccctgggtcgaccggctggcctgtgcctggctcatccagcgcttcatcgacagcggcgcggaaatcctctggctggaatccccgagcgactgccccgccgatgcactgggctttgacttcgatggcgccgcgttcagccatgtcgggcaccgcgtcaccttcgaaaccctgatcgacagcttcgtgctgcaggctccaggcctttcacgcatcgccgcgctggttcactacctcgatgtcggtggcagccagcctgcggaagcgtccggcatcgagcgtgtcctggcgggcctgcgcgagagcattaccgatgacaaccaactgatggcagcggcaaacggcatcttcgacgggctgctggcggcctttgccaacgaggaaaacggtcatggctga

SEQ ID NO: 328427 - DNA, 1368 bp, Pseudomonas aeruginosa
atggctgaaacgacgacgctggccacgggcgaagcccccctcaagccagcgaccccggtgggcttgttcgaagcgttgctgttctggctgaagatcggcttcatcagctttggcgggccggcaggacagatctccatcctccaccaggagttggtggagcgtcgccgctggatcagcgagaagcgctttctgcatgccctgaactactgcatgttgctgcccgggcccgaggcccagcagctcgcgacctacatcggttggttgatgcaccggacctggggcggggtgattgctggcgggctgttcgtgctgccgtcgctgttcatcctgatcgggctgtcgtgggtctatatcgagttcggcaacgttccggtggttgccgggatcttctatggcatcaagccggcggtcaccgcgatcgtcgttcatgcggcgcaccgcatcggttcccgggcattgaagaatggctggctatgggcgatcgccgcagcatccttcgtcgccatttttgccctgaacgtcccgttcccgctgatcgttctggccgctgccgtgctgggctacatcggcggaaaagtgctgccggacaagttcgtgaccgctggcaagcatggctccgggaaggccagttacgggcctgcgctgatcgatgacgatacaccgccacccgcgcatgcccgtttccgctggagctatctgctcaagctgatcctgatcggtgcggcgctatggatgctccccatggggttgctgaccgtcatcttcggctggcaaggcactctgacccagatggggtggttcttcaccaaggctgcgttgctcaccttcggcggtgcctacgcggtgttgccctatgtctaccaaggtgcggtcggtcactacggctggctgtcgcccacgcagatgatcgacggcctggccctgggggaaacaacgccggggccgttgatcatggtggtgactttcgtcggcttcattggcagctacatccacccgatgttcggcaccgaccatccgttcctggcgggcgcggtggcggctgtgctggtcacctggttcaccttcctgccctcgttcctgttcatccttgccggcggtccgctggtggagtcgacgcacaacgaactgaagttcacagcgccgctgaccgggatcaccgccgccgtggtaggtgtgatcctgaatctggcgttgttcttcggttaccacgtgctctggcccaacggctttgggggaggattcgagtgggcctccgcacttatcgccgcggccgccgctattgccctgttctacttcaagcgcggtgtgatccaggtgctggtgatgagtgcactggcggggctggcggtccagctgtcgatgcgttga

SEQ ID NO: 328428 - DNA, 207 bp, Pseudomonas aeruginosa
atgcgactgacccaagcgcttctcatcggtgtactggctgttggtgtgacgacaccggtatttgccgaagatggctacgaccgctcgatcgaattcaacaagaaattccgcgaggaccagaaacgcctctggggtgaaaaagacaccgcagacaaagccaaaccggcagagaccaaagaaaaggaaaacgctaaaagcccatcctag

SEQ ID NO: 328429 - DNA, 1395 bp, Pseudomonas aeruginosa
atgaagcgcttcagcctggccgccaggttgggactcaaagtcggcttgatgagcgtgatactgctggtgctgctctctatcgtgggctacctgatgctcggccaggcgctggagcgcacggcgcaaagcagcctgatcaccaagatgggtggcatggcccataacctatcgaccgtcgcggatctgtccgaggtcaccgcagactcccaccagttggtcgaccttgcgatgggccacaacaacctgttcgtcagcattttcgatacggcaaacagccgaatccccctgctgaccatcggctcgaaaaagataaccaccgaactcaccagctttcctgccaacgatcaagtggagttctacgagtggaacaacgaactgggcatgcccatgctcagcgtttcccagctcatgcgtctggctgacggtacccaggtcggtgtgtacatgaccgtggatgaatcctccgatgccgaattgctccgggcgatgctgagctgggccctgatggcgtcacccttcatcctggcgctgatcatggtcgtggcctggtggacggtacgccggggcttgctgccgcttacgcgctttctgaaagtcgcgtcgaagatctccaccgacaacatgcagcatcggctgcctaccgaccgcttgccgatcgaactgctggagctcgcggacggcatcaactttatgctgcaccgcctggacggtggcgtgcagcagctatcgcagttctcggacgacctgtcccacgagttgcgtgctccgctcactaacctgatgggcaaagcacaggtggccctgtcacgaccacgcagctcggaggagtaccgtgaggtgctggaatcctgcgccgaggagctggatcgcatgaaaagcatggtggccgacatgcttttcctggcacatgtcagccagcctgcagccttggtgcaattcgagacggtggcactggtcgacgaggtgcagagggtcagtgacttgttcagcctgagtgccgaagagagcggcgttcggctcgatgtgtcaggcagtgtcgatgtgatccaaggcaatcgcctgatgattcaacgggcagtgtccaatttgctctccaacgccattcgctactgcccacaagggcaggctgtagtggtgaaggttcaccgtgagcaggagcacatcaggctcagcgtaggcaatccaggccaaggtattccggaagagcacctgcctcatctgttcgaacgcttctatcgggtcgacaaagggcgtgcgcgcagcgagggaggcacaggcctcgggcttgccatcgtgcgatcgatcatgagcctgcaccaaggcgtggcgaaggtagaaataacgggctcgggctttacctggttccacctgagttttccggtgaaccgtctctga

SEQ ID NO: 328430 - DNA, 270 bp, Pseudomonas aeruginosa
ttgaaggattccacctccctcctgattttcctgcgcgtcgagctgactaccaaggaattcgccctgttgcgcctgctcatgagccacccaggggaagccctgacccgctcgcagatcatttccctggtctgggacatgaacttcgactgcgataccaacgtgatcgacgtggcgatccggcgcctgcgcgccaagatcgacgatccgttcgagaacaaacttatccacaccctgcgcggtgtgggctatgtgatcgaggagcgttcatga

SEQ ID NO: 328431 - DNA, 1038 bp, Pseudomonas aeruginosa
atgagtgctgagaagttctctgtcgccaatgaacagattcaagcgctgggtatcaagacgtctgctgtgcaaagcatgaaacagacggtcagcacgcgatatcccggccaggttgtcgtgcctccgaaagcggagcagatcgtcagttccccacttgaaggtgtggtggtgcaactgctggtgggcgagtaccaggccgttcgcaaaggcgagccggtcgtgcgcctgtccagtccggcgatgagccagctccagctccagctgttgcaggcatctgcccgcgccacgctggcccggcaggcctacacccgggaacagaagctgttcgatgagggcatcattccgcagcgtcgggcgcaggaagcccaggcaacgctgaaggaagcggaagcgactctggtgcagaccaaggccgaactggccctggcgggaatgaccccggccatgatcgagcaggtcatccgctccgggattccttccgacaggatcaccctcagcgccgttcaggacggcattgtcagcaacatctcggtccggcccggccagcgggtcgacggtgccacgtcgctgctgaacatcacccaggtcgatgcgctgtggctggacgtgcagattccggccgcggccagtattggcattcagccgggcgcgggcgtaacggtggtcgacaagggcattaatgggcgtgtcatcaacctgagcccgaccctctcggctaccagccagttcgtggtgctgcgcgccgaaatcgaaaatgccaacggcgccctgcgtcccggcgagctcgtcaccgtggagatcccggttcaggccgctggcaaatcctgggacatccctctgtctgccgtcgctcgcaacaagaccgactccgtggtgttcgtccgcacgcccgacggttttgaagcccgcccggtcaaggtcgaagccagcgcggggcaactggtccgtgtccagggcaacatcagcgaacaggaccaggttgccgtcgccggcgtgattgcgctgaaaggcgcctggcttgaagaggacggtgagtga

SEQ ID NO: 328432 - DNA, 3084 bp, Pseudomonas aeruginosa
atgctgagccgtcttatccaattctctttgtcccagcgcctgttcatggtgctggcgacgctgttgctgaccggcgcgggctggtatgcctaccgtgggctgcccatcgatgccttccctgatgtggccagcacccaggtcaaggtgatcatgaaggcaccggggatgaccccggaagaagttgaaagccggattgccgtgccgatcgaagtggaaatgctcggtattcccaagaccaagatcctgcgctcggtcaccaagtacggcctggtcgatgtcaccatcgattttcaggatggcactgacatctactgggcgcggcaacaggtttccgagcgtctcggcaacctgagcgacagcctgccggacggcatcagtggcggcatggcgccgatcaccacaccgctgggcgagatgtttatgttcacggtggacggtacaaccttgtctctggtcgaacgtcgcagcctgctcgactgggtgatccggccggcgctgcgtaccgtacctggcgtggcggatgtgaactccctcggtggccaggtcaggaccttcgaggtactgccagatcccatccgcatggctgccagcggcgtgagccttgagcagctgaccaacgcggtcaacaccaacaaccgtaacgacggtgccggccgactgggtgaaggtgacgaagtcctgctggtacgcagcgagggcagcatccgcaccctggatgacctgcgggccgttgtggtcaattccaacagctccagcccggtgcgggttggcgacctggccgaggttcgccttggcaccctgacccgctacggcgtggtgacccaggatggcaagggcgaggctgtgcaaggcctggtgctcggcctggctggcgccaacgcccgccaagtggtcgccggtgtgcaactgaagctcaaggaactggaggccacactaccgaaaggcatcaccatcaccagcttctacgatcgctcgtcgctggtcgataaagcggtaggggctgtgtccaaggcgctgatcgaggccaccgtgttggtcatcgtgttgctggccctgttcctcggcaacgttcgcgcagcgctgacggttgccctggtacttccgctggcggcgttgatcaccttcatcctgatgcgcttcgtcggcatgtccgccaacctgatgagtctgggagggctggccattgccatcggcatgttggtggatgccgcggtggtggtggtcgagaacatcgtccagcgtctggccaccgatccttccggtggcaagctgccgcgtctgcacatcatctaccgggcggtgcgcgaggtcgcggtaccggtgacgtccggcatcctgatcatcatcacggtgttcctgccgctgctcaccctgcaggacctcgaaggcaagttcttcgtcccggtggcgctgaccatcgtcttcgctctggcgggatcgttgctgctgtcgctgaccgtgatccccgtgctgtcctcctacctgctgcgcgaggtcaagcacgaagacccctggcttgcccgcaagctgctgggcatctatggcccggtgctggagtgggggcttggccggcagaaactgatcgcgatcatcgctggcgccatgttggtcgtcgctggcctggtctacacccaggtgggcaagaccttcatgccgaccatggatgaaggcgacctgatcgtgggtatcgagaaactgccatcggtcagcctcgaacagacggccgagctggacaagaagatccagaccgcgctgatggcagcggtcccggagatccggggcatcgtggcgcgggccggttccgacgagatcggtcttgatcccatgggcctgaaccagaccgatacctacctgctgctcaagcccatgagcgaatggcggatggacaccaaggaagagctgatggacgaggtccgcaaggtgctcgatccaatgccgggtatcggctacagctttacccagcccatcgagatgcgcgtctccgagatgatcatcggtgtgcgcggcgacctcgccgtgaagatctatggccctgacctgggcaccctgagccaactgggcggcaagatcgagtcgctgctcaagactgtgcagggcaaccaggacgtctacaccgtgcagaacgacggtgtgcagtatctgcgcgtggagatcgaccggctgcaggctggccgtttcggcctgagcgtcgaggccatccaggatgcactgcgcgtgcagatcgaaggccagcaggccggcctggtgatcgaaggcaaccagcgcacgccgatcctcattcgctcggacgagtcggtgcgcacgtcgccggcggacttcaacgcggtgcggatcaccacgccggatggccagaccattccgctgagcagcgtggcgagactggagcgtgccgatggcccggtgaagatcgaccgggaaatgggcagccgctacagcgtggtgatcgccaacgtcagcggtcgtgacctggtcggcttcgtcgaggaggccaaggcgctggtggctcagcaggtggaactgcccaacggctatcgcatcagctggggcggccagttcgagaaccagcagcgtgcggctgcccggctgtccatcgtcgttcccgtggcgcttggtctgatcttcgtcctgctgttctcgaccttcggctccgtgcgccaggcgttgcttatcctcagcaacatccccttcgccctggtgggcggcatcgtcgcgctgtgggtcactggcgagtacctctcggtgccagcgtcggtggggttcatcgctttgttgggtatcgcggtgctcaacggcatcgtgctggtcagttacttcaaccagttgcatggcgaaggcctgccactgcgggaagtggtgctccagggtgcccgtcgccggttacgcccggtactgatgaccgcctcgatcaccgccttcggtctggtcccactgttgttcgctaccgggcccggctccgagatccagcggccgttggccatcgtggtgatcggcggtttgatcaccgtcaccgcgctcaccctcatgttgctcccgattctctatctgcgattcgcccacgcgaaaaaggaggccaaagatgcctga

SEQ ID NO: 328433 - DNA, 303 bp, Pseudomonas aeruginosa
atgcctgatacctggttgacgctgctctgcaccccaagcttggaggagaagctcatcgaccacctcctggtcgtgacggggaaccagatcttcaccagcacaccggttgcggcgcacgggctgtccaccgcggcactcaatccgatggagcgtgtcatggggcgggccaaggctgtgcagatccaactcgtggtggaacggcagcaactcacggaggtgctgcaatccctcaaggaggagtttccaaataccgggctgcgctattggacggtccaggtcagtaactttggggagttcgtgtga

SEQ ID NO: 328434 - DNA, 1236 bp, Pseudomonas aeruginosa
atgaagcgccttgttcccctggctctgctgatcagtgtgtgtggcacggccgtggcgcaacctgccgctccggcaaacattctgcccaagccgctggtggtgtcgctgctcaacgccgatccccgcgtggcctcggcacgctccagcatggatgccgccatgctggaggctggcatcatccggcgttcgccttatgaatggacggccacggcaatcggccagcaacggcgtaccgacgctggccccaactacaacgaatggaacgtgggtatcgagcgcacggtgcgcctgcctggcaaggccagtgccgaccaggacatcagttcggcaacgctgcgattggcagatgccacctatggcgaagtccgtcatgaagccgcgcgggaactgatgaccctgtggctggattggctggtgtcggagcacgcgctcaccatcgccaataaaggcctggcctcagccaaggaaagcctggcggcggcggaaaaacgcaaccgtgcgggtgacgcctctaagctggatgtaagcctggtcaaggcggaagtggccgagcaactgcgacaaggcaacgaagccaagataaaagccgctgcgagctgggcaacactgtcgcggcgcttccctggcatcgagcgcaaagtggttgatctgcccattccttcggccgaactcggtcagtacgacacctggcgcgagcggatcctggccgaaagcgatgtgctgcgtcgggtcgaagcctctctgctgagaaatcaggggcaatcggcccgggcgaaggctgacagggtgccggatcctacgttgggggtattcaccgcctccgagcagggcaaccgtgagcgcatctacggtgtcagcttcagcatgccgatccccagcgggtcgcgcagtgctcgctacagccaggcgctggcccaggagaatgcggctcgcgaggatgtcgacctggccaaacgcgagctggaagccgggattgcccgtgacgtcgaactggcttcaggtgcttacgagagctacctgatcgcgaaggatggcgccgctgccatgacccagaacgaagcacagatgcagcgtgcctacgaactgggcgaggtggatctgcagtcgttgttgctggctcgccggcaagccgtcgcatcgtctaccagcgccctgcaggcccacgcggatacgctgcgcacccatctgtcgctgttgatcgatgcccactggatatgggggttggacgaaagctga

SEQ ID NO: 328435 - DNA, 930 bp, Pseudomonas aeruginosa; identical to SEQ ID NO: 269214

SEQ ID NO: 328436 - DNA, 885 bp, Pseudomonas aeruginosa
atgcacgcattccccctcaccctggacaaccgactcgccgaagccctgccgctatggcgcaacctggcccgcaccgaccgggcgccgcgaaggaacatcgacctcgccgactggaaagccgactggcgcgaactgatcgccgcgctcgacaggttttcccggagccacggctatcgccagccgttcgccgcgcaagggcacgcagccctggaaaacgcctgggcctggggccaggccgcggaaaacgccagtacgctgctgctcaaggccatcgaccggggcctggccggcgccgaactgcgctccatctacctggagaccgccgcgctgtggctggactacagccggctgctcggcgccgcccgcgacagcctgcgcgagcagggcgaggtcgacttcgagacggcgccggccctggcgccgcgcacaggccagtatccgttcgcgctgcaactgctcgccatgggcgtgctgctcgatgcccaggagctcatcccggcgctggtcgaggaggtcctgcagttcgataccgaccgcctgctcgactatctcggcgcggccgccctcggcctgacttccgccagcgaggaaaccttccatccacggccgttcgggcagttgcgggcgttcttcgaagaggcggacggcagcgacgcccaggcgctggcgccttacctgcaaagccagtaccgggagttcttccagctttcccccaaggcgcagaagaagacccgccgcctgaccggcccctacgcctggggctggtgggccatggaggtgtcggcgctgggcgtgctctacggctgggacgatggcgtcctgcgcgcctcgccgcattacctcggcgacctggtcgactacgcgcgggcgcgcggcgacgcctga

SEQ ID NO: 328437 - DNA, 1581 bp, Pseudomonas aeruginosa
atgtccgagcgtggaacggctgcagaaggccggatcaactggcgacgcatcctgccgatactgctcaccaccaccctggtgggcggtatctgtgggatcttcgtcatcaacgaactggatcgccagcacgacggcgcgcacctgcgctcgtacaccgagagggcgctggagcgggcactggagatttcctccgcggcggaccagatgctccgcgagatgaacgccggcagcgaccgggatctggaaatgctgcgttccatcgtgctcgagtcgcgcttcatgagcgacgttggcaggatcagcggcgaccgggtcatgtgcacgggcgtccggggccggctgcgcgcgccctggggattgtccgcgcccgaccgggtagatgccgccggcacccgcttctggacagagggcatgcccctgccgttgcaggcgctgcccaccgggttggtcagtcgcggcaacgccgtcgtattcattgccccgcacgcctatttcgatgtcgaccacccggacccgggcatctcggcggcggccgtcagcagtggcggcgactacatctaccaccgtttcgcctgggacgacgaccagcccctcgaggcgctcggccggcccggctggccgcgcttcatcggcgcccggcagataagcctgtgcgacccgacgcaggacatctgcgtggtctcccttctccgcgaacgcggcctgcttggcaccgagcccggacgcgcggccatggccgcggcgatcggcggcgggctgttgttcggcgtcatgctgctgctcagctacctgttcggcttcctcaacgacgaaaaactgccggccaggctgctgcgcgcgttgaagcgcgaggccctggaggtgcactaccagcccatcgtgcgcctggccagcggccgctgcgccggggtcgaggccctggcgcgctggaccgatagcagcctggggcgggtttccccggatgtcttcatcggcgccctggaggagagcggcgacatcgaactgctgacccgtttcgtcttccgccgcgccctgaagcagctcgggccgttgctgagggagcagcggagcttctacgtcagcgtcaacgtcaccggcaaggacatcgccgaccccggtttcatcgatttcgccatgcgccagatggccagggaaagcgtgcgcccggaacaggtcgcgctggaactgaccgagcgcaccaccgaggcccagggctgcctgctggccgggatgaaccgcctgcgcgaactcggcctgaagatctacgtggacgatttcggcaccggtcattcgaacctggtctacctggccaacctgccggtagacgcgatcaagatcgacaaggtcttcactcagtccatcggcgacagcagcgccgtcgaactgatcttcgacaagctctgctcgatggccgagcacctggagatcggcgtggtcgtcgaagggatcgagacacaggcccaggccgaccacgtgctgcgccgctcgcccgaggccctcggccagggctggcatttcggcaaggcactgccgctggaggccttcctcgactactaccggaaccagccggcgggccgctag

SEQ ID NO: 328438 - DNA, 669 bp, Pseudomonas aeruginosa
atgtccgaagacctgcatcgccggggtatcggcatgacctcccagcgtacccgagagcgcctgatccagcgcctgtacgaagaaggcctgtccaacgcccacgtgctcgaggtgatccgccgcacgccgcgtcatctgttcgtcgacgaggcgctctcgcatcgcgcctacgaagacaccgccctgccgatcggccacaaccagaccatttcccagccattcatggtggcgcggatgaccgagttgctgctggcggccggcccgctggacaaggtcatggagatcggtaccgggtccggctaccagaccgcggtgctggcgcaactggtcgagcgggtcttctctgtcgagcggatccaggcgttgcaggacaaggccaaggagcgtcttgcggagctaaacctgcgtaatgttgtctttcgttggggcgatggctgggagggctggtcggcgttggctccctacaatggaatcatcgtcaccgcggcggccacggaagtcccgcagtcgttgctggaccagttggccccggggggccgtctggtgatcccggtcggtggcggcgaggtccagcaactgatgctgatcgtccgcaccgaggacgggttcagccgccaggtactcgactcggtacgtttcgtcccgctgctcaacggcccgatcgcctga

SEQ ID NO: 328439 - DNA, 1200 bp, Pseudomonas aeruginosa
atggcaagaatcaaactcaccaaatccgctgtcgatgccgccaagccccaggcgcaggccatcgaactgcgggacaccgtggtgcccggcttcctgtgcaagatcaccccggccggccgcaaggtgttcatgctccagtaccggacgaacgccggcgagcgccgcaagccggccctgggccagtacggcgaactgaccgtcgagcaggcccgtgtcatggcgcaggagtggctggccgaggtgcgccggggcggcgaccccagcgcggctaaggccgccgcccgcaaggcacagaccatgaaggagtattgccacaccttcatggaggactactccaagcagcgcaacaagcccagcacgcagcgcggctatcagggcgtcatcgaccgctgcatcatcccgatcatgggccggatgaaggtgcaggacgtgaagcgcccggacgtggccgcgctgatgaagaagctggcccacaagccggccgaggcgaaccgcaccttcggcgtgttgcgcaagatgttcaacctggccgaagtgtgggggttgcgcccggacggcacaaacccgtgccgccacgtcccgatgtttccgcccggcaaggaaacccggctcatcgtggacgatgaactggtgcggatcttccgtcacctagagcacttggaagccgagggactggagaactacgtcatcccgctggcgatccgcctgcaattcgagtttgccgcccgccgctccgaaatctgcccgctcgaatggggctgggttgatctggaaaagcgccgcgtcgtctggcccgacagcaagaccggcggcatttccaaacccatgagcgaggaagcctatcggctgctttcgacggcgccgcgccgggagggctccccctacgtcctgccgtcgcccaacgacccggcccggcatctgacgcatggcgaacactatggcggctggaagcgcgtgctcaaggccgcgggcgtgccgcacgtcggcacgcacggcatccgccatcgagcgacgaccgacattgccaactcaggcgtgccaaccaaagtgggcatgaagctcacaggtcacaagaccgttgcgatgtttatgcactacgtacataccgaggacaagccggtgcgagatgccgccgagctggtggcgaatcggcggctggcgattaccggggcgtcccgttctatggaggtgacagcatga

SEQ ID NO: 328440 - DNA, 426 bp, Pseudomonas aeruginosa
gtggaactgctggatgccgcgcgccaagcagcggcgggcagtgtcaatgcgctgatgacgaccagctattgggagattggccgccggatcgtggaagccgagcagaaaggcaggcggcgggctggttacggcgagcagttgatggcgcggttgtccgccggtctgacggcgcgctttgggcgcgggttcagcccggacaacctggaaaacatgcggcgcttctttgccgcttacccccttgaggcaatttccaagacgctgtctcggaaatttgacctctccgaactggccctggtcttcaggttgctgtggtcggcctatgtccggctgctggcggtcaaggatgaccatacccgtcggttttacgaggccgaggcgccgcgcggtgcgccagctcgaatggcagatcggcagccacttctatga

SEQ ID NO: 328441 - DNA, 1407 bp, Pseudomonas aeruginosa
atgtcgccggccgctctggacatcgtcctgctggagccgcacgaggcggccctgcgcttgctgctgcaaagggaaaacggtgccgaggcgtccgcctacgtgctgttcggcaaggctgacatctcggcagacccctggtcgggagtgcctcgcaccagattgatctcgcacgaagtcatccccgtcgcggccgatgaaatggtctccgcatcgcctgtccatgtcacatggtccacccgaggcttcatgcgcattctcggcatcgcgaaagaacggggcttggttgcgggcctggtacacacgcatccgaacgcggcagcgttcttctccgaccaggatgaccgaaacgagtcggagctggcccggacgacgttcaacaagggcgtttccggcctagccagcatggtgttcggccgcgatgacgccatcgcgggcaggctctggactgcccccggcaagacggtcatggcatcctcgatctcgctggtaggaagccagatcaagatcgcgcgcaaggtggctgcggctgacgaagatcaattcctggcgcggcaggccgcgctcttcggccaagggttcaatccagtcgtgcgcgggctgcgggtgggtgtcgtagggggcggcggcacgggcagtgctgtcgcgatgctattggcgcggctgggcgtcggctttctggggctgatggacaaagacaccattgatgtcaccaatctcaaccgcgtgcatggctcgcgcaccgcagatgtggacgccggcttggccaaggtggacatcctcgcgcgcgagattcgcgccgcgggtctcggcacccaggtcgtcaccaaagacgagtgggtcggccatcctgatctgcgcgatctgctgcgctcctgcgacgtgcttttcggctgtaccgacgaccatcaggggcggctgacgcttaaccgcttggcgcactactacggcatcccgctgatcgatgtgggcctgcgcatgcgcgcggcacgcagcggcgcggacttcgacatgacggggcgcgtgtcgacgattgggcccggcaaaccttgtctcatgtgtctgggagtagccgatccgcgccgcgctgcggccgaaggactccggcgcagcgacccggccgagttcgagcggcgtaaggcggaagcctatgtggacggcggcggcgacccggcgcctgcggtggtcacgttcaccacggccatcgcctgcgcggccgtcgatgagctcattcagggactgaccggttttcgcggtcctgcgggcatgtcgcacaacaggattcgccgctttgaccgcgtagtggatcgcaccatgacctgccgacccttggcgtcttgcccggtttgtgccagccaggcgagctggggacgcggcgatgtcaacccatttcttggggtgatcggatga

SEQ ID NO: 328442 - DNA, 930 bp, Pseudomonas aeruginosa
atgcaaacccagaccaccagcggtgatgaccgcttcgatgtcgaagatgttgctgcggcgatccgcgaaggccgcagcctgcggccagcagcgctctaccggatcgtcgtcttggacgaccagctccacgaacgtcacgtcgatctctccgatccggtgccgaccgggcgccagatccttcaggccgccggatcgcgcccggccgatgagtacagcgtttatgcgattttgacctctggcgagttcgaggacctgcgtctggacgaaacctacgatctgcgcggccgcggtgcggaacgtttcgtcatcttccagactgatcgcgcgttcaagttcacgatcgatgaccggcaactggagtggggcaagcccagcatcagcggccgcgtgctcaaggcgctggccggtgtcccaccagagacctacgacgtctatctcgaagtgcgtggcgggggccaggacattctgatccgcgacggcgacctgatcgatctgggtaagccgggcatcgagcgcttcatcacgctaatccgtgacaccactgaggggctgctcacgctgcccgaagcggaccagcgctatctgagcagccatggcgtggctttcgagatggtgagcgacggcgcgcacacgggcgtcatcttcaagcagttgccgctgccctccggaaagctcaaccacgccacggccgatgtgctcgttctcctgccgccgggctatcccgatgttgcgccggacatgttctattgcgacccgtggctgacgctgcaaagcgttgggcgctacccgacctgcgctgaccaggcccacgcgttccagggccgcagctggcagcgctggtcgcgccacaacacagcgtggcgcccgggcatcgacggcctgcacactatgctcaagcgcatcgagcacgccctggcggaggcgaagtga

SEQ ID NO: 328443 - DNA, 3429 bp, Pseudomonas aeruginosa
atggacgccaccgaggccgctcgactggaagcagaacgcctgcaccgtgcgaacgtcgcggccggcggagatccgacccggcctttagtgtttgcgcttcaggaggcctcaaatcgcggcttggatgtgtacgcgctgcgagaaggagacccacagcttaagggaggcaaagccacgttcgactgtcaggctggaggcatcctctacgaggatcgtggatcagacttcgagcgcgcgtttttgattgcacacgaactcggccatgtcgtgctggaaggtggcacgctcgatgtggtgacggtggatgtcgagcccgaccgatcgctggaagacgcaccggtgggcgtcgatcgtgtccttgactacggggcgcgtgagcgacgtgaagtgaagatggacctcttcgcgcgcgagttcctgctgccgcgtcctgtgttgcgcgagttgcatgtcaacgaaggactgacatccgacgcgatcgcgatgcgcttcggcgcgccgctcgctgtggtgcagcaacagttgcttgatgcactgctgctgccagcggccgaagagccgaaccccgtaggcgccggcgccgtggcagctccgctcaccccagaccccacgcaggctcaggcggcagcacatcgtggcttggcgtttcagctgcaggcagggccgggtacgggcaagacgcggacgcttgttcgtcgcatcgaagggttgcttgcggacggcgtcgatcccaccacgatcctggtactcaccttctccaacaaggcggccaatgaactgtgcgagaggattgccgcgagcaatcctctcgcggcggcggcgatgtggatcggcacattccacgcattcgggctggacatcgttcgccgctttcacgaccgactggcgctgccgccggacccacgattgatcgaccggacggaggccattgaactcctggaggacgagtttccgcggctcgacctgaagcactatcgcaacctctgggacccggccctggatttaagcgacatgctgagcgcgatctcgcgcgccaaggatgaggttgtcgatgcagcaggctatcgcgccctcgcgcagtcgatggcggatcgagcagggaccgaccaggacgcgaaggttcgtgcgcagaagtgcctggaggtcgccacgctcttcgaggcgtacgaacggctgctgaccgcgcgccagctgctggacttcggtgacctggtcgcgctgccggttcgtcttgtcgagggcagcgccgaggtaagggatgccctgcgtgctcgccatgagcatgtactggtagatgaataccaagatgtcaaccgcgcctcggtccggctcctgaaggccatcgtcagcgacggccgcaacctgtgggttgtcggcgatgcacgccaatccatctaccgcttccgcggcgcctctgcgacgaacatcgcgcgctttgcgatcgacttccccggcgcgcaggccgcacagctgggcgtcaactatcgctccgacgaacggatcgtcgatgtgttcaccgagttcgcgcgcggcatgcaagcatccgccggtgcgttgccgctgaacctgcaggccgaccgcggctccacaggagaacgggttgagcttcgcgttgccgggtcggctgacgatgaaatctccgcgcttgccgcgtcgatcacggccctgcacgagcagggcattgcctatggtggccaggcggtgctgtgcgcgtccaatgcgcgcctgaacgccattgcagaaggtcttgaggcccggggcattcccgcgctgcacttgggcagcttgttcgagaggccggaaatcaaggatctgctggccttgctctcgctggcgaccgacccgcgggcggccgcgatggtgcgcgtggcaaccatggctcggcaccaaatgcccttgaaggatgtcatgcgggtcattgagcggctgcggacgacgaatccagcttcgctggattggttggcaatacatgccggagtggatggcctgacagactgcagtcgagaagcgctatctcgcctgtccgcgctctttgcaggtgtgaacgcatcgactgacccctggctcttacttgctggatggacgattgatggtctcggactcgcgaagacgctttatttggctggtgatccgcagagtcgcatgcaaagtctggctgtctggcagttcttgaacttctgtcgccggcagccaagaggccaaggcatgccagtggttcgcctgcttgatcgcgtcaggcggttagttctgctcgctgaggatcgtggattgagccagttgccccgcagtgccgagaacatcgaagcagtgcgcttgatgaccatccacggaagcaaggggctggagttcgatgtcgttcatttacctggcatggtaacgtccggcctaccgcgcaacaacgtgccgccgcgttgtcttcctccggacggtctgatccatggttcggaggggctgaccggcatcgaggcggtgaaggccggccacgacgaggaagaagagtgcttgttcttcgtagcgctttcgcgagcgcgcgataggctgcagctgtatgcctacgccaggcaggcagatggtcgtacgcgtagcgcctccaagtttatcgccccgatcgaccgactccttgttcgtccggtaccggtgccgttgcaagccggctcgacatcgacgggcaccccgctcgccatcacatggcaagggcgtccccaatggaccgacatccaggtcaacctcttcgagcggtgcccgcgccgcttcttgtacacgcacgtgctgaggcttggaggtcgacgaactgaaaccgcattcatgaagatgcacaacgtcgtgagcgacgtgttcgattggttgaaacgggagcacgagacgacaagtcccacggtcgacgagctggctgcacgcttcgaggaggcctggtgctccaagggtgcgacagagcatggatatgcggaggactaccgccgcatcggcaagcggctcgtcgatttcctcatcgagagccggaatcgtgacgtggccgcgccggcgccaccgatctcgctgggttgggccgagggcgagatcctcgtaaccccggatagtgtagctcacggagccggtggccgggtcacggtgcggcgcgtcatgacgggcaagcagcgctcgaacgccttcgatgatattgagtacacaattctccaactcgccgccgtccaggcttatggaccacatgcgcaggtcgaggtgacctaccttaccagcgaaaccatccagccgatggaaatcacgtcgcgcaagctggaatccaggcgcgagaagctgcaggccttccttcaggcaatgcaggccgggcagttcccctctaagcccgaggctcgtagctgtccgcgctgcccgcacttcttcctctgcggcgagttgcccggaggggggtgggtacaagaaaaactctga

SEQ ID NO: 328444 - DNA, 594 bp, Pseudomonas aeruginosa
atgagtacgtcaaagcctttcgctgcagacgaggaatctgtgctgatggcgttctccatggagcccaaccatggccgggaaacgcttgaacgctacattagggagtacccgcagcatgcgaccgcgctgatcgactgttcgatcgatctgctttatgaggcgccagaaggcgatgttccggcgaccgaagtgccggacagcgcgattgataaggcctggcagcgattcgagcgggctgtccagcagcccgatgcggaggttgcgaatccgttcaccaagctcaatacgagcagcttcaagtcgctcgcacgcagcctggacgtcagtaacctcttcctcatgcgggtgcgcgatcgggccattcgtacagccaccattcctgcccgattcgtcgagaagcttgcgtcagaactgggtgtcaccgttcaatctgtgaacgcatacctgcaggggccaccgggcatggtttccggacacgcttttcggtcaaatgtgaagccgagtgtgggcgagcagatcacgttcgaccaagctgtcgcgacttcacaactcacgccggagcagcaggcgacgctaaaggcactgtcggactga

SEQ ID NO: 328445 - DNA, 780 bp, Pseudomonas aeruginosa
atgccgaaacccttgagaagcaaggataaaaacggggagccgttcgcgcgccccccggagatcgacgcctgtttgcagaggctggagtcgatcgatgccgcgacacgcctgcaggccttcaccgtcgcgtcgaggaagagcgacggctatgtgccgtcggaagcactgacatatttcctgcggcgcgcccatgcgacaggcgcaaaggacgagttcaagcagcttttcggactgctcatgaagcgcgtcgggcagtctctgtttgcatcgatcccggactctcgtatggccggggcacaagacatccgagaagaggtcatgagccgattcgctgagcgaattgccaaggactgcagcggccgcttcgctatgctggatttctttgaagtgcggttcgacctagcattcgcccggttccgcaagaccgtgctgaggcagattggtccggcctcggtccttacagtgccgttgtccacggatgacaatgagggtcaggacatttcaccggaagtcgaggcagcagcggccgacttcctcggaggcgaccctcaaaaaattgacgacccggctttccggttggagttggacgctgcgattgacgcattaccagacgatcagaggcgggtcgttggcttgctacggcaaggcttccagatcgactcgaaggacccgaacatcatgactatcgcgaagatgctccagtgcgatgagagaaccgtgcgcaatcgccgcgaccgtgcctacaagaccctcaggtctgttctgcaggaggacgcatga

SEQ ID NO: 328446 - DNA, 2226 bp, Pseudomonas aeruginosa
atgagccaaaccaatttcctgatcggtcgtggcgagctgctgacccatgacatcgtcggtccgaagcgcatgccaggcaaggccgaggtctacacgttcgcgcaggcgagggagcgaatggttcctcagttccgcagtgcaagcaaggcgctggacgagctatctgctgacgcttgcccgggcgacttcgcggtagcccggctgatgatgaatcccagcttcattgcgcgctcgtattttccgacaggactactgcgtagtacgggactggagtccatcgggagccgtaccgtcaaggtcaagccgcaggcctggacccgcaaggggcagccgcatgaaaccacaacgaccgaactgtttgtcgccggcaagcgccaggctttccgcaacctctcccgatggacgcaaaccattgaggcggaatccgacgagggcgaagatcttgcccacatcgaacagtttgccgcctttgcgccagcagagcgaatcgtgggcctcggcggcccgaaggatcgctttttcgaagtaggcctacatctgctaccggatgaagacccgggcctaatccagaaggctttcgtgaagttcgcgcagcaggaaggcgtgaaggtccacagtgaagtcgatttcatcgccggcaatctgtggttcgtgccggtcgagggcaagccgcgcgacattgagcggttggccagcttcgccttcgtgcgggtgatccgtcccgtgccaaagctgcgtggtatccgtcccttgcaacgcagtggtgggccctcagtgggatgcagcctccccaccgaacaggccctttcatccgaacctcgtgtcgccatcctggacggtggcctgcctaagcaccatccgatcggcccctggctgcgctcgtaccgcaagctcgacgaagacgccgacgatgatccggacggcccggagcatggcttgggcgtgacctccgccgtgctgttcggtccgatccagcccaacggtacggtcggcaggccgttcgccccggtggaccatctgcgcgtgctggaccaggaggcgggcggcgaagatccattggagttgtatcgcacactcggtctcatcgagcaggttctgctgtcgaggtcctacgagttcatcaacctgagcctgggcccagatctcgaagtggaggaccgggaagtccacgcttggacgtccgttatcgacgagttgctcagcgacggcgatacgctcatgacggtggccgttggcaataacggagaccgggaccgcgagctcggctacaaccgcgtgcaggttccatcggattgcgtgaatgcgctcgcggtcggcgcggccgacgacaccgatgctggctgggcacgcgcgccctacagcgcgatcgggccgggccgcagccctggggttatcaagccagacctgatggcgttcggtggcaacccagcagccaaatactttcatgtgttggcgccgaacgtgaagccggtgctgacgccgcagttgggtaccagcttcgcggctccgtacctgctgcgtagcgcggtcggcgtacgcgcgatcctgggcggagatctgacgccactcgccatcaaggcccttctggttcacgcggccgatcctggcgagcatgatccggtcgaagtgggttggggcaagattcctgaggacaccctcgacattatcacctgcccggatggtgtggcccgcgtggtctaccagggcgagctcaagcccagtaagtacttgcgtgccagcctgccgctgcccaaggaaggactgctcggcaatgtgcgtctgaaggcgacgttctgctatgcctcacccaccgatccgcaggatgccgcggcctacaccaaggccggcctcgaagtcgtcttccggcccaacgacgagaagatcaaggatggcaagagcaacgcggataccaagggcttcttcgacttgaagaagttcgccaccgagcaggagcggcgttcggatcagggcaaatgggaaactgtgctgcacggagccaagaccttccgcggctccagcctcaagaaccccgttttcgacattcactacaacgcccgcgacggcggcggccgggccaccactggtgccgagaagatccgctatgcactgatcctctcggtcgaggccccgaagcatgctgatctctacaacgacatcttgcgtgcctatgccaaaaccctcgtgccgatccagccgcaggtgtccttgccgattcgtgttcggtga

SEQ ID NO: 328447 - DNA, 1155 bp, Pseudomonas aeruginosa
atgagagaagagcattcagatttagcccagatggtccgcctggctttggccgagcagagtgaggatgtgcgcctgttcacggcgcggctagtccgcaagtaccgagggacggcgcccgacttggccgagcagctcgaactgttcctgaagtcgaagccagtacgcagtgtctctcccatgcgcaagctgtcgcctcagccgccaacggcccacgccttgccggttgacgacgaatcccgtctctctctcctgaaggtgttcaaggacgaaccgacgacagatgcgccgctgctgtccggcgatgtcgaggattcactggggcaactcatcgccgagcgccggcagagcgatcgacttcaggccatggggctgacgccgacccgctcggccatctttgtggggccgcccggggtcggcaagacactcacggcccgctggctggccgcgcaattgaaggtgccgctgtacgtgctcgacctgacagccgtgatgagcagcctgctaggcaagagcggcaccaacctgcgggcggccatcgatttcgccaaacgcgagccttgcgtgctgctgctggacgaaatcgacgctatcgccaagcgacgcagcgatgacagcgacgtaggcgaactcaagcgcctggtcacggtgatcctgcaagaagtcgacgaatggcctgccagcagtgtattgctggcggccaccaaccacccggaactgatcgatccggcgctgtggcgacgcttcgacctggtagtccagttcaagacgcccgatgaacaggcagtcaaggaagccatcaagcgattcctggggccggactacgccctttttgcccgttggatcgacatcctggtgtttgcattcgccggccattcgttcagcgacatcgagcgcgacgtgcagcgcttccggcgtgccgtggcgctgggcacgaccaccgacgctgatctggtcgaagacttcatgaaggcgcgtgctttggcgctcgataggcagggccgcatcgacctggcagtgatgctggccaagcagacccgcctgtcccagcacactgtttccgacatcaccggggtgagccgggacacgatccgaaagtacaccaatgagacgtctgcggtacgaaaggccgcacaacggagaaaggctgacgcatga

SEQ ID NO: 328448 - DNA, 972 bp, Pseudomonas aeruginosa
atgccatatcccgttgtgccgtgggagcacgttgcacccaattaccatcgaggtacgattctgctgggcaatggggctagcattgctgtttcaccgagttttggctatggctcgttgctggatcatgcccagcgagcaggcttactcggagctgacgtacagcaactctttggctttttccgaacctccgatttcgagttgatccttcgactggtctggcaagcgtcaaacgtcaataggtcactacagataccagacaatcgcacgcatcaagcctacctgaatgtcagagagtgtttgattcaagccgttcgcgacgtgcatcctgcatatgatctagtgagtggtcatttgccaagcatgtaccagttcctcagagggttcgatacggtaatttccttgaactatgacttgctggtctattggacgatgacctatggactcgacattcaggacggacatctattcaaggattgcttcctggggaatggcatgttcgacgatgcttggcagagatttcgagccccctatagggaacggactaacaccttggtgttttatccgcatggaagtctggctctgtgccgaactgcagtggagcaggagttcaagattcacaacgctggggaaggtttgctggaggccatccttgcggagtggcgcagtgagcgcgttgtgccgctgtttgtcagcgaagggacgatgctgcagaaagtttcctctattcagaacagttattacctttctacggtgtaccgggaggtacttacgtcacagcggttcacattgacgttattcggctggggactcggggagcacgatcggcatttattgcgacggatgcgcggaaccggcatccaacgggtggcagtctccgtttttggtggcaatcaggtctattgcaaccatgcctaccaagtcattcaggatgggcggttgcaggagctgagtgcaacacggtcattgaattga

SEQ ID NO: 328449 - DNA, 1311 bp, Pseudomonas aeruginosa
atgcaggcgctatatctgctggcgctgtctcctgtcgcagaaacccggggcgatccgaatagctacggcttcaggatcgaacgctccacggcggacgcgatggcgcagttgttcgtatgcctatccaagcgagcttccgctcaatgggtgctggacgcggacatcgaagggttcttcgacaacatcaaccatgattggctgataaggaatgtccccacggatacacgagtactccggcaatggttaaaggccggtgttgtacaccgagggcagttgcacgcaacggatgcaggtacgccacaaggggggatcatctccccaaccttggcaaatctggcactggatgggctggaatcactcctcaagcaacatttgggggtgacgagggcgaagaagctgaaaatcaacgtggtgcgctacgcggatgatttcgtaatcactggagcctcctcggaggtactggagaacgagatcaaaccctgggtagagcagttcctggccgtacgcgggctgcggctttctcccaagaagacccgcatcgtccacatcgacgaaggcttcgacttcctcggatggagcttccggaagtacgacggaacgttgttgatcaagccgagcaagaagaacaccaaagcgttctacggcaagatcagggaggtgatcgacacccacaagacgagtaagcaggaggacttgatccgactgctaaatccaatcctgcgggggtgggcgctttaccatcagccagtagtggccaaacaggcgtatagccggatggataacagggcgtttgttaagctctggcgctgggccaaaaggcggcatccaaacaagtccctggactggatacggaagaagtatttccgtccacaaggggaacgcggatgggtgttcgccaccacggttctggaagcgaacggaacaaaacgggaagtcgagttgtaccagcttgcagggacaccgatcgagcggcacaaaaaggtgagtggggaatacaacccctacgacccgaccatggaggcggcaggcgaaaaactgcgcatggaacggatgctgaacaagctgaagtaccggaagcaaatcgccagtctattcaccagccaaagtgggttatgcgcgctatgcaaacagccgatatccagggaaaccgggtggcacgatcaccacattatctaccgctcacaaggcggtggagactccctggagaaccgggtactattgcaccccatttgtcaccaacagctccacgcacgtggtctgcatgtgagcaaaccggcccccttgggggttttggataggcctgagccgtaa

SEQ ID NO: 328450 - DNA, 135 bp, Pseudomonas aeruginosa
atgaatgagatgagccaagataccttcggcataatcatgctcaccggcttgcttctcgtctgtttagggatggcagcctgggcggattggccgaggatcaaaagctacctcaaacgaccgccctccaagcactaa

SEQ ID NO: 328451 - DNA, 966 bp, Pseudomonas aeruginosa
gtgaccagcgacgccgccggcaacctcacccaggaccgcgccgcacgcaaactggcctacgacacccagggccgcctgcaaagcgtcagcctcgacggccagcaggtcgccgaataccgctacaacgccctcggccagcgcatcgtcaagctcacccccgagagcgtcaccacctacctctacggtcccgacggccagttgctcggcgaagccgaacacgacggcagcggccggaaactgcgagcccagtactacctgtggctggacagcctgccgctggccaccatcgacgccgactacgacgcccagggcaaggtcggcaacccgaccctgctctacctccatggcgaccacctcgacaccccgcgcctggctaccgacgccagcggccagatcgcctggcagtggcagtccgacgccttcggccgcggcgaagcgctgagccagggcagcacccgggtcaacctgcgcttccccgggcagtactacgatgcggaaagcgggctgcactacaactacttccgcgactatgatccggagactgggcggtatgtggagagtgatccgattgggttggccggcggcttgaatacgcttggatatgccggccaaaatcctgtaatgcaccaagatcctgatggcttggcatttatgcttttagctctcccctttgcaggtggaaccagcctaggctctgcgctcacatcagctacagcattaggaataggggcttgggggctaaccacccttggtgactcccccgtgcaaatggctgctccagggaacgtagctgattcgcaaattgttcgagattacggcgaaaacgcatctcaagcacgccagtgtggaggtaaagcccctgatcgatgtgaatggcttgagcaaaacaaaaataactatcgccctgaccaggttaaggcaacccaaaaagcatggggatgtcgtagaagtaggcatggtcgttaa

SEQ ID NO: 328452 - DNA, 186 bp, Pseudomonas aeruginosa
atgaacggcgtgttcctggcgatcggcgcgctgctgccgatctgcctggccggcggtgcgctgctcggctatgcggcggtgcgcttccgcgtccagggcgatccggtcgccgagcaggtcaacgccctgttgccgcagacccagtgcggccagtgtggctaccccggctgcaagccctacgcctag

SEQ ID NO: 328453 - DNA, 2568 bp, Pseudomonas aeruginosa
atgaccgacctctctcagcacacgccaatgatgcagcagtacttcaaactgaagcatcagcaccccgaccaattgatgttctatcgcatgggcgacttctacgagctgttctacgaggacgcgaagaaggccgccaagctgctcgacatcaccctgaccgcgcgcggccagtccggcggcaaggcgatcccgatggcaggcattcccttccattcggcggagggctacctggccaagctggtcaagctcggcgagtcggtggcgatctgcgagcagatcggcgacccggccaccagcaaggggccggtggagcgccaggtggtgcggatcatcacccccggcacggtgagcgacgaggcgctgctcgacgaacgccgcgacaacctgctggcggcaatcctcggcgacgagcgcctgttcggcctcgccgtgctggacatcaccagcggccgcttcagcgtccaggagataaaaggctgggaaaccctgctggccgaactggagcgcctcaacccggccgagctgctgattcccgacgactggccacagggcctgccggcggagaagcgccgcggcgtacgtcgccgcgcgccgtgggacttcgatcgcgactcggcgcacaagagcctctgccagcaattcggcacccaggacctgaaaggcttcggctgccagaacctgaccctggccatcggcgccgccggctgcctgctcgcctacgccaaggaaacccagcgtaccgccctgccgcacctgcgcagcctgcgccacgaccgcctcgatgacacggtgatcctcgacggtgccagccgccgcaacctggagctggatatcaacctcagcggtggccgcgagaacaccctgcaatcggtggtcgaccgctgccagaccgccatggccagccgcctgatgagccgctggctgaaccgtccgttgcgtgaccgcgcggtactggaagcccgccaggagtccatcgcctgcctgctggaacgctaccgcttcgagaacctgcaaccgcagctcaaggaaatcggcgacctcgaacgcatcctcgcccgcatcggcctgcgcaacgcccgccctcgcgacctggcgcgcctgcgcgacgcgctggcggcgctgccggacctgcagaacgccatgaccgaactggaagcgccgcacctgcaggcgctggccaccaccatcggcacctatcccgaactcgccgaactgctggccaaggcgatcatcgacaacccgccagcggtgatccgcgacggtggcgtgatcaagaccggctatgacgccgagctggacgagctgcaggcgctgagcgaaaacgccgggcaattcctgatggacctggaagcgcgcgagaaggcccgcaccggcctgcccaacctgaaggtcggctacaaccgcatccatggctacttcatcgagctgccacgggtgcaggccgaacaggcgccggccgactacatccgccggcagaccctgaaaggcgccgagcgcttcatcacgccggaactgaaggccttcgaggacaaggcgctgtcggcccagagccgcgccctggcccgcgagaaggcgctctacgaagagctgctggaacgcctgatcggccacctcgctccgctccaggacagcgcctcggcgctggcggaactggacgtgctggcgaatctcgccgaacgcgcgctgaacctcgacctgaatcgcccacggttcgtcgaacacacctgcctgcacatcgagcagggccgccatccggtggtcgagcaggtgctggagacgccgttcgtggccaacgacctggcgctggatgccgacacccggatgctggtgatcaccggtccgaacatgggcggtaaatccacctacatgcggcaaaccgcgctgatcgtgctgcttgcgcacatcggcagcttcgttccggctgcacgctgcgagctgtccctggtggaccgcatcttcacccgcatcggctcgtccgacgaccttgccggcggccgctcgaccttcatggtggagatgagcgaaaccgccaacatcctgcacaacgccaccgacaagagcctggtgctgatggatgaggtcggccgcggcaccagcaccttcgacggcctgtcgctggcctgggcagcggccgaggacctggcccggactcgcgccttcaccctgttcgccacccactatttcgaactgaccgtactgccggaaagccagcccgcggtagccaacgtgcacctgaacgcgaccgagcacaatgaacgcatcgtgttcctgcaccatgtactgccgggaccggcgagccagagctacggcctcgcggtggcccagttggccggcgtgccggccccggtaatccagcgcgcccgcgaacacctcaagcgcctggaaaccaccagcctgccgcacgagatgccgagccagcagagcggcaagcccgcctcgccgatgcagagcgacctgttcgccagcctgccgcacccggtgatcgatgaattgtcgaggatcaatcccgacgatatcagcccgcggcaagctctcgatctgttatatgcatggaagatgcgggtctga

SEQ ID NO: 328454 - DNA, 246 bp, Pseudomonas aeruginosa; identical to SEQ ID NO: 199455

SEQ ID NO: 328455 - DNA, 1281 bp, Pseudomonas aeruginosa; identical to SEQ ID NO: 247974

SEQ ID NO: 328456 - DNA, 993 bp, Pseudomonas aeruginosa; identical to SEQ ID NO: 247975

SEQ ID NO: 328457 - DNA, 705 bp, Pseudomonas aeruginosa; identical to SEQ ID NO: 199452

SEQ ID NO: 328458 - DNA, 1368 bp, Pseudomonas aeruginosa
atgaacgacgtgaccatcatcgaccgtttcctcgatacgttctcgcgctacatcgactcgggcttcggcttattgcagggcgaagtggcatttctcaccgccacgctcatcgtcatcgacatgacgatcgctggcctgtattgggccatgagccacgccaccggccagggcgacgacgtgatcgccaagctgctgcgcaaggtgctctgtgtcggcgcgttcgcctacatcatcggcaacttcaactggctggcgagcatcgtgttccgctcgttcgccggcttgggaattaccgctaccggctcggccatcacgatggagaacttccttcagccgggccggctggcgaagaccggcatcgacgcagccgcgccgattctggaacagatcggggacatggctgggttccccgaggtgttcgtgaacatcgaccctatcgtggttctgttcatcgcctggctggtggtgatcctctgcttcttcgtgctggccgtacagcttttcatcacgctgatcgagttcaaactgactacgctcgccggcttcgtcttgatcccgtttgcactctggaacaagacctcgttcctcgcggaaaaggtgctaggcaacgtggtgtcgtcaggcatcaaggtcttggtgctggccgtcatcgtcggcatcggttcaggcctgttcgccgagttccaggtgcatcccgacgaaccatccatcgaccacgcgctggtcgtgatgctggcctcgctcgcgctgctggcgctgggcattttcggccccggtatcgccaccggcctggtgtccggtgcgccacagcttggtgcgggcgcgatggctggtgctgcggtcggggctgtcggcaccggcgttgccatcggcgccgccgtaacgggcgtgggcggcgccgtcatggccggggcacgaatggccccggcggccgcaaagctggccggtgccggtgcgcgtgccgcgacttcggcggccggcagtgcccgatcggcgttccaggccggttccgctgcggccggcggcggtgccaagggcgcggcggctggcctcggcaatgtcgccaagactggcgcacaagccgcaggccgcagcgtcacctctggtgcttccgctgttgggcagaaggtggccgactccttccgcgctggctggaacggcacagaagccggcagcgacggtgctggccccggccagaccgcagacggcaccgcaggctcgcagaagcaagagcaaccggcctgggccaagcggatgcaccgccgccagcaggctacccatgccgcgaccactgccgcccacacgctgcgcggcggcgacggcggcggctccgggcaaggcccgagcctgcgggattccgatacctaa

SEQ ID NO: 328459 - DNA, 327 bp, Pseudomonas aeruginosa; identical to SEQ ID NO: 199450

SEQ ID NO: 328460 - DNA, 744 bp, Pseudomonas aeruginosa; identical to SEQ ID NO: 199449

SEQ ID NO: 328461 - DNA, 2451 bp, Pseudomonas aeruginosa; identical to SEQ ID NO: 199448

SEQ ID NO: 328462 - DNA, 387 bp, Pseudomonas aeruginosa; identical to SEQ ID NO: 117516

SEQ ID NO: 328463 - DNA, 1071 bp, Pseudomonas aeruginosa; identical to SEQ ID NO: 199445

SEQ ID NO: 328464 - DNA, 477 bp, Pseudomonas aeruginosa; identical to SEQ ID NO: 199444

SEQ ID NO: 328465 - DNA, 906 bp, Pseudomonas aeruginosa; identical to SEQ ID NO: 199442

SEQ ID NO: 328466 - DNA, 531 bp, Pseudomonas aeruginosa; identical to SEQ ID NO: 199441

SEQ ID NO: 328467 - DNA, 237 bp, Pseudomonas aeruginosa; identical to SEQ ID NO: 149275

SEQ ID NO: 328468 - DNA, 318 bp, Pseudomonas aeruginosa; identical to SEQ ID NO: 199439

SEQ ID NO: 328469 - DNA, 906 bp, Pseudomonas aeruginosa
atggaaattcgacacctgcgctactttctggcggtggcagaggagctgcactttgcccgagccgcagagcgcctccacatagagacatcgccgctgtcgcgcgccatcaaggaacttgaggaagagttgggcgtagcgctatttgcgagaaccactcggagcacccgcttgactcgtgcgggcaggctcttctttgagagcgtgccgcgtgtcttcgcagctttgcagcaggcgcgcgacagtgtgaacgccgcagccaatggctttcattgccagctccgtattgcattgtctgatggaatcacgccatcgcgcctgcctgcgttgttggcgctctgccggcaggaagagccggaagtggaagttcgcttcttcgaggtgcctttggcacagcaaatcaagggattgtgtggcgaactgtacgatctcggcttcgctcaatcggatgaagtcggcgaaggcatcatcgccgtgccggtgtggagtgaccctctgatggtagctgtgcccgcacggcaccccttgctatcccacaaacagattcccctagaagagctgttgcggtatccgctggtgctctgcgacgcggtggcgtgtgagggccatgctcggcaagttgaacgggtgctacgtcgcgtggacatagagccactgattgccgaacgcgtgacttccagcgatctaatgatggtcctggtttcggcgggacttgcactaggcctcacaggaggcgcgcatatcacagccagcagggaacagggggtggtcgcacggccgctgactggacgttcgccaatgctcacgacctatctactacggccggccagcgagccgtcagaaatgctgactcgcttcatggaacgcgttcattcgatcaaatctccagatgccaaaggtcggcggtaa

SEQ ID NO: 328470 - DNA, 1404 bp, Pseudomonas aeruginosa; identical to SEQ ID NO: 199437

SEQ ID NO: 328471 - DNA, 642 bp, Pseudomonas aeruginosa; identical to SEQ ID NO: 247992

SEQ ID NO: 328472 - DNA, 1167 bp, Pseudomonas aeruginosa; identical to SEQ ID NO: 247993

SEQ ID NO: 328473 - DNA, 3105 bp, Pseudomonas aeruginosa; identical to SEQ ID NO: 247994

SEQ ID NO: 328474 - DNA, 621 bp, Pseudomonas aeruginosa; identical to SEQ ID NO: 199435

SEQ ID NO: 328475 - DNA, 1119 bp, Pseudomonas aeruginosa
atggtcggcggtgatcacaaatggctggcgggtggcgactggacgatagagcactacgccagtctggcaaaatccgtgtccgccgcccgcatcagtcatgccgaggggtacgccactcccttactcgactggacgcaagtccagagactggacaccgccggcgcggctctgctggtggaaattctcgggccagactcgatactcgaccggccggaggcagctccaaatctgtcctcggatcgcctcgccctaatgagagcgctggccgccgctgctaccgatcagcagaagacggagaaagcagcggtgagcgggaatcctctgctccgcggtctgggacgcataggcctgaccttggaacagggctgtcgtgcgtgtcttggtctggccgggttcgtgggccagatcatcgaaacatggagccgtaccgttcgtcacccgcgtcgctggcgcgcgacctcggtgatcgctcaaatccagcgatcagcggtggacgccattcccatcgtggcgctactgagcttcatggtaggaatggtggtggcgttcctgggagcaacggtgctggccaacttcggtgcgagcatcttctcggtgcatctggtcgccttctcgttcatgcgcgagttcggagtgctgctcccggccatattgattgcaggccgtaccgcaagcgcgtacaccgcccaaatcggttcgatgaaggcaaatgaagagatcgatgcgcttcgctccaacgcgctcgaccccatcgagttactggtgctgccacgcgtgctggcgcttcttgtgtccttgccactgctcaccttagtaggcatcttggctggcattgcgggcggcgccaccgtatgcgcactgagcttggaaattcctcccgcacagttccttgccatcgtgcaggaaaaaatcgaggtgcgccattttcttgtcggaatgagcaagtccccgctcttcgcggtgatgatcgccgctatcggctgccatgaagggttcaaggtcgccggtagcgctgagtcggtaggcgaccacacgacgtctagtgtcgtgcaatcaatcttcatggtgatcctgatagacgccatcgctgcactgttcttcatggagatgggctggtga

SEQ ID NO: 328476 - DNA, 822 bp, Pseudomonas aeruginosa; identical to SEQ ID NO: 199433

SEQ ID NO: 328477 - DNA, 930 bp, Pseudomonas aeruginosa; identical to SEQ ID NO: 199432

SEQ ID NO: 328478 - DNA, 696 bp, Pseudomonas aeruginosa; identical to SEQ ID NO: 199431

SEQ ID NO: 328479 - DNA, 600 bp, Pseudomonas aeruginosa
atgacgacccaatccaacaccacatgcacgcacgaagtcgcgccgcatcctcgctcgcgcctgcgcgctcgcatcgtgctggcgggcttcgccgccgtcggcttcgctgcgctggcctgggcggctttcgtgtcgccgctgccgcgtctgacctacaacccgtccgacagcgtggcggtcggctggtatcgcatcgagccgctcgacctgcgcaccgcctcgctgccacgtccgttgtccgtggacagcattgtgctggtgccgctgcccgacagggccgccatgctggctgcgcagcgcggctacctgccgacccgcgttccgctgctcaaacgtgtgggcgcagtcgcgccgcaacacgtttgcatcgtcgccgggcaggtacgcatcgacggcgtgcctgcggccgccgcgctgcctgccgaccggctgggccggccgctgccatccttgcagctttgccgccgcctcgaaccgggcgagctgttcctgttgagcgtgaccaatccggcgtcgtttgacagccgctatttcggcccggtcagcgcatccgccgtgatcggcatcgcgcacccggtctggctggagacacgcccatga

SEQ ID NO: 328480 - DNA, 549 bp, Pseudomonas aeruginosa
atgaacgcatccgccttgcctgccgctcaggcggcgacggctgctgcgctgccgccttcgctttcgacgctcgccggccaggccggcagcgtgccgctgactcgcgtatcgctcgcctacattgaaccgcgattcaagctctacctgcgtttcggcgaaccggcgcgcatgctgcggctcgaccgctggcggcgctgcgcggtgttcctgccgcgtgcaatgttctgccgcgtgcgctgggaagcaaacgactacggcacgatccgttggcagctcatggtgatgcaagccgccacgccgctggacgacatgcagtgcatccccggcgtgcagccgggcgcacgcctgctgctgcacgccgaaggcgaaaacgcggtgcgtgtcgtgctggaacgcatcgacggcatcgaagggcaagacatcgccgccatcgacgtgtcgcccgcgtactggcgcacgctgggcaaccgtctggcggcccgcctagcgctgcccgaatacaccgccgagcggcacgccgcttggctggccggaagggcgctgccatga

SEQ ID NO: 328481 - DNA, 264 bp, Pseudomonas aeruginosa
atgagcagcctgcgcagcaagcgcgtcggcatcggcgcacgtccgcccgcgaatccgcacgccgaggcgtggattcgccagggcgatgccgatgcgctcaataagggcgacctctacaccgcacgcttgaccctcgacgtgacgcccgcgctgcgcgcgcgcatcaagatcgccgctttcggccagggcgtgaccgtggccgaactgctgcgcggactactggaacgagagttccccgacaaccgcacggagaacctgccatga

SEQ ID NO: 328482 - DNA, 639 bp, Pseudomonas aeruginosa
atgatcttcgcgtttctcaaccagaaaggcggcgtcggcaagaccacgctcgccacccacatcgccggcgagctggcgctgcgtggtctgcacgtcatcctgctggacgccgacccgcagggttcatcgctggactggacgcagcgcagaagccagcagggcttgccacggctgttcagcgccgtgggcctcgcccgcgagacactgcatcaggaagcgcccgagctggcgcgccgcgccgatcacgtcatcatcgacggcccgccgcgcatcgccgccctggcgcgctcggcgctgctggcggccgagcgcgtgctgattcctgtgcagcccagcccgtatgacctgtgggccagcgccgagatggtggcgctgatccgtgaggcacaggtgttccggcctgcgctgcgcgcggccttcgtcatcaatcggcgcgtcagcaccaccatcatcggcagggaagcgcggcaatcgctggccgaacagccgctgccggcgctgcgcagcgaagtgcgccagcgcatcgtcttcgccgatagcgtggccgctggccggctcgcccgcgagacagcgcccgacagcgccgccgcacgcgagatcgccgcgctcgccgatgaactgctgcggtggccgacatga

SEQ ID NO: 328483 - DNA, 855 bp, Pseudomonas aeruginosa
atgtccagcccatcgctgccgccggggcagcgatcgcagcagcgggaacagctcgacctgttccgcgcgttgccgggcgacatggcgccgcgcgacagccaggacttgatggcctttccgttcttctcgctcgccaagtcgcggcgcaccgagccgatcgacttccgggcgggtggcatcaccatccgcgtggagggaacgcaggagcacggcatcgcaacgatctgggatgccgacgttttgatttgggcggcctcgcagatcgtggaggcgcgcgacgcaggcattcgcccgtcgcgctggatacacgccacgccctacgaaatcctgcgcttcatcgggcgcggcacgtccctcaacgactaccagcgtctgaaagccgcgctcgaccggctgcaatcgaccagcgtggcgacttccatccgcgaaaccactgggcggcgcttgcaccgcttttcgtgggtgaacgaatggcgcgagctggccgacgccagcggcacgccgctgggcatcgagctgatcctgccggactggttctatgccggcgtgctagatgccgccctggtgctgaccatcgaccctgcctatttccgcttgaagggcggcatcgaacgctggctgtaccgcctggtgcgcaagcacggcggacggcaggagcacggctggcaattcgacttccggcacctctaccgcaagtcgggcagcgcggcccgcttctcggacttcgcctacgacctgcgcatgctggtggcgcggcagtcgctgcccggctacgtcctgggcatcgagccgatgccgggcgaaaggctggaactgctgaccttccggcccgtgccgttcacggcacggggataa

SEQ ID NO: 328484 - DNA, 285 bp, Pseudomonas aeruginosa
gtgcgacccgctcccttgcggcctgccgccgctgctgtcgctgcgcccgtgcagccccaacgctacctgaccaacgacgaagccgccgaatacctgcggctgtcgccgcgcacgctggagaaacagcgcgtgatcggcggcggcccgaagttccgcaagttcggccgccgcgtcatgtacgcggtgtccgacctcaatgcctgggccgaccagcgcagctacgaggccacatccgacccggaatatgccgagcgtcacgcgggcgactaccgtgatggccgctga

SEQ ID NO: 328485 - DNA, 333 bp, Pseudomonas aeruginosa
atggtctgtcatcttggtttttacggggaaaccaagttggtgacagcgaaacactcattggcgacggcaatacggacgatcaggaaagcgcgtggcttgagccaggaagcgttctccgacgtgtccagccgcacctacatgagttcgctggaacgcgacttgaaaagcccgaccatgcacaagctgaccgagctgtgcgaggtcatggacgtgcatccgttgacgttgctgacgctggcctatgctggcgacagcacgcgcaaggccgatcagcttctggtgcaggtgcgccaggagcttgaggcggtgttgaaggaacgcgacacgccatag

SEQ ID NO: 328486 - DNA, 315 bp, Pseudomonas aeruginosa
atggctaacatcggcaccttcaccgcagagaaagacggcttcaccggccagctccgcaccctgaccctgaacgtcaagatcaagctgattcccaacgacaagggcgacaccgagaacgcccccgacttccgccttcaggcggccggccacgacatcggcgcggcgtgggagaagaccagcgaagccgggcggccctacgtgtccgtatccctcgacgacccttcgttcccggcgacggtctatgcccgcctgatcgagaacgaagacggcacgcacgacctgatctggtcgcgcagcaagcccaaggcggcctga

SEQ ID NO: 328487 - DNA, 222 bp, Pseudomonas aeruginosa
atgtcgatgaaatggaccgagcagcgcttgcgcaaggctctcaagcagatggcgaacaatcatgaatcggctgcggtcgaggtcatgcgcgccgtcgagcgggcgaacgatccgaagctggcgcagcgcctgctcgaggtgatcgagcagatgcaccaggatgccgatgcgctgcgctccatcgacgacgaaatcgccagcggcgtgatccgttgccaatga

SEQ ID NO: 328488 - DNA, 264 bp, Pseudomonas aeruginosa
atgctggtgattcgattcaagggctggtcggtgaaactcgaccaccaggtgggcagcgctgggaagttcggcatctggtcgttccacggctcggagagcagctacgtgccgaacatggagtcgattctccggcatgctgctattcggcctgcggagccgaaagaaggcggggaggtcgaggtattcatctgtgattcgcgcatgccgcaggatgagtggcggcctgtcggtagcggcgttgcggcctacgagtcggaccgctga

SEQ ID NO: 328489 - DNA, 261 bp, Pseudomonas aeruginosa
atgagggtggtgctgatgctggtgatggttgcgctggcgggatgcgccggccggcaggaagccgagccgcgcacggtgcgcgtagaagtgccggtggcggtgccgtgccgggtgccggcggtggaggtgccggcatgggcagcggctgggctgaagaagagcgacgatctccagaccaaggtccgtgcgctgctggccgagcggcggcagcggatcgggtatgaagcccaactgctggctgccaacagagcatgccagtag

SEQ ID NO: 328490 - DNA, 369 bp, Pseudomonas aeruginosa; identical to SEQ ID NO: 324023

SEQ ID NO: 328491 - DNA, 630 bp, Pseudomonas aeruginosa
atgcctatcactgagcagcagttgctgcatgtcctcccgaacgccggccctcgagccggcgtttttgttggtgcgctgaaccgcgggatgacgcgcttcggtatcacttcgccggtgcgcgcggcggcgttcctggcgcagatcgggcatgagagcgcccagttgacccggctggtggagaacctcaactacagcgcccgcggcctggctgcgacctggccgagccggtacctcggcgccgacggccagcccaacgccctggcgcagcgcctggcgcgcaacccccgagccatcgccaacaacgcctacgcctcgcgcaacggcaatggcgacgaggcgtccggcgatggctggtgctaccgcgggcgcgggctgctgcagatcaccggccgggcgaactaccgcgcggccggcgccgggctgggccagccgctggagcaggaacccgagcttctcgagcaaccggagtgggcggcgatctcggcggcctggtggtgggccagtcacggcttgaacgacctggccgaccgcggcgagttcgccgccatcactcggcgcatcaatggcggcacgaacggccaggcggagcgcctggcgctgtgggagcgggccaaggcggtgctgtcgtga

SEQ ID NO: 328492 - DNA, 177 bp, Pseudomonas aeruginosa
atggctaggctgtatgacagcagctcggaaaaggatttcatcgggtatggatttatcgatgttgagaagaaaatgcttttgattgaggtggacggaaagccaatttcatctaactatccgttcaattgggataagggatgctcattggctataaactttaactacatgacgagttaa

SEQ ID NO: 328493 - DNA, 2004 bp, Pseudomonas aeruginosa
atgacttacgacaccagcgaccttccgctcggctcgaaggaccctcgcgttctgtacgaaaacgctgagcatctcgatttggcaatgaactcgctgaatcaagatcgctggatggaccgtgggcctcagcgtcctccggttgcacgatggacctggtggggaatcgagcagtatgtcatgcagtggctggccgctcagggatttgaaccgaccccccttgaatatgtcgacggctctccgctgattgttgatcgcccgactcaactgattcagcgtgacgggaacctgtatagcgttcaactgccagcagatttcccggtcagcctcagcgggaactgggccaccgacgagagtctgctggttgcccaggtcgaccgctcgctgcgtcagcagttgagagctccgggtggcgccggaatgatgggttacgatccggcggaaacgtacccatcagatacggttgggtatgcaataaatgagattgatggaaaggcggaggaggcatctaacttagcgacgactggcgcattcggtaacgcgcagatgctaaccagagtcagggcgcgaatctcgggcgcgccaactatgtatgttcttggtgattctatttctcatggagcttttgccgggagaatataccggaatggctgggtgaatctcctgcgaagaatgctatacaacgagatcggcactctaacttatggattcacaccgctgatgtctctctttgacggcgctgggaatgcatctaatgaaattcactctatcgacttcgcaaaaacatcaggagaccactcttgggtttatagatcgaatgaaagcggatcatatgttcctcaagggttgtcgtgggtttcaaatgaggttggcaatatcataaggtcgactatcccaacatttcaggacgcatgcacggtttactacgtcgcaaggcctggcgggggaacgtttgacataaaagttaacggatcggtagtagctagtgtgaatacgcaggcctcagttgtaaacgctttgcaaggccaagctgtaacactgaaagataatgggtttgggaaatgtgtaatcgaggttgttactacatctgccgcaactgttgagttttctggtttttcatatgcgaacgcctatagtcaatcggctctgcataatttttcaaactctggccgtaggcttcgctgggttgatgagtctgtcatcagttcgatgatggcaggaacctctctattcatcatggcactgggtatcaatgatgcgtcagacaatgagtctgatacggcgtactatgaggagttcgtaaaaagaattgattggctgataagctattcaaatcaaaatagcgtacccgtagtggtacctgattttttgtggagctacccagatacaaacaatacaagacagcagctaaagcgcctagctgacgaaacgcagggcctatacatcccgtttgctgacttctttagaaaaggatcgcagccagcagacgcaaattatcttgtaaataccattaaactattttcggatggctcccatccaaacgttcatggacataagtatattgcggagactattgctaagaagcttggtctttcagttagttcgaaaaagcaagctctagactatcatgattggtggatgccgatatcaattacaagtacgacaataaagaatgctgactttggttcgatacctccgagccgagtgataactgcaactcgaaacaatggcgcgaatgttctttttagattttatgtctctggcgtctctgggacttccgctgttgcgttctctggagcatactcatctgactctggcgtgttcgttgatcttccagtaactggacagatggagcttgaggcaaatggggcaaattccggagttgtaaatatctctcaagcaggagtaacaataaccccaaattcatcgaacacgaaaagcactcatcggtttgttgttagcgttgcacgtggggagcgaccgtttgttgatggtgtgatttactag

SEQ ID NO: 328494 - DNA, 408 bp, Pseudomonas aeruginosa
atgccgaacagatacctcaccgccatctataccgagggcgggcgggccctgccgtgccttgactgctggggcctgacgctcatcgcgcgggttgagttgttcggtctgccgatgctgaccgacttcggcggtgtcacgcggcgcaccccggtttcgatgcaaagggcgtgcgatgcggagatccaccgcgcgctcgagcaatgcgagccaggacctggggtcatcgccgcggcctacagagggcggctgctcgatcacgtaggtctgctggtcgaagcggatggacgcctccaggttctcgaaatcaacccgggaagcggggtttcactcaccccgctccagaagttctccgacaaatactccaaggtggtcttctaccgtgatcgaaatctacccatcgctccttga

SEQ ID NO: 328495 - DNA, 492 bp, Pseudomonas aeruginosa
atggcgacggctcttgagcggttctatgcatcggatgggccggatcttccgattgcaacgatcgagattactcggccctccaggcccgatccgatcctcatctgtcaggggttcaaagacctgacctgcatgacagaagacggacggctactgacattcatcgctggtgcgatcgacgtatcgattccgaagcgagacaacagcggaaaccagaacgttggattcgcaatcgacaacgtgactggctttgctcagcagtatatttccgaggccatcgacgccggagagccggtcacgcttgtcctgcgaatctacctcgaaagcgacctgactgcgccggccgagcggccgtatcggatgcgcgtgaaaggggctgaattcgaaagcctcactgtccaggtggaggccggctactacgacctcatcaacaccgccgcgctgcgccacatctacaacgttagcgagttccctggcctcaaatactggccctga

SEQ ID NO: 328496 - DNA, 480 bp, Pseudomonas aeruginosa
atgaagcagtaccccaatatctgcccgcctcagcgggagggctatgggcttactcctgtcagcccccttatccgcacggaaatgcagactggtagggcgaggcagcggcgtcacttcaccgcaactccaactatggcaagcgtgaggtggaggctcaacgacagcgaggcaatgctatttgaggcatggttccgcgatgttctagtggatggttaccattggttcgaatgcccgctaaagacgccggagactcccggtggtttgcgttcgtatgccgccagattcaccgacatctatgatggtccaaagctggtcagcggcagtatctcgctctgggatttcaccgccacactggagttgcgtgagcgccccatcatcgatcctgggtgggccgagattctgcccgagtacattctcctcgcggatatcttcgacatcgcaatgaacagggagtggcctcgacatggcgacggctcttga

SEQ ID NO: 328497 - DNA, 2451 bp, Pseudomonas aeruginosa
atggcatcacgcagcctggggacgcttacgctcgatctcatcgccaaggttggcgggttcgtggccggcatggagaaggccgagcgcacagcaaagaaaggcgctaaggaaattggcagcgccgccgatgccgcatcgctggcctgggggaagcttggtaaggtcgctgcgggcgccctctcaggaatcactgttggagcagttttcggtgcagtgatcagaaacaccaagcagatggagaaagagcaggcgcaactcgaagccgttctgcgctcgacgggagagtctgctggtttcagccgagaacagctgaacgaaatggcctcgtccatggagaggactagcactgtatctgccggagaaatcaaccaggcacagaccaacctgctggccttcactggcattgttggagagcagtttcctcgcgcgcttcaatccgccattgacatggcggcgcgcactggaactactgtaacgtccgctgccgagacaataggtcgtgcccttgatgttccatccaagggtcttaccgctctgagcaaacaagggtttcggtttacagaggaacagaagaaagctgctgaacagcttgaggcaactggacgcactgctgaagctcagggaattattctcaaagcccttgaggagtcatatgggggggctgctgcggcttcgcgcgatacctttggcggggccctcatggctctgcaaaacaccattgacggactgttgacaggaagcgaaggaagtctggacggtgccaagggtgctatcgatgatctcaatagggcattgagcgaccccgctacagcggaatccgtctccaaacttgtcgacctgctcgcgcagggagcgtcaaccgtagttgattccttgccgttcctgattgatgcgggggatggcgtggtgcgggtattcagtatcgcggccgatgccctggtaggcgtttttgccactgcgaccatgcacgcgcaggggctggccgcctcaatgttcgaaacgctttcgctgctaccagacgcccttggcggggatgatttcgcagctagagctgctgaataccgcgcaagtgctgccataaatctgggagtagccaaagaggctgctgacggcattcgagacgcgcttgagcgacctcttgctggatccgctatagcagatgcagccagcaagacgaaggagctgaataaggcgaagaaagagagcagggatctcgatgatgcagcgataagcgctgctgccaaagcggctggcgcaaggaaagaggccgaagctgccgcaaagcgtcagcagcaggcggtcgccagtcttatttcatccatgcaactggaggctgccactgttggcatgaccgccaacgagcagaagctttacagacttcaattggacggagcaactgcctctcagttagcgcaggcaaaggcagccattgagactgtcgagtccttcaagcaacaacagaaggcccaggaagattacaggaagctggtccaagacctcaggactgacgaagagcgcctgctcgatacaacgaaagagcgccttgctgttcttgacgcaatgcagggtctgagcgacgaggaaagaaatcgtgtcgcttcgcggatcgtgtctgactcgttctctgctccgccttctttcggtggcgcagacgctgtagtcgctgggcctcaaggtgaactcgacaagatcgacaaggcagaggaagaacttgagaagtggtatcaaacccaactcgatcttctgaatgccagtcgagaggcaaaagctgaattgactgctcaatgggatgagcaggaattgaagctaaagcaagagcacgaagatgccttggccgccattgagcgttcccgtcagcaagtgacgatgagcgccaatgagcagttcttcggaaacctgagcggcttggccaggactttcttcggagagcagtcggggctctacaaggcggcgtttgtcgccgagaaatcctacgcgattgcgaaaacactgctgaatgcgccaaagaccgcctctgatgcttattcagcgatggcggggattcctgttatcggtcccgcactggggattgcggctgccgctgcggctgttactgcccagcttgcccaggttgcagcagtgaagaacgtaaacctatctggcatggcccacgacggtattgatgctgttccggagaccggcacctggttactccagaagggcgagagggtgacgacggcagagacgagcgcaaagctcgacaggacgcttgatgacgttcgcgcaaatcagagcagcggcggagcgccgaccatcaacctgatcgaggatcgtagtcgtgcagggcaagttaatactcgccgccaggacgaccaatacatcatcgatgttgttgtggccgacctattcggcgatggccgtacatctaaggctatcggtagttcgttcggcatgcgcaggagcgggacatga

SEQ ID NO: 328498 - DNA, 255 bp, Pseudomonas aeruginosa
atgtgcgggattggcggcagaaccatcgcagaagctaagtcccgcctcagctatcgggagttcctgagctggtgcaagttccgcagcaagcgcgggagtctccatgtcggcatgagggtagagcgtggatcggcattgctcgccgcgctctacgccaatacgcacagcaaggagacgtacaagctgtacgacttcatgccgcatgaagaagagcccgtaatcagtctagatcaggcccttgagacctgggcctag

SEQ ID NO: 328499 - DNA, 360 bp, Pseudomonas aeruginosa
atgcatctgtcgattgattcccttaaagaagctggcgccttcactggcgcccccatcgaaaaagagatcacctggaagcagggcgacaaggaactgactgcaaccgtgtatgtccggcccttgtcgtacagcaccgctgtttctgaccttctggccatgaatggcaaggtggatggcgtagcgggtcggatcgctgcgtcaatcgtggatgaagaaggtaagccggtattcacgccagcagatatcaccggcgaggccgaccccggtcgtggcgcgctggatggaaacctgaccatcgccctgctcaccgttatcgccgaggtgaacaacctgggaaagacgaccagctcagcgaactag

SEQ ID NO: 328500 - DNA, 618 bp, Pseudomonas aeruginosa
atgaccaacgctttgccgcctgggctgaccgactgcctgctctggtctgaagagcttggcatgggcttccacccgcgccctccgatggactacacgggaccgtatttcgagaagtaccagctgcttgacgctaccccgatgggcgctgcgctgacccaggctcgtattgatctggtgcgccgtcactttgccggccaggtggtagacatcggtatcggcggaggccgtttcgtcaccgagtccggcgctatgggtttcgacgtgaacccggaggcggtggactggctgaaggcgcaggagctctactacgacccgtaccagcaccatgcagaagccgtgacctgctgggacagcctggaacacatcccggagccggagaagctgctcgaccacgttggcgagtggctgttcgtgtcgatgccgatctacaaggatcagaccgactgcctggcctccaaacactacaagccgggcgaacattgctggtattggagcctccctggcctggttgcctggtgcgagcggcagggcttcgaactggtggaaatgaacgaggtggaatcagaactcggtcgtgagggtatcaccagctttgcgttccggagagtccatggctga

SEQ ID NO: 328501 - DNA, 828 bp, Pseudomonas aeruginosa
ttgttcatccgcggaatgcttggccttggtgacaatatctacgcccgcgcattcgtgaagaagcaccttggagcctatctcgaaacgccgtggccccagctctatgcagacatcgatgtgaaatgcgtgcgtccgagtacccagctccgcacgcaggcgaagaacgtccagcgcccggcgcagtggcataagccattcggtggcggtcggctccgaatcgcctacggccagatgccgatcatccagggcttgcgacaagctttccggtgcgagcccggcgcgttcgatttgcccgacttcggcccgtcgccggtcgaggggcgctacgttctcgttcgtcccgcgacggtgcgcgctgagtggcgtgcagacacgcgcaacccactgcctgggtacatcgccagcgctgcctcagagatgcgccgaaggggctggagagtggtttccgtggcggacctggagccgggaaaggagtgggcgctcgctccacttccgccggctgacatccagttccacaagggcgagctgccggttgaacaactgctggcgctgctccagcacgcagatgccgtgattggcggcatcggctggatcgttccggccagcatcgccgccaaggttccggcctggatcatctgcggcggccagggcggatacaactcgccagaacacatcaccgacaagtgcatggacctgtcccgcatcaccttcgcggttcctgacaggttctgccgctgcaccatgaaacagcacaactgcgacaaaaggatcaccgatcatgaccaacgctttgccgcctgggctgaccgactgcctgctctggtctga

SEQ ID NO: 328502 - DNA, 321 bp, Pseudomonas aeruginosa
atgagcatgatcccgcttgatacagcaaagtccttccttgatgtgatccacgactgggatgacgccaagctccaattgctgctggacggggccgaagacgaggcctgccaattcatgtggcgccagtctcttgatggcctttgcaattgcgaagagagcagtgaggtagtcagcagcgagccaggcattccgcctagcgtggtcatcggagtgcttctcttgcttcaggccagctatcaggctgctccagaagaaatcgcaactctgcgcaaggcggccgaagtgaagctgatgccgtacagatgcggcttgggggtttga

SEQ ID NO: 328503 - DNA, 261 bp, Pseudomonas aeruginosa
ttggccatcgccaggggtgctaaacgcatcatcctgctgggctatgacatgcagaaaaccaatgggcaatcgcactggcacggcgaccacccgaaagggctcgggagcgccggcaagatcgccgaatggccgtccgagttcgagcgcctgaagcgcaacaacccgacaatcgagatcatcaattgcactcgcgaaacagcgctgacctgcttcgctcgacgcccgctggaggaagtgctgaatgagcatgatcccgcttga

SEQ ID NO: 328504 - DNA, 1188 bp, Pseudomonas aeruginosa
atgagcgacttcgaaaaacaaatcggcgaactgaacgccagcctcaagcaggtcggcgaccagatcaagtcccaggccgaacaggtcaacacccagatcgccaacttcggcgagatgagcaagtcggcacgagccgatgttgacaaacttctggtaacgcagggtgagttgcaagcacgactgagcgccgcggaacaagccatgctggccaacgagaagcgtgacggcggcgaagaagcaccgaagaccgccggccaaatggtcgcagagagtctgaaagagcagggtgttaccagttccctgcgcggttcgcatcgcgtatccatgccgcgctcggccatcacctccatcgacagctctggcggcgccctggttgctcctgatcgtcgccccggtgtcgttgccgctccgcagcgtcgactgaccatccgcgacctggttgcgcctggcaccactgagtcgaactccgtcgagtacgtccgcgagaccggcttcgtcaacaacgccgctcctgtttcggaaggcacccagaagccgtactccgacctcaccttcgagctggaaaacgcgccggttcgcaccatcgcccacctgttcaaggcaagtcgccagatcctggacgacgcatcggccttgcagagctacatcgatgcgcgtgctcgctacggcctgatgctggtcgaagaaggtcaactgctctacgggaacgggaccggcgccaacctgcacggcatcattccgcaggcacaggcctacgctccgccgagcggcgtagtggtgactgccgagcagcgaatcgaccgcatccgcctggcgatccttcaggcgcaactggccgagttcccggccagcggtatcgtgctcaaccccatcgactgggcgctgatcgagctgaccaaggacgccgagaaccgttacatcatcggtagcccgcagaacggcaccactccgaccctctggcgtctgccggtggtggaaacccaggccatcactcaagacgagttcctgaccggtgcgttctctctcggcgcccagatcttcgaccgcatggacatcgaggttctggtttccaccgagaacgacaaggacttcgagaacaacatggtcaccatccgcgccgaggagcggctggccttcgcggtttatcgccccgaggctttcgtgactggttcgctgaccgccagctga

SEQ ID NO: 328505 - DNA, 891 bp, Pseudomonas aeruginosa
atgactctgcgaaatcttccggcagcgccggaggctcgcccgcgctcgggcgtccagtgcgacctggcgccaaaagcgctggatgcatggcgtcctgagcttcgcgccgcgtccggcgataaccccgacaccaccatcaccatctacgagcccatcggttacgactggtggaccggcgagggcgtaaccgcgaaacgcattgccggtgcgctgcgcgccatcggcggcgatgtagatgtgaccgtgaacatcaacagcccgggtggcgacgtgttcgaggggctcgccatctacaacctgctgcgcgagcacaagggcaaggtcacggtgaacatcatcggattggctgcctctgccgcctcctttatcgccatggcaggggatgaaatccgcattggccgcgccgccttcctgatgatccacaacgcctggctgatcgccatgggcaatcggaacgacctgcgtgagatcgccgactggctggagccattcgacatgacgctggctgacatttacgcacagcgcacgggaatcgacatcgacgacatcgtaaagcagatggacgccgagacctggatcggtgggcgcgaggccgtcgacaaagggtgggcagatgccttcctggagtccgatgagatctccagcgctcccagcaaccgcagcgaagccatcctggccaagcgccgaatggatgccgccctggctcgcagcggcatgccgcgaagccagcgcaatgaactcatcaacgacttcaagaccagcatgcttggcgctgctggcgggggtggtgacaccccgaccgatatgcctggcgctgtcgctcctgacctctccgctgcactacgggcagcacaagacatcaccaaattcctccaaggagaatcgcaatga

SEQ ID NO: 328506 - DNA, 732 bp, Pseudomonas aeruginosa
atgctgcacatcccggcgtttacgctggatggcagagtcggtctctctgccatccggtatggcgtcgatgtcttcggttcggtcatgtcggcggaggatgccgccaacggcacattcaagaacggactgctccccacggtcgcattcaaggtcgaccgcattctccagcctgcgcagagggaggagttcagggaatacgtaaagtccgtatctggcgcgatgaacgccggaaggtcccctgtactggagcaggggatcactcctgagactatcggcatcaacccggtcgatgctcagttgctggagacgcgagagcatggggtgatcgagatttgcagatggttcggggttcctccctggatgattggccagaccgacaagggtagcaactgggggaccgggcttgaacagcagatgctcgcgttcctgacattctcgatcagttcgatcaccaatcagattcagcagtgcgtcaacaagcggctgctaactgcgcccgagcggattcgctattacgccgagttttcccttgagggattcctgaaagctgatagcgcgggtcgcgctgcctggtacagcactatggcgcaaaacggattcatgacccgcaacgaaggtcgccggaaagagaaccttccagagcttcccggcggagacatcctgactgtgcaatccaacctagtccccctggatcaactggggggggcaacgaaagaaagctctccgccgtag

SEQ ID NO: 328507 - DNA, 165 bp, Pseudomonas aeruginosa
atgaacatcgcaactggcctctacctcttcttcggcgtccttggtctggctcttttcgtagccggaaccttcgtgctgctggggctcggctgggcgctcatttccggtgcagcttcagcattcgctatcgcggcgttcattcgcaaggggctgaccagtgagtaa

SEQ ID NO: 328508 - DNA, 1692 bp, Pseudomonas aeruginosa
atgacccccagcgacattgcgcgacagtacgctagcgatgtcgtgagtgggggtatcgtcgcgtgccggtatgtgaagttggcatgccagcgcttcctgaatgacctggaacggcaggacgatgacgattggccatacgttttcgacgaggccaaggcagatcgcgccgtcaagttcatgcagctcatgcctcacaccaaaggcaaatggagcgcttcgaagtcgaagttggtgttcgagccctggcaggtattcatcgaggccaacatcttcggctgggtcaagaaggacaccggcaagcgcaggttccgtgaggtctatgaagaagagccaaggaagaacggcaagtcggcacgccttgccgctcgaggtatttacctattcgcggcggatggcgagtcgggagccgaggtctattccggcgctaccaccgagaagcaggcattcgaggtatttcgcccggcctggatgatggcgcacaagctggagagcctgcgcaaccggttcggcatcgagctttctggaaaccagaagaaccctggccccatgttcgtcatggaggacatgtcgaagttcgagacggtgatcggaaacccaggggatggtgccagcccccatgcggctctggtggacgagtaccacgaacacgacacagacgccttggtggataccatgcagacaggcatgggggcgcgggagcagccattactgtcgatcattacgacggcggggtcgaatctcggcggcccatgctacgagaagcgccgggacgtgatccgcattctcgaaggccagacgatcgatgagacgatcttcgggatcatctacacgatcgacgacgatgattcgtgggatgacccggccagcctgatcaaggccaatccgaattacggagtgtcggtattccctgacttcctcctggcccagctccagcaggccaagcgctcggcgtcaaagcagaacgccttccgcaccaagcacctgaaccaatgggtgggcgctcggacggtctggatgaacatgctggcctggcagcggcagaagcgcgacttcacgattgcggacatggccggctgccgctgctggatggctttggaccttgccagcaagaaagacgtggctgccctggtaatgctgttcgagaaagctggtcagttctactgcattccgcgcttctacgctccagaggccgccgctgaggaaaacgagaagtatcagaacttcgcgcttgagggtcatctgaccctgacgccagggagcatgacggactacgcattcatcgaggcagacatccttgatctggcaaaacagatcgacctgcaagatgttgccttcgacgactggcaggccaactacctgattacccgactctccaacacatccatcccggtcgtggacttcaaccagacagtgaagaacatgagcgacccgatgaaggaggtggaggcaagggtaatagcgcggacgctctggcatgacgggaacccagtcatgacctggatgatgggcaacgtggcggcaaagatcgacgccaaggaaaacatctacccgcgcaaggaaaacgacaacgaccccaactgcaagatcgatggcccagtgaccttgatcatggctatggggcgcgccctggttgccggagttgatgacggcgacgacttcatgaacgccatacggaatcccatcatcgcatga

SEQ ID NO: 328509 - DNA, 381 bp, Pseudomonas aeruginosa
atggcacgacacaaacagccggatgtcgtcgccaagttcaagggcgccgacaagaaaaaccctcagcgataccggaaagagtccgctcaaggtgagggtgaaattggcgatgcgccgatccatctccaggggccggcaaggcttgcttgggttgagctttgctcccaatcaatcaagggcgtcttgacgggctctgatcgaatcatcctggaggtcaccgccaacctgcttgctgagtacaggtcgaatccatcggagttcgctgtaggcaagtacacccacctgattggcaacttggcgaggcttgggctaaccccatccgaccgccagaagttcggcctggaaaagccgaaggagaaggacgagttcgaggatttctga

SEQ ID NO: 328510 - DNA, 219 bp, Pseudomonas aeruginosa
atgactgagtccgaggaagaggttcggctcctcctgcgcgatctcctcgatgagcagcgcaagaccaatcagctattgcaccttctgatccaggctctggccgaagatggcgaggatcctgacgccgtgccgaccagctatctggatggaacaccgatccaagggcatcagccggtacgccgtaatagccttttggcaacgccgccaggggaacgatga

SEQ ID NO: 328511 - DNA, 369 bp, Pseudomonas aeruginosa
atggccgagccgagtggtgcggtagcagtcgccggcttggtcggtattggtgcgtctgcattgatccctggcattgatgccaatgcagtgatcggtgcttttgctggggcgatcttcttcgtggtgtacgccaaggacatttcggcctgggcgcgccttggttacttcgtcgtgtcctggatcgttggctactacgtcgccggcgaagtcatcgggcgagagtgggccagaacatcgggcctggtcgcgtgtggcggggcattgttctgcgtcgcagtgggcaccagcttgctggagtgggtgcagggggggaagacgcctggttggctccgcttcattgcggaccgctttggaggtcgtaatggttga

SEQ ID NO: 328512 - DNA, 582 bp, Pseudomonas aeruginosa
atgaccatttacaccagcattcggtcggcagtcgtctctgccctggcggcggaaaccatcgacaacactgcaaagcaagcctggcagaagctctaccagccagggtatgccgacagtgagggtttagctgggctgatcaggggatcgaacacttcaggcatcaagcgcatagacgctgattgctgggtgcacgcccggctgcacagtcagctcaagccgcggtactggaacgcacttgtggcgaagtacagcactcacaaggccaagaaggtcgagtccatcagtgcgctggtgccagttattgcaagccacgcgcctcaattattcgtgatgaaggccgtaactgcctgggcgatcccgcagttgaagggagtcgatgggaagcgttccagtgacatgatcgtcctgcctcagcagttctatgacatcaactcttgggatttccaggggttgaacaggactacctactggaggtggaagaaaggtgtcgagcgaaccctggatgaaatgatcaacgaggcacttaatgattctgagaatattcttcgaagagaaggcattttgattgcagatgtggcttga

SEQ ID NO: 328513 - DNA, 582 bp, Pseudomonas aeruginosa
atgagcctatccgctagccagcccaaaccgaagaagtgccagaaccccgagtgcggcaccaggttcatcccgcagcgcttcgggcagaaagtgtgcagcccgaagtgcgccctggccatcaaggacaagcacgccaagccggcgcggaaggccatcgccgaccgcgagcggagggagatcaaggttcggaaggagaggctgaagagcaaggcggatcacctgcgcgaggctcaagctgcgttcaacgagttcattcgtctgcgcgacgccgaccagccgtgcatcagttgtggccgccaccatgatgggcagtaccacgctgggcactaccgcacggttgccgccagcccagagctgcgcttcgagccgctcaacgtgaacaaacaatgcgccccatgtaacaaccacaagtcaggcgacatcgtgaactaccggatcaacctggtgcgcaagatcggcgccgagaaagttgagtggctggaaggccctcatgagcccctgaaactgaccatcgaagaaatcaaggcgctgaaggccaagttccgggcctgggtgcgagaactgaagagggcaacggcatga

SEQ ID NO: 328514 - DNA, 159 bp, Pseudomonas aeruginosa
atgagcaggcgacagattgcaaaaattctggtgggccagcttctggtcatcgcactcatcatctacacgcagacatctgcgtccatcaacccatggattatctcaatggttgggacggccaccctatggcttggctacttcgcgggagaagagctatga

SEQ ID NO: 328515 - DNA, 264 bp, Pseudomonas aeruginosa
atgagcaagttcaaggcgggcgatctcgctcttaatctgcaagacatccccagctgcatcagtgcgggagtggtagtcgagttgatgtctcgacttgcccctggtgatctgtttgccgaagacggccagacctttcaggtgattcggccagcttggtgggtgctccatgaaggagaccggctctacatacctgaacggtatctcatgcccctgcgcggccacttccagtccgagcagcagaaggcgaaggaggtggaggcatga

SEQ ID NO: 328516 - DNA, 588 bp, Pseudomonas aeruginosa
gtggctgaactcgctctcatccgcacagcccagggcctggtcccggcgaccgaggcagatcgcgaaaccgttcagaagtggaaggccggccaggtcgtccacgggaaattcacccggatgcgcaatgccaagttccacggcaagttcttcgccatgttggatctcgcatgggagtactgggagccgaaaggtggtcttgtgccgcgccaggagatgcgtggcatccgcgggctggccaaatacttcgaggatctgaatgggcgtcctggccaattgcagaacgccgtcgccgcgtacatcgccaagcttgaggctgatcgagcgggccgcttcccggcagtcgagaagagccgcgaggcgttccgcgagtggatcaccattgaggccggtcacttccacctgatccatacgcctgacggtgttcgcaaggaagccaagtcgatcagttgggcgagcatggacgacacggctttcgagccgctctatcgcgacgtgtttgccgcctgctggaggctggtcctttcctctcacttcgaaactgaggctgacgccatggcggcggctgatcagatggggactttcgcatga

SEQ ID NO: 328517 - DNA, 204 bp, Pseudomonas aeruginosa
atggatattgtagacatcgccaatgactacgccgagcgtgaactcgctgaacgcctgtactcccgagtcaagtacgtcggcgagagcctgtgtgagtgtgaagactgcggcgaggagattcctgtggcgcggcgggcactcgttcctggggttcggaagtgcctttcttgccaggaatacttggaggcaatcaatggacgctga

SEQ ID NO: 328518 - DNA, 483 bp, Pseudomonas aeruginosa
atgcagggacagaccggcatcgcgaagaaggtctacgagtgcgtaccgatctctgagccctggcgttcgttccaggtgctgaccgcgctccgcaacatgaccggaagcacgccggacgttcggattgtccagggctgtctgcgcgatctggtcgattccggactgatccgccgcactggtactgaccactaccaacgaatccaagtcgagaaaaagaccaagcctcaggagtcgaagatgggcgagcccgcgaagaagatcgaaacccagtccgagccgaagcgctccgcctccccgctggagatgttgggcgaactggcaaacgagctcgccggcatggccgagcacatgaagcgcctgtctgatcgcatcgaggacgtcgcgttggcagtcgagcaggaacgcgaatcgaacgccaagtcgatggaaagctatcgccagctcaaggcactgctgaagagcctgcaaggggagggtgagtga

SEQ ID NO: 328519 - DNA, 687 bp, Pseudomonas aeruginosa
atgaaaggtgatgaaagacgccggactatctaccagcaccagggatacaaactgcgctcctacaccgagttgatgtgggctcgactcatggatgcggtagatatcttctatctctacgaaccgcatcttatccaggtcgatggatgcaagtatctgccggacttctacctcccagcggcagatatgtatctcgaagtaaaaggttcgcgaccgactgagatcgaggtggccaaagcagatcagacgcgcaagtacaccggtcggccagtggtatttctggtttccaggccgcagagcgatgcgcgcgggttcatgaattgctatctgctggttccgcgcggcgacgagtgggtggatatgtcgcttgattggctaggccagatacttcttacagcagcgggagagagtgcctggaccaaggcaattctctcggtccgcgaagacattctggattgcctgcgcccagttagcgaagtcgttgacgaagtcctgctcgaaatgatgggcagaagtgaggcagaggactacctccggctcacccacaagcgagccaatgaagatcgttgctcgattgaccgtgaactgtctgttccagaccgaggcatcgcttggtggcgcaatcgttacttcccgaccgttatggaacaggcggcacccgctcttggagacaagagggccacccaatga

SEQ ID NO: 328520 - DNA, 1341 bp, Pseudomonas aeruginosa
atgatcgaacttcacagcctggaggcggaacatggcgtgctgggcgccatgctcaaacagccgcacctgattagcgttctgtccgaagagctttcccccgacgcgttcgcatacagcgtcaacgcagacctgtatcggctgattcttgatctggagtctgccggcacgccgattgacatcatcactctggcagaggccaaagagttcctttgcgacgaaacccggacgatggcttacgtcggggaaattctgagcaacatcgtcagcgtggcgaatgccaaggagtacgcacggattgttcgtgagcgagccatctcacgccagatagctgatgtagccagtggggtagaggaggttgctcatcagaattgttcaatcgaagacaagatcgcccaggctcaggcccttgtgcttggcctggatgccggcggcaccaacggtgagtgccaaatggttggggacatcctgcgcgaccatgtggaggtgcttcaggagcgccatgaccgagcgcagaaaggcgacatgttggatggtttgagcaccggaattccagacctcgaccagtgcacgcaaggcctgaagtctggacagatgattgtcatcgctggtcgccctgcaatgggcaaaaccaccctggcgatgaacatcgcagcagacgtggccatcaagcagcacaggccggtcctggtaatcagtctcgagatgaccaagagccagctaatggatcgcctgatcgctgctgtcggaggtatctctctccagaacctgaaagatggttcctgcacccacaaggattacaccgagctcaacgcggcagttctcaagcttcgtgacgcaaaaatcgccgtgagcgacgtgccggtcatgaccatgccgcgcatccgctccattgcccgccggcagaagcaccgcatgggtgacttgggcctgatcgtcatcgactacctaggtctcgtagaaggggatggtaaggggcgcgtagatgatgtcaccaccatgtcgcgccagatgaagctgttggccagggagatcggatgcccggtgctcccgctctgccagctcaaccgcggatgtgagtctcgcccggataagcgcccggtgctcagcgacctacgcgagtccggcgccatcgagcaagacgcggacatcgtgatgttcgtgtaccgcgatgaagtctatttcccgaacagcgataagaagggcatcggcgaaatcctgatccggaagaatcgggacggagagatcggcagcgtattcacctcattccagggaagcaaatcccgattcgttcctcttgcaagccaataccgcgaacagcctgagcagaaggaggactggtga

SEQ ID NO: 328521 - DNA, 990 bp, Pseudomonas aeruginosa
atgagcaatatcgtttcattacgcaacaccggggggtttacccggatggacaacagcttgatggaatcgctggccaaggtggatttgcctgcccgcgagttccgagtgcttttcgcgatatgccgccagacgattggatatcaagttgaggcaaagcgcctcaccgccgacgagattggcgcgctgaccaacatgcgccgcgacgtggtgtcaaaggcgatcagccatctgctggagaggagaatcctgttccgcatcgggggaagccgcggtgagctaggcgtttctcccgccagcgaatgggtattccacgagcagaagaaagaacgtctcagtgagaccaaatcatctcactcggacaatgttatctcactcggcgataaggtgagtgagaccaaaactgctcactcccttctctatacaaagaaagaagatctaccccctgaaactgttccttcggaacagatttccgccccccagggggctgatcacgctccggtcaagaaatccaacggggtttcgttcgatggcgaggacttccaagtcgagccagccctgattaccaaatgggccaacgcgtactccccggttgacgtcgaggcagagatcgcacgggctgctgtgtgggctgctgcaaatccccggaaggccaagaagaactggcgcatgttcctggtcaaatggctggcaaagagcgccaccaactccgtgagcgagactggcgttccggtcgacaagatcattgacctgtaccaccgcgtttgcccgaacctgccggctgtcgcggttgtcggcgacaaggttctccgcgccctgatcgttgagcgctggaacgagagcgaatcccaccaggctagcccgttctggaagaccatcttcgagcgcgcgaatcgcaccagccaaatttggtatcgcggcgccaacgtggttccgcgtctcgaggtgatctgctcgcgtgccgtgttccgtcagttggaggagcaagcatga

SEQ ID NO: 328522 - DNA, 465 bp, Pseudomonas aeruginosa
atgaaaacgcccgtactagagacccgcagaaaggtaatgaccacggtagccaatgcctatccgggcggtcgcgattgcgctgccgcgcggctggggattccgctgaagcgcctggagaaccagatgtacgaaacggcgggcgtgaagcccctgagcgacggcgacctgtacgtcctggagcaggagatggggacttcctatctgccggactacatctgcgcgatgtacgggggagtgtttgtgcggacgccggaagcgggcgatctggacaacgtagacctgcaccaccgttcgctgcgtacagcggttaagcgtggccgggttgatcagatgatcgctctggccctggaggacggggagatcagcgctgacgaagcgaaagagattttggccttgcatgccaagcacatggccgccaggcatgaagaggttcgggccgtgctcgaactgcacagggcgaagtga

SEQ ID NO: 328523 - DNA, 261 bp, Pseudomonas aeruginosa
atgactgatgaaatcgacaagatcgttgcgacgatcaacgcgcagaaaggcgaactgatgggtatcaacgccttccttatggcaatggcacgctcgctaacacctgcggaactcgggagggttctcgacgggttcgataacgaaattgcgcacatgcgatcgttcttggcgtactcgcaactgccggacgaagtcattgggggtctcgagggttatgtgaagacttggaacgcgattcgaacgaggccaaaccagtcttga

SEQ ID NO: 328524 - DNA, 345 bp, Pseudomonas aeruginosa
atgaccgaattcatgcaaatcctgatctttgggacctcgttggcgatggcctacttcctgggcgccacctcgtcgaggaagagctccagtgaaatccggctgatcgacaagtggccaacggcctacatccagttcgactcgggcatgagccaagaggatgcgctgcgcttccttgagctggcccgcgaaatggttctggccgggccagagaaagtgactgccgagaatgcgctgaaggatgacgaggagagccgagacgctttctgggcgcagtctctcaagactggtttggcctcgttcgaatcgcgttccaagtcttcacataaccctcgagacccccaatga

SEQ ID NO: 328525 - DNA, 201 bp, Pseudomonas aeruginosa
atgcaccgcattcctctcaaagaattttctgcccagaagggccagaccaaggccgctgcgctgctgggactgacccagggcgcactgaacaaggcgttgcgggtcgggcgtgacatctatgtcaccgaaaacgcagacggaacctactcggctgaggaggttaaggctttcccatctcactccgccaaggccgttgcttga

SEQ ID NO: 328526 - DNA, 816 bp, Pseudomonas aeruginosa
atggatacctatcgcctgcgggaatacccttcgcacatgagcgacaagaaacgtgaaatctcccagtgggagaaagaggaatgcgcaaagctgaaagctgcgctggaagaattcaacgccgggaaatcccggaaggacagccttacccaggggaaaatcgccgaagctctcgacatgagtcagggctccgtgagttcctatctcaacggctacaacgcgctcaatgcgaggtttgcttcgtacgttgcctcgcaaattgggatccgtatcgagtcattcagtgaacggctggcagcggaagttggggagatggccaaggctgtgcatgcagagcccacaaaggggaatgtcatccctgccgacttttcaaggcagagaacaaagagcgggttcattgtcgtgccccaatacgatatcgctgcctccatggggaaaggcctggcgcgcccagaatttgatgtcgttatcgactcgattgtcgcgagcgtcgactacttatctcgcaacgtcaggtattcagcgccagacaacctcgcgctaatcacgggctatggcgacagcatgcagcctacgttttcggacggagacatccttctagtcgataccggcatcactgagataaagatagatgccgtctacgttatggccctgaaggatgagctttacataaagcggatgcagcgaagggcagatggcacctttctgatgatctcagacaacaacgcatacccaccaatcgaggtatccagcgccgaattaaaaagattccaggtgctcgctagggtcctgctggcctggaatgcgaagagactgtga

SEQ ID NO: 328527 - DNA, 651 bp, Pseudomonas aeruginosa
atggtcgatttgcatgctgagtttggggagagtcggattttccacgagaaacgcatagaccgaaggtctgtcgatgcactcgcgggactggccgccgggatcactgctgatgggcatatcaatcagcaggaggccgagttcctacaggattggatcgctacgaacttggtccatcttgacgatccagtgaccaacctcctctaccggaggctctcagacatgctgtccgatggcgtgttagacgctgatgagtctgccgaactgcttgagattcttagagggtttggtggcctctctgcttccaagccgaaaccaagcgacaatgcctttactccatcgaatgctcttccgctcaacaatccagctcccaagcttgagtggtcgggccatctctacgttttcactggcgtcatggtctacggccccagaaagcattgcgaagagatcgtcgtcaaccgcggcgggggaatagcctcaggcatcagcaaaaaggtgcactacctggtcgtcggcgagataggcaacgagcagtggctacacagtacgtatggaaccaagatcaagcgagctgtcgagctgcgcgaggaaggccatcccatcgcgataatcagcgagaagcactggcaagcctcgatgttcaatctggtctag

SEQ ID NO: 328528 - DNA, 903 bp, Pseudomonas aeruginosa
atgaacagaactgaattcacccatgcgcaagcagaaatcagcttcttggatcgaattgcgcaaaagcctggattgagcgaccttgctcgactttcgctcgaatccagaaaaaatcaggttagcgctagcctacgagatcctgaccgcggcgcttttgctccagcaaaagccatcgtcacctaccgcggagcgccggtccacggcgtccacggaattgttgctgaattcggatcggctgccaccacaaaattttctgatgcgatagcggcaatagcggcctctttaagcggcatcctcaacgactttgggcccattccgaataaggcacaaaatcagatcttaatcacgggcacagccttggggtcgtttggctttgagttcgaagaagctccggctgccgaggcccagctcccgcttgagggaacaactcctgtttcccaagcgtttgagttggttgctgaattactcgaagcatcgacaaaaggtgatgaggaactatcagagcctgcgtcaagacttggcactagggctatcgccatggtgtcggaatacttggataagctgattgcctatgaggcgtattgctcggtctcaacacaagatcacatcttcgctttctcaagtgttgaccaggttcgaattagcaggtcacggcttagcacagacaatattaccgaaagattcgttgagttctctggagagttcttgggcgtatttcctgcggagcgacgcttcgaatttaaaacgcaagatggagaggtgctacacggtcgtatctccgctgacgtagagaacccggcagagataaatacgcgcctgaatcaactattcaccatcaagttaaatgcaagaactgtaggcaaaggtagaccgcgttatacgctaaccgctcgaccttggtga

SEQ ID NO: 328529 - DNA, 207 bp, Pseudomonas aeruginosa
atgaatgaaaaatcctcacgtgctgtacgccaggcacttcgggtcctccgcaaggcggaagacgatcgcgaggcgcgcattgagtaccacgaaacggttggaatgctgcgcggcctgtactacggcggtgagatcgattcgatggagctagttgcgctcacgcaactcgcaggaaacgcatacatcaacgctgggaaaccctggtaa

SEQ ID NO: 328530 - DNA, 207 bp, Pseudomonas aeruginosa
atggctcaattcaatgtcgatgcgcacctgagcaacggcaagcgcctggactggattgccctgccggaaggcaacgagacaccggatgacgtgctgatcgaggtacgccaggccgccatgaagaaattcggcgacctcatctggttcaaccgctgggaccacgttgttgccagcaacggctacatcaccgtgcggatgcatgcgtga

SEQ ID NO: 328531 - DNA, 330 bp, Pseudomonas aeruginosa
atggcccgccagaacgatattgaaaccattaaggatttgttgcatcgcggcgaactcactgccgaccaagcaaatgtccagatggttcgcaacgatcggttccgcatggtgatcaattcgcttcctgcaagtgtgcgcaaggctctcaatgctgcggtgaaaactggtgagcttgggcacatgaagaaagatggccacaagcctgagtgctatttccaccctaccttcaaatatctggctgttgaggcccgcaacaagcgggagtgtgaaatcgcaagagcaagccgcagtgctttggcaagcatgagtgacattgtgtcacttgattga

SEQ ID NO: 328532 - DNA, 873 bp, Pseudomonas aeruginosa
atggcggccaaatcgttcaagcagatgatcaaggacggcgacctgaaacgcgcagatgcgatgaaggctcgcctggaagaccttcacgaggagccaggcttcaaccttcgccgcgagggcgaagatctcgaacagagcatcgccgaactggccgagttccttcaccagggcggcacggtaccggcgctggaggtcaggccgcgcgaggaaggcggcatgttcgtcgtcgacggccaccgccggcaccgcgcctacctgaagctcgatgccgaagggaaactgccccgtgattcggagggcaacttttgggtacctatcaccgccttcgctggtaacgatgcagagcgcgtgctgcgtgtaatcaccagccaggaaggtcggaagctgagtcagcttgaactggccgacggctacaagcgcctcgccgccttcggctggtcgcccgaacagatcgccaggaagatgggcaagacccgccagcacgtcgaccaggtactgcgggtcggcaatgccaacagcgacgtacagcgcatgattgcctccggcgaggttgcggcaacgaccgcggctcaggctgtccgccagcacggcgagcaagccggcaagatactcggcgacaagctgcgccaggtaaaagccgcaggcggtaacaaggtcacgccgaagtcgatccgaaagccgcaagtgccgcgctgcatccttgatgacctgcacggcctttgcaattcgattgcaaaaggacttcctggcgatgttcgcgcagcaatagccgccggcgccgaggtggtcaacttgaccgttccggccgccagcattgagcagcttctggagcttgtttccagggcagacgaggcgcttgcgcagagcgcctaa

SEQ ID NO: 328533 - DNA, 378 bp, Pseudomonas aeruginosa
atgtataagcacgcttcgatttctgatcttctcggaaagaccatcaagcagatcaccggattggaagctggaagcgattctgtcgatttcgaatgtgaagacggctctctgttccggatgtatcaccagcaagattgctgtgagagtgtttcgattgacgatatcgagggcgacgcaagagaccttgttggccagccgttggtggttgccgaggacgtcagtagcgacgacttcccggcgccgccgggggattacgtagaaagctacacatggaccttctaccgactggccacagccaaagggttcgtcgtgatccgctggcttggcgagtcgaacggctactactccgaatcggtcgatttcagccgcatcaactga

SEQ ID NO: 328534 - DNA, 378 bp, Pseudomonas aeruginosa
atgaacactgcattgaaatacgcccaggaacgctgggacaacgcgcttccgcccgacgatgacggtgacggtgacggtgaccgcgagtatgtcactgagcaagtcggcaagcttctgaactgcgaggacggtgattgcgtgccgttccatgatcgtaaagaaaggccctttatcggccctgacttcacggtctacggattcgccggattcgtcccggagtggcttgccgaggtcgacagcaaagagttcccgatgactcagctactcctagccgtccgccgtggcgacctggaactggcccaacgcatctggttccgcgcattcgaatccacgcttatcgagaacgctgaacgactggttagggagagacgagtatga

SEQ ID NO: 328535 - DNA, 519 bp, Pseudomonas aeruginosa
atgagcattgattggaacacggcaccggagggtgcgactcattgggagccgagggggatagtattcggcgaaggctggatgaaaaaggccgggaatgaatggtcctattggctcgaaggaagcgaagtgtgggccggagtgtgggccgattgttttgtatccgcagagcgtgaggcgacattcgaggctagaccgaaagaggcctgggacggccagggcctgccgccggttgggacggtgtgcgaatacagacacatgatctggcctgagtatcgtccctgtgaaattcggtacatcagcgaagagtcgctagttgcgtatgacgacgcacaagaacagttctaccgcacgtgcgacatgctgttccgccccatccgcacccccgagcagatcgccgccgaggagcgggagaaggcagtcggtgatatggctatgtcaattcaaggagttccatatcagtaccctacgctttacgcactctacgacgccggctaccgccgccaggaggaagggaaatga

SEQ ID NO: 328536 - DNA, 306 bp, Pseudomonas aeruginosa
atgaccgtgcaaccgatcagtgatgagcagttggcagaggtggaaaggctaatttcccaacgcgaaccgagctatgaaaatcggaaaatcatgaacgccacgatttccgccattatcgcccgcctgcgcgctgctgaggtcgatgctaagcggtatcggtggcttcgggatagcgggcgcctgctcggcgacaacatggactctcacgagtacaacttttgcgtagtcactgctgacggcgaagacgttatgtggtttgagcaactggactcagcaatagacgccgccatggagagcacgccatga

SEQ ID NO: 328537 - DNA, 657 bp, Pseudomonas aeruginosa
atgaaagaacgtccgatcctgttcaacgaccagatggtccgcgccatcctggaaggtaggaagacggtcacgcggcgagtgatgaagccgcagcccgacttcctcggctcaatggtcgatcccaatacgccattcaagacgcttgatgccggcctgcatgcacgcatcacctgcccctacggcgagcccggcgaccggttgtgggtgcgtgagacgtggactgacgtgaacatgtgcggcgcaccggcgctggcatatcgggcggacgaggatatccgcgatcttatggacgagccgggctttctggatgatcgcggagccttcaactacgacgacccgcgcgtcaagccatatccatttgcctgctggtacgccgaacttgatcaggcgcgctggcggccgagcatccatatgccgcgttgggcctcccgcatcctgctggaggtcaccgctgttcgcgtagaacgcctgcaggacatcagcgaggagcaggcacgggccgagggatatcccgccgagcgcgaatgcgaaacgggcggtagtggcttggatgcttggctctggttccgctccctttggggagagatcaacggcccagaggctttcaccgccaatccctgggtctgggtcatcgaattcaagcgggtgacgccgtga

SEQ ID NO: 328538 - DNA, 687 bp, Pseudomonas aeruginosa
atgagttatcactcttcactggcgacgggggcggactgctcgcatcaatgctgctcggcatccggtgcatcggcgctgttgagtacagagcacactcaagaagggtgctcactcagcgtcagagagacggagcagtcccacacttcccaatcttcagtgacatccgaacgtttgatggaagaccctaccgcggaagagctggactcgtatctggaggatttccctgccagaagtacagcactgccccttctggacgaaacaacgctgaagacctttggccggagatgcggagagtcgtggcagatgttgctccctggtacgtcttcgccgaaaacgtttcggaagtcgcaatcgaatatgccgcagaagactgtcgggctatgggttaccgcacccaagccatttcccttggagcgtctgacctgggtggtgaccacattcgggaaagacattggctacttgcatacgccgacgacaaaagccaactacgccgcgcaatcaatgcagaaatggccttcagctcgggccttcgtcatggcgtttggcaggccaagcccggagaaccaagagtggctaatgggatggccagaaggatggagcgattcaagtccactggaaatggccaaattccaatcgtggctgcgacagcactggtgcttcttgcgctcgcataaggaggcagcatga

SEQ ID NO: 328539 - DNA, 138 bp, Pseudomonas aeruginosa
atgagaactcgtcgaacagcaatctggctaggcagcctcttcggcggactgctgtacctcttcatcctggccgccggcccgatctggggcggcatcatcaccgcagaatctacgcacctgtccgcagcaggccggtaa

SEQ ID NO: 328540 - DNA, 837 bp, Pseudomonas aeruginosa
atggccaagatcacaaaggaccaggccaagcgtcacaagcaggcgctggacttggcccatagcgataagcacctatcgctcgatgaccggctgttcatcttggataacttccacgagggagccaccaacatgaacggattggcaggcgctttcttcacccccgaaggacttgcccgagacttcgctatcgaagtgaacggaggaacaatcattgacctgtgcgccgggatcgggcgtctgtcgttcgcctgctctgatggagccaagcgaatcgtctgcgttgagcagaatactgaatacgcagaggtcggaaagcgcgtcgttcctgacgccgaatggattgtcggtgatgtgttcggcatcggaaatatcggaaccttcgactgggctatctccaacccgccattcgggcagataaataccggtgccgattttgatggcgcctactccggcgggaagttcgaatacaaggtgatcgagctggccagccggctagcctcctggggcgcttttattatcccccagatgtcggcccccttccgctattcaggtaagcaacacttcgagcagcagatcgacaaggaatgccgcaagttcatggatcagacggggatcgtcatgggaatgaactgcggcattgataccagcatgtatctgaatgactggaaaggcgtgagtccagtctgcgagatagtgatctgtgagtttggcatcgaggccgaagaggtttcggcagagcctaagccaacaatccagcaagtacccgcaaagccacttccgtccggcgagcagcaatgcgcttctgcgcagctcgatatattcgagcagatcgcctaa

SEQ ID NO: 328541 - DNA, 534 bp, Pseudomonas aeruginosa
atgtccaacgaaggaaaaacgcacttcaggaaggcgttcgactcgccgtacctgagcagtgctgacattgtcgagccaactgtcctaactatcgcgcgagtgggtcttgagccagaccgcacgaagaagaccaaggacatgttcaacaccgcccacttcgtagaaaaggaactgcggccaggcgagaagctgaagccgatgatcctgaacgcgaccaacagcaagacgctcaaggcgctgactggctcgtcgttcatcgatgactggctgaacgttcgcgtaacggtctacgtcgacagcaacgtgcgttttggaaaggagtcggtagaaggcctgcggatcagcccgaaagcgccggtacaagccgtcctgacgccggaatgcacgaagcaatgggctaacgcgaagaacgcatacctgcgcgacggcaacctagatgcagtgaccgcccgcgtcttcatctcggaagaacaccagcagcaactgatgcaggagtgcgcagatgagatggcacgacgtaccgcagaacagtga

SEQ ID NO: 328542 - DNA, 618 bp, Pseudomonas aeruginosa
atgagatggcacgacgtaccgcagaacagtgatgtgtgggaggcgctgagaatcggaaaggccactgcgtccagtttcgggactttcatggcgaacgagggcaaggccttcggcgagccggcaaagaagtacgcgcttcagattgccctggagcgcgctaccggcgtgaaggcgtccttcagtttctccaatgatcacactgagcgcggccatgaacaggagccagttgccaggatgctctacgaggacgagaacttcgttgaagtatccaacggcgggttcttcgactgggaactgtacggagacagtcctgatggactcgtaatggaagacggcgtggtcgagatcaagtccgtcactgcggctgtccactacgccaccctgcgccgcgaatcattcgacccagcctatcgctggcagcttatcggccacctcgactgcactggtcgggactgggtcgatttcatcagctactgctcggagttccctccggccagccaactgatcgtccaccgactgcatcgatccgaatgcgctgatgaaatccaacgcctgcgcgaccgccgcgaggctttcctagaactggtcgagcagacctatcaaaccattccgaggtaa

SEQ ID NO: 328543 - DNA, 288 bp, Pseudomonas aeruginosa
atgagcgtgaaatacgacgtcgtggccagcgttggccagtacgagaaggacggccaggtcaagtacctgaaccgcaaggtcggcgtgatcgtcagcacgcagaaagggtaccggctgaaactcgatgcctgcttcaacccggcaggttgcccgcaacgatcagacgatggcggagtctggcttgcgctgttcgagccgaagaaggatcagcctcaacaacagcagagcgcgcctcgacaagctcaggctaacgacagcttcgacgattcttctgacataccattctga

SEQ ID NO: 328544 - DNA, 642 bp, Pseudomonas aeruginosa
atgaacaccgatcttgcacccgttgaaatctatatcccggcagatgcttggctgaagccggtagcagttccgcacagcatgacgcatgaggatatcgaccgactggtttcggagttcatgtcgtcgggaggggccattaaggaaatcccggtaggagtatccggcgactcggctccagcaatgttcaacggacgtatccgctctatgggcaaacaaaccgcccaggagatcaaggacgaaccgtttgttgctgctctggatgtcctgctcgattgctgcccggaccgcaagggagccgccgacgcgcttggtatccgagattacgtgcttcagcgcctcctttcgaactacttcgggcgagacaaacgggcggacaagatccgtgcaccggagcgaaaagactgccgccaacgattcaaagtcatccgagacgagcagtggaagctagaccacgggcagatcgcaaagatcgacggtgtgatggtcaagcgctgctcagcctgtcgtgagacgaaaccagttactgagtatcacgcgaagaaggactcgcacgctggaatctgcacccgatgcaaggcatgcgtcgccatcgagaaggcttccaagaagcatgggacgcaagatgaaaaagcagcggcttga

SEQ ID NO: 328545 - DNA, 1020 bp, Pseudomonas aeruginosa
atgagcgaactgaacaaggaatcggtagagcaggcaggcggggatgagcgcgcggcgttcgaactcttcgtgcgcaagcactgcggcatgccggagcacatcgccgtaaactgggacgccaagttcaccaatgatgcatgggaggggtggcaagcccgcgccgccctggcgcaaccctccccggcgctaccgcctttcgcggagaaggtgctggctaagctgcgccgcttctatgactgcgccgaagacttcgaatcgggcggtgttgatatcggccggcactggctagacctgctgactcagctcgggctgctcaatcgagttcagcgcagcccggcgttctgggagatcagccagcagggagaggatttactcggtatgccgcaaccctccccagcgcaggccgagcaggcagaggcggagcggccggaggtagtggcttatctgttcgtcaaaccggatgggacactgtccatggatgccgtcagacataagccgtcgcaacccgccgttgcggtcatgaccgtcgcccagcatgagcgcatcgtcgaagcgcgctggaaccgtgcaatggatttgttgctcgatcacgtttcccgtatcagcgagaagttcaaggcggagcgcgacgccgccctggccagggtcgcagagctggaggcatgcggggctcctgcgctgctcgccgcagccgactacttcgccgagcgcgccaaggggccgtcgccgggctgggtcacgctgtccgcagtcgccaaggagctgcgcgttcgcgctgataaagccccggtcgcccaggctcagcacagcgtgccggaggggtggatgctcgtcgagtgcggaatctggacgcaggaacaggtggacgagatgcagaagacggtgactcgattccgcaattcagaattcgtcgacgaccgcgcgctagcgatggctgttgctgacgcaggccagtgcaaggctccaaagatatcgctggccgagctgctcgccgccgcgcccggcaaggagggggtgtga

SEQ ID NO: 328546 - DNA, 270 bp, Pseudomonas aeruginosa
atgggtttctggatcgagattcgctgcgaagatcgttttgcgaagtggtcagatggaaaaggctactcaccggagaggtgctggtcgcacgacaatgaagggccgatgcaagaagcatccgacacgcaggcttcggtgatcaatgcataccgcgaccttgagacggaagcgcgtgcgcgtgggtgggttaagtaccgctacggctgggtctgcccttactgcgcagtgcatcgacccgcgcacttcagcaaggaggtaggtcatgagtaa

SEQ ID NO: 328547 - DNA, 402 bp, Pseudomonas aeruginosa
atgagtaactgctcgcacgaagcttgggatttcggcgcgctgcaatgcccggactgcggcgctgtgaagggtcacgtcgcggatgccgactacgccaagctagaagccgaggcccaggcgctaagggatgaagtcgcagcactgcgcgcaagggtggtggtcattcctgccctacgcgatgtcagcgcatctgctgatccggaataccgatcatctgccactggctataacttggcgtgcggggatatggcgcgcatcaacggtatgacggtcagcgaggggcttttgcgcaggctgtgcgagccactgctttcgcatgctgattacgtcgtagctcgcaacgaactccgcgccctgctgagcgagcatgagggagggaacgatgtcagcaatcatcagtga

SEQ ID NO: 328548 - DNA, 186 bp, Pseudomonas aeruginosa
atggagcaagcagtgaaacgattcccgctcacaagaatgctattgcgcttcaccctctggctggagaggaagatgcacaaacaggaagacttctcgctgaacgacccagagtggaacgaacttcagaacaaggtcaacgcgatgaagcgagacatgaacaaggcgatccactcagaggagtcctga

SEQ ID NO: 328549 - DNA, 285 bp, Pseudomonas aeruginosa
gtgcctgacatgagagaagagtttgaagcgtgggtatcaggcagaaaagtctgcactcgttacggcgctaagttgaacaccaacaccgacggcatgtactccgactaccggataaacgatagatggttggcctggaaagccagccgcgcggctctgagggtggagttgcctgcaaagcgctcatacagcatgtacgcaaccaagcatgagtgccacgcgttcaacgacgccatagagaaggtaaaagaagccctccggcaagcaggaatcgaggtggcgccatga

SEQ ID NO: 328550 - DNA, 222 bp, Pseudomonas aeruginosa
atgaccaagaagcaaacacctgaacagcgcattgagcgggcccttgaggactttcacgcatacaaatctacgtggaaacgtgatgaacgtggactcgttccgacattcattttcaaaggaaagcatcacacctttgtcgaaatgcatctcaagatcgaaaagaaaagaaagcagatcgcatcaaagatattgaaaagcatcaacgacgaggtgtggctatga

SEQ ID NO: 328551 - DNA, 273 bp, Pseudomonas aeruginosa
atggcagatgcagagttcctttgcgcgactgatcctaagaccgtcctcgccctgctggacgagatcgacaggctcaaggcggagaacgaggcgctgaggggagcgctacaggccgtggaagccgaagtcgacgggaatctccgcccacttacccgagacctcgtgaacatggtcagcggcttgaaaaacggcagccacccgaatgacatctacgaacactgcgacgagatcgaaaggatcatcggagcagccctggaaggagacaagcaatga

SEQ ID NO: 328552 - DNA, 315 bp, Pseudomonas aeruginosa
atgaacgaccgcgaactactcgaactggcggcgcgggcggctggttttaccgggtacggattcttcctgggcgatgatgggatcgatgtcagtgacgaaactggtactcgcttcgcctggaacccgctcaccgacgacggcgacgcgctgaggctggcagttctgcttaatctggagatccatagcccaaagagcaatccgacagtcatgtttagaactgctgaaaacgatgtcttctatcaggacgcgtgcattcgactagccatcactcgcgccgcagccgagatcggcaagtctatgggaggtggggaatga

SEQ ID NO: 328553 - DNA, 378 bp, Pseudomonas aeruginosa
atgagcgaaaccgtagaagtgatgacctgcgatcttgaggggccggcgctggattgggccgttgcggtgatcgaaggatatgacctcatgaagcatcccttccgccgagccttcatcccaaacttcggttactgcgactactcaccttcgaccaattggactttcggcggaccactgatcgagaagtatcgcttcgagttcgaatgggtcggtaacgactggcatggcgaaccgctgaacttcttcacagcatgcggcttcgatatgccagctgatgcagcgtcggcagggaccacccatctaatagcagcatgccgcgccatcgttcgagccaagtacggaaaaaccgtcagcgttcccgccgaactcatcaagtaa

SEQ ID NO: 328554 - DNA, 1110 bp, Pseudomonas aeruginosa
atgccgtacaagagaaacgactccgcctactggtggatctctttcaaatcagcaacaggaaagcttgttagacgctcttctggaactgccgactactcggcggcgaaagcactagagcaacaggaacgcgcgaaagcgtggaaggaaaaggaaatgggcgtgaatccgcccagaacctttgaggaggtgatcattccgtatctgcaacacgctcgccagcatcagcgcagctacgaaacgaccgtgcaccgcataaagccgctgcgcgagtattttgccggacgtgtgatcaacgatctaggggggcaggacatccggggctacggaacgcacagattggacgccggcgcatccccggcaaccattaaccgcgaactcgctgccctctccgcggctatcaaccactgcaacaccgaactggagtgggccctcccgaatcccgttaagggacggaagatgcgcgaggccgaggggcgtgatcgttggctgacaagggcagaggttgaggccctgtgccgagccgcgcgcgggcagaagtttggcccgatgctggaggactttatccgcctggccgtcaacacagggtgccggcgggaagagatgctcggccttgagtggcgcagagtggattttgccaaccgcctgatctatctggaggctggccacacgaaggcaggaaagcgccggagcatcccgatcaacgaaggagcgatggcagcactaaagcgacgaatggcattcaggtccgagacaagcccggaatgcccatgggtttttgcgcgcgccaatggtgatcgagtggtatcgctatcggccggcttcaagcaggcctgcaaggcagcgaagattgtggactttacgattcacgacctgcgccatacctgcgcggcatggctggtaagtgccggcgttccgttggcggatgttcgggatctgctcggacactcgacggtcgcgatgactgagcgatatgcccatcttgcgccggccagggtaagggatgcagttggggtgcttgatcaagtccgtgaaagtcgcatttcacgttcagttcacgttgataatccagcgcatctacaaggagggccgctgaagctcgtaaacacttga

SEQ ID NO: 328555 - DNA, 867 bp, Pseudomonas aeruginosa; identical to SEQ ID NO: 324312

SEQ ID NO: 328556 - DNA, 1290 bp, Pseudomonas aeruginosa
atgcgccacgccatcgaaggctgccggccgatccagatccgcgggcgggtcacccaggtcaccggaaccctgctcaaggccgtggtgcccggcgtgcgcatcggcgaactctgccagttgcgcaatcccgaccagagcctggcgctgctcgccgaggtcatcggcttccagcagcaccaggcgctgctcaccccgctcggcgagatgctcggggtttcctccaacaccgaagtcagccctaccggcggcatgcatcgcgtggcggtcggagagcacctgctcgggcaggtgctcgacggcctcggccgccccttcgacggcagcccgccggccgagccggcggcctggtatccggtctaccgggatgccccgcaaccgatgagccggcgcctgatagagcggccgctatcgctgggtgtgcgcgccatcgacggcctgctgacctgcggcgaaggccagcgcatgggcatcttcgctgccgccggcggcggcaagagcaccctgctggccagcctggtgcgcaatgccgaggtggatgtgacggtactcgccctggtcggcgaacgcggtcgcgaagtccgcgagttcatcgaaagcgacctcggcgaacaggggctgcgccgctcggtgctggtggtcgccacttccgaccgaccggcgatggagcgcgccaaggccggtttcgtcgccaccagcatcgccgagtatttccgcgatcagggtcgccgcgtcctgctgctgatggactcgctgacccgcttcgccagggcccagcgcgaaatcggcctggcggccggtgaaccgcccacccgccgtggctacccgccatcggtgttcgccgcgctgccacgcctgatggagcgtgccgggcaatccgagcggggctcgatcaccgcgctctacaccgtgctggtggaaggcgacgacatgagcgagccggtggccgacgagacccgttcgattctcgacgggcacatcgtgctgtcgcgcaagctggccgccgccaaccactatccggccatcgacgtgctgcactcggtgagccgggtcatgaaccagatcgtcgacgacgatcagcgccatgcggccggacgcttgcgcgaatggctggcgaagtacgaggaagtcgagttgctgctgaagatcggcgaataccagaaaggccaggacagcgaagccgaccaggccatcgagaagatcggggcgatccgccagtggctgcgccagggtacccacgaaaccagcgattacgcacaggcctgcgcgcagttgcggagcctctgcgcatga

SEQ ID NO: 328557 - DNA, 660 bp, Pseudomonas aeruginosa
atggatcggtttctccgggttgccgacgctcctctccgcggccttcgccgcccgctgtcggcgcgggcggcgaagcctgggcactggcctgcgccgtgggcgcgacctcggctgcggctttcgccgggaagccggggccgggctgcggccgctcatgcgtccgacctgcgatttgcgggtgggaggacaccggcaccagcggcggttcgtcgaccggaggcgccgaaacgctggccggctcccgggcttgcgtggacgccgcgacgcgcgcggagaccgccggcgcttgccgtgctaccgatccggacggcgacactgttggcgttggcgttggcgttggcgttggcgttggcgttggcgttggcgttggcgttgcgtccgcggcaactggcacgggggcttgccgagtggtcggcggccggtcggcggcaggcgccgcgggctggtcggcgagaggcgtcgaggtcggcgcgtcggctgtcgcggcgggctcttcggcctctgtcgtttcgtcgcccttgtcgaacggtggcctgggcgccggcggtcggtgcgcgggcagggcctgttcgaaggcgatctgctgcgcgcgcagcggcggaaggggggcaggggtgtcggacgacacgagcggagccgtatccacggcgttcagcttga

SEQ ID NO: 328558 - DNA, 420 bp, Pseudomonas aeruginosa
atgacgacccctgtaacgagcatctcaaacgccttgaccgccttggcaagcgccccgctggcccaggcagcgcctgagacgcttatcgaggtcgccctgctcgtctggtacgaccccgaccccctcccctcgctaaaacgcaccctggatgccttggagggcatccagcagcgccgcgctagattcgccctggacgtgatccgccgctacccctgcatagagctcgaacgccagcgggcgctacgcgacctggtagatctgaaagttagctttgagggagggtcaatggtggatctgctcaatgcctgggacctggacgagaccgaaaccccgaacaccaaggcgatccttccctatcagaccagacattacgctgatgagcgccgcaagcaagctagtaggacgcgactgcctcgctaa

SEQ ID NO: 328559 - DNA, 1971 bp, Pseudomonas aeruginosa
atgacagtgaccgaagtagtcacgaccctcaaacccgtagctgtgatcgtccagcagggcaaggtactcgacttcatcgacgggcggactcagcgcgaggaaacgcctgaagagtatgtgcgtcaagagatcgccaaatctctggtgcgcgagtacggctatcccaagagcaacatttcagttgagttcactttacgccttggctcacgcaaaccaagagccgatctcgtagtatttaacgccggcgatgagcatgatcaaattaatgcacatattattgttgaatgcaaagagcaaaaggtaaagtcgagtgaccgaaaagagggtgtcggccagctgcagagttatatgtccgcctgtccgaacgcaatctatggcatgtggaccaatgggctagaacgcttttgctacaaaaaaattgagctcaacggaaagatcgcttacgaagaacttccggacctacctggctatggccaaacagaagatgaagctgaaagaccagagtttgatcaactcaaacccgcatcttccgacgccttactttttgcatttcgccgatgccacaactacattgctggaaatcagggcttgcaaaagccgcaagctttttgggagctactcaaacttatcttttgcaaaattcacgacgagcgaaatagcgaagtagtagagttctacgccgccggcaacgaacgtgctggaattaatggccccctgaaagttaaaaaacgccttgacacactttttgacgccgtaaagaaagaatatccagcgatctttacacaaaacgatgtcatcgagctaaccccccaggttttagcctatctggttagccagctccaaatgtactctctacttgaaagtgatgtagatgtaaaaggacatgcttacgaagaaatcgtaggctcaaaccttcgtggagatcgtggagagttctttacgcctcgcaacgtctgcaatatggctgtggcaatgttagacccatcagaaggccaattaatgctggatcctgcatgtggcactggggggttcttgatcgccgcaatgaaccatgtaatcgagaagatccgcacctcggagctagaaaagtggaaaggcgacattaagcggtctgagctaaaaatcgtcaatcgcattgctaagttcgctggttcgtgcattgtcggcctcgatttcaacccggagttggtcaaggccacaaagatgaatatggtcatgaacaatgacggtgcgggagggctatatcaagctaactccctagctagccctgcagtttgggaggaaagccttcgcgatcgatcccttctagggagcgtcgacctaatcttcaccaatcctccgtttggatcgaaaatcccggttgacgatccatcaatcttggaaaaatatgaacttggtcattcttggtcatatgatgaaaaatccgacatttggatcaagggggacggcattcaaaaatctcagccccccgaaattcttttcattgaacgctgtgtaaagtttctaaaacctggcacagggcgcgtagcaatggttttacccgatggaatcctaggatcaccaggcctaggttatgtgcgccaatggatactcaaaaacacccaagttcttgcatctgtagatctgcatcctgatactttccaaccaaatgtcagcgtccagacaagcgtgcttgtccttcaacgcaaatccaatgaattggtaaagcttgaagaggccgcaggccgcatgaacgaatatcaagtatttatggcggtagccaatcatgtcggccatgacaaacgtggcaacaccacttacgttcgtgacaaaaaaggaaacgaggtagtcgaagagattgagcagagctttaaagaatatgaagatggccaaatagtttataaaaagcaaaagacccaacgtaaagttgttgacgacaacaccatgcaaatcgctcaggagtttcgcaaatggctctccgagcaagactaa

SEQ ID NO: 328560 - DNA, 1449 bp, Pseudomonas aeruginosa
atggctctccgagcaagactaagcgcccctcgcgaagaaaaagatcagtggccctggcataagacaaagagtctagccctgcctgtttctgcgctctggaacaatgaaaggcgcatggaggctgagagttacctttcgagcggatatggtctacgcctagctcttgaggccaaactctcagttcacgaacgcctcggggcgcttgctaacgtctggcaaccatctcgcctcaaagggatcactgttggtgaagagtatggcacgccatttctggctgccacccaagttttcgatcaaaggcctgtgcctcgaaaatttctttcgctagatcgaaccgacagctcagctaatcgtttcgttactgctggaaccataatgcttacatgctccggctctgttggccgggcaactttagcgacagatgctattaaaggaatactcatctcccacgatctgttaaggattgaagcgactgagcctaagtatcgtgggtgggtttatgcgtttctacgctcacccacagcacgggctatgatgacttcggctcaatatggccacatcattaaacatctagagccttcccacttgtatgcattgcctgttcccagccccgatgacaatctcgccgaacagttcgagtgcatgacagcgcgcatcctagaggagcggaatcaggcctacaccaaattcctagaagcagagcgcctcttcgaaaagtacattggacagccagacttcaataagcgtgacgaggttggcttcagtgtttcatcctcatcattagcttttggaagaagaagacttgaaggcgtctaccacaatccatccgtacaggctctctatgcgcacttcaagaaagccaatctaactaccgagtccctaaagagcataggtgcacaatgctggcttccaggacgttttcaacgcatcccagcagaagaaggtattgagttggtaggtagcgcaaatctatttgaggtcaatcccgacctaccaaaacggattgctgacatcaactttggcgatgaggctcaggggcgagtgaaagaaggatggctgcttttggcgcgctcaggccaaacctacgggctcaacggaacacttgccatcgccaacaaattcttagaagaaaaaatcatttcagaccatgtgattcggataaagcctagggaaaactttagtagtcgagtaggctatatctacacagcactttcgcacccaaccctgggaaggcctctcgttaaatctctggcctacggttctagcatcccggaaattgaggttgaggatgtcaataacctgcaagttgttcggctcacagaagagcaagaggcagccattgctgatcttgctgaaagtgcagctaagctctatgcggatgcagacattctggagaatgaaatgacgacactcatggagcagcatctgcagaaaattctcggaaaatag

SEQ ID NO: 328561 - DNA, 1044 bp, Pseudomonas aeruginosa
atgaaggcccaggaagagattttcgagatcgtaagaacggctcgccaacggataaagcagatgccgtccagaagccgatctaaggctaccgatgatgattatgttcgcgaatataatcgtatggttggcgatgaaggagctgatccagaaaaactatggtcagcaatctgcgcaaccaaaagtaagtctacatatcggagaagagtggccgcaacaattcactgttgtcgtgttcagcttcaggaagcattgcggagccaggatgcggcccagcgtgcgggtgatacgaatgccctcaaataccaagtatcagtgatcgaaggagcgatcggaatcctgaatattgttgaaaggcacaaaggacagtgtcccctggagaatacggtaaggcgaaaatcaaagcggtctgacttgaaatacctgcctggcaattggcgggagcaattgtataaaaagctcgagggcagcaagtacgaactggcatatctggtagaggctatttcgggatgtcgaccaggtgaactcgagaagggcgttaaagtgatttgcaaaaagagcgggctgctgactatccgggtcgacaacggcgtcaaggttactgctcagaaagggcagccttggcgagaaatcacctatcgagtcgatcagagtccgttggttagggctctctatgaggtctgcagaaaggtcgcaccagatacggaaaagatcgagacggttgtcgacatcgagaaaactaccaactggcgtgcagcgctgtcgtcagccggacagaagttatggccgagactgaaattcagggtctgcccgtaccacctccgcaacgccgcagctagcgactggaagcgggctgggctgagcgaagaggagatctcagctgcattgggacactgcgtgaacaagacctccagcctctatggtcaatcccagatcggccaagggggcagcggtttgtgccccgttgaagtaagagctgcacggcctgtcctgaatacccgcactccatctcctcaagtaaatcgggtcttcctgagcactacatga

SEQ ID NO: 328562 - DNA, 135 bp, Pseudomonas aeruginosa
atgctctcgatagccaagcagtacgtcaacaagcgcagaattaagtggcttttgccacactcggggtttcccacggtaaaagacctaataaaccccgaggaaagtttcgtcacaccgaaatcgctcggggtttag

SEQ ID NO: 328563 - DNA, 222 bp, Pseudomonas aeruginosa
atggctaaaaagactatacccgatatcgtgctagacgacgccctggtgaccgccaatcctcgattagaggatcccaaagccgaatccgagctcaaagccctgagacagttacttggcccagcatgcgagaaagttgttgaagcatatgcaacagtttccaaccaaaaaggtgcgaaacgtgccttcagacacttcattcaaaacttaatcgccgcagcctaa

SEQ ID NO: 328564 - DNA, 1551 bp, Pseudomonas aeruginosa
atgagcaataagaccgcttgggagaaagcagctgaggcacagggcacaaccgaatcggaacgagctctagcccggctcgcccgcaaggcgttcctgagtatgtggagctacccaaacgtttatagcgacgagggtagatcgggcggcaagggtgacggcaaggagttggtagacctattggtggtctttggcaccgatgtgcttctgttctccgacaaacattgcgcgtttcagtcggacgtggacattaagattgcctggccgcgatggtacaagcgggcaatagaaaaatctgcaaggcagcttgcaggggccgaaaatttcctacgtcggttcccggaccgcgtgtttgtcgataaatcatgccagaccaagttgccggtgacgcttccggatcccagcgtagcccgctatttcctgattgctgttacgcgaggcggccatgaggcagcggttcggcacttcggcggtggaagcagcggtagcttgatgctcaacagcatgcttgagggggatgcccactacgaacacccgttcgaagtcggatttccgctgaagaaccgccgcttcgtccacctcctcgatgagatgacggtcgacgcccttttggaggagctggacactgtccccgaccttgtcgactacctagtttgcaaggagcgctattttggctcgaacggcttgttcatgcacgttgccggcgaagaggagctactagcgcattacatgtgcacgatggagaacggcaagcacgccttgcccaaggtgccgcctggcactcaagccgtcaccctcctggagggtgactggcgattctatcgatcaagccctcaacgtgcggctaaacgcgaggccgaccagggcagctacatgtgggatgcgctcatcgagcaccaagcgtcctttgttcgcaccgggacagctatcggccttcccgacacgccgccggagaccattgaccacgagcgaatcctgcgcgctcttgcagcagaaccccgactagctaggcgagagcttgctgaacatttccgttttgcgctcagacacagcgagcccggcaagaaattcgcgcgcataattctgagcggcaacaacatgtcccgcgcgtacgttttcctgacggttccaaagccaccgggtgatagctaccaggcctaccgggagaaacgctcggccgcattgctggcgtactgtcacggcatccaaatccgttttcccaacgtgtctgaagcaattggtattgcctctgaacccttctccgagaagctctcttctcaagatttcctatatgtcgacctcagtggtgagatgagtccggaagagtccgccgcttggaggagcgcaatggaggagctcgatgtacttcaaactccagcccaggaagtcgagtgtttcgggggaaaaagtcatgaatttccgatgcctttcaacttcggcggaccgaaattttacgattacgagtccggcgctcccatgaatcgagccgagcgacgcagaatggcacgagaggcccgaaaaaaagctaaaaaggcgaacaagccaaagcgataa

SEQ ID NO: 328565 - DNA, 4248 bp, Pseudomonas aeruginosa
gtgtcgaccccctcgctaaccccgtcgccgcctcccgccggcgacccactgaccgtacccgaccgaccggcagccaaggctggcctgctgttgctggtcctgttgatgctcggcctgctgctctggcagatgagccaggagctgcgccagcaggaacgcttcgaacacgagcgagccgcggcccagctcgatcgtctcaacgaccgcctgtccctgaccctcgaactcaaggcgcgcaccgccctcgccctgctcccgggcgtgccccccagcgagcgtggcgagatccagaacaggctgttgccacgcatcagcgatgcgctgccacaggtccgccagttgcaatgggtggacagcgccccgcagacaggcagcccgtcgccggaaacgacgctgcccgagcagttgcgccagcacgccggctccggcctctaccactattgcctcgacccgcgcgacggcgaatccctctacctgaccctgcgcgaacccggcagccgccgcgacagtggcttctggctgttgcacctggccagcgacagcctcgcccagtggagtcccgacctgcccaccggcaacctgctctggcgcctggaagaccaatacgccgggcgggtgctctggcataccccagggagcacggcgctgctcgacgacatgcagaccctcggcgtggaaccgctgcgcaacagcgactggcagcttcgcgggctctacgacagcacgcgagtgcggctcggcctgctgccgggaatcggcggcgagctggcgatcttcctcctgctggtcggcgtcaccgtgtacatgctgctgcgcctgcaccgcgagcagcaaggcctgcgcgccatgaccctggcctcgcagcgcagcctgcgccaggcggccacggcactggcggcgatcgacgagcgggtgctggtgacccgcgccgacggccgcctcagctacctcaatccccaggccgaacgcctcttcggcatcagttcggcccaggcccgccagcatcacctgctgggcctgctgccagacctcgagccaggctggctgacggacgccggtggcgacggcgagacccgtagcgagctgctgccgctgcgggtgcgcggcgagccgcggacgttcaccctcagccgccatccgctggccagctatccggcgctcgccgaccaggcctggaccctccgcgagcagatcctccagggcgggcaggtctgggtgttgcgcgacgtcaccgaggaacagcacgccctcggcgtcctggaggaaacccggcggcgctaccaggacatcttcgaaggggtcggcgtggccctctgcgtgctcgacctctccgccctgcgccaggctctggtggagcaaggcttggacagctgcgccgcactgcgcgcctggctcgccggcgaacccgggcggcagcaggcgctgctggagcggatccgcatcaccgagatcaacgatgtcagtcgccgcctgctacagatcgattccaccgaacaggcctggcagcgcttgctcgaccacggcccgctacaaccggacagcctgcgcctgcaggtgatcgaggcgctcatcgagcgccggccggtactcgaacttgaagccacgctgcgctgcggcaagagcacgccgcggcacctgtggttgcaactgcgcctgccggaaaaccccggcgaatggcatgcggtgaccctcagcctgtccgacgtcaccagtcgcaaggaagtcgaactgtcgctgatcgagcgcgagaagttctggtcggacgcggtccaggcggtgcccgataccctctacatccacgacctgcacgcgcgccgggtgatcttcagcaaccatcacctgggccagcaactgggctacaaccaggaagaactggcgcggatgggcgagaacttctgggaaaccctgctgcaccccgacgaccaggaatactactggcgcatccgcaacctgcagcacgtggtcggcgacggcctgctgctcgacagccagttgcgctggcgccaccgcgacggccgctggcactggttcgacatccgcgagcaggccttcagccgcgaccgcagcggtcgcgtggcgcgcctgatcggcgtggccaaggacatcaccttcaccgtcgaggcgaacaacgcgctgcgcgagaacggccgacgctaccgcatgctggcggaaaacatcagcgacgtgatcttctccaccgacgccgagctcaacgccagctacgtcagcccctcggtacagcacgtgttcggctacagcccggaatgggcgctgctcaacggcctccaccagaccgccaccaacccgcgccagctcggccgcctgaacggcctgctgcgccgcgtgcggcacgccatcggcgaccgccagaagctcgccgagctgcgggaaaaccctggccagcatctgttcgccctcgactgcctgcgcgccgacggacgcaagattcccatcgaactgcggatcgtcctgatgtgggacgagcacgaccgcttcgaaggcctgctcggcatcgcccgcgacatcagccagcagcgccgcgccgaacgcgagctgcggatggcggcgacggtattcgaacactccacggcggcgatcatggtcaccgacccggccggctacatcgtccaggtcaacgattccttctcgcgcctgaccggctacagcccggccgacgtgctcgaccagcagccgcgcctgctcaccgccgaccgccaggaagccaaccagctcaagcacgtgctcgccagcctgcagcacagcggcagctgggaaggcgagatcctgcagaagcgcaagaccggcgaactctatccgtcctgggtcggcatcaccgcggtgcgtgacgaggaaggcgacctggtcagcttcgtctgcttcttcagcgacatcagcgagcgcaaggccagcgagcggcgcatccaccgcctggcctactacgacgccctcacccacctgcccaaccgcacgctgttccaggaccgtctgcataccgccctgcagcaggccgagcgcaacggccagtgggtggtgctgatgttcctcgacctcgaccgcttcaagccgatcaacgactccctcggccacgccgccggcgaccgcatgctgcaggaagtggcgacccgcctgagcgcctgcgtcagccaggacgataccgtggcgcgcatgggcggcgacgaattcaccctgctgctgccttcccagggcgaccgcgagatcgccctgaaacgggcgatccaggtcgccgagctgatcctcggccgtctggcccggccgttcaccctggaaggccgtgaattcttcgtcaccgccagcatcggcgtggccttgtcgccccaggacggcgccgaactgagcctgctgatgaagaacgccgacacggcgatgtaccacgccaaggagatgggcaagaacaacttccagttctaccaggccgagatgaacgctcgcgccctggagcgcctggaactggaaagcgacctgcgccgcgccctggaactgggcgagttcgtcctccactaccagccgcagttcaccggcgacggccgccgcctgactggcgccgaggtcctgctgcgctggcagcatccgcgccgcggactggttccgccgagcgagttcattccggtgctggaggagatcggcctggtggcccaggtcggcgactggctgctggcggaagcctgcaagcagttgcgcagctggcacaaggccaaggtgcgggtgccgaaggtctcggtgaacctctcggcacggcagttcgccgatggccagttgggcgagcggatcgccgcgatcctctacgagacaggcatcccgccggcctgcctggagctggagctgaccgaaagcatcctgatgagtgacgtcgccgaggccatgcagatcctctccgggctcaagcgcctcggcctggccatcgcggtggacgacttcggcaccggctactcctcgctgaactacctcaagcagttccccatcgacgtgttgaagatcgaccgcagcttcgtcgacggcctgccccacggcgaacaggacgcacagatcgcccgggcgatcattgccatggcccacagcctgaacctgatggtgatcgccgagggcgtggagagccaggcccagctggacttccttcgcgagcacggctgcgacgaggtgcaaggctacctgttcggccggccgatgcccgccgagcagttcggcatgctctacgccagcgacgtgctgttcatgttcaacgagggctga

SEQ ID NO: 328566 - DNA, 564 bp, Pseudomonas aeruginosa
atgaccctgatttcccatgacgagcgactcatcaaggcgctggcagtcgctatcgtcgaccgcccgcgagcgacgctgaaggaactggccgaggcggccggcgtaagcaaggccaccctgcaccgcttctgcggcacgcgggacaacctggtgcagatgctcgaggaccacggagagaccgtactgaaccagatcatccaggcctgcgacctggagcatgccgagcctctggaggcgttgcagcgcctgatcaaggaacacctcacccaccgcgagctgctggtattcctggtattccagtaccgcccggacttcctcgacccgcacggcgaaggcgcacgctggcagtcctacctggaagcgctggacgccttcttcctgcgcggacagcagaaaggcgtgtttcgcatcgacatcacggcggccgtgttcaccgaactgttcatcaccctggtctacggcatggtcgatgcggaacgccgcggacgggcggccagctccaattccgcgcataccctggagcagatgttcctccacggcgcttccaatccggcgcgctcctga

SEQ ID NO: 328567 - DNA, 1065 bp, Pseudomonas aeruginosa
atggtgttgccggtggaggtcctgacggtgcaggccgagcccctggcgctgagttcggaactgcctgggcggatcgaaccggtgcgggtcgccgaggtgcgcgcgcgggtggccggcatcgtcgtgcggaagcgcttcgaggagggcgccgacgtcaaggctggcgacctgctgttccagatcgatccggcaccgctgaaggctgcggtgtcgcgcgccgaaggtgagctggcgcggaaccgcgcggtgctgttcgaggcgcaggcgcgggtgcgtcgctacgagccgctggtgaagatccaggcggtcagccagcaggacttcgataccgccaccgccgacctgcgcagcgccgaggcggcgacccgctcggcccaggccgacctggagaccgcgcgcctgaacctcggctacgcctcggtcactgcgccgatctccgggcgcatcggccgcgcgctggtgaccgagggcgcgctggtcgggcagggcgaggcgacgctgatggcgcgtatccagcagctcgatccgatctatgcggatttcacccagaccgcggccgaggccctgcgcctgcgcgacgccctgaagaaaggcaccttggccgccggcgacagccaggcgctgaccctgcgcgtcgaagggacgccctacgagcgccagggcgcgttgcagttcgccgacgtggcggtggatcgcggcaccggccagatcgccctgcgcggcaagttcgccaaccccgacggggtcctgctgccgggcatgtacgtgcgcgtacgtacgccccagggcatcgacaaccaggcgatcctggtgccgcaacgggccgtgcaccgctccagcgacggcagcgcccaggtgatggtggtgggcgccgacgagcgcgccgaggcgcgcagcgtcggtaccggcgtcatgcagggttcgcgctggcagatcaccgagggcctggagccgggtgaccgggtcatagtcggcggcctggctgcggtgcagccgggggtgaagatcgtgccgaagccggatggtgcccaggcgcaagcccagtcacctgcgccgcaacagtaa

SEQ ID NO: 328568 - DNA, 489 bp, Pseudomonas aeruginosa
atgaaatccatcaagtccctgccgtcctttgctgctcttgctctctgcctgagcgtttcgtccatggctagcgcggccaccatcaccccggtcaactcggccttcaccgcacctggcaccatcagcgtgagctcgccggcgtcgctcaatctgccagtgacctgcaacatcaccttcaagggcaagaccgccgccgatggttcctatgcctcgatcgacagcgtcaccgttagcggcagcaacaccctgtgcagcgtgccgcagatgaccggcctgccgtggaagctgaccgtttccagcaccaccgccggcaaggtcgatggcgtcggcttcaagattctctcctctacctgtggcccgagcaccgtcaacggttcctggagcaacgccaccaataccctcagcgccagcaatcagtcgctggcaggcaactgcaagatcaacagcctgagcgtgaagccgaccccggccttcgtagtcaacccgtaa

SEQ ID NO: 328569 - DNA, 867 bp, Pseudomonas aeruginosa
atgcagtcctcgcaactgctcccgcttggcagcctgttgctgtcgttcgccacgcccctcgcccaggccgatgccctgcacgaccaggccagcgcgctgttcaaacccatccccgagcaggtcaccgagctacgcggccagcccatcagcgagcaacagcgcgaactcggcaagaaactgttcttcgacccgcgcctgtcacgcagccatgtgctcagctgcaacacctgccacaacgtcggcaccggcggcgccgacaacgtaccgacgtcggtcggtcacggctggcagaaggggccacgcaattcaccgacggtcttcaacgccgtgttcaatgccgcgcagttctgggatggccgtgccaaggacctgggggagcaggccaagggtccgatccagaacagcgtcgagatgcacagtaccccgcagttggtcgaacagaccctgggcagcatcccggaatacgtggacgccttccgcaaggccttccccaaggccggcaagccggtcagcttcgacaacatggcgctggccatcgaggcctacgaggcgaccctggtgactccggactcgcccttcgacctgtatctcaagggcgacgacaaggccctcgacgcacagcagaagaaaggcctcaaggcattcatggacagtggctgcagcgcctgccacaacggcatcaacctgggcggccaggcctacttcccgttcggcctggtgaagaagcccgacgccagcgtgctgcccagcggcgacaagggccgcttcgccgtgaccaagacccagagcgacgagtacgtattccgcgccgcgcccctgcgcaacgtcgccctcaccgcgccgtacttccacagcggccaggtctag

SEQ ID NO: 328570 - DNA, 813 bp, Pseudomonas aeruginosa; identical to SEQ ID NO: 320481

SEQ ID NO: 328571 - DNA, 1302 bp, Pseudomonas aeruginosa
atgaccccacttcaattgaccgaggaatatctcttcgcacacgacctcagagaggccagccagaagacctatcgagcagcaaccagagcgctcatgaagcacttcggcagcacagtcaccgtgcaggaaatcactcatcggagtgtattggaatggagacgaaaggtattggagcaggggctatccaaacgcagttggaacacttactcgagccacctgcgcaccgtttggggatatgccattgagtacgaactgctgacccacagccaaatcaatcctttcaagaaaaccggagtgacgccgccaaagcggccgagcaagacagtagcactcgatgccatacaaagcgctcgctcctggctgaaagtgctagatagctccgagcactgcacgggggaacgcgcacgaatcactccggtttggttctggcggtgcgtattcgagacattctacgaaaccggcatccgtctgaatgcgctgctgtgcattcgtaagtgcgatgtggactggaaaagaaaaatgatcctgatccgggctgagacagagaaaacccaccgagagttttccgtccccatcaccgatgggatagccccccatatacggcggctactccaggaagccgagcaggtaggcatgagccaccacgaccagctattcaatgtgaatcgtttctcacgccactatgcacgcaaggaaatgaatgccgaccaagtcgaggcgatgtacagaaagttgaccgagaagaccggggtacgaatgacgccccatcgattcaggcacaccctggcttccgacttgatgaagcagcatgagcgcaatatccatgtcgccaaggatctactcaaccactccaacatccaaacaacaatgagctatatcgagacggatcacgatcagattcgggcagtgcttaacgagcgaagcctagctcagggcgccgtggcacagacccgaaaggtcgattacagtggatcgccgcagaaggcggctcattcaaggccggcgctgccacgcccaactcagagaggaagcagtccgtcgacacaggtacccacagcagaagtgacgagtacggggtctgatcaggagattcaggcttacaactcaccacccttctgtactcaaagaagagccgacgcggtacccccaccagcggacaactccgaacaggacttgctgttcgcgctgctggcccaacacctgttgcgacaggcaagcctgacgacaaccgagggcaactgcgctcctagatggggtaccgttgtcggaaagaaagcaagccccccgttggccgatcggtag

SEQ ID NO: 328572 - DNA, 1251 bp, Pseudomonas aeruginosa
atgtctcgcaaaccaagaacccagccggcagcgttgcctgtgattccttccgagttgctggagtcgtttggtgacggctcgatgacggccgaagctatcaatgcggcgtccctggctttcaagaaggccctgatcgagcgggccctggccggtgagctgaaccatcacctgggctacccggccggcacagccaagcccgagcggatgagtaatcagcgcaacggcaagggggccaagacggtgctgacccaggaggggccgatccgtatcgacgtgccccgagatcgcgagggcagctttgccccgctcctgatccccaagcatgagcgccgttttactggctttgatgacaagatcgtcgccatgtatgcccgcggcatgacggtgcgcgaaatccagggctttctgctggaacaatacggcacagacgtctcgccggacttcatcagctcggtcactgacgaggttatggccgaggtcaccgcctggcaggccaggccgctcgagcccatgtatccggtcgtgttctttgacgcgctgcgggtcaagatcagggaggatgctgtcgtgcgcaacaaggccgtctatctggccctgggcgtgctacccgacggcacacgcgatatcctgggtttgtggattgaaggcaccgaaggcgccaagttctggatgaaggtcttcaacgacctgaagacccggggcgtgggcgatatcctgatcgccgtgactgacgggttgaagggtatacccgaggcgctggccgcggtgttcccggccaccacactgcaaacctgcatcgtccatctgatccgcaacagcctcgattacgcgagctggaaggatcgcaaggcgctggccgccgcgatccgaccgatctataccgctgtcagtgctgaagcggccctggccgcgcttgacgcctttgccgatgggccgtggggtcagaagttccccaccgtctgcgcggcatggcgcaatgcctgggatcgcgtgattccgttcttcgcctttgcgccggagatccgcaaggtgatctacaccaccaacgccatcgagaatgtcaactcgcagctacgcaagatcatcaagacccggggccatttccctactgacgaagccgcctccaagttgatctggctcgcgctgcgaaacatcaccgccaaatggagccgatccgctcacgactggaagcaagccatgaaccaattcgctatcctttacgctgaccgattcagtcgcccttccgtgtaa

SEQ ID NO: 328573 - DNA, 357 bp, Pseudomonas aeruginosa
atgaacgcgcacaccaacaaaggttttgcctcccgggtcggttttggtctgggtacgcttgtgcgtttctgcctgcatgatcgtcggcctgtcgtgcgctgggtcaagcgagttagcctcttggtggtgttgttcgttatctttgctcagaactttacctggatggccagtgccttcatgaccttattgtcgtttgggttgattgggtgggcgttggttaaaggtgacttttcgatcttccagcagttggaaaaagatgaagcccaagcagctccgtatggacgagatgttttcggtcgagagctgaattcttgggggaaagtcgatagtcagctttttgatcctgatagtgagtaa

SEQ ID NO: 328574 - DNA, 1533 bp, Pseudomonas aeruginosa
atgaccttcatgaccaatgactacctggagtattacctcaccctcctcggctggatcatcaacaacgggatctggaacatgatctcggacacgggcctgtttgcggtgccgttcgcggccatcgtattgcgcgaatggctgaaagttcgcggggaaggcgccgacgagggcaacaagggcgtgctgtctctggcccgcatcgagacgcatatctacgtcggctacatcgtggtcgccctggcgggaatcccggtcgtcaacgtgagcttcgacaccatcgagttcgaccaggcccgcgcccagcagtgccagtacagcctgccagcgccggcagacaccggctggtcgaactccttcagcagcctggccggcaagagtgcgcagatgccgctctggtgggcgatgatgcacgccctgtccaagggcttcaccgccggcgcggtcgcggccattccgtgcggcacggatctgcggcagatgcgaatggaagtggacaatacgcgcgtgaacaacccgctgctggcacaagaaatcgctgatttctccagggactgctacgggccttcccgtgcgcggctgttcatgcgacaacccgatctgggctccgtcgccgaggacaacaaggcgctgcaggacctgaactggatcggctcccgattcctgctgaacaccccggggtactacgacaccgactactcgaagagtccccgtcagtcgtggccctacaacgccacccgcgacgccgggctgccccaggtgggcggtggtggtggctaccccacctgcaagcagtggtgggctgactcagggatcggtttgcgtgatcggatcaaggaccaggtggatccggacctgatgaccagcttcctcaagtgggcaaaatggctgaaccaggaggaggtaaccgaggcagtcattcgccaggtgatctccccctccagccaggtcaaaggcaacgtctataccgactatggtgggcaggtgggcggtacggtctggaacggcatcgcgagaaccgcaggaaccttcggcgttgccctgggcagcctggcctatttcccggcgatggatatggtccgccaagcactgccgatggtgatgtcgttcctgaagatggccatggtcatctgcattccgatggtcctggtcatcggcacctatcaactgaaagttgccatgacgatgacggtcgtattctttgcgatgatgttcgtcgacttttggttccaactggccagatatatcgatagcacgatacttgatgctttctatggttcggggtcaccgcatctttcgttcgatccagtcatggggctcaatacggcgactcaagatgcaatcttgaacttcgtgatgggctctatgttcttgattcttcctgcactctggatcactgccatcggctgggcaggtcttcagattggaacggtgctcagtgggctcgagacaggagttaaaagggtagatgcagccgcagcccaaggtggaggtctagctaaacaaggaattagttctttccagtcaaaagactaa

SEQ ID NO: 328575 - DNA, 2967 bp, Pseudomonas aeruginosa; identical to SEQ ID NO: 324398

SEQ ID NO: 328576 - DNA, 585 bp, Pseudomonas aeruginosa; identical to SEQ ID NO: 324382

SEQ ID NO: 328577 - DNA, 198 bp, Pseudomonas aeruginosa
atgcaatacggaaagctggcactcgcccatcttcgtctcgaactgccgctgcaggttcttatgtccaacgccggcttttatatcggcacccttgatgaagaaggaccagcttcgcgcgaatcggttgaatactaccaatcccgcgaacttgctcaacaggcattagacaacggcacttggtcgcaacgggaatattaa

SEQ ID NO: 328578 - DNA, 390 bp, Pseudomonas aeruginosa
atgtccaagcaatccaccagcttcgaaatcggctttgccctcggcagtgttgtgcgtgagttccgcagagcgctcagtcgccctccggtcgtagtgcatgcacaagctccggttgcgtcgagcgtccagcgtatcgagcccgccatgcttgctggcccgaccgccaaggagctggaacacatcagcgacgtcccggcgatcgtccggttgaagaaagtcaacctcaatgactggtatctggccaacacgcgcgaagtgcaaaagcccaagcgcgcgcgcaaatccaaaccggccaaggcggcccccaaggccaaaacaccggtcaggaaggagctcaagctgggctcccttgatcaactgatcgcaccggttgatccgctgacctgctga

SEQ ID NO: 328579 - DNA, 390 bp, Pseudomonas aeruginosa
gtgcgggcgctggcgcggcgcacccaacagtccacggccgagatcgagaccctgatcggtgccttgcagaatggcacgcagcaggcggtgcagcgtatgcagcgcagccaccagttggtggaccagagcgtcgacgacgcgttgcagaccgaggcggcgctgggcaacatcgccacggcggtggcgctgatccagcagatgaaccagcagatcgccgcggcctccgagcagcagagcgcggtcgccgaggagatcaaccgcagtgtcacggcgatccgcgaggtggccgatcagtcggcccaagccatgcagtcgacggcttcgtccagcgaacaactggcggagctggggcgcgaactacagggcatggtcaggcatttccgcttgtag

SEQ ID NO: 328580 - DNA, 1197 bp, Pseudomonas aeruginosa
atgaccgaaaccacccagccccagcctcgtctgcgtccgttcgccgactcctctcccgccgccgtggtggccggcttcgtcgccatgctcaccggctacaccagctcgctggtactgatgttccaggccgggcagaacgccggtctcagcagcgcgcagatttcctcgtggatctgggccctgtcgatcggcatgggcctggcgaccatcggcctgaccctgcgctaccgggtgccgatcgtgatcgcctggtccacccccggcgcggcgctgctgatcagcagcctgcccggagtgccgtacagcgaggcgatcggcgccttcatcgtctgcgccctcctgatcaccctgtgcggcgtcaccggcagcttcgaacgcctgatgcgccaggttccctcctcgctggcctcggcgctgctggccggggtgctgttccgcatcggcatcgagatctgcaacgccgccgagcaacagaccctgctggtgctggcgatgttcttcagctatctgctgtgcaaacgcttctcgccgcgctatgcggtgttcgctgcgctactggtgggggtgctgctggccgggatactgggccaactggacttcagcaggttccgcctggaactggcggtaccggagtggaccacgccgagcttctccctggccgccaccatcagcatcggcatcccgctgttcatcgtcgccatggcttcgcagaacatgcccggcatcgccgtgctgcgcgccgacggctaccaggtgccggcctcgccgctgatctcgagtaccggcatcgcctcgatcctgctggcaccgttcggctcccacgggatcaacctggcggcgatcagcgcggcgatctgcaccggtccctcggcccacgaggacccgcacaagcgctataccgcggcgctctggtgcggcttcttcaactgcgtcgcaggaaccttcggcgccaccctggcagcgttgttcgcggcgttccccaaggcactggtactgtccatcgccgccatcgccctgctcggctcgatcatgaacggcctggccaactcgatggccgacgagcgccagcgcgaggccgcgctggtgaccttcatggtcaccgcctccggcttcaccctgctgtccatcggctcggcgttctggggcctggtggccggcctgctgactcagttcgtgctcaactggcggcgcggctga

SEQ ID NO: 328581 - DNA, 1131 bp, Pseudomonas aeruginosa
atggacctgaaagctgatgcgctcgaaaaactagtccagatagctcgctatggggctgtaggagatggcgaaaaggttcgagtccacacgatgcgcttgattcgtagcttacgagaggagggaaaccctttagctacgaggctccaagacgcagttttctctcagcgttttgatgaggctagcaccgcagtcatacgacgggtaaaagaaacagggatttctgcaccacctcctactgatttagactcaggaggagagttgttaaatattgaggatcctgtggcccttccagaagggtttatgcggtcgagggaaatcaaggggccattggaccttattgtaggtgagtttaaaaatctaaagaaattaagtgagtttggtataagtccaactagtaaggtgctttttacagggcctccgggtgttggaaaaacagtggcggctagatatctggctagtaagctaaaattgcctcttgtagttttggatctggcctctgttgttagtagttttttggggcgtactggtgtaaatattaagaaggcgcttgagtatgcatcctctcgtccatgtgtccttttgttagatgaaatagattcaatagctaagaaacgagatgatatttctgatgttggggagattaagcggttagtgactgtggttttgcaagaattagacttgtggcagtctaagggtatcttaattgctgctacaaatcactatcatttgttggatccagcggttcaacgccggtttgatagggtggtcgagtttaagcggcctggttttttagaattgcttgaagttggtgggctgctgattcgtcgtgaagagaaagtacctaaagcatggatagtgttcatggctaaaataatggctgatacatcgtttagtgattttcagcgtgaggtaaataatcttaggcgacactatttgattgaaggggaggtcggagctgaagaatatctaaggtctcagcttgagataatggtgaggccagaagatcgagctttcagaaaagagcttgctgtgcttctagtgaaggatggaagagcttcgcagcgctcagcgagtagggttactggagtttctagagatacattgcgtcatgctttaacagcggaggtttaa

SEQ ID NO: 328582 - DNA, 2208 bp, Pseudomonas aeruginosa
atggcagaaaaagggcgttttctttttgggcggggcgagaaaattaccgagcaagttgatttcaggggtgggccaaataatactaataacccttatactattactcgtcaaattcaacggcttgagaaaaaactggatgcgttgacgaaggatatttcaagacttccgaaagatactttagccggtggtaatgctgtggctgctgtaacacttcaccctcaatttctctctcggtccggttttcctgaatatttgctaaagttttttgatttgcgtcttattggcagtcggccaaagaaagttaagccagaagctggtcgtggttctgacagtatagaaggcattgcgtctaccacaatatttgttgctggaacagagtttgcttttgaaaattttcatgattctttggcggactttcccgatgaggacgagaacttatctggtgacttggttaagattgaggatatttcattattcagaggtaaggataaaatacttggggaaatagaaagttataaggctgaggtcgaggttgtagtacatttcgatagtgctcaagatctaggatgggaggaaagcctcgttaagtactctgagaacagccgagtagatttggatatggctcgagcgtatcagtctcgaggccttctctttgtaccagccaaagctacaaagaaatcagtagagaagttggctgagttttcttttattcgggctgttcgtcctatgcctaagcttagaacaattaatgcgccatctttagttcgttcgaaagcttcggtggtgctgccgactgataagccttttgatgaaagttttcgagtggcagtatttgatggtggtcttcctgctgatcatccgtttggagtttgggtacgagctatagagccccttgcatcatctcgtattggaaaccctgttactgatctacaagcgcatggccaagcggtgacatccgcacttttattcggtcatgtagatggcgcgctggaaagaccttatgcatatgttgatcactatcgtgtattaggtgatggagtatctgatagtagtttatatgatgtgatgctgtatgtagatggagtattgtctcaatcaagttactcgcttgtttcatttagtattggtccatatcaggttgccggtgatgatgaagttactgcctggacggcaatgcttgatgatcatctagggtctggtgatgtacttgctacaattgcggtaggaaatgatggagaccaaccttggccgaattcacgtattcaagttccaagtgatagtgtaaacgcactttcggttggcgcttcagacgggcaggagaaagggtggtcaagagccccttacagcagtatcgggccaggtagaagccccggcttggtaaagcctgatatcgtttcctttgggggggtggaaggtaagaagtttaagttcgtatttccagggttggtaacggctgaagattgtggtaccagctttgctacccccgcagcgatgcgtgtagcggcaggcttgcgtgctttcttcggagatgatttaacaactacagctatcaaggctctccttgtacattccgctgaccaaggaggtcactcaagggatgaggtaggctgggggcttgtggactccgacatcgaacgtatagttaagtgcgcagatggcgagataaaggttctttacaaaggaaagcttgagcctggaaaagttcttcgagccccgatccctttgcccgatgaagaacttccaggtaaggtcattattaaggcaacattttgttatagctgcgctacagatccacatgttccgggtgagtatacacgtgcgggattagatataaagtttaggccaaataaagatatttttgaaactaatcctgtttatcctaagactgagtctttctttgggcggcactcaaaaagcaatgagcaagagcttcgtttggacgctcataagtgggatgcggtgcggaagtctcaaaagagtaagtacggtagctctctgaagtctccaacttttgacatacactatgttgcaagggaacctgggaaaaaggctgctcctctccggccgccgaagctttcttacgcattggtagtcactgtcattaataaacgtactccagatttgtatgaacgaattgaagcaaagtatcgtaatcagttgatggctattgttccgaaggtcgatatcccagtgcgaattcgtagttga

SEQ ID NO: 328583 - DNA, 183 bp, Pseudomonas aeruginosa
atgccgagtgatcgcccagtgccgatggaaaccttccaattctgcttcgcgggcatcgtcggtagtgtttccggcagggtcgtgacttggggcggcctgactgtcgatatcgaccagatcgagaatgcttggctccgtcgggcgattgaagactatcgctgtggccgtagggggcagaaatga

SEQ ID NO: 328584 - DNA, 1002 bp, Pseudomonas aeruginosa
atgacggtacgcaaggacggcaagacgtggacggctgacttctatgagaatggtcgttccgggcgcaggattcgcaagaaaggcttcgccaccaagtctgccgcgattcgctatgagcaggattttttcgccgtgaagggcgagacgggccgaccgctggatgaccgtctctccgatctggtgaaggtttggtatgacctccacggctgcaccttgaaggatggcaagcaacgcttggcgcgctgtgaggcgctggcgaagcggctagggaaccccctggcgttcgagttcgattcgttggcgtgggcacgctaccggcaacgtcgcttgaccgaggtgaagcctgagactgtcaatcacgagcaacgctacttgtcggcggtcttctctgaactgattcgcctgggctcctggcacaaggaaaacccgctgggcaaggtacggcaaatcaagacggatcaggtcgaacttacgtttctgtccctggatcaggtcgctcgactgctggaagagtgcaaggccagtacgaacaaccatacctatccggtcgcgctgttgtgtctcgccacgggagcccgctgggaagaggcggaaagcctgacgcggggcgctgtgcatggcggcaaggtgcactatcaccggaccaagaatcggcagagccgatcagtgccgatcccggacgagttggagaggttgatattcaaggtgggcatgcctggatctggccgcctgttcatgtcctgccgcgccgcgttccgctgcgcctatcagcgttgcgggttccagacgccgggccagatgacccacattctccgccataccttcgccagccactacatgatggggggaggggacatcctgaccctacagcggatcctcggccactcctcgatcacgatgaccatgcggtatgcgcacctatcgccggagcatttggcctcggctatgagcctgtccccgctgtatcagataaagcacttcgctagtcaggtacaccagtag

SEQ ID NO: 328585 - DNA, 213 bp, Pseudomonas aeruginosa
atgaaaattctacgccgcaaggccgtctgcgaaaagcttggcggcatcaatgacgtaacgctctggcggatcacacgcgatgatccgacattcccggtatgcatccagatcaacaagcgggttgtcggatggctggaacacgagattgatacctggctcggacagaaggccgctgccgcccgcaccgccaacaacaacgctgtccatccctga

SEQ ID NO: 328586 - DNA, 1023 bp, Pseudomonas aeruginosa
atgcgcagcgtgggcaatttgctggacgctggtgtggcaaaagccacgctcaagcgcgatccgctggagcggatcaggcagaatgccgccgaggtggcgaagcaggcggagcagcacgacgccgcccaagtattgactccgcgggtacgccacctgatcgacgaagccgtggagctggaggtcgagcaggcccgcagcgcaggcgcgacaggctacatcgcgcactttctggcgcaggccacgcttcctcatacagaccccaagagcaactactttgaacgcggcacaggcaagctgaccctctccatcacagctaaccccaaacatggcgtgccctatggcggtctgccgcgcctgctgttggcgtggatgtgtaccgaggccgtccgcacaggcagtccggagctatcgctggggcgctcacaggcggaatttctggaaaagctcgacctgtacaacgatggccggtacatcgccagagtgcgtgaccagagcttgcggctagtccgctcgctgatctccgtcagcggcgcggacggggatgcactgggtatcgaaaacatcctgatcgccaaacgggcatttctcttctggaacgcccgcgacactgagcagcccgcactgtgggacagctcaatcaccctcagtacggacttcttcgagagcctgacccatgctccggtgccgatcagaatggaggcgcttcaagcgctcaagaagtcgcctctggcgatggatatctacacatggctggtctaccgcatgttcagtctgaacgtggcgacaatcaagggcggcaagcggcttgctcaggtgccttgggctggcttgatgaggcagttcggctctggctatgcgaatactcctaaggggctggccaacttcaagaccaatttccgcctccggctaaatgaagcgctgctgttctatcccgaggctcggaaccacatcgaggaaacgaaagaccacctgatcctcacccctgcacgcctacatatcgcagcgaccaagaggagaggataa

SEQ ID NO: 328587 - DNA, 435 bp, Pseudomonas aeruginosa; identical to SEQ ID NO: 160031

SEQ ID NO: 328588 - DNA, 837 bp, Pseudomonas aeruginosa
atgccggtctcctccgaagcgtcaggggaatgggtcagcgtgtatgctgtgccgaagatggattgtccctcagaagaacggatgatccgcttggcgctgaacggctttgatgagattcgaacgctgtccttcgacttgtcgaaccgccgattggaggtcgtgcatgacggcgaggctgagcccatcaccgcgaaactggcgaccttggggctaggcgcctctcttcaggaaaccgtcattgccgacccagagacgatcaaggccgctgagagctcggcagtctctgctacgcaggagtcaggcactctgcgcgtgttgctcggtatcaatgcgatcatgttcgtggtggaaatgactgctggcctgatcgcccagtctaccggcctgatcgctgattccctggatatgtttgccgatgcagccgtctatggcctggctctctatgccgtagggcgcagtgcgaaaatgcaggtacgtgccgcgcatctggcaggggtactgcaactgattttggctatcggcgtactcgtcgaggtggtgcgacgctttgttttcggtagtgagcctgaatcgctgatgatgatggcgatcgccttcgtcgcgttgatcgccaataccggttgcctgctgttgatatccaagcaccgcgaaggcggcgcgcatatgaaggcaagctggatattctcggccaatgatgtggtgatcaacatgggcgtcatcgccgccggtgccttggtcgcctggacggggtccagctaccctgacctgattatcggtaccatcgtgggcctgatcgtcctcaacggcgctcggcgcatcctggcgctcaaggggtga

SEQ ID NO: 328589 - DNA, 762 bp, Pseudomonas aeruginosa
atgatggatagtatctggctggtactcggcctggcgctgttgcccgccttaggcaattttagtggtgggctcgctgcggaggcctcccgaactaccgggcgccgtctcaattacgcccttcacggcgctgccggcctcgtcattgcggtggtggcggttgaaatcatgccgcgcgtgctagagaacctctcagcctgggtaatcgccctcgctttcgcgctgggcggcattgcttacgtaggtatcgagaagctcgttgagagtctccagaagcgacaaggccagcagggagaaggcggtcagacgagtgtctggatgatctatatcgccgtatccatcgacctgttcagcgatggcctcctgatcggggcggggtcggcggtctcaccgtcggtcgcgataatcctggcggcgggtcaggttctcgccgatgttcctgagggctttgcgacgatcgccaccatgaaagataaaggaatccctcgtagcaagcggatactgctctctgcttccttcgcgattcctgtgctctcggcagccgtctttgcttacttcgtactcaggaaccagccggaggcatttaagctagcggcactgacgttcacggcaggccttctcacggtcgctgccatcgaagatatggtctccgaggctcacgagagcggtgacgatacgcacatctcaccgctggctttcataggcggcttcgtcctgttcgttctggtatcagcgggcttggaaggggtggtatcgcaaagctaa

SEQ ID NO: 328590 - DNA, 1440 bp, Pseudomonas aeruginosa
atgccgcttgcctttgcccctgtgggctgggcatggcttgcggtgatcgctctggcaacattttttgtcctgaccgcgcagtcttcaaggcgtcaggcgctgtggtcggcctacctctttggccttggctacttcggcgtgggtgtctcctgggtctttatcagcattagccagtacggcaatggccccgtggtggcggtgttagtcacggcggcctttgtctcgctgctcgccctctttccatggggcgtcgcgtacctcgtgcgctgcctgcgccctgagatggatgcaatggcactctggctagggctacctgcggcatgggtgctgagtgaatggatgcgcacctggttcttgaccggctttccctggctcttcattggctacagccagaccgacaccacacttgccactatcgctcccgtctttggcgtgcttggcgtgagtttactggtggcacttctcgctggcgggcttgcctgggttgtccaggggccaagcctgcgccgtgctgcggtagtcggtgccgtgttagtcgctaccctcgccggcttgcaactgctggatcgtgaatggacgcagccagccgctgacccgatcgatgtcgtcctcttgcaaggaaacatcgcgcaagacaagaaatgggacccgagataccgggacatcacacttgagcgctatcaggcgcttaccgcgcagcatctcggagccgatatcgtgatctggccagaagcggcaatcccgatgtggcatgaccaggccaaagcatatcttgctgagcttgaggcgttagccgatcaggcaggcacatcgttaatgattggcgtcccggtacgcgaggcggagggccgtacctacaacgccgtggtaagcctctccgatccctcaggcttctactacaaacgccacctggtgcccttcggtgaatatgttccgtttcgggatcttttggggtcggccctcgacgtgctcggggcgcccatgtccgacttcacaccgggacgggaagcgcacgtcctgaatgcagcaggggtgcccgtaggggcactcatctgctacgaggcggtctttggtgccgaagtcactgagcttctgcccgaagcgcagttactggtgaatgtcagcaacgatgcctggttcggcagctcgctcggccccctccagcatttccagatggcacgcatgcgtgccatcgaaaccggacgtgaccttcttcgagccacgaacaccggtatcacagcagccatcaatcatgagggcaaagtgctcaagcgtgctccgcagttcgaagtggccaccctcagcgccgaagtgacaccgcgaactggcgcgcccccttatgtgcgctggcgggattggcctgtccttggcctgaccgcactcggactcggcctgctcctgctccgtcgaattcgtcggcatcatcggttgggtacatga

SEQ ID NO: 328591 - DNA, 522 bp, Pseudomonas aeruginosa
atgtctacttatggcagtcggctcgcagagaaagcccacgagccgggaaaggcgatgcgctggctgtggctctcgctcctgttactgtttgtcgatcaggcaagcaagtaccttgccagcaccatgctagcgcatggtgaaagcgtgcctgccgcacccttcttcaattgggtccaccgccacaatacgggggcggccttcagctttctcgcggatgtcggcggttggcagcagccgcttttcatcggactggccctggttatctcgatattactggtgtactggctttggcgttcaccacgcgtactgagttatcggctcgccctcagtgcgatcctcggcggcgcgttgggcaatgtcgcagatcgcttgcggttaggctacgtagaggattttctcgattttcactatgcccagtggcactggccatcgttcaacctagcggacgtatggatcttcctcggtgtcgccctctttatttgggcggaaatacgacatcaaccaggcagccgccgccgctga

SEQ ID NO: 328592 - DNA, 498 bp, Pseudomonas aeruginosa
atgcacgactgctgccaagggctctgctgcatcctaaccaatctggaagagcgcaccctgctggacctgctacccggtcgtcagcaagagagggtgacaagacgcctcatgagcatggccaaccgccaccaggtcgagatcgtcagcatggacatgtggaagccctaccgccgcgccttccagacggtgctgccacaggcccgtatcgtggtcgataagttccacgtcgtgcgcatggccaacgaggccttagagaagatccgcaaaggcctaaggaaggagttgaagcccaatcagcgccggaccctcaaaggtgaccggaaaatcctgctgaagcgcgctcacgacgtttcagaccgcgaacggctcatcatggagacctggacaggagcattccccccagctcttggcggcttacgagcacaaggagcgcttctaccatatctgggactgtaccaatcggcgtggtgccgaacaggctctcgccacctggattga

SEQ ID NO: 328593 - DNA, 147 bp, Pseudomonas aeruginosa
atgctctataccaccaagcacaagaagaaggcgccacaagtcaaggaatccccgtttctgggcagagccaccatgacctacaacatgggactccccgagcctgagaagaacttcggtgtcgatctatcaaccttctggaaggactaa

SEQ ID NO: 328594 - DNA, 417 bp, Pseudomonas aeruginosa
atgaaagcgttgctgctggcggccatgccagtgatgctgatggatggcactgccccagacctcaaccactggttgcggatcgagccagccatcgtcgccgccgtggaatgccgtcaagccttgccgttgcacgtactggacggcattgcgcccaatgctcccggcagttggtcgctgacaccggcacgcagcttcacagtgttcgggttgccggtgacgcgtatcgagctgttcatcgacccggatggtgaattgggtgcgagctataccgcagtgatcgaaaagcgcagcctggaacaggtgcgcaagcaactgaagcttgccagccagcgcgggcgcatcggccagctctcggcagatcagcccagcgcagaggttcaagtgacttgcacggtcgccgcaacggagcaagggtga

SEQ ID NO: 328595 - DNA, 477 bp, Pseudomonas aeruginosa
gtgagcattcagcgcatcctctccggcggccaaaccggcgtagaccgggcagcgctggatttcgccattgcccggcaaattccgcacggcggctggtgcccggcaggccgacgggccgctgatggcgtactggatgctcgctaccagttgctggagaccgaatccatcggctaccgccagcgtaccaagcacaatgttcgggacgctgatgcaacgctgatcatttaccgaggcagactggaaggtggcagcttgctcactcgcgatctggcgacgggacacggcaagccgctgctactgtgcgatttgcatgcccctacagaagagctgttggctgcatggcaagactggttgcttagccatcccgtcgctattctcaacattgctggcccgagtgaagcgcgcaaccccggtatttacctgcaggcgagcgcgctactggagcttttctggagcaaggaacatgagccgatctga

SEQ ID NO: 328596 - DNA, 1575 bp, Pseudomonas aeruginosa
atgcgcaaaccaaagcaagcccgcccgttgcgcctgcgggaatacgaagccgccattgctgcgctcaaggcgcgacacccctggcttgcccggcaaatcgtcgaacccgcgccggggcatttggccgtggtggcacatctgtttgcccaggtggaatgtctgctgccgcccacagtggtcgcacgcaagggctcactgtcggtgagttgcaaccgggatcgcctggccattcattaccagccgccgcgacgccacagcgaacgtgcagcagccgtgttcgatctgattgcccagaccaagcacctttcgctgcaaaaatgccccgtttgcggtgtacaggttgtcggggacggcatccgtccgaaacgctgcccgcaacacgacggcatccaaggattgtttgccgaagaagtgcgccgcagccgccagctcatcgtcgaacagggtgtacagcaggtggtgctcgatctgggcaaggtgacgaccgaagatgtacgcgccgccatagcggttgaagatgagcccgtcccgagtgaagccaaaccggaacaggttcaggagcagccgacagaaaccgctaaatcaatgcccttgccgagcatcgtctttctcgatgaagccgggctggagacgttcgtggatcgccaccgaccgaaaggcgacgacaagttcaagcgcgcacaggcgatggcggagcggatcaagcgggcgggccatggtagccgccaactgggcctgctgcccccggactggaaagcccttctggatgagttcgcgcaggcctttccaaacttccatgaactggccgagctgatgcgtgatcacttcgccttgtccagtctgggcgatggccgggtgtcctggcctgccgtgttgctggtcggcccggcgggtatcggcaaaaccgaggcggcacgctggcttgccgatcagctcgtgctaccgttccgggtcttcgacatggcgagtacgcaatcaagttcgccgctcgccggttccgaatcattttggagcaattccgagccaggccagctctttgagctgctggcctaccagccactggccaacccggtggtggtgctcgatgagctggataaggccagcaacgggcgaccgcaatacgacccgctggccgcgctctataccttgctggaaccgcgcagtgcgcgagatttcatcgacctgtcgatccgcgactttgccatcgacgccagtcatgtgaattggatggcgaccgcgaatgagctggaggcgattccggggccgctacgctcacggctgacggtgttgcacattcaaccgcccaggccggagcaggtcagaagcattgcgcagtcgatttacaaccgactccgcgacgagtcgagctggggtaacgcctttgccgagcgactggatgatgatgtcctgtcccgtctgcaagccttgccaccgcgcagtgtgcgtctggttctgcagcgggctttgggttcggcagctcgtgatgaccgaggaatcgtccaggtgcaagacatcagaccgctggtcgagatcagccgccgtggcgttggctttgtcagcgagggatggaattga

SEQ ID NO: 328597 - DNA, 738 bp, Pseudomonas aeruginosa
atgccaacccttgccaacgaacaattgccaggctttgccgccgccttgatacgactgcgcggggaaacgctggggcggatcgctgaagccaccggtatccgcactgccaacctctcggtctggctacgtggcaaagagcaggtgatctccgccaaacgactagtcggcctgttgcaccacctcggtgtggaaggcgggcgcctgcgtagcgacgtgttgcaccagtggcaggatcgtggggcactggatgacagcaagctcgtgctaggcaagctgctggccgacaagcagtcggtgtggttgtttcaggatgagcagccggggcttatcaagacccgctttctgttggctggcgatgtgctgatccgcatggagatcgagccgggcgtcgatcaagcccttgatttggcgacagtcgtcagggtggatcgtgtcatcagcacccctacagcattggccggggtaccaatcgactcgttggcatctgcgcgcaacgtcctcttggccctggcggagcagaccgcatcggacgtgggtgacgaagagctgctggaagggctgatgttccgtctgaccgaaacattaggcagtaatgtcacttcagcgcagggctggcaacaactggagcaggcgctgcgctttgcattcaacgcaggagcccagcctggcgacatcgccaagctggttgatagccatttccgcagcggcggcaacgcggacatgccgccagctcagtag

SEQ ID NO: 328598 - DNA, 210 bp, Pseudomonas aeruginosa
atgagcacagaaccgtgggttaccgccgatcacgtcgcccagcacttgggcgtggccaaggacaccgtgtaccgctggcgcgagcgcaagggtctgcccgcacaccgcgtggggcggctgtggaagttccagctctccgaggtggatgaatgggtgcgtgcaggcggcgcagatgaagatgtcggtgagccggggagtcggcatacatga

SEQ ID NO: 328599 - DNA, 2973 bp, Pseudomonas aeruginosa
atgacgaccacagaacaacaaatcgaactcgatctgatcgccaagctcggcgacctcaagtacacctatcgccccgacattcgcgaccgtgccgcgctcgaagccaacttccgagccaagttcgaggcgctgaaccgcgtgcacctgactgacagcgagtttcaacgcttgctcgacggcattatcacacccgatgtctacgccgctgcccagcggcttcgcaacatcaacagcttcgagcgcgacgatggtacgccgctgaactacaccttggtgaacatccgggactggtgcaagaacgactttgaggtcgtcaaccagttgcgcatgaacactgacaacagccatcaccgctacgacgtgatgctgctcatcaacggcgtaccggtggtgcaaatcgagctgaagaccttggcggtcagcccgcgccgggccatgcagcagatcgttgattacaagactgaccccggcaatggctatagcaagacactgctgtgcttcctgcagctcttcatcgtcagcaaccgcactgacacttggtatttcgccaacaacaacgcacggcacttcagcttcaacgcagatgagcgcttcttgccggtttaccagtttgccagcgaagacaacaagaaaatcacgctgctcgatagttttgccgagaagttcctagccaagtgcactctagggcaaatgatcagccgctacatggtgctggtggccagcgagcagaagctgctgatgatgcggccataccaaatctatgccgtcaaagccatcgtggagtgcatccaccagaattgcggcaacggctacatctggcacaccaccggctcaggcaagacgctgacttcgttcaaggcgtccaccctgctcaaagacaatccggacatcgacaagtgtctgtttgtggtggatcgcaaagacctggatcgccagactcgcgaggaattcaaccgctttcaggagggctgcgtcgaagagaacaccaacaccgagaccctggtgcgccgcctactgtcggatgactacgccgataaagtcatcgtcaccaccattcagaagctgggcctggctctggatggggccaacagacgcaactacaaggagcggctggagccattacgcaaccagcgcatggtgtttatctttgatgaatgccaccgctcacaatttggcgacaaccacaaagccatcaaggagttcttccccaacgcccagctttttggctttaccggcacacccatcttcgagaagaacgccagctaccagcagatcgaaggtcagcaggccagttaccgcacgaccgacgacctcttccagcgttgcctgcatcaatacaccatcacccacgccatcgaggatcgcaacgtcctgcgctttcacgtggattacttcaagcccgaaggcaagaatcctcccaagcctggtgaaggtgtggccaagcccaaggtcattgaaaccattctcgccaagcacgatgcagcgaccaatggccgcaagttcaacgcggtgttggcaacggccagcatcaacgatgccatcgagtatttcgaactgttcgcggagattcaaaaacaaaagaccgagcaagatcctgagttccgtccgctgaacattgcctgcgtattctctccacctgccgagggaaataaggacgtacaacagattcaggaagacctgccgcaagagaaagaagataaccagcaagaccccgagggcaagaaggctgcgctcacgcgcatcgtggccgactacaacgcccgcttcggtaccaaccaccgcattggcgagttcgacctgtactaccaggatgtgcaaaagcgcatcaaggatcagcagtatcccaacagcgatctccccgccgcgcaaaagatcgacatcaccatcgtggtggacatgctgctcaccggtttcgactccaagtacctcaataccctatacgtggataagaacctcaagcatcacggcttgatccaggcgttttcgcgcaccaatcgcgtgctgaacgacagcaagccctatggcaacatcctcgacttccgtcagcagcaaaggccggtcgaagaggcgattgcactgttctctggcgagaagatcgacaacccgcgtgaaatctggctggtagaccctgcgcccaaggtcatcgataacctgcaaaccgccacccagaagctggccgacttcatgcagtcgcaaggcgtgggcaatgcgccggaagaagtggccaacctgaaaggcgatgccgcacgggcgcagttcgtcaatctgttcaaggaagtacagcgcctcaagacccagctcgatcaatataccgatctctcggatgagcagaaggcgcagatcacccagattgcgccacccgatcagatgcagggcttcaaaggtgtgtacctcgaaacggccaagcgcttgaaggaacagcaggatcgcgaccagaccccgccagaagtgcagcagcttgatttcgaattcgtgctcttcgcctcaagcgtgatcgactacgactacatcatgagcctcatcgccaagctgacccagcagaagcccggcaagctcaccatgaaccgtgagcagctcatcggcctgatccagtccgatgccaagttcatcgacgagcgtgaggacattgccgagtacatccggggcttaccggtcaacgaagcattggatgaaaagcaaatccgcagcggattcgaccgcttcaaggcagagaaaaaaacacgggaactcaccgatctcgccaaccgccacacactggacgcatcagcgctgcaagcctttgtcgatgacattttgcgccgccgcattttcgatggcgaacgcctctccgagttgatggccccgctggaacttggctggaaagcccgcacgcagaaagagttggccctgatggaagagctgacaccactgctgcacaagctcgcccagggtcgagagattgctggtttggctgcctatgaggaggggcgatga

SEQ ID NO: 328600 - DNA, 2643 bp, Pseudomonas aeruginosa
atgatgggaaccgtctttacacagggggcgcagtgggttcgtgcggacttccatctgcacacccgcgcagatcgtgagttcaagtacacaggcgatgacaacttctacaacagcaattatgtgaacgcgctggagaaagcaggtatccagctgggcgtcatcaccaatcacaacaagttcgattttgaggagttcaaagcgctgcgcaagacagcgcagaagaaggatattgcgctgttgcccggcgtcgagctgtcggtcaatgacggggccaatggcatccacaccttggttgttttttccgacgactggttggccgatggtcatgaccatatcaaccccttcctgggcgttgcgtttgaaggaaaaatccctgcccagtacgagcaggaaaacgggcgttcctctctgtcactgttggaaaccatcaagaagctggaaagctatcaccgcgactttttccttgtctttgcccatgtcgaagcaccgagcggactgtgggccgaattggacggggggcgtcttgccgaactgggccagaacgaattcttccgccgtcgcacgttgggcttccaaaaggtacgcacgtacaacaagctgcaagagaaaagcaaaccctgccggactaaaacgcagcagcatctaggtggctggtaccccgccgaactggaaggctgcgacgccaaatgcatcgaagagattggtcagggcaaagcctgttacctcaaattgggtgaactgtcctttgaggcggtcaagtttgctctgagcgattctgcttcgcgggtcgccacggagccgcccaagcatctcgcatcgcacatccgcagcattcactttgatgggggcatccttgacgggaaaacgctgcatttctcgcctgaactgaacacgttgatcggcatccggggcagcggcaagtcttccattctggaagcagtgcgctacgctctcgatattcctcgcggggagaaagcgcaggacaccaagtacaaggatgaactgatccgccacactctgggcagcggcggcaaggtgacgctgacggcctgtgacgtatacggacaggtattcaccatctcccgcatttttcgcgaagcgccgaacgtctatctggacggcaaattgcagcccggtgtatcgatccgggaaactgtgctgcgccgtccgatctacttcgggcagaaagacctttccagcaccggcgaaggtttcgagaccgatctagtggaaaagctggtgggcgaaaagctccgcacactgcgagacgaaatcgaaacccaacgccagcatgtgcgtgatgctgcgcagcgctggctcaagctcagcaatactgccgaactcaggcgtgattaccagtcccagctcaccgatgccaacttccgactgaagaaatttgaagagtacggggttgccgataagctgcaaaagcgccttggcttccagcaggatgccagtgcactggcacgcatgaaggagcgggcagacagcttcgtgctcgccttggggcaattgatcgccgagcacgaagacgatctgcgtaatgccacgagctacgtctccaagcagaaccccgatttcttcacggcttattacgccgaatttgccaatctcgttgccaaagtcgatcagctcaagcaaatcgagcaggaggcccgcgctgttacctcccggcttcaattcaaacaaggcgagttcgatgccgcgcgccagagtcttcaggaagagtttgcccaggtcgaacgtcagctggctcaggaactcaagcagaccggcatgacggccatccagccggatgacttcctgacccaacagcagcgtaaaaccaaggcggagcaaatgctggaggcgctcgccaagcaggaaagccagcaaagcagcatccgcgacgcactgtttgccgagatcgacaagctcaacggcctgtggctgcgcgagttcaacgccatcaaggccgaactggatcgggtgaacgctggccataccgccttgcagatcgaagccgacttcaaaggcgacaaggaagccgccatcggcttcatgcagcagctcttcaagggcagcaacatccgcgaaaccaccctgcgcgccgtgatggaggactatgccgatttcggcggcctgctgcgtgatttgccaaacgccttgaaaaaagcgggcagcacgccggaggtgttcgaaaagacctttatgcagaacctgacggagttcgtcacctggcaggtgcccaaccgtttcgtcattcgctatcgcggcaaggaactcaagcaccactcgctcgggcagcgtgcttccgcgttgctgctatatgtgctcagccagcgccagaacgacgtgatcatcattgaccagccggaagacgatctggacaaccagaccatctacgacgacgtgatcaagctgctgcgcgagatgaagccttacgcccaattcatcttcgctacccacaacgccaactttccggtgctgggtgatgcggagcaagtgcatgcctgccgctatcaggatgagcaagtcgccgtacaaagcggcagcatcgacgctcgtccggtgcaggacgccatcatcaacatcatggaaggaggccaggaagccttcaaccgacgcaaagaggtttacaacctatggaaaccacagaactga

SEQ ID NO: 328601 - DNA, 1164 bp, Pseudomonas aeruginosa
atggaaaccacagaactgatcgactgcttgagccgtggcgaagacagtcgccatcagttcaaagagaacttcaccaatgccgacgcgctggcggcggagatcgtggccttcgccaacaccgctggcgggcagattttcattggcgtgcaaaacgacggcacggtgctgggcttgtctcacgcggacattgaccgcctgaaccagctcatctccaacagtgcctcacaaaacgtgcggcctgcggtgaacccgctcaccgaaaatgtgccgcaccccaacggcaccgtgatggtggtcaccgttgtggaaggcgtcagcaaaccctacatggacaagaacggagccatctgggtgaagaacggctcggacaagcgccgcgccacctcgcgtgaggaaatccagcgcctgctccagcaggcgggtctggtgcatgcggatgaaacgcccgtggcgggcttgagcgcgggcgatgtggacctgccctatttcgaaaccttcttcgagcagcaattcggcgagccgctcgcccagcacaaccagccgctgccgcagttgctgaccaacatgaatctgctcaatcaggggcaactgaatgtggcgggcagcctgctgtttgccaaagcgcctcagtacgcactgcctgccttcatcgtcaaggcggtggcttttgtcggcaatgagatcgaggatcagcgctatatcgacagccgcgacatcaccggcaagctggccgatgtgttccagcagacgctgggtttcatcatcgccaacacccgcgccactcagggtgaacagggcttcaactcccaaggccaatcggagattccgcgcatcgtctgggaagagctggtcgccaacgcgctcatccaccgcgattacttcatcagcgcgccggtgcgcgtgttggtgtttgccgatcgggtcgaaatcatcagccctggtcatctgcccaacaacctgaccgtcgaaaacatcaaggcgggcaactccaatatgcgcaacccgattctggcgtcctttgccgccaagctgctgccctatcgcggactcggcagcggcctgctgcgcgccttgcgggcctggccgcagattgaactgatcgacgaccgggcgggaaatctgtttaaggtcatcgtcgcgcggccgcaggagcaagcagcgtga

SEQ ID NO: 328602 - DNA, 1287 bp, Pseudomonas aeruginosa
gtgagtgagaataaaaaacagcagttggtgccacgggtgcggtttccggagttccgtgatgctggggagtggatcactgttgaattaggcaagctttcgcgacttctaaccgagagggttggaagtgccatttgtactccttacacgattacctctggagttggtctgattagccaagaagaaaagcttggtcgcacaatcgcgggcaattctctaaagaattatcttgttcttcaagaaaacgactttgcatacaacaaaagcgcgacgaaggcacatccacagggctttatcgccctctatgcgggaggtgaacgcgctgctgttccaaatagtatcttcacctgcttccgtgtgaatcagaatcaagtaattcccactttcttagatgcgctatttgccagcaacttacatggaaagtggctaagaacgcgcattgcagttggtgcgcgtgcacatggctctttacaggtcagtgataacgatttaatggcaacgcctgtgccactacctagcggcaccaactcgctcgaagaacaacaaaaaatcgccgactgcctgtcttcgctggataatctgatcgcggcggaaagccaaaagctcgacaccctcaagacccacaaaaagggactgatgcagcagcttttcgcccgcgaaggcgaaaccgtgccacggctgcggtttccggagtttcgggagactggggagtgggaaaaagtgtcgctccagcgagttattgagattgcgtctggccaagtcgacccaaccaagcccccatattgcgacttaccgcacgttggaggggaaaacatcgaagcaggcacggggaaacttctgaatttacggacagcgaaggaggatggggtcatcagcgggaagtacgccttcgatgaacacgatatcctttattcgaaaatcaggcccgcgcttaacaaagttgccgccccagacatcagtggtgtctgcagcgcagacgtatacccaatacgcccatgctgcgagatgttacgtcgggagtttctcgtatatttgttgaggtcagagtcatttgttaagtatgcaacgaagcactctgggcgaggcaagattcccaagattaaccgcgaagatttgttcgcatatgatgccatgcttccaatgcctgccgagcaagaatatatcgcgtcttttttatcttcactcgatgagcggataaacttgcagtcgcagaagctggaagacctacagaatcataaaattggtctcatgcagcagttatttccgacgctggatgaggtggacgcatga

SEQ ID NO: 328603 - DNA, 1116 bp, Pseudomonas aeruginosa
atgaagcccgcccaatccttcgccgacttgcccgcgctggccgctcatctgcgcagcgagctggagaacaagaagaccatcctgctctatgcctacaacggcacgggcaagacgcggttatccatggccttcaaggacatgggcaagcaggccgaggcccgcgataccctgtacttcaacgcattcactgaagacctgttccactggaataacgatctggcaggcgatgcggaccggcgcttgctgctcaacagggattcgcgattctttcaggggctgttcgatctggagatggataaccgcattcgcccattgctgcggcgttacgcggatttcgacttccggatcgacaccgagggcccagagtgggcggtgcgcttttcccgcctggtggatggccagaccgttgacaacatcaaggtgtcacgcggcgaggaaaacatcttcatctggtgttttttcctggctgtggtcgaactggcgatggacgccgatatcgaggcgtatcaatgggtgaagtacctgtatatcgacgacccgatctcgtcgctggatgaacacaacgccatcgccgtcgccaatcacctggcgcagttgctcaagcggcaggacaatcggctcaagacagtgctctccacgcaccatacgttgtttttcaatgtgctctgtaacgagctgggcaaggcgcgccgctatgtgatcaacaagcacacggcaagcggcggctatctgctacggcccgaagagggcgatacgcctttctttcaccacgttgcggccttggcggaactctatcaggccgtgcaggaagaccgtttgttcacgcaccacttcaacatgctgcgcacgattctggaaaagacggccagcttccacgggcacaagaacttctcggcctgcatcaagcaagacgatgatgatccggacggcattttgcacgcccgtttgatcaacatcctcagccacggcaactactcgctgtatgagccgcagcagatgctcgatgagaacaaggcttacttcaagaagattctgaacgatttcctgaatcgctaccccttcaatcccgatttgttccctcaagtttctgaggttgcaacagcaggtaccccatga

SEQ ID NO: 328604 - DNA, 1623 bp, Pseudomonas aeruginosa
atgactgagttcgaaaaacaaaaactgggcaagaccctctgggccatcgccgaccagctgcgtggcgcgatgaatgcggacgacttccgcgactatatgctggcttttctcttcctgcgctatctgtcggacaactacgaggccgccgcgcaaaaggagctgggggcggactatccagagcttccttccgatgtgttgaggcagaccggcgtgaatacgccacttcaagcgtggtacgaggaaaatctggacgacgtacccgaattcgagaaacagatgcgccgcaaggtgcattacgtgattgagccgcaatacctgtggggcaacatcgccgagatggcgcgcacgcaggatgccgagctgctgcataccttgcagaaaggcttcaagtacatcgaggaagagtccttcgccagcaccttccgtggcttgttctcagagatcaatctggcgtcggacaagctgggcaagacctacatcgagcgcaatgcccgcctgtgcaagatcatcgccgagatcgccaaggggctggggcagttctctactgacagtgacacgctgggtgatgcctacgagtacctgatcggccagtttgcggcaggctcgggcaaaaaggccggcgagttctacacgccgcagcgcatttcagacatcctgtcggccatcgtcacgctggacagccaggagccagccaccggcaagcgctcgcatctggatagcgttttcgactttgcctgcggctcgggctccttgctgctcaacgtgcgccgcctgatggggccgcacggcattggtaagatttacggccaggaaaagaacatcaccacctacaacctggcgcgcatgaacatgctgctgcacggggtgaaggactcggagttcgagattttccatggcgataccctgctcaacgagtgggatatgttgcgcgagaccaatccggccaaaatgccgaagttcgacgcggtggtggccaacccgccgttcagctaccgctgggagccaagcgaggcgctgggcgaagacgtgcgcttcaagaattacggcctggcaccgaagtccgccgctgactttgccttcctgctgcatggcttccatttcctcaagcaagacggtgtgatggcaatcatattgccccacggcgtgctgttccggggtggtgccgaggctcgcattcgtaccaaactgctcaaggatgggcacatcgacactgttatcggccttccggcgaacctgttcttctctactggcataccggtgtgcatcctggtgctgaaaaagtgcaagaagccggacgacgtgctgttcatcaacgctgccgagcattatgagaagggcaaacgccagaaccagctcttgccggagcacatcgaccaaatcatcgatgcctaccagtaccgcaaggaagcgccgcgttactctcgccgggtgagcatggaagaaatcgagaagaacgatttcaacctgaacatctcgcgctatgtgagcaccgcgcaagctgaggaagagatcgacctggcagcggtgcatgccgatctggttgccgccgagaagaagattgcagacgccaaggcgcgccacaatcagtatctggctgagttggggttgccactgttgccttga

SEQ ID NO: 328605 - DNA, 687 bp, Pseudomonas aeruginosa
gtgaagtcagtagaacatagtgagtacctgccagacacggaggcaggacgctcactattcagggagcgcctgattgcaaaaattcagcaacatcgcgatttcaaggcgctgccacacgaaattcagtcgaacttctttgagaagttagctgaactcaccctcttcggcaccaacaactgttcggtggagacacacagcccaaggacacgcaagcttgaaaaattggccgacagttatcgccgggttgccaatagcattgcgctgctttcggaaatagatgagctgctgctcgatgatgcctttcaacacagcatgcctttgcaacagcaaaagaaactgatgcgacagctggctgccgaagttgatgagctgataggcgggatgcggcagacgtctaccagcacatctgagcggcttttgctaggtctgcagggtgcgagcttgctgaatcaactgggcaagttgggagttgcctgcaaaatcaataatgactttcagacaatcaccaaagatgctgcagagcagcgcgacgcaagcaagcaaacacagcgcttgatgccagatttgtcgcagagcatgacacttgccatgctctgcgccatgctcattctcttcaacaacgggcagctcgttgaatggagctactgccgcagactgttgctggaagggaaaagggtttccaggtaa

SEQ ID NO: 328606 - DNA, 558 bp, Pseudomonas aeruginosa
atgactggggtctaccgcgacgtgatgccggcgatcgttcgcgtcctggcggctgatgccatcgacaatacggcgaagcagagttggcagaggcttatcgagcgaaaggtcgacagcgggtttcgggcgctgctttctgcccaagatcagttcgagttcgattgcatcctgcacgccttgttgcaccgggagctttcgccgaccgagtgggacgtgctgcatgctcgctactcgacgcactttgatcggcgcggccaggcaatcgagcgactggtaggcagggtgcattcacctgccccttctcggtttctggagcgtgctgtagcgacctgggccatcccgatgatgaagggcaaggacggaaagcggtcaaccgctatcctgatgctcccgaaggagtggtacgacatgaacaactgggatgaagatgctcgtccggactcaactcgaaaccgctggcgccgggacattcgaaaacagcttgaccgtttcgaggagggggcgctggtacatgtaactgagatacttgatcgtgaaaagctggttgaagtagcgtga

SEQ ID NO: 328607 - DNA, 492 bp, Pseudomonas aeruginosa
atgagctctgtgtctgatgcaaaacgccctcgtcgaggcaagaagccacaggggatatctctccacccgcgcgccaaggaaacttggcagcgcttgcccttcgtaggcaaggaccatggtcgctactcaatgtgggatgttcctttgactggtagctacctcaccggtctcgaggccggcaagagtatcgcgcacatctatctgaagtatgtccgggatgtggacgactggatggcttgcgaggtgctcaggagcatggtgcgcgatttgatcaccaaagccccttcggacgagcaagaggaaactgtcaaacgcggccagttcgcggggttcatgggcgagatattcaactggctcaaggtgtccgcccagtttgccggaagcagtctagaccgagtggaagaccagggcctggtagatcgggtgaaccactacctggatgcaggcgtagccgatgcaatagatgcggctattacgagggcttcgacatga

SEQ ID NO: 328608 - DNA, 234 bp, Pseudomonas aeruginosa
atgactagccgcatcggagcgaaagcgctcggtgaccagctctacagctacatcggcgccatccaggacttggctaccgcagtccgcgaagacttggctttcgaaggttgcgagccgggcccacgcctgaccggcgaccaggtggatgcgatccatctgtcgattatcactatcgccaggttggctggcgaagacttgatccaactgctgaccgagctggaggtgccggcatga

SEQ ID NO: 328609 - DNA, 279 bp, Pseudomonas aeruginosa
atgagggccactatgggtatcagcttccgggcgactgcgccggtcgatctttcgacgggagatcagaaaacgaatgtcctgtgcgtgatggatgacattgatgccgacctcgcactggacagcgcagtcggcctgctcgacgcgattcaaggcgggctcctcgacatcctcgacgagccgagtgttagtcgtcgcgtagccctacttcttcatgcggccgagacagccactgccctggtccgtgcggccctggagggtggggaggtgtccaatgactag

SEQ ID NO: 328610 - DNA, 279 bp, Pseudomonas aeruginosa
atgagcgcggtctggaacaagccccagtcgtctgcactcaaggctccgatatctcagcttccgccgcggagattcgcagcgattaacccgaccacgacggtcgaagaggcgttgagcgaggccatcgcgctgacgctaagtgtttctagcattctcggagcactgaccacctccgatgaagagcacgcgtgcttgtatgccctggagattgctgcagagatggctggcgacttggttgacgccgcgctcgactccctgcgtgaggagggccagcaatga

SEQ ID NO: 328611 - DNA, 198 bp, Pseudomonas aeruginosa
atgaactggttgagagatgccttcaggcgctggaaggaaaggcactgggacaaggaatacttcccagaagaccggggcggaataacgccgctgagggctttctgggagaaaaggcgcgcatcaatcatgacgtttgcgctctggctgattgccctgatcgctggggctctgatcctcagcgccattggccttggctga

SEQ ID NO: 328612 - DNA, 393 bp, Pseudomonas aeruginosa
atgatccgaaacgtcttcgtgattctggctggactgattgcggtggccgttatctgtgccgctggggtgatcctccatgccatcggcggctaccacatcgagctgacgccgatcatcgcgacagtgggggccgccggcgggatcgcgctcctttgccatgagtttggctacagcgctgggcgcaacaaggcactggatgaccgcttctacccaaatgcagatgcgccttacgtgcactttcccagaggcatggacaactaccgggatcgcctggagttcctgaatcaagccatcaagcggctgcacgaagtcgaatcagccaaggccaatggcgctgaggatcagagccccagcgatcagggcaatcagccagagcgcaaacgtcatgattga

SEQ ID NO: 328613 - DNA, 222 bp, Pseudomonas aeruginosa
atgaccaccatctacaaagagctcgtcgcccactttgggactcaagacgagaccgccgcgaagctcggcgttgaccaaagcaccgtgtctggatgggtccggggaaagcacgggatgtctcctcttgtcgcgaagcgggctcaggttctgaccgacggaaaattcaagaaagaggacctgtgtccggctttcccgtgggaagcgctgtcggcagttgcctga

SEQ ID NO: 328614 - DNA, 477 bp, Pseudomonas aeruginosa
atgaacaacaatgaagaggttccaccaagagccccgagcgaaaaggactacgccctgattccccaatacactgctcgcggcgagtgcggcgatggatatttcaacgatcatgtagagaccactgaaggcctggtgttcaagcgagattggctgaagcgagtcaactccaaacctgagaacctctttgtgatctacgcagaaggcgacagcatggagccctacattttcgagggcgatgtcgtgctcttcgacgtagccaagatagagcctcaggataagcaggtgtacgtcatcaggcgaccggacgggggcatcagcatcaagcgcctgaatcagcagctaacaggcgcttggctcattcgaagcgataaccccgacaaaaccgcatatccagacgagatcgctagcgaaacgtcggttcatgatcttccgatcattggccgtgttatctggcgtggtggaggaatcggttcctga

SEQ ID NO: 328615 - DNA, 384 bp, Pseudomonas aeruginosa
atgaccaccgccaccatcaccgcacacggtttcaccggcttcctcggcaaaggcctgtccctgcgtgagcttcagtgcgtcctgggcatcgctgcgggtcgtacctcgaaggagttggcccgcgacctgggcatgcagccgggcacggtgggtaagcgcgttctggcagcgaccaccaaactcggagtcacccgccgtgccgccctggtggccgaggctatgcgccgcgggcttatctcacccgccgtgatcgccctcgccttcctcgtcgccggtcagccactgctcaacgatgaccacatgttgcgcagccgccgtggcggcgaaaggaagatcgaaactcgtctgactgctcgccgcgatggcgtggcctgggtggcgtga

SEQ ID NO: 328616 - DNA, 123 bp, Pseudomonas aeruginosa
atgaccatgcgcaaggctctgaccgccatcgcactcgtcgcgctgtttggcctggccactgttgccgccggcgccgcgctccagccgttcaagaccctgttcatctgggaggtatgccagtga

SEQ ID NO: 328617 - DNA, 192 bp, Pseudomonas aeruginosa
atgagaggctccgatattccgccaccaccagggtatcgccctacgccgctcgccaccctcggccagcagttggtccgcctgggccaggcgatgcagaaccccaacaccaagctcggcgagttgaccgaactggtccaggcctgcggcgtcgacctgcggacctgcgacacgaacaaggagagccggacatga

SEQ ID NO: 328618 - DNA, 180 bp, Pseudomonas aeruginosa
atgatcggagcactgatcctctgcatcgtctggtgtgtgggcggcctctacgtcgggtacatgctcagttcgctggccgccgccgagaagtacaccgacgaaatccaacgcctcaacgaagaactccgcaaagagcgcctgctacgccgcctgaacgcacgggagaacgattacccatga

SEQ ID NO: 328619 - DNA, 246 bp, Pseudomonas aeruginosa
atgactacccctaacccagcctcctactgcatggacacgcacgaggagtttattctcgacgaactgctgcccctgatcgtcaaccatgcagcgaagaaccaccacccagccgacgccgtggccctggcctccttcctcgccctgggcaccatcctgcaatccaacggcatggaccgcgattcgctggtgttcgccatcgacgcctcgctgctgcccactcacgaccttccggaaactgtccaatga

SEQ ID NO: 328620 - DNA, 840 bp, Pseudomonas aeruginosa
atgaacctgaccaaccagatcaccatgaccagcctggagctggtggacttcatcaacgcccatcgccagcagcaagccgagcaggcagggcagccattcccttcagaggatttcccggaattgacccatgccaaccttctggcaaaggtccccaaggtcctcggggaaacatctcattcatttgaatgcgatctccccgacagctacggacggccccgtcgcggctaccgcttccccaaacgcgaagcctgcctggtcgccatgtcctacagctacgagctccaggccgccgtctacgaccgcatgactgtcctggaagagcagttgaagctggcaccaccgccccagccgcgccagctcagcaccatcaaccgcgagttcaaggcggcgctgggcatcgccaagaccgccggcctccagggcaaccaggccatcttcgccgctgaccgcgtgatccagcgcgagcttgggtgcagccccatgcgcctggttggcgtcacctcgctgcccaccgaggacaacgagcgcacctacactccgtccgagctctgtgccaagctcgacggagcctacaagccccgggagctgaacaagctgctcgaggacatgggcctgcagcagcatgtcgatctcggcggtaagcacaaggaatgggaactcaccgaagccggcaagcgccacggcatcatgagcgacaccggcaaggtacacaccaccaccggtcaggctgtctacagcgtgcgctggaaagcatcggtgctggacctggtcccgtcgaagatcgtggcaacggtgccgcagcagccgacggcaccagctcaagggagcatgcagctgtga

SEQ ID NO: 328621 - DNA, 330 bp, Pseudomonas aeruginosa
gtgacgatgatgatgtgtagtttctgcggctgctatgaggacagtgttgacaacttcatcagagggcctggcggcatcctcatctgcaacgtatgcgtcgacctgtgcaacgaaattctccacaaacgtctccccgaagcctacagctccgaacaagacgccttggtggcgatcatcgaaatggagcgcgccagcgccgaagcgaagttcggggatgcggacaaagccgagacctgggcaacagtcatcgctgcccgcaaaggattgagggcaggaagggcgaaggcggcacgcaacgaagaggagatagggaatgggaagctcgactag

SEQ ID NO: 328622 - DNA, 243 bp, Pseudomonas aeruginosa
atgggaagctcgactagccccgtatccgagttcctgtccgaagaggaagtcgctgagctgactgggcgcgagtacccgagcaagcagatcgagtggctgaacaggtccggatggaagtacgccgtgaccgcggcgaaccgcccgatagttgggcgcgtatatgcccgcctgaagctggccggcgtgaagccgacgatagctgccgccgaggagtggagtttggacctgtcgaaggtgagctaa

SEQ ID NO: 328623 - DNA, 1050 bp, Pseudomonas aeruginosa
atgagaccacggagcaacaagaatcgggggctgccgccacgcatgatcaagcgcacccggacaatgaagtcgggaaaggtctgggtcggctactactacgacgggcgggatgccgaggggaagcgcaaggagatcccgctgggcacggacctggacgaggcccgggagaagtgggcgaagctggagaggaaggtcgtgccggtggccaccaggacagttggcgatctactacggcggtacgagcgggacgtggtgccggggaaggggctgaagacacagaaggacaacctcaaggtcatcgtccaactgatgaaatccttcgagtcagctccgattgaagcactcacaccgcagataatcgcccagtaccgggacgccagatcggcacccgtgcgggctaaccgagagattgccctactctctcacgcgttcaacatggccagggagtggggcataacggatagggagaacccgtgccgaggggtgaagcggaataaagaagcccctcgggacgtgtacatcactgacgaggtgtggctcgcggtgtacaacgaagcgcccgccgatctgcggatcgccatggacctggcgtacctgacgggtcagcgtccggcggatgttcgcaagatgcgttggtcggatgtggatggagattacctgctggtcggccagggaaagacctcgatgaagctacgcatcaggttgcggcgagcggatggatcgcaaacgacgcttggcgagctcctggacaagcttgaccggtctcacccgacactcgtggccagtcaggacgggaagccgattacggaaagcatgctgcgtttccgattcgagcccgctcggaaagctgcggcagagaaagccgcaaaggcaaaggatagcgaactagccaaggccatcatgaacttccaatttcgcgatatcaggccgaaagcagcctccgacatcgacagtctgtcgcaggcatcagacctccttgggcacaccactcagggtatgactcagcgagtctatcgacgcattgggaaggtggttgatccggtgaaatga

SEQ ID NO: 328624 - DNA, 1083 bp, Pseudomonas aeruginosa
atgagcaagcagatcctggttctccccggtgacggtatcggcccggaaatcatggcggaagcggtcaaggtgctggaactggccaacgacaggttccagctcggcttcgaactggccgaggacgtcatcggtggcgcggccatcgacaagcacggcgtgccgctggccgaccagaccctgcagcgcgcgcgccaggccgatgcggtgctgctgggcgcggtaggggggccgaaatgggacaggatcgaacgcgatatccgtcccgagcgcggtctgctgaagattcgctcgcaactgggcctgttcgccaacctgcgtccggccatcctctatccgcaactggccgcggcctccagcctgaagccggaagtggtcgccgggctggacatcctcatcgtccgcgaactgaccggcggcatctacttcggccagccccgcgagcagcgcgtgctggagaacggcgagcgccaggcctacgacaccctgccgtacagcgagagcgaaatccgtcgtatcgcccgcgtcggtttcgacatggcccgcgtacgcaacaacaggctctgctcggtggacaaggccaacgttctcgcctccagccaactgtggcgggaagtggtggaagaggtggcgaaggactacccggacgtcgagctttcccatatgtacgtggataacgccgccatgcaactggtgcgcgcgcccaagcagttcgacgtgatggtcaccgacaacatgttcggcgacatcctgtcggatgaggcttccatgctgaccggttccatcggcatgctgccttctgcctcgctcgacgcgaacaacaagggcatgtacgaaccctgccacggttccgccccggacatcgccggtcagggcatcgccaacccgttggcgaccatcctctcggtctcgatgatgttgcgctacagcttcagccaggcgaccgccgccgacgccatcgagcaggcggtgagcaaggtcctcgatcaggggctgcgcaccggcgacatctggtccgaaggctgccgcaaggtcggcacccgggaaatgggcgatgccgtagtcgcggcactcaagaatctgtaa

SEQ ID NO: 328625 - DNA, 762 bp, Pseudomonas aeruginosa
atgagcgaccacgatgacgttgtccagcgccagttcggcgcccaggcttcggcctacctgagcagcgccgtgcatgcccagggcgaggaattcgccttgctgcgcgacgccctggccgggcgcccggaagcgcgggtcctcgacctgggctgcggcgccggccacgtgagcttccaggtcgccgccctggcaggggaggtggtggcctacgatctttccgccgagatgctcgccgtggtggcgctgagcgccgcggaacggggcatggcgaacatccgtaccgaacagggcaaggcggagagcctgcccttcgccgacggcgagttcgatttcgtcttcagtcgctattccacccatcactggcgcgacgtcggcctggccctgcgcgaggtgcggcgggtgctcaagcccggcggggtggcgatcttcgtcgacgtggcggcgcccgggcaggccttgccggataccttcctgcagaccgtcgagatgctccgcgacaccagccatgtgcgcaactactcgccggccgagtgggcgcgcctgagcggcgaggcggggttgctggtcaccggaagccggcgccagcgcctgcgcctggagttccagtcgtgggtcgagcggatgcgtacgccggaggtgttccgccaggcgatccgcagcctgcagctggcggtgggcgaggaagtcagggagtatttcgagattgccgacgacggctcgttcagcaccgacgtgctggtgctgtggctgcgtcgggagtga

SEQ ID NO: 328626 - DNA, 837 bp, Pseudomonas aeruginosa
atgccggtttcgttacccttcgagcaagtcgatgtcttctccgaacagcccttcaaaggcaacgccgttgccgtggtgattggcgccgaccgcctgagcagccagcagatgctcgagttcgccgcctggacccagttgagcgagacgaccttcctgctgcggccgaccgttgccgaagccgactatcgcgtgaggatcttcaccccgttgcgggagttgccctttgccgggcatccgacgctggggagctgccaggtctggctgaaccaggggggcggcaatgctgctgacgagatcgtccaggagtgcctggcgggcctgatccgtatccgccgcaagggcgccttgctgtcgttcgcggcgcctcccctgcttcgtggcggagcggtcgaagacgaggtgttgcgacggatcgagagcgggcttggcctttccccggggcaggtactcggcagccaatgggtggacaacggacccggctgggtggccgttcggctggccacgcgtgacgaggtcctggccattcgcccggactacgcgaagctcgacgggctcaacgtgggcgtggtcgcgccctggcaaggtccccaggcggaggcggatgtggaagtgcgcgccttcatgggcgaggaactcaatgaagaccccgttaccggcagcctcaacgcgagcctggcgcaatggctgatcggcacgggagtcatgcccgggcgctatacggcgagccagggcacggccttgggtcgccgggggcggataagcgtcgagcagatcggcggcgatatctggatcggcggtaaggtgcagccgggcatgtcggggcaggtcgtgttctga

SEQ ID NO: 328627 - DNA, 915 bp, Pseudomonas aeruginosa
atggagtctgcgcggaacagggtaacaatggaggtcgtagatgctgaagatctgtggcttttgccagcggtcgataagtacggctacatctgtcgaggttgtgatctgacggtttacccggcttcctacctgaagacgaatttgcagcgtccccattttcgaagcccccacggccaggagcacttggagggctgtgatatcgaaggtgatgagaaaaccgttgcgagtggaaaaaagggctctgtgcggagcaagctacagacaagtcccgccttgtcaccggcacggctggtccttaggaatgagcgaccgattgtcgatcccactgctcagccctcgccatcaggggcatcacgatctgtacggacgggctcctcaggaaacggagaggctcgccctcaggggcgcagatccgcgcaaagcattaggcgtatctgtcgcgccttcatcaattttccatacgaccgggatctttcgctggaggtaccaggggttgaggccaccacctaccagcaagtgttcaaaaagcttcgaggggaaggcgttgaggatctaccttcacaaaaaatcttctatggcgagctcagttggggcagggctgaagttgatgatgacaatcttctaattaccctatcagccggggagtggggcacggaggctaaaaggtacgtccggccatacagggtccgcgtgtcctgggcaggttggtcggacgcaaagcgtacgatcgtcaccaaagaactagaggtcgttcggcaagagggtatagatgcgaagaaaagcggcagcaaggatcggccctacatcttcttcctcggccgccaggacgcggaagacccatcgattttccatgtagatgatcatcgcttgatctgtgggctgttggcgaccattacctatccagcccgcagctag

SEQ ID NO: 328628 - DNA, 870 bp, Pseudomonas aeruginosa
atgttgaatccggtctggctgaagagcctggtagcgatcgttcaaacaggcagttttcagagcgcggcgagggcgttggggctggcccagccgacggtgtcgcagcacttgcagaagcttgaagagcaggtcggcgtaacgctggtgcagcgcagtcgtagcggctgccagcctaccacacgggcgctggccttcatgccgcatgcgaccgccttgctcgacatgcacgcccgggcgctagaagccctgcatggcaatcgtgagcgcgtcggggccagctccaacatcggcacctaccttctcctgccattcgtgcgcaactatctgacgaccgcaaatgagaggggcgaggtggatctgcgcatcgccgccaacccggatgtggccgaccagctactggcgggccagctcgacgccgcgatcatggaatggtggctacctcaccccgacttcgaacaccgcctctggcgggtcgagccgctggtgcttatcgtcagccccgaccatgcgctggctgaagcagggtgcatagaacgtgatcgtctggtggacctgccgatgctgggaggtgaaccgggtagcggtaccggacggcttctgaccgaatactttggcgaactgggcgtgcctcgcagcggtatgcagctaggcagcaccgaggcagtcaaacaagcagtgagggcgggactcggcgtgtcgttggtgatggcttccgcagtacaagacgaagttcgcagtggcgcgctggtagctcttcccatcccggggcttgaaaagcgtctccaactgatctggcgcaaacctcccggaaatctgcacccgccgggatttgtgcggcacttattggaggaggcagatctagctggataa

SEQ ID NO: 328629 - DNA, 1011 bp, Pseudomonas aeruginosa
atgctgccgaaactcgttataactcaccgagtacacgatgagatcctgcaactgctggcgccacattgcgagctgatgaccaaccagaccgacagcacgctgccgcgcgaggaaattctgcgccgctgccgcgatgctcaggcgatgatggcgttcatgcccgatcgggtcgatgcagactttcttcaagcctgccctgagctgcgtgtagtcggctgcgcgctcaagggcttcgacaatttcgatgtggacgcctgtactgcccgcggggtctggctgaccttcgtgcctgatctgttgacggtcccgactgccgagctggcgatcggactggcggtggggctggggcggcatctgcgggcagcagatgcgttcgtccgctctggcaagttccagggctggcaaccacagttctacggcacggggctggataacgctacggtcggcatccttggcatgggcgccatcggactggccatggctgatcgcttgcagggatggggcgcgaccctgcagtaccacgaggcgaaggctctggatacacaaaccgagcaacggctcggcctgcgccgggtggcgtgcagcgaactcttcgccagctcggacttcatcctgctggcgcttcccttgaatgccgatacccagcatctggtcaacgccgagctgcttgccctcgtacggccgggcgctctgcttgtaaacccctgtcgtggttcggtagtggatgaagccgccgtgctcgcggcgcttgagcgaggccagctcggcgggtatgcggcggatgtattcgaaatggaagactgggctcgcgcggaccggccgcggctgatcgatcctgcgctgctcgcgcatccgaatacgctgttcactccgcacatagggtcggcagtgcgcgcggtgcgcctggagattgaacgttgtgcagcgcagaacatcatccaggcattggcaggtgcgcgcccaatcaacgctgcgaaccgtctgcccaaggccgagcctgccgcatgttga

SEQ ID NO: 328630 - DNA, 828 bp, Pseudomonas aeruginosa; identical to SEQ ID NO: 181409

SEQ ID NO: 328631 - DNA, 864 bp, Pseudomonas aeruginosa
atgaaacgcttatccgcgctcttattgacttgcttgctgtccgctgtttcaagtttgtccgccctagcggccgatgccgatccggatgtgctaaaggttgccctgctgccggacgaaaacgcctccgagctgatcaagcgtaaccagccgctgaaggattatctggaagagcatctggacaagaaggtgcagctgatcgtaaccaccgactattcctcgatgattgaggcgatgcgctttggccgtatcgacctggcgtatttcggtccgctgtcctacgtcatggccaaaagcaaaagcgacatcgagcccttcgctgccatggtcatcgacggcaagccgacctatcgctcggtgattatcgccaatgtggcgtcaggcgtgaatgagtatgccgaccttaagggcaagaagatggcctatggtgaccgggcatcgacgtccagccatttgattcccaaagccgtgcttcttgagacggccggtttgacgggtgggcaggactacgaacaacattttgtgggcacgcatgacgccgttgccgtcaacgtggcgaacggcaacgccgatgcgggtgggctgtcggaggtaattttcaatcacgcagtcgaacgtggcctaatcgatccgagcaaggtgaaagtacttggttacagcggcgaatacccccagtacccctgggcgatgcgctcgaacctgagccccgagctgaaaaccaaggtgcgggatgtattcgtcggtatcgacgatcccgaagtgctgcgcaacttcaaggccgaggccttcgcgccaatcaccgacgccgactacgatgtgatccgcaacatgggatcgctgctcggcctcgacttcgccacgatgtga

SEQ ID NO: 328632 - DNA, 828 bp, Pseudomonas aeruginosa
atgacgccccatccgatacaggacgccgtgctgcgggtcgaccggttgagcgtcgtctatccaggcggcgtgacagccctacgcgatacctcgattgcatttcggcgtggtgagttcaccgtgctgcttggtctctcgggcgcaggcaagtcgaccttgctccgtagtctcaatcgactcgtcacgcccactggcggcagtgtcaccagcgaactcggtgaactcggcagcggctcggccttgcgtcagcatcgtcggcgtaccgccatgatctttcagcaccaccagctaatcgaacgtcaaagcgcactggctaatgtgcttaccggtcggctggcctttcacaacacgctccgctcgctgtttcctctgccgcgtgccgatcaggagattgcgctcagttgcctcgctcgggtcggtctggcagacaaggcgctaagccgggtggacaaactgtccggtggccagcagcagcgggtaggcatcgcgcgtgcgctagcgcaacagccggcgatcattctggccgatgagccggtagccagtctcgacccggccacttcggtccgtgttctcggattgctgcgcgacatctgcaaggaagacggcatcaccgccatcgtttcgctgcatcaactcgaatatgcccgccgcttcgccgatcgcgtcgtcgggctggccgattctcagatcgttttcgatgccgcgccctcggaactcaccgatgcgcagcttgagcgcatctatgcaggccgctctacgactcagccagcgaatgctccggctgaaccacctgtcatgctcgaaccttcactggagatgtcccgatga

SEQ ID NO: 328633 - DNA, 381 bp, Pseudomonas aeruginosa
atgaagcagatgaccttcgccgacgccgagtacgctggcaagcgcaagcaaacccgcaaggagttgttcctgatcgagatggatcgggtggtgccgtggaagggcttgattgctttgatcgagccacattatccgaagggtgaaggtggccgtccggcctacccgttgatggcgatgctgcgtgtgcatctgctgcagaactggttcggctacagcgatccagcgatggaggaagcgctgtacgaaaccacgatcctgcgccagtttgccgggctgaacctggagcgcatccccgacgaaaccaccaggtgtcagttggtcgagattgggcgaggaagtcatgccgctgattgtgccagagcaggcgatcagcgcagataa

SEQ ID NO: 328634 - DNA, 336 bp, Pseudomonas aeruginosa
gtgatccgcatcgatagcatctggcttgccactgagccgatggacatgcgcgccggcaccgagaccgcattggcccgtgtagtggaggtattcggtgcggcgaagccgcactgtgcttatctgttcgccaaccgccgcgccaaccgcatgaaagtgttggtgcatgacggtgtagggatctggctggccgcgcggcgattgaaccagggcaagtttcactggccaggcatccaccgcggctcggaagttgaactcgacaccgagcagcttcaggctttggtgctcggtttaccttggcagcgggttggtgcagccggtgcgatcacagtgctgtag

SEQ ID NO: 328635 - DNA, 600 bp, Pseudomonas aeruginosa
atgggcgagcttcagttgaaaagccgtgtgcgcataaagaaataccgggcctacagaggcgaagagggtcaggtagcgccgaacctgctgaaacggaagttcgatgccaaacgaccgaaccagaaatgggtaaccgatgtgacggagtttcgggtcggggggcagaagctttatctctcgccgatccttgacctctataacggcgaaataatcgccttcaagaccgcgaggcgcccgctgttcgacatggttggtgcgatgctacggcaagcttttgagaggctgcggccacgcgataaaccaattttgcattccgaccagggatggcagtaccggatgcctatctaccgccgcgtgctgaacgagcgtgcggtaaagccaagcatgtcccgcaaaggaaattgctatgacaatgcggctatggaaagcttttttggcacgttgaaatccgagttcttttacctgaacaaattcaacagtctcgatgagcttgaagcaggtatagaggactacatacactactacaatcattcgcgaatcaggctgaagctaagtggcctgagccctgtggaatacaggactcaagcacggcgggcatag

SEQ ID NO: 328636 - DNA, 303 bp, Pseudomonas aeruginosa
atggaggttaggtcgcaggcattggtcgatgtcgttgaggatgtgatctgcgacgtgtgccgctctggaactcgtatccctggctatggccttcaatacggcaagcttgaagcccaatggggatatggatcacagcatgacggaaagcactatcgggtgcatctctgcgagccctgctttttcagggtgctgagtggattgcgtcgggagtgtatggtcaatggcatgttcgatgatgagcagccattttcctctgaggattttggcttggtcagcaagggtaactactgggaaaagagctga

SEQ ID NO: 328637 - DNA, 1401 bp, Pseudomonas aeruginosa
atgagcagatcgctacgcagctggcagaacagctgcatcaccaaggcgttggagcaccttaccgtcacgcagcacttcttctgccaggcaacgccgggagccgggaagacgcgcatggccgcggagctgaccagccgactgcttcagcaggacagaattgacctggtgctgtgctttgcgccgtcctgccaggtcgtggagggttttcgttcgactttttcggaagtgctaggcagacgtctcgatggccagatgggtgccgtgggggcggcctatacctatcaggccatggaataccgtgatgagggattctggcagcttcttgatgactaccgggtgcttgtggtcttcgatgaaatccaccattgcgccggccacgatccgctcctcagcaatgcctgggggcagcagatactgcaccggatacaggatcgcgctgtcttcacgttggccctgtctggcacgccctggcgttcggacgacaaggccattgccttggctcgctattcgtcgcccgaagggcatttgatctgcgattaccgctatggcttgaaagacgccattgccgacggcgtgtgccgatcccctcgcattgtgttgctcgataatcagaaggtgaaactcactgaagaacttggcgcggatagctccgtcaggctgtttcccagcatcgccaagcttttgggggagtcacctgtcacctatgaggaactgctgcgccatgacgacgtgatcaatccaatcctcgaccttggctacagcaagctcaacgagctacgccagatcaagcctgatgccgccggcttggtggtggctaccgacatcgaacacgctcagcaaatagcccaggctctggaaacaatgggtgaagagtgccgtatcgtgaccaacaaaaccccggatgcgcagcaagtgatcaatgcattccgcagcaacacctgccgctggattgtcgccgtaggaatgatcagcgaaggcaccgacattccacgcctgcaagtgtgctgctatctcagccgtatccgcaccgaactgcattaccggcaagtgctgggacgggtactgcgacgcacaggtgaatcggatgaccaggcttggctattcatgctggcagaaccgaagcttcagggctttgcggagcgaattgcagatgacttgccggatgacctggccgttttgagagatgtgcagatgcctggatttaatccagactcaaggcctgaaccgatgggtgcttcgggccatgtcaagggtatcggcgatgctgggttaggtggcgcagaacctggtattgggtcgcaggctacgaacatcatttcgctgggtggctttgcaaatgagcccgcttaccaggtcagcttttcccagcattaccggcagcagctactggcttgtttctga

SEQ ID NO: 328638 - DNA, 579 bp, Pseudomonas aeruginosa
atgaaatcggcctcgtttatcttcgacaggcgtctgtatgagctgcttcaggagccagggcgtacaacctttacgacccgtgaactgcgcgatgcctatgctgctcgcctgaatggcacacatttccgtatcgccgatgtgcgacgctatgtgtatgagcagatccgtcgactagtgcgcgcgggctgggttgcactggacgaggaccgtcgtgtccgaggacaggtctaccacctgcagccgattccggcacacctacaactggaactgatcgacaacggttttgagagcagccttatggctgccggagtgcccgaaccagacacggcggtacgcgacgtggaggctttgccggccaatacggatttgcagttggaggcgctccacaaggaaatccgcttggactttctcacttcaatgggcgaggcagagcgattcaagctgcttctggacgagatgccgcatttgcgcgacaaggttgaaggcgattacctggaggccagggatcgcagttctcgccttctgggccatttacgcgccatagaaaagaccctcaaaacgctcgcagcgccacgatga

SEQ ID NO: 328639 - DNA, 222 bp, Pseudomonas aeruginosa
atggataagttggcgaaagcgttaggggaacgcatccgagtgcagaggaaggcctgccggatttcccaggatgcactggcgctggcgtgcaatatcgaccgcagctacgtagggcggatcgaacgtggcgaggtcaacatcaccgtcgagaagctgtatcgcatcgcaagcgtgcttgcatgcgatccatgcggcctactgcctcaggcgtcagagctttag

SEQ ID NO: 328640 - DNA, 2049 bp, Pseudomonas aeruginosa
ttgagtgctgctgttcagtcgataggtagtcttttttctagcggccagtttccagtcaccagccagccagatagtgcggctcagctgtatgggaagcccgcgtcggattttgttatctgtcgcactgagtatggcaatgcaacggcagtgtacggcgagtctgtatgggactttaacccgtacaggctgagtgcaaaaaaaattggccgaatacgcttcgatatggtgttcggtgattatggtcatgatcagcaagcgctgatcgaagaagccaaatatcttctgtattgtcttatttatttcgctggcggtgggcggattggtaagctgagtgcatctacgattatttcatattgggttgtgctgcgcatcgctatgaagttctgctatgcgcagaaaaagaagtcaatggttggtgtgctgtccttgcagcagctttttaccgtgcctgtttatctagcggcttttgttagtgaaagtaattttgacaagacggttcttagtgggatattgcacggattgattagtgtgggcgaggaacgcctagggtatgttgtgctgaatccaagagtttttgatttgagaagacctgattctaaacagcatccggtaattccgacacgcctttatttgaatttaataaatatttgtggcgacctgctcgatcatctttacttgggtgttgggaatattgattcatttatatcgtgctttgctgatgagtatttcggtcttactccgcaccgtcaaaaatctttgggggttggtggtaagtcgcgctatcgccccggtattcagcaagcaatagaggaatatggtctggctgcggtttttgtcggtgagtttgcctgttccgaaaagagaaagctgcagcgagtccttctcaagatgcagtatgtggtgagaatggtgatacacctatataccggcatgcgtgatcaagaggtgatgcgtatgtcttataactgcttatctgatcaagtcgtgagatgttcagtggttgatgatcaaggttttatgcgcgatcaaccgcaatcagtacacatattatcgactaccacgaagtttagcggttacaagaaagaaagcgcatggttcgcggcaggcgaagtcgtcaaggcggtcgaggttggccaggcgatttgtcgtggtttagcccggctctataggattgaactggatgatcgttgtccgctattcatcaatccgtccgtcctgtgtaaaacgaagaattgtgcagaagttggtgtaacagactttacattgagagcaacgatgggcagtgctttgaaatccttatcgattcaatcagaggatttacaagagttggctcagagcgacccttctcgtgacttttacaatgagccagattttgcagtaggccagccctggccgctgactagccatcaattccgacgttcgttggccttctatggaagcagtagcggctttctctcgctaccgactctgcgagcgcagttcaagcatatgaccattcagatggcgcgctattatgcgaatggctttgataacttgcgcaccatttttggctactatgacgagaagaaaatagacttcgtgctaccatataaccactttgctttcgagttccagatggccatgccgatgtcggtggccaatcagttgattgcagatctgctgttcaaagaagaaccgctgtttggtggcaccggttcatacatgcagaggcagaaagaacgtgttgaagctggcgagataaagattgaagatattcgtgccgatacagagcttcgggtgaagaacggtgcaattagctatcggccaacgctactcggtggttgcaccaaggtgggccgctgcgattccttcatgctcggtgactatactgaatgtttgtcctgcgagggtgcgattatcaagccctccaggttaagtgcggccattgaggatgcgaaaaacgagttgtcaaactacgcagaagactcaggcgaatatcaaattgtgaagggcgatattgagcgcctaatggttttcaagactcgcctgatcgacactgtggagctttag

SEQ ID NO: 328641 - DNA, 1929 bp, Pseudomonas aeruginosa
atgagtagtcggcagctgttagagcatcgcgaaaatacaaaaattattacgctaaatgagttggttcaggagttttccgaacctgagcgtttgcgattgcagctgaccgttaaggttaaaaagaagccgttagatattggtagttttgcatatctcattcgtggtaagaataaaagtgttcatgatgatcgcgggacgccattggtgattgagtcgttcgttgaaagtcgtcgtgagctgattgtgagagttttggagtcttttgtcggtctgcgtgataagtcagtcttggcaaatttcttccataccgaatattttattgattggttgaacgctgagggttaccgagaaatattttccagtagcgtggatgctcaaaaggcatatcgagattatacagcgcatctaaatcaaaaaatatccgataaaaagctgaagccccggaccgcgtcaagctaccaaactagagcatccagcctgatcaaattactttatccagataatagtgtccatattcttgctggtgcagtaaggattgttccagatagaggttctgcaacagcaggcgctgctcatgtcgagttgtatagagatgtttgctttgccattgcccagcagtgcagtgattttatcttgaataaaaaaccttacccgctcgtggttggagttagagattatgaagttgttatatttccgtccaaccgaggcgcgagcagcccatttaaggatgctgctccttcatataactcagctgagcggcgaattgctacggccgaagaatacttcgcggccttcgagaggcttggccgaaaaaagccgagaaattataatgtcgcgcgcgaactaagaagctcccaggcatctttggatgcggctaatgaagatgggcgcaactggcatcgtcttaatctagcgagtcttgcggcgaaagcctatgctatccttttttttatgattacaggtgccactccggctgaatttgagcagtttagttacgaagacgcactcaaagttgaaaagtcccctctcaagaaagagttgtcggctgtgaaatttcgggctggcggaaagtcaacgctttacaacattgggcggggctcgggtttgtcgctgctgaaagagtatttaaagctgcgtgcgtggattttggatggtgcgagacatgagcgactattctttgcaatgcctacgtctggtcagcttagaacttgcaaaagctttggtgatcttaacgtgacaagctccttagaaaaattttatgagtttattagcggggtctttcttgatccgactgtaccaagactttcaactcgtaaaatacgcaagcacaaaagcactgaaatgcactctgcacgtttgtcgccgtccacggtagcggcatccctcaatcacaccgaagcggtgaatctttctacctatgcagaggcaacacctgaacagcagcaatccgagttcagcctgttttgggatgcaatacgccacgctgctcatgttgtgcgtgagcgaagccgcaaggctgtagcaagtagtgtcgcaatagcggcgggtcactgcgaggatttcaataagccgacgtctgccactgatgtgggattgattatagagccgaactgccgcacccaatatggttgtttgtactgcgaaaactatttatgtcacggcgatgaggaggatctgcataaaattctgagtttgcaatacgtggtcaatgccgtgcgtaaatcggcccccgatgcagcgcatactgaggcacttttcaaagagttatctatccggatcgagtttatagtcgatgctcttagtgagcgctctagctcggtgaaacagacagtcgaaaaggttaaagctaaggtgtttgaatacggcgagttaactaagttttgggaagtccggttgggtcgctatgaaaaaatggggatcgtattttga

SEQ ID NO: 328642 - DNA, 1467 bp, Pseudomonas aeruginosa
atgtcctacaccaatccgcgtcacgaaggtcgtctgattctcatcccgaatttgcaggatgccttcgctatcctgcatgtcagtgaagcgcctcgcggctctattgagtcagcgcttgagggggctgaatccaatctgctttataaatgcgatgaagtcggttcagggaatgaccgtgccctgttcaatttcccatttttgtttagtgctaatggcaacccttggcacgaagcgaacgactacttgctgagtctcatgcgtgatagggctcctgcaagtcgacgcactgatgatgttaggcgtcgtgccagtaaactgttggattacctcctattctgtgaggataacaatctggattggctcgacttttccggtgcccgtccttcgcttcgcccgacttacaagtacttctatcacctgattaaagaaggccgtcgcagtaatcaggtcatcaatcaatataccgctgcggtctatcacttttataagtacgtttccgagcattggcattacctcgatctaaagcgtgttgatacgatcaagcaagtgcggcttatcgtgcagagcccaaaaggcgcgaaaatcatcgatgctgaaaagcgcagccaaacgcggcgtacgccgcctagtagctccgttcctttgggattcgtgcgtgaagatggcgaggatcttcgacctctctccaatcttgagttaggcgcgcttttggaggccattaatgaaaagaaatggtcaacgattgagcggttgattcttctcacgtctctgatgactggagctcgtaagcaaagtgttttgaccatacgcttgaagcatttgaaaggatttacagaagacaaactagtgccggaatgtgcctataaattgcatgccggcccgcgcacaggcattgatacgaaatttgacaaaactcaagttctgtatgttccaaagcaacttgctgaagaattggtcacgcttgcacgtagtccgatgatgaggagacggcgggaaaaatttcgtgctcaattagaagtcagtcatcccggtctgttgatagaagaggacgatatgtatttgtttctctccgatcaaggcaattgttattacatggcttcaaatgatccgcgttacgcaattgttaggtcgccacagacagggcaggtgacggaaacaataaagcgaaaattgcagagtacagcttctagccaatttccaaaagattttacatatcactggctgcgagcgacttttgcctatcaactctaccagcgcctgcaaccgttggttcaagaaggcgttttgaaattaggggaggatattgattttattcaaaaacgtatgcatcacgagtctagggaaacaactgaaaactatctaaagttattcaatatgactcacgaaaaagtcatcgcccaagaggtgtgggagaagaaattgtttaacggtaactacgaagtcatgaaattgacggtccaagaatga

SEQ ID NO: 328643 - DNA, 2514 bp, Pseudomonas aeruginosa
atgatttccctacccatcgacgccgttgttcccgccctgcgccaggcccttggtgcacaacaccaggccgtcctggaagccccgccgggtgccggcaagaccacccgggtgccgctggccctgctcgacgagccctggctcgccggccaacgcatcctcatgctcgaaccgcgacgcctggcggcgcgggccgcggccgagcggctggccgccgagctgggcgaaaaggtcggcgagaccgtcggctaccggatccgcctggagagcagggtcggcccgaagacccgcatcgaagtggtcaccgagggtattcttgcccgtcgcctgcaagacgacccggcgctggacggtgtcggcctggtgatcttcgacgaattccacgagcgcagcctggatgccgacctggccctggcgctgactctcaatggccgcgaactgttgcgcgacgagccgccgctgaaagtgctggtgatgtcggcgaccctggagggcgagcgtcttgcggcgctgctcggcgaagcgccggtggtgcgcagcgagggccgcatgttcccggtggatatccgctggggacgggcggcgcaacccggcgagttcatcgagccgcgggtgcagcaggcggtgctccaggcgctggcggaggaaagcggcagcgtgctggtctttcttcccggccaggccgagatccgccgcgttcacgaaggcttgcgcgaggcccttggcggtcgccccgaggtgctgctctgcccgctgcatggcgagctcgacctcgccgcccagcgcgccgccatcgagccggcgtcgcggggcacgcgcaaggtggtgctggcgaccaacatcgccgagaccagcctgaccatcgacggcgtacgggtggtgatcgacgccggcctggcgcgggtgccgcgcttcgatccgggtagcggcatgacccgcctggagacccagcgcatctcccgcgcctccgctacccagcgtgccggccgcgcagggcgcctggagccgggcgtatgctaccgcttgtggtcggagagccagcatgagcagttgcctgcctacggcacggcggaaatcctccaggccgatctggccgggctggccctgcaactggcgcgctggggcgtggcgccggaggagctggcctggctcgacgcgccgcccgcggcggcctacgcccaggcccgcgagctgctcgggcggctgggggcgctgtacgccagcggcgcgttgagtgcccatggccaggcgatggccgaattgccgacccatccgcgcattgcccacctgctgctgcgcggccaggccctcggccttggcgaactggcttgcgacgtagcggcgctgctcggcgaacgtgacatacagcgtggcggcggcgccgacctgcacagccgtctcgccctgctcgccggcgaggcccgcactggcgcctcgcgcggcgcggtacagcgcgcccggcaactggcccggcagttccgcggttacctgcgcggcgccgccagcgaggcggtcgtcgatcccggtcatccgcgttggctgggttgcctgctggccttcgcctatcccgaccgcatcgctcgccagcgccgcgccggtggcggcgactaccggctggccaatggacgcgctgcgcagttcggcgaaccggacagcctgatgaagcagccctggctggtgatcgccgatctgggcagccgccagggccagcgcgaagagcggatctacctggccgccgaactcgatccgaggttgttcgatacggtcctggcggagcaggtcagccagcgcgacgagctgcagtgggacgagcgcgaaggcgtgctgcgcgccgagcgccagcgccgggtcggcgaactggtgctgtccagcgaggcgctacccggcctcgacgaagcggcgcgcagccaggcgctgctcggcctggtccggcgcaagggcctggagctgttgccctggaccccggaactgcgccagtggcaggcgcgcatcggcttgctgcgccggctggacctggaagacaagggcgagagcgagtggccggacgtcagcgacgccgcgttgctggaacggttggaggaatggttgccggcctatctcggcaaggtcacccgcctggctcacttcgccaacctcgacctggcttcgatcctcgccgggctgttgccctggccattaccgcagcgtctcgacgagtgggcgccgaaaaccctggaagtcccctccggctcgcgcatccgcctggactacagcgaaaccccgccgatcctcgcggtgcgcctgcaggaactgttcggcctcggcgacactccgcgcatcgcccagggccgcctggcagtgaagctgcacctgctgtcacccgcgcatcgcccggtgcaggtgacccaggacctggcgaacttctggcgcagcacctatgcggaagtcaggaaggacctgaagggacgctatccgaagctattccataagttagacccttgggttgaatcgcttaacaacaaaaagattgacaggtag

SEQ ID NO: 328644 - DNA, 711 bp, Pseudomonas aeruginosa
atgaaaacgcgtagcgagcgcaccgccagcctttcaagttccgcaaccgaacctgaaaatgacgctgccttcatcgaaaggctgcgctccattgtcgctatagcagggagcgcaagtgctttagcgaggaatgctggaatctcccaaggcgggttgcagaggtacttgaaaggcggggaacccacccggagagtgctcatttccttggccaaggcggcaggcgtgagcctgggctggcttatgaccggcgagggcagtcagaagccggaagagcaggaggctacgggatcggaccaatatgtctacgtccccctgtatgacgcgagggtcagcgcgggacatggaagctggagcgaaggcgcacacgttcttacgcagcttgcctttacgcgctacagcttgagcaagaaggggttagagccaaccaggatgtcggcagtaagggtcgggggcgactccatggaacccctcctgtcggatggcgacgccgttgttatcgaccatgaccttagaaccgtgcgggatgaagcgatctatgtgattcgggtcggggatcagctctacgccaagcgcttacaacggcagttcgatggctctatcgcgatcatcagcgaaaacaaggcgtataaggacatggtcgtccccaaggaccagctttctgacttggatatcattgggcgcgttgtctggcttgggcgatggatggtttag

SEQ ID NO: 328645 - DNA, 357 bp, Pseudomonas aeruginosa
atgaacagaaccgaaatcccccgcgacaacaacgtccgctgggagtggatcaaataccagctccgcgccagggggtcgtccctggccgaggtggcccgctccctcgacgtatccagcccggcagtcaaaaacgccaagctgaatccctaccctcgggtagagcgcgccatcgctgctgtactcgacctcagccccctagtgctgtggcctgagcgctggctcgacgacgagaatccgaagcggcaacggcccaatcgctcggagaccttgcaggcatatgtcagacatatgccaagtgctgaggaaaataccagatacgctgaccaagcgcagcgtaaagccgacgcgggggcttga

SEQ ID NO: 328646 - DNA, 435 bp, Pseudomonas aeruginosa
atggcccgccgcaaagacgaccgcaccctggacatcttcgatgttccgcagccagcccgcgctatacccggcgagtgcaactatgccgcccaggtcagcgagctggtcagcgaaattctgaaggccgccaacctcgaccgttacgaggtcgccgcccgcatgtcgcgcctatctggcgatgacgtgagcaagaacatgctcgacgcctggtcgagtcccgcccgagctgatcacaacttgcctttctaccgcgccgccctcctggaggacgtctgcgcgagccacctgctgaccaactggctggtcgatgtgcggggcggccgcgtggcctatggccgagacgcactgctcgccgagctgggccgcctggagcggacccgcgaggaagcgggtcggcaggcgcgtgagctgaaacgaatcctgggggagccgtga

SEQ ID NO: 328647 - DNA, 282 bp, Pseudomonas aeruginosa
atggccgacaccatcgctttctgctgggcctctggcctgatccagttcggtgaccaggtgcccgagggcgccatcgagatcgcccgtggggacgaccaggtcgttcgcgaaaacctcgtgaccaattcgcggcacgcttacgacaacgtgtcgctcctggttccgggcgtacccgaagcggcaaaccaaaccgagggcggggacgcactggagtgcttcatccgtcttctcgccaagtacgacagcgccgctttccaggtcgcttatgtggaggacgtgtga

SEQ ID NO: 328648 - DNA, 207 bp, Pseudomonas aeruginosa
atgcagcagtccaaccccttcaatcaccccggacagagctacggcgccgtagacgtcgatagccgactccgcgccgttgccggcttcgacctggagcaatgccgcgccgcgctcgcggtcaccggcctccagaagatcgtcgagcagaaaattcgcacccgcatccgccagctggaaaagcaggcatccgcacagaaggaggcatag

SEQ ID NO: 328649 - DNA, 270 bp, Pseudomonas aeruginosa
atggccgtatacaccatcaccctaagcgacaccgaaggcggaatagatttctccatgcaaggcccgccgctgcacgactccgaagcatcgaagatcgcctacgcccttatgcaatcgaccatgtccctcggccgagaactcgcaaagcagaacggagttggtaacgccgtttcctgcgcctgcgacgagtgcctggcacggcgcgctcgcggtgaggaaccgcagcaggaaatccactacaccacggccaagaaccgcaccgtccactga

SEQ ID NO: 328650 - DNA, 207 bp, Pseudomonas aeruginosa
atgaaaatcaccaacgacaccaccacctacgaagtggccgaactgatgggttcggaggctgacgaactcgatggacgtatcatgatggggctgctcagccgcgaatgcgtggtagacactgacgacctgagcgaggatcaatggctggctctgatcgacgagtcgcagaaggttcgccgcgagcagttcgaaagcgatgaagcctga

SEQ ID NO: 328651 - DNA, 240 bp, Pseudomonas aeruginosa
atggacccgatcacaatcaatctcgtcattctggctgcgtcgttcatcctatccagagccttggcgccgaagccgcaaaagcccaagccaacagcgtttgaagacatcgatttcccgcgctgcgacgagggcgacgaactggccgccgtgttcggtcagtgctggaggaagtcctggatggtgctgaccgtaggcaactaccgaacgaaggcgatcaagacaaaggggagcaagaaatga

SEQ ID NO: 328652 - DNA, 2208 bp, Pseudomonas aeruginosa
atgggcgctaaacccaaggctcaaacggtcggctttcgatacttcttcgacatccatttcaccctaggcaagaaaatcgacgagctgtgcgcgctccgggcaagcggaaaaaccgcgtggaaaggatcgatcactactaacggtcaggtacgcatcaacgccccgaaactgttcggcggcgacaagggcgaaggtgggctcgatggaacgttggatatcctgttcggcgaagaagaccagggtgtcctgccgcgcctggcggccatgctcggcggcctggtgccggcgttccgtggcgtaaccacagggttctattccggcttggtaacctccatgaacccctacccgaagacatgggaatttttggtccggggaggaaaccgcttgtgggacggcaatccctggtatcccgaaaagcagttcatctggctagcggacggtcagatcaaggcgatgaacccggcgcacatcctttatctcgtctacaccggccgggacttccggggactggcccgcacgcgaatggacgaggcgagctggcgggccgctgctgacaagctgtatgccgagggtttcgggctgtgctttgaatggaccaggtccgacacgttcgccaacttctgcgagacggtgaaatcgcatatcggcgctgaggtttacccgaaccgtcagacgggacagatcagcatccggctcctgcgggacgactataacgtcgcagacctgccgctgttcgacgaggacagcggcctcctggaaatcactcaggagaagaccggctcgacctccctggcgccgagccagcttatcgtgaaatacatcgaccagatcgacggggcgcagcgccaaatcatcgtcaacaacaacgcggtcgctgcgtcgcaggggcggcgctcgtctgaggaaatcgagttcctgggcgtgcctaccggggagctggccgggcgagtcggtgagcgggaaatgcgtctgaagacaaccggcctgaagcgctataagggcgtgttcgaccgccgcgcccgtagcctgaaccctggccagccgttccgcatccgttcgacccggcgcggcatccctgaaaccgtcgttcgggtcggccggatcgaggacaacttcctcggcgacggcaagatcaccctgaccgtcgtccaggatcagttcaatctgccggcgacaaccggcgtggcgccgccaccaccgggctggattccgcccgaccggacgcctcgggcgatcactgtgcgccgcctgatcgaggcaccctatcgcgaactggccggcgtgatcgatccggcaaatctccagctcctggacgtgagcgcgtcctacttggccgcgctggccgaggcgccgaccagcctgtcgcagagctacacactgaccgaccgcgtcggcagctctggcgcgttcgttgatcgcggaaccggcgactggtgcccgaccggactactcgccgccgagctgccgctggcggccggtccgaacgtcgtcacgttgacgaacgccagccggctggaggacgtcactgtcggccaggccgcagtcgtggacgacgagatagtccgggtcgatgcggtcaactacgccagcggcacggtcaccctcgcgcgcggctgcgccgataccgtaccggccaagcatctggccggggctcgggtctggttctacgacacgttcgaagctgtggacgaaacggtctacagccagggcgtgacgctccaggcccggctgctgacgaacaccagcgagggccaactggccccggcgctggccgccaccgacagcctcaccctgaccgggcgccaaggtaagccgtatccgcccggccagttccgcatcaacggcagcgcgtacccaacgaaagtctacggggcgctgtcggtgagctgggcgaagcgcgaccggatcggccaggccgaccagttgatcgataccacggtcggcaacatcggacccgaagatggggcgacggttacgctcctggtctacagcggtacgacgctgaagcgtacctatgccggtctcacatccagtaactggtcctatccgctggccgaagacatggcggatggcccgctccaggacgtgcgccttgtcctgcgcagtgtccgcgacggcatcgattcttggcagcagcacgacatcacgattgaacgccacggcctcggtttccggcttggcgaagaactaggaggcgtatccgcatga

SEQ ID NO: 328653 - DNA, 303 bp, Pseudomonas aeruginosa
atgatcatcacgttgtcgccgtatgtcgcgctgcccggcagcgatgaacatctgatgctgagcaggactggcgatgtactcaccgtgaacggccagtcgttcgatttcacaccgctcccggagggcggcgagttgccggccgaggctatcgggtcggagtggttcgctggccccgtcgttcgccgtgaggggcgtctagagttcagcctgcggctgccgctggctgacggcgctagtgcagccgctcgctttcctgaaccaatgctgatcgaggccgacggccctgtggagttgccgcaatga

SEQ ID NO: 328654 - DNA, 1644 bp, Pseudomonas aeruginosa
atgacttcctcgcccgtcaccccatcggccgtcgacgacgcccccgactggcccgccgccttcgtccgccgctatctcgacgccggccactggcaggaccagaacttcgccgaagccctggccgccagcgccgcgcgccatccgcggcggatcgcgctctgcgacgacgaccagcggctcagctatgccgacctgctccagcgctgccgccgcctggcagccggactgcgccaggccggcctcgcacatggcgacacggtagtgctgcacctgcccaacggcatcgccttcgtcgagacctgcttcgccctgttccagctcggcgtacgcccggtgctcgccctccccgcccatcgccagcatgagatcagcggtttctgtcgcttcgccgaggccaaggcctacatcggcgccgaacggatcgacggcttcgacccacggccgatggcccgtgagctgctcgccagcggcgcctgccggatggcgctgatccacggcgaagccgaggcgccgctgcaagcgctggcaccgctgtaccaggccgacgcgctggaagactgcgccgcccgcgccgaggatatcgcctgcttccagttgtccggcggcaccaccggcacgccgaagctgattccccggcgtcatcgcgagtatctctacaacgtccgcgccagcgccgaggtctgcggcttcgacgagcacacggtgtacctcaccggcttgccgatggcgcacaacttcactctctgctgccccggagtgatcggcacgctgctggccggcggccgcgtggtggtcagccagcgcgccgatcccgagcattgcttcgccctgatcgcccgtgaacgggtcacccacaccgccctggtaccgccgctggcgatgctctggctggatgcccaggaaagccgccgcgccgatctatccagcctgcgtctgctccaggtcggcggctccaggctcggcagcagtgccgcgcaacgcgtcgaaccggtgctcggctgccagttgcaacaggtgctgggaatggccgaggggctgatctgctacacccgcctggacgatccgcccgaacgcgtgctgcatacccagggccggccgctgtcgccggacgacgaagtgcgggtggtcgacgccgagggccgcgaggtcggccccggcgaggtgggcgaactgaccgtgcgcggtccctacaccatccgcggctactaccgcctgcccgaacacaacgccaaggccttcagcgcggacggcttctaccgcaccggcgaccgggtcagccgcgacaaggacggctacctggtggtggagggccgcgacaaggaccagatcaaccgcggcggcgagaagatcgccgcggaagaggtggagaacctgctgatagcccatccgcaggtgcacgacgccaccgtcgtggcgatgcccgacagcctgctcggcgagcgcacctgcgccttcgtcatcccgcgccagccggcgccctcggcgctgaagctgaagcaatacctgcacgcctgcgggctggccgcgttcaaggtgccggaccgcatcgagctggtcccggccttcccccagaccggcatcggcaagatcagcaagaaggacctgcgcgagcgcctgcgccgcgagctggaggcccgcgcatga

SEQ ID NO: 328655 - DNA, 306 bp, Pseudomonas aeruginosa
atgaaaactcccgaagactgcaccggcctggcggacatccgcgaggccatcgaccggatcgacctggatatcgtccaggccctcggccgccgcatggactacgtcaaggcggcgtcgcgcttcaaggccagcgaggcggcgattccggcacccgagcgggtcgccgcgatgctccccgagcgcgcccgctgggccgaggaaaacggactcgacgcgcccttcgtcgagggactgttcgcgcagatcatccactggtacatcgccgagcagatcaagtactggcgccagacacggggtgccgcatga

SEQ ID NO: 328656 - DNA, 702 bp, Pseudomonas aeruginosa
atggatcccaagcacctctttctagatgagcgcttgaaaggcagatgcgcctactgcggtgggccgcccgaaaccgtcgaccatgtcccctctcgtgttctcttggacaatccacttccagaaaaccttccagtcgttgaggcctgccgaaagtgcaacggcggcttctcgttgaacgaggaatacctagcatgcctgctggaatgcaccatgtccggaacgactgagatcagccagctatcgcgagagaagatcagacaagcgctagacagaaatccgagactgcaaaaccagttggaacagtgccgtagaacggatgactctggtcacatctggtggcagcccgacgaagcacgagtcagaaacgtgatcatgaagttggcgcaggggcatgcggtatacgagctaggagaatactggaacgatgagcctgacctttactcgattcgcgccatcccaacgatgactactggagagatacaggatttcgaaaacctagaagactacgtccagcccctatggcctgaattaggatgccgcgcgttcctacgcgcatcgggcaaaaccatacctccaattcaaatcgggggctggctgatcgtacagcctggacgctacagatacttggttgactggcaagatggagtcgatatccgcattgtcattggcgagtatctagcctgcagggtcgtgtggtgctga

SEQ ID NO: 328657 - DNA, 1725 bp, Pseudomonas aeruginosa
atggcggtcactaaggatagcattgaggtaagttttaactcagacgccgactatttgattcagggtctaacttccgatgttagcaatatagagtgtatatatgatttaattgataactctatagatgcggcgcgctctaaaattttaagtggttcaaaggcggtcaagaaggacttctttggactgcctgcctcatataagagattcaagattgagttggatatttcatctcgaaaggttactgtctctgataactgtgctggaatagatgagaatactctttctgaaaaagtttttaccattggtaagagatctagacacgccttcggtattggtcattatggcgttgggctgaatcgggcgatatttaagcttggaagctctgtgcaactggtgacagataatgggaagcacgccttttctcttggcttctcggaaaaagatgtgcgagctgcagtagagaataagtcaacaattcaggcaaaaagactccctactagcaagaaaagctactacaagttagagatcgatagggttaaaaatgatgtactgtccgatctaggatcggatacgtggcttgaaaccttgcgagatcaaataagaattcggtatgcgatcttttgccggaaggggcttgtaatcaccgtaaataaaaagaaagttgggagttttggcccgaaaatacgaaaccctgactttcttgagaagagagcgaagagctttgtatctcaaaatggcgtctcggtttatctagaggctgggcttcatgagaattatcgtattgcgaaatttgaaagcgattatgaggaatttaagccggtgatcaaagggctgacgccggagtatgggtggtatgttgtatgtaatgataggataatactggtcgccgataaaaccaaaaccactggctggaccactacagcttggcacaatgagtaccacgggtttctcgggtgggcttattatgttagtgaggatccatctttattgccgtgggatacgaagaagactggaataaatacaaataatcaaacgcatattgaggttctaagctcgcttaaggagcttgcggatgattatcgaagcagaaatagaagcttaagacagtcgaaacctgaggggctggcgtctgaaccagctaagcctcgaggtaggggcactggcactggcgtccgcggtgggaaccctcttggtggtgttggtaattctggaggcaggagtgcttcgggatcggcaattcatactaaagaaatggatatgttaatctacaatatatccacagttactggctctccacgaattgcgtcgttccttcaagaggctaaagagatatcaatcaaagagcacccgtatactgctatgatattgttgcgcgttctgttcgaagcagctcttcgcgattatttgttaagacataagcattaccagaaagtaaaggattctgttttcgaggaacaggctgttcaagggcggccttttaatcaaaagcaaaagagggactttacacctgctctgtcaaatatgctgagctgggttgtgaagaatacggaaatatttagttctgatctgaggagagggacgaagacctcaatagataattttattaaggatctttcgcgcttgaatggcatagtgcacgaagatggggtgcttacggatttttctgaggctaagcagataagaaacaatgctctgaaggcgttggaaacatttttagagagctga

SEQ ID NO: 328658 - DNA, 1134 bp, Pseudomonas aeruginosa
gtggaaacctcaaaacctcttgtgatcgacttgttttctggttgtggcgggcttgggctaggtgctgagttggcgggattccattcgctagcagcagtggacgttgatagggatctccagtccgcctatagcctaaactttcccctcacacaaaccatcaacactgatttggcactagtaacgccaagcatgtggaaaagtattcttaacggaaaaaaaattgacggaatcattggtggccctccttgccaaggatttagccgcataggtcttcgaaaaaccgacgacccaagaaatgccttgcttagtcaatactttagacaagtgcgtgagttaaagccaagattcttcttgatggaaaatgtagaggggcttctggatgagaagaataaacccgttctagatgctgcgctcaatttaattccaggaaattacaacgttatcggtccattgaagatcaacgcccttgattgcggggcggcgacctctcggaagcgagtagtaataattggtgtcgactcgtcctccatggatcgggtttccgagcaagaaatagttgccagtcttgtgaaacgtccgatccctgttagagaagccataagcgatatcccctctcctaaagaagatgagttgagatcgtcagagttctttagttgggcgagatataagaaaacttcattgtctgagtacgcattaagaatgcgtgcgatgccgccaaaaggactagggtcgaagctttcattagagcgtctggtacatggtgagatatctggcgtaataaatacaaagcacacgcagccggtaattgatcgatttagcgaaactcgccctggcgagacggaactggtaagtcgatatcctaggctttcttggggagggcattgccctacacttcgcgccggcacggggagcgacaaaggtagctttcaagctatgaggcctatccatccctcagagccgcgagtaataacagtcagagaagcggctaggctgcagggttttccggactggttcctatttcatcccacaatttggcactctttccgaatgatagggaatagtgtctcgccccttatgtctcatcacttgatgggcatcattgcggaaaagttagagcgcagagtagctgcatag
